United States Patent Application Publication US 2005/0255487 A1 - sequence listing, part 50

SEQ ID NO: 1368161 - RNA, 19 nt, Homo sapiens
  misc_RNA (1)...(19): siRNA sense strand
ccauuacguucagcaagaa

SEQ ID NO: 1368162 - RNA, 19 nt, Homo sapiens
  misc_RNA (1)...(19): siRNA sense strand
ccugaaggagagaccauua

SEQ ID NO: 1368163 - RNA, 19 nt, Homo sapiens
  misc_RNA (1)...(19): siRNA sense strand
agacucaagugaccauugg

SEQ ID NO: 1368164 - RNA, 19 nt, Homo sapiens
  misc_RNA (1)...(19): siRNA sense strand
cagucaagguuuauauucu

SEQ ID NO: 1368165 - RNA, 19 nt, Homo sapiens
  misc_RNA (1)...(19): siRNA sense strand
ucaggugugugacagaaca

SEQ ID NO: 1368166 - RNA, 19 nt, Homo sapiens
  misc_RNA (1)...(19): siRNA sense strand
gguaugcaguagcguacau

SEQ ID NO: 1368167 - RNA, 19 nt, Homo sapiens
  misc_RNA (1)...(19): siRNA sense strand
ugugccaugugccuuuaua

SEQ ID NO: 1368168 - RNA, 19 nt, Homo sapiens
  misc_RNA (1)...(19): siRNA sense strand
uauuggcagucacauuuau

SEQ ID NO: 1368169 - RNA, 19 nt, Homo sapiens
  misc_RNA (1)...(19): siRNA sense strand
ccaagaccauuacguucag

SEQ ID NO: 1368170 - RNA, 19 nt, Homo sapiens
  misc_RNA (1)...(19): siRNA sense strand
gugccaagaccauuacguu

SEQ ID NO: 1368171 - RNA, 19 nt, Homo sapiens
  misc_RNA (1)...(19): siRNA sense strand
gcaaggcuagucuccaaag

SEQ ID NO: 1368172 - RNA, 19 nt, Homo sapiens
  misc_RNA (1)...(19): siRNA sense strand
gaagucaaugaaacagaug

SEQ ID NO: 1368173 - RNA, 19 nt, Homo sapiens
  misc_RNA (1)...(19): siRNA sense strand
caucuugucagaagucaau

SEQ ID NO: 1368174 - RNA, 19 nt, Homo sapiens
  misc_RNA (1)...(19): siRNA sense strand
gagagaccauuauuuugga

SEQ ID NO: 1368175 - RNA, 19 nt, Homo sapiens
  misc_RNA (1)...(19): siRNA sense strand
gagacucaagugaccauug

SEQ ID NO: 1368176 - RNA, 19 nt, Homo sapiens
  misc_RNA (1)...(19): siRNA sense strand
caagaucuccaggcccaaa

SEQ ID NO: 1368177 - RNA, 19 nt, Homo sapiens
  misc_RNA (1)...(19): siRNA sense strand
ggcagucacauuuauggaa

SEQ ID NO: 1368178 - RNA, 19 nt, Homo sapiens
  misc_RNA (1)...(19): siRNA sense strand
accauuacguucagcaaga

SEQ ID NO: 1368179 - RNA, 19 nt, Homo sapiens
  misc_RNA (1)...(19): siRNA sense strand
caacuucaucuugucagaa

SEQ ID NO: 1368180 - RNA, 19 nt, Homo sapiens
  misc_RNA (1)...(19): siRNA sense strand
gaccagaucaauaucaacu

SEQ ID NO: 1368181 - RNA, 19 nt, Homo sapiens
  misc_RNA (1)...(19): siRNA sense strand
uggaccagaucaauaucaa

SEQ ID NO: 1368182 - RNA, 19 nt, Homo sapiens
  misc_RNA (1)...(19): siRNA sense strand
gaagcuuugccuccuaauc

SEQ ID NO: 1368183 - RNA, 19 nt, Homo sapiens
  misc_RNA (1)...(19): siRNA sense strand
gagaauauuaauggcuuga

SEQ ID NO: 1368184 - RNA, 19 nt, Homo sapiens
  misc_RNA (1)...(19): siRNA sense strand
agauggaaggugcaacaua

SEQ ID NO: 1368185 - RNA, 19 nt, Homo sapiens
  misc_RNA (1)...(19): siRNA sense strand
ggugcaacauagaauuugg

SEQ ID NO: 1368186 - RNA, 19 nt, Homo sapiens
  misc_RNA (1)...(19): siRNA sense strand
uggcuaaucucaggaagag

SEQ ID NO: 1368187 - RNA, 19 nt, Homo sapiens
  misc_RNA (1)...(19): siRNA sense strand
aaagauggaaggugcaaca

SEQ ID NO: 1368188 - RNA, 19 nt, Homo sapiens
  misc_RNA (1)...(19): siRNA sense strand
gggaaauaccgaguggauu

SEQ ID NO: 1368189 - RNA, 19 nt, Homo sapiens
  misc_RNA (1)...(19): siRNA sense strand
ggagagaccauuauuuugg

SEQ ID NO: 1368190 - RNA, 19 nt, Homo sapiens
  misc_RNA (1)...(19): siRNA sense strand
agaacgcagugaucagcaa

SEQ ID NO: 1368191 - RNA, 19 nt, Homo sapiens
  misc_RNA (1)...(19): siRNA sense strand
gugccuuuauaaugagaaa

SEQ ID NO: 1368192 - RNA, 19 nt, Homo sapiens
  misc_RNA (1)...(19): siRNA sense strand
guuagagccaggaugaaga

SEQ ID NO: 1368193 - RNA, 19 nt, Homo sapiens
  misc_RNA (1)...(19): siRNA sense strand
cagucuauacuuggaguua

SEQ ID NO: 1368194 - RNA, 19 nt, Homo sapiens
  misc_RNA (1)...(19): siRNA sense strand
ccauaacuuuagcaagaca

SEQ ID NO: 1368195 - RNA, 19 nt, Homo sapiens
  misc_RNA (1)...(19): siRNA sense strand
ggauuuccauaacuuuagc

SEQ ID NO: 1368196 - RNA, 19 nt, Homo sapiens
  misc_RNA (1)...(19): siRNA sense strand
gacaaaggaagggaaauac

SEQ ID NO: 1368197 - RNA, 19 nt, Homo sapiens
  misc_RNA (1)...(19): siRNA sense strand
cccauaguauccaagacaa

SEQ ID NO: 1368198 - RNA, 19 nt, Homo sapiens
  misc_RNA (1)...(19): siRNA sense strand
uuauuggcagucacauuua

SEQ ID NO: 1368199 - RNA, 19 nt, Homo sapiens
  misc_RNA (1)...(19): siRNA sense strand
gcaagaacgcagugaucag

SEQ ID NO: 1368200 - RNA, 19 nt, Homo sapiens
  misc_RNA (1)...(19): siRNA sense strand
cagcaagaacgcagugauc

SEQ ID NO: 1368201 - RNA, 19 nt, Homo sapiens
  misc_RNA (1)...(19): siRNA sense strand
caaagagcaaggcuagucu

SEQ ID NO: 1368202 - RNA, 19 nt, Homo sapiens
  misc_RNA (1)...(19): siRNA sense strand
aaggagagaccauuauuuu

SEQ ID NO: 1368203 - RNA, 19 nt, Homo sapiens
  misc_RNA (1)...(19): siRNA sense strand
aaggugcaacauagaauuu

SEQ ID NO: 1368204 - RNA, 19 nt, Homo sapiens
  misc_RNA (1)...(19): siRNA sense strand
acagucaagguuuauauuc

SEQ ID NO: 1368205 - RNA, 19 nt, Homo sapiens
  misc_RNA (1)...(19): siRNA sense strand
cagaugacaccaaaaugua

SEQ ID NO: 1368206 - RNA, 19 nt, Homo sapiens
  misc_RNA (1)...(19): siRNA sense strand
cacagucaagguuuauauu

SEQ ID NO: 1368207 - RNA, 19 nt, Homo sapiens
  misc_RNA (1)...(19): siRNA sense strand
aaacagaugacaccaaaau

SEQ ID NO: 1368208 - RNA, 19 nt, Homo sapiens
  misc_RNA (1)...(19): siRNA sense strand
gccaaguccggacauccua

SEQ ID NO: 1368209 - RNA, 19 nt, Homo sapiens
  misc_RNA (1)...(19): siRNA sense strand
cagaagucaaugaaacaga

SEQ ID NO: 1368210 - RNA, 19 nt, Homo sapiens
  misc_RNA (1)...(19): siRNA sense strand
ugaaacagaugacaccaaa

SEQ ID NO: 1368211 - RNA, 19 nt, Homo sapiens
  misc_RNA (1)...(19): siRNA sense strand
gagcaaggcuagucuccaa

SEQ ID NO: 1368212 - RNA, 19 nt, Homo sapiens
  misc_RNA (1)...(19): siRNA sense strand
gcagucacauuuauggaaa

SEQ ID NO: 1368213 - RNA, 19 nt, Homo sapiens
  misc_RNA (1)...(19): siRNA sense strand
gauggaaggugcaacauag

SEQ ID NO: 1368214 - RNA, 19 nt, Homo sapiens
  misc_RNA (1)...(19): siRNA sense strand
ccaugugccuuuauaauga

SEQ ID NO: 1368215 - RNA, 19 nt, Homo sapiens
  misc_RNA (1)...(19): siRNA sense strand
gaaggagagaccauuauuu

SEQ ID NO: 1368216 - RNA, 19 nt, Homo sapiens
  misc_RNA (1)...(19): siRNA sense strand
ccagaucaauaucaacuuu

SEQ ID NO: 1368217 - RNA, 19 nt, Homo sapiens
  misc_RNA (1)...(19): siRNA sense strand
guucaaacaucuucggaaa

SEQ ID NO: 1368218 - RNA, 19 nt, Homo sapiens
  misc_RNA (1)...(19): siRNA sense strand
ucaaacaucuucggaaaug

SEQ ID NO: 1368219 - RNA, 19 nt, Homo sapiens
  misc_RNA (1)...(19): siRNA sense strand
caacauagaauuuggcaau

SEQ ID NO: 1368220 - RNA, 19 nt, Homo sapiens
  misc_RNA (1)...(19): siRNA sense strand
gaagagaggcuaugacaac

SEQ ID NO: 1368221 - RNA, 19 nt, Homo sapiens
  misc_RNA (1)...(19): siRNA sense strand
uagcguacauucacaaaga

SEQ ID NO: 1368222 - RNA, 19 nt, Homo sapiens
  misc_RNA (1)...(19): siRNA sense strand
ccagcaggacuuugaauua

SEQ ID NO: 1368223 - RNA, 19 nt, Homo sapiens
  misc_RNA (1)...(19): siRNA sense strand
gaggcacagucaagguuua

SEQ ID NO: 1368224 - RNA, 19 nt, Homo sapiens
  misc_RNA (1)...(19): siRNA sense strand
gaccucagcuuuucuguuu

SEQ ID NO: 1368225 - RNA, 19 nt, Homo sapiens
  misc_RNA (1)...(19): siRNA sense strand
gcaggacuuugaauuagug

SEQ ID NO: 1368226 - RNA, 19 nt, Homo sapiens
  misc_RNA (1)...(19): siRNA sense strand
gggaagcuuugccuccuaa

SEQ ID NO: 1368227 - RNA, 19 nt, Homo sapiens
  misc_RNA (1)...(19): siRNA sense strand
gaaggugcaacauagaauu

SEQ ID NO: 1368228 - RNA, 19 nt, Homo sapiens
  misc_RNA (1)...(19): siRNA sense strand
gcacagucaagguuuauau

SEQ ID NO: 1368229 - RNA, 19 nt, Homo sapiens
  misc_RNA (1)...(19): siRNA sense strand
gauguuagagccaggauga

SEQ ID NO: 1368230 - RNA, 19 nt, Homo sapiens
  misc_RNA (1)...(19): siRNA sense strand
cugcuuaucuuucagucua

SEQ ID NO: 1368231 - RNA, 19 nt, Homo sapiens
  misc_RNA (1)...(19): siRNA sense strand
aaacgugccaagaccauua

SEQ ID NO: 1368232 - RNA, 19 nt, Homo sapiens
  misc_RNA (1)...(19): siRNA sense strand
cagcaggacuuugaauuag

SEQ ID NO: 1368233 - RNA, 19 nt, Homo sapiens
  misc_RNA (1)...(19): siRNA sense strand
uuccauaacuuuagcaaga

SEQ ID NO: 1368234 - RNA, 19 nt, Homo sapiens
  misc_RNA (1)...(19): siRNA sense strand
ucacauuuauggaaagcuu

SEQ ID NO: 1368235 - RNA, 19 nt, Homo sapiens
  misc_RNA (1)...(19): siRNA sense strand
agacaaaggaagggaaaua

SEQ ID NO: 1368236 - RNA, 19 nt, Homo sapiens
  misc_RNA (1)...(19): siRNA sense strand
gcaaagagcaaggcuaguc

SEQ ID NO: 1368237 - RNA, 19 nt, Homo sapiens
  misc_RNA (1)...(19): siRNA sense strand
cauagaauuuggcaaugug

SEQ ID NO: 1368238 - RNA, 19 nt, Homo sapiens
  misc_RNA (1)...(19): siRNA sense strand
gcaguagcguacauucaca

SEQ ID NO: 1368239 - RNA, 19 nt, Homo sapiens
  misc_RNA (1)...(19): siRNA sense strand
gaacgcagugaucagcaaa

SEQ ID NO: 1368240 - RNA, 19 nt, Homo sapiens
  misc_RNA (1)...(19): siRNA sense strand
gaccucaaguggagauaca

SEQ ID NO: 1368241 - RNA, 19 nt, Homo sapiens
  misc_RNA (1)...(19): siRNA sense strand
agaagucaaugaaacagau

SEQ ID NO: 1368242 - RNA, 19 nt, Homo sapiens
  misc_RNA (1)...(19): siRNA sense strand
ugaaggagagaccauuauu

SEQ ID NO: 1368243 - RNA, 19 nt, Homo sapiens
  misc_RNA (1)...(19): siRNA sense strand
caaggcuagucuccaaaga

SEQ ID NO: 1368244 - RNA, 19 nt, Homo sapiens
  misc_RNA (1)...(19): siRNA sense strand
gccaugugccuuuauaaug

SEQ ID NO: 1368245 - RNA, 19 nt, Homo sapiens
  misc_RNA (1)...(19): siRNA sense strand
caagacaaaggaagggaaa

SEQ ID NO: 1368246 - RNA, 19 nt, Homo sapiens
  misc_RNA (1)...(19): siRNA sense strand
ggaggcacagucaagguuu

SEQ ID NO: 1368247 - RNA, 19 nt, Homo sapiens
  misc_RNA (1)...(19): siRNA sense strand
ggaaggugcaacauagaau

SEQ ID NO: 1368248 - RNA, 19 nt, Homo sapiens
  misc_RNA (1)...(19): siRNA sense strand
ucaagugaccauuggauau

SEQ ID NO: 1368249 - RNA, 19 nt, Homo sapiens
  misc_RNA (1)...(19): siRNA sense strand
gcuuaucuuucagucuaua

SEQ ID NO: 1368250 - RNA, 19 nt, Homo sapiens
  misc_RNA (1)...(19): siRNA sense strand
gaucacaacagcccuuucu

SEQ ID NO: 1368251 - RNA, 19 nt, Homo sapiens
  misc_RNA (1)...(19): siRNA sense strand
gauauggauucaggugugu

SEQ ID NO: 1368252 - RNA, 19 nt, Homo sapiens
  misc_RNA (1)...(19): siRNA sense strand
ugucagaagucaaugaaac

SEQ ID NO: 1368253 - RNA, 19 nt, Homo sapiens
  misc_RNA (1)...(19): siRNA sense strand
ccaacuucaucuugucaga

SEQ ID NO: 1368254 - RNA, 19 nt, Homo sapiens
  misc_RNA (1)...(19): siRNA sense strand
ucacaacagcccuuucuuc

SEQ ID NO: 1368255 - RNA, 19 nt, Homo sapiens
  misc_RNA (1)...(19): siRNA sense strand
cuuauuggcagucacauuu

SEQ ID NO: 1368256 - RNA, 19 nt, Homo sapiens
  misc_RNA (1)...(19): siRNA sense strand
caagugaccauuggauaug

SEQ ID NO: 1368257 - RNA, 19 nt, Homo sapiens
  misc_RNA (1)...(19): siRNA sense strand
gccaagaccauuacguuca

SEQ ID NO: 1368258 - RNA, 19 nt, Homo sapiens
  misc_RNA (1)...(19): siRNA sense strand
aggcuagucuccaaagaug

SEQ ID NO: 1368259 - RNA, 19 nt, Homo sapiens
  misc_RNA (1)...(19): siRNA sense strand
ucuuuggucuccuguggua

SEQ ID NO: 1368260 - RNA, 19 nt, Homo sapiens
  misc_RNA (1)...(19): siRNA sense strand
ggaugaagagaggcuauga

SEQ ID NO: 1368261 - RNA, 19 nt, Homo sapiens
  misc_RNA (1)...(19): siRNA sense strand
ccauuacguucagcaagaa

SEQ ID NO: 1368262 - RNA, 19 nt, Homo sapiens
  misc_RNA (1)...(19): siRNA sense strand
ccugaaggagagaccauua

SEQ ID NO: 1368263 - RNA, 19 nt, Homo sapiens
  misc_RNA (1)...(19): siRNA sense strand
agacucaagugaccauugg

SEQ ID NO: 1368264 - RNA, 19 nt, Homo sapiens
  misc_RNA (1)...(19): siRNA sense strand
cagucaagguuuauauucu

SEQ ID NO: 1368265 - RNA, 19 nt, Homo sapiens
  misc_RNA (1)...(19): siRNA sense strand
ucaggugugugacagaaca

SEQ ID NO: 1368266 - RNA, 19 nt, Homo sapiens
  misc_RNA (1)...(19): siRNA sense strand
gguaugcaguagcguacau

SEQ ID NO: 1368267 - RNA, 19 nt, Homo sapiens
  misc_RNA (1)...(19): siRNA sense strand
ugugccaugugccuuuaua

SEQ ID NO: 1368268 - RNA, 19 nt, Homo sapiens
  misc_RNA (1)...(19): siRNA sense strand
uauuggcagucacauuuau

SEQ ID NO: 1368269 - RNA, 19 nt, Homo sapiens
  misc_RNA (1)...(19): siRNA sense strand
ccaagaccauuacguucag

SEQ ID NO: 1368270 - RNA, 19 nt, Homo sapiens
  misc_RNA (1)...(19): siRNA sense strand
gugccaagaccauuacguu

SEQ ID NO: 1368271 - RNA, 19 nt, Homo sapiens
  misc_RNA (1)...(19): siRNA sense strand
gcaaggcuagucuccaaag

SEQ ID NO: 1368272 - RNA, 19 nt, Homo sapiens
  misc_RNA (1)...(19): siRNA sense strand
gaagucaaugaaacagaug

SEQ ID NO: 1368273 - RNA, 19 nt, Homo sapiens
  misc_RNA (1)...(19): siRNA sense strand
caucuugucagaagucaau

SEQ ID NO: 1368274 - RNA, 19 nt, Homo sapiens
  misc_RNA (1)...(19): siRNA sense strand
gagagaccauuauuuugga

SEQ ID NO: 1368275 - RNA, 19 nt, Homo sapiens
  misc_RNA (1)...(19): siRNA sense strand
gagacucaagugaccauug

SEQ ID NO: 1368276 - RNA, 19 nt, Homo sapiens
  misc_RNA (1)...(19): siRNA sense strand
caagaucuccaggcccaaa

SEQ ID NO: 1368277 - RNA, 19 nt, Homo sapiens
  misc_RNA (1)...(19): siRNA sense strand
ggcagucacauuuauggaa

SEQ ID NO: 1368278 - RNA, 19 nt, Homo sapiens
  misc_RNA (1)...(19): siRNA sense strand
accauuacguucagcaaga

SEQ ID NO: 1368279 - RNA, 19 nt, Homo sapiens
  misc_RNA (1)...(19): siRNA sense strand
caacuucaucuugucagaa

SEQ ID NO: 1368280 - RNA, 19 nt, Homo sapiens
  misc_RNA (1)...(19): siRNA sense strand
gaccagaucaauaucaacu

SEQ ID NO: 1368281 - RNA, 19 nt, Homo sapiens
  misc_RNA (1)...(19): siRNA sense strand
uggaccagaucaauaucaa

SEQ ID NO: 1368282 - RNA, 19 nt, Homo sapiens
  misc_RNA (1)...(19): siRNA sense strand
gaagcuuugccuccuaauc

SEQ ID NO: 1368283 - RNA, 19 nt, Homo sapiens
  misc_RNA (1)...(19): siRNA sense strand
gagaauauuaauggcuuga

SEQ ID NO: 1368284 - RNA, 19 nt, Homo sapiens
  misc_RNA (1)...(19): siRNA sense strand
agauggaaggugcaacaua

SEQ ID NO: 1368285 - RNA, 19 nt, Homo sapiens
  misc_RNA (1)...(19): siRNA sense strand
ggugcaacauagaauuugg

SEQ ID NO: 1368286 - RNA, 19 nt, Homo sapiens
  misc_RNA (1)...(19): siRNA sense strand
uggcuaaucucaggaagag

SEQ ID NO: 1368287 - RNA, 19 nt, Homo sapiens
  misc_RNA (1)...(19): siRNA sense strand
aaagauggaaggugcaaca

SEQ ID NO: 1368288 - RNA, 19 nt, Homo sapiens
  misc_RNA (1)...(19): siRNA sense strand
gggaaauaccgaguggauu

SEQ ID NO: 1368289 - RNA, 19 nt, Homo sapiens
  misc_RNA (1)...(19): siRNA sense strand
ggagagaccauuauuuugg

SEQ ID NO: 1368290 - RNA, 19 nt, Homo sapiens
  misc_RNA (1)...(19): siRNA sense strand
agaacgcagugaucagcaa

SEQ ID NO: 1368291 - RNA, 19 nt, Homo sapiens
  misc_RNA (1)...(19): siRNA sense strand
gugccuuuauaaugagaaa

SEQ ID NO: 1368292 - RNA, 19 nt, Homo sapiens
  misc_RNA (1)...(19): siRNA sense strand
guuagagccaggaugaaga

SEQ ID NO: 1368293 - RNA, 19 nt, Homo sapiens
  misc_RNA (1)...(19): siRNA sense strand
cagucuauacuuggaguua

SEQ ID NO: 1368294 - RNA, 19 nt, Homo sapiens
  misc_RNA (1)...(19): siRNA sense strand
ccauaacuuuagcaagaca

SEQ ID NO: 1368295 - RNA, 19 nt, Homo sapiens
  misc_RNA (1)...(19): siRNA sense strand
ggauuuccauaacuuuagc

SEQ ID NO: 1368296 - RNA, 19 nt, Homo sapiens
  misc_RNA (1)...(19): siRNA sense strand
gacaaaggaagggaaauac

SEQ ID NO: 1368297 - RNA, 19 nt, Homo sapiens
  misc_RNA (1)...(19): siRNA sense strand
cccauaguauccaagacaa

SEQ ID NO: 1368298 - RNA, 19 nt, Homo sapiens
  misc_RNA (1)...(19): siRNA sense strand
uuauuggcagucacauuua

SEQ ID NO: 1368299 - RNA, 19 nt, Homo sapiens
  misc_RNA (1)...(19): siRNA sense strand
gcaagaacgcagugaucag

SEQ ID NO: 1368300 - RNA, 19 nt, Homo sapiens
  misc_RNA (1)...(19): siRNA sense strand
cagcaagaacgcagugauc

SEQ ID NO: 1368301 - RNA, 19 nt, Homo sapiens
  misc_RNA (1)...(19): siRNA sense strand
caaagagcaaggcuagucu

SEQ ID NO: 1368302 - RNA, 19 nt, Homo sapiens
  misc_RNA (1)...(19): siRNA sense strand
aaggagagaccauuauuuu

SEQ ID NO: 1368303 - RNA, 19 nt, Homo sapiens
  misc_RNA (1)...(19): siRNA sense strand
aaggugcaacauagaauuu

SEQ ID NO: 1368304 - RNA, 19 nt, Homo sapiens
  misc_RNA (1)...(19): siRNA sense strand
acagucaagguuuauauuc

SEQ ID NO: 1368305 - RNA, 19 nt, Homo sapiens
  misc_RNA (1)...(19): siRNA sense strand
cagaugacaccaaaaugua

SEQ ID NO: 1368306 - RNA, 19 nt, Homo sapiens
  misc_RNA (1)...(19): siRNA sense strand
cacagucaagguuuauauu

SEQ ID NO: 1368307 - RNA, 19 nt, Homo sapiens
  misc_RNA (1)...(19): siRNA sense strand
aaacagaugacaccaaaau

SEQ ID NO: 1368308 - RNA, 19 nt, Homo sapiens
  misc_RNA (1)...(19): siRNA sense strand
gccaaguccggacauccua

SEQ ID NO: 1368309 - RNA, 19 nt, Homo sapiens
  misc_RNA (1)...(19): siRNA sense strand
cagaagucaaugaaacaga

SEQ ID NO: 1368310 - RNA, 19 nt, Homo sapiens
  misc_RNA (1)...(19): siRNA sense strand
ugaaacagaugacaccaaa

SEQ ID NO: 1368311 - RNA, 19 nt, Homo sapiens
  misc_RNA (1)...(19): siRNA sense strand
gagcaaggcuagucuccaa

SEQ ID NO: 1368312 - RNA, 19 nt, Homo sapiens
  misc_RNA (1)...(19): siRNA sense strand
gcagucacauuuauggaaa

SEQ ID NO: 1368313 - RNA, 19 nt, Homo sapiens
  misc_RNA (1)...(19): siRNA sense strand
gauggaaggugcaacauag

SEQ ID NO: 1368314 - RNA, 19 nt, Homo sapiens
  misc_RNA (1)...(19): siRNA sense strand
ccaugugccuuuauaauga

SEQ ID NO: 1368315 - RNA, 19 nt, Homo sapiens
  misc_RNA (1)...(19): siRNA sense strand
gaaggagagaccauuauuu

SEQ ID NO: 1368316 - RNA, 19 nt, Homo sapiens
  misc_RNA (1)...(19): siRNA sense strand
ccagaucaauaucaacuuu

SEQ ID NO: 1368317 - RNA, 19 nt, Homo sapiens
  misc_RNA (1)...(19): siRNA sense strand
guucaaacaucuucggaaa

SEQ ID NO: 1368318 - RNA, 19 nt, Homo sapiens
  misc_RNA (1)...(19): siRNA sense strand
ucaaacaucuucggaaaug

SEQ ID NO: 1368319 - RNA, 19 nt, Homo sapiens
  misc_RNA (1)...(19): siRNA sense strand
caacauagaauuuggcaau

SEQ ID NO: 1368320 - RNA, 19 nt, Homo sapiens
  misc_RNA (1)...(19): siRNA sense strand
gaagagaggcuaugacaac

SEQ ID NO: 1368321 - RNA, 19 nt, Homo sapiens
  misc_RNA (1)...(19): siRNA sense strand
uagcguacauucacaaaga

SEQ ID NO: 1368322 - RNA, 19 nt, Homo sapiens
  misc_RNA (1)...(19): siRNA sense strand
ccagcaggacuuugaauua

SEQ ID NO: 1368323 - RNA, 19 nt, Homo sapiens
  misc_RNA (1)...(19): siRNA sense strand
gaggcacagucaagguuua

SEQ ID NO: 1368324 - RNA, 19 nt, Homo sapiens
  misc_RNA (1)...(19): siRNA sense strand
gaccucagcuuuucuguuu

SEQ ID NO: 1368325 - RNA, 19 nt, Homo sapiens
  misc_RNA (1)...(19): siRNA sense strand
gcaggacuuugaauuagug

SEQ ID NO: 1368326 - RNA, 19 nt, Homo sapiens
  misc_RNA (1)...(19): siRNA sense strand
gggaagcuuugccuccuaa

SEQ ID NO: 1368327 - RNA, 19 nt, Homo sapiens
  misc_RNA (1)...(19): siRNA sense strand
gaaggugcaacauagaauu

SEQ ID NO: 1368328 - RNA, 19 nt, Homo sapiens
  misc_RNA (1)...(19): siRNA sense strand
gcacagucaagguuuauau

SEQ ID NO: 1368329 - RNA, 19 nt, Homo sapiens
  misc_RNA (1)...(19): siRNA sense strand
gacagaaaguauguucaaa

SEQ ID NO: 1368330 - RNA, 19 nt, Homo sapiens
  misc_RNA (1)...(19): siRNA sense strand
gauguuagagccaggauga

SEQ ID NO: 1368331 - RNA, 19 nt, Homo sapiens
  misc_RNA (1)...(19): siRNA sense strand
cugcuuaucuuucagucua

SEQ ID NO: 1368332 - RNA, 19 nt, Homo sapiens
  misc_RNA (1)...(19): siRNA sense strand
aaacgugccaagaccauua

SEQ ID NO: 1368333 - RNA, 19 nt, Homo sapiens
  misc_RNA (1)...(19): siRNA sense strand
cagcaggacuuugaauuag

SEQ ID NO: 1368334 - RNA, 19 nt, Homo sapiens
  misc_RNA (1)...(19): siRNA sense strand
uuccauaacuuuagcaaga

SEQ ID NO: 1368335 - RNA, 19 nt, Homo sapiens
  misc_RNA (1)...(19): siRNA sense strand
gcaaagagcaaggcuaguc

SEQ ID NO: 1368336 - RNA, 19 nt, Homo sapiens
  misc_RNA (1)...(19): siRNA sense strand
agacaaaggaagggaaaua

SEQ ID NO: 1368337 - RNA, 19 nt, Homo sapiens
  misc_RNA (1)...(19): siRNA sense strand
ucacauuuauggaaagcuu

SEQ ID NO: 1368338 - RNA, 19 nt, Homo sapiens
  misc_RNA (1)...(19): siRNA sense strand
cauagaauuuggcaaugug

SEQ ID NO: 1368339 - RNA, 19 nt, Homo sapiens
  misc_RNA (1)...(19): siRNA sense strand
gcaguagcguacauucaca

SEQ ID NO: 1368340 - RNA, 19 nt, Homo sapiens
  misc_RNA (1)...(19): siRNA sense strand
gaacgcagugaucagcaaa

SEQ ID NO: 1368341 - RNA, 19 nt, Homo sapiens
  misc_RNA (1)...(19): siRNA sense strand
ugacagaaaguauguucaa

SEQ ID NO: 1368342 - RNA, 19 nt, Homo sapiens
  misc_RNA (1)...(19): siRNA sense strand
agaagucaaugaaacagau

SEQ ID NO: 1368343 - RNA, 19 nt, Homo sapiens
  misc_RNA (1)...(19): siRNA sense strand
ugaaggagagaccauuauu

SEQ ID NO: 1368344 - RNA, 19 nt, Homo sapiens
  misc_RNA (1)...(19): siRNA sense strand
gaccucaaguggagauaca

SEQ ID NO: 1368345 - RNA, 19 nt, Homo sapiens
  misc_RNA (1)...(19): siRNA sense strand
caagacaaaggaagggaaa

SEQ ID NO: 1368346 - RNA, 19 nt, Homo sapiens
  misc_RNA (1)...(19): siRNA sense strand
caaggcuagucuccaaaga

SEQ ID NO: 1368347 - RNA, 19 nt, Homo sapiens
  misc_RNA (1)...(19): siRNA sense strand
gccaugugccuuuauaaug

SEQ ID NO: 1368348 - RNA, 19 nt, Homo sapiens
  misc_RNA (1)...(19): siRNA sense strand
ggaaggugcaacauagaau

SEQ ID NO: 1368349 - RNA, 19 nt, Homo sapiens
  misc_RNA (1)...(19): siRNA sense strand
ucaagugaccauuggauau

SEQ ID NO: 1368350 - RNA, 19 nt, Homo sapiens
  misc_RNA (1)...(19): siRNA sense strand
ggaggcacagucaagguuu

SEQ ID NO: 1368351 - RNA, 19 nt, Homo sapiens
  misc_RNA (1)...(19): siRNA sense strand
gcuuaucuuucagucuaua

SEQ ID NO: 1368352 - RNA, 19 nt, Homo sapiens
  misc_RNA (1)...(19): siRNA sense strand
gaucacaacagcccuuucu

SEQ ID NO: 1368353 - RNA, 19 nt, Homo sapiens
  misc_RNA (1)...(19): siRNA sense strand
gauauggauucaggugugu

SEQ ID NO: 1368354 - RNA, 19 nt, Homo sapiens
  misc_RNA (1)...(19): siRNA sense strand
ugucagaagucaaugaaac

SEQ ID NO: 1368355 - RNA, 19 nt, Homo sapiens
  misc_RNA (1)...(19): siRNA sense strand
ccaacuucaucuugucaga

SEQ ID NO: 1368356 - RNA, 19 nt, Homo sapiens
  misc_RNA (1)...(19): siRNA sense strand
ucacaacagcccuuucuuc

SEQ ID NO: 1368357 - RNA, 19 nt, Homo sapiens
  misc_RNA (1)...(19): siRNA sense strand
cuuauuggcagucacauuu

SEQ ID NO: 1368358 - RNA, 19 nt, Homo sapiens
  misc_RNA (1)...(19): siRNA sense strand
caagugaccauuggauaug

SEQ ID NO: 1368359 - RNA, 19 nt, Homo sapiens
  misc_RNA (1)...(19): siRNA sense strand
aggcuagucuccaaagaug

SEQ ID NO: 1368360 - RNA, 19 nt, Homo sapiens
  misc_RNA (1)...(19): siRNA sense strand
gccaagaccauuacguuca

SEQ ID NO: 1368361 - RNA, 19 nt, Homo sapiens
  misc_RNA (1)...(19): siRNA sense strand
ucuuuggucuccuguggua

SEQ ID NO: 1368362 - RNA, 19 nt, Homo sapiens
  misc_RNA (1)...(19): siRNA sense strand
ggaugaagagaggcuauga

SEQ ID NO: 1368363 - RNA, 19 nt, Homo sapiens
  misc_RNA (1)...(19): siRNA sense strand
ccauuacguucagcaagaa

SEQ ID NO: 1368364 - RNA, 19 nt, Homo sapiens
  misc_RNA (1)...(19): siRNA sense strand
ccugaaggagagaccauua

SEQ ID NO: 1368365 - RNA, 19 nt, Homo sapiens
  misc_RNA (1)...(19): siRNA sense strand
cagucaagguuuauauucu

SEQ ID NO: 1368366 - RNA, 19 nt, Homo sapiens
  misc_RNA (1)...(19): siRNA sense strand
ucaggugugugacagaaca

SEQ ID NO: 1368367 - RNA, 19 nt, Homo sapiens
  misc_RNA (1)...(19): siRNA sense strand
agacucaagugaccauugg

SEQ ID NO: 1368368 - RNA, 19 nt, Homo sapiens
  misc_RNA (1)...(19): siRNA sense strand
gguaugcaguagcguacau

SEQ ID NO: 1368369 - RNA, 19 nt, Homo sapiens
  misc_RNA (1)...(19): siRNA sense strand
ugugccaugugccuuuaua

SEQ ID NO: 1368370 - RNA, 19 nt, Homo sapiens
  misc_RNA (1)...(19): siRNA sense strand
uauuggcagucacauuuau

SEQ ID NO: 1368371 - RNA, 19 nt, Homo sapiens
  misc_RNA (1)...(19): siRNA sense strand
ccaagaccauuacguucag

SEQ ID NO: 1368372 - RNA, 19 nt, Homo sapiens
  misc_RNA (1)...(19): siRNA sense strand
gugccaagaccauuacguu

SEQ ID NO: 1368373 - RNA, 19 nt, Homo sapiens
  misc_RNA (1)...(19): siRNA sense strand
gagacucaagugaccauug

SEQ ID NO: 1368374 - RNA, 19 nt, Homo sapiens
  misc_RNA (1)...(19): siRNA sense strand
gaagucaaugaaacagaug

SEQ ID NO: 1368375 - RNA, 19 nt, Homo sapiens
  misc_RNA (1)...(19): siRNA sense strand
caucuugucagaagucaau

SEQ ID NO: 1368376 - RNA, 19 nt, Homo sapiens
  misc_RNA (1)...(19): siRNA sense strand
gagagaccauuauuuugga

SEQ ID NO: 1368377 - RNA, 19 nt, Homo sapiens
  misc_RNA (1)...(19): siRNA sense strand
gcaaggcuagucuccaaag

SEQ ID NO: 1368378 - RNA, 19 nt, Homo sapiens
  misc_RNA (1)...(19): siRNA sense strand
caagaucuccaggcccaaa

SEQ ID NO: 1368379 - RNA, 19 nt, Homo sapiens
  misc_RNA (1)...(19): siRNA sense strand
ggcagucacauuuauggaa

SEQ ID NO: 1368380 - RNA, 19 nt, Homo sapiens
  misc_RNA (1)...(19): siRNA sense strand
accauuacguucagcaaga

SEQ ID NO: 1368381 - RNA, 19 nt, Homo sapiens
  misc_RNA (1)...(19): siRNA sense strand
gaucaggguguugacagaa

SEQ ID NO: 1368382 - RNA, 19 nt, Homo sapiens
  misc_RNA (1)...(19): siRNA sense strand
caacuucaucuugucagaa

SEQ ID NO: 1368383 - RNA, 19 nt, Homo sapiens
  misc_RNA (1)...(19): siRNA sense strand
gaccagaucaauaucaacu

SEQ ID NO: 1368384 - RNA, 19 nt, Homo sapiens
  misc_RNA (1)...(19): siRNA sense strand
uggaccagaucaauaucaa

SEQ ID NO: 1368385 - RNA, 19 nt, Homo sapiens
  misc_RNA (1)...(19): siRNA sense strand
gaagcuuugccuccuaauc

SEQ ID NO: 1368386 - RNA, 19 nt, Homo sapiens
  misc_RNA (1)...(19): siRNA sense strand
gagaauauuaauggcuuga

SEQ ID NO: 1368387 - RNA, 19 nt, Homo sapiens
  misc_RNA (1)...(19): siRNA sense strand
agauggaaggugcaacaua

SEQ ID NO: 1368388 - RNA, 19 nt, Homo sapiens
  misc_RNA (1)...(19): siRNA sense strand
ggugcaacauagaauuugg

SEQ ID NO: 1368389 - RNA, 19 nt, Homo sapiens
  misc_RNA (1)...(19): siRNA sense strand
uggcuaaucucaggaagag

SEQ ID NO: 1368390 - RNA, 19 nt, Homo sapiens
  misc_RNA (1)...(19): siRNA sense strand
agaacgcagugaucagcaa

SEQ ID NO: 1368391 - RNA, 19 nt, Homo sapiens
  misc_RNA (1)...(19): siRNA sense strand
aaagauggaaggugcaaca

SEQ ID NO: 1368392 - RNA, 19 nt, Homo sapiens
  misc_RNA (1)...(19): siRNA sense strand
gggaaauaccgaguggauu

SEQ ID NO: 1368393 - RNA, 19 nt, Homo sapiens
  misc_RNA (1)...(19): siRNA sense strand
ggagagaccauuauuuugg

SEQ ID NO: 1368394 - RNA, 19 nt, Homo sapiens
  misc_RNA (1)...(19): siRNA sense strand
gugccuuuauaaugagaaa

SEQ ID NO: 1368395 - RNA, 19 nt, Homo sapiens
  misc_RNA (1)...(19): siRNA sense strand
guuagagccaggaugaaga

SEQ ID NO: 1368396 - RNA, 19 nt, Homo sapiens
  misc_RNA (1)...(19): siRNA sense strand
cagucuauacuuggaguua

SEQ ID NO: 1368397 - RNA, 19 nt, Homo sapiens
  misc_RNA (1)...(19): siRNA sense strand
ccauaacuuuagcaagaca

SEQ ID NO: 1368398 - RNA, 19 nt, Homo sapiens
  misc_RNA (1)...(19): siRNA sense strand
ggauuuccauaacuuuagc

SEQ ID NO: 1368399 - RNA, 19 nt, Homo sapiens
  misc_RNA (1)...(19): siRNA sense strand
gacaaaggaagggaaauac

SEQ ID NO: 1368400 - RNA, 19 nt, Homo sapiens
  misc_RNA (1)...(19): siRNA sense strand
cccauaguauccaagacaa

SEQ ID NO: 1368401 - RNA, 19 nt, Homo sapiens
  misc_RNA (1)...(19): siRNA sense strand
uuauuggcagucacauuua

SEQ ID NO: 1368402 - RNA, 19 nt, Homo sapiens
  misc_RNA (1)...(19): siRNA sense strand
gcaagaacgcagugaucag

SEQ ID NO: 1368403 - RNA, 19 nt, Homo sapiens
  misc_RNA (1)...(19): siRNA sense strand
cagcaagaacgcagugauc

SEQ ID NO: 1368404 - RNA, 19 nt, Homo sapiens
  misc_RNA (1)...(19): siRNA sense strand
caaagagcaaggcuagucu

SEQ ID NO: 1368405 - RNA, 19 nt, Homo sapiens
  misc_RNA (1)...(19): siRNA sense strand
aaggugcaacauagaauuu

SEQ ID NO: 1368406 - RNA, 19 nt, Homo sapiens
  misc_RNA (1)...(19): siRNA sense strand
aaggagagaccauuauuuu

SEQ ID NO: 1368407 - RNA, 19 nt, Homo sapiens
  misc_RNA (1)...(19): siRNA sense strand
gguguugacagaaaguaug

SEQ ID NO: 1368408 - RNA, 19 nt, Homo sapiens
  misc_RNA (1)...(19): siRNA sense strand
acagucaagguuuauauuc

SEQ ID NO: 1368409 - RNA, 19 nt, Homo sapiens
  misc_RNA (1)...(19): siRNA sense strand
cagaugacaccaaaaugua

SEQ ID NO: 1368410 - RNA, 19 nt, Homo sapiens
  misc_RNA (1)...(19): siRNA sense strand
ugaaacagaugacaccaaa

SEQ ID NO: 1368411 - RNA, 19 nt, Homo sapiens
  misc_RNA (1)...(19): siRNA sense strand
gagcaaggcuagucuccaa

SEQ ID NO: 1368412 - RNA, 19 nt, Homo sapiens
  misc_RNA (1)...(19): siRNA sense strand
gcagucacauuuauggaaa

SEQ ID NO: 1368413 - RNA, 19 nt, Homo sapiens
  misc_RNA (1)...(19): siRNA sense strand
gauggaaggugcaacauag

SEQ ID NO: 1368414 - RNA, 19 nt, Homo sapiens
  misc_RNA (1)...(19): siRNA sense strand
ccaugugccuuuauaauga

SEQ ID NO: 1368415 - RNA, 19 nt, Homo sapiens
  misc_RNA (1)...(19): siRNA sense strand
gaaggagagaccauuauuu

SEQ ID NO: 1368416 - RNA, 19 nt, Homo sapiens
  misc_RNA (1)...(19): siRNA sense strand
ccagaucaauaucaacuuu

SEQ ID NO: 1368417 - RNA, 19 nt, Homo sapiens
  misc_RNA (1)...(19): siRNA sense strand
guucaaacaucuucggaaa

SEQ ID NO: 1368418 - RNA, 19 nt, Homo sapiens
  misc_RNA (1)...(19): siRNA sense strand
ucaaacaucuucggaaaug

SEQ ID NO: 1368419 - RNA, 19 nt, Homo sapiens
  misc_RNA (1)...(19): siRNA sense strand
caacauagaauuuggcaau

SEQ ID NO: 1368420 - RNA, 19 nt, Homo sapiens
  misc_RNA (1)...(19): siRNA sense strand
gaagagaggcuaugacaac

SEQ ID NO: 1368421 - RNA, 19 nt, Homo sapiens
  misc_RNA (1)...(19): siRNA sense strand
uagcguacauucacaaaga

SEQ ID NO: 1368422 - RNA, 19 nt, Homo sapiens
  misc_RNA (1)...(19): siRNA sense strand
ccagcaggacuuugaauua

SEQ ID NO: 1368423 - RNA, 19 nt, Homo sapiens
  misc_RNA (1)...(19): siRNA sense strand
gaggcacagucaagguuua

SEQ ID NO: 1368424 - RNA, 19 nt, Homo sapiens
  misc_RNA (1)...(19): siRNA sense strand
gaccucagcuuuucuguuu

SEQ ID NO: 1368425 - RNA, 19 nt, Homo sapiens
  misc_RNA (1)...(19): siRNA sense strand
gcaggacuuugaauuagug

SEQ ID NO: 1368426 - RNA, 19 nt, Homo sapiens
  misc_RNA (1)...(19): siRNA sense strand
gggaagcuuugccuccuaa

SEQ ID NO: 1368427 - RNA, 19 nt, Homo sapiens
  misc_RNA (1)...(19): siRNA sense strand
gaaggugcaacauagaauu

SEQ ID NO: 1368428 - RNA, 19 nt, Homo sapiens
  misc_RNA (1)...(19): siRNA sense strand
gcacagucaagguuuauau

SEQ ID NO: 1368429 - RNA, 19 nt, Homo sapiens
  misc_RNA (1)...(19): siRNA sense strand
gauguuagagccaggauga

SEQ ID NO: 1368430 - RNA, 19 nt, Homo sapiens
  misc_RNA (1)...(19): siRNA sense strand
cugcuuaucuuucagucua

SEQ ID NO: 1368431 - RNA, 19 nt, Homo sapiens
  misc_RNA (1)...(19): siRNA sense strand
aaacgugccaagaccauua

SEQ ID NO: 1368432 - RNA, 19 nt, Homo sapiens
  misc_RNA (1)...(19): siRNA sense strand
cagcaggacuuugaauuag

SEQ ID NO: 1368433 - RNA, 19 nt, Homo sapiens
  misc_RNA (1)...(19): siRNA sense strand
uuccauaacuuuagcaaga

SEQ ID NO: 1368434 - RNA, 19 nt, Homo sapiens
  misc_RNA (1)...(19): siRNA sense strand
ucacauuuauggaaagcuu

SEQ ID NO: 1368435 - RNA, 19 nt, Homo sapiens
  misc_RNA (1)...(19): siRNA sense strand
agacaaaggaagggaaaua

SEQ ID NO: 1368436 - RNA, 19 nt, Homo sapiens
  misc_RNA (1)...(19): siRNA sense strand
gcaaagagcaaggcuaguc

SEQ ID NO: 1368437 - RNA, 19 nt, Homo sapiens
  misc_RNA (1)...(19): siRNA sense strand
cauagaauuuggcaaugug

SEQ ID NO: 1368438 - RNA, 19 nt, Homo sapiens
  misc_RNA (1)...(19): siRNA sense strand
gcaguagcguacauucaca

SEQ ID NO: 1368439 - RNA, 19 nt, Homo sapiens
  misc_RNA (1)...(19): siRNA sense strand
gaacgcagugaucagcaaa

SEQ ID NO: 1368440 - RNA, 19 nt, Homo sapiens
  misc_RNA (1)...(19): siRNA sense strand
gaccucaaguggagauaca

SEQ ID NO: 1368441 - RNA, 19 nt, Homo sapiens
  misc_RNA (1)...(19): siRNA sense strand
agaagucaaugaaacagau

SEQ ID NO: 1368442 - RNA, 19 nt, Homo sapiens
  misc_RNA (1)...(19): siRNA sense strand
ugaaggagagaccauuauu

SEQ ID NO: 1368443 - RNA, 19 nt, Homo sapiens
  misc_RNA (1)...(19): siRNA sense strand
caaggcuagucuccaaaga

SEQ ID NO: 1368444 - RNA, 19 nt, Homo sapiens
  misc_RNA (1)...(19): siRNA sense strand
gccaugugccuuuauaaug

SEQ ID NO: 1368445 - RNA, 19 nt, Homo sapiens
  misc_RNA (1)...(19): siRNA sense strand
caagacaaaggaagggaaa

SEQ ID NO: 1368446 - RNA, 19 nt, Homo sapiens
  misc_RNA (1)...(19): siRNA sense strand
ggaggcacagucaagguuu

SEQ ID NO: 1368447 - RNA, 19 nt, Homo sapiens
  misc_RNA (1)...(19): siRNA sense strand
ggaaggugcaacauagaau

SEQ ID NO: 1368448 - RNA, 19 nt, Homo sapiens
  misc_RNA (1)...(19): siRNA sense strand
ucaagugaccauuggauau

SEQ ID NO: 1368449 - RNA, 19 nt, Homo sapiens
  misc_RNA (1)...(19): siRNA sense strand
gcuuaucuuucagucuaua

SEQ ID NO: 1368450 - RNA, 19 nt, Homo sapiens
  misc_RNA (1)...(19): siRNA sense strand
gaucacaacagcccuuucu

SEQ ID NO: 1368451 - RNA, 19 nt, Homo sapiens
  misc_RNA (1)...(19): siRNA sense strand
gauauggauucaggugugu

SEQ ID NO: 1368452 - RNA, 19 nt, Homo sapiens
  misc_RNA (1)...(19): siRNA sense strand
ugucagaagucaaugaaac

SEQ ID NO: 1368453 - RNA, 19 nt, Homo sapiens
  misc_RNA (1)...(19): siRNA sense strand
ccaacuucaucuugucaga

SEQ ID NO: 1368454 - RNA, 19 nt, Homo sapiens
  misc_RNA (1)...(19): siRNA sense strand
ucacaacagcccuuucuuc

SEQ ID NO: 1368455 - RNA, 19 nt, Homo sapiens
  misc_RNA (1)...(19): siRNA sense strand
cuuauuggcagucacauuu

SEQ ID NO: 1368456 - RNA, 19 nt, Homo sapiens
  misc_RNA (1)...(19): siRNA sense strand
caagugaccauuggauaug

SEQ ID NO: 1368457 - RNA, 19 nt, Homo sapiens
  misc_RNA (1)...(19): siRNA sense strand
gccaagaccauuacguuca

SEQ ID NO: 1368458 - RNA, 19 nt, Homo sapiens
  misc_RNA (1)...(19): siRNA sense strand
aggcuagucuccaaagaug

SEQ ID NO: 1368459 - RNA, 19 nt, Homo sapiens
  misc_RNA (1)...(19): siRNA sense strand
ucuuuggucuccuguggua

SEQ ID NO: 1368460 - RNA, 19 nt, Homo sapiens
  misc_RNA (1)...(19): siRNA sense strand
ggaugaagagaggcuauga

SEQ ID NO: 1368461 - RNA, 19 nt, Homo sapiens
  misc_RNA (1)...(19): siRNA sense strand
ccauuacguucagcaagaa

SEQ ID NO: 1368462 - RNA, 19 nt, Homo sapiens
  misc_RNA (1)...(19): siRNA sense strand
ccugaaggagagaccauua

SEQ ID NO: 1368463 - RNA, 19 nt, Homo sapiens
  misc_RNA (1)...(19): siRNA sense strand
agacucaagugaccauugg

SEQ ID NO: 1368464 - RNA, 19 nt, Homo sapiens
  misc_RNA (1)...(19): siRNA sense strand
cagucaagguuuauauucu

SEQ ID NO: 1368465 - RNA, 19 nt, Homo sapiens
  misc_RNA (1)...(19): siRNA sense strand
ucaggugugugacagaaca

SEQ ID NO: 1368466 - RNA, 19 nt, Homo sapiens
  misc_RNA (1)...(19): siRNA sense strand
gguaugcaguagcguacau

SEQ ID NO: 1368467 - RNA, 19 nt, Homo sapiens
  misc_RNA (1)...(19): siRNA sense strand
ugugccaugugccuuuaua

SEQ ID NO: 1368468 - RNA, 19 nt, Homo sapiens
  misc_RNA (1)...(19): siRNA sense strand
uauuggcagucacauuuau

SEQ ID NO: 1368469 - RNA, 19 nt, Homo sapiens
  misc_RNA (1)...(19): siRNA sense strand
ccaagaccauuacguucag

SEQ ID NO: 1368470 - RNA, 19 nt, Homo sapiens
  misc_RNA (1)...(19): siRNA sense strand
gugccaagaccauuacguu

SEQ ID NO: 1368471 - RNA, 19 nt, Homo sapiens
  misc_RNA (1)...(19): siRNA sense strand
gcaaggcuagucuccaaag

SEQ ID NO: 1368472 - RNA, 19 nt, Homo sapiens
  misc_RNA (1)...(19): siRNA sense strand
gaagucaaugaaacagaug

SEQ ID NO: 1368473 - RNA, 19 nt, Homo sapiens
  misc_RNA (1)...(19): siRNA sense strand
caucuugucagaagucaau

SEQ ID NO: 1368474 - RNA, 19 nt, Homo sapiens
  misc_RNA (1)...(19): siRNA sense strand
gagagaccauuauuuugga

SEQ ID NO: 1368475 - RNA, 19 nt, Homo sapiens
  misc_RNA (1)...(19): siRNA sense strand
gagacucaagugaccauug

SEQ ID NO: 1368476 - RNA, 19 nt, Homo sapiens
  misc_RNA (1)...(19): siRNA sense strand
caagaucuccaggcccaaa

SEQ ID NO: 1368477 - RNA, 19 nt, Homo sapiens
  misc_RNA (1)...(19): siRNA sense strand
ggcagucacauuuauggaa

SEQ ID NO: 1368478 - RNA, 19 nt, Homo sapiens
  misc_RNA (1)...(19): siRNA sense strand
accauuacguucagcaaga

SEQ ID NO: 1368479 - RNA, 19 nt, Homo sapiens
  misc_RNA (1)...(19): siRNA sense strand
caacuucaucuugucagaa

SEQ ID NO: 1368480 - RNA, 19 nt, Homo sapiens
  misc_RNA (1)...(19): siRNA sense strand
gaccagaucaauaucaacu

SEQ ID NO: 1368481 - RNA, 19 nt, Homo sapiens
  misc_RNA (1)...(19): siRNA sense strand
uggaccagaucaauaucaa

SEQ ID NO: 1368482 - RNA, 19 nt, Homo sapiens
  misc_RNA (1)...(19): siRNA sense strand
gaagcuuugccuccuaauc

SEQ ID NO: 1368483 - RNA, 19 nt, Homo sapiens
  misc_RNA (1)...(19): siRNA sense strand
gagaauauuaauggcuuga

SEQ ID NO: 1368484 - RNA, 19 nt, Homo sapiens
  misc_RNA (1)...(19): siRNA sense strand
agauggaaggugcaacaua

SEQ ID NO: 1368485 - RNA, 19 nt, Homo sapiens
  misc_RNA (1)...(19): siRNA sense strand
ggugcaacauagaauuugg

SEQ ID NO: 1368486 - RNA, 19 nt, Homo sapiens
  misc_RNA (1)...(19): siRNA sense strand
uggcuaaucucaggaagag

SEQ ID NO: 1368487 - RNA, 19 nt, Homo sapiens
  misc_RNA (1)...(19): siRNA sense strand
aaagauggaaggugcaaca

SEQ ID NO: 1368488 - RNA, 19 nt, Homo sapiens
  misc_RNA (1)...(19): siRNA sense strand
gggaaauaccgaguggauu

SEQ ID NO: 1368489 - RNA, 19 nt, Homo sapiens
  misc_RNA (1)...(19): siRNA sense strand
ggagagaccauuauuuugg

SEQ ID NO: 1368490 - RNA, 19 nt, Homo sapiens
  misc_RNA (1)...(19): siRNA sense strand
agaacgcagugaucagcaa

SEQ ID NO: 1368491 - RNA, 19 nt, Homo sapiens
  misc_RNA (1)...(19): siRNA sense strand
gugccuuuauaaugagaaa

SEQ ID NO: 1368492 - RNA, 19 nt, Homo sapiens
  misc_RNA (1)...(19): siRNA sense strand
guuagagccaggaugaaga

SEQ ID NO: 1368493 - RNA, 19 nt, Homo sapiens
  misc_RNA (1)...(19): siRNA sense strand
cagucuauacuuggaguua

SEQ ID NO: 1368494 - RNA, 19 nt, Homo sapiens
  misc_RNA (1)...(19): siRNA sense strand
ccauaacuuuagcaagaca

SEQ ID NO: 1368495 - RNA, 19 nt, Homo sapiens
  misc_RNA (1)...(19): siRNA sense strand
ggauuuccauaacuuuagc

SEQ ID NO: 1368496 - RNA, 19 nt, Homo sapiens
  misc_RNA (1)...(19): siRNA sense strand
gacaaaggaagggaaauac

SEQ ID NO: 1368497 - RNA, 19 nt, Homo sapiens
  misc_RNA (1)...(19): siRNA sense strand
cccauaguauccaagacaa

SEQ ID NO: 1368498 - RNA, 19 nt, Homo sapiens
  misc_RNA (1)...(19): siRNA sense strand
uuauuggcagucacauuua

SEQ ID NO: 1368499 - RNA, 19 nt, Homo sapiens
  misc_RNA (1)...(19): siRNA sense strand
gcaagaacgcagugaucag

SEQ ID NO: 1368500 - RNA, 19 nt, Homo sapiens
  misc_RNA (1)...(19): siRNA sense strand
cagcaagaacgcagugauc

SEQ ID NO: 1368501 - RNA, 19 nt, Homo sapiens
  misc_RNA (1)...(19): siRNA sense strand
caaagagcaaggcuagucu

SEQ ID NO: 1368502 - RNA, 19 nt, Homo sapiens
  misc_RNA (1)...(19): siRNA sense strand
aaggagagaccauuauuuu

SEQ ID NO: 1368503 - RNA, 19 nt, Homo sapiens
  misc_RNA (1)...(19): siRNA sense strand
aaggugcaacauagaauuu

SEQ ID NO: 1368504 - RNA, 19 nt, Homo sapiens
  misc_RNA (1)...(19): siRNA sense strand
acagucaagguuuauauuc

SEQ ID NO: 1368505 - RNA, 19 nt, Homo sapiens
  misc_RNA (1)...(19): siRNA sense strand
cagaugacaccaaaaugua

SEQ ID NO: 1368506 - RNA, 19 nt, Homo sapiens
  misc_RNA (1)...(19): siRNA sense strand
cacagucaagguuuauauu

SEQ ID NO: 1368507 - RNA, 19 nt, Homo sapiens
  misc_RNA (1)...(19): siRNA sense strand
aaacagaugacaccaaaau

SEQ ID NO: 1368508 - RNA, 19 nt, Homo sapiens
  misc_RNA (1)...(19): siRNA sense strand
gccaaguccggacauccua

SEQ ID NO: 1368509 - RNA, 19 nt, Homo sapiens
  misc_RNA (1)...(19): siRNA sense strand
cagaagucaaugaaacaga

SEQ ID NO: 1368510 - RNA, 19 nt, Homo sapiens
  misc_RNA (1)...(19): siRNA sense strand
ugaaacagaugacaccaaa

SEQ ID NO: 1368511 - RNA, 19 nt, Homo sapiens
  misc_RNA (1)...(19): siRNA sense strand
gagcaaggcuagucuccaa

SEQ ID NO: 1368512 - RNA, 19 nt, Homo sapiens
  misc_RNA (1)...(19): siRNA sense strand
gcagucacauuuauggaaa

SEQ ID NO: 1368513 - RNA, 19 nt, Homo sapiens
  misc_RNA (1)...(19): siRNA sense strand
gauggaaggugcaacauag

SEQ ID NO: 1368514 - RNA, 19 nt, Homo sapiens
  misc_RNA (1)...(19): siRNA sense strand
ccaugugccuuuauaauga

SEQ ID NO: 1368515 - RNA, 19 nt, Homo sapiens
  misc_RNA (1)...(19): siRNA sense strand
gaaggagagaccauuauuu

SEQ ID NO: 1368516 - RNA, 19 nt, Homo sapiens
  misc_RNA (1)...(19): siRNA sense strand
ccagaucaauaucaacuuu

SEQ ID NO: 1368517 - RNA, 19 nt, Homo sapiens
  misc_RNA (1)...(19): siRNA sense strand
guucaaacaucuucggaaa

SEQ ID NO: 1368518 - RNA, 19 nt, Homo sapiens
  misc_RNA (1)...(19): siRNA sense strand
ucaaacaucuucggaaaug

SEQ ID NO: 1368519 - RNA, 19 nt, Homo sapiens
  misc_RNA (1)...(19): siRNA sense strand
caacauagaauuuggcaau

SEQ ID NO: 1368520 - RNA, 19 nt, Homo sapiens
  misc_RNA (1)...(19): siRNA sense strand
gaagagaggcuaugacaac

SEQ ID NO: 1368521 - RNA, 19 nt, Homo sapiens
  misc_RNA (1)...(19): siRNA sense strand
uagcguacauucacaaaga

SEQ ID NO: 1368522 - RNA, 19 nt, Homo sapiens
  misc_RNA (1)...(19): siRNA sense strand
ccagcaggacuuugaauua

SEQ ID NO: 1368523 - RNA, 19 nt, Homo sapiens
  misc_RNA (1)...(19): siRNA sense strand
gaggcacagucaagguuua

SEQ ID NO: 1368524 - RNA, 19 nt, Homo sapiens
  misc_RNA (1)...(19): siRNA sense strand
gaccucagcuuuucuguuu

SEQ ID NO: 1368525 - RNA, 19 nt, Homo sapiens
  misc_RNA (1)...(19): siRNA sense strand
gcaggacuuugaauuagug

SEQ ID NO: 1368526 - RNA, 19 nt, Homo sapiens
  misc_RNA (1)...(19): siRNA sense strand
gggaagcuuugccuccuaa

SEQ ID NO: 1368527 - RNA, 19 nt, Homo sapiens
  misc_RNA (1)...(19): siRNA sense strand
gaaggugcaacauagaauu

SEQ ID NO: 1368528 - RNA, 19 nt, Homo sapiens
  misc_RNA (1)...(19): siRNA sense strand
gcacagucaagguuuauau

SEQ ID NO: 1368529 - RNA, 19 nt, Homo sapiens
  misc_RNA (1)...(19): siRNA sense strand
gacagaaaguauguucaaa

SEQ ID NO: 1368530 - RNA, 19 nt, Homo sapiens
  misc_RNA (1)...(19): siRNA sense strand
gauguuagagccaggauga

SEQ ID NO: 1368531 - RNA, 19 nt, Homo sapiens
  misc_RNA (1)...(19): siRNA sense strand
cugcuuaucuuucagucua

SEQ ID NO: 1368532 - RNA, 19 nt, Homo sapiens
  misc_RNA (1)...(19): siRNA sense strand
aaacgugccaagaccauua

SEQ ID NO: 1368533 - RNA, 19 nt, Homo sapiens
  misc_RNA (1)...(19): siRNA sense strand
cagcaggacuuugaauuag

SEQ ID NO: 1368534 - RNA, 19 nt, Homo sapiens
  misc_RNA (1)...(19): siRNA sense strand
uuccauaacuuuagcaaga

SEQ ID NO: 1368535 - RNA, 19 nt, Homo sapiens
  misc_RNA (1)...(19): siRNA sense strand
gcaaagagcaaggcuaguc

SEQ ID NO: 1368536 - RNA, 19 nt, Homo sapiens
  misc_RNA (1)...(19): siRNA sense strand
agacaaaggaagggaaaua

SEQ ID NO: 1368537 - RNA, 19 nt, Homo sapiens
  misc_RNA (1)...(19): siRNA sense strand
ucacauuuauggaaagcuu

SEQ ID NO: 1368538 - RNA, 19 nt, Homo sapiens
  misc_RNA (1)...(19): siRNA sense strand
cauagaauuuggcaaugug

SEQ ID NO: 1368539 - RNA, 19 nt, Homo sapiens
  misc_RNA (1)...(19): siRNA sense strand
gcaguagcguacauucaca

SEQ ID NO: 1368540 - RNA, 19 nt, Homo sapiens
  misc_RNA (1)...(19): siRNA sense strand
gaacgcagugaucagcaaa

SEQ ID NO: 1368541 - RNA, 19 nt, Homo sapiens
  misc_RNA (1)...(19): siRNA sense strand
ugacagaaaguauguucaa

SEQ ID NO: 1368542 - RNA, 19 nt, Homo sapiens
  misc_RNA (1)...(19): siRNA sense strand
agaagucaaugaaacagau

SEQ ID NO: 1368543 - RNA, 19 nt, Homo sapiens
  misc_RNA (1)...(19): siRNA sense strand
ugaaggagagaccauuauu

SEQ ID NO: 1368544 - RNA, 19 nt, Homo sapiens
  misc_RNA (1)...(19): siRNA sense strand
gaccucaaguggagauaca

SEQ ID NO: 1368545 - RNA, 19 nt, Homo sapiens
  misc_RNA (1)...(19): siRNA sense strand
caagacaaaggaagggaaa

SEQ ID NO: 1368546 - RNA, 19 nt, Homo sapiens
  misc_RNA (1)...(19): siRNA sense strand
caaggcuagucuccaaaga

SEQ ID NO: 1368547 - RNA, 19 nt, Homo sapiens
  misc_RNA (1)...(19): siRNA sense strand
gccaugugccuuuauaaug

SEQ ID NO: 1368548 - RNA, 19 nt, Homo sapiens
  misc_RNA (1)...(19): siRNA sense strand
ggaaggugcaacauagaau

SEQ ID NO: 1368549 - RNA, 19 nt, Homo sapiens
  misc_RNA (1)...(19): siRNA sense strand
ucaagugaccauuggauau

SEQ ID NO: 1368550 - RNA, 19 nt, Homo sapiens
  misc_RNA (1)...(19): siRNA sense strand
ggaggcacagucaagguuu

SEQ ID NO: 1368551 - RNA, 19 nt, Homo sapiens
  misc_RNA (1)...(19): siRNA sense strand
gcuuaucuuucagucuaua

SEQ ID NO: 1368552 - RNA, 19 nt, Homo sapiens
  misc_RNA (1)...(19): siRNA sense strand
gaucacaacagcccuuucu

SEQ ID NO: 1368553 - RNA, 19 nt, Homo sapiens
  misc_RNA (1)...(19): siRNA sense strand
gauauggauucaggugugu

SEQ ID NO: 1368554 - RNA, 19 nt, Homo sapiens
  misc_RNA (1)...(19): siRNA sense strand
ugucagaagucaaugaaac

SEQ ID NO: 1368555 - RNA, 19 nt, Homo sapiens
  misc_RNA (1)...(19): siRNA sense strand
ccaacuucaucuugucaga

SEQ ID NO: 1368556 - RNA, 19 nt, Homo sapiens
  misc_RNA (1)...(19): siRNA sense strand
ucacaacagcccuuucuuc

SEQ ID NO: 1368557 - RNA, 19 nt, Homo sapiens
  misc_RNA (1)...(19): siRNA sense strand
cuuauuggcagucacauuu

SEQ ID NO: 1368558 - RNA, 19 nt, Homo sapiens
  misc_RNA (1)...(19): siRNA sense strand
caagugaccauuggauaug

SEQ ID NO: 1368559 - RNA, 19 nt, Homo sapiens
  misc_RNA (1)...(19): siRNA sense strand
aggcuagucuccaaagaug

SEQ ID NO: 1368560 - RNA, 19 nt, Homo sapiens
  misc_RNA (1)...(19): siRNA sense strand
gccaagaccauuacguuca

SEQ ID NO: 1368561 - RNA, 19 nt, Homo sapiens
  misc_RNA (1)...(19): siRNA sense strand
ucuuuggucuccuguggua

SEQ ID NO: 1368562 - RNA, 19 nt, Homo sapiens
  misc_RNA (1)...(19): siRNA sense strand
ggaugaagagaggcuauga

SEQ ID NO: 1368563 - RNA, 19 nt, Homo sapiens
  misc_RNA (1)...(19): siRNA sense strand
ccauuacguucagcaagaa

SEQ ID NO: 1368564 - RNA, 19 nt, Homo sapiens
  misc_RNA (1)...(19): siRNA sense strand
ccugaaggagagaccauua

SEQ ID NO: 1368565 - RNA, 19 nt, Homo sapiens
  misc_RNA (1)...(19): siRNA sense strand
cagucaagguuuauauucu

SEQ ID NO: 1368566 - RNA, 19 nt, Homo sapiens
  misc_RNA (1)...(19): siRNA sense strand
ucaggugugugacagaaca

SEQ ID NO: 1368567 - RNA, 19 nt, Homo sapiens
  misc_RNA (1)...(19): siRNA sense strand
agacucaagugaccauugg

SEQ ID NO: 1368568 - RNA, 19 nt, Homo sapiens
  misc_RNA (1)...(19): siRNA sense strand
gguaugcaguagcguacau

SEQ ID NO: 1368569 - RNA, 19 nt, Homo sapiens
  misc_RNA (1)...(19): siRNA sense strand
ugugccaugugccuuuaua

SEQ ID NO: 1368570 - RNA, 19 nt, Homo sapiens
  misc_RNA (1)...(19): siRNA sense strand
uauuggcagucacauuuau

SEQ ID NO: 1368571 - RNA, 19 nt, Homo sapiens
  misc_RNA (1)...(19): siRNA sense strand
ccaagaccauuacguucag

SEQ ID NO: 1368572 - RNA, 19 nt, Homo sapiens
  misc_RNA (1)...(19): siRNA sense strand
gugccaagaccauuacguu

SEQ ID NO: 1368573 - RNA, 19 nt, Homo sapiens
  misc_RNA (1)...(19): siRNA sense strand
gagacucaagugaccauug

SEQ ID NO: 1368574 - RNA, 19 nt, Homo sapiens
  misc_RNA (1)...(19): siRNA sense strand
gaagucaaugaaacagaug

SEQ ID NO: 1368575 - RNA, 19 nt, Homo sapiens
  misc_RNA (1)...(19): siRNA sense strand
caucuugucagaagucaau

SEQ ID NO: 1368576 - RNA, 19 nt, Homo sapiens
  misc_RNA (1)...(19): siRNA sense strand
gagagaccauuauuuugga

SEQ ID NO: 1368577 - RNA, 19 nt, Homo sapiens
  misc_RNA (1)...(19): siRNA sense strand
gcaaggcuagucuccaaag

SEQ ID NO: 1368578 - RNA, 19 nt, Homo sapiens
  misc_RNA (1)...(19): siRNA sense strand
caagaucuccaggcccaaa

SEQ ID NO: 1368579 - RNA, 19 nt, Homo sapiens
  misc_RNA (1)...(19): siRNA sense strand
ggcagucacauuuauggaa

SEQ ID NO: 1368580 - RNA, 19 nt, Homo sapiens
  misc_RNA (1)...(19): siRNA sense strand
accauuacguucagcaaga

SEQ ID NO: 1368581 - RNA, 19 nt, Homo sapiens
  misc_RNA (1)...(19): siRNA sense strand
gaucaggguguugacagaa

SEQ ID NO: 1368582 - RNA, 19 nt, Homo sapiens
  misc_RNA (1)...(19): siRNA sense strand
caacuucaucuugucagaa

SEQ ID NO: 1368583 - RNA, 19 nt, Homo sapiens
  misc_RNA (1)...(19): siRNA sense strand
gaccagaucaauaucaacu

SEQ ID NO: 1368584 - RNA, 19 nt, Homo sapiens
  misc_RNA (1)...(19): siRNA sense strand
uggaccagaucaauaucaa

SEQ ID NO: 1368585 - RNA, 19 nt, Homo sapiens
  misc_RNA (1)...(19): siRNA sense strand
gaagcuuugccuccuaauc

SEQ ID NO: 1368586 - RNA, 19 nt, Homo sapiens
  misc_RNA (1)...(19): siRNA sense strand
gagaauauuaauggcuuga

SEQ ID NO: 1368587 - RNA, 19 nt, Homo sapiens
  misc_RNA (1)...(19): siRNA sense strand
agauggaaggugcaacaua

SEQ ID NO: 1368588 - RNA, 19 nt, Homo sapiens
  misc_RNA (1)...(19): siRNA sense strand
ggugcaacauagaauuugg

SEQ ID NO: 1368589 - RNA, 19 nt, Homo sapiens
  misc_RNA (1)...(19): siRNA sense strand
uggcuaaucucaggaagag

SEQ ID NO: 1368590 - RNA, 19 nt, Homo sapiens
  misc_RNA (1)...(19): siRNA sense strand
agaacgcagugaucagcaa

SEQ ID NO: 1368591 - RNA, 19 nt, Homo sapiens
  misc_RNA (1)...(19): siRNA sense strand
aaagauggaaggugcaaca

SEQ ID NO: 1368592 - RNA, 19 nt, Homo sapiens
  misc_RNA (1)...(19): siRNA sense strand
gggaaauaccgaguggauu

SEQ ID NO: 1368593 - RNA, 19 nt, Homo sapiens
  misc_RNA (1)...(19): siRNA sense strand
ggagagaccauuauuuugg

SEQ ID NO: 1368594 - RNA, 19 nt, Homo sapiens
  misc_RNA (1)...(19): siRNA sense strand
gugccuuuauaaugagaaa

SEQ ID NO: 1368595 - RNA, 19 nt, Homo sapiens
  misc_RNA (1)...(19): siRNA sense strand
guuagagccaggaugaaga

SEQ ID NO: 1368596 - RNA, 19 nt, Homo sapiens
  misc_RNA (1)...(19): siRNA sense strand
cagucuauacuuggaguua

SEQ ID NO: 1368597 - RNA, 19 nt, Homo sapiens
  misc_RNA (1)...(19): siRNA sense strand
ccauaacuuuagcaagaca

SEQ ID NO: 1368598 - RNA, 19 nt, Homo sapiens
  misc_RNA (1)...(19): siRNA sense strand
ggauuuccauaacuuuagc

SEQ ID NO: 1368599 - RNA, 19 nt, Homo sapiens
  misc_RNA (1)...(19): siRNA sense strand
gacaaaggaagggaaauac

SEQ ID NO: 1368600 - RNA, 19 nt, Homo sapiens
  misc_RNA (1)...(19): siRNA sense strand
cccauaguauccaagacaa

SEQ ID NO: 1368601 - RNA, 19 nt, Homo sapiens
  misc_RNA (1)...(19): siRNA sense strand
uuauuggcagucacauuua

SEQ ID NO: 1368602 - RNA, 19 nt, Homo sapiens
  misc_RNA (1)...(19): siRNA sense strand
gcaagaacgcagugaucag

SEQ ID NO: 1368603 - RNA, 19 nt, Homo sapiens
  misc_RNA (1)...(19): siRNA sense strand
cagcaagaacgcagugauc

SEQ ID NO: 1368604 - RNA, 19 nt, Homo sapiens
  misc_RNA (1)...(19): siRNA sense strand
caaagagcaaggcuagucu

SEQ ID NO: 1368605 - RNA, 19 nt, Homo sapiens
  misc_RNA (1)...(19): siRNA sense strand
aaggugcaacauagaauuu

SEQ ID NO: 1368606 - RNA, 19 nt, Homo sapiens
  misc_RNA (1)...(19): siRNA sense strand
aaggagagaccauuauuuu

SEQ ID NO: 1368607 - RNA, 19 nt, Homo sapiens
  misc_RNA (1)...(19): siRNA sense strand
gguguugacagaaaguaug

SEQ ID NO: 1368608 - RNA, 19 nt, Homo sapiens
  misc_RNA (1)...(19): siRNA sense strand
acagucaagguuuauauuc

SEQ ID NO: 1368609 - RNA, 19 nt, Homo sapiens
  misc_RNA (1)...(19): siRNA sense strand
cagaugacaccaaaaugua

SEQ ID NO: 1368610 - RNA, 19 nt, Homo sapiens
  misc_RNA (1)...(19): siRNA sense strand
ugaaacagaugacaccaaa

SEQ ID NO: 1368611 - RNA, 19 nt, Homo sapiens
  misc_RNA (1)...(19): siRNA sense strand
gagcaaggcuagucuccaa

SEQ ID NO: 1368612 - RNA, 19 nt, Homo sapiens
  misc_RNA (1)...(19): siRNA sense strand
gcagucacauuuauggaaa

SEQ ID NO: 1368613 - RNA, 19 nt, Homo sapiens
  misc_RNA (1)...(19): siRNA sense strand
gauggaaggugcaacauag

SEQ ID NO: 1368614 - RNA, 19 nt, Homo sapiens
  misc_RNA (1)...(19): siRNA sense strand
ccaugugccuuuauaauga

SEQ ID NO: 1368615 - RNA, 19 nt, Homo sapiens
  misc_RNA (1)...(19): siRNA sense strand
gaaggagagaccauuauuu

SEQ ID NO: 1368616 - RNA, 19 nt, Homo sapiens
  misc_RNA (1)...(19): siRNA sense strand
ccagaucaauaucaacuuu

SEQ ID NO: 1368617 - RNA, 19 nt, Homo sapiens
  misc_RNA (1)...(19): siRNA sense strand
guucaaacaucuucggaaa

SEQ ID NO: 1368618 - RNA, 19 nt, Homo sapiens
  misc_RNA (1)...(19): siRNA sense strand
ucaaacaucuucggaaaug

SEQ ID NO: 1368619 - RNA, 19 nt, Homo sapiens
  misc_RNA (1)...(19): siRNA sense strand
caacauagaauuuggcaau

SEQ ID NO: 1368620 - RNA, 19 nt, Homo sapiens
  misc_RNA (1)...(19): siRNA sense strand
gaagagaggcuaugacaac

SEQ ID NO: 1368621 - RNA, 19 nt, Homo sapiens
  misc_RNA (1)...(19): siRNA sense strand
uagcguacauucacaaaga

SEQ ID NO: 1368622 - RNA, 19 nt, Homo sapiens
  misc_RNA (1)...(19): siRNA sense strand
ccagcaggacuuugaauua

SEQ ID NO: 1368623 - RNA, 19 nt, Homo sapiens
  misc_RNA (1)...(19): siRNA sense strand
gaggcacagucaagguuua

SEQ ID NO: 1368624 - RNA, 19 nt, Homo sapiens
  misc_RNA (1)...(19): siRNA sense strand
gaccucagcuuuucuguuu

SEQ ID NO: 1368625 - RNA, 19 nt, Homo sapiens
  misc_RNA (1)...(19): siRNA sense strand
gcaggacuuugaauuagug

SEQ ID NO: 1368626 - RNA, 19 nt, Homo sapiens
  misc_RNA (1)...(19): siRNA sense strand
gggaagcuuugccuccuaa

SEQ ID NO: 1368627 - RNA, 19 nt, Homo sapiens
  misc_RNA (1)...(19): siRNA sense strand
gaaggugcaacauagaauu

SEQ ID NO: 1368628 - RNA, 19 nt, Homo sapiens
  misc_RNA (1)...(19): siRNA sense strand
gcacagucaagguuuauau

SEQ ID NO: 1368629 - RNA, 19 nt, Homo sapiens
  misc_RNA (1)...(19): siRNA sense strand
gauguuagagccaggauga

SEQ ID NO: 1368630 - RNA, 19 nt, Homo sapiens
  misc_RNA (1)...(19): siRNA sense strand
cugcuuaucuuucagucua

SEQ ID NO: 1368631 - RNA, 19 nt, Homo sapiens
  misc_RNA (1)...(19): siRNA sense strand
aaacgugccaagaccauua

SEQ ID NO: 1368632 - RNA, 19 nt, Homo sapiens
  misc_RNA (1)...(19): siRNA sense strand
cagcaggacuuugaauuag

SEQ ID NO: 1368633 - RNA, 19 nt, Homo sapiens
  misc_RNA (1)...(19): siRNA sense strand
uuccauaacuuuagcaaga

SEQ ID NO: 1368634 - RNA, 19 nt, Homo sapiens
  misc_RNA (1)...(19): siRNA sense strand
ucacauuuauggaaagcuu

SEQ ID NO: 1368635 - RNA, 19 nt, Homo sapiens
  misc_RNA (1)...(19): siRNA sense strand
agacaaaggaagggaaaua

SEQ ID NO: 1368636 - RNA, 19 nt, Homo sapiens
  misc_RNA (1)...(19): siRNA sense strand
gcaaagagcaaggcuaguc

SEQ ID NO: 1368637 - RNA, 19 nt, Homo sapiens
  misc_RNA (1)...(19): siRNA sense strand
cauagaauuuggcaaugug

SEQ ID NO: 1368638 - RNA, 19 nt, Homo sapiens
  misc_RNA (1)...(19): siRNA sense strand
gcaguagcguacauucaca

SEQ ID NO: 1368639 - RNA, 19 nt, Homo sapiens
  misc_RNA (1)...(19): siRNA sense strand
gaacgcagugaucagcaaa

SEQ ID NO: 1368640 - RNA, 19 nt, Homo sapiens
  misc_RNA (1)...(19): siRNA sense strand
gaccucaaguggagauaca

SEQ ID NO: 1368641 - RNA, 19 nt, Homo sapiens
  misc_RNA (1)...(19): siRNA sense strand
agaagucaaugaaacagau

SEQ ID NO: 1368642 - RNA, 19 nt, Homo sapiens
  misc_RNA (1)...(19): siRNA sense strand
ugaaggagagaccauuauu

SEQ ID NO: 1368643 - RNA, 19 nt, Homo sapiens
  misc_RNA (1)...(19): siRNA sense strand
caaggcuagucuccaaaga

SEQ ID NO: 1368644 - RNA, 19 nt, Homo sapiens
  misc_RNA (1)...(19): siRNA sense strand
gccaugugccuuuauaaug

SEQ ID NO: 1368645 - RNA, 19 nt, Homo sapiens
  misc_RNA (1)...(19): siRNA sense strand
caagacaaaggaagggaaa

SEQ ID NO: 1368646 - RNA, 19 nt, Homo sapiens
  misc_RNA (1)...(19): siRNA sense strand
ggaggcacagucaagguuu

SEQ ID NO: 1368647 - RNA, 19 nt, Homo sapiens
  misc_RNA (1)...(19): siRNA sense strand
ggaaggugcaacauagaau

SEQ ID NO: 1368648 - RNA, 19 nt, Homo sapiens
  misc_RNA (1)...(19): siRNA sense strand
ucaagugaccauuggauau

SEQ ID NO: 1368649 - RNA, 19 nt, Homo sapiens
  misc_RNA (1)...(19): siRNA sense strand
gcuuaucuuucagucuaua

SEQ ID NO: 1368650 - RNA, 19 nt, Homo sapiens
  misc_RNA (1)...(19): siRNA sense strand
gaucacaacagcccuuucu

SEQ ID NO: 1368651 - RNA, 19 nt, Homo sapiens
  misc_RNA (1)...(19): siRNA sense strand
gauauggauucaggugugu

SEQ ID NO: 1368652 - RNA, 19 nt, Homo sapiens
  misc_RNA (1)...(19): siRNA sense strand
ugucagaagucaaugaaac

SEQ ID NO: 1368653 - RNA, 19 nt, Homo sapiens
  misc_RNA (1)...(19): siRNA sense strand
ccaacuucaucuugucaga

SEQ ID NO: 1368654 - RNA, 19 nt, Homo sapiens
  misc_RNA (1)...(19): siRNA sense strand
ucacaacagcccuuucuuc

SEQ ID NO: 1368655 - RNA, 19 nt, Homo sapiens
  misc_RNA (1)...(19): siRNA sense strand
cuuauuggcagucacauuu

SEQ ID NO: 1368656 - RNA, 19 nt, Homo sapiens
  misc_RNA (1)...(19): siRNA sense strand
caagugaccauuggauaug

SEQ ID NO: 1368657 - RNA, 19 nt, Homo sapiens
  misc_RNA (1)...(19): siRNA sense strand
gccaagaccauuacguuca

SEQ ID NO: 1368658 - RNA, 19 nt, Homo sapiens
  misc_RNA (1)...(19): siRNA sense strand
aggcuagucuccaaagaug

SEQ ID NO: 1368659 - RNA, 19 nt, Homo sapiens
  misc_RNA (1)...(19): siRNA sense strand
ucuuuggucuccuguggua

SEQ ID NO: 1368660 - RNA, 19 nt, Homo sapiens
  misc_RNA (1)...(19): siRNA sense strand
ggaugaagagaggcuauga

SEQ ID NO: 1368661 - RNA, 19 nt, Homo sapiens
  misc_RNA (1)...(19): siRNA sense strand
ccauuacguucagcaagaa

SEQ ID NO: 1368662 - RNA, 19 nt, Homo sapiens
  misc_RNA (1)...(19): siRNA sense strand
ccugaaggagagaccauua

SEQ ID NO: 1368663 - RNA, 19 nt, Homo sapiens
  misc_RNA (1)...(19): siRNA sense strand
agacucaagugaccauugg

SEQ ID NO: 1368664 - RNA, 19 nt, Homo sapiens
  misc_RNA (1)...(19): siRNA sense strand
cagucaagguuuauauucu

SEQ ID NO: 1368665 - RNA, 19 nt, Homo sapiens
  misc_RNA (1)...(19): siRNA sense strand
ucaggugugugacagaaca

SEQ ID NO: 1368666 - RNA, 19 nt, Homo sapiens
  misc_RNA (1)...(19): siRNA sense strand
gguaugcaguagcguacau

SEQ ID NO: 1368667 - RNA, 19 nt, Homo sapiens
  misc_RNA (1)...(19): siRNA sense strand
ugugccaugugccuuuaua

SEQ ID NO: 1368668 - RNA, 19 nt, Homo sapiens
  misc_RNA (1)...(19): siRNA sense strand
uauuggcagucacauuuau

SEQ ID NO: 1368669 - RNA, 19 nt, Homo sapiens
  misc_RNA (1)...(19): siRNA sense strand
ccaagaccauuacguucag

SEQ ID NO: 1368670 - RNA, 19 nt, Homo sapiens
  misc_RNA (1)...(19): siRNA sense strand
gugccaagaccauuacguu

SEQ ID NO: 1368671 - RNA, 19 nt, Homo sapiens
  misc_RNA (1)...(19): siRNA sense strand
gcaaggcuagucuccaaag

SEQ ID NO: 1368672 - RNA, 19 nt, Homo sapiens
  misc_RNA (1)...(19): siRNA sense strand
gaagucaaugaaacagaug

SEQ ID NO: 1368673 - RNA, 19 nt, Homo sapiens
  misc_RNA (1)...(19): siRNA sense strand
caucuugucagaagucaau

SEQ ID NO: 1368674 - RNA, 19 nt, Homo sapiens
  misc_RNA (1)...(19): siRNA sense strand
gagagaccauuauuuugga

SEQ ID NO: 1368675 - RNA, 19 nt, Homo sapiens
  misc_RNA (1)...(19): siRNA sense strand
gagacucaagugaccauug

SEQ ID NO: 1368676 - RNA, 19 nt, Homo sapiens
  misc_RNA (1)...(19): siRNA sense strand
caagaucuccaggcccaaa

SEQ ID NO: 1368677 - RNA, 19 nt, Homo sapiens
  misc_RNA (1)...(19): siRNA sense strand
ggcagucacauuuauggaa

SEQ ID NO: 1368678 - RNA, 19 nt, Homo sapiens
  misc_RNA (1)...(19): siRNA sense strand
accauuacguucagcaaga

SEQ ID NO: 1368679 - RNA, 19 nt, Homo sapiens
  misc_RNA (1)...(19): siRNA sense strand
caacuucaucuugucagaa

SEQ ID NO: 1368680 - RNA, 19 nt, Homo sapiens
  misc_RNA (1)...(19): siRNA sense strand
gaccagaucaauaucaacu

SEQ ID NO: 1368681 - RNA, 19 nt, Homo sapiens
  misc_RNA (1)...(19): siRNA sense strand
uggaccagaucaauaucaa

SEQ ID NO: 1368682 - RNA, 19 nt, Homo sapiens
  misc_RNA (1)...(19): siRNA sense strand
gaagcuuugccuccuaauc

SEQ ID NO: 1368683 - RNA, 19 nt, Homo sapiens
  misc_RNA (1)...(19): siRNA sense strand
gagaauauuaauggcuuga

SEQ ID NO: 1368684 - RNA, 19 nt, Homo sapiens
  misc_RNA (1)...(19): siRNA sense strand
agauggaaggugcaacaua

SEQ ID NO: 1368685 - RNA, 19 nt, Homo sapiens
  misc_RNA (1)...(19): siRNA sense strand
ggugcaacauagaauuugg

SEQ ID NO: 1368686 - RNA, 19 nt, Homo sapiens
  misc_RNA (1)...(19): siRNA sense strand
uggcuaaucucaggaagag

SEQ ID NO: 1368687 - RNA, 19 nt, Homo sapiens
  misc_RNA (1)...(19): siRNA sense strand
aaagauggaaggugcaaca

SEQ ID NO: 1368688 - RNA, 19 nt, Homo sapiens
  misc_RNA (1)...(19): siRNA sense strand
gggaaauaccgaguggauu

SEQ ID NO: 1368689 - RNA, 19 nt, Homo sapiens
  misc_RNA (1)...(19): siRNA sense strand
ggagagaccauuauuuugg

SEQ ID NO: 1368690 - RNA, 19 nt, Homo sapiens
  misc_RNA (1)...(19): siRNA sense strand
agaacgcagugaucagcaa

SEQ ID NO: 1368691 - RNA, 19 nt, Homo sapiens
  misc_RNA (1)...(19): siRNA sense strand
gugccuuuauaaugagaaa

SEQ ID NO: 1368692 - RNA, 19 nt, Homo sapiens
  misc_RNA (1)...(19): siRNA sense strand
guuagagccaggaugaaga

SEQ ID NO: 1368693 - RNA, 19 nt, Homo sapiens
  misc_RNA (1)...(19): siRNA sense strand
cagucuauacuuggaguua

SEQ ID NO: 1368694 - RNA, 19 nt, Homo sapiens
  misc_RNA (1)...(19): siRNA sense strand
ccauaacuuuagcaagaca

SEQ ID NO: 1368695 - RNA, 19 nt, Homo sapiens
  misc_RNA (1)...(19): siRNA sense strand
ggauuuccauaacuuuagc

SEQ ID NO: 1368696 - RNA, 19 nt, Homo sapiens
  misc_RNA (1)...(19): siRNA sense strand
gacaaaggaagggaaauac

SEQ ID NO: 1368697 - RNA, 19 nt, Homo sapiens
  misc_RNA (1)...(19): siRNA sense strand
cccauaguauccaagacaa

SEQ ID NO: 1368698 - RNA, 19 nt, Homo sapiens
  misc_RNA (1)...(19): siRNA sense strand
uuauuggcagucacauuua

SEQ ID NO: 1368699 - RNA, 19 nt, Homo sapiens
  misc_RNA (1)...(19): siRNA sense strand
gcaagaacgcagugaucag

SEQ ID NO: 1368700 - RNA, 19 nt, Homo sapiens
  misc_RNA (1)...(19): siRNA sense strand
cagcaagaacgcagugauc

SEQ ID NO: 1368701 - RNA, 19 nt, Homo sapiens
  misc_RNA (1)...(19): siRNA sense strand
caaagagcaaggcuagucu

SEQ ID NO: 1368702 - RNA, 19 nt, Homo sapiens
  misc_RNA (1)...(19): siRNA sense strand
aaggagagaccauuauuuu

SEQ ID NO: 1368703 - RNA, 19 nt, Homo sapiens
  misc_RNA (1)...(19): siRNA sense strand
aaggugcaacauagaauuu

SEQ ID NO: 1368704 - RNA, 19 nt, Homo sapiens
  misc_RNA (1)...(19): siRNA sense strand
acagucaagguuuauauuc

SEQ ID NO: 1368705 - RNA, 19 nt, Homo sapiens
  misc_RNA (1)...(19): siRNA sense strand
cagaugacaccaaaaugua

SEQ ID NO: 1368706 - RNA, 19 nt, Homo sapiens
  misc_RNA (1)...(19): siRNA sense strand
cacagucaagguuuauauu

SEQ ID NO: 1368707 - RNA, 19 nt, Homo sapiens
  misc_RNA (1)...(19): siRNA sense strand
aaacagaugacaccaaaau

SEQ ID NO: 1368708 - RNA, 19 nt, Homo sapiens
  misc_RNA (1)...(19): siRNA sense strand
gccaaguccggacauccua

SEQ ID NO: 1368709 - RNA, 19 nt, Homo sapiens
  misc_RNA (1)...(19): siRNA sense strand
cagaagucaaugaaacaga

SEQ ID NO: 1368710 - RNA, 19 nt, Homo sapiens
  misc_RNA (1)...(19): siRNA sense strand
ugaaacagaugacaccaaa

SEQ ID NO: 1368711 - RNA, 19 nt, Homo sapiens
  misc_RNA (1)...(19): siRNA sense strand
gagcaaggcuagucuccaa

SEQ ID NO: 1368712 - RNA, 19 nt, Homo sapiens
  misc_RNA (1)...(19): siRNA sense strand
gcagucacauuuauggaaa

SEQ ID NO: 1368713 - RNA, 19 nt, Homo sapiens
  misc_RNA (1)...(19): siRNA sense strand
gauggaaggugcaacauag

SEQ ID NO: 1368714 - RNA, 19 nt, Homo sapiens
  misc_RNA (1)...(19): siRNA sense strand
ccaugugccuuuauaauga

SEQ ID NO: 1368715 - RNA, 19 nt, Homo sapiens
  misc_RNA (1)...(19): siRNA sense strand
gaaggagagaccauuauuu

SEQ ID NO: 1368716 - RNA, 19 nt, Homo sapiens
  misc_RNA (1)...(19): siRNA sense strand
ccagaucaauaucaacuuu

SEQ ID NO: 1368717 - RNA, 19 nt, Homo sapiens
  misc_RNA (1)...(19): siRNA sense strand
guucaaacaucuucggaaa

SEQ ID NO: 1368718 - RNA, 19 nt, Homo sapiens
  misc_RNA (1)...(19): siRNA sense strand
ucaaacaucuucggaaaug

SEQ ID NO: 1368719 - RNA, 19 nt, Homo sapiens
  misc_RNA (1)...(19): siRNA sense strand
caacauagaauuuggcaau

SEQ ID NO: 1368720 - RNA, 19 nt, Homo sapiens
  misc_RNA (1)...(19): siRNA sense strand
gaagagaggcuaugacaac

SEQ ID NO: 1368721 - RNA, 19 nt, Homo sapiens
  misc_RNA (1)...(19): siRNA sense strand
uagcguacauucacaaaga

SEQ ID NO: 1368722 - RNA, 19 nt, Homo sapiens
  misc_RNA (1)...(19): siRNA sense strand
ccagcaggacuuugaauua

SEQ ID NO: 1368723 - RNA, 19 nt, Homo sapiens
  misc_RNA (1)...(19): siRNA sense strand
gaggcacagucaagguuua

SEQ ID NO: 1368724 - RNA, 19 nt, Homo sapiens
  misc_RNA (1)...(19): siRNA sense strand
gaccucagcuuuucuguuu

SEQ ID NO: 1368725 - RNA, 19 nt, Homo sapiens
  misc_RNA (1)...(19): siRNA sense strand
gcaggacuuugaauuagug

SEQ ID NO: 1368726 - RNA, 19 nt, Homo sapiens
  misc_RNA (1)...(19): siRNA sense strand
gggaagcuuugccuccuaa

SEQ ID NO: 1368727 - RNA, 19 nt, Homo sapiens
  misc_RNA (1)...(19): siRNA sense strand
gaaggugcaacauagaauu

SEQ ID NO: 1368728 - RNA, 19 nt, Homo sapiens
  misc_RNA (1)...(19): siRNA sense strand
gcacagucaagguuuauau

SEQ ID NO: 1368729 - RNA, 19 nt, Homo sapiens
  misc_RNA (1)...(19): siRNA sense strand
gauguuagagccaggauga

SEQ ID NO: 1368730 - RNA, 19 nt, Homo sapiens
  misc_RNA (1)...(19): siRNA sense strand
cugcuuaucuuucagucua

SEQ ID NO: 1368731 - RNA, 19 nt, Homo sapiens
  misc_RNA (1)...(19): siRNA sense strand
aaacgugccaagaccauua

SEQ ID NO: 1368732 - RNA, 19 nt, Homo sapiens
  misc_RNA (1)...(19): siRNA sense strand
cagcaggacuuugaauuag

SEQ ID NO: 1368733 - RNA, 19 nt, Homo sapiens
  misc_RNA (1)...(19): siRNA sense strand
uuccauaacuuuagcaaga

SEQ ID NO: 1368734 - RNA, 19 nt, Homo sapiens
  misc_RNA (1)...(19): siRNA sense strand
ucacauuuauggaaagcuu

SEQ ID NO: 1368735 - RNA, 19 nt, Homo sapiens
  misc_RNA (1)...(19): siRNA sense strand
agacaaaggaagggaaaua

SEQ ID NO: 1368736 - RNA, 19 nt, Homo sapiens
  misc_RNA (1)...(19): siRNA sense strand
gcaaagagcaaggcuaguc

SEQ ID NO: 1368737 - RNA, 19 nt, Homo sapiens
  misc_RNA (1)...(19): siRNA sense strand
cauagaauuuggcaaugug

SEQ ID NO: 1368738 - RNA, 19 nt, Homo sapiens
  misc_RNA (1)...(19): siRNA sense strand
gcaguagcguacauucaca

SEQ ID NO: 1368739 - RNA, 19 nt, Homo sapiens
  misc_RNA (1)...(19): siRNA sense strand
gaacgcagugaucagcaaa

SEQ ID NO: 1368740 - RNA, 19 nt, Homo sapiens
  misc_RNA (1)...(19): siRNA sense strand
gaccucaaguggagauaca

SEQ ID NO: 1368741 - RNA, 19 nt, Homo sapiens
  misc_RNA (1)...(19): siRNA sense strand
agaagucaaugaaacagau

SEQ ID NO: 1368742 - RNA, 19 nt, Homo sapiens
  misc_RNA (1)...(19): siRNA sense strand
ugaaggagagaccauuauu

SEQ ID NO: 1368743 - RNA, 19 nt, Homo sapiens
  misc_RNA (1)...(19): siRNA sense strand
caaggcuagucuccaaaga

SEQ ID NO: 1368744 - RNA, 19 nt, Homo sapiens
  misc_RNA (1)...(19): siRNA sense strand
gccaugugccuuuauaaug

SEQ ID NO: 1368745 - RNA, 19 nt, Homo sapiens
  misc_RNA (1)...(19): siRNA sense strand
caagacaaaggaagggaaa

SEQ ID NO: 1368746 - RNA, 19 nt, Homo sapiens
  misc_RNA (1)...(19): siRNA sense strand
ggaggcacagucaagguuu

SEQ ID NO: 1368747 - RNA, 19 nt, Homo sapiens
  misc_RNA (1)...(19): siRNA sense strand
ggaaggugcaacauagaau

SEQ ID NO: 1368748 - RNA, 19 nt, Homo sapiens
  misc_RNA (1)...(19): siRNA sense strand
ucaagugaccauuggauau

SEQ ID NO: 1368749 - RNA, 19 nt, Homo sapiens
  misc_RNA (1)...(19): siRNA sense strand
gcuuaucuuucagucuaua

SEQ ID NO: 1368750 - RNA, 19 nt, Homo sapiens
  misc_RNA (1)...(19): siRNA sense strand
gaucacaacagcccuuucu

SEQ ID NO: 1368751 - RNA, 19 nt, Homo sapiens
  misc_RNA (1)...(19): siRNA sense strand
gauauggauucaggugugu

SEQ ID NO: 1368752 - RNA, 19 nt, Homo sapiens
  misc_RNA (1)...(19): siRNA sense strand
ugucagaagucaaugaaac

SEQ ID NO: 1368753 - RNA, 19 nt, Homo sapiens
  misc_RNA (1)...(19): siRNA sense strand
ccaacuucaucuugucaga

SEQ ID NO: 1368754 - RNA, 19 nt, Homo sapiens
  misc_RNA (1)...(19): siRNA sense strand
ucacaacagcccuuucuuc

SEQ ID NO: 1368755 - RNA, 19 nt, Homo sapiens
  misc_RNA (1)...(19): siRNA sense strand
cuuauuggcagucacauuu

SEQ ID NO: 1368756 - RNA, 19 nt, Homo sapiens
  misc_RNA (1)...(19): siRNA sense strand
caagugaccauuggauaug

SEQ ID NO: 1368757 - RNA, 19 nt, Homo sapiens
  misc_RNA (1)...(19): siRNA sense strand
gccaagaccauuacguuca

SEQ ID NO: 1368758 - RNA, 19 nt, Homo sapiens
  misc_RNA (1)...(19): siRNA sense strand
aggcuagucuccaaagaug

SEQ ID NO: 1368759 - RNA, 19 nt, Homo sapiens
  misc_RNA (1)...(19): siRNA sense strand
ucuuuggucuccuguggua

SEQ ID NO: 1368760 - RNA, 19 nt, Homo sapiens
  misc_RNA (1)...(19): siRNA sense strand
ggaugaagagaggcuauga

SEQ ID NO: 1368761 - RNA, 19 nt, Homo sapiens
  misc_RNA (1)...(19): siRNA sense strand
ccauuacguucagcaagaa

SEQ ID NO: 1368762 - RNA, 19 nt, Homo sapiens
  misc_RNA (1)...(19): siRNA sense strand
ccugaaggagagaccauua

SEQ ID NO: 1368763 - RNA, 19 nt, Homo sapiens
  misc_RNA (1)...(19): siRNA sense strand
agacucaagugaccauugg

SEQ ID NO: 1368764 - RNA, 19 nt, Homo sapiens
  misc_RNA (1)...(19): siRNA sense strand
cagucaagguuuauauucu

SEQ ID NO: 1368765 - RNA, 19 nt, Homo sapiens
  misc_RNA (1)...(19): siRNA sense strand
ucaggugugugacagaaca

SEQ ID NO: 1368766 - RNA, 19 nt, Homo sapiens
  misc_RNA (1)...(19): siRNA sense strand
gguaugcaguagcguacau

SEQ ID NO: 1368767 - RNA, 19 nt, Homo sapiens
  misc_RNA (1)...(19): siRNA sense strand
ugugccaugugccuuuaua

SEQ ID NO: 1368768 - RNA, 19 nt, Homo sapiens
  misc_RNA (1)...(19): siRNA sense strand
uauuggcagucacauuuau

SEQ ID NO: 1368769 - RNA, 19 nt, Homo sapiens
  misc_RNA (1)...(19): siRNA sense strand
ccaagaccauuacguucag

SEQ ID NO: 1368770 - RNA, 19 nt, Homo sapiens
  misc_RNA (1)...(19): siRNA sense strand
gugccaagaccauuacguu

SEQ ID NO: 1368771 - RNA, 19 nt, Homo sapiens
  misc_RNA (1)...(19): siRNA sense strand
gcaaggcuagucuccaaag

SEQ ID NO: 1368772 - RNA, 19 nt, Homo sapiens
  misc_RNA (1)...(19): siRNA sense strand
gaagucaaugaaacagaug

SEQ ID NO: 1368773 - RNA, 19 nt, Homo sapiens
  misc_RNA (1)...(19): siRNA sense strand
caucuugucagaagucaau

SEQ ID NO: 1368774 - RNA, 19 nt, Homo sapiens
  misc_RNA (1)...(19): siRNA sense strand
gagagaccauuauuuugga

SEQ ID NO: 1368775 - RNA, 19 nt, Homo sapiens
  misc_RNA (1)...(19): siRNA sense strand
gagacucaagugaccauug

SEQ ID NO: 1368776 - RNA, 19 nt, Homo sapiens
  misc_RNA (1)...(19): siRNA sense strand
caagaucuccaggcccaaa

SEQ ID NO: 1368777 - RNA, 19 nt, Homo sapiens
  misc_RNA (1)...(19): siRNA sense strand
ggcagucacauuuauggaa

SEQ ID NO: 1368778 - RNA, 19 nt, Homo sapiens
  misc_RNA (1)...(19): siRNA sense strand
accauuacguucagcaaga

SEQ ID NO: 1368779 - RNA, 19 nt, Homo sapiens
  misc_RNA (1)...(19): siRNA sense strand
caacuucaucuugucagaa

SEQ ID NO: 1368780 - RNA, 19 nt, Homo sapiens
  misc_RNA (1)...(19): siRNA sense strand
gaccagaucaauaucaacu

SEQ ID NO: 1368781 - RNA, 19 nt, Homo sapiens
  misc_RNA (1)...(19): siRNA sense strand
uggaccagaucaauaucaa

SEQ ID NO: 1368782 - RNA, 19 nt, Homo sapiens
  misc_RNA (1)...(19): siRNA sense strand
gaagcuuugccuccuaauc

SEQ ID NO: 1368783 - RNA, 19 nt, Homo sapiens
  misc_RNA (1)...(19): siRNA sense strand
gagaauauuaauggcuuga

SEQ ID NO: 1368784 - RNA, 19 nt, Homo sapiens
  misc_RNA (1)...(19): siRNA sense strand
agauggaaggugcaacaua

SEQ ID NO: 1368785 - RNA, 19 nt, Homo sapiens
  misc_RNA (1)...(19): siRNA sense strand
ggugcaacauagaauuugg

SEQ ID NO: 1368786 - RNA, 19 nt, Homo sapiens
  misc_RNA (1)...(19): siRNA sense strand
uggcuaaucucaggaagag

SEQ ID NO: 1368787 - RNA, 19 nt, Homo sapiens
  misc_RNA (1)...(19): siRNA sense strand
aaagauggaaggugcaaca

SEQ ID NO: 1368788 - RNA, 19 nt, Homo sapiens
  misc_RNA (1)...(19): siRNA sense strand
gggaaauaccgaguggauu

SEQ ID NO: 1368789 - RNA, 19 nt, Homo sapiens
  misc_RNA (1)...(19): siRNA sense strand
ggagagaccauuauuuugg

SEQ ID NO: 1368790 - RNA, 19 nt, Homo sapiens
  misc_RNA (1)...(19): siRNA sense strand
agaacgcagugaucagcaa

SEQ ID NO: 1368791 - RNA, 19 nt, Homo sapiens
  misc_RNA (1)...(19): siRNA sense strand
gugccuuuauaaugagaaa

SEQ ID NO: 1368792 - RNA, 19 nt, Homo sapiens
  misc_RNA (1)...(19): siRNA sense strand
guuagagccaggaugaaga

SEQ ID NO: 1368793 - RNA, 19 nt, Homo sapiens
  misc_RNA (1)...(19): siRNA sense strand
cagucuauacuuggaguua

SEQ ID NO: 1368794 - RNA, 19 nt, Homo sapiens
  misc_RNA (1)...(19): siRNA sense strand
ccauaacuuuagcaagaca

SEQ ID NO: 1368795 - RNA, 19 nt, Homo sapiens
  misc_RNA (1)...(19): siRNA sense strand
ggauuuccauaacuuuagc

SEQ ID NO: 1368796 - RNA, 19 nt, Homo sapiens
  misc_RNA (1)...(19): siRNA sense strand
gacaaaggaagggaaauac

SEQ ID NO: 1368797 - RNA, 19 nt, Homo sapiens
  misc_RNA (1)...(19): siRNA sense strand
cccauaguauccaagacaa

SEQ ID NO: 1368798 - RNA, 19 nt, Homo sapiens
  misc_RNA (1)...(19): siRNA sense strand
uuauuggcagucacauuua

SEQ ID NO: 1368799 - RNA, 19 nt, Homo sapiens
  misc_RNA (1)...(19): siRNA sense strand
gcaagaacgcagugaucag

SEQ ID NO: 1368800 - RNA, 19 nt, Homo sapiens
  misc_RNA (1)...(19): siRNA sense strand
cagcaagaacgcagugauc

SEQ ID NO: 1368801 - RNA, 19 nt, Homo sapiens
  misc_RNA (1)...(19): siRNA sense strand
caaagagcaaggcuagucu

SEQ ID NO: 1368802 - RNA, 19 nt, Homo sapiens
  misc_RNA (1)...(19): siRNA sense strand
aaggagagaccauuauuuu

SEQ ID NO: 1368803 - RNA, 19 nt, Homo sapiens
  misc_RNA (1)...(19): siRNA sense strand
aaggugcaacauagaauuu

SEQ ID NO: 1368804 - RNA, 19 nt, Homo sapiens
  misc_RNA (1)...(19): siRNA sense strand
acagucaagguuuauauuc

SEQ ID NO: 1368805 - RNA, 19 nt, Homo sapiens
  misc_RNA (1)...(19): siRNA sense strand
cagaugacaccaaaaugua

SEQ ID NO: 1368806 - RNA, 19 nt, Homo sapiens
  misc_RNA (1)...(19): siRNA sense strand
cacagucaagguuuauauu

SEQ ID NO: 1368807 - RNA, 19 nt, Homo sapiens
  misc_RNA (1)...(19): siRNA sense strand
aaacagaugacaccaaaau

SEQ ID NO: 1368808 - RNA, 19 nt, Homo sapiens
  misc_RNA (1)...(19): siRNA sense strand
gccaaguccggacauccua

SEQ ID NO: 1368809 - RNA, 19 nt, Homo sapiens
  misc_RNA (1)...(19): siRNA sense strand
cagaagucaaugaaacaga

SEQ ID NO: 1368810 - RNA, 19 nt, Homo sapiens
  misc_RNA (1)...(19): siRNA sense strand
uaaaguaccuacccagaug

SEQ ID NO: 1368811 - RNA, 19 nt, Homo sapiens
  misc_RNA (1)...(19): siRNA sense strand
gaacgacaccacagaagaa

SEQ ID NO: 1368812 - RNA, 19 nt, Homo sapiens
  misc_RNA (1)...(19): siRNA sense strand
guagagaaauggucagaag

SEQ ID NO: 1368813 - RNA, 19 nt, Homo sapiens
  misc_RNA (1)...(19): siRNA sense strand
gagaaauggucagaaggaa

SEQ ID NO: 1368814 - RNA, 19 nt, Homo sapiens
  misc_RNA (1)...(19): siRNA sense strand
ggaagcaguugguggucuu

SEQ ID NO: 1368815 - RNA, 19 nt, Homo sapiens
  misc_RNA (1)...(19): siRNA sense strand
cgacaccacagaagaaauu

SEQ ID NO: 1368816 - RNA, 19 nt, Homo sapiens
  misc_RNA (1)...(19): siRNA sense strand
gaaggaacgacaccacaga

SEQ ID NO: 1368817 - RNA, 19 nt, Homo sapiens
  misc_RNA (1)...(19): siRNA sense strand
ggaacgacaccacagaaga

SEQ ID NO: 1368818 - RNA, 19 nt, Homo sapiens
  misc_RNA (1)...(19): siRNA sense strand
gaacagaauauagugacaa

SEQ ID NO: 1368819 - RNA, 19 nt, Homo sapiens
  misc_RNA (1)...(19): siRNA sense strand
caauguaaccagaacagaa

SEQ ID NO: 1368820 - RNA, 19 nt, Homo sapiens
  misc_RNA (1)...(19): siRNA sense strand
guaccuacccagauggaaa

SEQ ID NO: 1368821 - RNA, 19 nt, Homo sapiens
  misc_RNA (1)...(19): siRNA sense strand
gcuugcugcucagauguua

SEQ ID NO: 1368822 - RNA, 19 nt, Homo sapiens
  misc_RNA (1)...(19): siRNA sense strand
guaaccagaacagaauaua

SEQ ID NO: 1368823 - RNA, 19 nt, Homo sapiens
  misc_RNA (1)...(19): siRNA sense strand
ccacagaagaaauuagaau

SEQ ID NO: 1368824 - RNA, 19 nt, Homo sapiens
  misc_RNA (1)...(19): siRNA sense strand
acacagacgaggacaaugu

SEQ ID NO: 1368825 - RNA, 19 nt, Homo sapiens
  misc_RNA (1)...(19): siRNA sense strand
caccagaguuugccuacgu

SEQ ID NO: 1368826 - RNA, 19 nt, Homo sapiens
  misc_RNA (1)...(19): siRNA sense strand
ccacccaguuuccaucagu

SEQ ID NO: 1368827 - RNA, 19 nt, Homo sapiens
  misc_RNA (1)...(19): siRNA sense strand
ccagaacagaauauaguga

SEQ ID NO: 1368828 - RNA, 19 nt, Homo sapiens
  misc_RNA (1)...(19): siRNA sense strand
gagcaaacggaagcaguug

SEQ ID NO: 1368829 - RNA, 19 nt, Homo sapiens
  misc_RNA (1)...(19): siRNA sense strand
caccacagaagaaauuaga

SEQ ID NO: 1368830 - RNA, 19 nt, Homo sapiens
  misc_RNA (1)...(19): siRNA sense strand
agagaaauggucagaagga

SEQ ID NO: 1368831 - RNA, 19 nt, Homo sapiens
  misc_RNA (1)...(19): siRNA sense strand
gcaaacggaagcaguuggu

SEQ ID NO: 1368832 - RNA, 19 nt, Homo sapiens
  misc_RNA (1)...(19): siRNA sense strand
uaaccagaacagaauauag

SEQ ID NO: 1368833 - RNA, 19 nt, Homo sapiens
  misc_RNA (1)...(19): siRNA sense strand
gaggacaauguaaccagaa

SEQ ID NO: 1368834 - RNA, 19 nt, Homo sapiens
  misc_RNA (1)...(19): siRNA sense strand
cacagacgaggacaaugua

SEQ ID NO: 1368835 - RNA, 19 nt, Homo sapiens
  misc_RNA (1)...(19): siRNA sense strand
gcaguugguggucuuucuu

SEQ ID NO: 1368836 - RNA, 19 nt, Homo sapiens
  misc_RNA (1)...(19): siRNA sense strand
ccaguuuccaucaguuuau

SEQ ID NO: 1368837 - RNA, 19 nt, Homo sapiens
  misc_RNA (1)...(19): siRNA sense strand
cuaaaguaccuacccagau

SEQ ID NO: 1368838 - RNA, 19 nt, Homo sapiens
  misc_RNA (1)...(19): siRNA sense strand
gacaccacagaagaaauua

SEQ ID NO: 1368839 - RNA, 19 nt, Homo sapiens
  misc_RNA (1)...(19): siRNA sense strand
cacagaagaaauuagaaug

SEQ ID NO: 1368840 - RNA, 19 nt, Homo sapiens
  misc_RNA (1)...(19): siRNA sense strand
ugagcaaacggaagcaguu

SEQ ID NO: 1368841 - RNA, 19 nt, Homo sapiens
  misc_RNA (1)...(19): siRNA sense strand
ggacaauguaaccagaaca

SEQ ID NO: 1368842 - RNA, 19 nt, Homo sapiens
  misc_RNA (1)...(19): siRNA sense strand
gaagcaguugguggucuuu

SEQ ID NO: 1368843 - RNA, 19 nt, Homo sapiens
  misc_RNA (1)...(19): siRNA sense strand
agaacagaauauagugaca

SEQ ID NO: 1368844 - RNA, 19 nt, Homo sapiens
  misc_RNA (1)...(19): siRNA sense strand
aauguaaccagaacagaau

SEQ ID NO: 1368845 - RNA, 19 nt, Homo sapiens
  misc_RNA (1)...(19): siRNA sense strand
acagcugucucaccagagu

SEQ ID NO: 1368846 - RNA, 19 nt, Homo sapiens
  misc_RNA (1)...(19): siRNA sense strand
agacacagacgaggacaau

SEQ ID NO: 1368847 - RNA, 19 nt, Homo sapiens
  misc_RNA (1)...(19): siRNA sense strand
aaccagaacagaauauagu

SEQ ID NO: 1368848 - RNA, 19 nt, Homo sapiens
  misc_RNA (1)...(19): siRNA sense strand
ugacaaaugugcucccuuu

SEQ ID NO: 1368849 - RNA, 19 nt, Homo sapiens
  misc_RNA (1)...(19): siRNA sense strand
ucacaaacgucgcaaagca

SEQ ID NO: 1368850 - RNA, 19 nt, Homo sapiens
  misc_RNA (1)...(19): siRNA sense strand
ggaagcaguugguggucuu

SEQ ID NO: 1368851 - RNA, 19 nt, Homo sapiens
  misc_RNA (1)...(19): siRNA sense strand
gaacagaauauagugacaa

SEQ ID NO: 1368852 - RNA, 19 nt, Homo sapiens
  misc_RNA (1)...(19): siRNA sense strand
caauguaaccagaacagaa

SEQ ID NO: 1368853 - RNA, 19 nt, Homo sapiens
  misc_RNA (1)...(19): siRNA sense strand
gcuugcugcucagauguua

SEQ ID NO: 1368854 - RNA, 19 nt, Homo sapiens
  misc_RNA (1)...(19): siRNA sense strand
guaaccagaacagaauaua

SEQ ID NO: 1368855 - RNA, 19 nt, Homo sapiens
  misc_RNA (1)...(19): siRNA sense strand
uucaggaucuggugacaaa

SEQ ID NO: 1368856 - RNA, 19 nt, Homo sapiens
  misc_RNA (1)...(19): siRNA sense strand
ucgcaaagcagaaacugaa

SEQ ID NO: 1368857 - RNA, 19 nt, Homo sapiens
  misc_RNA (1)...(19): siRNA sense strand
gagguaaccgugacuacug

SEQ ID NO: 1368858 - RNA, 19 nt, Homo sapiens
  misc_RNA (1)...(19): siRNA sense strand
acacagacgaggacaaugu

SEQ ID NO: 1368859 - RNA, 19 nt, Homo sapiens
  misc_RNA (1)...(19): siRNA sense strand
caccagaguuugccuacgu

SEQ ID NO: 1368860 - RNA, 19 nt, Homo sapiens
  misc_RNA (1)...(19): siRNA sense strand
ccacccaguuuccaucagu

SEQ ID NO: 1368861 - RNA, 19 nt, Homo sapiens
  misc_RNA (1)...(19): siRNA sense strand
gugcucccuuuggaaguua

SEQ ID NO: 1368862 - RNA, 19 nt, Homo sapiens
  misc_RNA (1)...(19): siRNA sense strand
ccagaacagaauauaguga

SEQ ID NO: 1368863 - RNA, 19 nt, Homo sapiens
  misc_RNA (1)...(19): siRNA sense strand
gagcaaacggaagcaguug

SEQ ID NO: 1368864 - RNA, 19 nt, Homo sapiens
  misc_RNA (1)...(19): siRNA sense strand
uaaccagaacagaauauag

SEQ ID NO: 1368865 - RNA, 19 nt, Homo sapiens
  misc_RNA (1)...(19): siRNA sense strand
gcaaacggaagcaguuggu

SEQ ID NO: 1368866 - RNA, 19 nt, Homo sapiens
  misc_RNA (1)...(19): siRNA sense strand
gaggacaauguaaccagaa

SEQ ID NO: 1368867 - RNA, 19 nt, Homo sapiens
  misc_RNA (1)...(19): siRNA sense strand
aaacgucgcaaagcagaaa

SEQ ID NO: 1368868 - RNA, 19 nt, Homo sapiens
  misc_RNA (1)...(19): siRNA sense strand
gcucacaaacgucgcaaag

SEQ ID NO: 1368869 - RNA, 19 nt, Homo sapiens
  misc_RNA (1)...(19): siRNA sense strand
cacagacgaggacaaugua

SEQ ID NO: 1368870 - RNA, 19 nt, Homo sapiens
  misc_RNA (1)...(19): siRNA sense strand
gcaguugguggucuuucuu

SEQ ID NO: 1368871 - RNA, 19 nt, Homo sapiens
  misc_RNA (1)...(19): siRNA sense strand
ccaguuuccaucaguuuau

SEQ ID NO: 1368872 - RNA, 19 nt, Homo sapiens
  misc_RNA (1)...(19): siRNA sense strand
ugagcaaacggaagcaguu

SEQ ID NO: 1368873 - RNA, 19 nt, Homo sapiens
  misc_RNA (1)...(19): siRNA sense strand
caggaucuggugacaaaug

SEQ ID NO: 1368874 - RNA, 19 nt, Homo sapiens
  misc_RNA (1)...(19): siRNA sense strand
agaacagaauauagugaca

SEQ ID NO: 1368875 - RNA, 19 nt, Homo sapiens
  misc_RNA (1)...(19): siRNA sense strand
gcaaagcagaaacugaaaa

SEQ ID NO: 1368876 - RNA, 19 nt, Homo sapiens
  misc_RNA (1)...(19): siRNA sense strand
cuuuggaaguuacgguauu

SEQ ID NO: 1368877 - RNA, 19 nt, Homo sapiens
  misc_RNA (1)...(19): siRNA sense strand
ggacaauguaaccagaaca

SEQ ID NO: 1368878 - RNA, 19 nt, Homo sapiens
  misc_RNA (1)...(19): siRNA sense strand
gaagcaguugguggucuuu

SEQ ID NO: 1368879 - RNA, 19 nt, Homo sapiens
  misc_RNA (1)...(19): siRNA sense strand
aauguaaccagaacagaau

SEQ ID NO: 1368880 - RNA, 19 nt, Homo sapiens
  misc_RNA (1)...(19): siRNA sense strand
agacacagacgaggacaau

SEQ ID NO: 1368881 - RNA, 19 nt, Homo sapiens
  misc_RNA (1)...(19): siRNA sense strand
acagcugucucaccagagu

SEQ ID NO: 1368882 - RNA, 19 nt, Homo sapiens
  misc_RNA (1)...(19): siRNA sense strand
ggagguaaccgugacuacu

SEQ ID NO: 1368883 - RNA, 19 nt, Homo sapiens
  misc_RNA (1)...(19): siRNA sense strand
gacuacugcucacaaacgu

SEQ ID NO: 1368884 - RNA, 19 nt, Homo sapiens
  misc_RNA (1)...(19): siRNA sense strand
aaccagaacagaauauagu

SEQ ID NO: 1368885 - RNA, 19 nt, Homo sapiens
  misc_RNA (1)...(19): siRNA sense strand
agcagaaacugaaaacuga

SEQ ID NO: 1368886 - RNA, 19 nt, Homo sapiens
  misc_RNA (1)...(19): siRNA sense strand
ugacaaaugugcucccuuu

SEQ ID NO: 1368887 - RNA, 19 nt, Homo sapiens
  misc_RNA (1)...(19): siRNA sense strand
uaaaguaccuacccagaug

SEQ ID NO: 1368888 - RNA, 19 nt, Homo sapiens
  misc_RNA (1)...(19): siRNA sense strand
gaacgacaccacagaagaa

SEQ ID NO: 1368889 - RNA, 19 nt, Homo sapiens
  misc_RNA (1)...(19): siRNA sense strand
guagagaaauggucagaag

SEQ ID NO: 1368890 - RNA, 19 nt, Homo sapiens
  misc_RNA (1)...(19): siRNA sense strand
ucacaaacgucgcaaagca

SEQ ID NO: 1368891 - RNA, 19 nt, Homo sapiens
  misc_RNA (1)...(19): siRNA sense strand
gagaaauggucagaaggaa

SEQ ID NO: 1368892 - RNA, 19 nt, Homo sapiens
  misc_RNA (1)...(19): siRNA sense strand
ggaagcaguugguggucuu

SEQ ID NO: 1368893 - RNA, 19 nt, Homo sapiens
  misc_RNA (1)...(19): siRNA sense strand
cgacaccacagaagaaauu

SEQ ID NO: 1368894 - RNA, 19 nt, Homo sapiens
  misc_RNA (1)...(19): siRNA sense strand
gaaggaacgacaccacaga

SEQ ID NO: 1368895 - RNA, 19 nt, Homo sapiens
  misc_RNA (1)...(19): siRNA sense strand
ggaacgacaccacagaaga

SEQ ID NO: 1368896 - RNA, 19 nt, Homo sapiens
  misc_RNA (1)...(19): siRNA sense strand
gaacagaauauagugacaa

SEQ ID NO: 1368897 - RNA, 19 nt, Homo sapiens
  misc_RNA (1)...(19): siRNA sense strand
caauguaaccagaacagaa

SEQ ID NO: 1368898 - RNA, 19 nt, Homo sapiens
  misc_RNA (1)...(19): siRNA sense strand
guaccuacccagauggaaa

SEQ ID NO: 1368899 - RNA, 19 nt, Homo sapiens
  misc_RNA (1)...(19): siRNA sense strand
gcuugcugcucagauguua

SEQ ID NO: 1368900 - RNA, 19 nt, Homo sapiens
  misc_RNA (1)...(19): siRNA sense strand
guaaccagaacagaauaua

SEQ ID NO: 1368901 - RNA, 19 nt, Homo sapiens
  misc_RNA (1)...(19): siRNA sense strand
ccacagaagaaauuagaau

SEQ ID NO: 1368902 - RNA, 19 nt, Homo sapiens
  misc_RNA (1)...(19): siRNA sense strand
uucaggaucuggugacaaa

SEQ ID NO: 1368903 - RNA, 19 nt, Homo sapiens
  misc_RNA (1)...(19): siRNA sense strand
ucgcaaagcagaaacugaa

SEQ ID NO: 1368904 - RNA, 19 nt, Homo sapiens
  misc_RNA (1)...(19): siRNA sense strand
gagguaaccgugacuacug

SEQ ID NO: 1368905 - RNA, 19 nt, Homo sapiens
  misc_RNA (1)...(19): siRNA sense strand
acacagacgaggacaaugu

SEQ ID NO: 1368906 - RNA, 19 nt, Homo sapiens
  misc_RNA (1)...(19): siRNA sense strand
caccagaguuugccuacgu

SEQ ID NO: 1368907 - RNA, 19 nt, Homo sapiens
  misc_RNA (1)...(19): siRNA sense strand
ccacccaguuuccaucagu

SEQ ID NO: 1368908 - RNA, 19 nt, Homo sapiens
  misc_RNA (1)...(19): siRNA sense strand
gugcucccuuuggaaguua

SEQ ID NO: 1368909 - RNA, 19 nt, Homo sapiens
  misc_RNA (1)...(19): siRNA sense strand
ccagaacagaauauaguga

SEQ ID NO: 1368910 - RNA, 19 nt, Homo sapiens
  misc_RNA (1)...(19): siRNA sense strand
gagcaaacggaagcaguug

SEQ ID NO: 1368911 - RNA, 19 nt, Homo sapiens
  misc_RNA (1)...(19): siRNA sense strand
caccacagaagaaauuaga

SEQ ID NO: 1368912 - RNA, 19 nt, Homo sapiens
  misc_RNA (1)...(19): siRNA sense strand
uaaccagaacagaauauag

SEQ ID NO: 1368913 - RNA, 19 nt, Homo sapiens
  misc_RNA (1)...(19): siRNA sense strand
gcaaacggaagcaguuggu

SEQ ID NO: 1368914 - RNA, 19 nt, Homo sapiens
  misc_RNA (1)...(19): siRNA sense strand
agagaaauggucagaagga

SEQ ID NO: 1368915 - RNA, 19 nt, Homo sapiens
  misc_RNA (1)...(19): siRNA sense strand
gaggacaauguaaccagaa

SEQ ID NO: 1368916 - RNA, 19 nt, Homo sapiens
  misc_RNA (1)...(19): siRNA sense strand
aaacgucgcaaagcagaaa

SEQ ID NO: 1368917 - RNA, 19 nt, Homo sapiens
  misc_RNA (1)...(19): siRNA sense strand
gcucacaaacgucgcaaag

SEQ ID NO: 1368918 - RNA, 19 nt, Homo sapiens
  misc_RNA (1)...(19): siRNA sense strand
cacagacgaggacaaugua

SEQ ID NO: 1368919 - RNA, 19 nt, Homo sapiens
  misc_RNA (1)...(19): siRNA sense strand
gcaguugguggucuuucuu

SEQ ID NO: 1368920 - RNA, 19 nt, Homo sapiens
  misc_RNA (1)...(19): siRNA sense strand
ccaguuuccaucaguuuau

SEQ ID NO: 1368921 - RNA, 19 nt, Homo sapiens
  misc_RNA (1)...(19): siRNA sense strand
gacaccacagaagaaauua

SEQ ID NO: 1368922 - RNA, 19 nt, Homo sapiens
  misc_RNA (1)...(19): siRNA sense strand
cacagaagaaauuagaaug

SEQ ID NO: 1368923 - RNA, 19 nt, Homo sapiens
  misc_RNA (1)...(19): siRNA sense strand
cuaaaguaccuacccagau

SEQ ID NO: 1368924 - RNA, 19 nt, Homo sapiens
  misc_RNA (1)...(19): siRNA sense strand
ugagcaaacggaagcaguu

SEQ ID NO: 1368925 - RNA, 19 nt, Homo sapiens
  misc_RNA (1)...(19): siRNA sense strand
caggaucuggugacaaaug

SEQ ID NO: 1368926 - RNA, 19 nt, Homo sapiens
  misc_RNA (1)...(19): siRNA sense strand
agaacagaauauagugaca

SEQ ID NO: 1368927 - RNA, 19 nt, Homo sapiens
  misc_RNA (1)...(19): siRNA sense strand
gcaaagcagaaacugaaaa

SEQ ID NO: 1368928 - RNA, 19 nt, Homo sapiens
  misc_RNA (1)...(19): siRNA sense strand
cuuuggaaguuacgguauu

SEQ ID NO: 1368929 - RNA, 19 nt, Homo sapiens
  misc_RNA (1)...(19): siRNA sense strand
ggacaauguaaccagaaca

SEQ ID NO: 1368930 - RNA, 19 nt, Homo sapiens
  misc_RNA (1)...(19): siRNA sense strand
gaagcaguugguggucuuu

SEQ ID NO: 1368931 - RNA, 19 nt, Homo sapiens
  misc_RNA (1)...(19): siRNA sense strand
agacacagacgaggacaau

SEQ ID NO: 1368932 - RNA, 19 nt, Homo sapiens
  misc_RNA (1)...(19): siRNA sense strand
aauguaaccagaacagaau

SEQ ID NO: 1368933 - RNA, 19 nt, Homo sapiens
  misc_RNA (1)...(19): siRNA sense strand
acagcugucucaccagagu

SEQ ID NO: 1368934 - RNA, 19 nt, Homo sapiens
  misc_RNA (1)...(19): siRNA sense strand
aaccagaacagaauauagu

SEQ ID NO: 1368935 - RNA, 19 nt, Homo sapiens
  misc_RNA (1)...(19): siRNA sense strand
gacuacugcucacaaacgu

SEQ ID NO: 1368936 - RNA, 19 nt, Homo sapiens
  misc_RNA (1)...(19): siRNA sense strand
ggagguaaccgugacuacu

SEQ ID NO: 1368937 - RNA, 19 nt, Homo sapiens
  misc_RNA (1)...(19): siRNA sense strand
agcagaaacugaaaacuga

SEQ ID NO: 1368938 - RNA, 19 nt, Homo sapiens
  misc_RNA (1)...(19): siRNA sense strand
uaaaguaccuacccagaug

SEQ ID NO: 1368939 - RNA, 19 nt, Homo sapiens
  misc_RNA (1)...(19): siRNA sense strand
gaacgacaccacagaagaa

SEQ ID NO: 1368940 - RNA, 19 nt, Homo sapiens
  misc_RNA (1)...(19): siRNA sense strand
guagagaaauggucagaag

SEQ ID NO: 1368941 - RNA, 19 nt, Homo sapiens
  misc_RNA (1)...(19): siRNA sense strand
gagaaauggucagaaggaa

SEQ ID NO: 1368942 - RNA, 19 nt, Homo sapiens
  misc_RNA (1)...(19): siRNA sense strand
ggaagcaguugguggucuu

SEQ ID NO: 1368943 - RNA, 19 nt, Homo sapiens
  misc_RNA (1)...(19): siRNA sense strand
cgacaccacagaagaaauu

SEQ ID NO: 1368944 - RNA, 19 nt, Homo sapiens
  misc_RNA (1)...(19): siRNA sense strand
gaaggaacgacaccacaga

SEQ ID NO: 1368945 - RNA, 19 nt, Homo sapiens
  misc_RNA (1)...(19): siRNA sense strand
ggaacgacaccacagaaga

SEQ ID NO: 1368946 - RNA, 19 nt, Homo sapiens
  misc_RNA (1)...(19): siRNA sense strand
gaacagaauauagugacaa

SEQ ID NO: 1368947 - RNA, 19 nt, Homo sapiens
  misc_RNA (1)...(19): siRNA sense strand
caauguaaccagaacagaa

SEQ ID NO: 1368948 - RNA, 19 nt, Homo sapiens
  misc_RNA (1)...(19): siRNA sense strand
guaccuacccagauggaaa

SEQ ID NO: 1368949 - RNA, 19 nt, Homo sapiens
  misc_RNA (1)...(19): siRNA sense strand
gcuugcugcucagauguua

SEQ ID NO: 1368950 - RNA, 19 nt, Homo sapiens
  misc_RNA (1)...(19): siRNA sense strand
guaaccagaacagaauaua

SEQ ID NO: 1368951 - RNA, 19 nt, Homo sapiens
  misc_RNA (1)...(19): siRNA sense strand
ccacagaagaaauuagaau

SEQ ID NO: 1368952 - RNA, 19 nt, Homo sapiens
  misc_RNA (1)...(19): siRNA sense strand
acacagacgaggacaaugu

SEQ ID NO: 1368953 - RNA, 19 nt, Homo sapiens
  misc_RNA (1)...(19): siRNA sense strand
caccagaguuugccuacgu

SEQ ID NO: 1368954 - RNA, 19 nt, Homo sapiens
  misc_RNA (1)...(19): siRNA sense strand
ccacccaguuuccaucagu

SEQ ID NO: 1368955 - RNA, 19 nt, Homo sapiens
  misc_RNA (1)...(19): siRNA sense strand
ccagaacagaauauaguga

SEQ ID NO: 1368956 - RNA, 19 nt, Homo sapiens
  misc_RNA (1)...(19): siRNA sense strand
gagcaaacggaagcaguug

SEQ ID NO: 1368957 - RNA, 19 nt, Homo sapiens
  misc_RNA (1)...(19): siRNA sense strand
caccacagaagaaauuaga

SEQ ID NO: 1368958 - RNA, 19 nt, Homo sapiens
  misc_RNA (1)...(19): siRNA sense strand
agagaaauggucagaagga

SEQ ID NO: 1368959 - RNA, 19 nt, Homo sapiens
  misc_RNA (1)...(19): siRNA sense strand
gcaaacggaagcaguuggu

SEQ ID NO: 1368960 - RNA, 19 nt, Homo sapiens
  misc_RNA (1)...(19): siRNA sense strand
uaaccagaacagaauauag

SEQ ID NO: 1368961 - RNA, 19 nt, Homo sapiens
  misc_RNA (1)...(19): siRNA sense strand
gaggacaauguaaccagaa

SEQ ID NO: 1368962 - RNA, 19 nt, Homo sapiens
  misc_RNA (1)...(19): siRNA sense strand
cacagacgaggacaaugua

SEQ ID NO: 1368963 - RNA, 19 nt, Homo sapiens
  misc_RNA (1)...(19): siRNA sense strand
gcaguugguggucuuucuu

SEQ ID NO: 1368964 - RNA, 19 nt, Homo sapiens
  misc_RNA (1)...(19): siRNA sense strand
ccaguuuccaucaguuuau

SEQ ID NO: 1368965 - RNA, 19 nt, Homo sapiens
  misc_RNA (1)...(19): siRNA sense strand
cuaaaguaccuacccagau

SEQ ID NO: 1368966 - RNA, 19 nt, Homo sapiens
  misc_RNA (1)...(19): siRNA sense strand
gacaccacagaagaaauua

SEQ ID NO: 1368967 - RNA, 19 nt, Homo sapiens
  misc_RNA (1)...(19): siRNA sense strand
cacagaagaaauuagaaug

SEQ ID NO: 1368968 - RNA, 19 nt, Homo sapiens
  misc_RNA (1)...(19): siRNA sense strand
ugagcaaacggaagcaguu

SEQ ID NO: 1368969 - RNA, 19 nt, Homo sapiens
  misc_RNA (1)...(19): siRNA sense strand
ggacaauguaaccagaaca

SEQ ID NO: 1368970 - RNA, 19 nt, Homo sapiens
  misc_RNA (1)...(19): siRNA sense strand
gaagcaguugguggucuuu

SEQ ID NO: 1368971 - RNA, 19 nt, Homo sapiens
  misc_RNA (1)...(19): siRNA sense strand
agaacagaauauagugaca

SEQ ID NO: 1368972 - RNA, 19 nt, Homo sapiens
  misc_RNA (1)...(19): siRNA sense strand
aauguaaccagaacagaau

SEQ ID NO: 1368973 - RNA, 19 nt, Homo sapiens
  misc_RNA (1)...(19): siRNA sense strand
acagcugucucaccagagu

SEQ ID NO: 1368974 - RNA, 19 nt, Homo sapiens
  misc_RNA (1)...(19): siRNA sense strand
agacacagacgaggacaau

SEQ ID NO: 1368975 - RNA, 19 nt, Homo sapiens
  misc_RNA (1)...(19): siRNA sense strand
aaccagaacagaauauagu

SEQ ID NO: 1368976 - RNA, 19 nt, Homo sapiens
  misc_RNA (1)...(19): siRNA sense strand
ugacaaaugugcucccuuu

SEQ ID NO: 1368977 - RNA, 19 nt, Homo sapiens
  misc_RNA (1)...(19): siRNA sense strand
uaaaguaccuacccagaug

SEQ ID NO: 1368978 - RNA, 19 nt, Homo sapiens
  misc_RNA (1)...(19): siRNA sense strand
gaacgacaccacagaagaa

SEQ ID NO: 1368979 - RNA, 19 nt, Homo sapiens
  misc_RNA (1)...(19): siRNA sense strand
guagagaaauggucagaag

SEQ ID NO: 1368980 - RNA, 19 nt, Homo sapiens
  misc_RNA (1)...(19): siRNA sense strand
ucacaaacgucgcaaagca

SEQ ID NO: 1368981 - RNA, 19 nt, Homo sapiens
  misc_RNA (1)...(19): siRNA sense strand
gagaaauggucagaaggaa

SEQ ID NO: 1368982 - RNA, 19 nt, Homo sapiens
  misc_RNA (1)...(19): siRNA sense strand
ggaagcaguugguggucuu

SEQ ID NO: 1368983 - RNA, 19 nt, Homo sapiens
  misc_RNA (1)...(19): siRNA sense strand
cgacaccacagaagaaauu

SEQ ID NO: 1368984 - RNA, 19 nt, Homo sapiens
  misc_RNA (1)...(19): siRNA sense strand
gaaggaacgacaccacaga

SEQ ID NO: 1368985 - RNA, 19 nt, Homo sapiens
  misc_RNA (1)...(19): siRNA sense strand
ggaacgacaccacagaaga

SEQ ID NO: 1368986 - RNA, 19 nt, Homo sapiens
  misc_RNA (1)...(19): siRNA sense strand
gaacagaauauagugacaa

SEQ ID NO: 1368987 - RNA, 19 nt, Homo sapiens
  misc_RNA (1)...(19): siRNA sense strand
caauguaaccagaacagaa

SEQ ID NO: 1368988 - RNA, 19 nt, Homo sapiens
  misc_RNA (1)...(19): siRNA sense strand
guaccuacccagauggaaa

SEQ ID NO: 1368989 - RNA, 19 nt, Homo sapiens
  misc_RNA (1)...(19): siRNA sense strand
gcuugcugcucagauguua

SEQ ID NO: 1368990 - RNA, 19 nt, Homo sapiens
  misc_RNA (1)...(19): siRNA sense strand
guaaccagaacagaauaua

SEQ ID NO: 1368991 - RNA, 19 nt, Homo sapiens
  misc_RNA (1)...(19): siRNA sense strand
ccacagaagaaauuagaau

SEQ ID NO: 1368992 - RNA, 19 nt, Homo sapiens
  misc_RNA (1)...(19): siRNA sense strand
uucaggaucuggugacaaa

SEQ ID NO: 1368993 - RNA, 19 nt, Homo sapiens
  misc_RNA (1)...(19): siRNA sense strand
ucgcaaagcagaaacugaa

SEQ ID NO: 1368994 - RNA, 19 nt, Homo sapiens
  misc_RNA (1)...(19): siRNA sense strand
gagguaaccgugacuacug

SEQ ID NO: 1368995 - RNA, 19 nt, Homo sapiens
  misc_RNA (1)...(19): siRNA sense strand
acacagacgaggacaaugu

SEQ ID NO: 1368996 - RNA, 19 nt, Homo sapiens
  misc_RNA (1)...(19): siRNA sense strand
caccagaguuugccuacgu

SEQ ID NO: 1368997 - RNA, 19 nt, Homo sapiens
  misc_RNA (1)...(19): siRNA sense strand
ccacccaguuuccaucagu

SEQ ID NO: 1368998 - RNA, 19 nt, Homo sapiens
  misc_RNA (1)...(19): siRNA sense strand
gugcucccuuuggaaguua

SEQ ID NO: 1368999 - RNA, 19 nt, Homo sapiens
  misc_RNA (1)...(19): siRNA sense strand
ccagaacagaauauaguga

SEQ ID NO: 1369000 - RNA, 19 nt, Homo sapiens
  misc_RNA (1)...(19): siRNA sense strand
gagcaaacggaagcaguug

SEQ ID NO: 1369001 - RNA, 19 nt, Homo sapiens
  misc_RNA (1)...(19): siRNA sense strand
caccacagaagaaauuaga

SEQ ID NO: 1369002 - RNA, 19 nt, Homo sapiens
  misc_RNA (1)...(19): siRNA sense strand
uaaccagaacagaauauag

SEQ ID NO: 1369003 - RNA, 19 nt, Homo sapiens
  misc_RNA (1)...(19): siRNA sense strand
gcaaacggaagcaguuggu

SEQ ID NO: 1369004 - RNA, 19 nt, Homo sapiens
  misc_RNA (1)...(19): siRNA sense strand
agagaaauggucagaagga

SEQ ID NO: 1369005 - RNA, 19 nt, Homo sapiens
  misc_RNA (1)...(19): siRNA sense strand
gaggacaauguaaccagaa

SEQ ID NO: 1369006 - RNA, 19 nt, Homo sapiens
  misc_RNA (1)...(19): siRNA sense strand
aaacgucgcaaagcagaaa

SEQ ID NO: 1369007 - RNA, 19 nt, Homo sapiens
  misc_RNA (1)...(19): siRNA sense strand
gcucacaaacgucgcaaag

SEQ ID NO: 1369008 - RNA, 19 nt, Homo sapiens
  misc_RNA (1)...(19): siRNA sense strand
cacagacgaggacaaugua

SEQ ID NO: 1369009 - RNA, 19 nt, Homo sapiens
  misc_RNA (1)...(19): siRNA sense strand
gcaguugguggucuuucuu

SEQ ID NO: 1369010 - RNA, 19 nt, Homo sapiens
  misc_RNA (1)...(19): siRNA sense strand
ccaguuuccaucaguuuau

SEQ ID NO: 1369011 - RNA, 19 nt, Homo sapiens
  misc_RNA (1)...(19): siRNA sense strand
gacaccacagaagaaauua

SEQ ID NO: 1369012 - RNA, 19 nt, Homo sapiens
  misc_RNA (1)...(19): siRNA sense strand
cacagaagaaauuagaaug

SEQ ID NO: 1369013 - RNA, 19 nt, Homo sapiens
  misc_RNA (1)...(19): siRNA sense strand
cuaaaguaccuacccagau

SEQ ID NO: 1369014 - RNA, 19 nt, Homo sapiens
  misc_RNA (1)...(19): siRNA sense strand
ugagcaaacggaagcaguu

SEQ ID NO: 1369015 - RNA, 19 nt, Homo sapiens
  misc_RNA (1)...(19): siRNA sense strand
caggaucuggugacaaaug

SEQ ID NO: 1369016 - RNA, 19 nt, Homo sapiens
  misc_RNA (1)...(19): siRNA sense strand
agaacagaauauagugaca

SEQ ID NO: 1369017 - RNA, 19 nt, Homo sapiens
  misc_RNA (1)...(19): siRNA sense strand
gcaaagcagaaacugaaaa

SEQ ID NO: 1369018 - RNA, 19 nt, Homo sapiens
  misc_RNA (1)...(19): siRNA sense strand
cuuuggaaguuacgguauu

SEQ ID NO: 1369019 - RNA, 19 nt, Homo sapiens
  misc_RNA (1)...(19): siRNA sense strand
ggacaauguaaccagaaca

SEQ ID NO: 1369020 - RNA, 19 nt, Homo sapiens
  misc_RNA (1)...(19): siRNA sense strand
gaagcaguugguggucuuu

SEQ ID NO: 1369021 - RNA, 19 nt, Homo sapiens
  misc_RNA (1)...(19): siRNA sense strand
agacacagacgaggacaau

SEQ ID NO: 1369022 - RNA, 19 nt, Homo sapiens
  misc_RNA (1)...(19): siRNA sense strand
aauguaaccagaacagaau

SEQ ID NO: 1369023 - RNA, 19 nt, Homo sapiens
  misc_RNA (1)...(19): siRNA sense strand
acagcugucucaccagagu

SEQ ID NO: 1369024 - RNA, 19 nt, Homo sapiens
  misc_RNA (1)...(19): siRNA sense strand
aaccagaacagaauauagu

SEQ ID NO: 1369025 - RNA, 19 nt, Homo sapiens
  misc_RNA (1)...(19): siRNA sense strand
gacuacugcucacaaacgu

SEQ ID NO: 1369026 - RNA, 19 nt, Homo sapiens
  misc_RNA (1)...(19): siRNA sense strand
ggagguaaccgugacuacu

SEQ ID NO: 1369027 - RNA, 19 nt, Homo sapiens
  misc_RNA (1)...(19): siRNA sense strand
agcagaaacugaaaacuga

SEQ ID NO: 1369028 - RNA, 19 nt, Homo sapiens
  misc_RNA (1)...(19): siRNA sense strand
ugacaaaugugcucccuuu

SEQ ID NO: 1369029 - RNA, 19 nt, Homo sapiens
  misc_RNA (1)...(19): siRNA sense strand
uaaaguaccuacccagaug

SEQ ID NO: 1369030 - RNA, 19 nt, Homo sapiens
  misc_RNA (1)...(19): siRNA sense strand
gaacgacaccacagaagaa

SEQ ID NO: 1369031 - RNA, 19 nt, Homo sapiens
  misc_RNA (1)...(19): siRNA sense strand
guagagaaauggucagaag

SEQ ID NO: 1369032 - RNA, 19 nt, Homo sapiens
  misc_RNA (1)...(19): siRNA sense strand
ucacaaacgucgcaaagca

SEQ ID NO: 1369033 - RNA, 19 nt, Homo sapiens
  misc_RNA (1)...(19): siRNA sense strand
gagaaauggucagaaggaa

SEQ ID NO: 1369034 - RNA, 19 nt, Homo sapiens
  misc_RNA (1)...(19): siRNA sense strand
ggaagcaguugguggucuu

SEQ ID NO: 1369035 - RNA, 19 nt, Homo sapiens
  misc_RNA (1)...(19): siRNA sense strand
cgacaccacagaagaaauu

SEQ ID NO: 1369036 - RNA, 19 nt, Homo sapiens
  misc_RNA (1)...(19): siRNA sense strand
gaaggaacgacaccacaga

SEQ ID NO: 1369037 - RNA, 19 nt, Homo sapiens
  misc_RNA (1)...(19): siRNA sense strand
ggaacgacaccacagaaga

SEQ ID NO: 1369038 - RNA, 19 nt, Homo sapiens
  misc_RNA (1)...(19): siRNA sense strand
gaacagaauauagugacaa

SEQ ID NO: 1369039 - RNA, 19 nt, Homo sapiens
  misc_RNA (1)...(19): siRNA sense strand
caauguaaccagaacagaa

SEQ ID NO: 1369040 - RNA, 19 nt, Homo sapiens
  misc_RNA (1)...(19): siRNA sense strand
guaccuacccagauggaaa

SEQ ID NO: 1369041 - RNA, 19 nt, Homo sapiens
  misc_RNA (1)...(19): siRNA sense strand
gcuugcugcucagauguua

SEQ ID NO: 1369042 - RNA, 19 nt, Homo sapiens
  misc_RNA (1)...(19): siRNA sense strand
guaaccagaacagaauaua

SEQ ID NO: 1369043 - RNA, 19 nt, Homo sapiens
  misc_RNA (1)...(19): siRNA sense strand
ccacagaagaaauuagaau

SEQ ID NO: 1369044 - RNA, 19 nt, Homo sapiens
  misc_RNA (1)...(19): siRNA sense strand
uucaggaucuggugacaaa

SEQ ID NO: 1369045 - RNA, 19 nt, Homo sapiens
  misc_RNA (1)...(19): siRNA sense strand
ucgcaaagcagaaacugaa

SEQ ID NO: 1369046 - RNA, 19 nt, Homo sapiens
  misc_RNA (1)...(19): siRNA sense strand
gagguaaccgugacuacug

SEQ ID NO: 1369047 - RNA, 19 nt, Homo sapiens
  misc_RNA (1)...(19): siRNA sense strand
acacagacgaggacaaugu

SEQ ID NO: 1369048 - RNA, 19 nt, Homo sapiens
  misc_RNA (1)...(19): siRNA sense strand
caccagaguuugccuacgu

SEQ ID NO: 1369049 - RNA, 19 nt, Homo sapiens
  misc_RNA (1)...(19): siRNA sense strand
ccacccaguuuccaucagu

SEQ ID NO: 1369050 - RNA, 19 nt, Homo sapiens
  misc_RNA (1)...(19): siRNA sense strand
gugcucccuuuggaaguua

SEQ ID NO: 1369051 - RNA, 19 nt, Homo sapiens
  misc_RNA (1)...(19): siRNA sense strand
ccagaacagaauauaguga

SEQ ID NO: 1369052 - RNA, 19 nt, Homo sapiens
  misc_RNA (1)...(19): siRNA sense strand
gagcaaacggaagcaguug

SEQ ID NO: 1369053 - RNA, 19 nt, Homo sapiens
  misc_RNA (1)...(19): siRNA sense strand
caccacagaagaaauuaga

SEQ ID NO: 1369054 - RNA, 19 nt, Homo sapiens
  misc_RNA (1)...(19): siRNA sense strand
uaaccagaacagaauauag

SEQ ID NO: 1369055 - RNA, 19 nt, Homo sapiens
  misc_RNA (1)...(19): siRNA sense strand
gcaaacggaagcaguuggu

SEQ ID NO: 1369056 - RNA, 19 nt, Homo sapiens
  misc_RNA (1)...(19): siRNA sense strand
agagaaauggucagaagga

SEQ ID NO: 1369057 - RNA, 19 nt, Homo sapiens
  misc_RNA (1)...(19): siRNA sense strand
gaggacaauguaaccagaa

SEQ ID NO: 1369058 - RNA, 19 nt, Homo sapiens
  misc_RNA (1)...(19): siRNA sense strand
aaacgucgcaaagcagaaa

SEQ ID NO: 1369059 - RNA, 19 nt, Homo sapiens
  misc_RNA (1)...(19): siRNA sense strand
gcucacaaacgucgcaaag

SEQ ID NO: 1369060 - RNA, 19 nt, Homo sapiens
  misc_RNA (1)...(19): siRNA sense strand
cacagacgaggacaaugua

SEQ ID NO: 1369061 - RNA, 19 nt, Homo sapiens
  misc_RNA (1)...(19): siRNA sense strand
gcaguugguggucuuucuu

SEQ ID NO: 1369062 - RNA, 19 nt, Homo sapiens
  misc_RNA (1)...(19): siRNA sense strand
ccaguuuccaucaguuuau

SEQ ID NO: 1369063 - RNA, 19 nt, Homo sapiens
  misc_RNA (1)...(19): siRNA sense strand
gacaccacagaagaaauua

SEQ ID NO: 1369064 - RNA, 19 nt, Homo sapiens
  misc_RNA (1)...(19): siRNA sense strand
cacagaagaaauuagaaug

SEQ ID NO: 1369065 - RNA, 19 nt, Homo sapiens
  misc_RNA (1)...(19): siRNA sense strand
cuaaaguaccuacccagau

SEQ ID NO: 1369066 - RNA, 19 nt, Homo sapiens
  misc_RNA (1)...(19): siRNA sense strand
ugagcaaacggaagcaguu

SEQ ID NO: 1369067 - RNA, 19 nt, Homo sapiens
  misc_RNA (1)...(19): siRNA sense strand
caggaucuggugacaaaug

SEQ ID NO: 1369068 - RNA, 19 nt, Homo sapiens
  misc_RNA (1)...(19): siRNA sense strand
agaacagaauauagugaca

SEQ ID NO: 1369069 - RNA, 19 nt, Homo sapiens
  misc_RNA (1)...(19): siRNA sense strand
gcaaagcagaaacugaaaa

SEQ ID NO: 1369070 - RNA, 19 nt, Homo sapiens
  misc_RNA (1)...(19): siRNA sense strand
cuuuggaaguuacgguauu

SEQ ID NO: 1369071 - RNA, 19 nt, Homo sapiens
  misc_RNA (1)...(19): siRNA sense strand
ggacaauguaaccagaaca

SEQ ID NO: 1369072 - RNA, 19 nt, Homo sapiens
  misc_RNA (1)...(19): siRNA sense strand
gaagcaguugguggucuuu

SEQ ID NO: 1369073 - RNA, 19 nt, Homo sapiens
  misc_RNA (1)...(19): siRNA sense strand
agacacagacgaggacaau

SEQ ID NO: 1369074 - RNA, 19 nt, Homo sapiens
  misc_RNA (1)...(19): siRNA sense strand
aauguaaccagaacagaau

SEQ ID NO: 1369075 - RNA, 19 nt, Homo sapiens
  misc_RNA (1)...(19): siRNA sense strand
acagcugucucaccagagu

SEQ ID NO: 1369076 - RNA, 19 nt, Homo sapiens
  misc_RNA (1)...(19): siRNA sense strand
aaccagaacagaauauagu

SEQ ID NO: 1369077 - RNA, 19 nt, Homo sapiens
  misc_RNA (1)...(19): siRNA sense strand
gacuacugcucacaaacgu

SEQ ID NO: 1369078 - RNA, 19 nt, Homo sapiens
  misc_RNA (1)...(19): siRNA sense strand
ggagguaaccgugacuacu

SEQ ID NO: 1369079 - RNA, 19 nt, Homo sapiens
  misc_RNA (1)...(19): siRNA sense strand
agcagaaacugaaaacuga

SEQ ID NO: 1369080 - RNA, 19 nt, Homo sapiens
  misc_RNA (1)...(19): siRNA sense strand
uaaaguaccuacccagaug

SEQ ID NO: 1369081 - RNA, 19 nt, Homo sapiens
  misc_RNA (1)...(19): siRNA sense strand
gaacgacaccacagaagaa

SEQ ID NO: 1369082 - RNA, 19 nt, Homo sapiens
  misc_RNA (1)...(19): siRNA sense strand
guagagaaauggucagaag

SEQ ID NO: 1369083 - RNA, 19 nt, Homo sapiens
  misc_RNA (1)...(19): siRNA sense strand
gagaaauggucagaaggaa

SEQ ID NO: 1369084 - RNA, 19 nt, Homo sapiens
  misc_RNA (1)...(19): siRNA sense strand
ggaagcaguugguggucuu

SEQ ID NO: 1369085 - RNA, 19 nt, Homo sapiens
  misc_RNA (1)...(19): siRNA sense strand
cgacaccacagaagaaauu

SEQ ID NO: 1369086 - RNA, 19 nt, Homo sapiens
  misc_RNA (1)...(19): siRNA sense strand
gaaggaacgacaccacaga

SEQ ID NO: 1369087 - RNA, 19 nt, Homo sapiens
  misc_RNA (1)...(19): siRNA sense strand
ggaacgacaccacagaaga

SEQ ID NO: 1369088 - RNA, 19 nt, Homo sapiens
  misc_RNA (1)...(19): siRNA sense strand
gaacagaauauagugacaa

SEQ ID NO: 1369089 - RNA, 19 nt, Homo sapiens
  misc_RNA (1)...(19): siRNA sense strand
caauguaaccagaacagaa

SEQ ID NO: 1369090 - RNA, 19 nt, Homo sapiens
  misc_RNA (1)...(19): siRNA sense strand
guaccuacccagauggaaa

SEQ ID NO: 1369091 - RNA, 19 nt, Homo sapiens
  misc_RNA (1)...(19): siRNA sense strand
gcuugcugcucagauguua

SEQ ID NO: 1369092 - RNA, 19 nt, Homo sapiens
  misc_RNA (1)...(19): siRNA sense strand
guaaccagaacagaauaua

SEQ ID NO: 1369093 - RNA, 19 nt, Homo sapiens
  misc_RNA (1)...(19): siRNA sense strand
ccacagaagaaauuagaau

SEQ ID NO: 1369094 - RNA, 19 nt, Homo sapiens
  misc_RNA (1)...(19): siRNA sense strand
acacagacgaggacaaugu

SEQ ID NO: 1369095 - RNA, 19 nt, Homo sapiens
  misc_RNA (1)...(19): siRNA sense strand
caccagaguuugccuacgu

SEQ ID NO: 1369096 - RNA, 19 nt, Homo sapiens
  misc_RNA (1)...(19): siRNA sense strand
ccacccaguuuccaucagu

SEQ ID NO: 1369097 - RNA, 19 nt, Homo sapiens
  misc_RNA (1)...(19): siRNA sense strand
ccagaacagaauauaguga

SEQ ID NO: 1369098 - RNA, 19 nt, Homo sapiens
  misc_RNA (1)...(19): siRNA sense strand
gagcaaacggaagcaguug

SEQ ID NO: 1369099 - RNA, 19 nt, Homo sapiens
  misc_RNA (1)...(19): siRNA sense strand
caccacagaagaaauuaga

SEQ ID NO: 1369100 - RNA, 19 nt, Homo sapiens
  misc_RNA (1)...(19): siRNA sense strand
agagaaauggucagaagga

SEQ ID NO: 1369101 - RNA, 19 nt, Homo sapiens
  misc_RNA (1)...(19): siRNA sense strand
gcaaacggaagcaguuggu

SEQ ID NO: 1369102 - RNA, 19 nt, Homo sapiens
  misc_RNA (1)...(19): siRNA sense strand
uaaccagaacagaauauag

SEQ ID NO: 1369103 - RNA, 19 nt, Homo sapiens
  misc_RNA (1)...(19): siRNA sense strand
gaggacaauguaaccagaa

SEQ ID NO: 1369104 - RNA, 19 nt, Homo sapiens
  misc_RNA (1)...(19): siRNA sense strand
cacagacgaggacaaugua

SEQ ID NO: 1369105 - RNA, 19 nt, Homo sapiens
  misc_RNA (1)...(19): siRNA sense strand
gcaguugguggucuuucuu

SEQ ID NO: 1369106 - RNA, 19 nt, Homo sapiens
  misc_RNA (1)...(19): siRNA sense strand
ccaguuuccaucaguuuau

SEQ ID NO: 1369107 - RNA, 19 nt, Homo sapiens
  misc_RNA (1)...(19): siRNA sense strand
cuaaaguaccuacccagau

SEQ ID NO: 1369108 - RNA, 19 nt, Homo sapiens
  misc_RNA (1)...(19): siRNA sense strand
gacaccacagaagaaauua

SEQ ID NO: 1369109 - RNA, 19 nt, Homo sapiens
  misc_RNA (1)...(19): siRNA sense strand
cacagaagaaauuagaaug

SEQ ID NO: 1369110 - RNA, 19 nt, Homo sapiens
  misc_RNA (1)...(19): siRNA sense strand
ugagcaaacggaagcaguu

SEQ ID NO: 1369111 - RNA, 19 nt, Homo sapiens
  misc_RNA (1)...(19): siRNA sense strand
ggacaauguaaccagaaca

SEQ ID NO: 1369112 - RNA, 19 nt, Homo sapiens
  misc_RNA (1)...(19): siRNA sense strand
gaagcaguugguggucuuu

SEQ ID NO: 1369113 - RNA, 19 nt, Homo sapiens
  misc_RNA (1)...(19): siRNA sense strand
agaacagaauauagugaca

SEQ ID NO: 1369114 - RNA, 19 nt, Homo sapiens
  misc_RNA (1)...(19): siRNA sense strand
aauguaaccagaacagaau

SEQ ID NO: 1369115 - RNA, 19 nt, Homo sapiens
  misc_RNA (1)...(19): siRNA sense strand
acagcugucucaccagagu

SEQ ID NO: 1369116 - RNA, 19 nt, Homo sapiens
  misc_RNA (1)...(19): siRNA sense strand
agacacagacgaggacaau

SEQ ID NO: 1369117 - RNA, 19 nt, Homo sapiens
  misc_RNA (1)...(19): siRNA sense strand
aaccagaacagaauauagu

SEQ ID NO: 1369118 - RNA, 19 nt, Homo sapiens
  misc_RNA (1)...(19): siRNA sense strand
ugacaaaugugcucccuuu

SEQ ID NO: 1369119 - RNA, 19 nt, Homo sapiens
  misc_RNA (1)...(19): siRNA sense strand
ucacaaacgucgcaaagca

SEQ ID NO: 1369120 - RNA, 19 nt, Homo sapiens
  misc_RNA (1)...(19): siRNA sense strand
ggaagcaguugguggucuu

SEQ ID NO: 1369121 - RNA, 19 nt, Homo sapiens
  misc_RNA (1)...(19): siRNA sense strand
gaacagaauauagugacaa

SEQ ID NO: 1369122 - RNA, 19 nt, Homo sapiens
  misc_RNA (1)...(19): siRNA sense strand
caauguaaccagaacagaa

SEQ ID NO: 1369123 - RNA, 19 nt, Homo sapiens
  misc_RNA (1)...(19): siRNA sense strand
gcuugcugcucagauguua

SEQ ID NO: 1369124 - RNA, 19 nt, Homo sapiens
  misc_RNA (1)...(19): siRNA sense strand
guaaccagaacagaauaua

SEQ ID NO: 1369125 - RNA, 19 nt, Homo sapiens
  misc_RNA (1)...(19): siRNA sense strand
uucaggaucuggugacaaa

SEQ ID NO: 1369126 - RNA, 19 nt, Homo sapiens
  misc_RNA (1)...(19): siRNA sense strand
ucgcaaagcagaaacugaa

SEQ ID NO: 1369127 - RNA, 19 nt, Homo sapiens
  misc_RNA (1)...(19): siRNA sense strand
gagguaaccgugacuacug

SEQ ID NO: 1369128 - RNA, 19 nt, Homo sapiens
  misc_RNA (1)...(19): siRNA sense strand
acacagacgaggacaaugu

SEQ ID NO: 1369129 - RNA, 19 nt, Homo sapiens
  misc_RNA (1)...(19): siRNA sense strand
caccagaguuugccuacgu

SEQ ID NO: 1369130 - RNA, 19 nt, Homo sapiens
  misc_RNA (1)...(19): siRNA sense strand
ccacccaguuuccaucagu

SEQ ID NO: 1369131 - RNA, 19 nt, Homo sapiens
  misc_RNA (1)...(19): siRNA sense strand
gugcucccuuuggaaguua

SEQ ID NO: 1369132 - RNA, 19 nt, Homo sapiens
  misc_RNA (1)...(19): siRNA sense strand
ccagaacagaauauaguga

SEQ ID NO: 1369133 - RNA, 19 nt, Homo sapiens
  misc_RNA (1)...(19): siRNA sense strand
gagcaaacggaagcaguug

SEQ ID NO: 1369134 - RNA, 19 nt, Homo sapiens
  misc_RNA (1)...(19): siRNA sense strand
uaaccagaacagaauauag

SEQ ID NO: 1369135 - RNA, 19 nt, Homo sapiens
  misc_RNA (1)...(19): siRNA sense strand
gcaaacggaagcaguuggu

SEQ ID NO: 1369136 - RNA, 19 nt, Homo sapiens
  misc_RNA (1)...(19): siRNA sense strand
gaggacaauguaaccagaa

SEQ ID NO: 1369137 - RNA, 19 nt, Homo sapiens
  misc_RNA (1)...(19): siRNA sense strand
aaacgucgcaaagcagaaa

SEQ ID NO: 1369138 - RNA, 19 nt, Homo sapiens
  misc_RNA (1)...(19): siRNA sense strand
gcucacaaacgucgcaaag

SEQ ID NO: 1369139 - RNA, 19 nt, Homo sapiens
  misc_RNA (1)...(19): siRNA sense strand
cacagacgaggacaaugua

SEQ ID NO: 1369140 - RNA, 19 nt, Homo sapiens
  misc_RNA (1)...(19): siRNA sense strand
gcaguugguggucuuucuu

SEQ ID NO: 1369141 - RNA, 19 nt, Homo sapiens
  misc_RNA (1)...(19): siRNA sense strand
ccaguuuccaucaguuuau

SEQ ID NO: 1369142 - RNA, 19 nt, Homo sapiens
  misc_RNA (1)...(19): siRNA sense strand
ugagcaaacggaagcaguu

SEQ ID NO: 1369143 - RNA, 19 nt, Homo sapiens
  misc_RNA (1)...(19): siRNA sense strand
caggaucuggugacaaaug

SEQ ID NO: 1369144 - RNA, 19 nt, Homo sapiens
  misc_RNA (1)...(19): siRNA sense strand
agaacagaauauagugaca

SEQ ID NO: 1369145 - RNA, 19 nt, Homo sapiens
  misc_RNA (1)...(19): siRNA sense strand
gcaaagcagaaacugaaaa

SEQ ID NO: 1369146 - RNA, 19 nt, Homo sapiens
  misc_RNA (1)...(19): siRNA sense strand
cuuuggaaguuacgguauu

SEQ ID NO: 1369147 - RNA, 19 nt, Homo sapiens
  misc_RNA (1)...(19): siRNA sense strand
ggacaauguaaccagaaca

SEQ ID NO: 1369148 - RNA, 19 nt, Homo sapiens
  misc_RNA (1)...(19): siRNA sense strand
gaagcaguugguggucuuu

SEQ ID NO: 1369149 - RNA, 19 nt, Homo sapiens
  misc_RNA (1)...(19): siRNA sense strand
aauguaaccagaacagaau

SEQ ID NO: 1369150 - RNA, 19 nt, Homo sapiens
  misc_RNA (1)...(19): siRNA sense strand
agacacagacgaggacaau

SEQ ID NO: 1369151 - RNA, 19 nt, Homo sapiens
  misc_RNA (1)...(19): siRNA sense strand
acagcugucucaccagagu

SEQ ID NO: 1369152 - RNA, 19 nt, Homo sapiens
  misc_RNA (1)...(19): siRNA sense strand
ggagguaaccgugacuacu

SEQ ID NO: 1369153 - RNA, 19 nt, Homo sapiens
  misc_RNA (1)...(19): siRNA sense strand
gacuacugcucacaaacgu

SEQ ID NO: 1369154 - RNA, 19 nt, Homo sapiens
  misc_RNA (1)...(19): siRNA sense strand
aaccagaacagaauauagu

SEQ ID NO: 1369155 - RNA, 19 nt, Homo sapiens
  misc_RNA (1)...(19): siRNA sense strand
agcagaaacugaaaacuga

SEQ ID NO: 1369156 - RNA, 19 nt, Homo sapiens
  misc_RNA (1)...(19): siRNA sense strand
ugacaaaugugcucccuuu

SEQ ID NO: 1369157 - RNA, 19 nt, Homo sapiens
  misc_RNA (1)...(19): siRNA sense strand
uaaaguaccuacccagaug

SEQ ID NO: 1369158 - RNA, 19 nt, Homo sapiens
  misc_RNA (1)...(19): siRNA sense strand
gaacgacaccacagaagaa

SEQ ID NO: 1369159 - RNA, 19 nt, Homo sapiens
  misc_RNA (1)...(19): siRNA sense strand
guagagaaauggucagaag

SEQ ID NO: 1369160 - RNA, 19 nt, Homo sapiens
  misc_RNA (1)...(19): siRNA sense strand
ucacaaacgucgcaaagca

SEQ ID NO: 1369161 - RNA, 19 nt, Homo sapiens
  misc_RNA (1)...(19): siRNA sense strand
gagaaauggucagaaggaa

SEQ ID NO: 1369162 - RNA, 19 nt, Homo sapiens
  misc_RNA (1)...(19): siRNA sense strand
ggaagcaguugguggucuu

SEQ ID NO: 1369163 - RNA, 19 nt, Homo sapiens
  misc_RNA (1)...(19): siRNA sense strand
cgacaccacagaagaaauu

SEQ ID NO: 1369164 - RNA, 19 nt, Homo sapiens
  misc_RNA (1)...(19): siRNA sense strand
gaaggaacgacaccacaga

SEQ ID NO: 1369165 - RNA, 19 nt, Homo sapiens
  misc_RNA (1)...(19): siRNA sense strand
ggaacgacaccacagaaga

SEQ ID NO: 1369166 - RNA, 19 nt, Homo sapiens
  misc_RNA (1)...(19): siRNA sense strand
gaacagaauauagugacaa

SEQ ID NO: 1369167 - RNA, 19 nt, Homo sapiens
  misc_RNA (1)...(19): siRNA sense strand
caauguaaccagaacagaa

SEQ ID NO: 1369168 - RNA, 19 nt, Homo sapiens
  misc_RNA (1)...(19): siRNA sense strand
guaccuacccagauggaaa

SEQ ID NO: 1369169 - RNA, 19 nt, Homo sapiens
  misc_RNA (1)...(19): siRNA sense strand
gcuugcugcucagauguua

SEQ ID NO: 1369170 - RNA, 19 nt, Homo sapiens
  misc_RNA (1)...(19): siRNA sense strand
guaaccagaacagaauaua

SEQ ID NO: 1369171 - RNA, 19 nt, Homo sapiens
  misc_RNA (1)...(19): siRNA sense strand
ccacagaagaaauuagaau

SEQ ID NO: 1369172 - RNA, 19 nt, Homo sapiens
  misc_RNA (1)...(19): siRNA sense strand
uucaggaucuggugacaaa

SEQ ID NO: 1369173 - RNA, 19 nt, Homo sapiens
  misc_RNA (1)...(19): siRNA sense strand
ucgcaaagcagaaacugaa

SEQ ID NO: 1369174 - RNA, 19 nt, Homo sapiens
  misc_RNA (1)...(19): siRNA sense strand
gagguaaccgugacuacug

SEQ ID NO: 1369175 - RNA, 19 nt, Homo sapiens
  misc_RNA (1)...(19): siRNA sense strand
acacagacgaggacaaugu

SEQ ID NO: 1369176 - RNA, 19 nt, Homo sapiens
  misc_RNA (1)...(19): siRNA sense strand
caccagaguuugccuacgu

SEQ ID NO: 1369177 - RNA, 19 nt, Homo sapiens
  misc_RNA (1)...(19): siRNA sense strand
ccacccaguuuccaucagu

SEQ ID NO: 1369178 - RNA, 19 nt, Homo sapiens
  misc_RNA (1)...(19): siRNA sense strand
gugcucccuuuggaaguua

SEQ ID NO: 1369179 - RNA, 19 nt, Homo sapiens
  misc_RNA (1)...(19): siRNA sense strand
ccagaacagaauauaguga

SEQ ID NO: 1369180 - RNA, 19 nt, Homo sapiens
  misc_RNA (1)...(19): siRNA sense strand
gagcaaacggaagcaguug

SEQ ID NO: 1369181 - RNA, 19 nt, Homo sapiens
  misc_RNA (1)...(19): siRNA sense strand
caccacagaagaaauuaga

SEQ ID NO: 1369182 - RNA, 19 nt, Homo sapiens
  misc_RNA (1)...(19): siRNA sense strand
uaaccagaacagaauauag

SEQ ID NO: 1369183 - RNA, 19 nt, Homo sapiens
  misc_RNA (1)...(19): siRNA sense strand
gcaaacggaagcaguuggu

SEQ ID NO: 1369184 - RNA, 19 nt, Homo sapiens
  misc_RNA (1)...(19): siRNA sense strand
agagaaauggucagaagga

SEQ ID NO: 1369185 - RNA, 19 nt, Homo sapiens
  misc_RNA (1)...(19): siRNA sense strand
gaggacaauguaaccagaa

SEQ ID NO: 1369186 - RNA, 19 nt, Homo sapiens
  misc_RNA (1)...(19): siRNA sense strand
aaacgucgcaaagcagaaa

SEQ ID NO: 1369187 - RNA, 19 nt, Homo sapiens
  misc_RNA (1)...(19): siRNA sense strand
gcucacaaacgucgcaaag

SEQ ID NO: 1369188 - RNA, 19 nt, Homo sapiens
  misc_RNA (1)...(19): siRNA sense strand
cacagacgaggacaaugua

SEQ ID NO: 1369189 - RNA, 19 nt, Homo sapiens
  misc_RNA (1)...(19): siRNA sense strand
gcaguugguggucuuucuu

SEQ ID NO: 1369190 - RNA, 19 nt, Homo sapiens
  misc_RNA (1)...(19): siRNA sense strand
ccaguuuccaucaguuuau

SEQ ID NO: 1369191 - RNA, 19 nt, Homo sapiens
  misc_RNA (1)...(19): siRNA sense strand
gacaccacagaagaaauua

SEQ ID NO: 1369192 - RNA, 19 nt, Homo sapiens
  misc_RNA (1)...(19): siRNA sense strand
cacagaagaaauuagaaug

SEQ ID NO: 1369193 - RNA, 19 nt, Homo sapiens
  misc_RNA (1)...(19): siRNA sense strand
cuaaaguaccuacccagau

SEQ ID NO: 1369194 - RNA, 19 nt, Homo sapiens
  misc_RNA (1)...(19): siRNA sense strand
ugagcaaacggaagcaguu

SEQ ID NO: 1369195 - RNA, 19 nt, Homo sapiens
  misc_RNA (1)...(19): siRNA sense strand
caggaucuggugacaaaug

SEQ ID NO: 1369196 - RNA, 19 nt, Homo sapiens
  misc_RNA (1)...(19): siRNA sense strand
agaacagaauauagugaca

SEQ ID NO: 1369197 - RNA, 19 nt, Homo sapiens
  misc_RNA (1)...(19): siRNA sense strand
gcaaagcagaaacugaaaa

SEQ ID NO: 1369198 - RNA, 19 nt, Homo sapiens
  misc_RNA (1)...(19): siRNA sense strand
cuuuggaaguuacgguauu

SEQ ID NO: 1369199 - RNA, 19 nt, Homo sapiens
  misc_RNA (1)...(19): siRNA sense strand
ggacaauguaaccagaaca

SEQ ID NO: 1369200 - RNA, 19 nt, Homo sapiens
  misc_RNA (1)...(19): siRNA sense strand
gaagcaguugguggucuuu

SEQ ID NO: 1369201 - RNA, 19 nt, Homo sapiens
  misc_RNA (1)...(19): siRNA sense strand
agacacagacgaggacaau

SEQ ID NO: 1369202 - RNA, 19 nt, Homo sapiens
  misc_RNA (1)...(19): siRNA sense strand
aauguaaccagaacagaau

SEQ ID NO: 1369203 - RNA, 19 nt, Homo sapiens
  misc_RNA (1)...(19): siRNA sense strand
acagcugucucaccagagu

SEQ ID NO: 1369204 - RNA, 19 nt, Homo sapiens
  misc_RNA (1)...(19): siRNA sense strand
aaccagaacagaauauagu

SEQ ID NO: 1369205 - RNA, 19 nt, Homo sapiens
  misc_RNA (1)...(19): siRNA sense strand
gacuacugcucacaaacgu

SEQ ID NO: 1369206 - RNA, 19 nt, Homo sapiens
  misc_RNA (1)...(19): siRNA sense strand
ggagguaaccgugacuacu

SEQ ID NO: 1369207 - RNA, 19 nt, Homo sapiens
  misc_RNA (1)...(19): siRNA sense strand
agcagaaacugaaaacuga

SEQ ID NO: 1369208 - RNA, 19 nt, Homo sapiens
  misc_RNA (1)...(19): siRNA sense strand
uaaaguaccuacccagaug

SEQ ID NO: 1369209 - RNA, 19 nt, Homo sapiens
  misc_RNA (1)...(19): siRNA sense strand
gaacgacaccacagaagaa

SEQ ID NO: 1369210 - RNA, 19 nt, Homo sapiens
  misc_RNA (1)...(19): siRNA sense strand
guagagaaauggucagaag

SEQ ID NO: 1369211 - RNA, 19 nt, Homo sapiens
  misc_RNA (1)...(19): siRNA sense strand
gagaaauggucagaaggaa

SEQ ID NO: 1369212 - RNA, 19 nt, Homo sapiens
  misc_RNA (1)...(19): siRNA sense strand
ggaagcaguugguggucuu

SEQ ID NO: 1369213 - RNA, 19 nt, Homo sapiens
  misc_RNA (1)...(19): siRNA sense strand
cgacaccacagaagaaauu

SEQ ID NO: 1369214 - RNA, 19 nt, Homo sapiens
  misc_RNA (1)...(19): siRNA sense strand
gaaggaacgacaccacaga

SEQ ID NO: 1369215 - RNA, 19 nt, Homo sapiens
  misc_RNA (1)...(19): siRNA sense strand
ggaacgacaccacagaaga

SEQ ID NO: 1369216 - RNA, 19 nt, Homo sapiens
  misc_RNA (1)...(19): siRNA sense strand
gaacagaauauagugacaa

SEQ ID NO: 1369217 - RNA, 19 nt, Homo sapiens
  misc_RNA (1)...(19): siRNA sense strand
caauguaaccagaacagaa

SEQ ID NO: 1369218 - RNA, 19 nt, Homo sapiens
  misc_RNA (1)...(19): siRNA sense strand
guaccuacccagauggaaa

SEQ ID NO: 1369219 - RNA, 19 nt, Homo sapiens
  misc_RNA (1)...(19): siRNA sense strand
gcuugcugcucagauguua

SEQ ID NO: 1369220 - RNA, 19 nt, Homo sapiens
  misc_RNA (1)...(19): siRNA sense strand
guaaccagaacagaauaua

SEQ ID NO: 1369221 - RNA, 19 nt, Homo sapiens
  misc_RNA (1)...(19): siRNA sense strand
ccacagaagaaauuagaau

SEQ ID NO: 1369222 - RNA, 19 nt, Homo sapiens
  misc_RNA (1)...(19): siRNA sense strand
acacagacgaggacaaugu

SEQ ID NO: 1369223 - RNA, 19 nt, Homo sapiens
  misc_RNA (1)...(19): siRNA sense strand
caccagaguuugccuacgu

SEQ ID NO: 1369224 - RNA, 19 nt, Homo sapiens
  misc_RNA (1)...(19): siRNA sense strand
ccacccaguuuccaucagu

SEQ ID NO: 1369225 - RNA, 19 nt, Homo sapiens
  misc_RNA (1)...(19): siRNA sense strand
ccagaacagaauauaguga

SEQ ID NO: 1369226 - RNA, 19 nt, Homo sapiens
  misc_RNA (1)...(19): siRNA sense strand
gagcaaacggaagcaguug

SEQ ID NO: 1369227 - RNA, 19 nt, Homo sapiens
  misc_RNA (1)...(19): siRNA sense strand
caccacagaagaaauuaga

SEQ ID NO: 1369228 - RNA, 19 nt, Homo sapiens
  misc_RNA (1)...(19): siRNA sense strand
agagaaauggucagaagga

SEQ ID NO: 1369229 - RNA, 19 nt, Homo sapiens
  misc_RNA (1)...(19): siRNA sense strand
gcaaacggaagcaguuggu

SEQ ID NO: 1369230 - RNA, 19 nt, Homo sapiens
  misc_RNA (1)...(19): siRNA sense strand
uaaccagaacagaauauag

SEQ ID NO: 1369231 - RNA, 19 nt, Homo sapiens
  misc_RNA (1)...(19): siRNA sense strand
gaggacaauguaaccagaa

SEQ ID NO: 1369232 - RNA, 19 nt, Homo sapiens
  misc_RNA (1)...(19): siRNA sense strand
cacagacgaggacaaugua

SEQ ID NO: 1369233 - RNA, 19 nt, Homo sapiens
  misc_RNA (1)...(19): siRNA sense strand
gcaguugguggucuuucuu

SEQ ID NO: 1369234 - RNA, 19 nt, Homo sapiens
  misc_RNA (1)...(19): siRNA sense strand
ccaguuuccaucaguuuau

SEQ ID NO: 1369235 - RNA, 19 nt, Homo sapiens
  misc_RNA (1)...(19): siRNA sense strand
cuaaaguaccuacccagau

SEQ ID NO: 1369236 - RNA, 19 nt, Homo sapiens
  misc_RNA (1)...(19): siRNA sense strand
gacaccacagaagaaauua

SEQ ID NO: 1369237 - RNA, 19 nt, Homo sapiens
  misc_RNA (1)...(19): siRNA sense strand
cacagaagaaauuagaaug

SEQ ID NO: 1369238 - RNA, 19 nt, Homo sapiens
  misc_RNA (1)...(19): siRNA sense strand
ugagcaaacggaagcaguu

SEQ ID NO: 1369239 - RNA, 19 nt, Homo sapiens
  misc_RNA (1)...(19): siRNA sense strand
ggacaauguaaccagaaca

SEQ ID NO: 1369240 - RNA, 19 nt, Homo sapiens
  misc_RNA (1)...(19): siRNA sense strand
gaagcaguugguggucuuu

SEQ ID NO: 1369241 - RNA, 19 nt, Homo sapiens
  misc_RNA (1)...(19): siRNA sense strand
agaacagaauauagugaca

SEQ ID NO: 1369242 - RNA, 19 nt, Homo sapiens
  misc_RNA (1)...(19): siRNA sense strand
aauguaaccagaacagaau

SEQ ID NO: 1369243 - RNA, 19 nt, Homo sapiens
  misc_RNA (1)...(19): siRNA sense strand
acagcugucucaccagagu

SEQ ID NO: 1369244 - RNA, 19 nt, Homo sapiens
  misc_RNA (1)...(19): siRNA sense strand
agacacagacgaggacaau

SEQ ID NO: 1369245 - RNA, 19 nt, Homo sapiens
  misc_RNA (1)...(19): siRNA sense strand
aaccagaacagaauauagu

SEQ ID NO: 1369246 - RNA, 19 nt, Homo sapiens
  misc_RNA (1)...(19): siRNA sense strand
ugacaaaugugcucccuuu

SEQ ID NO: 1369247 - RNA, 19 nt, Homo sapiens
  misc_RNA (1)...(19): siRNA sense strand
uaaaguaccuacccagaug

SEQ ID NO: 1369248 - RNA, 19 nt, Homo sapiens
  misc_RNA (1)...(19): siRNA sense strand
gaacgacaccacagaagaa

SEQ ID NO: 1369249 - RNA, 19 nt, Homo sapiens
  misc_RNA (1)...(19): siRNA sense strand
guagagaaauggucagaag

SEQ ID NO: 1369250 - RNA, 19 nt, Homo sapiens
  misc_RNA (1)...(19): siRNA sense strand
ucacaaacgucgcaaagca

SEQ ID NO: 1369251 - RNA, 19 nt, Homo sapiens
  misc_RNA (1)...(19): siRNA sense strand
gagaaauggucagaaggaa

SEQ ID NO: 1369252 - RNA, 19 nt, Homo sapiens
  misc_RNA (1)...(19): siRNA sense strand
ggaagcaguugguggucuu

SEQ ID NO: 1369253 - RNA, 19 nt, Homo sapiens
  misc_RNA (1)...(19): siRNA sense strand
cgacaccacagaagaaauu

SEQ ID NO: 1369254 - RNA, 19 nt, Homo sapiens
  misc_RNA (1)...(19): siRNA sense strand
gaaggaacgacaccacaga

SEQ ID NO: 1369255 - RNA, 19 nt, Homo sapiens
  misc_RNA (1)...(19): siRNA sense strand
ggaacgacaccacagaaga

SEQ ID NO: 1369256 - RNA, 19 nt, Homo sapiens
  misc_RNA (1)...(19): siRNA sense strand
gaacagaauauagugacaa

SEQ ID NO: 1369257 - RNA, 19 nt, Homo sapiens
  misc_RNA (1)...(19): siRNA sense strand
caauguaaccagaacagaa

SEQ ID NO: 1369258 - RNA, 19 nt, Homo sapiens
  misc_RNA (1)...(19): siRNA sense strand
guaccuacccagauggaaa

SEQ ID NO: 1369259 - RNA, 19 nt, Homo sapiens
  misc_RNA (1)...(19): siRNA sense strand
gcuugcugcucagauguua

SEQ ID NO: 1369260 - RNA, 19 nt, Homo sapiens
  misc_RNA (1)...(19): siRNA sense strand
guaaccagaacagaauaua

SEQ ID NO: 1369261 - RNA, 19 nt, Homo sapiens
  misc_RNA (1)...(19): siRNA sense strand
ccacagaagaaauuagaau

SEQ ID NO: 1369262 - RNA, 19 nt, Homo sapiens
  misc_RNA (1)...(19): siRNA sense strand
uucaggaucuggugacaaa

SEQ ID NO: 1369263 - RNA, 19 nt, Homo sapiens
  misc_RNA (1)...(19): siRNA sense strand
ucgcaaagcagaaacugaa

SEQ ID NO: 1369264 - RNA, 19 nt, Homo sapiens
  misc_RNA (1)...(19): siRNA sense strand
gagguaaccgugacuacug

SEQ ID NO: 1369265 - RNA, 19 nt, Homo sapiens
  misc_RNA (1)...(19): siRNA sense strand
acacagacgaggacaaugu

SEQ ID NO: 1369266 - RNA, 19 nt, Homo sapiens
  misc_RNA (1)...(19): siRNA sense strand
caccagaguuugccuacgu

SEQ ID NO: 1369267 - RNA, 19 nt, Homo sapiens
  misc_RNA (1)...(19): siRNA sense strand
ccacccaguuuccaucagu

SEQ ID NO: 1369268 - RNA, 19 nt, Homo sapiens
  misc_RNA (1)...(19): siRNA sense strand
gugcucccuuuggaaguua

SEQ ID NO: 1369269 - RNA, 19 nt, Homo sapiens
  misc_RNA (1)...(19): siRNA sense strand
ccagaacagaauauaguga

SEQ ID NO: 1369270 - RNA, 19 nt, Homo sapiens
  misc_RNA (1)...(19): siRNA sense strand
gagcaaacggaagcaguug

SEQ ID NO: 1369271 - RNA, 19 nt, Homo sapiens
  misc_RNA (1)...(19): siRNA sense strand
caccacagaagaaauuaga

SEQ ID NO: 1369272 - RNA, 19 nt, Homo sapiens
  misc_RNA (1)...(19): siRNA sense strand
uaaccagaacagaauauag

SEQ ID NO: 1369273 - RNA, 19 nt, Homo sapiens
  misc_RNA (1)...(19): siRNA sense strand
gcaaacggaagcaguuggu

SEQ ID NO: 1369274 - RNA, 19 nt, Homo sapiens
  misc_RNA (1)...(19): siRNA sense strand
agagaaauggucagaagga

SEQ ID NO: 1369275 - RNA, 19 nt, Homo sapiens
  misc_RNA (1)...(19): siRNA sense strand
gaggacaauguaaccagaa

SEQ ID NO: 1369276 - RNA, 19 nt, Homo sapiens
  misc_RNA (1)...(19): siRNA sense strand
aaacgucgcaaagcagaaa

SEQ ID NO: 1369277 - RNA, 19 nt, Homo sapiens
  misc_RNA (1)...(19): siRNA sense strand
gcucacaaacgucgcaaag

SEQ ID NO: 1369278 - RNA, 19 nt, Homo sapiens
  misc_RNA (1)...(19): siRNA sense strand
cacagacgaggacaaugua

SEQ ID NO: 1369279 - RNA, 19 nt, Homo sapiens
  misc_RNA (1)...(19): siRNA sense strand
gcaguugguggucuuucuu

SEQ ID NO: 1369280 - RNA, 19 nt, Homo sapiens
  misc_RNA (1)...(19): siRNA sense strand
ccaguuuccaucaguuuau

SEQ ID NO: 1369281 - RNA, 19 nt, Homo sapiens
  misc_RNA (1)...(19): siRNA sense strand
gacaccacagaagaaauua

SEQ ID NO: 1369282 - RNA, 19 nt, Homo sapiens
  misc_RNA (1)...(19): siRNA sense strand
cacagaagaaauuagaaug

SEQ ID NO: 1369283 - RNA, 19 nt, Homo sapiens
  misc_RNA (1)...(19): siRNA sense strand
cuaaaguaccuacccagau

SEQ ID NO: 1369284 - RNA, 19 nt, Homo sapiens
  misc_RNA (1)...(19): siRNA sense strand
ugagcaaacggaagcaguu

SEQ ID NO: 1369285 - RNA, 19 nt, Homo sapiens
  misc_RNA (1)...(19): siRNA sense strand
caggaucuggugacaaaug

SEQ ID NO: 1369286 - RNA, 19 nt, Homo sapiens
  misc_RNA (1)...(19): siRNA sense strand
agaacagaauauagugaca

SEQ ID NO: 1369287 - RNA, 19 nt, Homo sapiens
  misc_RNA (1)...(19): siRNA sense strand
gcaaagcagaaacugaaaa

SEQ ID NO: 1369288 - RNA, 19 nt, Homo sapiens
  misc_RNA (1)...(19): siRNA sense strand
cuuuggaaguuacgguauu

SEQ ID NO: 1369289 - RNA, 19 nt, Homo sapiens
  misc_RNA (1)...(19): siRNA sense strand
ggacaauguaaccagaaca

SEQ ID NO: 1369290 - RNA, 19 nt, Homo sapiens
  misc_RNA (1)...(19): siRNA sense strand
gaagcaguugguggucuuu

SEQ ID NO: 1369291 - RNA, 19 nt, Homo sapiens
  misc_RNA (1)...(19): siRNA sense strand
agacacagacgaggacaau

SEQ ID NO: 1369292 - RNA, 19 nt, Homo sapiens
  misc_RNA (1)...(19): siRNA sense strand
aauguaaccagaacagaau

SEQ ID NO: 1369293 - RNA, 19 nt, Homo sapiens
  misc_RNA (1)...(19): siRNA sense strand
acagcugucucaccagagu

SEQ ID NO: 1369294 - RNA, 19 nt, Homo sapiens
  misc_RNA (1)...(19): siRNA sense strand
aaccagaacagaauauagu

SEQ ID NO: 1369295 - RNA, 19 nt, Homo sapiens
  misc_RNA (1)...(19): siRNA sense strand
gacuacugcucacaaacgu

SEQ ID NO: 1369296 - RNA, 19 nt, Homo sapiens
  misc_RNA (1)...(19): siRNA sense strand
ggagguaaccgugacuacu

SEQ ID NO: 1369297 - RNA, 19 nt, Homo sapiens
  misc_RNA (1)...(19): siRNA sense strand
agcagaaacugaaaacuga

SEQ ID NO: 1369298 - RNA, 19 nt, Homo sapiens
  misc_RNA (1)...(19): siRNA sense strand
ugacaaaugugcucccuuu

SEQ ID NO: 1369299 - RNA, 19 nt, Homo sapiens
  misc_RNA (1)...(19): siRNA sense strand
uaaaguaccuacccagaug

SEQ ID NO: 1369300 - RNA, 19 nt, Homo sapiens
  misc_RNA (1)...(19): siRNA sense strand
gaacgacaccacagaagaa

SEQ ID NO: 1369301 - RNA, 19 nt, Homo sapiens
  misc_RNA (1)...(19): siRNA sense strand
guagagaaauggucagaag

SEQ ID NO: 1369302 - RNA, 19 nt, Homo sapiens
  misc_RNA (1)...(19): siRNA sense strand
ucacaaacgucgcaaagca

SEQ ID NO: 1369303 - RNA, 19 nt, Homo sapiens
  misc_RNA (1)...(19): siRNA sense strand
gagaaauggucagaaggaa

SEQ ID NO: 1369304 - RNA, 19 nt, Homo sapiens
  misc_RNA (1)...(19): siRNA sense strand
ggaagcaguugguggucuu

SEQ ID NO: 1369305 - RNA, 19 nt, Homo sapiens
  misc_RNA (1)...(19): siRNA sense strand
cgacaccacagaagaaauu

SEQ ID NO: 1369306 - RNA, 19 nt, Homo sapiens
  misc_RNA (1)...(19): siRNA sense strand
gaaggaacgacaccacaga

SEQ ID NO: 1369307 - RNA, 19 nt, Homo sapiens
  misc_RNA (1)...(19): siRNA sense strand
ggaacgacaccacagaaga

SEQ ID NO: 1369308 - RNA, 19 nt, Homo sapiens
  misc_RNA (1)...(19): siRNA sense strand
gaacagaauauagugacaa

SEQ ID NO: 1369309 - RNA, 19 nt, Homo sapiens
  misc_RNA (1)...(19): siRNA sense strand
caauguaaccagaacagaa

SEQ ID NO: 1369310 - RNA, 19 nt, Homo sapiens
  misc_RNA (1)...(19): siRNA sense strand
guaccuacccagauggaaa

SEQ ID NO: 1369311 - RNA, 19 nt, Homo sapiens
  misc_RNA (1)...(19): siRNA sense strand
gcuugcugcucagauguua

SEQ ID NO: 1369312 - RNA, 19 nt, Homo sapiens
  misc_RNA (1)...(19): siRNA sense strand
guaaccagaacagaauaua

SEQ ID NO: 1369313 - RNA, 19 nt, Homo sapiens
  misc_RNA (1)...(19): siRNA sense strand
ccacagaagaaauuagaau

SEQ ID NO: 1369314 - RNA, 19 nt, Homo sapiens
  misc_RNA (1)...(19): siRNA sense strand
uucaggaucuggugacaaa

SEQ ID NO: 1369315 - RNA, 19 nt, Homo sapiens
  misc_RNA (1)...(19): siRNA sense strand
ucgcaaagcagaaacugaa

SEQ ID NO: 1369316 - RNA, 19 nt, Homo sapiens
  misc_RNA (1)...(19): siRNA sense strand
gagguaaccgugacuacug

SEQ ID NO: 1369317 - RNA, 19 nt, Homo sapiens
  misc_RNA (1)...(19): siRNA sense strand
acacagacgaggacaaugu

SEQ ID NO: 1369318 - RNA, 19 nt, Homo sapiens
  misc_RNA (1)...(19): siRNA sense strand
caccagaguuugccuacgu

SEQ ID NO: 1369319 - RNA, 19 nt, Homo sapiens
  misc_RNA (1)...(19): siRNA sense strand
ccacccaguuuccaucagu

SEQ ID NO: 1369320 - RNA, 19 nt, Homo sapiens
  misc_RNA (1)...(19): siRNA sense strand
gugcucccuuuggaaguua

SEQ ID NO: 1369321 - RNA, 19 nt, Homo sapiens
  misc_RNA (1)...(19): siRNA sense strand
ccagaacagaauauaguga

SEQ ID NO: 1369322 - RNA, 19 nt, Homo sapiens
  misc_RNA (1)...(19): siRNA sense strand
gagcaaacggaagcaguug

SEQ ID NO: 1369323 - RNA, 19 nt, Homo sapiens
  misc_RNA (1)...(19): siRNA sense strand
caccacagaagaaauuaga

SEQ ID NO: 1369324 - RNA, 19 nt, Homo sapiens
  misc_RNA (1)...(19): siRNA sense strand
uaaccagaacagaauauag

SEQ ID NO: 1369325 - RNA, 19 nt, Homo sapiens
  misc_RNA (1)...(19): siRNA sense strand
gcaaacggaagcaguuggu

SEQ ID NO: 1369326 - RNA, 19 nt, Homo sapiens
  misc_RNA (1)...(19): siRNA sense strand
agagaaauggucagaagga

SEQ ID NO: 1369327 - RNA, 19 nt, Homo sapiens
  misc_RNA (1)...(19): siRNA sense strand
gaggacaauguaaccagaa

SEQ ID NO: 1369328 - RNA, 19 nt, Homo sapiens
  misc_RNA (1)...(19): siRNA sense strand
aaacgucgcaaagcagaaa

SEQ ID NO: 1369329 - RNA, 19 nt, Homo sapiens
  misc_RNA (1)...(19): siRNA sense strand
gcucacaaacgucgcaaag

SEQ ID NO: 1369330 - RNA, 19 nt, Homo sapiens
  misc_RNA (1)...(19): siRNA sense strand
cacagacgaggacaaugua

SEQ ID NO: 1369331 - RNA, 19 nt, Homo sapiens
  misc_RNA (1)...(19): siRNA sense strand
gcaguugguggucuuucuu

SEQ ID NO: 1369332 - RNA, 19 nt, Homo sapiens
  misc_RNA (1)...(19): siRNA sense strand
ccaguuuccaucaguuuau

SEQ ID NO: 1369333 - RNA, 19 nt, Homo sapiens
  misc_RNA (1)...(19): siRNA sense strand
gacaccacagaagaaauua

SEQ ID NO: 1369334 - RNA, 19 nt, Homo sapiens
  misc_RNA (1)...(19): siRNA sense strand
cacagaagaaauuagaaug

SEQ ID NO: 1369335 - RNA, 19 nt, Homo sapiens
  misc_RNA (1)...(19): siRNA sense strand
cuaaaguaccuacccagau

SEQ ID NO: 1369336 - RNA, 19 nt, Homo sapiens
  misc_RNA (1)...(19): siRNA sense strand
ugagcaaacggaagcaguu

SEQ ID NO: 1369337 - RNA, 19 nt, Homo sapiens
  misc_RNA (1)...(19): siRNA sense strand
caggaucuggugacaaaug

SEQ ID NO: 1369338 - RNA, 19 nt, Homo sapiens
  misc_RNA (1)...(19): siRNA sense strand
agaacagaauauagugaca

SEQ ID NO: 1369339 - RNA, 19 nt, Homo sapiens
  misc_RNA (1)...(19): siRNA sense strand
gcaaagcagaaacugaaaa

SEQ ID NO: 1369340 - RNA, 19 nt, Homo sapiens
  misc_RNA (1)...(19): siRNA sense strand
cuuuggaaguuacgguauu

SEQ ID NO: 1369341 - RNA, 19 nt, Homo sapiens
  misc_RNA (1)...(19): siRNA sense strand
ggacaauguaaccagaaca

SEQ ID NO: 1369342 - RNA, 19 nt, Homo sapiens
  misc_RNA (1)...(19): siRNA sense strand
gaagcaguugguggucuuu

SEQ ID NO: 1369343 - RNA, 19 nt, Homo sapiens
  misc_RNA (1)...(19): siRNA sense strand
agacacagacgaggacaau

SEQ ID NO: 1369344 - RNA, 19 nt, Homo sapiens
  misc_RNA (1)...(19): siRNA sense strand
aauguaaccagaacagaau

SEQ ID NO: 1369345 - RNA, 19 nt, Homo sapiens
  misc_RNA (1)...(19): siRNA sense strand
acagcugucucaccagagu

SEQ ID NO: 1369346 - RNA, 19 nt, Homo sapiens
  misc_RNA (1)...(19): siRNA sense strand
aaccagaacagaauauagu

SEQ ID NO: 1369347 - RNA, 19 nt, Homo sapiens
  misc_RNA (1)...(19): siRNA sense strand
gacuacugcucacaaacgu

SEQ ID NO: 1369348 - RNA, 19 nt, Homo sapiens
  misc_RNA (1)...(19): siRNA sense strand
ggagguaaccgugacuacu

SEQ ID NO: 1369349 - RNA, 19 nt, Homo sapiens
  misc_RNA (1)...(19): siRNA sense strand
agcagaaacugaaaacuga

SEQ ID NO: 1369350 - RNA, 19 nt, Homo sapiens
  misc_RNA (1)...(19): siRNA sense strand
uaaaguaccuacccagaug

SEQ ID NO: 1369351 - RNA, 19 nt, Homo sapiens
  misc_RNA (1)...(19): siRNA sense strand
gaacgacaccacagaagaa

SEQ ID NO: 1369352 - RNA, 19 nt, Homo sapiens
  misc_RNA (1)...(19): siRNA sense strand
guagagaaauggucagaag

SEQ ID NO: 1369353 - RNA, 19 nt, Homo sapiens
  misc_RNA (1)...(19): siRNA sense strand
gagaaauggucagaaggaa

SEQ ID NO: 1369354 - RNA, 19 nt, Homo sapiens
  misc_RNA (1)...(19): siRNA sense strand
ggaagcaguugguggucuu

SEQ ID NO: 1369355 - RNA, 19 nt, Homo sapiens
  misc_RNA (1)...(19): siRNA sense strand
cgacaccacagaagaaauu

SEQ ID NO: 1369356 - RNA, 19 nt, Homo sapiens
  misc_RNA (1)...(19): siRNA sense strand
gaaggaacgacaccacaga

SEQ ID NO: 1369357 - RNA, 19 nt, Homo sapiens
  misc_RNA (1)...(19): siRNA sense strand
ggaacgacaccacagaaga

SEQ ID NO: 1369358 - RNA, 19 nt, Homo sapiens
  misc_RNA (1)...(19): siRNA sense strand
gaacagaauauagugacaa

SEQ ID NO: 1369359 - RNA, 19 nt, Homo sapiens
  misc_RNA (1)...(19): siRNA sense strand
caauguaaccagaacagaa

SEQ ID NO: 1369360 - RNA, 19 nt, Homo sapiens
  misc_RNA (1)...(19): siRNA sense strand
guaccuacccagauggaaa

SEQ ID NO: 1369361 - RNA, 19 nt, Homo sapiens
  misc_RNA (1)...(19): siRNA sense strand
gcuugcugcucagauguua

SEQ ID NO: 1369362 - RNA, 19 nt, Homo sapiens
  misc_RNA (1)...(19): siRNA sense strand
guaaccagaacagaauaua

SEQ ID NO: 1369363 - RNA, 19 nt, Homo sapiens
  misc_RNA (1)...(19): siRNA sense strand
ccacagaagaaauuagaau

SEQ ID NO: 1369364 - RNA, 19 nt, Homo sapiens
  misc_RNA (1)...(19): siRNA sense strand
acacagacgaggacaaugu

SEQ ID NO: 1369365 - RNA, 19 nt, Homo sapiens
  misc_RNA (1)...(19): siRNA sense strand
caccagaguuugccuacgu

SEQ ID NO: 1369366 - RNA, 19 nt, Homo sapiens
  misc_RNA (1)...(19): siRNA sense strand
ccacccaguuuccaucagu

SEQ ID NO: 1369367 - RNA, 19 nt, Homo sapiens
  misc_RNA (1)...(19): siRNA sense strand
ccagaacagaauauaguga

SEQ ID NO: 1369368 - RNA, 19 nt, Homo sapiens
  misc_RNA (1)...(19): siRNA sense strand
gagcaaacggaagcaguug

SEQ ID NO: 1369369 - RNA, 19 nt, Homo sapiens
  misc_RNA (1)...(19): siRNA sense strand
caccacagaagaaauuaga

SEQ ID NO: 1369370 - RNA, 19 nt, Homo sapiens
  misc_RNA (1)...(19): siRNA sense strand
agagaaauggucagaagga

SEQ ID NO: 1369371 - RNA, 19 nt, Homo sapiens
  misc_RNA (1)...(19): siRNA sense strand
gcaaacggaagcaguuggu

SEQ ID NO: 1369372 - RNA, 19 nt, Homo sapiens
  misc_RNA (1)...(19): siRNA sense strand
uaaccagaacagaauauag

SEQ ID NO: 1369373 - RNA, 19 nt, Homo sapiens
  misc_RNA (1)...(19): siRNA sense strand
gaggacaauguaaccagaa

SEQ ID NO: 1369374 - RNA, 19 nt, Homo sapiens
  misc_RNA (1)...(19): siRNA sense strand
cacagacgaggacaaugua

SEQ ID NO: 1369375 - RNA, 19 nt, Homo sapiens
  misc_RNA (1)...(19): siRNA sense strand
gcaguugguggucuuucuu

SEQ ID NO: 1369376 - RNA, 19 nt, Homo sapiens
  misc_RNA (1)...(19): siRNA sense strand
ccaguuuccaucaguuuau

SEQ ID NO: 1369377 - RNA, 19 nt, Homo sapiens
  misc_RNA (1)...(19): siRNA sense strand
cuaaaguaccuacccagau

SEQ ID NO: 1369378 - RNA, 19 nt, Homo sapiens
  misc_RNA (1)...(19): siRNA sense strand
gacaccacagaagaaauua

SEQ ID NO: 1369379 - RNA, 19 nt, Homo sapiens
  misc_RNA (1)...(19): siRNA sense strand
cacagaagaaauuagaaug

SEQ ID NO: 1369380 - RNA, 19 nt, Homo sapiens
  misc_RNA (1)...(19): siRNA sense strand
ugagcaaacggaagcaguu

SEQ ID NO: 1369381 - RNA, 19 nt, Homo sapiens
  misc_RNA (1)...(19): siRNA sense strand
ggacaauguaaccagaaca

SEQ ID NO: 1369382 - RNA, 19 nt, Homo sapiens
  misc_RNA (1)...(19): siRNA sense strand
gaagcaguugguggucuuu

SEQ ID NO: 1369383 - RNA, 19 nt, Homo sapiens
  misc_RNA (1)...(19): siRNA sense strand
agaacagaauauagugaca

SEQ ID NO: 1369384 - RNA, 19 nt, Homo sapiens
  misc_RNA (1)...(19): siRNA sense strand
aauguaaccagaacagaau

SEQ ID NO: 1369385 - RNA, 19 nt, Homo sapiens
  misc_RNA (1)...(19): siRNA sense strand
acagcugucucaccagagu

SEQ ID NO: 1369386 - RNA, 19 nt, Homo sapiens
  misc_RNA (1)...(19): siRNA sense strand
agacacagacgaggacaau

SEQ ID NO: 1369387 - RNA, 19 nt, Homo sapiens
  misc_RNA (1)...(19): siRNA sense strand
aaccagaacagaauauagu

SEQ ID NO: 1369388 - RNA, 19 nt, Homo sapiens
  misc_RNA (1)...(19): siRNA sense strand
ugacaaaugugcucccuuu

SEQ ID NO: 1369389 - RNA, 19 nt, Homo sapiens
  misc_RNA (1)...(19): siRNA sense strand
ucacaaacgucgcaaagca

SEQ ID NO: 1369390 - RNA, 19 nt, Homo sapiens
  misc_RNA (1)...(19): siRNA sense strand
ggaagcaguugguggucuu

SEQ ID NO: 1369391 - RNA, 19 nt, Homo sapiens
  misc_RNA (1)...(19): siRNA sense strand
gaacagaauauagugacaa

SEQ ID NO: 1369392 - RNA, 19 nt, Homo sapiens
  misc_RNA (1)...(19): siRNA sense strand
caauguaaccagaacagaa

SEQ ID NO: 1369393 - RNA, 19 nt, Homo sapiens
  misc_RNA (1)...(19): siRNA sense strand
gcuugcugcucagauguua

SEQ ID NO: 1369394 - RNA, 19 nt, Homo sapiens
  misc_RNA (1)...(19): siRNA sense strand
guaaccagaacagaauaua

SEQ ID NO: 1369395 - RNA, 19 nt, Homo sapiens
  misc_RNA (1)...(19): siRNA sense strand
uucaggaucuggugacaaa

SEQ ID NO: 1369396 - RNA, 19 nt, Homo sapiens
  misc_RNA (1)...(19): siRNA sense strand
ucgcaaagcagaaacugaa

SEQ ID NO: 1369397 - RNA, 19 nt, Homo sapiens
  misc_RNA (1)...(19): siRNA sense strand
gagguaaccgugacuacug

SEQ ID NO: 1369398 - RNA, 19 nt, Homo sapiens
  misc_RNA (1)...(19): siRNA sense strand
acacagacgaggacaaugu

SEQ ID NO: 1369399 - RNA, 19 nt, Homo sapiens
  misc_RNA (1)...(19): siRNA sense strand
caccagaguuugccuacgu

SEQ ID NO: 1369400 - RNA, 19 nt, Homo sapiens
  misc_RNA (1)...(19): siRNA sense strand
ccacccaguuuccaucagu

SEQ ID NO: 1369401 - RNA, 19 nt, Homo sapiens
  misc_RNA (1)...(19): siRNA sense strand
gugcucccuuuggaaguua

SEQ ID NO: 1369402 - RNA, 19 nt, Homo sapiens
  misc_RNA (1)...(19): siRNA sense strand
ccagaacagaauauaguga

SEQ ID NO: 1369403 - RNA, 19 nt, Homo sapiens
  misc_RNA (1)...(19): siRNA sense strand
gagcaaacggaagcaguug

SEQ ID NO: 1369404 - RNA, 19 nt, Homo sapiens
  misc_RNA (1)...(19): siRNA sense strand
uaaccagaacagaauauag

SEQ ID NO: 1369405 - RNA, 19 nt, Homo sapiens
  misc_RNA (1)...(19): siRNA sense strand
gcaaacggaagcaguuggu

SEQ ID NO: 1369406 - RNA, 19 nt, Homo sapiens
  misc_RNA (1)...(19): siRNA sense strand
gaggacaauguaaccagaa

SEQ ID NO: 1369407 - RNA, 19 nt, Homo sapiens
  misc_RNA (1)...(19): siRNA sense strand
aaacgucgcaaagcagaaa

SEQ ID NO: 1369408 - RNA, 19 nt, Homo sapiens
  misc_RNA (1)...(19): siRNA sense strand
gcucacaaacgucgcaaag

SEQ ID NO: 1369409 - RNA, 19 nt, Homo sapiens
  misc_RNA (1)...(19): siRNA sense strand
cacagacgaggacaaugua

SEQ ID NO: 1369410 - RNA, 19 nt, Homo sapiens
  misc_RNA (1)...(19): siRNA sense strand
gcaguugguggucuuucuu

SEQ ID NO: 1369411 - RNA, 19 nt, Homo sapiens
  misc_RNA (1)...(19): siRNA sense strand
ccaguuuccaucaguuuau

SEQ ID NO: 1369412 - RNA, 19 nt, Homo sapiens
  misc_RNA (1)...(19): siRNA sense strand
ugagcaaacggaagcaguu

SEQ ID NO: 1369413 - RNA, 19 nt, Homo sapiens
  misc_RNA (1)...(19): siRNA sense strand
caggaucuggugacaaaug

SEQ ID NO: 1369414 - RNA, 19 nt, Homo sapiens
  misc_RNA (1)...(19): siRNA sense strand
agaacagaauauagugaca

SEQ ID NO: 1369415 - RNA, 19 nt, Homo sapiens
  misc_RNA (1)...(19): siRNA sense strand
gcaaagcagaaacugaaaa

SEQ ID NO: 1369416 - RNA, 19 nt, Homo sapiens
  misc_RNA (1)...(19): siRNA sense strand
cuuuggaaguuacgguauu

SEQ ID NO: 1369417 - RNA, 19 nt, Homo sapiens
  misc_RNA (1)...(19): siRNA sense strand
ggacaauguaaccagaaca

SEQ ID NO: 1369418 - RNA, 19 nt, Homo sapiens
  misc_RNA (1)...(19): siRNA sense strand
gaagcaguugguggucuuu

SEQ ID NO: 1369419 - RNA, 19 nt, Homo sapiens
  misc_RNA (1)...(19): siRNA sense strand
aauguaaccagaacagaau

SEQ ID NO: 1369420 - RNA, 19 nt, Homo sapiens
  misc_RNA (1)...(19): siRNA sense strand
agacacagacgaggacaau

SEQ ID NO: 1369421 - RNA, 19 nt, Homo sapiens
  misc_RNA (1)...(19): siRNA sense strand
acagcugucucaccagagu

SEQ ID NO: 1369422 - RNA, 19 nt, Homo sapiens
  misc_RNA (1)...(19): siRNA sense strand
ggagguaaccgugacuacu

SEQ ID NO: 1369423 - RNA, 19 nt, Homo sapiens
  misc_RNA (1)...(19): siRNA sense strand
gacuacugcucacaaacgu

SEQ ID NO: 1369424 - RNA, 19 nt, Homo sapiens
  misc_RNA (1)...(19): siRNA sense strand
aaccagaacagaauauagu

SEQ ID NO: 1369425 - RNA, 19 nt, Homo sapiens
  misc_RNA (1)...(19): siRNA sense strand
agcagaaacugaaaacuga

SEQ ID NO: 1369426 - RNA, 19 nt, Homo sapiens
  misc_RNA (1)...(19): siRNA sense strand
ugacaaaugugcucccuuu

SEQ ID NO: 1369427 - RNA, 19 nt, Homo sapiens
  misc_RNA (1)...(19): siRNA sense strand
uaaaguaccuacccagaug

SEQ ID NO: 1369428 - RNA, 19 nt, Homo sapiens
  misc_RNA (1)...(19): siRNA sense strand
gaacgacaccacagaagaa

SEQ ID NO: 1369429 - RNA, 19 nt, Homo sapiens
  misc_RNA (1)...(19): siRNA sense strand
guagagaaauggucagaag

SEQ ID NO: 1369430 - RNA, 19 nt, Homo sapiens
  misc_RNA (1)...(19): siRNA sense strand
ucacaaacgucgcaaagca

SEQ ID NO: 1369431 - RNA, 19 nt, Homo sapiens
  misc_RNA (1)...(19): siRNA sense strand
gagaaauggucagaaggaa

SEQ ID NO: 1369432 - RNA, 19 nt, Homo sapiens
  misc_RNA (1)...(19): siRNA sense strand
ggaagcaguugguggucuu

SEQ ID NO: 1369433 - RNA, 19 nt, Homo sapiens
  misc_RNA (1)...(19): siRNA sense strand
cgacaccacagaagaaauu

SEQ ID NO: 1369434 - RNA, 19 nt, Homo sapiens
  misc_RNA (1)...(19): siRNA sense strand
gaaggaacgacaccacaga

SEQ ID NO: 1369435 - RNA, 19 nt, Homo sapiens
  misc_RNA (1)...(19): siRNA sense strand
ggaacgacaccacagaaga

SEQ ID NO: 1369436 - RNA, 19 nt, Homo sapiens
  misc_RNA (1)...(19): siRNA sense strand
gaacagaauauagugacaa

SEQ ID NO: 1369437 - RNA, 19 nt, Homo sapiens
  misc_RNA (1)...(19): siRNA sense strand
caauguaaccagaacagaa

SEQ ID NO: 1369438 - RNA, 19 nt, Homo sapiens
  misc_RNA (1)...(19): siRNA sense strand
guaccuacccagauggaaa

SEQ ID NO: 1369439 - RNA, 19 nt, Homo sapiens
  misc_RNA (1)...(19): siRNA sense strand
gcuugcugcucagauguua

SEQ ID NO: 1369440 - RNA, 19 nt, Homo sapiens
  misc_RNA (1)...(19): siRNA sense strand
guaaccagaacagaauaua

SEQ ID NO: 1369441 - RNA, 19 nt, Homo sapiens
  misc_RNA (1)...(19): siRNA sense strand
ccacagaagaaauuagaau

SEQ ID NO: 1369442 - RNA, 19 nt, Homo sapiens
  misc_RNA (1)...(19): siRNA sense strand
uucaggaucuggugacaaa

SEQ ID NO: 1369443 - RNA, 19 nt, Homo sapiens
  misc_RNA (1)...(19): siRNA sense strand
ucgcaaagcagaaacugaa

SEQ ID NO: 1369444 - RNA, 19 nt, Homo sapiens
  misc_RNA (1)...(19): siRNA sense strand
gagguaaccgugacuacug

SEQ ID NO: 1369445 - RNA, 19 nt, Homo sapiens
  misc_RNA (1)...(19): siRNA sense strand
acacagacgaggacaaugu

SEQ ID NO: 1369446 - RNA, 19 nt, Homo sapiens
  misc_RNA (1)...(19): siRNA sense strand
caccagaguuugccuacgu

SEQ ID NO: 1369447 - RNA, 19 nt, Homo sapiens
  misc_RNA (1)...(19): siRNA sense strand
ccacccaguuuccaucagu

SEQ ID NO: 1369448 - RNA, 19 nt, Homo sapiens
  misc_RNA (1)...(19): siRNA sense strand
gugcucccuuuggaaguua

SEQ ID NO: 1369449 - RNA, 19 nt, Homo sapiens
  misc_RNA (1)...(19): siRNA sense strand
ccagaacagaauauaguga

SEQ ID NO: 1369450 - RNA, 19 nt, Homo sapiens
  misc_RNA (1)...(19): siRNA sense strand
gagcaaacggaagcaguug

SEQ ID NO: 1369451 - RNA, 19 nt, Homo sapiens
  misc_RNA (1)...(19): siRNA sense strand
caccacagaagaaauuaga

SEQ ID NO: 1369452 - RNA, 19 nt, Homo sapiens
  misc_RNA (1)...(19): siRNA sense strand
uaaccagaacagaauauag

SEQ ID NO: 1369453 - RNA, 19 nt, Homo sapiens
  misc_RNA (1)...(19): siRNA sense strand
gcaaacggaagcaguuggu

SEQ ID NO: 1369454 - RNA, 19 nt, Homo sapiens
  misc_RNA (1)...(19): siRNA sense strand
agagaaauggucagaagga

SEQ ID NO: 1369455 - RNA, 19 nt, Homo sapiens
  misc_RNA (1)...(19): siRNA sense strand
gaggacaauguaaccagaa

SEQ ID NO: 1369456 - RNA, 19 nt, Homo sapiens
  misc_RNA (1)...(19): siRNA sense strand
aaacgucgcaaagcagaaa

SEQ ID NO: 1369457 - RNA, 19 nt, Homo sapiens
  misc_RNA (1)...(19): siRNA sense strand
gcucacaaacgucgcaaag

SEQ ID NO: 1369458 - RNA, 19 nt, Homo sapiens
  misc_RNA (1)...(19): siRNA sense strand
cacagacgaggacaaugua

SEQ ID NO: 1369459 - RNA, 19 nt, Homo sapiens
  misc_RNA (1)...(19): siRNA sense strand
gcaguugguggucuuucuu

SEQ ID NO: 1369460 - RNA, 19 nt, Homo sapiens
  misc_RNA (1)...(19): siRNA sense strand
ccaguuuccaucaguuuau

SEQ ID NO: 1369461 - RNA, 19 nt, Homo sapiens
  misc_RNA (1)...(19): siRNA sense strand
gacaccacagaagaaauua

SEQ ID NO: 1369462 - RNA, 19 nt, Homo sapiens
  misc_RNA (1)...(19): siRNA sense strand
cacagaagaaauuagaaug

SEQ ID NO: 1369463 - RNA, 19 nt, Homo sapiens
  misc_RNA (1)...(19): siRNA sense strand
cuaaaguaccuacccagau

SEQ ID NO: 1369464 - RNA, 19 nt, Homo sapiens
  misc_RNA (1)...(19): siRNA sense strand
ugagcaaacggaagcaguu

SEQ ID NO: 1369465 - RNA, 19 nt, Homo sapiens
  misc_RNA (1)...(19): siRNA sense strand
caggaucuggugacaaaug

SEQ ID NO: 1369466 - RNA, 19 nt, Homo sapiens
  misc_RNA (1)...(19): siRNA sense strand
agaacagaauauagugaca

SEQ ID NO: 1369467 - RNA, 19 nt, Homo sapiens
  misc_RNA (1)...(19): siRNA sense strand
gcaaagcagaaacugaaaa

SEQ ID NO: 1369468 - RNA, 19 nt, Homo sapiens
  misc_RNA (1)...(19): siRNA sense strand
cuuuggaaguuacgguauu

SEQ ID NO: 1369469 - RNA, 19 nt, Homo sapiens
  misc_RNA (1)...(19): siRNA sense strand
ggacaauguaaccagaaca

SEQ ID NO: 1369470 - RNA, 19 nt, Homo sapiens
  misc_RNA (1)...(19): siRNA sense strand
gaagcaguugguggucuuu

SEQ ID NO: 1369471 - RNA, 19 nt, Homo sapiens
  misc_RNA (1)...(19): siRNA sense strand
agacacagacgaggacaau

SEQ ID NO: 1369472 - RNA, 19 nt, Homo sapiens
  misc_RNA (1)...(19): siRNA sense strand
aauguaaccagaacagaau

SEQ ID NO: 1369473 - RNA, 19 nt, Homo sapiens
  misc_RNA (1)...(19): siRNA sense strand
acagcugucucaccagagu

SEQ ID NO: 1369474 - RNA, 19 nt, Homo sapiens
  misc_RNA (1)...(19): siRNA sense strand
aaccagaacagaauauagu

SEQ ID NO: 1369475 - RNA, 19 nt, Homo sapiens
  misc_RNA (1)...(19): siRNA sense strand
gacuacugcucacaaacgu

SEQ ID NO: 1369476 - RNA, 19 nt, Homo sapiens
  misc_RNA (1)...(19): siRNA sense strand
ggagguaaccgugacuacu

SEQ ID NO: 1369477 - RNA, 19 nt, Homo sapiens
  misc_RNA (1)...(19): siRNA sense strand
agcagaaacugaaaacuga

SEQ ID NO: 1369478 - RNA, 19 nt, Homo sapiens
  misc_RNA (1)...(19): siRNA sense strand
uaaaguaccuacccagaug

SEQ ID NO: 1369479 - RNA, 19 nt, Homo sapiens
  misc_RNA (1)...(19): siRNA sense strand
gaacgacaccacagaagaa

SEQ ID NO: 1369480 - RNA, 19 nt, Homo sapiens
  misc_RNA (1)...(19): siRNA sense strand
guagagaaauggucagaag

SEQ ID NO: 1369481 - RNA, 19 nt, Homo sapiens
  misc_RNA (1)...(19): siRNA sense strand
gagaaauggucagaaggaa

SEQ ID NO: 1369482 - RNA, 19 nt, Homo sapiens
  misc_RNA (1)...(19): siRNA sense strand
ggaagcaguugguggucuu

SEQ ID NO: 1369483 - RNA, 19 nt, Homo sapiens
  misc_RNA (1)...(19): siRNA sense strand
cgacaccacagaagaaauu

SEQ ID NO: 1369484 - RNA, 19 nt, Homo sapiens
  misc_RNA (1)...(19): siRNA sense strand
gaaggaacgacaccacaga

SEQ ID NO: 1369485 - RNA, 19 nt, Homo sapiens
  misc_RNA (1)...(19): siRNA sense strand
ggaacgacaccacagaaga

SEQ ID NO: 1369486 - RNA, 19 nt, Homo sapiens
  misc_RNA (1)...(19): siRNA sense strand
gaacagaauauagugacaa

SEQ ID NO: 1369487 - RNA, 19 nt, Homo sapiens
  misc_RNA (1)...(19): siRNA sense strand
caauguaaccagaacagaa

SEQ ID NO: 1369488 - RNA, 19 nt, Homo sapiens
  misc_RNA (1)...(19): siRNA sense strand
guaccuacccagauggaaa

SEQ ID NO: 1369489 - RNA, 19 nt, Homo sapiens
  misc_RNA (1)...(19): siRNA sense strand
gcuugcugcucagauguua

SEQ ID NO: 1369490 - RNA, 19 nt, Homo sapiens
  misc_RNA (1)...(19): siRNA sense strand
guaaccagaacagaauaua

SEQ ID NO: 1369491 - RNA, 19 nt, Homo sapiens
  misc_RNA (1)...(19): siRNA sense strand
ccacagaagaaauuagaau

SEQ ID NO: 1369492 - RNA, 19 nt, Homo sapiens
  misc_RNA (1)...(19): siRNA sense strand
acacagacgaggacaaugu

SEQ ID NO: 1369493 - RNA, 19 nt, Homo sapiens
  misc_RNA (1)...(19): siRNA sense strand
caccagaguuugccuacgu

SEQ ID NO: 1369494 - RNA, 19 nt, Homo sapiens
  misc_RNA (1)...(19): siRNA sense strand
ccacccaguuuccaucagu

SEQ ID NO: 1369495 - RNA, 19 nt, Homo sapiens
  misc_RNA (1)...(19): siRNA sense strand
ccagaacagaauauaguga

SEQ ID NO: 1369496 - RNA, 19 nt, Homo sapiens
  misc_RNA (1)...(19): siRNA sense strand
gagcaaacggaagcaguug

SEQ ID NO: 1369497 - RNA, 19 nt, Homo sapiens
  misc_RNA (1)...(19): siRNA sense strand
caccacagaagaaauuaga

SEQ ID NO: 1369498 - RNA, 19 nt, Homo sapiens
  misc_RNA (1)...(19): siRNA sense strand
agagaaauggucagaagga

SEQ ID NO: 1369499 - RNA, 19 nt, Homo sapiens
  misc_RNA (1)...(19): siRNA sense strand
gcaaacggaagcaguuggu

SEQ ID NO: 1369500 - RNA, 19 nt, Homo sapiens
  misc_RNA (1)...(19): siRNA sense strand
uaaccagaacagaauauag

SEQ ID NO: 1369501 - RNA, 19 nt, Homo sapiens
  misc_RNA (1)...(19): siRNA sense strand
gaggacaauguaaccagaa

SEQ ID NO: 1369502 - RNA, 19 nt, Homo sapiens
  misc_RNA (1)...(19): siRNA sense strand
cacagacgaggacaaugua

SEQ ID NO: 1369503 - RNA, 19 nt, Homo sapiens
  misc_RNA (1)...(19): siRNA sense strand
gcaguugguggucuuucuu

SEQ ID NO: 1369504 - RNA, 19 nt, Homo sapiens
  misc_RNA (1)...(19): siRNA sense strand
ccaguuuccaucaguuuau

SEQ ID NO: 1369505 - RNA, 19 nt, Homo sapiens
  misc_RNA (1)...(19): siRNA sense strand
cuaaaguaccuacccagau

SEQ ID NO: 1369506 - RNA, 19 nt, Homo sapiens
  misc_RNA (1)...(19): siRNA sense strand
gacaccacagaagaaauua

SEQ ID NO: 1369507 - RNA, 19 nt, Homo sapiens
  misc_RNA (1)...(19): siRNA sense strand
cacagaagaaauuagaaug

SEQ ID NO: 1369508 - RNA, 19 nt, Homo sapiens
  misc_RNA (1)...(19): siRNA sense strand
ugagcaaacggaagcaguu

SEQ ID NO: 1369509 - RNA, 19 nt, Homo sapiens
  misc_RNA (1)...(19): siRNA sense strand
ggacaauguaaccagaaca

SEQ ID NO: 1369510 - RNA, 19 nt, Homo sapiens
  misc_RNA (1)...(19): siRNA sense strand
gaagcaguugguggucuuu

SEQ ID NO: 1369511 - RNA, 19 nt, Homo sapiens
  misc_RNA (1)...(19): siRNA sense strand
agaacagaauauagugaca

SEQ ID NO: 1369512 - RNA, 19 nt, Homo sapiens
  misc_RNA (1)...(19): siRNA sense strand
aauguaaccagaacagaau

SEQ ID NO: 1369513 - RNA, 19 nt, Homo sapiens
  misc_RNA (1)...(19): siRNA sense strand
acagcugucucaccagagu

SEQ ID NO: 1369514 - RNA, 19 nt, Homo sapiens
  misc_RNA (1)...(19): siRNA sense strand
agacacagacgaggacaau

SEQ ID NO: 1369515 - RNA, 19 nt, Homo sapiens
  misc_RNA (1)...(19): siRNA sense strand
aaccagaacagaauauagu

SEQ ID NO: 1369516 - RNA, 19 nt, Homo sapiens
  misc_RNA (1)...(19): siRNA sense strand
ugacaaaugugcucccuuu

SEQ ID NO: 1369517 - RNA, 19 nt, Homo sapiens
  misc_RNA (1)...(19): siRNA sense strand
uaaaguaccuacccagaug

SEQ ID NO: 1369518 - RNA, 19 nt, Homo sapiens
  misc_RNA (1)...(19): siRNA sense strand
gaacgacaccacagaagaa

SEQ ID NO: 1369519 - RNA, 19 nt, Homo sapiens
  misc_RNA (1)...(19): siRNA sense strand
guagagaaauggucagaag

SEQ ID NO: 1369520 - RNA, 19 nt, Homo sapiens
  misc_RNA (1)...(19): siRNA sense strand
ucacaaacgucgcaaagca

SEQ ID NO: 1369521 - RNA, 19 nt, Homo sapiens
  misc_RNA (1)...(19): siRNA sense strand
gagaaauggucagaaggaa

SEQ ID NO: 1369522 - RNA, 19 nt, Homo sapiens
  misc_RNA (1)...(19): siRNA sense strand
ggaagcaguugguggucuu

SEQ ID NO: 1369523 - RNA, 19 nt, Homo sapiens
  misc_RNA (1)...(19): siRNA sense strand
cgacaccacagaagaaauu

SEQ ID NO: 1369524 - RNA, 19 nt, Homo sapiens
  misc_RNA (1)...(19): siRNA sense strand
gaaggaacgacaccacaga

SEQ ID NO: 1369525 - RNA, 19 nt, Homo sapiens
  misc_RNA (1)...(19): siRNA sense strand
ggaacgacaccacagaaga

SEQ ID NO: 1369526 - RNA, 19 nt, Homo sapiens
  misc_RNA (1)...(19): siRNA sense strand
gaacagaauauagugacaa

SEQ ID NO: 1369527 - RNA, 19 nt, Homo sapiens
  misc_RNA (1)...(19): siRNA sense strand
caauguaaccagaacagaa

SEQ ID NO: 1369528 - RNA, 19 nt, Homo sapiens
  misc_RNA (1)...(19): siRNA sense strand
guaccuacccagauggaaa

SEQ ID NO: 1369529 - RNA, 19 nt, Homo sapiens
  misc_RNA (1)...(19): siRNA sense strand
gcuugcugcucagauguua

SEQ ID NO: 1369530 - RNA, 19 nt, Homo sapiens
  misc_RNA (1)...(19): siRNA sense strand
guaaccagaacagaauaua

SEQ ID NO: 1369531 - RNA, 19 nt, Homo sapiens
  misc_RNA (1)...(19): siRNA sense strand
ccacagaagaaauuagaau

SEQ ID NO: 1369532 - RNA, 19 nt, Homo sapiens
  misc_RNA (1)...(19): siRNA sense strand
uucaggaucuggugacaaa

SEQ ID NO: 1369533 - RNA, 19 nt, Homo sapiens
  misc_RNA (1)...(19): siRNA sense strand
ucgcaaagcagaaacugaa

SEQ ID NO: 1369534 - RNA, 19 nt, Homo sapiens
  misc_RNA (1)...(19): siRNA sense strand
gagguaaccgugacuacug

SEQ ID NO: 1369535 - RNA, 19 nt, Homo sapiens
  misc_RNA (1)...(19): siRNA sense strand
acacagacgaggacaaugu

SEQ ID NO: 1369536 - RNA, 19 nt, Homo sapiens
  misc_RNA (1)...(19): siRNA sense strand
caccagaguuugccuacgu

SEQ ID NO: 1369537 - RNA, 19 nt, Homo sapiens
  misc_RNA (1)...(19): siRNA sense strand
ccacccaguuuccaucagu

SEQ ID NO: 1369538 - RNA, 19 nt, Homo sapiens
  misc_RNA (1)...(19): siRNA sense strand
gugcucccuuuggaaguua

SEQ ID NO: 1369539 - RNA, 19 nt, Homo sapiens
  misc_RNA (1)...(19): siRNA sense strand
ccagaacagaauauaguga

SEQ ID NO: 1369540 - RNA, 19 nt, Homo sapiens
  misc_RNA (1)...(19): siRNA sense strand
gagcaaacggaagcaguug

SEQ ID NO: 1369541 - RNA, 19 nt, Homo sapiens
  misc_RNA (1)...(19): siRNA sense strand
caccacagaagaaauuaga

SEQ ID NO: 1369542 - RNA, 19 nt, Homo sapiens
  misc_RNA (1)...(19): siRNA sense strand
uaaccagaacagaauauag

SEQ ID NO: 1369543 - RNA, 19 nt, Homo sapiens
  misc_RNA (1)...(19): siRNA sense strand
gcaaacggaagcaguuggu

SEQ ID NO: 1369544 - RNA, 19 nt, Homo sapiens
  misc_RNA (1)...(19): siRNA sense strand
agagaaauggucagaagga

SEQ ID NO: 1369545 - RNA, 19 nt, Homo sapiens
  misc_RNA (1)...(19): siRNA sense strand
gaggacaauguaaccagaa

SEQ ID NO: 1369546 - RNA, 19 nt, Homo sapiens
  misc_RNA (1)...(19): siRNA sense strand
aaacgucgcaaagcagaaa

SEQ ID NO: 1369547 - RNA, 19 nt, Homo sapiens
  misc_RNA (1)...(19): siRNA sense strand
gcucacaaacgucgcaaag

SEQ ID NO: 1369548 - RNA, 19 nt, Homo sapiens
  misc_RNA (1)...(19): siRNA sense strand
cacagacgaggacaaugua

SEQ ID NO: 1369549 - RNA, 19 nt, Homo sapiens
  misc_RNA (1)...(19): siRNA sense strand
gcaguugguggucuuucuu

SEQ ID NO: 1369550 - RNA, 19 nt, Homo sapiens
  misc_RNA (1)...(19): siRNA sense strand
ccaguuuccaucaguuuau

SEQ ID NO: 1369551 - RNA, 19 nt, Homo sapiens
  misc_RNA (1)...(19): siRNA sense strand
gacaccacagaagaaauua

SEQ ID NO: 1369552 - RNA, 19 nt, Homo sapiens
  misc_RNA (1)...(19): siRNA sense strand
cacagaagaaauuagaaug

SEQ ID NO: 1369553 - RNA, 19 nt, Homo sapiens
  misc_RNA (1)...(19): siRNA sense strand
cuaaaguaccuacccagau

SEQ ID NO: 1369554 - RNA, 19 nt, Homo sapiens
  misc_RNA (1)...(19): siRNA sense strand
ugagcaaacggaagcaguu

SEQ ID NO: 1369555 - RNA, 19 nt, Homo sapiens
  misc_RNA (1)...(19): siRNA sense strand
caggaucuggugacaaaug

SEQ ID NO: 1369556 - RNA, 19 nt, Homo sapiens
  misc_RNA (1)...(19): siRNA sense strand
agaacagaauauagugaca

SEQ ID NO: 1369557 - RNA, 19 nt, Homo sapiens
  misc_RNA (1)...(19): siRNA sense strand
gcaaagcagaaacugaaaa

SEQ ID NO: 1369558 - RNA, 19 nt, Homo sapiens
  misc_RNA (1)...(19): siRNA sense strand
cuuuggaaguuacgguauu

SEQ ID NO: 1369559 - RNA, 19 nt, Homo sapiens
  misc_RNA (1)...(19): siRNA sense strand
ggacaauguaaccagaaca

SEQ ID NO: 1369560 - RNA, 19 nt, Homo sapiens
  misc_RNA (1)...(19): siRNA sense strand
gaagcaguugguggucuuu

SEQ ID NO: 1369561 - RNA, 19 nt, Homo sapiens
  misc_RNA (1)...(19): siRNA sense strand
agacacagacgaggacaau

SEQ ID NO: 1369562 - RNA, 19 nt, Homo sapiens
  misc_RNA (1)...(19): siRNA sense strand
aauguaaccagaacagaau

SEQ ID NO: 1369563 - RNA, 19 nt, Homo sapiens
  misc_RNA (1)...(19): siRNA sense strand
acagcugucucaccagagu

SEQ ID NO: 1369564 - RNA, 19 nt, Homo sapiens
  misc_RNA (1)...(19): siRNA sense strand
aaccagaacagaauauagu

SEQ ID NO: 1369565 - RNA, 19 nt, Homo sapiens
  misc_RNA (1)...(19): siRNA sense strand
gacuacugcucacaaacgu

SEQ ID NO: 1369566 - RNA, 19 nt, Homo sapiens
  misc_RNA (1)...(19): siRNA sense strand
ggagguaaccgugacuacu

SEQ ID NO: 1369567 - RNA, 19 nt, Homo sapiens
  misc_RNA (1)...(19): siRNA sense strand
agcagaaacugaaaacuga

SEQ ID NO: 1369568 - RNA, 19 nt, Homo sapiens
  misc_RNA (1)...(19): siRNA sense strand
ugacaaaugugcucccuuu

SEQ ID NO: 1369569 - RNA, 19 nt, Homo sapiens
  misc_RNA (1)...(19): siRNA sense strand
uaaaguaccuacccagaug

SEQ ID NO: 1369570 - RNA, 19 nt, Homo sapiens
  misc_RNA (1)...(19): siRNA sense strand
gaacgacaccacagaagaa

SEQ ID NO: 1369571 - RNA, 19 nt, Homo sapiens
  misc_RNA (1)...(19): siRNA sense strand
guagagaaauggucagaag

SEQ ID NO: 1369572 - RNA, 19 nt, Homo sapiens
  misc_RNA (1)...(19): siRNA sense strand
ucacaaacgucgcaaagca

SEQ ID NO: 1369573 - RNA, 19 nt, Homo sapiens
  misc_RNA (1)...(19): siRNA sense strand
gagaaauggucagaaggaa

SEQ ID NO: 1369574 - RNA, 19 nt, Homo sapiens
  misc_RNA (1)...(19): siRNA sense strand
ggaagcaguugguggucuu

SEQ ID NO: 1369575 - RNA, 19 nt, Homo sapiens
  misc_RNA (1)...(19): siRNA sense strand
cgacaccacagaagaaauu

SEQ ID NO: 1369576 - RNA, 19 nt, Homo sapiens
  misc_RNA (1)...(19): siRNA sense strand
gaaggaacgacaccacaga

SEQ ID NO: 1369577 - RNA, 19 nt, Homo sapiens
  misc_RNA (1)...(19): siRNA sense strand
ggaacgacaccacagaaga

SEQ ID NO: 1369578 - RNA, 19 nt, Homo sapiens
  misc_RNA (1)...(19): siRNA sense strand
gaacagaauauagugacaa

SEQ ID NO: 1369579 - RNA, 19 nt, Homo sapiens
  misc_RNA (1)...(19): siRNA sense strand
caauguaaccagaacagaa

SEQ ID NO: 1369580 - RNA, 19 nt, Homo sapiens
  misc_RNA (1)...(19): siRNA sense strand
guaccuacccagauggaaa

SEQ ID NO: 1369581 - RNA, 19 nt, Homo sapiens
  misc_RNA (1)...(19): siRNA sense strand
gcuugcugcucagauguua

SEQ ID NO: 1369582 - RNA, 19 nt, Homo sapiens
  misc_RNA (1)...(19): siRNA sense strand
guaaccagaacagaauaua

SEQ ID NO: 1369583 - RNA, 19 nt, Homo sapiens
  misc_RNA (1)...(19): siRNA sense strand
ccacagaagaaauuagaau

SEQ ID NO: 1369584 - RNA, 19 nt, Homo sapiens
  misc_RNA (1)...(19): siRNA sense strand
uucaggaucuggugacaaa

SEQ ID NO: 1369585 - RNA, 19 nt, Homo sapiens
  misc_RNA (1)...(19): siRNA sense strand
ucgcaaagcagaaacugaa

SEQ ID NO: 1369586 - RNA, 19 nt, Homo sapiens
  misc_RNA (1)...(19): siRNA sense strand
gagguaaccgugacuacug

SEQ ID NO: 1369587 - RNA, 19 nt, Homo sapiens
  misc_RNA (1)...(19): siRNA sense strand
acacagacgaggacaaugu

SEQ ID NO: 1369588 - RNA, 19 nt, Homo sapiens
  misc_RNA (1)...(19): siRNA sense strand
caccagaguuugccuacgu

SEQ ID NO: 1369589 - RNA, 19 nt, Homo sapiens
  misc_RNA (1)...(19): siRNA sense strand
ccacccaguuuccaucagu

SEQ ID NO: 1369590 - RNA, 19 nt, Homo sapiens
  misc_RNA (1)...(19): siRNA sense strand
gugcucccuuuggaaguua

SEQ ID NO: 1369591 - RNA, 19 nt, Homo sapiens
  misc_RNA (1)...(19): siRNA sense strand
ccagaacagaauauaguga

SEQ ID NO: 1369592 - RNA, 19 nt, Homo sapiens
  misc_RNA (1)...(19): siRNA sense strand
gagcaaacggaagcaguug

SEQ ID NO: 1369593 - RNA, 19 nt, Homo sapiens
  misc_RNA (1)...(19): siRNA sense strand
caccacagaagaaauuaga

SEQ ID NO: 1369594 - RNA, 19 nt, Homo sapiens
  misc_RNA (1)...(19): siRNA sense strand
uaaccagaacagaauauag

SEQ ID NO: 1369595 - RNA, 19 nt, Homo sapiens
  misc_RNA (1)...(19): siRNA sense strand
gcaaacggaagcaguuggu

SEQ ID NO: 1369596 - RNA, 19 nt, Homo sapiens
  misc_RNA (1)...(19): siRNA sense strand
agagaaauggucagaagga

SEQ ID NO: 1369597 - RNA, 19 nt, Homo sapiens
  misc_RNA (1)...(19): siRNA sense strand
gaggacaauguaaccagaa

SEQ ID NO: 1369598 - RNA, 19 nt, Homo sapiens
  misc_RNA (1)...(19): siRNA sense strand
aaacgucgcaaagcagaaa

SEQ ID NO: 1369599 - RNA, 19 nt, Homo sapiens
  misc_RNA (1)...(19): siRNA sense strand
gcucacaaacgucgcaaag

SEQ ID NO: 1369600 - RNA, 19 nt, Homo sapiens
  misc_RNA (1)...(19): siRNA sense strand
cacagacgaggacaaugua

SEQ ID NO: 1369601 - RNA, 19 nt, Homo sapiens
  misc_RNA (1)...(19): siRNA sense strand
gcaguugguggucuuucuu

SEQ ID NO: 1369602 - RNA, 19 nt, Homo sapiens
  misc_RNA (1)...(19): siRNA sense strand
ccaguuuccaucaguuuau

SEQ ID NO: 1369603 - RNA, 19 nt, Homo sapiens
  misc_RNA (1)...(19): siRNA sense strand
gacaccacagaagaaauua

SEQ ID NO: 1369604 - RNA, 19 nt, Homo sapiens
  misc_RNA (1)...(19): siRNA sense strand
cacagaagaaauuagaaug

SEQ ID NO: 1369605 - RNA, 19 nt, Homo sapiens
  misc_RNA (1)...(19): siRNA sense strand
cuaaaguaccuacccagau

SEQ ID NO: 1369606 - RNA, 19 nt, Homo sapiens
  misc_RNA (1)...(19): siRNA sense strand
ugagcaaacggaagcaguu

SEQ ID NO: 1369607 - RNA, 19 nt, Homo sapiens
  misc_RNA (1)...(19): siRNA sense strand
caggaucuggugacaaaug

SEQ ID NO: 1369608 - RNA, 19 nt, Homo sapiens
  misc_RNA (1)...(19): siRNA sense strand
agaacagaauauagugaca

SEQ ID NO: 1369609 - RNA, 19 nt, Homo sapiens
  misc_RNA (1)...(19): siRNA sense strand
gcaaagcagaaacugaaaa

SEQ ID NO: 1369610 - RNA, 19 nt, Homo sapiens
  misc_RNA (1)...(19): siRNA sense strand
cuuuggaaguuacgguauu

SEQ ID NO: 1369611 - RNA, 19 nt, Homo sapiens
  misc_RNA (1)...(19): siRNA sense strand
ggacaauguaaccagaaca

SEQ ID NO: 1369612 - RNA, 19 nt, Homo sapiens
  misc_RNA (1)...(19): siRNA sense strand
gaagcaguugguggucuuu

SEQ ID NO: 1369613 - RNA, 19 nt, Homo sapiens
  misc_RNA (1)...(19): siRNA sense strand
agacacagacgaggacaau

SEQ ID NO: 1369614 - RNA, 19 nt, Homo sapiens
  misc_RNA (1)...(19): siRNA sense strand
aauguaaccagaacagaau

SEQ ID NO: 1369615 - RNA, 19 nt, Homo sapiens
  misc_RNA (1)...(19): siRNA sense strand
acagcugucucaccagagu

SEQ ID NO: 1369616 - RNA, 19 nt, Homo sapiens
  misc_RNA (1)...(19): siRNA sense strand
aaccagaacagaauauagu

SEQ ID NO: 1369617 - RNA, 19 nt, Homo sapiens
  misc_RNA (1)...(19): siRNA sense strand
gacuacugcucacaaacgu

SEQ ID NO: 1369618 - RNA, 19 nt, Homo sapiens
  misc_RNA (1)...(19): siRNA sense strand
ggagguaaccgugacuacu

SEQ ID NO: 1369619 - RNA, 19 nt, Homo sapiens
  misc_RNA (1)...(19): siRNA sense strand
agcagaaacugaaaacuga

SEQ ID NO: 1369620 - RNA, 19 nt, Homo sapiens
  misc_RNA (1)...(19): siRNA sense strand
gaucauaagucacgagagu

SEQ ID NO: 1369621 - RNA, 19 nt, Homo sapiens
  misc_RNA (1)...(19): siRNA sense strand
gggaggccgugcugucuaa

SEQ ID NO: 1369622 - RNA, 19 nt, Homo sapiens
  misc_RNA (1)...(19): siRNA sense strand
gaguuucuguucaauaugu

SEQ ID NO: 1369623 - RNA, 19 nt, Homo sapiens
  misc_RNA (1)...(19): siRNA sense strand
gaaggaguuucuguucaau

SEQ ID NO: 1369624 - RNA, 19 nt, Homo sapiens
  misc_RNA (1)...(19): siRNA sense strand
aaagagaggccggaucaaa

SEQ ID NO: 1369625 - RNA, 19 nt, Homo sapiens
  misc_RNA (1)...(19): siRNA sense strand
ggagcagggcaaagaguaa

SEQ ID NO: 1369626 - RNA, 19 nt, Homo sapiens
  misc_RNA (1)...(19): siRNA sense strand
gccgugcugucuaaucaaa

SEQ ID NO: 1369627 - RNA, 19 nt, Homo sapiens
  misc_RNA (1)...(19): siRNA sense strand
aggaguuucuguucaauau

SEQ ID NO: 1369628 - RNA, 19 nt, Homo sapiens
  misc_RNA (1)...(19): siRNA sense strand
gcacgcccgaguacaguuu

SEQ ID NO: 1369629 - RNA, 19 nt, Homo sapiens
  misc_RNA (1)...(19): siRNA sense strand
acaaagagaggccggauca

SEQ ID NO: 1369630 - RNA, 19 nt, Homo sapiens
  misc_RNA (1)...(19): siRNA sense strand
gaauaaggagcagggcaaa

SEQ ID NO: 1369631 - RNA, 19 nt, Homo sapiens
  misc_RNA (1)...(19): siRNA sense strand
cgaaggaagcgaggacaaa

SEQ ID NO: 1369632 - RNA, 19 nt, Homo sapiens
  misc_RNA (1)...(19): siRNA sense strand
gaaggaagcgaggacaaag

SEQ ID NO: 1369633 - RNA, 19 nt, Homo sapiens
  misc_RNA (1)...(19): siRNA sense strand
caauaaaauuugcgaagga

SEQ ID NO: 1369634 - RNA, 19 nt, Homo sapiens
  misc_RNA (1)...(19): siRNA sense strand
ggagcuagagaaggaguuu

SEQ ID NO: 1369635 - RNA, 19 nt, Homo sapiens
  misc_RNA (1)...(19): siRNA sense strand
cgugcugucuaaucaaaga

SEQ ID NO: 1369636 - RNA, 19 nt, Homo sapiens
  misc_RNA (1)...(19): siRNA sense strand
gcgcugucccuacaccaaa

SEQ ID NO: 1369637 - RNA, 19 nt, Homo sapiens
  misc_RNA (1)...(19): siRNA sense strand
auaaggagcagggcaaaga

SEQ ID NO: 1369638 - RNA, 19 nt, Homo sapiens
  misc_RNA (1)...(19): siRNA sense strand
aggccgugcugucuaauca

SEQ ID NO: 1369639 - RNA, 19 nt, Homo sapiens
  misc_RNA (1)...(19): siRNA sense strand
gagugagagacaagucaaa

SEQ ID NO: 1369640 - RNA, 19 nt, Homo sapiens
  misc_RNA (1)...(19): siRNA sense strand
cgcuggagcuagagaagga

SEQ ID NO: 1369641 - RNA, 19 nt, Homo sapiens
  misc_RNA (1)...(19): siRNA sense strand
uggccagacuccucaaucu

SEQ ID NO: 1369642 - RNA, 19 nt, Homo sapiens
  misc_RNA (1)...(19): siRNA sense strand
gcgaaggaagcgaggacaa

SEQ ID NO: 1369643 - RNA, 19 nt, Homo sapiens
  misc_RNA (1)...(19): siRNA sense strand
ggaagcgaggacaaagaga

SEQ ID NO: 1369644 - RNA, 19 nt, Homo sapiens
  misc_RNA (1)...(19): siRNA sense strand
ccagccaaguuuccuucug

SEQ ID NO: 1369645 - RNA, 19 nt, Homo sapiens
  misc_RNA (1)...(19): siRNA sense strand
gcugucccuacaccaaaua

SEQ ID NO: 1369646 - RNA, 19 nt, Homo sapiens
  misc_RNA (1)...(19): siRNA sense strand
ggaguuucuguucaauaug

SEQ ID NO: 1369647 - RNA, 19 nt, Homo sapiens
  misc_RNA (1)...(19): siRNA sense strand
gcgaaggcauuacaaagaa

SEQ ID NO: 1369648 - RNA, 19 nt, Homo sapiens
  misc_RNA (1)...(19): siRNA sense strand
caaauuaaaugccaucucu

SEQ ID NO: 1369649 - RNA, 19 nt, Homo sapiens
  misc_RNA (1)...(19): siRNA sense strand
gauaccaacuuucugaaug

SEQ ID NO: 1369650 - RNA, 19 nt, Homo sapiens
  misc_RNA (1)...(19): siRNA sense strand
caugagcuuugucaacuua

SEQ ID NO: 1369651 - RNA, 19 nt, Homo sapiens
  misc_RNA (1)...(19): siRNA sense strand
aaagggaaauucucucuau

SEQ ID NO: 1369652 - RNA, 19 nt, Homo sapiens
  misc_RNA (1)...(19): siRNA sense strand
gaaagacgggaaauacaaa

SEQ ID NO: 1369653 - RNA, 19 nt, Homo sapiens
  misc_RNA (1)...(19): siRNA sense strand
ccacuuaacgcccauauga

SEQ ID NO: 1369654 - RNA, 19 nt, Homo sapiens
  misc_RNA (1)...(19): siRNA sense strand
gcagaucuguucuuguuag

SEQ ID NO: 1369655 - RNA, 19 nt, Homo sapiens
  misc_RNA (1)...(19): siRNA sense strand
gauguuuccugaccacgua

SEQ ID NO: 1369656 - RNA, 19 nt, Homo sapiens
  misc_RNA (1)...(19): siRNA sense strand
ucacagacccagaccauuu

SEQ ID NO: 1369657 - RNA, 19 nt, Homo sapiens
  misc_RNA (1)...(19): siRNA sense strand
guaagaagcacgaacucua

SEQ ID NO: 1369658 - RNA, 19 nt, Homo sapiens
  misc_RNA (1)...(19): siRNA sense strand
acaaugccaugaccaauga

SEQ ID NO: 1369659 - RNA, 19 nt, Homo sapiens
  misc_RNA (1)...(19): siRNA sense strand
gagauuauaacacaaguga

SEQ ID NO: 1369660 - RNA, 19 nt, Homo sapiens
  misc_RNA (1)...(19): siRNA sense strand
ggaaauacaaagggaaauu

SEQ ID NO: 1369661 - RNA, 19 nt, Homo sapiens
  misc_RNA (1)...(19): siRNA sense strand
gaucuguucuuguuagaca

SEQ ID NO: 1369662 - RNA, 19 nt, Homo sapiens
  misc_RNA (1)...(19): siRNA sense strand
gggaaauucucucuaucuu

SEQ ID NO: 1369663 - RNA, 19 nt, Homo sapiens
  misc_RNA (1)...(19): siRNA sense strand
gauuauagcaccagaagga

SEQ ID NO: 1369664 - RNA, 19 nt, Homo sapiens
  misc_RNA (1)...(19): siRNA sense strand
gcagcugaauuccggauau

SEQ ID NO: 1369665 - RNA, 19 nt, Homo sapiens
  misc_RNA (1)...(19): siRNA sense strand
ggaugcagaucuguucuug

SEQ ID NO: 1369666 - RNA, 19 nt, Homo sapiens
  misc_RNA (1)...(19): siRNA sense strand
ccagaauaauuugggcuua

SEQ ID NO: 1369667 - RNA, 19 nt, Homo sapiens
  misc_RNA (1)...(19): siRNA sense strand
gagcaacaaccgauuugaa

SEQ ID NO: 1369668 - RNA, 19 nt, Homo sapiens
  misc_RNA (1)...(19): siRNA sense strand
uggcaggacuggauuauag

SEQ ID NO: 1369669 - RNA, 19 nt, Homo sapiens
  misc_RNA (1)...(19): siRNA sense strand
ggcccaagcuuuagaugug

SEQ ID NO: 1369670 - RNA, 19 nt, Homo sapiens
  misc_RNA (1)...(19): siRNA sense strand
gaaauacaaagggaaauuc

SEQ ID NO: 1369671 - RNA, 19 nt, Homo sapiens
  misc_RNA (1)...(19): siRNA sense strand
cagcugaauuccggauaua

SEQ ID NO: 1369672 - RNA, 19 nt, Homo sapiens
  misc_RNA (1)...(19): siRNA sense strand
ggaaauucucucuaucuug

SEQ ID NO: 1369673 - RNA, 19 nt, Homo sapiens
  misc_RNA (1)...(19): siRNA sense strand
uuaaggguauuguggguuu

SEQ ID NO: 1369674 - RNA, 19 nt, Homo sapiens
  misc_RNA (1)...(19): siRNA sense strand
ggacgcaguaucaacguaa

SEQ ID NO: 1369675 - RNA, 19 nt, Homo sapiens
  misc_RNA (1)...(19): siRNA sense strand
cgaaagacgggaaauacaa

SEQ ID NO: 1369676 - RNA, 19 nt, Homo sapiens
  misc_RNA (1)...(19): siRNA sense strand
agaaggauacgcugcauuu

SEQ ID NO: 1369677 - RNA, 19 nt, Homo sapiens
  misc_RNA (1)...(19): siRNA sense strand
uggguuggcuugucuuuga

SEQ ID NO: 1369678 - RNA, 19 nt, Homo sapiens
  misc_RNA (1)...(19): siRNA sense strand
gcuggguucuaguggguua

SEQ ID NO: 1369679 - RNA, 19 nt, Homo sapiens
  misc_RNA (1)...(19): siRNA sense strand
gaaggcauuacaaagaauu

SEQ ID NO: 1369680 - RNA, 19 nt, Homo sapiens
  misc_RNA (1)...(19): siRNA sense strand
augcagaucuguucuuguu

SEQ ID NO: 1369681 - RNA, 19 nt, Homo sapiens
  misc_RNA (1)...(19): siRNA sense strand
ccacgaaagacgggaaaua

SEQ ID NO: 1369682 - RNA, 19 nt, Homo sapiens
  misc_RNA (1)...(19): siRNA sense strand
uaagaagcacgaacucuau

SEQ ID NO: 1369683 - RNA, 19 nt, Homo sapiens
  misc_RNA (1)...(19): siRNA sense strand
gacagggaccucagucaaa

SEQ ID NO: 1369684 - RNA, 19 nt, Homo sapiens
  misc_RNA (1)...(19): siRNA sense strand
gggcauccuuggcagaaga

SEQ ID NO: 1369685 - RNA, 19 nt, Homo sapiens
  misc_RNA (1)...(19): siRNA sense strand
auaccaacuuucugaauga

SEQ ID NO: 1369686 - RNA, 19 nt, Homo sapiens
  misc_RNA (1)...(19): siRNA sense strand
cgugagagcagccaacaaa

SEQ ID NO: 1369687 - RNA, 19 nt, Homo sapiens
  misc_RNA (1)...(19): siRNA sense strand
uaaaugccaucucuguucu

SEQ ID NO: 1369688 - RNA, 19 nt, Homo sapiens
  misc_RNA (1)...(19): siRNA sense strand
caugauaccaacuuucuga

SEQ ID NO: 1369689 - RNA, 19 nt, Homo sapiens
  misc_RNA (1)...(19): siRNA sense strand
ucucuguucuguacuuuga

SEQ ID NO: 1369690 - RNA, 19 nt, Homo sapiens
  misc_RNA (1)...(19): siRNA sense strand
gaauguucuuuuccacuua

SEQ ID NO: 1369691 - RNA, 19 nt, Homo sapiens
  misc_RNA (1)...(19): siRNA sense strand
gagagcagccaacaaacga

SEQ ID NO: 1369692 - RNA, 19 nt, Homo sapiens
  misc_RNA (1)...(19): siRNA sense strand
cuagccagccuccaugaua

SEQ ID NO: 1369693 - RNA, 19 nt, Homo sapiens
  misc_RNA (1)...(19): siRNA sense strand
gagcagccaacaaacgaaa

SEQ ID NO: 1369694 - RNA, 19 nt, Homo sapiens
  misc_RNA (1)...(19): siRNA sense strand
gcaauaaauccagcucuca

SEQ ID NO: 1369695 - RNA, 19 nt, Homo sapiens
  misc_RNA (1)...(19): siRNA sense strand
caucaaggaauacacaaau

SEQ ID NO: 1369696 - RNA, 19 nt, Homo sapiens
  misc_RNA (1)...(19): siRNA sense strand
caaccacgcuauaguucag

SEQ ID NO: 1369697 - RNA, 19 nt, Homo sapiens
  misc_RNA (1)...(19): siRNA sense strand
caaagggaaauucucucua

SEQ ID NO: 1369698 - RNA, 19 nt, Homo sapiens
  misc_RNA (1)...(19): siRNA sense strand
uggcuugucuuugauauca

SEQ ID NO: 1369699 - RNA, 19 nt, Homo sapiens
  misc_RNA (1)...(19): siRNA sense strand
aaauagggaugcagaucug

SEQ ID NO: 1369700 - RNA, 19 nt, Homo sapiens
  misc_RNA (1)...(19): siRNA sense strand
cgaaggcauuacaaagaau

SEQ ID NO: 1369701 - RNA, 19 nt, Homo sapiens
  misc_RNA (1)...(19): siRNA sense strand
gauguggguuggcuugucu

SEQ ID NO: 1369702 - RNA, 19 nt, Homo sapiens
  misc_RNA (1)...(19): siRNA sense strand
gcuccaaccaaauuaaaug

SEQ ID NO: 1369703 - RNA, 19 nt, Homo sapiens
  misc_RNA (1)...(19): siRNA sense strand
uccagaauguccaguguug

SEQ ID NO: 1369704 - RNA, 19 nt, Homo sapiens
  misc_RNA (1)...(19): siRNA sense strand
ggauggcaggacuggauua

SEQ ID NO: 1369705 - RNA, 19 nt, Homo sapiens
  misc_RNA (1)...(19): siRNA sense strand
caaauagggaugcagaucu

SEQ ID NO: 1369706 - RNA, 19 nt, Homo sapiens
  misc_RNA (1)...(19): siRNA sense strand
gacgcaguaucaacguaaa

SEQ ID NO: 1369707 - RNA, 19 nt, Homo sapiens
  misc_RNA (1)...(19): siRNA sense strand
gaagcacgaacucuaugug

SEQ ID NO: 1369708 - RNA, 19 nt, Homo sapiens
  misc_RNA (1)...(19): siRNA sense strand
uuaaaugccaucucuguuc

SEQ ID NO: 1369709 - RNA, 19 nt, Homo sapiens
  misc_RNA (1)...(19): siRNA sense strand
ucaaggaauacacaaauag

SEQ ID NO: 1369710 - RNA, 19 nt, Homo sapiens
  misc_RNA (1)...(19): siRNA sense strand
guaccaaagccuuguugug

SEQ ID NO: 1369711 - RNA, 19 nt, Homo sapiens
  misc_RNA (1)...(19): siRNA sense strand
ccucugcaccucucuuuau

SEQ ID NO: 1369712 - RNA, 19 nt, Homo sapiens
  misc_RNA (1)...(19): siRNA sense strand
ugauuaauccccagaauaa

SEQ ID NO: 1369713 - RNA, 19 nt, Homo sapiens
  misc_RNA (1)...(19): siRNA sense strand
gucaugagcuuugucaacu

SEQ ID NO: 1369714 - RNA, 19 nt, Homo sapiens
  misc_RNA (1)...(19): siRNA sense strand
uaugcuggaucucuacaau

SEQ ID NO: 1369715 - RNA, 19 nt, Homo sapiens
  misc_RNA (1)...(19): siRNA sense strand
ccuccaugauaccaacuuu

SEQ ID NO: 1369716 - RNA, 19 nt, Homo sapiens
  misc_RNA (1)...(19): siRNA sense strand
caccaaccacgcuauaguu

SEQ ID NO: 1369717 - RNA, 19 nt, Homo sapiens
  misc_RNA (1)...(19): siRNA sense strand
ucugaaugaugcugacaug

SEQ ID NO: 1369718 - RNA, 19 nt, Homo sapiens
  misc_RNA (1)...(19): siRNA sense strand
uggguauccucgucgcaua

SEQ ID NO: 1369719 - RNA, 19 nt, Homo sapiens
  misc_RNA (1)...(19): siRNA sense strand
ccaucucuguucuguacuu

SEQ ID NO: 1369720 - RNA, 19 nt, Homo sapiens
  misc_RNA (1)...(19): siRNA sense strand
ugccaucucuguucuguac

SEQ ID NO: 1369721 - RNA, 19 nt, Homo sapiens
  misc_RNA (1)...(19): siRNA sense strand
agaauaauuugggcuuaca

SEQ ID NO: 1369722 - RNA, 19 nt, Homo sapiens
  misc_RNA (1)...(19): siRNA sense strand
cagaauaauuugggcuuac

SEQ ID NO: 1369723 - RNA, 19 nt, Homo sapiens
  misc_RNA (1)...(19): siRNA sense strand
cagaucuguucuuguuaga

SEQ ID NO: 1369724 - RNA, 19 nt, Homo sapiens
  misc_RNA (1)...(19): siRNA sense strand
guugaaagagacaaggauu

SEQ ID NO: 1369725 - RNA, 19 nt, Homo sapiens
  misc_RNA (1)...(19): siRNA sense strand
uuauugugauggagaaugu

SEQ ID NO: 1369726 - RNA, 19 nt, Homo sapiens
  misc_RNA (1)...(19): siRNA sense strand
caucucuguucuguacuuu

SEQ ID NO: 1369727 - RNA, 19 nt, Homo sapiens
  misc_RNA (1)...(19): siRNA sense strand
ccagcgaaggcauuacaaa

SEQ ID NO: 1369728 - RNA, 19 nt, Homo sapiens
  misc_RNA (1)...(19): siRNA sense strand
gagcugcuggguucuagug

SEQ ID NO: 1369729 - RNA, 19 nt, Homo sapiens
  misc_RNA (1)...(19): siRNA sense strand
caauaaauccagcucucau

SEQ ID NO: 1369730 - RNA, 19 nt, Homo sapiens
  misc_RNA (1)...(19): siRNA sense strand
caaggcgagugagguacuu

SEQ ID NO: 1369731 - RNA, 19 nt, Homo sapiens
  misc_RNA (1)...(19): siRNA sense strand
ggaagacagggaccucagu

SEQ ID NO: 1369732 - RNA, 19 nt, Homo sapiens
  misc_RNA (1)...(19): siRNA sense strand
gcaacaaccgauuugaaaa

SEQ ID NO: 1369733 - RNA, 19 nt, Homo sapiens
  misc_RNA (1)...(19): siRNA sense strand
agcaacaaccgauuugaaa

SEQ ID NO: 1369734 - RNA, 19 nt, Homo sapiens
  misc_RNA (1)...(19): siRNA sense strand
ggagcaacaaccgauuuga

SEQ ID NO: 1369735 - RNA, 19 nt, Homo sapiens
  misc_RNA (1)...(19): siRNA sense strand
uagccagccuccaugauac

SEQ ID NO: 1369736 - RNA, 19 nt, Homo sapiens
  misc_RNA (1)...(19): siRNA sense strand
uuauagcaccagaaggaua

SEQ ID NO: 1369737 - RNA, 19 nt, Homo sapiens
  misc_RNA (1)...(19): siRNA sense strand
gcugaauuccggauauaca

SEQ ID NO: 1369738 - RNA, 19 nt, Homo sapiens
  misc_RNA (1)...(19): siRNA sense strand
ucaugagcuuugucaacuu

SEQ ID NO: 1369739 - RNA, 19 nt, Homo sapiens
  misc_RNA (1)...(19): siRNA sense strand
ccucgucgcauacaguuau

SEQ ID NO: 1369740 - RNA, 19 nt, Homo sapiens
  misc_RNA (1)...(19): siRNA sense strand
cuucaaggcgagugaggua

SEQ ID NO: 1369741 - RNA, 19 nt, Homo sapiens
  misc_RNA (1)...(19): siRNA sense strand
caugguggccuucuucaag

SEQ ID NO: 1369742 - RNA, 19 nt, Homo sapiens
  misc_RNA (1)...(19): siRNA sense strand
cguaaaaucugcuggucuu

SEQ ID NO: 1369743 - RNA, 19 nt, Homo sapiens
  misc_RNA (1)...(19): siRNA sense strand
caaggaauacacaaauagg

SEQ ID NO: 1369744 - RNA, 19 nt, Homo sapiens
  misc_RNA (1)...(19): siRNA sense strand
cagcgaaggcauuacaaag

SEQ ID NO: 1369745 - RNA, 19 nt, Homo sapiens
  misc_RNA (1)...(19): siRNA sense strand
ugaaugaugcugacauggu

SEQ ID NO: 1369746 - RNA, 19 nt, Homo sapiens
  misc_RNA (1)...(19): siRNA sense strand
guucuguacuuugaugaca

SEQ ID NO: 1369747 - RNA, 19 nt, Homo sapiens
  misc_RNA (1)...(19): siRNA sense strand
ccagugagaucaaagacua

SEQ ID NO: 1369748 - RNA, 19 nt, Homo sapiens
  misc_RNA (1)...(19): siRNA sense strand
ccgaggagcugaacaaaga

SEQ ID NO: 1369749 - RNA, 19 nt, Homo sapiens
  misc_RNA (1)...(19): siRNA sense strand
ggacugaccuggagaugca

SEQ ID NO: 1369750 - RNA, 19 nt, Homo sapiens
  misc_RNA (1)...(19): siRNA sense strand
ggagaugcuugcucugaga

SEQ ID NO: 1369751 - RNA, 19 nt, Homo sapiens
  misc_RNA (1)...(19): siRNA sense strand
gcaugcagcugucccagau

SEQ ID NO: 1369752 - RNA, 19 nt, Homo sapiens
  misc_RNA (1)...(19): siRNA sense strand
gcaagcaucuggccaaucc

SEQ ID NO: 1369753 - RNA, 19 nt, Homo sapiens
  misc_RNA (1)...(19): siRNA sense strand
acaaagaaguggccuccaa

SEQ ID NO: 1369754 - RNA, 19 nt, Homo sapiens
  misc_RNA (1)...(19): siRNA sense strand
gaucauugcggccaccauu

SEQ ID NO: 1369755 - RNA, 19 nt, Homo sapiens
  misc_RNA (1)...(19): siRNA sense strand
gaccaaguaugagcacgaa

SEQ ID NO: 1369756 - RNA, 19 nt, Homo sapiens
  misc_RNA (1)...(19): siRNA sense strand
gugagaaggugaccaugca

SEQ ID NO: 1369757 - RNA, 19 nt, Homo sapiens
  misc_RNA (1)...(19): siRNA sense strand
gaggagaugcuugcucuga

SEQ ID NO: 1369758 - RNA, 19 nt, Homo sapiens
  misc_RNA (1)...(19): siRNA sense strand
uggcuugggugcuggcuuu

SEQ ID NO: 1369759 - RNA, 19 nt, Homo sapiens
  misc_RNA (1)...(19): siRNA sense strand
gaaagcaucccuggagaac

SEQ ID NO: 1369760 - RNA, 19 nt, Homo sapiens
  misc_RNA (1)...(19): siRNA sense strand
gcagaucgaaggccugaag

SEQ ID NO: 1369761 - RNA, 19 nt, Homo sapiens
  misc_RNA (1)...(19): siRNA sense strand
ugagaugcgugaccaguac

SEQ ID NO: 1369762 - RNA, 19 nt, Homo sapiens
  misc_RNA (1)...(19): siRNA sense strand
ucgaggaccugaggaacaa

SEQ ID NO: 1369763 - RNA, 19 nt, Homo sapiens
  misc_RNA (1)...(19): siRNA sense strand
agcaggagauugccaccua

SEQ ID NO: 1369764 - RNA, 19 nt, Homo sapiens
  misc_RNA (1)...(19): siRNA sense strand
gcagugagaaggugaccau

SEQ ID NO: 1369765 - RNA, 19 nt, Homo sapiens
  misc_RNA (1)...(19): siRNA sense strand
uacagucccuacuucaaga

SEQ ID NO: 1369766 - RNA, 19 nt, Homo sapiens
  misc_RNA (1)...(19): siRNA sense strand
gaagugaagauccgugacu

SEQ ID NO: 1369767 - RNA, 19 nt, Homo sapiens
  misc_RNA (1)...(19): siRNA sense strand
ccaugcagaaccucaauga

SEQ ID NO: 1369768 - RNA, 19 nt, Homo sapiens
  misc_RNA (1)...(19): siRNA sense strand
gcaucuggccaauccuauu

SEQ ID NO: 1369769 - RNA, 19 nt, Homo sapiens
  misc_RNA (1)...(19): siRNA sense strand
ugaagauccgugacuggua

SEQ ID NO: 1369770 - RNA, 19 nt, Homo sapiens
  misc_RNA (1)...(19): siRNA sense strand
ccagauccagggacugauu

SEQ ID NO: 1369771 - RNA, 19 nt, Homo sapiens
  misc_RNA (1)...(19): siRNA sense strand
aagcaucccuggagaacag

SEQ ID NO: 1369772 - RNA, 19 nt, Homo sapiens
  misc_RNA (1)...(19): siRNA sense strand
acgagcagauggcagagaa

SEQ ID NO: 1369773 - RNA, 19 nt, Homo sapiens
  misc_RNA (1)...(19): siRNA sense strand
ugagccgcauccugaauga

SEQ ID NO: 1369774 - RNA, 19 nt, Homo sapiens
  misc_RNA (1)...(19): siRNA sense strand
uggccuaccugaggaagaa

SEQ ID NO: 1369775 - RNA, 19 nt, Homo sapiens
  misc_RNA (1)...(19): siRNA sense strand
gaccugaggaacaagauca

SEQ ID NO: 1369776 - RNA, 19 nt, Homo sapiens
  misc_RNA (1)...(19): siRNA sense strand
gcaagaccgaggagcugaa

SEQ ID NO: 1369777 - RNA, 19 nt, Homo sapiens
  misc_RNA (1)...(19): siRNA sense strand
gaaccacgaggaggagaug

SEQ ID NO: 1369778 - RNA, 19 nt, Homo sapiens
  misc_RNA (1)...(19): siRNA sense strand
ugaaagcaucccuggagaa

SEQ ID NO: 1369779 - RNA, 19 nt, Homo sapiens
  misc_RNA (1)...(19): siRNA sense strand
gcgaggaugcccaccuuuc

SEQ ID NO: 1369780 - RNA, 19 nt, Homo sapiens
  misc_RNA (1)...(19): siRNA sense strand
cagcaagcaucuggccaau

SEQ ID NO: 1369781 - RNA, 19 nt, Homo sapiens
  misc_RNA (1)...(19): siRNA sense strand
cagcagcagcagcagcuuu

SEQ ID NO: 1369782 - RNA, 19 nt, Homo sapiens
  misc_RNA (1)...(19): siRNA sense strand
ucauugcggccaccauuga

SEQ ID NO: 1369783 - RNA, 19 nt, Homo sapiens
  misc_RNA (1)...(19): siRNA sense strand
caucuggccaauccuauuc

SEQ ID NO: 1369784 - RNA, 19 nt, Homo sapiens
  misc_RNA (1)...(19): siRNA sense strand
ccaaaggccgcuacugcau

SEQ ID NO: 1369785 - RNA, 19 nt, Homo sapiens
  misc_RNA (1)...(19): siRNA sense strand
acgccgaccuggaagugaa

SEQ ID NO: 1369786 - RNA, 19 nt, Homo sapiens
  misc_RNA (1)...(19): siRNA sense strand
ggagcugaacaaagaagug

SEQ ID NO: 1369787 - RNA, 19 nt, Homo sapiens
  misc_RNA (1)...(19): siRNA sense strand
agaccugguuccugagcaa

SEQ ID NO: 1369788 - RNA, 19 nt, Homo sapiens
  misc_RNA (1)...(19): siRNA sense strand
cuacagucccuacuucaag

SEQ ID NO: 1369789 - RNA, 19 nt, Homo sapiens
  misc_RNA (1)...(19): siRNA sense strand
gaccgaggagcugaacaaa

SEQ ID NO: 1369790 - RNA, 19 nt, Homo sapiens
  misc_RNA (1)...(19): siRNA sense strand
agaaggugaccaugcagaa

SEQ ID NO: 1369791 - RNA, 19 nt, Homo sapiens
  misc_RNA (1)...(19): siRNA sense strand
caacgccgaccuggaagug

SEQ ID NO: 1369792 - RNA, 19 nt, Homo sapiens
  misc_RNA (1)...(19): siRNA sense strand
cagcucagcaugaaagcau

SEQ ID NO: 1369793 - RNA, 19 nt, Homo sapiens
  misc_RNA (1)...(19): siRNA sense strand
agaccgaggagcugaacaa

SEQ ID NO: 1369794 - RNA, 19 nt, Homo sapiens
  misc_RNA (1)...(19): siRNA sense strand
gaggaccugaggaacaaga

SEQ ID NO: 1369795 - RNA, 19 nt, Homo sapiens
  misc_RNA (1)...(19): siRNA sense strand
cugaggaacaagaucauug

SEQ ID NO: 1369796 - RNA, 19 nt, Homo sapiens
  misc_RNA (1)...(19): siRNA sense strand
agaucuugcuggaugugaa

SEQ ID NO: 1369797 - RNA, 19 nt, Homo sapiens
  misc_RNA (1)...(19): siRNA sense strand
gagccaggaguaccagauc

SEQ ID NO: 1369798 - RNA, 19 nt, Homo sapiens
  misc_RNA (1)...(19): siRNA sense strand
gagaugugaacguggagau

SEQ ID NO: 1369799 - RNA, 19 nt, Homo sapiens
  misc_RNA (1)...(19): siRNA sense strand
aggaggagcuggccuaccu

SEQ ID NO: 1369800 - RNA, 19 nt, Homo sapiens
  misc_RNA (1)...(19): siRNA sense strand
ucucagauguggccuacuu

SEQ ID NO: 1369801 - RNA, 19 nt, Homo sapiens
  misc_RNA (1)...(19): siRNA sense strand
ggcugcagcuguacgguuu

SEQ ID NO: 1369802 - RNA, 19 nt, Homo sapiens
  misc_RNA (1)...(19): siRNA sense strand
gagagagccguuuccagaa

SEQ ID NO: 1369803 - RNA, 19 nt, Homo sapiens
  misc_RNA (1)...(19): siRNA sense strand
gcuacauguugccugguuu

SEQ ID NO: 1369804 - RNA, 19 nt, Homo sapiens
  misc_RNA (1)...(19): siRNA sense strand
gaaguucccuccccagaag

SEQ ID NO: 1369805 - RNA, 19 nt, Homo sapiens
  misc_RNA (1)...(19): siRNA sense strand
gcagaaggacgaguacuac

SEQ ID NO: 1369806 - RNA, 19 nt, Homo sapiens
  misc_RNA (1)...(19): siRNA sense strand
cauccacggugucuucuac

SEQ ID NO: 1369807 - RNA, 19 nt, Homo sapiens
  misc_RNA (1)...(19): siRNA sense strand
ucaucuaccuucggcacua

SEQ ID NO: 1369808 - RNA, 19 nt, Homo sapiens
  misc_RNA (1)...(19): siRNA sense strand
ggcuacauguugccugguu

SEQ ID NO: 1369809 - RNA, 19 nt, Homo sapiens
  misc_RNA (1)...(19): siRNA sense strand
gaggaguacgucagcauca

SEQ ID NO: 1369810 - RNA, 19 nt, Homo sapiens
  misc_RNA (1)...(19): siRNA sense strand
cccagaagcucaucuaccu

SEQ ID NO: 1369811 - RNA, 19 nt, Homo sapiens
  misc_RNA (1)...(19): siRNA sense strand
uuacauccacggugucuuc

SEQ ID NO: 1369812 - RNA, 19 nt, Homo sapiens
  misc_RNA (1)...(19): siRNA sense strand
cgcagaaggacgaguacua

SEQ ID NO: 1369813 - RNA, 19 nt, Homo sapiens
  misc_RNA (1)...(19): siRNA sense strand
ggaguacgucagcaucauc

SEQ ID NO: 1369814 - RNA, 19 nt, Homo sapiens
  misc_RNA (1)...(19): siRNA sense strand
acacggccacccugacuga

SEQ ID NO: 1369815 - RNA, 19 nt, Homo sapiens
  misc_RNA (1)...(19): siRNA sense strand
ccauggggcugcagcugua

SEQ ID NO: 1369816 - RNA, 19 nt, Homo sapiens
  misc_RNA (1)...(19): siRNA sense strand
ucagauguggccuacuuug

SEQ ID NO: 1369817 - RNA, 19 nt, Homo sapiens
  misc_RNA (1)...(19): siRNA sense strand
cggcgcagaaggacgagua

SEQ ID NO: 1369818 - RNA, 19 nt, Homo sapiens
  misc_RNA (1)...(19): siRNA sense strand
ugcccuaccugcuggacaa

SEQ ID NO: 1369819 - RNA, 19 nt, Homo sapiens
  misc_RNA (1)...(19): siRNA sense strand
ucucagauguggccuacuu

SEQ ID NO: 1369820 - RNA, 19 nt, Homo sapiens
  misc_RNA (1)...(19): siRNA sense strand
ggcugcagcuguacgguuu

SEQ ID NO: 1369821 - RNA, 19 nt, Homo sapiens
  misc_RNA (1)...(19): siRNA sense strand
gagagagccguuuccagaa

SEQ ID NO: 1369822 - RNA, 19 nt, Homo sapiens
  misc_RNA (1)...(19): siRNA sense strand
gcuacauguugccugguuu

SEQ ID NO: 1369823 - RNA, 19 nt, Homo sapiens
  misc_RNA (1)...(19): siRNA sense strand
gaaguucccuccccagaag

SEQ ID NO: 1369824 - RNA, 19 nt, Homo sapiens
  misc_RNA (1)...(19): siRNA sense strand
gcagaaggacgaguacuac

SEQ ID NO: 1369825 - RNA, 19 nt, Homo sapiens
  misc_RNA (1)...(19): siRNA sense strand
cauccacggugucuucuac

SEQ ID NO: 1369826 - RNA, 19 nt, Homo sapiens
  misc_RNA (1)...(19): siRNA sense strand
ucaucuaccuucggcacua

SEQ ID NO: 1369827 - RNA, 19 nt, Homo sapiens
  misc_RNA (1)...(19): siRNA sense strand
ggcuacauguugccugguu

SEQ ID NO: 1369828 - RNA, 19 nt, Homo sapiens
  misc_RNA (1)...(19): siRNA sense strand
gaggaguacgucagcauca

SEQ ID NO: 1369829 - RNA, 19 nt, Homo sapiens
  misc_RNA (1)...(19): siRNA sense strand
cccagaagcucaucuaccu

SEQ ID NO: 1369830 - RNA, 19 nt, Homo sapiens
  misc_RNA (1)...(19): siRNA sense strand
uuacauccacggugucuuc

SEQ ID NO: 1369831 - RNA, 19 nt, Homo sapiens
  misc_RNA (1)...(19): siRNA sense strand
cgcagaaggacgaguacua

SEQ ID NO: 1369832 - RNA, 19 nt, Homo sapiens
  misc_RNA (1)...(19): siRNA sense strand
ggaguacgucagcaucauc

SEQ ID NO: 1369833 - RNA, 19 nt, Homo sapiens
  misc_RNA (1)...(19): siRNA sense strand
acacggccacccugacuga

SEQ ID NO: 1369834 - RNA, 19 nt, Homo sapiens
  misc_RNA (1)...(19): siRNA sense strand
ccauggggcugcagcugua

SEQ ID NO: 1369835 - RNA, 19 nt, Homo sapiens
  misc_RNA (1)...(19): siRNA sense strand
ucagauguggccuacuuug

SEQ ID NO: 1369836 - RNA, 19 nt, Homo sapiens
  misc_RNA (1)...(19): siRNA sense strand
cggcgcagaaggacgagua

SEQ ID NO: 1369837 - RNA, 19 nt, Homo sapiens
  misc_RNA (1)...(19): siRNA sense strand
ugcccuaccugcuggacaa

SEQ ID NO: 1369838 - RNA, 19 nt, Homo sapiens
  misc_RNA (1)...(19): siRNA sense strand
gaaggucuccgaugucaua

SEQ ID NO: 1369839 - RNA, 19 nt, Homo sapiens
  misc_RNA (1)...(19): siRNA sense strand
gaucauacaugcgcuguga

SEQ ID NO: 1369840 - RNA, 19 nt, Homo sapiens
  misc_RNA (1)...(19): siRNA sense strand
gccgugagcuggugaagaa

SEQ ID NO: 1369841 - RNA, 19 nt, Homo sapiens
  misc_RNA (1)...(19): siRNA sense strand
ugaagaaggucuccgaugu

SEQ ID NO: 1369842 - RNA, 19 nt, Homo sapiens
  misc_RNA (1)...(19): siRNA sense strand
ggagcuggcuguaccugaa

SEQ ID NO: 1369843 - RNA, 19 nt, Homo sapiens
  misc_RNA (1)...(19): siRNA sense strand
gaucaugccuggguagugu

SEQ ID NO: 1369844 - RNA, 19 nt, Homo sapiens
  misc_RNA (1)...(19): siRNA sense strand
ugggacaucuggaaaggua

SEQ ID NO: 1369845 - RNA, 19 nt, Homo sapiens
  misc_RNA (1)...(19): siRNA sense strand
caaggaguucuuugaagua

SEQ ID NO: 1369846 - RNA, 19 nt, Homo sapiens
  misc_RNA (1)...(19): siRNA sense strand
acaaggaguucuuugaagu

SEQ ID NO: 1369847 - RNA, 19 nt, Homo sapiens
  misc_RNA (1)...(19): siRNA sense strand
gaaccuggcagaucuagag

SEQ ID NO: 1369848 - RNA, 19 nt, Homo sapiens
  misc_RNA (1)...(19): siRNA sense strand
ggucuccgaugucauaugg

SEQ ID NO: 1369849 - RNA, 19 nt, Homo sapiens
  misc_RNA (1)...(19): siRNA sense strand
ccacugucauccaggacua

SEQ ID NO: 1369850 - RNA, 19 nt, Homo sapiens
  misc_RNA (1)...(19): siRNA sense strand
acgaggagaucuacaagga

SEQ ID NO: 1369851 - RNA, 19 nt, Homo sapiens
  misc_RNA (1)...(19): siRNA sense strand
cgucaucccuaccaacguu

SEQ ID NO: 1369852 - RNA, 19 nt, Homo sapiens
  misc_RNA (1)...(19): siRNA sense strand
gaagaaggucuccgauguc

SEQ ID NO: 1369853 - RNA, 19 nt, Homo sapiens
  misc_RNA (1)...(19): siRNA sense strand
gggaagacgaggagaucua

SEQ ID NO: 1369854 - RNA, 19 nt, Homo sapiens
  misc_RNA (1)...(19): siRNA sense strand
gaacacaucuaccccuaca

SEQ ID NO: 1369855 - RNA, 19 nt, Homo sapiens
  misc_RNA (1)...(19): siRNA sense strand
gaagaugaagggcaugaag

SEQ ID NO: 1369856 - RNA, 19 nt, Homo sapiens
  misc_RNA (1)...(19): siRNA sense strand
ugacuacacucugucuuuc

SEQ ID NO: 1369857 - RNA, 19 nt, Homo sapiens
  misc_RNA (1)...(19): siRNA sense strand
cuacaaggaguucuuugaa

SEQ ID NO: 1369858 - RNA, 19 nt, Homo sapiens
  misc_RNA (1)...(19): siRNA sense strand
cagaaggugcgcauaguga

SEQ ID NO: 1369859 - RNA, 19 nt, Homo sapiens
  misc_RNA (1)...(19): siRNA sense strand
gccaucaacccuuccauug

SEQ ID NO: 1369860 - RNA, 19 nt, Homo sapiens
  misc_RNA (1)...(19): siRNA sense strand
gugacuacacucugucuuu

SEQ ID NO: 1369861 - RNA, 19 nt, Homo sapiens
  misc_RNA (1)...(19): siRNA sense strand
ugaaguagccaaugauguc

SEQ ID NO: 1369862 - RNA, 19 nt, Homo sapiens
  misc_RNA (1)...(19): siRNA sense strand
gaucuacaaggaguucuuu

SEQ ID NO: 1369863 - RNA, 19 nt, Homo sapiens
  misc_RNA (1)...(19): siRNA sense strand
gcagaaggugcgcauagug

SEQ ID NO: 1369864 - RNA, 19 nt, Homo sapiens
  misc_RNA (1)...(19): siRNA sense strand
aagaaggucuccgauguca

SEQ ID NO: 1369865 - RNA, 19 nt, Homo sapiens
  misc_RNA (1)...(19): siRNA sense strand
gaccuacuaucgggaugaa

SEQ ID NO: 1369866 - RNA, 19 nt, Homo sapiens
  misc_RNA (1)...(19): siRNA sense strand
uagggaaccuggcagaucu

SEQ ID NO: 1369867 - RNA, 19 nt, Homo sapiens
  misc_RNA (1)...(19): siRNA sense strand
ucuccgaugucauauggaa

SEQ ID NO: 1369868 - RNA, 19 nt, Homo sapiens
  misc_RNA (1)...(19): siRNA sense strand
gagaagaugaagggcauga

SEQ ID NO: 1369869 - RNA, 19 nt, Homo sapiens
  misc_RNA (1)...(19): siRNA sense strand
cgacguggugcgccuguuu

SEQ ID NO: 1369870 - RNA, 19 nt, Homo sapiens
  misc_RNA (1)...(19): siRNA sense strand
ucuuugaaguagccaauga

SEQ ID NO: 1369871 - RNA, 19 nt, Homo sapiens
  misc_RNA (1)...(19): siRNA sense strand
uacaaggaguucuuugaag

SEQ ID NO: 1369872 - RNA, 19 nt, Homo sapiens
  misc_RNA (1)...(19): siRNA sense strand
ccugaaaggaucauacaug

SEQ ID NO: 1369873 - RNA, 19 nt, Homo sapiens
  misc_RNA (1)...(19): siRNA sense strand
gaaguagccaaugauguca

SEQ ID NO: 1369874 - RNA, 19 nt, Homo sapiens
  misc_RNA (1)...(19): siRNA sense strand
ccacauccagucccucuuc

SEQ ID NO: 1369875 - RNA, 19 nt, Homo sapiens
  misc_RNA (1)...(19): siRNA sense strand
ggcagaaggugcgcauagu

SEQ ID NO: 1369876 - RNA, 19 nt, Homo sapiens
  misc_RNA (1)...(19): siRNA sense strand
gcagaugaagaagcagaaa

SEQ ID NO: 1369877 - RNA, 19 nt, Homo sapiens
  misc_RNA (1)...(19): siRNA sense strand
cagcuccgguguggccuuu

SEQ ID NO: 1369878 - RNA, 19 nt, Homo sapiens
  misc_RNA (1)...(19): siRNA sense strand
gaccugggacaucuggaaa

SEQ ID NO: 1369879 - RNA, 19 nt, Homo sapiens
  misc_RNA (1)...(19): siRNA sense strand
gagcuggcuguaccugaaa

SEQ ID NO: 1369880 - RNA, 19 nt, Homo sapiens
  misc_RNA (1)...(19): siRNA sense strand
cagacccacucacccucua

SEQ ID NO: 1369881 - RNA, 19 nt, Homo sapiens
  misc_RNA (1)...(19): siRNA sense strand
ggagaucuacaaggaguuc

SEQ ID NO: 1369882 - RNA, 19 nt, Homo sapiens
  misc_RNA (1)...(19): siRNA sense strand
gcugugaccgcaagaugga

SEQ ID NO: 1369883 - RNA, 19 nt, Homo sapiens
  misc_RNA (1)...(19): siRNA sense strand
ggaagccuccugggacugu

SEQ ID NO: 1369884 - RNA, 19 nt, Homo sapiens
  misc_RNA (1)...(19): siRNA sense strand
gggcugggccaccuuucuu

SEQ ID NO: 1369885 - RNA, 19 nt, Homo sapiens
  misc_RNA (1)...(19): siRNA sense strand
ucuaugaccugggacaucu

SEQ ID NO: 1369886 - RNA, 19 nt, Homo sapiens
  misc_RNA (1)...(19): siRNA sense strand
ugaaggaggcagccagcuu

SEQ ID NO: 1369887 - RNA, 19 nt, Homo sapiens
  misc_RNA (1)...(19): siRNA sense strand
ggaagacgaggagaucuac

SEQ ID NO: 1369888 - RNA, 19 nt, Homo sapiens
  misc_RNA (1)...(19): siRNA sense strand
ccucagccaagaccuacua

SEQ ID NO: 1369889 - RNA, 19 nt, Homo sapiens
  misc_RNA (1)...(19): siRNA sense strand
agucgcaagugcagaugaa

SEQ ID NO: 1369890 - RNA, 19 nt, Homo sapiens
  misc_RNA (1)...(19): siRNA sense strand
ucuacaaggaguucuuuga

SEQ ID NO: 1369891 - RNA, 19 nt, Homo sapiens
  misc_RNA (1)...(19): siRNA sense strand
ugcucuggcugcucuauga

SEQ ID NO: 1369892 - RNA, 19 nt, Homo sapiens
  misc_RNA (1)...(19): siRNA sense strand
gcagcgcaaaggccucuga

SEQ ID NO: 1369893 - RNA, 19 nt, Homo sapiens
  misc_RNA (1)...(19): siRNA sense strand
agauggagguggcguucau

SEQ ID NO: 1369894 - RNA, 19 nt, Homo sapiens
  misc_RNA (1)...(19): siRNA sense strand
gaugaagaagcagaaagug

SEQ ID NO: 1369895 - RNA, 19 nt, Homo sapiens
  misc_RNA (1)...(19): siRNA sense strand
cgcaagugcagaugaagaa

SEQ ID NO: 1369896 - RNA, 19 nt, Homo sapiens
  misc_RNA (1)...(19): siRNA sense strand
uccagucccucuucagcuu

SEQ ID NO: 1369897 - RNA, 19 nt, Homo sapiens
  misc_RNA (1)...(19): siRNA sense strand
gcgcugugaccgcaagaug

SEQ ID NO: 1369898 - RNA, 19 nt, Homo sapiens
  misc_RNA (1)...(19): siRNA sense strand
uggccgaccugucuaucau

SEQ ID NO: 1369899 - RNA, 19 nt, Homo sapiens
  misc_RNA (1)...(19): siRNA sense strand
aaggaguucuuugaaguag

SEQ ID NO: 1369900 - RNA, 19 nt, Homo sapiens
  misc_RNA (1)...(19): siRNA sense strand
cagccaagaccuacuaucg

SEQ ID NO: 1369901 - RNA, 19 nt, Homo sapiens
  misc_RNA (1)...(19): siRNA sense strand
gucccucuauccucgagaa

SEQ ID NO: 1369902 - RNA, 19 nt, Homo sapiens
  misc_RNA (1)...(19): siRNA sense strand
gccaucaagcugcaacuca

SEQ ID NO: 1369903 - RNA, 19 nt, Homo sapiens
  misc_RNA (1)...(19): siRNA sense strand
ccgacucgcuggagcuucu

SEQ ID NO: 1369904 - RNA, 19 nt, Homo sapiens
  misc_RNA (1)...(19): siRNA sense strand
gaaggucuccgaugucaua

SEQ ID NO: 1369905 - RNA, 19 nt, Homo sapiens
  misc_RNA (1)...(19): siRNA sense strand
gaucauacaugcgcuguga

SEQ ID NO: 1369906 - RNA, 19 nt, Homo sapiens
  misc_RNA (1)...(19): siRNA sense strand
gccgugagcuggugaagaa

SEQ ID NO: 1369907 - RNA, 19 nt, Homo sapiens
  misc_RNA (1)...(19): siRNA sense strand
ugaagaaggucuccgaugu

SEQ ID NO: 1369908 - RNA, 19 nt, Homo sapiens
  misc_RNA (1)...(19): siRNA sense strand
ggagcuggcuguaccugaa

SEQ ID NO: 1369909 - RNA, 19 nt, Homo sapiens
  misc_RNA (1)...(19): siRNA sense strand
gaucaugccuggguagugu

SEQ ID NO: 1369910 - RNA, 19 nt, Homo sapiens
  misc_RNA (1)...(19): siRNA sense strand
ugggacaucuggaaaggua

SEQ ID NO: 1369911 - RNA, 19 nt, Homo sapiens
  misc_RNA (1)...(19): siRNA sense strand
caaggaguucuuugaagua

SEQ ID NO: 1369912 - RNA, 19 nt, Homo sapiens
  misc_RNA (1)...(19): siRNA sense strand
acaaggaguucuuugaagu

SEQ ID NO: 1369913 - RNA, 19 nt, Homo sapiens
  misc_RNA (1)...(19): siRNA sense strand
gaaccuggcagaucuagag

SEQ ID NO: 1369914 - RNA, 19 nt, Homo sapiens
  misc_RNA (1)...(19): siRNA sense strand
ggucuccgaugucauaugg

SEQ ID NO: 1369915 - RNA, 19 nt, Homo sapiens
  misc_RNA (1)...(19): siRNA sense strand
ccacugucauccaggacua

SEQ ID NO: 1369916 - RNA, 19 nt, Homo sapiens
  misc_RNA (1)...(19): siRNA sense strand
acgaggagaucuacaagga

SEQ ID NO: 1369917 - RNA, 19 nt, Homo sapiens
  misc_RNA (1)...(19): siRNA sense strand
cgucaucccuaccaacguu

SEQ ID NO: 1369918 - RNA, 19 nt, Homo sapiens
  misc_RNA (1)...(19): siRNA sense strand
gaagaaggucuccgauguc

SEQ ID NO: 1369919 - RNA, 19 nt, Homo sapiens
  misc_RNA (1)...(19): siRNA sense strand
gggaagacgaggagaucua

SEQ ID NO: 1369920 - RNA, 19 nt, Homo sapiens
  misc_RNA (1)...(19): siRNA sense strand
gaacacaucuaccccuaca

SEQ ID NO: 1369921 - RNA, 19 nt, Homo sapiens
  misc_RNA (1)...(19): siRNA sense strand
gaagaugaagggcaugaag

SEQ ID NO: 1369922 - RNA, 19 nt, Homo sapiens
  misc_RNA (1)...(19): siRNA sense strand
ugacuacacucugucuuuc

SEQ ID NO: 1369923 - RNA, 19 nt, Homo sapiens
  misc_RNA (1)...(19): siRNA sense strand
cuacaaggaguucuuugaa

SEQ ID NO: 1369924 - RNA, 19 nt, Homo sapiens
  misc_RNA (1)...(19): siRNA sense strand
cagaaggugcgcauaguga

SEQ ID NO: 1369925 - RNA, 19 nt, Homo sapiens
  misc_RNA (1)...(19): siRNA sense strand
gccaucaacccuuccauug

SEQ ID NO: 1369926 - RNA, 19 nt, Homo sapiens
  misc_RNA (1)...(19): siRNA sense strand
gugacuacacucugucuuu

SEQ ID NO: 1369927 - RNA, 19 nt, Homo sapiens
  misc_RNA (1)...(19): siRNA sense strand
ugaaguagccaaugauguc

SEQ ID NO: 1369928 - RNA, 19 nt, Homo sapiens
  misc_RNA (1)...(19): siRNA sense strand
gaucuacaaggaguucuuu

SEQ ID NO: 1369929 - RNA, 19 nt, Homo sapiens
  misc_RNA (1)...(19): siRNA sense strand
gcagaaggugcgcauagug

SEQ ID NO: 1369930 - RNA, 19 nt, Homo sapiens
  misc_RNA (1)...(19): siRNA sense strand
aagaaggucuccgauguca

SEQ ID NO: 1369931 - RNA, 19 nt, Homo sapiens
  misc_RNA (1)...(19): siRNA sense strand
gaccuacuaucgggaugaa

SEQ ID NO: 1369932 - RNA, 19 nt, Homo sapiens
  misc_RNA (1)...(19): siRNA sense strand
uagggaaccuggcagaucu

SEQ ID NO: 1369933 - RNA, 19 nt, Homo sapiens
  misc_RNA (1)...(19): siRNA sense strand
ucuccgaugucauauggaa

SEQ ID NO: 1369934 - RNA, 19 nt, Homo sapiens
  misc_RNA (1)...(19): siRNA sense strand
gagaagaugaagggcauga

SEQ ID NO: 1369935 - RNA, 19 nt, Homo sapiens
  misc_RNA (1)...(19): siRNA sense strand
cgacguggugcgccuguuu

SEQ ID NO: 1369936 - RNA, 19 nt, Homo sapiens
  misc_RNA (1)...(19): siRNA sense strand
ucuuugaaguagccaauga

SEQ ID NO: 1369937 - RNA, 19 nt, Homo sapiens
  misc_RNA (1)...(19): siRNA sense strand
uacaaggaguucuuugaag

SEQ ID NO: 1369938 - RNA, 19 nt, Homo sapiens
  misc_RNA (1)...(19): siRNA sense strand
ccugaaaggaucauacaug

SEQ ID NO: 1369939 - RNA, 19 nt, Homo sapiens
  misc_RNA (1)...(19): siRNA sense strand
gaaguagccaaugauguca

SEQ ID NO: 1369940 - RNA, 19 nt, Homo sapiens
  misc_RNA (1)...(19): siRNA sense strand
ccacauccagucccucuuc

SEQ ID NO: 1369941 - RNA, 19 nt, Homo sapiens
  misc_RNA (1)...(19): siRNA sense strand
ggcagaaggugcgcauagu

SEQ ID NO: 1369942 - RNA, 19 nt, Homo sapiens
  misc_RNA (1)...(19): siRNA sense strand
gcagaugaagaagcagaaa

SEQ ID NO: 1369943 - RNA, 19 nt, Homo sapiens
  misc_RNA (1)...(19): siRNA sense strand
cagcuccgguguggccuuu

SEQ ID NO: 1369944 - RNA, 19 nt, Homo sapiens
  misc_RNA (1)...(19): siRNA sense strand
gaccugggacaucuggaaa

SEQ ID NO: 1369945 - RNA, 19 nt, Homo sapiens
  misc_RNA (1)...(19): siRNA sense strand
gagcuggcuguaccugaaa

SEQ ID NO: 1369946 - RNA, 19 nt, Homo sapiens
  misc_RNA (1)...(19): siRNA sense strand
cagacccacucacccucua

SEQ ID NO: 1369947 - RNA, 19 nt, Homo sapiens
  misc_RNA (1)...(19): siRNA sense strand
ggagaucuacaaggaguuc

SEQ ID NO: 1369948 - RNA, 19 nt, Homo sapiens
  misc_RNA (1)...(19): siRNA sense strand
gcugugaccgcaagaugga

SEQ ID NO: 1369949 - RNA, 19 nt, Homo sapiens
  misc_RNA (1)...(19): siRNA sense strand
ggaagccuccugggacugu

SEQ ID NO: 1369950 - RNA, 19 nt, Homo sapiens
  misc_RNA (1)...(19): siRNA sense strand
gggcugggccaccuuucuu

SEQ ID NO: 1369951 - RNA, 19 nt, Homo sapiens
  misc_RNA (1)...(19): siRNA sense strand
ucuaugaccugggacaucu

SEQ ID NO: 1369952 - RNA, 19 nt, Homo sapiens
  misc_RNA (1)...(19): siRNA sense strand
ugaaggaggcagccagcuu

SEQ ID NO: 1369953 - RNA, 19 nt, Homo sapiens
  misc_RNA (1)...(19): siRNA sense strand
ggaagacgaggagaucuac

SEQ ID NO: 1369954 - RNA, 19 nt, Homo sapiens
  misc_RNA (1)...(19): siRNA sense strand
ccucagccaagaccuacua

SEQ ID NO: 1369955 - RNA, 19 nt, Homo sapiens
  misc_RNA (1)...(19): siRNA sense strand
agucgcaagugcagaugaa

SEQ ID NO: 1369956 - RNA, 19 nt, Homo sapiens
  misc_RNA (1)...(19): siRNA sense strand
ucuacaaggaguucuuuga

SEQ ID NO: 1369957 - RNA, 19 nt, Homo sapiens
  misc_RNA (1)...(19): siRNA sense strand
ugcucuggcugcucuauga

SEQ ID NO: 1369958 - RNA, 19 nt, Homo sapiens
  misc_RNA (1)...(19): siRNA sense strand
gcagcgcaaaggccucuga

SEQ ID NO: 1369959 - RNA, 19 nt, Homo sapiens
  misc_RNA (1)...(19): siRNA sense strand
agauggagguggcguucau

SEQ ID NO: 1369960 - RNA, 19 nt, Homo sapiens
  misc_RNA (1)...(19): siRNA sense strand
gaugaagaagcagaaagug

SEQ ID NO: 1369961 - RNA, 19 nt, Homo sapiens
  misc_RNA (1)...(19): siRNA sense strand
cgcaagugcagaugaagaa

SEQ ID NO: 1369962 - RNA, 19 nt, Homo sapiens
  misc_RNA (1)...(19): siRNA sense strand
uccagucccucuucagcuu

SEQ ID NO: 1369963 - RNA, 19 nt, Homo sapiens
  misc_RNA (1)...(19): siRNA sense strand
gcgcugugaccgcaagaug

SEQ ID NO: 1369964 - RNA, 19 nt, Homo sapiens
  misc_RNA (1)...(19): siRNA sense strand
uggccgaccugucuaucau

SEQ ID NO: 1369965 - RNA, 19 nt, Homo sapiens
  misc_RNA (1)...(19): siRNA sense strand
aaggaguucuuugaaguag

SEQ ID NO: 1369966 - RNA, 19 nt, Homo sapiens
  misc_RNA (1)...(19): siRNA sense strand
cagccaagaccuacuaucg

SEQ ID NO: 1369967 - RNA, 19 nt, Homo sapiens
  misc_RNA (1)...(19): siRNA sense strand
gucccucuauccucgagaa

SEQ ID NO: 1369968 - RNA, 19 nt, Homo sapiens
  misc_RNA (1)...(19): siRNA sense strand
gccaucaagcugcaacuca

SEQ ID NO: 1369969 - RNA, 19 nt, Homo sapiens
  misc_RNA (1)...(19): siRNA sense strand
ccgacucgcuggagcuucu

SEQ ID NO: 1369970 - RNA, 19 nt, Homo sapiens
  misc_RNA (1)...(19): siRNA sense strand
gaaggucuccgaugucaua

SEQ ID NO: 1369971 - RNA, 19 nt, Homo sapiens
  misc_RNA (1)...(19): siRNA sense strand
gaucauacaugcgcuguga

SEQ ID NO: 1369972 - RNA, 19 nt, Homo sapiens
  misc_RNA (1)...(19): siRNA sense strand
gccgugagcuggugaagaa

SEQ ID NO: 1369973 - RNA, 19 nt, Homo sapiens
  misc_RNA (1)...(19): siRNA sense strand
ugaagaaggucuccgaugu

SEQ ID NO: 1369974 - RNA, 19 nt, Homo sapiens
  misc_RNA (1)...(19): siRNA sense strand
ggagcuggcuguaccugaa

SEQ ID NO: 1369975 - RNA, 19 nt, Homo sapiens
  misc_RNA (1)...(19): siRNA sense strand
gaucaugccuggguagugu

SEQ ID NO: 1369976 - RNA, 19 nt, Homo sapiens
  misc_RNA (1)...(19): siRNA sense strand
ugggacaucuggaaaggua

SEQ ID NO: 1369977 - RNA, 19 nt, Homo sapiens
  misc_RNA (1)...(19): siRNA sense strand
caaggaguucuuugaagua

SEQ ID NO: 1369978 - RNA, 19 nt, Homo sapiens
  misc_RNA (1)...(19): siRNA sense strand
acaaggaguucuuugaagu

SEQ ID NO: 1369979 - RNA, 19 nt, Homo sapiens
  misc_RNA (1)...(19): siRNA sense strand
gaaccuggcagaucuagag

SEQ ID NO: 1369980 - RNA, 19 nt, Homo sapiens
  misc_RNA (1)...(19): siRNA sense strand
ggucuccgaugucauaugg

SEQ ID NO: 1369981 - RNA, 19 nt, Homo sapiens
  misc_RNA (1)...(19): siRNA sense strand
ccacugucauccaggacua

SEQ ID NO: 1369982 - RNA, 19 nt, Homo sapiens
  misc_RNA (1)...(19): siRNA sense strand
acgaggagaucuacaagga

SEQ ID NO: 1369983 - RNA, 19 nt, Homo sapiens
  misc_RNA (1)...(19): siRNA sense strand
cgucaucccuaccaacguu

SEQ ID NO: 1369984 - RNA, 19 nt, Homo sapiens
  misc_RNA (1)...(19): siRNA sense strand
gaagaaggucuccgauguc

SEQ ID NO: 1369985 - RNA, 19 nt, Homo sapiens
  misc_RNA (1)...(19): siRNA sense strand
gggaagacgaggagaucua

SEQ ID NO: 1369986 - RNA, 19 nt, Homo sapiens
  misc_RNA (1)...(19): siRNA sense strand
gaacacaucuaccccuaca

SEQ ID NO: 1369987 - RNA, 19 nt, Homo sapiens
  misc_RNA (1)...(19): siRNA sense strand
gaagaugaagggcaugaag

SEQ ID NO: 1369988 - RNA, 19 nt, Homo sapiens
  misc_RNA (1)...(19): siRNA sense strand
ugacuacacucugucuuuc

SEQ ID NO: 1369989 - RNA, 19 nt, Homo sapiens
  misc_RNA (1)...(19): siRNA sense strand
cuacaaggaguucuuugaa

SEQ ID NO: 1369990 - RNA, 19 nt, Homo sapiens
  misc_RNA (1)...(19): siRNA sense strand
cagaaggugcgcauaguga

SEQ ID NO: 1369991 - RNA, 19 nt, Homo sapiens
  misc_RNA (1)...(19): siRNA sense strand
gccaucaacccuuccauug

SEQ ID NO: 1369992 - RNA, 19 nt, Homo sapiens
  misc_RNA (1)...(19): siRNA sense strand
gugacuacacucugucuuu

SEQ ID NO: 1369993 - RNA, 19 nt, Homo sapiens
  misc_RNA (1)...(19): siRNA sense strand
ugaaguagccaaugauguc

SEQ ID NO: 1369994 - RNA, 19 nt, Homo sapiens
  misc_RNA (1)...(19): siRNA sense strand
gaucuacaaggaguucuuu

SEQ ID NO: 1369995 - RNA, 19 nt, Homo sapiens
  misc_RNA (1)...(19): siRNA sense strand
gcagaaggugcgcauagug

SEQ ID NO: 1369996 - RNA, 19 nt, Homo sapiens
  misc_RNA (1)...(19): siRNA sense strand
aagaaggucuccgauguca

SEQ ID NO: 1369997 - RNA, 19 nt, Homo sapiens
  misc_RNA (1)...(19): siRNA sense strand
gaccuacuaucgggaugaa

SEQ ID NO: 1369998 - RNA, 19 nt, Homo sapiens
  misc_RNA (1)...(19): siRNA sense strand
uagggaaccuggcagaucu

SEQ ID NO: 1369999 - RNA, 19 nt, Homo sapiens
  misc_RNA (1)...(19): siRNA sense strand
ucuccgaugucauauggaa

SEQ ID NO: 1370000 - RNA, 19 nt, Homo sapiens
  misc_RNA (1)...(19): siRNA sense strand
gagaagaugaagggcauga

SEQ ID NO: 1370001 - RNA, 19 nt, Homo sapiens
  misc_RNA (1)...(19): siRNA sense strand
cgacguggugcgccuguuu

SEQ ID NO: 1370002 - RNA, 19 nt, Homo sapiens
  misc_RNA (1)...(19): siRNA sense strand
ucuuugaaguagccaauga

SEQ ID NO: 1370003 - RNA, 19 nt, Homo sapiens
  misc_RNA (1)...(19): siRNA sense strand
uacaaggaguucuuugaag

SEQ ID NO: 1370004 - RNA, 19 nt, Homo sapiens
  misc_RNA (1)...(19): siRNA sense strand
ccugaaaggaucauacaug

SEQ ID NO: 1370005 - RNA, 19 nt, Homo sapiens
  misc_RNA (1)...(19): siRNA sense strand
gaaguagccaaugauguca

SEQ ID NO: 1370006 - RNA, 19 nt, Homo sapiens
  misc_RNA (1)...(19): siRNA sense strand
ccacauccagucccucuuc

SEQ ID NO: 1370007 - RNA, 19 nt, Homo sapiens
  misc_RNA (1)...(19): siRNA sense strand
ggcagaaggugcgcauagu

SEQ ID NO: 1370008 - RNA, 19 nt, Homo sapiens
  misc_RNA (1)...(19): siRNA sense strand
gcagaugaagaagcagaaa

SEQ ID NO: 1370009 - RNA, 19 nt, Homo sapiens
  misc_RNA (1)...(19): siRNA sense strand
cagcuccgguguggccuuu

SEQ ID NO: 1370010 - RNA, 19 nt, Homo sapiens
  misc_RNA (1)...(19): siRNA sense strand
gaccugggacaucuggaaa

SEQ ID NO: 1370011 - RNA, 19 nt, Homo sapiens
  misc_RNA (1)...(19): siRNA sense strand
gagcuggcuguaccugaaa

SEQ ID NO: 1370012 - RNA, 19 nt, Homo sapiens
  misc_RNA (1)...(19): siRNA sense strand
cagacccacucacccucua

SEQ ID NO: 1370013 - RNA, 19 nt, Homo sapiens
  misc_RNA (1)...(19): siRNA sense strand
ggagaucuacaaggaguuc

SEQ ID NO: 1370014 - RNA, 19 nt, Homo sapiens
  misc_RNA (1)...(19): siRNA sense strand
gcugugaccgcaagaugga

SEQ ID NO: 1370015 - RNA, 19 nt, Homo sapiens
  misc_RNA (1)...(19): siRNA sense strand
ggaagccuccugggacugu

SEQ ID NO: 1370016 - RNA, 19 nt, Homo sapiens
  misc_RNA (1)...(19): siRNA sense strand
gggcugggccaccuuucuu

SEQ ID NO: 1370017 - RNA, 19 nt, Homo sapiens
  misc_RNA (1)...(19): siRNA sense strand
ucuaugaccugggacaucu

SEQ ID NO: 1370018 - RNA, 19 nt, Homo sapiens
  misc_RNA (1)...(19): siRNA sense strand
ugaaggaggcagccagcuu

SEQ ID NO: 1370019 - RNA, 19 nt, Homo sapiens
  misc_RNA (1)...(19): siRNA sense strand
ggaagacgaggagaucuac

SEQ ID NO: 1370020 - RNA, 19 nt, Homo sapiens
  misc_RNA (1)...(19): siRNA sense strand
ccucagccaagaccuacua

SEQ ID NO: 1370021 - RNA, 19 nt, Homo sapiens
  misc_RNA (1)...(19): siRNA sense strand
agucgcaagugcagaugaa

SEQ ID NO: 1370022 - RNA, 19 nt, Homo sapiens
  misc_RNA (1)...(19): siRNA sense strand
ucuacaaggaguucuuuga

SEQ ID NO: 1370023 - RNA, 19 nt, Homo sapiens
  misc_RNA (1)...(19): siRNA sense strand
ugcucuggcugcucuauga

SEQ ID NO: 1370024 - RNA, 19 nt, Homo sapiens
  misc_RNA (1)...(19): siRNA sense strand
gcagcgcaaaggccucuga

SEQ ID NO: 1370025 - RNA, 19 nt, Homo sapiens
  misc_RNA (1)...(19): siRNA sense strand
agauggagguggcguucau

SEQ ID NO: 1370026 - RNA, 19 nt, Homo sapiens
  misc_RNA (1)...(19): siRNA sense strand
gaugaagaagcagaaagug

SEQ ID NO: 1370027 - RNA, 19 nt, Homo sapiens
  misc_RNA (1)...(19): siRNA sense strand
cgcaagugcagaugaagaa

SEQ ID NO: 1370028 - RNA, 19 nt, Homo sapiens
  misc_RNA (1)...(19): siRNA sense strand
uccagucccucuucagcuu

SEQ ID NO: 1370029 - RNA, 19 nt, Homo sapiens
  misc_RNA (1)...(19): siRNA sense strand
gcgcugugaccgcaagaug

SEQ ID NO: 1370030 - RNA, 19 nt, Homo sapiens
  misc_RNA (1)...(19): siRNA sense strand
uggccgaccugucuaucau

SEQ ID NO: 1370031 - RNA, 19 nt, Homo sapiens
  misc_RNA (1)...(19): siRNA sense strand
aaggaguucuuugaaguag

SEQ ID NO: 1370032 - RNA, 19 nt, Homo sapiens
  misc_RNA (1)...(19): siRNA sense strand
cagccaagaccuacuaucg

SEQ ID NO: 1370033 - RNA, 19 nt, Homo sapiens
  misc_RNA (1)...(19): siRNA sense strand
gucccucuauccucgagaa

SEQ ID NO: 1370034 - RNA, 19 nt, Homo sapiens
  misc_RNA (1)...(19): siRNA sense strand
gccaucaagcugcaacuca

SEQ ID NO: 1370035 - RNA, 19 nt, Homo sapiens
  misc_RNA (1)...(19): siRNA sense strand
ccgacucgcuggagcuucu

SEQ ID NO: 1370036 - RNA, 19 nt, Homo sapiens
  misc_RNA (1)...(19): siRNA sense strand
gaaggucuccgaugucaua

SEQ ID NO: 1370037 - RNA, 19 nt, Homo sapiens
  misc_RNA (1)...(19): siRNA sense strand
gaucauacaugcgcuguga

SEQ ID NO: 1370038 - RNA, 19 nt, Homo sapiens
  misc_RNA (1)...(19): siRNA sense strand
gccgugagcuggugaagaa

SEQ ID NO: 1370039 - RNA, 19 nt, Homo sapiens
  misc_RNA (1)...(19): siRNA sense strand
ugaagaaggucuccgaugu

SEQ ID NO: 1370040 - RNA, 19 nt, Homo sapiens
  misc_RNA (1)...(19): siRNA sense strand
ggagcuggcuguaccugaa

SEQ ID NO: 1370041 - RNA, 19 nt, Homo sapiens
  misc_RNA (1)...(19): siRNA sense strand
gaucaugccuggguagugu

SEQ ID NO: 1370042 - RNA, 19 nt, Homo sapiens
  misc_RNA (1)...(19): siRNA sense strand
ugggacaucuggaaaggua

SEQ ID NO: 1370043 - RNA, 19 nt, Homo sapiens
  misc_RNA (1)...(19): siRNA sense strand
caaggaguucuuugaagua

SEQ ID NO: 1370044 - RNA, 19 nt, Homo sapiens
  misc_RNA (1)...(19): siRNA sense strand
acaaggaguucuuugaagu

SEQ ID NO: 1370045 - RNA, 19 nt, Homo sapiens
  misc_RNA (1)...(19): siRNA sense strand
gaaccuggcagaucuagag

SEQ ID NO: 1370046 - RNA, 19 nt, Homo sapiens
  misc_RNA (1)...(19): siRNA sense strand
ggucuccgaugucauaugg

SEQ ID NO: 1370047 - RNA, 19 nt, Homo sapiens
  misc_RNA (1)...(19): siRNA sense strand
ccacugucauccaggacua

SEQ ID NO: 1370048 - RNA, 19 nt, Homo sapiens
  misc_RNA (1)...(19): siRNA sense strand
acgaggagaucuacaagga

SEQ ID NO: 1370049 - RNA, 19 nt, Homo sapiens
  misc_RNA (1)...(19): siRNA sense strand
cgucaucccuaccaacguu

SEQ ID NO: 1370050 - RNA, 19 nt, Homo sapiens
  misc_RNA (1)...(19): siRNA sense strand
gaagaaggucuccgauguc

SEQ ID NO: 1370051 - RNA, 19 nt, Homo sapiens
  misc_RNA (1)...(19): siRNA sense strand
gggaagacgaggagaucua

SEQ ID NO: 1370052 - RNA, 19 nt, Homo sapiens
  misc_RNA (1)...(19): siRNA sense strand
gaacacaucuaccccuaca

SEQ ID NO: 1370053 - RNA, 19 nt, Homo sapiens
  misc_RNA (1)...(19): siRNA sense strand
gaagaugaagggcaugaag

SEQ ID NO: 1370054 - RNA, 19 nt, Homo sapiens
  misc_RNA (1)...(19): siRNA sense strand
ugacuacacucugucuuuc

SEQ ID NO: 1370055 - RNA, 19 nt, Homo sapiens
  misc_RNA (1)...(19): siRNA sense strand
cuacaaggaguucuuugaa

SEQ ID NO: 1370056 - RNA, 19 nt, Homo sapiens
  misc_RNA (1)...(19): siRNA sense strand
cagaaggugcgcauaguga

SEQ ID NO: 1370057 - RNA, 19 nt, Homo sapiens
  misc_RNA (1)...(19): siRNA sense strand
gccaucaacccuuccauug

SEQ ID NO: 1370058 - RNA, 19 nt, Homo sapiens
  misc_RNA (1)...(19): siRNA sense strand
gugacuacacucugucuuu

SEQ ID NO: 1370059 - RNA, 19 nt, Homo sapiens
  misc_RNA (1)...(19): siRNA sense strand
ugaaguagccaaugauguc

SEQ ID NO: 1370060 - RNA, 19 nt, Homo sapiens
  misc_RNA (1)...(19): siRNA sense strand
gaucuacaaggaguucuuu

SEQ ID NO: 1370061 - RNA, 19 nt, Homo sapiens
  misc_RNA (1)...(19): siRNA sense strand
gcagaaggugcgcauagug

SEQ ID NO: 1370062 - RNA, 19 nt, Homo sapiens
  misc_RNA (1)...(19): siRNA sense strand
aagaaggucuccgauguca

SEQ ID NO: 1370063 - RNA, 19 nt, Homo sapiens
  misc_RNA (1)...(19): siRNA sense strand
gaccuacuaucgggaugaa

SEQ ID NO: 1370064 - RNA, 19 nt, Homo sapiens
  misc_RNA (1)...(19): siRNA sense strand
uagggaaccuggcagaucu

SEQ ID NO: 1370065 - RNA, 19 nt, Homo sapiens
  misc_RNA (1)...(19): siRNA sense strand
ucuccgaugucauauggaa

SEQ ID NO: 1370066 - RNA, 19 nt, Homo sapiens
  misc_RNA (1)...(19): siRNA sense strand
gagaagaugaagggcauga

SEQ ID NO: 1370067 - RNA, 19 nt, Homo sapiens
  misc_RNA (1)...(19): siRNA sense strand
cgacguggugcgccuguuu

SEQ ID NO: 1370068 - RNA, 19 nt, Homo sapiens
  misc_RNA (1)...(19): siRNA sense strand
ucuuugaaguagccaauga

SEQ ID NO: 1370069 - RNA, 19 nt, Homo sapiens
  misc_RNA (1)...(19): siRNA sense strand
uacaaggaguucuuugaag

SEQ ID NO: 1370070 - RNA, 19 nt, Homo sapiens
  misc_RNA (1)...(19): siRNA sense strand
ccugaaaggaucauacaug

SEQ ID NO: 1370071 - RNA, 19 nt, Homo sapiens
  misc_RNA (1)...(19): siRNA sense strand
gaaguagccaaugauguca

SEQ ID NO: 1370072 - RNA, 19 nt, Homo sapiens
  misc_RNA (1)...(19): siRNA sense strand
ccacauccagucccucuuc

SEQ ID NO: 1370073 - RNA, 19 nt, Homo sapiens
  misc_RNA (1)...(19): siRNA sense strand
ggcagaaggugcgcauagu

SEQ ID NO: 1370074 - RNA, 19 nt, Homo sapiens
  misc_RNA (1)...(19): siRNA sense strand
gcagaugaagaagcagaaa

SEQ ID NO: 1370075 - RNA, 19 nt, Homo sapiens
  misc_RNA (1)...(19): siRNA sense strand
cagcuccgguguggccuuu

SEQ ID NO: 1370076 - RNA, 19 nt, Homo sapiens
  misc_RNA (1)...(19): siRNA sense strand
gaccugggacaucuggaaa

SEQ ID NO: 1370077 - RNA, 19 nt, Homo sapiens
  misc_RNA (1)...(19): siRNA sense strand
gagcuggcuguaccugaaa

SEQ ID NO: 1370078 - RNA, 19 nt, Homo sapiens
  misc_RNA (1)...(19): siRNA sense strand
cagacccacucacccucua

SEQ ID NO: 1370079 - RNA, 19 nt, Homo sapiens
  misc_RNA (1)...(19): siRNA sense strand
ggagaucuacaaggaguuc

SEQ ID NO: 1370080 - RNA, 19 nt, Homo sapiens
  misc_RNA (1)...(19): siRNA sense strand
gcugugaccgcaagaugga

SEQ ID NO: 1370081 - RNA, 19 nt, Homo sapiens
  misc_RNA (1)...(19): siRNA sense strand
ggaagccuccugggacugu

SEQ ID NO: 1370082 - RNA, 19 nt, Homo sapiens
  misc_RNA (1)...(19): siRNA sense strand
gggcugggccaccuuucuu

SEQ ID NO: 1370083 - RNA, 19 nt, Homo sapiens
  misc_RNA (1)...(19): siRNA sense strand
ucuaugaccugggacaucu

SEQ ID NO: 1370084 - RNA, 19 nt, Homo sapiens
  misc_RNA (1)...(19): siRNA sense strand
ugaaggaggcagccagcuu

SEQ ID NO: 1370085 - RNA, 19 nt, Homo sapiens
  misc_RNA (1)...(19): siRNA sense strand
ggaagacgaggagaucuac

SEQ ID NO: 1370086 - RNA, 19 nt, Homo sapiens
  misc_RNA (1)...(19): siRNA sense strand
ccucagccaagaccuacua

SEQ ID NO: 1370087 - RNA, 19 nt, Homo sapiens
  misc_RNA (1)...(19): siRNA sense strand
agucgcaagugcagaugaa

SEQ ID NO: 1370088 - RNA, 19 nt, Homo sapiens
  misc_RNA (1)...(19): siRNA sense strand
ucuacaaggaguucuuuga

SEQ ID NO: 1370089 - RNA, 19 nt, Homo sapiens
  misc_RNA (1)...(19): siRNA sense strand
ugcucuggcugcucuauga

SEQ ID NO: 1370090 - RNA, 19 nt, Homo sapiens
  misc_RNA (1)...(19): siRNA sense strand
gcagcgcaaaggccucuga

SEQ ID NO: 1370091 - RNA, 19 nt, Homo sapiens
  misc_RNA (1)...(19): siRNA sense strand
agauggagguggcguucau

SEQ ID NO: 1370092 - RNA, 19 nt, Homo sapiens
  misc_RNA (1)...(19): siRNA sense strand
gaugaagaagcagaaagug

SEQ ID NO: 1370093 - RNA, 19 nt, Homo sapiens
  misc_RNA (1)...(19): siRNA sense strand
cgcaagugcagaugaagaa

SEQ ID NO: 1370094 - RNA, 19 nt, Homo sapiens
  misc_RNA (1)...(19): siRNA sense strand
uccagucccucuucagcuu

SEQ ID NO: 1370095 - RNA, 19 nt, Homo sapiens
  misc_RNA (1)...(19): siRNA sense strand
gcgcugugaccgcaagaug

SEQ ID NO: 1370096 - RNA, 19 nt, Homo sapiens
  misc_RNA (1)...(19): siRNA sense strand
uggccgaccugucuaucau

SEQ ID NO: 1370097 - RNA, 19 nt, Homo sapiens
  misc_RNA (1)...(19): siRNA sense strand
aaggaguucuuugaaguag

SEQ ID NO: 1370098 - RNA, 19 nt, Homo sapiens
  misc_RNA (1)...(19): siRNA sense strand
cagccaagaccuacuaucg

SEQ ID NO: 1370099 - RNA, 19 nt, Homo sapiens
  misc_RNA (1)...(19): siRNA sense strand
gucccucuauccucgagaa

SEQ ID NO: 1370100 - RNA, 19 nt, Homo sapiens
  misc_RNA (1)...(19): siRNA sense strand
gccaucaagcugcaacuca

SEQ ID NO: 1370101 - RNA, 19 nt, Homo sapiens
  misc_RNA (1)...(19): siRNA sense strand
ccgacucgcuggagcuucu

SEQ ID NO: 1370102 - RNA, 19 nt, Homo sapiens
  misc_RNA (1)...(19): siRNA sense strand
gaaggucuccgaugucaua

SEQ ID NO: 1370103 - RNA, 19 nt, Homo sapiens
  misc_RNA (1)...(19): siRNA sense strand
gaucauacaugcgcuguga

SEQ ID NO: 1370104 - RNA, 19 nt, Homo sapiens
  misc_RNA (1)...(19): siRNA sense strand
gccgugagcuggugaagaa

SEQ ID NO: 1370105 - RNA, 19 nt, Homo sapiens
  misc_RNA (1)...(19): siRNA sense strand
ugaagaaggucuccgaugu

SEQ ID NO: 1370106 - RNA, 19 nt, Homo sapiens
  misc_RNA (1)...(19): siRNA sense strand
ggagcuggcuguaccugaa

SEQ ID NO: 1370107 - RNA, 19 nt, Homo sapiens
  misc_RNA (1)...(19): siRNA sense strand
gaucaugccuggguagugu

SEQ ID NO: 1370108 - RNA, 19 nt, Homo sapiens
  misc_RNA (1)...(19): siRNA sense strand
ugggacaucuggaaaggua

SEQ ID NO: 1370109 - RNA, 19 nt, Homo sapiens
  misc_RNA (1)...(19): siRNA sense strand
caaggaguucuuugaagua

SEQ ID NO: 1370110 - RNA, 19 nt, Homo sapiens
  misc_RNA (1)...(19): siRNA sense strand
acaaggaguucuuugaagu

SEQ ID NO: 1370111 - RNA, 19 nt, Homo sapiens
  misc_RNA (1)...(19): siRNA sense strand
gaaccuggcagaucuagag

SEQ ID NO: 1370112 - RNA, 19 nt, Homo sapiens
  misc_RNA (1)...(19): siRNA sense strand
ggucuccgaugucauaugg

SEQ ID NO: 1370113 - RNA, 19 nt, Homo sapiens
  misc_RNA (1)...(19): siRNA sense strand
ccacugucauccaggacua

SEQ ID NO: 1370114 - RNA, 19 nt, Homo sapiens
  misc_RNA (1)...(19): siRNA sense strand
acgaggagaucuacaagga

SEQ ID NO: 1370115 - RNA, 19 nt, Homo sapiens
  misc_RNA (1)...(19): siRNA sense strand
cgucaucccuaccaacguu

SEQ ID NO: 1370116 - RNA, 19 nt, Homo sapiens
  misc_RNA (1)...(19): siRNA sense strand
gaagaaggucuccgauguc

SEQ ID NO: 1370117 - RNA, 19 nt, Homo sapiens
  misc_RNA (1)...(19): siRNA sense strand
gggaagacgaggagaucua

SEQ ID NO: 1370118 - RNA, 19 nt, Homo sapiens
  misc_RNA (1)...(19): siRNA sense strand
gaacacaucuaccccuaca

SEQ ID NO: 1370119 - RNA, 19 nt, Homo sapiens
  misc_RNA (1)...(19): siRNA sense strand
gaagaugaagggcaugaag

SEQ ID NO: 1370120 - RNA, 19 nt, Homo sapiens
  misc_RNA (1)...(19): siRNA sense strand
ugacuacacucugucuuuc

SEQ ID NO: 1370121 - RNA, 19 nt, Homo sapiens
  misc_RNA (1)...(19): siRNA sense strand
cuacaaggaguucuuugaa

SEQ ID NO: 1370122 - RNA, 19 nt, Homo sapiens
  misc_RNA (1)...(19): siRNA sense strand
cagaaggugcgcauaguga

SEQ ID NO: 1370123 - RNA, 19 nt, Homo sapiens
  misc_RNA (1)...(19): siRNA sense strand
gccaucaacccuuccauug

SEQ ID NO: 1370124 - RNA, 19 nt, Homo sapiens
  misc_RNA (1)...(19): siRNA sense strand
gugacuacacucugucuuu

SEQ ID NO: 1370125 - RNA, 19 nt, Homo sapiens
  misc_RNA (1)...(19): siRNA sense strand
ugaaguagccaaugauguc

SEQ ID NO: 1370126 - RNA, 19 nt, Homo sapiens
  misc_RNA (1)...(19): siRNA sense strand
gaucuacaaggaguucuuu

SEQ ID NO: 1370127 - RNA, 19 nt, Homo sapiens
  misc_RNA (1)...(19): siRNA sense strand
gcagaaggugcgcauagug

SEQ ID NO: 1370128 - RNA, 19 nt, Homo sapiens
  misc_RNA (1)...(19): siRNA sense strand
aagaaggucuccgauguca

SEQ ID NO: 1370129 - RNA, 19 nt, Homo sapiens
  misc_RNA (1)...(19): siRNA sense strand
gaccuacuaucgggaugaa

SEQ ID NO: 1370130 - RNA, 19 nt, Homo sapiens
  misc_RNA (1)...(19): siRNA sense strand
uagggaaccuggcagaucu

SEQ ID NO: 1370131 - RNA, 19 nt, Homo sapiens
  misc_RNA (1)...(19): siRNA sense strand
ucuccgaugucauauggaa

SEQ ID NO: 1370132 - RNA, 19 nt, Homo sapiens
  misc_RNA (1)...(19): siRNA sense strand
gagaagaugaagggcauga

SEQ ID NO: 1370133 - RNA, 19 nt, Homo sapiens
  misc_RNA (1)...(19): siRNA sense strand
cgacguggugcgccuguuu

SEQ ID NO: 1370134 - RNA, 19 nt, Homo sapiens
  misc_RNA (1)...(19): siRNA sense strand
ucuuugaaguagccaauga

SEQ ID NO: 1370135 - RNA, 19 nt, Homo sapiens
  misc_RNA (1)...(19): siRNA sense strand
uacaaggaguucuuugaag

SEQ ID NO: 1370136 - RNA, 19 nt, Homo sapiens
  misc_RNA (1)...(19): siRNA sense strand
ccugaaaggaucauacaug

SEQ ID NO: 1370137 - RNA, 19 nt, Homo sapiens
  misc_RNA (1)...(19): siRNA sense strand
gaaguagccaaugauguca

SEQ ID NO: 1370138 - RNA, 19 nt, Homo sapiens
  misc_RNA (1)...(19): siRNA sense strand
ccacauccagucccucuuc

SEQ ID NO: 1370139 - RNA, 19 nt, Homo sapiens
  misc_RNA (1)...(19): siRNA sense strand
ggcagaaggugcgcauagu

SEQ ID NO: 1370140 - RNA, 19 nt, Homo sapiens
  misc_RNA (1)...(19): siRNA sense strand
gcagaugaagaagcagaaa

SEQ ID NO: 1370141 - RNA, 19 nt, Homo sapiens
  misc_RNA (1)...(19): siRNA sense strand
cagcuccgguguggccuuu

SEQ ID NO: 1370142 - RNA, 19 nt, Homo sapiens
  misc_RNA (1)...(19): siRNA sense strand
gaccugggacaucuggaaa

SEQ ID NO: 1370143 - RNA, 19 nt, Homo sapiens
  misc_RNA (1)...(19): siRNA sense strand
gagcuggcuguaccugaaa

SEQ ID NO: 1370144 - RNA, 19 nt, Homo sapiens
  misc_RNA (1)...(19): siRNA sense strand
cagacccacucacccucua

SEQ ID NO: 1370145 - RNA, 19 nt, Homo sapiens
  misc_RNA (1)...(19): siRNA sense strand
ggagaucuacaaggaguuc

SEQ ID NO: 1370146 - RNA, 19 nt, Homo sapiens
  misc_RNA (1)...(19): siRNA sense strand
gcugugaccgcaagaugga

SEQ ID NO: 1370147 - RNA, 19 nt, Homo sapiens
  misc_RNA (1)...(19): siRNA sense strand
ggaagccuccugggacugu

SEQ ID NO: 1370148 - RNA, 19 nt, Homo sapiens
  misc_RNA (1)...(19): siRNA sense strand
gggcugggccaccuuucuu

SEQ ID NO: 1370149 - RNA, 19 nt, Homo sapiens
  misc_RNA (1)...(19): siRNA sense strand
ucuaugaccugggacaucu

SEQ ID NO: 1370150 - RNA, 19 nt, Homo sapiens
  misc_RNA (1)...(19): siRNA sense strand
ugaaggaggcagccagcuu

SEQ ID NO: 1370151 - RNA, 19 nt, Homo sapiens
  misc_RNA (1)...(19): siRNA sense strand
ggaagacgaggagaucuac

SEQ ID NO: 1370152 - RNA, 19 nt, Homo sapiens
  misc_RNA (1)...(19): siRNA sense strand
ccucagccaagaccuacua

SEQ ID NO: 1370153 - RNA, 19 nt, Homo sapiens
  misc_RNA (1)...(19): siRNA sense strand
agucgcaagugcagaugaa

SEQ ID NO: 1370154 - RNA, 19 nt, Homo sapiens
  misc_RNA (1)...(19): siRNA sense strand
ucuacaaggaguucuuuga

SEQ ID NO: 1370155 - RNA, 19 nt, Homo sapiens
  misc_RNA (1)...(19): siRNA sense strand
ugcucuggcugcucuauga

SEQ ID NO: 1370156 - RNA, 19 nt, Homo sapiens
  misc_RNA (1)...(19): siRNA sense strand
gcagcgcaaaggccucuga

SEQ ID NO: 1370157 - RNA, 19 nt, Homo sapiens
  misc_RNA (1)...(19): siRNA sense strand
agauggagguggcguucau

SEQ ID NO: 1370158 - RNA, 19 nt, Homo sapiens
  misc_RNA (1)...(19): siRNA sense strand
gaugaagaagcagaaagug

SEQ ID NO: 1370159 - RNA, 19 nt, Homo sapiens
  misc_RNA (1)...(19): siRNA sense strand
cgcaagugcagaugaagaa

SEQ ID NO: 1370160 - RNA, 19 nt, Homo sapiens
  misc_RNA (1)...(19): siRNA sense strand
uccagucccucuucagcuu

SEQ ID NO: 1370161 - RNA, 19 nt, Homo sapiens
  misc_RNA (1)...(19): siRNA sense strand
gcgcugugaccgcaagaug

SEQ ID NO: 1370162 - RNA, 19 nt, Homo sapiens
  misc_RNA (1)...(19): siRNA sense strand
uggccgaccugucuaucau

SEQ ID NO: 1370163 - RNA, 19 nt, Homo sapiens
  misc_RNA (1)...(19): siRNA sense strand
aaggaguucuuugaaguag

SEQ ID NO: 1370164 - RNA, 19 nt, Homo sapiens
  misc_RNA (1)...(19): siRNA sense strand
cagccaagaccuacuaucg

SEQ ID NO: 1370165 - RNA, 19 nt, Homo sapiens
  misc_RNA (1)...(19): siRNA sense strand
gucccucuauccucgagaa

SEQ ID NO: 1370166 - RNA, 19 nt, Homo sapiens
  misc_RNA (1)...(19): siRNA sense strand
gccaucaagcugcaacuca

SEQ ID NO: 1370167 - RNA, 19 nt, Homo sapiens
  misc_RNA (1)...(19): siRNA sense strand
ccgacucgcuggagcuucu

SEQ ID NO: 1370168 - RNA, 19 nt, Homo sapiens
  misc_RNA (1)...(19): siRNA sense strand
gaaggucuccgaugucaua

SEQ ID NO: 1370169 - RNA, 19 nt, Homo sapiens
  misc_RNA (1)...(19): siRNA sense strand
gaucauacaugcgcuguga

SEQ ID NO: 1370170 - RNA, 19 nt, Homo sapiens
  misc_RNA (1)...(19): siRNA sense strand
gccgugagcuggugaagaa

SEQ ID NO: 1370171 - RNA, 19 nt, Homo sapiens
  misc_RNA (1)...(19): siRNA sense strand
ugaagaaggucuccgaugu

SEQ ID NO: 1370172 - RNA, 19 nt, Homo sapiens
  misc_RNA (1)...(19): siRNA sense strand
ggagcuggcuguaccugaa

SEQ ID NO: 1370173 - RNA, 19 nt, Homo sapiens
  misc_RNA (1)...(19): siRNA sense strand
gaucaugccuggguagugu

SEQ ID NO: 1370174 - RNA, 19 nt, Homo sapiens
  misc_RNA (1)...(19): siRNA sense strand
ugggacaucuggaaaggua

SEQ ID NO: 1370175 - RNA, 19 nt, Homo sapiens
  misc_RNA (1)...(19): siRNA sense strand
caaggaguucuuugaagua

SEQ ID NO: 1370176 - RNA, 19 nt, Homo sapiens
  misc_RNA (1)...(19): siRNA sense strand
acaaggaguucuuugaagu

SEQ ID NO: 1370177 - RNA, 19 nt, Homo sapiens
  misc_RNA (1)...(19): siRNA sense strand
gaaccuggcagaucuagag

SEQ ID NO: 1370178 - RNA, 19 nt, Homo sapiens
  misc_RNA (1)...(19): siRNA sense strand
ggucuccgaugucauaugg

SEQ ID NO: 1370179 - RNA, 19 nt, Homo sapiens
  misc_RNA (1)...(19): siRNA sense strand
ccacugucauccaggacua

SEQ ID NO: 1370180 - RNA, 19 nt, Homo sapiens
  misc_RNA (1)...(19): siRNA sense strand
acgaggagaucuacaagga

SEQ ID NO: 1370181 - RNA, 19 nt, Homo sapiens
  misc_RNA (1)...(19): siRNA sense strand
cgucaucccuaccaacguu

SEQ ID NO: 1370182 - RNA, 19 nt, Homo sapiens
  misc_RNA (1)...(19): siRNA sense strand
gaagaaggucuccgauguc

SEQ ID NO: 1370183 - RNA, 19 nt, Homo sapiens
  misc_RNA (1)...(19): siRNA sense strand
gggaagacgaggagaucua

SEQ ID NO: 1370184 - RNA, 19 nt, Homo sapiens
  misc_RNA (1)...(19): siRNA sense strand
gaacacaucuaccccuaca

SEQ ID NO: 1370185 - RNA, 19 nt, Homo sapiens
  misc_RNA (1)...(19): siRNA sense strand
gaagaugaagggcaugaag

SEQ ID NO: 1370186 - RNA, 19 nt, Homo sapiens
  misc_RNA (1)...(19): siRNA sense strand
ugacuacacucugucuuuc

SEQ ID NO: 1370187 - RNA, 19 nt, Homo sapiens
  misc_RNA (1)...(19): siRNA sense strand
cuacaaggaguucuuugaa

SEQ ID NO: 1370188 - RNA, 19 nt, Homo sapiens
  misc_RNA (1)...(19): siRNA sense strand
cagaaggugcgcauaguga

SEQ ID NO: 1370189 - RNA, 19 nt, Homo sapiens
  misc_RNA (1)...(19): siRNA sense strand
gccaucaacccuuccauug

SEQ ID NO: 1370190 - RNA, 19 nt, Homo sapiens
  misc_RNA (1)...(19): siRNA sense strand
gugacuacacucugucuuu

SEQ ID NO: 1370191 - RNA, 19 nt, Homo sapiens
  misc_RNA (1)...(19): siRNA sense strand
ugaaguagccaaugauguc

SEQ ID NO: 1370192 - RNA, 19 nt, Homo sapiens
  misc_RNA (1)...(19): siRNA sense strand
gaucuacaaggaguucuuu

SEQ ID NO: 1370193 - RNA, 19 nt, Homo sapiens
  misc_RNA (1)...(19): siRNA sense strand
gcagaaggugcgcauagug

SEQ ID NO: 1370194 - RNA, 19 nt, Homo sapiens
  misc_RNA (1)...(19): siRNA sense strand
aagaaggucuccgauguca

SEQ ID NO: 1370195 - RNA, 19 nt, Homo sapiens
  misc_RNA (1)...(19): siRNA sense strand
gaccuacuaucgggaugaa

SEQ ID NO: 1370196 - RNA, 19 nt, Homo sapiens
  misc_RNA (1)...(19): siRNA sense strand
uagggaaccuggcagaucu

SEQ ID NO: 1370197 - RNA, 19 nt, Homo sapiens
  misc_RNA (1)...(19): siRNA sense strand
ucuccgaugucauauggaa

SEQ ID NO: 1370198 - RNA, 19 nt, Homo sapiens
  misc_RNA (1)...(19): siRNA sense strand
gagaagaugaagggcauga

SEQ ID NO: 1370199 - RNA, 19 nt, Homo sapiens
  misc_RNA (1)...(19): siRNA sense strand
cgacguggugcgccuguuu

SEQ ID NO: 1370200 - RNA, 19 nt, Homo sapiens
  misc_RNA (1)...(19): siRNA sense strand
ucuuugaaguagccaauga

SEQ ID NO: 1370201 - RNA, 19 nt, Homo sapiens
  misc_RNA (1)...(19): siRNA sense strand
uacaaggaguucuuugaag

SEQ ID NO: 1370202 - RNA, 19 nt, Homo sapiens
  misc_RNA (1)...(19): siRNA sense strand
ccugaaaggaucauacaug

SEQ ID NO: 1370203 - RNA, 19 nt, Homo sapiens
  misc_RNA (1)...(19): siRNA sense strand
gaaguagccaaugauguca

SEQ ID NO: 1370204 - RNA, 19 nt, Homo sapiens
  misc_RNA (1)...(19): siRNA sense strand
ccacauccagucccucuuc

SEQ ID NO: 1370205 - RNA, 19 nt, Homo sapiens
  misc_RNA (1)...(19): siRNA sense strand
ggcagaaggugcgcauagu

SEQ ID NO: 1370206 - RNA, 19 nt, Homo sapiens
  misc_RNA (1)...(19): siRNA sense strand
gcagaugaagaagcagaaa

SEQ ID NO: 1370207 - RNA, 19 nt, Homo sapiens
  misc_RNA (1)...(19): siRNA sense strand
cagcuccgguguggccuuu

SEQ ID NO: 1370208 - RNA, 19 nt, Homo sapiens
  misc_RNA (1)...(19): siRNA sense strand
gaccugggacaucuggaaa

SEQ ID NO: 1370209 - RNA, 19 nt, Homo sapiens
  misc_RNA (1)...(19): siRNA sense strand
gagcuggcuguaccugaaa

SEQ ID NO: 1370210 - RNA, 19 nt, Homo sapiens
  misc_RNA (1)...(19): siRNA sense strand
cagacccacucacccucua

SEQ ID NO: 1370211 - RNA, 19 nt, Homo sapiens
  misc_RNA (1)...(19): siRNA sense strand
ggagaucuacaaggaguuc

SEQ ID NO: 1370212 - RNA, 19 nt, Homo sapiens
  misc_RNA (1)...(19): siRNA sense strand
gcugugaccgcaagaugga

SEQ ID NO: 1370213 - RNA, 19 nt, Homo sapiens
  misc_RNA (1)...(19): siRNA sense strand
ggaagccuccugggacugu

SEQ ID NO: 1370214 - RNA, 19 nt, Homo sapiens
  misc_RNA (1)...(19): siRNA sense strand
gggcugggccaccuuucuu

SEQ ID NO: 1370215 - RNA, 19 nt, Homo sapiens
  misc_RNA (1)...(19): siRNA sense strand
ucuaugaccugggacaucu

SEQ ID NO: 1370216 - RNA, 19 nt, Homo sapiens
  misc_RNA (1)...(19): siRNA sense strand
ugaaggaggcagccagcuu

SEQ ID NO: 1370217 - RNA, 19 nt, Homo sapiens
  misc_RNA (1)...(19): siRNA sense strand
ggaagacgaggagaucuac

SEQ ID NO: 1370218 - RNA, 19 nt, Homo sapiens
  misc_RNA (1)...(19): siRNA sense strand
ccucagccaagaccuacua

SEQ ID NO: 1370219 - RNA, 19 nt, Homo sapiens
  misc_RNA (1)...(19): siRNA sense strand
agucgcaagugcagaugaa

SEQ ID NO: 1370220 - RNA, 19 nt, Homo sapiens
  misc_RNA (1)...(19): siRNA sense strand
ucuacaaggaguucuuuga

SEQ ID NO: 1370221 - RNA, 19 nt, Homo sapiens
  misc_RNA (1)...(19): siRNA sense strand
ugcucuggcugcucuauga

SEQ ID NO: 1370222 - RNA, 19 nt, Homo sapiens
  misc_RNA (1)...(19): siRNA sense strand
gcagcgcaaaggccucuga

SEQ ID NO: 1370223 - RNA, 19 nt, Homo sapiens
  misc_RNA (1)...(19): siRNA sense strand
agauggagguggcguucau

SEQ ID NO: 1370224 - RNA, 19 nt, Homo sapiens
  misc_RNA (1)...(19): siRNA sense strand
gaugaagaagcagaaagug

SEQ ID NO: 1370225 - RNA, 19 nt, Homo sapiens
  misc_RNA (1)...(19): siRNA sense strand
cgcaagugcagaugaagaa

SEQ ID NO: 1370226 - RNA, 19 nt, Homo sapiens
  misc_RNA (1)...(19): siRNA sense strand
uccagucccucuucagcuu

SEQ ID NO: 1370227 - RNA, 19 nt, Homo sapiens
  misc_RNA (1)...(19): siRNA sense strand
gcgcugugaccgcaagaug

SEQ ID NO: 1370228 - RNA, 19 nt, Homo sapiens
  misc_RNA (1)...(19): siRNA sense strand
uggccgaccugucuaucau

SEQ ID NO: 1370229 - RNA, 19 nt, Homo sapiens
  misc_RNA (1)...(19): siRNA sense strand
aaggaguucuuugaaguag

SEQ ID NO: 1370230 - RNA, 19 nt, Homo sapiens
  misc_RNA (1)...(19): siRNA sense strand
cagccaagaccuacuaucg

SEQ ID NO: 1370231 - RNA, 19 nt, Homo sapiens
  misc_RNA (1)...(19): siRNA sense strand
gucccucuauccucgagaa

SEQ ID NO: 1370232 - RNA, 19 nt, Homo sapiens
  misc_RNA (1)...(19): siRNA sense strand
gccaucaagcugcaacuca

SEQ ID NO: 1370233 - RNA, 19 nt, Homo sapiens
  misc_RNA (1)...(19): siRNA sense strand
ccgacucgcuggagcuucu

SEQ ID NO: 1370234 - RNA, 19 nt, Homo sapiens
  misc_RNA (1)...(19): siRNA sense strand
gaaggucuccgaugucaua

SEQ ID NO: 1370235 - RNA, 19 nt, Homo sapiens
  misc_RNA (1)...(19): siRNA sense strand
gaucauacaugcgcuguga

SEQ ID NO: 1370236 - RNA, 19 nt, Homo sapiens
  misc_RNA (1)...(19): siRNA sense strand
gccgugagcuggugaagaa

SEQ ID NO: 1370237 - RNA, 19 nt, Homo sapiens
  misc_RNA (1)...(19): siRNA sense strand
ugaagaaggucuccgaugu

SEQ ID NO: 1370238 - RNA, 19 nt, Homo sapiens
  misc_RNA (1)...(19): siRNA sense strand
ggagcuggcuguaccugaa

SEQ ID NO: 1370239 - RNA, 19 nt, Homo sapiens
  misc_RNA (1)...(19): siRNA sense strand
gaucaugccuggguagugu

SEQ ID NO: 1370240 - RNA, 19 nt, Homo sapiens
  misc_RNA (1)...(19): siRNA sense strand
ugggacaucuggaaaggua

SEQ ID NO: 1370241 - RNA, 19 nt, Homo sapiens
  misc_RNA (1)...(19): siRNA sense strand
caaggaguucuuugaagua

SEQ ID NO: 1370242 - RNA, 19 nt, Homo sapiens
  misc_RNA (1)...(19): siRNA sense strand
acaaggaguucuuugaagu

SEQ ID NO: 1370243 - RNA, 19 nt, Homo sapiens
  misc_RNA (1)...(19): siRNA sense strand
gaaccuggcagaucuagag

SEQ ID NO: 1370244 - RNA, 19 nt, Homo sapiens
  misc_RNA (1)...(19): siRNA sense strand
ggucuccgaugucauaugg

SEQ ID NO: 1370245 - RNA, 19 nt, Homo sapiens
  misc_RNA (1)...(19): siRNA sense strand
ccacugucauccaggacua

SEQ ID NO: 1370246 - RNA, 19 nt, Homo sapiens
  misc_RNA (1)...(19): siRNA sense strand
acgaggagaucuacaagga

SEQ ID NO: 1370247 - RNA, 19 nt, Homo sapiens
  misc_RNA (1)...(19): siRNA sense strand
cgucaucccuaccaacguu

SEQ ID NO: 1370248 - RNA, 19 nt, Homo sapiens
  misc_RNA (1)...(19): siRNA sense strand
gaagaaggucuccgauguc

SEQ ID NO: 1370249 - RNA, 19 nt, Homo sapiens
  misc_RNA (1)...(19): siRNA sense strand
gggaagacgaggagaucua

SEQ ID NO: 1370250 - RNA, 19 nt, Homo sapiens
  misc_RNA (1)...(19): siRNA sense strand
gaacacaucuaccccuaca

SEQ ID NO: 1370251 - RNA, 19 nt, Homo sapiens
  misc_RNA (1)...(19): siRNA sense strand
gaagaugaagggcaugaag

SEQ ID NO: 1370252 - RNA, 19 nt, Homo sapiens
  misc_RNA (1)...(19): siRNA sense strand
ugacuacacucugucuuuc

SEQ ID NO: 1370253 - RNA, 19 nt, Homo sapiens
  misc_RNA (1)...(19): siRNA sense strand
cuacaaggaguucuuugaa

SEQ ID NO: 1370254 - RNA, 19 nt, Homo sapiens
  misc_RNA (1)...(19): siRNA sense strand
cagaaggugcgcauaguga

SEQ ID NO: 1370255 - RNA, 19 nt, Homo sapiens
  misc_RNA (1)...(19): siRNA sense strand
gccaucaacccuuccauug

SEQ ID NO: 1370256 - RNA, 19 nt, Homo sapiens
  misc_RNA (1)...(19): siRNA sense strand
gugacuacacucugucuuu

SEQ ID NO: 1370257 - RNA, 19 nt, Homo sapiens
  misc_RNA (1)...(19): siRNA sense strand
ugaaguagccaaugauguc

SEQ ID NO: 1370258 - RNA, 19 nt, Homo sapiens
  misc_RNA (1)...(19): siRNA sense strand
gaucuacaaggaguucuuu

SEQ ID NO: 1370259 - RNA, 19 nt, Homo sapiens
  misc_RNA (1)...(19): siRNA sense strand
gcagaaggugcgcauagug

SEQ ID NO: 1370260 - RNA, 19 nt, Homo sapiens
  misc_RNA (1)...(19): siRNA sense strand
aagaaggucuccgauguca

SEQ ID NO: 1370261 - RNA, 19 nt, Homo sapiens
  misc_RNA (1)...(19): siRNA sense strand
gaccuacuaucgggaugaa

SEQ ID NO: 1370262 - RNA, 19 nt, Homo sapiens
  misc_RNA (1)...(19): siRNA sense strand
uagggaaccuggcagaucu

SEQ ID NO: 1370263 - RNA, 19 nt, Homo sapiens
  misc_RNA (1)...(19): siRNA sense strand
ucuccgaugucauauggaa

SEQ ID NO: 1370264 - RNA, 19 nt, Homo sapiens
  misc_RNA (1)...(19): siRNA sense strand
gagaagaugaagggcauga

SEQ ID NO: 1370265 - RNA, 19 nt, Homo sapiens
  misc_RNA (1)...(19): siRNA sense strand
cgacguggugcgccuguuu

SEQ ID NO: 1370266 - RNA, 19 nt, Homo sapiens
  misc_RNA (1)...(19): siRNA sense strand
ucuuugaaguagccaauga

SEQ ID NO: 1370267 - RNA, 19 nt, Homo sapiens
  misc_RNA (1)...(19): siRNA sense strand
uacaaggaguucuuugaag

SEQ ID NO: 1370268 - RNA, 19 nt, Homo sapiens
  misc_RNA (1)...(19): siRNA sense strand
ccugaaaggaucauacaug

SEQ ID NO: 1370269 - RNA, 19 nt, Homo sapiens
  misc_RNA (1)...(19): siRNA sense strand
gaaguagccaaugauguca

SEQ ID NO: 1370270 - RNA, 19 nt, Homo sapiens
  misc_RNA (1)...(19): siRNA sense strand
ccacauccagucccucuuc

SEQ ID NO: 1370271 - RNA, 19 nt, Homo sapiens
  misc_RNA (1)...(19): siRNA sense strand
ggcagaaggugcgcauagu

SEQ ID NO: 1370272 - RNA, 19 nt, Homo sapiens
  misc_RNA (1)...(19): siRNA sense strand
gcagaugaagaagcagaaa

SEQ ID NO: 1370273 - RNA, 19 nt, Homo sapiens
  misc_RNA (1)...(19): siRNA sense strand
cagcuccgguguggccuuu

SEQ ID NO: 1370274 - RNA, 19 nt, Homo sapiens
  misc_RNA (1)...(19): siRNA sense strand
gaccugggacaucuggaaa

SEQ ID NO: 1370275 - RNA, 19 nt, Homo sapiens
  misc_RNA (1)...(19): siRNA sense strand
gagcuggcuguaccugaaa

SEQ ID NO: 1370276 - RNA, 19 nt, Homo sapiens
  misc_RNA (1)...(19): siRNA sense strand
cagacccacucacccucua

SEQ ID NO: 1370277 - RNA, 19 nt, Homo sapiens
  misc_RNA (1)...(19): siRNA sense strand
ggagaucuacaaggaguuc

SEQ ID NO: 1370278 - RNA, 19 nt, Homo sapiens
  misc_RNA (1)...(19): siRNA sense strand
gcugugaccgcaagaugga

SEQ ID NO: 1370279 - RNA, 19 nt, Homo sapiens
  misc_RNA (1)...(19): siRNA sense strand
ggaagccuccugggacugu

SEQ ID NO: 1370280 - RNA, 19 nt, Homo sapiens
  misc_RNA (1)...(19): siRNA sense strand
gggcugggccaccuuucuu

SEQ ID NO: 1370281 - RNA, 19 nt, Homo sapiens
  misc_RNA (1)...(19): siRNA sense strand
ucuaugaccugggacaucu

SEQ ID NO: 1370282 - RNA, 19 nt, Homo sapiens
  misc_RNA (1)...(19): siRNA sense strand
ugaaggaggcagccagcuu

SEQ ID NO: 1370283 - RNA, 19 nt, Homo sapiens
  misc_RNA (1)...(19): siRNA sense strand
ggaagacgaggagaucuac

SEQ ID NO: 1370284 - RNA, 19 nt, Homo sapiens
  misc_RNA (1)...(19): siRNA sense strand
ccucagccaagaccuacua

SEQ ID NO: 1370285 - RNA, 19 nt, Homo sapiens
  misc_RNA (1)...(19): siRNA sense strand
agucgcaagugcagaugaa

SEQ ID NO: 1370286 - RNA, 19 nt, Homo sapiens
  misc_RNA (1)...(19): siRNA sense strand
ucuacaaggaguucuuuga

SEQ ID NO: 1370287 - RNA, 19 nt, Homo sapiens
  misc_RNA (1)...(19): siRNA sense strand
ugcucuggcugcucuauga

SEQ ID NO: 1370288 - RNA, 19 nt, Homo sapiens
  misc_RNA (1)...(19): siRNA sense strand
gcagcgcaaaggccucuga

SEQ ID NO: 1370289 - RNA, 19 nt, Homo sapiens
  misc_RNA (1)...(19): siRNA sense strand
agauggagguggcguucau

SEQ ID NO: 1370290 - RNA, 19 nt, Homo sapiens
  misc_RNA (1)...(19): siRNA sense strand
gaugaagaagcagaaagug

SEQ ID NO: 1370291 - RNA, 19 nt, Homo sapiens
  misc_RNA (1)...(19): siRNA sense strand
cgcaagugcagaugaagaa

SEQ ID NO: 1370292 - RNA, 19 nt, Homo sapiens
  misc_RNA (1)...(19): siRNA sense strand
uccagucccucuucagcuu

SEQ ID NO: 1370293 - RNA, 19 nt, Homo sapiens
  misc_RNA (1)...(19): siRNA sense strand
gcgcugugaccgcaagaug

SEQ ID NO: 1370294 - RNA, 19 nt, Homo sapiens
  misc_RNA (1)...(19): siRNA sense strand
uggccgaccugucuaucau

SEQ ID NO: 1370295 - RNA, 19 nt, Homo sapiens
  misc_RNA (1)...(19): siRNA sense strand
aaggaguucuuugaaguag

SEQ ID NO: 1370296 - RNA, 19 nt, Homo sapiens
  misc_RNA (1)...(19): siRNA sense strand
cagccaagaccuacuaucg

SEQ ID NO: 1370297 - RNA, 19 nt, Homo sapiens
  misc_RNA (1)...(19): siRNA sense strand
gucccucuauccucgagaa

SEQ ID NO: 1370298 - RNA, 19 nt, Homo sapiens
  misc_RNA (1)...(19): siRNA sense strand
gccaucaagcugcaacuca

SEQ ID NO: 1370299 - RNA, 19 nt, Homo sapiens
  misc_RNA (1)...(19): siRNA sense strand
ccgacucgcuggagcuucu

SEQ ID NO: 1370300 - RNA, 19 nt, Homo sapiens
  misc_RNA (1)...(19): siRNA sense strand
gaacagaucugaugaauga

SEQ ID NO: 1370301 - RNA, 19 nt, Homo sapiens
  misc_RNA (1)...(19): siRNA sense strand
caagagagcugaagacuau

SEQ ID NO: 1370302 - RNA, 19 nt, Homo sapiens
  misc_RNA (1)...(19): siRNA sense strand
gaagggaguuugcuaaauu

SEQ ID NO: 1370303 - RNA, 19 nt, Homo sapiens
  misc_RNA (1)...(19): siRNA sense strand
ccacagacauuuacauuaa

SEQ ID NO: 1370304 - RNA, 19 nt, Homo sapiens
  misc_RNA (1)...(19): siRNA sense strand
gcgcauaucuggaaauuug

SEQ ID NO: 1370305 - RNA, 19 nt, Homo sapiens
  misc_RNA (1)...(19): siRNA sense strand
gaagagggauaauacaaau

SEQ ID NO: 1370306 - RNA, 19 nt, Homo sapiens
  misc_RNA (1)...(19): siRNA sense strand
gugaagacauggaugcuua

SEQ ID NO: 1370307 - RNA, 19 nt, Homo sapiens
  misc_RNA (1)...(19): siRNA sense strand
gaaagacgauuuggagaau

SEQ ID NO: 1370308 - RNA, 19 nt, Homo sapiens
  misc_RNA (1)...(19): siRNA sense strand
guaauucaguugaucauug

SEQ ID NO: 1370309 - RNA, 19 nt, Homo sapiens
  misc_RNA (1)...(19): siRNA sense strand
gaaaugaggaggauuacuu

SEQ ID NO: 1370310 - RNA, 19 nt, Homo sapiens
  misc_RNA (1)...(19): siRNA sense strand
caaaucauguggagaaugu

SEQ ID NO: 1370311 - RNA, 19 nt, Homo sapiens
  misc_RNA (1)...(19): siRNA sense strand
gaacugcaccagcccauuu

SEQ ID NO: 1370312 - RNA, 19 nt, Homo sapiens
  misc_RNA (1)...(19): siRNA sense strand
guacagauccgaaguuuca

SEQ ID NO: 1370313 - RNA, 19 nt, Homo sapiens
  misc_RNA (1)...(19): siRNA sense strand
cagaugaaguuaacaguga

SEQ ID NO: 1370314 - RNA, 19 nt, Homo sapiens
  misc_RNA (1)...(19): siRNA sense strand
ggaguuugcuaaauuugaa

SEQ ID NO: 1370315 - RNA, 19 nt, Homo sapiens
  misc_RNA (1)...(19): siRNA sense strand
gugcagagccuucaauaaa

SEQ ID NO: 1370316 - RNA, 19 nt, Homo sapiens
  misc_RNA (1)...(19): siRNA sense strand
gaacaacgaggucaugguu

SEQ ID NO: 1370317 - RNA, 19 nt, Homo sapiens
  misc_RNA (1)...(19): siRNA sense strand
gaaacuugguggcauuguu

SEQ ID NO: 1370318 - RNA, 19 nt, Homo sapiens
  misc_RNA (1)...(19): siRNA sense strand
gaaaugguguuugcaagug

SEQ ID NO: 1370319 - RNA, 19 nt, Homo sapiens
  misc_RNA (1)...(19): siRNA sense strand
ggaagagggauaauacaaa

SEQ ID NO: 1370320 - RNA, 19 nt, Homo sapiens
  misc_RNA (1)...(19): siRNA sense strand
caaauugucagaaggagua

SEQ ID NO: 1370321 - RNA, 19 nt, Homo sapiens
  misc_RNA (1)...(19): siRNA sense strand
ggagaaguauuuaaugaac

SEQ ID NO: 1370322 - RNA, 19 nt, Homo sapiens
  misc_RNA (1)...(19): siRNA sense strand
cccagaggcuccaaagaua

SEQ ID NO: 1370323 - RNA, 19 nt, Homo sapiens
  misc_RNA (1)...(19): siRNA sense strand
gcugaagacuaucccauug

SEQ ID NO: 1370324 - RNA, 19 nt, Homo sapiens
  misc_RNA (1)...(19): siRNA sense strand
agacaucauuccaauugua

SEQ ID NO: 1370325 - RNA, 19 nt, Homo sapiens
  misc_RNA (1)...(19): siRNA sense strand
gauccugugucccauugua

SEQ ID NO: 1370326 - RNA, 19 nt, Homo sapiens
  misc_RNA (1)...(19): siRNA sense strand
ggaaguagagguuauucuu

SEQ ID NO: 1370327 - RNA, 19 nt, Homo sapiens
  misc_RNA (1)...(19): siRNA sense strand
ucagaaggaguaacaauaa

SEQ ID NO: 1370328 - RNA, 19 nt, Homo sapiens
  misc_RNA (1)...(19): siRNA sense strand
gaaaaugaaugccaaaugg

SEQ ID NO: 1370329 - RNA, 19 nt, Homo sapiens
  misc_RNA (1)...(19): siRNA sense strand
gcaagugucguguguguga

SEQ ID NO: 1370330 - RNA, 19 nt, Homo sapiens
  misc_RNA (1)...(19): siRNA sense strand
gugauaauuucaacuguga

SEQ ID NO: 1370331 - RNA, 19 nt, Homo sapiens
  misc_RNA (1)...(19): siRNA sense strand
acaauucccuuuccucaga

SEQ ID NO: 1370332 - RNA, 19 nt, Homo sapiens
  misc_RNA (1)...(19): siRNA sense strand
gaaggaguaacaauaaguu

SEQ ID NO: 1370333 - RNA, 19 nt, Homo sapiens
  misc_RNA (1)...(19): siRNA sense strand
gcaauguaauucaguugau

SEQ ID NO: 1370334 - RNA, 19 nt, Homo sapiens
  misc_RNA (1)...(19): siRNA sense strand
gguagaaagucgggacaaa

SEQ ID NO: 1370335 - RNA, 19 nt, Homo sapiens
  misc_RNA (1)...(19): siRNA sense strand
gaaggauguugacgacugu

SEQ ID NO: 1370336 - RNA, 19 nt, Homo sapiens
  misc_RNA (1)...(19): siRNA sense strand
aaacagcgcauaucuggaa

SEQ ID NO: 1370337 - RNA, 19 nt, Homo sapiens
  misc_RNA (1)...(19): siRNA sense strand
ccagacaucauuccaauug

SEQ ID NO: 1370338 - RNA, 19 nt, Homo sapiens
  misc_RNA (1)...(19): siRNA sense strand
guaaggagaaggauguuga

SEQ ID NO: 1370339 - RNA, 19 nt, Homo sapiens
  misc_RNA (1)...(19): siRNA sense strand
ugauagauccaauggcuua

SEQ ID NO: 1370340 - RNA, 19 nt, Homo sapiens
  misc_RNA (1)...(19): siRNA sense strand
gaaaucugcaguaacaaug

SEQ ID NO: 1370341 - RNA, 19 nt, Homo sapiens
  misc_RNA (1)...(19): siRNA sense strand
gcaugugacuguucuuugg

SEQ ID NO: 1370342 - RNA, 19 nt, Homo sapiens
  misc_RNA (1)...(19): siRNA sense strand
ggagaugagguucaauuug

SEQ ID NO: 1370343 - RNA, 19 nt, Homo sapiens
  misc_RNA (1)...(19): siRNA sense strand
cagaggauauuacucagau

SEQ ID NO: 1370344 - RNA, 19 nt, Homo sapiens
  misc_RNA (1)...(19): siRNA sense strand
gcaaacgugugagaugugu

SEQ ID NO: 1370345 - RNA, 19 nt, Homo sapiens
  misc_RNA (1)...(19): siRNA sense strand
gaaagucccaagugucaug

SEQ ID NO: 1370346 - RNA, 19 nt, Homo sapiens
  misc_RNA (1)...(19): siRNA sense strand
gugcucagucuuacuaaua

SEQ ID NO: 1370347 - RNA, 19 nt, Homo sapiens
  misc_RNA (1)...(19): siRNA sense strand
ggacuucagaauuggauuu

SEQ ID NO: 1370348 - RNA, 19 nt, Homo sapiens
  misc_RNA (1)...(19): siRNA sense strand
gcaaaggaacagcagagaa

SEQ ID NO: 1370349 - RNA, 19 nt, Homo sapiens
  misc_RNA (1)...(19): siRNA sense strand
gggcaaacgugugagaugu

SEQ ID NO: 1370350 - RNA, 19 nt, Homo sapiens
  misc_RNA (1)...(19): siRNA sense strand
ugcacgaugugaugauuua

SEQ ID NO: 1370351 - RNA, 19 nt, Homo sapiens
  misc_RNA (1)...(19): siRNA sense strand
uagauccaauggcuuaauu

SEQ ID NO: 1370352 - RNA, 19 nt, Homo sapiens
  misc_RNA (1)...(19): siRNA sense strand
gaauuggauuuggcucauu

SEQ ID NO: 1370353 - RNA, 19 nt, Homo sapiens
  misc_RNA (1)...(19): siRNA sense strand
uagaaagucgggacaaauu

SEQ ID NO: 1370354 - RNA, 19 nt, Homo sapiens
  misc_RNA (1)...(19): siRNA sense strand
aaugaaaugaggaggauua

SEQ ID NO: 1370355 - RNA, 19 nt, Homo sapiens
  misc_RNA (1)...(19): siRNA sense strand
aauuguagcuggugugguu

SEQ ID NO: 1370356 - RNA, 19 nt, Homo sapiens
  misc_RNA (1)...(19): siRNA sense strand
agaaagucgggacaaauua

SEQ ID NO: 1370357 - RNA, 19 nt, Homo sapiens
  misc_RNA (1)...(19): siRNA sense strand
gagcauaaagaauguguuc

SEQ ID NO: 1370358 - RNA, 19 nt, Homo sapiens
  misc_RNA (1)...(19): siRNA sense strand
uccaauggcuuaauuugug

SEQ ID NO: 1370359 - RNA, 19 nt, Homo sapiens
  misc_RNA (1)...(19): siRNA sense strand
gaaguuaacagugaagaca

SEQ ID NO: 1370360 - RNA, 19 nt, Homo sapiens
  misc_RNA (1)...(19): siRNA sense strand
cagcacagaugaaguuaac

SEQ ID NO: 1370361 - RNA, 19 nt, Homo sapiens
  misc_RNA (1)...(19): siRNA sense strand
gcaaaugccaaaucaugug

SEQ ID NO: 1370362 - RNA, 19 nt, Homo sapiens
  misc_RNA (1)...(19): siRNA sense strand
gaagaauuucagccuguuu

SEQ ID NO: 1370363 - RNA, 19 nt, Homo sapiens
  misc_RNA (1)...(19): siRNA sense strand
cagaggcuccaaagauaua

SEQ ID NO: 1370364 - RNA, 19 nt, Homo sapiens
  misc_RNA (1)...(19): siRNA sense strand
cugcugauauggaagcuuu

SEQ ID NO: 1370365 - RNA, 19 nt, Homo sapiens
  misc_RNA (1)...(19): siRNA sense strand
caacugugauagauccaau

SEQ ID NO: 1370366 - RNA, 19 nt, Homo sapiens
  misc_RNA (1)...(19): siRNA sense strand
uagagguuauucuucagua

SEQ ID NO: 1370367 - RNA, 19 nt, Homo sapiens
  misc_RNA (1)...(19): siRNA sense strand
cagcgcauaucuggaaauu

SEQ ID NO: 1370368 - RNA, 19 nt, Homo sapiens
  misc_RNA (1)...(19): siRNA sense strand
caaaggaacagcagagaag

SEQ ID NO: 1370369 - RNA, 19 nt, Homo sapiens
  misc_RNA (1)...(19): siRNA sense strand
gaacagcagagaagcucaa

SEQ ID NO: 1370370 - RNA, 19 nt, Homo sapiens
  misc_RNA (1)...(19): siRNA sense strand
gauccaauggcuuaauuug

SEQ ID NO: 1370371 - RNA, 19 nt, Homo sapiens
  misc_RNA (1)...(19): siRNA sense strand
gaaaacaguucagaaaucu

SEQ ID NO: 1370372 - RNA, 19 nt, Homo sapiens
  misc_RNA (1)...(19): siRNA sense strand
caagugucaugaaggaaau

SEQ ID NO: 1370373 - RNA, 19 nt, Homo sapiens
  misc_RNA (1)...(19): siRNA sense strand
gucagaaggaguaacaaua

SEQ ID NO: 1370374 - RNA, 19 nt, Homo sapiens
  misc_RNA (1)...(19): siRNA sense strand
gaggauuacuucggacuuc

SEQ ID NO: 1370375 - RNA, 19 nt, Homo sapiens
  misc_RNA (1)...(19): siRNA sense strand
ugaaagacgauuuggagaa

SEQ ID NO: 1370376 - RNA, 19 nt, Homo sapiens
  misc_RNA (1)...(19): siRNA sense strand
gccacagacauuuacauua

SEQ ID NO: 1370377 - RNA, 19 nt, Homo sapiens
  misc_RNA (1)...(19): siRNA sense strand
gcaguugguuuugcgauua

SEQ ID NO: 1370378 - RNA, 19 nt, Homo sapiens
  misc_RNA (1)...(19): siRNA sense strand
aaaagacugugaugccuua

SEQ ID NO: 1370379 - RNA, 19 nt, Homo sapiens
  misc_RNA (1)...(19): siRNA sense strand
ggaaaugguguuugcaagu

SEQ ID NO: 1370380 - RNA, 19 nt, Homo sapiens
  misc_RNA (1)...(19): siRNA sense strand
gcgaaggcaucccugaaag

SEQ ID NO: 1370381 - RNA, 19 nt, Homo sapiens
  misc_RNA (1)...(19): siRNA sense strand
gcucagucuuacuaauaaa

SEQ ID NO: 1370382 - RNA, 19 nt, Homo sapiens
  misc_RNA (1)...(19): siRNA sense strand
gcaccagcccauuuagcua

SEQ ID NO: 1370383 - RNA, 19 nt, Homo sapiens
  misc_RNA (1)...(19): siRNA sense strand
aagggaguuugcuaaauuu

SEQ ID NO: 1370384 - RNA, 19 nt, Homo sapiens
  misc_RNA (1)...(19): siRNA sense strand
acaacgaggucaugguuca

SEQ ID NO: 1370385 - RNA, 19 nt, Homo sapiens
  misc_RNA (1)...(19): siRNA sense strand
cugauuggcuggaggaaug

SEQ ID NO: 1370386 - RNA, 19 nt, Homo sapiens
  misc_RNA (1)...(19): siRNA sense strand
aaguagagguuauucuuca

SEQ ID NO: 1370387 - RNA, 19 nt, Homo sapiens
  misc_RNA (1)...(19): siRNA sense strand
guccagacaucauuccaau

SEQ ID NO: 1370388 - RNA, 19 nt, Homo sapiens
  misc_RNA (1)...(19): siRNA sense strand
gaaagucgggacaaauuac

SEQ ID NO: 1370389 - RNA, 19 nt, Homo sapiens
  misc_RNA (1)...(19): siRNA sense strand
guguacagauccgaaguuu

SEQ ID NO: 1370390 - RNA, 19 nt, Homo sapiens
  misc_RNA (1)...(19): siRNA sense strand
guaggaagagggauaauac

SEQ ID NO: 1370391 - RNA, 19 nt, Homo sapiens
  misc_RNA (1)...(19): siRNA sense strand
ccaagugucaugaaggaaa

SEQ ID NO: 1370392 - RNA, 19 nt, Homo sapiens
  misc_RNA (1)...(19): siRNA sense strand
gaucugaugaaugaaauga

SEQ ID NO: 1370393 - RNA, 19 nt, Homo sapiens
  misc_RNA (1)...(19): siRNA sense strand
ggacaguguguuuguagga

SEQ ID NO: 1370394 - RNA, 19 nt, Homo sapiens
  misc_RNA (1)...(19): siRNA sense strand
cauuacugcugauauggaa

SEQ ID NO: 1370395 - RNA, 19 nt, Homo sapiens
  misc_RNA (1)...(19): siRNA sense strand
gcuccaaagauauaaagaa

SEQ ID NO: 1370396 - RNA, 19 nt, Homo sapiens
  misc_RNA (1)...(19): siRNA sense strand
ugacgacuguugguucuau

SEQ ID NO: 1370397 - RNA, 19 nt, Homo sapiens
  misc_RNA (1)...(19): siRNA sense strand
uguggugucuguaagugua

SEQ ID NO: 1370398 - RNA, 19 nt, Homo sapiens
  misc_RNA (1)...(19): siRNA sense strand
gaggaaaugguguuugcaa

SEQ ID NO: 1370399 - RNA, 19 nt, Homo sapiens
  misc_RNA (1)...(19): siRNA sense strand
gacaguguguuuguaggaa

SEQ ID NO: 1370400 - RNA, 19 nt, Homo sapiens
  misc_RNA (1)...(19): siRNA sense strand
gaacagaucugaugaauga

SEQ ID NO: 1370401 - RNA, 19 nt, Homo sapiens
  misc_RNA (1)...(19): siRNA sense strand
caagagagcugaagacuau

SEQ ID NO: 1370402 - RNA, 19 nt, Homo sapiens
  misc_RNA (1)...(19): siRNA sense strand
gaagggaguuugcuaaauu

SEQ ID NO: 1370403 - RNA, 19 nt, Homo sapiens
  misc_RNA (1)...(19): siRNA sense strand
ccacagacauuuacauuaa

SEQ ID NO: 1370404 - RNA, 19 nt, Homo sapiens
  misc_RNA (1)...(19): siRNA sense strand
gcgcauaucuggaaauuug

SEQ ID NO: 1370405 - RNA, 19 nt, Homo sapiens
  misc_RNA (1)...(19): siRNA sense strand
gaagagggauaauacaaau

SEQ ID NO: 1370406 - RNA, 19 nt, Homo sapiens
  misc_RNA (1)...(19): siRNA sense strand
gugaagacauggaugcuua

SEQ ID NO: 1370407 - RNA, 19 nt, Homo sapiens
  misc_RNA (1)...(19): siRNA sense strand
gaaagacgauuuggagaau

SEQ ID NO: 1370408 - RNA, 19 nt, Homo sapiens
  misc_RNA (1)...(19): siRNA sense strand
guaauucaguugaucauug

SEQ ID NO: 1370409 - RNA, 19 nt, Homo sapiens
  misc_RNA (1)...(19): siRNA sense strand
gaaaugaggaggauuacuu

SEQ ID NO: 1370410 - RNA, 19 nt, Homo sapiens
  misc_RNA (1)...(19): siRNA sense strand
caaaucauguggagaaugu

SEQ ID NO: 1370411 - RNA, 19 nt, Homo sapiens
  misc_RNA (1)...(19): siRNA sense strand
gaacugcaccagcccauuu

SEQ ID NO: 1370412 - RNA, 19 nt, Homo sapiens
  misc_RNA (1)...(19): siRNA sense strand
guacagauccgaaguuuca

SEQ ID NO: 1370413 - RNA, 19 nt, Homo sapiens
  misc_RNA (1)...(19): siRNA sense strand
cagaugaaguuaacaguga

SEQ ID NO: 1370414 - RNA, 19 nt, Homo sapiens
  misc_RNA (1)...(19): siRNA sense strand
ggaguuugcuaaauuugaa

SEQ ID NO: 1370415 - RNA, 19 nt, Homo sapiens
  misc_RNA (1)...(19): siRNA sense strand
gugcagagccuucaauaaa

SEQ ID NO: 1370416 - RNA, 19 nt, Homo sapiens
  misc_RNA (1)...(19): siRNA sense strand
gaacaacgaggucaugguu

SEQ ID NO: 1370417 - RNA, 19 nt, Homo sapiens
  misc_RNA (1)...(19): siRNA sense strand
gaaacuugguggcauuguu

SEQ ID NO: 1370418 - RNA, 19 nt, Homo sapiens
  misc_RNA (1)...(19): siRNA sense strand
gaaaugguguuugcaagug

SEQ ID NO: 1370419 - RNA, 19 nt, Homo sapiens
  misc_RNA (1)...(19): siRNA sense strand
ggaagagggauaauacaaa

SEQ ID NO: 1370420 - RNA, 19 nt, Homo sapiens
  misc_RNA (1)...(19): siRNA sense strand
caaauugucagaaggagua

SEQ ID NO: 1370421 - RNA, 19 nt, Homo sapiens
  misc_RNA (1)...(19): siRNA sense strand
ggagaaguauuuaaugaac

SEQ ID NO: 1370422 - RNA, 19 nt, Homo sapiens
  misc_RNA (1)...(19): siRNA sense strand
cccagaggcuccaaagaua

SEQ ID NO: 1370423 - RNA, 19 nt, Homo sapiens
  misc_RNA (1)...(19): siRNA sense strand
gcugaagacuaucccauug

SEQ ID NO: 1370424 - RNA, 19 nt, Homo sapiens
  misc_RNA (1)...(19): siRNA sense strand
agacaucauuccaauugua

SEQ ID NO: 1370425 - RNA, 19 nt, Homo sapiens
  misc_RNA (1)...(19): siRNA sense strand
gauccugugucccauugua

SEQ ID NO: 1370426 - RNA, 19 nt, Homo sapiens
  misc_RNA (1)...(19): siRNA sense strand
ggaaguagagguuauucuu

SEQ ID NO: 1370427 - RNA, 19 nt, Homo sapiens
  misc_RNA (1)...(19): siRNA sense strand
ucagaaggaguaacaauaa

SEQ ID NO: 1370428 - RNA, 19 nt, Homo sapiens
  misc_RNA (1)...(19): siRNA sense strand
gaaaaugaaugccaaaugg

SEQ ID NO: 1370429 - RNA, 19 nt, Homo sapiens
  misc_RNA (1)...(19): siRNA sense strand
gcaagugucguguguguga

SEQ ID NO: 1370430 - RNA, 19 nt, Homo sapiens
  misc_RNA (1)...(19): siRNA sense strand
gugauaauuucaacuguga

SEQ ID NO: 1370431 - RNA, 19 nt, Homo sapiens
  misc_RNA (1)...(19): siRNA sense strand
acaauucccuuuccucaga

SEQ ID NO: 1370432 - RNA, 19 nt, Homo sapiens
  misc_RNA (1)...(19): siRNA sense strand
gaaggaguaacaauaaguu

SEQ ID NO: 1370433 - RNA, 19 nt, Homo sapiens
  misc_RNA (1)...(19): siRNA sense strand
gcaauguaauucaguugau

SEQ ID NO: 1370434 - RNA, 19 nt, Homo sapiens
  misc_RNA (1)...(19): siRNA sense strand
gguagaaagucgggacaaa

SEQ ID NO: 1370435 - RNA, 19 nt, Homo sapiens
  misc_RNA (1)...(19): siRNA sense strand
gaaggauguugacgacugu

SEQ ID NO: 1370436 - RNA, 19 nt, Homo sapiens
  misc_RNA (1)...(19): siRNA sense strand
aaacagcgcauaucuggaa

SEQ ID NO: 1370437 - RNA, 19 nt, Homo sapiens
  misc_RNA (1)...(19): siRNA sense strand
ccagacaucauuccaauug

SEQ ID NO: 1370438 - RNA, 19 nt, Homo sapiens
  misc_RNA (1)...(19): siRNA sense strand
guaaggagaaggauguuga

SEQ ID NO: 1370439 - RNA, 19 nt, Homo sapiens
  misc_RNA (1)...(19): siRNA sense strand
ugauagauccaauggcuua

SEQ ID NO: 1370440 - RNA, 19 nt, Homo sapiens
  misc_RNA (1)...(19): siRNA sense strand
gaaaucugcaguaacaaug

SEQ ID NO: 1370441 - RNA, 19 nt, Homo sapiens
  misc_RNA (1)...(19): siRNA sense strand
gcaugugacuguucuuugg

SEQ ID NO: 1370442 - RNA, 19 nt, Homo sapiens
  misc_RNA (1)...(19): siRNA sense strand
ggagaugagguucaauuug

SEQ ID NO: 1370443 - RNA, 19 nt, Homo sapiens
  misc_RNA (1)...(19): siRNA sense strand
cagaggauauuacucagau

SEQ ID NO: 1370444 - RNA, 19 nt, Homo sapiens
  misc_RNA (1)...(19): siRNA sense strand
gcaaacgugugagaugugu

SEQ ID NO: 1370445 - RNA, 19 nt, Homo sapiens
  misc_RNA (1)...(19): siRNA sense strand
gaaagucccaagugucaug

SEQ ID NO: 1370446 - RNA, 19 nt, Homo sapiens
  misc_RNA (1)...(19): siRNA sense strand
gugcucagucuuacuaaua

SEQ ID NO: 1370447 - RNA, 19 nt, Homo sapiens
  misc_RNA (1)...(19): siRNA sense strand
ggacuucagaauuggauuu

SEQ ID NO: 1370448 - RNA, 19 nt, Homo sapiens
  misc_RNA (1)...(19): siRNA sense strand
gcaaaggaacagcagagaa

SEQ ID NO: 1370449 - RNA, 19 nt, Homo sapiens
  misc_RNA (1)...(19): siRNA sense strand
gggcaaacgugugagaugu

SEQ ID NO: 1370450 - RNA, 19 nt, Homo sapiens
  misc_RNA (1)...(19): siRNA sense strand
ugcacgaugugaugauuua

SEQ ID NO: 1370451 - RNA, 19 nt, Homo sapiens
  misc_RNA (1)...(19): siRNA sense strand
uagauccaauggcuuaauu

SEQ ID NO: 1370452 - RNA, 19 nt, Homo sapiens
  misc_RNA (1)...(19): siRNA sense strand
gaauuggauuuggcucauu

SEQ ID NO: 1370453 - RNA, 19 nt, Homo sapiens
  misc_RNA (1)...(19): siRNA sense strand
uagaaagucgggacaaauu

SEQ ID NO: 1370454 - RNA, 19 nt, Homo sapiens
  misc_RNA (1)...(19): siRNA sense strand
aaugaaaugaggaggauua

SEQ ID NO: 1370455 - RNA, 19 nt, Homo sapiens
  misc_RNA (1)...(19): siRNA sense strand
aauuguagcuggugugguu

SEQ ID NO: 1370456 - RNA, 19 nt, Homo sapiens
  misc_RNA (1)...(19): siRNA sense strand
agaaagucgggacaaauua

SEQ ID NO: 1370457 - RNA, 19 nt, Homo sapiens
  misc_RNA (1)...(19): siRNA sense strand
gagcauaaagaauguguuc

SEQ ID NO: 1370458 - RNA, 19 nt, Homo sapiens
  misc_RNA (1)...(19): siRNA sense strand
uccaauggcuuaauuugug

SEQ ID NO: 1370459 - RNA, 19 nt, Homo sapiens
  misc_RNA (1)...(19): siRNA sense strand
gaaguuaacagugaagaca

SEQ ID NO: 1370460 - RNA, 19 nt, Homo sapiens
  misc_RNA (1)...(19): siRNA sense strand
cagcacagaugaaguuaac

SEQ ID NO: 1370461 - RNA, 19 nt, Homo sapiens
  misc_RNA (1)...(19): siRNA sense strand
gcaaaugccaaaucaugug

SEQ ID NO: 1370462 - RNA, 19 nt, Homo sapiens
  misc_RNA (1)...(19): siRNA sense strand
gaagaauuucagccuguuu

SEQ ID NO: 1370463 - RNA, 19 nt, Homo sapiens
  misc_RNA (1)...(19): siRNA sense strand
cagaggcuccaaagauaua

SEQ ID NO: 1370464 - RNA, 19 nt, Homo sapiens
  misc_RNA (1)...(19): siRNA sense strand
cugcugauauggaagcuuu

SEQ ID NO: 1370465 - RNA, 19 nt, Homo sapiens
  misc_RNA (1)...(19): siRNA sense strand
caacugugauagauccaau

SEQ ID NO: 1370466 - RNA, 19 nt, Homo sapiens
  misc_RNA (1)...(19): siRNA sense strand
uagagguuauucuucagua

SEQ ID NO: 1370467 - RNA, 19 nt, Homo sapiens
  misc_RNA (1)...(19): siRNA sense strand
cagcgcauaucuggaaauu

SEQ ID NO: 1370468 - RNA, 19 nt, Homo sapiens
  misc_RNA (1)...(19): siRNA sense strand
caaaggaacagcagagaag

SEQ ID NO: 1370469 - RNA, 19 nt, Homo sapiens
  misc_RNA (1)...(19): siRNA sense strand
gaacagcagagaagcucaa

SEQ ID NO: 1370470 - RNA, 19 nt, Homo sapiens
  misc_RNA (1)...(19): siRNA sense strand
gauccaauggcuuaauuug

SEQ ID NO: 1370471 - RNA, 19 nt, Homo sapiens
  misc_RNA (1)...(19): siRNA sense strand
gaaaacaguucagaaaucu

SEQ ID NO: 1370472 - RNA, 19 nt, Homo sapiens
  misc_RNA (1)...(19): siRNA sense strand
caagugucaugaaggaaau

SEQ ID NO: 1370473 - RNA, 19 nt, Homo sapiens
  misc_RNA (1)...(19): siRNA sense strand
gucagaaggaguaacaaua

SEQ ID NO: 1370474 - RNA, 19 nt, Homo sapiens
  misc_RNA (1)...(19): siRNA sense strand
gaggauuacuucggacuuc

SEQ ID NO: 1370475 - RNA, 19 nt, Homo sapiens
  misc_RNA (1)...(19): siRNA sense strand
ugaaagacgauuuggagaa

SEQ ID NO: 1370476 - RNA, 19 nt, Homo sapiens
  misc_RNA (1)...(19): siRNA sense strand
gccacagacauuuacauua

SEQ ID NO: 1370477 - RNA, 19 nt, Homo sapiens
  misc_RNA (1)...(19): siRNA sense strand
gcaguugguuuugcgauua

SEQ ID NO: 1370478 - RNA, 19 nt, Homo sapiens
  misc_RNA (1)...(19): siRNA sense strand
aaaagacugugaugccuua

SEQ ID NO: 1370479 - RNA, 19 nt, Homo sapiens
  misc_RNA (1)...(19): siRNA sense strand
ggaaaugguguuugcaagu

SEQ ID NO: 1370480 - RNA, 19 nt, Homo sapiens
  misc_RNA (1)...(19): siRNA sense strand
gcgaaggcaucccugaaag

SEQ ID NO: 1370481 - RNA, 19 nt, Homo sapiens
  misc_RNA (1)...(19): siRNA sense strand
gcucagucuuacuaauaaa

SEQ ID NO: 1370482 - RNA, 19 nt, Homo sapiens
  misc_RNA (1)...(19): siRNA sense strand
gcaccagcccauuuagcua

SEQ ID NO: 1370483 - RNA, 19 nt, Homo sapiens
  misc_RNA (1)...(19): siRNA sense strand
aagggaguuugcuaaauuu

SEQ ID NO: 1370484 - RNA, 19 nt, Homo sapiens
  misc_RNA (1)...(19): siRNA sense strand
acaacgaggucaugguuca

SEQ ID NO: 1370485 - RNA, 19 nt, Homo sapiens
  misc_RNA (1)...(19): siRNA sense strand
cugauuggcuggaggaaug

SEQ ID NO: 1370486 - RNA, 19 nt, Homo sapiens
  misc_RNA (1)...(19): siRNA sense strand
aaguagagguuauucuuca

SEQ ID NO: 1370487 - RNA, 19 nt, Homo sapiens
  misc_RNA (1)...(19): siRNA sense strand
guccagacaucauuccaau

SEQ ID NO: 1370488 - RNA, 19 nt, Homo sapiens
  misc_RNA (1)...(19): siRNA sense strand
gaaagucgggacaaauuac

SEQ ID NO: 1370489 - RNA, 19 nt, Homo sapiens
  misc_RNA (1)...(19): siRNA sense strand
guguacagauccgaaguuu

SEQ ID NO: 1370490 - RNA, 19 nt, Homo sapiens
  misc_RNA (1)...(19): siRNA sense strand
guaggaagagggauaauac

SEQ ID NO: 1370491 - RNA, 19 nt, Homo sapiens
  misc_RNA (1)...(19): siRNA sense strand
ccaagugucaugaaggaaa

SEQ ID NO: 1370492 - RNA, 19 nt, Homo sapiens
  misc_RNA (1)...(19): siRNA sense strand
gaucugaugaaugaaauga

SEQ ID NO: 1370493 - RNA, 19 nt, Homo sapiens
  misc_RNA (1)...(19): siRNA sense strand
ggacaguguguuuguagga

SEQ ID NO: 1370494 - RNA, 19 nt, Homo sapiens
  misc_RNA (1)...(19): siRNA sense strand
cauuacugcugauauggaa

SEQ ID NO: 1370495 - RNA, 19 nt, Homo sapiens
  misc_RNA (1)...(19): siRNA sense strand
gcuccaaagauauaaagaa

SEQ ID NO: 1370496 - RNA, 19 nt, Homo sapiens
  misc_RNA (1)...(19): siRNA sense strand
ugacgacuguugguucuau

SEQ ID NO: 1370497 - RNA, 19 nt, Homo sapiens
  misc_RNA (1)...(19): siRNA sense strand
uguggugucuguaagugua

SEQ ID NO: 1370498 - RNA, 19 nt, Homo sapiens
  misc_RNA (1)...(19): siRNA sense strand
gaggaaaugguguuugcaa

SEQ ID NO: 1370499 - RNA, 19 nt, Homo sapiens
  misc_RNA (1)...(19): siRNA sense strand
gacaguguguuuguaggaa

SEQ ID NO: 1370500 - RNA, 19 nt, Homo sapiens
  misc_RNA (1)...(19): siRNA sense strand
gaacagaucugaugaauga

SEQ ID NO: 1370501 - RNA, 19 nt, Homo sapiens
  misc_RNA (1)...(19): siRNA sense strand
caagagagcugaagacuau

SEQ ID NO: 1370502 - RNA, 19 nt, Homo sapiens
  misc_RNA (1)...(19): siRNA sense strand
gaagggaguuugcuaaauu

SEQ ID NO: 1370503 - RNA, 19 nt, Homo sapiens
  misc_RNA (1)...(19): siRNA sense strand
ccacagacauuuacauuaa

SEQ ID NO: 1370504 - RNA, 19 nt, Homo sapiens
  misc_RNA (1)...(19): siRNA sense strand
gcgcauaucuggaaauuug

SEQ ID NO: 1370505 - RNA, 19 nt, Homo sapiens
  misc_RNA (1)...(19): siRNA sense strand
gaagagggauaauacaaau

SEQ ID NO: 1370506 - RNA, 19 nt, Homo sapiens
  misc_RNA (1)...(19): siRNA sense strand
gugaagacauggaugcuua

SEQ ID NO: 1370507 - RNA, 19 nt, Homo sapiens
  misc_RNA (1)...(19): siRNA sense strand
gaaagacgauuuggagaau

SEQ ID NO: 1370508 - RNA, 19 nt, Homo sapiens
  misc_RNA (1)...(19): siRNA sense strand
guaauucaguugaucauug

SEQ ID NO: 1370509 - RNA, 19 nt, Homo sapiens
  misc_RNA (1)...(19): siRNA sense strand
gaaaugaggaggauuacuu

SEQ ID NO: 1370510 - RNA, 19 nt, Homo sapiens
  misc_RNA (1)...(19): siRNA sense strand
caaaucauguggagaaugu

SEQ ID NO: 1370511 - RNA, 19 nt, Homo sapiens
  misc_RNA (1)...(19): siRNA sense strand
gaacugcaccagcccauuu

SEQ ID NO: 1370512 - RNA, 19 nt, Homo sapiens
  misc_RNA (1)...(19): siRNA sense strand
guacagauccgaaguuuca

SEQ ID NO: 1370513 - RNA, 19 nt, Homo sapiens
  misc_RNA (1)...(19): siRNA sense strand
cagaugaaguuaacaguga

SEQ ID NO: 1370514 - RNA, 19 nt, Homo sapiens
  misc_RNA (1)...(19): siRNA sense strand
ggaguuugcuaaauuugaa

SEQ ID NO: 1370515 - RNA, 19 nt, Homo sapiens
  misc_RNA (1)...(19): siRNA sense strand
gugcagagccuucaauaaa

SEQ ID NO: 1370516 - RNA, 19 nt, Homo sapiens
  misc_RNA (1)...(19): siRNA sense strand
gaacaacgaggucaugguu

SEQ ID NO: 1370517 - RNA, 19 nt, Homo sapiens
  misc_RNA (1)...(19): siRNA sense strand
gaaacuugguggcauuguu

SEQ ID NO: 1370518 - RNA, 19 nt, Homo sapiens
  misc_RNA (1)...(19): siRNA sense strand
gaaaugguguuugcaagug

SEQ ID NO: 1370519 - RNA, 19 nt, Homo sapiens
  misc_RNA (1)...(19): siRNA sense strand
ggaagagggauaauacaaa

SEQ ID NO: 1370520 - RNA, 19 nt, Homo sapiens
  misc_RNA (1)...(19): siRNA sense strand
caaauugucagaaggagua

SEQ ID NO: 1370521 - RNA, 19 nt, Homo sapiens
  misc_RNA (1)...(19): siRNA sense strand
ggagaaguauuuaaugaac

SEQ ID NO: 1370522 - RNA, 19 nt, Homo sapiens
  misc_RNA (1)...(19): siRNA sense strand
cccagaggcuccaaagaua

SEQ ID NO: 1370523 - RNA, 19 nt, Homo sapiens
  misc_RNA (1)...(19): siRNA sense strand
gcugaagacuaucccauug

SEQ ID NO: 1370524 - RNA, 19 nt, Homo sapiens
  misc_RNA (1)...(19): siRNA sense strand
agacaucauuccaauugua

SEQ ID NO: 1370525 - RNA, 19 nt, Homo sapiens
  misc_RNA (1)...(19): siRNA sense strand
gauccugugucccauugua

SEQ ID NO: 1370526 - RNA, 19 nt, Homo sapiens
  misc_RNA (1)...(19): siRNA sense strand
ggaaguagagguuauucuu

SEQ ID NO: 1370527 - RNA, 19 nt, Homo sapiens
  misc_RNA (1)...(19): siRNA sense strand
ucagaaggaguaacaauaa

SEQ ID NO: 1370528 - RNA, 19 nt, Homo sapiens
  misc_RNA (1)...(19): siRNA sense strand
gaaaaugaaugccaaaugg

SEQ ID NO: 1370529 - RNA, 19 nt, Homo sapiens
  misc_RNA (1)...(19): siRNA sense strand
gcaagugucguguguguga

SEQ ID NO: 1370530 - RNA, 19 nt, Homo sapiens
  misc_RNA (1)...(19): siRNA sense strand
gugauaauuucaacuguga

SEQ ID NO: 1370531 - RNA, 19 nt, Homo sapiens
  misc_RNA (1)...(19): siRNA sense strand
acaauucccuuuccucaga

SEQ ID NO: 1370532 - RNA, 19 nt, Homo sapiens
  misc_RNA (1)...(19): siRNA sense strand
gaaggaguaacaauaaguu

SEQ ID NO: 1370533 - RNA, 19 nt, Homo sapiens
  misc_RNA (1)...(19): siRNA sense strand
gcaauguaauucaguugau

SEQ ID NO: 1370534 - RNA, 19 nt, Homo sapiens
  misc_RNA (1)...(19): siRNA sense strand
gguagaaagucgggacaaa

SEQ ID NO: 1370535 - RNA, 19 nt, Homo sapiens
  misc_RNA (1)...(19): siRNA sense strand
gaaggauguugacgacugu

SEQ ID NO: 1370536 - RNA, 19 nt, Homo sapiens
  misc_RNA (1)...(19): siRNA sense strand
aaacagcgcauaucuggaa

SEQ ID NO: 1370537 - RNA, 19 nt, Homo sapiens
  misc_RNA (1)...(19): siRNA sense strand
ccagacaucauuccaauug

SEQ ID NO: 1370538 - RNA, 19 nt, Homo sapiens
  misc_RNA (1)...(19): siRNA sense strand
guaaggagaaggauguuga

SEQ ID NO: 1370539 - RNA, 19 nt, Homo sapiens
  misc_RNA (1)...(19): siRNA sense strand
ugauagauccaauggcuua

SEQ ID NO: 1370540 - RNA, 19 nt, Homo sapiens
  misc_RNA (1)...(19): siRNA sense strand
gaaaucugcaguaacaaug

SEQ ID NO: 1370541 - RNA, 19 nt, Homo sapiens
  misc_RNA (1)...(19): siRNA sense strand
gcaugugacuguucuuugg

SEQ ID NO: 1370542 - RNA, 19 nt, Homo sapiens
  misc_RNA (1)...(19): siRNA sense strand
ggagaugagguucaauuug

SEQ ID NO: 1370543 - RNA, 19 nt, Homo sapiens
  misc_RNA (1)...(19): siRNA sense strand
cagaggauauuacucagau

SEQ ID NO: 1370544 - RNA, 19 nt, Homo sapiens
  misc_RNA (1)...(19): siRNA sense strand
gcaaacgugugagaugugu

SEQ ID NO: 1370545 - RNA, 19 nt, Homo sapiens
  misc_RNA (1)...(19): siRNA sense strand
gaaagucccaagugucaug

SEQ ID NO: 1370546 - RNA, 19 nt, Homo sapiens
  misc_RNA (1)...(19): siRNA sense strand
gugcucagucuuacuaaua

SEQ ID NO: 1370547 - RNA, 19 nt, Homo sapiens
  misc_RNA (1)...(19): siRNA sense strand
ggacuucagaauuggauuu

SEQ ID NO: 1370548 - RNA, 19 nt, Homo sapiens
  misc_RNA (1)...(19): siRNA sense strand
gcaaaggaacagcagagaa

SEQ ID NO: 1370549 - RNA, 19 nt, Homo sapiens
  misc_RNA (1)...(19): siRNA sense strand
gggcaaacgugugagaugu

SEQ ID NO: 1370550 - RNA, 19 nt, Homo sapiens
  misc_RNA (1)...(19): siRNA sense strand
ugcacgaugugaugauuua

SEQ ID NO: 1370551 - RNA, 19 nt, Homo sapiens
  misc_RNA (1)...(19): siRNA sense strand
uagauccaauggcuuaauu

SEQ ID NO: 1370552 - RNA, 19 nt, Homo sapiens
  misc_RNA (1)...(19): siRNA sense strand
gaauuggauuuggcucauu

SEQ ID NO: 1370553 - RNA, 19 nt, Homo sapiens
  misc_RNA (1)...(19): siRNA sense strand
uagaaagucgggacaaauu

SEQ ID NO: 1370554 - RNA, 19 nt, Homo sapiens
  misc_RNA (1)...(19): siRNA sense strand
aaugaaaugaggaggauua

SEQ ID NO: 1370555 - RNA, 19 nt, Homo sapiens
  misc_RNA (1)...(19): siRNA sense strand
aauuguagcuggugugguu

SEQ ID NO: 1370556 - RNA, 19 nt, Homo sapiens
  misc_RNA (1)...(19): siRNA sense strand
agaaagucgggacaaauua

SEQ ID NO: 1370557 - RNA, 19 nt, Homo sapiens
  misc_RNA (1)...(19): siRNA sense strand
gagcauaaagaauguguuc

SEQ ID NO: 1370558 - RNA, 19 nt, Homo sapiens
  misc_RNA (1)...(19): siRNA sense strand
uccaauggcuuaauuugug

SEQ ID NO: 1370559 - RNA, 19 nt, Homo sapiens
  misc_RNA (1)...(19): siRNA sense strand
gaaguuaacagugaagaca

SEQ ID NO: 1370560 - RNA, 19 nt, Homo sapiens
  misc_RNA (1)...(19): siRNA sense strand
cagcacagaugaaguuaac

SEQ ID NO: 1370561 - RNA, 19 nt, Homo sapiens
  misc_RNA (1)...(19): siRNA sense strand
gcaaaugccaaaucaugug

SEQ ID NO: 1370562 - RNA, 19 nt, Homo sapiens
  misc_RNA (1)...(19): siRNA sense strand
gaagaauuucagccuguuu

SEQ ID NO: 1370563 - RNA, 19 nt, Homo sapiens
  misc_RNA (1)...(19): siRNA sense strand
cagaggcuccaaagauaua

SEQ ID NO: 1370564 - RNA, 19 nt, Homo sapiens
  misc_RNA (1)...(19): siRNA sense strand
cugcugauauggaagcuuu

SEQ ID NO: 1370565 - RNA, 19 nt, Homo sapiens
  misc_RNA (1)...(19): siRNA sense strand
caacugugauagauccaau

SEQ ID NO: 1370566 - RNA, 19 nt, Homo sapiens
  misc_RNA (1)...(19): siRNA sense strand
uagagguuauucuucagua

SEQ ID NO: 1370567 - RNA, 19 nt, Homo sapiens
  misc_RNA (1)...(19): siRNA sense strand
cagcgcauaucuggaaauu

SEQ ID NO: 1370568 - RNA, 19 nt, Homo sapiens
  misc_RNA (1)...(19): siRNA sense strand
caaaggaacagcagagaag

SEQ ID NO: 1370569 - RNA, 19 nt, Homo sapiens
  misc_RNA (1)...(19): siRNA sense strand
gaacagcagagaagcucaa

SEQ ID NO: 1370570 - RNA, 19 nt, Homo sapiens
  misc_RNA (1)...(19): siRNA sense strand
gauccaauggcuuaauuug

SEQ ID NO: 1370571 - RNA, 19 nt, Homo sapiens
  misc_RNA (1)...(19): siRNA sense strand
gaaaacaguucagaaaucu

SEQ ID NO: 1370572 - RNA, 19 nt, Homo sapiens
  misc_RNA (1)...(19): siRNA sense strand
caagugucaugaaggaaau

SEQ ID NO: 1370573 - RNA, 19 nt, Homo sapiens
  misc_RNA (1)...(19): siRNA sense strand
gucagaaggaguaacaaua

SEQ ID NO: 1370574 - RNA, 19 nt, Homo sapiens
  misc_RNA (1)...(19): siRNA sense strand
gaggauuacuucggacuuc

SEQ ID NO: 1370575 - RNA, 19 nt, Homo sapiens
  misc_RNA (1)...(19): siRNA sense strand
ugaaagacgauuuggagaa

SEQ ID NO: 1370576 - RNA, 19 nt, Homo sapiens
  misc_RNA (1)...(19): siRNA sense strand
gccacagacauuuacauua

SEQ ID NO: 1370577 - RNA, 19 nt, Homo sapiens
  misc_RNA (1)...(19): siRNA sense strand
gcaguugguuuugcgauua

SEQ ID NO: 1370578 - RNA, 19 nt, Homo sapiens
  misc_RNA (1)...(19): siRNA sense strand
aaaagacugugaugccuua

SEQ ID NO: 1370579 - RNA, 19 nt, Homo sapiens
  misc_RNA (1)...(19): siRNA sense strand
ggaaaugguguuugcaagu

SEQ ID NO: 1370580 - RNA, 19 nt, Homo sapiens
  misc_RNA (1)...(19): siRNA sense strand
gcgaaggcaucccugaaag

SEQ ID NO: 1370581 - RNA, 19 nt, Homo sapiens
  misc_RNA (1)...(19): siRNA sense strand
gcucagucuuacuaauaaa

SEQ ID NO: 1370582 - RNA, 19 nt, Homo sapiens
  misc_RNA (1)...(19): siRNA sense strand
gcaccagcccauuuagcua

SEQ ID NO: 1370583 - RNA, 19 nt, Homo sapiens
  misc_RNA (1)...(19): siRNA sense strand
aagggaguuugcuaaauuu

SEQ ID NO: 1370584 - RNA, 19 nt, Homo sapiens
  misc_RNA (1)...(19): siRNA sense strand
acaacgaggucaugguuca

SEQ ID NO: 1370585 - RNA, 19 nt, Homo sapiens
  misc_RNA (1)...(19): siRNA sense strand
cugauuggcuggaggaaug

SEQ ID NO: 1370586 - RNA, 19 nt, Homo sapiens
  misc_RNA (1)...(19): siRNA sense strand
aaguagagguuauucuuca

SEQ ID NO: 1370587 - RNA, 19 nt, Homo sapiens
  misc_RNA (1)...(19): siRNA sense strand
guccagacaucauuccaau

SEQ ID NO: 1370588 - RNA, 19 nt, Homo sapiens
  misc_RNA (1)...(19): siRNA sense strand
gaaagucgggacaaauuac

SEQ ID NO: 1370589 - RNA, 19 nt, Homo sapiens
  misc_RNA (1)...(19): siRNA sense strand
guguacagauccgaaguuu

SEQ ID NO: 1370590 - RNA, 19 nt, Homo sapiens
  misc_RNA (1)...(19): siRNA sense strand
guaggaagagggauaauac

SEQ ID NO: 1370591 - RNA, 19 nt, Homo sapiens
  misc_RNA (1)...(19): siRNA sense strand
ccaagugucaugaaggaaa

SEQ ID NO: 1370592 - RNA, 19 nt, Homo sapiens
  misc_RNA (1)...(19): siRNA sense strand
gaucugaugaaugaaauga

SEQ ID NO: 1370593 - RNA, 19 nt, Homo sapiens
  misc_RNA (1)...(19): siRNA sense strand
ggacaguguguuuguagga

SEQ ID NO: 1370594 - RNA, 19 nt, Homo sapiens
  misc_RNA (1)...(19): siRNA sense strand
cauuacugcugauauggaa

SEQ ID NO: 1370595 - RNA, 19 nt, Homo sapiens
  misc_RNA (1)...(19): siRNA sense strand
gcuccaaagauauaaagaa

SEQ ID NO: 1370596 - RNA, 19 nt, Homo sapiens
  misc_RNA (1)...(19): siRNA sense strand
ugacgacuguugguucuau

SEQ ID NO: 1370597 - RNA, 19 nt, Homo sapiens
  misc_RNA (1)...(19): siRNA sense strand
uguggugucuguaagugua

SEQ ID NO: 1370598 - RNA, 19 nt, Homo sapiens
  misc_RNA (1)...(19): siRNA sense strand
gaggaaaugguguuugcaa

SEQ ID NO: 1370599 - RNA, 19 nt, Homo sapiens
  misc_RNA (1)...(19): siRNA sense strand
gacaguguguuuguaggaa

SEQ ID NO: 1370600 - RNA, 19 nt, Homo sapiens
  misc_RNA (1)...(19): siRNA sense strand
gaacagaucugaugaauga

SEQ ID NO: 1370601 - RNA, 19 nt, Homo sapiens
  misc_RNA (1)...(19): siRNA sense strand
caagagagcugaagacuau

SEQ ID NO: 1370602 - RNA, 19 nt, Homo sapiens
  misc_RNA (1)...(19): siRNA sense strand
gaagggaguuugcuaaauu

SEQ ID NO: 1370603 - RNA, 19 nt, Homo sapiens
  misc_RNA (1)...(19): siRNA sense strand
ccacagacauuuacauuaa

SEQ ID NO: 1370604 - RNA, 19 nt, Homo sapiens
  misc_RNA (1)...(19): siRNA sense strand
gcgcauaucuggaaauuug

SEQ ID NO: 1370605 - RNA, 19 nt, Homo sapiens
  misc_RNA (1)...(19): siRNA sense strand
gaagagggauaauacaaau

SEQ ID NO: 1370606 - RNA, 19 nt, Homo sapiens
  misc_RNA (1)...(19): siRNA sense strand
gugaagacauggaugcuua

SEQ ID NO: 1370607 - RNA, 19 nt, Homo sapiens
  misc_RNA (1)...(19): siRNA sense strand
gaaagacgauuuggagaau

SEQ ID NO: 1370608 - RNA, 19 nt, Homo sapiens
  misc_RNA (1)...(19): siRNA sense strand
guaauucaguugaucauug

SEQ ID NO: 1370609 - RNA, 19 nt, Homo sapiens
  misc_RNA (1)...(19): siRNA sense strand
gaaaugaggaggauuacuu

SEQ ID NO: 1370610 - RNA, 19 nt, Homo sapiens
  misc_RNA (1)...(19): siRNA sense strand
caaaucauguggagaaugu

SEQ ID NO: 1370611 - RNA, 19 nt, Homo sapiens
  misc_RNA (1)...(19): siRNA sense strand
gaacugcaccagcccauuu

SEQ ID NO: 1370612 - RNA, 19 nt, Homo sapiens
  misc_RNA (1)...(19): siRNA sense strand
guacagauccgaaguuuca

SEQ ID NO: 1370613 - RNA, 19 nt, Homo sapiens
  misc_RNA (1)...(19): siRNA sense strand
cagaugaaguuaacaguga

SEQ ID NO: 1370614 - RNA, 19 nt, Homo sapiens
  misc_RNA (1)...(19): siRNA sense strand
ggaguuugcuaaauuugaa

SEQ ID NO: 1370615 - RNA, 19 nt, Homo sapiens
  misc_RNA (1)...(19): siRNA sense strand
gugcagagccuucaauaaa

SEQ ID NO: 1370616 - RNA, 19 nt, Homo sapiens
  misc_RNA (1)...(19): siRNA sense strand
gaacaacgaggucaugguu

SEQ ID NO: 1370617 - RNA, 19 nt, Homo sapiens
  misc_RNA (1)...(19): siRNA sense strand
gaaacuugguggcauuguu

SEQ ID NO: 1370618 - RNA, 19 nt, Homo sapiens
  misc_RNA (1)...(19): siRNA sense strand
gaaaugguguuugcaagug

SEQ ID NO: 1370619 - RNA, 19 nt, Homo sapiens
  misc_RNA (1)...(19): siRNA sense strand
ggaagagggauaauacaaa

SEQ ID NO: 1370620 - RNA, 19 nt, Homo sapiens
  misc_RNA (1)...(19): siRNA sense strand
caaauugucagaaggagua

SEQ ID NO: 1370621 - RNA, 19 nt, Homo sapiens
  misc_RNA (1)...(19): siRNA sense strand
ggagaaguauuuaaugaac

SEQ ID NO: 1370622 - RNA, 19 nt, Homo sapiens
  misc_RNA (1)...(19): siRNA sense strand
cccagaggcuccaaagaua

SEQ ID NO: 1370623 - RNA, 19 nt, Homo sapiens
  misc_RNA (1)...(19): siRNA sense strand
gcugaagacuaucccauug

SEQ ID NO: 1370624 - RNA, 19 nt, Homo sapiens
  misc_RNA (1)...(19): siRNA sense strand
agacaucauuccaauugua

SEQ ID NO: 1370625 - RNA, 19 nt, Homo sapiens
  misc_RNA (1)...(19): siRNA sense strand
gauccugugucccauugua

SEQ ID NO: 1370626 - RNA, 19 nt, Homo sapiens
  misc_RNA (1)...(19): siRNA sense strand
ggaaguagagguuauucuu

SEQ ID NO: 1370627 - RNA, 19 nt, Homo sapiens
  misc_RNA (1)...(19): siRNA sense strand
ucagaaggaguaacaauaa

SEQ ID NO: 1370628 - RNA, 19 nt, Homo sapiens
  misc_RNA (1)...(19): siRNA sense strand
gaaaaugaaugccaaaugg

SEQ ID NO: 1370629 - RNA, 19 nt, Homo sapiens
  misc_RNA (1)...(19): siRNA sense strand
gcaagugucguguguguga

SEQ ID NO: 1370630 - RNA, 19 nt, Homo sapiens
  misc_RNA (1)...(19): siRNA sense strand
gugauaauuucaacuguga

SEQ ID NO: 1370631 - RNA, 19 nt, Homo sapiens
  misc_RNA (1)...(19): siRNA sense strand
acaauucccuuuccucaga

SEQ ID NO: 1370632 - RNA, 19 nt, Homo sapiens
  misc_RNA (1)...(19): siRNA sense strand
gaaggaguaacaauaaguu

SEQ ID NO: 1370633 - RNA, 19 nt, Homo sapiens
  misc_RNA (1)...(19): siRNA sense strand
gcaauguaauucaguugau

SEQ ID NO: 1370634 - RNA, 19 nt, Homo sapiens
  misc_RNA (1)...(19): siRNA sense strand
gguagaaagucgggacaaa

SEQ ID NO: 1370635 - RNA, 19 nt, Homo sapiens
  misc_RNA (1)...(19): siRNA sense strand
gaaggauguugacgacugu

SEQ ID NO: 1370636 - RNA, 19 nt, Homo sapiens
  misc_RNA (1)...(19): siRNA sense strand
aaacagcgcauaucuggaa

SEQ ID NO: 1370637 - RNA, 19 nt, Homo sapiens
  misc_RNA (1)...(19): siRNA sense strand
ccagacaucauuccaauug

SEQ ID NO: 1370638 - RNA, 19 nt, Homo sapiens
  misc_RNA (1)...(19): siRNA sense strand
guaaggagaaggauguuga

SEQ ID NO: 1370639 - RNA, 19 nt, Homo sapiens
  misc_RNA (1)...(19): siRNA sense strand
ugauagauccaauggcuua

SEQ ID NO: 1370640 - RNA, 19 nt, Homo sapiens
  misc_RNA (1)...(19): siRNA sense strand
gaaaucugcaguaacaaug

SEQ ID NO: 1370641 - RNA, 19 nt, Homo sapiens
  misc_RNA (1)...(19): siRNA sense strand
gcaugugacuguucuuugg

SEQ ID NO: 1370642 - RNA, 19 nt, Homo sapiens
  misc_RNA (1)...(19): siRNA sense strand
ggagaugagguucaauuug

SEQ ID NO: 1370643 - RNA, 19 nt, Homo sapiens
  misc_RNA (1)...(19): siRNA sense strand
cagaggauauuacucagau

SEQ ID NO: 1370644 - RNA, 19 nt, Homo sapiens
  misc_RNA (1)...(19): siRNA sense strand
gcaaacgugugagaugugu

SEQ ID NO: 1370645 - RNA, 19 nt, Homo sapiens
  misc_RNA (1)...(19): siRNA sense strand
gaaagucccaagugucaug

SEQ ID NO: 1370646 - RNA, 19 nt, Homo sapiens
  misc_RNA (1)...(19): siRNA sense strand
gugcucagucuuacuaaua

SEQ ID NO: 1370647 - RNA, 19 nt, Homo sapiens
  misc_RNA (1)...(19): siRNA sense strand
ggacuucagaauuggauuu

SEQ ID NO: 1370648 - RNA, 19 nt, Homo sapiens
  misc_RNA (1)...(19): siRNA sense strand
gcaaaggaacagcagagaa

SEQ ID NO: 1370649 - RNA, 19 nt, Homo sapiens
  misc_RNA (1)...(19): siRNA sense strand
gggcaaacgugugagaugu

SEQ ID NO: 1370650 - RNA, 19 nt, Homo sapiens
  misc_RNA (1)...(19): siRNA sense strand
ugcacgaugugaugauuua

SEQ ID NO: 1370651 - RNA, 19 nt, Homo sapiens
  misc_RNA (1)...(19): siRNA sense strand
uagauccaauggcuuaauu

SEQ ID NO: 1370652 - RNA, 19 nt, Homo sapiens
  misc_RNA (1)...(19): siRNA sense strand
gaauuggauuuggcucauu

SEQ ID NO: 1370653 - RNA, 19 nt, Homo sapiens
  misc_RNA (1)...(19): siRNA sense strand
uagaaagucgggacaaauu

SEQ ID NO: 1370654 - RNA, 19 nt, Homo sapiens
  misc_RNA (1)...(19): siRNA sense strand
aaugaaaugaggaggauua

SEQ ID NO: 1370655 - RNA, 19 nt, Homo sapiens
  misc_RNA (1)...(19): siRNA sense strand
aauuguagcuggugugguu

SEQ ID NO: 1370656 - RNA, 19 nt, Homo sapiens
  misc_RNA (1)...(19): siRNA sense strand
agaaagucgggacaaauua

SEQ ID NO: 1370657 - RNA, 19 nt, Homo sapiens
  misc_RNA (1)...(19): siRNA sense strand
gagcauaaagaauguguuc

SEQ ID NO: 1370658 - RNA, 19 nt, Homo sapiens
  misc_RNA (1)...(19): siRNA sense strand
uccaauggcuuaauuugug

SEQ ID NO: 1370659 - RNA, 19 nt, Homo sapiens
  misc_RNA (1)...(19): siRNA sense strand
gaaguuaacagugaagaca

SEQ ID NO: 1370660 - RNA, 19 nt, Homo sapiens
  misc_RNA (1)...(19): siRNA sense strand
cagcacagaugaaguuaac

SEQ ID NO: 1370661 - RNA, 19 nt, Homo sapiens
  misc_RNA (1)...(19): siRNA sense strand
gcaaaugccaaaucaugug

SEQ ID NO: 1370662 - RNA, 19 nt, Homo sapiens
  misc_RNA (1)...(19): siRNA sense strand
gaagaauuucagccuguuu

SEQ ID NO: 1370663 - RNA, 19 nt, Homo sapiens
  misc_RNA (1)...(19): siRNA sense strand
cagaggcuccaaagauaua

SEQ ID NO: 1370664 - RNA, 19 nt, Homo sapiens
  misc_RNA (1)...(19): siRNA sense strand
cugcugauauggaagcuuu

SEQ ID NO: 1370665 - RNA, 19 nt, Homo sapiens
  misc_RNA (1)...(19): siRNA sense strand
caacugugauagauccaau

SEQ ID NO: 1370666 - RNA, 19 nt, Homo sapiens
  misc_RNA (1)...(19): siRNA sense strand
uagagguuauucuucagua

SEQ ID NO: 1370667 - RNA, 19 nt, Homo sapiens
  misc_RNA (1)...(19): siRNA sense strand
cagcgcauaucuggaaauu

SEQ ID NO: 1370668 - RNA, 19 nt, Homo sapiens
  misc_RNA (1)...(19): siRNA sense strand
caaaggaacagcagagaag

SEQ ID NO: 1370669 - RNA, 19 nt, Homo sapiens
  misc_RNA (1)...(19): siRNA sense strand
gaacagcagagaagcucaa

SEQ ID NO: 1370670 - RNA, 19 nt, Homo sapiens
  misc_RNA (1)...(19): siRNA sense strand
gauccaauggcuuaauuug

SEQ ID NO: 1370671 - RNA, 19 nt, Homo sapiens
  misc_RNA (1)...(19): siRNA sense strand
gaaaacaguucagaaaucu

SEQ ID NO: 1370672 - RNA, 19 nt, Homo sapiens
  misc_RNA (1)...(19): siRNA sense strand
caagugucaugaaggaaau

SEQ ID NO: 1370673 - RNA, 19 nt, Homo sapiens
  misc_RNA (1)...(19): siRNA sense strand
gucagaaggaguaacaaua

SEQ ID NO: 1370674 - RNA, 19 nt, Homo sapiens
  misc_RNA (1)...(19): siRNA sense strand
gaggauuacuucggacuuc

SEQ ID NO: 1370675 - RNA, 19 nt, Homo sapiens
  misc_RNA (1)...(19): siRNA sense strand
ugaaagacgauuuggagaa

SEQ ID NO: 1370676 - RNA, 19 nt, Homo sapiens
  misc_RNA (1)...(19): siRNA sense strand
gccacagacauuuacauua

SEQ ID NO: 1370677 - RNA, 19 nt, Homo sapiens
  misc_RNA (1)...(19): siRNA sense strand
gcaguugguuuugcgauua

SEQ ID NO: 1370678 - RNA, 19 nt, Homo sapiens
  misc_RNA (1)...(19): siRNA sense strand
aaaagacugugaugccuua

SEQ ID NO: 1370679 - RNA, 19 nt, Homo sapiens
  misc_RNA (1)...(19): siRNA sense strand
ggaaaugguguuugcaagu

SEQ ID NO: 1370680 - RNA, 19 nt, Homo sapiens
  misc_RNA (1)...(19): siRNA sense strand
gcgaaggcaucccugaaag

SEQ ID NO: 1370681 - RNA, 19 nt, Homo sapiens
  misc_RNA (1)...(19): siRNA sense strand
gcucagucuuacuaauaaa

SEQ ID NO: 1370682 - RNA, 19 nt, Homo sapiens
  misc_RNA (1)...(19): siRNA sense strand
gcaccagcccauuuagcua

SEQ ID NO: 1370683 - RNA, 19 nt, Homo sapiens
  misc_RNA (1)...(19): siRNA sense strand
aagggaguuugcuaaauuu

SEQ ID NO: 1370684 - RNA, 19 nt, Homo sapiens
  misc_RNA (1)...(19): siRNA sense strand
acaacgaggucaugguuca

SEQ ID NO: 1370685 - RNA, 19 nt, Homo sapiens
  misc_RNA (1)...(19): siRNA sense strand
cugauuggcuggaggaaug

SEQ ID NO: 1370686 - RNA, 19 nt, Homo sapiens
  misc_RNA (1)...(19): siRNA sense strand
aaguagagguuauucuuca

SEQ ID NO: 1370687 - RNA, 19 nt, Homo sapiens
  misc_RNA (1)...(19): siRNA sense strand
guccagacaucauuccaau

SEQ ID NO: 1370688 - RNA, 19 nt, Homo sapiens
  misc_RNA (1)...(19): siRNA sense strand
gaaagucgggacaaauuac

SEQ ID NO: 1370689 - RNA, 19 nt, Homo sapiens
  misc_RNA (1)...(19): siRNA sense strand
guguacagauccgaaguuu

SEQ ID NO: 1370690 - RNA, 19 nt, Homo sapiens
  misc_RNA (1)...(19): siRNA sense strand
guaggaagagggauaauac

SEQ ID NO: 1370691 - RNA, 19 nt, Homo sapiens
  misc_RNA (1)...(19): siRNA sense strand
ccaagugucaugaaggaaa

SEQ ID NO: 1370692 - RNA, 19 nt, Homo sapiens
  misc_RNA (1)...(19): siRNA sense strand
gaucugaugaaugaaauga

SEQ ID NO: 1370693 - RNA, 19 nt, Homo sapiens
  misc_RNA (1)...(19): siRNA sense strand
ggacaguguguuuguagga

SEQ ID NO: 1370694 - RNA, 19 nt, Homo sapiens
  misc_RNA (1)...(19): siRNA sense strand
cauuacugcugauauggaa

SEQ ID NO: 1370695 - RNA, 19 nt, Homo sapiens
  misc_RNA (1)...(19): siRNA sense strand
gcuccaaagauauaaagaa

SEQ ID NO: 1370696 - RNA, 19 nt, Homo sapiens
  misc_RNA (1)...(19): siRNA sense strand
ugacgacuguugguucuau

SEQ ID NO: 1370697 - RNA, 19 nt, Homo sapiens
  misc_RNA (1)...(19): siRNA sense strand
uguggugucuguaagugua

SEQ ID NO: 1370698 - RNA, 19 nt, Homo sapiens
  misc_RNA (1)...(19): siRNA sense strand
gaggaaaugguguuugcaa

SEQ ID NO: 1370699 - RNA, 19 nt, Homo sapiens
  misc_RNA (1)...(19): siRNA sense strand
gacaguguguuuguaggaa

SEQ ID NO: 1370700 - RNA, 19 nt, Homo sapiens
  misc_RNA (1)...(19): siRNA sense strand
gaacagaucugaugaauga

SEQ ID NO: 1370701 - RNA, 19 nt, Homo sapiens
  misc_RNA (1)...(19): siRNA sense strand
caagagagcugaagacuau

SEQ ID NO: 1370702 - RNA, 19 nt, Homo sapiens
  misc_RNA (1)...(19): siRNA sense strand
gaagggaguuugcuaaauu

SEQ ID NO: 1370703 - RNA, 19 nt, Homo sapiens
  misc_RNA (1)...(19): siRNA sense strand
ccacagacauuuacauuaa

SEQ ID NO: 1370704 - RNA, 19 nt, Homo sapiens
  misc_RNA (1)...(19): siRNA sense strand
gcgcauaucuggaaauuug

SEQ ID NO: 1370705 - RNA, 19 nt, Homo sapiens
  misc_RNA (1)...(19): siRNA sense strand
gaagagggauaauacaaau

SEQ ID NO: 1370706 - RNA, 19 nt, Homo sapiens
  misc_RNA (1)...(19): siRNA sense strand
gugaagacauggaugcuua

SEQ ID NO: 1370707 - RNA, 19 nt, Homo sapiens
  misc_RNA (1)...(19): siRNA sense strand
gaaagacgauuuggagaau

SEQ ID NO: 1370708 - RNA, 19 nt, Homo sapiens
  misc_RNA (1)...(19): siRNA sense strand
guaauucaguugaucauug

SEQ ID NO: 1370709 - RNA, 19 nt, Homo sapiens
  misc_RNA (1)...(19): siRNA sense strand
gaaaugaggaggauuacuu

SEQ ID NO: 1370710 - RNA, 19 nt, Homo sapiens
  misc_RNA (1)...(19): siRNA sense strand
caaaucauguggagaaugu

SEQ ID NO: 1370711 - RNA, 19 nt, Homo sapiens
  misc_RNA (1)...(19): siRNA sense strand
gaacugcaccagcccauuu

SEQ ID NO: 1370712 - RNA, 19 nt, Homo sapiens
  misc_RNA (1)...(19): siRNA sense strand
guacagauccgaaguuuca

SEQ ID NO: 1370713 - RNA, 19 nt, Homo sapiens
  misc_RNA (1)...(19): siRNA sense strand
cagaugaaguuaacaguga

SEQ ID NO: 1370714 - RNA, 19 nt, Homo sapiens
  misc_RNA (1)...(19): siRNA sense strand
ggaguuugcuaaauuugaa

SEQ ID NO: 1370715 - RNA, 19 nt, Homo sapiens
  misc_RNA (1)...(19): siRNA sense strand
gugcagagccuucaauaaa

SEQ ID NO: 1370716 - RNA, 19 nt, Homo sapiens
  misc_RNA (1)...(19): siRNA sense strand
gaacaacgaggucaugguu

SEQ ID NO: 1370717 - RNA, 19 nt, Homo sapiens
  misc_RNA (1)...(19): siRNA sense strand
gaaacuugguggcauuguu

SEQ ID NO: 1370718 - RNA, 19 nt, Homo sapiens
  misc_RNA (1)...(19): siRNA sense strand
gaaaugguguuugcaagug

SEQ ID NO: 1370719 - RNA, 19 nt, Homo sapiens
  misc_RNA (1)...(19): siRNA sense strand
ggaagagggauaauacaaa

SEQ ID NO: 1370720 - RNA, 19 nt, Homo sapiens
  misc_RNA (1)...(19): siRNA sense strand
caaauugucagaaggagua

SEQ ID NO: 1370721 - RNA, 19 nt, Homo sapiens
  misc_RNA (1)...(19): siRNA sense strand
ggagaaguauuuaaugaac

SEQ ID NO: 1370722 - RNA, 19 nt, Homo sapiens
  misc_RNA (1)...(19): siRNA sense strand
cccagaggcuccaaagaua

SEQ ID NO: 1370723 - RNA, 19 nt, Homo sapiens
  misc_RNA (1)...(19): siRNA sense strand
gcugaagacuaucccauug

SEQ ID NO: 1370724 - RNA, 19 nt, Homo sapiens
  misc_RNA (1)...(19): siRNA sense strand
agacaucauuccaauugua

SEQ ID NO: 1370725 - RNA, 19 nt, Homo sapiens
  misc_RNA (1)...(19): siRNA sense strand
gauccugugucccauugua

SEQ ID NO: 1370726 - RNA, 19 nt, Homo sapiens
  misc_RNA (1)...(19): siRNA sense strand
ggaaguagagguuauucuu

SEQ ID NO: 1370727 - RNA, 19 nt, Homo sapiens
  misc_RNA (1)...(19): siRNA sense strand
ucagaaggaguaacaauaa

SEQ ID NO: 1370728 - RNA, 19 nt, Homo sapiens
  misc_RNA (1)...(19): siRNA sense strand
gaaaaugaaugccaaaugg

SEQ ID NO: 1370729 - RNA, 19 nt, Homo sapiens
  misc_RNA (1)...(19): siRNA sense strand
gcaagugucguguguguga

SEQ ID NO: 1370730 - RNA, 19 nt, Homo sapiens
  misc_RNA (1)...(19): siRNA sense strand
gugauaauuucaacuguga

SEQ ID NO: 1370731 - RNA, 19 nt, Homo sapiens
  misc_RNA (1)...(19): siRNA sense strand
acaauucccuuuccucaga

SEQ ID NO: 1370732 - RNA, 19 nt, Homo sapiens
  misc_RNA (1)...(19): siRNA sense strand
gaaggaguaacaauaaguu

SEQ ID NO: 1370733 - RNA, 19 nt, Homo sapiens
  misc_RNA (1)...(19): siRNA sense strand
gcaauguaauucaguugau

SEQ ID NO: 1370734 - RNA, 19 nt, Homo sapiens
  misc_RNA (1)...(19): siRNA sense strand
gguagaaagucgggacaaa

SEQ ID NO: 1370735 - RNA, 19 nt, Homo sapiens
  misc_RNA (1)...(19): siRNA sense strand
gaaggauguugacgacugu

SEQ ID NO: 1370736 - RNA, 19 nt, Homo sapiens
  misc_RNA (1)...(19): siRNA sense strand
aaacagcgcauaucuggaa

SEQ ID NO: 1370737 - RNA, 19 nt, Homo sapiens
  misc_RNA (1)...(19): siRNA sense strand
ccagacaucauuccaauug

SEQ ID NO: 1370738 - RNA, 19 nt, Homo sapiens
  misc_RNA (1)...(19): siRNA sense strand
guaaggagaaggauguuga

SEQ ID NO: 1370739 - RNA, 19 nt, Homo sapiens
  misc_RNA (1)...(19): siRNA sense strand
ugauagauccaauggcuua

SEQ ID NO: 1370740 - RNA, 19 nt, Homo sapiens
  misc_RNA (1)...(19): siRNA sense strand
gaaaucugcaguaacaaug

SEQ ID NO: 1370741 - RNA, 19 nt, Homo sapiens
  misc_RNA (1)...(19): siRNA sense strand
gcaugugacuguucuuugg

SEQ ID NO: 1370742 - RNA, 19 nt, Homo sapiens
  misc_RNA (1)...(19): siRNA sense strand
ggagaugagguucaauuug

SEQ ID NO: 1370743 - RNA, 19 nt, Homo sapiens
  misc_RNA (1)...(19): siRNA sense strand
cagaggauauuacucagau

SEQ ID NO: 1370744 - RNA, 19 nt, Homo sapiens
  misc_RNA (1)...(19): siRNA sense strand
gcaaacgugugagaugugu

SEQ ID NO: 1370745 - RNA, 19 nt, Homo sapiens
  misc_RNA (1)...(19): siRNA sense strand
gaaagucccaagugucaug

SEQ ID NO: 1370746 - RNA, 19 nt, Homo sapiens
  misc_RNA (1)...(19): siRNA sense strand
gugcucagucuuacuaaua

SEQ ID NO: 1370747 - RNA, 19 nt, Homo sapiens
  misc_RNA (1)...(19): siRNA sense strand
ggacuucagaauuggauuu

SEQ ID NO: 1370748 - RNA, 19 nt, Homo sapiens
  misc_RNA (1)...(19): siRNA sense strand
gcaaaggaacagcagagaa

SEQ ID NO: 1370749 - RNA, 19 nt, Homo sapiens
  misc_RNA (1)...(19): siRNA sense strand
gggcaaacgugugagaugu

SEQ ID NO: 1370750 - RNA, 19 nt, Homo sapiens
  misc_RNA (1)...(19): siRNA sense strand
ugcacgaugugaugauuua

SEQ ID NO: 1370751 - RNA, 19 nt, Homo sapiens
  misc_RNA (1)...(19): siRNA sense strand
uagauccaauggcuuaauu

SEQ ID NO: 1370752 - RNA, 19 nt, Homo sapiens
  misc_RNA (1)...(19): siRNA sense strand
gaauuggauuuggcucauu

SEQ ID NO: 1370753 - RNA, 19 nt, Homo sapiens
  misc_RNA (1)...(19): siRNA sense strand
uagaaagucgggacaaauu

SEQ ID NO: 1370754 - RNA, 19 nt, Homo sapiens
  misc_RNA (1)...(19): siRNA sense strand
aaugaaaugaggaggauua

SEQ ID NO: 1370755 - RNA, 19 nt, Homo sapiens
  misc_RNA (1)...(19): siRNA sense strand
aauuguagcuggugugguu

SEQ ID NO: 1370756 - RNA, 19 nt, Homo sapiens
  misc_RNA (1)...(19): siRNA sense strand
agaaagucgggacaaauua

SEQ ID NO: 1370757 - RNA, 19 nt, Homo sapiens
  misc_RNA (1)...(19): siRNA sense strand
gagcauaaagaauguguuc

SEQ ID NO: 1370758 - RNA, 19 nt, Homo sapiens
  misc_RNA (1)...(19): siRNA sense strand
uccaauggcuuaauuugug

SEQ ID NO: 1370759 - RNA, 19 nt, Homo sapiens
  misc_RNA (1)...(19): siRNA sense strand
gaaguuaacagugaagaca

SEQ ID NO: 1370760 - RNA, 19 nt, Homo sapiens
  misc_RNA (1)...(19): siRNA sense strand
cagcacagaugaaguuaac

SEQ ID NO: 1370761 - RNA, 19 nt, Homo sapiens
  misc_RNA (1)...(19): siRNA sense strand
gcaaaugccaaaucaugug

SEQ ID NO: 1370762 - RNA, 19 nt, Homo sapiens
  misc_RNA (1)...(19): siRNA sense strand
gaagaauuucagccuguuu

SEQ ID NO: 1370763 - RNA, 19 nt, Homo sapiens
  misc_RNA (1)...(19): siRNA sense strand
cagaggcuccaaagauaua

SEQ ID NO: 1370764 - RNA, 19 nt, Homo sapiens
  misc_RNA (1)...(19): siRNA sense strand
cugcugauauggaagcuuu

SEQ ID NO: 1370765 - RNA, 19 nt, Homo sapiens
  misc_RNA (1)...(19): siRNA sense strand
caacugugauagauccaau

SEQ ID NO: 1370766 - RNA, 19 nt, Homo sapiens
  misc_RNA (1)...(19): siRNA sense strand
uagagguuauucuucagua

SEQ ID NO: 1370767 - RNA, 19 nt, Homo sapiens
  misc_RNA (1)...(19): siRNA sense strand
cagcgcauaucuggaaauu

SEQ ID NO: 1370768 - RNA, 19 nt, Homo sapiens
  misc_RNA (1)...(19): siRNA sense strand
caaaggaacagcagagaag

SEQ ID NO: 1370769 - RNA, 19 nt, Homo sapiens
  misc_RNA (1)...(19): siRNA sense strand
gaacagcagagaagcucaa

SEQ ID NO: 1370770 - RNA, 19 nt, Homo sapiens
  misc_RNA (1)...(19): siRNA sense strand
gauccaauggcuuaauuug

SEQ ID NO: 1370771 - RNA, 19 nt, Homo sapiens
  misc_RNA (1)...(19): siRNA sense strand
gaaaacaguucagaaaucu

SEQ ID NO: 1370772 - RNA, 19 nt, Homo sapiens
  misc_RNA (1)...(19): siRNA sense strand
caagugucaugaaggaaau

SEQ ID NO: 1370773 - RNA, 19 nt, Homo sapiens
  misc_RNA (1)...(19): siRNA sense strand
gucagaaggaguaacaaua

SEQ ID NO: 1370774 - RNA, 19 nt, Homo sapiens
  misc_RNA (1)...(19): siRNA sense strand
gaggauuacuucggacuuc

SEQ ID NO: 1370775 - RNA, 19 nt, Homo sapiens
  misc_RNA (1)...(19): siRNA sense strand
ugaaagacgauuuggagaa

SEQ ID NO: 1370776 - RNA, 19 nt, Homo sapiens
  misc_RNA (1)...(19): siRNA sense strand
gccacagacauuuacauua

SEQ ID NO: 1370777 - RNA, 19 nt, Homo sapiens
  misc_RNA (1)...(19): siRNA sense strand
gcaguugguuuugcgauua

SEQ ID NO: 1370778 - RNA, 19 nt, Homo sapiens
  misc_RNA (1)...(19): siRNA sense strand
aaaagacugugaugccuua

SEQ ID NO: 1370779 - RNA, 19 nt, Homo sapiens
  misc_RNA (1)...(19): siRNA sense strand
ggaaaugguguuugcaagu

SEQ ID NO: 1370780 - RNA, 19 nt, Homo sapiens
  misc_RNA (1)...(19): siRNA sense strand
gcgaaggcaucccugaaag

SEQ ID NO: 1370781 - RNA, 19 nt, Homo sapiens
  misc_RNA (1)...(19): siRNA sense strand
gcucagucuuacuaauaaa

SEQ ID NO: 1370782 - RNA, 19 nt, Homo sapiens
  misc_RNA (1)...(19): siRNA sense strand
gcaccagcccauuuagcua

SEQ ID NO: 1370783 - RNA, 19 nt, Homo sapiens
  misc_RNA (1)...(19): siRNA sense strand
aagggaguuugcuaaauuu

SEQ ID NO: 1370784 - RNA, 19 nt, Homo sapiens
  misc_RNA (1)...(19): siRNA sense strand
acaacgaggucaugguuca

SEQ ID NO: 1370785 - RNA, 19 nt, Homo sapiens
  misc_RNA (1)...(19): siRNA sense strand
cugauuggcuggaggaaug

SEQ ID NO: 1370786 - RNA, 19 nt, Homo sapiens
  misc_RNA (1)...(19): siRNA sense strand
aaguagagguuauucuuca

SEQ ID NO: 1370787 - RNA, 19 nt, Homo sapiens
  misc_RNA (1)...(19): siRNA sense strand
guccagacaucauuccaau

SEQ ID NO: 1370788 - RNA, 19 nt, Homo sapiens
  misc_RNA (1)...(19): siRNA sense strand
gaaagucgggacaaauuac

SEQ ID NO: 1370789 - RNA, 19 nt, Homo sapiens
  misc_RNA (1)...(19): siRNA sense strand
guguacagauccgaaguuu

SEQ ID NO: 1370790 - RNA, 19 nt, Homo sapiens
  misc_RNA (1)...(19): siRNA sense strand
guaggaagagggauaauac

SEQ ID NO: 1370791 - RNA, 19 nt, Homo sapiens
  misc_RNA (1)...(19): siRNA sense strand
ccaagugucaugaaggaaa

SEQ ID NO: 1370792 - RNA, 19 nt, Homo sapiens
  misc_RNA (1)...(19): siRNA sense strand
gaucugaugaaugaaauga

SEQ ID NO: 1370793 - RNA, 19 nt, Homo sapiens
  misc_RNA (1)...(19): siRNA sense strand
ggacaguguguuuguagga

SEQ ID NO: 1370794 - RNA, 19 nt, Homo sapiens
  misc_RNA (1)...(19): siRNA sense strand
cauuacugcugauauggaa

SEQ ID NO: 1370795 - RNA, 19 nt, Homo sapiens
  misc_RNA (1)...(19): siRNA sense strand
gcuccaaagauauaaagaa

SEQ ID NO: 1370796 - RNA, 19 nt, Homo sapiens
  misc_RNA (1)...(19): siRNA sense strand
ugacgacuguugguucuau

SEQ ID NO: 1370797 - RNA, 19 nt, Homo sapiens
  misc_RNA (1)...(19): siRNA sense strand
uguggugucuguaagugua

SEQ ID NO: 1370798 - RNA, 19 nt, Homo sapiens
  misc_RNA (1)...(19): siRNA sense strand
gaggaaaugguguuugcaa

SEQ ID NO: 1370799 - RNA, 19 nt, Homo sapiens
  misc_RNA (1)...(19): siRNA sense strand
gacaguguguuuguaggaa

SEQ ID NO: 1370800 - RNA, 19 nt, Homo sapiens
  misc_RNA (1)...(19): siRNA sense strand
gaacagaucugaugaauga

SEQ ID NO: 1370801 - RNA, 19 nt, Homo sapiens
  misc_RNA (1)...(19): siRNA sense strand
caagagagcugaagacuau

SEQ ID NO: 1370802 - RNA, 19 nt, Homo sapiens
  misc_RNA (1)...(19): siRNA sense strand
gaagggaguuugcuaaauu

SEQ ID NO: 1370803 - RNA, 19 nt, Homo sapiens
  misc_RNA (1)...(19): siRNA sense strand
ccacagacauuuacauuaa

SEQ ID NO: 1370804 - RNA, 19 nt, Homo sapiens
  misc_RNA (1)...(19): siRNA sense strand
gcgcauaucuggaaauuug

SEQ ID NO: 1370805 - RNA, 19 nt, Homo sapiens
  misc_RNA (1)...(19): siRNA sense strand
gaagagggauaauacaaau

SEQ ID NO: 1370806 - RNA, 19 nt, Homo sapiens
  misc_RNA (1)...(19): siRNA sense strand
gugaagacauggaugcuua

SEQ ID NO: 1370807 - RNA, 19 nt, Homo sapiens
  misc_RNA (1)...(19): siRNA sense strand
gaaagacgauuuggagaau

SEQ ID NO: 1370808 - RNA, 19 nt, Homo sapiens
  misc_RNA (1)...(19): siRNA sense strand
guaauucaguugaucauug

SEQ ID NO: 1370809 - RNA, 19 nt, Homo sapiens
  misc_RNA (1)...(19): siRNA sense strand
gaaaugaggaggauuacuu

SEQ ID NO: 1370810 - RNA, 19 nt, Homo sapiens
  misc_RNA (1)...(19): siRNA sense strand
caaaucauguggagaaugu

SEQ ID NO: 1370811 - RNA, 19 nt, Homo sapiens
  misc_RNA (1)...(19): siRNA sense strand
gaacugcaccagcccauuu

SEQ ID NO: 1370812 - RNA, 19 nt, Homo sapiens
  misc_RNA (1)...(19): siRNA sense strand
guacagauccgaaguuuca

SEQ ID NO: 1370813 - RNA, 19 nt, Homo sapiens
  misc_RNA (1)...(19): siRNA sense strand
cagaugaaguuaacaguga

SEQ ID NO: 1370814 - RNA, 19 nt, Homo sapiens
  misc_RNA (1)...(19): siRNA sense strand
ggaguuugcuaaauuugaa

SEQ ID NO: 1370815 - RNA, 19 nt, Homo sapiens
  misc_RNA (1)...(19): siRNA sense strand
gugcagagccuucaauaaa

SEQ ID NO: 1370816 - RNA, 19 nt, Homo sapiens
  misc_RNA (1)...(19): siRNA sense strand
gaacaacgaggucaugguu

SEQ ID NO: 1370817 - RNA, 19 nt, Homo sapiens
  misc_RNA (1)...(19): siRNA sense strand
gaaacuugguggcauuguu

SEQ ID NO: 1370818 - RNA, 19 nt, Homo sapiens
  misc_RNA (1)...(19): siRNA sense strand
gaaaugguguuugcaagug

SEQ ID NO: 1370819 - RNA, 19 nt, Homo sapiens
  misc_RNA (1)...(19): siRNA sense strand
ggaagagggauaauacaaa

SEQ ID NO: 1370820 - RNA, 19 nt, Homo sapiens
  misc_RNA (1)...(19): siRNA sense strand
caaauugucagaaggagua

SEQ ID NO: 1370821 - RNA, 19 nt, Homo sapiens
  misc_RNA (1)...(19): siRNA sense strand
ggagaaguauuuaaugaac

SEQ ID NO: 1370822 - RNA, 19 nt, Homo sapiens
  misc_RNA (1)...(19): siRNA sense strand
cccagaggcuccaaagaua

SEQ ID NO: 1370823 - RNA, 19 nt, Homo sapiens
  misc_RNA (1)...(19): siRNA sense strand
gcugaagacuaucccauug

SEQ ID NO: 1370824 - RNA, 19 nt, Homo sapiens
  misc_RNA (1)...(19): siRNA sense strand
agacaucauuccaauugua

SEQ ID NO: 1370825 - RNA, 19 nt, Homo sapiens
  misc_RNA (1)...(19): siRNA sense strand
gauccugugucccauugua

SEQ ID NO: 1370826 - RNA, 19 nt, Homo sapiens
  misc_RNA (1)...(19): siRNA sense strand
ggaaguagagguuauucuu

SEQ ID NO: 1370827 - RNA, 19 nt, Homo sapiens
  misc_RNA (1)...(19): siRNA sense strand
ucagaaggaguaacaauaa

SEQ ID NO: 1370828 - RNA, 19 nt, Homo sapiens
  misc_RNA (1)...(19): siRNA sense strand
gaaaaugaaugccaaaugg

SEQ ID NO: 1370829 - RNA, 19 nt, Homo sapiens
  misc_RNA (1)...(19): siRNA sense strand
gcaagugucguguguguga

SEQ ID NO: 1370830 - RNA, 19 nt, Homo sapiens
  misc_RNA (1)...(19): siRNA sense strand
gugauaauuucaacuguga

SEQ ID NO: 1370831 - RNA, 19 nt, Homo sapiens
  misc_RNA (1)...(19): siRNA sense strand
acaauucccuuuccucaga

SEQ ID NO: 1370832 - RNA, 19 nt, Homo sapiens
  misc_RNA (1)...(19): siRNA sense strand
gaaggaguaacaauaaguu

SEQ ID NO: 1370833 - RNA, 19 nt, Homo sapiens
  misc_RNA (1)...(19): siRNA sense strand
gcaauguaauucaguugau

SEQ ID NO: 1370834 - RNA, 19 nt, Homo sapiens
  misc_RNA (1)...(19): siRNA sense strand
gguagaaagucgggacaaa

SEQ ID NO: 1370835 - RNA, 19 nt, Homo sapiens
  misc_RNA (1)...(19): siRNA sense strand
gaaggauguugacgacugu

SEQ ID NO: 1370836 - RNA, 19 nt, Homo sapiens
  misc_RNA (1)...(19): siRNA sense strand
aaacagcgcauaucuggaa

SEQ ID NO: 1370837 - RNA, 19 nt, Homo sapiens
  misc_RNA (1)...(19): siRNA sense strand
ccagacaucauuccaauug

SEQ ID NO: 1370838 - RNA, 19 nt, Homo sapiens
  misc_RNA (1)...(19): siRNA sense strand
guaaggagaaggauguuga

SEQ ID NO: 1370839 - RNA, 19 nt, Homo sapiens
  misc_RNA (1)...(19): siRNA sense strand
ugauagauccaauggcuua

SEQ ID NO: 1370840 - RNA, 19 nt, Homo sapiens
  misc_RNA (1)...(19): siRNA sense strand
gaaaucugcaguaacaaug

SEQ ID NO: 1370841 - RNA, 19 nt, Homo sapiens
  misc_RNA (1)...(19): siRNA sense strand
gcaugugacuguucuuugg

SEQ ID NO: 1370842 - RNA, 19 nt, Homo sapiens
  misc_RNA (1)...(19): siRNA sense strand
ggagaugagguucaauuug

SEQ ID NO: 1370843 - RNA, 19 nt, Homo sapiens
  misc_RNA (1)...(19): siRNA sense strand
cagaggauauuacucagau

SEQ ID NO: 1370844 - RNA, 19 nt, Homo sapiens
  misc_RNA (1)...(19): siRNA sense strand
gcaaacgugugagaugugu

SEQ ID NO: 1370845 - RNA, 19 nt, Homo sapiens
  misc_RNA (1)...(19): siRNA sense strand
gaaagucccaagugucaug

SEQ ID NO: 1370846 - RNA, 19 nt, Homo sapiens
  misc_RNA (1)...(19): siRNA sense strand
gugcucagucuuacuaaua

SEQ ID NO: 1370847 - RNA, 19 nt, Homo sapiens
  misc_RNA (1)...(19): siRNA sense strand
ggacuucagaauuggauuu

SEQ ID NO: 1370848 - RNA, 19 nt, Homo sapiens
  misc_RNA (1)...(19): siRNA sense strand
gcaaaggaacagcagagaa

SEQ ID NO: 1370849 - RNA, 19 nt, Homo sapiens
  misc_RNA (1)...(19): siRNA sense strand
gggcaaacgugugagaugu

SEQ ID NO: 1370850 - RNA, 19 nt, Homo sapiens
  misc_RNA (1)...(19): siRNA sense strand
ugcacgaugugaugauuua

SEQ ID NO: 1370851 - RNA, 19 nt, Homo sapiens
  misc_RNA (1)...(19): siRNA sense strand
uagauccaauggcuuaauu

SEQ ID NO: 1370852 - RNA, 19 nt, Homo sapiens
  misc_RNA (1)...(19): siRNA sense strand
gaauuggauuuggcucauu

SEQ ID NO: 1370853 - RNA, 19 nt, Homo sapiens
  misc_RNA (1)...(19): siRNA sense strand
uagaaagucgggacaaauu

SEQ ID NO: 1370854 - RNA, 19 nt, Homo sapiens
  misc_RNA (1)...(19): siRNA sense strand
aaugaaaugaggaggauua

SEQ ID NO: 1370855 - RNA, 19 nt, Homo sapiens
  misc_RNA (1)...(19): siRNA sense strand
aauuguagcuggugugguu

SEQ ID NO: 1370856 - RNA, 19 nt, Homo sapiens
  misc_RNA (1)...(19): siRNA sense strand
agaaagucgggacaaauua

SEQ ID NO: 1370857 - RNA, 19 nt, Homo sapiens
  misc_RNA (1)...(19): siRNA sense strand
gagcauaaagaauguguuc

SEQ ID NO: 1370858 - RNA, 19 nt, Homo sapiens
  misc_RNA (1)...(19): siRNA sense strand
uccaauggcuuaauuugug

SEQ ID NO: 1370859 - RNA, 19 nt, Homo sapiens
  misc_RNA (1)...(19): siRNA sense strand
gaaguuaacagugaagaca

SEQ ID NO: 1370860 - RNA, 19 nt, Homo sapiens
  misc_RNA (1)...(19): siRNA sense strand
cagcacagaugaaguuaac

SEQ ID NO: 1370861 - RNA, 19 nt, Homo sapiens
  misc_RNA (1)...(19): siRNA sense strand
gcaaaugccaaaucaugug

SEQ ID NO: 1370862 - RNA, 19 nt, Homo sapiens
  misc_RNA (1)...(19): siRNA sense strand
gaagaauuucagccuguuu

SEQ ID NO: 1370863 - RNA, 19 nt, Homo sapiens
  misc_RNA (1)...(19): siRNA sense strand
cagaggcuccaaagauaua

SEQ ID NO: 1370864 - RNA, 19 nt, Homo sapiens
  misc_RNA (1)...(19): siRNA sense strand
cugcugauauggaagcuuu

SEQ ID NO: 1370865 - RNA, 19 nt, Homo sapiens
  misc_RNA (1)...(19): siRNA sense strand
caacugugauagauccaau

SEQ ID NO: 1370866 - RNA, 19 nt, Homo sapiens
  misc_RNA (1)...(19): siRNA sense strand
uagagguuauucuucagua

SEQ ID NO: 1370867 - RNA, 19 nt, Homo sapiens
  misc_RNA (1)...(19): siRNA sense strand
cagcgcauaucuggaaauu

SEQ ID NO: 1370868 - RNA, 19 nt, Homo sapiens
  misc_RNA (1)...(19): siRNA sense strand
caaaggaacagcagagaag

SEQ ID NO: 1370869 - RNA, 19 nt, Homo sapiens
  misc_RNA (1)...(19): siRNA sense strand
gaacagcagagaagcucaa

SEQ ID NO: 1370870 - RNA, 19 nt, Homo sapiens
  misc_RNA (1)...(19): siRNA sense strand
gauccaauggcuuaauuug

SEQ ID NO: 1370871 - RNA, 19 nt, Homo sapiens
  misc_RNA (1)...(19): siRNA sense strand
gaaaacaguucagaaaucu

SEQ ID NO: 1370872 - RNA, 19 nt, Homo sapiens
  misc_RNA (1)...(19): siRNA sense strand
caagugucaugaaggaaau

SEQ ID NO: 1370873 - RNA, 19 nt, Homo sapiens
  misc_RNA (1)...(19): siRNA sense strand
gucagaaggaguaacaaua

SEQ ID NO: 1370874 - RNA, 19 nt, Homo sapiens
  misc_RNA (1)...(19): siRNA sense strand
gaggauuacuucggacuuc

SEQ ID NO: 1370875 - RNA, 19 nt, Homo sapiens
  misc_RNA (1)...(19): siRNA sense strand
ugaaagacgauuuggagaa

SEQ ID NO: 1370876 - RNA, 19 nt, Homo sapiens
  misc_RNA (1)...(19): siRNA sense strand
gccacagacauuuacauua

SEQ ID NO: 1370877 - RNA, 19 nt, Homo sapiens
  misc_RNA (1)...(19): siRNA sense strand
gcaguugguuuugcgauua

SEQ ID NO: 1370878 - RNA, 19 nt, Homo sapiens
  misc_RNA (1)...(19): siRNA sense strand
aaaagacugugaugccuua

SEQ ID NO: 1370879 - RNA, 19 nt, Homo sapiens
  misc_RNA (1)...(19): siRNA sense strand
ggaaaugguguuugcaagu

SEQ ID NO: 1370880 - RNA, 19 nt, Homo sapiens
  misc_RNA (1)...(19): siRNA sense strand
gcgaaggcaucccugaaag

SEQ ID NO: 1370881 - RNA, 19 nt, Homo sapiens
  misc_RNA (1)...(19): siRNA sense strand
gcucagucuuacuaauaaa

SEQ ID NO: 1370882 - RNA, 19 nt, Homo sapiens
  misc_RNA (1)...(19): siRNA sense strand
gcaccagcccauuuagcua

SEQ ID NO: 1370883 - RNA, 19 nt, Homo sapiens
  misc_RNA (1)...(19): siRNA sense strand
aagggaguuugcuaaauuu

SEQ ID NO: 1370884 - RNA, 19 nt, Homo sapiens
  misc_RNA (1)...(19): siRNA sense strand
acaacgaggucaugguuca

SEQ ID NO: 1370885 - RNA, 19 nt, Homo sapiens
  misc_RNA (1)...(19): siRNA sense strand
cugauuggcuggaggaaug

SEQ ID NO: 1370886 - RNA, 19 nt, Homo sapiens
  misc_RNA (1)...(19): siRNA sense strand
aaguagagguuauucuuca

SEQ ID NO: 1370887 - RNA, 19 nt, Homo sapiens
  misc_RNA (1)...(19): siRNA sense strand
guccagacaucauuccaau

SEQ ID NO: 1370888 - RNA, 19 nt, Homo sapiens
  misc_RNA (1)...(19): siRNA sense strand
gaaagucgggacaaauuac

SEQ ID NO: 1370889 - RNA, 19 nt, Homo sapiens
  misc_RNA (1)...(19): siRNA sense strand
guguacagauccgaaguuu

SEQ ID NO: 1370890 - RNA, 19 nt, Homo sapiens
  misc_RNA (1)...(19): siRNA sense strand
guaggaagagggauaauac

SEQ ID NO: 1370891 - RNA, 19 nt, Homo sapiens
  misc_RNA (1)...(19): siRNA sense strand
ccaagugucaugaaggaaa

SEQ ID NO: 1370892 - RNA, 19 nt, Homo sapiens
  misc_RNA (1)...(19): siRNA sense strand
gaucugaugaaugaaauga

SEQ ID NO: 1370893 - RNA, 19 nt, Homo sapiens
  misc_RNA (1)...(19): siRNA sense strand
ggacaguguguuuguagga

SEQ ID NO: 1370894 - RNA, 19 nt, Homo sapiens
  misc_RNA (1)...(19): siRNA sense strand
cauuacugcugauauggaa

SEQ ID NO: 1370895 - RNA, 19 nt, Homo sapiens
  misc_RNA (1)...(19): siRNA sense strand
gcuccaaagauauaaagaa

SEQ ID NO: 1370896 - RNA, 19 nt, Homo sapiens
  misc_RNA (1)...(19): siRNA sense strand
ugacgacuguugguucuau

SEQ ID NO: 1370897 - RNA, 19 nt, Homo sapiens
  misc_RNA (1)...(19): siRNA sense strand
uguggugucuguaagugua

SEQ ID NO: 1370898 - RNA, 19 nt, Homo sapiens
  misc_RNA (1)...(19): siRNA sense strand
gaggaaaugguguuugcaa

SEQ ID NO: 1370899 - RNA, 19 nt, Homo sapiens
  misc_RNA (1)...(19): siRNA sense strand
gacaguguguuuguaggaa

SEQ ID NO: 1370900 - RNA, 19 nt, Homo sapiens
  misc_RNA (1)...(19): siRNA sense strand
gaaaugaccugccgugaua

SEQ ID NO: 1370901 - RNA, 19 nt, Homo sapiens
  misc_RNA (1)...(19): siRNA sense strand
ggaagaagaugaaucagau

SEQ ID NO: 1370902 - RNA, 19 nt, Homo sapiens
  misc_RNA (1)...(19): siRNA sense strand
ggaaucagaugcaaagaug

SEQ ID NO: 1370903 - RNA, 19 nt, Homo sapiens
  misc_RNA (1)...(19): siRNA sense strand
ugaagaagguuccaacaaa

SEQ ID NO: 1370904 - RNA, 19 nt, Homo sapiens
  misc_RNA (1)...(19): siRNA sense strand
gagaagaagcagagaaaua

SEQ ID NO: 1370905 - RNA, 19 nt, Homo sapiens
  misc_RNA (1)...(19): siRNA sense strand
cagcuggguuggugaauua

SEQ ID NO: 1370906 - RNA, 19 nt, Homo sapiens
  misc_RNA (1)...(19): siRNA sense strand
gaaggaagaagaugaauca

SEQ ID NO: 1370907 - RNA, 19 nt, Homo sapiens
  misc_RNA (1)...(19): siRNA sense strand
gacaugaaauuguuccaaa

SEQ ID NO: 1370908 - RNA, 19 nt, Homo sapiens
  misc_RNA (1)...(19): siRNA sense strand
gcgcaacucuacaugauug

SEQ ID NO: 1370909 - RNA, 19 nt, Homo sapiens
  misc_RNA (1)...(19): siRNA sense strand
ggcagaugcucguucuuua

SEQ ID NO: 1370910 - RNA, 19 nt, Homo sapiens
  misc_RNA (1)...(19): siRNA sense strand
cauaguacaugacgaaguu

SEQ ID NO: 1370911 - RNA, 19 nt, Homo sapiens
  misc_RNA (1)...(19): siRNA sense strand
uaaggaaucucugaaggaa

SEQ ID NO: 1370912 - RNA, 19 nt, Homo sapiens
  misc_RNA (1)...(19): siRNA sense strand
gaagaagguuccaacaaaa

SEQ ID NO: 1370913 - RNA, 19 nt, Homo sapiens
  misc_RNA (1)...(19): siRNA sense strand
gcuacaacauuccacuaaa

SEQ ID NO: 1370914 - RNA, 19 nt, Homo sapiens
  misc_RNA (1)...(19): siRNA sense strand
gaauggcaguagcagguuu

SEQ ID NO: 1370915 - RNA, 19 nt, Homo sapiens
  misc_RNA (1)...(19): siRNA sense strand
caacuucagaucuaacuuu

SEQ ID NO: 1370916 - RNA, 19 nt, Homo sapiens
  misc_RNA (1)...(19): siRNA sense strand
uggaagacaugaaauuguu

SEQ ID NO: 1370917 - RNA, 19 nt, Homo sapiens
  misc_RNA (1)...(19): siRNA sense strand
agacauagcaagagaagaa

SEQ ID NO: 1370918 - RNA, 19 nt, Homo sapiens
  misc_RNA (1)...(19): siRNA sense strand
gcaaagacggaaauagaga

SEQ ID NO: 1370919 - RNA, 19 nt, Homo sapiens
  misc_RNA (1)...(19): siRNA sense strand
caaguugaauaugcuauga

SEQ ID NO: 1370920 - RNA, 19 nt, Homo sapiens
  misc_RNA (1)...(19): siRNA sense strand
gccgugauaucguuaaaga

SEQ ID NO: 1370921 - RNA, 19 nt, Homo sapiens
  misc_RNA (1)...(19): siRNA sense strand
gaucuaacuuuggcuacaa

SEQ ID NO: 1370922 - RNA, 19 nt, Homo sapiens
  misc_RNA (1)...(19): siRNA sense strand
gaaaauaguaguacagcua

SEQ ID NO: 1370923 - RNA, 19 nt, Homo sapiens
  misc_RNA (1)...(19): siRNA sense strand
uagcagacauagcaagaga

SEQ ID NO: 1370924 - RNA, 19 nt, Homo sapiens
  misc_RNA (1)...(19): siRNA sense strand
uaacuuuggcuacaacauu

SEQ ID NO: 1370925 - RNA, 19 nt, Homo sapiens
  misc_RNA (1)...(19): siRNA sense strand
ugacgaaguuaaggauaaa

SEQ ID NO: 1370926 - RNA, 19 nt, Homo sapiens
  misc_RNA (1)...(19): siRNA sense strand
ggcaguagcagguuuguug

SEQ ID NO: 1370927 - RNA, 19 nt, Homo sapiens
  misc_RNA (1)...(19): siRNA sense strand
agaagaagcagagaaauau

SEQ ID NO: 1370928 - RNA, 19 nt, Homo sapiens
  misc_RNA (1)...(19): siRNA sense strand
gaaauagagaagcuucaga

SEQ ID NO: 1370929 - RNA, 19 nt, Homo sapiens
  misc_RNA (1)...(19): siRNA sense strand
aggaaucucugaaggaaga

SEQ ID NO: 1370930 - RNA, 19 nt, Homo sapiens
  misc_RNA (1)...(19): siRNA sense strand
gaccugccgugauaucguu

SEQ ID NO: 1370931 - RNA, 19 nt, Homo sapiens
  misc_RNA (1)...(19): siRNA sense strand
cagacagaguggccaugua

SEQ ID NO: 1370932 - RNA, 19 nt, Homo sapiens
  misc_RNA (1)...(19): siRNA sense strand
gcuuccaacuucagaucua

SEQ ID NO: 1370933 - RNA, 19 nt, Homo sapiens
  misc_RNA (1)...(19): siRNA sense strand
caaagacggaaauagagaa

SEQ ID NO: 1370934 - RNA, 19 nt, Homo sapiens
  misc_RNA (1)...(19): siRNA sense strand
gugcgcaacucuacaugau

SEQ ID NO: 1370935 - RNA, 19 nt, Homo sapiens
  misc_RNA (1)...(19): siRNA sense strand
gcagaugcucguucuuuag

SEQ ID NO: 1370936 - RNA, 19 nt, Homo sapiens
  misc_RNA (1)...(19): siRNA sense strand
gaagaagaugaaucagaug

SEQ ID NO: 1370937 - RNA, 19 nt, Homo sapiens
  misc_RNA (1)...(19): siRNA sense strand
uaguacagcuauuggaauc

SEQ ID NO: 1370938 - RNA, 19 nt, Homo sapiens
  misc_RNA (1)...(19): siRNA sense strand
uuacauaguacaugacgaa

SEQ ID NO: 1370939 - RNA, 19 nt, Homo sapiens
  misc_RNA (1)...(19): siRNA sense strand
cugcaaagacggaaauaga

SEQ ID NO: 1370940 - RNA, 19 nt, Homo sapiens
  misc_RNA (1)...(19): siRNA sense strand
agacagaguggccauguau

SEQ ID NO: 1370941 - RNA, 19 nt, Homo sapiens
  misc_RNA (1)...(19): siRNA sense strand
aagagaagaagcagagaaa

SEQ ID NO: 1370942 - RNA, 19 nt, Homo sapiens
  misc_RNA (1)...(19): siRNA sense strand
augacgaaguuaaggauaa

SEQ ID NO: 1370943 - RNA, 19 nt, Homo sapiens
  misc_RNA (1)...(19): siRNA sense strand
auagagaagcuucagauga

SEQ ID NO: 1370944 - RNA, 19 nt, Homo sapiens
  misc_RNA (1)...(19): siRNA sense strand
cuacaacauuccacuaaaa

SEQ ID NO: 1370945 - RNA, 19 nt, Homo sapiens
  misc_RNA (1)...(19): siRNA sense strand
uaagagaagaagcagagaa

SEQ ID NO: 1370946 - RNA, 19 nt, Homo sapiens
  misc_RNA (1)...(19): siRNA sense strand
gaaugacggugcgcaacuc

SEQ ID NO: 1370947 - RNA, 19 nt, Homo sapiens
  misc_RNA (1)...(19): siRNA sense strand
gcaugcauauacacucuac

SEQ ID NO: 1370948 - RNA, 19 nt, Homo sapiens
  misc_RNA (1)...(19): siRNA sense strand
gcagguuuguuggcagaug

SEQ ID NO: 1370949 - RNA, 19 nt, Homo sapiens
  misc_RNA (1)...(19): siRNA sense strand
gcagacauagcaagagaag

SEQ ID NO: 1370950 - RNA, 19 nt, Homo sapiens
  misc_RNA (1)...(19): siRNA sense strand
ggcuacaacauuccacuaa

SEQ ID NO: 1370951 - RNA, 19 nt, Homo sapiens
  misc_RNA (1)...(19): siRNA sense strand
guacagcuauuggaaucag

SEQ ID NO: 1370952 - RNA, 19 nt, Homo sapiens
  misc_RNA (1)...(19): siRNA sense strand
uaacuaauggaagacauga

SEQ ID NO: 1370953 - RNA, 19 nt, Homo sapiens
  misc_RNA (1)...(19): siRNA sense strand
ucagcuggguuggugaauu

SEQ ID NO: 1370954 - RNA, 19 nt, Homo sapiens
  misc_RNA (1)...(19): siRNA sense strand
gugcaugcauauacacucu

SEQ ID NO: 1370955 - RNA, 19 nt, Homo sapiens
  misc_RNA (1)...(19): siRNA sense strand
ggaagacaugaaauuguuc

SEQ ID NO: 1370956 - RNA, 19 nt, Homo sapiens
  misc_RNA (1)...(19): siRNA sense strand
aaauagagaagcuucagau

SEQ ID NO: 1370957 - RNA, 19 nt, Homo sapiens
  misc_RNA (1)...(19): siRNA sense strand
gcagacagaguggccaugu

SEQ ID NO: 1370958 - RNA, 19 nt, Homo sapiens
  misc_RNA (1)...(19): siRNA sense strand
aagaagaugaaucagauga

SEQ ID NO: 1370959 - RNA, 19 nt, Homo sapiens
  misc_RNA (1)...(19): siRNA sense strand
augcaaagaugguguuguc

SEQ ID NO: 1370960 - RNA, 19 nt, Homo sapiens
  misc_RNA (1)...(19): siRNA sense strand
acuaauggaagacaugaaa

SEQ ID NO: 1370961 - RNA, 19 nt, Homo sapiens
  misc_RNA (1)...(19): siRNA sense strand
uggcagaugcucguucuuu

SEQ ID NO: 1370962 - RNA, 19 nt, Homo sapiens
  misc_RNA (1)...(19): siRNA sense strand
gugauaucguuaaagaagu

SEQ ID NO: 1370963 - RNA, 19 nt, Homo sapiens
  misc_RNA (1)...(19): siRNA sense strand
guaguacagcuauuggaau

SEQ ID NO: 1370964 - RNA, 19 nt, Homo sapiens
  misc_RNA (1)...(19): siRNA sense strand
cgugauaucguuaaagaag

SEQ ID NO: 1370965 - RNA, 19 nt, Homo sapiens
  misc_RNA (1)...(19): siRNA sense strand
ccugucagccucuacauuc

SEQ ID NO: 1370966 - RNA, 19 nt, Homo sapiens
  misc_RNA (1)...(19): siRNA sense strand
uaauguugaucggcauguu

SEQ ID NO: 1370967 - RNA, 19 nt, Homo sapiens
  misc_RNA (1)...(19): siRNA sense strand
agacggaaauagagaagcu

SEQ ID NO: 1370968 - RNA, 19 nt, Homo sapiens
  misc_RNA (1)...(19): siRNA sense strand
cccaucagguguuucauac

SEQ ID NO: 1370969 - RNA, 19 nt, Homo sapiens
  misc_RNA (1)...(19): siRNA sense strand
ggaauggcaguagcagguu

SEQ ID NO: 1370970 - RNA, 19 nt, Homo sapiens
  misc_RNA (1)...(19): siRNA sense strand
ggaaauagagaagcuucag

SEQ ID NO: 1370971 - RNA, 19 nt, Homo sapiens
  misc_RNA (1)...(19): siRNA sense strand
caugacgaaguuaaggaua

SEQ ID NO: 1370972 - RNA, 19 nt, Homo sapiens
  misc_RNA (1)...(19): siRNA sense strand
agaaaugaccugccgugau

SEQ ID NO: 1370973 - RNA, 19 nt, Homo sapiens
  misc_RNA (1)...(19): siRNA sense strand
ugaaggcuguggaaaauag

SEQ ID NO: 1370974 - RNA, 19 nt, Homo sapiens
  misc_RNA (1)...(19): siRNA sense strand
cuuccaacuucagaucuaa

SEQ ID NO: 1370975 - RNA, 19 nt, Homo sapiens
  misc_RNA (1)...(19): siRNA sense strand
acagaguggccauguaugu

SEQ ID NO: 1370976 - RNA, 19 nt, Homo sapiens
  misc_RNA (1)...(19): siRNA sense strand
uaugaaggcuguggaaaau

SEQ ID NO: 1370977 - RNA, 19 nt, Homo sapiens
  misc_RNA (1)...(19): siRNA sense strand
gcuaugaaggcuguggaaa

SEQ ID NO: 1370978 - RNA, 19 nt, Homo sapiens
  misc_RNA (1)...(19): siRNA sense strand
aauggaagacaugaaauug

SEQ ID NO: 1370979 - RNA, 19 nt, Homo sapiens
  misc_RNA (1)...(19): siRNA sense strand
aacuucagaucuaacuuug

SEQ ID NO: 1370980 - RNA, 19 nt, Homo sapiens
  misc_RNA (1)...(19): siRNA sense strand
gcuauuggaaucagaugca

SEQ ID NO: 1370981 - RNA, 19 nt, Homo sapiens
  misc_RNA (1)...(19): siRNA sense strand
aggaagaagaugaaucaga

SEQ ID NO: 1370982 - RNA, 19 nt, Homo sapiens
  misc_RNA (1)...(19): siRNA sense strand
guuggcagaugcucguucu

SEQ ID NO: 1370983 - RNA, 19 nt, Homo sapiens
  misc_RNA (1)...(19): siRNA sense strand
guacaugacgaaguuaagg

SEQ ID NO: 1370984 - RNA, 19 nt, Homo sapiens
  misc_RNA (1)...(19): siRNA sense strand
ggugcgcaacucuacauga

SEQ ID NO: 1370985 - RNA, 19 nt, Homo sapiens
  misc_RNA (1)...(19): siRNA sense strand
ugaucggcauguuggaaug

SEQ ID NO: 1370986 - RNA, 19 nt, Homo sapiens
  misc_RNA (1)...(19): siRNA sense strand
aacuuuggcuacaacauuc

SEQ ID NO: 1370987 - RNA, 19 nt, Homo sapiens
  misc_RNA (1)...(19): siRNA sense strand
ugacccaucagguguuuca

SEQ ID NO: 1370988 - RNA, 19 nt, Homo sapiens
  misc_RNA (1)...(19): siRNA sense strand
ugaaggaagaagaugaauc

SEQ ID NO: 1370989 - RNA, 19 nt, Homo sapiens
  misc_RNA (1)...(19): siRNA sense strand
gguguuucauacgguuauu

SEQ ID NO: 1370990 - RNA, 19 nt, Homo sapiens
  misc_RNA (1)...(19): siRNA sense strand
gaaaugaccugccgugaua

SEQ ID NO: 1370991 - RNA, 19 nt, Homo sapiens
  misc_RNA (1)...(19): siRNA sense strand
ggaagaagaugaaucagau

SEQ ID NO: 1370992 - RNA, 19 nt, Homo sapiens
  misc_RNA (1)...(19): siRNA sense strand
ggaaucagaugcaaagaug

SEQ ID NO: 1370993 - RNA, 19 nt, Homo sapiens
  misc_RNA (1)...(19): siRNA sense strand
ugaagaagguuccaacaaa

SEQ ID NO: 1370994 - RNA, 19 nt, Homo sapiens
  misc_RNA (1)...(19): siRNA sense strand
gagaagaagcagagaaaua

SEQ ID NO: 1370995 - RNA, 19 nt, Homo sapiens
  misc_RNA (1)...(19): siRNA sense strand
cagcuggguuggugaauua

SEQ ID NO: 1370996 - RNA, 19 nt, Homo sapiens
  misc_RNA (1)...(19): siRNA sense strand
gaaggaagaagaugaauca

SEQ ID NO: 1370997 - RNA, 19 nt, Homo sapiens
  misc_RNA (1)...(19): siRNA sense strand
gacaugaaauuguuccaaa

SEQ ID NO: 1370998 - RNA, 19 nt, Homo sapiens
  misc_RNA (1)...(19): siRNA sense strand
gcgcaacucuacaugauug

SEQ ID NO: 1370999 - RNA, 19 nt, Homo sapiens
  misc_RNA (1)...(19): siRNA sense strand
ggcagaugcucguucuuua

SEQ ID NO: 1371000 - RNA, 19 nt, Homo sapiens
  misc_RNA (1)...(19): siRNA sense strand
cauaguacaugacgaaguu

SEQ ID NO: 1371001 - RNA, 19 nt, Homo sapiens
  misc_RNA (1)...(19): siRNA sense strand
uaaggaaucucugaaggaa

SEQ ID NO: 1371002 - RNA, 19 nt, Homo sapiens
  misc_RNA (1)...(19): siRNA sense strand
gaagaagguuccaacaaaa

SEQ ID NO: 1371003 - RNA, 19 nt, Homo sapiens
  misc_RNA (1)...(19): siRNA sense strand
gcuacaacauuccacuaaa

SEQ ID NO: 1371004 - RNA, 19 nt, Homo sapiens
  misc_RNA (1)...(19): siRNA sense strand
gaauggcaguagcagguuu

SEQ ID NO: 1371005 - RNA, 19 nt, Homo sapiens
  misc_RNA (1)...(19): siRNA sense strand
caacuucagaucuaacuuu

SEQ ID NO: 1371006 - RNA, 19 nt, Homo sapiens
  misc_RNA (1)...(19): siRNA sense strand
uggaagacaugaaauuguu

SEQ ID NO: 1371007 - RNA, 19 nt, Homo sapiens
  misc_RNA (1)...(19): siRNA sense strand
agacauagcaagagaagaa

SEQ ID NO: 1371008 - RNA, 19 nt, Homo sapiens
  misc_RNA (1)...(19): siRNA sense strand
gcaaagacggaaauagaga

SEQ ID NO: 1371009 - RNA, 19 nt, Homo sapiens
  misc_RNA (1)...(19): siRNA sense strand
caaguugaauaugcuauga

SEQ ID NO: 1371010 - RNA, 19 nt, Homo sapiens
  misc_RNA (1)...(19): siRNA sense strand
gccgugauaucguuaaaga

SEQ ID NO: 1371011 - RNA, 19 nt, Homo sapiens
  misc_RNA (1)...(19): siRNA sense strand
gaucuaacuuuggcuacaa

SEQ ID NO: 1371012 - RNA, 19 nt, Homo sapiens
  misc_RNA (1)...(19): siRNA sense strand
gaaaauaguaguacagcua

SEQ ID NO: 1371013 - RNA, 19 nt, Homo sapiens
  misc_RNA (1)...(19): siRNA sense strand
uagcagacauagcaagaga

SEQ ID NO: 1371014 - RNA, 19 nt, Homo sapiens
  misc_RNA (1)...(19): siRNA sense strand
uaacuuuggcuacaacauu

SEQ ID NO: 1371015 - RNA, 19 nt, Homo sapiens
  misc_RNA (1)...(19): siRNA sense strand
ugacgaaguuaaggauaaa

SEQ ID NO: 1371016 - RNA, 19 nt, Homo sapiens
  misc_RNA (1)...(19): siRNA sense strand
ggcaguagcagguuuguug

SEQ ID NO: 1371017 - RNA, 19 nt, Homo sapiens
  misc_RNA (1)...(19): siRNA sense strand
agaagaagcagagaaauau

SEQ ID NO: 1371018 - RNA, 19 nt, Homo sapiens
  misc_RNA (1)...(19): siRNA sense strand
gaaauagagaagcuucaga

SEQ ID NO: 1371019 - RNA, 19 nt, Homo sapiens
  misc_RNA (1)...(19): siRNA sense strand
aggaaucucugaaggaaga

SEQ ID NO: 1371020 - RNA, 19 nt, Homo sapiens
  misc_RNA (1)...(19): siRNA sense strand
gaccugccgugauaucguu

SEQ ID NO: 1371021 - RNA, 19 nt, Homo sapiens
  misc_RNA (1)...(19): siRNA sense strand
cagacagaguggccaugua

SEQ ID NO: 1371022 - RNA, 19 nt, Homo sapiens
  misc_RNA (1)...(19): siRNA sense strand
gcuuccaacuucagaucua

SEQ ID NO: 1371023 - RNA, 19 nt, Homo sapiens
  misc_RNA (1)...(19): siRNA sense strand
caaagacggaaauagagaa

SEQ ID NO: 1371024 - RNA, 19 nt, Homo sapiens
  misc_RNA (1)...(19): siRNA sense strand
gugcgcaacucuacaugau

SEQ ID NO: 1371025 - RNA, 19 nt, Homo sapiens
  misc_RNA (1)...(19): siRNA sense strand
gcagaugcucguucuuuag

SEQ ID NO: 1371026 - RNA, 19 nt, Homo sapiens
  misc_RNA (1)...(19): siRNA sense strand
gaagaagaugaaucagaug

SEQ ID NO: 1371027 - RNA, 19 nt, Homo sapiens
  misc_RNA (1)...(19): siRNA sense strand
uaguacagcuauuggaauc

SEQ ID NO: 1371028 - RNA, 19 nt, Homo sapiens
  misc_RNA (1)...(19): siRNA sense strand
uuacauaguacaugacgaa

SEQ ID NO: 1371029 - RNA, 19 nt, Homo sapiens
  misc_RNA (1)...(19): siRNA sense strand
cugcaaagacggaaauaga

SEQ ID NO: 1371030 - RNA, 19 nt, Homo sapiens
  misc_RNA (1)...(19): siRNA sense strand
agacagaguggccauguau

SEQ ID NO: 1371031 - RNA, 19 nt, Homo sapiens
  misc_RNA (1)...(19): siRNA sense strand
aagagaagaagcagagaaa

SEQ ID NO: 1371032 - RNA, 19 nt, Homo sapiens
  misc_RNA (1)...(19): siRNA sense strand
augacgaaguuaaggauaa

SEQ ID NO: 1371033 - RNA, 19 nt, Homo sapiens
  misc_RNA (1)...(19): siRNA sense strand
auagagaagcuucagauga

SEQ ID NO: 1371034 - RNA, 19 nt, Homo sapiens
  misc_RNA (1)...(19): siRNA sense strand
cuacaacauuccacuaaaa

SEQ ID NO: 1371035 - RNA, 19 nt, Homo sapiens
  misc_RNA (1)...(19): siRNA sense strand
uaagagaagaagcagagaa

SEQ ID NO: 1371036 - RNA, 19 nt, Homo sapiens
  misc_RNA (1)...(19): siRNA sense strand
gaaugacggugcgcaacuc

SEQ ID NO: 1371037 - RNA, 19 nt, Homo sapiens
  misc_RNA (1)...(19): siRNA sense strand
gcaugcauauacacucuac

SEQ ID NO: 1371038 - RNA, 19 nt, Homo sapiens
  misc_RNA (1)...(19): siRNA sense strand
gcagguuuguuggcagaug

SEQ ID NO: 1371039 - RNA, 19 nt, Homo sapiens
  misc_RNA (1)...(19): siRNA sense strand
gcagacauagcaagagaag

SEQ ID NO: 1371040 - RNA, 19 nt, Homo sapiens
  misc_RNA (1)...(19): siRNA sense strand
ggcuacaacauuccacuaa

SEQ ID NO: 1371041 - RNA, 19 nt, Homo sapiens
  misc_RNA (1)...(19): siRNA sense strand
guacagcuauuggaaucag

SEQ ID NO: 1371042 - RNA, 19 nt, Homo sapiens
  misc_RNA (1)...(19): siRNA sense strand
uaacuaauggaagacauga

SEQ ID NO: 1371043 - RNA, 19 nt, Homo sapiens
  misc_RNA (1)...(19): siRNA sense strand
ucagcuggguuggugaauu

SEQ ID NO: 1371044 - RNA, 19 nt, Homo sapiens
  misc_RNA (1)...(19): siRNA sense strand
gugcaugcauauacacucu

SEQ ID NO: 1371045 - RNA, 19 nt, Homo sapiens
  misc_RNA (1)...(19): siRNA sense strand
ggaagacaugaaauuguuc

SEQ ID NO: 1371046 - RNA, 19 nt, Homo sapiens
  misc_RNA (1)...(19): siRNA sense strand
aaauagagaagcuucagau

SEQ ID NO: 1371047 - RNA, 19 nt, Homo sapiens
  misc_RNA (1)...(19): siRNA sense strand
gcagacagaguggccaugu

SEQ ID NO: 1371048 - RNA, 19 nt, Homo sapiens
  misc_RNA (1)...(19): siRNA sense strand
aagaagaugaaucagauga

SEQ ID NO: 1371049 - RNA, 19 nt, Homo sapiens
  misc_RNA (1)...(19): siRNA sense strand
augcaaagaugguguuguc

SEQ ID NO: 1371050 - RNA, 19 nt, Homo sapiens
  misc_RNA (1)...(19): siRNA sense strand
acuaauggaagacaugaaa

SEQ ID NO: 1371051 - RNA, 19 nt, Homo sapiens
  misc_RNA (1)...(19): siRNA sense strand
uggcagaugcucguucuuu

SEQ ID NO: 1371052 - RNA, 19 nt, Homo sapiens
  misc_RNA (1)...(19): siRNA sense strand
gugauaucguuaaagaagu

SEQ ID NO: 1371053 - RNA, 19 nt, Homo sapiens
  misc_RNA (1)...(19): siRNA sense strand
guaguacagcuauuggaau

SEQ ID NO: 1371054 - RNA, 19 nt, Homo sapiens
  misc_RNA (1)...(19): siRNA sense strand
cgugauaucguuaaagaag

SEQ ID NO: 1371055 - RNA, 19 nt, Homo sapiens
  misc_RNA (1)...(19): siRNA sense strand
ccugucagccucuacauuc

SEQ ID NO: 1371056 - RNA, 19 nt, Homo sapiens
  misc_RNA (1)...(19): siRNA sense strand
uaauguugaucggcauguu

SEQ ID NO: 1371057 - RNA, 19 nt, Homo sapiens
  misc_RNA (1)...(19): siRNA sense strand
agacggaaauagagaagcu

SEQ ID NO: 1371058 - RNA, 19 nt, Homo sapiens
  misc_RNA (1)...(19): siRNA sense strand
cccaucagguguuucauac

SEQ ID NO: 1371059 - RNA, 19 nt, Homo sapiens
  misc_RNA (1)...(19): siRNA sense strand
ggaauggcaguagcagguu

SEQ ID NO: 1371060 - RNA, 19 nt, Homo sapiens
  misc_RNA (1)...(19): siRNA sense strand
ggaaauagagaagcuucag

SEQ ID NO: 1371061 - RNA, 19 nt, Homo sapiens
  misc_RNA (1)...(19): siRNA sense strand
caugacgaaguuaaggaua

SEQ ID NO: 1371062 - RNA, 19 nt, Homo sapiens
  misc_RNA (1)...(19): siRNA sense strand
agaaaugaccugccgugau

SEQ ID NO: 1371063 - RNA, 19 nt, Homo sapiens
  misc_RNA (1)...(19): siRNA sense strand
ugaaggcuguggaaaauag

SEQ ID NO: 1371064 - RNA, 19 nt, Homo sapiens
  misc_RNA (1)...(19): siRNA sense strand
cuuccaacuucagaucuaa

SEQ ID NO: 1371065 - RNA, 19 nt, Homo sapiens
  misc_RNA (1)...(19): siRNA sense strand
acagaguggccauguaugu

SEQ ID NO: 1371066 - RNA, 19 nt, Homo sapiens
  misc_RNA (1)...(19): siRNA sense strand
uaugaaggcuguggaaaau

SEQ ID NO: 1371067 - RNA, 19 nt, Homo sapiens
  misc_RNA (1)...(19): siRNA sense strand
gcuaugaaggcuguggaaa

SEQ ID NO: 1371068 - RNA, 19 nt, Homo sapiens
  misc_RNA (1)...(19): siRNA sense strand
aauggaagacaugaaauug

SEQ ID NO: 1371069 - RNA, 19 nt, Homo sapiens
  misc_RNA (1)...(19): siRNA sense strand
aacuucagaucuaacuuug

SEQ ID NO: 1371070 - RNA, 19 nt, Homo sapiens
  misc_RNA (1)...(19): siRNA sense strand
gcuauuggaaucagaugca

SEQ ID NO: 1371071 - RNA, 19 nt, Homo sapiens
  misc_RNA (1)...(19): siRNA sense strand
aggaagaagaugaaucaga

SEQ ID NO: 1371072 - RNA, 19 nt, Homo sapiens
  misc_RNA (1)...(19): siRNA sense strand
guuggcagaugcucguucu

SEQ ID NO: 1371073 - RNA, 19 nt, Homo sapiens
  misc_RNA (1)...(19): siRNA sense strand
guacaugacgaaguuaagg

SEQ ID NO: 1371074 - RNA, 19 nt, Homo sapiens
  misc_RNA (1)...(19): siRNA sense strand
ggugcgcaacucuacauga

SEQ ID NO: 1371075 - RNA, 19 nt, Homo sapiens
  misc_RNA (1)...(19): siRNA sense strand
ugaucggcauguuggaaug

SEQ ID NO: 1371076 - RNA, 19 nt, Homo sapiens
  misc_RNA (1)...(19): siRNA sense strand
aacuuuggcuacaacauuc

SEQ ID NO: 1371077 - RNA, 19 nt, Homo sapiens
  misc_RNA (1)...(19): siRNA sense strand
ugacccaucagguguuuca

SEQ ID NO: 1371078 - RNA, 19 nt, Homo sapiens
  misc_RNA (1)...(19): siRNA sense strand
ugaaggaagaagaugaauc

SEQ ID NO: 1371079 - RNA, 19 nt, Homo sapiens
  misc_RNA (1)...(19): siRNA sense strand
gguguuucauacgguuauu

SEQ ID NO: 1371080 - RNA, 19 nt, Homo sapiens
  misc_RNA (1)...(19): siRNA sense strand
gaagaugacuggacucaaa

SEQ ID NO: 1371081 - RNA, 19 nt, Homo sapiens
  misc_RNA (1)...(19): siRNA sense strand
gcaaagguguguauuauga

SEQ ID NO: 1371082 - RNA, 19 nt, Homo sapiens
  misc_RNA (1)...(19): siRNA sense strand
gaacaacgccuguggcauu

SEQ ID NO: 1371083 - RNA, 19 nt, Homo sapiens
  misc_RNA (1)...(19): siRNA sense strand
aacaagcacuggauaauua

SEQ ID NO: 1371084 - RNA, 19 nt, Homo sapiens
  misc_RNA (1)...(19): siRNA sense strand
cgaaagaaaggauauguua

SEQ ID NO: 1371085 - RNA, 19 nt, Homo sapiens
  misc_RNA (1)...(19): siRNA sense strand
gaagaugccuacccauaug

SEQ ID NO: 1371086 - RNA, 19 nt, Homo sapiens
  misc_RNA (1)...(19): siRNA sense strand
ggcaaacucuuaaaucuga

SEQ ID NO: 1371087 - RNA, 19 nt, Homo sapiens
  misc_RNA (1)...(19): siRNA sense strand
ugaaaucucucggcguuua

SEQ ID NO: 1371088 - RNA, 19 nt, Homo sapiens
  misc_RNA (1)...(19): siRNA sense strand
ggaagaagacccacaggaa

SEQ ID NO: 1371089 - RNA, 19 nt, Homo sapiens
  misc_RNA (1)...(19): siRNA sense strand
guaaugacacccuuuauau

SEQ ID NO: 1371090 - RNA, 19 nt, Homo sapiens
  misc_RNA (1)...(19): siRNA sense strand
cagcaaagguguguauuau

SEQ ID NO: 1371091 - RNA, 19 nt, Homo sapiens
  misc_RNA (1)...(19): siRNA sense strand
ggaaacaagcacuggauaa

SEQ ID NO: 1371092 - RNA, 19 nt, Homo sapiens
  misc_RNA (1)...(19): siRNA sense strand
gcaguaaugacacccuuua

SEQ ID NO: 1371093 - RNA, 19 nt, Homo sapiens
  misc_RNA (1)...(19): siRNA sense strand
ggaagagaguuguauguac

SEQ ID NO: 1371094 - RNA, 19 nt, Homo sapiens
  misc_RNA (1)...(19): siRNA sense strand
gaagcaauauaacaacaag

SEQ ID NO: 1371095 - RNA, 19 nt, Homo sapiens
  misc_RNA (1)...(19): siRNA sense strand
gaccaaugccuuccaauau

SEQ ID NO: 1371096 - RNA, 19 nt, Homo sapiens
  misc_RNA (1)...(19): siRNA sense strand
gaagaaaacuggcaaacuc

SEQ ID NO: 1371097 - RNA, 19 nt, Homo sapiens
  misc_RNA (1)...(19): siRNA sense strand
gaaacaagcacuggauaau

SEQ ID NO: 1371098 - RNA, 19 nt, Homo sapiens
  misc_RNA (1)...(19): siRNA sense strand
caagguggaugaaaucucu

SEQ ID NO: 1371099 - RNA, 19 nt, Homo sapiens
  misc_RNA (1)...(19): siRNA sense strand
ccucauggcucgaaauaag

SEQ ID NO: 1371100 - RNA, 19 nt, Homo sapiens
  misc_RNA (1)...(19): siRNA sense strand
acaacaagguggaugaaau

SEQ ID NO: 1371101 - RNA, 19 nt, Homo sapiens
  misc_RNA (1)...(19): siRNA sense strand
gaagaggugguucagaaga

SEQ ID NO: 1371102 - RNA, 19 nt, Homo sapiens
  misc_RNA (1)...(19): siRNA sense strand
gaaagcugcaauagcgaua

SEQ ID NO: 1371103 - RNA, 19 nt, Homo sapiens
  misc_RNA (1)...(19): siRNA sense strand
gguauugacucugaagaug

SEQ ID NO: 1371104 - RNA, 19 nt, Homo sapiens
  misc_RNA (1)...(19): siRNA sense strand
ccaaugccuuccaauaugu

SEQ ID NO: 1371105 - RNA, 19 nt, Homo sapiens
  misc_RNA (1)...(19): siRNA sense strand
uccaauaugugcagaagaa

SEQ ID NO: 1371106 - RNA, 19 nt, Homo sapiens
  misc_RNA (1)...(19): siRNA sense strand
ggacaggaagagaguugua

SEQ ID NO: 1371107 - RNA, 19 nt, Homo sapiens
  misc_RNA (1)...(19): siRNA sense strand
ugaccaaugccuuccaaua

SEQ ID NO: 1371108 - RNA, 19 nt, Homo sapiens
  misc_RNA (1)...(19): siRNA sense strand
caacaggcaaggcagcuaa

SEQ ID NO: 1371109 - RNA, 19 nt, Homo sapiens
  misc_RNA (1)...(19): siRNA sense strand
ggacaugaccagugaagag

SEQ ID NO: 1371110 - RNA, 19 nt, Homo sapiens
  misc_RNA (1)...(19): siRNA sense strand
gcucaagguucugcugcua

SEQ ID NO: 1371111 - RNA, 19 nt, Homo sapiens
  misc_RNA (1)...(19): siRNA sense strand
caacaagguggaugaaauc

SEQ ID NO: 1371112 - RNA, 19 nt, Homo sapiens
  misc_RNA (1)...(19): siRNA sense strand
aaacaagcacuggauaauu

SEQ ID NO: 1371113 - RNA, 19 nt, Homo sapiens
  misc_RNA (1)...(19): siRNA sense strand
ugaaguauauuuccaucca

SEQ ID NO: 1371114 - RNA, 19 nt, Homo sapiens
  misc_RNA (1)...(19): siRNA sense strand
ggagaaaacuggggaaaca

SEQ ID NO: 1371115 - RNA, 19 nt, Homo sapiens
  misc_RNA (1)...(19): siRNA sense strand
ggaaugagaaagcccugaa

SEQ ID NO: 1371116 - RNA, 19 nt, Homo sapiens
  misc_RNA (1)...(19): siRNA sense strand
gaaaucucucggcguuuaa

SEQ ID NO: 1371117 - RNA, 19 nt, Homo sapiens
  misc_RNA (1)...(19): siRNA sense strand
gggaaacaagcacuggaua

SEQ ID NO: 1371118 - RNA, 19 nt, Homo sapiens
  misc_RNA (1)...(19): siRNA sense strand
gaaaacuggcaaacucuua

SEQ ID NO: 1371119 - RNA, 19 nt, Homo sapiens
  misc_RNA (1)...(19): siRNA sense strand
gaaagaaaggauauguuac

SEQ ID NO: 1371120 - RNA, 19 nt, Homo sapiens
  misc_RNA (1)...(19): siRNA sense strand
acagcaaagguguguauua

SEQ ID NO: 1371121 - RNA, 19 nt, Homo sapiens
  misc_RNA (1)...(19): siRNA sense strand
ugaagaugccuacccauau

SEQ ID NO: 1371122 - RNA, 19 nt, Homo sapiens
  misc_RNA (1)...(19): siRNA sense strand
ggaagcaauauaacaacaa

SEQ ID NO: 1371123 - RNA, 19 nt, Homo sapiens
  misc_RNA (1)...(19): siRNA sense strand
gcaauagcgauaaucugaa

SEQ ID NO: 1371124 - RNA, 19 nt, Homo sapiens
  misc_RNA (1)...(19): siRNA sense strand
cccagaaccuaguggauug

SEQ ID NO: 1371125 - RNA, 19 nt, Homo sapiens
  misc_RNA (1)...(19): siRNA sense strand
gaaguauauuuccauccau

SEQ ID NO: 1371126 - RNA, 19 nt, Homo sapiens
  misc_RNA (1)...(19): siRNA sense strand
caauagcgauaaucugaac

SEQ ID NO: 1371127 - RNA, 19 nt, Homo sapiens
  misc_RNA (1)...(19): siRNA sense strand
aaagguguguauuaugaug

SEQ ID NO: 1371128 - RNA, 19 nt, Homo sapiens
  misc_RNA (1)...(19): siRNA sense strand
aguaaugacacccuuuaua

SEQ ID NO: 1371129 - RNA, 19 nt, Homo sapiens
  misc_RNA (1)...(19): siRNA sense strand
gaugacuggacucaaagua

SEQ ID NO: 1371130 - RNA, 19 nt, Homo sapiens
  misc_RNA (1)...(19): siRNA sense strand
cugaagaugccuacccaua

SEQ ID NO: 1371131 - RNA, 19 nt, Homo sapiens
  misc_RNA (1)...(19): siRNA sense strand
ucuguacccugaggagaua

SEQ ID NO: 1371132 - RNA, 19 nt, Homo sapiens
  misc_RNA (1)...(19): siRNA sense strand
uaugaugaaagcugcaaua

SEQ ID NO: 1371133 - RNA, 19 nt, Homo sapiens
  misc_RNA (1)...(19): siRNA sense strand
accaaugccuuccaauaug

SEQ ID NO: 1371134 - RNA, 19 nt, Homo sapiens
  misc_RNA (1)...(19): siRNA sense strand
ugcaauagcgauaaucuga

SEQ ID NO: 1371135 - RNA, 19 nt, Homo sapiens
  misc_RNA (1)...(19): siRNA sense strand
acaggaagcaauauaacaa

SEQ ID NO: 1371136 - RNA, 19 nt, Homo sapiens
  misc_RNA (1)...(19): siRNA sense strand
ccuaguggauugugugucu

SEQ ID NO: 1371137 - RNA, 19 nt, Homo sapiens
  misc_RNA (1)...(19): siRNA sense strand
uggauugugugucugagaa

SEQ ID NO: 1371138 - RNA, 19 nt, Homo sapiens
  misc_RNA (1)...(19): siRNA sense strand
uaaugacacccuuuauauc

SEQ ID NO: 1371139 - RNA, 19 nt, Homo sapiens
  misc_RNA (1)...(19): siRNA sense strand
ugggagcuauggaagaaga

SEQ ID NO: 1371140 - RNA, 19 nt, Homo sapiens
  misc_RNA (1)...(19): siRNA sense strand
gauugugugucugagaaug

SEQ ID NO: 1371141 - RNA, 19 nt, Homo sapiens
  misc_RNA (1)...(19): siRNA sense strand
gggaaacaaaggauauauc

SEQ ID NO: 1371142 - RNA, 19 nt, Homo sapiens
  misc_RNA (1)...(19): siRNA sense strand
acugggagcuauggaagaa

SEQ ID NO: 1371143 - RNA, 19 nt, Homo sapiens
  misc_RNA (1)...(19): siRNA sense strand
ccugaccuccuuccaguuu

SEQ ID NO: 1371144 - RNA, 19 nt, Homo sapiens
  misc_RNA (1)...(19): siRNA sense strand
uaacaacaagguggaugaa

SEQ ID NO: 1371145 - RNA, 19 nt, Homo sapiens
  misc_RNA (1)...(19): siRNA sense strand
caugaccaaugccuuccaa

SEQ ID NO: 1371146 - RNA, 19 nt, Homo sapiens
  misc_RNA (1)...(19): siRNA sense strand
cuggcaaacucuuaaaucu

SEQ ID NO: 1371147 - RNA, 19 nt, Homo sapiens
  misc_RNA (1)...(19): siRNA sense strand
aagaggugguucagaagau

SEQ ID NO: 1371148 - RNA, 19 nt, Homo sapiens
  misc_RNA (1)...(19): siRNA sense strand
acaagcacuggauaauuaa

SEQ ID NO: 1371149 - RNA, 19 nt, Homo sapiens
  misc_RNA (1)...(19): siRNA sense strand
auauguuacuccugucaaa

SEQ ID NO: 1371150 - RNA, 19 nt, Homo sapiens
  misc_RNA (1)...(19): siRNA sense strand
aaacuggcaaacucuuaaa

SEQ ID NO: 1371151 - RNA, 19 nt, Homo sapiens
  misc_RNA (1)...(19): siRNA sense strand
aggaagagaguuguaugua

SEQ ID NO: 1371152 - RNA, 19 nt, Homo sapiens
  misc_RNA (1)...(19): siRNA sense strand
ggauauguuacuccuguca

SEQ ID NO: 1371153 - RNA, 19 nt, Homo sapiens
  misc_RNA (1)...(19): siRNA sense strand
ugaccuccuuccaguuuua

SEQ ID NO: 1371154 - RNA, 19 nt, Homo sapiens
  misc_RNA (1)...(19): siRNA sense strand
gagugggaccugucucugu

SEQ ID NO: 1371155 - RNA, 19 nt, Homo sapiens
  misc_RNA (1)...(19): siRNA sense strand
agggccaacucaagaagaa

SEQ ID NO: 1371156 - RNA, 19 nt, Homo sapiens
  misc_RNA (1)...(19): siRNA sense strand
gacaggaagagaguuguau

SEQ ID NO: 1371157 - RNA, 19 nt, Homo sapiens
  misc_RNA (1)...(19): siRNA sense strand
caggaagagaguuguaugu

SEQ ID NO: 1371158 - RNA, 19 nt, Homo sapiens
  misc_RNA (1)...(19): siRNA sense strand
caagcacuggauaauuaaa

SEQ ID NO: 1371159 - RNA, 19 nt, Homo sapiens
  misc_RNA (1)...(19): siRNA sense strand
aagcugcaauagcgauaau

SEQ ID NO: 1371160 - RNA, 19 nt, Homo sapiens
  misc_RNA (1)...(19): siRNA sense strand
aggaagcaauauaacaaca

SEQ ID NO: 1371161 - RNA, 19 nt, Homo sapiens
  misc_RNA (1)...(19): siRNA sense strand
cccuuuauaucccagaaug

SEQ ID NO: 1371162 - RNA, 19 nt, Homo sapiens
  misc_RNA (1)...(19): siRNA sense strand
agacccacaggaagcaaua

SEQ ID NO: 1371163 - RNA, 19 nt, Homo sapiens
  misc_RNA (1)...(19): siRNA sense strand
caaagguguguauuaugau

SEQ ID NO: 1371164 - RNA, 19 nt, Homo sapiens
  misc_RNA (1)...(19): siRNA sense strand
augcaagccugaccuccuu

SEQ ID NO: 1371165 - RNA, 19 nt, Homo sapiens
  misc_RNA (1)...(19): siRNA sense strand
gaaugagaaagcccugaag

SEQ ID NO: 1371166 - RNA, 19 nt, Homo sapiens
  misc_RNA (1)...(19): siRNA sense strand
gaggugguucagaagauga

SEQ ID NO: 1371167 - RNA, 19 nt, Homo sapiens
  misc_RNA (1)...(19): siRNA sense strand
gaaccgggguauugacucu

SEQ ID NO: 1371168 - RNA, 19 nt, Homo sapiens
  misc_RNA (1)...(19): siRNA sense strand
ucucucggcguuuaauuug

SEQ ID NO: 1371169 - RNA, 19 nt, Homo sapiens
  misc_RNA (1)...(19): siRNA sense strand
gauauguuacuccugucaa

SEQ ID NO: 1371170 - RNA, 19 nt, Homo sapiens
  misc_RNA (1)...(19): siRNA sense strand
gagggccaacucaagaaga

SEQ ID NO: 1371171 - RNA, 19 nt, Homo sapiens
  misc_RNA (1)...(19): siRNA sense strand
aacaacgccuguggcauug

SEQ ID NO: 1371172 - RNA, 19 nt, Homo sapiens
  misc_RNA (1)...(19): siRNA sense strand
ccacaggaagcaauauaac

SEQ ID NO: 1371173 - RNA, 19 nt, Homo sapiens
  misc_RNA (1)...(19): siRNA sense strand
cagaagaaccgggguauug

SEQ ID NO: 1371174 - RNA, 19 nt, Homo sapiens
  misc_RNA (1)...(19): siRNA sense strand
cccacaggaagcaauauaa

SEQ ID NO: 1371175 - RNA, 19 nt, Homo sapiens
  misc_RNA (1)...(19): siRNA sense strand
cagaagaugacuggacuca

SEQ ID NO: 1371176 - RNA, 19 nt, Homo sapiens
  misc_RNA (1)...(19): siRNA sense strand
gaauccagaagggaaacaa

SEQ ID NO: 1371177 - RNA, 19 nt, Homo sapiens
  misc_RNA (1)...(19): siRNA sense strand
agaggugguucagaagaug

SEQ ID NO: 1371178 - RNA, 19 nt, Homo sapiens
  misc_RNA (1)...(19): siRNA sense strand
caggcaaggcagcuaaaug

SEQ ID NO: 1371179 - RNA, 19 nt, Homo sapiens
  misc_RNA (1)...(19): siRNA sense strand
cacaggaagcaauauaaca

SEQ ID NO: 1371180 - RNA, 19 nt, Homo sapiens
  misc_RNA (1)...(19): siRNA sense strand
gguaguagaucuccucuuu

SEQ ID NO: 1371181 - RNA, 19 nt, Homo sapiens
  misc_RNA (1)...(19): siRNA sense strand
acacugaccucuacugguu

SEQ ID NO: 1371182 - RNA, 19 nt, Homo sapiens
  misc_RNA (1)...(19): siRNA sense strand
gcacagccaucgccaucug

SEQ ID NO: 1371183 - RNA, 19 nt, Homo sapiens
  misc_RNA (1)...(19): siRNA sense strand
ggagaggacagaaagcaaa

SEQ ID NO: 1371184 - RNA, 19 nt, Homo sapiens
  misc_RNA (1)...(19): siRNA sense strand
ccucaccuuugucuacuua

SEQ ID NO: 1371185 - RNA, 19 nt, Homo sapiens
  misc_RNA (1)...(19): siRNA sense strand
ucaccuuugucuacuuaua

SEQ ID NO: 1371186 - RNA, 19 nt, Homo sapiens
  misc_RNA (1)...(19): siRNA sense strand
gaacuccacggucaucuuc

SEQ ID NO: 1371187 - RNA, 19 nt, Homo sapiens
  misc_RNA (1)...(19): siRNA sense strand
caucaugccuucgguguuc

SEQ ID NO: 1371188 - RNA, 19 nt, Homo sapiens
  misc_RNA (1)...(19): siRNA sense strand
ggccauggaugccaauagu

SEQ ID NO: 1371189 - RNA, 19 nt, Homo sapiens
  misc_RNA (1)...(19): siRNA sense strand
gagcaucuccuacaucaac

SEQ ID NO: 1371190 - RNA, 19 nt, Homo sapiens
  misc_RNA (1)...(19): siRNA sense strand
uaguagaucuccucuuucu

SEQ ID NO: 1371191 - RNA, 19 nt, Homo sapiens
  misc_RNA (1)...(19): siRNA sense strand
ugucuggucuucuuugugu

SEQ ID NO: 1371192 - RNA, 19 nt, Homo sapiens
  misc_RNA (1)...(19): siRNA sense strand
gcccgacccucaccuuugu

SEQ ID NO: 1371193 - RNA, 19 nt, Homo sapiens
  misc_RNA (1)...(19): siRNA sense strand
ugaccgccauggccauuga

SEQ ID NO: 1371194 - RNA, 19 nt, Homo sapiens
  misc_RNA (1)...(19): siRNA sense strand
cccgacaucuucaucauca

SEQ ID NO: 1371195 - RNA, 19 nt, Homo sapiens
  misc_RNA (1)...(19): siRNA sense strand
gccaucagcuugggcuaug

SEQ ID NO: 1371196 - RNA, 19 nt, Homo sapiens
  misc_RNA (1)...(19): siRNA sense strand
caaccucucgguaguagau

SEQ ID NO: 1371197 - RNA, 19 nt, Homo sapiens
  misc_RNA (1)...(19): siRNA sense strand
gcugggcacccuacuaugu

SEQ ID NO: 1371198 - RNA, 19 nt, Homo sapiens
  misc_RNA (1)...(19): siRNA sense strand
ggaugccaauagucaguuc

SEQ ID NO: 1371199 - RNA, 19 nt, Homo sapiens
  misc_RNA (1)...(19): siRNA sense strand
gguucacccuguaccaguu

SEQ ID NO: 1371200 - RNA, 19 nt, Homo sapiens
  misc_RNA (1)...(19): siRNA sense strand
ggaacuccacggucaucuu

SEQ ID NO: 1371201 - RNA, 19 nt, Homo sapiens
  misc_RNA (1)...(19): siRNA sense strand
ccaucugucuggucuucuu

SEQ ID NO: 1371202 - RNA, 19 nt, Homo sapiens
  misc_RNA (1)...(19): siRNA sense strand
cuacaucaacaucaucaug

SEQ ID NO: 1371203 - RNA, 19 nt, Homo sapiens
  misc_RNA (1)...(19): siRNA sense strand
caucaaccucucgguagua

SEQ ID NO: 1371204 - RNA, 19 nt, Homo sapiens
  misc_RNA (1)...(19): siRNA sense strand
ccauggaugccaauaguca

SEQ ID NO: 1371205 - RNA, 19 nt, Homo sapiens
  misc_RNA (1)...(19): siRNA sense strand
ugcuacagcugacccaguu

SEQ ID NO: 1371206 - RNA, 19 nt, Homo sapiens
  misc_RNA (1)...(19): siRNA sense strand
ggucaucacagccgcauac

SEQ ID NO: 1371207 - RNA, 19 nt, Homo sapiens
  misc_RNA (1)...(19): siRNA sense strand
gacgaggagaggacagaaa

SEQ ID NO: 1371208 - RNA, 19 nt, Homo sapiens
  misc_RNA (1)...(19): siRNA sense strand
gaggagaggacagaaagca

SEQ ID NO: 1371209 - RNA, 19 nt, Homo sapiens
  misc_RNA (1)...(19): siRNA sense strand
ucaucaaccucucgguagu

SEQ ID NO: 1371210 - RNA, 19 nt, Homo sapiens
  misc_RNA (1)...(19): siRNA sense strand
ucuacugguucacccugua

SEQ ID NO: 1371211 - RNA, 19 nt, Homo sapiens
  misc_RNA (1)...(19): siRNA sense strand
gagggcaguugggcuugga

SEQ ID NO: 1371212 - RNA, 19 nt, Homo sapiens
  misc_RNA (1)...(19): siRNA sense strand
gagaggacagaaagcaaag

SEQ ID NO: 1371213 - RNA, 19 nt, Homo sapiens
  misc_RNA (1)...(19): siRNA sense strand
gcaaugggguguggcacuu

SEQ ID NO: 1371214 - RNA, 19 nt, Homo sapiens
  misc_RNA (1)...(19): siRNA sense strand
acaaugcggccaucagcuu

SEQ ID NO: 1371215 - RNA, 19 nt, Homo sapiens
  misc_RNA (1)...(19): siRNA sense strand
cccagacacugaccucuac

SEQ ID NO: 1371216 - RNA, 19 nt, Homo sapiens
  misc_RNA (1)...(19): siRNA sense strand
gcuugguccugucggugaa

SEQ ID NO: 1371217 - RNA, 19 nt, Homo sapiens
  misc_RNA (1)...(19): siRNA sense strand
ucagugggagccaugaaga

SEQ ID NO: 1371218 - RNA, 19 nt, Homo sapiens
  misc_RNA (1)...(19): siRNA sense strand
ugugagacguuccgcaaac

SEQ ID NO: 1371219 - RNA, 19 nt, Homo sapiens
  misc_RNA (1)...(19): siRNA sense strand
caacguccccgacaucuuc

SEQ ID NO: 1371220 - RNA, 19 nt, Homo sapiens
  misc_RNA (1)...(19): siRNA sense strand
gacccucaccuuugucuac

SEQ ID NO: 1371221 - RNA, 19 nt, Homo sapiens
  misc_RNA (1)...(19): siRNA sense strand
gccagcaacaccucugaug

SEQ ID NO: 1371222 - RNA, 19 nt, Homo sapiens
  misc_RNA (1)...(19): siRNA sense strand
guaguagaucuccucuuuc

SEQ ID NO: 1371223 - RNA, 19 nt, Homo sapiens
  misc_RNA (1)...(19): siRNA sense strand
ugaaacagguugcagauaa

SEQ ID NO: 1371224 - RNA, 19 nt, Homo sapiens
  misc_RNA (1)...(19): siRNA sense strand
gaccagagccugucauuug

SEQ ID NO: 1371225 - RNA, 19 nt, Homo sapiens
  misc_RNA (1)...(19): siRNA sense strand
acacuaaacgccaauaaua

SEQ ID NO: 1371226 - RNA, 19 nt, Homo sapiens
  misc_RNA (1)...(19): siRNA sense strand
agaaggaccugaacaacaa

SEQ ID NO: 1371227 - RNA, 19 nt, Homo sapiens
  misc_RNA (1)...(19): siRNA sense strand
gaaacagguugcagauaag

SEQ ID NO: 1371228 - RNA, 19 nt, Homo sapiens
  misc_RNA (1)...(19): siRNA sense strand
gagagcagccaacgagaaa

SEQ ID NO: 1371229 - RNA, 19 nt, Homo sapiens
  misc_RNA (1)...(19): siRNA sense strand
ccaauaauauggagacacu

SEQ ID NO: 1371230 - RNA, 19 nt, Homo sapiens
  misc_RNA (1)...(19): siRNA sense strand
gagagugaagacaguauuu

SEQ ID NO: 1371231 - RNA, 19 nt, Homo sapiens
  misc_RNA (1)...(19): siRNA sense strand
ggagagcagccaacgagaa

SEQ ID NO: 1371232 - RNA, 19 nt, Homo sapiens
  misc_RNA (1)...(19): siRNA sense strand
gcaagaacucugaggugaa

SEQ ID NO: 1371233 - RNA, 19 nt, Homo sapiens
  misc_RNA (1)...(19): siRNA sense strand
gacauucucacuauucuau

SEQ ID NO: 1371234 - RNA, 19 nt, Homo sapiens
  misc_RNA (1)...(19): siRNA sense strand
gaaucgaggcccugaaaca

SEQ ID NO: 1371235 - RNA, 19 nt, Homo sapiens
  misc_RNA (1)...(19): siRNA sense strand
caagaacucugaggugaac

SEQ ID NO: 1371236 - RNA, 19 nt, Homo sapiens
  misc_RNA (1)...(19): siRNA sense strand
ccuccucgcuguggucuuu

SEQ ID NO: 1371237 - RNA, 19 nt, Homo sapiens
  misc_RNA (1)...(19): siRNA sense strand
gaugggugcucuggagaug

SEQ ID NO: 1371238 - RNA, 19 nt, Homo sapiens
  misc_RNA (1)...(19): siRNA sense strand
ucacuauucuaugccuuaa

SEQ ID NO: 1371239 - RNA, 19 nt, Homo sapiens
  misc_RNA (1)...(19): siRNA sense strand
cagaaucgaggcccugaaa

SEQ ID NO: 1371240 - RNA, 19 nt, Homo sapiens
  misc_RNA (1)...(19): siRNA sense strand
ggacgaggaggacagaauc

SEQ ID NO: 1371241 - RNA, 19 nt, Homo sapiens
  misc_RNA (1)...(19): siRNA sense strand
ggacauucucacuauucua

SEQ ID NO: 1371242 - RNA, 19 nt, Homo sapiens
  misc_RNA (1)...(19): siRNA sense strand
cagaaggaccugaacaaca

SEQ ID NO: 1371243 - RNA, 19 nt, Homo sapiens
  misc_RNA (1)...(19): siRNA sense strand
gaaggaggagcucaacucu

SEQ ID NO: 1371244 - RNA, 19 nt, Homo sapiens
  misc_RNA (1)...(19): siRNA sense strand
aaacacuaaacgccaauaa

SEQ ID NO: 1371245 - RNA, 19 nt, Homo sapiens
  misc_RNA (1)...(19): siRNA sense strand
uggagacacuaaucgaaug

SEQ ID NO: 1371246 - RNA, 19 nt, Homo sapiens
  misc_RNA (1)...(19): siRNA sense strand
cacuaaacgccaauaauau

SEQ ID NO: 1371247 - RNA, 19 nt, Homo sapiens
  misc_RNA (1)...(19): siRNA sense strand
acucugaggugaacaggau

SEQ ID NO: 1371248 - RNA, 19 nt, Homo sapiens
  misc_RNA (1)...(19): siRNA sense strand
accagagccugucauuuga

SEQ ID NO: 1371249 - RNA, 19 nt, Homo sapiens
  misc_RNA (1)...(19): siRNA sense strand
gcagccacaaugcuucaaa

SEQ ID NO: 1371250 - RNA, 19 nt, Homo sapiens
  misc_RNA (1)...(19): siRNA sense strand
acacuaaucgaaugucaau

SEQ ID NO: 1371251 - RNA, 19 nt, Homo sapiens
  misc_RNA (1)...(19): siRNA sense strand
ccaacgagaaagcccguaa

SEQ ID NO: 1371252 - RNA, 19 nt, Homo sapiens
  misc_RNA (1)...(19): siRNA sense strand
acuaaacgccaauaauaug

SEQ ID NO: 1371253 - RNA, 19 nt, Homo sapiens
  misc_RNA (1)...(19): siRNA sense strand
ggagacacuaaucgaaugu

SEQ ID NO: 1371254 - RNA, 19 nt, Homo sapiens
  misc_RNA (1)...(19): siRNA sense strand
acuauucuaugccuuaaag

SEQ ID NO: 1371255 - RNA, 19 nt, Homo sapiens
  misc_RNA (1)...(19): siRNA sense strand
ucgcuguggucuuuaagga

SEQ ID NO: 1371256 - RNA, 19 nt, Homo sapiens
  misc_RNA (1)...(19): siRNA sense strand
acuaaucgaaugucaauca

SEQ ID NO: 1371257 - RNA, 19 nt, Homo sapiens
  misc_RNA (1)...(19): siRNA sense strand
cccggaagcuacuuucaag

SEQ ID NO: 1371258 - RNA, 19 nt, Homo sapiens
  misc_RNA (1)...(19): siRNA sense strand
caaucuggccaucugcauu

SEQ ID NO: 1371259 - RNA, 19 nt, Homo sapiens
  misc_RNA (1)...(19): siRNA sense strand
uaauauggagacacuaauc

SEQ ID NO: 1371260 - RNA, 19 nt, Homo sapiens
  misc_RNA (1)...(19): siRNA sense strand
agagggugauaucaaggaa

SEQ ID NO: 1371261 - RNA, 19 nt, Homo sapiens
  misc_RNA (1)...(19): siRNA sense strand
cagagccugucauuugaag

SEQ ID NO: 1371262 - RNA, 19 nt, Homo sapiens
  misc_RNA (1)...(19): siRNA sense strand
cugagaagcagccacaaug

SEQ ID NO: 1371263 - RNA, 19 nt, Homo sapiens
  misc_RNA (1)...(19): siRNA sense strand
ugagagugaagacaguauu

SEQ ID NO: 1371264 - RNA, 19 nt, Homo sapiens
  misc_RNA (1)...(19): siRNA sense strand
aaucuggccaucugcauug

SEQ ID NO: 1371265 - RNA, 19 nt, Homo sapiens
  misc_RNA (1)...(19): siRNA sense strand
gcaggacgaggaggacaga

SEQ ID NO: 1371266 - RNA, 19 nt, Homo sapiens
  misc_RNA (1)...(19): siRNA sense strand
ggcaucaugugagagugaa

SEQ ID NO: 1371267 - RNA, 19 nt, Homo sapiens
  misc_RNA (1)...(19): siRNA sense strand
ugaaggaggagcucaacuc

SEQ ID NO: 1371268 - RNA, 19 nt, Homo sapiens
  misc_RNA (1)...(19): siRNA sense strand
caacggaagggauauucag

SEQ ID NO: 1371269 - RNA, 19 nt, Homo sapiens
  misc_RNA (1)...(19): siRNA sense strand
agggugauaucaaggaaca

SEQ ID NO: 1371270 - RNA, 19 nt, Homo sapiens
  misc_RNA (1)...(19): siRNA sense strand
uaaacgccaauaauaugga

SEQ ID NO: 1371271 - RNA, 19 nt, Homo sapiens
  misc_RNA (1)...(19): siRNA sense strand
uauggagacacuaaucgaa

SEQ ID NO: 1371272 - RNA, 19 nt, Homo sapiens
  misc_RNA (1)...(19): siRNA sense strand
ccagagccugucauuugaa

SEQ ID NO: 1371273 - RNA, 19 nt, Homo sapiens
  misc_RNA (1)...(19): siRNA sense strand
cauuugaagcccagaagga

SEQ ID NO: 1371274 - RNA, 19 nt, Homo sapiens
  misc_RNA (1)...(19): siRNA sense strand
ugaaacagguugcagauaa

SEQ ID NO: 1371275 - RNA, 19 nt, Homo sapiens
  misc_RNA (1)...(19): siRNA sense strand
gaccagagccugucauuug

SEQ ID NO: 1371276 - RNA, 19 nt, Homo sapiens
  misc_RNA (1)...(19): siRNA sense strand
acacuaaacgccaauaaua

SEQ ID NO: 1371277 - RNA, 19 nt, Homo sapiens
  misc_RNA (1)...(19): siRNA sense strand
agaaggaccugaacaacaa

SEQ ID NO: 1371278 - RNA, 19 nt, Homo sapiens
  misc_RNA (1)...(19): siRNA sense strand
gaaacagguugcagauaag

SEQ ID NO: 1371279 - RNA, 19 nt, Homo sapiens
  misc_RNA (1)...(19): siRNA sense strand
gagagcagccaacgagaaa

SEQ ID NO: 1371280 - RNA, 19 nt, Homo sapiens
  misc_RNA (1)...(19): siRNA sense strand
ccaauaauauggagacacu

SEQ ID NO: 1371281 - RNA, 19 nt, Homo sapiens
  misc_RNA (1)...(19): siRNA sense strand
gagagugaagacaguauuu

SEQ ID NO: 1371282 - RNA, 19 nt, Homo sapiens
  misc_RNA (1)...(19): siRNA sense strand
ggagagcagccaacgagaa

SEQ ID NO: 1371283 - RNA, 19 nt, Homo sapiens
  misc_RNA (1)...(19): siRNA sense strand
gcaagaacucugaggugaa

SEQ ID NO: 1371284 - RNA, 19 nt, Homo sapiens
  misc_RNA (1)...(19): siRNA sense strand
gacauucucacuauucuau

SEQ ID NO: 1371285 - RNA, 19 nt, Homo sapiens
  misc_RNA (1)...(19): siRNA sense strand
gaaucgaggcccugaaaca

SEQ ID NO: 1371286 - RNA, 19 nt, Homo sapiens
  misc_RNA (1)...(19): siRNA sense strand
caagaacucugaggugaac

SEQ ID NO: 1371287 - RNA, 19 nt, Homo sapiens
  misc_RNA (1)...(19): siRNA sense strand
ccuccucgcuguggucuuu

SEQ ID NO: 1371288 - RNA, 19 nt, Homo sapiens
  misc_RNA (1)...(19): siRNA sense strand
gaugggugcucuggagaug

SEQ ID NO: 1371289 - RNA, 19 nt, Homo sapiens
  misc_RNA (1)...(19): siRNA sense strand
ucacuauucuaugccuuaa

SEQ ID NO: 1371290 - RNA, 19 nt, Homo sapiens
  misc_RNA (1)...(19): siRNA sense strand
cagaaucgaggcccugaaa

SEQ ID NO: 1371291 - RNA, 19 nt, Homo sapiens
  misc_RNA (1)...(19): siRNA sense strand
ggacgaggaggacagaauc

SEQ ID NO: 1371292 - RNA, 19 nt, Homo sapiens
  misc_RNA (1)...(19): siRNA sense strand
ggacauucucacuauucua

SEQ ID NO: 1371293 - RNA, 19 nt, Homo sapiens
  misc_RNA (1)...(19): siRNA sense strand
cagaaggaccugaacaaca

SEQ ID NO: 1371294 - RNA, 19 nt, Homo sapiens
  misc_RNA (1)...(19): siRNA sense strand
gaaggaggagcucaacucu

SEQ ID NO: 1371295 - RNA, 19 nt, Homo sapiens
  misc_RNA (1)...(19): siRNA sense strand
aaacacuaaacgccaauaa

SEQ ID NO: 1371296 - RNA, 19 nt, Homo sapiens
  misc_RNA (1)...(19): siRNA sense strand
uggagacacuaaucgaaug

SEQ ID NO: 1371297 - RNA, 19 nt, Homo sapiens
  misc_RNA (1)...(19): siRNA sense strand
cacuaaacgccaauaauau

SEQ ID NO: 1371298 - RNA, 19 nt, Homo sapiens
  misc_RNA (1)...(19): siRNA sense strand
acucugaggugaacaggau

SEQ ID NO: 1371299 - RNA, 19 nt, Homo sapiens
  misc_RNA (1)...(19): siRNA sense strand
accagagccugucauuuga

SEQ ID NO: 1371300 - RNA, 19 nt, Homo sapiens
  misc_RNA (1)...(19): siRNA sense strand
gcagccacaaugcuucaaa

SEQ ID NO: 1371301 - RNA, 19 nt, Homo sapiens
  misc_RNA (1)...(19): siRNA sense strand
acacuaaucgaaugucaau

SEQ ID NO: 1371302 - RNA, 19 nt, Homo sapiens
  misc_RNA (1)...(19): siRNA sense strand
ccaacgagaaagcccguaa

SEQ ID NO: 1371303 - RNA, 19 nt, Homo sapiens
  misc_RNA (1)...(19): siRNA sense strand
acuaaacgccaauaauaug

SEQ ID NO: 1371304 - RNA, 19 nt, Homo sapiens
  misc_RNA (1)...(19): siRNA sense strand
ggagacacuaaucgaaugu

SEQ ID NO: 1371305 - RNA, 19 nt, Homo sapiens
  misc_RNA (1)...(19): siRNA sense strand
acuauucuaugccuuaaag

SEQ ID NO: 1371306 - RNA, 19 nt, Homo sapiens
  misc_RNA (1)...(19): siRNA sense strand
ucgcuguggucuuuaagga

SEQ ID NO: 1371307 - RNA, 19 nt, Homo sapiens
  misc_RNA (1)...(19): siRNA sense strand
acuaaucgaaugucaauca

SEQ ID NO: 1371308 - RNA, 19 nt, Homo sapiens
  misc_RNA (1)...(19): siRNA sense strand
cccggaagcuacuuucaag

SEQ ID NO: 1371309 - RNA, 19 nt, Homo sapiens
  misc_RNA (1)...(19): siRNA sense strand
caaucuggccaucugcauu

SEQ ID NO: 1371310 - RNA, 19 nt, Homo sapiens
  misc_RNA (1)...(19): siRNA sense strand
uaauauggagacacuaauc

SEQ ID NO: 1371311 - RNA, 19 nt, Homo sapiens
  misc_RNA (1)...(19): siRNA sense strand
agagggugauaucaaggaa

SEQ ID NO: 1371312 - RNA, 19 nt, Homo sapiens
  misc_RNA (1)...(19): siRNA sense strand
cagagccugucauuugaag

SEQ ID NO: 1371313 - RNA, 19 nt, Homo sapiens
  misc_RNA (1)...(19): siRNA sense strand
cugagaagcagccacaaug

SEQ ID NO: 1371314 - RNA, 19 nt, Homo sapiens
  misc_RNA (1)...(19): siRNA sense strand
ugagagugaagacaguauu

SEQ ID NO: 1371315 - RNA, 19 nt, Homo sapiens
  misc_RNA (1)...(19): siRNA sense strand
aaucuggccaucugcauug

SEQ ID NO: 1371316 - RNA, 19 nt, Homo sapiens
  misc_RNA (1)...(19): siRNA sense strand
gcaggacgaggaggacaga

SEQ ID NO: 1371317 - RNA, 19 nt, Homo sapiens
  misc_RNA (1)...(19): siRNA sense strand
ggcaucaugugagagugaa

SEQ ID NO: 1371318 - RNA, 19 nt, Homo sapiens
  misc_RNA (1)...(19): siRNA sense strand
ugaaggaggagcucaacuc

SEQ ID NO: 1371319 - RNA, 19 nt, Homo sapiens
  misc_RNA (1)...(19): siRNA sense strand
caacggaagggauauucag

SEQ ID NO: 1371320 - RNA, 19 nt, Homo sapiens
  misc_RNA (1)...(19): siRNA sense strand
agggugauaucaaggaaca

SEQ ID NO: 1371321 - RNA, 19 nt, Homo sapiens
  misc_RNA (1)...(19): siRNA sense strand
uaaacgccaauaauaugga

SEQ ID NO: 1371322 - RNA, 19 nt, Homo sapiens
  misc_RNA (1)...(19): siRNA sense strand
uauggagacacuaaucgaa

SEQ ID NO: 1371323 - RNA, 19 nt, Homo sapiens
  misc_RNA (1)...(19): siRNA sense strand
ccagagccugucauuugaa

SEQ ID NO: 1371324 - RNA, 19 nt, Homo sapiens
  misc_RNA (1)...(19): siRNA sense strand
cauuugaagcccagaagga

SEQ ID NO: 1371325 - RNA, 19 nt, Homo sapiens
  misc_RNA (1)...(19): siRNA sense strand
ugaaacagguugcagauaa

SEQ ID NO: 1371326 - RNA, 19 nt, Homo sapiens
  misc_RNA (1)...(19): siRNA sense strand
gaccagagccugucauuug

SEQ ID NO: 1371327 - RNA, 19 nt, Homo sapiens
  misc_RNA (1)...(19): siRNA sense strand
agaaggaccugaacaacaa

SEQ ID NO: 1371328 - RNA, 19 nt, Homo sapiens
  misc_RNA (1)...(19): siRNA sense strand
gaaacagguugcagauaag

SEQ ID NO: 1371329 - RNA, 19 nt, Homo sapiens
  misc_RNA (1)...(19): siRNA sense strand
gcaagaacucugaggugaa

SEQ ID NO: 1371330 - RNA, 19 nt, Homo sapiens
  misc_RNA (1)...(19): siRNA sense strand
gaaucgaggcccugaaaca

SEQ ID NO: 1371331 - RNA, 19 nt, Homo sapiens
  misc_RNA (1)...(19): siRNA sense strand
caagaacucugaggugaac

SEQ ID NO: 1371332 - RNA, 19 nt, Homo sapiens
  misc_RNA (1)...(19): siRNA sense strand
cagaaucgaggcccugaaa

SEQ ID NO: 1371333 - RNA, 19 nt, Homo sapiens
  misc_RNA (1)...(19): siRNA sense strand
ggacgaggaggacagaauc

SEQ ID NO: 1371334 - RNA, 19 nt, Homo sapiens
  misc_RNA (1)...(19): siRNA sense strand
cagaaggaccugaacaaca

SEQ ID NO: 1371335 - RNA, 19 nt, Homo sapiens
  misc_RNA (1)...(19): siRNA sense strand
acucugaggugaacaggau

SEQ ID NO: 1371336 - RNA, 19 nt, Homo sapiens
  misc_RNA (1)...(19): siRNA sense strand
accagagccugucauuuga

SEQ ID NO: 1371337 - RNA, 19 nt, Homo sapiens
  misc_RNA (1)...(19): siRNA sense strand
caaucuggccaucugcauu

SEQ ID NO: 1371338 - RNA, 19 nt, Homo sapiens
  misc_RNA (1)...(19): siRNA sense strand
cagagccugucauuugaag

SEQ ID NO: 1371339 - RNA, 19 nt, Homo sapiens
  misc_RNA (1)...(19): siRNA sense strand
gcaggacgaggaggacaga

SEQ ID NO: 1371340 - RNA, 19 nt, Homo sapiens
  misc_RNA (1)...(19): siRNA sense strand
aaucuggccaucugcauug

SEQ ID NO: 1371341 - RNA, 19 nt, Homo sapiens
  misc_RNA (1)...(19): siRNA sense strand
ccagagccugucauuugaa

SEQ ID NO: 1371342 - RNA, 19 nt, Homo sapiens
  misc_RNA (1)...(19): siRNA sense strand
cauuugaagcccagaagga

SEQ ID NO: 1371343 - RNA, 19 nt, Homo sapiens
  misc_RNA (1)...(19): siRNA sense strand
aaacauggcuucacaaugg

SEQ ID NO: 1371344 - RNA, 19 nt, Homo sapiens
  misc_RNA (1)...(19): siRNA sense strand
ggaauccuauccauaugua

SEQ ID NO: 1371345 - RNA, 19 nt, Homo sapiens
  misc_RNA (1)...(19): siRNA sense strand
ggacagauguuccggaaaa

SEQ ID NO: 1371346 - RNA, 19 nt, Homo sapiens
  misc_RNA (1)...(19): siRNA sense strand
agaauucuguugcuaauga

SEQ ID NO: 1371347 - RNA, 19 nt, Homo sapiens
  misc_RNA (1)...(19): siRNA sense strand
guacagaccugagaauucu

SEQ ID NO: 1371348 - RNA, 19 nt, Homo sapiens
  misc_RNA (1)...(19): siRNA sense strand
ggaauagccuccgcuguuc

SEQ ID NO: 1371349 - RNA, 19 nt, Homo sapiens
  misc_RNA (1)...(19): siRNA sense strand
ggagaaggcccugaugaaa

SEQ ID NO: 1371350 - RNA, 19 nt, Homo sapiens
  misc_RNA (1)...(19): siRNA sense strand
gaaacagugugguucuugu

SEQ ID NO: 1371351 - RNA, 19 nt, Homo sapiens
  misc_RNA (1)...(19): siRNA sense strand
gaagaauucaggcagauga

SEQ ID NO: 1371352 - RNA, 19 nt, Homo sapiens
  misc_RNA (1)...(19): siRNA sense strand
gggaauagccuccgcuguu

SEQ ID NO: 1371353 - RNA, 19 nt, Homo sapiens
  misc_RNA (1)...(19): siRNA sense strand
ggagcaaauucgaauaaca

SEQ ID NO: 1371354 - RNA, 19 nt, Homo sapiens
  misc_RNA (1)...(19): siRNA sense strand
gaugauggguugcuuucga

SEQ ID NO: 1371355 - RNA, 19 nt, Homo sapiens
  misc_RNA (1)...(19): siRNA sense strand
caauggccaugaaugcuuu

SEQ ID NO: 1371356 - RNA, 19 nt, Homo sapiens
  misc_RNA (1)...(19): siRNA sense strand
gaaggagcaaauucgaaua

SEQ ID NO: 1371357 - RNA, 19 nt, Homo sapiens
  misc_RNA (1)...(19): siRNA sense strand
gaaggcaacacacagaaga

SEQ ID NO: 1371358 - RNA, 19 nt, Homo sapiens
  misc_RNA (1)...(19): siRNA sense strand
ggaauacagccaagggaaa

SEQ ID NO: 1371359 - RNA, 19 nt, Homo sapiens
  misc_RNA (1)...(19): siRNA sense strand
uggaugaaaucuguaagua

SEQ ID NO: 1371360 - RNA, 19 nt, Homo sapiens
  misc_RNA (1)...(19): siRNA sense strand
gcaacacacagaagauuau

SEQ ID NO: 1371361 - RNA, 19 nt, Homo sapiens
  misc_RNA (1)...(19): siRNA sense strand
ugacaugaccaaugaagaa

SEQ ID NO: 1371362 - RNA, 19 nt, Homo sapiens
  misc_RNA (1)...(19): siRNA sense strand
gauuauauggcgcgaauga

SEQ ID NO: 1371363 - RNA, 19 nt, Homo sapiens
  misc_RNA (1)...(19): siRNA sense strand
gcuagggccuuccaguaug

SEQ ID NO: 1371364 - RNA, 19 nt, Homo sapiens
  misc_RNA (1)...(19): siRNA sense strand
ggaaacauggcuucacaau

SEQ ID NO: 1371365 - RNA, 19 nt, Homo sapiens
  misc_RNA (1)...(19): siRNA sense strand
gaaacauggcuucacaaug

SEQ ID NO: 1371366 - RNA, 19 nt, Homo sapiens
  misc_RNA (1)...(19): siRNA sense strand
gggcucgaauggcuaugua

SEQ ID NO: 1371367 - RNA, 19 nt, Homo sapiens
  misc_RNA (1)...(19): siRNA sense strand
gaaaggagaaggcccugau

SEQ ID NO: 1371368 - RNA, 19 nt, Homo sapiens
  misc_RNA (1)...(19): siRNA sense strand
ggcaacacacagaagauua

SEQ ID NO: 1371369 - RNA, 19 nt, Homo sapiens
  misc_RNA (1)...(19): siRNA sense strand
caugaccaaugaagaauuc

SEQ ID NO: 1371370 - RNA, 19 nt, Homo sapiens
  misc_RNA (1)...(19): siRNA sense strand
caaauucgaauaacagcaa

SEQ ID NO: 1371371 - RNA, 19 nt, Homo sapiens
  misc_RNA (1)...(19): siRNA sense strand
gagaaggcccugaugaaag

SEQ ID NO: 1371372 - RNA, 19 nt, Homo sapiens
  misc_RNA (1)...(19): siRNA sense strand
gaaaccagaaauucaggaa

SEQ ID NO: 1371373 - RNA, 19 nt, Homo sapiens
  misc_RNA (1)...(19): siRNA sense strand
caacacacagaagauuaua

SEQ ID NO: 1371374 - RNA, 19 nt, Homo sapiens
  misc_RNA (1)...(19): siRNA sense strand
aaaccuggaucaugguguu

SEQ ID NO: 1371375 - RNA, 19 nt, Homo sapiens
  misc_RNA (1)...(19): siRNA sense strand
ugagaauucuguugcuaau

SEQ ID NO: 1371376 - RNA, 19 nt, Homo sapiens
  misc_RNA (1)...(19): siRNA sense strand
uaaugacacuggcuucaca

SEQ ID NO: 1371377 - RNA, 19 nt, Homo sapiens
  misc_RNA (1)...(19): siRNA sense strand
gugagccucuguuucuuga

SEQ ID NO: 1371378 - RNA, 19 nt, Homo sapiens
  misc_RNA (1)...(19): siRNA sense strand
gaugaaagcagucgcaacu

SEQ ID NO: 1371379 - RNA, 19 nt, Homo sapiens
  misc_RNA (1)...(19): siRNA sense strand
gaacggaggccuggacucu

SEQ ID NO: 1371380 - RNA, 19 nt, Homo sapiens
  misc_RNA (1)...(19): siRNA sense strand
ugacgccagugaagaauca

SEQ ID NO: 1371381 - RNA, 19 nt, Homo sapiens
  misc_RNA (1)...(19): siRNA sense strand
gagccucuguuucuugauc

SEQ ID NO: 1371382 - RNA, 19 nt, Homo sapiens
  misc_RNA (1)...(19): siRNA sense strand
gcagaugauggguugcuuu

SEQ ID NO: 1371383 - RNA, 19 nt, Homo sapiens
  misc_RNA (1)...(19): siRNA sense strand
acacacagaagauuauaug

SEQ ID NO: 1371384 - RNA, 19 nt, Homo sapiens
  misc_RNA (1)...(19): siRNA sense strand
gagcaaauucgaauaacag

SEQ ID NO: 1371385 - RNA, 19 nt, Homo sapiens
  misc_RNA (1)...(19): siRNA sense strand
aagauuauauggcgcgaau

SEQ ID NO: 1371386 - RNA, 19 nt, Homo sapiens
  misc_RNA (1)...(19): siRNA sense strand
gcucgaauggcuauguaaa

SEQ ID NO: 1371387 - RNA, 19 nt, Homo sapiens
  misc_RNA (1)...(19): siRNA sense strand
gacuggugcucuugaagga

SEQ ID NO: 1371388 - RNA, 19 nt, Homo sapiens
  misc_RNA (1)...(19): siRNA sense strand
caaagugguaccaguggaa

SEQ ID NO: 1371389 - RNA, 19 nt, Homo sapiens
  misc_RNA (1)...(19): siRNA sense strand
ugaaggagcaaauucgaau

SEQ ID NO: 1371390 - RNA, 19 nt, Homo sapiens
  misc_RNA (1)...(19): siRNA sense strand
guaaguacagaccugagaa

SEQ ID NO: 1371391 - RNA, 19 nt, Homo sapiens
  misc_RNA (1)...(19): siRNA sense strand
uccaguaugucaaggagaa

SEQ ID NO: 1371392 - RNA, 19 nt, Homo sapiens
  misc_RNA (1)...(19): siRNA sense strand
gggcccaucuccguugcua

SEQ ID NO: 1371393 - RNA, 19 nt, Homo sapiens
  misc_RNA (1)...(19): siRNA sense strand
acggaggccuggacucuga

SEQ ID NO: 1371394 - RNA, 19 nt, Homo sapiens
  misc_RNA (1)...(19): siRNA sense strand
agaaggcccugaugaaagc

SEQ ID NO: 1371395 - RNA, 19 nt, Homo sapiens
  misc_RNA (1)...(19): siRNA sense strand
ccaaagacaagaacaacca

SEQ ID NO: 1371396 - RNA, 19 nt, Homo sapiens
  misc_RNA (1)...(19): siRNA sense strand
aaggagcaaauucgaauaa

SEQ ID NO: 1371397 - RNA, 19 nt, Homo sapiens
  misc_RNA (1)...(19): siRNA sense strand
gaagaaucagaaacagugu

SEQ ID NO: 1371398 - RNA, 19 nt, Homo sapiens
  misc_RNA (1)...(19): siRNA sense strand
gggaaacuugucucacuga

SEQ ID NO: 1371399 - RNA, 19 nt, Homo sapiens
  misc_RNA (1)...(19): siRNA sense strand
ucacugagcgagcagaauc

SEQ ID NO: 1371400 - RNA, 19 nt, Homo sapiens
  misc_RNA (1)...(19): siRNA sense strand
gcaaguauuggcucgucaa

SEQ ID NO: 1371401 - RNA, 19 nt, Homo sapiens
  misc_RNA (1)...(19): siRNA sense strand
ccugagaauucuguugcua

SEQ ID NO: 1371402 - RNA, 19 nt, Homo sapiens
  misc_RNA (1)...(19): siRNA sense strand
ggcuagggccuuccaguau

SEQ ID NO: 1371403 - RNA, 19 nt, Homo sapiens
  misc_RNA (1)...(19): siRNA sense strand
ggaugaaaucuguaaguac

SEQ ID NO: 1371404 - RNA, 19 nt, Homo sapiens
  misc_RNA (1)...(19): siRNA sense strand
ggagagcagugugggaaaa

SEQ ID NO: 1371405 - RNA, 19 nt, Homo sapiens
  misc_RNA (1)...(19): siRNA sense strand
agaaucugguggacuguuc

SEQ ID NO: 1371406 - RNA, 19 nt, Homo sapiens
  misc_RNA (1)...(19): siRNA sense strand
gcccaucuccguugcuaug

SEQ ID NO: 1371407 - RNA, 19 nt, Homo sapiens
  misc_RNA (1)...(19): siRNA sense strand
gcaaucagggcugcaaugg

SEQ ID NO: 1371408 - RNA, 19 nt, Homo sapiens
  misc_RNA (1)...(19): siRNA sense strand
gaauacagccaagggaaac

SEQ ID NO: 1371409 - RNA, 19 nt, Homo sapiens
  misc_RNA (1)...(19): siRNA sense strand
ggaaggcaacacacagaag

SEQ ID NO: 1371410 - RNA, 19 nt, Homo sapiens
  misc_RNA (1)...(19): siRNA sense strand
cugcaaugguggcuucaug

SEQ ID NO: 1371411 - RNA, 19 nt, Homo sapiens
  misc_RNA (1)...(19): siRNA sense strand
aaucagaaacagugugguu

SEQ ID NO: 1371412 - RNA, 19 nt, Homo sapiens
  misc_RNA (1)...(19): siRNA sense strand
cuagggccuuccaguaugu

SEQ ID NO: 1371413 - RNA, 19 nt, Homo sapiens
  misc_RNA (1)...(19): siRNA sense strand
agggaaacauggcuucaca

SEQ ID NO: 1371414 - RNA, 19 nt, Homo sapiens
  misc_RNA (1)...(19): siRNA sense strand
caaguauuggcucgucaaa

SEQ ID NO: 1371415 - RNA, 19 nt, Homo sapiens
  misc_RNA (1)...(19): siRNA sense strand
uggcuagggccuuccagua

SEQ ID NO: 1371416 - RNA, 19 nt, Homo sapiens
  misc_RNA (1)...(19): siRNA sense strand
caucuccguugcuauggau

SEQ ID NO: 1371417 - RNA, 19 nt, Homo sapiens
  misc_RNA (1)...(19): siRNA sense strand
ucacaauggccaugaaugc

SEQ ID NO: 1371418 - RNA, 19 nt, Homo sapiens
  misc_RNA (1)...(19): siRNA sense strand
ucuguggauuggagaaaga

SEQ ID NO: 1371419 - RNA, 19 nt, Homo sapiens
  misc_RNA (1)...(19): siRNA sense strand
gcagccagcuaccccaaug

SEQ ID NO: 1371420 - RNA, 19 nt, Homo sapiens
  misc_RNA (1)...(19): siRNA sense strand
gugguuggcuacggcuuug

SEQ ID NO: 1371421 - RNA, 19 nt, Homo sapiens
  misc_RNA (1)...(19): siRNA sense strand
ggugguuggcuacggcuuu

SEQ ID NO: 1371422 - RNA, 19 nt, Homo sapiens
  misc_RNA (1)...(19): siRNA sense strand
uauauggcgcgaaugaaga

SEQ ID NO: 1371423 - RNA, 19 nt, Homo sapiens
  misc_RNA (1)...(19): siRNA sense strand
gcaguggaugaaaucugua

SEQ ID NO: 1371424 - RNA, 19 nt, Homo sapiens
  misc_RNA (1)...(19): siRNA sense strand
agcaguggaugaaaucugu

SEQ ID NO: 1371425 - RNA, 19 nt, Homo sapiens
  misc_RNA (1)...(19): siRNA sense strand
ggccuggacucugaggaau

SEQ ID NO: 1371426 - RNA, 19 nt, Homo sapiens
  misc_RNA (1)...(19): siRNA sense strand
cagugaagaaucagaaaca

SEQ ID NO: 1371427 - RNA, 19 nt, Homo sapiens
  misc_RNA (1)...(19): siRNA sense strand
cugagaauucuguugcuaa

SEQ ID NO: 1371428 - RNA, 19 nt, Homo sapiens
  misc_RNA (1)...(19): siRNA sense strand
uaaguacagaccugagaau

SEQ ID NO: 1371429 - RNA, 19 nt, Homo sapiens
  misc_RNA (1)...(19): siRNA sense strand
gcucuugaaggacagaugu

SEQ ID NO: 1371430 - RNA, 19 nt, Homo sapiens
  misc_RNA (1)...(19): siRNA sense strand
cagaugauggguugcuuuc

SEQ ID NO: 1371431 - RNA, 19 nt, Homo sapiens
  misc_RNA (1)...(19): siRNA sense strand
agacaagaacaaccacugu

SEQ ID NO: 1371432 - RNA, 19 nt, Homo sapiens
  misc_RNA (1)...(19): siRNA sense strand
aggagaaggcccugaugaa

SEQ ID NO: 1371433 - RNA, 19 nt, Homo sapiens
  misc_RNA (1)...(19): siRNA sense strand
gcuaaugacacuggcuuca

SEQ ID NO: 1371434 - RNA, 19 nt, Homo sapiens
  misc_RNA (1)...(19): siRNA sense strand
guggaaggcaacacacaga

SEQ ID NO: 1371435 - RNA, 19 nt, Homo sapiens
  misc_RNA (1)...(19): siRNA sense strand
acaauggccaugaaugcuu

SEQ ID NO: 1371436 - RNA, 19 nt, Homo sapiens
  misc_RNA (1)...(19): siRNA sense strand
gacaugaccaaugaagaau

SEQ ID NO: 1371437 - RNA, 19 nt, Homo sapiens
  misc_RNA (1)...(19): siRNA sense strand
ggagaaagaaaggcuacgu

SEQ ID NO: 1371438 - RNA, 19 nt, Homo sapiens
  misc_RNA (1)...(19): siRNA sense strand
ggauggaggagagcagugu

SEQ ID NO: 1371439 - RNA, 19 nt, Homo sapiens
  misc_RNA (1)...(19): siRNA sense strand
gccauucguccuuccaguu

SEQ ID NO: 1371440 - RNA, 19 nt, Homo sapiens
  misc_RNA (1)...(19): siRNA sense strand
aaggagaaggcccugauga

SEQ ID NO: 1371441 - RNA, 19 nt, Homo sapiens
  misc_RNA (1)...(19): siRNA sense strand
gaauucuguugcuaaugac

SEQ ID NO: 1371442 - RNA, 19 nt, Homo sapiens
  misc_RNA (1)...(19): siRNA sense strand
cugggaaacuugucucacu

SEQ ID NO: 1371443 - RNA, 19 nt, Homo sapiens
  misc_RNA (1)...(19): siRNA sense strand
gaaauacguucgcaacuca

SEQ ID NO: 1371444 - RNA, 19 nt, Homo sapiens
  misc_RNA (1)...(19): siRNA sense strand
gggcaugggugcuggagaa

SEQ ID NO: 1371445 - RNA, 19 nt, Homo sapiens
  misc_RNA (1)...(19): siRNA sense strand
ggaaauacguucgcaacuc

SEQ ID NO: 1371446 - RNA, 19 nt, Homo sapiens
  misc_RNA (1)...(19): siRNA sense strand
guucgcaacucacggauga

SEQ ID NO: 1371447 - RNA, 19 nt, Homo sapiens
  misc_RNA (1)...(19): siRNA sense strand
cauuggagcuucuuuaucu

SEQ ID NO: 1371448 - RNA, 19 nt, Homo sapiens
  misc_RNA (1)...(19): siRNA sense strand
gagcauuggagcuucuuua

SEQ ID NO: 1371449 - RNA, 19 nt, Homo sapiens
  misc_RNA (1)...(19): siRNA sense strand
cagagaauaagcccuguua

SEQ ID NO: 1371450 - RNA, 19 nt, Homo sapiens
  misc_RNA (1)...(19): siRNA sense strand
gaguggaaguuaucuguca

SEQ ID NO: 1371451 - RNA, 19 nt, Homo sapiens
  misc_RNA (1)...(19): siRNA sense strand
ccuguuaccugcuggauau

SEQ ID NO: 1371452 - RNA, 19 nt, Homo sapiens
  misc_RNA (1)...(19): siRNA sense strand
gcaacucacggaugauuga

SEQ ID NO: 1371453 - RNA, 19 nt, Homo sapiens
  misc_RNA (1)...(19): siRNA sense strand
agacagaagcccggaaaua

SEQ ID NO: 1371454 - RNA, 19 nt, Homo sapiens
  misc_RNA (1)...(19): siRNA sense strand
ccccagagcuguuuuauga

SEQ ID NO: 1371455 - RNA, 19 nt, Homo sapiens
  misc_RNA (1)...(19): siRNA sense strand
caugggugcuggagaagaa

SEQ ID NO: 1371456 - RNA, 19 nt, Homo sapiens
  misc_RNA (1)...(19): siRNA sense strand
ucacaacccaggccacaaa

SEQ ID NO: 1371457 - RNA, 19 nt, Homo sapiens
  misc_RNA (1)...(19): siRNA sense strand
gggagucuguguucaccaa

SEQ ID NO: 1371458 - RNA, 19 nt, Homo sapiens
  misc_RNA (1)...(19): siRNA sense strand
gcugugcaguggcucugua

SEQ ID NO: 1371459 - RNA, 19 nt, Homo sapiens
  misc_RNA (1)...(19): siRNA sense strand
caguggcucuguaaugcua

SEQ ID NO: 1371460 - RNA, 19 nt, Homo sapiens
  misc_RNA (1)...(19): siRNA sense strand
cagaugaagggcacuauug

SEQ ID NO: 1371461 - RNA, 19 nt, Homo sapiens
  misc_RNA (1)...(19): siRNA sense strand
gagagguucccauuaagga

SEQ ID NO: 1371462 - RNA, 19 nt, Homo sapiens
  misc_RNA (1)...(19): siRNA sense strand
gcccugccaugcuggauga

SEQ ID NO: 1371463 - RNA, 19 nt, Homo sapiens
  misc_RNA (1)...(19): siRNA sense strand
acucacggaugauugauau

SEQ ID NO: 1371464 - RNA, 19 nt, Homo sapiens
  misc_RNA (1)...(19): siRNA sense strand
aaaucaggaugaaguugaa

SEQ ID NO: 1371465 - RNA, 19 nt, Homo sapiens
  misc_RNA (1)...(19): siRNA sense strand
gacagaagcccggaaauac

SEQ ID NO: 1371466 - RNA, 19 nt, Homo sapiens
  misc_RNA (1)...(19): siRNA sense strand
uaacagugccaaagcaaag

SEQ ID NO: 1371467 - RNA, 19 nt, Homo sapiens
  misc_RNA (1)...(19): siRNA sense strand
gcuaacaagaagucugaaa

SEQ ID NO: 1371468 - RNA, 19 nt, Homo sapiens
  misc_RNA (1)...(19): siRNA sense strand
ccaggcacauuugaugguu

SEQ ID NO: 1371469 - RNA, 19 nt, Homo sapiens
  misc_RNA (1)...(19): siRNA sense strand
gcucuguaaugcuaacaag

SEQ ID NO: 1371470 - RNA, 19 nt, Homo sapiens
  misc_RNA (1)...(19): siRNA sense strand
gagucuguguucaccaaug

SEQ ID NO: 1371471 - RNA, 19 nt, Homo sapiens
  misc_RNA (1)...(19): siRNA sense strand
cgagacagaagcccggaaa

SEQ ID NO: 1371472 - RNA, 19 nt, Homo sapiens
  misc_RNA (1)...(19): siRNA sense strand
gaacccagggagucugugu

SEQ ID NO: 1371473 - RNA, 19 nt, Homo sapiens
  misc_RNA (1)...(19): siRNA sense strand
ggccagggcaucccauuca

SEQ ID NO: 1371474 - RNA, 19 nt, Homo sapiens
  misc_RNA (1)...(19): siRNA sense strand
gugcaguggcucuguaaug

SEQ ID NO: 1371475 - RNA, 19 nt, Homo sapiens
  misc_RNA (1)...(19): siRNA sense strand
gugccaaagcaaagaaauu

SEQ ID NO: 1371476 - RNA, 19 nt, Homo sapiens
  misc_RNA (1)...(19): siRNA sense strand
guaaugcuaacaagaaguc

SEQ ID NO: 1371477 - RNA, 19 nt, Homo sapiens
  misc_RNA (1)...(19): siRNA sense strand
gccagggcaucccauucaa

SEQ ID NO: 1371478 - RNA, 19 nt, Homo sapiens
  misc_RNA (1)...(19): siRNA sense strand
agucuguguucaccaauga

SEQ ID NO: 1371479 - RNA, 19 nt, Homo sapiens
  misc_RNA (1)...(19): siRNA sense strand
ucuguaaugcuaacaagaa

SEQ ID NO: 1371480 - RNA, 19 nt, Homo sapiens
  misc_RNA (1)...(19): siRNA sense strand
gcauuggagcuucuuuauc

SEQ ID NO: 1371481 - RNA, 19 nt, Homo sapiens
  misc_RNA (1)...(19): siRNA sense strand
ucugggccuucgaccuuua

SEQ ID NO: 1371482 - RNA, 19 nt, Homo sapiens
  misc_RNA (1)...(19): siRNA sense strand
gagaauaagcccuguuacc

SEQ ID NO: 1371483 - RNA, 19 nt, Homo sapiens
  misc_RNA (1)...(19): siRNA sense strand
ggcuguggaccgagagaua

SEQ ID NO: 1371484 - RNA, 19 nt, Homo sapiens
  misc_RNA (1)...(19): siRNA sense strand
cagaggggcugagugaaaa

SEQ ID NO: 1371485 - RNA, 19 nt, Homo sapiens
  misc_RNA (1)...(19): siRNA sense strand
cagagcaguuggagcugau

SEQ ID NO: 1371486 - RNA, 19 nt, Homo sapiens
  misc_RNA (1)...(19): siRNA sense strand
gggcugaguggaaguuauc

SEQ ID NO: 1371487 - RNA, 19 nt, Homo sapiens
  misc_RNA (1)...(19): siRNA sense strand
ucagaugaagggcacuauu

SEQ ID NO: 1371488 - RNA, 19 nt, Homo sapiens
  misc_RNA (1)...(19): siRNA sense strand
guggcauggugguagacua

SEQ ID NO: 1371489 - RNA, 19 nt, Homo sapiens
  misc_RNA (1)...(19): siRNA sense strand
auucaagccaggcacauuu

SEQ ID NO: 1371490 - RNA, 19 nt, Homo sapiens
  misc_RNA (1)...(19): siRNA sense strand
guuaccugcuggauauugg

SEQ ID NO: 1371491 - RNA, 19 nt, Homo sapiens
  misc_RNA (1)...(19): siRNA sense strand
cuaacagugccaaagcaaa

SEQ ID NO: 1371492 - RNA, 19 nt, Homo sapiens
  misc_RNA (1)...(19): siRNA sense strand
gcaguuggagcugaucaca

SEQ ID NO: 1371493 - RNA, 19 nt, Homo sapiens
  misc_RNA (1)...(19): siRNA sense strand
cugcagcuguacccugaga

SEQ ID NO: 1371494 - RNA, 19 nt, Homo sapiens
  misc_RNA (1)...(19): siRNA sense strand
gggagagccuggacgaaga

SEQ ID NO: 1371495 - RNA, 19 nt, Homo sapiens
  misc_RNA (1)...(19): siRNA sense strand
gcagcuuccuggccaagaa

SEQ ID NO: 1371496 - RNA, 19 nt, Homo sapiens
  misc_RNA (1)...(19): siRNA sense strand
ccacggguccugcugcaaa

SEQ ID NO: 1371497 - RNA, 19 nt, Homo sapiens
  misc_RNA (1)...(19): siRNA sense strand
ccacggguccugcugcaaa

SEQ ID NO: 1371498 - RNA, 19 nt, Homo sapiens
  misc_RNA (1)...(19): siRNA sense strand
gcggcugacugcagacaug

SEQ ID NO: 1371499 - RNA, 19 nt, Homo sapiens
  misc_RNA (1)...(19): siRNA sense strand
ggccaccacuacccagaga

SEQ ID NO: 1371500 - RNA, 19 nt, Homo sapiens
  misc_RNA (1)...(19): siRNA sense strand
ggaggaugaugaggucaag

SEQ ID NO: 1371501 - RNA, 19 nt, Homo sapiens
  misc_RNA (1)...(19): siRNA sense strand
acacguccuuccucagcaa

SEQ ID NO: 1371502 - RNA, 19 nt, Homo sapiens
  misc_RNA (1)...(19): siRNA sense strand
cugacucucucuuguccuu

SEQ ID NO: 1371503 - RNA, 19 nt, Homo sapiens
  misc_RNA (1)...(19): siRNA sense strand
ccaccacuacccagagaug

SEQ ID NO: 1371504 - RNA, 19 nt, Homo sapiens
  misc_RNA (1)...(19): siRNA sense strand
gaccgagaccgggaugguu

SEQ ID NO: 1371505 - RNA, 19 nt, Homo sapiens
  misc_RNA (1)...(19): siRNA sense strand
gggagagccuggacgaaga

SEQ ID NO: 1371506 - RNA, 19 nt, Homo sapiens
  misc_RNA (1)...(19): siRNA sense strand
gcagcuuccuggccaagaa

SEQ ID NO: 1371507 - RNA, 19 nt, Homo sapiens
  misc_RNA (1)...(19): siRNA sense strand
ccacggguccugcugcaaa

SEQ ID NO: 1371508 - RNA, 19 nt, Homo sapiens
  misc_RNA (1)...(19): siRNA sense strand
ccacggguccugcugcaaa

SEQ ID NO: 1371509 - RNA, 19 nt, Homo sapiens
  misc_RNA (1)...(19): siRNA sense strand
gcggcugacugcagacaug

SEQ ID NO: 1371510 - RNA, 19 nt, Homo sapiens
  misc_RNA (1)...(19): siRNA sense strand
ggccaccacuacccagaga

SEQ ID NO: 1371511 - RNA, 19 nt, Homo sapiens
  misc_RNA (1)...(19): siRNA sense strand
ggaggaugaugaggucaag

SEQ ID NO: 1371512 - RNA, 19 nt, Homo sapiens
  misc_RNA (1)...(19): siRNA sense strand
acacguccuuccucagcaa

SEQ ID NO: 1371513 - RNA, 19 nt, Homo sapiens
  misc_RNA (1)...(19): siRNA sense strand
cugacucucucuuguccuu

SEQ ID NO: 1371514 - RNA, 19 nt, Homo sapiens
  misc_RNA (1)...(19): siRNA sense strand
ccaccacuacccagagaug

SEQ ID NO: 1371515 - RNA, 19 nt, Homo sapiens
  misc_RNA (1)...(19): siRNA sense strand
gaccgagaccgggaugguu

SEQ ID NO: 1371516 - RNA, 19 nt, Homo sapiens
  misc_RNA (1)...(19): siRNA sense strand
caacauaccucaacuucug

SEQ ID NO: 1371517 - RNA, 19 nt, Homo sapiens
  misc_RNA (1)...(19): siRNA sense strand
gagcaaagccgucgagaug

SEQ ID NO: 1371518 - RNA, 19 nt, Homo sapiens
  misc_RNA (1)...(19): siRNA sense strand
gagagcaaguucuacaaga

SEQ ID NO: 1371519 - RNA, 19 nt, Homo sapiens
  misc_RNA (1)...(19): siRNA sense strand
caacuucuguucccgcaaa

SEQ ID NO: 1371520 - RNA, 19 nt, Homo sapiens
  misc_RNA (1)...(19): siRNA sense strand
agacaagugugccauuuga

SEQ ID NO: 1371521 - RNA, 19 nt, Homo sapiens
  misc_RNA (1)...(19): siRNA sense strand
ccaccaagcgccagaagua

SEQ ID NO: 1371522 - RNA, 19 nt, Homo sapiens
  misc_RNA (1)...(19): siRNA sense strand
gagaggaaggugaguauga

SEQ ID NO: 1371523 - RNA, 19 nt, Homo sapiens
  misc_RNA (1)...(19): siRNA sense strand
gaacggaucagcgagaaga

SEQ ID NO: 1371524 - RNA, 19 nt, Homo sapiens
  misc_RNA (1)...(19): siRNA sense strand
ccaucaagcuggagugugu

SEQ ID NO: 1371525 - RNA, 19 nt, Homo sapiens
  misc_RNA (1)...(19): siRNA sense strand
ucgaggaccuguucaacuu

SEQ ID NO: 1371526 - RNA, 19 nt, Homo sapiens
  misc_RNA (1)...(19): siRNA sense strand
gcuacgugcucauguacuu

SEQ ID NO: 1371527 - RNA, 19 nt, Homo sapiens
  misc_RNA (1)...(19): siRNA sense strand
cggcagggcuucuccuaug

SEQ ID NO: 1371528 - RNA, 19 nt, Homo sapiens
  misc_RNA (1)...(19): siRNA sense strand
cgacuacucuuaccuacgu

SEQ ID NO: 1371529 - RNA, 19 nt, Homo sapiens
  misc_RNA (1)...(19): siRNA sense strand
gcaaagccgucgagaugac

SEQ ID NO: 1371530 - RNA, 19 nt, Homo sapiens
  misc_RNA (1)...(19): siRNA sense strand
ccuccgaauucucaacaua

SEQ ID NO: 1371531 - RNA, 19 nt, Homo sapiens
  misc_RNA (1)...(19): siRNA sense strand
gcacaucgagagcaaguuc

SEQ ID NO: 1371532 - RNA, 19 nt, Homo sapiens
  misc_RNA (1)...(19): siRNA sense strand
gagcugagggcgacuacaa

SEQ ID NO: 1371533 - RNA, 19 nt, Homo sapiens
  misc_RNA (1)...(19): siRNA sense strand
gcucuuggccgaccagaug

SEQ ID NO: 1371534 - RNA, 19 nt, Homo sapiens
  misc_RNA (1)...(19): siRNA sense strand
acagacaagugugccauuu

SEQ ID NO: 1371535 - RNA, 19 nt, Homo sapiens
  misc_RNA (1)...(19): siRNA sense strand
acuggaacaugcugaaauu

SEQ ID NO: 1371536 - RNA, 19 nt, Homo sapiens
  misc_RNA (1)...(19): siRNA sense strand
gagcaaguucuacaagaug

SEQ ID NO: 1371537 - RNA, 19 nt, Homo sapiens
  misc_RNA (1)...(19): siRNA sense strand
gugaggaagucgccaucaa

SEQ ID NO: 1371538 - RNA, 19 nt, Homo sapiens
  misc_RNA (1)...(19): siRNA sense strand
ggcagggcuucuccuauga

SEQ ID NO: 1371539 - RNA, 19 nt, Homo sapiens
  misc_RNA (1)...(19): siRNA sense strand
uggagugugugaagacaaa

SEQ ID NO: 1371540 - RNA, 19 nt, Homo sapiens
  misc_RNA (1)...(19): siRNA sense strand
acacgcaccugggcauuga

SEQ ID NO: 1371541 - RNA, 19 nt, Homo sapiens
  misc_RNA (1)...(19): siRNA sense strand
gaucagccgcaucgaguau

SEQ ID NO: 1371542 - RNA, 19 nt, Homo sapiens
  misc_RNA (1)...(19): siRNA sense strand
ccaagcgccagaaguauga

SEQ ID NO: 1371543 - RNA, 19 nt, Homo sapiens
  misc_RNA (1)...(19): siRNA sense strand
cgacaagcccgacuacucu

SEQ ID NO: 1371544 - RNA, 19 nt, Homo sapiens
  misc_RNA (1)...(19): siRNA sense strand
gaucccagccucacagaca

SEQ ID NO: 1371545 - RNA, 19 nt, Homo sapiens
  misc_RNA (1)...(19): siRNA sense strand
agagcaaguucuacaagau

SEQ ID NO: 1371546 - RNA, 19 nt, Homo sapiens
  misc_RNA (1)...(19): siRNA sense strand
ccgcuacgcuuccaucaac

SEQ ID NO: 1371547 - RNA, 19 nt, Homo sapiens
  misc_RNA (1)...(19): siRNA sense strand
gagcggguccuucggagau

SEQ ID NO: 1371548 - RNA, 19 nt, Homo sapiens
  misc_RNA (1)...(19): siRNA sense strand
gggagaggaaggugaguau

SEQ ID NO: 1371549 - RNA, 19 nt, Homo sapiens
  misc_RNA (1)...(19): siRNA sense strand
gaggaccuguucaacuucu

SEQ ID NO: 1371550 - RNA, 19 nt, Homo sapiens
  misc_RNA (1)...(19): siRNA sense strand
gggcuucuccuaugacuac

SEQ ID NO: 1371551 - RNA, 19 nt, Homo sapiens
  misc_RNA (1)...(19): siRNA sense strand
cuaccugggugccaacauc

SEQ ID NO: 1371552 - RNA, 19 nt, Homo sapiens
  misc_RNA (1)...(19): siRNA sense strand
ucagccgcaucgaguauau

SEQ ID NO: 1371553 - RNA, 19 nt, Homo sapiens
  misc_RNA (1)...(19): siRNA sense strand
ugggcuacgugcucaugua

SEQ ID NO: 1371554 - RNA, 19 nt, Homo sapiens
  misc_RNA (1)...(19): siRNA sense strand
gcaaccuggucuacaucau

SEQ ID NO: 1371555 - RNA, 19 nt, Homo sapiens
  misc_RNA (1)...(19): siRNA sense strand
gcaccugggcauugagcaa

SEQ ID NO: 1371556 - RNA, 19 nt, Homo sapiens
  misc_RNA (1)...(19): siRNA sense strand
acaagcccgacuacucuua

SEQ ID NO: 1371557 - RNA, 19 nt, Homo sapiens
  misc_RNA (1)...(19): siRNA sense strand
caaccuggucuacaucauc

SEQ ID NO: 1371558 - RNA, 19 nt, Homo sapiens
  misc_RNA (1)...(19): siRNA sense strand
gggaucccguccaucaagu

SEQ ID NO: 1371559 - RNA, 19 nt, Homo sapiens
  misc_RNA (1)...(19): siRNA sense strand
gcgagaagaagaugucaac

SEQ ID NO: 1371560 - RNA, 19 nt, Homo sapiens
  misc_RNA (1)...(19): siRNA sense strand
gaucagcgagaagaagaug

SEQ ID NO: 1371561 - RNA, 19 nt, Homo sapiens
  misc_RNA (1)...(19): siRNA sense strand
uauauccacuccaagaacu

SEQ ID NO: 1371562 - RNA, 19 nt, Homo sapiens
  misc_RNA (1)...(19): siRNA sense strand
agcaaguucuacaagauga

SEQ ID NO: 1371563 - RNA, 19 nt, Homo sapiens
  misc_RNA (1)...(19): siRNA sense strand
gcccgacuacucuuaccua

SEQ ID NO: 1371564 - RNA, 19 nt, Homo sapiens
  misc_RNA (1)...(19): siRNA sense strand
cagacaagugugccauuug

SEQ ID NO: 1371565 - RNA, 19 nt, Homo sapiens
  misc_RNA (1)...(19): siRNA sense strand
gacuggaacaugcugaaau

SEQ ID NO: 1371566 - RNA, 19 nt, Homo sapiens
  misc_RNA (1)...(19): siRNA sense strand
acaacgugauggucaugga

SEQ ID NO: 1371567 - RNA, 19 nt, Homo sapiens
  misc_RNA (1)...(19): siRNA sense strand
uuaccuacgucagcucuuc

SEQ ID NO: 1371568 - RNA, 19 nt, Homo sapiens
  misc_RNA (1)...(19): siRNA sense strand
gcaaauucagccucaagac

SEQ ID NO: 1371569 - RNA, 19 nt, Homo sapiens
  misc_RNA (1)...(19): siRNA sense strand
agaggaaggugaguaugag

SEQ ID NO: 1371570 - RNA, 19 nt, Homo sapiens
  misc_RNA (1)...(19): siRNA sense strand
aaggcuaucccuccgaauu

SEQ ID NO: 1371571 - RNA, 19 nt, Homo sapiens
  misc_RNA (1)...(19): siRNA sense strand
caacacgcaccugggcauu

SEQ ID NO: 1371572 - RNA, 19 nt, Homo sapiens
  misc_RNA (1)...(19): siRNA sense strand
gaagggcaaccuggucuac

SEQ ID NO: 1371573 - RNA, 19 nt, Homo sapiens
  misc_RNA (1)...(19): siRNA sense strand
ccuaugacuacgucuuuga

SEQ ID NO: 1371574 - RNA, 19 nt, Homo sapiens
  misc_RNA (1)...(19): siRNA sense strand
ggaccuguucaacuucugu

SEQ ID NO: 1371575 - RNA, 19 nt, Homo sapiens
  misc_RNA (1)...(19): siRNA sense strand
ggagaggaaggugaguaug

SEQ ID NO: 1371576 - RNA, 19 nt, Homo sapiens
  misc_RNA (1)...(19): siRNA sense strand
gcuggagugugugaagaca

SEQ ID NO: 1371577 - RNA, 19 nt, Homo sapiens
  misc_RNA (1)...(19): siRNA sense strand
aagcuggagugugugaaga

SEQ ID NO: 1371578 - RNA, 19 nt, Homo sapiens
  misc_RNA (1)...(19): siRNA sense strand
caacauaccucaacuucug

SEQ ID NO: 1371579 - RNA, 19 nt, Homo sapiens
  misc_RNA (1)...(19): siRNA sense strand
gagcaaagccgucgagaug

SEQ ID NO: 1371580 - RNA, 19 nt, Homo sapiens
  misc_RNA (1)...(19): siRNA sense strand
gagagcaaguucuacaaga

SEQ ID NO: 1371581 - RNA, 19 nt, Homo sapiens
  misc_RNA (1)...(19): siRNA sense strand
caacuucuguucccgcaaa

SEQ ID NO: 1371582 - RNA, 19 nt, Homo sapiens
  misc_RNA (1)...(19): siRNA sense strand
agacaagugugccauuuga

SEQ ID NO: 1371583 - RNA, 19 nt, Homo sapiens
  misc_RNA (1)...(19): siRNA sense strand
ccaccaagcgccagaagua

SEQ ID NO: 1371584 - RNA, 19 nt, Homo sapiens
  misc_RNA (1)...(19): siRNA sense strand
gagaggaaggugaguauga

SEQ ID NO: 1371585 - RNA, 19 nt, Homo sapiens
  misc_RNA (1)...(19): siRNA sense strand
gaacggaucagcgagaaga

SEQ ID NO: 1371586 - RNA, 19 nt, Homo sapiens
  misc_RNA (1)...(19): siRNA sense strand
ccaucaagcuggagugugu

SEQ ID NO: 1371587 - RNA, 19 nt, Homo sapiens
  misc_RNA (1)...(19): siRNA sense strand
ucgaggaccuguucaacuu

SEQ ID NO: 1371588 - RNA, 19 nt, Homo sapiens
  misc_RNA (1)...(19): siRNA sense strand
gcuacgugcucauguacuu

SEQ ID NO: 1371589 - RNA, 19 nt, Homo sapiens
  misc_RNA (1)...(19): siRNA sense strand
cggcagggcuucuccuaug

SEQ ID NO: 1371590 - RNA, 19 nt, Homo sapiens
  misc_RNA (1)...(19): siRNA sense strand
cgacuacucuuaccuacgu

SEQ ID NO: 1371591 - RNA, 19 nt, Homo sapiens
  misc_RNA (1)...(19): siRNA sense strand
gcaaagccgucgagaugac

SEQ ID NO: 1371592 - RNA, 19 nt, Homo sapiens
  misc_RNA (1)...(19): siRNA sense strand
ccuccgaauucucaacaua

SEQ ID NO: 1371593 - RNA, 19 nt, Homo sapiens
  misc_RNA (1)...(19): siRNA sense strand
gcacaucgagagcaaguuc

SEQ ID NO: 1371594 - RNA, 19 nt, Homo sapiens
  misc_RNA (1)...(19): siRNA sense strand
gagcugagggcgacuacaa

SEQ ID NO: 1371595 - RNA, 19 nt, Homo sapiens
  misc_RNA (1)...(19): siRNA sense strand
gcucuuggccgaccagaug

SEQ ID NO: 1371596 - RNA, 19 nt, Homo sapiens
  misc_RNA (1)...(19): siRNA sense strand
acagacaagugugccauuu

SEQ ID NO: 1371597 - RNA, 19 nt, Homo sapiens
  misc_RNA (1)...(19): siRNA sense strand
acuggaacaugcugaaauu

SEQ ID NO: 1371598 - RNA, 19 nt, Homo sapiens
  misc_RNA (1)...(19): siRNA sense strand
gagcaaguucuacaagaug

SEQ ID NO: 1371599 - RNA, 19 nt, Homo sapiens
  misc_RNA (1)...(19): siRNA sense strand
gugaggaagucgccaucaa

SEQ ID NO: 1371600 - RNA, 19 nt, Homo sapiens
  misc_RNA (1)...(19): siRNA sense strand
ggcagggcuucuccuauga

SEQ ID NO: 1371601 - RNA, 19 nt, Homo sapiens
  misc_RNA (1)...(19): siRNA sense strand
uggagugugugaagacaaa

SEQ ID NO: 1371602 - RNA, 19 nt, Homo sapiens
  misc_RNA (1)...(19): siRNA sense strand
acacgcaccugggcauuga

SEQ ID NO: 1371603 - RNA, 19 nt, Homo sapiens
  misc_RNA (1)...(19): siRNA sense strand
gaucagccgcaucgaguau

SEQ ID NO: 1371604 - RNA, 19 nt, Homo sapiens
  misc_RNA (1)...(19): siRNA sense strand
ccaagcgccagaaguauga

SEQ ID NO: 1371605 - RNA, 19 nt, Homo sapiens
  misc_RNA (1)...(19): siRNA sense strand
cgacaagcccgacuacucu

SEQ ID NO: 1371606 - RNA, 19 nt, Homo sapiens
  misc_RNA (1)...(19): siRNA sense strand
gaucccagccucacagaca

SEQ ID NO: 1371607 - RNA, 19 nt, Homo sapiens
  misc_RNA (1)...(19): siRNA sense strand
agagcaaguucuacaagau

SEQ ID NO: 1371608 - RNA, 19 nt, Homo sapiens
  misc_RNA (1)...(19): siRNA sense strand
ccgcuacgcuuccaucaac

SEQ ID NO: 1371609 - RNA, 19 nt, Homo sapiens
  misc_RNA (1)...(19): siRNA sense strand
gagcggguccuucggagau

SEQ ID NO: 1371610 - RNA, 19 nt, Homo sapiens
  misc_RNA (1)...(19): siRNA sense strand
gggagaggaaggugaguau

SEQ ID NO: 1371611 - RNA, 19 nt, Homo sapiens
  misc_RNA (1)...(19): siRNA sense strand
gaggaccuguucaacuucu

SEQ ID NO: 1371612 - RNA, 19 nt, Homo sapiens
  misc_RNA (1)...(19): siRNA sense strand
gggcuucuccuaugacuac

SEQ ID NO: 1371613 - RNA, 19 nt, Homo sapiens
  misc_RNA (1)...(19): siRNA sense strand
cuaccugggugccaacauc

SEQ ID NO: 1371614 - RNA, 19 nt, Homo sapiens
  misc_RNA (1)...(19): siRNA sense strand
ucagccgcaucgaguauau

SEQ ID NO: 1371615 - RNA, 19 nt, Homo sapiens
  misc_RNA (1)...(19): siRNA sense strand
ugggcuacgugcucaugua

SEQ ID NO: 1371616 - RNA, 19 nt, Homo sapiens
  misc_RNA (1)...(19): siRNA sense strand
gcaaccuggucuacaucau

SEQ ID NO: 1371617 - RNA, 19 nt, Homo sapiens
  misc_RNA (1)...(19): siRNA sense strand
gcaccugggcauugagcaa

SEQ ID NO: 1371618 - RNA, 19 nt, Homo sapiens
  misc_RNA (1)...(19): siRNA sense strand
acaagcccgacuacucuua

SEQ ID NO: 1371619 - RNA, 19 nt, Homo sapiens
  misc_RNA (1)...(19): siRNA sense strand
caaccuggucuacaucauc

SEQ ID NO: 1371620 - RNA, 19 nt, Homo sapiens
  misc_RNA (1)...(19): siRNA sense strand
gggaucccguccaucaagu

SEQ ID NO: 1371621 - RNA, 19 nt, Homo sapiens
  misc_RNA (1)...(19): siRNA sense strand
gcgagaagaagaugucaac

SEQ ID NO: 1371622 - RNA, 19 nt, Homo sapiens
  misc_RNA (1)...(19): siRNA sense strand
gaucagcgagaagaagaug

SEQ ID NO: 1371623 - RNA, 19 nt, Homo sapiens
  misc_RNA (1)...(19): siRNA sense strand
uauauccacuccaagaacu

SEQ ID NO: 1371624 - RNA, 19 nt, Homo sapiens
  misc_RNA (1)...(19): siRNA sense strand
agcaaguucuacaagauga

SEQ ID NO: 1371625 - RNA, 19 nt, Homo sapiens
  misc_RNA (1)...(19): siRNA sense strand
gcccgacuacucuuaccua

SEQ ID NO: 1371626 - RNA, 19 nt, Homo sapiens
  misc_RNA (1)...(19): siRNA sense strand
cagacaagugugccauuug

SEQ ID NO: 1371627 - RNA, 19 nt, Homo sapiens
  misc_RNA (1)...(19): siRNA sense strand
gacuggaacaugcugaaau

SEQ ID NO: 1371628 - RNA, 19 nt, Homo sapiens
  misc_RNA (1)...(19): siRNA sense strand
acaacgugauggucaugga

SEQ ID NO: 1371629 - RNA, 19 nt, Homo sapiens
  misc_RNA (1)...(19): siRNA sense strand
uuaccuacgucagcucuuc

SEQ ID NO: 1371630 - RNA, 19 nt, Homo sapiens
  misc_RNA (1)...(19): siRNA sense strand
gcaaauucagccucaagac

SEQ ID NO: 1371631 - RNA, 19 nt, Homo sapiens
  misc_RNA (1)...(19): siRNA sense strand
agaggaaggugaguaugag

SEQ ID NO: 1371632 - RNA, 19 nt, Homo sapiens
  misc_RNA (1)...(19): siRNA sense strand
aaggcuaucccuccgaauu

SEQ ID NO: 1371633 - RNA, 19 nt, Homo sapiens
  misc_RNA (1)...(19): siRNA sense strand
caacacgcaccugggcauu

SEQ ID NO: 1371634 - RNA, 19 nt, Homo sapiens
  misc_RNA (1)...(19): siRNA sense strand
gaagggcaaccuggucuac

SEQ ID NO: 1371635 - RNA, 19 nt, Homo sapiens
  misc_RNA (1)...(19): siRNA sense strand
ccuaugacuacgucuuuga

SEQ ID NO: 1371636 - RNA, 19 nt, Homo sapiens
  misc_RNA (1)...(19): siRNA sense strand
ggaccuguucaacuucugu

SEQ ID NO: 1371637 - RNA, 19 nt, Homo sapiens
  misc_RNA (1)...(19): siRNA sense strand
ggagaggaaggugaguaug

SEQ ID NO: 1371638 - RNA, 19 nt, Homo sapiens
  misc_RNA (1)...(19): siRNA sense strand
gcuggagugugugaagaca

SEQ ID NO: 1371639 - RNA, 19 nt, Homo sapiens
  misc_RNA (1)...(19): siRNA sense strand
aagcuggagugugugaaga

SEQ ID NO: 1371640 - RNA, 19 nt, Homo sapiens
  misc_RNA (1)...(19): siRNA sense strand
gaaggucuccgaugucaua

SEQ ID NO: 1371641 - RNA, 19 nt, Homo sapiens
  misc_RNA (1)...(19): siRNA sense strand
gaucauacaugcgcuguga

SEQ ID NO: 1371642 - RNA, 19 nt, Homo sapiens
  misc_RNA (1)...(19): siRNA sense strand
gccgugagcuggugaagaa

SEQ ID NO: 1371643 - RNA, 19 nt, Homo sapiens
  misc_RNA (1)...(19): siRNA sense strand
ugaagaaggucuccgaugu

SEQ ID NO: 1371644 - RNA, 19 nt, Homo sapiens
  misc_RNA (1)...(19): siRNA sense strand
ggagcuggcuguaccugaa

SEQ ID NO: 1371645 - RNA, 19 nt, Homo sapiens
  misc_RNA (1)...(19): siRNA sense strand
gaucaugccuggguagugu

SEQ ID NO: 1371646 - RNA, 19 nt, Homo sapiens
  misc_RNA (1)...(19): siRNA sense strand
ugggacaucuggaaaggua

SEQ ID NO: 1371647 - RNA, 19 nt, Homo sapiens
  misc_RNA (1)...(19): siRNA sense strand
caaggaguucuuugaagua

SEQ ID NO: 1371648 - RNA, 19 nt, Homo sapiens
  misc_RNA (1)...(19): siRNA sense strand
acaaggaguucuuugaagu

SEQ ID NO: 1371649 - RNA, 19 nt, Homo sapiens
  misc_RNA (1)...(19): siRNA sense strand
gaaccuggcagaucuagag

SEQ ID NO: 1371650 - RNA, 19 nt, Homo sapiens
  misc_RNA (1)...(19): siRNA sense strand
ggucuccgaugucauaugg

SEQ ID NO: 1371651 - RNA, 19 nt, Homo sapiens
  misc_RNA (1)...(19): siRNA sense strand
ccacugucauccaggacua

SEQ ID NO: 1371652 - RNA, 19 nt, Homo sapiens
  misc_RNA (1)...(19): siRNA sense strand
acgaggagaucuacaagga

SEQ ID NO: 1371653 - RNA, 19 nt, Homo sapiens
  misc_RNA (1)...(19): siRNA sense strand
cgucaucccuaccaacguu

SEQ ID NO: 1371654 - RNA, 19 nt, Homo sapiens
  misc_RNA (1)...(19): siRNA sense strand
gaagaaggucuccgauguc

SEQ ID NO: 1371655 - RNA, 19 nt, Homo sapiens
  misc_RNA (1)...(19): siRNA sense strand
gggaagacgaggagaucua

SEQ ID NO: 1371656 - RNA, 19 nt, Homo sapiens
  misc_RNA (1)...(19): siRNA sense strand
gaacacaucuaccccuaca

SEQ ID NO: 1371657 - RNA, 19 nt, Homo sapiens
  misc_RNA (1)...(19): siRNA sense strand
gaagaugaagggcaugaag

SEQ ID NO: 1371658 - RNA, 19 nt, Homo sapiens
  misc_RNA (1)...(19): siRNA sense strand
ugacuacacucugucuuuc

SEQ ID NO: 1371659 - RNA, 19 nt, Homo sapiens
  misc_RNA (1)...(19): siRNA sense strand
cuacaaggaguucuuugaa

SEQ ID NO: 1371660 - RNA, 19 nt, Homo sapiens
  misc_RNA (1)...(19): siRNA sense strand
cagaaggugcgcauaguga

SEQ ID NO: 1371661 - RNA, 19 nt, Homo sapiens
  misc_RNA (1)...(19): siRNA sense strand
gccaucaacccuuccauug

SEQ ID NO: 1371662 - RNA, 19 nt, Homo sapiens
  misc_RNA (1)...(19): siRNA sense strand
gugacuacacucugucuuu

SEQ ID NO: 1371663 - RNA, 19 nt, Homo sapiens
  misc_RNA (1)...(19): siRNA sense strand
ugaaguagccaaugauguc

SEQ ID NO: 1371664 - RNA, 19 nt, Homo sapiens
  misc_RNA (1)...(19): siRNA sense strand
gaucuacaaggaguucuuu

SEQ ID NO: 1371665 - RNA, 19 nt, Homo sapiens
  misc_RNA (1)...(19): siRNA sense strand
gcagaaggugcgcauagug

SEQ ID NO: 1371666 - RNA, 19 nt, Homo sapiens
  misc_RNA (1)...(19): siRNA sense strand
aagaaggucuccgauguca

SEQ ID NO: 1371667 - RNA, 19 nt, Homo sapiens
  misc_RNA (1)...(19): siRNA sense strand
gaccuacuaucgggaugaa

SEQ ID NO: 1371668 - RNA, 19 nt, Homo sapiens
  misc_RNA (1)...(19): siRNA sense strand
uagggaaccuggcagaucu

SEQ ID NO: 1371669 - RNA, 19 nt, Homo sapiens
  misc_RNA (1)...(19): siRNA sense strand
ucuccgaugucauauggaa

SEQ ID NO: 1371670 - RNA, 19 nt, Homo sapiens
  misc_RNA (1)...(19): siRNA sense strand
gagaagaugaagggcauga

SEQ ID NO: 1371671 - RNA, 19 nt, Homo sapiens
  misc_RNA (1)...(19): siRNA sense strand
cgacguggugcgccuguuu

SEQ ID NO: 1371672 - RNA, 19 nt, Homo sapiens
  misc_RNA (1)...(19): siRNA sense strand
ucuuugaaguagccaauga

SEQ ID NO: 1371673 - RNA, 19 nt, Homo sapiens
  misc_RNA (1)...(19): siRNA sense strand
uacaaggaguucuuugaag

SEQ ID NO: 1371674 - RNA, 19 nt, Homo sapiens
  misc_RNA (1)...(19): siRNA sense strand
ccugaaaggaucauacaug

SEQ ID NO: 1371675 - RNA, 19 nt, Homo sapiens
  misc_RNA (1)...(19): siRNA sense strand
gaaguagccaaugauguca

SEQ ID NO: 1371676 - RNA, 19 nt, Homo sapiens
  misc_RNA (1)...(19): siRNA sense strand
ccacauccagucccucuuc

SEQ ID NO: 1371677 - RNA, 19 nt, Homo sapiens
  misc_RNA (1)...(19): siRNA sense strand
ggcagaaggugcgcauagu

SEQ ID NO: 1371678 - RNA, 19 nt, Homo sapiens
  misc_RNA (1)...(19): siRNA sense strand
gcagaugaagaagcagaaa

SEQ ID NO: 1371679 - RNA, 19 nt, Homo sapiens
  misc_RNA (1)...(19): siRNA sense strand
cagcuccgguguggccuuu

SEQ ID NO: 1371680 - RNA, 19 nt, Homo sapiens
  misc_RNA (1)...(19): siRNA sense strand
gaccugggacaucuggaaa

SEQ ID NO: 1371681 - RNA, 19 nt, Homo sapiens
  misc_RNA (1)...(19): siRNA sense strand
gagcuggcuguaccugaaa

SEQ ID NO: 1371682 - RNA, 19 nt, Homo sapiens
  misc_RNA (1)...(19): siRNA sense strand
cagacccacucacccucua

SEQ ID NO: 1371683 - RNA, 19 nt, Homo sapiens
  misc_RNA (1)...(19): siRNA sense strand
ggagaucuacaaggaguuc

SEQ ID NO: 1371684 - RNA, 19 nt, Homo sapiens
  misc_RNA (1)...(19): siRNA sense strand
gcugugaccgcaagaugga

SEQ ID NO: 1371685 - RNA, 19 nt, Homo sapiens
  misc_RNA (1)...(19): siRNA sense strand
ggaagccuccugggacugu

SEQ ID NO: 1371686 - RNA, 19 nt, Homo sapiens
  misc_RNA (1)...(19): siRNA sense strand
gggcugggccaccuuucuu

SEQ ID NO: 1371687 - RNA, 19 nt, Homo sapiens
  misc_RNA (1)...(19): siRNA sense strand
ucuaugaccugggacaucu

SEQ ID NO: 1371688 - RNA, 19 nt, Homo sapiens
  misc_RNA (1)...(19): siRNA sense strand
ugaaggaggcagccagcuu

SEQ ID NO: 1371689 - RNA, 19 nt, Homo sapiens
  misc_RNA (1)...(19): siRNA sense strand
ggaagacgaggagaucuac

SEQ ID NO: 1371690 - RNA, 19 nt, Homo sapiens
  misc_RNA (1)...(19): siRNA sense strand
ccucagccaagaccuacua

SEQ ID NO: 1371691 - RNA, 19 nt, Homo sapiens
  misc_RNA (1)...(19): siRNA sense strand
agucgcaagugcagaugaa

SEQ ID NO: 1371692 - RNA, 19 nt, Homo sapiens
  misc_RNA (1)...(19): siRNA sense strand
ucuacaaggaguucuuuga

SEQ ID NO: 1371693 - RNA, 19 nt, Homo sapiens
  misc_RNA (1)...(19): siRNA sense strand
ugcucuggcugcucuauga

SEQ ID NO: 1371694 - RNA, 19 nt, Homo sapiens
  misc_RNA (1)...(19): siRNA sense strand
gcagcgcaaaggccucuga

SEQ ID NO: 1371695 - RNA, 19 nt, Homo sapiens
  misc_RNA (1)...(19): siRNA sense strand
agauggagguggcguucau

SEQ ID NO: 1371696 - RNA, 19 nt, Homo sapiens
  misc_RNA (1)...(19): siRNA sense strand
gaugaagaagcagaaagug

SEQ ID NO: 1371697 - RNA, 19 nt, Homo sapiens
  misc_RNA (1)...(19): siRNA sense strand
cgcaagugcagaugaagaa

SEQ ID NO: 1371698 - RNA, 19 nt, Homo sapiens
  misc_RNA (1)...(19): siRNA sense strand
uccagucccucuucagcuu

SEQ ID NO: 1371699 - RNA, 19 nt, Homo sapiens
  misc_RNA (1)...(19): siRNA sense strand
gcgcugugaccgcaagaug

SEQ ID NO: 1371700 - RNA, 19 nt, Homo sapiens
  misc_RNA (1)...(19): siRNA sense strand
uggccgaccugucuaucau

SEQ ID NO: 1371701 - RNA, 19 nt, Homo sapiens
  misc_RNA (1)...(19): siRNA sense strand
aaggaguucuuugaaguag

SEQ ID NO: 1371702 - RNA, 19 nt, Homo sapiens
  misc_RNA (1)...(19): siRNA sense strand
cagccaagaccuacuaucg

SEQ ID NO: 1371703 - RNA, 19 nt, Homo sapiens
  misc_RNA (1)...(19): siRNA sense strand
gucccucuauccucgagaa

SEQ ID NO: 1371704 - RNA, 19 nt, Homo sapiens
  misc_RNA (1)...(19): siRNA sense strand
gccaucaagcugcaacuca

SEQ ID NO: 1371705 - RNA, 19 nt, Homo sapiens
  misc_RNA (1)...(19): siRNA sense strand
ccgacucgcuggagcuucu

SEQ ID NO: 1371706 - RNA, 19 nt, Homo sapiens
  misc_RNA (1)...(19): siRNA sense strand
gaaggucuccgaugucaua

SEQ ID NO: 1371707 - RNA, 19 nt, Homo sapiens
  misc_RNA (1)...(19): siRNA sense strand
gaucauacaugcgcuguga

SEQ ID NO: 1371708 - RNA, 19 nt, Homo sapiens
  misc_RNA (1)...(19): siRNA sense strand
gccgugagcuggugaagaa

SEQ ID NO: 1371709 - RNA, 19 nt, Homo sapiens
  misc_RNA (1)...(19): siRNA sense strand
ugaagaaggucuccgaugu

SEQ ID NO: 1371710 - RNA, 19 nt, Homo sapiens
  misc_RNA (1)...(19): siRNA sense strand
ggagcuggcuguaccugaa

SEQ ID NO: 1371711 - RNA, 19 nt, Homo sapiens
  misc_RNA (1)...(19): siRNA sense strand
gaucaugccuggguagugu

SEQ ID NO: 1371712 - RNA, 19 nt, Homo sapiens
  misc_RNA (1)...(19): siRNA sense strand
ugggacaucuggaaaggua

SEQ ID NO: 1371713 - RNA, 19 nt, Homo sapiens
  misc_RNA (1)...(19): siRNA sense strand
caaggaguucuuugaagua

SEQ ID NO: 1371714 - RNA, 19 nt, Homo sapiens
  misc_RNA (1)...(19): siRNA sense strand
acaaggaguucuuugaagu

SEQ ID NO: 1371715 - RNA, 19 nt, Homo sapiens
  misc_RNA (1)...(19): siRNA sense strand
gaaccuggcagaucuagag

SEQ ID NO: 1371716 - RNA, 19 nt, Homo sapiens
  misc_RNA (1)...(19): siRNA sense strand
ggucuccgaugucauaugg

SEQ ID NO: 1371717 - RNA, 19 nt, Homo sapiens
  misc_RNA (1)...(19): siRNA sense strand
ccacugucauccaggacua

SEQ ID NO: 1371718 - RNA, 19 nt, Homo sapiens
  misc_RNA (1)...(19): siRNA sense strand
acgaggagaucuacaagga

SEQ ID NO: 1371719 - RNA, 19 nt, Homo sapiens
  misc_RNA (1)...(19): siRNA sense strand
cgucaucccuaccaacguu

SEQ ID NO: 1371720 - RNA, 19 nt, Homo sapiens
  misc_RNA (1)...(19): siRNA sense strand
gaagaaggucuccgauguc

SEQ ID NO: 1371721 - RNA, 19 nt, Homo sapiens
  misc_RNA (1)...(19): siRNA sense strand
gggaagacgaggagaucua

SEQ ID NO: 1371722 - RNA, 19 nt, Homo sapiens
  misc_RNA (1)...(19): siRNA sense strand
gaacacaucuaccccuaca

SEQ ID NO: 1371723 - RNA, 19 nt, Homo sapiens
  misc_RNA (1)...(19): siRNA sense strand
gaagaugaagggcaugaag

SEQ ID NO: 1371724 - RNA, 19 nt, Homo sapiens
  misc_RNA (1)...(19): siRNA sense strand
ugacuacacucugucuuuc

SEQ ID NO: 1371725 - RNA, 19 nt, Homo sapiens
  misc_RNA (1)...(19): siRNA sense strand
cuacaaggaguucuuugaa

SEQ ID NO: 1371726 - RNA, 19 nt, Homo sapiens
  misc_RNA (1)...(19): siRNA sense strand
cagaaggugcgcauaguga

SEQ ID NO: 1371727 - RNA, 19 nt, Homo sapiens
  misc_RNA (1)...(19): siRNA sense strand
gccaucaacccuuccauug

SEQ ID NO: 1371728 - RNA, 19 nt, Homo sapiens
  misc_RNA (1)...(19): siRNA sense strand
gugacuacacucugucuuu

SEQ ID NO: 1371729 - RNA, 19 nt, Homo sapiens
  misc_RNA (1)...(19): siRNA sense strand
ugaaguagccaaugauguc

SEQ ID NO: 1371730 - RNA, 19 nt, Homo sapiens
  misc_RNA (1)...(19): siRNA sense strand
gaucuacaaggaguucuuu

SEQ ID NO: 1371731 - RNA, 19 nt, Homo sapiens
  misc_RNA (1)...(19): siRNA sense strand
gcagaaggugcgcauagug

SEQ ID NO: 1371732 - RNA, 19 nt, Homo sapiens
  misc_RNA (1)...(19): siRNA sense strand
aagaaggucuccgauguca

SEQ ID NO: 1371733 - RNA, 19 nt, Homo sapiens
  misc_RNA (1)...(19): siRNA sense strand
gaccuacuaucgggaugaa

SEQ ID NO: 1371734 - RNA, 19 nt, Homo sapiens
  misc_RNA (1)...(19): siRNA sense strand
uagggaaccuggcagaucu

SEQ ID NO: 1371735 - RNA, 19 nt, Homo sapiens
  misc_RNA (1)...(19): siRNA sense strand
ucuccgaugucauauggaa

SEQ ID NO: 1371736 - RNA, 19 nt, Homo sapiens
  misc_RNA (1)...(19): siRNA sense strand
gagaagaugaagggcauga

SEQ ID NO: 1371737 - RNA, 19 nt, Homo sapiens
  misc_RNA (1)...(19): siRNA sense strand
cgacguggugcgccuguuu

SEQ ID NO: 1371738 - RNA, 19 nt, Homo sapiens
  misc_RNA (1)...(19): siRNA sense strand
ucuuugaaguagccaauga

SEQ ID NO: 1371739 - RNA, 19 nt, Homo sapiens
  misc_RNA (1)...(19): siRNA sense strand
uacaaggaguucuuugaag

SEQ ID NO: 1371740 - RNA, 19 nt, Homo sapiens
  misc_RNA (1)...(19): siRNA sense strand
ccugaaaggaucauacaug

SEQ ID NO: 1371741 - RNA, 19 nt, Homo sapiens
  misc_RNA (1)...(19): siRNA sense strand
gaaguagccaaugauguca

SEQ ID NO: 1371742 - RNA, 19 nt, Homo sapiens
  misc_RNA (1)...(19): siRNA sense strand
ccacauccagucccucuuc

SEQ ID NO: 1371743 - RNA, 19 nt, Homo sapiens
  misc_RNA (1)...(19): siRNA sense strand
ggcagaaggugcgcauagu

SEQ ID NO: 1371744 - RNA, 19 nt, Homo sapiens
  misc_RNA (1)...(19): siRNA sense strand
gcagaugaagaagcagaaa

SEQ ID NO: 1371745 - RNA, 19 nt, Homo sapiens
  misc_RNA (1)...(19): siRNA sense strand
cagcuccgguguggccuuu

SEQ ID NO: 1371746 - RNA, 19 nt, Homo sapiens
  misc_RNA (1)...(19): siRNA sense strand
gaccugggacaucuggaaa

SEQ ID NO: 1371747 - RNA, 19 nt, Homo sapiens
  misc_RNA (1)...(19): siRNA sense strand
gagcuggcuguaccugaaa

SEQ ID NO: 1371748 - RNA, 19 nt, Homo sapiens
  misc_RNA (1)...(19): siRNA sense strand
cagacccacucacccucua

SEQ ID NO: 1371749 - RNA, 19 nt, Homo sapiens
  misc_RNA (1)...(19): siRNA sense strand
ggagaucuacaaggaguuc

SEQ ID NO: 1371750 - RNA, 19 nt, Homo sapiens
  misc_RNA (1)...(19): siRNA sense strand
gcugugaccgcaagaugga

SEQ ID NO: 1371751 - RNA, 19 nt, Homo sapiens
  misc_RNA (1)...(19): siRNA sense strand
ggaagccuccugggacugu

SEQ ID NO: 1371752 - RNA, 19 nt, Homo sapiens
  misc_RNA (1)...(19): siRNA sense strand
gggcugggccaccuuucuu

SEQ ID NO: 1371753 - RNA, 19 nt, Homo sapiens
  misc_RNA (1)...(19): siRNA sense strand
ucuaugaccugggacaucu

SEQ ID NO: 1371754 - RNA, 19 nt, Homo sapiens
  misc_RNA (1)...(19): siRNA sense strand
ugaaggaggcagccagcuu

SEQ ID NO: 1371755 - RNA, 19 nt, Homo sapiens
  misc_RNA (1)...(19): siRNA sense strand
ggaagacgaggagaucuac

SEQ ID NO: 1371756 - RNA, 19 nt, Homo sapiens
  misc_RNA (1)...(19): siRNA sense strand
ccucagccaagaccuacua

SEQ ID NO: 1371757 - RNA, 19 nt, Homo sapiens
  misc_RNA (1)...(19): siRNA sense strand
agucgcaagugcagaugaa

SEQ ID NO: 1371758 - RNA, 19 nt, Homo sapiens
  misc_RNA (1)...(19): siRNA sense strand
ucuacaaggaguucuuuga

SEQ ID NO: 1371759 - RNA, 19 nt, Homo sapiens
  misc_RNA (1)...(19): siRNA sense strand
ugcucuggcugcucuauga

SEQ ID NO: 1371760 - RNA, 19 nt, Homo sapiens
  misc_RNA (1)...(19): siRNA sense strand
gcagcgcaaaggccucuga

SEQ ID NO: 1371761 - RNA, 19 nt, Homo sapiens
  misc_RNA (1)...(19): siRNA sense strand
agauggagguggcguucau

SEQ ID NO: 1371762 - RNA, 19 nt, Homo sapiens
  misc_RNA (1)...(19): siRNA sense strand
gaugaagaagcagaaagug

SEQ ID NO: 1371763 - RNA, 19 nt, Homo sapiens
  misc_RNA (1)...(19): siRNA sense strand
cgcaagugcagaugaagaa

SEQ ID NO: 1371764 - RNA, 19 nt, Homo sapiens
  misc_RNA (1)...(19): siRNA sense strand
uccagucccucuucagcuu

SEQ ID NO: 1371765 - RNA, 19 nt, Homo sapiens
  misc_RNA (1)...(19): siRNA sense strand
gcgcugugaccgcaagaug

SEQ ID NO: 1371766 - RNA, 19 nt, Homo sapiens
  misc_RNA (1)...(19): siRNA sense strand
uggccgaccugucuaucau

SEQ ID NO: 1371767 - RNA, 19 nt, Homo sapiens
  misc_RNA (1)...(19): siRNA sense strand
aaggaguucuuugaaguag

SEQ ID NO: 1371768 - RNA, 19 nt, Homo sapiens
  misc_RNA (1)...(19): siRNA sense strand
cagccaagaccuacuaucg

SEQ ID NO: 1371769 - RNA, 19 nt, Homo sapiens
  misc_RNA (1)...(19): siRNA sense strand
gucccucuauccucgagaa

SEQ ID NO: 1371770 - RNA, 19 nt, Homo sapiens
  misc_RNA (1)...(19): siRNA sense strand
gccaucaagcugcaacuca

SEQ ID NO: 1371771 - RNA, 19 nt, Homo sapiens
  misc_RNA (1)...(19): siRNA sense strand
ccgacucgcuggagcuucu

SEQ ID NO: 1371772 - RNA, 19 nt, Homo sapiens
  misc_RNA (1)...(19): siRNA sense strand
gaaggucuccgaugucaua

SEQ ID NO: 1371773 - RNA, 19 nt, Homo sapiens
  misc_RNA (1)...(19): siRNA sense strand
gaucauacaugcgcuguga

SEQ ID NO: 1371774 - RNA, 19 nt, Homo sapiens
  misc_RNA (1)...(19): siRNA sense strand
gccgugagcuggugaagaa

SEQ ID NO: 1371775 - RNA, 19 nt, Homo sapiens
  misc_RNA (1)...(19): siRNA sense strand
ugaagaaggucuccgaugu

SEQ ID NO: 1371776 - RNA, 19 nt, Homo sapiens
  misc_RNA (1)...(19): siRNA sense strand
ggagcuggcuguaccugaa

SEQ ID NO: 1371777 - RNA, 19 nt, Homo sapiens
  misc_RNA (1)...(19): siRNA sense strand
gaucaugccuggguagugu

SEQ ID NO: 1371778 - RNA, 19 nt, Homo sapiens
  misc_RNA (1)...(19): siRNA sense strand
ugggacaucuggaaaggua

SEQ ID NO: 1371779 - RNA, 19 nt, Homo sapiens
  misc_RNA (1)...(19): siRNA sense strand
caaggaguucuuugaagua

SEQ ID NO: 1371780 - RNA, 19 nt, Homo sapiens
  misc_RNA (1)...(19): siRNA sense strand
acaaggaguucuuugaagu

SEQ ID NO: 1371781 - RNA, 19 nt, Homo sapiens
  misc_RNA (1)...(19): siRNA sense strand
gaaccuggcagaucuagag

SEQ ID NO: 1371782 - RNA, 19 nt, Homo sapiens
  misc_RNA (1)...(19): siRNA sense strand
ggucuccgaugucauaugg

SEQ ID NO: 1371783 - RNA, 19 nt, Homo sapiens
  misc_RNA (1)...(19): siRNA sense strand
ccacugucauccaggacua

SEQ ID NO: 1371784 - RNA, 19 nt, Homo sapiens
  misc_RNA (1)...(19): siRNA sense strand
acgaggagaucuacaagga

SEQ ID NO: 1371785 - RNA, 19 nt, Homo sapiens
  misc_RNA (1)...(19): siRNA sense strand
cgucaucccuaccaacguu

SEQ ID NO: 1371786 - RNA, 19 nt, Homo sapiens
  misc_RNA (1)...(19): siRNA sense strand
gaagaaggucuccgauguc

SEQ ID NO: 1371787 - RNA, 19 nt, Homo sapiens
  misc_RNA (1)...(19): siRNA sense strand
gggaagacgaggagaucua

SEQ ID NO: 1371788 - RNA, 19 nt, Homo sapiens
  misc_RNA (1)...(19): siRNA sense strand
gaacacaucuaccccuaca

SEQ ID NO: 1371789 - RNA, 19 nt, Homo sapiens
  misc_RNA (1)...(19): siRNA sense strand
gaagaugaagggcaugaag

SEQ ID NO: 1371790 - RNA, 19 nt, Homo sapiens
  misc_RNA (1)...(19): siRNA sense strand
ugacuacacucugucuuuc

SEQ ID NO: 1371791 - RNA, 19 nt, Homo sapiens
  misc_RNA (1)...(19): siRNA sense strand
cuacaaggaguucuuugaa

SEQ ID NO: 1371792 - RNA, 19 nt, Homo sapiens
  misc_RNA (1)...(19): siRNA sense strand
cagaaggugcgcauaguga

SEQ ID NO: 1371793 - RNA, 19 nt, Homo sapiens
  misc_RNA (1)...(19): siRNA sense strand
gccaucaacccuuccauug

SEQ ID NO: 1371794 - RNA, 19 nt, Homo sapiens
  misc_RNA (1)...(19): siRNA sense strand
gugacuacacucugucuuu

SEQ ID NO: 1371795 - RNA, 19 nt, Homo sapiens
  misc_RNA (1)...(19): siRNA sense strand
ugaaguagccaaugauguc

SEQ ID NO: 1371796 - RNA, 19 nt, Homo sapiens
  misc_RNA (1)...(19): siRNA sense strand
gaucuacaaggaguucuuu

SEQ ID NO: 1371797 - RNA, 19 nt, Homo sapiens
  misc_RNA (1)...(19): siRNA sense strand
gcagaaggugcgcauagug

SEQ ID NO: 1371798 - RNA, 19 nt, Homo sapiens
  misc_RNA (1)...(19): siRNA sense strand
aagaaggucuccgauguca

SEQ ID NO: 1371799 - RNA, 19 nt, Homo sapiens
  misc_RNA (1)...(19): siRNA sense strand
gaccuacuaucgggaugaa

SEQ ID NO: 1371800 - RNA, 19 nt, Homo sapiens
  misc_RNA (1)...(19): siRNA sense strand
uagggaaccuggcagaucu

SEQ ID NO: 1371801 - RNA, 19 nt, Homo sapiens
  misc_RNA (1)...(19): siRNA sense strand
ucuccgaugucauauggaa

SEQ ID NO: 1371802 - RNA, 19 nt, Homo sapiens
  misc_RNA (1)...(19): siRNA sense strand
gagaagaugaagggcauga

SEQ ID NO: 1371803 - RNA, 19 nt, Homo sapiens
  misc_RNA (1)...(19): siRNA sense strand
cgacguggugcgccuguuu

SEQ ID NO: 1371804 - RNA, 19 nt, Homo sapiens
  misc_RNA (1)...(19): siRNA sense strand
ucuuugaaguagccaauga

SEQ ID NO: 1371805 - RNA, 19 nt, Homo sapiens
  misc_RNA (1)...(19): siRNA sense strand
uacaaggaguucuuugaag

SEQ ID NO: 1371806 - RNA, 19 nt, Homo sapiens
  misc_RNA (1)...(19): siRNA sense strand
ccugaaaggaucauacaug

SEQ ID NO: 1371807 - RNA, 19 nt, Homo sapiens
  misc_RNA (1)...(19): siRNA sense strand
gaaguagccaaugauguca

SEQ ID NO: 1371808 - RNA, 19 nt, Homo sapiens
  misc_RNA (1)...(19): siRNA sense strand
ccacauccagucccucuuc

SEQ ID NO: 1371809 - RNA, 19 nt, Homo sapiens
  misc_RNA (1)...(19): siRNA sense strand
ggcagaaggugcgcauagu

SEQ ID NO: 1371810 - RNA, 19 nt, Homo sapiens
  misc_RNA (1)...(19): siRNA sense strand
gcagaugaagaagcagaaa

SEQ ID NO: 1371811 - RNA, 19 nt, Homo sapiens
  misc_RNA (1)...(19): siRNA sense strand
cagcuccgguguggccuuu

SEQ ID NO: 1371812 - RNA, 19 nt, Homo sapiens
  misc_RNA (1)...(19): siRNA sense strand
gaccugggacaucuggaaa

SEQ ID NO: 1371813 - RNA, 19 nt, Homo sapiens
  misc_RNA (1)...(19): siRNA sense strand
gagcuggcuguaccugaaa

SEQ ID NO: 1371814 - RNA, 19 nt, Homo sapiens
  misc_RNA (1)...(19): siRNA sense strand
cagacccacucacccucua

SEQ ID NO: 1371815 - RNA, 19 nt, Homo sapiens
  misc_RNA (1)...(19): siRNA sense strand
ggagaucuacaaggaguuc

SEQ ID NO: 1371816 - RNA, 19 nt, Homo sapiens
  misc_RNA (1)...(19): siRNA sense strand
gcugugaccgcaagaugga

SEQ ID NO: 1371817 - RNA, 19 nt, Homo sapiens
  misc_RNA (1)...(19): siRNA sense strand
ggaagccuccugggacugu

SEQ ID NO: 1371818 - RNA, 19 nt, Homo sapiens
  misc_RNA (1)...(19): siRNA sense strand
gggcugggccaccuuucuu

SEQ ID NO: 1371819 - RNA, 19 nt, Homo sapiens
  misc_RNA (1)...(19): siRNA sense strand
ucuaugaccugggacaucu

SEQ ID NO: 1371820 - RNA, 19 nt, Homo sapiens
  misc_RNA (1)...(19): siRNA sense strand
ugaaggaggcagccagcuu

SEQ ID NO: 1371821 - RNA, 19 nt, Homo sapiens
  misc_RNA (1)...(19): siRNA sense strand
ggaagacgaggagaucuac

SEQ ID NO: 1371822 - RNA, 19 nt, Homo sapiens
  misc_RNA (1)...(19): siRNA sense strand
ccucagccaagaccuacua

SEQ ID NO: 1371823 - RNA, 19 nt, Homo sapiens
  misc_RNA (1)...(19): siRNA sense strand
agucgcaagugcagaugaa

SEQ ID NO: 1371824 - RNA, 19 nt, Homo sapiens
  misc_RNA (1)...(19): siRNA sense strand
ucuacaaggaguucuuuga

SEQ ID NO: 1371825 - RNA, 19 nt, Homo sapiens
  misc_RNA (1)...(19): siRNA sense strand
ugcucuggcugcucuauga

SEQ ID NO: 1371826 - RNA, 19 nt, Homo sapiens
  misc_RNA (1)...(19): siRNA sense strand
gcagcgcaaaggccucuga

SEQ ID NO: 1371827 - RNA, 19 nt, Homo sapiens
  misc_RNA (1)...(19): siRNA sense strand
agauggagguggcguucau

SEQ ID NO: 1371828 - RNA, 19 nt, Homo sapiens
  misc_RNA (1)...(19): siRNA sense strand
gaugaagaagcagaaagug

SEQ ID NO: 1371829 - RNA, 19 nt, Homo sapiens
  misc_RNA (1)...(19): siRNA sense strand
cgcaagugcagaugaagaa

SEQ ID NO: 1371830 - RNA, 19 nt, Homo sapiens
  misc_RNA (1)...(19): siRNA sense strand
uccagucccucuucagcuu

SEQ ID NO: 1371831 - RNA, 19 nt, Homo sapiens
  misc_RNA (1)...(19): siRNA sense strand
gcgcugugaccgcaagaug

SEQ ID NO: 1371832 - RNA, 19 nt, Homo sapiens
  misc_RNA (1)...(19): siRNA sense strand
uggccgaccugucuaucau

SEQ ID NO: 1371833 - RNA, 19 nt, Homo sapiens
  misc_RNA (1)...(19): siRNA sense strand
aaggaguucuuugaaguag

SEQ ID NO: 1371834 - RNA, 19 nt, Homo sapiens
  misc_RNA (1)...(19): siRNA sense strand
cagccaagaccuacuaucg

SEQ ID NO: 1371835 - RNA, 19 nt, Homo sapiens
  misc_RNA (1)...(19): siRNA sense strand
gucccucuauccucgagaa

SEQ ID NO: 1371836 - RNA, 19 nt, Homo sapiens
  misc_RNA (1)...(19): siRNA sense strand
gccaucaagcugcaacuca

SEQ ID NO: 1371837 - RNA, 19 nt, Homo sapiens
  misc_RNA (1)...(19): siRNA sense strand
ccgacucgcuggagcuucu

SEQ ID NO: 1371838 - RNA, 19 nt, Homo sapiens
  misc_RNA (1)...(19): siRNA sense strand
gaaggucuccgaugucaua

SEQ ID NO: 1371839 - RNA, 19 nt, Homo sapiens
  misc_RNA (1)...(19): siRNA sense strand
gaucauacaugcgcuguga

SEQ ID NO: 1371840 - RNA, 19 nt, Homo sapiens
  misc_RNA (1)...(19): siRNA sense strand
gccgugagcuggugaagaa

SEQ ID NO: 1371841 - RNA, 19 nt, Homo sapiens
  misc_RNA (1)...(19): siRNA sense strand
ugaagaaggucuccgaugu

SEQ ID NO: 1371842 - RNA, 19 nt, Homo sapiens
  misc_RNA (1)...(19): siRNA sense strand
ggagcuggcuguaccugaa

SEQ ID NO: 1371843 - RNA, 19 nt, Homo sapiens
  misc_RNA (1)...(19): siRNA sense strand
gaucaugccuggguagugu

SEQ ID NO: 1371844 - RNA, 19 nt, Homo sapiens
  misc_RNA (1)...(19): siRNA sense strand
ugggacaucuggaaaggua

SEQ ID NO: 1371845 - RNA, 19 nt, Homo sapiens
  misc_RNA (1)...(19): siRNA sense strand
caaggaguucuuugaagua

SEQ ID NO: 1371846 - RNA, 19 nt, Homo sapiens
  misc_RNA (1)...(19): siRNA sense strand
acaaggaguucuuugaagu

SEQ ID NO: 1371847 - RNA, 19 nt, Homo sapiens
  misc_RNA (1)...(19): siRNA sense strand
gaaccuggcagaucuagag

SEQ ID NO: 1371848 - RNA, 19 nt, Homo sapiens
  misc_RNA (1)...(19): siRNA sense strand
ggucuccgaugucauaugg

SEQ ID NO: 1371849 - RNA, 19 nt, Homo sapiens
  misc_RNA (1)...(19): siRNA sense strand
ccacugucauccaggacua

SEQ ID NO: 1371850 - RNA, 19 nt, Homo sapiens
  misc_RNA (1)...(19): siRNA sense strand
acgaggagaucuacaagga

SEQ ID NO: 1371851 - RNA, 19 nt, Homo sapiens
  misc_RNA (1)...(19): siRNA sense strand
cgucaucccuaccaacguu

SEQ ID NO: 1371852 - RNA, 19 nt, Homo sapiens
  misc_RNA (1)...(19): siRNA sense strand
gaagaaggucuccgauguc

SEQ ID NO: 1371853 - RNA, 19 nt, Homo sapiens
  misc_RNA (1)...(19): siRNA sense strand
gggaagacgaggagaucua

SEQ ID NO: 1371854 - RNA, 19 nt, Homo sapiens
  misc_RNA (1)...(19): siRNA sense strand
gaacacaucuaccccuaca

SEQ ID NO: 1371855 - RNA, 19 nt, Homo sapiens
  misc_RNA (1)...(19): siRNA sense strand
gaagaugaagggcaugaag

SEQ ID NO: 1371856 - RNA, 19 nt, Homo sapiens
  misc_RNA (1)...(19): siRNA sense strand
ugacuacacucugucuuuc

SEQ ID NO: 1371857 - RNA, 19 nt, Homo sapiens
  misc_RNA (1)...(19): siRNA sense strand
cuacaaggaguucuuugaa

SEQ ID NO: 1371858 - RNA, 19 nt, Homo sapiens
  misc_RNA (1)...(19): siRNA sense strand
cagaaggugcgcauaguga

SEQ ID NO: 1371859 - RNA, 19 nt, Homo sapiens
  misc_RNA (1)...(19): siRNA sense strand
gccaucaacccuuccauug

SEQ ID NO: 1371860 - RNA, 19 nt, Homo sapiens
  misc_RNA (1)...(19): siRNA sense strand
gugacuacacucugucuuu

SEQ ID NO: 1371861 - RNA, 19 nt, Homo sapiens
  misc_RNA (1)...(19): siRNA sense strand
ugaaguagccaaugauguc

SEQ ID NO: 1371862 - RNA, 19 nt, Homo sapiens
  misc_RNA (1)...(19): siRNA sense strand
gaucuacaaggaguucuuu

SEQ ID NO: 1371863 - RNA, 19 nt, Homo sapiens
  misc_RNA (1)...(19): siRNA sense strand
gcagaaggugcgcauagug

SEQ ID NO: 1371864 - RNA, 19 nt, Homo sapiens
  misc_RNA (1)...(19): siRNA sense strand
aagaaggucuccgauguca

SEQ ID NO: 1371865 - RNA, 19 nt, Homo sapiens
  misc_RNA (1)...(19): siRNA sense strand
gaccuacuaucgggaugaa

SEQ ID NO: 1371866 - RNA, 19 nt, Homo sapiens
  misc_RNA (1)...(19): siRNA sense strand
uagggaaccuggcagaucu

SEQ ID NO: 1371867 - RNA, 19 nt, Homo sapiens
  misc_RNA (1)...(19): siRNA sense strand
ucuccgaugucauauggaa

SEQ ID NO: 1371868 - RNA, 19 nt, Homo sapiens
  misc_RNA (1)...(19): siRNA sense strand
gagaagaugaagggcauga

SEQ ID NO: 1371869 - RNA, 19 nt, Homo sapiens
  misc_RNA (1)...(19): siRNA sense strand
cgacguggugcgccuguuu

SEQ ID NO: 1371870 - RNA, 19 nt, Homo sapiens
  misc_RNA (1)...(19): siRNA sense strand
ucuuugaaguagccaauga

SEQ ID NO: 1371871 - RNA, 19 nt, Homo sapiens
  misc_RNA (1)...(19): siRNA sense strand
uacaaggaguucuuugaag

SEQ ID NO: 1371872 - RNA, 19 nt, Homo sapiens
  misc_RNA (1)...(19): siRNA sense strand
ccugaaaggaucauacaug

SEQ ID NO: 1371873 - RNA, 19 nt, Homo sapiens
  misc_RNA (1)...(19): siRNA sense strand
gaaguagccaaugauguca

SEQ ID NO: 1371874 - RNA, 19 nt, Homo sapiens
  misc_RNA (1)...(19): siRNA sense strand
ccacauccagucccucuuc

SEQ ID NO: 1371875 - RNA, 19 nt, Homo sapiens
  misc_RNA (1)...(19): siRNA sense strand
ggcagaaggugcgcauagu

SEQ ID NO: 1371876 - RNA, 19 nt, Homo sapiens
  misc_RNA (1)...(19): siRNA sense strand
gcagaugaagaagcagaaa

SEQ ID NO: 1371877 - RNA, 19 nt, Homo sapiens
  misc_RNA (1)...(19): siRNA sense strand
cagcuccgguguggccuuu

SEQ ID NO: 1371878 - RNA, 19 nt, Homo sapiens
  misc_RNA (1)...(19): siRNA sense strand
gaccugggacaucuggaaa

SEQ ID NO: 1371879 - RNA, 19 nt, Homo sapiens
  misc_RNA (1)...(19): siRNA sense strand
gagcuggcuguaccugaaa

SEQ ID NO: 1371880 - RNA, 19 nt, Homo sapiens
  misc_RNA (1)...(19): siRNA sense strand
cagacccacucacccucua

SEQ ID NO: 1371881 - RNA, 19 nt, Homo sapiens
  misc_RNA (1)...(19): siRNA sense strand
ggagaucuacaaggaguuc

SEQ ID NO: 1371882 - RNA, 19 nt, Homo sapiens
  misc_RNA (1)...(19): siRNA sense strand
gcugugaccgcaagaugga

SEQ ID NO: 1371883 - RNA, 19 nt, Homo sapiens
  misc_RNA (1)...(19): siRNA sense strand
ggaagccuccugggacugu

SEQ ID NO: 1371884 - RNA, 19 nt, Homo sapiens
  misc_RNA (1)...(19): siRNA sense strand
gggcugggccaccuuucuu

SEQ ID NO: 1371885 - RNA, 19 nt, Homo sapiens
  misc_RNA (1)...(19): siRNA sense strand
ucuaugaccugggacaucu

SEQ ID NO: 1371886 - RNA, 19 nt, Homo sapiens
  misc_RNA (1)...(19): siRNA sense strand
ugaaggaggcagccagcuu

SEQ ID NO: 1371887 - RNA, 19 nt, Homo sapiens
  misc_RNA (1)...(19): siRNA sense strand
ggaagacgaggagaucuac

SEQ ID NO: 1371888 - RNA, 19 nt, Homo sapiens
  misc_RNA (1)...(19): siRNA sense strand
ccucagccaagaccuacua

SEQ ID NO: 1371889 - RNA, 19 nt, Homo sapiens
  misc_RNA (1)...(19): siRNA sense strand
agucgcaagugcagaugaa

SEQ ID NO: 1371890 - RNA, 19 nt, Homo sapiens
  misc_RNA (1)...(19): siRNA sense strand
ucuacaaggaguucuuuga

SEQ ID NO: 1371891 - RNA, 19 nt, Homo sapiens
  misc_RNA (1)...(19): siRNA sense strand
ugcucuggcugcucuauga

SEQ ID NO: 1371892 - RNA, 19 nt, Homo sapiens
  misc_RNA (1)...(19): siRNA sense strand
gcagcgcaaaggccucuga

SEQ ID NO: 1371893 - RNA, 19 nt, Homo sapiens
  misc_RNA (1)...(19): siRNA sense strand
agauggagguggcguucau

SEQ ID NO: 1371894 - RNA, 19 nt, Homo sapiens
  misc_RNA (1)...(19): siRNA sense strand
gaugaagaagcagaaagug

SEQ ID NO: 1371895 - RNA, 19 nt, Homo sapiens
  misc_RNA (1)...(19): siRNA sense strand
cgcaagugcagaugaagaa

SEQ ID NO: 1371896 - RNA, 19 nt, Homo sapiens
  misc_RNA (1)...(19): siRNA sense strand
uccagucccucuucagcuu

SEQ ID NO: 1371897 - RNA, 19 nt, Homo sapiens
  misc_RNA (1)...(19): siRNA sense strand
gcgcugugaccgcaagaug

SEQ ID NO: 1371898 - RNA, 19 nt, Homo sapiens
  misc_RNA (1)...(19): siRNA sense strand
uggccgaccugucuaucau

SEQ ID NO: 1371899 - RNA, 19 nt, Homo sapiens
  misc_RNA (1)...(19): siRNA sense strand
aaggaguucuuugaaguag

SEQ ID NO: 1371900 - RNA, 19 nt, Homo sapiens
  misc_RNA (1)...(19): siRNA sense strand
cagccaagaccuacuaucg

SEQ ID NO: 1371901 - RNA, 19 nt, Homo sapiens
  misc_RNA (1)...(19): siRNA sense strand
gucccucuauccucgagaa

SEQ ID NO: 1371902 - RNA, 19 nt, Homo sapiens
  misc_RNA (1)...(19): siRNA sense strand
gccaucaagcugcaacuca

SEQ ID NO: 1371903 - RNA, 19 nt, Homo sapiens
  misc_RNA (1)...(19): siRNA sense strand
ccgacucgcuggagcuucu

SEQ ID NO: 1371904 - RNA, 19 nt, Homo sapiens
  misc_RNA (1)...(19): siRNA sense strand
gaaggucuccgaugucaua

SEQ ID NO: 1371905 - RNA, 19 nt, Homo sapiens
  misc_RNA (1)...(19): siRNA sense strand
gaucauacaugcgcuguga

SEQ ID NO: 1371906 - RNA, 19 nt, Homo sapiens
  misc_RNA (1)...(19): siRNA sense strand
gccgugagcuggugaagaa

SEQ ID NO: 1371907 - RNA, 19 nt, Homo sapiens
  misc_RNA (1)...(19): siRNA sense strand
ugaagaaggucuccgaugu

SEQ ID NO: 1371908 - RNA, 19 nt, Homo sapiens
  misc_RNA (1)...(19): siRNA sense strand
ggagcuggcuguaccugaa

SEQ ID NO: 1371909 - RNA, 19 nt, Homo sapiens
  misc_RNA (1)...(19): siRNA sense strand
gaucaugccuggguagugu

SEQ ID NO: 1371910 - RNA, 19 nt, Homo sapiens
  misc_RNA (1)...(19): siRNA sense strand
ugggacaucuggaaaggua

SEQ ID NO: 1371911 - RNA, 19 nt, Homo sapiens
  misc_RNA (1)...(19): siRNA sense strand
caaggaguucuuugaagua

SEQ ID NO: 1371912 - RNA, 19 nt, Homo sapiens
  misc_RNA (1)...(19): siRNA sense strand
acaaggaguucuuugaagu

SEQ ID NO: 1371913 - RNA, 19 nt, Homo sapiens
  misc_RNA (1)...(19): siRNA sense strand
gaaccuggcagaucuagag

SEQ ID NO: 1371914 - RNA, 19 nt, Homo sapiens
  misc_RNA (1)...(19): siRNA sense strand
ggucuccgaugucauaugg

SEQ ID NO: 1371915 - RNA, 19 nt, Homo sapiens
  misc_RNA (1)...(19): siRNA sense strand
ccacugucauccaggacua

SEQ ID NO: 1371916 - RNA, 19 nt, Homo sapiens
  misc_RNA (1)...(19): siRNA sense strand
acgaggagaucuacaagga

SEQ ID NO: 1371917 - RNA, 19 nt, Homo sapiens
  misc_RNA (1)...(19): siRNA sense strand
cgucaucccuaccaacguu

SEQ ID NO: 1371918 - RNA, 19 nt, Homo sapiens
  misc_RNA (1)...(19): siRNA sense strand
gaagaaggucuccgauguc

SEQ ID NO: 1371919 - RNA, 19 nt, Homo sapiens
  misc_RNA (1)...(19): siRNA sense strand
gggaagacgaggagaucua

SEQ ID NO: 1371920 - RNA, 19 nt, Homo sapiens
  misc_RNA (1)...(19): siRNA sense strand
gaacacaucuaccccuaca

SEQ ID NO: 1371921 - RNA, 19 nt, Homo sapiens
  misc_RNA (1)...(19): siRNA sense strand
gaagaugaagggcaugaag

SEQ ID NO: 1371922 - RNA, 19 nt, Homo sapiens
  misc_RNA (1)...(19): siRNA sense strand
ugacuacacucugucuuuc

SEQ ID NO: 1371923 - RNA, 19 nt, Homo sapiens
  misc_RNA (1)...(19): siRNA sense strand
cuacaaggaguucuuugaa

SEQ ID NO: 1371924 - RNA, 19 nt, Homo sapiens
  misc_RNA (1)...(19): siRNA sense strand
cagaaggugcgcauaguga

SEQ ID NO: 1371925 - RNA, 19 nt, Homo sapiens
  misc_RNA (1)...(19): siRNA sense strand
gccaucaacccuuccauug

SEQ ID NO: 1371926 - RNA, 19 nt, Homo sapiens
  misc_RNA (1)...(19): siRNA sense strand
gugacuacacucugucuuu

SEQ ID NO: 1371927 - RNA, 19 nt, Homo sapiens
  misc_RNA (1)...(19): siRNA sense strand
ugaaguagccaaugauguc

SEQ ID NO: 1371928 - RNA, 19 nt, Homo sapiens
  misc_RNA (1)...(19): siRNA sense strand
gaucuacaaggaguucuuu

SEQ ID NO: 1371929 - RNA, 19 nt, Homo sapiens
  misc_RNA (1)...(19): siRNA sense strand
gcagaaggugcgcauagug

SEQ ID NO: 1371930 - RNA, 19 nt, Homo sapiens
  misc_RNA (1)...(19): siRNA sense strand
aagaaggucuccgauguca

SEQ ID NO: 1371931 - RNA, 19 nt, Homo sapiens
  misc_RNA (1)...(19): siRNA sense strand
gaccuacuaucgggaugaa

SEQ ID NO: 1371932 - RNA, 19 nt, Homo sapiens
  misc_RNA (1)...(19): siRNA sense strand
uagggaaccuggcagaucu

SEQ ID NO: 1371933 - RNA, 19 nt, Homo sapiens
  misc_RNA (1)...(19): siRNA sense strand
ucuccgaugucauauggaa

SEQ ID NO: 1371934 - RNA, 19 nt, Homo sapiens
  misc_RNA (1)...(19): siRNA sense strand
gagaagaugaagggcauga

SEQ ID NO: 1371935 - RNA, 19 nt, Homo sapiens
  misc_RNA (1)...(19): siRNA sense strand
cgacguggugcgccuguuu

SEQ ID NO: 1371936 - RNA, 19 nt, Homo sapiens
  misc_RNA (1)...(19): siRNA sense strand
ucuuugaaguagccaauga

SEQ ID NO: 1371937 - RNA, 19 nt, Homo sapiens
  misc_RNA (1)...(19): siRNA sense strand
uacaaggaguucuuugaag

SEQ ID NO: 1371938 - RNA, 19 nt, Homo sapiens
  misc_RNA (1)...(19): siRNA sense strand
ccugaaaggaucauacaug

SEQ ID NO: 1371939 - RNA, 19 nt, Homo sapiens
  misc_RNA (1)...(19): siRNA sense strand
gaaguagccaaugauguca

SEQ ID NO: 1371940 - RNA, 19 nt, Homo sapiens
  misc_RNA (1)...(19): siRNA sense strand
ccacauccagucccucuuc

SEQ ID NO: 1371941 - RNA, 19 nt, Homo sapiens
  misc_RNA (1)...(19): siRNA sense strand
ggcagaaggugcgcauagu

SEQ ID NO: 1371942 - RNA, 19 nt, Homo sapiens
  misc_RNA (1)...(19): siRNA sense strand
gcagaugaagaagcagaaa

SEQ ID NO: 1371943 - RNA, 19 nt, Homo sapiens
  misc_RNA (1)...(19): siRNA sense strand
cagcuccgguguggccuuu

SEQ ID NO: 1371944 - RNA, 19 nt, Homo sapiens
  misc_RNA (1)...(19): siRNA sense strand
gaccugggacaucuggaaa

SEQ ID NO: 1371945 - RNA, 19 nt, Homo sapiens
  misc_RNA (1)...(19): siRNA sense strand
gagcuggcuguaccugaaa

SEQ ID NO: 1371946 - RNA, 19 nt, Homo sapiens
  misc_RNA (1)...(19): siRNA sense strand
cagacccacucacccucua

SEQ ID NO: 1371947 - RNA, 19 nt, Homo sapiens
  misc_RNA (1)...(19): siRNA sense strand
ggagaucuacaaggaguuc

SEQ ID NO: 1371948 - RNA, 19 nt, Homo sapiens
  misc_RNA (1)...(19): siRNA sense strand
gcugugaccgcaagaugga

SEQ ID NO: 1371949 - RNA, 19 nt, Homo sapiens
  misc_RNA (1)...(19): siRNA sense strand
ggaagccuccugggacugu

SEQ ID NO: 1371950 - RNA, 19 nt, Homo sapiens
  misc_RNA (1)...(19): siRNA sense strand
gggcugggccaccuuucuu

SEQ ID NO: 1371951 - RNA, 19 nt, Homo sapiens
  misc_RNA (1)...(19): siRNA sense strand
ucuaugaccugggacaucu

SEQ ID NO: 1371952 - RNA, 19 nt, Homo sapiens
  misc_RNA (1)...(19): siRNA sense strand
ugaaggaggcagccagcuu

SEQ ID NO: 1371953 - RNA, 19 nt, Homo sapiens
  misc_RNA (1)...(19): siRNA sense strand
ggaagacgaggagaucuac

SEQ ID NO: 1371954 - RNA, 19 nt, Homo sapiens
  misc_RNA (1)...(19): siRNA sense strand
ccucagccaagaccuacua

SEQ ID NO: 1371955 - RNA, 19 nt, Homo sapiens
  misc_RNA (1)...(19): siRNA sense strand
agucgcaagugcagaugaa

SEQ ID NO: 1371956 - RNA, 19 nt, Homo sapiens
  misc_RNA (1)...(19): siRNA sense strand
ucuacaaggaguucuuuga

SEQ ID NO: 1371957 - RNA, 19 nt, Homo sapiens
  misc_RNA (1)...(19): siRNA sense strand
ugcucuggcugcucuauga

SEQ ID NO: 1371958 - RNA, 19 nt, Homo sapiens
  misc_RNA (1)...(19): siRNA sense strand
gcagcgcaaaggccucuga

SEQ ID NO: 1371959 - RNA, 19 nt, Homo sapiens
  misc_RNA (1)...(19): siRNA sense strand
agauggagguggcguucau

SEQ ID NO: 1371960 - RNA, 19 nt, Homo sapiens
  misc_RNA (1)...(19): siRNA sense strand
gaugaagaagcagaaagug

SEQ ID NO: 1371961 - RNA, 19 nt, Homo sapiens
  misc_RNA (1)...(19): siRNA sense strand
cgcaagugcagaugaagaa

SEQ ID NO: 1371962 - RNA, 19 nt, Homo sapiens
  misc_RNA (1)...(19): siRNA sense strand
uccagucccucuucagcuu

SEQ ID NO: 1371963 - RNA, 19 nt, Homo sapiens
  misc_RNA (1)...(19): siRNA sense strand
gcgcugugaccgcaagaug

SEQ ID NO: 1371964 - RNA, 19 nt, Homo sapiens
  misc_RNA (1)...(19): siRNA sense strand
uggccgaccugucuaucau

SEQ ID NO: 1371965 - RNA, 19 nt, Homo sapiens
  misc_RNA (1)...(19): siRNA sense strand
aaggaguucuuugaaguag

SEQ ID NO: 1371966 - RNA, 19 nt, Homo sapiens
  misc_RNA (1)...(19): siRNA sense strand
cagccaagaccuacuaucg

SEQ ID NO: 1371967 - RNA, 19 nt, Homo sapiens
  misc_RNA (1)...(19): siRNA sense strand
gucccucuauccucgagaa

SEQ ID NO: 1371968 - RNA, 19 nt, Homo sapiens
  misc_RNA (1)...(19): siRNA sense strand
gccaucaagcugcaacuca

SEQ ID NO: 1371969 - RNA, 19 nt, Homo sapiens
  misc_RNA (1)...(19): siRNA sense strand
ccgacucgcuggagcuucu

SEQ ID NO: 1371970 - RNA, 19 nt, Homo sapiens
  misc_RNA (1)...(19): siRNA sense strand
gaaggucuccgaugucaua

SEQ ID NO: 1371971 - RNA, 19 nt, Homo sapiens
  misc_RNA (1)...(19): siRNA sense strand
gaucauacaugcgcuguga

SEQ ID NO: 1371972 - RNA, 19 nt, Homo sapiens
  misc_RNA (1)...(19): siRNA sense strand
gccgugagcuggugaagaa

SEQ ID NO: 1371973 - RNA, 19 nt, Homo sapiens
  misc_RNA (1)...(19): siRNA sense strand
ugaagaaggucuccgaugu

SEQ ID NO: 1371974 - RNA, 19 nt, Homo sapiens
  misc_RNA (1)...(19): siRNA sense strand
ggagcuggcuguaccugaa

SEQ ID NO: 1371975 - RNA, 19 nt, Homo sapiens
  misc_RNA (1)...(19): siRNA sense strand
gaucaugccuggguagugu

SEQ ID NO: 1371976 - RNA, 19 nt, Homo sapiens
  misc_RNA (1)...(19): siRNA sense strand
ugggacaucuggaaaggua

SEQ ID NO: 1371977 - RNA, 19 nt, Homo sapiens
  misc_RNA (1)...(19): siRNA sense strand
caaggaguucuuugaagua

SEQ ID NO: 1371978 - RNA, 19 nt, Homo sapiens
  misc_RNA (1)...(19): siRNA sense strand
acaaggaguucuuugaagu

SEQ ID NO: 1371979 - RNA, 19 nt, Homo sapiens
  misc_RNA (1)...(19): siRNA sense strand
gaaccuggcagaucuagag

SEQ ID NO: 1371980 - RNA, 19 nt, Homo sapiens
  misc_RNA (1)...(19): siRNA sense strand
ggucuccgaugucauaugg

SEQ ID NO: 1371981 - RNA, 19 nt, Homo sapiens
  misc_RNA (1)...(19): siRNA sense strand
ccacugucauccaggacua

SEQ ID NO: 1371982 - RNA, 19 nt, Homo sapiens
  misc_RNA (1)...(19): siRNA sense strand
acgaggagaucuacaagga

SEQ ID NO: 1371983 - RNA, 19 nt, Homo sapiens
  misc_RNA (1)...(19): siRNA sense strand
cgucaucccuaccaacguu

SEQ ID NO: 1371984 - RNA, 19 nt, Homo sapiens
  misc_RNA (1)...(19): siRNA sense strand
gaagaaggucuccgauguc

SEQ ID NO: 1371985 - RNA, 19 nt, Homo sapiens
  misc_RNA (1)...(19): siRNA sense strand
gggaagacgaggagaucua

SEQ ID NO: 1371986 - RNA, 19 nt, Homo sapiens
  misc_RNA (1)...(19): siRNA sense strand
gaacacaucuaccccuaca

SEQ ID NO: 1371987 - RNA, 19 nt, Homo sapiens
  misc_RNA (1)...(19): siRNA sense strand
gaagaugaagggcaugaag

SEQ ID NO: 1371988 - RNA, 19 nt, Homo sapiens
  misc_RNA (1)...(19): siRNA sense strand
ugacuacacucugucuuuc

SEQ ID NO: 1371989 - RNA, 19 nt, Homo sapiens
  misc_RNA (1)...(19): siRNA sense strand
cuacaaggaguucuuugaa

SEQ ID NO: 1371990 - RNA, 19 nt, Homo sapiens
  misc_RNA (1)...(19): siRNA sense strand
cagaaggugcgcauaguga

SEQ ID NO: 1371991 - RNA, 19 nt, Homo sapiens
  misc_RNA (1)...(19): siRNA sense strand
gccaucaacccuuccauug

SEQ ID NO: 1371992 - RNA, 19 nt, Homo sapiens
  misc_RNA (1)...(19): siRNA sense strand
gugacuacacucugucuuu

SEQ ID NO: 1371993 - RNA, 19 nt, Homo sapiens
  misc_RNA (1)...(19): siRNA sense strand
ugaaguagccaaugauguc

SEQ ID NO: 1371994 - RNA, 19 nt, Homo sapiens
  misc_RNA (1)...(19): siRNA sense strand
gaucuacaaggaguucuuu

SEQ ID NO: 1371995 - RNA, 19 nt, Homo sapiens
  misc_RNA (1)...(19): siRNA sense strand
gcagaaggugcgcauagug

SEQ ID NO: 1371996 - RNA, 19 nt, Homo sapiens
  misc_RNA (1)...(19): siRNA sense strand
aagaaggucuccgauguca

SEQ ID NO: 1371997 - RNA, 19 nt, Homo sapiens
  misc_RNA (1)...(19): siRNA sense strand
gaccuacuaucgggaugaa

SEQ ID NO: 1371998 - RNA, 19 nt, Homo sapiens
  misc_RNA (1)...(19): siRNA sense strand
uagggaaccuggcagaucu

SEQ ID NO: 1371999 - RNA, 19 nt, Homo sapiens
  misc_RNA (1)...(19): siRNA sense strand
ucuccgaugucauauggaa

SEQ ID NO: 1372000 - RNA, 19 nt, Homo sapiens
  misc_RNA (1)...(19): siRNA sense strand
gagaagaugaagggcauga

SEQ ID NO: 1372001 - RNA, 19 nt, Homo sapiens
  misc_RNA (1)...(19): siRNA sense strand
cgacguggugcgccuguuu

SEQ ID NO: 1372002 - RNA, 19 nt, Homo sapiens
  misc_RNA (1)...(19): siRNA sense strand
ucuuugaaguagccaauga

SEQ ID NO: 1372003 - RNA, 19 nt, Homo sapiens
  misc_RNA (1)...(19): siRNA sense strand
uacaaggaguucuuugaag

SEQ ID NO: 1372004 - RNA, 19 nt, Homo sapiens
  misc_RNA (1)...(19): siRNA sense strand
ccugaaaggaucauacaug

SEQ ID NO: 1372005 - RNA, 19 nt, Homo sapiens
  misc_RNA (1)...(19): siRNA sense strand
gaaguagccaaugauguca

SEQ ID NO: 1372006 - RNA, 19 nt, Homo sapiens
  misc_RNA (1)...(19): siRNA sense strand
ccacauccagucccucuuc

SEQ ID NO: 1372007 - RNA, 19 nt, Homo sapiens
  misc_RNA (1)...(19): siRNA sense strand
ggcagaaggugcgcauagu

SEQ ID NO: 1372008 - RNA, 19 nt, Homo sapiens
  misc_RNA (1)...(19): siRNA sense strand
gcagaugaagaagcagaaa

SEQ ID NO: 1372009 - RNA, 19 nt, Homo sapiens
  misc_RNA (1)...(19): siRNA sense strand
cagcuccgguguggccuuu

SEQ ID NO: 1372010 - RNA, 19 nt, Homo sapiens
  misc_RNA (1)...(19): siRNA sense strand
gaccugggacaucuggaaa

SEQ ID NO: 1372011 - RNA, 19 nt, Homo sapiens
  misc_RNA (1)...(19): siRNA sense strand
gagcuggcuguaccugaaa

SEQ ID NO: 1372012 - RNA, 19 nt, Homo sapiens
  misc_RNA (1)...(19): siRNA sense strand
cagacccacucacccucua

SEQ ID NO: 1372013 - RNA, 19 nt, Homo sapiens
  misc_RNA (1)...(19): siRNA sense strand
ggagaucuacaaggaguuc

SEQ ID NO: 1372014 - RNA, 19 nt, Homo sapiens
  misc_RNA (1)...(19): siRNA sense strand
gcugugaccgcaagaugga

SEQ ID NO: 1372015 - RNA, 19 nt, Homo sapiens
  misc_RNA (1)...(19): siRNA sense strand
ggaagccuccugggacugu

SEQ ID NO: 1372016 - RNA, 19 nt, Homo sapiens
  misc_RNA (1)...(19): siRNA sense strand
gggcugggccaccuuucuu

SEQ ID NO: 1372017 - RNA, 19 nt, Homo sapiens
  misc_RNA (1)...(19): siRNA sense strand
ucuaugaccugggacaucu

SEQ ID NO: 1372018 - RNA, 19 nt, Homo sapiens
  misc_RNA (1)...(19): siRNA sense strand
ugaaggaggcagccagcuu

SEQ ID NO: 1372019 - RNA, 19 nt, Homo sapiens
  misc_RNA (1)...(19): siRNA sense strand
ggaagacgaggagaucuac

SEQ ID NO: 1372020 - RNA, 19 nt, Homo sapiens
  misc_RNA (1)...(19): siRNA sense strand
ccucagccaagaccuacua

SEQ ID NO: 1372021 - RNA, 19 nt, Homo sapiens
  misc_RNA (1)...(19): siRNA sense strand
agucgcaagugcagaugaa

SEQ ID NO: 1372022 - RNA, 19 nt, Homo sapiens
  misc_RNA (1)...(19): siRNA sense strand
ucuacaaggaguucuuuga

SEQ ID NO: 1372023 - RNA, 19 nt, Homo sapiens
  misc_RNA (1)...(19): siRNA sense strand
ugcucuggcugcucuauga

SEQ ID NO: 1372024 - RNA, 19 nt, Homo sapiens
  misc_RNA (1)...(19): siRNA sense strand
gcagcgcaaaggccucuga

SEQ ID NO: 1372025 - RNA, 19 nt, Homo sapiens
  misc_RNA (1)...(19): siRNA sense strand
agauggagguggcguucau

SEQ ID NO: 1372026 - RNA, 19 nt, Homo sapiens
  misc_RNA (1)...(19): siRNA sense strand
gaugaagaagcagaaagug

SEQ ID NO: 1372027 - RNA, 19 nt, Homo sapiens
  misc_RNA (1)...(19): siRNA sense strand
cgcaagugcagaugaagaa

SEQ ID NO: 1372028 - RNA, 19 nt, Homo sapiens
  misc_RNA (1)...(19): siRNA sense strand
uccagucccucuucagcuu

SEQ ID NO: 1372029 - RNA, 19 nt, Homo sapiens
  misc_RNA (1)...(19): siRNA sense strand
gcgcugugaccgcaagaug

SEQ ID NO: 1372030 - RNA, 19 nt, Homo sapiens
  misc_RNA (1)...(19): siRNA sense strand
uggccgaccugucuaucau

SEQ ID NO: 1372031 - RNA, 19 nt, Homo sapiens
  misc_RNA (1)...(19): siRNA sense strand
aaggaguucuuugaaguag

SEQ ID NO: 1372032 - RNA, 19 nt, Homo sapiens
  misc_RNA (1)...(19): siRNA sense strand
cagccaagaccuacuaucg

SEQ ID NO: 1372033 - RNA, 19 nt, Homo sapiens
  misc_RNA (1)...(19): siRNA sense strand
gucccucuauccucgagaa

SEQ ID NO: 1372034 - RNA, 19 nt, Homo sapiens
  misc_RNA (1)...(19): siRNA sense strand
gccaucaagcugcaacuca

SEQ ID NO: 1372035 - RNA, 19 nt, Homo sapiens
  misc_RNA (1)...(19): siRNA sense strand
ccgacucgcuggagcuucu

SEQ ID NO: 1372036 - RNA, 19 nt, Homo sapiens
  misc_RNA (1)...(19): siRNA sense strand
gaaggucuccgaugucaua

SEQ ID NO: 1372037 - RNA, 19 nt, Homo sapiens
  misc_RNA (1)...(19): siRNA sense strand
gaucauacaugcgcuguga

SEQ ID NO: 1372038 - RNA, 19 nt, Homo sapiens
  misc_RNA (1)...(19): siRNA sense strand
gccgugagcuggugaagaa

SEQ ID NO: 1372039 - RNA, 19 nt, Homo sapiens
  misc_RNA (1)...(19): siRNA sense strand
ugaagaaggucuccgaugu

SEQ ID NO: 1372040 - RNA, 19 nt, Homo sapiens
  misc_RNA (1)...(19): siRNA sense strand
ggagcuggcuguaccugaa

SEQ ID NO: 1372041 - RNA, 19 nt, Homo sapiens
  misc_RNA (1)...(19): siRNA sense strand
gaucaugccuggguagugu

SEQ ID NO: 1372042 - RNA, 19 nt, Homo sapiens
  misc_RNA (1)...(19): siRNA sense strand
ugggacaucuggaaaggua

SEQ ID NO: 1372043 - RNA, 19 nt, Homo sapiens
  misc_RNA (1)...(19): siRNA sense strand
caaggaguucuuugaagua

SEQ ID NO: 1372044 - RNA, 19 nt, Homo sapiens
  misc_RNA (1)...(19): siRNA sense strand
acaaggaguucuuugaagu

SEQ ID NO: 1372045 - RNA, 19 nt, Homo sapiens
  misc_RNA (1)...(19): siRNA sense strand
gaaccuggcagaucuagag

SEQ ID NO: 1372046 - RNA, 19 nt, Homo sapiens
  misc_RNA (1)...(19): siRNA sense strand
ggucuccgaugucauaugg

SEQ ID NO: 1372047 - RNA, 19 nt, Homo sapiens
  misc_RNA (1)...(19): siRNA sense strand
ccacugucauccaggacua

SEQ ID NO: 1372048 - RNA, 19 nt, Homo sapiens
  misc_RNA (1)...(19): siRNA sense strand
acgaggagaucuacaagga

SEQ ID NO: 1372049 - RNA, 19 nt, Homo sapiens
  misc_RNA (1)...(19): siRNA sense strand
cgucaucccuaccaacguu

SEQ ID NO: 1372050 - RNA, 19 nt, Homo sapiens
  misc_RNA (1)...(19): siRNA sense strand
gaagaaggucuccgauguc

SEQ ID NO: 1372051 - RNA, 19 nt, Homo sapiens
  misc_RNA (1)...(19): siRNA sense strand
gggaagacgaggagaucua

SEQ ID NO: 1372052 - RNA, 19 nt, Homo sapiens
  misc_RNA (1)...(19): siRNA sense strand
gaacacaucuaccccuaca

SEQ ID NO: 1372053 - RNA, 19 nt, Homo sapiens
  misc_RNA (1)...(19): siRNA sense strand
gaagaugaagggcaugaag

SEQ ID NO: 1372054 - RNA, 19 nt, Homo sapiens
  misc_RNA (1)...(19): siRNA sense strand
ugacuacacucugucuuuc

SEQ ID NO: 1372055 - RNA, 19 nt, Homo sapiens
  misc_RNA (1)...(19): siRNA sense strand
cuacaaggaguucuuugaa

SEQ ID NO: 1372056 - RNA, 19 nt, Homo sapiens
  misc_RNA (1)...(19): siRNA sense strand
cagaaggugcgcauaguga

SEQ ID NO: 1372057 - RNA, 19 nt, Homo sapiens
  misc_RNA (1)...(19): siRNA sense strand
gccaucaacccuuccauug

SEQ ID NO: 1372058 - RNA, 19 nt, Homo sapiens
  misc_RNA (1)...(19): siRNA sense strand
gugacuacacucugucuuu

SEQ ID NO: 1372059 - RNA, 19 nt, Homo sapiens
  misc_RNA (1)...(19): siRNA sense strand
ugaaguagccaaugauguc

SEQ ID NO: 1372060 - RNA, 19 nt, Homo sapiens
  misc_RNA (1)...(19): siRNA sense strand
gaucuacaaggaguucuuu

SEQ ID NO: 1372061 - RNA, 19 nt, Homo sapiens
  misc_RNA (1)...(19): siRNA sense strand
gcagaaggugcgcauagug

SEQ ID NO: 1372062 - RNA, 19 nt, Homo sapiens
  misc_RNA (1)...(19): siRNA sense strand
aagaaggucuccgauguca

SEQ ID NO: 1372063 - RNA, 19 nt, Homo sapiens
  misc_RNA (1)...(19): siRNA sense strand
gaccuacuaucgggaugaa

SEQ ID NO: 1372064 - RNA, 19 nt, Homo sapiens
  misc_RNA (1)...(19): siRNA sense strand
uagggaaccuggcagaucu

SEQ ID NO: 1372065 - RNA, 19 nt, Homo sapiens
  misc_RNA (1)...(19): siRNA sense strand
ucuccgaugucauauggaa

SEQ ID NO: 1372066 - RNA, 19 nt, Homo sapiens
  misc_RNA (1)...(19): siRNA sense strand
gagaagaugaagggcauga

SEQ ID NO: 1372067 - RNA, 19 nt, Homo sapiens
  misc_RNA (1)...(19): siRNA sense strand
cgacguggugcgccuguuu

SEQ ID NO: 1372068 - RNA, 19 nt, Homo sapiens
  misc_RNA (1)...(19): siRNA sense strand
ucuuugaaguagccaauga

SEQ ID NO: 1372069 - RNA, 19 nt, Homo sapiens
  misc_RNA (1)...(19): siRNA sense strand
uacaaggaguucuuugaag

SEQ ID NO: 1372070 - RNA, 19 nt, Homo sapiens
  misc_RNA (1)...(19): siRNA sense strand
ccugaaaggaucauacaug

SEQ ID NO: 1372071 - RNA, 19 nt, Homo sapiens
  misc_RNA (1)...(19): siRNA sense strand
gaaguagccaaugauguca

SEQ ID NO: 1372072 - RNA, 19 nt, Homo sapiens
  misc_RNA (1)...(19): siRNA sense strand
ccacauccagucccucuuc

SEQ ID NO: 1372073 - RNA, 19 nt, Homo sapiens
  misc_RNA (1)...(19): siRNA sense strand
ggcagaaggugcgcauagu

SEQ ID NO: 1372074 - RNA, 19 nt, Homo sapiens
  misc_RNA (1)...(19): siRNA sense strand
gcagaugaagaagcagaaa

SEQ ID NO: 1372075 - RNA, 19 nt, Homo sapiens
  misc_RNA (1)...(19): siRNA sense strand
cagcuccgguguggccuuu

SEQ ID NO: 1372076 - RNA, 19 nt, Homo sapiens
  misc_RNA (1)...(19): siRNA sense strand
gaccugggacaucuggaaa

SEQ ID NO: 1372077 - RNA, 19 nt, Homo sapiens
  misc_RNA (1)...(19): siRNA sense strand
gagcuggcuguaccugaaa

SEQ ID NO: 1372078 - RNA, 19 nt, Homo sapiens
  misc_RNA (1)...(19): siRNA sense strand
cagacccacucacccucua

SEQ ID NO: 1372079 - RNA, 19 nt, Homo sapiens
  misc_RNA (1)...(19): siRNA sense strand
ggagaucuacaaggaguuc

SEQ ID NO: 1372080 - RNA, 19 nt, Homo sapiens
  misc_RNA (1)...(19): siRNA sense strand
gcugugaccgcaagaugga

SEQ ID NO: 1372081 - RNA, 19 nt, Homo sapiens
  misc_RNA (1)...(19): siRNA sense strand
ggaagccuccugggacugu

SEQ ID NO: 1372082 - RNA, 19 nt, Homo sapiens
  misc_RNA (1)...(19): siRNA sense strand
gggcugggccaccuuucuu

SEQ ID NO: 1372083 - RNA, 19 nt, Homo sapiens
  misc_RNA (1)...(19): siRNA sense strand
ucuaugaccugggacaucu

SEQ ID NO: 1372084 - RNA, 19 nt, Homo sapiens
  misc_RNA (1)...(19): siRNA sense strand
ugaaggaggcagccagcuu

SEQ ID NO: 1372085 - RNA, 19 nt, Homo sapiens
  misc_RNA (1)...(19): siRNA sense strand
ggaagacgaggagaucuac

SEQ ID NO: 1372086 - RNA, 19 nt, Homo sapiens
  misc_RNA (1)...(19): siRNA sense strand
ccucagccaagaccuacua

SEQ ID NO: 1372087 - RNA, 19 nt, Homo sapiens
  misc_RNA (1)...(19): siRNA sense strand
agucgcaagugcagaugaa

SEQ ID NO: 1372088 - RNA, 19 nt, Homo sapiens
  misc_RNA (1)...(19): siRNA sense strand
ucuacaaggaguucuuuga

SEQ ID NO: 1372089 - RNA, 19 nt, Homo sapiens
  misc_RNA (1)...(19): siRNA sense strand
ugcucuggcugcucuauga

SEQ ID NO: 1372090 - RNA, 19 nt, Homo sapiens
  misc_RNA (1)...(19): siRNA sense strand
gcagcgcaaaggccucuga

SEQ ID NO: 1372091 - RNA, 19 nt, Homo sapiens
  misc_RNA (1)...(19): siRNA sense strand
agauggagguggcguucau

SEQ ID NO: 1372092 - RNA, 19 nt, Homo sapiens
  misc_RNA (1)...(19): siRNA sense strand
gaugaagaagcagaaagug

SEQ ID NO: 1372093 - RNA, 19 nt, Homo sapiens
  misc_RNA (1)...(19): siRNA sense strand
cgcaagugcagaugaagaa

SEQ ID NO: 1372094 - RNA, 19 nt, Homo sapiens
  misc_RNA (1)...(19): siRNA sense strand
uccagucccucuucagcuu

SEQ ID NO: 1372095 - RNA, 19 nt, Homo sapiens
  misc_RNA (1)...(19): siRNA sense strand
gcgcugugaccgcaagaug

SEQ ID NO: 1372096 - RNA, 19 nt, Homo sapiens
  misc_RNA (1)...(19): siRNA sense strand
uggccgaccugucuaucau

SEQ ID NO: 1372097 - RNA, 19 nt, Homo sapiens
  misc_RNA (1)...(19): siRNA sense strand
aaggaguucuuugaaguag

SEQ ID NO: 1372098 - RNA, 19 nt, Homo sapiens
  misc_RNA (1)...(19): siRNA sense strand
cagccaagaccuacuaucg

SEQ ID NO: 1372099 - RNA, 19 nt, Homo sapiens
  misc_RNA (1)...(19): siRNA sense strand
gucccucuauccucgagaa

SEQ ID NO: 1372100 - RNA, 19 nt, Homo sapiens
  misc_RNA (1)...(19): siRNA sense strand
gccaucaagcugcaacuca

SEQ ID NO: 1372101 - RNA, 19 nt, Homo sapiens
  misc_RNA (1)...(19): siRNA sense strand
ccgacucgcuggagcuucu

SEQ ID NO: 1372102 - RNA, 19 nt, Homo sapiens
  misc_RNA (1)...(19): siRNA sense strand
gaagaucgcuguucccauu

SEQ ID NO: 1372103 - RNA, 19 nt, Homo sapiens
  misc_RNA (1)...(19): siRNA sense strand
gaagagagccuuaucugua

SEQ ID NO: 1372104 - RNA, 19 nt, Homo sapiens
  misc_RNA (1)...(19): siRNA sense strand
gaggaacuacuucgaauua

SEQ ID NO: 1372105 - RNA, 19 nt, Homo sapiens
  misc_RNA (1)...(19): siRNA sense strand
gaugaagaauggcaaagaa

SEQ ID NO: 1372106 - RNA, 19 nt, Homo sapiens
  misc_RNA (1)...(19): siRNA sense strand
aagaaacucuguccuauug

SEQ ID NO: 1372107 - RNA, 19 nt, Homo sapiens
  misc_RNA (1)...(19): siRNA sense strand
gugcagggcuccaguaaug

SEQ ID NO: 1372108 - RNA, 19 nt, Homo sapiens
  misc_RNA (1)...(19): siRNA sense strand
gaucagggcugcuucuagu

SEQ ID NO: 1372109 - RNA, 19 nt, Homo sapiens
  misc_RNA (1)...(19): siRNA sense strand
aaacagcucuuugagauau

SEQ ID NO: 1372110 - RNA, 19 nt, Homo sapiens
  misc_RNA (1)...(19): siRNA sense strand
gaacagaagaccacucuca

SEQ ID NO: 1372111 - RNA, 19 nt, Homo sapiens
  misc_RNA (1)...(19): siRNA sense strand
ccagaucccugaagaagau

SEQ ID NO: 1372112 - RNA, 19 nt, Homo sapiens
  misc_RNA (1)...(19): siRNA sense strand
ccaagaaacucuguccuau

SEQ ID NO: 1372113 - RNA, 19 nt, Homo sapiens
  misc_RNA (1)...(19): siRNA sense strand
gaucaucucaguccacauu

SEQ ID NO: 1372114 - RNA, 19 nt, Homo sapiens
  misc_RNA (1)...(19): siRNA sense strand
ggaagaguaccaacacauu

SEQ ID NO: 1372115 - RNA, 19 nt, Homo sapiens
  misc_RNA (1)...(19): siRNA sense strand
cgccauccauacucaauua

SEQ ID NO: 1372116 - RNA, 19 nt, Homo sapiens
  misc_RNA (1)...(19): siRNA sense strand
aagagagccuuaucuguau

SEQ ID NO: 1372117 - RNA, 19 nt, Homo sapiens
  misc_RNA (1)...(19): siRNA sense strand
gaagaguaccaacacauuc

SEQ ID NO: 1372118 - RNA, 19 nt, Homo sapiens
  misc_RNA (1)...(19): siRNA sense strand
gagaguggguaguggugaa

SEQ ID NO: 1372119 - RNA, 19 nt, Homo sapiens
  misc_RNA (1)...(19): siRNA sense strand
caagaaacucuguccuauu

SEQ ID NO: 1372120 - RNA, 19 nt, Homo sapiens
  misc_RNA (1)...(19): siRNA sense strand
gugaagcgaucaucucagu

SEQ ID NO: 1372121 - RNA, 19 nt, Homo sapiens
  misc_RNA (1)...(19): siRNA sense strand
cauccauacucaauuauca

SEQ ID NO: 1372122 - RNA, 19 nt, Homo sapiens
  misc_RNA (1)...(19): siRNA sense strand
ccucguacauuuccaaaca

SEQ ID NO: 1372123 - RNA, 19 nt, Homo sapiens
  misc_RNA (1)...(19): siRNA sense strand
gcaacuuucuaugacauug

SEQ ID NO: 1372124 - RNA, 19 nt, Homo sapiens
  misc_RNA (1)...(19): siRNA sense strand
ggaacuacuucgaauuacu

SEQ ID NO: 1372125 - RNA, 19 nt, Homo sapiens
  misc_RNA (1)...(19): siRNA sense strand
gaaacucuguccuauugac

SEQ ID NO: 1372126 - RNA, 19 nt, Homo sapiens
  misc_RNA (1)...(19): siRNA sense strand
ugaauuagugccuguuaaa

SEQ ID NO: 1372127 - RNA, 19 nt, Homo sapiens
  misc_RNA (1)...(19): siRNA sense strand
ggaggaacuacuucgaauu

SEQ ID NO: 1372128 - RNA, 19 nt, Homo sapiens
  misc_RNA (1)...(19): siRNA sense strand
gggauagcaacaaauguaa

SEQ ID NO: 1372129 - RNA, 19 nt, Homo sapiens
  misc_RNA (1)...(19): siRNA sense strand
gccagaagcacaagcuauu

SEQ ID NO: 1372130 - RNA, 19 nt, Homo sapiens
  misc_RNA (1)...(19): siRNA sense strand
gaacuacuucgaauuacuc

SEQ ID NO: 1372131 - RNA, 19 nt, Homo sapiens
  misc_RNA (1)...(19): siRNA sense strand
guacagagaguggguagug

SEQ ID NO: 1372132 - RNA, 19 nt, Homo sapiens
  misc_RNA (1)...(19): siRNA sense strand
gcagggcuccaguaaugaa

SEQ ID NO: 1372133 - RNA, 19 nt, Homo sapiens
  misc_RNA (1)...(19): siRNA sense strand
ggauagcaacaaauguaaa

SEQ ID NO: 1372134 - RNA, 19 nt, Homo sapiens
  misc_RNA (1)...(19): siRNA sense strand
gcaacaaauguaaaugugu

SEQ ID NO: 1372135 - RNA, 19 nt, Homo sapiens
  misc_RNA (1)...(19): siRNA sense strand
aguuauagaugaagaaugg

SEQ ID NO: 1372136 - RNA, 19 nt, Homo sapiens
  misc_RNA (1)...(19): siRNA sense strand
guuaaaguugccaaucaua

SEQ ID NO: 1372137 - RNA, 19 nt, Homo sapiens
  misc_RNA (1)...(19): siRNA sense strand
auuagugccuguuaaaguu

SEQ ID NO: 1372138 - RNA, 19 nt, Homo sapiens
  misc_RNA (1)...(19): siRNA sense strand
ugugguggcuguugcaaug

SEQ ID NO: 1372139 - RNA, 19 nt, Homo sapiens
  misc_RNA (1)...(19): siRNA sense strand
accagcaccucguacauuu

SEQ ID NO: 1372140 - RNA, 19 nt, Homo sapiens
  misc_RNA (1)...(19): siRNA sense strand
caugauguuugacgaagau

SEQ ID NO: 1372141 - RNA, 19 nt, Homo sapiens
  misc_RNA (1)...(19): siRNA sense strand
ugggauagcaacaaaugua

SEQ ID NO: 1372142 - RNA, 19 nt, Homo sapiens
  misc_RNA (1)...(19): siRNA sense strand
gcaaugaagagagccuuau

SEQ ID NO: 1372143 - RNA, 19 nt, Homo sapiens
  misc_RNA (1)...(19): siRNA sense strand
cgaagaucguugcgagugu

SEQ ID NO: 1372144 - RNA, 19 nt, Homo sapiens
  misc_RNA (1)...(19): siRNA sense strand
gaagaauggcaaagaacuc

SEQ ID NO: 1372145 - RNA, 19 nt, Homo sapiens
  misc_RNA (1)...(19): siRNA sense strand
uaaaguugccaaucauaca

SEQ ID NO: 1372146 - RNA, 19 nt, Homo sapiens
  misc_RNA (1)...(19): siRNA sense strand
cugaauuagugccuguuaa

SEQ ID NO: 1372147 - RNA, 19 nt, Homo sapiens
  misc_RNA (1)...(19): siRNA sense strand
uggaggaacuacuucgaau

SEQ ID NO: 1372148 - RNA, 19 nt, Homo sapiens
  misc_RNA (1)...(19): siRNA sense strand
ccagaagcacaagcuauuu

SEQ ID NO: 1372149 - RNA, 19 nt, Homo sapiens
  misc_RNA (1)...(19): siRNA sense strand
cagaagaccacucucaucu

SEQ ID NO: 1372150 - RNA, 19 nt, Homo sapiens
  misc_RNA (1)...(19): siRNA sense strand
gcuguucccauuccaagaa

SEQ ID NO: 1372151 - RNA, 19 nt, Homo sapiens
  misc_RNA (1)...(19): siRNA sense strand
ccauccagaucccugaaga

SEQ ID NO: 1372152 - RNA, 19 nt, Homo sapiens
  misc_RNA (1)...(19): siRNA sense strand
cauacucaauuaucagaag

SEQ ID NO: 1372153 - RNA, 19 nt, Homo sapiens
  misc_RNA (1)...(19): siRNA sense strand
ucagggcugcuucuaguuu

SEQ ID NO: 1372154 - RNA, 19 nt, Homo sapiens
  misc_RNA (1)...(19): siRNA sense strand
agccuuaucuguaugaaca

SEQ ID NO: 1372155 - RNA, 19 nt, Homo sapiens
  misc_RNA (1)...(19): siRNA sense strand
cagugcagcccuagagaaa

SEQ ID NO: 1372156 - RNA, 19 nt, Homo sapiens
  misc_RNA (1)...(19): siRNA sense strand
cagggcugcuucuaguuug

SEQ ID NO: 1372157 - RNA, 19 nt, Homo sapiens
  misc_RNA (1)...(19): siRNA sense strand
gagauaucagugccuuuga

SEQ ID NO: 1372158 - RNA, 19 nt, Homo sapiens
  misc_RNA (1)...(19): siRNA sense strand
cagcaugugcaaagcauug

SEQ ID NO: 1372159 - RNA, 19 nt, Homo sapiens
  misc_RNA (1)...(19): siRNA sense strand
ccaggaaccagcucucugu

SEQ ID NO: 1372160 - RNA, 19 nt, Homo sapiens
  misc_RNA (1)...(19): siRNA sense strand
ccacucucaucuccaggaa

SEQ ID NO: 1372161 - RNA, 19 nt, Homo sapiens
  misc_RNA (1)...(19): siRNA sense strand
uaucagugccuuugacauc

SEQ ID NO: 1372162 - RNA, 19 nt, Homo sapiens
  misc_RNA (1)...(19): siRNA sense strand
caacuuucuaugacauuga

SEQ ID NO: 1372163 - RNA, 19 nt, Homo sapiens
  misc_RNA (1)...(19): siRNA sense strand
ugagauaucagugccuuug

SEQ ID NO: 1372164 - RNA, 19 nt, Homo sapiens
  misc_RNA (1)...(19): siRNA sense strand
gagagccuuaucuguauga

SEQ ID NO: 1372165 - RNA, 19 nt, Homo sapiens
  misc_RNA (1)...(19): siRNA sense strand
cuaugacauugaaacacua

SEQ ID NO: 1372166 - RNA, 19 nt, Homo sapiens
  misc_RNA (1)...(19): siRNA sense strand
ucuaugacauugaaacacu

SEQ ID NO: 1372167 - RNA, 19 nt, Homo sapiens
  misc_RNA (1)...(19): siRNA sense strand
acuggaagcuguggagaug

SEQ ID NO: 1372168 - RNA, 19 nt, Homo sapiens
  misc_RNA (1)...(19): siRNA sense strand
uguaagugcuugccaacag

SEQ ID NO: 1372169 - RNA, 19 nt, Homo sapiens
  misc_RNA (1)...(19): siRNA sense strand
cuguuaaaguugccaauca

SEQ ID NO: 1372170 - RNA, 19 nt, Homo sapiens
  misc_RNA (1)...(19): siRNA sense strand
gaauuagugccuguuaaag

SEQ ID NO: 1372171 - RNA, 19 nt, Homo sapiens
  misc_RNA (1)...(19): siRNA sense strand
ugaagagagccuuaucugu

SEQ ID NO: 1372172 - RNA, 19 nt, Homo sapiens
  misc_RNA (1)...(19): siRNA sense strand
guaccaacacauucuucaa

SEQ ID NO: 1372173 - RNA, 19 nt, Homo sapiens
  misc_RNA (1)...(19): siRNA sense strand
gauaucagugccuuugaca

SEQ ID NO: 1372174 - RNA, 19 nt, Homo sapiens
  misc_RNA (1)...(19): siRNA sense strand
cagaagcacaagcuauuuc

SEQ ID NO: 1372175 - RNA, 19 nt, Homo sapiens
  misc_RNA (1)...(19): siRNA sense strand
ucaauuaucagaagaucca

SEQ ID NO: 1372176 - RNA, 19 nt, Homo sapiens
  misc_RNA (1)...(19): siRNA sense strand
gcggcaacuuucuaugaca

SEQ ID NO: 1372177 - RNA, 19 nt, Homo sapiens
  misc_RNA (1)...(19): siRNA sense strand
gcaccucguacauuuccaa

SEQ ID NO: 1372178 - RNA, 19 nt, Homo sapiens
  misc_RNA (1)...(19): siRNA sense strand
caaaacagcaugugcaaag

SEQ ID NO: 1372179 - RNA, 19 nt, Homo sapiens
  misc_RNA (1)...(19): siRNA sense strand
gacagaugccccuuucaua

SEQ ID NO: 1372180 - RNA, 19 nt, Homo sapiens
  misc_RNA (1)...(19): siRNA sense strand
gaggacagaugccccuuuc

SEQ ID NO: 1372181 - RNA, 19 nt, Homo sapiens
  misc_RNA (1)...(19): siRNA sense strand
uccaagaaacucuguccua

SEQ ID NO: 1372182 - RNA, 19 nt, Homo sapiens
  misc_RNA (1)...(19): siRNA sense strand
gaauggcaaagaacucagu

SEQ ID NO: 1372183 - RNA, 19 nt, Homo sapiens
  misc_RNA (1)...(19): siRNA sense strand
uaugggauagcaacaaaug

SEQ ID NO: 1372184 - RNA, 19 nt, Homo sapiens
  misc_RNA (1)...(19): siRNA sense strand
ccugaauuagugccuguua

SEQ ID NO: 1372185 - RNA, 19 nt, Homo sapiens
  misc_RNA (1)...(19): siRNA sense strand
gggaagaguaccaacacau

SEQ ID NO: 1372186 - RNA, 19 nt, Homo sapiens
  misc_RNA (1)...(19): siRNA sense strand
gugcagcccuagagaaacg

SEQ ID NO: 1372187 - RNA, 19 nt, Homo sapiens
  misc_RNA (1)...(19): siRNA sense strand
caccagcaccucguacauu

SEQ ID NO: 1372188 - RNA, 19 nt, Homo sapiens
  misc_RNA (1)...(19): siRNA sense strand
uaaaacaccaugucccaaa

SEQ ID NO: 1372189 - RNA, 19 nt, Homo sapiens
  misc_RNA (1)...(19): siRNA sense strand
agcaacaaauguaaaugug

SEQ ID NO: 1372190 - RNA, 19 nt, Homo sapiens
  misc_RNA (1)...(19): siRNA sense strand
caccaugucccaaagaucu

SEQ ID NO: 1372191 - RNA, 19 nt, Homo sapiens
  misc_RNA (1)...(19): siRNA sense strand
caaugaagagagccuuauc

SEQ ID NO: 1372192 - RNA, 19 nt, Homo sapiens
  misc_RNA (1)...(19): siRNA sense strand
cggcaacuuucuaugacau

SEQ ID NO: 1372193 - RNA, 19 nt, Homo sapiens
  misc_RNA (1)...(19): siRNA sense strand
ggagaccugcugccagaag

SEQ ID NO: 1372194 - RNA, 19 nt, Homo sapiens
  misc_RNA (1)...(19): siRNA sense strand
aaacaccaugucccaaaga

SEQ ID NO: 1372195 - RNA, 19 nt, Homo sapiens
  misc_RNA (1)...(19): siRNA sense strand
uugcgagugugucuguaaa

SEQ ID NO: 1372196 - RNA, 19 nt, Homo sapiens
  misc_RNA (1)...(19): siRNA sense strand
ucccaucgguccacuaggu

SEQ ID NO: 1372197 - RNA, 19 nt, Homo sapiens
  misc_RNA (1)...(19): siRNA sense strand
uguuaaaguugccaaucau

SEQ ID NO: 1372198 - RNA, 19 nt, Homo sapiens
  misc_RNA (1)...(19): siRNA sense strand
gggcuccaguaaugaacau

SEQ ID NO: 1372199 - RNA, 19 nt, Homo sapiens
  misc_RNA (1)...(19): siRNA sense strand
uggaagcuguggagaugca

SEQ ID NO: 1372200 - RNA, 19 nt, Homo sapiens
  misc_RNA (1)...(19): siRNA sense strand
guugcgagugugucuguaa

SEQ ID NO: 1372201 - RNA, 19 nt, Homo sapiens
  misc_RNA (1)...(19): siRNA sense strand
uaccagaccaugugcaagu

SEQ ID NO: 1372202 - RNA, 19 nt, Homo sapiens
  misc_RNA (1)...(19): siRNA sense strand
ggacugaggaugccaauga

SEQ ID NO: 1372203 - RNA, 19 nt, Homo sapiens
  misc_RNA (1)...(19): siRNA sense strand
caaguucaauggugucuga

SEQ ID NO: 1372204 - RNA, 19 nt, Homo sapiens
  misc_RNA (1)...(19): siRNA sense strand
uggaggagcugcugaaaga

SEQ ID NO: 1372205 - RNA, 19 nt, Homo sapiens
  misc_RNA (1)...(19): siRNA sense strand
gaaagaguaccacagcaaa

SEQ ID NO: 1372206 - RNA, 19 nt, Homo sapiens
  misc_RNA (1)...(19): siRNA sense strand
ucacagagaagaaagagaa

SEQ ID NO: 1372207 - RNA, 19 nt, Homo sapiens
  misc_RNA (1)...(19): siRNA sense strand
gaacaaggccgaggagaac

SEQ ID NO: 1372208 - RNA, 19 nt, Homo sapiens
  misc_RNA (1)...(19): siRNA sense strand
cagcagcgguggugagaca

SEQ ID NO: 1372209 - RNA, 19 nt, Homo sapiens
  misc_RNA (1)...(19): siRNA sense strand
cauggcaacucgagauaca

SEQ ID NO: 1372210 - RNA, 19 nt, Homo sapiens
  misc_RNA (1)...(19): siRNA sense strand
gagcagcggacaaguucaa

SEQ ID NO: 1372211 - RNA, 19 nt, Homo sapiens
  misc_RNA (1)...(19): siRNA sense strand
gggcaccucuggguacuca

SEQ ID NO: 1372212 - RNA, 19 nt, Homo sapiens
  misc_RNA (1)...(19): siRNA sense strand
gagcaaccuggucaucuga

SEQ ID NO: 1372213 - RNA, 19 nt, Homo sapiens
  misc_RNA (1)...(19): siRNA sense strand
ggagguggaggcaguggaa

SEQ ID NO: 1372214 - RNA, 19 nt, Homo sapiens
  misc_RNA (1)...(19): siRNA sense strand
ugaaagaguaccacagcaa

SEQ ID NO: 1372215 - RNA, 19 nt, Homo sapiens
  misc_RNA (1)...(19): siRNA sense strand
ggcggaagccguacaaagu

SEQ ID NO: 1372216 - RNA, 19 nt, Homo sapiens
  misc_RNA (1)...(19): siRNA sense strand
aggagcugcugaaagagua

SEQ ID NO: 1372217 - RNA, 19 nt, Homo sapiens
  misc_RNA (1)...(19): siRNA sense strand
gggcagggcacauuaugca

SEQ ID NO: 1372218 - RNA, 19 nt, Homo sapiens
  misc_RNA (1)...(19): siRNA sense strand
ugacaucaacaacccuuug

SEQ ID NO: 1372219 - RNA, 19 nt, Homo sapiens
  misc_RNA (1)...(19): siRNA sense strand
agaacaaggccgaggagaa

SEQ ID NO: 1372220 - RNA, 19 nt, Homo sapiens
  misc_RNA (1)...(19): siRNA sense strand
gcggaagccguacaaagug

SEQ ID NO: 1372221 - RNA, 19 nt, Homo sapiens
  misc_RNA (1)...(19): siRNA sense strand
ggcauggcaacucgagaua

SEQ ID NO: 1372222 - RNA, 19 nt, Homo sapiens
  misc_RNA (1)...(19): siRNA sense strand
agagcaaccuggucaucug

SEQ ID NO: 1372223 - RNA, 19 nt, Homo sapiens
  misc_RNA (1)...(19): siRNA sense strand
gaggagcugcugaaagagu

SEQ ID NO: 1372224 - RNA, 19 nt, Homo sapiens
  misc_RNA (1)...(19): siRNA sense strand
gauacacucuguggagacu

SEQ ID NO: 1372225 - RNA, 19 nt, Homo sapiens
  misc_RNA (1)...(19): siRNA sense strand
gcaccucuggguacucaug

SEQ ID NO: 1372226 - RNA, 19 nt, Homo sapiens
  misc_RNA (1)...(19): siRNA sense strand
gggcauggcaacucgagau

SEQ ID NO: 1372227 - RNA, 19 nt, Homo sapiens
  misc_RNA (1)...(19): siRNA sense strand
gcuguagccagaagaagug

SEQ ID NO: 1372228 - RNA, 19 nt, Homo sapiens
  misc_RNA (1)...(19): siRNA sense strand
gagagcaaccuggucaucu

SEQ ID NO: 1372229 - RNA, 19 nt, Homo sapiens
  misc_RNA (1)...(19): siRNA sense strand
gcagcggacaaguucaaug

SEQ ID NO: 1372230 - RNA, 19 nt, Homo sapiens
  misc_RNA (1)...(19): siRNA sense strand
cugcuggccugggugguuu

SEQ ID NO: 1372231 - RNA, 19 nt, Homo sapiens
  misc_RNA (1)...(19): siRNA sense strand
cagcggacaaguucaaugg

SEQ ID NO: 1372232 - RNA, 19 nt, Homo sapiens
  misc_RNA (1)...(19): siRNA sense strand
gacugaggaugccaaugag

SEQ ID NO: 1372233 - RNA, 19 nt, Homo sapiens
  misc_RNA (1)...(19): siRNA sense strand
gguggaggcaguggaauca

SEQ ID NO: 1372234 - RNA, 19 nt, Homo sapiens
  misc_RNA (1)...(19): siRNA sense strand
gcaacucgagauacacucu

SEQ ID NO: 1372235 - RNA, 19 nt, Homo sapiens
  misc_RNA (1)...(19): siRNA sense strand
gaucacagagaagaaagag

SEQ ID NO: 1372236 - RNA, 19 nt, Homo sapiens
  misc_RNA (1)...(19): siRNA sense strand
uaugugguccggcuaagug

SEQ ID NO: 1372237 - RNA, 19 nt, Homo sapiens
  misc_RNA (1)...(19): siRNA sense strand
cagagaagaaagagaaugc

SEQ ID NO: 1372238 - RNA, 19 nt, Homo sapiens
  misc_RNA (1)...(19): siRNA sense strand
ggacugaggaugccaauga

SEQ ID NO: 1372239 - RNA, 19 nt, Homo sapiens
  misc_RNA (1)...(19): siRNA sense strand
caaguucaauggugucuga

SEQ ID NO: 1372240 - RNA, 19 nt, Homo sapiens
  misc_RNA (1)...(19): siRNA sense strand
uggaggagcugcugaaaga

SEQ ID NO: 1372241 - RNA, 19 nt, Homo sapiens
  misc_RNA (1)...(19): siRNA sense strand
gaaagaguaccacagcaaa

SEQ ID NO: 1372242 - RNA, 19 nt, Homo sapiens
  misc_RNA (1)...(19): siRNA sense strand
ucacagagaagaaagagaa

SEQ ID NO: 1372243 - RNA, 19 nt, Homo sapiens
  misc_RNA (1)...(19): siRNA sense strand
gaacaaggccgaggagaac

SEQ ID NO: 1372244 - RNA, 19 nt, Homo sapiens
  misc_RNA (1)...(19): siRNA sense strand
cagcagcgguggugagaca

SEQ ID NO: 1372245 - RNA, 19 nt, Homo sapiens
  misc_RNA (1)...(19): siRNA sense strand
cauggcaacucgagauaca

SEQ ID NO: 1372246 - RNA, 19 nt, Homo sapiens
  misc_RNA (1)...(19): siRNA sense strand
gagcagcggacaaguucaa

SEQ ID NO: 1372247 - RNA, 19 nt, Homo sapiens
  misc_RNA (1)...(19): siRNA sense strand
gggcaccucuggguacuca

SEQ ID NO: 1372248 - RNA, 19 nt, Homo sapiens
  misc_RNA (1)...(19): siRNA sense strand
gagcaaccuggucaucuga

SEQ ID NO: 1372249 - RNA, 19 nt, Homo sapiens
  misc_RNA (1)...(19): siRNA sense strand
ggagguggaggcaguggaa

SEQ ID NO: 1372250 - RNA, 19 nt, Homo sapiens
  misc_RNA (1)...(19): siRNA sense strand
ugaaagaguaccacagcaa

SEQ ID NO: 1372251 - RNA, 19 nt, Homo sapiens
  misc_RNA (1)...(19): siRNA sense strand
ggcggaagccguacaaagu

SEQ ID NO: 1372252 - RNA, 19 nt, Homo sapiens
  misc_RNA (1)...(19): siRNA sense strand
aggagcugcugaaagagua

SEQ ID NO: 1372253 - RNA, 19 nt, Homo sapiens
  misc_RNA (1)...(19): siRNA sense strand
gggcagggcacauuaugca

SEQ ID NO: 1372254 - RNA, 19 nt, Homo sapiens
  misc_RNA (1)...(19): siRNA sense strand
ugacaucaacaacccuuug

SEQ ID NO: 1372255 - RNA, 19 nt, Homo sapiens
  misc_RNA (1)...(19): siRNA sense strand
agaacaaggccgaggagaa

SEQ ID NO: 1372256 - RNA, 19 nt, Homo sapiens
  misc_RNA (1)...(19): siRNA sense strand
gcggaagccguacaaagug

SEQ ID NO: 1372257 - RNA, 19 nt, Homo sapiens
  misc_RNA (1)...(19): siRNA sense strand
ggcauggcaacucgagaua

SEQ ID NO: 1372258 - RNA, 19 nt, Homo sapiens
  misc_RNA (1)...(19): siRNA sense strand
agagcaaccuggucaucug

SEQ ID NO: 1372259 - RNA, 19 nt, Homo sapiens
  misc_RNA (1)...(19): siRNA sense strand
gaggagcugcugaaagagu

SEQ ID NO: 1372260 - RNA, 19 nt, Homo sapiens
  misc_RNA (1)...(19): siRNA sense strand
gauacacucuguggagacu

SEQ ID NO: 1372261 - RNA, 19 nt, Homo sapiens
  misc_RNA (1)...(19): siRNA sense strand
gcaccucuggguacucaug

SEQ ID NO: 1372262 - RNA, 19 nt, Homo sapiens
  misc_RNA (1)...(19): siRNA sense strand
gggcauggcaacucgagau

SEQ ID NO: 1372263 - RNA, 19 nt, Homo sapiens
  misc_RNA (1)...(19): siRNA sense strand
gcuguagccagaagaagug

SEQ ID NO: 1372264 - RNA, 19 nt, Homo sapiens
  misc_RNA (1)...(19): siRNA sense strand
gagagcaaccuggucaucu

SEQ ID NO: 1372265 - RNA, 19 nt, Homo sapiens
  misc_RNA (1)...(19): siRNA sense strand
gcagcggacaaguucaaug

SEQ ID NO: 1372266 - RNA, 19 nt, Homo sapiens
  misc_RNA (1)...(19): siRNA sense strand
cugcuggccugggugguuu

SEQ ID NO: 1372267 - RNA, 19 nt, Homo sapiens
  misc_RNA (1)...(19): siRNA sense strand
cagcggacaaguucaaugg

SEQ ID NO: 1372268 - RNA, 19 nt, Homo sapiens
  misc_RNA (1)...(19): siRNA sense strand
gacugaggaugccaaugag

SEQ ID NO: 1372269 - RNA, 19 nt, Homo sapiens
  misc_RNA (1)...(19): siRNA sense strand
gguggaggcaguggaauca

SEQ ID NO: 1372270 - RNA, 19 nt, Homo sapiens
  misc_RNA (1)...(19): siRNA sense strand
gcaacucgagauacacucu

SEQ ID NO: 1372271 - RNA, 19 nt, Homo sapiens
  misc_RNA (1)...(19): siRNA sense strand
gaucacagagaagaaagag

SEQ ID NO: 1372272 - RNA, 19 nt, Homo sapiens
  misc_RNA (1)...(19): siRNA sense strand
uaugugguccggcuaagug

SEQ ID NO: 1372273 - RNA, 19 nt, Homo sapiens
  misc_RNA (1)...(19): siRNA sense strand
cagagaagaaagagaaugc

SEQ ID NO: 1372274 - RNA, 19 nt, Homo sapiens
  misc_RNA (1)...(19): siRNA sense strand
ggacugaggaugccaauga

SEQ ID NO: 1372275 - RNA, 19 nt, Homo sapiens
  misc_RNA (1)...(19): siRNA sense strand
caaguucaauggugucuga

SEQ ID NO: 1372276 - RNA, 19 nt, Homo sapiens
  misc_RNA (1)...(19): siRNA sense strand
uggaggagcugcugaaaga

SEQ ID NO: 1372277 - RNA, 19 nt, Homo sapiens
  misc_RNA (1)...(19): siRNA sense strand
gaaagaguaccacagcaaa

SEQ ID NO: 1372278 - RNA, 19 nt, Homo sapiens
  misc_RNA (1)...(19): siRNA sense strand
ucacagagaagaaagagaa

SEQ ID NO: 1372279 - RNA, 19 nt, Homo sapiens
  misc_RNA (1)...(19): siRNA sense strand
gaacaaggccgaggagaac

SEQ ID NO: 1372280 - RNA, 19 nt, Homo sapiens
  misc_RNA (1)...(19): siRNA sense strand
cagcagcgguggugagaca

SEQ ID NO: 1372281 - RNA, 19 nt, Homo sapiens
  misc_RNA (1)...(19): siRNA sense strand
cauggcaacucgagauaca

SEQ ID NO: 1372282 - RNA, 19 nt, Homo sapiens
  misc_RNA (1)...(19): siRNA sense strand
gagcagcggacaaguucaa

SEQ ID NO: 1372283 - RNA, 19 nt, Homo sapiens
  misc_RNA (1)...(19): siRNA sense strand
gggcaccucuggguacuca

SEQ ID NO: 1372284 - RNA, 19 nt, Homo sapiens
  misc_RNA (1)...(19): siRNA sense strand
gagcaaccuggucaucuga

SEQ ID NO: 1372285 - RNA, 19 nt, Homo sapiens
  misc_RNA (1)...(19): siRNA sense strand
ggagguggaggcaguggaa

SEQ ID NO: 1372286 - RNA, 19 nt, Homo sapiens
  misc_RNA (1)...(19): siRNA sense strand
ugaaagaguaccacagcaa

SEQ ID NO: 1372287 - RNA, 19 nt, Homo sapiens
  misc_RNA (1)...(19): siRNA sense strand
ggcggaagccguacaaagu

SEQ ID NO: 1372288 - RNA, 19 nt, Homo sapiens
  misc_RNA (1)...(19): siRNA sense strand
aggagcugcugaaagagua

SEQ ID NO: 1372289 - RNA, 19 nt, Homo sapiens
  misc_RNA (1)...(19): siRNA sense strand
gggcagggcacauuaugca

SEQ ID NO: 1372290 - RNA, 19 nt, Homo sapiens
  misc_RNA (1)...(19): siRNA sense strand
ugacaucaacaacccuuug

SEQ ID NO: 1372291 - RNA, 19 nt, Homo sapiens
  misc_RNA (1)...(19): siRNA sense strand
agaacaaggccgaggagaa

SEQ ID NO: 1372292 - RNA, 19 nt, Homo sapiens
  misc_RNA (1)...(19): siRNA sense strand
gcggaagccguacaaagug

SEQ ID NO: 1372293 - RNA, 19 nt, Homo sapiens
  misc_RNA (1)...(19): siRNA sense strand
ggcauggcaacucgagaua

SEQ ID NO: 1372294 - RNA, 19 nt, Homo sapiens
  misc_RNA (1)...(19): siRNA sense strand
agagcaaccuggucaucug

SEQ ID NO: 1372295 - RNA, 19 nt, Homo sapiens
  misc_RNA (1)...(19): siRNA sense strand
gaggagcugcugaaagagu

SEQ ID NO: 1372296 - RNA, 19 nt, Homo sapiens
  misc_RNA (1)...(19): siRNA sense strand
gauacacucuguggagacu

SEQ ID NO: 1372297 - RNA, 19 nt, Homo sapiens
  misc_RNA (1)...(19): siRNA sense strand
gcaccucuggguacucaug

SEQ ID NO: 1372298 - RNA, 19 nt, Homo sapiens
  misc_RNA (1)...(19): siRNA sense strand
gggcauggcaacucgagau

SEQ ID NO: 1372299 - RNA, 19 nt, Homo sapiens
  misc_RNA (1)...(19): siRNA sense strand
gcuguagccagaagaagug

SEQ ID NO: 1372300 - RNA, 19 nt, Homo sapiens
  misc_RNA (1)...(19): siRNA sense strand
gagagcaaccuggucaucu

SEQ ID NO: 1372301 - RNA, 19 nt, Homo sapiens
  misc_RNA (1)...(19): siRNA sense strand
gcagcggacaaguucaaug

SEQ ID NO: 1372302 - RNA, 19 nt, Homo sapiens
  misc_RNA (1)...(19): siRNA sense strand
cugcuggccugggugguuu

SEQ ID NO: 1372303 - RNA, 19 nt, Homo sapiens
  misc_RNA (1)...(19): siRNA sense strand
cagcggacaaguucaaugg

SEQ ID NO: 1372304 - RNA, 19 nt, Homo sapiens
  misc_RNA (1)...(19): siRNA sense strand
gacugaggaugccaaugag

SEQ ID NO: 1372305 - RNA, 19 nt, Homo sapiens
  misc_RNA (1)...(19): siRNA sense strand
gguggaggcaguggaauca

SEQ ID NO: 1372306 - RNA, 19 nt, Homo sapiens
  misc_RNA (1)...(19): siRNA sense strand
gcaacucgagauacacucu

SEQ ID NO: 1372307 - RNA, 19 nt, Homo sapiens
  misc_RNA (1)...(19): siRNA sense strand
gaucacagagaagaaagag

SEQ ID NO: 1372308 - RNA, 19 nt, Homo sapiens
  misc_RNA (1)...(19): siRNA sense strand
uaugugguccggcuaagug

SEQ ID NO: 1372309 - RNA, 19 nt, Homo sapiens
  misc_RNA (1)...(19): siRNA sense strand
cagagaagaaagagaaugc

SEQ ID NO: 1372310 - RNA, 19 nt, Homo sapiens
  misc_RNA (1)...(19): siRNA sense strand
ggacugaggaugccaauga

SEQ ID NO: 1372311 - RNA, 19 nt, Homo sapiens
  misc_RNA (1)...(19): siRNA sense strand
caaguucaauggugucuga

SEQ ID NO: 1372312 - RNA, 19 nt, Homo sapiens
  misc_RNA (1)...(19): siRNA sense strand
uggaggagcugcugaaaga

SEQ ID NO: 1372313 - RNA, 19 nt, Homo sapiens
  misc_RNA (1)...(19): siRNA sense strand
gaaagaguaccacagcaaa

SEQ ID NO: 1372314 - RNA, 19 nt, Homo sapiens
  misc_RNA (1)...(19): siRNA sense strand
ucacagagaagaaagagaa

SEQ ID NO: 1372315 - RNA, 19 nt, Homo sapiens
  misc_RNA (1)...(19): siRNA sense strand
gaacaaggccgaggagaac

SEQ ID NO: 1372316 - RNA, 19 nt, Homo sapiens
  misc_RNA (1)...(19): siRNA sense strand
cagcagcgguggugagaca

SEQ ID NO: 1372317 - RNA, 19 nt, Homo sapiens
  misc_RNA (1)...(19): siRNA sense strand
cauggcaacucgagauaca

SEQ ID NO: 1372318 - RNA, 19 nt, Homo sapiens
  misc_RNA (1)...(19): siRNA sense strand
gagcagcggacaaguucaa

SEQ ID NO: 1372319 - RNA, 19 nt, Homo sapiens
  misc_RNA (1)...(19): siRNA sense strand
gggcaccucuggguacuca

SEQ ID NO: 1372320 - RNA, 19 nt, Homo sapiens
  misc_RNA (1)...(19): siRNA sense strand
gagcaaccuggucaucuga

SEQ ID NO: 1372321 - RNA, 19 nt, Homo sapiens
  misc_RNA (1)...(19): siRNA sense strand
ggagguggaggcaguggaa

SEQ ID NO: 1372322 - RNA, 19 nt, Homo sapiens
  misc_RNA (1)...(19): siRNA sense strand
ugaaagaguaccacagcaa

SEQ ID NO: 1372323 - RNA, 19 nt, Homo sapiens
  misc_RNA (1)...(19): siRNA sense strand
ggcggaagccguacaaagu

SEQ ID NO: 1372324 - RNA, 19 nt, Homo sapiens
  misc_RNA (1)...(19): siRNA sense strand
aggagcugcugaaagagua

SEQ ID NO: 1372325 - RNA, 19 nt, Homo sapiens
  misc_RNA (1)...(19): siRNA sense strand
gggcagggcacauuaugca

SEQ ID NO: 1372326 - RNA, 19 nt, Homo sapiens
  misc_RNA (1)...(19): siRNA sense strand
ugacaucaacaacccuuug

SEQ ID NO: 1372327 - RNA, 19 nt, Homo sapiens
  misc_RNA (1)...(19): siRNA sense strand
agaacaaggccgaggagaa

SEQ ID NO: 1372328 - RNA, 19 nt, Homo sapiens
  misc_RNA (1)...(19): siRNA sense strand
gcggaagccguacaaagug

SEQ ID NO: 1372329 - RNA, 19 nt, Homo sapiens
  misc_RNA (1)...(19): siRNA sense strand
ggcauggcaacucgagaua

SEQ ID NO: 1372330 - RNA, 19 nt, Homo sapiens
  misc_RNA (1)...(19): siRNA sense strand
agagcaaccuggucaucug

SEQ ID NO: 1372331 - RNA, 19 nt, Homo sapiens
  misc_RNA (1)...(19): siRNA sense strand
gaggagcugcugaaagagu

SEQ ID NO: 1372332 - RNA, 19 nt, Homo sapiens
  misc_RNA (1)...(19): siRNA sense strand
gauacacucuguggagacu

SEQ ID NO: 1372333 - RNA, 19 nt, Homo sapiens
  misc_RNA (1)...(19): siRNA sense strand
gcaccucuggguacucaug

SEQ ID NO: 1372334 - RNA, 19 nt, Homo sapiens
  misc_RNA (1)...(19): siRNA sense strand
gggcauggcaacucgagau

SEQ ID NO: 1372335 - RNA, 19 nt, Homo sapiens
  misc_RNA (1)...(19): siRNA sense strand
gcuguagccagaagaagug

SEQ ID NO: 1372336 - RNA, 19 nt, Homo sapiens
  misc_RNA (1)...(19): siRNA sense strand
gagagcaaccuggucaucu

SEQ ID NO: 1372337 - RNA, 19 nt, Homo sapiens
  misc_RNA (1)...(19): siRNA sense strand
gcagcggacaaguucaaug

SEQ ID NO: 1372338 - RNA, 19 nt, Homo sapiens
  misc_RNA (1)...(19): siRNA sense strand
cugcuggccugggugguuu

SEQ ID NO: 1372339 - RNA, 19 nt, Homo sapiens
  misc_RNA (1)...(19): siRNA sense strand
cagcggacaaguucaaugg

SEQ ID NO: 1372340 - RNA, 19 nt, Homo sapiens
  misc_RNA (1)...(19): siRNA sense strand
gacugaggaugccaaugag

SEQ ID NO: 1372341 - RNA, 19 nt, Homo sapiens
  misc_RNA (1)...(19): siRNA sense strand
gguggaggcaguggaauca

SEQ ID NO: 1372342 - RNA, 19 nt, Homo sapiens
  misc_RNA (1)...(19): siRNA sense strand
gcaacucgagauacacucu

SEQ ID NO: 1372343 - RNA, 19 nt, Homo sapiens
  misc_RNA (1)...(19): siRNA sense strand
gaucacagagaagaaagag

SEQ ID NO: 1372344 - RNA, 19 nt, Homo sapiens
  misc_RNA (1)...(19): siRNA sense strand
uaugugguccggcuaagug

SEQ ID NO: 1372345 - RNA, 19 nt, Homo sapiens
  misc_RNA (1)...(19): siRNA sense strand
cagagaagaaagagaaugc

SEQ ID NO: 1372346 - RNA, 19 nt, Homo sapiens
  misc_RNA (1)...(19): siRNA sense strand
uaucacagaugucguaaga

SEQ ID NO: 1372347 - RNA, 19 nt, Homo sapiens
  misc_RNA (1)...(19): siRNA sense strand
ucacagaugucguaagaau

SEQ ID NO: 1372348 - RNA, 19 nt, Homo sapiens
  misc_RNA (1)...(19): siRNA sense strand
ggccagauccugugcauaa

SEQ ID NO: 1372349 - RNA, 19 nt, Homo sapiens
  misc_RNA (1)...(19): siRNA sense strand
cagauccugugcauaauaa

SEQ ID NO: 1372350 - RNA, 19 nt, Homo sapiens
  misc_RNA (1)...(19): siRNA sense strand
uaaaaugggugaugucaaa

SEQ ID NO: 1372351 - RNA, 19 nt, Homo sapiens
  misc_RNA (1)...(19): siRNA sense strand
gcaggacaauaguaugcua

SEQ ID NO: 1372352 - RNA, 19 nt, Homo sapiens
  misc_RNA (1)...(19): siRNA sense strand
ugacuauaauugcaacgua

SEQ ID NO: 1372353 - RNA, 19 nt, Homo sapiens
  misc_RNA (1)...(19): siRNA sense strand
agaaacacaugaucaagug

SEQ ID NO: 1372354 - RNA, 19 nt, Homo sapiens
  misc_RNA (1)...(19): siRNA sense strand
ggagcuuuauauuguguuu

SEQ ID NO: 1372355 - RNA, 19 nt, Homo sapiens
  misc_RNA (1)...(19): siRNA sense strand
gauagaacaacuuagcaaa

SEQ ID NO: 1372356 - RNA, 19 nt, Homo sapiens
  misc_RNA (1)...(19): siRNA sense strand
ugaggaaggaccuaugaua

SEQ ID NO: 1372357 - RNA, 19 nt, Homo sapiens
  misc_RNA (1)...(19): siRNA sense strand
agagaacuaucuugaaaca

SEQ ID NO: 1372358 - RNA, 19 nt, Homo sapiens
  misc_RNA (1)...(19): siRNA sense strand
ccagaugacuauaauugca

SEQ ID NO: 1372359 - RNA, 19 nt, Homo sapiens
  misc_RNA (1)...(19): siRNA sense strand
ccagauccugugcauaaua

SEQ ID NO: 1372360 - RNA, 19 nt, Homo sapiens
  misc_RNA (1)...(19): siRNA sense strand
ugaagaaacacaugaucaa

SEQ ID NO: 1372361 - RNA, 19 nt, Homo sapiens
  misc_RNA (1)...(19): siRNA sense strand
cuacuaagcaccguuggua

SEQ ID NO: 1372362 - RNA, 19 nt, Homo sapiens
  misc_RNA (1)...(19): siRNA sense strand
gaagaaacacaugaucaag

SEQ ID NO: 1372363 - RNA, 19 nt, Homo sapiens
  misc_RNA (1)...(19): siRNA sense strand
uaccagaugacuauaauug

SEQ ID NO: 1372364 - RNA, 19 nt, Homo sapiens
  misc_RNA (1)...(19): siRNA sense strand
gauggcaggacaauaguau

SEQ ID NO: 1372365 - RNA, 19 nt, Homo sapiens
  misc_RNA (1)...(19): siRNA sense strand
ggcuguagcugcaguaaaa

SEQ ID NO: 1372366 - RNA, 19 nt, Homo sapiens
  misc_RNA (1)...(19): siRNA sense strand
ugggugaugucaaagagaa

SEQ ID NO: 1372367 - RNA, 19 nt, Homo sapiens
  misc_RNA (1)...(19): siRNA sense strand
gcaaaauguucuuuacuac

SEQ ID NO: 1372368 - RNA, 19 nt, Homo sapiens
  misc_RNA (1)...(19): siRNA sense strand
ucuaccagaugacuauaau

SEQ ID NO: 1372369 - RNA, 19 nt, Homo sapiens
  misc_RNA (1)...(19): siRNA sense strand
gaaucugaauccuccaaaa

SEQ ID NO: 1372370 - RNA, 19 nt, Homo sapiens
  misc_RNA (1)...(19): siRNA sense strand
gauccugugcauaauaaug

SEQ ID NO: 1372371 - RNA, 19 nt, Homo sapiens
  misc_RNA (1)...(19): siRNA sense strand
gaacaacuuagcaaaaugu

SEQ ID NO: 1372372 - RNA, 19 nt, Homo sapiens
  misc_RNA (1)...(19): siRNA sense strand
ggacaauaguaugcuacca

SEQ ID NO: 1372373 - RNA, 19 nt, Homo sapiens
  misc_RNA (1)...(19): siRNA sense strand
gucauaaaucuacguauuc

SEQ ID NO: 1372374 - RNA, 19 nt, Homo sapiens
  misc_RNA (1)...(19): siRNA sense strand
gcaguaaaaugggugaugu

SEQ ID NO: 1372375 - RNA, 19 nt, Homo sapiens
  misc_RNA (1)...(19): siRNA sense strand
ggacauuccauaugaacac

SEQ ID NO: 1372376 - RNA, 19 nt, Homo sapiens
  misc_RNA (1)...(19): siRNA sense strand
acauuuauuuccaguccaa

SEQ ID NO: 1372377 - RNA, 19 nt, Homo sapiens
  misc_RNA (1)...(19): siRNA sense strand
cauggacgguaucacagau

SEQ ID NO: 1372378 - RNA, 19 nt, Homo sapiens
  misc_RNA (1)...(19): siRNA sense strand
ucugauggcaggacaauag

SEQ ID NO: 1372379 - RNA, 19 nt, Homo sapiens
  misc_RNA (1)...(19): siRNA sense strand
gacauuccauaugaacaca

SEQ ID NO: 1372380 - RNA, 19 nt, Homo sapiens
  misc_RNA (1)...(19): siRNA sense strand
ccucauggacgguaucaca

SEQ ID NO: 1372381 - RNA, 19 nt, Homo sapiens
  misc_RNA (1)...(19): siRNA sense strand
ugauagaacaacuuagcaa

SEQ ID NO: 1372382 - RNA, 19 nt, Homo sapiens
  misc_RNA (1)...(19): siRNA sense strand
guauucuccucuaccagau

SEQ ID NO: 1372383 - RNA, 19 nt, Homo sapiens
  misc_RNA (1)...(19): siRNA sense strand
gccagauccugugcauaau

SEQ ID NO: 1372384 - RNA, 19 nt, Homo sapiens
  misc_RNA (1)...(19): siRNA sense strand
aagaaacacaugaucaagu

SEQ ID NO: 1372385 - RNA, 19 nt, Homo sapiens
  misc_RNA (1)...(19): siRNA sense strand
cagaugacuauaauugcaa

SEQ ID NO: 1372386 - RNA, 19 nt, Homo sapiens
  misc_RNA (1)...(19): siRNA sense strand
cgguaucacagaugucgua

SEQ ID NO: 1372387 - RNA, 19 nt, Homo sapiens
  misc_RNA (1)...(19): siRNA sense strand
aaaaccagauuggaagaaa

SEQ ID NO: 1372388 - RNA, 19 nt, Homo sapiens
  misc_RNA (1)...(19): siRNA sense strand
caccguugguauccucaug

SEQ ID NO: 1372389 - RNA, 19 nt, Homo sapiens
  misc_RNA (1)...(19): siRNA sense strand
uaucacagaugucguaaga

SEQ ID NO: 1372390 - RNA, 19 nt, Homo sapiens
  misc_RNA (1)...(19): siRNA sense strand
ucacagaugucguaagaau

SEQ ID NO: 1372391 - RNA, 19 nt, Homo sapiens
  misc_RNA (1)...(19): siRNA sense strand
ggccagauccugugcauaa

SEQ ID NO: 1372392 - RNA, 19 nt, Homo sapiens
  misc_RNA (1)...(19): siRNA sense strand
cagauccugugcauaauaa

SEQ ID NO: 1372393 - RNA, 19 nt, Homo sapiens
  misc_RNA (1)...(19): siRNA sense strand
uaaaaugggugaugucaaa

SEQ ID NO: 1372394 - RNA, 19 nt, Homo sapiens
  misc_RNA (1)...(19): siRNA sense strand
gcaggacaauaguaugcua

SEQ ID NO: 1372395 - RNA, 19 nt, Homo sapiens
  misc_RNA (1)...(19): siRNA sense strand
ugacuauaauugcaacgua

SEQ ID NO: 1372396 - RNA, 19 nt, Homo sapiens
  misc_RNA (1)...(19): siRNA sense strand
agaaacacaugaucaagug

SEQ ID NO: 1372397 - RNA, 19 nt, Homo sapiens
  misc_RNA (1)...(19): siRNA sense strand
ggagcuuuauauuguguuu

SEQ ID NO: 1372398 - RNA, 19 nt, Homo sapiens
  misc_RNA (1)...(19): siRNA sense strand
gauagaacaacuuagcaaa

SEQ ID NO: 1372399 - RNA, 19 nt, Homo sapiens
  misc_RNA (1)...(19): siRNA sense strand
ugaggaaggaccuaugaua

SEQ ID NO: 1372400 - RNA, 19 nt, Homo sapiens
  misc_RNA (1)...(19): siRNA sense strand
agagaacuaucuugaaaca

SEQ ID NO: 1372401 - RNA, 19 nt, Homo sapiens
  misc_RNA (1)...(19): siRNA sense strand
ccagaugacuauaauugca

SEQ ID NO: 1372402 - RNA, 19 nt, Homo sapiens
  misc_RNA (1)...(19): siRNA sense strand
ccagauccugugcauaaua

SEQ ID NO: 1372403 - RNA, 19 nt, Homo sapiens
  misc_RNA (1)...(19): siRNA sense strand
ugaagaaacacaugaucaa

SEQ ID NO: 1372404 - RNA, 19 nt, Homo sapiens
  misc_RNA (1)...(19): siRNA sense strand
cuacuaagcaccguuggua

SEQ ID NO: 1372405 - RNA, 19 nt, Homo sapiens
  misc_RNA (1)...(19): siRNA sense strand
gaagaaacacaugaucaag

SEQ ID NO: 1372406 - RNA, 19 nt, Homo sapiens
  misc_RNA (1)...(19): siRNA sense strand
uaccagaugacuauaauug

SEQ ID NO: 1372407 - RNA, 19 nt, Homo sapiens
  misc_RNA (1)...(19): siRNA sense strand
gauggcaggacaauaguau

SEQ ID NO: 1372408 - RNA, 19 nt, Homo sapiens
  misc_RNA (1)...(19): siRNA sense strand
ggcuguagcugcaguaaaa

SEQ ID NO: 1372409 - RNA, 19 nt, Homo sapiens
  misc_RNA (1)...(19): siRNA sense strand
ugggugaugucaaagagaa

SEQ ID NO: 1372410 - RNA, 19 nt, Homo sapiens
  misc_RNA (1)...(19): siRNA sense strand
gcaaaauguucuuuacuac

SEQ ID NO: 1372411 - RNA, 19 nt, Homo sapiens
  misc_RNA (1)...(19): siRNA sense strand
ucuaccagaugacuauaau

SEQ ID NO: 1372412 - RNA, 19 nt, Homo sapiens
  misc_RNA (1)...(19): siRNA sense strand
gaaucugaauccuccaaaa

SEQ ID NO: 1372413 - RNA, 19 nt, Homo sapiens
  misc_RNA (1)...(19): siRNA sense strand
gauccugugcauaauaaug

SEQ ID NO: 1372414 - RNA, 19 nt, Homo sapiens
  misc_RNA (1)...(19): siRNA sense strand
gaacaacuuagcaaaaugu

SEQ ID NO: 1372415 - RNA, 19 nt, Homo sapiens
  misc_RNA (1)...(19): siRNA sense strand
ggacaauaguaugcuacca

SEQ ID NO: 1372416 - RNA, 19 nt, Homo sapiens
  misc_RNA (1)...(19): siRNA sense strand
gucauaaaucuacguauuc

SEQ ID NO: 1372417 - RNA, 19 nt, Homo sapiens
  misc_RNA (1)...(19): siRNA sense strand
gcaguaaaaugggugaugu

SEQ ID NO: 1372418 - RNA, 19 nt, Homo sapiens
  misc_RNA (1)...(19): siRNA sense strand
ggacauuccauaugaacac

SEQ ID NO: 1372419 - RNA, 19 nt, Homo sapiens
  misc_RNA (1)...(19): siRNA sense strand
acauuuauuuccaguccaa

SEQ ID NO: 1372420 - RNA, 19 nt, Homo sapiens
  misc_RNA (1)...(19): siRNA sense strand
cauggacgguaucacagau

SEQ ID NO: 1372421 - RNA, 19 nt, Homo sapiens
  misc_RNA (1)...(19): siRNA sense strand
ucugauggcaggacaauag

SEQ ID NO: 1372422 - RNA, 19 nt, Homo sapiens
  misc_RNA (1)...(19): siRNA sense strand
gacauuccauaugaacaca

SEQ ID NO: 1372423 - RNA, 19 nt, Homo sapiens
  misc_RNA (1)...(19): siRNA sense strand
ccucauggacgguaucaca

SEQ ID NO: 1372424 - RNA, 19 nt, Homo sapiens
  misc_RNA (1)...(19): siRNA sense strand
ugauagaacaacuuagcaa

SEQ ID NO: 1372425 - RNA, 19 nt, Homo sapiens
  misc_RNA (1)...(19): siRNA sense strand
guauucuccucuaccagau

SEQ ID NO: 1372426 - RNA, 19 nt, Homo sapiens
  misc_RNA (1)...(19): siRNA sense strand
gccagauccugugcauaau

SEQ ID NO: 1372427 - RNA, 19 nt, Homo sapiens
  misc_RNA (1)...(19): siRNA sense strand
aagaaacacaugaucaagu

SEQ ID NO: 1372428 - RNA, 19 nt, Homo sapiens
  misc_RNA (1)...(19): siRNA sense strand
cagaugacuauaauugcaa

SEQ ID NO: 1372429 - RNA, 19 nt, Homo sapiens
  misc_RNA (1)...(19): siRNA sense strand
cgguaucacagaugucgua

SEQ ID NO: 1372430 - RNA, 19 nt, Homo sapiens
  misc_RNA (1)...(19): siRNA sense strand
aaaaccagauuggaagaaa

SEQ ID NO: 1372431 - RNA, 19 nt, Homo sapiens
  misc_RNA (1)...(19): siRNA sense strand
caccguugguauccucaug

SEQ ID NO: 1372432 - RNA, 19 nt, Homo sapiens
  misc_RNA (1)...(19): siRNA sense strand
uaucacagaugucguaaga

SEQ ID NO: 1372433 - RNA, 19 nt, Homo sapiens
  misc_RNA (1)...(19): siRNA sense strand
ucacagaugucguaagaau

SEQ ID NO: 1372434 - RNA, 19 nt, Homo sapiens
  misc_RNA (1)...(19): siRNA sense strand
ggccagauccugugcauaa

SEQ ID NO: 1372435 - RNA, 19 nt, Homo sapiens
  misc_RNA (1)...(19): siRNA sense strand
cagauccugugcauaauaa

SEQ ID NO: 1372436 - RNA, 19 nt, Homo sapiens
  misc_RNA (1)...(19): siRNA sense strand
gcaggacaauaguaugcua

SEQ ID NO: 1372437 - RNA, 19 nt, Homo sapiens
  misc_RNA (1)...(19): siRNA sense strand
ugacuauaauugcaacgua

SEQ ID NO: 1372438 - RNA, 19 nt, Homo sapiens
  misc_RNA (1)...(19): siRNA sense strand
agaaacacaugaucaagug

SEQ ID NO: 1372439 - RNA, 19 nt, Homo sapiens
  misc_RNA (1)...(19): siRNA sense strand
ggagcuuuauauuguguuu

SEQ ID NO: 1372440 - RNA, 19 nt, Homo sapiens
  misc_RNA (1)...(19): siRNA sense strand
gauagaacaacuuagcaaa

SEQ ID NO: 1372441 - RNA, 19 nt, Homo sapiens
  misc_RNA (1)...(19): siRNA sense strand
ugaggaaggaccuaugaua

SEQ ID NO: 1372442 - RNA, 19 nt, Homo sapiens
  misc_RNA (1)...(19): siRNA sense strand
agagaacuaucuugaaaca

SEQ ID NO: 1372443 - RNA, 19 nt, Homo sapiens
  misc_RNA (1)...(19): siRNA sense strand
ccagaugacuauaauugca

SEQ ID NO: 1372444 - RNA, 19 nt, Homo sapiens
  misc_RNA (1)...(19): siRNA sense strand
ccagauccugugcauaaua

SEQ ID NO: 1372445 - RNA, 19 nt, Homo sapiens
  misc_RNA (1)...(19): siRNA sense strand
ugaagaaacacaugaucaa

SEQ ID NO: 1372446 - RNA, 19 nt, Homo sapiens
  misc_RNA (1)...(19): siRNA sense strand
cuacuaagcaccguuggua

SEQ ID NO: 1372447 - RNA, 19 nt, Homo sapiens
  misc_RNA (1)...(19): siRNA sense strand
gaagaaacacaugaucaag

SEQ ID NO: 1372448 - RNA, 19 nt, Homo sapiens
  misc_RNA (1)...(19): siRNA sense strand
uaccagaugacuauaauug

SEQ ID NO: 1372449 - RNA, 19 nt, Homo sapiens
  misc_RNA (1)...(19): siRNA sense strand
gauggcaggacaauaguau

SEQ ID NO: 1372450 - RNA, 19 nt, Homo sapiens
  misc_RNA (1)...(19): siRNA sense strand
gcaaaauguucuuuacuac

SEQ ID NO: 1372451 - RNA, 19 nt, Homo sapiens
  misc_RNA (1)...(19): siRNA sense strand
ucuaccagaugacuauaau

SEQ ID NO: 1372452 - RNA, 19 nt, Homo sapiens
  misc_RNA (1)...(19): siRNA sense strand
gaaucugaauccuccaaaa

SEQ ID NO: 1372453 - RNA, 19 nt, Homo sapiens
  misc_RNA (1)...(19): siRNA sense strand
gauccugugcauaauaaug

SEQ ID NO: 1372454 - RNA, 19 nt, Homo sapiens
  misc_RNA (1)...(19): siRNA sense strand
gaacaacuuagcaaaaugu

SEQ ID NO: 1372455 - RNA, 19 nt, Homo sapiens
  misc_RNA (1)...(19): siRNA sense strand
ggacaauaguaugcuacca

SEQ ID NO: 1372456 - RNA, 19 nt, Homo sapiens
  misc_RNA (1)...(19): siRNA sense strand
gucauaaaucuacguauuc

SEQ ID NO: 1372457 - RNA, 19 nt, Homo sapiens
  misc_RNA (1)...(19): siRNA sense strand
acauuuauuuccaguccaa

SEQ ID NO: 1372458 - RNA, 19 nt, Homo sapiens
  misc_RNA (1)...(19): siRNA sense strand
ggacauuccauaugaacac

SEQ ID NO: 1372459 - RNA, 19 nt, Homo sapiens
  misc_RNA (1)...(19): siRNA sense strand
cauggacgguaucacagau

SEQ ID NO: 1372460 - RNA, 19 nt, Homo sapiens
  misc_RNA (1)...(19): siRNA sense strand
ucugauggcaggacaauag

SEQ ID NO: 1372461 - RNA, 19 nt, Homo sapiens
  misc_RNA (1)...(19): siRNA sense strand
gacauuccauaugaacaca

SEQ ID NO: 1372462 - RNA, 19 nt, Homo sapiens
  misc_RNA (1)...(19): siRNA sense strand
ccucauggacgguaucaca

SEQ ID NO: 1372463 - RNA, 19 nt, Homo sapiens
  misc_RNA (1)...(19): siRNA sense strand
ugauagaacaacuuagcaa

SEQ ID NO: 1372464 - RNA, 19 nt, Homo sapiens
  misc_RNA (1)...(19): siRNA sense strand
guauucuccucuaccagau

SEQ ID NO: 1372465 - RNA, 19 nt, Homo sapiens
  misc_RNA (1)...(19): siRNA sense strand
gccagauccugugcauaau

SEQ ID NO: 1372466 - RNA, 19 nt, Homo sapiens
  misc_RNA (1)...(19): siRNA sense strand
aagaaacacaugaucaagu

SEQ ID NO: 1372467 - RNA, 19 nt, Homo sapiens
  misc_RNA (1)...(19): siRNA sense strand
cagaugacuauaauugcaa

SEQ ID NO: 1372468 - RNA, 19 nt, Homo sapiens
  misc_RNA (1)...(19): siRNA sense strand
cgguaucacagaugucgua

SEQ ID NO: 1372469 - RNA, 19 nt, Homo sapiens
  misc_RNA (1)...(19): siRNA sense strand
aaaaccagauuggaagaaa

SEQ ID NO: 1372470 - RNA, 19 nt, Homo sapiens
  misc_RNA (1)...(19): siRNA sense strand
caccguugguauccucaug

SEQ ID NO: 1372471 - RNA, 19 nt, Homo sapiens
  misc_RNA (1)...(19): siRNA sense strand
uaucacagaugucguaaga

SEQ ID NO: 1372472 - RNA, 19 nt, Homo sapiens
  misc_RNA (1)...(19): siRNA sense strand
ucacagaugucguaagaau

SEQ ID NO: 1372473 - RNA, 19 nt, Homo sapiens
  misc_RNA (1)...(19): siRNA sense strand
ggccagauccugugcauaa

SEQ ID NO: 1372474 - RNA, 19 nt, Homo sapiens
  misc_RNA (1)...(19): siRNA sense strand
cagauccugugcauaauaa

SEQ ID NO: 1372475 - RNA, 19 nt, Homo sapiens
  misc_RNA (1)...(19): siRNA sense strand
uaaaaugggugaugucaaa

SEQ ID NO: 1372476 - RNA, 19 nt, Homo sapiens
  misc_RNA (1)...(19): siRNA sense strand
gcaggacaauaguaugcua

SEQ ID NO: 1372477 - RNA, 19 nt, Homo sapiens
  misc_RNA (1)...(19): siRNA sense strand
ugacuauaauugcaacgua

SEQ ID NO: 1372478 - RNA, 19 nt, Homo sapiens
  misc_RNA (1)...(19): siRNA sense strand
agaaacacaugaucaagug

SEQ ID NO: 1372479 - RNA, 19 nt, Homo sapiens
  misc_RNA (1)...(19): siRNA sense strand
ggagcuuuauauuguguuu

SEQ ID NO: 1372480 - RNA, 19 nt, Homo sapiens
  misc_RNA (1)...(19): siRNA sense strand
gauagaacaacuuagcaaa

SEQ ID NO: 1372481 - RNA, 19 nt, Homo sapiens
  misc_RNA (1)...(19): siRNA sense strand
ugaggaaggaccuaugaua

SEQ ID NO: 1372482 - RNA, 19 nt, Homo sapiens
  misc_RNA (1)...(19): siRNA sense strand
agagaacuaucuugaaaca

SEQ ID NO: 1372483 - RNA, 19 nt, Homo sapiens
  misc_RNA (1)...(19): siRNA sense strand
ccagaugacuauaauugca

SEQ ID NO: 1372484 - RNA, 19 nt, Homo sapiens
  misc_RNA (1)...(19): siRNA sense strand
ccagauccugugcauaaua

SEQ ID NO: 1372485 - RNA, 19 nt, Homo sapiens
  misc_RNA (1)...(19): siRNA sense strand
ugaagaaacacaugaucaa

SEQ ID NO: 1372486 - RNA, 19 nt, Homo sapiens
  misc_RNA (1)...(19): siRNA sense strand
cuacuaagcaccguuggua

SEQ ID NO: 1372487 - RNA, 19 nt, Homo sapiens
  misc_RNA (1)...(19): siRNA sense strand
gaagaaacacaugaucaag

SEQ ID NO: 1372488 - RNA, 19 nt, Homo sapiens
  misc_RNA (1)...(19): siRNA sense strand
uaccagaugacuauaauug

SEQ ID NO: 1372489 - RNA, 19 nt, Homo sapiens
  misc_RNA (1)...(19): siRNA sense strand
gauggcaggacaauaguau

SEQ ID NO: 1372490 - RNA, 19 nt, Homo sapiens
  misc_RNA (1)...(19): siRNA sense strand
ggcuguagcugcaguaaaa

SEQ ID NO: 1372491 - RNA, 19 nt, Homo sapiens
  misc_RNA (1)...(19): siRNA sense strand
ugggugaugucaaagagaa

SEQ ID NO: 1372492 - RNA, 19 nt, Homo sapiens
  misc_RNA (1)...(19): siRNA sense strand
gcaaaauguucuuuacuac

SEQ ID NO: 1372493 - RNA, 19 nt, Homo sapiens
  misc_RNA (1)...(19): siRNA sense strand
ucuaccagaugacuauaau

SEQ ID NO: 1372494 - RNA, 19 nt, Homo sapiens
  misc_RNA (1)...(19): siRNA sense strand
gaaucugaauccuccaaaa

SEQ ID NO: 1372495 - RNA, 19 nt, Homo sapiens
  misc_RNA (1)...(19): siRNA sense strand
gauccugugcauaauaaug

SEQ ID NO: 1372496 - RNA, 19 nt, Homo sapiens
  misc_RNA (1)...(19): siRNA sense strand
gaacaacuuagcaaaaugu

SEQ ID NO: 1372497 - RNA, 19 nt, Homo sapiens
  misc_RNA (1)...(19): siRNA sense strand
ggacaauaguaugcuacca

SEQ ID NO: 1372498 - RNA, 19 nt, Homo sapiens
  misc_RNA (1)...(19): siRNA sense strand
gucauaaaucuacguauuc

SEQ ID NO: 1372499 - RNA, 19 nt, Homo sapiens
  misc_RNA (1)...(19): siRNA sense strand
gcaguaaaaugggugaugu

SEQ ID NO: 1372500 - RNA, 19 nt, Homo sapiens
  misc_RNA (1)...(19): siRNA sense strand
ggacauuccauaugaacac

SEQ ID NO: 1372501 - RNA, 19 nt, Homo sapiens
  misc_RNA (1)...(19): siRNA sense strand
acauuuauuuccaguccaa

SEQ ID NO: 1372502 - RNA, 19 nt, Homo sapiens
  misc_RNA (1)...(19): siRNA sense strand
cauggacgguaucacagau

SEQ ID NO: 1372503 - RNA, 19 nt, Homo sapiens
  misc_RNA (1)...(19): siRNA sense strand
ucugauggcaggacaauag

SEQ ID NO: 1372504 - RNA, 19 nt, Homo sapiens
  misc_RNA (1)...(19): siRNA sense strand
gacauuccauaugaacaca

SEQ ID NO: 1372505 - RNA, 19 nt, Homo sapiens
  misc_RNA (1)...(19): siRNA sense strand
ccucauggacgguaucaca

SEQ ID NO: 1372506 - RNA, 19 nt, Homo sapiens
  misc_RNA (1)...(19): siRNA sense strand
ugauagaacaacuuagcaa

SEQ ID NO: 1372507 - RNA, 19 nt, Homo sapiens
  misc_RNA (1)...(19): siRNA sense strand
guauucuccucuaccagau

SEQ ID NO: 1372508 - RNA, 19 nt, Homo sapiens
  misc_RNA (1)...(19): siRNA sense strand
gccagauccugugcauaau

SEQ ID NO: 1372509 - RNA, 19 nt, Homo sapiens
  misc_RNA (1)...(19): siRNA sense strand
aagaaacacaugaucaagu

SEQ ID NO: 1372510 - RNA, 19 nt, Homo sapiens
  misc_RNA (1)...(19): siRNA sense strand
cagaugacuauaauugcaa

SEQ ID NO: 1372511 - RNA, 19 nt, Homo sapiens
  misc_RNA (1)...(19): siRNA sense strand
cgguaucacagaugucgua

SEQ ID NO: 1372512 - RNA, 19 nt, Homo sapiens
  misc_RNA (1)...(19): siRNA sense strand
aaaaccagauuggaagaaa

SEQ ID NO: 1372513 - RNA, 19 nt, Homo sapiens
  misc_RNA (1)...(19): siRNA sense strand
caccguugguauccucaug

SEQ ID NO: 1372514 - RNA, 19 nt, Homo sapiens
  misc_RNA (1)...(19): siRNA sense strand
uaucacagaugucguaaga

SEQ ID NO: 1372515 - RNA, 19 nt, Homo sapiens
  misc_RNA (1)...(19): siRNA sense strand
ucacagaugucguaagaau

SEQ ID NO: 1372516 - RNA, 19 nt, Homo sapiens
  misc_RNA (1)...(19): siRNA sense strand
ggccagauccugugcauaa

SEQ ID NO: 1372517 - RNA, 19 nt, Homo sapiens
  misc_RNA (1)...(19): siRNA sense strand
cagauccugugcauaauaa

SEQ ID NO: 1372518 - RNA, 19 nt, Homo sapiens
  misc_RNA (1)...(19): siRNA sense strand
uaaaaugggugaugucaaa

SEQ ID NO: 1372519 - RNA, 19 nt, Homo sapiens
  misc_RNA (1)...(19): siRNA sense strand
gcaggacaauaguaugcua

SEQ ID NO: 1372520 - RNA, 19 nt, Homo sapiens
  misc_RNA (1)...(19): siRNA sense strand
ugacuauaauugcaacgua

SEQ ID NO: 1372521 - RNA, 19 nt, Homo sapiens
  misc_RNA (1)...(19): siRNA sense strand
agaaacacaugaucaagug

SEQ ID NO: 1372522 - RNA, 19 nt, Homo sapiens
  misc_RNA (1)...(19): siRNA sense strand
ggagcuuuauauuguguuu

SEQ ID NO: 1372523 - RNA, 19 nt, Homo sapiens
  misc_RNA (1)...(19): siRNA sense strand
gauagaacaacuuagcaaa

SEQ ID NO: 1372524 - RNA, 19 nt, Homo sapiens
  misc_RNA (1)...(19): siRNA sense strand
ugaggaaggaccuaugaua

SEQ ID NO: 1372525 - RNA, 19 nt, Homo sapiens
  misc_RNA (1)...(19): siRNA sense strand
agagaacuaucuugaaaca

SEQ ID NO: 1372526 - RNA, 19 nt, Homo sapiens
  misc_RNA (1)...(19): siRNA sense strand
ccagaugacuauaauugca

SEQ ID NO: 1372527 - RNA, 19 nt, Homo sapiens
  misc_RNA (1)...(19): siRNA sense strand
ccagauccugugcauaaua

SEQ ID NO: 1372528 - RNA, 19 nt, Homo sapiens
  misc_RNA (1)...(19): siRNA sense strand
ugaagaaacacaugaucaa

SEQ ID NO: 1372529 - RNA, 19 nt, Homo sapiens
  misc_RNA (1)...(19): siRNA sense strand
cuacuaagcaccguuggua

SEQ ID NO: 1372530 - RNA, 19 nt, Homo sapiens
  misc_RNA (1)...(19): siRNA sense strand
gaagaaacacaugaucaag

SEQ ID NO: 1372531 - RNA, 19 nt, Homo sapiens
  misc_RNA (1)...(19): siRNA sense strand
uaccagaugacuauaauug

SEQ ID NO: 1372532 - RNA, 19 nt, Homo sapiens
  misc_RNA (1)...(19): siRNA sense strand
gauggcaggacaauaguau

SEQ ID NO: 1372533 - RNA, 19 nt, Homo sapiens
  misc_RNA (1)...(19): siRNA sense strand
ggcuguagcugcaguaaaa

SEQ ID NO: 1372534 - RNA, 19 nt, Homo sapiens
  misc_RNA (1)...(19): siRNA sense strand
ugggugaugucaaagagaa

SEQ ID NO: 1372535 - RNA, 19 nt, Homo sapiens
  misc_RNA (1)...(19): siRNA sense strand
gcaaaauguucuuuacuac

SEQ ID NO: 1372536 - RNA, 19 nt, Homo sapiens
  misc_RNA (1)...(19): siRNA sense strand
ucuaccagaugacuauaau

SEQ ID NO: 1372537 - RNA, 19 nt, Homo sapiens
  misc_RNA (1)...(19): siRNA sense strand
gaaucugaauccuccaaaa

SEQ ID NO: 1372538 - RNA, 19 nt, Homo sapiens
  misc_RNA (1)...(19): siRNA sense strand
gauccugugcauaauaaug

SEQ ID NO: 1372539 - RNA, 19 nt, Homo sapiens
  misc_RNA (1)...(19): siRNA sense strand
gaacaacuuagcaaaaugu

SEQ ID NO: 1372540 - RNA, 19 nt, Homo sapiens
  misc_RNA (1)...(19): siRNA sense strand
ggacaauaguaugcuacca

SEQ ID NO: 1372541 - RNA, 19 nt, Homo sapiens
  misc_RNA (1)...(19): siRNA sense strand
gucauaaaucuacguauuc

SEQ ID NO: 1372542 - RNA, 19 nt, Homo sapiens
  misc_RNA (1)...(19): siRNA sense strand
gcaguaaaaugggugaugu

SEQ ID NO: 1372543 - RNA, 19 nt, Homo sapiens
  misc_RNA (1)...(19): siRNA sense strand
ggacauuccauaugaacac

SEQ ID NO: 1372544 - RNA, 19 nt, Homo sapiens
  misc_RNA (1)...(19): siRNA sense strand
acauuuauuuccaguccaa

SEQ ID NO: 1372545 - RNA, 19 nt, Homo sapiens
  misc_RNA (1)...(19): siRNA sense strand
cauggacgguaucacagau

SEQ ID NO: 1372546 - RNA, 19 nt, Homo sapiens
  misc_RNA (1)...(19): siRNA sense strand
ucugauggcaggacaauag

SEQ ID NO: 1372547 - RNA, 19 nt, Homo sapiens
  misc_RNA (1)...(19): siRNA sense strand
gacauuccauaugaacaca

SEQ ID NO: 1372548 - RNA, 19 nt, Homo sapiens
  misc_RNA (1)...(19): siRNA sense strand
ccucauggacgguaucaca

SEQ ID NO: 1372549 - RNA, 19 nt, Homo sapiens
  misc_RNA (1)...(19): siRNA sense strand
ugauagaacaacuuagcaa

SEQ ID NO: 1372550 - RNA, 19 nt, Homo sapiens
  misc_RNA (1)...(19): siRNA sense strand
guauucuccucuaccagau

SEQ ID NO: 1372551 - RNA, 19 nt, Homo sapiens
  misc_RNA (1)...(19): siRNA sense strand
gccagauccugugcauaau

SEQ ID NO: 1372552 - RNA, 19 nt, Homo sapiens
  misc_RNA (1)...(19): siRNA sense strand
aagaaacacaugaucaagu

SEQ ID NO: 1372553 - RNA, 19 nt, Homo sapiens
  misc_RNA (1)...(19): siRNA sense strand
cagaugacuauaauugcaa

SEQ ID NO: 1372554 - RNA, 19 nt, Homo sapiens
  misc_RNA (1)...(19): siRNA sense strand
cgguaucacagaugucgua

SEQ ID NO: 1372555 - RNA, 19 nt, Homo sapiens
  misc_RNA (1)...(19): siRNA sense strand
aaaaccagauuggaagaaa

SEQ ID NO: 1372556 - RNA, 19 nt, Homo sapiens
  misc_RNA (1)...(19): siRNA sense strand
caccguugguauccucaug

SEQ ID NO: 1372557 - RNA, 19 nt, Homo sapiens
  misc_RNA (1)...(19): siRNA sense strand
uaucacagaugucguaaga

SEQ ID NO: 1372558 - RNA, 19 nt, Homo sapiens
  misc_RNA (1)...(19): siRNA sense strand
ucacagaugucguaagaau

SEQ ID NO: 1372559 - RNA, 19 nt, Homo sapiens
  misc_RNA (1)...(19): siRNA sense strand
ggccagauccugugcauaa

SEQ ID NO: 1372560 - RNA, 19 nt, Homo sapiens
  misc_RNA (1)...(19): siRNA sense strand
cagauccugugcauaauaa

SEQ ID NO: 1372561 - RNA, 19 nt, Homo sapiens
  misc_RNA (1)...(19): siRNA sense strand
gcaggacaauaguaugcua

SEQ ID NO: 1372562 - RNA, 19 nt, Homo sapiens
  misc_RNA (1)...(19): siRNA sense strand
ugacuauaauugcaacgua

SEQ ID NO: 1372563 - RNA, 19 nt, Homo sapiens
  misc_RNA (1)...(19): siRNA sense strand
agaaacacaugaucaagug

SEQ ID NO: 1372564 - RNA, 19 nt, Homo sapiens
  misc_RNA (1)...(19): siRNA sense strand
ggagcuuuauauuguguuu

SEQ ID NO: 1372565 - RNA, 19 nt, Homo sapiens
  misc_RNA (1)...(19): siRNA sense strand
gauagaacaacuuagcaaa

SEQ ID NO: 1372566 - RNA, 19 nt, Homo sapiens
  misc_RNA (1)...(19): siRNA sense strand
ugaggaaggaccuaugaua

SEQ ID NO: 1372567 - RNA, 19 nt, Homo sapiens
  misc_RNA (1)...(19): siRNA sense strand
agagaacuaucuugaaaca

SEQ ID NO: 1372568 - RNA, 19 nt, Homo sapiens
  misc_RNA (1)...(19): siRNA sense strand
ccagaugacuauaauugca

SEQ ID NO: 1372569 - RNA, 19 nt, Homo sapiens
  misc_RNA (1)...(19): siRNA sense strand
ccagauccugugcauaaua

SEQ ID NO: 1372570 - RNA, 19 nt, Homo sapiens
  misc_RNA (1)...(19): siRNA sense strand
ugaagaaacacaugaucaa

SEQ ID NO: 1372571 - RNA, 19 nt, Homo sapiens
  misc_RNA (1)...(19): siRNA sense strand
cuacuaagcaccguuggua

SEQ ID NO: 1372572 - RNA, 19 nt, Homo sapiens
  misc_RNA (1)...(19): siRNA sense strand
gaagaaacacaugaucaag

SEQ ID NO: 1372573 - RNA, 19 nt, Homo sapiens
  misc_RNA (1)...(19): siRNA sense strand
uaccagaugacuauaauug

SEQ ID NO: 1372574 - RNA, 19 nt, Homo sapiens
  misc_RNA (1)...(19): siRNA sense strand
gauggcaggacaauaguau

SEQ ID NO: 1372575 - RNA, 19 nt, Homo sapiens
  misc_RNA (1)...(19): siRNA sense strand
gcaaaauguucuuuacuac

SEQ ID NO: 1372576 - RNA, 19 nt, Homo sapiens
  misc_RNA (1)...(19): siRNA sense strand
ucuaccagaugacuauaau

SEQ ID NO: 1372577 - RNA, 19 nt, Homo sapiens
  misc_RNA (1)...(19): siRNA sense strand
gaaucugaauccuccaaaa

SEQ ID NO: 1372578 - RNA, 19 nt, Homo sapiens
  misc_RNA (1)...(19): siRNA sense strand
gauccugugcauaauaaug

SEQ ID NO: 1372579 - RNA, 19 nt, Homo sapiens
  misc_RNA (1)...(19): siRNA sense strand
gaacaacuuagcaaaaugu

SEQ ID NO: 1372580 - RNA, 19 nt, Homo sapiens
  misc_RNA (1)...(19): siRNA sense strand
ggacaauaguaugcuacca

SEQ ID NO: 1372581 - RNA, 19 nt, Homo sapiens
  misc_RNA (1)...(19): siRNA sense strand
gucauaaaucuacguauuc

SEQ ID NO: 1372582 - RNA, 19 nt, Homo sapiens
  misc_RNA (1)...(19): siRNA sense strand
acauuuauuuccaguccaa

SEQ ID NO: 1372583 - RNA, 19 nt, Homo sapiens
  misc_RNA (1)...(19): siRNA sense strand
ggacauuccauaugaacac

SEQ ID NO: 1372584 - RNA, 19 nt, Homo sapiens
  misc_RNA (1)...(19): siRNA sense strand
cauggacgguaucacagau

SEQ ID NO: 1372585 - RNA, 19 nt, Homo sapiens
  misc_RNA (1)...(19): siRNA sense strand
ucugauggcaggacaauag

SEQ ID NO: 1372586 - RNA, 19 nt, Homo sapiens
  misc_RNA (1)...(19): siRNA sense strand
gacauuccauaugaacaca

SEQ ID NO: 1372587 - RNA, 19 nt, Homo sapiens
  misc_RNA (1)...(19): siRNA sense strand
ccucauggacgguaucaca

SEQ ID NO: 1372588 - RNA, 19 nt, Homo sapiens
  misc_RNA (1)...(19): siRNA sense strand
ugauagaacaacuuagcaa

SEQ ID NO: 1372589 - RNA, 19 nt, Homo sapiens
  misc_RNA (1)...(19): siRNA sense strand
guauucuccucuaccagau

SEQ ID NO: 1372590 - RNA, 19 nt, Homo sapiens
  misc_RNA (1)...(19): siRNA sense strand
gccagauccugugcauaau

SEQ ID NO: 1372591 - RNA, 19 nt, Homo sapiens
  misc_RNA (1)...(19): siRNA sense strand
aagaaacacaugaucaagu

SEQ ID NO: 1372592 - RNA, 19 nt, Homo sapiens
  misc_RNA (1)...(19): siRNA sense strand
cagaugacuauaauugcaa

SEQ ID NO: 1372593 - RNA, 19 nt, Homo sapiens
  misc_RNA (1)...(19): siRNA sense strand
cgguaucacagaugucgua

SEQ ID NO: 1372594 - RNA, 19 nt, Homo sapiens
  misc_RNA (1)...(19): siRNA sense strand
aaaaccagauuggaagaaa

SEQ ID NO: 1372595 - RNA, 19 nt, Homo sapiens
  misc_RNA (1)...(19): siRNA sense strand
caccguugguauccucaug

SEQ ID NO: 1372596 - RNA, 19 nt, Homo sapiens
  misc_RNA (1)...(19): siRNA sense strand
gaaggucuccgaugucaua

SEQ ID NO: 1372597 - RNA, 19 nt, Homo sapiens
  misc_RNA (1)...(19): siRNA sense strand
gaucauacaugcgcuguga

SEQ ID NO: 1372598 - RNA, 19 nt, Homo sapiens
  misc_RNA (1)...(19): siRNA sense strand
gccgugagcuggugaagaa

SEQ ID NO: 1372599 - RNA, 19 nt, Homo sapiens
  misc_RNA (1)...(19): siRNA sense strand
ugaagaaggucuccgaugu

SEQ ID NO: 1372600 - RNA, 19 nt, Homo sapiens
  misc_RNA (1)...(19): siRNA sense strand
ggagcuggcuguaccugaa

SEQ ID NO: 1372601 - RNA, 19 nt, Homo sapiens
  misc_RNA (1)...(19): siRNA sense strand
gaucaugccuggguagugu

SEQ ID NO: 1372602 - RNA, 19 nt, Homo sapiens
  misc_RNA (1)...(19): siRNA sense strand
ugggacaucuggaaaggua

SEQ ID NO: 1372603 - RNA, 19 nt, Homo sapiens
  misc_RNA (1)...(19): siRNA sense strand
caaggaguucuuugaagua

SEQ ID NO: 1372604 - RNA, 19 nt, Homo sapiens
  misc_RNA (1)...(19): siRNA sense strand
acaaggaguucuuugaagu

SEQ ID NO: 1372605 - RNA, 19 nt, Homo sapiens
  misc_RNA (1)...(19): siRNA sense strand
gaaccuggcagaucuagag

SEQ ID NO: 1372606 - RNA, 19 nt, Homo sapiens
  misc_RNA (1)...(19): siRNA sense strand
ggucuccgaugucauaugg

SEQ ID NO: 1372607 - RNA, 19 nt, Homo sapiens
  misc_RNA (1)...(19): siRNA sense strand
ccacugucauccaggacua

SEQ ID NO: 1372608 - RNA, 19 nt, Homo sapiens
  misc_RNA (1)...(19): siRNA sense strand
acgaggagaucuacaagga

SEQ ID NO: 1372609 - RNA, 19 nt, Homo sapiens
  misc_RNA (1)...(19): siRNA sense strand
cgucaucccuaccaacguu

SEQ ID NO: 1372610 - RNA, 19 nt, Homo sapiens
  misc_RNA (1)...(19): siRNA sense strand
gaagaaggucuccgauguc

SEQ ID NO: 1372611 - RNA, 19 nt, Homo sapiens
  misc_RNA (1)...(19): siRNA sense strand
gggaagacgaggagaucua

SEQ ID NO: 1372612 - RNA, 19 nt, Homo sapiens
  misc_RNA (1)...(19): siRNA sense strand
gaacacaucuaccccuaca

SEQ ID NO: 1372613 - RNA, 19 nt, Homo sapiens
  misc_RNA (1)...(19): siRNA sense strand
gaagaugaagggcaugaag

SEQ ID NO: 1372614 - RNA, 19 nt, Homo sapiens
  misc_RNA (1)...(19): siRNA sense strand
ugacuacacucugucuuuc

SEQ ID NO: 1372615 - RNA, 19 nt, Homo sapiens
  misc_RNA (1)...(19): siRNA sense strand
cuacaaggaguucuuugaa

SEQ ID NO: 1372616 - RNA, 19 nt, Homo sapiens
  misc_RNA (1)...(19): siRNA sense strand
cagaaggugcgcauaguga

SEQ ID NO: 1372617 - RNA, 19 nt, Homo sapiens
  misc_RNA (1)...(19): siRNA sense strand
gccaucaacccuuccauug

SEQ ID NO: 1372618 - RNA, 19 nt, Homo sapiens
  misc_RNA (1)...(19): siRNA sense strand
gugacuacacucugucuuu

SEQ ID NO: 1372619 - RNA, 19 nt, Homo sapiens
  misc_RNA (1)...(19): siRNA sense strand
ugaaguagccaaugauguc

SEQ ID NO: 1372620 - RNA, 19 nt, Homo sapiens
  misc_RNA (1)...(19): siRNA sense strand
gaucuacaaggaguucuuu

SEQ ID NO: 1372621 - RNA, 19 nt, Homo sapiens
  misc_RNA (1)...(19): siRNA sense strand
gcagaaggugcgcauagug

SEQ ID NO: 1372622 - RNA, 19 nt, Homo sapiens
  misc_RNA (1)...(19): siRNA sense strand
aagaaggucuccgauguca

SEQ ID NO: 1372623 - RNA, 19 nt, Homo sapiens
  misc_RNA (1)...(19): siRNA sense strand
gaccuacuaucgggaugaa

SEQ ID NO: 1372624 - RNA, 19 nt, Homo sapiens
  misc_RNA (1)...(19): siRNA sense strand
uagggaaccuggcagaucu

SEQ ID NO: 1372625 - RNA, 19 nt, Homo sapiens
  misc_RNA (1)...(19): siRNA sense strand
ucuccgaugucauauggaa

SEQ ID NO: 1372626 - RNA, 19 nt, Homo sapiens
  misc_RNA (1)...(19): siRNA sense strand
gagaagaugaagggcauga

SEQ ID NO: 1372627 - RNA, 19 nt, Homo sapiens
  misc_RNA (1)...(19): siRNA sense strand
cgacguggugcgccuguuu

SEQ ID NO: 1372628 - RNA, 19 nt, Homo sapiens
  misc_RNA (1)...(19): siRNA sense strand
ucuuugaaguagccaauga

SEQ ID NO: 1372629 - RNA, 19 nt, Homo sapiens
  misc_RNA (1)...(19): siRNA sense strand
uacaaggaguucuuugaag

SEQ ID NO: 1372630 - RNA, 19 nt, Homo sapiens
  misc_RNA (1)...(19): siRNA sense strand
ccugaaaggaucauacaug

SEQ ID NO: 1372631 - RNA, 19 nt, Homo sapiens
  misc_RNA (1)...(19): siRNA sense strand
gaaguagccaaugauguca

SEQ ID NO: 1372632 - RNA, 19 nt, Homo sapiens
  misc_RNA (1)...(19): siRNA sense strand
ccacauccagucccucuuc

SEQ ID NO: 1372633 - RNA, 19 nt, Homo sapiens
  misc_RNA (1)...(19): siRNA sense strand
ggcagaaggugcgcauagu

SEQ ID NO: 1372634 - RNA, 19 nt, Homo sapiens
  misc_RNA (1)...(19): siRNA sense strand
gcagaugaagaagcagaaa

SEQ ID NO: 1372635 - RNA, 19 nt, Homo sapiens
  misc_RNA (1)...(19): siRNA sense strand
cagcuccgguguggccuuu

SEQ ID NO: 1372636 - RNA, 19 nt, Homo sapiens
  misc_RNA (1)...(19): siRNA sense strand
gaccugggacaucuggaaa

SEQ ID NO: 1372637 - RNA, 19 nt, Homo sapiens
  misc_RNA (1)...(19): siRNA sense strand
gagcuggcuguaccugaaa

SEQ ID NO: 1372638 - RNA, 19 nt, Homo sapiens
  misc_RNA (1)...(19): siRNA sense strand
cagacccacucacccucua

SEQ ID NO: 1372639 - RNA, 19 nt, Homo sapiens
  misc_RNA (1)...(19): siRNA sense strand
ggagaucuacaaggaguuc

SEQ ID NO: 1372640 - RNA, 19 nt, Homo sapiens
  misc_RNA (1)...(19): siRNA sense strand
gcugugaccgcaagaugga

SEQ ID NO: 1372641 - RNA, 19 nt, Homo sapiens
  misc_RNA (1)...(19): siRNA sense strand
ggaagccuccugggacugu

SEQ ID NO: 1372642 - RNA, 19 nt, Homo sapiens
  misc_RNA (1)...(19): siRNA sense strand
gggcugggccaccuuucuu

SEQ ID NO: 1372643 - RNA, 19 nt, Homo sapiens
  misc_RNA (1)...(19): siRNA sense strand
ucuaugaccugggacaucu

SEQ ID NO: 1372644 - RNA, 19 nt, Homo sapiens
  misc_RNA (1)...(19): siRNA sense strand
ugaaggaggcagccagcuu

SEQ ID NO: 1372645 - RNA, 19 nt, Homo sapiens
  misc_RNA (1)...(19): siRNA sense strand
ggaagacgaggagaucuac

SEQ ID NO: 1372646 - RNA, 19 nt, Homo sapiens
  misc_RNA (1)...(19): siRNA sense strand
ccucagccaagaccuacua

SEQ ID NO: 1372647 - RNA, 19 nt, Homo sapiens
  misc_RNA (1)...(19): siRNA sense strand
agucgcaagugcagaugaa

SEQ ID NO: 1372648 - RNA, 19 nt, Homo sapiens
  misc_RNA (1)...(19): siRNA sense strand
ucuacaaggaguucuuuga

SEQ ID NO: 1372649 - RNA, 19 nt, Homo sapiens
  misc_RNA (1)...(19): siRNA sense strand
ugcucuggcugcucuauga

SEQ ID NO: 1372650 - RNA, 19 nt, Homo sapiens
  misc_RNA (1)...(19): siRNA sense strand
gcagcgcaaaggccucuga

SEQ ID NO: 1372651 - RNA, 19 nt, Homo sapiens
  misc_RNA (1)...(19): siRNA sense strand
agauggagguggcguucau

SEQ ID NO: 1372652 - RNA, 19 nt, Homo sapiens
  misc_RNA (1)...(19): siRNA sense strand
gaugaagaagcagaaagug

SEQ ID NO: 1372653 - RNA, 19 nt, Homo sapiens
  misc_RNA (1)...(19): siRNA sense strand
cgcaagugcagaugaagaa

SEQ ID NO: 1372654 - RNA, 19 nt, Homo sapiens
  misc_RNA (1)...(19): siRNA sense strand
uccagucccucuucagcuu

SEQ ID NO: 1372655 - RNA, 19 nt, Homo sapiens
  misc_RNA (1)...(19): siRNA sense strand
gcgcugugaccgcaagaug

SEQ ID NO: 1372656 - RNA, 19 nt, Homo sapiens
  misc_RNA (1)...(19): siRNA sense strand
uggccgaccugucuaucau

SEQ ID NO: 1372657 - RNA, 19 nt, Homo sapiens
  misc_RNA (1)...(19): siRNA sense strand
aaggaguucuuugaaguag

SEQ ID NO: 1372658 - RNA, 19 nt, Homo sapiens
  misc_RNA (1)...(19): siRNA sense strand
cagccaagaccuacuaucg

SEQ ID NO: 1372659 - RNA, 19 nt, Homo sapiens
  misc_RNA (1)...(19): siRNA sense strand
gucccucuauccucgagaa

SEQ ID NO: 1372660 - RNA, 19 nt, Homo sapiens
  misc_RNA (1)...(19): siRNA sense strand
gccaucaagcugcaacuca

SEQ ID NO: 1372661 - RNA, 19 nt, Homo sapiens
  misc_RNA (1)...(19): siRNA sense strand
ccgacucgcuggagcuucu

SEQ ID NO: 1372662 - RNA, 19 nt, Homo sapiens
  misc_RNA (1)...(19): siRNA sense strand
gaaggucuccgaugucaua

SEQ ID NO: 1372663 - RNA, 19 nt, Homo sapiens
  misc_RNA (1)...(19): siRNA sense strand
gaucauacaugcgcuguga

SEQ ID NO: 1372664 - RNA, 19 nt, Homo sapiens
  misc_RNA (1)...(19): siRNA sense strand
gccgugagcuggugaagaa

SEQ ID NO: 1372665 - RNA, 19 nt, Homo sapiens
  misc_RNA (1)...(19): siRNA sense strand
ugaagaaggucuccgaugu

SEQ ID NO: 1372666 - RNA, 19 nt, Homo sapiens
  misc_RNA (1)...(19): siRNA sense strand
ggagcuggcuguaccugaa

SEQ ID NO: 1372667 - RNA, 19 nt, Homo sapiens
  misc_RNA (1)...(19): siRNA sense strand
gaucaugccuggguagugu

SEQ ID NO: 1372668 - RNA, 19 nt, Homo sapiens
  misc_RNA (1)...(19): siRNA sense strand
ugggacaucuggaaaggua

SEQ ID NO: 1372669 - RNA, 19 nt, Homo sapiens
  misc_RNA (1)...(19): siRNA sense strand
caaggaguucuuugaagua

SEQ ID NO: 1372670 - RNA, 19 nt, Homo sapiens
  misc_RNA (1)...(19): siRNA sense strand
acaaggaguucuuugaagu

SEQ ID NO: 1372671 - RNA, 19 nt, Homo sapiens
  misc_RNA (1)...(19): siRNA sense strand
gaaccuggcagaucuagag

SEQ ID NO: 1372672 - RNA, 19 nt, Homo sapiens
  misc_RNA (1)...(19): siRNA sense strand
ggucuccgaugucauaugg

SEQ ID NO: 1372673 - RNA, 19 nt, Homo sapiens
  misc_RNA (1)...(19): siRNA sense strand
ccacugucauccaggacua

SEQ ID NO: 1372674 - RNA, 19 nt, Homo sapiens
  misc_RNA (1)...(19): siRNA sense strand
acgaggagaucuacaagga

SEQ ID NO: 1372675 - RNA, 19 nt, Homo sapiens
  misc_RNA (1)...(19): siRNA sense strand
cgucaucccuaccaacguu

SEQ ID NO: 1372676 - RNA, 19 nt, Homo sapiens
  misc_RNA (1)...(19): siRNA sense strand
gaagaaggucuccgauguc

SEQ ID NO: 1372677 - RNA, 19 nt, Homo sapiens
  misc_RNA (1)...(19): siRNA sense strand
gggaagacgaggagaucua

SEQ ID NO: 1372678 - RNA, 19 nt, Homo sapiens
  misc_RNA (1)...(19): siRNA sense strand
gaacacaucuaccccuaca

SEQ ID NO: 1372679 - RNA, 19 nt, Homo sapiens
  misc_RNA (1)...(19): siRNA sense strand
gaagaugaagggcaugaag

SEQ ID NO: 1372680 - RNA, 19 nt, Homo sapiens
  misc_RNA (1)...(19): siRNA sense strand
ugacuacacucugucuuuc

SEQ ID NO: 1372681 - RNA, 19 nt, Homo sapiens
  misc_RNA (1)...(19): siRNA sense strand
cuacaaggaguucuuugaa

SEQ ID NO: 1372682 - RNA, 19 nt, Homo sapiens
  misc_RNA (1)...(19): siRNA sense strand
cagaaggugcgcauaguga

SEQ ID NO: 1372683 - RNA, 19 nt, Homo sapiens
  misc_RNA (1)...(19): siRNA sense strand
gccaucaacccuuccauug

SEQ ID NO: 1372684 - RNA, 19 nt, Homo sapiens
  misc_RNA (1)...(19): siRNA sense strand
gugacuacacucugucuuu

SEQ ID NO: 1372685 - RNA, 19 nt, Homo sapiens
  misc_RNA (1)...(19): siRNA sense strand
ugaaguagccaaugauguc

SEQ ID NO: 1372686 - RNA, 19 nt, Homo sapiens
  misc_RNA (1)...(19): siRNA sense strand
gaucuacaaggaguucuuu

SEQ ID NO: 1372687 - RNA, 19 nt, Homo sapiens
  misc_RNA (1)...(19): siRNA sense strand
gcagaaggugcgcauagug

SEQ ID NO: 1372688 - RNA, 19 nt, Homo sapiens
  misc_RNA (1)...(19): siRNA sense strand
aagaaggucuccgauguca

SEQ ID NO: 1372689 - RNA, 19 nt, Homo sapiens
  misc_RNA (1)...(19): siRNA sense strand
gaccuacuaucgggaugaa

SEQ ID NO: 1372690 - RNA, 19 nt, Homo sapiens
  misc_RNA (1)...(19): siRNA sense strand
uagggaaccuggcagaucu

SEQ ID NO: 1372691 - RNA, 19 nt, Homo sapiens
  misc_RNA (1)...(19): siRNA sense strand
ucuccgaugucauauggaa

SEQ ID NO: 1372692 - RNA, 19 nt, Homo sapiens
  misc_RNA (1)...(19): siRNA sense strand
gagaagaugaagggcauga

SEQ ID NO: 1372693 - RNA, 19 nt, Homo sapiens
  misc_RNA (1)...(19): siRNA sense strand
cgacguggugcgccuguuu

SEQ ID NO: 1372694 - RNA, 19 nt, Homo sapiens
  misc_RNA (1)...(19): siRNA sense strand
ucuuugaaguagccaauga

SEQ ID NO: 1372695 - RNA, 19 nt, Homo sapiens
  misc_RNA (1)...(19): siRNA sense strand
uacaaggaguucuuugaag

SEQ ID NO: 1372696 - RNA, 19 nt, Homo sapiens
  misc_RNA (1)...(19): siRNA sense strand
ccugaaaggaucauacaug

SEQ ID NO: 1372697 - RNA, 19 nt, Homo sapiens
  misc_RNA (1)...(19): siRNA sense strand
gaaguagccaaugauguca

SEQ ID NO: 1372698 - RNA, 19 nt, Homo sapiens
  misc_RNA (1)...(19): siRNA sense strand
ccacauccagucccucuuc

SEQ ID NO: 1372699 - RNA, 19 nt, Homo sapiens
  misc_RNA (1)...(19): siRNA sense strand
ggcagaaggugcgcauagu

SEQ ID NO: 1372700 - RNA, 19 nt, Homo sapiens
  misc_RNA (1)...(19): siRNA sense strand
gcagaugaagaagcagaaa

SEQ ID NO: 1372701 - RNA, 19 nt, Homo sapiens
  misc_RNA (1)...(19): siRNA sense strand
cagcuccgguguggccuuu

SEQ ID NO: 1372702 - RNA, 19 nt, Homo sapiens
  misc_RNA (1)...(19): siRNA sense strand
gaccugggacaucuggaaa

SEQ ID NO: 1372703 - RNA, 19 nt, Homo sapiens
  misc_RNA (1)...(19): siRNA sense strand
gagcuggcuguaccugaaa

SEQ ID NO: 1372704 - RNA, 19 nt, Homo sapiens
  misc_RNA (1)...(19): siRNA sense strand
cagacccacucacccucua

SEQ ID NO: 1372705 - RNA, 19 nt, Homo sapiens
  misc_RNA (1)...(19): siRNA sense strand
ggagaucuacaaggaguuc

SEQ ID NO: 1372706 - RNA, 19 nt, Homo sapiens
  misc_RNA (1)...(19): siRNA sense strand
gcugugaccgcaagaugga

SEQ ID NO: 1372707 - RNA, 19 nt, Homo sapiens
  misc_RNA (1)...(19): siRNA sense strand
ggaagccuccugggacugu

SEQ ID NO: 1372708 - RNA, 19 nt, Homo sapiens
  misc_RNA (1)...(19): siRNA sense strand
gggcugggccaccuuucuu

SEQ ID NO: 1372709 - RNA, 19 nt, Homo sapiens
  misc_RNA (1)...(19): siRNA sense strand
ucuaugaccugggacaucu

SEQ ID NO: 1372710 - RNA, 19 nt, Homo sapiens
  misc_RNA (1)...(19): siRNA sense strand
ugaaggaggcagccagcuu

SEQ ID NO: 1372711 - RNA, 19 nt, Homo sapiens
  misc_RNA (1)...(19): siRNA sense strand
ggaagacgaggagaucuac

SEQ ID NO: 1372712 - RNA, 19 nt, Homo sapiens
  misc_RNA (1)...(19): siRNA sense strand
ccucagccaagaccuacua

SEQ ID NO: 1372713 - RNA, 19 nt, Homo sapiens
  misc_RNA (1)...(19): siRNA sense strand
agucgcaagugcagaugaa

SEQ ID NO: 1372714 - RNA, 19 nt, Homo sapiens
  misc_RNA (1)...(19): siRNA sense strand
ucuacaaggaguucuuuga

SEQ ID NO: 1372715 - RNA, 19 nt, Homo sapiens
  misc_RNA (1)...(19): siRNA sense strand
ugcucuggcugcucuauga

SEQ ID NO: 1372716 - RNA, 19 nt, Homo sapiens
  misc_RNA (1)...(19): siRNA sense strand
gcagcgcaaaggccucuga

SEQ ID NO: 1372717 - RNA, 19 nt, Homo sapiens
  misc_RNA (1)...(19): siRNA sense strand
agauggagguggcguucau

SEQ ID NO: 1372718 - RNA, 19 nt, Homo sapiens
  misc_RNA (1)...(19): siRNA sense strand
gaugaagaagcagaaagug

SEQ ID NO: 1372719 - RNA, 19 nt, Homo sapiens
  misc_RNA (1)...(19): siRNA sense strand
cgcaagugcagaugaagaa

SEQ ID NO: 1372720 - RNA, 19 nt, Homo sapiens
  misc_RNA (1)...(19): siRNA sense strand
uccagucccucuucagcuu

SEQ ID NO: 1372721 - RNA, 19 nt, Homo sapiens
  misc_RNA (1)...(19): siRNA sense strand
gcgcugugaccgcaagaug

SEQ ID NO: 1372722 - RNA, 19 nt, Homo sapiens
  misc_RNA (1)...(19): siRNA sense strand
uggccgaccugucuaucau

SEQ ID NO: 1372723 - RNA, 19 nt, Homo sapiens
  misc_RNA (1)...(19): siRNA sense strand
aaggaguucuuugaaguag

SEQ ID NO: 1372724 - RNA, 19 nt, Homo sapiens
  misc_RNA (1)...(19): siRNA sense strand
cagccaagaccuacuaucg

SEQ ID NO: 1372725 - RNA, 19 nt, Homo sapiens
  misc_RNA (1)...(19): siRNA sense strand
gucccucuauccucgagaa

SEQ ID NO: 1372726 - RNA, 19 nt, Homo sapiens
  misc_RNA (1)...(19): siRNA sense strand
gccaucaagcugcaacuca

SEQ ID NO: 1372727 - RNA, 19 nt, Homo sapiens
  misc_RNA (1)...(19): siRNA sense strand
ccgacucgcuggagcuucu

SEQ ID NO: 1372728 - RNA, 19 nt, Homo sapiens
  misc_RNA (1)...(19): siRNA sense strand
gaaggucuccgaugucaua

SEQ ID NO: 1372729 - RNA, 19 nt, Homo sapiens
  misc_RNA (1)...(19): siRNA sense strand
gaucauacaugcgcuguga

SEQ ID NO: 1372730 - RNA, 19 nt, Homo sapiens
  misc_RNA (1)...(19): siRNA sense strand
gccgugagcuggugaagaa

SEQ ID NO: 1372731 - RNA, 19 nt, Homo sapiens
  misc_RNA (1)...(19): siRNA sense strand
ugaagaaggucuccgaugu

SEQ ID NO: 1372732 - RNA, 19 nt, Homo sapiens
  misc_RNA (1)...(19): siRNA sense strand
ggagcuggcuguaccugaa

SEQ ID NO: 1372733 - RNA, 19 nt, Homo sapiens
  misc_RNA (1)...(19): siRNA sense strand
gaucaugccuggguagugu

SEQ ID NO: 1372734 - RNA, 19 nt, Homo sapiens
  misc_RNA (1)...(19): siRNA sense strand
ugggacaucuggaaaggua

SEQ ID NO: 1372735 - RNA, 19 nt, Homo sapiens
  misc_RNA (1)...(19): siRNA sense strand
caaggaguucuuugaagua

SEQ ID NO: 1372736 - RNA, 19 nt, Homo sapiens
  misc_RNA (1)...(19): siRNA sense strand
acaaggaguucuuugaagu

SEQ ID NO: 1372737 - RNA, 19 nt, Homo sapiens
  misc_RNA (1)...(19): siRNA sense strand
gaaccuggcagaucuagag

SEQ ID NO: 1372738 - RNA, 19 nt, Homo sapiens
  misc_RNA (1)...(19): siRNA sense strand
ggucuccgaugucauaugg

SEQ ID NO: 1372739 - RNA, 19 nt, Homo sapiens
  misc_RNA (1)...(19): siRNA sense strand
ccacugucauccaggacua

SEQ ID NO: 1372740 - RNA, 19 nt, Homo sapiens
  misc_RNA (1)...(19): siRNA sense strand
acgaggagaucuacaagga

SEQ ID NO: 1372741 - RNA, 19 nt, Homo sapiens
  misc_RNA (1)...(19): siRNA sense strand
cgucaucccuaccaacguu

SEQ ID NO: 1372742 - RNA, 19 nt, Homo sapiens
  misc_RNA (1)...(19): siRNA sense strand
gaagaaggucuccgauguc

SEQ ID NO: 1372743 - RNA, 19 nt, Homo sapiens
  misc_RNA (1)...(19): siRNA sense strand
gggaagacgaggagaucua

SEQ ID NO: 1372744 - RNA, 19 nt, Homo sapiens
  misc_RNA (1)...(19): siRNA sense strand
gaacacaucuaccccuaca

SEQ ID NO: 1372745 - RNA, 19 nt, Homo sapiens
  misc_RNA (1)...(19): siRNA sense strand
gaagaugaagggcaugaag

SEQ ID NO: 1372746 - RNA, 19 nt, Homo sapiens
  misc_RNA (1)...(19): siRNA sense strand
ugacuacacucugucuuuc

SEQ ID NO: 1372747 - RNA, 19 nt, Homo sapiens
  misc_RNA (1)...(19): siRNA sense strand
cuacaaggaguucuuugaa

SEQ ID NO: 1372748 - RNA, 19 nt, Homo sapiens
  misc_RNA (1)...(19): siRNA sense strand
cagaaggugcgcauaguga

SEQ ID NO: 1372749 - RNA, 19 nt, Homo sapiens
  misc_RNA (1)...(19): siRNA sense strand
gccaucaacccuuccauug

SEQ ID NO: 1372750 - RNA, 19 nt, Homo sapiens
  misc_RNA (1)...(19): siRNA sense strand
gugacuacacucugucuuu

SEQ ID NO: 1372751 - RNA, 19 nt, Homo sapiens
  misc_RNA (1)...(19): siRNA sense strand
ugaaguagccaaugauguc

SEQ ID NO: 1372752 - RNA, 19 nt, Homo sapiens
  misc_RNA (1)...(19): siRNA sense strand
gaucuacaaggaguucuuu

SEQ ID NO: 1372753 - RNA, 19 nt, Homo sapiens
  misc_RNA (1)...(19): siRNA sense strand
gcagaaggugcgcauagug

SEQ ID NO: 1372754 - RNA, 19 nt, Homo sapiens
  misc_RNA (1)...(19): siRNA sense strand
aagaaggucuccgauguca

SEQ ID NO: 1372755 - RNA, 19 nt, Homo sapiens
  misc_RNA (1)...(19): siRNA sense strand
gaccuacuaucgggaugaa

SEQ ID NO: 1372756 - RNA, 19 nt, Homo sapiens
  misc_RNA (1)...(19): siRNA sense strand
uagggaaccuggcagaucu

SEQ ID NO: 1372757 - RNA, 19 nt, Homo sapiens
  misc_RNA (1)...(19): siRNA sense strand
ucuccgaugucauauggaa

SEQ ID NO: 1372758 - RNA, 19 nt, Homo sapiens
  misc_RNA (1)...(19): siRNA sense strand
gagaagaugaagggcauga

SEQ ID NO: 1372759 - RNA, 19 nt, Homo sapiens
  misc_RNA (1)...(19): siRNA sense strand
cgacguggugcgccuguuu

SEQ ID NO: 1372760 - RNA, 19 nt, Homo sapiens
  misc_RNA (1)...(19): siRNA sense strand
ucuuugaaguagccaauga

SEQ ID NO: 1372761 - RNA, 19 nt, Homo sapiens
  misc_RNA (1)...(19): siRNA sense strand
uacaaggaguucuuugaag

SEQ ID NO: 1372762 - RNA, 19 nt, Homo sapiens
  misc_RNA (1)...(19): siRNA sense strand
ccugaaaggaucauacaug

SEQ ID NO: 1372763 - RNA, 19 nt, Homo sapiens
  misc_RNA (1)...(19): siRNA sense strand
gaaguagccaaugauguca

SEQ ID NO: 1372764 - RNA, 19 nt, Homo sapiens
  misc_RNA (1)...(19): siRNA sense strand
ccacauccagucccucuuc

SEQ ID NO: 1372765 - RNA, 19 nt, Homo sapiens
  misc_RNA (1)...(19): siRNA sense strand
ggcagaaggugcgcauagu

SEQ ID NO: 1372766 - RNA, 19 nt, Homo sapiens
  misc_RNA (1)...(19): siRNA sense strand
gcagaugaagaagcagaaa

SEQ ID NO: 1372767 - RNA, 19 nt, Homo sapiens
  misc_RNA (1)...(19): siRNA sense strand
cagcuccgguguggccuuu

SEQ ID NO: 1372768 - RNA, 19 nt, Homo sapiens
  misc_RNA (1)...(19): siRNA sense strand
gaccugggacaucuggaaa

SEQ ID NO: 1372769 - RNA, 19 nt, Homo sapiens
  misc_RNA (1)...(19): siRNA sense strand
gagcuggcuguaccugaaa

SEQ ID NO: 1372770 - RNA, 19 nt, Homo sapiens
  misc_RNA (1)...(19): siRNA sense strand
cagacccacucacccucua

SEQ ID NO: 1372771 - RNA, 19 nt, Homo sapiens
  misc_RNA (1)...(19): siRNA sense strand
ggagaucuacaaggaguuc

SEQ ID NO: 1372772 - RNA, 19 nt, Homo sapiens
  misc_RNA (1)...(19): siRNA sense strand
gcugugaccgcaagaugga

SEQ ID NO: 1372773 - RNA, 19 nt, Homo sapiens
  misc_RNA (1)...(19): siRNA sense strand
ggaagccuccugggacugu

SEQ ID NO: 1372774 - RNA, 19 nt, Homo sapiens
  misc_RNA (1)...(19): siRNA sense strand
gggcugggccaccuuucuu

SEQ ID NO: 1372775 - RNA, 19 nt, Homo sapiens
  misc_RNA (1)...(19): siRNA sense strand
ucuaugaccugggacaucu

SEQ ID NO: 1372776 - RNA, 19 nt, Homo sapiens
  misc_RNA (1)...(19): siRNA sense strand
ugaaggaggcagccagcuu

SEQ ID NO: 1372777 - RNA, 19 nt, Homo sapiens
  misc_RNA (1)...(19): siRNA sense strand
ggaagacgaggagaucuac

SEQ ID NO: 1372778 - RNA, 19 nt, Homo sapiens
  misc_RNA (1)...(19): siRNA sense strand
ccucagccaagaccuacua

SEQ ID NO: 1372779 - RNA, 19 nt, Homo sapiens
  misc_RNA (1)...(19): siRNA sense strand
agucgcaagugcagaugaa

SEQ ID NO: 1372780 - RNA, 19 nt, Homo sapiens
  misc_RNA (1)...(19): siRNA sense strand
ucuacaaggaguucuuuga

SEQ ID NO: 1372781 - RNA, 19 nt, Homo sapiens
  misc_RNA (1)...(19): siRNA sense strand
ugcucuggcugcucuauga

SEQ ID NO: 1372782 - RNA, 19 nt, Homo sapiens
  misc_RNA (1)...(19): siRNA sense strand
gcagcgcaaaggccucuga

SEQ ID NO: 1372783 - RNA, 19 nt, Homo sapiens
  misc_RNA (1)...(19): siRNA sense strand
agauggagguggcguucau

SEQ ID NO: 1372784 - RNA, 19 nt, Homo sapiens
  misc_RNA (1)...(19): siRNA sense strand
gaugaagaagcagaaagug

SEQ ID NO: 1372785 - RNA, 19 nt, Homo sapiens
  misc_RNA (1)...(19): siRNA sense strand
cgcaagugcagaugaagaa

SEQ ID NO: 1372786 - RNA, 19 nt, Homo sapiens
  misc_RNA (1)...(19): siRNA sense strand
uccagucccucuucagcuu

SEQ ID NO: 1372787 - RNA, 19 nt, Homo sapiens
  misc_RNA (1)...(19): siRNA sense strand
gcgcugugaccgcaagaug

SEQ ID NO: 1372788 - RNA, 19 nt, Homo sapiens
  misc_RNA (1)...(19): siRNA sense strand
uggccgaccugucuaucau

SEQ ID NO: 1372789 - RNA, 19 nt, Homo sapiens
  misc_RNA (1)...(19): siRNA sense strand
aaggaguucuuugaaguag

SEQ ID NO: 1372790 - RNA, 19 nt, Homo sapiens
  misc_RNA (1)...(19): siRNA sense strand
cagccaagaccuacuaucg

SEQ ID NO: 1372791 - RNA, 19 nt, Homo sapiens
  misc_RNA (1)...(19): siRNA sense strand
gucccucuauccucgagaa

SEQ ID NO: 1372792 - RNA, 19 nt, Homo sapiens
  misc_RNA (1)...(19): siRNA sense strand
gccaucaagcugcaacuca

SEQ ID NO: 1372793 - RNA, 19 nt, Homo sapiens
  misc_RNA (1)...(19): siRNA sense strand
ccgacucgcuggagcuucu

SEQ ID NO: 1372794 - RNA, 19 nt, Homo sapiens
  misc_RNA (1)...(19): siRNA sense strand
gaaggucuccgaugucaua

SEQ ID NO: 1372795 - RNA, 19 nt, Homo sapiens
  misc_RNA (1)...(19): siRNA sense strand
gaucauacaugcgcuguga

SEQ ID NO: 1372796 - RNA, 19 nt, Homo sapiens
  misc_RNA (1)...(19): siRNA sense strand
gccgugagcuggugaagaa

SEQ ID NO: 1372797 - RNA, 19 nt, Homo sapiens
  misc_RNA (1)...(19): siRNA sense strand
ugaagaaggucuccgaugu

SEQ ID NO: 1372798 - RNA, 19 nt, Homo sapiens
  misc_RNA (1)...(19): siRNA sense strand
ggagcuggcuguaccugaa

SEQ ID NO: 1372799 - RNA, 19 nt, Homo sapiens
  misc_RNA (1)...(19): siRNA sense strand
gaucaugccuggguagugu

SEQ ID NO: 1372800 - RNA, 19 nt, Homo sapiens
  misc_RNA (1)...(19): siRNA sense strand
ugggacaucuggaaaggua

SEQ ID NO: 1372801 - RNA, 19 nt, Homo sapiens
  misc_RNA (1)...(19): siRNA sense strand
caaggaguucuuugaagua

SEQ ID NO: 1372802 - RNA, 19 nt, Homo sapiens
  misc_RNA (1)...(19): siRNA sense strand
acaaggaguucuuugaagu

SEQ ID NO: 1372803 - RNA, 19 nt, Homo sapiens
  misc_RNA (1)...(19): siRNA sense strand
gaaccuggcagaucuagag

SEQ ID NO: 1372804 - RNA, 19 nt, Homo sapiens
  misc_RNA (1)...(19): siRNA sense strand
ggucuccgaugucauaugg

SEQ ID NO: 1372805 - RNA, 19 nt, Homo sapiens
  misc_RNA (1)...(19): siRNA sense strand
ccacugucauccaggacua

SEQ ID NO: 1372806 - RNA, 19 nt, Homo sapiens
  misc_RNA (1)...(19): siRNA sense strand
acgaggagaucuacaagga

SEQ ID NO: 1372807 - RNA, 19 nt, Homo sapiens
  misc_RNA (1)...(19): siRNA sense strand
cgucaucccuaccaacguu

SEQ ID NO: 1372808 - RNA, 19 nt, Homo sapiens
  misc_RNA (1)...(19): siRNA sense strand
gaagaaggucuccgauguc

SEQ ID NO: 1372809 - RNA, 19 nt, Homo sapiens
  misc_RNA (1)...(19): siRNA sense strand
gggaagacgaggagaucua

SEQ ID NO: 1372810 - RNA, 19 nt, Homo sapiens
  misc_RNA (1)...(19): siRNA sense strand
gaacacaucuaccccuaca

SEQ ID NO: 1372811 - RNA, 19 nt, Homo sapiens
  misc_RNA (1)...(19): siRNA sense strand
gaagaugaagggcaugaag

SEQ ID NO: 1372812 - RNA, 19 nt, Homo sapiens
  misc_RNA (1)...(19): siRNA sense strand
ugacuacacucugucuuuc

SEQ ID NO: 1372813 - RNA, 19 nt, Homo sapiens
  misc_RNA (1)...(19): siRNA sense strand
cuacaaggaguucuuugaa

SEQ ID NO: 1372814 - RNA, 19 nt, Homo sapiens
  misc_RNA (1)...(19): siRNA sense strand
cagaaggugcgcauaguga

SEQ ID NO: 1372815 - RNA, 19 nt, Homo sapiens
  misc_RNA (1)...(19): siRNA sense strand
gccaucaacccuuccauug

SEQ ID NO: 1372816 - RNA, 19 nt, Homo sapiens
  misc_RNA (1)...(19): siRNA sense strand
gugacuacacucugucuuu

SEQ ID NO: 1372817 - RNA, 19 nt, Homo sapiens
  misc_RNA (1)...(19): siRNA sense strand
ugaaguagccaaugauguc

SEQ ID NO: 1372818 - RNA, 19 nt, Homo sapiens
  misc_RNA (1)...(19): siRNA sense strand
gaucuacaaggaguucuuu

SEQ ID NO: 1372819 - RNA, 19 nt, Homo sapiens
  misc_RNA (1)...(19): siRNA sense strand
gcagaaggugcgcauagug

SEQ ID NO: 1372820 - RNA, 19 nt, Homo sapiens
  misc_RNA (1)...(19): siRNA sense strand
aagaaggucuccgauguca

SEQ ID NO: 1372821 - RNA, 19 nt, Homo sapiens
  misc_RNA (1)...(19): siRNA sense strand
gaccuacuaucgggaugaa

SEQ ID NO: 1372822 - RNA, 19 nt, Homo sapiens
  misc_RNA (1)...(19): siRNA sense strand
uagggaaccuggcagaucu

SEQ ID NO: 1372823 - RNA, 19 nt, Homo sapiens
  misc_RNA (1)...(19): siRNA sense strand
ucuccgaugucauauggaa

SEQ ID NO: 1372824 - RNA, 19 nt, Homo sapiens
  misc_RNA (1)...(19): siRNA sense strand
gagaagaugaagggcauga

SEQ ID NO: 1372825 - RNA, 19 nt, Homo sapiens
  misc_RNA (1)...(19): siRNA sense strand
cgacguggugcgccuguuu

SEQ ID NO: 1372826 - RNA, 19 nt, Homo sapiens
  misc_RNA (1)...(19): siRNA sense strand
ucuuugaaguagccaauga

SEQ ID NO: 1372827 - RNA, 19 nt, Homo sapiens
  misc_RNA (1)...(19): siRNA sense strand
uacaaggaguucuuugaag

SEQ ID NO: 1372828 - RNA, 19 nt, Homo sapiens
  misc_RNA (1)...(19): siRNA sense strand
ccugaaaggaucauacaug

SEQ ID NO: 1372829 - RNA, 19 nt, Homo sapiens
  misc_RNA (1)...(19): siRNA sense strand
gaaguagccaaugauguca

SEQ ID NO: 1372830 - RNA, 19 nt, Homo sapiens
  misc_RNA (1)...(19): siRNA sense strand
ccacauccagucccucuuc

SEQ ID NO: 1372831 - RNA, 19 nt, Homo sapiens
  misc_RNA (1)...(19): siRNA sense strand
ggcagaaggugcgcauagu

SEQ ID NO: 1372832 - RNA, 19 nt, Homo sapiens
  misc_RNA (1)...(19): siRNA sense strand
gcagaugaagaagcagaaa

SEQ ID NO: 1372833 - RNA, 19 nt, Homo sapiens
  misc_RNA (1)...(19): siRNA sense strand
cagcuccgguguggccuuu

SEQ ID NO: 1372834 - RNA, 19 nt, Homo sapiens
  misc_RNA (1)...(19): siRNA sense strand
gaccugggacaucuggaaa

SEQ ID NO: 1372835 - RNA, 19 nt, Homo sapiens
  misc_RNA (1)...(19): siRNA sense strand
gagcuggcuguaccugaaa

SEQ ID NO: 1372836 - RNA, 19 nt, Homo sapiens
  misc_RNA (1)...(19): siRNA sense strand
cagacccacucacccucua

SEQ ID NO: 1372837 - RNA, 19 nt, Homo sapiens
  misc_RNA (1)...(19): siRNA sense strand
ggagaucuacaaggaguuc

SEQ ID NO: 1372838 - RNA, 19 nt, Homo sapiens
  misc_RNA (1)...(19): siRNA sense strand
gcugugaccgcaagaugga

SEQ ID NO: 1372839 - RNA, 19 nt, Homo sapiens
  misc_RNA (1)...(19): siRNA sense strand
ggaagccuccugggacugu

SEQ ID NO: 1372840 - RNA, 19 nt, Homo sapiens
  misc_RNA (1)...(19): siRNA sense strand
gggcugggccaccuuucuu

SEQ ID NO: 1372841 - RNA, 19 nt, Homo sapiens
  misc_RNA (1)...(19): siRNA sense strand
ucuaugaccugggacaucu

SEQ ID NO: 1372842 - RNA, 19 nt, Homo sapiens
  misc_RNA (1)...(19): siRNA sense strand
ugaaggaggcagccagcuu

SEQ ID NO: 1372843 - RNA, 19 nt, Homo sapiens
  misc_RNA (1)...(19): siRNA sense strand
ggaagacgaggagaucuac

SEQ ID NO: 1372844 - RNA, 19 nt, Homo sapiens
  misc_RNA (1)...(19): siRNA sense strand
ccucagccaagaccuacua

SEQ ID NO: 1372845 - RNA, 19 nt, Homo sapiens
  misc_RNA (1)...(19): siRNA sense strand
agucgcaagugcagaugaa

SEQ ID NO: 1372846 - RNA, 19 nt, Homo sapiens
  misc_RNA (1)...(19): siRNA sense strand
ucuacaaggaguucuuuga

SEQ ID NO: 1372847 - RNA, 19 nt, Homo sapiens
  misc_RNA (1)...(19): siRNA sense strand
ugcucuggcugcucuauga

SEQ ID NO: 1372848 - RNA, 19 nt, Homo sapiens
  misc_RNA (1)...(19): siRNA sense strand
gcagcgcaaaggccucuga

SEQ ID NO: 1372849 - RNA, 19 nt, Homo sapiens
  misc_RNA (1)...(19): siRNA sense strand
agauggagguggcguucau

SEQ ID NO: 1372850 - RNA, 19 nt, Homo sapiens
  misc_RNA (1)...(19): siRNA sense strand
gaugaagaagcagaaagug

SEQ ID NO: 1372851 - RNA, 19 nt, Homo sapiens
  misc_RNA (1)...(19): siRNA sense strand
cgcaagugcagaugaagaa

SEQ ID NO: 1372852 - RNA, 19 nt, Homo sapiens
  misc_RNA (1)...(19): siRNA sense strand
uccagucccucuucagcuu

SEQ ID NO: 1372853 - RNA, 19 nt, Homo sapiens
  misc_RNA (1)...(19): siRNA sense strand
gcgcugugaccgcaagaug

SEQ ID NO: 1372854 - RNA, 19 nt, Homo sapiens
  misc_RNA (1)...(19): siRNA sense strand
uggccgaccugucuaucau

SEQ ID NO: 1372855 - RNA, 19 nt, Homo sapiens
  misc_RNA (1)...(19): siRNA sense strand
aaggaguucuuugaaguag

SEQ ID NO: 1372856 - RNA, 19 nt, Homo sapiens
  misc_RNA (1)...(19): siRNA sense strand
cagccaagaccuacuaucg

SEQ ID NO: 1372857 - RNA, 19 nt, Homo sapiens
  misc_RNA (1)...(19): siRNA sense strand
gucccucuauccucgagaa

SEQ ID NO: 1372858 - RNA, 19 nt, Homo sapiens
  misc_RNA (1)...(19): siRNA sense strand
gccaucaagcugcaacuca

SEQ ID NO: 1372859 - RNA, 19 nt, Homo sapiens
  misc_RNA (1)...(19): siRNA sense strand
ccgacucgcuggagcuucu

SEQ ID NO: 1372860 - RNA, 19 nt, Homo sapiens
  misc_RNA (1)...(19): siRNA sense strand
gaaggucuccgaugucaua

SEQ ID NO: 1372861 - RNA, 19 nt, Homo sapiens
  misc_RNA (1)...(19): siRNA sense strand
gaucauacaugcgcuguga

SEQ ID NO: 1372862 - RNA, 19 nt, Homo sapiens
  misc_RNA (1)...(19): siRNA sense strand
gccgugagcuggugaagaa

SEQ ID NO: 1372863 - RNA, 19 nt, Homo sapiens
  misc_RNA (1)...(19): siRNA sense strand
ugaagaaggucuccgaugu

SEQ ID NO: 1372864 - RNA, 19 nt, Homo sapiens
  misc_RNA (1)...(19): siRNA sense strand
ggagcuggcuguaccugaa

SEQ ID NO: 1372865 - RNA, 19 nt, Homo sapiens
  misc_RNA (1)...(19): siRNA sense strand
gaucaugccuggguagugu

SEQ ID NO: 1372866 - RNA, 19 nt, Homo sapiens
  misc_RNA (1)...(19): siRNA sense strand
ugggacaucuggaaaggua

SEQ ID NO: 1372867 - RNA, 19 nt, Homo sapiens
  misc_RNA (1)...(19): siRNA sense strand
caaggaguucuuugaagua

SEQ ID NO: 1372868 - RNA, 19 nt, Homo sapiens
  misc_RNA (1)...(19): siRNA sense strand
acaaggaguucuuugaagu

SEQ ID NO: 1372869 - RNA, 19 nt, Homo sapiens
  misc_RNA (1)...(19): siRNA sense strand
gaaccuggcagaucuagag

SEQ ID NO: 1372870 - RNA, 19 nt, Homo sapiens
  misc_RNA (1)...(19): siRNA sense strand
ggucuccgaugucauaugg

SEQ ID NO: 1372871 - RNA, 19 nt, Homo sapiens
  misc_RNA (1)...(19): siRNA sense strand
ccacugucauccaggacua

SEQ ID NO: 1372872 - RNA, 19 nt, Homo sapiens
  misc_RNA (1)...(19): siRNA sense strand
acgaggagaucuacaagga

SEQ ID NO: 1372873 - RNA, 19 nt, Homo sapiens
  misc_RNA (1)...(19): siRNA sense strand
cgucaucccuaccaacguu

SEQ ID NO: 1372874 - RNA, 19 nt, Homo sapiens
  misc_RNA (1)...(19): siRNA sense strand
gaagaaggucuccgauguc

SEQ ID NO: 1372875 - RNA, 19 nt, Homo sapiens
  misc_RNA (1)...(19): siRNA sense strand
gggaagacgaggagaucua

SEQ ID NO: 1372876 - RNA, 19 nt, Homo sapiens
  misc_RNA (1)...(19): siRNA sense strand
gaacacaucuaccccuaca

SEQ ID NO: 1372877 - RNA, 19 nt, Homo sapiens
  misc_RNA (1)...(19): siRNA sense strand
gaagaugaagggcaugaag

SEQ ID NO: 1372878 - RNA, 19 nt, Homo sapiens
  misc_RNA (1)...(19): siRNA sense strand
ugacuacacucugucuuuc

SEQ ID NO: 1372879 - RNA, 19 nt, Homo sapiens
  misc_RNA (1)...(19): siRNA sense strand
cuacaaggaguucuuugaa

SEQ ID NO: 1372880 - RNA, 19 nt, Homo sapiens
  misc_RNA (1)...(19): siRNA sense strand
cagaaggugcgcauaguga

SEQ ID NO: 1372881 - RNA, 19 nt, Homo sapiens
  misc_RNA (1)...(19): siRNA sense strand
gccaucaacccuuccauug

SEQ ID NO: 1372882 - RNA, 19 nt, Homo sapiens
  misc_RNA (1)...(19): siRNA sense strand
gugacuacacucugucuuu

SEQ ID NO: 1372883 - RNA, 19 nt, Homo sapiens
  misc_RNA (1)...(19): siRNA sense strand
ugaaguagccaaugauguc

SEQ ID NO: 1372884 - RNA, 19 nt, Homo sapiens
  misc_RNA (1)...(19): siRNA sense strand
gaucuacaaggaguucuuu

SEQ ID NO: 1372885 - RNA, 19 nt, Homo sapiens
  misc_RNA (1)...(19): siRNA sense strand
gcagaaggugcgcauagug

SEQ ID NO: 1372886 - RNA, 19 nt, Homo sapiens
  misc_RNA (1)...(19): siRNA sense strand
aagaaggucuccgauguca

SEQ ID NO: 1372887 - RNA, 19 nt, Homo sapiens
  misc_RNA (1)...(19): siRNA sense strand
gaccuacuaucgggaugaa

SEQ ID NO: 1372888 - RNA, 19 nt, Homo sapiens
  misc_RNA (1)...(19): siRNA sense strand
uagggaaccuggcagaucu

SEQ ID NO: 1372889 - RNA, 19 nt, Homo sapiens
  misc_RNA (1)...(19): siRNA sense strand
ucuccgaugucauauggaa

SEQ ID NO: 1372890 - RNA, 19 nt, Homo sapiens
  misc_RNA (1)...(19): siRNA sense strand
gagaagaugaagggcauga

SEQ ID NO: 1372891 - RNA, 19 nt, Homo sapiens
  misc_RNA (1)...(19): siRNA sense strand
cgacguggugcgccuguuu

SEQ ID NO: 1372892 - RNA, 19 nt, Homo sapiens
  misc_RNA (1)...(19): siRNA sense strand
ucuuugaaguagccaauga

SEQ ID NO: 1372893 - RNA, 19 nt, Homo sapiens
  misc_RNA (1)...(19): siRNA sense strand
uacaaggaguucuuugaag

SEQ ID NO: 1372894 - RNA, 19 nt, Homo sapiens
  misc_RNA (1)...(19): siRNA sense strand
ccugaaaggaucauacaug

SEQ ID NO: 1372895 - RNA, 19 nt, Homo sapiens
  misc_RNA (1)...(19): siRNA sense strand
gaaguagccaaugauguca

SEQ ID NO: 1372896 - RNA, 19 nt, Homo sapiens
  misc_RNA (1)...(19): siRNA sense strand
ccacauccagucccucuuc

SEQ ID NO: 1372897 - RNA, 19 nt, Homo sapiens
  misc_RNA (1)...(19): siRNA sense strand
ggcagaaggugcgcauagu

SEQ ID NO: 1372898 - RNA, 19 nt, Homo sapiens
  misc_RNA (1)...(19): siRNA sense strand
gcagaugaagaagcagaaa

SEQ ID NO: 1372899 - RNA, 19 nt, Homo sapiens
  misc_RNA (1)...(19): siRNA sense strand
cagcuccgguguggccuuu

SEQ ID NO: 1372900 - RNA, 19 nt, Homo sapiens
  misc_RNA (1)...(19): siRNA sense strand
gaccugggacaucuggaaa

SEQ ID NO: 1372901 - RNA, 19 nt, Homo sapiens
  misc_RNA (1)...(19): siRNA sense strand
gagcuggcuguaccugaaa

SEQ ID NO: 1372902 - RNA, 19 nt, Homo sapiens
  misc_RNA (1)...(19): siRNA sense strand
cagacccacucacccucua

SEQ ID NO: 1372903 - RNA, 19 nt, Homo sapiens
  misc_RNA (1)...(19): siRNA sense strand
ggagaucuacaaggaguuc

SEQ ID NO: 1372904 - RNA, 19 nt, Homo sapiens
  misc_RNA (1)...(19): siRNA sense strand
gcugugaccgcaagaugga

SEQ ID NO: 1372905 - RNA, 19 nt, Homo sapiens
  misc_RNA (1)...(19): siRNA sense strand
ggaagccuccugggacugu

SEQ ID NO: 1372906 - RNA, 19 nt, Homo sapiens
  misc_RNA (1)...(19): siRNA sense strand
gggcugggccaccuuucuu

SEQ ID NO: 1372907 - RNA, 19 nt, Homo sapiens
  misc_RNA (1)...(19): siRNA sense strand
ucuaugaccugggacaucu

SEQ ID NO: 1372908 - RNA, 19 nt, Homo sapiens
  misc_RNA (1)...(19): siRNA sense strand
ugaaggaggcagccagcuu

SEQ ID NO: 1372909 - RNA, 19 nt, Homo sapiens
  misc_RNA (1)...(19): siRNA sense strand
ggaagacgaggagaucuac

SEQ ID NO: 1372910 - RNA, 19 nt, Homo sapiens
  misc_RNA (1)...(19): siRNA sense strand
ccucagccaagaccuacua

SEQ ID NO: 1372911 - RNA, 19 nt, Homo sapiens
  misc_RNA (1)...(19): siRNA sense strand
agucgcaagugcagaugaa

SEQ ID NO: 1372912 - RNA, 19 nt, Homo sapiens
  misc_RNA (1)...(19): siRNA sense strand
ucuacaaggaguucuuuga

SEQ ID NO: 1372913 - RNA, 19 nt, Homo sapiens
  misc_RNA (1)...(19): siRNA sense strand
ugcucuggcugcucuauga

SEQ ID NO: 1372914 - RNA, 19 nt, Homo sapiens
  misc_RNA (1)...(19): siRNA sense strand
gcagcgcaaaggccucuga

SEQ ID NO: 1372915 - RNA, 19 nt, Homo sapiens
  misc_RNA (1)...(19): siRNA sense strand
agauggagguggcguucau

SEQ ID NO: 1372916 - RNA, 19 nt, Homo sapiens
  misc_RNA (1)...(19): siRNA sense strand
gaugaagaagcagaaagug

SEQ ID NO: 1372917 - RNA, 19 nt, Homo sapiens
  misc_RNA (1)...(19): siRNA sense strand
cgcaagugcagaugaagaa

SEQ ID NO: 1372918 - RNA, 19 nt, Homo sapiens
  misc_RNA (1)...(19): siRNA sense strand
uccagucccucuucagcuu

SEQ ID NO: 1372919 - RNA, 19 nt, Homo sapiens
  misc_RNA (1)...(19): siRNA sense strand
gcgcugugaccgcaagaug

SEQ ID NO: 1372920 - RNA, 19 nt, Homo sapiens
  misc_RNA (1)...(19): siRNA sense strand
uggccgaccugucuaucau

SEQ ID NO: 1372921 - RNA, 19 nt, Homo sapiens
  misc_RNA (1)...(19): siRNA sense strand
aaggaguucuuugaaguag

SEQ ID NO: 1372922 - RNA, 19 nt, Homo sapiens
  misc_RNA (1)...(19): siRNA sense strand
cagccaagaccuacuaucg

SEQ ID NO: 1372923 - RNA, 19 nt, Homo sapiens
  misc_RNA (1)...(19): siRNA sense strand
gucccucuauccucgagaa

SEQ ID NO: 1372924 - RNA, 19 nt, Homo sapiens
  misc_RNA (1)...(19): siRNA sense strand
gccaucaagcugcaacuca

SEQ ID NO: 1372925 - RNA, 19 nt, Homo sapiens
  misc_RNA (1)...(19): siRNA sense strand
ccgacucgcuggagcuucu

SEQ ID NO: 1372926 - RNA, 19 nt, Homo sapiens
  misc_RNA (1)...(19): siRNA sense strand
gaaggucuccgaugucaua

SEQ ID NO: 1372927 - RNA, 19 nt, Homo sapiens
  misc_RNA (1)...(19): siRNA sense strand
gaucauacaugcgcuguga

SEQ ID NO: 1372928 - RNA, 19 nt, Homo sapiens
  misc_RNA (1)...(19): siRNA sense strand
gccgugagcuggugaagaa

SEQ ID NO: 1372929 - RNA, 19 nt, Homo sapiens
  misc_RNA (1)...(19): siRNA sense strand
ugaagaaggucuccgaugu

SEQ ID NO: 1372930 - RNA, 19 nt, Homo sapiens
  misc_RNA (1)...(19): siRNA sense strand
ggagcuggcuguaccugaa

SEQ ID NO: 1372931 - RNA, 19 nt, Homo sapiens
  misc_RNA (1)...(19): siRNA sense strand
gaucaugccuggguagugu

SEQ ID NO: 1372932 - RNA, 19 nt, Homo sapiens
  misc_RNA (1)...(19): siRNA sense strand
ugggacaucuggaaaggua

SEQ ID NO: 1372933 - RNA, 19 nt, Homo sapiens
  misc_RNA (1)...(19): siRNA sense strand
caaggaguucuuugaagua

SEQ ID NO: 1372934 - RNA, 19 nt, Homo sapiens
  misc_RNA (1)...(19): siRNA sense strand
acaaggaguucuuugaagu

SEQ ID NO: 1372935 - RNA, 19 nt, Homo sapiens
  misc_RNA (1)...(19): siRNA sense strand
gaaccuggcagaucuagag

SEQ ID NO: 1372936 - RNA, 19 nt, Homo sapiens
  misc_RNA (1)...(19): siRNA sense strand
ggucuccgaugucauaugg

SEQ ID NO: 1372937 - RNA, 19 nt, Homo sapiens
  misc_RNA (1)...(19): siRNA sense strand
ccacugucauccaggacua

SEQ ID NO: 1372938 - RNA, 19 nt, Homo sapiens
  misc_RNA (1)...(19): siRNA sense strand
acgaggagaucuacaagga

SEQ ID NO: 1372939 - RNA, 19 nt, Homo sapiens
  misc_RNA (1)...(19): siRNA sense strand
cgucaucccuaccaacguu

SEQ ID NO: 1372940 - RNA, 19 nt, Homo sapiens
  misc_RNA (1)...(19): siRNA sense strand
gaagaaggucuccgauguc

SEQ ID NO: 1372941 - RNA, 19 nt, Homo sapiens
  misc_RNA (1)...(19): siRNA sense strand
gggaagacgaggagaucua

SEQ ID NO: 1372942 - RNA, 19 nt, Homo sapiens
  misc_RNA (1)...(19): siRNA sense strand
gaacacaucuaccccuaca

SEQ ID NO: 1372943 - RNA, 19 nt, Homo sapiens
  misc_RNA (1)...(19): siRNA sense strand
gaagaugaagggcaugaag

SEQ ID NO: 1372944 - RNA, 19 nt, Homo sapiens
  misc_RNA (1)...(19): siRNA sense strand
ugacuacacucugucuuuc

SEQ ID NO: 1372945 - RNA, 19 nt, Homo sapiens
  misc_RNA (1)...(19): siRNA sense strand
cuacaaggaguucuuugaa

SEQ ID NO: 1372946 - RNA, 19 nt, Homo sapiens
  misc_RNA (1)...(19): siRNA sense strand
cagaaggugcgcauaguga

SEQ ID NO: 1372947 - RNA, 19 nt, Homo sapiens
  misc_RNA (1)...(19): siRNA sense strand
gccaucaacccuuccauug

SEQ ID NO: 1372948 - RNA, 19 nt, Homo sapiens
  misc_RNA (1)...(19): siRNA sense strand
gugacuacacucugucuuu

SEQ ID NO: 1372949 - RNA, 19 nt, Homo sapiens
  misc_RNA (1)...(19): siRNA sense strand
ugaaguagccaaugauguc

SEQ ID NO: 1372950 - RNA, 19 nt, Homo sapiens
  misc_RNA (1)...(19): siRNA sense strand
gaucuacaaggaguucuuu

SEQ ID NO: 1372951 - RNA, 19 nt, Homo sapiens
  misc_RNA (1)...(19): siRNA sense strand
gcagaaggugcgcauagug

SEQ ID NO: 1372952 - RNA, 19 nt, Homo sapiens
  misc_RNA (1)...(19): siRNA sense strand
aagaaggucuccgauguca

SEQ ID NO: 1372953 - RNA, 19 nt, Homo sapiens
  misc_RNA (1)...(19): siRNA sense strand
gaccuacuaucgggaugaa

SEQ ID NO: 1372954 - RNA, 19 nt, Homo sapiens
  misc_RNA (1)...(19): siRNA sense strand
uagggaaccuggcagaucu

SEQ ID NO: 1372955 - RNA, 19 nt, Homo sapiens
  misc_RNA (1)...(19): siRNA sense strand
ucuccgaugucauauggaa

SEQ ID NO: 1372956 - RNA, 19 nt, Homo sapiens
  misc_RNA (1)...(19): siRNA sense strand
gagaagaugaagggcauga

SEQ ID NO: 1372957 - RNA, 19 nt, Homo sapiens
  misc_RNA (1)...(19): siRNA sense strand
cgacguggugcgccuguuu

SEQ ID NO: 1372958 - RNA, 19 nt, Homo sapiens
  misc_RNA (1)...(19): siRNA sense strand
ucuuugaaguagccaauga

SEQ ID NO: 1372959 - RNA, 19 nt, Homo sapiens
  misc_RNA (1)...(19): siRNA sense strand
uacaaggaguucuuugaag

SEQ ID NO: 1372960 - RNA, 19 nt, Homo sapiens
  misc_RNA (1)...(19): siRNA sense strand
ccugaaaggaucauacaug

SEQ ID NO: 1372961 - RNA, 19 nt, Homo sapiens
  misc_RNA (1)...(19): siRNA sense strand
gaaguagccaaugauguca

SEQ ID NO: 1372962 - RNA, 19 nt, Homo sapiens
  misc_RNA (1)...(19): siRNA sense strand
ccacauccagucccucuuc

SEQ ID NO: 1372963 - RNA, 19 nt, Homo sapiens
  misc_RNA (1)...(19): siRNA sense strand
ggcagaaggugcgcauagu

SEQ ID NO: 1372964 - RNA, 19 nt, Homo sapiens
  misc_RNA (1)...(19): siRNA sense strand
gcagaugaagaagcagaaa

SEQ ID NO: 1372965 - RNA, 19 nt, Homo sapiens
  misc_RNA (1)...(19): siRNA sense strand
cagcuccgguguggccuuu

SEQ ID NO: 1372966 - RNA, 19 nt, Homo sapiens
  misc_RNA (1)...(19): siRNA sense strand
gaccugggacaucuggaaa

SEQ ID NO: 1372967 - RNA, 19 nt, Homo sapiens
  misc_RNA (1)...(19): siRNA sense strand
gagcuggcuguaccugaaa

SEQ ID NO: 1372968 - RNA, 19 nt, Homo sapiens
  misc_RNA (1)...(19): siRNA sense strand
cagacccacucacccucua

SEQ ID NO: 1372969 - RNA, 19 nt, Homo sapiens
  misc_RNA (1)...(19): siRNA sense strand
ggagaucuacaaggaguuc

SEQ ID NO: 1372970 - RNA, 19 nt, Homo sapiens
  misc_RNA (1)...(19): siRNA sense strand
gcugugaccgcaagaugga

SEQ ID NO: 1372971 - RNA, 19 nt, Homo sapiens
  misc_RNA (1)...(19): siRNA sense strand
ggaagccuccugggacugu

SEQ ID NO: 1372972 - RNA, 19 nt, Homo sapiens
  misc_RNA (1)...(19): siRNA sense strand
gggcugggccaccuuucuu

SEQ ID NO: 1372973 - RNA, 19 nt, Homo sapiens
  misc_RNA (1)...(19): siRNA sense strand
ucuaugaccugggacaucu

SEQ ID NO: 1372974 - RNA, 19 nt, Homo sapiens
  misc_RNA (1)...(19): siRNA sense strand
ugaaggaggcagccagcuu

SEQ ID NO: 1372975 - RNA, 19 nt, Homo sapiens
  misc_RNA (1)...(19): siRNA sense strand
ggaagacgaggagaucuac

SEQ ID NO: 1372976 - RNA, 19 nt, Homo sapiens
  misc_RNA (1)...(19): siRNA sense strand
ccucagccaagaccuacua

SEQ ID NO: 1372977 - RNA, 19 nt, Homo sapiens
  misc_RNA (1)...(19): siRNA sense strand
agucgcaagugcagaugaa

SEQ ID NO: 1372978 - RNA, 19 nt, Homo sapiens
  misc_RNA (1)...(19): siRNA sense strand
ucuacaaggaguucuuuga

SEQ ID NO: 1372979 - RNA, 19 nt, Homo sapiens
  misc_RNA (1)...(19): siRNA sense strand
ugcucuggcugcucuauga

SEQ ID NO: 1372980 - RNA, 19 nt, Homo sapiens
  misc_RNA (1)...(19): siRNA sense strand
gcagcgcaaaggccucuga

SEQ ID NO: 1372981 - RNA, 19 nt, Homo sapiens
  misc_RNA (1)...(19): siRNA sense strand
agauggagguggcguucau

SEQ ID NO: 1372982 - RNA, 19 nt, Homo sapiens
  misc_RNA (1)...(19): siRNA sense strand
gaugaagaagcagaaagug

SEQ ID NO: 1372983 - RNA, 19 nt, Homo sapiens
  misc_RNA (1)...(19): siRNA sense strand
cgcaagugcagaugaagaa

SEQ ID NO: 1372984 - RNA, 19 nt, Homo sapiens
  misc_RNA (1)...(19): siRNA sense strand
uccagucccucuucagcuu

SEQ ID NO: 1372985 - RNA, 19 nt, Homo sapiens
  misc_RNA (1)...(19): siRNA sense strand
gcgcugugaccgcaagaug

SEQ ID NO: 1372986 - RNA, 19 nt, Homo sapiens
  misc_RNA (1)...(19): siRNA sense strand
uggccgaccugucuaucau

SEQ ID NO: 1372987 - RNA, 19 nt, Homo sapiens
  misc_RNA (1)...(19): siRNA sense strand
aaggaguucuuugaaguag

SEQ ID NO: 1372988 - RNA, 19 nt, Homo sapiens
  misc_RNA (1)...(19): siRNA sense strand
cagccaagaccuacuaucg

SEQ ID NO: 1372989 - RNA, 19 nt, Homo sapiens
  misc_RNA (1)...(19): siRNA sense strand
gucccucuauccucgagaa

SEQ ID NO: 1372990 - RNA, 19 nt, Homo sapiens
  misc_RNA (1)...(19): siRNA sense strand
gccaucaagcugcaacuca

SEQ ID NO: 1372991 - RNA, 19 nt, Homo sapiens
  misc_RNA (1)...(19): siRNA sense strand
ccgacucgcuggagcuucu

SEQ ID NO: 1372992 - RNA, 19 nt, Homo sapiens
  misc_RNA (1)...(19): siRNA sense strand
gaaggucuccgaugucaua

SEQ ID NO: 1372993 - RNA, 19 nt, Homo sapiens
  misc_RNA (1)...(19): siRNA sense strand
gaucauacaugcgcuguga

SEQ ID NO: 1372994 - RNA, 19 nt, Homo sapiens
  misc_RNA (1)...(19): siRNA sense strand
gccgugagcuggugaagaa

SEQ ID NO: 1372995 - RNA, 19 nt, Homo sapiens
  misc_RNA (1)...(19): siRNA sense strand
ugaagaaggucuccgaugu

SEQ ID NO: 1372996 - RNA, 19 nt, Homo sapiens
  misc_RNA (1)...(19): siRNA sense strand
ggagcuggcuguaccugaa

SEQ ID NO: 1372997 - RNA, 19 nt, Homo sapiens
  misc_RNA (1)...(19): siRNA sense strand
gaucaugccuggguagugu

SEQ ID NO: 1372998 - RNA, 19 nt, Homo sapiens
  misc_RNA (1)...(19): siRNA sense strand
ugggacaucuggaaaggua

SEQ ID NO: 1372999 - RNA, 19 nt, Homo sapiens
  misc_RNA (1)...(19): siRNA sense strand
caaggaguucuuugaagua

SEQ ID NO: 1373000 - RNA, 19 nt, Homo sapiens
  misc_RNA (1)...(19): siRNA sense strand
acaaggaguucuuugaagu

SEQ ID NO: 1373001 - RNA, 19 nt, Homo sapiens
  misc_RNA (1)...(19): siRNA sense strand
gaaccuggcagaucuagag

SEQ ID NO: 1373002 - RNA, 19 nt, Homo sapiens
  misc_RNA (1)...(19): siRNA sense strand
ggucuccgaugucauaugg

SEQ ID NO: 1373003 - RNA, 19 nt, Homo sapiens
  misc_RNA (1)...(19): siRNA sense strand
ccacugucauccaggacua

SEQ ID NO: 1373004 - RNA, 19 nt, Homo sapiens
  misc_RNA (1)...(19): siRNA sense strand
acgaggagaucuacaagga

SEQ ID NO: 1373005 - RNA, 19 nt, Homo sapiens
  misc_RNA (1)...(19): siRNA sense strand
cgucaucccuaccaacguu

SEQ ID NO: 1373006 - RNA, 19 nt, Homo sapiens
  misc_RNA (1)...(19): siRNA sense strand
gaagaaggucuccgauguc

SEQ ID NO: 1373007 - RNA, 19 nt, Homo sapiens
  misc_RNA (1)...(19): siRNA sense strand
gggaagacgaggagaucua

SEQ ID NO: 1373008 - RNA, 19 nt, Homo sapiens
  misc_RNA (1)...(19): siRNA sense strand
gaacacaucuaccccuaca

SEQ ID NO: 1373009 - RNA, 19 nt, Homo sapiens
  misc_RNA (1)...(19): siRNA sense strand
gaagaugaagggcaugaag

SEQ ID NO: 1373010 - RNA, 19 nt, Homo sapiens
  misc_RNA (1)...(19): siRNA sense strand
ugacuacacucugucuuuc

SEQ ID NO: 1373011 - RNA, 19 nt, Homo sapiens
  misc_RNA (1)...(19): siRNA sense strand
cuacaaggaguucuuugaa

SEQ ID NO: 1373012 - RNA, 19 nt, Homo sapiens
  misc_RNA (1)...(19): siRNA sense strand
cagaaggugcgcauaguga

SEQ ID NO: 1373013 - RNA, 19 nt, Homo sapiens
  misc_RNA (1)...(19): siRNA sense strand
gccaucaacccuuccauug

SEQ ID NO: 1373014 - RNA, 19 nt, Homo sapiens
  misc_RNA (1)...(19): siRNA sense strand
gugacuacacucugucuuu

SEQ ID NO: 1373015 - RNA, 19 nt, Homo sapiens
  misc_RNA (1)...(19): siRNA sense strand
ugaaguagccaaugauguc

SEQ ID NO: 1373016 - RNA, 19 nt, Homo sapiens
  misc_RNA (1)...(19): siRNA sense strand
gaucuacaaggaguucuuu

SEQ ID NO: 1373017 - RNA, 19 nt, Homo sapiens
  misc_RNA (1)...(19): siRNA sense strand
gcagaaggugcgcauagug

SEQ ID NO: 1373018 - RNA, 19 nt, Homo sapiens
  misc_RNA (1)...(19): siRNA sense strand
aagaaggucuccgauguca

SEQ ID NO: 1373019 - RNA, 19 nt, Homo sapiens
  misc_RNA (1)...(19): siRNA sense strand
gaccuacuaucgggaugaa

SEQ ID NO: 1373020 - RNA, 19 nt, Homo sapiens
  misc_RNA (1)...(19): siRNA sense strand
uagggaaccuggcagaucu

SEQ ID NO: 1373021 - RNA, 19 nt, Homo sapiens
  misc_RNA (1)...(19): siRNA sense strand
ucuccgaugucauauggaa

SEQ ID NO: 1373022 - RNA, 19 nt, Homo sapiens
  misc_RNA (1)...(19): siRNA sense strand
gagaagaugaagggcauga

SEQ ID NO: 1373023 - RNA, 19 nt, Homo sapiens
  misc_RNA (1)...(19): siRNA sense strand
cgacguggugcgccuguuu

SEQ ID NO: 1373024 - RNA, 19 nt, Homo sapiens
  misc_RNA (1)...(19): siRNA sense strand
ucuuugaaguagccaauga

SEQ ID NO: 1373025 - RNA, 19 nt, Homo sapiens
  misc_RNA (1)...(19): siRNA sense strand
uacaaggaguucuuugaag

SEQ ID NO: 1373026 - RNA, 19 nt, Homo sapiens
  misc_RNA (1)...(19): siRNA sense strand
ccugaaaggaucauacaug

SEQ ID NO: 1373027 - RNA, 19 nt, Homo sapiens
  misc_RNA (1)...(19): siRNA sense strand
gaaguagccaaugauguca

SEQ ID NO: 1373028 - RNA, 19 nt, Homo sapiens
  misc_RNA (1)...(19): siRNA sense strand
ccacauccagucccucuuc

SEQ ID NO: 1373029 - RNA, 19 nt, Homo sapiens
  misc_RNA (1)...(19): siRNA sense strand
ggcagaaggugcgcauagu

SEQ ID NO: 1373030 - RNA, 19 nt, Homo sapiens
  misc_RNA (1)...(19): siRNA sense strand
gcagaugaagaagcagaaa

SEQ ID NO: 1373031 - RNA, 19 nt, Homo sapiens
  misc_RNA (1)...(19): siRNA sense strand
cagcuccgguguggccuuu

SEQ ID NO: 1373032 - RNA, 19 nt, Homo sapiens
  misc_RNA (1)...(19): siRNA sense strand
gaccugggacaucuggaaa

SEQ ID NO: 1373033 - RNA, 19 nt, Homo sapiens
  misc_RNA (1)...(19): siRNA sense strand
gagcuggcuguaccugaaa

SEQ ID NO: 1373034 - RNA, 19 nt, Homo sapiens
  misc_RNA (1)...(19): siRNA sense strand
cagacccacucacccucua

SEQ ID NO: 1373035 - RNA, 19 nt, Homo sapiens
  misc_RNA (1)...(19): siRNA sense strand
ggagaucuacaaggaguuc

SEQ ID NO: 1373036 - RNA, 19 nt, Homo sapiens
  misc_RNA (1)...(19): siRNA sense strand
gcugugaccgcaagaugga

SEQ ID NO: 1373037 - RNA, 19 nt, Homo sapiens
  misc_RNA (1)...(19): siRNA sense strand
ggaagccuccugggacugu

SEQ ID NO: 1373038 - RNA, 19 nt, Homo sapiens
  misc_RNA (1)...(19): siRNA sense strand
gggcugggccaccuuucuu

SEQ ID NO: 1373039 - RNA, 19 nt, Homo sapiens
  misc_RNA (1)...(19): siRNA sense strand
ucuaugaccugggacaucu

SEQ ID NO: 1373040 - RNA, 19 nt, Homo sapiens
  misc_RNA (1)...(19): siRNA sense strand
ugaaggaggcagccagcuu

SEQ ID NO: 1373041 - RNA, 19 nt, Homo sapiens
  misc_RNA (1)...(19): siRNA sense strand
ggaagacgaggagaucuac

SEQ ID NO: 1373042 - RNA, 19 nt, Homo sapiens
  misc_RNA (1)...(19): siRNA sense strand
ccucagccaagaccuacua

SEQ ID NO: 1373043 - RNA, 19 nt, Homo sapiens
  misc_RNA (1)...(19): siRNA sense strand
agucgcaagugcagaugaa

SEQ ID NO: 1373044 - RNA, 19 nt, Homo sapiens
  misc_RNA (1)...(19): siRNA sense strand
ucuacaaggaguucuuuga

SEQ ID NO: 1373045 - RNA, 19 nt, Homo sapiens
  misc_RNA (1)...(19): siRNA sense strand
ugcucuggcugcucuauga

SEQ ID NO: 1373046 - RNA, 19 nt, Homo sapiens
  misc_RNA (1)...(19): siRNA sense strand
gcagcgcaaaggccucuga

SEQ ID NO: 1373047 - RNA, 19 nt, Homo sapiens
  misc_RNA (1)...(19): siRNA sense strand
agauggagguggcguucau

SEQ ID NO: 1373048 - RNA, 19 nt, Homo sapiens
  misc_RNA (1)...(19): siRNA sense strand
gaugaagaagcagaaagug

SEQ ID NO: 1373049 - RNA, 19 nt, Homo sapiens
  misc_RNA (1)...(19): siRNA sense strand
cgcaagugcagaugaagaa

SEQ ID NO: 1373050 - RNA, 19 nt, Homo sapiens
  misc_RNA (1)...(19): siRNA sense strand
uccagucccucuucagcuu

SEQ ID NO: 1373051 - RNA, 19 nt, Homo sapiens
  misc_RNA (1)...(19): siRNA sense strand
gcgcugugaccgcaagaug

SEQ ID NO: 1373052 - RNA, 19 nt, Homo sapiens
  misc_RNA (1)...(19): siRNA sense strand
uggccgaccugucuaucau

SEQ ID NO: 1373053 - RNA, 19 nt, Homo sapiens
  misc_RNA (1)...(19): siRNA sense strand
aaggaguucuuugaaguag

SEQ ID NO: 1373054 - RNA, 19 nt, Homo sapiens
  misc_RNA (1)...(19): siRNA sense strand
cagccaagaccuacuaucg

SEQ ID NO: 1373055 - RNA, 19 nt, Homo sapiens
  misc_RNA (1)...(19): siRNA sense strand
gucccucuauccucgagaa

SEQ ID NO: 1373056 - RNA, 19 nt, Homo sapiens
  misc_RNA (1)...(19): siRNA sense strand
gccaucaagcugcaacuca

SEQ ID NO: 1373057 - RNA, 19 nt, Homo sapiens
  misc_RNA (1)...(19): siRNA sense strand
ccgacucgcuggagcuucu

SEQ ID NO: 1373058 - RNA, 19 nt, Homo sapiens
  misc_RNA (1)...(19): siRNA sense strand
gaaggucuccgaugucaua

SEQ ID NO: 1373059 - RNA, 19 nt, Homo sapiens
  misc_RNA (1)...(19): siRNA sense strand
gaucauacaugcgcuguga

SEQ ID NO: 1373060 - RNA, 19 nt, Homo sapiens
  misc_RNA (1)...(19): siRNA sense strand
gccgugagcuggugaagaa

SEQ ID NO: 1373061 - RNA, 19 nt, Homo sapiens
  misc_RNA (1)...(19): siRNA sense strand
ugaagaaggucuccgaugu

SEQ ID NO: 1373062 - RNA, 19 nt, Homo sapiens
  misc_RNA (1)...(19): siRNA sense strand
ggagcuggcuguaccugaa

SEQ ID NO: 1373063 - RNA, 19 nt, Homo sapiens
  misc_RNA (1)...(19): siRNA sense strand
gaucaugccuggguagugu

SEQ ID NO: 1373064 - RNA, 19 nt, Homo sapiens
  misc_RNA (1)...(19): siRNA sense strand
ugggacaucuggaaaggua

SEQ ID NO: 1373065 - RNA, 19 nt, Homo sapiens
  misc_RNA (1)...(19): siRNA sense strand
caaggaguucuuugaagua

SEQ ID NO: 1373066 - RNA, 19 nt, Homo sapiens
  misc_RNA (1)...(19): siRNA sense strand
acaaggaguucuuugaagu

SEQ ID NO: 1373067 - RNA, 19 nt, Homo sapiens
  misc_RNA (1)...(19): siRNA sense strand
gaaccuggcagaucuagag

SEQ ID NO: 1373068 - RNA, 19 nt, Homo sapiens
  misc_RNA (1)...(19): siRNA sense strand
ggucuccgaugucauaugg

SEQ ID NO: 1373069 - RNA, 19 nt, Homo sapiens
  misc_RNA (1)...(19): siRNA sense strand
ccacugucauccaggacua

SEQ ID NO: 1373070 - RNA, 19 nt, Homo sapiens
  misc_RNA (1)...(19): siRNA sense strand
acgaggagaucuacaagga

SEQ ID NO: 1373071 - RNA, 19 nt, Homo sapiens
  misc_RNA (1)...(19): siRNA sense strand
cgucaucccuaccaacguu

SEQ ID NO: 1373072 - RNA, 19 nt, Homo sapiens
  misc_RNA (1)...(19): siRNA sense strand
gaagaaggucuccgauguc

SEQ ID NO: 1373073 - RNA, 19 nt, Homo sapiens
  misc_RNA (1)...(19): siRNA sense strand
gggaagacgaggagaucua

SEQ ID NO: 1373074 - RNA, 19 nt, Homo sapiens
  misc_RNA (1)...(19): siRNA sense strand
gaacacaucuaccccuaca

SEQ ID NO: 1373075 - RNA, 19 nt, Homo sapiens
  misc_RNA (1)...(19): siRNA sense strand
gaagaugaagggcaugaag

SEQ ID NO: 1373076 - RNA, 19 nt, Homo sapiens
  misc_RNA (1)...(19): siRNA sense strand
ugacuacacucugucuuuc

SEQ ID NO: 1373077 - RNA, 19 nt, Homo sapiens
  misc_RNA (1)...(19): siRNA sense strand
cuacaaggaguucuuugaa

SEQ ID NO: 1373078 - RNA, 19 nt, Homo sapiens
  misc_RNA (1)...(19): siRNA sense strand
cagaaggugcgcauaguga

SEQ ID NO: 1373079 - RNA, 19 nt, Homo sapiens
  misc_RNA (1)...(19): siRNA sense strand
gccaucaacccuuccauug

SEQ ID NO: 1373080 - RNA, 19 nt, Homo sapiens
  misc_RNA (1)...(19): siRNA sense strand
gugacuacacucugucuuu

SEQ ID NO: 1373081 - RNA, 19 nt, Homo sapiens
  misc_RNA (1)...(19): siRNA sense strand
ugaaguagccaaugauguc

SEQ ID NO: 1373082 - RNA, 19 nt, Homo sapiens
  misc_RNA (1)...(19): siRNA sense strand
gaucuacaaggaguucuuu

SEQ ID NO: 1373083 - RNA, 19 nt, Homo sapiens
  misc_RNA (1)...(19): siRNA sense strand
gcagaaggugcgcauagug

SEQ ID NO: 1373084 - RNA, 19 nt, Homo sapiens
  misc_RNA (1)...(19): siRNA sense strand
aagaaggucuccgauguca

SEQ ID NO: 1373085 - RNA, 19 nt, Homo sapiens
  misc_RNA (1)...(19): siRNA sense strand
gaccuacuaucgggaugaa

SEQ ID NO: 1373086 - RNA, 19 nt, Homo sapiens
  misc_RNA (1)...(19): siRNA sense strand
uagggaaccuggcagaucu

SEQ ID NO: 1373087 - RNA, 19 nt, Homo sapiens
  misc_RNA (1)...(19): siRNA sense strand
ucuccgaugucauauggaa

SEQ ID NO: 1373088 - RNA, 19 nt, Homo sapiens
  misc_RNA (1)...(19): siRNA sense strand
gagaagaugaagggcauga

SEQ ID NO: 1373089 - RNA, 19 nt, Homo sapiens
  misc_RNA (1)...(19): siRNA sense strand
cgacguggugcgccuguuu

SEQ ID NO: 1373090 - RNA, 19 nt, Homo sapiens
  misc_RNA (1)...(19): siRNA sense strand
ucuuugaaguagccaauga

SEQ ID NO: 1373091 - RNA, 19 nt, Homo sapiens
  misc_RNA (1)...(19): siRNA sense strand
uacaaggaguucuuugaag

SEQ ID NO: 1373092 - RNA, 19 nt, Homo sapiens
  misc_RNA (1)...(19): siRNA sense strand
ccugaaaggaucauacaug

SEQ ID NO: 1373093 - RNA, 19 nt, Homo sapiens
  misc_RNA (1)...(19): siRNA sense strand
gaaguagccaaugauguca

SEQ ID NO: 1373094 - RNA, 19 nt, Homo sapiens
  misc_RNA (1)...(19): siRNA sense strand
ccacauccagucccucuuc

SEQ ID NO: 1373095 - RNA, 19 nt, Homo sapiens
  misc_RNA (1)...(19): siRNA sense strand
ggcagaaggugcgcauagu

SEQ ID NO: 1373096 - RNA, 19 nt, Homo sapiens
  misc_RNA (1)...(19): siRNA sense strand
gcagaugaagaagcagaaa

SEQ ID NO: 1373097 - RNA, 19 nt, Homo sapiens
  misc_RNA (1)...(19): siRNA sense strand
cagcuccgguguggccuuu

SEQ ID NO: 1373098 - RNA, 19 nt, Homo sapiens
  misc_RNA (1)...(19): siRNA sense strand
gaccugggacaucuggaaa

SEQ ID NO: 1373099 - RNA, 19 nt, Homo sapiens
  misc_RNA (1)...(19): siRNA sense strand
gagcuggcuguaccugaaa

SEQ ID NO: 1373100 - RNA, 19 nt, Homo sapiens
  misc_RNA (1)...(19): siRNA sense strand
cagacccacucacccucua

SEQ ID NO: 1373101 - RNA, 19 nt, Homo sapiens
  misc_RNA (1)...(19): siRNA sense strand
ggagaucuacaaggaguuc

SEQ ID NO: 1373102 - RNA, 19 nt, Homo sapiens
  misc_RNA (1)...(19): siRNA sense strand
gcugugaccgcaagaugga

SEQ ID NO: 1373103 - RNA, 19 nt, Homo sapiens
  misc_RNA (1)...(19): siRNA sense strand
ggaagccuccugggacugu

SEQ ID NO: 1373104 - RNA, 19 nt, Homo sapiens
  misc_RNA (1)...(19): siRNA sense strand
gggcugggccaccuuucuu

SEQ ID NO: 1373105 - RNA, 19 nt, Homo sapiens
  misc_RNA (1)...(19): siRNA sense strand
ucuaugaccugggacaucu

SEQ ID NO: 1373106 - RNA, 19 nt, Homo sapiens
  misc_RNA (1)...(19): siRNA sense strand
ugaaggaggcagccagcuu

SEQ ID NO: 1373107 - RNA, 19 nt, Homo sapiens
  misc_RNA (1)...(19): siRNA sense strand
ggaagacgaggagaucuac

SEQ ID NO: 1373108 - RNA, 19 nt, Homo sapiens
  misc_RNA (1)...(19): siRNA sense strand
ccucagccaagaccuacua

SEQ ID NO: 1373109 - RNA, 19 nt, Homo sapiens
  misc_RNA (1)...(19): siRNA sense strand
agucgcaagugcagaugaa

SEQ ID NO: 1373110 - RNA, 19 nt, Homo sapiens
  misc_RNA (1)...(19): siRNA sense strand
ucuacaaggaguucuuuga

SEQ ID NO: 1373111 - RNA, 19 nt, Homo sapiens
  misc_RNA (1)...(19): siRNA sense strand
ugcucuggcugcucuauga

SEQ ID NO: 1373112 - RNA, 19 nt, Homo sapiens
  misc_RNA (1)...(19): siRNA sense strand
gcagcgcaaaggccucuga

SEQ ID NO: 1373113 - RNA, 19 nt, Homo sapiens
  misc_RNA (1)...(19): siRNA sense strand
agauggagguggcguucau

SEQ ID NO: 1373114 - RNA, 19 nt, Homo sapiens
  misc_RNA (1)...(19): siRNA sense strand
gaugaagaagcagaaagug

SEQ ID NO: 1373115 - RNA, 19 nt, Homo sapiens
  misc_RNA (1)...(19): siRNA sense strand
cgcaagugcagaugaagaa

SEQ ID NO: 1373116 - RNA, 19 nt, Homo sapiens
  misc_RNA (1)...(19): siRNA sense strand
uccagucccucuucagcuu

SEQ ID NO: 1373117 - RNA, 19 nt, Homo sapiens
  misc_RNA (1)...(19): siRNA sense strand
gcgcugugaccgcaagaug

SEQ ID NO: 1373118 - RNA, 19 nt, Homo sapiens
  misc_RNA (1)...(19): siRNA sense strand
uggccgaccugucuaucau

SEQ ID NO: 1373119 - RNA, 19 nt, Homo sapiens
  misc_RNA (1)...(19): siRNA sense strand
aaggaguucuuugaaguag

SEQ ID NO: 1373120 - RNA, 19 nt, Homo sapiens
  misc_RNA (1)...(19): siRNA sense strand
cagccaagaccuacuaucg

SEQ ID NO: 1373121 - RNA, 19 nt, Homo sapiens
  misc_RNA (1)...(19): siRNA sense strand
gucccucuauccucgagaa

SEQ ID NO: 1373122 - RNA, 19 nt, Homo sapiens
  misc_RNA (1)...(19): siRNA sense strand
gccaucaagcugcaacuca

SEQ ID NO: 1373123 - RNA, 19 nt, Homo sapiens
  misc_RNA (1)...(19): siRNA sense strand
ccgacucgcuggagcuucu

SEQ ID NO: 1373124 - RNA, 19 nt, Homo sapiens
  misc_RNA (1)...(19): siRNA sense strand
gaaggucuccgaugucaua

SEQ ID NO: 1373125 - RNA, 19 nt, Homo sapiens
  misc_RNA (1)...(19): siRNA sense strand
gaucauacaugcgcuguga

SEQ ID NO: 1373126 - RNA, 19 nt, Homo sapiens
  misc_RNA (1)...(19): siRNA sense strand
gccgugagcuggugaagaa

SEQ ID NO: 1373127 - RNA, 19 nt, Homo sapiens
  misc_RNA (1)...(19): siRNA sense strand
ugaagaaggucuccgaugu

SEQ ID NO: 1373128 - RNA, 19 nt, Homo sapiens
  misc_RNA (1)...(19): siRNA sense strand
ggagcuggcuguaccugaa

SEQ ID NO: 1373129 - RNA, 19 nt, Homo sapiens
  misc_RNA (1)...(19): siRNA sense strand
gaucaugccuggguagugu

SEQ ID NO: 1373130 - RNA, 19 nt, Homo sapiens
  misc_RNA (1)...(19): siRNA sense strand
ugggacaucuggaaaggua

SEQ ID NO: 1373131 - RNA, 19 nt, Homo sapiens
  misc_RNA (1)...(19): siRNA sense strand
caaggaguucuuugaagua

SEQ ID NO: 1373132 - RNA, 19 nt, Homo sapiens
  misc_RNA (1)...(19): siRNA sense strand
acaaggaguucuuugaagu

SEQ ID NO: 1373133 - RNA, 19 nt, Homo sapiens
  misc_RNA (1)...(19): siRNA sense strand
gaaccuggcagaucuagag

SEQ ID NO: 1373134 - RNA, 19 nt, Homo sapiens
  misc_RNA (1)...(19): siRNA sense strand
ggucuccgaugucauaugg

SEQ ID NO: 1373135 - RNA, 19 nt, Homo sapiens
  misc_RNA (1)...(19): siRNA sense strand
ccacugucauccaggacua

SEQ ID NO: 1373136 - RNA, 19 nt, Homo sapiens
  misc_RNA (1)...(19): siRNA sense strand
acgaggagaucuacaagga

SEQ ID NO: 1373137 - RNA, 19 nt, Homo sapiens
  misc_RNA (1)...(19): siRNA sense strand
cgucaucccuaccaacguu

SEQ ID NO: 1373138 - RNA, 19 nt, Homo sapiens
  misc_RNA (1)...(19): siRNA sense strand
gaagaaggucuccgauguc

SEQ ID NO: 1373139 - RNA, 19 nt, Homo sapiens
  misc_RNA (1)...(19): siRNA sense strand
gggaagacgaggagaucua

SEQ ID NO: 1373140 - RNA, 19 nt, Homo sapiens
  misc_RNA (1)...(19): siRNA sense strand
gaacacaucuaccccuaca

SEQ ID NO: 1373141 - RNA, 19 nt, Homo sapiens
  misc_RNA (1)...(19): siRNA sense strand
gaagaugaagggcaugaag

SEQ ID NO: 1373142 - RNA, 19 nt, Homo sapiens
  misc_RNA (1)...(19): siRNA sense strand
ugacuacacucugucuuuc

SEQ ID NO: 1373143 - RNA, 19 nt, Homo sapiens
  misc_RNA (1)...(19): siRNA sense strand
cuacaaggaguucuuugaa

SEQ ID NO: 1373144 - RNA, 19 nt, Homo sapiens
  misc_RNA (1)...(19): siRNA sense strand
cagaaggugcgcauaguga

SEQ ID NO: 1373145 - RNA, 19 nt, Homo sapiens
  misc_RNA (1)...(19): siRNA sense strand
gccaucaacccuuccauug

SEQ ID NO: 1373146 - RNA, 19 nt, Homo sapiens
  misc_RNA (1)...(19): siRNA sense strand
gugacuacacucugucuuu

SEQ ID NO: 1373147 - RNA, 19 nt, Homo sapiens
  misc_RNA (1)...(19): siRNA sense strand
ugaaguagccaaugauguc

SEQ ID NO: 1373148 - RNA, 19 nt, Homo sapiens
  misc_RNA (1)...(19): siRNA sense strand
gaucuacaaggaguucuuu

SEQ ID NO: 1373149 - RNA, 19 nt, Homo sapiens
  misc_RNA (1)...(19): siRNA sense strand
gcagaaggugcgcauagug

SEQ ID NO: 1373150 - RNA, 19 nt, Homo sapiens
  misc_RNA (1)...(19): siRNA sense strand
aagaaggucuccgauguca

SEQ ID NO: 1373151 - RNA, 19 nt, Homo sapiens
  misc_RNA (1)...(19): siRNA sense strand
gaccuacuaucgggaugaa

SEQ ID NO: 1373152 - RNA, 19 nt, Homo sapiens
  misc_RNA (1)...(19): siRNA sense strand
uagggaaccuggcagaucu

SEQ ID NO: 1373153 - RNA, 19 nt, Homo sapiens
  misc_RNA (1)...(19): siRNA sense strand
ucuccgaugucauauggaa

SEQ ID NO: 1373154 - RNA, 19 nt, Homo sapiens
  misc_RNA (1)...(19): siRNA sense strand
gagaagaugaagggcauga

SEQ ID NO: 1373155 - RNA, 19 nt, Homo sapiens
  misc_RNA (1)...(19): siRNA sense strand
cgacguggugcgccuguuu

SEQ ID NO: 1373156 - RNA, 19 nt, Homo sapiens
  misc_RNA (1)...(19): siRNA sense strand
ucuuugaaguagccaauga

SEQ ID NO: 1373157 - RNA, 19 nt, Homo sapiens
  misc_RNA (1)...(19): siRNA sense strand
uacaaggaguucuuugaag

SEQ ID NO: 1373158 - RNA, 19 nt, Homo sapiens
  misc_RNA (1)...(19): siRNA sense strand
ccugaaaggaucauacaug

SEQ ID NO: 1373159 - RNA, 19 nt, Homo sapiens
  misc_RNA (1)...(19): siRNA sense strand
gaaguagccaaugauguca

SEQ ID NO: 1373160 - RNA, 19 nt, Homo sapiens
  misc_RNA (1)...(19): siRNA sense strand
ccacauccagucccucuuc

SEQ ID NO: 1373161 - RNA, 19 nt, Homo sapiens
  misc_RNA (1)...(19): siRNA sense strand
ggcagaaggugcgcauagu

SEQ ID NO: 1373162 - RNA, 19 nt, Homo sapiens
  misc_RNA (1)...(19): siRNA sense strand
gcagaugaagaagcagaaa

SEQ ID NO: 1373163 - RNA, 19 nt, Homo sapiens
  misc_RNA (1)...(19): siRNA sense strand
cagcuccgguguggccuuu

SEQ ID NO: 1373164 - RNA, 19 nt, Homo sapiens
  misc_RNA (1)...(19): siRNA sense strand
gaccugggacaucuggaaa

SEQ ID NO: 1373165 - RNA, 19 nt, Homo sapiens
  misc_RNA (1)...(19): siRNA sense strand
gagcuggcuguaccugaaa

SEQ ID NO: 1373166 - RNA, 19 nt, Homo sapiens
  misc_RNA (1)...(19): siRNA sense strand
cagacccacucacccucua

SEQ ID NO: 1373167 - RNA, 19 nt, Homo sapiens
  misc_RNA (1)...(19): siRNA sense strand
ggagaucuacaaggaguuc

SEQ ID NO: 1373168 - RNA, 19 nt, Homo sapiens
  misc_RNA (1)...(19): siRNA sense strand
gcugugaccgcaagaugga

SEQ ID NO: 1373169 - RNA, 19 nt, Homo sapiens
  misc_RNA (1)...(19): siRNA sense strand
ggaagccuccugggacugu

SEQ ID NO: 1373170 - RNA, 19 nt, Homo sapiens
  misc_RNA (1)...(19): siRNA sense strand
gggcugggccaccuuucuu

SEQ ID NO: 1373171 - RNA, 19 nt, Homo sapiens
  misc_RNA (1)...(19): siRNA sense strand
ucuaugaccugggacaucu

SEQ ID NO: 1373172 - RNA, 19 nt, Homo sapiens
  misc_RNA (1)...(19): siRNA sense strand
ugaaggaggcagccagcuu

SEQ ID NO: 1373173 - RNA, 19 nt, Homo sapiens
  misc_RNA (1)...(19): siRNA sense strand
ggaagacgaggagaucuac

SEQ ID NO: 1373174 - RNA, 19 nt, Homo sapiens
  misc_RNA (1)...(19): siRNA sense strand
ccucagccaagaccuacua

SEQ ID NO: 1373175 - RNA, 19 nt, Homo sapiens
  misc_RNA (1)...(19): siRNA sense strand
agucgcaagugcagaugaa

SEQ ID NO: 1373176 - RNA, 19 nt, Homo sapiens
  misc_RNA (1)...(19): siRNA sense strand
ucuacaaggaguucuuuga

SEQ ID NO: 1373177 - RNA, 19 nt, Homo sapiens
  misc_RNA (1)...(19): siRNA sense strand
ugcucuggcugcucuauga

SEQ ID NO: 1373178 - RNA, 19 nt, Homo sapiens
  misc_RNA (1)...(19): siRNA sense strand
gcagcgcaaaggccucuga

SEQ ID NO: 1373179 - RNA, 19 nt, Homo sapiens
  misc_RNA (1)...(19): siRNA sense strand
agauggagguggcguucau

SEQ ID NO: 1373180 - RNA, 19 nt, Homo sapiens
  misc_RNA (1)...(19): siRNA sense strand
gaugaagaagcagaaagug

SEQ ID NO: 1373181 - RNA, 19 nt, Homo sapiens
  misc_RNA (1)...(19): siRNA sense strand
cgcaagugcagaugaagaa

SEQ ID NO: 1373182 - RNA, 19 nt, Homo sapiens
  misc_RNA (1)...(19): siRNA sense strand
uccagucccucuucagcuu

SEQ ID NO: 1373183 - RNA, 19 nt, Homo sapiens
  misc_RNA (1)...(19): siRNA sense strand
gcgcugugaccgcaagaug

SEQ ID NO: 1373184 - RNA, 19 nt, Homo sapiens
  misc_RNA (1)...(19): siRNA sense strand
uggccgaccugucuaucau

SEQ ID NO: 1373185 - RNA, 19 nt, Homo sapiens
  misc_RNA (1)...(19): siRNA sense strand
aaggaguucuuugaaguag

SEQ ID NO: 1373186 - RNA, 19 nt, Homo sapiens
  misc_RNA (1)...(19): siRNA sense strand
cagccaagaccuacuaucg

SEQ ID NO: 1373187 - RNA, 19 nt, Homo sapiens
  misc_RNA (1)...(19): siRNA sense strand
gucccucuauccucgagaa

SEQ ID NO: 1373188 - RNA, 19 nt, Homo sapiens
  misc_RNA (1)...(19): siRNA sense strand
gccaucaagcugcaacuca

SEQ ID NO: 1373189 - RNA, 19 nt, Homo sapiens
  misc_RNA (1)...(19): siRNA sense strand
ccgacucgcuggagcuucu

SEQ ID NO: 1373190 - RNA, 19 nt, Homo sapiens
  misc_RNA (1)...(19): siRNA sense strand
gaaggucuccgaugucaua

SEQ ID NO: 1373191 - RNA, 19 nt, Homo sapiens
  misc_RNA (1)...(19): siRNA sense strand
gaucauacaugcgcuguga

SEQ ID NO: 1373192 - RNA, 19 nt, Homo sapiens
  misc_RNA (1)...(19): siRNA sense strand
gccgugagcuggugaagaa

SEQ ID NO: 1373193 - RNA, 19 nt, Homo sapiens
  misc_RNA (1)...(19): siRNA sense strand
ugaagaaggucuccgaugu

SEQ ID NO: 1373194 - RNA, 19 nt, Homo sapiens
  misc_RNA (1)...(19): siRNA sense strand
ggagcuggcuguaccugaa

SEQ ID NO: 1373195 - RNA, 19 nt, Homo sapiens
  misc_RNA (1)...(19): siRNA sense strand
gaucaugccuggguagugu

SEQ ID NO: 1373196 - RNA, 19 nt, Homo sapiens
  misc_RNA (1)...(19): siRNA sense strand
ugggacaucuggaaaggua

SEQ ID NO: 1373197 - RNA, 19 nt, Homo sapiens
  misc_RNA (1)...(19): siRNA sense strand
caaggaguucuuugaagua

SEQ ID NO: 1373198 - RNA, 19 nt, Homo sapiens
  misc_RNA (1)...(19): siRNA sense strand
acaaggaguucuuugaagu

SEQ ID NO: 1373199 - RNA, 19 nt, Homo sapiens
  misc_RNA (1)...(19): siRNA sense strand
gaaccuggcagaucuagag

SEQ ID NO: 1373200 - RNA, 19 nt, Homo sapiens
  misc_RNA (1)...(19): siRNA sense strand
ggucuccgaugucauaugg

SEQ ID NO: 1373201 - RNA, 19 nt, Homo sapiens
  misc_RNA (1)...(19): siRNA sense strand
ccacugucauccaggacua

SEQ ID NO: 1373202 - RNA, 19 nt, Homo sapiens
  misc_RNA (1)...(19): siRNA sense strand
acgaggagaucuacaagga

SEQ ID NO: 1373203 - RNA, 19 nt, Homo sapiens
  misc_RNA (1)...(19): siRNA sense strand
cgucaucccuaccaacguu

SEQ ID NO: 1373204 - RNA, 19 nt, Homo sapiens
  misc_RNA (1)...(19): siRNA sense strand
gaagaaggucuccgauguc

SEQ ID NO: 1373205 - RNA, 19 nt, Homo sapiens
  misc_RNA (1)...(19): siRNA sense strand
gggaagacgaggagaucua

SEQ ID NO: 1373206 - RNA, 19 nt, Homo sapiens
  misc_RNA (1)...(19): siRNA sense strand
gaacacaucuaccccuaca

SEQ ID NO: 1373207 - RNA, 19 nt, Homo sapiens
  misc_RNA (1)...(19): siRNA sense strand
gaagaugaagggcaugaag

SEQ ID NO: 1373208 - RNA, 19 nt, Homo sapiens
  misc_RNA (1)...(19): siRNA sense strand
ugacuacacucugucuuuc

SEQ ID NO: 1373209 - RNA, 19 nt, Homo sapiens
  misc_RNA (1)...(19): siRNA sense strand
cuacaaggaguucuuugaa

SEQ ID NO: 1373210 - RNA, 19 nt, Homo sapiens
  misc_RNA (1)...(19): siRNA sense strand
cagaaggugcgcauaguga

SEQ ID NO: 1373211 - RNA, 19 nt, Homo sapiens
  misc_RNA (1)...(19): siRNA sense strand
gccaucaacccuuccauug

SEQ ID NO: 1373212 - RNA, 19 nt, Homo sapiens
  misc_RNA (1)...(19): siRNA sense strand
gugacuacacucugucuuu

SEQ ID NO: 1373213 - RNA, 19 nt, Homo sapiens
  misc_RNA (1)...(19): siRNA sense strand
ugaaguagccaaugauguc

SEQ ID NO: 1373214 - RNA, 19 nt, Homo sapiens
  misc_RNA (1)...(19): siRNA sense strand
gaucuacaaggaguucuuu

SEQ ID NO: 1373215 - RNA, 19 nt, Homo sapiens
  misc_RNA (1)...(19): siRNA sense strand
gcagaaggugcgcauagug

SEQ ID NO: 1373216 - RNA, 19 nt, Homo sapiens
  misc_RNA (1)...(19): siRNA sense strand
aagaaggucuccgauguca

SEQ ID NO: 1373217 - RNA, 19 nt, Homo sapiens
  misc_RNA (1)...(19): siRNA sense strand
gaccuacuaucgggaugaa

SEQ ID NO: 1373218 - RNA, 19 nt, Homo sapiens
  misc_RNA (1)...(19): siRNA sense strand
uagggaaccuggcagaucu

SEQ ID NO: 1373219 - RNA, 19 nt, Homo sapiens
  misc_RNA (1)...(19): siRNA sense strand
ucuccgaugucauauggaa

SEQ ID NO: 1373220 - RNA, 19 nt, Homo sapiens
  misc_RNA (1)...(19): siRNA sense strand
gagaagaugaagggcauga

SEQ ID NO: 1373221 - RNA, 19 nt, Homo sapiens
  misc_RNA (1)...(19): siRNA sense strand
cgacguggugcgccuguuu

SEQ ID NO: 1373222 - RNA, 19 nt, Homo sapiens
  misc_RNA (1)...(19): siRNA sense strand
ucuuugaaguagccaauga

SEQ ID NO: 1373223 - RNA, 19 nt, Homo sapiens
  misc_RNA (1)...(19): siRNA sense strand
uacaaggaguucuuugaag

SEQ ID NO: 1373224 - RNA, 19 nt, Homo sapiens
  misc_RNA (1)...(19): siRNA sense strand
ccugaaaggaucauacaug

SEQ ID NO: 1373225 - RNA, 19 nt, Homo sapiens
  misc_RNA (1)...(19): siRNA sense strand
gaaguagccaaugauguca

SEQ ID NO: 1373226 - RNA, 19 nt, Homo sapiens
  misc_RNA (1)...(19): siRNA sense strand
ccacauccagucccucuuc

SEQ ID NO: 1373227 - RNA, 19 nt, Homo sapiens
  misc_RNA (1)...(19): siRNA sense strand
ggcagaaggugcgcauagu

SEQ ID NO: 1373228 - RNA, 19 nt, Homo sapiens
  misc_RNA (1)...(19): siRNA sense strand
gcagaugaagaagcagaaa

SEQ ID NO: 1373229 - RNA, 19 nt, Homo sapiens
  misc_RNA (1)...(19): siRNA sense strand
cagcuccgguguggccuuu

SEQ ID NO: 1373230 - RNA, 19 nt, Homo sapiens
  misc_RNA (1)...(19): siRNA sense strand
gaccugggacaucuggaaa

SEQ ID NO: 1373231 - RNA, 19 nt, Homo sapiens
  misc_RNA (1)...(19): siRNA sense strand
gagcuggcuguaccugaaa

SEQ ID NO: 1373232 - RNA, 19 nt, Homo sapiens
  misc_RNA (1)...(19): siRNA sense strand
cagacccacucacccucua

SEQ ID NO: 1373233 - RNA, 19 nt, Homo sapiens
  misc_RNA (1)...(19): siRNA sense strand
ggagaucuacaaggaguuc

SEQ ID NO: 1373234 - RNA, 19 nt, Homo sapiens
  misc_RNA (1)...(19): siRNA sense strand
gcugugaccgcaagaugga

SEQ ID NO: 1373235 - RNA, 19 nt, Homo sapiens
  misc_RNA (1)...(19): siRNA sense strand
ggaagccuccugggacugu

SEQ ID NO: 1373236 - RNA, 19 nt, Homo sapiens
  misc_RNA (1)...(19): siRNA sense strand
gggcugggccaccuuucuu

SEQ ID NO: 1373237 - RNA, 19 nt, Homo sapiens
  misc_RNA (1)...(19): siRNA sense strand
ucuaugaccugggacaucu

SEQ ID NO: 1373238 - RNA, 19 nt, Homo sapiens
  misc_RNA (1)...(19): siRNA sense strand
ugaaggaggcagccagcuu

SEQ ID NO: 1373239 - RNA, 19 nt, Homo sapiens
  misc_RNA (1)...(19): siRNA sense strand
ggaagacgaggagaucuac

SEQ ID NO: 1373240 - RNA, 19 nt, Homo sapiens
  misc_RNA (1)...(19): siRNA sense strand
ccucagccaagaccuacua

SEQ ID NO: 1373241 - RNA, 19 nt, Homo sapiens
  misc_RNA (1)...(19): siRNA sense strand
agucgcaagugcagaugaa

SEQ ID NO: 1373242 - RNA, 19 nt, Homo sapiens
  misc_RNA (1)...(19): siRNA sense strand
ucuacaaggaguucuuuga

SEQ ID NO: 1373243 - RNA, 19 nt, Homo sapiens
  misc_RNA (1)...(19): siRNA sense strand
ugcucuggcugcucuauga

SEQ ID NO: 1373244 - RNA, 19 nt, Homo sapiens
  misc_RNA (1)...(19): siRNA sense strand
gcagcgcaaaggccucuga

SEQ ID NO: 1373245 - RNA, 19 nt, Homo sapiens
  misc_RNA (1)...(19): siRNA sense strand
agauggagguggcguucau

SEQ ID NO: 1373246 - RNA, 19 nt, Homo sapiens
  misc_RNA (1)...(19): siRNA sense strand
gaugaagaagcagaaagug

SEQ ID NO: 1373247 - RNA, 19 nt, Homo sapiens
  misc_RNA (1)...(19): siRNA sense strand
cgcaagugcagaugaagaa

SEQ ID NO: 1373248 - RNA, 19 nt, Homo sapiens
  misc_RNA (1)...(19): siRNA sense strand
uccagucccucuucagcuu

SEQ ID NO: 1373249 - RNA, 19 nt, Homo sapiens
  misc_RNA (1)...(19): siRNA sense strand
gcgcugugaccgcaagaug

SEQ ID NO: 1373250 - RNA, 19 nt, Homo sapiens
  misc_RNA (1)...(19): siRNA sense strand
uggccgaccugucuaucau

SEQ ID NO: 1373251 - RNA, 19 nt, Homo sapiens
  misc_RNA (1)...(19): siRNA sense strand
aaggaguucuuugaaguag

SEQ ID NO: 1373252 - RNA, 19 nt, Homo sapiens
  misc_RNA (1)...(19): siRNA sense strand
cagccaagaccuacuaucg

SEQ ID NO: 1373253 - RNA, 19 nt, Homo sapiens
  misc_RNA (1)...(19): siRNA sense strand
gucccucuauccucgagaa

SEQ ID NO: 1373254 - RNA, 19 nt, Homo sapiens
  misc_RNA (1)...(19): siRNA sense strand
gccaucaagcugcaacuca

SEQ ID NO: 1373255 - RNA, 19 nt, Homo sapiens
  misc_RNA (1)...(19): siRNA sense strand
ccgacucgcuggagcuucu

SEQ ID NO: 1373256 - RNA, 19 nt, Homo sapiens
  misc_RNA (1)...(19): siRNA sense strand
gaaggucuccgaugucaua

SEQ ID NO: 1373257 - RNA, 19 nt, Homo sapiens
  misc_RNA (1)...(19): siRNA sense strand
gaucauacaugcgcuguga

SEQ ID NO: 1373258 - RNA, 19 nt, Homo sapiens
  misc_RNA (1)...(19): siRNA sense strand
gccgugagcuggugaagaa

SEQ ID NO: 1373259 - RNA, 19 nt, Homo sapiens
  misc_RNA (1)...(19): siRNA sense strand
ugaagaaggucuccgaugu

SEQ ID NO: 1373260 - RNA, 19 nt, Homo sapiens
  misc_RNA (1)...(19): siRNA sense strand
ggagcuggcuguaccugaa

SEQ ID NO: 1373261 - RNA, 19 nt, Homo sapiens
  misc_RNA (1)...(19): siRNA sense strand
gaucaugccuggguagugu

SEQ ID NO: 1373262 - RNA, 19 nt, Homo sapiens
  misc_RNA (1)...(19): siRNA sense strand
ugggacaucuggaaaggua

SEQ ID NO: 1373263 - RNA, 19 nt, Homo sapiens
  misc_RNA (1)...(19): siRNA sense strand
caaggaguucuuugaagua

SEQ ID NO: 1373264 - RNA, 19 nt, Homo sapiens
  misc_RNA (1)...(19): siRNA sense strand
acaaggaguucuuugaagu

SEQ ID NO: 1373265 - RNA, 19 nt, Homo sapiens
  misc_RNA (1)...(19): siRNA sense strand
gaaccuggcagaucuagag

SEQ ID NO: 1373266 - RNA, 19 nt, Homo sapiens
  misc_RNA (1)...(19): siRNA sense strand
ggucuccgaugucauaugg

SEQ ID NO: 1373267 - RNA, 19 nt, Homo sapiens
  misc_RNA (1)...(19): siRNA sense strand
ccacugucauccaggacua

SEQ ID NO: 1373268 - RNA, 19 nt, Homo sapiens
  misc_RNA (1)...(19): siRNA sense strand
acgaggagaucuacaagga

SEQ ID NO: 1373269 - RNA, 19 nt, Homo sapiens
  misc_RNA (1)...(19): siRNA sense strand
cgucaucccuaccaacguu

SEQ ID NO: 1373270 - RNA, 19 nt, Homo sapiens
  misc_RNA (1)...(19): siRNA sense strand
gaagaaggucuccgauguc

SEQ ID NO: 1373271 - RNA, 19 nt, Homo sapiens
  misc_RNA (1)...(19): siRNA sense strand
gggaagacgaggagaucua

SEQ ID NO: 1373272 - RNA, 19 nt, Homo sapiens
  misc_RNA (1)...(19): siRNA sense strand
gaacacaucuaccccuaca

SEQ ID NO: 1373273 - RNA, 19 nt, Homo sapiens
  misc_RNA (1)...(19): siRNA sense strand
gaagaugaagggcaugaag

SEQ ID NO: 1373274 - RNA, 19 nt, Homo sapiens
  misc_RNA (1)...(19): siRNA sense strand
ugacuacacucugucuuuc

SEQ ID NO: 1373275 - RNA, 19 nt, Homo sapiens
  misc_RNA (1)...(19): siRNA sense strand
cuacaaggaguucuuugaa

SEQ ID NO: 1373276 - RNA, 19 nt, Homo sapiens
  misc_RNA (1)...(19): siRNA sense strand
cagaaggugcgcauaguga

SEQ ID NO: 1373277 - RNA, 19 nt, Homo sapiens
  misc_RNA (1)...(19): siRNA sense strand
gccaucaacccuuccauug

SEQ ID NO: 1373278 - RNA, 19 nt, Homo sapiens
  misc_RNA (1)...(19): siRNA sense strand
gugacuacacucugucuuu

SEQ ID NO: 1373279 - RNA, 19 nt, Homo sapiens
  misc_RNA (1)...(19): siRNA sense strand
ugaaguagccaaugauguc

SEQ ID NO: 1373280 - RNA, 19 nt, Homo sapiens
  misc_RNA (1)...(19): siRNA sense strand
gaucuacaaggaguucuuu

SEQ ID NO: 1373281 - RNA, 19 nt, Homo sapiens
  misc_RNA (1)...(19): siRNA sense strand
gcagaaggugcgcauagug

SEQ ID NO: 1373282 - RNA, 19 nt, Homo sapiens
  misc_RNA (1)...(19): siRNA sense strand
aagaaggucuccgauguca

SEQ ID NO: 1373283 - RNA, 19 nt, Homo sapiens
  misc_RNA (1)...(19): siRNA sense strand
gaccuacuaucgggaugaa

SEQ ID NO: 1373284 - RNA, 19 nt, Homo sapiens
  misc_RNA (1)...(19): siRNA sense strand
uagggaaccuggcagaucu

SEQ ID NO: 1373285 - RNA, 19 nt, Homo sapiens
  misc_RNA (1)...(19): siRNA sense strand
ucuccgaugucauauggaa

SEQ ID NO: 1373286 - RNA, 19 nt, Homo sapiens
  misc_RNA (1)...(19): siRNA sense strand
gagaagaugaagggcauga

SEQ ID NO: 1373287 - RNA, 19 nt, Homo sapiens
  misc_RNA (1)...(19): siRNA sense strand
cgacguggugcgccuguuu

SEQ ID NO: 1373288 - RNA, 19 nt, Homo sapiens
  misc_RNA (1)...(19): siRNA sense strand
ucuuugaaguagccaauga

SEQ ID NO: 1373289 - RNA, 19 nt, Homo sapiens
  misc_RNA (1)...(19): siRNA sense strand
uacaaggaguucuuugaag

SEQ ID NO: 1373290 - RNA, 19 nt, Homo sapiens
  misc_RNA (1)...(19): siRNA sense strand
ccugaaaggaucauacaug

SEQ ID NO: 1373291 - RNA, 19 nt, Homo sapiens
  misc_RNA (1)...(19): siRNA sense strand
gaaguagccaaugauguca

SEQ ID NO: 1373292 - RNA, 19 nt, Homo sapiens
  misc_RNA (1)...(19): siRNA sense strand
ccacauccagucccucuuc

SEQ ID NO: 1373293 - RNA, 19 nt, Homo sapiens
  misc_RNA (1)...(19): siRNA sense strand
ggcagaaggugcgcauagu

SEQ ID NO: 1373294 - RNA, 19 nt, Homo sapiens
  misc_RNA (1)...(19): siRNA sense strand
gcagaugaagaagcagaaa

SEQ ID NO: 1373295 - RNA, 19 nt, Homo sapiens
  misc_RNA (1)...(19): siRNA sense strand
cagcuccgguguggccuuu

SEQ ID NO: 1373296 - RNA, 19 nt, Homo sapiens
  misc_RNA (1)...(19): siRNA sense strand
gaccugggacaucuggaaa

SEQ ID NO: 1373297 - RNA, 19 nt, Homo sapiens
  misc_RNA (1)...(19): siRNA sense strand
gagcuggcuguaccugaaa

SEQ ID NO: 1373298 - RNA, 19 nt, Homo sapiens
  misc_RNA (1)...(19): siRNA sense strand
cagacccacucacccucua

SEQ ID NO: 1373299 - RNA, 19 nt, Homo sapiens
  misc_RNA (1)...(19): siRNA sense strand
ggagaucuacaaggaguuc

SEQ ID NO: 1373300 - RNA, 19 nt, Homo sapiens
  misc_RNA (1)...(19): siRNA sense strand
gcugugaccgcaagaugga

SEQ ID NO: 1373301 - RNA, 19 nt, Homo sapiens
  misc_RNA (1)...(19): siRNA sense strand
ggaagccuccugggacugu

SEQ ID NO: 1373302 - RNA, 19 nt, Homo sapiens
  misc_RNA (1)...(19): siRNA sense strand
gggcugggccaccuuucuu

SEQ ID NO: 1373303 - RNA, 19 nt, Homo sapiens
  misc_RNA (1)...(19): siRNA sense strand
ucuaugaccugggacaucu

SEQ ID NO: 1373304 - RNA, 19 nt, Homo sapiens
  misc_RNA (1)...(19): siRNA sense strand
ugaaggaggcagccagcuu

SEQ ID NO: 1373305 - RNA, 19 nt, Homo sapiens
  misc_RNA (1)...(19): siRNA sense strand
ggaagacgaggagaucuac

SEQ ID NO: 1373306 - RNA, 19 nt, Homo sapiens
  misc_RNA (1)...(19): siRNA sense strand
ccucagccaagaccuacua

SEQ ID NO: 1373307 - RNA, 19 nt, Homo sapiens
  misc_RNA (1)...(19): siRNA sense strand
agucgcaagugcagaugaa

SEQ ID NO: 1373308 - RNA, 19 nt, Homo sapiens
  misc_RNA (1)...(19): siRNA sense strand
ucuacaaggaguucuuuga

SEQ ID NO: 1373309 - RNA, 19 nt, Homo sapiens
  misc_RNA (1)...(19): siRNA sense strand
ugcucuggcugcucuauga

SEQ ID NO: 1373310 - RNA, 19 nt, Homo sapiens
  misc_RNA (1)...(19): siRNA sense strand
gcagcgcaaaggccucuga

SEQ ID NO: 1373311 - RNA, 19 nt, Homo sapiens
  misc_RNA (1)...(19): siRNA sense strand
agauggagguggcguucau

SEQ ID NO: 1373312 - RNA, 19 nt, Homo sapiens
  misc_RNA (1)...(19): siRNA sense strand
gaugaagaagcagaaagug

SEQ ID NO: 1373313 - RNA, 19 nt, Homo sapiens
  misc_RNA (1)...(19): siRNA sense strand
cgcaagugcagaugaagaa

SEQ ID NO: 1373314 - RNA, 19 nt, Homo sapiens
  misc_RNA (1)...(19): siRNA sense strand
uccagucccucuucagcuu

SEQ ID NO: 1373315 - RNA, 19 nt, Homo sapiens
  misc_RNA (1)...(19): siRNA sense strand
gcgcugugaccgcaagaug

SEQ ID NO: 1373316 - RNA, 19 nt, Homo sapiens
  misc_RNA (1)...(19): siRNA sense strand
uggccgaccugucuaucau

SEQ ID NO: 1373317 - RNA, 19 nt, Homo sapiens
  misc_RNA (1)...(19): siRNA sense strand
aaggaguucuuugaaguag

SEQ ID NO: 1373318 - RNA, 19 nt, Homo sapiens
  misc_RNA (1)...(19): siRNA sense strand
cagccaagaccuacuaucg

SEQ ID NO: 1373319 - RNA, 19 nt, Homo sapiens
  misc_RNA (1)...(19): siRNA sense strand
gucccucuauccucgagaa

SEQ ID NO: 1373320 - RNA, 19 nt, Homo sapiens
  misc_RNA (1)...(19): siRNA sense strand
gccaucaagcugcaacuca

SEQ ID NO: 1373321 - RNA, 19 nt, Homo sapiens
  misc_RNA (1)...(19): siRNA sense strand
ccgacucgcuggagcuucu

SEQ ID NO: 1373322 - RNA, 19 nt, Homo sapiens
  misc_RNA (1)...(19): siRNA sense strand
gaaggucuccgaugucaua

SEQ ID NO: 1373323 - RNA, 19 nt, Homo sapiens
  misc_RNA (1)...(19): siRNA sense strand
gaucauacaugcgcuguga

SEQ ID NO: 1373324 - RNA, 19 nt, Homo sapiens
  misc_RNA (1)...(19): siRNA sense strand
gccgugagcuggugaagaa

SEQ ID NO: 1373325 - RNA, 19 nt, Homo sapiens
  misc_RNA (1)...(19): siRNA sense strand
ugaagaaggucuccgaugu

SEQ ID NO: 1373326 - RNA, 19 nt, Homo sapiens
  misc_RNA (1)...(19): siRNA sense strand
ggagcuggcuguaccugaa

SEQ ID NO: 1373327 - RNA, 19 nt, Homo sapiens
  misc_RNA (1)...(19): siRNA sense strand
gaucaugccuggguagugu

SEQ ID NO: 1373328 - RNA, 19 nt, Homo sapiens
  misc_RNA (1)...(19): siRNA sense strand
ugggacaucuggaaaggua

SEQ ID NO: 1373329 - RNA, 19 nt, Homo sapiens
  misc_RNA (1)...(19): siRNA sense strand
caaggaguucuuugaagua

SEQ ID NO: 1373330 - RNA, 19 nt, Homo sapiens
  misc_RNA (1)...(19): siRNA sense strand
acaaggaguucuuugaagu

SEQ ID NO: 1373331 - RNA, 19 nt, Homo sapiens
  misc_RNA (1)...(19): siRNA sense strand
gaaccuggcagaucuagag

SEQ ID NO: 1373332 - RNA, 19 nt, Homo sapiens
  misc_RNA (1)...(19): siRNA sense strand
ggucuccgaugucauaugg

SEQ ID NO: 1373333 - RNA, 19 nt, Homo sapiens
  misc_RNA (1)...(19): siRNA sense strand
ccacugucauccaggacua

SEQ ID NO: 1373334 - RNA, 19 nt, Homo sapiens
  misc_RNA (1)...(19): siRNA sense strand
acgaggagaucuacaagga

SEQ ID NO: 1373335 - RNA, 19 nt, Homo sapiens
  misc_RNA (1)...(19): siRNA sense strand
cgucaucccuaccaacguu

SEQ ID NO: 1373336 - RNA, 19 nt, Homo sapiens
  misc_RNA (1)...(19): siRNA sense strand
gaagaaggucuccgauguc

SEQ ID NO: 1373337 - RNA, 19 nt, Homo sapiens
  misc_RNA (1)...(19): siRNA sense strand
gggaagacgaggagaucua

SEQ ID NO: 1373338 - RNA, 19 nt, Homo sapiens
  misc_RNA (1)...(19): siRNA sense strand
gaacacaucuaccccuaca

SEQ ID NO: 1373339 - RNA, 19 nt, Homo sapiens
  misc_RNA (1)...(19): siRNA sense strand
gaagaugaagggcaugaag

SEQ ID NO: 1373340 - RNA, 19 nt, Homo sapiens
  misc_RNA (1)...(19): siRNA sense strand
ugacuacacucugucuuuc

SEQ ID NO: 1373341 - RNA, 19 nt, Homo sapiens
  misc_RNA (1)...(19): siRNA sense strand
cuacaaggaguucuuugaa

SEQ ID NO: 1373342 - RNA, 19 nt, Homo sapiens
  misc_RNA (1)...(19): siRNA sense strand
cagaaggugcgcauaguga

SEQ ID NO: 1373343 - RNA, 19 nt, Homo sapiens
  misc_RNA (1)...(19): siRNA sense strand
gccaucaacccuuccauug

SEQ ID NO: 1373344 - RNA, 19 nt, Homo sapiens
  misc_RNA (1)...(19): siRNA sense strand
gugacuacacucugucuuu

SEQ ID NO: 1373345 - RNA, 19 nt, Homo sapiens
  misc_RNA (1)...(19): siRNA sense strand
ugaaguagccaaugauguc

SEQ ID NO: 1373346 - RNA, 19 nt, Homo sapiens
  misc_RNA (1)...(19): siRNA sense strand
gaucuacaaggaguucuuu

SEQ ID NO: 1373347 - RNA, 19 nt, Homo sapiens
  misc_RNA (1)...(19): siRNA sense strand
gcagaaggugcgcauagug

SEQ ID NO: 1373348 - RNA, 19 nt, Homo sapiens
  misc_RNA (1)...(19): siRNA sense strand
aagaaggucuccgauguca

SEQ ID NO: 1373349 - RNA, 19 nt, Homo sapiens
  misc_RNA (1)...(19): siRNA sense strand
gaccuacuaucgggaugaa

SEQ ID NO: 1373350 - RNA, 19 nt, Homo sapiens
  misc_RNA (1)...(19): siRNA sense strand
uagggaaccuggcagaucu

SEQ ID NO: 1373351 - RNA, 19 nt, Homo sapiens
  misc_RNA (1)...(19): siRNA sense strand
ucuccgaugucauauggaa

SEQ ID NO: 1373352 - RNA, 19 nt, Homo sapiens
  misc_RNA (1)...(19): siRNA sense strand
gagaagaugaagggcauga

SEQ ID NO: 1373353 - RNA, 19 nt, Homo sapiens
  misc_RNA (1)...(19): siRNA sense strand
cgacguggugcgccuguuu

SEQ ID NO: 1373354 - RNA, 19 nt, Homo sapiens
  misc_RNA (1)...(19): siRNA sense strand
ucuuugaaguagccaauga

SEQ ID NO: 1373355 - RNA, 19 nt, Homo sapiens
  misc_RNA (1)...(19): siRNA sense strand
uacaaggaguucuuugaag

SEQ ID NO: 1373356 - RNA, 19 nt, Homo sapiens
  misc_RNA (1)...(19): siRNA sense strand
ccugaaaggaucauacaug

SEQ ID NO: 1373357 - RNA, 19 nt, Homo sapiens
  misc_RNA (1)...(19): siRNA sense strand
gaaguagccaaugauguca

SEQ ID NO: 1373358 - RNA, 19 nt, Homo sapiens
  misc_RNA (1)...(19): siRNA sense strand
ccacauccagucccucuuc

SEQ ID NO: 1373359 - RNA, 19 nt, Homo sapiens
  misc_RNA (1)...(19): siRNA sense strand
ggcagaaggugcgcauagu

SEQ ID NO: 1373360 - RNA, 19 nt, Homo sapiens
  misc_RNA (1)...(19): siRNA sense strand
gcagaugaagaagcagaaa

SEQ ID NO: 1373361 - RNA, 19 nt, Homo sapiens
  misc_RNA (1)...(19): siRNA sense strand
cagcuccgguguggccuuu

SEQ ID NO: 1373362 - RNA, 19 nt, Homo sapiens
  misc_RNA (1)...(19): siRNA sense strand
gaccugggacaucuggaaa

SEQ ID NO: 1373363 - RNA, 19 nt, Homo sapiens
  misc_RNA (1)...(19): siRNA sense strand
gagcuggcuguaccugaaa

SEQ ID NO: 1373364 - RNA, 19 nt, Homo sapiens
  misc_RNA (1)...(19): siRNA sense strand
cagacccacucacccucua

SEQ ID NO: 1373365 - RNA, 19 nt, Homo sapiens
  misc_RNA (1)...(19): siRNA sense strand
ggagaucuacaaggaguuc

SEQ ID NO: 1373366 - RNA, 19 nt, Homo sapiens
  misc_RNA (1)...(19): siRNA sense strand
gcugugaccgcaagaugga

SEQ ID NO: 1373367 - RNA, 19 nt, Homo sapiens
  misc_RNA (1)...(19): siRNA sense strand
ggaagccuccugggacugu

SEQ ID NO: 1373368 - RNA, 19 nt, Homo sapiens
  misc_RNA (1)...(19): siRNA sense strand
gggcugggccaccuuucuu

SEQ ID NO: 1373369 - RNA, 19 nt, Homo sapiens
  misc_RNA (1)...(19): siRNA sense strand
ucuaugaccugggacaucu

SEQ ID NO: 1373370 - RNA, 19 nt, Homo sapiens
  misc_RNA (1)...(19): siRNA sense strand
ugaaggaggcagccagcuu

SEQ ID NO: 1373371 - RNA, 19 nt, Homo sapiens
  misc_RNA (1)...(19): siRNA sense strand
ggaagacgaggagaucuac

SEQ ID NO: 1373372 - RNA, 19 nt, Homo sapiens
  misc_RNA (1)...(19): siRNA sense strand
ccucagccaagaccuacua

SEQ ID NO: 1373373 - RNA, 19 nt, Homo sapiens
  misc_RNA (1)...(19): siRNA sense strand
agucgcaagugcagaugaa

SEQ ID NO: 1373374 - RNA, 19 nt, Homo sapiens
  misc_RNA (1)...(19): siRNA sense strand
ucuacaaggaguucuuuga

SEQ ID NO: 1373375 - RNA, 19 nt, Homo sapiens
  misc_RNA (1)...(19): siRNA sense strand
ugcucuggcugcucuauga

SEQ ID NO: 1373376 - RNA, 19 nt, Homo sapiens
  misc_RNA (1)...(19): siRNA sense strand
gcagcgcaaaggccucuga

SEQ ID NO: 1373377 - RNA, 19 nt, Homo sapiens
  misc_RNA (1)...(19): siRNA sense strand
agauggagguggcguucau

SEQ ID NO: 1373378 - RNA, 19 nt, Homo sapiens
  misc_RNA (1)...(19): siRNA sense strand
gaugaagaagcagaaagug

SEQ ID NO: 1373379 - RNA, 19 nt, Homo sapiens
  misc_RNA (1)...(19): siRNA sense strand
cgcaagugcagaugaagaa

SEQ ID NO: 1373380 - RNA, 19 nt, Homo sapiens
  misc_RNA (1)...(19): siRNA sense strand
uccagucccucuucagcuu

SEQ ID NO: 1373381 - RNA, 19 nt, Homo sapiens
  misc_RNA (1)...(19): siRNA sense strand
gcgcugugaccgcaagaug

SEQ ID NO: 1373382 - RNA, 19 nt, Homo sapiens
  misc_RNA (1)...(19): siRNA sense strand
uggccgaccugucuaucau

SEQ ID NO: 1373383 - RNA, 19 nt, Homo sapiens
  misc_RNA (1)...(19): siRNA sense strand
aaggaguucuuugaaguag

SEQ ID NO: 1373384 - RNA, 19 nt, Homo sapiens
  misc_RNA (1)...(19): siRNA sense strand
cagccaagaccuacuaucg

SEQ ID NO: 1373385 - RNA, 19 nt, Homo sapiens
  misc_RNA (1)...(19): siRNA sense strand
gucccucuauccucgagaa

SEQ ID NO: 1373386 - RNA, 19 nt, Homo sapiens
  misc_RNA (1)...(19): siRNA sense strand
gccaucaagcugcaacuca

SEQ ID NO: 1373387 - RNA, 19 nt, Homo sapiens
  misc_RNA (1)...(19): siRNA sense strand
ccgacucgcuggagcuucu

SEQ ID NO: 1373388 - RNA, 19 nt, Homo sapiens
  misc_RNA (1)...(19): siRNA sense strand
gaaggucuccgaugucaua

SEQ ID NO: 1373389 - RNA, 19 nt, Homo sapiens
  misc_RNA (1)...(19): siRNA sense strand
gaucauacaugcgcuguga

SEQ ID NO: 1373390 - RNA, 19 nt, Homo sapiens
  misc_RNA (1)...(19): siRNA sense strand
gccgugagcuggugaagaa

SEQ ID NO: 1373391 - RNA, 19 nt, Homo sapiens
  misc_RNA (1)...(19): siRNA sense strand
ugaagaaggucuccgaugu

SEQ ID NO: 1373392 - RNA, 19 nt, Homo sapiens
  misc_RNA (1)...(19): siRNA sense strand
ggagcuggcuguaccugaa

SEQ ID NO: 1373393 - RNA, 19 nt, Homo sapiens
  misc_RNA (1)...(19): siRNA sense strand
gaucaugccuggguagugu

SEQ ID NO: 1373394 - RNA, 19 nt, Homo sapiens
  misc_RNA (1)...(19): siRNA sense strand
ugggacaucuggaaaggua

SEQ ID NO: 1373395 - RNA, 19 nt, Homo sapiens
  misc_RNA (1)...(19): siRNA sense strand
caaggaguucuuugaagua

SEQ ID NO: 1373396 - RNA, 19 nt, Homo sapiens
  misc_RNA (1)...(19): siRNA sense strand
acaaggaguucuuugaagu

SEQ ID NO: 1373397 - RNA, 19 nt, Homo sapiens
  misc_RNA (1)...(19): siRNA sense strand
gaaccuggcagaucuagag

SEQ ID NO: 1373398 - RNA, 19 nt, Homo sapiens
  misc_RNA (1)...(19): siRNA sense strand
ggucuccgaugucauaugg

SEQ ID NO: 1373399 - RNA, 19 nt, Homo sapiens
  misc_RNA (1)...(19): siRNA sense strand
ccacugucauccaggacua

SEQ ID NO: 1373400 - RNA, 19 nt, Homo sapiens
  misc_RNA (1)...(19): siRNA sense strand
acgaggagaucuacaagga

SEQ ID NO: 1373401 - RNA, 19 nt, Homo sapiens
  misc_RNA (1)...(19): siRNA sense strand
cgucaucccuaccaacguu

SEQ ID NO: 1373402 - RNA, 19 nt, Homo sapiens
  misc_RNA (1)...(19): siRNA sense strand
gaagaaggucuccgauguc

SEQ ID NO: 1373403 - RNA, 19 nt, Homo sapiens
  misc_RNA (1)...(19): siRNA sense strand
gggaagacgaggagaucua

SEQ ID NO: 1373404 - RNA, 19 nt, Homo sapiens
  misc_RNA (1)...(19): siRNA sense strand
gaacacaucuaccccuaca

SEQ ID NO: 1373405 - RNA, 19 nt, Homo sapiens
  misc_RNA (1)...(19): siRNA sense strand
gaagaugaagggcaugaag

SEQ ID NO: 1373406 - RNA, 19 nt, Homo sapiens
  misc_RNA (1)...(19): siRNA sense strand
ugacuacacucugucuuuc

SEQ ID NO: 1373407 - RNA, 19 nt, Homo sapiens
  misc_RNA (1)...(19): siRNA sense strand
cuacaaggaguucuuugaa

SEQ ID NO: 1373408 - RNA, 19 nt, Homo sapiens
  misc_RNA (1)...(19): siRNA sense strand
cagaaggugcgcauaguga

SEQ ID NO: 1373409 - RNA, 19 nt, Homo sapiens
  misc_RNA (1)...(19): siRNA sense strand
gccaucaacccuuccauug

SEQ ID NO: 1373410 - RNA, 19 nt, Homo sapiens
  misc_RNA (1)...(19): siRNA sense strand
gugacuacacucugucuuu

SEQ ID NO: 1373411 - RNA, 19 nt, Homo sapiens
  misc_RNA (1)...(19): siRNA sense strand
ugaaguagccaaugauguc

SEQ ID NO: 1373412 - RNA, 19 nt, Homo sapiens
  misc_RNA (1)...(19): siRNA sense strand
gaucuacaaggaguucuuu

SEQ ID NO: 1373413 - RNA, 19 nt, Homo sapiens
  misc_RNA (1)...(19): siRNA sense strand
gcagaaggugcgcauagug

SEQ ID NO: 1373414 - RNA, 19 nt, Homo sapiens
  misc_RNA (1)...(19): siRNA sense strand
aagaaggucuccgauguca

SEQ ID NO: 1373415 - RNA, 19 nt, Homo sapiens
  misc_RNA (1)...(19): siRNA sense strand
gaccuacuaucgggaugaa

SEQ ID NO: 1373416 - RNA, 19 nt, Homo sapiens
  misc_RNA (1)...(19): siRNA sense strand
uagggaaccuggcagaucu

SEQ ID NO: 1373417 - RNA, 19 nt, Homo sapiens
  misc_RNA (1)...(19): siRNA sense strand
ucuccgaugucauauggaa

SEQ ID NO: 1373418 - RNA, 19 nt, Homo sapiens
  misc_RNA (1)...(19): siRNA sense strand
gagaagaugaagggcauga

SEQ ID NO: 1373419 - RNA, 19 nt, Homo sapiens
  misc_RNA (1)...(19): siRNA sense strand
cgacguggugcgccuguuu

SEQ ID NO: 1373420 - RNA, 19 nt, Homo sapiens
  misc_RNA (1)...(19): siRNA sense strand
ucuuugaaguagccaauga

SEQ ID NO: 1373421 - RNA, 19 nt, Homo sapiens
  misc_RNA (1)...(19): siRNA sense strand
uacaaggaguucuuugaag

SEQ ID NO: 1373422 - RNA, 19 nt, Homo sapiens
  misc_RNA (1)...(19): siRNA sense strand
ccugaaaggaucauacaug

SEQ ID NO: 1373423 - RNA, 19 nt, Homo sapiens
  misc_RNA (1)...(19): siRNA sense strand
gaaguagccaaugauguca

SEQ ID NO: 1373424 - RNA, 19 nt, Homo sapiens
  misc_RNA (1)...(19): siRNA sense strand
ccacauccagucccucuuc

SEQ ID NO: 1373425 - RNA, 19 nt, Homo sapiens
  misc_RNA (1)...(19): siRNA sense strand
ggcagaaggugcgcauagu

SEQ ID NO: 1373426 - RNA, 19 nt, Homo sapiens
  misc_RNA (1)...(19): siRNA sense strand
gcagaugaagaagcagaaa

SEQ ID NO: 1373427 - RNA, 19 nt, Homo sapiens
  misc_RNA (1)...(19): siRNA sense strand
cagcuccgguguggccuuu

SEQ ID NO: 1373428 - RNA, 19 nt, Homo sapiens
  misc_RNA (1)...(19): siRNA sense strand
gaccugggacaucuggaaa

SEQ ID NO: 1373429 - RNA, 19 nt, Homo sapiens
  misc_RNA (1)...(19): siRNA sense strand
gagcuggcuguaccugaaa

SEQ ID NO: 1373430 - RNA, 19 nt, Homo sapiens
  misc_RNA (1)...(19): siRNA sense strand
cagacccacucacccucua

SEQ ID NO: 1373431 - RNA, 19 nt, Homo sapiens
  misc_RNA (1)...(19): siRNA sense strand
ggagaucuacaaggaguuc

SEQ ID NO: 1373432 - RNA, 19 nt, Homo sapiens
  misc_RNA (1)...(19): siRNA sense strand
gcugugaccgcaagaugga

SEQ ID NO: 1373433 - RNA, 19 nt, Homo sapiens
  misc_RNA (1)...(19): siRNA sense strand
ggaagccuccugggacugu

SEQ ID NO: 1373434 - RNA, 19 nt, Homo sapiens
  misc_RNA (1)...(19): siRNA sense strand
gggcugggccaccuuucuu

SEQ ID NO: 1373435 - RNA, 19 nt, Homo sapiens
  misc_RNA (1)...(19): siRNA sense strand
ucuaugaccugggacaucu

SEQ ID NO: 1373436 - RNA, 19 nt, Homo sapiens
  misc_RNA (1)...(19): siRNA sense strand
ugaaggaggcagccagcuu

SEQ ID NO: 1373437 - RNA, 19 nt, Homo sapiens
  misc_RNA (1)...(19): siRNA sense strand
ggaagacgaggagaucuac

SEQ ID NO: 1373438 - RNA, 19 nt, Homo sapiens
  misc_RNA (1)...(19): siRNA sense strand
ccucagccaagaccuacua

SEQ ID NO: 1373439 - RNA, 19 nt, Homo sapiens
  misc_RNA (1)...(19): siRNA sense strand
agucgcaagugcagaugaa

SEQ ID NO: 1373440 - RNA, 19 nt, Homo sapiens
  misc_RNA (1)...(19): siRNA sense strand
ucuacaaggaguucuuuga

SEQ ID NO: 1373441 - RNA, 19 nt, Homo sapiens
  misc_RNA (1)...(19): siRNA sense strand
ugcucuggcugcucuauga

SEQ ID NO: 1373442 - RNA, 19 nt, Homo sapiens
  misc_RNA (1)...(19): siRNA sense strand
gcagcgcaaaggccucuga

SEQ ID NO: 1373443 - RNA, 19 nt, Homo sapiens
  misc_RNA (1)...(19): siRNA sense strand
agauggagguggcguucau

SEQ ID NO: 1373444 - RNA, 19 nt, Homo sapiens
  misc_RNA (1)...(19): siRNA sense strand
gaugaagaagcagaaagug

SEQ ID NO: 1373445 - RNA, 19 nt, Homo sapiens
  misc_RNA (1)...(19): siRNA sense strand
cgcaagugcagaugaagaa

SEQ ID NO: 1373446 - RNA, 19 nt, Homo sapiens
  misc_RNA (1)...(19): siRNA sense strand
uccagucccucuucagcuu

SEQ ID NO: 1373447 - RNA, 19 nt, Homo sapiens
  misc_RNA (1)...(19): siRNA sense strand
gcgcugugaccgcaagaug

SEQ ID NO: 1373448 - RNA, 19 nt, Homo sapiens
  misc_RNA (1)...(19): siRNA sense strand
uggccgaccugucuaucau

SEQ ID NO: 1373449 - RNA, 19 nt, Homo sapiens
  misc_RNA (1)...(19): siRNA sense strand
aaggaguucuuugaaguag

SEQ ID NO: 1373450 - RNA, 19 nt, Homo sapiens
  misc_RNA (1)...(19): siRNA sense strand
cagccaagaccuacuaucg

SEQ ID NO: 1373451 - RNA, 19 nt, Homo sapiens
  misc_RNA (1)...(19): siRNA sense strand
gucccucuauccucgagaa

SEQ ID NO: 1373452 - RNA, 19 nt, Homo sapiens
  misc_RNA (1)...(19): siRNA sense strand
gccaucaagcugcaacuca

SEQ ID NO: 1373453 - RNA, 19 nt, Homo sapiens
  misc_RNA (1)...(19): siRNA sense strand
ccgacucgcuggagcuucu

SEQ ID NO: 1373454 - RNA, 19 nt, Homo sapiens
  misc_RNA (1)...(19): siRNA sense strand
gaaggucuccgaugucaua

SEQ ID NO: 1373455 - RNA, 19 nt, Homo sapiens
  misc_RNA (1)...(19): siRNA sense strand
gaucauacaugcgcuguga

SEQ ID NO: 1373456 - RNA, 19 nt, Homo sapiens
  misc_RNA (1)...(19): siRNA sense strand
gccgugagcuggugaagaa

SEQ ID NO: 1373457 - RNA, 19 nt, Homo sapiens
  misc_RNA (1)...(19): siRNA sense strand
ugaagaaggucuccgaugu

SEQ ID NO: 1373458 - RNA, 19 nt, Homo sapiens
  misc_RNA (1)...(19): siRNA sense strand
ggagcuggcuguaccugaa

SEQ ID NO: 1373459 - RNA, 19 nt, Homo sapiens
  misc_RNA (1)...(19): siRNA sense strand
gaucaugccuggguagugu

SEQ ID NO: 1373460 - RNA, 19 nt, Homo sapiens
  misc_RNA (1)...(19): siRNA sense strand
ugggacaucuggaaaggua

SEQ ID NO: 1373461 - RNA, 19 nt, Homo sapiens
  misc_RNA (1)...(19): siRNA sense strand
caaggaguucuuugaagua

SEQ ID NO: 1373462 - RNA, 19 nt, Homo sapiens
  misc_RNA (1)...(19): siRNA sense strand
acaaggaguucuuugaagu

SEQ ID NO: 1373463 - RNA, 19 nt, Homo sapiens
  misc_RNA (1)...(19): siRNA sense strand
gaaccuggcagaucuagag

SEQ ID NO: 1373464 - RNA, 19 nt, Homo sapiens
  misc_RNA (1)...(19): siRNA sense strand
ggucuccgaugucauaugg

SEQ ID NO: 1373465 - RNA, 19 nt, Homo sapiens
  misc_RNA (1)...(19): siRNA sense strand
ccacugucauccaggacua

SEQ ID NO: 1373466 - RNA, 19 nt, Homo sapiens
  misc_RNA (1)...(19): siRNA sense strand
acgaggagaucuacaagga

SEQ ID NO: 1373467 - RNA, 19 nt, Homo sapiens
  misc_RNA (1)...(19): siRNA sense strand
cgucaucccuaccaacguu

SEQ ID NO: 1373468 - RNA, 19 nt, Homo sapiens
  misc_RNA (1)...(19): siRNA sense strand
gaagaaggucuccgauguc

SEQ ID NO: 1373469 - RNA, 19 nt, Homo sapiens
  misc_RNA (1)...(19): siRNA sense strand
gggaagacgaggagaucua

SEQ ID NO: 1373470 - RNA, 19 nt, Homo sapiens
  misc_RNA (1)...(19): siRNA sense strand
gaacacaucuaccccuaca

SEQ ID NO: 1373471 - RNA, 19 nt, Homo sapiens
  misc_RNA (1)...(19): siRNA sense strand
gaagaugaagggcaugaag

SEQ ID NO: 1373472 - RNA, 19 nt, Homo sapiens
  misc_RNA (1)...(19): siRNA sense strand
ugacuacacucugucuuuc

SEQ ID NO: 1373473 - RNA, 19 nt, Homo sapiens
  misc_RNA (1)...(19): siRNA sense strand
cuacaaggaguucuuugaa

SEQ ID NO: 1373474 - RNA, 19 nt, Homo sapiens
  misc_RNA (1)...(19): siRNA sense strand
cagaaggugcgcauaguga

SEQ ID NO: 1373475 - RNA, 19 nt, Homo sapiens
  misc_RNA (1)...(19): siRNA sense strand
gccaucaacccuuccauug

SEQ ID NO: 1373476 - RNA, 19 nt, Homo sapiens
  misc_RNA (1)...(19): siRNA sense strand
gugacuacacucugucuuu

SEQ ID NO: 1373477 - RNA, 19 nt, Homo sapiens
  misc_RNA (1)...(19): siRNA sense strand
ugaaguagccaaugauguc

SEQ ID NO: 1373478 - RNA, 19 nt, Homo sapiens
  misc_RNA (1)...(19): siRNA sense strand
gaucuacaaggaguucuuu

SEQ ID NO: 1373479 - RNA, 19 nt, Homo sapiens
  misc_RNA (1)...(19): siRNA sense strand
gcagaaggugcgcauagug

SEQ ID NO: 1373480 - RNA, 19 nt, Homo sapiens
  misc_RNA (1)...(19): siRNA sense strand
aagaaggucuccgauguca

SEQ ID NO: 1373481 - RNA, 19 nt, Homo sapiens
  misc_RNA (1)...(19): siRNA sense strand
gaccuacuaucgggaugaa

SEQ ID NO: 1373482 - RNA, 19 nt, Homo sapiens
  misc_RNA (1)...(19): siRNA sense strand
uagggaaccuggcagaucu

SEQ ID NO: 1373483 - RNA, 19 nt, Homo sapiens
  misc_RNA (1)...(19): siRNA sense strand
ucuccgaugucauauggaa

SEQ ID NO: 1373484 - RNA, 19 nt, Homo sapiens
  misc_RNA (1)...(19): siRNA sense strand
gagaagaugaagggcauga

SEQ ID NO: 1373485 - RNA, 19 nt, Homo sapiens
  misc_RNA (1)...(19): siRNA sense strand
cgacguggugcgccuguuu

SEQ ID NO: 1373486 - RNA, 19 nt, Homo sapiens
  misc_RNA (1)...(19): siRNA sense strand
ucuuugaaguagccaauga

SEQ ID NO: 1373487 - RNA, 19 nt, Homo sapiens
  misc_RNA (1)...(19): siRNA sense strand
uacaaggaguucuuugaag

SEQ ID NO: 1373488 - RNA, 19 nt, Homo sapiens
  misc_RNA (1)...(19): siRNA sense strand
ccugaaaggaucauacaug

SEQ ID NO: 1373489 - RNA, 19 nt, Homo sapiens
  misc_RNA (1)...(19): siRNA sense strand
gaaguagccaaugauguca

SEQ ID NO: 1373490 - RNA, 19 nt, Homo sapiens
  misc_RNA (1)...(19): siRNA sense strand
ccacauccagucccucuuc

SEQ ID NO: 1373491 - RNA, 19 nt, Homo sapiens
  misc_RNA (1)...(19): siRNA sense strand
ggcagaaggugcgcauagu

SEQ ID NO: 1373492 - RNA, 19 nt, Homo sapiens
  misc_RNA (1)...(19): siRNA sense strand
gcagaugaagaagcagaaa

SEQ ID NO: 1373493 - RNA, 19 nt, Homo sapiens
  misc_RNA (1)...(19): siRNA sense strand
cagcuccgguguggccuuu

SEQ ID NO: 1373494 - RNA, 19 nt, Homo sapiens
  misc_RNA (1)...(19): siRNA sense strand
gaccugggacaucuggaaa

SEQ ID NO: 1373495 - RNA, 19 nt, Homo sapiens
  misc_RNA (1)...(19): siRNA sense strand
gagcuggcuguaccugaaa

SEQ ID NO: 1373496 - RNA, 19 nt, Homo sapiens
  misc_RNA (1)...(19): siRNA sense strand
cagacccacucacccucua

SEQ ID NO: 1373497 - RNA, 19 nt, Homo sapiens
  misc_RNA (1)...(19): siRNA sense strand
ggagaucuacaaggaguuc

SEQ ID NO: 1373498 - RNA, 19 nt, Homo sapiens
  misc_RNA (1)...(19): siRNA sense strand
gcugugaccgcaagaugga

SEQ ID NO: 1373499 - RNA, 19 nt, Homo sapiens
  misc_RNA (1)...(19): siRNA sense strand
ggaagccuccugggacugu

SEQ ID NO: 1373500 - RNA, 19 nt, Homo sapiens
  misc_RNA (1)...(19): siRNA sense strand
gggcugggccaccuuucuu

SEQ ID NO: 1373501 - RNA, 19 nt, Homo sapiens
  misc_RNA (1)...(19): siRNA sense strand
ucuaugaccugggacaucu

SEQ ID NO: 1373502 - RNA, 19 nt, Homo sapiens
  misc_RNA (1)...(19): siRNA sense strand
ugaaggaggcagccagcuu

SEQ ID NO: 1373503 - RNA, 19 nt, Homo sapiens
  misc_RNA (1)...(19): siRNA sense strand
ggaagacgaggagaucuac

SEQ ID NO: 1373504 - RNA, 19 nt, Homo sapiens
  misc_RNA (1)...(19): siRNA sense strand
ccucagccaagaccuacua

SEQ ID NO: 1373505 - RNA, 19 nt, Homo sapiens
  misc_RNA (1)...(19): siRNA sense strand
agucgcaagugcagaugaa

SEQ ID NO: 1373506 - RNA, 19 nt, Homo sapiens
  misc_RNA (1)...(19): siRNA sense strand
ucuacaaggaguucuuuga

SEQ ID NO: 1373507 - RNA, 19 nt, Homo sapiens
  misc_RNA (1)...(19): siRNA sense strand
ugcucuggcugcucuauga

SEQ ID NO: 1373508 - RNA, 19 nt, Homo sapiens
  misc_RNA (1)...(19): siRNA sense strand
gcagcgcaaaggccucuga

SEQ ID NO: 1373509 - RNA, 19 nt, Homo sapiens
  misc_RNA (1)...(19): siRNA sense strand
agauggagguggcguucau

SEQ ID NO: 1373510 - RNA, 19 nt, Homo sapiens
  misc_RNA (1)...(19): siRNA sense strand
gaugaagaagcagaaagug

SEQ ID NO: 1373511 - RNA, 19 nt, Homo sapiens
  misc_RNA (1)...(19): siRNA sense strand
cgcaagugcagaugaagaa

SEQ ID NO: 1373512 - RNA, 19 nt, Homo sapiens
  misc_RNA (1)...(19): siRNA sense strand
uccagucccucuucagcuu

SEQ ID NO: 1373513 - RNA, 19 nt, Homo sapiens
  misc_RNA (1)...(19): siRNA sense strand
gcgcugugaccgcaagaug

SEQ ID NO: 1373514 - RNA, 19 nt, Homo sapiens
  misc_RNA (1)...(19): siRNA sense strand
uggccgaccugucuaucau

SEQ ID NO: 1373515 - RNA, 19 nt, Homo sapiens
  misc_RNA (1)...(19): siRNA sense strand
aaggaguucuuugaaguag

SEQ ID NO: 1373516 - RNA, 19 nt, Homo sapiens
  misc_RNA (1)...(19): siRNA sense strand
cagccaagaccuacuaucg

SEQ ID NO: 1373517 - RNA, 19 nt, Homo sapiens
  misc_RNA (1)...(19): siRNA sense strand
gucccucuauccucgagaa

SEQ ID NO: 1373518 - RNA, 19 nt, Homo sapiens
  misc_RNA (1)...(19): siRNA sense strand
gccaucaagcugcaacuca

SEQ ID NO: 1373519 - RNA, 19 nt, Homo sapiens
  misc_RNA (1)...(19): siRNA sense strand
ccgacucgcuggagcuucu

SEQ ID NO: 1373520 - RNA, 19 nt, Homo sapiens
  misc_RNA (1)...(19): siRNA sense strand
ccaacuggcucacggcaaa

SEQ ID NO: 1373521 - RNA, 19 nt, Homo sapiens
  misc_RNA (1)...(19): siRNA sense strand
gcaaagaguggucggaaga

SEQ ID NO: 1373522 - RNA, 19 nt, Homo sapiens
  misc_RNA (1)...(19): siRNA sense strand
ucacagccaacuuuaauuu

SEQ ID NO: 1373523 - RNA, 19 nt, Homo sapiens
  misc_RNA (1)...(19): siRNA sense strand
gaguuucuguucaauaugu

SEQ ID NO: 1373524 - RNA, 19 nt, Homo sapiens
  misc_RNA (1)...(19): siRNA sense strand
gaaaaugaaucgagaaaac

SEQ ID NO: 1373525 - RNA, 19 nt, Homo sapiens
  misc_RNA (1)...(19): siRNA sense strand
ggaugaaacugaagaaaau

SEQ ID NO: 1373526 - RNA, 19 nt, Homo sapiens
  misc_RNA (1)...(19): siRNA sense strand
gagcucacagccaacuuua

SEQ ID NO: 1373527 - RNA, 19 nt, Homo sapiens
  misc_RNA (1)...(19): siRNA sense strand
gaaggaguuucuguucaau

SEQ ID NO: 1373528 - RNA, 19 nt, Homo sapiens
  misc_RNA (1)...(19): siRNA sense strand
gcucacagccaacuuuaau

SEQ ID NO: 1373529 - RNA, 19 nt, Homo sapiens
  misc_RNA (1)...(19): siRNA sense strand
ggagcucacagccaacuuu

SEQ ID NO: 1373530 - RNA, 19 nt, Homo sapiens
  misc_RNA (1)...(19): siRNA sense strand
cacuggagcuggagaagga

SEQ ID NO: 1373531 - RNA, 19 nt, Homo sapiens
  misc_RNA (1)...(19): siRNA sense strand
aggaguuucuguucaauau

SEQ ID NO: 1373532 - RNA, 19 nt, Homo sapiens
  misc_RNA (1)...(19): siRNA sense strand
uuucagaaccgcaggauga

SEQ ID NO: 1373533 - RNA, 19 nt, Homo sapiens
  misc_RNA (1)...(19): siRNA sense strand
gcaggaugaaacugaagaa

SEQ ID NO: 1373534 - RNA, 19 nt, Homo sapiens
  misc_RNA (1)...(19): siRNA sense strand
caaagaguggucggaagaa

SEQ ID NO: 1373535 - RNA, 19 nt, Homo sapiens
  misc_RNA (1)...(19): siRNA sense strand
aaagaguggucggaagaag

SEQ ID NO: 1373536 - RNA, 19 nt, Homo sapiens
  misc_RNA (1)...(19): siRNA sense strand
acacgaagcaccagacacu

SEQ ID NO: 1373537 - RNA, 19 nt, Homo sapiens
  misc_RNA (1)...(19): siRNA sense strand
gaagaaaaugaaucgagaa

SEQ ID NO: 1373538 - RNA, 19 nt, Homo sapiens
  misc_RNA (1)...(19): siRNA sense strand
ggagcuggagaaggaguuu

SEQ ID NO: 1373539 - RNA, 19 nt, Homo sapiens
  misc_RNA (1)...(19): siRNA sense strand
ggaguuucuguucaauaug

SEQ ID NO: 1373540 - RNA, 19 nt, Homo sapiens
  misc_RNA (1)...(19): siRNA sense strand
ccaacuggcucacggcaaa

SEQ ID NO: 1373541 - RNA, 19 nt, Homo sapiens
  misc_RNA (1)...(19): siRNA sense strand
gcaaagaguggucggaaga

SEQ ID NO: 1373542 - RNA, 19 nt, Homo sapiens
  misc_RNA (1)...(19): siRNA sense strand
ucacagccaacuuuaauuu

SEQ ID NO: 1373543 - RNA, 19 nt, Homo sapiens
  misc_RNA (1)...(19): siRNA sense strand
gaguuucuguucaauaugu

SEQ ID NO: 1373544 - RNA, 19 nt, Homo sapiens
  misc_RNA (1)...(19): siRNA sense strand
gaaaaugaaucgagaaaac

SEQ ID NO: 1373545 - RNA, 19 nt, Homo sapiens
  misc_RNA (1)...(19): siRNA sense strand
ggaugaaacugaagaaaau

SEQ ID NO: 1373546 - RNA, 19 nt, Homo sapiens
  misc_RNA (1)...(19): siRNA sense strand
gagcucacagccaacuuua

SEQ ID NO: 1373547 - RNA, 19 nt, Homo sapiens
  misc_RNA (1)...(19): siRNA sense strand
gaaggaguuucuguucaau

SEQ ID NO: 1373548 - RNA, 19 nt, Homo sapiens
  misc_RNA (1)...(19): siRNA sense strand
gcucacagccaacuuuaau

SEQ ID NO: 1373549 - RNA, 19 nt, Homo sapiens
  misc_RNA (1)...(19): siRNA sense strand
ggagcucacagccaacuuu

SEQ ID NO: 1373550 - RNA, 19 nt, Homo sapiens
  misc_RNA (1)...(19): siRNA sense strand
cacuggagcuggagaagga

SEQ ID NO: 1373551 - RNA, 19 nt, Homo sapiens
  misc_RNA (1)...(19): siRNA sense strand
aggaguuucuguucaauau

SEQ ID NO: 1373552 - RNA, 19 nt, Homo sapiens
  misc_RNA (1)...(19): siRNA sense strand
uuucagaaccgcaggauga

SEQ ID NO: 1373553 - RNA, 19 nt, Homo sapiens
  misc_RNA (1)...(19): siRNA sense strand
gcaggaugaaacugaagaa

SEQ ID NO: 1373554 - RNA, 19 nt, Homo sapiens
  misc_RNA (1)...(19): siRNA sense strand
caaagaguggucggaagaa

SEQ ID NO: 1373555 - RNA, 19 nt, Homo sapiens
  misc_RNA (1)...(19): siRNA sense strand
aaagaguggucggaagaag

SEQ ID NO: 1373556 - RNA, 19 nt, Homo sapiens
  misc_RNA (1)...(19): siRNA sense strand
acacgaagcaccagacacu

SEQ ID NO: 1373557 - RNA, 19 nt, Homo sapiens
  misc_RNA (1)...(19): siRNA sense strand
gaagaaaaugaaucgagaa

SEQ ID NO: 1373558 - RNA, 19 nt, Homo sapiens
  misc_RNA (1)...(19): siRNA sense strand
ggagcuggagaaggaguuu

SEQ ID NO: 1373559 - RNA, 19 nt, Homo sapiens
  misc_RNA (1)...(19): siRNA sense strand
ggaguuucuguucaauaug

SEQ ID NO: 1373560 - RNA, 19 nt, Homo sapiens
  misc_RNA (1)...(19): siRNA sense strand
ccaacuggcucacggcaaa

SEQ ID NO: 1373561 - RNA, 19 nt, Homo sapiens
  misc_RNA (1)...(19): siRNA sense strand
gcaaagaguggucggaaga

SEQ ID NO: 1373562 - RNA, 19 nt, Homo sapiens
  misc_RNA (1)...(19): siRNA sense strand
ucacagccaacuuuaauuu

SEQ ID NO: 1373563 - RNA, 19 nt, Homo sapiens
  misc_RNA (1)...(19): siRNA sense strand
gaguuucuguucaauaugu

SEQ ID NO: 1373564 - RNA, 19 nt, Homo sapiens
  misc_RNA (1)...(19): siRNA sense strand
gaaaaugaaucgagaaaac

SEQ ID NO: 1373565 - RNA, 19 nt, Homo sapiens
  misc_RNA (1)...(19): siRNA sense strand
ggaugaaacugaagaaaau

SEQ ID NO: 1373566 - RNA, 19 nt, Homo sapiens
  misc_RNA (1)...(19): siRNA sense strand
gagcucacagccaacuuua

SEQ ID NO: 1373567 - RNA, 19 nt, Homo sapiens
  misc_RNA (1)...(19): siRNA sense strand
gaaggaguuucuguucaau

SEQ ID NO: 1373568 - RNA, 19 nt, Homo sapiens
  misc_RNA (1)...(19): siRNA sense strand
gcucacagccaacuuuaau

SEQ ID NO: 1373569 - RNA, 19 nt, Homo sapiens
  misc_RNA (1)...(19): siRNA sense strand
ggagcucacagccaacuuu

SEQ ID NO: 1373570 - RNA, 19 nt, Homo sapiens
  misc_RNA (1)...(19): siRNA sense strand
cacuggagcuggagaagga

SEQ ID NO: 1373571 - RNA, 19 nt, Homo sapiens
  misc_RNA (1)...(19): siRNA sense strand
aggaguuucuguucaauau

SEQ ID NO: 1373572 - RNA, 19 nt, Homo sapiens
  misc_RNA (1)...(19): siRNA sense strand
uuucagaaccgcaggauga

SEQ ID NO: 1373573 - RNA, 19 nt, Homo sapiens
  misc_RNA (1)...(19): siRNA sense strand
gcaggaugaaacugaagaa

SEQ ID NO: 1373574 - RNA, 19 nt, Homo sapiens
  misc_RNA (1)...(19): siRNA sense strand
caaagaguggucggaagaa

SEQ ID NO: 1373575 - RNA, 19 nt, Homo sapiens
  misc_RNA (1)...(19): siRNA sense strand
aaagaguggucggaagaag

SEQ ID NO: 1373576 - RNA, 19 nt, Homo sapiens
  misc_RNA (1)...(19): siRNA sense strand
acacgaagcaccagacacu

SEQ ID NO: 1373577 - RNA, 19 nt, Homo sapiens
  misc_RNA (1)...(19): siRNA sense strand
gaagaaaaugaaucgagaa

SEQ ID NO: 1373578 - RNA, 19 nt, Homo sapiens
  misc_RNA (1)...(19): siRNA sense strand
ggagcuggagaaggaguuu

SEQ ID NO: 1373579 - RNA, 19 nt, Homo sapiens
  misc_RNA (1)...(19): siRNA sense strand
ggaguuucuguucaauaug

SEQ ID NO: 1373580 - RNA, 19 nt, Homo sapiens
  misc_RNA (1)...(19): siRNA sense strand
ccaacuggcucacggcaaa

SEQ ID NO: 1373581 - RNA, 19 nt, Homo sapiens
  misc_RNA (1)...(19): siRNA sense strand
gcaaagaguggucggaaga

SEQ ID NO: 1373582 - RNA, 19 nt, Homo sapiens
  misc_RNA (1)...(19): siRNA sense strand
ucacagccaacuuuaauuu

SEQ ID NO: 1373583 - RNA, 19 nt, Homo sapiens
  misc_RNA (1)...(19): siRNA sense strand
gaguuucuguucaauaugu

SEQ ID NO: 1373584 - RNA, 19 nt, Homo sapiens
  misc_RNA (1)...(19): siRNA sense strand
gaaaaugaaucgagaaaac

SEQ ID NO: 1373585 - RNA, 19 nt, Homo sapiens
  misc_RNA (1)...(19): siRNA sense strand
ggaugaaacugaagaaaau

SEQ ID NO: 1373586 - RNA, 19 nt, Homo sapiens
  misc_RNA (1)...(19): siRNA sense strand
gagcucacagccaacuuua

SEQ ID NO: 1373587 - RNA, 19 nt, Homo sapiens
  misc_RNA (1)...(19): siRNA sense strand
gaaggaguuucuguucaau

SEQ ID NO: 1373588 - RNA, 19 nt, Homo sapiens
  misc_RNA (1)...(19): siRNA sense strand
gcucacagccaacuuuaau

SEQ ID NO: 1373589 - RNA, 19 nt, Homo sapiens
  misc_RNA (1)...(19): siRNA sense strand
ggagcucacagccaacuuu

SEQ ID NO: 1373590 - RNA, 19 nt, Homo sapiens
  misc_RNA (1)...(19): siRNA sense strand
cacuggagcuggagaagga

SEQ ID NO: 1373591 - RNA, 19 nt, Homo sapiens
  misc_RNA (1)...(19): siRNA sense strand
aggaguuucuguucaauau

SEQ ID NO: 1373592 - RNA, 19 nt, Homo sapiens
  misc_RNA (1)...(19): siRNA sense strand
uuucagaaccgcaggauga

SEQ ID NO: 1373593 - RNA, 19 nt, Homo sapiens
  misc_RNA (1)...(19): siRNA sense strand
gcaggaugaaacugaagaa

SEQ ID NO: 1373594 - RNA, 19 nt, Homo sapiens
  misc_RNA (1)...(19): siRNA sense strand
caaagaguggucggaagaa

SEQ ID NO: 1373595 - RNA, 19 nt, Homo sapiens
  misc_RNA (1)...(19): siRNA sense strand
aaagaguggucggaagaag

SEQ ID NO: 1373596 - RNA, 19 nt, Homo sapiens
  misc_RNA (1)...(19): siRNA sense strand
acacgaagcaccagacacu

SEQ ID NO: 1373597 - RNA, 19 nt, Homo sapiens
  misc_RNA (1)...(19): siRNA sense strand
gaagaaaaugaaucgagaa

SEQ ID NO: 1373598 - RNA, 19 nt, Homo sapiens
  misc_RNA (1)...(19): siRNA sense strand
ggagcuggagaaggaguuu

SEQ ID NO: 1373599 - RNA, 19 nt, Homo sapiens
  misc_RNA (1)...(19): siRNA sense strand
ggaguuucuguucaauaug

SEQ ID NO: 1373600 - RNA, 19 nt, Homo sapiens
  misc_RNA (1)...(19): siRNA sense strand
gaagucagaugaugaauua

SEQ ID NO: 1373601 - RNA, 19 nt, Homo sapiens
  misc_RNA (1)...(19): siRNA sense strand
ggaaacagauggcaaauau

SEQ ID NO: 1373602 - RNA, 19 nt, Homo sapiens
  misc_RNA (1)...(19): siRNA sense strand
caaggaagcuguugaugaa

SEQ ID NO: 1373603 - RNA, 19 nt, Homo sapiens
  misc_RNA (1)...(19): siRNA sense strand
caaagaagaugcuaaagag

SEQ ID NO: 1373604 - RNA, 19 nt, Homo sapiens
  misc_RNA (1)...(19): siRNA sense strand
ggaagagugugacuacuug

SEQ ID NO: 1373605 - RNA, 19 nt, Homo sapiens
  misc_RNA (1)...(19): siRNA sense strand
gaacagcuaaucgauaaua

SEQ ID NO: 1373606 - RNA, 19 nt, Homo sapiens
  misc_RNA (1)...(19): siRNA sense strand
uaaaagaccugcugcauuu

SEQ ID NO: 1373607 - RNA, 19 nt, Homo sapiens
  misc_RNA (1)...(19): siRNA sense strand
ggacagggaugacuucaag

SEQ ID NO: 1373608 - RNA, 19 nt, Homo sapiens
  misc_RNA (1)...(19): siRNA sense strand
ucaagaauuuggagucuaa

SEQ ID NO: 1373609 - RNA, 19 nt, Homo sapiens
  misc_RNA (1)...(19): siRNA sense strand
gaagggcuauugugcgauu

SEQ ID NO: 1373610 - RNA, 19 nt, Homo sapiens
  misc_RNA (1)...(19): siRNA sense strand
gcuaaucgauaauauggaa

SEQ ID NO: 1373611 - RNA, 19 nt, Homo sapiens
  misc_RNA (1)...(19): siRNA sense strand
gcaaauauccagcacuuuc

SEQ ID NO: 1373612 - RNA, 19 nt, Homo sapiens
  misc_RNA (1)...(19): siRNA sense strand
cugaacagcuaaucgauaa

SEQ ID NO: 1373613 - RNA, 19 nt, Homo sapiens
  misc_RNA (1)...(19): siRNA sense strand
agaauacucugaacagcua

SEQ ID NO: 1373614 - RNA, 19 nt, Homo sapiens
  misc_RNA (1)...(19): siRNA sense strand
caccagcgaugacagguuu

SEQ ID NO: 1373615 - RNA, 19 nt, Homo sapiens
  misc_RNA (1)...(19): siRNA sense strand
gugagaggauggaaaauua

SEQ ID NO: 1373616 - RNA, 19 nt, Homo sapiens
  misc_RNA (1)...(19): siRNA sense strand
ucgauaauauggaagcuuu

SEQ ID NO: 1373617 - RNA, 19 nt, Homo sapiens
  misc_RNA (1)...(19): siRNA sense strand
gaagagagaagugcagaug

SEQ ID NO: 1373618 - RNA, 19 nt, Homo sapiens
  misc_RNA (1)...(19): siRNA sense strand
ggaagcuguugaugaaugu

SEQ ID NO: 1373619 - RNA, 19 nt, Homo sapiens
  misc_RNA (1)...(19): siRNA sense strand
ucaaagaagaugcuaaaga

SEQ ID NO: 1373620 - RNA, 19 nt, Homo sapiens
  misc_RNA (1)...(19): siRNA sense strand
gagaagugcagaugucgaa

SEQ ID NO: 1373621 - RNA, 19 nt, Homo sapiens
  misc_RNA (1)...(19): siRNA sense strand
gagaagaagcaacuuguag

SEQ ID NO: 1373622 - RNA, 19 nt, Homo sapiens
  misc_RNA (1)...(19): siRNA sense strand
uaucuacagccuucacuua

SEQ ID NO: 1373623 - RNA, 19 nt, Homo sapiens
  misc_RNA (1)...(19): siRNA sense strand
gaaacuggcuccccaucaa

SEQ ID NO: 1373624 - RNA, 19 nt, Homo sapiens
  misc_RNA (1)...(19): siRNA sense strand
gaagauccuuucaaaacaa

SEQ ID NO: 1373625 - RNA, 19 nt, Homo sapiens
  misc_RNA (1)...(19): siRNA sense strand
gaugaauuauaccagaaga

SEQ ID NO: 1373626 - RNA, 19 nt, Homo sapiens
  misc_RNA (1)...(19): siRNA sense strand
ggacaaggaagcuguugau

SEQ ID NO: 1373627 - RNA, 19 nt, Homo sapiens
  misc_RNA (1)...(19): siRNA sense strand
ggcaggaaguccaggagaa

SEQ ID NO: 1373628 - RNA, 19 nt, Homo sapiens
  misc_RNA (1)...(19): siRNA sense strand
acaggaagcugaacagaac

SEQ ID NO: 1373629 - RNA, 19 nt, Homo sapiens
  misc_RNA (1)...(19): siRNA sense strand
gcagguggcgcucaugaga

SEQ ID NO: 1373630 - RNA, 19 nt, Homo sapiens
  misc_RNA (1)...(19): siRNA sense strand
ggaaaagcauaugauguuu

SEQ ID NO: 1373631 - RNA, 19 nt, Homo sapiens
  misc_RNA (1)...(19): siRNA sense strand
cagcaaaucggaaggauca

SEQ ID NO: 1373632 - RNA, 19 nt, Homo sapiens
  misc_RNA (1)...(19): siRNA sense strand
accagaagauccuuucaaa

SEQ ID NO: 1373633 - RNA, 19 nt, Homo sapiens
  misc_RNA (1)...(19): siRNA sense strand
acaaggaagcuguugauga

SEQ ID NO: 1373634 - RNA, 19 nt, Homo sapiens
  misc_RNA (1)...(19): siRNA sense strand
gcacgcgacaccagaaaga

SEQ ID NO: 1373635 - RNA, 19 nt, Homo sapiens
  misc_RNA (1)...(19): siRNA sense strand
guucguggaugcccuguuc

SEQ ID NO: 1373636 - RNA, 19 nt, Homo sapiens
  misc_RNA (1)...(19): siRNA sense strand
uggcaaauauccagcacuu

SEQ ID NO: 1373637 - RNA, 19 nt, Homo sapiens
  misc_RNA (1)...(19): siRNA sense strand
ucuacagccuucacuuaaa

SEQ ID NO: 1373638 - RNA, 19 nt, Homo sapiens
  misc_RNA (1)...(19): siRNA sense strand
gcaggcguauuaccagcaa

SEQ ID NO: 1373639 - RNA, 19 nt, Homo sapiens
  misc_RNA (1)...(19): siRNA sense strand
ggaagaggagaaugucaga

SEQ ID NO: 1373640 - RNA, 19 nt, Homo sapiens
  misc_RNA (1)...(19): siRNA sense strand
ccagaaagacgacacucaa

SEQ ID NO: 1373641 - RNA, 19 nt, Homo sapiens
  misc_RNA (1)...(19): siRNA sense strand
gccaggagcuguacuucag

SEQ ID NO: 1373642 - RNA, 19 nt, Homo sapiens
  misc_RNA (1)...(19): siRNA sense strand
aaagaagucagaugaugaa

SEQ ID NO: 1373643 - RNA, 19 nt, Homo sapiens
  misc_RNA (1)...(19): siRNA sense strand
ggugaacgccuucccugaa

SEQ ID NO: 1373644 - RNA, 19 nt, Homo sapiens
  misc_RNA (1)...(19): siRNA sense strand
aagaagaugcuaaagagaa

SEQ ID NO: 1373645 - RNA, 19 nt, Homo sapiens
  misc_RNA (1)...(19): siRNA sense strand
agugggaacucaaagaaga

SEQ ID NO: 1373646 - RNA, 19 nt, Homo sapiens
  misc_RNA (1)...(19): siRNA sense strand
acagcaauaucacagcauu

SEQ ID NO: 1373647 - RNA, 19 nt, Homo sapiens
  misc_RNA (1)...(19): siRNA sense strand
ucagcaccguggacacuuu

SEQ ID NO: 1373648 - RNA, 19 nt, Homo sapiens
  misc_RNA (1)...(19): siRNA sense strand
cacccuggcugauguggaa

SEQ ID NO: 1373649 - RNA, 19 nt, Homo sapiens
  misc_RNA (1)...(19): siRNA sense strand
ggacuucaggucaaacugu

SEQ ID NO: 1373650 - RNA, 19 nt, Homo sapiens
  misc_RNA (1)...(19): siRNA sense strand
gcgagaguguagacguuga

SEQ ID NO: 1373651 - RNA, 19 nt, Homo sapiens
  misc_RNA (1)...(19): siRNA sense strand
aaagggacuucaggucaaa

SEQ ID NO: 1373652 - RNA, 19 nt, Homo sapiens
  misc_RNA (1)...(19): siRNA sense strand
gcacauggcaaaagugauu

SEQ ID NO: 1373653 - RNA, 19 nt, Homo sapiens
  misc_RNA (1)...(19): siRNA sense strand
ucacagcauucgcccugaa

SEQ ID NO: 1373654 - RNA, 19 nt, Homo sapiens
  misc_RNA (1)...(19): siRNA sense strand
agagagaagugcagauguc

SEQ ID NO: 1373655 - RNA, 19 nt, Homo sapiens
  misc_RNA (1)...(19): siRNA sense strand
caacccgucucugcaugaa

SEQ ID NO: 1373656 - RNA, 19 nt, Homo sapiens
  misc_RNA (1)...(19): siRNA sense strand
gaacucaaagaagaugcua

SEQ ID NO: 1373657 - RNA, 19 nt, Homo sapiens
  misc_RNA (1)...(19): siRNA sense strand
cagaaagacgacacucaaa

SEQ ID NO: 1373658 - RNA, 19 nt, Homo sapiens
  misc_RNA (1)...(19): siRNA sense strand
gcucaagaauuuggagucu

SEQ ID NO: 1373659 - RNA, 19 nt, Homo sapiens
  misc_RNA (1)...(19): siRNA sense strand
caaaaucugcucaagaauu

SEQ ID NO: 1373660 - RNA, 19 nt, Homo sapiens
  misc_RNA (1)...(19): siRNA sense strand
gaaggacaaggaagcuguu

SEQ ID NO: 1373661 - RNA, 19 nt, Homo sapiens
  misc_RNA (1)...(19): siRNA sense strand
agaagaugcuaaagagaag

SEQ ID NO: 1373662 - RNA, 19 nt, Homo sapiens
  misc_RNA (1)...(19): siRNA sense strand
ggaggaagcacagcagaca

SEQ ID NO: 1373663 - RNA, 19 nt, Homo sapiens
  misc_RNA (1)...(19): siRNA sense strand
gaaagacgacacucaaaau

SEQ ID NO: 1373664 - RNA, 19 nt, Homo sapiens
  misc_RNA (1)...(19): siRNA sense strand
aggaagcuguugaugaaug

SEQ ID NO: 1373665 - RNA, 19 nt, Homo sapiens
  misc_RNA (1)...(19): siRNA sense strand
aaagagaagaagcaacuug

SEQ ID NO: 1373666 - RNA, 19 nt, Homo sapiens
  misc_RNA (1)...(19): siRNA sense strand
caaggaggaggaagagaga

SEQ ID NO: 1373667 - RNA, 19 nt, Homo sapiens
  misc_RNA (1)...(19): siRNA sense strand
gcagcaggcaggagucaug

SEQ ID NO: 1373668 - RNA, 19 nt, Homo sapiens
  misc_RNA (1)...(19): siRNA sense strand
gcaaaucggaaggaucaug

SEQ ID NO: 1373669 - RNA, 19 nt, Homo sapiens
  misc_RNA (1)...(19): siRNA sense strand
ggaaugcagccaccaagag

SEQ ID NO: 1373670 - RNA, 19 nt, Homo sapiens
  misc_RNA (1)...(19): siRNA sense strand
agugugaccuggaggaaga

SEQ ID NO: 1373671 - RNA, 19 nt, Homo sapiens
  misc_RNA (1)...(19): siRNA sense strand
ccaagaggaggaacagaga

SEQ ID NO: 1373672 - RNA, 19 nt, Homo sapiens
  misc_RNA (1)...(19): siRNA sense strand
cagcugaugaugacucuga

SEQ ID NO: 1373673 - RNA, 19 nt, Homo sapiens
  misc_RNA (1)...(19): siRNA sense strand
uccuugaccuucuuccuaa

SEQ ID NO: 1373674 - RNA, 19 nt, Homo sapiens
  misc_RNA (1)...(19): siRNA sense strand
gauggaaaauuacaaacug

SEQ ID NO: 1373675 - RNA, 19 nt, Homo sapiens
  misc_RNA (1)...(19): siRNA sense strand
caaaagugauugaguuucu

SEQ ID NO: 1373676 - RNA, 19 nt, Homo sapiens
  misc_RNA (1)...(19): siRNA sense strand
gucagaugaugaauuauac

SEQ ID NO: 1373677 - RNA, 19 nt, Homo sapiens
  misc_RNA (1)...(19): siRNA sense strand
ugagucagcaagaaaguga

SEQ ID NO: 1373678 - RNA, 19 nt, Homo sapiens
  misc_RNA (1)...(19): siRNA sense strand
gaacucagcaacccuucgu

SEQ ID NO: 1373679 - RNA, 19 nt, Homo sapiens
  misc_RNA (1)...(19): siRNA sense strand
gaagagugugacuacuuga

SEQ ID NO: 1373680 - RNA, 19 nt, Homo sapiens
  misc_RNA (1)...(19): siRNA sense strand
cuacagccuucacuuaaaa

SEQ ID NO: 1373681 - RNA, 19 nt, Homo sapiens
  misc_RNA (1)...(19): siRNA sense strand
acucaaagaagaugcuaaa

SEQ ID NO: 1373682 - RNA, 19 nt, Homo sapiens
  misc_RNA (1)...(19): siRNA sense strand
cagcuaaucgauaauaugg

SEQ ID NO: 1373683 - RNA, 19 nt, Homo sapiens
  misc_RNA (1)...(19): siRNA sense strand
gaaaagaaggagagagaau

SEQ ID NO: 1373684 - RNA, 19 nt, Homo sapiens
  misc_RNA (1)...(19): siRNA sense strand
agagaagaagcaacuugua

SEQ ID NO: 1373685 - RNA, 19 nt, Homo sapiens
  misc_RNA (1)...(19): siRNA sense strand
gagaagccccuaaggacua

SEQ ID NO: 1373686 - RNA, 19 nt, Homo sapiens
  misc_RNA (1)...(19): siRNA sense strand
ugaugacucugacggaaag

SEQ ID NO: 1373687 - RNA, 19 nt, Homo sapiens
  misc_RNA (1)...(19): siRNA sense strand
gaaacagauggcaaauauc

SEQ ID NO: 1373688 - RNA, 19 nt, Homo sapiens
  misc_RNA (1)...(19): siRNA sense strand
cuaaagagaagaagcaacu

SEQ ID NO: 1373689 - RNA, 19 nt, Homo sapiens
  misc_RNA (1)...(19): siRNA sense strand
gaugcccuguuccuucaga

SEQ ID NO: 1373690 - RNA, 19 nt, Homo sapiens
  misc_RNA (1)...(19): siRNA sense strand
uggaugcccuguuccuuca

SEQ ID NO: 1373691 - RNA, 19 nt, Homo sapiens
  misc_RNA (1)...(19): siRNA sense strand
agaagucagaugaugaauu

SEQ ID NO: 1373692 - RNA, 19 nt, Homo sapiens
  misc_RNA (1)...(19): siRNA sense strand
ggucaaacugucaaacaca

SEQ ID NO: 1373693 - RNA, 19 nt, Homo sapiens
  misc_RNA (1)...(19): siRNA sense strand
gacguugaccuguguaucu

SEQ ID NO: 1373694 - RNA, 19 nt, Homo sapiens
  misc_RNA (1)...(19): siRNA sense strand
gacagugggaacucaaaga

SEQ ID NO: 1373695 - RNA, 19 nt, Homo sapiens
  misc_RNA (1)...(19): siRNA sense strand
ggagacccagcuacaggaa

SEQ ID NO: 1373696 - RNA, 19 nt, Homo sapiens
  misc_RNA (1)...(19): siRNA sense strand
ccaaggacagggaugacuu

SEQ ID NO: 1373697 - RNA, 19 nt, Homo sapiens
  misc_RNA (1)...(19): siRNA sense strand
aaacagauggcaaauaucc

SEQ ID NO: 1373698 - RNA, 19 nt, Homo sapiens
  misc_RNA (1)...(19): siRNA sense strand
ucugaacagcuaaucgaua

SEQ ID NO: 1373699 - RNA, 19 nt, Homo sapiens
  misc_RNA (1)...(19): siRNA sense strand
cucaaaaucugcucaagaa

SEQ ID NO: 1373700 - RNA, 19 nt, Homo sapiens
  misc_RNA (1)...(19): siRNA sense strand
gaagucagaugaugaauua

SEQ ID NO: 1373701 - RNA, 19 nt, Homo sapiens
  misc_RNA (1)...(19): siRNA sense strand
ggaaacagauggcaaauau

SEQ ID NO: 1373702 - RNA, 19 nt, Homo sapiens
  misc_RNA (1)...(19): siRNA sense strand
caaggaagcuguugaugaa

SEQ ID NO: 1373703 - RNA, 19 nt, Homo sapiens
  misc_RNA (1)...(19): siRNA sense strand
caaagaagaugcuaaagag

SEQ ID NO: 1373704 - RNA, 19 nt, Homo sapiens
  misc_RNA (1)...(19): siRNA sense strand
ggaagagugugacuacuug

SEQ ID NO: 1373705 - RNA, 19 nt, Homo sapiens
  misc_RNA (1)...(19): siRNA sense strand
gaacagcuaaucgauaaua

SEQ ID NO: 1373706 - RNA, 19 nt, Homo sapiens
  misc_RNA (1)...(19): siRNA sense strand
uaaaagaccugcugcauuu

SEQ ID NO: 1373707 - RNA, 19 nt, Homo sapiens
  misc_RNA (1)...(19): siRNA sense strand
ggacagggaugacuucaag

SEQ ID NO: 1373708 - RNA, 19 nt, Homo sapiens
  misc_RNA (1)...(19): siRNA sense strand
ucaagaauuuggagucuaa

SEQ ID NO: 1373709 - RNA, 19 nt, Homo sapiens
  misc_RNA (1)...(19): siRNA sense strand
gaagggcuauugugcgauu

SEQ ID NO: 1373710 - RNA, 19 nt, Homo sapiens
  misc_RNA (1)...(19): siRNA sense strand
gcuaaucgauaauauggaa

SEQ ID NO: 1373711 - RNA, 19 nt, Homo sapiens
  misc_RNA (1)...(19): siRNA sense strand
gcaaauauccagcacuuuc

SEQ ID NO: 1373712 - RNA, 19 nt, Homo sapiens
  misc_RNA (1)...(19): siRNA sense strand
cugaacagcuaaucgauaa

SEQ ID NO: 1373713 - RNA, 19 nt, Homo sapiens
  misc_RNA (1)...(19): siRNA sense strand
agaauacucugaacagcua

SEQ ID NO: 1373714 - RNA, 19 nt, Homo sapiens
  misc_RNA (1)...(19): siRNA sense strand
caccagcgaugacagguuu

SEQ ID NO: 1373715 - RNA, 19 nt, Homo sapiens
  misc_RNA (1)...(19): siRNA sense strand
gugagaggauggaaaauua

SEQ ID NO: 1373716 - RNA, 19 nt, Homo sapiens
  misc_RNA (1)...(19): siRNA sense strand
ucgauaauauggaagcuuu

SEQ ID NO: 1373717 - RNA, 19 nt, Homo sapiens
  misc_RNA (1)...(19): siRNA sense strand
gaagagagaagugcagaug

SEQ ID NO: 1373718 - RNA, 19 nt, Homo sapiens
  misc_RNA (1)...(19): siRNA sense strand
ggaagcuguugaugaaugu

SEQ ID NO: 1373719 - RNA, 19 nt, Homo sapiens
  misc_RNA (1)...(19): siRNA sense strand
ucaaagaagaugcuaaaga

SEQ ID NO: 1373720 - RNA, 19 nt, Homo sapiens
  misc_RNA (1)...(19): siRNA sense strand
gagaagugcagaugucgaa

SEQ ID NO: 1373721 - RNA, 19 nt, Homo sapiens
  misc_RNA (1)...(19): siRNA sense strand
gagaagaagcaacuuguag

SEQ ID NO: 1373722 - RNA, 19 nt, Homo sapiens
  misc_RNA (1)...(19): siRNA sense strand
uaucuacagccuucacuua

SEQ ID NO: 1373723 - RNA, 19 nt, Homo sapiens
  misc_RNA (1)...(19): siRNA sense strand
gaaacuggcuccccaucaa

SEQ ID NO: 1373724 - RNA, 19 nt, Homo sapiens
  misc_RNA (1)...(19): siRNA sense strand
gaagauccuuucaaaacaa

SEQ ID NO: 1373725 - RNA, 19 nt, Homo sapiens
  misc_RNA (1)...(19): siRNA sense strand
gaugaauuauaccagaaga

SEQ ID NO: 1373726 - RNA, 19 nt, Homo sapiens
  misc_RNA (1)...(19): siRNA sense strand
ggacaaggaagcuguugau

SEQ ID NO: 1373727 - RNA, 19 nt, Homo sapiens
  misc_RNA (1)...(19): siRNA sense strand
ggcaggaaguccaggagaa

SEQ ID NO: 1373728 - RNA, 19 nt, Homo sapiens
  misc_RNA (1)...(19): siRNA sense strand
acaggaagcugaacagaac

SEQ ID NO: 1373729 - RNA, 19 nt, Homo sapiens
  misc_RNA (1)...(19): siRNA sense strand
gcagguggcgcucaugaga

SEQ ID NO: 1373730 - RNA, 19 nt, Homo sapiens
  misc_RNA (1)...(19): siRNA sense strand
ggaaaagcauaugauguuu

SEQ ID NO: 1373731 - RNA, 19 nt, Homo sapiens
  misc_RNA (1)...(19): siRNA sense strand
cagcaaaucggaaggauca

SEQ ID NO: 1373732 - RNA, 19 nt, Homo sapiens
  misc_RNA (1)...(19): siRNA sense strand
accagaagauccuuucaaa

SEQ ID NO: 1373733 - RNA, 19 nt, Homo sapiens
  misc_RNA (1)...(19): siRNA sense strand
acaaggaagcuguugauga

SEQ ID NO: 1373734 - RNA, 19 nt, Homo sapiens
  misc_RNA (1)...(19): siRNA sense strand
gcacgcgacaccagaaaga

SEQ ID NO: 1373735 - RNA, 19 nt, Homo sapiens
  misc_RNA (1)...(19): siRNA sense strand
guucguggaugcccuguuc

SEQ ID NO: 1373736 - RNA, 19 nt, Homo sapiens
  misc_RNA (1)...(19): siRNA sense strand
uggcaaauauccagcacuu

SEQ ID NO: 1373737 - RNA, 19 nt, Homo sapiens
  misc_RNA (1)...(19): siRNA sense strand
ucuacagccuucacuuaaa

SEQ ID NO: 1373738 - RNA, 19 nt, Homo sapiens
  misc_RNA (1)...(19): siRNA sense strand
gcaggcguauuaccagcaa

SEQ ID NO: 1373739 - RNA, 19 nt, Homo sapiens
  misc_RNA (1)...(19): siRNA sense strand
ggaagaggagaaugucaga

SEQ ID NO: 1373740 - RNA, 19 nt, Homo sapiens
  misc_RNA (1)...(19): siRNA sense strand
ccagaaagacgacacucaa

SEQ ID NO: 1373741 - RNA, 19 nt, Homo sapiens
  misc_RNA (1)...(19): siRNA sense strand
gccaggagcuguacuucag

SEQ ID NO: 1373742 - RNA, 19 nt, Homo sapiens
  misc_RNA (1)...(19): siRNA sense strand
aaagaagucagaugaugaa

SEQ ID NO: 1373743 - RNA, 19 nt, Homo sapiens
  misc_RNA (1)...(19): siRNA sense strand
ggugaacgccuucccugaa

SEQ ID NO: 1373744 - RNA, 19 nt, Homo sapiens
  misc_RNA (1)...(19): siRNA sense strand
aagaagaugcuaaagagaa

SEQ ID NO: 1373745 - RNA, 19 nt, Homo sapiens
  misc_RNA (1)...(19): siRNA sense strand
agugggaacucaaagaaga

SEQ ID NO: 1373746 - RNA, 19 nt, Homo sapiens
  misc_RNA (1)...(19): siRNA sense strand
acagcaauaucacagcauu

SEQ ID NO: 1373747 - RNA, 19 nt, Homo sapiens
  misc_RNA (1)...(19): siRNA sense strand
ucagcaccguggacacuuu

SEQ ID NO: 1373748 - RNA, 19 nt, Homo sapiens
  misc_RNA (1)...(19): siRNA sense strand
cacccuggcugauguggaa

SEQ ID NO: 1373749 - RNA, 19 nt, Homo sapiens
  misc_RNA (1)...(19): siRNA sense strand
ggacuucaggucaaacugu

SEQ ID NO: 1373750 - RNA, 19 nt, Homo sapiens
  misc_RNA (1)...(19): siRNA sense strand
gcgagaguguagacguuga

SEQ ID NO: 1373751 - RNA, 19 nt, Homo sapiens
  misc_RNA (1)...(19): siRNA sense strand
aaagggacuucaggucaaa

SEQ ID NO: 1373752 - RNA, 19 nt, Homo sapiens
  misc_RNA (1)...(19): siRNA sense strand
gcacauggcaaaagugauu

SEQ ID NO: 1373753 - RNA, 19 nt, Homo sapiens
  misc_RNA (1)...(19): siRNA sense strand
ucacagcauucgcccugaa

SEQ ID NO: 1373754 - RNA, 19 nt, Homo sapiens
  misc_RNA (1)...(19): siRNA sense strand
agagagaagugcagauguc

SEQ ID NO: 1373755 - RNA, 19 nt, Homo sapiens
  misc_RNA (1)...(19): siRNA sense strand
caacccgucucugcaugaa

SEQ ID NO: 1373756 - RNA, 19 nt, Homo sapiens
  misc_RNA (1)...(19): siRNA sense strand
gaacucaaagaagaugcua

SEQ ID NO: 1373757 - RNA, 19 nt, Homo sapiens
  misc_RNA (1)...(19): siRNA sense strand
cagaaagacgacacucaaa

SEQ ID NO: 1373758 - RNA, 19 nt, Homo sapiens
  misc_RNA (1)...(19): siRNA sense strand
gcucaagaauuuggagucu

SEQ ID NO: 1373759 - RNA, 19 nt, Homo sapiens
  misc_RNA (1)...(19): siRNA sense strand
caaaaucugcucaagaauu

SEQ ID NO: 1373760 - RNA, 19 nt, Homo sapiens
  misc_RNA (1)...(19): siRNA sense strand
gaaggacaaggaagcuguu

SEQ ID NO: 1373761 - RNA, 19 nt, Homo sapiens
  misc_RNA (1)...(19): siRNA sense strand
agaagaugcuaaagagaag

SEQ ID NO: 1373762 - RNA, 19 nt, Homo sapiens
  misc_RNA (1)...(19): siRNA sense strand
ggaggaagcacagcagaca

SEQ ID NO: 1373763 - RNA, 19 nt, Homo sapiens
  misc_RNA (1)...(19): siRNA sense strand
gaaagacgacacucaaaau

SEQ ID NO: 1373764 - RNA, 19 nt, Homo sapiens
  misc_RNA (1)...(19): siRNA sense strand
aggaagcuguugaugaaug

SEQ ID NO: 1373765 - RNA, 19 nt, Homo sapiens
  misc_RNA (1)...(19): siRNA sense strand
aaagagaagaagcaacuug

SEQ ID NO: 1373766 - RNA, 19 nt, Homo sapiens
  misc_RNA (1)...(19): siRNA sense strand
caaggaggaggaagagaga

SEQ ID NO: 1373767 - RNA, 19 nt, Homo sapiens
  misc_RNA (1)...(19): siRNA sense strand
gcagcaggcaggagucaug

SEQ ID NO: 1373768 - RNA, 19 nt, Homo sapiens
  misc_RNA (1)...(19): siRNA sense strand
gcaaaucggaaggaucaug

SEQ ID NO: 1373769 - RNA, 19 nt, Homo sapiens
  misc_RNA (1)...(19): siRNA sense strand
ggaaugcagccaccaagag

SEQ ID NO: 1373770 - RNA, 19 nt, Homo sapiens
  misc_RNA (1)...(19): siRNA sense strand
agugugaccuggaggaaga

SEQ ID NO: 1373771 - RNA, 19 nt, Homo sapiens
  misc_RNA (1)...(19): siRNA sense strand
ccaagaggaggaacagaga

SEQ ID NO: 1373772 - RNA, 19 nt, Homo sapiens
  misc_RNA (1)...(19): siRNA sense strand
cagcugaugaugacucuga

SEQ ID NO: 1373773 - RNA, 19 nt, Homo sapiens
  misc_RNA (1)...(19): siRNA sense strand
uccuugaccuucuuccuaa

SEQ ID NO: 1373774 - RNA, 19 nt, Homo sapiens
  misc_RNA (1)...(19): siRNA sense strand
gauggaaaauuacaaacug

SEQ ID NO: 1373775 - RNA, 19 nt, Homo sapiens
  misc_RNA (1)...(19): siRNA sense strand
caaaagugauugaguuucu

SEQ ID NO: 1373776 - RNA, 19 nt, Homo sapiens
  misc_RNA (1)...(19): siRNA sense strand
gucagaugaugaauuauac

SEQ ID NO: 1373777 - RNA, 19 nt, Homo sapiens
  misc_RNA (1)...(19): siRNA sense strand
ugagucagcaagaaaguga

SEQ ID NO: 1373778 - RNA, 19 nt, Homo sapiens
  misc_RNA (1)...(19): siRNA sense strand
gaacucagcaacccuucgu

SEQ ID NO: 1373779 - RNA, 19 nt, Homo sapiens
  misc_RNA (1)...(19): siRNA sense strand
gaagagugugacuacuuga

SEQ ID NO: 1373780 - RNA, 19 nt, Homo sapiens
  misc_RNA (1)...(19): siRNA sense strand
cuacagccuucacuuaaaa

SEQ ID NO: 1373781 - RNA, 19 nt, Homo sapiens
  misc_RNA (1)...(19): siRNA sense strand
acucaaagaagaugcuaaa

SEQ ID NO: 1373782 - RNA, 19 nt, Homo sapiens
  misc_RNA (1)...(19): siRNA sense strand
cagcuaaucgauaauaugg

SEQ ID NO: 1373783 - RNA, 19 nt, Homo sapiens
  misc_RNA (1)...(19): siRNA sense strand
gaaaagaaggagagagaau

SEQ ID NO: 1373784 - RNA, 19 nt, Homo sapiens
  misc_RNA (1)...(19): siRNA sense strand
agagaagaagcaacuugua

SEQ ID NO: 1373785 - RNA, 19 nt, Homo sapiens
  misc_RNA (1)...(19): siRNA sense strand
gagaagccccuaaggacua

SEQ ID NO: 1373786 - RNA, 19 nt, Homo sapiens
  misc_RNA (1)...(19): siRNA sense strand
ugaugacucugacggaaag

SEQ ID NO: 1373787 - RNA, 19 nt, Homo sapiens
  misc_RNA (1)...(19): siRNA sense strand
gaaacagauggcaaauauc

SEQ ID NO: 1373788 - RNA, 19 nt, Homo sapiens
  misc_RNA (1)...(19): siRNA sense strand
cuaaagagaagaagcaacu

SEQ ID NO: 1373789 - RNA, 19 nt, Homo sapiens
  misc_RNA (1)...(19): siRNA sense strand
gaugcccuguuccuucaga

SEQ ID NO: 1373790 - RNA, 19 nt, Homo sapiens
  misc_RNA (1)...(19): siRNA sense strand
uggaugcccuguuccuuca

SEQ ID NO: 1373791 - RNA, 19 nt, Homo sapiens
  misc_RNA (1)...(19): siRNA sense strand
agaagucagaugaugaauu

SEQ ID NO: 1373792 - RNA, 19 nt, Homo sapiens
  misc_RNA (1)...(19): siRNA sense strand
ggucaaacugucaaacaca

SEQ ID NO: 1373793 - RNA, 19 nt, Homo sapiens
  misc_RNA (1)...(19): siRNA sense strand
gacguugaccuguguaucu

SEQ ID NO: 1373794 - RNA, 19 nt, Homo sapiens
  misc_RNA (1)...(19): siRNA sense strand
gacagugggaacucaaaga

SEQ ID NO: 1373795 - RNA, 19 nt, Homo sapiens
  misc_RNA (1)...(19): siRNA sense strand
ggagacccagcuacaggaa

SEQ ID NO: 1373796 - RNA, 19 nt, Homo sapiens
  misc_RNA (1)...(19): siRNA sense strand
ccaaggacagggaugacuu

SEQ ID NO: 1373797 - RNA, 19 nt, Homo sapiens
  misc_RNA (1)...(19): siRNA sense strand
aaacagauggcaaauaucc

SEQ ID NO: 1373798 - RNA, 19 nt, Homo sapiens
  misc_RNA (1)...(19): siRNA sense strand
ucugaacagcuaaucgaua

SEQ ID NO: 1373799 - RNA, 19 nt, Homo sapiens
  misc_RNA (1)...(19): siRNA sense strand
cucaaaaucugcucaagaa

SEQ ID NO: 1373800 - RNA, 19 nt, Homo sapiens
  misc_RNA (1)...(19): siRNA sense strand
gagcgcagcuuccggauca

SEQ ID NO: 1373801 - RNA, 19 nt, Homo sapiens
  misc_RNA (1)...(19): siRNA sense strand
caaccucacuaaugccaua

SEQ ID NO: 1373802 - RNA, 19 nt, Homo sapiens
  misc_RNA (1)...(19): siRNA sense strand
gcacuggaggguuuaauuu

SEQ ID NO: 1373803 - RNA, 19 nt, Homo sapiens
  misc_RNA (1)...(19): siRNA sense strand
gcagcaaccucacuaaugc

SEQ ID NO: 1373804 - RNA, 19 nt, Homo sapiens
  misc_RNA (1)...(19): siRNA sense strand
ccuacaagcuggcugagaa

SEQ ID NO: 1373805 - RNA, 19 nt, Homo sapiens
  misc_RNA (1)...(19): siRNA sense strand
gcaacaaccacaccugcua

SEQ ID NO: 1373806 - RNA, 19 nt, Homo sapiens
  misc_RNA (1)...(19): siRNA sense strand
ggcuuugccuugaauuuaa

SEQ ID NO: 1373807 - RNA, 19 nt, Homo sapiens
  misc_RNA (1)...(19): siRNA sense strand
gagcagagcgggaccaucu

SEQ ID NO: 1373808 - RNA, 19 nt, Homo sapiens
  misc_RNA (1)...(19): siRNA sense strand
gcacgcugaucgagaaugg

SEQ ID NO: 1373809 - RNA, 19 nt, Homo sapiens
  misc_RNA (1)...(19): siRNA sense strand
gcaaagacggcaacaacca

SEQ ID NO: 1373810 - RNA, 19 nt, Homo sapiens
  misc_RNA (1)...(19): siRNA sense strand
uggagagccugaucaacaa

SEQ ID NO: 1373811 - RNA, 19 nt, Homo sapiens
  misc_RNA (1)...(19): siRNA sense strand
caagcuggcugagaacauc

SEQ ID NO: 1373812 - RNA, 19 nt, Homo sapiens
  misc_RNA (1)...(19): siRNA sense strand
ucuggaggcuucucauuca

SEQ ID NO: 1373813 - RNA, 19 nt, Homo sapiens
  misc_RNA (1)...(19): siRNA sense strand
gcuuugccuugaauuuaaa

SEQ ID NO: 1373814 - RNA, 19 nt, Homo sapiens
  misc_RNA (1)...(19): siRNA sense strand
cggcuuugccuugaauuua

SEQ ID NO: 1373815 - RNA, 19 nt, Homo sapiens
  misc_RNA (1)...(19): siRNA sense strand
uggaggaguuggucaagga

SEQ ID NO: 1373816 - RNA, 19 nt, Homo sapiens
  misc_RNA (1)...(19): siRNA sense strand
gcagcagcaaccucacuaa

SEQ ID NO: 1373817 - RNA, 19 nt, Homo sapiens
  misc_RNA (1)...(19): siRNA sense strand
caacugcuccaaccucauc

SEQ ID NO: 1373818 - RNA, 19 nt, Homo sapiens
  misc_RNA (1)...(19): siRNA sense strand
ccggaucaccuuugacuga

SEQ ID NO: 1373819 - RNA, 19 nt, Homo sapiens
  misc_RNA (1)...(19): siRNA sense strand
cagcagcaccaccggcuuu

SEQ ID NO: 1373820 - RNA, 19 nt, Homo sapiens
  misc_RNA (1)...(19): siRNA sense strand
uggaggaggugaccaaggu

SEQ ID NO: 1373821 - RNA, 19 nt, Homo sapiens
  misc_RNA (1)...(19): siRNA sense strand
gauccucaaugcgcacaug

SEQ ID NO: 1373822 - RNA, 19 nt, Homo sapiens
  misc_RNA (1)...(19): siRNA sense strand
ggaccaggagcucgacuuc

SEQ ID NO: 1373823 - RNA, 19 nt, Homo sapiens
  misc_RNA (1)...(19): siRNA sense strand
ggaacuggauuuucuuugg

SEQ ID NO: 1373824 - RNA, 19 nt, Homo sapiens
  misc_RNA (1)...(19): siRNA sense strand
gcacccaccggcuuugugu

SEQ ID NO: 1373825 - RNA, 19 nt, Homo sapiens
  misc_RNA (1)...(19): siRNA sense strand
ggagagccugaucaacaaa

SEQ ID NO: 1373826 - RNA, 19 nt, Homo sapiens
  misc_RNA (1)...(19): siRNA sense strand
caaauggagccuggagcua

SEQ ID NO: 1373827 - RNA, 19 nt, Homo sapiens
  misc_RNA (1)...(19): siRNA sense strand
ccaccggcuuugccuugaa

SEQ ID NO: 1373828 - RNA, 19 nt, Homo sapiens
  misc_RNA (1)...(19): siRNA sense strand
cagccucuuugcgucaaua

SEQ ID NO: 1373829 - RNA, 19 nt, Homo sapiens
  misc_RNA (1)...(19): siRNA sense strand
gaucgagaauggagaaaag

SEQ ID NO: 1373830 - RNA, 19 nt, Homo sapiens
  misc_RNA (1)...(19): siRNA sense strand
ccaccggccuguucucacu

SEQ ID NO: 1373831 - RNA, 19 nt, Homo sapiens
  misc_RNA (1)...(19): siRNA sense strand
cccaggaucucaaggacau

SEQ ID NO: 1373832 - RNA, 19 nt, Homo sapiens
  misc_RNA (1)...(19): siRNA sense strand
acuggacucucccucugua

SEQ ID NO: 1373833 - RNA, 19 nt, Homo sapiens
  misc_RNA (1)...(19): siRNA sense strand
agacgacaggcuucacuuu

SEQ ID NO: 1373834 - RNA, 19 nt, Homo sapiens
  misc_RNA (1)...(19): siRNA sense strand
acaggcggguucacguuug

SEQ ID NO: 1373835 - RNA, 19 nt, Homo sapiens
  misc_RNA (1)...(19): siRNA sense strand
gcuuccggaucaccuuuga

SEQ ID NO: 1373836 - RNA, 19 nt, Homo sapiens
  misc_RNA (1)...(19): siRNA sense strand
ugcaguggaucgaccagaa

SEQ ID NO: 1373837 - RNA, 19 nt, Homo sapiens
  misc_RNA (1)...(19): siRNA sense strand
cuggagagccugaucaaca

SEQ ID NO: 1373838 - RNA, 19 nt, Homo sapiens
  misc_RNA (1)...(19): siRNA sense strand
ggcacuggaggguuuaauu

SEQ ID NO: 1373839 - RNA, 19 nt, Homo sapiens
  misc_RNA (1)...(19): siRNA sense strand
aauggagccuggagcuaga

SEQ ID NO: 1373840 - RNA, 19 nt, Homo sapiens
  misc_RNA (1)...(19): siRNA sense strand
gcugaucgagaauggagaa

SEQ ID NO: 1373841 - RNA, 19 nt, Homo sapiens
  misc_RNA (1)...(19): siRNA sense strand
ugagcccacuggaggaguu

SEQ ID NO: 1373842 - RNA, 19 nt, Homo sapiens
  misc_RNA (1)...(19): siRNA sense strand
caucuggaggcuucucauu

SEQ ID NO: 1373843 - RNA, 19 nt, Homo sapiens
  misc_RNA (1)...(19): siRNA sense strand
cagcagcaaccucacuaau

SEQ ID NO: 1373844 - RNA, 19 nt, Homo sapiens
  misc_RNA (1)...(19): siRNA sense strand
gcagagcgggaccaucuac

SEQ ID NO: 1373845 - RNA, 19 nt, Homo sapiens
  misc_RNA (1)...(19): siRNA sense strand
accaggagcucgacuucau

SEQ ID NO: 1373846 - RNA, 19 nt, Homo sapiens
  misc_RNA (1)...(19): siRNA sense strand
ggaacagcgacucuugcuu

SEQ ID NO: 1373847 - RNA, 19 nt, Homo sapiens
  misc_RNA (1)...(19): siRNA sense strand
ggcagcagcaaccucacua

SEQ ID NO: 1373848 - RNA, 19 nt, Homo sapiens
  misc_RNA (1)...(19): siRNA sense strand
gcaccuccacaacaacauc

SEQ ID NO: 1373849 - RNA, 19 nt, Homo sapiens
  misc_RNA (1)...(19): siRNA sense strand
ucugcaagauccucaaugc

SEQ ID NO: 1373850 - RNA, 19 nt, Homo sapiens
  misc_RNA (1)...(19): siRNA sense strand
gagagccugaucaacaaau

SEQ ID NO: 1373851 - RNA, 19 nt, Homo sapiens
  misc_RNA (1)...(19): siRNA sense strand
ccaccggcuuuguguuugg

SEQ ID NO: 1373852 - RNA, 19 nt, Homo sapiens
  misc_RNA (1)...(19): siRNA sense strand
agagccugaucaacaaaug

SEQ ID NO: 1373853 - RNA, 19 nt, Homo sapiens
  misc_RNA (1)...(19): siRNA sense strand
cuacaggcggguucacguu

SEQ ID NO: 1373854 - RNA, 19 nt, Homo sapiens
  misc_RNA (1)...(19): siRNA sense strand
caccggcuuugccuugaau

SEQ ID NO: 1373855 - RNA, 19 nt, Homo sapiens
  misc_RNA (1)...(19): siRNA sense strand
cagccaccaucaccaguac

SEQ ID NO: 1373856 - RNA, 19 nt, Homo sapiens
  misc_RNA (1)...(19): siRNA sense strand
ccacagcaggugccacaca

SEQ ID NO: 1373857 - RNA, 19 nt, Homo sapiens
  misc_RNA (1)...(19): siRNA sense strand
acccuccgguuucaacauu

SEQ ID NO: 1373858 - RNA, 19 nt, Homo sapiens
  misc_RNA (1)...(19): siRNA sense strand
gagcgcagcuuccggauca

SEQ ID NO: 1373859 - RNA, 19 nt, Homo sapiens
  misc_RNA (1)...(19): siRNA sense strand
caaccucacuaaugccaua

SEQ ID NO: 1373860 - RNA, 19 nt, Homo sapiens
  misc_RNA (1)...(19): siRNA sense strand
gcacuggaggguuuaauuu

SEQ ID NO: 1373861 - RNA, 19 nt, Homo sapiens
  misc_RNA (1)...(19): siRNA sense strand
gcagcaaccucacuaaugc

SEQ ID NO: 1373862 - RNA, 19 nt, Homo sapiens
  misc_RNA (1)...(19): siRNA sense strand
ccuacaagcuggcugagaa

SEQ ID NO: 1373863 - RNA, 19 nt, Homo sapiens
  misc_RNA (1)...(19): siRNA sense strand
gcaacaaccacaccugcua

SEQ ID NO: 1373864 - RNA, 19 nt, Homo sapiens
  misc_RNA (1)...(19): siRNA sense strand
ggcuuugccuugaauuuaa

SEQ ID NO: 1373865 - RNA, 19 nt, Homo sapiens
  misc_RNA (1)...(19): siRNA sense strand
gagcagagcgggaccaucu

SEQ ID NO: 1373866 - RNA, 19 nt, Homo sapiens
  misc_RNA (1)...(19): siRNA sense strand
gcacgcugaucgagaaugg

SEQ ID NO: 1373867 - RNA, 19 nt, Homo sapiens
  misc_RNA (1)...(19): siRNA sense strand
gcaaagacggcaacaacca

SEQ ID NO: 1373868 - RNA, 19 nt, Homo sapiens
  misc_RNA (1)...(19): siRNA sense strand
uggagagccugaucaacaa

SEQ ID NO: 1373869 - RNA, 19 nt, Homo sapiens
  misc_RNA (1)...(19): siRNA sense strand
caagcuggcugagaacauc

SEQ ID NO: 1373870 - RNA, 19 nt, Homo sapiens
  misc_RNA (1)...(19): siRNA sense strand
ucuggaggcuucucauuca

SEQ ID NO: 1373871 - RNA, 19 nt, Homo sapiens
  misc_RNA (1)...(19): siRNA sense strand
gcuuugccuugaauuuaaa

SEQ ID NO: 1373872 - RNA, 19 nt, Homo sapiens
  misc_RNA (1)...(19): siRNA sense strand
cggcuuugccuugaauuua

SEQ ID NO: 1373873 - RNA, 19 nt, Homo sapiens
  misc_RNA (1)...(19): siRNA sense strand
uggaggaguuggucaagga

SEQ ID NO: 1373874 - RNA, 19 nt, Homo sapiens
  misc_RNA (1)...(19): siRNA sense strand
gcagcagcaaccucacuaa

SEQ ID NO: 1373875 - RNA, 19 nt, Homo sapiens
  misc_RNA (1)...(19): siRNA sense strand
caacugcuccaaccucauc

SEQ ID NO: 1373876 - RNA, 19 nt, Homo sapiens
  misc_RNA (1)...(19): siRNA sense strand
ccggaucaccuuugacuga

SEQ ID NO: 1373877 - RNA, 19 nt, Homo sapiens
  misc_RNA (1)...(19): siRNA sense strand
cagcagcaccaccggcuuu

SEQ ID NO: 1373878 - RNA, 19 nt, Homo sapiens
  misc_RNA (1)...(19): siRNA sense strand
uggaggaggugaccaaggu

SEQ ID NO: 1373879 - RNA, 19 nt, Homo sapiens
  misc_RNA (1)...(19): siRNA sense strand
gauccucaaugcgcacaug

SEQ ID NO: 1373880 - RNA, 19 nt, Homo sapiens
  misc_RNA (1)...(19): siRNA sense strand
ggaccaggagcucgacuuc

SEQ ID NO: 1373881 - RNA, 19 nt, Homo sapiens
  misc_RNA (1)...(19): siRNA sense strand
ggaacuggauuuucuuugg

SEQ ID NO: 1373882 - RNA, 19 nt, Homo sapiens
  misc_RNA (1)...(19): siRNA sense strand
gcacccaccggcuuugugu

SEQ ID NO: 1373883 - RNA, 19 nt, Homo sapiens
  misc_RNA (1)...(19): siRNA sense strand
ggagagccugaucaacaaa

SEQ ID NO: 1373884 - RNA, 19 nt, Homo sapiens
  misc_RNA (1)...(19): siRNA sense strand
caaauggagccuggagcua

SEQ ID NO: 1373885 - RNA, 19 nt, Homo sapiens
  misc_RNA (1)...(19): siRNA sense strand
ccaccggcuuugccuugaa

SEQ ID NO: 1373886 - RNA, 19 nt, Homo sapiens
  misc_RNA (1)...(19): siRNA sense strand
cagccucuuugcgucaaua

SEQ ID NO: 1373887 - RNA, 19 nt, Homo sapiens
  misc_RNA (1)...(19): siRNA sense strand
gaucgagaauggagaaaag

SEQ ID NO: 1373888 - RNA, 19 nt, Homo sapiens
  misc_RNA (1)...(19): siRNA sense strand
ccaccggccuguucucacu

SEQ ID NO: 1373889 - RNA, 19 nt, Homo sapiens
  misc_RNA (1)...(19): siRNA sense strand
cccaggaucucaaggacau

SEQ ID NO: 1373890 - RNA, 19 nt, Homo sapiens
  misc_RNA (1)...(19): siRNA sense strand
acuggacucucccucugua

SEQ ID NO: 1373891 - RNA, 19 nt, Homo sapiens
  misc_RNA (1)...(19): siRNA sense strand
agacgacaggcuucacuuu

SEQ ID NO: 1373892 - RNA, 19 nt, Homo sapiens
  misc_RNA (1)...(19): siRNA sense strand
acaggcggguucacguuug

SEQ ID NO: 1373893 - RNA, 19 nt, Homo sapiens
  misc_RNA (1)...(19): siRNA sense strand
gcuuccggaucaccuuuga

SEQ ID NO: 1373894 - RNA, 19 nt, Homo sapiens
  misc_RNA (1)...(19): siRNA sense strand
ugcaguggaucgaccagaa

SEQ ID NO: 1373895 - RNA, 19 nt, Homo sapiens
  misc_RNA (1)...(19): siRNA sense strand
cuggagagccugaucaaca

SEQ ID NO: 1373896 - RNA, 19 nt, Homo sapiens
  misc_RNA (1)...(19): siRNA sense strand
ggcacuggaggguuuaauu

SEQ ID NO: 1373897 - RNA, 19 nt, Homo sapiens
  misc_RNA (1)...(19): siRNA sense strand
aauggagccuggagcuaga

SEQ ID NO: 1373898 - RNA, 19 nt, Homo sapiens
  misc_RNA (1)...(19): siRNA sense strand
gcugaucgagaauggagaa

SEQ ID NO: 1373899 - RNA, 19 nt, Homo sapiens
  misc_RNA (1)...(19): siRNA sense strand
ugagcccacuggaggaguu

SEQ ID NO: 1373900 - RNA, 19 nt, Homo sapiens
  misc_RNA (1)...(19): siRNA sense strand
caucuggaggcuucucauu

SEQ ID NO: 1373901 - RNA, 19 nt, Homo sapiens
  misc_RNA (1)...(19): siRNA sense strand
cagcagcaaccucacuaau

SEQ ID NO: 1373902 - RNA, 19 nt, Homo sapiens
  misc_RNA (1)...(19): siRNA sense strand
gcagagcgggaccaucuac

SEQ ID NO: 1373903 - RNA, 19 nt, Homo sapiens
  misc_RNA (1)...(19): siRNA sense strand
accaggagcucgacuucau

SEQ ID NO: 1373904 - RNA, 19 nt, Homo sapiens
  misc_RNA (1)...(19): siRNA sense strand
ggaacagcgacucuugcuu

SEQ ID NO: 1373905 - RNA, 19 nt, Homo sapiens
  misc_RNA (1)...(19): siRNA sense strand
ggcagcagcaaccucacua

SEQ ID NO: 1373906 - RNA, 19 nt, Homo sapiens
  misc_RNA (1)...(19): siRNA sense strand
gcaccuccacaacaacauc

SEQ ID NO: 1373907 - RNA, 19 nt, Homo sapiens
  misc_RNA (1)...(19): siRNA sense strand
ucugcaagauccucaaugc

SEQ ID NO: 1373908 - RNA, 19 nt, Homo sapiens
  misc_RNA (1)...(19): siRNA sense strand
gagagccugaucaacaaau

SEQ ID NO: 1373909 - RNA, 19 nt, Homo sapiens
  misc_RNA (1)...(19): siRNA sense strand
ccaccggcuuuguguuugg

SEQ ID NO: 1373910 - RNA, 19 nt, Homo sapiens
  misc_RNA (1)...(19): siRNA sense strand
agagccugaucaacaaaug

SEQ ID NO: 1373911 - RNA, 19 nt, Homo sapiens
  misc_RNA (1)...(19): siRNA sense strand
cuacaggcggguucacguu

SEQ ID NO: 1373912 - RNA, 19 nt, Homo sapiens
  misc_RNA (1)...(19): siRNA sense strand
caccggcuuugccuugaau

SEQ ID NO: 1373913 - RNA, 19 nt, Homo sapiens
  misc_RNA (1)...(19): siRNA sense strand
cagccaccaucaccaguac

SEQ ID NO: 1373914 - RNA, 19 nt, Homo sapiens
  misc_RNA (1)...(19): siRNA sense strand
ccacagcaggugccacaca

SEQ ID NO: 1373915 - RNA, 19 nt, Homo sapiens
  misc_RNA (1)...(19): siRNA sense strand
acccuccgguuucaacauu

SEQ ID NO: 1373916 - RNA, 19 nt, Homo sapiens
  misc_RNA (1)...(19): siRNA sense strand
gagcgcagcuuccggauca

SEQ ID NO: 1373917 - RNA, 19 nt, Homo sapiens
  misc_RNA (1)...(19): siRNA sense strand
caaccucacuaaugccaua

SEQ ID NO: 1373918 - RNA, 19 nt, Homo sapiens
  misc_RNA (1)...(19): siRNA sense strand
gcacuggaggguuuaauuu

SEQ ID NO: 1373919 - RNA, 19 nt, Homo sapiens
  misc_RNA (1)...(19): siRNA sense strand
gcagcaaccucacuaaugc

SEQ ID NO: 1373920 - RNA, 19 nt, Homo sapiens
  misc_RNA (1)...(19): siRNA sense strand
ccuacaagcuggcugagaa

SEQ ID NO: 1373921 - RNA, 19 nt, Homo sapiens
  misc_RNA (1)...(19): siRNA sense strand
gcaacaaccacaccugcua

SEQ ID NO: 1373922 - RNA, 19 nt, Homo sapiens
  misc_RNA (1)...(19): siRNA sense strand
ggcuuugccuugaauuuaa

SEQ ID NO: 1373923 - RNA, 19 nt, Homo sapiens
  misc_RNA (1)...(19): siRNA sense strand
gagcagagcgggaccaucu

SEQ ID NO: 1373924 - RNA, 19 nt, Homo sapiens
  misc_RNA (1)...(19): siRNA sense strand
gcacgcugaucgagaaugg

SEQ ID NO: 1373925 - RNA, 19 nt, Homo sapiens
  misc_RNA (1)...(19): siRNA sense strand
gcaaagacggcaacaacca

SEQ ID NO: 1373926 - RNA, 19 nt, Homo sapiens
  misc_RNA (1)...(19): siRNA sense strand
uggagagccugaucaacaa

SEQ ID NO: 1373927 - RNA, 19 nt, Homo sapiens
  misc_RNA (1)...(19): siRNA sense strand
caagcuggcugagaacauc

SEQ ID NO: 1373928 - RNA, 19 nt, Homo sapiens
  misc_RNA (1)...(19): siRNA sense strand
ucuggaggcuucucauuca

SEQ ID NO: 1373929 - RNA, 19 nt, Homo sapiens
  misc_RNA (1)...(19): siRNA sense strand
gcuuugccuugaauuuaaa

SEQ ID NO: 1373930 - RNA, 19 nt, Homo sapiens
  misc_RNA (1)...(19): siRNA sense strand
cggcuuugccuugaauuua

SEQ ID NO: 1373931 - RNA, 19 nt, Homo sapiens
  misc_RNA (1)...(19): siRNA sense strand
uggaggaguuggucaagga

SEQ ID NO: 1373932 - RNA, 19 nt, Homo sapiens
  misc_RNA (1)...(19): siRNA sense strand
gcagcagcaaccucacuaa

SEQ ID NO: 1373933 - RNA, 19 nt, Homo sapiens
  misc_RNA (1)...(19): siRNA sense strand
caacugcuccaaccucauc

SEQ ID NO: 1373934 - RNA, 19 nt, Homo sapiens
  misc_RNA (1)...(19): siRNA sense strand
ccggaucaccuuugacuga

SEQ ID NO: 1373935 - RNA, 19 nt, Homo sapiens
  misc_RNA (1)...(19): siRNA sense strand
cagcagcaccaccggcuuu

SEQ ID NO: 1373936 - RNA, 19 nt, Homo sapiens
  misc_RNA (1)...(19): siRNA sense strand
uggaggaggugaccaaggu

SEQ ID NO: 1373937 - RNA, 19 nt, Homo sapiens
  misc_RNA (1)...(19): siRNA sense strand
gauccucaaugcgcacaug

SEQ ID NO: 1373938 - RNA, 19 nt, Homo sapiens
  misc_RNA (1)...(19): siRNA sense strand
ggaccaggagcucgacuuc

SEQ ID NO: 1373939 - RNA, 19 nt, Homo sapiens
  misc_RNA (1)...(19): siRNA sense strand
ggaacuggauuuucuuugg

SEQ ID NO: 1373940 - RNA, 19 nt, Homo sapiens
  misc_RNA (1)...(19): siRNA sense strand
gcacccaccggcuuugugu

SEQ ID NO: 1373941 - RNA, 19 nt, Homo sapiens
  misc_RNA (1)...(19): siRNA sense strand
ggagagccugaucaacaaa

SEQ ID NO: 1373942 - RNA, 19 nt, Homo sapiens
  misc_RNA (1)...(19): siRNA sense strand
caaauggagccuggagcua

SEQ ID NO: 1373943 - RNA, 19 nt, Homo sapiens
  misc_RNA (1)...(19): siRNA sense strand
ccaccggcuuugccuugaa

SEQ ID NO: 1373944 - RNA, 19 nt, Homo sapiens
  misc_RNA (1)...(19): siRNA sense strand
cagccucuuugcgucaaua

SEQ ID NO: 1373945 - RNA, 19 nt, Homo sapiens
  misc_RNA (1)...(19): siRNA sense strand
gaucgagaauggagaaaag

SEQ ID NO: 1373946 - RNA, 19 nt, Homo sapiens
  misc_RNA (1)...(19): siRNA sense strand
ccaccggccuguucucacu

SEQ ID NO: 1373947 - RNA, 19 nt, Homo sapiens
  misc_RNA (1)...(19): siRNA sense strand
cccaggaucucaaggacau

SEQ ID NO: 1373948 - RNA, 19 nt, Homo sapiens
  misc_RNA (1)...(19): siRNA sense strand
acuggacucucccucugua

SEQ ID NO: 1373949 - RNA, 19 nt, Homo sapiens
  misc_RNA (1)...(19): siRNA sense strand
agacgacaggcuucacuuu

SEQ ID NO: 1373950 - RNA, 19 nt, Homo sapiens
  misc_RNA (1)...(19): siRNA sense strand
acaggcggguucacguuug

SEQ ID NO: 1373951 - RNA, 19 nt, Homo sapiens
  misc_RNA (1)...(19): siRNA sense strand
gcuuccggaucaccuuuga

SEQ ID NO: 1373952 - RNA, 19 nt, Homo sapiens
  misc_RNA (1)...(19): siRNA sense strand
ugcaguggaucgaccagaa

SEQ ID NO: 1373953 - RNA, 19 nt, Homo sapiens
  misc_RNA (1)...(19): siRNA sense strand
cuggagagccugaucaaca

SEQ ID NO: 1373954 - RNA, 19 nt, Homo sapiens
  misc_RNA (1)...(19): siRNA sense strand
ggcacuggaggguuuaauu

SEQ ID NO: 1373955 - RNA, 19 nt, Homo sapiens
  misc_RNA (1)...(19): siRNA sense strand
aauggagccuggagcuaga

SEQ ID NO: 1373956 - RNA, 19 nt, Homo sapiens
  misc_RNA (1)...(19): siRNA sense strand
gcugaucgagaauggagaa

SEQ ID NO: 1373957 - RNA, 19 nt, Homo sapiens
  misc_RNA (1)...(19): siRNA sense strand
ugagcccacuggaggaguu

SEQ ID NO: 1373958 - RNA, 19 nt, Homo sapiens
  misc_RNA (1)...(19): siRNA sense strand
caucuggaggcuucucauu

SEQ ID NO: 1373959 - RNA, 19 nt, Homo sapiens
  misc_RNA (1)...(19): siRNA sense strand
cagcagcaaccucacuaau

SEQ ID NO: 1373960 - RNA, 19 nt, Homo sapiens
  misc_RNA (1)...(19): siRNA sense strand
gcagagcgggaccaucuac

SEQ ID NO: 1373961 - RNA, 19 nt, Homo sapiens
  misc_RNA (1)...(19): siRNA sense strand
accaggagcucgacuucau

SEQ ID NO: 1373962 - RNA, 19 nt, Homo sapiens
  misc_RNA (1)...(19): siRNA sense strand
ggaacagcgacucuugcuu

SEQ ID NO: 1373963 - RNA, 19 nt, Homo sapiens
  misc_RNA (1)...(19): siRNA sense strand
ggcagcagcaaccucacua

SEQ ID NO: 1373964 - RNA, 19 nt, Homo sapiens
  misc_RNA (1)...(19): siRNA sense strand
gcaccuccacaacaacauc

SEQ ID NO: 1373965 - RNA, 19 nt, Homo sapiens
  misc_RNA (1)...(19): siRNA sense strand
ucugcaagauccucaaugc

SEQ ID NO: 1373966 - RNA, 19 nt, Homo sapiens
  misc_RNA (1)...(19): siRNA sense strand
gagagccugaucaacaaau

SEQ ID NO: 1373967 - RNA, 19 nt, Homo sapiens
  misc_RNA (1)...(19): siRNA sense strand
ccaccggcuuuguguuugg

SEQ ID NO: 1373968 - RNA, 19 nt, Homo sapiens
  misc_RNA (1)...(19): siRNA sense strand
agagccugaucaacaaaug

SEQ ID NO: 1373969 - RNA, 19 nt, Homo sapiens
  misc_RNA (1)...(19): siRNA sense strand
cuacaggcggguucacguu

SEQ ID NO: 1373970 - RNA, 19 nt, Homo sapiens
  misc_RNA (1)...(19): siRNA sense strand
caccggcuuugccuugaau

SEQ ID NO: 1373971 - RNA, 19 nt, Homo sapiens
  misc_RNA (1)...(19): siRNA sense strand
cagccaccaucaccaguac

SEQ ID NO: 1373972 - RNA, 19 nt, Homo sapiens
  misc_RNA (1)...(19): siRNA sense strand
ccacagcaggugccacaca

SEQ ID NO: 1373973 - RNA, 19 nt, Homo sapiens
  misc_RNA (1)...(19): siRNA sense strand
acccuccgguuucaacauu

SEQ ID NO: 1373974 - RNA, 19 nt, Homo sapiens
  misc_RNA (1)...(19): siRNA sense strand
gagcgcagcuuccggauca

SEQ ID NO: 1373975 - RNA, 19 nt, Homo sapiens
  misc_RNA (1)...(19): siRNA sense strand
caaccucacuaaugccaua

SEQ ID NO: 1373976 - RNA, 19 nt, Homo sapiens
  misc_RNA (1)...(19): siRNA sense strand
gcacuggaggguuuaauuu

SEQ ID NO: 1373977 - RNA, 19 nt, Homo sapiens
  misc_RNA (1)...(19): siRNA sense strand
gcagcaaccucacuaaugc

SEQ ID NO: 1373978 - RNA, 19 nt, Homo sapiens
  misc_RNA (1)...(19): siRNA sense strand
ccuacaagcuggcugagaa

SEQ ID NO: 1373979 - RNA, 19 nt, Homo sapiens
  misc_RNA (1)...(19): siRNA sense strand
gcaacaaccacaccugcua

SEQ ID NO: 1373980 - RNA, 19 nt, Homo sapiens
  misc_RNA (1)...(19): siRNA sense strand
ggcuuugccuugaauuuaa

SEQ ID NO: 1373981 - RNA, 19 nt, Homo sapiens
  misc_RNA (1)...(19): siRNA sense strand
gagcagagcgggaccaucu

SEQ ID NO: 1373982 - RNA, 19 nt, Homo sapiens
  misc_RNA (1)...(19): siRNA sense strand
gcacgcugaucgagaaugg

SEQ ID NO: 1373983 - RNA, 19 nt, Homo sapiens
  misc_RNA (1)...(19): siRNA sense strand
gcaaagacggcaacaacca

SEQ ID NO: 1373984 - RNA, 19 nt, Homo sapiens
  misc_RNA (1)...(19): siRNA sense strand
uggagagccugaucaacaa

SEQ ID NO: 1373985 - RNA, 19 nt, Homo sapiens
  misc_RNA (1)...(19): siRNA sense strand
caagcuggcugagaacauc

SEQ ID NO: 1373986 - RNA, 19 nt, Homo sapiens
  misc_RNA (1)...(19): siRNA sense strand
ucuggaggcuucucauuca

SEQ ID NO: 1373987 - RNA, 19 nt, Homo sapiens
  misc_RNA (1)...(19): siRNA sense strand
gcuuugccuugaauuuaaa

SEQ ID NO: 1373988 - RNA, 19 nt, Homo sapiens
  misc_RNA (1)...(19): siRNA sense strand
cggcuuugccuugaauuua

SEQ ID NO: 1373989 - RNA, 19 nt, Homo sapiens
  misc_RNA (1)...(19): siRNA sense strand
uggaggaguuggucaagga

SEQ ID NO: 1373990 - RNA, 19 nt, Homo sapiens
  misc_RNA (1)...(19): siRNA sense strand
gcagcagcaaccucacuaa

SEQ ID NO: 1373991 - RNA, 19 nt, Homo sapiens
  misc_RNA (1)...(19): siRNA sense strand
caacugcuccaaccucauc

SEQ ID NO: 1373992 - RNA, 19 nt, Homo sapiens
  misc_RNA (1)...(19): siRNA sense strand
ccggaucaccuuugacuga

SEQ ID NO: 1373993 - RNA, 19 nt, Homo sapiens
  misc_RNA (1)...(19): siRNA sense strand
cagcagcaccaccggcuuu

SEQ ID NO: 1373994 - RNA, 19 nt, Homo sapiens
  misc_RNA (1)...(19): siRNA sense strand
uggaggaggugaccaaggu

SEQ ID NO: 1373995 - RNA, 19 nt, Homo sapiens
  misc_RNA (1)...(19): siRNA sense strand
gauccucaaugcgcacaug

SEQ ID NO: 1373996 - RNA, 19 nt, Homo sapiens
  misc_RNA (1)...(19): siRNA sense strand
ggaccaggagcucgacuuc

SEQ ID NO: 1373997 - RNA, 19 nt, Homo sapiens
  misc_RNA (1)...(19): siRNA sense strand
ggaacuggauuuucuuugg

SEQ ID NO: 1373998 - RNA, 19 nt, Homo sapiens
  misc_RNA (1)...(19): siRNA sense strand
gcacccaccggcuuugugu

SEQ ID NO: 1373999 - RNA, 19 nt, Homo sapiens
  misc_RNA (1)...(19): siRNA sense strand
ggagagccugaucaacaaa

SEQ ID NO: 1374000 - RNA, 19 nt, Homo sapiens
  misc_RNA (1)...(19): siRNA sense strand
caaauggagccuggagcua

SEQ ID NO: 1374001 - RNA, 19 nt, Homo sapiens
  misc_RNA (1)...(19): siRNA sense strand
ccaccggcuuugccuugaa

SEQ ID NO: 1374002 - RNA, 19 nt, Homo sapiens
  misc_RNA (1)...(19): siRNA sense strand
cagccucuuugcgucaaua

SEQ ID NO: 1374003 - RNA, 19 nt, Homo sapiens
  misc_RNA (1)...(19): siRNA sense strand
gaucgagaauggagaaaag

SEQ ID NO: 1374004 - RNA, 19 nt, Homo sapiens
  misc_RNA (1)...(19): siRNA sense strand
ccaccggccuguucucacu

SEQ ID NO: 1374005 - RNA, 19 nt, Homo sapiens
  misc_RNA (1)...(19): siRNA sense strand
cccaggaucucaaggacau

SEQ ID NO: 1374006 - RNA, 19 nt, Homo sapiens
  misc_RNA (1)...(19): siRNA sense strand
acuggacucucccucugua

SEQ ID NO: 1374007 - RNA, 19 nt, Homo sapiens
  misc_RNA (1)...(19): siRNA sense strand
agacgacaggcuucacuuu

SEQ ID NO: 1374008 - RNA, 19 nt, Homo sapiens
  misc_RNA (1)...(19): siRNA sense strand
acaggcggguucacguuug

SEQ ID NO: 1374009 - RNA, 19 nt, Homo sapiens
  misc_RNA (1)...(19): siRNA sense strand
gcuuccggaucaccuuuga

SEQ ID NO: 1374010 - RNA, 19 nt, Homo sapiens
  misc_RNA (1)...(19): siRNA sense strand
ugcaguggaucgaccagaa

SEQ ID NO: 1374011 - RNA, 19 nt, Homo sapiens
  misc_RNA (1)...(19): siRNA sense strand
cuggagagccugaucaaca

SEQ ID NO: 1374012 - RNA, 19 nt, Homo sapiens
  misc_RNA (1)...(19): siRNA sense strand
ggcacuggaggguuuaauu

SEQ ID NO: 1374013 - RNA, 19 nt, Homo sapiens
  misc_RNA (1)...(19): siRNA sense strand
aauggagccuggagcuaga

SEQ ID NO: 1374014 - RNA, 19 nt, Homo sapiens
  misc_RNA (1)...(19): siRNA sense strand
gcugaucgagaauggagaa

SEQ ID NO: 1374015 - RNA, 19 nt, Homo sapiens
  misc_RNA (1)...(19): siRNA sense strand
ugagcccacuggaggaguu

SEQ ID NO: 1374016 - RNA, 19 nt, Homo sapiens
  misc_RNA (1)...(19): siRNA sense strand
caucuggaggcuucucauu

SEQ ID NO: 1374017 - RNA, 19 nt, Homo sapiens
  misc_RNA (1)...(19): siRNA sense strand
cagcagcaaccucacuaau

SEQ ID NO: 1374018 - RNA, 19 nt, Homo sapiens
  misc_RNA (1)...(19): siRNA sense strand
gcagagcgggaccaucuac

SEQ ID NO: 1374019 - RNA, 19 nt, Homo sapiens
  misc_RNA (1)...(19): siRNA sense strand
accaggagcucgacuucau

SEQ ID NO: 1374020 - RNA, 19 nt, Homo sapiens
  misc_RNA (1)...(19): siRNA sense strand
ggaacagcgacucuugcuu

SEQ ID NO: 1374021 - RNA, 19 nt, Homo sapiens
  misc_RNA (1)...(19): siRNA sense strand
ggcagcagcaaccucacua

SEQ ID NO: 1374022 - RNA, 19 nt, Homo sapiens
  misc_RNA (1)...(19): siRNA sense strand
gcaccuccacaacaacauc

SEQ ID NO: 1374023 - RNA, 19 nt, Homo sapiens
  misc_RNA (1)...(19): siRNA sense strand
ucugcaagauccucaaugc

SEQ ID NO: 1374024 - RNA, 19 nt, Homo sapiens
  misc_RNA (1)...(19): siRNA sense strand
gagagccugaucaacaaau

SEQ ID NO: 1374025 - RNA, 19 nt, Homo sapiens
  misc_RNA (1)...(19): siRNA sense strand
ccaccggcuuuguguuugg

SEQ ID NO: 1374026 - RNA, 19 nt, Homo sapiens
  misc_RNA (1)...(19): siRNA sense strand
agagccugaucaacaaaug

SEQ ID NO: 1374027 - RNA, 19 nt, Homo sapiens
  misc_RNA (1)...(19): siRNA sense strand
cuacaggcggguucacguu

SEQ ID NO: 1374028 - RNA, 19 nt, Homo sapiens
  misc_RNA (1)...(19): siRNA sense strand
caccggcuuugccuugaau

SEQ ID NO: 1374029 - RNA, 19 nt, Homo sapiens
  misc_RNA (1)...(19): siRNA sense strand
cagccaccaucaccaguac

SEQ ID NO: 1374030 - RNA, 19 nt, Homo sapiens
  misc_RNA (1)...(19): siRNA sense strand
ccacagcaggugccacaca

SEQ ID NO: 1374031 - RNA, 19 nt, Homo sapiens
  misc_RNA (1)...(19): siRNA sense strand
acccuccgguuucaacauu

SEQ ID NO: 1374032 - RNA, 19 nt, Homo sapiens
  misc_RNA (1)...(19): siRNA sense strand
gagcgcagcuuccggauca

SEQ ID NO: 1374033 - RNA, 19 nt, Homo sapiens
  misc_RNA (1)...(19): siRNA sense strand
caaccucacuaaugccaua

SEQ ID NO: 1374034 - RNA, 19 nt, Homo sapiens
  misc_RNA (1)...(19): siRNA sense strand
gcacuggaggguuuaauuu

SEQ ID NO: 1374035 - RNA, 19 nt, Homo sapiens
  misc_RNA (1)...(19): siRNA sense strand
gcagcaaccucacuaaugc

SEQ ID NO: 1374036 - RNA, 19 nt, Homo sapiens
  misc_RNA (1)...(19): siRNA sense strand
ccuacaagcuggcugagaa

SEQ ID NO: 1374037 - RNA, 19 nt, Homo sapiens
  misc_RNA (1)...(19): siRNA sense strand
gcaacaaccacaccugcua

SEQ ID NO: 1374038 - RNA, 19 nt, Homo sapiens
  misc_RNA (1)...(19): siRNA sense strand
ggcuuugccuugaauuuaa

SEQ ID NO: 1374039 - RNA, 19 nt, Homo sapiens
  misc_RNA (1)...(19): siRNA sense strand
gagcagagcgggaccaucu

SEQ ID NO: 1374040 - RNA, 19 nt, Homo sapiens
  misc_RNA (1)...(19): siRNA sense strand
gcacgcugaucgagaaugg

SEQ ID NO: 1374041 - RNA, 19 nt, Homo sapiens
  misc_RNA (1)...(19): siRNA sense strand
gcaaagacggcaacaacca

SEQ ID NO: 1374042 - RNA, 19 nt, Homo sapiens
  misc_RNA (1)...(19): siRNA sense strand
uggagagccugaucaacaa

SEQ ID NO: 1374043 - RNA, 19 nt, Homo sapiens
  misc_RNA (1)...(19): siRNA sense strand
caagcuggcugagaacauc

SEQ ID NO: 1374044 - RNA, 19 nt, Homo sapiens
  misc_RNA (1)...(19): siRNA sense strand
ucuggaggcuucucauuca

SEQ ID NO: 1374045 - RNA, 19 nt, Homo sapiens
  misc_RNA (1)...(19): siRNA sense strand
gcuuugccuugaauuuaaa

SEQ ID NO: 1374046 - RNA, 19 nt, Homo sapiens
  misc_RNA (1)...(19): siRNA sense strand
cggcuuugccuugaauuua

SEQ ID NO: 1374047 - RNA, 19 nt, Homo sapiens
  misc_RNA (1)...(19): siRNA sense strand
uggaggaguuggucaagga

SEQ ID NO: 1374048 - RNA, 19 nt, Homo sapiens
  misc_RNA (1)...(19): siRNA sense strand
gcagcagcaaccucacuaa

SEQ ID NO: 1374049 - RNA, 19 nt, Homo sapiens
  misc_RNA (1)...(19): siRNA sense strand
caacugcuccaaccucauc

SEQ ID NO: 1374050 - RNA, 19 nt, Homo sapiens
  misc_RNA (1)...(19): siRNA sense strand
ccggaucaccuuugacuga

SEQ ID NO: 1374051 - RNA, 19 nt, Homo sapiens
  misc_RNA (1)...(19): siRNA sense strand
cagcagcaccaccggcuuu

SEQ ID NO: 1374052 - RNA, 19 nt, Homo sapiens
  misc_RNA (1)...(19): siRNA sense strand
uggaggaggugaccaaggu

SEQ ID NO: 1374053 - RNA, 19 nt, Homo sapiens
  misc_RNA (1)...(19): siRNA sense strand
gauccucaaugcgcacaug

SEQ ID NO: 1374054 - RNA, 19 nt, Homo sapiens
  misc_RNA (1)...(19): siRNA sense strand
ggaccaggagcucgacuuc

SEQ ID NO: 1374055 - RNA, 19 nt, Homo sapiens
  misc_RNA (1)...(19): siRNA sense strand
ggaacuggauuuucuuugg

SEQ ID NO: 1374056 - RNA, 19 nt, Homo sapiens
  misc_RNA (1)...(19): siRNA sense strand
gcacccaccggcuuugugu

SEQ ID NO: 1374057 - RNA, 19 nt, Homo sapiens
  misc_RNA (1)...(19): siRNA sense strand
ggagagccugaucaacaaa

SEQ ID NO: 1374058 - RNA, 19 nt, Homo sapiens
  misc_RNA (1)...(19): siRNA sense strand
caaauggagccuggagcua

SEQ ID NO: 1374059 - RNA, 19 nt, Homo sapiens
  misc_RNA (1)...(19): siRNA sense strand
ccaccggcuuugccuugaa

SEQ ID NO: 1374060 - RNA, 19 nt, Homo sapiens
  misc_RNA (1)...(19): siRNA sense strand
cagccucuuugcgucaaua

SEQ ID NO: 1374061 - RNA, 19 nt, Homo sapiens
  misc_RNA (1)...(19): siRNA sense strand
gaucgagaauggagaaaag

SEQ ID NO: 1374062 - RNA, 19 nt, Homo sapiens
  misc_RNA (1)...(19): siRNA sense strand
ccaccggccuguucucacu

SEQ ID NO: 1374063 - RNA, 19 nt, Homo sapiens
  misc_RNA (1)...(19): siRNA sense strand
cccaggaucucaaggacau

SEQ ID NO: 1374064 - RNA, 19 nt, Homo sapiens
  misc_RNA (1)...(19): siRNA sense strand
acuggacucucccucugua

SEQ ID NO: 1374065 - RNA, 19 nt, Homo sapiens
  misc_RNA (1)...(19): siRNA sense strand
agacgacaggcuucacuuu

SEQ ID NO: 1374066 - RNA, 19 nt, Homo sapiens
  misc_RNA (1)...(19): siRNA sense strand
acaggcggguucacguuug

SEQ ID NO: 1374067 - RNA, 19 nt, Homo sapiens
  misc_RNA (1)...(19): siRNA sense strand
gcuuccggaucaccuuuga

SEQ ID NO: 1374068 - RNA, 19 nt, Homo sapiens
  misc_RNA (1)...(19): siRNA sense strand
ugcaguggaucgaccagaa

SEQ ID NO: 1374069 - RNA, 19 nt, Homo sapiens
  misc_RNA (1)...(19): siRNA sense strand
cuggagagccugaucaaca

SEQ ID NO: 1374070 - RNA, 19 nt, Homo sapiens
  misc_RNA (1)...(19): siRNA sense strand
ggcacuggaggguuuaauu

SEQ ID NO: 1374071 - RNA, 19 nt, Homo sapiens
  misc_RNA (1)...(19): siRNA sense strand
aauggagccuggagcuaga

SEQ ID NO: 1374072 - RNA, 19 nt, Homo sapiens
  misc_RNA (1)...(19): siRNA sense strand
gcugaucgagaauggagaa

SEQ ID NO: 1374073 - RNA, 19 nt, Homo sapiens
  misc_RNA (1)...(19): siRNA sense strand
ugagcccacuggaggaguu

SEQ ID NO: 1374074 - RNA, 19 nt, Homo sapiens
  misc_RNA (1)...(19): siRNA sense strand
caucuggaggcuucucauu

SEQ ID NO: 1374075 - RNA, 19 nt, Homo sapiens
  misc_RNA (1)...(19): siRNA sense strand
cagcagcaaccucacuaau

SEQ ID NO: 1374076 - RNA, 19 nt, Homo sapiens
  misc_RNA (1)...(19): siRNA sense strand
gcagagcgggaccaucuac

SEQ ID NO: 1374077 - RNA, 19 nt, Homo sapiens
  misc_RNA (1)...(19): siRNA sense strand
accaggagcucgacuucau

SEQ ID NO: 1374078 - RNA, 19 nt, Homo sapiens
  misc_RNA (1)...(19): siRNA sense strand
ggaacagcgacucuugcuu

SEQ ID NO: 1374079 - RNA, 19 nt, Homo sapiens
  misc_RNA (1)...(19): siRNA sense strand
ggcagcagcaaccucacua

SEQ ID NO: 1374080 - RNA, 19 nt, Homo sapiens
  misc_RNA (1)...(19): siRNA sense strand
gcaccuccacaacaacauc

SEQ ID NO: 1374081 - RNA, 19 nt, Homo sapiens
  misc_RNA (1)...(19): siRNA sense strand
ucugcaagauccucaaugc

SEQ ID NO: 1374082 - RNA, 19 nt, Homo sapiens
  misc_RNA (1)...(19): siRNA sense strand
gagagccugaucaacaaau

SEQ ID NO: 1374083 - RNA, 19 nt, Homo sapiens
  misc_RNA (1)...(19): siRNA sense strand
ccaccggcuuuguguuugg

SEQ ID NO: 1374084 - RNA, 19 nt, Homo sapiens
  misc_RNA (1)...(19): siRNA sense strand
agagccugaucaacaaaug

SEQ ID NO: 1374085 - RNA, 19 nt, Homo sapiens
  misc_RNA (1)...(19): siRNA sense strand
cuacaggcggguucacguu

SEQ ID NO: 1374086 - RNA, 19 nt, Homo sapiens
  misc_RNA (1)...(19): siRNA sense strand
caccggcuuugccuugaau

SEQ ID NO: 1374087 - RNA, 19 nt, Homo sapiens
  misc_RNA (1)...(19): siRNA sense strand
cagccaccaucaccaguac

SEQ ID NO: 1374088 - RNA, 19 nt, Homo sapiens
  misc_RNA (1)...(19): siRNA sense strand
ccacagcaggugccacaca

SEQ ID NO: 1374089 - RNA, 19 nt, Homo sapiens
  misc_RNA (1)...(19): siRNA sense strand
acccuccgguuucaacauu

SEQ ID NO: 1374090 - RNA, 19 nt, Homo sapiens
  misc_RNA (1)...(19): siRNA sense strand
gagcgcagcuuccggauca

SEQ ID NO: 1374091 - RNA, 19 nt, Homo sapiens
  misc_RNA (1)...(19): siRNA sense strand
caaccucacuaaugccaua

SEQ ID NO: 1374092 - RNA, 19 nt, Homo sapiens
  misc_RNA (1)...(19): siRNA sense strand
gcacuggaggguuuaauuu

SEQ ID NO: 1374093 - RNA, 19 nt, Homo sapiens
  misc_RNA (1)...(19): siRNA sense strand
gcagcaaccucacuaaugc

SEQ ID NO: 1374094 - RNA, 19 nt, Homo sapiens
  misc_RNA (1)...(19): siRNA sense strand
ccuacaagcuggcugagaa

SEQ ID NO: 1374095 - RNA, 19 nt, Homo sapiens
  misc_RNA (1)...(19): siRNA sense strand
gcaacaaccacaccugcua

SEQ ID NO: 1374096 - RNA, 19 nt, Homo sapiens
  misc_RNA (1)...(19): siRNA sense strand
ggcuuugccuugaauuuaa

SEQ ID NO: 1374097 - RNA, 19 nt, Homo sapiens
  misc_RNA (1)...(19): siRNA sense strand
gagcagagcgggaccaucu

SEQ ID NO: 1374098 - RNA, 19 nt, Homo sapiens
  misc_RNA (1)...(19): siRNA sense strand
gcacgcugaucgagaaugg

SEQ ID NO: 1374099 - RNA, 19 nt, Homo sapiens
  misc_RNA (1)...(19): siRNA sense strand
gcaaagacggcaacaacca

SEQ ID NO: 1374100 - RNA, 19 nt, Homo sapiens
  misc_RNA (1)...(19): siRNA sense strand
uggagagccugaucaacaa

SEQ ID NO: 1374101 - RNA, 19 nt, Homo sapiens
  misc_RNA (1)...(19): siRNA sense strand
caagcuggcugagaacauc

SEQ ID NO: 1374102 - RNA, 19 nt, Homo sapiens
  misc_RNA (1)...(19): siRNA sense strand
ucuggaggcuucucauuca

SEQ ID NO: 1374103 - RNA, 19 nt, Homo sapiens
  misc_RNA (1)...(19): siRNA sense strand
gcuuugccuugaauuuaaa

SEQ ID NO: 1374104 - RNA, 19 nt, Homo sapiens
  misc_RNA (1)...(19): siRNA sense strand
cggcuuugccuugaauuua

SEQ ID NO: 1374105 - RNA, 19 nt, Homo sapiens
  misc_RNA (1)...(19): siRNA sense strand
uggaggaguuggucaagga

SEQ ID NO: 1374106 - RNA, 19 nt, Homo sapiens
  misc_RNA (1)...(19): siRNA sense strand
gcagcagcaaccucacuaa

SEQ ID NO: 1374107 - RNA, 19 nt, Homo sapiens
  misc_RNA (1)...(19): siRNA sense strand
caacugcuccaaccucauc

SEQ ID NO: 1374108 - RNA, 19 nt, Homo sapiens
  misc_RNA (1)...(19): siRNA sense strand
ccggaucaccuuugacuga

SEQ ID NO: 1374109 - RNA, 19 nt, Homo sapiens
  misc_RNA (1)...(19): siRNA sense strand
cagcagcaccaccggcuuu

SEQ ID NO: 1374110 - RNA, 19 nt, Homo sapiens
  misc_RNA (1)...(19): siRNA sense strand
uggaggaggugaccaaggu

SEQ ID NO: 1374111 - RNA, 19 nt, Homo sapiens
  misc_RNA (1)...(19): siRNA sense strand
gauccucaaugcgcacaug

SEQ ID NO: 1374112 - RNA, 19 nt, Homo sapiens
  misc_RNA (1)...(19): siRNA sense strand
ggaccaggagcucgacuuc

SEQ ID NO: 1374113 - RNA, 19 nt, Homo sapiens
  misc_RNA (1)...(19): siRNA sense strand
ggaacuggauuuucuuugg

SEQ ID NO: 1374114 - RNA, 19 nt, Homo sapiens
  misc_RNA (1)...(19): siRNA sense strand
gcacccaccggcuuugugu

SEQ ID NO: 1374115 - RNA, 19 nt, Homo sapiens
  misc_RNA (1)...(19): siRNA sense strand
ggagagccugaucaacaaa

SEQ ID NO: 1374116 - RNA, 19 nt, Homo sapiens
  misc_RNA (1)...(19): siRNA sense strand
caaauggagccuggagcua

SEQ ID NO: 1374117 - RNA, 19 nt, Homo sapiens
  misc_RNA (1)...(19): siRNA sense strand
ccaccggcuuugccuugaa

SEQ ID NO: 1374118 - RNA, 19 nt, Homo sapiens
  misc_RNA (1)...(19): siRNA sense strand
cagccucuuugcgucaaua

SEQ ID NO: 1374119 - RNA, 19 nt, Homo sapiens
  misc_RNA (1)...(19): siRNA sense strand
gaucgagaauggagaaaag

SEQ ID NO: 1374120 - RNA, 19 nt, Homo sapiens
  misc_RNA (1)...(19): siRNA sense strand
ccaccggccuguucucacu

SEQ ID NO: 1374121 - RNA, 19 nt, Homo sapiens
  misc_RNA (1)...(19): siRNA sense strand
cccaggaucucaaggacau

SEQ ID NO: 1374122 - RNA, 19 nt, Homo sapiens
  misc_RNA (1)...(19): siRNA sense strand
acuggacucucccucugua

SEQ ID NO: 1374123 - RNA, 19 nt, Homo sapiens
  misc_RNA (1)...(19): siRNA sense strand
agacgacaggcuucacuuu

SEQ ID NO: 1374124 - RNA, 19 nt, Homo sapiens
  misc_RNA (1)...(19): siRNA sense strand
acaggcggguucacguuug

SEQ ID NO: 1374125 - RNA, 19 nt, Homo sapiens
  misc_RNA (1)...(19): siRNA sense strand
gcuuccggaucaccuuuga

SEQ ID NO: 1374126 - RNA, 19 nt, Homo sapiens
  misc_RNA (1)...(19): siRNA sense strand
ugcaguggaucgaccagaa

SEQ ID NO: 1374127 - RNA, 19 nt, Homo sapiens
  misc_RNA (1)...(19): siRNA sense strand
cuggagagccugaucaaca

SEQ ID NO: 1374128 - RNA, 19 nt, Homo sapiens
  misc_RNA (1)...(19): siRNA sense strand
ggcacuggaggguuuaauu

SEQ ID NO: 1374129 - RNA, 19 nt, Homo sapiens
  misc_RNA (1)...(19): siRNA sense strand
aauggagccuggagcuaga

SEQ ID NO: 1374130 - RNA, 19 nt, Homo sapiens
  misc_RNA (1)...(19): siRNA sense strand
gcugaucgagaauggagaa

SEQ ID NO: 1374131 - RNA, 19 nt, Homo sapiens
  misc_RNA (1)...(19): siRNA sense strand
ugagcccacuggaggaguu

SEQ ID NO: 1374132 - RNA, 19 nt, Homo sapiens
  misc_RNA (1)...(19): siRNA sense strand
caucuggaggcuucucauu

SEQ ID NO: 1374133 - RNA, 19 nt, Homo sapiens
  misc_RNA (1)...(19): siRNA sense strand
cagcagcaaccucacuaau

SEQ ID NO: 1374134 - RNA, 19 nt, Homo sapiens
  misc_RNA (1)...(19): siRNA sense strand
gcagagcgggaccaucuac

SEQ ID NO: 1374135 - RNA, 19 nt, Homo sapiens
  misc_RNA (1)...(19): siRNA sense strand
accaggagcucgacuucau

SEQ ID NO: 1374136 - RNA, 19 nt, Homo sapiens
  misc_RNA (1)...(19): siRNA sense strand
ggaacagcgacucuugcuu

SEQ ID NO: 1374137 - RNA, 19 nt, Homo sapiens
  misc_RNA (1)...(19): siRNA sense strand
ggcagcagcaaccucacua

SEQ ID NO: 1374138 - RNA, 19 nt, Homo sapiens
  misc_RNA (1)...(19): siRNA sense strand
gcaccuccacaacaacauc

SEQ ID NO: 1374139 - RNA, 19 nt, Homo sapiens
  misc_RNA (1)...(19): siRNA sense strand
ucugcaagauccucaaugc

SEQ ID NO: 1374140 - RNA, 19 nt, Homo sapiens
  misc_RNA (1)...(19): siRNA sense strand
gagagccugaucaacaaau

SEQ ID NO: 1374141 - RNA, 19 nt, Homo sapiens
  misc_RNA (1)...(19): siRNA sense strand
ccaccggcuuuguguuugg

SEQ ID NO: 1374142 - RNA, 19 nt, Homo sapiens
  misc_RNA (1)...(19): siRNA sense strand
agagccugaucaacaaaug

SEQ ID NO: 1374143 - RNA, 19 nt, Homo sapiens
  misc_RNA (1)...(19): siRNA sense strand
cuacaggcggguucacguu

SEQ ID NO: 1374144 - RNA, 19 nt, Homo sapiens
  misc_RNA (1)...(19): siRNA sense strand
caccggcuuugccuugaau

SEQ ID NO: 1374145 - RNA, 19 nt, Homo sapiens
  misc_RNA (1)...(19): siRNA sense strand
cagccaccaucaccaguac

SEQ ID NO: 1374146 - RNA, 19 nt, Homo sapiens
  misc_RNA (1)...(19): siRNA sense strand
ccacagcaggugccacaca

SEQ ID NO: 1374147 - RNA, 19 nt, Homo sapiens
  misc_RNA (1)...(19): siRNA sense strand
acccuccgguuucaacauu

SEQ ID NO: 1374148 - RNA, 19 nt, Homo sapiens
  misc_RNA (1)...(19): siRNA sense strand
gagcgcagcuuccggauca

SEQ ID NO: 1374149 - RNA, 19 nt, Homo sapiens
  misc_RNA (1)...(19): siRNA sense strand
caaccucacuaaugccaua

SEQ ID NO: 1374150 - RNA, 19 nt, Homo sapiens
  misc_RNA (1)...(19): siRNA sense strand
gcacuggaggguuuaauuu

SEQ ID NO: 1374151 - RNA, 19 nt, Homo sapiens
  misc_RNA (1)...(19): siRNA sense strand
gcagcaaccucacuaaugc

SEQ ID NO: 1374152 - RNA, 19 nt, Homo sapiens
  misc_RNA (1)...(19): siRNA sense strand
ccuacaagcuggcugagaa

SEQ ID NO: 1374153 - RNA, 19 nt, Homo sapiens
  misc_RNA (1)...(19): siRNA sense strand
gcaacaaccacaccugcua

SEQ ID NO: 1374154 - RNA, 19 nt, Homo sapiens
  misc_RNA (1)...(19): siRNA sense strand
ggcuuugccuugaauuuaa

SEQ ID NO: 1374155 - RNA, 19 nt, Homo sapiens
  misc_RNA (1)...(19): siRNA sense strand
gagcagagcgggaccaucu

SEQ ID NO: 1374156 - RNA, 19 nt, Homo sapiens
  misc_RNA (1)...(19): siRNA sense strand
gcacgcugaucgagaaugg

SEQ ID NO: 1374157 - RNA, 19 nt, Homo sapiens
  misc_RNA (1)...(19): siRNA sense strand
gcaaagacggcaacaacca

SEQ ID NO: 1374158 - RNA, 19 nt, Homo sapiens
  misc_RNA (1)...(19): siRNA sense strand
uggagagccugaucaacaa

SEQ ID NO: 1374159 - RNA, 19 nt, Homo sapiens
  misc_RNA (1)...(19): siRNA sense strand
caagcuggcugagaacauc

SEQ ID NO: 1374160 - RNA, 19 nt, Homo sapiens
  misc_RNA (1)...(19): siRNA sense strand
ucuggaggcuucucauuca

SEQ ID NO: 1374161 - RNA, 19 nt, Homo sapiens
  misc_RNA (1)...(19): siRNA sense strand
gcuuugccuugaauuuaaa

SEQ ID NO: 1374162 - RNA, 19 nt, Homo sapiens
  misc_RNA (1)...(19): siRNA sense strand
cggcuuugccuugaauuua

SEQ ID NO: 1374163 - RNA, 19 nt, Homo sapiens
  misc_RNA (1)...(19): siRNA sense strand
uggaggaguuggucaagga

SEQ ID NO: 1374164 - RNA, 19 nt, Homo sapiens
  misc_RNA (1)...(19): siRNA sense strand
gcagcagcaaccucacuaa

SEQ ID NO: 1374165 - RNA, 19 nt, Homo sapiens
  misc_RNA (1)...(19): siRNA sense strand
caacugcuccaaccucauc

SEQ ID NO: 1374166 - RNA, 19 nt, Homo sapiens
  misc_RNA (1)...(19): siRNA sense strand
ccggaucaccuuugacuga

SEQ ID NO: 1374167 - RNA, 19 nt, Homo sapiens
  misc_RNA (1)...(19): siRNA sense strand
cagcagcaccaccggcuuu

SEQ ID NO: 1374168 - RNA, 19 nt, Homo sapiens
  misc_RNA (1)...(19): siRNA sense strand
uggaggaggugaccaaggu

SEQ ID NO: 1374169 - RNA, 19 nt, Homo sapiens
  misc_RNA (1)...(19): siRNA sense strand
gauccucaaugcgcacaug

SEQ ID NO: 1374170 - RNA, 19 nt, Homo sapiens
  misc_RNA (1)...(19): siRNA sense strand
ggaccaggagcucgacuuc

SEQ ID NO: 1374171 - RNA, 19 nt, Homo sapiens
  misc_RNA (1)...(19): siRNA sense strand
ggaacuggauuuucuuugg

SEQ ID NO: 1374172 - RNA, 19 nt, Homo sapiens
  misc_RNA (1)...(19): siRNA sense strand
gcacccaccggcuuugugu

SEQ ID NO: 1374173 - RNA, 19 nt, Homo sapiens
  misc_RNA (1)...(19): siRNA sense strand
ggagagccugaucaacaaa

SEQ ID NO: 1374174 - RNA, 19 nt, Homo sapiens
  misc_RNA (1)...(19): siRNA sense strand
caaauggagccuggagcua

SEQ ID NO: 1374175 - RNA, 19 nt, Homo sapiens
  misc_RNA (1)...(19): siRNA sense strand
ccaccggcuuugccuugaa

SEQ ID NO: 1374176 - RNA, 19 nt, Homo sapiens
  misc_RNA (1)...(19): siRNA sense strand
cagccucuuugcgucaaua

SEQ ID NO: 1374177 - RNA, 19 nt, Homo sapiens
  misc_RNA (1)...(19): siRNA sense strand
gaucgagaauggagaaaag

SEQ ID NO: 1374178 - RNA, 19 nt, Homo sapiens
  misc_RNA (1)...(19): siRNA sense strand
ccaccggccuguucucacu

SEQ ID NO: 1374179 - RNA, 19 nt, Homo sapiens
  misc_RNA (1)...(19): siRNA sense strand
cccaggaucucaaggacau

SEQ ID NO: 1374180 - RNA, 19 nt, Homo sapiens
  misc_RNA (1)...(19): siRNA sense strand
acuggacucucccucugua

SEQ ID NO: 1374181 - RNA, 19 nt, Homo sapiens
  misc_RNA (1)...(19): siRNA sense strand
agacgacaggcuucacuuu

SEQ ID NO: 1374182 - RNA, 19 nt, Homo sapiens
  misc_RNA (1)...(19): siRNA sense strand
acaggcggguucacguuug

SEQ ID NO: 1374183 - RNA, 19 nt, Homo sapiens
  misc_RNA (1)...(19): siRNA sense strand
gcuuccggaucaccuuuga

SEQ ID NO: 1374184 - RNA, 19 nt, Homo sapiens
  misc_RNA (1)...(19): siRNA sense strand
ugcaguggaucgaccagaa

SEQ ID NO: 1374185 - RNA, 19 nt, Homo sapiens
  misc_RNA (1)...(19): siRNA sense strand
cuggagagccugaucaaca

SEQ ID NO: 1374186 - RNA, 19 nt, Homo sapiens
  misc_RNA (1)...(19): siRNA sense strand
ggcacuggaggguuuaauu

SEQ ID NO: 1374187 - RNA, 19 nt, Homo sapiens
  misc_RNA (1)...(19): siRNA sense strand
aauggagccuggagcuaga

SEQ ID NO: 1374188 - RNA, 19 nt, Homo sapiens
  misc_RNA (1)...(19): siRNA sense strand
gcugaucgagaauggagaa

SEQ ID NO: 1374189 - RNA, 19 nt, Homo sapiens
  misc_RNA (1)...(19): siRNA sense strand
ugagcccacuggaggaguu

SEQ ID NO: 1374190 - RNA, 19 nt, Homo sapiens
  misc_RNA (1)...(19): siRNA sense strand
caucuggaggcuucucauu

SEQ ID NO: 1374191 - RNA, 19 nt, Homo sapiens
  misc_RNA (1)...(19): siRNA sense strand
cagcagcaaccucacuaau

SEQ ID NO: 1374192 - RNA, 19 nt, Homo sapiens
  misc_RNA (1)...(19): siRNA sense strand
gcagagcgggaccaucuac

SEQ ID NO: 1374193 - RNA, 19 nt, Homo sapiens
  misc_RNA (1)...(19): siRNA sense strand
accaggagcucgacuucau

SEQ ID NO: 1374194 - RNA, 19 nt, Homo sapiens
  misc_RNA (1)...(19): siRNA sense strand
ggaacagcgacucuugcuu

SEQ ID NO: 1374195 - RNA, 19 nt, Homo sapiens
  misc_RNA (1)...(19): siRNA sense strand
ggcagcagcaaccucacua

SEQ ID NO: 1374196 - RNA, 19 nt, Homo sapiens
  misc_RNA (1)...(19): siRNA sense strand
gcaccuccacaacaacauc

SEQ ID NO: 1374197 - RNA, 19 nt, Homo sapiens
  misc_RNA (1)...(19): siRNA sense strand
ucugcaagauccucaaugc

SEQ ID NO: 1374198 - RNA, 19 nt, Homo sapiens
  misc_RNA (1)...(19): siRNA sense strand
gagagccugaucaacaaau

SEQ ID NO: 1374199 - RNA, 19 nt, Homo sapiens
  misc_RNA (1)...(19): siRNA sense strand
ccaccggcuuuguguuugg

SEQ ID NO: 1374200 - RNA, 19 nt, Homo sapiens
  misc_RNA (1)...(19): siRNA sense strand
agagccugaucaacaaaug

SEQ ID NO: 1374201 - RNA, 19 nt, Homo sapiens
  misc_RNA (1)...(19): siRNA sense strand
cuacaggcggguucacguu

SEQ ID NO: 1374202 - RNA, 19 nt, Homo sapiens
  misc_RNA (1)...(19): siRNA sense strand
caccggcuuugccuugaau

SEQ ID NO: 1374203 - RNA, 19 nt, Homo sapiens
  misc_RNA (1)...(19): siRNA sense strand
cagccaccaucaccaguac

SEQ ID NO: 1374204 - RNA, 19 nt, Homo sapiens
  misc_RNA (1)...(19): siRNA sense strand
ccacagcaggugccacaca

SEQ ID NO: 1374205 - RNA, 19 nt, Homo sapiens
  misc_RNA (1)...(19): siRNA sense strand
acccuccgguuucaacauu

SEQ ID NO: 1374206 - RNA, 19 nt, Homo sapiens
  misc_RNA (1)...(19): siRNA sense strand
gagcgcagcuuccggauca

SEQ ID NO: 1374207 - RNA, 19 nt, Homo sapiens
  misc_RNA (1)...(19): siRNA sense strand
caaccucacuaaugccaua

SEQ ID NO: 1374208 - RNA, 19 nt, Homo sapiens
  misc_RNA (1)...(19): siRNA sense strand
gcacuggaggguuuaauuu

SEQ ID NO: 1374209 - RNA, 19 nt, Homo sapiens
  misc_RNA (1)...(19): siRNA sense strand
gcagcaaccucacuaaugc

SEQ ID NO: 1374210 - RNA, 19 nt, Homo sapiens
  misc_RNA (1)...(19): siRNA sense strand
ccuacaagcuggcugagaa

SEQ ID NO: 1374211 - RNA, 19 nt, Homo sapiens
  misc_RNA (1)...(19): siRNA sense strand
gcaacaaccacaccugcua

SEQ ID NO: 1374212 - RNA, 19 nt, Homo sapiens
  misc_RNA (1)...(19): siRNA sense strand
ggcuuugccuugaauuuaa

SEQ ID NO: 1374213 - RNA, 19 nt, Homo sapiens
  misc_RNA (1)...(19): siRNA sense strand
gagcagagcgggaccaucu

SEQ ID NO: 1374214 - RNA, 19 nt, Homo sapiens
  misc_RNA (1)...(19): siRNA sense strand
gcacgcugaucgagaaugg

SEQ ID NO: 1374215 - RNA, 19 nt, Homo sapiens
  misc_RNA (1)...(19): siRNA sense strand
gcaaagacggcaacaacca

SEQ ID NO: 1374216 - RNA, 19 nt, Homo sapiens
  misc_RNA (1)...(19): siRNA sense strand
uggagagccugaucaacaa

SEQ ID NO: 1374217 - RNA, 19 nt, Homo sapiens
  misc_RNA (1)...(19): siRNA sense strand
caagcuggcugagaacauc

SEQ ID NO: 1374218 - RNA, 19 nt, Homo sapiens
  misc_RNA (1)...(19): siRNA sense strand
ucuggaggcuucucauuca

SEQ ID NO: 1374219 - RNA, 19 nt, Homo sapiens
  misc_RNA (1)...(19): siRNA sense strand
gcuuugccuugaauuuaaa

SEQ ID NO: 1374220 - RNA, 19 nt, Homo sapiens
  misc_RNA (1)...(19): siRNA sense strand
cggcuuugccuugaauuua

SEQ ID NO: 1374221 - RNA, 19 nt, Homo sapiens
  misc_RNA (1)...(19): siRNA sense strand
uggaggaguuggucaagga

SEQ ID NO: 1374222 - RNA, 19 nt, Homo sapiens
  misc_RNA (1)...(19): siRNA sense strand
gcagcagcaaccucacuaa

SEQ ID NO: 1374223 - RNA, 19 nt, Homo sapiens
  misc_RNA (1)...(19): siRNA sense strand
caacugcuccaaccucauc

SEQ ID NO: 1374224 - RNA, 19 nt, Homo sapiens
  misc_RNA (1)...(19): siRNA sense strand
ccggaucaccuuugacuga

SEQ ID NO: 1374225 - RNA, 19 nt, Homo sapiens
  misc_RNA (1)...(19): siRNA sense strand
cagcagcaccaccggcuuu

SEQ ID NO: 1374226 - RNA, 19 nt, Homo sapiens
  misc_RNA (1)...(19): siRNA sense strand
uggaggaggugaccaaggu

SEQ ID NO: 1374227 - RNA, 19 nt, Homo sapiens
  misc_RNA (1)...(19): siRNA sense strand
gauccucaaugcgcacaug

SEQ ID NO: 1374228 - RNA, 19 nt, Homo sapiens
  misc_RNA (1)...(19): siRNA sense strand
ggaccaggagcucgacuuc

SEQ ID NO: 1374229 - RNA, 19 nt, Homo sapiens
  misc_RNA (1)...(19): siRNA sense strand
ggaacuggauuuucuuugg

SEQ ID NO: 1374230 - RNA, 19 nt, Homo sapiens
  misc_RNA (1)...(19): siRNA sense strand
gcacccaccggcuuugugu

SEQ ID NO: 1374231 - RNA, 19 nt, Homo sapiens
  misc_RNA (1)...(19): siRNA sense strand
ggagagccugaucaacaaa

SEQ ID NO: 1374232 - RNA, 19 nt, Homo sapiens
  misc_RNA (1)...(19): siRNA sense strand
caaauggagccuggagcua

SEQ ID NO: 1374233 - RNA, 19 nt, Homo sapiens
  misc_RNA (1)...(19): siRNA sense strand
ccaccggcuuugccuugaa

SEQ ID NO: 1374234 - RNA, 19 nt, Homo sapiens
  misc_RNA (1)...(19): siRNA sense strand
cagccucuuugcgucaaua

SEQ ID NO: 1374235 - RNA, 19 nt, Homo sapiens
  misc_RNA (1)...(19): siRNA sense strand
gaucgagaauggagaaaag

SEQ ID NO: 1374236 - RNA, 19 nt, Homo sapiens
  misc_RNA (1)...(19): siRNA sense strand
ccaccggccuguucucacu

SEQ ID NO: 1374237 - RNA, 19 nt, Homo sapiens
  misc_RNA (1)...(19): siRNA sense strand
cccaggaucucaaggacau

SEQ ID NO: 1374238 - RNA, 19 nt, Homo sapiens
  misc_RNA (1)...(19): siRNA sense strand
acuggacucucccucugua

SEQ ID NO: 1374239 - RNA, 19 nt, Homo sapiens
  misc_RNA (1)...(19): siRNA sense strand
agacgacaggcuucacuuu

SEQ ID NO: 1374240 - RNA, 19 nt, Homo sapiens
  misc_RNA (1)...(19): siRNA sense strand
acaggcggguucacguuug

SEQ ID NO: 1374241 - RNA, 19 nt, Homo sapiens
  misc_RNA (1)...(19): siRNA sense strand
gcuuccggaucaccuuuga

SEQ ID NO: 1374242 - RNA, 19 nt, Homo sapiens
  misc_RNA (1)...(19): siRNA sense strand
ugcaguggaucgaccagaa

SEQ ID NO: 1374243 - RNA, 19 nt, Homo sapiens
  misc_RNA (1)...(19): siRNA sense strand
cuggagagccugaucaaca

SEQ ID NO: 1374244 - RNA, 19 nt, Homo sapiens
  misc_RNA (1)...(19): siRNA sense strand
ggcacuggaggguuuaauu

SEQ ID NO: 1374245 - RNA, 19 nt, Homo sapiens
  misc_RNA (1)...(19): siRNA sense strand
aauggagccuggagcuaga

SEQ ID NO: 1374246 - RNA, 19 nt, Homo sapiens
  misc_RNA (1)...(19): siRNA sense strand
gcugaucgagaauggagaa

SEQ ID NO: 1374247 - RNA, 19 nt, Homo sapiens
  misc_RNA (1)...(19): siRNA sense strand
ugagcccacuggaggaguu

SEQ ID NO: 1374248 - RNA, 19 nt, Homo sapiens
  misc_RNA (1)...(19): siRNA sense strand
caucuggaggcuucucauu

SEQ ID NO: 1374249 - RNA, 19 nt, Homo sapiens
  misc_RNA (1)...(19): siRNA sense strand
cagcagcaaccucacuaau

SEQ ID NO: 1374250 - RNA, 19 nt, Homo sapiens
  misc_RNA (1)...(19): siRNA sense strand
gcagagcgggaccaucuac

SEQ ID NO: 1374251 - RNA, 19 nt, Homo sapiens
  misc_RNA (1)...(19): siRNA sense strand
accaggagcucgacuucau

SEQ ID NO: 1374252 - RNA, 19 nt, Homo sapiens
  misc_RNA (1)...(19): siRNA sense strand
ggaacagcgacucuugcuu

SEQ ID NO: 1374253 - RNA, 19 nt, Homo sapiens
  misc_RNA (1)...(19): siRNA sense strand
ggcagcagcaaccucacua

SEQ ID NO: 1374254 - RNA, 19 nt, Homo sapiens
  misc_RNA (1)...(19): siRNA sense strand
gcaccuccacaacaacauc

SEQ ID NO: 1374255 - RNA, 19 nt, Homo sapiens
  misc_RNA (1)...(19): siRNA sense strand
ucugcaagauccucaaugc

SEQ ID NO: 1374256 - RNA, 19 nt, Homo sapiens
  misc_RNA (1)...(19): siRNA sense strand
gagagccugaucaacaaau

SEQ ID NO: 1374257 - RNA, 19 nt, Homo sapiens
  misc_RNA (1)...(19): siRNA sense strand
ccaccggcuuuguguuugg

SEQ ID NO: 1374258 - RNA, 19 nt, Homo sapiens
  misc_RNA (1)...(19): siRNA sense strand
agagccugaucaacaaaug

SEQ ID NO: 1374259 - RNA, 19 nt, Homo sapiens
  misc_RNA (1)...(19): siRNA sense strand
cuacaggcggguucacguu

SEQ ID NO: 1374260 - RNA, 19 nt, Homo sapiens
  misc_RNA (1)...(19): siRNA sense strand
caccggcuuugccuugaau

SEQ ID NO: 1374261 - RNA, 19 nt, Homo sapiens
  misc_RNA (1)...(19): siRNA sense strand
cagccaccaucaccaguac

SEQ ID NO: 1374262 - RNA, 19 nt, Homo sapiens
  misc_RNA (1)...(19): siRNA sense strand
ccacagcaggugccacaca

SEQ ID NO: 1374263 - RNA, 19 nt, Homo sapiens
  misc_RNA (1)...(19): siRNA sense strand
acccuccgguuucaacauu

SEQ ID NO: 1374264 - RNA, 19 nt, Homo sapiens
  misc_RNA (1)...(19): siRNA sense strand
gcuaucguguggccacuuu

SEQ ID NO: 1374265 - RNA, 19 nt, Homo sapiens
  misc_RNA (1)...(19): siRNA sense strand
gcuaucguguggccacuuu

SEQ ID NO: 1374266 - RNA, 19 nt, Homo sapiens
  misc_RNA (1)...(19): siRNA sense strand
gagcugauauuucuaugua

SEQ ID NO: 1374267 - RNA, 19 nt, Homo sapiens
  misc_RNA (1)...(19): siRNA sense strand
gcaaguggcaucugaauuu

SEQ ID NO: 1374268 - RNA, 19 nt, Homo sapiens
  misc_RNA (1)...(19): siRNA sense strand
gaauauagccguucuggaa

SEQ ID NO: 1374269 - RNA, 19 nt, Homo sapiens
  misc_RNA (1)...(19): siRNA sense strand
gcaguuccaucuccuauug

SEQ ID NO: 1374270 - RNA, 19 nt, Homo sapiens
  misc_RNA (1)...(19): siRNA sense strand
ggaaaucccacuaggaauu

SEQ ID NO: 1374271 - RNA, 19 nt, Homo sapiens
  misc_RNA (1)...(19): siRNA sense strand
ccacagugauguuguaaug

SEQ ID NO: 1374272 - RNA, 19 nt, Homo sapiens
  misc_RNA (1)...(19): siRNA sense strand
caucuccuauugauuguua

SEQ ID NO: 1374273 - RNA, 19 nt, Homo sapiens
  misc_RNA (1)...(19): siRNA sense strand
ggccuuugcuucagguuua

SEQ ID NO: 1374274 - RNA, 19 nt, Homo sapiens
  misc_RNA (1)...(19): siRNA sense strand
ucaagaaccuaaagcuauu

SEQ ID NO: 1374275 - RNA, 19 nt, Homo sapiens
  misc_RNA (1)...(19): siRNA sense strand
guacagggauggucaccuu

SEQ ID NO: 1374276 - RNA, 19 nt, Homo sapiens
  misc_RNA (1)...(19): siRNA sense strand
uaauagacuucguuucuug

SEQ ID NO: 1374277 - RNA, 19 nt, Homo sapiens
  misc_RNA (1)...(19): siRNA sense strand
agagauguccuuggaauua

SEQ ID NO: 1374278 - RNA, 19 nt, Homo sapiens
  misc_RNA (1)...(19): siRNA sense strand
gcacucggguuuugaauau

SEQ ID NO: 1374279 - RNA, 19 nt, Homo sapiens
  misc_RNA (1)...(19): siRNA sense strand
gaaaucccacuaggaauug

SEQ ID NO: 1374280 - RNA, 19 nt, Homo sapiens
  misc_RNA (1)...(19): siRNA sense strand
gaugauguguauggaggua

SEQ ID NO: 1374281 - RNA, 19 nt, Homo sapiens
  misc_RNA (1)...(19): siRNA sense strand
gcaucugaauuuggauuaa

SEQ ID NO: 1374282 - RNA, 19 nt, Homo sapiens
  misc_RNA (1)...(19): siRNA sense strand
caaguggcaucugaauuug

SEQ ID NO: 1374283 - RNA, 19 nt, Homo sapiens
  misc_RNA (1)...(19): siRNA sense strand
gcagccacuguaacuauua

SEQ ID NO: 1374284 - RNA, 19 nt, Homo sapiens
  misc_RNA (1)...(19): siRNA sense strand
agacuucguuucuugcaaa

SEQ ID NO: 1374285 - RNA, 19 nt, Homo sapiens
  misc_RNA (1)...(19): siRNA sense strand
cauaauagacuucguuucu

SEQ ID NO: 1374286 - RNA, 19 nt, Homo sapiens
  misc_RNA (1)...(19): siRNA sense strand
cuacauguccgaauggaaa

SEQ ID NO: 1374287 - RNA, 19 nt, Homo sapiens
  misc_RNA (1)...(19): siRNA sense strand
acucaugcaucaguucuua

SEQ ID NO: 1374288 - RNA, 19 nt, Homo sapiens
  misc_RNA (1)...(19): siRNA sense strand
uaaguacuguuuggccuuu

SEQ ID NO: 1374289 - RNA, 19 nt, Homo sapiens
  misc_RNA (1)...(19): siRNA sense strand
acagagauguccuuggaau

SEQ ID NO: 1374290 - RNA, 19 nt, Homo sapiens
  misc_RNA (1)...(19): siRNA sense strand
gagauguccuuggaauuag

SEQ ID NO: 1374291 - RNA, 19 nt, Homo sapiens
  misc_RNA (1)...(19): siRNA sense strand
aggaagaccuacuggaaga

SEQ ID NO: 1374292 - RNA, 19 nt, Homo sapiens
  misc_RNA (1)...(19): siRNA sense strand
uaaugggccuggugucugu

SEQ ID NO: 1374293 - RNA, 19 nt, Homo sapiens
  misc_RNA (1)...(19): siRNA sense strand
ucugggagcugauauuucu

SEQ ID NO: 1374294 - RNA, 19 nt, Homo sapiens
  misc_RNA (1)...(19): siRNA sense strand
gggcuuagaggaugaggaa

SEQ ID NO: 1374295 - RNA, 19 nt, Homo sapiens
  misc_RNA (1)...(19): siRNA sense strand
uaagggcacucuucagcau

SEQ ID NO: 1374296 - RNA, 19 nt, Homo sapiens
  misc_RNA (1)...(19): siRNA sense strand
ugaggaagaccuacuggaa

SEQ ID NO: 1374297 - RNA, 19 nt, Homo sapiens
  misc_RNA (1)...(19): siRNA sense strand
aaagcaggagaccaaauua

SEQ ID NO: 1374298 - RNA, 19 nt, Homo sapiens
  misc_RNA (1)...(19): siRNA sense strand
ggccuggugucuguuaauu

SEQ ID NO: 1374299 - RNA, 19 nt, Homo sapiens
  misc_RNA (1)...(19): siRNA sense strand
gcaacaaaauacaugaaug

SEQ ID NO: 1374300 - RNA, 19 nt, Homo sapiens
  misc_RNA (1)...(19): siRNA sense strand
gagcuugggaggauucgaa

SEQ ID NO: 1374301 - RNA, 19 nt, Homo sapiens
  misc_RNA (1)...(19): siRNA sense strand
gccgagagcuugggaggau

SEQ ID NO: 1374302 - RNA, 19 nt, Homo sapiens
  misc_RNA (1)...(19): siRNA sense strand
ccuggugucuguuaauugu

SEQ ID NO: 1374303 - RNA, 19 nt, Homo sapiens
  misc_RNA (1)...(19): siRNA sense strand
acuaggaauugccuugaaa

SEQ ID NO: 1374304 - RNA, 19 nt, Homo sapiens
  misc_RNA (1)...(19): siRNA sense strand
gagcuuccggcaaucauga

SEQ ID NO: 1374305 - RNA, 19 nt, Homo sapiens
  misc_RNA (1)...(19): siRNA sense strand
aaagacgccuccucacaag

SEQ ID NO: 1374306 - RNA, 19 nt, Homo sapiens
  misc_RNA (1)...(19): siRNA sense strand
gggccaggauccagagcaa

SEQ ID NO: 1374307 - RNA, 19 nt, Homo sapiens
  misc_RNA (1)...(19): siRNA sense strand
ugccacacuuccaacauuu

SEQ ID NO: 1374308 - RNA, 19 nt, Homo sapiens
  misc_RNA (1)...(19): siRNA sense strand
gcagcacacccuccaagug

SEQ ID NO: 1374309 - RNA, 19 nt, Homo sapiens
  misc_RNA (1)...(19): siRNA sense strand
gagcaguuccaucuccuau

SEQ ID NO: 1374310 - RNA, 19 nt, Homo sapiens
  misc_RNA (1)...(19): siRNA sense strand
gcaauuacaccagaaacca

SEQ ID NO: 1374311 - RNA, 19 nt, Homo sapiens
  misc_RNA (1)...(19): siRNA sense strand
gcagcaauuacaccagaaa

SEQ ID NO: 1374312 - RNA, 19 nt, Homo sapiens
  misc_RNA (1)...(19): siRNA sense strand
gcuuagaggaugaggaaga

SEQ ID NO: 1374313 - RNA, 19 nt, Homo sapiens
  misc_RNA (1)...(19): siRNA sense strand
uagcagccacuguaacuau

SEQ ID NO: 1374314 - RNA, 19 nt, Homo sapiens
  misc_RNA (1)...(19): siRNA sense strand
ccucaagaaccuaaagcua

SEQ ID NO: 1374315 - RNA, 19 nt, Homo sapiens
  misc_RNA (1)...(19): siRNA sense strand
cugccacacuuccaacauu

SEQ ID NO: 1374316 - RNA, 19 nt, Homo sapiens
  misc_RNA (1)...(19): siRNA sense strand
ccacgcaggcgauccaugu

SEQ ID NO: 1374317 - RNA, 19 nt, Homo sapiens
  misc_RNA (1)...(19): siRNA sense strand
uuacuagaggcagcaauua

SEQ ID NO: 1374318 - RNA, 19 nt, Homo sapiens
  misc_RNA (1)...(19): siRNA sense strand
aagcgucaguguacagguu

SEQ ID NO: 1374319 - RNA, 19 nt, Homo sapiens
  misc_RNA (1)...(19): siRNA sense strand
gacucuacauguccgaaug

SEQ ID NO: 1374320 - RNA, 19 nt, Homo sapiens
  misc_RNA (1)...(19): siRNA sense strand
auacaugaauggccacagu

SEQ ID NO: 1374321 - RNA, 19 nt, Homo sapiens
  misc_RNA (1)...(19): siRNA sense strand
ggcaucugaauuuggauua

SEQ ID NO: 1374322 - RNA, 19 nt, Homo sapiens
  misc_RNA (1)...(19): siRNA sense strand
uuguauggaugauguguau

SEQ ID NO: 1374323 - RNA, 19 nt, Homo sapiens
  misc_RNA (1)...(19): siRNA sense strand
caagaaccuaaagcuauuu

SEQ ID NO: 1374324 - RNA, 19 nt, Homo sapiens
  misc_RNA (1)...(19): siRNA sense strand
ucugaagacucuacauguc

SEQ ID NO: 1374325 - RNA, 19 nt, Homo sapiens
  misc_RNA (1)...(19): siRNA sense strand
uggccacagugauguugua

SEQ ID NO: 1374326 - RNA, 19 nt, Homo sapiens
  misc_RNA (1)...(19): siRNA sense strand
gaauggccacagugauguu

SEQ ID NO: 1374327 - RNA, 19 nt, Homo sapiens
  misc_RNA (1)...(19): siRNA sense strand
cuggaaaucccacuaggaa

SEQ ID NO: 1374328 - RNA, 19 nt, Homo sapiens
  misc_RNA (1)...(19): siRNA sense strand
cucaagaaccuaaagcuau

SEQ ID NO: 1374329 - RNA, 19 nt, Homo sapiens
  misc_RNA (1)...(19): siRNA sense strand
gauggucaccuuuuauauu

SEQ ID NO: 1374330 - RNA, 19 nt, Homo sapiens
  misc_RNA (1)...(19): siRNA sense strand
gaagaccuacuggaagauc

SEQ ID NO: 1374331 - RNA, 19 nt, Homo sapiens
  misc_RNA (1)...(19): siRNA sense strand
gccaggauccagagcaaug

SEQ ID NO: 1374332 - RNA, 19 nt, Homo sapiens
  misc_RNA (1)...(19): siRNA sense strand
gacacacugauucgacuuu

SEQ ID NO: 1374333 - RNA, 19 nt, Homo sapiens
  misc_RNA (1)...(19): siRNA sense strand
cacuaggaauugccuugaa

SEQ ID NO: 1374334 - RNA, 19 nt, Homo sapiens
  misc_RNA (1)...(19): siRNA sense strand
caauuacaccagaaaccaa

SEQ ID NO: 1374335 - RNA, 19 nt, Homo sapiens
  misc_RNA (1)...(19): siRNA sense strand
uauauuaagggcacucuuc

SEQ ID NO: 1374336 - RNA, 19 nt, Homo sapiens
  misc_RNA (1)...(19): siRNA sense strand
cagggauggucaccuuuua

SEQ ID NO: 1374337 - RNA, 19 nt, Homo sapiens
  misc_RNA (1)...(19): siRNA sense strand
uggugucuguuaauuguga

SEQ ID NO: 1374338 - RNA, 19 nt, Homo sapiens
  misc_RNA (1)...(19): siRNA sense strand
ggguagaaaagguuauuua

SEQ ID NO: 1374339 - RNA, 19 nt, Homo sapiens
  misc_RNA (1)...(19): siRNA sense strand
agcaggagaccaaauuauu

SEQ ID NO: 1374340 - RNA, 19 nt, Homo sapiens
  misc_RNA (1)...(19): siRNA sense strand
gggagcugauauuucuaug

SEQ ID NO: 1374341 - RNA, 19 nt, Homo sapiens
  misc_RNA (1)...(19): siRNA sense strand
ggcaaguggcaucugaauu

SEQ ID NO: 1374342 - RNA, 19 nt, Homo sapiens
  misc_RNA (1)...(19): siRNA sense strand
gggauggucaccuuuuaua

SEQ ID NO: 1374343 - RNA, 19 nt, Homo sapiens
  misc_RNA (1)...(19): siRNA sense strand
cuauguauucugcaacaaa

SEQ ID NO: 1374344 - RNA, 19 nt, Homo sapiens
  misc_RNA (1)...(19): siRNA sense strand
ggagcugauauuucuaugu

SEQ ID NO: 1374345 - RNA, 19 nt, Homo sapiens
  misc_RNA (1)...(19): siRNA sense strand
ggcagcaauuacaccagaa

SEQ ID NO: 1374346 - RNA, 19 nt, Homo sapiens
  misc_RNA (1)...(19): siRNA sense strand
aguggcaucugaauuugga

SEQ ID NO: 1374347 - RNA, 19 nt, Homo sapiens
  misc_RNA (1)...(19): siRNA sense strand
auauagccguucuggaaau

SEQ ID NO: 1374348 - RNA, 19 nt, Homo sapiens
  misc_RNA (1)...(19): siRNA sense strand
ggaugaggaagaccuacug

SEQ ID NO: 1374349 - RNA, 19 nt, Homo sapiens
  misc_RNA (1)...(19): siRNA sense strand
ucgacuuucugugggcuua

SEQ ID NO: 1374350 - RNA, 19 nt, Homo sapiens
  misc_RNA (1)...(19): siRNA sense strand
cagagauguccuuggaauu

SEQ ID NO: 1374351 - RNA, 19 nt, Homo sapiens
  misc_RNA (1)...(19): siRNA sense strand
aauauagccguucuggaaa

SEQ ID NO: 1374352 - RNA, 19 nt, Homo sapiens
  misc_RNA (1)...(19): siRNA sense strand
guauggaugauguguaugg

SEQ ID NO: 1374353 - RNA, 19 nt, Homo sapiens
  misc_RNA (1)...(19): siRNA sense strand
ccacuaggaauugccuuga

SEQ ID NO: 1374354 - RNA, 19 nt, Homo sapiens
  misc_RNA (1)...(19): siRNA sense strand
uuccaucuccuauugauug

SEQ ID NO: 1374355 - RNA, 19 nt, Homo sapiens
  misc_RNA (1)...(19): siRNA sense strand
gguuuagcagccacuguaa

SEQ ID NO: 1374356 - RNA, 19 nt, Homo sapiens
  misc_RNA (1)...(19): siRNA sense strand
aagcaggagaccaaauuau

SEQ ID NO: 1374357 - RNA, 19 nt, Homo sapiens
  misc_RNA (1)...(19): siRNA sense strand
ggugaagcgucaguguaca

SEQ ID NO: 1374358 - RNA, 19 nt, Homo sapiens
  misc_RNA (1)...(19): siRNA sense strand
caacaaaauacaugaaugg

SEQ ID NO: 1374359 - RNA, 19 nt, Homo sapiens
  misc_RNA (1)...(19): siRNA sense strand
aaaagcaggagaccaaauu

SEQ ID NO: 1374360 - RNA, 19 nt, Homo sapiens
  misc_RNA (1)...(19): siRNA sense strand
acacacugauucgacuuuc

SEQ ID NO: 1374361 - RNA, 19 nt, Homo sapiens
  misc_RNA (1)...(19): siRNA sense strand
ucuuaagaaugacagagau

SEQ ID NO: 1374362 - RNA, 19 nt, Homo sapiens
  misc_RNA (1)...(19): siRNA sense strand
gaaagccuucauaauagac

SEQ ID NO: 1374363 - RNA, 19 nt, Homo sapiens
  misc_RNA (1)...(19): siRNA sense strand
gagcugauauuucuaugua

SEQ ID NO: 1374364 - RNA, 19 nt, Homo sapiens
  misc_RNA (1)...(19): siRNA sense strand
gcaaguggcaucugaauuu

SEQ ID NO: 1374365 - RNA, 19 nt, Homo sapiens
  misc_RNA (1)...(19): siRNA sense strand
gaauauagccguucuggaa

SEQ ID NO: 1374366 - RNA, 19 nt, Homo sapiens
  misc_RNA (1)...(19): siRNA sense strand
gcaguuccaucuccuauug

SEQ ID NO: 1374367 - RNA, 19 nt, Homo sapiens
  misc_RNA (1)...(19): siRNA sense strand
ggaaaucccacuaggaauu

SEQ ID NO: 1374368 - RNA, 19 nt, Homo sapiens
  misc_RNA (1)...(19): siRNA sense strand
ccacagugauguuguaaug

SEQ ID NO: 1374369 - RNA, 19 nt, Homo sapiens
  misc_RNA (1)...(19): siRNA sense strand
caucuccuauugauuguua

SEQ ID NO: 1374370 - RNA, 19 nt, Homo sapiens
  misc_RNA (1)...(19): siRNA sense strand
ggccuuugcuucagguuua

SEQ ID NO: 1374371 - RNA, 19 nt, Homo sapiens
  misc_RNA (1)...(19): siRNA sense strand
ucaagaaccuaaagcuauu

SEQ ID NO: 1374372 - RNA, 19 nt, Homo sapiens
  misc_RNA (1)...(19): siRNA sense strand
guacagggauggucaccuu

SEQ ID NO: 1374373 - RNA, 19 nt, Homo sapiens
  misc_RNA (1)...(19): siRNA sense strand
uaauagacuucguuucuug

SEQ ID NO: 1374374 - RNA, 19 nt, Homo sapiens
  misc_RNA (1)...(19): siRNA sense strand
agagauguccuuggaauua

SEQ ID NO: 1374375 - RNA, 19 nt, Homo sapiens
  misc_RNA (1)...(19): siRNA sense strand
gcacucggguuuugaauau

SEQ ID NO: 1374376 - RNA, 19 nt, Homo sapiens
  misc_RNA (1)...(19): siRNA sense strand
gaaaucccacuaggaauug

SEQ ID NO: 1374377 - RNA, 19 nt, Homo sapiens
  misc_RNA (1)...(19): siRNA sense strand
gaugauguguauggaggua

SEQ ID NO: 1374378 - RNA, 19 nt, Homo sapiens
  misc_RNA (1)...(19): siRNA sense strand
gcaucugaauuuggauuaa

SEQ ID NO: 1374379 - RNA, 19 nt, Homo sapiens
  misc_RNA (1)...(19): siRNA sense strand
caaguggcaucugaauuug

SEQ ID NO: 1374380 - RNA, 19 nt, Homo sapiens
  misc_RNA (1)...(19): siRNA sense strand
gcagccacuguaacuauua

SEQ ID NO: 1374381 - RNA, 19 nt, Homo sapiens
  misc_RNA (1)...(19): siRNA sense strand
agacuucguuucuugcaaa

SEQ ID NO: 1374382 - RNA, 19 nt, Homo sapiens
  misc_RNA (1)...(19): siRNA sense strand
cauaauagacuucguuucu

SEQ ID NO: 1374383 - RNA, 19 nt, Homo sapiens
  misc_RNA (1)...(19): siRNA sense strand
cuacauguccgaauggaaa

SEQ ID NO: 1374384 - RNA, 19 nt, Homo sapiens
  misc_RNA (1)...(19): siRNA sense strand
acucaugcaucaguucuua

SEQ ID NO: 1374385 - RNA, 19 nt, Homo sapiens
  misc_RNA (1)...(19): siRNA sense strand
uaaguacuguuuggccuuu

SEQ ID NO: 1374386 - RNA, 19 nt, Homo sapiens
  misc_RNA (1)...(19): siRNA sense strand
acagagauguccuuggaau

SEQ ID NO: 1374387 - RNA, 19 nt, Homo sapiens
  misc_RNA (1)...(19): siRNA sense strand
gagauguccuuggaauuag

SEQ ID NO: 1374388 - RNA, 19 nt, Homo sapiens
  misc_RNA (1)...(19): siRNA sense strand
aggaagaccuacuggaaga

SEQ ID NO: 1374389 - RNA, 19 nt, Homo sapiens
  misc_RNA (1)...(19): siRNA sense strand
uaaugggccuggugucugu

SEQ ID NO: 1374390 - RNA, 19 nt, Homo sapiens
  misc_RNA (1)...(19): siRNA sense strand
ucugggagcugauauuucu

SEQ ID NO: 1374391 - RNA, 19 nt, Homo sapiens
  misc_RNA (1)...(19): siRNA sense strand
gggcuuagaggaugaggaa

SEQ ID NO: 1374392 - RNA, 19 nt, Homo sapiens
  misc_RNA (1)...(19): siRNA sense strand
uaagggcacucuucagcau

SEQ ID NO: 1374393 - RNA, 19 nt, Homo sapiens
  misc_RNA (1)...(19): siRNA sense strand
ugaggaagaccuacuggaa

SEQ ID NO: 1374394 - RNA, 19 nt, Homo sapiens
  misc_RNA (1)...(19): siRNA sense strand
aaagcaggagaccaaauua

SEQ ID NO: 1374395 - RNA, 19 nt, Homo sapiens
  misc_RNA (1)...(19): siRNA sense strand
ggccuggugucuguuaauu

SEQ ID NO: 1374396 - RNA, 19 nt, Homo sapiens
  misc_RNA (1)...(19): siRNA sense strand
gcaacaaaauacaugaaug

SEQ ID NO: 1374397 - RNA, 19 nt, Homo sapiens
  misc_RNA (1)...(19): siRNA sense strand
gagcuugggaggauucgaa

SEQ ID NO: 1374398 - RNA, 19 nt, Homo sapiens
  misc_RNA (1)...(19): siRNA sense strand
gccgagagcuugggaggau

SEQ ID NO: 1374399 - RNA, 19 nt, Homo sapiens
  misc_RNA (1)...(19): siRNA sense strand
ccuggugucuguuaauugu

SEQ ID NO: 1374400 - RNA, 19 nt, Homo sapiens
  misc_RNA (1)...(19): siRNA sense strand
acuaggaauugccuugaaa

SEQ ID NO: 1374401 - RNA, 19 nt, Homo sapiens
  misc_RNA (1)...(19): siRNA sense strand
gagcuuccggcaaucauga

SEQ ID NO: 1374402 - RNA, 19 nt, Homo sapiens
  misc_RNA (1)...(19): siRNA sense strand
aaagacgccuccucacaag

SEQ ID NO: 1374403 - RNA, 19 nt, Homo sapiens
  misc_RNA (1)...(19): siRNA sense strand
gggccaggauccagagcaa

SEQ ID NO: 1374404 - RNA, 19 nt, Homo sapiens
  misc_RNA (1)...(19): siRNA sense strand
ugccacacuuccaacauuu

SEQ ID NO: 1374405 - RNA, 19 nt, Homo sapiens
  misc_RNA (1)...(19): siRNA sense strand
gcagcacacccuccaagug

SEQ ID NO: 1374406 - RNA, 19 nt, Homo sapiens
  misc_RNA (1)...(19): siRNA sense strand
gagcaguuccaucuccuau

SEQ ID NO: 1374407 - RNA, 19 nt, Homo sapiens
  misc_RNA (1)...(19): siRNA sense strand
gcaauuacaccagaaacca

SEQ ID NO: 1374408 - RNA, 19 nt, Homo sapiens
  misc_RNA (1)...(19): siRNA sense strand
gcagcaauuacaccagaaa

SEQ ID NO: 1374409 - RNA, 19 nt, Homo sapiens
  misc_RNA (1)...(19): siRNA sense strand
gcuuagaggaugaggaaga

SEQ ID NO: 1374410 - RNA, 19 nt, Homo sapiens
  misc_RNA (1)...(19): siRNA sense strand
uagcagccacuguaacuau

SEQ ID NO: 1374411 - RNA, 19 nt, Homo sapiens
  misc_RNA (1)...(19): siRNA sense strand
ccucaagaaccuaaagcua

SEQ ID NO: 1374412 - RNA, 19 nt, Homo sapiens
  misc_RNA (1)...(19): siRNA sense strand
cugccacacuuccaacauu

SEQ ID NO: 1374413 - RNA, 19 nt, Homo sapiens
  misc_RNA (1)...(19): siRNA sense strand
ccacgcaggcgauccaugu

SEQ ID NO: 1374414 - RNA, 19 nt, Homo sapiens
  misc_RNA (1)...(19): siRNA sense strand
uuacuagaggcagcaauua

SEQ ID NO: 1374415 - RNA, 19 nt, Homo sapiens
  misc_RNA (1)...(19): siRNA sense strand
aagcgucaguguacagguu

SEQ ID NO: 1374416 - RNA, 19 nt, Homo sapiens
  misc_RNA (1)...(19): siRNA sense strand
gacucuacauguccgaaug

SEQ ID NO: 1374417 - RNA, 19 nt, Homo sapiens
  misc_RNA (1)...(19): siRNA sense strand
auacaugaauggccacagu

SEQ ID NO: 1374418 - RNA, 19 nt, Homo sapiens
  misc_RNA (1)...(19): siRNA sense strand
ggcaucugaauuuggauua

SEQ ID NO: 1374419 - RNA, 19 nt, Homo sapiens
  misc_RNA (1)...(19): siRNA sense strand
uuguauggaugauguguau

SEQ ID NO: 1374420 - RNA, 19 nt, Homo sapiens
  misc_RNA (1)...(19): siRNA sense strand
caagaaccuaaagcuauuu

SEQ ID NO: 1374421 - RNA, 19 nt, Homo sapiens
  misc_RNA (1)...(19): siRNA sense strand
ucugaagacucuacauguc

SEQ ID NO: 1374422 - RNA, 19 nt, Homo sapiens
  misc_RNA (1)...(19): siRNA sense strand
uggccacagugauguugua

SEQ ID NO: 1374423 - RNA, 19 nt, Homo sapiens
  misc_RNA (1)...(19): siRNA sense strand
gaauggccacagugauguu

SEQ ID NO: 1374424 - RNA, 19 nt, Homo sapiens
  misc_RNA (1)...(19): siRNA sense strand
cuggaaaucccacuaggaa

SEQ ID NO: 1374425 - RNA, 19 nt, Homo sapiens
  misc_RNA (1)...(19): siRNA sense strand
cucaagaaccuaaagcuau

SEQ ID NO: 1374426 - RNA, 19 nt, Homo sapiens
  misc_RNA (1)...(19): siRNA sense strand
gauggucaccuuuuauauu

SEQ ID NO: 1374427 - RNA, 19 nt, Homo sapiens
  misc_RNA (1)...(19): siRNA sense strand
gaagaccuacuggaagauc

SEQ ID NO: 1374428 - RNA, 19 nt, Homo sapiens
  misc_RNA (1)...(19): siRNA sense strand
gccaggauccagagcaaug

SEQ ID NO: 1374429 - RNA, 19 nt, Homo sapiens
  misc_RNA (1)...(19): siRNA sense strand
gacacacugauucgacuuu

SEQ ID NO: 1374430 - RNA, 19 nt, Homo sapiens
  misc_RNA (1)...(19): siRNA sense strand
cacuaggaauugccuugaa

SEQ ID NO: 1374431 - RNA, 19 nt, Homo sapiens
  misc_RNA (1)...(19): siRNA sense strand
caauuacaccagaaaccaa

SEQ ID NO: 1374432 - RNA, 19 nt, Homo sapiens
  misc_RNA (1)...(19): siRNA sense strand
uauauuaagggcacucuuc

SEQ ID NO: 1374433 - RNA, 19 nt, Homo sapiens
  misc_RNA (1)...(19): siRNA sense strand
cagggauggucaccuuuua

SEQ ID NO: 1374434 - RNA, 19 nt, Homo sapiens
  misc_RNA (1)...(19): siRNA sense strand
uggugucuguuaauuguga

SEQ ID NO: 1374435 - RNA, 19 nt, Homo sapiens
  misc_RNA (1)...(19): siRNA sense strand
ggguagaaaagguuauuua

SEQ ID NO: 1374436 - RNA, 19 nt, Homo sapiens
  misc_RNA (1)...(19): siRNA sense strand
agcaggagaccaaauuauu

SEQ ID NO: 1374437 - RNA, 19 nt, Homo sapiens
  misc_RNA (1)...(19): siRNA sense strand
gggagcugauauuucuaug

SEQ ID NO: 1374438 - RNA, 19 nt, Homo sapiens
  misc_RNA (1)...(19): siRNA sense strand
ggcaaguggcaucugaauu

SEQ ID NO: 1374439 - RNA, 19 nt, Homo sapiens
  misc_RNA (1)...(19): siRNA sense strand
gggauggucaccuuuuaua

SEQ ID NO: 1374440 - RNA, 19 nt, Homo sapiens
  misc_RNA (1)...(19): siRNA sense strand
cuauguauucugcaacaaa

SEQ ID NO: 1374441 - RNA, 19 nt, Homo sapiens
  misc_RNA (1)...(19): siRNA sense strand
ggagcugauauuucuaugu

SEQ ID NO: 1374442 - RNA, 19 nt, Homo sapiens
  misc_RNA (1)...(19): siRNA sense strand
ggcagcaauuacaccagaa

SEQ ID NO: 1374443 - RNA, 19 nt, Homo sapiens
  misc_RNA (1)...(19): siRNA sense strand
aguggcaucugaauuugga

SEQ ID NO: 1374444 - RNA, 19 nt, Homo sapiens
  misc_RNA (1)...(19): siRNA sense strand
auauagccguucuggaaau

SEQ ID NO: 1374445 - RNA, 19 nt, Homo sapiens
  misc_RNA (1)...(19): siRNA sense strand
ggaugaggaagaccuacug

SEQ ID NO: 1374446 - RNA, 19 nt, Homo sapiens
  misc_RNA (1)...(19): siRNA sense strand
ucgacuuucugugggcuua

SEQ ID NO: 1374447 - RNA, 19 nt, Homo sapiens
  misc_RNA (1)...(19): siRNA sense strand
cagagauguccuuggaauu

SEQ ID NO: 1374448 - RNA, 19 nt, Homo sapiens
  misc_RNA (1)...(19): siRNA sense strand
aauauagccguucuggaaa

SEQ ID NO: 1374449 - RNA, 19 nt, Homo sapiens
  misc_RNA (1)...(19): siRNA sense strand
guauggaugauguguaugg

SEQ ID NO: 1374450 - RNA, 19 nt, Homo sapiens
  misc_RNA (1)...(19): siRNA sense strand
ccacuaggaauugccuuga

SEQ ID NO: 1374451 - RNA, 19 nt, Homo sapiens
  misc_RNA (1)...(19): siRNA sense strand
uuccaucuccuauugauug

SEQ ID NO: 1374452 - RNA, 19 nt, Homo sapiens
  misc_RNA (1)...(19): siRNA sense strand
gguuuagcagccacuguaa

SEQ ID NO: 1374453 - RNA, 19 nt, Homo sapiens
  misc_RNA (1)...(19): siRNA sense strand
aagcaggagaccaaauuau

SEQ ID NO: 1374454 - RNA, 19 nt, Homo sapiens
  misc_RNA (1)...(19): siRNA sense strand
ggugaagcgucaguguaca

SEQ ID NO: 1374455 - RNA, 19 nt, Homo sapiens
  misc_RNA (1)...(19): siRNA sense strand
caacaaaauacaugaaugg

SEQ ID NO: 1374456 - RNA, 19 nt, Homo sapiens
  misc_RNA (1)...(19): siRNA sense strand
aaaagcaggagaccaaauu

SEQ ID NO: 1374457 - RNA, 19 nt, Homo sapiens
  misc_RNA (1)...(19): siRNA sense strand
acacacugauucgacuuuc

SEQ ID NO: 1374458 - RNA, 19 nt, Homo sapiens
  misc_RNA (1)...(19): siRNA sense strand
ucuuaagaaugacagagau

SEQ ID NO: 1374459 - RNA, 19 nt, Homo sapiens
  misc_RNA (1)...(19): siRNA sense strand
gaaagccuucauaauagac

SEQ ID NO: 1374460 - RNA, 19 nt, Homo sapiens
  misc_RNA (1)...(19): siRNA sense strand
gaaagcagcuccaucagua

SEQ ID NO: 1374461 - RNA, 19 nt, Homo sapiens
  misc_RNA (1)...(19): siRNA sense strand
gcaaggaucugcaacugua

SEQ ID NO: 1374462 - RNA, 19 nt, Homo sapiens
  misc_RNA (1)...(19): siRNA sense strand
caacaaagcguucaguaua

SEQ ID NO: 1374463 - RNA, 19 nt, Homo sapiens
  misc_RNA (1)...(19): siRNA sense strand
gcacccauccucaauauua

SEQ ID NO: 1374464 - RNA, 19 nt, Homo sapiens
  misc_RNA (1)...(19): siRNA sense strand
acacugagcugcuggauuu

SEQ ID NO: 1374465 - RNA, 19 nt, Homo sapiens
  misc_RNA (1)...(19): siRNA sense strand
gagcagagccuggugaaua

SEQ ID NO: 1374466 - RNA, 19 nt, Homo sapiens
  misc_RNA (1)...(19): siRNA sense strand
gggcugagcugguuuagug

SEQ ID NO: 1374467 - RNA, 19 nt, Homo sapiens
  misc_RNA (1)...(19): siRNA sense strand
gacaacaucuccuugaaga

SEQ ID NO: 1374468 - RNA, 19 nt, Homo sapiens
  misc_RNA (1)...(19): siRNA sense strand
ucaaaggucugaaggagaa

SEQ ID NO: 1374469 - RNA, 19 nt, Homo sapiens
  misc_RNA (1)...(19): siRNA sense strand
caaccuagccaaccagaua

SEQ ID NO: 1374470 - RNA, 19 nt, Homo sapiens
  misc_RNA (1)...(19): siRNA sense strand
ucaagaagcugccaacuac

SEQ ID NO: 1374471 - RNA, 19 nt, Homo sapiens
  misc_RNA (1)...(19): siRNA sense strand
gggcaaagcuacagacaag

SEQ ID NO: 1374472 - RNA, 19 nt, Homo sapiens
  misc_RNA (1)...(19): siRNA sense strand
gaaaugaagcuuacagaca

SEQ ID NO: 1374473 - RNA, 19 nt, Homo sapiens
  misc_RNA (1)...(19): siRNA sense strand
ccaaagaacuucggaucaa

SEQ ID NO: 1374474 - RNA, 19 nt, Homo sapiens
  misc_RNA (1)...(19): siRNA sense strand
caucggcccuugcuucuuu

SEQ ID NO: 1374475 - RNA, 19 nt, Homo sapiens
  misc_RNA (1)...(19): siRNA sense strand
guagggaacuggaaucauc

SEQ ID NO: 1374476 - RNA, 19 nt, Homo sapiens
  misc_RNA (1)...(19): siRNA sense strand
caagucagcuuccucauac

SEQ ID NO: 1374477 - RNA, 19 nt, Homo sapiens
  misc_RNA (1)...(19): siRNA sense strand
gagcgaagauggcaaaucg

SEQ ID NO: 1374478 - RNA, 19 nt, Homo sapiens
  misc_RNA (1)...(19): siRNA sense strand
gcacagcaccucagacuuc

SEQ ID NO: 1374479 - RNA, 19 nt, Homo sapiens
  misc_RNA (1)...(19): siRNA sense strand
gagaaggaaaugaagcuua

SEQ ID NO: 1374480 - RNA, 19 nt, Homo sapiens
  misc_RNA (1)...(19): siRNA sense strand
caaggaugcugaugcgaaa

SEQ ID NO: 1374481 - RNA, 19 nt, Homo sapiens
  misc_RNA (1)...(19): siRNA sense strand
agacaaaacuccucagaua

SEQ ID NO: 1374482 - RNA, 19 nt, Homo sapiens
  misc_RNA (1)...(19): siRNA sense strand
ccaagacgcuguccaaguc

SEQ ID NO: 1374483 - RNA, 19 nt, Homo sapiens
  misc_RNA (1)...(19): siRNA sense strand
gaacucaacaauagugcua

SEQ ID NO: 1374484 - RNA, 19 nt, Homo sapiens
  misc_RNA (1)...(19): siRNA sense strand
guaaaugggcgcaagacua

SEQ ID NO: 1374485 - RNA, 19 nt, Homo sapiens
  misc_RNA (1)...(19): siRNA sense strand
aagacuagcuuagauguuu

SEQ ID NO: 1374486 - RNA, 19 nt, Homo sapiens
  misc_RNA (1)...(19): siRNA sense strand
gaucugcaacuguaucuuu

SEQ ID NO: 1374487 - RNA, 19 nt, Homo sapiens
  misc_RNA (1)...(19): siRNA sense strand
gcgagaaaccauagacuuu

SEQ ID NO: 1374488 - RNA, 19 nt, Homo sapiens
  misc_RNA (1)...(19): siRNA sense strand
caacuuaccaacauaguga

SEQ ID NO: 1374489 - RNA, 19 nt, Homo sapiens
  misc_RNA (1)...(19): siRNA sense strand
gaaagaggacagugcagaa

SEQ ID NO: 1374490 - RNA, 19 nt, Homo sapiens
  misc_RNA (1)...(19): siRNA sense strand
aacaaagcguucaguauaa

SEQ ID NO: 1374491 - RNA, 19 nt, Homo sapiens
  misc_RNA (1)...(19): siRNA sense strand
gagcugacuuggaguggaa

SEQ ID NO: 1374492 - RNA, 19 nt, Homo sapiens
  misc_RNA (1)...(19): siRNA sense strand
ccugagagcugugaugauu

SEQ ID NO: 1374493 - RNA, 19 nt, Homo sapiens
  misc_RNA (1)...(19): siRNA sense strand
gcacuucccaugucucuga

SEQ ID NO: 1374494 - RNA, 19 nt, Homo sapiens
  misc_RNA (1)...(19): siRNA sense strand
gaagaauacugggcuccaa

SEQ ID NO: 1374495 - RNA, 19 nt, Homo sapiens
  misc_RNA (1)...(19): siRNA sense strand
guacagcggcucccaaaug

SEQ ID NO: 1374496 - RNA, 19 nt, Homo sapiens
  misc_RNA (1)...(19): siRNA sense strand
gcgcaagacuagcuuagau

SEQ ID NO: 1374497 - RNA, 19 nt, Homo sapiens
  misc_RNA (1)...(19): siRNA sense strand
gguaucaucuccacaccuu

SEQ ID NO: 1374498 - RNA, 19 nt, Homo sapiens
  misc_RNA (1)...(19): siRNA sense strand
uggaacaacucuaucauuc

SEQ ID NO: 1374499 - RNA, 19 nt, Homo sapiens
  misc_RNA (1)...(19): siRNA sense strand
gagcgacagugaccucaug

SEQ ID NO: 1374500 - RNA, 19 nt, Homo sapiens
  misc_RNA (1)...(19): siRNA sense strand
aaaugaagcuuacagacau

SEQ ID NO: 1374501 - RNA, 19 nt, Homo sapiens
  misc_RNA (1)...(19): siRNA sense strand
cagcaugguucuacagaga

SEQ ID NO: 1374502 - RNA, 19 nt, Homo sapiens
  misc_RNA (1)...(19): siRNA sense strand
ccagcaagcucagccauau

SEQ ID NO: 1374503 - RNA, 19 nt, Homo sapiens
  misc_RNA (1)...(19): siRNA sense strand
cgacaucaaugccaacaag

SEQ ID NO: 1374504 - RNA, 19 nt, Homo sapiens
  misc_RNA (1)...(19): siRNA sense strand
gaugaugcagcacuacaua

SEQ ID NO: 1374505 - RNA, 19 nt, Homo sapiens
  misc_RNA (1)...(19): siRNA sense strand
ccaagucagcuuccucaua

SEQ ID NO: 1374506 - RNA, 19 nt, Homo sapiens
  misc_RNA (1)...(19): siRNA sense strand
gcuaaugagugguuucagu

SEQ ID NO: 1374507 - RNA, 19 nt, Homo sapiens
  misc_RNA (1)...(19): siRNA sense strand
cgcaggaacucaacaauag

SEQ ID NO: 1374508 - RNA, 19 nt, Homo sapiens
  misc_RNA (1)...(19): siRNA sense strand
aaccauggcuugcacuuga

SEQ ID NO: 1374509 - RNA, 19 nt, Homo sapiens
  misc_RNA (1)...(19): siRNA sense strand
acaaagcguucaguauaaa

SEQ ID NO: 1374510 - RNA, 19 nt, Homo sapiens
  misc_RNA (1)...(19): siRNA sense strand
gaugcaaucugagcaaauc

SEQ ID NO: 1374511 - RNA, 19 nt, Homo sapiens
  misc_RNA (1)...(19): siRNA sense strand
gcaaagggccaacuuacca

SEQ ID NO: 1374512 - RNA, 19 nt, Homo sapiens
  misc_RNA (1)...(19): siRNA sense strand
gggccaacuuaccaacaua

SEQ ID NO: 1374513 - RNA, 19 nt, Homo sapiens
  misc_RNA (1)...(19): siRNA sense strand
gagcugguuuagugaauca

SEQ ID NO: 1374514 - RNA, 19 nt, Homo sapiens
  misc_RNA (1)...(19): siRNA sense strand
ggaugaagcuguuuuccaa

SEQ ID NO: 1374515 - RNA, 19 nt, Homo sapiens
  misc_RNA (1)...(19): siRNA sense strand
ugagagcugugaugauuca

SEQ ID NO: 1374516 - RNA, 19 nt, Homo sapiens
  misc_RNA (1)...(19): siRNA sense strand
caaucucaguucagaagaa

SEQ ID NO: 1374517 - RNA, 19 nt, Homo sapiens
  misc_RNA (1)...(19): siRNA sense strand
gagaggcgacauucccaua

SEQ ID NO: 1374518 - RNA, 19 nt, Homo sapiens
  misc_RNA (1)...(19): siRNA sense strand
cagacaacaucuccuugaa

SEQ ID NO: 1374519 - RNA, 19 nt, Homo sapiens
  misc_RNA (1)...(19): siRNA sense strand
cggcugagcugaaggucuu

SEQ ID NO: 1374520 - RNA, 19 nt, Homo sapiens
  misc_RNA (1)...(19): siRNA sense strand
ucagugaguuggucaaugg

SEQ ID NO: 1374521 - RNA, 19 nt, Homo sapiens
  misc_RNA (1)...(19): siRNA sense strand
guagcaaggucaguggaaa

SEQ ID NO: 1374522 - RNA, 19 nt, Homo sapiens
  misc_RNA (1)...(19): siRNA sense strand
cagacaaucucaguucaga

SEQ ID NO: 1374523 - RNA, 19 nt, Homo sapiens
  misc_RNA (1)...(19): siRNA sense strand
cugcaaguaucauaaaugu

SEQ ID NO: 1374524 - RNA, 19 nt, Homo sapiens
  misc_RNA (1)...(19): siRNA sense strand
ccaagaaagggcucaggua

SEQ ID NO: 1374525 - RNA, 19 nt, Homo sapiens
  misc_RNA (1)...(19): siRNA sense strand
ugaaggagccuaccaaggu

SEQ ID NO: 1374526 - RNA, 19 nt, Homo sapiens
  misc_RNA (1)...(19): siRNA sense strand
uaaaugggcgcaagacuag

SEQ ID NO: 1374527 - RNA, 19 nt, Homo sapiens
  misc_RNA (1)...(19): siRNA sense strand
caacgcuccuccucugaug

SEQ ID NO: 1374528 - RNA, 19 nt, Homo sapiens
  misc_RNA (1)...(19): siRNA sense strand
aaagugggcugagcugguu

SEQ ID NO: 1374529 - RNA, 19 nt, Homo sapiens
  misc_RNA (1)...(19): siRNA sense strand
ggaagcugguagagucaga

SEQ ID NO: 1374530 - RNA, 19 nt, Homo sapiens
  misc_RNA (1)...(19): siRNA sense strand
gaucaucugcauuaucuuc

SEQ ID NO: 1374531 - RNA, 19 nt, Homo sapiens
  misc_RNA (1)...(19): siRNA sense strand
cagaaaguacucccaagaa

SEQ ID NO: 1374532 - RNA, 19 nt, Homo sapiens
  misc_RNA (1)...(19): siRNA sense strand
cacuugagcuucaggaugu

SEQ ID NO: 1374533 - RNA, 19 nt, Homo sapiens
  misc_RNA (1)...(19): siRNA sense strand
gaugcuggaugaagcuguu

SEQ ID NO: 1374534 - RNA, 19 nt, Homo sapiens
  misc_RNA (1)...(19): siRNA sense strand
ccucaacucugcccaccaa

SEQ ID NO: 1374535 - RNA, 19 nt, Homo sapiens
  misc_RNA (1)...(19): siRNA sense strand
gcaagacuagcuuagaugu

SEQ ID NO: 1374536 - RNA, 19 nt, Homo sapiens
  misc_RNA (1)...(19): siRNA sense strand
acuggaagaugcuggauga

SEQ ID NO: 1374537 - RNA, 19 nt, Homo sapiens
  misc_RNA (1)...(19): siRNA sense strand
caaagaacuucggaucaag

SEQ ID NO: 1374538 - RNA, 19 nt, Homo sapiens
  misc_RNA (1)...(19): siRNA sense strand
cacccauccucaauauuaa

SEQ ID NO: 1374539 - RNA, 19 nt, Homo sapiens
  misc_RNA (1)...(19): siRNA sense strand
ucagcaagauccagaaguc

SEQ ID NO: 1374540 - RNA, 19 nt, Homo sapiens
  misc_RNA (1)...(19): siRNA sense strand
caacaucuccuugaagagu

SEQ ID NO: 1374541 - RNA, 19 nt, Homo sapiens
  misc_RNA (1)...(19): siRNA sense strand
cuucaaaggucccagaucu

SEQ ID NO: 1374542 - RNA, 19 nt, Homo sapiens
  misc_RNA (1)...(19): siRNA sense strand
uggaucaucugcauuaucu

SEQ ID NO: 1374543 - RNA, 19 nt, Homo sapiens
  misc_RNA (1)...(19): siRNA sense strand
agaaggaaaugaagcuuac

SEQ ID NO: 1374544 - RNA, 19 nt, Homo sapiens
  misc_RNA (1)...(19): siRNA sense strand
aggagaggaugcaaucuga

SEQ ID NO: 1374545 - RNA, 19 nt, Homo sapiens
  misc_RNA (1)...(19): siRNA sense strand
cggcacccauccucaauau

SEQ ID NO: 1374546 - RNA, 19 nt, Homo sapiens
  misc_RNA (1)...(19): siRNA sense strand
gcuacaagcucagcaucug

SEQ ID NO: 1374547 - RNA, 19 nt, Homo sapiens
  misc_RNA (1)...(19): siRNA sense strand
aggguaagcuugcagugaa

SEQ ID NO: 1374548 - RNA, 19 nt, Homo sapiens
  misc_RNA (1)...(19): siRNA sense strand
gaagcugccaacuacauug

SEQ ID NO: 1374549 - RNA, 19 nt, Homo sapiens
  misc_RNA (1)...(19): siRNA sense strand
ucauugaccuguggaacaa

SEQ ID NO: 1374550 - RNA, 19 nt, Homo sapiens
  misc_RNA (1)...(19): siRNA sense strand
agaguuggcuucgaaguuc

SEQ ID NO: 1374551 - RNA, 19 nt, Homo sapiens
  misc_RNA (1)...(19): siRNA sense strand
cgacauucccauaccauug

SEQ ID NO: 1374552 - RNA, 19 nt, Homo sapiens
  misc_RNA (1)...(19): siRNA sense strand
ccagccaagucaaguucua

SEQ ID NO: 1374553 - RNA, 19 nt, Homo sapiens
  misc_RNA (1)...(19): siRNA sense strand
caugcaaacuggugguuca

SEQ ID NO: 1374554 - RNA, 19 nt, Homo sapiens
  misc_RNA (1)...(19): siRNA sense strand
ucgcaggaacucaacaaua

SEQ ID NO: 1374555 - RNA, 19 nt, Homo sapiens
  misc_RNA (1)...(19): siRNA sense strand
caacaagaccaaucaaagc

SEQ ID NO: 1374556 - RNA, 19 nt, Homo sapiens
  misc_RNA (1)...(19): siRNA sense strand
gcagagaaugaccgacuga

SEQ ID NO: 1374557 - RNA, 19 nt, Homo sapiens
  misc_RNA (1)...(19): siRNA sense strand
ccaccaaucagccuguaaa

SEQ ID NO: 1374558 - RNA, 19 nt, Homo sapiens
  misc_RNA (1)...(19): siRNA sense strand
gauaggacagucaaagaca

SEQ ID NO: 1374559 - RNA, 19 nt, Homo sapiens
  misc_RNA (1)...(19): siRNA sense strand
ccaacaagaccaaucaaag

SEQ ID NO: 1374560 - RNA, 19 nt, Homo sapiens
  misc_RNA (1)...(19): siRNA sense strand
cgacagcccuuuccugaua

SEQ ID NO: 1374561 - RNA, 19 nt, Homo sapiens
  misc_RNA (1)...(19): siRNA sense strand
ggcagaaggucuuguauga

SEQ ID NO: 1374562 - RNA, 19 nt, Homo sapiens
  misc_RNA (1)...(19): siRNA sense strand
ggaugaagcugaaaucaag

SEQ ID NO: 1374563 - RNA, 19 nt, Homo sapiens
  misc_RNA (1)...(19): siRNA sense strand
gugguuaucuggugguaua

SEQ ID NO: 1374564 - RNA, 19 nt, Homo sapiens
  misc_RNA (1)...(19): siRNA sense strand
aaacauccaugcucggaaa

SEQ ID NO: 1374565 - RNA, 19 nt, Homo sapiens
  misc_RNA (1)...(19): siRNA sense strand
guuaggccaucucaucuuu

SEQ ID NO: 1374566 - RNA, 19 nt, Homo sapiens
  misc_RNA (1)...(19): siRNA sense strand
gcccuagucuucauuacuu

SEQ ID NO: 1374567 - RNA, 19 nt, Homo sapiens
  misc_RNA (1)...(19): siRNA sense strand
ggaggccuacuguccauua

SEQ ID NO: 1374568 - RNA, 19 nt, Homo sapiens
  misc_RNA (1)...(19): siRNA sense strand
gcugaugucuaucucaugu

SEQ ID NO: 1374569 - RNA, 19 nt, Homo sapiens
  misc_RNA (1)...(19): siRNA sense strand
gaacauggccaucuuugcu

SEQ ID NO: 1374570 - RNA, 19 nt, Homo sapiens
  misc_RNA (1)...(19): siRNA sense strand
aagcugaaaucaaggaaga

SEQ ID NO: 1374571 - RNA, 19 nt, Homo sapiens
  misc_RNA (1)...(19): siRNA sense strand
gcacugacaccaucuaugc

SEQ ID NO: 1374572 - RNA, 19 nt, Homo sapiens
  misc_RNA (1)...(19): siRNA sense strand
gcccuuuccugauaacuau

SEQ ID NO: 1374573 - RNA, 19 nt, Homo sapiens
  misc_RNA (1)...(19): siRNA sense strand
caucuuugcuucuguaugc

SEQ ID NO: 1374574 - RNA, 19 nt, Homo sapiens
  misc_RNA (1)...(19): siRNA sense strand
gacagcccuuuccugauaa

SEQ ID NO: 1374575 - RNA, 19 nt, Homo sapiens
  misc_RNA (1)...(19): siRNA sense strand
ggccaucuuugcuucugua

SEQ ID NO: 1374576 - RNA, 19 nt, Homo sapiens
  misc_RNA (1)...(19): siRNA sense strand
auauugggcugugguauuu

SEQ ID NO: 1374577 - RNA, 19 nt, Homo sapiens
  misc_RNA (1)...(19): siRNA sense strand
uguccagguuccucaguua

SEQ ID NO: 1374578 - RNA, 19 nt, Homo sapiens
  misc_RNA (1)...(19): siRNA sense strand
ugugggagccguacucuuu

SEQ ID NO: 1374579 - RNA, 19 nt, Homo sapiens
  misc_RNA (1)...(19): siRNA sense strand
cucauucgcuugcagcuuu

SEQ ID NO: 1374580 - RNA, 19 nt, Homo sapiens
  misc_RNA (1)...(19): siRNA sense strand
caccaucuaugccauguca

SEQ ID NO: 1374581 - RNA, 19 nt, Homo sapiens
  misc_RNA (1)...(19): siRNA sense strand
ucacugauuggguauguuu

SEQ ID NO: 1374582 - RNA, 19 nt, Homo sapiens
  misc_RNA (1)...(19): siRNA sense strand
gacauuugccauucagauu

SEQ ID NO: 1374583 - RNA, 19 nt, Homo sapiens
  misc_RNA (1)...(19): siRNA sense strand
ggccuacuguccauuagug

SEQ ID NO: 1374584 - RNA, 19 nt, Homo sapiens
  misc_RNA (1)...(19): siRNA sense strand
gggaugaagcugaaaucaa

SEQ ID NO: 1374585 - RNA, 19 nt, Homo sapiens
  misc_RNA (1)...(19): siRNA sense strand
ccagcacacuauccuugaa

SEQ ID NO: 1374586 - RNA, 19 nt, Homo sapiens
  misc_RNA (1)...(19): siRNA sense strand
gcugugcaguguuuguguu

SEQ ID NO: 1374587 - RNA, 19 nt, Homo sapiens
  misc_RNA (1)...(19): siRNA sense strand
uacuuucacuuauggguuu

SEQ ID NO: 1374588 - RNA, 19 nt, Homo sapiens
  misc_RNA (1)...(19): siRNA sense strand
ggugaagggcggaagaaga

SEQ ID NO: 1374589 - RNA, 19 nt, Homo sapiens
  misc_RNA (1)...(19): siRNA sense strand
gauuggguauguuuuguuu

SEQ ID NO: 1374590 - RNA, 19 nt, Homo sapiens
  misc_RNA (1)...(19): siRNA sense strand
gcuguuaggccaucucauc

SEQ ID NO: 1374591 - RNA, 19 nt, Homo sapiens
  misc_RNA (1)...(19): siRNA sense strand
guauauggaugagggucuu

SEQ ID NO: 1374592 - RNA, 19 nt, Homo sapiens
  misc_RNA (1)...(19): siRNA sense strand
aggaagacuuguccagguu

SEQ ID NO: 1374593 - RNA, 19 nt, Homo sapiens
  misc_RNA (1)...(19): siRNA sense strand
ucucauugauggaggugaa

SEQ ID NO: 1374594 - RNA, 19 nt, Homo sapiens
  misc_RNA (1)...(19): siRNA sense strand
gaaacuaaaggcauguacu

SEQ ID NO: 1374595 - RNA, 19 nt, Homo sapiens
  misc_RNA (1)...(19): siRNA sense strand
gaagaaacuaaaggcaugu

SEQ ID NO: 1374596 - RNA, 19 nt, Homo sapiens
  misc_RNA (1)...(19): siRNA sense strand
acauuugccauucagauuu

SEQ ID NO: 1374597 - RNA, 19 nt, Homo sapiens
  misc_RNA (1)...(19): siRNA sense strand
guuaucuggugguauaugg

SEQ ID NO: 1374598 - RNA, 19 nt, Homo sapiens
  misc_RNA (1)...(19): siRNA sense strand
ggaggugaagggcggaaga

SEQ ID NO: 1374599 - RNA, 19 nt, Homo sapiens
  misc_RNA (1)...(19): siRNA sense strand
ucauuacuuucacuuaugg

SEQ ID NO: 1374600 - RNA, 19 nt, Homo sapiens
  misc_RNA (1)...(19): siRNA sense strand
ucaaguggcagaaggucuu

SEQ ID NO: 1374601 - RNA, 19 nt, Homo sapiens
  misc_RNA (1)...(19): siRNA sense strand
cauuguauccagcacacua

SEQ ID NO: 1374602 - RNA, 19 nt, Homo sapiens
  misc_RNA (1)...(19): siRNA sense strand
cugaagacccuuacagagu

SEQ ID NO: 1374603 - RNA, 19 nt, Homo sapiens
  misc_RNA (1)...(19): siRNA sense strand
gugaagggcggaagaagag

SEQ ID NO: 1374604 - RNA, 19 nt, Homo sapiens
  misc_RNA (1)...(19): siRNA sense strand
cauccaugcucggaaauac

SEQ ID NO: 1374605 - RNA, 19 nt, Homo sapiens
  misc_RNA (1)...(19): siRNA sense strand
aaacuaaaggcauguacuc

SEQ ID NO: 1374606 - RNA, 19 nt, Homo sapiens
  misc_RNA (1)...(19): siRNA sense strand
ccugaagagugcccuaguc

SEQ ID NO: 1374607 - RNA, 19 nt, Homo sapiens
  misc_RNA (1)...(19): siRNA sense strand
gccuugggaugaagcugaa

SEQ ID NO: 1374608 - RNA, 19 nt, Homo sapiens
  misc_RNA (1)...(19): siRNA sense strand
ugaugucuaucucaugucu

SEQ ID NO: 1374609 - RNA, 19 nt, Homo sapiens
  misc_RNA (1)...(19): siRNA sense strand
gaggccuacuguccauuag

SEQ ID NO: 1374610 - RNA, 19 nt, Homo sapiens
  misc_RNA (1)...(19): siRNA sense strand
ggcccauguugcagaagaa

SEQ ID NO: 1374611 - RNA, 19 nt, Homo sapiens
  misc_RNA (1)...(19): siRNA sense strand
gacaccaucuaugccaugu

SEQ ID NO: 1374612 - RNA, 19 nt, Homo sapiens
  misc_RNA (1)...(19): siRNA sense strand
ccagugcugaagacccuua

SEQ ID NO: 1374613 - RNA, 19 nt, Homo sapiens
  misc_RNA (1)...(19): siRNA sense strand
gaggugaagggcggaagaa

SEQ ID NO: 1374614 - RNA, 19 nt, Homo sapiens
  misc_RNA (1)...(19): siRNA sense strand
augcucaaccugugacuaa

SEQ ID NO: 1374615 - RNA, 19 nt, Homo sapiens
  misc_RNA (1)...(19): siRNA sense strand
gcucaaccugugacuaaca

SEQ ID NO: 1374616 - RNA, 19 nt, Homo sapiens
  misc_RNA (1)...(19): siRNA sense strand
ccuugaacauggccaucuu

SEQ ID NO: 1374617 - RNA, 19 nt, Homo sapiens
  misc_RNA (1)...(19): siRNA sense strand
ugacauuugccauucagau

SEQ ID NO: 1374618 - RNA, 19 nt, Homo sapiens
  misc_RNA (1)...(19): siRNA sense strand
acaccaaggaggucaagug

SEQ ID NO: 1374619 - RNA, 19 nt, Homo sapiens
  misc_RNA (1)...(19): siRNA sense strand
gcagaaggucuuguaugag

SEQ ID NO: 1374620 - RNA, 19 nt, Homo sapiens
  misc_RNA (1)...(19): siRNA sense strand
gcacacuauccuugaacau

SEQ ID NO: 1374621 - RNA, 19 nt, Homo sapiens
  misc_RNA (1)...(19): siRNA sense strand
ucuaugccaugucagucuu

SEQ ID NO: 1374622 - RNA, 19 nt, Homo sapiens
  misc_RNA (1)...(19): siRNA sense strand
ggugacauuugccauucag

SEQ ID NO: 1374623 - RNA, 19 nt, Homo sapiens
  misc_RNA (1)...(19): siRNA sense strand
ugacuauggugccaaugcu

SEQ ID NO: 1374624 - RNA, 19 nt, Homo sapiens
  misc_RNA (1)...(19): siRNA sense strand
cauccuaccuuucuacuua

SEQ ID NO: 1374625 - RNA, 19 nt, Homo sapiens
  misc_RNA (1)...(19): siRNA sense strand
aauauggccugcaauagua

SEQ ID NO: 1374626 - RNA, 19 nt, Homo sapiens
  misc_RNA (1)...(19): siRNA sense strand
gugaggauccugagaauuu

SEQ ID NO: 1374627 - RNA, 19 nt, Homo sapiens
  misc_RNA (1)...(19): siRNA sense strand
ggacauacucuucgagcua

SEQ ID NO: 1374628 - RNA, 19 nt, Homo sapiens
  misc_RNA (1)...(19): siRNA sense strand
ucgccuaugugcucaauua

SEQ ID NO: 1374629 - RNA, 19 nt, Homo sapiens
  misc_RNA (1)...(19): siRNA sense strand
ccuaugugcucaauuacua

SEQ ID NO: 1374630 - RNA, 19 nt, Homo sapiens
  misc_RNA (1)...(19): siRNA sense strand
gaucuacuaugccgagaga

SEQ ID NO: 1374631 - RNA, 19 nt, Homo sapiens
  misc_RNA (1)...(19): siRNA sense strand
gaauaucauugacuuugug

SEQ ID NO: 1374632 - RNA, 19 nt, Homo sapiens
  misc_RNA (1)...(19): siRNA sense strand
caaguguuguucuacagua

SEQ ID NO: 1374633 - RNA, 19 nt, Homo sapiens
  misc_RNA (1)...(19): siRNA sense strand
gaacacgccuggcccuucu

SEQ ID NO: 1374634 - RNA, 19 nt, Homo sapiens
  misc_RNA (1)...(19): siRNA sense strand
gauauuugcuaccaugauc

SEQ ID NO: 1374635 - RNA, 19 nt, Homo sapiens
  misc_RNA (1)...(19): siRNA sense strand
gagcuaguacuaaugaauu

SEQ ID NO: 1374636 - RNA, 19 nt, Homo sapiens
  misc_RNA (1)...(19): siRNA sense strand
uuaaauauggccugcaaua

SEQ ID NO: 1374637 - RNA, 19 nt, Homo sapiens
  misc_RNA (1)...(19): siRNA sense strand
acacaugucugggcaaaga

SEQ ID NO: 1374638 - RNA, 19 nt, Homo sapiens
  misc_RNA (1)...(19): siRNA sense strand
caggcaagcucaccuacuu

SEQ ID NO: 1374639 - RNA, 19 nt, Homo sapiens
  misc_RNA (1)...(19): siRNA sense strand
gcaauaguacacagaguga

SEQ ID NO: 1374640 - RNA, 19 nt, Homo sapiens
  misc_RNA (1)...(19): siRNA sense strand
caaagacaaucgacuucug

SEQ ID NO: 1374641 - RNA, 19 nt, Homo sapiens
  misc_RNA (1)...(19): siRNA sense strand
gauccugccuugacguaug

SEQ ID NO: 1374642 - RNA, 19 nt, Homo sapiens
  misc_RNA (1)...(19): siRNA sense strand
ucagugggcugucauccaa

SEQ ID NO: 1374643 - RNA, 19 nt, Homo sapiens
  misc_RNA (1)...(19): siRNA sense strand
uaacgacccuucagcuagu

SEQ ID NO: 1374644 - RNA, 19 nt, Homo sapiens
  misc_RNA (1)...(19): siRNA sense strand
guacacagagugacacaug

SEQ ID NO: 1374645 - RNA, 19 nt, Homo sapiens
  misc_RNA (1)...(19): siRNA sense strand
guccagagccgccagguuu

SEQ ID NO: 1374646 - RNA, 19 nt, Homo sapiens
  misc_RNA (1)...(19): siRNA sense strand
gagcccugcugcuggauga

SEQ ID NO: 1374647 - RNA, 19 nt, Homo sapiens
  misc_RNA (1)...(19): siRNA sense strand
caaagcugcuaaagaugug

SEQ ID NO: 1374648 - RNA, 19 nt, Homo sapiens
  misc_RNA (1)...(19): siRNA sense strand
ccaaagcugcuaaagaugu

SEQ ID NO: 1374649 - RNA, 19 nt, Homo sapiens
  misc_RNA (1)...(19): siRNA sense strand
auccaaagcugcuaaagau

SEQ ID NO: 1374650 - RNA, 19 nt, Homo sapiens
  misc_RNA (1)...(19): siRNA sense strand
gggcaaagacaaucgacuu

SEQ ID NO: 1374651 - RNA, 19 nt, Homo sapiens
  misc_RNA (1)...(19): siRNA sense strand
gacagaaccagucaucaau

SEQ ID NO: 1374652 - RNA, 19 nt, Homo sapiens
  misc_RNA (1)...(19): siRNA sense strand
cagaaccagucaucaaugg

SEQ ID NO: 1374653 - RNA, 19 nt, Homo sapiens
  misc_RNA (1)...(19): siRNA sense strand
ccaagaggcugggcaucga

SEQ ID NO: 1374654 - RNA, 19 nt, Homo sapiens
  misc_RNA (1)...(19): siRNA sense strand
gaguguguguggugugguu

SEQ ID NO: 1374655 - RNA, 19 nt, Homo sapiens
  misc_RNA (1)...(19): siRNA sense strand
guucuacaguaugaaauug

SEQ ID NO: 1374656 - RNA, 19 nt, Homo sapiens
  misc_RNA (1)...(19): siRNA sense strand
agacagaaccagucaucaa

SEQ ID NO: 1374657 - RNA, 19 nt, Homo sapiens
  misc_RNA (1)...(19): siRNA sense strand
acaaucgacuucuggaaca

SEQ ID NO: 1374658 - RNA, 19 nt, Homo sapiens
  misc_RNA (1)...(19): siRNA sense strand
cuagugagcacacacaguu

SEQ ID NO: 1374659 - RNA, 19 nt, Homo sapiens
  misc_RNA (1)...(19): siRNA sense strand
caagacagaaccagucauc

SEQ ID NO: 1374660 - RNA, 19 nt, Homo sapiens
  misc_RNA (1)...(19): siRNA sense strand
gcaaagcagaaacuuccaa

SEQ ID NO: 1374661 - RNA, 19 nt, Homo sapiens
  misc_RNA (1)...(19): siRNA sense strand
guacuacuccuuggcaaug

SEQ ID NO: 1374662 - RNA, 19 nt, Homo sapiens
  misc_RNA (1)...(19): siRNA sense strand
gcacccggcacgaaaccua

SEQ ID NO: 1374663 - RNA, 19 nt, Homo sapiens
  misc_RNA (1)...(19): siRNA sense strand
cauccaaagcugcuaaaga

SEQ ID NO: 1374664 - RNA, 19 nt, Homo sapiens
  misc_RNA (1)...(19): siRNA sense strand
aaauauggccugcaauagu

SEQ ID NO: 1374665 - RNA, 19 nt, Homo sapiens
  misc_RNA (1)...(19): siRNA sense strand
uugcuaccaugaucuacua

SEQ ID NO: 1374666 - RNA, 19 nt, Homo sapiens
  misc_RNA (1)...(19): siRNA sense strand
aauuaaauauggccugcaa

SEQ ID NO: 1374667 - RNA, 19 nt, Homo sapiens
  misc_RNA (1)...(19): siRNA sense strand
aagcagaaacuuccaagga

SEQ ID NO: 1374668 - RNA, 19 nt, Homo sapiens
  misc_RNA (1)...(19): siRNA sense strand
ccgccagguuuauugcuuu

SEQ ID NO: 1374669 - RNA, 19 nt, Homo sapiens
  misc_RNA (1)...(19): siRNA sense strand
gaacaacgagagggugauc

SEQ ID NO: 1374670 - RNA, 19 nt, Homo sapiens
  misc_RNA (1)...(19): siRNA sense strand
uggaaacacaugaagcuuu

SEQ ID NO: 1374671 - RNA, 19 nt, Homo sapiens
  misc_RNA (1)...(19): siRNA sense strand
gccagugccugucauuguc

SEQ ID NO: 1374672 - RNA, 19 nt, Homo sapiens
  misc_RNA (1)...(19): siRNA sense strand
caugugggcccucuucgaa

SEQ ID NO: 1374673 - RNA, 19 nt, Homo sapiens
  misc_RNA (1)...(19): siRNA sense strand
cauccugguuucaauuaca

SEQ ID NO: 1374674 - RNA, 19 nt, Homo sapiens
  misc_RNA (1)...(19): siRNA sense strand
guauguagaaggagugugu

SEQ ID NO: 1374675 - RNA, 19 nt, Homo sapiens
  misc_RNA (1)...(19): siRNA sense strand
guguuguucuacaguauga

SEQ ID NO: 1374676 - RNA, 19 nt, Homo sapiens
  misc_RNA (1)...(19): siRNA sense strand
aggaggagcuggccuucug

SEQ ID NO: 1374677 - RNA, 19 nt, Homo sapiens
  misc_RNA (1)...(19): siRNA sense strand
aggaggcgcuggacaucuu

SEQ ID NO: 1374678 - RNA, 19 nt, Homo sapiens
  misc_RNA (1)...(19): siRNA sense strand
gcaaagacaaucgacuucu

SEQ ID NO: 1374679 - RNA, 19 nt, Homo sapiens
  misc_RNA (1)...(19): siRNA sense strand
uaaauauggccugcaauag

SEQ ID NO: 1374680 - RNA, 19 nt, Homo sapiens
  misc_RNA (1)...(19): siRNA sense strand
gagugggagcucaaccuaa

SEQ ID NO: 1374681 - RNA, 19 nt, Homo sapiens
  misc_RNA (1)...(19): siRNA sense strand
ccuaacgacccuucagcua

SEQ ID NO: 1374682 - RNA, 19 nt, Homo sapiens
  misc_RNA (1)...(19): siRNA sense strand
agucaucaauggcacaagu

SEQ ID NO: 1374683 - RNA, 19 nt, Homo sapiens
  misc_RNA (1)...(19): siRNA sense strand
ggcaauggcaaagcagaaa

SEQ ID NO: 1374684 - RNA, 19 nt, Homo sapiens
  misc_RNA (1)...(19): siRNA sense strand
gcuggagugcugacaauag

SEQ ID NO: 1374685 - RNA, 19 nt, Homo sapiens
  misc_RNA (1)...(19): siRNA sense strand
aaacggauccugccuugac

SEQ ID NO: 1374686 - RNA, 19 nt, Homo sapiens
  misc_RNA (1)...(19): siRNA sense strand
gaaacggauccugccuuga

SEQ ID NO: 1374687 - RNA, 19 nt, Homo sapiens
  misc_RNA (1)...(19): siRNA sense strand
gcaagaucgagaacaacga

SEQ ID NO: 1374688 - RNA, 19 nt, Homo sapiens
  misc_RNA (1)...(19): siRNA sense strand
cuaccaugaucuacuaugc

SEQ ID NO: 1374689 - RNA, 19 nt, Homo sapiens
  misc_RNA (1)...(19): siRNA sense strand
uguguggugugguuuacuu

SEQ ID NO: 1374690 - RNA, 19 nt, Homo sapiens
  misc_RNA (1)...(19): siRNA sense strand
uggcuggagugcugacaau

SEQ ID NO: 1374691 - RNA, 19 nt, Homo sapiens
  misc_RNA (1)...(19): siRNA sense strand
ggcaaagacaaucgacuuc

SEQ ID NO: 1374692 - RNA, 19 nt, Homo sapiens
  misc_RNA (1)...(19): siRNA sense strand
gccgccagguuuauugcuu

SEQ ID NO: 1374693 - RNA, 19 nt, Homo sapiens
  misc_RNA (1)...(19): siRNA sense strand
ccucagggugguaagguuu

SEQ ID NO: 1374694 - RNA, 19 nt, Homo sapiens
  misc_RNA (1)...(19): siRNA sense strand
ugagggugcuuggacauac

SEQ ID NO: 1374695 - RNA, 19 nt, Homo sapiens
  misc_RNA (1)...(19): siRNA sense strand
cucaagacccugccuggaa

SEQ ID NO: 1374696 - RNA, 19 nt, Homo sapiens
  misc_RNA (1)...(19): siRNA sense strand
cgagcuaguacuaaugaau

SEQ ID NO: 1374697 - RNA, 19 nt, Homo sapiens
  misc_RNA (1)...(19): siRNA sense strand
gcuuggacauacucuucga

SEQ ID NO: 1374698 - RNA, 19 nt, Homo sapiens
  misc_RNA (1)...(19): siRNA sense strand
gugcuuggacauacucuuc

SEQ ID NO: 1374699 - RNA, 19 nt, Homo sapiens
  misc_RNA (1)...(19): siRNA sense strand
gcaugugggcccucuucga

SEQ ID NO: 1374700 - RNA, 19 nt, Homo sapiens
  misc_RNA (1)...(19): siRNA sense strand
gagggugcuuggacauacu

SEQ ID NO: 1374701 - RNA, 19 nt, Homo sapiens
  misc_RNA (1)...(19): siRNA sense strand
cuugacguauguagaagga

SEQ ID NO: 1374702 - RNA, 19 nt, Homo sapiens
  misc_RNA (1)...(19): siRNA sense strand
guuguucuacaguaugaaa

SEQ ID NO: 1374703 - RNA, 19 nt, Homo sapiens
  misc_RNA (1)...(19): siRNA sense strand
cccaauaaacuugaauuca

SEQ ID NO: 1374704 - RNA, 19 nt, Homo sapiens
  misc_RNA (1)...(19): siRNA sense strand
cgacuucuggaacauaaca

SEQ ID NO: 1374705 - RNA, 19 nt, Homo sapiens
  misc_RNA (1)...(19): siRNA sense strand
gagcacacacaguucaaaa

SEQ ID NO: 1374706 - RNA, 19 nt, Homo sapiens
  misc_RNA (1)...(19): siRNA sense strand
agugggagcucaaccuaac

SEQ ID NO: 1374707 - RNA, 19 nt, Homo sapiens
  misc_RNA (1)...(19): siRNA sense strand
cgagagagugggagcucaa

SEQ ID NO: 1374708 - RNA, 19 nt, Homo sapiens
  misc_RNA (1)...(19): siRNA sense strand
acucuucgagcuaguacua

SEQ ID NO: 1374709 - RNA, 19 nt, Homo sapiens
  misc_RNA (1)...(19): siRNA sense strand
cauccuaccuuucuacuua

SEQ ID NO: 1374710 - RNA, 19 nt, Homo sapiens
  misc_RNA (1)...(19): siRNA sense strand
aauauggccugcaauagua

SEQ ID NO: 1374711 - RNA, 19 nt, Homo sapiens
  misc_RNA (1)...(19): siRNA sense strand
gugaggauccugagaauuu

SEQ ID NO: 1374712 - RNA, 19 nt, Homo sapiens
  misc_RNA (1)...(19): siRNA sense strand
ggacauacucuucgagcua

SEQ ID NO: 1374713 - RNA, 19 nt, Homo sapiens
  misc_RNA (1)...(19): siRNA sense strand
ucgccuaugugcucaauua

SEQ ID NO: 1374714 - RNA, 19 nt, Homo sapiens
  misc_RNA (1)...(19): siRNA sense strand
ccuaugugcucaauuacua

SEQ ID NO: 1374715 - RNA, 19 nt, Homo sapiens
  misc_RNA (1)...(19): siRNA sense strand
gaucuacuaugccgagaga

SEQ ID NO: 1374716 - RNA, 19 nt, Homo sapiens
  misc_RNA (1)...(19): siRNA sense strand
gaauaucauugacuuugug

SEQ ID NO: 1374717 - RNA, 19 nt, Homo sapiens
  misc_RNA (1)...(19): siRNA sense strand
caaguguuguucuacagua

SEQ ID NO: 1374718 - RNA, 19 nt, Homo sapiens
  misc_RNA (1)...(19): siRNA sense strand
gaacacgccuggcccuucu

SEQ ID NO: 1374719 - RNA, 19 nt, Homo sapiens
  misc_RNA (1)...(19): siRNA sense strand
gauauuugcuaccaugauc

SEQ ID NO: 1374720 - RNA, 19 nt, Homo sapiens
  misc_RNA (1)...(19): siRNA sense strand
gagcuaguacuaaugaauu

SEQ ID NO: 1374721 - RNA, 19 nt, Homo sapiens
  misc_RNA (1)...(19): siRNA sense strand
uuaaauauggccugcaaua

SEQ ID NO: 1374722 - RNA, 19 nt, Homo sapiens
  misc_RNA (1)...(19): siRNA sense strand
acacaugucugggcaaaga

SEQ ID NO: 1374723 - RNA, 19 nt, Homo sapiens
  misc_RNA (1)...(19): siRNA sense strand
caggcaagcucaccuacuu

SEQ ID NO: 1374724 - RNA, 19 nt, Homo sapiens
  misc_RNA (1)...(19): siRNA sense strand
gcaauaguacacagaguga

SEQ ID NO: 1374725 - RNA, 19 nt, Homo sapiens
  misc_RNA (1)...(19): siRNA sense strand
caaagacaaucgacuucug

SEQ ID NO: 1374726 - RNA, 19 nt, Homo sapiens
  misc_RNA (1)...(19): siRNA sense strand
gauccugccuugacguaug

SEQ ID NO: 1374727 - RNA, 19 nt, Homo sapiens
  misc_RNA (1)...(19): siRNA sense strand
ucagugggcugucauccaa

SEQ ID NO: 1374728 - RNA, 19 nt, Homo sapiens
  misc_RNA (1)...(19): siRNA sense strand
uaacgacccuucagcuagu

SEQ ID NO: 1374729 - RNA, 19 nt, Homo sapiens
  misc_RNA (1)...(19): siRNA sense strand
guacacagagugacacaug

SEQ ID NO: 1374730 - RNA, 19 nt, Homo sapiens
  misc_RNA (1)...(19): siRNA sense strand
guccagagccgccagguuu

SEQ ID NO: 1374731 - RNA, 19 nt, Homo sapiens
  misc_RNA (1)...(19): siRNA sense strand
gagcccugcugcuggauga

SEQ ID NO: 1374732 - RNA, 19 nt, Homo sapiens
  misc_RNA (1)...(19): siRNA sense strand
caaagcugcuaaagaugug

SEQ ID NO: 1374733 - RNA, 19 nt, Homo sapiens
  misc_RNA (1)...(19): siRNA sense strand
ccaaagcugcuaaagaugu

SEQ ID NO: 1374734 - RNA, 19 nt, Homo sapiens
  misc_RNA (1)...(19): siRNA sense strand
auccaaagcugcuaaagau

SEQ ID NO: 1374735 - RNA, 19 nt, Homo sapiens
  misc_RNA (1)...(19): siRNA sense strand
gggcaaagacaaucgacuu

SEQ ID NO: 1374736 - RNA, 19 nt, Homo sapiens
  misc_RNA (1)...(19): siRNA sense strand
gacagaaccagucaucaau

SEQ ID NO: 1374737 - RNA, 19 nt, Homo sapiens
  misc_RNA (1)...(19): siRNA sense strand
cagaaccagucaucaaugg

SEQ ID NO: 1374738 - RNA, 19 nt, Homo sapiens
  misc_RNA (1)...(19): siRNA sense strand
ccaagaggcugggcaucga

SEQ ID NO: 1374739 - RNA, 19 nt, Homo sapiens
  misc_RNA (1)...(19): siRNA sense strand
gaguguguguggugugguu

SEQ ID NO: 1374740 - RNA, 19 nt, Homo sapiens
  misc_RNA (1)...(19): siRNA sense strand
guucuacaguaugaaauug

SEQ ID NO: 1374741 - RNA, 19 nt, Homo sapiens
  misc_RNA (1)...(19): siRNA sense strand
agacagaaccagucaucaa

SEQ ID NO: 1374742 - RNA, 19 nt, Homo sapiens
  misc_RNA (1)...(19): siRNA sense strand
acaaucgacuucuggaaca

SEQ ID NO: 1374743 - RNA, 19 nt, Homo sapiens
  misc_RNA (1)...(19): siRNA sense strand
cuagugagcacacacaguu

SEQ ID NO: 1374744 - RNA, 19 nt, Homo sapiens
  misc_RNA (1)...(19): siRNA sense strand
caagacagaaccagucauc

SEQ ID NO: 1374745 - RNA, 19 nt, Homo sapiens
  misc_RNA (1)...(19): siRNA sense strand
gcaaagcagaaacuuccaa

SEQ ID NO: 1374746 - RNA, 19 nt, Homo sapiens
  misc_RNA (1)...(19): siRNA sense strand
guacuacuccuuggcaaug

SEQ ID NO: 1374747 - RNA, 19 nt, Homo sapiens
  misc_RNA (1)...(19): siRNA sense strand
gcacccggcacgaaaccua

SEQ ID NO: 1374748 - RNA, 19 nt, Homo sapiens
  misc_RNA (1)...(19): siRNA sense strand
cauccaaagcugcuaaaga

SEQ ID NO: 1374749 - RNA, 19 nt, Homo sapiens
  misc_RNA (1)...(19): siRNA sense strand
aaauauggccugcaauagu

SEQ ID NO: 1374750 - RNA, 19 nt, Homo sapiens
  misc_RNA (1)...(19): siRNA sense strand
uugcuaccaugaucuacua

SEQ ID NO: 1374751 - RNA, 19 nt, Homo sapiens
  misc_RNA (1)...(19): siRNA sense strand
aauuaaauauggccugcaa

SEQ ID NO: 1374752 - RNA, 19 nt, Homo sapiens
  misc_RNA (1)...(19): siRNA sense strand
aagcagaaacuuccaagga

SEQ ID NO: 1374753 - RNA, 19 nt, Homo sapiens
  misc_RNA (1)...(19): siRNA sense strand
ccgccagguuuauugcuuu

SEQ ID NO: 1374754 - RNA, 19 nt, Homo sapiens
  misc_RNA (1)...(19): siRNA sense strand
gaacaacgagagggugauc

SEQ ID NO: 1374755 - RNA, 19 nt, Homo sapiens
  misc_RNA (1)...(19): siRNA sense strand
uggaaacacaugaagcuuu

SEQ ID NO: 1374756 - RNA, 19 nt, Homo sapiens
  misc_RNA (1)...(19): siRNA sense strand
gccagugccugucauuguc

SEQ ID NO: 1374757 - RNA, 19 nt, Homo sapiens
  misc_RNA (1)...(19): siRNA sense strand
caugugggcccucuucgaa

SEQ ID NO: 1374758 - RNA, 19 nt, Homo sapiens
  misc_RNA (1)...(19): siRNA sense strand
cauccugguuucaauuaca

SEQ ID NO: 1374759 - RNA, 19 nt, Homo sapiens
  misc_RNA (1)...(19): siRNA sense strand
guauguagaaggagugugu

SEQ ID NO: 1374760 - RNA, 19 nt, Homo sapiens
  misc_RNA (1)...(19): siRNA sense strand
guguuguucuacaguauga

SEQ ID NO: 1374761 - RNA, 19 nt, Homo sapiens
  misc_RNA (1)...(19): siRNA sense strand
aggaggagcuggccuucug

SEQ ID NO: 1374762 - RNA, 19 nt, Homo sapiens
  misc_RNA (1)...(19): siRNA sense strand
aggaggcgcuggacaucuu

SEQ ID NO: 1374763 - RNA, 19 nt, Homo sapiens
  misc_RNA (1)...(19): siRNA sense strand
gcaaagacaaucgacuucu

SEQ ID NO: 1374764 - RNA, 19 nt, Homo sapiens
  misc_RNA (1)...(19): siRNA sense strand
uaaauauggccugcaauag

SEQ ID NO: 1374765 - RNA, 19 nt, Homo sapiens
  misc_RNA (1)...(19): siRNA sense strand
gagugggagcucaaccuaa

SEQ ID NO: 1374766 - RNA, 19 nt, Homo sapiens
  misc_RNA (1)...(19): siRNA sense strand
ccuaacgacccuucagcua

SEQ ID NO: 1374767 - RNA, 19 nt, Homo sapiens
  misc_RNA (1)...(19): siRNA sense strand
agucaucaauggcacaagu

SEQ ID NO: 1374768 - RNA, 19 nt, Homo sapiens
  misc_RNA (1)...(19): siRNA sense strand
ggcaauggcaaagcagaaa

SEQ ID NO: 1374769 - RNA, 19 nt, Homo sapiens
  misc_RNA (1)...(19): siRNA sense strand
gcuggagugcugacaauag

SEQ ID NO: 1374770 - RNA, 19 nt, Homo sapiens
  misc_RNA (1)...(19): siRNA sense strand
aaacggauccugccuugac

SEQ ID NO: 1374771 - RNA, 19 nt, Homo sapiens
  misc_RNA (1)...(19): siRNA sense strand
gaaacggauccugccuuga

SEQ ID NO: 1374772 - RNA, 19 nt, Homo sapiens
  misc_RNA (1)...(19): siRNA sense strand
gcaagaucgagaacaacga

SEQ ID NO: 1374773 - RNA, 19 nt, Homo sapiens
  misc_RNA (1)...(19): siRNA sense strand
cuaccaugaucuacuaugc

SEQ ID NO: 1374774 - RNA, 19 nt, Homo sapiens
  misc_RNA (1)...(19): siRNA sense strand
uguguggugugguuuacuu

SEQ ID NO: 1374775 - RNA, 19 nt, Homo sapiens
  misc_RNA (1)...(19): siRNA sense strand
uggcuggagugcugacaau

SEQ ID NO: 1374776 - RNA, 19 nt, Homo sapiens
  misc_RNA (1)...(19): siRNA sense strand
ggcaaagacaaucgacuuc

SEQ ID NO: 1374777 - RNA, 19 nt, Homo sapiens
  misc_RNA (1)...(19): siRNA sense strand
gccgccagguuuauugcuu

SEQ ID NO: 1374778 - RNA, 19 nt, Homo sapiens
  misc_RNA (1)...(19): siRNA sense strand
ccucagggugguaagguuu

SEQ ID NO: 1374779 - RNA, 19 nt, Homo sapiens
  misc_RNA (1)...(19): siRNA sense strand
ugagggugcuuggacauac

SEQ ID NO: 1374780 - RNA, 19 nt, Homo sapiens
  misc_RNA (1)...(19): siRNA sense strand
cucaagacccugccuggaa

SEQ ID NO: 1374781 - RNA, 19 nt, Homo sapiens
  misc_RNA (1)...(19): siRNA sense strand
cgagcuaguacuaaugaau

SEQ ID NO: 1374782 - RNA, 19 nt, Homo sapiens
  misc_RNA (1)...(19): siRNA sense strand
gcuuggacauacucuucga

SEQ ID NO: 1374783 - RNA, 19 nt, Homo sapiens
  misc_RNA (1)...(19): siRNA sense strand
gugcuuggacauacucuuc

SEQ ID NO: 1374784 - RNA, 19 nt, Homo sapiens
  misc_RNA (1)...(19): siRNA sense strand
gcaugugggcccucuucga

SEQ ID NO: 1374785 - RNA, 19 nt, Homo sapiens
  misc_RNA (1)...(19): siRNA sense strand
gagggugcuuggacauacu

SEQ ID NO: 1374786 - RNA, 19 nt, Homo sapiens
  misc_RNA (1)...(19): siRNA sense strand
cuugacguauguagaagga

SEQ ID NO: 1374787 - RNA, 19 nt, Homo sapiens
  misc_RNA (1)...(19): siRNA sense strand
guuguucuacaguaugaaa

SEQ ID NO: 1374788 - RNA, 19 nt, Homo sapiens
  misc_RNA (1)...(19): siRNA sense strand
cccaauaaacuugaauuca

SEQ ID NO: 1374789 - RNA, 19 nt, Homo sapiens
  misc_RNA (1)...(19): siRNA sense strand
cgacuucuggaacauaaca

SEQ ID NO: 1374790 - RNA, 19 nt, Homo sapiens
  misc_RNA (1)...(19): siRNA sense strand
gagcacacacaguucaaaa

SEQ ID NO: 1374791 - RNA, 19 nt, Homo sapiens
  misc_RNA (1)...(19): siRNA sense strand
agugggagcucaaccuaac

SEQ ID NO: 1374792 - RNA, 19 nt, Homo sapiens
  misc_RNA (1)...(19): siRNA sense strand
cgagagagugggagcucaa

SEQ ID NO: 1374793 - RNA, 19 nt, Homo sapiens
  misc_RNA (1)...(19): siRNA sense strand
acucuucgagcuaguacua

SEQ ID NO: 1374794 - RNA, 19 nt, Homo sapiens
  misc_RNA (1)...(19): siRNA sense strand
cauccuaccuuucuacuua

SEQ ID NO: 1374795 - RNA, 19 nt, Homo sapiens
  misc_RNA (1)...(19): siRNA sense strand
aauauggccugcaauagua

SEQ ID NO: 1374796 - RNA, 19 nt, Homo sapiens
  misc_RNA (1)...(19): siRNA sense strand
gugaggauccugagaauuu

SEQ ID NO: 1374797 - RNA, 19 nt, Homo sapiens
  misc_RNA (1)...(19): siRNA sense strand
ggacauacucuucgagcua

SEQ ID NO: 1374798 - RNA, 19 nt, Homo sapiens
  misc_RNA (1)...(19): siRNA sense strand
ucgccuaugugcucaauua

SEQ ID NO: 1374799 - RNA, 19 nt, Homo sapiens
  misc_RNA (1)...(19): siRNA sense strand
ccuaugugcucaauuacua

SEQ ID NO: 1374800 - RNA, 19 nt, Homo sapiens
  misc_RNA (1)...(19): siRNA sense strand
gaucuacuaugccgagaga

SEQ ID NO: 1374801 - RNA, 19 nt, Homo sapiens
  misc_RNA (1)...(19): siRNA sense strand
gaauaucauugacuuugug

SEQ ID NO: 1374802 - RNA, 19 nt, Homo sapiens
  misc_RNA (1)...(19): siRNA sense strand
caaguguuguucuacagua

SEQ ID NO: 1374803 - RNA, 19 nt, Homo sapiens
  misc_RNA (1)...(19): siRNA sense strand
gaacacgccuggcccuucu

SEQ ID NO: 1374804 - RNA, 19 nt, Homo sapiens
  misc_RNA (1)...(19): siRNA sense strand
gauauuugcuaccaugauc

SEQ ID NO: 1374805 - RNA, 19 nt, Homo sapiens
  misc_RNA (1)...(19): siRNA sense strand
gagcuaguacuaaugaauu

SEQ ID NO: 1374806 - RNA, 19 nt, Homo sapiens
  misc_RNA (1)...(19): siRNA sense strand
uuaaauauggccugcaaua

SEQ ID NO: 1374807 - RNA, 19 nt, Homo sapiens
  misc_RNA (1)...(19): siRNA sense strand
acacaugucugggcaaaga

SEQ ID NO: 1374808 - RNA, 19 nt, Homo sapiens
  misc_RNA (1)...(19): siRNA sense strand
caggcaagcucaccuacuu

SEQ ID NO: 1374809 - RNA, 19 nt, Homo sapiens
  misc_RNA (1)...(19): siRNA sense strand
gcaauaguacacagaguga

SEQ ID NO: 1374810 - RNA, 19 nt, Homo sapiens
  misc_RNA (1)...(19): siRNA sense strand
caaagacaaucgacuucug

SEQ ID NO: 1374811 - RNA, 19 nt, Homo sapiens
  misc_RNA (1)...(19): siRNA sense strand
gauccugccuugacguaug

SEQ ID NO: 1374812 - RNA, 19 nt, Homo sapiens
  misc_RNA (1)...(19): siRNA sense strand
ucagugggcugucauccaa

SEQ ID NO: 1374813 - RNA, 19 nt, Homo sapiens
  misc_RNA (1)...(19): siRNA sense strand
uaacgacccuucagcuagu

SEQ ID NO: 1374814 - RNA, 19 nt, Homo sapiens
  misc_RNA (1)...(19): siRNA sense strand
guacacagagugacacaug

SEQ ID NO: 1374815 - RNA, 19 nt, Homo sapiens
  misc_RNA (1)...(19): siRNA sense strand
guccagagccgccagguuu

SEQ ID NO: 1374816 - RNA, 19 nt, Homo sapiens
  misc_RNA (1)...(19): siRNA sense strand
gagcccugcugcuggauga

SEQ ID NO: 1374817 - RNA, 19 nt, Homo sapiens
  misc_RNA (1)...(19): siRNA sense strand
caaagcugcuaaagaugug

SEQ ID NO: 1374818 - RNA, 19 nt, Homo sapiens
  misc_RNA (1)...(19): siRNA sense strand
ccaaagcugcuaaagaugu

SEQ ID NO: 1374819 - RNA, 19 nt, Homo sapiens
  misc_RNA (1)...(19): siRNA sense strand
auccaaagcugcuaaagau

SEQ ID NO: 1374820 - RNA, 19 nt, Homo sapiens
  misc_RNA (1)...(19): siRNA sense strand
gggcaaagacaaucgacuu

SEQ ID NO: 1374821 - RNA, 19 nt, Homo sapiens
  misc_RNA (1)...(19): siRNA sense strand
gacagaaccagucaucaau

SEQ ID NO: 1374822 - RNA, 19 nt, Homo sapiens
  misc_RNA (1)...(19): siRNA sense strand
cagaaccagucaucaaugg

SEQ ID NO: 1374823 - RNA, 19 nt, Homo sapiens
  misc_RNA (1)...(19): siRNA sense strand
ccaagaggcugggcaucga

SEQ ID NO: 1374824 - RNA, 19 nt, Homo sapiens
  misc_RNA (1)...(19): siRNA sense strand
gaguguguguggugugguu

SEQ ID NO: 1374825 - RNA, 19 nt, Homo sapiens
  misc_RNA (1)...(19): siRNA sense strand
guucuacaguaugaaauug

SEQ ID NO: 1374826 - RNA, 19 nt, Homo sapiens
  misc_RNA (1)...(19): siRNA sense strand
agacagaaccagucaucaa

SEQ ID NO: 1374827 - RNA, 19 nt, Homo sapiens
  misc_RNA (1)...(19): siRNA sense strand
acaaucgacuucuggaaca

SEQ ID NO: 1374828 - RNA, 19 nt, Homo sapiens
  misc_RNA (1)...(19): siRNA sense strand
cuagugagcacacacaguu

SEQ ID NO: 1374829 - RNA, 19 nt, Homo sapiens
  misc_RNA (1)...(19): siRNA sense strand
caagacagaaccagucauc

SEQ ID NO: 1374830 - RNA, 19 nt, Homo sapiens
  misc_RNA (1)...(19): siRNA sense strand
gcaaagcagaaacuuccaa

SEQ ID NO: 1374831 - RNA, 19 nt, Homo sapiens
  misc_RNA (1)...(19): siRNA sense strand
guacuacuccuuggcaaug

SEQ ID NO: 1374832 - RNA, 19 nt, Homo sapiens
  misc_RNA (1)...(19): siRNA sense strand
gcacccggcacgaaaccua

SEQ ID NO: 1374833 - RNA, 19 nt, Homo sapiens
  misc_RNA (1)...(19): siRNA sense strand
cauccaaagcugcuaaaga

SEQ ID NO: 1374834 - RNA, 19 nt, Homo sapiens
  misc_RNA (1)...(19): siRNA sense strand
aaauauggccugcaauagu

SEQ ID NO: 1374835 - RNA, 19 nt, Homo sapiens
  misc_RNA (1)...(19): siRNA sense strand
uugcuaccaugaucuacua

SEQ ID NO: 1374836 - RNA, 19 nt, Homo sapiens
  misc_RNA (1)...(19): siRNA sense strand
aauuaaauauggccugcaa

SEQ ID NO: 1374837 - RNA, 19 nt, Homo sapiens
  misc_RNA (1)...(19): siRNA sense strand
aagcagaaacuuccaagga

SEQ ID NO: 1374838 - RNA, 19 nt, Homo sapiens
  misc_RNA (1)...(19): siRNA sense strand
ccgccagguuuauugcuuu

SEQ ID NO: 1374839 - RNA, 19 nt, Homo sapiens
  misc_RNA (1)...(19): siRNA sense strand
gaacaacgagagggugauc

SEQ ID NO: 1374840 - RNA, 19 nt, Homo sapiens
  misc_RNA (1)...(19): siRNA sense strand
uggaaacacaugaagcuuu

SEQ ID NO: 1374841 - RNA, 19 nt, Homo sapiens
  misc_RNA (1)...(19): siRNA sense strand
gccagugccugucauuguc

SEQ ID NO: 1374842 - RNA, 19 nt, Homo sapiens
  misc_RNA (1)...(19): siRNA sense strand
caugugggcccucuucgaa

SEQ ID NO: 1374843 - RNA, 19 nt, Homo sapiens
  misc_RNA (1)...(19): siRNA sense strand
cauccugguuucaauuaca

SEQ ID NO: 1374844 - RNA, 19 nt, Homo sapiens
  misc_RNA (1)...(19): siRNA sense strand
guauguagaaggagugugu

SEQ ID NO: 1374845 - RNA, 19 nt, Homo sapiens
  misc_RNA (1)...(19): siRNA sense strand
guguuguucuacaguauga

SEQ ID NO: 1374846 - RNA, 19 nt, Homo sapiens
  misc_RNA (1)...(19): siRNA sense strand
aggaggagcuggccuucug

SEQ ID NO: 1374847 - RNA, 19 nt, Homo sapiens
  misc_RNA (1)...(19): siRNA sense strand
aggaggcgcuggacaucuu

SEQ ID NO: 1374848 - RNA, 19 nt, Homo sapiens
  misc_RNA (1)...(19): siRNA sense strand
gcaaagacaaucgacuucu

SEQ ID NO: 1374849 - RNA, 19 nt, Homo sapiens
  misc_RNA (1)...(19): siRNA sense strand
uaaauauggccugcaauag

SEQ ID NO: 1374850 - RNA, 19 nt, Homo sapiens
  misc_RNA (1)...(19): siRNA sense strand
gagugggagcucaaccuaa

SEQ ID NO: 1374851 - RNA, 19 nt, Homo sapiens
  misc_RNA (1)...(19): siRNA sense strand
ccuaacgacccuucagcua

SEQ ID NO: 1374852 - RNA, 19 nt, Homo sapiens
  misc_RNA (1)...(19): siRNA sense strand
agucaucaauggcacaagu

SEQ ID NO: 1374853 - RNA, 19 nt, Homo sapiens
  misc_RNA (1)...(19): siRNA sense strand
ggcaauggcaaagcagaaa

SEQ ID NO: 1374854 - RNA, 19 nt, Homo sapiens
  misc_RNA (1)...(19): siRNA sense strand
gcuggagugcugacaauag

SEQ ID NO: 1374855 - RNA, 19 nt, Homo sapiens
  misc_RNA (1)...(19): siRNA sense strand
aaacggauccugccuugac

SEQ ID NO: 1374856 - RNA, 19 nt, Homo sapiens
  misc_RNA (1)...(19): siRNA sense strand
gaaacggauccugccuuga

SEQ ID NO: 1374857 - RNA, 19 nt, Homo sapiens
  misc_RNA (1)...(19): siRNA sense strand
gcaagaucgagaacaacga

SEQ ID NO: 1374858 - RNA, 19 nt, Homo sapiens
  misc_RNA (1)...(19): siRNA sense strand
cuaccaugaucuacuaugc

SEQ ID NO: 1374859 - RNA, 19 nt, Homo sapiens
  misc_RNA (1)...(19): siRNA sense strand
uguguggugugguuuacuu

SEQ ID NO: 1374860 - RNA, 19 nt, Homo sapiens
  misc_RNA (1)...(19): siRNA sense strand
uggcuggagugcugacaau

SEQ ID NO: 1374861 - RNA, 19 nt, Homo sapiens
  misc_RNA (1)...(19): siRNA sense strand
ggcaaagacaaucgacuuc

SEQ ID NO: 1374862 - RNA, 19 nt, Homo sapiens
  misc_RNA (1)...(19): siRNA sense strand
gccgccagguuuauugcuu

SEQ ID NO: 1374863 - RNA, 19 nt, Homo sapiens
  misc_RNA (1)...(19): siRNA sense strand
ccucagggugguaagguuu

SEQ ID NO: 1374864 - RNA, 19 nt, Homo sapiens
  misc_RNA (1)...(19): siRNA sense strand
ugagggugcuuggacauac

SEQ ID NO: 1374865 - RNA, 19 nt, Homo sapiens
  misc_RNA (1)...(19): siRNA sense strand
cucaagacccugccuggaa

SEQ ID NO: 1374866 - RNA, 19 nt, Homo sapiens
  misc_RNA (1)...(19): siRNA sense strand
cgagcuaguacuaaugaau

SEQ ID NO: 1374867 - RNA, 19 nt, Homo sapiens
  misc_RNA (1)...(19): siRNA sense strand
gcuuggacauacucuucga

SEQ ID NO: 1374868 - RNA, 19 nt, Homo sapiens
  misc_RNA (1)...(19): siRNA sense strand
gugcuuggacauacucuuc

SEQ ID NO: 1374869 - RNA, 19 nt, Homo sapiens
  misc_RNA (1)...(19): siRNA sense strand
gcaugugggcccucuucga

SEQ ID NO: 1374870 - RNA, 19 nt, Homo sapiens
  misc_RNA (1)...(19): siRNA sense strand
gagggugcuuggacauacu

SEQ ID NO: 1374871 - RNA, 19 nt, Homo sapiens
  misc_RNA (1)...(19): siRNA sense strand
cuugacguauguagaagga

SEQ ID NO: 1374872 - RNA, 19 nt, Homo sapiens
  misc_RNA (1)...(19): siRNA sense strand
guuguucuacaguaugaaa

SEQ ID NO: 1374873 - RNA, 19 nt, Homo sapiens
  misc_RNA (1)...(19): siRNA sense strand
cccaauaaacuugaauuca

SEQ ID NO: 1374874 - RNA, 19 nt, Homo sapiens
  misc_RNA (1)...(19): siRNA sense strand
cgacuucuggaacauaaca

SEQ ID NO: 1374875 - RNA, 19 nt, Homo sapiens
  misc_RNA (1)...(19): siRNA sense strand
gagcacacacaguucaaaa

SEQ ID NO: 1374876 - RNA, 19 nt, Homo sapiens
  misc_RNA (1)...(19): siRNA sense strand
agugggagcucaaccuaac

SEQ ID NO: 1374877 - RNA, 19 nt, Homo sapiens
  misc_RNA (1)...(19): siRNA sense strand
cgagagagugggagcucaa

SEQ ID NO: 1374878 - RNA, 19 nt, Homo sapiens
  misc_RNA (1)...(19): siRNA sense strand
acucuucgagcuaguacua

SEQ ID NO: 1374879 - RNA, 19 nt, Homo sapiens
  misc_RNA (1)...(19): siRNA sense strand
cauccuaccuuucuacuua

SEQ ID NO: 1374880 - RNA, 19 nt, Homo sapiens
  misc_RNA (1)...(19): siRNA sense strand
aauauggccugcaauagua

SEQ ID NO: 1374881 - RNA, 19 nt, Homo sapiens
  misc_RNA (1)...(19): siRNA sense strand
gugaggauccugagaauuu

SEQ ID NO: 1374882 - RNA, 19 nt, Homo sapiens
  misc_RNA (1)...(19): siRNA sense strand
ggacauacucuucgagcua

SEQ ID NO: 1374883 - RNA, 19 nt, Homo sapiens
  misc_RNA (1)...(19): siRNA sense strand
ucgccuaugugcucaauua

SEQ ID NO: 1374884 - RNA, 19 nt, Homo sapiens
  misc_RNA (1)...(19): siRNA sense strand
ccuaugugcucaauuacua

SEQ ID NO: 1374885 - RNA, 19 nt, Homo sapiens
  misc_RNA (1)...(19): siRNA sense strand
gaucuacuaugccgagaga

SEQ ID NO: 1374886 - RNA, 19 nt, Homo sapiens
  misc_RNA (1)...(19): siRNA sense strand
gaauaucauugacuuugug

SEQ ID NO: 1374887 - RNA, 19 nt, Homo sapiens
  misc_RNA (1)...(19): siRNA sense strand
caaguguuguucuacagua

SEQ ID NO: 1374888 - RNA, 19 nt, Homo sapiens
  misc_RNA (1)...(19): siRNA sense strand
gaacacgccuggcccuucu

SEQ ID NO: 1374889 - RNA, 19 nt, Homo sapiens
  misc_RNA (1)...(19): siRNA sense strand
gauauuugcuaccaugauc

SEQ ID NO: 1374890 - RNA, 19 nt, Homo sapiens
  misc_RNA (1)...(19): siRNA sense strand
gagcuaguacuaaugaauu

SEQ ID NO: 1374891 - RNA, 19 nt, Homo sapiens
  misc_RNA (1)...(19): siRNA sense strand
uuaaauauggccugcaaua

SEQ ID NO: 1374892 - RNA, 19 nt, Homo sapiens
  misc_RNA (1)...(19): siRNA sense strand
acacaugucugggcaaaga

SEQ ID NO: 1374893 - RNA, 19 nt, Homo sapiens
  misc_RNA (1)...(19): siRNA sense strand
caggcaagcucaccuacuu

SEQ ID NO: 1374894 - RNA, 19 nt, Homo sapiens
  misc_RNA (1)...(19): siRNA sense strand
gcaauaguacacagaguga

SEQ ID NO: 1374895 - RNA, 19 nt, Homo sapiens
  misc_RNA (1)...(19): siRNA sense strand
caaagacaaucgacuucug

SEQ ID NO: 1374896 - RNA, 19 nt, Homo sapiens
  misc_RNA (1)...(19): siRNA sense strand
gauccugccuugacguaug

SEQ ID NO: 1374897 - RNA, 19 nt, Homo sapiens
  misc_RNA (1)...(19): siRNA sense strand
ucagugggcugucauccaa

SEQ ID NO: 1374898 - RNA, 19 nt, Homo sapiens
  misc_RNA (1)...(19): siRNA sense strand
uaacgacccuucagcuagu

SEQ ID NO: 1374899 - RNA, 19 nt, Homo sapiens
  misc_RNA (1)...(19): siRNA sense strand
guacacagagugacacaug

SEQ ID NO: 1374900 - RNA, 19 nt, Homo sapiens
  misc_RNA (1)...(19): siRNA sense strand
guccagagccgccagguuu

SEQ ID NO: 1374901 - RNA, 19 nt, Homo sapiens
  misc_RNA (1)...(19): siRNA sense strand
gagcccugcugcuggauga

SEQ ID NO: 1374902 - RNA, 19 nt, Homo sapiens
  misc_RNA (1)...(19): siRNA sense strand
caaagcugcuaaagaugug

SEQ ID NO: 1374903 - RNA, 19 nt, Homo sapiens
  misc_RNA (1)...(19): siRNA sense strand
ccaaagcugcuaaagaugu

SEQ ID NO: 1374904 - RNA, 19 nt, Homo sapiens
  misc_RNA (1)...(19): siRNA sense strand
auccaaagcugcuaaagau

SEQ ID NO: 1374905 - RNA, 19 nt, Homo sapiens
  misc_RNA (1)...(19): siRNA sense strand
gggcaaagacaaucgacuu

SEQ ID NO: 1374906 - RNA, 19 nt, Homo sapiens
  misc_RNA (1)...(19): siRNA sense strand
gacagaaccagucaucaau

SEQ ID NO: 1374907 - RNA, 19 nt, Homo sapiens
  misc_RNA (1)...(19): siRNA sense strand
cagaaccagucaucaaugg

SEQ ID NO: 1374908 - RNA, 19 nt, Homo sapiens
  misc_RNA (1)...(19): siRNA sense strand
ccaagaggcugggcaucga

SEQ ID NO: 1374909 - RNA, 19 nt, Homo sapiens
  misc_RNA (1)...(19): siRNA sense strand
gaguguguguggugugguu

SEQ ID NO: 1374910 - RNA, 19 nt, Homo sapiens
  misc_RNA (1)...(19): siRNA sense strand
guucuacaguaugaaauug

SEQ ID NO: 1374911 - RNA, 19 nt, Homo sapiens
  misc_RNA (1)...(19): siRNA sense strand
agacagaaccagucaucaa

SEQ ID NO: 1374912 - RNA, 19 nt, Homo sapiens
  misc_RNA (1)...(19): siRNA sense strand
acaaucgacuucuggaaca

SEQ ID NO: 1374913 - RNA, 19 nt, Homo sapiens
  misc_RNA (1)...(19): siRNA sense strand
cuagugagcacacacaguu

SEQ ID NO: 1374914 - RNA, 19 nt, Homo sapiens
  misc_RNA (1)...(19): siRNA sense strand
caagacagaaccagucauc

SEQ ID NO: 1374915 - RNA, 19 nt, Homo sapiens
  misc_RNA (1)...(19): siRNA sense strand
gcaaagcagaaacuuccaa

SEQ ID NO: 1374916 - RNA, 19 nt, Homo sapiens
  misc_RNA (1)...(19): siRNA sense strand
guacuacuccuuggcaaug

SEQ ID NO: 1374917 - RNA, 19 nt, Homo sapiens
  misc_RNA (1)...(19): siRNA sense strand
gcacccggcacgaaaccua

SEQ ID NO: 1374918 - RNA, 19 nt, Homo sapiens
  misc_RNA (1)...(19): siRNA sense strand
cauccaaagcugcuaaaga

SEQ ID NO: 1374919 - RNA, 19 nt, Homo sapiens
  misc_RNA (1)...(19): siRNA sense strand
aaauauggccugcaauagu

SEQ ID NO: 1374920 - RNA, 19 nt, Homo sapiens
  misc_RNA (1)...(19): siRNA sense strand
uugcuaccaugaucuacua

SEQ ID NO: 1374921 - RNA, 19 nt, Homo sapiens
  misc_RNA (1)...(19): siRNA sense strand
aauuaaauauggccugcaa

SEQ ID NO: 1374922 - RNA, 19 nt, Homo sapiens
  misc_RNA (1)...(19): siRNA sense strand
aagcagaaacuuccaagga

SEQ ID NO: 1374923 - RNA, 19 nt, Homo sapiens
  misc_RNA (1)...(19): siRNA sense strand
ccgccagguuuauugcuuu

SEQ ID NO: 1374924 - RNA, 19 nt, Homo sapiens
  misc_RNA (1)...(19): siRNA sense strand
gaacaacgagagggugauc

SEQ ID NO: 1374925 - RNA, 19 nt, Homo sapiens
  misc_RNA (1)...(19): siRNA sense strand
uggaaacacaugaagcuuu

SEQ ID NO: 1374926 - RNA, 19 nt, Homo sapiens
  misc_RNA (1)...(19): siRNA sense strand
gccagugccugucauuguc

SEQ ID NO: 1374927 - RNA, 19 nt, Homo sapiens
  misc_RNA (1)...(19): siRNA sense strand
caugugggcccucuucgaa

SEQ ID NO: 1374928 - RNA, 19 nt, Homo sapiens
  misc_RNA (1)...(19): siRNA sense strand
cauccugguuucaauuaca

SEQ ID NO: 1374929 - RNA, 19 nt, Homo sapiens
  misc_RNA (1)...(19): siRNA sense strand
guauguagaaggagugugu

SEQ ID NO: 1374930 - RNA, 19 nt, Homo sapiens
  misc_RNA (1)...(19): siRNA sense strand
guguuguucuacaguauga

SEQ ID NO: 1374931 - RNA, 19 nt, Homo sapiens
  misc_RNA (1)...(19): siRNA sense strand
aggaggagcuggccuucug

SEQ ID NO: 1374932 - RNA, 19 nt, Homo sapiens
  misc_RNA (1)...(19): siRNA sense strand
aggaggcgcuggacaucuu

SEQ ID NO: 1374933 - RNA, 19 nt, Homo sapiens
  misc_RNA (1)...(19): siRNA sense strand
gcaaagacaaucgacuucu

SEQ ID NO: 1374934 - RNA, 19 nt, Homo sapiens
  misc_RNA (1)...(19): siRNA sense strand
uaaauauggccugcaauag

SEQ ID NO: 1374935 - RNA, 19 nt, Homo sapiens
  misc_RNA (1)...(19): siRNA sense strand
gagugggagcucaaccuaa

SEQ ID NO: 1374936 - RNA, 19 nt, Homo sapiens
  misc_RNA (1)...(19): siRNA sense strand
ccuaacgacccuucagcua

SEQ ID NO: 1374937 - RNA, 19 nt, Homo sapiens
  misc_RNA (1)...(19): siRNA sense strand
agucaucaauggcacaagu

SEQ ID NO: 1374938 - RNA, 19 nt, Homo sapiens
  misc_RNA (1)...(19): siRNA sense strand
ggcaauggcaaagcagaaa

SEQ ID NO: 1374939 - RNA, 19 nt, Homo sapiens
  misc_RNA (1)...(19): siRNA sense strand
gcuggagugcugacaauag

SEQ ID NO: 1374940 - RNA, 19 nt, Homo sapiens
  misc_RNA (1)...(19): siRNA sense strand
aaacggauccugccuugac

SEQ ID NO: 1374941 - RNA, 19 nt, Homo sapiens
  misc_RNA (1)...(19): siRNA sense strand
gaaacggauccugccuuga

SEQ ID NO: 1374942 - RNA, 19 nt, Homo sapiens
  misc_RNA (1)...(19): siRNA sense strand
gcaagaucgagaacaacga

SEQ ID NO: 1374943 - RNA, 19 nt, Homo sapiens
  misc_RNA (1)...(19): siRNA sense strand
cuaccaugaucuacuaugc

SEQ ID NO: 1374944 - RNA, 19 nt, Homo sapiens
  misc_RNA (1)...(19): siRNA sense strand
uguguggugugguuuacuu

SEQ ID NO: 1374945 - RNA, 19 nt, Homo sapiens
  misc_RNA (1)...(19): siRNA sense strand
uggcuggagugcugacaau

SEQ ID NO: 1374946 - RNA, 19 nt, Homo sapiens
  misc_RNA (1)...(19): siRNA sense strand
ggcaaagacaaucgacuuc

SEQ ID NO: 1374947 - RNA, 19 nt, Homo sapiens
  misc_RNA (1)...(19): siRNA sense strand
gccgccagguuuauugcuu

SEQ ID NO: 1374948 - RNA, 19 nt, Homo sapiens
  misc_RNA (1)...(19): siRNA sense strand
ccucagggugguaagguuu

SEQ ID NO: 1374949 - RNA, 19 nt, Homo sapiens
  misc_RNA (1)...(19): siRNA sense strand
ugagggugcuuggacauac

SEQ ID NO: 1374950 - RNA, 19 nt, Homo sapiens
  misc_RNA (1)...(19): siRNA sense strand
cucaagacccugccuggaa

SEQ ID NO: 1374951 - RNA, 19 nt, Homo sapiens
  misc_RNA (1)...(19): siRNA sense strand
cgagcuaguacuaaugaau

SEQ ID NO: 1374952 - RNA, 19 nt, Homo sapiens
  misc_RNA (1)...(19): siRNA sense strand
gcuuggacauacucuucga

SEQ ID NO: 1374953 - RNA, 19 nt, Homo sapiens
  misc_RNA (1)...(19): siRNA sense strand
gugcuuggacauacucuuc

SEQ ID NO: 1374954 - RNA, 19 nt, Homo sapiens
  misc_RNA (1)...(19): siRNA sense strand
gcaugugggcccucuucga

SEQ ID NO: 1374955 - RNA, 19 nt, Homo sapiens
  misc_RNA (1)...(19): siRNA sense strand
gagggugcuuggacauacu

SEQ ID NO: 1374956 - RNA, 19 nt, Homo sapiens
  misc_RNA (1)...(19): siRNA sense strand
cuugacguauguagaagga

SEQ ID NO: 1374957 - RNA, 19 nt, Homo sapiens
  misc_RNA (1)...(19): siRNA sense strand
guuguucuacaguaugaaa

SEQ ID NO: 1374958 - RNA, 19 nt, Homo sapiens
  misc_RNA (1)...(19): siRNA sense strand
cccaauaaacuugaauuca

SEQ ID NO: 1374959 - RNA, 19 nt, Homo sapiens
  misc_RNA (1)...(19): siRNA sense strand
cgacuucuggaacauaaca

SEQ ID NO: 1374960 - RNA, 19 nt, Homo sapiens
  misc_RNA (1)...(19): siRNA sense strand
gagcacacacaguucaaaa

SEQ ID NO: 1374961 - RNA, 19 nt, Homo sapiens
  misc_RNA (1)...(19): siRNA sense strand
agugggagcucaaccuaac

SEQ ID NO: 1374962 - RNA, 19 nt, Homo sapiens
  misc_RNA (1)...(19): siRNA sense strand
cgagagagugggagcucaa

SEQ ID NO: 1374963 - RNA, 19 nt, Homo sapiens
  misc_RNA (1)...(19): siRNA sense strand
acucuucgagcuaguacua

SEQ ID NO: 1374964 - RNA, 19 nt, Homo sapiens
  misc_RNA (1)...(19): siRNA sense strand
cauccuaccuuucuacuua

SEQ ID NO: 1374965 - RNA, 19 nt, Homo sapiens
  misc_RNA (1)...(19): siRNA sense strand
aauauggccugcaauagua

SEQ ID NO: 1374966 - RNA, 19 nt, Homo sapiens
  misc_RNA (1)...(19): siRNA sense strand
gugaggauccugagaauuu

SEQ ID NO: 1374967 - RNA, 19 nt, Homo sapiens
  misc_RNA (1)...(19): siRNA sense strand
ggacauacucuucgagcua

SEQ ID NO: 1374968 - RNA, 19 nt, Homo sapiens
  misc_RNA (1)...(19): siRNA sense strand
ucgccuaugugcucaauua

SEQ ID NO: 1374969 - RNA, 19 nt, Homo sapiens
  misc_RNA (1)...(19): siRNA sense strand
ccuaugugcucaauuacua

SEQ ID NO: 1374970 - RNA, 19 nt, Homo sapiens
  misc_RNA (1)...(19): siRNA sense strand
gaucuacuaugccgagaga

SEQ ID NO: 1374971 - RNA, 19 nt, Homo sapiens
  misc_RNA (1)...(19): siRNA sense strand
gaauaucauugacuuugug

SEQ ID NO: 1374972 - RNA, 19 nt, Homo sapiens
  misc_RNA (1)...(19): siRNA sense strand
caaguguuguucuacagua

SEQ ID NO: 1374973 - RNA, 19 nt, Homo sapiens
  misc_RNA (1)...(19): siRNA sense strand
gaacacgccuggcccuucu

SEQ ID NO: 1374974 - RNA, 19 nt, Homo sapiens
  misc_RNA (1)...(19): siRNA sense strand
gauauuugcuaccaugauc

SEQ ID NO: 1374975 - RNA, 19 nt, Homo sapiens
  misc_RNA (1)...(19): siRNA sense strand
gagcuaguacuaaugaauu

SEQ ID NO: 1374976 - RNA, 19 nt, Homo sapiens
  misc_RNA (1)...(19): siRNA sense strand
uuaaauauggccugcaaua

SEQ ID NO: 1374977 - RNA, 19 nt, Homo sapiens
  misc_RNA (1)...(19): siRNA sense strand
acacaugucugggcaaaga

SEQ ID NO: 1374978 - RNA, 19 nt, Homo sapiens
  misc_RNA (1)...(19): siRNA sense strand
caggcaagcucaccuacuu

SEQ ID NO: 1374979 - RNA, 19 nt, Homo sapiens
  misc_RNA (1)...(19): siRNA sense strand
gcaauaguacacagaguga

SEQ ID NO: 1374980 - RNA, 19 nt, Homo sapiens
  misc_RNA (1)...(19): siRNA sense strand
caaagacaaucgacuucug

SEQ ID NO: 1374981 - RNA, 19 nt, Homo sapiens
  misc_RNA (1)...(19): siRNA sense strand
gauccugccuugacguaug

SEQ ID NO: 1374982 - RNA, 19 nt, Homo sapiens
  misc_RNA (1)...(19): siRNA sense strand
ucagugggcugucauccaa

SEQ ID NO: 1374983 - RNA, 19 nt, Homo sapiens
  misc_RNA (1)...(19): siRNA sense strand
uaacgacccuucagcuagu

SEQ ID NO: 1374984 - RNA, 19 nt, Homo sapiens
  misc_RNA (1)...(19): siRNA sense strand
guacacagagugacacaug

SEQ ID NO: 1374985 - RNA, 19 nt, Homo sapiens
  misc_RNA (1)...(19): siRNA sense strand
guccagagccgccagguuu

SEQ ID NO: 1374986 - RNA, 19 nt, Homo sapiens
  misc_RNA (1)...(19): siRNA sense strand
gagcccugcugcuggauga

SEQ ID NO: 1374987 - RNA, 19 nt, Homo sapiens
  misc_RNA (1)...(19): siRNA sense strand
caaagcugcuaaagaugug

SEQ ID NO: 1374988 - RNA, 19 nt, Homo sapiens
  misc_RNA (1)...(19): siRNA sense strand
ccaaagcugcuaaagaugu

SEQ ID NO: 1374989 - RNA, 19 nt, Homo sapiens
  misc_RNA (1)...(19): siRNA sense strand
auccaaagcugcuaaagau

SEQ ID NO: 1374990 - RNA, 19 nt, Homo sapiens
  misc_RNA (1)...(19): siRNA sense strand
gggcaaagacaaucgacuu

SEQ ID NO: 1374991 - RNA, 19 nt, Homo sapiens
  misc_RNA (1)...(19): siRNA sense strand
gacagaaccagucaucaau

SEQ ID NO: 1374992 - RNA, 19 nt, Homo sapiens
  misc_RNA (1)...(19): siRNA sense strand
cagaaccagucaucaaugg

SEQ ID NO: 1374993 - RNA, 19 nt, Homo sapiens
  misc_RNA (1)...(19): siRNA sense strand
ccaagaggcugggcaucga

SEQ ID NO: 1374994 - RNA, 19 nt, Homo sapiens
  misc_RNA (1)...(19): siRNA sense strand
gaguguguguggugugguu

SEQ ID NO: 1374995 - RNA, 19 nt, Homo sapiens
  misc_RNA (1)...(19): siRNA sense strand
guucuacaguaugaaauug

SEQ ID NO: 1374996 - RNA, 19 nt, Homo sapiens
  misc_RNA (1)...(19): siRNA sense strand
agacagaaccagucaucaa

SEQ ID NO: 1374997 - RNA, 19 nt, Homo sapiens
  misc_RNA (1)...(19): siRNA sense strand
acaaucgacuucuggaaca

SEQ ID NO: 1374998 - RNA, 19 nt, Homo sapiens
  misc_RNA (1)...(19): siRNA sense strand
cuagugagcacacacaguu

SEQ ID NO: 1374999 - RNA, 19 nt, Homo sapiens
  misc_RNA (1)...(19): siRNA sense strand
caagacagaaccagucauc

SEQ ID NO: 1375000 - RNA, 19 nt, Homo sapiens
  misc_RNA (1)...(19): siRNA sense strand
gcaaagcagaaacuuccaa

SEQ ID NO: 1375001 - RNA, 19 nt, Homo sapiens
  misc_RNA (1)...(19): siRNA sense strand
guacuacuccuuggcaaug

SEQ ID NO: 1375002 - RNA, 19 nt, Homo sapiens
  misc_RNA (1)...(19): siRNA sense strand
gcacccggcacgaaaccua

SEQ ID NO: 1375003 - RNA, 19 nt, Homo sapiens
  misc_RNA (1)...(19): siRNA sense strand
cauccaaagcugcuaaaga

SEQ ID NO: 1375004 - RNA, 19 nt, Homo sapiens
  misc_RNA (1)...(19): siRNA sense strand
aaauauggccugcaauagu

SEQ ID NO: 1375005 - RNA, 19 nt, Homo sapiens
  misc_RNA (1)...(19): siRNA sense strand
uugcuaccaugaucuacua

SEQ ID NO: 1375006 - RNA, 19 nt, Homo sapiens
  misc_RNA (1)...(19): siRNA sense strand
aauuaaauauggccugcaa

SEQ ID NO: 1375007 - RNA, 19 nt, Homo sapiens
  misc_RNA (1)...(19): siRNA sense strand
aagcagaaacuuccaagga

SEQ ID NO: 1375008 - RNA, 19 nt, Homo sapiens
  misc_RNA (1)...(19): siRNA sense strand
ccgccagguuuauugcuuu

SEQ ID NO: 1375009 - RNA, 19 nt, Homo sapiens
  misc_RNA (1)...(19): siRNA sense strand
gaacaacgagagggugauc

SEQ ID NO: 1375010 - RNA, 19 nt, Homo sapiens
  misc_RNA (1)...(19): siRNA sense strand
uggaaacacaugaagcuuu

SEQ ID NO: 1375011 - RNA, 19 nt, Homo sapiens
  misc_RNA (1)...(19): siRNA sense strand
gccagugccugucauuguc

SEQ ID NO: 1375012 - RNA, 19 nt, Homo sapiens
  misc_RNA (1)...(19): siRNA sense strand
caugugggcccucuucgaa

SEQ ID NO: 1375013 - RNA, 19 nt, Homo sapiens
  misc_RNA (1)...(19): siRNA sense strand
cauccugguuucaauuaca

SEQ ID NO: 1375014 - RNA, 19 nt, Homo sapiens
  misc_RNA (1)...(19): siRNA sense strand
guauguagaaggagugugu

SEQ ID NO: 1375015 - RNA, 19 nt, Homo sapiens
  misc_RNA (1)...(19): siRNA sense strand
guguuguucuacaguauga

SEQ ID NO: 1375016 - RNA, 19 nt, Homo sapiens
  misc_RNA (1)...(19): siRNA sense strand
aggaggagcuggccuucug

SEQ ID NO: 1375017 - RNA, 19 nt, Homo sapiens
  misc_RNA (1)...(19): siRNA sense strand
aggaggcgcuggacaucuu

SEQ ID NO: 1375018 - RNA, 19 nt, Homo sapiens
  misc_RNA (1)...(19): siRNA sense strand
gcaaagacaaucgacuucu

SEQ ID NO: 1375019 - RNA, 19 nt, Homo sapiens
  misc_RNA (1)...(19): siRNA sense strand
uaaauauggccugcaauag

SEQ ID NO: 1375020 - RNA, 19 nt, Homo sapiens
  misc_RNA (1)...(19): siRNA sense strand
gagugggagcucaaccuaa

SEQ ID NO: 1375021 - RNA, 19 nt, Homo sapiens
  misc_RNA (1)...(19): siRNA sense strand
ccuaacgacccuucagcua

SEQ ID NO: 1375022 - RNA, 19 nt, Homo sapiens
  misc_RNA (1)...(19): siRNA sense strand
agucaucaauggcacaagu

SEQ ID NO: 1375023 - RNA, 19 nt, Homo sapiens
  misc_RNA (1)...(19): siRNA sense strand
ggcaauggcaaagcagaaa

SEQ ID NO: 1375024 - RNA, 19 nt, Homo sapiens
  misc_RNA (1)...(19): siRNA sense strand
gcuggagugcugacaauag

SEQ ID NO: 1375025 - RNA, 19 nt, Homo sapiens
  misc_RNA (1)...(19): siRNA sense strand
aaacggauccugccuugac

SEQ ID NO: 1375026 - RNA, 19 nt, Homo sapiens
  misc_RNA (1)...(19): siRNA sense strand
gaaacggauccugccuuga

SEQ ID NO: 1375027 - RNA, 19 nt, Homo sapiens
  misc_RNA (1)...(19): siRNA sense strand
gcaagaucgagaacaacga

SEQ ID NO: 1375028 - RNA, 19 nt, Homo sapiens
  misc_RNA (1)...(19): siRNA sense strand
cuaccaugaucuacuaugc

SEQ ID NO: 1375029 - RNA, 19 nt, Homo sapiens
  misc_RNA (1)...(19): siRNA sense strand
uguguggugugguuuacuu

SEQ ID NO: 1375030 - RNA, 19 nt, Homo sapiens
  misc_RNA (1)...(19): siRNA sense strand
uggcuggagugcugacaau

SEQ ID NO: 1375031 - RNA, 19 nt, Homo sapiens
  misc_RNA (1)...(19): siRNA sense strand
ggcaaagacaaucgacuuc

SEQ ID NO: 1375032 - RNA, 19 nt, Homo sapiens
  misc_RNA (1)...(19): siRNA sense strand
gccgccagguuuauugcuu

SEQ ID NO: 1375033 - RNA, 19 nt, Homo sapiens
  misc_RNA (1)...(19): siRNA sense strand
ccucagggugguaagguuu

SEQ ID NO: 1375034 - RNA, 19 nt, Homo sapiens
  misc_RNA (1)...(19): siRNA sense strand
ugagggugcuuggacauac

SEQ ID NO: 1375035 - RNA, 19 nt, Homo sapiens
  misc_RNA (1)...(19): siRNA sense strand
cucaagacccugccuggaa

SEQ ID NO: 1375036 - RNA, 19 nt, Homo sapiens
  misc_RNA (1)...(19): siRNA sense strand
cgagcuaguacuaaugaau

SEQ ID NO: 1375037 - RNA, 19 nt, Homo sapiens
  misc_RNA (1)...(19): siRNA sense strand
gcuuggacauacucuucga

SEQ ID NO: 1375038 - RNA, 19 nt, Homo sapiens
  misc_RNA (1)...(19): siRNA sense strand
gugcuuggacauacucuuc

SEQ ID NO: 1375039 - RNA, 19 nt, Homo sapiens
  misc_RNA (1)...(19): siRNA sense strand
gcaugugggcccucuucga

SEQ ID NO: 1375040 - RNA, 19 nt, Homo sapiens
  misc_RNA (1)...(19): siRNA sense strand
gagggugcuuggacauacu

SEQ ID NO: 1375041 - RNA, 19 nt, Homo sapiens
  misc_RNA (1)...(19): siRNA sense strand
cuugacguauguagaagga

SEQ ID NO: 1375042 - RNA, 19 nt, Homo sapiens
  misc_RNA (1)...(19): siRNA sense strand
guuguucuacaguaugaaa

SEQ ID NO: 1375043 - RNA, 19 nt, Homo sapiens
  misc_RNA (1)...(19): siRNA sense strand
cccaauaaacuugaauuca

SEQ ID NO: 1375044 - RNA, 19 nt, Homo sapiens
  misc_RNA (1)...(19): siRNA sense strand
cgacuucuggaacauaaca

SEQ ID NO: 1375045 - RNA, 19 nt, Homo sapiens
  misc_RNA (1)...(19): siRNA sense strand
gagcacacacaguucaaaa

SEQ ID NO: 1375046 - RNA, 19 nt, Homo sapiens
  misc_RNA (1)...(19): siRNA sense strand
agugggagcucaaccuaac

SEQ ID NO: 1375047 - RNA, 19 nt, Homo sapiens
  misc_RNA (1)...(19): siRNA sense strand
cgagagagugggagcucaa

SEQ ID NO: 1375048 - RNA, 19 nt, Homo sapiens
  misc_RNA (1)...(19): siRNA sense strand
acucuucgagcuaguacua

SEQ ID NO: 1375049 - RNA, 19 nt, Homo sapiens
  misc_RNA (1)...(19): siRNA sense strand
cauccuaccuuucuacuua

SEQ ID NO: 1375050 - RNA, 19 nt, Homo sapiens
  misc_RNA (1)...(19): siRNA sense strand
aauauggccugcaauagua

SEQ ID NO: 1375051 - RNA, 19 nt, Homo sapiens
  misc_RNA (1)...(19): siRNA sense strand
gugaggauccugagaauuu

SEQ ID NO: 1375052 - RNA, 19 nt, Homo sapiens
  misc_RNA (1)...(19): siRNA sense strand
ggacauacucuucgagcua

SEQ ID NO: 1375053 - RNA, 19 nt, Homo sapiens
  misc_RNA (1)...(19): siRNA sense strand
ucgccuaugugcucaauua

SEQ ID NO: 1375054 - RNA, 19 nt, Homo sapiens
  misc_RNA (1)...(19): siRNA sense strand
ccuaugugcucaauuacua

SEQ ID NO: 1375055 - RNA, 19 nt, Homo sapiens
  misc_RNA (1)...(19): siRNA sense strand
gaucuacuaugccgagaga

SEQ ID NO: 1375056 - RNA, 19 nt, Homo sapiens
  misc_RNA (1)...(19): siRNA sense strand
gaauaucauugacuuugug

SEQ ID NO: 1375057 - RNA, 19 nt, Homo sapiens
  misc_RNA (1)...(19): siRNA sense strand
caaguguuguucuacagua

SEQ ID NO: 1375058 - RNA, 19 nt, Homo sapiens
  misc_RNA (1)...(19): siRNA sense strand
gaacacgccuggcccuucu

SEQ ID NO: 1375059 - RNA, 19 nt, Homo sapiens
  misc_RNA (1)...(19): siRNA sense strand
gauauuugcuaccaugauc

SEQ ID NO: 1375060 - RNA, 19 nt, Homo sapiens
  misc_RNA (1)...(19): siRNA sense strand
gagcuaguacuaaugaauu

SEQ ID NO: 1375061 - RNA, 19 nt, Homo sapiens
  misc_RNA (1)...(19): siRNA sense strand
uuaaauauggccugcaaua

SEQ ID NO: 1375062 - RNA, 19 nt, Homo sapiens
  misc_RNA (1)...(19): siRNA sense strand
acacaugucugggcaaaga

SEQ ID NO: 1375063 - RNA, 19 nt, Homo sapiens
  misc_RNA (1)...(19): siRNA sense strand
caggcaagcucaccuacuu

SEQ ID NO: 1375064 - RNA, 19 nt, Homo sapiens
  misc_RNA (1)...(19): siRNA sense strand
gcaauaguacacagaguga

SEQ ID NO: 1375065 - RNA, 19 nt, Homo sapiens
  misc_RNA (1)...(19): siRNA sense strand
caaagacaaucgacuucug

SEQ ID NO: 1375066 - RNA, 19 nt, Homo sapiens
  misc_RNA (1)...(19): siRNA sense strand
gauccugccuugacguaug

SEQ ID NO: 1375067 - RNA, 19 nt, Homo sapiens
  misc_RNA (1)...(19): siRNA sense strand
ucagugggcugucauccaa

SEQ ID NO: 1375068 - RNA, 19 nt, Homo sapiens
  misc_RNA (1)...(19): siRNA sense strand
uaacgacccuucagcuagu

SEQ ID NO: 1375069 - RNA, 19 nt, Homo sapiens
  misc_RNA (1)...(19): siRNA sense strand
guacacagagugacacaug

SEQ ID NO: 1375070 - RNA, 19 nt, Homo sapiens
  misc_RNA (1)...(19): siRNA sense strand
guccagagccgccagguuu

SEQ ID NO: 1375071 - RNA, 19 nt, Homo sapiens
  misc_RNA (1)...(19): siRNA sense strand
gagcccugcugcuggauga

SEQ ID NO: 1375072 - RNA, 19 nt, Homo sapiens
  misc_RNA (1)...(19): siRNA sense strand
caaagcugcuaaagaugug

SEQ ID NO: 1375073 - RNA, 19 nt, Homo sapiens
  misc_RNA (1)...(19): siRNA sense strand
ccaaagcugcuaaagaugu

SEQ ID NO: 1375074 - RNA, 19 nt, Homo sapiens
  misc_RNA (1)...(19): siRNA sense strand
auccaaagcugcuaaagau

SEQ ID NO: 1375075 - RNA, 19 nt, Homo sapiens
  misc_RNA (1)...(19): siRNA sense strand
gggcaaagacaaucgacuu

SEQ ID NO: 1375076 - RNA, 19 nt, Homo sapiens
  misc_RNA (1)...(19): siRNA sense strand
gacagaaccagucaucaau

SEQ ID NO: 1375077 - RNA, 19 nt, Homo sapiens
  misc_RNA (1)...(19): siRNA sense strand
cagaaccagucaucaaugg

SEQ ID NO: 1375078 - RNA, 19 nt, Homo sapiens
  misc_RNA (1)...(19): siRNA sense strand
ccaagaggcugggcaucga

SEQ ID NO: 1375079 - RNA, 19 nt, Homo sapiens
  misc_RNA (1)...(19): siRNA sense strand
gaguguguguggugugguu

SEQ ID NO: 1375080 - RNA, 19 nt, Homo sapiens
  misc_RNA (1)...(19): siRNA sense strand
guucuacaguaugaaauug

SEQ ID NO: 1375081 - RNA, 19 nt, Homo sapiens
  misc_RNA (1)...(19): siRNA sense strand
agacagaaccagucaucaa

SEQ ID NO: 1375082 - RNA, 19 nt, Homo sapiens
  misc_RNA (1)...(19): siRNA sense strand
acaaucgacuucuggaaca

SEQ ID NO: 1375083 - RNA, 19 nt, Homo sapiens
  misc_RNA (1)...(19): siRNA sense strand
cuagugagcacacacaguu

SEQ ID NO: 1375084 - RNA, 19 nt, Homo sapiens
  misc_RNA (1)...(19): siRNA sense strand
caagacagaaccagucauc

SEQ ID NO: 1375085 - RNA, 19 nt, Homo sapiens
  misc_RNA (1)...(19): siRNA sense strand
gcaaagcagaaacuuccaa

SEQ ID NO: 1375086 - RNA, 19 nt, Homo sapiens
  misc_RNA (1)...(19): siRNA sense strand
guacuacuccuuggcaaug

SEQ ID NO: 1375087 - RNA, 19 nt, Homo sapiens
  misc_RNA (1)...(19): siRNA sense strand
gcacccggcacgaaaccua

SEQ ID NO: 1375088 - RNA, 19 nt, Homo sapiens
  misc_RNA (1)...(19): siRNA sense strand
cauccaaagcugcuaaaga

SEQ ID NO: 1375089 - RNA, 19 nt, Homo sapiens
  misc_RNA (1)...(19): siRNA sense strand
aaauauggccugcaauagu

SEQ ID NO: 1375090 - RNA, 19 nt, Homo sapiens
  misc_RNA (1)...(19): siRNA sense strand
uugcuaccaugaucuacua

SEQ ID NO: 1375091 - RNA, 19 nt, Homo sapiens
  misc_RNA (1)...(19): siRNA sense strand
aauuaaauauggccugcaa

SEQ ID NO: 1375092 - RNA, 19 nt, Homo sapiens
  misc_RNA (1)...(19): siRNA sense strand
aagcagaaacuuccaagga

SEQ ID NO: 1375093 - RNA, 19 nt, Homo sapiens
  misc_RNA (1)...(19): siRNA sense strand
ccgccagguuuauugcuuu

SEQ ID NO: 1375094 - RNA, 19 nt, Homo sapiens
  misc_RNA (1)...(19): siRNA sense strand
gaacaacgagagggugauc

SEQ ID NO: 1375095 - RNA, 19 nt, Homo sapiens
  misc_RNA (1)...(19): siRNA sense strand
uggaaacacaugaagcuuu

SEQ ID NO: 1375096 - RNA, 19 nt, Homo sapiens
  misc_RNA (1)...(19): siRNA sense strand
gccagugccugucauuguc

SEQ ID NO: 1375097 - RNA, 19 nt, Homo sapiens
  misc_RNA (1)...(19): siRNA sense strand
caugugggcccucuucgaa

SEQ ID NO: 1375098 - RNA, 19 nt, Homo sapiens
  misc_RNA (1)...(19): siRNA sense strand
cauccugguuucaauuaca

SEQ ID NO: 1375099 - RNA, 19 nt, Homo sapiens
  misc_RNA (1)...(19): siRNA sense strand
guauguagaaggagugugu

SEQ ID NO: 1375100 - RNA, 19 nt, Homo sapiens
  misc_RNA (1)...(19): siRNA sense strand
guguuguucuacaguauga

SEQ ID NO: 1375101 - RNA, 19 nt, Homo sapiens
  misc_RNA (1)...(19): siRNA sense strand
aggaggagcuggccuucug

SEQ ID NO: 1375102 - RNA, 19 nt, Homo sapiens
  misc_RNA (1)...(19): siRNA sense strand
aggaggcgcuggacaucuu

SEQ ID NO: 1375103 - RNA, 19 nt, Homo sapiens
  misc_RNA (1)...(19): siRNA sense strand
gcaaagacaaucgacuucu

SEQ ID NO: 1375104 - RNA, 19 nt, Homo sapiens
  misc_RNA (1)...(19): siRNA sense strand
uaaauauggccugcaauag

SEQ ID NO: 1375105 - RNA, 19 nt, Homo sapiens
  misc_RNA (1)...(19): siRNA sense strand
gagugggagcucaaccuaa

SEQ ID NO: 1375106 - RNA, 19 nt, Homo sapiens
  misc_RNA (1)...(19): siRNA sense strand
ccuaacgacccuucagcua

SEQ ID NO: 1375107 - RNA, 19 nt, Homo sapiens
  misc_RNA (1)...(19): siRNA sense strand
agucaucaauggcacaagu

SEQ ID NO: 1375108 - RNA, 19 nt, Homo sapiens
  misc_RNA (1)...(19): siRNA sense strand
ggcaauggcaaagcagaaa

SEQ ID NO: 1375109 - RNA, 19 nt, Homo sapiens
  misc_RNA (1)...(19): siRNA sense strand
gcuggagugcugacaauag

SEQ ID NO: 1375110 - RNA, 19 nt, Homo sapiens
  misc_RNA (1)...(19): siRNA sense strand
aaacggauccugccuugac

SEQ ID NO: 1375111 - RNA, 19 nt, Homo sapiens
  misc_RNA (1)...(19): siRNA sense strand
gaaacggauccugccuuga

SEQ ID NO: 1375112 - RNA, 19 nt, Homo sapiens
  misc_RNA (1)...(19): siRNA sense strand
gcaagaucgagaacaacga

SEQ ID NO: 1375113 - RNA, 19 nt, Homo sapiens
  misc_RNA (1)...(19): siRNA sense strand
cuaccaugaucuacuaugc

SEQ ID NO: 1375114 - RNA, 19 nt, Homo sapiens
  misc_RNA (1)...(19): siRNA sense strand
uguguggugugguuuacuu

SEQ ID NO: 1375115 - RNA, 19 nt, Homo sapiens
  misc_RNA (1)...(19): siRNA sense strand
uggcuggagugcugacaau

SEQ ID NO: 1375116 - RNA, 19 nt, Homo sapiens
  misc_RNA (1)...(19): siRNA sense strand
ggcaaagacaaucgacuuc

SEQ ID NO: 1375117 - RNA, 19 nt, Homo sapiens
  misc_RNA (1)...(19): siRNA sense strand
gccgccagguuuauugcuu

SEQ ID NO: 1375118 - RNA, 19 nt, Homo sapiens
  misc_RNA (1)...(19): siRNA sense strand
ccucagggugguaagguuu

SEQ ID NO: 1375119 - RNA, 19 nt, Homo sapiens
  misc_RNA (1)...(19): siRNA sense strand
ugagggugcuuggacauac

SEQ ID NO: 1375120 - RNA, 19 nt, Homo sapiens
  misc_RNA (1)...(19): siRNA sense strand
cucaagacccugccuggaa

SEQ ID NO: 1375121 - RNA, 19 nt, Homo sapiens
  misc_RNA (1)...(19): siRNA sense strand
cgagcuaguacuaaugaau

SEQ ID NO: 1375122 - RNA, 19 nt, Homo sapiens
  misc_RNA (1)...(19): siRNA sense strand
gcuuggacauacucuucga

SEQ ID NO: 1375123 - RNA, 19 nt, Homo sapiens
  misc_RNA (1)...(19): siRNA sense strand
gugcuuggacauacucuuc

SEQ ID NO: 1375124 - RNA, 19 nt, Homo sapiens
  misc_RNA (1)...(19): siRNA sense strand
gcaugugggcccucuucga

SEQ ID NO: 1375125 - RNA, 19 nt, Homo sapiens
  misc_RNA (1)...(19): siRNA sense strand
gagggugcuuggacauacu

SEQ ID NO: 1375126 - RNA, 19 nt, Homo sapiens
  misc_RNA (1)...(19): siRNA sense strand
cuugacguauguagaagga

SEQ ID NO: 1375127 - RNA, 19 nt, Homo sapiens
  misc_RNA (1)...(19): siRNA sense strand
guuguucuacaguaugaaa

SEQ ID NO: 1375128 - RNA, 19 nt, Homo sapiens
  misc_RNA (1)...(19): siRNA sense strand
cccaauaaacuugaauuca

SEQ ID NO: 1375129 - RNA, 19 nt, Homo sapiens
  misc_RNA (1)...(19): siRNA sense strand
cgacuucuggaacauaaca

SEQ ID NO: 1375130 - RNA, 19 nt, Homo sapiens
  misc_RNA (1)...(19): siRNA sense strand
gagcacacacaguucaaaa

SEQ ID NO: 1375131 - RNA, 19 nt, Homo sapiens
  misc_RNA (1)...(19): siRNA sense strand
agugggagcucaaccuaac

SEQ ID NO: 1375132 - RNA, 19 nt, Homo sapiens
  misc_RNA (1)...(19): siRNA sense strand
cgagagagugggagcucaa

SEQ ID NO: 1375133 - RNA, 19 nt, Homo sapiens
  misc_RNA (1)...(19): siRNA sense strand
acucuucgagcuaguacua

SEQ ID NO: 1375134 - RNA, 19 nt, Homo sapiens
  misc_RNA (1)...(19): siRNA sense strand
gaaguaauguucucagcuu

SEQ ID NO: 1375135 - RNA, 19 nt, Homo sapiens
  misc_RNA (1)...(19): siRNA sense strand
ccacagacaugcaccauau

SEQ ID NO: 1375136 - RNA, 19 nt, Homo sapiens
  misc_RNA (1)...(19): siRNA sense strand
uuucuagccuggauuaaua

SEQ ID NO: 1375137 - RNA, 19 nt, Homo sapiens
  misc_RNA (1)...(19): siRNA sense strand
aaagagccauccaagcuaa

SEQ ID NO: 1375138 - RNA, 19 nt, Homo sapiens
  misc_RNA (1)...(19): siRNA sense strand
ucacuauccuguccacauu

SEQ ID NO: 1375139 - RNA, 19 nt, Homo sapiens
  misc_RNA (1)...(19): siRNA sense strand
ccacgcugcugccauuaaa

SEQ ID NO: 1375140 - RNA, 19 nt, Homo sapiens
  misc_RNA (1)...(19): siRNA sense strand
agaagagaguuuccaagaa

SEQ ID NO: 1375141 - RNA, 19 nt, Homo sapiens
  misc_RNA (1)...(19): siRNA sense strand
gguccacgcugcugccauu

SEQ ID NO: 1375142 - RNA, 19 nt, Homo sapiens
  misc_RNA (1)...(19): siRNA sense strand
uagccuggauuaauaagaa

SEQ ID NO: 1375143 - RNA, 19 nt, Homo sapiens
  misc_RNA (1)...(19): siRNA sense strand
gagacucugcagaucauua

SEQ ID NO: 1375144 - RNA, 19 nt, Homo sapiens
  misc_RNA (1)...(19): siRNA sense strand
uagaagagaguuuccaaga

SEQ ID NO: 1375145 - RNA, 19 nt, Homo sapiens
  misc_RNA (1)...(19): siRNA sense strand
agacaugcaccauauagaa

SEQ ID NO: 1375146 - RNA, 19 nt, Homo sapiens
  misc_RNA (1)...(19): siRNA sense strand
ugggagagcucgacgucuu

SEQ ID NO: 1375147 - RNA, 19 nt, Homo sapiens
  misc_RNA (1)...(19): siRNA sense strand
ggacaggguguucaaggau

SEQ ID NO: 1375148 - RNA, 19 nt, Homo sapiens
  misc_RNA (1)...(19): siRNA sense strand
gcagcauugccaacucuuu

SEQ ID NO: 1375149 - RNA, 19 nt, Homo sapiens
  misc_RNA (1)...(19): siRNA sense strand
gcuccuggguacaauacug

SEQ ID NO: 1375150 - RNA, 19 nt, Homo sapiens
  misc_RNA (1)...(19): siRNA sense strand
uacaguguguuucccuuug

SEQ ID NO: 1375151 - RNA, 19 nt, Homo sapiens
  misc_RNA (1)...(19): siRNA sense strand
gggagagcucgacgucuuu

SEQ ID NO: 1375152 - RNA, 19 nt, Homo sapiens
  misc_RNA (1)...(19): siRNA sense strand
agacucugcagaucauuaa

SEQ ID NO: 1375153 - RNA, 19 nt, Homo sapiens
  misc_RNA (1)...(19): siRNA sense strand
gaaguuacaguguguuucc

SEQ ID NO: 1375154 - RNA, 19 nt, Homo sapiens
  misc_RNA (1)...(19): siRNA sense strand
cagcagcauugccaacucu

SEQ ID NO: 1375155 - RNA, 19 nt, Homo sapiens
  misc_RNA (1)...(19): siRNA sense strand
ugccaacucuuuccucuac

SEQ ID NO: 1375156 - RNA, 19 nt, Homo sapiens
  misc_RNA (1)...(19): siRNA sense strand
ccaacucuuuccucuacau

SEQ ID NO: 1375157 - RNA, 19 nt, Homo sapiens
  misc_RNA (1)...(19): siRNA sense strand
gaaucaugaaguaauguuc

SEQ ID NO: 1375158 - RNA, 19 nt, Homo sapiens
  misc_RNA (1)...(19): siRNA sense strand
gagcucgacgucuuucuag

SEQ ID NO: 1375159 - RNA, 19 nt, Homo sapiens
  misc_RNA (1)...(19): siRNA sense strand
uggacaggguguucaagga

SEQ ID NO: 1375160 - RNA, 19 nt, Homo sapiens
  misc_RNA (1)...(19): siRNA sense strand
gauauugugcucaguagac

SEQ ID NO: 1375161 - RNA, 19 nt, Homo sapiens
  misc_RNA (1)...(19): siRNA sense strand
gacaugcaccauauagaag

SEQ ID NO: 1375162 - RNA, 19 nt, Homo sapiens
  misc_RNA (1)...(19): siRNA sense strand
cagcauugccaacucuuuc

SEQ ID NO: 1375163 - RNA, 19 nt, Homo sapiens
  misc_RNA (1)...(19): siRNA sense strand
uauagaagagaguuuccaa

SEQ ID NO: 1375164 - RNA, 19 nt, Homo sapiens
  misc_RNA (1)...(19): siRNA sense strand
uggagacucugcagaucau

SEQ ID NO: 1375165 - RNA, 19 nt, Homo sapiens
  misc_RNA (1)...(19): siRNA sense strand
caaaagagccauccaagcu

SEQ ID NO: 1375166 - RNA, 19 nt, Homo sapiens
  misc_RNA (1)...(19): siRNA sense strand
ccauauagaagagaguuuc

SEQ ID NO: 1375167 - RNA, 19 nt, Homo sapiens
  misc_RNA (1)...(19): siRNA sense strand
acaggguguucaaggauca

SEQ ID NO: 1375168 - RNA, 19 nt, Homo sapiens
  misc_RNA (1)...(19): siRNA sense strand
aaacucugcggcaauguca

SEQ ID NO: 1375169 - RNA, 19 nt, Homo sapiens
  misc_RNA (1)...(19): siRNA sense strand
ccaccaaugccaccagagu

SEQ ID NO: 1375170 - RNA, 19 nt, Homo sapiens
  misc_RNA (1)...(19): siRNA sense strand
acagacaugcaccauauag

SEQ ID NO: 1375171 - RNA, 19 nt, Homo sapiens
  misc_RNA (1)...(19): siRNA sense strand
uuacaguguguuucccuuu

SEQ ID NO: 1375172 - RNA, 19 nt, Homo sapiens
  misc_RNA (1)...(19): siRNA sense strand
gaaguaauguucucagcuu

SEQ ID NO: 1375173 - RNA, 19 nt, Homo sapiens
  misc_RNA (1)...(19): siRNA sense strand
ccacagacaugcaccauau

SEQ ID NO: 1375174 - RNA, 19 nt, Homo sapiens
  misc_RNA (1)...(19): siRNA sense strand
uuucuagccuggauuaaua

SEQ ID NO: 1375175 - RNA, 19 nt, Homo sapiens
  misc_RNA (1)...(19): siRNA sense strand
aaagagccauccaagcuaa

SEQ ID NO: 1375176 - RNA, 19 nt, Homo sapiens
  misc_RNA (1)...(19): siRNA sense strand
ucacuauccuguccacauu

SEQ ID NO: 1375177 - RNA, 19 nt, Homo sapiens
  misc_RNA (1)...(19): siRNA sense strand
ccacgcugcugccauuaaa

SEQ ID NO: 1375178 - RNA, 19 nt, Homo sapiens
  misc_RNA (1)...(19): siRNA sense strand
agaagagaguuuccaagaa

SEQ ID NO: 1375179 - RNA, 19 nt, Homo sapiens
  misc_RNA (1)...(19): siRNA sense strand
gguccacgcugcugccauu

SEQ ID NO: 1375180 - RNA, 19 nt, Homo sapiens
  misc_RNA (1)...(19): siRNA sense strand
uagccuggauuaauaagaa

SEQ ID NO: 1375181 - RNA, 19 nt, Homo sapiens
  misc_RNA (1)...(19): siRNA sense strand
gcaugaaguuacagugugu

SEQ ID NO: 1375182 - RNA, 19 nt, Homo sapiens
  misc_RNA (1)...(19): siRNA sense strand
gagacucugcagaucauua

SEQ ID NO: 1375183 - RNA, 19 nt, Homo sapiens
  misc_RNA (1)...(19): siRNA sense strand
uagaagagaguuuccaaga

SEQ ID NO: 1375184 - RNA, 19 nt, Homo sapiens
  misc_RNA (1)...(19): siRNA sense strand
agacaugcaccauauagaa

SEQ ID NO: 1375185 - RNA, 19 nt, Homo sapiens
  misc_RNA (1)...(19): siRNA sense strand
ugggagagcucgacgucuu

SEQ ID NO: 1375186 - RNA, 19 nt, Homo sapiens
  misc_RNA (1)...(19): siRNA sense strand
ggacaggguguucaaggau

SEQ ID NO: 1375187 - RNA, 19 nt, Homo sapiens
  misc_RNA (1)...(19): siRNA sense strand
gcagcauugccaacucuuu

SEQ ID NO: 1375188 - RNA, 19 nt, Homo sapiens
  misc_RNA (1)...(19): siRNA sense strand
uacaguguguuucccuuug

SEQ ID NO: 1375189 - RNA, 19 nt, Homo sapiens
  misc_RNA (1)...(19): siRNA sense strand
gggagagcucgacgucuuu

SEQ ID NO: 1375190 - RNA, 19 nt, Homo sapiens
  misc_RNA (1)...(19): siRNA sense strand
gcuccuggguacaauacug

SEQ ID NO: 1375191 - RNA, 19 nt, Homo sapiens
  misc_RNA (1)...(19): siRNA sense strand
agacucugcagaucauuaa

SEQ ID NO: 1375192 - RNA, 19 nt, Homo sapiens
  misc_RNA (1)...(19): siRNA sense strand
gaaguuacaguguguuucc

SEQ ID NO: 1375193 - RNA, 19 nt, Homo sapiens
  misc_RNA (1)...(19): siRNA sense strand
cagcagcauugccaacucu

SEQ ID NO: 1375194 - RNA, 19 nt, Homo sapiens
  misc_RNA (1)...(19): siRNA sense strand
ugccaacucuuuccucuac

SEQ ID NO: 1375195 - RNA, 19 nt, Homo sapiens
  misc_RNA (1)...(19): siRNA sense strand
ccaacucuuuccucuacau

SEQ ID NO: 1375196 - RNA, 19 nt, Homo sapiens
  misc_RNA (1)...(19): siRNA sense strand
gaaucaugaaguaauguuc

SEQ ID NO: 1375197 - RNA, 19 nt, Homo sapiens
  misc_RNA (1)...(19): siRNA sense strand
gagcucgacgucuuucuag

SEQ ID NO: 1375198 - RNA, 19 nt, Homo sapiens
  misc_RNA (1)...(19): siRNA sense strand
uggacaggguguucaagga

SEQ ID NO: 1375199 - RNA, 19 nt, Homo sapiens
  misc_RNA (1)...(19): siRNA sense strand
gauauugugcucaguagac

SEQ ID NO: 1375200 - RNA, 19 nt, Homo sapiens
  misc_RNA (1)...(19): siRNA sense strand
gacaugcaccauauagaag

SEQ ID NO: 1375201 - RNA, 19 nt, Homo sapiens
  misc_RNA (1)...(19): siRNA sense strand
cagcauugccaacucuuuc

SEQ ID NO: 1375202 - RNA, 19 nt, Homo sapiens
  misc_RNA (1)...(19): siRNA sense strand
uauagaagagaguuuccaa

SEQ ID NO: 1375203 - RNA, 19 nt, Homo sapiens
  misc_RNA (1)...(19): siRNA sense strand
uggagacucugcagaucau

SEQ ID NO: 1375204 - RNA, 19 nt, Homo sapiens
  misc_RNA (1)...(19): siRNA sense strand
caaaagagccauccaagcu

SEQ ID NO: 1375205 - RNA, 19 nt, Homo sapiens
  misc_RNA (1)...(19): siRNA sense strand
ccauauagaagagaguuuc

SEQ ID NO: 1375206 - RNA, 19 nt, Homo sapiens
  misc_RNA (1)...(19): siRNA sense strand
acaggguguucaaggauca

SEQ ID NO: 1375207 - RNA, 19 nt, Homo sapiens
  misc_RNA (1)...(19): siRNA sense strand
aaacucugcggcaauguca

SEQ ID NO: 1375208 - RNA, 19 nt, Homo sapiens
  misc_RNA (1)...(19): siRNA sense strand
ccaccaaugccaccagagu

SEQ ID NO: 1375209 - RNA, 19 nt, Homo sapiens
  misc_RNA (1)...(19): siRNA sense strand
uuacaguguguuucccuuu

SEQ ID NO: 1375210 - RNA, 19 nt, Homo sapiens
  misc_RNA (1)...(19): siRNA sense strand
acagacaugcaccauauag

SEQ ID NO: 1375211 - RNA, 19 nt, Homo sapiens
  misc_RNA (1)...(19): siRNA sense strand
gaauugaucuugccugaaa

SEQ ID NO: 1375212 - RNA, 19 nt, Homo sapiens
  misc_RNA (1)...(19): siRNA sense strand
gaucuacgaugaacuuuaa

SEQ ID NO: 1375213 - RNA, 19 nt, Homo sapiens
  misc_RNA (1)...(19): siRNA sense strand
ucaacaagcugaugaauga

SEQ ID NO: 1375214 - RNA, 19 nt, Homo sapiens
  misc_RNA (1)...(19): siRNA sense strand
gaaugagucucuaauguug

SEQ ID NO: 1375215 - RNA, 19 nt, Homo sapiens
  misc_RNA (1)...(19): siRNA sense strand
gcacagaucaucaagauug

SEQ ID NO: 1375216 - RNA, 19 nt, Homo sapiens
  misc_RNA (1)...(19): siRNA sense strand
ugagguagcugaagguaaa

SEQ ID NO: 1375217 - RNA, 19 nt, Homo sapiens
  misc_RNA (1)...(19): siRNA sense strand
agccagagcucaaaugaua

SEQ ID NO: 1375218 - RNA, 19 nt, Homo sapiens
  misc_RNA (1)...(19): siRNA sense strand
gaaguuacaugaugcucuu

SEQ ID NO: 1375219 - RNA, 19 nt, Homo sapiens
  misc_RNA (1)...(19): siRNA sense strand
gaacuaaaggugccaaaug

SEQ ID NO: 1375220 - RNA, 19 nt, Homo sapiens
  misc_RNA (1)...(19): siRNA sense strand
aaaggaaacugcuaucgaa

SEQ ID NO: 1375221 - RNA, 19 nt, Homo sapiens
  misc_RNA (1)...(19): siRNA sense strand
gaaggcagcagaugaggua

SEQ ID NO: 1375222 - RNA, 19 nt, Homo sapiens
  misc_RNA (1)...(19): siRNA sense strand
cuacagaaguuacaugaug

SEQ ID NO: 1375223 - RNA, 19 nt, Homo sapiens
  misc_RNA (1)...(19): siRNA sense strand
ggaaacugcuaucgaacuu

SEQ ID NO: 1375224 - RNA, 19 nt, Homo sapiens
  misc_RNA (1)...(19): siRNA sense strand
gaacucagacaaauaugaa

SEQ ID NO: 1375225 - RNA, 19 nt, Homo sapiens
  misc_RNA (1)...(19): siRNA sense strand
ccaacgaucauguuaauaa

SEQ ID NO: 1375226 - RNA, 19 nt, Homo sapiens
  misc_RNA (1)...(19): siRNA sense strand
ggaauuuagugguuauguu

SEQ ID NO: 1375227 - RNA, 19 nt, Homo sapiens
  misc_RNA (1)...(19): siRNA sense strand
caauagaaguucaugaagu

SEQ ID NO: 1375228 - RNA, 19 nt, Homo sapiens
  misc_RNA (1)...(19): siRNA sense strand
ugaugaagauagcaaauga

SEQ ID NO: 1375229 - RNA, 19 nt, Homo sapiens
  misc_RNA (1)...(19): siRNA sense strand
acgaugaacuuuaagauug

SEQ ID NO: 1375230 - RNA, 19 nt, Homo sapiens
  misc_RNA (1)...(19): siRNA sense strand
agaauuggcuuugcagaaa

SEQ ID NO: 1375231 - RNA, 19 nt, Homo sapiens
  misc_RNA (1)...(19): siRNA sense strand
gguacagguuuaaauacua

SEQ ID NO: 1375232 - RNA, 19 nt, Homo sapiens
  misc_RNA (1)...(19): siRNA sense strand
gggcaggaauuuagugguu

SEQ ID NO: 1375233 - RNA, 19 nt, Homo sapiens
  misc_RNA (1)...(19): siRNA sense strand
ucaagccaaugaugauuaa

SEQ ID NO: 1375234 - RNA, 19 nt, Homo sapiens
  misc_RNA (1)...(19): siRNA sense strand
ggucaggucugggagaauu

SEQ ID NO: 1375235 - RNA, 19 nt, Homo sapiens
  misc_RNA (1)...(19): siRNA sense strand
gaucaggaacucagacaaa

SEQ ID NO: 1375236 - RNA, 19 nt, Homo sapiens
  misc_RNA (1)...(19): siRNA sense strand
uaaaggugccaaaugauaa

SEQ ID NO: 1375237 - RNA, 19 nt, Homo sapiens
  misc_RNA (1)...(19): siRNA sense strand
ucacugcuccgaauaaauu

SEQ ID NO: 1375238 - RNA, 19 nt, Homo sapiens
  misc_RNA (1)...(19): siRNA sense strand
ugacaaggcagcaaagauu

SEQ ID NO: 1375239 - RNA, 19 nt, Homo sapiens
  misc_RNA (1)...(19): siRNA sense strand
cuaaaggugccaaaugaua

SEQ ID NO: 1375240 - RNA, 19 nt, Homo sapiens
  misc_RNA (1)...(19): siRNA sense strand
gauagcaaaugauauucga

SEQ ID NO: 1375241 - RNA, 19 nt, Homo sapiens
  misc_RNA (1)...(19): siRNA sense strand
gcaggaauuuagugguuau

SEQ ID NO: 1375242 - RNA, 19 nt, Homo sapiens
  misc_RNA (1)...(19): siRNA sense strand
guacagguuuaaauacuag

SEQ ID NO: 1375243 - RNA, 19 nt, Homo sapiens
  misc_RNA (1)...(19): siRNA sense strand
gaaccaggaagcaguauca

SEQ ID NO: 1375244 - RNA, 19 nt, Homo sapiens
  misc_RNA (1)...(19): siRNA sense strand
gaaguaaaccaggauuaug

SEQ ID NO: 1375245 - RNA, 19 nt, Homo sapiens
  misc_RNA (1)...(19): siRNA sense strand
ggaacucagacaaauauga

SEQ ID NO: 1375246 - RNA, 19 nt, Homo sapiens
  misc_RNA (1)...(19): siRNA sense strand
gaauuuagugguuauguuc

SEQ ID NO: 1375247 - RNA, 19 nt, Homo sapiens
  misc_RNA (1)...(19): siRNA sense strand
aacuaaaggugccaaauga

SEQ ID NO: 1375248 - RNA, 19 nt, Homo sapiens
  misc_RNA (1)...(19): siRNA sense strand
gaggugaacuuggcagcaa

SEQ ID NO: 1375249 - RNA, 19 nt, Homo sapiens
  misc_RNA (1)...(19): siRNA sense strand
ggcaggaauuuagugguua

SEQ ID NO: 1375250 - RNA, 19 nt, Homo sapiens
  misc_RNA (1)...(19): siRNA sense strand
gauuggaggugugacagaa

SEQ ID NO: 1375251 - RNA, 19 nt, Homo sapiens
  misc_RNA (1)...(19): siRNA sense strand
guugguacagguuuaaaua

SEQ ID NO: 1375252 - RNA, 19 nt, Homo sapiens
  misc_RNA (1)...(19): siRNA sense strand
gguagcugaagguaaauua

SEQ ID NO: 1375253 - RNA, 19 nt, Homo sapiens
  misc_RNA (1)...(19): siRNA sense strand
ugaaugagucucuaauguu

SEQ ID NO: 1375254 - RNA, 19 nt, Homo sapiens
  misc_RNA (1)...(19): siRNA sense strand
ggugaacccuacucagugu

SEQ ID NO: 1375255 - RNA, 19 nt, Homo sapiens
  misc_RNA (1)...(19): siRNA sense strand
gaucuugccugaaaaugaa

SEQ ID NO: 1375256 - RNA, 19 nt, Homo sapiens
  misc_RNA (1)...(19): siRNA sense strand
uaccaggacuacagaaguu

SEQ ID NO: 1375257 - RNA, 19 nt, Homo sapiens
  misc_RNA (1)...(19): siRNA sense strand
gcagagcaguuugacgaau

SEQ ID NO: 1375258 - RNA, 19 nt, Homo sapiens
  misc_RNA (1)...(19): siRNA sense strand
cagaaaggaucaacaagcu

SEQ ID NO: 1375259 - RNA, 19 nt, Homo sapiens
  misc_RNA (1)...(19): siRNA sense strand
gagcucaaaugauacuuuu

SEQ ID NO: 1375260 - RNA, 19 nt, Homo sapiens
  misc_RNA (1)...(19): siRNA sense strand
cagagcaguuugacgaaug

SEQ ID NO: 1375261 - RNA, 19 nt, Homo sapiens
  misc_RNA (1)...(19): siRNA sense strand
aagauuggacguacucaua

SEQ ID NO: 1375262 - RNA, 19 nt, Homo sapiens
  misc_RNA (1)...(19): siRNA sense strand
caggaacucagacaaauau

SEQ ID NO: 1375263 - RNA, 19 nt, Homo sapiens
  misc_RNA (1)...(19): siRNA sense strand
ggugccaaaugauaaguau

SEQ ID NO: 1375264 - RNA, 19 nt, Homo sapiens
  misc_RNA (1)...(19): siRNA sense strand
gaugaaugagucucuaaug

SEQ ID NO: 1375265 - RNA, 19 nt, Homo sapiens
  misc_RNA (1)...(19): siRNA sense strand
ucaggaacucagacaaaua

SEQ ID NO: 1375266 - RNA, 19 nt, Homo sapiens
  misc_RNA (1)...(19): siRNA sense strand
caugcuggguccaaaguga

SEQ ID NO: 1375267 - RNA, 19 nt, Homo sapiens
  misc_RNA (1)...(19): siRNA sense strand
gaauccaggccaauacaga

SEQ ID NO: 1375268 - RNA, 19 nt, Homo sapiens
  misc_RNA (1)...(19): siRNA sense strand
ucaggaugcuguuccacuu

SEQ ID NO: 1375269 - RNA, 19 nt, Homo sapiens
  misc_RNA (1)...(19): siRNA sense strand
gcccagaccgugagaucua

SEQ ID NO: 1375270 - RNA, 19 nt, Homo sapiens
  misc_RNA (1)...(19): siRNA sense strand
caaaauuccuuccggauag

SEQ ID NO: 1375271 - RNA, 19 nt, Homo sapiens
  misc_RNA (1)...(19): siRNA sense strand
uaaaggaaacugcuaucga

SEQ ID NO: 1375272 - RNA, 19 nt, Homo sapiens
  misc_RNA (1)...(19): siRNA sense strand
cauuagcaauagagcaauu

SEQ ID NO: 1375273 - RNA, 19 nt, Homo sapiens
  misc_RNA (1)...(19): siRNA sense strand
uaaugaaggcagcagauga

SEQ ID NO: 1375274 - RNA, 19 nt, Homo sapiens
  misc_RNA (1)...(19): siRNA sense strand
gcaauagaaguucaugaag

SEQ ID NO: 1375275 - RNA, 19 nt, Homo sapiens
  misc_RNA (1)...(19): siRNA sense strand
ugaagucauuagcaauaga

SEQ ID NO: 1375276 - RNA, 19 nt, Homo sapiens
  misc_RNA (1)...(19): siRNA sense strand
gacaaggcagcaaagauug

SEQ ID NO: 1375277 - RNA, 19 nt, Homo sapiens
  misc_RNA (1)...(19): siRNA sense strand
gcugaugaaugagucucua

SEQ ID NO: 1375278 - RNA, 19 nt, Homo sapiens
  misc_RNA (1)...(19): siRNA sense strand
uugcacagaucaucaagau

SEQ ID NO: 1375279 - RNA, 19 nt, Homo sapiens
  misc_RNA (1)...(19): siRNA sense strand
ucccaacgaucauguuaau

SEQ ID NO: 1375280 - RNA, 19 nt, Homo sapiens
  misc_RNA (1)...(19): siRNA sense strand
gaacccuacucagugugaa

SEQ ID NO: 1375281 - RNA, 19 nt, Homo sapiens
  misc_RNA (1)...(19): siRNA sense strand
gaaccauguugcugucacu

SEQ ID NO: 1375282 - RNA, 19 nt, Homo sapiens
  misc_RNA (1)...(19): siRNA sense strand
ugaaguaaaccaggauuau

SEQ ID NO: 1375283 - RNA, 19 nt, Homo sapiens
  misc_RNA (1)...(19): siRNA sense strand
ggugacagcucucaauccu

SEQ ID NO: 1375284 - RNA, 19 nt, Homo sapiens
  misc_RNA (1)...(19): siRNA sense strand
caucccaacgaucauguua

SEQ ID NO: 1375285 - RNA, 19 nt, Homo sapiens
  misc_RNA (1)...(19): siRNA sense strand
guagcugaagguaaauuaa

SEQ ID NO: 1375286 - RNA, 19 nt, Homo sapiens
  misc_RNA (1)...(19): siRNA sense strand
ggacuacagaaguuacaug

SEQ ID NO: 1375287 - RNA, 19 nt, Homo sapiens
  misc_RNA (1)...(19): siRNA sense strand
ucacagcagagcaguuuga

SEQ ID NO: 1375288 - RNA, 19 nt, Homo sapiens
  misc_RNA (1)...(19): siRNA sense strand
gguaugacaaggcagcaaa

SEQ ID NO: 1375289 - RNA, 19 nt, Homo sapiens
  misc_RNA (1)...(19): siRNA sense strand
gcaaggugaacccuacuca

SEQ ID NO: 1375290 - RNA, 19 nt, Homo sapiens
  misc_RNA (1)...(19): siRNA sense strand
ugauaccuuuggugaacua

SEQ ID NO: 1375291 - RNA, 19 nt, Homo sapiens
  misc_RNA (1)...(19): siRNA sense strand
ggauagaauaugauaccuu

SEQ ID NO: 1375292 - RNA, 19 nt, Homo sapiens
  misc_RNA (1)...(19): siRNA sense strand
gacuacagaaguuacauga

SEQ ID NO: 1375293 - RNA, 19 nt, Homo sapiens
  misc_RNA (1)...(19): siRNA sense strand
auuauggucuugauccaaa

SEQ ID NO: 1375294 - RNA, 19 nt, Homo sapiens
  misc_RNA (1)...(19): siRNA sense strand
cgaugaacuuuaagauugg

SEQ ID NO: 1375295 - RNA, 19 nt, Homo sapiens
  misc_RNA (1)...(19): siRNA sense strand
uaugauaccuuuggugaac

SEQ ID NO: 1375296 - RNA, 19 nt, Homo sapiens
  misc_RNA (1)...(19): siRNA sense strand
ugagaucuacgaugaacuu

SEQ ID NO: 1375297 - RNA, 19 nt, Homo sapiens
  misc_RNA (1)...(19): siRNA sense strand
gaauuggcuuugcagaaaa

SEQ ID NO: 1375298 - RNA, 19 nt, Homo sapiens
  misc_RNA (1)...(19): siRNA sense strand
caggaugcuguuccacuua

SEQ ID NO: 1375299 - RNA, 19 nt, Homo sapiens
  misc_RNA (1)...(19): siRNA sense strand
augaaugagucucuaaugu

SEQ ID NO: 1375300 - RNA, 19 nt, Homo sapiens
  misc_RNA (1)...(19): siRNA sense strand
accgugagaucuacgauga

SEQ ID NO: 1375301 - RNA, 19 nt, Homo sapiens
  misc_RNA (1)...(19): siRNA sense strand
gcuguuccacuuacucuug

SEQ ID NO: 1375302 - RNA, 19 nt, Homo sapiens
  misc_RNA (1)...(19): siRNA sense strand
gugaagcaaugaccauggu

SEQ ID NO: 1375303 - RNA, 19 nt, Homo sapiens
  misc_RNA (1)...(19): siRNA sense strand
aaagccagagcucaaauga

SEQ ID NO: 1375304 - RNA, 19 nt, Homo sapiens
  misc_RNA (1)...(19): siRNA sense strand
auacagaaaggaucaacaa

SEQ ID NO: 1375305 - RNA, 19 nt, Homo sapiens
  misc_RNA (1)...(19): siRNA sense strand
ugucacugcuccgaauaaa

SEQ ID NO: 1375306 - RNA, 19 nt, Homo sapiens
  misc_RNA (1)...(19): siRNA sense strand
uagaauuggcuuugcagaa

SEQ ID NO: 1375307 - RNA, 19 nt, Homo sapiens
  misc_RNA (1)...(19): siRNA sense strand
augaugcucuugaugcaaa

SEQ ID NO: 1375308 - RNA, 19 nt, Homo sapiens
  misc_RNA (1)...(19): siRNA sense strand
gaugaacuuuaagauugga

SEQ ID NO: 1375309 - RNA, 19 nt, Homo sapiens
  misc_RNA (1)...(19): siRNA sense strand
gguaaaaccuaaggacaug

SEQ ID NO: 1375310 - RNA, 19 nt, Homo sapiens
  misc_RNA (1)...(19): siRNA sense strand
gcucucaauccucauauag

SEQ ID NO: 1375311 - RNA, 19 nt, Homo sapiens
  misc_RNA (1)...(19): siRNA sense strand
gaacaagccuuaauuagga

SEQ ID NO: 1375312 - RNA, 19 nt, Homo sapiens
  misc_RNA (1)...(19): siRNA sense strand
gaaacaagaugcugacaaa

SEQ ID NO: 1375313 - RNA, 19 nt, Homo sapiens
  misc_RNA (1)...(19): siRNA sense strand
gaucaggaauuccauauuu

SEQ ID NO: 1375314 - RNA, 19 nt, Homo sapiens
  misc_RNA (1)...(19): siRNA sense strand
ggaagaaggugaucucuau

SEQ ID NO: 1375315 - RNA, 19 nt, Homo sapiens
  misc_RNA (1)...(19): siRNA sense strand
ggucagaacuuauguagaa

SEQ ID NO: 1375316 - RNA, 19 nt, Homo sapiens
  misc_RNA (1)...(19): siRNA sense strand
gcaggcagaucuucaauuu

SEQ ID NO: 1375317 - RNA, 19 nt, Homo sapiens
  misc_RNA (1)...(19): siRNA sense strand
guggagacauuacauauua

SEQ ID NO: 1375318 - RNA, 19 nt, Homo sapiens
  misc_RNA (1)...(19): siRNA sense strand
gaaaagggcugaaagaauu

SEQ ID NO: 1375319 - RNA, 19 nt, Homo sapiens
  misc_RNA (1)...(19): siRNA sense strand
gaaagaacuucaggacaua

SEQ ID NO: 1375320 - RNA, 19 nt, Homo sapiens
  misc_RNA (1)...(19): siRNA sense strand
gaacagaagagggcuauua

SEQ ID NO: 1375321 - RNA, 19 nt, Homo sapiens
  misc_RNA (1)...(19): siRNA sense strand
gaacuuauguagaagauca

SEQ ID NO: 1375322 - RNA, 19 nt, Homo sapiens
  misc_RNA (1)...(19): siRNA sense strand
gaugaaagaugaugaagga

SEQ ID NO: 1375323 - RNA, 19 nt, Homo sapiens
  misc_RNA (1)...(19): siRNA sense strand
gggagaagcugcccuuaaa

SEQ ID NO: 1375324 - RNA, 19 nt, Homo sapiens
  misc_RNA (1)...(19): siRNA sense strand
caaauuagaugacauugga

SEQ ID NO: 1375325 - RNA, 19 nt, Homo sapiens
  misc_RNA (1)...(19): siRNA sense strand
ccaaagaaguugugaaguu

SEQ ID NO: 1375326 - RNA, 19 nt, Homo sapiens
  misc_RNA (1)...(19): siRNA sense strand
caggaaagcuucaguuuga

SEQ ID NO: 1375327 - RNA, 19 nt, Homo sapiens
  misc_RNA (1)...(19): siRNA sense strand
gaaggcaucucuuacaaau

SEQ ID NO: 1375328 - RNA, 19 nt, Homo sapiens
  misc_RNA (1)...(19): siRNA sense strand
gaugaaagaugaccaggaa

SEQ ID NO: 1375329 - RNA, 19 nt, Homo sapiens
  misc_RNA (1)...(19): siRNA sense strand
ugaaggaacuuacacguuu

SEQ ID NO: 1375330 - RNA, 19 nt, Homo sapiens
  misc_RNA (1)...(19): siRNA sense strand
gguacucaaucacuaauua

SEQ ID NO: 1375331 - RNA, 19 nt, Homo sapiens
  misc_RNA (1)...(19): siRNA sense strand
gaccuuaccuguacagaaa

SEQ ID NO: 1375332 - RNA, 19 nt, Homo sapiens
  misc_RNA (1)...(19): siRNA sense strand
gaagagggcuauuaugaag

SEQ ID NO: 1375333 - RNA, 19 nt, Homo sapiens
  misc_RNA (1)...(19): siRNA sense strand
ugaagaagauggagaagaa

SEQ ID NO: 1375334 - RNA, 19 nt, Homo sapiens
  misc_RNA (1)...(19): siRNA sense strand
gaagagaaacgcuuuguug

SEQ ID NO: 1375335 - RNA, 19 nt, Homo sapiens
  misc_RNA (1)...(19): siRNA sense strand
gaaaucaaaucaacugaca

SEQ ID NO: 1375336 - RNA, 19 nt, Homo sapiens
  misc_RNA (1)...(19): siRNA sense strand
gaagaaugguguggaaauu

SEQ ID NO: 1375337 - RNA, 19 nt, Homo sapiens
  misc_RNA (1)...(19): siRNA sense strand
ggagaaagauaccaaaugg

SEQ ID NO: 1375338 - RNA, 19 nt, Homo sapiens
  misc_RNA (1)...(19): siRNA sense strand
caaagugaguuacaacaaa

SEQ ID NO: 1375339 - RNA, 19 nt, Homo sapiens
  misc_RNA (1)...(19): siRNA sense strand
cuaaagaggugaaacaaga

SEQ ID NO: 1375340 - RNA, 19 nt, Homo sapiens
  misc_RNA (1)...(19): siRNA sense strand
gagaauggcucaugaaggu

SEQ ID NO: 1375341 - RNA, 19 nt, Homo sapiens
  misc_RNA (1)...(19): siRNA sense strand
gaaacaauacugagaacua

SEQ ID NO: 1375342 - RNA, 19 nt, Homo sapiens
  misc_RNA (1)...(19): siRNA sense strand
gcaaauaacucaggagaag

SEQ ID NO: 1375343 - RNA, 19 nt, Homo sapiens
  misc_RNA (1)...(19): siRNA sense strand
gcagagccacuaacaaaua

SEQ ID NO: 1375344 - RNA, 19 nt, Homo sapiens
  misc_RNA (1)...(19): siRNA sense strand
guauaaagauggcauugaa

SEQ ID NO: 1375345 - RNA, 19 nt, Homo sapiens
  misc_RNA (1)...(19): siRNA sense strand
caucaaacauggagaaaga

SEQ ID NO: 1375346 - RNA, 19 nt, Homo sapiens
  misc_RNA (1)...(19): siRNA sense strand
gaaggaaaaugguaucaua

SEQ ID NO: 1375347 - RNA, 19 nt, Homo sapiens
  misc_RNA (1)...(19): siRNA sense strand
gaacaagaaacaauacuga

SEQ ID NO: 1375348 - RNA, 19 nt, Homo sapiens
  misc_RNA (1)...(19): siRNA sense strand
caacauagcuggagaaacc

SEQ ID NO: 1375349 - RNA, 19 nt, Homo sapiens
  misc_RNA (1)...(19): siRNA sense strand
gaagagcgcuuugaaguac

SEQ ID NO: 1375350 - RNA, 19 nt, Homo sapiens
  misc_RNA (1)...(19): siRNA sense strand
gaauugauguccuguggaa

SEQ ID NO: 1375351 - RNA, 19 nt, Homo sapiens
  misc_RNA (1)...(19): siRNA sense strand
gaaagaauccagagccaaa

SEQ ID NO: 1375352 - RNA, 19 nt, Homo sapiens
  misc_RNA (1)...(19): siRNA sense strand
ggauacagauacaaaguga

SEQ ID NO: 1375353 - RNA, 19 nt, Homo sapiens
  misc_RNA (1)...(19): siRNA sense strand
gcagaucacagacagaaua

SEQ ID NO: 1375354 - RNA, 19 nt, Homo sapiens
  misc_RNA (1)...(19): siRNA sense strand
gaaaccaacuguaaucucu

SEQ ID NO: 1375355 - RNA, 19 nt, Homo sapiens
  misc_RNA (1)...(19): siRNA sense strand
ggacauagaaguuccagaa

SEQ ID NO: 1375356 - RNA, 19 nt, Homo sapiens
  misc_RNA (1)...(19): siRNA sense strand
ggauauccauuaccaaaga

SEQ ID NO: 1375357 - RNA, 19 nt, Homo sapiens
  misc_RNA (1)...(19): siRNA sense strand
caaagaaguugugaaguug

SEQ ID NO: 1375358 - RNA, 19 nt, Homo sapiens
  misc_RNA (1)...(19): siRNA sense strand
caucaggaauguucacuuu

SEQ ID NO: 1375359 - RNA, 19 nt, Homo sapiens
  misc_RNA (1)...(19): siRNA sense strand
gaauuagagugcauuguau

SEQ ID NO: 1375360 - RNA, 19 nt, Homo sapiens
  misc_RNA (1)...(19): siRNA sense strand
uaaagaagaugguacucaa

SEQ ID NO: 1375361 - RNA, 19 nt, Homo sapiens
  misc_RNA (1)...(19): siRNA sense strand
uguggaagcucgucauaua

SEQ ID NO: 1375362 - RNA, 19 nt, Homo sapiens
  misc_RNA (1)...(19): siRNA sense strand
gaaaugaaagucagagcua

SEQ ID NO: 1375363 - RNA, 19 nt, Homo sapiens
  misc_RNA (1)...(19): siRNA sense strand
caaauggacuuucuacaag

SEQ ID NO: 1375364 - RNA, 19 nt, Homo sapiens
  misc_RNA (1)...(19): siRNA sense strand
ggaaaugccuguuuaucca

SEQ ID NO: 1375365 - RNA, 19 nt, Homo sapiens
  misc_RNA (1)...(19): siRNA sense strand
acacaaauauguaguggaa

SEQ ID NO: 1375366 - RNA, 19 nt, Homo sapiens
  misc_RNA (1)...(19): siRNA sense strand
ggaagaugcuggaaauuac

SEQ ID NO: 1375367 - RNA, 19 nt, Homo sapiens
  misc_RNA (1)...(19): siRNA sense strand
ccaaagaguuaacugaaga

SEQ ID NO: 1375368 - RNA, 19 nt, Homo sapiens
  misc_RNA (1)...(19): siRNA sense strand
cggaagagcugcgcaguaa

SEQ ID NO: 1375369 - RNA, 19 nt, Homo sapiens
  misc_RNA (1)...(19): siRNA sense strand
uaaggaagaugcuggaaau

SEQ ID NO: 1375370 - RNA, 19 nt, Homo sapiens
  misc_RNA (1)...(19): siRNA sense strand
ucagggaccuauucaguaa

SEQ ID NO: 1375371 - RNA, 19 nt, Homo sapiens
  misc_RNA (1)...(19): siRNA sense strand
gcacggaugucaccugcaa

SEQ ID NO: 1375372 - RNA, 19 nt, Homo sapiens
  misc_RNA (1)...(19): siRNA sense strand
gagaugugguuaugacuga

SEQ ID NO: 1375373 - RNA, 19 nt, Homo sapiens
  misc_RNA (1)...(19): siRNA sense strand
caagaacaaauccaaguua

SEQ ID NO: 1375374 - RNA, 19 nt, Homo sapiens
  misc_RNA (1)...(19): siRNA sense strand
gagaaacuauggcuacuag

SEQ ID NO: 1375375 - RNA, 19 nt, Homo sapiens
  misc_RNA (1)...(19): siRNA sense strand
ggagaagacugcuguaacu

SEQ ID NO: 1375376 - RNA, 19 nt, Homo sapiens
  misc_RNA (1)...(19): siRNA sense strand
gcacauaucaucacagauc

SEQ ID NO: 1375377 - RNA, 19 nt, Homo sapiens
  misc_RNA (1)...(19): siRNA sense strand
ggaaacacauuaaggacau

SEQ ID NO: 1375378 - RNA, 19 nt, Homo sapiens
  misc_RNA (1)...(19): siRNA sense strand
gaaauuaagccaagugaca

SEQ ID NO: 1375379 - RNA, 19 nt, Homo sapiens
  misc_RNA (1)...(19): siRNA sense strand
gaugaaagacggccaagaa

SEQ ID NO: 1375380 - RNA, 19 nt, Homo sapiens
  misc_RNA (1)...(19): siRNA sense strand
guuaaagucuccuuggaaa

SEQ ID NO: 1375381 - RNA, 19 nt, Homo sapiens
  misc_RNA (1)...(19): siRNA sense strand
gagcucaagucucgaaaga

SEQ ID NO: 1375382 - RNA, 19 nt, Homo sapiens
  misc_RNA (1)...(19): siRNA sense strand
gaaagaauuacccaugaaa

SEQ ID NO: 1375383 - RNA, 19 nt, Homo sapiens
  misc_RNA (1)...(19): siRNA sense strand
gaaggaaucuacacugcau

SEQ ID NO: 1375384 - RNA, 19 nt, Homo sapiens
  misc_RNA (1)...(19): siRNA sense strand
gauuaugaguuacugauga

SEQ ID NO: 1375385 - RNA, 19 nt, Homo sapiens
  misc_RNA (1)...(19): siRNA sense strand
ugaagaagcugauuaugag

SEQ ID NO: 1375386 - RNA, 19 nt, Homo sapiens
  misc_RNA (1)...(19): siRNA sense strand
gagaaacgcuuuguugagu

SEQ ID NO: 1375387 - RNA, 19 nt, Homo sapiens
  misc_RNA (1)...(19): siRNA sense strand
gcaggugucagaagaauuu

SEQ ID NO: 1375388 - RNA, 19 nt, Homo sapiens
  misc_RNA (1)...(19): siRNA sense strand
gaaauuuacuacagaagag

SEQ ID NO: 1375389 - RNA, 19 nt, Homo sapiens
  misc_RNA (1)...(19): siRNA sense strand
ggaaauugccgaagcuuau

SEQ ID NO: 1375390 - RNA, 19 nt, Homo sapiens
  misc_RNA (1)...(19): siRNA sense strand
gaaauugagaugagugaaa

SEQ ID NO: 1375391 - RNA, 19 nt, Homo sapiens
  misc_RNA (1)...(19): siRNA sense strand
cauagaaguuccagaauca

SEQ ID NO: 1375392 - RNA, 19 nt, Homo sapiens
  misc_RNA (1)...(19): siRNA sense strand
agacaaacccgaauugaaa

SEQ ID NO: 1375393 - RNA, 19 nt, Homo sapiens
  misc_RNA (1)...(19): siRNA sense strand
ggaacaauuuacucucuga

SEQ ID NO: 1375394 - RNA, 19 nt, Homo sapiens
  misc_RNA (1)...(19): siRNA sense strand
gaaaucaagcccaguucua

SEQ ID NO: 1375395 - RNA, 19 nt, Homo sapiens
  misc_RNA (1)...(19): siRNA sense strand
gaaagacggccaagaagug

SEQ ID NO: 1375396 - RNA, 19 nt, Homo sapiens
  misc_RNA (1)...(19): siRNA sense strand
ccaagcaauugaucacuuu

SEQ ID NO: 1375397 - RNA, 19 nt, Homo sapiens
  misc_RNA (1)...(19): siRNA sense strand
gagaaggcauuacuaccaa

SEQ ID NO: 1375398 - RNA, 19 nt, Homo sapiens
  misc_RNA (1)...(19): siRNA sense strand
gaaaacaguuguaccuaaa

SEQ ID NO: 1375399 - RNA, 19 nt, Homo sapiens
  misc_RNA (1)...(19): siRNA sense strand
caagaaaugcuuuaucaga

SEQ ID NO: 1375400 - RNA, 19 nt, Homo sapiens
  misc_RNA (1)...(19): siRNA sense strand
gaaggaacuuacacguuug

SEQ ID NO: 1375401 - RNA, 19 nt, Homo sapiens
  misc_RNA (1)...(19): siRNA sense strand
aaacagcgacuagucauua

SEQ ID NO: 1375402 - RNA, 19 nt, Homo sapiens
  misc_RNA (1)...(19): siRNA sense strand
caagugagacuccaaguga

SEQ ID NO: 1375403 - RNA, 19 nt, Homo sapiens
  misc_RNA (1)...(19): siRNA sense strand
gaaguugugucuccugauc

SEQ ID NO: 1375404 - RNA, 19 nt, Homo sapiens
  misc_RNA (1)...(19): siRNA sense strand
gaagaagcgagccauguuu

SEQ ID NO: 1375405 - RNA, 19 nt, Homo sapiens
  misc_RNA (1)...(19): siRNA sense strand
ccaggaagcuguguuugaa

SEQ ID NO: 1375406 - RNA, 19 nt, Homo sapiens
  misc_RNA (1)...(19): siRNA sense strand
gaaacaacagaaaccauuu

SEQ ID NO: 1375407 - RNA, 19 nt, Homo sapiens
  misc_RNA (1)...(19): siRNA sense strand
gcaagcuggugauuucuau

SEQ ID NO: 1375408 - RNA, 19 nt, Homo sapiens
  misc_RNA (1)...(19): siRNA sense strand
cauccaaccugcucaagaa

SEQ ID NO: 1375409 - RNA, 19 nt, Homo sapiens
  misc_RNA (1)...(19): siRNA sense strand
gaagauugaagcccacuuu

SEQ ID NO: 1375410 - RNA, 19 nt, Homo sapiens
  misc_RNA (1)...(19): siRNA sense strand
gcucagaucucagaaucaa

SEQ ID NO: 1375411 - RNA, 19 nt, Homo sapiens
  misc_RNA (1)...(19): siRNA sense strand
gaacaagccuuaauuagga

SEQ ID NO: 1375412 - RNA, 19 nt, Homo sapiens
  misc_RNA (1)...(19): siRNA sense strand
gaaacaagaugcugacaaa

SEQ ID NO: 1375413 - RNA, 19 nt, Homo sapiens
  misc_RNA (1)...(19): siRNA sense strand
gaucaggaauuccauauuu

SEQ ID NO: 1375414 - RNA, 19 nt, Homo sapiens
  misc_RNA (1)...(19): siRNA sense strand
ggaagaaggugaucucuau

SEQ ID NO: 1375415 - RNA, 19 nt, Homo sapiens
  misc_RNA (1)...(19): siRNA sense strand
ggucagaacuuauguagaa

SEQ ID NO: 1375416 - RNA, 19 nt, Homo sapiens
  misc_RNA (1)...(19): siRNA sense strand
gcaggcagaucuucaauuu

SEQ ID NO: 1375417 - RNA, 19 nt, Homo sapiens
  misc_RNA (1)...(19): siRNA sense strand
guggagacauuacauauua

SEQ ID NO: 1375418 - RNA, 19 nt, Homo sapiens
  misc_RNA (1)...(19): siRNA sense strand
gaaaagggcugaaagaauu

SEQ ID NO: 1375419 - RNA, 19 nt, Homo sapiens
  misc_RNA (1)...(19): siRNA sense strand
gaaagaacuucaggacaua

SEQ ID NO: 1375420 - RNA, 19 nt, Homo sapiens
  misc_RNA (1)...(19): siRNA sense strand
gaacagaagagggcuauua

SEQ ID NO: 1375421 - RNA, 19 nt, Homo sapiens
  misc_RNA (1)...(19): siRNA sense strand
gaacuuauguagaagauca

SEQ ID NO: 1375422 - RNA, 19 nt, Homo sapiens
  misc_RNA (1)...(19): siRNA sense strand
gaugaaagaugaugaagga

SEQ ID NO: 1375423 - RNA, 19 nt, Homo sapiens
  misc_RNA (1)...(19): siRNA sense strand
gggagaagcugcccuuaaa

SEQ ID NO: 1375424 - RNA, 19 nt, Homo sapiens
  misc_RNA (1)...(19): siRNA sense strand
caaauuagaugacauugga

SEQ ID NO: 1375425 - RNA, 19 nt, Homo sapiens
  misc_RNA (1)...(19): siRNA sense strand
ccaaagaaguugugaaguu

SEQ ID NO: 1375426 - RNA, 19 nt, Homo sapiens
  misc_RNA (1)...(19): siRNA sense strand
caggaaagcuucaguuuga

SEQ ID NO: 1375427 - RNA, 19 nt, Homo sapiens
  misc_RNA (1)...(19): siRNA sense strand
gaaggcaucucuuacaaau

SEQ ID NO: 1375428 - RNA, 19 nt, Homo sapiens
  misc_RNA (1)...(19): siRNA sense strand
gaugaaagaugaccaggaa

SEQ ID NO: 1375429 - RNA, 19 nt, Homo sapiens
  misc_RNA (1)...(19): siRNA sense strand
ugaaggaacuuacacguuu

SEQ ID NO: 1375430 - RNA, 19 nt, Homo sapiens
  misc_RNA (1)...(19): siRNA sense strand
gguacucaaucacuaauua

SEQ ID NO: 1375431 - RNA, 19 nt, Homo sapiens
  misc_RNA (1)...(19): siRNA sense strand
gaccuuaccuguacagaaa

SEQ ID NO: 1375432 - RNA, 19 nt, Homo sapiens
  misc_RNA (1)...(19): siRNA sense strand
gaagagggcuauuaugaag

SEQ ID NO: 1375433 - RNA, 19 nt, Homo sapiens
  misc_RNA (1)...(19): siRNA sense strand
ugaagaagauggagaagaa

SEQ ID NO: 1375434 - RNA, 19 nt, Homo sapiens
  misc_RNA (1)...(19): siRNA sense strand
gaagagaaacgcuuuguug

SEQ ID NO: 1375435 - RNA, 19 nt, Homo sapiens
  misc_RNA (1)...(19): siRNA sense strand
gaaaucaaaucaacugaca

SEQ ID NO: 1375436 - RNA, 19 nt, Homo sapiens
  misc_RNA (1)...(19): siRNA sense strand
gaagaaugguguggaaauu

SEQ ID NO: 1375437 - RNA, 19 nt, Homo sapiens
  misc_RNA (1)...(19): siRNA sense strand
ggagaaagauaccaaaugg

SEQ ID NO: 1375438 - RNA, 19 nt, Homo sapiens
  misc_RNA (1)...(19): siRNA sense strand
caaagugaguuacaacaaa

SEQ ID NO: 1375439 - RNA, 19 nt, Homo sapiens
  misc_RNA (1)...(19): siRNA sense strand
cuaaagaggugaaacaaga

SEQ ID NO: 1375440 - RNA, 19 nt, Homo sapiens
  misc_RNA (1)...(19): siRNA sense strand
gagaauggcucaugaaggu

SEQ ID NO: 1375441 - RNA, 19 nt, Homo sapiens
  misc_RNA (1)...(19): siRNA sense strand
gaaacaauacugagaacua

SEQ ID NO: 1375442 - RNA, 19 nt, Homo sapiens
  misc_RNA (1)...(19): siRNA sense strand
gcaaauaacucaggagaag

SEQ ID NO: 1375443 - RNA, 19 nt, Homo sapiens
  misc_RNA (1)...(19): siRNA sense strand
gcagagccacuaacaaaua

SEQ ID NO: 1375444 - RNA, 19 nt, Homo sapiens
  misc_RNA (1)...(19): siRNA sense strand
guauaaagauggcauugaa

SEQ ID NO: 1375445 - RNA, 19 nt, Homo sapiens
  misc_RNA (1)...(19): siRNA sense strand
caucaaacauggagaaaga

SEQ ID NO: 1375446 - RNA, 19 nt, Homo sapiens
  misc_RNA (1)...(19): siRNA sense strand
gaaggaaaaugguaucaua

SEQ ID NO: 1375447 - RNA, 19 nt, Homo sapiens
  misc_RNA (1)...(19): siRNA sense strand
gaacaagaaacaauacuga

SEQ ID NO: 1375448 - RNA, 19 nt, Homo sapiens
  misc_RNA (1)...(19): siRNA sense strand
caacauagcuggagaaacc

SEQ ID NO: 1375449 - RNA, 19 nt, Homo sapiens
  misc_RNA (1)...(19): siRNA sense strand
gaagagcgcuuugaaguac

SEQ ID NO: 1375450 - RNA, 19 nt, Homo sapiens
  misc_RNA (1)...(19): siRNA sense strand
gaauugauguccuguggaa

SEQ ID NO: 1375451 - RNA, 19 nt, Homo sapiens
  misc_RNA (1)...(19): siRNA sense strand
gaaagaauccagagccaaa

SEQ ID NO: 1375452 - RNA, 19 nt, Homo sapiens
  misc_RNA (1)...(19): siRNA sense strand
ggauacagauacaaaguga

SEQ ID NO: 1375453 - RNA, 19 nt, Homo sapiens
  misc_RNA (1)...(19): siRNA sense strand
gcagaucacagacagaaua

SEQ ID NO: 1375454 - RNA, 19 nt, Homo sapiens
  misc_RNA (1)...(19): siRNA sense strand
gaaaccaacuguaaucucu

SEQ ID NO: 1375455 - RNA, 19 nt, Homo sapiens
  misc_RNA (1)...(19): siRNA sense strand
ggacauagaaguuccagaa

SEQ ID NO: 1375456 - RNA, 19 nt, Homo sapiens
  misc_RNA (1)...(19): siRNA sense strand
ggauauccauuaccaaaga

SEQ ID NO: 1375457 - RNA, 19 nt, Homo sapiens
  misc_RNA (1)...(19): siRNA sense strand
caaagaaguugugaaguug

SEQ ID NO: 1375458 - RNA, 19 nt, Homo sapiens
  misc_RNA (1)...(19): siRNA sense strand
caucaggaauguucacuuu

SEQ ID NO: 1375459 - RNA, 19 nt, Homo sapiens
  misc_RNA (1)...(19): siRNA sense strand
gaauuagagugcauuguau

SEQ ID NO: 1375460 - RNA, 19 nt, Homo sapiens
  misc_RNA (1)...(19): siRNA sense strand
uaaagaagaugguacucaa

SEQ ID NO: 1375461 - RNA, 19 nt, Homo sapiens
  misc_RNA (1)...(19): siRNA sense strand
uguggaagcucgucauaua

SEQ ID NO: 1375462 - RNA, 19 nt, Homo sapiens
  misc_RNA (1)...(19): siRNA sense strand
gaaaugaaagucagagcua

SEQ ID NO: 1375463 - RNA, 19 nt, Homo sapiens
  misc_RNA (1)...(19): siRNA sense strand
caaauggacuuucuacaag

SEQ ID NO: 1375464 - RNA, 19 nt, Homo sapiens
  misc_RNA (1)...(19): siRNA sense strand
ggaaaugccuguuuaucca

SEQ ID NO: 1375465 - RNA, 19 nt, Homo sapiens
  misc_RNA (1)...(19): siRNA sense strand
acacaaauauguaguggaa

SEQ ID NO: 1375466 - RNA, 19 nt, Homo sapiens
  misc_RNA (1)...(19): siRNA sense strand
ggaagaugcuggaaauuac

SEQ ID NO: 1375467 - RNA, 19 nt, Homo sapiens
  misc_RNA (1)...(19): siRNA sense strand
ccaaagaguuaacugaaga

SEQ ID NO: 1375468 - RNA, 19 nt, Homo sapiens
  misc_RNA (1)...(19): siRNA sense strand
cggaagagcugcgcaguaa

SEQ ID NO: 1375469 - RNA, 19 nt, Homo sapiens
  misc_RNA (1)...(19): siRNA sense strand
uaaggaagaugcuggaaau

SEQ ID NO: 1375470 - RNA, 19 nt, Homo sapiens
  misc_RNA (1)...(19): siRNA sense strand
ucagggaccuauucaguaa

SEQ ID NO: 1375471 - RNA, 19 nt, Homo sapiens
  misc_RNA (1)...(19): siRNA sense strand
gcacggaugucaccugcaa

SEQ ID NO: 1375472 - RNA, 19 nt, Homo sapiens
  misc_RNA (1)...(19): siRNA sense strand
gagaugugguuaugacuga

SEQ ID NO: 1375473 - RNA, 19 nt, Homo sapiens
  misc_RNA (1)...(19): siRNA sense strand
caagaacaaauccaaguua

SEQ ID NO: 1375474 - RNA, 19 nt, Homo sapiens
  misc_RNA (1)...(19): siRNA sense strand
gagaaacuauggcuacuag

SEQ ID NO: 1375475 - RNA, 19 nt, Homo sapiens
  misc_RNA (1)...(19): siRNA sense strand
ggagaagacugcuguaacu

SEQ ID NO: 1375476 - RNA, 19 nt, Homo sapiens
  misc_RNA (1)...(19): siRNA sense strand
gcacauaucaucacagauc

SEQ ID NO: 1375477 - RNA, 19 nt, Homo sapiens
  misc_RNA (1)...(19): siRNA sense strand
ggaaacacauuaaggacau

SEQ ID NO: 1375478 - RNA, 19 nt, Homo sapiens
  misc_RNA (1)...(19): siRNA sense strand
gaaauuaagccaagugaca

SEQ ID NO: 1375479 - RNA, 19 nt, Homo sapiens
  misc_RNA (1)...(19): siRNA sense strand
gaugaaagacggccaagaa

SEQ ID NO: 1375480 - RNA, 19 nt, Homo sapiens
  misc_RNA (1)...(19): siRNA sense strand
guuaaagucuccuuggaaa

SEQ ID NO: 1375481 - RNA, 19 nt, Homo sapiens
  misc_RNA (1)...(19): siRNA sense strand
gagcucaagucucgaaaga

SEQ ID NO: 1375482 - RNA, 19 nt, Homo sapiens
  misc_RNA (1)...(19): siRNA sense strand
gaaagaauuacccaugaaa

SEQ ID NO: 1375483 - RNA, 19 nt, Homo sapiens
  misc_RNA (1)...(19): siRNA sense strand
gaaggaaucuacacugcau

SEQ ID NO: 1375484 - RNA, 19 nt, Homo sapiens
  misc_RNA (1)...(19): siRNA sense strand
gauuaugaguuacugauga

SEQ ID NO: 1375485 - RNA, 19 nt, Homo sapiens
  misc_RNA (1)...(19): siRNA sense strand
ugaagaagcugauuaugag

SEQ ID NO: 1375486 - RNA, 19 nt, Homo sapiens
  misc_RNA (1)...(19): siRNA sense strand
gagaaacgcuuuguugagu

SEQ ID NO: 1375487 - RNA, 19 nt, Homo sapiens
  misc_RNA (1)...(19): siRNA sense strand
gcaggugucagaagaauuu

SEQ ID NO: 1375488 - RNA, 19 nt, Homo sapiens
  misc_RNA (1)...(19): siRNA sense strand
gaaauuuacuacagaagag

SEQ ID NO: 1375489 - RNA, 19 nt, Homo sapiens
  misc_RNA (1)...(19): siRNA sense strand
ggaaauugccgaagcuuau

SEQ ID NO: 1375490 - RNA, 19 nt, Homo sapiens
  misc_RNA (1)...(19): siRNA sense strand
gaaauugagaugagugaaa

SEQ ID NO: 1375491 - RNA, 19 nt, Homo sapiens
  misc_RNA (1)...(19): siRNA sense strand
cauagaaguuccagaauca

SEQ ID NO: 1375492 - RNA, 19 nt, Homo sapiens
  misc_RNA (1)...(19): siRNA sense strand
agacaaacccgaauugaaa

SEQ ID NO: 1375493 - RNA, 19 nt, Homo sapiens
  misc_RNA (1)...(19): siRNA sense strand
ggaacaauuuacucucuga

SEQ ID NO: 1375494 - RNA, 19 nt, Homo sapiens
  misc_RNA (1)...(19): siRNA sense strand
gaaaucaagcccaguucua

SEQ ID NO: 1375495 - RNA, 19 nt, Homo sapiens
  misc_RNA (1)...(19): siRNA sense strand
gaaagacggccaagaagug

SEQ ID NO: 1375496 - RNA, 19 nt, Homo sapiens
  misc_RNA (1)...(19): siRNA sense strand
ccaagcaauugaucacuuu

SEQ ID NO: 1375497 - RNA, 19 nt, Homo sapiens
  misc_RNA (1)...(19): siRNA sense strand
gagaaggcauuacuaccaa

SEQ ID NO: 1375498 - RNA, 19 nt, Homo sapiens
  misc_RNA (1)...(19): siRNA sense strand
gaaaacaguuguaccuaaa

SEQ ID NO: 1375499 - RNA, 19 nt, Homo sapiens
  misc_RNA (1)...(19): siRNA sense strand
caagaaaugcuuuaucaga

SEQ ID NO: 1375500 - RNA, 19 nt, Homo sapiens
  misc_RNA (1)...(19): siRNA sense strand
gaaggaacuuacacguuug

SEQ ID NO: 1375501 - RNA, 19 nt, Homo sapiens
  misc_RNA (1)...(19): siRNA sense strand
aaacagcgacuagucauua

SEQ ID NO: 1375502 - RNA, 19 nt, Homo sapiens
  misc_RNA (1)...(19): siRNA sense strand
caagugagacuccaaguga

SEQ ID NO: 1375503 - RNA, 19 nt, Homo sapiens
  misc_RNA (1)...(19): siRNA sense strand
gaaguugugucuccugauc

SEQ ID NO: 1375504 - RNA, 19 nt, Homo sapiens
  misc_RNA (1)...(19): siRNA sense strand
gaagaagcgagccauguuu

SEQ ID NO: 1375505 - RNA, 19 nt, Homo sapiens
  misc_RNA (1)...(19): siRNA sense strand
ccaggaagcuguguuugaa

SEQ ID NO: 1375506 - RNA, 19 nt, Homo sapiens
  misc_RNA (1)...(19): siRNA sense strand
gaaacaacagaaaccauuu

SEQ ID NO: 1375507 - RNA, 19 nt, Homo sapiens
  misc_RNA (1)...(19): siRNA sense strand
gcaagcuggugauuucuau

SEQ ID NO: 1375508 - RNA, 19 nt, Homo sapiens
  misc_RNA (1)...(19): siRNA sense strand
cauccaaccugcucaagaa

SEQ ID NO: 1375509 - RNA, 19 nt, Homo sapiens
  misc_RNA (1)...(19): siRNA sense strand
gaagauugaagcccacuuu

SEQ ID NO: 1375510 - RNA, 19 nt, Homo sapiens
  misc_RNA (1)...(19): siRNA sense strand
gcucagaucucagaaucaa

SEQ ID NO: 1375511 - RNA, 19 nt, Homo sapiens
  misc_RNA (1)...(19): siRNA sense strand
gaacaagccuuaauuagga

SEQ ID NO: 1375512 - RNA, 19 nt, Homo sapiens
  misc_RNA (1)...(19): siRNA sense strand
gaaacaagaugcugacaaa

SEQ ID NO: 1375513 - RNA, 19 nt, Homo sapiens
  misc_RNA (1)...(19): siRNA sense strand
gaucaggaauuccauauuu

SEQ ID NO: 1375514 - RNA, 19 nt, Homo sapiens
  misc_RNA (1)...(19): siRNA sense strand
ggaagaaggugaucucuau

SEQ ID NO: 1375515 - RNA, 19 nt, Homo sapiens
  misc_RNA (1)...(19): siRNA sense strand
ggucagaacuuauguagaa

SEQ ID NO: 1375516 - RNA, 19 nt, Homo sapiens
  misc_RNA (1)...(19): siRNA sense strand
gcaggcagaucuucaauuu

SEQ ID NO: 1375517 - RNA, 19 nt, Homo sapiens
  misc_RNA (1)...(19): siRNA sense strand
guggagacauuacauauua

SEQ ID NO: 1375518 - RNA, 19 nt, Homo sapiens
  misc_RNA (1)...(19): siRNA sense strand
gaaaagggcugaaagaauu

SEQ ID NO: 1375519 - RNA, 19 nt, Homo sapiens
  misc_RNA (1)...(19): siRNA sense strand
gaaagaacuucaggacaua

SEQ ID NO: 1375520 - RNA, 19 nt, Homo sapiens
  misc_RNA (1)...(19): siRNA sense strand
gaacagaagagggcuauua

SEQ ID NO: 1375521 - RNA, 19 nt, Homo sapiens
  misc_RNA (1)...(19): siRNA sense strand
gaacuuauguagaagauca

SEQ ID NO: 1375522 - RNA, 19 nt, Homo sapiens
  misc_RNA (1)...(19): siRNA sense strand
gaugaaagaugaugaagga

SEQ ID NO: 1375523 - RNA, 19 nt, Homo sapiens
  misc_RNA (1)...(19): siRNA sense strand
gggagaagcugcccuuaaa

SEQ ID NO: 1375524 - RNA, 19 nt, Homo sapiens
  misc_RNA (1)...(19): siRNA sense strand
caaauuagaugacauugga

SEQ ID NO: 1375525 - RNA, 19 nt, Homo sapiens
  misc_RNA (1)...(19): siRNA sense strand
ccaaagaaguugugaaguu

SEQ ID NO: 1375526 - RNA, 19 nt, Homo sapiens
  misc_RNA (1)...(19): siRNA sense strand
caggaaagcuucaguuuga

SEQ ID NO: 1375527 - RNA, 19 nt, Homo sapiens
  misc_RNA (1)...(19): siRNA sense strand
gaaggcaucucuuacaaau

SEQ ID NO: 1375528 - RNA, 19 nt, Homo sapiens
  misc_RNA (1)...(19): siRNA sense strand
gaugaaagaugaccaggaa

SEQ ID NO: 1375529 - RNA, 19 nt, Homo sapiens
  misc_RNA (1)...(19): siRNA sense strand
ugaaggaacuuacacguuu

SEQ ID NO: 1375530 - RNA, 19 nt, Homo sapiens
  misc_RNA (1)...(19): siRNA sense strand
gguacucaaucacuaauua

SEQ ID NO: 1375531 - RNA, 19 nt, Homo sapiens
  misc_RNA (1)...(19): siRNA sense strand
gaccuuaccuguacagaaa

SEQ ID NO: 1375532 - RNA, 19 nt, Homo sapiens
  misc_RNA (1)...(19): siRNA sense strand
gaagagggcuauuaugaag

SEQ ID NO: 1375533 - RNA, 19 nt, Homo sapiens
  misc_RNA (1)...(19): siRNA sense strand
ugaagaagauggagaagaa

SEQ ID NO: 1375534 - RNA, 19 nt, Homo sapiens
  misc_RNA (1)...(19): siRNA sense strand
gaagagaaacgcuuuguug

SEQ ID NO: 1375535 - RNA, 19 nt, Homo sapiens
  misc_RNA (1)...(19): siRNA sense strand
gaaaucaaaucaacugaca

SEQ ID NO: 1375536 - RNA, 19 nt, Homo sapiens
  misc_RNA (1)...(19): siRNA sense strand
gaagaaugguguggaaauu

SEQ ID NO: 1375537 - RNA, 19 nt, Homo sapiens
  misc_RNA (1)...(19): siRNA sense strand
ggagaaagauaccaaaugg

SEQ ID NO: 1375538 - RNA, 19 nt, Homo sapiens
  misc_RNA (1)...(19): siRNA sense strand
caaagugaguuacaacaaa

SEQ ID NO: 1375539 - RNA, 19 nt, Homo sapiens
  misc_RNA (1)...(19): siRNA sense strand
cuaaagaggugaaacaaga

SEQ ID NO: 1375540 - RNA, 19 nt, Homo sapiens
  misc_RNA (1)...(19): siRNA sense strand
gagaauggcucaugaaggu

SEQ ID NO: 1375541 - RNA, 19 nt, Homo sapiens
  misc_RNA (1)...(19): siRNA sense strand
gaaacaauacugagaacua

SEQ ID NO: 1375542 - RNA, 19 nt, Homo sapiens
  misc_RNA (1)...(19): siRNA sense strand
gcaaauaacucaggagaag

SEQ ID NO: 1375543 - RNA, 19 nt, Homo sapiens
  misc_RNA (1)...(19): siRNA sense strand
gcagagccacuaacaaaua

SEQ ID NO: 1375544 - RNA, 19 nt, Homo sapiens
  misc_RNA (1)...(19): siRNA sense strand
guauaaagauggcauugaa

SEQ ID NO: 1375545 - RNA, 19 nt, Homo sapiens
  misc_RNA (1)...(19): siRNA sense strand
caucaaacauggagaaaga

SEQ ID NO: 1375546 - RNA, 19 nt, Homo sapiens
  misc_RNA (1)...(19): siRNA sense strand
gaaggaaaaugguaucaua

SEQ ID NO: 1375547 - RNA, 19 nt, Homo sapiens
  misc_RNA (1)...(19): siRNA sense strand
gaacaagaaacaauacuga

SEQ ID NO: 1375548 - RNA, 19 nt, Homo sapiens
  misc_RNA (1)...(19): siRNA sense strand
caacauagcuggagaaacc

SEQ ID NO: 1375549 - RNA, 19 nt, Homo sapiens
  misc_RNA (1)...(19): siRNA sense strand
gaagagcgcuuugaaguac

SEQ ID NO: 1375550 - RNA, 19 nt, Homo sapiens
  misc_RNA (1)...(19): siRNA sense strand
gaauugauguccuguggaa

SEQ ID NO: 1375551 - RNA, 19 nt, Homo sapiens
  misc_RNA (1)...(19): siRNA sense strand
gaaagaauccagagccaaa

SEQ ID NO: 1375552 - RNA, 19 nt, Homo sapiens
  misc_RNA (1)...(19): siRNA sense strand
ggauacagauacaaaguga

SEQ ID NO: 1375553 - RNA, 19 nt, Homo sapiens
  misc_RNA (1)...(19): siRNA sense strand
gcagaucacagacagaaua

SEQ ID NO: 1375554 - RNA, 19 nt, Homo sapiens
  misc_RNA (1)...(19): siRNA sense strand
gaaaccaacuguaaucucu

SEQ ID NO: 1375555 - RNA, 19 nt, Homo sapiens
  misc_RNA (1)...(19): siRNA sense strand
ggacauagaaguuccagaa

SEQ ID NO: 1375556 - RNA, 19 nt, Homo sapiens
  misc_RNA (1)...(19): siRNA sense strand
ggauauccauuaccaaaga

SEQ ID NO: 1375557 - RNA, 19 nt, Homo sapiens
  misc_RNA (1)...(19): siRNA sense strand
caaagaaguugugaaguug

SEQ ID NO: 1375558 - RNA, 19 nt, Homo sapiens
  misc_RNA (1)...(19): siRNA sense strand
caucaggaauguucacuuu

SEQ ID NO: 1375559 - RNA, 19 nt, Homo sapiens
  misc_RNA (1)...(19): siRNA sense strand
gaauuagagugcauuguau

SEQ ID NO: 1375560 - RNA, 19 nt, Homo sapiens
  misc_RNA (1)...(19): siRNA sense strand
uaaagaagaugguacucaa

SEQ ID NO: 1375561 - RNA, 19 nt, Homo sapiens
  misc_RNA (1)...(19): siRNA sense strand
uguggaagcucgucauaua

SEQ ID NO: 1375562 - RNA, 19 nt, Homo sapiens
  misc_RNA (1)...(19): siRNA sense strand
gaaaugaaagucagagcua

SEQ ID NO: 1375563 - RNA, 19 nt, Homo sapiens
  misc_RNA (1)...(19): siRNA sense strand
caaauggacuuucuacaag

SEQ ID NO: 1375564 - RNA, 19 nt, Homo sapiens
  misc_RNA (1)...(19): siRNA sense strand
ggaaaugccuguuuaucca

SEQ ID NO: 1375565 - RNA, 19 nt, Homo sapiens
  misc_RNA (1)...(19): siRNA sense strand
acacaaauauguaguggaa

SEQ ID NO: 1375566 - RNA, 19 nt, Homo sapiens
  misc_RNA (1)...(19): siRNA sense strand
ggaagaugcuggaaauuac

SEQ ID NO: 1375567 - RNA, 19 nt, Homo sapiens
  misc_RNA (1)...(19): siRNA sense strand
ccaaagaguuaacugaaga

SEQ ID NO: 1375568 - RNA, 19 nt, Homo sapiens
  misc_RNA (1)...(19): siRNA sense strand
cggaagagcugcgcaguaa

SEQ ID NO: 1375569 - RNA, 19 nt, Homo sapiens
  misc_RNA (1)...(19): siRNA sense strand
uaaggaagaugcuggaaau

SEQ ID NO: 1375570 - RNA, 19 nt, Homo sapiens
  misc_RNA (1)...(19): siRNA sense strand
ucagggaccuauucaguaa

SEQ ID NO: 1375571 - RNA, 19 nt, Homo sapiens
  misc_RNA (1)...(19): siRNA sense strand
gcacggaugucaccugcaa

SEQ ID NO: 1375572 - RNA, 19 nt, Homo sapiens
  misc_RNA (1)...(19): siRNA sense strand
gagaugugguuaugacuga

SEQ ID NO: 1375573 - RNA, 19 nt, Homo sapiens
  misc_RNA (1)...(19): siRNA sense strand
caagaacaaauccaaguua

SEQ ID NO: 1375574 - RNA, 19 nt, Homo sapiens
  misc_RNA (1)...(19): siRNA sense strand
gagaaacuauggcuacuag

SEQ ID NO: 1375575 - RNA, 19 nt, Homo sapiens
  misc_RNA (1)...(19): siRNA sense strand
ggagaagacugcuguaacu

SEQ ID NO: 1375576 - RNA, 19 nt, Homo sapiens
  misc_RNA (1)...(19): siRNA sense strand
gcacauaucaucacagauc

SEQ ID NO: 1375577 - RNA, 19 nt, Homo sapiens
  misc_RNA (1)...(19): siRNA sense strand
ggaaacacauuaaggacau

SEQ ID NO: 1375578 - RNA, 19 nt, Homo sapiens
  misc_RNA (1)...(19): siRNA sense strand
gaaauuaagccaagugaca

SEQ ID NO: 1375579 - RNA, 19 nt, Homo sapiens
  misc_RNA (1)...(19): siRNA sense strand
gaugaaagacggccaagaa

SEQ ID NO: 1375580 - RNA, 19 nt, Homo sapiens
  misc_RNA (1)...(19): siRNA sense strand
guuaaagucuccuuggaaa

SEQ ID NO: 1375581 - RNA, 19 nt, Homo sapiens
  misc_RNA (1)...(19): siRNA sense strand
gagcucaagucucgaaaga

SEQ ID NO: 1375582 - RNA, 19 nt, Homo sapiens
  misc_RNA (1)...(19): siRNA sense strand
gaaagaauuacccaugaaa

SEQ ID NO: 1375583 - RNA, 19 nt, Homo sapiens
  misc_RNA (1)...(19): siRNA sense strand
gaaggaaucuacacugcau

SEQ ID NO: 1375584 - RNA, 19 nt, Homo sapiens
  misc_RNA (1)...(19): siRNA sense strand
gauuaugaguuacugauga

SEQ ID NO: 1375585 - RNA, 19 nt, Homo sapiens
  misc_RNA (1)...(19): siRNA sense strand
ugaagaagcugauuaugag

SEQ ID NO: 1375586 - RNA, 19 nt, Homo sapiens
  misc_RNA (1)...(19): siRNA sense strand
gagaaacgcuuuguugagu

SEQ ID NO: 1375587 - RNA, 19 nt, Homo sapiens
  misc_RNA (1)...(19): siRNA sense strand
gcaggugucagaagaauuu

SEQ ID NO: 1375588 - RNA, 19 nt, Homo sapiens
  misc_RNA (1)...(19): siRNA sense strand
gaaauuuacuacagaagag

SEQ ID NO: 1375589 - RNA, 19 nt, Homo sapiens
  misc_RNA (1)...(19): siRNA sense strand
ggaaauugccgaagcuuau

SEQ ID NO: 1375590 - RNA, 19 nt, Homo sapiens
  misc_RNA (1)...(19): siRNA sense strand
gaaauugagaugagugaaa

SEQ ID NO: 1375591 - RNA, 19 nt, Homo sapiens
  misc_RNA (1)...(19): siRNA sense strand
cauagaaguuccagaauca

SEQ ID NO: 1375592 - RNA, 19 nt, Homo sapiens
  misc_RNA (1)...(19): siRNA sense strand
agacaaacccgaauugaaa

SEQ ID NO: 1375593 - RNA, 19 nt, Homo sapiens
  misc_RNA (1)...(19): siRNA sense strand
ggaacaauuuacucucuga

SEQ ID NO: 1375594 - RNA, 19 nt, Homo sapiens
  misc_RNA (1)...(19): siRNA sense strand
gaaaucaagcccaguucua

SEQ ID NO: 1375595 - RNA, 19 nt, Homo sapiens
  misc_RNA (1)...(19): siRNA sense strand
gaaagacggccaagaagug

SEQ ID NO: 1375596 - RNA, 19 nt, Homo sapiens
  misc_RNA (1)...(19): siRNA sense strand
ccaagcaauugaucacuuu

SEQ ID NO: 1375597 - RNA, 19 nt, Homo sapiens
  misc_RNA (1)...(19): siRNA sense strand
gagaaggcauuacuaccaa

SEQ ID NO: 1375598 - RNA, 19 nt, Homo sapiens
  misc_RNA (1)...(19): siRNA sense strand
gaaaacaguuguaccuaaa

SEQ ID NO: 1375599 - RNA, 19 nt, Homo sapiens
  misc_RNA (1)...(19): siRNA sense strand
caagaaaugcuuuaucaga

SEQ ID NO: 1375600 - RNA, 19 nt, Homo sapiens
  misc_RNA (1)...(19): siRNA sense strand
gaaggaacuuacacguuug

SEQ ID NO: 1375601 - RNA, 19 nt, Homo sapiens
  misc_RNA (1)...(19): siRNA sense strand
aaacagcgacuagucauua

SEQ ID NO: 1375602 - RNA, 19 nt, Homo sapiens
  misc_RNA (1)...(19): siRNA sense strand
caagugagacuccaaguga

SEQ ID NO: 1375603 - RNA, 19 nt, Homo sapiens
  misc_RNA (1)...(19): siRNA sense strand
gaaguugugucuccugauc

SEQ ID NO: 1375604 - RNA, 19 nt, Homo sapiens
  misc_RNA (1)...(19): siRNA sense strand
gaagaagcgagccauguuu

SEQ ID NO: 1375605 - RNA, 19 nt, Homo sapiens
  misc_RNA (1)...(19): siRNA sense strand
ccaggaagcuguguuugaa

SEQ ID NO: 1375606 - RNA, 19 nt, Homo sapiens
  misc_RNA (1)...(19): siRNA sense strand
gaaacaacagaaaccauuu

SEQ ID NO: 1375607 - RNA, 19 nt, Homo sapiens
  misc_RNA (1)...(19): siRNA sense strand
gcaagcuggugauuucuau

SEQ ID NO: 1375608 - RNA, 19 nt, Homo sapiens
  misc_RNA (1)...(19): siRNA sense strand
cauccaaccugcucaagaa

SEQ ID NO: 1375609 - RNA, 19 nt, Homo sapiens
  misc_RNA (1)...(19): siRNA sense strand
gaagauugaagcccacuuu

SEQ ID NO: 1375610 - RNA, 19 nt, Homo sapiens
  misc_RNA (1)...(19): siRNA sense strand
gcucagaucucagaaucaa

SEQ ID NO: 1375611 - RNA, 19 nt, Homo sapiens
  misc_RNA (1)...(19): siRNA sense strand
gaacaagccuuaauuagga

SEQ ID NO: 1375612 - RNA, 19 nt, Homo sapiens
  misc_RNA (1)...(19): siRNA sense strand
gaaacaagaugcugacaaa

SEQ ID NO: 1375613 - RNA, 19 nt, Homo sapiens
  misc_RNA (1)...(19): siRNA sense strand
gaucaggaauuccauauuu

SEQ ID NO: 1375614 - RNA, 19 nt, Homo sapiens
  misc_RNA (1)...(19): siRNA sense strand
ggaagaaggugaucucuau

SEQ ID NO: 1375615 - RNA, 19 nt, Homo sapiens
  misc_RNA (1)...(19): siRNA sense strand
ggucagaacuuauguagaa

SEQ ID NO: 1375616 - RNA, 19 nt, Homo sapiens
  misc_RNA (1)...(19): siRNA sense strand
gcaggcagaucuucaauuu

SEQ ID NO: 1375617 - RNA, 19 nt, Homo sapiens
  misc_RNA (1)...(19): siRNA sense strand
guggagacauuacauauua

SEQ ID NO: 1375618 - RNA, 19 nt, Homo sapiens
  misc_RNA (1)...(19): siRNA sense strand
gaaaagggcugaaagaauu

SEQ ID NO: 1375619 - RNA, 19 nt, Homo sapiens
  misc_RNA (1)...(19): siRNA sense strand
gaaagaacuucaggacaua

SEQ ID NO: 1375620 - RNA, 19 nt, Homo sapiens
  misc_RNA (1)...(19): siRNA sense strand
gaacagaagagggcuauua

SEQ ID NO: 1375621 - RNA, 19 nt, Homo sapiens
  misc_RNA (1)...(19): siRNA sense strand
gaacuuauguagaagauca

SEQ ID NO: 1375622 - RNA, 19 nt, Homo sapiens
  misc_RNA (1)...(19): siRNA sense strand
gaugaaagaugaugaagga

SEQ ID NO: 1375623 - RNA, 19 nt, Homo sapiens
  misc_RNA (1)...(19): siRNA sense strand
gggagaagcugcccuuaaa

SEQ ID NO: 1375624 - RNA, 19 nt, Homo sapiens
  misc_RNA (1)...(19): siRNA sense strand
caaauuagaugacauugga

SEQ ID NO: 1375625 - RNA, 19 nt, Homo sapiens
  misc_RNA (1)...(19): siRNA sense strand
ccaaagaaguugugaaguu

SEQ ID NO: 1375626 - RNA, 19 nt, Homo sapiens
  misc_RNA (1)...(19): siRNA sense strand
caggaaagcuucaguuuga

SEQ ID NO: 1375627 - RNA, 19 nt, Homo sapiens
  misc_RNA (1)...(19): siRNA sense strand
gaaggcaucucuuacaaau

SEQ ID NO: 1375628 - RNA, 19 nt, Homo sapiens
  misc_RNA (1)...(19): siRNA sense strand
gaugaaagaugaccaggaa

SEQ ID NO: 1375629 - RNA, 19 nt, Homo sapiens
  misc_RNA (1)...(19): siRNA sense strand
ugaaggaacuuacacguuu

SEQ ID NO: 1375630 - RNA, 19 nt, Homo sapiens
  misc_RNA (1)...(19): siRNA sense strand
gguacucaaucacuaauua

SEQ ID NO: 1375631 - RNA, 19 nt, Homo sapiens
  misc_RNA (1)...(19): siRNA sense strand
gaccuuaccuguacagaaa

SEQ ID NO: 1375632 - RNA, 19 nt, Homo sapiens
  misc_RNA (1)...(19): siRNA sense strand
gaagagggcuauuaugaag

SEQ ID NO: 1375633 - RNA, 19 nt, Homo sapiens
  misc_RNA (1)...(19): siRNA sense strand
ugaagaagauggagaagaa

SEQ ID NO: 1375634 - RNA, 19 nt, Homo sapiens
  misc_RNA (1)...(19): siRNA sense strand
gaagagaaacgcuuuguug

SEQ ID NO: 1375635 - RNA, 19 nt, Homo sapiens
  misc_RNA (1)...(19): siRNA sense strand
gaaaucaaaucaacugaca

SEQ ID NO: 1375636 - RNA, 19 nt, Homo sapiens
  misc_RNA (1)...(19): siRNA sense strand
gaagaaugguguggaaauu

SEQ ID NO: 1375637 - RNA, 19 nt, Homo sapiens
  misc_RNA (1)...(19): siRNA sense strand
ggagaaagauaccaaaugg

SEQ ID NO: 1375638 - RNA, 19 nt, Homo sapiens
  misc_RNA (1)...(19): siRNA sense strand
caaagugaguuacaacaaa

SEQ ID NO: 1375639 - RNA, 19 nt, Homo sapiens
  misc_RNA (1)...(19): siRNA sense strand
cuaaagaggugaaacaaga

SEQ ID NO: 1375640 - RNA, 19 nt, Homo sapiens
  misc_RNA (1)...(19): siRNA sense strand
gagaauggcucaugaaggu

SEQ ID NO: 1375641 - RNA, 19 nt, Homo sapiens
  misc_RNA (1)...(19): siRNA sense strand
gaaacaauacugagaacua

SEQ ID NO: 1375642 - RNA, 19 nt, Homo sapiens
  misc_RNA (1)...(19): siRNA sense strand
gcaaauaacucaggagaag

SEQ ID NO: 1375643 - RNA, 19 nt, Homo sapiens
  misc_RNA (1)...(19): siRNA sense strand
gcagagccacuaacaaaua

SEQ ID NO: 1375644 - RNA, 19 nt, Homo sapiens
  misc_RNA (1)...(19): siRNA sense strand
guauaaagauggcauugaa

SEQ ID NO: 1375645 - RNA, 19 nt, Homo sapiens
  misc_RNA (1)...(19): siRNA sense strand
caucaaacauggagaaaga

SEQ ID NO: 1375646 - RNA, 19 nt, Homo sapiens
  misc_RNA (1)...(19): siRNA sense strand
gaaggaaaaugguaucaua

SEQ ID NO: 1375647 - RNA, 19 nt, Homo sapiens
  misc_RNA (1)...(19): siRNA sense strand
gaacaagaaacaauacuga

SEQ ID NO: 1375648 - RNA, 19 nt, Homo sapiens
  misc_RNA (1)...(19): siRNA sense strand
caacauagcuggagaaacc

SEQ ID NO: 1375649 - RNA, 19 nt, Homo sapiens
  misc_RNA (1)...(19): siRNA sense strand
gaagagcgcuuugaaguac

SEQ ID NO: 1375650 - RNA, 19 nt, Homo sapiens
  misc_RNA (1)...(19): siRNA sense strand
gaauugauguccuguggaa

SEQ ID NO: 1375651 - RNA, 19 nt, Homo sapiens
  misc_RNA (1)...(19): siRNA sense strand
gaaagaauccagagccaaa

SEQ ID NO: 1375652 - RNA, 19 nt, Homo sapiens
  misc_RNA (1)...(19): siRNA sense strand
ggauacagauacaaaguga

SEQ ID NO: 1375653 - RNA, 19 nt, Homo sapiens
  misc_RNA (1)...(19): siRNA sense strand
gcagaucacagacagaaua

SEQ ID NO: 1375654 - RNA, 19 nt, Homo sapiens
  misc_RNA (1)...(19): siRNA sense strand
gaaaccaacuguaaucucu

SEQ ID NO: 1375655 - RNA, 19 nt, Homo sapiens
  misc_RNA (1)...(19): siRNA sense strand
ggacauagaaguuccagaa

SEQ ID NO: 1375656 - RNA, 19 nt, Homo sapiens
  misc_RNA (1)...(19): siRNA sense strand
ggauauccauuaccaaaga

SEQ ID NO: 1375657 - RNA, 19 nt, Homo sapiens
  misc_RNA (1)...(19): siRNA sense strand
caaagaaguugugaaguug

SEQ ID NO: 1375658 - RNA, 19 nt, Homo sapiens
  misc_RNA (1)...(19): siRNA sense strand
caucaggaauguucacuuu

SEQ ID NO: 1375659 - RNA, 19 nt, Homo sapiens
  misc_RNA (1)...(19): siRNA sense strand
gaauuagagugcauuguau

SEQ ID NO: 1375660 - RNA, 19 nt, Homo sapiens
  misc_RNA (1)...(19): siRNA sense strand
uaaagaagaugguacucaa

SEQ ID NO: 1375661 - RNA, 19 nt, Homo sapiens
  misc_RNA (1)...(19): siRNA sense strand
uguggaagcucgucauaua

SEQ ID NO: 1375662 - RNA, 19 nt, Homo sapiens
  misc_RNA (1)...(19): siRNA sense strand
gaaaugaaagucagagcua

SEQ ID NO: 1375663 - RNA, 19 nt, Homo sapiens
  misc_RNA (1)...(19): siRNA sense strand
caaauggacuuucuacaag

SEQ ID NO: 1375664 - RNA, 19 nt, Homo sapiens
  misc_RNA (1)...(19): siRNA sense strand
ggaaaugccuguuuaucca

SEQ ID NO: 1375665 - RNA, 19 nt, Homo sapiens
  misc_RNA (1)...(19): siRNA sense strand
acacaaauauguaguggaa

SEQ ID NO: 1375666 - RNA, 19 nt, Homo sapiens
  misc_RNA (1)...(19): siRNA sense strand
ggaagaugcuggaaauuac

SEQ ID NO: 1375667 - RNA, 19 nt, Homo sapiens
  misc_RNA (1)...(19): siRNA sense strand
ccaaagaguuaacugaaga

SEQ ID NO: 1375668 - RNA, 19 nt, Homo sapiens
  misc_RNA (1)...(19): siRNA sense strand
cggaagagcugcgcaguaa

SEQ ID NO: 1375669 - RNA, 19 nt, Homo sapiens
  misc_RNA (1)...(19): siRNA sense strand
uaaggaagaugcuggaaau

SEQ ID NO: 1375670 - RNA, 19 nt, Homo sapiens
  misc_RNA (1)...(19): siRNA sense strand
ucagggaccuauucaguaa

SEQ ID NO: 1375671 - RNA, 19 nt, Homo sapiens
  misc_RNA (1)...(19): siRNA sense strand
gcacggaugucaccugcaa

SEQ ID NO: 1375672 - RNA, 19 nt, Homo sapiens
  misc_RNA (1)...(19): siRNA sense strand
gagaugugguuaugacuga

SEQ ID NO: 1375673 - RNA, 19 nt, Homo sapiens
  misc_RNA (1)...(19): siRNA sense strand
caagaacaaauccaaguua

SEQ ID NO: 1375674 - RNA, 19 nt, Homo sapiens
  misc_RNA (1)...(19): siRNA sense strand
gagaaacuauggcuacuag

SEQ ID NO: 1375675 - RNA, 19 nt, Homo sapiens
  misc_RNA (1)...(19): siRNA sense strand
ggagaagacugcuguaacu

SEQ ID NO: 1375676 - RNA, 19 nt, Homo sapiens
  misc_RNA (1)...(19): siRNA sense strand
gcacauaucaucacagauc

SEQ ID NO: 1375677 - RNA, 19 nt, Homo sapiens
  misc_RNA (1)...(19): siRNA sense strand
ggaaacacauuaaggacau

SEQ ID NO: 1375678 - RNA, 19 nt, Homo sapiens
  misc_RNA (1)...(19): siRNA sense strand
gaaauuaagccaagugaca

SEQ ID NO: 1375679 - RNA, 19 nt, Homo sapiens
  misc_RNA (1)...(19): siRNA sense strand
gaugaaagacggccaagaa

SEQ ID NO: 1375680 - RNA, 19 nt, Homo sapiens
  misc_RNA (1)...(19): siRNA sense strand
guuaaagucuccuuggaaa

SEQ ID NO: 1375681 - RNA, 19 nt, Homo sapiens
  misc_RNA (1)...(19): siRNA sense strand
gagcucaagucucgaaaga

SEQ ID NO: 1375682 - RNA, 19 nt, Homo sapiens
  misc_RNA (1)...(19): siRNA sense strand
gaaagaauuacccaugaaa

SEQ ID NO: 1375683 - RNA, 19 nt, Homo sapiens
  misc_RNA (1)...(19): siRNA sense strand
gaaggaaucuacacugcau

SEQ ID NO: 1375684 - RNA, 19 nt, Homo sapiens
  misc_RNA (1)...(19): siRNA sense strand
gauuaugaguuacugauga

SEQ ID NO: 1375685 - RNA, 19 nt, Homo sapiens
  misc_RNA (1)...(19): siRNA sense strand
ugaagaagcugauuaugag

SEQ ID NO: 1375686 - RNA, 19 nt, Homo sapiens
  misc_RNA (1)...(19): siRNA sense strand
gagaaacgcuuuguugagu

SEQ ID NO: 1375687 - RNA, 19 nt, Homo sapiens
  misc_RNA (1)...(19): siRNA sense strand
gcaggugucagaagaauuu

SEQ ID NO: 1375688 - RNA, 19 nt, Homo sapiens
  misc_RNA (1)...(19): siRNA sense strand
gaaauuuacuacagaagag

SEQ ID NO: 1375689 - RNA, 19 nt, Homo sapiens
  misc_RNA (1)...(19): siRNA sense strand
ggaaauugccgaagcuuau

SEQ ID NO: 1375690 - RNA, 19 nt, Homo sapiens
  misc_RNA (1)...(19): siRNA sense strand
gaaauugagaugagugaaa

SEQ ID NO: 1375691 - RNA, 19 nt, Homo sapiens
  misc_RNA (1)...(19): siRNA sense strand
cauagaaguuccagaauca

SEQ ID NO: 1375692 - RNA, 19 nt, Homo sapiens
  misc_RNA (1)...(19): siRNA sense strand
agacaaacccgaauugaaa

SEQ ID NO: 1375693 - RNA, 19 nt, Homo sapiens
  misc_RNA (1)...(19): siRNA sense strand
ggaacaauuuacucucuga

SEQ ID NO: 1375694 - RNA, 19 nt, Homo sapiens
  misc_RNA (1)...(19): siRNA sense strand
gaaaucaagcccaguucua

SEQ ID NO: 1375695 - RNA, 19 nt, Homo sapiens
  misc_RNA (1)...(19): siRNA sense strand
gaaagacggccaagaagug

SEQ ID NO: 1375696 - RNA, 19 nt, Homo sapiens
  misc_RNA (1)...(19): siRNA sense strand
ccaagcaauugaucacuuu

SEQ ID NO: 1375697 - RNA, 19 nt, Homo sapiens
  misc_RNA (1)...(19): siRNA sense strand
gagaaggcauuacuaccaa

SEQ ID NO: 1375698 - RNA, 19 nt, Homo sapiens
  misc_RNA (1)...(19): siRNA sense strand
gaaaacaguuguaccuaaa

SEQ ID NO: 1375699 - RNA, 19 nt, Homo sapiens
  misc_RNA (1)...(19): siRNA sense strand
caagaaaugcuuuaucaga

SEQ ID NO: 1375700 - RNA, 19 nt, Homo sapiens
  misc_RNA (1)...(19): siRNA sense strand
gaaggaacuuacacguuug

SEQ ID NO: 1375701 - RNA, 19 nt, Homo sapiens
  misc_RNA (1)...(19): siRNA sense strand
aaacagcgacuagucauua

SEQ ID NO: 1375702 - RNA, 19 nt, Homo sapiens
  misc_RNA (1)...(19): siRNA sense strand
caagugagacuccaaguga

SEQ ID NO: 1375703 - RNA, 19 nt, Homo sapiens
  misc_RNA (1)...(19): siRNA sense strand
gaaguugugucuccugauc

SEQ ID NO: 1375704 - RNA, 19 nt, Homo sapiens
  misc_RNA (1)...(19): siRNA sense strand
gaagaagcgagccauguuu

SEQ ID NO: 1375705 - RNA, 19 nt, Homo sapiens
  misc_RNA (1)...(19): siRNA sense strand
ccaggaagcuguguuugaa

SEQ ID NO: 1375706 - RNA, 19 nt, Homo sapiens
  misc_RNA (1)...(19): siRNA sense strand
gaaacaacagaaaccauuu

SEQ ID NO: 1375707 - RNA, 19 nt, Homo sapiens
  misc_RNA (1)...(19): siRNA sense strand
gcaagcuggugauuucuau

SEQ ID NO: 1375708 - RNA, 19 nt, Homo sapiens
  misc_RNA (1)...(19): siRNA sense strand
cauccaaccugcucaagaa

SEQ ID NO: 1375709 - RNA, 19 nt, Homo sapiens
  misc_RNA (1)...(19): siRNA sense strand
gaagauugaagcccacuuu

SEQ ID NO: 1375710 - RNA, 19 nt, Homo sapiens
  misc_RNA (1)...(19): siRNA sense strand
gcucagaucucagaaucaa

SEQ ID NO: 1375711 - RNA, 19 nt, Homo sapiens
  misc_RNA (1)...(19): siRNA sense strand
gaacaagccuuaauuagga

SEQ ID NO: 1375712 - RNA, 19 nt, Homo sapiens
  misc_RNA (1)...(19): siRNA sense strand
gaaacaagaugcugacaaa

SEQ ID NO: 1375713 - RNA, 19 nt, Homo sapiens
  misc_RNA (1)...(19): siRNA sense strand
gaucaggaauuccauauuu

SEQ ID NO: 1375714 - RNA, 19 nt, Homo sapiens
  misc_RNA (1)...(19): siRNA sense strand
ggaagaaggugaucucuau

SEQ ID NO: 1375715 - RNA, 19 nt, Homo sapiens
  misc_RNA (1)...(19): siRNA sense strand
ggucagaacuuauguagaa

SEQ ID NO: 1375716 - RNA, 19 nt, Homo sapiens
  misc_RNA (1)...(19): siRNA sense strand
gcaggcagaucuucaauuu

SEQ ID NO: 1375717 - RNA, 19 nt, Homo sapiens
  misc_RNA (1)...(19): siRNA sense strand
guggagacauuacauauua

SEQ ID NO: 1375718 - RNA, 19 nt, Homo sapiens
  misc_RNA (1)...(19): siRNA sense strand
gaaaagggcugaaagaauu

SEQ ID NO: 1375719 - RNA, 19 nt, Homo sapiens
  misc_RNA (1)...(19): siRNA sense strand
gaaagaacuucaggacaua

SEQ ID NO: 1375720 - RNA, 19 nt, Homo sapiens
  misc_RNA (1)...(19): siRNA sense strand
gaacagaagagggcuauua

SEQ ID NO: 1375721 - RNA, 19 nt, Homo sapiens
  misc_RNA (1)...(19): siRNA sense strand
gaacuuauguagaagauca

SEQ ID NO: 1375722 - RNA, 19 nt, Homo sapiens
  misc_RNA (1)...(19): siRNA sense strand
gaugaaagaugaugaagga

SEQ ID NO: 1375723 - RNA, 19 nt, Homo sapiens
  misc_RNA (1)...(19): siRNA sense strand
gggagaagcugcccuuaaa

SEQ ID NO: 1375724 - RNA, 19 nt, Homo sapiens
  misc_RNA (1)...(19): siRNA sense strand
caaauuagaugacauugga

SEQ ID NO: 1375725 - RNA, 19 nt, Homo sapiens
  misc_RNA (1)...(19): siRNA sense strand
ccaaagaaguugugaaguu

SEQ ID NO: 1375726 - RNA, 19 nt, Homo sapiens
  misc_RNA (1)...(19): siRNA sense strand
caggaaagcuucaguuuga

SEQ ID NO: 1375727 - RNA, 19 nt, Homo sapiens
  misc_RNA (1)...(19): siRNA sense strand
gaaggcaucucuuacaaau

SEQ ID NO: 1375728 - RNA, 19 nt, Homo sapiens
  misc_RNA (1)...(19): siRNA sense strand
gaugaaagaugaccaggaa

SEQ ID NO: 1375729 - RNA, 19 nt, Homo sapiens
  misc_RNA (1)...(19): siRNA sense strand
ugaaggaacuuacacguuu

SEQ ID NO: 1375730 - RNA, 19 nt, Homo sapiens
  misc_RNA (1)...(19): siRNA sense strand
gguacucaaucacuaauua

SEQ ID NO: 1375731 - RNA, 19 nt, Homo sapiens
  misc_RNA (1)...(19): siRNA sense strand
gaccuuaccuguacagaaa

SEQ ID NO: 1375732 - RNA, 19 nt, Homo sapiens
  misc_RNA (1)...(19): siRNA sense strand
gaagagggcuauuaugaag

SEQ ID NO: 1375733 - RNA, 19 nt, Homo sapiens
  misc_RNA (1)...(19): siRNA sense strand
ugaagaagauggagaagaa

SEQ ID NO: 1375734 - RNA, 19 nt, Homo sapiens
  misc_RNA (1)...(19): siRNA sense strand
gaagagaaacgcuuuguug

SEQ ID NO: 1375735 - RNA, 19 nt, Homo sapiens
  misc_RNA (1)...(19): siRNA sense strand
gaaaucaaaucaacugaca

SEQ ID NO: 1375736 - RNA, 19 nt, Homo sapiens
  misc_RNA (1)...(19): siRNA sense strand
gaagaaugguguggaaauu

SEQ ID NO: 1375737 - RNA, 19 nt, Homo sapiens
  misc_RNA (1)...(19): siRNA sense strand
ggagaaagauaccaaaugg

SEQ ID NO: 1375738 - RNA, 19 nt, Homo sapiens
  misc_RNA (1)...(19): siRNA sense strand
caaagugaguuacaacaaa

SEQ ID NO: 1375739 - RNA, 19 nt, Homo sapiens
  misc_RNA (1)...(19): siRNA sense strand
cuaaagaggugaaacaaga

SEQ ID NO: 1375740 - RNA, 19 nt, Homo sapiens
  misc_RNA (1)...(19): siRNA sense strand
gagaauggcucaugaaggu

SEQ ID NO: 1375741 - RNA, 19 nt, Homo sapiens
  misc_RNA (1)...(19): siRNA sense strand
gaaacaauacugagaacua

SEQ ID NO: 1375742 - RNA, 19 nt, Homo sapiens
  misc_RNA (1)...(19): siRNA sense strand
gcaaauaacucaggagaag

SEQ ID NO: 1375743 - RNA, 19 nt, Homo sapiens
  misc_RNA (1)...(19): siRNA sense strand
gcagagccacuaacaaaua

SEQ ID NO: 1375744 - RNA, 19 nt, Homo sapiens
  misc_RNA (1)...(19): siRNA sense strand
guauaaagauggcauugaa

SEQ ID NO: 1375745 - RNA, 19 nt, Homo sapiens
  misc_RNA (1)...(19): siRNA sense strand
caucaaacauggagaaaga

SEQ ID NO: 1375746 - RNA, 19 nt, Homo sapiens
  misc_RNA (1)...(19): siRNA sense strand
gaaggaaaaugguaucaua

SEQ ID NO: 1375747 - RNA, 19 nt, Homo sapiens
  misc_RNA (1)...(19): siRNA sense strand
gaacaagaaacaauacuga

SEQ ID NO: 1375748 - RNA, 19 nt, Homo sapiens
  misc_RNA (1)...(19): siRNA sense strand
caacauagcuggagaaacc

SEQ ID NO: 1375749 - RNA, 19 nt, Homo sapiens
  misc_RNA (1)...(19): siRNA sense strand
gaagagcgcuuugaaguac

SEQ ID NO: 1375750 - RNA, 19 nt, Homo sapiens
  misc_RNA (1)...(19): siRNA sense strand
gaauugauguccuguggaa

SEQ ID NO: 1375751 - RNA, 19 nt, Homo sapiens
  misc_RNA (1)...(19): siRNA sense strand
gaaagaauccagagccaaa

SEQ ID NO: 1375752 - RNA, 19 nt, Homo sapiens
  misc_RNA (1)...(19): siRNA sense strand
ggauacagauacaaaguga

SEQ ID NO: 1375753 - RNA, 19 nt, Homo sapiens
  misc_RNA (1)...(19): siRNA sense strand
gcagaucacagacagaaua

SEQ ID NO: 1375754 - RNA, 19 nt, Homo sapiens
  misc_RNA (1)...(19): siRNA sense strand
gaaaccaacuguaaucucu

SEQ ID NO: 1375755 - RNA, 19 nt, Homo sapiens
  misc_RNA (1)...(19): siRNA sense strand
ggacauagaaguuccagaa

SEQ ID NO: 1375756 - RNA, 19 nt, Homo sapiens
  misc_RNA (1)...(19): siRNA sense strand
ggauauccauuaccaaaga

SEQ ID NO: 1375757 - RNA, 19 nt, Homo sapiens
  misc_RNA (1)...(19): siRNA sense strand
caaagaaguugugaaguug

SEQ ID NO: 1375758 - RNA, 19 nt, Homo sapiens
  misc_RNA (1)...(19): siRNA sense strand
caucaggaauguucacuuu

SEQ ID NO: 1375759 - RNA, 19 nt, Homo sapiens
  misc_RNA (1)...(19): siRNA sense strand
gaauuagagugcauuguau

SEQ ID NO: 1375760 - RNA, 19 nt, Homo sapiens
  misc_RNA (1)...(19): siRNA sense strand
uaaagaagaugguacucaa

SEQ ID NO: 1375761 - RNA, 19 nt, Homo sapiens
  misc_RNA (1)...(19): siRNA sense strand
uguggaagcucgucauaua

SEQ ID NO: 1375762 - RNA, 19 nt, Homo sapiens
  misc_RNA (1)...(19): siRNA sense strand
gaaaugaaagucagagcua

SEQ ID NO: 1375763 - RNA, 19 nt, Homo sapiens
  misc_RNA (1)...(19): siRNA sense strand
caaauggacuuucuacaag

SEQ ID NO: 1375764 - RNA, 19 nt, Homo sapiens
  misc_RNA (1)...(19): siRNA sense strand
ggaaaugccuguuuaucca

SEQ ID NO: 1375765 - RNA, 19 nt, Homo sapiens
  misc_RNA (1)...(19): siRNA sense strand
acacaaauauguaguggaa

SEQ ID NO: 1375766 - RNA, 19 nt, Homo sapiens
  misc_RNA (1)...(19): siRNA sense strand
ggaagaugcuggaaauuac

SEQ ID NO: 1375767 - RNA, 19 nt, Homo sapiens
  misc_RNA (1)...(19): siRNA sense strand
ccaaagaguuaacugaaga

SEQ ID NO: 1375768 - RNA, 19 nt, Homo sapiens
  misc_RNA (1)...(19): siRNA sense strand
cggaagagcugcgcaguaa

SEQ ID NO: 1375769 - RNA, 19 nt, Homo sapiens
  misc_RNA (1)...(19): siRNA sense strand
uaaggaagaugcuggaaau

SEQ ID NO: 1375770 - RNA, 19 nt, Homo sapiens
  misc_RNA (1)...(19): siRNA sense strand
ucagggaccuauucaguaa

SEQ ID NO: 1375771 - RNA, 19 nt, Homo sapiens
  misc_RNA (1)...(19): siRNA sense strand
gcacggaugucaccugcaa

SEQ ID NO: 1375772 - RNA, 19 nt, Homo sapiens
  misc_RNA (1)...(19): siRNA sense strand
gagaugugguuaugacuga

SEQ ID NO: 1375773 - RNA, 19 nt, Homo sapiens
  misc_RNA (1)...(19): siRNA sense strand
caagaacaaauccaaguua

SEQ ID NO: 1375774 - RNA, 19 nt, Homo sapiens
  misc_RNA (1)...(19): siRNA sense strand
gagaaacuauggcuacuag

SEQ ID NO: 1375775 - RNA, 19 nt, Homo sapiens
  misc_RNA (1)...(19): siRNA sense strand
ggagaagacugcuguaacu

SEQ ID NO: 1375776 - RNA, 19 nt, Homo sapiens
  misc_RNA (1)...(19): siRNA sense strand
gcacauaucaucacagauc

SEQ ID NO: 1375777 - RNA, 19 nt, Homo sapiens
  misc_RNA (1)...(19): siRNA sense strand
ggaaacacauuaaggacau

SEQ ID NO: 1375778 - RNA, 19 nt, Homo sapiens
  misc_RNA (1)...(19): siRNA sense strand
gaaauuaagccaagugaca

SEQ ID NO: 1375779 - RNA, 19 nt, Homo sapiens
  misc_RNA (1)...(19): siRNA sense strand
gaugaaagacggccaagaa

SEQ ID NO: 1375780 - RNA, 19 nt, Homo sapiens
  misc_RNA (1)...(19): siRNA sense strand
guuaaagucuccuuggaaa

SEQ ID NO: 1375781 - RNA, 19 nt, Homo sapiens
  misc_RNA (1)...(19): siRNA sense strand
gagcucaagucucgaaaga

SEQ ID NO: 1375782 - RNA, 19 nt, Homo sapiens
  misc_RNA (1)...(19): siRNA sense strand
gaaagaauuacccaugaaa

SEQ ID NO: 1375783 - RNA, 19 nt, Homo sapiens
  misc_RNA (1)...(19): siRNA sense strand
gaaggaaucuacacugcau

SEQ ID NO: 1375784 - RNA, 19 nt, Homo sapiens
  misc_RNA (1)...(19): siRNA sense strand
gauuaugaguuacugauga

SEQ ID NO: 1375785 - RNA, 19 nt, Homo sapiens
  misc_RNA (1)...(19): siRNA sense strand
ugaagaagcugauuaugag

SEQ ID NO: 1375786 - RNA, 19 nt, Homo sapiens
  misc_RNA (1)...(19): siRNA sense strand
gagaaacgcuuuguugagu

SEQ ID NO: 1375787 - RNA, 19 nt, Homo sapiens
  misc_RNA (1)...(19): siRNA sense strand
gcaggugucagaagaauuu

SEQ ID NO: 1375788 - RNA, 19 nt, Homo sapiens
  misc_RNA (1)...(19): siRNA sense strand
gaaauuuacuacagaagag

SEQ ID NO: 1375789 - RNA, 19 nt, Homo sapiens
  misc_RNA (1)...(19): siRNA sense strand
ggaaauugccgaagcuuau

SEQ ID NO: 1375790 - RNA, 19 nt, Homo sapiens
  misc_RNA (1)...(19): siRNA sense strand
gaaauugagaugagugaaa

SEQ ID NO: 1375791 - RNA, 19 nt, Homo sapiens
  misc_RNA (1)...(19): siRNA sense strand
cauagaaguuccagaauca

SEQ ID NO: 1375792 - RNA, 19 nt, Homo sapiens
  misc_RNA (1)...(19): siRNA sense strand
agacaaacccgaauugaaa

SEQ ID NO: 1375793 - RNA, 19 nt, Homo sapiens
  misc_RNA (1)...(19): siRNA sense strand
ggaacaauuuacucucuga

SEQ ID NO: 1375794 - RNA, 19 nt, Homo sapiens
  misc_RNA (1)...(19): siRNA sense strand
gaaaucaagcccaguucua

SEQ ID NO: 1375795 - RNA, 19 nt, Homo sapiens
  misc_RNA (1)...(19): siRNA sense strand
gaaagacggccaagaagug

SEQ ID NO: 1375796 - RNA, 19 nt, Homo sapiens
  misc_RNA (1)...(19): siRNA sense strand
ccaagcaauugaucacuuu

SEQ ID NO: 1375797 - RNA, 19 nt, Homo sapiens
  misc_RNA (1)...(19): siRNA sense strand
gagaaggcauuacuaccaa

SEQ ID NO: 1375798 - RNA, 19 nt, Homo sapiens
  misc_RNA (1)...(19): siRNA sense strand
gaaaacaguuguaccuaaa

SEQ ID NO: 1375799 - RNA, 19 nt, Homo sapiens
  misc_RNA (1)...(19): siRNA sense strand
caagaaaugcuuuaucaga

SEQ ID NO: 1375800 - RNA, 19 nt, Homo sapiens
  misc_RNA (1)...(19): siRNA sense strand
gaaggaacuuacacguuug

SEQ ID NO: 1375801 - RNA, 19 nt, Homo sapiens
  misc_RNA (1)...(19): siRNA sense strand
aaacagcgacuagucauua

SEQ ID NO: 1375802 - RNA, 19 nt, Homo sapiens
  misc_RNA (1)...(19): siRNA sense strand
caagugagacuccaaguga

SEQ ID NO: 1375803 - RNA, 19 nt, Homo sapiens
  misc_RNA (1)...(19): siRNA sense strand
gaaguugugucuccugauc

SEQ ID NO: 1375804 - RNA, 19 nt, Homo sapiens
  misc_RNA (1)...(19): siRNA sense strand
gaagaagcgagccauguuu

SEQ ID NO: 1375805 - RNA, 19 nt, Homo sapiens
  misc_RNA (1)...(19): siRNA sense strand
ccaggaagcuguguuugaa

SEQ ID NO: 1375806 - RNA, 19 nt, Homo sapiens
  misc_RNA (1)...(19): siRNA sense strand
gaaacaacagaaaccauuu

SEQ ID NO: 1375807 - RNA, 19 nt, Homo sapiens
  misc_RNA (1)...(19): siRNA sense strand
gcaagcuggugauuucuau

SEQ ID NO: 1375808 - RNA, 19 nt, Homo sapiens
  misc_RNA (1)...(19): siRNA sense strand
cauccaaccugcucaagaa

SEQ ID NO: 1375809 - RNA, 19 nt, Homo sapiens
  misc_RNA (1)...(19): siRNA sense strand
gaagauugaagcccacuuu

SEQ ID NO: 1375810 - RNA, 19 nt, Homo sapiens
  misc_RNA (1)...(19): siRNA sense strand
gcucagaucucagaaucaa

SEQ ID NO: 1375811 - RNA, 19 nt, Homo sapiens
  misc_RNA (1)...(19): siRNA sense strand
gguaauggaugaugaagua

SEQ ID NO: 1375812 - RNA, 19 nt, Homo sapiens
  misc_RNA (1)...(19): siRNA sense strand
ggaauuggccuccuguauu

SEQ ID NO: 1375813 - RNA, 19 nt, Homo sapiens
  misc_RNA (1)...(19): siRNA sense strand
caacugcauucuauagauu

SEQ ID NO: 1375814 - RNA, 19 nt, Homo sapiens
  misc_RNA (1)...(19): siRNA sense strand
gcaacugcauucuauagau

SEQ ID NO: 1375815 - RNA, 19 nt, Homo sapiens
  misc_RNA (1)...(19): siRNA sense strand
agaagacuguguagcauuu

SEQ ID NO: 1375816 - RNA, 19 nt, Homo sapiens
  misc_RNA (1)...(19): siRNA sense strand
gcagagcccaccugaauga

SEQ ID NO: 1375817 - RNA, 19 nt, Homo sapiens
  misc_RNA (1)...(19): siRNA sense strand
ucgaacagaugacagagua

SEQ ID NO: 1375818 - RNA, 19 nt, Homo sapiens
  misc_RNA (1)...(19): siRNA sense strand
ccacaccauugcauauuug

SEQ ID NO: 1375819 - RNA, 19 nt, Homo sapiens
  misc_RNA (1)...(19): siRNA sense strand
gagaaaaugccaagaagua

SEQ ID NO: 1375820 - RNA, 19 nt, Homo sapiens
  misc_RNA (1)...(19): siRNA sense strand
gaacagaugacagaguaga

SEQ ID NO: 1375821 - RNA, 19 nt, Homo sapiens
  misc_RNA (1)...(19): siRNA sense strand
ugacagaguagaacgugua

SEQ ID NO: 1375822 - RNA, 19 nt, Homo sapiens
  misc_RNA (1)...(19): siRNA sense strand
ucacccagguaauggauga

SEQ ID NO: 1375823 - RNA, 19 nt, Homo sapiens
  misc_RNA (1)...(19): siRNA sense strand
ccaccugaaugaccuugaa

SEQ ID NO: 1375824 - RNA, 19 nt, Homo sapiens
  misc_RNA (1)...(19): siRNA sense strand
cuacagccauccugcacuu

SEQ ID NO: 1375825 - RNA, 19 nt, Homo sapiens
  misc_RNA (1)...(19): siRNA sense strand
aaaugaugcuuaugaguac

SEQ ID NO: 1375826 - RNA, 19 nt, Homo sapiens
  misc_RNA (1)...(19): siRNA sense strand
aauggaugaugaaguauuc

SEQ ID NO: 1375827 - RNA, 19 nt, Homo sapiens
  misc_RNA (1)...(19): siRNA sense strand
ccagaagacuguguagcau

SEQ ID NO: 1375828 - RNA, 19 nt, Homo sapiens
  misc_RNA (1)...(19): siRNA sense strand
acgcagagcccaccugaau

SEQ ID NO: 1375829 - RNA, 19 nt, Homo sapiens
  misc_RNA (1)...(19): siRNA sense strand
acagguugcugaaaaguaa

SEQ ID NO: 1375830 - RNA, 19 nt, Homo sapiens
  misc_RNA (1)...(19): siRNA sense strand
gcacuucagacuauuuguc

SEQ ID NO: 1375831 - RNA, 19 nt, Homo sapiens
  misc_RNA (1)...(19): siRNA sense strand
gcuuacagguugcugaaaa

SEQ ID NO: 1375832 - RNA, 19 nt, Homo sapiens
  misc_RNA (1)...(19): siRNA sense strand
cagaagacuguguagcauu

SEQ ID NO: 1375833 - RNA, 19 nt, Homo sapiens
  misc_RNA (1)...(19): siRNA sense strand
accacaccauugcauauuu

SEQ ID NO: 1375834 - RNA, 19 nt, Homo sapiens
  misc_RNA (1)...(19): siRNA sense strand
uuuguuggauauggaguua

SEQ ID NO: 1375835 - RNA, 19 nt, Homo sapiens
  misc_RNA (1)...(19): siRNA sense strand
cauccuaugcaacaauuau

SEQ ID NO: 1375836 - RNA, 19 nt, Homo sapiens
  misc_RNA (1)...(19): siRNA sense strand
gaagacuguguagcauuug

SEQ ID NO: 1375837 - RNA, 19 nt, Homo sapiens
  misc_RNA (1)...(19): siRNA sense strand
ccagguaauggaugaugaa

SEQ ID NO: 1375838 - RNA, 19 nt, Homo sapiens
  misc_RNA (1)...(19): siRNA sense strand
caauccagaagacugugua

SEQ ID NO: 1375839 - RNA, 19 nt, Homo sapiens
  misc_RNA (1)...(19): siRNA sense strand
cccagguaauggaugauga

SEQ ID NO: 1375840 - RNA, 19 nt, Homo sapiens
  misc_RNA (1)...(19): siRNA sense strand
agauugacaagaaagguuu

SEQ ID NO: 1375841 - RNA, 19 nt, Homo sapiens
  misc_RNA (1)...(19): siRNA sense strand
cuaccacaccauugcauau

SEQ ID NO: 1375842 - RNA, 19 nt, Homo sapiens
  misc_RNA (1)...(19): siRNA sense strand
gaaaaugccaagaaguauc

SEQ ID NO: 1375843 - RNA, 19 nt, Homo sapiens
  misc_RNA (1)...(19): siRNA sense strand
gcugaaaaguaaauuguac

SEQ ID NO: 1375844 - RNA, 19 nt, Homo sapiens
  misc_RNA (1)...(19): siRNA sense strand
caccauugcauauuugaca

SEQ ID NO: 1375845 - RNA, 19 nt, Homo sapiens
  misc_RNA (1)...(19): siRNA sense strand
uagauugacaagaaagguu

SEQ ID NO: 1375846 - RNA, 19 nt, Homo sapiens
  misc_RNA (1)...(19): siRNA sense strand
auccugcacuucagacuau

SEQ ID NO: 1375847 - RNA, 19 nt, Homo sapiens
  misc_RNA (1)...(19): siRNA sense strand
cauccugcacuucagacua

SEQ ID NO: 1375848 - RNA, 19 nt, Homo sapiens
  misc_RNA (1)...(19): siRNA sense strand
ggccuccuguauuccuuga

SEQ ID NO: 1375849 - RNA, 19 nt, Homo sapiens
  misc_RNA (1)...(19): siRNA sense strand
uggaauuggccuccuguau

SEQ ID NO: 1375850 - RNA, 19 nt, Homo sapiens
  misc_RNA (1)...(19): siRNA sense strand
gguaauggaugaugaagua

SEQ ID NO: 1375851 - RNA, 19 nt, Homo sapiens
  misc_RNA (1)...(19): siRNA sense strand
ggaauuggccuccuguauu

SEQ ID NO: 1375852 - RNA, 19 nt, Homo sapiens
  misc_RNA (1)...(19): siRNA sense strand
caacugcauucuauagauu

SEQ ID NO: 1375853 - RNA, 19 nt, Homo sapiens
  misc_RNA (1)...(19): siRNA sense strand
gcaacugcauucuauagau

SEQ ID NO: 1375854 - RNA, 19 nt, Homo sapiens
  misc_RNA (1)...(19): siRNA sense strand
agaagacuguguagcauuu

SEQ ID NO: 1375855 - RNA, 19 nt, Homo sapiens
  misc_RNA (1)...(19): siRNA sense strand
gcagagcccaccugaauga

SEQ ID NO: 1375856 - RNA, 19 nt, Homo sapiens
  misc_RNA (1)...(19): siRNA sense strand
ucgaacagaugacagagua

SEQ ID NO: 1375857 - RNA, 19 nt, Homo sapiens
  misc_RNA (1)...(19): siRNA sense strand
ccacaccauugcauauuug

SEQ ID NO: 1375858 - RNA, 19 nt, Homo sapiens
  misc_RNA (1)...(19): siRNA sense strand
gaacagaugacagaguaga

SEQ ID NO: 1375859 - RNA, 19 nt, Homo sapiens
  misc_RNA (1)...(19): siRNA sense strand
ugacagaguagaacgugua

SEQ ID NO: 1375860 - RNA, 19 nt, Homo sapiens
  misc_RNA (1)...(19): siRNA sense strand
ucacccagguaauggauga

SEQ ID NO: 1375861 - RNA, 19 nt, Homo sapiens
  misc_RNA (1)...(19): siRNA sense strand
ccaccugaaugaccuugaa

SEQ ID NO: 1375862 - RNA, 19 nt, Homo sapiens
  misc_RNA (1)...(19): siRNA sense strand
cuacagccauccugcacuu

SEQ ID NO: 1375863 - RNA, 19 nt, Homo sapiens
  misc_RNA (1)...(19): siRNA sense strand
aaaugaugcuuaugaguac

SEQ ID NO: 1375864 - RNA, 19 nt, Homo sapiens
  misc_RNA (1)...(19): siRNA sense strand
aauggaugaugaaguauuc

SEQ ID NO: 1375865 - RNA, 19 nt, Homo sapiens
  misc_RNA (1)...(19): siRNA sense strand
ccagaagacuguguagcau

SEQ ID NO: 1375866 - RNA, 19 nt, Homo sapiens
  misc_RNA (1)...(19): siRNA sense strand
acgcagagcccaccugaau

SEQ ID NO: 1375867 - RNA, 19 nt, Homo sapiens
  misc_RNA (1)...(19): siRNA sense strand
acagguugcugaaaaguaa

SEQ ID NO: 1375868 - RNA, 19 nt, Homo sapiens
  misc_RNA (1)...(19): siRNA sense strand
gcacuucagacuauuuguc

SEQ ID NO: 1375869 - RNA, 19 nt, Homo sapiens
  misc_RNA (1)...(19): siRNA sense strand
gcuuacagguugcugaaaa

SEQ ID NO: 1375870 - RNA, 19 nt, Homo sapiens
  misc_RNA (1)...(19): siRNA sense strand
cagaagacuguguagcauu

SEQ ID NO: 1375871 - RNA, 19 nt, Homo sapiens
  misc_RNA (1)...(19): siRNA sense strand
accacaccauugcauauuu

SEQ ID NO: 1375872 - RNA, 19 nt, Homo sapiens
  misc_RNA (1)...(19): siRNA sense strand
uuuguuggauauggaguua

SEQ ID NO: 1375873 - RNA, 19 nt, Homo sapiens
  misc_RNA (1)...(19): siRNA sense strand
cauccuaugcaacaauuau

SEQ ID NO: 1375874 - RNA, 19 nt, Homo sapiens
  misc_RNA (1)...(19): siRNA sense strand
gaagacuguguagcauuug

SEQ ID NO: 1375875 - RNA, 19 nt, Homo sapiens
  misc_RNA (1)...(19): siRNA sense strand
ccagguaauggaugaugaa

SEQ ID NO: 1375876 - RNA, 19 nt, Homo sapiens
  misc_RNA (1)...(19): siRNA sense strand
caauccagaagacugugua

SEQ ID NO: 1375877 - RNA, 19 nt, Homo sapiens
  misc_RNA (1)...(19): siRNA sense strand
cccagguaauggaugauga

SEQ ID NO: 1375878 - RNA, 19 nt, Homo sapiens
  misc_RNA (1)...(19): siRNA sense strand
agauugacaagaaagguuu

SEQ ID NO: 1375879 - RNA, 19 nt, Homo sapiens
  misc_RNA (1)...(19): siRNA sense strand
cuaccacaccauugcauau

SEQ ID NO: 1375880 - RNA, 19 nt, Homo sapiens
  misc_RNA (1)...(19): siRNA sense strand
caccauugcauauuugaca

SEQ ID NO: 1375881 - RNA, 19 nt, Homo sapiens
  misc_RNA (1)...(19): siRNA sense strand
gcugaaaaguaaauuguac

SEQ ID NO: 1375882 - RNA, 19 nt, Homo sapiens
  misc_RNA (1)...(19): siRNA sense strand
uagauugacaagaaagguu

SEQ ID NO: 1375883 - RNA, 19 nt, Homo sapiens
  misc_RNA (1)...(19): siRNA sense strand
auccugcacuucagacuau

SEQ ID NO: 1375884 - RNA, 19 nt, Homo sapiens
  misc_RNA (1)...(19): siRNA sense strand
cauccugcacuucagacua

SEQ ID NO: 1375885 - RNA, 19 nt, Homo sapiens
  misc_RNA (1)...(19): siRNA sense strand
ggccuccuguauuccuuga

SEQ ID NO: 1375886 - RNA, 19 nt, Homo sapiens
  misc_RNA (1)...(19): siRNA sense strand
uggaauuggccuccuguau

SEQ ID NO: 1375887 - RNA, 19 nt, Homo sapiens
  misc_RNA (1)...(19): siRNA sense strand
gguaauggaugaugaagua

SEQ ID NO: 1375888 - RNA, 19 nt, Homo sapiens
  misc_RNA (1)...(19): siRNA sense strand
ggaauuggccuccuguauu

SEQ ID NO: 1375889 - RNA, 19 nt, Homo sapiens
  misc_RNA (1)...(19): siRNA sense strand
caacugcauucuauagauu

SEQ ID NO: 1375890 - RNA, 19 nt, Homo sapiens
  misc_RNA (1)...(19): siRNA sense strand
gcaacugcauucuauagau

SEQ ID NO: 1375891 - RNA, 19 nt, Homo sapiens
  misc_RNA (1)...(19): siRNA sense strand
agaagacuguguagcauuu

SEQ ID NO: 1375892 - RNA, 19 nt, Homo sapiens
  misc_RNA (1)...(19): siRNA sense strand
gcagagcccaccugaauga

SEQ ID NO: 1375893 - RNA, 19 nt, Homo sapiens
  misc_RNA (1)...(19): siRNA sense strand
ucgaacagaugacagagua

SEQ ID NO: 1375894 - RNA, 19 nt, Homo sapiens
  misc_RNA (1)...(19): siRNA sense strand
ccacaccauugcauauuug

SEQ ID NO: 1375895 - RNA, 19 nt, Homo sapiens
  misc_RNA (1)...(19): siRNA sense strand
gaacagaugacagaguaga

SEQ ID NO: 1375896 - RNA, 19 nt, Homo sapiens
  misc_RNA (1)...(19): siRNA sense strand
ugacagaguagaacgugua

SEQ ID NO: 1375897 - RNA, 19 nt, Homo sapiens
  misc_RNA (1)...(19): siRNA sense strand
ucacccagguaauggauga

SEQ ID NO: 1375898 - RNA, 19 nt, Homo sapiens
  misc_RNA (1)...(19): siRNA sense strand
ccaccugaaugaccuugaa

SEQ ID NO: 1375899 - RNA, 19 nt, Homo sapiens
  misc_RNA (1)...(19): siRNA sense strand
cuacagccauccugcacuu

SEQ ID NO: 1375900 - RNA, 19 nt, Homo sapiens
  misc_RNA (1)...(19): siRNA sense strand
aaaugaugcuuaugaguac

SEQ ID NO: 1375901 - RNA, 19 nt, Homo sapiens
  misc_RNA (1)...(19): siRNA sense strand
aauggaugaugaaguauuc

SEQ ID NO: 1375902 - RNA, 19 nt, Homo sapiens
  misc_RNA (1)...(19): siRNA sense strand
ccagaagacuguguagcau

SEQ ID NO: 1375903 - RNA, 19 nt, Homo sapiens
  misc_RNA (1)...(19): siRNA sense strand
acgcagagcccaccugaau

SEQ ID NO: 1375904 - RNA, 19 nt, Homo sapiens
  misc_RNA (1)...(19): siRNA sense strand
acagguugcugaaaaguaa

SEQ ID NO: 1375905 - RNA, 19 nt, Homo sapiens
  misc_RNA (1)...(19): siRNA sense strand
gcacuucagacuauuuguc

SEQ ID NO: 1375906 - RNA, 19 nt, Homo sapiens
  misc_RNA (1)...(19): siRNA sense strand
gcuuacagguugcugaaaa

SEQ ID NO: 1375907 - RNA, 19 nt, Homo sapiens
  misc_RNA (1)...(19): siRNA sense strand
cagaagacuguguagcauu

SEQ ID NO: 1375908 - RNA, 19 nt, Homo sapiens
  misc_RNA (1)...(19): siRNA sense strand
accacaccauugcauauuu

SEQ ID NO: 1375909 - RNA, 19 nt, Homo sapiens
  misc_RNA (1)...(19): siRNA sense strand
uuuguuggauauggaguua

SEQ ID NO: 1375910 - RNA, 19 nt, Homo sapiens
  misc_RNA (1)...(19): siRNA sense strand
cauccuaugcaacaauuau

SEQ ID NO: 1375911 - RNA, 19 nt, Homo sapiens
  misc_RNA (1)...(19): siRNA sense strand
gaagacuguguagcauuug

SEQ ID NO: 1375912 - RNA, 19 nt, Homo sapiens
  misc_RNA (1)...(19): siRNA sense strand
ccagguaauggaugaugaa

SEQ ID NO: 1375913 - RNA, 19 nt, Homo sapiens
  misc_RNA (1)...(19): siRNA sense strand
caauccagaagacugugua

SEQ ID NO: 1375914 - RNA, 19 nt, Homo sapiens
  misc_RNA (1)...(19): siRNA sense strand
cccagguaauggaugauga

SEQ ID NO: 1375915 - RNA, 19 nt, Homo sapiens
  misc_RNA (1)...(19): siRNA sense strand
agauugacaagaaagguuu

SEQ ID NO: 1375916 - RNA, 19 nt, Homo sapiens
  misc_RNA (1)...(19): siRNA sense strand
cuaccacaccauugcauau

SEQ ID NO: 1375917 - RNA, 19 nt, Homo sapiens
  misc_RNA (1)...(19): siRNA sense strand
caccauugcauauuugaca

SEQ ID NO: 1375918 - RNA, 19 nt, Homo sapiens
  misc_RNA (1)...(19): siRNA sense strand
gcugaaaaguaaauuguac

SEQ ID NO: 1375919 - RNA, 19 nt, Homo sapiens
  misc_RNA (1)...(19): siRNA sense strand
uagauugacaagaaagguu

SEQ ID NO: 1375920 - RNA, 19 nt, Homo sapiens
  misc_RNA (1)...(19): siRNA sense strand
auccugcacuucagacuau

SEQ ID NO: 1375921 - RNA, 19 nt, Homo sapiens
  misc_RNA (1)...(19): siRNA sense strand
cauccugcacuucagacua

SEQ ID NO: 1375922 - RNA, 19 nt, Homo sapiens
  misc_RNA (1)...(19): siRNA sense strand
ggccuccuguauuccuuga

SEQ ID NO: 1375923 - RNA, 19 nt, Homo sapiens
  misc_RNA (1)...(19): siRNA sense strand
uggaauuggccuccuguau

SEQ ID NO: 1375924 - RNA, 19 nt, Homo sapiens
  misc_RNA (1)...(19): siRNA sense strand
gguaauggaugaugaagua

SEQ ID NO: 1375925 - RNA, 19 nt, Homo sapiens
  misc_RNA (1)...(19): siRNA sense strand
ggaauuggccuccuguauu

SEQ ID NO: 1375926 - RNA, 19 nt, Homo sapiens
  misc_RNA (1)...(19): siRNA sense strand
caacugcauucuauagauu

SEQ ID NO: 1375927 - RNA, 19 nt, Homo sapiens
  misc_RNA (1)...(19): siRNA sense strand
gcaacugcauucuauagau

SEQ ID NO: 1375928 - RNA, 19 nt, Homo sapiens
  misc_RNA (1)...(19): siRNA sense strand
agaagacuguguagcauuu

SEQ ID NO: 1375929 - RNA, 19 nt, Homo sapiens
  misc_RNA (1)...(19): siRNA sense strand
gcagagcccaccugaauga

SEQ ID NO: 1375930 - RNA, 19 nt, Homo sapiens
  misc_RNA (1)...(19): siRNA sense strand
ucgaacagaugacagagua

SEQ ID NO: 1375931 - RNA, 19 nt, Homo sapiens
  misc_RNA (1)...(19): siRNA sense strand
ccacaccauugcauauuug

SEQ ID NO: 1375932 - RNA, 19 nt, Homo sapiens
  misc_RNA (1)...(19): siRNA sense strand
gaacagaugacagaguaga

SEQ ID NO: 1375933 - RNA, 19 nt, Homo sapiens
  misc_RNA (1)...(19): siRNA sense strand
ugacagaguagaacgugua

SEQ ID NO: 1375934 - RNA, 19 nt, Homo sapiens
  misc_RNA (1)...(19): siRNA sense strand
ucacccagguaauggauga

SEQ ID NO: 1375935 - RNA, 19 nt, Homo sapiens
  misc_RNA (1)...(19): siRNA sense strand
ccaccugaaugaccuugaa

SEQ ID NO: 1375936 - RNA, 19 nt, Homo sapiens
  misc_RNA (1)...(19): siRNA sense strand
cuacagccauccugcacuu

SEQ ID NO: 1375937 - RNA, 19 nt, Homo sapiens
  misc_RNA (1)...(19): siRNA sense strand
aaaugaugcuuaugaguac

SEQ ID NO: 1375938 - RNA, 19 nt, Homo sapiens
  misc_RNA (1)...(19): siRNA sense strand
aauggaugaugaaguauuc

SEQ ID NO: 1375939 - RNA, 19 nt, Homo sapiens
  misc_RNA (1)...(19): siRNA sense strand
ccagaagacuguguagcau

SEQ ID NO: 1375940 - RNA, 19 nt, Homo sapiens
  misc_RNA (1)...(19): siRNA sense strand
acgcagagcccaccugaau

SEQ ID NO: 1375941 - RNA, 19 nt, Homo sapiens
  misc_RNA (1)...(19): siRNA sense strand
acagguugcugaaaaguaa

SEQ ID NO: 1375942 - RNA, 19 nt, Homo sapiens
  misc_RNA (1)...(19): siRNA sense strand
gcacuucagacuauuuguc

SEQ ID NO: 1375943 - RNA, 19 nt, Homo sapiens
  misc_RNA (1)...(19): siRNA sense strand
gcuuacagguugcugaaaa

SEQ ID NO: 1375944 - RNA, 19 nt, Homo sapiens
  misc_RNA (1)...(19): siRNA sense strand
cagaagacuguguagcauu

SEQ ID NO: 1375945 - RNA, 19 nt, Homo sapiens
  misc_RNA (1)...(19): siRNA sense strand
accacaccauugcauauuu

SEQ ID NO: 1375946 - RNA, 19 nt, Homo sapiens
  misc_RNA (1)...(19): siRNA sense strand
uuuguuggauauggaguua

SEQ ID NO: 1375947 - RNA, 19 nt, Homo sapiens
  misc_RNA (1)...(19): siRNA sense strand
cauccuaugcaacaauuau

SEQ ID NO: 1375948 - RNA, 19 nt, Homo sapiens
  misc_RNA (1)...(19): siRNA sense strand
gaagacuguguagcauuug

SEQ ID NO: 1375949 - RNA, 19 nt, Homo sapiens
  misc_RNA (1)...(19): siRNA sense strand
ccagguaauggaugaugaa

SEQ ID NO: 1375950 - RNA, 19 nt, Homo sapiens
  misc_RNA (1)...(19): siRNA sense strand
caauccagaagacugugua

SEQ ID NO: 1375951 - RNA, 19 nt, Homo sapiens
  misc_RNA (1)...(19): siRNA sense strand
cccagguaauggaugauga

SEQ ID NO: 1375952 - RNA, 19 nt, Homo sapiens
  misc_RNA (1)...(19): siRNA sense strand
agauugacaagaaagguuu

SEQ ID NO: 1375953 - RNA, 19 nt, Homo sapiens
  misc_RNA (1)...(19): siRNA sense strand
cuaccacaccauugcauau

SEQ ID NO: 1375954 - RNA, 19 nt, Homo sapiens
  misc_RNA (1)...(19): siRNA sense strand
caccauugcauauuugaca

SEQ ID NO: 1375955 - RNA, 19 nt, Homo sapiens
  misc_RNA (1)...(19): siRNA sense strand
gcugaaaaguaaauuguac

SEQ ID NO: 1375956 - RNA, 19 nt, Homo sapiens
  misc_RNA (1)...(19): siRNA sense strand
uagauugacaagaaagguu

SEQ ID NO: 1375957 - RNA, 19 nt, Homo sapiens
  misc_RNA (1)...(19): siRNA sense strand
auccugcacuucagacuau

SEQ ID NO: 1375958 - RNA, 19 nt, Homo sapiens
  misc_RNA (1)...(19): siRNA sense strand
cauccugcacuucagacua

SEQ ID NO: 1375959 - RNA, 19 nt, Homo sapiens
  misc_RNA (1)...(19): siRNA sense strand
ggccuccuguauuccuuga

SEQ ID NO: 1375960 - RNA, 19 nt, Homo sapiens
  misc_RNA (1)...(19): siRNA sense strand
uggaauuggccuccuguau

SEQ ID NO: 1375961 - RNA, 19 nt, Homo sapiens
  misc_RNA (1)...(19): siRNA sense strand
gaacugagguugugaugaa

SEQ ID NO: 1375962 - RNA, 19 nt, Homo sapiens
  misc_RNA (1)...(19): siRNA sense strand
ggugauugcugaagaauua

SEQ ID NO: 1375963 - RNA, 19 nt, Homo sapiens
  misc_RNA (1)...(19): siRNA sense strand
gcaaaggaauuaaaccaaa

SEQ ID NO: 1375964 - RNA, 19 nt, Homo sapiens
  misc_RNA (1)...(19): siRNA sense strand
gaaauuggaugacaaggau

SEQ ID NO: 1375965 - RNA, 19 nt, Homo sapiens
  misc_RNA (1)...(19): siRNA sense strand
uaucagagcugucuuccua

SEQ ID NO: 1375966 - RNA, 19 nt, Homo sapiens
  misc_RNA (1)...(19): siRNA sense strand
gcaaucaacuuuaaugaag

SEQ ID NO: 1375967 - RNA, 19 nt, Homo sapiens
  misc_RNA (1)...(19): siRNA sense strand
agagaaagcuguccaaauc

SEQ ID NO: 1375968 - RNA, 19 nt, Homo sapiens
  misc_RNA (1)...(19): siRNA sense strand
gaagaagaauuacaagaac

SEQ ID NO: 1375969 - RNA, 19 nt, Homo sapiens
  misc_RNA (1)...(19): siRNA sense strand
gacaaggauuucuucagua

SEQ ID NO: 1375970 - RNA, 19 nt, Homo sapiens
  misc_RNA (1)...(19): siRNA sense strand
acaaggauuucuucaguaa

SEQ ID NO: 1375971 - RNA, 19 nt, Homo sapiens
  misc_RNA (1)...(19): siRNA sense strand
caucagaaauguaugaauc

SEQ ID NO: 1375972 - RNA, 19 nt, Homo sapiens
  misc_RNA (1)...(19): siRNA sense strand
ggaaaucauucaaaguauc

SEQ ID NO: 1375973 - RNA, 19 nt, Homo sapiens
  misc_RNA (1)...(19): siRNA sense strand
ggacggugaugaugggauu

SEQ ID NO: 1375974 - RNA, 19 nt, Homo sapiens
  misc_RNA (1)...(19): siRNA sense strand
gaacucaggcacugugauu

SEQ ID NO: 1375975 - RNA, 19 nt, Homo sapiens
  misc_RNA (1)...(19): siRNA sense strand
ugacaaggauuucuucagu

SEQ ID NO: 1375976 - RNA, 19 nt, Homo sapiens
  misc_RNA (1)...(19): siRNA sense strand
gaagaugagcaacauuuau

SEQ ID NO: 1375977 - RNA, 19 nt, Homo sapiens
  misc_RNA (1)...(19): siRNA sense strand
guaugaaucuuccagaaca

SEQ ID NO: 1375978 - RNA, 19 nt, Homo sapiens
  misc_RNA (1)...(19): siRNA sense strand
caaaccaaguuguggacua

SEQ ID NO: 1375979 - RNA, 19 nt, Homo sapiens
  misc_RNA (1)...(19): siRNA sense strand
ugacaggacugaggugauu

SEQ ID NO: 1375980 - RNA, 19 nt, Homo sapiens
  misc_RNA (1)...(19): siRNA sense strand
ccaaggaggcaucgcaaua

SEQ ID NO: 1375981 - RNA, 19 nt, Homo sapiens
  misc_RNA (1)...(19): siRNA sense strand
gaacacagcagggaaaucu

SEQ ID NO: 1375982 - RNA, 19 nt, Homo sapiens
  misc_RNA (1)...(19): siRNA sense strand
gcacggaaauuggaugaca

SEQ ID NO: 1375983 - RNA, 19 nt, Homo sapiens
  misc_RNA (1)...(19): siRNA sense strand
gaagaauuaucuggcaaug

SEQ ID NO: 1375984 - RNA, 19 nt, Homo sapiens
  misc_RNA (1)...(19): siRNA sense strand
gcaaugacgacuauguuga

SEQ ID NO: 1375985 - RNA, 19 nt, Homo sapiens
  misc_RNA (1)...(19): siRNA sense strand
uacaguagcuauagauuuc

SEQ ID NO: 1375986 - RNA, 19 nt, Homo sapiens
  misc_RNA (1)...(19): siRNA sense strand
caaauccaguuuacaguag

SEQ ID NO: 1375987 - RNA, 19 nt, Homo sapiens
  misc_RNA (1)...(19): siRNA sense strand
ccaagaagaagaauuacaa

SEQ ID NO: 1375988 - RNA, 19 nt, Homo sapiens
  misc_RNA (1)...(19): siRNA sense strand
gcaccgaacugagguugug

SEQ ID NO: 1375989 - RNA, 19 nt, Homo sapiens
  misc_RNA (1)...(19): siRNA sense strand
cggcuaaagugcauaguau

SEQ ID NO: 1375990 - RNA, 19 nt, Homo sapiens
  misc_RNA (1)...(19): siRNA sense strand
caggauaccuccagaguac

SEQ ID NO: 1375991 - RNA, 19 nt, Homo sapiens
  misc_RNA (1)...(19): siRNA sense strand
ccaaauccaguuuacagua

SEQ ID NO: 1375992 - RNA, 19 nt, Homo sapiens
  misc_RNA (1)...(19): siRNA sense strand
gaugagaggagcaauggaa

SEQ ID NO: 1375993 - RNA, 19 nt, Homo sapiens
  misc_RNA (1)...(19): siRNA sense strand
aagccaagaagaagaauua

SEQ ID NO: 1375994 - RNA, 19 nt, Homo sapiens
  misc_RNA (1)...(19): siRNA sense strand
ggaaauuggaugacaagga

SEQ ID NO: 1375995 - RNA, 19 nt, Homo sapiens
  misc_RNA (1)...(19): siRNA sense strand
caacacacugggaaucuuu

SEQ ID NO: 1375996 - RNA, 19 nt, Homo sapiens
  misc_RNA (1)...(19): siRNA sense strand
ccagaagguugccaaguca

SEQ ID NO: 1375997 - RNA, 19 nt, Homo sapiens
  misc_RNA (1)...(19): siRNA sense strand
cacggucucucaugacuuu

SEQ ID NO: 1375998 - RNA, 19 nt, Homo sapiens
  misc_RNA (1)...(19): siRNA sense strand
ugacuucauuggagaauuc

SEQ ID NO: 1375999 - RNA, 19 nt, Homo sapiens
  misc_RNA (1)...(19): siRNA sense strand
augaguaucugaaagcuuu

SEQ ID NO: 1376000 - RNA, 19 nt, Homo sapiens
  misc_RNA (1)...(19): siRNA sense strand
uaaacccaguguacucaaa

SEQ ID NO: 1376001 - RNA, 19 nt, Homo sapiens
  misc_RNA (1)...(19): siRNA sense strand
cagaugguguuaucacaga

SEQ ID NO: 1376002 - RNA, 19 nt, Homo sapiens
  misc_RNA (1)...(19): siRNA sense strand
gaagacaacccagaaugug

SEQ ID NO: 1376003 - RNA, 19 nt, Homo sapiens
  misc_RNA (1)...(19): siRNA sense strand
acacuuggccagauuguuu

SEQ ID NO: 1376004 - RNA, 19 nt, Homo sapiens
  misc_RNA (1)...(19): siRNA sense strand
gugauucgcaccugcauaa

SEQ ID NO: 1376005 - RNA, 19 nt, Homo sapiens
  misc_RNA (1)...(19): siRNA sense strand
guacaaagccaagaagaag

SEQ ID NO: 1376006 - RNA, 19 nt, Homo sapiens
  misc_RNA (1)...(19): siRNA sense strand
gcaucaaucccaaguacaa

SEQ ID NO: 1376007 - RNA, 19 nt, Homo sapiens
  misc_RNA (1)...(19): siRNA sense strand
ugacagagaugcccuuucc

SEQ ID NO: 1376008 - RNA, 19 nt, Homo sapiens
  misc_RNA (1)...(19): siRNA sense strand
accaaguuguggacuauua

SEQ ID NO: 1376009 - RNA, 19 nt, Homo sapiens
  misc_RNA (1)...(19): siRNA sense strand
caagucagcgucagaggaa

SEQ ID NO: 1376010 - RNA, 19 nt, Homo sapiens
  misc_RNA (1)...(19): siRNA sense strand
ucucaugacuuugcaauca

SEQ ID NO: 1376011 - RNA, 19 nt, Homo sapiens
  misc_RNA (1)...(19): siRNA sense strand
gagaauucaccucgacauu

SEQ ID NO: 1376012 - RNA, 19 nt, Homo sapiens
  misc_RNA (1)...(19): siRNA sense strand
agaauuaucuggcaaugac

SEQ ID NO: 1376013 - RNA, 19 nt, Homo sapiens
  misc_RNA (1)...(19): siRNA sense strand
aaaccaaguuguggacuau

SEQ ID NO: 1376014 - RNA, 19 nt, Homo sapiens
  misc_RNA (1)...(19): siRNA sense strand
ggagauuugccaagacuau

SEQ ID NO: 1376015 - RNA, 19 nt, Homo sapiens
  misc_RNA (1)...(19): siRNA sense strand
cuggaaaucauucaaagua

SEQ ID NO: 1376016 - RNA, 19 nt, Homo sapiens
  misc_RNA (1)...(19): siRNA sense strand
ccagauuguuucccagaga

SEQ ID NO: 1376017 - RNA, 19 nt, Homo sapiens
  misc_RNA (1)...(19): siRNA sense strand
agaagaugagcaacauuua

SEQ ID NO: 1376018 - RNA, 19 nt, Homo sapiens
  misc_RNA (1)...(19): siRNA sense strand
gggagagccuguucuucga

SEQ ID NO: 1376019 - RNA, 19 nt, Homo sapiens
  misc_RNA (1)...(19): siRNA sense strand
gaagaagaugagcaacauu

SEQ ID NO: 1376020 - RNA, 19 nt, Homo sapiens
  misc_RNA (1)...(19): siRNA sense strand
ugacgacuauguugagcuu

SEQ ID NO: 1376021 - RNA, 19 nt, Homo sapiens
  misc_RNA (1)...(19): siRNA sense strand
aagaagaugagcaacauuu

SEQ ID NO: 1376022 - RNA, 19 nt, Homo sapiens
  misc_RNA (1)...(19): siRNA sense strand
gugcacacuuggccagauu

SEQ ID NO: 1376023 - RNA, 19 nt, Homo sapiens
  misc_RNA (1)...(19): siRNA sense strand
uacaauggcaaaggaauua

SEQ ID NO: 1376024 - RNA, 19 nt, Homo sapiens
  misc_RNA (1)...(19): siRNA sense strand
ggaggcaucgcaauacuuc

SEQ ID NO: 1376025 - RNA, 19 nt, Homo sapiens
  misc_RNA (1)...(19): siRNA sense strand
cccagaaugugcaggaauu

SEQ ID NO: 1376026 - RNA, 19 nt, Homo sapiens
  misc_RNA (1)...(19): siRNA sense strand
caacuuuaaugaagacaac

SEQ ID NO: 1376027 - RNA, 19 nt, Homo sapiens
  misc_RNA (1)...(19): siRNA sense strand
gugcaagauucacaagaug

SEQ ID NO: 1376028 - RNA, 19 nt, Homo sapiens
  misc_RNA (1)...(19): siRNA sense strand
gagaugcccuuuccaaacc

SEQ ID NO: 1376029 - RNA, 19 nt, Homo sapiens
  misc_RNA (1)...(19): siRNA sense strand
gacagaugguguuaucaca

SEQ ID NO: 1376030 - RNA, 19 nt, Homo sapiens
  misc_RNA (1)...(19): siRNA sense strand
gaacuucaaacacgcaucu

SEQ ID NO: 1376031 - RNA, 19 nt, Homo sapiens
  misc_RNA (1)...(19): siRNA sense strand
cagauuguuucccagagaa

SEQ ID NO: 1376032 - RNA, 19 nt, Homo sapiens
  misc_RNA (1)...(19): siRNA sense strand
ggcagugguuugagguuga

SEQ ID NO: 1376033 - RNA, 19 nt, Homo sapiens
  misc_RNA (1)...(19): siRNA sense strand
ugacuuugcaaucaacuuu

SEQ ID NO: 1376034 - RNA, 19 nt, Homo sapiens
  misc_RNA (1)...(19): siRNA sense strand
ggacuccaauggcaagcau

SEQ ID NO: 1376035 - RNA, 19 nt, Homo sapiens
  misc_RNA (1)...(19): siRNA sense strand
cugagguugugaugaauaa

SEQ ID NO: 1376036 - RNA, 19 nt, Homo sapiens
  misc_RNA (1)...(19): siRNA sense strand
ggagaugagaggagcaaug

SEQ ID NO: 1376037 - RNA, 19 nt, Homo sapiens
  misc_RNA (1)...(19): siRNA sense strand
gugcaucaaucccaaguac

SEQ ID NO: 1376038 - RNA, 19 nt, Homo sapiens
  misc_RNA (1)...(19): siRNA sense strand
gcauaaacccaguguacuc

SEQ ID NO: 1376039 - RNA, 19 nt, Homo sapiens
  misc_RNA (1)...(19): siRNA sense strand
ccugacagaugguguuauc

SEQ ID NO: 1376040 - RNA, 19 nt, Homo sapiens
  misc_RNA (1)...(19): siRNA sense strand
ugcacuacauccacccuua

SEQ ID NO: 1376041 - RNA, 19 nt, Homo sapiens
  misc_RNA (1)...(19): siRNA sense strand
gcagugggagugcaucaau

SEQ ID NO: 1376042 - RNA, 19 nt, Homo sapiens
  misc_RNA (1)...(19): siRNA sense strand
ccaaaauguucaucagaaa

SEQ ID NO: 1376043 - RNA, 19 nt, Homo sapiens
  misc_RNA (1)...(19): siRNA sense strand
ccaaguacaaagccaagaa

SEQ ID NO: 1376044 - RNA, 19 nt, Homo sapiens
  misc_RNA (1)...(19): siRNA sense strand
caagggagagccuguucuu

SEQ ID NO: 1376045 - RNA, 19 nt, Homo sapiens
  misc_RNA (1)...(19): siRNA sense strand
ugaguccgcugccaacaca

SEQ ID NO: 1376046 - RNA, 19 nt, Homo sapiens
  misc_RNA (1)...(19): siRNA sense strand
ggacuauuacaauggcaaa

SEQ ID NO: 1376047 - RNA, 19 nt, Homo sapiens
  misc_RNA (1)...(19): siRNA sense strand
cagagaaagcuguccaaau

SEQ ID NO: 1376048 - RNA, 19 nt, Homo sapiens
  misc_RNA (1)...(19): siRNA sense strand
ugaagacaacccagaaugu

SEQ ID NO: 1376049 - RNA, 19 nt, Homo sapiens
  misc_RNA (1)...(19): siRNA sense strand
uaaugaagacaacccagaa

SEQ ID NO: 1376050 - RNA, 19 nt, Homo sapiens
  misc_RNA (1)...(19): siRNA sense strand
ccaggauaccuccagagua

SEQ ID NO: 1376051 - RNA, 19 nt, Homo sapiens
  misc_RNA (1)...(19): siRNA sense strand
acaaagccaagaagaagaa

SEQ ID NO: 1376052 - RNA, 19 nt, Homo sapiens
  misc_RNA (1)...(19): siRNA sense strand
cagagaugcccuuuccaaa

SEQ ID NO: 1376053 - RNA, 19 nt, Homo sapiens
  misc_RNA (1)...(19): siRNA sense strand
ugaaugaugaugcaacuca

SEQ ID NO: 1376054 - RNA, 19 nt, Homo sapiens
  misc_RNA (1)...(19): siRNA sense strand
ccaguuuacaguagcuaua

SEQ ID NO: 1376055 - RNA, 19 nt, Homo sapiens
  misc_RNA (1)...(19): siRNA sense strand
ccaacacacugggaaucuu

SEQ ID NO: 1376056 - RNA, 19 nt, Homo sapiens
  misc_RNA (1)...(19): siRNA sense strand
gaaagcuguccaaauccuu

SEQ ID NO: 1376057 - RNA, 19 nt, Homo sapiens
  misc_RNA (1)...(19): siRNA sense strand
cuauuacaauggcaaagga

SEQ ID NO: 1376058 - RNA, 19 nt, Homo sapiens
  misc_RNA (1)...(19): siRNA sense strand
cagaggaaacuaacaccaa

SEQ ID NO: 1376059 - RNA, 19 nt, Homo sapiens
  misc_RNA (1)...(19): siRNA sense strand
gagaugagaggagcaaugg

SEQ ID NO: 1376060 - RNA, 19 nt, Homo sapiens
  misc_RNA (1)...(19): siRNA sense strand
caauggcaaaggaauuaaa

SEQ ID NO: 1376061 - RNA, 19 nt, Homo sapiens
  misc_RNA (1)...(19): siRNA sense strand
gaaucaagcuuccauaugu

SEQ ID NO: 1376062 - RNA, 19 nt, Homo sapiens
  misc_RNA (1)...(19): siRNA sense strand
gcaaagauguuucucuguu

SEQ ID NO: 1376063 - RNA, 19 nt, Homo sapiens
  misc_RNA (1)...(19): siRNA sense strand
acacaugccuggagacuua

SEQ ID NO: 1376064 - RNA, 19 nt, Homo sapiens
  misc_RNA (1)...(19): siRNA sense strand
caacaaagcccgaggauau

SEQ ID NO: 1376065 - RNA, 19 nt, Homo sapiens
  misc_RNA (1)...(19): siRNA sense strand
ccaaagaaauucaggaaga

SEQ ID NO: 1376066 - RNA, 19 nt, Homo sapiens
  misc_RNA (1)...(19): siRNA sense strand
cuacauagauuucuucaug

SEQ ID NO: 1376067 - RNA, 19 nt, Homo sapiens
  misc_RNA (1)...(19): siRNA sense strand
ggaaauugaugauauugug

SEQ ID NO: 1376068 - RNA, 19 nt, Homo sapiens
  misc_RNA (1)...(19): siRNA sense strand
aaacucagcuauugccaua

SEQ ID NO: 1376069 - RNA, 19 nt, Homo sapiens
  misc_RNA (1)...(19): siRNA sense strand
gaagauaauucugguugaa

SEQ ID NO: 1376070 - RNA, 19 nt, Homo sapiens
  misc_RNA (1)...(19): siRNA sense strand
caaagauguuucucuguuu

SEQ ID NO: 1376071 - RNA, 19 nt, Homo sapiens
  misc_RNA (1)...(19): siRNA sense strand
guacaagaguggauuaauc

SEQ ID NO: 1376072 - RNA, 19 nt, Homo sapiens
  misc_RNA (1)...(19): siRNA sense strand
ggaagaguguucuaucuca

SEQ ID NO: 1376073 - RNA, 19 nt, Homo sapiens
  misc_RNA (1)...(19): siRNA sense strand
gaaagacaacgaccuuaaa

SEQ ID NO: 1376074 - RNA, 19 nt, Homo sapiens
  misc_RNA (1)...(19): siRNA sense strand
ggaaagacaacgaccuuaa

SEQ ID NO: 1376075 - RNA, 19 nt, Homo sapiens
  misc_RNA (1)...(19): siRNA sense strand
caaagaguuucuacuaaga

SEQ ID NO: 1376076 - RNA, 19 nt, Homo sapiens
  misc_RNA (1)...(19): siRNA sense strand
ccucagugguuucuaauaa

SEQ ID NO: 1376077 - RNA, 19 nt, Homo sapiens
  misc_RNA (1)...(19): siRNA sense strand
ccagugaauuucugaguuu

SEQ ID NO: 1376078 - RNA, 19 nt, Homo sapiens
  misc_RNA (1)...(19): siRNA sense strand
cagggaacauggaaugaua

SEQ ID NO: 1376079 - RNA, 19 nt, Homo sapiens
  misc_RNA (1)...(19): siRNA sense strand
uaagagcgacaaaguauaa

SEQ ID NO: 1376080 - RNA, 19 nt, Homo sapiens
  misc_RNA (1)...(19): siRNA sense strand
gagcaucuuuaacagaauu

SEQ ID NO: 1376081 - RNA, 19 nt, Homo sapiens
  misc_RNA (1)...(19): siRNA sense strand
ccuggagacuuauuuaauu

SEQ ID NO: 1376082 - RNA, 19 nt, Homo sapiens
  misc_RNA (1)...(19): siRNA sense strand
cgacaaaguauaacaaguu

SEQ ID NO: 1376083 - RNA, 19 nt, Homo sapiens
  misc_RNA (1)...(19): siRNA sense strand
ggagcaugguauucaagua

SEQ ID NO: 1376084 - RNA, 19 nt, Homo sapiens
  misc_RNA (1)...(19): siRNA sense strand
gaagaguguucuaucucaa

SEQ ID NO: 1376085 - RNA, 19 nt, Homo sapiens
  misc_RNA (1)...(19): siRNA sense strand
ucaaagaguuucuacuaag

SEQ ID NO: 1376086 - RNA, 19 nt, Homo sapiens
  misc_RNA (1)...(19): siRNA sense strand
gagaacugauaagaagaua

SEQ ID NO: 1376087 - RNA, 19 nt, Homo sapiens
  misc_RNA (1)...(19): siRNA sense strand
gcucuuuacucagggaaua

SEQ ID NO: 1376088 - RNA, 19 nt, Homo sapiens
  misc_RNA (1)...(19): siRNA sense strand
cgggauacauuacuuguug

SEQ ID NO: 1376089 - RNA, 19 nt, Homo sapiens
  misc_RNA (1)...(19): siRNA sense strand
ucgauguccucuuauauuu

SEQ ID NO: 1376090 - RNA, 19 nt, Homo sapiens
  misc_RNA (1)...(19): siRNA sense strand
agauuuaccuaaccaguuu

SEQ ID NO: 1376091 - RNA, 19 nt, Homo sapiens
  misc_RNA (1)...(19): siRNA sense strand
ggaaguaugugaggauugg

SEQ ID NO: 1376092 - RNA, 19 nt, Homo sapiens
  misc_RNA (1)...(19): siRNA sense strand
gauaucagaagugcaauaa

SEQ ID NO: 1376093 - RNA, 19 nt, Homo sapiens
  misc_RNA (1)...(19): siRNA sense strand
gcaccaacaauuaugauga

SEQ ID NO: 1376094 - RNA, 19 nt, Homo sapiens
  misc_RNA (1)...(19): siRNA sense strand
aaacaggguggaucuauuu

SEQ ID NO: 1376095 - RNA, 19 nt, Homo sapiens
  misc_RNA (1)...(19): siRNA sense strand
gaugaucugagaacugaua

SEQ ID NO: 1376096 - RNA, 19 nt, Homo sapiens
  misc_RNA (1)...(19): siRNA sense strand
ggguggaucuauuuuauua

SEQ ID NO: 1376097 - RNA, 19 nt, Homo sapiens
  misc_RNA (1)...(19): siRNA sense strand
uaucagaagugcaauaaac

SEQ ID NO: 1376098 - RNA, 19 nt, Homo sapiens
  misc_RNA (1)...(19): siRNA sense strand
ugugagagccagugaauuu

SEQ ID NO: 1376099 - RNA, 19 nt, Homo sapiens
  misc_RNA (1)...(19): siRNA sense strand
caaaggagcaugguauuca

SEQ ID NO: 1376100 - RNA, 19 nt, Homo sapiens
  misc_RNA (1)...(19): siRNA sense strand
ccggaaaccuggucucuuc

SEQ ID NO: 1376101 - RNA, 19 nt, Homo sapiens
  misc_RNA (1)...(19): siRNA sense strand
gaagcgacacuuuggaaga

SEQ ID NO: 1376102 - RNA, 19 nt, Homo sapiens
  misc_RNA (1)...(19): siRNA sense strand
cgagaggugugaugcauuc

SEQ ID NO: 1376103 - RNA, 19 nt, Homo sapiens
  misc_RNA (1)...(19): siRNA sense strand
cagaugcugugcugucaaa

SEQ ID NO: 1376104 - RNA, 19 nt, Homo sapiens
  misc_RNA (1)...(19): siRNA sense strand
caccaacaauuaugaugaa

SEQ ID NO: 1376105 - RNA, 19 nt, Homo sapiens
  misc_RNA (1)...(19): siRNA sense strand
gaacgggauacauuacuug

SEQ ID NO: 1376106 - RNA, 19 nt, Homo sapiens
  misc_RNA (1)...(19): siRNA sense strand
gaucugagaacugauaaga

SEQ ID NO: 1376107 - RNA, 19 nt, Homo sapiens
  misc_RNA (1)...(19): siRNA sense strand
uaacaagaauggaggaaaa

SEQ ID NO: 1376108 - RNA, 19 nt, Homo sapiens
  misc_RNA (1)...(19): siRNA sense strand
caaguacaagaguggauua

SEQ ID NO: 1376109 - RNA, 19 nt, Homo sapiens
  misc_RNA (1)...(19): siRNA sense strand
gaaaccuggucucuuccuu

SEQ ID NO: 1376110 - RNA, 19 nt, Homo sapiens
  misc_RNA (1)...(19): siRNA sense strand
guuauuguuucccaaagaa

SEQ ID NO: 1376111 - RNA, 19 nt, Homo sapiens
  misc_RNA (1)...(19): siRNA sense strand
uacaugaaguucuaaggaa

SEQ ID NO: 1376112 - RNA, 19 nt, Homo sapiens
  misc_RNA (1)...(19): siRNA sense strand
ucugagaacugauaagaag

SEQ ID NO: 1376113 - RNA, 19 nt, Homo sapiens
  misc_RNA (1)...(19): siRNA sense strand
ccuccaaacucagcuauug

SEQ ID NO: 1376114 - RNA, 19 nt, Homo sapiens
  misc_RNA (1)...(19): siRNA sense strand
aauacacgcucuuuacuca

SEQ ID NO: 1376115 - RNA, 19 nt, Homo sapiens
  misc_RNA (1)...(19): siRNA sense strand
caacuuacggccaaggaaa

SEQ ID NO: 1376116 - RNA, 19 nt, Homo sapiens
  misc_RNA (1)...(19): siRNA sense strand
caaagaaauucaggaagag

SEQ ID NO: 1376117 - RNA, 19 nt, Homo sapiens
  misc_RNA (1)...(19): siRNA sense strand
ggagguaguagaaauguca

SEQ ID NO: 1376118 - RNA, 19 nt, Homo sapiens
  misc_RNA (1)...(19): siRNA sense strand
gccagugaauuucugaguu

SEQ ID NO: 1376119 - RNA, 19 nt, Homo sapiens
  misc_RNA (1)...(19): siRNA sense strand
uacaaaugcuuggagauga

SEQ ID NO: 1376120 - RNA, 19 nt, Homo sapiens
  misc_RNA (1)...(19): siRNA sense strand
ugaacuugcugugcauaaa

SEQ ID NO: 1376121 - RNA, 19 nt, Homo sapiens
  misc_RNA (1)...(19): siRNA sense strand
ccucucauuuaucagaaua

SEQ ID NO: 1376122 - RNA, 19 nt, Homo sapiens
  misc_RNA (1)...(19): siRNA sense strand
caagagguccaagcuauug

SEQ ID NO: 1376123 - RNA, 19 nt, Homo sapiens
  misc_RNA (1)...(19): siRNA sense strand
ucgggauucucauacuuua

SEQ ID NO: 1376124 - RNA, 19 nt, Homo sapiens
  misc_RNA (1)...(19): siRNA sense strand
gguuauuguuucccaaaga

SEQ ID NO: 1376125 - RNA, 19 nt, Homo sapiens
  misc_RNA (1)...(19): siRNA sense strand
gccauaccuugcucuacua

SEQ ID NO: 1376126 - RNA, 19 nt, Homo sapiens
  misc_RNA (1)...(19): siRNA sense strand
caaggaggaggaucaaguu

SEQ ID NO: 1376127 - RNA, 19 nt, Homo sapiens
  misc_RNA (1)...(19): siRNA sense strand
ugugaugcauuccaacaaa

SEQ ID NO: 1376128 - RNA, 19 nt, Homo sapiens
  misc_RNA (1)...(19): siRNA sense strand
gaggugugaugcauuccaa

SEQ ID NO: 1376129 - RNA, 19 nt, Homo sapiens
  misc_RNA (1)...(19): siRNA sense strand
aaagauguuucucuguuuc

SEQ ID NO: 1376130 - RNA, 19 nt, Homo sapiens
  misc_RNA (1)...(19): siRNA sense strand
gggauguucuggugauauc

SEQ ID NO: 1376131 - RNA, 19 nt, Homo sapiens
  misc_RNA (1)...(19): siRNA sense strand
ugacaaaacuucucuagag

SEQ ID NO: 1376132 - RNA, 19 nt, Homo sapiens
  misc_RNA (1)...(19): siRNA sense strand
caggaagaguguucuaucu

SEQ ID NO: 1376133 - RNA, 19 nt, Homo sapiens
  misc_RNA (1)...(19): siRNA sense strand
ugaacgggauacauuacuu

SEQ ID NO: 1376134 - RNA, 19 nt, Homo sapiens
  misc_RNA (1)...(19): siRNA sense strand
ggugauaucagaagugcaa

SEQ ID NO: 1376135 - RNA, 19 nt, Homo sapiens
  misc_RNA (1)...(19): siRNA sense strand
aaaggagcaugguauucaa

SEQ ID NO: 1376136 - RNA, 19 nt, Homo sapiens
  misc_RNA (1)...(19): siRNA sense strand
aauaugaacgggauacauu

SEQ ID NO: 1376137 - RNA, 19 nt, Homo sapiens
  misc_RNA (1)...(19): siRNA sense strand
cuauagaagcuaacaagaa

SEQ ID NO: 1376138 - RNA, 19 nt, Homo sapiens
  misc_RNA (1)...(19): siRNA sense strand
cgauguccucuuauauuua

SEQ ID NO: 1376139 - RNA, 19 nt, Homo sapiens
  misc_RNA (1)...(19): siRNA sense strand
auuggucgauguccucuua

SEQ ID NO: 1376140 - RNA, 19 nt, Homo sapiens
  misc_RNA (1)...(19): siRNA sense strand
gaaguucuaaggaaguaug

SEQ ID NO: 1376141 - RNA, 19 nt, Homo sapiens
  misc_RNA (1)...(19): siRNA sense strand
agauaauucugguugaaga

SEQ ID NO: 1376142 - RNA, 19 nt, Homo sapiens
  misc_RNA (1)...(19): siRNA sense strand
ccuguggcaccaacaauua

SEQ ID NO: 1376143 - RNA, 19 nt, Homo sapiens
  misc_RNA (1)...(19): siRNA sense strand
gcgacacuuuggaagauug

SEQ ID NO: 1376144 - RNA, 19 nt, Homo sapiens
  misc_RNA (1)...(19): siRNA sense strand
ggaggaggaucaaguuuuc

SEQ ID NO: 1376145 - RNA, 19 nt, Homo sapiens
  misc_RNA (1)...(19): siRNA sense strand
gggauacauuacuuguuga

SEQ ID NO: 1376146 - RNA, 19 nt, Homo sapiens
  misc_RNA (1)...(19): siRNA sense strand
uaucaaaggagcaugguau

SEQ ID NO: 1376147 - RNA, 19 nt, Homo sapiens
  misc_RNA (1)...(19): siRNA sense strand
aaucaagcuuccauauguu

SEQ ID NO: 1376148 - RNA, 19 nt, Homo sapiens
  misc_RNA (1)...(19): siRNA sense strand
caccaaaacuacauagauu

SEQ ID NO: 1376149 - RNA, 19 nt, Homo sapiens
  misc_RNA (1)...(19): siRNA sense strand
caauaaacagccuccaguu

SEQ ID NO: 1376150 - RNA, 19 nt, Homo sapiens
  misc_RNA (1)...(19): siRNA sense strand
gagcgacaaaguauaacaa

SEQ ID NO: 1376151 - RNA, 19 nt, Homo sapiens
  misc_RNA (1)...(19): siRNA sense strand
ccaaggagacauggaagaa

SEQ ID NO: 1376152 - RNA, 19 nt, Homo sapiens
  misc_RNA (1)...(19): siRNA sense strand
gaauacacgcucuuuacuc

SEQ ID NO: 1376153 - RNA, 19 nt, Homo sapiens
  misc_RNA (1)...(19): siRNA sense strand
caguggagauaauaaucaa

SEQ ID NO: 1376154 - RNA, 19 nt, Homo sapiens
  misc_RNA (1)...(19): siRNA sense strand
gcgacaaaguauaacaagu

SEQ ID NO: 1376155 - RNA, 19 nt, Homo sapiens
  misc_RNA (1)...(19): siRNA sense strand
gcaugguauucaaguacaa

SEQ ID NO: 1376156 - RNA, 19 nt, Homo sapiens
  misc_RNA (1)...(19): siRNA sense strand
ugacagggaacauggaaug

SEQ ID NO: 1376157 - RNA, 19 nt, Homo sapiens
  misc_RNA (1)...(19): siRNA sense strand
ggaauacacgcucuuuacu

SEQ ID NO: 1376158 - RNA, 19 nt, Homo sapiens
  misc_RNA (1)...(19): siRNA sense strand
ucgguugcccucucauuua

SEQ ID NO: 1376159 - RNA, 19 nt, Homo sapiens
  misc_RNA (1)...(19): siRNA sense strand
gagagccagugaauuucug

SEQ ID NO: 1376160 - RNA, 19 nt, Homo sapiens
  misc_RNA (1)...(19): siRNA sense strand
aaaaguaucgggaaaauug

SEQ ID NO: 1376161 - RNA, 19 nt, Homo sapiens
  misc_RNA (1)...(19): siRNA sense strand
gaaucaagcuuccauaugu

SEQ ID NO: 1376162 - RNA, 19 nt, Homo sapiens
  misc_RNA (1)...(19): siRNA sense strand
gcaaagauguuucucuguu

SEQ ID NO: 1376163 - RNA, 19 nt, Homo sapiens
  misc_RNA (1)...(19): siRNA sense strand
acacaugccuggagacuua

SEQ ID NO: 1376164 - RNA, 19 nt, Homo sapiens
  misc_RNA (1)...(19): siRNA sense strand
caacaaagcccgaggauau

SEQ ID NO: 1376165 - RNA, 19 nt, Homo sapiens
  misc_RNA (1)...(19): siRNA sense strand
ccaaagaaauucaggaaga

SEQ ID NO: 1376166 - RNA, 19 nt, Homo sapiens
  misc_RNA (1)...(19): siRNA sense strand
cuacauagauuucuucaug

SEQ ID NO: 1376167 - RNA, 19 nt, Homo sapiens
  misc_RNA (1)...(19): siRNA sense strand
ggaaauugaugauauugug

SEQ ID NO: 1376168 - RNA, 19 nt, Homo sapiens
  misc_RNA (1)...(19): siRNA sense strand
aaacucagcuauugccaua

SEQ ID NO: 1376169 - RNA, 19 nt, Homo sapiens
  misc_RNA (1)...(19): siRNA sense strand
gaagauaauucugguugaa

SEQ ID NO: 1376170 - RNA, 19 nt, Homo sapiens
  misc_RNA (1)...(19): siRNA sense strand
caaagauguuucucuguuu

SEQ ID NO: 1376171 - RNA, 19 nt, Homo sapiens
  misc_RNA (1)...(19): siRNA sense strand
guacaagaguggauuaauc

SEQ ID NO: 1376172 - RNA, 19 nt, Homo sapiens
  misc_RNA (1)...(19): siRNA sense strand
ggaagaguguucuaucuca

SEQ ID NO: 1376173 - RNA, 19 nt, Homo sapiens
  misc_RNA (1)...(19): siRNA sense strand
gaaagacaacgaccuuaaa

SEQ ID NO: 1376174 - RNA, 19 nt, Homo sapiens
  misc_RNA (1)...(19): siRNA sense strand
ggaaagacaacgaccuuaa

SEQ ID NO: 1376175 - RNA, 19 nt, Homo sapiens
  misc_RNA (1)...(19): siRNA sense strand
caaagaguuucuacuaaga

SEQ ID NO: 1376176 - RNA, 19 nt, Homo sapiens
  misc_RNA (1)...(19): siRNA sense strand
ccucagugguuucuaauaa

SEQ ID NO: 1376177 - RNA, 19 nt, Homo sapiens
  misc_RNA (1)...(19): siRNA sense strand
ccagugaauuucugaguuu

SEQ ID NO: 1376178 - RNA, 19 nt, Homo sapiens
  misc_RNA (1)...(19): siRNA sense strand
cagggaacauggaaugaua

SEQ ID NO: 1376179 - RNA, 19 nt, Homo sapiens
  misc_RNA (1)...(19): siRNA sense strand
uaagagcgacaaaguauaa

SEQ ID NO: 1376180 - RNA, 19 nt, Homo sapiens
  misc_RNA (1)...(19): siRNA sense strand
gagcaucuuuaacagaauu

SEQ ID NO: 1376181 - RNA, 19 nt, Homo sapiens
  misc_RNA (1)...(19): siRNA sense strand
ccuggagacuuauuuaauu

SEQ ID NO: 1376182 - RNA, 19 nt, Homo sapiens
  misc_RNA (1)...(19): siRNA sense strand
cgacaaaguauaacaaguu

SEQ ID NO: 1376183 - RNA, 19 nt, Homo sapiens
  misc_RNA (1)...(19): siRNA sense strand
ggagcaugguauucaagua

SEQ ID NO: 1376184 - RNA, 19 nt, Homo sapiens
  misc_RNA (1)...(19): siRNA sense strand
gaagaguguucuaucucaa

SEQ ID NO: 1376185 - RNA, 19 nt, Homo sapiens
  misc_RNA (1)...(19): siRNA sense strand
ucaaagaguuucuacuaag

SEQ ID NO: 1376186 - RNA, 19 nt, Homo sapiens
  misc_RNA (1)...(19): siRNA sense strand
gagaacugauaagaagaua

SEQ ID NO: 1376187 - RNA, 19 nt, Homo sapiens
  misc_RNA (1)...(19): siRNA sense strand
gcucuuuacucagggaaua

SEQ ID NO: 1376188 - RNA, 19 nt, Homo sapiens
  misc_RNA (1)...(19): siRNA sense strand
cgggauacauuacuuguug

SEQ ID NO: 1376189 - RNA, 19 nt, Homo sapiens
  misc_RNA (1)...(19): siRNA sense strand
ucgauguccucuuauauuu

SEQ ID NO: 1376190 - RNA, 19 nt, Homo sapiens
  misc_RNA (1)...(19): siRNA sense strand
agauuuaccuaaccaguuu

SEQ ID NO: 1376191 - RNA, 19 nt, Homo sapiens
  misc_RNA (1)...(19): siRNA sense strand
ggaaguaugugaggauugg

SEQ ID NO: 1376192 - RNA, 19 nt, Homo sapiens
  misc_RNA (1)...(19): siRNA sense strand
gauaucagaagugcaauaa

SEQ ID NO: 1376193 - RNA, 19 nt, Homo sapiens
  misc_RNA (1)...(19): siRNA sense strand
gcaccaacaauuaugauga

SEQ ID NO: 1376194 - RNA, 19 nt, Homo sapiens
  misc_RNA (1)...(19): siRNA sense strand
aaacaggguggaucuauuu

SEQ ID NO: 1376195 - RNA, 19 nt, Homo sapiens
  misc_RNA (1)...(19): siRNA sense strand
gaugaucugagaacugaua

SEQ ID NO: 1376196 - RNA, 19 nt, Homo sapiens
  misc_RNA (1)...(19): siRNA sense strand
ggguggaucuauuuuauua

SEQ ID NO: 1376197 - RNA, 19 nt, Homo sapiens
  misc_RNA (1)...(19): siRNA sense strand
uaucagaagugcaauaaac

SEQ ID NO: 1376198 - RNA, 19 nt, Homo sapiens
  misc_RNA (1)...(19): siRNA sense strand
ugugagagccagugaauuu

SEQ ID NO: 1376199 - RNA, 19 nt, Homo sapiens
  misc_RNA (1)...(19): siRNA sense strand
caaaggagcaugguauuca

SEQ ID NO: 1376200 - RNA, 19 nt, Homo sapiens
  misc_RNA (1)...(19): siRNA sense strand
ccggaaaccuggucucuuc

SEQ ID NO: 1376201 - RNA, 19 nt, Homo sapiens
  misc_RNA (1)...(19): siRNA sense strand
gaagcgacacuuuggaaga

SEQ ID NO: 1376202 - RNA, 19 nt, Homo sapiens
  misc_RNA (1)...(19): siRNA sense strand
cgagaggugugaugcauuc

SEQ ID NO: 1376203 - RNA, 19 nt, Homo sapiens
  misc_RNA (1)...(19): siRNA sense strand
cagaugcugugcugucaaa

SEQ ID NO: 1376204 - RNA, 19 nt, Homo sapiens
  misc_RNA (1)...(19): siRNA sense strand
caccaacaauuaugaugaa

SEQ ID NO: 1376205 - RNA, 19 nt, Homo sapiens
  misc_RNA (1)...(19): siRNA sense strand
gaacgggauacauuacuug

SEQ ID NO: 1376206 - RNA, 19 nt, Homo sapiens
  misc_RNA (1)...(19): siRNA sense strand
gaucugagaacugauaaga

SEQ ID NO: 1376207 - RNA, 19 nt, Homo sapiens
  misc_RNA (1)...(19): siRNA sense strand
uaacaagaauggaggaaaa

SEQ ID NO: 1376208 - RNA, 19 nt, Homo sapiens
  misc_RNA (1)...(19): siRNA sense strand
caaguacaagaguggauua

SEQ ID NO: 1376209 - RNA, 19 nt, Homo sapiens
  misc_RNA (1)...(19): siRNA sense strand
gaaaccuggucucuuccuu

SEQ ID NO: 1376210 - RNA, 19 nt, Homo sapiens
  misc_RNA (1)...(19): siRNA sense strand
guuauuguuucccaaagaa

SEQ ID NO: 1376211 - RNA, 19 nt, Homo sapiens
  misc_RNA (1)...(19): siRNA sense strand
uacaugaaguucuaaggaa

SEQ ID NO: 1376212 - RNA, 19 nt, Homo sapiens
  misc_RNA (1)...(19): siRNA sense strand
ucugagaacugauaagaag

SEQ ID NO: 1376213 - RNA, 19 nt, Homo sapiens
  misc_RNA (1)...(19): siRNA sense strand
aauacacgcucuuuacuca

SEQ ID NO: 1376214 - RNA, 19 nt, Homo sapiens
  misc_RNA (1)...(19): siRNA sense strand
caacuuacggccaaggaaa

SEQ ID NO: 1376215 - RNA, 19 nt, Homo sapiens
  misc_RNA (1)...(19): siRNA sense strand
caaagaaauucaggaagag

SEQ ID NO: 1376216 - RNA, 19 nt, Homo sapiens
  misc_RNA (1)...(19): siRNA sense strand
ggagguaguagaaauguca

SEQ ID NO: 1376217 - RNA, 19 nt, Homo sapiens
  misc_RNA (1)...(19): siRNA sense strand
gccagugaauuucugaguu

SEQ ID NO: 1376218 - RNA, 19 nt, Homo sapiens
  misc_RNA (1)...(19): siRNA sense strand
uacaaaugcuuggagauga

SEQ ID NO: 1376219 - RNA, 19 nt, Homo sapiens
  misc_RNA (1)...(19): siRNA sense strand
ugaacuugcugugcauaaa

SEQ ID NO: 1376220 - RNA, 19 nt, Homo sapiens
  misc_RNA (1)...(19): siRNA sense strand
ccucucauuuaucagaaua

SEQ ID NO: 1376221 - RNA, 19 nt, Homo sapiens
  misc_RNA (1)...(19): siRNA sense strand
caagagguccaagcuauug

SEQ ID NO: 1376222 - RNA, 19 nt, Homo sapiens
  misc_RNA (1)...(19): siRNA sense strand
ucgggauucucauacuuua

SEQ ID NO: 1376223 - RNA, 19 nt, Homo sapiens
  misc_RNA (1)...(19): siRNA sense strand
gguuauuguuucccaaaga

SEQ ID NO: 1376224 - RNA, 19 nt, Homo sapiens
  misc_RNA (1)...(19): siRNA sense strand
gccauaccuugcucuacua

SEQ ID NO: 1376225 - RNA, 19 nt, Homo sapiens
  misc_RNA (1)...(19): siRNA sense strand
caaggaggaggaucaaguu

SEQ ID NO: 1376226 - RNA, 19 nt, Homo sapiens
  misc_RNA (1)...(19): siRNA sense strand
ugugaugcauuccaacaaa

SEQ ID NO: 1376227 - RNA, 19 nt, Homo sapiens
  misc_RNA (1)...(19): siRNA sense strand
gaggugugaugcauuccaa

SEQ ID NO: 1376228 - RNA, 19 nt, Homo sapiens
  misc_RNA (1)...(19): siRNA sense strand
aaagauguuucucuguuuc

SEQ ID NO: 1376229 - RNA, 19 nt, Homo sapiens
  misc_RNA (1)...(19): siRNA sense strand
gggauguucuggugauauc

SEQ ID NO: 1376230 - RNA, 19 nt, Homo sapiens
  misc_RNA (1)...(19): siRNA sense strand
ugacaaaacuucucuagag

SEQ ID NO: 1376231 - RNA, 19 nt, Homo sapiens
  misc_RNA (1)...(19): siRNA sense strand
caggaagaguguucuaucu

SEQ ID NO: 1376232 - RNA, 19 nt, Homo sapiens
  misc_RNA (1)...(19): siRNA sense strand
ugaacgggauacauuacuu

SEQ ID NO: 1376233 - RNA, 19 nt, Homo sapiens
  misc_RNA (1)...(19): siRNA sense strand
ggugauaucagaagugcaa

SEQ ID NO: 1376234 - RNA, 19 nt, Homo sapiens
  misc_RNA (1)...(19): siRNA sense strand
agauaauucugguugaaga

SEQ ID NO: 1376235 - RNA, 19 nt, Homo sapiens
  misc_RNA (1)...(19): siRNA sense strand
aaaggagcaugguauucaa

SEQ ID NO: 1376236 - RNA, 19 nt, Homo sapiens
  misc_RNA (1)...(19): siRNA sense strand
aauaugaacgggauacauu

SEQ ID NO: 1376237 - RNA, 19 nt, Homo sapiens
  misc_RNA (1)...(19): siRNA sense strand
cuauagaagcuaacaagaa

SEQ ID NO: 1376238 - RNA, 19 nt, Homo sapiens
  misc_RNA (1)...(19): siRNA sense strand
cgauguccucuuauauuua

SEQ ID NO: 1376239 - RNA, 19 nt, Homo sapiens
  misc_RNA (1)...(19): siRNA sense strand
auuggucgauguccucuua

SEQ ID NO: 1376240 - RNA, 19 nt, Homo sapiens
  misc_RNA (1)...(19): siRNA sense strand
gaaguucuaaggaaguaug

SEQ ID NO: 1376241 - RNA, 19 nt, Homo sapiens
  misc_RNA (1)...(19): siRNA sense strand
ccuguggcaccaacaauua

SEQ ID NO: 1376242 - RNA, 19 nt, Homo sapiens
  misc_RNA (1)...(19): siRNA sense strand
gcgacacuuuggaagauug

SEQ ID NO: 1376243 - RNA, 19 nt, Homo sapiens
  misc_RNA (1)...(19): siRNA sense strand
ggaggaggaucaaguuuuc

SEQ ID NO: 1376244 - RNA, 19 nt, Homo sapiens
  misc_RNA (1)...(19): siRNA sense strand
gggauacauuacuuguuga

SEQ ID NO: 1376245 - RNA, 19 nt, Homo sapiens
  misc_RNA (1)...(19): siRNA sense strand
uaucaaaggagcaugguau

SEQ ID NO: 1376246 - RNA, 19 nt, Homo sapiens
  misc_RNA (1)...(19): siRNA sense strand
aaucaagcuuccauauguu

SEQ ID NO: 1376247 - RNA, 19 nt, Homo sapiens
  misc_RNA (1)...(19): siRNA sense strand
caccaaaacuacauagauu

SEQ ID NO: 1376248 - RNA, 19 nt, Homo sapiens
  misc_RNA (1)...(19): siRNA sense strand
caauaaacagccuccaguu

SEQ ID NO: 1376249 - RNA, 19 nt, Homo sapiens
  misc_RNA (1)...(19): siRNA sense strand
gagcgacaaaguauaacaa

SEQ ID NO: 1376250 - RNA, 19 nt, Homo sapiens
  misc_RNA (1)...(19): siRNA sense strand
ccaaggagacauggaagaa

SEQ ID NO: 1376251 - RNA, 19 nt, Homo sapiens
  misc_RNA (1)...(19): siRNA sense strand
gaauacacgcucuuuacuc

SEQ ID NO: 1376252 - RNA, 19 nt, Homo sapiens
  misc_RNA (1)...(19): siRNA sense strand
caguggagauaauaaucaa

SEQ ID NO: 1376253 - RNA, 19 nt, Homo sapiens
  misc_RNA (1)...(19): siRNA sense strand
gcgacaaaguauaacaagu

SEQ ID NO: 1376254 - RNA, 19 nt, Homo sapiens
  misc_RNA (1)...(19): siRNA sense strand
gcaugguauucaaguacaa

SEQ ID NO: 1376255 - RNA, 19 nt, Homo sapiens
  misc_RNA (1)...(19): siRNA sense strand
ugacagggaacauggaaug

SEQ ID NO: 1376256 - RNA, 19 nt, Homo sapiens
  misc_RNA (1)...(19): siRNA sense strand
ggaauacacgcucuuuacu

SEQ ID NO: 1376257 - RNA, 19 nt, Homo sapiens
  misc_RNA (1)...(19): siRNA sense strand
ucgguugcccucucauuua

SEQ ID NO: 1376258 - RNA, 19 nt, Homo sapiens
  misc_RNA (1)...(19): siRNA sense strand
gagagccagugaauuucug

SEQ ID NO: 1376259 - RNA, 19 nt, Homo sapiens
  misc_RNA (1)...(19): siRNA sense strand
aaaaguaucgggaaaauug

SEQ ID NO: 1376260 - RNA, 19 nt, Homo sapiens
  misc_RNA (1)...(19): siRNA sense strand
gcaugaacuugcugugcau

SEQ ID NO: 1376261 - RNA, 19 nt, Homo sapiens
  misc_RNA (1)...(19): siRNA sense strand
gaaucaagcuuccauaugu

SEQ ID NO: 1376262 - RNA, 19 nt, Homo sapiens
  misc_RNA (1)...(19): siRNA sense strand
gcaaagauguuucucuguu

SEQ ID NO: 1376263 - RNA, 19 nt, Homo sapiens
  misc_RNA (1)...(19): siRNA sense strand
acacaugccuggagacuua

SEQ ID NO: 1376264 - RNA, 19 nt, Homo sapiens
  misc_RNA (1)...(19): siRNA sense strand
caacaaagcccgaggauau

SEQ ID NO: 1376265 - RNA, 19 nt, Homo sapiens
  misc_RNA (1)...(19): siRNA sense strand
ccaaagaaauucaggaaga

SEQ ID NO: 1376266 - RNA, 19 nt, Homo sapiens
  misc_RNA (1)...(19): siRNA sense strand
cuacauagauuucuucaug

SEQ ID NO: 1376267 - RNA, 19 nt, Homo sapiens
  misc_RNA (1)...(19): siRNA sense strand
ggaaauugaugauauugug

SEQ ID NO: 1376268 - RNA, 19 nt, Homo sapiens
  misc_RNA (1)...(19): siRNA sense strand
aaacucagcuauugccaua

SEQ ID NO: 1376269 - RNA, 19 nt, Homo sapiens
  misc_RNA (1)...(19): siRNA sense strand
gaagauaauucugguugaa

SEQ ID NO: 1376270 - RNA, 19 nt, Homo sapiens
  misc_RNA (1)...(19): siRNA sense strand
caaagauguuucucuguuu

SEQ ID NO: 1376271 - RNA, 19 nt, Homo sapiens
  misc_RNA (1)...(19): siRNA sense strand
guacaagaguggauuaauc

SEQ ID NO: 1376272 - RNA, 19 nt, Homo sapiens
  misc_RNA (1)...(19): siRNA sense strand
ggaagaguguucuaucuca

SEQ ID NO: 1376273 - RNA, 19 nt, Homo sapiens
  misc_RNA (1)...(19): siRNA sense strand
gaaagacaacgaccuuaaa

SEQ ID NO: 1376274 - RNA, 19 nt, Homo sapiens
  misc_RNA (1)...(19): siRNA sense strand
ggaaagacaacgaccuuaa

SEQ ID NO: 1376275 - RNA, 19 nt, Homo sapiens
  misc_RNA (1)...(19): siRNA sense strand
caaagaguuucuacuaaga

SEQ ID NO: 1376276 - RNA, 19 nt, Homo sapiens
  misc_RNA (1)...(19): siRNA sense strand
ccucagugguuucuaauaa

SEQ ID NO: 1376277 - RNA, 19 nt, Homo sapiens
  misc_RNA (1)...(19): siRNA sense strand
ccagugaauuucugaguuu

SEQ ID NO: 1376278 - RNA, 19 nt, Homo sapiens
  misc_RNA (1)...(19): siRNA sense strand
cagggaacauggaaugaua

SEQ ID NO: 1376279 - RNA, 19 nt, Homo sapiens
  misc_RNA (1)...(19): siRNA sense strand
uaagagcgacaaaguauaa

SEQ ID NO: 1376280 - RNA, 19 nt, Homo sapiens
  misc_RNA (1)...(19): siRNA sense strand
gagcaucuuuaacagaauu

SEQ ID NO: 1376281 - RNA, 19 nt, Homo sapiens
  misc_RNA (1)...(19): siRNA sense strand
ccuggagacuuauuuaauu

SEQ ID NO: 1376282 - RNA, 19 nt, Homo sapiens
  misc_RNA (1)...(19): siRNA sense strand
cgacaaaguauaacaaguu

SEQ ID NO: 1376283 - RNA, 19 nt, Homo sapiens
  misc_RNA (1)...(19): siRNA sense strand
ggagcaugguauucaagua

SEQ ID NO: 1376284 - RNA, 19 nt, Homo sapiens
  misc_RNA (1)...(19): siRNA sense strand
gaagaguguucuaucucaa

SEQ ID NO: 1376285 - RNA, 19 nt, Homo sapiens
  misc_RNA (1)...(19): siRNA sense strand
ucaaagaguuucuacuaag

SEQ ID NO: 1376286 - RNA, 19 nt, Homo sapiens
  misc_RNA (1)...(19): siRNA sense strand
gagaacugauaagaagaua

SEQ ID NO: 1376287 - RNA, 19 nt, Homo sapiens
  misc_RNA (1)...(19): siRNA sense strand
gcucuuuacucagggaaua

SEQ ID NO: 1376288 - RNA, 19 nt, Homo sapiens
  misc_RNA (1)...(19): siRNA sense strand
cgggauacauuacuuguug

SEQ ID NO: 1376289 - RNA, 19 nt, Homo sapiens
  misc_RNA (1)...(19): siRNA sense strand
ucgauguccucuuauauuu

SEQ ID NO: 1376290 - RNA, 19 nt, Homo sapiens
  misc_RNA (1)...(19): siRNA sense strand
agauuuaccuaaccaguuu

SEQ ID NO: 1376291 - RNA, 19 nt, Homo sapiens
  misc_RNA (1)...(19): siRNA sense strand
ggaaguaugugaggauugg

SEQ ID NO: 1376292 - RNA, 19 nt, Homo sapiens
  misc_RNA (1)...(19): siRNA sense strand
gauaucagaagugcaauaa

SEQ ID NO: 1376293 - RNA, 19 nt, Homo sapiens
  misc_RNA (1)...(19): siRNA sense strand
gcaccaacaauuaugauga

SEQ ID NO: 1376294 - RNA, 19 nt, Homo sapiens
  misc_RNA (1)...(19): siRNA sense strand
aaacaggguggaucuauuu

SEQ ID NO: 1376295 - RNA, 19 nt, Homo sapiens
  misc_RNA (1)...(19): siRNA sense strand
gaugaucugagaacugaua

SEQ ID NO: 1376296 - RNA, 19 nt, Homo sapiens
  misc_RNA (1)...(19): siRNA sense strand
ggguggaucuauuuuauua

SEQ ID NO: 1376297 - RNA, 19 nt, Homo sapiens
  misc_RNA (1)...(19): siRNA sense strand
uaucagaagugcaauaaac

SEQ ID NO: 1376298 - RNA, 19 nt, Homo sapiens
  misc_RNA (1)...(19): siRNA sense strand
ugugagagccagugaauuu

SEQ ID NO: 1376299 - RNA, 19 nt, Homo sapiens
  misc_RNA (1)...(19): siRNA sense strand
caaaggagcaugguauuca

SEQ ID NO: 1376300 - RNA, 19 nt, Homo sapiens
  misc_RNA (1)...(19): siRNA sense strand
ccggaaaccuggucucuuc

SEQ ID NO: 1376301 - RNA, 19 nt, Homo sapiens
  misc_RNA (1)...(19): siRNA sense strand
gaagcgacacuuuggaaga

SEQ ID NO: 1376302 - RNA, 19 nt, Homo sapiens
  misc_RNA (1)...(19): siRNA sense strand
cgagaggugugaugcauuc

SEQ ID NO: 1376303 - RNA, 19 nt, Homo sapiens
  misc_RNA (1)...(19): siRNA sense strand
cagaugcugugcugucaaa

SEQ ID NO: 1376304 - RNA, 19 nt, Homo sapiens
  misc_RNA (1)...(19): siRNA sense strand
caccaacaauuaugaugaa

SEQ ID NO: 1376305 - RNA, 19 nt, Homo sapiens
  misc_RNA (1)...(19): siRNA sense strand
gaacgggauacauuacuug

SEQ ID NO: 1376306 - RNA, 19 nt, Homo sapiens
  misc_RNA (1)...(19): siRNA sense strand
gaucugagaacugauaaga

SEQ ID NO: 1376307 - RNA, 19 nt, Homo sapiens
  misc_RNA (1)...(19): siRNA sense strand
uaacaagaauggaggaaaa

SEQ ID NO: 1376308 - RNA, 19 nt, Homo sapiens
  misc_RNA (1)...(19): siRNA sense strand
caaguacaagaguggauua

SEQ ID NO: 1376309 - RNA, 19 nt, Homo sapiens
  misc_RNA (1)...(19): siRNA sense strand
gaaaccuggucucuuccuu

SEQ ID NO: 1376310 - RNA, 19 nt, Homo sapiens
  misc_RNA (1)...(19): siRNA sense strand
guuauuguuucccaaagaa

SEQ ID NO: 1376311 - RNA, 19 nt, Homo sapiens
  misc_RNA (1)...(19): siRNA sense strand
uacaugaaguucuaaggaa

SEQ ID NO: 1376312 - RNA, 19 nt, Homo sapiens
  misc_RNA (1)...(19): siRNA sense strand
ucugagaacugauaagaag

SEQ ID NO: 1376313 - RNA, 19 nt, Homo sapiens
  misc_RNA (1)...(19): siRNA sense strand
aauacacgcucuuuacuca

SEQ ID NO: 1376314 - RNA, 19 nt, Homo sapiens
  misc_RNA (1)...(19): siRNA sense strand
caacuuacggccaaggaaa

SEQ ID NO: 1376315 - RNA, 19 nt, Homo sapiens
  misc_RNA (1)...(19): siRNA sense strand
caaagaaauucaggaagag

SEQ ID NO: 1376316 - RNA, 19 nt, Homo sapiens
  misc_RNA (1)...(19): siRNA sense strand
ggagguaguagaaauguca

SEQ ID NO: 1376317 - RNA, 19 nt, Homo sapiens
  misc_RNA (1)...(19): siRNA sense strand
gccagugaauuucugaguu

SEQ ID NO: 1376318 - RNA, 19 nt, Homo sapiens
  misc_RNA (1)...(19): siRNA sense strand
uacaaaugcuuggagauga

SEQ ID NO: 1376319 - RNA, 19 nt, Homo sapiens
  misc_RNA (1)...(19): siRNA sense strand
ugaacuugcugugcauaaa

SEQ ID NO: 1376320 - RNA, 19 nt, Homo sapiens
  misc_RNA (1)...(19): siRNA sense strand
ccucucauuuaucagaaua

SEQ ID NO: 1376321 - RNA, 19 nt, Homo sapiens
  misc_RNA (1)...(19): siRNA sense strand
caagagguccaagcuauug

SEQ ID NO: 1376322 - RNA, 19 nt, Homo sapiens
  misc_RNA (1)...(19): siRNA sense strand
ucgggauucucauacuuua

SEQ ID NO: 1376323 - RNA, 19 nt, Homo sapiens
  misc_RNA (1)...(19): siRNA sense strand
gguuauuguuucccaaaga

SEQ ID NO: 1376324 - RNA, 19 nt, Homo sapiens
  misc_RNA (1)...(19): siRNA sense strand
gccauaccuugcucuacua

SEQ ID NO: 1376325 - RNA, 19 nt, Homo sapiens
  misc_RNA (1)...(19): siRNA sense strand
caaggaggaggaucaaguu

SEQ ID NO: 1376326 - RNA, 19 nt, Homo sapiens
  misc_RNA (1)...(19): siRNA sense strand
ugugaugcauuccaacaaa

SEQ ID NO: 1376327 - RNA, 19 nt, Homo sapiens
  misc_RNA (1)...(19): siRNA sense strand
gaggugugaugcauuccaa

SEQ ID NO: 1376328 - RNA, 19 nt, Homo sapiens
  misc_RNA (1)...(19): siRNA sense strand
aaagauguuucucuguuuc

SEQ ID NO: 1376329 - RNA, 19 nt, Homo sapiens
  misc_RNA (1)...(19): siRNA sense strand
gggauguucuggugauauc

SEQ ID NO: 1376330 - RNA, 19 nt, Homo sapiens
  misc_RNA (1)...(19): siRNA sense strand
ugacaaaacuucucuagag

SEQ ID NO: 1376331 - RNA, 19 nt, Homo sapiens
  misc_RNA (1)...(19): siRNA sense strand
caggaagaguguucuaucu

SEQ ID NO: 1376332 - RNA, 19 nt, Homo sapiens
  misc_RNA (1)...(19): siRNA sense strand
ugaacgggauacauuacuu

SEQ ID NO: 1376333 - RNA, 19 nt, Homo sapiens
  misc_RNA (1)...(19): siRNA sense strand
ggugauaucagaagugcaa

SEQ ID NO: 1376334 - RNA, 19 nt, Homo sapiens
  misc_RNA (1)...(19): siRNA sense strand
agauaauucugguugaaga

SEQ ID NO: 1376335 - RNA, 19 nt, Homo sapiens
  misc_RNA (1)...(19): siRNA sense strand
aaaggagcaugguauucaa

SEQ ID NO: 1376336 - RNA, 19 nt, Homo sapiens
  misc_RNA (1)...(19): siRNA sense strand
aauaugaacgggauacauu

SEQ ID NO: 1376337 - RNA, 19 nt, Homo sapiens
  misc_RNA (1)...(19): siRNA sense strand
cuauagaagcuaacaagaa

SEQ ID NO: 1376338 - RNA, 19 nt, Homo sapiens
  misc_RNA (1)...(19): siRNA sense strand
cgauguccucuuauauuua

SEQ ID NO: 1376339 - RNA, 19 nt, Homo sapiens
  misc_RNA (1)...(19): siRNA sense strand
auuggucgauguccucuua

SEQ ID NO: 1376340 - RNA, 19 nt, Homo sapiens
  misc_RNA (1)...(19): siRNA sense strand
gaaguucuaaggaaguaug

SEQ ID NO: 1376341 - RNA, 19 nt, Homo sapiens
  misc_RNA (1)...(19): siRNA sense strand
ccuguggcaccaacaauua

SEQ ID NO: 1376342 - RNA, 19 nt, Homo sapiens
  misc_RNA (1)...(19): siRNA sense strand
gcgacacuuuggaagauug

SEQ ID NO: 1376343 - RNA, 19 nt, Homo sapiens
  misc_RNA (1)...(19): siRNA sense strand
ggaggaggaucaaguuuuc

SEQ ID NO: 1376344 - RNA, 19 nt, Homo sapiens
  misc_RNA (1)...(19): siRNA sense strand
gggauacauuacuuguuga

SEQ ID NO: 1376345 - RNA, 19 nt, Homo sapiens
  misc_RNA (1)...(19): siRNA sense strand
uaucaaaggagcaugguau

SEQ ID NO: 1376346 - RNA, 19 nt, Homo sapiens
  misc_RNA (1)...(19): siRNA sense strand
aaucaagcuuccauauguu

SEQ ID NO: 1376347 - RNA, 19 nt, Homo sapiens
  misc_RNA (1)...(19): siRNA sense strand
caccaaaacuacauagauu

SEQ ID NO: 1376348 - RNA, 19 nt, Homo sapiens
  misc_RNA (1)...(19): siRNA sense strand
caauaaacagccuccaguu

SEQ ID NO: 1376349 - RNA, 19 nt, Homo sapiens
  misc_RNA (1)...(19): siRNA sense strand
gagcgacaaaguauaacaa

SEQ ID NO: 1376350 - RNA, 19 nt, Homo sapiens
  misc_RNA (1)...(19): siRNA sense strand
ccaaggagacauggaagaa

SEQ ID NO: 1376351 - RNA, 19 nt, Homo sapiens
  misc_RNA (1)...(19): siRNA sense strand
gaauacacgcucuuuacuc

SEQ ID NO: 1376352 - RNA, 19 nt, Homo sapiens
  misc_RNA (1)...(19): siRNA sense strand
caguggagauaauaaucaa

SEQ ID NO: 1376353 - RNA, 19 nt, Homo sapiens
  misc_RNA (1)...(19): siRNA sense strand
gcgacaaaguauaacaagu

SEQ ID NO: 1376354 - RNA, 19 nt, Homo sapiens
  misc_RNA (1)...(19): siRNA sense strand
gcaugguauucaaguacaa

SEQ ID NO: 1376355 - RNA, 19 nt, Homo sapiens
  misc_RNA (1)...(19): siRNA sense strand
ugacagggaacauggaaug

SEQ ID NO: 1376356 - RNA, 19 nt, Homo sapiens
  misc_RNA (1)...(19): siRNA sense strand
ggaauacacgcucuuuacu

SEQ ID NO: 1376357 - RNA, 19 nt, Homo sapiens
  misc_RNA (1)...(19): siRNA sense strand
ucgguugcccucucauuua

SEQ ID NO: 1376358 - RNA, 19 nt, Homo sapiens
  misc_RNA (1)...(19): siRNA sense strand
gagagccagugaauuucug

SEQ ID NO: 1376359 - RNA, 19 nt, Homo sapiens
  misc_RNA (1)...(19): siRNA sense strand
aaaaguaucgggaaaauug

SEQ ID NO: 1376360 - RNA, 19 nt, Homo sapiens
  misc_RNA (1)...(19): siRNA sense strand
gcaugaacuugcugugcau

SEQ ID NO: 1376361 - RNA, 19 nt, Homo sapiens
  misc_RNA (1)...(19): siRNA sense strand
gaaucaagcuuccauaugu

SEQ ID NO: 1376362 - RNA, 19 nt, Homo sapiens
  misc_RNA (1)...(19): siRNA sense strand
gcaaagauguuucucuguu

SEQ ID NO: 1376363 - RNA, 19 nt, Homo sapiens
  misc_RNA (1)...(19): siRNA sense strand
acacaugccuggagacuua

SEQ ID NO: 1376364 - RNA, 19 nt, Homo sapiens
  misc_RNA (1)...(19): siRNA sense strand
caacaaagcccgaggauau

SEQ ID NO: 1376365 - RNA, 19 nt, Homo sapiens
  misc_RNA (1)...(19): siRNA sense strand
ccaaagaaauucaggaaga

SEQ ID NO: 1376366 - RNA, 19 nt, Homo sapiens
  misc_RNA (1)...(19): siRNA sense strand
cuacauagauuucuucaug

SEQ ID NO: 1376367 - RNA, 19 nt, Homo sapiens
  misc_RNA (1)...(19): siRNA sense strand
ggaaauugaugauauugug

SEQ ID NO: 1376368 - RNA, 19 nt, Homo sapiens
  misc_RNA (1)...(19): siRNA sense strand
aaacucagcuauugccaua

SEQ ID NO: 1376369 - RNA, 19 nt, Homo sapiens
  misc_RNA (1)...(19): siRNA sense strand
gaagauaauucugguugaa

SEQ ID NO: 1376370 - RNA, 19 nt, Homo sapiens
  misc_RNA (1)...(19): siRNA sense strand
caaagauguuucucuguuu

SEQ ID NO: 1376371 - RNA, 19 nt, Homo sapiens
  misc_RNA (1)...(19): siRNA sense strand
ggaagaguguucuaucuca

SEQ ID NO: 1376372 - RNA, 19 nt, Homo sapiens
  misc_RNA (1)...(19): siRNA sense strand
caaagaguuucuacuaaga

SEQ ID NO: 1376373 - RNA, 19 nt, Homo sapiens
  misc_RNA (1)...(19): siRNA sense strand
ccucagugguuucuaauaa

SEQ ID NO: 1376374 - RNA, 19 nt, Homo sapiens
  misc_RNA (1)...(19): siRNA sense strand
ccagugaauuucugaguuu

SEQ ID NO: 1376375 - RNA, 19 nt, Homo sapiens
  misc_RNA (1)...(19): siRNA sense strand
cagggaacauggaaugaua

SEQ ID NO: 1376376 - RNA, 19 nt, Homo sapiens
  misc_RNA (1)...(19): siRNA sense strand
uaagagcgacaaaguauaa

SEQ ID NO: 1376377 - RNA, 19 nt, Homo sapiens
  misc_RNA (1)...(19): siRNA sense strand
gagcaucuuuaacagaauu

SEQ ID NO: 1376378 - RNA, 19 nt, Homo sapiens
  misc_RNA (1)...(19): siRNA sense strand
ccuggagacuuauuuaauu

SEQ ID NO: 1376379 - RNA, 19 nt, Homo sapiens
  misc_RNA (1)...(19): siRNA sense strand
cgacaaaguauaacaaguu

SEQ ID NO: 1376380 - RNA, 19 nt, Homo sapiens
  misc_RNA (1)...(19): siRNA sense strand
gaagaguguucuaucucaa

SEQ ID NO: 1376381 - RNA, 19 nt, Homo sapiens
  misc_RNA (1)...(19): siRNA sense strand
ucaaagaguuucuacuaag

SEQ ID NO: 1376382 - RNA, 19 nt, Homo sapiens
  misc_RNA (1)...(19): siRNA sense strand
gagaacugauaagaagaua

SEQ ID NO: 1376383 - RNA, 19 nt, Homo sapiens
  misc_RNA (1)...(19): siRNA sense strand
gcucuuuacucagggaaua

SEQ ID NO: 1376384 - RNA, 19 nt, Homo sapiens
  misc_RNA (1)...(19): siRNA sense strand
cgggauacauuacuuguug

SEQ ID NO: 1376385 - RNA, 19 nt, Homo sapiens
  misc_RNA (1)...(19): siRNA sense strand
ucgauguccucuuauauuu

SEQ ID NO: 1376386 - RNA, 19 nt, Homo sapiens
  misc_RNA (1)...(19): siRNA sense strand
agauuuaccuaaccaguuu

SEQ ID NO: 1376387 - RNA, 19 nt, Homo sapiens
  misc_RNA (1)...(19): siRNA sense strand
ggaaguaugugaggauugg

SEQ ID NO: 1376388 - RNA, 19 nt, Homo sapiens
  misc_RNA (1)...(19): siRNA sense strand
gauaucagaagugcaauaa

SEQ ID NO: 1376389 - RNA, 19 nt, Homo sapiens
  misc_RNA (1)...(19): siRNA sense strand
gcaccaacaauuaugauga

SEQ ID NO: 1376390 - RNA, 19 nt, Homo sapiens
  misc_RNA (1)...(19): siRNA sense strand
gaugaucugagaacugaua

SEQ ID NO: 1376391 - RNA, 19 nt, Homo sapiens
  misc_RNA (1)...(19): siRNA sense strand
uaucagaagugcaauaaac

SEQ ID NO: 1376392 - RNA, 19 nt, Homo sapiens
  misc_RNA (1)...(19): siRNA sense strand
ugugagagccagugaauuu

SEQ ID NO: 1376393 - RNA, 19 nt, Homo sapiens
  misc_RNA (1)...(19): siRNA sense strand
caccaacaauuaugaugaa

SEQ ID NO: 1376394 - RNA, 19 nt, Homo sapiens
  misc_RNA (1)...(19): siRNA sense strand
ccggaaaccuggucucuuc

SEQ ID NO: 1376395 - RNA, 19 nt, Homo sapiens
  misc_RNA (1)...(19): siRNA sense strand
gaagcgacacuuuggaaga

SEQ ID NO: 1376396 - RNA, 19 nt, Homo sapiens
  misc_RNA (1)...(19): siRNA sense strand
cgagaggugugaugcauuc

SEQ ID NO: 1376397 - RNA, 19 nt, Homo sapiens
  misc_RNA (1)...(19): siRNA sense strand
cagaugcugugcugucaaa

SEQ ID NO: 1376398 - RNA, 19 nt, Homo sapiens
  misc_RNA (1)...(19): siRNA sense strand
gaacgggauacauuacuug

SEQ ID NO: 1376399 - RNA, 19 nt, Homo sapiens
  misc_RNA (1)...(19): siRNA sense strand
gaucugagaacugauaaga

SEQ ID NO: 1376400 - RNA, 19 nt, Homo sapiens
  misc_RNA (1)...(19): siRNA sense strand
uaacaagaauggaggaaaa

SEQ ID NO: 1376401 - RNA, 19 nt, Homo sapiens
  misc_RNA (1)...(19): siRNA sense strand
uacaugaaguucuaaggaa

SEQ ID NO: 1376402 - RNA, 19 nt, Homo sapiens
  misc_RNA (1)...(19): siRNA sense strand
gaaaccuggucucuuccuu

SEQ ID NO: 1376403 - RNA, 19 nt, Homo sapiens
  misc_RNA (1)...(19): siRNA sense strand
guuauuguuucccaaagaa

SEQ ID NO: 1376404 - RNA, 19 nt, Homo sapiens
  misc_RNA (1)...(19): siRNA sense strand
ucugagaacugauaagaag

SEQ ID NO: 1376405 - RNA, 19 nt, Homo sapiens
  misc_RNA (1)...(19): siRNA sense strand
aauacacgcucuuuacuca

SEQ ID NO: 1376406 - RNA, 19 nt, Homo sapiens
  misc_RNA (1)...(19): siRNA sense strand
caacuuacggccaaggaaa

SEQ ID NO: 1376407 - RNA, 19 nt, Homo sapiens
  misc_RNA (1)...(19): siRNA sense strand
caaagaaauucaggaagag

SEQ ID NO: 1376408 - RNA, 19 nt, Homo sapiens
  misc_RNA (1)...(19): siRNA sense strand
ggagguaguagaaauguca

SEQ ID NO: 1376409 - RNA, 19 nt, Homo sapiens
  misc_RNA (1)...(19): siRNA sense strand
gccagugaauuucugaguu

SEQ ID NO: 1376410 - RNA, 19 nt, Homo sapiens
  misc_RNA (1)...(19): siRNA sense strand
uacaaaugcuuggagauga

SEQ ID NO: 1376411 - RNA, 19 nt, Homo sapiens
  misc_RNA (1)...(19): siRNA sense strand
ccucucauuuaucagaaua

SEQ ID NO: 1376412 - RNA, 19 nt, Homo sapiens
  misc_RNA (1)...(19): siRNA sense strand
caagagguccaagcuauug

SEQ ID NO: 1376413 - RNA, 19 nt, Homo sapiens
  misc_RNA (1)...(19): siRNA sense strand
ucgggauucucauacuuua

SEQ ID NO: 1376414 - RNA, 19 nt, Homo sapiens
  misc_RNA (1)...(19): siRNA sense strand
gguuauuguuucccaaaga

SEQ ID NO: 1376415 - RNA, 19 nt, Homo sapiens
  misc_RNA (1)...(19): siRNA sense strand
gccauaccuugcucuacua

SEQ ID NO: 1376416 - RNA, 19 nt, Homo sapiens
  misc_RNA (1)...(19): siRNA sense strand
caaggaggaggaucaaguu

SEQ ID NO: 1376417 - RNA, 19 nt, Homo sapiens
  misc_RNA (1)...(19): siRNA sense strand
ugugaugcauuccaacaaa

SEQ ID NO: 1376418 - RNA, 19 nt, Homo sapiens
  misc_RNA (1)...(19): siRNA sense strand
gaggugugaugcauuccaa

SEQ ID NO: 1376419 - RNA, 19 nt, Homo sapiens
  misc_RNA (1)...(19): siRNA sense strand
aaagauguuucucuguuuc

SEQ ID NO: 1376420 - RNA, 19 nt, Homo sapiens
  misc_RNA (1)...(19): siRNA sense strand
gggauguucuggugauauc

SEQ ID NO: 1376421 - RNA, 19 nt, Homo sapiens
  misc_RNA (1)...(19): siRNA sense strand
ugacaaaacuucucuagag

SEQ ID NO: 1376422 - RNA, 19 nt, Homo sapiens
  misc_RNA (1)...(19): siRNA sense strand
caggaagaguguucuaucu

SEQ ID NO: 1376423 - RNA, 19 nt, Homo sapiens
  misc_RNA (1)...(19): siRNA sense strand
ugaacgggauacauuacuu

SEQ ID NO: 1376424 - RNA, 19 nt, Homo sapiens
  misc_RNA (1)...(19): siRNA sense strand
ggugauaucagaagugcaa

SEQ ID NO: 1376425 - RNA, 19 nt, Homo sapiens
  misc_RNA (1)...(19): siRNA sense strand
gaaguucuaaggaaguaug

SEQ ID NO: 1376426 - RNA, 19 nt, Homo sapiens
  misc_RNA (1)...(19): siRNA sense strand
aauaugaacgggauacauu

SEQ ID NO: 1376427 - RNA, 19 nt, Homo sapiens
  misc_RNA (1)...(19): siRNA sense strand
cuauagaagcuaacaagaa

SEQ ID NO: 1376428 - RNA, 19 nt, Homo sapiens
  misc_RNA (1)...(19): siRNA sense strand
cgauguccucuuauauuua

SEQ ID NO: 1376429 - RNA, 19 nt, Homo sapiens
  misc_RNA (1)...(19): siRNA sense strand
auuggucgauguccucuua

SEQ ID NO: 1376430 - RNA, 19 nt, Homo sapiens
  misc_RNA (1)...(19): siRNA sense strand
agauaauucugguugaaga

SEQ ID NO: 1376431 - RNA, 19 nt, Homo sapiens
  misc_RNA (1)...(19): siRNA sense strand
ccuguggcaccaacaauua

SEQ ID NO: 1376432 - RNA, 19 nt, Homo sapiens
  misc_RNA (1)...(19): siRNA sense strand
gcgacacuuuggaagauug

SEQ ID NO: 1376433 - RNA, 19 nt, Homo sapiens
  misc_RNA (1)...(19): siRNA sense strand
ggaggaggaucaaguuuuc

SEQ ID NO: 1376434 - RNA, 19 nt, Homo sapiens
  misc_RNA (1)...(19): siRNA sense strand
gggauacauuacuuguuga

SEQ ID NO: 1376435 - RNA, 19 nt, Homo sapiens
  misc_RNA (1)...(19): siRNA sense strand
caauaaacagccuccaguu

SEQ ID NO: 1376436 - RNA, 19 nt, Homo sapiens
  misc_RNA (1)...(19): siRNA sense strand
aaucaagcuuccauauguu

SEQ ID NO: 1376437 - RNA, 19 nt, Homo sapiens
  misc_RNA (1)...(19): siRNA sense strand
caccaaaacuacauagauu

SEQ ID NO: 1376438 - RNA, 19 nt, Homo sapiens
  misc_RNA (1)...(19): siRNA sense strand
caguggagauaauaaucaa

SEQ ID NO: 1376439 - RNA, 19 nt, Homo sapiens
  misc_RNA (1)...(19): siRNA sense strand
ccaaggagacauggaagaa

SEQ ID NO: 1376440 - RNA, 19 nt, Homo sapiens
  misc_RNA (1)...(19): siRNA sense strand
gaauacacgcucuuuacuc

SEQ ID NO: 1376441 - RNA, 19 nt, Homo sapiens
  misc_RNA (1)...(19): siRNA sense strand
gcgacaaaguauaacaagu

SEQ ID NO: 1376442 - RNA, 19 nt, Homo sapiens
  misc_RNA (1)...(19): siRNA sense strand
gagcgacaaaguauaacaa

SEQ ID NO: 1376443 - RNA, 19 nt, Homo sapiens
  misc_RNA (1)...(19): siRNA sense strand
ucgguugcccucucauuua

SEQ ID NO: 1376444 - RNA, 19 nt, Homo sapiens
  misc_RNA (1)...(19): siRNA sense strand
ugacagggaacauggaaug

SEQ ID NO: 1376445 - RNA, 19 nt, Homo sapiens
  misc_RNA (1)...(19): siRNA sense strand
ggaauacacgcucuuuacu

SEQ ID NO: 1376446 - RNA, 19 nt, Homo sapiens
  misc_RNA (1)...(19): siRNA sense strand
guucuaaggaaguauguga

SEQ ID NO: 1376447 - RNA, 19 nt, Homo sapiens
  misc_RNA (1)...(19): siRNA sense strand
aaaaguaucgggaaaauug

SEQ ID NO: 1376448 - RNA, 19 nt, Homo sapiens
  misc_RNA (1)...(19): siRNA sense strand
acaaaugcuuggagaugau

SEQ ID NO: 1376449 - RNA, 19 nt, Homo sapiens
  misc_RNA (1)...(19): siRNA sense strand
gagagccagugaauuucug

SEQ ID NO: 1376450 - RNA, 19 nt, Homo sapiens
  misc_RNA (1)...(19): siRNA sense strand
acauagauuucuucaugga

SEQ ID NO: 1376451 - RNA, 19 nt, Homo sapiens
  misc_RNA (1)...(19): siRNA sense strand
ucagauagcaguuuucaaa

SEQ ID NO: 1376452 - RNA, 19 nt, Homo sapiens
  misc_RNA (1)...(19): siRNA sense strand
cuacuaagagcgacaaagu

SEQ ID NO: 1376453 - RNA, 19 nt, Homo sapiens
  misc_RNA (1)...(19): siRNA sense strand
ggaaugauagacccugaca

SEQ ID NO: 1376454 - RNA, 19 nt, Homo sapiens
  misc_RNA (1)...(19): siRNA sense strand
gguugaagauuuaccuaac

SEQ ID NO: 1376455 - RNA, 19 nt, Homo sapiens
  misc_RNA (1)...(19): siRNA sense strand
acuaagagcgacaaaguau

SEQ ID NO: 1376456 - RNA, 19 nt, Homo sapiens
  misc_RNA (1)...(19): siRNA sense strand
caaggagacauggaagaaa

SEQ ID NO: 1376457 - RNA, 19 nt, Homo sapiens
  misc_RNA (1)...(19): siRNA sense strand
uaucgggauucucauacuu

SEQ ID NO: 1376458 - RNA, 19 nt, Homo sapiens
  misc_RNA (1)...(19): siRNA sense strand
ugaaucaagcuuccauaug

SEQ ID NO: 1376459 - RNA, 19 nt, Homo sapiens
  misc_RNA (1)...(19): siRNA sense strand
cugaggagguaguagaaau

SEQ ID NO: 1376460 - RNA, 19 nt, Homo sapiens
  misc_RNA (1)...(19): siRNA sense strand
gucgauguccucuuauauu

SEQ ID NO: 1376461 - RNA, 19 nt, Homo sapiens
  misc_RNA (1)...(19): siRNA sense strand
gaaucaagcuuccauaugu

SEQ ID NO: 1376462 - RNA, 19 nt, Homo sapiens
  misc_RNA (1)...(19): siRNA sense strand
gcaaagauguuucucuguu

SEQ ID NO: 1376463 - RNA, 19 nt, Homo sapiens
  misc_RNA (1)...(19): siRNA sense strand
acacaugccuggagacuua

SEQ ID NO: 1376464 - RNA, 19 nt, Homo sapiens
  misc_RNA (1)...(19): siRNA sense strand
caacaaagcccgaggauau

SEQ ID NO: 1376465 - RNA, 19 nt, Homo sapiens
  misc_RNA (1)...(19): siRNA sense strand
ccaaagaaauucaggaaga

SEQ ID NO: 1376466 - RNA, 19 nt, Homo sapiens
  misc_RNA (1)...(19): siRNA sense strand
cuacauagauuucuucaug

SEQ ID NO: 1376467 - RNA, 19 nt, Homo sapiens
  misc_RNA (1)...(19): siRNA sense strand
ggaaauugaugauauugug

SEQ ID NO: 1376468 - RNA, 19 nt, Homo sapiens
  misc_RNA (1)...(19): siRNA sense strand
aaacucagcuauugccaua

SEQ ID NO: 1376469 - RNA, 19 nt, Homo sapiens
  misc_RNA (1)...(19): siRNA sense strand
gaagauaauucugguugaa

SEQ ID NO: 1376470 - RNA, 19 nt, Homo sapiens
  misc_RNA (1)...(19): siRNA sense strand
caaagauguuucucuguuu

SEQ ID NO: 1376471 - RNA, 19 nt, Homo sapiens
  misc_RNA (1)...(19): siRNA sense strand
guacaagaguggauuaauc

SEQ ID NO: 1376472 - RNA, 19 nt, Homo sapiens
  misc_RNA (1)...(19): siRNA sense strand
ggaagaguguucuaucuca

SEQ ID NO: 1376473 - RNA, 19 nt, Homo sapiens
  misc_RNA (1)...(19): siRNA sense strand
gaaagacaacgaccuuaaa

SEQ ID NO: 1376474 - RNA, 19 nt, Homo sapiens
  misc_RNA (1)...(19): siRNA sense strand
ggaaagacaacgaccuuaa

SEQ ID NO: 1376475 - RNA, 19 nt, Homo sapiens
  misc_RNA (1)...(19): siRNA sense strand
caaagaguuucuacuaaga

SEQ ID NO: 1376476 - RNA, 19 nt, Homo sapiens
  misc_RNA (1)...(19): siRNA sense strand
ccucagugguuucuaauaa

SEQ ID NO: 1376477 - RNA, 19 nt, Homo sapiens
  misc_RNA (1)...(19): siRNA sense strand
ccagugaauuucugaguuu

SEQ ID NO: 1376478 - RNA, 19 nt, Homo sapiens
  misc_RNA (1)...(19): siRNA sense strand
cagggaacauggaaugaua

SEQ ID NO: 1376479 - RNA, 19 nt, Homo sapiens
  misc_RNA (1)...(19): siRNA sense strand
uaagagcgacaaaguauaa

SEQ ID NO: 1376480 - RNA, 19 nt, Homo sapiens
  misc_RNA (1)...(19): siRNA sense strand
gagcaucuuuaacagaauu

SEQ ID NO: 1376481 - RNA, 19 nt, Homo sapiens
  misc_RNA (1)...(19): siRNA sense strand
ccuggagacuuauuuaauu

SEQ ID NO: 1376482 - RNA, 19 nt, Homo sapiens
  misc_RNA (1)...(19): siRNA sense strand
cgacaaaguauaacaaguu

SEQ ID NO: 1376483 - RNA, 19 nt, Homo sapiens
  misc_RNA (1)...(19): siRNA sense strand
ggagcaugguauucaagua

SEQ ID NO: 1376484 - RNA, 19 nt, Homo sapiens
  misc_RNA (1)...(19): siRNA sense strand
gaagaguguucuaucucaa

SEQ ID NO: 1376485 - RNA, 19 nt, Homo sapiens
  misc_RNA (1)...(19): siRNA sense strand
ucaaagaguuucuacuaag

SEQ ID NO: 1376486 - RNA, 19 nt, Homo sapiens
  misc_RNA (1)...(19): siRNA sense strand
gagaacugauaagaagaua

SEQ ID NO: 1376487 - RNA, 19 nt, Homo sapiens
  misc_RNA (1)...(19): siRNA sense strand
gcucuuuacucagggaaua

SEQ ID NO: 1376488 - RNA, 19 nt, Homo sapiens
  misc_RNA (1)...(19): siRNA sense strand
cgggauacauuacuuguug

SEQ ID NO: 1376489 - RNA, 19 nt, Homo sapiens
  misc_RNA (1)...(19): siRNA sense strand
ucgauguccucuuauauuu

SEQ ID NO: 1376490 - RNA, 19 nt, Homo sapiens
  misc_RNA (1)...(19): siRNA sense strand
agauuuaccuaaccaguuu

SEQ ID NO: 1376491 - RNA, 19 nt, Homo sapiens
  misc_RNA (1)...(19): siRNA sense strand
ggaaguaugugaggauugg

SEQ ID NO: 1376492 - RNA, 19 nt, Homo sapiens
  misc_RNA (1)...(19): siRNA sense strand
gauaucagaagugcaauaa

SEQ ID NO: 1376493 - RNA, 19 nt, Homo sapiens
  misc_RNA (1)...(19): siRNA sense strand
gcaccaacaauuaugauga

SEQ ID NO: 1376494 - RNA, 19 nt, Homo sapiens
  misc_RNA (1)...(19): siRNA sense strand
aaacaggguggaucuauuu

SEQ ID NO: 1376495 - RNA, 19 nt, Homo sapiens
  misc_RNA (1)...(19): siRNA sense strand
gaugaucugagaacugaua

SEQ ID NO: 1376496 - RNA, 19 nt, Homo sapiens
  misc_RNA (1)...(19): siRNA sense strand
ggguggaucuauuuuauua

SEQ ID NO: 1376497 - RNA, 19 nt, Homo sapiens
  misc_RNA (1)...(19): siRNA sense strand
uaucagaagugcaauaaac

SEQ ID NO: 1376498 - RNA, 19 nt, Homo sapiens
  misc_RNA (1)...(19): siRNA sense strand
ugugagagccagugaauuu

SEQ ID NO: 1376499 - RNA, 19 nt, Homo sapiens
  misc_RNA (1)...(19): siRNA sense strand
caaaggagcaugguauuca

SEQ ID NO: 1376500 - RNA, 19 nt, Homo sapiens
  misc_RNA (1)...(19): siRNA sense strand
ccggaaaccuggucucuuc

SEQ ID NO: 1376501 - RNA, 19 nt, Homo sapiens
  misc_RNA (1)...(19): siRNA sense strand
gaagcgacacuuuggaaga

SEQ ID NO: 1376502 - RNA, 19 nt, Homo sapiens
  misc_RNA (1)...(19): siRNA sense strand
cgagaggugugaugcauuc

SEQ ID NO: 1376503 - RNA, 19 nt, Homo sapiens
  misc_RNA (1)...(19): siRNA sense strand
cagaugcugugcugucaaa

SEQ ID NO: 1376504 - RNA, 19 nt, Homo sapiens
  misc_RNA (1)...(19): siRNA sense strand
caccaacaauuaugaugaa

SEQ ID NO: 1376505 - RNA, 19 nt, Homo sapiens
  misc_RNA (1)...(19): siRNA sense strand
gaacgggauacauuacuug

SEQ ID NO: 1376506 - RNA, 19 nt, Homo sapiens
  misc_RNA (1)...(19): siRNA sense strand
gaucugagaacugauaaga

SEQ ID NO: 1376507 - RNA, 19 nt, Homo sapiens
  misc_RNA (1)...(19): siRNA sense strand
uaacaagaauggaggaaaa

SEQ ID NO: 1376508 - RNA, 19 nt, Homo sapiens
  misc_RNA (1)...(19): siRNA sense strand
caaguacaagaguggauua

SEQ ID NO: 1376509 - RNA, 19 nt, Homo sapiens
  misc_RNA (1)...(19): siRNA sense strand
gaaaccuggucucuuccuu

SEQ ID NO: 1376510 - RNA, 19 nt, Homo sapiens
  misc_RNA (1)...(19): siRNA sense strand
guuauuguuucccaaagaa

SEQ ID NO: 1376511 - RNA, 19 nt, Homo sapiens
  misc_RNA (1)...(19): siRNA sense strand
uacaugaaguucuaaggaa

SEQ ID NO: 1376512 - RNA, 19 nt, Homo sapiens
  misc_RNA (1)...(19): siRNA sense strand
ucugagaacugauaagaag

SEQ ID NO: 1376513 - RNA, 19 nt, Homo sapiens
  misc_RNA (1)...(19): siRNA sense strand
aauacacgcucuuuacuca

SEQ ID NO: 1376514 - RNA, 19 nt, Homo sapiens
  misc_RNA (1)...(19): siRNA sense strand
caacuuacggccaaggaaa

SEQ ID NO: 1376515 - RNA, 19 nt, Homo sapiens
  misc_RNA (1)...(19): siRNA sense strand
caaagaaauucaggaagag

SEQ ID NO: 1376516 - RNA, 19 nt, Homo sapiens
  misc_RNA (1)...(19): siRNA sense strand
ggagguaguagaaauguca

SEQ ID NO: 1376517 - RNA, 19 nt, Homo sapiens
  misc_RNA (1)...(19): siRNA sense strand
gccagugaauuucugaguu

SEQ ID NO: 1376518 - RNA, 19 nt, Homo sapiens
  misc_RNA (1)...(19): siRNA sense strand
uacaaaugcuuggagauga

SEQ ID NO: 1376519 - RNA, 19 nt, Homo sapiens
  misc_RNA (1)...(19): siRNA sense strand
ugaacuugcugugcauaaa

SEQ ID NO: 1376520 - RNA, 19 nt, Homo sapiens
  misc_RNA (1)...(19): siRNA sense strand
ccucucauuuaucagaaua

SEQ ID NO: 1376521 - RNA, 19 nt, Homo sapiens
  misc_RNA (1)...(19): siRNA sense strand
caagagguccaagcuauug

SEQ ID NO: 1376522 - RNA, 19 nt, Homo sapiens
  misc_RNA (1)...(19): siRNA sense strand
ucgggauucucauacuuua

SEQ ID NO: 1376523 - RNA, 19 nt, Homo sapiens
  misc_RNA (1)...(19): siRNA sense strand
gguuauuguuucccaaaga

SEQ ID NO: 1376524 - RNA, 19 nt, Homo sapiens
  misc_RNA (1)...(19): siRNA sense strand
gccauaccuugcucuacua

SEQ ID NO: 1376525 - RNA, 19 nt, Homo sapiens
  misc_RNA (1)...(19): siRNA sense strand
caaggaggaggaucaaguu

SEQ ID NO: 1376526 - RNA, 19 nt, Homo sapiens
  misc_RNA (1)...(19): siRNA sense strand
ugugaugcauuccaacaaa

SEQ ID NO: 1376527 - RNA, 19 nt, Homo sapiens
  misc_RNA (1)...(19): siRNA sense strand
gaggugugaugcauuccaa

SEQ ID NO: 1376528 - RNA, 19 nt, Homo sapiens
  misc_RNA (1)...(19): siRNA sense strand
aaagauguuucucuguuuc

SEQ ID NO: 1376529 - RNA, 19 nt, Homo sapiens
  misc_RNA (1)...(19): siRNA sense strand
gggauguucuggugauauc

SEQ ID NO: 1376530 - RNA, 19 nt, Homo sapiens
  misc_RNA (1)...(19): siRNA sense strand
ugacaaaacuucucuagag

SEQ ID NO: 1376531 - RNA, 19 nt, Homo sapiens
  misc_RNA (1)...(19): siRNA sense strand
caggaagaguguucuaucu

SEQ ID NO: 1376532 - RNA, 19 nt, Homo sapiens
  misc_RNA (1)...(19): siRNA sense strand
ugaacgggauacauuacuu

SEQ ID NO: 1376533 - RNA, 19 nt, Homo sapiens
  misc_RNA (1)...(19): siRNA sense strand
ggugauaucagaagugcaa

SEQ ID NO: 1376534 - RNA, 19 nt, Homo sapiens
  misc_RNA (1)...(19): siRNA sense strand
agauaauucugguugaaga

SEQ ID NO: 1376535 - RNA, 19 nt, Homo sapiens
  misc_RNA (1)...(19): siRNA sense strand
aaaggagcaugguauucaa

SEQ ID NO: 1376536 - RNA, 19 nt, Homo sapiens
  misc_RNA (1)...(19): siRNA sense strand
aauaugaacgggauacauu

SEQ ID NO: 1376537 - RNA, 19 nt, Homo sapiens
  misc_RNA (1)...(19): siRNA sense strand
cuauagaagcuaacaagaa

SEQ ID NO: 1376538 - RNA, 19 nt, Homo sapiens
  misc_RNA (1)...(19): siRNA sense strand
cgauguccucuuauauuua

SEQ ID NO: 1376539 - RNA, 19 nt, Homo sapiens
  misc_RNA (1)...(19): siRNA sense strand
auuggucgauguccucuua

SEQ ID NO: 1376540 - RNA, 19 nt, Homo sapiens
  misc_RNA (1)...(19): siRNA sense strand
gaaguucuaaggaaguaug

SEQ ID NO: 1376541 - RNA, 19 nt, Homo sapiens
  misc_RNA (1)...(19): siRNA sense strand
ccuguggcaccaacaauua

SEQ ID NO: 1376542 - RNA, 19 nt, Homo sapiens
  misc_RNA (1)...(19): siRNA sense strand
gcgacacuuuggaagauug

SEQ ID NO: 1376543 - RNA, 19 nt, Homo sapiens
  misc_RNA (1)...(19): siRNA sense strand
ggaggaggaucaaguuuuc

SEQ ID NO: 1376544 - RNA, 19 nt, Homo sapiens
  misc_RNA (1)...(19): siRNA sense strand
gggauacauuacuuguuga

SEQ ID NO: 1376545 - RNA, 19 nt, Homo sapiens
  misc_RNA (1)...(19): siRNA sense strand
uaucaaaggagcaugguau

SEQ ID NO: 1376546 - RNA, 19 nt, Homo sapiens
  misc_RNA (1)...(19): siRNA sense strand
aaucaagcuuccauauguu

SEQ ID NO: 1376547 - RNA, 19 nt, Homo sapiens
  misc_RNA (1)...(19): siRNA sense strand
caccaaaacuacauagauu

SEQ ID NO: 1376548 - RNA, 19 nt, Homo sapiens
  misc_RNA (1)...(19): siRNA sense strand
caauaaacagccuccaguu

SEQ ID NO: 1376549 - RNA, 19 nt, Homo sapiens
  misc_RNA (1)...(19): siRNA sense strand
gagcgacaaaguauaacaa

SEQ ID NO: 1376550 - RNA, 19 nt, Homo sapiens
  misc_RNA (1)...(19): siRNA sense strand
ccaaggagacauggaagaa

SEQ ID NO: 1376551 - RNA, 19 nt, Homo sapiens
  misc_RNA (1)...(19): siRNA sense strand
gaauacacgcucuuuacuc

SEQ ID NO: 1376552 - RNA, 19 nt, Homo sapiens
  misc_RNA (1)...(19): siRNA sense strand
caguggagauaauaaucaa

SEQ ID NO: 1376553 - RNA, 19 nt, Homo sapiens
  misc_RNA (1)...(19): siRNA sense strand
gcgacaaaguauaacaagu

SEQ ID NO: 1376554 - RNA, 19 nt, Homo sapiens
  misc_RNA (1)...(19): siRNA sense strand
gcaugguauucaaguacaa

SEQ ID NO: 1376555 - RNA, 19 nt, Homo sapiens
  misc_RNA (1)...(19): siRNA sense strand
ugacagggaacauggaaug

SEQ ID NO: 1376556 - RNA, 19 nt, Homo sapiens
  misc_RNA (1)...(19): siRNA sense strand
ggaauacacgcucuuuacu

SEQ ID NO: 1376557 - RNA, 19 nt, Homo sapiens
  misc_RNA (1)...(19): siRNA sense strand
ucgguugcccucucauuua

SEQ ID NO: 1376558 - RNA, 19 nt, Homo sapiens
  misc_RNA (1)...(19): siRNA sense strand
gagagccagugaauuucug

SEQ ID NO: 1376559 - RNA, 19 nt, Homo sapiens
  misc_RNA (1)...(19): siRNA sense strand
aaaaguaucgggaaaauug

SEQ ID NO: 1376560 - RNA, 19 nt, Homo sapiens
  misc_RNA (1)...(19): siRNA sense strand
gcaugaacuugcugugcau

SEQ ID NO: 1376561 - RNA, 19 nt, Homo sapiens
  misc_RNA (1)...(19): siRNA sense strand
gaaucaagcuuccauaugu

SEQ ID NO: 1376562 - RNA, 19 nt, Homo sapiens
  misc_RNA (1)...(19): siRNA sense strand
gcaaagauguuucucuguu

SEQ ID NO: 1376563 - RNA, 19 nt, Homo sapiens
  misc_RNA (1)...(19): siRNA sense strand
acacaugccuggagacuua

SEQ ID NO: 1376564 - RNA, 19 nt, Homo sapiens
  misc_RNA (1)...(19): siRNA sense strand
caacaaagcccgaggauau

SEQ ID NO: 1376565 - RNA, 19 nt, Homo sapiens
  misc_RNA (1)...(19): siRNA sense strand
ccaaagaaauucaggaaga

SEQ ID NO: 1376566 - RNA, 19 nt, Homo sapiens
  misc_RNA (1)...(19): siRNA sense strand
cuacauagauuucuucaug

SEQ ID NO: 1376567 - RNA, 19 nt, Homo sapiens
  misc_RNA (1)...(19): siRNA sense strand
ggaaauugaugauauugug

SEQ ID NO: 1376568 - RNA, 19 nt, Homo sapiens
  misc_RNA (1)...(19): siRNA sense strand
aaacucagcuauugccaua

SEQ ID NO: 1376569 - RNA, 19 nt, Homo sapiens
  misc_RNA (1)...(19): siRNA sense strand
gaagauaauucugguugaa

SEQ ID NO: 1376570 - RNA, 19 nt, Homo sapiens
  misc_RNA (1)...(19): siRNA sense strand
caaagauguuucucuguuu

SEQ ID NO: 1376571 - RNA, 19 nt, Homo sapiens
  misc_RNA (1)...(19): siRNA sense strand
guacaagaguggauuaauc

SEQ ID NO: 1376572 - RNA, 19 nt, Homo sapiens
  misc_RNA (1)...(19): siRNA sense strand
ggaagaguguucuaucuca

SEQ ID NO: 1376573 - RNA, 19 nt, Homo sapiens
  misc_RNA (1)...(19): siRNA sense strand
gaaagacaacgaccuuaaa

SEQ ID NO: 1376574 - RNA, 19 nt, Homo sapiens
  misc_RNA (1)...(19): siRNA sense strand
ggaaagacaacgaccuuaa

SEQ ID NO: 1376575 - RNA, 19 nt, Homo sapiens
  misc_RNA (1)...(19): siRNA sense strand
caaagaguuucuacuaaga

SEQ ID NO: 1376576 - RNA, 19 nt, Homo sapiens
  misc_RNA (1)...(19): siRNA sense strand
ccucagugguuucuaauaa

SEQ ID NO: 1376577 - RNA, 19 nt, Homo sapiens
  misc_RNA (1)...(19): siRNA sense strand
ccagugaauuucugaguuu

SEQ ID NO: 1376578 - RNA, 19 nt, Homo sapiens
  misc_RNA (1)...(19): siRNA sense strand
cagggaacauggaaugaua

SEQ ID NO: 1376579 - RNA, 19 nt, Homo sapiens
  misc_RNA (1)...(19): siRNA sense strand
uaagagcgacaaaguauaa

SEQ ID NO: 1376580 - RNA, 19 nt, Homo sapiens
  misc_RNA (1)...(19): siRNA sense strand
gagcaucuuuaacagaauu

SEQ ID NO: 1376581 - RNA, 19 nt, Homo sapiens
  misc_RNA (1)...(19): siRNA sense strand
ccuggagacuuauuuaauu

SEQ ID NO: 1376582 - RNA, 19 nt, Homo sapiens
  misc_RNA (1)...(19): siRNA sense strand
cgacaaaguauaacaaguu

SEQ ID NO: 1376583 - RNA, 19 nt, Homo sapiens
  misc_RNA (1)...(19): siRNA sense strand
ggagcaugguauucaagua

SEQ ID NO: 1376584 - RNA, 19 nt, Homo sapiens
  misc_RNA (1)...(19): siRNA sense strand
gaagaguguucuaucucaa

SEQ ID NO: 1376585 - RNA, 19 nt, Homo sapiens
  misc_RNA (1)...(19): siRNA sense strand
ucaaagaguuucuacuaag

SEQ ID NO: 1376586 - RNA, 19 nt, Homo sapiens
  misc_RNA (1)...(19): siRNA sense strand
gagaacugauaagaagaua

SEQ ID NO: 1376587 - RNA, 19 nt, Homo sapiens
  misc_RNA (1)...(19): siRNA sense strand
gcucuuuacucagggaaua

SEQ ID NO: 1376588 - RNA, 19 nt, Homo sapiens
  misc_RNA (1)...(19): siRNA sense strand
cgggauacauuacuuguug

SEQ ID NO: 1376589 - RNA, 19 nt, Homo sapiens
  misc_RNA (1)...(19): siRNA sense strand
ucgauguccucuuauauuu

SEQ ID NO: 1376590 - RNA, 19 nt, Homo sapiens
  misc_RNA (1)...(19): siRNA sense strand
agauuuaccuaaccaguuu

SEQ ID NO: 1376591 - RNA, 19 nt, Homo sapiens
  misc_RNA (1)...(19): siRNA sense strand
ggaaguaugugaggauugg

SEQ ID NO: 1376592 - RNA, 19 nt, Homo sapiens
  misc_RNA (1)...(19): siRNA sense strand
gauaucagaagugcaauaa

SEQ ID NO: 1376593 - RNA, 19 nt, Homo sapiens
  misc_RNA (1)...(19): siRNA sense strand
gcaccaacaauuaugauga

SEQ ID NO: 1376594 - RNA, 19 nt, Homo sapiens
  misc_RNA (1)...(19): siRNA sense strand
aaacaggguggaucuauuu

SEQ ID NO: 1376595 - RNA, 19 nt, Homo sapiens
  misc_RNA (1)...(19): siRNA sense strand
gaugaucugagaacugaua

SEQ ID NO: 1376596 - RNA, 19 nt, Homo sapiens
  misc_RNA (1)...(19): siRNA sense strand
ggguggaucuauuuuauua

SEQ ID NO: 1376597 - RNA, 19 nt, Homo sapiens
  misc_RNA (1)...(19): siRNA sense strand
uaucagaagugcaauaaac

SEQ ID NO: 1376598 - RNA, 19 nt, Homo sapiens
  misc_RNA (1)...(19): siRNA sense strand
ugugagagccagugaauuu

SEQ ID NO: 1376599 - RNA, 19 nt, Homo sapiens
  misc_RNA (1)...(19): siRNA sense strand
caaaggagcaugguauuca

SEQ ID NO: 1376600 - RNA, 19 nt, Homo sapiens
  misc_RNA (1)...(19): siRNA sense strand
ccggaaaccuggucucuuc

SEQ ID NO: 1376601 - RNA, 19 nt, Homo sapiens
  misc_RNA (1)...(19): siRNA sense strand
gaagcgacacuuuggaaga

SEQ ID NO: 1376602 - RNA, 19 nt, Homo sapiens
  misc_RNA (1)...(19): siRNA sense strand
cgagaggugugaugcauuc

SEQ ID NO: 1376603 - RNA, 19 nt, Homo sapiens
  misc_RNA (1)...(19): siRNA sense strand
cagaugcugugcugucaaa

SEQ ID NO: 1376604 - RNA, 19 nt, Homo sapiens
  misc_RNA (1)...(19): siRNA sense strand
caccaacaauuaugaugaa

SEQ ID NO: 1376605 - RNA, 19 nt, Homo sapiens
  misc_RNA (1)...(19): siRNA sense strand
gaacgggauacauuacuug

SEQ ID NO: 1376606 - RNA, 19 nt, Homo sapiens
  misc_RNA (1)...(19): siRNA sense strand
gaucugagaacugauaaga

SEQ ID NO: 1376607 - RNA, 19 nt, Homo sapiens
  misc_RNA (1)...(19): siRNA sense strand
uaacaagaauggaggaaaa

SEQ ID NO: 1376608 - RNA, 19 nt, Homo sapiens
  misc_RNA (1)...(19): siRNA sense strand
caaguacaagaguggauua

SEQ ID NO: 1376609 - RNA, 19 nt, Homo sapiens
  misc_RNA (1)...(19): siRNA sense strand
gaaaccuggucucuuccuu

SEQ ID NO: 1376610 - RNA, 19 nt, Homo sapiens
  misc_RNA (1)...(19): siRNA sense strand
guuauuguuucccaaagaa

SEQ ID NO: 1376611 - RNA, 19 nt, Homo sapiens
  misc_RNA (1)...(19): siRNA sense strand
uacaugaaguucuaaggaa

SEQ ID NO: 1376612 - RNA, 19 nt, Homo sapiens
  misc_RNA (1)...(19): siRNA sense strand
ucugagaacugauaagaag

SEQ ID NO: 1376613 - RNA, 19 nt, Homo sapiens
  misc_RNA (1)...(19): siRNA sense strand
aauacacgcucuuuacuca

SEQ ID NO: 1376614 - RNA, 19 nt, Homo sapiens
  misc_RNA (1)...(19): siRNA sense strand
caacuuacggccaaggaaa

SEQ ID NO: 1376615 - RNA, 19 nt, Homo sapiens
  misc_RNA (1)...(19): siRNA sense strand
caaagaaauucaggaagag

SEQ ID NO: 1376616 - RNA, 19 nt, Homo sapiens
  misc_RNA (1)...(19): siRNA sense strand
ggagguaguagaaauguca

SEQ ID NO: 1376617 - RNA, 19 nt, Homo sapiens
  misc_RNA (1)...(19): siRNA sense strand
gccagugaauuucugaguu

SEQ ID NO: 1376618 - RNA, 19 nt, Homo sapiens
  misc_RNA (1)...(19): siRNA sense strand
uacaaaugcuuggagauga

SEQ ID NO: 1376619 - RNA, 19 nt, Homo sapiens
  misc_RNA (1)...(19): siRNA sense strand
ugaacuugcugugcauaaa

SEQ ID NO: 1376620 - RNA, 19 nt, Homo sapiens
  misc_RNA (1)...(19): siRNA sense strand
ccucucauuuaucagaaua

SEQ ID NO: 1376621 - RNA, 19 nt, Homo sapiens
  misc_RNA (1)...(19): siRNA sense strand
caagagguccaagcuauug

SEQ ID NO: 1376622 - RNA, 19 nt, Homo sapiens
  misc_RNA (1)...(19): siRNA sense strand
ucgggauucucauacuuua

SEQ ID NO: 1376623 - RNA, 19 nt, Homo sapiens
  misc_RNA (1)...(19): siRNA sense strand
gguuauuguuucccaaaga

SEQ ID NO: 1376624 - RNA, 19 nt, Homo sapiens
  misc_RNA (1)...(19): siRNA sense strand
gccauaccuugcucuacua

SEQ ID NO: 1376625 - RNA, 19 nt, Homo sapiens
  misc_RNA (1)...(19): siRNA sense strand
caaggaggaggaucaaguu

SEQ ID NO: 1376626 - RNA, 19 nt, Homo sapiens
  misc_RNA (1)...(19): siRNA sense strand
ugugaugcauuccaacaaa

SEQ ID NO: 1376627 - RNA, 19 nt, Homo sapiens
  misc_RNA (1)...(19): siRNA sense strand
gaggugugaugcauuccaa

SEQ ID NO: 1376628 - RNA, 19 nt, Homo sapiens
  misc_RNA (1)...(19): siRNA sense strand
aaagauguuucucuguuuc

SEQ ID NO: 1376629 - RNA, 19 nt, Homo sapiens
  misc_RNA (1)...(19): siRNA sense strand
gggauguucuggugauauc

SEQ ID NO: 1376630 - RNA, 19 nt, Homo sapiens
  misc_RNA (1)...(19): siRNA sense strand
ugacaaaacuucucuagag

SEQ ID NO: 1376631 - RNA, 19 nt, Homo sapiens
  misc_RNA (1)...(19): siRNA sense strand
caggaagaguguucuaucu

SEQ ID NO: 1376632 - RNA, 19 nt, Homo sapiens
  misc_RNA (1)...(19): siRNA sense strand
ugaacgggauacauuacuu

SEQ ID NO: 1376633 - RNA, 19 nt, Homo sapiens
  misc_RNA (1)...(19): siRNA sense strand
ggugauaucagaagugcaa

SEQ ID NO: 1376634 - RNA, 19 nt, Homo sapiens
  misc_RNA (1)...(19): siRNA sense strand
agauaauucugguugaaga

SEQ ID NO: 1376635 - RNA, 19 nt, Homo sapiens
  misc_RNA (1)...(19): siRNA sense strand
aaaggagcaugguauucaa

SEQ ID NO: 1376636 - RNA, 19 nt, Homo sapiens
  misc_RNA (1)...(19): siRNA sense strand
aauaugaacgggauacauu

SEQ ID NO: 1376637 - RNA, 19 nt, Homo sapiens
  misc_RNA (1)...(19): siRNA sense strand
cuauagaagcuaacaagaa

SEQ ID NO: 1376638 - RNA, 19 nt, Homo sapiens
  misc_RNA (1)...(19): siRNA sense strand
cgauguccucuuauauuua

SEQ ID NO: 1376639 - RNA, 19 nt, Homo sapiens
  misc_RNA (1)...(19): siRNA sense strand
auuggucgauguccucuua

SEQ ID NO: 1376640 - RNA, 19 nt, Homo sapiens
  misc_RNA (1)...(19): siRNA sense strand
gaaguucuaaggaaguaug

SEQ ID NO: 1376641 - RNA, 19 nt, Homo sapiens
  misc_RNA (1)...(19): siRNA sense strand
ccuguggcaccaacaauua

SEQ ID NO: 1376642 - RNA, 19 nt, Homo sapiens
  misc_RNA (1)...(19): siRNA sense strand
gcgacacuuuggaagauug

SEQ ID NO: 1376643 - RNA, 19 nt, Homo sapiens
  misc_RNA (1)...(19): siRNA sense strand
ggaggaggaucaaguuuuc

SEQ ID NO: 1376644 - RNA, 19 nt, Homo sapiens
  misc_RNA (1)...(19): siRNA sense strand
gggauacauuacuuguuga

SEQ ID NO: 1376645 - RNA, 19 nt, Homo sapiens
  misc_RNA (1)...(19): siRNA sense strand
uaucaaaggagcaugguau

SEQ ID NO: 1376646 - RNA, 19 nt, Homo sapiens
  misc_RNA (1)...(19): siRNA sense strand
aaucaagcuuccauauguu

SEQ ID NO: 1376647 - RNA, 19 nt, Homo sapiens
  misc_RNA (1)...(19): siRNA sense strand
caccaaaacuacauagauu

SEQ ID NO: 1376648 - RNA, 19 nt, Homo sapiens
  misc_RNA (1)...(19): siRNA sense strand
caauaaacagccuccaguu

SEQ ID NO: 1376649 - RNA, 19 nt, Homo sapiens
  misc_RNA (1)...(19): siRNA sense strand
gagcgacaaaguauaacaa

SEQ ID NO: 1376650 - RNA, 19 nt, Homo sapiens
  misc_RNA (1)...(19): siRNA sense strand
ccaaggagacauggaagaa

SEQ ID NO: 1376651 - RNA, 19 nt, Homo sapiens
  misc_RNA (1)...(19): siRNA sense strand
gaauacacgcucuuuacuc

SEQ ID NO: 1376652 - RNA, 19 nt, Homo sapiens
  misc_RNA (1)...(19): siRNA sense strand
caguggagauaauaaucaa

SEQ ID NO: 1376653 - RNA, 19 nt, Homo sapiens
  misc_RNA (1)...(19): siRNA sense strand
gcgacaaaguauaacaagu

SEQ ID NO: 1376654 - RNA, 19 nt, Homo sapiens
  misc_RNA (1)...(19): siRNA sense strand
gcaugguauucaaguacaa

SEQ ID NO: 1376655 - RNA, 19 nt, Homo sapiens
  misc_RNA (1)...(19): siRNA sense strand
ugacagggaacauggaaug

SEQ ID NO: 1376656 - RNA, 19 nt, Homo sapiens
  misc_RNA (1)...(19): siRNA sense strand
ggaauacacgcucuuuacu

SEQ ID NO: 1376657 - RNA, 19 nt, Homo sapiens
  misc_RNA (1)...(19): siRNA sense strand
ucgguugcccucucauuua

SEQ ID NO: 1376658 - RNA, 19 nt, Homo sapiens
  misc_RNA (1)...(19): siRNA sense strand
gagagccagugaauuucug

SEQ ID NO: 1376659 - RNA, 19 nt, Homo sapiens
  misc_RNA (1)...(19): siRNA sense strand
aaaaguaucgggaaaauug

SEQ ID NO: 1376660 - RNA, 19 nt, Homo sapiens
  misc_RNA (1)...(19): siRNA sense strand
gcaugaacuugcugugcau

SEQ ID NO: 1376661 - RNA, 19 nt, Homo sapiens
  misc_RNA (1)...(19): siRNA sense strand
gaaucaagcuuccauaugu

SEQ ID NO: 1376662 - RNA, 19 nt, Homo sapiens
  misc_RNA (1)...(19): siRNA sense strand
gcaaagauguuucucuguu

SEQ ID NO: 1376663 - RNA, 19 nt, Homo sapiens
  misc_RNA (1)...(19): siRNA sense strand
acacaugccuggagacuua

SEQ ID NO: 1376664 - RNA, 19 nt, Homo sapiens
  misc_RNA (1)...(19): siRNA sense strand
caacaaagcccgaggauau

SEQ ID NO: 1376665 - RNA, 19 nt, Homo sapiens
  misc_RNA (1)...(19): siRNA sense strand
ccaaagaaauucaggaaga

SEQ ID NO: 1376666 - RNA, 19 nt, Homo sapiens
  misc_RNA (1)...(19): siRNA sense strand
cuacauagauuucuucaug

SEQ ID NO: 1376667 - RNA, 19 nt, Homo sapiens
  misc_RNA (1)...(19): siRNA sense strand
ggaaauugaugauauugug

SEQ ID NO: 1376668 - RNA, 19 nt, Homo sapiens
  misc_RNA (1)...(19): siRNA sense strand
aaacucagcuauugccaua

SEQ ID NO: 1376669 - RNA, 19 nt, Homo sapiens
  misc_RNA (1)...(19): siRNA sense strand
gaagauaauucugguugaa

SEQ ID NO: 1376670 - RNA, 19 nt, Homo sapiens
  misc_RNA (1)...(19): siRNA sense strand
caaagauguuucucuguuu

SEQ ID NO: 1376671 - RNA, 19 nt, Homo sapiens
  misc_RNA (1)...(19): siRNA sense strand
guacaagaguggauuaauc

SEQ ID NO: 1376672 - RNA, 19 nt, Homo sapiens
  misc_RNA (1)...(19): siRNA sense strand
ggaagaguguucuaucuca

SEQ ID NO: 1376673 - RNA, 19 nt, Homo sapiens
  misc_RNA (1)...(19): siRNA sense strand
gaaagacaacgaccuuaaa

SEQ ID NO: 1376674 - RNA, 19 nt, Homo sapiens
  misc_RNA (1)...(19): siRNA sense strand
ggaaagacaacgaccuuaa

SEQ ID NO: 1376675 - RNA, 19 nt, Homo sapiens
  misc_RNA (1)...(19): siRNA sense strand
caaagaguuucuacuaaga

SEQ ID NO: 1376676 - RNA, 19 nt, Homo sapiens
  misc_RNA (1)...(19): siRNA sense strand
ccucagugguuucuaauaa

SEQ ID NO: 1376677 - RNA, 19 nt, Homo sapiens
  misc_RNA (1)...(19): siRNA sense strand
ccagugaauuucugaguuu

SEQ ID NO: 1376678 - RNA, 19 nt, Homo sapiens
  misc_RNA (1)...(19): siRNA sense strand
cagggaacauggaaugaua

SEQ ID NO: 1376679 - RNA, 19 nt, Homo sapiens
  misc_RNA (1)...(19): siRNA sense strand
uaagagcgacaaaguauaa

SEQ ID NO: 1376680 - RNA, 19 nt, Homo sapiens
  misc_RNA (1)...(19): siRNA sense strand
gagcaucuuuaacagaauu

SEQ ID NO: 1376681 - RNA, 19 nt, Homo sapiens
  misc_RNA (1)...(19): siRNA sense strand
ccuggagacuuauuuaauu

SEQ ID NO: 1376682 - RNA, 19 nt, Homo sapiens
  misc_RNA (1)...(19): siRNA sense strand
cgacaaaguauaacaaguu

SEQ ID NO: 1376683 - RNA, 19 nt, Homo sapiens
  misc_RNA (1)...(19): siRNA sense strand
ggagcaugguauucaagua

SEQ ID NO: 1376684 - RNA, 19 nt, Homo sapiens
  misc_RNA (1)...(19): siRNA sense strand
gaagaguguucuaucucaa

SEQ ID NO: 1376685 - RNA, 19 nt, Homo sapiens
  misc_RNA (1)...(19): siRNA sense strand
ucaaagaguuucuacuaag

SEQ ID NO: 1376686 - RNA, 19 nt, Homo sapiens
  misc_RNA (1)...(19): siRNA sense strand
gagaacugauaagaagaua

SEQ ID NO: 1376687 - RNA, 19 nt, Homo sapiens
  misc_RNA (1)...(19): siRNA sense strand
gcucuuuacucagggaaua

SEQ ID NO: 1376688 - RNA, 19 nt, Homo sapiens
  misc_RNA (1)...(19): siRNA sense strand
cgggauacauuacuuguug

SEQ ID NO: 1376689 - RNA, 19 nt, Homo sapiens
  misc_RNA (1)...(19): siRNA sense strand
ucgauguccucuuauauuu

SEQ ID NO: 1376690 - RNA, 19 nt, Homo sapiens
  misc_RNA (1)...(19): siRNA sense strand
agauuuaccuaaccaguuu

SEQ ID NO: 1376691 - RNA, 19 nt, Homo sapiens
  misc_RNA (1)...(19): siRNA sense strand
ggaaguaugugaggauugg

SEQ ID NO: 1376692 - RNA, 19 nt, Homo sapiens
  misc_RNA (1)...(19): siRNA sense strand
gauaucagaagugcaauaa

SEQ ID NO: 1376693 - RNA, 19 nt, Homo sapiens
  misc_RNA (1)...(19): siRNA sense strand
gcaccaacaauuaugauga

SEQ ID NO: 1376694 - RNA, 19 nt, Homo sapiens
  misc_RNA (1)...(19): siRNA sense strand
aaacaggguggaucuauuu

SEQ ID NO: 1376695 - RNA, 19 nt, Homo sapiens
  misc_RNA (1)...(19): siRNA sense strand
gaugaucugagaacugaua

SEQ ID NO: 1376696 - RNA, 19 nt, Homo sapiens
  misc_RNA (1)...(19): siRNA sense strand
ggguggaucuauuuuauua

SEQ ID NO: 1376697 - RNA, 19 nt, Homo sapiens
  misc_RNA (1)...(19): siRNA sense strand
uaucagaagugcaauaaac

SEQ ID NO: 1376698 - RNA, 19 nt, Homo sapiens
  misc_RNA (1)...(19): siRNA sense strand
ugugagagccagugaauuu

SEQ ID NO: 1376699 - RNA, 19 nt, Homo sapiens
  misc_RNA (1)...(19): siRNA sense strand
caaaggagcaugguauuca

SEQ ID NO: 1376700 - RNA, 19 nt, Homo sapiens
  misc_RNA (1)...(19): siRNA sense strand
ccggaaaccuggucucuuc

SEQ ID NO: 1376701 - RNA, 19 nt, Homo sapiens
  misc_RNA (1)...(19): siRNA sense strand
gaagcgacacuuuggaaga

SEQ ID NO: 1376702 - RNA, 19 nt, Homo sapiens
  misc_RNA (1)...(19): siRNA sense strand
cgagaggugugaugcauuc

SEQ ID NO: 1376703 - RNA, 19 nt, Homo sapiens
  misc_RNA (1)...(19): siRNA sense strand
cagaugcugugcugucaaa

SEQ ID NO: 1376704 - RNA, 19 nt, Homo sapiens
  misc_RNA (1)...(19): siRNA sense strand
caccaacaauuaugaugaa

SEQ ID NO: 1376705 - RNA, 19 nt, Homo sapiens
  misc_RNA (1)...(19): siRNA sense strand
gaacgggauacauuacuug

SEQ ID NO: 1376706 - RNA, 19 nt, Homo sapiens
  misc_RNA (1)...(19): siRNA sense strand
gaucugagaacugauaaga

SEQ ID NO: 1376707 - RNA, 19 nt, Homo sapiens
  misc_RNA (1)...(19): siRNA sense strand
uaacaagaauggaggaaaa

SEQ ID NO: 1376708 - RNA, 19 nt, Homo sapiens
  misc_RNA (1)...(19): siRNA sense strand
caaguacaagaguggauua

SEQ ID NO: 1376709 - RNA, 19 nt, Homo sapiens
  misc_RNA (1)...(19): siRNA sense strand
gaaaccuggucucuuccuu

SEQ ID NO: 1376710 - RNA, 19 nt, Homo sapiens
  misc_RNA (1)...(19): siRNA sense strand
guuauuguuucccaaagaa

SEQ ID NO: 1376711 - RNA, 19 nt, Homo sapiens
  misc_RNA (1)...(19): siRNA sense strand
uacaugaaguucuaaggaa

SEQ ID NO: 1376712 - RNA, 19 nt, Homo sapiens
  misc_RNA (1)...(19): siRNA sense strand
ucugagaacugauaagaag

SEQ ID NO: 1376713 - RNA, 19 nt, Homo sapiens
  misc_RNA (1)...(19): siRNA sense strand
aauacacgcucuuuacuca

SEQ ID NO: 1376714 - RNA, 19 nt, Homo sapiens
  misc_RNA (1)...(19): siRNA sense strand
caacuuacggccaaggaaa

SEQ ID NO: 1376715 - RNA, 19 nt, Homo sapiens
  misc_RNA (1)...(19): siRNA sense strand
caaagaaauucaggaagag

SEQ ID NO: 1376716 - RNA, 19 nt, Homo sapiens
  misc_RNA (1)...(19): siRNA sense strand
ggagguaguagaaauguca

SEQ ID NO: 1376717 - RNA, 19 nt, Homo sapiens
  misc_RNA (1)...(19): siRNA sense strand
gccagugaauuucugaguu

SEQ ID NO: 1376718 - RNA, 19 nt, Homo sapiens
  misc_RNA (1)...(19): siRNA sense strand
uacaaaugcuuggagauga

SEQ ID NO: 1376719 - RNA, 19 nt, Homo sapiens
  misc_RNA (1)...(19): siRNA sense strand
ugaacuugcugugcauaaa

SEQ ID NO: 1376720 - RNA, 19 nt, Homo sapiens
  misc_RNA (1)...(19): siRNA sense strand
ccucucauuuaucagaaua

SEQ ID NO: 1376721 - RNA, 19 nt, Homo sapiens
  misc_RNA (1)...(19): siRNA sense strand
caagagguccaagcuauug

SEQ ID NO: 1376722 - RNA, 19 nt, Homo sapiens
  misc_RNA (1)...(19): siRNA sense strand
ucgggauucucauacuuua

SEQ ID NO: 1376723 - RNA, 19 nt, Homo sapiens
  misc_RNA (1)...(19): siRNA sense strand
gguuauuguuucccaaaga

SEQ ID NO: 1376724 - RNA, 19 nt, Homo sapiens
  misc_RNA (1)...(19): siRNA sense strand
gccauaccuugcucuacua

SEQ ID NO: 1376725 - RNA, 19 nt, Homo sapiens
  misc_RNA (1)...(19): siRNA sense strand
caaggaggaggaucaaguu

SEQ ID NO: 1376726 - RNA, 19 nt, Homo sapiens
  misc_RNA (1)...(19): siRNA sense strand
ugugaugcauuccaacaaa

SEQ ID NO: 1376727 - RNA, 19 nt, Homo sapiens
  misc_RNA (1)...(19): siRNA sense strand
gaggugugaugcauuccaa

SEQ ID NO: 1376728 - RNA, 19 nt, Homo sapiens
  misc_RNA (1)...(19): siRNA sense strand
aaagauguuucucuguuuc

SEQ ID NO: 1376729 - RNA, 19 nt, Homo sapiens
  misc_RNA (1)...(19): siRNA sense strand
gggauguucuggugauauc

SEQ ID NO: 1376730 - RNA, 19 nt, Homo sapiens
  misc_RNA (1)...(19): siRNA sense strand
ugacaaaacuucucuagag

SEQ ID NO: 1376731 - RNA, 19 nt, Homo sapiens
  misc_RNA (1)...(19): siRNA sense strand
caggaagaguguucuaucu

SEQ ID NO: 1376732 - RNA, 19 nt, Homo sapiens
  misc_RNA (1)...(19): siRNA sense strand
ugaacgggauacauuacuu

SEQ ID NO: 1376733 - RNA, 19 nt, Homo sapiens
  misc_RNA (1)...(19): siRNA sense strand
ggugauaucagaagugcaa

SEQ ID NO: 1376734 - RNA, 19 nt, Homo sapiens
  misc_RNA (1)...(19): siRNA sense strand
agauaauucugguugaaga

SEQ ID NO: 1376735 - RNA, 19 nt, Homo sapiens
  misc_RNA (1)...(19): siRNA sense strand
aaaggagcaugguauucaa

SEQ ID NO: 1376736 - RNA, 19 nt, Homo sapiens
  misc_RNA (1)...(19): siRNA sense strand
aauaugaacgggauacauu

SEQ ID NO: 1376737 - RNA, 19 nt, Homo sapiens
  misc_RNA (1)...(19): siRNA sense strand
cuauagaagcuaacaagaa

SEQ ID NO: 1376738 - RNA, 19 nt, Homo sapiens
  misc_RNA (1)...(19): siRNA sense strand
cgauguccucuuauauuua

SEQ ID NO: 1376739 - RNA, 19 nt, Homo sapiens
  misc_RNA (1)...(19): siRNA sense strand
auuggucgauguccucuua

SEQ ID NO: 1376740 - RNA, 19 nt, Homo sapiens
  misc_RNA (1)...(19): siRNA sense strand
gaaguucuaaggaaguaug

SEQ ID NO: 1376741 - RNA, 19 nt, Homo sapiens
  misc_RNA (1)...(19): siRNA sense strand
ccuguggcaccaacaauua

SEQ ID NO: 1376742 - RNA, 19 nt, Homo sapiens
  misc_RNA (1)...(19): siRNA sense strand
gcgacacuuuggaagauug

SEQ ID NO: 1376743 - RNA, 19 nt, Homo sapiens
  misc_RNA (1)...(19): siRNA sense strand
ggaggaggaucaaguuuuc

SEQ ID NO: 1376744 - RNA, 19 nt, Homo sapiens
  misc_RNA (1)...(19): siRNA sense strand
gggauacauuacuuguuga

SEQ ID NO: 1376745 - RNA, 19 nt, Homo sapiens
  misc_RNA (1)...(19): siRNA sense strand
uaucaaaggagcaugguau

SEQ ID NO: 1376746 - RNA, 19 nt, Homo sapiens
  misc_RNA (1)...(19): siRNA sense strand
aaucaagcuuccauauguu

SEQ ID NO: 1376747 - RNA, 19 nt, Homo sapiens
  misc_RNA (1)...(19): siRNA sense strand
caccaaaacuacauagauu

SEQ ID NO: 1376748 - RNA, 19 nt, Homo sapiens
  misc_RNA (1)...(19): siRNA sense strand
caauaaacagccuccaguu

SEQ ID NO: 1376749 - RNA, 19 nt, Homo sapiens
  misc_RNA (1)...(19): siRNA sense strand
gagcgacaaaguauaacaa

SEQ ID NO: 1376750 - RNA, 19 nt, Homo sapiens
  misc_RNA (1)...(19): siRNA sense strand
ccaaggagacauggaagaa

SEQ ID NO: 1376751 - RNA, 19 nt, Homo sapiens
  misc_RNA (1)...(19): siRNA sense strand
gaauacacgcucuuuacuc

SEQ ID NO: 1376752 - RNA, 19 nt, Homo sapiens
  misc_RNA (1)...(19): siRNA sense strand
caguggagauaauaaucaa

SEQ ID NO: 1376753 - RNA, 19 nt, Homo sapiens
  misc_RNA (1)...(19): siRNA sense strand
gcgacaaaguauaacaagu

SEQ ID NO: 1376754 - RNA, 19 nt, Homo sapiens
  misc_RNA (1)...(19): siRNA sense strand
gcaugguauucaaguacaa

SEQ ID NO: 1376755 - RNA, 19 nt, Homo sapiens
  misc_RNA (1)...(19): siRNA sense strand
ugacagggaacauggaaug

SEQ ID NO: 1376756 - RNA, 19 nt, Homo sapiens
  misc_RNA (1)...(19): siRNA sense strand
ggaauacacgcucuuuacu

SEQ ID NO: 1376757 - RNA, 19 nt, Homo sapiens
  misc_RNA (1)...(19): siRNA sense strand
ucgguugcccucucauuua

SEQ ID NO: 1376758 - RNA, 19 nt, Homo sapiens
  misc_RNA (1)...(19): siRNA sense strand
gagagccagugaauuucug

SEQ ID NO: 1376759 - RNA, 19 nt, Homo sapiens
  misc_RNA (1)...(19): siRNA sense strand
aaaaguaucgggaaaauug

SEQ ID NO: 1376760 - RNA, 19 nt, Homo sapiens
  misc_RNA (1)...(19): siRNA sense strand
gcaugaacuugcugugcau

SEQ ID NO: 1376761 - RNA, 19 nt, Homo sapiens
  misc_RNA (1)...(19): siRNA sense strand
gaaucaagcuuccauaugu

SEQ ID NO: 1376762 - RNA, 19 nt, Homo sapiens
  misc_RNA (1)...(19): siRNA sense strand
gcaaagauguuucucuguu

SEQ ID NO: 1376763 - RNA, 19 nt, Homo sapiens
  misc_RNA (1)...(19): siRNA sense strand
acacaugccuggagacuua

SEQ ID NO: 1376764 - RNA, 19 nt, Homo sapiens
  misc_RNA (1)...(19): siRNA sense strand
caacaaagcccgaggauau

SEQ ID NO: 1376765 - RNA, 19 nt, Homo sapiens
  misc_RNA (1)...(19): siRNA sense strand
ccaaagaaauucaggaaga

SEQ ID NO: 1376766 - RNA, 19 nt, Homo sapiens
  misc_RNA (1)...(19): siRNA sense strand
cuacauagauuucuucaug

SEQ ID NO: 1376767 - RNA, 19 nt, Homo sapiens
  misc_RNA (1)...(19): siRNA sense strand
ggaaauugaugauauugug

SEQ ID NO: 1376768 - RNA, 19 nt, Homo sapiens
  misc_RNA (1)...(19): siRNA sense strand
aaacucagcuauugccaua

SEQ ID NO: 1376769 - RNA, 19 nt, Homo sapiens
  misc_RNA (1)...(19): siRNA sense strand
gaagauaauucugguugaa

SEQ ID NO: 1376770 - RNA, 19 nt, Homo sapiens
  misc_RNA (1)...(19): siRNA sense strand
caaagauguuucucuguuu

SEQ ID NO: 1376771 - RNA, 19 nt, Homo sapiens
  misc_RNA (1)...(19): siRNA sense strand
guacaagaguggauuaauc

SEQ ID NO: 1376772 - RNA, 19 nt, Homo sapiens
  misc_RNA (1)...(19): siRNA sense strand
ggaagaguguucuaucuca

SEQ ID NO: 1376773 - RNA, 19 nt, Homo sapiens
  misc_RNA (1)...(19): siRNA sense strand
gaaagacaacgaccuuaaa

SEQ ID NO: 1376774 - RNA, 19 nt, Homo sapiens
  misc_RNA (1)...(19): siRNA sense strand
ggaaagacaacgaccuuaa

SEQ ID NO: 1376775 - RNA, 19 nt, Homo sapiens
  misc_RNA (1)...(19): siRNA sense strand
caaagaguuucuacuaaga

SEQ ID NO: 1376776 - RNA, 19 nt, Homo sapiens
  misc_RNA (1)...(19): siRNA sense strand
ccucagugguuucuaauaa

SEQ ID NO: 1376777 - RNA, 19 nt, Homo sapiens
  misc_RNA (1)...(19): siRNA sense strand
ccagugaauuucugaguuu

SEQ ID NO: 1376778 - RNA, 19 nt, Homo sapiens
  misc_RNA (1)...(19): siRNA sense strand
cagggaacauggaaugaua

SEQ ID NO: 1376779 - RNA, 19 nt, Homo sapiens
  misc_RNA (1)...(19): siRNA sense strand
uaagagcgacaaaguauaa

SEQ ID NO: 1376780 - RNA, 19 nt, Homo sapiens
  misc_RNA (1)...(19): siRNA sense strand
gagcaucuuuaacagaauu

SEQ ID NO: 1376781 - RNA, 19 nt, Homo sapiens
  misc_RNA (1)...(19): siRNA sense strand
ccuggagacuuauuuaauu

SEQ ID NO: 1376782 - RNA, 19 nt, Homo sapiens
  misc_RNA (1)...(19): siRNA sense strand
cgacaaaguauaacaaguu

SEQ ID NO: 1376783 - RNA, 19 nt, Homo sapiens
  misc_RNA (1)...(19): siRNA sense strand
ggagcaugguauucaagua

SEQ ID NO: 1376784 - RNA, 19 nt, Homo sapiens
  misc_RNA (1)...(19): siRNA sense strand
gaagaguguucuaucucaa

SEQ ID NO: 1376785 - RNA, 19 nt, Homo sapiens
  misc_RNA (1)...(19): siRNA sense strand
ucaaagaguuucuacuaag

SEQ ID NO: 1376786 - RNA, 19 nt, Homo sapiens
  misc_RNA (1)...(19): siRNA sense strand
gagaacugauaagaagaua

SEQ ID NO: 1376787 - RNA, 19 nt, Homo sapiens
  misc_RNA (1)...(19): siRNA sense strand
gcucuuuacucagggaaua

SEQ ID NO: 1376788 - RNA, 19 nt, Homo sapiens
  misc_RNA (1)...(19): siRNA sense strand
cgggauacauuacuuguug

SEQ ID NO: 1376789 - RNA, 19 nt, Homo sapiens
  misc_RNA (1)...(19): siRNA sense strand
ucgauguccucuuauauuu

SEQ ID NO: 1376790 - RNA, 19 nt, Homo sapiens
  misc_RNA (1)...(19): siRNA sense strand
agauuuaccuaaccaguuu

SEQ ID NO: 1376791 - RNA, 19 nt, Homo sapiens
  misc_RNA (1)...(19): siRNA sense strand
ggaaguaugugaggauugg

SEQ ID NO: 1376792 - RNA, 19 nt, Homo sapiens
  misc_RNA (1)...(19): siRNA sense strand
gauaucagaagugcaauaa

SEQ ID NO: 1376793 - RNA, 19 nt, Homo sapiens
  misc_RNA (1)...(19): siRNA sense strand
gcaccaacaauuaugauga

SEQ ID NO: 1376794 - RNA, 19 nt, Homo sapiens
  misc_RNA (1)...(19): siRNA sense strand
aaacaggguggaucuauuu

SEQ ID NO: 1376795 - RNA, 19 nt, Homo sapiens
  misc_RNA (1)...(19): siRNA sense strand
gaugaucugagaacugaua

SEQ ID NO: 1376796 - RNA, 19 nt, Homo sapiens
  misc_RNA (1)...(19): siRNA sense strand
ggguggaucuauuuuauua

SEQ ID NO: 1376797 - RNA, 19 nt, Homo sapiens
  misc_RNA (1)...(19): siRNA sense strand
uaucagaagugcaauaaac

SEQ ID NO: 1376798 - RNA, 19 nt, Homo sapiens
  misc_RNA (1)...(19): siRNA sense strand
ugugagagccagugaauuu

SEQ ID NO: 1376799 - RNA, 19 nt, Homo sapiens
  misc_RNA (1)...(19): siRNA sense strand
caaaggagcaugguauuca

SEQ ID NO: 1376800 - RNA, 19 nt, Homo sapiens
  misc_RNA (1)...(19): siRNA sense strand
ccggaaaccuggucucuuc

SEQ ID NO: 1376801 - RNA, 19 nt, Homo sapiens
  misc_RNA (1)...(19): siRNA sense strand
gaagcgacacuuuggaaga

SEQ ID NO: 1376802 - RNA, 19 nt, Homo sapiens
  misc_RNA (1)...(19): siRNA sense strand
cgagaggugugaugcauuc

SEQ ID NO: 1376803 - RNA, 19 nt, Homo sapiens
  misc_RNA (1)...(19): siRNA sense strand
cagaugcugugcugucaaa

SEQ ID NO: 1376804 - RNA, 19 nt, Homo sapiens
  misc_RNA (1)...(19): siRNA sense strand
caccaacaauuaugaugaa

SEQ ID NO: 1376805 - RNA, 19 nt, Homo sapiens
  misc_RNA (1)...(19): siRNA sense strand
gaacgggauacauuacuug

SEQ ID NO: 1376806 - RNA, 19 nt, Homo sapiens
  misc_RNA (1)...(19): siRNA sense strand
gaucugagaacugauaaga

SEQ ID NO: 1376807 - RNA, 19 nt, Homo sapiens
  misc_RNA (1)...(19): siRNA sense strand
uaacaagaauggaggaaaa

SEQ ID NO: 1376808 - RNA, 19 nt, Homo sapiens
  misc_RNA (1)...(19): siRNA sense strand
caaguacaagaguggauua

SEQ ID NO: 1376809 - RNA, 19 nt, Homo sapiens
  misc_RNA (1)...(19): siRNA sense strand
gaaaccuggucucuuccuu

SEQ ID NO: 1376810 - RNA, 19 nt, Homo sapiens
  misc_RNA (1)...(19): siRNA sense strand
guuauuguuucccaaagaa

SEQ ID NO: 1376811 - RNA, 19 nt, Homo sapiens
  misc_RNA (1)...(19): siRNA sense strand
uacaugaaguucuaaggaa

SEQ ID NO: 1376812 - RNA, 19 nt, Homo sapiens
  misc_RNA (1)...(19): siRNA sense strand
ucugagaacugauaagaag

SEQ ID NO: 1376813 - RNA, 19 nt, Homo sapiens
  misc_RNA (1)...(19): siRNA sense strand
aauacacgcucuuuacuca

SEQ ID NO: 1376814 - RNA, 19 nt, Homo sapiens
  misc_RNA (1)...(19): siRNA sense strand
caacuuacggccaaggaaa

SEQ ID NO: 1376815 - RNA, 19 nt, Homo sapiens
  misc_RNA (1)...(19): siRNA sense strand
caaagaaauucaggaagag

SEQ ID NO: 1376816 - RNA, 19 nt, Homo sapiens
  misc_RNA (1)...(19): siRNA sense strand
ggagguaguagaaauguca

SEQ ID NO: 1376817 - RNA, 19 nt, Homo sapiens
  misc_RNA (1)...(19): siRNA sense strand
gccagugaauuucugaguu

SEQ ID NO: 1376818 - RNA, 19 nt, Homo sapiens
  misc_RNA (1)...(19): siRNA sense strand
uacaaaugcuuggagauga

SEQ ID NO: 1376819 - RNA, 19 nt, Homo sapiens
  misc_RNA (1)...(19): siRNA sense strand
ugaacuugcugugcauaaa

SEQ ID NO: 1376820 - RNA, 19 nt, Homo sapiens
  misc_RNA (1)...(19): siRNA sense strand
ccucucauuuaucagaaua

SEQ ID NO: 1376821 - RNA, 19 nt, Homo sapiens
  misc_RNA (1)...(19): siRNA sense strand
caagagguccaagcuauug

SEQ ID NO: 1376822 - RNA, 19 nt, Homo sapiens
  misc_RNA (1)...(19): siRNA sense strand
ucgggauucucauacuuua

SEQ ID NO: 1376823 - RNA, 19 nt, Homo sapiens
  misc_RNA (1)...(19): siRNA sense strand
gguuauuguuucccaaaga

SEQ ID NO: 1376824 - RNA, 19 nt, Homo sapiens
  misc_RNA (1)...(19): siRNA sense strand
gccauaccuugcucuacua

SEQ ID NO: 1376825 - RNA, 19 nt, Homo sapiens
  misc_RNA (1)...(19): siRNA sense strand
caaggaggaggaucaaguu

SEQ ID NO: 1376826 - RNA, 19 nt, Homo sapiens
  misc_RNA (1)...(19): siRNA sense strand
ugugaugcauuccaacaaa

SEQ ID NO: 1376827 - RNA, 19 nt, Homo sapiens
  misc_RNA (1)...(19): siRNA sense strand
gaggugugaugcauuccaa

SEQ ID NO: 1376828 - RNA, 19 nt, Homo sapiens
  misc_RNA (1)...(19): siRNA sense strand
aaagauguuucucuguuuc

SEQ ID NO: 1376829 - RNA, 19 nt, Homo sapiens
  misc_RNA (1)...(19): siRNA sense strand
gggauguucuggugauauc

SEQ ID NO: 1376830 - RNA, 19 nt, Homo sapiens
  misc_RNA (1)...(19): siRNA sense strand
ugacaaaacuucucuagag

SEQ ID NO: 1376831 - RNA, 19 nt, Homo sapiens
  misc_RNA (1)...(19): siRNA sense strand
caggaagaguguucuaucu

SEQ ID NO: 1376832 - RNA, 19 nt, Homo sapiens
  misc_RNA (1)...(19): siRNA sense strand
ugaacgggauacauuacuu

SEQ ID NO: 1376833 - RNA, 19 nt, Homo sapiens
  misc_RNA (1)...(19): siRNA sense strand
ggugauaucagaagugcaa

SEQ ID NO: 1376834 - RNA, 19 nt, Homo sapiens
  misc_RNA (1)...(19): siRNA sense strand
agauaauucugguugaaga

SEQ ID NO: 1376835 - RNA, 19 nt, Homo sapiens
  misc_RNA (1)...(19): siRNA sense strand
aaaggagcaugguauucaa

SEQ ID NO: 1376836 - RNA, 19 nt, Homo sapiens
  misc_RNA (1)...(19): siRNA sense strand
aauaugaacgggauacauu

SEQ ID NO: 1376837 - RNA, 19 nt, Homo sapiens
  misc_RNA (1)...(19): siRNA sense strand
cuauagaagcuaacaagaa

SEQ ID NO: 1376838 - RNA, 19 nt, Homo sapiens
  misc_RNA (1)...(19): siRNA sense strand
cgauguccucuuauauuua

SEQ ID NO: 1376839 - RNA, 19 nt, Homo sapiens
  misc_RNA (1)...(19): siRNA sense strand
auuggucgauguccucuua

SEQ ID NO: 1376840 - RNA, 19 nt, Homo sapiens
  misc_RNA (1)...(19): siRNA sense strand
gaaguucuaaggaaguaug

SEQ ID NO: 1376841 - RNA, 19 nt, Homo sapiens
  misc_RNA (1)...(19): siRNA sense strand
ccuguggcaccaacaauua

SEQ ID NO: 1376842 - RNA, 19 nt, Homo sapiens
  misc_RNA (1)...(19): siRNA sense strand
gcgacacuuuggaagauug

SEQ ID NO: 1376843 - RNA, 19 nt, Homo sapiens
  misc_RNA (1)...(19): siRNA sense strand
ggaggaggaucaaguuuuc

SEQ ID NO: 1376844 - RNA, 19 nt, Homo sapiens
  misc_RNA (1)...(19): siRNA sense strand
gggauacauuacuuguuga

SEQ ID NO: 1376845 - RNA, 19 nt, Homo sapiens
  misc_RNA (1)...(19): siRNA sense strand
uaucaaaggagcaugguau

SEQ ID NO: 1376846 - RNA, 19 nt, Homo sapiens
  misc_RNA (1)...(19): siRNA sense strand
aaucaagcuuccauauguu

SEQ ID NO: 1376847 - RNA, 19 nt, Homo sapiens
  misc_RNA (1)...(19): siRNA sense strand
caccaaaacuacauagauu

SEQ ID NO: 1376848 - RNA, 19 nt, Homo sapiens
  misc_RNA (1)...(19): siRNA sense strand
caauaaacagccuccaguu

SEQ ID NO: 1376849 - RNA, 19 nt, Homo sapiens
  misc_RNA (1)...(19): siRNA sense strand
gagcgacaaaguauaacaa

SEQ ID NO: 1376850 - RNA, 19 nt, Homo sapiens
  misc_RNA (1)...(19): siRNA sense strand
ccaaggagacauggaagaa

SEQ ID NO: 1376851 - RNA, 19 nt, Homo sapiens
  misc_RNA (1)...(19): siRNA sense strand
gaauacacgcucuuuacuc

SEQ ID NO: 1376852 - RNA, 19 nt, Homo sapiens
  misc_RNA (1)...(19): siRNA sense strand
caguggagauaauaaucaa

SEQ ID NO: 1376853 - RNA, 19 nt, Homo sapiens
  misc_RNA (1)...(19): siRNA sense strand
gcgacaaaguauaacaagu

SEQ ID NO: 1376854 - RNA, 19 nt, Homo sapiens
  misc_RNA (1)...(19): siRNA sense strand
gcaugguauucaaguacaa

SEQ ID NO: 1376855 - RNA, 19 nt, Homo sapiens
  misc_RNA (1)...(19): siRNA sense strand
ugacagggaacauggaaug

SEQ ID NO: 1376856 - RNA, 19 nt, Homo sapiens
  misc_RNA (1)...(19): siRNA sense strand
ggaauacacgcucuuuacu

SEQ ID NO: 1376857 - RNA, 19 nt, Homo sapiens
  misc_RNA (1)...(19): siRNA sense strand
ucgguugcccucucauuua

SEQ ID NO: 1376858 - RNA, 19 nt, Homo sapiens
  misc_RNA (1)...(19): siRNA sense strand
gagagccagugaauuucug

SEQ ID NO: 1376859 - RNA, 19 nt, Homo sapiens
  misc_RNA (1)...(19): siRNA sense strand
aaaaguaucgggaaaauug

SEQ ID NO: 1376860 - RNA, 19 nt, Homo sapiens
  misc_RNA (1)...(19): siRNA sense strand
gcaugaacuugcugugcau

SEQ ID NO: 1376861 - RNA, 19 nt, Homo sapiens
  misc_RNA (1)...(19): siRNA sense strand
gaacaaagauggaagcauu

SEQ ID NO: 1376862 - RNA, 19 nt, Homo sapiens
  misc_RNA (1)...(19): siRNA sense strand
gaugaaaucugugcugaua

SEQ ID NO: 1376863 - RNA, 19 nt, Homo sapiens
  misc_RNA (1)...(19): siRNA sense strand
gaauuucacucacauacaa

SEQ ID NO: 1376864 - RNA, 19 nt, Homo sapiens
  misc_RNA (1)...(19): siRNA sense strand
ccaaugaccugcacuugaa

SEQ ID NO: 1376865 - RNA, 19 nt, Homo sapiens
  misc_RNA (1)...(19): siRNA sense strand
gagaggaacccguauguuu

SEQ ID NO: 1376866 - RNA, 19 nt, Homo sapiens
  misc_RNA (1)...(19): siRNA sense strand
guacaaucguugacaauga

SEQ ID NO: 1376867 - RNA, 19 nt, Homo sapiens
  misc_RNA (1)...(19): siRNA sense strand
ucaauaagcuugccaacau

SEQ ID NO: 1376868 - RNA, 19 nt, Homo sapiens
  misc_RNA (1)...(19): siRNA sense strand
gcaguuauccaccuucuuu

SEQ ID NO: 1376869 - RNA, 19 nt, Homo sapiens
  misc_RNA (1)...(19): siRNA sense strand
cgaauaugcugaugaacaa

SEQ ID NO: 1376870 - RNA, 19 nt, Homo sapiens
  misc_RNA (1)...(19): siRNA sense strand
aaacagcgccaucaagaua

SEQ ID NO: 1376871 - RNA, 19 nt, Homo sapiens
  misc_RNA (1)...(19): siRNA sense strand
uuacaaagcucgacugaag

SEQ ID NO: 1376872 - RNA, 19 nt, Homo sapiens
  misc_RNA (1)...(19): siRNA sense strand
cagaauauccgcauugaaa

SEQ ID NO: 1376873 - RNA, 19 nt, Homo sapiens
  misc_RNA (1)...(19): siRNA sense strand
caauaagcuugccaacaua

SEQ ID NO: 1376874 - RNA, 19 nt, Homo sapiens
  misc_RNA (1)...(19): siRNA sense strand
gaacagagggaaccacgaa

SEQ ID NO: 1376875 - RNA, 19 nt, Homo sapiens
  misc_RNA (1)...(19): siRNA sense strand
gaucugaccuggaaaucau

SEQ ID NO: 1376876 - RNA, 19 nt, Homo sapiens
  misc_RNA (1)...(19): siRNA sense strand
caggagaucugacacauca

SEQ ID NO: 1376877 - RNA, 19 nt, Homo sapiens
  misc_RNA (1)...(19): siRNA sense strand
ggagaucccucaguucgaa

SEQ ID NO: 1376878 - RNA, 19 nt, Homo sapiens
  misc_RNA (1)...(19): siRNA sense strand
gggcugaacuuaccaugga

SEQ ID NO: 1376879 - RNA, 19 nt, Homo sapiens
  misc_RNA (1)...(19): siRNA sense strand
auacagaucugaccuggaa

SEQ ID NO: 1376880 - RNA, 19 nt, Homo sapiens
  misc_RNA (1)...(19): siRNA sense strand
gaccacagacuugaauuua

SEQ ID NO: 1376881 - RNA, 19 nt, Homo sapiens
  misc_RNA (1)...(19): siRNA sense strand
gauggaagcauugacuuua

SEQ ID NO: 1376882 - RNA, 19 nt, Homo sapiens
  misc_RNA (1)...(19): siRNA sense strand
ccaaagagguaacaaucug

SEQ ID NO: 1376883 - RNA, 19 nt, Homo sapiens
  misc_RNA (1)...(19): siRNA sense strand
gaaagaauuccauagagau

SEQ ID NO: 1376884 - RNA, 19 nt, Homo sapiens
  misc_RNA (1)...(19): siRNA sense strand
ccauagagauccuaaugau

SEQ ID NO: 1376885 - RNA, 19 nt, Homo sapiens
  misc_RNA (1)...(19): siRNA sense strand
gagggaaccacgaagauuu

SEQ ID NO: 1376886 - RNA, 19 nt, Homo sapiens
  misc_RNA (1)...(19): siRNA sense strand
ccaagaaaguccugaagca

SEQ ID NO: 1376887 - RNA, 19 nt, Homo sapiens
  misc_RNA (1)...(19): siRNA sense strand
guucgaaucugguaaacau

SEQ ID NO: 1376888 - RNA, 19 nt, Homo sapiens
  misc_RNA (1)...(19): siRNA sense strand
cuaaugauccuguguguga

SEQ ID NO: 1376889 - RNA, 19 nt, Homo sapiens
  misc_RNA (1)...(19): siRNA sense strand
cagcaguucuucaacgaaa

SEQ ID NO: 1376890 - RNA, 19 nt, Homo sapiens
  misc_RNA (1)...(19): siRNA sense strand
uaauggacuugaacaaaga

SEQ ID NO: 1376891 - RNA, 19 nt, Homo sapiens
  misc_RNA (1)...(19): siRNA sense strand
guagaucgaggaaagaauu

SEQ ID NO: 1376892 - RNA, 19 nt, Homo sapiens
  misc_RNA (1)...(19): siRNA sense strand
ccauggagaucccucaguu

SEQ ID NO: 1376893 - RNA, 19 nt, Homo sapiens
  misc_RNA (1)...(19): siRNA sense strand
ucuuagaggugcuauuuga

SEQ ID NO: 1376894 - RNA, 19 nt, Homo sapiens
  misc_RNA (1)...(19): siRNA sense strand
aaacuucucccuccaaaga

SEQ ID NO: 1376895 - RNA, 19 nt, Homo sapiens
  misc_RNA (1)...(19): siRNA sense strand
agaaaguccugaagcaaau

SEQ ID NO: 1376896 - RNA, 19 nt, Homo sapiens
  misc_RNA (1)...(19): siRNA sense strand
gauaugaagacuugaugaa

SEQ ID NO: 1376897 - RNA, 19 nt, Homo sapiens
  misc_RNA (1)...(19): siRNA sense strand
guagagaggaacaagauga

SEQ ID NO: 1376898 - RNA, 19 nt, Homo sapiens
  misc_RNA (1)...(19): siRNA sense strand
acacacauauacauaagga

SEQ ID NO: 1376899 - RNA, 19 nt, Homo sapiens
  misc_RNA (1)...(19): siRNA sense strand
gaaaacagcgccaucaaga

SEQ ID NO: 1376900 - RNA, 19 nt, Homo sapiens
  misc_RNA (1)...(19): siRNA sense strand
ccacagacuugaauuuacu

SEQ ID NO: 1376901 - RNA, 19 nt, Homo sapiens
  misc_RNA (1)...(19): siRNA sense strand
gguauggcuucacgaaaga

SEQ ID NO: 1376902 - RNA, 19 nt, Homo sapiens
  misc_RNA (1)...(19): siRNA sense strand
ccacgaagauuuuaugaug

SEQ ID NO: 1376903 - RNA, 19 nt, Homo sapiens
  misc_RNA (1)...(19): siRNA sense strand
ucaugcccauuaugucuua

SEQ ID NO: 1376904 - RNA, 19 nt, Homo sapiens
  misc_RNA (1)...(19): siRNA sense strand
guaccgagguuacaaagcu

SEQ ID NO: 1376905 - RNA, 19 nt, Homo sapiens
  misc_RNA (1)...(19): siRNA sense strand
gaauuuacuccaccgugua

SEQ ID NO: 1376906 - RNA, 19 nt, Homo sapiens
  misc_RNA (1)...(19): siRNA sense strand
caacggaaacaaacagaga

SEQ ID NO: 1376907 - RNA, 19 nt, Homo sapiens
  misc_RNA (1)...(19): siRNA sense strand
gauacuucaugcccauuau

SEQ ID NO: 1376908 - RNA, 19 nt, Homo sapiens
  misc_RNA (1)...(19): siRNA sense strand
guacaagaggcucauucua

SEQ ID NO: 1376909 - RNA, 19 nt, Homo sapiens
  misc_RNA (1)...(19): siRNA sense strand
ccaucaagauauuaagaga

SEQ ID NO: 1376910 - RNA, 19 nt, Homo sapiens
  misc_RNA (1)...(19): siRNA sense strand
uacaaucguugacaaugaa

SEQ ID NO: 1376911 - RNA, 19 nt, Homo sapiens
  misc_RNA (1)...(19): siRNA sense strand
cauaauggacuugaacaaa

SEQ ID NO: 1376912 - RNA, 19 nt, Homo sapiens
  misc_RNA (1)...(19): siRNA sense strand
gaucuccguggaagaauuu

SEQ ID NO: 1376913 - RNA, 19 nt, Homo sapiens
  misc_RNA (1)...(19): siRNA sense strand
aaacaaacagagaccauga

SEQ ID NO: 1376914 - RNA, 19 nt, Homo sapiens
  misc_RNA (1)...(19): siRNA sense strand
gagaggaacaagaugaaau

SEQ ID NO: 1376915 - RNA, 19 nt, Homo sapiens
  misc_RNA (1)...(19): siRNA sense strand
ggaaaacuacacacauaua

SEQ ID NO: 1376916 - RNA, 19 nt, Homo sapiens
  misc_RNA (1)...(19): siRNA sense strand
uggaaacguugaauacaug

SEQ ID NO: 1376917 - RNA, 19 nt, Homo sapiens
  misc_RNA (1)...(19): siRNA sense strand
ucacucacauacaaacuuc

SEQ ID NO: 1376918 - RNA, 19 nt, Homo sapiens
  misc_RNA (1)...(19): siRNA sense strand
acaaacuucucccuccaaa

SEQ ID NO: 1376919 - RNA, 19 nt, Homo sapiens
  misc_RNA (1)...(19): siRNA sense strand
uaagagagagagugauuuc

SEQ ID NO: 1376920 - RNA, 19 nt, Homo sapiens
  misc_RNA (1)...(19): siRNA sense strand
acagagaccaugacacuga

SEQ ID NO: 1376921 - RNA, 19 nt, Homo sapiens
  misc_RNA (1)...(19): siRNA sense strand
uaucagagaccacagacuu

SEQ ID NO: 1376922 - RNA, 19 nt, Homo sapiens
  misc_RNA (1)...(19): siRNA sense strand
aaacagagaccaugacacu

SEQ ID NO: 1376923 - RNA, 19 nt, Homo sapiens
  misc_RNA (1)...(19): siRNA sense strand
auaauggacuugaacaaag

SEQ ID NO: 1376924 - RNA, 19 nt, Homo sapiens
  misc_RNA (1)...(19): siRNA sense strand
uaugaagacuugaugaaac

SEQ ID NO: 1376925 - RNA, 19 nt, Homo sapiens
  misc_RNA (1)...(19): siRNA sense strand
cuacacacauauacauaag

SEQ ID NO: 1376926 - RNA, 19 nt, Homo sapiens
  misc_RNA (1)...(19): siRNA sense strand
cauugacacugaucacuca

SEQ ID NO: 1376927 - RNA, 19 nt, Homo sapiens
  misc_RNA (1)...(19): siRNA sense strand
aagaaaguccugaagcaaa

SEQ ID NO: 1376928 - RNA, 19 nt, Homo sapiens
  misc_RNA (1)...(19): siRNA sense strand
ccaacauaauggacuugaa

SEQ ID NO: 1376929 - RNA, 19 nt, Homo sapiens
  misc_RNA (1)...(19): siRNA sense strand
gaugauucccaagucaaua

SEQ ID NO: 1376930 - RNA, 19 nt, Homo sapiens
  misc_RNA (1)...(19): siRNA sense strand
acaagaggcucauucuacu

SEQ ID NO: 1376931 - RNA, 19 nt, Homo sapiens
  misc_RNA (1)...(19): siRNA sense strand
gaacugguaccgagguuac

SEQ ID NO: 1376932 - RNA, 19 nt, Homo sapiens
  misc_RNA (1)...(19): siRNA sense strand
cgaaucugguaaacauaga

SEQ ID NO: 1376933 - RNA, 19 nt, Homo sapiens
  misc_RNA (1)...(19): siRNA sense strand
ggacuugaacaaagaugga

SEQ ID NO: 1376934 - RNA, 19 nt, Homo sapiens
  misc_RNA (1)...(19): siRNA sense strand
caagaaaguccugaagcaa

SEQ ID NO: 1376935 - RNA, 19 nt, Homo sapiens
  misc_RNA (1)...(19): siRNA sense strand
ggaugcagcaguucuucaa

SEQ ID NO: 1376936 - RNA, 19 nt, Homo sapiens
  misc_RNA (1)...(19): siRNA sense strand
ugaugaaucugagguaugg

SEQ ID NO: 1376937 - RNA, 19 nt, Homo sapiens
  misc_RNA (1)...(19): siRNA sense strand
caagauauuaagagagaga

SEQ ID NO: 1376938 - RNA, 19 nt, Homo sapiens
  misc_RNA (1)...(19): siRNA sense strand
uugaauacauguccagcuu

SEQ ID NO: 1376939 - RNA, 19 nt, Homo sapiens
  misc_RNA (1)...(19): siRNA sense strand
ggaaacaaacagagaccau

SEQ ID NO: 1376940 - RNA, 19 nt, Homo sapiens
  misc_RNA (1)...(19): siRNA sense strand
auggaagcauugacuuuaa

SEQ ID NO: 1376941 - RNA, 19 nt, Homo sapiens
  misc_RNA (1)...(19): siRNA sense strand
gaaggccagacaacacuau

SEQ ID NO: 1376942 - RNA, 19 nt, Homo sapiens
  misc_RNA (1)...(19): siRNA sense strand
gagcugcguugaucaucca

SEQ ID NO: 1376943 - RNA, 19 nt, Homo sapiens
  misc_RNA (1)...(19): siRNA sense strand
uuagaggugcuauuugaaa

SEQ ID NO: 1376944 - RNA, 19 nt, Homo sapiens
  misc_RNA (1)...(19): siRNA sense strand
caacauaauggacuugaac

SEQ ID NO: 1376945 - RNA, 19 nt, Homo sapiens
  misc_RNA (1)...(19): siRNA sense strand
cccaaucgguacaaucguu

SEQ ID NO: 1376946 - RNA, 19 nt, Homo sapiens
  misc_RNA (1)...(19): siRNA sense strand
ugucuuagaggugcuauuu

SEQ ID NO: 1376947 - RNA, 19 nt, Homo sapiens
  misc_RNA (1)...(19): siRNA sense strand
uggaagcauugacuuuaau

SEQ ID NO: 1376948 - RNA, 19 nt, Homo sapiens
  misc_RNA (1)...(19): siRNA sense strand
ggauaucagagaccacaga

SEQ ID NO: 1376949 - RNA, 19 nt, Homo sapiens
  misc_RNA (1)...(19): siRNA sense strand
acagcgccaucaagauauu

SEQ ID NO: 1376950 - RNA, 19 nt, Homo sapiens
  misc_RNA (1)...(19): siRNA sense strand
cgugccauguggaaacuuu

SEQ ID NO: 1376951 - RNA, 19 nt, Homo sapiens
  misc_RNA (1)...(19): siRNA sense strand
gagguauggcuucacgaaa

SEQ ID NO: 1376952 - RNA, 19 nt, Homo sapiens
  misc_RNA (1)...(19): siRNA sense strand
aaacauagaccaaaaugga

SEQ ID NO: 1376953 - RNA, 19 nt, Homo sapiens
  misc_RNA (1)...(19): siRNA sense strand
acugagagcugcguugauc

SEQ ID NO: 1376954 - RNA, 19 nt, Homo sapiens
  misc_RNA (1)...(19): siRNA sense strand
gaggcucauucuacucuag

SEQ ID NO: 1376955 - RNA, 19 nt, Homo sapiens
  misc_RNA (1)...(19): siRNA sense strand
caacuucaagaccacagaa

SEQ ID NO: 1376956 - RNA, 19 nt, Homo sapiens
  misc_RNA (1)...(19): siRNA sense strand
ugaccuuacucgugcuuuc

SEQ ID NO: 1376957 - RNA, 19 nt, Homo sapiens
  misc_RNA (1)...(19): siRNA sense strand
uaugaugaaucugagguau

SEQ ID NO: 1376958 - RNA, 19 nt, Homo sapiens
  misc_RNA (1)...(19): siRNA sense strand
uacaagaggcucauucuac

SEQ ID NO: 1376959 - RNA, 19 nt, Homo sapiens
  misc_RNA (1)...(19): siRNA sense strand
uaagcuugccaacauaaug

SEQ ID NO: 1376960 - RNA, 19 nt, Homo sapiens
  misc_RNA (1)...(19): siRNA sense strand
ugaucuccguggaagaauu

SEQ ID NO: 1376961 - RNA, 19 nt, Homo sapiens
  misc_RNA (1)...(19): siRNA sense strand
gaacaaagauggaagcauu

SEQ ID NO: 1376962 - RNA, 19 nt, Homo sapiens
  misc_RNA (1)...(19): siRNA sense strand
gaugaaaucugugcugaua

SEQ ID NO: 1376963 - RNA, 19 nt, Homo sapiens
  misc_RNA (1)...(19): siRNA sense strand
gaauuucacucacauacaa

SEQ ID NO: 1376964 - RNA, 19 nt, Homo sapiens
  misc_RNA (1)...(19): siRNA sense strand
ccaaugaccugcacuugaa

SEQ ID NO: 1376965 - RNA, 19 nt, Homo sapiens
  misc_RNA (1)...(19): siRNA sense strand
gagaggaacccguauguuu

SEQ ID NO: 1376966 - RNA, 19 nt, Homo sapiens
  misc_RNA (1)...(19): siRNA sense strand
guacaaucguugacaauga

SEQ ID NO: 1376967 - RNA, 19 nt, Homo sapiens
  misc_RNA (1)...(19): siRNA sense strand
ucaauaagcuugccaacau

SEQ ID NO: 1376968 - RNA, 19 nt, Homo sapiens
  misc_RNA (1)...(19): siRNA sense strand
aaacagcgccaucaagaua

SEQ ID NO: 1376969 - RNA, 19 nt, Homo sapiens
  misc_RNA (1)...(19): siRNA sense strand
cagaauauccgcauugaaa

SEQ ID NO: 1376970 - RNA, 19 nt, Homo sapiens
  misc_RNA (1)...(19): siRNA sense strand
caauaagcuugccaacaua

SEQ ID NO: 1376971 - RNA, 19 nt, Homo sapiens
  misc_RNA (1)...(19): siRNA sense strand
gaacagagggaaccacgaa

SEQ ID NO: 1376972 - RNA, 19 nt, Homo sapiens
  misc_RNA (1)...(19): siRNA sense strand
gaucugaccuggaaaucau

SEQ ID NO: 1376973 - RNA, 19 nt, Homo sapiens
  misc_RNA (1)...(19): siRNA sense strand
ggagaucccucaguucgaa

SEQ ID NO: 1376974 - RNA, 19 nt, Homo sapiens
  misc_RNA (1)...(19): siRNA sense strand
gggcugaacuuaccaugga

SEQ ID NO: 1376975 - RNA, 19 nt, Homo sapiens
  misc_RNA (1)...(19): siRNA sense strand
auacagaucugaccuggaa

SEQ ID NO: 1376976 - RNA, 19 nt, Homo sapiens
  misc_RNA (1)...(19): siRNA sense strand
gaccacagacuugaauuua

SEQ ID NO: 1376977 - RNA, 19 nt, Homo sapiens
  misc_RNA (1)...(19): siRNA sense strand
gauggaagcauugacuuua

SEQ ID NO: 1376978 - RNA, 19 nt, Homo sapiens
  misc_RNA (1)...(19): siRNA sense strand
ccaaagagguaacaaucug

SEQ ID NO: 1376979 - RNA, 19 nt, Homo sapiens
  misc_RNA (1)...(19): siRNA sense strand
gaaagaauuccauagagau

SEQ ID NO: 1376980 - RNA, 19 nt, Homo sapiens
  misc_RNA (1)...(19): siRNA sense strand
ccauagagauccuaaugau

SEQ ID NO: 1376981 - RNA, 19 nt, Homo sapiens
  misc_RNA (1)...(19): siRNA sense strand
gagggaaccacgaagauuu

SEQ ID NO: 1376982 - RNA, 19 nt, Homo sapiens
  misc_RNA (1)...(19): siRNA sense strand
cuaaugauccuguguguga

SEQ ID NO: 1376983 - RNA, 19 nt, Homo sapiens
  misc_RNA (1)...(19): siRNA sense strand
guucgaaucugguaaacau

SEQ ID NO: 1376984 - RNA, 19 nt, Homo sapiens
  misc_RNA (1)...(19): siRNA sense strand
uaauggacuugaacaaaga

SEQ ID NO: 1376985 - RNA, 19 nt, Homo sapiens
  misc_RNA (1)...(19): siRNA sense strand
guagaucgaggaaagaauu

SEQ ID NO: 1376986 - RNA, 19 nt, Homo sapiens
  misc_RNA (1)...(19): siRNA sense strand
ccauggagaucccucaguu

SEQ ID NO: 1376987 - RNA, 19 nt, Homo sapiens
  misc_RNA (1)...(19): siRNA sense strand
aaacuucucccuccaaaga

SEQ ID NO: 1376988 - RNA, 19 nt, Homo sapiens
  misc_RNA (1)...(19): siRNA sense strand
guagagaggaacaagauga

SEQ ID NO: 1376989 - RNA, 19 nt, Homo sapiens
  misc_RNA (1)...(19): siRNA sense strand
gauaugaagacuugaugaa

SEQ ID NO: 1376990 - RNA, 19 nt, Homo sapiens
  misc_RNA (1)...(19): siRNA sense strand
ccacgaagauuuuaugaug

SEQ ID NO: 1376991 - RNA, 19 nt, Homo sapiens
  misc_RNA (1)...(19): siRNA sense strand
gaaaacagcgccaucaaga

SEQ ID NO: 1376992 - RNA, 19 nt, Homo sapiens
  misc_RNA (1)...(19): siRNA sense strand
ccacagacuugaauuuacu

SEQ ID NO: 1376993 - RNA, 19 nt, Homo sapiens
  misc_RNA (1)...(19): siRNA sense strand
gguauggcuucacgaaaga

SEQ ID NO: 1376994 - RNA, 19 nt, Homo sapiens
  misc_RNA (1)...(19): siRNA sense strand
gaauuuacuccaccgugua

SEQ ID NO: 1376995 - RNA, 19 nt, Homo sapiens
  misc_RNA (1)...(19): siRNA sense strand
caacggaaacaaacagaga

SEQ ID NO: 1376996 - RNA, 19 nt, Homo sapiens
  misc_RNA (1)...(19): siRNA sense strand
ccaucaagauauuaagaga

SEQ ID NO: 1376997 - RNA, 19 nt, Homo sapiens
  misc_RNA (1)...(19): siRNA sense strand
guacaagaggcucauucua

SEQ ID NO: 1376998 - RNA, 19 nt, Homo sapiens
  misc_RNA (1)...(19): siRNA sense strand
uacaaucguugacaaugaa

SEQ ID NO: 1376999 - RNA, 19 nt, Homo sapiens
  misc_RNA (1)...(19): siRNA sense strand
cauaauggacuugaacaaa

SEQ ID NO: 1377000 - RNA, 19 nt, Homo sapiens
  misc_RNA (1)...(19): siRNA sense strand
gaucuccguggaagaauuu

SEQ ID NO: 1377001 - RNA, 19 nt, Homo sapiens
  misc_RNA (1)...(19): siRNA sense strand
aaacaaacagagaccauga

SEQ ID NO: 1377002 - RNA, 19 nt, Homo sapiens
  misc_RNA (1)...(19): siRNA sense strand
gagaggaacaagaugaaau

SEQ ID NO: 1377003 - RNA, 19 nt, Homo sapiens
  misc_RNA (1)...(19): siRNA sense strand
ucacucacauacaaacuuc

SEQ ID NO: 1377004 - RNA, 19 nt, Homo sapiens
  misc_RNA (1)...(19): siRNA sense strand
uggaaacguugaauacaug

SEQ ID NO: 1377005 - RNA, 19 nt, Homo sapiens
  misc_RNA (1)...(19): siRNA sense strand
acaaacuucucccuccaaa

SEQ ID NO: 1377006 - RNA, 19 nt, Homo sapiens
  misc_RNA (1)...(19): siRNA sense strand
uaagagagagagugauuuc

SEQ ID NO: 1377007 - RNA, 19 nt, Homo sapiens
  misc_RNA (1)...(19): siRNA sense strand
acagagaccaugacacuga

SEQ ID NO: 1377008 - RNA, 19 nt, Homo sapiens
  misc_RNA (1)...(19): siRNA sense strand
uaucagagaccacagacuu

SEQ ID NO: 1377009 - RNA, 19 nt, Homo sapiens
  misc_RNA (1)...(19): siRNA sense strand
aaacagagaccaugacacu

SEQ ID NO: 1377010 - RNA, 19 nt, Homo sapiens
  misc_RNA (1)...(19): siRNA sense strand
auaauggacuugaacaaag

SEQ ID NO: 1377011 - RNA, 19 nt, Homo sapiens
  misc_RNA (1)...(19): siRNA sense strand
uaugaagacuugaugaaac

SEQ ID NO: 1377012 - RNA, 19 nt, Homo sapiens
  misc_RNA (1)...(19): siRNA sense strand
cauugacacugaucacuca

SEQ ID NO: 1377013 - RNA, 19 nt, Homo sapiens
  misc_RNA (1)...(19): siRNA sense strand
acaagaggcucauucuacu

SEQ ID NO: 1377014 - RNA, 19 nt, Homo sapiens
  misc_RNA (1)...(19): siRNA sense strand
ccaacauaauggacuugaa

SEQ ID NO: 1377015 - RNA, 19 nt, Homo sapiens
  misc_RNA (1)...(19): siRNA sense strand
gaugauucccaagucaaua

SEQ ID NO: 1377016 - RNA, 19 nt, Homo sapiens
  misc_RNA (1)...(19): siRNA sense strand
cgaaucugguaaacauaga

SEQ ID NO: 1377017 - RNA, 19 nt, Homo sapiens
  misc_RNA (1)...(19): siRNA sense strand
ggacuugaacaaagaugga

SEQ ID NO: 1377018 - RNA, 19 nt, Homo sapiens
  misc_RNA (1)...(19): siRNA sense strand
ugaugaaucugagguaugg

SEQ ID NO: 1377019 - RNA, 19 nt, Homo sapiens
  misc_RNA (1)...(19): siRNA sense strand
caagauauuaagagagaga

SEQ ID NO: 1377020 - RNA, 19 nt, Homo sapiens
  misc_RNA (1)...(19): siRNA sense strand
uugaauacauguccagcuu

SEQ ID NO: 1377021 - RNA, 19 nt, Homo sapiens
  misc_RNA (1)...(19): siRNA sense strand
ggaaacaaacagagaccau

SEQ ID NO: 1377022 - RNA, 19 nt, Homo sapiens
  misc_RNA (1)...(19): siRNA sense strand
auggaagcauugacuuuaa

SEQ ID NO: 1377023 - RNA, 19 nt, Homo sapiens
  misc_RNA (1)...(19): siRNA sense strand
cccaaucgguacaaucguu

SEQ ID NO: 1377024 - RNA, 19 nt, Homo sapiens
  misc_RNA (1)...(19): siRNA sense strand
caacauaauggacuugaac

SEQ ID NO: 1377025 - RNA, 19 nt, Homo sapiens
  misc_RNA (1)...(19): siRNA sense strand
ggauaucagagaccacaga

SEQ ID NO: 1377026 - RNA, 19 nt, Homo sapiens
  misc_RNA (1)...(19): siRNA sense strand
uggaagcauugacuuuaau

SEQ ID NO: 1377027 - RNA, 19 nt, Homo sapiens
  misc_RNA (1)...(19): siRNA sense strand
acagcgccaucaagauauu

SEQ ID NO: 1377028 - RNA, 19 nt, Homo sapiens
  misc_RNA (1)...(19): siRNA sense strand
cgugccauguggaaacuuu

SEQ ID NO: 1377029 - RNA, 19 nt, Homo sapiens
  misc_RNA (1)...(19): siRNA sense strand
gagguauggcuucacgaaa

SEQ ID NO: 1377030 - RNA, 19 nt, Homo sapiens
  misc_RNA (1)...(19): siRNA sense strand
aaacauagaccaaaaugga

SEQ ID NO: 1377031 - RNA, 19 nt, Homo sapiens
  misc_RNA (1)...(19): siRNA sense strand
uaugaugaaucugagguau

SEQ ID NO: 1377032 - RNA, 19 nt, Homo sapiens
  misc_RNA (1)...(19): siRNA sense strand
gaggcucauucuacucuag

SEQ ID NO: 1377033 - RNA, 19 nt, Homo sapiens
  misc_RNA (1)...(19): siRNA sense strand
caacuucaagaccacagaa

SEQ ID NO: 1377034 - RNA, 19 nt, Homo sapiens
  misc_RNA (1)...(19): siRNA sense strand
ugaccuuacucgugcuuuc

SEQ ID NO: 1377035 - RNA, 19 nt, Homo sapiens
  misc_RNA (1)...(19): siRNA sense strand
agaccacagacuugaauuu

SEQ ID NO: 1377036 - RNA, 19 nt, Homo sapiens
  misc_RNA (1)...(19): siRNA sense strand
uaagcuugccaacauaaug

SEQ ID NO: 1377037 - RNA, 19 nt, Homo sapiens
  misc_RNA (1)...(19): siRNA sense strand
ugaucuccguggaagaauu

SEQ ID NO: 1377038 - RNA, 19 nt, Homo sapiens
  misc_RNA (1)...(19): siRNA sense strand
uacaagaggcucauucuac

SEQ ID NO: 1377039 - RNA, 19 nt, Homo sapiens
  misc_RNA (1)...(19): siRNA sense strand
ucagagaccacagacuuga

SEQ ID NO: 1377040 - RNA, 19 nt, Homo sapiens
  misc_RNA (1)...(19): siRNA sense strand
ucauucuacucuaguugaa

SEQ ID NO: 1377041 - RNA, 19 nt, Homo sapiens
  misc_RNA (1)...(19): siRNA sense strand
aaauggaaacguugaauac

SEQ ID NO: 1377042 - RNA, 19 nt, Homo sapiens
  misc_RNA (1)...(19): siRNA sense strand
ccacagaaaaucaggaaaa

SEQ ID NO: 1377043 - RNA, 19 nt, Homo sapiens
  misc_RNA (1)...(19): siRNA sense strand
caaagagguaacaaucugu

SEQ ID NO: 1377044 - RNA, 19 nt, Homo sapiens
  misc_RNA (1)...(19): siRNA sense strand
ucaguucgaaucugguaaa

SEQ ID NO: 1377045 - RNA, 19 nt, Homo sapiens
  misc_RNA (1)...(19): siRNA sense strand
aauaagcuugccaacauaa

SEQ ID NO: 1377046 - RNA, 19 nt, Homo sapiens
  misc_RNA (1)...(19): siRNA sense strand
ugaaaucugugcugauacc

SEQ ID NO: 1377047 - RNA, 19 nt, Homo sapiens
  misc_RNA (1)...(19): siRNA sense strand
cagagaggaacccguaugu

SEQ ID NO: 1377048 - RNA, 19 nt, Homo sapiens
  misc_RNA (1)...(19): siRNA sense strand
uccagaauauccgcauuga

SEQ ID NO: 1377049 - RNA, 19 nt, Homo sapiens
  misc_RNA (1)...(19): siRNA sense strand
gguacaaucguugacaaug

SEQ ID NO: 1377050 - RNA, 19 nt, Homo sapiens
  misc_RNA (1)...(19): siRNA sense strand
auguccagcuuccagaaua

SEQ ID NO: 1377051 - RNA, 19 nt, Homo sapiens
  misc_RNA (1)...(19): siRNA sense strand
ggaaacguugaauacaugu

SEQ ID NO: 1377052 - RNA, 19 nt, Homo sapiens
  misc_RNA (1)...(19): siRNA sense strand
cccaaugaccugcacuuga

SEQ ID NO: 1377053 - RNA, 19 nt, Homo sapiens
  misc_RNA (1)...(19): siRNA sense strand
uagagaggaacaagaugaa

SEQ ID NO: 1377054 - RNA, 19 nt, Homo sapiens
  misc_RNA (1)...(19): siRNA sense strand
gggaaacuggaugaucuuu

SEQ ID NO: 1377055 - RNA, 19 nt, Homo sapiens
  misc_RNA (1)...(19): siRNA sense strand
ugagguauggcuucacgaa

SEQ ID NO: 1377056 - RNA, 19 nt, Homo sapiens
  misc_RNA (1)...(19): siRNA sense strand
agauggaagcauugacuuu

SEQ ID NO: 1377057 - RNA, 19 nt, Homo sapiens
  misc_RNA (1)...(19): siRNA sense strand
gaagaauuucgugccaugu

SEQ ID NO: 1377058 - RNA, 19 nt, Homo sapiens
  misc_RNA (1)...(19): siRNA sense strand
cagaaaaucaggaaaacuu

SEQ ID NO: 1377059 - RNA, 19 nt, Homo sapiens
  misc_RNA (1)...(19): siRNA sense strand
gaaccacgaagauuuuaug

SEQ ID NO: 1377060 - RNA, 19 nt, Homo sapiens
  misc_RNA (1)...(19): siRNA sense strand
agguauggcuucacgaaag

SEQ ID NO: 1377061 - RNA, 19 nt, Homo sapiens
  misc_RNA (1)...(19): siRNA sense strand
gaacaaagauggaagcauu

SEQ ID NO: 1377062 - RNA, 19 nt, Homo sapiens
  misc_RNA (1)...(19): siRNA sense strand
gaugaaaucugugcugaua

SEQ ID NO: 1377063 - RNA, 19 nt, Homo sapiens
  misc_RNA (1)...(19): siRNA sense strand
gaauuucacucacauacaa

SEQ ID NO: 1377064 - RNA, 19 nt, Homo sapiens
  misc_RNA (1)...(19): siRNA sense strand
ccaaugaccugcacuugaa

SEQ ID NO: 1377065 - RNA, 19 nt, Homo sapiens
  misc_RNA (1)...(19): siRNA sense strand
gagaggaacccguauguuu

SEQ ID NO: 1377066 - RNA, 19 nt, Homo sapiens
  misc_RNA (1)...(19): siRNA sense strand
guacaaucguugacaauga

SEQ ID NO: 1377067 - RNA, 19 nt, Homo sapiens
  misc_RNA (1)...(19): siRNA sense strand
ucaauaagcuugccaacau

SEQ ID NO: 1377068 - RNA, 19 nt, Homo sapiens
  misc_RNA (1)...(19): siRNA sense strand
gcaguuauccaccuucuuu

SEQ ID NO: 1377069 - RNA, 19 nt, Homo sapiens
  misc_RNA (1)...(19): siRNA sense strand
cgaauaugcugaugaacaa

SEQ ID NO: 1377070 - RNA, 19 nt, Homo sapiens
  misc_RNA (1)...(19): siRNA sense strand
aaacagcgccaucaagaua

SEQ ID NO: 1377071 - RNA, 19 nt, Homo sapiens
  misc_RNA (1)...(19): siRNA sense strand
uuacaaagcucgacugaag

SEQ ID NO: 1377072 - RNA, 19 nt, Homo sapiens
  misc_RNA (1)...(19): siRNA sense strand
cagaauauccgcauugaaa

SEQ ID NO: 1377073 - RNA, 19 nt, Homo sapiens
  misc_RNA (1)...(19): siRNA sense strand
caauaagcuugccaacaua

SEQ ID NO: 1377074 - RNA, 19 nt, Homo sapiens
  misc_RNA (1)...(19): siRNA sense strand
gaacagagggaaccacgaa

SEQ ID NO: 1377075 - RNA, 19 nt, Homo sapiens
  misc_RNA (1)...(19): siRNA sense strand
gaucugaccuggaaaucau

SEQ ID NO: 1377076 - RNA, 19 nt, Homo sapiens
  misc_RNA (1)...(19): siRNA sense strand
caggagaucugacacauca

SEQ ID NO: 1377077 - RNA, 19 nt, Homo sapiens
  misc_RNA (1)...(19): siRNA sense strand
ggagaucccucaguucgaa

SEQ ID NO: 1377078 - RNA, 19 nt, Homo sapiens
  misc_RNA (1)...(19): siRNA sense strand
gggcugaacuuaccaugga

SEQ ID NO: 1377079 - RNA, 19 nt, Homo sapiens
  misc_RNA (1)...(19): siRNA sense strand
auacagaucugaccuggaa

SEQ ID NO: 1377080 - RNA, 19 nt, Homo sapiens
  misc_RNA (1)...(19): siRNA sense strand
gaccacagacuugaauuua

SEQ ID NO: 1377081 - RNA, 19 nt, Homo sapiens
  misc_RNA (1)...(19): siRNA sense strand
gauggaagcauugacuuua

SEQ ID NO: 1377082 - RNA, 19 nt, Homo sapiens
  misc_RNA (1)...(19): siRNA sense strand
ccaaagagguaacaaucug

SEQ ID NO: 1377083 - RNA, 19 nt, Homo sapiens
  misc_RNA (1)...(19): siRNA sense strand
gaaagaauuccauagagau

SEQ ID NO: 1377084 - RNA, 19 nt, Homo sapiens
  misc_RNA (1)...(19): siRNA sense strand
ccauagagauccuaaugau

SEQ ID NO: 1377085 - RNA, 19 nt, Homo sapiens
  misc_RNA (1)...(19): siRNA sense strand
gagggaaccacgaagauuu

SEQ ID NO: 1377086 - RNA, 19 nt, Homo sapiens
  misc_RNA (1)...(19): siRNA sense strand
ccaagaaaguccugaagca

SEQ ID NO: 1377087 - RNA, 19 nt, Homo sapiens
  misc_RNA (1)...(19): siRNA sense strand
guucgaaucugguaaacau

SEQ ID NO: 1377088 - RNA, 19 nt, Homo sapiens
  misc_RNA (1)...(19): siRNA sense strand
cuaaugauccuguguguga

SEQ ID NO: 1377089 - RNA, 19 nt, Homo sapiens
  misc_RNA (1)...(19): siRNA sense strand
cagcaguucuucaacgaaa

SEQ ID NO: 1377090 - RNA, 19 nt, Homo sapiens
  misc_RNA (1)...(19): siRNA sense strand
uaauggacuugaacaaaga

SEQ ID NO: 1377091 - RNA, 19 nt, Homo sapiens
  misc_RNA (1)...(19): siRNA sense strand
guagaucgaggaaagaauu

SEQ ID NO: 1377092 - RNA, 19 nt, Homo sapiens
  misc_RNA (1)...(19): siRNA sense strand
ccauggagaucccucaguu

SEQ ID NO: 1377093 - RNA, 19 nt, Homo sapiens
  misc_RNA (1)...(19): siRNA sense strand
ucuuagaggugcuauuuga

SEQ ID NO: 1377094 - RNA, 19 nt, Homo sapiens
  misc_RNA (1)...(19): siRNA sense strand
aaacuucucccuccaaaga

SEQ ID NO: 1377095 - RNA, 19 nt, Homo sapiens
  misc_RNA (1)...(19): siRNA sense strand
agaaaguccugaagcaaau

SEQ ID NO: 1377096 - RNA, 19 nt, Homo sapiens
  misc_RNA (1)...(19): siRNA sense strand
gauaugaagacuugaugaa

SEQ ID NO: 1377097 - RNA, 19 nt, Homo sapiens
  misc_RNA (1)...(19): siRNA sense strand
guagagaggaacaagauga

SEQ ID NO: 1377098 - RNA, 19 nt, Homo sapiens
  misc_RNA (1)...(19): siRNA sense strand
acacacauauacauaagga

SEQ ID NO: 1377099 - RNA, 19 nt, Homo sapiens
  misc_RNA (1)...(19): siRNA sense strand
gaaaacagcgccaucaaga

SEQ ID NO: 1377100 - RNA, 19 nt, Homo sapiens
  misc_RNA (1)...(19): siRNA sense strand
ccacagacuugaauuuacu

SEQ ID NO: 1377101 - RNA, 19 nt, Homo sapiens
  misc_RNA (1)...(19): siRNA sense strand
gguauggcuucacgaaaga

SEQ ID NO: 1377102 - RNA, 19 nt, Homo sapiens
  misc_RNA (1)...(19): siRNA sense strand
ccacgaagauuuuaugaug

SEQ ID NO: 1377103 - RNA, 19 nt, Homo sapiens
  misc_RNA (1)...(19): siRNA sense strand
ucaugcccauuaugucuua

SEQ ID NO: 1377104 - RNA, 19 nt, Homo sapiens
  misc_RNA (1)...(19): siRNA sense strand
guaccgagguuacaaagcu

SEQ ID NO: 1377105 - RNA, 19 nt, Homo sapiens
  misc_RNA (1)...(19): siRNA sense strand
gaauuuacuccaccgugua

SEQ ID NO: 1377106 - RNA, 19 nt, Homo sapiens
  misc_RNA (1)...(19): siRNA sense strand
caacggaaacaaacagaga

SEQ ID NO: 1377107 - RNA, 19 nt, Homo sapiens
  misc_RNA (1)...(19): siRNA sense strand
gauacuucaugcccauuau

SEQ ID NO: 1377108 - RNA, 19 nt, Homo sapiens
  misc_RNA (1)...(19): siRNA sense strand
guacaagaggcucauucua

SEQ ID NO: 1377109 - RNA, 19 nt, Homo sapiens
  misc_RNA (1)...(19): siRNA sense strand
ccaucaagauauuaagaga

SEQ ID NO: 1377110 - RNA, 19 nt, Homo sapiens
  misc_RNA (1)...(19): siRNA sense strand
uacaaucguugacaaugaa

SEQ ID NO: 1377111 - RNA, 19 nt, Homo sapiens
  misc_RNA (1)...(19): siRNA sense strand
cauaauggacuugaacaaa

SEQ ID NO: 1377112 - RNA, 19 nt, Homo sapiens
  misc_RNA (1)...(19): siRNA sense strand
gaucuccguggaagaauuu

SEQ ID NO: 1377113 - RNA, 19 nt, Homo sapiens
  misc_RNA (1)...(19): siRNA sense strand
aaacaaacagagaccauga

SEQ ID NO: 1377114 - RNA, 19 nt, Homo sapiens
  misc_RNA (1)...(19): siRNA sense strand
gagaggaacaagaugaaau

SEQ ID NO: 1377115 - RNA, 19 nt, Homo sapiens
  misc_RNA (1)...(19): siRNA sense strand
ggaaaacuacacacauaua

SEQ ID NO: 1377116 - RNA, 19 nt, Homo sapiens
  misc_RNA (1)...(19): siRNA sense strand
uggaaacguugaauacaug

SEQ ID NO: 1377117 - RNA, 19 nt, Homo sapiens
  misc_RNA (1)...(19): siRNA sense strand
ucacucacauacaaacuuc

SEQ ID NO: 1377118 - RNA, 19 nt, Homo sapiens
  misc_RNA (1)...(19): siRNA sense strand
acaaacuucucccuccaaa

SEQ ID NO: 1377119 - RNA, 19 nt, Homo sapiens
  misc_RNA (1)...(19): siRNA sense strand
uaagagagagagugauuuc

SEQ ID NO: 1377120 - RNA, 19 nt, Homo sapiens
  misc_RNA (1)...(19): siRNA sense strand
acagagaccaugacacuga

SEQ ID NO: 1377121 - RNA, 19 nt, Homo sapiens
  misc_RNA (1)...(19): siRNA sense strand
uaucagagaccacagacuu

SEQ ID NO: 1377122 - RNA, 19 nt, Homo sapiens
  misc_RNA (1)...(19): siRNA sense strand
aaacagagaccaugacacu

SEQ ID NO: 1377123 - RNA, 19 nt, Homo sapiens
  misc_RNA (1)...(19): siRNA sense strand
auaauggacuugaacaaag

SEQ ID NO: 1377124 - RNA, 19 nt, Homo sapiens
  misc_RNA (1)...(19): siRNA sense strand
uaugaagacuugaugaaac

SEQ ID NO: 1377125 - RNA, 19 nt, Homo sapiens
  misc_RNA (1)...(19): siRNA sense strand
cuacacacauauacauaag

SEQ ID NO: 1377126 - RNA, 19 nt, Homo sapiens
  misc_RNA (1)...(19): siRNA sense strand
cauugacacugaucacuca

SEQ ID NO: 1377127 - RNA, 19 nt, Homo sapiens
  misc_RNA (1)...(19): siRNA sense strand
aagaaaguccugaagcaaa

SEQ ID NO: 1377128 - RNA, 19 nt, Homo sapiens
  misc_RNA (1)...(19): siRNA sense strand
ccaacauaauggacuugaa

SEQ ID NO: 1377129 - RNA, 19 nt, Homo sapiens
  misc_RNA (1)...(19): siRNA sense strand
gaugauucccaagucaaua

SEQ ID NO: 1377130 - RNA, 19 nt, Homo sapiens
  misc_RNA (1)...(19): siRNA sense strand
acaagaggcucauucuacu

SEQ ID NO: 1377131 - RNA, 19 nt, Homo sapiens
  misc_RNA (1)...(19): siRNA sense strand
gaacugguaccgagguuac

SEQ ID NO: 1377132 - RNA, 19 nt, Homo sapiens
  misc_RNA (1)...(19): siRNA sense strand
cgaaucugguaaacauaga

SEQ ID NO: 1377133 - RNA, 19 nt, Homo sapiens
  misc_RNA (1)...(19): siRNA sense strand
ggacuugaacaaagaugga

SEQ ID NO: 1377134 - RNA, 19 nt, Homo sapiens
  misc_RNA (1)...(19): siRNA sense strand
caagaaaguccugaagcaa

SEQ ID NO: 1377135 - RNA, 19 nt, Homo sapiens
  misc_RNA (1)...(19): siRNA sense strand
ggaugcagcaguucuucaa

SEQ ID NO: 1377136 - RNA, 19 nt, Homo sapiens
  misc_RNA (1)...(19): siRNA sense strand
ugaugaaucugagguaugg

SEQ ID NO: 1377137 - RNA, 19 nt, Homo sapiens
  misc_RNA (1)...(19): siRNA sense strand
caagauauuaagagagaga

SEQ ID NO: 1377138 - RNA, 19 nt, Homo sapiens
  misc_RNA (1)...(19): siRNA sense strand
uugaauacauguccagcuu

SEQ ID NO: 1377139 - RNA, 19 nt, Homo sapiens
  misc_RNA (1)...(19): siRNA sense strand
ggaaacaaacagagaccau

SEQ ID NO: 1377140 - RNA, 19 nt, Homo sapiens
  misc_RNA (1)...(19): siRNA sense strand
auggaagcauugacuuuaa

SEQ ID NO: 1377141 - RNA, 19 nt, Homo sapiens
  misc_RNA (1)...(19): siRNA sense strand
gaaggccagacaacacuau

SEQ ID NO: 1377142 - RNA, 19 nt, Homo sapiens
  misc_RNA (1)...(19): siRNA sense strand
gagcugcguugaucaucca

SEQ ID NO: 1377143 - RNA, 19 nt, Homo sapiens
  misc_RNA (1)...(19): siRNA sense strand
uuagaggugcuauuugaaa

SEQ ID NO: 1377144 - RNA, 19 nt, Homo sapiens
  misc_RNA (1)...(19): siRNA sense strand
caacauaauggacuugaac

SEQ ID NO: 1377145 - RNA, 19 nt, Homo sapiens
  misc_RNA (1)...(19): siRNA sense strand
cccaaucgguacaaucguu

SEQ ID NO: 1377146 - RNA, 19 nt, Homo sapiens
  misc_RNA (1)...(19): siRNA sense strand
ugucuuagaggugcuauuu

SEQ ID NO: 1377147 - RNA, 19 nt, Homo sapiens
  misc_RNA (1)...(19): siRNA sense strand
uggaagcauugacuuuaau

SEQ ID NO: 1377148 - RNA, 19 nt, Homo sapiens
  misc_RNA (1)...(19): siRNA sense strand
ggauaucagagaccacaga

SEQ ID NO: 1377149 - RNA, 19 nt, Homo sapiens
  misc_RNA (1)...(19): siRNA sense strand
acagcgccaucaagauauu

SEQ ID NO: 1377150 - RNA, 19 nt, Homo sapiens
  misc_RNA (1)...(19): siRNA sense strand
cgugccauguggaaacuuu

SEQ ID NO: 1377151 - RNA, 19 nt, Homo sapiens
  misc_RNA (1)...(19): siRNA sense strand
gagguauggcuucacgaaa

SEQ ID NO: 1377152 - RNA, 19 nt, Homo sapiens
  misc_RNA (1)...(19): siRNA sense strand
aaacauagaccaaaaugga

SEQ ID NO: 1377153 - RNA, 19 nt, Homo sapiens
  misc_RNA (1)...(19): siRNA sense strand
acugagagcugcguugauc

SEQ ID NO: 1377154 - RNA, 19 nt, Homo sapiens
  misc_RNA (1)...(19): siRNA sense strand
gaggcucauucuacucuag

SEQ ID NO: 1377155 - RNA, 19 nt, Homo sapiens
  misc_RNA (1)...(19): siRNA sense strand
caacuucaagaccacagaa

SEQ ID NO: 1377156 - RNA, 19 nt, Homo sapiens
  misc_RNA (1)...(19): siRNA sense strand
ugaccuuacucgugcuuuc

SEQ ID NO: 1377157 - RNA, 19 nt, Homo sapiens
  misc_RNA (1)...(19): siRNA sense strand
uaugaugaaucugagguau

SEQ ID NO: 1377158 - RNA, 19 nt, Homo sapiens
  misc_RNA (1)...(19): siRNA sense strand
uacaagaggcucauucuac

SEQ ID NO: 1377159 - RNA, 19 nt, Homo sapiens
  misc_RNA (1)...(19): siRNA sense strand
uaagcuugccaacauaaug

SEQ ID NO: 1377160 - RNA, 19 nt, Homo sapiens
  misc_RNA (1)...(19): siRNA sense strand
ugaucuccguggaagaauu

SEQ ID NO: 1377161 - RNA, 19 nt, Homo sapiens
  misc_RNA (1)...(19): siRNA sense strand
gaugaaaucugugcugaua

SEQ ID NO: 1377162 - RNA, 19 nt, Homo sapiens
  misc_RNA (1)...(19): siRNA sense strand
gaauuucacucacauacaa

SEQ ID NO: 1377163 - RNA, 19 nt, Homo sapiens
  misc_RNA (1)...(19): siRNA sense strand
ccaaugaccugcacuugaa

SEQ ID NO: 1377164 - RNA, 19 nt, Homo sapiens
  misc_RNA (1)...(19): siRNA sense strand
gagaggaacccguauguuu

SEQ ID NO: 1377165 - RNA, 19 nt, Homo sapiens
  misc_RNA (1)...(19): siRNA sense strand
guacaaucguugacaauga

SEQ ID NO: 1377166 - RNA, 19 nt, Homo sapiens
  misc_RNA (1)...(19): siRNA sense strand
gcaguuauccaccuucuuu

SEQ ID NO: 1377167 - RNA, 19 nt, Homo sapiens
  misc_RNA (1)...(19): siRNA sense strand
cgaauaugcugaugaacaa

SEQ ID NO: 1377168 - RNA, 19 nt, Homo sapiens
  misc_RNA (1)...(19): siRNA sense strand
aaacagcgccaucaagaua

SEQ ID NO: 1377169 - RNA, 19 nt, Homo sapiens
  misc_RNA (1)...(19): siRNA sense strand
uuacaaagcucgacugaag

SEQ ID NO: 1377170 - RNA, 19 nt, Homo sapiens
  misc_RNA (1)...(19): siRNA sense strand
gaacagagggaaccacgaa

SEQ ID NO: 1377171 - RNA, 19 nt, Homo sapiens
  misc_RNA (1)...(19): siRNA sense strand
caggagaucugacacauca

SEQ ID NO: 1377172 - RNA, 19 nt, Homo sapiens
  misc_RNA (1)...(19): siRNA sense strand
gaccacagacuugaauuua

SEQ ID NO: 1377173 - RNA, 19 nt, Homo sapiens
  misc_RNA (1)...(19): siRNA sense strand
ccaaagagguaacaaucug

SEQ ID NO: 1377174 - RNA, 19 nt, Homo sapiens
  misc_RNA (1)...(19): siRNA sense strand
gaaagaauuccauagagau

SEQ ID NO: 1377175 - RNA, 19 nt, Homo sapiens
  misc_RNA (1)...(19): siRNA sense strand
ccauagagauccuaaugau

SEQ ID NO: 1377176 - RNA, 19 nt, Homo sapiens
  misc_RNA (1)...(19): siRNA sense strand
gagggaaccacgaagauuu

SEQ ID NO: 1377177 - RNA, 19 nt, Homo sapiens
  misc_RNA (1)...(19): siRNA sense strand
ccaagaaaguccugaagca

SEQ ID NO: 1377178 - RNA, 19 nt, Homo sapiens
  misc_RNA (1)...(19): siRNA sense strand
cuaaugauccuguguguga

SEQ ID NO: 1377179 - RNA, 19 nt, Homo sapiens
  misc_RNA (1)...(19): siRNA sense strand
cagcaguucuucaacgaaa

SEQ ID NO: 1377180 - RNA, 19 nt, Homo sapiens
  misc_RNA (1)...(19): siRNA sense strand
guagaucgaggaaagaauu

SEQ ID NO: 1377181 - RNA, 19 nt, Homo sapiens
  misc_RNA (1)...(19): siRNA sense strand
ucuuagaggugcuauuuga

SEQ ID NO: 1377182 - RNA, 19 nt, Homo sapiens
  misc_RNA (1)...(19): siRNA sense strand
aaacuucucccuccaaaga

SEQ ID NO: 1377183 - RNA, 19 nt, Homo sapiens
  misc_RNA (1)...(19): siRNA sense strand
agaaaguccugaagcaaau

SEQ ID NO: 1377184 - RNA, 19 nt, Homo sapiens
  misc_RNA (1)...(19): siRNA sense strand
guagagaggaacaagauga

SEQ ID NO: 1377185 - RNA, 19 nt, Homo sapiens
  misc_RNA (1)...(19): siRNA sense strand
acacacauauacauaagga

SEQ ID NO: 1377186 - RNA, 19 nt, Homo sapiens
  misc_RNA (1)...(19): siRNA sense strand
gaaaacagcgccaucaaga

SEQ ID NO: 1377187 - RNA, 19 nt, Homo sapiens
  misc_RNA (1)...(19): siRNA sense strand
ccacagacuugaauuuacu

SEQ ID NO: 1377188 - RNA, 19 nt, Homo sapiens
  misc_RNA (1)...(19): siRNA sense strand
gguauggcuucacgaaaga

SEQ ID NO: 1377189 - RNA, 19 nt, Homo sapiens
  misc_RNA (1)...(19): siRNA sense strand
ccacgaagauuuuaugaug

SEQ ID NO: 1377190 - RNA, 19 nt, Homo sapiens
  misc_RNA (1)...(19): siRNA sense strand
ucaugcccauuaugucuua

SEQ ID NO: 1377191 - RNA, 19 nt, Homo sapiens
  misc_RNA (1)...(19): siRNA sense strand
guaccgagguuacaaagcu

SEQ ID NO: 1377192 - RNA, 19 nt, Homo sapiens
  misc_RNA (1)...(19): siRNA sense strand
gaauuuacuccaccgugua

SEQ ID NO: 1377193 - RNA, 19 nt, Homo sapiens
  misc_RNA (1)...(19): siRNA sense strand
caacggaaacaaacagaga

SEQ ID NO: 1377194 - RNA, 19 nt, Homo sapiens
  misc_RNA (1)...(19): siRNA sense strand
gauacuucaugcccauuau

SEQ ID NO: 1377195 - RNA, 19 nt, Homo sapiens
  misc_RNA (1)...(19): siRNA sense strand
ccaucaagauauuaagaga

SEQ ID NO: 1377196 - RNA, 19 nt, Homo sapiens
  misc_RNA (1)...(19): siRNA sense strand
uacaaucguugacaaugaa

SEQ ID NO: 1377197 - RNA, 19 nt, Homo sapiens
  misc_RNA (1)...(19): siRNA sense strand
aaacaaacagagaccauga

SEQ ID NO: 1377198 - RNA, 19 nt, Homo sapiens
  misc_RNA (1)...(19): siRNA sense strand
gagaggaacaagaugaaau

SEQ ID NO: 1377199 - RNA, 19 nt, Homo sapiens
  misc_RNA (1)...(19): siRNA sense strand
ggaaaacuacacacauaua

SEQ ID NO: 1377200 - RNA, 19 nt, Homo sapiens
  misc_RNA (1)...(19): siRNA sense strand
ucacucacauacaaacuuc

SEQ ID NO: 1377201 - RNA, 19 nt, Homo sapiens
  misc_RNA (1)...(19): siRNA sense strand
acaaacuucucccuccaaa

SEQ ID NO: 1377202 - RNA, 19 nt, Homo sapiens
  misc_RNA (1)...(19): siRNA sense strand
uaagagagagagugauuuc

SEQ ID NO: 1377203 - RNA, 19 nt, Homo sapiens
  misc_RNA (1)...(19): siRNA sense strand
acagagaccaugacacuga

SEQ ID NO: 1377204 - RNA, 19 nt, Homo sapiens
  misc_RNA (1)...(19): siRNA sense strand
uaucagagaccacagacuu

SEQ ID NO: 1377205 - RNA, 19 nt, Homo sapiens
  misc_RNA (1)...(19): siRNA sense strand
aaacagagaccaugacacu

SEQ ID NO: 1377206 - RNA, 19 nt, Homo sapiens
  misc_RNA (1)...(19): siRNA sense strand
cuacacacauauacauaag

SEQ ID NO: 1377207 - RNA, 19 nt, Homo sapiens
  misc_RNA (1)...(19): siRNA sense strand
aagaaaguccugaagcaaa

SEQ ID NO: 1377208 - RNA, 19 nt, Homo sapiens
  misc_RNA (1)...(19): siRNA sense strand
gaacugguaccgagguuac

SEQ ID NO: 1377209 - RNA, 19 nt, Homo sapiens
  misc_RNA (1)...(19): siRNA sense strand
caagaaaguccugaagcaa

SEQ ID NO: 1377210 - RNA, 19 nt, Homo sapiens
  misc_RNA (1)...(19): siRNA sense strand
ugaugaaucugagguaugg

SEQ ID NO: 1377211 - RNA, 19 nt, Homo sapiens
  misc_RNA (1)...(19): siRNA sense strand
ggaugcagcaguucuucaa

SEQ ID NO: 1377212 - RNA, 19 nt, Homo sapiens
  misc_RNA (1)...(19): siRNA sense strand
caagauauuaagagagaga

SEQ ID NO: 1377213 - RNA, 19 nt, Homo sapiens
  misc_RNA (1)...(19): siRNA sense strand
gaaggccagacaacacuau

SEQ ID NO: 1377214 - RNA, 19 nt, Homo sapiens
  misc_RNA (1)...(19): siRNA sense strand
ggaaacaaacagagaccau

SEQ ID NO: 1377215 - RNA, 19 nt, Homo sapiens
  misc_RNA (1)...(19): siRNA sense strand
gagcugcguugaucaucca

SEQ ID NO: 1377216 - RNA, 19 nt, Homo sapiens
  misc_RNA (1)...(19): siRNA sense strand
uuagaggugcuauuugaaa

SEQ ID NO: 1377217 - RNA, 19 nt, Homo sapiens
  misc_RNA (1)...(19): siRNA sense strand
cccaaucgguacaaucguu

SEQ ID NO: 1377218 - RNA, 19 nt, Homo sapiens
  misc_RNA (1)...(19): siRNA sense strand
ugucuuagaggugcuauuu

SEQ ID NO: 1377219 - RNA, 19 nt, Homo sapiens
  misc_RNA (1)...(19): siRNA sense strand
ggauaucagagaccacaga

SEQ ID NO: 1377220 - RNA, 19 nt, Homo sapiens
  misc_RNA (1)...(19): siRNA sense strand
acagcgccaucaagauauu

SEQ ID NO: 1377221 - RNA, 19 nt, Homo sapiens
  misc_RNA (1)...(19): siRNA sense strand
gagguauggcuucacgaaa

SEQ ID NO: 1377222 - RNA, 19 nt, Homo sapiens
  misc_RNA (1)...(19): siRNA sense strand
uaugaugaaucugagguau

SEQ ID NO: 1377223 - RNA, 19 nt, Homo sapiens
  misc_RNA (1)...(19): siRNA sense strand
acugagagcugcguugauc

SEQ ID NO: 1377224 - RNA, 19 nt, Homo sapiens
  misc_RNA (1)...(19): siRNA sense strand
agaccacagacuugaauuu

SEQ ID NO: 1377225 - RNA, 19 nt, Homo sapiens
  misc_RNA (1)...(19): siRNA sense strand
caaagagguaacaaucugu

SEQ ID NO: 1377226 - RNA, 19 nt, Homo sapiens
  misc_RNA (1)...(19): siRNA sense strand
ucagagaccacagacuuga

SEQ ID NO: 1377227 - RNA, 19 nt, Homo sapiens
  misc_RNA (1)...(19): siRNA sense strand
ucgaauaugcugaugaaca

SEQ ID NO: 1377228 - RNA, 19 nt, Homo sapiens
  misc_RNA (1)...(19): siRNA sense strand
acuaugcccucaccaucuu

SEQ ID NO: 1377229 - RNA, 19 nt, Homo sapiens
  misc_RNA (1)...(19): siRNA sense strand
cagaacugguaccgagguu

SEQ ID NO: 1377230 - RNA, 19 nt, Homo sapiens
  misc_RNA (1)...(19): siRNA sense strand
gaaaguccugaagcaaaug

SEQ ID NO: 1377231 - RNA, 19 nt, Homo sapiens
  misc_RNA (1)...(19): siRNA sense strand
gcuauuugaaaccaagaaa

SEQ ID NO: 1377232 - RNA, 19 nt, Homo sapiens
  misc_RNA (1)...(19): siRNA sense strand
uuggaaaacuacacacaua

SEQ ID NO: 1377233 - RNA, 19 nt, Homo sapiens
  misc_RNA (1)...(19): siRNA sense strand
ugaaaucugugcugauacc

SEQ ID NO: 1377234 - RNA, 19 nt, Homo sapiens
  misc_RNA (1)...(19): siRNA sense strand
cagagaggaacccguaugu

SEQ ID NO: 1377235 - RNA, 19 nt, Homo sapiens
  misc_RNA (1)...(19): siRNA sense strand
gaggugcuauuugaaacca

SEQ ID NO: 1377236 - RNA, 19 nt, Homo sapiens
  misc_RNA (1)...(19): siRNA sense strand
uagaggugcuauuugaaac

SEQ ID NO: 1377237 - RNA, 19 nt, Homo sapiens
  misc_RNA (1)...(19): siRNA sense strand
uagagaggaacaagaugaa

SEQ ID NO: 1377238 - RNA, 19 nt, Homo sapiens
  misc_RNA (1)...(19): siRNA sense strand
gguacaaucguugacaaug

SEQ ID NO: 1377239 - RNA, 19 nt, Homo sapiens
  misc_RNA (1)...(19): siRNA sense strand
cccaaugaccugcacuuga

SEQ ID NO: 1377240 - RNA, 19 nt, Homo sapiens
  misc_RNA (1)...(19): siRNA sense strand
gcagcaguucuucaacgaa

SEQ ID NO: 1377241 - RNA, 19 nt, Homo sapiens
  misc_RNA (1)...(19): siRNA sense strand
gggaaacuggaugaucuuu

SEQ ID NO: 1377242 - RNA, 19 nt, Homo sapiens
  misc_RNA (1)...(19): siRNA sense strand
gaaccacgaagauuuuaug

SEQ ID NO: 1377243 - RNA, 19 nt, Homo sapiens
  misc_RNA (1)...(19): siRNA sense strand
ucacugagagcugcguuga

SEQ ID NO: 1377244 - RNA, 19 nt, Homo sapiens
  misc_RNA (1)...(19): siRNA sense strand
cugcguugaucauccagaa

SEQ ID NO: 1377245 - RNA, 19 nt, Homo sapiens
  misc_RNA (1)...(19): siRNA sense strand
agguauggcuucacgaaag

SEQ ID NO: 1377246 - RNA, 19 nt, Homo sapiens
  misc_RNA (1)...(19): siRNA sense strand
ugagguauggcuucacgaa

SEQ ID NO: 1377247 - RNA, 19 nt, Homo sapiens
  misc_RNA (1)...(19): siRNA sense strand
agauacuucaugcccauua

SEQ ID NO: 1377248 - RNA, 19 nt, Homo sapiens
  misc_RNA (1)...(19): siRNA sense strand
ugacucgaagcacaauaaa

SEQ ID NO: 1377249 - RNA, 19 nt, Homo sapiens
  misc_RNA (1)...(19): siRNA sense strand
gguuacaaagcucgacuga

SEQ ID NO: 1377250 - RNA, 19 nt, Homo sapiens
  misc_RNA (1)...(19): siRNA sense strand
gaugaacaaggccaaaugc

SEQ ID NO: 1377251 - RNA, 19 nt, Homo sapiens
  misc_RNA (1)...(19): siRNA sense strand
ggagaucugacacaucacu

SEQ ID NO: 1377252 - RNA, 19 nt, Homo sapiens
  misc_RNA (1)...(19): siRNA sense strand
gaaaacuacacacauauac

SEQ ID NO: 1377253 - RNA, 19 nt, Homo sapiens
  misc_RNA (1)...(19): siRNA sense strand
guguagagaggaacaagau

SEQ ID NO: 1377254 - RNA, 19 nt, Homo sapiens
  misc_RNA (1)...(19): siRNA sense strand
gagaccacagacuugaauu

SEQ ID NO: 1377255 - RNA, 19 nt, Homo sapiens
  misc_RNA (1)...(19): siRNA sense strand
uggcuucacgaaagaaauu

SEQ ID NO: 1377256 - RNA, 19 nt, Homo sapiens
  misc_RNA (1)...(19): siRNA sense strand
aaucugagguauggcuuca

SEQ ID NO: 1377257 - RNA, 19 nt, Homo sapiens
  misc_RNA (1)...(19): siRNA sense strand
aaagaauuccauagagauc

SEQ ID NO: 1377258 - RNA, 19 nt, Homo sapiens
  misc_RNA (1)...(19): siRNA sense strand
acagagggaaccacgaaga

SEQ ID NO: 1377259 - RNA, 19 nt, Homo sapiens
  misc_RNA (1)...(19): siRNA sense strand
agaggaacaagaugaaauc

SEQ ID NO: 1377260 - RNA, 19 nt, Homo sapiens
  misc_RNA (1)...(19): siRNA sense strand
aaaugcaguuauccaccuu

SEQ ID NO: 1377261 - RNA, 19 nt, Homo sapiens
  misc_RNA (1)...(19): siRNA sense strand
gaacaaagauggaagcauu

SEQ ID NO: 1377262 - RNA, 19 nt, Homo sapiens
  misc_RNA (1)...(19): siRNA sense strand
gaugaaaucugugcugaua

SEQ ID NO: 1377263 - RNA, 19 nt, Homo sapiens
  misc_RNA (1)...(19): siRNA sense strand
gaauuucacucacauacaa

SEQ ID NO: 1377264 - RNA, 19 nt, Homo sapiens
  misc_RNA (1)...(19): siRNA sense strand
ccaaugaccugcacuugaa

SEQ ID NO: 1377265 - RNA, 19 nt, Homo sapiens
  misc_RNA (1)...(19): siRNA sense strand
gagaggaacccguauguuu

SEQ ID NO: 1377266 - RNA, 19 nt, Homo sapiens
  misc_RNA (1)...(19): siRNA sense strand
guacaaucguugacaauga

SEQ ID NO: 1377267 - RNA, 19 nt, Homo sapiens
  misc_RNA (1)...(19): siRNA sense strand
ucaauaagcuugccaacau

SEQ ID NO: 1377268 - RNA, 19 nt, Homo sapiens
  misc_RNA (1)...(19): siRNA sense strand
gcaguuauccaccuucuuu

SEQ ID NO: 1377269 - RNA, 19 nt, Homo sapiens
  misc_RNA (1)...(19): siRNA sense strand
cgaauaugcugaugaacaa

SEQ ID NO: 1377270 - RNA, 19 nt, Homo sapiens
  misc_RNA (1)...(19): siRNA sense strand
aaacagcgccaucaagaua

SEQ ID NO: 1377271 - RNA, 19 nt, Homo sapiens
  misc_RNA (1)...(19): siRNA sense strand
uuacaaagcucgacugaag

SEQ ID NO: 1377272 - RNA, 19 nt, Homo sapiens
  misc_RNA (1)...(19): siRNA sense strand
cagaauauccgcauugaaa

SEQ ID NO: 1377273 - RNA, 19 nt, Homo sapiens
  misc_RNA (1)...(19): siRNA sense strand
caauaagcuugccaacaua

SEQ ID NO: 1377274 - RNA, 19 nt, Homo sapiens
  misc_RNA (1)...(19): siRNA sense strand
gaacagagggaaccacgaa

SEQ ID NO: 1377275 - RNA, 19 nt, Homo sapiens
  misc_RNA (1)...(19): siRNA sense strand
gaucugaccuggaaaucau

SEQ ID NO: 1377276 - RNA, 19 nt, Homo sapiens
  misc_RNA (1)...(19): siRNA sense strand
caggagaucugacacauca

SEQ ID NO: 1377277 - RNA, 19 nt, Homo sapiens
  misc_RNA (1)...(19): siRNA sense strand
ggagaucccucaguucgaa

SEQ ID NO: 1377278 - RNA, 19 nt, Homo sapiens
  misc_RNA (1)...(19): siRNA sense strand
gggcugaacuuaccaugga

SEQ ID NO: 1377279 - RNA, 19 nt, Homo sapiens
  misc_RNA (1)...(19): siRNA sense strand
auacagaucugaccuggaa

SEQ ID NO: 1377280 - RNA, 19 nt, Homo sapiens
  misc_RNA (1)...(19): siRNA sense strand
gaccacagacuugaauuua

SEQ ID NO: 1377281 - RNA, 19 nt, Homo sapiens
  misc_RNA (1)...(19): siRNA sense strand
gauggaagcauugacuuua

SEQ ID NO: 1377282 - RNA, 19 nt, Homo sapiens
  misc_RNA (1)...(19): siRNA sense strand
ccaaagagguaacaaucug

SEQ ID NO: 1377283 - RNA, 19 nt, Homo sapiens
  misc_RNA (1)...(19): siRNA sense strand
gaaagaauuccauagagau

SEQ ID NO: 1377284 - RNA, 19 nt, Homo sapiens
  misc_RNA (1)...(19): siRNA sense strand
ccauagagauccuaaugau

SEQ ID NO: 1377285 - RNA, 19 nt, Homo sapiens
  misc_RNA (1)...(19): siRNA sense strand
gagggaaccacgaagauuu

SEQ ID NO: 1377286 - RNA, 19 nt, Homo sapiens
  misc_RNA (1)...(19): siRNA sense strand
ccaagaaaguccugaagca

SEQ ID NO: 1377287 - RNA, 19 nt, Homo sapiens
  misc_RNA (1)...(19): siRNA sense strand
guucgaaucugguaaacau

SEQ ID NO: 1377288 - RNA, 19 nt, Homo sapiens
  misc_RNA (1)...(19): siRNA sense strand
cuaaugauccuguguguga

SEQ ID NO: 1377289 - RNA, 19 nt, Homo sapiens
  misc_RNA (1)...(19): siRNA sense strand
cagcaguucuucaacgaaa

SEQ ID NO: 1377290 - RNA, 19 nt, Homo sapiens
  misc_RNA (1)...(19): siRNA sense strand
uaauggacuugaacaaaga

SEQ ID NO: 1377291 - RNA, 19 nt, Homo sapiens
  misc_RNA (1)...(19): siRNA sense strand
guagaucgaggaaagaauu

SEQ ID NO: 1377292 - RNA, 19 nt, Homo sapiens
  misc_RNA (1)...(19): siRNA sense strand
ccauggagaucccucaguu

SEQ ID NO: 1377293 - RNA, 19 nt, Homo sapiens
  misc_RNA (1)...(19): siRNA sense strand
ucuuagaggugcuauuuga

SEQ ID NO: 1377294 - RNA, 19 nt, Homo sapiens
  misc_RNA (1)...(19): siRNA sense strand
aaacuucucccuccaaaga

SEQ ID NO: 1377295 - RNA, 19 nt, Homo sapiens
  misc_RNA (1)...(19): siRNA sense strand
agaaaguccugaagcaaau

SEQ ID NO: 1377296 - RNA, 19 nt, Homo sapiens
  misc_RNA (1)...(19): siRNA sense strand
gauaugaagacuugaugaa

SEQ ID NO: 1377297 - RNA, 19 nt, Homo sapiens
  misc_RNA (1)...(19): siRNA sense strand
guagagaggaacaagauga

SEQ ID NO: 1377298 - RNA, 19 nt, Homo sapiens
  misc_RNA (1)...(19): siRNA sense strand
acacacauauacauaagga

SEQ ID NO: 1377299 - RNA, 19 nt, Homo sapiens
  misc_RNA (1)...(19): siRNA sense strand
gaaaacagcgccaucaaga

SEQ ID NO: 1377300 - RNA, 19 nt, Homo sapiens
  misc_RNA (1)...(19): siRNA sense strand
ccacagacuugaauuuacu

SEQ ID NO: 1377301 - RNA, 19 nt, Homo sapiens
  misc_RNA (1)...(19): siRNA sense strand
gguauggcuucacgaaaga

SEQ ID NO: 1377302 - RNA, 19 nt, Homo sapiens
  misc_RNA (1)...(19): siRNA sense strand
ccacgaagauuuuaugaug

SEQ ID NO: 1377303 - RNA, 19 nt, Homo sapiens
  misc_RNA (1)...(19): siRNA sense strand
ucaugcccauuaugucuua

SEQ ID NO: 1377304 - RNA, 19 nt, Homo sapiens
  misc_RNA (1)...(19): siRNA sense strand
guaccgagguuacaaagcu

SEQ ID NO: 1377305 - RNA, 19 nt, Homo sapiens
  misc_RNA (1)...(19): siRNA sense strand
gaauuuacuccaccgugua

SEQ ID NO: 1377306 - RNA, 19 nt, Homo sapiens
  misc_RNA (1)...(19): siRNA sense strand
caacggaaacaaacagaga

SEQ ID NO: 1377307 - RNA, 19 nt, Homo sapiens
  misc_RNA (1)...(19): siRNA sense strand
gauacuucaugcccauuau

SEQ ID NO: 1377308 - RNA, 19 nt, Homo sapiens
  misc_RNA (1)...(19): siRNA sense strand
guacaagaggcucauucua

SEQ ID NO: 1377309 - RNA, 19 nt, Homo sapiens
  misc_RNA (1)...(19): siRNA sense strand
ccaucaagauauuaagaga

SEQ ID NO: 1377310 - RNA, 19 nt, Homo sapiens
  misc_RNA (1)...(19): siRNA sense strand
uacaaucguugacaaugaa

SEQ ID NO: 1377311 - RNA, 19 nt, Homo sapiens
  misc_RNA (1)...(19): siRNA sense strand
cauaauggacuugaacaaa

SEQ ID NO: 1377312 - RNA, 19 nt, Homo sapiens
  misc_RNA (1)...(19): siRNA sense strand
gaucuccguggaagaauuu

SEQ ID NO: 1377313 - RNA, 19 nt, Homo sapiens
  misc_RNA (1)...(19): siRNA sense strand
aaacaaacagagaccauga

SEQ ID NO: 1377314 - RNA, 19 nt, Homo sapiens
  misc_RNA (1)...(19): siRNA sense strand
gagaggaacaagaugaaau

SEQ ID NO: 1377315 - RNA, 19 nt, Homo sapiens
  misc_RNA (1)...(19): siRNA sense strand
ggaaaacuacacacauaua

SEQ ID NO: 1377316 - RNA, 19 nt, Homo sapiens
  misc_RNA (1)...(19): siRNA sense strand
uggaaacguugaauacaug

SEQ ID NO: 1377317 - RNA, 19 nt, Homo sapiens
  misc_RNA (1)...(19): siRNA sense strand
ucacucacauacaaacuuc

SEQ ID NO: 1377318 - RNA, 19 nt, Homo sapiens
  misc_RNA (1)...(19): siRNA sense strand
acaaacuucucccuccaaa

SEQ ID NO: 1377319 - RNA, 19 nt, Homo sapiens
  misc_RNA (1)...(19): siRNA sense strand
uaagagagagagugauuuc

SEQ ID NO: 1377320 - RNA, 19 nt, Homo sapiens
  misc_RNA (1)...(19): siRNA sense strand
acagagaccaugacacuga

SEQ ID NO: 1377321 - RNA, 19 nt, Homo sapiens
  misc_RNA (1)...(19): siRNA sense strand
uaucagagaccacagacuu

SEQ ID NO: 1377322 - RNA, 19 nt, Homo sapiens
  misc_RNA (1)...(19): siRNA sense strand
aaacagagaccaugacacu

SEQ ID NO: 1377323 - RNA, 19 nt, Homo sapiens
  misc_RNA (1)...(19): siRNA sense strand
auaauggacuugaacaaag

SEQ ID NO: 1377324 - RNA, 19 nt, Homo sapiens
  misc_RNA (1)...(19): siRNA sense strand
uaugaagacuugaugaaac

SEQ ID NO: 1377325 - RNA, 19 nt, Homo sapiens
  misc_RNA (1)...(19): siRNA sense strand
cuacacacauauacauaag

SEQ ID NO: 1377326 - RNA, 19 nt, Homo sapiens
  misc_RNA (1)...(19): siRNA sense strand
cauugacacugaucacuca

SEQ ID NO: 1377327 - RNA, 19 nt, Homo sapiens
  misc_RNA (1)...(19): siRNA sense strand
aagaaaguccugaagcaaa

SEQ ID NO: 1377328 - RNA, 19 nt, Homo sapiens
  misc_RNA (1)...(19): siRNA sense strand
ccaacauaauggacuugaa

SEQ ID NO: 1377329 - RNA, 19 nt, Homo sapiens
  misc_RNA (1)...(19): siRNA sense strand
gaugauucccaagucaaua

SEQ ID NO: 1377330 - RNA, 19 nt, Homo sapiens
  misc_RNA (1)...(19): siRNA sense strand
acaagaggcucauucuacu

SEQ ID NO: 1377331 - RNA, 19 nt, Homo sapiens
  misc_RNA (1)...(19): siRNA sense strand
gaacugguaccgagguuac

SEQ ID NO: 1377332 - RNA, 19 nt, Homo sapiens
  misc_RNA (1)...(19): siRNA sense strand
cgaaucugguaaacauaga

SEQ ID NO: 1377333 - RNA, 19 nt, Homo sapiens
  misc_RNA (1)...(19): siRNA sense strand
ggacuugaacaaagaugga

SEQ ID NO: 1377334 - RNA, 19 nt, Homo sapiens
  misc_RNA (1)...(19): siRNA sense strand
caagaaaguccugaagcaa

SEQ ID NO: 1377335 - RNA, 19 nt, Homo sapiens
  misc_RNA (1)...(19): siRNA sense strand
ggaugcagcaguucuucaa

SEQ ID NO: 1377336 - RNA, 19 nt, Homo sapiens
  misc_RNA (1)...(19): siRNA sense strand
ugaugaaucugagguaugg

SEQ ID NO: 1377337 - RNA, 19 nt, Homo sapiens
  misc_RNA (1)...(19): siRNA sense strand
caagauauuaagagagaga

SEQ ID NO: 1377338 - RNA, 19 nt, Homo sapiens
  misc_RNA (1)...(19): siRNA sense strand
uugaauacauguccagcuu

SEQ ID NO: 1377339 - RNA, 19 nt, Homo sapiens
  misc_RNA (1)...(19): siRNA sense strand
ggaaacaaacagagaccau

SEQ ID NO: 1377340 - RNA, 19 nt, Homo sapiens
  misc_RNA (1)...(19): siRNA sense strand
auggaagcauugacuuuaa

SEQ ID NO: 1377341 - RNA, 19 nt, Homo sapiens
  misc_RNA (1)...(19): siRNA sense strand
gaaggccagacaacacuau

SEQ ID NO: 1377342 - RNA, 19 nt, Homo sapiens
  misc_RNA (1)...(19): siRNA sense strand
gagcugcguugaucaucca

SEQ ID NO: 1377343 - RNA, 19 nt, Homo sapiens
  misc_RNA (1)...(19): siRNA sense strand
uuagaggugcuauuugaaa

SEQ ID NO: 1377344 - RNA, 19 nt, Homo sapiens
  misc_RNA (1)...(19): siRNA sense strand
caacauaauggacuugaac

SEQ ID NO: 1377345 - RNA, 19 nt, Homo sapiens
  misc_RNA (1)...(19): siRNA sense strand
cccaaucgguacaaucguu

SEQ ID NO: 1377346 - RNA, 19 nt, Homo sapiens
  misc_RNA (1)...(19): siRNA sense strand
ugucuuagaggugcuauuu

SEQ ID NO: 1377347 - RNA, 19 nt, Homo sapiens
  misc_RNA (1)...(19): siRNA sense strand
uggaagcauugacuuuaau

SEQ ID NO: 1377348 - RNA, 19 nt, Homo sapiens
  misc_RNA (1)...(19): siRNA sense strand
ggauaucagagaccacaga

SEQ ID NO: 1377349 - RNA, 19 nt, Homo sapiens
  misc_RNA (1)...(19): siRNA sense strand
acagcgccaucaagauauu

SEQ ID NO: 1377350 - RNA, 19 nt, Homo sapiens
  misc_RNA (1)...(19): siRNA sense strand
cgugccauguggaaacuuu

SEQ ID NO: 1377351 - RNA, 19 nt, Homo sapiens
  misc_RNA (1)...(19): siRNA sense strand
gagguauggcuucacgaaa

SEQ ID NO: 1377352 - RNA, 19 nt, Homo sapiens
  misc_RNA (1)...(19): siRNA sense strand
aaacauagaccaaaaugga

SEQ ID NO: 1377353 - RNA, 19 nt, Homo sapiens
  misc_RNA (1)...(19): siRNA sense strand
acugagagcugcguugauc

SEQ ID NO: 1377354 - RNA, 19 nt, Homo sapiens
  misc_RNA (1)...(19): siRNA sense strand
gaggcucauucuacucuag

SEQ ID NO: 1377355 - RNA, 19 nt, Homo sapiens
  misc_RNA (1)...(19): siRNA sense strand
caacuucaagaccacagaa

SEQ ID NO: 1377356 - RNA, 19 nt, Homo sapiens
  misc_RNA (1)...(19): siRNA sense strand
ugaccuuacucgugcuuuc

SEQ ID NO: 1377357 - RNA, 19 nt, Homo sapiens
  misc_RNA (1)...(19): siRNA sense strand
uaugaugaaucugagguau

SEQ ID NO: 1377358 - RNA, 19 nt, Homo sapiens
  misc_RNA (1)...(19): siRNA sense strand
uacaagaggcucauucuac

SEQ ID NO: 1377359 - RNA, 19 nt, Homo sapiens
  misc_RNA (1)...(19): siRNA sense strand
uaagcuugccaacauaaug

SEQ ID NO: 1377360 - RNA, 19 nt, Homo sapiens
  misc_RNA (1)...(19): siRNA sense strand
ugaucuccguggaagaauu

SEQ ID NO: 1377361 - RNA, 19 nt, Homo sapiens
  misc_RNA (1)...(19): siRNA sense strand
gaacaaagauggaagcauu

SEQ ID NO: 1377362 - RNA, 19 nt, Homo sapiens
  misc_RNA (1)...(19): siRNA sense strand
gaugaaaucugugcugaua

SEQ ID NO: 1377363 - RNA, 19 nt, Homo sapiens
  misc_RNA (1)...(19): siRNA sense strand
gaauuucacucacauacaa

SEQ ID NO: 1377364 - RNA, 19 nt, Homo sapiens
  misc_RNA (1)...(19): siRNA sense strand
ccaaugaccugcacuugaa

SEQ ID NO: 1377365 - RNA, 19 nt, Homo sapiens
  misc_RNA (1)...(19): siRNA sense strand
gagaggaacccguauguuu

SEQ ID NO: 1377366 - RNA, 19 nt, Homo sapiens
  misc_RNA (1)...(19): siRNA sense strand
guacaaucguugacaauga

SEQ ID NO: 1377367 - RNA, 19 nt, Homo sapiens
  misc_RNA (1)...(19): siRNA sense strand
ucaauaagcuugccaacau

SEQ ID NO: 1377368 - RNA, 19 nt, Homo sapiens
  misc_RNA (1)...(19): siRNA sense strand
gcaguuauccaccuucuuu

SEQ ID NO: 1377369 - RNA, 19 nt, Homo sapiens
  misc_RNA (1)...(19): siRNA sense strand
cgaauaugcugaugaacaa

SEQ ID NO: 1377370 - RNA, 19 nt, Homo sapiens
  misc_RNA (1)...(19): siRNA sense strand
aaacagcgccaucaagaua

SEQ ID NO: 1377371 - RNA, 19 nt, Homo sapiens
  misc_RNA (1)...(19): siRNA sense strand
uuacaaagcucgacugaag

SEQ ID NO: 1377372 - RNA, 19 nt, Homo sapiens
  misc_RNA (1)...(19): siRNA sense strand
cagaauauccgcauugaaa

SEQ ID NO: 1377373 - RNA, 19 nt, Homo sapiens
  misc_RNA (1)...(19): siRNA sense strand
caauaagcuugccaacaua

SEQ ID NO: 1377374 - RNA, 19 nt, Homo sapiens
  misc_RNA (1)...(19): siRNA sense strand
gaacagagggaaccacgaa

SEQ ID NO: 1377375 - RNA, 19 nt, Homo sapiens
  misc_RNA (1)...(19): siRNA sense strand
gaucugaccuggaaaucau

SEQ ID NO: 1377376 - RNA, 19 nt, Homo sapiens
  misc_RNA (1)...(19): siRNA sense strand
caggagaucugacacauca

SEQ ID NO: 1377377 - RNA, 19 nt, Homo sapiens
  misc_RNA (1)...(19): siRNA sense strand
ggagaucccucaguucgaa

SEQ ID NO: 1377378 - RNA, 19 nt, Homo sapiens
  misc_RNA (1)...(19): siRNA sense strand
gggcugaacuuaccaugga

SEQ ID NO: 1377379 - RNA, 19 nt, Homo sapiens
  misc_RNA (1)...(19): siRNA sense strand
auacagaucugaccuggaa

SEQ ID NO: 1377380 - RNA, 19 nt, Homo sapiens
  misc_RNA (1)...(19): siRNA sense strand
gaccacagacuugaauuua

SEQ ID NO: 1377381 - RNA, 19 nt, Homo sapiens
  misc_RNA (1)...(19): siRNA sense strand
gauggaagcauugacuuua

SEQ ID NO: 1377382 - RNA, 19 nt, Homo sapiens
  misc_RNA (1)...(19): siRNA sense strand
ccaaagagguaacaaucug

SEQ ID NO: 1377383 - RNA, 19 nt, Homo sapiens
  misc_RNA (1)...(19): siRNA sense strand
gaaagaauuccauagagau

SEQ ID NO: 1377384 - RNA, 19 nt, Homo sapiens
  misc_RNA (1)...(19): siRNA sense strand
ccauagagauccuaaugau

SEQ ID NO: 1377385 - RNA, 19 nt, Homo sapiens
  misc_RNA (1)...(19): siRNA sense strand
gagggaaccacgaagauuu

SEQ ID NO: 1377386 - RNA, 19 nt, Homo sapiens
  misc_RNA (1)...(19): siRNA sense strand
ccaagaaaguccugaagca

SEQ ID NO: 1377387 - RNA, 19 nt, Homo sapiens
  misc_RNA (1)...(19): siRNA sense strand
guucgaaucugguaaacau

SEQ ID NO: 1377388 - RNA, 19 nt, Homo sapiens
  misc_RNA (1)...(19): siRNA sense strand
cuaaugauccuguguguga

SEQ ID NO: 1377389 - RNA, 19 nt, Homo sapiens
  misc_RNA (1)...(19): siRNA sense strand
cagcaguucuucaacgaaa

SEQ ID NO: 1377390 - RNA, 19 nt, Homo sapiens
  misc_RNA (1)...(19): siRNA sense strand
uaauggacuugaacaaaga

SEQ ID NO: 1377391 - RNA, 19 nt, Homo sapiens
  misc_RNA (1)...(19): siRNA sense strand
guagaucgaggaaagaauu

SEQ ID NO: 1377392 - RNA, 19 nt, Homo sapiens
  misc_RNA (1)...(19): siRNA sense strand
ccauggagaucccucaguu

SEQ ID NO: 1377393 - RNA, 19 nt, Homo sapiens
  misc_RNA (1)...(19): siRNA sense strand
ucuuagaggugcuauuuga

SEQ ID NO: 1377394 - RNA, 19 nt, Homo sapiens
  misc_RNA (1)...(19): siRNA sense strand
aaacuucucccuccaaaga

SEQ ID NO: 1377395 - RNA, 19 nt, Homo sapiens
  misc_RNA (1)...(19): siRNA sense strand
agaaaguccugaagcaaau

SEQ ID NO: 1377396 - RNA, 19 nt, Homo sapiens
  misc_RNA (1)...(19): siRNA sense strand
gauaugaagacuugaugaa

SEQ ID NO: 1377397 - RNA, 19 nt, Homo sapiens
  misc_RNA (1)...(19): siRNA sense strand
guagagaggaacaagauga

SEQ ID NO: 1377398 - RNA, 19 nt, Homo sapiens
  misc_RNA (1)...(19): siRNA sense strand
acacacauauacauaagga

SEQ ID NO: 1377399 - RNA, 19 nt, Homo sapiens
  misc_RNA (1)...(19): siRNA sense strand
gaaaacagcgccaucaaga

SEQ ID NO: 1377400 - RNA, 19 nt, Homo sapiens
  misc_RNA (1)...(19): siRNA sense strand
ccacagacuugaauuuacu

SEQ ID NO: 1377401 - RNA, 19 nt, Homo sapiens
  misc_RNA (1)...(19): siRNA sense strand
gguauggcuucacgaaaga

SEQ ID NO: 1377402 - RNA, 19 nt, Homo sapiens
  misc_RNA (1)...(19): siRNA sense strand
ccacgaagauuuuaugaug

SEQ ID NO: 1377403 - RNA, 19 nt, Homo sapiens
  misc_RNA (1)...(19): siRNA sense strand
ucaugcccauuaugucuua

SEQ ID NO: 1377404 - RNA, 19 nt, Homo sapiens
  misc_RNA (1)...(19): siRNA sense strand
guaccgagguuacaaagcu

SEQ ID NO: 1377405 - RNA, 19 nt, Homo sapiens
  misc_RNA (1)...(19): siRNA sense strand
gaauuuacuccaccgugua

SEQ ID NO: 1377406 - RNA, 19 nt, Homo sapiens
  misc_RNA (1)...(19): siRNA sense strand
caacggaaacaaacagaga

SEQ ID NO: 1377407 - RNA, 19 nt, Homo sapiens
  misc_RNA (1)...(19): siRNA sense strand
gauacuucaugcccauuau

SEQ ID NO: 1377408 - RNA, 19 nt, Homo sapiens
  misc_RNA (1)...(19): siRNA sense strand
guacaagaggcucauucua

SEQ ID NO: 1377409 - RNA, 19 nt, Homo sapiens
  misc_RNA (1)...(19): siRNA sense strand
ccaucaagauauuaagaga

SEQ ID NO: 1377410 - RNA, 19 nt, Homo sapiens
  misc_RNA (1)...(19): siRNA sense strand
uacaaucguugacaaugaa

SEQ ID NO: 1377411 - RNA, 19 nt, Homo sapiens
  misc_RNA (1)...(19): siRNA sense strand
cauaauggacuugaacaaa

SEQ ID NO: 1377412 - RNA, 19 nt, Homo sapiens
  misc_RNA (1)...(19): siRNA sense strand
gaucuccguggaagaauuu

SEQ ID NO: 1377413 - RNA, 19 nt, Homo sapiens
  misc_RNA (1)...(19): siRNA sense strand
aaacaaacagagaccauga

SEQ ID NO: 1377414 - RNA, 19 nt, Homo sapiens
  misc_RNA (1)...(19): siRNA sense strand
gagaggaacaagaugaaau

SEQ ID NO: 1377415 - RNA, 19 nt, Homo sapiens
  misc_RNA (1)...(19): siRNA sense strand
ggaaaacuacacacauaua

SEQ ID NO: 1377416 - RNA, 19 nt, Homo sapiens
  misc_RNA (1)...(19): siRNA sense strand
uggaaacguugaauacaug

SEQ ID NO: 1377417 - RNA, 19 nt, Homo sapiens
  misc_RNA (1)...(19): siRNA sense strand
ucacucacauacaaacuuc

SEQ ID NO: 1377418 - RNA, 19 nt, Homo sapiens
  misc_RNA (1)...(19): siRNA sense strand
acaaacuucucccuccaaa

SEQ ID NO: 1377419 - RNA, 19 nt, Homo sapiens
  misc_RNA (1)...(19): siRNA sense strand
uaagagagagagugauuuc

SEQ ID NO: 1377420 - RNA, 19 nt, Homo sapiens
  misc_RNA (1)...(19): siRNA sense strand
acagagaccaugacacuga

SEQ ID NO: 1377421 - RNA, 19 nt, Homo sapiens
  misc_RNA (1)...(19): siRNA sense strand
uaucagagaccacagacuu

SEQ ID NO: 1377422 - RNA, 19 nt, Homo sapiens
  misc_RNA (1)...(19): siRNA sense strand
aaacagagaccaugacacu

SEQ ID NO: 1377423 - RNA, 19 nt, Homo sapiens
  misc_RNA (1)...(19): siRNA sense strand
auaauggacuugaacaaag

SEQ ID NO: 1377424 - RNA, 19 nt, Homo sapiens
  misc_RNA (1)...(19): siRNA sense strand
uaugaagacuugaugaaac

SEQ ID NO: 1377425 - RNA, 19 nt, Homo sapiens
  misc_RNA (1)...(19): siRNA sense strand
cuacacacauauacauaag

SEQ ID NO: 1377426 - RNA, 19 nt, Homo sapiens
  misc_RNA (1)...(19): siRNA sense strand
cauugacacugaucacuca

SEQ ID NO: 1377427 - RNA, 19 nt, Homo sapiens
  misc_RNA (1)...(19): siRNA sense strand
aagaaaguccugaagcaaa

SEQ ID NO: 1377428 - RNA, 19 nt, Homo sapiens
  misc_RNA (1)...(19): siRNA sense strand
ccaacauaauggacuugaa

SEQ ID NO: 1377429 - RNA, 19 nt, Homo sapiens
  misc_RNA (1)...(19): siRNA sense strand
gaugauucccaagucaaua

SEQ ID NO: 1377430 - RNA, 19 nt, Homo sapiens
  misc_RNA (1)...(19): siRNA sense strand
acaagaggcucauucuacu

SEQ ID NO: 1377431 - RNA, 19 nt, Homo sapiens
  misc_RNA (1)...(19): siRNA sense strand
gaacugguaccgagguuac

SEQ ID NO: 1377432 - RNA, 19 nt, Homo sapiens
  misc_RNA (1)...(19): siRNA sense strand
cgaaucugguaaacauaga

SEQ ID NO: 1377433 - RNA, 19 nt, Homo sapiens
  misc_RNA (1)...(19): siRNA sense strand
ggacuugaacaaagaugga

SEQ ID NO: 1377434 - RNA, 19 nt, Homo sapiens
  misc_RNA (1)...(19): siRNA sense strand
caagaaaguccugaagcaa

SEQ ID NO: 1377435 - RNA, 19 nt, Homo sapiens
  misc_RNA (1)...(19): siRNA sense strand
ggaugcagcaguucuucaa

SEQ ID NO: 1377436 - RNA, 19 nt, Homo sapiens
  misc_RNA (1)...(19): siRNA sense strand
ugaugaaucugagguaugg

SEQ ID NO: 1377437 - RNA, 19 nt, Homo sapiens
  misc_RNA (1)...(19): siRNA sense strand
caagauauuaagagagaga

SEQ ID NO: 1377438 - RNA, 19 nt, Homo sapiens
  misc_RNA (1)...(19): siRNA sense strand
uugaauacauguccagcuu

SEQ ID NO: 1377439 - RNA, 19 nt, Homo sapiens
  misc_RNA (1)...(19): siRNA sense strand
ggaaacaaacagagaccau

SEQ ID NO: 1377440 - RNA, 19 nt, Homo sapiens
  misc_RNA (1)...(19): siRNA sense strand
auggaagcauugacuuuaa

SEQ ID NO: 1377441 - RNA, 19 nt, Homo sapiens
  misc_RNA (1)...(19): siRNA sense strand
gaaggccagacaacacuau

SEQ ID NO: 1377442 - RNA, 19 nt, Homo sapiens
  misc_RNA (1)...(19): siRNA sense strand
gagcugcguugaucaucca

SEQ ID NO: 1377443 - RNA, 19 nt, Homo sapiens
  misc_RNA (1)...(19): siRNA sense strand
uuagaggugcuauuugaaa

SEQ ID NO: 1377444 - RNA, 19 nt, Homo sapiens
  misc_RNA (1)...(19): siRNA sense strand
caacauaauggacuugaac

SEQ ID NO: 1377445 - RNA, 19 nt, Homo sapiens
  misc_RNA (1)...(19): siRNA sense strand
cccaaucgguacaaucguu

SEQ ID NO: 1377446 - RNA, 19 nt, Homo sapiens
  misc_RNA (1)...(19): siRNA sense strand
ugucuuagaggugcuauuu

SEQ ID NO: 1377447 - RNA, 19 nt, Homo sapiens
  misc_RNA (1)...(19): siRNA sense strand
uggaagcauugacuuuaau

SEQ ID NO: 1377448 - RNA, 19 nt, Homo sapiens
  misc_RNA (1)...(19): siRNA sense strand
ggauaucagagaccacaga

SEQ ID NO: 1377449 - RNA, 19 nt, Homo sapiens
  misc_RNA (1)...(19): siRNA sense strand
acagcgccaucaagauauu

SEQ ID NO: 1377450 - RNA, 19 nt, Homo sapiens
  misc_RNA (1)...(19): siRNA sense strand
cgugccauguggaaacuuu

SEQ ID NO: 1377451 - RNA, 19 nt, Homo sapiens
  misc_RNA (1)...(19): siRNA sense strand
gagguauggcuucacgaaa

SEQ ID NO: 1377452 - RNA, 19 nt, Homo sapiens
  misc_RNA (1)...(19): siRNA sense strand
aaacauagaccaaaaugga

SEQ ID NO: 1377453 - RNA, 19 nt, Homo sapiens
  misc_RNA (1)...(19): siRNA sense strand
acugagagcugcguugauc

SEQ ID NO: 1377454 - RNA, 19 nt, Homo sapiens
  misc_RNA (1)...(19): siRNA sense strand
gaggcucauucuacucuag

SEQ ID NO: 1377455 - RNA, 19 nt, Homo sapiens
  misc_RNA (1)...(19): siRNA sense strand
caacuucaagaccacagaa

SEQ ID NO: 1377456 - RNA, 19 nt, Homo sapiens
  misc_RNA (1)...(19): siRNA sense strand
ugaccuuacucgugcuuuc

SEQ ID NO: 1377457 - RNA, 19 nt, Homo sapiens
  misc_RNA (1)...(19): siRNA sense strand
uaugaugaaucugagguau

SEQ ID NO: 1377458 - RNA, 19 nt, Homo sapiens
  misc_RNA (1)...(19): siRNA sense strand
uacaagaggcucauucuac

SEQ ID NO: 1377459 - RNA, 19 nt, Homo sapiens
  misc_RNA (1)...(19): siRNA sense strand
uaagcuugccaacauaaug

SEQ ID NO: 1377460 - RNA, 19 nt, Homo sapiens
  misc_RNA (1)...(19): siRNA sense strand
ugaucuccguggaagaauu

SEQ ID NO: 1377461 - RNA, 19 nt, Homo sapiens
  misc_RNA (1)...(19): siRNA sense strand
gaacaaagauggaagcauu

SEQ ID NO: 1377462 - RNA, 19 nt, Homo sapiens
  misc_RNA (1)...(19): siRNA sense strand
gaugaaaucugugcugaua

SEQ ID NO: 1377463 - RNA, 19 nt, Homo sapiens
  misc_RNA (1)...(19): siRNA sense strand
gaauuucacucacauacaa

SEQ ID NO: 1377464 - RNA, 19 nt, Homo sapiens
  misc_RNA (1)...(19): siRNA sense strand
ccaaugaccugcacuugaa

SEQ ID NO: 1377465 - RNA, 19 nt, Homo sapiens
  misc_RNA (1)...(19): siRNA sense strand
gagaggaacccguauguuu

SEQ ID NO: 1377466 - RNA, 19 nt, Homo sapiens
  misc_RNA (1)...(19): siRNA sense strand
guacaaucguugacaauga

SEQ ID NO: 1377467 - RNA, 19 nt, Homo sapiens
  misc_RNA (1)...(19): siRNA sense strand
ucaauaagcuugccaacau

SEQ ID NO: 1377468 - RNA, 19 nt, Homo sapiens
  misc_RNA (1)...(19): siRNA sense strand
aaacagcgccaucaagaua

SEQ ID NO: 1377469 - RNA, 19 nt, Homo sapiens
  misc_RNA (1)...(19): siRNA sense strand
cagaauauccgcauugaaa

SEQ ID NO: 1377470 - RNA, 19 nt, Homo sapiens
  misc_RNA (1)...(19): siRNA sense strand
caauaagcuugccaacaua

SEQ ID NO: 1377471 - RNA, 19 nt, Homo sapiens
  misc_RNA (1)...(19): siRNA sense strand
gaacagagggaaccacgaa

SEQ ID NO: 1377472 - RNA, 19 nt, Homo sapiens
  misc_RNA (1)...(19): siRNA sense strand
gaucugaccuggaaaucau

SEQ ID NO: 1377473 - RNA, 19 nt, Homo sapiens
  misc_RNA (1)...(19): siRNA sense strand
ggagaucccucaguucgaa

SEQ ID NO: 1377474 - RNA, 19 nt, Homo sapiens
  misc_RNA (1)...(19): siRNA sense strand
gggcugaacuuaccaugga

SEQ ID NO: 1377475 - RNA, 19 nt, Homo sapiens
  misc_RNA (1)...(19): siRNA sense strand
auacagaucugaccuggaa

SEQ ID NO: 1377476 - RNA, 19 nt, Homo sapiens
  misc_RNA (1)...(19): siRNA sense strand
gaccacagacuugaauuua

SEQ ID NO: 1377477 - RNA, 19 nt, Homo sapiens
  misc_RNA (1)...(19): siRNA sense strand
gauggaagcauugacuuua

SEQ ID NO: 1377478 - RNA, 19 nt, Homo sapiens
  misc_RNA (1)...(19): siRNA sense strand
ccaaagagguaacaaucug

SEQ ID NO: 1377479 - RNA, 19 nt, Homo sapiens
  misc_RNA (1)...(19): siRNA sense strand
gaaagaauuccauagagau

SEQ ID NO: 1377480 - RNA, 19 nt, Homo sapiens
  misc_RNA (1)...(19): siRNA sense strand
ccauagagauccuaaugau

SEQ ID NO: 1377481 - RNA, 19 nt, Homo sapiens
  misc_RNA (1)...(19): siRNA sense strand
gagggaaccacgaagauuu

SEQ ID NO: 1377482 - RNA, 19 nt, Homo sapiens
  misc_RNA (1)...(19): siRNA sense strand
cuaaugauccuguguguga

SEQ ID NO: 1377483 - RNA, 19 nt, Homo sapiens
  misc_RNA (1)...(19): siRNA sense strand
guucgaaucugguaaacau

SEQ ID NO: 1377484 - RNA, 19 nt, Homo sapiens
  misc_RNA (1)...(19): siRNA sense strand
uaauggacuugaacaaaga

SEQ ID NO: 1377485 - RNA, 19 nt, Homo sapiens
  misc_RNA (1)...(19): siRNA sense strand
guagaucgaggaaagaauu

SEQ ID NO: 1377486 - RNA, 19 nt, Homo sapiens
  misc_RNA (1)...(19): siRNA sense strand
ccauggagaucccucaguu

SEQ ID NO: 1377487 - RNA, 19 nt, Homo sapiens
  misc_RNA (1)...(19): siRNA sense strand
aaacuucucccuccaaaga

SEQ ID NO: 1377488 - RNA, 19 nt, Homo sapiens
  misc_RNA (1)...(19): siRNA sense strand
guagagaggaacaagauga

SEQ ID NO: 1377489 - RNA, 19 nt, Homo sapiens
  misc_RNA (1)...(19): siRNA sense strand
gauaugaagacuugaugaa

SEQ ID NO: 1377490 - RNA, 19 nt, Homo sapiens
  misc_RNA (1)...(19): siRNA sense strand
ccacgaagauuuuaugaug

SEQ ID NO: 1377491 - RNA, 19 nt, Homo sapiens
  misc_RNA (1)...(19): siRNA sense strand
gaaaacagcgccaucaaga

SEQ ID NO: 1377492 - RNA, 19 nt, Homo sapiens
  misc_RNA (1)...(19): siRNA sense strand
ccacagacuugaauuuacu

SEQ ID NO: 1377493 - RNA, 19 nt, Homo sapiens
  misc_RNA (1)...(19): siRNA sense strand
gguauggcuucacgaaaga

SEQ ID NO: 1377494 - RNA, 19 nt, Homo sapiens
  misc_RNA (1)...(19): siRNA sense strand
gaauuuacuccaccgugua

SEQ ID NO: 1377495 - RNA, 19 nt, Homo sapiens
  misc_RNA (1)...(19): siRNA sense strand
caacggaaacaaacagaga

SEQ ID NO: 1377496 - RNA, 19 nt, Homo sapiens
  misc_RNA (1)...(19): siRNA sense strand
ccaucaagauauuaagaga

SEQ ID NO: 1377497 - RNA, 19 nt, Homo sapiens
  misc_RNA (1)...(19): siRNA sense strand
guacaagaggcucauucua

SEQ ID NO: 1377498 - RNA, 19 nt, Homo sapiens
  misc_RNA (1)...(19): siRNA sense strand
uacaaucguugacaaugaa

SEQ ID NO: 1377499 - RNA, 19 nt, Homo sapiens
  misc_RNA (1)...(19): siRNA sense strand
cauaauggacuugaacaaa

SEQ ID NO: 1377500 - RNA, 19 nt, Homo sapiens
  misc_RNA (1)...(19): siRNA sense strand
gaucuccguggaagaauuu

SEQ ID NO: 1377501 - RNA, 19 nt, Homo sapiens
  misc_RNA (1)...(19): siRNA sense strand
aaacaaacagagaccauga

SEQ ID NO: 1377502 - RNA, 19 nt, Homo sapiens
  misc_RNA (1)...(19): siRNA sense strand
gagaggaacaagaugaaau

SEQ ID NO: 1377503 - RNA, 19 nt, Homo sapiens
  misc_RNA (1)...(19): siRNA sense strand
ucacucacauacaaacuuc

SEQ ID NO: 1377504 - RNA, 19 nt, Homo sapiens
  misc_RNA (1)...(19): siRNA sense strand
uggaaacguugaauacaug

SEQ ID NO: 1377505 - RNA, 19 nt, Homo sapiens
  misc_RNA (1)...(19): siRNA sense strand
acaaacuucucccuccaaa

SEQ ID NO: 1377506 - RNA, 19 nt, Homo sapiens
  misc_RNA (1)...(19): siRNA sense strand
uaagagagagagugauuuc

SEQ ID NO: 1377507 - RNA, 19 nt, Homo sapiens
  misc_RNA (1)...(19): siRNA sense strand
acagagaccaugacacuga

SEQ ID NO: 1377508 - RNA, 19 nt, Homo sapiens
  misc_RNA (1)...(19): siRNA sense strand
uaucagagaccacagacuu

SEQ ID NO: 1377509 - RNA, 19 nt, Homo sapiens
  misc_RNA (1)...(19): siRNA sense strand
aaacagagaccaugacacu

SEQ ID NO: 1377510 - RNA, 19 nt, Homo sapiens
  misc_RNA (1)...(19): siRNA sense strand
auaauggacuugaacaaag

SEQ ID NO: 1377511 - RNA, 19 nt, Homo sapiens
  misc_RNA (1)...(19): siRNA sense strand
uaugaagacuugaugaaac

SEQ ID NO: 1377512 - RNA, 19 nt, Homo sapiens
  misc_RNA (1)...(19): siRNA sense strand
cauugacacugaucacuca

SEQ ID NO: 1377513 - RNA, 19 nt, Homo sapiens
  misc_RNA (1)...(19): siRNA sense strand
acaagaggcucauucuacu

SEQ ID NO: 1377514 - RNA, 19 nt, Homo sapiens
  misc_RNA (1)...(19): siRNA sense strand
ccaacauaauggacuugaa

SEQ ID NO: 1377515 - RNA, 19 nt, Homo sapiens
  misc_RNA (1)...(19): siRNA sense strand
gaugauucccaagucaaua

SEQ ID NO: 1377516 - RNA, 19 nt, Homo sapiens
  misc_RNA (1)...(19): siRNA sense strand
cgaaucugguaaacauaga

SEQ ID NO: 1377517 - RNA, 19 nt, Homo sapiens
  misc_RNA (1)...(19): siRNA sense strand
ggacuugaacaaagaugga

SEQ ID NO: 1377518 - RNA, 19 nt, Homo sapiens
  misc_RNA (1)...(19): siRNA sense strand
ugaugaaucugagguaugg

SEQ ID NO: 1377519 - RNA, 19 nt, Homo sapiens
  misc_RNA (1)...(19): siRNA sense strand
caagauauuaagagagaga

SEQ ID NO: 1377520 - RNA, 19 nt, Homo sapiens
  misc_RNA (1)...(19): siRNA sense strand
uugaauacauguccagcuu

SEQ ID NO: 1377521 - RNA, 19 nt, Homo sapiens
  misc_RNA (1)...(19): siRNA sense strand
ggaaacaaacagagaccau

SEQ ID NO: 1377522 - RNA, 19 nt, Homo sapiens
  misc_RNA (1)...(19): siRNA sense strand
auggaagcauugacuuuaa

SEQ ID NO: 1377523 - RNA, 19 nt, Homo sapiens
  misc_RNA (1)...(19): siRNA sense strand
cccaaucgguacaaucguu

SEQ ID NO: 1377524 - RNA, 19 nt, Homo sapiens
  misc_RNA (1)...(19): siRNA sense strand
caacauaauggacuugaac

SEQ ID NO: 1377525 - RNA, 19 nt, Homo sapiens
  misc_RNA (1)...(19): siRNA sense strand
ggauaucagagaccacaga

SEQ ID NO: 1377526 - RNA, 19 nt, Homo sapiens
  misc_RNA (1)...(19): siRNA sense strand
uggaagcauugacuuuaau

SEQ ID NO: 1377527 - RNA, 19 nt, Homo sapiens
  misc_RNA (1)...(19): siRNA sense strand
acagcgccaucaagauauu

SEQ ID NO: 1377528 - RNA, 19 nt, Homo sapiens
  misc_RNA (1)...(19): siRNA sense strand
cgugccauguggaaacuuu

SEQ ID NO: 1377529 - RNA, 19 nt, Homo sapiens
  misc_RNA (1)...(19): siRNA sense strand
gagguauggcuucacgaaa

SEQ ID NO: 1377530 - RNA, 19 nt, Homo sapiens
  misc_RNA (1)...(19): siRNA sense strand
aaacauagaccaaaaugga

SEQ ID NO: 1377531 - RNA, 19 nt, Homo sapiens
  misc_RNA (1)...(19): siRNA sense strand
uaugaugaaucugagguau

SEQ ID NO: 1377532 - RNA, 19 nt, Homo sapiens
  misc_RNA (1)...(19): siRNA sense strand
gaggcucauucuacucuag

SEQ ID NO: 1377533 - RNA, 19 nt, Homo sapiens
  misc_RNA (1)...(19): siRNA sense strand
caacuucaagaccacagaa

SEQ ID NO: 1377534 - RNA, 19 nt, Homo sapiens
  misc_RNA (1)...(19): siRNA sense strand
ugaccuuacucgugcuuuc

SEQ ID NO: 1377535 - RNA, 19 nt, Homo sapiens
  misc_RNA (1)...(19): siRNA sense strand
agaccacagacuugaauuu

SEQ ID NO: 1377536 - RNA, 19 nt, Homo sapiens
  misc_RNA (1)...(19): siRNA sense strand
uaagcuugccaacauaaug

SEQ ID NO: 1377537 - RNA, 19 nt, Homo sapiens
  misc_RNA (1)...(19): siRNA sense strand
ugaucuccguggaagaauu

SEQ ID NO: 1377538 - RNA, 19 nt, Homo sapiens
  misc_RNA (1)...(19): siRNA sense strand
uacaagaggcucauucuac

SEQ ID NO: 1377539 - RNA, 19 nt, Homo sapiens
  misc_RNA (1)...(19): siRNA sense strand
ucagagaccacagacuuga

SEQ ID NO: 1377540 - RNA, 19 nt, Homo sapiens
  misc_RNA (1)...(19): siRNA sense strand
ucauucuacucuaguugaa

SEQ ID NO: 1377541 - RNA, 19 nt, Homo sapiens
  misc_RNA (1)...(19): siRNA sense strand
aaauggaaacguugaauac

SEQ ID NO: 1377542 - RNA, 19 nt, Homo sapiens
  misc_RNA (1)...(19): siRNA sense strand
ccacagaaaaucaggaaaa

SEQ ID NO: 1377543 - RNA, 19 nt, Homo sapiens
  misc_RNA (1)...(19): siRNA sense strand
caaagagguaacaaucugu

SEQ ID NO: 1377544 - RNA, 19 nt, Homo sapiens
  misc_RNA (1)...(19): siRNA sense strand
ucaguucgaaucugguaaa

SEQ ID NO: 1377545 - RNA, 19 nt, Homo sapiens
  misc_RNA (1)...(19): siRNA sense strand
aauaagcuugccaacauaa

SEQ ID NO: 1377546 - RNA, 19 nt, Homo sapiens
  misc_RNA (1)...(19): siRNA sense strand
ugaaaucugugcugauacc

SEQ ID NO: 1377547 - RNA, 19 nt, Homo sapiens
  misc_RNA (1)...(19): siRNA sense strand
cagagaggaacccguaugu

SEQ ID NO: 1377548 - RNA, 19 nt, Homo sapiens
  misc_RNA (1)...(19): siRNA sense strand
uccagaauauccgcauuga

SEQ ID NO: 1377549 - RNA, 19 nt, Homo sapiens
  misc_RNA (1)...(19): siRNA sense strand
gguacaaucguugacaaug

SEQ ID NO: 1377550 - RNA, 19 nt, Homo sapiens
  misc_RNA (1)...(19): siRNA sense strand
auguccagcuuccagaaua

SEQ ID NO: 1377551 - RNA, 19 nt, Homo sapiens
  misc_RNA (1)...(19): siRNA sense strand
ggaaacguugaauacaugu

SEQ ID NO: 1377552 - RNA, 19 nt, Homo sapiens
  misc_RNA (1)...(19): siRNA sense strand
cccaaugaccugcacuuga

SEQ ID NO: 1377553 - RNA, 19 nt, Homo sapiens
  misc_RNA (1)...(19): siRNA sense strand
uagagaggaacaagaugaa

SEQ ID NO: 1377554 - RNA, 19 nt, Homo sapiens
  misc_RNA (1)...(19): siRNA sense strand
gggaaacuggaugaucuuu

SEQ ID NO: 1377555 - RNA, 19 nt, Homo sapiens
  misc_RNA (1)...(19): siRNA sense strand
ugagguauggcuucacgaa

SEQ ID NO: 1377556 - RNA, 19 nt, Homo sapiens
  misc_RNA (1)...(19): siRNA sense strand
agauggaagcauugacuuu

SEQ ID NO: 1377557 - RNA, 19 nt, Homo sapiens
  misc_RNA (1)...(19): siRNA sense strand
gaagaauuucgugccaugu

SEQ ID NO: 1377558 - RNA, 19 nt, Homo sapiens
  misc_RNA (1)...(19): siRNA sense strand
cagaaaaucaggaaaacuu

SEQ ID NO: 1377559 - RNA, 19 nt, Homo sapiens
  misc_RNA (1)...(19): siRNA sense strand
gaaccacgaagauuuuaug

SEQ ID NO: 1377560 - RNA, 19 nt, Homo sapiens
  misc_RNA (1)...(19): siRNA sense strand
agguauggcuucacgaaag

SEQ ID NO: 1377561 - RNA, 19 nt, Homo sapiens
  misc_RNA (1)...(19): siRNA sense strand
gaacaaagauggaagcauu

SEQ ID NO: 1377562 - RNA, 19 nt, Homo sapiens
  misc_RNA (1)...(19): siRNA sense strand
gaugaaaucugugcugaua

SEQ ID NO: 1377563 - RNA, 19 nt, Homo sapiens
  misc_RNA (1)...(19): siRNA sense strand
gaauuucacucacauacaa

SEQ ID NO: 1377564 - RNA, 19 nt, Homo sapiens
  misc_RNA (1)...(19): siRNA sense strand
ccaaugaccugcacuugaa

SEQ ID NO: 1377565 - RNA, 19 nt, Homo sapiens
  misc_RNA (1)...(19): siRNA sense strand
gagaggaacccguauguuu

SEQ ID NO: 1377566 - RNA, 19 nt, Homo sapiens
  misc_RNA (1)...(19): siRNA sense strand
guacaaucguugacaauga

SEQ ID NO: 1377567 - RNA, 19 nt, Homo sapiens
  misc_RNA (1)...(19): siRNA sense strand
ucaauaagcuugccaacau

SEQ ID NO: 1377568 - RNA, 19 nt, Homo sapiens
  misc_RNA (1)...(19): siRNA sense strand
gcaguuauccaccuucuuu

SEQ ID NO: 1377569 - RNA, 19 nt, Homo sapiens
  misc_RNA (1)...(19): siRNA sense strand
cgaauaugcugaugaacaa

SEQ ID NO: 1377570 - RNA, 19 nt, Homo sapiens
  misc_RNA (1)...(19): siRNA sense strand
aaacagcgccaucaagaua

SEQ ID NO: 1377571 - RNA, 19 nt, Homo sapiens
  misc_RNA (1)...(19): siRNA sense strand
uuacaaagcucgacugaag

SEQ ID NO: 1377572 - RNA, 19 nt, Homo sapiens
  misc_RNA (1)...(19): siRNA sense strand
cagaauauccgcauugaaa

SEQ ID NO: 1377573 - RNA, 19 nt, Homo sapiens
  misc_RNA (1)...(19): siRNA sense strand
caauaagcuugccaacaua

SEQ ID NO: 1377574 - RNA, 19 nt, Homo sapiens
  misc_RNA (1)...(19): siRNA sense strand
gaacagagggaaccacgaa

SEQ ID NO: 1377575 - RNA, 19 nt, Homo sapiens
  misc_RNA (1)...(19): siRNA sense strand
gaucugaccuggaaaucau

SEQ ID NO: 1377576 - RNA, 19 nt, Homo sapiens
  misc_RNA (1)...(19): siRNA sense strand
caggagaucugacacauca

SEQ ID NO: 1377577 - RNA, 19 nt, Homo sapiens
  misc_RNA (1)...(19): siRNA sense strand
ggagaucccucaguucgaa

SEQ ID NO: 1377578 - RNA, 19 nt, Homo sapiens
  misc_RNA (1)...(19): siRNA sense strand
gggcugaacuuaccaugga

SEQ ID NO: 1377579 - RNA, 19 nt, Homo sapiens
  misc_RNA (1)...(19): siRNA sense strand
auacagaucugaccuggaa

SEQ ID NO: 1377580 - RNA, 19 nt, Homo sapiens
  misc_RNA (1)...(19): siRNA sense strand
gaccacagacuugaauuua

SEQ ID NO: 1377581 - RNA, 19 nt, Homo sapiens
  misc_RNA (1)...(19): siRNA sense strand
gauggaagcauugacuuua

SEQ ID NO: 1377582 - RNA, 19 nt, Homo sapiens
  misc_RNA (1)...(19): siRNA sense strand
ccaaagagguaacaaucug

SEQ ID NO: 1377583 - RNA, 19 nt, Homo sapiens
  misc_RNA (1)...(19): siRNA sense strand
gaaagaauuccauagagau

SEQ ID NO: 1377584 - RNA, 19 nt, Homo sapiens
  misc_RNA (1)...(19): siRNA sense strand
ccauagagauccuaaugau

SEQ ID NO: 1377585 - RNA, 19 nt, Homo sapiens
  misc_RNA (1)...(19): siRNA sense strand
gagggaaccacgaagauuu

SEQ ID NO: 1377586 - RNA, 19 nt, Homo sapiens
  misc_RNA (1)...(19): siRNA sense strand
ccaagaaaguccugaagca

SEQ ID NO: 1377587 - RNA, 19 nt, Homo sapiens
  misc_RNA (1)...(19): siRNA sense strand
guucgaaucugguaaacau

SEQ ID NO: 1377588 - RNA, 19 nt, Homo sapiens
  misc_RNA (1)...(19): siRNA sense strand
cuaaugauccuguguguga

SEQ ID NO: 1377589 - RNA, 19 nt, Homo sapiens
  misc_RNA (1)...(19): siRNA sense strand
cagcaguucuucaacgaaa

SEQ ID NO: 1377590 - RNA, 19 nt, Homo sapiens
  misc_RNA (1)...(19): siRNA sense strand
uaauggacuugaacaaaga

SEQ ID NO: 1377591 - RNA, 19 nt, Homo sapiens
  misc_RNA (1)...(19): siRNA sense strand
guagaucgaggaaagaauu

SEQ ID NO: 1377592 - RNA, 19 nt, Homo sapiens
  misc_RNA (1)...(19): siRNA sense strand
ccauggagaucccucaguu

SEQ ID NO: 1377593 - RNA, 19 nt, Homo sapiens
  misc_RNA (1)...(19): siRNA sense strand
ucuuagaggugcuauuuga

SEQ ID NO: 1377594 - RNA, 19 nt, Homo sapiens
  misc_RNA (1)...(19): siRNA sense strand
aaacuucucccuccaaaga

SEQ ID NO: 1377595 - RNA, 19 nt, Homo sapiens
  misc_RNA (1)...(19): siRNA sense strand
agaaaguccugaagcaaau

SEQ ID NO: 1377596 - RNA, 19 nt, Homo sapiens
  misc_RNA (1)...(19): siRNA sense strand
gauaugaagacuugaugaa

SEQ ID NO: 1377597 - RNA, 19 nt, Homo sapiens
  misc_RNA (1)...(19): siRNA sense strand
guagagaggaacaagauga

SEQ ID NO: 1377598 - RNA, 19 nt, Homo sapiens
  misc_RNA (1)...(19): siRNA sense strand
acacacauauacauaagga

SEQ ID NO: 1377599 - RNA, 19 nt, Homo sapiens
  misc_RNA (1)...(19): siRNA sense strand
gaaaacagcgccaucaaga

SEQ ID NO: 1377600 - RNA, 19 nt, Homo sapiens
  misc_RNA (1)...(19): siRNA sense strand
ccacagacuugaauuuacu

SEQ ID NO: 1377601 - RNA, 19 nt, Homo sapiens
  misc_RNA (1)...(19): siRNA sense strand
gguauggcuucacgaaaga

SEQ ID NO: 1377602 - RNA, 19 nt, Homo sapiens
  misc_RNA (1)...(19): siRNA sense strand
ccacgaagauuuuaugaug

SEQ ID NO: 1377603 - RNA, 19 nt, Homo sapiens
  misc_RNA (1)...(19): siRNA sense strand
ucaugcccauuaugucuua

SEQ ID NO: 1377604 - RNA, 19 nt, Homo sapiens
  misc_RNA (1)...(19): siRNA sense strand
guaccgagguuacaaagcu

SEQ ID NO: 1377605 - RNA, 19 nt, Homo sapiens
  misc_RNA (1)...(19): siRNA sense strand
gaauuuacuccaccgugua

SEQ ID NO: 1377606 - RNA, 19 nt, Homo sapiens
  misc_RNA (1)...(19): siRNA sense strand
caacggaaacaaacagaga

SEQ ID NO: 1377607 - RNA, 19 nt, Homo sapiens
  misc_RNA (1)...(19): siRNA sense strand
gauacuucaugcccauuau

SEQ ID NO: 1377608 - RNA, 19 nt, Homo sapiens
  misc_RNA (1)...(19): siRNA sense strand
guacaagaggcucauucua

SEQ ID NO: 1377609 - RNA, 19 nt, Homo sapiens
  misc_RNA (1)...(19): siRNA sense strand
ccaucaagauauuaagaga

SEQ ID NO: 1377610 - RNA, 19 nt, Homo sapiens
  misc_RNA (1)...(19): siRNA sense strand
uacaaucguugacaaugaa

SEQ ID NO: 1377611 - RNA, 19 nt, Homo sapiens
  misc_RNA (1)...(19): siRNA sense strand
cauaauggacuugaacaaa

SEQ ID NO: 1377612 - RNA, 19 nt, Homo sapiens
  misc_RNA (1)...(19): siRNA sense strand
gaucuccguggaagaauuu

SEQ ID NO: 1377613 - RNA, 19 nt, Homo sapiens
  misc_RNA (1)...(19): siRNA sense strand
aaacaaacagagaccauga

SEQ ID NO: 1377614 - RNA, 19 nt, Homo sapiens
  misc_RNA (1)...(19): siRNA sense strand
gagaggaacaagaugaaau

SEQ ID NO: 1377615 - RNA, 19 nt, Homo sapiens
  misc_RNA (1)...(19): siRNA sense strand
ggaaaacuacacacauaua

SEQ ID NO: 1377616 - RNA, 19 nt, Homo sapiens
  misc_RNA (1)...(19): siRNA sense strand
uggaaacguugaauacaug

SEQ ID NO: 1377617 - RNA, 19 nt, Homo sapiens
  misc_RNA (1)...(19): siRNA sense strand
ucacucacauacaaacuuc

SEQ ID NO: 1377618 - RNA, 19 nt, Homo sapiens
  misc_RNA (1)...(19): siRNA sense strand
acaaacuucucccuccaaa

SEQ ID NO: 1377619 - RNA, 19 nt, Homo sapiens
  misc_RNA (1)...(19): siRNA sense strand
uaagagagagagugauuuc

SEQ ID NO: 1377620 - RNA, 19 nt, Homo sapiens
  misc_RNA (1)...(19): siRNA sense strand
acagagaccaugacacuga

SEQ ID NO: 1377621 - RNA, 19 nt, Homo sapiens
  misc_RNA (1)...(19): siRNA sense strand
uaucagagaccacagacuu

SEQ ID NO: 1377622 - RNA, 19 nt, Homo sapiens
  misc_RNA (1)...(19): siRNA sense strand
aaacagagaccaugacacu

SEQ ID NO: 1377623 - RNA, 19 nt, Homo sapiens
  misc_RNA (1)...(19): siRNA sense strand
auaauggacuugaacaaag

SEQ ID NO: 1377624 - RNA, 19 nt, Homo sapiens
  misc_RNA (1)...(19): siRNA sense strand
uaugaagacuugaugaaac

SEQ ID NO: 1377625 - RNA, 19 nt, Homo sapiens
  misc_RNA (1)...(19): siRNA sense strand
cuacacacauauacauaag

SEQ ID NO: 1377626 - RNA, 19 nt, Homo sapiens
  misc_RNA (1)...(19): siRNA sense strand
cauugacacugaucacuca

SEQ ID NO: 1377627 - RNA, 19 nt, Homo sapiens
  misc_RNA (1)...(19): siRNA sense strand
aagaaaguccugaagcaaa

SEQ ID NO: 1377628 - RNA, 19 nt, Homo sapiens
  misc_RNA (1)...(19): siRNA sense strand
ccaacauaauggacuugaa

SEQ ID NO: 1377629 - RNA, 19 nt, Homo sapiens
  misc_RNA (1)...(19): siRNA sense strand
gaugauucccaagucaaua

SEQ ID NO: 1377630 - RNA, 19 nt, Homo sapiens
  misc_RNA (1)...(19): siRNA sense strand
acaagaggcucauucuacu

SEQ ID NO: 1377631 - RNA, 19 nt, Homo sapiens
  misc_RNA (1)...(19): siRNA sense strand
gaacugguaccgagguuac

SEQ ID NO: 1377632 - RNA, 19 nt, Homo sapiens
  misc_RNA (1)...(19): siRNA sense strand
cgaaucugguaaacauaga

SEQ ID NO: 1377633 - RNA, 19 nt, Homo sapiens
  misc_RNA (1)...(19): siRNA sense strand
ggacuugaacaaagaugga

SEQ ID NO: 1377634 - RNA, 19 nt, Homo sapiens
  misc_RNA (1)...(19): siRNA sense strand
caagaaaguccugaagcaa

SEQ ID NO: 1377635 - RNA, 19 nt, Homo sapiens
  misc_RNA (1)...(19): siRNA sense strand
ggaugcagcaguucuucaa

SEQ ID NO: 1377636 - RNA, 19 nt, Homo sapiens
  misc_RNA (1)...(19): siRNA sense strand
ugaugaaucugagguaugg

SEQ ID NO: 1377637 - RNA, 19 nt, Homo sapiens
  misc_RNA (1)...(19): siRNA sense strand
caagauauuaagagagaga

SEQ ID NO: 1377638 - RNA, 19 nt, Homo sapiens
  misc_RNA (1)...(19): siRNA sense strand
uugaauacauguccagcuu

SEQ ID NO: 1377639 - RNA, 19 nt, Homo sapiens
  misc_RNA (1)...(19): siRNA sense strand
ggaaacaaacagagaccau

SEQ ID NO: 1377640 - RNA, 19 nt, Homo sapiens
  misc_RNA (1)...(19): siRNA sense strand
auggaagcauugacuuuaa

SEQ ID NO: 1377641 - RNA, 19 nt, Homo sapiens
  misc_RNA (1)...(19): siRNA sense strand
gaaggccagacaacacuau

SEQ ID NO: 1377642 - RNA, 19 nt, Homo sapiens
  misc_RNA (1)...(19): siRNA sense strand
gagcugcguugaucaucca

SEQ ID NO: 1377643 - RNA, 19 nt, Homo sapiens
  misc_RNA (1)...(19): siRNA sense strand
uuagaggugcuauuugaaa

SEQ ID NO: 1377644 - RNA, 19 nt, Homo sapiens
  misc_RNA (1)...(19): siRNA sense strand
caacauaauggacuugaac

SEQ ID NO: 1377645 - RNA, 19 nt, Homo sapiens
  misc_RNA (1)...(19): siRNA sense strand
cccaaucgguacaaucguu

SEQ ID NO: 1377646 - RNA, 19 nt, Homo sapiens
  misc_RNA (1)...(19): siRNA sense strand
ugucuuagaggugcuauuu

SEQ ID NO: 1377647 - RNA, 19 nt, Homo sapiens
  misc_RNA (1)...(19): siRNA sense strand
uggaagcauugacuuuaau

SEQ ID NO: 1377648 - RNA, 19 nt, Homo sapiens
  misc_RNA (1)...(19): siRNA sense strand
ggauaucagagaccacaga

SEQ ID NO: 1377649 - RNA, 19 nt, Homo sapiens
  misc_RNA (1)...(19): siRNA sense strand
acagcgccaucaagauauu

SEQ ID NO: 1377650 - RNA, 19 nt, Homo sapiens
  misc_RNA (1)...(19): siRNA sense strand
cgugccauguggaaacuuu

SEQ ID NO: 1377651 - RNA, 19 nt, Homo sapiens
  misc_RNA (1)...(19): siRNA sense strand
gagguauggcuucacgaaa

SEQ ID NO: 1377652 - RNA, 19 nt, Homo sapiens
  misc_RNA (1)...(19): siRNA sense strand
aaacauagaccaaaaugga

SEQ ID NO: 1377653 - RNA, 19 nt, Homo sapiens
  misc_RNA (1)...(19): siRNA sense strand
acugagagcugcguugauc

SEQ ID NO: 1377654 - RNA, 19 nt, Homo sapiens
  misc_RNA (1)...(19): siRNA sense strand
gaggcucauucuacucuag

SEQ ID NO: 1377655 - RNA, 19 nt, Homo sapiens
  misc_RNA (1)...(19): siRNA sense strand
caacuucaagaccacagaa

SEQ ID NO: 1377656 - RNA, 19 nt, Homo sapiens
  misc_RNA (1)...(19): siRNA sense strand
ugaccuuacucgugcuuuc

SEQ ID NO: 1377657 - RNA, 19 nt, Homo sapiens
  misc_RNA (1)...(19): siRNA sense strand
uaugaugaaucugagguau

SEQ ID NO: 1377658 - RNA, 19 nt, Homo sapiens
  misc_RNA (1)...(19): siRNA sense strand
uacaagaggcucauucuac

SEQ ID NO: 1377659 - RNA, 19 nt, Homo sapiens
  misc_RNA (1)...(19): siRNA sense strand
uaagcuugccaacauaaug

SEQ ID NO: 1377660 - RNA, 19 nt, Homo sapiens
  misc_RNA (1)...(19): siRNA sense strand
ugaucuccguggaagaauu

SEQ ID NO: 1377661 - RNA, 19 nt, Homo sapiens
  misc_RNA (1)...(19): siRNA sense strand
gaugaaaucugugcugaua

SEQ ID NO: 1377662 - RNA, 19 nt, Homo sapiens
  misc_RNA (1)...(19): siRNA sense strand
gaauuucacucacauacaa

SEQ ID NO: 1377663 - RNA, 19 nt, Homo sapiens
  misc_RNA (1)...(19): siRNA sense strand
ccaaugaccugcacuugaa

SEQ ID NO: 1377664 - RNA, 19 nt, Homo sapiens
  misc_RNA (1)...(19): siRNA sense strand
gagaggaacccguauguuu

SEQ ID NO: 1377665 - RNA, 19 nt, Homo sapiens
  misc_RNA (1)...(19): siRNA sense strand
guacaaucguugacaauga

SEQ ID NO: 1377666 - RNA, 19 nt, Homo sapiens
  misc_RNA (1)...(19): siRNA sense strand
gcaguuauccaccuucuuu

SEQ ID NO: 1377667 - RNA, 19 nt, Homo sapiens
  misc_RNA (1)...(19): siRNA sense strand
cgaauaugcugaugaacaa

SEQ ID NO: 1377668 - RNA, 19 nt, Homo sapiens
  misc_RNA (1)...(19): siRNA sense strand
aaacagcgccaucaagaua

SEQ ID NO: 1377669 - RNA, 19 nt, Homo sapiens
  misc_RNA (1)...(19): siRNA sense strand
uuacaaagcucgacugaag

SEQ ID NO: 1377670 - RNA, 19 nt, Homo sapiens
  misc_RNA (1)...(19): siRNA sense strand
gaacagagggaaccacgaa

SEQ ID NO: 1377671 - RNA, 19 nt, Homo sapiens
  misc_RNA (1)...(19): siRNA sense strand
caggagaucugacacauca

SEQ ID NO: 1377672 - RNA, 19 nt, Homo sapiens
  misc_RNA (1)...(19): siRNA sense strand
gaccacagacuugaauuua

SEQ ID NO: 1377673 - RNA, 19 nt, Homo sapiens
  misc_RNA (1)...(19): siRNA sense strand
ccaaagagguaacaaucug

SEQ ID NO: 1377674 - RNA, 19 nt, Homo sapiens
  misc_RNA (1)...(19): siRNA sense strand
gaaagaauuccauagagau

SEQ ID NO: 1377675 - RNA, 19 nt, Homo sapiens
  misc_RNA (1)...(19): siRNA sense strand
ccauagagauccuaaugau

SEQ ID NO: 1377676 - RNA, 19 nt, Homo sapiens
  misc_RNA (1)...(19): siRNA sense strand
gagggaaccacgaagauuu

SEQ ID NO: 1377677 - RNA, 19 nt, Homo sapiens
  misc_RNA (1)...(19): siRNA sense strand
ccaagaaaguccugaagca

SEQ ID NO: 1377678 - RNA, 19 nt, Homo sapiens
  misc_RNA (1)...(19): siRNA sense strand
cuaaugauccuguguguga

SEQ ID NO: 1377679 - RNA, 19 nt, Homo sapiens
  misc_RNA (1)...(19): siRNA sense strand
cagcaguucuucaacgaaa

SEQ ID NO: 1377680 - RNA, 19 nt, Homo sapiens
  misc_RNA (1)...(19): siRNA sense strand
guagaucgaggaaagaauu

SEQ ID NO: 1377681 - RNA, 19 nt, Homo sapiens
  misc_RNA (1)...(19): siRNA sense strand
ucuuagaggugcuauuuga

SEQ ID NO: 1377682 - RNA, 19 nt, Homo sapiens
  misc_RNA (1)...(19): siRNA sense strand
aaacuucucccuccaaaga

SEQ ID NO: 1377683 - RNA, 19 nt, Homo sapiens
  misc_RNA (1)...(19): siRNA sense strand
agaaaguccugaagcaaau

SEQ ID NO: 1377684 - RNA, 19 nt, Homo sapiens
  misc_RNA (1)...(19): siRNA sense strand
guagagaggaacaagauga

SEQ ID NO: 1377685 - RNA, 19 nt, Homo sapiens
  misc_RNA (1)...(19): siRNA sense strand
acacacauauacauaagga

SEQ ID NO: 1377686 - RNA, 19 nt, Homo sapiens
  misc_RNA (1)...(19): siRNA sense strand
gaaaacagcgccaucaaga

SEQ ID NO: 1377687 - RNA, 19 nt, Homo sapiens
  misc_RNA (1)...(19): siRNA sense strand
ccacagacuugaauuuacu

SEQ ID NO: 1377688 - RNA, 19 nt, Homo sapiens
  misc_RNA (1)...(19): siRNA sense strand
gguauggcuucacgaaaga

SEQ ID NO: 1377689 - RNA, 19 nt, Homo sapiens
  misc_RNA (1)...(19): siRNA sense strand
ccacgaagauuuuaugaug

SEQ ID NO: 1377690 - RNA, 19 nt, Homo sapiens
  misc_RNA (1)...(19): siRNA sense strand
ucaugcccauuaugucuua

SEQ ID NO: 1377691 - RNA, 19 nt, Homo sapiens
  misc_RNA (1)...(19): siRNA sense strand
guaccgagguuacaaagcu

SEQ ID NO: 1377692 - RNA, 19 nt, Homo sapiens
  misc_RNA (1)...(19): siRNA sense strand
gaauuuacuccaccgugua

SEQ ID NO: 1377693 - RNA, 19 nt, Homo sapiens
  misc_RNA (1)...(19): siRNA sense strand
caacggaaacaaacagaga

SEQ ID NO: 1377694 - RNA, 19 nt, Homo sapiens
  misc_RNA (1)...(19): siRNA sense strand
gauacuucaugcccauuau

SEQ ID NO: 1377695 - RNA, 19 nt, Homo sapiens
  misc_RNA (1)...(19): siRNA sense strand
ccaucaagauauuaagaga

SEQ ID NO: 1377696 - RNA, 19 nt, Homo sapiens
  misc_RNA (1)...(19): siRNA sense strand
uacaaucguugacaaugaa

SEQ ID NO: 1377697 - RNA, 19 nt, Homo sapiens
  misc_RNA (1)...(19): siRNA sense strand
aaacaaacagagaccauga

SEQ ID NO: 1377698 - RNA, 19 nt, Homo sapiens
  misc_RNA (1)...(19): siRNA sense strand
gagaggaacaagaugaaau

SEQ ID NO: 1377699 - RNA, 19 nt, Homo sapiens
  misc_RNA (1)...(19): siRNA sense strand
ggaaaacuacacacauaua

SEQ ID NO: 1377700 - RNA, 19 nt, Homo sapiens
  misc_RNA (1)...(19): siRNA sense strand
ucacucacauacaaacuuc

SEQ ID NO: 1377701 - RNA, 19 nt, Homo sapiens
  misc_RNA (1)...(19): siRNA sense strand
acaaacuucucccuccaaa

SEQ ID NO: 1377702 - RNA, 19 nt, Homo sapiens
  misc_RNA (1)...(19): siRNA sense strand
uaagagagagagugauuuc

SEQ ID NO: 1377703 - RNA, 19 nt, Homo sapiens
  misc_RNA (1)...(19): siRNA sense strand
acagagaccaugacacuga

SEQ ID NO: 1377704 - RNA, 19 nt, Homo sapiens
  misc_RNA (1)...(19): siRNA sense strand
uaucagagaccacagacuu

SEQ ID NO: 1377705 - RNA, 19 nt, Homo sapiens
  misc_RNA (1)...(19): siRNA sense strand
aaacagagaccaugacacu

SEQ ID NO: 1377706 - RNA, 19 nt, Homo sapiens
  misc_RNA (1)...(19): siRNA sense strand
cuacacacauauacauaag

SEQ ID NO: 1377707 - RNA, 19 nt, Homo sapiens
  misc_RNA (1)...(19): siRNA sense strand
aagaaaguccugaagcaaa

SEQ ID NO: 1377708 - RNA, 19 nt, Homo sapiens
  misc_RNA (1)...(19): siRNA sense strand
gaacugguaccgagguuac

SEQ ID NO: 1377709 - RNA, 19 nt, Homo sapiens
  misc_RNA (1)...(19): siRNA sense strand
caagaaaguccugaagcaa

SEQ ID NO: 1377710 - RNA, 19 nt, Homo sapiens
  misc_RNA (1)...(19): siRNA sense strand
ugaugaaucugagguaugg

SEQ ID NO: 1377711 - RNA, 19 nt, Homo sapiens
  misc_RNA (1)...(19): siRNA sense strand
ggaugcagcaguucuucaa

SEQ ID NO: 1377712 - RNA, 19 nt, Homo sapiens
  misc_RNA (1)...(19): siRNA sense strand
caagauauuaagagagaga

SEQ ID NO: 1377713 - RNA, 19 nt, Homo sapiens
  misc_RNA (1)...(19): siRNA sense strand
gaaggccagacaacacuau

SEQ ID NO: 1377714 - RNA, 19 nt, Homo sapiens
  misc_RNA (1)...(19): siRNA sense strand
ggaaacaaacagagaccau

SEQ ID NO: 1377715 - RNA, 19 nt, Homo sapiens
  misc_RNA (1)...(19): siRNA sense strand
gagcugcguugaucaucca

SEQ ID NO: 1377716 - RNA, 19 nt, Homo sapiens
  misc_RNA (1)...(19): siRNA sense strand
uuagaggugcuauuugaaa

SEQ ID NO: 1377717 - RNA, 19 nt, Homo sapiens
  misc_RNA (1)...(19): siRNA sense strand
cccaaucgguacaaucguu

SEQ ID NO: 1377718 - RNA, 19 nt, Homo sapiens
  misc_RNA (1)...(19): siRNA sense strand
ugucuuagaggugcuauuu

SEQ ID NO: 1377719 - RNA, 19 nt, Homo sapiens
  misc_RNA (1)...(19): siRNA sense strand
ggauaucagagaccacaga

SEQ ID NO: 1377720 - RNA, 19 nt, Homo sapiens
  misc_RNA (1)...(19): siRNA sense strand
acagcgccaucaagauauu

SEQ ID NO: 1377721 - RNA, 19 nt, Homo sapiens
  misc_RNA (1)...(19): siRNA sense strand
gagguauggcuucacgaaa

SEQ ID NO: 1377722 - RNA, 19 nt, Homo sapiens
  misc_RNA (1)...(19): siRNA sense strand
uaugaugaaucugagguau

SEQ ID NO: 1377723 - RNA, 19 nt, Homo sapiens
  misc_RNA (1)...(19): siRNA sense strand
acugagagcugcguugauc

SEQ ID NO: 1377724 - RNA, 19 nt, Homo sapiens
  misc_RNA (1)...(19): siRNA sense strand
agaccacagacuugaauuu

SEQ ID NO: 1377725 - RNA, 19 nt, Homo sapiens
  misc_RNA (1)...(19): siRNA sense strand
caaagagguaacaaucugu

SEQ ID NO: 1377726 - RNA, 19 nt, Homo sapiens
  misc_RNA (1)...(19): siRNA sense strand
ucagagaccacagacuuga

SEQ ID NO: 1377727 - RNA, 19 nt, Homo sapiens
  misc_RNA (1)...(19): siRNA sense strand
ucgaauaugcugaugaaca

SEQ ID NO: 1377728 - RNA, 19 nt, Homo sapiens
  misc_RNA (1)...(19): siRNA sense strand
acuaugcccucaccaucuu

SEQ ID NO: 1377729 - RNA, 19 nt, Homo sapiens
  misc_RNA (1)...(19): siRNA sense strand
cagaacugguaccgagguu

SEQ ID NO: 1377730 - RNA, 19 nt, Homo sapiens
  misc_RNA (1)...(19): siRNA sense strand
gaaaguccugaagcaaaug

SEQ ID NO: 1377731 - RNA, 19 nt, Homo sapiens
  misc_RNA (1)...(19): siRNA sense strand
gcuauuugaaaccaagaaa

SEQ ID NO: 1377732 - RNA, 19 nt, Homo sapiens
  misc_RNA (1)...(19): siRNA sense strand
uuggaaaacuacacacaua

SEQ ID NO: 1377733 - RNA, 19 nt, Homo sapiens
  misc_RNA (1)...(19): siRNA sense strand
ugaaaucugugcugauacc

SEQ ID NO: 1377734 - RNA, 19 nt, Homo sapiens
  misc_RNA (1)...(19): siRNA sense strand
cagagaggaacccguaugu

SEQ ID NO: 1377735 - RNA, 19 nt, Homo sapiens
  misc_RNA (1)...(19): siRNA sense strand
gaggugcuauuugaaacca

SEQ ID NO: 1377736 - RNA, 19 nt, Homo sapiens
  misc_RNA (1)...(19): siRNA sense strand
uagaggugcuauuugaaac

SEQ ID NO: 1377737 - RNA, 19 nt, Homo sapiens
  misc_RNA (1)...(19): siRNA sense strand
uagagaggaacaagaugaa

SEQ ID NO: 1377738 - RNA, 19 nt, Homo sapiens
  misc_RNA (1)...(19): siRNA sense strand
gguacaaucguugacaaug

SEQ ID NO: 1377739 - RNA, 19 nt, Homo sapiens
  misc_RNA (1)...(19): siRNA sense strand
cccaaugaccugcacuuga

SEQ ID NO: 1377740 - RNA, 19 nt, Homo sapiens
  misc_RNA (1)...(19): siRNA sense strand
gcagcaguucuucaacgaa

SEQ ID NO: 1377741 - RNA, 19 nt, Homo sapiens
  misc_RNA (1)...(19): siRNA sense strand
gggaaacuggaugaucuuu

SEQ ID NO: 1377742 - RNA, 19 nt, Homo sapiens
  misc_RNA (1)...(19): siRNA sense strand
gaaccacgaagauuuuaug

SEQ ID NO: 1377743 - RNA, 19 nt, Homo sapiens
  misc_RNA (1)...(19): siRNA sense strand
ucacugagagcugcguuga

SEQ ID NO: 1377744 - RNA, 19 nt, Homo sapiens
  misc_RNA (1)...(19): siRNA sense strand
cugcguugaucauccagaa

SEQ ID NO: 1377745 - RNA, 19 nt, Homo sapiens
  misc_RNA (1)...(19): siRNA sense strand
agguauggcuucacgaaag

SEQ ID NO: 1377746 - RNA, 19 nt, Homo sapiens
  misc_RNA (1)...(19): siRNA sense strand
ugagguauggcuucacgaa

SEQ ID NO: 1377747 - RNA, 19 nt, Homo sapiens
  misc_RNA (1)...(19): siRNA sense strand
agauacuucaugcccauua

SEQ ID NO: 1377748 - RNA, 19 nt, Homo sapiens
  misc_RNA (1)...(19): siRNA sense strand
ugacucgaagcacaauaaa

SEQ ID NO: 1377749 - RNA, 19 nt, Homo sapiens
  misc_RNA (1)...(19): siRNA sense strand
gguuacaaagcucgacuga

SEQ ID NO: 1377750 - RNA, 19 nt, Homo sapiens
  misc_RNA (1)...(19): siRNA sense strand
gaugaacaaggccaaaugc

SEQ ID NO: 1377751 - RNA, 19 nt, Homo sapiens
  misc_RNA (1)...(19): siRNA sense strand
ggagaucugacacaucacu

SEQ ID NO: 1377752 - RNA, 19 nt, Homo sapiens
  misc_RNA (1)...(19): siRNA sense strand
gaaaacuacacacauauac

SEQ ID NO: 1377753 - RNA, 19 nt, Homo sapiens
  misc_RNA (1)...(19): siRNA sense strand
guguagagaggaacaagau

SEQ ID NO: 1377754 - RNA, 19 nt, Homo sapiens
  misc_RNA (1)...(19): siRNA sense strand
gagaccacagacuugaauu

SEQ ID NO: 1377755 - RNA, 19 nt, Homo sapiens
  misc_RNA (1)...(19): siRNA sense strand
uggcuucacgaaagaaauu

SEQ ID NO: 1377756 - RNA, 19 nt, Homo sapiens
  misc_RNA (1)...(19): siRNA sense strand
aaucugagguauggcuuca

SEQ ID NO: 1377757 - RNA, 19 nt, Homo sapiens
  misc_RNA (1)...(19): siRNA sense strand
aaagaauuccauagagauc

SEQ ID NO: 1377758 - RNA, 19 nt, Homo sapiens
  misc_RNA (1)...(19): siRNA sense strand
acagagggaaccacgaaga

SEQ ID NO: 1377759 - RNA, 19 nt, Homo sapiens
  misc_RNA (1)...(19): siRNA sense strand
agaggaacaagaugaaauc

SEQ ID NO: 1377760 - RNA, 19 nt, Homo sapiens
  misc_RNA (1)...(19): siRNA sense strand
aaaugcaguuauccaccuu

SEQ ID NO: 1377761 - RNA, 19 nt, Homo sapiens
  misc_RNA (1)...(19): siRNA sense strand
gaacaaagauggaagcauu

SEQ ID NO: 1377762 - RNA, 19 nt, Homo sapiens
  misc_RNA (1)...(19): siRNA sense strand
gaugaaaucugugcugaua

SEQ ID NO: 1377763 - RNA, 19 nt, Homo sapiens
  misc_RNA (1)...(19): siRNA sense strand
gaauuucacucacauacaa

SEQ ID NO: 1377764 - RNA, 19 nt, Homo sapiens
  misc_RNA (1)...(19): siRNA sense strand
ccaaugaccugcacuugaa

SEQ ID NO: 1377765 - RNA, 19 nt, Homo sapiens
  misc_RNA (1)...(19): siRNA sense strand
gagaggaacccguauguuu

SEQ ID NO: 1377766 - RNA, 19 nt, Homo sapiens
  misc_RNA (1)...(19): siRNA sense strand
guacaaucguugacaauga

SEQ ID NO: 1377767 - RNA, 19 nt, Homo sapiens
  misc_RNA (1)...(19): siRNA sense strand
ucaauaagcuugccaacau

SEQ ID NO: 1377768 - RNA, 19 nt, Homo sapiens
  misc_RNA (1)...(19): siRNA sense strand
gcaguuauccaccuucuuu

SEQ ID NO: 1377769 - RNA, 19 nt, Homo sapiens
  misc_RNA (1)...(19): siRNA sense strand
cgaauaugcugaugaacaa

SEQ ID NO: 1377770 - RNA, 19 nt, Homo sapiens
  misc_RNA (1)...(19): siRNA sense strand
aaacagcgccaucaagaua

SEQ ID NO: 1377771 - RNA, 19 nt, Homo sapiens
  misc_RNA (1)...(19): siRNA sense strand
uuacaaagcucgacugaag

SEQ ID NO: 1377772 - RNA, 19 nt, Homo sapiens
  misc_RNA (1)...(19): siRNA sense strand
cagaauauccgcauugaaa

SEQ ID NO: 1377773 - RNA, 19 nt, Homo sapiens
  misc_RNA (1)...(19): siRNA sense strand
caauaagcuugccaacaua

SEQ ID NO: 1377774 - RNA, 19 nt, Homo sapiens
  misc_RNA (1)...(19): siRNA sense strand
gaacagagggaaccacgaa

SEQ ID NO: 1377775 - RNA, 19 nt, Homo sapiens
  misc_RNA (1)...(19): siRNA sense strand
gaucugaccuggaaaucau

SEQ ID NO: 1377776 - RNA, 19 nt, Homo sapiens
  misc_RNA (1)...(19): siRNA sense strand
caggagaucugacacauca

SEQ ID NO: 1377777 - RNA, 19 nt, Homo sapiens
  misc_RNA (1)...(19): siRNA sense strand
ggagaucccucaguucgaa

SEQ ID NO: 1377778 - RNA, 19 nt, Homo sapiens
  misc_RNA (1)...(19): siRNA sense strand
gggcugaacuuaccaugga

SEQ ID NO: 1377779 - RNA, 19 nt, Homo sapiens
  misc_RNA (1)...(19): siRNA sense strand
auacagaucugaccuggaa

SEQ ID NO: 1377780 - RNA, 19 nt, Homo sapiens
  misc_RNA (1)...(19): siRNA sense strand
gaccacagacuugaauuua

SEQ ID NO: 1377781 - RNA, 19 nt, Homo sapiens
  misc_RNA (1)...(19): siRNA sense strand
gauggaagcauugacuuua

SEQ ID NO: 1377782 - RNA, 19 nt, Homo sapiens
  misc_RNA (1)...(19): siRNA sense strand
ccaaagagguaacaaucug

SEQ ID NO: 1377783 - RNA, 19 nt, Homo sapiens
  misc_RNA (1)...(19): siRNA sense strand
gaaagaauuccauagagau

SEQ ID NO: 1377784 - RNA, 19 nt, Homo sapiens
  misc_RNA (1)...(19): siRNA sense strand
ccauagagauccuaaugau

SEQ ID NO: 1377785 - RNA, 19 nt, Homo sapiens
  misc_RNA (1)...(19): siRNA sense strand
gagggaaccacgaagauuu

SEQ ID NO: 1377786 - RNA, 19 nt, Homo sapiens
  misc_RNA (1)...(19): siRNA sense strand
ccaagaaaguccugaagca

SEQ ID NO: 1377787 - RNA, 19 nt, Homo sapiens
  misc_RNA (1)...(19): siRNA sense strand
guucgaaucugguaaacau

SEQ ID NO: 1377788 - RNA, 19 nt, Homo sapiens
  misc_RNA (1)...(19): siRNA sense strand
cuaaugauccuguguguga

SEQ ID NO: 1377789 - RNA, 19 nt, Homo sapiens
  misc_RNA (1)...(19): siRNA sense strand
cagcaguucuucaacgaaa

SEQ ID NO: 1377790 - RNA, 19 nt, Homo sapiens
  misc_RNA (1)...(19): siRNA sense strand
uaauggacuugaacaaaga

SEQ ID NO: 1377791 - RNA, 19 nt, Homo sapiens
  misc_RNA (1)...(19): siRNA sense strand
guagaucgaggaaagaauu

SEQ ID NO: 1377792 - RNA, 19 nt, Homo sapiens
  misc_RNA (1)...(19): siRNA sense strand
ccauggagaucccucaguu

SEQ ID NO: 1377793 - RNA, 19 nt, Homo sapiens
  misc_RNA (1)...(19): siRNA sense strand
ucuuagaggugcuauuuga

SEQ ID NO: 1377794 - RNA, 19 nt, Homo sapiens
  misc_RNA (1)...(19): siRNA sense strand
aaacuucucccuccaaaga

SEQ ID NO: 1377795 - RNA, 19 nt, Homo sapiens
  misc_RNA (1)...(19): siRNA sense strand
agaaaguccugaagcaaau

SEQ ID NO: 1377796 - RNA, 19 nt, Homo sapiens
  misc_RNA (1)...(19): siRNA sense strand
gauaugaagacuugaugaa

SEQ ID NO: 1377797 - RNA, 19 nt, Homo sapiens
  misc_RNA (1)...(19): siRNA sense strand
guagagaggaacaagauga

SEQ ID NO: 1377798 - RNA, 19 nt, Homo sapiens
  misc_RNA (1)...(19): siRNA sense strand
acacacauauacauaagga

SEQ ID NO: 1377799 - RNA, 19 nt, Homo sapiens
  misc_RNA (1)...(19): siRNA sense strand
gaaaacagcgccaucaaga

SEQ ID NO: 1377800 - RNA, 19 nt, Homo sapiens
  misc_RNA (1)...(19): siRNA sense strand
ccacagacuugaauuuacu

SEQ ID NO: 1377801 - RNA, 19 nt, Homo sapiens
  misc_RNA (1)...(19): siRNA sense strand
gguauggcuucacgaaaga

SEQ ID NO: 1377802 - RNA, 19 nt, Homo sapiens
  misc_RNA (1)...(19): siRNA sense strand
ccacgaagauuuuaugaug

SEQ ID NO: 1377803 - RNA, 19 nt, Homo sapiens
  misc_RNA (1)...(19): siRNA sense strand
ucaugcccauuaugucuua

SEQ ID NO: 1377804 - RNA, 19 nt, Homo sapiens
  misc_RNA (1)...(19): siRNA sense strand
guaccgagguuacaaagcu

SEQ ID NO: 1377805 - RNA, 19 nt, Homo sapiens
  misc_RNA (1)...(19): siRNA sense strand
gaauuuacuccaccgugua

SEQ ID NO: 1377806 - RNA, 19 nt, Homo sapiens
  misc_RNA (1)...(19): siRNA sense strand
caacggaaacaaacagaga

SEQ ID NO: 1377807 - RNA, 19 nt, Homo sapiens
  misc_RNA (1)...(19): siRNA sense strand
gauacuucaugcccauuau

SEQ ID NO: 1377808 - RNA, 19 nt, Homo sapiens
  misc_RNA (1)...(19): siRNA sense strand
guacaagaggcucauucua

SEQ ID NO: 1377809 - RNA, 19 nt, Homo sapiens
  misc_RNA (1)...(19): siRNA sense strand
ccaucaagauauuaagaga

SEQ ID NO: 1377810 - RNA, 19 nt, Homo sapiens
  misc_RNA (1)...(19): siRNA sense strand
uacaaucguugacaaugaa

SEQ ID NO: 1377811 - RNA, 19 nt, Homo sapiens
  misc_RNA (1)...(19): siRNA sense strand
cauaauggacuugaacaaa

SEQ ID NO: 1377812 - RNA, 19 nt, Homo sapiens
  misc_RNA (1)...(19): siRNA sense strand
gaucuccguggaagaauuu

SEQ ID NO: 1377813 - RNA, 19 nt, Homo sapiens
  misc_RNA (1)...(19): siRNA sense strand
aaacaaacagagaccauga

SEQ ID NO: 1377814 - RNA, 19 nt, Homo sapiens
  misc_RNA (1)...(19): siRNA sense strand
gagaggaacaagaugaaau

SEQ ID NO: 1377815 - RNA, 19 nt, Homo sapiens
  misc_RNA (1)...(19): siRNA sense strand
ggaaaacuacacacauaua

SEQ ID NO: 1377816 - RNA, 19 nt, Homo sapiens
  misc_RNA (1)...(19): siRNA sense strand
uggaaacguugaauacaug

SEQ ID NO: 1377817 - RNA, 19 nt, Homo sapiens
  misc_RNA (1)...(19): siRNA sense strand
ucacucacauacaaacuuc

SEQ ID NO: 1377818 - RNA, 19 nt, Homo sapiens
  misc_RNA (1)...(19): siRNA sense strand
acaaacuucucccuccaaa

SEQ ID NO: 1377819 - RNA, 19 nt, Homo sapiens
  misc_RNA (1)...(19): siRNA sense strand
uaagagagagagugauuuc

SEQ ID NO: 1377820 - RNA, 19 nt, Homo sapiens
  misc_RNA (1)...(19): siRNA sense strand
acagagaccaugacacuga

SEQ ID NO: 1377821 - RNA, 19 nt, Homo sapiens
  misc_RNA (1)...(19): siRNA sense strand
uaucagagaccacagacuu

SEQ ID NO: 1377822 - RNA, 19 nt, Homo sapiens
  misc_RNA (1)...(19): siRNA sense strand
aaacagagaccaugacacu

SEQ ID NO: 1377823 - RNA, 19 nt, Homo sapiens
  misc_RNA (1)...(19): siRNA sense strand
auaauggacuugaacaaag

SEQ ID NO: 1377824 - RNA, 19 nt, Homo sapiens
  misc_RNA (1)...(19): siRNA sense strand
uaugaagacuugaugaaac

SEQ ID NO: 1377825 - RNA, 19 nt, Homo sapiens
  misc_RNA (1)...(19): siRNA sense strand
cuacacacauauacauaag

SEQ ID NO: 1377826 - RNA, 19 nt, Homo sapiens
  misc_RNA (1)...(19): siRNA sense strand
cauugacacugaucacuca

SEQ ID NO: 1377827 - RNA, 19 nt, Homo sapiens
  misc_RNA (1)...(19): siRNA sense strand
aagaaaguccugaagcaaa

SEQ ID NO: 1377828 - RNA, 19 nt, Homo sapiens
  misc_RNA (1)...(19): siRNA sense strand
ccaacauaauggacuugaa

SEQ ID NO: 1377829 - RNA, 19 nt, Homo sapiens
  misc_RNA (1)...(19): siRNA sense strand
gaugauucccaagucaaua

SEQ ID NO: 1377830 - RNA, 19 nt, Homo sapiens
  misc_RNA (1)...(19): siRNA sense strand
acaagaggcucauucuacu

SEQ ID NO: 1377831 - RNA, 19 nt, Homo sapiens
  misc_RNA (1)...(19): siRNA sense strand
gaacugguaccgagguuac

SEQ ID NO: 1377832 - RNA, 19 nt, Homo sapiens
  misc_RNA (1)...(19): siRNA sense strand
cgaaucugguaaacauaga

SEQ ID NO: 1377833 - RNA, 19 nt, Homo sapiens
  misc_RNA (1)...(19): siRNA sense strand
ggacuugaacaaagaugga

SEQ ID NO: 1377834 - RNA, 19 nt, Homo sapiens
  misc_RNA (1)...(19): siRNA sense strand
caagaaaguccugaagcaa

SEQ ID NO: 1377835 - RNA, 19 nt, Homo sapiens
  misc_RNA (1)...(19): siRNA sense strand
ggaugcagcaguucuucaa

SEQ ID NO: 1377836 - RNA, 19 nt, Homo sapiens
  misc_RNA (1)...(19): siRNA sense strand
ugaugaaucugagguaugg

SEQ ID NO: 1377837 - RNA, 19 nt, Homo sapiens
  misc_RNA (1)...(19): siRNA sense strand
caagauauuaagagagaga

SEQ ID NO: 1377838 - RNA, 19 nt, Homo sapiens
  misc_RNA (1)...(19): siRNA sense strand
uugaauacauguccagcuu

SEQ ID NO: 1377839 - RNA, 19 nt, Homo sapiens
  misc_RNA (1)...(19): siRNA sense strand
ggaaacaaacagagaccau

SEQ ID NO: 1377840 - RNA, 19 nt, Homo sapiens
  misc_RNA (1)...(19): siRNA sense strand
auggaagcauugacuuuaa

SEQ ID NO: 1377841 - RNA, 19 nt, Homo sapiens
  misc_RNA (1)...(19): siRNA sense strand
gaaggccagacaacacuau

SEQ ID NO: 1377842 - RNA, 19 nt, Homo sapiens
  misc_RNA (1)...(19): siRNA sense strand
gagcugcguugaucaucca

SEQ ID NO: 1377843 - RNA, 19 nt, Homo sapiens
  misc_RNA (1)...(19): siRNA sense strand
uuagaggugcuauuugaaa

SEQ ID NO: 1377844 - RNA, 19 nt, Homo sapiens
  misc_RNA (1)...(19): siRNA sense strand
caacauaauggacuugaac

SEQ ID NO: 1377845 - RNA, 19 nt, Homo sapiens
  misc_RNA (1)...(19): siRNA sense strand
cccaaucgguacaaucguu

SEQ ID NO: 1377846 - RNA, 19 nt, Homo sapiens
  misc_RNA (1)...(19): siRNA sense strand
ugucuuagaggugcuauuu

SEQ ID NO: 1377847 - RNA, 19 nt, Homo sapiens
  misc_RNA (1)...(19): siRNA sense strand
uggaagcauugacuuuaau

SEQ ID NO: 1377848 - RNA, 19 nt, Homo sapiens
  misc_RNA (1)...(19): siRNA sense strand
ggauaucagagaccacaga

SEQ ID NO: 1377849 - RNA, 19 nt, Homo sapiens
  misc_RNA (1)...(19): siRNA sense strand
acagcgccaucaagauauu

SEQ ID NO: 1377850 - RNA, 19 nt, Homo sapiens
  misc_RNA (1)...(19): siRNA sense strand
cgugccauguggaaacuuu

SEQ ID NO: 1377851 - RNA, 19 nt, Homo sapiens
  misc_RNA (1)...(19): siRNA sense strand
gagguauggcuucacgaaa

SEQ ID NO: 1377852 - RNA, 19 nt, Homo sapiens
  misc_RNA (1)...(19): siRNA sense strand
aaacauagaccaaaaugga

SEQ ID NO: 1377853 - RNA, 19 nt, Homo sapiens
  misc_RNA (1)...(19): siRNA sense strand
acugagagcugcguugauc

SEQ ID NO: 1377854 - RNA, 19 nt, Homo sapiens
  misc_RNA (1)...(19): siRNA sense strand
gaggcucauucuacucuag

SEQ ID NO: 1377855 - RNA, 19 nt, Homo sapiens
  misc_RNA (1)...(19): siRNA sense strand
caacuucaagaccacagaa

SEQ ID NO: 1377856 - RNA, 19 nt, Homo sapiens
  misc_RNA (1)...(19): siRNA sense strand
ugaccuuacucgugcuuuc

SEQ ID NO: 1377857 - RNA, 19 nt, Homo sapiens
  misc_RNA (1)...(19): siRNA sense strand
uaugaugaaucugagguau

SEQ ID NO: 1377858 - RNA, 19 nt, Homo sapiens
  misc_RNA (1)...(19): siRNA sense strand
uacaagaggcucauucuac

SEQ ID NO: 1377859 - RNA, 19 nt, Homo sapiens
  misc_RNA (1)...(19): siRNA sense strand
uaagcuugccaacauaaug

SEQ ID NO: 1377860 - RNA, 19 nt, Homo sapiens
  misc_RNA (1)...(19): siRNA sense strand
ugaucuccguggaagaauu

SEQ ID NO: 1377861 - RNA, 19 nt, Homo sapiens
  misc_RNA (1)...(19): siRNA sense strand
gaacaaagauggaagcauu

SEQ ID NO: 1377862 - RNA, 19 nt, Homo sapiens
  misc_RNA (1)...(19): siRNA sense strand
gaugaaaucugugcugaua

SEQ ID NO: 1377863 - RNA, 19 nt, Homo sapiens
  misc_RNA (1)...(19): siRNA sense strand
gaauuucacucacauacaa

SEQ ID NO: 1377864 - RNA, 19 nt, Homo sapiens
  misc_RNA (1)...(19): siRNA sense strand
ccaaugaccugcacuugaa

SEQ ID NO: 1377865 - RNA, 19 nt, Homo sapiens
  misc_RNA (1)...(19): siRNA sense strand
gagaggaacccguauguuu

SEQ ID NO: 1377866 - RNA, 19 nt, Homo sapiens
  misc_RNA (1)...(19): siRNA sense strand
guacaaucguugacaauga

SEQ ID NO: 1377867 - RNA, 19 nt, Homo sapiens
  misc_RNA (1)...(19): siRNA sense strand
ucaauaagcuugccaacau

SEQ ID NO: 1377868 - RNA, 19 nt, Homo sapiens
  misc_RNA (1)...(19): siRNA sense strand
gcaguuauccaccuucuuu

SEQ ID NO: 1377869 - RNA, 19 nt, Homo sapiens
  misc_RNA (1)...(19): siRNA sense strand
cgaauaugcugaugaacaa

SEQ ID NO: 1377870 - RNA, 19 nt, Homo sapiens
  misc_RNA (1)...(19): siRNA sense strand
aaacagcgccaucaagaua

SEQ ID NO: 1377871 - RNA, 19 nt, Homo sapiens
  misc_RNA (1)...(19): siRNA sense strand
uuacaaagcucgacugaag

SEQ ID NO: 1377872 - RNA, 19 nt, Homo sapiens
  misc_RNA (1)...(19): siRNA sense strand
cagaauauccgcauugaaa

SEQ ID NO: 1377873 - RNA, 19 nt, Homo sapiens
  misc_RNA (1)...(19): siRNA sense strand
caauaagcuugccaacaua

SEQ ID NO: 1377874 - RNA, 19 nt, Homo sapiens
  misc_RNA (1)...(19): siRNA sense strand
gaacagagggaaccacgaa

SEQ ID NO: 1377875 - RNA, 19 nt, Homo sapiens
  misc_RNA (1)...(19): siRNA sense strand
gaucugaccuggaaaucau

SEQ ID NO: 1377876 - RNA, 19 nt, Homo sapiens
  misc_RNA (1)...(19): siRNA sense strand
caggagaucugacacauca

SEQ ID NO: 1377877 - RNA, 19 nt, Homo sapiens
  misc_RNA (1)...(19): siRNA sense strand
ggagaucccucaguucgaa

SEQ ID NO: 1377878 - RNA, 19 nt, Homo sapiens
  misc_RNA (1)...(19): siRNA sense strand
gggcugaacuuaccaugga

SEQ ID NO: 1377879 - RNA, 19 nt, Homo sapiens
  misc_RNA (1)...(19): siRNA sense strand
auacagaucugaccuggaa

SEQ ID NO: 1377880 - RNA, 19 nt, Homo sapiens
  misc_RNA (1)...(19): siRNA sense strand
gaccacagacuugaauuua

SEQ ID NO: 1377881 - RNA, 19 nt, Homo sapiens
  misc_RNA (1)...(19): siRNA sense strand
gauggaagcauugacuuua

SEQ ID NO: 1377882 - RNA, 19 nt, Homo sapiens
  misc_RNA (1)...(19): siRNA sense strand
ccaaagagguaacaaucug

SEQ ID NO: 1377883 - RNA, 19 nt, Homo sapiens
  misc_RNA (1)...(19): siRNA sense strand
gaaagaauuccauagagau

SEQ ID NO: 1377884 - RNA, 19 nt, Homo sapiens
  misc_RNA (1)...(19): siRNA sense strand
ccauagagauccuaaugau

SEQ ID NO: 1377885 - RNA, 19 nt, Homo sapiens
  misc_RNA (1)...(19): siRNA sense strand
gagggaaccacgaagauuu

SEQ ID NO: 1377886 - RNA, 19 nt, Homo sapiens
  misc_RNA (1)...(19): siRNA sense strand
ccaagaaaguccugaagca

SEQ ID NO: 1377887 - RNA, 19 nt, Homo sapiens
  misc_RNA (1)...(19): siRNA sense strand
guucgaaucugguaaacau

SEQ ID NO: 1377888 - RNA, 19 nt, Homo sapiens
  misc_RNA (1)...(19): siRNA sense strand
cuaaugauccuguguguga

SEQ ID NO: 1377889 - RNA, 19 nt, Homo sapiens
  misc_RNA (1)...(19): siRNA sense strand
cagcaguucuucaacgaaa

SEQ ID NO: 1377890 - RNA, 19 nt, Homo sapiens
  misc_RNA (1)...(19): siRNA sense strand
uaauggacuugaacaaaga

SEQ ID NO: 1377891 - RNA, 19 nt, Homo sapiens
  misc_RNA (1)...(19): siRNA sense strand
guagaucgaggaaagaauu

SEQ ID NO: 1377892 - RNA, 19 nt, Homo sapiens
  misc_RNA (1)...(19): siRNA sense strand
ccauggagaucccucaguu

SEQ ID NO: 1377893 - RNA, 19 nt, Homo sapiens
  misc_RNA (1)...(19): siRNA sense strand
ucuuagaggugcuauuuga

SEQ ID NO: 1377894 - RNA, 19 nt, Homo sapiens
  misc_RNA (1)...(19): siRNA sense strand
aaacuucucccuccaaaga

SEQ ID NO: 1377895 - RNA, 19 nt, Homo sapiens
  misc_RNA (1)...(19): siRNA sense strand
agaaaguccugaagcaaau

SEQ ID NO: 1377896 - RNA, 19 nt, Homo sapiens
  misc_RNA (1)...(19): siRNA sense strand
gauaugaagacuugaugaa

SEQ ID NO: 1377897 - RNA, 19 nt, Homo sapiens
  misc_RNA (1)...(19): siRNA sense strand
guagagaggaacaagauga

SEQ ID NO: 1377898 - RNA, 19 nt, Homo sapiens
  misc_RNA (1)...(19): siRNA sense strand
acacacauauacauaagga

SEQ ID NO: 1377899 - RNA, 19 nt, Homo sapiens
  misc_RNA (1)...(19): siRNA sense strand
gaaaacagcgccaucaaga

SEQ ID NO: 1377900 - RNA, 19 nt, Homo sapiens
  misc_RNA (1)...(19): siRNA sense strand
ccacagacuugaauuuacu

SEQ ID NO: 1377901 - RNA, 19 nt, Homo sapiens
  misc_RNA (1)...(19): siRNA sense strand
gguauggcuucacgaaaga

SEQ ID NO: 1377902 - RNA, 19 nt, Homo sapiens
  misc_RNA (1)...(19): siRNA sense strand
ccacgaagauuuuaugaug

SEQ ID NO: 1377903 - RNA, 19 nt, Homo sapiens
  misc_RNA (1)...(19): siRNA sense strand
ucaugcccauuaugucuua

SEQ ID NO: 1377904 - RNA, 19 nt, Homo sapiens
  misc_RNA (1)...(19): siRNA sense strand
guaccgagguuacaaagcu

SEQ ID NO: 1377905 - RNA, 19 nt, Homo sapiens
  misc_RNA (1)...(19): siRNA sense strand
gaauuuacuccaccgugua

SEQ ID NO: 1377906 - RNA, 19 nt, Homo sapiens
  misc_RNA (1)...(19): siRNA sense strand
caacggaaacaaacagaga

SEQ ID NO: 1377907 - RNA, 19 nt, Homo sapiens
  misc_RNA (1)...(19): siRNA sense strand
gauacuucaugcccauuau

SEQ ID NO: 1377908 - RNA, 19 nt, Homo sapiens
  misc_RNA (1)...(19): siRNA sense strand
guacaagaggcucauucua

SEQ ID NO: 1377909 - RNA, 19 nt, Homo sapiens
  misc_RNA (1)...(19): siRNA sense strand
ccaucaagauauuaagaga

SEQ ID NO: 1377910 - RNA, 19 nt, Homo sapiens
  misc_RNA (1)...(19): siRNA sense strand
uacaaucguugacaaugaa

SEQ ID NO: 1377911 - RNA, 19 nt, Homo sapiens
  misc_RNA (1)...(19): siRNA sense strand
cauaauggacuugaacaaa

SEQ ID NO: 1377912 - RNA, 19 nt, Homo sapiens
  misc_RNA (1)...(19): siRNA sense strand
gaucuccguggaagaauuu

SEQ ID NO: 1377913 - RNA, 19 nt, Homo sapiens
  misc_RNA (1)...(19): siRNA sense strand
aaacaaacagagaccauga

SEQ ID NO: 1377914 - RNA, 19 nt, Homo sapiens
  misc_RNA (1)...(19): siRNA sense strand
gagaggaacaagaugaaau

SEQ ID NO: 1377915 - RNA, 19 nt, Homo sapiens
  misc_RNA (1)...(19): siRNA sense strand
ggaaaacuacacacauaua

SEQ ID NO: 1377916 - RNA, 19 nt, Homo sapiens
  misc_RNA (1)...(19): siRNA sense strand
uggaaacguugaauacaug

SEQ ID NO: 1377917 - RNA, 19 nt, Homo sapiens
  misc_RNA (1)...(19): siRNA sense strand
ucacucacauacaaacuuc

SEQ ID NO: 1377918 - RNA, 19 nt, Homo sapiens
  misc_RNA (1)...(19): siRNA sense strand
acaaacuucucccuccaaa

SEQ ID NO: 1377919 - RNA, 19 nt, Homo sapiens
  misc_RNA (1)...(19): siRNA sense strand
uaagagagagagugauuuc

SEQ ID NO: 1377920 - RNA, 19 nt, Homo sapiens
  misc_RNA (1)...(19): siRNA sense strand
acagagaccaugacacuga

SEQ ID NO: 1377921 - RNA, 19 nt, Homo sapiens
  misc_RNA (1)...(19): siRNA sense strand
uaucagagaccacagacuu

SEQ ID NO: 1377922 - RNA, 19 nt, Homo sapiens
  misc_RNA (1)...(19): siRNA sense strand
aaacagagaccaugacacu

SEQ ID NO: 1377923 - RNA, 19 nt, Homo sapiens
  misc_RNA (1)...(19): siRNA sense strand
auaauggacuugaacaaag

SEQ ID NO: 1377924 - RNA, 19 nt, Homo sapiens
  misc_RNA (1)...(19): siRNA sense strand
uaugaagacuugaugaaac

SEQ ID NO: 1377925 - RNA, 19 nt, Homo sapiens
  misc_RNA (1)...(19): siRNA sense strand
cuacacacauauacauaag

SEQ ID NO: 1377926 - RNA, 19 nt, Homo sapiens
  misc_RNA (1)...(19): siRNA sense strand
cauugacacugaucacuca

SEQ ID NO: 1377927 - RNA, 19 nt, Homo sapiens
  misc_RNA (1)...(19): siRNA sense strand
aagaaaguccugaagcaaa

SEQ ID NO: 1377928 - RNA, 19 nt, Homo sapiens
  misc_RNA (1)...(19): siRNA sense strand
ccaacauaauggacuugaa

SEQ ID NO: 1377929 - RNA, 19 nt, Homo sapiens
  misc_RNA (1)...(19): siRNA sense strand
gaugauucccaagucaaua

SEQ ID NO: 1377930 - RNA, 19 nt, Homo sapiens
  misc_RNA (1)...(19): siRNA sense strand
acaagaggcucauucuacu

SEQ ID NO: 1377931 - RNA, 19 nt, Homo sapiens
  misc_RNA (1)...(19): siRNA sense strand
gaacugguaccgagguuac

SEQ ID NO: 1377932 - RNA, 19 nt, Homo sapiens
  misc_RNA (1)...(19): siRNA sense strand
cgaaucugguaaacauaga

SEQ ID NO: 1377933 - RNA, 19 nt, Homo sapiens
  misc_RNA (1)...(19): siRNA sense strand
ggacuugaacaaagaugga

SEQ ID NO: 1377934 - RNA, 19 nt, Homo sapiens
  misc_RNA (1)...(19): siRNA sense strand
caagaaaguccugaagcaa

SEQ ID NO: 1377935 - RNA, 19 nt, Homo sapiens
  misc_RNA (1)...(19): siRNA sense strand
ggaugcagcaguucuucaa

SEQ ID NO: 1377936 - RNA, 19 nt, Homo sapiens
  misc_RNA (1)...(19): siRNA sense strand
ugaugaaucugagguaugg

SEQ ID NO: 1377937 - RNA, 19 nt, Homo sapiens
  misc_RNA (1)...(19): siRNA sense strand
caagauauuaagagagaga

SEQ ID NO: 1377938 - RNA, 19 nt, Homo sapiens
  misc_RNA (1)...(19): siRNA sense strand
uugaauacauguccagcuu

SEQ ID NO: 1377939 - RNA, 19 nt, Homo sapiens
  misc_RNA (1)...(19): siRNA sense strand
ggaaacaaacagagaccau

SEQ ID NO: 1377940 - RNA, 19 nt, Homo sapiens
  misc_RNA (1)...(19): siRNA sense strand
auggaagcauugacuuuaa

SEQ ID NO: 1377941 - RNA, 19 nt, Homo sapiens
  misc_RNA (1)...(19): siRNA sense strand
gaaggccagacaacacuau

SEQ ID NO: 1377942 - RNA, 19 nt, Homo sapiens
  misc_RNA (1)...(19): siRNA sense strand
gagcugcguugaucaucca

SEQ ID NO: 1377943 - RNA, 19 nt, Homo sapiens
  misc_RNA (1)...(19): siRNA sense strand
uuagaggugcuauuugaaa

SEQ ID NO: 1377944 - RNA, 19 nt, Homo sapiens
  misc_RNA (1)...(19): siRNA sense strand
caacauaauggacuugaac

SEQ ID NO: 1377945 - RNA, 19 nt, Homo sapiens
  misc_RNA (1)...(19): siRNA sense strand
cccaaucgguacaaucguu

SEQ ID NO: 1377946 - RNA, 19 nt, Homo sapiens
  misc_RNA (1)...(19): siRNA sense strand
ugucuuagaggugcuauuu

SEQ ID NO: 1377947 - RNA, 19 nt, Homo sapiens
  misc_RNA (1)...(19): siRNA sense strand
uggaagcauugacuuuaau

SEQ ID NO: 1377948 - RNA, 19 nt, Homo sapiens
  misc_RNA (1)...(19): siRNA sense strand
ggauaucagagaccacaga

SEQ ID NO: 1377949 - RNA, 19 nt, Homo sapiens
  misc_RNA (1)...(19): siRNA sense strand
acagcgccaucaagauauu

SEQ ID NO: 1377950 - RNA, 19 nt, Homo sapiens
  misc_RNA (1)...(19): siRNA sense strand
cgugccauguggaaacuuu

SEQ ID NO: 1377951 - RNA, 19 nt, Homo sapiens
  misc_RNA (1)...(19): siRNA sense strand
gagguauggcuucacgaaa

SEQ ID NO: 1377952 - RNA, 19 nt, Homo sapiens
  misc_RNA (1)...(19): siRNA sense strand
aaacauagaccaaaaugga

SEQ ID NO: 1377953 - RNA, 19 nt, Homo sapiens
  misc_RNA (1)...(19): siRNA sense strand
acugagagcugcguugauc

SEQ ID NO: 1377954 - RNA, 19 nt, Homo sapiens
  misc_RNA (1)...(19): siRNA sense strand
gaggcucauucuacucuag

SEQ ID NO: 1377955 - RNA, 19 nt, Homo sapiens
  misc_RNA (1)...(19): siRNA sense strand
caacuucaagaccacagaa

SEQ ID NO: 1377956 - RNA, 19 nt, Homo sapiens
  misc_RNA (1)...(19): siRNA sense strand
ugaccuuacucgugcuuuc

SEQ ID NO: 1377957 - RNA, 19 nt, Homo sapiens
  misc_RNA (1)...(19): siRNA sense strand
uaugaugaaucugagguau

SEQ ID NO: 1377958 - RNA, 19 nt, Homo sapiens
  misc_RNA (1)...(19): siRNA sense strand
uacaagaggcucauucuac

SEQ ID NO: 1377959 - RNA, 19 nt, Homo sapiens
  misc_RNA (1)...(19): siRNA sense strand
uaagcuugccaacauaaug

SEQ ID NO: 1377960 - RNA, 19 nt, Homo sapiens
  misc_RNA (1)...(19): siRNA sense strand
ugaucuccguggaagaauu

SEQ ID NO: 1377961 - RNA, 19 nt, Homo sapiens
  misc_RNA (1)...(19): siRNA sense strand
gaacaaagauggaagcauu

SEQ ID NO: 1377962 - RNA, 19 nt, Homo sapiens
  misc_RNA (1)...(19): siRNA sense strand
gaugaaaucugugcugaua

SEQ ID NO: 1377963 - RNA, 19 nt, Homo sapiens
  misc_RNA (1)...(19): siRNA sense strand
gaauuucacucacauacaa

SEQ ID NO: 1377964 - RNA, 19 nt, Homo sapiens
  misc_RNA (1)...(19): siRNA sense strand
ccaaugaccugcacuugaa

SEQ ID NO: 1377965 - RNA, 19 nt, Homo sapiens
  misc_RNA (1)...(19): siRNA sense strand
gagaggaacccguauguuu

SEQ ID NO: 1377966 - RNA, 19 nt, Homo sapiens
  misc_RNA (1)...(19): siRNA sense strand
guacaaucguugacaauga

SEQ ID NO: 1377967 - RNA, 19 nt, Homo sapiens
  misc_RNA (1)...(19): siRNA sense strand
ucaauaagcuugccaacau

SEQ ID NO: 1377968 - RNA, 19 nt, Homo sapiens
  misc_RNA (1)...(19): siRNA sense strand
aaacagcgccaucaagaua

SEQ ID NO: 1377969 - RNA, 19 nt, Homo sapiens
  misc_RNA (1)...(19): siRNA sense strand
cagaauauccgcauugaaa

SEQ ID NO: 1377970 - RNA, 19 nt, Homo sapiens
  misc_RNA (1)...(19): siRNA sense strand
caauaagcuugccaacaua

SEQ ID NO: 1377971 - RNA, 19 nt, Homo sapiens
  misc_RNA (1)...(19): siRNA sense strand
gaacagagggaaccacgaa

SEQ ID NO: 1377972 - RNA, 19 nt, Homo sapiens
  misc_RNA (1)...(19): siRNA sense strand
gaucugaccuggaaaucau

SEQ ID NO: 1377973 - RNA, 19 nt, Homo sapiens
  misc_RNA (1)...(19): siRNA sense strand
ggagaucccucaguucgaa

SEQ ID NO: 1377974 - RNA, 19 nt, Homo sapiens
  misc_RNA (1)...(19): siRNA sense strand
gggcugaacuuaccaugga

SEQ ID NO: 1377975 - RNA, 19 nt, Homo sapiens
  misc_RNA (1)...(19): siRNA sense strand
auacagaucugaccuggaa

SEQ ID NO: 1377976 - RNA, 19 nt, Homo sapiens
  misc_RNA (1)...(19): siRNA sense strand
gaccacagacuugaauuua

SEQ ID NO: 1377977 - RNA, 19 nt, Homo sapiens
  misc_RNA (1)...(19): siRNA sense strand
gauggaagcauugacuuua

SEQ ID NO: 1377978 - RNA, 19 nt, Homo sapiens
  misc_RNA (1)...(19): siRNA sense strand
ccaaagagguaacaaucug

SEQ ID NO: 1377979 - RNA, 19 nt, Homo sapiens
  misc_RNA (1)...(19): siRNA sense strand
gaaagaauuccauagagau

SEQ ID NO: 1377980 - RNA, 19 nt, Homo sapiens
  misc_RNA (1)...(19): siRNA sense strand
ccauagagauccuaaugau

SEQ ID NO: 1377981 - RNA, 19 nt, Homo sapiens
  misc_RNA (1)...(19): siRNA sense strand
gagggaaccacgaagauuu

SEQ ID NO: 1377982 - RNA, 19 nt, Homo sapiens
  misc_RNA (1)...(19): siRNA sense strand
cuaaugauccuguguguga

SEQ ID NO: 1377983 - RNA, 19 nt, Homo sapiens
  misc_RNA (1)...(19): siRNA sense strand
guucgaaucugguaaacau

SEQ ID NO: 1377984 - RNA, 19 nt, Homo sapiens
  misc_RNA (1)...(19): siRNA sense strand
uaauggacuugaacaaaga

SEQ ID NO: 1377985 - RNA, 19 nt, Homo sapiens
  misc_RNA (1)...(19): siRNA sense strand
guagaucgaggaaagaauu

SEQ ID NO: 1377986 - RNA, 19 nt, Homo sapiens
  misc_RNA (1)...(19): siRNA sense strand
ccauggagaucccucaguu

SEQ ID NO: 1377987 - RNA, 19 nt, Homo sapiens
  misc_RNA (1)...(19): siRNA sense strand
aaacuucucccuccaaaga

SEQ ID NO: 1377988 - RNA, 19 nt, Homo sapiens
  misc_RNA (1)...(19): siRNA sense strand
guagagaggaacaagauga

SEQ ID NO: 1377989 - RNA, 19 nt, Homo sapiens
  misc_RNA (1)...(19): siRNA sense strand
gauaugaagacuugaugaa

SEQ ID NO: 1377990 - RNA, 19 nt, Homo sapiens
  misc_RNA (1)...(19): siRNA sense strand
ccacgaagauuuuaugaug

SEQ ID NO: 1377991 - RNA, 19 nt, Homo sapiens
  misc_RNA (1)...(19): siRNA sense strand
gaaaacagcgccaucaaga

SEQ ID NO: 1377992 - RNA, 19 nt, Homo sapiens
  misc_RNA (1)...(19): siRNA sense strand
ccacagacuugaauuuacu

SEQ ID NO: 1377993 - RNA, 19 nt, Homo sapiens
  misc_RNA (1)...(19): siRNA sense strand
gguauggcuucacgaaaga

SEQ ID NO: 1377994 - RNA, 19 nt, Homo sapiens
  misc_RNA (1)...(19): siRNA sense strand
gaauuuacuccaccgugua

SEQ ID NO: 1377995 - RNA, 19 nt, Homo sapiens
  misc_RNA (1)...(19): siRNA sense strand
caacggaaacaaacagaga

SEQ ID NO: 1377996 - RNA, 19 nt, Homo sapiens
  misc_RNA (1)...(19): siRNA sense strand
ccaucaagauauuaagaga

SEQ ID NO: 1377997 - RNA, 19 nt, Homo sapiens
  misc_RNA (1)...(19): siRNA sense strand
guacaagaggcucauucua

SEQ ID NO: 1377998 - RNA, 19 nt, Homo sapiens
  misc_RNA (1)...(19): siRNA sense strand
uacaaucguugacaaugaa

SEQ ID NO: 1377999 - RNA, 19 nt, Homo sapiens
  misc_RNA (1)...(19): siRNA sense strand
cauaauggacuugaacaaa

SEQ ID NO: 1378000 - RNA, 19 nt, Homo sapiens
  misc_RNA (1)...(19): siRNA sense strand
gaucuccguggaagaauuu

SEQ ID NO: 1378001 - RNA, 19 nt, Homo sapiens
  misc_RNA (1)...(19): siRNA sense strand
aaacaaacagagaccauga

SEQ ID NO: 1378002 - RNA, 19 nt, Homo sapiens
  misc_RNA (1)...(19): siRNA sense strand
gagaggaacaagaugaaau

SEQ ID NO: 1378003 - RNA, 19 nt, Homo sapiens
  misc_RNA (1)...(19): siRNA sense strand
ucacucacauacaaacuuc

SEQ ID NO: 1378004 - RNA, 19 nt, Homo sapiens
  misc_RNA (1)...(19): siRNA sense strand
uggaaacguugaauacaug

SEQ ID NO: 1378005 - RNA, 19 nt, Homo sapiens
  misc_RNA (1)...(19): siRNA sense strand
acaaacuucucccuccaaa

SEQ ID NO: 1378006 - RNA, 19 nt, Homo sapiens
  misc_RNA (1)...(19): siRNA sense strand
uaagagagagagugauuuc

SEQ ID NO: 1378007 - RNA, 19 nt, Homo sapiens
  misc_RNA (1)...(19): siRNA sense strand
acagagaccaugacacuga

SEQ ID NO: 1378008 - RNA, 19 nt, Homo sapiens
  misc_RNA (1)...(19): siRNA sense strand
uaucagagaccacagacuu

SEQ ID NO: 1378009 - RNA, 19 nt, Homo sapiens
  misc_RNA (1)...(19): siRNA sense strand
aaacagagaccaugacacu

SEQ ID NO: 1378010 - RNA, 19 nt, Homo sapiens
  misc_RNA (1)...(19): siRNA sense strand
auaauggacuugaacaaag

SEQ ID NO: 1378011 - RNA, 19 nt, Homo sapiens
  misc_RNA (1)...(19): siRNA sense strand
uaugaagacuugaugaaac

SEQ ID NO: 1378012 - RNA, 19 nt, Homo sapiens
  misc_RNA (1)...(19): siRNA sense strand
cauugacacugaucacuca

SEQ ID NO: 1378013 - RNA, 19 nt, Homo sapiens
  misc_RNA (1)...(19): siRNA sense strand
acaagaggcucauucuacu

SEQ ID NO: 1378014 - RNA, 19 nt, Homo sapiens
  misc_RNA (1)...(19): siRNA sense strand
ccaacauaauggacuugaa

SEQ ID NO: 1378015 - RNA, 19 nt, Homo sapiens
  misc_RNA (1)...(19): siRNA sense strand
gaugauucccaagucaaua

SEQ ID NO: 1378016 - RNA, 19 nt, Homo sapiens
  misc_RNA (1)...(19): siRNA sense strand
cgaaucugguaaacauaga

SEQ ID NO: 1378017 - RNA, 19 nt, Homo sapiens
  misc_RNA (1)...(19): siRNA sense strand
ggacuugaacaaagaugga

SEQ ID NO: 1378018 - RNA, 19 nt, Homo sapiens
  misc_RNA (1)...(19): siRNA sense strand
ugaugaaucugagguaugg

SEQ ID NO: 1378019 - RNA, 19 nt, Homo sapiens
  misc_RNA (1)...(19): siRNA sense strand
caagauauuaagagagaga

SEQ ID NO: 1378020 - RNA, 19 nt, Homo sapiens
  misc_RNA (1)...(19): siRNA sense strand
uugaauacauguccagcuu

SEQ ID NO: 1378021 - RNA, 19 nt, Homo sapiens
  misc_RNA (1)...(19): siRNA sense strand
ggaaacaaacagagaccau

SEQ ID NO: 1378022 - RNA, 19 nt, Homo sapiens
  misc_RNA (1)...(19): siRNA sense strand
auggaagcauugacuuuaa

SEQ ID NO: 1378023 - RNA, 19 nt, Homo sapiens
  misc_RNA (1)...(19): siRNA sense strand
cccaaucgguacaaucguu

SEQ ID NO: 1378024 - RNA, 19 nt, Homo sapiens
  misc_RNA (1)...(19): siRNA sense strand
caacauaauggacuugaac

SEQ ID NO: 1378025 - RNA, 19 nt, Homo sapiens
  misc_RNA (1)...(19): siRNA sense strand
ggauaucagagaccacaga

SEQ ID NO: 1378026 - RNA, 19 nt, Homo sapiens
  misc_RNA (1)...(19): siRNA sense strand
uggaagcauugacuuuaau

SEQ ID NO: 1378027 - RNA, 19 nt, Homo sapiens
  misc_RNA (1)...(19): siRNA sense strand
acagcgccaucaagauauu

SEQ ID NO: 1378028 - RNA, 19 nt, Homo sapiens
  misc_RNA (1)...(19): siRNA sense strand
cgugccauguggaaacuuu

SEQ ID NO: 1378029 - RNA, 19 nt, Homo sapiens
  misc_RNA (1)...(19): siRNA sense strand
gagguauggcuucacgaaa

SEQ ID NO: 1378030 - RNA, 19 nt, Homo sapiens
  misc_RNA (1)...(19): siRNA sense strand
aaacauagaccaaaaugga

SEQ ID NO: 1378031 - RNA, 19 nt, Homo sapiens
  misc_RNA (1)...(19): siRNA sense strand
uaugaugaaucugagguau

SEQ ID NO: 1378032 - RNA, 19 nt, Homo sapiens
  misc_RNA (1)...(19): siRNA sense strand
gaggcucauucuacucuag

SEQ ID NO: 1378033 - RNA, 19 nt, Homo sapiens
  misc_RNA (1)...(19): siRNA sense strand
caacuucaagaccacagaa

SEQ ID NO: 1378034 - RNA, 19 nt, Homo sapiens
  misc_RNA (1)...(19): siRNA sense strand
ugaccuuacucgugcuuuc

SEQ ID NO: 1378035 - RNA, 19 nt, Homo sapiens
  misc_RNA (1)...(19): siRNA sense strand
agaccacagacuugaauuu

SEQ ID NO: 1378036 - RNA, 19 nt, Homo sapiens
  misc_RNA (1)...(19): siRNA sense strand
uaagcuugccaacauaaug

SEQ ID NO: 1378037 - RNA, 19 nt, Homo sapiens
  misc_RNA (1)...(19): siRNA sense strand
ugaucuccguggaagaauu

SEQ ID NO: 1378038 - RNA, 19 nt, Homo sapiens
  misc_RNA (1)...(19): siRNA sense strand
uacaagaggcucauucuac

SEQ ID NO: 1378039 - RNA, 19 nt, Homo sapiens
  misc_RNA (1)...(19): siRNA sense strand
ucagagaccacagacuuga

SEQ ID NO: 1378040 - RNA, 19 nt, Homo sapiens
  misc_RNA (1)...(19): siRNA sense strand
ucauucuacucuaguugaa

SEQ ID NO: 1378041 - RNA, 19 nt, Homo sapiens
  misc_RNA (1)...(19): siRNA sense strand
aaauggaaacguugaauac

SEQ ID NO: 1378042 - RNA, 19 nt, Homo sapiens
  misc_RNA (1)...(19): siRNA sense strand
ccacagaaaaucaggaaaa

SEQ ID NO: 1378043 - RNA, 19 nt, Homo sapiens
  misc_RNA (1)...(19): siRNA sense strand
caaagagguaacaaucugu

SEQ ID NO: 1378044 - RNA, 19 nt, Homo sapiens
  misc_RNA (1)...(19): siRNA sense strand
ucaguucgaaucugguaaa

SEQ ID NO: 1378045 - RNA, 19 nt, Homo sapiens
  misc_RNA (1)...(19): siRNA sense strand
aauaagcuugccaacauaa

SEQ ID NO: 1378046 - RNA, 19 nt, Homo sapiens
  misc_RNA (1)...(19): siRNA sense strand
ugaaaucugugcugauacc

SEQ ID NO: 1378047 - RNA, 19 nt, Homo sapiens
  misc_RNA (1)...(19): siRNA sense strand
cagagaggaacccguaugu

SEQ ID NO: 1378048 - RNA, 19 nt, Homo sapiens
  misc_RNA (1)...(19): siRNA sense strand
uccagaauauccgcauuga

SEQ ID NO: 1378049 - RNA, 19 nt, Homo sapiens
  misc_RNA (1)...(19): siRNA sense strand
gguacaaucguugacaaug

SEQ ID NO: 1378050 - RNA, 19 nt, Homo sapiens
  misc_RNA (1)...(19): siRNA sense strand
auguccagcuuccagaaua

SEQ ID NO: 1378051 - RNA, 19 nt, Homo sapiens
  misc_RNA (1)...(19): siRNA sense strand
ggaaacguugaauacaugu

SEQ ID NO: 1378052 - RNA, 19 nt, Homo sapiens
  misc_RNA (1)...(19): siRNA sense strand
cccaaugaccugcacuuga

SEQ ID NO: 1378053 - RNA, 19 nt, Homo sapiens
  misc_RNA (1)...(19): siRNA sense strand
uagagaggaacaagaugaa

SEQ ID NO: 1378054 - RNA, 19 nt, Homo sapiens
  misc_RNA (1)...(19): siRNA sense strand
gggaaacuggaugaucuuu

SEQ ID NO: 1378055 - RNA, 19 nt, Homo sapiens
  misc_RNA (1)...(19): siRNA sense strand
ugagguauggcuucacgaa

SEQ ID NO: 1378056 - RNA, 19 nt, Homo sapiens
  misc_RNA (1)...(19): siRNA sense strand
agauggaagcauugacuuu

SEQ ID NO: 1378057 - RNA, 19 nt, Homo sapiens
  misc_RNA (1)...(19): siRNA sense strand
gaagaauuucgugccaugu

SEQ ID NO: 1378058 - RNA, 19 nt, Homo sapiens
  misc_RNA (1)...(19): siRNA sense strand
cagaaaaucaggaaaacuu

SEQ ID NO: 1378059 - RNA, 19 nt, Homo sapiens
  misc_RNA (1)...(19): siRNA sense strand
gaaccacgaagauuuuaug

SEQ ID NO: 1378060 - RNA, 19 nt, Homo sapiens
  misc_RNA (1)...(19): siRNA sense strand
agguauggcuucacgaaag

SEQ ID NO: 1378061 - RNA, 19 nt, Homo sapiens
  misc_RNA (1)...(19): siRNA sense strand
gaacaaagauggaagcauu

SEQ ID NO: 1378062 - RNA, 19 nt, Homo sapiens
  misc_RNA (1)...(19): siRNA sense strand
gaugaaaucugugcugaua

SEQ ID NO: 1378063 - RNA, 19 nt, Homo sapiens
  misc_RNA (1)...(19): siRNA sense strand
gaauuucacucacauacaa

SEQ ID NO: 1378064 - RNA, 19 nt, Homo sapiens
  misc_RNA (1)...(19): siRNA sense strand
ccaaugaccugcacuugaa

SEQ ID NO: 1378065 - RNA, 19 nt, Homo sapiens
  misc_RNA (1)...(19): siRNA sense strand
gagaggaacccguauguuu

SEQ ID NO: 1378066 - RNA, 19 nt, Homo sapiens
  misc_RNA (1)...(19): siRNA sense strand
guacaaucguugacaauga

SEQ ID NO: 1378067 - RNA, 19 nt, Homo sapiens
  misc_RNA (1)...(19): siRNA sense strand
ucaauaagcuugccaacau

SEQ ID NO: 1378068 - RNA, 19 nt, Homo sapiens
  misc_RNA (1)...(19): siRNA sense strand
gcaguuauccaccuucuuu

SEQ ID NO: 1378069 - RNA, 19 nt, Homo sapiens
  misc_RNA (1)...(19): siRNA sense strand
cgaauaugcugaugaacaa

SEQ ID NO: 1378070 - RNA, 19 nt, Homo sapiens
  misc_RNA (1)...(19): siRNA sense strand
aaacagcgccaucaagaua

SEQ ID NO: 1378071 - RNA, 19 nt, Homo sapiens
  misc_RNA (1)...(19): siRNA sense strand
uuacaaagcucgacugaag

SEQ ID NO: 1378072 - RNA, 19 nt, Homo sapiens
  misc_RNA (1)...(19): siRNA sense strand
cagaauauccgcauugaaa

SEQ ID NO: 1378073 - RNA, 19 nt, Homo sapiens
  misc_RNA (1)...(19): siRNA sense strand
caauaagcuugccaacaua

SEQ ID NO: 1378074 - RNA, 19 nt, Homo sapiens
  misc_RNA (1)...(19): siRNA sense strand
gaacagagggaaccacgaa

SEQ ID NO: 1378075 - RNA, 19 nt, Homo sapiens
  misc_RNA (1)...(19): siRNA sense strand
gaucugaccuggaaaucau

SEQ ID NO: 1378076 - RNA, 19 nt, Homo sapiens
  misc_RNA (1)...(19): siRNA sense strand
caggagaucugacacauca

SEQ ID NO: 1378077 - RNA, 19 nt, Homo sapiens
  misc_RNA (1)...(19): siRNA sense strand
ggagaucccucaguucgaa

SEQ ID NO: 1378078 - RNA, 19 nt, Homo sapiens
  misc_RNA (1)...(19): siRNA sense strand
gggcugaacuuaccaugga

SEQ ID NO: 1378079 - RNA, 19 nt, Homo sapiens
  misc_RNA (1)...(19): siRNA sense strand
auacagaucugaccuggaa

SEQ ID NO: 1378080 - RNA, 19 nt, Homo sapiens
  misc_RNA (1)...(19): siRNA sense strand
gaccacagacuugaauuua

SEQ ID NO: 1378081 - RNA, 19 nt, Homo sapiens
  misc_RNA (1)...(19): siRNA sense strand
gauggaagcauugacuuua

SEQ ID NO: 1378082 - RNA, 19 nt, Homo sapiens
  misc_RNA (1)...(19): siRNA sense strand
ccaaagagguaacaaucug

SEQ ID NO: 1378083 - RNA, 19 nt, Homo sapiens
  misc_RNA (1)...(19): siRNA sense strand
gaaagaauuccauagagau

SEQ ID NO: 1378084 - RNA, 19 nt, Homo sapiens
  misc_RNA (1)...(19): siRNA sense strand
ccauagagauccuaaugau

SEQ ID NO: 1378085 - RNA, 19 nt, Homo sapiens
  misc_RNA (1)...(19): siRNA sense strand
gagggaaccacgaagauuu

SEQ ID NO: 1378086 - RNA, 19 nt, Homo sapiens
  misc_RNA (1)...(19): siRNA sense strand
ccaagaaaguccugaagca

SEQ ID NO: 1378087 - RNA, 19 nt, Homo sapiens
  misc_RNA (1)...(19): siRNA sense strand
guucgaaucugguaaacau

SEQ ID NO: 1378088 - RNA, 19 nt, Homo sapiens
  misc_RNA (1)...(19): siRNA sense strand
cuaaugauccuguguguga

SEQ ID NO: 1378089 - RNA, 19 nt, Homo sapiens
  misc_RNA (1)...(19): siRNA sense strand
cagcaguucuucaacgaaa

SEQ ID NO: 1378090 - RNA, 19 nt, Homo sapiens
  misc_RNA (1)...(19): siRNA sense strand
uaauggacuugaacaaaga

SEQ ID NO: 1378091 - RNA, 19 nt, Homo sapiens
  misc_RNA (1)...(19): siRNA sense strand
guagaucgaggaaagaauu

SEQ ID NO: 1378092 - RNA, 19 nt, Homo sapiens
  misc_RNA (1)...(19): siRNA sense strand
ccauggagaucccucaguu

SEQ ID NO: 1378093 - RNA, 19 nt, Homo sapiens
  misc_RNA (1)...(19): siRNA sense strand
ucuuagaggugcuauuuga

SEQ ID NO: 1378094 - RNA, 19 nt, Homo sapiens
  misc_RNA (1)...(19): siRNA sense strand
aaacuucucccuccaaaga

SEQ ID NO: 1378095 - RNA, 19 nt, Homo sapiens
  misc_RNA (1)...(19): siRNA sense strand
agaaaguccugaagcaaau

SEQ ID NO: 1378096 - RNA, 19 nt, Homo sapiens
  misc_RNA (1)...(19): siRNA sense strand
gauaugaagacuugaugaa

SEQ ID NO: 1378097 - RNA, 19 nt, Homo sapiens
  misc_RNA (1)...(19): siRNA sense strand
guagagaggaacaagauga

SEQ ID NO: 1378098 - RNA, 19 nt, Homo sapiens
  misc_RNA (1)...(19): siRNA sense strand
acacacauauacauaagga

SEQ ID NO: 1378099 - RNA, 19 nt, Homo sapiens
  misc_RNA (1)...(19): siRNA sense strand
gaaaacagcgccaucaaga

SEQ ID NO: 1378100 - RNA, 19 nt, Homo sapiens
  misc_RNA (1)...(19): siRNA sense strand
ccacagacuugaauuuacu

SEQ ID NO: 1378101 - RNA, 19 nt, Homo sapiens
  misc_RNA (1)...(19): siRNA sense strand
gguauggcuucacgaaaga

SEQ ID NO: 1378102 - RNA, 19 nt, Homo sapiens
  misc_RNA (1)...(19): siRNA sense strand
ccacgaagauuuuaugaug

SEQ ID NO: 1378103 - RNA, 19 nt, Homo sapiens
  misc_RNA (1)...(19): siRNA sense strand
ucaugcccauuaugucuua

SEQ ID NO: 1378104 - RNA, 19 nt, Homo sapiens
  misc_RNA (1)...(19): siRNA sense strand
guaccgagguuacaaagcu

SEQ ID NO: 1378105 - RNA, 19 nt, Homo sapiens
  misc_RNA (1)...(19): siRNA sense strand
gaauuuacuccaccgugua

SEQ ID NO: 1378106 - RNA, 19 nt, Homo sapiens
  misc_RNA (1)...(19): siRNA sense strand
caacggaaacaaacagaga

SEQ ID NO: 1378107 - RNA, 19 nt, Homo sapiens
  misc_RNA (1)...(19): siRNA sense strand
gauacuucaugcccauuau

SEQ ID NO: 1378108 - RNA, 19 nt, Homo sapiens
  misc_RNA (1)...(19): siRNA sense strand
guacaagaggcucauucua

SEQ ID NO: 1378109 - RNA, 19 nt, Homo sapiens
  misc_RNA (1)...(19): siRNA sense strand
ccaucaagauauuaagaga

SEQ ID NO: 1378110 - RNA, 19 nt, Homo sapiens
  misc_RNA (1)...(19): siRNA sense strand
uacaaucguugacaaugaa

SEQ ID NO: 1378111 - RNA, 19 nt, Homo sapiens
  misc_RNA (1)...(19): siRNA sense strand
cauaauggacuugaacaaa

SEQ ID NO: 1378112 - RNA, 19 nt, Homo sapiens
  misc_RNA (1)...(19): siRNA sense strand
gaucuccguggaagaauuu

SEQ ID NO: 1378113 - RNA, 19 nt, Homo sapiens
  misc_RNA (1)...(19): siRNA sense strand
aaacaaacagagaccauga

SEQ ID NO: 1378114 - RNA, 19 nt, Homo sapiens
  misc_RNA (1)...(19): siRNA sense strand
gagaggaacaagaugaaau

SEQ ID NO: 1378115 - RNA, 19 nt, Homo sapiens
  misc_RNA (1)...(19): siRNA sense strand
ggaaaacuacacacauaua

SEQ ID NO: 1378116 - RNA, 19 nt, Homo sapiens
  misc_RNA (1)...(19): siRNA sense strand
uggaaacguugaauacaug

SEQ ID NO: 1378117 - RNA, 19 nt, Homo sapiens
  misc_RNA (1)...(19): siRNA sense strand
ucacucacauacaaacuuc

SEQ ID NO: 1378118 - RNA, 19 nt, Homo sapiens
  misc_RNA (1)...(19): siRNA sense strand
acaaacuucucccuccaaa

SEQ ID NO: 1378119 - RNA, 19 nt, Homo sapiens
  misc_RNA (1)...(19): siRNA sense strand
uaagagagagagugauuuc

SEQ ID NO: 1378120 - RNA, 19 nt, Homo sapiens
  misc_RNA (1)...(19): siRNA sense strand
acagagaccaugacacuga

SEQ ID NO: 1378121 - RNA, 19 nt, Homo sapiens
  misc_RNA (1)...(19): siRNA sense strand
uaucagagaccacagacuu

SEQ ID NO: 1378122 - RNA, 19 nt, Homo sapiens
  misc_RNA (1)...(19): siRNA sense strand
aaacagagaccaugacacu

SEQ ID NO: 1378123 - RNA, 19 nt, Homo sapiens
  misc_RNA (1)...(19): siRNA sense strand
auaauggacuugaacaaag

SEQ ID NO: 1378124 - RNA, 19 nt, Homo sapiens
  misc_RNA (1)...(19): siRNA sense strand
uaugaagacuugaugaaac

SEQ ID NO: 1378125 - RNA, 19 nt, Homo sapiens
  misc_RNA (1)...(19): siRNA sense strand
cuacacacauauacauaag

SEQ ID NO: 1378126 - RNA, 19 nt, Homo sapiens
  misc_RNA (1)...(19): siRNA sense strand
cauugacacugaucacuca

SEQ ID NO: 1378127 - RNA, 19 nt, Homo sapiens
  misc_RNA (1)...(19): siRNA sense strand
aagaaaguccugaagcaaa

SEQ ID NO: 1378128 - RNA, 19 nt, Homo sapiens
  misc_RNA (1)...(19): siRNA sense strand
ccaacauaauggacuugaa

SEQ ID NO: 1378129 - RNA, 19 nt, Homo sapiens
  misc_RNA (1)...(19): siRNA sense strand
gaugauucccaagucaaua

SEQ ID NO: 1378130 - RNA, 19 nt, Homo sapiens
  misc_RNA (1)...(19): siRNA sense strand
acaagaggcucauucuacu

SEQ ID NO: 1378131 - RNA, 19 nt, Homo sapiens
  misc_RNA (1)...(19): siRNA sense strand
gaacugguaccgagguuac

SEQ ID NO: 1378132 - RNA, 19 nt, Homo sapiens
  misc_RNA (1)...(19): siRNA sense strand
cgaaucugguaaacauaga

SEQ ID NO: 1378133 - RNA, 19 nt, Homo sapiens
  misc_RNA (1)...(19): siRNA sense strand
ggacuugaacaaagaugga

SEQ ID NO: 1378134 - RNA, 19 nt, Homo sapiens
  misc_RNA (1)...(19): siRNA sense strand
caagaaaguccugaagcaa

SEQ ID NO: 1378135 - RNA, 19 nt, Homo sapiens
  misc_RNA (1)...(19): siRNA sense strand
ggaugcagcaguucuucaa

SEQ ID NO: 1378136 - RNA, 19 nt, Homo sapiens
  misc_RNA (1)...(19): siRNA sense strand
ugaugaaucugagguaugg

SEQ ID NO: 1378137 - RNA, 19 nt, Homo sapiens
  misc_RNA (1)...(19): siRNA sense strand
caagauauuaagagagaga

SEQ ID NO: 1378138 - RNA, 19 nt, Homo sapiens
  misc_RNA (1)...(19): siRNA sense strand
uugaauacauguccagcuu

SEQ ID NO: 1378139 - RNA, 19 nt, Homo sapiens
  misc_RNA (1)...(19): siRNA sense strand
ggaaacaaacagagaccau

SEQ ID NO: 1378140 - RNA, 19 nt, Homo sapiens
  misc_RNA (1)...(19): siRNA sense strand
auggaagcauugacuuuaa

SEQ ID NO: 1378141 - RNA, 19 nt, Homo sapiens
  misc_RNA (1)...(19): siRNA sense strand
gaaggccagacaacacuau

SEQ ID NO: 1378142 - RNA, 19 nt, Homo sapiens
  misc_RNA (1)...(19): siRNA sense strand
gagcugcguugaucaucca

SEQ ID NO: 1378143 - RNA, 19 nt, Homo sapiens
  misc_RNA (1)...(19): siRNA sense strand
uuagaggugcuauuugaaa

SEQ ID NO: 1378144 - RNA, 19 nt, Homo sapiens
  misc_RNA (1)...(19): siRNA sense strand
caacauaauggacuugaac

SEQ ID NO: 1378145 - RNA, 19 nt, Homo sapiens
  misc_RNA (1)...(19): siRNA sense strand
cccaaucgguacaaucguu

SEQ ID NO: 1378146 - RNA, 19 nt, Homo sapiens
  misc_RNA (1)...(19): siRNA sense strand
ugucuuagaggugcuauuu

SEQ ID NO: 1378147 - RNA, 19 nt, Homo sapiens
  misc_RNA (1)...(19): siRNA sense strand
uggaagcauugacuuuaau

SEQ ID NO: 1378148 - RNA, 19 nt, Homo sapiens
  misc_RNA (1)...(19): siRNA sense strand
ggauaucagagaccacaga

SEQ ID NO: 1378149 - RNA, 19 nt, Homo sapiens
  misc_RNA (1)...(19): siRNA sense strand
acagcgccaucaagauauu

SEQ ID NO: 1378150 - RNA, 19 nt, Homo sapiens
  misc_RNA (1)...(19): siRNA sense strand
cgugccauguggaaacuuu

SEQ ID NO: 1378151 - RNA, 19 nt, Homo sapiens
  misc_RNA (1)...(19): siRNA sense strand
gagguauggcuucacgaaa

SEQ ID NO: 1378152 - RNA, 19 nt, Homo sapiens
  misc_RNA (1)...(19): siRNA sense strand
aaacauagaccaaaaugga

SEQ ID NO: 1378153 - RNA, 19 nt, Homo sapiens
  misc_RNA (1)...(19): siRNA sense strand
acugagagcugcguugauc

SEQ ID NO: 1378154 - RNA, 19 nt, Homo sapiens
  misc_RNA (1)...(19): siRNA sense strand
gaggcucauucuacucuag

SEQ ID NO: 1378155 - RNA, 19 nt, Homo sapiens
  misc_RNA (1)...(19): siRNA sense strand
caacuucaagaccacagaa

SEQ ID NO: 1378156 - RNA, 19 nt, Homo sapiens
  misc_RNA (1)...(19): siRNA sense strand
ugaccuuacucgugcuuuc

SEQ ID NO: 1378157 - RNA, 19 nt, Homo sapiens
  misc_RNA (1)...(19): siRNA sense strand
uaugaugaaucugagguau

SEQ ID NO: 1378158 - RNA, 19 nt, Homo sapiens
  misc_RNA (1)...(19): siRNA sense strand
uacaagaggcucauucuac

SEQ ID NO: 1378159 - RNA, 19 nt, Homo sapiens
  misc_RNA (1)...(19): siRNA sense strand
uaagcuugccaacauaaug

SEQ ID NO: 1378160 - RNA, 19 nt, Homo sapiens
  misc_RNA (1)...(19): siRNA sense strand
ugaucuccguggaagaauu

SEQ ID NO: 1378161 - RNA, 19 nt, Homo sapiens
  misc_RNA (1)...(19): siRNA sense strand
gaugaaaucugugcugaua

SEQ ID NO: 1378162 - RNA, 19 nt, Homo sapiens
  misc_RNA (1)...(19): siRNA sense strand
gaauuucacucacauacaa

SEQ ID NO: 1378163 - RNA, 19 nt, Homo sapiens
  misc_RNA (1)...(19): siRNA sense strand
ccaaugaccugcacuugaa

SEQ ID NO: 1378164 - RNA, 19 nt, Homo sapiens
  misc_RNA (1)...(19): siRNA sense strand
gagaggaacccguauguuu

SEQ ID NO: 1378165 - RNA, 19 nt, Homo sapiens
  misc_RNA (1)...(19): siRNA sense strand
guacaaucguugacaauga

SEQ ID NO: 1378166 - RNA, 19 nt, Homo sapiens
  misc_RNA (1)...(19): siRNA sense strand
gcaguuauccaccuucuuu

SEQ ID NO: 1378167 - RNA, 19 nt, Homo sapiens
  misc_RNA (1)...(19): siRNA sense strand
cgaauaugcugaugaacaa

SEQ ID NO: 1378168 - RNA, 19 nt, Homo sapiens
  misc_RNA (1)...(19): siRNA sense strand
aaacagcgccaucaagaua

SEQ ID NO: 1378169 - RNA, 19 nt, Homo sapiens
  misc_RNA (1)...(19): siRNA sense strand
uuacaaagcucgacugaag

SEQ ID NO: 1378170 - RNA, 19 nt, Homo sapiens
  misc_RNA (1)...(19): siRNA sense strand
gaacagagggaaccacgaa

SEQ ID NO: 1378171 - RNA, 19 nt, Homo sapiens
  misc_RNA (1)...(19): siRNA sense strand
caggagaucugacacauca

SEQ ID NO: 1378172 - RNA, 19 nt, Homo sapiens
  misc_RNA (1)...(19): siRNA sense strand
gaccacagacuugaauuua

SEQ ID NO: 1378173 - RNA, 19 nt, Homo sapiens
  misc_RNA (1)...(19): siRNA sense strand
ccaaagagguaacaaucug

SEQ ID NO: 1378174 - RNA, 19 nt, Homo sapiens
  misc_RNA (1)...(19): siRNA sense strand
gaaagaauuccauagagau

SEQ ID NO: 1378175 - RNA, 19 nt, Homo sapiens
  misc_RNA (1)...(19): siRNA sense strand
ccauagagauccuaaugau

SEQ ID NO: 1378176 - RNA, 19 nt, Homo sapiens
  misc_RNA (1)...(19): siRNA sense strand
gagggaaccacgaagauuu

SEQ ID NO: 1378177 - RNA, 19 nt, Homo sapiens
  misc_RNA (1)...(19): siRNA sense strand
ccaagaaaguccugaagca

SEQ ID NO: 1378178 - RNA, 19 nt, Homo sapiens
  misc_RNA (1)...(19): siRNA sense strand
cuaaugauccuguguguga

SEQ ID NO: 1378179 - RNA, 19 nt, Homo sapiens
  misc_RNA (1)...(19): siRNA sense strand
cagcaguucuucaacgaaa

SEQ ID NO: 1378180 - RNA, 19 nt, Homo sapiens
  misc_RNA (1)...(19): siRNA sense strand
guagaucgaggaaagaauu

SEQ ID NO: 1378181 - RNA, 19 nt, Homo sapiens
  misc_RNA (1)...(19): siRNA sense strand
ucuuagaggugcuauuuga

SEQ ID NO: 1378182 - RNA, 19 nt, Homo sapiens
  misc_RNA (1)...(19): siRNA sense strand
aaacuucucccuccaaaga

SEQ ID NO: 1378183 - RNA, 19 nt, Homo sapiens
  misc_RNA (1)...(19): siRNA sense strand
agaaaguccugaagcaaau

SEQ ID NO: 1378184 - RNA, 19 nt, Homo sapiens
  misc_RNA (1)...(19): siRNA sense strand
guagagaggaacaagauga

SEQ ID NO: 1378185 - RNA, 19 nt, Homo sapiens
  misc_RNA (1)...(19): siRNA sense strand
acacacauauacauaagga

SEQ ID NO: 1378186 - RNA, 19 nt, Homo sapiens
  misc_RNA (1)...(19): siRNA sense strand
gaaaacagcgccaucaaga

SEQ ID NO: 1378187 - RNA, 19 nt, Homo sapiens
  misc_RNA (1)...(19): siRNA sense strand
ccacagacuugaauuuacu

SEQ ID NO: 1378188 - RNA, 19 nt, Homo sapiens
  misc_RNA (1)...(19): siRNA sense strand
gguauggcuucacgaaaga

SEQ ID NO: 1378189 - RNA, 19 nt, Homo sapiens
  misc_RNA (1)...(19): siRNA sense strand
ccacgaagauuuuaugaug

SEQ ID NO: 1378190 - RNA, 19 nt, Homo sapiens
  misc_RNA (1)...(19): siRNA sense strand
ucaugcccauuaugucuua

SEQ ID NO: 1378191 - RNA, 19 nt, Homo sapiens
  misc_RNA (1)...(19): siRNA sense strand
guaccgagguuacaaagcu

SEQ ID NO: 1378192 - RNA, 19 nt, Homo sapiens
  misc_RNA (1)...(19): siRNA sense strand
gaauuuacuccaccgugua

SEQ ID NO: 1378193 - RNA, 19 nt, Homo sapiens
  misc_RNA (1)...(19): siRNA sense strand
caacggaaacaaacagaga

SEQ ID NO: 1378194 - RNA, 19 nt, Homo sapiens
  misc_RNA (1)...(19): siRNA sense strand
gauacuucaugcccauuau

SEQ ID NO: 1378195 - RNA, 19 nt, Homo sapiens
  misc_RNA (1)...(19): siRNA sense strand
ccaucaagauauuaagaga

SEQ ID NO: 1378196 - RNA, 19 nt, Homo sapiens
  misc_RNA (1)...(19): siRNA sense strand
uacaaucguugacaaugaa

SEQ ID NO: 1378197 - RNA, 19 nt, Homo sapiens
  misc_RNA (1)...(19): siRNA sense strand
aaacaaacagagaccauga

SEQ ID NO: 1378198 - RNA, 19 nt, Homo sapiens
  misc_RNA (1)...(19): siRNA sense strand
gagaggaacaagaugaaau

SEQ ID NO: 1378199 - RNA, 19 nt, Homo sapiens
  misc_RNA (1)...(19): siRNA sense strand
ggaaaacuacacacauaua

SEQ ID NO: 1378200 - RNA, 19 nt, Homo sapiens
  misc_RNA (1)...(19): siRNA sense strand
ucacucacauacaaacuuc

SEQ ID NO: 1378201 - RNA, 19 nt, Homo sapiens
  misc_RNA (1)...(19): siRNA sense strand
acaaacuucucccuccaaa

SEQ ID NO: 1378202 - RNA, 19 nt, Homo sapiens
  misc_RNA (1)...(19): siRNA sense strand
uaagagagagagugauuuc

SEQ ID NO: 1378203 - RNA, 19 nt, Homo sapiens
  misc_RNA (1)...(19): siRNA sense strand
acagagaccaugacacuga

SEQ ID NO: 1378204 - RNA, 19 nt, Homo sapiens
  misc_RNA (1)...(19): siRNA sense strand
uaucagagaccacagacuu

SEQ ID NO: 1378205 - RNA, 19 nt, Homo sapiens
  misc_RNA (1)...(19): siRNA sense strand
aaacagagaccaugacacu

SEQ ID NO: 1378206 - RNA, 19 nt, Homo sapiens
  misc_RNA (1)...(19): siRNA sense strand
cuacacacauauacauaag

SEQ ID NO: 1378207 - RNA, 19 nt, Homo sapiens
  misc_RNA (1)...(19): siRNA sense strand
aagaaaguccugaagcaaa

SEQ ID NO: 1378208 - RNA, 19 nt, Homo sapiens
  misc_RNA (1)...(19): siRNA sense strand
gaacugguaccgagguuac

SEQ ID NO: 1378209 - RNA, 19 nt, Homo sapiens
  misc_RNA (1)...(19): siRNA sense strand
caagaaaguccugaagcaa

SEQ ID NO: 1378210 - RNA, 19 nt, Homo sapiens
  misc_RNA (1)...(19): siRNA sense strand
ugaugaaucugagguaugg

SEQ ID NO: 1378211 - RNA, 19 nt, Homo sapiens
  misc_RNA (1)...(19): siRNA sense strand
ggaugcagcaguucuucaa

SEQ ID NO: 1378212 - RNA, 19 nt, Homo sapiens
  misc_RNA (1)...(19): siRNA sense strand
caagauauuaagagagaga

SEQ ID NO: 1378213 - RNA, 19 nt, Homo sapiens
  misc_RNA (1)...(19): siRNA sense strand
gaaggccagacaacacuau

SEQ ID NO: 1378214 - RNA, 19 nt, Homo sapiens
  misc_RNA (1)...(19): siRNA sense strand
ggaaacaaacagagaccau

SEQ ID NO: 1378215 - RNA, 19 nt, Homo sapiens
  misc_RNA (1)...(19): siRNA sense strand
gagcugcguugaucaucca

SEQ ID NO: 1378216 - RNA, 19 nt, Homo sapiens
  misc_RNA (1)...(19): siRNA sense strand
uuagaggugcuauuugaaa

SEQ ID NO: 1378217 - RNA, 19 nt, Homo sapiens
  misc_RNA (1)...(19): siRNA sense strand
cccaaucgguacaaucguu

SEQ ID NO: 1378218 - RNA, 19 nt, Homo sapiens
  misc_RNA (1)...(19): siRNA sense strand
ugucuuagaggugcuauuu

SEQ ID NO: 1378219 - RNA, 19 nt, Homo sapiens
  misc_RNA (1)...(19): siRNA sense strand
ggauaucagagaccacaga

SEQ ID NO: 1378220 - RNA, 19 nt, Homo sapiens
  misc_RNA (1)...(19): siRNA sense strand
acagcgccaucaagauauu

SEQ ID NO: 1378221 - RNA, 19 nt, Homo sapiens
  misc_RNA (1)...(19): siRNA sense strand
gagguauggcuucacgaaa

SEQ ID NO: 1378222 - RNA, 19 nt, Homo sapiens
  misc_RNA (1)...(19): siRNA sense strand
uaugaugaaucugagguau

SEQ ID NO: 1378223 - RNA, 19 nt, Homo sapiens
  misc_RNA (1)...(19): siRNA sense strand
acugagagcugcguugauc

SEQ ID NO: 1378224 - RNA, 19 nt, Homo sapiens
  misc_RNA (1)...(19): siRNA sense strand
agaccacagacuugaauuu

SEQ ID NO: 1378225 - RNA, 19 nt, Homo sapiens
  misc_RNA (1)...(19): siRNA sense strand
caaagagguaacaaucugu

SEQ ID NO: 1378226 - RNA, 19 nt, Homo sapiens
  misc_RNA (1)...(19): siRNA sense strand
ucagagaccacagacuuga

SEQ ID NO: 1378227 - RNA, 19 nt, Homo sapiens
  misc_RNA (1)...(19): siRNA sense strand
ucgaauaugcugaugaaca

SEQ ID NO: 1378228 - RNA, 19 nt, Homo sapiens
  misc_RNA (1)...(19): siRNA sense strand
acuaugcccucaccaucuu

SEQ ID NO: 1378229 - RNA, 19 nt, Homo sapiens
  misc_RNA (1)...(19): siRNA sense strand
cagaacugguaccgagguu

SEQ ID NO: 1378230 - RNA, 19 nt, Homo sapiens
  misc_RNA (1)...(19): siRNA sense strand
gaaaguccugaagcaaaug

SEQ ID NO: 1378231 - RNA, 19 nt, Homo sapiens
  misc_RNA (1)...(19): siRNA sense strand
gcuauuugaaaccaagaaa

SEQ ID NO: 1378232 - RNA, 19 nt, Homo sapiens
  misc_RNA (1)...(19): siRNA sense strand
uuggaaaacuacacacaua

SEQ ID NO: 1378233 - RNA, 19 nt, Homo sapiens
  misc_RNA (1)...(19): siRNA sense strand
ugaaaucugugcugauacc

SEQ ID NO: 1378234 - RNA, 19 nt, Homo sapiens
  misc_RNA (1)...(19): siRNA sense strand
cagagaggaacccguaugu

SEQ ID NO: 1378235 - RNA, 19 nt, Homo sapiens
  misc_RNA (1)...(19): siRNA sense strand
gaggugcuauuugaaacca

SEQ ID NO: 1378236 - RNA, 19 nt, Homo sapiens
  misc_RNA (1)...(19): siRNA sense strand
uagaggugcuauuugaaac

SEQ ID NO: 1378237 - RNA, 19 nt, Homo sapiens
  misc_RNA (1)...(19): siRNA sense strand
uagagaggaacaagaugaa

SEQ ID NO: 1378238 - RNA, 19 nt, Homo sapiens
  misc_RNA (1)...(19): siRNA sense strand
gguacaaucguugacaaug

SEQ ID NO: 1378239 - RNA, 19 nt, Homo sapiens
  misc_RNA (1)...(19): siRNA sense strand
cccaaugaccugcacuuga

SEQ ID NO: 1378240 - RNA, 19 nt, Homo sapiens
  misc_RNA (1)...(19): siRNA sense strand
gcagcaguucuucaacgaa

SEQ ID NO: 1378241 - RNA, 19 nt, Homo sapiens
  misc_RNA (1)...(19): siRNA sense strand
gggaaacuggaugaucuuu

SEQ ID NO: 1378242 - RNA, 19 nt, Homo sapiens
  misc_RNA (1)...(19): siRNA sense strand
gaaccacgaagauuuuaug

SEQ ID NO: 1378243 - RNA, 19 nt, Homo sapiens
  misc_RNA (1)...(19): siRNA sense strand
ucacugagagcugcguuga

SEQ ID NO: 1378244 - RNA, 19 nt, Homo sapiens
  misc_RNA (1)...(19): siRNA sense strand
cugcguugaucauccagaa

SEQ ID NO: 1378245 - RNA, 19 nt, Homo sapiens
  misc_RNA (1)...(19): siRNA sense strand
agguauggcuucacgaaag

SEQ ID NO: 1378246 - RNA, 19 nt, Homo sapiens
  misc_RNA (1)...(19): siRNA sense strand
ugagguauggcuucacgaa

SEQ ID NO: 1378247 - RNA, 19 nt, Homo sapiens
  misc_RNA (1)...(19): siRNA sense strand
agauacuucaugcccauua

SEQ ID NO: 1378248 - RNA, 19 nt, Homo sapiens
  misc_RNA (1)...(19): siRNA sense strand
ugacucgaagcacaauaaa

SEQ ID NO: 1378249 - RNA, 19 nt, Homo sapiens
  misc_RNA (1)...(19): siRNA sense strand
gguuacaaagcucgacuga

SEQ ID NO: 1378250 - RNA, 19 nt, Homo sapiens
  misc_RNA (1)...(19): siRNA sense strand
gaugaacaaggccaaaugc

SEQ ID NO: 1378251 - RNA, 19 nt, Homo sapiens
  misc_RNA (1)...(19): siRNA sense strand
ggagaucugacacaucacu

SEQ ID NO: 1378252 - RNA, 19 nt, Homo sapiens
  misc_RNA (1)...(19): siRNA sense strand
gaaaacuacacacauauac

SEQ ID NO: 1378253 - RNA, 19 nt, Homo sapiens
  misc_RNA (1)...(19): siRNA sense strand
guguagagaggaacaagau

SEQ ID NO: 1378254 - RNA, 19 nt, Homo sapiens
  misc_RNA (1)...(19): siRNA sense strand
gagaccacagacuugaauu

SEQ ID NO: 1378255 - RNA, 19 nt, Homo sapiens
  misc_RNA (1)...(19): siRNA sense strand
uggcuucacgaaagaaauu

SEQ ID NO: 1378256 - RNA, 19 nt, Homo sapiens
  misc_RNA (1)...(19): siRNA sense strand
aaucugagguauggcuuca

SEQ ID NO: 1378257 - RNA, 19 nt, Homo sapiens
  misc_RNA (1)...(19): siRNA sense strand
aaagaauuccauagagauc

SEQ ID NO: 1378258 - RNA, 19 nt, Homo sapiens
  misc_RNA (1)...(19): siRNA sense strand
acagagggaaccacgaaga

SEQ ID NO: 1378259 - RNA, 19 nt, Homo sapiens
  misc_RNA (1)...(19): siRNA sense strand
agaggaacaagaugaaauc

SEQ ID NO: 1378260 - RNA, 19 nt, Homo sapiens
  misc_RNA (1)...(19): siRNA sense strand
aaaugcaguuauccaccuu

SEQ ID NO: 1378261 - RNA, 19 nt, Homo sapiens
  misc_RNA (1)...(19): siRNA sense strand
gaacaaagauggaagcauu

SEQ ID NO: 1378262 - RNA, 19 nt, Homo sapiens
  misc_RNA (1)...(19): siRNA sense strand
gaugaaaucugugcugaua

SEQ ID NO: 1378263 - RNA, 19 nt, Homo sapiens
  misc_RNA (1)...(19): siRNA sense strand
gaauuucacucacauacaa

SEQ ID NO: 1378264 - RNA, 19 nt, Homo sapiens
  misc_RNA (1)...(19): siRNA sense strand
ccaaugaccugcacuugaa

SEQ ID NO: 1378265 - RNA, 19 nt, Homo sapiens
  misc_RNA (1)...(19): siRNA sense strand
gagaggaacccguauguuu

SEQ ID NO: 1378266 - RNA, 19 nt, Homo sapiens
  misc_RNA (1)...(19): siRNA sense strand
guacaaucguugacaauga

SEQ ID NO: 1378267 - RNA, 19 nt, Homo sapiens
  misc_RNA (1)...(19): siRNA sense strand
ucaauaagcuugccaacau

SEQ ID NO: 1378268 - RNA, 19 nt, Homo sapiens
  misc_RNA (1)...(19): siRNA sense strand
gcaguuauccaccuucuuu

SEQ ID NO: 1378269 - RNA, 19 nt, Homo sapiens
  misc_RNA (1)...(19): siRNA sense strand
cgaauaugcugaugaacaa

SEQ ID NO: 1378270 - RNA, 19 nt, Homo sapiens
  misc_RNA (1)...(19): siRNA sense strand
aaacagcgccaucaagaua

SEQ ID NO: 1378271 - RNA, 19 nt, Homo sapiens
  misc_RNA (1)...(19): siRNA sense strand
uuacaaagcucgacugaag

SEQ ID NO: 1378272 - RNA, 19 nt, Homo sapiens
  misc_RNA (1)...(19): siRNA sense strand
cagaauauccgcauugaaa

SEQ ID NO: 1378273 - RNA, 19 nt, Homo sapiens
  misc_RNA (1)...(19): siRNA sense strand
caauaagcuugccaacaua

SEQ ID NO: 1378274 - RNA, 19 nt, Homo sapiens
  misc_RNA (1)...(19): siRNA sense strand
gaacagagggaaccacgaa

SEQ ID NO: 1378275 - RNA, 19 nt, Homo sapiens
  misc_RNA (1)...(19): siRNA sense strand
gaucugaccuggaaaucau

SEQ ID NO: 1378276 - RNA, 19 nt, Homo sapiens
  misc_RNA (1)...(19): siRNA sense strand
caggagaucugacacauca

SEQ ID NO: 1378277 - RNA, 19 nt, Homo sapiens
  misc_RNA (1)...(19): siRNA sense strand
ggagaucccucaguucgaa

SEQ ID NO: 1378278 - RNA, 19 nt, Homo sapiens
  misc_RNA (1)...(19): siRNA sense strand
gggcugaacuuaccaugga

SEQ ID NO: 1378279 - RNA, 19 nt, Homo sapiens
  misc_RNA (1)...(19): siRNA sense strand
auacagaucugaccuggaa

SEQ ID NO: 1378280 - RNA, 19 nt, Homo sapiens
  misc_RNA (1)...(19): siRNA sense strand
gaccacagacuugaauuua

SEQ ID NO: 1378281 - RNA, 19 nt, Homo sapiens
  misc_RNA (1)...(19): siRNA sense strand
gauggaagcauugacuuua

SEQ ID NO: 1378282 - RNA, 19 nt, Homo sapiens
  misc_RNA (1)...(19): siRNA sense strand
ccaaagagguaacaaucug

SEQ ID NO: 1378283 - RNA, 19 nt, Homo sapiens
  misc_RNA (1)...(19): siRNA sense strand
gaaagaauuccauagagau

SEQ ID NO: 1378284 - RNA, 19 nt, Homo sapiens
  misc_RNA (1)...(19): siRNA sense strand
ccauagagauccuaaugau

SEQ ID NO: 1378285 - RNA, 19 nt, Homo sapiens
  misc_RNA (1)...(19): siRNA sense strand
gagggaaccacgaagauuu

SEQ ID NO: 1378286 - RNA, 19 nt, Homo sapiens
  misc_RNA (1)...(19): siRNA sense strand
ccaagaaaguccugaagca

SEQ ID NO: 1378287 - RNA, 19 nt, Homo sapiens
  misc_RNA (1)...(19): siRNA sense strand
guucgaaucugguaaacau

SEQ ID NO: 1378288 - RNA, 19 nt, Homo sapiens
  misc_RNA (1)...(19): siRNA sense strand
cuaaugauccuguguguga

SEQ ID NO: 1378289 - RNA, 19 nt, Homo sapiens
  misc_RNA (1)...(19): siRNA sense strand
cagcaguucuucaacgaaa

SEQ ID NO: 1378290 - RNA, 19 nt, Homo sapiens
  misc_RNA (1)...(19): siRNA sense strand
uaauggacuugaacaaaga

SEQ ID NO: 1378291 - RNA, 19 nt, Homo sapiens
  misc_RNA (1)...(19): siRNA sense strand
guagaucgaggaaagaauu

SEQ ID NO: 1378292 - RNA, 19 nt, Homo sapiens
  misc_RNA (1)...(19): siRNA sense strand
ccauggagaucccucaguu

SEQ ID NO: 1378293 - RNA, 19 nt, Homo sapiens
  misc_RNA (1)...(19): siRNA sense strand
ucuuagaggugcuauuuga

SEQ ID NO: 1378294 - RNA, 19 nt, Homo sapiens
  misc_RNA (1)...(19): siRNA sense strand
aaacuucucccuccaaaga

SEQ ID NO: 1378295 - RNA, 19 nt, Homo sapiens
  misc_RNA (1)...(19): siRNA sense strand
agaaaguccugaagcaaau

SEQ ID NO: 1378296 - RNA, 19 nt, Homo sapiens
  misc_RNA (1)...(19): siRNA sense strand
gauaugaagacuugaugaa

SEQ ID NO: 1378297 - RNA, 19 nt, Homo sapiens
  misc_RNA (1)...(19): siRNA sense strand
guagagaggaacaagauga

SEQ ID NO: 1378298 - RNA, 19 nt, Homo sapiens
  misc_RNA (1)...(19): siRNA sense strand
acacacauauacauaagga

SEQ ID NO: 1378299 - RNA, 19 nt, Homo sapiens
  misc_RNA (1)...(19): siRNA sense strand
gaaaacagcgccaucaaga

SEQ ID NO: 1378300 - RNA, 19 nt, Homo sapiens
  misc_RNA (1)...(19): siRNA sense strand
ccacagacuugaauuuacu

SEQ ID NO: 1378301 - RNA, 19 nt, Homo sapiens
  misc_RNA (1)...(19): siRNA sense strand
gguauggcuucacgaaaga

SEQ ID NO: 1378302 - RNA, 19 nt, Homo sapiens
  misc_RNA (1)...(19): siRNA sense strand
ccacgaagauuuuaugaug

SEQ ID NO: 1378303 - RNA, 19 nt, Homo sapiens
  misc_RNA (1)...(19): siRNA sense strand
ucaugcccauuaugucuua

SEQ ID NO: 1378304 - RNA, 19 nt, Homo sapiens
  misc_RNA (1)...(19): siRNA sense strand
guaccgagguuacaaagcu

SEQ ID NO: 1378305 - RNA, 19 nt, Homo sapiens
  misc_RNA (1)...(19): siRNA sense strand
gaauuuacuccaccgugua

SEQ ID NO: 1378306 - RNA, 19 nt, Homo sapiens
  misc_RNA (1)...(19): siRNA sense strand
caacggaaacaaacagaga

SEQ ID NO: 1378307 - RNA, 19 nt, Homo sapiens
  misc_RNA (1)...(19): siRNA sense strand
gauacuucaugcccauuau

SEQ ID NO: 1378308 - RNA, 19 nt, Homo sapiens
  misc_RNA (1)...(19): siRNA sense strand
guacaagaggcucauucua

SEQ ID NO: 1378309 - RNA, 19 nt, Homo sapiens
  misc_RNA (1)...(19): siRNA sense strand
ccaucaagauauuaagaga

SEQ ID NO: 1378310 - RNA, 19 nt, Homo sapiens
  misc_RNA (1)...(19): siRNA sense strand
uacaaucguugacaaugaa

SEQ ID NO: 1378311 - RNA, 19 nt, Homo sapiens
  misc_RNA (1)...(19): siRNA sense strand
cauaauggacuugaacaaa

SEQ ID NO: 1378312 - RNA, 19 nt, Homo sapiens
  misc_RNA (1)...(19): siRNA sense strand
gaucuccguggaagaauuu

SEQ ID NO: 1378313 - RNA, 19 nt, Homo sapiens
  misc_RNA (1)...(19): siRNA sense strand
aaacaaacagagaccauga

SEQ ID NO: 1378314 - RNA, 19 nt, Homo sapiens
  misc_RNA (1)...(19): siRNA sense strand
gagaggaacaagaugaaau

SEQ ID NO: 1378315 - RNA, 19 nt, Homo sapiens
  misc_RNA (1)...(19): siRNA sense strand
ggaaaacuacacacauaua

SEQ ID NO: 1378316 - RNA, 19 nt, Homo sapiens
  misc_RNA (1)...(19): siRNA sense strand
uggaaacguugaauacaug

SEQ ID NO: 1378317 - RNA, 19 nt, Homo sapiens
  misc_RNA (1)...(19): siRNA sense strand
ucacucacauacaaacuuc

SEQ ID NO: 1378318 - RNA, 19 nt, Homo sapiens
  misc_RNA (1)...(19): siRNA sense strand
acaaacuucucccuccaaa

SEQ ID NO: 1378319 - RNA, 19 nt, Homo sapiens
  misc_RNA (1)...(19): siRNA sense strand
uaagagagagagugauuuc

SEQ ID NO: 1378320 - RNA, 19 nt, Homo sapiens
  misc_RNA (1)...(19): siRNA sense strand
acagagaccaugacacuga

SEQ ID NO: 1378321 - RNA, 19 nt, Homo sapiens
  misc_RNA (1)...(19): siRNA sense strand
uaucagagaccacagacuu

SEQ ID NO: 1378322 - RNA, 19 nt, Homo sapiens
  misc_RNA (1)...(19): siRNA sense strand
aaacagagaccaugacacu

SEQ ID NO: 1378323 - RNA, 19 nt, Homo sapiens
  misc_RNA (1)...(19): siRNA sense strand
auaauggacuugaacaaag

SEQ ID NO: 1378324 - RNA, 19 nt, Homo sapiens
  misc_RNA (1)...(19): siRNA sense strand
uaugaagacuugaugaaac

SEQ ID NO: 1378325 - RNA, 19 nt, Homo sapiens
  misc_RNA (1)...(19): siRNA sense strand
cuacacacauauacauaag

SEQ ID NO: 1378326 - RNA, 19 nt, Homo sapiens
  misc_RNA (1)...(19): siRNA sense strand
cauugacacugaucacuca

SEQ ID NO: 1378327 - RNA, 19 nt, Homo sapiens
  misc_RNA (1)...(19): siRNA sense strand
aagaaaguccugaagcaaa

SEQ ID NO: 1378328 - RNA, 19 nt, Homo sapiens
  misc_RNA (1)...(19): siRNA sense strand
ccaacauaauggacuugaa

SEQ ID NO: 1378329 - RNA, 19 nt, Homo sapiens
  misc_RNA (1)...(19): siRNA sense strand
gaugauucccaagucaaua

SEQ ID NO: 1378330 - RNA, 19 nt, Homo sapiens
  misc_RNA (1)...(19): siRNA sense strand
acaagaggcucauucuacu

SEQ ID NO: 1378331 - RNA, 19 nt, Homo sapiens
  misc_RNA (1)...(19): siRNA sense strand
gaacugguaccgagguuac

SEQ ID NO: 1378332 - RNA, 19 nt, Homo sapiens
  misc_RNA (1)...(19): siRNA sense strand
cgaaucugguaaacauaga

SEQ ID NO: 1378333 - RNA, 19 nt, Homo sapiens
  misc_RNA (1)...(19): siRNA sense strand
ggacuugaacaaagaugga

SEQ ID NO: 1378334 - RNA, 19 nt, Homo sapiens
  misc_RNA (1)...(19): siRNA sense strand
caagaaaguccugaagcaa

SEQ ID NO: 1378335 - RNA, 19 nt, Homo sapiens
  misc_RNA (1)...(19): siRNA sense strand
ggaugcagcaguucuucaa

SEQ ID NO: 1378336 - RNA, 19 nt, Homo sapiens
  misc_RNA (1)...(19): siRNA sense strand
ugaugaaucugagguaugg

SEQ ID NO: 1378337 - RNA, 19 nt, Homo sapiens
  misc_RNA (1)...(19): siRNA sense strand
caagauauuaagagagaga

SEQ ID NO: 1378338 - RNA, 19 nt, Homo sapiens
  misc_RNA (1)...(19): siRNA sense strand
uugaauacauguccagcuu

SEQ ID NO: 1378339 - RNA, 19 nt, Homo sapiens
  misc_RNA (1)...(19): siRNA sense strand
ggaaacaaacagagaccau

SEQ ID NO: 1378340 - RNA, 19 nt, Homo sapiens
  misc_RNA (1)...(19): siRNA sense strand
auggaagcauugacuuuaa

SEQ ID NO: 1378341 - RNA, 19 nt, Homo sapiens
  misc_RNA (1)...(19): siRNA sense strand
gaaggccagacaacacuau

SEQ ID NO: 1378342 - RNA, 19 nt, Homo sapiens
  misc_RNA (1)...(19): siRNA sense strand
gagcugcguugaucaucca

SEQ ID NO: 1378343 - RNA, 19 nt, Homo sapiens
  misc_RNA (1)...(19): siRNA sense strand
uuagaggugcuauuugaaa

SEQ ID NO: 1378344 - RNA, 19 nt, Homo sapiens
  misc_RNA (1)...(19): siRNA sense strand
caacauaauggacuugaac

SEQ ID NO: 1378345 - RNA, 19 nt, Homo sapiens
  misc_RNA (1)...(19): siRNA sense strand
cccaaucgguacaaucguu

SEQ ID NO: 1378346 - RNA, 19 nt, Homo sapiens
  misc_RNA (1)...(19): siRNA sense strand
ugucuuagaggugcuauuu

SEQ ID NO: 1378347 - RNA, 19 nt, Homo sapiens
  misc_RNA (1)...(19): siRNA sense strand
uggaagcauugacuuuaau

SEQ ID NO: 1378348 - RNA, 19 nt, Homo sapiens
  misc_RNA (1)...(19): siRNA sense strand
ggauaucagagaccacaga

SEQ ID NO: 1378349 - RNA, 19 nt, Homo sapiens
  misc_RNA (1)...(19): siRNA sense strand
acagcgccaucaagauauu

SEQ ID NO: 1378350 - RNA, 19 nt, Homo sapiens
  misc_RNA (1)...(19): siRNA sense strand
cgugccauguggaaacuuu

SEQ ID NO: 1378351 - RNA, 19 nt, Homo sapiens
  misc_RNA (1)...(19): siRNA sense strand
gagguauggcuucacgaaa

SEQ ID NO: 1378352 - RNA, 19 nt, Homo sapiens
  misc_RNA (1)...(19): siRNA sense strand
aaacauagaccaaaaugga

SEQ ID NO: 1378353 - RNA, 19 nt, Homo sapiens
  misc_RNA (1)...(19): siRNA sense strand
acugagagcugcguugauc

SEQ ID NO: 1378354 - RNA, 19 nt, Homo sapiens
  misc_RNA (1)...(19): siRNA sense strand
gaggcucauucuacucuag

SEQ ID NO: 1378355 - RNA, 19 nt, Homo sapiens
  misc_RNA (1)...(19): siRNA sense strand
caacuucaagaccacagaa

SEQ ID NO: 1378356 - RNA, 19 nt, Homo sapiens
  misc_RNA (1)...(19): siRNA sense strand
ugaccuuacucgugcuuuc

SEQ ID NO: 1378357 - RNA, 19 nt, Homo sapiens
  misc_RNA (1)...(19): siRNA sense strand
uaugaugaaucugagguau

SEQ ID NO: 1378358 - RNA, 19 nt, Homo sapiens
  misc_RNA (1)...(19): siRNA sense strand
uacaagaggcucauucuac

SEQ ID NO: 1378359 - RNA, 19 nt, Homo sapiens
  misc_RNA (1)...(19): siRNA sense strand
uaagcuugccaacauaaug

SEQ ID NO: 1378360 - RNA, 19 nt, Homo sapiens
  misc_RNA (1)...(19): siRNA sense strand
ugaucuccguggaagaauu

SEQ ID NO: 1378361 - RNA, 19 nt, Homo sapiens
  misc_RNA (1)...(19): siRNA sense strand
gaacaaagauggaagcauu

SEQ ID NO: 1378362 - RNA, 19 nt, Homo sapiens
  misc_RNA (1)...(19): siRNA sense strand
gaugaaaucugugcugaua

SEQ ID NO: 1378363 - RNA, 19 nt, Homo sapiens
  misc_RNA (1)...(19): siRNA sense strand
gaauuucacucacauacaa

SEQ ID NO: 1378364 - RNA, 19 nt, Homo sapiens
  misc_RNA (1)...(19): siRNA sense strand
ccaaugaccugcacuugaa

SEQ ID NO: 1378365 - RNA, 19 nt, Homo sapiens
  misc_RNA (1)...(19): siRNA sense strand
gagaggaacccguauguuu

SEQ ID NO: 1378366 - RNA, 19 nt, Homo sapiens
  misc_RNA (1)...(19): siRNA sense strand
guacaaucguugacaauga

SEQ ID NO: 1378367 - RNA, 19 nt, Homo sapiens
  misc_RNA (1)...(19): siRNA sense strand
ucaauaagcuugccaacau

SEQ ID NO: 1378368 - RNA, 19 nt, Homo sapiens
  misc_RNA (1)...(19): siRNA sense strand
gcaguuauccaccuucuuu

SEQ ID NO: 1378369 - RNA, 19 nt, Homo sapiens
  misc_RNA (1)...(19): siRNA sense strand
cgaauaugcugaugaacaa

SEQ ID NO: 1378370 - RNA, 19 nt, Homo sapiens
  misc_RNA (1)...(19): siRNA sense strand
aaacagcgccaucaagaua

SEQ ID NO: 1378371 - RNA, 19 nt, Homo sapiens
  misc_RNA (1)...(19): siRNA sense strand
uuacaaagcucgacugaag

SEQ ID NO: 1378372 - RNA, 19 nt, Homo sapiens
  misc_RNA (1)...(19): siRNA sense strand
cagaauauccgcauugaaa

SEQ ID NO: 1378373 - RNA, 19 nt, Homo sapiens
  misc_RNA (1)...(19): siRNA sense strand
caauaagcuugccaacaua

SEQ ID NO: 1378374 - RNA, 19 nt, Homo sapiens
  misc_RNA (1)...(19): siRNA sense strand
gaacagagggaaccacgaa

SEQ ID NO: 1378375 - RNA, 19 nt, Homo sapiens
  misc_RNA (1)...(19): siRNA sense strand
gaucugaccuggaaaucau

SEQ ID NO: 1378376 - RNA, 19 nt, Homo sapiens
  misc_RNA (1)...(19): siRNA sense strand
caggagaucugacacauca

SEQ ID NO: 1378377 - RNA, 19 nt, Homo sapiens
  misc_RNA (1)...(19): siRNA sense strand
ggagaucccucaguucgaa

SEQ ID NO: 1378378 - RNA, 19 nt, Homo sapiens
  misc_RNA (1)...(19): siRNA sense strand
gggcugaacuuaccaugga

SEQ ID NO: 1378379 - RNA, 19 nt, Homo sapiens
  misc_RNA (1)...(19): siRNA sense strand
auacagaucugaccuggaa

SEQ ID NO: 1378380 - RNA, 19 nt, Homo sapiens
  misc_RNA (1)...(19): siRNA sense strand
gaccacagacuugaauuua

SEQ ID NO: 1378381 - RNA, 19 nt, Homo sapiens
  misc_RNA (1)...(19): siRNA sense strand
gauggaagcauugacuuua

SEQ ID NO: 1378382 - RNA, 19 nt, Homo sapiens
  misc_RNA (1)...(19): siRNA sense strand
ccaaagagguaacaaucug

SEQ ID NO: 1378383 - RNA, 19 nt, Homo sapiens
  misc_RNA (1)...(19): siRNA sense strand
gaaagaauuccauagagau

SEQ ID NO: 1378384 - RNA, 19 nt, Homo sapiens
  misc_RNA (1)...(19): siRNA sense strand
ccauagagauccuaaugau

SEQ ID NO: 1378385 - RNA, 19 nt, Homo sapiens
  misc_RNA (1)...(19): siRNA sense strand
gagggaaccacgaagauuu

SEQ ID NO: 1378386 - RNA, 19 nt, Homo sapiens
  misc_RNA (1)...(19): siRNA sense strand
ccaagaaaguccugaagca

SEQ ID NO: 1378387 - RNA, 19 nt, Homo sapiens
  misc_RNA (1)...(19): siRNA sense strand
guucgaaucugguaaacau

SEQ ID NO: 1378388 - RNA, 19 nt, Homo sapiens
  misc_RNA (1)...(19): siRNA sense strand
cuaaugauccuguguguga

SEQ ID NO: 1378389 - RNA, 19 nt, Homo sapiens
  misc_RNA (1)...(19): siRNA sense strand
cagcaguucuucaacgaaa

SEQ ID NO: 1378390 - RNA, 19 nt, Homo sapiens
  misc_RNA (1)...(19): siRNA sense strand
uaauggacuugaacaaaga

SEQ ID NO: 1378391 - RNA, 19 nt, Homo sapiens
  misc_RNA (1)...(19): siRNA sense strand
guagaucgaggaaagaauu

SEQ ID NO: 1378392 - RNA, 19 nt, Homo sapiens
  misc_RNA (1)...(19): siRNA sense strand
ccauggagaucccucaguu

SEQ ID NO: 1378393 - RNA, 19 nt, Homo sapiens
  misc_RNA (1)...(19): siRNA sense strand
ucuuagaggugcuauuuga

SEQ ID NO: 1378394 - RNA, 19 nt, Homo sapiens
  misc_RNA (1)...(19): siRNA sense strand
aaacuucucccuccaaaga

SEQ ID NO: 1378395 - RNA, 19 nt, Homo sapiens
  misc_RNA (1)...(19): siRNA sense strand
agaaaguccugaagcaaau

SEQ ID NO: 1378396 - RNA, 19 nt, Homo sapiens
  misc_RNA (1)...(19): siRNA sense strand
gauaugaagacuugaugaa

SEQ ID NO: 1378397 - RNA, 19 nt, Homo sapiens
  misc_RNA (1)...(19): siRNA sense strand
guagagaggaacaagauga

SEQ ID NO: 1378398 - RNA, 19 nt, Homo sapiens
  misc_RNA (1)...(19): siRNA sense strand
acacacauauacauaagga

SEQ ID NO: 1378399 - RNA, 19 nt, Homo sapiens
  misc_RNA (1)...(19): siRNA sense strand
gaaaacagcgccaucaaga

SEQ ID NO: 1378400 - RNA, 19 nt, Homo sapiens
  misc_RNA (1)...(19): siRNA sense strand
ccacagacuugaauuuacu

SEQ ID NO: 1378401 - RNA, 19 nt, Homo sapiens
  misc_RNA (1)...(19): siRNA sense strand
gguauggcuucacgaaaga

SEQ ID NO: 1378402 - RNA, 19 nt, Homo sapiens
  misc_RNA (1)...(19): siRNA sense strand
ccacgaagauuuuaugaug

SEQ ID NO: 1378403 - RNA, 19 nt, Homo sapiens
  misc_RNA (1)...(19): siRNA sense strand
ucaugcccauuaugucuua

SEQ ID NO: 1378404 - RNA, 19 nt, Homo sapiens
  misc_RNA (1)...(19): siRNA sense strand
guaccgagguuacaaagcu

SEQ ID NO: 1378405 - RNA, 19 nt, Homo sapiens
  misc_RNA (1)...(19): siRNA sense strand
gaauuuacuccaccgugua

SEQ ID NO: 1378406 - RNA, 19 nt, Homo sapiens
  misc_RNA (1)...(19): siRNA sense strand
caacggaaacaaacagaga

SEQ ID NO: 1378407 - RNA, 19 nt, Homo sapiens
  misc_RNA (1)...(19): siRNA sense strand
gauacuucaugcccauuau

SEQ ID NO: 1378408 - RNA, 19 nt, Homo sapiens
  misc_RNA (1)...(19): siRNA sense strand
guacaagaggcucauucua

SEQ ID NO: 1378409 - RNA, 19 nt, Homo sapiens
  misc_RNA (1)...(19): siRNA sense strand
ccaucaagauauuaagaga

SEQ ID NO: 1378410 - RNA, 19 nt, Homo sapiens
  misc_RNA (1)...(19): siRNA sense strand
uacaaucguugacaaugaa

SEQ ID NO: 1378411 - RNA, 19 nt, Homo sapiens
  misc_RNA (1)...(19): siRNA sense strand
cauaauggacuugaacaaa

SEQ ID NO: 1378412 - RNA, 19 nt, Homo sapiens
  misc_RNA (1)...(19): siRNA sense strand
gaucuccguggaagaauuu

SEQ ID NO: 1378413 - RNA, 19 nt, Homo sapiens
  misc_RNA (1)...(19): siRNA sense strand
aaacaaacagagaccauga

SEQ ID NO: 1378414 - RNA, 19 nt, Homo sapiens
  misc_RNA (1)...(19): siRNA sense strand
gagaggaacaagaugaaau

SEQ ID NO: 1378415 - RNA, 19 nt, Homo sapiens
  misc_RNA (1)...(19): siRNA sense strand
ggaaaacuacacacauaua

SEQ ID NO: 1378416 - RNA, 19 nt, Homo sapiens
  misc_RNA (1)...(19): siRNA sense strand
uggaaacguugaauacaug

SEQ ID NO: 1378417 - RNA, 19 nt, Homo sapiens
  misc_RNA (1)...(19): siRNA sense strand
ucacucacauacaaacuuc

SEQ ID NO: 1378418 - RNA, 19 nt, Homo sapiens
  misc_RNA (1)...(19): siRNA sense strand
acaaacuucucccuccaaa

SEQ ID NO: 1378419 - RNA, 19 nt, Homo sapiens
  misc_RNA (1)...(19): siRNA sense strand
uaagagagagagugauuuc

SEQ ID NO: 1378420 - RNA, 19 nt, Homo sapiens
  misc_RNA (1)...(19): siRNA sense strand
acagagaccaugacacuga

SEQ ID NO: 1378421 - RNA, 19 nt, Homo sapiens
  misc_RNA (1)...(19): siRNA sense strand
uaucagagaccacagacuu

SEQ ID NO: 1378422 - RNA, 19 nt, Homo sapiens
  misc_RNA (1)...(19): siRNA sense strand
aaacagagaccaugacacu

SEQ ID NO: 1378423 - RNA, 19 nt, Homo sapiens
  misc_RNA (1)...(19): siRNA sense strand
auaauggacuugaacaaag

SEQ ID NO: 1378424 - RNA, 19 nt, Homo sapiens
  misc_RNA (1)...(19): siRNA sense strand
uaugaagacuugaugaaac

SEQ ID NO: 1378425 - RNA, 19 nt, Homo sapiens
  misc_RNA (1)...(19): siRNA sense strand
cuacacacauauacauaag

SEQ ID NO: 1378426 - RNA, 19 nt, Homo sapiens
  misc_RNA (1)...(19): siRNA sense strand
cauugacacugaucacuca

SEQ ID NO: 1378427 - RNA, 19 nt, Homo sapiens
  misc_RNA (1)...(19): siRNA sense strand
aagaaaguccugaagcaaa

SEQ ID NO: 1378428 - RNA, 19 nt, Homo sapiens
  misc_RNA (1)...(19): siRNA sense strand
ccaacauaauggacuugaa

SEQ ID NO: 1378429 - RNA, 19 nt, Homo sapiens
  misc_RNA (1)...(19): siRNA sense strand
gaugauucccaagucaaua

SEQ ID NO: 1378430 - RNA, 19 nt, Homo sapiens
  misc_RNA (1)...(19): siRNA sense strand
acaagaggcucauucuacu

SEQ ID NO: 1378431 - RNA, 19 nt, Homo sapiens
  misc_RNA (1)...(19): siRNA sense strand
gaacugguaccgagguuac

SEQ ID NO: 1378432 - RNA, 19 nt, Homo sapiens
  misc_RNA (1)...(19): siRNA sense strand
cgaaucugguaaacauaga

SEQ ID NO: 1378433 - RNA, 19 nt, Homo sapiens
  misc_RNA (1)...(19): siRNA sense strand
ggacuugaacaaagaugga

SEQ ID NO: 1378434 - RNA, 19 nt, Homo sapiens
  misc_RNA (1)...(19): siRNA sense strand
caagaaaguccugaagcaa

SEQ ID NO: 1378435 - RNA, 19 nt, Homo sapiens
  misc_RNA (1)...(19): siRNA sense strand
ggaugcagcaguucuucaa

SEQ ID NO: 1378436 - RNA, 19 nt, Homo sapiens
  misc_RNA (1)...(19): siRNA sense strand
ugaugaaucugagguaugg

SEQ ID NO: 1378437 - RNA, 19 nt, Homo sapiens
  misc_RNA (1)...(19): siRNA sense strand
caagauauuaagagagaga

SEQ ID NO: 1378438 - RNA, 19 nt, Homo sapiens
  misc_RNA (1)...(19): siRNA sense strand
uugaauacauguccagcuu

SEQ ID NO: 1378439 - RNA, 19 nt, Homo sapiens
  misc_RNA (1)...(19): siRNA sense strand
ggaaacaaacagagaccau

SEQ ID NO: 1378440 - RNA, 19 nt, Homo sapiens
  misc_RNA (1)...(19): siRNA sense strand
auggaagcauugacuuuaa

SEQ ID NO: 1378441 - RNA, 19 nt, Homo sapiens
  misc_RNA (1)...(19): siRNA sense strand
gaaggccagacaacacuau

SEQ ID NO: 1378442 - RNA, 19 nt, Homo sapiens
  misc_RNA (1)...(19): siRNA sense strand
gagcugcguugaucaucca

SEQ ID NO: 1378443 - RNA, 19 nt, Homo sapiens
  misc_RNA (1)...(19): siRNA sense strand
uuagaggugcuauuugaaa

SEQ ID NO: 1378444 - RNA, 19 nt, Homo sapiens
  misc_RNA (1)...(19): siRNA sense strand
caacauaauggacuugaac

SEQ ID NO: 1378445 - RNA, 19 nt, Homo sapiens
  misc_RNA (1)...(19): siRNA sense strand
cccaaucgguacaaucguu

SEQ ID NO: 1378446 - RNA, 19 nt, Homo sapiens
  misc_RNA (1)...(19): siRNA sense strand
ugucuuagaggugcuauuu

SEQ ID NO: 1378447 - RNA, 19 nt, Homo sapiens
  misc_RNA (1)...(19): siRNA sense strand
uggaagcauugacuuuaau

SEQ ID NO: 1378448 - RNA, 19 nt, Homo sapiens
  misc_RNA (1)...(19): siRNA sense strand
ggauaucagagaccacaga

SEQ ID NO: 1378449 - RNA, 19 nt, Homo sapiens
  misc_RNA (1)...(19): siRNA sense strand
acagcgccaucaagauauu

SEQ ID NO: 1378450 - RNA, 19 nt, Homo sapiens
  misc_RNA (1)...(19): siRNA sense strand
cgugccauguggaaacuuu

SEQ ID NO: 1378451 - RNA, 19 nt, Homo sapiens
  misc_RNA (1)...(19): siRNA sense strand
gagguauggcuucacgaaa

SEQ ID NO: 1378452 - RNA, 19 nt, Homo sapiens
  misc_RNA (1)...(19): siRNA sense strand
aaacauagaccaaaaugga

SEQ ID NO: 1378453 - RNA, 19 nt, Homo sapiens
  misc_RNA (1)...(19): siRNA sense strand
acugagagcugcguugauc

SEQ ID NO: 1378454 - RNA, 19 nt, Homo sapiens
  misc_RNA (1)...(19): siRNA sense strand
gaggcucauucuacucuag

SEQ ID NO: 1378455 - RNA, 19 nt, Homo sapiens
  misc_RNA (1)...(19): siRNA sense strand
caacuucaagaccacagaa

SEQ ID NO: 1378456 - RNA, 19 nt, Homo sapiens
  misc_RNA (1)...(19): siRNA sense strand
ugaccuuacucgugcuuuc

SEQ ID NO: 1378457 - RNA, 19 nt, Homo sapiens
  misc_RNA (1)...(19): siRNA sense strand
uaugaugaaucugagguau

SEQ ID NO: 1378458 - RNA, 19 nt, Homo sapiens
  misc_RNA (1)...(19): siRNA sense strand
uacaagaggcucauucuac

SEQ ID NO: 1378459 - RNA, 19 nt, Homo sapiens
  misc_RNA (1)...(19): siRNA sense strand
uaagcuugccaacauaaug

SEQ ID NO: 1378460 - RNA, 19 nt, Homo sapiens
  misc_RNA (1)...(19): siRNA sense strand
ugaucuccguggaagaauu

SEQ ID NO: 1378461 - RNA, 19 nt, Homo sapiens
  misc_RNA (1)...(19): siRNA sense strand
gaacaaagauggaagcauu

SEQ ID NO: 1378462 - RNA, 19 nt, Homo sapiens
  misc_RNA (1)...(19): siRNA sense strand
gaugaaaucugugcugaua

SEQ ID NO: 1378463 - RNA, 19 nt, Homo sapiens
  misc_RNA (1)...(19): siRNA sense strand
gaauuucacucacauacaa

SEQ ID NO: 1378464 - RNA, 19 nt, Homo sapiens
  misc_RNA (1)...(19): siRNA sense strand
ccaaugaccugcacuugaa

SEQ ID NO: 1378465 - RNA, 19 nt, Homo sapiens
  misc_RNA (1)...(19): siRNA sense strand
gagaggaacccguauguuu

SEQ ID NO: 1378466 - RNA, 19 nt, Homo sapiens
  misc_RNA (1)...(19): siRNA sense strand
guacaaucguugacaauga

SEQ ID NO: 1378467 - RNA, 19 nt, Homo sapiens
  misc_RNA (1)...(19): siRNA sense strand
ucaauaagcuugccaacau

SEQ ID NO: 1378468 - RNA, 19 nt, Homo sapiens
  misc_RNA (1)...(19): siRNA sense strand
aaacagcgccaucaagaua

SEQ ID NO: 1378469 - RNA, 19 nt, Homo sapiens
  misc_RNA (1)...(19): siRNA sense strand
cagaauauccgcauugaaa

SEQ ID NO: 1378470 - RNA, 19 nt, Homo sapiens
  misc_RNA (1)...(19): siRNA sense strand
caauaagcuugccaacaua

SEQ ID NO: 1378471 - RNA, 19 nt, Homo sapiens
  misc_RNA (1)...(19): siRNA sense strand
gaacagagggaaccacgaa

SEQ ID NO: 1378472 - RNA, 19 nt, Homo sapiens
  misc_RNA (1)...(19): siRNA sense strand
gaucugaccuggaaaucau

SEQ ID NO: 1378473 - RNA, 19 nt, Homo sapiens
  misc_RNA (1)...(19): siRNA sense strand
ggagaucccucaguucgaa

SEQ ID NO: 1378474 - RNA, 19 nt, Homo sapiens
  misc_RNA (1)...(19): siRNA sense strand
gggcugaacuuaccaugga

SEQ ID NO: 1378475 - RNA, 19 nt, Homo sapiens
  misc_RNA (1)...(19): siRNA sense strand
auacagaucugaccuggaa

SEQ ID NO: 1378476 - RNA, 19 nt, Homo sapiens
  misc_RNA (1)...(19): siRNA sense strand
gaccacagacuugaauuua

SEQ ID NO: 1378477 - RNA, 19 nt, Homo sapiens
  misc_RNA (1)...(19): siRNA sense strand
gauggaagcauugacuuua

SEQ ID NO: 1378478 - RNA, 19 nt, Homo sapiens
  misc_RNA (1)...(19): siRNA sense strand
ccaaagagguaacaaucug

SEQ ID NO: 1378479 - RNA, 19 nt, Homo sapiens
  misc_RNA (1)...(19): siRNA sense strand
gaaagaauuccauagagau

SEQ ID NO: 1378480 - RNA, 19 nt, Homo sapiens
  misc_RNA (1)...(19): siRNA sense strand
ccauagagauccuaaugau

SEQ ID NO: 1378481 - RNA, 19 nt, Homo sapiens
  misc_RNA (1)...(19): siRNA sense strand
gagggaaccacgaagauuu

SEQ ID NO: 1378482 - RNA, 19 nt, Homo sapiens
  misc_RNA (1)...(19): siRNA sense strand
cuaaugauccuguguguga

SEQ ID NO: 1378483 - RNA, 19 nt, Homo sapiens
  misc_RNA (1)...(19): siRNA sense strand
guucgaaucugguaaacau

SEQ ID NO: 1378484 - RNA, 19 nt, Homo sapiens
  misc_RNA (1)...(19): siRNA sense strand
uaauggacuugaacaaaga

SEQ ID NO: 1378485 - RNA, 19 nt, Homo sapiens
  misc_RNA (1)...(19): siRNA sense strand
guagaucgaggaaagaauu

SEQ ID NO: 1378486 - RNA, 19 nt, Homo sapiens
  misc_RNA (1)...(19): siRNA sense strand
ccauggagaucccucaguu

SEQ ID NO: 1378487 - RNA, 19 nt, Homo sapiens
  misc_RNA (1)...(19): siRNA sense strand
aaacuucucccuccaaaga

SEQ ID NO: 1378488 - RNA, 19 nt, Homo sapiens
  misc_RNA (1)...(19): siRNA sense strand
guagagaggaacaagauga

SEQ ID NO: 1378489 - RNA, 19 nt, Homo sapiens
  misc_RNA (1)...(19): siRNA sense strand
gauaugaagacuugaugaa

SEQ ID NO: 1378490 - RNA, 19 nt, Homo sapiens
  misc_RNA (1)...(19): siRNA sense strand
ccacgaagauuuuaugaug

SEQ ID NO: 1378491 - RNA, 19 nt, Homo sapiens
  misc_RNA (1)...(19): siRNA sense strand
gaaaacagcgccaucaaga

SEQ ID NO: 1378492 - RNA, 19 nt, Homo sapiens
  misc_RNA (1)...(19): siRNA sense strand
ccacagacuugaauuuacu

SEQ ID NO: 1378493 - RNA, 19 nt, Homo sapiens
  misc_RNA (1)...(19): siRNA sense strand
gguauggcuucacgaaaga

SEQ ID NO: 1378494 - RNA, 19 nt, Homo sapiens
  misc_RNA (1)...(19): siRNA sense strand
gaauuuacuccaccgugua

SEQ ID NO: 1378495 - RNA, 19 nt, Homo sapiens
  misc_RNA (1)...(19): siRNA sense strand
caacggaaacaaacagaga

SEQ ID NO: 1378496 - RNA, 19 nt, Homo sapiens
  misc_RNA (1)...(19): siRNA sense strand
ccaucaagauauuaagaga

SEQ ID NO: 1378497 - RNA, 19 nt, Homo sapiens
  misc_RNA (1)...(19): siRNA sense strand
guacaagaggcucauucua

SEQ ID NO: 1378498 - RNA, 19 nt, Homo sapiens
  misc_RNA (1)...(19): siRNA sense strand
uacaaucguugacaaugaa

SEQ ID NO: 1378499 - RNA, 19 nt, Homo sapiens
  misc_RNA (1)...(19): siRNA sense strand
cauaauggacuugaacaaa

SEQ ID NO: 1378500 - RNA, 19 nt, Homo sapiens
  misc_RNA (1)...(19): siRNA sense strand
gaucuccguggaagaauuu

SEQ ID NO: 1378501 - RNA, 19 nt, Homo sapiens
  misc_RNA (1)...(19): siRNA sense strand
aaacaaacagagaccauga

SEQ ID NO: 1378502 - RNA, 19 nt, Homo sapiens
  misc_RNA (1)...(19): siRNA sense strand
gagaggaacaagaugaaau

SEQ ID NO: 1378503 - RNA, 19 nt, Homo sapiens
  misc_RNA (1)...(19): siRNA sense strand
ucacucacauacaaacuuc

SEQ ID NO: 1378504 - RNA, 19 nt, Homo sapiens
  misc_RNA (1)...(19): siRNA sense strand
uggaaacguugaauacaug

SEQ ID NO: 1378505 - RNA, 19 nt, Homo sapiens
  misc_RNA (1)...(19): siRNA sense strand
acaaacuucucccuccaaa

SEQ ID NO: 1378506 - RNA, 19 nt, Homo sapiens
  misc_RNA (1)...(19): siRNA sense strand
uaagagagagagugauuuc

SEQ ID NO: 1378507 - RNA, 19 nt, Homo sapiens
  misc_RNA (1)...(19): siRNA sense strand
acagagaccaugacacuga

SEQ ID NO: 1378508 - RNA, 19 nt, Homo sapiens
  misc_RNA (1)...(19): siRNA sense strand
uaucagagaccacagacuu

SEQ ID NO: 1378509 - RNA, 19 nt, Homo sapiens
  misc_RNA (1)...(19): siRNA sense strand
aaacagagaccaugacacu

SEQ ID NO: 1378510 - RNA, 19 nt, Homo sapiens
  misc_RNA (1)...(19): siRNA sense strand
auaauggacuugaacaaag

SEQ ID NO: 1378511 - RNA, 19 nt, Homo sapiens
  misc_RNA (1)...(19): siRNA sense strand
uaugaagacuugaugaaac

SEQ ID NO: 1378512 - RNA, 19 nt, Homo sapiens
  misc_RNA (1)...(19): siRNA sense strand
cauugacacugaucacuca

SEQ ID NO: 1378513 - RNA, 19 nt, Homo sapiens
  misc_RNA (1)...(19): siRNA sense strand
acaagaggcucauucuacu

SEQ ID NO: 1378514 - RNA, 19 nt, Homo sapiens
  misc_RNA (1)...(19): siRNA sense strand
ccaacauaauggacuugaa

SEQ ID NO: 1378515 - RNA, 19 nt, Homo sapiens
  misc_RNA (1)...(19): siRNA sense strand
gaugauucccaagucaaua

SEQ ID NO: 1378516 - RNA, 19 nt, Homo sapiens
  misc_RNA (1)...(19): siRNA sense strand
cgaaucugguaaacauaga

SEQ ID NO: 1378517 - RNA, 19 nt, Homo sapiens
  misc_RNA (1)...(19): siRNA sense strand
ggacuugaacaaagaugga

SEQ ID NO: 1378518 - RNA, 19 nt, Homo sapiens
  misc_RNA (1)...(19): siRNA sense strand
ugaugaaucugagguaugg

SEQ ID NO: 1378519 - RNA, 19 nt, Homo sapiens
  misc_RNA (1)...(19): siRNA sense strand
caagauauuaagagagaga

SEQ ID NO: 1378520 - RNA, 19 nt, Homo sapiens
  misc_RNA (1)...(19): siRNA sense strand
uugaauacauguccagcuu

SEQ ID NO: 1378521 - RNA, 19 nt, Homo sapiens
  misc_RNA (1)...(19): siRNA sense strand
ggaaacaaacagagaccau

SEQ ID NO: 1378522 - RNA, 19 nt, Homo sapiens
  misc_RNA (1)...(19): siRNA sense strand
auggaagcauugacuuuaa

SEQ ID NO: 1378523 - RNA, 19 nt, Homo sapiens
  misc_RNA (1)...(19): siRNA sense strand
cccaaucgguacaaucguu

SEQ ID NO: 1378524 - RNA, 19 nt, Homo sapiens
  misc_RNA (1)...(19): siRNA sense strand
caacauaauggacuugaac

SEQ ID NO: 1378525 - RNA, 19 nt, Homo sapiens
  misc_RNA (1)...(19): siRNA sense strand
ggauaucagagaccacaga

SEQ ID NO: 1378526 - RNA, 19 nt, Homo sapiens
  misc_RNA (1)...(19): siRNA sense strand
uggaagcauugacuuuaau

SEQ ID NO: 1378527 - RNA, 19 nt, Homo sapiens
  misc_RNA (1)...(19): siRNA sense strand
acagcgccaucaagauauu

SEQ ID NO: 1378528 - RNA, 19 nt, Homo sapiens
  misc_RNA (1)...(19): siRNA sense strand
cgugccauguggaaacuuu

SEQ ID NO: 1378529 - RNA, 19 nt, Homo sapiens
  misc_RNA (1)...(19): siRNA sense strand
gagguauggcuucacgaaa

SEQ ID NO: 1378530 - RNA, 19 nt, Homo sapiens
  misc_RNA (1)...(19): siRNA sense strand
aaacauagaccaaaaugga

SEQ ID NO: 1378531 - RNA, 19 nt, Homo sapiens
  misc_RNA (1)...(19): siRNA sense strand
uaugaugaaucugagguau

SEQ ID NO: 1378532 - RNA, 19 nt, Homo sapiens
  misc_RNA (1)...(19): siRNA sense strand
gaggcucauucuacucuag

SEQ ID NO: 1378533 - RNA, 19 nt, Homo sapiens
  misc_RNA (1)...(19): siRNA sense strand
caacuucaagaccacagaa

SEQ ID NO: 1378534 - RNA, 19 nt, Homo sapiens
  misc_RNA (1)...(19): siRNA sense strand
ugaccuuacucgugcuuuc

SEQ ID NO: 1378535 - RNA, 19 nt, Homo sapiens
  misc_RNA (1)...(19): siRNA sense strand
agaccacagacuugaauuu

SEQ ID NO: 1378536 - RNA, 19 nt, Homo sapiens
  misc_RNA (1)...(19): siRNA sense strand
uaagcuugccaacauaaug

SEQ ID NO: 1378537 - RNA, 19 nt, Homo sapiens
  misc_RNA (1)...(19): siRNA sense strand
ugaucuccguggaagaauu

SEQ ID NO: 1378538 - RNA, 19 nt, Homo sapiens
  misc_RNA (1)...(19): siRNA sense strand
uacaagaggcucauucuac

SEQ ID NO: 1378539 - RNA, 19 nt, Homo sapiens
  misc_RNA (1)...(19): siRNA sense strand
ucagagaccacagacuuga

SEQ ID NO: 1378540 - RNA, 19 nt, Homo sapiens
  misc_RNA (1)...(19): siRNA sense strand
ucauucuacucuaguugaa

SEQ ID NO: 1378541 - RNA, 19 nt, Homo sapiens
  misc_RNA (1)...(19): siRNA sense strand
aaauggaaacguugaauac

SEQ ID NO: 1378542 - RNA, 19 nt, Homo sapiens
  misc_RNA (1)...(19): siRNA sense strand
ccacagaaaaucaggaaaa

SEQ ID NO: 1378543 - RNA, 19 nt, Homo sapiens
  misc_RNA (1)...(19): siRNA sense strand
caaagagguaacaaucugu

SEQ ID NO: 1378544 - RNA, 19 nt, Homo sapiens
  misc_RNA (1)...(19): siRNA sense strand
ucaguucgaaucugguaaa

SEQ ID NO: 1378545 - RNA, 19 nt, Homo sapiens
  misc_RNA (1)...(19): siRNA sense strand
aauaagcuugccaacauaa

SEQ ID NO: 1378546 - RNA, 19 nt, Homo sapiens
  misc_RNA (1)...(19): siRNA sense strand
ugaaaucugugcugauacc

SEQ ID NO: 1378547 - RNA, 19 nt, Homo sapiens
  misc_RNA (1)...(19): siRNA sense strand
cagagaggaacccguaugu

SEQ ID NO: 1378548 - RNA, 19 nt, Homo sapiens
  misc_RNA (1)...(19): siRNA sense strand
uccagaauauccgcauuga

SEQ ID NO: 1378549 - RNA, 19 nt, Homo sapiens
  misc_RNA (1)...(19): siRNA sense strand
gguacaaucguugacaaug

SEQ ID NO: 1378550 - RNA, 19 nt, Homo sapiens
  misc_RNA (1)...(19): siRNA sense strand
auguccagcuuccagaaua

SEQ ID NO: 1378551 - RNA, 19 nt, Homo sapiens
  misc_RNA (1)...(19): siRNA sense strand
ggaaacguugaauacaugu

SEQ ID NO: 1378552 - RNA, 19 nt, Homo sapiens
  misc_RNA (1)...(19): siRNA sense strand
cccaaugaccugcacuuga

SEQ ID NO: 1378553 - RNA, 19 nt, Homo sapiens
  misc_RNA (1)...(19): siRNA sense strand
uagagaggaacaagaugaa

SEQ ID NO: 1378554 - RNA, 19 nt, Homo sapiens
  misc_RNA (1)...(19): siRNA sense strand
gggaaacuggaugaucuuu

SEQ ID NO: 1378555 - RNA, 19 nt, Homo sapiens
  misc_RNA (1)...(19): siRNA sense strand
ugagguauggcuucacgaa

SEQ ID NO: 1378556 - RNA, 19 nt, Homo sapiens
  misc_RNA (1)...(19): siRNA sense strand
agauggaagcauugacuuu

SEQ ID NO: 1378557 - RNA, 19 nt, Homo sapiens
  misc_RNA (1)...(19): siRNA sense strand
gaagaauuucgugccaugu

SEQ ID NO: 1378558 - RNA, 19 nt, Homo sapiens
  misc_RNA (1)...(19): siRNA sense strand
cagaaaaucaggaaaacuu

SEQ ID NO: 1378559 - RNA, 19 nt, Homo sapiens
  misc_RNA (1)...(19): siRNA sense strand
gaaccacgaagauuuuaug

SEQ ID NO: 1378560 - RNA, 19 nt, Homo sapiens
  misc_RNA (1)...(19): siRNA sense strand
agguauggcuucacgaaag

SEQ ID NO: 1378561 - RNA, 19 nt, Homo sapiens
  misc_RNA (1)...(19): siRNA sense strand
gaacaaagauggaagcauu

SEQ ID NO: 1378562 - RNA, 19 nt, Homo sapiens
  misc_RNA (1)...(19): siRNA sense strand
gaugaaaucugugcugaua

SEQ ID NO: 1378563 - RNA, 19 nt, Homo sapiens
  misc_RNA (1)...(19): siRNA sense strand
gaauuucacucacauacaa

SEQ ID NO: 1378564 - RNA, 19 nt, Homo sapiens
  misc_RNA (1)...(19): siRNA sense strand
ccaaugaccugcacuugaa

SEQ ID NO: 1378565 - RNA, 19 nt, Homo sapiens
  misc_RNA (1)...(19): siRNA sense strand
gagaggaacccguauguuu

SEQ ID NO: 1378566 - RNA, 19 nt, Homo sapiens
  misc_RNA (1)...(19): siRNA sense strand
guacaaucguugacaauga

SEQ ID NO: 1378567 - RNA, 19 nt, Homo sapiens
  misc_RNA (1)...(19): siRNA sense strand
ucaauaagcuugccaacau

SEQ ID NO: 1378568 - RNA, 19 nt, Homo sapiens
  misc_RNA (1)...(19): siRNA sense strand
gcaguuauccaccuucuuu

SEQ ID NO: 1378569 - RNA, 19 nt, Homo sapiens
  misc_RNA (1)...(19): siRNA sense strand
cgaauaugcugaugaacaa

SEQ ID NO: 1378570 - RNA, 19 nt, Homo sapiens
  misc_RNA (1)...(19): siRNA sense strand
aaacagcgccaucaagaua

SEQ ID NO: 1378571 - RNA, 19 nt, Homo sapiens
  misc_RNA (1)...(19): siRNA sense strand
uuacaaagcucgacugaag

SEQ ID NO: 1378572 - RNA, 19 nt, Homo sapiens
  misc_RNA (1)...(19): siRNA sense strand
cagaauauccgcauugaaa

SEQ ID NO: 1378573 - RNA, 19 nt, Homo sapiens
  misc_RNA (1)...(19): siRNA sense strand
caauaagcuugccaacaua

SEQ ID NO: 1378574 - RNA, 19 nt, Homo sapiens
  misc_RNA (1)...(19): siRNA sense strand
gaacagagggaaccacgaa

SEQ ID NO: 1378575 - RNA, 19 nt, Homo sapiens
  misc_RNA (1)...(19): siRNA sense strand
gaucugaccuggaaaucau

SEQ ID NO: 1378576 - RNA, 19 nt, Homo sapiens
  misc_RNA (1)...(19): siRNA sense strand
caggagaucugacacauca

SEQ ID NO: 1378577 - RNA, 19 nt, Homo sapiens
  misc_RNA (1)...(19): siRNA sense strand
ggagaucccucaguucgaa

SEQ ID NO: 1378578 - RNA, 19 nt, Homo sapiens
  misc_RNA (1)...(19): siRNA sense strand
gggcugaacuuaccaugga

SEQ ID NO: 1378579 - RNA, 19 nt, Homo sapiens
  misc_RNA (1)...(19): siRNA sense strand
auacagaucugaccuggaa

SEQ ID NO: 1378580 - RNA, 19 nt, Homo sapiens
  misc_RNA (1)...(19): siRNA sense strand
gaccacagacuugaauuua

SEQ ID NO: 1378581 - RNA, 19 nt, Homo sapiens
  misc_RNA (1)...(19): siRNA sense strand
gauggaagcauugacuuua

SEQ ID NO: 1378582 - RNA, 19 nt, Homo sapiens
  misc_RNA (1)...(19): siRNA sense strand
ccaaagagguaacaaucug

SEQ ID NO: 1378583 - RNA, 19 nt, Homo sapiens
  misc_RNA (1)...(19): siRNA sense strand
gaaagaauuccauagagau

SEQ ID NO: 1378584 - RNA, 19 nt, Homo sapiens
  misc_RNA (1)...(19): siRNA sense strand
ccauagagauccuaaugau

SEQ ID NO: 1378585 - RNA, 19 nt, Homo sapiens
  misc_RNA (1)...(19): siRNA sense strand
gagggaaccacgaagauuu

SEQ ID NO: 1378586 - RNA, 19 nt, Homo sapiens
  misc_RNA (1)...(19): siRNA sense strand
ccaagaaaguccugaagca

SEQ ID NO: 1378587 - RNA, 19 nt, Homo sapiens
  misc_RNA (1)...(19): siRNA sense strand
guucgaaucugguaaacau

SEQ ID NO: 1378588 - RNA, 19 nt, Homo sapiens
  misc_RNA (1)...(19): siRNA sense strand
cuaaugauccuguguguga

SEQ ID NO: 1378589 - RNA, 19 nt, Homo sapiens
  misc_RNA (1)...(19): siRNA sense strand
cagcaguucuucaacgaaa

SEQ ID NO: 1378590 - RNA, 19 nt, Homo sapiens
  misc_RNA (1)...(19): siRNA sense strand
uaauggacuugaacaaaga

SEQ ID NO: 1378591 - RNA, 19 nt, Homo sapiens
  misc_RNA (1)...(19): siRNA sense strand
guagaucgaggaaagaauu

SEQ ID NO: 1378592 - RNA, 19 nt, Homo sapiens
  misc_RNA (1)...(19): siRNA sense strand
ccauggagaucccucaguu

SEQ ID NO: 1378593 - RNA, 19 nt, Homo sapiens
  misc_RNA (1)...(19): siRNA sense strand
ucuuagaggugcuauuuga

SEQ ID NO: 1378594 - RNA, 19 nt, Homo sapiens
  misc_RNA (1)...(19): siRNA sense strand
aaacuucucccuccaaaga

SEQ ID NO: 1378595 - RNA, 19 nt, Homo sapiens
  misc_RNA (1)...(19): siRNA sense strand
agaaaguccugaagcaaau

SEQ ID NO: 1378596 - RNA, 19 nt, Homo sapiens
  misc_RNA (1)...(19): siRNA sense strand
gauaugaagacuugaugaa

SEQ ID NO: 1378597 - RNA, 19 nt, Homo sapiens
  misc_RNA (1)...(19): siRNA sense strand
guagagaggaacaagauga

SEQ ID NO: 1378598 - RNA, 19 nt, Homo sapiens
  misc_RNA (1)...(19): siRNA sense strand
acacacauauacauaagga

SEQ ID NO: 1378599 - RNA, 19 nt, Homo sapiens
  misc_RNA (1)...(19): siRNA sense strand
gaaaacagcgccaucaaga

SEQ ID NO: 1378600 - RNA, 19 nt, Homo sapiens
  misc_RNA (1)...(19): siRNA sense strand
ccacagacuugaauuuacu

SEQ ID NO: 1378601 - RNA, 19 nt, Homo sapiens
  misc_RNA (1)...(19): siRNA sense strand
gguauggcuucacgaaaga

SEQ ID NO: 1378602 - RNA, 19 nt, Homo sapiens
  misc_RNA (1)...(19): siRNA sense strand
ccacgaagauuuuaugaug

SEQ ID NO: 1378603 - RNA, 19 nt, Homo sapiens
  misc_RNA (1)...(19): siRNA sense strand
ucaugcccauuaugucuua

SEQ ID NO: 1378604 - RNA, 19 nt, Homo sapiens
  misc_RNA (1)...(19): siRNA sense strand
guaccgagguuacaaagcu

SEQ ID NO: 1378605 - RNA, 19 nt, Homo sapiens
  misc_RNA (1)...(19): siRNA sense strand
gaauuuacuccaccgugua

SEQ ID NO: 1378606 - RNA, 19 nt, Homo sapiens
  misc_RNA (1)...(19): siRNA sense strand
caacggaaacaaacagaga

SEQ ID NO: 1378607 - RNA, 19 nt, Homo sapiens
  misc_RNA (1)...(19): siRNA sense strand
gauacuucaugcccauuau

SEQ ID NO: 1378608 - RNA, 19 nt, Homo sapiens
  misc_RNA (1)...(19): siRNA sense strand
guacaagaggcucauucua

SEQ ID NO: 1378609 - RNA, 19 nt, Homo sapiens
  misc_RNA (1)...(19): siRNA sense strand
ccaucaagauauuaagaga

SEQ ID NO: 1378610 - RNA, 19 nt, Homo sapiens
  misc_RNA (1)...(19): siRNA sense strand
uacaaucguugacaaugaa

SEQ ID NO: 1378611 - RNA, 19 nt, Homo sapiens
  misc_RNA (1)...(19): siRNA sense strand
cauaauggacuugaacaaa

SEQ ID NO: 1378612 - RNA, 19 nt, Homo sapiens
  misc_RNA (1)...(19): siRNA sense strand
gaucuccguggaagaauuu

SEQ ID NO: 1378613 - RNA, 19 nt, Homo sapiens
  misc_RNA (1)...(19): siRNA sense strand
aaacaaacagagaccauga

SEQ ID NO: 1378614 - RNA, 19 nt, Homo sapiens
  misc_RNA (1)...(19): siRNA sense strand
gagaggaacaagaugaaau

SEQ ID NO: 1378615 - RNA, 19 nt, Homo sapiens
  misc_RNA (1)...(19): siRNA sense strand
ggaaaacuacacacauaua

SEQ ID NO: 1378616 - RNA, 19 nt, Homo sapiens
  misc_RNA (1)...(19): siRNA sense strand
uggaaacguugaauacaug

SEQ ID NO: 1378617 - RNA, 19 nt, Homo sapiens
  misc_RNA (1)...(19): siRNA sense strand
ucacucacauacaaacuuc

SEQ ID NO: 1378618 - RNA, 19 nt, Homo sapiens
  misc_RNA (1)...(19): siRNA sense strand
acaaacuucucccuccaaa

SEQ ID NO: 1378619 - RNA, 19 nt, Homo sapiens
  misc_RNA (1)...(19): siRNA sense strand
uaagagagagagugauuuc

SEQ ID NO: 1378620 - RNA, 19 nt, Homo sapiens
  misc_RNA (1)...(19): siRNA sense strand
acagagaccaugacacuga

SEQ ID NO: 1378621 - RNA, 19 nt, Homo sapiens
  misc_RNA (1)...(19): siRNA sense strand
uaucagagaccacagacuu

SEQ ID NO: 1378622 - RNA, 19 nt, Homo sapiens
  misc_RNA (1)...(19): siRNA sense strand
aaacagagaccaugacacu

SEQ ID NO: 1378623 - RNA, 19 nt, Homo sapiens
  misc_RNA (1)...(19): siRNA sense strand
auaauggacuugaacaaag

SEQ ID NO: 1378624 - RNA, 19 nt, Homo sapiens
  misc_RNA (1)...(19): siRNA sense strand
uaugaagacuugaugaaac

SEQ ID NO: 1378625 - RNA, 19 nt, Homo sapiens
  misc_RNA (1)...(19): siRNA sense strand
cuacacacauauacauaag

SEQ ID NO: 1378626 - RNA, 19 nt, Homo sapiens
  misc_RNA (1)...(19): siRNA sense strand
cauugacacugaucacuca

SEQ ID NO: 1378627 - RNA, 19 nt, Homo sapiens
  misc_RNA (1)...(19): siRNA sense strand
aagaaaguccugaagcaaa

SEQ ID NO: 1378628 - RNA, 19 nt, Homo sapiens
  misc_RNA (1)...(19): siRNA sense strand
ccaacauaauggacuugaa

SEQ ID NO: 1378629 - RNA, 19 nt, Homo sapiens
  misc_RNA (1)...(19): siRNA sense strand
gaugauucccaagucaaua

SEQ ID NO: 1378630 - RNA, 19 nt, Homo sapiens
  misc_RNA (1)...(19): siRNA sense strand
acaagaggcucauucuacu

SEQ ID NO: 1378631 - RNA, 19 nt, Homo sapiens
  misc_RNA (1)...(19): siRNA sense strand
gaacugguaccgagguuac

SEQ ID NO: 1378632 - RNA, 19 nt, Homo sapiens
  misc_RNA (1)...(19): siRNA sense strand
cgaaucugguaaacauaga

SEQ ID NO: 1378633 - RNA, 19 nt, Homo sapiens
  misc_RNA (1)...(19): siRNA sense strand
ggacuugaacaaagaugga

SEQ ID NO: 1378634 - RNA, 19 nt, Homo sapiens
  misc_RNA (1)...(19): siRNA sense strand
caagaaaguccugaagcaa

SEQ ID NO: 1378635 - RNA, 19 nt, Homo sapiens
  misc_RNA (1)...(19): siRNA sense strand
ggaugcagcaguucuucaa

SEQ ID NO: 1378636 - RNA, 19 nt, Homo sapiens
  misc_RNA (1)...(19): siRNA sense strand
ugaugaaucugagguaugg

SEQ ID NO: 1378637 - RNA, 19 nt, Homo sapiens
  misc_RNA (1)...(19): siRNA sense strand
caagauauuaagagagaga

SEQ ID NO: 1378638 - RNA, 19 nt, Homo sapiens
  misc_RNA (1)...(19): siRNA sense strand
uugaauacauguccagcuu

SEQ ID NO: 1378639 - RNA, 19 nt, Homo sapiens
  misc_RNA (1)...(19): siRNA sense strand
ggaaacaaacagagaccau

SEQ ID NO: 1378640 - RNA, 19 nt, Homo sapiens
  misc_RNA (1)...(19): siRNA sense strand
auggaagcauugacuuuaa

SEQ ID NO: 1378641 - RNA, 19 nt, Homo sapiens
  misc_RNA (1)...(19): siRNA sense strand
gaaggccagacaacacuau

SEQ ID NO: 1378642 - RNA, 19 nt, Homo sapiens
  misc_RNA (1)...(19): siRNA sense strand
gagcugcguugaucaucca

SEQ ID NO: 1378643 - RNA, 19 nt, Homo sapiens
  misc_RNA (1)...(19): siRNA sense strand
uuagaggugcuauuugaaa

SEQ ID NO: 1378644 - RNA, 19 nt, Homo sapiens
  misc_RNA (1)...(19): siRNA sense strand
caacauaauggacuugaac

SEQ ID NO: 1378645 - RNA, 19 nt, Homo sapiens
  misc_RNA (1)...(19): siRNA sense strand
cccaaucgguacaaucguu

SEQ ID NO: 1378646 - RNA, 19 nt, Homo sapiens
  misc_RNA (1)...(19): siRNA sense strand
ugucuuagaggugcuauuu

SEQ ID NO: 1378647 - RNA, 19 nt, Homo sapiens
  misc_RNA (1)...(19): siRNA sense strand
uggaagcauugacuuuaau

SEQ ID NO: 1378648 - RNA, 19 nt, Homo sapiens
  misc_RNA (1)...(19): siRNA sense strand
ggauaucagagaccacaga

SEQ ID NO: 1378649 - RNA, 19 nt, Homo sapiens
  misc_RNA (1)...(19): siRNA sense strand
acagcgccaucaagauauu

SEQ ID NO: 1378650 - RNA, 19 nt, Homo sapiens
  misc_RNA (1)...(19): siRNA sense strand
cgugccauguggaaacuuu

SEQ ID NO: 1378651 - RNA, 19 nt, Homo sapiens
  misc_RNA (1)...(19): siRNA sense strand
gagguauggcuucacgaaa

SEQ ID NO: 1378652 - RNA, 19 nt, Homo sapiens
  misc_RNA (1)...(19): siRNA sense strand
aaacauagaccaaaaugga

SEQ ID NO: 1378653 - RNA, 19 nt, Homo sapiens
  misc_RNA (1)...(19): siRNA sense strand
acugagagcugcguugauc

SEQ ID NO: 1378654 - RNA, 19 nt, Homo sapiens
  misc_RNA (1)...(19): siRNA sense strand
gaggcucauucuacucuag

SEQ ID NO: 1378655 - RNA, 19 nt, Homo sapiens
  misc_RNA (1)...(19): siRNA sense strand
caacuucaagaccacagaa

SEQ ID NO: 1378656 - RNA, 19 nt, Homo sapiens
  misc_RNA (1)...(19): siRNA sense strand
ugaccuuacucgugcuuuc

SEQ ID NO: 1378657 - RNA, 19 nt, Homo sapiens
  misc_RNA (1)...(19): siRNA sense strand
uaugaugaaucugagguau

SEQ ID NO: 1378658 - RNA, 19 nt, Homo sapiens
  misc_RNA (1)...(19): siRNA sense strand
uacaagaggcucauucuac

SEQ ID NO: 1378659 - RNA, 19 nt, Homo sapiens
  misc_RNA (1)...(19): siRNA sense strand
uaagcuugccaacauaaug

SEQ ID NO: 1378660 - RNA, 19 nt, Homo sapiens
  misc_RNA (1)...(19): siRNA sense strand
ugaucuccguggaagaauu

SEQ ID NO: 1378661 - RNA, 19 nt, Homo sapiens
  misc_RNA (1)...(19): siRNA sense strand
gaugaaaucugugcugaua

SEQ ID NO: 1378662 - RNA, 19 nt, Homo sapiens
  misc_RNA (1)...(19): siRNA sense strand
gaauuucacucacauacaa

SEQ ID NO: 1378663 - RNA, 19 nt, Homo sapiens
  misc_RNA (1)...(19): siRNA sense strand
ccaaugaccugcacuugaa

SEQ ID NO: 1378664 - RNA, 19 nt, Homo sapiens
  misc_RNA (1)...(19): siRNA sense strand
gagaggaacccguauguuu

SEQ ID NO: 1378665 - RNA, 19 nt, Homo sapiens
  misc_RNA (1)...(19): siRNA sense strand
guacaaucguugacaauga

SEQ ID NO: 1378666 - RNA, 19 nt, Homo sapiens
  misc_RNA (1)...(19): siRNA sense strand
gcaguuauccaccuucuuu

SEQ ID NO: 1378667 - RNA, 19 nt, Homo sapiens
  misc_RNA (1)...(19): siRNA sense strand
cgaauaugcugaugaacaa

SEQ ID NO: 1378668 - RNA, 19 nt, Homo sapiens
  misc_RNA (1)...(19): siRNA sense strand
aaacagcgccaucaagaua

SEQ ID NO: 1378669 - RNA, 19 nt, Homo sapiens
  misc_RNA (1)...(19): siRNA sense strand
uuacaaagcucgacugaag

SEQ ID NO: 1378670 - RNA, 19 nt, Homo sapiens
  misc_RNA (1)...(19): siRNA sense strand
gaacagagggaaccacgaa

SEQ ID NO: 1378671 - RNA, 19 nt, Homo sapiens
  misc_RNA (1)...(19): siRNA sense strand
caggagaucugacacauca

SEQ ID NO: 1378672 - RNA, 19 nt, Homo sapiens
  misc_RNA (1)...(19): siRNA sense strand
gaccacagacuugaauuua

SEQ ID NO: 1378673 - RNA, 19 nt, Homo sapiens
  misc_RNA (1)...(19): siRNA sense strand
ccaaagagguaacaaucug

SEQ ID NO: 1378674 - RNA, 19 nt, Homo sapiens
  misc_RNA (1)...(19): siRNA sense strand
gaaagaauuccauagagau

SEQ ID NO: 1378675 - RNA, 19 nt, Homo sapiens
  misc_RNA (1)...(19): siRNA sense strand
ccauagagauccuaaugau

SEQ ID NO: 1378676 - RNA, 19 nt, Homo sapiens
  misc_RNA (1)...(19): siRNA sense strand
gagggaaccacgaagauuu

SEQ ID NO: 1378677 - RNA, 19 nt, Homo sapiens
  misc_RNA (1)...(19): siRNA sense strand
ccaagaaaguccugaagca

SEQ ID NO: 1378678 - RNA, 19 nt, Homo sapiens
  misc_RNA (1)...(19): siRNA sense strand
cuaaugauccuguguguga

SEQ ID NO: 1378679 - RNA, 19 nt, Homo sapiens
  misc_RNA (1)...(19): siRNA sense strand
cagcaguucuucaacgaaa

SEQ ID NO: 1378680 - RNA, 19 nt, Homo sapiens
  misc_RNA (1)...(19): siRNA sense strand
guagaucgaggaaagaauu

SEQ ID NO: 1378681 - RNA, 19 nt, Homo sapiens
  misc_RNA (1)...(19): siRNA sense strand
ucuuagaggugcuauuuga

SEQ ID NO: 1378682 - RNA, 19 nt, Homo sapiens
  misc_RNA (1)...(19): siRNA sense strand
aaacuucucccuccaaaga

SEQ ID NO: 1378683 - RNA, 19 nt, Homo sapiens
  misc_RNA (1)...(19): siRNA sense strand
agaaaguccugaagcaaau

SEQ ID NO: 1378684 - RNA, 19 nt, Homo sapiens
  misc_RNA (1)...(19): siRNA sense strand
guagagaggaacaagauga

SEQ ID NO: 1378685 - RNA, 19 nt, Homo sapiens
  misc_RNA (1)...(19): siRNA sense strand
acacacauauacauaagga

SEQ ID NO: 1378686 - RNA, 19 nt, Homo sapiens
  misc_RNA (1)...(19): siRNA sense strand
gaaaacagcgccaucaaga

SEQ ID NO: 1378687 - RNA, 19 nt, Homo sapiens
  misc_RNA (1)...(19): siRNA sense strand
ccacagacuugaauuuacu

SEQ ID NO: 1378688 - RNA, 19 nt, Homo sapiens
  misc_RNA (1)...(19): siRNA sense strand
gguauggcuucacgaaaga

SEQ ID NO: 1378689 - RNA, 19 nt, Homo sapiens
  misc_RNA (1)...(19): siRNA sense strand
ccacgaagauuuuaugaug

SEQ ID NO: 1378690 - RNA, 19 nt, Homo sapiens
  misc_RNA (1)...(19): siRNA sense strand
ucaugcccauuaugucuua

SEQ ID NO: 1378691 - RNA, 19 nt, Homo sapiens
  misc_RNA (1)...(19): siRNA sense strand
guaccgagguuacaaagcu

SEQ ID NO: 1378692 - RNA, 19 nt, Homo sapiens
  misc_RNA (1)...(19): siRNA sense strand
gaauuuacuccaccgugua

SEQ ID NO: 1378693 - RNA, 19 nt, Homo sapiens
  misc_RNA (1)...(19): siRNA sense strand
caacggaaacaaacagaga

SEQ ID NO: 1378694 - RNA, 19 nt, Homo sapiens
  misc_RNA (1)...(19): siRNA sense strand
gauacuucaugcccauuau

SEQ ID NO: 1378695 - RNA, 19 nt, Homo sapiens
  misc_RNA (1)...(19): siRNA sense strand
ccaucaagauauuaagaga

SEQ ID NO: 1378696 - RNA, 19 nt, Homo sapiens
  misc_RNA (1)...(19): siRNA sense strand
uacaaucguugacaaugaa

SEQ ID NO: 1378697 - RNA, 19 nt, Homo sapiens
  misc_RNA (1)...(19): siRNA sense strand
aaacaaacagagaccauga

SEQ ID NO: 1378698 - RNA, 19 nt, Homo sapiens
  misc_RNA (1)...(19): siRNA sense strand
gagaggaacaagaugaaau

SEQ ID NO: 1378699 - RNA, 19 nt, Homo sapiens
  misc_RNA (1)...(19): siRNA sense strand
ggaaaacuacacacauaua

SEQ ID NO: 1378700 - RNA, 19 nt, Homo sapiens
  misc_RNA (1)...(19): siRNA sense strand
ucacucacauacaaacuuc

SEQ ID NO: 1378701 - RNA, 19 nt, Homo sapiens
  misc_RNA (1)...(19): siRNA sense strand
acaaacuucucccuccaaa

SEQ ID NO: 1378702 - RNA, 19 nt, Homo sapiens
  misc_RNA (1)...(19): siRNA sense strand
uaagagagagagugauuuc

SEQ ID NO: 1378703 - RNA, 19 nt, Homo sapiens
  misc_RNA (1)...(19): siRNA sense strand
acagagaccaugacacuga

SEQ ID NO: 1378704 - RNA, 19 nt, Homo sapiens
  misc_RNA (1)...(19): siRNA sense strand
uaucagagaccacagacuu

SEQ ID NO: 1378705 - RNA, 19 nt, Homo sapiens
  misc_RNA (1)...(19): siRNA sense strand
aaacagagaccaugacacu

SEQ ID NO: 1378706 - RNA, 19 nt, Homo sapiens
  misc_RNA (1)...(19): siRNA sense strand
cuacacacauauacauaag

SEQ ID NO: 1378707 - RNA, 19 nt, Homo sapiens
  misc_RNA (1)...(19): siRNA sense strand
aagaaaguccugaagcaaa

SEQ ID NO: 1378708 - RNA, 19 nt, Homo sapiens
  misc_RNA (1)...(19): siRNA sense strand
gaacugguaccgagguuac

SEQ ID NO: 1378709 - RNA, 19 nt, Homo sapiens
  misc_RNA (1)...(19): siRNA sense strand
caagaaaguccugaagcaa

SEQ ID NO: 1378710 - RNA, 19 nt, Homo sapiens
  misc_RNA (1)...(19): siRNA sense strand
ugaugaaucugagguaugg

SEQ ID NO: 1378711 - RNA, 19 nt, Homo sapiens
  misc_RNA (1)...(19): siRNA sense strand
ggaugcagcaguucuucaa

SEQ ID NO: 1378712 - RNA, 19 nt, Homo sapiens
  misc_RNA (1)...(19): siRNA sense strand
caagauauuaagagagaga

SEQ ID NO: 1378713 - RNA, 19 nt, Homo sapiens
  misc_RNA (1)...(19): siRNA sense strand
gaaggccagacaacacuau

SEQ ID NO: 1378714 - RNA, 19 nt, Homo sapiens
  misc_RNA (1)...(19): siRNA sense strand
ggaaacaaacagagaccau

SEQ ID NO: 1378715 - RNA, 19 nt, Homo sapiens
  misc_RNA (1)...(19): siRNA sense strand
gagcugcguugaucaucca

SEQ ID NO: 1378716 - RNA, 19 nt, Homo sapiens
  misc_RNA (1)...(19): siRNA sense strand
uuagaggugcuauuugaaa

SEQ ID NO: 1378717 - RNA, 19 nt, Homo sapiens
  misc_RNA (1)...(19): siRNA sense strand
cccaaucgguacaaucguu

SEQ ID NO: 1378718 - RNA, 19 nt, Homo sapiens
  misc_RNA (1)...(19): siRNA sense strand
ugucuuagaggugcuauuu

SEQ ID NO: 1378719 - RNA, 19 nt, Homo sapiens
  misc_RNA (1)...(19): siRNA sense strand
ggauaucagagaccacaga

SEQ ID NO: 1378720 - RNA, 19 nt, Homo sapiens
  misc_RNA (1)...(19): siRNA sense strand
acagcgccaucaagauauu

SEQ ID NO: 1378721 - RNA, 19 nt, Homo sapiens
  misc_RNA (1)...(19): siRNA sense strand
gagguauggcuucacgaaa

SEQ ID NO: 1378722 - RNA, 19 nt, Homo sapiens
  misc_RNA (1)...(19): siRNA sense strand
uaugaugaaucugagguau

SEQ ID NO: 1378723 - RNA, 19 nt, Homo sapiens
  misc_RNA (1)...(19): siRNA sense strand
acugagagcugcguugauc

SEQ ID NO: 1378724 - RNA, 19 nt, Homo sapiens
  misc_RNA (1)...(19): siRNA sense strand
agaccacagacuugaauuu

SEQ ID NO: 1378725 - RNA, 19 nt, Homo sapiens
  misc_RNA (1)...(19): siRNA sense strand
caaagagguaacaaucugu

SEQ ID NO: 1378726 - RNA, 19 nt, Homo sapiens
  misc_RNA (1)...(19): siRNA sense strand
ucagagaccacagacuuga

SEQ ID NO: 1378727 - RNA, 19 nt, Homo sapiens
  misc_RNA (1)...(19): siRNA sense strand
ucgaauaugcugaugaaca

SEQ ID NO: 1378728 - RNA, 19 nt, Homo sapiens
  misc_RNA (1)...(19): siRNA sense strand
acuaugcccucaccaucuu

SEQ ID NO: 1378729 - RNA, 19 nt, Homo sapiens
  misc_RNA (1)...(19): siRNA sense strand
cagaacugguaccgagguu

SEQ ID NO: 1378730 - RNA, 19 nt, Homo sapiens
  misc_RNA (1)...(19): siRNA sense strand
gaaaguccugaagcaaaug

SEQ ID NO: 1378731 - RNA, 19 nt, Homo sapiens
  misc_RNA (1)...(19): siRNA sense strand
gcuauuugaaaccaagaaa

SEQ ID NO: 1378732 - RNA, 19 nt, Homo sapiens
  misc_RNA (1)...(19): siRNA sense strand
uuggaaaacuacacacaua

SEQ ID NO: 1378733 - RNA, 19 nt, Homo sapiens
  misc_RNA (1)...(19): siRNA sense strand
ugaaaucugugcugauacc

SEQ ID NO: 1378734 - RNA, 19 nt, Homo sapiens
  misc_RNA (1)...(19): siRNA sense strand
cagagaggaacccguaugu

SEQ ID NO: 1378735 - RNA, 19 nt, Homo sapiens
  misc_RNA (1)...(19): siRNA sense strand
gaggugcuauuugaaacca

SEQ ID NO: 1378736 - RNA, 19 nt, Homo sapiens
  misc_RNA (1)...(19): siRNA sense strand
uagaggugcuauuugaaac

SEQ ID NO: 1378737 - RNA, 19 nt, Homo sapiens
  misc_RNA (1)...(19): siRNA sense strand
uagagaggaacaagaugaa

SEQ ID NO: 1378738 - RNA, 19 nt, Homo sapiens
  misc_RNA (1)...(19): siRNA sense strand
gguacaaucguugacaaug

SEQ ID NO: 1378739 - RNA, 19 nt, Homo sapiens
  misc_RNA (1)...(19): siRNA sense strand
cccaaugaccugcacuuga

SEQ ID NO: 1378740 - RNA, 19 nt, Homo sapiens
  misc_RNA (1)...(19): siRNA sense strand
gcagcaguucuucaacgaa

SEQ ID NO: 1378741 - RNA, 19 nt, Homo sapiens
  misc_RNA (1)...(19): siRNA sense strand
gggaaacuggaugaucuuu

SEQ ID NO: 1378742 - RNA, 19 nt, Homo sapiens
  misc_RNA (1)...(19): siRNA sense strand
gaaccacgaagauuuuaug

SEQ ID NO: 1378743 - RNA, 19 nt, Homo sapiens
  misc_RNA (1)...(19): siRNA sense strand
ucacugagagcugcguuga

SEQ ID NO: 1378744 - RNA, 19 nt, Homo sapiens
  misc_RNA (1)...(19): siRNA sense strand
cugcguugaucauccagaa

SEQ ID NO: 1378745 - RNA, 19 nt, Homo sapiens
  misc_RNA (1)...(19): siRNA sense strand
agguauggcuucacgaaag

SEQ ID NO: 1378746 - RNA, 19 nt, Homo sapiens
  misc_RNA (1)...(19): siRNA sense strand
ugagguauggcuucacgaa

SEQ ID NO: 1378747 - RNA, 19 nt, Homo sapiens
  misc_RNA (1)...(19): siRNA sense strand
agauacuucaugcccauua

SEQ ID NO: 1378748 - RNA, 19 nt, Homo sapiens
  misc_RNA (1)...(19): siRNA sense strand
ugacucgaagcacaauaaa

SEQ ID NO: 1378749 - RNA, 19 nt, Homo sapiens
  misc_RNA (1)...(19): siRNA sense strand
gguuacaaagcucgacuga

SEQ ID NO: 1378750 - RNA, 19 nt, Homo sapiens
  misc_RNA (1)...(19): siRNA sense strand
gaugaacaaggccaaaugc

SEQ ID NO: 1378751 - RNA, 19 nt, Homo sapiens
  misc_RNA (1)...(19): siRNA sense strand
ggagaucugacacaucacu

SEQ ID NO: 1378752 - RNA, 19 nt, Homo sapiens
  misc_RNA (1)...(19): siRNA sense strand
gaaaacuacacacauauac

SEQ ID NO: 1378753 - RNA, 19 nt, Homo sapiens
  misc_RNA (1)...(19): siRNA sense strand
guguagagaggaacaagau

SEQ ID NO: 1378754 - RNA, 19 nt, Homo sapiens
  misc_RNA (1)...(19): siRNA sense strand
gagaccacagacuugaauu

SEQ ID NO: 1378755 - RNA, 19 nt, Homo sapiens
  misc_RNA (1)...(19): siRNA sense strand
uggcuucacgaaagaaauu

SEQ ID NO: 1378756 - RNA, 19 nt, Homo sapiens
  misc_RNA (1)...(19): siRNA sense strand
aaucugagguauggcuuca

SEQ ID NO: 1378757 - RNA, 19 nt, Homo sapiens
  misc_RNA (1)...(19): siRNA sense strand
aaagaauuccauagagauc

SEQ ID NO: 1378758 - RNA, 19 nt, Homo sapiens
  misc_RNA (1)...(19): siRNA sense strand
acagagggaaccacgaaga

SEQ ID NO: 1378759 - RNA, 19 nt, Homo sapiens
  misc_RNA (1)...(19): siRNA sense strand
agaggaacaagaugaaauc

SEQ ID NO: 1378760 - RNA, 19 nt, Homo sapiens
  misc_RNA (1)...(19): siRNA sense strand
aaaugcaguuauccaccuu

SEQ ID NO: 1378761 - RNA, 19 nt, Homo sapiens
  misc_RNA (1)...(19): siRNA sense strand
gaacaaagauggaagcauu

SEQ ID NO: 1378762 - RNA, 19 nt, Homo sapiens
  misc_RNA (1)...(19): siRNA sense strand
gaugaaaucugugcugaua

SEQ ID NO: 1378763 - RNA, 19 nt, Homo sapiens
  misc_RNA (1)...(19): siRNA sense strand
gaauuucacucacauacaa

SEQ ID NO: 1378764 - RNA, 19 nt, Homo sapiens
  misc_RNA (1)...(19): siRNA sense strand
ccaaugaccugcacuugaa

SEQ ID NO: 1378765 - RNA, 19 nt, Homo sapiens
  misc_RNA (1)...(19): siRNA sense strand
gagaggaacccguauguuu

SEQ ID NO: 1378766 - RNA, 19 nt, Homo sapiens
  misc_RNA (1)...(19): siRNA sense strand
guacaaucguugacaauga

SEQ ID NO: 1378767 - RNA, 19 nt, Homo sapiens
  misc_RNA (1)...(19): siRNA sense strand
ucaauaagcuugccaacau

SEQ ID NO: 1378768 - RNA, 19 nt, Homo sapiens
  misc_RNA (1)...(19): siRNA sense strand
gcaguuauccaccuucuuu

SEQ ID NO: 1378769 - RNA, 19 nt, Homo sapiens
  misc_RNA (1)...(19): siRNA sense strand
cgaauaugcugaugaacaa

SEQ ID NO: 1378770 - RNA, 19 nt, Homo sapiens
  misc_RNA (1)...(19): siRNA sense strand
aaacagcgccaucaagaua

SEQ ID NO: 1378771 - RNA, 19 nt, Homo sapiens
  misc_RNA (1)...(19): siRNA sense strand
uuacaaagcucgacugaag

SEQ ID NO: 1378772 - RNA, 19 nt, Homo sapiens
  misc_RNA (1)...(19): siRNA sense strand
cagaauauccgcauugaaa

SEQ ID NO: 1378773 - RNA, 19 nt, Homo sapiens
  misc_RNA (1)...(19): siRNA sense strand
caauaagcuugccaacaua

SEQ ID NO: 1378774 - RNA, 19 nt, Homo sapiens
  misc_RNA (1)...(19): siRNA sense strand
gaacagagggaaccacgaa

SEQ ID NO: 1378775 - RNA, 19 nt, Homo sapiens
  misc_RNA (1)...(19): siRNA sense strand
gaucugaccuggaaaucau

SEQ ID NO: 1378776 - RNA, 19 nt, Homo sapiens
  misc_RNA (1)...(19): siRNA sense strand
caggagaucugacacauca

SEQ ID NO: 1378777 - RNA, 19 nt, Homo sapiens
  misc_RNA (1)...(19): siRNA sense strand
ggagaucccucaguucgaa

SEQ ID NO: 1378778 - RNA, 19 nt, Homo sapiens
  misc_RNA (1)...(19): siRNA sense strand
gggcugaacuuaccaugga

SEQ ID NO: 1378779 - RNA, 19 nt, Homo sapiens
  misc_RNA (1)...(19): siRNA sense strand
auacagaucugaccuggaa

SEQ ID NO: 1378780 - RNA, 19 nt, Homo sapiens
  misc_RNA (1)...(19): siRNA sense strand
gaccacagacuugaauuua

SEQ ID NO: 1378781 - RNA, 19 nt, Homo sapiens
  misc_RNA (1)...(19): siRNA sense strand
gauggaagcauugacuuua

SEQ ID NO: 1378782 - RNA, 19 nt, Homo sapiens
  misc_RNA (1)...(19): siRNA sense strand
ccaaagagguaacaaucug

SEQ ID NO: 1378783 - RNA, 19 nt, Homo sapiens
  misc_RNA (1)...(19): siRNA sense strand
gaaagaauuccauagagau

SEQ ID NO: 1378784 - RNA, 19 nt, Homo sapiens
  misc_RNA (1)...(19): siRNA sense strand
ccauagagauccuaaugau

SEQ ID NO: 1378785 - RNA, 19 nt, Homo sapiens
  misc_RNA (1)...(19): siRNA sense strand
gagggaaccacgaagauuu

SEQ ID NO: 1378786 - RNA, 19 nt, Homo sapiens
  misc_RNA (1)...(19): siRNA sense strand
ccaagaaaguccugaagca

SEQ ID NO: 1378787 - RNA, 19 nt, Homo sapiens
  misc_RNA (1)...(19): siRNA sense strand
guucgaaucugguaaacau

SEQ ID NO: 1378788 - RNA, 19 nt, Homo sapiens
  misc_RNA (1)...(19): siRNA sense strand
cuaaugauccuguguguga

SEQ ID NO: 1378789 - RNA, 19 nt, Homo sapiens
  misc_RNA (1)...(19): siRNA sense strand
cagcaguucuucaacgaaa

SEQ ID NO: 1378790 - RNA, 19 nt, Homo sapiens
  misc_RNA (1)...(19): siRNA sense strand
uaauggacuugaacaaaga

SEQ ID NO: 1378791 - RNA, 19 nt, Homo sapiens
  misc_RNA (1)...(19): siRNA sense strand
guagaucgaggaaagaauu

SEQ ID NO: 1378792 - RNA, 19 nt, Homo sapiens
  misc_RNA (1)...(19): siRNA sense strand
ccauggagaucccucaguu

SEQ ID NO: 1378793 - RNA, 19 nt, Homo sapiens
  misc_RNA (1)...(19): siRNA sense strand
ucuuagaggugcuauuuga

SEQ ID NO: 1378794 - RNA, 19 nt, Homo sapiens
  misc_RNA (1)...(19): siRNA sense strand
aaacuucucccuccaaaga

SEQ ID NO: 1378795 - RNA, 19 nt, Homo sapiens
  misc_RNA (1)...(19): siRNA sense strand
agaaaguccugaagcaaau

SEQ ID NO: 1378796 - RNA, 19 nt, Homo sapiens
  misc_RNA (1)...(19): siRNA sense strand
gauaugaagacuugaugaa

SEQ ID NO: 1378797 - RNA, 19 nt, Homo sapiens
  misc_RNA (1)...(19): siRNA sense strand
guagagaggaacaagauga

SEQ ID NO: 1378798 - RNA, 19 nt, Homo sapiens
  misc_RNA (1)...(19): siRNA sense strand
acacacauauacauaagga

SEQ ID NO: 1378799 - RNA, 19 nt, Homo sapiens
  misc_RNA (1)...(19): siRNA sense strand
gaaaacagcgccaucaaga

SEQ ID NO: 1378800 - RNA, 19 nt, Homo sapiens
  misc_RNA (1)...(19): siRNA sense strand
ccacagacuugaauuuacu

SEQ ID NO: 1378801 - RNA, 19 nt, Homo sapiens
  misc_RNA (1)...(19): siRNA sense strand
gguauggcuucacgaaaga

SEQ ID NO: 1378802 - RNA, 19 nt, Homo sapiens
  misc_RNA (1)...(19): siRNA sense strand
ccacgaagauuuuaugaug

SEQ ID NO: 1378803 - RNA, 19 nt, Homo sapiens
  misc_RNA (1)...(19): siRNA sense strand
ucaugcccauuaugucuua

SEQ ID NO: 1378804 - RNA, 19 nt, Homo sapiens
  misc_RNA (1)...(19): siRNA sense strand
guaccgagguuacaaagcu

SEQ ID NO: 1378805 - RNA, 19 nt, Homo sapiens
  misc_RNA (1)...(19): siRNA sense strand
gaauuuacuccaccgugua

SEQ ID NO: 1378806 - RNA, 19 nt, Homo sapiens
  misc_RNA (1)...(19): siRNA sense strand
caacggaaacaaacagaga

SEQ ID NO: 1378807 - RNA, 19 nt, Homo sapiens
  misc_RNA (1)...(19): siRNA sense strand
gauacuucaugcccauuau

SEQ ID NO: 1378808 - RNA, 19 nt, Homo sapiens
  misc_RNA (1)...(19): siRNA sense strand
guacaagaggcucauucua

SEQ ID NO: 1378809 - RNA, 19 nt, Homo sapiens
  misc_RNA (1)...(19): siRNA sense strand
ccaucaagauauuaagaga

SEQ ID NO: 1378810 - RNA, 19 nt, Homo sapiens
  misc_RNA (1)...(19): siRNA sense strand
uacaaucguugacaaugaa

SEQ ID NO: 1378811 - RNA, 19 nt, Homo sapiens
  misc_RNA (1)...(19): siRNA sense strand
cauaauggacuugaacaaa

SEQ ID NO: 1378812 - RNA, 19 nt, Homo sapiens
  misc_RNA (1)...(19): siRNA sense strand
gaucuccguggaagaauuu

SEQ ID NO: 1378813 - RNA, 19 nt, Homo sapiens
  misc_RNA (1)...(19): siRNA sense strand
aaacaaacagagaccauga

SEQ ID NO: 1378814 - RNA, 19 nt, Homo sapiens
  misc_RNA (1)...(19): siRNA sense strand
gagaggaacaagaugaaau

SEQ ID NO: 1378815 - RNA, 19 nt, Homo sapiens
  misc_RNA (1)...(19): siRNA sense strand
ggaaaacuacacacauaua

SEQ ID NO: 1378816 - RNA, 19 nt, Homo sapiens
  misc_RNA (1)...(19): siRNA sense strand
uggaaacguugaauacaug

SEQ ID NO: 1378817 - RNA, 19 nt, Homo sapiens
  misc_RNA (1)...(19): siRNA sense strand
ucacucacauacaaacuuc

SEQ ID NO: 1378818 - RNA, 19 nt, Homo sapiens
  misc_RNA (1)...(19): siRNA sense strand
acaaacuucucccuccaaa

SEQ ID NO: 1378819 - RNA, 19 nt, Homo sapiens
  misc_RNA (1)...(19): siRNA sense strand
uaagagagagagugauuuc

SEQ ID NO: 1378820 - RNA, 19 nt, Homo sapiens
  misc_RNA (1)...(19): siRNA sense strand
acagagaccaugacacuga

SEQ ID NO: 1378821 - RNA, 19 nt, Homo sapiens
  misc_RNA (1)...(19): siRNA sense strand
uaucagagaccacagacuu

SEQ ID NO: 1378822 - RNA, 19 nt, Homo sapiens
  misc_RNA (1)...(19): siRNA sense strand
aaacagagaccaugacacu

SEQ ID NO: 1378823 - RNA, 19 nt, Homo sapiens
  misc_RNA (1)...(19): siRNA sense strand
auaauggacuugaacaaag

SEQ ID NO: 1378824 - RNA, 19 nt, Homo sapiens
  misc_RNA (1)...(19): siRNA sense strand
uaugaagacuugaugaaac

SEQ ID NO: 1378825 - RNA, 19 nt, Homo sapiens
  misc_RNA (1)...(19): siRNA sense strand
cuacacacauauacauaag

SEQ ID NO: 1378826 - RNA, 19 nt, Homo sapiens
  misc_RNA (1)...(19): siRNA sense strand
cauugacacugaucacuca

SEQ ID NO: 1378827 - RNA, 19 nt, Homo sapiens
  misc_RNA (1)...(19): siRNA sense strand
aagaaaguccugaagcaaa

SEQ ID NO: 1378828 - RNA, 19 nt, Homo sapiens
  misc_RNA (1)...(19): siRNA sense strand
ccaacauaauggacuugaa

SEQ ID NO: 1378829 - RNA, 19 nt, Homo sapiens
  misc_RNA (1)...(19): siRNA sense strand
gaugauucccaagucaaua

SEQ ID NO: 1378830 - RNA, 19 nt, Homo sapiens
  misc_RNA (1)...(19): siRNA sense strand
acaagaggcucauucuacu

SEQ ID NO: 1378831 - RNA, 19 nt, Homo sapiens
  misc_RNA (1)...(19): siRNA sense strand
gaacugguaccgagguuac

SEQ ID NO: 1378832 - RNA, 19 nt, Homo sapiens
  misc_RNA (1)...(19): siRNA sense strand
cgaaucugguaaacauaga

SEQ ID NO: 1378833 - RNA, 19 nt, Homo sapiens
  misc_RNA (1)...(19): siRNA sense strand
ggacuugaacaaagaugga

SEQ ID NO: 1378834 - RNA, 19 nt, Homo sapiens
  misc_RNA (1)...(19): siRNA sense strand
caagaaaguccugaagcaa

SEQ ID NO: 1378835 - RNA, 19 nt, Homo sapiens
  misc_RNA (1)...(19): siRNA sense strand
ggaugcagcaguucuucaa

SEQ ID NO: 1378836 - RNA, 19 nt, Homo sapiens
  misc_RNA (1)...(19): siRNA sense strand
ugaugaaucugagguaugg

SEQ ID NO: 1378837 - RNA, 19 nt, Homo sapiens
  misc_RNA (1)...(19): siRNA sense strand
caagauauuaagagagaga

SEQ ID NO: 1378838 - RNA, 19 nt, Homo sapiens
  misc_RNA (1)...(19): siRNA sense strand
uugaauacauguccagcuu

SEQ ID NO: 1378839 - RNA, 19 nt, Homo sapiens
  misc_RNA (1)...(19): siRNA sense strand
ggaaacaaacagagaccau

SEQ ID NO: 1378840 - RNA, 19 nt, Homo sapiens
  misc_RNA (1)...(19): siRNA sense strand
auggaagcauugacuuuaa

SEQ ID NO: 1378841 - RNA, 19 nt, Homo sapiens
  misc_RNA (1)...(19): siRNA sense strand
gaaggccagacaacacuau

SEQ ID NO: 1378842 - RNA, 19 nt, Homo sapiens
  misc_RNA (1)...(19): siRNA sense strand
gagcugcguugaucaucca

SEQ ID NO: 1378843 - RNA, 19 nt, Homo sapiens
  misc_RNA (1)...(19): siRNA sense strand
uuagaggugcuauuugaaa

SEQ ID NO: 1378844 - RNA, 19 nt, Homo sapiens
  misc_RNA (1)...(19): siRNA sense strand
caacauaauggacuugaac

SEQ ID NO: 1378845 - RNA, 19 nt, Homo sapiens
  misc_RNA (1)...(19): siRNA sense strand
cccaaucgguacaaucguu

SEQ ID NO: 1378846 - RNA, 19 nt, Homo sapiens
  misc_RNA (1)...(19): siRNA sense strand
ugucuuagaggugcuauuu

SEQ ID NO: 1378847 - RNA, 19 nt, Homo sapiens
  misc_RNA (1)...(19): siRNA sense strand
uggaagcauugacuuuaau

SEQ ID NO: 1378848 - RNA, 19 nt, Homo sapiens
  misc_RNA (1)...(19): siRNA sense strand
ggauaucagagaccacaga

SEQ ID NO: 1378849 - RNA, 19 nt, Homo sapiens
  misc_RNA (1)...(19): siRNA sense strand
acagcgccaucaagauauu

SEQ ID NO: 1378850 - RNA, 19 nt, Homo sapiens
  misc_RNA (1)...(19): siRNA sense strand
cgugccauguggaaacuuu

SEQ ID NO: 1378851 - RNA, 19 nt, Homo sapiens
  misc_RNA (1)...(19): siRNA sense strand
gagguauggcuucacgaaa

SEQ ID NO: 1378852 - RNA, 19 nt, Homo sapiens
  misc_RNA (1)...(19): siRNA sense strand
aaacauagaccaaaaugga

SEQ ID NO: 1378853 - RNA, 19 nt, Homo sapiens
  misc_RNA (1)...(19): siRNA sense strand
acugagagcugcguugauc

SEQ ID NO: 1378854 - RNA, 19 nt, Homo sapiens
  misc_RNA (1)...(19): siRNA sense strand
gaggcucauucuacucuag

SEQ ID NO: 1378855 - RNA, 19 nt, Homo sapiens
  misc_RNA (1)...(19): siRNA sense strand
caacuucaagaccacagaa

SEQ ID NO: 1378856 - RNA, 19 nt, Homo sapiens
  misc_RNA (1)...(19): siRNA sense strand
ugaccuuacucgugcuuuc

SEQ ID NO: 1378857 - RNA, 19 nt, Homo sapiens
  misc_RNA (1)...(19): siRNA sense strand
uaugaugaaucugagguau

SEQ ID NO: 1378858 - RNA, 19 nt, Homo sapiens
  misc_RNA (1)...(19): siRNA sense strand
uacaagaggcucauucuac

SEQ ID NO: 1378859 - RNA, 19 nt, Homo sapiens
  misc_RNA (1)...(19): siRNA sense strand
uaagcuugccaacauaaug

SEQ ID NO: 1378860 - RNA, 19 nt, Homo sapiens
  misc_RNA (1)...(19): siRNA sense strand
ugaucuccguggaagaauu

SEQ ID NO: 1378861 - RNA, 19 nt, Homo sapiens
  misc_RNA (1)...(19): siRNA sense strand
uaacagagcuccuccgaua

SEQ ID NO: 1378862 - RNA, 19 nt, Homo sapiens
  misc_RNA (1)...(19): siRNA sense strand
ggagguagaugacuucuuu

SEQ ID NO: 1378863 - RNA, 19 nt, Homo sapiens
  misc_RNA (1)...(19): siRNA sense strand
gaucgcaacuuucauguuu

SEQ ID NO: 1378864 - RNA, 19 nt, Homo sapiens
  misc_RNA (1)...(19): siRNA sense strand
gaagguugcugagcuauuu

SEQ ID NO: 1378865 - RNA, 19 nt, Homo sapiens
  misc_RNA (1)...(19): siRNA sense strand
ccaaagcccucauugacua

SEQ ID NO: 1378866 - RNA, 19 nt, Homo sapiens
  misc_RNA (1)...(19): siRNA sense strand
gagcaaagacgucaaguug

SEQ ID NO: 1378867 - RNA, 19 nt, Homo sapiens
  misc_RNA (1)...(19): siRNA sense strand
gaagagaguggcagcauuu

SEQ ID NO: 1378868 - RNA, 19 nt, Homo sapiens
  misc_RNA (1)...(19): siRNA sense strand
ugaaaugucugaacuggaa

SEQ ID NO: 1378869 - RNA, 19 nt, Homo sapiens
  misc_RNA (1)...(19): siRNA sense strand
gaaaguagagggucgaguu

SEQ ID NO: 1378870 - RNA, 19 nt, Homo sapiens
  misc_RNA (1)...(19): siRNA sense strand
gagagaagaugcagaaacu

SEQ ID NO: 1378871 - RNA, 19 nt, Homo sapiens
  misc_RNA (1)...(19): siRNA sense strand
aaacaaagcucuggauaag

SEQ ID NO: 1378872 - RNA, 19 nt, Homo sapiens
  misc_RNA (1)...(19): siRNA sense strand
gaugaagauuugaagcuaa

SEQ ID NO: 1378873 - RNA, 19 nt, Homo sapiens
  misc_RNA (1)...(19): siRNA sense strand
ggaagagaguggcagcauu

SEQ ID NO: 1378874 - RNA, 19 nt, Homo sapiens
  misc_RNA (1)...(19): siRNA sense strand
gcagagcuguauugacuug

SEQ ID NO: 1378875 - RNA, 19 nt, Homo sapiens
  misc_RNA (1)...(19): siRNA sense strand
ugucugaacuggaaauaaa

SEQ ID NO: 1378876 - RNA, 19 nt, Homo sapiens
  misc_RNA (1)...(19): siRNA sense strand
caaacaaagcucuggauaa

SEQ ID NO: 1378877 - RNA, 19 nt, Homo sapiens
  misc_RNA (1)...(19): siRNA sense strand
ccagaaauuugaacaacuu

SEQ ID NO: 1378878 - RNA, 19 nt, Homo sapiens
  misc_RNA (1)...(19): siRNA sense strand
gagagacaaagucaaauuu

SEQ ID NO: 1378879 - RNA, 19 nt, Homo sapiens
  misc_RNA (1)...(19): siRNA sense strand
acaauaggaucaaagauuc

SEQ ID NO: 1378880 - RNA, 19 nt, Homo sapiens
  misc_RNA (1)...(19): siRNA sense strand
gaaaagugcugaugaaguc

SEQ ID NO: 1378881 - RNA, 19 nt, Homo sapiens
  misc_RNA (1)...(19): siRNA sense strand
cuacgaagcccgacuuuga

SEQ ID NO: 1378882 - RNA, 19 nt, Homo sapiens
  misc_RNA (1)...(19): siRNA sense strand
gagacaaagucaaauuuac

SEQ ID NO: 1378883 - RNA, 19 nt, Homo sapiens
  misc_RNA (1)...(19): siRNA sense strand
gaaggugaagggucuauga

SEQ ID NO: 1378884 - RNA, 19 nt, Homo sapiens
  misc_RNA (1)...(19): siRNA sense strand
gauacuacaugcucaacau

SEQ ID NO: 1378885 - RNA, 19 nt, Homo sapiens
  misc_RNA (1)...(19): siRNA sense strand
gcaccaaagcccucauuga

SEQ ID NO: 1378886 - RNA, 19 nt, Homo sapiens
  misc_RNA (1)...(19): siRNA sense strand
cuacaugacacucuuauug

SEQ ID NO: 1378887 - RNA, 19 nt, Homo sapiens
  misc_RNA (1)...(19): siRNA sense strand
gaacaacuuuccgaaucug

SEQ ID NO: 1378888 - RNA, 19 nt, Homo sapiens
  misc_RNA (1)...(19): siRNA sense strand
gagaguggcagcauuuaga

SEQ ID NO: 1378889 - RNA, 19 nt, Homo sapiens
  misc_RNA (1)...(19): siRNA sense strand
ugagagagacaaagucaaa

SEQ ID NO: 1378890 - RNA, 19 nt, Homo sapiens
  misc_RNA (1)...(19): siRNA sense strand
cauugaagcugcuaaggau

SEQ ID NO: 1378891 - RNA, 19 nt, Homo sapiens
  misc_RNA (1)...(19): siRNA sense strand
guugaucccucgcuucaga

SEQ ID NO: 1378892 - RNA, 19 nt, Homo sapiens
  misc_RNA (1)...(19): siRNA sense strand
agaagaauuugccaagaug

SEQ ID NO: 1378893 - RNA, 19 nt, Homo sapiens
  misc_RNA (1)...(19): siRNA sense strand
gauguuugguggcuucuuc

SEQ ID NO: 1378894 - RNA, 19 nt, Homo sapiens
  misc_RNA (1)...(19): siRNA sense strand
gaugaaacaagaacuggaa

SEQ ID NO: 1378895 - RNA, 19 nt, Homo sapiens
  misc_RNA (1)...(19): siRNA sense strand
ggagugcugccagaaauuu

SEQ ID NO: 1378896 - RNA, 19 nt, Homo sapiens
  misc_RNA (1)...(19): siRNA sense strand
aaagaagaauuugccaaga

SEQ ID NO: 1378897 - RNA, 19 nt, Homo sapiens
  misc_RNA (1)...(19): siRNA sense strand
caggagugcugccagaaau

SEQ ID NO: 1378898 - RNA, 19 nt, Homo sapiens
  misc_RNA (1)...(19): siRNA sense strand
ucaaacaaagcucuggaua

SEQ ID NO: 1378899 - RNA, 19 nt, Homo sapiens
  misc_RNA (1)...(19): siRNA sense strand
aagaagaauuugccaagau

SEQ ID NO: 1378900 - RNA, 19 nt, Homo sapiens
  misc_RNA (1)...(19): siRNA sense strand
uuaaggagguagaugacuu

SEQ ID NO: 1378901 - RNA, 19 nt, Homo sapiens
  misc_RNA (1)...(19): siRNA sense strand
acaugacacucuuauugaa

SEQ ID NO: 1378902 - RNA, 19 nt, Homo sapiens
  misc_RNA (1)...(19): siRNA sense strand
aaacaugccaggaacaaug

SEQ ID NO: 1378903 - RNA, 19 nt, Homo sapiens
  misc_RNA (1)...(19): siRNA sense strand
gaguuaaggagguagauga

SEQ ID NO: 1378904 - RNA, 19 nt, Homo sapiens
  misc_RNA (1)...(19): siRNA sense strand
gaagaauuugccaagauga

SEQ ID NO: 1378905 - RNA, 19 nt, Homo sapiens
  misc_RNA (1)...(19): siRNA sense strand
agacuaugcugggcuuauu

SEQ ID NO: 1378906 - RNA, 19 nt, Homo sapiens
  misc_RNA (1)...(19): siRNA sense strand
aaggcaacaugaagacuuu

SEQ ID NO: 1378907 - RNA, 19 nt, Homo sapiens
  misc_RNA (1)...(19): siRNA sense strand
gaagagcccacagucauca

SEQ ID NO: 1378908 - RNA, 19 nt, Homo sapiens
  misc_RNA (1)...(19): siRNA sense strand
gaaacugggagaaggugaa

SEQ ID NO: 1378909 - RNA, 19 nt, Homo sapiens
  misc_RNA (1)...(19): siRNA sense strand
ugugaaagcugacaaaaug

SEQ ID NO: 1378910 - RNA, 19 nt, Homo sapiens
  misc_RNA (1)...(19): siRNA sense strand
gagcuguauugacuuguuc

SEQ ID NO: 1378911 - RNA, 19 nt, Homo sapiens
  misc_RNA (1)...(19): siRNA sense strand
agaugaagauuugaagcua

SEQ ID NO: 1378912 - RNA, 19 nt, Homo sapiens
  misc_RNA (1)...(19): siRNA sense strand
uugcagagcuguauugacu

SEQ ID NO: 1378913 - RNA, 19 nt, Homo sapiens
  misc_RNA (1)...(19): siRNA sense strand
cugaguaucucgcuguguu

SEQ ID NO: 1378914 - RNA, 19 nt, Homo sapiens
  misc_RNA (1)...(19): siRNA sense strand
gaguaucucgcuguguuua

SEQ ID NO: 1378915 - RNA, 19 nt, Homo sapiens
  misc_RNA (1)...(19): siRNA sense strand
ugaacaacuuuccgaaucu

SEQ ID NO: 1378916 - RNA, 19 nt, Homo sapiens
  misc_RNA (1)...(19): siRNA sense strand
caacaugaagacuuugugu

SEQ ID NO: 1378917 - RNA, 19 nt, Homo sapiens
  misc_RNA (1)...(19): siRNA sense strand
uugaacaacuuuccgaauc

SEQ ID NO: 1378918 - RNA, 19 nt, Homo sapiens
  misc_RNA (1)...(19): siRNA sense strand
agaccacacugcccacguu

SEQ ID NO: 1378919 - RNA, 19 nt, Homo sapiens
  misc_RNA (1)...(19): siRNA sense strand
gacuaugcugggcuuauua

SEQ ID NO: 1378920 - RNA, 19 nt, Homo sapiens
  misc_RNA (1)...(19): siRNA sense strand
uacaugacacucuuauuga

SEQ ID NO: 1378921 - RNA, 19 nt, Homo sapiens
  misc_RNA (1)...(19): siRNA sense strand
agagagacaaagucaaauu

SEQ ID NO: 1378922 - RNA, 19 nt, Homo sapiens
  misc_RNA (1)...(19): siRNA sense strand
ggugaaaagugcugaugaa

SEQ ID NO: 1378923 - RNA, 19 nt, Homo sapiens
  misc_RNA (1)...(19): siRNA sense strand
uugccaagaugaaacaaga

SEQ ID NO: 1378924 - RNA, 19 nt, Homo sapiens
  misc_RNA (1)...(19): siRNA sense strand
caaggcaacaugaagacuu

SEQ ID NO: 1378925 - RNA, 19 nt, Homo sapiens
  misc_RNA (1)...(19): siRNA sense strand
ccacacugcccacguuuca

SEQ ID NO: 1378926 - RNA, 19 nt, Homo sapiens
  misc_RNA (1)...(19): siRNA sense strand
gcaaaagaagaacugauaa

SEQ ID NO: 1378927 - RNA, 19 nt, Homo sapiens
  misc_RNA (1)...(19): siRNA sense strand
guccucccaugaagucuuu

SEQ ID NO: 1378928 - RNA, 19 nt, Homo sapiens
  misc_RNA (1)...(19): siRNA sense strand
caagaugaaacaagaacug

SEQ ID NO: 1378929 - RNA, 19 nt, Homo sapiens
  misc_RNA (1)...(19): siRNA sense strand
uuacaaggcaacaugaaga

SEQ ID NO: 1378930 - RNA, 19 nt, Homo sapiens
  misc_RNA (1)...(19): siRNA sense strand
caugacacucuuauugaaa

SEQ ID NO: 1378931 - RNA, 19 nt, Homo sapiens
  misc_RNA (1)...(19): siRNA sense strand
guggcagcauuuagaaaga

SEQ ID NO: 1378932 - RNA, 19 nt, Homo sapiens
  misc_RNA (1)...(19): siRNA sense strand
uagaagagcccacagucau

SEQ ID NO: 1378933 - RNA, 19 nt, Homo sapiens
  misc_RNA (1)...(19): siRNA sense strand
gacuuuguguggcuacaug

SEQ ID NO: 1378934 - RNA, 19 nt, Homo sapiens
  misc_RNA (1)...(19): siRNA sense strand
gcagaaacugggagaaggu

SEQ ID NO: 1378935 - RNA, 19 nt, Homo sapiens
  misc_RNA (1)...(19): siRNA sense strand
cagauugacauaccugaug

SEQ ID NO: 1378936 - RNA, 19 nt, Homo sapiens
  misc_RNA (1)...(19): siRNA sense strand
aguagagggucgaguuuca

SEQ ID NO: 1378937 - RNA, 19 nt, Homo sapiens
  misc_RNA (1)...(19): siRNA sense strand
aaaguagagggucgaguuu

SEQ ID NO: 1378938 - RNA, 19 nt, Homo sapiens
  misc_RNA (1)...(19): siRNA sense strand
cuguggaccugaauguuga

SEQ ID NO: 1378939 - RNA, 19 nt, Homo sapiens
  misc_RNA (1)...(19): siRNA sense strand
aauuuacagugcacacaaa

SEQ ID NO: 1378940 - RNA, 19 nt, Homo sapiens
  misc_RNA (1)...(19): siRNA sense strand
gccagaaauuugaacaacu

SEQ ID NO: 1378941 - RNA, 19 nt, Homo sapiens
  misc_RNA (1)...(19): siRNA sense strand
aaauguugccgaugacuau

SEQ ID NO: 1378942 - RNA, 19 nt, Homo sapiens
  misc_RNA (1)...(19): siRNA sense strand
gaaacaagaacuggaagcu

SEQ ID NO: 1378943 - RNA, 19 nt, Homo sapiens
  misc_RNA (1)...(19): siRNA sense strand
agagcuguauugacuuguu

SEQ ID NO: 1378944 - RNA, 19 nt, Homo sapiens
  misc_RNA (1)...(19): siRNA sense strand
gaacuggaaauaaaacaug

SEQ ID NO: 1378945 - RNA, 19 nt, Homo sapiens
  misc_RNA (1)...(19): siRNA sense strand
guaucucgcuguguuuaag

SEQ ID NO: 1378946 - RNA, 19 nt, Homo sapiens
  misc_RNA (1)...(19): siRNA sense strand
ucaaaaguguggugaaaag

SEQ ID NO: 1378947 - RNA, 19 nt, Homo sapiens
  misc_RNA (1)...(19): siRNA sense strand
uggcagcauuuagaaagaa

SEQ ID NO: 1378948 - RNA, 19 nt, Homo sapiens
  misc_RNA (1)...(19): siRNA sense strand
cagagcuccuccgauacua

SEQ ID NO: 1378949 - RNA, 19 nt, Homo sapiens
  misc_RNA (1)...(19): siRNA sense strand
gaaaugucugaacuggaaa

SEQ ID NO: 1378950 - RNA, 19 nt, Homo sapiens
  misc_RNA (1)...(19): siRNA sense strand
caccaaagcccucauugac

SEQ ID NO: 1378951 - RNA, 19 nt, Homo sapiens
  misc_RNA (1)...(19): siRNA sense strand
caacauugaagcugcuaag

SEQ ID NO: 1378952 - RNA, 19 nt, Homo sapiens
  misc_RNA (1)...(19): siRNA sense strand
gcaacaugaagacuuugug

SEQ ID NO: 1378953 - RNA, 19 nt, Homo sapiens
  misc_RNA (1)...(19): siRNA sense strand
ggcagcauuuagaaagaau

SEQ ID NO: 1378954 - RNA, 19 nt, Homo sapiens
  misc_RNA (1)...(19): siRNA sense strand
uugcugagcuauuugaaaa

SEQ ID NO: 1378955 - RNA, 19 nt, Homo sapiens
  misc_RNA (1)...(19): siRNA sense strand
gggucgaguuucaucagau

SEQ ID NO: 1378956 - RNA, 19 nt, Homo sapiens
  misc_RNA (1)...(19): siRNA sense strand
gagcuccuccgauacuaca

SEQ ID NO: 1378957 - RNA, 19 nt, Homo sapiens
  misc_RNA (1)...(19): siRNA sense strand
gaacuggaagcugaguauc

SEQ ID NO: 1378958 - RNA, 19 nt, Homo sapiens
  misc_RNA (1)...(19): siRNA sense strand
gaguggcagcauuuagaaa

SEQ ID NO: 1378959 - RNA, 19 nt, Homo sapiens
  misc_RNA (1)...(19): siRNA sense strand
acacugcccacguuucaga

SEQ ID NO: 1378960 - RNA, 19 nt, Homo sapiens
  misc_RNA (1)...(19): siRNA sense strand
uaaggagguagaugacuuc

SEQ ID NO: 1378961 - RNA, 19 nt, Homo sapiens
  misc_RNA (1)...(19): siRNA sense strand
uaacagagcuccuccgaua

SEQ ID NO: 1378962 - RNA, 19 nt, Homo sapiens
  misc_RNA (1)...(19): siRNA sense strand
ggagguagaugacuucuuu

SEQ ID NO: 1378963 - RNA, 19 nt, Homo sapiens
  misc_RNA (1)...(19): siRNA sense strand
gaucgcaacuuucauguuu

SEQ ID NO: 1378964 - RNA, 19 nt, Homo sapiens
  misc_RNA (1)...(19): siRNA sense strand
gaagguugcugagcuauuu

SEQ ID NO: 1378965 - RNA, 19 nt, Homo sapiens
  misc_RNA (1)...(19): siRNA sense strand
ccaaagcccucauugacua

SEQ ID NO: 1378966 - RNA, 19 nt, Homo sapiens
  misc_RNA (1)...(19): siRNA sense strand
gagcaaagacgucaaguug

SEQ ID NO: 1378967 - RNA, 19 nt, Homo sapiens
  misc_RNA (1)...(19): siRNA sense strand
gaagagaguggcagcauuu

SEQ ID NO: 1378968 - RNA, 19 nt, Homo sapiens
  misc_RNA (1)...(19): siRNA sense strand
ugaaaugucugaacuggaa

SEQ ID NO: 1378969 - RNA, 19 nt, Homo sapiens
  misc_RNA (1)...(19): siRNA sense strand
gaaaguagagggucgaguu

SEQ ID NO: 1378970 - RNA, 19 nt, Homo sapiens
  misc_RNA (1)...(19): siRNA sense strand
gagagaagaugcagaaacu

SEQ ID NO: 1378971 - RNA, 19 nt, Homo sapiens
  misc_RNA (1)...(19): siRNA sense strand
aaacaaagcucuggauaag

SEQ ID NO: 1378972 - RNA, 19 nt, Homo sapiens
  misc_RNA (1)...(19): siRNA sense strand
gaugaagauuugaagcuaa

SEQ ID NO: 1378973 - RNA, 19 nt, Homo sapiens
  misc_RNA (1)...(19): siRNA sense strand
ggaagagaguggcagcauu

SEQ ID NO: 1378974 - RNA, 19 nt, Homo sapiens
  misc_RNA (1)...(19): siRNA sense strand
gcagagcuguauugacuug

SEQ ID NO: 1378975 - RNA, 19 nt, Homo sapiens
  misc_RNA (1)...(19): siRNA sense strand
ugucugaacuggaaauaaa

SEQ ID NO: 1378976 - RNA, 19 nt, Homo sapiens
  misc_RNA (1)...(19): siRNA sense strand
caaacaaagcucuggauaa

SEQ ID NO: 1378977 - RNA, 19 nt, Homo sapiens
  misc_RNA (1)...(19): siRNA sense strand
ccagaaauuugaacaacuu

SEQ ID NO: 1378978 - RNA, 19 nt, Homo sapiens
  misc_RNA (1)...(19): siRNA sense strand
gagagacaaagucaaauuu

SEQ ID NO: 1378979 - RNA, 19 nt, Homo sapiens
  misc_RNA (1)...(19): siRNA sense strand
acaauaggaucaaagauuc

SEQ ID NO: 1378980 - RNA, 19 nt, Homo sapiens
  misc_RNA (1)...(19): siRNA sense strand
gaaaagugcugaugaaguc

SEQ ID NO: 1378981 - RNA, 19 nt, Homo sapiens
  misc_RNA (1)...(19): siRNA sense strand
cuacgaagcccgacuuuga

SEQ ID NO: 1378982 - RNA, 19 nt, Homo sapiens
  misc_RNA (1)...(19): siRNA sense strand
gagacaaagucaaauuuac

SEQ ID NO: 1378983 - RNA, 19 nt, Homo sapiens
  misc_RNA (1)...(19): siRNA sense strand
gaaggugaagggucuauga

SEQ ID NO: 1378984 - RNA, 19 nt, Homo sapiens
  misc_RNA (1)...(19): siRNA sense strand
gauacuacaugcucaacau

SEQ ID NO: 1378985 - RNA, 19 nt, Homo sapiens
  misc_RNA (1)...(19): siRNA sense strand
gcaccaaagcccucauuga

SEQ ID NO: 1378986 - RNA, 19 nt, Homo sapiens
  misc_RNA (1)...(19): siRNA sense strand
cuacaugacacucuuauug

SEQ ID NO: 1378987 - RNA, 19 nt, Homo sapiens
  misc_RNA (1)...(19): siRNA sense strand
gaacaacuuuccgaaucug

SEQ ID NO: 1378988 - RNA, 19 nt, Homo sapiens
  misc_RNA (1)...(19): siRNA sense strand
gagaguggcagcauuuaga

SEQ ID NO: 1378989 - RNA, 19 nt, Homo sapiens
  misc_RNA (1)...(19): siRNA sense strand
ugagagagacaaagucaaa

SEQ ID NO: 1378990 - RNA, 19 nt, Homo sapiens
  misc_RNA (1)...(19): siRNA sense strand
cauugaagcugcuaaggau

SEQ ID NO: 1378991 - RNA, 19 nt, Homo sapiens
  misc_RNA (1)...(19): siRNA sense strand
guugaucccucgcuucaga

SEQ ID NO: 1378992 - RNA, 19 nt, Homo sapiens
  misc_RNA (1)...(19): siRNA sense strand
agaagaauuugccaagaug

SEQ ID NO: 1378993 - RNA, 19 nt, Homo sapiens
  misc_RNA (1)...(19): siRNA sense strand
gauguuugguggcuucuuc

SEQ ID NO: 1378994 - RNA, 19 nt, Homo sapiens
  misc_RNA (1)...(19): siRNA sense strand
gaugaaacaagaacuggaa

SEQ ID NO: 1378995 - RNA, 19 nt, Homo sapiens
  misc_RNA (1)...(19): siRNA sense strand
ggagugcugccagaaauuu

SEQ ID NO: 1378996 - RNA, 19 nt, Homo sapiens
  misc_RNA (1)...(19): siRNA sense strand
aaagaagaauuugccaaga

SEQ ID NO: 1378997 - RNA, 19 nt, Homo sapiens
  misc_RNA (1)...(19): siRNA sense strand
caggagugcugccagaaau

SEQ ID NO: 1378998 - RNA, 19 nt, Homo sapiens
  misc_RNA (1)...(19): siRNA sense strand
ucaaacaaagcucuggaua

SEQ ID NO: 1378999 - RNA, 19 nt, Homo sapiens
  misc_RNA (1)...(19): siRNA sense strand
aagaagaauuugccaagau

SEQ ID NO: 1379000 - RNA, 19 nt, Homo sapiens
  misc_RNA (1)...(19): siRNA sense strand
uuaaggagguagaugacuu

SEQ ID NO: 1379001 - RNA, 19 nt, Homo sapiens
  misc_RNA (1)...(19): siRNA sense strand
acaugacacucuuauugaa

SEQ ID NO: 1379002 - RNA, 19 nt, Homo sapiens
  misc_RNA (1)...(19): siRNA sense strand
aaacaugccaggaacaaug

SEQ ID NO: 1379003 - RNA, 19 nt, Homo sapiens
  misc_RNA (1)...(19): siRNA sense strand
gaguuaaggagguagauga

SEQ ID NO: 1379004 - RNA, 19 nt, Homo sapiens
  misc_RNA (1)...(19): siRNA sense strand
gaagaauuugccaagauga

SEQ ID NO: 1379005 - RNA, 19 nt, Homo sapiens
  misc_RNA (1)...(19): siRNA sense strand
agacuaugcugggcuuauu

SEQ ID NO: 1379006 - RNA, 19 nt, Homo sapiens
  misc_RNA (1)...(19): siRNA sense strand
aaggcaacaugaagacuuu

SEQ ID NO: 1379007 - RNA, 19 nt, Homo sapiens
  misc_RNA (1)...(19): siRNA sense strand
gaagagcccacagucauca

SEQ ID NO: 1379008 - RNA, 19 nt, Homo sapiens
  misc_RNA (1)...(19): siRNA sense strand
gaaacugggagaaggugaa

SEQ ID NO: 1379009 - RNA, 19 nt, Homo sapiens
  misc_RNA (1)...(19): siRNA sense strand
ugugaaagcugacaaaaug

SEQ ID NO: 1379010 - RNA, 19 nt, Homo sapiens
  misc_RNA (1)...(19): siRNA sense strand
gagcuguauugacuuguuc

SEQ ID NO: 1379011 - RNA, 19 nt, Homo sapiens
  misc_RNA (1)...(19): siRNA sense strand
agaugaagauuugaagcua

SEQ ID NO: 1379012 - RNA, 19 nt, Homo sapiens
  misc_RNA (1)...(19): siRNA sense strand
uugcagagcuguauugacu

SEQ ID NO: 1379013 - RNA, 19 nt, Homo sapiens
  misc_RNA (1)...(19): siRNA sense strand
cugaguaucucgcuguguu

SEQ ID NO: 1379014 - RNA, 19 nt, Homo sapiens
  misc_RNA (1)...(19): siRNA sense strand
gaguaucucgcuguguuua

SEQ ID NO: 1379015 - RNA, 19 nt, Homo sapiens
  misc_RNA (1)...(19): siRNA sense strand
ugaacaacuuuccgaaucu

SEQ ID NO: 1379016 - RNA, 19 nt, Homo sapiens
  misc_RNA (1)...(19): siRNA sense strand
caacaugaagacuuugugu

SEQ ID NO: 1379017 - RNA, 19 nt, Homo sapiens
  misc_RNA (1)...(19): siRNA sense strand
uugaacaacuuuccgaauc

SEQ ID NO: 1379018 - RNA, 19 nt, Homo sapiens
  misc_RNA (1)...(19): siRNA sense strand
agaccacacugcccacguu

SEQ ID NO: 1379019 - RNA, 19 nt, Homo sapiens
  misc_RNA (1)...(19): siRNA sense strand
gacuaugcugggcuuauua

SEQ ID NO: 1379020 - RNA, 19 nt, Homo sapiens
  misc_RNA (1)...(19): siRNA sense strand
uacaugacacucuuauuga

SEQ ID NO: 1379021 - RNA, 19 nt, Homo sapiens
  misc_RNA (1)...(19): siRNA sense strand
agagagacaaagucaaauu

SEQ ID NO: 1379022 - RNA, 19 nt, Homo sapiens
  misc_RNA (1)...(19): siRNA sense strand
ggugaaaagugcugaugaa

SEQ ID NO: 1379023 - RNA, 19 nt, Homo sapiens
  misc_RNA (1)...(19): siRNA sense strand
uugccaagaugaaacaaga

SEQ ID NO: 1379024 - RNA, 19 nt, Homo sapiens
  misc_RNA (1)...(19): siRNA sense strand
caaggcaacaugaagacuu

SEQ ID NO: 1379025 - RNA, 19 nt, Homo sapiens
  misc_RNA (1)...(19): siRNA sense strand
ccacacugcccacguuuca

SEQ ID NO: 1379026 - RNA, 19 nt, Homo sapiens
  misc_RNA (1)...(19): siRNA sense strand
gcaaaagaagaacugauaa

SEQ ID NO: 1379027 - RNA, 19 nt, Homo sapiens
  misc_RNA (1)...(19): siRNA sense strand
guccucccaugaagucuuu

SEQ ID NO: 1379028 - RNA, 19 nt, Homo sapiens
  misc_RNA (1)...(19): siRNA sense strand
caagaugaaacaagaacug

SEQ ID NO: 1379029 - RNA, 19 nt, Homo sapiens
  misc_RNA (1)...(19): siRNA sense strand
uuacaaggcaacaugaaga

SEQ ID NO: 1379030 - RNA, 19 nt, Homo sapiens
  misc_RNA (1)...(19): siRNA sense strand
caugacacucuuauugaaa

SEQ ID NO: 1379031 - RNA, 19 nt, Homo sapiens
  misc_RNA (1)...(19): siRNA sense strand
guggcagcauuuagaaaga

SEQ ID NO: 1379032 - RNA, 19 nt, Homo sapiens
  misc_RNA (1)...(19): siRNA sense strand
uagaagagcccacagucau

SEQ ID NO: 1379033 - RNA, 19 nt, Homo sapiens
  misc_RNA (1)...(19): siRNA sense strand
gacuuuguguggcuacaug

SEQ ID NO: 1379034 - RNA, 19 nt, Homo sapiens
  misc_RNA (1)...(19): siRNA sense strand
gcagaaacugggagaaggu

SEQ ID NO: 1379035 - RNA, 19 nt, Homo sapiens
  misc_RNA (1)...(19): siRNA sense strand
cagauugacauaccugaug

SEQ ID NO: 1379036 - RNA, 19 nt, Homo sapiens
  misc_RNA (1)...(19): siRNA sense strand
aguagagggucgaguuuca

SEQ ID NO: 1379037 - RNA, 19 nt, Homo sapiens
  misc_RNA (1)...(19): siRNA sense strand
aaaguagagggucgaguuu

SEQ ID NO: 1379038 - RNA, 19 nt, Homo sapiens
  misc_RNA (1)...(19): siRNA sense strand
cuguggaccugaauguuga

SEQ ID NO: 1379039 - RNA, 19 nt, Homo sapiens
  misc_RNA (1)...(19): siRNA sense strand
aauuuacagugcacacaaa

SEQ ID NO: 1379040 - RNA, 19 nt, Homo sapiens
  misc_RNA (1)...(19): siRNA sense strand
gccagaaauuugaacaacu

SEQ ID NO: 1379041 - RNA, 19 nt, Homo sapiens
  misc_RNA (1)...(19): siRNA sense strand
aaauguugccgaugacuau

SEQ ID NO: 1379042 - RNA, 19 nt, Homo sapiens
  misc_RNA (1)...(19): siRNA sense strand
gaaacaagaacuggaagcu

SEQ ID NO: 1379043 - RNA, 19 nt, Homo sapiens
  misc_RNA (1)...(19): siRNA sense strand
agagcuguauugacuuguu

SEQ ID NO: 1379044 - RNA, 19 nt, Homo sapiens
  misc_RNA (1)...(19): siRNA sense strand
gaacuggaaauaaaacaug

SEQ ID NO: 1379045 - RNA, 19 nt, Homo sapiens
  misc_RNA (1)...(19): siRNA sense strand
guaucucgcuguguuuaag

SEQ ID NO: 1379046 - RNA, 19 nt, Homo sapiens
  misc_RNA (1)...(19): siRNA sense strand
ucaaaaguguggugaaaag

SEQ ID NO: 1379047 - RNA, 19 nt, Homo sapiens
  misc_RNA (1)...(19): siRNA sense strand
uggcagcauuuagaaagaa

SEQ ID NO: 1379048 - RNA, 19 nt, Homo sapiens
  misc_RNA (1)...(19): siRNA sense strand
cagagcuccuccgauacua

SEQ ID NO: 1379049 - RNA, 19 nt, Homo sapiens
  misc_RNA (1)...(19): siRNA sense strand
gaaaugucugaacuggaaa

SEQ ID NO: 1379050 - RNA, 19 nt, Homo sapiens
  misc_RNA (1)...(19): siRNA sense strand
caccaaagcccucauugac

SEQ ID NO: 1379051 - RNA, 19 nt, Homo sapiens
  misc_RNA (1)...(19): siRNA sense strand
caacauugaagcugcuaag

SEQ ID NO: 1379052 - RNA, 19 nt, Homo sapiens
  misc_RNA (1)...(19): siRNA sense strand
gcaacaugaagacuuugug

SEQ ID NO: 1379053 - RNA, 19 nt, Homo sapiens
  misc_RNA (1)...(19): siRNA sense strand
ggcagcauuuagaaagaau

SEQ ID NO: 1379054 - RNA, 19 nt, Homo sapiens
  misc_RNA (1)...(19): siRNA sense strand
uugcugagcuauuugaaaa

SEQ ID NO: 1379055 - RNA, 19 nt, Homo sapiens
  misc_RNA (1)...(19): siRNA sense strand
gggucgaguuucaucagau

SEQ ID NO: 1379056 - RNA, 19 nt, Homo sapiens
  misc_RNA (1)...(19): siRNA sense strand
gagcuccuccgauacuaca

SEQ ID NO: 1379057 - RNA, 19 nt, Homo sapiens
  misc_RNA (1)...(19): siRNA sense strand
gaacuggaagcugaguauc

SEQ ID NO: 1379058 - RNA, 19 nt, Homo sapiens
  misc_RNA (1)...(19): siRNA sense strand
gaguggcagcauuuagaaa

SEQ ID NO: 1379059 - RNA, 19 nt, Homo sapiens
  misc_RNA (1)...(19): siRNA sense strand
acacugcccacguuucaga

SEQ ID NO: 1379060 - RNA, 19 nt, Homo sapiens
  misc_RNA (1)...(19): siRNA sense strand
uaaggagguagaugacuuc

SEQ ID NO: 1379061 - RNA, 19 nt, Homo sapiens
  misc_RNA (1)...(19): siRNA sense strand
gauaagagguacacaaaua

SEQ ID NO: 1379062 - RNA, 19 nt, Homo sapiens
  misc_RNA (1)...(19): siRNA sense strand
gcaaauaccucauccucaa

SEQ ID NO: 1379063 - RNA, 19 nt, Homo sapiens
  misc_RNA (1)...(19): siRNA sense strand
gaaaugggaucagaaauca

SEQ ID NO: 1379064 - RNA, 19 nt, Homo sapiens
  misc_RNA (1)...(19): siRNA sense strand
ccacggagcugaagaacaa

SEQ ID NO: 1379065 - RNA, 19 nt, Homo sapiens
  misc_RNA (1)...(19): siRNA sense strand
gagaugauauugaccuuau

SEQ ID NO: 1379066 - RNA, 19 nt, Homo sapiens
  misc_RNA (1)...(19): siRNA sense strand
ggaagaagaggaagaagaa

SEQ ID NO: 1379067 - RNA, 19 nt, Homo sapiens
  misc_RNA (1)...(19): siRNA sense strand
guucaagccuaaugaguuu

SEQ ID NO: 1379068 - RNA, 19 nt, Homo sapiens
  misc_RNA (1)...(19): siRNA sense strand
gaucagaaaucacagaaac

SEQ ID NO: 1379069 - RNA, 19 nt, Homo sapiens
  misc_RNA (1)...(19): siRNA sense strand
caaaggagaucggcuagga

SEQ ID NO: 1379070 - RNA, 19 nt, Homo sapiens
  misc_RNA (1)...(19): siRNA sense strand
ggaauguguuugccacuga

SEQ ID NO: 1379071 - RNA, 19 nt, Homo sapiens
  misc_RNA (1)...(19): siRNA sense strand
gguggaagcuuggagauga

SEQ ID NO: 1379072 - RNA, 19 nt, Homo sapiens
  misc_RNA (1)...(19): siRNA sense strand
gcagaaaugggaucagaaa

SEQ ID NO: 1379073 - RNA, 19 nt, Homo sapiens
  misc_RNA (1)...(19): siRNA sense strand
gaagaugcgcuacuuggaa

SEQ ID NO: 1379074 - RNA, 19 nt, Homo sapiens
  misc_RNA (1)...(19): siRNA sense strand
caaccuacaucaaccacaa

SEQ ID NO: 1379075 - RNA, 19 nt, Homo sapiens
  misc_RNA (1)...(19): siRNA sense strand
ggagccacauaccaagaua

SEQ ID NO: 1379076 - RNA, 19 nt, Homo sapiens
  misc_RNA (1)...(19): siRNA sense strand
uaaguacuccucucaguuu

SEQ ID NO: 1379077 - RNA, 19 nt, Homo sapiens
  misc_RNA (1)...(19): siRNA sense strand
gucagaagcuggacucuca

SEQ ID NO: 1379078 - RNA, 19 nt, Homo sapiens
  misc_RNA (1)...(19): siRNA sense strand
ggaagaagaagaggaagaa

SEQ ID NO: 1379079 - RNA, 19 nt, Homo sapiens
  misc_RNA (1)...(19): siRNA sense strand
ugagugagacugccaauga

SEQ ID NO: 1379080 - RNA, 19 nt, Homo sapiens
  misc_RNA (1)...(19): siRNA sense strand
aagaagaggaagaaacuua

SEQ ID NO: 1379081 - RNA, 19 nt, Homo sapiens
  misc_RNA (1)...(19): siRNA sense strand
cgacauggauaagaaugaa

SEQ ID NO: 1379082 - RNA, 19 nt, Homo sapiens
  misc_RNA (1)...(19): siRNA sense strand
gaaagagagagaacgcauu

SEQ ID NO: 1379083 - RNA, 19 nt, Homo sapiens
  misc_RNA (1)...(19): siRNA sense strand
cacaggacauugaguguug

SEQ ID NO: 1379084 - RNA, 19 nt, Homo sapiens
  misc_RNA (1)...(19): siRNA sense strand
agaaugaaaucgccucugu

SEQ ID NO: 1379085 - RNA, 19 nt, Homo sapiens
  misc_RNA (1)...(19): siRNA sense strand
caaauaaguacuccucuca

SEQ ID NO: 1379086 - RNA, 19 nt, Homo sapiens
  misc_RNA (1)...(19): siRNA sense strand
uaagagugccaaacagaaa

SEQ ID NO: 1379087 - RNA, 19 nt, Homo sapiens
  misc_RNA (1)...(19): siRNA sense strand
ggaaggaaagauacaacuu

SEQ ID NO: 1379088 - RNA, 19 nt, Homo sapiens
  misc_RNA (1)...(19): siRNA sense strand
gaugauauugaccuuauug

SEQ ID NO: 1379089 - RNA, 19 nt, Homo sapiens
  misc_RNA (1)...(19): siRNA sense strand
ggaggaagaagaggaagaa

SEQ ID NO: 1379090 - RNA, 19 nt, Homo sapiens
  misc_RNA (1)...(19): siRNA sense strand
caagauaagagguacacaa

SEQ ID NO: 1379091 - RNA, 19 nt, Homo sapiens
  misc_RNA (1)...(19): siRNA sense strand
gaaccuccgcagagacaaa

SEQ ID NO: 1379092 - RNA, 19 nt, Homo sapiens
  misc_RNA (1)...(19): siRNA sense strand
ggagaugauauugaccuua

SEQ ID NO: 1379093 - RNA, 19 nt, Homo sapiens
  misc_RNA (1)...(19): siRNA sense strand
gacaggagccacauaccaa

SEQ ID NO: 1379094 - RNA, 19 nt, Homo sapiens
  misc_RNA (1)...(19): siRNA sense strand
ggaagaggaggaggaagaa

SEQ ID NO: 1379095 - RNA, 19 nt, Homo sapiens
  misc_RNA (1)...(19): siRNA sense strand
gaagaacaacagcuacaag

SEQ ID NO: 1379096 - RNA, 19 nt, Homo sapiens
  misc_RNA (1)...(19): siRNA sense strand
gagacaacucugacuuuga

SEQ ID NO: 1379097 - RNA, 19 nt, Homo sapiens
  misc_RNA (1)...(19): siRNA sense strand
agagguacacaaauaagua

SEQ ID NO: 1379098 - RNA, 19 nt, Homo sapiens
  misc_RNA (1)...(19): siRNA sense strand
ggaggaggaagaagaggaa

SEQ ID NO: 1379099 - RNA, 19 nt, Homo sapiens
  misc_RNA (1)...(19): siRNA sense strand
ccuagaauacuacgacaaa

SEQ ID NO: 1379100 - RNA, 19 nt, Homo sapiens
  misc_RNA (1)...(19): siRNA sense strand
aagauaagagguacacaaa

SEQ ID NO: 1379101 - RNA, 19 nt, Homo sapiens
  misc_RNA (1)...(19): siRNA sense strand
gaagaagaagaggaagaaa

SEQ ID NO: 1379102 - RNA, 19 nt, Homo sapiens
  misc_RNA (1)...(19): siRNA sense strand
gaagcuuggagaugauauu

SEQ ID NO: 1379103 - RNA, 19 nt, Homo sapiens
  misc_RNA (1)...(19): siRNA sense strand
agacaacucugacuuugac

SEQ ID NO: 1379104 - RNA, 19 nt, Homo sapiens
  misc_RNA (1)...(19): siRNA sense strand
ccacauaccaagauaagag

SEQ ID NO: 1379105 - RNA, 19 nt, Homo sapiens
  misc_RNA (1)...(19): siRNA sense strand
agaagaggaagaaacuuaa

SEQ ID NO: 1379106 - RNA, 19 nt, Homo sapiens
  misc_RNA (1)...(19): siRNA sense strand
ugaugaagaugaggaggaa

SEQ ID NO: 1379107 - RNA, 19 nt, Homo sapiens
  misc_RNA (1)...(19): siRNA sense strand
guggaagucaauaugcuua

SEQ ID NO: 1379108 - RNA, 19 nt, Homo sapiens
  misc_RNA (1)...(19): siRNA sense strand
gaaugaaaucgccucuguu

SEQ ID NO: 1379109 - RNA, 19 nt, Homo sapiens
  misc_RNA (1)...(19): siRNA sense strand
cuacaucaaccacaauuuc

SEQ ID NO: 1379110 - RNA, 19 nt, Homo sapiens
  misc_RNA (1)...(19): siRNA sense strand
ggacaggagccacauacca

SEQ ID NO: 1379111 - RNA, 19 nt, Homo sapiens
  misc_RNA (1)...(19): siRNA sense strand
gagcaucaagcgcaucuuc

SEQ ID NO: 1379112 - RNA, 19 nt, Homo sapiens
  misc_RNA (1)...(19): siRNA sense strand
ccaaacagaaagagagaga

SEQ ID NO: 1379113 - RNA, 19 nt, Homo sapiens
  misc_RNA (1)...(19): siRNA sense strand
caaagaucgucggaacaug

SEQ ID NO: 1379114 - RNA, 19 nt, Homo sapiens
  misc_RNA (1)...(19): siRNA sense strand
gaauguguuugccacugau

SEQ ID NO: 1379115 - RNA, 19 nt, Homo sapiens
  misc_RNA (1)...(19): siRNA sense strand
ugaugaagaugcgcuacuu

SEQ ID NO: 1379116 - RNA, 19 nt, Homo sapiens
  misc_RNA (1)...(19): siRNA sense strand
ggaagugaaagaggaaaug

SEQ ID NO: 1379117 - RNA, 19 nt, Homo sapiens
  misc_RNA (1)...(19): siRNA sense strand
agaaaugggaucagaaauc

SEQ ID NO: 1379118 - RNA, 19 nt, Homo sapiens
  misc_RNA (1)...(19): siRNA sense strand
gggauuccaggcacuguaa

SEQ ID NO: 1379119 - RNA, 19 nt, Homo sapiens
  misc_RNA (1)...(19): siRNA sense strand
caacaucaagacacucaau

SEQ ID NO: 1379120 - RNA, 19 nt, Homo sapiens
  misc_RNA (1)...(19): siRNA sense strand
aaugaaaucgccucuguug

SEQ ID NO: 1379121 - RNA, 19 nt, Homo sapiens
  misc_RNA (1)...(19): siRNA sense strand
ccagcggaaucgaaugaga

SEQ ID NO: 1379122 - RNA, 19 nt, Homo sapiens
  misc_RNA (1)...(19): siRNA sense strand
ggaggaagaggaggaggaa

SEQ ID NO: 1379123 - RNA, 19 nt, Homo sapiens
  misc_RNA (1)...(19): siRNA sense strand
aauaaguacuccucucagu

SEQ ID NO: 1379124 - RNA, 19 nt, Homo sapiens
  misc_RNA (1)...(19): siRNA sense strand
aaagagagagaacgcauuc

SEQ ID NO: 1379125 - RNA, 19 nt, Homo sapiens
  misc_RNA (1)...(19): siRNA sense strand
caguugaaguucguaguga

SEQ ID NO: 1379126 - RNA, 19 nt, Homo sapiens
  misc_RNA (1)...(19): siRNA sense strand
aggacgacauggauaagaa

SEQ ID NO: 1379127 - RNA, 19 nt, Homo sapiens
  misc_RNA (1)...(19): siRNA sense strand
ggaggcaaccuacaucaac

SEQ ID NO: 1379128 - RNA, 19 nt, Homo sapiens
  misc_RNA (1)...(19): siRNA sense strand
gucggaacauguugcaguu

SEQ ID NO: 1379129 - RNA, 19 nt, Homo sapiens
  misc_RNA (1)...(19): siRNA sense strand
caagcuugguuaugugucu

SEQ ID NO: 1379130 - RNA, 19 nt, Homo sapiens
  misc_RNA (1)...(19): siRNA sense strand
ugagcacgauggcgucaug

SEQ ID NO: 1379131 - RNA, 19 nt, Homo sapiens
  misc_RNA (1)...(19): siRNA sense strand
ggacgacauggauaagaau

SEQ ID NO: 1379132 - RNA, 19 nt, Homo sapiens
  misc_RNA (1)...(19): siRNA sense strand
gagugagacugccaaugag

SEQ ID NO: 1379133 - RNA, 19 nt, Homo sapiens
  misc_RNA (1)...(19): siRNA sense strand
ucaguguauuccugggaua

SEQ ID NO: 1379134 - RNA, 19 nt, Homo sapiens
  misc_RNA (1)...(19): siRNA sense strand
cagaaacaauuugggguua

SEQ ID NO: 1379135 - RNA, 19 nt, Homo sapiens
  misc_RNA (1)...(19): siRNA sense strand
gagaucggcuaggaaaggu

SEQ ID NO: 1379136 - RNA, 19 nt, Homo sapiens
  misc_RNA (1)...(19): siRNA sense strand
guguauuccugggauauug

SEQ ID NO: 1379137 - RNA, 19 nt, Homo sapiens
  misc_RNA (1)...(19): siRNA sense strand
gaagaagaggaagaaacuu

SEQ ID NO: 1379138 - RNA, 19 nt, Homo sapiens
  misc_RNA (1)...(19): siRNA sense strand
cccagcaguucaagccuaa

SEQ ID NO: 1379139 - RNA, 19 nt, Homo sapiens
  misc_RNA (1)...(19): siRNA sense strand
gcuuggagaugauauugac

SEQ ID NO: 1379140 - RNA, 19 nt, Homo sapiens
  misc_RNA (1)...(19): siRNA sense strand
aaagaucgucggaacaugu

SEQ ID NO: 1379141 - RNA, 19 nt, Homo sapiens
  misc_RNA (1)...(19): siRNA sense strand
gcacuguaauggcguugac

SEQ ID NO: 1379142 - RNA, 19 nt, Homo sapiens
  misc_RNA (1)...(19): siRNA sense strand
gaauggggaaggaaagaua

SEQ ID NO: 1379143 - RNA, 19 nt, Homo sapiens
  misc_RNA (1)...(19): siRNA sense strand
gaugaagaugcgcuacuug

SEQ ID NO: 1379144 - RNA, 19 nt, Homo sapiens
  misc_RNA (1)...(19): siRNA sense strand
auacagcgcgcacacagaa

SEQ ID NO: 1379145 - RNA, 19 nt, Homo sapiens
  misc_RNA (1)...(19): siRNA sense strand
gagccacauaccaagauaa

SEQ ID NO: 1379146 - RNA, 19 nt, Homo sapiens
  misc_RNA (1)...(19): siRNA sense strand
ggagaucggcuaggaaagg

SEQ ID NO: 1379147 - RNA, 19 nt, Homo sapiens
  misc_RNA (1)...(19): siRNA sense strand
ggauauugucguccagaga

SEQ ID NO: 1379148 - RNA, 19 nt, Homo sapiens
  misc_RNA (1)...(19): siRNA sense strand
uaucagagccacaggacau

SEQ ID NO: 1379149 - RNA, 19 nt, Homo sapiens
  misc_RNA (1)...(19): siRNA sense strand
ccuaagagugccaaacaga

SEQ ID NO: 1379150 - RNA, 19 nt, Homo sapiens
  misc_RNA (1)...(19): siRNA sense strand
agaggaagaagaagaggaa

SEQ ID NO: 1379151 - RNA, 19 nt, Homo sapiens
  misc_RNA (1)...(19): siRNA sense strand
ccucaagcuugguuaugug

SEQ ID NO: 1379152 - RNA, 19 nt, Homo sapiens
  misc_RNA (1)...(19): siRNA sense strand
guacuccucucaguuuggu

SEQ ID NO: 1379153 - RNA, 19 nt, Homo sapiens
  misc_RNA (1)...(19): siRNA sense strand
gaagugaaagaggaaaugg

SEQ ID NO: 1379154 - RNA, 19 nt, Homo sapiens
  misc_RNA (1)...(19): siRNA sense strand
aggcagaaaugggaucaga

SEQ ID NO: 1379155 - RNA, 19 nt, Homo sapiens
  misc_RNA (1)...(19): siRNA sense strand
cuaagagugccaaacagaa

SEQ ID NO: 1379156 - RNA, 19 nt, Homo sapiens
  misc_RNA (1)...(19): siRNA sense strand
aagaagaggaagaagaaga

SEQ ID NO: 1379157 - RNA, 19 nt, Homo sapiens
  misc_RNA (1)...(19): siRNA sense strand
aaggagaucggcuaggaaa

SEQ ID NO: 1379158 - RNA, 19 nt, Homo sapiens
  misc_RNA (1)...(19): siRNA sense strand
agaagaagaggaagaaacu

SEQ ID NO: 1379159 - RNA, 19 nt, Homo sapiens
  misc_RNA (1)...(19): siRNA sense strand
ucaguuuggugguggaagu

SEQ ID NO: 1379160 - RNA, 19 nt, Homo sapiens
  misc_RNA (1)...(19): siRNA sense strand
agaacaacagcuacaaguu

SEQ ID NO: 1379161 - RNA, 19 nt, Homo sapiens
  misc_RNA (1)...(19): siRNA sense strand
ggauguagaugauuucuuu

SEQ ID NO: 1379162 - RNA, 19 nt, Homo sapiens
  misc_RNA (1)...(19): siRNA sense strand
gaacauuucuuuuggagua

SEQ ID NO: 1379163 - RNA, 19 nt, Homo sapiens
  misc_RNA (1)...(19): siRNA sense strand
gaugaagaccucaaacuuu

SEQ ID NO: 1379164 - RNA, 19 nt, Homo sapiens
  misc_RNA (1)...(19): siRNA sense strand
cgaaacuucccaacaauua

SEQ ID NO: 1379165 - RNA, 19 nt, Homo sapiens
  misc_RNA (1)...(19): siRNA sense strand
gcagaugauuacaauagaa

SEQ ID NO: 1379166 - RNA, 19 nt, Homo sapiens
  misc_RNA (1)...(19): siRNA sense strand
gaagaauucacaaagauga

SEQ ID NO: 1379167 - RNA, 19 nt, Homo sapiens
  misc_RNA (1)...(19): siRNA sense strand
caagaagaguugcugcauu

SEQ ID NO: 1379168 - RNA, 19 nt, Homo sapiens
  misc_RNA (1)...(19): siRNA sense strand
uaaaucagcagauggagua

SEQ ID NO: 1379169 - RNA, 19 nt, Homo sapiens
  misc_RNA (1)...(19): siRNA sense strand
gaacucaggauucuacaga

SEQ ID NO: 1379170 - RNA, 19 nt, Homo sapiens
  misc_RNA (1)...(19): siRNA sense strand
gcagauggaguaaucguuu

SEQ ID NO: 1379171 - RNA, 19 nt, Homo sapiens
  misc_RNA (1)...(19): siRNA sense strand
ggaauauaaucaagaugug

SEQ ID NO: 1379172 - RNA, 19 nt, Homo sapiens
  misc_RNA (1)...(19): siRNA sense strand
ggccgaaacuucccaacaa

SEQ ID NO: 1379173 - RNA, 19 nt, Homo sapiens
  misc_RNA (1)...(19): siRNA sense strand
gcuaauaaagcacuggaua

SEQ ID NO: 1379174 - RNA, 19 nt, Homo sapiens
  misc_RNA (1)...(19): siRNA sense strand
ggaugcaucugcuaaaucu

SEQ ID NO: 1379175 - RNA, 19 nt, Homo sapiens
  misc_RNA (1)...(19): siRNA sense strand
acuggaagcugaauauuug

SEQ ID NO: 1379176 - RNA, 19 nt, Homo sapiens
  misc_RNA (1)...(19): siRNA sense strand
gaaggaagaauucacaaag

SEQ ID NO: 1379177 - RNA, 19 nt, Homo sapiens
  misc_RNA (1)...(19): siRNA sense strand
aagagaaacuugaagacuu

SEQ ID NO: 1379178 - RNA, 19 nt, Homo sapiens
  misc_RNA (1)...(19): siRNA sense strand
ggucacuaguggauuauga

SEQ ID NO: 1379179 - RNA, 19 nt, Homo sapiens
  misc_RNA (1)...(19): siRNA sense strand
gaguaaaggauguagauga

SEQ ID NO: 1379180 - RNA, 19 nt, Homo sapiens
  misc_RNA (1)...(19): siRNA sense strand
gaacgaacauuucuuuugg

SEQ ID NO: 1379181 - RNA, 19 nt, Homo sapiens
  misc_RNA (1)...(19): siRNA sense strand
ucaggauucuacagauaua

SEQ ID NO: 1379182 - RNA, 19 nt, Homo sapiens
  misc_RNA (1)...(19): siRNA sense strand
cuacagauauaugcaaguu

SEQ ID NO: 1379183 - RNA, 19 nt, Homo sapiens
  misc_RNA (1)...(19): siRNA sense strand
aagaagaguugcugcauuc

SEQ ID NO: 1379184 - RNA, 19 nt, Homo sapiens
  misc_RNA (1)...(19): siRNA sense strand
ggaacuggaagcugaauau

SEQ ID NO: 1379185 - RNA, 19 nt, Homo sapiens
  misc_RNA (1)...(19): siRNA sense strand
gcacgagugucugcugaug

SEQ ID NO: 1379186 - RNA, 19 nt, Homo sapiens
  misc_RNA (1)...(19): siRNA sense strand
aguaaucguuucaggagua

SEQ ID NO: 1379187 - RNA, 19 nt, Homo sapiens
  misc_RNA (1)...(19): siRNA sense strand
gaaacuucccaacaauuau

SEQ ID NO: 1379188 - RNA, 19 nt, Homo sapiens
  misc_RNA (1)...(19): siRNA sense strand
aaauuuccaugucuucuug

SEQ ID NO: 1379189 - RNA, 19 nt, Homo sapiens
  misc_RNA (1)...(19): siRNA sense strand
cuaauaaagcacuggauaa

SEQ ID NO: 1379190 - RNA, 19 nt, Homo sapiens
  misc_RNA (1)...(19): siRNA sense strand
aaggaagaauucacaaaga

SEQ ID NO: 1379191 - RNA, 19 nt, Homo sapiens
  misc_RNA (1)...(19): siRNA sense strand
gaacuggaagcugaauauu

SEQ ID NO: 1379192 - RNA, 19 nt, Homo sapiens
  misc_RNA (1)...(19): siRNA sense strand
ggaagaauucacaaagaug

SEQ ID NO: 1379193 - RNA, 19 nt, Homo sapiens
  misc_RNA (1)...(19): siRNA sense strand
gaagacaguugcgaugcau

SEQ ID NO: 1379194 - RNA, 19 nt, Homo sapiens
  misc_RNA (1)...(19): siRNA sense strand
gaugaaacaggaacuggaa

SEQ ID NO: 1379195 - RNA, 19 nt, Homo sapiens
  misc_RNA (1)...(19): siRNA sense strand
guaaucguuucaggaguaa

SEQ ID NO: 1379196 - RNA, 19 nt, Homo sapiens
  misc_RNA (1)...(19): siRNA sense strand
acucaggauucuacagaua

SEQ ID NO: 1379197 - RNA, 19 nt, Homo sapiens
  misc_RNA (1)...(19): siRNA sense strand
ccucaaacuuucugaucuu

SEQ ID NO: 1379198 - RNA, 19 nt, Homo sapiens
  misc_RNA (1)...(19): siRNA sense strand
aagaguugcugcauucaga

SEQ ID NO: 1379199 - RNA, 19 nt, Homo sapiens
  misc_RNA (1)...(19): siRNA sense strand
ggaguaucauaaccgaguu

SEQ ID NO: 1379200 - RNA, 19 nt, Homo sapiens
  misc_RNA (1)...(19): siRNA sense strand
aaaggguaaucuacaguug

SEQ ID NO: 1379201 - RNA, 19 nt, Homo sapiens
  misc_RNA (1)...(19): siRNA sense strand
aaagugcugcagaugauua

SEQ ID NO: 1379202 - RNA, 19 nt, Homo sapiens
  misc_RNA (1)...(19): siRNA sense strand
caaaagugcugcagaugau

SEQ ID NO: 1379203 - RNA, 19 nt, Homo sapiens
  misc_RNA (1)...(19): siRNA sense strand
guuaaauggagacacauaa

SEQ ID NO: 1379204 - RNA, 19 nt, Homo sapiens
  misc_RNA (1)...(19): siRNA sense strand
caaaggguaaucuacaguu

SEQ ID NO: 1379205 - RNA, 19 nt, Homo sapiens
  misc_RNA (1)...(19): siRNA sense strand
augaagaccucaaacuuuc

SEQ ID NO: 1379206 - RNA, 19 nt, Homo sapiens
  misc_RNA (1)...(19): siRNA sense strand
ugcuaaaucugauagaaug

SEQ ID NO: 1379207 - RNA, 19 nt, Homo sapiens
  misc_RNA (1)...(19): siRNA sense strand
cgaaggaagaauucacaaa

SEQ ID NO: 1379208 - RNA, 19 nt, Homo sapiens
  misc_RNA (1)...(19): siRNA sense strand
aguaaaggauguagaugau

SEQ ID NO: 1379209 - RNA, 19 nt, Homo sapiens
  misc_RNA (1)...(19): siRNA sense strand
gccgaaacuucccaacaau

SEQ ID NO: 1379210 - RNA, 19 nt, Homo sapiens
  misc_RNA (1)...(19): siRNA sense strand
auaaagcacuggauaaagc

SEQ ID NO: 1379211 - RNA, 19 nt, Homo sapiens
  misc_RNA (1)...(19): siRNA sense strand
gagcacgaacgaacauuuc

SEQ ID NO: 1379212 - RNA, 19 nt, Homo sapiens
  misc_RNA (1)...(19): siRNA sense strand
aggaagaauucacaaagau

SEQ ID NO: 1379213 - RNA, 19 nt, Homo sapiens
  misc_RNA (1)...(19): siRNA sense strand
caugucuucuuggaauaua

SEQ ID NO: 1379214 - RNA, 19 nt, Homo sapiens
  misc_RNA (1)...(19): siRNA sense strand
gcacgaacgaacauuucuu

SEQ ID NO: 1379215 - RNA, 19 nt, Homo sapiens
  misc_RNA (1)...(19): siRNA sense strand
cacgaacgaacauuucuuu

SEQ ID NO: 1379216 - RNA, 19 nt, Homo sapiens
  misc_RNA (1)...(19): siRNA sense strand
gaacugaagcaugcaaagg

SEQ ID NO: 1379217 - RNA, 19 nt, Homo sapiens
  misc_RNA (1)...(19): siRNA sense strand
ggauaaagcaagagcaaaa

SEQ ID NO: 1379218 - RNA, 19 nt, Homo sapiens
  misc_RNA (1)...(19): siRNA sense strand
ugaugaagaccucaaacuu

SEQ ID NO: 1379219 - RNA, 19 nt, Homo sapiens
  misc_RNA (1)...(19): siRNA sense strand
acgagugucugcugaugaa

SEQ ID NO: 1379220 - RNA, 19 nt, Homo sapiens
  misc_RNA (1)...(19): siRNA sense strand
uaaggaugcaucugcuaaa

SEQ ID NO: 1379221 - RNA, 19 nt, Homo sapiens
  misc_RNA (1)...(19): siRNA sense strand
gaugugagugugcgaggaa

SEQ ID NO: 1379222 - RNA, 19 nt, Homo sapiens
  misc_RNA (1)...(19): siRNA sense strand
gcaaaggguaaucuacagu

SEQ ID NO: 1379223 - RNA, 19 nt, Homo sapiens
  misc_RNA (1)...(19): siRNA sense strand
ccacaaaagugcugcagau

SEQ ID NO: 1379224 - RNA, 19 nt, Homo sapiens
  misc_RNA (1)...(19): siRNA sense strand
gguuaaaucagcagaugga

SEQ ID NO: 1379225 - RNA, 19 nt, Homo sapiens
  misc_RNA (1)...(19): siRNA sense strand
gcaugaaguguuccugugu

SEQ ID NO: 1379226 - RNA, 19 nt, Homo sapiens
  misc_RNA (1)...(19): siRNA sense strand
uuaaggaugcaucugcuaa

SEQ ID NO: 1379227 - RNA, 19 nt, Homo sapiens
  misc_RNA (1)...(19): siRNA sense strand
guaaaggauguagaugauu

SEQ ID NO: 1379228 - RNA, 19 nt, Homo sapiens
  misc_RNA (1)...(19): siRNA sense strand
cagauggaguaaucguuuc

SEQ ID NO: 1379229 - RNA, 19 nt, Homo sapiens
  misc_RNA (1)...(19): siRNA sense strand
gcaugcaaaggguaaucua

SEQ ID NO: 1379230 - RNA, 19 nt, Homo sapiens
  misc_RNA (1)...(19): siRNA sense strand
aaacuucccaacaauuaug

SEQ ID NO: 1379231 - RNA, 19 nt, Homo sapiens
  misc_RNA (1)...(19): siRNA sense strand
gaagaccucaaacuuucug

SEQ ID NO: 1379232 - RNA, 19 nt, Homo sapiens
  misc_RNA (1)...(19): siRNA sense strand
ugaagcaugcaaaggguaa

SEQ ID NO: 1379233 - RNA, 19 nt, Homo sapiens
  misc_RNA (1)...(19): siRNA sense strand
gaucuccuguaucgaaggu

SEQ ID NO: 1379234 - RNA, 19 nt, Homo sapiens
  misc_RNA (1)...(19): siRNA sense strand
gacaagaucccacaaaagu

SEQ ID NO: 1379235 - RNA, 19 nt, Homo sapiens
  misc_RNA (1)...(19): siRNA sense strand
ucgaaggucuaggucacua

SEQ ID NO: 1379236 - RNA, 19 nt, Homo sapiens
  misc_RNA (1)...(19): siRNA sense strand
ugagcacgaacgaacauuu

SEQ ID NO: 1379237 - RNA, 19 nt, Homo sapiens
  misc_RNA (1)...(19): siRNA sense strand
agacaguugcgaugcauga

SEQ ID NO: 1379238 - RNA, 19 nt, Homo sapiens
  misc_RNA (1)...(19): siRNA sense strand
ucacuaguggauuaugaaa

SEQ ID NO: 1379239 - RNA, 19 nt, Homo sapiens
  misc_RNA (1)...(19): siRNA sense strand
gaccucaaacuuucugauc

SEQ ID NO: 1379240 - RNA, 19 nt, Homo sapiens
  misc_RNA (1)...(19): siRNA sense strand
agaagacaguugcgaugca

SEQ ID NO: 1379241 - RNA, 19 nt, Homo sapiens
  misc_RNA (1)...(19): siRNA sense strand
caguugcgaugcaugaagu

SEQ ID NO: 1379242 - RNA, 19 nt, Homo sapiens
  misc_RNA (1)...(19): siRNA sense strand
ccgaaacuucccaacaauu

SEQ ID NO: 1379243 - RNA, 19 nt, Homo sapiens
  misc_RNA (1)...(19): siRNA sense strand
ugcagaugauuacaauaga

SEQ ID NO: 1379244 - RNA, 19 nt, Homo sapiens
  misc_RNA (1)...(19): siRNA sense strand
ucugauagaaugacaagau

SEQ ID NO: 1379245 - RNA, 19 nt, Homo sapiens
  misc_RNA (1)...(19): siRNA sense strand
aaggaugcaucugcuaaau

SEQ ID NO: 1379246 - RNA, 19 nt, Homo sapiens
  misc_RNA (1)...(19): siRNA sense strand
gacgaaggaagaauucaca

SEQ ID NO: 1379247 - RNA, 19 nt, Homo sapiens
  misc_RNA (1)...(19): siRNA sense strand
gcuaaaucugauagaauga

SEQ ID NO: 1379248 - RNA, 19 nt, Homo sapiens
  misc_RNA (1)...(19): siRNA sense strand
uuuaagacaagaagaguug

SEQ ID NO: 1379249 - RNA, 19 nt, Homo sapiens
  misc_RNA (1)...(19): siRNA sense strand
aauagaagcacgagugucu

SEQ ID NO: 1379250 - RNA, 19 nt, Homo sapiens
  misc_RNA (1)...(19): siRNA sense strand
cugcagaugauuacaauag

SEQ ID NO: 1379251 - RNA, 19 nt, Homo sapiens
  misc_RNA (1)...(19): siRNA sense strand
cugauagaaugacaagauc

SEQ ID NO: 1379252 - RNA, 19 nt, Homo sapiens
  misc_RNA (1)...(19): siRNA sense strand
ucugcuaaaucugauagaa

SEQ ID NO: 1379253 - RNA, 19 nt, Homo sapiens
  misc_RNA (1)...(19): siRNA sense strand
gagugucugcugaugaaga

SEQ ID NO: 1379254 - RNA, 19 nt, Homo sapiens
  misc_RNA (1)...(19): siRNA sense strand
ggaguaaaggauguagaug

SEQ ID NO: 1379255 - RNA, 19 nt, Homo sapiens
  misc_RNA (1)...(19): siRNA sense strand
aacuggaagcugaauauuu

SEQ ID NO: 1379256 - RNA, 19 nt, Homo sapiens
  misc_RNA (1)...(19): siRNA sense strand
gaguugcugcauucagaaa

SEQ ID NO: 1379257 - RNA, 19 nt, Homo sapiens
  misc_RNA (1)...(19): siRNA sense strand
gaagaguugcugcauucag

SEQ ID NO: 1379258 - RNA, 19 nt, Homo sapiens
  misc_RNA (1)...(19): siRNA sense strand
gcaaaacaagaacuuauag

SEQ ID NO: 1379259 - RNA, 19 nt, Homo sapiens
  misc_RNA (1)...(19): siRNA sense strand
cucaaacuuucugaucuuu

SEQ ID NO: 1379260 - RNA, 19 nt, Homo sapiens
  misc_RNA (1)...(19): siRNA sense strand
aaauaucugagucugcaaa

SEQ ID NO: 1379261 - RNA, 19 nt, Homo sapiens
  misc_RNA (1)...(19): siRNA sense strand
ggauguagaugauuucuuu

SEQ ID NO: 1379262 - RNA, 19 nt, Homo sapiens
  misc_RNA (1)...(19): siRNA sense strand
gaauuuaucuggcuucaug

SEQ ID NO: 1379263 - RNA, 19 nt, Homo sapiens
  misc_RNA (1)...(19): siRNA sense strand
gaacauuucuuuuggagua

SEQ ID NO: 1379264 - RNA, 19 nt, Homo sapiens
  misc_RNA (1)...(19): siRNA sense strand
gaagaggaccgcggacuua

SEQ ID NO: 1379265 - RNA, 19 nt, Homo sapiens
  misc_RNA (1)...(19): siRNA sense strand
gaugaagaccucaaacuuu

SEQ ID NO: 1379266 - RNA, 19 nt, Homo sapiens
  misc_RNA (1)...(19): siRNA sense strand
cgaaacuucccaacaauua

SEQ ID NO: 1379267 - RNA, 19 nt, Homo sapiens
  misc_RNA (1)...(19): siRNA sense strand
ggacuuaaagcaauaaaug

SEQ ID NO: 1379268 - RNA, 19 nt, Homo sapiens
  misc_RNA (1)...(19): siRNA sense strand
gcagaugauuacaauagaa

SEQ ID NO: 1379269 - RNA, 19 nt, Homo sapiens
  misc_RNA (1)...(19): siRNA sense strand
ggacauuucugaugcucuu

SEQ ID NO: 1379270 - RNA, 19 nt, Homo sapiens
  misc_RNA (1)...(19): siRNA sense strand
caagaagaguugcugcauu

SEQ ID NO: 1379271 - RNA, 19 nt, Homo sapiens
  misc_RNA (1)...(19): siRNA sense strand
gaagaauucacaaagauga

SEQ ID NO: 1379272 - RNA, 19 nt, Homo sapiens
  misc_RNA (1)...(19): siRNA sense strand
uaaaucagcagauggagua

SEQ ID NO: 1379273 - RNA, 19 nt, Homo sapiens
  misc_RNA (1)...(19): siRNA sense strand
gaacucaggauucuacaga

SEQ ID NO: 1379274 - RNA, 19 nt, Homo sapiens
  misc_RNA (1)...(19): siRNA sense strand
gcagauggaguaaucguuu

SEQ ID NO: 1379275 - RNA, 19 nt, Homo sapiens
  misc_RNA (1)...(19): siRNA sense strand
ggaauauaaucaagaugug

SEQ ID NO: 1379276 - RNA, 19 nt, Homo sapiens
  misc_RNA (1)...(19): siRNA sense strand
ggccgaaacuucccaacaa

SEQ ID NO: 1379277 - RNA, 19 nt, Homo sapiens
  misc_RNA (1)...(19): siRNA sense strand
gcuaauaaagcacuggaua

SEQ ID NO: 1379278 - RNA, 19 nt, Homo sapiens
  misc_RNA (1)...(19): siRNA sense strand
ggaugcaucugcuaaaucu

SEQ ID NO: 1379279 - RNA, 19 nt, Homo sapiens
  misc_RNA (1)...(19): siRNA sense strand
gaagcuuggugaaggagaa

SEQ ID NO: 1379280 - RNA, 19 nt, Homo sapiens
  misc_RNA (1)...(19): siRNA sense strand
acuggaagcugaauauuug

SEQ ID NO: 1379281 - RNA, 19 nt, Homo sapiens
  misc_RNA (1)...(19): siRNA sense strand
gaaggagaagggucaauga

SEQ ID NO: 1379282 - RNA, 19 nt, Homo sapiens
  misc_RNA (1)...(19): siRNA sense strand
gaaggaagaauucacaaag

SEQ ID NO: 1379283 - RNA, 19 nt, Homo sapiens
  misc_RNA (1)...(19): siRNA sense strand
aagagaaacuugaagacuu

SEQ ID NO: 1379284 - RNA, 19 nt, Homo sapiens
  misc_RNA (1)...(19): siRNA sense strand
ggucacuaguggauuauga

SEQ ID NO: 1379285 - RNA, 19 nt, Homo sapiens
  misc_RNA (1)...(19): siRNA sense strand
gaguaaaggauguagauga

SEQ ID NO: 1379286 - RNA, 19 nt, Homo sapiens
  misc_RNA (1)...(19): siRNA sense strand
gaacgaacauuucuuuugg

SEQ ID NO: 1379287 - RNA, 19 nt, Homo sapiens
  misc_RNA (1)...(19): siRNA sense strand
ucaggauucuacagauaua

SEQ ID NO: 1379288 - RNA, 19 nt, Homo sapiens
  misc_RNA (1)...(19): siRNA sense strand
agaguucauugccaaauuu

SEQ ID NO: 1379289 - RNA, 19 nt, Homo sapiens
  misc_RNA (1)...(19): siRNA sense strand
aagaagaguugcugcauuc

SEQ ID NO: 1379290 - RNA, 19 nt, Homo sapiens
  misc_RNA (1)...(19): siRNA sense strand
cuacagauauaugcaaguu

SEQ ID NO: 1379291 - RNA, 19 nt, Homo sapiens
  misc_RNA (1)...(19): siRNA sense strand
ggaacuggaagcugaauau

SEQ ID NO: 1379292 - RNA, 19 nt, Homo sapiens
  misc_RNA (1)...(19): siRNA sense strand
ugaagacuaugcagguuau

SEQ ID NO: 1379293 - RNA, 19 nt, Homo sapiens
  misc_RNA (1)...(19): siRNA sense strand
gcacgagugucugcugaug

SEQ ID NO: 1379294 - RNA, 19 nt, Homo sapiens
  misc_RNA (1)...(19): siRNA sense strand
cuaugcagguuauaucauu

SEQ ID NO: 1379295 - RNA, 19 nt, Homo sapiens
  misc_RNA (1)...(19): siRNA sense strand
aguaaucguuucaggagua

SEQ ID NO: 1379296 - RNA, 19 nt, Homo sapiens
  misc_RNA (1)...(19): siRNA sense strand
gaaacuucccaacaauuau

SEQ ID NO: 1379297 - RNA, 19 nt, Homo sapiens
  misc_RNA (1)...(19): siRNA sense strand
aaggaagaauucacaaaga

SEQ ID NO: 1379298 - RNA, 19 nt, Homo sapiens
  misc_RNA (1)...(19): siRNA sense strand
cuaauaaagcacuggauaa

SEQ ID NO: 1379299 - RNA, 19 nt, Homo sapiens
  misc_RNA (1)...(19): siRNA sense strand
aaauuuccaugucuucuug

SEQ ID NO: 1379300 - RNA, 19 nt, Homo sapiens
  misc_RNA (1)...(19): siRNA sense strand
gaacuggaagcugaauauu

SEQ ID NO: 1379301 - RNA, 19 nt, Homo sapiens
  misc_RNA (1)...(19): siRNA sense strand
ggaagaauucacaaagaug

SEQ ID NO: 1379302 - RNA, 19 nt, Homo sapiens
  misc_RNA (1)...(19): siRNA sense strand
gaugaaacaggaacuggaa

SEQ ID NO: 1379303 - RNA, 19 nt, Homo sapiens
  misc_RNA (1)...(19): siRNA sense strand
gaagacaguugcgaugcau

SEQ ID NO: 1379304 - RNA, 19 nt, Homo sapiens
  misc_RNA (1)...(19): siRNA sense strand
caugauuccuuuguugaaa

SEQ ID NO: 1379305 - RNA, 19 nt, Homo sapiens
  misc_RNA (1)...(19): siRNA sense strand
acucaggauucuacagaua

SEQ ID NO: 1379306 - RNA, 19 nt, Homo sapiens
  misc_RNA (1)...(19): siRNA sense strand
guaaucguuucaggaguaa

SEQ ID NO: 1379307 - RNA, 19 nt, Homo sapiens
  misc_RNA (1)...(19): siRNA sense strand
ccgcggacuuaaagcaaua

SEQ ID NO: 1379308 - RNA, 19 nt, Homo sapiens
  misc_RNA (1)...(19): siRNA sense strand
ccucaaacuuucugaucuu

SEQ ID NO: 1379309 - RNA, 19 nt, Homo sapiens
  misc_RNA (1)...(19): siRNA sense strand
aagaguugcugcauucaga

SEQ ID NO: 1379310 - RNA, 19 nt, Homo sapiens
  misc_RNA (1)...(19): siRNA sense strand
ggaguaucauaaccgaguu

SEQ ID NO: 1379311 - RNA, 19 nt, Homo sapiens
  misc_RNA (1)...(19): siRNA sense strand
aaaggguaaucuacaguug

SEQ ID NO: 1379312 - RNA, 19 nt, Homo sapiens
  misc_RNA (1)...(19): siRNA sense strand
aaagugcugcagaugauua

SEQ ID NO: 1379313 - RNA, 19 nt, Homo sapiens
  misc_RNA (1)...(19): siRNA sense strand
aagaguucauugccaaauu

SEQ ID NO: 1379314 - RNA, 19 nt, Homo sapiens
  misc_RNA (1)...(19): siRNA sense strand
guuaaauggagacacauaa

SEQ ID NO: 1379315 - RNA, 19 nt, Homo sapiens
  misc_RNA (1)...(19): siRNA sense strand
caaaggguaaucuacaguu

SEQ ID NO: 1379316 - RNA, 19 nt, Homo sapiens
  misc_RNA (1)...(19): siRNA sense strand
augaagaccucaaacuuuc

SEQ ID NO: 1379317 - RNA, 19 nt, Homo sapiens
  misc_RNA (1)...(19): siRNA sense strand
caaaagugcugcagaugau

SEQ ID NO: 1379318 - RNA, 19 nt, Homo sapiens
  misc_RNA (1)...(19): siRNA sense strand
auguagaucuucaaaguga

SEQ ID NO: 1379319 - RNA, 19 nt, Homo sapiens
  misc_RNA (1)...(19): siRNA sense strand
cgaaggaagaauucacaaa

SEQ ID NO: 1379320 - RNA, 19 nt, Homo sapiens
  misc_RNA (1)...(19): siRNA sense strand
ugcuaaaucugauagaaug

SEQ ID NO: 1379321 - RNA, 19 nt, Homo sapiens
  misc_RNA (1)...(19): siRNA sense strand
aguaaaggauguagaugau

SEQ ID NO: 1379322 - RNA, 19 nt, Homo sapiens
  misc_RNA (1)...(19): siRNA sense strand
gccgaaacuucccaacaau

SEQ ID NO: 1379323 - RNA, 19 nt, Homo sapiens
  misc_RNA (1)...(19): siRNA sense strand
auaaagcacuggauaaagc

SEQ ID NO: 1379324 - RNA, 19 nt, Homo sapiens
  misc_RNA (1)...(19): siRNA sense strand
gcaauaaauguagaucuuc

SEQ ID NO: 1379325 - RNA, 19 nt, Homo sapiens
  misc_RNA (1)...(19): siRNA sense strand
cuucaugauuccuuuguug

SEQ ID NO: 1379326 - RNA, 19 nt, Homo sapiens
  misc_RNA (1)...(19): siRNA sense strand
gagcacgaacgaacauuuc

SEQ ID NO: 1379327 - RNA, 19 nt, Homo sapiens
  misc_RNA (1)...(19): siRNA sense strand
aggaagaauucacaaagau

SEQ ID NO: 1379328 - RNA, 19 nt, Homo sapiens
  misc_RNA (1)...(19): siRNA sense strand
caaugacgaaggaagaauu

SEQ ID NO: 1379329 - RNA, 19 nt, Homo sapiens
  misc_RNA (1)...(19): siRNA sense strand
caacaugaggaauuuaucu

SEQ ID NO: 1379330 - RNA, 19 nt, Homo sapiens
  misc_RNA (1)...(19): siRNA sense strand
gcacgaacgaacauuucuu

SEQ ID NO: 1379331 - RNA, 19 nt, Homo sapiens
  misc_RNA (1)...(19): siRNA sense strand
caugucuucuuggaauaua

SEQ ID NO: 1379332 - RNA, 19 nt, Homo sapiens
  misc_RNA (1)...(19): siRNA sense strand
uuaucuggcuucaugauuc

SEQ ID NO: 1379333 - RNA, 19 nt, Homo sapiens
  misc_RNA (1)...(19): siRNA sense strand
gaacugaagcaugcaaagg

SEQ ID NO: 1379334 - RNA, 19 nt, Homo sapiens
  misc_RNA (1)...(19): siRNA sense strand
ggauaaagcaagagcaaaa

SEQ ID NO: 1379335 - RNA, 19 nt, Homo sapiens
  misc_RNA (1)...(19): siRNA sense strand
ugaugaagaccucaaacuu

SEQ ID NO: 1379336 - RNA, 19 nt, Homo sapiens
  misc_RNA (1)...(19): siRNA sense strand
acgagugucugcugaugaa

SEQ ID NO: 1379337 - RNA, 19 nt, Homo sapiens
  misc_RNA (1)...(19): siRNA sense strand
cacgaacgaacauuucuuu

SEQ ID NO: 1379338 - RNA, 19 nt, Homo sapiens
  misc_RNA (1)...(19): siRNA sense strand
gcccggacuuccucucaga

SEQ ID NO: 1379339 - RNA, 19 nt, Homo sapiens
  misc_RNA (1)...(19): siRNA sense strand
gcaccaccaagaccugauu

SEQ ID NO: 1379340 - RNA, 19 nt, Homo sapiens
  misc_RNA (1)...(19): siRNA sense strand
acagaagcuuggugaagga

SEQ ID NO: 1379341 - RNA, 19 nt, Homo sapiens
  misc_RNA (1)...(19): siRNA sense strand
uaaggaugcaucugcuaaa

SEQ ID NO: 1379342 - RNA, 19 nt, Homo sapiens
  misc_RNA (1)...(19): siRNA sense strand
gaugugagugugcgaggaa

SEQ ID NO: 1379343 - RNA, 19 nt, Homo sapiens
  misc_RNA (1)...(19): siRNA sense strand
gcaaaggguaaucuacagu

SEQ ID NO: 1379344 - RNA, 19 nt, Homo sapiens
  misc_RNA (1)...(19): siRNA sense strand
gaggaccgcggacuuaaag

SEQ ID NO: 1379345 - RNA, 19 nt, Homo sapiens
  misc_RNA (1)...(19): siRNA sense strand
ccacaaaagugcugcagau

SEQ ID NO: 1379346 - RNA, 19 nt, Homo sapiens
  misc_RNA (1)...(19): siRNA sense strand
caaagaguucauugccaaa

SEQ ID NO: 1379347 - RNA, 19 nt, Homo sapiens
  misc_RNA (1)...(19): siRNA sense strand
aaaauucacuguucacaca

SEQ ID NO: 1379348 - RNA, 19 nt, Homo sapiens
  misc_RNA (1)...(19): siRNA sense strand
uuaaggaugcaucugcuaa

SEQ ID NO: 1379349 - RNA, 19 nt, Homo sapiens
  misc_RNA (1)...(19): siRNA sense strand
ucacacaaagaguucauug

SEQ ID NO: 1379350 - RNA, 19 nt, Homo sapiens
  misc_RNA (1)...(19): siRNA sense strand
guaaaggauguagaugauu

SEQ ID NO: 1379351 - RNA, 19 nt, Homo sapiens
  misc_RNA (1)...(19): siRNA sense strand
gguuaaaucagcagaugga

SEQ ID NO: 1379352 - RNA, 19 nt, Homo sapiens
  misc_RNA (1)...(19): siRNA sense strand
gcaugaaguguuccugugu

SEQ ID NO: 1379353 - RNA, 19 nt, Homo sapiens
  misc_RNA (1)...(19): siRNA sense strand
uuagugagcgggauaaagu

SEQ ID NO: 1379354 - RNA, 19 nt, Homo sapiens
  misc_RNA (1)...(19): siRNA sense strand
gcaugcaaaggguaaucua

SEQ ID NO: 1379355 - RNA, 19 nt, Homo sapiens
  misc_RNA (1)...(19): siRNA sense strand
aaacuucccaacaauuaug

SEQ ID NO: 1379356 - RNA, 19 nt, Homo sapiens
  misc_RNA (1)...(19): siRNA sense strand
cagauggaguaaucguuuc

SEQ ID NO: 1379357 - RNA, 19 nt, Homo sapiens
  misc_RNA (1)...(19): siRNA sense strand
ucggcaacaugaggaauuu

SEQ ID NO: 1379358 - RNA, 19 nt, Homo sapiens
  misc_RNA (1)...(19): siRNA sense strand
ugaagcaugcaaaggguaa

SEQ ID NO: 1379359 - RNA, 19 nt, Homo sapiens
  misc_RNA (1)...(19): siRNA sense strand
gaucuccuguaucgaaggu

SEQ ID NO: 1379360 - RNA, 19 nt, Homo sapiens
  misc_RNA (1)...(19): siRNA sense strand
gaagaccucaaacuuucug

SEQ ID NO: 1379361 - RNA, 19 nt, Homo sapiens
  misc_RNA (1)...(19): siRNA sense strand
ggauguagaugauuucuuu

SEQ ID NO: 1379362 - RNA, 19 nt, Homo sapiens
  misc_RNA (1)...(19): siRNA sense strand
gaacauuucuuuuggagua

SEQ ID NO: 1379363 - RNA, 19 nt, Homo sapiens
  misc_RNA (1)...(19): siRNA sense strand
gaugaagaccucaaacuuu

SEQ ID NO: 1379364 - RNA, 19 nt, Homo sapiens
  misc_RNA (1)...(19): siRNA sense strand
cgaaacuucccaacaauua

SEQ ID NO: 1379365 - RNA, 19 nt, Homo sapiens
  misc_RNA (1)...(19): siRNA sense strand
gcagaugauuacaauagaa

SEQ ID NO: 1379366 - RNA, 19 nt, Homo sapiens
  misc_RNA (1)...(19): siRNA sense strand
gaagaauucacaaagauga

SEQ ID NO: 1379367 - RNA, 19 nt, Homo sapiens
  misc_RNA (1)...(19): siRNA sense strand
caagaagaguugcugcauu

SEQ ID NO: 1379368 - RNA, 19 nt, Homo sapiens
  misc_RNA (1)...(19): siRNA sense strand
uaaaucagcagauggagua

SEQ ID NO: 1379369 - RNA, 19 nt, Homo sapiens
  misc_RNA (1)...(19): siRNA sense strand
gaacucaggauucuacaga

SEQ ID NO: 1379370 - RNA, 19 nt, Homo sapiens
  misc_RNA (1)...(19): siRNA sense strand
gcagauggaguaaucguuu

SEQ ID NO: 1379371 - RNA, 19 nt, Homo sapiens
  misc_RNA (1)...(19): siRNA sense strand
ggaauauaaucaagaugug

SEQ ID NO: 1379372 - RNA, 19 nt, Homo sapiens
  misc_RNA (1)...(19): siRNA sense strand
ggccgaaacuucccaacaa

SEQ ID NO: 1379373 - RNA, 19 nt, Homo sapiens
  misc_RNA (1)...(19): siRNA sense strand
gcuaauaaagcacuggaua

SEQ ID NO: 1379374 - RNA, 19 nt, Homo sapiens
  misc_RNA (1)...(19): siRNA sense strand
ggaugcaucugcuaaaucu

SEQ ID NO: 1379375 - RNA, 19 nt, Homo sapiens
  misc_RNA (1)...(19): siRNA sense strand
acuggaagcugaauauuug

SEQ ID NO: 1379376 - RNA, 19 nt, Homo sapiens
  misc_RNA (1)...(19): siRNA sense strand
gaaggaagaauucacaaag

SEQ ID NO: 1379377 - RNA, 19 nt, Homo sapiens
  misc_RNA (1)...(19): siRNA sense strand
aagagaaacuugaagacuu

SEQ ID NO: 1379378 - RNA, 19 nt, Homo sapiens
  misc_RNA (1)...(19): siRNA sense strand
ggucacuaguggauuauga

SEQ ID NO: 1379379 - RNA, 19 nt, Homo sapiens
  misc_RNA (1)...(19): siRNA sense strand
gaguaaaggauguagauga

SEQ ID NO: 1379380 - RNA, 19 nt, Homo sapiens
  misc_RNA (1)...(19): siRNA sense strand
gaacgaacauuucuuuugg

SEQ ID NO: 1379381 - RNA, 19 nt, Homo sapiens
  misc_RNA (1)...(19): siRNA sense strand
ucaggauucuacagauaua

SEQ ID NO: 1379382 - RNA, 19 nt, Homo sapiens
  misc_RNA (1)...(19): siRNA sense strand
cuacagauauaugcaaguu

SEQ ID NO: 1379383 - RNA, 19 nt, Homo sapiens
  misc_RNA (1)...(19): siRNA sense strand
aagaagaguugcugcauuc

SEQ ID NO: 1379384 - RNA, 19 nt, Homo sapiens
  misc_RNA (1)...(19): siRNA sense strand
ggaacuggaagcugaauau

SEQ ID NO: 1379385 - RNA, 19 nt, Homo sapiens
  misc_RNA (1)...(19): siRNA sense strand
gcacgagugucugcugaug

SEQ ID NO: 1379386 - RNA, 19 nt, Homo sapiens
  misc_RNA (1)...(19): siRNA sense strand
aguaaucguuucaggagua

SEQ ID NO: 1379387 - RNA, 19 nt, Homo sapiens
  misc_RNA (1)...(19): siRNA sense strand
gaaacuucccaacaauuau

SEQ ID NO: 1379388 - RNA, 19 nt, Homo sapiens
  misc_RNA (1)...(19): siRNA sense strand
aaauuuccaugucuucuug

SEQ ID NO: 1379389 - RNA, 19 nt, Homo sapiens
  misc_RNA (1)...(19): siRNA sense strand
cuaauaaagcacuggauaa

SEQ ID NO: 1379390 - RNA, 19 nt, Homo sapiens
  misc_RNA (1)...(19): siRNA sense strand
aaggaagaauucacaaaga

SEQ ID NO: 1379391 - RNA, 19 nt, Homo sapiens
  misc_RNA (1)...(19): siRNA sense strand
gaacuggaagcugaauauu

SEQ ID NO: 1379392 - RNA, 19 nt, Homo sapiens
  misc_RNA (1)...(19): siRNA sense strand
ggaagaauucacaaagaug

SEQ ID NO: 1379393 - RNA, 19 nt, Homo sapiens
  misc_RNA (1)...(19): siRNA sense strand
gaagacaguugcgaugcau

SEQ ID NO: 1379394 - RNA, 19 nt, Homo sapiens
  misc_RNA (1)...(19): siRNA sense strand
gaugaaacaggaacuggaa

SEQ ID NO: 1379395 - RNA, 19 nt, Homo sapiens
  misc_RNA (1)...(19): siRNA sense strand
guaaucguuucaggaguaa

SEQ ID NO: 1379396 - RNA, 19 nt, Homo sapiens
  misc_RNA (1)...(19): siRNA sense strand
acucaggauucuacagaua

SEQ ID NO: 1379397 - RNA, 19 nt, Homo sapiens
  misc_RNA (1)...(19): siRNA sense strand
ccucaaacuuucugaucuu

SEQ ID NO: 1379398 - RNA, 19 nt, Homo sapiens
  misc_RNA (1)...(19): siRNA sense strand
aagaguugcugcauucaga

SEQ ID NO: 1379399 - RNA, 19 nt, Homo sapiens
  misc_RNA (1)...(19): siRNA sense strand
ggaguaucauaaccgaguu

SEQ ID NO: 1379400 - RNA, 19 nt, Homo sapiens
  misc_RNA (1)...(19): siRNA sense strand
aaaggguaaucuacaguug

SEQ ID NO: 1379401 - RNA, 19 nt, Homo sapiens
  misc_RNA (1)...(19): siRNA sense strand
aaagugcugcagaugauua

SEQ ID NO: 1379402 - RNA, 19 nt, Homo sapiens
  misc_RNA (1)...(19): siRNA sense strand
caaaagugcugcagaugau

SEQ ID NO: 1379403 - RNA, 19 nt, Homo sapiens
  misc_RNA (1)...(19): siRNA sense strand
guuaaauggagacacauaa

SEQ ID NO: 1379404 - RNA, 19 nt, Homo sapiens
  misc_RNA (1)...(19): siRNA sense strand
caaaggguaaucuacaguu

SEQ ID NO: 1379405 - RNA, 19 nt, Homo sapiens
  misc_RNA (1)...(19): siRNA sense strand
augaagaccucaaacuuuc

SEQ ID NO: 1379406 - RNA, 19 nt, Homo sapiens
  misc_RNA (1)...(19): siRNA sense strand
ugcuaaaucugauagaaug

SEQ ID NO: 1379407 - RNA, 19 nt, Homo sapiens
  misc_RNA (1)...(19): siRNA sense strand
cgaaggaagaauucacaaa

SEQ ID NO: 1379408 - RNA, 19 nt, Homo sapiens
  misc_RNA (1)...(19): siRNA sense strand
aguaaaggauguagaugau

SEQ ID NO: 1379409 - RNA, 19 nt, Homo sapiens
  misc_RNA (1)...(19): siRNA sense strand
gccgaaacuucccaacaau

SEQ ID NO: 1379410 - RNA, 19 nt, Homo sapiens
  misc_RNA (1)...(19): siRNA sense strand
auaaagcacuggauaaagc

SEQ ID NO: 1379411 - RNA, 19 nt, Homo sapiens
  misc_RNA (1)...(19): siRNA sense strand
gagcacgaacgaacauuuc

SEQ ID NO: 1379412 - RNA, 19 nt, Homo sapiens
  misc_RNA (1)...(19): siRNA sense strand
aggaagaauucacaaagau

SEQ ID NO: 1379413 - RNA, 19 nt, Homo sapiens
  misc_RNA (1)...(19): siRNA sense strand
caugucuucuuggaauaua

SEQ ID NO: 1379414 - RNA, 19 nt, Homo sapiens
  misc_RNA (1)...(19): siRNA sense strand
gcacgaacgaacauuucuu

SEQ ID NO: 1379415 - RNA, 19 nt, Homo sapiens
  misc_RNA (1)...(19): siRNA sense strand
cacgaacgaacauuucuuu

SEQ ID NO: 1379416 - RNA, 19 nt, Homo sapiens
  misc_RNA (1)...(19): siRNA sense strand
gaacugaagcaugcaaagg

SEQ ID NO: 1379417 - RNA, 19 nt, Homo sapiens
  misc_RNA (1)...(19): siRNA sense strand
ggauaaagcaagagcaaaa

SEQ ID NO: 1379418 - RNA, 19 nt, Homo sapiens
  misc_RNA (1)...(19): siRNA sense strand
ugaugaagaccucaaacuu

SEQ ID NO: 1379419 - RNA, 19 nt, Homo sapiens
  misc_RNA (1)...(19): siRNA sense strand
acgagugucugcugaugaa

SEQ ID NO: 1379420 - RNA, 19 nt, Homo sapiens
  misc_RNA (1)...(19): siRNA sense strand
uaaggaugcaucugcuaaa

SEQ ID NO: 1379421 - RNA, 19 nt, Homo sapiens
  misc_RNA (1)...(19): siRNA sense strand
gaugugagugugcgaggaa

SEQ ID NO: 1379422 - RNA, 19 nt, Homo sapiens
  misc_RNA (1)...(19): siRNA sense strand
gcaaaggguaaucuacagu

SEQ ID NO: 1379423 - RNA, 19 nt, Homo sapiens
  misc_RNA (1)...(19): siRNA sense strand
ccacaaaagugcugcagau

SEQ ID NO: 1379424 - RNA, 19 nt, Homo sapiens
  misc_RNA (1)...(19): siRNA sense strand
gguuaaaucagcagaugga

SEQ ID NO: 1379425 - RNA, 19 nt, Homo sapiens
  misc_RNA (1)...(19): siRNA sense strand
gcaugaaguguuccugugu

SEQ ID NO: 1379426 - RNA, 19 nt, Homo sapiens
  misc_RNA (1)...(19): siRNA sense strand
uuaaggaugcaucugcuaa

SEQ ID NO: 1379427 - RNA, 19 nt, Homo sapiens
  misc_RNA (1)...(19): siRNA sense strand
guaaaggauguagaugauu

SEQ ID NO: 1379428 - RNA, 19 nt, Homo sapiens
  misc_RNA (1)...(19): siRNA sense strand
cagauggaguaaucguuuc

SEQ ID NO: 1379429 - RNA, 19 nt, Homo sapiens
  misc_RNA (1)...(19): siRNA sense strand
gcaugcaaaggguaaucua

SEQ ID NO: 1379430 - RNA, 19 nt, Homo sapiens
  misc_RNA (1)...(19): siRNA sense strand
aaacuucccaacaauuaug

SEQ ID NO: 1379431 - RNA, 19 nt, Homo sapiens
  misc_RNA (1)...(19): siRNA sense strand
gaagaccucaaacuuucug

SEQ ID NO: 1379432 - RNA, 19 nt, Homo sapiens
  misc_RNA (1)...(19): siRNA sense strand
ugaagcaugcaaaggguaa

SEQ ID NO: 1379433 - RNA, 19 nt, Homo sapiens
  misc_RNA (1)...(19): siRNA sense strand
gaucuccuguaucgaaggu

SEQ ID NO: 1379434 - RNA, 19 nt, Homo sapiens
  misc_RNA (1)...(19): siRNA sense strand
gacaagaucccacaaaagu

SEQ ID NO: 1379435 - RNA, 19 nt, Homo sapiens
  misc_RNA (1)...(19): siRNA sense strand
ucgaaggucuaggucacua

SEQ ID NO: 1379436 - RNA, 19 nt, Homo sapiens
  misc_RNA (1)...(19): siRNA sense strand
ugagcacgaacgaacauuu

SEQ ID NO: 1379437 - RNA, 19 nt, Homo sapiens
  misc_RNA (1)...(19): siRNA sense strand
agacaguugcgaugcauga

SEQ ID NO: 1379438 - RNA, 19 nt, Homo sapiens
  misc_RNA (1)...(19): siRNA sense strand
ucacuaguggauuaugaaa

SEQ ID NO: 1379439 - RNA, 19 nt, Homo sapiens
  misc_RNA (1)...(19): siRNA sense strand
gaccucaaacuuucugauc

SEQ ID NO: 1379440 - RNA, 19 nt, Homo sapiens
  misc_RNA (1)...(19): siRNA sense strand
agaagacaguugcgaugca

SEQ ID NO: 1379441 - RNA, 19 nt, Homo sapiens
  misc_RNA (1)...(19): siRNA sense strand
caguugcgaugcaugaagu

SEQ ID NO: 1379442 - RNA, 19 nt, Homo sapiens
  misc_RNA (1)...(19): siRNA sense strand
ccgaaacuucccaacaauu

SEQ ID NO: 1379443 - RNA, 19 nt, Homo sapiens
  misc_RNA (1)...(19): siRNA sense strand
ugcagaugauuacaauaga

SEQ ID NO: 1379444 - RNA, 19 nt, Homo sapiens
  misc_RNA (1)...(19): siRNA sense strand
ucugauagaaugacaagau

SEQ ID NO: 1379445 - RNA, 19 nt, Homo sapiens
  misc_RNA (1)...(19): siRNA sense strand
aaggaugcaucugcuaaau

SEQ ID NO: 1379446 - RNA, 19 nt, Homo sapiens
  misc_RNA (1)...(19): siRNA sense strand
gacgaaggaagaauucaca

SEQ ID NO: 1379447 - RNA, 19 nt, Homo sapiens
  misc_RNA (1)...(19): siRNA sense strand
gcuaaaucugauagaauga

SEQ ID NO: 1379448 - RNA, 19 nt, Homo sapiens
  misc_RNA (1)...(19): siRNA sense strand
uuuaagacaagaagaguug

SEQ ID NO: 1379449 - RNA, 19 nt, Homo sapiens
  misc_RNA (1)...(19): siRNA sense strand
aauagaagcacgagugucu

SEQ ID NO: 1379450 - RNA, 19 nt, Homo sapiens
  misc_RNA (1)...(19): siRNA sense strand
cugcagaugauuacaauag

SEQ ID NO: 1379451 - RNA, 19 nt, Homo sapiens
  misc_RNA (1)...(19): siRNA sense strand
cugauagaaugacaagauc

SEQ ID NO: 1379452 - RNA, 19 nt, Homo sapiens
  misc_RNA (1)...(19): siRNA sense strand
ucugcuaaaucugauagaa

SEQ ID NO: 1379453 - RNA, 19 nt, Homo sapiens
  misc_RNA (1)...(19): siRNA sense strand
gagugucugcugaugaaga

SEQ ID NO: 1379454 - RNA, 19 nt, Homo sapiens
  misc_RNA (1)...(19): siRNA sense strand
ggaguaaaggauguagaug

SEQ ID NO: 1379455 - RNA, 19 nt, Homo sapiens
  misc_RNA (1)...(19): siRNA sense strand
aacuggaagcugaauauuu

SEQ ID NO: 1379456 - RNA, 19 nt, Homo sapiens
  misc_RNA (1)...(19): siRNA sense strand
gaguugcugcauucagaaa

SEQ ID NO: 1379457 - RNA, 19 nt, Homo sapiens
  misc_RNA (1)...(19): siRNA sense strand
gaagaguugcugcauucag

SEQ ID NO: 1379458 - RNA, 19 nt, Homo sapiens
  misc_RNA (1)...(19): siRNA sense strand
gcaaaacaagaacuuauag

SEQ ID NO: 1379459 - RNA, 19 nt, Homo sapiens
  misc_RNA (1)...(19): siRNA sense strand
cucaaacuuucugaucuuu

SEQ ID NO: 1379460 - RNA, 19 nt, Homo sapiens
  misc_RNA (1)...(19): siRNA sense strand
aaauaucugagucugcaaa

SEQ ID NO: 1379461 - RNA, 19 nt, Homo sapiens
  misc_RNA (1)...(19): siRNA sense strand
ggauguagaugauuucuuu

SEQ ID NO: 1379462 - RNA, 19 nt, Homo sapiens
  misc_RNA (1)...(19): siRNA sense strand
gaauuuaucuggcuucaug

SEQ ID NO: 1379463 - RNA, 19 nt, Homo sapiens
  misc_RNA (1)...(19): siRNA sense strand
gaacauuucuuuuggagua

SEQ ID NO: 1379464 - RNA, 19 nt, Homo sapiens
  misc_RNA (1)...(19): siRNA sense strand
gaagaggaccgcggacuua

SEQ ID NO: 1379465 - RNA, 19 nt, Homo sapiens
  misc_RNA (1)...(19): siRNA sense strand
gaugaagaccucaaacuuu

SEQ ID NO: 1379466 - RNA, 19 nt, Homo sapiens
  misc_RNA (1)...(19): siRNA sense strand
cgaaacuucccaacaauua

SEQ ID NO: 1379467 - RNA, 19 nt, Homo sapiens
  misc_RNA (1)...(19): siRNA sense strand
ggacuuaaagcaauaaaug

SEQ ID NO: 1379468 - RNA, 19 nt, Homo sapiens
  misc_RNA (1)...(19): siRNA sense strand
gcagaugauuacaauagaa

SEQ ID NO: 1379469 - RNA, 19 nt, Homo sapiens
  misc_RNA (1)...(19): siRNA sense strand
ggacauuucugaugcucuu

SEQ ID NO: 1379470 - RNA, 19 nt, Homo sapiens
  misc_RNA (1)...(19): siRNA sense strand
caagaagaguugcugcauu

SEQ ID NO: 1379471 - RNA, 19 nt, Homo sapiens
  misc_RNA (1)...(19): siRNA sense strand
gaagaauucacaaagauga

SEQ ID NO: 1379472 - RNA, 19 nt, Homo sapiens
  misc_RNA (1)...(19): siRNA sense strand
uaaaucagcagauggagua

SEQ ID NO: 1379473 - RNA, 19 nt, Homo sapiens
  misc_RNA (1)...(19): siRNA sense strand
gaacucaggauucuacaga

SEQ ID NO: 1379474 - RNA, 19 nt, Homo sapiens
  misc_RNA (1)...(19): siRNA sense strand
gcagauggaguaaucguuu

SEQ ID NO: 1379475 - RNA, 19 nt, Homo sapiens
  misc_RNA (1)...(19): siRNA sense strand
ggaauauaaucaagaugug

SEQ ID NO: 1379476 - RNA, 19 nt, Homo sapiens
  misc_RNA (1)...(19): siRNA sense strand
ggccgaaacuucccaacaa

SEQ ID NO: 1379477 - RNA, 19 nt, Homo sapiens
  misc_RNA (1)...(19): siRNA sense strand
gcuaauaaagcacuggaua

SEQ ID NO: 1379478 - RNA, 19 nt, Homo sapiens
  misc_RNA (1)...(19): siRNA sense strand
ggaugcaucugcuaaaucu

SEQ ID NO: 1379479 - RNA, 19 nt, Homo sapiens
  misc_RNA (1)...(19): siRNA sense strand
gaagcuuggugaaggagaa

SEQ ID NO: 1379480 - RNA, 19 nt, Homo sapiens
  misc_RNA (1)...(19): siRNA sense strand
acuggaagcugaauauuug

SEQ ID NO: 1379481 - RNA, 19 nt, Homo sapiens
  misc_RNA (1)...(19): siRNA sense strand
gaaggagaagggucaauga

SEQ ID NO: 1379482 - RNA, 19 nt, Homo sapiens
  misc_RNA (1)...(19): siRNA sense strand
gaaggaagaauucacaaag

SEQ ID NO: 1379483 - RNA, 19 nt, Homo sapiens
  misc_RNA (1)...(19): siRNA sense strand
aagagaaacuugaagacuu

SEQ ID NO: 1379484 - RNA, 19 nt, Homo sapiens
  misc_RNA (1)...(19): siRNA sense strand
ggucacuaguggauuauga

SEQ ID NO: 1379485 - RNA, 19 nt, Homo sapiens
  misc_RNA (1)...(19): siRNA sense strand
gaguaaaggauguagauga

SEQ ID NO: 1379486 - RNA, 19 nt, Homo sapiens
  misc_RNA (1)...(19): siRNA sense strand
gaacgaacauuucuuuugg

SEQ ID NO: 1379487 - RNA, 19 nt, Homo sapiens
  misc_RNA (1)...(19): siRNA sense strand
ucaggauucuacagauaua

SEQ ID NO: 1379488 - RNA, 19 nt, Homo sapiens
  misc_RNA (1)...(19): siRNA sense strand
agaguucauugccaaauuu

SEQ ID NO: 1379489 - RNA, 19 nt, Homo sapiens
  misc_RNA (1)...(19): siRNA sense strand
aagaagaguugcugcauuc

SEQ ID NO: 1379490 - RNA, 19 nt, Homo sapiens
  misc_RNA (1)...(19): siRNA sense strand
cuacagauauaugcaaguu

SEQ ID NO: 1379491 - RNA, 19 nt, Homo sapiens
  misc_RNA (1)...(19): siRNA sense strand
ggaacuggaagcugaauau

SEQ ID NO: 1379492 - RNA, 19 nt, Homo sapiens
  misc_RNA (1)...(19): siRNA sense strand
ugaagacuaugcagguuau

SEQ ID NO: 1379493 - RNA, 19 nt, Homo sapiens
  misc_RNA (1)...(19): siRNA sense strand
gcacgagugucugcugaug

SEQ ID NO: 1379494 - RNA, 19 nt, Homo sapiens
  misc_RNA (1)...(19): siRNA sense strand
cuaugcagguuauaucauu

SEQ ID NO: 1379495 - RNA, 19 nt, Homo sapiens
  misc_RNA (1)...(19): siRNA sense strand
aguaaucguuucaggagua

SEQ ID NO: 1379496 - RNA, 19 nt, Homo sapiens
  misc_RNA (1)...(19): siRNA sense strand
gaaacuucccaacaauuau

SEQ ID NO: 1379497 - RNA, 19 nt, Homo sapiens
  misc_RNA (1)...(19): siRNA sense strand
aaggaagaauucacaaaga

SEQ ID NO: 1379498 - RNA, 19 nt, Homo sapiens
  misc_RNA (1)...(19): siRNA sense strand
cuaauaaagcacuggauaa

SEQ ID NO: 1379499 - RNA, 19 nt, Homo sapiens
  misc_RNA (1)...(19): siRNA sense strand
aaauuuccaugucuucuug

SEQ ID NO: 1379500 - RNA, 19 nt, Homo sapiens
  misc_RNA (1)...(19): siRNA sense strand
gaacuggaagcugaauauu

SEQ ID NO: 1379501 - RNA, 19 nt, Homo sapiens
  misc_RNA (1)...(19): siRNA sense strand
ggaagaauucacaaagaug

SEQ ID NO: 1379502 - RNA, 19 nt, Homo sapiens
  misc_RNA (1)...(19): siRNA sense strand
gaugaaacaggaacuggaa

SEQ ID NO: 1379503 - RNA, 19 nt, Homo sapiens
  misc_RNA (1)...(19): siRNA sense strand
gaagacaguugcgaugcau

SEQ ID NO: 1379504 - RNA, 19 nt, Homo sapiens
  misc_RNA (1)...(19): siRNA sense strand
caugauuccuuuguugaaa

SEQ ID NO: 1379505 - RNA, 19 nt, Homo sapiens
  misc_RNA (1)...(19): siRNA sense strand
acucaggauucuacagaua

SEQ ID NO: 1379506 - RNA, 19 nt, Homo sapiens
  misc_RNA (1)...(19): siRNA sense strand
guaaucguuucaggaguaa

SEQ ID NO: 1379507 - RNA, 19 nt, Homo sapiens
  misc_RNA (1)...(19): siRNA sense strand
ccgcggacuuaaagcaaua

SEQ ID NO: 1379508 - RNA, 19 nt, Homo sapiens
  misc_RNA (1)...(19): siRNA sense strand
ccucaaacuuucugaucuu

SEQ ID NO: 1379509 - RNA, 19 nt, Homo sapiens
  misc_RNA (1)...(19): siRNA sense strand
aagaguugcugcauucaga

SEQ ID NO: 1379510 - RNA, 19 nt, Homo sapiens
  misc_RNA (1)...(19): siRNA sense strand
ggaguaucauaaccgaguu

SEQ ID NO: 1379511 - RNA, 19 nt, Homo sapiens
  misc_RNA (1)...(19): siRNA sense strand
aaaggguaaucuacaguug

SEQ ID NO: 1379512 - RNA, 19 nt, Homo sapiens
  misc_RNA (1)...(19): siRNA sense strand
aaagugcugcagaugauua

SEQ ID NO: 1379513 - RNA, 19 nt, Homo sapiens
  misc_RNA (1)...(19): siRNA sense strand
aagaguucauugccaaauu

SEQ ID NO: 1379514 - RNA, 19 nt, Homo sapiens
  misc_RNA (1)...(19): siRNA sense strand
guuaaauggagacacauaa

SEQ ID NO: 1379515 - RNA, 19 nt, Homo sapiens
  misc_RNA (1)...(19): siRNA sense strand
caaaggguaaucuacaguu

SEQ ID NO: 1379516 - RNA, 19 nt, Homo sapiens
  misc_RNA (1)...(19): siRNA sense strand
augaagaccucaaacuuuc

SEQ ID NO: 1379517 - RNA, 19 nt, Homo sapiens
  misc_RNA (1)...(19): siRNA sense strand
caaaagugcugcagaugau

SEQ ID NO: 1379518 - RNA, 19 nt, Homo sapiens
  misc_RNA (1)...(19): siRNA sense strand
auguagaucuucaaaguga

SEQ ID NO: 1379519 - RNA, 19 nt, Homo sapiens
  misc_RNA (1)...(19): siRNA sense strand
cgaaggaagaauucacaaa

SEQ ID NO: 1379520 - RNA, 19 nt, Homo sapiens
  misc_RNA (1)...(19): siRNA sense strand
ugcuaaaucugauagaaug

SEQ ID NO: 1379521 - RNA, 19 nt, Homo sapiens
  misc_RNA (1)...(19): siRNA sense strand
aguaaaggauguagaugau

SEQ ID NO: 1379522 - RNA, 19 nt, Homo sapiens
  misc_RNA (1)...(19): siRNA sense strand
gccgaaacuucccaacaau

SEQ ID NO: 1379523 - RNA, 19 nt, Homo sapiens
  misc_RNA (1)...(19): siRNA sense strand
auaaagcacuggauaaagc

SEQ ID NO: 1379524 - RNA, 19 nt, Homo sapiens
  misc_RNA (1)...(19): siRNA sense strand
gcaauaaauguagaucuuc

SEQ ID NO: 1379525 - RNA, 19 nt, Homo sapiens
  misc_RNA (1)...(19): siRNA sense strand
cuucaugauuccuuuguug

SEQ ID NO: 1379526 - RNA, 19 nt, Homo sapiens
  misc_RNA (1)...(19): siRNA sense strand
gagcacgaacgaacauuuc

SEQ ID NO: 1379527 - RNA, 19 nt, Homo sapiens
  misc_RNA (1)...(19): siRNA sense strand
aggaagaauucacaaagau

SEQ ID NO: 1379528 - RNA, 19 nt, Homo sapiens
  misc_RNA (1)...(19): siRNA sense strand
caaugacgaaggaagaauu

SEQ ID NO: 1379529 - RNA, 19 nt, Homo sapiens
  misc_RNA (1)...(19): siRNA sense strand
caacaugaggaauuuaucu

SEQ ID NO: 1379530 - RNA, 19 nt, Homo sapiens
  misc_RNA (1)...(19): siRNA sense strand
gcacgaacgaacauuucuu

SEQ ID NO: 1379531 - RNA, 19 nt, Homo sapiens
  misc_RNA (1)...(19): siRNA sense strand
caugucuucuuggaauaua

SEQ ID NO: 1379532 - RNA, 19 nt, Homo sapiens
  misc_RNA (1)...(19): siRNA sense strand
uuaucuggcuucaugauuc

SEQ ID NO: 1379533 - RNA, 19 nt, Homo sapiens
  misc_RNA (1)...(19): siRNA sense strand
gaacugaagcaugcaaagg

SEQ ID NO: 1379534 - RNA, 19 nt, Homo sapiens
  misc_RNA (1)...(19): siRNA sense strand
ggauaaagcaagagcaaaa

SEQ ID NO: 1379535 - RNA, 19 nt, Homo sapiens
  misc_RNA (1)...(19): siRNA sense strand
ugaugaagaccucaaacuu

SEQ ID NO: 1379536 - RNA, 19 nt, Homo sapiens
  misc_RNA (1)...(19): siRNA sense strand
acgagugucugcugaugaa

SEQ ID NO: 1379537 - RNA, 19 nt, Homo sapiens
  misc_RNA (1)...(19): siRNA sense strand
cacgaacgaacauuucuuu

SEQ ID NO: 1379538 - RNA, 19 nt, Homo sapiens
  misc_RNA (1)...(19): siRNA sense strand
gcccggacuuccucucaga

SEQ ID NO: 1379539 - RNA, 19 nt, Homo sapiens
  misc_RNA (1)...(19): siRNA sense strand
gcaccaccaagaccugauu

SEQ ID NO: 1379540 - RNA, 19 nt, Homo sapiens
  misc_RNA (1)...(19): siRNA sense strand
acagaagcuuggugaagga

SEQ ID NO: 1379541 - RNA, 19 nt, Homo sapiens
  misc_RNA (1)...(19): siRNA sense strand
uaaggaugcaucugcuaaa

SEQ ID NO: 1379542 - RNA, 19 nt, Homo sapiens
  misc_RNA (1)...(19): siRNA sense strand
gaugugagugugcgaggaa

SEQ ID NO: 1379543 - RNA, 19 nt, Homo sapiens
  misc_RNA (1)...(19): siRNA sense strand
gcaaaggguaaucuacagu

SEQ ID NO: 1379544 - RNA, 19 nt, Homo sapiens
  misc_RNA (1)...(19): siRNA sense strand
gaggaccgcggacuuaaag

SEQ ID NO: 1379545 - RNA, 19 nt, Homo sapiens
  misc_RNA (1)...(19): siRNA sense strand
ccacaaaagugcugcagau

SEQ ID NO: 1379546 - RNA, 19 nt, Homo sapiens
  misc_RNA (1)...(19): siRNA sense strand
caaagaguucauugccaaa

SEQ ID NO: 1379547 - RNA, 19 nt, Homo sapiens
  misc_RNA (1)...(19): siRNA sense strand
aaaauucacuguucacaca

SEQ ID NO: 1379548 - RNA, 19 nt, Homo sapiens
  misc_RNA (1)...(19): siRNA sense strand
uuaaggaugcaucugcuaa

SEQ ID NO: 1379549 - RNA, 19 nt, Homo sapiens
  misc_RNA (1)...(19): siRNA sense strand
ucacacaaagaguucauug

SEQ ID NO: 1379550 - RNA, 19 nt, Homo sapiens
  misc_RNA (1)...(19): siRNA sense strand
guaaaggauguagaugauu

SEQ ID NO: 1379551 - RNA, 19 nt, Homo sapiens
  misc_RNA (1)...(19): siRNA sense strand
gguuaaaucagcagaugga

SEQ ID NO: 1379552 - RNA, 19 nt, Homo sapiens
  misc_RNA (1)...(19): siRNA sense strand
gcaugaaguguuccugugu

SEQ ID NO: 1379553 - RNA, 19 nt, Homo sapiens
  misc_RNA (1)...(19): siRNA sense strand
uuagugagcgggauaaagu

SEQ ID NO: 1379554 - RNA, 19 nt, Homo sapiens
  misc_RNA (1)...(19): siRNA sense strand
gcaugcaaaggguaaucua

SEQ ID NO: 1379555 - RNA, 19 nt, Homo sapiens
  misc_RNA (1)...(19): siRNA sense strand
aaacuucccaacaauuaug

SEQ ID NO: 1379556 - RNA, 19 nt, Homo sapiens
  misc_RNA (1)...(19): siRNA sense strand
cagauggaguaaucguuuc

SEQ ID NO: 1379557 - RNA, 19 nt, Homo sapiens
  misc_RNA (1)...(19): siRNA sense strand
ucggcaacaugaggaauuu

SEQ ID NO: 1379558 - RNA, 19 nt, Homo sapiens
  misc_RNA (1)...(19): siRNA sense strand
ugaagcaugcaaaggguaa

SEQ ID NO: 1379559 - RNA, 19 nt, Homo sapiens
  misc_RNA (1)...(19): siRNA sense strand
gaucuccuguaucgaaggu

SEQ ID NO: 1379560 - RNA, 19 nt, Homo sapiens
  misc_RNA (1)...(19): siRNA sense strand
gaagaccucaaacuuucug

SEQ ID NO: 1379561 - RNA, 19 nt, Homo sapiens
  misc_RNA (1)...(19): siRNA sense strand
gaaucgacgugacuacuua

SEQ ID NO: 1379562 - RNA, 19 nt, Homo sapiens
  misc_RNA (1)...(19): siRNA sense strand
gagaagaagccucaacuua

SEQ ID NO: 1379563 - RNA, 19 nt, Homo sapiens
  misc_RNA (1)...(19): siRNA sense strand
ccaauaagcuuugcaauca

SEQ ID NO: 1379564 - RNA, 19 nt, Homo sapiens
  misc_RNA (1)...(19): siRNA sense strand
gaaguuaaaccacccgaua

SEQ ID NO: 1379565 - RNA, 19 nt, Homo sapiens
  misc_RNA (1)...(19): siRNA sense strand
gaauagaggcccuguguga

SEQ ID NO: 1379566 - RNA, 19 nt, Homo sapiens
  misc_RNA (1)...(19): siRNA sense strand
gcaaagauccaccgagaga

SEQ ID NO: 1379567 - RNA, 19 nt, Homo sapiens
  misc_RNA (1)...(19): siRNA sense strand
caaugaagaugaugaugau

SEQ ID NO: 1379568 - RNA, 19 nt, Homo sapiens
  misc_RNA (1)...(19): siRNA sense strand
gcccagaucucuucagcaa

SEQ ID NO: 1379569 - RNA, 19 nt, Homo sapiens
  misc_RNA (1)...(19): siRNA sense strand
caaagaaggccaagaaagu

SEQ ID NO: 1379570 - RNA, 19 nt, Homo sapiens
  misc_RNA (1)...(19): siRNA sense strand
ugacagugaugaugaugaa

SEQ ID NO: 1379571 - RNA, 19 nt, Homo sapiens
  misc_RNA (1)...(19): siRNA sense strand
ccagaucucuucagcaauc

SEQ ID NO: 1379572 - RNA, 19 nt, Homo sapiens
  misc_RNA (1)...(19): siRNA sense strand
ucgcagcacuuguucguaa

SEQ ID NO: 1379573 - RNA, 19 nt, Homo sapiens
  misc_RNA (1)...(19): siRNA sense strand
guguuaagcuagaugauga

SEQ ID NO: 1379574 - RNA, 19 nt, Homo sapiens
  misc_RNA (1)...(19): siRNA sense strand
gaagaagccucaacuuacc

SEQ ID NO: 1379575 - RNA, 19 nt, Homo sapiens
  misc_RNA (1)...(19): siRNA sense strand
ugcaugaccuuucugagua

SEQ ID NO: 1379576 - RNA, 19 nt, Homo sapiens
  misc_RNA (1)...(19): siRNA sense strand
gcaaagcaagcaaagcaaa

SEQ ID NO: 1379577 - RNA, 19 nt, Homo sapiens
  misc_RNA (1)...(19): siRNA sense strand
ugaguacgaugcugaguau

SEQ ID NO: 1379578 - RNA, 19 nt, Homo sapiens
  misc_RNA (1)...(19): siRNA sense strand
aaacaaaagugacgagaaa

SEQ ID NO: 1379579 - RNA, 19 nt, Homo sapiens
  misc_RNA (1)...(19): siRNA sense strand
ugaagaugaugaugaugaa

SEQ ID NO: 1379580 - RNA, 19 nt, Homo sapiens
  misc_RNA (1)...(19): siRNA sense strand
gagcacaguuugagaucau

SEQ ID NO: 1379581 - RNA, 19 nt, Homo sapiens
  misc_RNA (1)...(19): siRNA sense strand
uaagcuagaugaugacagu

SEQ ID NO: 1379582 - RNA, 19 nt, Homo sapiens
  misc_RNA (1)...(19): siRNA sense strand
gcaaucaaggccaaagaaa

SEQ ID NO: 1379583 - RNA, 19 nt, Homo sapiens
  misc_RNA (1)...(19): siRNA sense strand
ccaagaaugaucaaagauu

SEQ ID NO: 1379584 - RNA, 19 nt, Homo sapiens
  misc_RNA (1)...(19): siRNA sense strand
gcaaagaaggccaagaaag

SEQ ID NO: 1379585 - RNA, 19 nt, Homo sapiens
  misc_RNA (1)...(19): siRNA sense strand
ggaggagccuuccaaacag

SEQ ID NO: 1379586 - RNA, 19 nt, Homo sapiens
  misc_RNA (1)...(19): siRNA sense strand
gagagaagaagagaaagaa

SEQ ID NO: 1379587 - RNA, 19 nt, Homo sapiens
  misc_RNA (1)...(19): siRNA sense strand
gaggagccuuccaaacaga

SEQ ID NO: 1379588 - RNA, 19 nt, Homo sapiens
  misc_RNA (1)...(19): siRNA sense strand
ggaagcagaagcugggaaa

SEQ ID NO: 1379589 - RNA, 19 nt, Homo sapiens
  misc_RNA (1)...(19): siRNA sense strand
gaagaggaggcgcgaauag

SEQ ID NO: 1379590 - RNA, 19 nt, Homo sapiens
  misc_RNA (1)...(19): siRNA sense strand
gaguggagcucuugguuuu

SEQ ID NO: 1379591 - RNA, 19 nt, Homo sapiens
  misc_RNA (1)...(19): siRNA sense strand
cagaagaggcucccacaga

SEQ ID NO: 1379592 - RNA, 19 nt, Homo sapiens
  misc_RNA (1)...(19): siRNA sense strand
ugaagaagaugggaauuac

SEQ ID NO: 1379593 - RNA, 19 nt, Homo sapiens
  misc_RNA (1)...(19): siRNA sense strand
uugacaagcuggccgagua

SEQ ID NO: 1379594 - RNA, 19 nt, Homo sapiens
  misc_RNA (1)...(19): siRNA sense strand
gaucacguucucccaagua

SEQ ID NO: 1379595 - RNA, 19 nt, Homo sapiens
  misc_RNA (1)...(19): siRNA sense strand
ccacguggaacagagauua

SEQ ID NO: 1379596 - RNA, 19 nt, Homo sapiens
  misc_RNA (1)...(19): siRNA sense strand
caauaagcuuugcaaucaa

SEQ ID NO: 1379597 - RNA, 19 nt, Homo sapiens
  misc_RNA (1)...(19): siRNA sense strand
cgacgugacuacuuacuac

SEQ ID NO: 1379598 - RNA, 19 nt, Homo sapiens
  misc_RNA (1)...(19): siRNA sense strand
gcucugacaaugaagauga

SEQ ID NO: 1379599 - RNA, 19 nt, Homo sapiens
  misc_RNA (1)...(19): siRNA sense strand
aggaggagcuagaagcaaa

SEQ ID NO: 1379600 - RNA, 19 nt, Homo sapiens
  misc_RNA (1)...(19): siRNA sense strand
caaagaaaaugaucugcuu

SEQ ID NO: 1379601 - RNA, 19 nt, Homo sapiens
  misc_RNA (1)...(19): siRNA sense strand
cuucaucccucucucuuug

SEQ ID NO: 1379602 - RNA, 19 nt, Homo sapiens
  misc_RNA (1)...(19): siRNA sense strand
gauugagcgucccgucuga

SEQ ID NO: 1379603 - RNA, 19 nt, Homo sapiens
  misc_RNA (1)...(19): siRNA sense strand
acuauaaguucauccagaa

SEQ ID NO: 1379604 - RNA, 19 nt, Homo sapiens
  misc_RNA (1)...(19): siRNA sense strand
gcgaauagaggcccugugu

SEQ ID NO: 1379605 - RNA, 19 nt, Homo sapiens
  misc_RNA (1)...(19): siRNA sense strand
aaggaaagcggcguuauuu

SEQ ID NO: 1379606 - RNA, 19 nt, Homo sapiens
  misc_RNA (1)...(19): siRNA sense strand
ggaaucgacgugacuacuu

SEQ ID NO: 1379607 - RNA, 19 nt, Homo sapiens
  misc_RNA (1)...(19): siRNA sense strand
ccgaguaugucgccaggaa

SEQ ID NO: 1379608 - RNA, 19 nt, Homo sapiens
  misc_RNA (1)...(19): siRNA sense strand
ggagaagaagccucaacuu

SEQ ID NO: 1379609 - RNA, 19 nt, Homo sapiens
  misc_RNA (1)...(19): siRNA sense strand
acaaugaagaugaugauga

SEQ ID NO: 1379610 - RNA, 19 nt, Homo sapiens
  misc_RNA (1)...(19): siRNA sense strand
ccaaguaccauucgucauc

SEQ ID NO: 1379611 - RNA, 19 nt, Homo sapiens
  misc_RNA (1)...(19): siRNA sense strand
aaaggaaagcggcguuauu

SEQ ID NO: 1379612 - RNA, 19 nt, Homo sapiens
  misc_RNA (1)...(19): siRNA sense strand
aagcaaagaaggccaagaa

SEQ ID NO: 1379613 - RNA, 19 nt, Homo sapiens
  misc_RNA (1)...(19): siRNA sense strand
ugccaagaaugaucaaaga

SEQ ID NO: 1379614 - RNA, 19 nt, Homo sapiens
  misc_RNA (1)...(19): siRNA sense strand
uagaggcccugugugauga

SEQ ID NO: 1379615 - RNA, 19 nt, Homo sapiens
  misc_RNA (1)...(19): siRNA sense strand
cgauaggccuucgagcaaa

SEQ ID NO: 1379616 - RNA, 19 nt, Homo sapiens
  misc_RNA (1)...(19): siRNA sense strand
aaggaggcaucguccagua

SEQ ID NO: 1379617 - RNA, 19 nt, Homo sapiens
  misc_RNA (1)...(19): siRNA sense strand
gaagguaguggacccagau

SEQ ID NO: 1379618 - RNA, 19 nt, Homo sapiens
  misc_RNA (1)...(19): siRNA sense strand
ggaggaggagccuuccaaa

SEQ ID NO: 1379619 - RNA, 19 nt, Homo sapiens
  misc_RNA (1)...(19): siRNA sense strand
agaagaagccucaacuuac

SEQ ID NO: 1379620 - RNA, 19 nt, Homo sapiens
  misc_RNA (1)...(19): siRNA sense strand
aaagaaggccaagaaaguu

SEQ ID NO: 1379621 - RNA, 19 nt, Homo sapiens
  misc_RNA (1)...(19): siRNA sense strand
gaaguguaaccgccuugaa

SEQ ID NO: 1379622 - RNA, 19 nt, Homo sapiens
  misc_RNA (1)...(19): siRNA sense strand
gaggaugggagcuacaaug

SEQ ID NO: 1379623 - RNA, 19 nt, Homo sapiens
  misc_RNA (1)...(19): siRNA sense strand
ggagcacaguuugagauca

SEQ ID NO: 1379624 - RNA, 19 nt, Homo sapiens
  misc_RNA (1)...(19): siRNA sense strand
cuucagcaaucguuucuuc

SEQ ID NO: 1379625 - RNA, 19 nt, Homo sapiens
  misc_RNA (1)...(19): siRNA sense strand
cgagagaagaagagaaaga

SEQ ID NO: 1379626 - RNA, 19 nt, Homo sapiens
  misc_RNA (1)...(19): siRNA sense strand
ggagcuagaagcaaagcaa

SEQ ID NO: 1379627 - RNA, 19 nt, Homo sapiens
  misc_RNA (1)...(19): siRNA sense strand
cagugaugaugaugaagaa

SEQ ID NO: 1379628 - RNA, 19 nt, Homo sapiens
  misc_RNA (1)...(19): siRNA sense strand
agaugaugaugaugaagaa

SEQ ID NO: 1379629 - RNA, 19 nt, Homo sapiens
  misc_RNA (1)...(19): siRNA sense strand
gaaagagggacgcuacacu

SEQ ID NO: 1379630 - RNA, 19 nt, Homo sapiens
  misc_RNA (1)...(19): siRNA sense strand
uuacagcuacuacaugcua

SEQ ID NO: 1379631 - RNA, 19 nt, Homo sapiens
  misc_RNA (1)...(19): siRNA sense strand
gagaagaagagaaagaaaa

SEQ ID NO: 1379632 - RNA, 19 nt, Homo sapiens
  misc_RNA (1)...(19): siRNA sense strand
gcgccaaacccgagaggaa

SEQ ID NO: 1379633 - RNA, 19 nt, Homo sapiens
  misc_RNA (1)...(19): siRNA sense strand
gaaguucgagaccaguguu

SEQ ID NO: 1379634 - RNA, 19 nt, Homo sapiens
  misc_RNA (1)...(19): siRNA sense strand
gcuagaugaugacagugau

SEQ ID NO: 1379635 - RNA, 19 nt, Homo sapiens
  misc_RNA (1)...(19): siRNA sense strand
gaggcaucguccaguaaga

SEQ ID NO: 1379636 - RNA, 19 nt, Homo sapiens
  misc_RNA (1)...(19): siRNA sense strand
gcaugaccuuucugaguac

SEQ ID NO: 1379637 - RNA, 19 nt, Homo sapiens
  misc_RNA (1)...(19): siRNA sense strand
ccagaaagccaugaaagag

SEQ ID NO: 1379638 - RNA, 19 nt, Homo sapiens
  misc_RNA (1)...(19): siRNA sense strand
gaucucauggccaaaguca

SEQ ID NO: 1379639 - RNA, 19 nt, Homo sapiens
  misc_RNA (1)...(19): siRNA sense strand
cgaguggagcucuugguuu

SEQ ID NO: 1379640 - RNA, 19 nt, Homo sapiens
  misc_RNA (1)...(19): siRNA sense strand
gucgaggaauccagcacua

SEQ ID NO: 1379641 - RNA, 19 nt, Homo sapiens
  misc_RNA (1)...(19): siRNA sense strand
gaugaugacagugaugaug

SEQ ID NO: 1379642 - RNA, 19 nt, Homo sapiens
  misc_RNA (1)...(19): siRNA sense strand
ugaugaugaugaagaagau

SEQ ID NO: 1379643 - RNA, 19 nt, Homo sapiens
  misc_RNA (1)...(19): siRNA sense strand
aggaggagccuuccaaaca

SEQ ID NO: 1379644 - RNA, 19 nt, Homo sapiens
  misc_RNA (1)...(19): siRNA sense strand
ucucauggccaaagucaga

SEQ ID NO: 1379645 - RNA, 19 nt, Homo sapiens
  misc_RNA (1)...(19): siRNA sense strand
aauaagcuuugcaaucaag

SEQ ID NO: 1379646 - RNA, 19 nt, Homo sapiens
  misc_RNA (1)...(19): siRNA sense strand
ggacgggaagcuggugaaa

SEQ ID NO: 1379647 - RNA, 19 nt, Homo sapiens
  misc_RNA (1)...(19): siRNA sense strand
ugaagaggaggcgcgaaua

SEQ ID NO: 1379648 - RNA, 19 nt, Homo sapiens
  misc_RNA (1)...(19): siRNA sense strand
gagcugaugaagcccuuga

SEQ ID NO: 1379649 - RNA, 19 nt, Homo sapiens
  misc_RNA (1)...(19): siRNA sense strand
augaagaagaugggaauua

SEQ ID NO: 1379650 - RNA, 19 nt, Homo sapiens
  misc_RNA (1)...(19): siRNA sense strand
gauaggccuucgagcaaaa

SEQ ID NO: 1379651 - RNA, 19 nt, Homo sapiens
  misc_RNA (1)...(19): siRNA sense strand
gaugaagaaagcaaagaag

SEQ ID NO: 1379652 - RNA, 19 nt, Homo sapiens
  misc_RNA (1)...(19): siRNA sense strand
gauccucaucgacagauau

SEQ ID NO: 1379653 - RNA, 19 nt, Homo sapiens
  misc_RNA (1)...(19): siRNA sense strand
ccacaaccaccaccacaag

SEQ ID NO: 1379654 - RNA, 19 nt, Homo sapiens
  misc_RNA (1)...(19): siRNA sense strand
guauuacagcuacuacaug

SEQ ID NO: 1379655 - RNA, 19 nt, Homo sapiens
  misc_RNA (1)...(19): siRNA sense strand
gcagggagcacaguuugag

SEQ ID NO: 1379656 - RNA, 19 nt, Homo sapiens
  misc_RNA (1)...(19): siRNA sense strand
gacguggucaccugcauga

SEQ ID NO: 1379657 - RNA, 19 nt, Homo sapiens
  misc_RNA (1)...(19): siRNA sense strand
aaagagaaacagcuucaag

SEQ ID NO: 1379658 - RNA, 19 nt, Homo sapiens
  misc_RNA (1)...(19): siRNA sense strand
aagcaaagcaagcaaagca

SEQ ID NO: 1379659 - RNA, 19 nt, Homo sapiens
  misc_RNA (1)...(19): siRNA sense strand
guacgaugcugaguauucc

SEQ ID NO: 1379660 - RNA, 19 nt, Homo sapiens
  misc_RNA (1)...(19): siRNA sense strand
ugaugaagaaagcaaagaa

SEQ ID NO: 1379661 - RNA, 19 nt, Homo sapiens
  misc_RNA (1)...(19): siRNA sense strand
gaauagaggcccuguguga

SEQ ID NO: 1379662 - RNA, 19 nt, Homo sapiens
  misc_RNA (1)...(19): siRNA sense strand
ugcaugaccuuucugagua

SEQ ID NO: 1379663 - RNA, 19 nt, Homo sapiens
  misc_RNA (1)...(19): siRNA sense strand
ugaguacgaugcugaguau

SEQ ID NO: 1379664 - RNA, 19 nt, Homo sapiens
  misc_RNA (1)...(19): siRNA sense strand
gaagaauacaagcgauuga

SEQ ID NO: 1379665 - RNA, 19 nt, Homo sapiens
  misc_RNA (1)...(19): siRNA sense strand
gaguggagcucuugguuuu

SEQ ID NO: 1379666 - RNA, 19 nt, Homo sapiens
  misc_RNA (1)...(19): siRNA sense strand
gaagaggaggcgcgaauag

SEQ ID NO: 1379667 - RNA, 19 nt, Homo sapiens
  misc_RNA (1)...(19): siRNA sense strand
ggaagaauacaagcgauug

SEQ ID NO: 1379668 - RNA, 19 nt, Homo sapiens
  misc_RNA (1)...(19): siRNA sense strand
ccacguggaacagagauua

SEQ ID NO: 1379669 - RNA, 19 nt, Homo sapiens
  misc_RNA (1)...(19): siRNA sense strand
gcgaauagaggcccugugu

SEQ ID NO: 1379670 - RNA, 19 nt, Homo sapiens
  misc_RNA (1)...(19): siRNA sense strand
uagaggcccugugugauga

SEQ ID NO: 1379671 - RNA, 19 nt, Homo sapiens
  misc_RNA (1)...(19): siRNA sense strand
gcgccaaacccgagaggaa

SEQ ID NO: 1379672 - RNA, 19 nt, Homo sapiens
  misc_RNA (1)...(19): siRNA sense strand
gcaugaccuuucugaguac

SEQ ID NO: 1379673 - RNA, 19 nt, Homo sapiens
  misc_RNA (1)...(19): siRNA sense strand
cgaguggagcucuugguuu

SEQ ID NO: 1379674 - RNA, 19 nt, Homo sapiens
  misc_RNA (1)...(19): siRNA sense strand
ugaagaggaggcgcgaaua

SEQ ID NO: 1379675 - RNA, 19 nt, Homo sapiens
  misc_RNA (1)...(19): siRNA sense strand
aauacaagcgauugaguga

SEQ ID NO: 1379676 - RNA, 19 nt, Homo sapiens
  misc_RNA (1)...(19): siRNA sense strand
gauccucaucgacagauau

SEQ ID NO: 1379677 - RNA, 19 nt, Homo sapiens
  misc_RNA (1)...(19): siRNA sense strand
gacguggucaccugcauga

SEQ ID NO: 1379678 - RNA, 19 nt, Homo sapiens
  misc_RNA (1)...(19): siRNA sense strand
guacgaugcugaguauucc

SEQ ID NO: 1379679 - RNA, 19 nt, Homo sapiens
  misc_RNA (1)...(19): siRNA sense strand
caagauccucaucgacaga

SEQ ID NO: 1379680 - RNA, 19 nt, Homo sapiens
  misc_RNA (1)...(19): siRNA sense strand
ucaccugcaugaccuuucu

SEQ ID NO: 1379681 - RNA, 19 nt, Homo sapiens
  misc_RNA (1)...(19): siRNA sense strand
auagaggcccugugugaug

SEQ ID NO: 1379682 - RNA, 19 nt, Homo sapiens
  misc_RNA (1)...(19): siRNA sense strand
cugaguacgaugcugagua

SEQ ID NO: 1379683 - RNA, 19 nt, Homo sapiens
  misc_RNA (1)...(19): siRNA sense strand
gcagccgaguggagcucuu

SEQ ID NO: 1379684 - RNA, 19 nt, Homo sapiens
  misc_RNA (1)...(19): siRNA sense strand
gcucuugguuuucggcuau

SEQ ID NO: 1379685 - RNA, 19 nt, Homo sapiens
  misc_RNA (1)...(19): siRNA sense strand
gggacacgcuggagcauua

SEQ ID NO: 1379686 - RNA, 19 nt, Homo sapiens
  misc_RNA (1)...(19): siRNA sense strand
caccugcccugaccaguuu

SEQ ID NO: 1379687 - RNA, 19 nt, Homo sapiens
  misc_RNA (1)...(19): siRNA sense strand
cggaggugcucauguuuga

SEQ ID NO: 1379688 - RNA, 19 nt, Homo sapiens
  misc_RNA (1)...(19): siRNA sense strand
gaccguaaacccucacgua

SEQ ID NO: 1379689 - RNA, 19 nt, Homo sapiens
  misc_RNA (1)...(19): siRNA sense strand
gaugacucccguuagcuua

SEQ ID NO: 1379690 - RNA, 19 nt, Homo sapiens
  misc_RNA (1)...(19): siRNA sense strand
acacacagccagaccguaa

SEQ ID NO: 1379691 - RNA, 19 nt, Homo sapiens
  misc_RNA (1)...(19): siRNA sense strand
gcaccugcccugaccaguu

SEQ ID NO: 1379692 - RNA, 19 nt, Homo sapiens
  misc_RNA (1)...(19): siRNA sense strand
caacguggccaccuucauc

SEQ ID NO: 1379693 - RNA, 19 nt, Homo sapiens
  misc_RNA (1)...(19): siRNA sense strand
gcgacaacguggccaccuu

SEQ ID NO: 1379694 - RNA, 19 nt, Homo sapiens
  misc_RNA (1)...(19): siRNA sense strand
gcuccugacucugccuauu

SEQ ID NO: 1379695 - RNA, 19 nt, Homo sapiens
  misc_RNA (1)...(19): siRNA sense strand
ccugagaugacucccguua

SEQ ID NO: 1379696 - RNA, 19 nt, Homo sapiens
  misc_RNA (1)...(19): siRNA sense strand
ggcaugcccugcacucagu

SEQ ID NO: 1379697 - RNA, 19 nt, Homo sapiens
  misc_RNA (1)...(19): siRNA sense strand
cguaaacccucacguaucc

SEQ ID NO: 1379698 - RNA, 19 nt, Homo sapiens
  misc_RNA (1)...(19): siRNA sense strand
gagacgggcagcacucaug

SEQ ID NO: 1379699 - RNA, 19 nt, Homo sapiens
  misc_RNA (1)...(19): siRNA sense strand
cguccuggguggcaaaugu

SEQ ID NO: 1379700 - RNA, 19 nt, Homo sapiens
  misc_RNA (1)...(19): siRNA sense strand
ugccggaggugcucauguu

SEQ ID NO: 1379701 - RNA, 19 nt, Homo sapiens
  misc_RNA (1)...(19): siRNA sense strand
ugagaugacucccguuagc

SEQ ID NO: 1379702 - RNA, 19 nt, Homo sapiens
  misc_RNA (1)...(19): siRNA sense strand
ccaagagcgugcggccauu

SEQ ID NO: 1379703 - RNA, 19 nt, Homo sapiens
  misc_RNA (1)...(19): siRNA sense strand
ccugaccaguuucccauga

SEQ ID NO: 1379704 - RNA, 19 nt, Homo sapiens
  misc_RNA (1)...(19): siRNA sense strand
caagagcgugcggccauuu

SEQ ID NO: 1379705 - RNA, 19 nt, Homo sapiens
  misc_RNA (1)...(19): siRNA sense strand
agcauuaccuggacaagca

SEQ ID NO: 1379706 - RNA, 19 nt, Homo sapiens
  misc_RNA (1)...(19): siRNA sense strand
gcaguuugagcaggagauu

SEQ ID NO: 1379707 - RNA, 19 nt, Homo sapiens
  misc_RNA (1)...(19): siRNA sense strand
ggccauuucgcuccaguga

SEQ ID NO: 1379708 - RNA, 19 nt, Homo sapiens
  misc_RNA (1)...(19): siRNA sense strand
gcugaggagccacgugaug

SEQ ID NO: 1379709 - RNA, 19 nt, Homo sapiens
  misc_RNA (1)...(19): siRNA sense strand
gaccuggugcugcgcaaga

SEQ ID NO: 1379710 - RNA, 19 nt, Homo sapiens
  misc_RNA (1)...(19): siRNA sense strand
ugaccaguuucccaugauc

SEQ ID NO: 1379711 - RNA, 19 nt, Homo sapiens
  misc_RNA (1)...(19): siRNA sense strand
gccgagggucugcaccuuu

SEQ ID NO: 1379712 - RNA, 19 nt, Homo sapiens
  misc_RNA (1)...(19): siRNA sense strand
gggaggacaccacugaaac

SEQ ID NO: 1379713 - RNA, 19 nt, Homo sapiens
  misc_RNA (1)...(19): siRNA sense strand
gccuauuguuccuccaguu

SEQ ID NO: 1379714 - RNA, 19 nt, Homo sapiens
  misc_RNA (1)...(19): siRNA sense strand
gggacacgcuggagcauua

SEQ ID NO: 1379715 - RNA, 19 nt, Homo sapiens
  misc_RNA (1)...(19): siRNA sense strand
caccugcccugaccaguuu

SEQ ID NO: 1379716 - RNA, 19 nt, Homo sapiens
  misc_RNA (1)...(19): siRNA sense strand
cggaggugcucauguuuga

SEQ ID NO: 1379717 - RNA, 19 nt, Homo sapiens
  misc_RNA (1)...(19): siRNA sense strand
gaccguaaacccucacgua

SEQ ID NO: 1379718 - RNA, 19 nt, Homo sapiens
  misc_RNA (1)...(19): siRNA sense strand
gaugacucccguuagcuua

SEQ ID NO: 1379719 - RNA, 19 nt, Homo sapiens
  misc_RNA (1)...(19): siRNA sense strand
acacacagccagaccguaa

SEQ ID NO: 1379720 - RNA, 19 nt, Homo sapiens
  misc_RNA (1)...(19): siRNA sense strand
gcaccugcccugaccaguu

SEQ ID NO: 1379721 - RNA, 19 nt, Homo sapiens
  misc_RNA (1)...(19): siRNA sense strand
caacguggccaccuucauc

SEQ ID NO: 1379722 - RNA, 19 nt, Homo sapiens
  misc_RNA (1)...(19): siRNA sense strand
gcgacaacguggccaccuu

SEQ ID NO: 1379723 - RNA, 19 nt, Homo sapiens
  misc_RNA (1)...(19): siRNA sense strand
gcuccugacucugccuauu

SEQ ID NO: 1379724 - RNA, 19 nt, Homo sapiens
  misc_RNA (1)...(19): siRNA sense strand
ccugagaugacucccguua

SEQ ID NO: 1379725 - RNA, 19 nt, Homo sapiens
  misc_RNA (1)...(19): siRNA sense strand
ggcaugcccugcacucagu

SEQ ID NO: 1379726 - RNA, 19 nt, Homo sapiens
  misc_RNA (1)...(19): siRNA sense strand
cguaaacccucacguaucc

SEQ ID NO: 1379727 - RNA, 19 nt, Homo sapiens
  misc_RNA (1)...(19): siRNA sense strand
gagacgggcagcacucaug

SEQ ID NO: 1379728 - RNA, 19 nt, Homo sapiens
  misc_RNA (1)...(19): siRNA sense strand
cguccuggguggcaaaugu

SEQ ID NO: 1379729 - RNA, 19 nt, Homo sapiens
  misc_RNA (1)...(19): siRNA sense strand
ugccggaggugcucauguu

SEQ ID NO: 1379730 - RNA, 19 nt, Homo sapiens
  misc_RNA (1)...(19): siRNA sense strand
ugagaugacucccguuagc

SEQ ID NO: 1379731 - RNA, 19 nt, Homo sapiens
  misc_RNA (1)...(19): siRNA sense strand
ccaagagcgugcggccauu

SEQ ID NO: 1379732 - RNA, 19 nt, Homo sapiens
  misc_RNA (1)...(19): siRNA sense strand
ccugaccaguuucccauga

SEQ ID NO: 1379733 - RNA, 19 nt, Homo sapiens
  misc_RNA (1)...(19): siRNA sense strand
caagagcgugcggccauuu

SEQ ID NO: 1379734 - RNA, 19 nt, Homo sapiens
  misc_RNA (1)...(19): siRNA sense strand
agcauuaccuggacaagca

SEQ ID NO: 1379735 - RNA, 19 nt, Homo sapiens
  misc_RNA (1)...(19): siRNA sense strand
gcaguuugagcaggagauu

SEQ ID NO: 1379736 - RNA, 19 nt, Homo sapiens
  misc_RNA (1)...(19): siRNA sense strand
ggccauuucgcuccaguga

SEQ ID NO: 1379737 - RNA, 19 nt, Homo sapiens
  misc_RNA (1)...(19): siRNA sense strand
gcugaggagccacgugaug

SEQ ID NO: 1379738 - RNA, 19 nt, Homo sapiens
  misc_RNA (1)...(19): siRNA sense strand
gaccuggugcugcgcaaga

SEQ ID NO: 1379739 - RNA, 19 nt, Homo sapiens
  misc_RNA (1)...(19): siRNA sense strand
ugaccaguuucccaugauc

SEQ ID NO: 1379740 - RNA, 19 nt, Homo sapiens
  misc_RNA (1)...(19): siRNA sense strand
gccgagggucugcaccuuu

SEQ ID NO: 1379741 - RNA, 19 nt, Homo sapiens
  misc_RNA (1)...(19): siRNA sense strand
gggaggacaccacugaaac

SEQ ID NO: 1379742 - RNA, 19 nt, Homo sapiens
  misc_RNA (1)...(19): siRNA sense strand
gccuauuguuccuccaguu

SEQ ID NO: 1379743 - RNA, 19 nt, Homo sapiens
  misc_RNA (1)...(19): siRNA sense strand
gggacacgcuggagcauua

SEQ ID NO: 1379744 - RNA, 19 nt, Homo sapiens
  misc_RNA (1)...(19): siRNA sense strand
caccugcccugaccaguuu

SEQ ID NO: 1379745 - RNA, 19 nt, Homo sapiens
  misc_RNA (1)...(19): siRNA sense strand
cggaggugcucauguuuga

SEQ ID NO: 1379746 - RNA, 19 nt, Homo sapiens
  misc_RNA (1)...(19): siRNA sense strand
gaugacucccguuagcuua

SEQ ID NO: 1379747 - RNA, 19 nt, Homo sapiens
  misc_RNA (1)...(19): siRNA sense strand
gcaccugcccugaccaguu

SEQ ID NO: 1379748 - RNA, 19 nt, Homo sapiens
  misc_RNA (1)...(19): siRNA sense strand
caacguggccaccuucauc

SEQ ID NO: 1379749 - RNA, 19 nt, Homo sapiens
  misc_RNA (1)...(19): siRNA sense strand
gcgacaacguggccaccuu

SEQ ID NO: 1379750 - RNA, 19 nt, Homo sapiens
  misc_RNA (1)...(19): siRNA sense strand
ccugagaugacucccguua

SEQ ID NO: 1379751 - RNA, 19 nt, Homo sapiens
  misc_RNA (1)...(19): siRNA sense strand
ugccggaggugcucauguu

SEQ ID NO: 1379752 - RNA, 19 nt, Homo sapiens
  misc_RNA (1)...(19): siRNA sense strand
ugagaugacucccguuagc

SEQ ID NO: 1379753 - RNA, 19 nt, Homo sapiens
  misc_RNA (1)...(19): siRNA sense strand
ccaagagcgugcggccauu

SEQ ID NO: 1379754 - RNA, 19 nt, Homo sapiens
  misc_RNA (1)...(19): siRNA sense strand
ccugaccaguuucccauga

SEQ ID NO: 1379755 - RNA, 19 nt, Homo sapiens
  misc_RNA (1)...(19): siRNA sense strand
caagagcgugcggccauuu

SEQ ID NO: 1379756 - RNA, 19 nt, Homo sapiens
  misc_RNA (1)...(19): siRNA sense strand
agcauuaccuggacaagca

SEQ ID NO: 1379757 - RNA, 19 nt, Homo sapiens
  misc_RNA (1)...(19): siRNA sense strand
gcaguuugagcaggagauu

SEQ ID NO: 1379758 - RNA, 19 nt, Homo sapiens
  misc_RNA (1)...(19): siRNA sense strand
gcugaggagccacgugaug

SEQ ID NO: 1379759 - RNA, 19 nt, Homo sapiens
  misc_RNA (1)...(19): siRNA sense strand
ggccauuucgcuccaguga

SEQ ID NO: 1379760 - RNA, 19 nt, Homo sapiens
  misc_RNA (1)...(19): siRNA sense strand
gaccuggugcugcgcaaga

SEQ ID NO: 1379761 - RNA, 19 nt, Homo sapiens
  misc_RNA (1)...(19): siRNA sense strand
ugaccaguuucccaugauc

SEQ ID NO: 1379762 - RNA, 19 nt, Homo sapiens
  misc_RNA (1)...(19): siRNA sense strand
gccgagggucugcaccuuu

SEQ ID NO: 1379763 - RNA, 19 nt, Homo sapiens
  misc_RNA (1)...(19): siRNA sense strand
gggaggacaccacugaaac

SEQ ID NO: 1379764 - RNA, 19 nt, Homo sapiens
  misc_RNA (1)...(19): siRNA sense strand
gggacacgcuggagcauua

SEQ ID NO: 1379765 - RNA, 19 nt, Homo sapiens
  misc_RNA (1)...(19): siRNA sense strand
caccugcccugaccaguuu

SEQ ID NO: 1379766 - RNA, 19 nt, Homo sapiens
  misc_RNA (1)...(19): siRNA sense strand
cggaggugcucauguuuga

SEQ ID NO: 1379767 - RNA, 19 nt, Homo sapiens
  misc_RNA (1)...(19): siRNA sense strand
gaccguaaacccucacgua

SEQ ID NO: 1379768 - RNA, 19 nt, Homo sapiens
  misc_RNA (1)...(19): siRNA sense strand
gaugacucccguuagcuua

SEQ ID NO: 1379769 - RNA, 19 nt, Homo sapiens
  misc_RNA (1)...(19): siRNA sense strand
acacacagccagaccguaa

SEQ ID NO: 1379770 - RNA, 19 nt, Homo sapiens
  misc_RNA (1)...(19): siRNA sense strand
gcaccugcccugaccaguu

SEQ ID NO: 1379771 - RNA, 19 nt, Homo sapiens
  misc_RNA (1)...(19): siRNA sense strand
caacguggccaccuucauc

SEQ ID NO: 1379772 - RNA, 19 nt, Homo sapiens
  misc_RNA (1)...(19): siRNA sense strand
gcgacaacguggccaccuu

SEQ ID NO: 1379773 - RNA, 19 nt, Homo sapiens
  misc_RNA (1)...(19): siRNA sense strand
gcuccugacucugccuauu

SEQ ID NO: 1379774 - RNA, 19 nt, Homo sapiens
  misc_RNA (1)...(19): siRNA sense strand
ccugagaugacucccguua

SEQ ID NO: 1379775 - RNA, 19 nt, Homo sapiens
  misc_RNA (1)...(19): siRNA sense strand
ggcaugcccugcacucagu

SEQ ID NO: 1379776 - RNA, 19 nt, Homo sapiens
  misc_RNA (1)...(19): siRNA sense strand
cguaaacccucacguaucc

SEQ ID NO: 1379777 - RNA, 19 nt, Homo sapiens
  misc_RNA (1)...(19): siRNA sense strand
gagacgggcagcacucaug

SEQ ID NO: 1379778 - RNA, 19 nt, Homo sapiens
  misc_RNA (1)...(19): siRNA sense strand
cguccuggguggcaaaugu

SEQ ID NO: 1379779 - RNA, 19 nt, Homo sapiens
  misc_RNA (1)...(19): siRNA sense strand
ugccggaggugcucauguu

SEQ ID NO: 1379780 - RNA, 19 nt, Homo sapiens
  misc_RNA (1)...(19): siRNA sense strand
ugagaugacucccguuagc

SEQ ID NO: 1379781 - RNA, 19 nt, Homo sapiens
  misc_RNA (1)...(19): siRNA sense strand
ccaagagcgugcggccauu

SEQ ID NO: 1379782 - RNA, 19 nt, Homo sapiens
  misc_RNA (1)...(19): siRNA sense strand
ccugaccaguuucccauga

SEQ ID NO: 1379783 - RNA, 19 nt, Homo sapiens
  misc_RNA (1)...(19): siRNA sense strand
caagagcgugcggccauuu

SEQ ID NO: 1379784 - RNA, 19 nt, Homo sapiens
  misc_RNA (1)...(19): siRNA sense strand
agcauuaccuggacaagca

SEQ ID NO: 1379785 - RNA, 19 nt, Homo sapiens
  misc_RNA (1)...(19): siRNA sense strand
gcaguuugagcaggagauu

SEQ ID NO: 1379786 - RNA, 19 nt, Homo sapiens
  misc_RNA (1)...(19): siRNA sense strand
ggccauuucgcuccaguga

SEQ ID NO: 1379787 - RNA, 19 nt, Homo sapiens
  misc_RNA (1)...(19): siRNA sense strand
gcugaggagccacgugaug

SEQ ID NO: 1379788 - RNA, 19 nt, Homo sapiens
  misc_RNA (1)...(19): siRNA sense strand
gaccuggugcugcgcaaga

SEQ ID NO: 1379789 - RNA, 19 nt, Homo sapiens
  misc_RNA (1)...(19): siRNA sense strand
ugaccaguuucccaugauc

SEQ ID NO: 1379790 - RNA, 19 nt, Homo sapiens
  misc_RNA (1)...(19): siRNA sense strand
gccgagggucugcaccuuu

SEQ ID NO: 1379791 - RNA, 19 nt, Homo sapiens
  misc_RNA (1)...(19): siRNA sense strand
gggaggacaccacugaaac

SEQ ID NO: 1379792 - RNA, 19 nt, Homo sapiens
  misc_RNA (1)...(19): siRNA sense strand
gccuauuguuccuccaguu

SEQ ID NO: 1379793 - RNA, 19 nt, Homo sapiens
  misc_RNA (1)...(19): siRNA sense strand
gggacacgcuggagcauua

SEQ ID NO: 1379794 - RNA, 19 nt, Homo sapiens
  misc_RNA (1)...(19): siRNA sense strand
caccugcccugaccaguuu

SEQ ID NO: 1379795 - RNA, 19 nt, Homo sapiens
  misc_RNA (1)...(19): siRNA sense strand
cggaggugcucauguuuga

SEQ ID NO: 1379796 - RNA, 19 nt, Homo sapiens
  misc_RNA (1)...(19): siRNA sense strand
gaccguaaacccucacgua

SEQ ID NO: 1379797 - RNA, 19 nt, Homo sapiens
  misc_RNA (1)...(19): siRNA sense strand
gaugacucccguuagcuua

SEQ ID NO: 1379798 - RNA, 19 nt, Homo sapiens
  misc_RNA (1)...(19): siRNA sense strand
acacacagccagaccguaa

SEQ ID NO: 1379799 - RNA, 19 nt, Homo sapiens
  misc_RNA (1)...(19): siRNA sense strand
gcaccugcccugaccaguu

SEQ ID NO: 1379800 - RNA, 19 nt, Homo sapiens
  misc_RNA (1)...(19): siRNA sense strand
caacguggccaccuucauc

SEQ ID NO: 1379801 - RNA, 19 nt, Homo sapiens
  misc_RNA (1)...(19): siRNA sense strand
gcgacaacguggccaccuu

SEQ ID NO: 1379802 - RNA, 19 nt, Homo sapiens
  misc_RNA (1)...(19): siRNA sense strand
gcuccugacucugccuauu

SEQ ID NO: 1379803 - RNA, 19 nt, Homo sapiens
  misc_RNA (1)...(19): siRNA sense strand
ccugagaugacucccguua

SEQ ID NO: 1379804 - RNA, 19 nt, Homo sapiens
  misc_RNA (1)...(19): siRNA sense strand
ggcaugcccugcacucagu

SEQ ID NO: 1379805 - RNA, 19 nt, Homo sapiens
  misc_RNA (1)...(19): siRNA sense strand
cguaaacccucacguaucc

SEQ ID NO: 1379806 - RNA, 19 nt, Homo sapiens
  misc_RNA (1)...(19): siRNA sense strand
gagacgggcagcacucaug

SEQ ID NO: 1379807 - RNA, 19 nt, Homo sapiens
  misc_RNA (1)...(19): siRNA sense strand
cguccuggguggcaaaugu

SEQ ID NO: 1379808 - RNA, 19 nt, Homo sapiens
  misc_RNA (1)...(19): siRNA sense strand
ugccggaggugcucauguu

SEQ ID NO: 1379809 - RNA, 19 nt, Homo sapiens
  misc_RNA (1)...(19): siRNA sense strand
ugagaugacucccguuagc

SEQ ID NO: 1379810 - RNA, 19 nt, Homo sapiens
  misc_RNA (1)...(19): siRNA sense strand
ccaagagcgugcggccauu

SEQ ID NO: 1379811 - RNA, 19 nt, Homo sapiens
  misc_RNA (1)...(19): siRNA sense strand
ccugaccaguuucccauga

SEQ ID NO: 1379812 - RNA, 19 nt, Homo sapiens
  misc_RNA (1)...(19): siRNA sense strand
caagagcgugcggccauuu

SEQ ID NO: 1379813 - RNA, 19 nt, Homo sapiens
  misc_RNA (1)...(19): siRNA sense strand
agcauuaccuggacaagca

SEQ ID NO: 1379814 - RNA, 19 nt, Homo sapiens
  misc_RNA (1)...(19): siRNA sense strand
gcaguuugagcaggagauu

SEQ ID NO: 1379815 - RNA, 19 nt, Homo sapiens
  misc_RNA (1)...(19): siRNA sense strand
ggccauuucgcuccaguga

SEQ ID NO: 1379816 - RNA, 19 nt, Homo sapiens
  misc_RNA (1)...(19): siRNA sense strand
gcugaggagccacgugaug

SEQ ID NO: 1379817 - RNA, 19 nt, Homo sapiens
  misc_RNA (1)...(19): siRNA sense strand
gaccuggugcugcgcaaga

SEQ ID NO: 1379818 - RNA, 19 nt, Homo sapiens
  misc_RNA (1)...(19): siRNA sense strand
ugaccaguuucccaugauc

SEQ ID NO: 1379819 - RNA, 19 nt, Homo sapiens
  misc_RNA (1)...(19): siRNA sense strand
gccgagggucugcaccuuu

SEQ ID NO: 1379820 - RNA, 19 nt, Homo sapiens
  misc_RNA (1)...(19): siRNA sense strand
gggaggacaccacugaaac

SEQ ID NO: 1379821 - RNA, 19 nt, Homo sapiens
  misc_RNA (1)...(19): siRNA sense strand
gccuauuguuccuccaguu

SEQ ID NO: 1379822 - RNA, 19 nt, Homo sapiens
  misc_RNA (1)...(19): siRNA sense strand
gggacacgcuggagcauua

SEQ ID NO: 1379823 - RNA, 19 nt, Homo sapiens
  misc_RNA (1)...(19): siRNA sense strand
caccugcccugaccaguuu

SEQ ID NO: 1379824 - RNA, 19 nt, Homo sapiens
  misc_RNA (1)...(19): siRNA sense strand
cggaggugcucauguuuga

SEQ ID NO: 1379825 - RNA, 19 nt, Homo sapiens
  misc_RNA (1)...(19): siRNA sense strand
gaugacucccguuagcuua

SEQ ID NO: 1379826 - RNA, 19 nt, Homo sapiens
  misc_RNA (1)...(19): siRNA sense strand
gcaccugcccugaccaguu

SEQ ID NO: 1379827 - RNA, 19 nt, Homo sapiens
  misc_RNA (1)...(19): siRNA sense strand
caacguggccaccuucauc

SEQ ID NO: 1379828 - RNA, 19 nt, Homo sapiens
  misc_RNA (1)...(19): siRNA sense strand
gcgacaacguggccaccuu

SEQ ID NO: 1379829 - RNA, 19 nt, Homo sapiens
  misc_RNA (1)...(19): siRNA sense strand
ccugagaugacucccguua

SEQ ID NO: 1379830 - RNA, 19 nt, Homo sapiens
  misc_RNA (1)...(19): siRNA sense strand
ugccggaggugcucauguu

SEQ ID NO: 1379831 - RNA, 19 nt, Homo sapiens
  misc_RNA (1)...(19): siRNA sense strand
ugagaugacucccguuagc

SEQ ID NO: 1379832 - RNA, 19 nt, Homo sapiens
  misc_RNA (1)...(19): siRNA sense strand
ccaagagcgugcggccauu

SEQ ID NO: 1379833 - RNA, 19 nt, Homo sapiens
  misc_RNA (1)...(19): siRNA sense strand
ccugaccaguuucccauga

SEQ ID NO: 1379834 - RNA, 19 nt, Homo sapiens
  misc_RNA (1)...(19): siRNA sense strand
caagagcgugcggccauuu

SEQ ID NO: 1379835 - RNA, 19 nt, Homo sapiens
  misc_RNA (1)...(19): siRNA sense strand
agcauuaccuggacaagca

SEQ ID NO: 1379836 - RNA, 19 nt, Homo sapiens
  misc_RNA (1)...(19): siRNA sense strand
gcaguuugagcaggagauu

SEQ ID NO: 1379837 - RNA, 19 nt, Homo sapiens
  misc_RNA (1)...(19): siRNA sense strand
gcugaggagccacgugaug

SEQ ID NO: 1379838 - RNA, 19 nt, Homo sapiens
  misc_RNA (1)...(19): siRNA sense strand
ggccauuucgcuccaguga

SEQ ID NO: 1379839 - RNA, 19 nt, Homo sapiens
  misc_RNA (1)...(19): siRNA sense strand
gaccuggugcugcgcaaga

SEQ ID NO: 1379840 - RNA, 19 nt, Homo sapiens
  misc_RNA (1)...(19): siRNA sense strand
ugaccaguuucccaugauc

SEQ ID NO: 1379841 - RNA, 19 nt, Homo sapiens
  misc_RNA (1)...(19): siRNA sense strand
gccgagggucugcaccuuu

SEQ ID NO: 1379842 - RNA, 19 nt, Homo sapiens
  misc_RNA (1)...(19): siRNA sense strand
gggaggacaccacugaaac

SEQ ID NO: 1379843 - RNA, 19 nt, Homo sapiens
  misc_RNA (1)...(19): siRNA sense strand
gaaagaauauggcccaauu

SEQ ID NO: 1379844 - RNA, 19 nt, Homo sapiens
  misc_RNA (1)...(19): siRNA sense strand
gaagaagccucugaagaua

SEQ ID NO: 1379845 - RNA, 19 nt, Homo sapiens
  misc_RNA (1)...(19): siRNA sense strand
gcaggaaggcuuuacauaa

SEQ ID NO: 1379846 - RNA, 19 nt, Homo sapiens
  misc_RNA (1)...(19): siRNA sense strand
ggaagaagccucugaagau

SEQ ID NO: 1379847 - RNA, 19 nt, Homo sapiens
  misc_RNA (1)...(19): siRNA sense strand
guuaauggguguuaugaaa

SEQ ID NO: 1379848 - RNA, 19 nt, Homo sapiens
  misc_RNA (1)...(19): siRNA sense strand
gaauuugacuccagugaau

SEQ ID NO: 1379849 - RNA, 19 nt, Homo sapiens
  misc_RNA (1)...(19): siRNA sense strand
gaaccugaaagucauguua

SEQ ID NO: 1379850 - RNA, 19 nt, Homo sapiens
  misc_RNA (1)...(19): siRNA sense strand
gaaaagaagagaccaaaua

SEQ ID NO: 1379851 - RNA, 19 nt, Homo sapiens
  misc_RNA (1)...(19): siRNA sense strand
gagacgauaucaagauuuc

SEQ ID NO: 1379852 - RNA, 19 nt, Homo sapiens
  misc_RNA (1)...(19): siRNA sense strand
ggaacucucuucucacaag

SEQ ID NO: 1379853 - RNA, 19 nt, Homo sapiens
  misc_RNA (1)...(19): siRNA sense strand
gaaauguuaauggguguua

SEQ ID NO: 1379854 - RNA, 19 nt, Homo sapiens
  misc_RNA (1)...(19): siRNA sense strand
gaaguuaggagacgauauc

SEQ ID NO: 1379855 - RNA, 19 nt, Homo sapiens
  misc_RNA (1)...(19): siRNA sense strand
gcggaugucuggacucuca

SEQ ID NO: 1379856 - RNA, 19 nt, Homo sapiens
  misc_RNA (1)...(19): siRNA sense strand
gaagaggaucugguugaua

SEQ ID NO: 1379857 - RNA, 19 nt, Homo sapiens
  misc_RNA (1)...(19): siRNA sense strand
ccagaggaguucauggaaa

SEQ ID NO: 1379858 - RNA, 19 nt, Homo sapiens
  misc_RNA (1)...(19): siRNA sense strand
gcuguugcguccucaauga

SEQ ID NO: 1379859 - RNA, 19 nt, Homo sapiens
  misc_RNA (1)...(19): siRNA sense strand
agaagccucugaagauaaa

SEQ ID NO: 1379860 - RNA, 19 nt, Homo sapiens
  misc_RNA (1)...(19): siRNA sense strand
gaaccgaauugcugaucau

SEQ ID NO: 1379861 - RNA, 19 nt, Homo sapiens
  misc_RNA (1)...(19): siRNA sense strand
cagaggaguucauggaaau

SEQ ID NO: 1379862 - RNA, 19 nt, Homo sapiens
  misc_RNA (1)...(19): siRNA sense strand
uaaaggaucucuucaucac

SEQ ID NO: 1379863 - RNA, 19 nt, Homo sapiens
  misc_RNA (1)...(19): siRNA sense strand
gaaagucauguuacuacaa

SEQ ID NO: 1379864 - RNA, 19 nt, Homo sapiens
  misc_RNA (1)...(19): siRNA sense strand
caagauuuccuuugguuga

SEQ ID NO: 1379865 - RNA, 19 nt, Homo sapiens
  misc_RNA (1)...(19): siRNA sense strand
guacgugcuuuauagugaa

SEQ ID NO: 1379866 - RNA, 19 nt, Homo sapiens
  misc_RNA (1)...(19): siRNA sense strand
ggaaugguggaacgcuuua

SEQ ID NO: 1379867 - RNA, 19 nt, Homo sapiens
  misc_RNA (1)...(19): siRNA sense strand
aagaagagaccaaauacaa

SEQ ID NO: 1379868 - RNA, 19 nt, Homo sapiens
  misc_RNA (1)...(19): siRNA sense strand
ggaugaaccagauuuaaag

SEQ ID NO: 1379869 - RNA, 19 nt, Homo sapiens
  misc_RNA (1)...(19): siRNA sense strand
gaaagggaauauuuugaug

SEQ ID NO: 1379870 - RNA, 19 nt, Homo sapiens
  misc_RNA (1)...(19): siRNA sense strand
ugaaccagauuuaaaggau

SEQ ID NO: 1379871 - RNA, 19 nt, Homo sapiens
  misc_RNA (1)...(19): siRNA sense strand
aagaggaucugguugauac

SEQ ID NO: 1379872 - RNA, 19 nt, Homo sapiens
  misc_RNA (1)...(19): siRNA sense strand
gaggaugaaccagauuuaa

SEQ ID NO: 1379873 - RNA, 19 nt, Homo sapiens
  misc_RNA (1)...(19): siRNA sense strand
ggaauuugacuccagugaa

SEQ ID NO: 1379874 - RNA, 19 nt, Homo sapiens
  misc_RNA (1)...(19): siRNA sense strand
gaagaaagggaauauuuug

SEQ ID NO: 1379875 - RNA, 19 nt, Homo sapiens
  misc_RNA (1)...(19): siRNA sense strand
ugaacuauuuagccagaaa

SEQ ID NO: 1379876 - RNA, 19 nt, Homo sapiens
  misc_RNA (1)...(19): siRNA sense strand
ugacuccagugaauuugaa

SEQ ID NO: 1379877 - RNA, 19 nt, Homo sapiens
  misc_RNA (1)...(19): siRNA sense strand
ggaagaaagggaauauuuu

SEQ ID NO: 1379878 - RNA, 19 nt, Homo sapiens
  misc_RNA (1)...(19): siRNA sense strand
ccagugaauuugaaguuag

SEQ ID NO: 1379879 - RNA, 19 nt, Homo sapiens
  misc_RNA (1)...(19): siRNA sense strand
gcugaucauccaacuuuaa

SEQ ID NO: 1379880 - RNA, 19 nt, Homo sapiens
  misc_RNA (1)...(19): siRNA sense strand
ccucugaagauaaaccuua

SEQ ID NO: 1379881 - RNA, 19 nt, Homo sapiens
  misc_RNA (1)...(19): siRNA sense strand
aggaagaaagggaauauuu

SEQ ID NO: 1379882 - RNA, 19 nt, Homo sapiens
  misc_RNA (1)...(19): siRNA sense strand
ggagacgauaucaagauuu

SEQ ID NO: 1379883 - RNA, 19 nt, Homo sapiens
  misc_RNA (1)...(19): siRNA sense strand
ggaucugguugauacucua

SEQ ID NO: 1379884 - RNA, 19 nt, Homo sapiens
  misc_RNA (1)...(19): siRNA sense strand
gcacaccccacucugauua

SEQ ID NO: 1379885 - RNA, 19 nt, Homo sapiens
  misc_RNA (1)...(19): siRNA sense strand
gauaucaagauuuccuuug

SEQ ID NO: 1379886 - RNA, 19 nt, Homo sapiens
  misc_RNA (1)...(19): siRNA sense strand
ccaaauacaagcagaacug

SEQ ID NO: 1379887 - RNA, 19 nt, Homo sapiens
  misc_RNA (1)...(19): siRNA sense strand
gcacaagcuugggaacucu

SEQ ID NO: 1379888 - RNA, 19 nt, Homo sapiens
  misc_RNA (1)...(19): siRNA sense strand
uccagugaauuugaaguua

SEQ ID NO: 1379889 - RNA, 19 nt, Homo sapiens
  misc_RNA (1)...(19): siRNA sense strand
caugaguacgugcuuuaua

SEQ ID NO: 1379890 - RNA, 19 nt, Homo sapiens
  misc_RNA (1)...(19): siRNA sense strand
gauguugccagcugcauug

SEQ ID NO: 1379891 - RNA, 19 nt, Homo sapiens
  misc_RNA (1)...(19): siRNA sense strand
gaucauccaacuuuaacau

SEQ ID NO: 1379892 - RNA, 19 nt, Homo sapiens
  misc_RNA (1)...(19): siRNA sense strand
ugaaagucauguuacuaca

SEQ ID NO: 1379893 - RNA, 19 nt, Homo sapiens
  misc_RNA (1)...(19): siRNA sense strand
uuuaaaggaucucuucauc

SEQ ID NO: 1379894 - RNA, 19 nt, Homo sapiens
  misc_RNA (1)...(19): siRNA sense strand
ugaggaugaaccagauuua

SEQ ID NO: 1379895 - RNA, 19 nt, Homo sapiens
  misc_RNA (1)...(19): siRNA sense strand
cuugggaacucucuucuca

SEQ ID NO: 1379896 - RNA, 19 nt, Homo sapiens
  misc_RNA (1)...(19): siRNA sense strand
aguacgugcuuuauaguga

SEQ ID NO: 1379897 - RNA, 19 nt, Homo sapiens
  misc_RNA (1)...(19): siRNA sense strand
ggagucauuccuuacauca

SEQ ID NO: 1379898 - RNA, 19 nt, Homo sapiens
  misc_RNA (1)...(19): siRNA sense strand
gggagucauuccuuacauc

SEQ ID NO: 1379899 - RNA, 19 nt, Homo sapiens
  misc_RNA (1)...(19): siRNA sense strand
aggagacgauaucaagauu

SEQ ID NO: 1379900 - RNA, 19 nt, Homo sapiens
  misc_RNA (1)...(19): siRNA sense strand
caucacagaccaaccuuca

SEQ ID NO: 1379901 - RNA, 19 nt, Homo sapiens
  misc_RNA (1)...(19): siRNA sense strand
caacauccccuuuaucaau

SEQ ID NO: 1379902 - RNA, 19 nt, Homo sapiens
  misc_RNA (1)...(19): siRNA sense strand
guuaggagacgauaucaag

SEQ ID NO: 1379903 - RNA, 19 nt, Homo sapiens
  misc_RNA (1)...(19): siRNA sense strand
ccagcugcauugacagaug

SEQ ID NO: 1379904 - RNA, 19 nt, Homo sapiens
  misc_RNA (1)...(19): siRNA sense strand
gaucugguugauacucuaa

SEQ ID NO: 1379905 - RNA, 19 nt, Homo sapiens
  misc_RNA (1)...(19): siRNA sense strand
ugggaacucucuucucaca

SEQ ID NO: 1379906 - RNA, 19 nt, Homo sapiens
  misc_RNA (1)...(19): siRNA sense strand
uacaugaguacgugcuuua

SEQ ID NO: 1379907 - RNA, 19 nt, Homo sapiens
  misc_RNA (1)...(19): siRNA sense strand
uaaggaagaaagggaauau

SEQ ID NO: 1379908 - RNA, 19 nt, Homo sapiens
  misc_RNA (1)...(19): siRNA sense strand
guugccagcugcauugaca

SEQ ID NO: 1379909 - RNA, 19 nt, Homo sapiens
  misc_RNA (1)...(19): siRNA sense strand
aagaagccucugaagauaa

SEQ ID NO: 1379910 - RNA, 19 nt, Homo sapiens
  misc_RNA (1)...(19): siRNA sense strand
augaguacgugcuuuauag

SEQ ID NO: 1379911 - RNA, 19 nt, Homo sapiens
  misc_RNA (1)...(19): siRNA sense strand
ccgaauugcugaucaucca

SEQ ID NO: 1379912 - RNA, 19 nt, Homo sapiens
  misc_RNA (1)...(19): siRNA sense strand
aggaugaaccagauuuaaa

SEQ ID NO: 1379913 - RNA, 19 nt, Homo sapiens
  misc_RNA (1)...(19): siRNA sense strand
gaucucuucaucacaguug

SEQ ID NO: 1379914 - RNA, 19 nt, Homo sapiens
  misc_RNA (1)...(19): siRNA sense strand
uugcugaucauccaacuuu

SEQ ID NO: 1379915 - RNA, 19 nt, Homo sapiens
  misc_RNA (1)...(19): siRNA sense strand
uggaacgcuuuaacgauga

SEQ ID NO: 1379916 - RNA, 19 nt, Homo sapiens
  misc_RNA (1)...(19): siRNA sense strand
uggaagaagccucugaaga

SEQ ID NO: 1379917 - RNA, 19 nt, Homo sapiens
  misc_RNA (1)...(19): siRNA sense strand
ugaaccgaauugcugauca

SEQ ID NO: 1379918 - RNA, 19 nt, Homo sapiens
  misc_RNA (1)...(19): siRNA sense strand
uaucaagauuuccuuuggu

SEQ ID NO: 1379919 - RNA, 19 nt, Homo sapiens
  misc_RNA (1)...(19): siRNA sense strand
agucauuccuuacaucaca

SEQ ID NO: 1379920 - RNA, 19 nt, Homo sapiens
  misc_RNA (1)...(19): siRNA sense strand
gguugauacucuaaaggau

SEQ ID NO: 1379921 - RNA, 19 nt, Homo sapiens
  misc_RNA (1)...(19): siRNA sense strand
agaagaggaucugguugau

SEQ ID NO: 1379922 - RNA, 19 nt, Homo sapiens
  misc_RNA (1)...(19): siRNA sense strand
cacaguugaugaaccugaa

SEQ ID NO: 1379923 - RNA, 19 nt, Homo sapiens
  misc_RNA (1)...(19): siRNA sense strand
gcccagaggaguucaugga

SEQ ID NO: 1379924 - RNA, 19 nt, Homo sapiens
  misc_RNA (1)...(19): siRNA sense strand
gcaaaccgucagagcuguu

SEQ ID NO: 1379925 - RNA, 19 nt, Homo sapiens
  misc_RNA (1)...(19): siRNA sense strand
gggaauuugacuccaguga

SEQ ID NO: 1379926 - RNA, 19 nt, Homo sapiens
  misc_RNA (1)...(19): siRNA sense strand
ggauguugccagcugcauu

SEQ ID NO: 1379927 - RNA, 19 nt, Homo sapiens
  misc_RNA (1)...(19): siRNA sense strand
cgcaggaaggcuuuacaua

SEQ ID NO: 1379928 - RNA, 19 nt, Homo sapiens
  misc_RNA (1)...(19): siRNA sense strand
ggcccugcuuccuguugua

SEQ ID NO: 1379929 - RNA, 19 nt, Homo sapiens
  misc_RNA (1)...(19): siRNA sense strand
aagauuuccuuugguugaa

SEQ ID NO: 1379930 - RNA, 19 nt, Homo sapiens
  misc_RNA (1)...(19): siRNA sense strand
ggauuccaaaguugaaguu

SEQ ID NO: 1379931 - RNA, 19 nt, Homo sapiens
  misc_RNA (1)...(19): siRNA sense strand
uugauacucuaaaggaugu

SEQ ID NO: 1379932 - RNA, 19 nt, Homo sapiens
  misc_RNA (1)...(19): siRNA sense strand
cucagagaauuuauaagga

SEQ ID NO: 1379933 - RNA, 19 nt, Homo sapiens
  misc_RNA (1)...(19): siRNA sense strand
uugaugaaccugaaaguca

SEQ ID NO: 1379934 - RNA, 19 nt, Homo sapiens
  misc_RNA (1)...(19): siRNA sense strand
gguggaacgcuuuaacgau

SEQ ID NO: 1379935 - RNA, 19 nt, Homo sapiens
  misc_RNA (1)...(19): siRNA sense strand
uuaaaggaucucuucauca

SEQ ID NO: 1379936 - RNA, 19 nt, Homo sapiens
  misc_RNA (1)...(19): siRNA sense strand
guuugaggaugaaccagau

SEQ ID NO: 1379937 - RNA, 19 nt, Homo sapiens
  misc_RNA (1)...(19): siRNA sense strand
gaagcacaccccacucuga

SEQ ID NO: 1379938 - RNA, 19 nt, Homo sapiens
  misc_RNA (1)...(19): siRNA sense strand
acgugggagucauuccuua

SEQ ID NO: 1379939 - RNA, 19 nt, Homo sapiens
  misc_RNA (1)...(19): siRNA sense strand
gaguacgugcuuuauagug

SEQ ID NO: 1379940 - RNA, 19 nt, Homo sapiens
  misc_RNA (1)...(19): siRNA sense strand
cgauaucaagauuuccuuu

SEQ ID NO: 1379941 - RNA, 19 nt, Homo sapiens
  misc_RNA (1)...(19): siRNA sense strand
ggauuauuacuaagacauc

SEQ ID NO: 1379942 - RNA, 19 nt, Homo sapiens
  misc_RNA (1)...(19): siRNA sense strand
cucugaagauaaaccuuaa

SEQ ID NO: 1379943 - RNA, 19 nt, Homo sapiens
  misc_RNA (1)...(19): siRNA sense strand
gaaagaauauggcccaauu

SEQ ID NO: 1379944 - RNA, 19 nt, Homo sapiens
  misc_RNA (1)...(19): siRNA sense strand
gaagaagccucugaagaua

SEQ ID NO: 1379945 - RNA, 19 nt, Homo sapiens
  misc_RNA (1)...(19): siRNA sense strand
gcaggaaggcuuuacauaa

SEQ ID NO: 1379946 - RNA, 19 nt, Homo sapiens
  misc_RNA (1)...(19): siRNA sense strand
ggaagaagccucugaagau

SEQ ID NO: 1379947 - RNA, 19 nt, Homo sapiens
  misc_RNA (1)...(19): siRNA sense strand
guuaauggguguuaugaaa

SEQ ID NO: 1379948 - RNA, 19 nt, Homo sapiens
  misc_RNA (1)...(19): siRNA sense strand
gaauuugacuccagugaau

SEQ ID NO: 1379949 - RNA, 19 nt, Homo sapiens
  misc_RNA (1)...(19): siRNA sense strand
gaaccugaaagucauguua

SEQ ID NO: 1379950 - RNA, 19 nt, Homo sapiens
  misc_RNA (1)...(19): siRNA sense strand
gaaaagaagagaccaaaua

SEQ ID NO: 1379951 - RNA, 19 nt, Homo sapiens
  misc_RNA (1)...(19): siRNA sense strand
gagacgauaucaagauuuc

SEQ ID NO: 1379952 - RNA, 19 nt, Homo sapiens
  misc_RNA (1)...(19): siRNA sense strand
ggaacucucuucucacaag

SEQ ID NO: 1379953 - RNA, 19 nt, Homo sapiens
  misc_RNA (1)...(19): siRNA sense strand
gaaauguuaauggguguua

SEQ ID NO: 1379954 - RNA, 19 nt, Homo sapiens
  misc_RNA (1)...(19): siRNA sense strand
gaaguuaggagacgauauc

SEQ ID NO: 1379955 - RNA, 19 nt, Homo sapiens
  misc_RNA (1)...(19): siRNA sense strand
gcggaugucuggacucuca

SEQ ID NO: 1379956 - RNA, 19 nt, Homo sapiens
  misc_RNA (1)...(19): siRNA sense strand
gaagaggaucugguugaua

SEQ ID NO: 1379957 - RNA, 19 nt, Homo sapiens
  misc_RNA (1)...(19): siRNA sense strand
ccagaggaguucauggaaa

SEQ ID NO: 1379958 - RNA, 19 nt, Homo sapiens
  misc_RNA (1)...(19): siRNA sense strand
gcuguugcguccucaauga

SEQ ID NO: 1379959 - RNA, 19 nt, Homo sapiens
  misc_RNA (1)...(19): siRNA sense strand
agaagccucugaagauaaa

SEQ ID NO: 1379960 - RNA, 19 nt, Homo sapiens
  misc_RNA (1)...(19): siRNA sense strand
gaaccgaauugcugaucau

SEQ ID NO: 1379961 - RNA, 19 nt, Homo sapiens
  misc_RNA (1)...(19): siRNA sense strand
cagaggaguucauggaaau

SEQ ID NO: 1379962 - RNA, 19 nt, Homo sapiens
  misc_RNA (1)...(19): siRNA sense strand
uaaaggaucucuucaucac

SEQ ID NO: 1379963 - RNA, 19 nt, Homo sapiens
  misc_RNA (1)...(19): siRNA sense strand
gaaagucauguuacuacaa

SEQ ID NO: 1379964 - RNA, 19 nt, Homo sapiens
  misc_RNA (1)...(19): siRNA sense strand
caagauuuccuuugguuga

SEQ ID NO: 1379965 - RNA, 19 nt, Homo sapiens
  misc_RNA (1)...(19): siRNA sense strand
guacgugcuuuauagugaa

SEQ ID NO: 1379966 - RNA, 19 nt, Homo sapiens
  misc_RNA (1)...(19): siRNA sense strand
ggaaugguggaacgcuuua

SEQ ID NO: 1379967 - RNA, 19 nt, Homo sapiens
  misc_RNA (1)...(19): siRNA sense strand
aagaagagaccaaauacaa

SEQ ID NO: 1379968 - RNA, 19 nt, Homo sapiens
  misc_RNA (1)...(19): siRNA sense strand
ggaugaaccagauuuaaag

SEQ ID NO: 1379969 - RNA, 19 nt, Homo sapiens
  misc_RNA (1)...(19): siRNA sense strand
gaaagggaauauuuugaug

SEQ ID NO: 1379970 - RNA, 19 nt, Homo sapiens
  misc_RNA (1)...(19): siRNA sense strand
ugaaccagauuuaaaggau

SEQ ID NO: 1379971 - RNA, 19 nt, Homo sapiens
  misc_RNA (1)...(19): siRNA sense strand
aagaggaucugguugauac

SEQ ID NO: 1379972 - RNA, 19 nt, Homo sapiens
  misc_RNA (1)...(19): siRNA sense strand
gaggaugaaccagauuuaa

SEQ ID NO: 1379973 - RNA, 19 nt, Homo sapiens
  misc_RNA (1)...(19): siRNA sense strand
ggaauuugacuccagugaa

SEQ ID NO: 1379974 - RNA, 19 nt, Homo sapiens
  misc_RNA (1)...(19): siRNA sense strand
gaagaaagggaauauuuug

SEQ ID NO: 1379975 - RNA, 19 nt, Homo sapiens
  misc_RNA (1)...(19): siRNA sense strand
ugaacuauuuagccagaaa

SEQ ID NO: 1379976 - RNA, 19 nt, Homo sapiens
  misc_RNA (1)...(19): siRNA sense strand
ugacuccagugaauuugaa

SEQ ID NO: 1379977 - RNA, 19 nt, Homo sapiens
  misc_RNA (1)...(19): siRNA sense strand
ggaagaaagggaauauuuu

SEQ ID NO: 1379978 - RNA, 19 nt, Homo sapiens
  misc_RNA (1)...(19): siRNA sense strand
ccagugaauuugaaguuag

SEQ ID NO: 1379979 - RNA, 19 nt, Homo sapiens
  misc_RNA (1)...(19): siRNA sense strand
gcugaucauccaacuuuaa

SEQ ID NO: 1379980 - RNA, 19 nt, Homo sapiens
  misc_RNA (1)...(19): siRNA sense strand
ccucugaagauaaaccuua

SEQ ID NO: 1379981 - RNA, 19 nt, Homo sapiens
  misc_RNA (1)...(19): siRNA sense strand
aggaagaaagggaauauuu

SEQ ID NO: 1379982 - RNA, 19 nt, Homo sapiens
  misc_RNA (1)...(19): siRNA sense strand
ggagacgauaucaagauuu

SEQ ID NO: 1379983 - RNA, 19 nt, Homo sapiens
  misc_RNA (1)...(19): siRNA sense strand
ggaucugguugauacucua

SEQ ID NO: 1379984 - RNA, 19 nt, Homo sapiens
  misc_RNA (1)...(19): siRNA sense strand
gcacaccccacucugauua

SEQ ID NO: 1379985 - RNA, 19 nt, Homo sapiens
  misc_RNA (1)...(19): siRNA sense strand
gauaucaagauuuccuuug

SEQ ID NO: 1379986 - RNA, 19 nt, Homo sapiens
  misc_RNA (1)...(19): siRNA sense strand
ccaaauacaagcagaacug

SEQ ID NO: 1379987 - RNA, 19 nt, Homo sapiens
  misc_RNA (1)...(19): siRNA sense strand
gcacaagcuugggaacucu

SEQ ID NO: 1379988 - RNA, 19 nt, Homo sapiens
  misc_RNA (1)...(19): siRNA sense strand
uccagugaauuugaaguua

SEQ ID NO: 1379989 - RNA, 19 nt, Homo sapiens
  misc_RNA (1)...(19): siRNA sense strand
caugaguacgugcuuuaua

SEQ ID NO: 1379990 - RNA, 19 nt, Homo sapiens
  misc_RNA (1)...(19): siRNA sense strand
gauguugccagcugcauug

SEQ ID NO: 1379991 - RNA, 19 nt, Homo sapiens
  misc_RNA (1)...(19): siRNA sense strand
gaucauccaacuuuaacau

SEQ ID NO: 1379992 - RNA, 19 nt, Homo sapiens
  misc_RNA (1)...(19): siRNA sense strand
ugaaagucauguuacuaca

SEQ ID NO: 1379993 - RNA, 19 nt, Homo sapiens
  misc_RNA (1)...(19): siRNA sense strand
uuuaaaggaucucuucauc

SEQ ID NO: 1379994 - RNA, 19 nt, Homo sapiens
  misc_RNA (1)...(19): siRNA sense strand
ugaggaugaaccagauuua

SEQ ID NO: 1379995 - RNA, 19 nt, Homo sapiens
  misc_RNA (1)...(19): siRNA sense strand
cuugggaacucucuucuca

SEQ ID NO: 1379996 - RNA, 19 nt, Homo sapiens
  misc_RNA (1)...(19): siRNA sense strand
aguacgugcuuuauaguga

SEQ ID NO: 1379997 - RNA, 19 nt, Homo sapiens
  misc_RNA (1)...(19): siRNA sense strand
ggagucauuccuuacauca

SEQ ID NO: 1379998 - RNA, 19 nt, Homo sapiens
  misc_RNA (1)...(19): siRNA sense strand
gggagucauuccuuacauc

SEQ ID NO: 1379999 - RNA, 19 nt, Homo sapiens
  misc_RNA (1)...(19): siRNA sense strand
aggagacgauaucaagauu

SEQ ID NO: 1380000 - RNA, 19 nt, Homo sapiens
  misc_RNA (1)...(19): siRNA sense strand
caucacagaccaaccuuca

SEQ ID NO: 1380001 - RNA, 19 nt, Homo sapiens
  misc_RNA (1)...(19): siRNA sense strand
caacauccccuuuaucaau

SEQ ID NO: 1380002 - RNA, 19 nt, Homo sapiens
  misc_RNA (1)...(19): siRNA sense strand
guuaggagacgauaucaag

SEQ ID NO: 1380003 - RNA, 19 nt, Homo sapiens
  misc_RNA (1)...(19): siRNA sense strand
ccagcugcauugacagaug

SEQ ID NO: 1380004 - RNA, 19 nt, Homo sapiens
  misc_RNA (1)...(19): siRNA sense strand
gaucugguugauacucuaa

SEQ ID NO: 1380005 - RNA, 19 nt, Homo sapiens
  misc_RNA (1)...(19): siRNA sense strand
ugggaacucucuucucaca

SEQ ID NO: 1380006 - RNA, 19 nt, Homo sapiens
  misc_RNA (1)...(19): siRNA sense strand
uacaugaguacgugcuuua

SEQ ID NO: 1380007 - RNA, 19 nt, Homo sapiens
  misc_RNA (1)...(19): siRNA sense strand
uaaggaagaaagggaauau

SEQ ID NO: 1380008 - RNA, 19 nt, Homo sapiens
  misc_RNA (1)...(19): siRNA sense strand
guugccagcugcauugaca

SEQ ID NO: 1380009 - RNA, 19 nt, Homo sapiens
  misc_RNA (1)...(19): siRNA sense strand
aagaagccucugaagauaa

SEQ ID NO: 1380010 - RNA, 19 nt, Homo sapiens
  misc_RNA (1)...(19): siRNA sense strand
augaguacgugcuuuauag

SEQ ID NO: 1380011 - RNA, 19 nt, Homo sapiens
  misc_RNA (1)...(19): siRNA sense strand
ccgaauugcugaucaucca

SEQ ID NO: 1380012 - RNA, 19 nt, Homo sapiens
  misc_RNA (1)...(19): siRNA sense strand
aggaugaaccagauuuaaa

SEQ ID NO: 1380013 - RNA, 19 nt, Homo sapiens
  misc_RNA (1)...(19): siRNA sense strand
gaucucuucaucacaguug

SEQ ID NO: 1380014 - RNA, 19 nt, Homo sapiens
  misc_RNA (1)...(19): siRNA sense strand
uugcugaucauccaacuuu

SEQ ID NO: 1380015 - RNA, 19 nt, Homo sapiens
  misc_RNA (1)...(19): siRNA sense strand
uggaacgcuuuaacgauga

SEQ ID NO: 1380016 - RNA, 19 nt, Homo sapiens
  misc_RNA (1)...(19): siRNA sense strand
uggaagaagccucugaaga

SEQ ID NO: 1380017 - RNA, 19 nt, Homo sapiens
  misc_RNA (1)...(19): siRNA sense strand
ugaaccgaauugcugauca

SEQ ID NO: 1380018 - RNA, 19 nt, Homo sapiens
  misc_RNA (1)...(19): siRNA sense strand
uaucaagauuuccuuuggu

SEQ ID NO: 1380019 - RNA, 19 nt, Homo sapiens
  misc_RNA (1)...(19): siRNA sense strand
agucauuccuuacaucaca

SEQ ID NO: 1380020 - RNA, 19 nt, Homo sapiens
  misc_RNA (1)...(19): siRNA sense strand
gguugauacucuaaaggau

SEQ ID NO: 1380021 - RNA, 19 nt, Homo sapiens
  misc_RNA (1)...(19): siRNA sense strand
agaagaggaucugguugau

SEQ ID NO: 1380022 - RNA, 19 nt, Homo sapiens
  misc_RNA (1)...(19): siRNA sense strand
cacaguugaugaaccugaa

SEQ ID NO: 1380023 - RNA, 19 nt, Homo sapiens
  misc_RNA (1)...(19): siRNA sense strand
gcccagaggaguucaugga

SEQ ID NO: 1380024 - RNA, 19 nt, Homo sapiens
  misc_RNA (1)...(19): siRNA sense strand
gcaaaccgucagagcuguu

SEQ ID NO: 1380025 - RNA, 19 nt, Homo sapiens
  misc_RNA (1)...(19): siRNA sense strand
gggaauuugacuccaguga

SEQ ID NO: 1380026 - RNA, 19 nt, Homo sapiens
  misc_RNA (1)...(19): siRNA sense strand
ggauguugccagcugcauu

SEQ ID NO: 1380027 - RNA, 19 nt, Homo sapiens
  misc_RNA (1)...(19): siRNA sense strand
cgcaggaaggcuuuacaua

SEQ ID NO: 1380028 - RNA, 19 nt, Homo sapiens
  misc_RNA (1)...(19): siRNA sense strand
ggcccugcuuccuguugua

SEQ ID NO: 1380029 - RNA, 19 nt, Homo sapiens
  misc_RNA (1)...(19): siRNA sense strand
aagauuuccuuugguugaa

SEQ ID NO: 1380030 - RNA, 19 nt, Homo sapiens
  misc_RNA (1)...(19): siRNA sense strand
ggauuccaaaguugaaguu

SEQ ID NO: 1380031 - RNA, 19 nt, Homo sapiens
  misc_RNA (1)...(19): siRNA sense strand
uugauacucuaaaggaugu

SEQ ID NO: 1380032 - RNA, 19 nt, Homo sapiens
  misc_RNA (1)...(19): siRNA sense strand
cucagagaauuuauaagga

SEQ ID NO: 1380033 - RNA, 19 nt, Homo sapiens
  misc_RNA (1)...(19): siRNA sense strand
uugaugaaccugaaaguca

SEQ ID NO: 1380034 - RNA, 19 nt, Homo sapiens
  misc_RNA (1)...(19): siRNA sense strand
gguggaacgcuuuaacgau

SEQ ID NO: 1380035 - RNA, 19 nt, Homo sapiens
  misc_RNA (1)...(19): siRNA sense strand
uuaaaggaucucuucauca

SEQ ID NO: 1380036 - RNA, 19 nt, Homo sapiens
  misc_RNA (1)...(19): siRNA sense strand
guuugaggaugaaccagau

SEQ ID NO: 1380037 - RNA, 19 nt, Homo sapiens
  misc_RNA (1)...(19): siRNA sense strand
gaagcacaccccacucuga

SEQ ID NO: 1380038 - RNA, 19 nt, Homo sapiens
  misc_RNA (1)...(19): siRNA sense strand
acgugggagucauuccuua

SEQ ID NO: 1380039 - RNA, 19 nt, Homo sapiens
  misc_RNA (1)...(19): siRNA sense strand
gaguacgugcuuuauagug

SEQ ID NO: 1380040 - RNA, 19 nt, Homo sapiens
  misc_RNA (1)...(19): siRNA sense strand
cgauaucaagauuuccuuu

SEQ ID NO: 1380041 - RNA, 19 nt, Homo sapiens
  misc_RNA (1)...(19): siRNA sense strand
ggauuauuacuaagacauc

SEQ ID NO: 1380042 - RNA, 19 nt, Homo sapiens
  misc_RNA (1)...(19): siRNA sense strand
cucugaagauaaaccuuaa

SEQ ID NO: 1380043 - RNA, 19 nt, Homo sapiens
  misc_RNA (1)...(19): siRNA sense strand
ugacaucgcugacaaguga

SEQ ID NO: 1380044 - RNA, 19 nt, Homo sapiens
  misc_RNA (1)...(19): siRNA sense strand
aaagagaccuccauuaaau

SEQ ID NO: 1380045 - RNA, 19 nt, Homo sapiens
  misc_RNA (1)...(19): siRNA sense strand
gcaaggcgcucaagguguu

SEQ ID NO: 1380046 - RNA, 19 nt, Homo sapiens
  misc_RNA (1)...(19): siRNA sense strand
gaagguggcauucagauga

SEQ ID NO: 1380047 - RNA, 19 nt, Homo sapiens
  misc_RNA (1)...(19): siRNA sense strand
gauaaagagaccuccauua

SEQ ID NO: 1380048 - RNA, 19 nt, Homo sapiens
  misc_RNA (1)...(19): siRNA sense strand
uaaagagaccuccauuaaa

SEQ ID NO: 1380049 - RNA, 19 nt, Homo sapiens
  misc_RNA (1)...(19): siRNA sense strand
auaaagagaccuccauuaa

SEQ ID NO: 1380050 - RNA, 19 nt, Homo sapiens
  misc_RNA (1)...(19): siRNA sense strand
gaccggaucuaccucauca

SEQ ID NO: 1380051 - RNA, 19 nt, Homo sapiens
  misc_RNA (1)...(19): siRNA sense strand
ggaucuaccucaucaacuc

SEQ ID NO: 1380052 - RNA, 19 nt, Homo sapiens
  misc_RNA (1)...(19): siRNA sense strand
gcagggcacccgggauaua

SEQ ID NO: 1380053 - RNA, 19 nt, Homo sapiens
  misc_RNA (1)...(19): siRNA sense strand
gagcagcacggcuuugugu

SEQ ID NO: 1380054 - RNA, 19 nt, Homo sapiens
  misc_RNA (1)...(19): siRNA sense strand
cgggauauaucagccauga

SEQ ID NO: 1380055 - RNA, 19 nt, Homo sapiens
  misc_RNA (1)...(19): siRNA sense strand
cagcacggcuuuguguuca

SEQ ID NO: 1380056 - RNA, 19 nt, Homo sapiens
  misc_RNA (1)...(19): siRNA sense strand
acacagccuucacgccauu

SEQ ID NO: 1380057 - RNA, 19 nt, Homo sapiens
  misc_RNA (1)...(19): siRNA sense strand
aagagaccuccauuaaaua

SEQ ID NO: 1380058 - RNA, 19 nt, Homo sapiens
  misc_RNA (1)...(19): siRNA sense strand
gcagcacggcuuuguguuc

SEQ ID NO: 1380059 - RNA, 19 nt, Homo sapiens
  misc_RNA (1)...(19): siRNA sense strand
ggaagguggcauucagaug

SEQ ID NO: 1380060 - RNA, 19 nt, Homo sapiens
  misc_RNA (1)...(19): siRNA sense strand
gcugacaagugaugacaac

SEQ ID NO: 1380061 - RNA, 19 nt, Homo sapiens
  misc_RNA (1)...(19): siRNA sense strand
gaagaggaagguggcauuc

SEQ ID NO: 1380062 - RNA, 19 nt, Homo sapiens
  misc_RNA (1)...(19): siRNA sense strand
agccacaccuucuucauca

SEQ ID NO: 1380063 - RNA, 19 nt, Homo sapiens
  misc_RNA (1)...(19): siRNA sense strand
gaggaagguggcauucaga

SEQ ID NO: 1380064 - RNA, 19 nt, Homo sapiens
  misc_RNA (1)...(19): siRNA sense strand
ucgcugacaucgcugacaa

SEQ ID NO: 1380065 - RNA, 19 nt, Homo sapiens
  misc_RNA (1)...(19): siRNA sense strand
gcaggcggaagaagaggaa

SEQ ID NO: 1380066 - RNA, 19 nt, Homo sapiens
  misc_RNA (1)...(19): siRNA sense strand
ugauaaagagaccuccauu

SEQ ID NO: 1380067 - RNA, 19 nt, Homo sapiens
  misc_RNA (1)...(19): siRNA sense strand
agaggaagguggcauucag

SEQ ID NO: 1380068 - RNA, 19 nt, Homo sapiens
  misc_RNA (1)...(19): siRNA sense strand
gugagcaggcggaagaaga

SEQ ID NO: 1380069 - RNA, 19 nt, Homo sapiens
  misc_RNA (1)...(19): siRNA sense strand
ggaugggaaugaggacagu

SEQ ID NO: 1380070 - RNA, 19 nt, Homo sapiens
  misc_RNA (1)...(19): siRNA sense strand
gguacagcaucaucaccau

SEQ ID NO: 1380071 - RNA, 19 nt, Homo sapiens
  misc_RNA (1)...(19): siRNA sense strand
agaagaggaagguggcauu

SEQ ID NO: 1380072 - RNA, 19 nt, Homo sapiens
  misc_RNA (1)...(19): siRNA sense strand
gggcacccgggauauauca

SEQ ID NO: 1380073 - RNA, 19 nt, Homo sapiens
  misc_RNA (1)...(19): siRNA sense strand
agaccuccauuaaauacgu

SEQ ID NO: 1380074 - RNA, 19 nt, Homo sapiens
  misc_RNA (1)...(19): siRNA sense strand
ggaccggaucuaccucauc

SEQ ID NO: 1380075 - RNA, 19 nt, Homo sapiens
  misc_RNA (1)...(19): siRNA sense strand
ugacaucgcugacaaguga

SEQ ID NO: 1380076 - RNA, 19 nt, Homo sapiens
  misc_RNA (1)...(19): siRNA sense strand
aaagagaccuccauuaaau

SEQ ID NO: 1380077 - RNA, 19 nt, Homo sapiens
  misc_RNA (1)...(19): siRNA sense strand
gcaaggcgcucaagguguu

SEQ ID NO: 1380078 - RNA, 19 nt, Homo sapiens
  misc_RNA (1)...(19): siRNA sense strand
gaagguggcauucagauga

SEQ ID NO: 1380079 - RNA, 19 nt, Homo sapiens
  misc_RNA (1)...(19): siRNA sense strand
gauaaagagaccuccauua

SEQ ID NO: 1380080 - RNA, 19 nt, Homo sapiens
  misc_RNA (1)...(19): siRNA sense strand
uaaagagaccuccauuaaa

SEQ ID NO: 1380081 - RNA, 19 nt, Homo sapiens
  misc_RNA (1)...(19): siRNA sense strand
auaaagagaccuccauuaa

SEQ ID NO: 1380082 - RNA, 19 nt, Homo sapiens
  misc_RNA (1)...(19): siRNA sense strand
gaccggaucuaccucauca

SEQ ID NO: 1380083 - RNA, 19 nt, Homo sapiens
  misc_RNA (1)...(19): siRNA sense strand
ggaucuaccucaucaacuc

SEQ ID NO: 1380084 - RNA, 19 nt, Homo sapiens
  misc_RNA (1)...(19): siRNA sense strand
gcagggcacccgggauaua

SEQ ID NO: 1380085 - RNA, 19 nt, Homo sapiens
  misc_RNA (1)...(19): siRNA sense strand
gagcagcacggcuuugugu

SEQ ID NO: 1380086 - RNA, 19 nt, Homo sapiens
  misc_RNA (1)...(19): siRNA sense strand
cgggauauaucagccauga

SEQ ID NO: 1380087 - RNA, 19 nt, Homo sapiens
  misc_RNA (1)...(19): siRNA sense strand
cagcacggcuuuguguuca

SEQ ID NO: 1380088 - RNA, 19 nt, Homo sapiens
  misc_RNA (1)...(19): siRNA sense strand
acacagccuucacgccauu

SEQ ID NO: 1380089 - RNA, 19 nt, Homo sapiens
  misc_RNA (1)...(19): siRNA sense strand
aagagaccuccauuaaaua

SEQ ID NO: 1380090 - RNA, 19 nt, Homo sapiens
  misc_RNA (1)...(19): siRNA sense strand
gcagcacggcuuuguguuc

SEQ ID NO: 1380091 - RNA, 19 nt, Homo sapiens
  misc_RNA (1)...(19): siRNA sense strand
ggaagguggcauucagaug

SEQ ID NO: 1380092 - RNA, 19 nt, Homo sapiens
  misc_RNA (1)...(19): siRNA sense strand
gcugacaagugaugacaac

SEQ ID NO: 1380093 - RNA, 19 nt, Homo sapiens
  misc_RNA (1)...(19): siRNA sense strand
gaagaggaagguggcauuc

SEQ ID NO: 1380094 - RNA, 19 nt, Homo sapiens
  misc_RNA (1)...(19): siRNA sense strand
agccacaccuucuucauca

SEQ ID NO: 1380095 - RNA, 19 nt, Homo sapiens
  misc_RNA (1)...(19): siRNA sense strand
gaggaagguggcauucaga

SEQ ID NO: 1380096 - RNA, 19 nt, Homo sapiens
  misc_RNA (1)...(19): siRNA sense strand
ucgcugacaucgcugacaa

SEQ ID NO: 1380097 - RNA, 19 nt, Homo sapiens
  misc_RNA (1)...(19): siRNA sense strand
gcaggcggaagaagaggaa

SEQ ID NO: 1380098 - RNA, 19 nt, Homo sapiens
  misc_RNA (1)...(19): siRNA sense strand
ugauaaagagaccuccauu

SEQ ID NO: 1380099 - RNA, 19 nt, Homo sapiens
  misc_RNA (1)...(19): siRNA sense strand
agaggaagguggcauucag

SEQ ID NO: 1380100 - RNA, 19 nt, Homo sapiens
  misc_RNA (1)...(19): siRNA sense strand
gugagcaggcggaagaaga

SEQ ID NO: 1380101 - RNA, 19 nt, Homo sapiens
  misc_RNA (1)...(19): siRNA sense strand
ggaugggaaugaggacagu

SEQ ID NO: 1380102 - RNA, 19 nt, Homo sapiens
  misc_RNA (1)...(19): siRNA sense strand
gguacagcaucaucaccau

SEQ ID NO: 1380103 - RNA, 19 nt, Homo sapiens
  misc_RNA (1)...(19): siRNA sense strand
agaagaggaagguggcauu

SEQ ID NO: 1380104 - RNA, 19 nt, Homo sapiens
  misc_RNA (1)...(19): siRNA sense strand
gggcacccgggauauauca

SEQ ID NO: 1380105 - RNA, 19 nt, Homo sapiens
  misc_RNA (1)...(19): siRNA sense strand
agaccuccauuaaauacgu

SEQ ID NO: 1380106 - RNA, 19 nt, Homo sapiens
  misc_RNA (1)...(19): siRNA sense strand
ggaccggaucuaccucauc

SEQ ID NO: 1380107 - RNA, 19 nt, Homo sapiens
  misc_RNA (1)...(19): siRNA sense strand
guaagaaacuccgaaauua

SEQ ID NO: 1380108 - RNA, 19 nt, Homo sapiens
  misc_RNA (1)...(19): siRNA sense strand
gaacagcgguacaggaaug

SEQ ID NO: 1380109 - RNA, 19 nt, Homo sapiens
  misc_RNA (1)...(19): siRNA sense strand
gaaagaagggaaugaguuu

SEQ ID NO: 1380110 - RNA, 19 nt, Homo sapiens
  misc_RNA (1)...(19): siRNA sense strand
ggagaaauauguauacagu

SEQ ID NO: 1380111 - RNA, 19 nt, Homo sapiens
  misc_RNA (1)...(19): siRNA sense strand
ggaaugaguuuaagaugau

SEQ ID NO: 1380112 - RNA, 19 nt, Homo sapiens
  misc_RNA (1)...(19): siRNA sense strand
gggaaugaguuuaagauga

SEQ ID NO: 1380113 - RNA, 19 nt, Homo sapiens
  misc_RNA (1)...(19): siRNA sense strand
gguaagaaacuccgaaauu

SEQ ID NO: 1380114 - RNA, 19 nt, Homo sapiens
  misc_RNA (1)...(19): siRNA sense strand
gaucuggccauguguguua

SEQ ID NO: 1380115 - RNA, 19 nt, Homo sapiens
  misc_RNA (1)...(19): siRNA sense strand
ggaaagaagggaaugaguu

SEQ ID NO: 1380116 - RNA, 19 nt, Homo sapiens
  misc_RNA (1)...(19): siRNA sense strand
gaaauuacuaugcagcaaa

SEQ ID NO: 1380117 - RNA, 19 nt, Homo sapiens
  misc_RNA (1)...(19): siRNA sense strand
gcagagaauuccacgugau

SEQ ID NO: 1380118 - RNA, 19 nt, Homo sapiens
  misc_RNA (1)...(19): siRNA sense strand
ggaagaaucaugccaagag

SEQ ID NO: 1380119 - RNA, 19 nt, Homo sapiens
  misc_RNA (1)...(19): siRNA sense strand
ggaauuccggcagcauuua

SEQ ID NO: 1380120 - RNA, 19 nt, Homo sapiens
  misc_RNA (1)...(19): siRNA sense strand
uuagagagcaagcaacaua

SEQ ID NO: 1380121 - RNA, 19 nt, Homo sapiens
  misc_RNA (1)...(19): siRNA sense strand
gcaagcaacauaagagcaa

SEQ ID NO: 1380122 - RNA, 19 nt, Homo sapiens
  misc_RNA (1)...(19): siRNA sense strand
gagaaucugggauauguau

SEQ ID NO: 1380123 - RNA, 19 nt, Homo sapiens
  misc_RNA (1)...(19): siRNA sense strand
gaagggaaugaguuuaaga

SEQ ID NO: 1380124 - RNA, 19 nt, Homo sapiens
  misc_RNA (1)...(19): siRNA sense strand
gggaagaagaguuaucgaa

SEQ ID NO: 1380125 - RNA, 19 nt, Homo sapiens
  misc_RNA (1)...(19): siRNA sense strand
gcagaugggcuccuuuaag

SEQ ID NO: 1380126 - RNA, 19 nt, Homo sapiens
  misc_RNA (1)...(19): siRNA sense strand
cagaugggcuccuuuaagc

SEQ ID NO: 1380127 - RNA, 19 nt, Homo sapiens
  misc_RNA (1)...(19): siRNA sense strand
gauggagaaucugggauau

SEQ ID NO: 1380128 - RNA, 19 nt, Homo sapiens
  misc_RNA (1)...(19): siRNA sense strand
aagaagggaaugaguuuaa

SEQ ID NO: 1380129 - RNA, 19 nt, Homo sapiens
  misc_RNA (1)...(19): siRNA sense strand
uggagaaucugggauaugu

SEQ ID NO: 1380130 - RNA, 19 nt, Homo sapiens
  misc_RNA (1)...(19): siRNA sense strand
gaaacuccgaaauuacuau

SEQ ID NO: 1380131 - RNA, 19 nt, Homo sapiens
  misc_RNA (1)...(19): siRNA sense strand
aguuuaagaugaugccuaa

SEQ ID NO: 1380132 - RNA, 19 nt, Homo sapiens
  misc_RNA (1)...(19): siRNA sense strand
ugugaugccuccuucaguu

SEQ ID NO: 1380133 - RNA, 19 nt, Homo sapiens
  misc_RNA (1)...(19): siRNA sense strand
gagagcaagcaacauaaga

SEQ ID NO: 1380134 - RNA, 19 nt, Homo sapiens
  misc_RNA (1)...(19): siRNA sense strand
gaaucugggauauguauag

SEQ ID NO: 1380135 - RNA, 19 nt, Homo sapiens
  misc_RNA (1)...(19): siRNA sense strand
ccgcagaugggcuccuuua

SEQ ID NO: 1380136 - RNA, 19 nt, Homo sapiens
  misc_RNA (1)...(19): siRNA sense strand
ccacggagaaugauuacug

SEQ ID NO: 1380137 - RNA, 19 nt, Homo sapiens
  misc_RNA (1)...(19): siRNA sense strand
cgaaauuacuaugcagcaa

SEQ ID NO: 1380138 - RNA, 19 nt, Homo sapiens
  misc_RNA (1)...(19): siRNA sense strand
uaagaaacuccgaaauuac

SEQ ID NO: 1380139 - RNA, 19 nt, Homo sapiens
  misc_RNA (1)...(19): siRNA sense strand
gccaccaggucuacaggaa

SEQ ID NO: 1380140 - RNA, 19 nt, Homo sapiens
  misc_RNA (1)...(19): siRNA sense strand
gaaugaguuuaagaugaug

SEQ ID NO: 1380141 - RNA, 19 nt, Homo sapiens
  misc_RNA (1)...(19): siRNA sense strand
ccuaacaggagaaauaugu

SEQ ID NO: 1380142 - RNA, 19 nt, Homo sapiens
  misc_RNA (1)...(19): siRNA sense strand
ggagaaucugggauaugua

SEQ ID NO: 1380143 - RNA, 19 nt, Homo sapiens
  misc_RNA (1)...(19): siRNA sense strand
agagcaaggugucugaaca

SEQ ID NO: 1380144 - RNA, 19 nt, Homo sapiens
  misc_RNA (1)...(19): siRNA sense strand
cacgugaucuggccaugug

SEQ ID NO: 1380145 - RNA, 19 nt, Homo sapiens
  misc_RNA (1)...(19): siRNA sense strand
aaagaagggaaugaguuua

SEQ ID NO: 1380146 - RNA, 19 nt, Homo sapiens
  misc_RNA (1)...(19): siRNA sense strand
uggcggaagcucagaguaa

SEQ ID NO: 1380147 - RNA, 19 nt, Homo sapiens
  misc_RNA (1)...(19): siRNA sense strand
cuugaacucugcacagcaa

SEQ ID NO: 1380148 - RNA, 19 nt, Homo sapiens
  misc_RNA (1)...(19): siRNA sense strand
gcauuuagagagcaagcaa

SEQ ID NO: 1380149 - RNA, 19 nt, Homo sapiens
  misc_RNA (1)...(19): siRNA sense strand
caggagaaauauguauaca

SEQ ID NO: 1380150 - RNA, 19 nt, Homo sapiens
  misc_RNA (1)...(19): siRNA sense strand
uagagagcaagcaacauaa

SEQ ID NO: 1380151 - RNA, 19 nt, Homo sapiens
  misc_RNA (1)...(19): siRNA sense strand
ggucgagccugcagcuacu

SEQ ID NO: 1380152 - RNA, 19 nt, Homo sapiens
  misc_RNA (1)...(19): siRNA sense strand
gccugcagcuacuccaguu

SEQ ID NO: 1380153 - RNA, 19 nt, Homo sapiens
  misc_RNA (1)...(19): siRNA sense strand
cacggagaaugauuacugu

SEQ ID NO: 1380154 - RNA, 19 nt, Homo sapiens
  misc_RNA (1)...(19): siRNA sense strand
uguuggagcuggcgaagag

SEQ ID NO: 1380155 - RNA, 19 nt, Homo sapiens
  misc_RNA (1)...(19): siRNA sense strand
gaauuccggcagcauuuag

SEQ ID NO: 1380156 - RNA, 19 nt, Homo sapiens
  misc_RNA (1)...(19): siRNA sense strand
ucugcaaugucaccuugaa

SEQ ID NO: 1380157 - RNA, 19 nt, Homo sapiens
  misc_RNA (1)...(19): siRNA sense strand
cugaacagcgguacaggaa

SEQ ID NO: 1380158 - RNA, 19 nt, Homo sapiens
  misc_RNA (1)...(19): siRNA sense strand
gagaauuccacgugaucug

SEQ ID NO: 1380159 - RNA, 19 nt, Homo sapiens
  misc_RNA (1)...(19): siRNA sense strand
cuaacaggagaaauaugua

SEQ ID NO: 1380160 - RNA, 19 nt, Homo sapiens
  misc_RNA (1)...(19): siRNA sense strand
augccuaacaggagaaaua

SEQ ID NO: 1380161 - RNA, 19 nt, Homo sapiens
  misc_RNA (1)...(19): siRNA sense strand
uggccacggagaaugauua

SEQ ID NO: 1380162 - RNA, 19 nt, Homo sapiens
  misc_RNA (1)...(19): siRNA sense strand
gcaaugucaccuugaacuc

SEQ ID NO: 1380163 - RNA, 19 nt, Homo sapiens
  misc_RNA (1)...(19): siRNA sense strand
ggcucaggcucacuaucaa

SEQ ID NO: 1380164 - RNA, 19 nt, Homo sapiens
  misc_RNA (1)...(19): siRNA sense strand
uaucaagggaagaaucaug

SEQ ID NO: 1380165 - RNA, 19 nt, Homo sapiens
  misc_RNA (1)...(19): siRNA sense strand
uggaauuccggcagcauuu

SEQ ID NO: 1380166 - RNA, 19 nt, Homo sapiens
  misc_RNA (1)...(19): siRNA sense strand
uuaagaugaugccuaacag

SEQ ID NO: 1380167 - RNA, 19 nt, Homo sapiens
  misc_RNA (1)...(19): siRNA sense strand
agaagggaaugaguuuaag

SEQ ID NO: 1380168 - RNA, 19 nt, Homo sapiens
  misc_RNA (1)...(19): siRNA sense strand
uggcucaggcucacuauca

SEQ ID NO: 1380169 - RNA, 19 nt, Homo sapiens
  misc_RNA (1)...(19): siRNA sense strand
aagaaacuccgaaauuacu

SEQ ID NO: 1380170 - RNA, 19 nt, Homo sapiens
  misc_RNA (1)...(19): siRNA sense strand
gagcaaggugucugaacag

SEQ ID NO: 1380171 - RNA, 19 nt, Homo sapiens
  misc_RNA (1)...(19): siRNA sense strand
guaagccccuguacugcaa

SEQ ID NO: 1380172 - RNA, 19 nt, Homo sapiens
  misc_RNA (1)...(19): siRNA sense strand
agaaacuccgaaauuacua

SEQ ID NO: 1380173 - RNA, 19 nt, Homo sapiens
  misc_RNA (1)...(19): siRNA sense strand
ggcggaagcucagaguaac

SEQ ID NO: 1380174 - RNA, 19 nt, Homo sapiens
  misc_RNA (1)...(19): siRNA sense strand
acaggaaugagauggagaa

SEQ ID NO: 1380175 - RNA, 19 nt, Homo sapiens
  misc_RNA (1)...(19): siRNA sense strand
cagagaauuccacgugauc

SEQ ID NO: 1380176 - RNA, 19 nt, Homo sapiens
  misc_RNA (1)...(19): siRNA sense strand
gggaagaaucaugccaaga

SEQ ID NO: 1380177 - RNA, 19 nt, Homo sapiens
  misc_RNA (1)...(19): siRNA sense strand
ccaggaaagaagggaauga

SEQ ID NO: 1380178 - RNA, 19 nt, Homo sapiens
  misc_RNA (1)...(19): siRNA sense strand
guaagaaacuccgaaauua

SEQ ID NO: 1380179 - RNA, 19 nt, Homo sapiens
  misc_RNA (1)...(19): siRNA sense strand
gaacagcgguacaggaaug

SEQ ID NO: 1380180 - RNA, 19 nt, Homo sapiens
  misc_RNA (1)...(19): siRNA sense strand
gaaagaagggaaugaguuu

SEQ ID NO: 1380181 - RNA, 19 nt, Homo sapiens
  misc_RNA (1)...(19): siRNA sense strand
ggagaaauauguauacagu

SEQ ID NO: 1380182 - RNA, 19 nt, Homo sapiens
  misc_RNA (1)...(19): siRNA sense strand
ggaaugaguuuaagaugau

SEQ ID NO: 1380183 - RNA, 19 nt, Homo sapiens
  misc_RNA (1)...(19): siRNA sense strand
gggaaugaguuuaagauga

SEQ ID NO: 1380184 - RNA, 19 nt, Homo sapiens
  misc_RNA (1)...(19): siRNA sense strand
gguaagaaacuccgaaauu

SEQ ID NO: 1380185 - RNA, 19 nt, Homo sapiens
  misc_RNA (1)...(19): siRNA sense strand
gaucuggccauguguguua

SEQ ID NO: 1380186 - RNA, 19 nt, Homo sapiens
  misc_RNA (1)...(19): siRNA sense strand
ggaaagaagggaaugaguu

SEQ ID NO: 1380187 - RNA, 19 nt, Homo sapiens
  misc_RNA (1)...(19): siRNA sense strand
gaaauuacuaugcagcaaa

SEQ ID NO: 1380188 - RNA, 19 nt, Homo sapiens
  misc_RNA (1)...(19): siRNA sense strand
gcagagaauuccacgugau

SEQ ID NO: 1380189 - RNA, 19 nt, Homo sapiens
  misc_RNA (1)...(19): siRNA sense strand
ggaagaaucaugccaagag

SEQ ID NO: 1380190 - RNA, 19 nt, Homo sapiens
  misc_RNA (1)...(19): siRNA sense strand
ggaauuccggcagcauuua

SEQ ID NO: 1380191 - RNA, 19 nt, Homo sapiens
  misc_RNA (1)...(19): siRNA sense strand
uuagagagcaagcaacaua

SEQ ID NO: 1380192 - RNA, 19 nt, Homo sapiens
  misc_RNA (1)...(19): siRNA sense strand
gcaagcaacauaagagcaa

SEQ ID NO: 1380193 - RNA, 19 nt, Homo sapiens
  misc_RNA (1)...(19): siRNA sense strand
gagaaucugggauauguau

SEQ ID NO: 1380194 - RNA, 19 nt, Homo sapiens
  misc_RNA (1)...(19): siRNA sense strand
gaagggaaugaguuuaaga

SEQ ID NO: 1380195 - RNA, 19 nt, Homo sapiens
  misc_RNA (1)...(19): siRNA sense strand
gggaagaagaguuaucgaa

SEQ ID NO: 1380196 - RNA, 19 nt, Homo sapiens
  misc_RNA (1)...(19): siRNA sense strand
gcagaugggcuccuuuaag

SEQ ID NO: 1380197 - RNA, 19 nt, Homo sapiens
  misc_RNA (1)...(19): siRNA sense strand
cagaugggcuccuuuaagc

SEQ ID NO: 1380198 - RNA, 19 nt, Homo sapiens
  misc_RNA (1)...(19): siRNA sense strand
gauggagaaucugggauau

SEQ ID NO: 1380199 - RNA, 19 nt, Homo sapiens
  misc_RNA (1)...(19): siRNA sense strand
aagaagggaaugaguuuaa

SEQ ID NO: 1380200 - RNA, 19 nt, Homo sapiens
  misc_RNA (1)...(19): siRNA sense strand
uggagaaucugggauaugu

SEQ ID NO: 1380201 - RNA, 19 nt, Homo sapiens
  misc_RNA (1)...(19): siRNA sense strand
gaaacuccgaaauuacuau

SEQ ID NO: 1380202 - RNA, 19 nt, Homo sapiens
  misc_RNA (1)...(19): siRNA sense strand
aguuuaagaugaugccuaa

SEQ ID NO: 1380203 - RNA, 19 nt, Homo sapiens
  misc_RNA (1)...(19): siRNA sense strand
ugugaugccuccuucaguu

SEQ ID NO: 1380204 - RNA, 19 nt, Homo sapiens
  misc_RNA (1)...(19): siRNA sense strand
gagagcaagcaacauaaga

SEQ ID NO: 1380205 - RNA, 19 nt, Homo sapiens
  misc_RNA (1)...(19): siRNA sense strand
gaaucugggauauguauag

SEQ ID NO: 1380206 - RNA, 19 nt, Homo sapiens
  misc_RNA (1)...(19): siRNA sense strand
ccgcagaugggcuccuuua

SEQ ID NO: 1380207 - RNA, 19 nt, Homo sapiens
  misc_RNA (1)...(19): siRNA sense strand
ccacggagaaugauuacug

SEQ ID NO: 1380208 - RNA, 19 nt, Homo sapiens
  misc_RNA (1)...(19): siRNA sense strand
cgaaauuacuaugcagcaa

SEQ ID NO: 1380209 - RNA, 19 nt, Homo sapiens
  misc_RNA (1)...(19): siRNA sense strand
uaagaaacuccgaaauuac

SEQ ID NO: 1380210 - RNA, 19 nt, Homo sapiens
  misc_RNA (1)...(19): siRNA sense strand
gccaccaggucuacaggaa

SEQ ID NO: 1380211 - RNA, 19 nt, Homo sapiens
  misc_RNA (1)...(19): siRNA sense strand
gaaugaguuuaagaugaug

SEQ ID NO: 1380212 - RNA, 19 nt, Homo sapiens
  misc_RNA (1)...(19): siRNA sense strand
ccuaacaggagaaauaugu

SEQ ID NO: 1380213 - RNA, 19 nt, Homo sapiens
  misc_RNA (1)...(19): siRNA sense strand
ggagaaucugggauaugua

SEQ ID NO: 1380214 - RNA, 19 nt, Homo sapiens
  misc_RNA (1)...(19): siRNA sense strand
agagcaaggugucugaaca

SEQ ID NO: 1380215 - RNA, 19 nt, Homo sapiens
  misc_RNA (1)...(19): siRNA sense strand
cacgugaucuggccaugug

SEQ ID NO: 1380216 - RNA, 19 nt, Homo sapiens
  misc_RNA (1)...(19): siRNA sense strand
aaagaagggaaugaguuua

SEQ ID NO: 1380217 - RNA, 19 nt, Homo sapiens
  misc_RNA (1)...(19): siRNA sense strand
uggcggaagcucagaguaa

SEQ ID NO: 1380218 - RNA, 19 nt, Homo sapiens
  misc_RNA (1)...(19): siRNA sense strand
cuugaacucugcacagcaa

SEQ ID NO: 1380219 - RNA, 19 nt, Homo sapiens
  misc_RNA (1)...(19): siRNA sense strand
gcauuuagagagcaagcaa

SEQ ID NO: 1380220 - RNA, 19 nt, Homo sapiens
  misc_RNA (1)...(19): siRNA sense strand
caggagaaauauguauaca

SEQ ID NO: 1380221 - RNA, 19 nt, Homo sapiens
  misc_RNA (1)...(19): siRNA sense strand
uagagagcaagcaacauaa

SEQ ID NO: 1380222 - RNA, 19 nt, Homo sapiens
  misc_RNA (1)...(19): siRNA sense strand
ggucgagccugcagcuacu

SEQ ID NO: 1380223 - RNA, 19 nt, Homo sapiens
  misc_RNA (1)...(19): siRNA sense strand
gccugcagcuacuccaguu

SEQ ID NO: 1380224 - RNA, 19 nt, Homo sapiens
  misc_RNA (1)...(19): siRNA sense strand
cacggagaaugauuacugu

SEQ ID NO: 1380225 - RNA, 19 nt, Homo sapiens
  misc_RNA (1)...(19): siRNA sense strand
uguuggagcuggcgaagag

SEQ ID NO: 1380226 - RNA, 19 nt, Homo sapiens
  misc_RNA (1)...(19): siRNA sense strand
gaauuccggcagcauuuag

SEQ ID NO: 1380227 - RNA, 19 nt, Homo sapiens
  misc_RNA (1)...(19): siRNA sense strand
ucugcaaugucaccuugaa

SEQ ID NO: 1380228 - RNA, 19 nt, Homo sapiens
  misc_RNA (1)...(19): siRNA sense strand
cugaacagcgguacaggaa

SEQ ID NO: 1380229 - RNA, 19 nt, Homo sapiens
  misc_RNA (1)...(19): siRNA sense strand
gagaauuccacgugaucug

SEQ ID NO: 1380230 - RNA, 19 nt, Homo sapiens
  misc_RNA (1)...(19): siRNA sense strand
cuaacaggagaaauaugua

SEQ ID NO: 1380231 - RNA, 19 nt, Homo sapiens
  misc_RNA (1)...(19): siRNA sense strand
augccuaacaggagaaaua

SEQ ID NO: 1380232 - RNA, 19 nt, Homo sapiens
  misc_RNA (1)...(19): siRNA sense strand
uggccacggagaaugauua

SEQ ID NO: 1380233 - RNA, 19 nt, Homo sapiens
  misc_RNA (1)...(19): siRNA sense strand
gcaaugucaccuugaacuc

SEQ ID NO: 1380234 - RNA, 19 nt, Homo sapiens
  misc_RNA (1)...(19): siRNA sense strand
ggcucaggcucacuaucaa

SEQ ID NO: 1380235 - RNA, 19 nt, Homo sapiens
  misc_RNA (1)...(19): siRNA sense strand
uaucaagggaagaaucaug

SEQ ID NO: 1380236 - RNA, 19 nt, Homo sapiens
  misc_RNA (1)...(19): siRNA sense strand
uggaauuccggcagcauuu

SEQ ID NO: 1380237 - RNA, 19 nt, Homo sapiens
  misc_RNA (1)...(19): siRNA sense strand
uuaagaugaugccuaacag

SEQ ID NO: 1380238 - RNA, 19 nt, Homo sapiens
  misc_RNA (1)...(19): siRNA sense strand
agaagggaaugaguuuaag

SEQ ID NO: 1380239 - RNA, 19 nt, Homo sapiens
  misc_RNA (1)...(19): siRNA sense strand
uggcucaggcucacuauca

SEQ ID NO: 1380240 - RNA, 19 nt, Homo sapiens
  misc_RNA (1)...(19): siRNA sense strand
aagaaacuccgaaauuacu

SEQ ID NO: 1380241 - RNA, 19 nt, Homo sapiens
  misc_RNA (1)...(19): siRNA sense strand
gagcaaggugucugaacag

SEQ ID NO: 1380242 - RNA, 19 nt, Homo sapiens
  misc_RNA (1)...(19): siRNA sense strand
guaagccccuguacugcaa

SEQ ID NO: 1380243 - RNA, 19 nt, Homo sapiens
  misc_RNA (1)...(19): siRNA sense strand
agaaacuccgaaauuacua

SEQ ID NO: 1380244 - RNA, 19 nt, Homo sapiens
  misc_RNA (1)...(19): siRNA sense strand
ggcggaagcucagaguaac

SEQ ID NO: 1380245 - RNA, 19 nt, Homo sapiens
  misc_RNA (1)...(19): siRNA sense strand
acaggaaugagauggagaa

SEQ ID NO: 1380246 - RNA, 19 nt, Homo sapiens
  misc_RNA (1)...(19): siRNA sense strand
cagagaauuccacgugauc

SEQ ID NO: 1380247 - RNA, 19 nt, Homo sapiens
  misc_RNA (1)...(19): siRNA sense strand
gggaagaaucaugccaaga

SEQ ID NO: 1380248 - RNA, 19 nt, Homo sapiens
  misc_RNA (1)...(19): siRNA sense strand
ccaggaaagaagggaauga

SEQ ID NO: 1380249 - RNA, 19 nt, Homo sapiens
  misc_RNA (1)...(19): siRNA sense strand
gaaucaagcuuccauaugu

SEQ ID NO: 1380250 - RNA, 19 nt, Homo sapiens
  misc_RNA (1)...(19): siRNA sense strand
gcaaagauguuucucuguu

SEQ ID NO: 1380251 - RNA, 19 nt, Homo sapiens
  misc_RNA (1)...(19): siRNA sense strand
acacaugccuggagacuua

SEQ ID NO: 1380252 - RNA, 19 nt, Homo sapiens
  misc_RNA (1)...(19): siRNA sense strand
caacaaagcccgaggauau

SEQ ID NO: 1380253 - RNA, 19 nt, Homo sapiens
  misc_RNA (1)...(19): siRNA sense strand
ccaaagaaauucaggaaga

SEQ ID NO: 1380254 - RNA, 19 nt, Homo sapiens
  misc_RNA (1)...(19): siRNA sense strand
cuacauagauuucuucaug

SEQ ID NO: 1380255 - RNA, 19 nt, Homo sapiens
  misc_RNA (1)...(19): siRNA sense strand
ggaaauugaugauauugug

SEQ ID NO: 1380256 - RNA, 19 nt, Homo sapiens
  misc_RNA (1)...(19): siRNA sense strand
aaacucagcuauugccaua

SEQ ID NO: 1380257 - RNA, 19 nt, Homo sapiens
  misc_RNA (1)...(19): siRNA sense strand
gaagauaauucugguugaa

SEQ ID NO: 1380258 - RNA, 19 nt, Homo sapiens
  misc_RNA (1)...(19): siRNA sense strand
caaagauguuucucuguuu

SEQ ID NO: 1380259 - RNA, 19 nt, Homo sapiens
  misc_RNA (1)...(19): siRNA sense strand
guacaagaguggauuaauc

SEQ ID NO: 1380260 - RNA, 19 nt, Homo sapiens
  misc_RNA (1)...(19): siRNA sense strand
ggaagaguguucuaucuca

SEQ ID NO: 1380261 - RNA, 19 nt, Homo sapiens
  misc_RNA (1)...(19): siRNA sense strand
gaaagacaacgaccuuaaa

SEQ ID NO: 1380262 - RNA, 19 nt, Homo sapiens
  misc_RNA (1)...(19): siRNA sense strand
ggaaagacaacgaccuuaa

SEQ ID NO: 1380263 - RNA, 19 nt, Homo sapiens
  misc_RNA (1)...(19): siRNA sense strand
caaagaguuucuacuaaga

SEQ ID NO: 1380264 - RNA, 19 nt, Homo sapiens
  misc_RNA (1)...(19): siRNA sense strand
ccucagugguuucuaauaa

SEQ ID NO: 1380265 - RNA, 19 nt, Homo sapiens
  misc_RNA (1)...(19): siRNA sense strand
ccagugaauuucugaguuu

SEQ ID NO: 1380266 - RNA, 19 nt, Homo sapiens
  misc_RNA (1)...(19): siRNA sense strand
cagggaacauggaaugaua

SEQ ID NO: 1380267 - RNA, 19 nt, Homo sapiens
  misc_RNA (1)...(19): siRNA sense strand
uaagagcgacaaaguauaa

SEQ ID NO: 1380268 - RNA, 19 nt, Homo sapiens
  misc_RNA (1)...(19): siRNA sense strand
gagcaucuuuaacagaauu

SEQ ID NO: 1380269 - RNA, 19 nt, Homo sapiens
  misc_RNA (1)...(19): siRNA sense strand
ccuggagacuuauuuaauu

SEQ ID NO: 1380270 - RNA, 19 nt, Homo sapiens
  misc_RNA (1)...(19): siRNA sense strand
cgacaaaguauaacaaguu

SEQ ID NO: 1380271 - RNA, 19 nt, Homo sapiens
  misc_RNA (1)...(19): siRNA sense strand
ggagcaugguauucaagua

SEQ ID NO: 1380272 - RNA, 19 nt, Homo sapiens
  misc_RNA (1)...(19): siRNA sense strand
gaagaguguucuaucucaa

SEQ ID NO: 1380273 - RNA, 19 nt, Homo sapiens
  misc_RNA (1)...(19): siRNA sense strand
ucaaagaguuucuacuaag

SEQ ID NO: 1380274 - RNA, 19 nt, Homo sapiens
  misc_RNA (1)...(19): siRNA sense strand
gagaacugauaagaagaua

SEQ ID NO: 1380275 - RNA, 19 nt, Homo sapiens
  misc_RNA (1)...(19): siRNA sense strand
gcucuuuacucagggaaua

SEQ ID NO: 1380276 - RNA, 19 nt, Homo sapiens
  misc_RNA (1)...(19): siRNA sense strand
cgggauacauuacuuguug

SEQ ID NO: 1380277 - RNA, 19 nt, Homo sapiens
  misc_RNA (1)...(19): siRNA sense strand
ucgauguccucuuauauuu

SEQ ID NO: 1380278 - RNA, 19 nt, Homo sapiens
  misc_RNA (1)...(19): siRNA sense strand
agauuuaccuaaccaguuu

SEQ ID NO: 1380279 - RNA, 19 nt, Homo sapiens
  misc_RNA (1)...(19): siRNA sense strand
ggaaguaugugaggauugg

SEQ ID NO: 1380280 - RNA, 19 nt, Homo sapiens
  misc_RNA (1)...(19): siRNA sense strand
gauaucagaagugcaauaa

SEQ ID NO: 1380281 - RNA, 19 nt, Homo sapiens
  misc_RNA (1)...(19): siRNA sense strand
gcaccaacaauuaugauga

SEQ ID NO: 1380282 - RNA, 19 nt, Homo sapiens
  misc_RNA (1)...(19): siRNA sense strand
aaacaggguggaucuauuu

SEQ ID NO: 1380283 - RNA, 19 nt, Homo sapiens
  misc_RNA (1)...(19): siRNA sense strand
gaugaucugagaacugaua

SEQ ID NO: 1380284 - RNA, 19 nt, Homo sapiens
  misc_RNA (1)...(19): siRNA sense strand
ggguggaucuauuuuauua

SEQ ID NO: 1380285 - RNA, 19 nt, Homo sapiens
  misc_RNA (1)...(19): siRNA sense strand
uaucagaagugcaauaaac

SEQ ID NO: 1380286 - RNA, 19 nt, Homo sapiens
  misc_RNA (1)...(19): siRNA sense strand
ugugagagccagugaauuu

SEQ ID NO: 1380287 - RNA, 19 nt, Homo sapiens
  misc_RNA (1)...(19): siRNA sense strand
caaaggagcaugguauuca

SEQ ID NO: 1380288 - RNA, 19 nt, Homo sapiens
  misc_RNA (1)...(19): siRNA sense strand
ccggaaaccuggucucuuc

SEQ ID NO: 1380289 - RNA, 19 nt, Homo sapiens
  misc_RNA (1)...(19): siRNA sense strand
gaagcgacacuuuggaaga

SEQ ID NO: 1380290 - RNA, 19 nt, Homo sapiens
  misc_RNA (1)...(19): siRNA sense strand
cgagaggugugaugcauuc

SEQ ID NO: 1380291 - RNA, 19 nt, Homo sapiens
  misc_RNA (1)...(19): siRNA sense strand
cagaugcugugcugucaaa

SEQ ID NO: 1380292 - RNA, 19 nt, Homo sapiens
  misc_RNA (1)...(19): siRNA sense strand
caccaacaauuaugaugaa

SEQ ID NO: 1380293 - RNA, 19 nt, Homo sapiens
  misc_RNA (1)...(19): siRNA sense strand
gaacgggauacauuacuug

SEQ ID NO: 1380294 - RNA, 19 nt, Homo sapiens
  misc_RNA (1)...(19): siRNA sense strand
gaucugagaacugauaaga

SEQ ID NO: 1380295 - RNA, 19 nt, Homo sapiens
  misc_RNA (1)...(19): siRNA sense strand
uaacaagaauggaggaaaa

SEQ ID NO: 1380296 - RNA, 19 nt, Homo sapiens
  misc_RNA (1)...(19): siRNA sense strand
caaguacaagaguggauua

SEQ ID NO: 1380297 - RNA, 19 nt, Homo sapiens
  misc_RNA (1)...(19): siRNA sense strand
gaaaccuggucucuuccuu

SEQ ID NO: 1380298 - RNA, 19 nt, Homo sapiens
  misc_RNA (1)...(19): siRNA sense strand
guuauuguuucccaaagaa

SEQ ID NO: 1380299 - RNA, 19 nt, Homo sapiens
  misc_RNA (1)...(19): siRNA sense strand
uacaugaaguucuaaggaa

SEQ ID NO: 1380300 - RNA, 19 nt, Homo sapiens
  misc_RNA (1)...(19): siRNA sense strand
ucugagaacugauaagaag

SEQ ID NO: 1380301 - RNA, 19 nt, Homo sapiens
  misc_RNA (1)...(19): siRNA sense strand
ccuccaaacucagcuauug

SEQ ID NO: 1380302 - RNA, 19 nt, Homo sapiens
  misc_RNA (1)...(19): siRNA sense strand
aauacacgcucuuuacuca

SEQ ID NO: 1380303 - RNA, 19 nt, Homo sapiens
  misc_RNA (1)...(19): siRNA sense strand
caacuuacggccaaggaaa

SEQ ID NO: 1380304 - RNA, 19 nt, Homo sapiens
  misc_RNA (1)...(19): siRNA sense strand
caaagaaauucaggaagag

SEQ ID NO: 1380305 - RNA, 19 nt, Homo sapiens
  misc_RNA (1)...(19): siRNA sense strand
ggagguaguagaaauguca

SEQ ID NO: 1380306 - RNA, 19 nt, Homo sapiens
  misc_RNA (1)...(19): siRNA sense strand
gccagugaauuucugaguu

SEQ ID NO: 1380307 - RNA, 19 nt, Homo sapiens
  misc_RNA (1)...(19): siRNA sense strand
uacaaaugcuuggagauga

SEQ ID NO: 1380308 - RNA, 19 nt, Homo sapiens
  misc_RNA (1)...(19): siRNA sense strand
ugaacuugcugugcauaaa

SEQ ID NO: 1380309 - RNA, 19 nt, Homo sapiens
  misc_RNA (1)...(19): siRNA sense strand
ccucucauuuaucagaaua

SEQ ID NO: 1380310 - RNA, 19 nt, Homo sapiens
  misc_RNA (1)...(19): siRNA sense strand
caagagguccaagcuauug

SEQ ID NO: 1380311 - RNA, 19 nt, Homo sapiens
  misc_RNA (1)...(19): siRNA sense strand
ucgggauucucauacuuua

SEQ ID NO: 1380312 - RNA, 19 nt, Homo sapiens
  misc_RNA (1)...(19): siRNA sense strand
gguuauuguuucccaaaga

SEQ ID NO: 1380313 - RNA, 19 nt, Homo sapiens
  misc_RNA (1)...(19): siRNA sense strand
gccauaccuugcucuacua

SEQ ID NO: 1380314 - RNA, 19 nt, Homo sapiens
  misc_RNA (1)...(19): siRNA sense strand
caaggaggaggaucaaguu

SEQ ID NO: 1380315 - RNA, 19 nt, Homo sapiens
  misc_RNA (1)...(19): siRNA sense strand
ugugaugcauuccaacaaa

SEQ ID NO: 1380316 - RNA, 19 nt, Homo sapiens
  misc_RNA (1)...(19): siRNA sense strand
gaggugugaugcauuccaa

SEQ ID NO: 1380317 - RNA, 19 nt, Homo sapiens
  misc_RNA (1)...(19): siRNA sense strand
aaagauguuucucuguuuc

SEQ ID NO: 1380318 - RNA, 19 nt, Homo sapiens
  misc_RNA (1)...(19): siRNA sense strand
gggauguucuggugauauc

SEQ ID NO: 1380319 - RNA, 19 nt, Homo sapiens
  misc_RNA (1)...(19): siRNA sense strand
ugacaaaacuucucuagag

SEQ ID NO: 1380320 - RNA, 19 nt, Homo sapiens
  misc_RNA (1)...(19): siRNA sense strand
caggaagaguguucuaucu

SEQ ID NO: 1380321 - RNA, 19 nt, Homo sapiens
  misc_RNA (1)...(19): siRNA sense strand
ugaacgggauacauuacuu

SEQ ID NO: 1380322 - RNA, 19 nt, Homo sapiens
  misc_RNA (1)...(19): siRNA sense strand
ggugauaucagaagugcaa

SEQ ID NO: 1380323 - RNA, 19 nt, Homo sapiens
  misc_RNA (1)...(19): siRNA sense strand
aaaggagcaugguauucaa

SEQ ID NO: 1380324 - RNA, 19 nt, Homo sapiens
  misc_RNA (1)...(19): siRNA sense strand
aauaugaacgggauacauu

SEQ ID NO: 1380325 - RNA, 19 nt, Homo sapiens
  misc_RNA (1)...(19): siRNA sense strand
cuauagaagcuaacaagaa

SEQ ID NO: 1380326 - RNA, 19 nt, Homo sapiens
  misc_RNA (1)...(19): siRNA sense strand
cgauguccucuuauauuua

SEQ ID NO: 1380327 - RNA, 19 nt, Homo sapiens
  misc_RNA (1)...(19): siRNA sense strand
auuggucgauguccucuua

SEQ ID NO: 1380328 - RNA, 19 nt, Homo sapiens
  misc_RNA (1)...(19): siRNA sense strand
gaaguucuaaggaaguaug

SEQ ID NO: 1380329 - RNA, 19 nt, Homo sapiens
  misc_RNA (1)...(19): siRNA sense strand
agauaauucugguugaaga

SEQ ID NO: 1380330 - RNA, 19 nt, Homo sapiens
  misc_RNA (1)...(19): siRNA sense strand
ccuguggcaccaacaauua

SEQ ID NO: 1380331 - RNA, 19 nt, Homo sapiens
  misc_RNA (1)...(19): siRNA sense strand
gcgacacuuuggaagauug

SEQ ID NO: 1380332 - RNA, 19 nt, Homo sapiens
  misc_RNA (1)...(19): siRNA sense strand
ggaggaggaucaaguuuuc

SEQ ID NO: 1380333 - RNA, 19 nt, Homo sapiens
  misc_RNA (1)...(19): siRNA sense strand
gggauacauuacuuguuga

SEQ ID NO: 1380334 - RNA, 19 nt, Homo sapiens
  misc_RNA (1)...(19): siRNA sense strand
uaucaaaggagcaugguau

SEQ ID NO: 1380335 - RNA, 19 nt, Homo sapiens
  misc_RNA (1)...(19): siRNA sense strand
aaucaagcuuccauauguu

SEQ ID NO: 1380336 - RNA, 19 nt, Homo sapiens
  misc_RNA (1)...(19): siRNA sense strand
caccaaaacuacauagauu

SEQ ID NO: 1380337 - RNA, 19 nt, Homo sapiens
  misc_RNA (1)...(19): siRNA sense strand
caauaaacagccuccaguu

SEQ ID NO: 1380338 - RNA, 19 nt, Homo sapiens
  misc_RNA (1)...(19): siRNA sense strand
gagcgacaaaguauaacaa

SEQ ID NO: 1380339 - RNA, 19 nt, Homo sapiens
  misc_RNA (1)...(19): siRNA sense strand
ccaaggagacauggaagaa

SEQ ID NO: 1380340 - RNA, 19 nt, Homo sapiens
  misc_RNA (1)...(19): siRNA sense strand
gaauacacgcucuuuacuc

SEQ ID NO: 1380341 - RNA, 19 nt, Homo sapiens
  misc_RNA (1)...(19): siRNA sense strand
caguggagauaauaaucaa

SEQ ID NO: 1380342 - RNA, 19 nt, Homo sapiens
  misc_RNA (1)...(19): siRNA sense strand
gcgacaaaguauaacaagu

SEQ ID NO: 1380343 - RNA, 19 nt, Homo sapiens
  misc_RNA (1)...(19): siRNA sense strand
gcaugguauucaaguacaa

SEQ ID NO: 1380344 - RNA, 19 nt, Homo sapiens
  misc_RNA (1)...(19): siRNA sense strand
ugacagggaacauggaaug

SEQ ID NO: 1380345 - RNA, 19 nt, Homo sapiens
  misc_RNA (1)...(19): siRNA sense strand
ggaauacacgcucuuuacu

SEQ ID NO: 1380346 - RNA, 19 nt, Homo sapiens
  misc_RNA (1)...(19): siRNA sense strand
ucgguugcccucucauuua

SEQ ID NO: 1380347 - RNA, 19 nt, Homo sapiens
  misc_RNA (1)...(19): siRNA sense strand
gagagccagugaauuucug

SEQ ID NO: 1380348 - RNA, 19 nt, Homo sapiens
  misc_RNA (1)...(19): siRNA sense strand
aaaaguaucgggaaaauug

SEQ ID NO: 1380349 - RNA, 19 nt, Homo sapiens
  misc_RNA (1)...(19): siRNA sense strand
gaaucaagcuuccauaugu

SEQ ID NO: 1380350 - RNA, 19 nt, Homo sapiens
  misc_RNA (1)...(19): siRNA sense strand
gcaaagauguuucucuguu

SEQ ID NO: 1380351 - RNA, 19 nt, Homo sapiens
  misc_RNA (1)...(19): siRNA sense strand
acacaugccuggagacuua

SEQ ID NO: 1380352 - RNA, 19 nt, Homo sapiens
  misc_RNA (1)...(19): siRNA sense strand
caacaaagcccgaggauau

SEQ ID NO: 1380353 - RNA, 19 nt, Homo sapiens
  misc_RNA (1)...(19): siRNA sense strand
ccaaagaaauucaggaaga

SEQ ID NO: 1380354 - RNA, 19 nt, Homo sapiens
  misc_RNA (1)...(19): siRNA sense strand
cuacauagauuucuucaug

SEQ ID NO: 1380355 - RNA, 19 nt, Homo sapiens
  misc_RNA (1)...(19): siRNA sense strand
ggaaauugaugauauugug

SEQ ID NO: 1380356 - RNA, 19 nt, Homo sapiens
  misc_RNA (1)...(19): siRNA sense strand
aaacucagcuauugccaua

SEQ ID NO: 1380357 - RNA, 19 nt, Homo sapiens
  misc_RNA (1)...(19): siRNA sense strand
gaagauaauucugguugaa

SEQ ID NO: 1380358 - RNA, 19 nt, Homo sapiens
  misc_RNA (1)...(19): siRNA sense strand
caaagauguuucucuguuu

SEQ ID NO: 1380359 - RNA, 19 nt, Homo sapiens
  misc_RNA (1)...(19): siRNA sense strand
guacaagaguggauuaauc

SEQ ID NO: 1380360 - RNA, 19 nt, Homo sapiens
  misc_RNA (1)...(19): siRNA sense strand
ggaagaguguucuaucuca

SEQ ID NO: 1380361 - RNA, 19 nt, Homo sapiens
  misc_RNA (1)...(19): siRNA sense strand
gaaagacaacgaccuuaaa

SEQ ID NO: 1380362 - RNA, 19 nt, Homo sapiens
  misc_RNA (1)...(19): siRNA sense strand
ggaaagacaacgaccuuaa

SEQ ID NO: 1380363 - RNA, 19 nt, Homo sapiens
  misc_RNA (1)...(19): siRNA sense strand
caaagaguuucuacuaaga

SEQ ID NO: 1380364 - RNA, 19 nt, Homo sapiens
  misc_RNA (1)...(19): siRNA sense strand
ccucagugguuucuaauaa

SEQ ID NO: 1380365 - RNA, 19 nt, Homo sapiens
  misc_RNA (1)...(19): siRNA sense strand
ccagugaauuucugaguuu

SEQ ID NO: 1380366 - RNA, 19 nt, Homo sapiens
  misc_RNA (1)...(19): siRNA sense strand
cagggaacauggaaugaua

SEQ ID NO: 1380367 - RNA, 19 nt, Homo sapiens
  misc_RNA (1)...(19): siRNA sense strand
uaagagcgacaaaguauaa

SEQ ID NO: 1380368 - RNA, 19 nt, Homo sapiens
  misc_RNA (1)...(19): siRNA sense strand
gagcaucuuuaacagaauu

SEQ ID NO: 1380369 - RNA, 19 nt, Homo sapiens
  misc_RNA (1)...(19): siRNA sense strand
ccuggagacuuauuuaauu

SEQ ID NO: 1380370 - RNA, 19 nt, Homo sapiens
  misc_RNA (1)...(19): siRNA sense strand
cgacaaaguauaacaaguu

SEQ ID NO: 1380371 - RNA, 19 nt, Homo sapiens
  misc_RNA (1)...(19): siRNA sense strand
ggagcaugguauucaagua

SEQ ID NO: 1380372 - RNA, 19 nt, Homo sapiens
  misc_RNA (1)...(19): siRNA sense strand
gaagaguguucuaucucaa

SEQ ID NO: 1380373 - RNA, 19 nt, Homo sapiens
  misc_RNA (1)...(19): siRNA sense strand
ucaaagaguuucuacuaag

SEQ ID NO: 1380374 - RNA, 19 nt, Homo sapiens
  misc_RNA (1)...(19): siRNA sense strand
gagaacugauaagaagaua

SEQ ID NO: 1380375 - RNA, 19 nt, Homo sapiens
  misc_RNA (1)...(19): siRNA sense strand
gcucuuuacucagggaaua

SEQ ID NO: 1380376 - RNA, 19 nt, Homo sapiens
  misc_RNA (1)...(19): siRNA sense strand
cgggauacauuacuuguug

SEQ ID NO: 1380377 - RNA, 19 nt, Homo sapiens
  misc_RNA (1)...(19): siRNA sense strand
ucgauguccucuuauauuu

SEQ ID NO: 1380378 - RNA, 19 nt, Homo sapiens
  misc_RNA (1)...(19): siRNA sense strand
agauuuaccuaaccaguuu

SEQ ID NO: 1380379 - RNA, 19 nt, Homo sapiens
  misc_RNA (1)...(19): siRNA sense strand
ggaaguaugugaggauugg

SEQ ID NO: 1380380 - RNA, 19 nt, Homo sapiens
  misc_RNA (1)...(19): siRNA sense strand
gauaucagaagugcaauaa

SEQ ID NO: 1380381 - RNA, 19 nt, Homo sapiens
  misc_RNA (1)...(19): siRNA sense strand
gcaccaacaauuaugauga

SEQ ID NO: 1380382 - RNA, 19 nt, Homo sapiens
  misc_RNA (1)...(19): siRNA sense strand
aaacaggguggaucuauuu

SEQ ID NO: 1380383 - RNA, 19 nt, Homo sapiens
  misc_RNA (1)...(19): siRNA sense strand
gaugaucugagaacugaua

SEQ ID NO: 1380384 - RNA, 19 nt, Homo sapiens
  misc_RNA (1)...(19): siRNA sense strand
ggguggaucuauuuuauua

SEQ ID NO: 1380385 - RNA, 19 nt, Homo sapiens
  misc_RNA (1)...(19): siRNA sense strand
uaucagaagugcaauaaac

SEQ ID NO: 1380386 - RNA, 19 nt, Homo sapiens
  misc_RNA (1)...(19): siRNA sense strand
ugugagagccagugaauuu

SEQ ID NO: 1380387 - RNA, 19 nt, Homo sapiens
  misc_RNA (1)...(19): siRNA sense strand
caaaggagcaugguauuca

SEQ ID NO: 1380388 - RNA, 19 nt, Homo sapiens
  misc_RNA (1)...(19): siRNA sense strand
ccggaaaccuggucucuuc

SEQ ID NO: 1380389 - RNA, 19 nt, Homo sapiens
  misc_RNA (1)...(19): siRNA sense strand
gaagcgacacuuuggaaga

SEQ ID NO: 1380390 - RNA, 19 nt, Homo sapiens
  misc_RNA (1)...(19): siRNA sense strand
cgagaggugugaugcauuc

SEQ ID NO: 1380391 - RNA, 19 nt, Homo sapiens
  misc_RNA (1)...(19): siRNA sense strand
cagaugcugugcugucaaa

SEQ ID NO: 1380392 - RNA, 19 nt, Homo sapiens
  misc_RNA (1)...(19): siRNA sense strand
caccaacaauuaugaugaa

SEQ ID NO: 1380393 - RNA, 19 nt, Homo sapiens
  misc_RNA (1)...(19): siRNA sense strand
gaacgggauacauuacuug

SEQ ID NO: 1380394 - RNA, 19 nt, Homo sapiens
  misc_RNA (1)...(19): siRNA sense strand
gaucugagaacugauaaga

SEQ ID NO: 1380395 - RNA, 19 nt, Homo sapiens
  misc_RNA (1)...(19): siRNA sense strand
uaacaagaauggaggaaaa

SEQ ID NO: 1380396 - RNA, 19 nt, Homo sapiens
  misc_RNA (1)...(19): siRNA sense strand
caaguacaagaguggauua

SEQ ID NO: 1380397 - RNA, 19 nt, Homo sapiens
  misc_RNA (1)...(19): siRNA sense strand
gaaaccuggucucuuccuu

SEQ ID NO: 1380398 - RNA, 19 nt, Homo sapiens
  misc_RNA (1)...(19): siRNA sense strand
guuauuguuucccaaagaa

SEQ ID NO: 1380399 - RNA, 19 nt, Homo sapiens
  misc_RNA (1)...(19): siRNA sense strand
uacaugaaguucuaaggaa

SEQ ID NO: 1380400 - RNA, 19 nt, Homo sapiens
  misc_RNA (1)...(19): siRNA sense strand
ucugagaacugauaagaag

SEQ ID NO: 1380401 - RNA, 19 nt, Homo sapiens
  misc_RNA (1)...(19): siRNA sense strand
aauacacgcucuuuacuca

SEQ ID NO: 1380402 - RNA, 19 nt, Homo sapiens
  misc_RNA (1)...(19): siRNA sense strand
caacuuacggccaaggaaa

SEQ ID NO: 1380403 - RNA, 19 nt, Homo sapiens
  misc_RNA (1)...(19): siRNA sense strand
caaagaaauucaggaagag

SEQ ID NO: 1380404 - RNA, 19 nt, Homo sapiens
  misc_RNA (1)...(19): siRNA sense strand
ggagguaguagaaauguca

SEQ ID NO: 1380405 - RNA, 19 nt, Homo sapiens
  misc_RNA (1)...(19): siRNA sense strand
gccagugaauuucugaguu

SEQ ID NO: 1380406 - RNA, 19 nt, Homo sapiens
  misc_RNA (1)...(19): siRNA sense strand
uacaaaugcuuggagauga

SEQ ID NO: 1380407 - RNA, 19 nt, Homo sapiens
  misc_RNA (1)...(19): siRNA sense strand
ugaacuugcugugcauaaa

SEQ ID NO: 1380408 - RNA, 19 nt, Homo sapiens
  misc_RNA (1)...(19): siRNA sense strand
ccucucauuuaucagaaua

SEQ ID NO: 1380409 - RNA, 19 nt, Homo sapiens
  misc_RNA (1)...(19): siRNA sense strand
caagagguccaagcuauug

SEQ ID NO: 1380410 - RNA, 19 nt, Homo sapiens
  misc_RNA (1)...(19): siRNA sense strand
ucgggauucucauacuuua

SEQ ID NO: 1380411 - RNA, 19 nt, Homo sapiens
  misc_RNA (1)...(19): siRNA sense strand
gguuauuguuucccaaaga

SEQ ID NO: 1380412 - RNA, 19 nt, Homo sapiens
  misc_RNA (1)...(19): siRNA sense strand
gccauaccuugcucuacua

SEQ ID NO: 1380413 - RNA, 19 nt, Homo sapiens
  misc_RNA (1)...(19): siRNA sense strand
caaggaggaggaucaaguu

SEQ ID NO: 1380414 - RNA, 19 nt, Homo sapiens
  misc_RNA (1)...(19): siRNA sense strand
ugugaugcauuccaacaaa

SEQ ID NO: 1380415 - RNA, 19 nt, Homo sapiens
  misc_RNA (1)...(19): siRNA sense strand
gaggugugaugcauuccaa

SEQ ID NO: 1380416 - RNA, 19 nt, Homo sapiens
  misc_RNA (1)...(19): siRNA sense strand
aaagauguuucucuguuuc

SEQ ID NO: 1380417 - RNA, 19 nt, Homo sapiens
  misc_RNA (1)...(19): siRNA sense strand
gggauguucuggugauauc

SEQ ID NO: 1380418 - RNA, 19 nt, Homo sapiens
  misc_RNA (1)...(19): siRNA sense strand
ugacaaaacuucucuagag

SEQ ID NO: 1380419 - RNA, 19 nt, Homo sapiens
  misc_RNA (1)...(19): siRNA sense strand
caggaagaguguucuaucu

SEQ ID NO: 1380420 - RNA, 19 nt, Homo sapiens
  misc_RNA (1)...(19): siRNA sense strand
ugaacgggauacauuacuu

SEQ ID NO: 1380421 - RNA, 19 nt, Homo sapiens
  misc_RNA (1)...(19): siRNA sense strand
ggugauaucagaagugcaa

SEQ ID NO: 1380422 - RNA, 19 nt, Homo sapiens
  misc_RNA (1)...(19): siRNA sense strand
agauaauucugguugaaga

SEQ ID NO: 1380423 - RNA, 19 nt, Homo sapiens
  misc_RNA (1)...(19): siRNA sense strand
aaaggagcaugguauucaa

SEQ ID NO: 1380424 - RNA, 19 nt, Homo sapiens
  misc_RNA (1)...(19): siRNA sense strand
aauaugaacgggauacauu

SEQ ID NO: 1380425 - RNA, 19 nt, Homo sapiens
  misc_RNA (1)...(19): siRNA sense strand
cuauagaagcuaacaagaa

SEQ ID NO: 1380426 - RNA, 19 nt, Homo sapiens
  misc_RNA (1)...(19): siRNA sense strand
cgauguccucuuauauuua

SEQ ID NO: 1380427 - RNA, 19 nt, Homo sapiens
  misc_RNA (1)...(19): siRNA sense strand
auuggucgauguccucuua

SEQ ID NO: 1380428 - RNA, 19 nt, Homo sapiens
  misc_RNA (1)...(19): siRNA sense strand
gaaguucuaaggaaguaug

SEQ ID NO: 1380429 - RNA, 19 nt, Homo sapiens
  misc_RNA (1)...(19): siRNA sense strand
ccuguggcaccaacaauua

SEQ ID NO: 1380430 - RNA, 19 nt, Homo sapiens
  misc_RNA (1)...(19): siRNA sense strand
gcgacacuuuggaagauug

SEQ ID NO: 1380431 - RNA, 19 nt, Homo sapiens
  misc_RNA (1)...(19): siRNA sense strand
ggaggaggaucaaguuuuc

SEQ ID NO: 1380432 - RNA, 19 nt, Homo sapiens
  misc_RNA (1)...(19): siRNA sense strand
gggauacauuacuuguuga

SEQ ID NO: 1380433 - RNA, 19 nt, Homo sapiens
  misc_RNA (1)...(19): siRNA sense strand
uaucaaaggagcaugguau

SEQ ID NO: 1380434 - RNA, 19 nt, Homo sapiens
  misc_RNA (1)...(19): siRNA sense strand
aaucaagcuuccauauguu

SEQ ID NO: 1380435 - RNA, 19 nt, Homo sapiens
  misc_RNA (1)...(19): siRNA sense strand
caccaaaacuacauagauu

SEQ ID NO: 1380436 - RNA, 19 nt, Homo sapiens
  misc_RNA (1)...(19): siRNA sense strand
caauaaacagccuccaguu

SEQ ID NO: 1380437 - RNA, 19 nt, Homo sapiens
  misc_RNA (1)...(19): siRNA sense strand
gagcgacaaaguauaacaa

SEQ ID NO: 1380438 - RNA, 19 nt, Homo sapiens
  misc_RNA (1)...(19): siRNA sense strand
ccaaggagacauggaagaa

SEQ ID NO: 1380439 - RNA, 19 nt, Homo sapiens
  misc_RNA (1)...(19): siRNA sense strand
gaauacacgcucuuuacuc

SEQ ID NO: 1380440 - RNA, 19 nt, Homo sapiens
  misc_RNA (1)...(19): siRNA sense strand
caguggagauaauaaucaa

SEQ ID NO: 1380441 - RNA, 19 nt, Homo sapiens
  misc_RNA (1)...(19): siRNA sense strand
gcgacaaaguauaacaagu

SEQ ID NO: 1380442 - RNA, 19 nt, Homo sapiens
  misc_RNA (1)...(19): siRNA sense strand
gcaugguauucaaguacaa

SEQ ID NO: 1380443 - RNA, 19 nt, Homo sapiens
  misc_RNA (1)...(19): siRNA sense strand
ugacagggaacauggaaug

SEQ ID NO: 1380444 - RNA, 19 nt, Homo sapiens
  misc_RNA (1)...(19): siRNA sense strand
ggaauacacgcucuuuacu

SEQ ID NO: 1380445 - RNA, 19 nt, Homo sapiens
  misc_RNA (1)...(19): siRNA sense strand
ucgguugcccucucauuua

SEQ ID NO: 1380446 - RNA, 19 nt, Homo sapiens
  misc_RNA (1)...(19): siRNA sense strand
gagagccagugaauuucug

SEQ ID NO: 1380447 - RNA, 19 nt, Homo sapiens
  misc_RNA (1)...(19): siRNA sense strand
aaaaguaucgggaaaauug

SEQ ID NO: 1380448 - RNA, 19 nt, Homo sapiens
  misc_RNA (1)...(19): siRNA sense strand
gcaugaacuugcugugcau

SEQ ID NO: 1380449 - RNA, 19 nt, Homo sapiens
  misc_RNA (1)...(19): siRNA sense strand
gaaucaagcuuccauaugu

SEQ ID NO: 1380450 - RNA, 19 nt, Homo sapiens
  misc_RNA (1)...(19): siRNA sense strand
gcaaagauguuucucuguu

SEQ ID NO: 1380451 - RNA, 19 nt, Homo sapiens
  misc_RNA (1)...(19): siRNA sense strand
acacaugccuggagacuua

SEQ ID NO: 1380452 - RNA, 19 nt, Homo sapiens
  misc_RNA (1)...(19): siRNA sense strand
caacaaagcccgaggauau

SEQ ID NO: 1380453 - RNA, 19 nt, Homo sapiens
  misc_RNA (1)...(19): siRNA sense strand
ccaaagaaauucaggaaga

SEQ ID NO: 1380454 - RNA, 19 nt, Homo sapiens
  misc_RNA (1)...(19): siRNA sense strand
cuacauagauuucuucaug

SEQ ID NO: 1380455 - RNA, 19 nt, Homo sapiens
  misc_RNA (1)...(19): siRNA sense strand
ggaaauugaugauauugug

SEQ ID NO: 1380456 - RNA, 19 nt, Homo sapiens
  misc_RNA (1)...(19): siRNA sense strand
aaacucagcuauugccaua

SEQ ID NO: 1380457 - RNA, 19 nt, Homo sapiens
  misc_RNA (1)...(19): siRNA sense strand
gaagauaauucugguugaa

SEQ ID NO: 1380458 - RNA, 19 nt, Homo sapiens
  misc_RNA (1)...(19): siRNA sense strand
caaagauguuucucuguuu

SEQ ID NO: 1380459 - RNA, 19 nt, Homo sapiens
  misc_RNA (1)...(19): siRNA sense strand
guacaagaguggauuaauc

SEQ ID NO: 1380460 - RNA, 19 nt, Homo sapiens
  misc_RNA (1)...(19): siRNA sense strand
ggaagaguguucuaucuca

SEQ ID NO: 1380461 - RNA, 19 nt, Homo sapiens
  misc_RNA (1)...(19): siRNA sense strand
gaaagacaacgaccuuaaa

SEQ ID NO: 1380462 - RNA, 19 nt, Homo sapiens
  misc_RNA (1)...(19): siRNA sense strand
ggaaagacaacgaccuuaa

SEQ ID NO: 1380463 - RNA, 19 nt, Homo sapiens
  misc_RNA (1)...(19): siRNA sense strand
caaagaguuucuacuaaga

SEQ ID NO: 1380464 - RNA, 19 nt, Homo sapiens
  misc_RNA (1)...(19): siRNA sense strand
ccucagugguuucuaauaa

SEQ ID NO: 1380465 - RNA, 19 nt, Homo sapiens
  misc_RNA (1)...(19): siRNA sense strand
ccagugaauuucugaguuu

SEQ ID NO: 1380466 - RNA, 19 nt, Homo sapiens
  misc_RNA (1)...(19): siRNA sense strand
cagggaacauggaaugaua

SEQ ID NO: 1380467 - RNA, 19 nt, Homo sapiens
  misc_RNA (1)...(19): siRNA sense strand
uaagagcgacaaaguauaa

SEQ ID NO: 1380468 - RNA, 19 nt, Homo sapiens
  misc_RNA (1)...(19): siRNA sense strand
gagcaucuuuaacagaauu

SEQ ID NO: 1380469 - RNA, 19 nt, Homo sapiens
  misc_RNA (1)...(19): siRNA sense strand
ccuggagacuuauuuaauu

SEQ ID NO: 1380470 - RNA, 19 nt, Homo sapiens
  misc_RNA (1)...(19): siRNA sense strand
cgacaaaguauaacaaguu

SEQ ID NO: 1380471 - RNA, 19 nt, Homo sapiens
  misc_RNA (1)...(19): siRNA sense strand
ggagcaugguauucaagua

SEQ ID NO: 1380472 - RNA, 19 nt, Homo sapiens
  misc_RNA (1)...(19): siRNA sense strand
gaagaguguucuaucucaa

SEQ ID NO: 1380473 - RNA, 19 nt, Homo sapiens
  misc_RNA (1)...(19): siRNA sense strand
ucaaagaguuucuacuaag

SEQ ID NO: 1380474 - RNA, 19 nt, Homo sapiens
  misc_RNA (1)...(19): siRNA sense strand
gagaacugauaagaagaua

SEQ ID NO: 1380475 - RNA, 19 nt, Homo sapiens
  misc_RNA (1)...(19): siRNA sense strand
gcucuuuacucagggaaua

SEQ ID NO: 1380476 - RNA, 19 nt, Homo sapiens
  misc_RNA (1)...(19): siRNA sense strand
cgggauacauuacuuguug

SEQ ID NO: 1380477 - RNA, 19 nt, Homo sapiens
  misc_RNA (1)...(19): siRNA sense strand
ucgauguccucuuauauuu

SEQ ID NO: 1380478 - RNA, 19 nt, Homo sapiens
  misc_RNA (1)...(19): siRNA sense strand
agauuuaccuaaccaguuu

SEQ ID NO: 1380479 - RNA, 19 nt, Homo sapiens
  misc_RNA (1)...(19): siRNA sense strand
ggaaguaugugaggauugg

SEQ ID NO: 1380480 - RNA, 19 nt, Homo sapiens
  misc_RNA (1)...(19): siRNA sense strand
gauaucagaagugcaauaa

SEQ ID NO: 1380481 - RNA, 19 nt, Homo sapiens
  misc_RNA (1)...(19): siRNA sense strand
gcaccaacaauuaugauga

SEQ ID NO: 1380482 - RNA, 19 nt, Homo sapiens
  misc_RNA (1)...(19): siRNA sense strand
aaacaggguggaucuauuu

SEQ ID NO: 1380483 - RNA, 19 nt, Homo sapiens
  misc_RNA (1)...(19): siRNA sense strand
gaugaucugagaacugaua

SEQ ID NO: 1380484 - RNA, 19 nt, Homo sapiens
  misc_RNA (1)...(19): siRNA sense strand
ggguggaucuauuuuauua

SEQ ID NO: 1380485 - RNA, 19 nt, Homo sapiens
  misc_RNA (1)...(19): siRNA sense strand
uaucagaagugcaauaaac

SEQ ID NO: 1380486 - RNA, 19 nt, Homo sapiens
  misc_RNA (1)...(19): siRNA sense strand
ugugagagccagugaauuu

SEQ ID NO: 1380487 - RNA, 19 nt, Homo sapiens
  misc_RNA (1)...(19): siRNA sense strand
caaaggagcaugguauuca

SEQ ID NO: 1380488 - RNA, 19 nt, Homo sapiens
  misc_RNA (1)...(19): siRNA sense strand
ccggaaaccuggucucuuc

SEQ ID NO: 1380489 - RNA, 19 nt, Homo sapiens
  misc_RNA (1)...(19): siRNA sense strand
gaagcgacacuuuggaaga

SEQ ID NO: 1380490 - RNA, 19 nt, Homo sapiens
  misc_RNA (1)...(19): siRNA sense strand
cgagaggugugaugcauuc

SEQ ID NO: 1380491 - RNA, 19 nt, Homo sapiens
  misc_RNA (1)...(19): siRNA sense strand
cagaugcugugcugucaaa

SEQ ID NO: 1380492 - RNA, 19 nt, Homo sapiens
  misc_RNA (1)...(19): siRNA sense strand
caccaacaauuaugaugaa

SEQ ID NO: 1380493 - RNA, 19 nt, Homo sapiens
  misc_RNA (1)...(19): siRNA sense strand
gaacgggauacauuacuug

SEQ ID NO: 1380494 - RNA, 19 nt, Homo sapiens
  misc_RNA (1)...(19): siRNA sense strand
gaucugagaacugauaaga

SEQ ID NO: 1380495 - RNA, 19 nt, Homo sapiens
  misc_RNA (1)...(19): siRNA sense strand
uaacaagaauggaggaaaa

SEQ ID NO: 1380496 - RNA, 19 nt, Homo sapiens
  misc_RNA (1)...(19): siRNA sense strand
caaguacaagaguggauua

SEQ ID NO: 1380497 - RNA, 19 nt, Homo sapiens
  misc_RNA (1)...(19): siRNA sense strand
gaaaccuggucucuuccuu

SEQ ID NO: 1380498 - RNA, 19 nt, Homo sapiens
  misc_RNA (1)...(19): siRNA sense strand
guuauuguuucccaaagaa

SEQ ID NO: 1380499 - RNA, 19 nt, Homo sapiens
  misc_RNA (1)...(19): siRNA sense strand
uacaugaaguucuaaggaa

SEQ ID NO: 1380500 - RNA, 19 nt, Homo sapiens
  misc_RNA (1)...(19): siRNA sense strand
ucugagaacugauaagaag

SEQ ID NO: 1380501 - RNA, 19 nt, Homo sapiens
  misc_RNA (1)...(19): siRNA sense strand
aauacacgcucuuuacuca

SEQ ID NO: 1380502 - RNA, 19 nt, Homo sapiens
  misc_RNA (1)...(19): siRNA sense strand
caacuuacggccaaggaaa

SEQ ID NO: 1380503 - RNA, 19 nt, Homo sapiens
  misc_RNA (1)...(19): siRNA sense strand
caaagaaauucaggaagag

SEQ ID NO: 1380504 - RNA, 19 nt, Homo sapiens
  misc_RNA (1)...(19): siRNA sense strand
ggagguaguagaaauguca

SEQ ID NO: 1380505 - RNA, 19 nt, Homo sapiens
  misc_RNA (1)...(19): siRNA sense strand
gccagugaauuucugaguu

SEQ ID NO: 1380506 - RNA, 19 nt, Homo sapiens
  misc_RNA (1)...(19): siRNA sense strand
uacaaaugcuuggagauga

SEQ ID NO: 1380507 - RNA, 19 nt, Homo sapiens
  misc_RNA (1)...(19): siRNA sense strand
ugaacuugcugugcauaaa

SEQ ID NO: 1380508 - RNA, 19 nt, Homo sapiens
  misc_RNA (1)...(19): siRNA sense strand
ccucucauuuaucagaaua

SEQ ID NO: 1380509 - RNA, 19 nt, Homo sapiens
  misc_RNA (1)...(19): siRNA sense strand
caagagguccaagcuauug

SEQ ID NO: 1380510 - RNA, 19 nt, Homo sapiens
  misc_RNA (1)...(19): siRNA sense strand
ucgggauucucauacuuua

SEQ ID NO: 1380511 - RNA, 19 nt, Homo sapiens
  misc_RNA (1)...(19): siRNA sense strand
gguuauuguuucccaaaga

SEQ ID NO: 1380512 - RNA, 19 nt, Homo sapiens
  misc_RNA (1)...(19): siRNA sense strand
gccauaccuugcucuacua

SEQ ID NO: 1380513 - RNA, 19 nt, Homo sapiens
  misc_RNA (1)...(19): siRNA sense strand
caaggaggaggaucaaguu

SEQ ID NO: 1380514 - RNA, 19 nt, Homo sapiens
  misc_RNA (1)...(19): siRNA sense strand
ugugaugcauuccaacaaa

SEQ ID NO: 1380515 - RNA, 19 nt, Homo sapiens
  misc_RNA (1)...(19): siRNA sense strand
gaggugugaugcauuccaa

SEQ ID NO: 1380516 - RNA, 19 nt, Homo sapiens
  misc_RNA (1)...(19): siRNA sense strand
aaagauguuucucuguuuc

SEQ ID NO: 1380517 - RNA, 19 nt, Homo sapiens
  misc_RNA (1)...(19): siRNA sense strand
gggauguucuggugauauc

SEQ ID NO: 1380518 - RNA, 19 nt, Homo sapiens
  misc_RNA (1)...(19): siRNA sense strand
ugacaaaacuucucuagag

SEQ ID NO: 1380519 - RNA, 19 nt, Homo sapiens
  misc_RNA (1)...(19): siRNA sense strand
caggaagaguguucuaucu

SEQ ID NO: 1380520 - RNA, 19 nt, Homo sapiens
  misc_RNA (1)...(19): siRNA sense strand
ugaacgggauacauuacuu

SEQ ID NO: 1380521 - RNA, 19 nt, Homo sapiens
  misc_RNA (1)...(19): siRNA sense strand
ggugauaucagaagugcaa

SEQ ID NO: 1380522 - RNA, 19 nt, Homo sapiens
  misc_RNA (1)...(19): siRNA sense strand
agauaauucugguugaaga

SEQ ID NO: 1380523 - RNA, 19 nt, Homo sapiens
  misc_RNA (1)...(19): siRNA sense strand
aaaggagcaugguauucaa

SEQ ID NO: 1380524 - RNA, 19 nt, Homo sapiens
  misc_RNA (1)...(19): siRNA sense strand
aauaugaacgggauacauu

SEQ ID NO: 1380525 - RNA, 19 nt, Homo sapiens
  misc_RNA (1)...(19): siRNA sense strand
cuauagaagcuaacaagaa

SEQ ID NO: 1380526 - RNA, 19 nt, Homo sapiens
  misc_RNA (1)...(19): siRNA sense strand
cgauguccucuuauauuua

SEQ ID NO: 1380527 - RNA, 19 nt, Homo sapiens
  misc_RNA (1)...(19): siRNA sense strand
auuggucgauguccucuua

SEQ ID NO: 1380528 - RNA, 19 nt, Homo sapiens
  misc_RNA (1)...(19): siRNA sense strand
gaaguucuaaggaaguaug

SEQ ID NO: 1380529 - RNA, 19 nt, Homo sapiens
  misc_RNA (1)...(19): siRNA sense strand
ccuguggcaccaacaauua

SEQ ID NO: 1380530 - RNA, 19 nt, Homo sapiens
  misc_RNA (1)...(19): siRNA sense strand
gcgacacuuuggaagauug

SEQ ID NO: 1380531 - RNA, 19 nt, Homo sapiens
  misc_RNA (1)...(19): siRNA sense strand
ggaggaggaucaaguuuuc

SEQ ID NO: 1380532 - RNA, 19 nt, Homo sapiens
  misc_RNA (1)...(19): siRNA sense strand
gggauacauuacuuguuga

SEQ ID NO: 1380533 - RNA, 19 nt, Homo sapiens
  misc_RNA (1)...(19): siRNA sense strand
uaucaaaggagcaugguau

SEQ ID NO: 1380534 - RNA, 19 nt, Homo sapiens
  misc_RNA (1)...(19): siRNA sense strand
aaucaagcuuccauauguu

SEQ ID NO: 1380535 - RNA, 19 nt, Homo sapiens
  misc_RNA (1)...(19): siRNA sense strand
caccaaaacuacauagauu

SEQ ID NO: 1380536 - RNA, 19 nt, Homo sapiens
  misc_RNA (1)...(19): siRNA sense strand
caauaaacagccuccaguu

SEQ ID NO: 1380537 - RNA, 19 nt, Homo sapiens
  misc_RNA (1)...(19): siRNA sense strand
gagcgacaaaguauaacaa

SEQ ID NO: 1380538 - RNA, 19 nt, Homo sapiens
  misc_RNA (1)...(19): siRNA sense strand
ccaaggagacauggaagaa

SEQ ID NO: 1380539 - RNA, 19 nt, Homo sapiens
  misc_RNA (1)...(19): siRNA sense strand
gaauacacgcucuuuacuc

SEQ ID NO: 1380540 - RNA, 19 nt, Homo sapiens
  misc_RNA (1)...(19): siRNA sense strand
caguggagauaauaaucaa

SEQ ID NO: 1380541 - RNA, 19 nt, Homo sapiens
  misc_RNA (1)...(19): siRNA sense strand
gcgacaaaguauaacaagu

SEQ ID NO: 1380542 - RNA, 19 nt, Homo sapiens
  misc_RNA (1)...(19): siRNA sense strand
gcaugguauucaaguacaa

SEQ ID NO: 1380543 - RNA, 19 nt, Homo sapiens
  misc_RNA (1)...(19): siRNA sense strand
ugacagggaacauggaaug

SEQ ID NO: 1380544 - RNA, 19 nt, Homo sapiens
  misc_RNA (1)...(19): siRNA sense strand
ggaauacacgcucuuuacu

SEQ ID NO: 1380545 - RNA, 19 nt, Homo sapiens
  misc_RNA (1)...(19): siRNA sense strand
ucgguugcccucucauuua

SEQ ID NO: 1380546 - RNA, 19 nt, Homo sapiens
  misc_RNA (1)...(19): siRNA sense strand
gagagccagugaauuucug

SEQ ID NO: 1380547 - RNA, 19 nt, Homo sapiens
  misc_RNA (1)...(19): siRNA sense strand
aaaaguaucgggaaaauug

SEQ ID NO: 1380548 - RNA, 19 nt, Homo sapiens
  misc_RNA (1)...(19): siRNA sense strand
gcaugaacuugcugugcau

SEQ ID NO: 1380549 - RNA, 19 nt, Homo sapiens
  misc_RNA (1)...(19): siRNA sense strand
gaaucaagcuuccauaugu

SEQ ID NO: 1380550 - RNA, 19 nt, Homo sapiens
  misc_RNA (1)...(19): siRNA sense strand
gcaaagauguuucucuguu

SEQ ID NO: 1380551 - RNA, 19 nt, Homo sapiens
  misc_RNA (1)...(19): siRNA sense strand
acacaugccuggagacuua

SEQ ID NO: 1380552 - RNA, 19 nt, Homo sapiens
  misc_RNA (1)...(19): siRNA sense strand
caacaaagcccgaggauau

SEQ ID NO: 1380553 - RNA, 19 nt, Homo sapiens
  misc_RNA (1)...(19): siRNA sense strand
ccaaagaaauucaggaaga

SEQ ID NO: 1380554 - RNA, 19 nt, Homo sapiens
  misc_RNA (1)...(19): siRNA sense strand
cuacauagauuucuucaug

SEQ ID NO: 1380555 - RNA, 19 nt, Homo sapiens
  misc_RNA (1)...(19): siRNA sense strand
ggaaauugaugauauugug

SEQ ID NO: 1380556 - RNA, 19 nt, Homo sapiens
  misc_RNA (1)...(19): siRNA sense strand
aaacucagcuauugccaua

SEQ ID NO: 1380557 - RNA, 19 nt, Homo sapiens
  misc_RNA (1)...(19): siRNA sense strand
gaagauaauucugguugaa

SEQ ID NO: 1380558 - RNA, 19 nt, Homo sapiens
  misc_RNA (1)...(19): siRNA sense strand
caaagauguuucucuguuu

SEQ ID NO: 1380559 - RNA, 19 nt, Homo sapiens
  misc_RNA (1)...(19): siRNA sense strand
ggaagaguguucuaucuca

SEQ ID NO: 1380560 - RNA, 19 nt, Homo sapiens
  misc_RNA (1)...(19): siRNA sense strand
caaagaguuucuacuaaga

SEQ ID NO: 1380561 - RNA, 19 nt, Homo sapiens
  misc_RNA (1)...(19): siRNA sense strand
ccucagugguuucuaauaa

SEQ ID NO: 1380562 - RNA, 19 nt, Homo sapiens
  misc_RNA (1)...(19): siRNA sense strand
ccagugaauuucugaguuu

SEQ ID NO: 1380563 - RNA, 19 nt, Homo sapiens
  misc_RNA (1)...(19): siRNA sense strand
cagggaacauggaaugaua

SEQ ID NO: 1380564 - RNA, 19 nt, Homo sapiens
  misc_RNA (1)...(19): siRNA sense strand
uaagagcgacaaaguauaa

SEQ ID NO: 1380565 - RNA, 19 nt, Homo sapiens
  misc_RNA (1)...(19): siRNA sense strand
gagcaucuuuaacagaauu

SEQ ID NO: 1380566 - RNA, 19 nt, Homo sapiens
  misc_RNA (1)...(19): siRNA sense strand
ccuggagacuuauuuaauu

SEQ ID NO: 1380567 - RNA, 19 nt, Homo sapiens
  misc_RNA (1)...(19): siRNA sense strand
cgacaaaguauaacaaguu

SEQ ID NO: 1380568 - RNA, 19 nt, Homo sapiens
  misc_RNA (1)...(19): siRNA sense strand
gaagaguguucuaucucaa

SEQ ID NO: 1380569 - RNA, 19 nt, Homo sapiens
  misc_RNA (1)...(19): siRNA sense strand
ucaaagaguuucuacuaag

SEQ ID NO: 1380570 - RNA, 19 nt, Homo sapiens
  misc_RNA (1)...(19): siRNA sense strand
gagaacugauaagaagaua

SEQ ID NO: 1380571 - RNA, 19 nt, Homo sapiens
  misc_RNA (1)...(19): siRNA sense strand
gcucuuuacucagggaaua

SEQ ID NO: 1380572 - RNA, 19 nt, Homo sapiens
  misc_RNA (1)...(19): siRNA sense strand
cgggauacauuacuuguug

SEQ ID NO: 1380573 - RNA, 19 nt, Homo sapiens
  misc_RNA (1)...(19): siRNA sense strand
ucgauguccucuuauauuu

SEQ ID NO: 1380574 - RNA, 19 nt, Homo sapiens
  misc_RNA (1)...(19): siRNA sense strand
agauuuaccuaaccaguuu

SEQ ID NO: 1380575 - RNA, 19 nt, Homo sapiens
  misc_RNA (1)...(19): siRNA sense strand
ggaaguaugugaggauugg

SEQ ID NO: 1380576 - RNA, 19 nt, Homo sapiens
  misc_RNA (1)...(19): siRNA sense strand
gauaucagaagugcaauaa

SEQ ID NO: 1380577 - RNA, 19 nt, Homo sapiens
  misc_RNA (1)...(19): siRNA sense strand
gcaccaacaauuaugauga

SEQ ID NO: 1380578 - RNA, 19 nt, Homo sapiens
  misc_RNA (1)...(19): siRNA sense strand
gaugaucugagaacugaua

SEQ ID NO: 1380579 - RNA, 19 nt, Homo sapiens
  misc_RNA (1)...(19): siRNA sense strand
uaucagaagugcaauaaac

SEQ ID NO: 1380580 - RNA, 19 nt, Homo sapiens
  misc_RNA (1)...(19): siRNA sense strand
ugugagagccagugaauuu

SEQ ID NO: 1380581 - RNA, 19 nt, Homo sapiens
  misc_RNA (1)...(19): siRNA sense strand
caccaacaauuaugaugaa

SEQ ID NO: 1380582 - RNA, 19 nt, Homo sapiens
  misc_RNA (1)...(19): siRNA sense strand
ccggaaaccuggucucuuc

SEQ ID NO: 1380583 - RNA, 19 nt, Homo sapiens
  misc_RNA (1)...(19): siRNA sense strand
gaagcgacacuuuggaaga

SEQ ID NO: 1380584 - RNA, 19 nt, Homo sapiens
  misc_RNA (1)...(19): siRNA sense strand
cgagaggugugaugcauuc

SEQ ID NO: 1380585 - RNA, 19 nt, Homo sapiens
  misc_RNA (1)...(19): siRNA sense strand
cagaugcugugcugucaaa

SEQ ID NO: 1380586 - RNA, 19 nt, Homo sapiens
  misc_RNA (1)...(19): siRNA sense strand
gaacgggauacauuacuug

SEQ ID NO: 1380587 - RNA, 19 nt, Homo sapiens
  misc_RNA (1)...(19): siRNA sense strand
gaucugagaacugauaaga

SEQ ID NO: 1380588 - RNA, 19 nt, Homo sapiens
  misc_RNA (1)...(19): siRNA sense strand
uaacaagaauggaggaaaa

SEQ ID NO: 1380589 - RNA, 19 nt, Homo sapiens
  misc_RNA (1)...(19): siRNA sense strand
uacaugaaguucuaaggaa

SEQ ID NO: 1380590 - RNA, 19 nt, Homo sapiens
  misc_RNA (1)...(19): siRNA sense strand
gaaaccuggucucuuccuu

SEQ ID NO: 1380591 - RNA, 19 nt, Homo sapiens
  misc_RNA (1)...(19): siRNA sense strand
guuauuguuucccaaagaa

SEQ ID NO: 1380592 - RNA, 19 nt, Homo sapiens
  misc_RNA (1)...(19): siRNA sense strand
ucugagaacugauaagaag

SEQ ID NO: 1380593 - RNA, 19 nt, Homo sapiens
  misc_RNA (1)...(19): siRNA sense strand
aauacacgcucuuuacuca

SEQ ID NO: 1380594 - RNA, 19 nt, Homo sapiens
  misc_RNA (1)...(19): siRNA sense strand
caacuuacggccaaggaaa

SEQ ID NO: 1380595 - RNA, 19 nt, Homo sapiens
  misc_RNA (1)...(19): siRNA sense strand
caaagaaauucaggaagag

SEQ ID NO: 1380596 - RNA, 19 nt, Homo sapiens
  misc_RNA (1)...(19): siRNA sense strand
ggagguaguagaaauguca

SEQ ID NO: 1380597 - RNA, 19 nt, Homo sapiens
  misc_RNA (1)...(19): siRNA sense strand
gccagugaauuucugaguu

SEQ ID NO: 1380598 - RNA, 19 nt, Homo sapiens
  misc_RNA (1)...(19): siRNA sense strand
uacaaaugcuuggagauga

SEQ ID NO: 1380599 - RNA, 19 nt, Homo sapiens
  misc_RNA (1)...(19): siRNA sense strand
ccucucauuuaucagaaua

SEQ ID NO: 1380600 - RNA, 19 nt, Homo sapiens
  misc_RNA (1)...(19): siRNA sense strand
caagagguccaagcuauug

SEQ ID NO: 1380601 - RNA, 19 nt, Homo sapiens
  misc_RNA (1)...(19): siRNA sense strand
ucgggauucucauacuuua

SEQ ID NO: 1380602 - RNA, 19 nt, Homo sapiens
  misc_RNA (1)...(19): siRNA sense strand
gguuauuguuucccaaaga

SEQ ID NO: 1380603 - RNA, 19 nt, Homo sapiens
  misc_RNA (1)...(19): siRNA sense strand
gccauaccuugcucuacua

SEQ ID NO: 1380604 - RNA, 19 nt, Homo sapiens
  misc_RNA (1)...(19): siRNA sense strand
caaggaggaggaucaaguu

SEQ ID NO: 1380605 - RNA, 19 nt, Homo sapiens
  misc_RNA (1)...(19): siRNA sense strand
ugugaugcauuccaacaaa

SEQ ID NO: 1380606 - RNA, 19 nt, Homo sapiens
  misc_RNA (1)...(19): siRNA sense strand
gaggugugaugcauuccaa

SEQ ID NO: 1380607 - RNA, 19 nt, Homo sapiens
  misc_RNA (1)...(19): siRNA sense strand
aaagauguuucucuguuuc

SEQ ID NO: 1380608 - RNA, 19 nt, Homo sapiens
  misc_RNA (1)...(19): siRNA sense strand
gggauguucuggugauauc

SEQ ID NO: 1380609 - RNA, 19 nt, Homo sapiens
  misc_RNA (1)...(19): siRNA sense strand
ugacaaaacuucucuagag

SEQ ID NO: 1380610 - RNA, 19 nt, Homo sapiens
  misc_RNA (1)...(19): siRNA sense strand
caggaagaguguucuaucu

SEQ ID NO: 1380611 - RNA, 19 nt, Homo sapiens
  misc_RNA (1)...(19): siRNA sense strand
ugaacgggauacauuacuu

SEQ ID NO: 1380612 - RNA, 19 nt, Homo sapiens
  misc_RNA (1)...(19): siRNA sense strand
ggugauaucagaagugcaa

SEQ ID NO: 1380613 - RNA, 19 nt, Homo sapiens
  misc_RNA (1)...(19): siRNA sense strand
gaaguucuaaggaaguaug

SEQ ID NO: 1380614 - RNA, 19 nt, Homo sapiens
  misc_RNA (1)...(19): siRNA sense strand
aauaugaacgggauacauu

SEQ ID NO: 1380615 - RNA, 19 nt, Homo sapiens
  misc_RNA (1)...(19): siRNA sense strand
cuauagaagcuaacaagaa

SEQ ID NO: 1380616 - RNA, 19 nt, Homo sapiens
  misc_RNA (1)...(19): siRNA sense strand
cgauguccucuuauauuua

SEQ ID NO: 1380617 - RNA, 19 nt, Homo sapiens
  misc_RNA (1)...(19): siRNA sense strand
auuggucgauguccucuua

SEQ ID NO: 1380618 - RNA, 19 nt, Homo sapiens
  misc_RNA (1)...(19): siRNA sense strand
agauaauucugguugaaga

SEQ ID NO: 1380619 - RNA, 19 nt, Homo sapiens
  misc_RNA (1)...(19): siRNA sense strand
ccuguggcaccaacaauua

SEQ ID NO: 1380620 - RNA, 19 nt, Homo sapiens
  misc_RNA (1)...(19): siRNA sense strand
gcgacacuuuggaagauug

SEQ ID NO: 1380621 - RNA, 19 nt, Homo sapiens
  misc_RNA (1)...(19): siRNA sense strand
ggaggaggaucaaguuuuc

SEQ ID NO: 1380622 - RNA, 19 nt, Homo sapiens
  misc_RNA (1)...(19): siRNA sense strand
gggauacauuacuuguuga

SEQ ID NO: 1380623 - RNA, 19 nt, Homo sapiens
  misc_RNA (1)...(19): siRNA sense strand
caauaaacagccuccaguu

SEQ ID NO: 1380624 - RNA, 19 nt, Homo sapiens
  misc_RNA (1)...(19): siRNA sense strand
aaucaagcuuccauauguu

SEQ ID NO: 1380625 - RNA, 19 nt, Homo sapiens
  misc_RNA (1)...(19): siRNA sense strand
caccaaaacuacauagauu

SEQ ID NO: 1380626 - RNA, 19 nt, Homo sapiens
  misc_RNA (1)...(19): siRNA sense strand
caguggagauaauaaucaa

SEQ ID NO: 1380627 - RNA, 19 nt, Homo sapiens
  misc_RNA (1)...(19): siRNA sense strand
ccaaggagacauggaagaa

SEQ ID NO: 1380628 - RNA, 19 nt, Homo sapiens
  misc_RNA (1)...(19): siRNA sense strand
gaauacacgcucuuuacuc

SEQ ID NO: 1380629 - RNA, 19 nt, Homo sapiens
  misc_RNA (1)...(19): siRNA sense strand
gcgacaaaguauaacaagu

SEQ ID NO: 1380630 - RNA, 19 nt, Homo sapiens
  misc_RNA (1)...(19): siRNA sense strand
gagcgacaaaguauaacaa

SEQ ID NO: 1380631 - RNA, 19 nt, Homo sapiens
  misc_RNA (1)...(19): siRNA sense strand
ucgguugcccucucauuua

SEQ ID NO: 1380632 - RNA, 19 nt, Homo sapiens
  misc_RNA (1)...(19): siRNA sense strand
ugacagggaacauggaaug

SEQ ID NO: 1380633 - RNA, 19 nt, Homo sapiens
  misc_RNA (1)...(19): siRNA sense strand
ggaauacacgcucuuuacu

SEQ ID NO: 1380634 - RNA, 19 nt, Homo sapiens
  misc_RNA (1)...(19): siRNA sense strand
guucuaaggaaguauguga

SEQ ID NO: 1380635 - RNA, 19 nt, Homo sapiens
  misc_RNA (1)...(19): siRNA sense strand
aaaaguaucgggaaaauug

SEQ ID NO: 1380636 - RNA, 19 nt, Homo sapiens
  misc_RNA (1)...(19): siRNA sense strand
acaaaugcuuggagaugau

SEQ ID NO: 1380637 - RNA, 19 nt, Homo sapiens
  misc_RNA (1)...(19): siRNA sense strand
gagagccagugaauuucug

SEQ ID NO: 1380638 - RNA, 19 nt, Homo sapiens
  misc_RNA (1)...(19): siRNA sense strand
acauagauuucuucaugga

SEQ ID NO: 1380639 - RNA, 19 nt, Homo sapiens
  misc_RNA (1)...(19): siRNA sense strand
ucagauagcaguuuucaaa

SEQ ID NO: 1380640 - RNA, 19 nt, Homo sapiens
  misc_RNA (1)...(19): siRNA sense strand
cuacuaagagcgacaaagu

SEQ ID NO: 1380641 - RNA, 19 nt, Homo sapiens
  misc_RNA (1)...(19): siRNA sense strand
ggaaugauagacccugaca

SEQ ID NO: 1380642 - RNA, 19 nt, Homo sapiens
  misc_RNA (1)...(19): siRNA sense strand
gguugaagauuuaccuaac

SEQ ID NO: 1380643 - RNA, 19 nt, Homo sapiens
  misc_RNA (1)...(19): siRNA sense strand
acuaagagcgacaaaguau

SEQ ID NO: 1380644 - RNA, 19 nt, Homo sapiens
  misc_RNA (1)...(19): siRNA sense strand
caaggagacauggaagaaa

SEQ ID NO: 1380645 - RNA, 19 nt, Homo sapiens
  misc_RNA (1)...(19): siRNA sense strand
uaucgggauucucauacuu

SEQ ID NO: 1380646 - RNA, 19 nt, Homo sapiens
  misc_RNA (1)...(19): siRNA sense strand
ugaaucaagcuuccauaug

SEQ ID NO: 1380647 - RNA, 19 nt, Homo sapiens
  misc_RNA (1)...(19): siRNA sense strand
cugaggagguaguagaaau

SEQ ID NO: 1380648 - RNA, 19 nt, Homo sapiens
  misc_RNA (1)...(19): siRNA sense strand
gucgauguccucuuauauu

SEQ ID NO: 1380649 - RNA, 19 nt, Homo sapiens
  misc_RNA (1)...(19): siRNA sense strand
gaaucaagcuuccauaugu

SEQ ID NO: 1380650 - RNA, 19 nt, Homo sapiens
  misc_RNA (1)...(19): siRNA sense strand
gcaaagauguuucucuguu

SEQ ID NO: 1380651 - RNA, 19 nt, Homo sapiens
  misc_RNA (1)...(19): siRNA sense strand
acacaugccuggagacuua

SEQ ID NO: 1380652 - RNA, 19 nt, Homo sapiens
  misc_RNA (1)...(19): siRNA sense strand
caacaaagcccgaggauau

SEQ ID NO: 1380653 - RNA, 19 nt, Homo sapiens
  misc_RNA (1)...(19): siRNA sense strand
ccaaagaaauucaggaaga

SEQ ID NO: 1380654 - RNA, 19 nt, Homo sapiens
  misc_RNA (1)...(19): siRNA sense strand
cuacauagauuucuucaug

SEQ ID NO: 1380655 - RNA, 19 nt, Homo sapiens
  misc_RNA (1)...(19): siRNA sense strand
ggaaauugaugauauugug

SEQ ID NO: 1380656 - RNA, 19 nt, Homo sapiens
  misc_RNA (1)...(19): siRNA sense strand
aaacucagcuauugccaua

SEQ ID NO: 1380657 - RNA, 19 nt, Homo sapiens
  misc_RNA (1)...(19): siRNA sense strand
gaagauaauucugguugaa

SEQ ID NO: 1380658 - RNA, 19 nt, Homo sapiens
  misc_RNA (1)...(19): siRNA sense strand
caaagauguuucucuguuu

SEQ ID NO: 1380659 - RNA, 19 nt, Homo sapiens
  misc_RNA (1)...(19): siRNA sense strand
guacaagaguggauuaauc

SEQ ID NO: 1380660 - RNA, 19 nt, Homo sapiens
  misc_RNA (1)...(19): siRNA sense strand
ggaagaguguucuaucuca

SEQ ID NO: 1380661 - RNA, 19 nt, Homo sapiens
  misc_RNA (1)...(19): siRNA sense strand
gaaagacaacgaccuuaaa

SEQ ID NO: 1380662 - RNA, 19 nt, Homo sapiens
  misc_RNA (1)...(19): siRNA sense strand
ggaaagacaacgaccuuaa

SEQ ID NO: 1380663 - RNA, 19 nt, Homo sapiens
  misc_RNA (1)...(19): siRNA sense strand
caaagaguuucuacuaaga

SEQ ID NO: 1380664 - RNA, 19 nt, Homo sapiens
  misc_RNA (1)...(19): siRNA sense strand
ccucagugguuucuaauaa

SEQ ID NO: 1380665 - RNA, 19 nt, Homo sapiens
  misc_RNA (1)...(19): siRNA sense strand
ccagugaauuucugaguuu

SEQ ID NO: 1380666 - RNA, 19 nt, Homo sapiens
  misc_RNA (1)...(19): siRNA sense strand
cagggaacauggaaugaua

SEQ ID NO: 1380667 - RNA, 19 nt, Homo sapiens
  misc_RNA (1)...(19): siRNA sense strand
uaagagcgacaaaguauaa

SEQ ID NO: 1380668 - RNA, 19 nt, Homo sapiens
  misc_RNA (1)...(19): siRNA sense strand
gagcaucuuuaacagaauu

SEQ ID NO: 1380669 - RNA, 19 nt, Homo sapiens
  misc_RNA (1)...(19): siRNA sense strand
ccuggagacuuauuuaauu

SEQ ID NO: 1380670 - RNA, 19 nt, Homo sapiens
  misc_RNA (1)...(19): siRNA sense strand
cgacaaaguauaacaaguu

SEQ ID NO: 1380671 - RNA, 19 nt, Homo sapiens
  misc_RNA (1)...(19): siRNA sense strand
ggagcaugguauucaagua

SEQ ID NO: 1380672 - RNA, 19 nt, Homo sapiens
  misc_RNA (1)...(19): siRNA sense strand
gaagaguguucuaucucaa

SEQ ID NO: 1380673 - RNA, 19 nt, Homo sapiens
  misc_RNA (1)...(19): siRNA sense strand
ucaaagaguuucuacuaag

SEQ ID NO: 1380674 - RNA, 19 nt, Homo sapiens
  misc_RNA (1)...(19): siRNA sense strand
gagaacugauaagaagaua

SEQ ID NO: 1380675 - RNA, 19 nt, Homo sapiens
  misc_RNA (1)...(19): siRNA sense strand
gcucuuuacucagggaaua

SEQ ID NO: 1380676 - RNA, 19 nt, Homo sapiens
  misc_RNA (1)...(19): siRNA sense strand
cgggauacauuacuuguug

SEQ ID NO: 1380677 - RNA, 19 nt, Homo sapiens
  misc_RNA (1)...(19): siRNA sense strand
ucgauguccucuuauauuu

SEQ ID NO: 1380678 - RNA, 19 nt, Homo sapiens
  misc_RNA (1)...(19): siRNA sense strand
agauuuaccuaaccaguuu

SEQ ID NO: 1380679 - RNA, 19 nt, Homo sapiens
  misc_RNA (1)...(19): siRNA sense strand
ggaaguaugugaggauugg

SEQ ID NO: 1380680 - RNA, 19 nt, Homo sapiens
  misc_RNA (1)...(19): siRNA sense strand
gauaucagaagugcaauaa

SEQ ID NO: 1380681 - RNA, 19 nt, Homo sapiens
  misc_RNA (1)...(19): siRNA sense strand
gcaccaacaauuaugauga

SEQ ID NO: 1380682 - RNA, 19 nt, Homo sapiens
  misc_RNA (1)...(19): siRNA sense strand
aaacaggguggaucuauuu

SEQ ID NO: 1380683 - RNA, 19 nt, Homo sapiens
  misc_RNA (1)...(19): siRNA sense strand
gaugaucugagaacugaua

SEQ ID NO: 1380684 - RNA, 19 nt, Homo sapiens
  misc_RNA (1)...(19): siRNA sense strand
ggguggaucuauuuuauua

SEQ ID NO: 1380685 - RNA, 19 nt, Homo sapiens
  misc_RNA (1)...(19): siRNA sense strand
uaucagaagugcaauaaac

SEQ ID NO: 1380686 - RNA, 19 nt, Homo sapiens
  misc_RNA (1)...(19): siRNA sense strand
ugugagagccagugaauuu

SEQ ID NO: 1380687 - RNA, 19 nt, Homo sapiens
  misc_RNA (1)...(19): siRNA sense strand
caaaggagcaugguauuca

SEQ ID NO: 1380688 - RNA, 19 nt, Homo sapiens
  misc_RNA (1)...(19): siRNA sense strand
ccggaaaccuggucucuuc

SEQ ID NO: 1380689 - RNA, 19 nt, Homo sapiens
  misc_RNA (1)...(19): siRNA sense strand
gaagcgacacuuuggaaga

SEQ ID NO: 1380690 - RNA, 19 nt, Homo sapiens
  misc_RNA (1)...(19): siRNA sense strand
cgagaggugugaugcauuc

SEQ ID NO: 1380691 - RNA, 19 nt, Homo sapiens
  misc_RNA (1)...(19): siRNA sense strand
cagaugcugugcugucaaa

SEQ ID NO: 1380692 - RNA, 19 nt, Homo sapiens
  misc_RNA (1)...(19): siRNA sense strand
caccaacaauuaugaugaa

SEQ ID NO: 1380693 - RNA, 19 nt, Homo sapiens
  misc_RNA (1)...(19): siRNA sense strand
gaacgggauacauuacuug

SEQ ID NO: 1380694 - RNA, 19 nt, Homo sapiens
  misc_RNA (1)...(19): siRNA sense strand
gaucugagaacugauaaga

SEQ ID NO: 1380695 - RNA, 19 nt, Homo sapiens
  misc_RNA (1)...(19): siRNA sense strand
uaacaagaauggaggaaaa

SEQ ID NO: 1380696 - RNA, 19 nt, Homo sapiens
  misc_RNA (1)...(19): siRNA sense strand
caaguacaagaguggauua

SEQ ID NO: 1380697 - RNA, 19 nt, Homo sapiens
  misc_RNA (1)...(19): siRNA sense strand
gaaaccuggucucuuccuu

SEQ ID NO: 1380698 - RNA, 19 nt, Homo sapiens
  misc_RNA (1)...(19): siRNA sense strand
guuauuguuucccaaagaa

SEQ ID NO: 1380699 - RNA, 19 nt, Homo sapiens
  misc_RNA (1)...(19): siRNA sense strand
uacaugaaguucuaaggaa

SEQ ID NO: 1380700 - RNA, 19 nt, Homo sapiens
  misc_RNA (1)...(19): siRNA sense strand
ucugagaacugauaagaag

SEQ ID NO: 1380701 - RNA, 19 nt, Homo sapiens
  misc_RNA (1)...(19): siRNA sense strand
aauacacgcucuuuacuca

SEQ ID NO: 1380702 - RNA, 19 nt, Homo sapiens
  misc_RNA (1)...(19): siRNA sense strand
caacuuacggccaaggaaa

SEQ ID NO: 1380703 - RNA, 19 nt, Homo sapiens
  misc_RNA (1)...(19): siRNA sense strand
caaagaaauucaggaagag

SEQ ID NO: 1380704 - RNA, 19 nt, Homo sapiens
  misc_RNA (1)...(19): siRNA sense strand
ggagguaguagaaauguca

SEQ ID NO: 1380705 - RNA, 19 nt, Homo sapiens
  misc_RNA (1)...(19): siRNA sense strand
gccagugaauuucugaguu

SEQ ID NO: 1380706 - RNA, 19 nt, Homo sapiens
  misc_RNA (1)...(19): siRNA sense strand
uacaaaugcuuggagauga

SEQ ID NO: 1380707 - RNA, 19 nt, Homo sapiens
  misc_RNA (1)...(19): siRNA sense strand
ugaacuugcugugcauaaa

SEQ ID NO: 1380708 - RNA, 19 nt, Homo sapiens
  misc_RNA (1)...(19): siRNA sense strand
ccucucauuuaucagaaua

SEQ ID NO: 1380709 - RNA, 19 nt, Homo sapiens
  misc_RNA (1)...(19): siRNA sense strand
caagagguccaagcuauug

SEQ ID NO: 1380710 - RNA, 19 nt, Homo sapiens
  misc_RNA (1)...(19): siRNA sense strand
ucgggauucucauacuuua

SEQ ID NO: 1380711 - RNA, 19 nt, Homo sapiens
  misc_RNA (1)...(19): siRNA sense strand
gguuauuguuucccaaaga

SEQ ID NO: 1380712 - RNA, 19 nt, Homo sapiens
  misc_RNA (1)...(19): siRNA sense strand
gccauaccuugcucuacua

SEQ ID NO: 1380713 - RNA, 19 nt, Homo sapiens
  misc_RNA (1)...(19): siRNA sense strand
caaggaggaggaucaaguu

SEQ ID NO: 1380714 - RNA, 19 nt, Homo sapiens
  misc_RNA (1)...(19): siRNA sense strand
ugugaugcauuccaacaaa

SEQ ID NO: 1380715 - RNA, 19 nt, Homo sapiens
  misc_RNA (1)...(19): siRNA sense strand
gaggugugaugcauuccaa

SEQ ID NO: 1380716 - RNA, 19 nt, Homo sapiens
  misc_RNA (1)...(19): siRNA sense strand
aaagauguuucucuguuuc

SEQ ID NO: 1380717 - RNA, 19 nt, Homo sapiens
  misc_RNA (1)...(19): siRNA sense strand
gggauguucuggugauauc

SEQ ID NO: 1380718 - RNA, 19 nt, Homo sapiens
  misc_RNA (1)...(19): siRNA sense strand
ugacaaaacuucucuagag

SEQ ID NO: 1380719 - RNA, 19 nt, Homo sapiens
  misc_RNA (1)...(19): siRNA sense strand
caggaagaguguucuaucu

SEQ ID NO: 1380720 - RNA, 19 nt, Homo sapiens
  misc_RNA (1)...(19): siRNA sense strand
ugaacgggauacauuacuu

SEQ ID NO: 1380721 - RNA, 19 nt, Homo sapiens
  misc_RNA (1)...(19): siRNA sense strand
ggugauaucagaagugcaa

SEQ ID NO: 1380722 - RNA, 19 nt, Homo sapiens
  misc_RNA (1)...(19): siRNA sense strand
agauaauucugguugaaga

SEQ ID NO: 1380723 - RNA, 19 nt, Homo sapiens
  misc_RNA (1)...(19): siRNA sense strand
aaaggagcaugguauucaa

SEQ ID NO: 1380724 - RNA, 19 nt, Homo sapiens
  misc_RNA (1)...(19): siRNA sense strand
aauaugaacgggauacauu

SEQ ID NO: 1380725 - RNA, 19 nt, Homo sapiens
  misc_RNA (1)...(19): siRNA sense strand
cuauagaagcuaacaagaa

SEQ ID NO: 1380726 - RNA, 19 nt, Homo sapiens
  misc_RNA (1)...(19): siRNA sense strand
cgauguccucuuauauuua

SEQ ID NO: 1380727 - RNA, 19 nt, Homo sapiens
  misc_RNA (1)...(19): siRNA sense strand
auuggucgauguccucuua

SEQ ID NO: 1380728 - RNA, 19 nt, Homo sapiens
  misc_RNA (1)...(19): siRNA sense strand
gaaguucuaaggaaguaug

SEQ ID NO: 1380729 - RNA, 19 nt, Homo sapiens
  misc_RNA (1)...(19): siRNA sense strand
ccuguggcaccaacaauua

SEQ ID NO: 1380730 - RNA, 19 nt, Homo sapiens
  misc_RNA (1)...(19): siRNA sense strand
gcgacacuuuggaagauug

SEQ ID NO: 1380731 - RNA, 19 nt, Homo sapiens
  misc_RNA (1)...(19): siRNA sense strand
ggaggaggaucaaguuuuc

SEQ ID NO: 1380732 - RNA, 19 nt, Homo sapiens
  misc_RNA (1)...(19): siRNA sense strand
gggauacauuacuuguuga

SEQ ID NO: 1380733 - RNA, 19 nt, Homo sapiens
  misc_RNA (1)...(19): siRNA sense strand
uaucaaaggagcaugguau

SEQ ID NO: 1380734 - RNA, 19 nt, Homo sapiens
  misc_RNA (1)...(19): siRNA sense strand
aaucaagcuuccauauguu

SEQ ID NO: 1380735 - RNA, 19 nt, Homo sapiens
  misc_RNA (1)...(19): siRNA sense strand
caccaaaacuacauagauu

SEQ ID NO: 1380736 - RNA, 19 nt, Homo sapiens
  misc_RNA (1)...(19): siRNA sense strand
caauaaacagccuccaguu

SEQ ID NO: 1380737 - RNA, 19 nt, Homo sapiens
  misc_RNA (1)...(19): siRNA sense strand
gagcgacaaaguauaacaa

SEQ ID NO: 1380738 - RNA, 19 nt, Homo sapiens
  misc_RNA (1)...(19): siRNA sense strand
ccaaggagacauggaagaa

SEQ ID NO: 1380739 - RNA, 19 nt, Homo sapiens
  misc_RNA (1)...(19): siRNA sense strand
gaauacacgcucuuuacuc

SEQ ID NO: 1380740 - RNA, 19 nt, Homo sapiens
  misc_RNA (1)...(19): siRNA sense strand
caguggagauaauaaucaa

SEQ ID NO: 1380741 - RNA, 19 nt, Homo sapiens
  misc_RNA (1)...(19): siRNA sense strand
gcgacaaaguauaacaagu

SEQ ID NO: 1380742 - RNA, 19 nt, Homo sapiens
  misc_RNA (1)...(19): siRNA sense strand
gcaugguauucaaguacaa

SEQ ID NO: 1380743 - RNA, 19 nt, Homo sapiens
  misc_RNA (1)...(19): siRNA sense strand
ugacagggaacauggaaug

SEQ ID NO: 1380744 - RNA, 19 nt, Homo sapiens
  misc_RNA (1)...(19): siRNA sense strand
ggaauacacgcucuuuacu

SEQ ID NO: 1380745 - RNA, 19 nt, Homo sapiens
  misc_RNA (1)...(19): siRNA sense strand
ucgguugcccucucauuua

SEQ ID NO: 1380746 - RNA, 19 nt, Homo sapiens
  misc_RNA (1)...(19): siRNA sense strand
gagagccagugaauuucug

SEQ ID NO: 1380747 - RNA, 19 nt, Homo sapiens
  misc_RNA (1)...(19): siRNA sense strand
aaaaguaucgggaaaauug

SEQ ID NO: 1380748 - RNA, 19 nt, Homo sapiens
  misc_RNA (1)...(19): siRNA sense strand
gcaugaacuugcugugcau

SEQ ID NO: 1380749 - RNA, 19 nt, Homo sapiens
  misc_RNA (1)...(19): siRNA sense strand
gaaucaagcuuccauaugu

SEQ ID NO: 1380750 - RNA, 19 nt, Homo sapiens
  misc_RNA (1)...(19): siRNA sense strand
gcaaagauguuucucuguu

SEQ ID NO: 1380751 - RNA, 19 nt, Homo sapiens
  misc_RNA (1)...(19): siRNA sense strand
acacaugccuggagacuua

SEQ ID NO: 1380752 - RNA, 19 nt, Homo sapiens
  misc_RNA (1)...(19): siRNA sense strand
caacaaagcccgaggauau

SEQ ID NO: 1380753 - RNA, 19 nt, Homo sapiens
  misc_RNA (1)...(19): siRNA sense strand
ccaaagaaauucaggaaga

SEQ ID NO: 1380754 - RNA, 19 nt, Homo sapiens
  misc_RNA (1)...(19): siRNA sense strand
cuacauagauuucuucaug

SEQ ID NO: 1380755 - RNA, 19 nt, Homo sapiens
  misc_RNA (1)...(19): siRNA sense strand
ggaaauugaugauauugug

SEQ ID NO: 1380756 - RNA, 19 nt, Homo sapiens
  misc_RNA (1)...(19): siRNA sense strand
aaacucagcuauugccaua

SEQ ID NO: 1380757 - RNA, 19 nt, Homo sapiens
  misc_RNA (1)...(19): siRNA sense strand
gaagauaauucugguugaa

SEQ ID NO: 1380758 - RNA, 19 nt, Homo sapiens
  misc_RNA (1)...(19): siRNA sense strand
caaagauguuucucuguuu

SEQ ID NO: 1380759 - RNA, 19 nt, Homo sapiens
  misc_RNA (1)...(19): siRNA sense strand
guacaagaguggauuaauc

SEQ ID NO: 1380760 - RNA, 19 nt, Homo sapiens
  misc_RNA (1)...(19): siRNA sense strand
ggaagaguguucuaucuca

SEQ ID NO: 1380761 - RNA, 19 nt, Homo sapiens
  misc_RNA (1)...(19): siRNA sense strand
gaaagacaacgaccuuaaa

SEQ ID NO: 1380762 - RNA, 19 nt, Homo sapiens
  misc_RNA (1)...(19): siRNA sense strand
ggaaagacaacgaccuuaa

SEQ ID NO: 1380763 - RNA, 19 nt, Homo sapiens
  misc_RNA (1)...(19): siRNA sense strand
caaagaguuucuacuaaga

SEQ ID NO: 1380764 - RNA, 19 nt, Homo sapiens
  misc_RNA (1)...(19): siRNA sense strand
ccucagugguuucuaauaa

SEQ ID NO: 1380765 - RNA, 19 nt, Homo sapiens
  misc_RNA (1)...(19): siRNA sense strand
ccagugaauuucugaguuu

SEQ ID NO: 1380766 - RNA, 19 nt, Homo sapiens
  misc_RNA (1)...(19): siRNA sense strand
cagggaacauggaaugaua

SEQ ID NO: 1380767 - RNA, 19 nt, Homo sapiens
  misc_RNA (1)...(19): siRNA sense strand
uaagagcgacaaaguauaa

SEQ ID NO: 1380768 - RNA, 19 nt, Homo sapiens
  misc_RNA (1)...(19): siRNA sense strand
gagcaucuuuaacagaauu

SEQ ID NO: 1380769 - RNA, 19 nt, Homo sapiens
  misc_RNA (1)...(19): siRNA sense strand
ccuggagacuuauuuaauu

SEQ ID NO: 1380770 - RNA, 19 nt, Homo sapiens
  misc_RNA (1)...(19): siRNA sense strand
cgacaaaguauaacaaguu

SEQ ID NO: 1380771 - RNA, 19 nt, Homo sapiens
  misc_RNA (1)...(19): siRNA sense strand
ggagcaugguauucaagua

SEQ ID NO: 1380772 - RNA, 19 nt, Homo sapiens
  misc_RNA (1)...(19): siRNA sense strand
gaagaguguucuaucucaa

SEQ ID NO: 1380773 - RNA, 19 nt, Homo sapiens
  misc_RNA (1)...(19): siRNA sense strand
ucaaagaguuucuacuaag

SEQ ID NO: 1380774 - RNA, 19 nt, Homo sapiens
  misc_RNA (1)...(19): siRNA sense strand
gagaacugauaagaagaua

SEQ ID NO: 1380775 - RNA, 19 nt, Homo sapiens
  misc_RNA (1)...(19): siRNA sense strand
gcucuuuacucagggaaua

SEQ ID NO: 1380776 - RNA, 19 nt, Homo sapiens
  misc_RNA (1)...(19): siRNA sense strand
cgggauacauuacuuguug

SEQ ID NO: 1380777 - RNA, 19 nt, Homo sapiens
  misc_RNA (1)...(19): siRNA sense strand
ucgauguccucuuauauuu

SEQ ID NO: 1380778 - RNA, 19 nt, Homo sapiens
  misc_RNA (1)...(19): siRNA sense strand
agauuuaccuaaccaguuu

SEQ ID NO: 1380779 - RNA, 19 nt, Homo sapiens
  misc_RNA (1)...(19): siRNA sense strand
ggaaguaugugaggauugg

SEQ ID NO: 1380780 - RNA, 19 nt, Homo sapiens
  misc_RNA (1)...(19): siRNA sense strand
gauaucagaagugcaauaa

SEQ ID NO: 1380781 - RNA, 19 nt, Homo sapiens
  misc_RNA (1)...(19): siRNA sense strand
gcaccaacaauuaugauga

SEQ ID NO: 1380782 - RNA, 19 nt, Homo sapiens
  misc_RNA (1)...(19): siRNA sense strand
aaacaggguggaucuauuu

SEQ ID NO: 1380783 - RNA, 19 nt, Homo sapiens
  misc_RNA (1)...(19): siRNA sense strand
gaugaucugagaacugaua

SEQ ID NO: 1380784 - RNA, 19 nt, Homo sapiens
  misc_RNA (1)...(19): siRNA sense strand
ggguggaucuauuuuauua

SEQ ID NO: 1380785 - RNA, 19 nt, Homo sapiens
  misc_RNA (1)...(19): siRNA sense strand
uaucagaagugcaauaaac

SEQ ID NO: 1380786 - RNA, 19 nt, Homo sapiens
  misc_RNA (1)...(19): siRNA sense strand
ugugagagccagugaauuu

SEQ ID NO: 1380787 - RNA, 19 nt, Homo sapiens
  misc_RNA (1)...(19): siRNA sense strand
caaaggagcaugguauuca

SEQ ID NO: 1380788 - RNA, 19 nt, Homo sapiens
  misc_RNA (1)...(19): siRNA sense strand
ccggaaaccuggucucuuc

SEQ ID NO: 1380789 - RNA, 19 nt, Homo sapiens
  misc_RNA (1)...(19): siRNA sense strand
gaagcgacacuuuggaaga

SEQ ID NO: 1380790 - RNA, 19 nt, Homo sapiens
  misc_RNA (1)...(19): siRNA sense strand
cgagaggugugaugcauuc

SEQ ID NO: 1380791 - RNA, 19 nt, Homo sapiens
  misc_RNA (1)...(19): siRNA sense strand
cagaugcugugcugucaaa

SEQ ID NO: 1380792 - RNA, 19 nt, Homo sapiens
  misc_RNA (1)...(19): siRNA sense strand
caccaacaauuaugaugaa

SEQ ID NO: 1380793 - RNA, 19 nt, Homo sapiens
  misc_RNA (1)...(19): siRNA sense strand
gaacgggauacauuacuug

SEQ ID NO: 1380794 - RNA, 19 nt, Homo sapiens
  misc_RNA (1)...(19): siRNA sense strand
gaucugagaacugauaaga

SEQ ID NO: 1380795 - RNA, 19 nt, Homo sapiens
  misc_RNA (1)...(19): siRNA sense strand
uaacaagaauggaggaaaa

SEQ ID NO: 1380796 - RNA, 19 nt, Homo sapiens
  misc_RNA (1)...(19): siRNA sense strand
caaguacaagaguggauua

SEQ ID NO: 1380797 - RNA, 19 nt, Homo sapiens
  misc_RNA (1)...(19): siRNA sense strand
gaaaccuggucucuuccuu

SEQ ID NO: 1380798 - RNA, 19 nt, Homo sapiens
  misc_RNA (1)...(19): siRNA sense strand
guuauuguuucccaaagaa

SEQ ID NO: 1380799 - RNA, 19 nt, Homo sapiens
  misc_RNA (1)...(19): siRNA sense strand
uacaugaaguucuaaggaa

SEQ ID NO: 1380800 - RNA, 19 nt, Homo sapiens
  misc_RNA (1)...(19): siRNA sense strand
ucugagaacugauaagaag

SEQ ID NO: 1380801 - RNA, 19 nt, Homo sapiens
  misc_RNA (1)...(19): siRNA sense strand
aauacacgcucuuuacuca

SEQ ID NO: 1380802 - RNA, 19 nt, Homo sapiens
  misc_RNA (1)...(19): siRNA sense strand
caacuuacggccaaggaaa

SEQ ID NO: 1380803 - RNA, 19 nt, Homo sapiens
  misc_RNA (1)...(19): siRNA sense strand
caaagaaauucaggaagag

SEQ ID NO: 1380804 - RNA, 19 nt, Homo sapiens
  misc_RNA (1)...(19): siRNA sense strand
ggagguaguagaaauguca

SEQ ID NO: 1380805 - RNA, 19 nt, Homo sapiens
  misc_RNA (1)...(19): siRNA sense strand
gccagugaauuucugaguu

SEQ ID NO: 1380806 - RNA, 19 nt, Homo sapiens
  misc_RNA (1)...(19): siRNA sense strand
uacaaaugcuuggagauga

SEQ ID NO: 1380807 - RNA, 19 nt, Homo sapiens
  misc_RNA (1)...(19): siRNA sense strand
ugaacuugcugugcauaaa

SEQ ID NO: 1380808 - RNA, 19 nt, Homo sapiens
  misc_RNA (1)...(19): siRNA sense strand
ccucucauuuaucagaaua

SEQ ID NO: 1380809 - RNA, 19 nt, Homo sapiens
  misc_RNA (1)...(19): siRNA sense strand
caagagguccaagcuauug

SEQ ID NO: 1380810 - RNA, 19 nt, Homo sapiens
  misc_RNA (1)...(19): siRNA sense strand
ucgggauucucauacuuua

SEQ ID NO: 1380811 - RNA, 19 nt, Homo sapiens
  misc_RNA (1)...(19): siRNA sense strand
gguuauuguuucccaaaga

SEQ ID NO: 1380812 - RNA, 19 nt, Homo sapiens
  misc_RNA (1)...(19): siRNA sense strand
gccauaccuugcucuacua

SEQ ID NO: 1380813 - RNA, 19 nt, Homo sapiens
  misc_RNA (1)...(19): siRNA sense strand
caaggaggaggaucaaguu

SEQ ID NO: 1380814 - RNA, 19 nt, Homo sapiens
  misc_RNA (1)...(19): siRNA sense strand
ugugaugcauuccaacaaa

SEQ ID NO: 1380815 - RNA, 19 nt, Homo sapiens
  misc_RNA (1)...(19): siRNA sense strand
gaggugugaugcauuccaa

SEQ ID NO: 1380816 - RNA, 19 nt, Homo sapiens
  misc_RNA (1)...(19): siRNA sense strand
aaagauguuucucuguuuc

SEQ ID NO: 1380817 - RNA, 19 nt, Homo sapiens
  misc_RNA (1)...(19): siRNA sense strand
gggauguucuggugauauc

SEQ ID NO: 1380818 - RNA, 19 nt, Homo sapiens
  misc_RNA (1)...(19): siRNA sense strand
ugacaaaacuucucuagag

SEQ ID NO: 1380819 - RNA, 19 nt, Homo sapiens
  misc_RNA (1)...(19): siRNA sense strand
caggaagaguguucuaucu

SEQ ID NO: 1380820 - RNA, 19 nt, Homo sapiens
  misc_RNA (1)...(19): siRNA sense strand
ugaacgggauacauuacuu

SEQ ID NO: 1380821 - RNA, 19 nt, Homo sapiens
  misc_RNA (1)...(19): siRNA sense strand
ggugauaucagaagugcaa

SEQ ID NO: 1380822 - RNA, 19 nt, Homo sapiens
  misc_RNA (1)...(19): siRNA sense strand
agauaauucugguugaaga

SEQ ID NO: 1380823 - RNA, 19 nt, Homo sapiens
  misc_RNA (1)...(19): siRNA sense strand
aaaggagcaugguauucaa

SEQ ID NO: 1380824 - RNA, 19 nt, Homo sapiens
  misc_RNA (1)...(19): siRNA sense strand
aauaugaacgggauacauu

SEQ ID NO: 1380825 - RNA, 19 nt, Homo sapiens
  misc_RNA (1)...(19): siRNA sense strand
cuauagaagcuaacaagaa

SEQ ID NO: 1380826 - RNA, 19 nt, Homo sapiens
  misc_RNA (1)...(19): siRNA sense strand
cgauguccucuuauauuua

SEQ ID NO: 1380827 - RNA, 19 nt, Homo sapiens
  misc_RNA (1)...(19): siRNA sense strand
auuggucgauguccucuua

SEQ ID NO: 1380828 - RNA, 19 nt, Homo sapiens
  misc_RNA (1)...(19): siRNA sense strand
gaaguucuaaggaaguaug

SEQ ID NO: 1380829 - RNA, 19 nt, Homo sapiens
  misc_RNA (1)...(19): siRNA sense strand
ccuguggcaccaacaauua

SEQ ID NO: 1380830 - RNA, 19 nt, Homo sapiens
  misc_RNA (1)...(19): siRNA sense strand
gcgacacuuuggaagauug

SEQ ID NO: 1380831 - RNA, 19 nt, Homo sapiens
  misc_RNA (1)...(19): siRNA sense strand
ggaggaggaucaaguuuuc

SEQ ID NO: 1380832 - RNA, 19 nt, Homo sapiens
  misc_RNA (1)...(19): siRNA sense strand
gggauacauuacuuguuga

SEQ ID NO: 1380833 - RNA, 19 nt, Homo sapiens
  misc_RNA (1)...(19): siRNA sense strand
uaucaaaggagcaugguau

SEQ ID NO: 1380834 - RNA, 19 nt, Homo sapiens
  misc_RNA (1)...(19): siRNA sense strand
aaucaagcuuccauauguu

SEQ ID NO: 1380835 - RNA, 19 nt, Homo sapiens
  misc_RNA (1)...(19): siRNA sense strand
caccaaaacuacauagauu

SEQ ID NO: 1380836 - RNA, 19 nt, Homo sapiens
  misc_RNA (1)...(19): siRNA sense strand
caauaaacagccuccaguu

SEQ ID NO: 1380837 - RNA, 19 nt, Homo sapiens
  misc_RNA (1)...(19): siRNA sense strand
gagcgacaaaguauaacaa

SEQ ID NO: 1380838 - RNA, 19 nt, Homo sapiens
  misc_RNA (1)...(19): siRNA sense strand
ccaaggagacauggaagaa

SEQ ID NO: 1380839 - RNA, 19 nt, Homo sapiens
  misc_RNA (1)...(19): siRNA sense strand
gaauacacgcucuuuacuc

SEQ ID NO: 1380840 - RNA, 19 nt, Homo sapiens
  misc_RNA (1)...(19): siRNA sense strand
caguggagauaauaaucaa

SEQ ID NO: 1380841 - RNA, 19 nt, Homo sapiens
  misc_RNA (1)...(19): siRNA sense strand
gcgacaaaguauaacaagu

SEQ ID NO: 1380842 - RNA, 19 nt, Homo sapiens
  misc_RNA (1)...(19): siRNA sense strand
gcaugguauucaaguacaa

SEQ ID NO: 1380843 - RNA, 19 nt, Homo sapiens
  misc_RNA (1)...(19): siRNA sense strand
ugacagggaacauggaaug

SEQ ID NO: 1380844 - RNA, 19 nt, Homo sapiens
  misc_RNA (1)...(19): siRNA sense strand
ggaauacacgcucuuuacu

SEQ ID NO: 1380845 - RNA, 19 nt, Homo sapiens
  misc_RNA (1)...(19): siRNA sense strand
ucgguugcccucucauuua

SEQ ID NO: 1380846 - RNA, 19 nt, Homo sapiens
  misc_RNA (1)...(19): siRNA sense strand
gagagccagugaauuucug

SEQ ID NO: 1380847 - RNA, 19 nt, Homo sapiens
  misc_RNA (1)...(19): siRNA sense strand
aaaaguaucgggaaaauug

SEQ ID NO: 1380848 - RNA, 19 nt, Homo sapiens
  misc_RNA (1)...(19): siRNA sense strand
gcaugaacuugcugugcau

SEQ ID NO: 1380849 - RNA, 19 nt, Homo sapiens
  misc_RNA (1)...(19): siRNA sense strand
gaaucaagcuuccauaugu

SEQ ID NO: 1380850 - RNA, 19 nt, Homo sapiens
  misc_RNA (1)...(19): siRNA sense strand
gcaaagauguuucucuguu

SEQ ID NO: 1380851 - RNA, 19 nt, Homo sapiens
  misc_RNA (1)...(19): siRNA sense strand
acacaugccuggagacuua

SEQ ID NO: 1380852 - RNA, 19 nt, Homo sapiens
  misc_RNA (1)...(19): siRNA sense strand
caacaaagcccgaggauau

SEQ ID NO: 1380853 - RNA, 19 nt, Homo sapiens
  misc_RNA (1)...(19): siRNA sense strand
ccaaagaaauucaggaaga

SEQ ID NO: 1380854 - RNA, 19 nt, Homo sapiens
  misc_RNA (1)...(19): siRNA sense strand
cuacauagauuucuucaug

SEQ ID NO: 1380855 - RNA, 19 nt, Homo sapiens
  misc_RNA (1)...(19): siRNA sense strand
ggaaauugaugauauugug

SEQ ID NO: 1380856 - RNA, 19 nt, Homo sapiens
  misc_RNA (1)...(19): siRNA sense strand
aaacucagcuauugccaua

SEQ ID NO: 1380857 - RNA, 19 nt, Homo sapiens
  misc_RNA (1)...(19): siRNA sense strand
gaagauaauucugguugaa

SEQ ID NO: 1380858 - RNA, 19 nt, Homo sapiens
  misc_RNA (1)...(19): siRNA sense strand
caaagauguuucucuguuu

SEQ ID NO: 1380859 - RNA, 19 nt, Homo sapiens
  misc_RNA (1)...(19): siRNA sense strand
guacaagaguggauuaauc

SEQ ID NO: 1380860 - RNA, 19 nt, Homo sapiens
  misc_RNA (1)...(19): siRNA sense strand
ggaagaguguucuaucuca

SEQ ID NO: 1380861 - RNA, 19 nt, Homo sapiens
  misc_RNA (1)...(19): siRNA sense strand
gaaagacaacgaccuuaaa

SEQ ID NO: 1380862 - RNA, 19 nt, Homo sapiens
  misc_RNA (1)...(19): siRNA sense strand
ggaaagacaacgaccuuaa

SEQ ID NO: 1380863 - RNA, 19 nt, Homo sapiens
  misc_RNA (1)...(19): siRNA sense strand
caaagaguuucuacuaaga

SEQ ID NO: 1380864 - RNA, 19 nt, Homo sapiens
  misc_RNA (1)...(19): siRNA sense strand
ccucagugguuucuaauaa

SEQ ID NO: 1380865 - RNA, 19 nt, Homo sapiens
  misc_RNA (1)...(19): siRNA sense strand
ccagugaauuucugaguuu

SEQ ID NO: 1380866 - RNA, 19 nt, Homo sapiens
  misc_RNA (1)...(19): siRNA sense strand
cagggaacauggaaugaua

SEQ ID NO: 1380867 - RNA, 19 nt, Homo sapiens
  misc_RNA (1)...(19): siRNA sense strand
uaagagcgacaaaguauaa

SEQ ID NO: 1380868 - RNA, 19 nt, Homo sapiens
  misc_RNA (1)...(19): siRNA sense strand
gagcaucuuuaacagaauu

SEQ ID NO: 1380869 - RNA, 19 nt, Homo sapiens
  misc_RNA (1)...(19): siRNA sense strand
ccuggagacuuauuuaauu

SEQ ID NO: 1380870 - RNA, 19 nt, Homo sapiens
  misc_RNA (1)...(19): siRNA sense strand
cgacaaaguauaacaaguu

SEQ ID NO: 1380871 - RNA, 19 nt, Homo sapiens
  misc_RNA (1)...(19): siRNA sense strand
ggagcaugguauucaagua

SEQ ID NO: 1380872 - RNA, 19 nt, Homo sapiens
  misc_RNA (1)...(19): siRNA sense strand
gaagaguguucuaucucaa

SEQ ID NO: 1380873 - RNA, 19 nt, Homo sapiens
  misc_RNA (1)...(19): siRNA sense strand
ucaaagaguuucuacuaag

SEQ ID NO: 1380874 - RNA, 19 nt, Homo sapiens
  misc_RNA (1)...(19): siRNA sense strand
gagaacugauaagaagaua

SEQ ID NO: 1380875 - RNA, 19 nt, Homo sapiens
  misc_RNA (1)...(19): siRNA sense strand
gcucuuuacucagggaaua

SEQ ID NO: 1380876 - RNA, 19 nt, Homo sapiens
  misc_RNA (1)...(19): siRNA sense strand
cgggauacauuacuuguug

SEQ ID NO: 1380877 - RNA, 19 nt, Homo sapiens
  misc_RNA (1)...(19): siRNA sense strand
ucgauguccucuuauauuu

SEQ ID NO: 1380878 - RNA, 19 nt, Homo sapiens
  misc_RNA (1)...(19): siRNA sense strand
agauuuaccuaaccaguuu

SEQ ID NO: 1380879 - RNA, 19 nt, Homo sapiens
  misc_RNA (1)...(19): siRNA sense strand
ggaaguaugugaggauugg

SEQ ID NO: 1380880 - RNA, 19 nt, Homo sapiens
  misc_RNA (1)...(19): siRNA sense strand
gauaucagaagugcaauaa

SEQ ID NO: 1380881 - RNA, 19 nt, Homo sapiens
  misc_RNA (1)...(19): siRNA sense strand
gcaccaacaauuaugauga

SEQ ID NO: 1380882 - RNA, 19 nt, Homo sapiens
  misc_RNA (1)...(19): siRNA sense strand
aaacaggguggaucuauuu

SEQ ID NO: 1380883 - RNA, 19 nt, Homo sapiens
  misc_RNA (1)...(19): siRNA sense strand
gaugaucugagaacugaua

SEQ ID NO: 1380884 - RNA, 19 nt, Homo sapiens
  misc_RNA (1)...(19): siRNA sense strand
ggguggaucuauuuuauua

SEQ ID NO: 1380885 - RNA, 19 nt, Homo sapiens
  misc_RNA (1)...(19): siRNA sense strand
uaucagaagugcaauaaac

SEQ ID NO: 1380886 - RNA, 19 nt, Homo sapiens
  misc_RNA (1)...(19): siRNA sense strand
ugugagagccagugaauuu

SEQ ID NO: 1380887 - RNA, 19 nt, Homo sapiens
  misc_RNA (1)...(19): siRNA sense strand
caaaggagcaugguauuca

SEQ ID NO: 1380888 - RNA, 19 nt, Homo sapiens
  misc_RNA (1)...(19): siRNA sense strand
ccggaaaccuggucucuuc

SEQ ID NO: 1380889 - RNA, 19 nt, Homo sapiens
  misc_RNA (1)...(19): siRNA sense strand
gaagcgacacuuuggaaga

SEQ ID NO: 1380890 - RNA, 19 nt, Homo sapiens
  misc_RNA (1)...(19): siRNA sense strand
cgagaggugugaugcauuc

SEQ ID NO: 1380891 - RNA, 19 nt, Homo sapiens
  misc_RNA (1)...(19): siRNA sense strand
cagaugcugugcugucaaa

SEQ ID NO: 1380892 - RNA, 19 nt, Homo sapiens
  misc_RNA (1)...(19): siRNA sense strand
caccaacaauuaugaugaa

SEQ ID NO: 1380893 - RNA, 19 nt, Homo sapiens
  misc_RNA (1)...(19): siRNA sense strand
gaacgggauacauuacuug

SEQ ID NO: 1380894 - RNA, 19 nt, Homo sapiens
  misc_RNA (1)...(19): siRNA sense strand
gaucugagaacugauaaga

SEQ ID NO: 1380895 - RNA, 19 nt, Homo sapiens
  misc_RNA (1)...(19): siRNA sense strand
uaacaagaauggaggaaaa

SEQ ID NO: 1380896 - RNA, 19 nt, Homo sapiens
  misc_RNA (1)...(19): siRNA sense strand
caaguacaagaguggauua

SEQ ID NO: 1380897 - RNA, 19 nt, Homo sapiens
  misc_RNA (1)...(19): siRNA sense strand
gaaaccuggucucuuccuu

SEQ ID NO: 1380898 - RNA, 19 nt, Homo sapiens
  misc_RNA (1)...(19): siRNA sense strand
guuauuguuucccaaagaa

SEQ ID NO: 1380899 - RNA, 19 nt, Homo sapiens
  misc_RNA (1)...(19): siRNA sense strand
uacaugaaguucuaaggaa

SEQ ID NO: 1380900 - RNA, 19 nt, Homo sapiens
  misc_RNA (1)...(19): siRNA sense strand
ucugagaacugauaagaag

SEQ ID NO: 1380901 - RNA, 19 nt, Homo sapiens
  misc_RNA (1)...(19): siRNA sense strand
aauacacgcucuuuacuca

SEQ ID NO: 1380902 - RNA, 19 nt, Homo sapiens
  misc_RNA (1)...(19): siRNA sense strand
caacuuacggccaaggaaa

SEQ ID NO: 1380903 - RNA, 19 nt, Homo sapiens
  misc_RNA (1)...(19): siRNA sense strand
caaagaaauucaggaagag

SEQ ID NO: 1380904 - RNA, 19 nt, Homo sapiens
  misc_RNA (1)...(19): siRNA sense strand
ggagguaguagaaauguca

SEQ ID NO: 1380905 - RNA, 19 nt, Homo sapiens
  misc_RNA (1)...(19): siRNA sense strand
gccagugaauuucugaguu

SEQ ID NO: 1380906 - RNA, 19 nt, Homo sapiens
  misc_RNA (1)...(19): siRNA sense strand
uacaaaugcuuggagauga

SEQ ID NO: 1380907 - RNA, 19 nt, Homo sapiens
  misc_RNA (1)...(19): siRNA sense strand
ugaacuugcugugcauaaa

SEQ ID NO: 1380908 - RNA, 19 nt, Homo sapiens
  misc_RNA (1)...(19): siRNA sense strand
ccucucauuuaucagaaua

SEQ ID NO: 1380909 - RNA, 19 nt, Homo sapiens
  misc_RNA (1)...(19): siRNA sense strand
caagagguccaagcuauug

SEQ ID NO: 1380910 - RNA, 19 nt, Homo sapiens
  misc_RNA (1)...(19): siRNA sense strand
ucgggauucucauacuuua

SEQ ID NO: 1380911 - RNA, 19 nt, Homo sapiens
  misc_RNA (1)...(19): siRNA sense strand
gguuauuguuucccaaaga

SEQ ID NO: 1380912 - RNA, 19 nt, Homo sapiens
  misc_RNA (1)...(19): siRNA sense strand
gccauaccuugcucuacua

SEQ ID NO: 1380913 - RNA, 19 nt, Homo sapiens
  misc_RNA (1)...(19): siRNA sense strand
caaggaggaggaucaaguu

SEQ ID NO: 1380914 - RNA, 19 nt, Homo sapiens
  misc_RNA (1)...(19): siRNA sense strand
ugugaugcauuccaacaaa

SEQ ID NO: 1380915 - RNA, 19 nt, Homo sapiens
  misc_RNA (1)...(19): siRNA sense strand
gaggugugaugcauuccaa

SEQ ID NO: 1380916 - RNA, 19 nt, Homo sapiens
  misc_RNA (1)...(19): siRNA sense strand
aaagauguuucucuguuuc

SEQ ID NO: 1380917 - RNA, 19 nt, Homo sapiens
  misc_RNA (1)...(19): siRNA sense strand
gggauguucuggugauauc

SEQ ID NO: 1380918 - RNA, 19 nt, Homo sapiens
  misc_RNA (1)...(19): siRNA sense strand
ugacaaaacuucucuagag

SEQ ID NO: 1380919 - RNA, 19 nt, Homo sapiens
  misc_RNA (1)...(19): siRNA sense strand
caggaagaguguucuaucu

SEQ ID NO: 1380920 - RNA, 19 nt, Homo sapiens
  misc_RNA (1)...(19): siRNA sense strand
ugaacgggauacauuacuu

SEQ ID NO: 1380921 - RNA, 19 nt, Homo sapiens
  misc_RNA (1)...(19): siRNA sense strand
ggugauaucagaagugcaa

SEQ ID NO: 1380922 - RNA, 19 nt, Homo sapiens
  misc_RNA (1)...(19): siRNA sense strand
agauaauucugguugaaga

SEQ ID NO: 1380923 - RNA, 19 nt, Homo sapiens
  misc_RNA (1)...(19): siRNA sense strand
aaaggagcaugguauucaa

SEQ ID NO: 1380924 - RNA, 19 nt, Homo sapiens
  misc_RNA (1)...(19): siRNA sense strand
aauaugaacgggauacauu

SEQ ID NO: 1380925 - RNA, 19 nt, Homo sapiens
  misc_RNA (1)...(19): siRNA sense strand
cuauagaagcuaacaagaa

SEQ ID NO: 1380926 - RNA, 19 nt, Homo sapiens
  misc_RNA (1)...(19): siRNA sense strand
cgauguccucuuauauuua

SEQ ID NO: 1380927 - RNA, 19 nt, Homo sapiens
  misc_RNA (1)...(19): siRNA sense strand
auuggucgauguccucuua

SEQ ID NO: 1380928 - RNA, 19 nt, Homo sapiens
  misc_RNA (1)...(19): siRNA sense strand
gaaguucuaaggaaguaug

SEQ ID NO: 1380929 - RNA, 19 nt, Homo sapiens
  misc_RNA (1)...(19): siRNA sense strand
ccuguggcaccaacaauua

SEQ ID NO: 1380930 - RNA, 19 nt, Homo sapiens
  misc_RNA (1)...(19): siRNA sense strand
gcgacacuuuggaagauug

SEQ ID NO: 1380931 - RNA, 19 nt, Homo sapiens
  misc_RNA (1)...(19): siRNA sense strand
ggaggaggaucaaguuuuc

SEQ ID NO: 1380932 - RNA, 19 nt, Homo sapiens
  misc_RNA (1)...(19): siRNA sense strand
gggauacauuacuuguuga

SEQ ID NO: 1380933 - RNA, 19 nt, Homo sapiens
  misc_RNA (1)...(19): siRNA sense strand
uaucaaaggagcaugguau

SEQ ID NO: 1380934 - RNA, 19 nt, Homo sapiens
  misc_RNA (1)...(19): siRNA sense strand
aaucaagcuuccauauguu

SEQ ID NO: 1380935 - RNA, 19 nt, Homo sapiens
  misc_RNA (1)...(19): siRNA sense strand
caccaaaacuacauagauu

SEQ ID NO: 1380936 - RNA, 19 nt, Homo sapiens
  misc_RNA (1)...(19): siRNA sense strand
caauaaacagccuccaguu

SEQ ID NO: 1380937 - RNA, 19 nt, Homo sapiens
  misc_RNA (1)...(19): siRNA sense strand
gagcgacaaaguauaacaa

SEQ ID NO: 1380938 - RNA, 19 nt, Homo sapiens
  misc_RNA (1)...(19): siRNA sense strand
ccaaggagacauggaagaa

SEQ ID NO: 1380939 - RNA, 19 nt, Homo sapiens
  misc_RNA (1)...(19): siRNA sense strand
gaauacacgcucuuuacuc

SEQ ID NO: 1380940 - RNA, 19 nt, Homo sapiens
  misc_RNA (1)...(19): siRNA sense strand
caguggagauaauaaucaa

SEQ ID NO: 1380941 - RNA, 19 nt, Homo sapiens
  misc_RNA (1)...(19): siRNA sense strand
gcgacaaaguauaacaagu

SEQ ID NO: 1380942 - RNA, 19 nt, Homo sapiens
  misc_RNA (1)...(19): siRNA sense strand
gcaugguauucaaguacaa

SEQ ID NO: 1380943 - RNA, 19 nt, Homo sapiens
  misc_RNA (1)...(19): siRNA sense strand
ugacagggaacauggaaug

SEQ ID NO: 1380944 - RNA, 19 nt, Homo sapiens
  misc_RNA (1)...(19): siRNA sense strand
ggaauacacgcucuuuacu

SEQ ID NO: 1380945 - RNA, 19 nt, Homo sapiens
  misc_RNA (1)...(19): siRNA sense strand
ucgguugcccucucauuua

SEQ ID NO: 1380946 - RNA, 19 nt, Homo sapiens
  misc_RNA (1)...(19): siRNA sense strand
gagagccagugaauuucug

SEQ ID NO: 1380947 - RNA, 19 nt, Homo sapiens
  misc_RNA (1)...(19): siRNA sense strand
aaaaguaucgggaaaauug

SEQ ID NO: 1380948 - RNA, 19 nt, Homo sapiens
  misc_RNA (1)...(19): siRNA sense strand
gcaugaacuugcugugcau

SEQ ID NO: 1380949 - RNA, 19 nt, Homo sapiens
  misc_RNA (1)...(19): siRNA sense strand
gaaucaagcuuccauaugu

SEQ ID NO: 1380950 - RNA, 19 nt, Homo sapiens
  misc_RNA (1)...(19): siRNA sense strand
gcaaagauguuucucuguu

SEQ ID NO: 1380951 - RNA, 19 nt, Homo sapiens
  misc_RNA (1)...(19): siRNA sense strand
acacaugccuggagacuua

SEQ ID NO: 1380952 - RNA, 19 nt, Homo sapiens
  misc_RNA (1)...(19): siRNA sense strand
caacaaagcccgaggauau

SEQ ID NO: 1380953 - RNA, 19 nt, Homo sapiens
  misc_RNA (1)...(19): siRNA sense strand
ccaaagaaauucaggaaga

SEQ ID NO: 1380954 - RNA, 19 nt, Homo sapiens
  misc_RNA (1)...(19): siRNA sense strand
cuacauagauuucuucaug

SEQ ID NO: 1380955 - RNA, 19 nt, Homo sapiens
  misc_RNA (1)...(19): siRNA sense strand
ggaaauugaugauauugug

SEQ ID NO: 1380956 - RNA, 19 nt, Homo sapiens
  misc_RNA (1)...(19): siRNA sense strand
aaacucagcuauugccaua

SEQ ID NO: 1380957 - RNA, 19 nt, Homo sapiens
  misc_RNA (1)...(19): siRNA sense strand
gaagauaauucugguugaa

SEQ ID NO: 1380958 - RNA, 19 nt, Homo sapiens
  misc_RNA (1)...(19): siRNA sense strand
caaagauguuucucuguuu

SEQ ID NO: 1380959 - RNA, 19 nt, Homo sapiens
  misc_RNA (1)...(19): siRNA sense strand
guacaagaguggauuaauc

SEQ ID NO: 1380960 - RNA, 19 nt, Homo sapiens
  misc_RNA (1)...(19): siRNA sense strand
ggaagaguguucuaucuca

SEQ ID NO: 1380961 - RNA, 19 nt, Homo sapiens
  misc_RNA (1)...(19): siRNA sense strand
gaaagacaacgaccuuaaa

SEQ ID NO: 1380962 - RNA, 19 nt, Homo sapiens
  misc_RNA (1)...(19): siRNA sense strand
ggaaagacaacgaccuuaa

SEQ ID NO: 1380963 - RNA, 19 nt, Homo sapiens
  misc_RNA (1)...(19): siRNA sense strand
caaagaguuucuacuaaga

SEQ ID NO: 1380964 - RNA, 19 nt, Homo sapiens
  misc_RNA (1)...(19): siRNA sense strand
ccucagugguuucuaauaa

SEQ ID NO: 1380965 - RNA, 19 nt, Homo sapiens
  misc_RNA (1)...(19): siRNA sense strand
ccagugaauuucugaguuu

SEQ ID NO: 1380966 - RNA, 19 nt, Homo sapiens
  misc_RNA (1)...(19): siRNA sense strand
cagggaacauggaaugaua

SEQ ID NO: 1380967 - RNA, 19 nt, Homo sapiens
  misc_RNA (1)...(19): siRNA sense strand
uaagagcgacaaaguauaa

SEQ ID NO: 1380968 - RNA, 19 nt, Homo sapiens
  misc_RNA (1)...(19): siRNA sense strand
gagcaucuuuaacagaauu

SEQ ID NO: 1380969 - RNA, 19 nt, Homo sapiens
  misc_RNA (1)...(19): siRNA sense strand
ccuggagacuuauuuaauu

SEQ ID NO: 1380970 - RNA, 19 nt, Homo sapiens
  misc_RNA (1)...(19): siRNA sense strand
cgacaaaguauaacaaguu

SEQ ID NO: 1380971 - RNA, 19 nt, Homo sapiens
  misc_RNA (1)...(19): siRNA sense strand
ggagcaugguauucaagua

SEQ ID NO: 1380972 - RNA, 19 nt, Homo sapiens
  misc_RNA (1)...(19): siRNA sense strand
gaagaguguucuaucucaa

SEQ ID NO: 1380973 - RNA, 19 nt, Homo sapiens
  misc_RNA (1)...(19): siRNA sense strand
ucaaagaguuucuacuaag

SEQ ID NO: 1380974 - RNA, 19 nt, Homo sapiens
  misc_RNA (1)...(19): siRNA sense strand
gagaacugauaagaagaua

SEQ ID NO: 1380975 - RNA, 19 nt, Homo sapiens
  misc_RNA (1)...(19): siRNA sense strand
gcucuuuacucagggaaua

SEQ ID NO: 1380976 - RNA, 19 nt, Homo sapiens
  misc_RNA (1)...(19): siRNA sense strand
cgggauacauuacuuguug

SEQ ID NO: 1380977 - RNA, 19 nt, Homo sapiens
  misc_RNA (1)...(19): siRNA sense strand
ucgauguccucuuauauuu

SEQ ID NO: 1380978 - RNA, 19 nt, Homo sapiens
  misc_RNA (1)...(19): siRNA sense strand
agauuuaccuaaccaguuu

SEQ ID NO: 1380979 - RNA, 19 nt, Homo sapiens
  misc_RNA (1)...(19): siRNA sense strand
ggaaguaugugaggauugg

SEQ ID NO: 1380980 - RNA, 19 nt, Homo sapiens
  misc_RNA (1)...(19): siRNA sense strand
gauaucagaagugcaauaa

SEQ ID NO: 1380981 - RNA, 19 nt, Homo sapiens
  misc_RNA (1)...(19): siRNA sense strand
gcaccaacaauuaugauga

SEQ ID NO: 1380982 - RNA, 19 nt, Homo sapiens
  misc_RNA (1)...(19): siRNA sense strand
aaacaggguggaucuauuu

SEQ ID NO: 1380983 - RNA, 19 nt, Homo sapiens
  misc_RNA (1)...(19): siRNA sense strand
gaugaucugagaacugaua

SEQ ID NO: 1380984 - RNA, 19 nt, Homo sapiens
  misc_RNA (1)...(19): siRNA sense strand
ggguggaucuauuuuauua

SEQ ID NO: 1380985 - RNA, 19 nt, Homo sapiens
  misc_RNA (1)...(19): siRNA sense strand
uaucagaagugcaauaaac

SEQ ID NO: 1380986 - RNA, 19 nt, Homo sapiens
  misc_RNA (1)...(19): siRNA sense strand
ugugagagccagugaauuu

SEQ ID NO: 1380987 - RNA, 19 nt, Homo sapiens
  misc_RNA (1)...(19): siRNA sense strand
caaaggagcaugguauuca

SEQ ID NO: 1380988 - RNA, 19 nt, Homo sapiens
  misc_RNA (1)...(19): siRNA sense strand
ccggaaaccuggucucuuc

SEQ ID NO: 1380989 - RNA, 19 nt, Homo sapiens
  misc_RNA (1)...(19): siRNA sense strand
gaagcgacacuuuggaaga

SEQ ID NO: 1380990 - RNA, 19 nt, Homo sapiens
  misc_RNA (1)...(19): siRNA sense strand
cgagaggugugaugcauuc

SEQ ID NO: 1380991 - RNA, 19 nt, Homo sapiens
  misc_RNA (1)...(19): siRNA sense strand
cagaugcugugcugucaaa

SEQ ID NO: 1380992 - RNA, 19 nt, Homo sapiens
  misc_RNA (1)...(19): siRNA sense strand
caccaacaauuaugaugaa

SEQ ID NO: 1380993 - RNA, 19 nt, Homo sapiens
  misc_RNA (1)...(19): siRNA sense strand
gaacgggauacauuacuug

SEQ ID NO: 1380994 - RNA, 19 nt, Homo sapiens
  misc_RNA (1)...(19): siRNA sense strand
gaucugagaacugauaaga

SEQ ID NO: 1380995 - RNA, 19 nt, Homo sapiens
  misc_RNA (1)...(19): siRNA sense strand
uaacaagaauggaggaaaa

SEQ ID NO: 1380996 - RNA, 19 nt, Homo sapiens
  misc_RNA (1)...(19): siRNA sense strand
caaguacaagaguggauua

SEQ ID NO: 1380997 - RNA, 19 nt, Homo sapiens
  misc_RNA (1)...(19): siRNA sense strand
gaaaccuggucucuuccuu

SEQ ID NO: 1380998 - RNA, 19 nt, Homo sapiens
  misc_RNA (1)...(19): siRNA sense strand
guuauuguuucccaaagaa

SEQ ID NO: 1380999 - RNA, 19 nt, Homo sapiens
  misc_RNA (1)...(19): siRNA sense strand
uacaugaaguucuaaggaa

SEQ ID NO: 1381000 - RNA, 19 nt, Homo sapiens
  misc_RNA (1)...(19): siRNA sense strand
ucugagaacugauaagaag

SEQ ID NO: 1381001 - RNA, 19 nt, Homo sapiens
  misc_RNA (1)...(19): siRNA sense strand
aauacacgcucuuuacuca

SEQ ID NO: 1381002 - RNA, 19 nt, Homo sapiens
  misc_RNA (1)...(19): siRNA sense strand
caacuuacggccaaggaaa

SEQ ID NO: 1381003 - RNA, 19 nt, Homo sapiens
  misc_RNA (1)...(19): siRNA sense strand
caaagaaauucaggaagag

SEQ ID NO: 1381004 - RNA, 19 nt, Homo sapiens
  misc_RNA (1)...(19): siRNA sense strand
ggagguaguagaaauguca

SEQ ID NO: 1381005 - RNA, 19 nt, Homo sapiens
  misc_RNA (1)...(19): siRNA sense strand
gccagugaauuucugaguu

SEQ ID NO: 1381006 - RNA, 19 nt, Homo sapiens
  misc_RNA (1)...(19): siRNA sense strand
uacaaaugcuuggagauga

SEQ ID NO: 1381007 - RNA, 19 nt, Homo sapiens
  misc_RNA (1)...(19): siRNA sense strand
ugaacuugcugugcauaaa

SEQ ID NO: 1381008 - RNA, 19 nt, Homo sapiens
  misc_RNA (1)...(19): siRNA sense strand
ccucucauuuaucagaaua

SEQ ID NO: 1381009 - RNA, 19 nt, Homo sapiens
  misc_RNA (1)...(19): siRNA sense strand
caagagguccaagcuauug

SEQ ID NO: 1381010 - RNA, 19 nt, Homo sapiens
  misc_RNA (1)...(19): siRNA sense strand
ucgggauucucauacuuua

SEQ ID NO: 1381011 - RNA, 19 nt, Homo sapiens
  misc_RNA (1)...(19): siRNA sense strand
gguuauuguuucccaaaga

SEQ ID NO: 1381012 - RNA, 19 nt, Homo sapiens
  misc_RNA (1)...(19): siRNA sense strand
gccauaccuugcucuacua

SEQ ID NO: 1381013 - RNA, 19 nt, Homo sapiens
  misc_RNA (1)...(19): siRNA sense strand
caaggaggaggaucaaguu

SEQ ID NO: 1381014 - RNA, 19 nt, Homo sapiens
  misc_RNA (1)...(19): siRNA sense strand
ugugaugcauuccaacaaa

SEQ ID NO: 1381015 - RNA, 19 nt, Homo sapiens
  misc_RNA (1)...(19): siRNA sense strand
gaggugugaugcauuccaa

SEQ ID NO: 1381016 - RNA, 19 nt, Homo sapiens
  misc_RNA (1)...(19): siRNA sense strand
aaagauguuucucuguuuc

SEQ ID NO: 1381017 - RNA, 19 nt, Homo sapiens
  misc_RNA (1)...(19): siRNA sense strand
gggauguucuggugauauc

SEQ ID NO: 1381018 - RNA, 19 nt, Homo sapiens
  misc_RNA (1)...(19): siRNA sense strand
ugacaaaacuucucuagag

SEQ ID NO: 1381019 - RNA, 19 nt, Homo sapiens
  misc_RNA (1)...(19): siRNA sense strand
caggaagaguguucuaucu

SEQ ID NO: 1381020 - RNA, 19 nt, Homo sapiens
  misc_RNA (1)...(19): siRNA sense strand
ugaacgggauacauuacuu

SEQ ID NO: 1381021 - RNA, 19 nt, Homo sapiens
  misc_RNA (1)...(19): siRNA sense strand
ggugauaucagaagugcaa

SEQ ID NO: 1381022 - RNA, 19 nt, Homo sapiens
  misc_RNA (1)...(19): siRNA sense strand
agauaauucugguugaaga

SEQ ID NO: 1381023 - RNA, 19 nt, Homo sapiens
  misc_RNA (1)...(19): siRNA sense strand
aaaggagcaugguauucaa

SEQ ID NO: 1381024 - RNA, 19 nt, Homo sapiens
  misc_RNA (1)...(19): siRNA sense strand
aauaugaacgggauacauu

SEQ ID NO: 1381025 - RNA, 19 nt, Homo sapiens
  misc_RNA (1)...(19): siRNA sense strand
cuauagaagcuaacaagaa

SEQ ID NO: 1381026 - RNA, 19 nt, Homo sapiens
  misc_RNA (1)...(19): siRNA sense strand
cgauguccucuuauauuua

SEQ ID NO: 1381027 - RNA, 19 nt, Homo sapiens
  misc_RNA (1)...(19): siRNA sense strand
auuggucgauguccucuua

SEQ ID NO: 1381028 - RNA, 19 nt, Homo sapiens
  misc_RNA (1)...(19): siRNA sense strand
gaaguucuaaggaaguaug

SEQ ID NO: 1381029 - RNA, 19 nt, Homo sapiens
  misc_RNA (1)...(19): siRNA sense strand
ccuguggcaccaacaauua

SEQ ID NO: 1381030 - RNA, 19 nt, Homo sapiens
  misc_RNA (1)...(19): siRNA sense strand
gcgacacuuuggaagauug

SEQ ID NO: 1381031 - RNA, 19 nt, Homo sapiens
  misc_RNA (1)...(19): siRNA sense strand
ggaggaggaucaaguuuuc

SEQ ID NO: 1381032 - RNA, 19 nt, Homo sapiens
  misc_RNA (1)...(19): siRNA sense strand
gggauacauuacuuguuga

SEQ ID NO: 1381033 - RNA, 19 nt, Homo sapiens
  misc_RNA (1)...(19): siRNA sense strand
uaucaaaggagcaugguau

SEQ ID NO: 1381034 - RNA, 19 nt, Homo sapiens
  misc_RNA (1)...(19): siRNA sense strand
aaucaagcuuccauauguu

SEQ ID NO: 1381035 - RNA, 19 nt, Homo sapiens
  misc_RNA (1)...(19): siRNA sense strand
caccaaaacuacauagauu

SEQ ID NO: 1381036 - RNA, 19 nt, Homo sapiens
  misc_RNA (1)...(19): siRNA sense strand
caauaaacagccuccaguu

SEQ ID NO: 1381037 - RNA, 19 nt, Homo sapiens
  misc_RNA (1)...(19): siRNA sense strand
gagcgacaaaguauaacaa

SEQ ID NO: 1381038 - RNA, 19 nt, Homo sapiens
  misc_RNA (1)...(19): siRNA sense strand
ccaaggagacauggaagaa

SEQ ID NO: 1381039 - RNA, 19 nt, Homo sapiens
  misc_RNA (1)...(19): siRNA sense strand
gaauacacgcucuuuacuc

SEQ ID NO: 1381040 - RNA, 19 nt, Homo sapiens
  misc_RNA (1)...(19): siRNA sense strand
caguggagauaauaaucaa

SEQ ID NO: 1381041 - RNA, 19 nt, Homo sapiens
  misc_RNA (1)...(19): siRNA sense strand
gcgacaaaguauaacaagu

SEQ ID NO: 1381042 - RNA, 19 nt, Homo sapiens
  misc_RNA (1)...(19): siRNA sense strand
gcaugguauucaaguacaa

SEQ ID NO: 1381043 - RNA, 19 nt, Homo sapiens
  misc_RNA (1)...(19): siRNA sense strand
ugacagggaacauggaaug

SEQ ID NO: 1381044 - RNA, 19 nt, Homo sapiens
  misc_RNA (1)...(19): siRNA sense strand
ggaauacacgcucuuuacu

SEQ ID NO: 1381045 - RNA, 19 nt, Homo sapiens
  misc_RNA (1)...(19): siRNA sense strand
ucgguugcccucucauuua

SEQ ID NO: 1381046 - RNA, 19 nt, Homo sapiens
  misc_RNA (1)...(19): siRNA sense strand
gagagccagugaauuucug

SEQ ID NO: 1381047 - RNA, 19 nt, Homo sapiens
  misc_RNA (1)...(19): siRNA sense strand
aaaaguaucgggaaaauug

SEQ ID NO: 1381048 - RNA, 19 nt, Homo sapiens
  misc_RNA (1)...(19): siRNA sense strand
gcaugaacuugcugugcau

SEQ ID NO: 1381049 - RNA, 19 nt, Homo sapiens
  misc_RNA (1)...(19): siRNA sense strand
gaaucaagcuuccauaugu

SEQ ID NO: 1381050 - RNA, 19 nt, Homo sapiens
  misc_RNA (1)...(19): siRNA sense strand
gcaaagauguuucucuguu

SEQ ID NO: 1381051 - RNA, 19 nt, Homo sapiens
  misc_RNA (1)...(19): siRNA sense strand
acacaugccuggagacuua

SEQ ID NO: 1381052 - RNA, 19 nt, Homo sapiens
  misc_RNA (1)...(19): siRNA sense strand
caacaaagcccgaggauau

SEQ ID NO: 1381053 - RNA, 19 nt, Homo sapiens
  misc_RNA (1)...(19): siRNA sense strand
ccaaagaaauucaggaaga

SEQ ID NO: 1381054 - RNA, 19 nt, Homo sapiens
  misc_RNA (1)...(19): siRNA sense strand
cuacauagauuucuucaug

SEQ ID NO: 1381055 - RNA, 19 nt, Homo sapiens
  misc_RNA (1)...(19): siRNA sense strand
ggaaauugaugauauugug

SEQ ID NO: 1381056 - RNA, 19 nt, Homo sapiens
  misc_RNA (1)...(19): siRNA sense strand
aaacucagcuauugccaua

SEQ ID NO: 1381057 - RNA, 19 nt, Homo sapiens
  misc_RNA (1)...(19): siRNA sense strand
gaagauaauucugguugaa

SEQ ID NO: 1381058 - RNA, 19 nt, Homo sapiens
  misc_RNA (1)...(19): siRNA sense strand
caaagauguuucucuguuu

SEQ ID NO: 1381059 - RNA, 19 nt, Homo sapiens
  misc_RNA (1)...(19): siRNA sense strand
guacaagaguggauuaauc

SEQ ID NO: 1381060 - RNA, 19 nt, Homo sapiens
  misc_RNA (1)...(19): siRNA sense strand
ggaagaguguucuaucuca

SEQ ID NO: 1381061 - RNA, 19 nt, Homo sapiens
  misc_RNA (1)...(19): siRNA sense strand
gaaagacaacgaccuuaaa

SEQ ID NO: 1381062 - RNA, 19 nt, Homo sapiens
  misc_RNA (1)...(19): siRNA sense strand
ggaaagacaacgaccuuaa

SEQ ID NO: 1381063 - RNA, 19 nt, Homo sapiens
  misc_RNA (1)...(19): siRNA sense strand
caaagaguuucuacuaaga

SEQ ID NO: 1381064 - RNA, 19 nt, Homo sapiens
  misc_RNA (1)...(19): siRNA sense strand
ccucagugguuucuaauaa

SEQ ID NO: 1381065 - RNA, 19 nt, Homo sapiens
  misc_RNA (1)...(19): siRNA sense strand
ccagugaauuucugaguuu

SEQ ID NO: 1381066 - RNA, 19 nt, Homo sapiens
  misc_RNA (1)...(19): siRNA sense strand
cagggaacauggaaugaua

SEQ ID NO: 1381067 - RNA, 19 nt, Homo sapiens
  misc_RNA (1)...(19): siRNA sense strand
uaagagcgacaaaguauaa

SEQ ID NO: 1381068 - RNA, 19 nt, Homo sapiens
  misc_RNA (1)...(19): siRNA sense strand
gagcaucuuuaacagaauu

SEQ ID NO: 1381069 - RNA, 19 nt, Homo sapiens
  misc_RNA (1)...(19): siRNA sense strand
ccuggagacuuauuuaauu

SEQ ID NO: 1381070 - RNA, 19 nt, Homo sapiens
  misc_RNA (1)...(19): siRNA sense strand
cgacaaaguauaacaaguu

SEQ ID NO: 1381071 - RNA, 19 nt, Homo sapiens
  misc_RNA (1)...(19): siRNA sense strand
ggagcaugguauucaagua

SEQ ID NO: 1381072 - RNA, 19 nt, Homo sapiens
  misc_RNA (1)...(19): siRNA sense strand
gaagaguguucuaucucaa

SEQ ID NO: 1381073 - RNA, 19 nt, Homo sapiens
  misc_RNA (1)...(19): siRNA sense strand
ucaaagaguuucuacuaag

SEQ ID NO: 1381074 - RNA, 19 nt, Homo sapiens
  misc_RNA (1)...(19): siRNA sense strand
gagaacugauaagaagaua

SEQ ID NO: 1381075 - RNA, 19 nt, Homo sapiens
  misc_RNA (1)...(19): siRNA sense strand
gcucuuuacucagggaaua

SEQ ID NO: 1381076 - RNA, 19 nt, Homo sapiens
  misc_RNA (1)...(19): siRNA sense strand
cgggauacauuacuuguug

SEQ ID NO: 1381077 - RNA, 19 nt, Homo sapiens
  misc_RNA (1)...(19): siRNA sense strand
ucgauguccucuuauauuu

SEQ ID NO: 1381078 - RNA, 19 nt, Homo sapiens
  misc_RNA (1)...(19): siRNA sense strand
agauuuaccuaaccaguuu

SEQ ID NO: 1381079 - RNA, 19 nt, Homo sapiens
  misc_RNA (1)...(19): siRNA sense strand
ggaaguaugugaggauugg

SEQ ID NO: 1381080 - RNA, 19 nt, Homo sapiens
  misc_RNA (1)...(19): siRNA sense strand
gauaucagaagugcaauaa

SEQ ID NO: 1381081 - RNA, 19 nt, Homo sapiens
  misc_RNA (1)...(19): siRNA sense strand
gcaccaacaauuaugauga

SEQ ID NO: 1381082 - RNA, 19 nt, Homo sapiens
  misc_RNA (1)...(19): siRNA sense strand
aaacaggguggaucuauuu

SEQ ID NO: 1381083 - RNA, 19 nt, Homo sapiens
  misc_RNA (1)...(19): siRNA sense strand
gaugaucugagaacugaua

SEQ ID NO: 1381084 - RNA, 19 nt, Homo sapiens
  misc_RNA (1)...(19): siRNA sense strand
ggguggaucuauuuuauua

SEQ ID NO: 1381085 - RNA, 19 nt, Homo sapiens
  misc_RNA (1)...(19): siRNA sense strand
uaucagaagugcaauaaac

SEQ ID NO: 1381086 - RNA, 19 nt, Homo sapiens
  misc_RNA (1)...(19): siRNA sense strand
ugugagagccagugaauuu

SEQ ID NO: 1381087 - RNA, 19 nt, Homo sapiens
  misc_RNA (1)...(19): siRNA sense strand
caaaggagcaugguauuca

SEQ ID NO: 1381088 - RNA, 19 nt, Homo sapiens
  misc_RNA (1)...(19): siRNA sense strand
ccggaaaccuggucucuuc

SEQ ID NO: 1381089 - RNA, 19 nt, Homo sapiens
  misc_RNA (1)...(19): siRNA sense strand
gaagcgacacuuuggaaga

SEQ ID NO: 1381090 - RNA, 19 nt, Homo sapiens
  misc_RNA (1)...(19): siRNA sense strand
cgagaggugugaugcauuc

SEQ ID NO: 1381091 - RNA, 19 nt, Homo sapiens
  misc_RNA (1)...(19): siRNA sense strand
cagaugcugugcugucaaa

SEQ ID NO: 1381092 - RNA, 19 nt, Homo sapiens
  misc_RNA (1)...(19): siRNA sense strand
caccaacaauuaugaugaa

SEQ ID NO: 1381093 - RNA, 19 nt, Homo sapiens
  misc_RNA (1)...(19): siRNA sense strand
gaacgggauacauuacuug

SEQ ID NO: 1381094 - RNA, 19 nt, Homo sapiens
  misc_RNA (1)...(19): siRNA sense strand
gaucugagaacugauaaga

SEQ ID NO: 1381095 - RNA, 19 nt, Homo sapiens
  misc_RNA (1)...(19): siRNA sense strand
uaacaagaauggaggaaaa

SEQ ID NO: 1381096 - RNA, 19 nt, Homo sapiens
  misc_RNA (1)...(19): siRNA sense strand
caaguacaagaguggauua

SEQ ID NO: 1381097 - RNA, 19 nt, Homo sapiens
  misc_RNA (1)...(19): siRNA sense strand
gaaaccuggucucuuccuu

SEQ ID NO: 1381098 - RNA, 19 nt, Homo sapiens
  misc_RNA (1)...(19): siRNA sense strand
guuauuguuucccaaagaa

SEQ ID NO: 1381099 - RNA, 19 nt, Homo sapiens
  misc_RNA (1)...(19): siRNA sense strand
uacaugaaguucuaaggaa

SEQ ID NO: 1381100 - RNA, 19 nt, Homo sapiens
  misc_RNA (1)...(19): siRNA sense strand
ucugagaacugauaagaag

SEQ ID NO: 1381101 - RNA, 19 nt, Homo sapiens
  misc_RNA (1)...(19): siRNA sense strand
ccuccaaacucagcuauug

SEQ ID NO: 1381102 - RNA, 19 nt, Homo sapiens
  misc_RNA (1)...(19): siRNA sense strand
aauacacgcucuuuacuca

SEQ ID NO: 1381103 - RNA, 19 nt, Homo sapiens
  misc_RNA (1)...(19): siRNA sense strand
caacuuacggccaaggaaa

SEQ ID NO: 1381104 - RNA, 19 nt, Homo sapiens
  misc_RNA (1)...(19): siRNA sense strand
caaagaaauucaggaagag

SEQ ID NO: 1381105 - RNA, 19 nt, Homo sapiens
  misc_RNA (1)...(19): siRNA sense strand
ggagguaguagaaauguca

SEQ ID NO: 1381106 - RNA, 19 nt, Homo sapiens
  misc_RNA (1)...(19): siRNA sense strand
gccagugaauuucugaguu

SEQ ID NO: 1381107 - RNA, 19 nt, Homo sapiens
  misc_RNA (1)...(19): siRNA sense strand
uacaaaugcuuggagauga

SEQ ID NO: 1381108 - RNA, 19 nt, Homo sapiens
  misc_RNA (1)...(19): siRNA sense strand
ugaacuugcugugcauaaa

SEQ ID NO: 1381109 - RNA, 19 nt, Homo sapiens
  misc_RNA (1)...(19): siRNA sense strand
ccucucauuuaucagaaua

SEQ ID NO: 1381110 - RNA, 19 nt, Homo sapiens
  misc_RNA (1)...(19): siRNA sense strand
caagagguccaagcuauug

SEQ ID NO: 1381111 - RNA, 19 nt, Homo sapiens
  misc_RNA (1)...(19): siRNA sense strand
ucgggauucucauacuuua

SEQ ID NO: 1381112 - RNA, 19 nt, Homo sapiens
  misc_RNA (1)...(19): siRNA sense strand
gguuauuguuucccaaaga

SEQ ID NO: 1381113 - RNA, 19 nt, Homo sapiens
  misc_RNA (1)...(19): siRNA sense strand
gccauaccuugcucuacua

SEQ ID NO: 1381114 - RNA, 19 nt, Homo sapiens
  misc_RNA (1)...(19): siRNA sense strand
caaggaggaggaucaaguu

SEQ ID NO: 1381115 - RNA, 19 nt, Homo sapiens
  misc_RNA (1)...(19): siRNA sense strand
ugugaugcauuccaacaaa

SEQ ID NO: 1381116 - RNA, 19 nt, Homo sapiens
  misc_RNA (1)...(19): siRNA sense strand
gaggugugaugcauuccaa

SEQ ID NO: 1381117 - RNA, 19 nt, Homo sapiens
  misc_RNA (1)...(19): siRNA sense strand
aaagauguuucucuguuuc

SEQ ID NO: 1381118 - RNA, 19 nt, Homo sapiens
  misc_RNA (1)...(19): siRNA sense strand
gggauguucuggugauauc

SEQ ID NO: 1381119 - RNA, 19 nt, Homo sapiens
  misc_RNA (1)...(19): siRNA sense strand
ugacaaaacuucucuagag

SEQ ID NO: 1381120 - RNA, 19 nt, Homo sapiens
  misc_RNA (1)...(19): siRNA sense strand
caggaagaguguucuaucu

SEQ ID NO: 1381121 - RNA, 19 nt, Homo sapiens
  misc_RNA (1)...(19): siRNA sense strand
ugaacgggauacauuacuu

SEQ ID NO: 1381122 - RNA, 19 nt, Homo sapiens
  misc_RNA (1)...(19): siRNA sense strand
ggugauaucagaagugcaa

SEQ ID NO: 1381123 - RNA, 19 nt, Homo sapiens
  misc_RNA (1)...(19): siRNA sense strand
aaaggagcaugguauucaa

SEQ ID NO: 1381124 - RNA, 19 nt, Homo sapiens
  misc_RNA (1)...(19): siRNA sense strand
aauaugaacgggauacauu

SEQ ID NO: 1381125 - RNA, 19 nt, Homo sapiens
  misc_RNA (1)...(19): siRNA sense strand
cuauagaagcuaacaagaa

SEQ ID NO: 1381126 - RNA, 19 nt, Homo sapiens
  misc_RNA (1)...(19): siRNA sense strand
cgauguccucuuauauuua

SEQ ID NO: 1381127 - RNA, 19 nt, Homo sapiens
  misc_RNA (1)...(19): siRNA sense strand
auuggucgauguccucuua

SEQ ID NO: 1381128 - RNA, 19 nt, Homo sapiens
  misc_RNA (1)...(19): siRNA sense strand
gaaguucuaaggaaguaug

SEQ ID NO: 1381129 - RNA, 19 nt, Homo sapiens
  misc_RNA (1)...(19): siRNA sense strand
agauaauucugguugaaga

SEQ ID NO: 1381130 - RNA, 19 nt, Homo sapiens
  misc_RNA (1)...(19): siRNA sense strand
ccuguggcaccaacaauua

SEQ ID NO: 1381131 - RNA, 19 nt, Homo sapiens
  misc_RNA (1)...(19): siRNA sense strand
gcgacacuuuggaagauug

SEQ ID NO: 1381132 - RNA, 19 nt, Homo sapiens
  misc_RNA (1)...(19): siRNA sense strand
ggaggaggaucaaguuuuc

SEQ ID NO: 1381133 - RNA, 19 nt, Homo sapiens
  misc_RNA (1)...(19): siRNA sense strand
gggauacauuacuuguuga

SEQ ID NO: 1381134 - RNA, 19 nt, Homo sapiens
  misc_RNA (1)...(19): siRNA sense strand
uaucaaaggagcaugguau

SEQ ID NO: 1381135 - RNA, 19 nt, Homo sapiens
  misc_RNA (1)...(19): siRNA sense strand
aaucaagcuuccauauguu

SEQ ID NO: 1381136 - RNA, 19 nt, Homo sapiens
  misc_RNA (1)...(19): siRNA sense strand
caccaaaacuacauagauu

SEQ ID NO: 1381137 - RNA, 19 nt, Homo sapiens
  misc_RNA (1)...(19): siRNA sense strand
caauaaacagccuccaguu

SEQ ID NO: 1381138 - RNA, 19 nt, Homo sapiens
  misc_RNA (1)...(19): siRNA sense strand
gagcgacaaaguauaacaa

SEQ ID NO: 1381139 - RNA, 19 nt, Homo sapiens
  misc_RNA (1)...(19): siRNA sense strand
ccaaggagacauggaagaa

SEQ ID NO: 1381140 - RNA, 19 nt, Homo sapiens
  misc_RNA (1)...(19): siRNA sense strand
gaauacacgcucuuuacuc

SEQ ID NO: 1381141 - RNA, 19 nt, Homo sapiens
  misc_RNA (1)...(19): siRNA sense strand
caguggagauaauaaucaa

SEQ ID NO: 1381142 - RNA, 19 nt, Homo sapiens
  misc_RNA (1)...(19): siRNA sense strand
gcgacaaaguauaacaagu

SEQ ID NO: 1381143 - RNA, 19 nt, Homo sapiens
  misc_RNA (1)...(19): siRNA sense strand
gcaugguauucaaguacaa

SEQ ID NO: 1381144 - RNA, 19 nt, Homo sapiens
  misc_RNA (1)...(19): siRNA sense strand
ugacagggaacauggaaug

SEQ ID NO: 1381145 - RNA, 19 nt, Homo sapiens
  misc_RNA (1)...(19): siRNA sense strand
ggaauacacgcucuuuacu

SEQ ID NO: 1381146 - RNA, 19 nt, Homo sapiens
  misc_RNA (1)...(19): siRNA sense strand
ucgguugcccucucauuua

SEQ ID NO: 1381147 - RNA, 19 nt, Homo sapiens
  misc_RNA (1)...(19): siRNA sense strand
gagagccagugaauuucug

SEQ ID NO: 1381148 - RNA, 19 nt, Homo sapiens
  misc_RNA (1)...(19): siRNA sense strand
aaaaguaucgggaaaauug

SEQ ID NO: 1381149 - RNA, 19 nt, Homo sapiens
  misc_RNA (1)...(19): siRNA sense strand
gaaucaagcuuccauaugu

SEQ ID NO: 1381150 - RNA, 19 nt, Homo sapiens
  misc_RNA (1)...(19): siRNA sense strand
gcaaagauguuucucuguu

SEQ ID NO: 1381151 - RNA, 19 nt, Homo sapiens
  misc_RNA (1)...(19): siRNA sense strand
acacaugccuggagacuua

SEQ ID NO: 1381152 - RNA, 19 nt, Homo sapiens
  misc_RNA (1)...(19): siRNA sense strand
caacaaagcccgaggauau

SEQ ID NO: 1381153 - RNA, 19 nt, Homo sapiens
  misc_RNA (1)...(19): siRNA sense strand
ccaaagaaauucaggaaga

SEQ ID NO: 1381154 - RNA, 19 nt, Homo sapiens
  misc_RNA (1)...(19): siRNA sense strand
cuacauagauuucuucaug

SEQ ID NO: 1381155 - RNA, 19 nt, Homo sapiens
  misc_RNA (1)...(19): siRNA sense strand
ggaaauugaugauauugug

SEQ ID NO: 1381156 - RNA, 19 nt, Homo sapiens
  misc_RNA (1)...(19): siRNA sense strand
aaacucagcuauugccaua

SEQ ID NO: 1381157 - RNA, 19 nt, Homo sapiens
  misc_RNA (1)...(19): siRNA sense strand
gaagauaauucugguugaa

SEQ ID NO: 1381158 - RNA, 19 nt, Homo sapiens
  misc_RNA (1)...(19): siRNA sense strand
caaagauguuucucuguuu

SEQ ID NO: 1381159 - RNA, 19 nt, Homo sapiens
  misc_RNA (1)...(19): siRNA sense strand
guacaagaguggauuaauc

SEQ ID NO: 1381160 - RNA, 19 nt, Homo sapiens
  misc_RNA (1)...(19): siRNA sense strand
ggaagaguguucuaucuca

SEQ ID NO: 1381161 - RNA, 19 nt, Homo sapiens
  misc_RNA (1)...(19): siRNA sense strand
gaaagacaacgaccuuaaa

SEQ ID NO: 1381162 - RNA, 19 nt, Homo sapiens
  misc_RNA (1)...(19): siRNA sense strand
ggaaagacaacgaccuuaa

SEQ ID NO: 1381163 - RNA, 19 nt, Homo sapiens
  misc_RNA (1)...(19): siRNA sense strand
caaagaguuucuacuaaga

SEQ ID NO: 1381164 - RNA, 19 nt, Homo sapiens
  misc_RNA (1)...(19): siRNA sense strand
ccucagugguuucuaauaa

SEQ ID NO: 1381165 - RNA, 19 nt, Homo sapiens
  misc_RNA (1)...(19): siRNA sense strand
ccagugaauuucugaguuu

SEQ ID NO: 1381166 - RNA, 19 nt, Homo sapiens
  misc_RNA (1)...(19): siRNA sense strand
cagggaacauggaaugaua

SEQ ID NO: 1381167 - RNA, 19 nt, Homo sapiens
  misc_RNA (1)...(19): siRNA sense strand
uaagagcgacaaaguauaa

SEQ ID NO: 1381168 - RNA, 19 nt, Homo sapiens
  misc_RNA (1)...(19): siRNA sense strand
gagcaucuuuaacagaauu

SEQ ID NO: 1381169 - RNA, 19 nt, Homo sapiens
  misc_RNA (1)...(19): siRNA sense strand
ccuggagacuuauuuaauu

SEQ ID NO: 1381170 - RNA, 19 nt, Homo sapiens
  misc_RNA (1)...(19): siRNA sense strand
cgacaaaguauaacaaguu

SEQ ID NO: 1381171 - RNA, 19 nt, Homo sapiens
  misc_RNA (1)...(19): siRNA sense strand
ggagcaugguauucaagua

SEQ ID NO: 1381172 - RNA, 19 nt, Homo sapiens
  misc_RNA (1)...(19): siRNA sense strand
gaagaguguucuaucucaa

SEQ ID NO: 1381173 - RNA, 19 nt, Homo sapiens
  misc_RNA (1)...(19): siRNA sense strand
ucaaagaguuucuacuaag

SEQ ID NO: 1381174 - RNA, 19 nt, Homo sapiens
  misc_RNA (1)...(19): siRNA sense strand
gagaacugauaagaagaua

SEQ ID NO: 1381175 - RNA, 19 nt, Homo sapiens
  misc_RNA (1)...(19): siRNA sense strand
gcucuuuacucagggaaua

SEQ ID NO: 1381176 - RNA, 19 nt, Homo sapiens
  misc_RNA (1)...(19): siRNA sense strand
cgggauacauuacuuguug

SEQ ID NO: 1381177 - RNA, 19 nt, Homo sapiens
  misc_RNA (1)...(19): siRNA sense strand
ucgauguccucuuauauuu

SEQ ID NO: 1381178 - RNA, 19 nt, Homo sapiens
  misc_RNA (1)...(19): siRNA sense strand
agauuuaccuaaccaguuu

SEQ ID NO: 1381179 - RNA, 19 nt, Homo sapiens
  misc_RNA (1)...(19): siRNA sense strand
ggaaguaugugaggauugg

SEQ ID NO: 1381180 - RNA, 19 nt, Homo sapiens
  misc_RNA (1)...(19): siRNA sense strand
gauaucagaagugcaauaa

SEQ ID NO: 1381181 - RNA, 19 nt, Homo sapiens
  misc_RNA (1)...(19): siRNA sense strand
gcaccaacaauuaugauga

SEQ ID NO: 1381182 - RNA, 19 nt, Homo sapiens
  misc_RNA (1)...(19): siRNA sense strand
aaacaggguggaucuauuu

SEQ ID NO: 1381183 - RNA, 19 nt, Homo sapiens
  misc_RNA (1)...(19): siRNA sense strand
gaugaucugagaacugaua

SEQ ID NO: 1381184 - RNA, 19 nt, Homo sapiens
  misc_RNA (1)...(19): siRNA sense strand
ggguggaucuauuuuauua

SEQ ID NO: 1381185 - RNA, 19 nt, Homo sapiens
  misc_RNA (1)...(19): siRNA sense strand
uaucagaagugcaauaaac

SEQ ID NO: 1381186 - RNA, 19 nt, Homo sapiens
  misc_RNA (1)...(19): siRNA sense strand
ugugagagccagugaauuu

SEQ ID NO: 1381187 - RNA, 19 nt, Homo sapiens
  misc_RNA (1)...(19): siRNA sense strand
caaaggagcaugguauuca

SEQ ID NO: 1381188 - RNA, 19 nt, Homo sapiens
  misc_RNA (1)...(19): siRNA sense strand
ccggaaaccuggucucuuc

SEQ ID NO: 1381189 - RNA, 19 nt, Homo sapiens
  misc_RNA (1)...(19): siRNA sense strand
gaagcgacacuuuggaaga

SEQ ID NO: 1381190 - RNA, 19 nt, Homo sapiens
  misc_RNA (1)...(19): siRNA sense strand
cgagaggugugaugcauuc

SEQ ID NO: 1381191 - RNA, 19 nt, Homo sapiens
  misc_RNA (1)...(19): siRNA sense strand
cagaugcugugcugucaaa

SEQ ID NO: 1381192 - RNA, 19 nt, Homo sapiens
  misc_RNA (1)...(19): siRNA sense strand
caccaacaauuaugaugaa

SEQ ID NO: 1381193 - RNA, 19 nt, Homo sapiens
  misc_RNA (1)...(19): siRNA sense strand
gaacgggauacauuacuug

SEQ ID NO: 1381194 - RNA, 19 nt, Homo sapiens
  misc_RNA (1)...(19): siRNA sense strand
gaucugagaacugauaaga

SEQ ID NO: 1381195 - RNA, 19 nt, Homo sapiens
  misc_RNA (1)...(19): siRNA sense strand
uaacaagaauggaggaaaa

SEQ ID NO: 1381196 - RNA, 19 nt, Homo sapiens
  misc_RNA (1)...(19): siRNA sense strand
caaguacaagaguggauua

SEQ ID NO: 1381197 - RNA, 19 nt, Homo sapiens
  misc_RNA (1)...(19): siRNA sense strand
gaaaccuggucucuuccuu

SEQ ID NO: 1381198 - RNA, 19 nt, Homo sapiens
  misc_RNA (1)...(19): siRNA sense strand
guuauuguuucccaaagaa

SEQ ID NO: 1381199 - RNA, 19 nt, Homo sapiens
  misc_RNA (1)...(19): siRNA sense strand
uacaugaaguucuaaggaa

SEQ ID NO: 1381200 - RNA, 19 nt, Homo sapiens
  misc_RNA (1)...(19): siRNA sense strand
ucugagaacugauaagaag

SEQ ID NO: 1381201 - RNA, 19 nt, Homo sapiens
  misc_RNA (1)...(19): siRNA sense strand
aauacacgcucuuuacuca

SEQ ID NO: 1381202 - RNA, 19 nt, Homo sapiens
  misc_RNA (1)...(19): siRNA sense strand
caacuuacggccaaggaaa

SEQ ID NO: 1381203 - RNA, 19 nt, Homo sapiens
  misc_RNA (1)...(19): siRNA sense strand
caaagaaauucaggaagag

SEQ ID NO: 1381204 - RNA, 19 nt, Homo sapiens
  misc_RNA (1)...(19): siRNA sense strand
ggagguaguagaaauguca

SEQ ID NO: 1381205 - RNA, 19 nt, Homo sapiens
  misc_RNA (1)...(19): siRNA sense strand
gccagugaauuucugaguu

SEQ ID NO: 1381206 - RNA, 19 nt, Homo sapiens
  misc_RNA (1)...(19): siRNA sense strand
uacaaaugcuuggagauga

SEQ ID NO: 1381207 - RNA, 19 nt, Homo sapiens
  misc_RNA (1)...(19): siRNA sense strand
ugaacuugcugugcauaaa

SEQ ID NO: 1381208 - RNA, 19 nt, Homo sapiens
  misc_RNA (1)...(19): siRNA sense strand
ccucucauuuaucagaaua

SEQ ID NO: 1381209 - RNA, 19 nt, Homo sapiens
  misc_RNA (1)...(19): siRNA sense strand
caagagguccaagcuauug

SEQ ID NO: 1381210 - RNA, 19 nt, Homo sapiens
  misc_RNA (1)...(19): siRNA sense strand
ucgggauucucauacuuua

SEQ ID NO: 1381211 - RNA, 19 nt, Homo sapiens
  misc_RNA (1)...(19): siRNA sense strand
gguuauuguuucccaaaga

SEQ ID NO: 1381212 - RNA, 19 nt, Homo sapiens
  misc_RNA (1)...(19): siRNA sense strand
gccauaccuugcucuacua

SEQ ID NO: 1381213 - RNA, 19 nt, Homo sapiens
  misc_RNA (1)...(19): siRNA sense strand
caaggaggaggaucaaguu

SEQ ID NO: 1381214 - RNA, 19 nt, Homo sapiens
  misc_RNA (1)...(19): siRNA sense strand
ugugaugcauuccaacaaa

SEQ ID NO: 1381215 - RNA, 19 nt, Homo sapiens
  misc_RNA (1)...(19): siRNA sense strand
gaggugugaugcauuccaa

SEQ ID NO: 1381216 - RNA, 19 nt, Homo sapiens
  misc_RNA (1)...(19): siRNA sense strand
aaagauguuucucuguuuc

SEQ ID NO: 1381217 - RNA, 19 nt, Homo sapiens
  misc_RNA (1)...(19): siRNA sense strand
gggauguucuggugauauc

SEQ ID NO: 1381218 - RNA, 19 nt, Homo sapiens
  misc_RNA (1)...(19): siRNA sense strand
ugacaaaacuucucuagag

SEQ ID NO: 1381219 - RNA, 19 nt, Homo sapiens
  misc_RNA (1)...(19): siRNA sense strand
caggaagaguguucuaucu

SEQ ID NO: 1381220 - RNA, 19 nt, Homo sapiens
  misc_RNA (1)...(19): siRNA sense strand
ugaacgggauacauuacuu

SEQ ID NO: 1381221 - RNA, 19 nt, Homo sapiens
  misc_RNA (1)...(19): siRNA sense strand
ggugauaucagaagugcaa

SEQ ID NO: 1381222 - RNA, 19 nt, Homo sapiens
  misc_RNA (1)...(19): siRNA sense strand
agauaauucugguugaaga

SEQ ID NO: 1381223 - RNA, 19 nt, Homo sapiens
  misc_RNA (1)...(19): siRNA sense strand
aaaggagcaugguauucaa

SEQ ID NO: 1381224 - RNA, 19 nt, Homo sapiens
  misc_RNA (1)...(19): siRNA sense strand
aauaugaacgggauacauu

SEQ ID NO: 1381225 - RNA, 19 nt, Homo sapiens
  misc_RNA (1)...(19): siRNA sense strand
cuauagaagcuaacaagaa

SEQ ID NO: 1381226 - RNA, 19 nt, Homo sapiens
  misc_RNA (1)...(19): siRNA sense strand
cgauguccucuuauauuua

SEQ ID NO: 1381227 - RNA, 19 nt, Homo sapiens
  misc_RNA (1)...(19): siRNA sense strand
auuggucgauguccucuua

SEQ ID NO: 1381228 - RNA, 19 nt, Homo sapiens
  misc_RNA (1)...(19): siRNA sense strand
gaaguucuaaggaaguaug

SEQ ID NO: 1381229 - RNA, 19 nt, Homo sapiens
  misc_RNA (1)...(19): siRNA sense strand
ccuguggcaccaacaauua

SEQ ID NO: 1381230 - RNA, 19 nt, Homo sapiens
  misc_RNA (1)...(19): siRNA sense strand
gcgacacuuuggaagauug

SEQ ID NO: 1381231 - RNA, 19 nt, Homo sapiens
  misc_RNA (1)...(19): siRNA sense strand
ggaggaggaucaaguuuuc

SEQ ID NO: 1381232 - RNA, 19 nt, Homo sapiens
  misc_RNA (1)...(19): siRNA sense strand
gggauacauuacuuguuga

SEQ ID NO: 1381233 - RNA, 19 nt, Homo sapiens
  misc_RNA (1)...(19): siRNA sense strand
uaucaaaggagcaugguau

SEQ ID NO: 1381234 - RNA, 19 nt, Homo sapiens
  misc_RNA (1)...(19): siRNA sense strand
aaucaagcuuccauauguu

SEQ ID NO: 1381235 - RNA, 19 nt, Homo sapiens
  misc_RNA (1)...(19): siRNA sense strand
caccaaaacuacauagauu

SEQ ID NO: 1381236 - RNA, 19 nt, Homo sapiens
  misc_RNA (1)...(19): siRNA sense strand
caauaaacagccuccaguu

SEQ ID NO: 1381237 - RNA, 19 nt, Homo sapiens
  misc_RNA (1)...(19): siRNA sense strand
gagcgacaaaguauaacaa

SEQ ID NO: 1381238 - RNA, 19 nt, Homo sapiens
  misc_RNA (1)...(19): siRNA sense strand
ccaaggagacauggaagaa

SEQ ID NO: 1381239 - RNA, 19 nt, Homo sapiens
  misc_RNA (1)...(19): siRNA sense strand
gaauacacgcucuuuacuc

SEQ ID NO: 1381240 - RNA, 19 nt, Homo sapiens
  misc_RNA (1)...(19): siRNA sense strand
caguggagauaauaaucaa

SEQ ID NO: 1381241 - RNA, 19 nt, Homo sapiens
  misc_RNA (1)...(19): siRNA sense strand
gcgacaaaguauaacaagu

SEQ ID NO: 1381242 - RNA, 19 nt, Homo sapiens
  misc_RNA (1)...(19): siRNA sense strand
gcaugguauucaaguacaa

SEQ ID NO: 1381243 - RNA, 19 nt, Homo sapiens
  misc_RNA (1)...(19): siRNA sense strand
ugacagggaacauggaaug

SEQ ID NO: 1381244 - RNA, 19 nt, Homo sapiens
  misc_RNA (1)...(19): siRNA sense strand
ggaauacacgcucuuuacu

SEQ ID NO: 1381245 - RNA, 19 nt, Homo sapiens
  misc_RNA (1)...(19): siRNA sense strand
ucgguugcccucucauuua

SEQ ID NO: 1381246 - RNA, 19 nt, Homo sapiens
  misc_RNA (1)...(19): siRNA sense strand
gagagccagugaauuucug

SEQ ID NO: 1381247 - RNA, 19 nt, Homo sapiens
  misc_RNA (1)...(19): siRNA sense strand
aaaaguaucgggaaaauug

SEQ ID NO: 1381248 - RNA, 19 nt, Homo sapiens
  misc_RNA (1)...(19): siRNA sense strand
gcaugaacuugcugugcau

SEQ ID NO: 1381249 - RNA, 19 nt, Homo sapiens
  misc_RNA (1)...(19): siRNA sense strand
gaaucaagcuuccauaugu

SEQ ID NO: 1381250 - RNA, 19 nt, Homo sapiens
  misc_RNA (1)...(19): siRNA sense strand
gcaaagauguuucucuguu

SEQ ID NO: 1381251 - RNA, 19 nt, Homo sapiens
  misc_RNA (1)...(19): siRNA sense strand
acacaugccuggagacuua

SEQ ID NO: 1381252 - RNA, 19 nt, Homo sapiens
  misc_RNA (1)...(19): siRNA sense strand
caacaaagcccgaggauau

SEQ ID NO: 1381253 - RNA, 19 nt, Homo sapiens
  misc_RNA (1)...(19): siRNA sense strand
ccaaagaaauucaggaaga

SEQ ID NO: 1381254 - RNA, 19 nt, Homo sapiens
  misc_RNA (1)...(19): siRNA sense strand
cuacauagauuucuucaug

SEQ ID NO: 1381255 - RNA, 19 nt, Homo sapiens
  misc_RNA (1)...(19): siRNA sense strand
ggaaauugaugauauugug

SEQ ID NO: 1381256 - RNA, 19 nt, Homo sapiens
  misc_RNA (1)...(19): siRNA sense strand
aaacucagcuauugccaua

SEQ ID NO: 1381257 - RNA, 19 nt, Homo sapiens
  misc_RNA (1)...(19): siRNA sense strand
gaagauaauucugguugaa

SEQ ID NO: 1381258 - RNA, 19 nt, Homo sapiens
  misc_RNA (1)...(19): siRNA sense strand
caaagauguuucucuguuu

SEQ ID NO: 1381259 - RNA, 19 nt, Homo sapiens
  misc_RNA (1)...(19): siRNA sense strand
guacaagaguggauuaauc

SEQ ID NO: 1381260 - RNA, 19 nt, Homo sapiens
  misc_RNA (1)...(19): siRNA sense strand
ggaagaguguucuaucuca

SEQ ID NO: 1381261 - RNA, 19 nt, Homo sapiens
  misc_RNA (1)...(19): siRNA sense strand
gaaagacaacgaccuuaaa

SEQ ID NO: 1381262 - RNA, 19 nt, Homo sapiens
  misc_RNA (1)...(19): siRNA sense strand
ggaaagacaacgaccuuaa

SEQ ID NO: 1381263 - RNA, 19 nt, Homo sapiens
  misc_RNA (1)...(19): siRNA sense strand
caaagaguuucuacuaaga

SEQ ID NO: 1381264 - RNA, 19 nt, Homo sapiens
  misc_RNA (1)...(19): siRNA sense strand
ccucagugguuucuaauaa

SEQ ID NO: 1381265 - RNA, 19 nt, Homo sapiens
  misc_RNA (1)...(19): siRNA sense strand
ccagugaauuucugaguuu

SEQ ID NO: 1381266 - RNA, 19 nt, Homo sapiens
  misc_RNA (1)...(19): siRNA sense strand
cagggaacauggaaugaua

SEQ ID NO: 1381267 - RNA, 19 nt, Homo sapiens
  misc_RNA (1)...(19): siRNA sense strand
uaagagcgacaaaguauaa

SEQ ID NO: 1381268 - RNA, 19 nt, Homo sapiens
  misc_RNA (1)...(19): siRNA sense strand
gagcaucuuuaacagaauu

SEQ ID NO: 1381269 - RNA, 19 nt, Homo sapiens
  misc_RNA (1)...(19): siRNA sense strand
ccuggagacuuauuuaauu

SEQ ID NO: 1381270 - RNA, 19 nt, Homo sapiens
  misc_RNA (1)...(19): siRNA sense strand
cgacaaaguauaacaaguu

SEQ ID NO: 1381271 - RNA, 19 nt, Homo sapiens
  misc_RNA (1)...(19): siRNA sense strand
ggagcaugguauucaagua

SEQ ID NO: 1381272 - RNA, 19 nt, Homo sapiens
  misc_RNA (1)...(19): siRNA sense strand
gaagaguguucuaucucaa

SEQ ID NO: 1381273 - RNA, 19 nt, Homo sapiens
  misc_RNA (1)...(19): siRNA sense strand
ucaaagaguuucuacuaag

SEQ ID NO: 1381274 - RNA, 19 nt, Homo sapiens
  misc_RNA (1)...(19): siRNA sense strand
gagaacugauaagaagaua

SEQ ID NO: 1381275 - RNA, 19 nt, Homo sapiens
  misc_RNA (1)...(19): siRNA sense strand
gcucuuuacucagggaaua

SEQ ID NO: 1381276 - RNA, 19 nt, Homo sapiens
  misc_RNA (1)...(19): siRNA sense strand
cgggauacauuacuuguug

SEQ ID NO: 1381277 - RNA, 19 nt, Homo sapiens
  misc_RNA (1)...(19): siRNA sense strand
ucgauguccucuuauauuu

SEQ ID NO: 1381278 - RNA, 19 nt, Homo sapiens
  misc_RNA (1)...(19): siRNA sense strand
agauuuaccuaaccaguuu

SEQ ID NO: 1381279 - RNA, 19 nt, Homo sapiens
  misc_RNA (1)...(19): siRNA sense strand
ggaaguaugugaggauugg

SEQ ID NO: 1381280 - RNA, 19 nt, Homo sapiens
  misc_RNA (1)...(19): siRNA sense strand
gauaucagaagugcaauaa

SEQ ID NO: 1381281 - RNA, 19 nt, Homo sapiens
  misc_RNA (1)...(19): siRNA sense strand
gcaccaacaauuaugauga

SEQ ID NO: 1381282 - RNA, 19 nt, Homo sapiens
  misc_RNA (1)...(19): siRNA sense strand
aaacaggguggaucuauuu

SEQ ID NO: 1381283 - RNA, 19 nt, Homo sapiens
  misc_RNA (1)...(19): siRNA sense strand
gaugaucugagaacugaua

SEQ ID NO: 1381284 - RNA, 19 nt, Homo sapiens
  misc_RNA (1)...(19): siRNA sense strand
ggguggaucuauuuuauua

SEQ ID NO: 1381285 - RNA, 19 nt, Homo sapiens
  misc_RNA (1)...(19): siRNA sense strand
uaucagaagugcaauaaac

SEQ ID NO: 1381286 - RNA, 19 nt, Homo sapiens
  misc_RNA (1)...(19): siRNA sense strand
ugugagagccagugaauuu

SEQ ID NO: 1381287 - RNA, 19 nt, Homo sapiens
  misc_RNA (1)...(19): siRNA sense strand
caaaggagcaugguauuca

SEQ ID NO: 1381288 - RNA, 19 nt, Homo sapiens
  misc_RNA (1)...(19): siRNA sense strand
ccggaaaccuggucucuuc

SEQ ID NO: 1381289 - RNA, 19 nt, Homo sapiens
  misc_RNA (1)...(19): siRNA sense strand
gaagcgacacuuuggaaga

SEQ ID NO: 1381290 - RNA, 19 nt, Homo sapiens
  misc_RNA (1)...(19): siRNA sense strand
cgagaggugugaugcauuc

SEQ ID NO: 1381291 - RNA, 19 nt, Homo sapiens
  misc_RNA (1)...(19): siRNA sense strand
cagaugcugugcugucaaa

SEQ ID NO: 1381292 - RNA, 19 nt, Homo sapiens
  misc_RNA (1)...(19): siRNA sense strand
caccaacaauuaugaugaa

SEQ ID NO: 1381293 - RNA, 19 nt, Homo sapiens
  misc_RNA (1)...(19): siRNA sense strand
gaacgggauacauuacuug

SEQ ID NO: 1381294 - RNA, 19 nt, Homo sapiens
  misc_RNA (1)...(19): siRNA sense strand
gaucugagaacugauaaga

SEQ ID NO: 1381295 - RNA, 19 nt, Homo sapiens
  misc_RNA (1)...(19): siRNA sense strand
uaacaagaauggaggaaaa

SEQ ID NO: 1381296 - RNA, 19 nt, Homo sapiens
  misc_RNA (1)...(19): siRNA sense strand
caaguacaagaguggauua

SEQ ID NO: 1381297 - RNA, 19 nt, Homo sapiens
  misc_RNA (1)...(19): siRNA sense strand
gaaaccuggucucuuccuu

SEQ ID NO: 1381298 - RNA, 19 nt, Homo sapiens
  misc_RNA (1)...(19): siRNA sense strand
guuauuguuucccaaagaa

SEQ ID NO: 1381299 - RNA, 19 nt, Homo sapiens
  misc_RNA (1)...(19): siRNA sense strand
uacaugaaguucuaaggaa

SEQ ID NO: 1381300 - RNA, 19 nt, Homo sapiens
  misc_RNA (1)...(19): siRNA sense strand
ucugagaacugauaagaag

SEQ ID NO: 1381301 - RNA, 19 nt, Homo sapiens
  misc_RNA (1)...(19): siRNA sense strand
aauacacgcucuuuacuca

SEQ ID NO: 1381302 - RNA, 19 nt, Homo sapiens
  misc_RNA (1)...(19): siRNA sense strand
caacuuacggccaaggaaa

SEQ ID NO: 1381303 - RNA, 19 nt, Homo sapiens
  misc_RNA (1)...(19): siRNA sense strand
caaagaaauucaggaagag

SEQ ID NO: 1381304 - RNA, 19 nt, Homo sapiens
  misc_RNA (1)...(19): siRNA sense strand
ggagguaguagaaauguca

SEQ ID NO: 1381305 - RNA, 19 nt, Homo sapiens
  misc_RNA (1)...(19): siRNA sense strand
gccagugaauuucugaguu

SEQ ID NO: 1381306 - RNA, 19 nt, Homo sapiens
  misc_RNA (1)...(19): siRNA sense strand
uacaaaugcuuggagauga

SEQ ID NO: 1381307 - RNA, 19 nt, Homo sapiens
  misc_RNA (1)...(19): siRNA sense strand
ugaacuugcugugcauaaa

SEQ ID NO: 1381308 - RNA, 19 nt, Homo sapiens
  misc_RNA (1)...(19): siRNA sense strand
ccucucauuuaucagaaua

SEQ ID NO: 1381309 - RNA, 19 nt, Homo sapiens
  misc_RNA (1)...(19): siRNA sense strand
caagagguccaagcuauug

SEQ ID NO: 1381310 - RNA, 19 nt, Homo sapiens
  misc_RNA (1)...(19): siRNA sense strand
ucgggauucucauacuuua

SEQ ID NO: 1381311 - RNA, 19 nt, Homo sapiens
  misc_RNA (1)...(19): siRNA sense strand
gguuauuguuucccaaaga

SEQ ID NO: 1381312 - RNA, 19 nt, Homo sapiens
  misc_RNA (1)...(19): siRNA sense strand
gccauaccuugcucuacua

SEQ ID NO: 1381313 - RNA, 19 nt, Homo sapiens
  misc_RNA (1)...(19): siRNA sense strand
caaggaggaggaucaaguu

SEQ ID NO: 1381314 - RNA, 19 nt, Homo sapiens
  misc_RNA (1)...(19): siRNA sense strand
ugugaugcauuccaacaaa

SEQ ID NO: 1381315 - RNA, 19 nt, Homo sapiens
  misc_RNA (1)...(19): siRNA sense strand
gaggugugaugcauuccaa

SEQ ID NO: 1381316 - RNA, 19 nt, Homo sapiens
  misc_RNA (1)...(19): siRNA sense strand
aaagauguuucucuguuuc

SEQ ID NO: 1381317 - RNA, 19 nt, Homo sapiens
  misc_RNA (1)...(19): siRNA sense strand
gggauguucuggugauauc

SEQ ID NO: 1381318 - RNA, 19 nt, Homo sapiens
  misc_RNA (1)...(19): siRNA sense strand
ugacaaaacuucucuagag

SEQ ID NO: 1381319 - RNA, 19 nt, Homo sapiens
  misc_RNA (1)...(19): siRNA sense strand
caggaagaguguucuaucu

SEQ ID NO: 1381320 - RNA, 19 nt, Homo sapiens
  misc_RNA (1)...(19): siRNA sense strand
ugaacgggauacauuacuu

SEQ ID NO: 1381321 - RNA, 19 nt, Homo sapiens
  misc_RNA (1)...(19): siRNA sense strand
ggugauaucagaagugcaa

SEQ ID NO: 1381322 - RNA, 19 nt, Homo sapiens
  misc_RNA (1)...(19): siRNA sense strand
agauaauucugguugaaga

SEQ ID NO: 1381323 - RNA, 19 nt, Homo sapiens
  misc_RNA (1)...(19): siRNA sense strand
aaaggagcaugguauucaa

SEQ ID NO: 1381324 - RNA, 19 nt, Homo sapiens
  misc_RNA (1)...(19): siRNA sense strand
aauaugaacgggauacauu

SEQ ID NO: 1381325 - RNA, 19 nt, Homo sapiens
  misc_RNA (1)...(19): siRNA sense strand
cuauagaagcuaacaagaa

SEQ ID NO: 1381326 - RNA, 19 nt, Homo sapiens
  misc_RNA (1)...(19): siRNA sense strand
cgauguccucuuauauuua

SEQ ID NO: 1381327 - RNA, 19 nt, Homo sapiens
  misc_RNA (1)...(19): siRNA sense strand
auuggucgauguccucuua

SEQ ID NO: 1381328 - RNA, 19 nt, Homo sapiens
  misc_RNA (1)...(19): siRNA sense strand
gaaguucuaaggaaguaug

SEQ ID NO: 1381329 - RNA, 19 nt, Homo sapiens
  misc_RNA (1)...(19): siRNA sense strand
ccuguggcaccaacaauua

SEQ ID NO: 1381330 - RNA, 19 nt, Homo sapiens
  misc_RNA (1)...(19): siRNA sense strand
gcgacacuuuggaagauug

SEQ ID NO: 1381331 - RNA, 19 nt, Homo sapiens
  misc_RNA (1)...(19): siRNA sense strand
ggaggaggaucaaguuuuc

SEQ ID NO: 1381332 - RNA, 19 nt, Homo sapiens
  misc_RNA (1)...(19): siRNA sense strand
gggauacauuacuuguuga

SEQ ID NO: 1381333 - RNA, 19 nt, Homo sapiens
  misc_RNA (1)...(19): siRNA sense strand
uaucaaaggagcaugguau

SEQ ID NO: 1381334 - RNA, 19 nt, Homo sapiens
  misc_RNA (1)...(19): siRNA sense strand
aaucaagcuuccauauguu

SEQ ID NO: 1381335 - RNA, 19 nt, Homo sapiens
  misc_RNA (1)...(19): siRNA sense strand
caccaaaacuacauagauu

SEQ ID NO: 1381336 - RNA, 19 nt, Homo sapiens
  misc_RNA (1)...(19): siRNA sense strand
caauaaacagccuccaguu

SEQ ID NO: 1381337 - RNA, 19 nt, Homo sapiens
  misc_RNA (1)...(19): siRNA sense strand
gagcgacaaaguauaacaa

SEQ ID NO: 1381338 - RNA, 19 nt, Homo sapiens
  misc_RNA (1)...(19): siRNA sense strand
ccaaggagacauggaagaa

SEQ ID NO: 1381339 - RNA, 19 nt, Homo sapiens
  misc_RNA (1)...(19): siRNA sense strand
gaauacacgcucuuuacuc

SEQ ID NO: 1381340 - RNA, 19 nt, Homo sapiens
  misc_RNA (1)...(19): siRNA sense strand
caguggagauaauaaucaa

SEQ ID NO: 1381341 - RNA, 19 nt, Homo sapiens
  misc_RNA (1)...(19): siRNA sense strand
gcgacaaaguauaacaagu

SEQ ID NO: 1381342 - RNA, 19 nt, Homo sapiens
  misc_RNA (1)...(19): siRNA sense strand
gcaugguauucaaguacaa

SEQ ID NO: 1381343 - RNA, 19 nt, Homo sapiens
  misc_RNA (1)...(19): siRNA sense strand
ugacagggaacauggaaug

SEQ ID NO: 1381344 - RNA, 19 nt, Homo sapiens
  misc_RNA (1)...(19): siRNA sense strand
ggaauacacgcucuuuacu

SEQ ID NO: 1381345 - RNA, 19 nt, Homo sapiens
  misc_RNA (1)...(19): siRNA sense strand
ucgguugcccucucauuua

SEQ ID NO: 1381346 - RNA, 19 nt, Homo sapiens
  misc_RNA (1)...(19): siRNA sense strand
gagagccagugaauuucug

SEQ ID NO: 1381347 - RNA, 19 nt, Homo sapiens
  misc_RNA (1)...(19): siRNA sense strand
aaaaguaucgggaaaauug

SEQ ID NO: 1381348 - RNA, 19 nt, Homo sapiens
  misc_RNA (1)...(19): siRNA sense strand
gcaugaacuugcugugcau

SEQ ID NO: 1381349 - RNA, 19 nt, Homo sapiens
  misc_RNA (1)...(19): siRNA sense strand
gaaucaagcuuccauaugu

SEQ ID NO: 1381350 - RNA, 19 nt, Homo sapiens
  misc_RNA (1)...(19): siRNA sense strand
gcaaagauguuucucuguu

SEQ ID NO: 1381351 - RNA, 19 nt, Homo sapiens
  misc_RNA (1)...(19): siRNA sense strand
acacaugccuggagacuua

SEQ ID NO: 1381352 - RNA, 19 nt, Homo sapiens
  misc_RNA (1)...(19): siRNA sense strand
caacaaagcccgaggauau

SEQ ID NO: 1381353 - RNA, 19 nt, Homo sapiens
  misc_RNA (1)...(19): siRNA sense strand
ccaaagaaauucaggaaga

SEQ ID NO: 1381354 - RNA, 19 nt, Homo sapiens
  misc_RNA (1)...(19): siRNA sense strand
cuacauagauuucuucaug

SEQ ID NO: 1381355 - RNA, 19 nt, Homo sapiens
  misc_RNA (1)...(19): siRNA sense strand
ggaaauugaugauauugug

SEQ ID NO: 1381356 - RNA, 19 nt, Homo sapiens
  misc_RNA (1)...(19): siRNA sense strand
aaacucagcuauugccaua

SEQ ID NO: 1381357 - RNA, 19 nt, Homo sapiens
  misc_RNA (1)...(19): siRNA sense strand
gaagauaauucugguugaa

SEQ ID NO: 1381358 - RNA, 19 nt, Homo sapiens
  misc_RNA (1)...(19): siRNA sense strand
caaagauguuucucuguuu

SEQ ID NO: 1381359 - RNA, 19 nt, Homo sapiens
  misc_RNA (1)...(19): siRNA sense strand
ggaagaguguucuaucuca

SEQ ID NO: 1381360 - RNA, 19 nt, Homo sapiens
  misc_RNA (1)...(19): siRNA sense strand
caaagaguuucuacuaaga

SEQ ID NO: 1381361 - RNA, 19 nt, Homo sapiens
  misc_RNA (1)...(19): siRNA sense strand
ccucagugguuucuaauaa

SEQ ID NO: 1381362 - RNA, 19 nt, Homo sapiens
  misc_RNA (1)...(19): siRNA sense strand
ccagugaauuucugaguuu

SEQ ID NO: 1381363 - RNA, 19 nt, Homo sapiens
  misc_RNA (1)...(19): siRNA sense strand
cagggaacauggaaugaua

SEQ ID NO: 1381364 - RNA, 19 nt, Homo sapiens
  misc_RNA (1)...(19): siRNA sense strand
uaagagcgacaaaguauaa

SEQ ID NO: 1381365 - RNA, 19 nt, Homo sapiens
  misc_RNA (1)...(19): siRNA sense strand
gagcaucuuuaacagaauu

SEQ ID NO: 1381366 - RNA, 19 nt, Homo sapiens
  misc_RNA (1)...(19): siRNA sense strand
ccuggagacuuauuuaauu

SEQ ID NO: 1381367 - RNA, 19 nt, Homo sapiens
  misc_RNA (1)...(19): siRNA sense strand
cgacaaaguauaacaaguu

SEQ ID NO: 1381368 - RNA, 19 nt, Homo sapiens
  misc_RNA (1)...(19): siRNA sense strand
gaagaguguucuaucucaa

SEQ ID NO: 1381369 - RNA, 19 nt, Homo sapiens
  misc_RNA (1)...(19): siRNA sense strand
ucaaagaguuucuacuaag

SEQ ID NO: 1381370 - RNA, 19 nt, Homo sapiens
  misc_RNA (1)...(19): siRNA sense strand
gagaacugauaagaagaua

SEQ ID NO: 1381371 - RNA, 19 nt, Homo sapiens
  misc_RNA (1)...(19): siRNA sense strand
gcucuuuacucagggaaua

SEQ ID NO: 1381372 - RNA, 19 nt, Homo sapiens
  misc_RNA (1)...(19): siRNA sense strand
cgggauacauuacuuguug

SEQ ID NO: 1381373 - RNA, 19 nt, Homo sapiens
  misc_RNA (1)...(19): siRNA sense strand
ucgauguccucuuauauuu

SEQ ID NO: 1381374 - RNA, 19 nt, Homo sapiens
  misc_RNA (1)...(19): siRNA sense strand
agauuuaccuaaccaguuu

SEQ ID NO: 1381375 - RNA, 19 nt, Homo sapiens
  misc_RNA (1)...(19): siRNA sense strand
ggaaguaugugaggauugg

SEQ ID NO: 1381376 - RNA, 19 nt, Homo sapiens
  misc_RNA (1)...(19): siRNA sense strand
gauaucagaagugcaauaa

SEQ ID NO: 1381377 - RNA, 19 nt, Homo sapiens
  misc_RNA (1)...(19): siRNA sense strand
gcaccaacaauuaugauga

SEQ ID NO: 1381378 - RNA, 19 nt, Homo sapiens
  misc_RNA (1)...(19): siRNA sense strand
gaugaucugagaacugaua

SEQ ID NO: 1381379 - RNA, 19 nt, Homo sapiens
  misc_RNA (1)...(19): siRNA sense strand
uaucagaagugcaauaaac

SEQ ID NO: 1381380 - RNA, 19 nt, Homo sapiens
  misc_RNA (1)...(19): siRNA sense strand
ugugagagccagugaauuu

SEQ ID NO: 1381381 - RNA, 19 nt, Homo sapiens
  misc_RNA (1)...(19): siRNA sense strand
caccaacaauuaugaugaa

SEQ ID NO: 1381382 - RNA, 19 nt, Homo sapiens
  misc_RNA (1)...(19): siRNA sense strand
ccggaaaccuggucucuuc

SEQ ID NO: 1381383 - RNA, 19 nt, Homo sapiens
  misc_RNA (1)...(19): siRNA sense strand
gaagcgacacuuuggaaga

SEQ ID NO: 1381384 - RNA, 19 nt, Homo sapiens
  misc_RNA (1)...(19): siRNA sense strand
cgagaggugugaugcauuc

SEQ ID NO: 1381385 - RNA, 19 nt, Homo sapiens
  misc_RNA (1)...(19): siRNA sense strand
cagaugcugugcugucaaa

SEQ ID NO: 1381386 - RNA, 19 nt, Homo sapiens
  misc_RNA (1)...(19): siRNA sense strand
gaacgggauacauuacuug

SEQ ID NO: 1381387 - RNA, 19 nt, Homo sapiens
  misc_RNA (1)...(19): siRNA sense strand
gaucugagaacugauaaga

SEQ ID NO: 1381388 - RNA, 19 nt, Homo sapiens
  misc_RNA (1)...(19): siRNA sense strand
uaacaagaauggaggaaaa

SEQ ID NO: 1381389 - RNA, 19 nt, Homo sapiens
  misc_RNA (1)...(19): siRNA sense strand
uacaugaaguucuaaggaa

SEQ ID NO: 1381390 - RNA, 19 nt, Homo sapiens
  misc_RNA (1)...(19): siRNA sense strand
gaaaccuggucucuuccuu

SEQ ID NO: 1381391 - RNA, 19 nt, Homo sapiens
  misc_RNA (1)...(19): siRNA sense strand
guuauuguuucccaaagaa

SEQ ID NO: 1381392 - RNA, 19 nt, Homo sapiens
  misc_RNA (1)...(19): siRNA sense strand
ucugagaacugauaagaag

SEQ ID NO: 1381393 - RNA, 19 nt, Homo sapiens
  misc_RNA (1)...(19): siRNA sense strand
aauacacgcucuuuacuca

SEQ ID NO: 1381394 - RNA, 19 nt, Homo sapiens
  misc_RNA (1)...(19): siRNA sense strand
caacuuacggccaaggaaa

SEQ ID NO: 1381395 - RNA, 19 nt, Homo sapiens
  misc_RNA (1)...(19): siRNA sense strand
caaagaaauucaggaagag

SEQ ID NO: 1381396 - RNA, 19 nt, Homo sapiens
  misc_RNA (1)...(19): siRNA sense strand
ggagguaguagaaauguca

SEQ ID NO: 1381397 - RNA, 19 nt, Homo sapiens
  misc_RNA (1)...(19): siRNA sense strand
gccagugaauuucugaguu

SEQ ID NO: 1381398 - RNA, 19 nt, Homo sapiens
  misc_RNA (1)...(19): siRNA sense strand
uacaaaugcuuggagauga

SEQ ID NO: 1381399 - RNA, 19 nt, Homo sapiens
  misc_RNA (1)...(19): siRNA sense strand
ccucucauuuaucagaaua

SEQ ID NO: 1381400 - RNA, 19 nt, Homo sapiens
  misc_RNA (1)...(19): siRNA sense strand
caagagguccaagcuauug

SEQ ID NO: 1381401 - RNA, 19 nt, Homo sapiens
  misc_RNA (1)...(19): siRNA sense strand
ucgggauucucauacuuua

SEQ ID NO: 1381402 - RNA, 19 nt, Homo sapiens
  misc_RNA (1)...(19): siRNA sense strand
gguuauuguuucccaaaga

SEQ ID NO: 1381403 - RNA, 19 nt, Homo sapiens
  misc_RNA (1)...(19): siRNA sense strand
gccauaccuugcucuacua

SEQ ID NO: 1381404 - RNA, 19 nt, Homo sapiens
  misc_RNA (1)...(19): siRNA sense strand
caaggaggaggaucaaguu

SEQ ID NO: 1381405 - RNA, 19 nt, Homo sapiens
  misc_RNA (1)...(19): siRNA sense strand
ugugaugcauuccaacaaa

SEQ ID NO: 1381406 - RNA, 19 nt, Homo sapiens
  misc_RNA (1)...(19): siRNA sense strand
gaggugugaugcauuccaa

SEQ ID NO: 1381407 - RNA, 19 nt, Homo sapiens
  misc_RNA (1)...(19): siRNA sense strand
aaagauguuucucuguuuc

SEQ ID NO: 1381408 - RNA, 19 nt, Homo sapiens
  misc_RNA (1)...(19): siRNA sense strand
gggauguucuggugauauc

SEQ ID NO: 1381409 - RNA, 19 nt, Homo sapiens
  misc_RNA (1)...(19): siRNA sense strand
ugacaaaacuucucuagag

SEQ ID NO: 1381410 - RNA, 19 nt, Homo sapiens
  misc_RNA (1)...(19): siRNA sense strand
caggaagaguguucuaucu

SEQ ID NO: 1381411 - RNA, 19 nt, Homo sapiens
  misc_RNA (1)...(19): siRNA sense strand
ugaacgggauacauuacuu

SEQ ID NO: 1381412 - RNA, 19 nt, Homo sapiens
  misc_RNA (1)...(19): siRNA sense strand
ggugauaucagaagugcaa

SEQ ID NO: 1381413 - RNA, 19 nt, Homo sapiens
  misc_RNA (1)...(19): siRNA sense strand
gaaguucuaaggaaguaug

SEQ ID NO: 1381414 - RNA, 19 nt, Homo sapiens
  misc_RNA (1)...(19): siRNA sense strand
aauaugaacgggauacauu

SEQ ID NO: 1381415 - RNA, 19 nt, Homo sapiens
  misc_RNA (1)...(19): siRNA sense strand
cuauagaagcuaacaagaa

SEQ ID NO: 1381416 - RNA, 19 nt, Homo sapiens
  misc_RNA (1)...(19): siRNA sense strand
cgauguccucuuauauuua

SEQ ID NO: 1381417 - RNA, 19 nt, Homo sapiens
  misc_RNA (1)...(19): siRNA sense strand
auuggucgauguccucuua

SEQ ID NO: 1381418 - RNA, 19 nt, Homo sapiens
  misc_RNA (1)...(19): siRNA sense strand
agauaauucugguugaaga

SEQ ID NO: 1381419 - RNA, 19 nt, Homo sapiens
  misc_RNA (1)...(19): siRNA sense strand
ccuguggcaccaacaauua

SEQ ID NO: 1381420 - RNA, 19 nt, Homo sapiens
  misc_RNA (1)...(19): siRNA sense strand
gcgacacuuuggaagauug

SEQ ID NO: 1381421 - RNA, 19 nt, Homo sapiens
  misc_RNA (1)...(19): siRNA sense strand
ggaggaggaucaaguuuuc

SEQ ID NO: 1381422 - RNA, 19 nt, Homo sapiens
  misc_RNA (1)...(19): siRNA sense strand
gggauacauuacuuguuga

SEQ ID NO: 1381423 - RNA, 19 nt, Homo sapiens
  misc_RNA (1)...(19): siRNA sense strand
caauaaacagccuccaguu

SEQ ID NO: 1381424 - RNA, 19 nt, Homo sapiens
  misc_RNA (1)...(19): siRNA sense strand
aaucaagcuuccauauguu

SEQ ID NO: 1381425 - RNA, 19 nt, Homo sapiens
  misc_RNA (1)...(19): siRNA sense strand
caccaaaacuacauagauu

SEQ ID NO: 1381426 - RNA, 19 nt, Homo sapiens
  misc_RNA (1)...(19): siRNA sense strand
caguggagauaauaaucaa

SEQ ID NO: 1381427 - RNA, 19 nt, Homo sapiens
  misc_RNA (1)...(19): siRNA sense strand
ccaaggagacauggaagaa

SEQ ID NO: 1381428 - RNA, 19 nt, Homo sapiens
  misc_RNA (1)...(19): siRNA sense strand
gaauacacgcucuuuacuc

SEQ ID NO: 1381429 - RNA, 19 nt, Homo sapiens
  misc_RNA (1)...(19): siRNA sense strand
gcgacaaaguauaacaagu

SEQ ID NO: 1381430 - RNA, 19 nt, Homo sapiens
  misc_RNA (1)...(19): siRNA sense strand
gagcgacaaaguauaacaa

SEQ ID NO: 1381431 - RNA, 19 nt, Homo sapiens
  misc_RNA (1)...(19): siRNA sense strand
ucgguugcccucucauuua

SEQ ID NO: 1381432 - RNA, 19 nt, Homo sapiens
  misc_RNA (1)...(19): siRNA sense strand
ugacagggaacauggaaug

SEQ ID NO: 1381433 - RNA, 19 nt, Homo sapiens
  misc_RNA (1)...(19): siRNA sense strand
ggaauacacgcucuuuacu

SEQ ID NO: 1381434 - RNA, 19 nt, Homo sapiens
  misc_RNA (1)...(19): siRNA sense strand
guucuaaggaaguauguga

SEQ ID NO: 1381435 - RNA, 19 nt, Homo sapiens
  misc_RNA (1)...(19): siRNA sense strand
aaaaguaucgggaaaauug

SEQ ID NO: 1381436 - RNA, 19 nt, Homo sapiens
  misc_RNA (1)...(19): siRNA sense strand
acaaaugcuuggagaugau

SEQ ID NO: 1381437 - RNA, 19 nt, Homo sapiens
  misc_RNA (1)...(19): siRNA sense strand
gagagccagugaauuucug

SEQ ID NO: 1381438 - RNA, 19 nt, Homo sapiens
  misc_RNA (1)...(19): siRNA sense strand
acauagauuucuucaugga

SEQ ID NO: 1381439 - RNA, 19 nt, Homo sapiens
  misc_RNA (1)...(19): siRNA sense strand
ucagauagcaguuuucaaa

SEQ ID NO: 1381440 - RNA, 19 nt, Homo sapiens
  misc_RNA (1)...(19): siRNA sense strand
cuacuaagagcgacaaagu

SEQ ID NO: 1381441 - RNA, 19 nt, Homo sapiens
  misc_RNA (1)...(19): siRNA sense strand
ggaaugauagacccugaca

SEQ ID NO: 1381442 - RNA, 19 nt, Homo sapiens
  misc_RNA (1)...(19): siRNA sense strand
gguugaagauuuaccuaac

SEQ ID NO: 1381443 - RNA, 19 nt, Homo sapiens
  misc_RNA (1)...(19): siRNA sense strand
acuaagagcgacaaaguau

SEQ ID NO: 1381444 - RNA, 19 nt, Homo sapiens
  misc_RNA (1)...(19): siRNA sense strand
caaggagacauggaagaaa

SEQ ID NO: 1381445 - RNA, 19 nt, Homo sapiens
  misc_RNA (1)...(19): siRNA sense strand
uaucgggauucucauacuu

SEQ ID NO: 1381446 - RNA, 19 nt, Homo sapiens
  misc_RNA (1)...(19): siRNA sense strand
ugaaucaagcuuccauaug

SEQ ID NO: 1381447 - RNA, 19 nt, Homo sapiens
  misc_RNA (1)...(19): siRNA sense strand
cugaggagguaguagaaau

SEQ ID NO: 1381448 - RNA, 19 nt, Homo sapiens
  misc_RNA (1)...(19): siRNA sense strand
gucgauguccucuuauauu

SEQ ID NO: 1381449 - RNA, 19 nt, Homo sapiens
  misc_RNA (1)...(19): siRNA sense strand
gaaucaagcuuccauaugu

SEQ ID NO: 1381450 - RNA, 19 nt, Homo sapiens
  misc_RNA (1)...(19): siRNA sense strand
gcaaagauguuucucuguu

SEQ ID NO: 1381451 - RNA, 19 nt, Homo sapiens
  misc_RNA (1)...(19): siRNA sense strand
acacaugccuggagacuua

SEQ ID NO: 1381452 - RNA, 19 nt, Homo sapiens
  misc_RNA (1)...(19): siRNA sense strand
caacaaagcccgaggauau

SEQ ID NO: 1381453 - RNA, 19 nt, Homo sapiens
  misc_RNA (1)...(19): siRNA sense strand
ccaaagaaauucaggaaga

SEQ ID NO: 1381454 - RNA, 19 nt, Homo sapiens
  misc_RNA (1)...(19): siRNA sense strand
cuacauagauuucuucaug

SEQ ID NO: 1381455 - RNA, 19 nt, Homo sapiens
  misc_RNA (1)...(19): siRNA sense strand
ggaaauugaugauauugug

SEQ ID NO: 1381456 - RNA, 19 nt, Homo sapiens
  misc_RNA (1)...(19): siRNA sense strand
aaacucagcuauugccaua

SEQ ID NO: 1381457 - RNA, 19 nt, Homo sapiens
  misc_RNA (1)...(19): siRNA sense strand
gaagauaauucugguugaa

SEQ ID NO: 1381458 - RNA, 19 nt, Homo sapiens
  misc_RNA (1)...(19): siRNA sense strand
caaagauguuucucuguuu

SEQ ID NO: 1381459 - RNA, 19 nt, Homo sapiens
  misc_RNA (1)...(19): siRNA sense strand
guacaagaguggauuaauc

SEQ ID NO: 1381460 - RNA, 19 nt, Homo sapiens
  misc_RNA (1)...(19): siRNA sense strand
ggaagaguguucuaucuca

SEQ ID NO: 1381461 - RNA, 19 nt, Homo sapiens
  misc_RNA (1)...(19): siRNA sense strand
gaaagacaacgaccuuaaa

SEQ ID NO: 1381462 - RNA, 19 nt, Homo sapiens
  misc_RNA (1)...(19): siRNA sense strand
ggaaagacaacgaccuuaa

SEQ ID NO: 1381463 - RNA, 19 nt, Homo sapiens
  misc_RNA (1)...(19): siRNA sense strand
caaagaguuucuacuaaga

SEQ ID NO: 1381464 - RNA, 19 nt, Homo sapiens
  misc_RNA (1)...(19): siRNA sense strand
ccucagugguuucuaauaa

SEQ ID NO: 1381465 - RNA, 19 nt, Homo sapiens
  misc_RNA (1)...(19): siRNA sense strand
ccagugaauuucugaguuu

SEQ ID NO: 1381466 - RNA, 19 nt, Homo sapiens
  misc_RNA (1)...(19): siRNA sense strand
cagggaacauggaaugaua

SEQ ID NO: 1381467 - RNA, 19 nt, Homo sapiens
  misc_RNA (1)...(19): siRNA sense strand
uaagagcgacaaaguauaa

SEQ ID NO: 1381468 - RNA, 19 nt, Homo sapiens
  misc_RNA (1)...(19): siRNA sense strand
gagcaucuuuaacagaauu

SEQ ID NO: 1381469 - RNA, 19 nt, Homo sapiens
  misc_RNA (1)...(19): siRNA sense strand
ccuggagacuuauuuaauu

SEQ ID NO: 1381470 - RNA, 19 nt, Homo sapiens
  misc_RNA (1)...(19): siRNA sense strand
cgacaaaguauaacaaguu

SEQ ID NO: 1381471 - RNA, 19 nt, Homo sapiens
  misc_RNA (1)...(19): siRNA sense strand
ggagcaugguauucaagua

SEQ ID NO: 1381472 - RNA, 19 nt, Homo sapiens
  misc_RNA (1)...(19): siRNA sense strand
gaagaguguucuaucucaa

SEQ ID NO: 1381473 - RNA, 19 nt, Homo sapiens
  misc_RNA (1)...(19): siRNA sense strand
ucaaagaguuucuacuaag

SEQ ID NO: 1381474 - RNA, 19 nt, Homo sapiens
  misc_RNA (1)...(19): siRNA sense strand
gagaacugauaagaagaua

SEQ ID NO: 1381475 - RNA, 19 nt, Homo sapiens
  misc_RNA (1)...(19): siRNA sense strand
gcucuuuacucagggaaua

SEQ ID NO: 1381476 - RNA, 19 nt, Homo sapiens
  misc_RNA (1)...(19): siRNA sense strand
cgggauacauuacuuguug

SEQ ID NO: 1381477 - RNA, 19 nt, Homo sapiens
  misc_RNA (1)...(19): siRNA sense strand
ucgauguccucuuauauuu

SEQ ID NO: 1381478 - RNA, 19 nt, Homo sapiens
  misc_RNA (1)...(19): siRNA sense strand
agauuuaccuaaccaguuu

SEQ ID NO: 1381479 - RNA, 19 nt, Homo sapiens
  misc_RNA (1)...(19): siRNA sense strand
ggaaguaugugaggauugg

SEQ ID NO: 1381480 - RNA, 19 nt, Homo sapiens
  misc_RNA (1)...(19): siRNA sense strand
gauaucagaagugcaauaa

SEQ ID NO: 1381481 - RNA, 19 nt, Homo sapiens
  misc_RNA (1)...(19): siRNA sense strand
gcaccaacaauuaugauga

SEQ ID NO: 1381482 - RNA, 19 nt, Homo sapiens
  misc_RNA (1)...(19): siRNA sense strand
aaacaggguggaucuauuu

SEQ ID NO: 1381483 - RNA, 19 nt, Homo sapiens
  misc_RNA (1)...(19): siRNA sense strand
gaugaucugagaacugaua

SEQ ID NO: 1381484 - RNA, 19 nt, Homo sapiens
  misc_RNA (1)...(19): siRNA sense strand
ggguggaucuauuuuauua

SEQ ID NO: 1381485 - RNA, 19 nt, Homo sapiens
  misc_RNA (1)...(19): siRNA sense strand
uaucagaagugcaauaaac

SEQ ID NO: 1381486 - RNA, 19 nt, Homo sapiens
  misc_RNA (1)...(19): siRNA sense strand
ugugagagccagugaauuu

SEQ ID NO: 1381487 - RNA, 19 nt, Homo sapiens
  misc_RNA (1)...(19): siRNA sense strand
caaaggagcaugguauuca

SEQ ID NO: 1381488 - RNA, 19 nt, Homo sapiens
  misc_RNA (1)...(19): siRNA sense strand
ccggaaaccuggucucuuc

SEQ ID NO: 1381489 - RNA, 19 nt, Homo sapiens
  misc_RNA (1)...(19): siRNA sense strand
gaagcgacacuuuggaaga

SEQ ID NO: 1381490 - RNA, 19 nt, Homo sapiens
  misc_RNA (1)...(19): siRNA sense strand
cgagaggugugaugcauuc

SEQ ID NO: 1381491 - RNA, 19 nt, Homo sapiens
  misc_RNA (1)...(19): siRNA sense strand
cagaugcugugcugucaaa

SEQ ID NO: 1381492 - RNA, 19 nt, Homo sapiens
  misc_RNA (1)...(19): siRNA sense strand
caccaacaauuaugaugaa

SEQ ID NO: 1381493 - RNA, 19 nt, Homo sapiens
  misc_RNA (1)...(19): siRNA sense strand
gaacgggauacauuacuug

SEQ ID NO: 1381494 - RNA, 19 nt, Homo sapiens
  misc_RNA (1)...(19): siRNA sense strand
gaucugagaacugauaaga

SEQ ID NO: 1381495 - RNA, 19 nt, Homo sapiens
  misc_RNA (1)...(19): siRNA sense strand
uaacaagaauggaggaaaa

SEQ ID NO: 1381496 - RNA, 19 nt, Homo sapiens
  misc_RNA (1)...(19): siRNA sense strand
caaguacaagaguggauua

SEQ ID NO: 1381497 - RNA, 19 nt, Homo sapiens
  misc_RNA (1)...(19): siRNA sense strand
gaaaccuggucucuuccuu

SEQ ID NO: 1381498 - RNA, 19 nt, Homo sapiens
  misc_RNA (1)...(19): siRNA sense strand
guuauuguuucccaaagaa

SEQ ID NO: 1381499 - RNA, 19 nt, Homo sapiens
  misc_RNA (1)...(19): siRNA sense strand
uacaugaaguucuaaggaa

SEQ ID NO: 1381500 - RNA, 19 nt, Homo sapiens
  misc_RNA (1)...(19): siRNA sense strand
ucugagaacugauaagaag

SEQ ID NO: 1381501 - RNA, 19 nt, Homo sapiens
  misc_RNA (1)...(19): siRNA sense strand
aauacacgcucuuuacuca

SEQ ID NO: 1381502 - RNA, 19 nt, Homo sapiens
  misc_RNA (1)...(19): siRNA sense strand
caacuuacggccaaggaaa

SEQ ID NO: 1381503 - RNA, 19 nt, Homo sapiens
  misc_RNA (1)...(19): siRNA sense strand
caaagaaauucaggaagag

SEQ ID NO: 1381504 - RNA, 19 nt, Homo sapiens
  misc_RNA (1)...(19): siRNA sense strand
ggagguaguagaaauguca

SEQ ID NO: 1381505 - RNA, 19 nt, Homo sapiens
  misc_RNA (1)...(19): siRNA sense strand
gccagugaauuucugaguu

SEQ ID NO: 1381506 - RNA, 19 nt, Homo sapiens
  misc_RNA (1)...(19): siRNA sense strand
uacaaaugcuuggagauga

SEQ ID NO: 1381507 - RNA, 19 nt, Homo sapiens
  misc_RNA (1)...(19): siRNA sense strand
ugaacuugcugugcauaaa

SEQ ID NO: 1381508 - RNA, 19 nt, Homo sapiens
  misc_RNA (1)...(19): siRNA sense strand
ccucucauuuaucagaaua

SEQ ID NO: 1381509 - RNA, 19 nt, Homo sapiens
  misc_RNA (1)...(19): siRNA sense strand
caagagguccaagcuauug

SEQ ID NO: 1381510 - RNA, 19 nt, Homo sapiens
  misc_RNA (1)...(19): siRNA sense strand
ucgggauucucauacuuua

SEQ ID NO: 1381511 - RNA, 19 nt, Homo sapiens
  misc_RNA (1)...(19): siRNA sense strand
gguuauuguuucccaaaga

SEQ ID NO: 1381512 - RNA, 19 nt, Homo sapiens
  misc_RNA (1)...(19): siRNA sense strand
gccauaccuugcucuacua

SEQ ID NO: 1381513 - RNA, 19 nt, Homo sapiens
  misc_RNA (1)...(19): siRNA sense strand
caaggaggaggaucaaguu

SEQ ID NO: 1381514 - RNA, 19 nt, Homo sapiens
  misc_RNA (1)...(19): siRNA sense strand
ugugaugcauuccaacaaa

SEQ ID NO: 1381515 - RNA, 19 nt, Homo sapiens
  misc_RNA (1)...(19): siRNA sense strand
gaggugugaugcauuccaa

SEQ ID NO: 1381516 - RNA, 19 nt, Homo sapiens
  misc_RNA (1)...(19): siRNA sense strand
aaagauguuucucuguuuc

SEQ ID NO: 1381517 - RNA, 19 nt, Homo sapiens
  misc_RNA (1)...(19): siRNA sense strand
gggauguucuggugauauc

SEQ ID NO: 1381518 - RNA, 19 nt, Homo sapiens
  misc_RNA (1)...(19): siRNA sense strand
ugacaaaacuucucuagag

SEQ ID NO: 1381519 - RNA, 19 nt, Homo sapiens
  misc_RNA (1)...(19): siRNA sense strand
caggaagaguguucuaucu

SEQ ID NO: 1381520 - RNA, 19 nt, Homo sapiens
  misc_RNA (1)...(19): siRNA sense strand
ugaacgggauacauuacuu

SEQ ID NO: 1381521 - RNA, 19 nt, Homo sapiens
  misc_RNA (1)...(19): siRNA sense strand
ggugauaucagaagugcaa

SEQ ID NO: 1381522 - RNA, 19 nt, Homo sapiens
  misc_RNA (1)...(19): siRNA sense strand
agauaauucugguugaaga

SEQ ID NO: 1381523 - RNA, 19 nt, Homo sapiens
  misc_RNA (1)...(19): siRNA sense strand
aaaggagcaugguauucaa

SEQ ID NO: 1381524 - RNA, 19 nt, Homo sapiens
  misc_RNA (1)...(19): siRNA sense strand
aauaugaacgggauacauu

SEQ ID NO: 1381525 - RNA, 19 nt, Homo sapiens
  misc_RNA (1)...(19): siRNA sense strand
cuauagaagcuaacaagaa

SEQ ID NO: 1381526 - RNA, 19 nt, Homo sapiens
  misc_RNA (1)...(19): siRNA sense strand
cgauguccucuuauauuua

SEQ ID NO: 1381527 - RNA, 19 nt, Homo sapiens
  misc_RNA (1)...(19): siRNA sense strand
auuggucgauguccucuua

SEQ ID NO: 1381528 - RNA, 19 nt, Homo sapiens
  misc_RNA (1)...(19): siRNA sense strand
gaaguucuaaggaaguaug

SEQ ID NO: 1381529 - RNA, 19 nt, Homo sapiens
  misc_RNA (1)...(19): siRNA sense strand
ccuguggcaccaacaauua

SEQ ID NO: 1381530 - RNA, 19 nt, Homo sapiens
  misc_RNA (1)...(19): siRNA sense strand
gcgacacuuuggaagauug

SEQ ID NO: 1381531 - RNA, 19 nt, Homo sapiens
  misc_RNA (1)...(19): siRNA sense strand
ggaggaggaucaaguuuuc

SEQ ID NO: 1381532 - RNA, 19 nt, Homo sapiens
  misc_RNA (1)...(19): siRNA sense strand
gggauacauuacuuguuga

SEQ ID NO: 1381533 - RNA, 19 nt, Homo sapiens
  misc_RNA (1)...(19): siRNA sense strand
uaucaaaggagcaugguau

SEQ ID NO: 1381534 - RNA, 19 nt, Homo sapiens
  misc_RNA (1)...(19): siRNA sense strand
aaucaagcuuccauauguu

SEQ ID NO: 1381535 - RNA, 19 nt, Homo sapiens
  misc_RNA (1)...(19): siRNA sense strand
caccaaaacuacauagauu

SEQ ID NO: 1381536 - RNA, 19 nt, Homo sapiens
  misc_RNA (1)...(19): siRNA sense strand
caauaaacagccuccaguu

SEQ ID NO: 1381537 - RNA, 19 nt, Homo sapiens
  misc_RNA (1)...(19): siRNA sense strand
gagcgacaaaguauaacaa

SEQ ID NO: 1381538 - RNA, 19 nt, Homo sapiens
  misc_RNA (1)...(19): siRNA sense strand
ccaaggagacauggaagaa

SEQ ID NO: 1381539 - RNA, 19 nt, Homo sapiens
  misc_RNA (1)...(19): siRNA sense strand
gaauacacgcucuuuacuc

SEQ ID NO: 1381540 - RNA, 19 nt, Homo sapiens
  misc_RNA (1)...(19): siRNA sense strand
caguggagauaauaaucaa

SEQ ID NO: 1381541 - RNA, 19 nt, Homo sapiens
  misc_RNA (1)...(19): siRNA sense strand
gcgacaaaguauaacaagu

SEQ ID NO: 1381542 - RNA, 19 nt, Homo sapiens
  misc_RNA (1)...(19): siRNA sense strand
gcaugguauucaaguacaa

SEQ ID NO: 1381543 - RNA, 19 nt, Homo sapiens
  misc_RNA (1)...(19): siRNA sense strand
ugacagggaacauggaaug

SEQ ID NO: 1381544 - RNA, 19 nt, Homo sapiens
  misc_RNA (1)...(19): siRNA sense strand
ggaauacacgcucuuuacu

SEQ ID NO: 1381545 - RNA, 19 nt, Homo sapiens
  misc_RNA (1)...(19): siRNA sense strand
ucgguugcccucucauuua

SEQ ID NO: 1381546 - RNA, 19 nt, Homo sapiens
  misc_RNA (1)...(19): siRNA sense strand
gagagccagugaauuucug

SEQ ID NO: 1381547 - RNA, 19 nt, Homo sapiens
  misc_RNA (1)...(19): siRNA sense strand
aaaaguaucgggaaaauug

SEQ ID NO: 1381548 - RNA, 19 nt, Homo sapiens
  misc_RNA (1)...(19): siRNA sense strand
gcaugaacuugcugugcau

SEQ ID NO: 1381549 - RNA, 19 nt, Homo sapiens
  misc_RNA (1)...(19): siRNA sense strand
gaaucaagcuuccauaugu

SEQ ID NO: 1381550 - RNA, 19 nt, Homo sapiens
  misc_RNA (1)...(19): siRNA sense strand
gcaaagauguuucucuguu

SEQ ID NO: 1381551 - RNA, 19 nt, Homo sapiens
  misc_RNA (1)...(19): siRNA sense strand
acacaugccuggagacuua

SEQ ID NO: 1381552 - RNA, 19 nt, Homo sapiens
  misc_RNA (1)...(19): siRNA sense strand
caacaaagcccgaggauau

SEQ ID NO: 1381553 - RNA, 19 nt, Homo sapiens
  misc_RNA (1)...(19): siRNA sense strand
ccaaagaaauucaggaaga

SEQ ID NO: 1381554 - RNA, 19 nt, Homo sapiens
  misc_RNA (1)...(19): siRNA sense strand
cuacauagauuucuucaug

SEQ ID NO: 1381555 - RNA, 19 nt, Homo sapiens
  misc_RNA (1)...(19): siRNA sense strand
ggaaauugaugauauugug

SEQ ID NO: 1381556 - RNA, 19 nt, Homo sapiens
  misc_RNA (1)...(19): siRNA sense strand
aaacucagcuauugccaua

SEQ ID NO: 1381557 - RNA, 19 nt, Homo sapiens
  misc_RNA (1)...(19): siRNA sense strand
gaagauaauucugguugaa

SEQ ID NO: 1381558 - RNA, 19 nt, Homo sapiens
  misc_RNA (1)...(19): siRNA sense strand
caaagauguuucucuguuu

SEQ ID NO: 1381559 - RNA, 19 nt, Homo sapiens
  misc_RNA (1)...(19): siRNA sense strand
guacaagaguggauuaauc

SEQ ID NO: 1381560 - RNA, 19 nt, Homo sapiens
  misc_RNA (1)...(19): siRNA sense strand
ggaagaguguucuaucuca

SEQ ID NO: 1381561 - RNA, 19 nt, Homo sapiens
  misc_RNA (1)...(19): siRNA sense strand
gaaagacaacgaccuuaaa

SEQ ID NO: 1381562 - RNA, 19 nt, Homo sapiens
  misc_RNA (1)...(19): siRNA sense strand
ggaaagacaacgaccuuaa

SEQ ID NO: 1381563 - RNA, 19 nt, Homo sapiens
  misc_RNA (1)...(19): siRNA sense strand
caaagaguuucuacuaaga

SEQ ID NO: 1381564 - RNA, 19 nt, Homo sapiens
  misc_RNA (1)...(19): siRNA sense strand
ccucagugguuucuaauaa

SEQ ID NO: 1381565 - RNA, 19 nt, Homo sapiens
  misc_RNA (1)...(19): siRNA sense strand
ccagugaauuucugaguuu

SEQ ID NO: 1381566 - RNA, 19 nt, Homo sapiens
  misc_RNA (1)...(19): siRNA sense strand
cagggaacauggaaugaua

SEQ ID NO: 1381567 - RNA, 19 nt, Homo sapiens
  misc_RNA (1)...(19): siRNA sense strand
uaagagcgacaaaguauaa

SEQ ID NO: 1381568 - RNA, 19 nt, Homo sapiens
  misc_RNA (1)...(19): siRNA sense strand
gagcaucuuuaacagaauu

SEQ ID NO: 1381569 - RNA, 19 nt, Homo sapiens
  misc_RNA (1)...(19): siRNA sense strand
ccuggagacuuauuuaauu

SEQ ID NO: 1381570 - RNA, 19 nt, Homo sapiens
  misc_RNA (1)...(19): siRNA sense strand
cgacaaaguauaacaaguu

SEQ ID NO: 1381571 - RNA, 19 nt, Homo sapiens
  misc_RNA (1)...(19): siRNA sense strand
ggagcaugguauucaagua

SEQ ID NO: 1381572 - RNA, 19 nt, Homo sapiens
  misc_RNA (1)...(19): siRNA sense strand
gaagaguguucuaucucaa

SEQ ID NO: 1381573 - RNA, 19 nt, Homo sapiens
  misc_RNA (1)...(19): siRNA sense strand
ucaaagaguuucuacuaag

SEQ ID NO: 1381574 - RNA, 19 nt, Homo sapiens
  misc_RNA (1)...(19): siRNA sense strand
gagaacugauaagaagaua

SEQ ID NO: 1381575 - RNA, 19 nt, Homo sapiens
  misc_RNA (1)...(19): siRNA sense strand
gcucuuuacucagggaaua

SEQ ID NO: 1381576 - RNA, 19 nt, Homo sapiens
  misc_RNA (1)...(19): siRNA sense strand
cgggauacauuacuuguug

SEQ ID NO: 1381577 - RNA, 19 nt, Homo sapiens
  misc_RNA (1)...(19): siRNA sense strand
ucgauguccucuuauauuu

SEQ ID NO: 1381578 - RNA, 19 nt, Homo sapiens
  misc_RNA (1)...(19): siRNA sense strand
agauuuaccuaaccaguuu

SEQ ID NO: 1381579 - RNA, 19 nt, Homo sapiens
  misc_RNA (1)...(19): siRNA sense strand
ggaaguaugugaggauugg

SEQ ID NO: 1381580 - RNA, 19 nt, Homo sapiens
  misc_RNA (1)...(19): siRNA sense strand
gauaucagaagugcaauaa

SEQ ID NO: 1381581 - RNA, 19 nt, Homo sapiens
  misc_RNA (1)...(19): siRNA sense strand
gcaccaacaauuaugauga

SEQ ID NO: 1381582 - RNA, 19 nt, Homo sapiens
  misc_RNA (1)...(19): siRNA sense strand
aaacaggguggaucuauuu

SEQ ID NO: 1381583 - RNA, 19 nt, Homo sapiens
  misc_RNA (1)...(19): siRNA sense strand
gaugaucugagaacugaua

SEQ ID NO: 1381584 - RNA, 19 nt, Homo sapiens
  misc_RNA (1)...(19): siRNA sense strand
ggguggaucuauuuuauua

SEQ ID NO: 1381585 - RNA, 19 nt, Homo sapiens
  misc_RNA (1)...(19): siRNA sense strand
uaucagaagugcaauaaac

SEQ ID NO: 1381586 - RNA, 19 nt, Homo sapiens
  misc_RNA (1)...(19): siRNA sense strand
ugugagagccagugaauuu

SEQ ID NO: 1381587 - RNA, 19 nt, Homo sapiens
  misc_RNA (1)...(19): siRNA sense strand
caaaggagcaugguauuca

SEQ ID NO: 1381588 - RNA, 19 nt, Homo sapiens
  misc_RNA (1)...(19): siRNA sense strand
ccggaaaccuggucucuuc

SEQ ID NO: 1381589 - RNA, 19 nt, Homo sapiens
  misc_RNA (1)...(19): siRNA sense strand
gaagcgacacuuuggaaga

SEQ ID NO: 1381590 - RNA, 19 nt, Homo sapiens
  misc_RNA (1)...(19): siRNA sense strand
cgagaggugugaugcauuc

SEQ ID NO: 1381591 - RNA, 19 nt, Homo sapiens
  misc_RNA (1)...(19): siRNA sense strand
cagaugcugugcugucaaa

SEQ ID NO: 1381592 - RNA, 19 nt, Homo sapiens
  misc_RNA (1)...(19): siRNA sense strand
caccaacaauuaugaugaa

SEQ ID NO: 1381593 - RNA, 19 nt, Homo sapiens
  misc_RNA (1)...(19): siRNA sense strand
gaacgggauacauuacuug

SEQ ID NO: 1381594 - RNA, 19 nt, Homo sapiens
  misc_RNA (1)...(19): siRNA sense strand
gaucugagaacugauaaga

SEQ ID NO: 1381595 - RNA, 19 nt, Homo sapiens
  misc_RNA (1)...(19): siRNA sense strand
uaacaagaauggaggaaaa

SEQ ID NO: 1381596 - RNA, 19 nt, Homo sapiens
  misc_RNA (1)...(19): siRNA sense strand
caaguacaagaguggauua

SEQ ID NO: 1381597 - RNA, 19 nt, Homo sapiens
  misc_RNA (1)...(19): siRNA sense strand
gaaaccuggucucuuccuu

SEQ ID NO: 1381598 - RNA, 19 nt, Homo sapiens
  misc_RNA (1)...(19): siRNA sense strand
guuauuguuucccaaagaa

SEQ ID NO: 1381599 - RNA, 19 nt, Homo sapiens
  misc_RNA (1)...(19): siRNA sense strand
uacaugaaguucuaaggaa

SEQ ID NO: 1381600 - RNA, 19 nt, Homo sapiens
  misc_RNA (1)...(19): siRNA sense strand
ucugagaacugauaagaag

SEQ ID NO: 1381601 - RNA, 19 nt, Homo sapiens
  misc_RNA (1)...(19): siRNA sense strand
aauacacgcucuuuacuca

SEQ ID NO: 1381602 - RNA, 19 nt, Homo sapiens
  misc_RNA (1)...(19): siRNA sense strand
caacuuacggccaaggaaa

SEQ ID NO: 1381603 - RNA, 19 nt, Homo sapiens
  misc_RNA (1)...(19): siRNA sense strand
caaagaaauucaggaagag

SEQ ID NO: 1381604 - RNA, 19 nt, Homo sapiens
  misc_RNA (1)...(19): siRNA sense strand
ggagguaguagaaauguca

SEQ ID NO: 1381605 - RNA, 19 nt, Homo sapiens
  misc_RNA (1)...(19): siRNA sense strand
gccagugaauuucugaguu

SEQ ID NO: 1381606 - RNA, 19 nt, Homo sapiens
  misc_RNA (1)...(19): siRNA sense strand
uacaaaugcuuggagauga

SEQ ID NO: 1381607 - RNA, 19 nt, Homo sapiens
  misc_RNA (1)...(19): siRNA sense strand
ugaacuugcugugcauaaa

SEQ ID NO: 1381608 - RNA, 19 nt, Homo sapiens
  misc_RNA (1)...(19): siRNA sense strand
ccucucauuuaucagaaua

SEQ ID NO: 1381609 - RNA, 19 nt, Homo sapiens
  misc_RNA (1)...(19): siRNA sense strand
caagagguccaagcuauug

SEQ ID NO: 1381610 - RNA, 19 nt, Homo sapiens
  misc_RNA (1)...(19): siRNA sense strand
ucgggauucucauacuuua

SEQ ID NO: 1381611 - RNA, 19 nt, Homo sapiens
  misc_RNA (1)...(19): siRNA sense strand
gguuauuguuucccaaaga

SEQ ID NO: 1381612 - RNA, 19 nt, Homo sapiens
  misc_RNA (1)...(19): siRNA sense strand
gccauaccuugcucuacua

SEQ ID NO: 1381613 - RNA, 19 nt, Homo sapiens
  misc_RNA (1)...(19): siRNA sense strand
caaggaggaggaucaaguu

SEQ ID NO: 1381614 - RNA, 19 nt, Homo sapiens
  misc_RNA (1)...(19): siRNA sense strand
ugugaugcauuccaacaaa

SEQ ID NO: 1381615 - RNA, 19 nt, Homo sapiens
  misc_RNA (1)...(19): siRNA sense strand
gaggugugaugcauuccaa

SEQ ID NO: 1381616 - RNA, 19 nt, Homo sapiens
  misc_RNA (1)...(19): siRNA sense strand
aaagauguuucucuguuuc

SEQ ID NO: 1381617 - RNA, 19 nt, Homo sapiens
  misc_RNA (1)...(19): siRNA sense strand
gggauguucuggugauauc

SEQ ID NO: 1381618 - RNA, 19 nt, Homo sapiens
  misc_RNA (1)...(19): siRNA sense strand
ugacaaaacuucucuagag

SEQ ID NO: 1381619 - RNA, 19 nt, Homo sapiens
  misc_RNA (1)...(19): siRNA sense strand
caggaagaguguucuaucu

SEQ ID NO: 1381620 - RNA, 19 nt, Homo sapiens
  misc_RNA (1)...(19): siRNA sense strand
ugaacgggauacauuacuu

SEQ ID NO: 1381621 - RNA, 19 nt, Homo sapiens
  misc_RNA (1)...(19): siRNA sense strand
ggugauaucagaagugcaa

SEQ ID NO: 1381622 - RNA, 19 nt, Homo sapiens
  misc_RNA (1)...(19): siRNA sense strand
agauaauucugguugaaga

SEQ ID NO: 1381623 - RNA, 19 nt, Homo sapiens
  misc_RNA (1)...(19): siRNA sense strand
aaaggagcaugguauucaa

SEQ ID NO: 1381624 - RNA, 19 nt, Homo sapiens
  misc_RNA (1)...(19): siRNA sense strand
aauaugaacgggauacauu

SEQ ID NO: 1381625 - RNA, 19 nt, Homo sapiens
  misc_RNA (1)...(19): siRNA sense strand
cuauagaagcuaacaagaa

SEQ ID NO: 1381626 - RNA, 19 nt, Homo sapiens
  misc_RNA (1)...(19): siRNA sense strand
cgauguccucuuauauuua

SEQ ID NO: 1381627 - RNA, 19 nt, Homo sapiens
  misc_RNA (1)...(19): siRNA sense strand
auuggucgauguccucuua

SEQ ID NO: 1381628 - RNA, 19 nt, Homo sapiens
  misc_RNA (1)...(19): siRNA sense strand
gaaguucuaaggaaguaug

SEQ ID NO: 1381629 - RNA, 19 nt, Homo sapiens
  misc_RNA (1)...(19): siRNA sense strand
ccuguggcaccaacaauua

SEQ ID NO: 1381630 - RNA, 19 nt, Homo sapiens
  misc_RNA (1)...(19): siRNA sense strand
gcgacacuuuggaagauug

SEQ ID NO: 1381631 - RNA, 19 nt, Homo sapiens
  misc_RNA (1)...(19): siRNA sense strand
ggaggaggaucaaguuuuc

SEQ ID NO: 1381632 - RNA, 19 nt, Homo sapiens
  misc_RNA (1)...(19): siRNA sense strand
gggauacauuacuuguuga

SEQ ID NO: 1381633 - RNA, 19 nt, Homo sapiens
  misc_RNA (1)...(19): siRNA sense strand
uaucaaaggagcaugguau

SEQ ID NO: 1381634 - RNA, 19 nt, Homo sapiens
  misc_RNA (1)...(19): siRNA sense strand
aaucaagcuuccauauguu

SEQ ID NO: 1381635 - RNA, 19 nt, Homo sapiens
  misc_RNA (1)...(19): siRNA sense strand
caccaaaacuacauagauu

SEQ ID NO: 1381636 - RNA, 19 nt, Homo sapiens
  misc_RNA (1)...(19): siRNA sense strand
caauaaacagccuccaguu

SEQ ID NO: 1381637 - RNA, 19 nt, Homo sapiens
  misc_RNA (1)...(19): siRNA sense strand
gagcgacaaaguauaacaa

SEQ ID NO: 1381638 - RNA, 19 nt, Homo sapiens
  misc_RNA (1)...(19): siRNA sense strand
ccaaggagacauggaagaa

SEQ ID NO: 1381639 - RNA, 19 nt, Homo sapiens
  misc_RNA (1)...(19): siRNA sense strand
gaauacacgcucuuuacuc

SEQ ID NO: 1381640 - RNA, 19 nt, Homo sapiens
  misc_RNA (1)...(19): siRNA sense strand
caguggagauaauaaucaa

SEQ ID NO: 1381641 - RNA, 19 nt, Homo sapiens
  misc_RNA (1)...(19): siRNA sense strand
gcgacaaaguauaacaagu

SEQ ID NO: 1381642 - RNA, 19 nt, Homo sapiens
  misc_RNA (1)...(19): siRNA sense strand
gcaugguauucaaguacaa

SEQ ID NO: 1381643 - RNA, 19 nt, Homo sapiens
  misc_RNA (1)...(19): siRNA sense strand
ugacagggaacauggaaug

SEQ ID NO: 1381644 - RNA, 19 nt, Homo sapiens
  misc_RNA (1)...(19): siRNA sense strand
ggaauacacgcucuuuacu

SEQ ID NO: 1381645 - RNA, 19 nt, Homo sapiens
  misc_RNA (1)...(19): siRNA sense strand
ucgguugcccucucauuua

SEQ ID NO: 1381646 - RNA, 19 nt, Homo sapiens
  misc_RNA (1)...(19): siRNA sense strand
gagagccagugaauuucug

SEQ ID NO: 1381647 - RNA, 19 nt, Homo sapiens
  misc_RNA (1)...(19): siRNA sense strand
aaaaguaucgggaaaauug

SEQ ID NO: 1381648 - RNA, 19 nt, Homo sapiens
  misc_RNA (1)...(19): siRNA sense strand
gcaugaacuugcugugcau

SEQ ID NO: 1381649 - RNA, 19 nt, Homo sapiens
  misc_RNA (1)...(19): siRNA sense strand
gaaucaagcuuccauaugu

SEQ ID NO: 1381650 - RNA, 19 nt, Homo sapiens
  misc_RNA (1)...(19): siRNA sense strand
gcaaagauguuucucuguu

SEQ ID NO: 1381651 - RNA, 19 nt, Homo sapiens
  misc_RNA (1)...(19): siRNA sense strand
acacaugccuggagacuua

SEQ ID NO: 1381652 - RNA, 19 nt, Homo sapiens
  misc_RNA (1)...(19): siRNA sense strand
caacaaagcccgaggauau

SEQ ID NO: 1381653 - RNA, 19 nt, Homo sapiens
  misc_RNA (1)...(19): siRNA sense strand
ccaaagaaauucaggaaga

SEQ ID NO: 1381654 - RNA, 19 nt, Homo sapiens
  misc_RNA (1)...(19): siRNA sense strand
cuacauagauuucuucaug

SEQ ID NO: 1381655 - RNA, 19 nt, Homo sapiens
  misc_RNA (1)...(19): siRNA sense strand
ggaaauugaugauauugug

SEQ ID NO: 1381656 - RNA, 19 nt, Homo sapiens
  misc_RNA (1)...(19): siRNA sense strand
aaacucagcuauugccaua

SEQ ID NO: 1381657 - RNA, 19 nt, Homo sapiens
  misc_RNA (1)...(19): siRNA sense strand
gaagauaauucugguugaa

SEQ ID NO: 1381658 - RNA, 19 nt, Homo sapiens
  misc_RNA (1)...(19): siRNA sense strand
caaagauguuucucuguuu

SEQ ID NO: 1381659 - RNA, 19 nt, Homo sapiens
  misc_RNA (1)...(19): siRNA sense strand
guacaagaguggauuaauc

SEQ ID NO: 1381660 - RNA, 19 nt, Homo sapiens
  misc_RNA (1)...(19): siRNA sense strand
ggaagaguguucuaucuca

SEQ ID NO: 1381661 - RNA, 19 nt, Homo sapiens
  misc_RNA (1)...(19): siRNA sense strand
gaaagacaacgaccuuaaa

SEQ ID NO: 1381662 - RNA, 19 nt, Homo sapiens
  misc_RNA (1)...(19): siRNA sense strand
ggaaagacaacgaccuuaa

SEQ ID NO: 1381663 - RNA, 19 nt, Homo sapiens
  misc_RNA (1)...(19): siRNA sense strand
caaagaguuucuacuaaga

SEQ ID NO: 1381664 - RNA, 19 nt, Homo sapiens
  misc_RNA (1)...(19): siRNA sense strand
ccucagugguuucuaauaa

SEQ ID NO: 1381665 - RNA, 19 nt, Homo sapiens
  misc_RNA (1)...(19): siRNA sense strand
ccagugaauuucugaguuu

SEQ ID NO: 1381666 - RNA, 19 nt, Homo sapiens
  misc_RNA (1)...(19): siRNA sense strand
cagggaacauggaaugaua

SEQ ID NO: 1381667 - RNA, 19 nt, Homo sapiens
  misc_RNA (1)...(19): siRNA sense strand
uaagagcgacaaaguauaa

SEQ ID NO: 1381668 - RNA, 19 nt, Homo sapiens
  misc_RNA (1)...(19): siRNA sense strand
gagcaucuuuaacagaauu

SEQ ID NO: 1381669 - RNA, 19 nt, Homo sapiens
  misc_RNA (1)...(19): siRNA sense strand
ccuggagacuuauuuaauu

SEQ ID NO: 1381670 - RNA, 19 nt, Homo sapiens
  misc_RNA (1)...(19): siRNA sense strand
cgacaaaguauaacaaguu

SEQ ID NO: 1381671 - RNA, 19 nt, Homo sapiens
  misc_RNA (1)...(19): siRNA sense strand
ggagcaugguauucaagua

SEQ ID NO: 1381672 - RNA, 19 nt, Homo sapiens
  misc_RNA (1)...(19): siRNA sense strand
gaagaguguucuaucucaa

SEQ ID NO: 1381673 - RNA, 19 nt, Homo sapiens
  misc_RNA (1)...(19): siRNA sense strand
ucaaagaguuucuacuaag

SEQ ID NO: 1381674 - RNA, 19 nt, Homo sapiens
  misc_RNA (1)...(19): siRNA sense strand
gagaacugauaagaagaua

SEQ ID NO: 1381675 - RNA, 19 nt, Homo sapiens
  misc_RNA (1)...(19): siRNA sense strand
gcucuuuacucagggaaua

SEQ ID NO: 1381676 - RNA, 19 nt, Homo sapiens
  misc_RNA (1)...(19): siRNA sense strand
cgggauacauuacuuguug

SEQ ID NO: 1381677 - RNA, 19 nt, Homo sapiens
  misc_RNA (1)...(19): siRNA sense strand
ucgauguccucuuauauuu

SEQ ID NO: 1381678 - RNA, 19 nt, Homo sapiens
  misc_RNA (1)...(19): siRNA sense strand
agauuuaccuaaccaguuu

SEQ ID NO: 1381679 - RNA, 19 nt, Homo sapiens
  misc_RNA (1)...(19): siRNA sense strand
ggaaguaugugaggauugg

SEQ ID NO: 1381680 - RNA, 19 nt, Homo sapiens
  misc_RNA (1)...(19): siRNA sense strand
gauaucagaagugcaauaa

SEQ ID NO: 1381681 - RNA, 19 nt, Homo sapiens
  misc_RNA (1)...(19): siRNA sense strand
gcaccaacaauuaugauga

SEQ ID NO: 1381682 - RNA, 19 nt, Homo sapiens
  misc_RNA (1)...(19): siRNA sense strand
aaacaggguggaucuauuu

SEQ ID NO: 1381683 - RNA, 19 nt, Homo sapiens
  misc_RNA (1)...(19): siRNA sense strand
gaugaucugagaacugaua

SEQ ID NO: 1381684 - RNA, 19 nt, Homo sapiens
  misc_RNA (1)...(19): siRNA sense strand
ggguggaucuauuuuauua

SEQ ID NO: 1381685 - RNA, 19 nt, Homo sapiens
  misc_RNA (1)...(19): siRNA sense strand
uaucagaagugcaauaaac

SEQ ID NO: 1381686 - RNA, 19 nt, Homo sapiens
  misc_RNA (1)...(19): siRNA sense strand
ugugagagccagugaauuu

SEQ ID NO: 1381687 - RNA, 19 nt, Homo sapiens
  misc_RNA (1)...(19): siRNA sense strand
caaaggagcaugguauuca

SEQ ID NO: 1381688 - RNA, 19 nt, Homo sapiens
  misc_RNA (1)...(19): siRNA sense strand
ccggaaaccuggucucuuc

SEQ ID NO: 1381689 - RNA, 19 nt, Homo sapiens
  misc_RNA (1)...(19): siRNA sense strand
gaagcgacacuuuggaaga

SEQ ID NO: 1381690 - RNA, 19 nt, Homo sapiens
  misc_RNA (1)...(19): siRNA sense strand
cgagaggugugaugcauuc

SEQ ID NO: 1381691 - RNA, 19 nt, Homo sapiens
  misc_RNA (1)...(19): siRNA sense strand
cagaugcugugcugucaaa

SEQ ID NO: 1381692 - RNA, 19 nt, Homo sapiens
  misc_RNA (1)...(19): siRNA sense strand
caccaacaauuaugaugaa

SEQ ID NO: 1381693 - RNA, 19 nt, Homo sapiens
  misc_RNA (1)...(19): siRNA sense strand
gaacgggauacauuacuug

SEQ ID NO: 1381694 - RNA, 19 nt, Homo sapiens
  misc_RNA (1)...(19): siRNA sense strand
gaucugagaacugauaaga

SEQ ID NO: 1381695 - RNA, 19 nt, Homo sapiens
  misc_RNA (1)...(19): siRNA sense strand
uaacaagaauggaggaaaa

SEQ ID NO: 1381696 - RNA, 19 nt, Homo sapiens
  misc_RNA (1)...(19): siRNA sense strand
caaguacaagaguggauua

SEQ ID NO: 1381697 - RNA, 19 nt, Homo sapiens
  misc_RNA (1)...(19): siRNA sense strand
gaaaccuggucucuuccuu

SEQ ID NO: 1381698 - RNA, 19 nt, Homo sapiens
  misc_RNA (1)...(19): siRNA sense strand
guuauuguuucccaaagaa

SEQ ID NO: 1381699 - RNA, 19 nt, Homo sapiens
  misc_RNA (1)...(19): siRNA sense strand
uacaugaaguucuaaggaa

SEQ ID NO: 1381700 - RNA, 19 nt, Homo sapiens
  misc_RNA (1)...(19): siRNA sense strand
ucugagaacugauaagaag

SEQ ID NO: 1381701 - RNA, 19 nt, Homo sapiens
  misc_RNA (1)...(19): siRNA sense strand
aauacacgcucuuuacuca

SEQ ID NO: 1381702 - RNA, 19 nt, Homo sapiens
  misc_RNA (1)...(19): siRNA sense strand
caacuuacggccaaggaaa

SEQ ID NO: 1381703 - RNA, 19 nt, Homo sapiens
  misc_RNA (1)...(19): siRNA sense strand
caaagaaauucaggaagag

SEQ ID NO: 1381704 - RNA, 19 nt, Homo sapiens
  misc_RNA (1)...(19): siRNA sense strand
ggagguaguagaaauguca

SEQ ID NO: 1381705 - RNA, 19 nt, Homo sapiens
  misc_RNA (1)...(19): siRNA sense strand
gccagugaauuucugaguu

SEQ ID NO: 1381706 - RNA, 19 nt, Homo sapiens
  misc_RNA (1)...(19): siRNA sense strand
uacaaaugcuuggagauga

SEQ ID NO: 1381707 - RNA, 19 nt, Homo sapiens
  misc_RNA (1)...(19): siRNA sense strand
ugaacuugcugugcauaaa

SEQ ID NO: 1381708 - RNA, 19 nt, Homo sapiens
  misc_RNA (1)...(19): siRNA sense strand
ccucucauuuaucagaaua

SEQ ID NO: 1381709 - RNA, 19 nt, Homo sapiens
  misc_RNA (1)...(19): siRNA sense strand
caagagguccaagcuauug

SEQ ID NO: 1381710 - RNA, 19 nt, Homo sapiens
  misc_RNA (1)...(19): siRNA sense strand
ucgggauucucauacuuua

SEQ ID NO: 1381711 - RNA, 19 nt, Homo sapiens
  misc_RNA (1)...(19): siRNA sense strand
gguuauuguuucccaaaga

SEQ ID NO: 1381712 - RNA, 19 nt, Homo sapiens
  misc_RNA (1)...(19): siRNA sense strand
gccauaccuugcucuacua

SEQ ID NO: 1381713 - RNA, 19 nt, Homo sapiens
  misc_RNA (1)...(19): siRNA sense strand
caaggaggaggaucaaguu

SEQ ID NO: 1381714 - RNA, 19 nt, Homo sapiens
  misc_RNA (1)...(19): siRNA sense strand
ugugaugcauuccaacaaa

SEQ ID NO: 1381715 - RNA, 19 nt, Homo sapiens
  misc_RNA (1)...(19): siRNA sense strand
gaggugugaugcauuccaa

SEQ ID NO: 1381716 - RNA, 19 nt, Homo sapiens
  misc_RNA (1)...(19): siRNA sense strand
aaagauguuucucuguuuc

SEQ ID NO: 1381717 - RNA, 19 nt, Homo sapiens
  misc_RNA (1)...(19): siRNA sense strand
gggauguucuggugauauc

SEQ ID NO: 1381718 - RNA, 19 nt, Homo sapiens
  misc_RNA (1)...(19): siRNA sense strand
ugacaaaacuucucuagag

SEQ ID NO: 1381719 - RNA, 19 nt, Homo sapiens
  misc_RNA (1)...(19): siRNA sense strand
caggaagaguguucuaucu

SEQ ID NO: 1381720 - RNA, 19 nt, Homo sapiens
  misc_RNA (1)...(19): siRNA sense strand
ugaacgggauacauuacuu

SEQ ID NO: 1381721 - RNA, 19 nt, Homo sapiens
  misc_RNA (1)...(19): siRNA sense strand
ggugauaucagaagugcaa

SEQ ID NO: 1381722 - RNA, 19 nt, Homo sapiens
  misc_RNA (1)...(19): siRNA sense strand
agauaauucugguugaaga

SEQ ID NO: 1381723 - RNA, 19 nt, Homo sapiens
  misc_RNA (1)...(19): siRNA sense strand
aaaggagcaugguauucaa

SEQ ID NO: 1381724 - RNA, 19 nt, Homo sapiens
  misc_RNA (1)...(19): siRNA sense strand
aauaugaacgggauacauu

SEQ ID NO: 1381725 - RNA, 19 nt, Homo sapiens
  misc_RNA (1)...(19): siRNA sense strand
cuauagaagcuaacaagaa

SEQ ID NO: 1381726 - RNA, 19 nt, Homo sapiens
  misc_RNA (1)...(19): siRNA sense strand
cgauguccucuuauauuua

SEQ ID NO: 1381727 - RNA, 19 nt, Homo sapiens
  misc_RNA (1)...(19): siRNA sense strand
auuggucgauguccucuua

SEQ ID NO: 1381728 - RNA, 19 nt, Homo sapiens
  misc_RNA (1)...(19): siRNA sense strand
gaaguucuaaggaaguaug

SEQ ID NO: 1381729 - RNA, 19 nt, Homo sapiens
  misc_RNA (1)...(19): siRNA sense strand
ccuguggcaccaacaauua

SEQ ID NO: 1381730 - RNA, 19 nt, Homo sapiens
  misc_RNA (1)...(19): siRNA sense strand
gcgacacuuuggaagauug

SEQ ID NO: 1381731 - RNA, 19 nt, Homo sapiens
  misc_RNA (1)...(19): siRNA sense strand
ggaggaggaucaaguuuuc

SEQ ID NO: 1381732 - RNA, 19 nt, Homo sapiens
  misc_RNA (1)...(19): siRNA sense strand
gggauacauuacuuguuga

SEQ ID NO: 1381733 - RNA, 19 nt, Homo sapiens
  misc_RNA (1)...(19): siRNA sense strand
uaucaaaggagcaugguau

SEQ ID NO: 1381734 - RNA, 19 nt, Homo sapiens
  misc_RNA (1)...(19): siRNA sense strand
aaucaagcuuccauauguu

SEQ ID NO: 1381735 - RNA, 19 nt, Homo sapiens
  misc_RNA (1)...(19): siRNA sense strand
caccaaaacuacauagauu

SEQ ID NO: 1381736 - RNA, 19 nt, Homo sapiens
  misc_RNA (1)...(19): siRNA sense strand
caauaaacagccuccaguu

SEQ ID NO: 1381737 - RNA, 19 nt, Homo sapiens
  misc_RNA (1)...(19): siRNA sense strand
gagcgacaaaguauaacaa

SEQ ID NO: 1381738 - RNA, 19 nt, Homo sapiens
  misc_RNA (1)...(19): siRNA sense strand
ccaaggagacauggaagaa

SEQ ID NO: 1381739 - RNA, 19 nt, Homo sapiens
  misc_RNA (1)...(19): siRNA sense strand
gaauacacgcucuuuacuc

SEQ ID NO: 1381740 - RNA, 19 nt, Homo sapiens
  misc_RNA (1)...(19): siRNA sense strand
caguggagauaauaaucaa

SEQ ID NO: 1381741 - RNA, 19 nt, Homo sapiens
  misc_RNA (1)...(19): siRNA sense strand
gcgacaaaguauaacaagu

SEQ ID NO: 1381742 - RNA, 19 nt, Homo sapiens
  misc_RNA (1)...(19): siRNA sense strand
gcaugguauucaaguacaa

SEQ ID NO: 1381743 - RNA, 19 nt, Homo sapiens
  misc_RNA (1)...(19): siRNA sense strand
ugacagggaacauggaaug

SEQ ID NO: 1381744 - RNA, 19 nt, Homo sapiens
  misc_RNA (1)...(19): siRNA sense strand
ggaauacacgcucuuuacu

SEQ ID NO: 1381745 - RNA, 19 nt, Homo sapiens
  misc_RNA (1)...(19): siRNA sense strand
ucgguugcccucucauuua

SEQ ID NO: 1381746 - RNA, 19 nt, Homo sapiens
  misc_RNA (1)...(19): siRNA sense strand
gagagccagugaauuucug

SEQ ID NO: 1381747 - RNA, 19 nt, Homo sapiens
  misc_RNA (1)...(19): siRNA sense strand
aaaaguaucgggaaaauug

SEQ ID NO: 1381748 - RNA, 19 nt, Homo sapiens
  misc_RNA (1)...(19): siRNA sense strand
gcaugaacuugcugugcau

SEQ ID NO: 1381749 - RNA, 19 nt, Homo sapiens
  misc_RNA (1)...(19): siRNA sense strand
gaaucaagcuuccauaugu

SEQ ID NO: 1381750 - RNA, 19 nt, Homo sapiens
  misc_RNA (1)...(19): siRNA sense strand
gcaaagauguuucucuguu

SEQ ID NO: 1381751 - RNA, 19 nt, Homo sapiens
  misc_RNA (1)...(19): siRNA sense strand
acacaugccuggagacuua

SEQ ID NO: 1381752 - RNA, 19 nt, Homo sapiens
  misc_RNA (1)...(19): siRNA sense strand
caacaaagcccgaggauau

SEQ ID NO: 1381753 - RNA, 19 nt, Homo sapiens
  misc_RNA (1)...(19): siRNA sense strand
ccaaagaaauucaggaaga

SEQ ID NO: 1381754 - RNA, 19 nt, Homo sapiens
  misc_RNA (1)...(19): siRNA sense strand
cuacauagauuucuucaug

SEQ ID NO: 1381755 - RNA, 19 nt, Homo sapiens
  misc_RNA (1)...(19): siRNA sense strand
ggaaauugaugauauugug

SEQ ID NO: 1381756 - RNA, 19 nt, Homo sapiens
  misc_RNA (1)...(19): siRNA sense strand
aaacucagcuauugccaua

SEQ ID NO: 1381757 - RNA, 19 nt, Homo sapiens
  misc_RNA (1)...(19): siRNA sense strand
gaagauaauucugguugaa

SEQ ID NO: 1381758 - RNA, 19 nt, Homo sapiens
  misc_RNA (1)...(19): siRNA sense strand
caaagauguuucucuguuu

SEQ ID NO: 1381759 - RNA, 19 nt, Homo sapiens
  misc_RNA (1)...(19): siRNA sense strand
guacaagaguggauuaauc

SEQ ID NO: 1381760 - RNA, 19 nt, Homo sapiens
  misc_RNA (1)...(19): siRNA sense strand
ggaagaguguucuaucuca

SEQ ID NO: 1381761 - RNA, 19 nt, Homo sapiens
  misc_RNA (1)...(19): siRNA sense strand
gaaagacaacgaccuuaaa

SEQ ID NO: 1381762 - RNA, 19 nt, Homo sapiens
  misc_RNA (1)...(19): siRNA sense strand
ggaaagacaacgaccuuaa

SEQ ID NO: 1381763 - RNA, 19 nt, Homo sapiens
  misc_RNA (1)...(19): siRNA sense strand
caaagaguuucuacuaaga

SEQ ID NO: 1381764 - RNA, 19 nt, Homo sapiens
  misc_RNA (1)...(19): siRNA sense strand
ccucagugguuucuaauaa

SEQ ID NO: 1381765 - RNA, 19 nt, Homo sapiens
  misc_RNA (1)...(19): siRNA sense strand
ccagugaauuucugaguuu

SEQ ID NO: 1381766 - RNA, 19 nt, Homo sapiens
  misc_RNA (1)...(19): siRNA sense strand
cagggaacauggaaugaua

SEQ ID NO: 1381767 - RNA, 19 nt, Homo sapiens
  misc_RNA (1)...(19): siRNA sense strand
uaagagcgacaaaguauaa

SEQ ID NO: 1381768 - RNA, 19 nt, Homo sapiens
  misc_RNA (1)...(19): siRNA sense strand
gagcaucuuuaacagaauu

SEQ ID NO: 1381769 - RNA, 19 nt, Homo sapiens
  misc_RNA (1)...(19): siRNA sense strand
ccuggagacuuauuuaauu

SEQ ID NO: 1381770 - RNA, 19 nt, Homo sapiens
  misc_RNA (1)...(19): siRNA sense strand
cgacaaaguauaacaaguu

SEQ ID NO: 1381771 - RNA, 19 nt, Homo sapiens
  misc_RNA (1)...(19): siRNA sense strand
ggagcaugguauucaagua

SEQ ID NO: 1381772 - RNA, 19 nt, Homo sapiens
  misc_RNA (1)...(19): siRNA sense strand
gaagaguguucuaucucaa

SEQ ID NO: 1381773 - RNA, 19 nt, Homo sapiens
  misc_RNA (1)...(19): siRNA sense strand
ucaaagaguuucuacuaag

SEQ ID NO: 1381774 - RNA, 19 nt, Homo sapiens
  misc_RNA (1)...(19): siRNA sense strand
gagaacugauaagaagaua

SEQ ID NO: 1381775 - RNA, 19 nt, Homo sapiens
  misc_RNA (1)...(19): siRNA sense strand
gcucuuuacucagggaaua

SEQ ID NO: 1381776 - RNA, 19 nt, Homo sapiens
  misc_RNA (1)...(19): siRNA sense strand
cgggauacauuacuuguug

SEQ ID NO: 1381777 - RNA, 19 nt, Homo sapiens
  misc_RNA (1)...(19): siRNA sense strand
ucgauguccucuuauauuu

SEQ ID NO: 1381778 - RNA, 19 nt, Homo sapiens
  misc_RNA (1)...(19): siRNA sense strand
agauuuaccuaaccaguuu

SEQ ID NO: 1381779 - RNA, 19 nt, Homo sapiens
  misc_RNA (1)...(19): siRNA sense strand
ggaaguaugugaggauugg

SEQ ID NO: 1381780 - RNA, 19 nt, Homo sapiens
  misc_RNA (1)...(19): siRNA sense strand
gauaucagaagugcaauaa

SEQ ID NO: 1381781 - RNA, 19 nt, Homo sapiens
  misc_RNA (1)...(19): siRNA sense strand
gcaccaacaauuaugauga

SEQ ID NO: 1381782 - RNA, 19 nt, Homo sapiens
  misc_RNA (1)...(19): siRNA sense strand
aaacaggguggaucuauuu

SEQ ID NO: 1381783 - RNA, 19 nt, Homo sapiens
  misc_RNA (1)...(19): siRNA sense strand
gaugaucugagaacugaua

SEQ ID NO: 1381784 - RNA, 19 nt, Homo sapiens
  misc_RNA (1)...(19): siRNA sense strand
ggguggaucuauuuuauua

SEQ ID NO: 1381785 - RNA, 19 nt, Homo sapiens
  misc_RNA (1)...(19): siRNA sense strand
uaucagaagugcaauaaac

SEQ ID NO: 1381786 - RNA, 19 nt, Homo sapiens
  misc_RNA (1)...(19): siRNA sense strand
ugugagagccagugaauuu

SEQ ID NO: 1381787 - RNA, 19 nt, Homo sapiens
  misc_RNA (1)...(19): siRNA sense strand
caaaggagcaugguauuca

SEQ ID NO: 1381788 - RNA, 19 nt, Homo sapiens
  misc_RNA (1)...(19): siRNA sense strand
ccggaaaccuggucucuuc

SEQ ID NO: 1381789 - RNA, 19 nt, Homo sapiens
  misc_RNA (1)...(19): siRNA sense strand
gaagcgacacuuuggaaga

SEQ ID NO: 1381790 - RNA, 19 nt, Homo sapiens
  misc_RNA (1)...(19): siRNA sense strand
cgagaggugugaugcauuc

SEQ ID NO: 1381791 - RNA, 19 nt, Homo sapiens
  misc_RNA (1)...(19): siRNA sense strand
cagaugcugugcugucaaa

SEQ ID NO: 1381792 - RNA, 19 nt, Homo sapiens
  misc_RNA (1)...(19): siRNA sense strand
caccaacaauuaugaugaa

SEQ ID NO: 1381793 - RNA, 19 nt, Homo sapiens
  misc_RNA (1)...(19): siRNA sense strand
gaacgggauacauuacuug

SEQ ID NO: 1381794 - RNA, 19 nt, Homo sapiens
  misc_RNA (1)...(19): siRNA sense strand
gaucugagaacugauaaga

SEQ ID NO: 1381795 - RNA, 19 nt, Homo sapiens
  misc_RNA (1)...(19): siRNA sense strand
uaacaagaauggaggaaaa

SEQ ID NO: 1381796 - RNA, 19 nt, Homo sapiens
  misc_RNA (1)...(19): siRNA sense strand
caaguacaagaguggauua

SEQ ID NO: 1381797 - RNA, 19 nt, Homo sapiens
  misc_RNA (1)...(19): siRNA sense strand
gaaaccuggucucuuccuu

SEQ ID NO: 1381798 - RNA, 19 nt, Homo sapiens
  misc_RNA (1)...(19): siRNA sense strand
guuauuguuucccaaagaa

SEQ ID NO: 1381799 - RNA, 19 nt, Homo sapiens
  misc_RNA (1)...(19): siRNA sense strand
uacaugaaguucuaaggaa

SEQ ID NO: 1381800 - RNA, 19 nt, Homo sapiens
  misc_RNA (1)...(19): siRNA sense strand
ucugagaacugauaagaag

SEQ ID NO: 1381801 - RNA, 19 nt, Homo sapiens
  misc_RNA (1)...(19): siRNA sense strand
aauacacgcucuuuacuca

SEQ ID NO: 1381802 - RNA, 19 nt, Homo sapiens
  misc_RNA (1)...(19): siRNA sense strand
caacuuacggccaaggaaa

SEQ ID NO: 1381803 - RNA, 19 nt, Homo sapiens
  misc_RNA (1)...(19): siRNA sense strand
caaagaaauucaggaagag

SEQ ID NO: 1381804 - RNA, 19 nt, Homo sapiens
  misc_RNA (1)...(19): siRNA sense strand
ggagguaguagaaauguca

SEQ ID NO: 1381805 - RNA, 19 nt, Homo sapiens
  misc_RNA (1)...(19): siRNA sense strand
gccagugaauuucugaguu

SEQ ID NO: 1381806 - RNA, 19 nt, Homo sapiens
  misc_RNA (1)...(19): siRNA sense strand
uacaaaugcuuggagauga

SEQ ID NO: 1381807 - RNA, 19 nt, Homo sapiens
  misc_RNA (1)...(19): siRNA sense strand
ugaacuugcugugcauaaa

SEQ ID NO: 1381808 - RNA, 19 nt, Homo sapiens
  misc_RNA (1)...(19): siRNA sense strand
ccucucauuuaucagaaua

SEQ ID NO: 1381809 - RNA, 19 nt, Homo sapiens
  misc_RNA (1)...(19): siRNA sense strand
caagagguccaagcuauug

SEQ ID NO: 1381810 - RNA, 19 nt, Homo sapiens
  misc_RNA (1)...(19): siRNA sense strand
ucgggauucucauacuuua

SEQ ID NO: 1381811 - RNA, 19 nt, Homo sapiens
  misc_RNA (1)...(19): siRNA sense strand
gguuauuguuucccaaaga

SEQ ID NO: 1381812 - RNA, 19 nt, Homo sapiens
  misc_RNA (1)...(19): siRNA sense strand
gccauaccuugcucuacua

SEQ ID NO: 1381813 - RNA, 19 nt, Homo sapiens
  misc_RNA (1)...(19): siRNA sense strand
caaggaggaggaucaaguu

SEQ ID NO: 1381814 - RNA, 19 nt, Homo sapiens
  misc_RNA (1)...(19): siRNA sense strand
ugugaugcauuccaacaaa

SEQ ID NO: 1381815 - RNA, 19 nt, Homo sapiens
  misc_RNA (1)...(19): siRNA sense strand
gaggugugaugcauuccaa

SEQ ID NO: 1381816 - RNA, 19 nt, Homo sapiens
  misc_RNA (1)...(19): siRNA sense strand
aaagauguuucucuguuuc

SEQ ID NO: 1381817 - RNA, 19 nt, Homo sapiens
  misc_RNA (1)...(19): siRNA sense strand
gggauguucuggugauauc

SEQ ID NO: 1381818 - RNA, 19 nt, Homo sapiens
  misc_RNA (1)...(19): siRNA sense strand
ugacaaaacuucucuagag

SEQ ID NO: 1381819 - RNA, 19 nt, Homo sapiens
  misc_RNA (1)...(19): siRNA sense strand
caggaagaguguucuaucu

SEQ ID NO: 1381820 - RNA, 19 nt, Homo sapiens
  misc_RNA (1)...(19): siRNA sense strand
ugaacgggauacauuacuu

SEQ ID NO: 1381821 - RNA, 19 nt, Homo sapiens
  misc_RNA (1)...(19): siRNA sense strand
ggugauaucagaagugcaa

SEQ ID NO: 1381822 - RNA, 19 nt, Homo sapiens
  misc_RNA (1)...(19): siRNA sense strand
agauaauucugguugaaga

SEQ ID NO: 1381823 - RNA, 19 nt, Homo sapiens
  misc_RNA (1)...(19): siRNA sense strand
aaaggagcaugguauucaa

SEQ ID NO: 1381824 - RNA, 19 nt, Homo sapiens
  misc_RNA (1)...(19): siRNA sense strand
aauaugaacgggauacauu

SEQ ID NO: 1381825 - RNA, 19 nt, Homo sapiens
  misc_RNA (1)...(19): siRNA sense strand
cuauagaagcuaacaagaa

SEQ ID NO: 1381826 - RNA, 19 nt, Homo sapiens
  misc_RNA (1)...(19): siRNA sense strand
cgauguccucuuauauuua

SEQ ID NO: 1381827 - RNA, 19 nt, Homo sapiens
  misc_RNA (1)...(19): siRNA sense strand
auuggucgauguccucuua

SEQ ID NO: 1381828 - RNA, 19 nt, Homo sapiens
  misc_RNA (1)...(19): siRNA sense strand
gaaguucuaaggaaguaug

SEQ ID NO: 1381829 - RNA, 19 nt, Homo sapiens
  misc_RNA (1)...(19): siRNA sense strand
ccuguggcaccaacaauua

SEQ ID NO: 1381830 - RNA, 19 nt, Homo sapiens
  misc_RNA (1)...(19): siRNA sense strand
gcgacacuuuggaagauug

SEQ ID NO: 1381831 - RNA, 19 nt, Homo sapiens
  misc_RNA (1)...(19): siRNA sense strand
ggaggaggaucaaguuuuc

SEQ ID NO: 1381832 - RNA, 19 nt, Homo sapiens
  misc_RNA (1)...(19): siRNA sense strand
gggauacauuacuuguuga

SEQ ID NO: 1381833 - RNA, 19 nt, Homo sapiens
  misc_RNA (1)...(19): siRNA sense strand
uaucaaaggagcaugguau

SEQ ID NO: 1381834 - RNA, 19 nt, Homo sapiens
  misc_RNA (1)...(19): siRNA sense strand
aaucaagcuuccauauguu

SEQ ID NO: 1381835 - RNA, 19 nt, Homo sapiens
  misc_RNA (1)...(19): siRNA sense strand
caccaaaacuacauagauu

SEQ ID NO: 1381836 - RNA, 19 nt, Homo sapiens
  misc_RNA (1)...(19): siRNA sense strand
caauaaacagccuccaguu

SEQ ID NO: 1381837 - RNA, 19 nt, Homo sapiens
  misc_RNA (1)...(19): siRNA sense strand
gagcgacaaaguauaacaa

SEQ ID NO: 1381838 - RNA, 19 nt, Homo sapiens
  misc_RNA (1)...(19): siRNA sense strand
ccaaggagacauggaagaa

SEQ ID NO: 1381839 - RNA, 19 nt, Homo sapiens
  misc_RNA (1)...(19): siRNA sense strand
gaauacacgcucuuuacuc

SEQ ID NO: 1381840 - RNA, 19 nt, Homo sapiens
  misc_RNA (1)...(19): siRNA sense strand
caguggagauaauaaucaa

SEQ ID NO: 1381841 - RNA, 19 nt, Homo sapiens
  misc_RNA (1)...(19): siRNA sense strand
gcgacaaaguauaacaagu

SEQ ID NO: 1381842 - RNA, 19 nt, Homo sapiens
  misc_RNA (1)...(19): siRNA sense strand
gcaugguauucaaguacaa

SEQ ID NO: 1381843 - RNA, 19 nt, Homo sapiens
  misc_RNA (1)...(19): siRNA sense strand
ugacagggaacauggaaug

SEQ ID NO: 1381844 - RNA, 19 nt, Homo sapiens
  misc_RNA (1)...(19): siRNA sense strand
ggaauacacgcucuuuacu

SEQ ID NO: 1381845 - RNA, 19 nt, Homo sapiens
  misc_RNA (1)...(19): siRNA sense strand
ucgguugcccucucauuua

SEQ ID NO: 1381846 - RNA, 19 nt, Homo sapiens
  misc_RNA (1)...(19): siRNA sense strand
gagagccagugaauuucug

SEQ ID NO: 1381847 - RNA, 19 nt, Homo sapiens
  misc_RNA (1)...(19): siRNA sense strand
aaaaguaucgggaaaauug

SEQ ID NO: 1381848 - RNA, 19 nt, Homo sapiens
  misc_RNA (1)...(19): siRNA sense strand
gcaugaacuugcugugcau

SEQ ID NO: 1381849 - RNA, 19 nt, Homo sapiens
  misc_RNA (1)...(19): siRNA sense strand
guaagaaacuccgaaauua

SEQ ID NO: 1381850 - RNA, 19 nt, Homo sapiens
  misc_RNA (1)...(19): siRNA sense strand
gaacagcgguacaggaaug

SEQ ID NO: 1381851 - RNA, 19 nt, Homo sapiens
  misc_RNA (1)...(19): siRNA sense strand
gaaagaagggaaugaguuu

SEQ ID NO: 1381852 - RNA, 19 nt, Homo sapiens
  misc_RNA (1)...(19): siRNA sense strand
ggagaaauauguauacagu

SEQ ID NO: 1381853 - RNA, 19 nt, Homo sapiens
  misc_RNA (1)...(19): siRNA sense strand
ggaaugaguuuaagaugau

SEQ ID NO: 1381854 - RNA, 19 nt, Homo sapiens
  misc_RNA (1)...(19): siRNA sense strand
gggaaugaguuuaagauga

SEQ ID NO: 1381855 - RNA, 19 nt, Homo sapiens
  misc_RNA (1)...(19): siRNA sense strand
gguaagaaacuccgaaauu

SEQ ID NO: 1381856 - RNA, 19 nt, Homo sapiens
  misc_RNA (1)...(19): siRNA sense strand
gaucuggccauguguguua

SEQ ID NO: 1381857 - RNA, 19 nt, Homo sapiens
  misc_RNA (1)...(19): siRNA sense strand
ggaaagaagggaaugaguu

SEQ ID NO: 1381858 - RNA, 19 nt, Homo sapiens
  misc_RNA (1)...(19): siRNA sense strand
gaaauuacuaugcagcaaa

SEQ ID NO: 1381859 - RNA, 19 nt, Homo sapiens
  misc_RNA (1)...(19): siRNA sense strand
gcagagaauuccacgugau

SEQ ID NO: 1381860 - RNA, 19 nt, Homo sapiens
  misc_RNA (1)...(19): siRNA sense strand
ggaagaaucaugccaagag

SEQ ID NO: 1381861 - RNA, 19 nt, Homo sapiens
  misc_RNA (1)...(19): siRNA sense strand
ggaauuccggcagcauuua

SEQ ID NO: 1381862 - RNA, 19 nt, Homo sapiens
  misc_RNA (1)...(19): siRNA sense strand
uuagagagcaagcaacaua

SEQ ID NO: 1381863 - RNA, 19 nt, Homo sapiens
  misc_RNA (1)...(19): siRNA sense strand
gcaagcaacauaagagcaa

SEQ ID NO: 1381864 - RNA, 19 nt, Homo sapiens
  misc_RNA (1)...(19): siRNA sense strand
gagaaucugggauauguau

SEQ ID NO: 1381865 - RNA, 19 nt, Homo sapiens
  misc_RNA (1)...(19): siRNA sense strand
gaagggaaugaguuuaaga

SEQ ID NO: 1381866 - RNA, 19 nt, Homo sapiens
  misc_RNA (1)...(19): siRNA sense strand
gggaagaagaguuaucgaa

SEQ ID NO: 1381867 - RNA, 19 nt, Homo sapiens
  misc_RNA (1)...(19): siRNA sense strand
gcagaugggcuccuuuaag

SEQ ID NO: 1381868 - RNA, 19 nt, Homo sapiens
  misc_RNA (1)...(19): siRNA sense strand
cagaugggcuccuuuaagc

SEQ ID NO: 1381869 - RNA, 19 nt, Homo sapiens
  misc_RNA (1)...(19): siRNA sense strand
gauggagaaucugggauau

SEQ ID NO: 1381870 - RNA, 19 nt, Homo sapiens
  misc_RNA (1)...(19): siRNA sense strand
aagaagggaaugaguuuaa

SEQ ID NO: 1381871 - RNA, 19 nt, Homo sapiens
  misc_RNA (1)...(19): siRNA sense strand
uggagaaucugggauaugu

SEQ ID NO: 1381872 - RNA, 19 nt, Homo sapiens
  misc_RNA (1)...(19): siRNA sense strand
gaaacuccgaaauuacuau

SEQ ID NO: 1381873 - RNA, 19 nt, Homo sapiens
  misc_RNA (1)...(19): siRNA sense strand
aguuuaagaugaugccuaa

SEQ ID NO: 1381874 - RNA, 19 nt, Homo sapiens
  misc_RNA (1)...(19): siRNA sense strand
ugugaugccuccuucaguu

SEQ ID NO: 1381875 - RNA, 19 nt, Homo sapiens
  misc_RNA (1)...(19): siRNA sense strand
gagagcaagcaacauaaga

SEQ ID NO: 1381876 - RNA, 19 nt, Homo sapiens
  misc_RNA (1)...(19): siRNA sense strand
gaaucugggauauguauag

SEQ ID NO: 1381877 - RNA, 19 nt, Homo sapiens
  misc_RNA (1)...(19): siRNA sense strand
ccgcagaugggcuccuuua

SEQ ID NO: 1381878 - RNA, 19 nt, Homo sapiens
  misc_RNA (1)...(19): siRNA sense strand
ccacggagaaugauuacug

SEQ ID NO: 1381879 - RNA, 19 nt, Homo sapiens
  misc_RNA (1)...(19): siRNA sense strand
cgaaauuacuaugcagcaa

SEQ ID NO: 1381880 - RNA, 19 nt, Homo sapiens
  misc_RNA (1)...(19): siRNA sense strand
uaagaaacuccgaaauuac

SEQ ID NO: 1381881 - RNA, 19 nt, Homo sapiens
  misc_RNA (1)...(19): siRNA sense strand
gccaccaggucuacaggaa

SEQ ID NO: 1381882 - RNA, 19 nt, Homo sapiens
  misc_RNA (1)...(19): siRNA sense strand
gaaugaguuuaagaugaug

SEQ ID NO: 1381883 - RNA, 19 nt, Homo sapiens
  misc_RNA (1)...(19): siRNA sense strand
ccuaacaggagaaauaugu

SEQ ID NO: 1381884 - RNA, 19 nt, Homo sapiens
  misc_RNA (1)...(19): siRNA sense strand
ggagaaucugggauaugua

SEQ ID NO: 1381885 - RNA, 19 nt, Homo sapiens
  misc_RNA (1)...(19): siRNA sense strand
agagcaaggugucugaaca

SEQ ID NO: 1381886 - RNA, 19 nt, Homo sapiens
  misc_RNA (1)...(19): siRNA sense strand
cacgugaucuggccaugug

SEQ ID NO: 1381887 - RNA, 19 nt, Homo sapiens
  misc_RNA (1)...(19): siRNA sense strand
aaagaagggaaugaguuua

SEQ ID NO: 1381888 - RNA, 19 nt, Homo sapiens
  misc_RNA (1)...(19): siRNA sense strand
uggcggaagcucagaguaa

SEQ ID NO: 1381889 - RNA, 19 nt, Homo sapiens
  misc_RNA (1)...(19): siRNA sense strand
cuugaacucugcacagcaa

SEQ ID NO: 1381890 - RNA, 19 nt, Homo sapiens
  misc_RNA (1)...(19): siRNA sense strand
gcauuuagagagcaagcaa

SEQ ID NO: 1381891 - RNA, 19 nt, Homo sapiens
  misc_RNA (1)...(19): siRNA sense strand
caggagaaauauguauaca

SEQ ID NO: 1381892 - RNA, 19 nt, Homo sapiens
  misc_RNA (1)...(19): siRNA sense strand
uagagagcaagcaacauaa

SEQ ID NO: 1381893 - RNA, 19 nt, Homo sapiens
  misc_RNA (1)...(19): siRNA sense strand
ggucgagccugcagcuacu

SEQ ID NO: 1381894 - RNA, 19 nt, Homo sapiens
  misc_RNA (1)...(19): siRNA sense strand
gccugcagcuacuccaguu

SEQ ID NO: 1381895 - RNA, 19 nt, Homo sapiens
  misc_RNA (1)...(19): siRNA sense strand
cacggagaaugauuacugu

SEQ ID NO: 1381896 - RNA, 19 nt, Homo sapiens
  misc_RNA (1)...(19): siRNA sense strand
uguuggagcuggcgaagag

SEQ ID NO: 1381897 - RNA, 19 nt, Homo sapiens
  misc_RNA (1)...(19): siRNA sense strand
gaauuccggcagcauuuag

SEQ ID NO: 1381898 - RNA, 19 nt, Homo sapiens
  misc_RNA (1)...(19): siRNA sense strand
ucugcaaugucaccuugaa

SEQ ID NO: 1381899 - RNA, 19 nt, Homo sapiens
  misc_RNA (1)...(19): siRNA sense strand
cugaacagcgguacaggaa

SEQ ID NO: 1381900 - RNA, 19 nt, Homo sapiens
  misc_RNA (1)...(19): siRNA sense strand
gagaauuccacgugaucug

SEQ ID NO: 1381901 - RNA, 19 nt, Homo sapiens
  misc_RNA (1)...(19): siRNA sense strand
cuaacaggagaaauaugua

SEQ ID NO: 1381902 - RNA, 19 nt, Homo sapiens
  misc_RNA (1)...(19): siRNA sense strand
augccuaacaggagaaaua

SEQ ID NO: 1381903 - RNA, 19 nt, Homo sapiens
  misc_RNA (1)...(19): siRNA sense strand
uggccacggagaaugauua

SEQ ID NO: 1381904 - RNA, 19 nt, Homo sapiens
  misc_RNA (1)...(19): siRNA sense strand
gcaaugucaccuugaacuc

SEQ ID NO: 1381905 - RNA, 19 nt, Homo sapiens
  misc_RNA (1)...(19): siRNA sense strand
ggcucaggcucacuaucaa

SEQ ID NO: 1381906 - RNA, 19 nt, Homo sapiens
  misc_RNA (1)...(19): siRNA sense strand
uaucaagggaagaaucaug

SEQ ID NO: 1381907 - RNA, 19 nt, Homo sapiens
  misc_RNA (1)...(19): siRNA sense strand
uggaauuccggcagcauuu

SEQ ID NO: 1381908 - RNA, 19 nt, Homo sapiens
  misc_RNA (1)...(19): siRNA sense strand
uuaagaugaugccuaacag

SEQ ID NO: 1381909 - RNA, 19 nt, Homo sapiens
  misc_RNA (1)...(19): siRNA sense strand
agaagggaaugaguuuaag

SEQ ID NO: 1381910 - RNA, 19 nt, Homo sapiens
  misc_RNA (1)...(19): siRNA sense strand
uggcucaggcucacuauca

SEQ ID NO: 1381911 - RNA, 19 nt, Homo sapiens
  misc_RNA (1)...(19): siRNA sense strand
aagaaacuccgaaauuacu

SEQ ID NO: 1381912 - RNA, 19 nt, Homo sapiens
  misc_RNA (1)...(19): siRNA sense strand
gagcaaggugucugaacag

SEQ ID NO: 1381913 - RNA, 19 nt, Homo sapiens
  misc_RNA (1)...(19): siRNA sense strand
guaagccccuguacugcaa

SEQ ID NO: 1381914 - RNA, 19 nt, Homo sapiens
  misc_RNA (1)...(19): siRNA sense strand
agaaacuccgaaauuacua

SEQ ID NO: 1381915 - RNA, 19 nt, Homo sapiens
  misc_RNA (1)...(19): siRNA sense strand
ggcggaagcucagaguaac

SEQ ID NO: 1381916 - RNA, 19 nt, Homo sapiens
  misc_RNA (1)...(19): siRNA sense strand
acaggaaugagauggagaa

SEQ ID NO: 1381917 - RNA, 19 nt, Homo sapiens
  misc_RNA (1)...(19): siRNA sense strand
cagagaauuccacgugauc

SEQ ID NO: 1381918 - RNA, 19 nt, Homo sapiens
  misc_RNA (1)...(19): siRNA sense strand
gggaagaaucaugccaaga

SEQ ID NO: 1381919 - RNA, 19 nt, Homo sapiens
  misc_RNA (1)...(19): siRNA sense strand
ccaggaaagaagggaauga

SEQ ID NO: 1381920 - RNA, 19 nt, Homo sapiens
  misc_RNA (1)...(19): siRNA sense strand
guaagaaacuccgaaauua

SEQ ID NO: 1381921 - RNA, 19 nt, Homo sapiens
  misc_RNA (1)...(19): siRNA sense strand
gaacagcgguacaggaaug

SEQ ID NO: 1381922 - RNA, 19 nt, Homo sapiens
  misc_RNA (1)...(19): siRNA sense strand
gaaagaagggaaugaguuu

SEQ ID NO: 1381923 - RNA, 19 nt, Homo sapiens
  misc_RNA (1)...(19): siRNA sense strand
ggagaaauauguauacagu

SEQ ID NO: 1381924 - RNA, 19 nt, Homo sapiens
  misc_RNA (1)...(19): siRNA sense strand
ggaaugaguuuaagaugau

SEQ ID NO: 1381925 - RNA, 19 nt, Homo sapiens
  misc_RNA (1)...(19): siRNA sense strand
gggaaugaguuuaagauga

SEQ ID NO: 1381926 - RNA, 19 nt, Homo sapiens
  misc_RNA (1)...(19): siRNA sense strand
gguaagaaacuccgaaauu

SEQ ID NO: 1381927 - RNA, 19 nt, Homo sapiens
  misc_RNA (1)...(19): siRNA sense strand
gaucuggccauguguguua

SEQ ID NO: 1381928 - RNA, 19 nt, Homo sapiens
  misc_RNA (1)...(19): siRNA sense strand
ggaaagaagggaaugaguu

SEQ ID NO: 1381929 - RNA, 19 nt, Homo sapiens
  misc_RNA (1)...(19): siRNA sense strand
gaaauuacuaugcagcaaa

SEQ ID NO: 1381930 - RNA, 19 nt, Homo sapiens
  misc_RNA (1)...(19): siRNA sense strand
gcagagaauuccacgugau

SEQ ID NO: 1381931 - RNA, 19 nt, Homo sapiens
  misc_RNA (1)...(19): siRNA sense strand
ggaagaaucaugccaagag

SEQ ID NO: 1381932 - RNA, 19 nt, Homo sapiens
  misc_RNA (1)...(19): siRNA sense strand
ggaauuccggcagcauuua

SEQ ID NO: 1381933 - RNA, 19 nt, Homo sapiens
  misc_RNA (1)...(19): siRNA sense strand
uuagagagcaagcaacaua

SEQ ID NO: 1381934 - RNA, 19 nt, Homo sapiens
  misc_RNA (1)...(19): siRNA sense strand
gcaagcaacauaagagcaa

SEQ ID NO: 1381935 - RNA, 19 nt, Homo sapiens
  misc_RNA (1)...(19): siRNA sense strand
gagaaucugggauauguau

SEQ ID NO: 1381936 - RNA, 19 nt, Homo sapiens
  misc_RNA (1)...(19): siRNA sense strand
gaagggaaugaguuuaaga

SEQ ID NO: 1381937 - RNA, 19 nt, Homo sapiens
  misc_RNA (1)...(19): siRNA sense strand
gggaagaagaguuaucgaa

SEQ ID NO: 1381938 - RNA, 19 nt, Homo sapiens
  misc_RNA (1)...(19): siRNA sense strand
gcagaugggcuccuuuaag

SEQ ID NO: 1381939 - RNA, 19 nt, Homo sapiens
  misc_RNA (1)...(19): siRNA sense strand
cagaugggcuccuuuaagc

SEQ ID NO: 1381940 - RNA, 19 nt, Homo sapiens
  misc_RNA (1)...(19): siRNA sense strand
gauggagaaucugggauau

SEQ ID NO: 1381941 - RNA, 19 nt, Homo sapiens
  misc_RNA (1)...(19): siRNA sense strand
aagaagggaaugaguuuaa

SEQ ID NO: 1381942 - RNA, 19 nt, Homo sapiens
  misc_RNA (1)...(19): siRNA sense strand
uggagaaucugggauaugu

SEQ ID NO: 1381943 - RNA, 19 nt, Homo sapiens
  misc_RNA (1)...(19): siRNA sense strand
gaaacuccgaaauuacuau

SEQ ID NO: 1381944 - RNA, 19 nt, Homo sapiens
  misc_RNA (1)...(19): siRNA sense strand
aguuuaagaugaugccuaa

SEQ ID NO: 1381945 - RNA, 19 nt, Homo sapiens
  misc_RNA (1)...(19): siRNA sense strand
ugugaugccuccuucaguu

SEQ ID NO: 1381946 - RNA, 19 nt, Homo sapiens
  misc_RNA (1)...(19): siRNA sense strand
gagagcaagcaacauaaga

SEQ ID NO: 1381947 - RNA, 19 nt, Homo sapiens
  misc_RNA (1)...(19): siRNA sense strand
gaaucugggauauguauag

SEQ ID NO: 1381948 - RNA, 19 nt, Homo sapiens
  misc_RNA (1)...(19): siRNA sense strand
ccgcagaugggcuccuuua

SEQ ID NO: 1381949 - RNA, 19 nt, Homo sapiens
  misc_RNA (1)...(19): siRNA sense strand
ccacggagaaugauuacug

SEQ ID NO: 1381950 - RNA, 19 nt, Homo sapiens
  misc_RNA (1)...(19): siRNA sense strand
cgaaauuacuaugcagcaa

SEQ ID NO: 1381951 - RNA, 19 nt, Homo sapiens
  misc_RNA (1)...(19): siRNA sense strand
uaagaaacuccgaaauuac

SEQ ID NO: 1381952 - RNA, 19 nt, Homo sapiens
  misc_RNA (1)...(19): siRNA sense strand
gccaccaggucuacaggaa

SEQ ID NO: 1381953 - RNA, 19 nt, Homo sapiens
  misc_RNA (1)...(19): siRNA sense strand
gaaugaguuuaagaugaug

SEQ ID NO: 1381954 - RNA, 19 nt, Homo sapiens
  misc_RNA (1)...(19): siRNA sense strand
ccuaacaggagaaauaugu

SEQ ID NO: 1381955 - RNA, 19 nt, Homo sapiens
  misc_RNA (1)...(19): siRNA sense strand
ggagaaucugggauaugua

SEQ ID NO: 1381956 - RNA, 19 nt, Homo sapiens
  misc_RNA (1)...(19): siRNA sense strand
agagcaaggugucugaaca

SEQ ID NO: 1381957 - RNA, 19 nt, Homo sapiens
  misc_RNA (1)...(19): siRNA sense strand
cacgugaucuggccaugug

SEQ ID NO: 1381958 - RNA, 19 nt, Homo sapiens
  misc_RNA (1)...(19): siRNA sense strand
aaagaagggaaugaguuua

SEQ ID NO: 1381959 - RNA, 19 nt, Homo sapiens
  misc_RNA (1)...(19): siRNA sense strand
uggcggaagcucagaguaa

SEQ ID NO: 1381960 - RNA, 19 nt, Homo sapiens
  misc_RNA (1)...(19): siRNA sense strand
cuugaacucugcacagcaa

SEQ ID NO: 1381961 - RNA, 19 nt, Homo sapiens
  misc_RNA (1)...(19): siRNA sense strand
gcauuuagagagcaagcaa

SEQ ID NO: 1381962 - RNA, 19 nt, Homo sapiens
  misc_RNA (1)...(19): siRNA sense strand
caggagaaauauguauaca

SEQ ID NO: 1381963 - RNA, 19 nt, Homo sapiens
  misc_RNA (1)...(19): siRNA sense strand
uagagagcaagcaacauaa

SEQ ID NO: 1381964 - RNA, 19 nt, Homo sapiens
  misc_RNA (1)...(19): siRNA sense strand
ggucgagccugcagcuacu

SEQ ID NO: 1381965 - RNA, 19 nt, Homo sapiens
  misc_RNA (1)...(19): siRNA sense strand
gccugcagcuacuccaguu

SEQ ID NO: 1381966 - RNA, 19 nt, Homo sapiens
  misc_RNA (1)...(19): siRNA sense strand
cacggagaaugauuacugu

SEQ ID NO: 1381967 - RNA, 19 nt, Homo sapiens
  misc_RNA (1)...(19): siRNA sense strand
uguuggagcuggcgaagag

SEQ ID NO: 1381968 - RNA, 19 nt, Homo sapiens
  misc_RNA (1)...(19): siRNA sense strand
gaauuccggcagcauuuag

SEQ ID NO: 1381969 - RNA, 19 nt, Homo sapiens
  misc_RNA (1)...(19): siRNA sense strand
ucugcaaugucaccuugaa

SEQ ID NO: 1381970 - RNA, 19 nt, Homo sapiens
  misc_RNA (1)...(19): siRNA sense strand
cugaacagcgguacaggaa

SEQ ID NO: 1381971 - RNA, 19 nt, Homo sapiens
  misc_RNA (1)...(19): siRNA sense strand
gagaauuccacgugaucug

SEQ ID NO: 1381972 - RNA, 19 nt, Homo sapiens
  misc_RNA (1)...(19): siRNA sense strand
cuaacaggagaaauaugua

SEQ ID NO: 1381973 - RNA, 19 nt, Homo sapiens
  misc_RNA (1)...(19): siRNA sense strand
augccuaacaggagaaaua

SEQ ID NO: 1381974 - RNA, 19 nt, Homo sapiens
  misc_RNA (1)...(19): siRNA sense strand
uggccacggagaaugauua

SEQ ID NO: 1381975 - RNA, 19 nt, Homo sapiens
  misc_RNA (1)...(19): siRNA sense strand
gcaaugucaccuugaacuc

SEQ ID NO: 1381976 - RNA, 19 nt, Homo sapiens
  misc_RNA (1)...(19): siRNA sense strand
ggcucaggcucacuaucaa

SEQ ID NO: 1381977 - RNA, 19 nt, Homo sapiens
  misc_RNA (1)...(19): siRNA sense strand
uaucaagggaagaaucaug

SEQ ID NO: 1381978 - RNA, 19 nt, Homo sapiens
  misc_RNA (1)...(19): siRNA sense strand
uggaauuccggcagcauuu

SEQ ID NO: 1381979 - RNA, 19 nt, Homo sapiens
  misc_RNA (1)...(19): siRNA sense strand
uuaagaugaugccuaacag

SEQ ID NO: 1381980 - RNA, 19 nt, Homo sapiens
  misc_RNA (1)...(19): siRNA sense strand
agaagggaaugaguuuaag

SEQ ID NO: 1381981 - RNA, 19 nt, Homo sapiens
  misc_RNA (1)...(19): siRNA sense strand
uggcucaggcucacuauca

SEQ ID NO: 1381982 - RNA, 19 nt, Homo sapiens
  misc_RNA (1)...(19): siRNA sense strand
aagaaacuccgaaauuacu

SEQ ID NO: 1381983 - RNA, 19 nt, Homo sapiens
  misc_RNA (1)...(19): siRNA sense strand
gagcaaggugucugaacag

SEQ ID NO: 1381984 - RNA, 19 nt, Homo sapiens
  misc_RNA (1)...(19): siRNA sense strand
guaagccccuguacugcaa

SEQ ID NO: 1381985 - RNA, 19 nt, Homo sapiens
  misc_RNA (1)...(19): siRNA sense strand
agaaacuccgaaauuacua

SEQ ID NO: 1381986 - RNA, 19 nt, Homo sapiens
  misc_RNA (1)...(19): siRNA sense strand
ggcggaagcucagaguaac

SEQ ID NO: 1381987 - RNA, 19 nt, Homo sapiens
  misc_RNA (1)...(19): siRNA sense strand
acaggaaugagauggagaa

SEQ ID NO: 1381988 - RNA, 19 nt, Homo sapiens
  misc_RNA (1)...(19): siRNA sense strand
cagagaauuccacgugauc

SEQ ID NO: 1381989 - RNA, 19 nt, Homo sapiens
  misc_RNA (1)...(19): siRNA sense strand
gggaagaaucaugccaaga

SEQ ID NO: 1381990 - RNA, 19 nt, Homo sapiens
  misc_RNA (1)...(19): siRNA sense strand
ccaggaaagaagggaauga

SEQ ID NO: 1381991 - RNA, 19 nt, Homo sapiens
  misc_RNA (1)...(19): siRNA sense strand
gggagagccuggacgaaga

SEQ ID NO: 1381992 - RNA, 19 nt, Homo sapiens
  misc_RNA (1)...(19): siRNA sense strand
gcagcuuccuggccaagaa

SEQ ID NO: 1381993 - RNA, 19 nt, Homo sapiens
  misc_RNA (1)...(19): siRNA sense strand
ccacggguccugcugcaaa

SEQ ID NO: 1381994 - RNA, 19 nt, Homo sapiens
  misc_RNA (1)...(19): siRNA sense strand
ccacggguccugcugcaaa

SEQ ID NO: 1381995 - RNA, 19 nt, Homo sapiens
  misc_RNA (1)...(19): siRNA sense strand
gcggcugacugcagacaug

SEQ ID NO: 1381996 - RNA, 19 nt, Homo sapiens
  misc_RNA (1)...(19): siRNA sense strand
ggccaccacuacccagaga

SEQ ID NO: 1381997 - RNA, 19 nt, Homo sapiens
  misc_RNA (1)...(19): siRNA sense strand
ggaggaugaugaggucaag

SEQ ID NO: 1381998 - RNA, 19 nt, Homo sapiens
  misc_RNA (1)...(19): siRNA sense strand
acacguccuuccucagcaa

SEQ ID NO: 1381999 - RNA, 19 nt, Homo sapiens
  misc_RNA (1)...(19): siRNA sense strand
cugacucucucuuguccuu

SEQ ID NO: 1382000 - RNA, 19 nt, Homo sapiens
  misc_RNA (1)...(19): siRNA sense strand
ccaccacuacccagagaug

SEQ ID NO: 1382001 - RNA, 19 nt, Homo sapiens
  misc_RNA (1)...(19): siRNA sense strand
gaccgagaccgggaugguu

SEQ ID NO: 1382002 - RNA, 19 nt, Homo sapiens
  misc_RNA (1)...(19): siRNA sense strand
gggagagccuggacgaaga

SEQ ID NO: 1382003 - RNA, 19 nt, Homo sapiens
  misc_RNA (1)...(19): siRNA sense strand
gcagcuuccuggccaagaa

SEQ ID NO: 1382004 - RNA, 19 nt, Homo sapiens
  misc_RNA (1)...(19): siRNA sense strand
ccacggguccugcugcaaa

SEQ ID NO: 1382005 - RNA, 19 nt, Homo sapiens
  misc_RNA (1)...(19): siRNA sense strand
ccacggguccugcugcaaa

SEQ ID NO: 1382006 - RNA, 19 nt, Homo sapiens
  misc_RNA (1)...(19): siRNA sense strand
gcggcugacugcagacaug

SEQ ID NO: 1382007 - RNA, 19 nt, Homo sapiens
  misc_RNA (1)...(19): siRNA sense strand
ggccaccacuacccagaga

SEQ ID NO: 1382008 - RNA, 19 nt, Homo sapiens
  misc_RNA (1)...(19): siRNA sense strand
ggaggaugaugaggucaag

SEQ ID NO: 1382009 - RNA, 19 nt, Homo sapiens
  misc_RNA (1)...(19): siRNA sense strand
acacguccuuccucagcaa

SEQ ID NO: 1382010 - RNA, 19 nt, Homo sapiens
  misc_RNA (1)...(19): siRNA sense strand
cugacucucucuuguccuu

SEQ ID NO: 1382011 - RNA, 19 nt, Homo sapiens
  misc_RNA (1)...(19): siRNA sense strand
ccaccacuacccagagaug

SEQ ID NO: 1382012 - RNA, 19 nt, Homo sapiens
  misc_RNA (1)...(19): siRNA sense strand
gaccgagaccgggaugguu

SEQ ID NO: 1382013 - RNA, 19 nt, Homo sapiens
  misc_RNA (1)...(19): siRNA sense strand
gaauagacguuucccugaa

SEQ ID NO: 1382014 - RNA, 19 nt, Homo sapiens
  misc_RNA (1)...(19): siRNA sense strand
ugaagaagaugaagaagga

SEQ ID NO: 1382015 - RNA, 19 nt, Homo sapiens
  misc_RNA (1)...(19): siRNA sense strand
cgaagaagauauagagaau

SEQ ID NO: 1382016 - RNA, 19 nt, Homo sapiens
  misc_RNA (1)...(19): siRNA sense strand
ggcagagacuccaaaguaa

SEQ ID NO: 1382017 - RNA, 19 nt, Homo sapiens
  misc_RNA (1)...(19): siRNA sense strand
ugccagaacuuccaucuaa

SEQ ID NO: 1382018 - RNA, 19 nt, Homo sapiens
  misc_RNA (1)...(19): siRNA sense strand
gaaagaggaauuuguaagu

SEQ ID NO: 1382019 - RNA, 19 nt, Homo sapiens
  misc_RNA (1)...(19): siRNA sense strand
ucacaaguuugccuuaaug

SEQ ID NO: 1382020 - RNA, 19 nt, Homo sapiens
  misc_RNA (1)...(19): siRNA sense strand
uaaguacucuguggaagaa

SEQ ID NO: 1382021 - RNA, 19 nt, Homo sapiens
  misc_RNA (1)...(19): siRNA sense strand
ggaagaagcaauucacaag

SEQ ID NO: 1382022 - RNA, 19 nt, Homo sapiens
  misc_RNA (1)...(19): siRNA sense strand
agaagcaauucacaaguuu

SEQ ID NO: 1382023 - RNA, 19 nt, Homo sapiens
  misc_RNA (1)...(19): siRNA sense strand
aagaagcaauucacaaguu

SEQ ID NO: 1382024 - RNA, 19 nt, Homo sapiens
  misc_RNA (1)...(19): siRNA sense strand
acagaaagaggaauuugua

SEQ ID NO: 1382025 - RNA, 19 nt, Homo sapiens
  misc_RNA (1)...(19): siRNA sense strand
aggcagagacuccaaagua

SEQ ID NO: 1382026 - RNA, 19 nt, Homo sapiens
  misc_RNA (1)...(19): siRNA sense strand
caaguuugccuuaaugaau

SEQ ID NO: 1382027 - RNA, 19 nt, Homo sapiens
  misc_RNA (1)...(19): siRNA sense strand
aaauacagcuccgcaggaa

SEQ ID NO: 1382028 - RNA, 19 nt, Homo sapiens
  misc_RNA (1)...(19): siRNA sense strand
guacgaagaagauauagag

SEQ ID NO: 1382029 - RNA, 19 nt, Homo sapiens
  misc_RNA (1)...(19): siRNA sense strand
gaagaagcaauucacaagu

SEQ ID NO: 1382030 - RNA, 19 nt, Homo sapiens
  misc_RNA (1)...(19): siRNA sense strand
gccagaacuuccaucuaaa

SEQ ID NO: 1382031 - RNA, 19 nt, Homo sapiens
  misc_RNA (1)...(19): siRNA sense strand
gaaaacauccuguguacga

SEQ ID NO: 1382032 - RNA, 19 nt, Homo sapiens
  misc_RNA (1)...(19): siRNA sense strand
aaagaggaauuuguaagug

SEQ ID NO: 1382033 - RNA, 19 nt, Homo sapiens
  misc_RNA (1)...(19): siRNA sense strand
gcagagacuccaaaguaau

SEQ ID NO: 1382034 - RNA, 19 nt, Homo sapiens
  misc_RNA (1)...(19): siRNA sense strand
guaaugcguugcugguaca

SEQ ID NO: 1382035 - RNA, 19 nt, Homo sapiens
  misc_RNA (1)...(19): siRNA sense strand
aaggaggacuucuggcauu

SEQ ID NO: 1382036 - RNA, 19 nt, Homo sapiens
  misc_RNA (1)...(19): siRNA sense strand
caacagaaagaggaauuug

SEQ ID NO: 1382037 - RNA, 19 nt, Homo sapiens
  misc_RNA (1)...(19): siRNA sense strand
gaggacuucuggcauucuu

SEQ ID NO: 1382038 - RNA, 19 nt, Homo sapiens
  misc_RNA (1)...(19): siRNA sense strand
aagaggaauuuguaagugu

SEQ ID NO: 1382039 - RNA, 19 nt, Homo sapiens
  misc_RNA (1)...(19): siRNA sense strand
cagaaagaggaauuuguaa

SEQ ID NO: 1382040 - RNA, 19 nt, Homo sapiens
  misc_RNA (1)...(19): siRNA sense strand
cuucaccucuucuuacaga

SEQ ID NO: 1382041 - RNA, 19 nt, Homo sapiens
  misc_RNA (1)...(19): siRNA sense strand
cuucuggcauucuuacauu

SEQ ID NO: 1382042 - RNA, 19 nt, Homo sapiens
  misc_RNA (1)...(19): siRNA sense strand
gaagcaauucacaaguuug

SEQ ID NO: 1382043 - RNA, 19 nt, Homo sapiens
  misc_RNA (1)...(19): siRNA sense strand
gaaaaguccuacagaaugc

SEQ ID NO: 1382044 - RNA, 19 nt, Homo sapiens
  misc_RNA (1)...(19): siRNA sense strand
ggaacaacagaaagaggaa

SEQ ID NO: 1382045 - RNA, 19 nt, Homo sapiens
  misc_RNA (1)...(19): siRNA sense strand
gaagauauagagaauucgu

SEQ ID NO: 1382046 - RNA, 19 nt, Homo sapiens
  misc_RNA (1)...(19): siRNA sense strand
gacauugaggcguguguuu

SEQ ID NO: 1382047 - RNA, 19 nt, Homo sapiens
  misc_RNA (1)...(19): siRNA sense strand
cagagacuccaaaguaaug

SEQ ID NO: 1382048 - RNA, 19 nt, Homo sapiens
  misc_RNA (1)...(19): siRNA sense strand
ucagaaaaguccuacagaa

SEQ ID NO: 1382049 - RNA, 19 nt, Homo sapiens
  misc_RNA (1)...(19): siRNA sense strand
guacaacugccagaacuuc

SEQ ID NO: 1382050 - RNA, 19 nt, Homo sapiens
  misc_RNA (1)...(19): siRNA sense strand
uagcagccuucaccucuuc

SEQ ID NO: 1382051 - RNA, 19 nt, Homo sapiens
  misc_RNA (1)...(19): siRNA sense strand
gcacuuuugcuuucagaua

SEQ ID NO: 1382052 - RNA, 19 nt, Homo sapiens
  misc_RNA (1)...(19): siRNA sense strand
gaacaacagaaagaggaau

SEQ ID NO: 1382053 - RNA, 19 nt, Homo sapiens
  misc_RNA (1)...(19): siRNA sense strand
cuaaguacucuguggaaga

SEQ ID NO: 1382054 - RNA, 19 nt, Homo sapiens
  misc_RNA (1)...(19): siRNA sense strand
gaauucagaagacauugag

SEQ ID NO: 1382055 - RNA, 19 nt, Homo sapiens
  misc_RNA (1)...(19): siRNA sense strand
uguguacgaagaagauaua

SEQ ID NO: 1382056 - RNA, 19 nt, Homo sapiens
  misc_RNA (1)...(19): siRNA sense strand
ggacacaguagugaugaca

SEQ ID NO: 1382057 - RNA, 19 nt, Homo sapiens
  misc_RNA (1)...(19): siRNA sense strand
cagccuucaccucuucuua

SEQ ID NO: 1382058 - RNA, 19 nt, Homo sapiens
  misc_RNA (1)...(19): siRNA sense strand
gacuaugagauauguauuc

SEQ ID NO: 1382059 - RNA, 19 nt, Homo sapiens
  misc_RNA (1)...(19): siRNA sense strand
ggacuucuggcauucuuac

SEQ ID NO: 1382060 - RNA, 19 nt, Homo sapiens
  misc_RNA (1)...(19): siRNA sense strand
gggcuuggacacaguagug

SEQ ID NO: 1382061 - RNA, 19 nt, Homo sapiens
  misc_RNA (1)...(19): siRNA sense strand
cuuaaugaauagacguuuc

SEQ ID NO: 1382062 - RNA, 19 nt, Homo sapiens
  misc_RNA (1)...(19): siRNA sense strand
ugaauucagaagacauuga

SEQ ID NO: 1382063 - RNA, 19 nt, Homo sapiens
  misc_RNA (1)...(19): siRNA sense strand
gccuucaccucuucuuaca

SEQ ID NO: 1382064 - RNA, 19 nt, Homo sapiens
  misc_RNA (1)...(19): siRNA sense strand
ggauucagaaggaggacuu

SEQ ID NO: 1382065 - RNA, 19 nt, Homo sapiens
  misc_RNA (1)...(19): siRNA sense strand
uagcauguguuuuacaaug

SEQ ID NO: 1382066 - RNA, 19 nt, Homo sapiens
  misc_RNA (1)...(19): siRNA sense strand
cauugacuaugagauaugu

SEQ ID NO: 1382067 - RNA, 19 nt, Homo sapiens
  misc_RNA (1)...(19): siRNA sense strand
gaagaagaugaagaaggaa

SEQ ID NO: 1382068 - RNA, 19 nt, Homo sapiens
  misc_RNA (1)...(19): siRNA sense strand
aauagacguuucccugaag

SEQ ID NO: 1382069 - RNA, 19 nt, Homo sapiens
  misc_RNA (1)...(19): siRNA sense strand
gacuaaguacucuguggaa

SEQ ID NO: 1382070 - RNA, 19 nt, Homo sapiens
  misc_RNA (1)...(19): siRNA sense strand
acgaagaagauauagagaa

SEQ ID NO: 1382071 - RNA, 19 nt, Homo sapiens
  misc_RNA (1)...(19): siRNA sense strand
agaaagaggaauuuguaag

SEQ ID NO: 1382072 - RNA, 19 nt, Homo sapiens
  misc_RNA (1)...(19): siRNA sense strand
gacguuucccugaagaaga

SEQ ID NO: 1382073 - RNA, 19 nt, Homo sapiens
  misc_RNA (1)...(19): siRNA sense strand
auucacaaguuugccuuaa

SEQ ID NO: 1382074 - RNA, 19 nt, Homo sapiens
  misc_RNA (1)...(19): siRNA sense strand
gcauguguuuuacaaugaa

SEQ ID NO: 1382075 - RNA, 19 nt, Homo sapiens
  misc_RNA (1)...(19): siRNA sense strand
aagaagaugaagaaggaaa

SEQ ID NO: 1382076 - RNA, 19 nt, Homo sapiens
  misc_RNA (1)...(19): siRNA sense strand
agaaugcacuuuugcuuuc

SEQ ID NO: 1382077 - RNA, 19 nt, Homo sapiens
  misc_RNA (1)...(19): siRNA sense strand
auacagcuccgcaggaauc

SEQ ID NO: 1382078 - RNA, 19 nt, Homo sapiens
  misc_RNA (1)...(19): siRNA sense strand
acaaguuugccuuaaugaa

SEQ ID NO: 1382079 - RNA, 19 nt, Homo sapiens
  misc_RNA (1)...(19): siRNA sense strand
uggaagaagcaauucacaa

SEQ ID NO: 1382080 - RNA, 19 nt, Homo sapiens
  misc_RNA (1)...(19): siRNA sense strand
gaaagcagcuacagagaaa

SEQ ID NO: 1382081 - RNA, 19 nt, Homo sapiens
  misc_RNA (1)...(19): siRNA sense strand
gaacaggaggaggugauua

SEQ ID NO: 1382082 - RNA, 19 nt, Homo sapiens
  misc_RNA (1)...(19): siRNA sense strand
gauaugcuaugucaaacug

SEQ ID NO: 1382083 - RNA, 19 nt, Homo sapiens
  misc_RNA (1)...(19): siRNA sense strand
gacaaggucugcagcacuu

SEQ ID NO: 1382084 - RNA, 19 nt, Homo sapiens
  misc_RNA (1)...(19): siRNA sense strand
acagagaaaugcugguuug

SEQ ID NO: 1382085 - RNA, 19 nt, Homo sapiens
  misc_RNA (1)...(19): siRNA sense strand
gagaccagccuaagaguug

SEQ ID NO: 1382086 - RNA, 19 nt, Homo sapiens
  misc_RNA (1)...(19): siRNA sense strand
ggaacucuuauguggauua

SEQ ID NO: 1382087 - RNA, 19 nt, Homo sapiens
  misc_RNA (1)...(19): siRNA sense strand
gaacucuuauguggauuau

SEQ ID NO: 1382088 - RNA, 19 nt, Homo sapiens
  misc_RNA (1)...(19): siRNA sense strand
cugcagcacuuccuugaaa

SEQ ID NO: 1382089 - RNA, 19 nt, Homo sapiens
  misc_RNA (1)...(19): siRNA sense strand
gguguaggaugucggagaa

SEQ ID NO: 1382090 - RNA, 19 nt, Homo sapiens
  misc_RNA (1)...(19): siRNA sense strand
ccuaagaguugcugcuuuc

SEQ ID NO: 1382091 - RNA, 19 nt, Homo sapiens
  misc_RNA (1)...(19): siRNA sense strand
gagaucaugcugugccuuu

SEQ ID NO: 1382092 - RNA, 19 nt, Homo sapiens
  misc_RNA (1)...(19): siRNA sense strand
aaaggaccauuuagaagug

SEQ ID NO: 1382093 - RNA, 19 nt, Homo sapiens
  misc_RNA (1)...(19): siRNA sense strand
cgaaguaccaugacugugu

SEQ ID NO: 1382094 - RNA, 19 nt, Homo sapiens
  misc_RNA (1)...(19): siRNA sense strand
gacugugucugaugccauu

SEQ ID NO: 1382095 - RNA, 19 nt, Homo sapiens
  misc_RNA (1)...(19): siRNA sense strand
gagaaagcagcuacagaga

SEQ ID NO: 1382096 - RNA, 19 nt, Homo sapiens
  misc_RNA (1)...(19): siRNA sense strand
gaagugugggcuccaguug

SEQ ID NO: 1382097 - RNA, 19 nt, Homo sapiens
  misc_RNA (1)...(19): siRNA sense strand
cugaugccauucuucgaua

SEQ ID NO: 1382098 - RNA, 19 nt, Homo sapiens
  misc_RNA (1)...(19): siRNA sense strand
gcucuucucaccuggcuaa

SEQ ID NO: 1382099 - RNA, 19 nt, Homo sapiens
  misc_RNA (1)...(19): siRNA sense strand
gccuaagaguugcugcuuu

SEQ ID NO: 1382100 - RNA, 19 nt, Homo sapiens
  misc_RNA (1)...(19): siRNA sense strand
gagugugguucuccuguca

SEQ ID NO: 1382101 - RNA, 19 nt, Homo sapiens
  misc_RNA (1)...(19): siRNA sense strand
ggagaccagccuaagaguu

SEQ ID NO: 1382102 - RNA, 19 nt, Homo sapiens
  misc_RNA (1)...(19): siRNA sense strand
acucugagguuccuuccuu

SEQ ID NO: 1382103 - RNA, 19 nt, Homo sapiens
  misc_RNA (1)...(19): siRNA sense strand
agaaagcagcuacagagaa

SEQ ID NO: 1382104 - RNA, 19 nt, Homo sapiens
  misc_RNA (1)...(19): siRNA sense strand
guaccaugacugugucuga

SEQ ID NO: 1382105 - RNA, 19 nt, Homo sapiens
  misc_RNA (1)...(19): siRNA sense strand
gacagccaguugcaccuau

SEQ ID NO: 1382106 - RNA, 19 nt, Homo sapiens
  misc_RNA (1)...(19): siRNA sense strand
gaaaaggaccauuuagaag

SEQ ID NO: 1382107 - RNA, 19 nt, Homo sapiens
  misc_RNA (1)...(19): siRNA sense strand
aggaggaggugauuacagu

SEQ ID NO: 1382108 - RNA, 19 nt, Homo sapiens
  misc_RNA (1)...(19): siRNA sense strand
ugaagaaaaggaccauuua

SEQ ID NO: 1382109 - RNA, 19 nt, Homo sapiens
  misc_RNA (1)...(19): siRNA sense strand
cuaaaggagaccagccuaa

SEQ ID NO: 1382110 - RNA, 19 nt, Homo sapiens
  misc_RNA (1)...(19): siRNA sense strand
ccuccacucuucagucugu

SEQ ID NO: 1382111 - RNA, 19 nt, Homo sapiens
  misc_RNA (1)...(19): siRNA sense strand
agaaugagggcuccuggaa

SEQ ID NO: 1382112 - RNA, 19 nt, Homo sapiens
  misc_RNA (1)...(19): siRNA sense strand
agugugggcuccaguuguu

SEQ ID NO: 1382113 - RNA, 19 nt, Homo sapiens
  misc_RNA (1)...(19): siRNA sense strand
ggaugucggagaaccaaga

SEQ ID NO: 1382114 - RNA, 19 nt, Homo sapiens
  misc_RNA (1)...(19): siRNA sense strand
aaaggagaccagccuaaga

SEQ ID NO: 1382115 - RNA, 19 nt, Homo sapiens
  misc_RNA (1)...(19): siRNA sense strand
agauauuccuccauaccaa

SEQ ID NO: 1382116 - RNA, 19 nt, Homo sapiens
  misc_RNA (1)...(19): siRNA sense strand
gaguucguguggcugagaa

SEQ ID NO: 1382117 - RNA, 19 nt, Homo sapiens
  misc_RNA (1)...(19): siRNA sense strand
cuggaacucuuauguggau

SEQ ID NO: 1382118 - RNA, 19 nt, Homo sapiens
  misc_RNA (1)...(19): siRNA sense strand
aaugagggcuccuggaacu

SEQ ID NO: 1382119 - RNA, 19 nt, Homo sapiens
  misc_RNA (1)...(19): siRNA sense strand
agaaaaggaccauuuagaa

SEQ ID NO: 1382120 - RNA, 19 nt, Homo sapiens
  misc_RNA (1)...(19): siRNA sense strand
gcuccuggaacucuuaugu

SEQ ID NO: 1382121 - RNA, 19 nt, Homo sapiens
  misc_RNA (1)...(19): siRNA sense strand
uaaaggagaccagccuaag

SEQ ID NO: 1382122 - RNA, 19 nt, Homo sapiens
  misc_RNA (1)...(19): siRNA sense strand
cuucucaccuggcuaaagg

SEQ ID NO: 1382123 - RNA, 19 nt, Homo sapiens
  misc_RNA (1)...(19): siRNA sense strand
gugauuacagugcguguuc

SEQ ID NO: 1382124 - RNA, 19 nt, Homo sapiens
  misc_RNA (1)...(19): siRNA sense strand
acagccaguugcaccuauu

SEQ ID NO: 1382125 - RNA, 19 nt, Homo sapiens
  misc_RNA (1)...(19): siRNA sense strand
gaagaaaaggaccauuuag

SEQ ID NO: 1382126 - RNA, 19 nt, Homo sapiens
  misc_RNA (1)...(19): siRNA sense strand
cuacagagaaaugcugguu

SEQ ID NO: 1382127 - RNA, 19 nt, Homo sapiens
  misc_RNA (1)...(19): siRNA sense strand
gagggcuccuggaacucuu

SEQ ID NO: 1382128 - RNA, 19 nt, Homo sapiens
  misc_RNA (1)...(19): siRNA sense strand
gaugucggagaaccaagaa

SEQ ID NO: 1382129 - RNA, 19 nt, Homo sapiens
  misc_RNA (1)...(19): siRNA sense strand
gccauucuucgauaugcua

SEQ ID NO: 1382130 - RNA, 19 nt, Homo sapiens
  misc_RNA (1)...(19): siRNA sense strand
aagcagcuacagagaaaug

SEQ ID NO: 1382131 - RNA, 19 nt, Homo sapiens
  misc_RNA (1)...(19): siRNA sense strand
cuccaguuguugacucuga

SEQ ID NO: 1382132 - RNA, 19 nt, Homo sapiens
  misc_RNA (1)...(19): siRNA sense strand
gugaagaaaaggaccauuu

SEQ ID NO: 1382133 - RNA, 19 nt, Homo sapiens
  misc_RNA (1)...(19): siRNA sense strand
ugaugccauucuucgauau

SEQ ID NO: 1382134 - RNA, 19 nt, Homo sapiens
  misc_RNA (1)...(19): siRNA sense strand
gugugguucuccugucaga

SEQ ID NO: 1382135 - RNA, 19 nt, Homo sapiens
  misc_RNA (1)...(19): siRNA sense strand
uaccaugacugugucugau

SEQ ID NO: 1382136 - RNA, 19 nt, Homo sapiens
  misc_RNA (1)...(19): siRNA sense strand
gaucaugcugugccuuugg

SEQ ID NO: 1382137 - RNA, 19 nt, Homo sapiens
  misc_RNA (1)...(19): siRNA sense strand
cuuccaagaucggguagga

SEQ ID NO: 1382138 - RNA, 19 nt, Homo sapiens
  misc_RNA (1)...(19): siRNA sense strand
gaaagcagcuacagagaaa

SEQ ID NO: 1382139 - RNA, 19 nt, Homo sapiens
  misc_RNA (1)...(19): siRNA sense strand
gaacaggaggaggugauua

SEQ ID NO: 1382140 - RNA, 19 nt, Homo sapiens
  misc_RNA (1)...(19): siRNA sense strand
gauaugcuaugucaaacug

SEQ ID NO: 1382141 - RNA, 19 nt, Homo sapiens
  misc_RNA (1)...(19): siRNA sense strand
gacaaggucugcagcacuu

SEQ ID NO: 1382142 - RNA, 19 nt, Homo sapiens
  misc_RNA (1)...(19): siRNA sense strand
acagagaaaugcugguuug

SEQ ID NO: 1382143 - RNA, 19 nt, Homo sapiens
  misc_RNA (1)...(19): siRNA sense strand
gagaccagccuaagaguug

SEQ ID NO: 1382144 - RNA, 19 nt, Homo sapiens
  misc_RNA (1)...(19): siRNA sense strand
ggaacucuuauguggauua

SEQ ID NO: 1382145 - RNA, 19 nt, Homo sapiens
  misc_RNA (1)...(19): siRNA sense strand
gaacucuuauguggauuau

SEQ ID NO: 1382146 - RNA, 19 nt, Homo sapiens
  misc_RNA (1)...(19): siRNA sense strand
cugcagcacuuccuugaaa

SEQ ID NO: 1382147 - RNA, 19 nt, Homo sapiens
  misc_RNA (1)...(19): siRNA sense strand
gguguaggaugucggagaa

SEQ ID NO: 1382148 - RNA, 19 nt, Homo sapiens
  misc_RNA (1)...(19): siRNA sense strand
ccuaagaguugcugcuuuc

SEQ ID NO: 1382149 - RNA, 19 nt, Homo sapiens
  misc_RNA (1)...(19): siRNA sense strand
gagaucaugcugugccuuu

SEQ ID NO: 1382150 - RNA, 19 nt, Homo sapiens
  misc_RNA (1)...(19): siRNA sense strand
aaaggaccauuuagaagug

SEQ ID NO: 1382151 - RNA, 19 nt, Homo sapiens
  misc_RNA (1)...(19): siRNA sense strand
cgaaguaccaugacugugu

SEQ ID NO: 1382152 - RNA, 19 nt, Homo sapiens
  misc_RNA (1)...(19): siRNA sense strand
gacugugucugaugccauu

SEQ ID NO: 1382153 - RNA, 19 nt, Homo sapiens
  misc_RNA (1)...(19): siRNA sense strand
gagaaagcagcuacagaga

SEQ ID NO: 1382154 - RNA, 19 nt, Homo sapiens
  misc_RNA (1)...(19): siRNA sense strand
gaagugugggcuccaguug

SEQ ID NO: 1382155 - RNA, 19 nt, Homo sapiens
  misc_RNA (1)...(19): siRNA sense strand
cugaugccauucuucgaua

SEQ ID NO: 1382156 - RNA, 19 nt, Homo sapiens
  misc_RNA (1)...(19): siRNA sense strand
gcucuucucaccuggcuaa

SEQ ID NO: 1382157 - RNA, 19 nt, Homo sapiens
  misc_RNA (1)...(19): siRNA sense strand
gccuaagaguugcugcuuu

SEQ ID NO: 1382158 - RNA, 19 nt, Homo sapiens
  misc_RNA (1)...(19): siRNA sense strand
gagugugguucuccuguca

SEQ ID NO: 1382159 - RNA, 19 nt, Homo sapiens
  misc_RNA (1)...(19): siRNA sense strand
ggagaccagccuaagaguu

SEQ ID NO: 1382160 - RNA, 19 nt, Homo sapiens
  misc_RNA (1)...(19): siRNA sense strand
acucugagguuccuuccuu

SEQ ID NO: 1382161 - RNA, 19 nt, Homo sapiens
  misc_RNA (1)...(19): siRNA sense strand
agaaagcagcuacagagaa

SEQ ID NO: 1382162 - RNA, 19 nt, Homo sapiens
  misc_RNA (1)...(19): siRNA sense strand
guaccaugacugugucuga

SEQ ID NO: 1382163 - RNA, 19 nt, Homo sapiens
  misc_RNA (1)...(19): siRNA sense strand
gacagccaguugcaccuau

SEQ ID NO: 1382164 - RNA, 19 nt, Homo sapiens
  misc_RNA (1)...(19): siRNA sense strand
gaaaaggaccauuuagaag

SEQ ID NO: 1382165 - RNA, 19 nt, Homo sapiens
  misc_RNA (1)...(19): siRNA sense strand
aggaggaggugauuacagu

SEQ ID NO: 1382166 - RNA, 19 nt, Homo sapiens
  misc_RNA (1)...(19): siRNA sense strand
ugaagaaaaggaccauuua

SEQ ID NO: 1382167 - RNA, 19 nt, Homo sapiens
  misc_RNA (1)...(19): siRNA sense strand
cuaaaggagaccagccuaa

SEQ ID NO: 1382168 - RNA, 19 nt, Homo sapiens
  misc_RNA (1)...(19): siRNA sense strand
ccuccacucuucagucugu

SEQ ID NO: 1382169 - RNA, 19 nt, Homo sapiens
  misc_RNA (1)...(19): siRNA sense strand
agaaugagggcuccuggaa

SEQ ID NO: 1382170 - RNA, 19 nt, Homo sapiens
  misc_RNA (1)...(19): siRNA sense strand
agugugggcuccaguuguu

SEQ ID NO: 1382171 - RNA, 19 nt, Homo sapiens
  misc_RNA (1)...(19): siRNA sense strand
ggaugucggagaaccaaga

SEQ ID NO: 1382172 - RNA, 19 nt, Homo sapiens
  misc_RNA (1)...(19): siRNA sense strand
aaaggagaccagccuaaga

SEQ ID NO: 1382173 - RNA, 19 nt, Homo sapiens
  misc_RNA (1)...(19): siRNA sense strand
agauauuccuccauaccaa

SEQ ID NO: 1382174 - RNA, 19 nt, Homo sapiens
  misc_RNA (1)...(19): siRNA sense strand
gaguucguguggcugagaa

SEQ ID NO: 1382175 - RNA, 19 nt, Homo sapiens
  misc_RNA (1)...(19): siRNA sense strand
cuggaacucuuauguggau

SEQ ID NO: 1382176 - RNA, 19 nt, Homo sapiens
  misc_RNA (1)...(19): siRNA sense strand
aaugagggcuccuggaacu

SEQ ID NO: 1382177 - RNA, 19 nt, Homo sapiens
  misc_RNA (1)...(19): siRNA sense strand
agaaaaggaccauuuagaa

SEQ ID NO: 1382178 - RNA, 19 nt, Homo sapiens
  misc_RNA (1)...(19): siRNA sense strand
gcuccuggaacucuuaugu

SEQ ID NO: 1382179 - RNA, 19 nt, Homo sapiens
  misc_RNA (1)...(19): siRNA sense strand
uaaaggagaccagccuaag

SEQ ID NO: 1382180 - RNA, 19 nt, Homo sapiens
  misc_RNA (1)...(19): siRNA sense strand
cuucucaccuggcuaaagg

SEQ ID NO: 1382181 - RNA, 19 nt, Homo sapiens
  misc_RNA (1)...(19): siRNA sense strand
gugauuacagugcguguuc

SEQ ID NO: 1382182 - RNA, 19 nt, Homo sapiens
  misc_RNA (1)...(19): siRNA sense strand
acagccaguugcaccuauu

SEQ ID NO: 1382183 - RNA, 19 nt, Homo sapiens
  misc_RNA (1)...(19): siRNA sense strand
gaagaaaaggaccauuuag

SEQ ID NO: 1382184 - RNA, 19 nt, Homo sapiens
  misc_RNA (1)...(19): siRNA sense strand
cuacagagaaaugcugguu

SEQ ID NO: 1382185 - RNA, 19 nt, Homo sapiens
  misc_RNA (1)...(19): siRNA sense strand
gagggcuccuggaacucuu

SEQ ID NO: 1382186 - RNA, 19 nt, Homo sapiens
  misc_RNA (1)...(19): siRNA sense strand
gaugucggagaaccaagaa

SEQ ID NO: 1382187 - RNA, 19 nt, Homo sapiens
  misc_RNA (1)...(19): siRNA sense strand
gccauucuucgauaugcua

SEQ ID NO: 1382188 - RNA, 19 nt, Homo sapiens
  misc_RNA (1)...(19): siRNA sense strand
aagcagcuacagagaaaug

SEQ ID NO: 1382189 - RNA, 19 nt, Homo sapiens
  misc_RNA (1)...(19): siRNA sense strand
cuccaguuguugacucuga

SEQ ID NO: 1382190 - RNA, 19 nt, Homo sapiens
  misc_RNA (1)...(19): siRNA sense strand
gugaagaaaaggaccauuu

SEQ ID NO: 1382191 - RNA, 19 nt, Homo sapiens
  misc_RNA (1)...(19): siRNA sense strand
ugaugccauucuucgauau

SEQ ID NO: 1382192 - RNA, 19 nt, Homo sapiens
  misc_RNA (1)...(19): siRNA sense strand
gugugguucuccugucaga

SEQ ID NO: 1382193 - RNA, 19 nt, Homo sapiens
  misc_RNA (1)...(19): siRNA sense strand
uaccaugacugugucugau

SEQ ID NO: 1382194 - RNA, 19 nt, Homo sapiens
  misc_RNA (1)...(19): siRNA sense strand
gaucaugcugugccuuugg

SEQ ID NO: 1382195 - RNA, 19 nt, Homo sapiens
  misc_RNA (1)...(19): siRNA sense strand
cuuccaagaucggguagga

SEQ ID NO: 1382196 - RNA, 19 nt, Homo sapiens
  misc_RNA (1)...(19): siRNA sense strand
ggaaagaucccuauggaaa

SEQ ID NO: 1382197 - RNA, 19 nt, Homo sapiens
  misc_RNA (1)...(19): siRNA sense strand
gaggaaagaucccuaugga

SEQ ID NO: 1382198 - RNA, 19 nt, Homo sapiens
  misc_RNA (1)...(19): siRNA sense strand
caggagaucauuaagauua

SEQ ID NO: 1382199 - RNA, 19 nt, Homo sapiens
  misc_RNA (1)...(19): siRNA sense strand
gcucggauaugucgacuuc

SEQ ID NO: 1382200 - RNA, 19 nt, Homo sapiens
  misc_RNA (1)...(19): siRNA sense strand
gaaaacaggagaucauuaa

SEQ ID NO: 1382201 - RNA, 19 nt, Homo sapiens
  misc_RNA (1)...(19): siRNA sense strand
ggagcuguuugaagacauu

SEQ ID NO: 1382202 - RNA, 19 nt, Homo sapiens
  misc_RNA (1)...(19): siRNA sense strand
guacuacagugaagcagau

SEQ ID NO: 1382203 - RNA, 19 nt, Homo sapiens
  misc_RNA (1)...(19): siRNA sense strand
gaacgugaggcucggauau

SEQ ID NO: 1382204 - RNA, 19 nt, Homo sapiens
  misc_RNA (1)...(19): siRNA sense strand
uuacagaacagcugauuga

SEQ ID NO: 1382205 - RNA, 19 nt, Homo sapiens
  misc_RNA (1)...(19): siRNA sense strand
guacacaacgcuacagaug

SEQ ID NO: 1382206 - RNA, 19 nt, Homo sapiens
  misc_RNA (1)...(19): siRNA sense strand
gcagaugccagccacugua

SEQ ID NO: 1382207 - RNA, 19 nt, Homo sapiens
  misc_RNA (1)...(19): siRNA sense strand
ccgucaagcuggcugauuu

SEQ ID NO: 1382208 - RNA, 19 nt, Homo sapiens
  misc_RNA (1)...(19): siRNA sense strand
gauggcaaguggcucaaug

SEQ ID NO: 1382209 - RNA, 19 nt, Homo sapiens
  misc_RNA (1)...(19): siRNA sense strand
gagagcagcaggcuugguu

SEQ ID NO: 1382210 - RNA, 19 nt, Homo sapiens
  misc_RNA (1)...(19): siRNA sense strand
aacaggagaucauuaagau

SEQ ID NO: 1382211 - RNA, 19 nt, Homo sapiens
  misc_RNA (1)...(19): siRNA sense strand
aaacaggagaucauuaaga

SEQ ID NO: 1382212 - RNA, 19 nt, Homo sapiens
  misc_RNA (1)...(19): siRNA sense strand
gcaagggugcuuucucugu

SEQ ID NO: 1382213 - RNA, 19 nt, Homo sapiens
  misc_RNA (1)...(19): siRNA sense strand
ccagagaguacuacaguga

SEQ ID NO: 1382214 - RNA, 19 nt, Homo sapiens
  misc_RNA (1)...(19): siRNA sense strand
gaacuugaucaaccagaug

SEQ ID NO: 1382215 - RNA, 19 nt, Homo sapiens
  misc_RNA (1)...(19): siRNA sense strand
gaacagcaagccuauccau

SEQ ID NO: 1382216 - RNA, 19 nt, Homo sapiens
  misc_RNA (1)...(19): siRNA sense strand
ggagaguguuaaccacauc

SEQ ID NO: 1382217 - RNA, 19 nt, Homo sapiens
  misc_RNA (1)...(19): siRNA sense strand
agaaucuccuguccaagaa

SEQ ID NO: 1382218 - RNA, 19 nt, Homo sapiens
  misc_RNA (1)...(19): siRNA sense strand
gaaagaucccuauggaaaa

SEQ ID NO: 1382219 - RNA, 19 nt, Homo sapiens
  misc_RNA (1)...(19): siRNA sense strand
cagcaggcuugguuugguu

SEQ ID NO: 1382220 - RNA, 19 nt, Homo sapiens
  misc_RNA (1)...(19): siRNA sense strand
ccaaaagccuauugaacaa

SEQ ID NO: 1382221 - RNA, 19 nt, Homo sapiens
  misc_RNA (1)...(19): siRNA sense strand
ucugaaacauccaaacauc

SEQ ID NO: 1382222 - RNA, 19 nt, Homo sapiens
  misc_RNA (1)...(19): siRNA sense strand
caacaccaccacagaagau

SEQ ID NO: 1382223 - RNA, 19 nt, Homo sapiens
  misc_RNA (1)...(19): siRNA sense strand
gcaacaccaccacagaaga

SEQ ID NO: 1382224 - RNA, 19 nt, Homo sapiens
  misc_RNA (1)...(19): siRNA sense strand
gaccauaaacccagcaaag

SEQ ID NO: 1382225 - RNA, 19 nt, Homo sapiens
  misc_RNA (1)...(19): siRNA sense strand
gcggggagcuguuugaaga

SEQ ID NO: 1382226 - RNA, 19 nt, Homo sapiens
  misc_RNA (1)...(19): siRNA sense strand
gcgccuccaugacaguauu

SEQ ID NO: 1382227 - RNA, 19 nt, Homo sapiens
  misc_RNA (1)...(19): siRNA sense strand
gcaccagccagucagaaga

SEQ ID NO: 1382228 - RNA, 19 nt, Homo sapiens
  misc_RNA (1)...(19): siRNA sense strand
aaccagaugcugaccauaa

SEQ ID NO: 1382229 - RNA, 19 nt, Homo sapiens
  misc_RNA (1)...(19): siRNA sense strand
aggagacuguggaguguuu

SEQ ID NO: 1382230 - RNA, 19 nt, Homo sapiens
  misc_RNA (1)...(19): siRNA sense strand
ggagaucauuaagauuaca

SEQ ID NO: 1382231 - RNA, 19 nt, Homo sapiens
  misc_RNA (1)...(19): siRNA sense strand
uaugucgacuucugaaaca

SEQ ID NO: 1382232 - RNA, 19 nt, Homo sapiens
  misc_RNA (1)...(19): siRNA sense strand
ccaagaacagcaagccuau

SEQ ID NO: 1382233 - RNA, 19 nt, Homo sapiens
  misc_RNA (1)...(19): siRNA sense strand
gaaaaccuguggauaucug

SEQ ID NO: 1382234 - RNA, 19 nt, Homo sapiens
  misc_RNA (1)...(19): siRNA sense strand
ccugaggucuugaggaaag

SEQ ID NO: 1382235 - RNA, 19 nt, Homo sapiens
  misc_RNA (1)...(19): siRNA sense strand
gcagcaggcuugguuuggu

SEQ ID NO: 1382236 - RNA, 19 nt, Homo sapiens
  misc_RNA (1)...(19): siRNA sense strand
gagcagcaggcuugguuug

SEQ ID NO: 1382237 - RNA, 19 nt, Homo sapiens
  misc_RNA (1)...(19): siRNA sense strand
ccgcaggugugugaagaaa

SEQ ID NO: 1382238 - RNA, 19 nt, Homo sapiens
  misc_RNA (1)...(19): siRNA sense strand
gggaugaggaucagcacaa

SEQ ID NO: 1382239 - RNA, 19 nt, Homo sapiens
  misc_RNA (1)...(19): siRNA sense strand
ggaugaggaucagcacaag

SEQ ID NO: 1382240 - RNA, 19 nt, Homo sapiens
  misc_RNA (1)...(19): siRNA sense strand
gauaugucgacuucugaaa

SEQ ID NO: 1382241 - RNA, 19 nt, Homo sapiens
  misc_RNA (1)...(19): siRNA sense strand
gccagccacuguauacauc

SEQ ID NO: 1382242 - RNA, 19 nt, Homo sapiens
  misc_RNA (1)...(19): siRNA sense strand
uggcaagggugcuuucucu

SEQ ID NO: 1382243 - RNA, 19 nt, Homo sapiens
  misc_RNA (1)...(19): siRNA sense strand
gauuucccaucaccagaau

SEQ ID NO: 1382244 - RNA, 19 nt, Homo sapiens
  misc_RNA (1)...(19): siRNA sense strand
ucaggagacuguggagugu

SEQ ID NO: 1382245 - RNA, 19 nt, Homo sapiens
  misc_RNA (1)...(19): siRNA sense strand
accagaugcugaccauaaa

SEQ ID NO: 1382246 - RNA, 19 nt, Homo sapiens
  misc_RNA (1)...(19): siRNA sense strand
ggauaugucgacuucugaa

SEQ ID NO: 1382247 - RNA, 19 nt, Homo sapiens
  misc_RNA (1)...(19): siRNA sense strand
uucacuaccucguguuuga

SEQ ID NO: 1382248 - RNA, 19 nt, Homo sapiens
  misc_RNA (1)...(19): siRNA sense strand
ucaaccagaugcugaccau

SEQ ID NO: 1382249 - RNA, 19 nt, Homo sapiens
  misc_RNA (1)...(19): siRNA sense strand
ggccagagaguacuacagu

SEQ ID NO: 1382250 - RNA, 19 nt, Homo sapiens
  misc_RNA (1)...(19): siRNA sense strand
ggcucaauguccacuauca

SEQ ID NO: 1382251 - RNA, 19 nt, Homo sapiens
  misc_RNA (1)...(19): siRNA sense strand
gauuacagaacagcugauu

SEQ ID NO: 1382252 - RNA, 19 nt, Homo sapiens
  misc_RNA (1)...(19): siRNA sense strand
aucaagggcuccacagaga

SEQ ID NO: 1382253 - RNA, 19 nt, Homo sapiens
  misc_RNA (1)...(19): siRNA sense strand
ggaucaagggcuccacaga

SEQ ID NO: 1382254 - RNA, 19 nt, Homo sapiens
  misc_RNA (1)...(19): siRNA sense strand
aaucaucaauaccaagaag

SEQ ID NO: 1382255 - RNA, 19 nt, Homo sapiens
  misc_RNA (1)...(19): siRNA sense strand
gggaucaccagaaacuaga

SEQ ID NO: 1382256 - RNA, 19 nt, Homo sapiens
  misc_RNA (1)...(19): siRNA sense strand
cagcgugcaucgccuacau

SEQ ID NO: 1382257 - RNA, 19 nt, Homo sapiens
  misc_RNA (1)...(19): siRNA sense strand
ccaugacaguauuucugaa

SEQ ID NO: 1382258 - RNA, 19 nt, Homo sapiens
  misc_RNA (1)...(19): siRNA sense strand
ccucguguuugaccuuguu

SEQ ID NO: 1382259 - RNA, 19 nt, Homo sapiens
  misc_RNA (1)...(19): siRNA sense strand
ucggauaugucgacuucug

SEQ ID NO: 1382260 - RNA, 19 nt, Homo sapiens
  misc_RNA (1)...(19): siRNA sense strand
cgaaaacaggagaucauua

SEQ ID NO: 1382261 - RNA, 19 nt, Homo sapiens
  misc_RNA (1)...(19): siRNA sense strand
ucaucaauaccaagaaguu

SEQ ID NO: 1382262 - RNA, 19 nt, Homo sapiens
  misc_RNA (1)...(19): siRNA sense strand
gccaaaagccuauugaaca

SEQ ID NO: 1382263 - RNA, 19 nt, Homo sapiens
  misc_RNA (1)...(19): siRNA sense strand
gaugccagccacuguauac

SEQ ID NO: 1382264 - RNA, 19 nt, Homo sapiens
  misc_RNA (1)...(19): siRNA sense strand
agaacuugaucaaccagau

SEQ ID NO: 1382265 - RNA, 19 nt, Homo sapiens
  misc_RNA (1)...(19): siRNA sense strand
acagcaagccuauccauac

SEQ ID NO: 1382266 - RNA, 19 nt, Homo sapiens
  misc_RNA (1)...(19): siRNA sense strand
caucaacaauggggacuuu

SEQ ID NO: 1382267 - RNA, 19 nt, Homo sapiens
  misc_RNA (1)...(19): siRNA sense strand
agagaguacuacagugaag

SEQ ID NO: 1382268 - RNA, 19 nt, Homo sapiens
  misc_RNA (1)...(19): siRNA sense strand
cagagaguacuacagugaa

SEQ ID NO: 1382269 - RNA, 19 nt, Homo sapiens
  misc_RNA (1)...(19): siRNA sense strand
caucaauaccaagaaguug

SEQ ID NO: 1382270 - RNA, 19 nt, Homo sapiens
  misc_RNA (1)...(19): siRNA sense strand
guccgcaggugugugaaga

SEQ ID NO: 1382271 - RNA, 19 nt, Homo sapiens
  misc_RNA (1)...(19): siRNA sense strand
gcaggugugugaagaaaac

SEQ ID NO: 1382272 - RNA, 19 nt, Homo sapiens
  misc_RNA (1)...(19): siRNA sense strand
uuugaggccuacacgaaga

SEQ ID NO: 1382273 - RNA, 19 nt, Homo sapiens
  misc_RNA (1)...(19): siRNA sense strand
ggacacgguaacuccugaa

SEQ ID NO: 1382274 - RNA, 19 nt, Homo sapiens
  misc_RNA (1)...(19): siRNA sense strand
ccagaaugggacacgguaa

SEQ ID NO: 1382275 - RNA, 19 nt, Homo sapiens
  misc_RNA (1)...(19): siRNA sense strand
acauccgccucacccagua

SEQ ID NO: 1382276 - RNA, 19 nt, Homo sapiens
  misc_RNA (1)...(19): siRNA sense strand
ugaaacauccaaacaucgu

SEQ ID NO: 1382277 - RNA, 19 nt, Homo sapiens
  misc_RNA (1)...(19): siRNA sense strand
gcugcaacaccaccacaga

SEQ ID NO: 1382278 - RNA, 19 nt, Homo sapiens
  misc_RNA (1)...(19): siRNA sense strand
aaaagccuauugaacaaga

SEQ ID NO: 1382279 - RNA, 19 nt, Homo sapiens
  misc_RNA (1)...(19): siRNA sense strand
ugaggaaagaucccuaugg

SEQ ID NO: 1382280 - RNA, 19 nt, Homo sapiens
  misc_RNA (1)...(19): siRNA sense strand
ccuacacgaagauuuguga

SEQ ID NO: 1382281 - RNA, 19 nt, Homo sapiens
  misc_RNA (1)...(19): siRNA sense strand
ggaaagaucccuauggaaa

SEQ ID NO: 1382282 - RNA, 19 nt, Homo sapiens
  misc_RNA (1)...(19): siRNA sense strand
gaggaaagaucccuaugga

SEQ ID NO: 1382283 - RNA, 19 nt, Homo sapiens
  misc_RNA (1)...(19): siRNA sense strand
caggagaucauuaagauua

SEQ ID NO: 1382284 - RNA, 19 nt, Homo sapiens
  misc_RNA (1)...(19): siRNA sense strand
gcucggauaugucgacuuc

SEQ ID NO: 1382285 - RNA, 19 nt, Homo sapiens
  misc_RNA (1)...(19): siRNA sense strand
gaaaacaggagaucauuaa

SEQ ID NO: 1382286 - RNA, 19 nt, Homo sapiens
  misc_RNA (1)...(19): siRNA sense strand
ggagcuguuugaagacauu

SEQ ID NO: 1382287 - RNA, 19 nt, Homo sapiens
  misc_RNA (1)...(19): siRNA sense strand
guacuacagugaagcagau

SEQ ID NO: 1382288 - RNA, 19 nt, Homo sapiens
  misc_RNA (1)...(19): siRNA sense strand
gaacgugaggcucggauau

SEQ ID NO: 1382289 - RNA, 19 nt, Homo sapiens
  misc_RNA (1)...(19): siRNA sense strand
uuacagaacagcugauuga

SEQ ID NO: 1382290 - RNA, 19 nt, Homo sapiens
  misc_RNA (1)...(19): siRNA sense strand
guacacaacgcuacagaug

SEQ ID NO: 1382291 - RNA, 19 nt, Homo sapiens
  misc_RNA (1)...(19): siRNA sense strand
gcagaugccagccacugua

SEQ ID NO: 1382292 - RNA, 19 nt, Homo sapiens
  misc_RNA (1)...(19): siRNA sense strand
ccgucaagcuggcugauuu

SEQ ID NO: 1382293 - RNA, 19 nt, Homo sapiens
  misc_RNA (1)...(19): siRNA sense strand
gauggcaaguggcucaaug

SEQ ID NO: 1382294 - RNA, 19 nt, Homo sapiens
  misc_RNA (1)...(19): siRNA sense strand
gagagcagcaggcuugguu

SEQ ID NO: 1382295 - RNA, 19 nt, Homo sapiens
  misc_RNA (1)...(19): siRNA sense strand
aacaggagaucauuaagau

SEQ ID NO: 1382296 - RNA, 19 nt, Homo sapiens
  misc_RNA (1)...(19): siRNA sense strand
aaacaggagaucauuaaga

SEQ ID NO: 1382297 - RNA, 19 nt, Homo sapiens
  misc_RNA (1)...(19): siRNA sense strand
gcaagggugcuuucucugu

SEQ ID NO: 1382298 - RNA, 19 nt, Homo sapiens
  misc_RNA (1)...(19): siRNA sense strand
ccagagaguacuacaguga

SEQ ID NO: 1382299 - RNA, 19 nt, Homo sapiens
  misc_RNA (1)...(19): siRNA sense strand
gaacuugaucaaccagaug

SEQ ID NO: 1382300 - RNA, 19 nt, Homo sapiens
  misc_RNA (1)...(19): siRNA sense strand
gaacagcaagccuauccau

SEQ ID NO: 1382301 - RNA, 19 nt, Homo sapiens
  misc_RNA (1)...(19): siRNA sense strand
ggagaguguuaaccacauc

SEQ ID NO: 1382302 - RNA, 19 nt, Homo sapiens
  misc_RNA (1)...(19): siRNA sense strand
agaaucuccuguccaagaa

SEQ ID NO: 1382303 - RNA, 19 nt, Homo sapiens
  misc_RNA (1)...(19): siRNA sense strand
gaaagaucccuauggaaaa

SEQ ID NO: 1382304 - RNA, 19 nt, Homo sapiens
  misc_RNA (1)...(19): siRNA sense strand
cagcaggcuugguuugguu

SEQ ID NO: 1382305 - RNA, 19 nt, Homo sapiens
  misc_RNA (1)...(19): siRNA sense strand
ccaaaagccuauugaacaa

SEQ ID NO: 1382306 - RNA, 19 nt, Homo sapiens
  misc_RNA (1)...(19): siRNA sense strand
ucugaaacauccaaacauc

SEQ ID NO: 1382307 - RNA, 19 nt, Homo sapiens
  misc_RNA (1)...(19): siRNA sense strand
caacaccaccacagaagau

SEQ ID NO: 1382308 - RNA, 19 nt, Homo sapiens
  misc_RNA (1)...(19): siRNA sense strand
gcaacaccaccacagaaga

SEQ ID NO: 1382309 - RNA, 19 nt, Homo sapiens
  misc_RNA (1)...(19): siRNA sense strand
gaccauaaacccagcaaag

SEQ ID NO: 1382310 - RNA, 19 nt, Homo sapiens
  misc_RNA (1)...(19): siRNA sense strand
gcggggagcuguuugaaga

SEQ ID NO: 1382311 - RNA, 19 nt, Homo sapiens
  misc_RNA (1)...(19): siRNA sense strand
gcgccuccaugacaguauu

SEQ ID NO: 1382312 - RNA, 19 nt, Homo sapiens
  misc_RNA (1)...(19): siRNA sense strand
gcaccagccagucagaaga

SEQ ID NO: 1382313 - RNA, 19 nt, Homo sapiens
  misc_RNA (1)...(19): siRNA sense strand
aaccagaugcugaccauaa

SEQ ID NO: 1382314 - RNA, 19 nt, Homo sapiens
  misc_RNA (1)...(19): siRNA sense strand
aggagacuguggaguguuu

SEQ ID NO: 1382315 - RNA, 19 nt, Homo sapiens
  misc_RNA (1)...(19): siRNA sense strand
ggagaucauuaagauuaca

SEQ ID NO: 1382316 - RNA, 19 nt, Homo sapiens
  misc_RNA (1)...(19): siRNA sense strand
uaugucgacuucugaaaca

SEQ ID NO: 1382317 - RNA, 19 nt, Homo sapiens
  misc_RNA (1)...(19): siRNA sense strand
ccaagaacagcaagccuau

SEQ ID NO: 1382318 - RNA, 19 nt, Homo sapiens
  misc_RNA (1)...(19): siRNA sense strand
gaaaaccuguggauaucug

SEQ ID NO: 1382319 - RNA, 19 nt, Homo sapiens
  misc_RNA (1)...(19): siRNA sense strand
ccugaggucuugaggaaag

SEQ ID NO: 1382320 - RNA, 19 nt, Homo sapiens
  misc_RNA (1)...(19): siRNA sense strand
gcagcaggcuugguuuggu

SEQ ID NO: 1382321 - RNA, 19 nt, Homo sapiens
  misc_RNA (1)...(19): siRNA sense strand
gagcagcaggcuugguuug

SEQ ID NO: 1382322 - RNA, 19 nt, Homo sapiens
  misc_RNA (1)...(19): siRNA sense strand
ccgcaggugugugaagaaa

SEQ ID NO: 1382323 - RNA, 19 nt, Homo sapiens
  misc_RNA (1)...(19): siRNA sense strand
gggaugaggaucagcacaa

SEQ ID NO: 1382324 - RNA, 19 nt, Homo sapiens
  misc_RNA (1)...(19): siRNA sense strand
ggaugaggaucagcacaag

SEQ ID NO: 1382325 - RNA, 19 nt, Homo sapiens
  misc_RNA (1)...(19): siRNA sense strand
gauaugucgacuucugaaa

SEQ ID NO: 1382326 - RNA, 19 nt, Homo sapiens
  misc_RNA (1)...(19): siRNA sense strand
gccagccacuguauacauc

SEQ ID NO: 1382327 - RNA, 19 nt, Homo sapiens
  misc_RNA (1)...(19): siRNA sense strand
uggcaagggugcuuucucu

SEQ ID NO: 1382328 - RNA, 19 nt, Homo sapiens
  misc_RNA (1)...(19): siRNA sense strand
gauuucccaucaccagaau

SEQ ID NO: 1382329 - RNA, 19 nt, Homo sapiens
  misc_RNA (1)...(19): siRNA sense strand
ucaggagacuguggagugu

SEQ ID NO: 1382330 - RNA, 19 nt, Homo sapiens
  misc_RNA (1)...(19): siRNA sense strand
accagaugcugaccauaaa

SEQ ID NO: 1382331 - RNA, 19 nt, Homo sapiens
  misc_RNA (1)...(19): siRNA sense strand
ggauaugucgacuucugaa

SEQ ID NO: 1382332 - RNA, 19 nt, Homo sapiens
  misc_RNA (1)...(19): siRNA sense strand
uucacuaccucguguuuga

SEQ ID NO: 1382333 - RNA, 19 nt, Homo sapiens
  misc_RNA (1)...(19): siRNA sense strand
ucaaccagaugcugaccau

SEQ ID NO: 1382334 - RNA, 19 nt, Homo sapiens
  misc_RNA (1)...(19): siRNA sense strand
ggccagagaguacuacagu

SEQ ID NO: 1382335 - RNA, 19 nt, Homo sapiens
  misc_RNA (1)...(19): siRNA sense strand
ggcucaauguccacuauca

SEQ ID NO: 1382336 - RNA, 19 nt, Homo sapiens
  misc_RNA (1)...(19): siRNA sense strand
gauuacagaacagcugauu

SEQ ID NO: 1382337 - RNA, 19 nt, Homo sapiens
  misc_RNA (1)...(19): siRNA sense strand
aucaagggcuccacagaga

SEQ ID NO: 1382338 - RNA, 19 nt, Homo sapiens
  misc_RNA (1)...(19): siRNA sense strand
ggaucaagggcuccacaga

SEQ ID NO: 1382339 - RNA, 19 nt, Homo sapiens
  misc_RNA (1)...(19): siRNA sense strand
aaucaucaauaccaagaag

SEQ ID NO: 1382340 - RNA, 19 nt, Homo sapiens
  misc_RNA (1)...(19): siRNA sense strand
gggaucaccagaaacuaga

SEQ ID NO: 1382341 - RNA, 19 nt, Homo sapiens
  misc_RNA (1)...(19): siRNA sense strand
cagcgugcaucgccuacau

SEQ ID NO: 1382342 - RNA, 19 nt, Homo sapiens
  misc_RNA (1)...(19): siRNA sense strand
ccaugacaguauuucugaa

SEQ ID NO: 1382343 - RNA, 19 nt, Homo sapiens
  misc_RNA (1)...(19): siRNA sense strand
ccucguguuugaccuuguu

SEQ ID NO: 1382344 - RNA, 19 nt, Homo sapiens
  misc_RNA (1)...(19): siRNA sense strand
ucggauaugucgacuucug

SEQ ID NO: 1382345 - RNA, 19 nt, Homo sapiens
  misc_RNA (1)...(19): siRNA sense strand
cgaaaacaggagaucauua

SEQ ID NO: 1382346 - RNA, 19 nt, Homo sapiens
  misc_RNA (1)...(19): siRNA sense strand
ucaucaauaccaagaaguu

SEQ ID NO: 1382347 - RNA, 19 nt, Homo sapiens
  misc_RNA (1)...(19): siRNA sense strand
gccaaaagccuauugaaca

SEQ ID NO: 1382348 - RNA, 19 nt, Homo sapiens
  misc_RNA (1)...(19): siRNA sense strand
gaugccagccacuguauac

SEQ ID NO: 1382349 - RNA, 19 nt, Homo sapiens
  misc_RNA (1)...(19): siRNA sense strand
agaacuugaucaaccagau

SEQ ID NO: 1382350 - RNA, 19 nt, Homo sapiens
  misc_RNA (1)...(19): siRNA sense strand
acagcaagccuauccauac

SEQ ID NO: 1382351 - RNA, 19 nt, Homo sapiens
  misc_RNA (1)...(19): siRNA sense strand
caucaacaauggggacuuu

SEQ ID NO: 1382352 - RNA, 19 nt, Homo sapiens
  misc_RNA (1)...(19): siRNA sense strand
agagaguacuacagugaag

SEQ ID NO: 1382353 - RNA, 19 nt, Homo sapiens
  misc_RNA (1)...(19): siRNA sense strand
cagagaguacuacagugaa

SEQ ID NO: 1382354 - RNA, 19 nt, Homo sapiens
  misc_RNA (1)...(19): siRNA sense strand
caucaauaccaagaaguug

SEQ ID NO: 1382355 - RNA, 19 nt, Homo sapiens
  misc_RNA (1)...(19): siRNA sense strand
guccgcaggugugugaaga

SEQ ID NO: 1382356 - RNA, 19 nt, Homo sapiens
  misc_RNA (1)...(19): siRNA sense strand
gcaggugugugaagaaaac

SEQ ID NO: 1382357 - RNA, 19 nt, Homo sapiens
  misc_RNA (1)...(19): siRNA sense strand
uuugaggccuacacgaaga

SEQ ID NO: 1382358 - RNA, 19 nt, Homo sapiens
  misc_RNA (1)...(19): siRNA sense strand
ggacacgguaacuccugaa

SEQ ID NO: 1382359 - RNA, 19 nt, Homo sapiens
  misc_RNA (1)...(19): siRNA sense strand
ccagaaugggacacgguaa

SEQ ID NO: 1382360 - RNA, 19 nt, Homo sapiens
  misc_RNA (1)...(19): siRNA sense strand
acauccgccucacccagua

SEQ ID NO: 1382361 - RNA, 19 nt, Homo sapiens
  misc_RNA (1)...(19): siRNA sense strand
ugaaacauccaaacaucgu

SEQ ID NO: 1382362 - RNA, 19 nt, Homo sapiens
  misc_RNA (1)...(19): siRNA sense strand
gcugcaacaccaccacaga

SEQ ID NO: 1382363 - RNA, 19 nt, Homo sapiens
  misc_RNA (1)...(19): siRNA sense strand
aaaagccuauugaacaaga

SEQ ID NO: 1382364 - RNA, 19 nt, Homo sapiens
  misc_RNA (1)...(19): siRNA sense strand
ugaggaaagaucccuaugg

SEQ ID NO: 1382365 - RNA, 19 nt, Homo sapiens
  misc_RNA (1)...(19): siRNA sense strand
ccuacacgaagauuuguga

SEQ ID NO: 1382366 - RNA, 19 nt, Homo sapiens
  misc_RNA (1)...(19): siRNA sense strand
ggaaagaucccuauggaaa

SEQ ID NO: 1382367 - RNA, 19 nt, Homo sapiens
  misc_RNA (1)...(19): siRNA sense strand
gaggaaagaucccuaugga

SEQ ID NO: 1382368 - RNA, 19 nt, Homo sapiens
  misc_RNA (1)...(19): siRNA sense strand
caggagaucauuaagauua

SEQ ID NO: 1382369 - RNA, 19 nt, Homo sapiens
  misc_RNA (1)...(19): siRNA sense strand
gcucggauaugucgacuuc

SEQ ID NO: 1382370 - RNA, 19 nt, Homo sapiens
  misc_RNA (1)...(19): siRNA sense strand
gaaaacaggagaucauuaa

SEQ ID NO: 1382371 - RNA, 19 nt, Homo sapiens
  misc_RNA (1)...(19): siRNA sense strand
ggagcuguuugaagacauu

SEQ ID NO: 1382372 - RNA, 19 nt, Homo sapiens
  misc_RNA (1)...(19): siRNA sense strand
guacuacagugaagcagau

SEQ ID NO: 1382373 - RNA, 19 nt, Homo sapiens
  misc_RNA (1)...(19): siRNA sense strand
gaacgugaggcucggauau

SEQ ID NO: 1382374 - RNA, 19 nt, Homo sapiens
  misc_RNA (1)...(19): siRNA sense strand
uuacagaacagcugauuga

SEQ ID NO: 1382375 - RNA, 19 nt, Homo sapiens
  misc_RNA (1)...(19): siRNA sense strand
guacacaacgcuacagaug

SEQ ID NO: 1382376 - RNA, 19 nt, Homo sapiens
  misc_RNA (1)...(19): siRNA sense strand
gcagaugccagccacugua

SEQ ID NO: 1382377 - RNA, 19 nt, Homo sapiens
  misc_RNA (1)...(19): siRNA sense strand
ccgucaagcuggcugauuu

SEQ ID NO: 1382378 - RNA, 19 nt, Homo sapiens
  misc_RNA (1)...(19): siRNA sense strand
gauggcaaguggcucaaug

SEQ ID NO: 1382379 - RNA, 19 nt, Homo sapiens
  misc_RNA (1)...(19): siRNA sense strand
gagagcagcaggcuugguu

SEQ ID NO: 1382380 - RNA, 19 nt, Homo sapiens
  misc_RNA (1)...(19): siRNA sense strand
aacaggagaucauuaagau

SEQ ID NO: 1382381 - RNA, 19 nt, Homo sapiens
  misc_RNA (1)...(19): siRNA sense strand
aaacaggagaucauuaaga

SEQ ID NO: 1382382 - RNA, 19 nt, Homo sapiens
  misc_RNA (1)...(19): siRNA sense strand
gcaagggugcuuucucugu

SEQ ID NO: 1382383 - RNA, 19 nt, Homo sapiens
  misc_RNA (1)...(19): siRNA sense strand
ccagagaguacuacaguga

SEQ ID NO: 1382384 - RNA, 19 nt, Homo sapiens
  misc_RNA (1)...(19): siRNA sense strand
gaacuugaucaaccagaug

SEQ ID NO: 1382385 - RNA, 19 nt, Homo sapiens
  misc_RNA (1)...(19): siRNA sense strand
gaacagcaagccuauccau

SEQ ID NO: 1382386 - RNA, 19 nt, Homo sapiens
  misc_RNA (1)...(19): siRNA sense strand
ggagaguguuaaccacauc

SEQ ID NO: 1382387 - RNA, 19 nt, Homo sapiens
  misc_RNA (1)...(19): siRNA sense strand
agaaucuccuguccaagaa

SEQ ID NO: 1382388 - RNA, 19 nt, Homo sapiens
  misc_RNA (1)...(19): siRNA sense strand
gaaagaucccuauggaaaa

SEQ ID NO: 1382389 - RNA, 19 nt, Homo sapiens
  misc_RNA (1)...(19): siRNA sense strand
cagcaggcuugguuugguu

SEQ ID NO: 1382390 - RNA, 19 nt, Homo sapiens
  misc_RNA (1)...(19): siRNA sense strand
ccaaaagccuauugaacaa

SEQ ID NO: 1382391 - RNA, 19 nt, Homo sapiens
  misc_RNA (1)...(19): siRNA sense strand
ucugaaacauccaaacauc

SEQ ID NO: 1382392 - RNA, 19 nt, Homo sapiens
  misc_RNA (1)...(19): siRNA sense strand
caacaccaccacagaagau

SEQ ID NO: 1382393 - RNA, 19 nt, Homo sapiens
  misc_RNA (1)...(19): siRNA sense strand
gcaacaccaccacagaaga

SEQ ID NO: 1382394 - RNA, 19 nt, Homo sapiens
  misc_RNA (1)...(19): siRNA sense strand
gaccauaaacccagcaaag

SEQ ID NO: 1382395 - RNA, 19 nt, Homo sapiens
  misc_RNA (1)...(19): siRNA sense strand
gcggggagcuguuugaaga

SEQ ID NO: 1382396 - RNA, 19 nt, Homo sapiens
  misc_RNA (1)...(19): siRNA sense strand
gcgccuccaugacaguauu

SEQ ID NO: 1382397 - RNA, 19 nt, Homo sapiens
  misc_RNA (1)...(19): siRNA sense strand
gcaccagccagucagaaga

SEQ ID NO: 1382398 - RNA, 19 nt, Homo sapiens
  misc_RNA (1)...(19): siRNA sense strand
aaccagaugcugaccauaa

SEQ ID NO: 1382399 - RNA, 19 nt, Homo sapiens
  misc_RNA (1)...(19): siRNA sense strand
aggagacuguggaguguuu

SEQ ID NO: 1382400 - RNA, 19 nt, Homo sapiens
  misc_RNA (1)...(19): siRNA sense strand
ggagaucauuaagauuaca

SEQ ID NO: 1382401 - RNA, 19 nt, Homo sapiens
  misc_RNA (1)...(19): siRNA sense strand
uaugucgacuucugaaaca

SEQ ID NO: 1382402 - RNA, 19 nt, Homo sapiens
  misc_RNA (1)...(19): siRNA sense strand
ccaagaacagcaagccuau

SEQ ID NO: 1382403 - RNA, 19 nt, Homo sapiens
  misc_RNA (1)...(19): siRNA sense strand
gaaaaccuguggauaucug

SEQ ID NO: 1382404 - RNA, 19 nt, Homo sapiens
  misc_RNA (1)...(19): siRNA sense strand
ccugaggucuugaggaaag

SEQ ID NO: 1382405 - RNA, 19 nt, Homo sapiens
  misc_RNA (1)...(19): siRNA sense strand
gcagcaggcuugguuuggu

SEQ ID NO: 1382406 - RNA, 19 nt, Homo sapiens
  misc_RNA (1)...(19): siRNA sense strand
gagcagcaggcuugguuug

SEQ ID NO: 1382407 - RNA, 19 nt, Homo sapiens
  misc_RNA (1)...(19): siRNA sense strand
ccgcaggugugugaagaaa

SEQ ID NO: 1382408 - RNA, 19 nt, Homo sapiens
  misc_RNA (1)...(19): siRNA sense strand
gggaugaggaucagcacaa

SEQ ID NO: 1382409 - RNA, 19 nt, Homo sapiens
  misc_RNA (1)...(19): siRNA sense strand
ggaugaggaucagcacaag

SEQ ID NO: 1382410 - RNA, 19 nt, Homo sapiens
  misc_RNA (1)...(19): siRNA sense strand
gauaugucgacuucugaaa

SEQ ID NO: 1382411 - RNA, 19 nt, Homo sapiens
  misc_RNA (1)...(19): siRNA sense strand
gccagccacuguauacauc

SEQ ID NO: 1382412 - RNA, 19 nt, Homo sapiens
  misc_RNA (1)...(19): siRNA sense strand
uggcaagggugcuuucucu

SEQ ID NO: 1382413 - RNA, 19 nt, Homo sapiens
  misc_RNA (1)...(19): siRNA sense strand
gauuucccaucaccagaau

SEQ ID NO: 1382414 - RNA, 19 nt, Homo sapiens
  misc_RNA (1)...(19): siRNA sense strand
ucaggagacuguggagugu

SEQ ID NO: 1382415 - RNA, 19 nt, Homo sapiens
  misc_RNA (1)...(19): siRNA sense strand
accagaugcugaccauaaa

SEQ ID NO: 1382416 - RNA, 19 nt, Homo sapiens
  misc_RNA (1)...(19): siRNA sense strand
ggauaugucgacuucugaa

SEQ ID NO: 1382417 - RNA, 19 nt, Homo sapiens
  misc_RNA (1)...(19): siRNA sense strand
uucacuaccucguguuuga

SEQ ID NO: 1382418 - RNA, 19 nt, Homo sapiens
  misc_RNA (1)...(19): siRNA sense strand
ucaaccagaugcugaccau

SEQ ID NO: 1382419 - RNA, 19 nt, Homo sapiens
  misc_RNA (1)...(19): siRNA sense strand
ggccagagaguacuacagu

SEQ ID NO: 1382420 - RNA, 19 nt, Homo sapiens
  misc_RNA (1)...(19): siRNA sense strand
ggcucaauguccacuauca

SEQ ID NO: 1382421 - RNA, 19 nt, Homo sapiens
  misc_RNA (1)...(19): siRNA sense strand
gauuacagaacagcugauu

SEQ ID NO: 1382422 - RNA, 19 nt, Homo sapiens
  misc_RNA (1)...(19): siRNA sense strand
aucaagggcuccacagaga

SEQ ID NO: 1382423 - RNA, 19 nt, Homo sapiens
  misc_RNA (1)...(19): siRNA sense strand
ggaucaagggcuccacaga

SEQ ID NO: 1382424 - RNA, 19 nt, Homo sapiens
  misc_RNA (1)...(19): siRNA sense strand
aaucaucaauaccaagaag

SEQ ID NO: 1382425 - RNA, 19 nt, Homo sapiens
  misc_RNA (1)...(19): siRNA sense strand
gggaucaccagaaacuaga

SEQ ID NO: 1382426 - RNA, 19 nt, Homo sapiens
  misc_RNA (1)...(19): siRNA sense strand
cagcgugcaucgccuacau

SEQ ID NO: 1382427 - RNA, 19 nt, Homo sapiens
  misc_RNA (1)...(19): siRNA sense strand
ccaugacaguauuucugaa

SEQ ID NO: 1382428 - RNA, 19 nt, Homo sapiens
  misc_RNA (1)...(19): siRNA sense strand
ccucguguuugaccuuguu

SEQ ID NO: 1382429 - RNA, 19 nt, Homo sapiens
  misc_RNA (1)...(19): siRNA sense strand
ucggauaugucgacuucug

SEQ ID NO: 1382430 - RNA, 19 nt, Homo sapiens
  misc_RNA (1)...(19): siRNA sense strand
cgaaaacaggagaucauua

SEQ ID NO: 1382431 - RNA, 19 nt, Homo sapiens
  misc_RNA (1)...(19): siRNA sense strand
ucaucaauaccaagaaguu

SEQ ID NO: 1382432 - RNA, 19 nt, Homo sapiens
  misc_RNA (1)...(19): siRNA sense strand
gccaaaagccuauugaaca

SEQ ID NO: 1382433 - RNA, 19 nt, Homo sapiens
  misc_RNA (1)...(19): siRNA sense strand
gaugccagccacuguauac

SEQ ID NO: 1382434 - RNA, 19 nt, Homo sapiens
  misc_RNA (1)...(19): siRNA sense strand
agaacuugaucaaccagau

SEQ ID NO: 1382435 - RNA, 19 nt, Homo sapiens
  misc_RNA (1)...(19): siRNA sense strand
acagcaagccuauccauac

SEQ ID NO: 1382436 - RNA, 19 nt, Homo sapiens
  misc_RNA (1)...(19): siRNA sense strand
caucaacaauggggacuuu

SEQ ID NO: 1382437 - RNA, 19 nt, Homo sapiens
  misc_RNA (1)...(19): siRNA sense strand
agagaguacuacagugaag

SEQ ID NO: 1382438 - RNA, 19 nt, Homo sapiens
  misc_RNA (1)...(19): siRNA sense strand
cagagaguacuacagugaa

SEQ ID NO: 1382439 - RNA, 19 nt, Homo sapiens
  misc_RNA (1)...(19): siRNA sense strand
caucaauaccaagaaguug

SEQ ID NO: 1382440 - RNA, 19 nt, Homo sapiens
  misc_RNA (1)...(19): siRNA sense strand
guccgcaggugugugaaga

SEQ ID NO: 1382441 - RNA, 19 nt, Homo sapiens
  misc_RNA (1)...(19): siRNA sense strand
gcaggugugugaagaaaac

SEQ ID NO: 1382442 - RNA, 19 nt, Homo sapiens
  misc_RNA (1)...(19): siRNA sense strand
uuugaggccuacacgaaga

SEQ ID NO: 1382443 - RNA, 19 nt, Homo sapiens
  misc_RNA (1)...(19): siRNA sense strand
ggacacgguaacuccugaa

SEQ ID NO: 1382444 - RNA, 19 nt, Homo sapiens
  misc_RNA (1)...(19): siRNA sense strand
ccagaaugggacacgguaa

SEQ ID NO: 1382445 - RNA, 19 nt, Homo sapiens
  misc_RNA (1)...(19): siRNA sense strand
acauccgccucacccagua

SEQ ID NO: 1382446 - RNA, 19 nt, Homo sapiens
  misc_RNA (1)...(19): siRNA sense strand
ugaaacauccaaacaucgu

SEQ ID NO: 1382447 - RNA, 19 nt, Homo sapiens
  misc_RNA (1)...(19): siRNA sense strand
gcugcaacaccaccacaga

SEQ ID NO: 1382448 - RNA, 19 nt, Homo sapiens
  misc_RNA (1)...(19): siRNA sense strand
aaaagccuauugaacaaga

SEQ ID NO: 1382449 - RNA, 19 nt, Homo sapiens
  misc_RNA (1)...(19): siRNA sense strand
ugaggaaagaucccuaugg

SEQ ID NO: 1382450 - RNA, 19 nt, Homo sapiens
  misc_RNA (1)...(19): siRNA sense strand
ccuacacgaagauuuguga

SEQ ID NO: 1382451 - RNA, 19 nt, Homo sapiens
  misc_RNA (1)...(19): siRNA sense strand
ggaaagaucccuauggaaa

SEQ ID NO: 1382452 - RNA, 19 nt, Homo sapiens
  misc_RNA (1)...(19): siRNA sense strand
gaggaaagaucccuaugga

SEQ ID NO: 1382453 - RNA, 19 nt, Homo sapiens
  misc_RNA (1)...(19): siRNA sense strand
caggagaucauuaagauua

SEQ ID NO: 1382454 - RNA, 19 nt, Homo sapiens
  misc_RNA (1)...(19): siRNA sense strand
gcucggauaugucgacuuc

SEQ ID NO: 1382455 - RNA, 19 nt, Homo sapiens
  misc_RNA (1)...(19): siRNA sense strand
gaaaacaggagaucauuaa

SEQ ID NO: 1382456 - RNA, 19 nt, Homo sapiens
  misc_RNA (1)...(19): siRNA sense strand
ggagcuguuugaagacauu

SEQ ID NO: 1382457 - RNA, 19 nt, Homo sapiens
  misc_RNA (1)...(19): siRNA sense strand
guacuacagugaagcagau

SEQ ID NO: 1382458 - RNA, 19 nt, Homo sapiens
  misc_RNA (1)...(19): siRNA sense strand
gaacgugaggcucggauau

SEQ ID NO: 1382459 - RNA, 19 nt, Homo sapiens
  misc_RNA (1)...(19): siRNA sense strand
uuacagaacagcugauuga

SEQ ID NO: 1382460 - RNA, 19 nt, Homo sapiens
  misc_RNA (1)...(19): siRNA sense strand
guacacaacgcuacagaug

SEQ ID NO: 1382461 - RNA, 19 nt, Homo sapiens
  misc_RNA (1)...(19): siRNA sense strand
gcagaugccagccacugua

SEQ ID NO: 1382462 - RNA, 19 nt, Homo sapiens
  misc_RNA (1)...(19): siRNA sense strand
ccgucaagcuggcugauuu

SEQ ID NO: 1382463 - RNA, 19 nt, Homo sapiens
  misc_RNA (1)...(19): siRNA sense strand
gauggcaaguggcucaaug

SEQ ID NO: 1382464 - RNA, 19 nt, Homo sapiens
  misc_RNA (1)...(19): siRNA sense strand
gagagcagcaggcuugguu

SEQ ID NO: 1382465 - RNA, 19 nt, Homo sapiens
  misc_RNA (1)...(19): siRNA sense strand
aacaggagaucauuaagau

SEQ ID NO: 1382466 - RNA, 19 nt, Homo sapiens
  misc_RNA (1)...(19): siRNA sense strand
aaacaggagaucauuaaga

SEQ ID NO: 1382467 - RNA, 19 nt, Homo sapiens
  misc_RNA (1)...(19): siRNA sense strand
gcaagggugcuuucucugu

SEQ ID NO: 1382468 - RNA, 19 nt, Homo sapiens
  misc_RNA (1)...(19): siRNA sense strand
ccagagaguacuacaguga

SEQ ID NO: 1382469 - RNA, 19 nt, Homo sapiens
  misc_RNA (1)...(19): siRNA sense strand
gaacuugaucaaccagaug

SEQ ID NO: 1382470 - RNA, 19 nt, Homo sapiens
  misc_RNA (1)...(19): siRNA sense strand
gaacagcaagccuauccau

SEQ ID NO: 1382471 - RNA, 19 nt, Homo sapiens
  misc_RNA (1)...(19): siRNA sense strand
ggagaguguuaaccacauc

SEQ ID NO: 1382472 - RNA, 19 nt, Homo sapiens
  misc_RNA (1)...(19): siRNA sense strand
agaaucuccuguccaagaa

SEQ ID NO: 1382473 - RNA, 19 nt, Homo sapiens
  misc_RNA (1)...(19): siRNA sense strand
gaaagaucccuauggaaaa

SEQ ID NO: 1382474 - RNA, 19 nt, Homo sapiens
  misc_RNA (1)...(19): siRNA sense strand
cagcaggcuugguuugguu

SEQ ID NO: 1382475 - RNA, 19 nt, Homo sapiens
  misc_RNA (1)...(19): siRNA sense strand
ccaaaagccuauugaacaa

SEQ ID NO: 1382476 - RNA, 19 nt, Homo sapiens
  misc_RNA (1)...(19): siRNA sense strand
ucugaaacauccaaacauc

SEQ ID NO: 1382477 - RNA, 19 nt, Homo sapiens
  misc_RNA (1)...(19): siRNA sense strand
caacaccaccacagaagau

SEQ ID NO: 1382478 - RNA, 19 nt, Homo sapiens
  misc_RNA (1)...(19): siRNA sense strand
gcaacaccaccacagaaga

SEQ ID NO: 1382479 - RNA, 19 nt, Homo sapiens
  misc_RNA (1)...(19): siRNA sense strand
gaccauaaacccagcaaag

SEQ ID NO: 1382480 - RNA, 19 nt, Homo sapiens
  misc_RNA (1)...(19): siRNA sense strand
gcggggagcuguuugaaga

SEQ ID NO: 1382481 - RNA, 19 nt, Homo sapiens
  misc_RNA (1)...(19): siRNA sense strand
gcgccuccaugacaguauu

SEQ ID NO: 1382482 - RNA, 19 nt, Homo sapiens
  misc_RNA (1)...(19): siRNA sense strand
gcaccagccagucagaaga

SEQ ID NO: 1382483 - RNA, 19 nt, Homo sapiens
  misc_RNA (1)...(19): siRNA sense strand
aaccagaugcugaccauaa

SEQ ID NO: 1382484 - RNA, 19 nt, Homo sapiens
  misc_RNA (1)...(19): siRNA sense strand
aggagacuguggaguguuu

SEQ ID NO: 1382485 - RNA, 19 nt, Homo sapiens
  misc_RNA (1)...(19): siRNA sense strand
ggagaucauuaagauuaca

SEQ ID NO: 1382486 - RNA, 19 nt, Homo sapiens
  misc_RNA (1)...(19): siRNA sense strand
uaugucgacuucugaaaca

SEQ ID NO: 1382487 - RNA, 19 nt, Homo sapiens
  misc_RNA (1)...(19): siRNA sense strand
ccaagaacagcaagccuau

SEQ ID NO: 1382488 - RNA, 19 nt, Homo sapiens
  misc_RNA (1)...(19): siRNA sense strand
gaaaaccuguggauaucug

SEQ ID NO: 1382489 - RNA, 19 nt, Homo sapiens
  misc_RNA (1)...(19): siRNA sense strand
ccugaggucuugaggaaag

SEQ ID NO: 1382490 - RNA, 19 nt, Homo sapiens
  misc_RNA (1)...(19): siRNA sense strand
gcagcaggcuugguuuggu

SEQ ID NO: 1382491 - RNA, 19 nt, Homo sapiens
  misc_RNA (1)...(19): siRNA sense strand
gagcagcaggcuugguuug

SEQ ID NO: 1382492 - RNA, 19 nt, Homo sapiens
  misc_RNA (1)...(19): siRNA sense strand
ccgcaggugugugaagaaa

SEQ ID NO: 1382493 - RNA, 19 nt, Homo sapiens
  misc_RNA (1)...(19): siRNA sense strand
gggaugaggaucagcacaa

SEQ ID NO: 1382494 - RNA, 19 nt, Homo sapiens
  misc_RNA (1)...(19): siRNA sense strand
ggaugaggaucagcacaag

SEQ ID NO: 1382495 - RNA, 19 nt, Homo sapiens
  misc_RNA (1)...(19): siRNA sense strand
gauaugucgacuucugaaa

SEQ ID NO: 1382496 - RNA, 19 nt, Homo sapiens
  misc_RNA (1)...(19): siRNA sense strand
gccagccacuguauacauc

SEQ ID NO: 1382497 - RNA, 19 nt, Homo sapiens
  misc_RNA (1)...(19): siRNA sense strand
uggcaagggugcuuucucu

SEQ ID NO: 1382498 - RNA, 19 nt, Homo sapiens
  misc_RNA (1)...(19): siRNA sense strand
gauuucccaucaccagaau

SEQ ID NO: 1382499 - RNA, 19 nt, Homo sapiens
  misc_RNA (1)...(19): siRNA sense strand
ucaggagacuguggagugu

SEQ ID NO: 1382500 - RNA, 19 nt, Homo sapiens
  misc_RNA (1)...(19): siRNA sense strand
accagaugcugaccauaaa

SEQ ID NO: 1382501 - RNA, 19 nt, Homo sapiens
  misc_RNA (1)...(19): siRNA sense strand
ggauaugucgacuucugaa

SEQ ID NO: 1382502 - RNA, 19 nt, Homo sapiens
  misc_RNA (1)...(19): siRNA sense strand
uucacuaccucguguuuga

SEQ ID NO: 1382503 - RNA, 19 nt, Homo sapiens
  misc_RNA (1)...(19): siRNA sense strand
ucaaccagaugcugaccau

SEQ ID NO: 1382504 - RNA, 19 nt, Homo sapiens
  misc_RNA (1)...(19): siRNA sense strand
ggccagagaguacuacagu

SEQ ID NO: 1382505 - RNA, 19 nt, Homo sapiens
  misc_RNA (1)...(19): siRNA sense strand
ggcucaauguccacuauca

SEQ ID NO: 1382506 - RNA, 19 nt, Homo sapiens
  misc_RNA (1)...(19): siRNA sense strand
gauuacagaacagcugauu

SEQ ID NO: 1382507 - RNA, 19 nt, Homo sapiens
  misc_RNA (1)...(19): siRNA sense strand
aucaagggcuccacagaga

SEQ ID NO: 1382508 - RNA, 19 nt, Homo sapiens
  misc_RNA (1)...(19): siRNA sense strand
ggaucaagggcuccacaga

SEQ ID NO: 1382509 - RNA, 19 nt, Homo sapiens
  misc_RNA (1)...(19): siRNA sense strand
aaucaucaauaccaagaag

SEQ ID NO: 1382510 - RNA, 19 nt, Homo sapiens
  misc_RNA (1)...(19): siRNA sense strand
gggaucaccagaaacuaga

SEQ ID NO: 1382511 - RNA, 19 nt, Homo sapiens
  misc_RNA (1)...(19): siRNA sense strand
cagcgugcaucgccuacau

SEQ ID NO: 1382512 - RNA, 19 nt, Homo sapiens
  misc_RNA (1)...(19): siRNA sense strand
ccaugacaguauuucugaa

SEQ ID NO: 1382513 - RNA, 19 nt, Homo sapiens
  misc_RNA (1)...(19): siRNA sense strand
ccucguguuugaccuuguu

SEQ ID NO: 1382514 - RNA, 19 nt, Homo sapiens
  misc_RNA (1)...(19): siRNA sense strand
ucggauaugucgacuucug

SEQ ID NO: 1382515 - RNA, 19 nt, Homo sapiens
  misc_RNA (1)...(19): siRNA sense strand
cgaaaacaggagaucauua

SEQ ID NO: 1382516 - RNA, 19 nt, Homo sapiens
  misc_RNA (1)...(19): siRNA sense strand
ucaucaauaccaagaaguu

SEQ ID NO: 1382517 - RNA, 19 nt, Homo sapiens
  misc_RNA (1)...(19): siRNA sense strand
gccaaaagccuauugaaca

SEQ ID NO: 1382518 - RNA, 19 nt, Homo sapiens
  misc_RNA (1)...(19): siRNA sense strand
gaugccagccacuguauac

SEQ ID NO: 1382519 - RNA, 19 nt, Homo sapiens
  misc_RNA (1)...(19): siRNA sense strand
agaacuugaucaaccagau

SEQ ID NO: 1382520 - RNA, 19 nt, Homo sapiens
  misc_RNA (1)...(19): siRNA sense strand
acagcaagccuauccauac

SEQ ID NO: 1382521 - RNA, 19 nt, Homo sapiens
  misc_RNA (1)...(19): siRNA sense strand
caucaacaauggggacuuu

SEQ ID NO: 1382522 - RNA, 19 nt, Homo sapiens
  misc_RNA (1)...(19): siRNA sense strand
agagaguacuacagugaag

SEQ ID NO: 1382523 - RNA, 19 nt, Homo sapiens
  misc_RNA (1)...(19): siRNA sense strand
cagagaguacuacagugaa

SEQ ID NO: 1382524 - RNA, 19 nt, Homo sapiens
  misc_RNA (1)...(19): siRNA sense strand
caucaauaccaagaaguug

SEQ ID NO: 1382525 - RNA, 19 nt, Homo sapiens
  misc_RNA (1)...(19): siRNA sense strand
guccgcaggugugugaaga

SEQ ID NO: 1382526 - RNA, 19 nt, Homo sapiens
  misc_RNA (1)...(19): siRNA sense strand
gcaggugugugaagaaaac

SEQ ID NO: 1382527 - RNA, 19 nt, Homo sapiens
  misc_RNA (1)...(19): siRNA sense strand
uuugaggccuacacgaaga

SEQ ID NO: 1382528 - RNA, 19 nt, Homo sapiens
  misc_RNA (1)...(19): siRNA sense strand
ggacacgguaacuccugaa

SEQ ID NO: 1382529 - RNA, 19 nt, Homo sapiens
  misc_RNA (1)...(19): siRNA sense strand
ccagaaugggacacgguaa

SEQ ID NO: 1382530 - RNA, 19 nt, Homo sapiens
  misc_RNA (1)...(19): siRNA sense strand
acauccgccucacccagua

SEQ ID NO: 1382531 - RNA, 19 nt, Homo sapiens
  misc_RNA (1)...(19): siRNA sense strand
ugaaacauccaaacaucgu

SEQ ID NO: 1382532 - RNA, 19 nt, Homo sapiens
  misc_RNA (1)...(19): siRNA sense strand
gcugcaacaccaccacaga

SEQ ID NO: 1382533 - RNA, 19 nt, Homo sapiens
  misc_RNA (1)...(19): siRNA sense strand
aaaagccuauugaacaaga

SEQ ID NO: 1382534 - RNA, 19 nt, Homo sapiens
  misc_RNA (1)...(19): siRNA sense strand
ugaggaaagaucccuaugg

SEQ ID NO: 1382535 - RNA, 19 nt, Homo sapiens
  misc_RNA (1)...(19): siRNA sense strand
ccuacacgaagauuuguga

SEQ ID NO: 1382536 - RNA, 19 nt, Homo sapiens
  misc_RNA (1)...(19): siRNA sense strand
ggaaagaucccuauggaaa

SEQ ID NO: 1382537 - RNA, 19 nt, Homo sapiens
  misc_RNA (1)...(19): siRNA sense strand
gaggaaagaucccuaugga

SEQ ID NO: 1382538 - RNA, 19 nt, Homo sapiens
  misc_RNA (1)...(19): siRNA sense strand
caggagaucauuaagauua

SEQ ID NO: 1382539 - RNA, 19 nt, Homo sapiens
  misc_RNA (1)...(19): siRNA sense strand
gcucggauaugucgacuuc

SEQ ID NO: 1382540 - RNA, 19 nt, Homo sapiens
  misc_RNA (1)...(19): siRNA sense strand
gaaaacaggagaucauuaa

SEQ ID NO: 1382541 - RNA, 19 nt, Homo sapiens
  misc_RNA (1)...(19): siRNA sense strand
ggagcuguuugaagacauu

SEQ ID NO: 1382542 - RNA, 19 nt, Homo sapiens
  misc_RNA (1)...(19): siRNA sense strand
guacuacagugaagcagau

SEQ ID NO: 1382543 - RNA, 19 nt, Homo sapiens
  misc_RNA (1)...(19): siRNA sense strand
gaacgugaggcucggauau

SEQ ID NO: 1382544 - RNA, 19 nt, Homo sapiens
  misc_RNA (1)...(19): siRNA sense strand
guacacaacgcuacagaug

SEQ ID NO: 1382545 - RNA, 19 nt, Homo sapiens
  misc_RNA (1)...(19): siRNA sense strand
gcagaugccagccacugua

SEQ ID NO: 1382546 - RNA, 19 nt, Homo sapiens
  misc_RNA (1)...(19): siRNA sense strand
ccgucaagcuggcugauuu

SEQ ID NO: 1382547 - RNA, 19 nt, Homo sapiens
  misc_RNA (1)...(19): siRNA sense strand
gagagcagcaggcuugguu

SEQ ID NO: 1382548 - RNA, 19 nt, Homo sapiens
  misc_RNA (1)...(19): siRNA sense strand
aacaggagaucauuaagau

SEQ ID NO: 1382549 - RNA, 19 nt, Homo sapiens
  misc_RNA (1)...(19): siRNA sense strand
aaacaggagaucauuaaga

SEQ ID NO: 1382550 - RNA, 19 nt, Homo sapiens
  misc_RNA (1)...(19): siRNA sense strand
ccagagaguacuacaguga

SEQ ID NO: 1382551 - RNA, 19 nt, Homo sapiens
  misc_RNA (1)...(19): siRNA sense strand
gcaagggugcuuucucugu

SEQ ID NO: 1382552 - RNA, 19 nt, Homo sapiens
  misc_RNA (1)...(19): siRNA sense strand
gaacuugaucaaccagaug

SEQ ID NO: 1382553 - RNA, 19 nt, Homo sapiens
  misc_RNA (1)...(19): siRNA sense strand
ggagaguguuaaccacauc

SEQ ID NO: 1382554 - RNA, 19 nt, Homo sapiens
  misc_RNA (1)...(19): siRNA sense strand
gaaagaucccuauggaaaa

SEQ ID NO: 1382555 - RNA, 19 nt, Homo sapiens
  misc_RNA (1)...(19): siRNA sense strand
cagcaggcuugguuugguu

SEQ ID NO: 1382556 - RNA, 19 nt, Homo sapiens
  misc_RNA (1)...(19): siRNA sense strand
ccaaaagccuauugaacaa

SEQ ID NO: 1382557 - RNA, 19 nt, Homo sapiens
  misc_RNA (1)...(19): siRNA sense strand
ucugaaacauccaaacauc

SEQ ID NO: 1382558 - RNA, 19 nt, Homo sapiens
  misc_RNA (1)...(19): siRNA sense strand
caacaccaccacagaagau

SEQ ID NO: 1382559 - RNA, 19 nt, Homo sapiens
  misc_RNA (1)...(19): siRNA sense strand
gcaacaccaccacagaaga

SEQ ID NO: 1382560 - RNA, 19 nt, Homo sapiens
  misc_RNA (1)...(19): siRNA sense strand
gaccauaaacccagcaaag

SEQ ID NO: 1382561 - RNA, 19 nt, Homo sapiens
  misc_RNA (1)...(19): siRNA sense strand
gcggggagcuguuugaaga

SEQ ID NO: 1382562 - RNA, 19 nt, Homo sapiens
  misc_RNA (1)...(19): siRNA sense strand
gcgccuccaugacaguauu

SEQ ID NO: 1382563 - RNA, 19 nt, Homo sapiens
  misc_RNA (1)...(19): siRNA sense strand
aaccagaugcugaccauaa

SEQ ID NO: 1382564 - RNA, 19 nt, Homo sapiens
  misc_RNA (1)...(19): siRNA sense strand
aggagacuguggaguguuu

SEQ ID NO: 1382565 - RNA, 19 nt, Homo sapiens
  misc_RNA (1)...(19): siRNA sense strand
ggagaucauuaagauuaca

SEQ ID NO: 1382566 - RNA, 19 nt, Homo sapiens
  misc_RNA (1)...(19): siRNA sense strand
uaugucgacuucugaaaca

SEQ ID NO: 1382567 - RNA, 19 nt, Homo sapiens
  misc_RNA (1)...(19): siRNA sense strand
gaaaaccuguggauaucug

SEQ ID NO: 1382568 - RNA, 19 nt, Homo sapiens
  misc_RNA (1)...(19): siRNA sense strand
ccgcaggugugugaagaaa

SEQ ID NO: 1382569 - RNA, 19 nt, Homo sapiens
  misc_RNA (1)...(19): siRNA sense strand
ccugaggucuugaggaaag

SEQ ID NO: 1382570 - RNA, 19 nt, Homo sapiens
  misc_RNA (1)...(19): siRNA sense strand
gcagcaggcuugguuuggu

SEQ ID NO: 1382571 - RNA, 19 nt, Homo sapiens
  misc_RNA (1)...(19): siRNA sense strand
gagcagcaggcuugguuug

SEQ ID NO: 1382572 - RNA, 19 nt, Homo sapiens
  misc_RNA (1)...(19): siRNA sense strand
gggaugaggaucagcacaa

SEQ ID NO: 1382573 - RNA, 19 nt, Homo sapiens
  misc_RNA (1)...(19): siRNA sense strand
ggaugaggaucagcacaag

SEQ ID NO: 1382574 - RNA, 19 nt, Homo sapiens
  misc_RNA (1)...(19): siRNA sense strand
gauaugucgacuucugaaa

SEQ ID NO: 1382575 - RNA, 19 nt, Homo sapiens
  misc_RNA (1)...(19): siRNA sense strand
gccagccacuguauacauc

SEQ ID NO: 1382576 - RNA, 19 nt, Homo sapiens
  misc_RNA (1)...(19): siRNA sense strand
uggcaagggugcuuucucu

SEQ ID NO: 1382577 - RNA, 19 nt, Homo sapiens
  misc_RNA (1)...(19): siRNA sense strand
ggauaugucgacuucugaa

SEQ ID NO: 1382578 - RNA, 19 nt, Homo sapiens
  misc_RNA (1)...(19): siRNA sense strand
ucaggagacuguggagugu

SEQ ID NO: 1382579 - RNA, 19 nt, Homo sapiens
  misc_RNA (1)...(19): siRNA sense strand
accagaugcugaccauaaa

SEQ ID NO: 1382580 - RNA, 19 nt, Homo sapiens
  misc_RNA (1)...(19): siRNA sense strand
gauuucccaucaccagaau

SEQ ID NO: 1382581 - RNA, 19 nt, Homo sapiens
  misc_RNA (1)...(19): siRNA sense strand
uucacuaccucguguuuga

SEQ ID NO: 1382582 - RNA, 19 nt, Homo sapiens
  misc_RNA (1)...(19): siRNA sense strand
ucaaccagaugcugaccau

SEQ ID NO: 1382583 - RNA, 19 nt, Homo sapiens
  misc_RNA (1)...(19): siRNA sense strand
aaucaucaauaccaagaag

SEQ ID NO: 1382584 - RNA, 19 nt, Homo sapiens
  misc_RNA (1)...(19): siRNA sense strand
aucaagggcuccacagaga

SEQ ID NO: 1382585 - RNA, 19 nt, Homo sapiens
  misc_RNA (1)...(19): siRNA sense strand
ggaucaagggcuccacaga

SEQ ID NO: 1382586 - RNA, 19 nt, Homo sapiens
  misc_RNA (1)...(19): siRNA sense strand
gggaucaccagaaacuaga

SEQ ID NO: 1382587 - RNA, 19 nt, Homo sapiens
  misc_RNA (1)...(19): siRNA sense strand
ggccagagaguacuacagu

SEQ ID NO: 1382588 - RNA, 19 nt, Homo sapiens
  misc_RNA (1)...(19): siRNA sense strand
ccaugacaguauuucugaa

SEQ ID NO: 1382589 - RNA, 19 nt, Homo sapiens
  misc_RNA (1)...(19): siRNA sense strand
ccucguguuugaccuuguu

SEQ ID NO: 1382590 - RNA, 19 nt, Homo sapiens
  misc_RNA (1)...(19): siRNA sense strand
ucggauaugucgacuucug

SEQ ID NO: 1382591 - RNA, 19 nt, Homo sapiens
  misc_RNA (1)...(19): siRNA sense strand
cgaaaacaggagaucauua

SEQ ID NO: 1382592 - RNA, 19 nt, Homo sapiens
  misc_RNA (1)...(19): siRNA sense strand
gccaaaagccuauugaaca

SEQ ID NO: 1382593 - RNA, 19 nt, Homo sapiens
  misc_RNA (1)...(19): siRNA sense strand
ucaucaauaccaagaaguu

SEQ ID NO: 1382594 - RNA, 19 nt, Homo sapiens
  misc_RNA (1)...(19): siRNA sense strand
gaugccagccacuguauac

SEQ ID NO: 1382595 - RNA, 19 nt, Homo sapiens
  misc_RNA (1)...(19): siRNA sense strand
agaacuugaucaaccagau

SEQ ID NO: 1382596 - RNA, 19 nt, Homo sapiens
  misc_RNA (1)...(19): siRNA sense strand
agagaguacuacagugaag

SEQ ID NO: 1382597 - RNA, 19 nt, Homo sapiens
  misc_RNA (1)...(19): siRNA sense strand
cagagaguacuacagugaa

SEQ ID NO: 1382598 - RNA, 19 nt, Homo sapiens
  misc_RNA (1)...(19): siRNA sense strand
caucaauaccaagaaguug

SEQ ID NO: 1382599 - RNA, 19 nt, Homo sapiens
  misc_RNA (1)...(19): siRNA sense strand
guccgcaggugugugaaga

SEQ ID NO: 1382600 - RNA, 19 nt, Homo sapiens
  misc_RNA (1)...(19): siRNA sense strand
ggacacgguaacuccugaa

SEQ ID NO: 1382601 - RNA, 19 nt, Homo sapiens
  misc_RNA (1)...(19): siRNA sense strand
gcaggugugugaagaaaac

SEQ ID NO: 1382602 - RNA, 19 nt, Homo sapiens
  misc_RNA (1)...(19): siRNA sense strand
ugaaacauccaaacaucgu

SEQ ID NO: 1382603 - RNA, 19 nt, Homo sapiens
  misc_RNA (1)...(19): siRNA sense strand
gcugcaacaccaccacaga

SEQ ID NO: 1382604 - RNA, 19 nt, Homo sapiens
  misc_RNA (1)...(19): siRNA sense strand
aaaagccuauugaacaaga

SEQ ID NO: 1382605 - RNA, 19 nt, Homo sapiens
  misc_RNA (1)...(19): siRNA sense strand
ccagaaugggacacgguaa

SEQ ID NO: 1382606 - RNA, 19 nt, Homo sapiens
  misc_RNA (1)...(19): siRNA sense strand
ugaggaaagaucccuaugg

SEQ ID NO: 1382607 - RNA, 19 nt, Homo sapiens
  misc_RNA (1)...(19): siRNA sense strand
ggaaagaucccuauggaaa

SEQ ID NO: 1382608 - RNA, 19 nt, Homo sapiens
  misc_RNA (1)...(19): siRNA sense strand
gaggaaagaucccuaugga

SEQ ID NO: 1382609 - RNA, 19 nt, Homo sapiens
  misc_RNA (1)...(19): siRNA sense strand
caggagaucauuaagauua

SEQ ID NO: 1382610 - RNA, 19 nt, Homo sapiens
  misc_RNA (1)...(19): siRNA sense strand
gcucggauaugucgacuuc

SEQ ID NO: 1382611 - RNA, 19 nt, Homo sapiens
  misc_RNA (1)...(19): siRNA sense strand
gaaaacaggagaucauuaa

SEQ ID NO: 1382612 - RNA, 19 nt, Homo sapiens
  misc_RNA (1)...(19): siRNA sense strand
ggagcuguuugaagacauu

SEQ ID NO: 1382613 - RNA, 19 nt, Homo sapiens
  misc_RNA (1)...(19): siRNA sense strand
guacuacagugaagcagau

SEQ ID NO: 1382614 - RNA, 19 nt, Homo sapiens
  misc_RNA (1)...(19): siRNA sense strand
gaacgugaggcucggauau

SEQ ID NO: 1382615 - RNA, 19 nt, Homo sapiens
  misc_RNA (1)...(19): siRNA sense strand
uuacagaacagcugauuga

SEQ ID NO: 1382616 - RNA, 19 nt, Homo sapiens
  misc_RNA (1)...(19): siRNA sense strand
guacacaacgcuacagaug

SEQ ID NO: 1382617 - RNA, 19 nt, Homo sapiens
  misc_RNA (1)...(19): siRNA sense strand
gcagaugccagccacugua

SEQ ID NO: 1382618 - RNA, 19 nt, Homo sapiens
  misc_RNA (1)...(19): siRNA sense strand
ccgucaagcuggcugauuu

SEQ ID NO: 1382619 - RNA, 19 nt, Homo sapiens
  misc_RNA (1)...(19): siRNA sense strand
gauggcaaguggcucaaug

SEQ ID NO: 1382620 - RNA, 19 nt, Homo sapiens
  misc_RNA (1)...(19): siRNA sense strand
gagagcagcaggcuugguu

SEQ ID NO: 1382621 - RNA, 19 nt, Homo sapiens
  misc_RNA (1)...(19): siRNA sense strand
aacaggagaucauuaagau

SEQ ID NO: 1382622 - RNA, 19 nt, Homo sapiens
  misc_RNA (1)...(19): siRNA sense strand
aaacaggagaucauuaaga

SEQ ID NO: 1382623 - RNA, 19 nt, Homo sapiens
  misc_RNA (1)...(19): siRNA sense strand
gcaagggugcuuucucugu

SEQ ID NO: 1382624 - RNA, 19 nt, Homo sapiens
  misc_RNA (1)...(19): siRNA sense strand
ccagagaguacuacaguga

SEQ ID NO: 1382625 - RNA, 19 nt, Homo sapiens
  misc_RNA (1)...(19): siRNA sense strand
gaacuugaucaaccagaug

SEQ ID NO: 1382626 - RNA, 19 nt, Homo sapiens
  misc_RNA (1)...(19): siRNA sense strand
gaacagcaagccuauccau

SEQ ID NO: 1382627 - RNA, 19 nt, Homo sapiens
  misc_RNA (1)...(19): siRNA sense strand
ggagaguguuaaccacauc

SEQ ID NO: 1382628 - RNA, 19 nt, Homo sapiens
  misc_RNA (1)...(19): siRNA sense strand
agaaucuccuguccaagaa

SEQ ID NO: 1382629 - RNA, 19 nt, Homo sapiens
  misc_RNA (1)...(19): siRNA sense strand
gaaagaucccuauggaaaa

SEQ ID NO: 1382630 - RNA, 19 nt, Homo sapiens
  misc_RNA (1)...(19): siRNA sense strand
cagcaggcuugguuugguu

SEQ ID NO: 1382631 - RNA, 19 nt, Homo sapiens
  misc_RNA (1)...(19): siRNA sense strand
ccaaaagccuauugaacaa

SEQ ID NO: 1382632 - RNA, 19 nt, Homo sapiens
  misc_RNA (1)...(19): siRNA sense strand
ucugaaacauccaaacauc

SEQ ID NO: 1382633 - RNA, 19 nt, Homo sapiens
  misc_RNA (1)...(19): siRNA sense strand
caacaccaccacagaagau

SEQ ID NO: 1382634 - RNA, 19 nt, Homo sapiens
  misc_RNA (1)...(19): siRNA sense strand
gcaacaccaccacagaaga

SEQ ID NO: 1382635 - RNA, 19 nt, Homo sapiens
  misc_RNA (1)...(19): siRNA sense strand
gaccauaaacccagcaaag

SEQ ID NO: 1382636 - RNA, 19 nt, Homo sapiens
  misc_RNA (1)...(19): siRNA sense strand
gcggggagcuguuugaaga

SEQ ID NO: 1382637 - RNA, 19 nt, Homo sapiens
  misc_RNA (1)...(19): siRNA sense strand
gcgccuccaugacaguauu

SEQ ID NO: 1382638 - RNA, 19 nt, Homo sapiens
  misc_RNA (1)...(19): siRNA sense strand
gcaccagccagucagaaga

SEQ ID NO: 1382639 - RNA, 19 nt, Homo sapiens
  misc_RNA (1)...(19): siRNA sense strand
aaccagaugcugaccauaa

SEQ ID NO: 1382640 - RNA, 19 nt, Homo sapiens
  misc_RNA (1)...(19): siRNA sense strand
aggagacuguggaguguuu

SEQ ID NO: 1382641 - RNA, 19 nt, Homo sapiens
  misc_RNA (1)...(19): siRNA sense strand
ggagaucauuaagauuaca

SEQ ID NO: 1382642 - RNA, 19 nt, Homo sapiens
  misc_RNA (1)...(19): siRNA sense strand
uaugucgacuucugaaaca

SEQ ID NO: 1382643 - RNA, 19 nt, Homo sapiens
  misc_RNA (1)...(19): siRNA sense strand
ccaagaacagcaagccuau

SEQ ID NO: 1382644 - RNA, 19 nt, Homo sapiens
  misc_RNA (1)...(19): siRNA sense strand
gaaaaccuguggauaucug

SEQ ID NO: 1382645 - RNA, 19 nt, Homo sapiens
  misc_RNA (1)...(19): siRNA sense strand
ccugaggucuugaggaaag

SEQ ID NO: 1382646 - RNA, 19 nt, Homo sapiens
  misc_RNA (1)...(19): siRNA sense strand
gcagcaggcuugguuuggu

SEQ ID NO: 1382647 - RNA, 19 nt, Homo sapiens
  misc_RNA (1)...(19): siRNA sense strand
gagcagcaggcuugguuug

SEQ ID NO: 1382648 - RNA, 19 nt, Homo sapiens
  misc_RNA (1)...(19): siRNA sense strand
ccgcaggugugugaagaaa

SEQ ID NO: 1382649 - RNA, 19 nt, Homo sapiens
  misc_RNA (1)...(19): siRNA sense strand
gggaugaggaucagcacaa

SEQ ID NO: 1382650 - RNA, 19 nt, Homo sapiens
  misc_RNA (1)...(19): siRNA sense strand
ggaugaggaucagcacaag

SEQ ID NO: 1382651 - RNA, 19 nt, Homo sapiens
  misc_RNA (1)...(19): siRNA sense strand
gauaugucgacuucugaaa

SEQ ID NO: 1382652 - RNA, 19 nt, Homo sapiens
  misc_RNA (1)...(19): siRNA sense strand
gccagccacuguauacauc

SEQ ID NO: 1382653 - RNA, 19 nt, Homo sapiens
  misc_RNA (1)...(19): siRNA sense strand
uggcaagggugcuuucucu

SEQ ID NO: 1382654 - RNA, 19 nt, Homo sapiens
  misc_RNA (1)...(19): siRNA sense strand
gauuucccaucaccagaau

SEQ ID NO: 1382655 - RNA, 19 nt, Homo sapiens
  misc_RNA (1)...(19): siRNA sense strand
ucaggagacuguggagugu

SEQ ID NO: 1382656 - RNA, 19 nt, Homo sapiens
  misc_RNA (1)...(19): siRNA sense strand
accagaugcugaccauaaa

SEQ ID NO: 1382657 - RNA, 19 nt, Homo sapiens
  misc_RNA (1)...(19): siRNA sense strand
ggauaugucgacuucugaa

SEQ ID NO: 1382658 - RNA, 19 nt, Homo sapiens
  misc_RNA (1)...(19): siRNA sense strand
uucacuaccucguguuuga

SEQ ID NO: 1382659 - RNA, 19 nt, Homo sapiens
  misc_RNA (1)...(19): siRNA sense strand
ucaaccagaugcugaccau

SEQ ID NO: 1382660 - RNA, 19 nt, Homo sapiens
  misc_RNA (1)...(19): siRNA sense strand
ggccagagaguacuacagu

SEQ ID NO: 1382661 - RNA, 19 nt, Homo sapiens
  misc_RNA (1)...(19): siRNA sense strand
ggcucaauguccacuauca

SEQ ID NO: 1382662 - RNA, 19 nt, Homo sapiens
  misc_RNA (1)...(19): siRNA sense strand
gauuacagaacagcugauu

SEQ ID NO: 1382663 - RNA, 19 nt, Homo sapiens
  misc_RNA (1)...(19): siRNA sense strand
aucaagggcuccacagaga

SEQ ID NO: 1382664 - RNA, 19 nt, Homo sapiens
  misc_RNA (1)...(19): siRNA sense strand
ggaucaagggcuccacaga

SEQ ID NO: 1382665 - RNA, 19 nt, Homo sapiens
  misc_RNA (1)...(19): siRNA sense strand
aaucaucaauaccaagaag

SEQ ID NO: 1382666 - RNA, 19 nt, Homo sapiens
  misc_RNA (1)...(19): siRNA sense strand
gggaucaccagaaacuaga

SEQ ID NO: 1382667 - RNA, 19 nt, Homo sapiens
  misc_RNA (1)...(19): siRNA sense strand
cagcgugcaucgccuacau

SEQ ID NO: 1382668 - RNA, 19 nt, Homo sapiens
  misc_RNA (1)...(19): siRNA sense strand
ccaugacaguauuucugaa

SEQ ID NO: 1382669 - RNA, 19 nt, Homo sapiens
  misc_RNA (1)...(19): siRNA sense strand
ccucguguuugaccuuguu

SEQ ID NO: 1382670 - RNA, 19 nt, Homo sapiens
  misc_RNA (1)...(19): siRNA sense strand
ucggauaugucgacuucug

SEQ ID NO: 1382671 - RNA, 19 nt, Homo sapiens
  misc_RNA (1)...(19): siRNA sense strand
cgaaaacaggagaucauua

SEQ ID NO: 1382672 - RNA, 19 nt, Homo sapiens
  misc_RNA (1)...(19): siRNA sense strand
ucaucaauaccaagaaguu

SEQ ID NO: 1382673 - RNA, 19 nt, Homo sapiens
  misc_RNA (1)...(19): siRNA sense strand
gccaaaagccuauugaaca

SEQ ID NO: 1382674 - RNA, 19 nt, Homo sapiens
  misc_RNA (1)...(19): siRNA sense strand
gaugccagccacuguauac

SEQ ID NO: 1382675 - RNA, 19 nt, Homo sapiens
  misc_RNA (1)...(19): siRNA sense strand
agaacuugaucaaccagau

SEQ ID NO: 1382676 - RNA, 19 nt, Homo sapiens
  misc_RNA (1)...(19): siRNA sense strand
acagcaagccuauccauac

SEQ ID NO: 1382677 - RNA, 19 nt, Homo sapiens
  misc_RNA (1)...(19): siRNA sense strand
caucaacaauggggacuuu

SEQ ID NO: 1382678 - RNA, 19 nt, Homo sapiens
  misc_RNA (1)...(19): siRNA sense strand
agagaguacuacagugaag

SEQ ID NO: 1382679 - RNA, 19 nt, Homo sapiens
  misc_RNA (1)...(19): siRNA sense strand
cagagaguacuacagugaa

SEQ ID NO: 1382680 - RNA, 19 nt, Homo sapiens
  misc_RNA (1)...(19): siRNA sense strand
caucaauaccaagaaguug

SEQ ID NO: 1382681 - RNA, 19 nt, Homo sapiens
  misc_RNA (1)...(19): siRNA sense strand
guccgcaggugugugaaga

SEQ ID NO: 1382682 - RNA, 19 nt, Homo sapiens
  misc_RNA (1)...(19): siRNA sense strand
gcaggugugugaagaaaac

SEQ ID NO: 1382683 - RNA, 19 nt, Homo sapiens
  misc_RNA (1)...(19): siRNA sense strand
uuugaggccuacacgaaga

SEQ ID NO: 1382684 - RNA, 19 nt, Homo sapiens
  misc_RNA (1)...(19): siRNA sense strand
ggacacgguaacuccugaa

SEQ ID NO: 1382685 - RNA, 19 nt, Homo sapiens
  misc_RNA (1)...(19): siRNA sense strand
ccagaaugggacacgguaa

SEQ ID NO: 1382686 - RNA, 19 nt, Homo sapiens
  misc_RNA (1)...(19): siRNA sense strand
acauccgccucacccagua

SEQ ID NO: 1382687 - RNA, 19 nt, Homo sapiens
  misc_RNA (1)...(19): siRNA sense strand
ugaaacauccaaacaucgu

SEQ ID NO: 1382688 - RNA, 19 nt, Homo sapiens
  misc_RNA (1)...(19): siRNA sense strand
gcugcaacaccaccacaga

SEQ ID NO: 1382689 - RNA, 19 nt, Homo sapiens
  misc_RNA (1)...(19): siRNA sense strand
aaaagccuauugaacaaga

SEQ ID NO: 1382690 - RNA, 19 nt, Homo sapiens
  misc_RNA (1)...(19): siRNA sense strand
ugaggaaagaucccuaugg

SEQ ID NO: 1382691 - RNA, 19 nt, Homo sapiens
  misc_RNA (1)...(19): siRNA sense strand
ccuacacgaagauuuguga

SEQ ID NO: 1382692 - RNA, 19 nt, Homo sapiens
  misc_RNA (1)...(19): siRNA sense strand
ggaaagaucccuauggaaa

SEQ ID NO: 1382693 - RNA, 19 nt, Homo sapiens
  misc_RNA (1)...(19): siRNA sense strand
gaggaaagaucccuaugga

SEQ ID NO: 1382694 - RNA, 19 nt, Homo sapiens
  misc_RNA (1)...(19): siRNA sense strand
caggagaucauuaagauua

SEQ ID NO: 1382695 - RNA, 19 nt, Homo sapiens
  misc_RNA (1)...(19): siRNA sense strand
gcucggauaugucgacuuc

SEQ ID NO: 1382696 - RNA, 19 nt, Homo sapiens
  misc_RNA (1)...(19): siRNA sense strand
gaaaacaggagaucauuaa

SEQ ID NO: 1382697 - RNA, 19 nt, Homo sapiens
  misc_RNA (1)...(19): siRNA sense strand
ggagcuguuugaagacauu

SEQ ID NO: 1382698 - RNA, 19 nt, Homo sapiens
  misc_RNA (1)...(19): siRNA sense strand
guacuacagugaagcagau

SEQ ID NO: 1382699 - RNA, 19 nt, Homo sapiens
  misc_RNA (1)...(19): siRNA sense strand
gaacgugaggcucggauau

SEQ ID NO: 1382700 - RNA, 19 nt, Homo sapiens
  misc_RNA (1)...(19): siRNA sense strand
uuacagaacagcugauuga

SEQ ID NO: 1382701 - RNA, 19 nt, Homo sapiens
  misc_RNA (1)...(19): siRNA sense strand
guacacaacgcuacagaug

SEQ ID NO: 1382702 - RNA, 19 nt, Homo sapiens
  misc_RNA (1)...(19): siRNA sense strand
gcagaugccagccacugua

SEQ ID NO: 1382703 - RNA, 19 nt, Homo sapiens
  misc_RNA (1)...(19): siRNA sense strand
ccgucaagcuggcugauuu

SEQ ID NO: 1382704 - RNA, 19 nt, Homo sapiens
  misc_RNA (1)...(19): siRNA sense strand
gauggcaaguggcucaaug

SEQ ID NO: 1382705 - RNA, 19 nt, Homo sapiens
  misc_RNA (1)...(19): siRNA sense strand
gagagcagcaggcuugguu

SEQ ID NO: 1382706 - RNA, 19 nt, Homo sapiens
  misc_RNA (1)...(19): siRNA sense strand
aacaggagaucauuaagau

SEQ ID NO: 1382707 - RNA, 19 nt, Homo sapiens
  misc_RNA (1)...(19): siRNA sense strand
aaacaggagaucauuaaga

SEQ ID NO: 1382708 - RNA, 19 nt, Homo sapiens
  misc_RNA (1)...(19): siRNA sense strand
gcaagggugcuuucucugu

SEQ ID NO: 1382709 - RNA, 19 nt, Homo sapiens
  misc_RNA (1)...(19): siRNA sense strand
ccagagaguacuacaguga

SEQ ID NO: 1382710 - RNA, 19 nt, Homo sapiens
  misc_RNA (1)...(19): siRNA sense strand
gaacuugaucaaccagaug

SEQ ID NO: 1382711 - RNA, 19 nt, Homo sapiens
  misc_RNA (1)...(19): siRNA sense strand
gaacagcaagccuauccau

SEQ ID NO: 1382712 - RNA, 19 nt, Homo sapiens
  misc_RNA (1)...(19): siRNA sense strand
ggagaguguuaaccacauc

SEQ ID NO: 1382713 - RNA, 19 nt, Homo sapiens
  misc_RNA (1)...(19): siRNA sense strand
agaaucuccuguccaagaa

SEQ ID NO: 1382714 - RNA, 19 nt, Homo sapiens
  misc_RNA (1)...(19): siRNA sense strand
gaaagaucccuauggaaaa

SEQ ID NO: 1382715 - RNA, 19 nt, Homo sapiens
  misc_RNA (1)...(19): siRNA sense strand
cagcaggcuugguuugguu

SEQ ID NO: 1382716 - RNA, 19 nt, Homo sapiens
  misc_RNA (1)...(19): siRNA sense strand
ccaaaagccuauugaacaa

SEQ ID NO: 1382717 - RNA, 19 nt, Homo sapiens
  misc_RNA (1)...(19): siRNA sense strand
ucugaaacauccaaacauc

SEQ ID NO: 1382718 - RNA, 19 nt, Homo sapiens
  misc_RNA (1)...(19): siRNA sense strand
caacaccaccacagaagau

SEQ ID NO: 1382719 - RNA, 19 nt, Homo sapiens
  misc_RNA (1)...(19): siRNA sense strand
gcaacaccaccacagaaga

SEQ ID NO: 1382720 - RNA, 19 nt, Homo sapiens
  misc_RNA (1)...(19): siRNA sense strand
gaccauaaacccagcaaag

SEQ ID NO: 1382721 - RNA, 19 nt, Homo sapiens
  misc_RNA (1)...(19): siRNA sense strand
gcggggagcuguuugaaga

SEQ ID NO: 1382722 - RNA, 19 nt, Homo sapiens
  misc_RNA (1)...(19): siRNA sense strand
gcgccuccaugacaguauu

SEQ ID NO: 1382723 - RNA, 19 nt, Homo sapiens
  misc_RNA (1)...(19): siRNA sense strand
gcaccagccagucagaaga

SEQ ID NO: 1382724 - RNA, 19 nt, Homo sapiens
  misc_RNA (1)...(19): siRNA sense strand
aaccagaugcugaccauaa

SEQ ID NO: 1382725 - RNA, 19 nt, Homo sapiens
  misc_RNA (1)...(19): siRNA sense strand
aggagacuguggaguguuu

SEQ ID NO: 1382726 - RNA, 19 nt, Homo sapiens
  misc_RNA (1)...(19): siRNA sense strand
ggagaucauuaagauuaca

SEQ ID NO: 1382727 - RNA, 19 nt, Homo sapiens
  misc_RNA (1)...(19): siRNA sense strand
uaugucgacuucugaaaca

SEQ ID NO: 1382728 - RNA, 19 nt, Homo sapiens
  misc_RNA (1)...(19): siRNA sense strand
ccaagaacagcaagccuau

SEQ ID NO: 1382729 - RNA, 19 nt, Homo sapiens
  misc_RNA (1)...(19): siRNA sense strand
gaaaaccuguggauaucug

SEQ ID NO: 1382730 - RNA, 19 nt, Homo sapiens
  misc_RNA (1)...(19): siRNA sense strand
ccugaggucuugaggaaag

SEQ ID NO: 1382731 - RNA, 19 nt, Homo sapiens
  misc_RNA (1)...(19): siRNA sense strand
gcagcaggcuugguuuggu

SEQ ID NO: 1382732 - RNA, 19 nt, Homo sapiens
  misc_RNA (1)...(19): siRNA sense strand
gagcagcaggcuugguuug

SEQ ID NO: 1382733 - RNA, 19 nt, Homo sapiens
  misc_RNA (1)...(19): siRNA sense strand
ccgcaggugugugaagaaa

SEQ ID NO: 1382734 - RNA, 19 nt, Homo sapiens
  misc_RNA (1)...(19): siRNA sense strand
gggaugaggaucagcacaa

SEQ ID NO: 1382735 - RNA, 19 nt, Homo sapiens
  misc_RNA (1)...(19): siRNA sense strand
ggaugaggaucagcacaag

SEQ ID NO: 1382736 - RNA, 19 nt, Homo sapiens
  misc_RNA (1)...(19): siRNA sense strand
gauaugucgacuucugaaa

SEQ ID NO: 1382737 - RNA, 19 nt, Homo sapiens
  misc_RNA (1)...(19): siRNA sense strand
gccagccacuguauacauc

SEQ ID NO: 1382738 - RNA, 19 nt, Homo sapiens
  misc_RNA (1)...(19): siRNA sense strand
uggcaagggugcuuucucu

SEQ ID NO: 1382739 - RNA, 19 nt, Homo sapiens
  misc_RNA (1)...(19): siRNA sense strand
gauuucccaucaccagaau

SEQ ID NO: 1382740 - RNA, 19 nt, Homo sapiens
  misc_RNA (1)...(19): siRNA sense strand
ucaggagacuguggagugu

SEQ ID NO: 1382741 - RNA, 19 nt, Homo sapiens
  misc_RNA (1)...(19): siRNA sense strand
accagaugcugaccauaaa

SEQ ID NO: 1382742 - RNA, 19 nt, Homo sapiens
  misc_RNA (1)...(19): siRNA sense strand
ggauaugucgacuucugaa

SEQ ID NO: 1382743 - RNA, 19 nt, Homo sapiens
  misc_RNA (1)...(19): siRNA sense strand
uucacuaccucguguuuga

SEQ ID NO: 1382744 - RNA, 19 nt, Homo sapiens
  misc_RNA (1)...(19): siRNA sense strand
ucaaccagaugcugaccau

SEQ ID NO: 1382745 - RNA, 19 nt, Homo sapiens
  misc_RNA (1)...(19): siRNA sense strand
ggccagagaguacuacagu

SEQ ID NO: 1382746 - RNA, 19 nt, Homo sapiens
  misc_RNA (1)...(19): siRNA sense strand
ggcucaauguccacuauca

SEQ ID NO: 1382747 - RNA, 19 nt, Homo sapiens
  misc_RNA (1)...(19): siRNA sense strand
gauuacagaacagcugauu

SEQ ID NO: 1382748 - RNA, 19 nt, Homo sapiens
  misc_RNA (1)...(19): siRNA sense strand
aucaagggcuccacagaga

SEQ ID NO: 1382749 - RNA, 19 nt, Homo sapiens
  misc_RNA (1)...(19): siRNA sense strand
ggaucaagggcuccacaga

SEQ ID NO: 1382750 - RNA, 19 nt, Homo sapiens
  misc_RNA (1)...(19): siRNA sense strand
aaucaucaauaccaagaag

SEQ ID NO: 1382751 - RNA, 19 nt, Homo sapiens
  misc_RNA (1)...(19): siRNA sense strand
gggaucaccagaaacuaga

SEQ ID NO: 1382752 - RNA, 19 nt, Homo sapiens
  misc_RNA (1)...(19): siRNA sense strand
cagcgugcaucgccuacau

SEQ ID NO: 1382753 - RNA, 19 nt, Homo sapiens
  misc_RNA (1)...(19): siRNA sense strand
ccaugacaguauuucugaa

SEQ ID NO: 1382754 - RNA, 19 nt, Homo sapiens
  misc_RNA (1)...(19): siRNA sense strand
ccucguguuugaccuuguu

SEQ ID NO: 1382755 - RNA, 19 nt, Homo sapiens
  misc_RNA (1)...(19): siRNA sense strand
ucggauaugucgacuucug

SEQ ID NO: 1382756 - RNA, 19 nt, Homo sapiens
  misc_RNA (1)...(19): siRNA sense strand
cgaaaacaggagaucauua

SEQ ID NO: 1382757 - RNA, 19 nt, Homo sapiens
  misc_RNA (1)...(19): siRNA sense strand
ucaucaauaccaagaaguu

SEQ ID NO: 1382758 - RNA, 19 nt, Homo sapiens
  misc_RNA (1)...(19): siRNA sense strand
gccaaaagccuauugaaca

SEQ ID NO: 1382759 - RNA, 19 nt, Homo sapiens
  misc_RNA (1)...(19): siRNA sense strand
gaugccagccacuguauac

SEQ ID NO: 1382760 - RNA, 19 nt, Homo sapiens
  misc_RNA (1)...(19): siRNA sense strand
agaacuugaucaaccagau

SEQ ID NO: 1382761 - RNA, 19 nt, Homo sapiens
  misc_RNA (1)...(19): siRNA sense strand
acagcaagccuauccauac

SEQ ID NO: 1382762 - RNA, 19 nt, Homo sapiens
  misc_RNA (1)...(19): siRNA sense strand
caucaacaauggggacuuu

SEQ ID NO: 1382763 - RNA, 19 nt, Homo sapiens
  misc_RNA (1)...(19): siRNA sense strand
agagaguacuacagugaag

SEQ ID NO: 1382764 - RNA, 19 nt, Homo sapiens
  misc_RNA (1)...(19): siRNA sense strand
cagagaguacuacagugaa

SEQ ID NO: 1382765 - RNA, 19 nt, Homo sapiens
  misc_RNA (1)...(19): siRNA sense strand
caucaauaccaagaaguug

SEQ ID NO: 1382766 - RNA, 19 nt, Homo sapiens
  misc_RNA (1)...(19): siRNA sense strand
guccgcaggugugugaaga

SEQ ID NO: 1382767 - RNA, 19 nt, Homo sapiens
  misc_RNA (1)...(19): siRNA sense strand
gcaggugugugaagaaaac

SEQ ID NO: 1382768 - RNA, 19 nt, Homo sapiens
  misc_RNA (1)...(19): siRNA sense strand
uuugaggccuacacgaaga

SEQ ID NO: 1382769 - RNA, 19 nt, Homo sapiens
  misc_RNA (1)...(19): siRNA sense strand
ggacacgguaacuccugaa

SEQ ID NO: 1382770 - RNA, 19 nt, Homo sapiens
  misc_RNA (1)...(19): siRNA sense strand
ccagaaugggacacgguaa

SEQ ID NO: 1382771 - RNA, 19 nt, Homo sapiens
  misc_RNA (1)...(19): siRNA sense strand
acauccgccucacccagua

SEQ ID NO: 1382772 - RNA, 19 nt, Homo sapiens
  misc_RNA (1)...(19): siRNA sense strand
ugaaacauccaaacaucgu

SEQ ID NO: 1382773 - RNA, 19 nt, Homo sapiens
  misc_RNA (1)...(19): siRNA sense strand
gcugcaacaccaccacaga

SEQ ID NO: 1382774 - RNA, 19 nt, Homo sapiens
  misc_RNA (1)...(19): siRNA sense strand
aaaagccuauugaacaaga

SEQ ID NO: 1382775 - RNA, 19 nt, Homo sapiens
  misc_RNA (1)...(19): siRNA sense strand
ugaggaaagaucccuaugg

SEQ ID NO: 1382776 - RNA, 19 nt, Homo sapiens
  misc_RNA (1)...(19): siRNA sense strand
ccuacacgaagauuuguga

SEQ ID NO: 1382777 - RNA, 19 nt, Homo sapiens
  misc_RNA (1)...(19): siRNA sense strand
ggaaagaucccuauggaaa

SEQ ID NO: 1382778 - RNA, 19 nt, Homo sapiens
  misc_RNA (1)...(19): siRNA sense strand
gaggaaagaucccuaugga

SEQ ID NO: 1382779 - RNA, 19 nt, Homo sapiens
  misc_RNA (1)...(19): siRNA sense strand
caggagaucauuaagauua

SEQ ID NO: 1382780 - RNA, 19 nt, Homo sapiens
  misc_RNA (1)...(19): siRNA sense strand
gcucggauaugucgacuuc

SEQ ID NO: 1382781 - RNA, 19 nt, Homo sapiens
  misc_RNA (1)...(19): siRNA sense strand
gaaaacaggagaucauuaa

SEQ ID NO: 1382782 - RNA, 19 nt, Homo sapiens
  misc_RNA (1)...(19): siRNA sense strand
ggagcuguuugaagacauu

SEQ ID NO: 1382783 - RNA, 19 nt, Homo sapiens
  misc_RNA (1)...(19): siRNA sense strand
guacuacagugaagcagau

SEQ ID NO: 1382784 - RNA, 19 nt, Homo sapiens
  misc_RNA (1)...(19): siRNA sense strand
gaacgugaggcucggauau

SEQ ID NO: 1382785 - RNA, 19 nt, Homo sapiens
  misc_RNA (1)...(19): siRNA sense strand
uuacagaacagcugauuga

SEQ ID NO: 1382786 - RNA, 19 nt, Homo sapiens
  misc_RNA (1)...(19): siRNA sense strand
guacacaacgcuacagaug

SEQ ID NO: 1382787 - RNA, 19 nt, Homo sapiens
  misc_RNA (1)...(19): siRNA sense strand
gcagaugccagccacugua

SEQ ID NO: 1382788 - RNA, 19 nt, Homo sapiens
  misc_RNA (1)...(19): siRNA sense strand
ccgucaagcuggcugauuu

SEQ ID NO: 1382789 - RNA, 19 nt, Homo sapiens
  misc_RNA (1)...(19): siRNA sense strand
gauggcaaguggcucaaug

SEQ ID NO: 1382790 - RNA, 19 nt, Homo sapiens
  misc_RNA (1)...(19): siRNA sense strand
gagagcagcaggcuugguu

SEQ ID NO: 1382791 - RNA, 19 nt, Homo sapiens
  misc_RNA (1)...(19): siRNA sense strand
aacaggagaucauuaagau

SEQ ID NO: 1382792 - RNA, 19 nt, Homo sapiens
  misc_RNA (1)...(19): siRNA sense strand
aaacaggagaucauuaaga

SEQ ID NO: 1382793 - RNA, 19 nt, Homo sapiens
  misc_RNA (1)...(19): siRNA sense strand
gcaagggugcuuucucugu

SEQ ID NO: 1382794 - RNA, 19 nt, Homo sapiens
  misc_RNA (1)...(19): siRNA sense strand
ccagagaguacuacaguga

SEQ ID NO: 1382795 - RNA, 19 nt, Homo sapiens
  misc_RNA (1)...(19): siRNA sense strand
gaacuugaucaaccagaug

SEQ ID NO: 1382796 - RNA, 19 nt, Homo sapiens
  misc_RNA (1)...(19): siRNA sense strand
gaacagcaagccuauccau

SEQ ID NO: 1382797 - RNA, 19 nt, Homo sapiens
  misc_RNA (1)...(19): siRNA sense strand
ggagaguguuaaccacauc

SEQ ID NO: 1382798 - RNA, 19 nt, Homo sapiens
  misc_RNA (1)...(19): siRNA sense strand
agaaucuccuguccaagaa

SEQ ID NO: 1382799 - RNA, 19 nt, Homo sapiens
  misc_RNA (1)...(19): siRNA sense strand
gaaagaucccuauggaaaa

SEQ ID NO: 1382800 - RNA, 19 nt, Homo sapiens
  misc_RNA (1)...(19): siRNA sense strand
cagcaggcuugguuugguu

SEQ ID NO: 1382801 - RNA, 19 nt, Homo sapiens
  misc_RNA (1)...(19): siRNA sense strand
ccaaaagccuauugaacaa

SEQ ID NO: 1382802 - RNA, 19 nt, Homo sapiens
  misc_RNA (1)...(19): siRNA sense strand
ucugaaacauccaaacauc

SEQ ID NO: 1382803 - RNA, 19 nt, Homo sapiens
  misc_RNA (1)...(19): siRNA sense strand
caacaccaccacagaagau

SEQ ID NO: 1382804 - RNA, 19 nt, Homo sapiens
  misc_RNA (1)...(19): siRNA sense strand
gcaacaccaccacagaaga

SEQ ID NO: 1382805 - RNA, 19 nt, Homo sapiens
  misc_RNA (1)...(19): siRNA sense strand
gaccauaaacccagcaaag

SEQ ID NO: 1382806 - RNA, 19 nt, Homo sapiens
  misc_RNA (1)...(19): siRNA sense strand
gcggggagcuguuugaaga

SEQ ID NO: 1382807 - RNA, 19 nt, Homo sapiens
  misc_RNA (1)...(19): siRNA sense strand
gcgccuccaugacaguauu

SEQ ID NO: 1382808 - RNA, 19 nt, Homo sapiens
  misc_RNA (1)...(19): siRNA sense strand
gcaccagccagucagaaga

SEQ ID NO: 1382809 - RNA, 19 nt, Homo sapiens
  misc_RNA (1)...(19): siRNA sense strand
aaccagaugcugaccauaa

SEQ ID NO: 1382810 - RNA, 19 nt, Homo sapiens
  misc_RNA (1)...(19): siRNA sense strand
aggagacuguggaguguuu

SEQ ID NO: 1382811 - RNA, 19 nt, Homo sapiens
  misc_RNA (1)...(19): siRNA sense strand
ggagaucauuaagauuaca

SEQ ID NO: 1382812 - RNA, 19 nt, Homo sapiens
  misc_RNA (1)...(19): siRNA sense strand
uaugucgacuucugaaaca

SEQ ID NO: 1382813 - RNA, 19 nt, Homo sapiens
  misc_RNA (1)...(19): siRNA sense strand
ccaagaacagcaagccuau

SEQ ID NO: 1382814 - RNA, 19 nt, Homo sapiens
  misc_RNA (1)...(19): siRNA sense strand
gaaaaccuguggauaucug

SEQ ID NO: 1382815 - RNA, 19 nt, Homo sapiens
  misc_RNA (1)...(19): siRNA sense strand
ccugaggucuugaggaaag

SEQ ID NO: 1382816 - RNA, 19 nt, Homo sapiens
  misc_RNA (1)...(19): siRNA sense strand
gcagcaggcuugguuuggu

SEQ ID NO: 1382817 - RNA, 19 nt, Homo sapiens
  misc_RNA (1)...(19): siRNA sense strand
gagcagcaggcuugguuug

SEQ ID NO: 1382818 - RNA, 19 nt, Homo sapiens
  misc_RNA (1)...(19): siRNA sense strand
ccgcaggugugugaagaaa

SEQ ID NO: 1382819 - RNA, 19 nt, Homo sapiens
  misc_RNA (1)...(19): siRNA sense strand
gggaugaggaucagcacaa

SEQ ID NO: 1382820 - RNA, 19 nt, Homo sapiens
  misc_RNA (1)...(19): siRNA sense strand
ggaugaggaucagcacaag

SEQ ID NO: 1382821 - RNA, 19 nt, Homo sapiens
  misc_RNA (1)...(19): siRNA sense strand
gauaugucgacuucugaaa

SEQ ID NO: 1382822 - RNA, 19 nt, Homo sapiens
  misc_RNA (1)...(19): siRNA sense strand
gccagccacuguauacauc

SEQ ID NO: 1382823 - RNA, 19 nt, Homo sapiens
  misc_RNA (1)...(19): siRNA sense strand
uggcaagggugcuuucucu

SEQ ID NO: 1382824 - RNA, 19 nt, Homo sapiens
  misc_RNA (1)...(19): siRNA sense strand
gauuucccaucaccagaau

SEQ ID NO: 1382825 - RNA, 19 nt, Homo sapiens
  misc_RNA (1)...(19): siRNA sense strand
ucaggagacuguggagugu

SEQ ID NO: 1382826 - RNA, 19 nt, Homo sapiens
  misc_RNA (1)...(19): siRNA sense strand
accagaugcugaccauaaa

SEQ ID NO: 1382827 - RNA, 19 nt, Homo sapiens
  misc_RNA (1)...(19): siRNA sense strand
ggauaugucgacuucugaa

SEQ ID NO: 1382828 - RNA, 19 nt, Homo sapiens
  misc_RNA (1)...(19): siRNA sense strand
uucacuaccucguguuuga

SEQ ID NO: 1382829 - RNA, 19 nt, Homo sapiens
  misc_RNA (1)...(19): siRNA sense strand
ucaaccagaugcugaccau

SEQ ID NO: 1382830 - RNA, 19 nt, Homo sapiens
  misc_RNA (1)...(19): siRNA sense strand
ggccagagaguacuacagu

SEQ ID NO: 1382831 - RNA, 19 nt, Homo sapiens
  misc_RNA (1)...(19): siRNA sense strand
ggcucaauguccacuauca

SEQ ID NO: 1382832 - RNA, 19 nt, Homo sapiens
  misc_RNA (1)...(19): siRNA sense strand
gauuacagaacagcugauu

SEQ ID NO: 1382833 - RNA, 19 nt, Homo sapiens
  misc_RNA (1)...(19): siRNA sense strand
aucaagggcuccacagaga

SEQ ID NO: 1382834 - RNA, 19 nt, Homo sapiens
  misc_RNA (1)...(19): siRNA sense strand
ggaucaagggcuccacaga

SEQ ID NO: 1382835 - RNA, 19 nt, Homo sapiens
  misc_RNA (1)...(19): siRNA sense strand
aaucaucaauaccaagaag

SEQ ID NO: 1382836 - RNA, 19 nt, Homo sapiens
  misc_RNA (1)...(19): siRNA sense strand
gggaucaccagaaacuaga

SEQ ID NO: 1382837 - RNA, 19 nt, Homo sapiens
  misc_RNA (1)...(19): siRNA sense strand
cagcgugcaucgccuacau

SEQ ID NO: 1382838 - RNA, 19 nt, Homo sapiens
  misc_RNA (1)...(19): siRNA sense strand
ccaugacaguauuucugaa

SEQ ID NO: 1382839 - RNA, 19 nt, Homo sapiens
  misc_RNA (1)...(19): siRNA sense strand
ccucguguuugaccuuguu

SEQ ID NO: 1382840 - RNA, 19 nt, Homo sapiens
  misc_RNA (1)...(19): siRNA sense strand
ucggauaugucgacuucug

SEQ ID NO: 1382841 - RNA, 19 nt, Homo sapiens
  misc_RNA (1)...(19): siRNA sense strand
cgaaaacaggagaucauua

SEQ ID NO: 1382842 - RNA, 19 nt, Homo sapiens
  misc_RNA (1)...(19): siRNA sense strand
ucaucaauaccaagaaguu

SEQ ID NO: 1382843 - RNA, 19 nt, Homo sapiens
  misc_RNA (1)...(19): siRNA sense strand
gccaaaagccuauugaaca

SEQ ID NO: 1382844 - RNA, 19 nt, Homo sapiens
  misc_RNA (1)...(19): siRNA sense strand
gaugccagccacuguauac

SEQ ID NO: 1382845 - RNA, 19 nt, Homo sapiens
  misc_RNA (1)...(19): siRNA sense strand
agaacuugaucaaccagau

SEQ ID NO: 1382846 - RNA, 19 nt, Homo sapiens
  misc_RNA (1)...(19): siRNA sense strand
acagcaagccuauccauac

SEQ ID NO: 1382847 - RNA, 19 nt, Homo sapiens
  misc_RNA (1)...(19): siRNA sense strand
caucaacaauggggacuuu

SEQ ID NO: 1382848 - RNA, 19 nt, Homo sapiens
  misc_RNA (1)...(19): siRNA sense strand
agagaguacuacagugaag

SEQ ID NO: 1382849 - RNA, 19 nt, Homo sapiens
  misc_RNA (1)...(19): siRNA sense strand
cagagaguacuacagugaa

SEQ ID NO: 1382850 - RNA, 19 nt, Homo sapiens
  misc_RNA (1)...(19): siRNA sense strand
caucaauaccaagaaguug

SEQ ID NO: 1382851 - RNA, 19 nt, Homo sapiens
  misc_RNA (1)...(19): siRNA sense strand
guccgcaggugugugaaga

SEQ ID NO: 1382852 - RNA, 19 nt, Homo sapiens
  misc_RNA (1)...(19): siRNA sense strand
gcaggugugugaagaaaac

SEQ ID NO: 1382853 - RNA, 19 nt, Homo sapiens
  misc_RNA (1)...(19): siRNA sense strand
uuugaggccuacacgaaga

SEQ ID NO: 1382854 - RNA, 19 nt, Homo sapiens
  misc_RNA (1)...(19): siRNA sense strand
ggacacgguaacuccugaa

SEQ ID NO: 1382855 - RNA, 19 nt, Homo sapiens
  misc_RNA (1)...(19): siRNA sense strand
ccagaaugggacacgguaa

SEQ ID NO: 1382856 - RNA, 19 nt, Homo sapiens
  misc_RNA (1)...(19): siRNA sense strand
acauccgccucacccagua

SEQ ID NO: 1382857 - RNA, 19 nt, Homo sapiens
  misc_RNA (1)...(19): siRNA sense strand
ugaaacauccaaacaucgu

SEQ ID NO: 1382858 - RNA, 19 nt, Homo sapiens
  misc_RNA (1)...(19): siRNA sense strand
gcugcaacaccaccacaga

SEQ ID NO: 1382859 - RNA, 19 nt, Homo sapiens
  misc_RNA (1)...(19): siRNA sense strand
aaaagccuauugaacaaga

SEQ ID NO: 1382860 - RNA, 19 nt, Homo sapiens
  misc_RNA (1)...(19): siRNA sense strand
ugaggaaagaucccuaugg

SEQ ID NO: 1382861 - RNA, 19 nt, Homo sapiens
  misc_RNA (1)...(19): siRNA sense strand
ccuacacgaagauuuguga

SEQ ID NO: 1382862 - RNA, 19 nt, Homo sapiens
  misc_RNA (1)...(19): siRNA sense strand
ggaaagaucccuauggaaa

SEQ ID NO: 1382863 - RNA, 19 nt, Homo sapiens
  misc_RNA (1)...(19): siRNA sense strand
gaggaaagaucccuaugga

SEQ ID NO: 1382864 - RNA, 19 nt, Homo sapiens
  misc_RNA (1)...(19): siRNA sense strand
caggagaucauuaagauua

SEQ ID NO: 1382865 - RNA, 19 nt, Homo sapiens
  misc_RNA (1)...(19): siRNA sense strand
gcucggauaugucgacuuc

SEQ ID NO: 1382866 - RNA, 19 nt, Homo sapiens
  misc_RNA (1)...(19): siRNA sense strand
gaaaacaggagaucauuaa

SEQ ID NO: 1382867 - RNA, 19 nt, Homo sapiens
  misc_RNA (1)...(19): siRNA sense strand
ggagcuguuugaagacauu

SEQ ID NO: 1382868 - RNA, 19 nt, Homo sapiens
  misc_RNA (1)...(19): siRNA sense strand
guacuacagugaagcagau

SEQ ID NO: 1382869 - RNA, 19 nt, Homo sapiens
  misc_RNA (1)...(19): siRNA sense strand
gaacgugaggcucggauau

SEQ ID NO: 1382870 - RNA, 19 nt, Homo sapiens
  misc_RNA (1)...(19): siRNA sense strand
uuacagaacagcugauuga

SEQ ID NO: 1382871 - RNA, 19 nt, Homo sapiens
  misc_RNA (1)...(19): siRNA sense strand
guacacaacgcuacagaug

SEQ ID NO: 1382872 - RNA, 19 nt, Homo sapiens
  misc_RNA (1)...(19): siRNA sense strand
gcagaugccagccacugua

SEQ ID NO: 1382873 - RNA, 19 nt, Homo sapiens
  misc_RNA (1)...(19): siRNA sense strand
ccgucaagcuggcugauuu

SEQ ID NO: 1382874 - RNA, 19 nt, Homo sapiens
  misc_RNA (1)...(19): siRNA sense strand
gauggcaaguggcucaaug

SEQ ID NO: 1382875 - RNA, 19 nt, Homo sapiens
  misc_RNA (1)...(19): siRNA sense strand
gagagcagcaggcuugguu

SEQ ID NO: 1382876 - RNA, 19 nt, Homo sapiens
  misc_RNA (1)...(19): siRNA sense strand
aacaggagaucauuaagau

SEQ ID NO: 1382877 - RNA, 19 nt, Homo sapiens
  misc_RNA (1)...(19): siRNA sense strand
aaacaggagaucauuaaga

SEQ ID NO: 1382878 - RNA, 19 nt, Homo sapiens
  misc_RNA (1)...(19): siRNA sense strand
gcaagggugcuuucucugu

SEQ ID NO: 1382879 - RNA, 19 nt, Homo sapiens
  misc_RNA (1)...(19): siRNA sense strand
ccagagaguacuacaguga

SEQ ID NO: 1382880 - RNA, 19 nt, Homo sapiens
  misc_RNA (1)...(19): siRNA sense strand
gaacuugaucaaccagaug

SEQ ID NO: 1382881 - RNA, 19 nt, Homo sapiens
  misc_RNA (1)...(19): siRNA sense strand
gaacagcaagccuauccau

SEQ ID NO: 1382882 - RNA, 19 nt, Homo sapiens
  misc_RNA (1)...(19): siRNA sense strand
ggagaguguuaaccacauc

SEQ ID NO: 1382883 - RNA, 19 nt, Homo sapiens
  misc_RNA (1)...(19): siRNA sense strand
agaaucuccuguccaagaa

SEQ ID NO: 1382884 - RNA, 19 nt, Homo sapiens
  misc_RNA (1)...(19): siRNA sense strand
gaaagaucccuauggaaaa

SEQ ID NO: 1382885 - RNA, 19 nt, Homo sapiens
  misc_RNA (1)...(19): siRNA sense strand
cagcaggcuugguuugguu

SEQ ID NO: 1382886 - RNA, 19 nt, Homo sapiens
  misc_RNA (1)...(19): siRNA sense strand
ccaaaagccuauugaacaa

SEQ ID NO: 1382887 - RNA, 19 nt, Homo sapiens
  misc_RNA (1)...(19): siRNA sense strand
ucugaaacauccaaacauc

SEQ ID NO: 1382888 - RNA, 19 nt, Homo sapiens
  misc_RNA (1)...(19): siRNA sense strand
caacaccaccacagaagau

SEQ ID NO: 1382889 - RNA, 19 nt, Homo sapiens
  misc_RNA (1)...(19): siRNA sense strand
gcaacaccaccacagaaga

SEQ ID NO: 1382890 - RNA, 19 nt, Homo sapiens
  misc_RNA (1)...(19): siRNA sense strand
gaccauaaacccagcaaag

SEQ ID NO: 1382891 - RNA, 19 nt, Homo sapiens
  misc_RNA (1)...(19): siRNA sense strand
gcggggagcuguuugaaga

SEQ ID NO: 1382892 - RNA, 19 nt, Homo sapiens
  misc_RNA (1)...(19): siRNA sense strand
gcgccuccaugacaguauu

SEQ ID NO: 1382893 - RNA, 19 nt, Homo sapiens
  misc_RNA (1)...(19): siRNA sense strand
gcaccagccagucagaaga

SEQ ID NO: 1382894 - RNA, 19 nt, Homo sapiens
  misc_RNA (1)...(19): siRNA sense strand
aaccagaugcugaccauaa

SEQ ID NO: 1382895 - RNA, 19 nt, Homo sapiens
  misc_RNA (1)...(19): siRNA sense strand
aggagacuguggaguguuu

SEQ ID NO: 1382896 - RNA, 19 nt, Homo sapiens
  misc_RNA (1)...(19): siRNA sense strand
ggagaucauuaagauuaca

SEQ ID NO: 1382897 - RNA, 19 nt, Homo sapiens
  misc_RNA (1)...(19): siRNA sense strand
uaugucgacuucugaaaca

SEQ ID NO: 1382898 - RNA, 19 nt, Homo sapiens
  misc_RNA (1)...(19): siRNA sense strand
ccaagaacagcaagccuau

SEQ ID NO: 1382899 - RNA, 19 nt, Homo sapiens
  misc_RNA (1)...(19): siRNA sense strand
gaaaaccuguggauaucug

SEQ ID NO: 1382900 - RNA, 19 nt, Homo sapiens
  misc_RNA (1)...(19): siRNA sense strand
ccugaggucuugaggaaag

SEQ ID NO: 1382901 - RNA, 19 nt, Homo sapiens
  misc_RNA (1)...(19): siRNA sense strand
gcagcaggcuugguuuggu

SEQ ID NO: 1382902 - RNA, 19 nt, Homo sapiens
  misc_RNA (1)...(19): siRNA sense strand
gagcagcaggcuugguuug

SEQ ID NO: 1382903 - RNA, 19 nt, Homo sapiens
  misc_RNA (1)...(19): siRNA sense strand
ccgcaggugugugaagaaa

SEQ ID NO: 1382904 - RNA, 19 nt, Homo sapiens
  misc_RNA (1)...(19): siRNA sense strand
gggaugaggaucagcacaa

SEQ ID NO: 1382905 - RNA, 19 nt, Homo sapiens
  misc_RNA (1)...(19): siRNA sense strand
ggaugaggaucagcacaag

SEQ ID NO: 1382906 - RNA, 19 nt, Homo sapiens
  misc_RNA (1)...(19): siRNA sense strand
gauaugucgacuucugaaa

SEQ ID NO: 1382907 - RNA, 19 nt, Homo sapiens
  misc_RNA (1)...(19): siRNA sense strand
gccagccacuguauacauc

SEQ ID NO: 1382908 - RNA, 19 nt, Homo sapiens
  misc_RNA (1)...(19): siRNA sense strand
uggcaagggugcuuucucu

SEQ ID NO: 1382909 - RNA, 19 nt, Homo sapiens
  misc_RNA (1)...(19): siRNA sense strand
gauuucccaucaccagaau

SEQ ID NO: 1382910 - RNA, 19 nt, Homo sapiens
  misc_RNA (1)...(19): siRNA sense strand
ucaggagacuguggagugu

SEQ ID NO: 1382911 - RNA, 19 nt, Homo sapiens
  misc_RNA (1)...(19): siRNA sense strand
accagaugcugaccauaaa

SEQ ID NO: 1382912 - RNA, 19 nt, Homo sapiens
  misc_RNA (1)...(19): siRNA sense strand
ggauaugucgacuucugaa

SEQ ID NO: 1382913 - RNA, 19 nt, Homo sapiens
  misc_RNA (1)...(19): siRNA sense strand
uucacuaccucguguuuga

SEQ ID NO: 1382914 - RNA, 19 nt, Homo sapiens
  misc_RNA (1)...(19): siRNA sense strand
ucaaccagaugcugaccau

SEQ ID NO: 1382915 - RNA, 19 nt, Homo sapiens
  misc_RNA (1)...(19): siRNA sense strand
ggccagagaguacuacagu

SEQ ID NO: 1382916 - RNA, 19 nt, Homo sapiens
  misc_RNA (1)...(19): siRNA sense strand
ggcucaauguccacuauca

SEQ ID NO: 1382917 - RNA, 19 nt, Homo sapiens
  misc_RNA (1)...(19): siRNA sense strand
gauuacagaacagcugauu

SEQ ID NO: 1382918 - RNA, 19 nt, Homo sapiens
  misc_RNA (1)...(19): siRNA sense strand
aucaagggcuccacagaga

SEQ ID NO: 1382919 - RNA, 19 nt, Homo sapiens
  misc_RNA (1)...(19): siRNA sense strand
ggaucaagggcuccacaga

SEQ ID NO: 1382920 - RNA, 19 nt, Homo sapiens
  misc_RNA (1)...(19): siRNA sense strand
aaucaucaauaccaagaag

SEQ ID NO: 1382921 - RNA, 19 nt, Homo sapiens
  misc_RNA (1)...(19): siRNA sense strand
gggaucaccagaaacuaga

SEQ ID NO: 1382922 - RNA, 19 nt, Homo sapiens
  misc_RNA (1)...(19): siRNA sense strand
cagcgugcaucgccuacau

SEQ ID NO: 1382923 - RNA, 19 nt, Homo sapiens
  misc_RNA (1)...(19): siRNA sense strand
ccaugacaguauuucugaa

SEQ ID NO: 1382924 - RNA, 19 nt, Homo sapiens
  misc_RNA (1)...(19): siRNA sense strand
ccucguguuugaccuuguu

SEQ ID NO: 1382925 - RNA, 19 nt, Homo sapiens
  misc_RNA (1)...(19): siRNA sense strand
ucggauaugucgacuucug

SEQ ID NO: 1382926 - RNA, 19 nt, Homo sapiens
  misc_RNA (1)...(19): siRNA sense strand
cgaaaacaggagaucauua

SEQ ID NO: 1382927 - RNA, 19 nt, Homo sapiens
  misc_RNA (1)...(19): siRNA sense strand
ucaucaauaccaagaaguu

SEQ ID NO: 1382928 - RNA, 19 nt, Homo sapiens
  misc_RNA (1)...(19): siRNA sense strand
gccaaaagccuauugaaca

SEQ ID NO: 1382929 - RNA, 19 nt, Homo sapiens
  misc_RNA (1)...(19): siRNA sense strand
gaugccagccacuguauac

SEQ ID NO: 1382930 - RNA, 19 nt, Homo sapiens
  misc_RNA (1)...(19): siRNA sense strand
agaacuugaucaaccagau

SEQ ID NO: 1382931 - RNA, 19 nt, Homo sapiens
  misc_RNA (1)...(19): siRNA sense strand
acagcaagccuauccauac

SEQ ID NO: 1382932 - RNA, 19 nt, Homo sapiens
  misc_RNA (1)...(19): siRNA sense strand
caucaacaauggggacuuu

SEQ ID NO: 1382933 - RNA, 19 nt, Homo sapiens
  misc_RNA (1)...(19): siRNA sense strand
agagaguacuacagugaag

SEQ ID NO: 1382934 - RNA, 19 nt, Homo sapiens
  misc_RNA (1)...(19): siRNA sense strand
cagagaguacuacagugaa

SEQ ID NO: 1382935 - RNA, 19 nt, Homo sapiens
  misc_RNA (1)...(19): siRNA sense strand
caucaauaccaagaaguug

SEQ ID NO: 1382936 - RNA, 19 nt, Homo sapiens
  misc_RNA (1)...(19): siRNA sense strand
guccgcaggugugugaaga

SEQ ID NO: 1382937 - RNA, 19 nt, Homo sapiens
  misc_RNA (1)...(19): siRNA sense strand
gcaggugugugaagaaaac

SEQ ID NO: 1382938 - RNA, 19 nt, Homo sapiens
  misc_RNA (1)...(19): siRNA sense strand
uuugaggccuacacgaaga

SEQ ID NO: 1382939 - RNA, 19 nt, Homo sapiens
  misc_RNA (1)...(19): siRNA sense strand
ggacacgguaacuccugaa

SEQ ID NO: 1382940 - RNA, 19 nt, Homo sapiens
  misc_RNA (1)...(19): siRNA sense strand
ccagaaugggacacgguaa

SEQ ID NO: 1382941 - RNA, 19 nt, Homo sapiens
  misc_RNA (1)...(19): siRNA sense strand
acauccgccucacccagua

SEQ ID NO: 1382942 - RNA, 19 nt, Homo sapiens
  misc_RNA (1)...(19): siRNA sense strand
ugaaacauccaaacaucgu

SEQ ID NO: 1382943 - RNA, 19 nt, Homo sapiens
  misc_RNA (1)...(19): siRNA sense strand
gcugcaacaccaccacaga

SEQ ID NO: 1382944 - RNA, 19 nt, Homo sapiens
  misc_RNA (1)...(19): siRNA sense strand
aaaagccuauugaacaaga

SEQ ID NO: 1382945 - RNA, 19 nt, Homo sapiens
  misc_RNA (1)...(19): siRNA sense strand
ugaggaaagaucccuaugg

SEQ ID NO: 1382946 - RNA, 19 nt, Homo sapiens
  misc_RNA (1)...(19): siRNA sense strand
ccuacacgaagauuuguga

SEQ ID NO: 1382947 - RNA, 19 nt, Homo sapiens
  misc_RNA (1)...(19): siRNA sense strand
ggaaagaucccuauggaaa

SEQ ID NO: 1382948 - RNA, 19 nt, Homo sapiens
  misc_RNA (1)...(19): siRNA sense strand
gaggaaagaucccuaugga

SEQ ID NO: 1382949 - RNA, 19 nt, Homo sapiens
  misc_RNA (1)...(19): siRNA sense strand
caggagaucauuaagauua

SEQ ID NO: 1382950 - RNA, 19 nt, Homo sapiens
  misc_RNA (1)...(19): siRNA sense strand
gcucggauaugucgacuuc

SEQ ID NO: 1382951 - RNA, 19 nt, Homo sapiens
  misc_RNA (1)...(19): siRNA sense strand
gaaaacaggagaucauuaa

SEQ ID NO: 1382952 - RNA, 19 nt, Homo sapiens
  misc_RNA (1)...(19): siRNA sense strand
ggagcuguuugaagacauu

SEQ ID NO: 1382953 - RNA, 19 nt, Homo sapiens
  misc_RNA (1)...(19): siRNA sense strand
guacuacagugaagcagau

SEQ ID NO: 1382954 - RNA, 19 nt, Homo sapiens
  misc_RNA (1)...(19): siRNA sense strand
gaacgugaggcucggauau

SEQ ID NO: 1382955 - RNA, 19 nt, Homo sapiens
  misc_RNA (1)...(19): siRNA sense strand
uuacagaacagcugauuga

SEQ ID NO: 1382956 - RNA, 19 nt, Homo sapiens
  misc_RNA (1)...(19): siRNA sense strand
guacacaacgcuacagaug

SEQ ID NO: 1382957 - RNA, 19 nt, Homo sapiens
  misc_RNA (1)...(19): siRNA sense strand
gcagaugccagccacugua

SEQ ID NO: 1382958 - RNA, 19 nt, Homo sapiens
  misc_RNA (1)...(19): siRNA sense strand
ccgucaagcuggcugauuu

SEQ ID NO: 1382959 - RNA, 19 nt, Homo sapiens
  misc_RNA (1)...(19): siRNA sense strand
gauggcaaguggcucaaug

SEQ ID NO: 1382960 - RNA, 19 nt, Homo sapiens
  misc_RNA (1)...(19): siRNA sense strand
gagagcagcaggcuugguu

SEQ ID NO: 1382961 - RNA, 19 nt, Homo sapiens
  misc_RNA (1)...(19): siRNA sense strand
aacaggagaucauuaagau

SEQ ID NO: 1382962 - RNA, 19 nt, Homo sapiens
  misc_RNA (1)...(19): siRNA sense strand
aaacaggagaucauuaaga

SEQ ID NO: 1382963 - RNA, 19 nt, Homo sapiens
  misc_RNA (1)...(19): siRNA sense strand
gcaagggugcuuucucugu

SEQ ID NO: 1382964 - RNA, 19 nt, Homo sapiens
  misc_RNA (1)...(19): siRNA sense strand
ccagagaguacuacaguga

SEQ ID NO: 1382965 - RNA, 19 nt, Homo sapiens
  misc_RNA (1)...(19): siRNA sense strand
gaacuugaucaaccagaug

SEQ ID NO: 1382966 - RNA, 19 nt, Homo sapiens
  misc_RNA (1)...(19): siRNA sense strand
gaacagcaagccuauccau

SEQ ID NO: 1382967 - RNA, 19 nt, Homo sapiens
  misc_RNA (1)...(19): siRNA sense strand
ggagaguguuaaccacauc

SEQ ID NO: 1382968 - RNA, 19 nt, Homo sapiens
  misc_RNA (1)...(19): siRNA sense strand
agaaucuccuguccaagaa

SEQ ID NO: 1382969 - RNA, 19 nt, Homo sapiens
  misc_RNA (1)...(19): siRNA sense strand
gaaagaucccuauggaaaa

SEQ ID NO: 1382970 - RNA, 19 nt, Homo sapiens
  misc_RNA (1)...(19): siRNA sense strand
cagcaggcuugguuugguu

SEQ ID NO: 1382971 - RNA, 19 nt, Homo sapiens
  misc_RNA (1)...(19): siRNA sense strand
ccaaaagccuauugaacaa

SEQ ID NO: 1382972 - RNA, 19 nt, Homo sapiens
  misc_RNA (1)...(19): siRNA sense strand
ucugaaacauccaaacauc

SEQ ID NO: 1382973 - RNA, 19 nt, Homo sapiens
  misc_RNA (1)...(19): siRNA sense strand
caacaccaccacagaagau

SEQ ID NO: 1382974 - RNA, 19 nt, Homo sapiens
  misc_RNA (1)...(19): siRNA sense strand
gcaacaccaccacagaaga

SEQ ID NO: 1382975 - RNA, 19 nt, Homo sapiens
  misc_RNA (1)...(19): siRNA sense strand
gaccauaaacccagcaaag

SEQ ID NO: 1382976 - RNA, 19 nt, Homo sapiens
  misc_RNA (1)...(19): siRNA sense strand
gcggggagcuguuugaaga

SEQ ID NO: 1382977 - RNA, 19 nt, Homo sapiens
  misc_RNA (1)...(19): siRNA sense strand
gcgccuccaugacaguauu

SEQ ID NO: 1382978 - RNA, 19 nt, Homo sapiens
  misc_RNA (1)...(19): siRNA sense strand
gcaccagccagucagaaga

SEQ ID NO: 1382979 - RNA, 19 nt, Homo sapiens
  misc_RNA (1)...(19): siRNA sense strand
aaccagaugcugaccauaa

SEQ ID NO: 1382980 - RNA, 19 nt, Homo sapiens
  misc_RNA (1)...(19): siRNA sense strand
aggagacuguggaguguuu

SEQ ID NO: 1382981 - RNA, 19 nt, Homo sapiens
  misc_RNA (1)...(19): siRNA sense strand
ggagaucauuaagauuaca

SEQ ID NO: 1382982 - RNA, 19 nt, Homo sapiens
  misc_RNA (1)...(19): siRNA sense strand
uaugucgacuucugaaaca

SEQ ID NO: 1382983 - RNA, 19 nt, Homo sapiens
  misc_RNA (1)...(19): siRNA sense strand
ccaagaacagcaagccuau

SEQ ID NO: 1382984 - RNA, 19 nt, Homo sapiens
  misc_RNA (1)...(19): siRNA sense strand
gaaaaccuguggauaucug

SEQ ID NO: 1382985 - RNA, 19 nt, Homo sapiens
  misc_RNA (1)...(19): siRNA sense strand
ccugaggucuugaggaaag

SEQ ID NO: 1382986 - RNA, 19 nt, Homo sapiens
  misc_RNA (1)...(19): siRNA sense strand
gcagcaggcuugguuuggu

SEQ ID NO: 1382987 - RNA, 19 nt, Homo sapiens
  misc_RNA (1)...(19): siRNA sense strand
gagcagcaggcuugguuug

SEQ ID NO: 1382988 - RNA, 19 nt, Homo sapiens
  misc_RNA (1)...(19): siRNA sense strand
ccgcaggugugugaagaaa

SEQ ID NO: 1382989 - RNA, 19 nt, Homo sapiens
  misc_RNA (1)...(19): siRNA sense strand
gggaugaggaucagcacaa

SEQ ID NO: 1382990 - RNA, 19 nt, Homo sapiens
  misc_RNA (1)...(19): siRNA sense strand
ggaugaggaucagcacaag

SEQ ID NO: 1382991 - RNA, 19 nt, Homo sapiens
  misc_RNA (1)...(19): siRNA sense strand
gauaugucgacuucugaaa

SEQ ID NO: 1382992 - RNA, 19 nt, Homo sapiens
  misc_RNA (1)...(19): siRNA sense strand
gccagccacuguauacauc

SEQ ID NO: 1382993 - RNA, 19 nt, Homo sapiens
  misc_RNA (1)...(19): siRNA sense strand
uggcaagggugcuuucucu

SEQ ID NO: 1382994 - RNA, 19 nt, Homo sapiens
  misc_RNA (1)...(19): siRNA sense strand
gauuucccaucaccagaau

SEQ ID NO: 1382995 - RNA, 19 nt, Homo sapiens
  misc_RNA (1)...(19): siRNA sense strand
ucaggagacuguggagugu

SEQ ID NO: 1382996 - RNA, 19 nt, Homo sapiens
  misc_RNA (1)...(19): siRNA sense strand
accagaugcugaccauaaa

SEQ ID NO: 1382997 - RNA, 19 nt, Homo sapiens
  misc_RNA (1)...(19): siRNA sense strand
ggauaugucgacuucugaa

SEQ ID NO: 1382998 - RNA, 19 nt, Homo sapiens
  misc_RNA (1)...(19): siRNA sense strand
uucacuaccucguguuuga

SEQ ID NO: 1382999 - RNA, 19 nt, Homo sapiens
  misc_RNA (1)...(19): siRNA sense strand
ucaaccagaugcugaccau

SEQ ID NO: 1383000 - RNA, 19 nt, Homo sapiens
  misc_RNA (1)...(19): siRNA sense strand
ggccagagaguacuacagu

SEQ ID NO: 1383001 - RNA, 19 nt, Homo sapiens
  misc_RNA (1)...(19): siRNA sense strand
ggcucaauguccacuauca

SEQ ID NO: 1383002 - RNA, 19 nt, Homo sapiens
  misc_RNA (1)...(19): siRNA sense strand
gauuacagaacagcugauu

SEQ ID NO: 1383003 - RNA, 19 nt, Homo sapiens
  misc_RNA (1)...(19): siRNA sense strand
aucaagggcuccacagaga

SEQ ID NO: 1383004 - RNA, 19 nt, Homo sapiens
  misc_RNA (1)...(19): siRNA sense strand
ggaucaagggcuccacaga

SEQ ID NO: 1383005 - RNA, 19 nt, Homo sapiens
  misc_RNA (1)...(19): siRNA sense strand
aaucaucaauaccaagaag

SEQ ID NO: 1383006 - RNA, 19 nt, Homo sapiens
  misc_RNA (1)...(19): siRNA sense strand
gggaucaccagaaacuaga

SEQ ID NO: 1383007 - RNA, 19 nt, Homo sapiens
  misc_RNA (1)...(19): siRNA sense strand
cagcgugcaucgccuacau

SEQ ID NO: 1383008 - RNA, 19 nt, Homo sapiens
  misc_RNA (1)...(19): siRNA sense strand
ccaugacaguauuucugaa

SEQ ID NO: 1383009 - RNA, 19 nt, Homo sapiens
  misc_RNA (1)...(19): siRNA sense strand
ccucguguuugaccuuguu

SEQ ID NO: 1383010 - RNA, 19 nt, Homo sapiens
  misc_RNA (1)...(19): siRNA sense strand
ucggauaugucgacuucug

SEQ ID NO: 1383011 - RNA, 19 nt, Homo sapiens
  misc_RNA (1)...(19): siRNA sense strand
cgaaaacaggagaucauua

SEQ ID NO: 1383012 - RNA, 19 nt, Homo sapiens
  misc_RNA (1)...(19): siRNA sense strand
ucaucaauaccaagaaguu

SEQ ID NO: 1383013 - RNA, 19 nt, Homo sapiens
  misc_RNA (1)...(19): siRNA sense strand
gccaaaagccuauugaaca

SEQ ID NO: 1383014 - RNA, 19 nt, Homo sapiens
  misc_RNA (1)...(19): siRNA sense strand
gaugccagccacuguauac

SEQ ID NO: 1383015 - RNA, 19 nt, Homo sapiens
  misc_RNA (1)...(19): siRNA sense strand
agaacuugaucaaccagau

SEQ ID NO: 1383016 - RNA, 19 nt, Homo sapiens
  misc_RNA (1)...(19): siRNA sense strand
acagcaagccuauccauac

SEQ ID NO: 1383017 - RNA, 19 nt, Homo sapiens
  misc_RNA (1)...(19): siRNA sense strand
caucaacaauggggacuuu

SEQ ID NO: 1383018 - RNA, 19 nt, Homo sapiens
  misc_RNA (1)...(19): siRNA sense strand
agagaguacuacagugaag

SEQ ID NO: 1383019 - RNA, 19 nt, Homo sapiens
  misc_RNA (1)...(19): siRNA sense strand
cagagaguacuacagugaa

SEQ ID NO: 1383020 - RNA, 19 nt, Homo sapiens
  misc_RNA (1)...(19): siRNA sense strand
caucaauaccaagaaguug

SEQ ID NO: 1383021 - RNA, 19 nt, Homo sapiens
  misc_RNA (1)...(19): siRNA sense strand
guccgcaggugugugaaga

SEQ ID NO: 1383022 - RNA, 19 nt, Homo sapiens
  misc_RNA (1)...(19): siRNA sense strand
gcaggugugugaagaaaac

SEQ ID NO: 1383023 - RNA, 19 nt, Homo sapiens
  misc_RNA (1)...(19): siRNA sense strand
uuugaggccuacacgaaga

SEQ ID NO: 1383024 - RNA, 19 nt, Homo sapiens
  misc_RNA (1)...(19): siRNA sense strand
ggacacgguaacuccugaa

SEQ ID NO: 1383025 - RNA, 19 nt, Homo sapiens
  misc_RNA (1)...(19): siRNA sense strand
ccagaaugggacacgguaa

SEQ ID NO: 1383026 - RNA, 19 nt, Homo sapiens
  misc_RNA (1)...(19): siRNA sense strand
acauccgccucacccagua

SEQ ID NO: 1383027 - RNA, 19 nt, Homo sapiens
  misc_RNA (1)...(19): siRNA sense strand
ugaaacauccaaacaucgu

SEQ ID NO: 1383028 - RNA, 19 nt, Homo sapiens
  misc_RNA (1)...(19): siRNA sense strand
gcugcaacaccaccacaga

SEQ ID NO: 1383029 - RNA, 19 nt, Homo sapiens
  misc_RNA (1)...(19): siRNA sense strand
aaaagccuauugaacaaga

SEQ ID NO: 1383030 - RNA, 19 nt, Homo sapiens
  misc_RNA (1)...(19): siRNA sense strand
ugaggaaagaucccuaugg

SEQ ID NO: 1383031 - RNA, 19 nt, Homo sapiens
  misc_RNA (1)...(19): siRNA sense strand
ccuacacgaagauuuguga

SEQ ID NO: 1383032 - RNA, 19 nt, Homo sapiens
  misc_RNA (1)...(19): siRNA sense strand
ggaaagaucccuauggaaa

SEQ ID NO: 1383033 - RNA, 19 nt, Homo sapiens
  misc_RNA (1)...(19): siRNA sense strand
gaggaaagaucccuaugga

SEQ ID NO: 1383034 - RNA, 19 nt, Homo sapiens
  misc_RNA (1)...(19): siRNA sense strand
caggagaucauuaagauua

SEQ ID NO: 1383035 - RNA, 19 nt, Homo sapiens
  misc_RNA (1)...(19): siRNA sense strand
gcucggauaugucgacuuc

SEQ ID NO: 1383036 - RNA, 19 nt, Homo sapiens
  misc_RNA (1)...(19): siRNA sense strand
gaaaacaggagaucauuaa

SEQ ID NO: 1383037 - RNA, 19 nt, Homo sapiens
  misc_RNA (1)...(19): siRNA sense strand
ggagcuguuugaagacauu

SEQ ID NO: 1383038 - RNA, 19 nt, Homo sapiens
  misc_RNA (1)...(19): siRNA sense strand
guacuacagugaagcagau

SEQ ID NO: 1383039 - RNA, 19 nt, Homo sapiens
  misc_RNA (1)...(19): siRNA sense strand
gaacgugaggcucggauau

SEQ ID NO: 1383040 - RNA, 19 nt, Homo sapiens
  misc_RNA (1)...(19): siRNA sense strand
guacacaacgcuacagaug

SEQ ID NO: 1383041 - RNA, 19 nt, Homo sapiens
  misc_RNA (1)...(19): siRNA sense strand
gcagaugccagccacugua

SEQ ID NO: 1383042 - RNA, 19 nt, Homo sapiens
  misc_RNA (1)...(19): siRNA sense strand
ccgucaagcuggcugauuu

SEQ ID NO: 1383043 - RNA, 19 nt, Homo sapiens
  misc_RNA (1)...(19): siRNA sense strand
gagagcagcaggcuugguu

SEQ ID NO: 1383044 - RNA, 19 nt, Homo sapiens
  misc_RNA (1)...(19): siRNA sense strand
aacaggagaucauuaagau

SEQ ID NO: 1383045 - RNA, 19 nt, Homo sapiens
  misc_RNA (1)...(19): siRNA sense strand
aaacaggagaucauuaaga

SEQ ID NO: 1383046 - RNA, 19 nt, Homo sapiens
  misc_RNA (1)...(19): siRNA sense strand
ccagagaguacuacaguga

SEQ ID NO: 1383047 - RNA, 19 nt, Homo sapiens
  misc_RNA (1)...(19): siRNA sense strand
gcaagggugcuuucucugu

SEQ ID NO: 1383048 - RNA, 19 nt, Homo sapiens
  misc_RNA (1)...(19): siRNA sense strand
gaacuugaucaaccagaug

SEQ ID NO: 1383049 - RNA, 19 nt, Homo sapiens
  misc_RNA (1)...(19): siRNA sense strand
ggagaguguuaaccacauc

SEQ ID NO: 1383050 - RNA, 19 nt, Homo sapiens
  misc_RNA (1)...(19): siRNA sense strand
gaaagaucccuauggaaaa

SEQ ID NO: 1383051 - RNA, 19 nt, Homo sapiens
  misc_RNA (1)...(19): siRNA sense strand
cagcaggcuugguuugguu

SEQ ID NO: 1383052 - RNA, 19 nt, Homo sapiens
  misc_RNA (1)...(19): siRNA sense strand
ccaaaagccuauugaacaa

SEQ ID NO: 1383053 - RNA, 19 nt, Homo sapiens
  misc_RNA (1)...(19): siRNA sense strand
ucugaaacauccaaacauc

SEQ ID NO: 1383054 - RNA, 19 nt, Homo sapiens
  misc_RNA (1)...(19): siRNA sense strand
caacaccaccacagaagau

SEQ ID NO: 1383055 - RNA, 19 nt, Homo sapiens
  misc_RNA (1)...(19): siRNA sense strand
gcaacaccaccacagaaga

SEQ ID NO: 1383056 - RNA, 19 nt, Homo sapiens
  misc_RNA (1)...(19): siRNA sense strand
gaccauaaacccagcaaag

SEQ ID NO: 1383057 - RNA, 19 nt, Homo sapiens
  misc_RNA (1)...(19): siRNA sense strand
gcggggagcuguuugaaga

SEQ ID NO: 1383058 - RNA, 19 nt, Homo sapiens
  misc_RNA (1)...(19): siRNA sense strand
gcgccuccaugacaguauu

SEQ ID NO: 1383059 - RNA, 19 nt, Homo sapiens
  misc_RNA (1)...(19): siRNA sense strand
aaccagaugcugaccauaa

SEQ ID NO: 1383060 - RNA, 19 nt, Homo sapiens
  misc_RNA (1)...(19): siRNA sense strand
aggagacuguggaguguuu

SEQ ID NO: 1383061 - RNA, 19 nt, Homo sapiens
  misc_RNA (1)...(19): siRNA sense strand
ggagaucauuaagauuaca

SEQ ID NO: 1383062 - RNA, 19 nt, Homo sapiens
  misc_RNA (1)...(19): siRNA sense strand
uaugucgacuucugaaaca

SEQ ID NO: 1383063 - RNA, 19 nt, Homo sapiens
  misc_RNA (1)...(19): siRNA sense strand
gaaaaccuguggauaucug

SEQ ID NO: 1383064 - RNA, 19 nt, Homo sapiens
  misc_RNA (1)...(19): siRNA sense strand
ccgcaggugugugaagaaa

SEQ ID NO: 1383065 - RNA, 19 nt, Homo sapiens
  misc_RNA (1)...(19): siRNA sense strand
ccugaggucuugaggaaag

SEQ ID NO: 1383066 - RNA, 19 nt, Homo sapiens
  misc_RNA (1)...(19): siRNA sense strand
gcagcaggcuugguuuggu

SEQ ID NO: 1383067 - RNA, 19 nt, Homo sapiens
  misc_RNA (1)...(19): siRNA sense strand
gagcagcaggcuugguuug

SEQ ID NO: 1383068 - RNA, 19 nt, Homo sapiens
  misc_RNA (1)...(19): siRNA sense strand
gggaugaggaucagcacaa

SEQ ID NO: 1383069 - RNA, 19 nt, Homo sapiens
  misc_RNA (1)...(19): siRNA sense strand
ggaugaggaucagcacaag

SEQ ID NO: 1383070 - RNA, 19 nt, Homo sapiens
  misc_RNA (1)...(19): siRNA sense strand
gauaugucgacuucugaaa

SEQ ID NO: 1383071 - RNA, 19 nt, Homo sapiens
  misc_RNA (1)...(19): siRNA sense strand
gccagccacuguauacauc

SEQ ID NO: 1383072 - RNA, 19 nt, Homo sapiens
  misc_RNA (1)...(19): siRNA sense strand
uggcaagggugcuuucucu

SEQ ID NO: 1383073 - RNA, 19 nt, Homo sapiens
  misc_RNA (1)...(19): siRNA sense strand
ggauaugucgacuucugaa

SEQ ID NO: 1383074 - RNA, 19 nt, Homo sapiens
  misc_RNA (1)...(19): siRNA sense strand
ucaggagacuguggagugu

SEQ ID NO: 1383075 - RNA, 19 nt, Homo sapiens
  misc_RNA (1)...(19): siRNA sense strand
accagaugcugaccauaaa

SEQ ID NO: 1383076 - RNA, 19 nt, Homo sapiens
  misc_RNA (1)...(19): siRNA sense strand
gauuucccaucaccagaau

SEQ ID NO: 1383077 - RNA, 19 nt, Homo sapiens
  misc_RNA (1)...(19): siRNA sense strand
uucacuaccucguguuuga

SEQ ID NO: 1383078 - RNA, 19 nt, Homo sapiens
  misc_RNA (1)...(19): siRNA sense strand
ucaaccagaugcugaccau

SEQ ID NO: 1383079 - RNA, 19 nt, Homo sapiens
  misc_RNA (1)...(19): siRNA sense strand
aaucaucaauaccaagaag

SEQ ID NO: 1383080 - RNA, 19 nt, Homo sapiens
  misc_RNA (1)...(19): siRNA sense strand
aucaagggcuccacagaga

SEQ ID NO: 1383081 - RNA, 19 nt, Homo sapiens
  misc_RNA (1)...(19): siRNA sense strand
ggaucaagggcuccacaga

SEQ ID NO: 1383082 - RNA, 19 nt, Homo sapiens
  misc_RNA (1)...(19): siRNA sense strand
gggaucaccagaaacuaga

SEQ ID NO: 1383083 - RNA, 19 nt, Homo sapiens
  misc_RNA (1)...(19): siRNA sense strand
ggccagagaguacuacagu

SEQ ID NO: 1383084 - RNA, 19 nt, Homo sapiens
  misc_RNA (1)...(19): siRNA sense strand
ccaugacaguauuucugaa

SEQ ID NO: 1383085 - RNA, 19 nt, Homo sapiens
  misc_RNA (1)...(19): siRNA sense strand
ccucguguuugaccuuguu

SEQ ID NO: 1383086 - RNA, 19 nt, Homo sapiens
  misc_RNA (1)...(19): siRNA sense strand
ucggauaugucgacuucug

SEQ ID NO: 1383087 - RNA, 19 nt, Homo sapiens
  misc_RNA (1)...(19): siRNA sense strand
cgaaaacaggagaucauua

SEQ ID NO: 1383088 - RNA, 19 nt, Homo sapiens
  misc_RNA (1)...(19): siRNA sense strand
gccaaaagccuauugaaca

SEQ ID NO: 1383089 - RNA, 19 nt, Homo sapiens
  misc_RNA (1)...(19): siRNA sense strand
ucaucaauaccaagaaguu

SEQ ID NO: 1383090 - RNA, 19 nt, Homo sapiens
  misc_RNA (1)...(19): siRNA sense strand
gaugccagccacuguauac

SEQ ID NO: 1383091 - RNA, 19 nt, Homo sapiens
  misc_RNA (1)...(19): siRNA sense strand
agaacuugaucaaccagau

SEQ ID NO: 1383092 - RNA, 19 nt, Homo sapiens
  misc_RNA (1)...(19): siRNA sense strand
agagaguacuacagugaag

SEQ ID NO: 1383093 - RNA, 19 nt, Homo sapiens
  misc_RNA (1)...(19): siRNA sense strand
cagagaguacuacagugaa

SEQ ID NO: 1383094 - RNA, 19 nt, Homo sapiens
  misc_RNA (1)...(19): siRNA sense strand
caucaauaccaagaaguug

SEQ ID NO: 1383095 - RNA, 19 nt, Homo sapiens
  misc_RNA (1)...(19): siRNA sense strand
guccgcaggugugugaaga

SEQ ID NO: 1383096 - RNA, 19 nt, Homo sapiens
  misc_RNA (1)...(19): siRNA sense strand
ggacacgguaacuccugaa

SEQ ID NO: 1383097 - RNA, 19 nt, Homo sapiens
  misc_RNA (1)...(19): siRNA sense strand
gcaggugugugaagaaaac

SEQ ID NO: 1383098 - RNA, 19 nt, Homo sapiens
  misc_RNA (1)...(19): siRNA sense strand
ugaaacauccaaacaucgu

SEQ ID NO: 1383099 - RNA, 19 nt, Homo sapiens
  misc_RNA (1)...(19): siRNA sense strand
gcugcaacaccaccacaga

SEQ ID NO: 1383100 - RNA, 19 nt, Homo sapiens
  misc_RNA (1)...(19): siRNA sense strand
aaaagccuauugaacaaga

SEQ ID NO: 1383101 - RNA, 19 nt, Homo sapiens
  misc_RNA (1)...(19): siRNA sense strand
ccagaaugggacacgguaa

SEQ ID NO: 1383102 - RNA, 19 nt, Homo sapiens
  misc_RNA (1)...(19): siRNA sense strand
ugaggaaagaucccuaugg

SEQ ID NO: 1383103 - RNA, 19 nt, Homo sapiens
  misc_RNA (1)...(19): siRNA sense strand
ggaaagaucccuauggaaa

SEQ ID NO: 1383104 - RNA, 19 nt, Homo sapiens
  misc_RNA (1)...(19): siRNA sense strand
gaggaaagaucccuaugga

SEQ ID NO: 1383105 - RNA, 19 nt, Homo sapiens
  misc_RNA (1)...(19): siRNA sense strand
caggagaucauuaagauua

SEQ ID NO: 1383106 - RNA, 19 nt, Homo sapiens
  misc_RNA (1)...(19): siRNA sense strand
gcucggauaugucgacuuc

SEQ ID NO: 1383107 - RNA, 19 nt, Homo sapiens
  misc_RNA (1)...(19): siRNA sense strand
gaaaacaggagaucauuaa

SEQ ID NO: 1383108 - RNA, 19 nt, Homo sapiens
  misc_RNA (1)...(19): siRNA sense strand
ggagcuguuugaagacauu

SEQ ID NO: 1383109 - RNA, 19 nt, Homo sapiens
  misc_RNA (1)...(19): siRNA sense strand
guacuacagugaagcagau

SEQ ID NO: 1383110 - RNA, 19 nt, Homo sapiens
  misc_RNA (1)...(19): siRNA sense strand
gaacgugaggcucggauau

SEQ ID NO: 1383111 - RNA, 19 nt, Homo sapiens
  misc_RNA (1)...(19): siRNA sense strand
uuacagaacagcugauuga

SEQ ID NO: 1383112 - RNA, 19 nt, Homo sapiens
  misc_RNA (1)...(19): siRNA sense strand
guacacaacgcuacagaug

SEQ ID NO: 1383113 - RNA, 19 nt, Homo sapiens
  misc_RNA (1)...(19): siRNA sense strand
gcagaugccagccacugua

SEQ ID NO: 1383114 - RNA, 19 nt, Homo sapiens
  misc_RNA (1)...(19): siRNA sense strand
ccgucaagcuggcugauuu

SEQ ID NO: 1383115 - RNA, 19 nt, Homo sapiens
  misc_RNA (1)...(19): siRNA sense strand
gauggcaaguggcucaaug

SEQ ID NO: 1383116 - RNA, 19 nt, Homo sapiens
  misc_RNA (1)...(19): siRNA sense strand
gagagcagcaggcuugguu

SEQ ID NO: 1383117 - RNA, 19 nt, Homo sapiens
  misc_RNA (1)...(19): siRNA sense strand
aacaggagaucauuaagau

SEQ ID NO: 1383118 - RNA, 19 nt, Homo sapiens
  misc_RNA (1)...(19): siRNA sense strand
aaacaggagaucauuaaga

SEQ ID NO: 1383119 - RNA, 19 nt, Homo sapiens
  misc_RNA (1)...(19): siRNA sense strand
gcaagggugcuuucucugu

SEQ ID NO: 1383120 - RNA, 19 nt, Homo sapiens
  misc_RNA (1)...(19): siRNA sense strand
ccagagaguacuacaguga

SEQ ID NO: 1383121 - RNA, 19 nt, Homo sapiens
  misc_RNA (1)...(19): siRNA sense strand
gaacuugaucaaccagaug

SEQ ID NO: 1383122 - RNA, 19 nt, Homo sapiens
  misc_RNA (1)...(19): siRNA sense strand
gaacagcaagccuauccau

SEQ ID NO: 1383123 - RNA, 19 nt, Homo sapiens
  misc_RNA (1)...(19): siRNA sense strand
ggagaguguuaaccacauc

SEQ ID NO: 1383124 - RNA, 19 nt, Homo sapiens
  misc_RNA (1)...(19): siRNA sense strand
agaaucuccuguccaagaa

SEQ ID NO: 1383125 - RNA, 19 nt, Homo sapiens
  misc_RNA (1)...(19): siRNA sense strand
gaaagaucccuauggaaaa

SEQ ID NO: 1383126 - RNA, 19 nt, Homo sapiens
  misc_RNA (1)...(19): siRNA sense strand
cagcaggcuugguuugguu

SEQ ID NO: 1383127 - RNA, 19 nt, Homo sapiens
  misc_RNA (1)...(19): siRNA sense strand
ccaaaagccuauugaacaa

SEQ ID NO: 1383128 - RNA, 19 nt, Homo sapiens
  misc_RNA (1)...(19): siRNA sense strand
ucugaaacauccaaacauc

SEQ ID NO: 1383129 - RNA, 19 nt, Homo sapiens
  misc_RNA (1)...(19): siRNA sense strand
caacaccaccacagaagau

SEQ ID NO: 1383130 - RNA, 19 nt, Homo sapiens
  misc_RNA (1)...(19): siRNA sense strand
gcaacaccaccacagaaga

SEQ ID NO: 1383131 - RNA, 19 nt, Homo sapiens
  misc_RNA (1)...(19): siRNA sense strand
gaccauaaacccagcaaag

SEQ ID NO: 1383132 - RNA, 19 nt, Homo sapiens
  misc_RNA (1)...(19): siRNA sense strand
gcggggagcuguuugaaga

SEQ ID NO: 1383133 - RNA, 19 nt, Homo sapiens
  misc_RNA (1)...(19): siRNA sense strand
gcgccuccaugacaguauu

SEQ ID NO: 1383134 - RNA, 19 nt, Homo sapiens
  misc_RNA (1)...(19): siRNA sense strand
gcaccagccagucagaaga

SEQ ID NO: 1383135 - RNA, 19 nt, Homo sapiens
  misc_RNA (1)...(19): siRNA sense strand
aaccagaugcugaccauaa

SEQ ID NO: 1383136 - RNA, 19 nt, Homo sapiens
  misc_RNA (1)...(19): siRNA sense strand
aggagacuguggaguguuu

SEQ ID NO: 1383137 - RNA, 19 nt, Homo sapiens
  misc_RNA (1)...(19): siRNA sense strand
ggagaucauuaagauuaca

SEQ ID NO: 1383138 - RNA, 19 nt, Homo sapiens
  misc_RNA (1)...(19): siRNA sense strand
uaugucgacuucugaaaca

SEQ ID NO: 1383139 - RNA, 19 nt, Homo sapiens
  misc_RNA (1)...(19): siRNA sense strand
ccaagaacagcaagccuau

SEQ ID NO: 1383140 - RNA, 19 nt, Homo sapiens
  misc_RNA (1)...(19): siRNA sense strand
gaaaaccuguggauaucug

SEQ ID NO: 1383141 - RNA, 19 nt, Homo sapiens
  misc_RNA (1)...(19): siRNA sense strand
ccugaggucuugaggaaag

SEQ ID NO: 1383142 - RNA, 19 nt, Homo sapiens
  misc_RNA (1)...(19): siRNA sense strand
gcagcaggcuugguuuggu

SEQ ID NO: 1383143 - RNA, 19 nt, Homo sapiens
  misc_RNA (1)...(19): siRNA sense strand
gagcagcaggcuugguuug

SEQ ID NO: 1383144 - RNA, 19 nt, Homo sapiens
  misc_RNA (1)...(19): siRNA sense strand
ccgcaggugugugaagaaa

SEQ ID NO: 1383145 - RNA, 19 nt, Homo sapiens
  misc_RNA (1)...(19): siRNA sense strand
gggaugaggaucagcacaa

SEQ ID NO: 1383146 - RNA, 19 nt, Homo sapiens
  misc_RNA (1)...(19): siRNA sense strand
ggaugaggaucagcacaag

SEQ ID NO: 1383147 - RNA, 19 nt, Homo sapiens
  misc_RNA (1)...(19): siRNA sense strand
gauaugucgacuucugaaa

SEQ ID NO: 1383148 - RNA, 19 nt, Homo sapiens
  misc_RNA (1)...(19): siRNA sense strand
gccagccacuguauacauc

SEQ ID NO: 1383149 - RNA, 19 nt, Homo sapiens
  misc_RNA (1)...(19): siRNA sense strand
uggcaagggugcuuucucu

SEQ ID NO: 1383150 - RNA, 19 nt, Homo sapiens
  misc_RNA (1)...(19): siRNA sense strand
gauuucccaucaccagaau

SEQ ID NO: 1383151 - RNA, 19 nt, Homo sapiens
  misc_RNA (1)...(19): siRNA sense strand
ucaggagacuguggagugu

SEQ ID NO: 1383152 - RNA, 19 nt, Homo sapiens
  misc_RNA (1)...(19): siRNA sense strand
accagaugcugaccauaaa

SEQ ID NO: 1383153 - RNA, 19 nt, Homo sapiens
  misc_RNA (1)...(19): siRNA sense strand
ggauaugucgacuucugaa

SEQ ID NO: 1383154 - RNA, 19 nt, Homo sapiens
  misc_RNA (1)...(19): siRNA sense strand
uucacuaccucguguuuga

SEQ ID NO: 1383155 - RNA, 19 nt, Homo sapiens
  misc_RNA (1)...(19): siRNA sense strand
ucaaccagaugcugaccau

SEQ ID NO: 1383156 - RNA, 19 nt, Homo sapiens
  misc_RNA (1)...(19): siRNA sense strand
ggccagagaguacuacagu

SEQ ID NO: 1383157 - RNA, 19 nt, Homo sapiens
  misc_RNA (1)...(19): siRNA sense strand
ggcucaauguccacuauca

SEQ ID NO: 1383158 - RNA, 19 nt, Homo sapiens
  misc_RNA (1)...(19): siRNA sense strand
gauuacagaacagcugauu

SEQ ID NO: 1383159 - RNA, 19 nt, Homo sapiens
  misc_RNA (1)...(19): siRNA sense strand
aucaagggcuccacagaga

SEQ ID NO: 1383160 - RNA, 19 nt, Homo sapiens
  misc_RNA (1)...(19): siRNA sense strand
ggaucaagggcuccacaga

SEQ ID NO: 1383161 - RNA, 19 nt, Homo sapiens
  misc_RNA (1)...(19): siRNA sense strand
aaucaucaauaccaagaag

SEQ ID NO: 1383162 - RNA, 19 nt, Homo sapiens
  misc_RNA (1)...(19): siRNA sense strand
gggaucaccagaaacuaga

SEQ ID NO: 1383163 - RNA, 19 nt, Homo sapiens
  misc_RNA (1)...(19): siRNA sense strand
cagcgugcaucgccuacau

SEQ ID NO: 1383164 - RNA, 19 nt, Homo sapiens
  misc_RNA (1)...(19): siRNA sense strand
ccaugacaguauuucugaa

SEQ ID NO: 1383165 - RNA, 19 nt, Homo sapiens
  misc_RNA (1)...(19): siRNA sense strand
ccucguguuugaccuuguu

SEQ ID NO: 1383166 - RNA, 19 nt, Homo sapiens
  misc_RNA (1)...(19): siRNA sense strand
ucggauaugucgacuucug

SEQ ID NO: 1383167 - RNA, 19 nt, Homo sapiens
  misc_RNA (1)...(19): siRNA sense strand
cgaaaacaggagaucauua

SEQ ID NO: 1383168 - RNA, 19 nt, Homo sapiens
  misc_RNA (1)...(19): siRNA sense strand
ucaucaauaccaagaaguu

SEQ ID NO: 1383169 - RNA, 19 nt, Homo sapiens
  misc_RNA (1)...(19): siRNA sense strand
gccaaaagccuauugaaca

SEQ ID NO: 1383170 - RNA, 19 nt, Homo sapiens
  misc_RNA (1)...(19): siRNA sense strand
gaugccagccacuguauac

SEQ ID NO: 1383171 - RNA, 19 nt, Homo sapiens
  misc_RNA (1)...(19): siRNA sense strand
agaacuugaucaaccagau

SEQ ID NO: 1383172 - RNA, 19 nt, Homo sapiens
  misc_RNA (1)...(19): siRNA sense strand
acagcaagccuauccauac

SEQ ID NO: 1383173 - RNA, 19 nt, Homo sapiens
  misc_RNA (1)...(19): siRNA sense strand
caucaacaauggggacuuu

SEQ ID NO: 1383174 - RNA, 19 nt, Homo sapiens
  misc_RNA (1)...(19): siRNA sense strand
agagaguacuacagugaag

SEQ ID NO: 1383175 - RNA, 19 nt, Homo sapiens
  misc_RNA (1)...(19): siRNA sense strand
cagagaguacuacagugaa

SEQ ID NO: 1383176 - RNA, 19 nt, Homo sapiens
  misc_RNA (1)...(19): siRNA sense strand
caucaauaccaagaaguug

SEQ ID NO: 1383177 - RNA, 19 nt, Homo sapiens
  misc_RNA (1)...(19): siRNA sense strand
guccgcaggugugugaaga

SEQ ID NO: 1383178 - RNA, 19 nt, Homo sapiens
  misc_RNA (1)...(19): siRNA sense strand
gcaggugugugaagaaaac

SEQ ID NO: 1383179 - RNA, 19 nt, Homo sapiens
  misc_RNA (1)...(19): siRNA sense strand
uuugaggccuacacgaaga

SEQ ID NO: 1383180 - RNA, 19 nt, Homo sapiens
  misc_RNA (1)...(19): siRNA sense strand
ggacacgguaacuccugaa

SEQ ID NO: 1383181 - RNA, 19 nt, Homo sapiens
  misc_RNA (1)...(19): siRNA sense strand
ccagaaugggacacgguaa

SEQ ID NO: 1383182 - RNA, 19 nt, Homo sapiens
  misc_RNA (1)...(19): siRNA sense strand
acauccgccucacccagua

SEQ ID NO: 1383183 - RNA, 19 nt, Homo sapiens
  misc_RNA (1)...(19): siRNA sense strand
ugaaacauccaaacaucgu

SEQ ID NO: 1383184 - RNA, 19 nt, Homo sapiens
  misc_RNA (1)...(19): siRNA sense strand
gcugcaacaccaccacaga

SEQ ID NO: 1383185 - RNA, 19 nt, Homo sapiens
  misc_RNA (1)...(19): siRNA sense strand
aaaagccuauugaacaaga

SEQ ID NO: 1383186 - RNA, 19 nt, Homo sapiens
  misc_RNA (1)...(19): siRNA sense strand
ugaggaaagaucccuaugg

SEQ ID NO: 1383187 - RNA, 19 nt, Homo sapiens
  misc_RNA (1)...(19): siRNA sense strand
ccuacacgaagauuuguga

SEQ ID NO: 1383188 - RNA, 19 nt, Homo sapiens
  misc_RNA (1)...(19): siRNA sense strand
ggaaagaucccuauggaaa

SEQ ID NO: 1383189 - RNA, 19 nt, Homo sapiens
  misc_RNA (1)...(19): siRNA sense strand
gaggaaagaucccuaugga

SEQ ID NO: 1383190 - RNA, 19 nt, Homo sapiens
  misc_RNA (1)...(19): siRNA sense strand
caggagaucauuaagauua

SEQ ID NO: 1383191 - RNA, 19 nt, Homo sapiens
  misc_RNA (1)...(19): siRNA sense strand
gcucggauaugucgacuuc

SEQ ID NO: 1383192 - RNA, 19 nt, Homo sapiens
  misc_RNA (1)...(19): siRNA sense strand
gaaaacaggagaucauuaa

SEQ ID NO: 1383193 - RNA, 19 nt, Homo sapiens
  misc_RNA (1)...(19): siRNA sense strand
ggagcuguuugaagacauu

SEQ ID NO: 1383194 - RNA, 19 nt, Homo sapiens
  misc_RNA (1)...(19): siRNA sense strand
guacuacagugaagcagau

SEQ ID NO: 1383195 - RNA, 19 nt, Homo sapiens
  misc_RNA (1)...(19): siRNA sense strand
gaacgugaggcucggauau

SEQ ID NO: 1383196 - RNA, 19 nt, Homo sapiens
  misc_RNA (1)...(19): siRNA sense strand
uuacagaacagcugauuga

SEQ ID NO: 1383197 - RNA, 19 nt, Homo sapiens
  misc_RNA (1)...(19): siRNA sense strand
guacacaacgcuacagaug

SEQ ID NO: 1383198 - RNA, 19 nt, Homo sapiens
  misc_RNA (1)...(19): siRNA sense strand
gcagaugccagccacugua

SEQ ID NO: 1383199 - RNA, 19 nt, Homo sapiens
  misc_RNA (1)...(19): siRNA sense strand
ccgucaagcuggcugauuu

SEQ ID NO: 1383200 - RNA, 19 nt, Homo sapiens
  misc_RNA (1)...(19): siRNA sense strand
gauggcaaguggcucaaug

SEQ ID NO: 1383201 - RNA, 19 nt, Homo sapiens
  misc_RNA (1)...(19): siRNA sense strand
gagagcagcaggcuugguu

SEQ ID NO: 1383202 - RNA, 19 nt, Homo sapiens
  misc_RNA (1)...(19): siRNA sense strand
aacaggagaucauuaagau

SEQ ID NO: 1383203 - RNA, 19 nt, Homo sapiens
  misc_RNA (1)...(19): siRNA sense strand
aaacaggagaucauuaaga

SEQ ID NO: 1383204 - RNA, 19 nt, Homo sapiens
  misc_RNA (1)...(19): siRNA sense strand
gcaagggugcuuucucugu

SEQ ID NO: 1383205 - RNA, 19 nt, Homo sapiens
  misc_RNA (1)...(19): siRNA sense strand
ccagagaguacuacaguga

SEQ ID NO: 1383206 - RNA, 19 nt, Homo sapiens
  misc_RNA (1)...(19): siRNA sense strand
gaacuugaucaaccagaug

SEQ ID NO: 1383207 - RNA, 19 nt, Homo sapiens
  misc_RNA (1)...(19): siRNA sense strand
gaacagcaagccuauccau

SEQ ID NO: 1383208 - RNA, 19 nt, Homo sapiens
  misc_RNA (1)...(19): siRNA sense strand
ggagaguguuaaccacauc

SEQ ID NO: 1383209 - RNA, 19 nt, Homo sapiens
  misc_RNA (1)...(19): siRNA sense strand
agaaucuccuguccaagaa

SEQ ID NO: 1383210 - RNA, 19 nt, Homo sapiens
  misc_RNA (1)...(19): siRNA sense strand
gaaagaucccuauggaaaa

SEQ ID NO: 1383211 - RNA, 19 nt, Homo sapiens
  misc_RNA (1)...(19): siRNA sense strand
cagcaggcuugguuugguu

SEQ ID NO: 1383212 - RNA, 19 nt, Homo sapiens
  misc_RNA (1)...(19): siRNA sense strand
ccaaaagccuauugaacaa

SEQ ID NO: 1383213 - RNA, 19 nt, Homo sapiens
  misc_RNA (1)...(19): siRNA sense strand
ucugaaacauccaaacauc

SEQ ID NO: 1383214 - RNA, 19 nt, Homo sapiens
  misc_RNA (1)...(19): siRNA sense strand
caacaccaccacagaagau

SEQ ID NO: 1383215 - RNA, 19 nt, Homo sapiens
  misc_RNA (1)...(19): siRNA sense strand
gcaacaccaccacagaaga

SEQ ID NO: 1383216 - RNA, 19 nt, Homo sapiens
  misc_RNA (1)...(19): siRNA sense strand
gaccauaaacccagcaaag

SEQ ID NO: 1383217 - RNA, 19 nt, Homo sapiens
  misc_RNA (1)...(19): siRNA sense strand
gcggggagcuguuugaaga

SEQ ID NO: 1383218 - RNA, 19 nt, Homo sapiens
  misc_RNA (1)...(19): siRNA sense strand
gcgccuccaugacaguauu

SEQ ID NO: 1383219 - RNA, 19 nt, Homo sapiens
  misc_RNA (1)...(19): siRNA sense strand
gcaccagccagucagaaga

SEQ ID NO: 1383220 - RNA, 19 nt, Homo sapiens
  misc_RNA (1)...(19): siRNA sense strand
aaccagaugcugaccauaa

SEQ ID NO: 1383221 - RNA, 19 nt, Homo sapiens
  misc_RNA (1)...(19): siRNA sense strand
aggagacuguggaguguuu

SEQ ID NO: 1383222 - RNA, 19 nt, Homo sapiens
  misc_RNA (1)...(19): siRNA sense strand
ggagaucauuaagauuaca

SEQ ID NO: 1383223 - RNA, 19 nt, Homo sapiens
  misc_RNA (1)...(19): siRNA sense strand
uaugucgacuucugaaaca

SEQ ID NO: 1383224 - RNA, 19 nt, Homo sapiens
  misc_RNA (1)...(19): siRNA sense strand
ccaagaacagcaagccuau

SEQ ID NO: 1383225 - RNA, 19 nt, Homo sapiens
  misc_RNA (1)...(19): siRNA sense strand
gaaaaccuguggauaucug

SEQ ID NO: 1383226 - RNA, 19 nt, Homo sapiens
  misc_RNA (1)...(19): siRNA sense strand
ccugaggucuugaggaaag

SEQ ID NO: 1383227 - RNA, 19 nt, Homo sapiens
  misc_RNA (1)...(19): siRNA sense strand
gcagcaggcuugguuuggu

SEQ ID NO: 1383228 - RNA, 19 nt, Homo sapiens
  misc_RNA (1)...(19): siRNA sense strand
gagcagcaggcuugguuug

SEQ ID NO: 1383229 - RNA, 19 nt, Homo sapiens
  misc_RNA (1)...(19): siRNA sense strand
ccgcaggugugugaagaaa

SEQ ID NO: 1383230 - RNA, 19 nt, Homo sapiens
  misc_RNA (1)...(19): siRNA sense strand
gggaugaggaucagcacaa

SEQ ID NO: 1383231 - RNA, 19 nt, Homo sapiens
  misc_RNA (1)...(19): siRNA sense strand
ggaugaggaucagcacaag

SEQ ID NO: 1383232 - RNA, 19 nt, Homo sapiens
  misc_RNA (1)...(19): siRNA sense strand
gauaugucgacuucugaaa

SEQ ID NO: 1383233 - RNA, 19 nt, Homo sapiens
  misc_RNA (1)...(19): siRNA sense strand
gccagccacuguauacauc

SEQ ID NO: 1383234 - RNA, 19 nt, Homo sapiens
  misc_RNA (1)...(19): siRNA sense strand
uggcaagggugcuuucucu

SEQ ID NO: 1383235 - RNA, 19 nt, Homo sapiens
  misc_RNA (1)...(19): siRNA sense strand
gauuucccaucaccagaau

SEQ ID NO: 1383236 - RNA, 19 nt, Homo sapiens
  misc_RNA (1)...(19): siRNA sense strand
ucaggagacuguggagugu

SEQ ID NO: 1383237 - RNA, 19 nt, Homo sapiens
  misc_RNA (1)...(19): siRNA sense strand
accagaugcugaccauaaa

SEQ ID NO: 1383238 - RNA, 19 nt, Homo sapiens
  misc_RNA (1)...(19): siRNA sense strand
ggauaugucgacuucugaa

SEQ ID NO: 1383239 - RNA, 19 nt, Homo sapiens
  misc_RNA (1)...(19): siRNA sense strand
uucacuaccucguguuuga

SEQ ID NO: 1383240 - RNA, 19 nt, Homo sapiens
  misc_RNA (1)...(19): siRNA sense strand
ucaaccagaugcugaccau

SEQ ID NO: 1383241 - RNA, 19 nt, Homo sapiens
  misc_RNA (1)...(19): siRNA sense strand
ggccagagaguacuacagu

SEQ ID NO: 1383242 - RNA, 19 nt, Homo sapiens
  misc_RNA (1)...(19): siRNA sense strand
ggcucaauguccacuauca

SEQ ID NO: 1383243 - RNA, 19 nt, Homo sapiens
  misc_RNA (1)...(19): siRNA sense strand
gauuacagaacagcugauu

SEQ ID NO: 1383244 - RNA, 19 nt, Homo sapiens
  misc_RNA (1)...(19): siRNA sense strand
aucaagggcuccacagaga

SEQ ID NO: 1383245 - RNA, 19 nt, Homo sapiens
  misc_RNA (1)...(19): siRNA sense strand
ggaucaagggcuccacaga

SEQ ID NO: 1383246 - RNA, 19 nt, Homo sapiens
  misc_RNA (1)...(19): siRNA sense strand
aaucaucaauaccaagaag

SEQ ID NO: 1383247 - RNA, 19 nt, Homo sapiens
  misc_RNA (1)...(19): siRNA sense strand
gggaucaccagaaacuaga

SEQ ID NO: 1383248 - RNA, 19 nt, Homo sapiens
  misc_RNA (1)...(19): siRNA sense strand
cagcgugcaucgccuacau

SEQ ID NO: 1383249 - RNA, 19 nt, Homo sapiens
  misc_RNA (1)...(19): siRNA sense strand
ccaugacaguauuucugaa

SEQ ID NO: 1383250 - RNA, 19 nt, Homo sapiens
  misc_RNA (1)...(19): siRNA sense strand
ccucguguuugaccuuguu

SEQ ID NO: 1383251 - RNA, 19 nt, Homo sapiens
  misc_RNA (1)...(19): siRNA sense strand
ucggauaugucgacuucug

SEQ ID NO: 1383252 - RNA, 19 nt, Homo sapiens
  misc_RNA (1)...(19): siRNA sense strand
cgaaaacaggagaucauua

SEQ ID NO: 1383253 - RNA, 19 nt, Homo sapiens
  misc_RNA (1)...(19): siRNA sense strand
ucaucaauaccaagaaguu

SEQ ID NO: 1383254 - RNA, 19 nt, Homo sapiens
  misc_RNA (1)...(19): siRNA sense strand
gccaaaagccuauugaaca

SEQ ID NO: 1383255 - RNA, 19 nt, Homo sapiens
  misc_RNA (1)...(19): siRNA sense strand
gaugccagccacuguauac

SEQ ID NO: 1383256 - RNA, 19 nt, Homo sapiens
  misc_RNA (1)...(19): siRNA sense strand
agaacuugaucaaccagau

SEQ ID NO: 1383257 - RNA, 19 nt, Homo sapiens
  misc_RNA (1)...(19): siRNA sense strand
acagcaagccuauccauac

SEQ ID NO: 1383258 - RNA, 19 nt, Homo sapiens
  misc_RNA (1)...(19): siRNA sense strand
caucaacaauggggacuuu

SEQ ID NO: 1383259 - RNA, 19 nt, Homo sapiens
  misc_RNA (1)...(19): siRNA sense strand
agagaguacuacagugaag

SEQ ID NO: 1383260 - RNA, 19 nt, Homo sapiens
  misc_RNA (1)...(19): siRNA sense strand
cagagaguacuacagugaa

SEQ ID NO: 1383261 - RNA, 19 nt, Homo sapiens
  misc_RNA (1)...(19): siRNA sense strand
caucaauaccaagaaguug

SEQ ID NO: 1383262 - RNA, 19 nt, Homo sapiens
  misc_RNA (1)...(19): siRNA sense strand
guccgcaggugugugaaga

SEQ ID NO: 1383263 - RNA, 19 nt, Homo sapiens
  misc_RNA (1)...(19): siRNA sense strand
gcaggugugugaagaaaac

SEQ ID NO: 1383264 - RNA, 19 nt, Homo sapiens
  misc_RNA (1)...(19): siRNA sense strand
uuugaggccuacacgaaga

SEQ ID NO: 1383265 - RNA, 19 nt, Homo sapiens
  misc_RNA (1)...(19): siRNA sense strand
ggacacgguaacuccugaa

SEQ ID NO: 1383266 - RNA, 19 nt, Homo sapiens
  misc_RNA (1)...(19): siRNA sense strand
ccagaaugggacacgguaa

SEQ ID NO: 1383267 - RNA, 19 nt, Homo sapiens
  misc_RNA (1)...(19): siRNA sense strand
acauccgccucacccagua

SEQ ID NO: 1383268 - RNA, 19 nt, Homo sapiens
  misc_RNA (1)...(19): siRNA sense strand
ugaaacauccaaacaucgu

SEQ ID NO: 1383269 - RNA, 19 nt, Homo sapiens
  misc_RNA (1)...(19): siRNA sense strand
gcugcaacaccaccacaga

SEQ ID NO: 1383270 - RNA, 19 nt, Homo sapiens
  misc_RNA (1)...(19): siRNA sense strand
aaaagccuauugaacaaga

SEQ ID NO: 1383271 - RNA, 19 nt, Homo sapiens
  misc_RNA (1)...(19): siRNA sense strand
ugaggaaagaucccuaugg

SEQ ID NO: 1383272 - RNA, 19 nt, Homo sapiens
  misc_RNA (1)...(19): siRNA sense strand
ccuacacgaagauuuguga

SEQ ID NO: 1383273 - RNA, 19 nt, Homo sapiens
  misc_RNA (1)...(19): siRNA sense strand
ggaaagaucccuauggaaa

SEQ ID NO: 1383274 - RNA, 19 nt, Homo sapiens
  misc_RNA (1)...(19): siRNA sense strand
gaggaaagaucccuaugga

SEQ ID NO: 1383275 - RNA, 19 nt, Homo sapiens
  misc_RNA (1)...(19): siRNA sense strand
caggagaucauuaagauua

SEQ ID NO: 1383276 - RNA, 19 nt, Homo sapiens
  misc_RNA (1)...(19): siRNA sense strand
gcucggauaugucgacuuc

SEQ ID NO: 1383277 - RNA, 19 nt, Homo sapiens
  misc_RNA (1)...(19): siRNA sense strand
gaaaacaggagaucauuaa

SEQ ID NO: 1383278 - RNA, 19 nt, Homo sapiens
  misc_RNA (1)...(19): siRNA sense strand
ggagcuguuugaagacauu

SEQ ID NO: 1383279 - RNA, 19 nt, Homo sapiens
  misc_RNA (1)...(19): siRNA sense strand
guacuacagugaagcagau

SEQ ID NO: 1383280 - RNA, 19 nt, Homo sapiens
  misc_RNA (1)...(19): siRNA sense strand
gaacgugaggcucggauau

SEQ ID NO: 1383281 - RNA, 19 nt, Homo sapiens
  misc_RNA (1)...(19): siRNA sense strand
uuacagaacagcugauuga

SEQ ID NO: 1383282 - RNA, 19 nt, Homo sapiens
  misc_RNA (1)...(19): siRNA sense strand
guacacaacgcuacagaug

SEQ ID NO: 1383283 - RNA, 19 nt, Homo sapiens
  misc_RNA (1)...(19): siRNA sense strand
gcagaugccagccacugua

SEQ ID NO: 1383284 - RNA, 19 nt, Homo sapiens
  misc_RNA (1)...(19): siRNA sense strand
ccgucaagcuggcugauuu

SEQ ID NO: 1383285 - RNA, 19 nt, Homo sapiens
  misc_RNA (1)...(19): siRNA sense strand
gauggcaaguggcucaaug

SEQ ID NO: 1383286 - RNA, 19 nt, Homo sapiens
  misc_RNA (1)...(19): siRNA sense strand
gagagcagcaggcuugguu

SEQ ID NO: 1383287 - RNA, 19 nt, Homo sapiens
  misc_RNA (1)...(19): siRNA sense strand
aacaggagaucauuaagau

SEQ ID NO: 1383288 - RNA, 19 nt, Homo sapiens
  misc_RNA (1)...(19): siRNA sense strand
aaacaggagaucauuaaga

SEQ ID NO: 1383289 - RNA, 19 nt, Homo sapiens
  misc_RNA (1)...(19): siRNA sense strand
gcaagggugcuuucucugu

SEQ ID NO: 1383290 - RNA, 19 nt, Homo sapiens
  misc_RNA (1)...(19): siRNA sense strand
ccagagaguacuacaguga

SEQ ID NO: 1383291 - RNA, 19 nt, Homo sapiens
  misc_RNA (1)...(19): siRNA sense strand
gaacuugaucaaccagaug

SEQ ID NO: 1383292 - RNA, 19 nt, Homo sapiens
  misc_RNA (1)...(19): siRNA sense strand
gaacagcaagccuauccau

SEQ ID NO: 1383293 - RNA, 19 nt, Homo sapiens
  misc_RNA (1)...(19): siRNA sense strand
ggagaguguuaaccacauc

SEQ ID NO: 1383294 - RNA, 19 nt, Homo sapiens
  misc_RNA (1)...(19): siRNA sense strand
agaaucuccuguccaagaa

SEQ ID NO: 1383295 - RNA, 19 nt, Homo sapiens
  misc_RNA (1)...(19): siRNA sense strand
gaaagaucccuauggaaaa

SEQ ID NO: 1383296 - RNA, 19 nt, Homo sapiens
  misc_RNA (1)...(19): siRNA sense strand
cagcaggcuugguuugguu

SEQ ID NO: 1383297 - RNA, 19 nt, Homo sapiens
  misc_RNA (1)...(19): siRNA sense strand
ccaaaagccuauugaacaa

SEQ ID NO: 1383298 - RNA, 19 nt, Homo sapiens
  misc_RNA (1)...(19): siRNA sense strand
ucugaaacauccaaacauc

SEQ ID NO: 1383299 - RNA, 19 nt, Homo sapiens
  misc_RNA (1)...(19): siRNA sense strand
caacaccaccacagaagau

SEQ ID NO: 1383300 - RNA, 19 nt, Homo sapiens
  misc_RNA (1)...(19): siRNA sense strand
gcaacaccaccacagaaga

SEQ ID NO: 1383301 - RNA, 19 nt, Homo sapiens
  misc_RNA (1)...(19): siRNA sense strand
gaccauaaacccagcaaag

SEQ ID NO: 1383302 - RNA, 19 nt, Homo sapiens
  misc_RNA (1)...(19): siRNA sense strand
gcggggagcuguuugaaga

SEQ ID NO: 1383303 - RNA, 19 nt, Homo sapiens
  misc_RNA (1)...(19): siRNA sense strand
gcgccuccaugacaguauu

SEQ ID NO: 1383304 - RNA, 19 nt, Homo sapiens
  misc_RNA (1)...(19): siRNA sense strand
gcaccagccagucagaaga

SEQ ID NO: 1383305 - RNA, 19 nt, Homo sapiens
  misc_RNA (1)...(19): siRNA sense strand
aaccagaugcugaccauaa

SEQ ID NO: 1383306 - RNA, 19 nt, Homo sapiens
  misc_RNA (1)...(19): siRNA sense strand
aggagacuguggaguguuu

SEQ ID NO: 1383307 - RNA, 19 nt, Homo sapiens
  misc_RNA (1)...(19): siRNA sense strand
ggagaucauuaagauuaca

SEQ ID NO: 1383308 - RNA, 19 nt, Homo sapiens
  misc_RNA (1)...(19): siRNA sense strand
uaugucgacuucugaaaca

SEQ ID NO: 1383309 - RNA, 19 nt, Homo sapiens
  misc_RNA (1)...(19): siRNA sense strand
ccaagaacagcaagccuau

SEQ ID NO: 1383310 - RNA, 19 nt, Homo sapiens
  misc_RNA (1)...(19): siRNA sense strand
gaaaaccuguggauaucug

SEQ ID NO: 1383311 - RNA, 19 nt, Homo sapiens
  misc_RNA (1)...(19): siRNA sense strand
ccugaggucuugaggaaag

SEQ ID NO: 1383312 - RNA, 19 nt, Homo sapiens
  misc_RNA (1)...(19): siRNA sense strand
gcagcaggcuugguuuggu

SEQ ID NO: 1383313 - RNA, 19 nt, Homo sapiens
  misc_RNA (1)...(19): siRNA sense strand
gagcagcaggcuugguuug

SEQ ID NO: 1383314 - RNA, 19 nt, Homo sapiens
  misc_RNA (1)...(19): siRNA sense strand
ccgcaggugugugaagaaa

SEQ ID NO: 1383315 - RNA, 19 nt, Homo sapiens
  misc_RNA (1)...(19): siRNA sense strand
gggaugaggaucagcacaa

SEQ ID NO: 1383316 - RNA, 19 nt, Homo sapiens
  misc_RNA (1)...(19): siRNA sense strand
ggaugaggaucagcacaag

SEQ ID NO: 1383317 - RNA, 19 nt, Homo sapiens
  misc_RNA (1)...(19): siRNA sense strand
gauaugucgacuucugaaa

SEQ ID NO: 1383318 - RNA, 19 nt, Homo sapiens
  misc_RNA (1)...(19): siRNA sense strand
gccagccacuguauacauc

SEQ ID NO: 1383319 - RNA, 19 nt, Homo sapiens
  misc_RNA (1)...(19): siRNA sense strand
uggcaagggugcuuucucu

SEQ ID NO: 1383320 - RNA, 19 nt, Homo sapiens
  misc_RNA (1)...(19): siRNA sense strand
gauuucccaucaccagaau

SEQ ID NO: 1383321 - RNA, 19 nt, Homo sapiens
  misc_RNA (1)...(19): siRNA sense strand
ucaggagacuguggagugu

SEQ ID NO: 1383322 - RNA, 19 nt, Homo sapiens
  misc_RNA (1)...(19): siRNA sense strand
accagaugcugaccauaaa

SEQ ID NO: 1383323 - RNA, 19 nt, Homo sapiens
  misc_RNA (1)...(19): siRNA sense strand
ggauaugucgacuucugaa

SEQ ID NO: 1383324 - RNA, 19 nt, Homo sapiens
  misc_RNA (1)...(19): siRNA sense strand
uucacuaccucguguuuga

SEQ ID NO: 1383325 - RNA, 19 nt, Homo sapiens
  misc_RNA (1)...(19): siRNA sense strand
ucaaccagaugcugaccau

SEQ ID NO: 1383326 - RNA, 19 nt, Homo sapiens
  misc_RNA (1)...(19): siRNA sense strand
ggccagagaguacuacagu

SEQ ID NO: 1383327 - RNA, 19 nt, Homo sapiens
  misc_RNA (1)...(19): siRNA sense strand
ggcucaauguccacuauca

SEQ ID NO: 1383328 - RNA, 19 nt, Homo sapiens
  misc_RNA (1)...(19): siRNA sense strand
gauuacagaacagcugauu

SEQ ID NO: 1383329 - RNA, 19 nt, Homo sapiens
  misc_RNA (1)...(19): siRNA sense strand
aucaagggcuccacagaga

SEQ ID NO: 1383330 - RNA, 19 nt, Homo sapiens
  misc_RNA (1)...(19): siRNA sense strand
ggaucaagggcuccacaga

SEQ ID NO: 1383331 - RNA, 19 nt, Homo sapiens
  misc_RNA (1)...(19): siRNA sense strand
aaucaucaauaccaagaag

SEQ ID NO: 1383332 - RNA, 19 nt, Homo sapiens
  misc_RNA (1)...(19): siRNA sense strand
gggaucaccagaaacuaga

SEQ ID NO: 1383333 - RNA, 19 nt, Homo sapiens
  misc_RNA (1)...(19): siRNA sense strand
cagcgugcaucgccuacau

SEQ ID NO: 1383334 - RNA, 19 nt, Homo sapiens
  misc_RNA (1)...(19): siRNA sense strand
ccaugacaguauuucugaa

SEQ ID NO: 1383335 - RNA, 19 nt, Homo sapiens
  misc_RNA (1)...(19): siRNA sense strand
ccucguguuugaccuuguu

SEQ ID NO: 1383336 - RNA, 19 nt, Homo sapiens
  misc_RNA (1)...(19): siRNA sense strand
ucggauaugucgacuucug

SEQ ID NO: 1383337 - RNA, 19 nt, Homo sapiens
  misc_RNA (1)...(19): siRNA sense strand
cgaaaacaggagaucauua

SEQ ID NO: 1383338 - RNA, 19 nt, Homo sapiens
  misc_RNA (1)...(19): siRNA sense strand
ucaucaauaccaagaaguu

SEQ ID NO: 1383339 - RNA, 19 nt, Homo sapiens
  misc_RNA (1)...(19): siRNA sense strand
gccaaaagccuauugaaca

SEQ ID NO: 1383340 - RNA, 19 nt, Homo sapiens
  misc_RNA (1)...(19): siRNA sense strand
gaugccagccacuguauac

SEQ ID NO: 1383341 - RNA, 19 nt, Homo sapiens
  misc_RNA (1)...(19): siRNA sense strand
agaacuugaucaaccagau

SEQ ID NO: 1383342 - RNA, 19 nt, Homo sapiens
  misc_RNA (1)...(19): siRNA sense strand
acagcaagccuauccauac

SEQ ID NO: 1383343 - RNA, 19 nt, Homo sapiens
  misc_RNA (1)...(19): siRNA sense strand
caucaacaauggggacuuu

SEQ ID NO: 1383344 - RNA, 19 nt, Homo sapiens
  misc_RNA (1)...(19): siRNA sense strand
agagaguacuacagugaag

SEQ ID NO: 1383345 - RNA, 19 nt, Homo sapiens
  misc_RNA (1)...(19): siRNA sense strand
cagagaguacuacagugaa

SEQ ID NO: 1383346 - RNA, 19 nt, Homo sapiens
  misc_RNA (1)...(19): siRNA sense strand
caucaauaccaagaaguug

SEQ ID NO: 1383347 - RNA, 19 nt, Homo sapiens
  misc_RNA (1)...(19): siRNA sense strand
guccgcaggugugugaaga

SEQ ID NO: 1383348 - RNA, 19 nt, Homo sapiens
  misc_RNA (1)...(19): siRNA sense strand
gcaggugugugaagaaaac

SEQ ID NO: 1383349 - RNA, 19 nt, Homo sapiens
  misc_RNA (1)...(19): siRNA sense strand
uuugaggccuacacgaaga

SEQ ID NO: 1383350 - RNA, 19 nt, Homo sapiens
  misc_RNA (1)...(19): siRNA sense strand
ggacacgguaacuccugaa

SEQ ID NO: 1383351 - RNA, 19 nt, Homo sapiens
  misc_RNA (1)...(19): siRNA sense strand
ccagaaugggacacgguaa

SEQ ID NO: 1383352 - RNA, 19 nt, Homo sapiens
  misc_RNA (1)...(19): siRNA sense strand
acauccgccucacccagua

SEQ ID NO: 1383353 - RNA, 19 nt, Homo sapiens
  misc_RNA (1)...(19): siRNA sense strand
ugaaacauccaaacaucgu

SEQ ID NO: 1383354 - RNA, 19 nt, Homo sapiens
  misc_RNA (1)...(19): siRNA sense strand
gcugcaacaccaccacaga

SEQ ID NO: 1383355 - RNA, 19 nt, Homo sapiens
  misc_RNA (1)...(19): siRNA sense strand
aaaagccuauugaacaaga

SEQ ID NO: 1383356 - RNA, 19 nt, Homo sapiens
  misc_RNA (1)...(19): siRNA sense strand
ugaggaaagaucccuaugg

SEQ ID NO: 1383357 - RNA, 19 nt, Homo sapiens
  misc_RNA (1)...(19): siRNA sense strand
ccuacacgaagauuuguga

SEQ ID NO: 1383358 - RNA, 19 nt, Homo sapiens
  misc_RNA (1)...(19): siRNA sense strand
ggaaagaucccuauggaaa

SEQ ID NO: 1383359 - RNA, 19 nt, Homo sapiens
  misc_RNA (1)...(19): siRNA sense strand
gaggaaagaucccuaugga

SEQ ID NO: 1383360 - RNA, 19 nt, Homo sapiens
  misc_RNA (1)...(19): siRNA sense strand
caggagaucauuaagauua

SEQ ID NO: 1383361 - RNA, 19 nt, Homo sapiens
  misc_RNA (1)...(19): siRNA sense strand
gcucggauaugucgacuuc

SEQ ID NO: 1383362 - RNA, 19 nt, Homo sapiens
  misc_RNA (1)...(19): siRNA sense strand
gaaaacaggagaucauuaa

SEQ ID NO: 1383363 - RNA, 19 nt, Homo sapiens
  misc_RNA (1)...(19): siRNA sense strand
ggagcuguuugaagacauu

SEQ ID NO: 1383364 - RNA, 19 nt, Homo sapiens
  misc_RNA (1)...(19): siRNA sense strand
guacuacagugaagcagau

SEQ ID NO: 1383365 - RNA, 19 nt, Homo sapiens
  misc_RNA (1)...(19): siRNA sense strand
gaacgugaggcucggauau

SEQ ID NO: 1383366 - RNA, 19 nt, Homo sapiens
  misc_RNA (1)...(19): siRNA sense strand
uuacagaacagcugauuga

SEQ ID NO: 1383367 - RNA, 19 nt, Homo sapiens
  misc_RNA (1)...(19): siRNA sense strand
guacacaacgcuacagaug

SEQ ID NO: 1383368 - RNA, 19 nt, Homo sapiens
  misc_RNA (1)...(19): siRNA sense strand
gcagaugccagccacugua

SEQ ID NO: 1383369 - RNA, 19 nt, Homo sapiens
  misc_RNA (1)...(19): siRNA sense strand
ccgucaagcuggcugauuu

SEQ ID NO: 1383370 - RNA, 19 nt, Homo sapiens
  misc_RNA (1)...(19): siRNA sense strand
gauggcaaguggcucaaug

SEQ ID NO: 1383371 - RNA, 19 nt, Homo sapiens
  misc_RNA (1)...(19): siRNA sense strand
gagagcagcaggcuugguu

SEQ ID NO: 1383372 - RNA, 19 nt, Homo sapiens
  misc_RNA (1)...(19): siRNA sense strand
aacaggagaucauuaagau

SEQ ID NO: 1383373 - RNA, 19 nt, Homo sapiens
  misc_RNA (1)...(19): siRNA sense strand
aaacaggagaucauuaaga

SEQ ID NO: 1383374 - RNA, 19 nt, Homo sapiens
  misc_RNA (1)...(19): siRNA sense strand
gcaagggugcuuucucugu

SEQ ID NO: 1383375 - RNA, 19 nt, Homo sapiens
  misc_RNA (1)...(19): siRNA sense strand
ccagagaguacuacaguga

SEQ ID NO: 1383376 - RNA, 19 nt, Homo sapiens
  misc_RNA (1)...(19): siRNA sense strand
gaacuugaucaaccagaug

SEQ ID NO: 1383377 - RNA, 19 nt, Homo sapiens
  misc_RNA (1)...(19): siRNA sense strand
gaacagcaagccuauccau

SEQ ID NO: 1383378 - RNA, 19 nt, Homo sapiens
  misc_RNA (1)...(19): siRNA sense strand
ggagaguguuaaccacauc

SEQ ID NO: 1383379 - RNA, 19 nt, Homo sapiens
  misc_RNA (1)...(19): siRNA sense strand
agaaucuccuguccaagaa

SEQ ID NO: 1383380 - RNA, 19 nt, Homo sapiens
  misc_RNA (1)...(19): siRNA sense strand
gaaagaucccuauggaaaa

SEQ ID NO: 1383381 - RNA, 19 nt, Homo sapiens
  misc_RNA (1)...(19): siRNA sense strand
cagcaggcuugguuugguu

SEQ ID NO: 1383382 - RNA, 19 nt, Homo sapiens
  misc_RNA (1)...(19): siRNA sense strand
ccaaaagccuauugaacaa

SEQ ID NO: 1383383 - RNA, 19 nt, Homo sapiens
  misc_RNA (1)...(19): siRNA sense strand
ucugaaacauccaaacauc

SEQ ID NO: 1383384 - RNA, 19 nt, Homo sapiens
  misc_RNA (1)...(19): siRNA sense strand
caacaccaccacagaagau

SEQ ID NO: 1383385 - RNA, 19 nt, Homo sapiens
  misc_RNA (1)...(19): siRNA sense strand
gcaacaccaccacagaaga

SEQ ID NO: 1383386 - RNA, 19 nt, Homo sapiens
  misc_RNA (1)...(19): siRNA sense strand
gaccauaaacccagcaaag

SEQ ID NO: 1383387 - RNA, 19 nt, Homo sapiens
  misc_RNA (1)...(19): siRNA sense strand
gcggggagcuguuugaaga

SEQ ID NO: 1383388 - RNA, 19 nt, Homo sapiens
  misc_RNA (1)...(19): siRNA sense strand
gcgccuccaugacaguauu

SEQ ID NO: 1383389 - RNA, 19 nt, Homo sapiens
  misc_RNA (1)...(19): siRNA sense strand
gcaccagccagucagaaga

SEQ ID NO: 1383390 - RNA, 19 nt, Homo sapiens
  misc_RNA (1)...(19): siRNA sense strand
aaccagaugcugaccauaa

SEQ ID NO: 1383391 - RNA, 19 nt, Homo sapiens
  misc_RNA (1)...(19): siRNA sense strand
aggagacuguggaguguuu

SEQ ID NO: 1383392 - RNA, 19 nt, Homo sapiens
  misc_RNA (1)...(19): siRNA sense strand
ggagaucauuaagauuaca

SEQ ID NO: 1383393 - RNA, 19 nt, Homo sapiens
  misc_RNA (1)...(19): siRNA sense strand
uaugucgacuucugaaaca

SEQ ID NO: 1383394 - RNA, 19 nt, Homo sapiens
  misc_RNA (1)...(19): siRNA sense strand
ccaagaacagcaagccuau

SEQ ID NO: 1383395 - RNA, 19 nt, Homo sapiens
  misc_RNA (1)...(19): siRNA sense strand
gaaaaccuguggauaucug

SEQ ID NO: 1383396 - RNA, 19 nt, Homo sapiens
  misc_RNA (1)...(19): siRNA sense strand
ccugaggucuugaggaaag

SEQ ID NO: 1383397 - RNA, 19 nt, Homo sapiens
  misc_RNA (1)...(19): siRNA sense strand
gcagcaggcuugguuuggu

SEQ ID NO: 1383398 - RNA, 19 nt, Homo sapiens
  misc_RNA (1)...(19): siRNA sense strand
gagcagcaggcuugguuug

SEQ ID NO: 1383399 - RNA, 19 nt, Homo sapiens
  misc_RNA (1)...(19): siRNA sense strand
ccgcaggugugugaagaaa

SEQ ID NO: 1383400 - RNA, 19 nt, Homo sapiens
  misc_RNA (1)...(19): siRNA sense strand
gggaugaggaucagcacaa

SEQ ID NO: 1383401 - RNA, 19 nt, Homo sapiens
  misc_RNA (1)...(19): siRNA sense strand
ggaugaggaucagcacaag

SEQ ID NO: 1383402 - RNA, 19 nt, Homo sapiens
  misc_RNA (1)...(19): siRNA sense strand
gauaugucgacuucugaaa

SEQ ID NO: 1383403 - RNA, 19 nt, Homo sapiens
  misc_RNA (1)...(19): siRNA sense strand
gccagccacuguauacauc

SEQ ID NO: 1383404 - RNA, 19 nt, Homo sapiens
  misc_RNA (1)...(19): siRNA sense strand
uggcaagggugcuuucucu

SEQ ID NO: 1383405 - RNA, 19 nt, Homo sapiens
  misc_RNA (1)...(19): siRNA sense strand
gauuucccaucaccagaau

SEQ ID NO: 1383406 - RNA, 19 nt, Homo sapiens
  misc_RNA (1)...(19): siRNA sense strand
ucaggagacuguggagugu

SEQ ID NO: 1383407 - RNA, 19 nt, Homo sapiens
  misc_RNA (1)...(19): siRNA sense strand
accagaugcugaccauaaa

SEQ ID NO: 1383408 - RNA, 19 nt, Homo sapiens
  misc_RNA (1)...(19): siRNA sense strand
ggauaugucgacuucugaa

SEQ ID NO: 1383409 - RNA, 19 nt, Homo sapiens
  misc_RNA (1)...(19): siRNA sense strand
uucacuaccucguguuuga

SEQ ID NO: 1383410 - RNA, 19 nt, Homo sapiens
  misc_RNA (1)...(19): siRNA sense strand
ucaaccagaugcugaccau

SEQ ID NO: 1383411 - RNA, 19 nt, Homo sapiens
  misc_RNA (1)...(19): siRNA sense strand
ggccagagaguacuacagu

SEQ ID NO: 1383412 - RNA, 19 nt, Homo sapiens
  misc_RNA (1)...(19): siRNA sense strand
ggcucaauguccacuauca

SEQ ID NO: 1383413 - RNA, 19 nt, Homo sapiens
  misc_RNA (1)...(19): siRNA sense strand
gauuacagaacagcugauu

SEQ ID NO: 1383414 - RNA, 19 nt, Homo sapiens
  misc_RNA (1)...(19): siRNA sense strand
aucaagggcuccacagaga

SEQ ID NO: 1383415 - RNA, 19 nt, Homo sapiens
  misc_RNA (1)...(19): siRNA sense strand
ggaucaagggcuccacaga

SEQ ID NO: 1383416 - RNA, 19 nt, Homo sapiens
  misc_RNA (1)...(19): siRNA sense strand
aaucaucaauaccaagaag

SEQ ID NO: 1383417 - RNA, 19 nt, Homo sapiens
  misc_RNA (1)...(19): siRNA sense strand
gggaucaccagaaacuaga

SEQ ID NO: 1383418 - RNA, 19 nt, Homo sapiens
  misc_RNA (1)...(19): siRNA sense strand
cagcgugcaucgccuacau

SEQ ID NO: 1383419 - RNA, 19 nt, Homo sapiens
  misc_RNA (1)...(19): siRNA sense strand
ccaugacaguauuucugaa

SEQ ID NO: 1383420 - RNA, 19 nt, Homo sapiens
  misc_RNA (1)...(19): siRNA sense strand
ccucguguuugaccuuguu

SEQ ID NO: 1383421 - RNA, 19 nt, Homo sapiens
  misc_RNA (1)...(19): siRNA sense strand
ucggauaugucgacuucug

SEQ ID NO: 1383422 - RNA, 19 nt, Homo sapiens
  misc_RNA (1)...(19): siRNA sense strand
cgaaaacaggagaucauua

SEQ ID NO: 1383423 - RNA, 19 nt, Homo sapiens
  misc_RNA (1)...(19): siRNA sense strand
ucaucaauaccaagaaguu

SEQ ID NO: 1383424 - RNA, 19 nt, Homo sapiens
  misc_RNA (1)...(19): siRNA sense strand
gccaaaagccuauugaaca

SEQ ID NO: 1383425 - RNA, 19 nt, Homo sapiens
  misc_RNA (1)...(19): siRNA sense strand
gaugccagccacuguauac

SEQ ID NO: 1383426 - RNA, 19 nt, Homo sapiens
  misc_RNA (1)...(19): siRNA sense strand
agaacuugaucaaccagau

SEQ ID NO: 1383427 - RNA, 19 nt, Homo sapiens
  misc_RNA (1)...(19): siRNA sense strand
acagcaagccuauccauac

SEQ ID NO: 1383428 - RNA, 19 nt, Homo sapiens
  misc_RNA (1)...(19): siRNA sense strand
caucaacaauggggacuuu

SEQ ID NO: 1383429 - RNA, 19 nt, Homo sapiens
  misc_RNA (1)...(19): siRNA sense strand
agagaguacuacagugaag

SEQ ID NO: 1383430 - RNA, 19 nt, Homo sapiens
  misc_RNA (1)...(19): siRNA sense strand
cagagaguacuacagugaa

SEQ ID NO: 1383431 - RNA, 19 nt, Homo sapiens
  misc_RNA (1)...(19): siRNA sense strand
caucaauaccaagaaguug

SEQ ID NO: 1383432 - RNA, 19 nt, Homo sapiens
  misc_RNA (1)...(19): siRNA sense strand
guccgcaggugugugaaga

SEQ ID NO: 1383433 - RNA, 19 nt, Homo sapiens
  misc_RNA (1)...(19): siRNA sense strand
gcaggugugugaagaaaac

SEQ ID NO: 1383434 - RNA, 19 nt, Homo sapiens
  misc_RNA (1)...(19): siRNA sense strand
uuugaggccuacacgaaga

SEQ ID NO: 1383435 - RNA, 19 nt, Homo sapiens
  misc_RNA (1)...(19): siRNA sense strand
ggacacgguaacuccugaa

SEQ ID NO: 1383436 - RNA, 19 nt, Homo sapiens
  misc_RNA (1)...(19): siRNA sense strand
ccagaaugggacacgguaa

SEQ ID NO: 1383437 - RNA, 19 nt, Homo sapiens
  misc_RNA (1)...(19): siRNA sense strand
acauccgccucacccagua

SEQ ID NO: 1383438 - RNA, 19 nt, Homo sapiens
  misc_RNA (1)...(19): siRNA sense strand
ugaaacauccaaacaucgu

SEQ ID NO: 1383439 - RNA, 19 nt, Homo sapiens
  misc_RNA (1)...(19): siRNA sense strand
gcugcaacaccaccacaga

SEQ ID NO: 1383440 - RNA, 19 nt, Homo sapiens
  misc_RNA (1)...(19): siRNA sense strand
aaaagccuauugaacaaga

SEQ ID NO: 1383441 - RNA, 19 nt, Homo sapiens
  misc_RNA (1)...(19): siRNA sense strand
ugaggaaagaucccuaugg

SEQ ID NO: 1383442 - RNA, 19 nt, Homo sapiens
  misc_RNA (1)...(19): siRNA sense strand
ccuacacgaagauuuguga

SEQ ID NO: 1383443 - RNA, 19 nt, Homo sapiens
  misc_RNA (1)...(19): siRNA sense strand
ggaaagaucccuauggaaa

SEQ ID NO: 1383444 - RNA, 19 nt, Homo sapiens
  misc_RNA (1)...(19): siRNA sense strand
gaggaaagaucccuaugga

SEQ ID NO: 1383445 - RNA, 19 nt, Homo sapiens
  misc_RNA (1)...(19): siRNA sense strand
caggagaucauuaagauua

SEQ ID NO: 1383446 - RNA, 19 nt, Homo sapiens
  misc_RNA (1)...(19): siRNA sense strand
gcucggauaugucgacuuc

SEQ ID NO: 1383447 - RNA, 19 nt, Homo sapiens
  misc_RNA (1)...(19): siRNA sense strand
gaaaacaggagaucauuaa

SEQ ID NO: 1383448 - RNA, 19 nt, Homo sapiens
  misc_RNA (1)...(19): siRNA sense strand
ggagcuguuugaagacauu

SEQ ID NO: 1383449 - RNA, 19 nt, Homo sapiens
  misc_RNA (1)...(19): siRNA sense strand
guacuacagugaagcagau

SEQ ID NO: 1383450 - RNA, 19 nt, Homo sapiens
  misc_RNA (1)...(19): siRNA sense strand
gaacgugaggcucggauau

SEQ ID NO: 1383451 - RNA, 19 nt, Homo sapiens
  misc_RNA (1)...(19): siRNA sense strand
uuacagaacagcugauuga

SEQ ID NO: 1383452 - RNA, 19 nt, Homo sapiens
  misc_RNA (1)...(19): siRNA sense strand
guacacaacgcuacagaug

SEQ ID NO: 1383453 - RNA, 19 nt, Homo sapiens
  misc_RNA (1)...(19): siRNA sense strand
gcagaugccagccacugua

SEQ ID NO: 1383454 - RNA, 19 nt, Homo sapiens
  misc_RNA (1)...(19): siRNA sense strand
ccgucaagcuggcugauuu

SEQ ID NO: 1383455 - RNA, 19 nt, Homo sapiens
  misc_RNA (1)...(19): siRNA sense strand
gauggcaaguggcucaaug

SEQ ID NO: 1383456 - RNA, 19 nt, Homo sapiens
  misc_RNA (1)...(19): siRNA sense strand
gagagcagcaggcuugguu

SEQ ID NO: 1383457 - RNA, 19 nt, Homo sapiens
  misc_RNA (1)...(19): siRNA sense strand
aacaggagaucauuaagau

SEQ ID NO: 1383458 - RNA, 19 nt, Homo sapiens
  misc_RNA (1)...(19): siRNA sense strand
aaacaggagaucauuaaga

SEQ ID NO: 1383459 - RNA, 19 nt, Homo sapiens
  misc_RNA (1)...(19): siRNA sense strand
gcaagggugcuuucucugu

SEQ ID NO: 1383460 - RNA, 19 nt, Homo sapiens
  misc_RNA (1)...(19): siRNA sense strand
ccagagaguacuacaguga

SEQ ID NO: 1383461 - RNA, 19 nt, Homo sapiens
  misc_RNA (1)...(19): siRNA sense strand
gaacuugaucaaccagaug

SEQ ID NO: 1383462 - RNA, 19 nt, Homo sapiens
  misc_RNA (1)...(19): siRNA sense strand
gaacagcaagccuauccau

SEQ ID NO: 1383463 - RNA, 19 nt, Homo sapiens
  misc_RNA (1)...(19): siRNA sense strand
ggagaguguuaaccacauc

SEQ ID NO: 1383464 - RNA, 19 nt, Homo sapiens
  misc_RNA (1)...(19): siRNA sense strand
agaaucuccuguccaagaa

SEQ ID NO: 1383465 - RNA, 19 nt, Homo sapiens
  misc_RNA (1)...(19): siRNA sense strand
gaaagaucccuauggaaaa

SEQ ID NO: 1383466 - RNA, 19 nt, Homo sapiens
  misc_RNA (1)...(19): siRNA sense strand
cagcaggcuugguuugguu

SEQ ID NO: 1383467 - RNA, 19 nt, Homo sapiens
  misc_RNA (1)...(19): siRNA sense strand
ccaaaagccuauugaacaa

SEQ ID NO: 1383468 - RNA, 19 nt, Homo sapiens
  misc_RNA (1)...(19): siRNA sense strand
ucugaaacauccaaacauc

SEQ ID NO: 1383469 - RNA, 19 nt, Homo sapiens
  misc_RNA (1)...(19): siRNA sense strand
caacaccaccacagaagau

SEQ ID NO: 1383470 - RNA, 19 nt, Homo sapiens
  misc_RNA (1)...(19): siRNA sense strand
gcaacaccaccacagaaga

SEQ ID NO: 1383471 - RNA, 19 nt, Homo sapiens
  misc_RNA (1)...(19): siRNA sense strand
gaccauaaacccagcaaag

SEQ ID NO: 1383472 - RNA, 19 nt, Homo sapiens
  misc_RNA (1)...(19): siRNA sense strand
gcggggagcuguuugaaga

SEQ ID NO: 1383473 - RNA, 19 nt, Homo sapiens
  misc_RNA (1)...(19): siRNA sense strand
gcgccuccaugacaguauu

SEQ ID NO: 1383474 - RNA, 19 nt, Homo sapiens
  misc_RNA (1)...(19): siRNA sense strand
gcaccagccagucagaaga

SEQ ID NO: 1383475 - RNA, 19 nt, Homo sapiens
  misc_RNA (1)...(19): siRNA sense strand
aaccagaugcugaccauaa

SEQ ID NO: 1383476 - RNA, 19 nt, Homo sapiens
  misc_RNA (1)...(19): siRNA sense strand
aggagacuguggaguguuu

SEQ ID NO: 1383477 - RNA, 19 nt, Homo sapiens
  misc_RNA (1)...(19): siRNA sense strand
ggagaucauuaagauuaca

SEQ ID NO: 1383478 - RNA, 19 nt, Homo sapiens
  misc_RNA (1)...(19): siRNA sense strand
uaugucgacuucugaaaca

SEQ ID NO: 1383479 - RNA, 19 nt, Homo sapiens
  misc_RNA (1)...(19): siRNA sense strand
ccaagaacagcaagccuau

SEQ ID NO: 1383480 - RNA, 19 nt, Homo sapiens
  misc_RNA (1)...(19): siRNA sense strand
gaaaaccuguggauaucug

SEQ ID NO: 1383481 - RNA, 19 nt, Homo sapiens
  misc_RNA (1)...(19): siRNA sense strand
ccugaggucuugaggaaag

SEQ ID NO: 1383482 - RNA, 19 nt, Homo sapiens
  misc_RNA (1)...(19): siRNA sense strand
gcagcaggcuugguuuggu

SEQ ID NO: 1383483 - RNA, 19 nt, Homo sapiens
  misc_RNA (1)...(19): siRNA sense strand
gagcagcaggcuugguuug

SEQ ID NO: 1383484 - RNA, 19 nt, Homo sapiens
  misc_RNA (1)...(19): siRNA sense strand
ccgcaggugugugaagaaa

SEQ ID NO: 1383485 - RNA, 19 nt, Homo sapiens
  misc_RNA (1)...(19): siRNA sense strand
gggaugaggaucagcacaa

SEQ ID NO: 1383486 - RNA, 19 nt, Homo sapiens
  misc_RNA (1)...(19): siRNA sense strand
ggaugaggaucagcacaag

SEQ ID NO: 1383487 - RNA, 19 nt, Homo sapiens
  misc_RNA (1)...(19): siRNA sense strand
gauaugucgacuucugaaa

SEQ ID NO: 1383488 - RNA, 19 nt, Homo sapiens
  misc_RNA (1)...(19): siRNA sense strand
gccagccacuguauacauc

SEQ ID NO: 1383489 - RNA, 19 nt, Homo sapiens
  misc_RNA (1)...(19): siRNA sense strand
uggcaagggugcuuucucu

SEQ ID NO: 1383490 - RNA, 19 nt, Homo sapiens
  misc_RNA (1)...(19): siRNA sense strand
gauuucccaucaccagaau

SEQ ID NO: 1383491 - RNA, 19 nt, Homo sapiens
  misc_RNA (1)...(19): siRNA sense strand
ucaggagacuguggagugu

SEQ ID NO: 1383492 - RNA, 19 nt, Homo sapiens
  misc_RNA (1)...(19): siRNA sense strand
accagaugcugaccauaaa

SEQ ID NO: 1383493 - RNA, 19 nt, Homo sapiens
  misc_RNA (1)...(19): siRNA sense strand
ggauaugucgacuucugaa

SEQ ID NO: 1383494 - RNA, 19 nt, Homo sapiens
  misc_RNA (1)...(19): siRNA sense strand
uucacuaccucguguuuga

SEQ ID NO: 1383495 - RNA, 19 nt, Homo sapiens
  misc_RNA (1)...(19): siRNA sense strand
ucaaccagaugcugaccau

SEQ ID NO: 1383496 - RNA, 19 nt, Homo sapiens
  misc_RNA (1)...(19): siRNA sense strand
ggccagagaguacuacagu

SEQ ID NO: 1383497 - RNA, 19 nt, Homo sapiens
  misc_RNA (1)...(19): siRNA sense strand
ggcucaauguccacuauca

SEQ ID NO: 1383498 - RNA, 19 nt, Homo sapiens
  misc_RNA (1)...(19): siRNA sense strand
gauuacagaacagcugauu

SEQ ID NO: 1383499 - RNA, 19 nt, Homo sapiens
  misc_RNA (1)...(19): siRNA sense strand
aucaagggcuccacagaga

SEQ ID NO: 1383500 - RNA, 19 nt, Homo sapiens
  misc_RNA (1)...(19): siRNA sense strand
ggaucaagggcuccacaga

SEQ ID NO: 1383501 - RNA, 19 nt, Homo sapiens
  misc_RNA (1)...(19): siRNA sense strand
aaucaucaauaccaagaag

SEQ ID NO: 1383502 - RNA, 19 nt, Homo sapiens
  misc_RNA (1)...(19): siRNA sense strand
gggaucaccagaaacuaga

SEQ ID NO: 1383503 - RNA, 19 nt, Homo sapiens
  misc_RNA (1)...(19): siRNA sense strand
cagcgugcaucgccuacau

SEQ ID NO: 1383504 - RNA, 19 nt, Homo sapiens
  misc_RNA (1)...(19): siRNA sense strand
ccaugacaguauuucugaa

SEQ ID NO: 1383505 - RNA, 19 nt, Homo sapiens
  misc_RNA (1)...(19): siRNA sense strand
ccucguguuugaccuuguu

SEQ ID NO: 1383506 - RNA, 19 nt, Homo sapiens
  misc_RNA (1)...(19): siRNA sense strand
ucggauaugucgacuucug

SEQ ID NO: 1383507 - RNA, 19 nt, Homo sapiens
  misc_RNA (1)...(19): siRNA sense strand
cgaaaacaggagaucauua

SEQ ID NO: 1383508 - RNA, 19 nt, Homo sapiens
  misc_RNA (1)...(19): siRNA sense strand
ucaucaauaccaagaaguu

SEQ ID NO: 1383509 - RNA, 19 nt, Homo sapiens
  misc_RNA (1)...(19): siRNA sense strand
gccaaaagccuauugaaca

SEQ ID NO: 1383510 - RNA, 19 nt, Homo sapiens
  misc_RNA (1)...(19): siRNA sense strand
gaugccagccacuguauac

SEQ ID NO: 1383511 - RNA, 19 nt, Homo sapiens
  misc_RNA (1)...(19): siRNA sense strand
agaacuugaucaaccagau

SEQ ID NO: 1383512 - RNA, 19 nt, Homo sapiens
  misc_RNA (1)...(19): siRNA sense strand
acagcaagccuauccauac

SEQ ID NO: 1383513 - RNA, 19 nt, Homo sapiens
  misc_RNA (1)...(19): siRNA sense strand
caucaacaauggggacuuu

SEQ ID NO: 1383514 - RNA, 19 nt, Homo sapiens
  misc_RNA (1)...(19): siRNA sense strand
agagaguacuacagugaag

SEQ ID NO: 1383515 - RNA, 19 nt, Homo sapiens
  misc_RNA (1)...(19): siRNA sense strand
cagagaguacuacagugaa

SEQ ID NO: 1383516 - RNA, 19 nt, Homo sapiens
  misc_RNA (1)...(19): siRNA sense strand
caucaauaccaagaaguug

SEQ ID NO: 1383517 - RNA, 19 nt, Homo sapiens
  misc_RNA (1)...(19): siRNA sense strand
guccgcaggugugugaaga

SEQ ID NO: 1383518 - RNA, 19 nt, Homo sapiens
  misc_RNA (1)...(19): siRNA sense strand
gcaggugugugaagaaaac

SEQ ID NO: 1383519 - RNA, 19 nt, Homo sapiens
  misc_RNA (1)...(19): siRNA sense strand
uuugaggccuacacgaaga

SEQ ID NO: 1383520 - RNA, 19 nt, Homo sapiens
  misc_RNA (1)...(19): siRNA sense strand
ggacacgguaacuccugaa

SEQ ID NO: 1383521 - RNA, 19 nt, Homo sapiens
  misc_RNA (1)...(19): siRNA sense strand
ccagaaugggacacgguaa

SEQ ID NO: 1383522 - RNA, 19 nt, Homo sapiens
  misc_RNA (1)...(19): siRNA sense strand
acauccgccucacccagua

SEQ ID NO: 1383523 - RNA, 19 nt, Homo sapiens
  misc_RNA (1)...(19): siRNA sense strand
ugaaacauccaaacaucgu

SEQ ID NO: 1383524 - RNA, 19 nt, Homo sapiens
  misc_RNA (1)...(19): siRNA sense strand
gcugcaacaccaccacaga

SEQ ID NO: 1383525 - RNA, 19 nt, Homo sapiens
  misc_RNA (1)...(19): siRNA sense strand
aaaagccuauugaacaaga

SEQ ID NO: 1383526 - RNA, 19 nt, Homo sapiens
  misc_RNA (1)...(19): siRNA sense strand
ugaggaaagaucccuaugg

SEQ ID NO: 1383527 - RNA, 19 nt, Homo sapiens
  misc_RNA (1)...(19): siRNA sense strand
ccuacacgaagauuuguga

SEQ ID NO: 1383528 - RNA, 19 nt, Homo sapiens
  misc_RNA (1)...(19): siRNA sense strand
ggaaagaucccuauggaaa

SEQ ID NO: 1383529 - RNA, 19 nt, Homo sapiens
  misc_RNA (1)...(19): siRNA sense strand
gaggaaagaucccuaugga

SEQ ID NO: 1383530 - RNA, 19 nt, Homo sapiens
  misc_RNA (1)...(19): siRNA sense strand
caggagaucauuaagauua

SEQ ID NO: 1383531 - RNA, 19 nt, Homo sapiens
  misc_RNA (1)...(19): siRNA sense strand
gcucggauaugucgacuuc

SEQ ID NO: 1383532 - RNA, 19 nt, Homo sapiens
  misc_RNA (1)...(19): siRNA sense strand
gaaaacaggagaucauuaa

SEQ ID NO: 1383533 - RNA, 19 nt, Homo sapiens
  misc_RNA (1)...(19): siRNA sense strand
ggagcuguuugaagacauu

SEQ ID NO: 1383534 - RNA, 19 nt, Homo sapiens
  misc_RNA (1)...(19): siRNA sense strand
guacuacagugaagcagau

SEQ ID NO: 1383535 - RNA, 19 nt, Homo sapiens
  misc_RNA (1)...(19): siRNA sense strand
gaacgugaggcucggauau

SEQ ID NO: 1383536 - RNA, 19 nt, Homo sapiens
  misc_RNA (1)...(19): siRNA sense strand
guacacaacgcuacagaug

SEQ ID NO: 1383537 - RNA, 19 nt, Homo sapiens
  misc_RNA (1)...(19): siRNA sense strand
gcagaugccagccacugua

SEQ ID NO: 1383538 - RNA, 19 nt, Homo sapiens
  misc_RNA (1)...(19): siRNA sense strand
ccgucaagcuggcugauuu

SEQ ID NO: 1383539 - RNA, 19 nt, Homo sapiens
  misc_RNA (1)...(19): siRNA sense strand
gagagcagcaggcuugguu

SEQ ID NO: 1383540 - RNA, 19 nt, Homo sapiens
  misc_RNA (1)...(19): siRNA sense strand
aacaggagaucauuaagau

SEQ ID NO: 1383541 - RNA, 19 nt, Homo sapiens
  misc_RNA (1)...(19): siRNA sense strand
aaacaggagaucauuaaga

SEQ ID NO: 1383542 - RNA, 19 nt, Homo sapiens
  misc_RNA (1)...(19): siRNA sense strand
ccagagaguacuacaguga

SEQ ID NO: 1383543 - RNA, 19 nt, Homo sapiens
  misc_RNA (1)...(19): siRNA sense strand
gcaagggugcuuucucugu

SEQ ID NO: 1383544 - RNA, 19 nt, Homo sapiens
  misc_RNA (1)...(19): siRNA sense strand
gaacuugaucaaccagaug

SEQ ID NO: 1383545 - RNA, 19 nt, Homo sapiens
  misc_RNA (1)...(19): siRNA sense strand
ggagaguguuaaccacauc

SEQ ID NO: 1383546 - RNA, 19 nt, Homo sapiens
  misc_RNA (1)...(19): siRNA sense strand
gaaagaucccuauggaaaa

SEQ ID NO: 1383547 - RNA, 19 nt, Homo sapiens
  misc_RNA (1)...(19): siRNA sense strand
cagcaggcuugguuugguu

SEQ ID NO: 1383548 - RNA, 19 nt, Homo sapiens
  misc_RNA (1)...(19): siRNA sense strand
ccaaaagccuauugaacaa

SEQ ID NO: 1383549 - RNA, 19 nt, Homo sapiens
  misc_RNA (1)...(19): siRNA sense strand
ucugaaacauccaaacauc

SEQ ID NO: 1383550 - RNA, 19 nt, Homo sapiens
  misc_RNA (1)...(19): siRNA sense strand
caacaccaccacagaagau

SEQ ID NO: 1383551 - RNA, 19 nt, Homo sapiens
  misc_RNA (1)...(19): siRNA sense strand
gcaacaccaccacagaaga

SEQ ID NO: 1383552 - RNA, 19 nt, Homo sapiens
  misc_RNA (1)...(19): siRNA sense strand
gaccauaaacccagcaaag

SEQ ID NO: 1383553 - RNA, 19 nt, Homo sapiens
  misc_RNA (1)...(19): siRNA sense strand
gcggggagcuguuugaaga

SEQ ID NO: 1383554 - RNA, 19 nt, Homo sapiens
  misc_RNA (1)...(19): siRNA sense strand
gcgccuccaugacaguauu

SEQ ID NO: 1383555 - RNA, 19 nt, Homo sapiens
  misc_RNA (1)...(19): siRNA sense strand
aaccagaugcugaccauaa

SEQ ID NO: 1383556 - RNA, 19 nt, Homo sapiens
  misc_RNA (1)...(19): siRNA sense strand
aggagacuguggaguguuu

SEQ ID NO: 1383557 - RNA, 19 nt, Homo sapiens
  misc_RNA (1)...(19): siRNA sense strand
ggagaucauuaagauuaca

SEQ ID NO: 1383558 - RNA, 19 nt, Homo sapiens
  misc_RNA (1)...(19): siRNA sense strand
uaugucgacuucugaaaca

SEQ ID NO: 1383559 - RNA, 19 nt, Homo sapiens
  misc_RNA (1)...(19): siRNA sense strand
gaaaaccuguggauaucug

SEQ ID NO: 1383560 - RNA, 19 nt, Homo sapiens
  misc_RNA (1)...(19): siRNA sense strand
ccgcaggugugugaagaaa

SEQ ID NO: 1383561 - RNA, 19 nt, Homo sapiens
  misc_RNA (1)...(19): siRNA sense strand
ccugaggucuugaggaaag

SEQ ID NO: 1383562 - RNA, 19 nt, Homo sapiens
  misc_RNA (1)...(19): siRNA sense strand
gcagcaggcuugguuuggu

SEQ ID NO: 1383563 - RNA, 19 nt, Homo sapiens
  misc_RNA (1)...(19): siRNA sense strand
gagcagcaggcuugguuug

SEQ ID NO: 1383564 - RNA, 19 nt, Homo sapiens
  misc_RNA (1)...(19): siRNA sense strand
gggaugaggaucagcacaa

SEQ ID NO: 1383565 - RNA, 19 nt, Homo sapiens
  misc_RNA (1)...(19): siRNA sense strand
ggaugaggaucagcacaag

SEQ ID NO: 1383566 - RNA, 19 nt, Homo sapiens
  misc_RNA (1)...(19): siRNA sense strand
gauaugucgacuucugaaa

SEQ ID NO: 1383567 - RNA, 19 nt, Homo sapiens
  misc_RNA (1)...(19): siRNA sense strand
gccagccacuguauacauc

SEQ ID NO: 1383568 - RNA, 19 nt, Homo sapiens
  misc_RNA (1)...(19): siRNA sense strand
uggcaagggugcuuucucu

SEQ ID NO: 1383569 - RNA, 19 nt, Homo sapiens
  misc_RNA (1)...(19): siRNA sense strand
ggauaugucgacuucugaa

SEQ ID NO: 1383570 - RNA, 19 nt, Homo sapiens
  misc_RNA (1)...(19): siRNA sense strand
ucaggagacuguggagugu

SEQ ID NO: 1383571 - RNA, 19 nt, Homo sapiens
  misc_RNA (1)...(19): siRNA sense strand
accagaugcugaccauaaa

SEQ ID NO: 1383572 - RNA, 19 nt, Homo sapiens
  misc_RNA (1)...(19): siRNA sense strand
gauuucccaucaccagaau

SEQ ID NO: 1383573 - RNA, 19 nt, Homo sapiens
  misc_RNA (1)...(19): siRNA sense strand
uucacuaccucguguuuga

SEQ ID NO: 1383574 - RNA, 19 nt, Homo sapiens
  misc_RNA (1)...(19): siRNA sense strand
ucaaccagaugcugaccau

SEQ ID NO: 1383575 - RNA, 19 nt, Homo sapiens
  misc_RNA (1)...(19): siRNA sense strand
aaucaucaauaccaagaag

SEQ ID NO: 1383576 - RNA, 19 nt, Homo sapiens
  misc_RNA (1)...(19): siRNA sense strand
aucaagggcuccacagaga

SEQ ID NO: 1383577 - RNA, 19 nt, Homo sapiens
  misc_RNA (1)...(19): siRNA sense strand
ggaucaagggcuccacaga

SEQ ID NO: 1383578 - RNA, 19 nt, Homo sapiens
  misc_RNA (1)...(19): siRNA sense strand
gggaucaccagaaacuaga

SEQ ID NO: 1383579 - RNA, 19 nt, Homo sapiens
  misc_RNA (1)...(19): siRNA sense strand
ggccagagaguacuacagu

SEQ ID NO: 1383580 - RNA, 19 nt, Homo sapiens
  misc_RNA (1)...(19): siRNA sense strand
ccaugacaguauuucugaa

SEQ ID NO: 1383581 - RNA, 19 nt, Homo sapiens
  misc_RNA (1)...(19): siRNA sense strand
ccucguguuugaccuuguu

SEQ ID NO: 1383582 - RNA, 19 nt, Homo sapiens
  misc_RNA (1)...(19): siRNA sense strand
ucggauaugucgacuucug

SEQ ID NO: 1383583 - RNA, 19 nt, Homo sapiens
  misc_RNA (1)...(19): siRNA sense strand
cgaaaacaggagaucauua

SEQ ID NO: 1383584 - RNA, 19 nt, Homo sapiens
  misc_RNA (1)...(19): siRNA sense strand
gccaaaagccuauugaaca

SEQ ID NO: 1383585 - RNA, 19 nt, Homo sapiens
  misc_RNA (1)...(19): siRNA sense strand
ucaucaauaccaagaaguu

SEQ ID NO: 1383586 - RNA, 19 nt, Homo sapiens
  misc_RNA (1)...(19): siRNA sense strand
gaugccagccacuguauac

SEQ ID NO: 1383587 - RNA, 19 nt, Homo sapiens
  misc_RNA (1)...(19): siRNA sense strand
agaacuugaucaaccagau

SEQ ID NO: 1383588 - RNA, 19 nt, Homo sapiens
  misc_RNA (1)...(19): siRNA sense strand
agagaguacuacagugaag

SEQ ID NO: 1383589 - RNA, 19 nt, Homo sapiens
  misc_RNA (1)...(19): siRNA sense strand
cagagaguacuacagugaa

SEQ ID NO: 1383590 - RNA, 19 nt, Homo sapiens
  misc_RNA (1)...(19): siRNA sense strand
caucaauaccaagaaguug

SEQ ID NO: 1383591 - RNA, 19 nt, Homo sapiens
  misc_RNA (1)...(19): siRNA sense strand
guccgcaggugugugaaga

SEQ ID NO: 1383592 - RNA, 19 nt, Homo sapiens
  misc_RNA (1)...(19): siRNA sense strand
ggacacgguaacuccugaa

SEQ ID NO: 1383593 - RNA, 19 nt, Homo sapiens
  misc_RNA (1)...(19): siRNA sense strand
gcaggugugugaagaaaac

SEQ ID NO: 1383594 - RNA, 19 nt, Homo sapiens
  misc_RNA (1)...(19): siRNA sense strand
ugaaacauccaaacaucgu

SEQ ID NO: 1383595 - RNA, 19 nt, Homo sapiens
  misc_RNA (1)...(19): siRNA sense strand
gcugcaacaccaccacaga

SEQ ID NO: 1383596 - RNA, 19 nt, Homo sapiens
  misc_RNA (1)...(19): siRNA sense strand
aaaagccuauugaacaaga

SEQ ID NO: 1383597 - RNA, 19 nt, Homo sapiens
  misc_RNA (1)...(19): siRNA sense strand
ccagaaugggacacgguaa

SEQ ID NO: 1383598 - RNA, 19 nt, Homo sapiens
  misc_RNA (1)...(19): siRNA sense strand
ugaggaaagaucccuaugg

SEQ ID NO: 1383599 - RNA, 19 nt, Homo sapiens
  misc_RNA (1)...(19): siRNA sense strand
ggaaagaucccuauggaaa

SEQ ID NO: 1383600 - RNA, 19 nt, Homo sapiens
  misc_RNA (1)...(19): siRNA sense strand
gaggaaagaucccuaugga

SEQ ID NO: 1383601 - RNA, 19 nt, Homo sapiens
  misc_RNA (1)...(19): siRNA sense strand
caggagaucauuaagauua

SEQ ID NO: 1383602 - RNA, 19 nt, Homo sapiens
  misc_RNA (1)...(19): siRNA sense strand
gcucggauaugucgacuuc

SEQ ID NO: 1383603 - RNA, 19 nt, Homo sapiens
  misc_RNA (1)...(19): siRNA sense strand
gaaaacaggagaucauuaa

SEQ ID NO: 1383604 - RNA, 19 nt, Homo sapiens
  misc_RNA (1)...(19): siRNA sense strand
ggagcuguuugaagacauu

SEQ ID NO: 1383605 - RNA, 19 nt, Homo sapiens
  misc_RNA (1)...(19): siRNA sense strand
guacuacagugaagcagau

SEQ ID NO: 1383606 - RNA, 19 nt, Homo sapiens
  misc_RNA (1)...(19): siRNA sense strand
gaacgugaggcucggauau

SEQ ID NO: 1383607 - RNA, 19 nt, Homo sapiens
  misc_RNA (1)...(19): siRNA sense strand
uuacagaacagcugauuga

SEQ ID NO: 1383608 - RNA, 19 nt, Homo sapiens
  misc_RNA (1)...(19): siRNA sense strand
guacacaacgcuacagaug

SEQ ID NO: 1383609 - RNA, 19 nt, Homo sapiens
  misc_RNA (1)...(19): siRNA sense strand
gcagaugccagccacugua

SEQ ID NO: 1383610 - RNA, 19 nt, Homo sapiens
  misc_RNA (1)...(19): siRNA sense strand
ccgucaagcuggcugauuu

SEQ ID NO: 1383611 - RNA, 19 nt, Homo sapiens
  misc_RNA (1)...(19): siRNA sense strand
gauggcaaguggcucaaug

SEQ ID NO: 1383612 - RNA, 19 nt, Homo sapiens
  misc_RNA (1)...(19): siRNA sense strand
gagagcagcaggcuugguu

SEQ ID NO: 1383613 - RNA, 19 nt, Homo sapiens
  misc_RNA (1)...(19): siRNA sense strand
aacaggagaucauuaagau

SEQ ID NO: 1383614 - RNA, 19 nt, Homo sapiens
  misc_RNA (1)...(19): siRNA sense strand
aaacaggagaucauuaaga

SEQ ID NO: 1383615 - RNA, 19 nt, Homo sapiens
  misc_RNA (1)...(19): siRNA sense strand
gcaagggugcuuucucugu

SEQ ID NO: 1383616 - RNA, 19 nt, Homo sapiens
  misc_RNA (1)...(19): siRNA sense strand
ccagagaguacuacaguga

SEQ ID NO: 1383617 - RNA, 19 nt, Homo sapiens
  misc_RNA (1)...(19): siRNA sense strand
gaacuugaucaaccagaug

SEQ ID NO: 1383618 - RNA, 19 nt, Homo sapiens
  misc_RNA (1)...(19): siRNA sense strand
gaacagcaagccuauccau

SEQ ID NO: 1383619 - RNA, 19 nt, Homo sapiens
  misc_RNA (1)...(19): siRNA sense strand
ggagaguguuaaccacauc

SEQ ID NO: 1383620 - RNA, 19 nt, Homo sapiens
  misc_RNA (1)...(19): siRNA sense strand
agaaucuccuguccaagaa

SEQ ID NO: 1383621 - RNA, 19 nt, Homo sapiens
  misc_RNA (1)...(19): siRNA sense strand
gaaagaucccuauggaaaa

SEQ ID NO: 1383622 - RNA, 19 nt, Homo sapiens
  misc_RNA (1)...(19): siRNA sense strand
cagcaggcuugguuugguu

SEQ ID NO: 1383623 - RNA, 19 nt, Homo sapiens
  misc_RNA (1)...(19): siRNA sense strand
ccaaaagccuauugaacaa

SEQ ID NO: 1383624 - RNA, 19 nt, Homo sapiens
  misc_RNA (1)...(19): siRNA sense strand
ucugaaacauccaaacauc

SEQ ID NO: 1383625 - RNA, 19 nt, Homo sapiens
  misc_RNA (1)...(19): siRNA sense strand
caacaccaccacagaagau

SEQ ID NO: 1383626 - RNA, 19 nt, Homo sapiens
  misc_RNA (1)...(19): siRNA sense strand
gcaacaccaccacagaaga

SEQ ID NO: 1383627 - RNA, 19 nt, Homo sapiens
  misc_RNA (1)...(19): siRNA sense strand
gaccauaaacccagcaaag

SEQ ID NO: 1383628 - RNA, 19 nt, Homo sapiens
  misc_RNA (1)...(19): siRNA sense strand
gcggggagcuguuugaaga

SEQ ID NO: 1383629 - RNA, 19 nt, Homo sapiens
  misc_RNA (1)...(19): siRNA sense strand
gcgccuccaugacaguauu

SEQ ID NO: 1383630 - RNA, 19 nt, Homo sapiens
  misc_RNA (1)...(19): siRNA sense strand
gcaccagccagucagaaga

SEQ ID NO: 1383631 - RNA, 19 nt, Homo sapiens
  misc_RNA (1)...(19): siRNA sense strand
aaccagaugcugaccauaa

SEQ ID NO: 1383632 - RNA, 19 nt, Homo sapiens
  misc_RNA (1)...(19): siRNA sense strand
aggagacuguggaguguuu

SEQ ID NO: 1383633 - RNA, 19 nt, Homo sapiens
  misc_RNA (1)...(19): siRNA sense strand
ggagaucauuaagauuaca

SEQ ID NO: 1383634 - RNA, 19 nt, Homo sapiens
  misc_RNA (1)...(19): siRNA sense strand
uaugucgacuucugaaaca

SEQ ID NO: 1383635 - RNA, 19 nt, Homo sapiens
  misc_RNA (1)...(19): siRNA sense strand
ccaagaacagcaagccuau

SEQ ID NO: 1383636 - RNA, 19 nt, Homo sapiens
  misc_RNA (1)...(19): siRNA sense strand
gaaaaccuguggauaucug

SEQ ID NO: 1383637 - RNA, 19 nt, Homo sapiens
  misc_RNA (1)...(19): siRNA sense strand
ccugaggucuugaggaaag

SEQ ID NO: 1383638 - RNA, 19 nt, Homo sapiens
  misc_RNA (1)...(19): siRNA sense strand
gcagcaggcuugguuuggu

SEQ ID NO: 1383639 - RNA, 19 nt, Homo sapiens
  misc_RNA (1)...(19): siRNA sense strand
gagcagcaggcuugguuug

SEQ ID NO: 1383640 - RNA, 19 nt, Homo sapiens
  misc_RNA (1)...(19): siRNA sense strand
ccgcaggugugugaagaaa

SEQ ID NO: 1383641 - RNA, 19 nt, Homo sapiens
  misc_RNA (1)...(19): siRNA sense strand
gggaugaggaucagcacaa

SEQ ID NO: 1383642 - RNA, 19 nt, Homo sapiens
  misc_RNA (1)...(19): siRNA sense strand
ggaugaggaucagcacaag

SEQ ID NO: 1383643 - RNA, 19 nt, Homo sapiens
  misc_RNA (1)...(19): siRNA sense strand
gauaugucgacuucugaaa

SEQ ID NO: 1383644 - RNA, 19 nt, Homo sapiens
  misc_RNA (1)...(19): siRNA sense strand
gccagccacuguauacauc

SEQ ID NO: 1383645 - RNA, 19 nt, Homo sapiens
  misc_RNA (1)...(19): siRNA sense strand
uggcaagggugcuuucucu

SEQ ID NO: 1383646 - RNA, 19 nt, Homo sapiens
  misc_RNA (1)...(19): siRNA sense strand
gauuucccaucaccagaau

SEQ ID NO: 1383647 - RNA, 19 nt, Homo sapiens
  misc_RNA (1)...(19): siRNA sense strand
ucaggagacuguggagugu

SEQ ID NO: 1383648 - RNA, 19 nt, Homo sapiens
  misc_RNA (1)...(19): siRNA sense strand
accagaugcugaccauaaa

SEQ ID NO: 1383649 - RNA, 19 nt, Homo sapiens
  misc_RNA (1)...(19): siRNA sense strand
ggauaugucgacuucugaa

SEQ ID NO: 1383650 - RNA, 19 nt, Homo sapiens
  misc_RNA (1)...(19): siRNA sense strand
uucacuaccucguguuuga

SEQ ID NO: 1383651 - RNA, 19 nt, Homo sapiens
  misc_RNA (1)...(19): siRNA sense strand
ucaaccagaugcugaccau

SEQ ID NO: 1383652 - RNA, 19 nt, Homo sapiens
  misc_RNA (1)...(19): siRNA sense strand
ggccagagaguacuacagu

SEQ ID NO: 1383653 - RNA, 19 nt, Homo sapiens
  misc_RNA (1)...(19): siRNA sense strand
ggcucaauguccacuauca

SEQ ID NO: 1383654 - RNA, 19 nt, Homo sapiens
  misc_RNA (1)...(19): siRNA sense strand
gauuacagaacagcugauu

SEQ ID NO: 1383655 - RNA, 19 nt, Homo sapiens
  misc_RNA (1)...(19): siRNA sense strand
aucaagggcuccacagaga

SEQ ID NO: 1383656 - RNA, 19 nt, Homo sapiens
  misc_RNA (1)...(19): siRNA sense strand
ggaucaagggcuccacaga

SEQ ID NO: 1383657 - RNA, 19 nt, Homo sapiens
  misc_RNA (1)...(19): siRNA sense strand
aaucaucaauaccaagaag

SEQ ID NO: 1383658 - RNA, 19 nt, Homo sapiens
  misc_RNA (1)...(19): siRNA sense strand
gggaucaccagaaacuaga

SEQ ID NO: 1383659 - RNA, 19 nt, Homo sapiens
  misc_RNA (1)...(19): siRNA sense strand
cagcgugcaucgccuacau

SEQ ID NO: 1383660 - RNA, 19 nt, Homo sapiens
  misc_RNA (1)...(19): siRNA sense strand
ccaugacaguauuucugaa

SEQ ID NO: 1383661 - RNA, 19 nt, Homo sapiens
  misc_RNA (1)...(19): siRNA sense strand
ccucguguuugaccuuguu

SEQ ID NO: 1383662 - RNA, 19 nt, Homo sapiens
  misc_RNA (1)...(19): siRNA sense strand
ucggauaugucgacuucug

SEQ ID NO: 1383663 - RNA, 19 nt, Homo sapiens
  misc_RNA (1)...(19): siRNA sense strand
cgaaaacaggagaucauua

SEQ ID NO: 1383664 - RNA, 19 nt, Homo sapiens
  misc_RNA (1)...(19): siRNA sense strand
ucaucaauaccaagaaguu

SEQ ID NO: 1383665 - RNA, 19 nt, Homo sapiens
  misc_RNA (1)...(19): siRNA sense strand
gccaaaagccuauugaaca

SEQ ID NO: 1383666 - RNA, 19 nt, Homo sapiens
  misc_RNA (1)...(19): siRNA sense strand
gaugccagccacuguauac

SEQ ID NO: 1383667 - RNA, 19 nt, Homo sapiens
  misc_RNA (1)...(19): siRNA sense strand
agaacuugaucaaccagau

SEQ ID NO: 1383668 - RNA, 19 nt, Homo sapiens
  misc_RNA (1)...(19): siRNA sense strand
acagcaagccuauccauac

SEQ ID NO: 1383669 - RNA, 19 nt, Homo sapiens
  misc_RNA (1)...(19): siRNA sense strand
caucaacaauggggacuuu

SEQ ID NO: 1383670 - RNA, 19 nt, Homo sapiens
  misc_RNA (1)...(19): siRNA sense strand
agagaguacuacagugaag

SEQ ID NO: 1383671 - RNA, 19 nt, Homo sapiens
  misc_RNA (1)...(19): siRNA sense strand
cagagaguacuacagugaa

SEQ ID NO: 1383672 - RNA, 19 nt, Homo sapiens
  misc_RNA (1)...(19): siRNA sense strand
caucaauaccaagaaguug

SEQ ID NO: 1383673 - RNA, 19 nt, Homo sapiens
  misc_RNA (1)...(19): siRNA sense strand
guccgcaggugugugaaga

SEQ ID NO: 1383674 - RNA, 19 nt, Homo sapiens
  misc_RNA (1)...(19): siRNA sense strand
gcaggugugugaagaaaac

SEQ ID NO: 1383675 - RNA, 19 nt, Homo sapiens
  misc_RNA (1)...(19): siRNA sense strand
uuugaggccuacacgaaga

SEQ ID NO: 1383676 - RNA, 19 nt, Homo sapiens
  misc_RNA (1)...(19): siRNA sense strand
ggacacgguaacuccugaa

SEQ ID NO: 1383677 - RNA, 19 nt, Homo sapiens
  misc_RNA (1)...(19): siRNA sense strand
ccagaaugggacacgguaa

SEQ ID NO: 1383678 - RNA, 19 nt, Homo sapiens
  misc_RNA (1)...(19): siRNA sense strand
acauccgccucacccagua

SEQ ID NO: 1383679 - RNA, 19 nt, Homo sapiens
  misc_RNA (1)...(19): siRNA sense strand
ugaaacauccaaacaucgu

SEQ ID NO: 1383680 - RNA, 19 nt, Homo sapiens
  misc_RNA (1)...(19): siRNA sense strand
gcugcaacaccaccacaga

SEQ ID NO: 1383681 - RNA, 19 nt, Homo sapiens
  misc_RNA (1)...(19): siRNA sense strand
aaaagccuauugaacaaga

SEQ ID NO: 1383682 - RNA, 19 nt, Homo sapiens
  misc_RNA (1)...(19): siRNA sense strand
ugaggaaagaucccuaugg

SEQ ID NO: 1383683 - RNA, 19 nt, Homo sapiens
  misc_RNA (1)...(19): siRNA sense strand
ccuacacgaagauuuguga

SEQ ID NO: 1383684 - RNA, 19 nt, Homo sapiens
  misc_RNA (1)...(19): siRNA sense strand
ggaaagaucccuauggaaa

SEQ ID NO: 1383685 - RNA, 19 nt, Homo sapiens
  misc_RNA (1)...(19): siRNA sense strand
gaggaaagaucccuaugga

SEQ ID NO: 1383686 - RNA, 19 nt, Homo sapiens
  misc_RNA (1)...(19): siRNA sense strand
caggagaucauuaagauua

SEQ ID NO: 1383687 - RNA, 19 nt, Homo sapiens
  misc_RNA (1)...(19): siRNA sense strand
gcucggauaugucgacuuc

SEQ ID NO: 1383688 - RNA, 19 nt, Homo sapiens
  misc_RNA (1)...(19): siRNA sense strand
gaaaacaggagaucauuaa

SEQ ID NO: 1383689 - RNA, 19 nt, Homo sapiens
  misc_RNA (1)...(19): siRNA sense strand
ggagcuguuugaagacauu

SEQ ID NO: 1383690 - RNA, 19 nt, Homo sapiens
  misc_RNA (1)...(19): siRNA sense strand
guacuacagugaagcagau

SEQ ID NO: 1383691 - RNA, 19 nt, Homo sapiens
  misc_RNA (1)...(19): siRNA sense strand
gaacgugaggcucggauau

SEQ ID NO: 1383692 - RNA, 19 nt, Homo sapiens
  misc_RNA (1)...(19): siRNA sense strand
uuacagaacagcugauuga

SEQ ID NO: 1383693 - RNA, 19 nt, Homo sapiens
  misc_RNA (1)...(19): siRNA sense strand
guacacaacgcuacagaug

SEQ ID NO: 1383694 - RNA, 19 nt, Homo sapiens
  misc_RNA (1)...(19): siRNA sense strand
gcagaugccagccacugua

SEQ ID NO: 1383695 - RNA, 19 nt, Homo sapiens
  misc_RNA (1)...(19): siRNA sense strand
ccgucaagcuggcugauuu

SEQ ID NO: 1383696 - RNA, 19 nt, Homo sapiens
  misc_RNA (1)...(19): siRNA sense strand
gauggcaaguggcucaaug

SEQ ID NO: 1383697 - RNA, 19 nt, Homo sapiens
  misc_RNA (1)...(19): siRNA sense strand
gagagcagcaggcuugguu

SEQ ID NO: 1383698 - RNA, 19 nt, Homo sapiens
  misc_RNA (1)...(19): siRNA sense strand
aacaggagaucauuaagau

SEQ ID NO: 1383699 - RNA, 19 nt, Homo sapiens
  misc_RNA (1)...(19): siRNA sense strand
aaacaggagaucauuaaga

SEQ ID NO: 1383700 - RNA, 19 nt, Homo sapiens
  misc_RNA (1)...(19): siRNA sense strand
gcaagggugcuuucucugu

SEQ ID NO: 1383701 - RNA, 19 nt, Homo sapiens
  misc_RNA (1)...(19): siRNA sense strand
ccagagaguacuacaguga

SEQ ID NO: 1383702 - RNA, 19 nt, Homo sapiens
  misc_RNA (1)...(19): siRNA sense strand
gaacuugaucaaccagaug

SEQ ID NO: 1383703 - RNA, 19 nt, Homo sapiens
  misc_RNA (1)...(19): siRNA sense strand
gaacagcaagccuauccau

SEQ ID NO: 1383704 - RNA, 19 nt, Homo sapiens
  misc_RNA (1)...(19): siRNA sense strand
ggagaguguuaaccacauc

SEQ ID NO: 1383705 - RNA, 19 nt, Homo sapiens
  misc_RNA (1)...(19): siRNA sense strand
agaaucuccuguccaagaa

SEQ ID NO: 1383706 - RNA, 19 nt, Homo sapiens
  misc_RNA (1)...(19): siRNA sense strand
gaaagaucccuauggaaaa

SEQ ID NO: 1383707 - RNA, 19 nt, Homo sapiens
  misc_RNA (1)...(19): siRNA sense strand
cagcaggcuugguuugguu

SEQ ID NO: 1383708 - RNA, 19 nt, Homo sapiens
  misc_RNA (1)...(19): siRNA sense strand
ccaaaagccuauugaacaa

SEQ ID NO: 1383709 - RNA, 19 nt, Homo sapiens
  misc_RNA (1)...(19): siRNA sense strand
ucugaaacauccaaacauc

SEQ ID NO: 1383710 - RNA, 19 nt, Homo sapiens
  misc_RNA (1)...(19): siRNA sense strand
caacaccaccacagaagau

SEQ ID NO: 1383711 - RNA, 19 nt, Homo sapiens
  misc_RNA (1)...(19): siRNA sense strand
gcaacaccaccacagaaga

SEQ ID NO: 1383712 - RNA, 19 nt, Homo sapiens
  misc_RNA (1)...(19): siRNA sense strand
gaccauaaacccagcaaag

SEQ ID NO: 1383713 - RNA, 19 nt, Homo sapiens
  misc_RNA (1)...(19): siRNA sense strand
gcggggagcuguuugaaga

SEQ ID NO: 1383714 - RNA, 19 nt, Homo sapiens
  misc_RNA (1)...(19): siRNA sense strand
gcgccuccaugacaguauu

SEQ ID NO: 1383715 - RNA, 19 nt, Homo sapiens
  misc_RNA (1)...(19): siRNA sense strand
gcaccagccagucagaaga

SEQ ID NO: 1383716 - RNA, 19 nt, Homo sapiens
  misc_RNA (1)...(19): siRNA sense strand
aaccagaugcugaccauaa

SEQ ID NO: 1383717 - RNA, 19 nt, Homo sapiens
  misc_RNA (1)...(19): siRNA sense strand
aggagacuguggaguguuu

SEQ ID NO: 1383718 - RNA, 19 nt, Homo sapiens
  misc_RNA (1)...(19): siRNA sense strand
ggagaucauuaagauuaca

SEQ ID NO: 1383719 - RNA, 19 nt, Homo sapiens
  misc_RNA (1)...(19): siRNA sense strand
uaugucgacuucugaaaca

SEQ ID NO: 1383720 - RNA, 19 nt, Homo sapiens
  misc_RNA (1)...(19): siRNA sense strand
ccaagaacagcaagccuau

SEQ ID NO: 1383721 - RNA, 19 nt, Homo sapiens
  misc_RNA (1)...(19): siRNA sense strand
gaaaaccuguggauaucug

SEQ ID NO: 1383722 - RNA, 19 nt, Homo sapiens
  misc_RNA (1)...(19): siRNA sense strand
ccugaggucuugaggaaag

SEQ ID NO: 1383723 - RNA, 19 nt, Homo sapiens
  misc_RNA (1)...(19): siRNA sense strand
gcagcaggcuugguuuggu

SEQ ID NO: 1383724 - RNA, 19 nt, Homo sapiens
  misc_RNA (1)...(19): siRNA sense strand
gagcagcaggcuugguuug

SEQ ID NO: 1383725 - RNA, 19 nt, Homo sapiens
  misc_RNA (1)...(19): siRNA sense strand
ccgcaggugugugaagaaa

SEQ ID NO: 1383726 - RNA, 19 nt, Homo sapiens
  misc_RNA (1)...(19): siRNA sense strand
gggaugaggaucagcacaa

SEQ ID NO: 1383727 - RNA, 19 nt, Homo sapiens
  misc_RNA (1)...(19): siRNA sense strand
ggaugaggaucagcacaag

SEQ ID NO: 1383728 - RNA, 19 nt, Homo sapiens
  misc_RNA (1)...(19): siRNA sense strand
gauaugucgacuucugaaa

SEQ ID NO: 1383729 - RNA, 19 nt, Homo sapiens
  misc_RNA (1)...(19): siRNA sense strand
gccagccacuguauacauc

SEQ ID NO: 1383730 - RNA, 19 nt, Homo sapiens
  misc_RNA (1)...(19): siRNA sense strand
uggcaagggugcuuucucu

SEQ ID NO: 1383731 - RNA, 19 nt, Homo sapiens
  misc_RNA (1)...(19): siRNA sense strand
gauuucccaucaccagaau

SEQ ID NO: 1383732 - RNA, 19 nt, Homo sapiens
  misc_RNA (1)...(19): siRNA sense strand
ucaggagacuguggagugu

SEQ ID NO: 1383733 - RNA, 19 nt, Homo sapiens
  misc_RNA (1)...(19): siRNA sense strand
accagaugcugaccauaaa

SEQ ID NO: 1383734 - RNA, 19 nt, Homo sapiens
  misc_RNA (1)...(19): siRNA sense strand
ggauaugucgacuucugaa

SEQ ID NO: 1383735 - RNA, 19 nt, Homo sapiens
  misc_RNA (1)...(19): siRNA sense strand
uucacuaccucguguuuga

SEQ ID NO: 1383736 - RNA, 19 nt, Homo sapiens
  misc_RNA (1)...(19): siRNA sense strand
ucaaccagaugcugaccau

SEQ ID NO: 1383737 - RNA, 19 nt, Homo sapiens
  misc_RNA (1)...(19): siRNA sense strand
ggccagagaguacuacagu

SEQ ID NO: 1383738 - RNA, 19 nt, Homo sapiens
  misc_RNA (1)...(19): siRNA sense strand
ggcucaauguccacuauca

SEQ ID NO: 1383739 - RNA, 19 nt, Homo sapiens
  misc_RNA (1)...(19): siRNA sense strand
gauuacagaacagcugauu

SEQ ID NO: 1383740 - RNA, 19 nt, Homo sapiens
  misc_RNA (1)...(19): siRNA sense strand
aucaagggcuccacagaga

SEQ ID NO: 1383741 - RNA, 19 nt, Homo sapiens
  misc_RNA (1)...(19): siRNA sense strand
ggaucaagggcuccacaga

SEQ ID NO: 1383742 - RNA, 19 nt, Homo sapiens
  misc_RNA (1)...(19): siRNA sense strand
aaucaucaauaccaagaag

SEQ ID NO: 1383743 - RNA, 19 nt, Homo sapiens
  misc_RNA (1)...(19): siRNA sense strand
gggaucaccagaaacuaga

SEQ ID NO: 1383744 - RNA, 19 nt, Homo sapiens
  misc_RNA (1)...(19): siRNA sense strand
cagcgugcaucgccuacau

SEQ ID NO: 1383745 - RNA, 19 nt, Homo sapiens
  misc_RNA (1)...(19): siRNA sense strand
ccaugacaguauuucugaa

SEQ ID NO: 1383746 - RNA, 19 nt, Homo sapiens
  misc_RNA (1)...(19): siRNA sense strand
ccucguguuugaccuuguu

SEQ ID NO: 1383747 - RNA, 19 nt, Homo sapiens
  misc_RNA (1)...(19): siRNA sense strand
ucggauaugucgacuucug

SEQ ID NO: 1383748 - RNA, 19 nt, Homo sapiens
  misc_RNA (1)...(19): siRNA sense strand
cgaaaacaggagaucauua

SEQ ID NO: 1383749 - RNA, 19 nt, Homo sapiens
  misc_RNA (1)...(19): siRNA sense strand
ucaucaauaccaagaaguu

SEQ ID NO: 1383750 - RNA, 19 nt, Homo sapiens
  misc_RNA (1)...(19): siRNA sense strand
gccaaaagccuauugaaca

SEQ ID NO: 1383751 - RNA, 19 nt, Homo sapiens
  misc_RNA (1)...(19): siRNA sense strand
gaugccagccacuguauac

SEQ ID NO: 1383752 - RNA, 19 nt, Homo sapiens
  misc_RNA (1)...(19): siRNA sense strand
agaacuugaucaaccagau

SEQ ID NO: 1383753 - RNA, 19 nt, Homo sapiens
  misc_RNA (1)...(19): siRNA sense strand
acagcaagccuauccauac

SEQ ID NO: 1383754 - RNA, 19 nt, Homo sapiens
  misc_RNA (1)...(19): siRNA sense strand
caucaacaauggggacuuu

SEQ ID NO: 1383755 - RNA, 19 nt, Homo sapiens
  misc_RNA (1)...(19): siRNA sense strand
agagaguacuacagugaag

SEQ ID NO: 1383756 - RNA, 19 nt, Homo sapiens
  misc_RNA (1)...(19): siRNA sense strand
cagagaguacuacagugaa

SEQ ID NO: 1383757 - RNA, 19 nt, Homo sapiens
  misc_RNA (1)...(19): siRNA sense strand
caucaauaccaagaaguug

SEQ ID NO: 1383758 - RNA, 19 nt, Homo sapiens
  misc_RNA (1)...(19): siRNA sense strand
guccgcaggugugugaaga

SEQ ID NO: 1383759 - RNA, 19 nt, Homo sapiens
  misc_RNA (1)...(19): siRNA sense strand
gcaggugugugaagaaaac

SEQ ID NO: 1383760 - RNA, 19 nt, Homo sapiens
  misc_RNA (1)...(19): siRNA sense strand
uuugaggccuacacgaaga

SEQ ID NO: 1383761 - RNA, 19 nt, Homo sapiens
  misc_RNA (1)...(19): siRNA sense strand
ggacacgguaacuccugaa

SEQ ID NO: 1383762 - RNA, 19 nt, Homo sapiens
  misc_RNA (1)...(19): siRNA sense strand
ccagaaugggacacgguaa

SEQ ID NO: 1383763 - RNA, 19 nt, Homo sapiens
  misc_RNA (1)...(19): siRNA sense strand
acauccgccucacccagua

SEQ ID NO: 1383764 - RNA, 19 nt, Homo sapiens
  misc_RNA (1)...(19): siRNA sense strand
ugaaacauccaaacaucgu

SEQ ID NO: 1383765 - RNA, 19 nt, Homo sapiens
  misc_RNA (1)...(19): siRNA sense strand
gcugcaacaccaccacaga

SEQ ID NO: 1383766 - RNA, 19 nt, Homo sapiens
  misc_RNA (1)...(19): siRNA sense strand
aaaagccuauugaacaaga

SEQ ID NO: 1383767 - RNA, 19 nt, Homo sapiens
  misc_RNA (1)...(19): siRNA sense strand
ugaggaaagaucccuaugg

SEQ ID NO: 1383768 - RNA, 19 nt, Homo sapiens
  misc_RNA (1)...(19): siRNA sense strand
ccuacacgaagauuuguga

SEQ ID NO: 1383769 - RNA, 19 nt, Homo sapiens
  misc_RNA (1)...(19): siRNA sense strand
ggaaagaucccuauggaaa

SEQ ID NO: 1383770 - RNA, 19 nt, Homo sapiens
  misc_RNA (1)...(19): siRNA sense strand
gaggaaagaucccuaugga

SEQ ID NO: 1383771 - RNA, 19 nt, Homo sapiens
  misc_RNA (1)...(19): siRNA sense strand
caggagaucauuaagauua

SEQ ID NO: 1383772 - RNA, 19 nt, Homo sapiens
  misc_RNA (1)...(19): siRNA sense strand
gcucggauaugucgacuuc

SEQ ID NO: 1383773 - RNA, 19 nt, Homo sapiens
  misc_RNA (1)...(19): siRNA sense strand
gaaaacaggagaucauuaa

SEQ ID NO: 1383774 - RNA, 19 nt, Homo sapiens
  misc_RNA (1)...(19): siRNA sense strand
ggagcuguuugaagacauu

SEQ ID NO: 1383775 - RNA, 19 nt, Homo sapiens
  misc_RNA (1)...(19): siRNA sense strand
guacuacagugaagcagau

SEQ ID NO: 1383776 - RNA, 19 nt, Homo sapiens
  misc_RNA (1)...(19): siRNA sense strand
gaacgugaggcucggauau

SEQ ID NO: 1383777 - RNA, 19 nt, Homo sapiens
  misc_RNA (1)...(19): siRNA sense strand
uuacagaacagcugauuga

SEQ ID NO: 1383778 - RNA, 19 nt, Homo sapiens
  misc_RNA (1)...(19): siRNA sense strand
guacacaacgcuacagaug

SEQ ID NO: 1383779 - RNA, 19 nt, Homo sapiens
  misc_RNA (1)...(19): siRNA sense strand
gcagaugccagccacugua

SEQ ID NO: 1383780 - RNA, 19 nt, Homo sapiens
  misc_RNA (1)...(19): siRNA sense strand
ccgucaagcuggcugauuu

SEQ ID NO: 1383781 - RNA, 19 nt, Homo sapiens
  misc_RNA (1)...(19): siRNA sense strand
gauggcaaguggcucaaug

SEQ ID NO: 1383782 - RNA, 19 nt, Homo sapiens
  misc_RNA (1)...(19): siRNA sense strand
gagagcagcaggcuugguu

SEQ ID NO: 1383783 - RNA, 19 nt, Homo sapiens
  misc_RNA (1)...(19): siRNA sense strand
aacaggagaucauuaagau

SEQ ID NO: 1383784 - RNA, 19 nt, Homo sapiens
  misc_RNA (1)...(19): siRNA sense strand
aaacaggagaucauuaaga

SEQ ID NO: 1383785 - RNA, 19 nt, Homo sapiens
  misc_RNA (1)...(19): siRNA sense strand
gcaagggugcuuucucugu

SEQ ID NO: 1383786 - RNA, 19 nt, Homo sapiens
  misc_RNA (1)...(19): siRNA sense strand
ccagagaguacuacaguga

SEQ ID NO: 1383787 - RNA, 19 nt, Homo sapiens
  misc_RNA (1)...(19): siRNA sense strand
gaacuugaucaaccagaug

SEQ ID NO: 1383788 - RNA, 19 nt, Homo sapiens
  misc_RNA (1)...(19): siRNA sense strand
gaacagcaagccuauccau

SEQ ID NO: 1383789 - RNA, 19 nt, Homo sapiens
  misc_RNA (1)...(19): siRNA sense strand
ggagaguguuaaccacauc

SEQ ID NO: 1383790 - RNA, 19 nt, Homo sapiens
  misc_RNA (1)...(19): siRNA sense strand
agaaucuccuguccaagaa

SEQ ID NO: 1383791 - RNA, 19 nt, Homo sapiens
  misc_RNA (1)...(19): siRNA sense strand
gaaagaucccuauggaaaa

SEQ ID NO: 1383792 - RNA, 19 nt, Homo sapiens
  misc_RNA (1)...(19): siRNA sense strand
cagcaggcuugguuugguu

SEQ ID NO: 1383793 - RNA, 19 nt, Homo sapiens
  misc_RNA (1)...(19): siRNA sense strand
ccaaaagccuauugaacaa

SEQ ID NO: 1383794 - RNA, 19 nt, Homo sapiens
  misc_RNA (1)...(19): siRNA sense strand
ucugaaacauccaaacauc

SEQ ID NO: 1383795 - RNA, 19 nt, Homo sapiens
  misc_RNA (1)...(19): siRNA sense strand
caacaccaccacagaagau

SEQ ID NO: 1383796 - RNA, 19 nt, Homo sapiens
  misc_RNA (1)...(19): siRNA sense strand
gcaacaccaccacagaaga

SEQ ID NO: 1383797 - RNA, 19 nt, Homo sapiens
  misc_RNA (1)...(19): siRNA sense strand
gaccauaaacccagcaaag

SEQ ID NO: 1383798 - RNA, 19 nt, Homo sapiens
  misc_RNA (1)...(19): siRNA sense strand
gcggggagcuguuugaaga

SEQ ID NO: 1383799 - RNA, 19 nt, Homo sapiens
  misc_RNA (1)...(19): siRNA sense strand
gcgccuccaugacaguauu

SEQ ID NO: 1383800 - RNA, 19 nt, Homo sapiens
  misc_RNA (1)...(19): siRNA sense strand
gcaccagccagucagaaga

SEQ ID NO: 1383801 - RNA, 19 nt, Homo sapiens
  misc_RNA (1)...(19): siRNA sense strand
aaccagaugcugaccauaa

SEQ ID NO: 1383802 - RNA, 19 nt, Homo sapiens
  misc_RNA (1)...(19): siRNA sense strand
aggagacuguggaguguuu

SEQ ID NO: 1383803 - RNA, 19 nt, Homo sapiens
  misc_RNA (1)...(19): siRNA sense strand
ggagaucauuaagauuaca

SEQ ID NO: 1383804 - RNA, 19 nt, Homo sapiens
  misc_RNA (1)...(19): siRNA sense strand
uaugucgacuucugaaaca

SEQ ID NO: 1383805 - RNA, 19 nt, Homo sapiens
  misc_RNA (1)...(19): siRNA sense strand
ccaagaacagcaagccuau

SEQ ID NO: 1383806 - RNA, 19 nt, Homo sapiens
  misc_RNA (1)...(19): siRNA sense strand
gaaaaccuguggauaucug

SEQ ID NO: 1383807 - RNA, 19 nt, Homo sapiens
  misc_RNA (1)...(19): siRNA sense strand
ccugaggucuugaggaaag

SEQ ID NO: 1383808 - RNA, 19 nt, Homo sapiens
  misc_RNA (1)...(19): siRNA sense strand
gcagcaggcuugguuuggu

SEQ ID NO: 1383809 - RNA, 19 nt, Homo sapiens
  misc_RNA (1)...(19): siRNA sense strand
gagcagcaggcuugguuug

SEQ ID NO: 1383810 - RNA, 19 nt, Homo sapiens
  misc_RNA (1)...(19): siRNA sense strand
ccgcaggugugugaagaaa

SEQ ID NO: 1383811 - RNA, 19 nt, Homo sapiens
  misc_RNA (1)...(19): siRNA sense strand
gggaugaggaucagcacaa

SEQ ID NO: 1383812 - RNA, 19 nt, Homo sapiens
  misc_RNA (1)...(19): siRNA sense strand
ggaugaggaucagcacaag

SEQ ID NO: 1383813 - RNA, 19 nt, Homo sapiens
  misc_RNA (1)...(19): siRNA sense strand
gauaugucgacuucugaaa

SEQ ID NO: 1383814 - RNA, 19 nt, Homo sapiens
  misc_RNA (1)...(19): siRNA sense strand
gccagccacuguauacauc

SEQ ID NO: 1383815 - RNA, 19 nt, Homo sapiens
  misc_RNA (1)...(19): siRNA sense strand
uggcaagggugcuuucucu

SEQ ID NO: 1383816 - RNA, 19 nt, Homo sapiens
  misc_RNA (1)...(19): siRNA sense strand
gauuucccaucaccagaau

SEQ ID NO: 1383817 - RNA, 19 nt, Homo sapiens
  misc_RNA (1)...(19): siRNA sense strand
ucaggagacuguggagugu

SEQ ID NO: 1383818 - RNA, 19 nt, Homo sapiens
  misc_RNA (1)...(19): siRNA sense strand
accagaugcugaccauaaa

SEQ ID NO: 1383819 - RNA, 19 nt, Homo sapiens
  misc_RNA (1)...(19): siRNA sense strand
ggauaugucgacuucugaa

SEQ ID NO: 1383820 - RNA, 19 nt, Homo sapiens
  misc_RNA (1)...(19): siRNA sense strand
uucacuaccucguguuuga

SEQ ID NO: 1383821 - RNA, 19 nt, Homo sapiens
  misc_RNA (1)...(19): siRNA sense strand
ucaaccagaugcugaccau

SEQ ID NO: 1383822 - RNA, 19 nt, Homo sapiens
  misc_RNA (1)...(19): siRNA sense strand
ggccagagaguacuacagu

SEQ ID NO: 1383823 - RNA, 19 nt, Homo sapiens
  misc_RNA (1)...(19): siRNA sense strand
ggcucaauguccacuauca

SEQ ID NO: 1383824 - RNA, 19 nt, Homo sapiens
  misc_RNA (1)...(19): siRNA sense strand
gauuacagaacagcugauu

SEQ ID NO: 1383825 - RNA, 19 nt, Homo sapiens
  misc_RNA (1)...(19): siRNA sense strand
aucaagggcuccacagaga

SEQ ID NO: 1383826 - RNA, 19 nt, Homo sapiens
  misc_RNA (1)...(19): siRNA sense strand
ggaucaagggcuccacaga

SEQ ID NO: 1383827 - RNA, 19 nt, Homo sapiens
  misc_RNA (1)...(19): siRNA sense strand
aaucaucaauaccaagaag

SEQ ID NO: 1383828 - RNA, 19 nt, Homo sapiens
  misc_RNA (1)...(19): siRNA sense strand
gggaucaccagaaacuaga

SEQ ID NO: 1383829 - RNA, 19 nt, Homo sapiens
  misc_RNA (1)...(19): siRNA sense strand
cagcgugcaucgccuacau

SEQ ID NO: 1383830 - RNA, 19 nt, Homo sapiens
  misc_RNA (1)...(19): siRNA sense strand
ccaugacaguauuucugaa

SEQ ID NO: 1383831 - RNA, 19 nt, Homo sapiens
  misc_RNA (1)...(19): siRNA sense strand
ccucguguuugaccuuguu

SEQ ID NO: 1383832 - RNA, 19 nt, Homo sapiens
  misc_RNA (1)...(19): siRNA sense strand
ucggauaugucgacuucug

SEQ ID NO: 1383833 - RNA, 19 nt, Homo sapiens
  misc_RNA (1)...(19): siRNA sense strand
cgaaaacaggagaucauua

SEQ ID NO: 1383834 - RNA, 19 nt, Homo sapiens
  misc_RNA (1)...(19): siRNA sense strand
ucaucaauaccaagaaguu

SEQ ID NO: 1383835 - RNA, 19 nt, Homo sapiens
  misc_RNA (1)...(19): siRNA sense strand
gccaaaagccuauugaaca

SEQ ID NO: 1383836 - RNA, 19 nt, Homo sapiens
  misc_RNA (1)...(19): siRNA sense strand
gaugccagccacuguauac

SEQ ID NO: 1383837 - RNA, 19 nt, Homo sapiens
  misc_RNA (1)...(19): siRNA sense strand
agaacuugaucaaccagau

SEQ ID NO: 1383838 - RNA, 19 nt, Homo sapiens
  misc_RNA (1)...(19): siRNA sense strand
acagcaagccuauccauac

SEQ ID NO: 1383839 - RNA, 19 nt, Homo sapiens
  misc_RNA (1)...(19): siRNA sense strand
caucaacaauggggacuuu

SEQ ID NO: 1383840 - RNA, 19 nt, Homo sapiens
  misc_RNA (1)...(19): siRNA sense strand
agagaguacuacagugaag

SEQ ID NO: 1383841 - RNA, 19 nt, Homo sapiens
  misc_RNA (1)...(19): siRNA sense strand
cagagaguacuacagugaa

SEQ ID NO: 1383842 - RNA, 19 nt, Homo sapiens
  misc_RNA (1)...(19): siRNA sense strand
caucaauaccaagaaguug

SEQ ID NO: 1383843 - RNA, 19 nt, Homo sapiens
  misc_RNA (1)...(19): siRNA sense strand
guccgcaggugugugaaga

SEQ ID NO: 1383844 - RNA, 19 nt, Homo sapiens
  misc_RNA (1)...(19): siRNA sense strand
gcaggugugugaagaaaac

SEQ ID NO: 1383845 - RNA, 19 nt, Homo sapiens
  misc_RNA (1)...(19): siRNA sense strand
uuugaggccuacacgaaga

SEQ ID NO: 1383846 - RNA, 19 nt, Homo sapiens
  misc_RNA (1)...(19): siRNA sense strand
ggacacgguaacuccugaa

SEQ ID NO: 1383847 - RNA, 19 nt, Homo sapiens
  misc_RNA (1)...(19): siRNA sense strand
ccagaaugggacacgguaa

SEQ ID NO: 1383848 - RNA, 19 nt, Homo sapiens
  misc_RNA (1)...(19): siRNA sense strand
acauccgccucacccagua

SEQ ID NO: 1383849 - RNA, 19 nt, Homo sapiens
  misc_RNA (1)...(19): siRNA sense strand
ugaaacauccaaacaucgu

SEQ ID NO: 1383850 - RNA, 19 nt, Homo sapiens
  misc_RNA (1)...(19): siRNA sense strand
gcugcaacaccaccacaga

SEQ ID NO: 1383851 - RNA, 19 nt, Homo sapiens
  misc_RNA (1)...(19): siRNA sense strand
aaaagccuauugaacaaga

SEQ ID NO: 1383852 - RNA, 19 nt, Homo sapiens
  misc_RNA (1)...(19): siRNA sense strand
ugaggaaagaucccuaugg

SEQ ID NO: 1383853 - RNA, 19 nt, Homo sapiens
  misc_RNA (1)...(19): siRNA sense strand
ccuacacgaagauuuguga

SEQ ID NO: 1383854 - RNA, 19 nt, Homo sapiens
  misc_RNA (1)...(19): siRNA sense strand
ggaaagaucccuauggaaa

SEQ ID NO: 1383855 - RNA, 19 nt, Homo sapiens
  misc_RNA (1)...(19): siRNA sense strand
gaggaaagaucccuaugga

SEQ ID NO: 1383856 - RNA, 19 nt, Homo sapiens
  misc_RNA (1)...(19): siRNA sense strand
caggagaucauuaagauua

SEQ ID NO: 1383857 - RNA, 19 nt, Homo sapiens
  misc_RNA (1)...(19): siRNA sense strand
gcucggauaugucgacuuc

SEQ ID NO: 1383858 - RNA, 19 nt, Homo sapiens
  misc_RNA (1)...(19): siRNA sense strand
gaaaacaggagaucauuaa

SEQ ID NO: 1383859 - RNA, 19 nt, Homo sapiens
  misc_RNA (1)...(19): siRNA sense strand
ggagcuguuugaagacauu

SEQ ID NO: 1383860 - RNA, 19 nt, Homo sapiens
  misc_RNA (1)...(19): siRNA sense strand
guacuacagugaagcagau

SEQ ID NO: 1383861 - RNA, 19 nt, Homo sapiens
  misc_RNA (1)...(19): siRNA sense strand
gaacgugaggcucggauau

SEQ ID NO: 1383862 - RNA, 19 nt, Homo sapiens
  misc_RNA (1)...(19): siRNA sense strand
uuacagaacagcugauuga

SEQ ID NO: 1383863 - RNA, 19 nt, Homo sapiens
  misc_RNA (1)...(19): siRNA sense strand
guacacaacgcuacagaug

SEQ ID NO: 1383864 - RNA, 19 nt, Homo sapiens
  misc_RNA (1)...(19): siRNA sense strand
gcagaugccagccacugua

SEQ ID NO: 1383865 - RNA, 19 nt, Homo sapiens
  misc_RNA (1)...(19): siRNA sense strand
ccgucaagcuggcugauuu

SEQ ID NO: 1383866 - RNA, 19 nt, Homo sapiens
  misc_RNA (1)...(19): siRNA sense strand
gauggcaaguggcucaaug

SEQ ID NO: 1383867 - RNA, 19 nt, Homo sapiens
  misc_RNA (1)...(19): siRNA sense strand
gagagcagcaggcuugguu

SEQ ID NO: 1383868 - RNA, 19 nt, Homo sapiens
  misc_RNA (1)...(19): siRNA sense strand
aacaggagaucauuaagau

SEQ ID NO: 1383869 - RNA, 19 nt, Homo sapiens
  misc_RNA (1)...(19): siRNA sense strand
aaacaggagaucauuaaga

SEQ ID NO: 1383870 - RNA, 19 nt, Homo sapiens
  misc_RNA (1)...(19): siRNA sense strand
gcaagggugcuuucucugu

SEQ ID NO: 1383871 - RNA, 19 nt, Homo sapiens
  misc_RNA (1)...(19): siRNA sense strand
ccagagaguacuacaguga

SEQ ID NO: 1383872 - RNA, 19 nt, Homo sapiens
  misc_RNA (1)...(19): siRNA sense strand
gaacuugaucaaccagaug

SEQ ID NO: 1383873 - RNA, 19 nt, Homo sapiens
  misc_RNA (1)...(19): siRNA sense strand
gaacagcaagccuauccau

SEQ ID NO: 1383874 - RNA, 19 nt, Homo sapiens
  misc_RNA (1)...(19): siRNA sense strand
ggagaguguuaaccacauc

SEQ ID NO: 1383875 - RNA, 19 nt, Homo sapiens
  misc_RNA (1)...(19): siRNA sense strand
agaaucuccuguccaagaa

SEQ ID NO: 1383876 - RNA, 19 nt, Homo sapiens
  misc_RNA (1)...(19): siRNA sense strand
gaaagaucccuauggaaaa

SEQ ID NO: 1383877 - RNA, 19 nt, Homo sapiens
  misc_RNA (1)...(19): siRNA sense strand
cagcaggcuugguuugguu

SEQ ID NO: 1383878 - RNA, 19 nt, Homo sapiens
  misc_RNA (1)...(19): siRNA sense strand
ccaaaagccuauugaacaa

SEQ ID NO: 1383879 - RNA, 19 nt, Homo sapiens
  misc_RNA (1)...(19): siRNA sense strand
ucugaaacauccaaacauc

SEQ ID NO: 1383880 - RNA, 19 nt, Homo sapiens
  misc_RNA (1)...(19): siRNA sense strand
caacaccaccacagaagau

SEQ ID NO: 1383881 - RNA, 19 nt, Homo sapiens
  misc_RNA (1)...(19): siRNA sense strand
gcaacaccaccacagaaga

SEQ ID NO: 1383882 - RNA, 19 nt, Homo sapiens
  misc_RNA (1)...(19): siRNA sense strand
gaccauaaacccagcaaag

SEQ ID NO: 1383883 - RNA, 19 nt, Homo sapiens
  misc_RNA (1)...(19): siRNA sense strand
gcggggagcuguuugaaga

SEQ ID NO: 1383884 - RNA, 19 nt, Homo sapiens
  misc_RNA (1)...(19): siRNA sense strand
gcgccuccaugacaguauu

SEQ ID NO: 1383885 - RNA, 19 nt, Homo sapiens
  misc_RNA (1)...(19): siRNA sense strand
gcaccagccagucagaaga

SEQ ID NO: 1383886 - RNA, 19 nt, Homo sapiens
  misc_RNA (1)...(19): siRNA sense strand
aaccagaugcugaccauaa

SEQ ID NO: 1383887 - RNA, 19 nt, Homo sapiens
  misc_RNA (1)...(19): siRNA sense strand
aggagacuguggaguguuu

SEQ ID NO: 1383888 - RNA, 19 nt, Homo sapiens
  misc_RNA (1)...(19): siRNA sense strand
ggagaucauuaagauuaca

SEQ ID NO: 1383889 - RNA, 19 nt, Homo sapiens
  misc_RNA (1)...(19): siRNA sense strand
uaugucgacuucugaaaca

SEQ ID NO: 1383890 - RNA, 19 nt, Homo sapiens
  misc_RNA (1)...(19): siRNA sense strand
ccaagaacagcaagccuau

SEQ ID NO: 1383891 - RNA, 19 nt, Homo sapiens
  misc_RNA (1)...(19): siRNA sense strand
gaaaaccuguggauaucug

SEQ ID NO: 1383892 - RNA, 19 nt, Homo sapiens
  misc_RNA (1)...(19): siRNA sense strand
ccugaggucuugaggaaag

SEQ ID NO: 1383893 - RNA, 19 nt, Homo sapiens
  misc_RNA (1)...(19): siRNA sense strand
gcagcaggcuugguuuggu

SEQ ID NO: 1383894 - RNA, 19 nt, Homo sapiens
  misc_RNA (1)...(19): siRNA sense strand
gagcagcaggcuugguuug

SEQ ID NO: 1383895 - RNA, 19 nt, Homo sapiens
  misc_RNA (1)...(19): siRNA sense strand
ccgcaggugugugaagaaa

SEQ ID NO: 1383896 - RNA, 19 nt, Homo sapiens
  misc_RNA (1)...(19): siRNA sense strand
gggaugaggaucagcacaa

SEQ ID NO: 1383897 - RNA, 19 nt, Homo sapiens
  misc_RNA (1)...(19): siRNA sense strand
ggaugaggaucagcacaag

SEQ ID NO: 1383898 - RNA, 19 nt, Homo sapiens
  misc_RNA (1)...(19): siRNA sense strand
gauaugucgacuucugaaa

SEQ ID NO: 1383899 - RNA, 19 nt, Homo sapiens
  misc_RNA (1)...(19): siRNA sense strand
gccagccacuguauacauc

SEQ ID NO: 1383900 - RNA, 19 nt, Homo sapiens
  misc_RNA (1)...(19): siRNA sense strand
uggcaagggugcuuucucu

SEQ ID NO: 1383901 - RNA, 19 nt, Homo sapiens
  misc_RNA (1)...(19): siRNA sense strand
gauuucccaucaccagaau

SEQ ID NO: 1383902 - RNA, 19 nt, Homo sapiens
  misc_RNA (1)...(19): siRNA sense strand
ucaggagacuguggagugu

SEQ ID NO: 1383903 - RNA, 19 nt, Homo sapiens
  misc_RNA (1)...(19): siRNA sense strand
accagaugcugaccauaaa

SEQ ID NO: 1383904 - RNA, 19 nt, Homo sapiens
  misc_RNA (1)...(19): siRNA sense strand
ggauaugucgacuucugaa

SEQ ID NO: 1383905 - RNA, 19 nt, Homo sapiens
  misc_RNA (1)...(19): siRNA sense strand
uucacuaccucguguuuga

SEQ ID NO: 1383906 - RNA, 19 nt, Homo sapiens
  misc_RNA (1)...(19): siRNA sense strand
ucaaccagaugcugaccau

SEQ ID NO: 1383907 - RNA, 19 nt, Homo sapiens
  misc_RNA (1)...(19): siRNA sense strand
ggccagagaguacuacagu

SEQ ID NO: 1383908 - RNA, 19 nt, Homo sapiens
  misc_RNA (1)...(19): siRNA sense strand
ggcucaauguccacuauca

SEQ ID NO: 1383909 - RNA, 19 nt, Homo sapiens
  misc_RNA (1)...(19): siRNA sense strand
gauuacagaacagcugauu

SEQ ID NO: 1383910 - RNA, 19 nt, Homo sapiens
  misc_RNA (1)...(19): siRNA sense strand
aucaagggcuccacagaga

SEQ ID NO: 1383911 - RNA, 19 nt, Homo sapiens
  misc_RNA (1)...(19): siRNA sense strand
ggaucaagggcuccacaga

SEQ ID NO: 1383912 - RNA, 19 nt, Homo sapiens
  misc_RNA (1)...(19): siRNA sense strand
aaucaucaauaccaagaag

SEQ ID NO: 1383913 - RNA, 19 nt, Homo sapiens
  misc_RNA (1)...(19): siRNA sense strand
gggaucaccagaaacuaga

SEQ ID NO: 1383914 - RNA, 19 nt, Homo sapiens
  misc_RNA (1)...(19): siRNA sense strand
cagcgugcaucgccuacau

SEQ ID NO: 1383915 - RNA, 19 nt, Homo sapiens
  misc_RNA (1)...(19): siRNA sense strand
ccaugacaguauuucugaa

SEQ ID NO: 1383916 - RNA, 19 nt, Homo sapiens
  misc_RNA (1)...(19): siRNA sense strand
ccucguguuugaccuuguu

SEQ ID NO: 1383917 - RNA, 19 nt, Homo sapiens
  misc_RNA (1)...(19): siRNA sense strand
ucggauaugucgacuucug

SEQ ID NO: 1383918 - RNA, 19 nt, Homo sapiens
  misc_RNA (1)...(19): siRNA sense strand
cgaaaacaggagaucauua

SEQ ID NO: 1383919 - RNA, 19 nt, Homo sapiens
  misc_RNA (1)...(19): siRNA sense strand
ucaucaauaccaagaaguu

SEQ ID NO: 1383920 - RNA, 19 nt, Homo sapiens
  misc_RNA (1)...(19): siRNA sense strand
gccaaaagccuauugaaca

SEQ ID NO: 1383921 - RNA, 19 nt, Homo sapiens
  misc_RNA (1)...(19): siRNA sense strand
gaugccagccacuguauac

SEQ ID NO: 1383922 - RNA, 19 nt, Homo sapiens
  misc_RNA (1)...(19): siRNA sense strand
agaacuugaucaaccagau

SEQ ID NO: 1383923 - RNA, 19 nt, Homo sapiens
  misc_RNA (1)...(19): siRNA sense strand
acagcaagccuauccauac

SEQ ID NO: 1383924 - RNA, 19 nt, Homo sapiens
  misc_RNA (1)...(19): siRNA sense strand
caucaacaauggggacuuu

SEQ ID NO: 1383925 - RNA, 19 nt, Homo sapiens
  misc_RNA (1)...(19): siRNA sense strand
agagaguacuacagugaag

SEQ ID NO: 1383926 - RNA, 19 nt, Homo sapiens
  misc_RNA (1)...(19): siRNA sense strand
cagagaguacuacagugaa

SEQ ID NO: 1383927 - RNA, 19 nt, Homo sapiens
  misc_RNA (1)...(19): siRNA sense strand
caucaauaccaagaaguug

SEQ ID NO: 1383928 - RNA, 19 nt, Homo sapiens
  misc_RNA (1)...(19): siRNA sense strand
guccgcaggugugugaaga

SEQ ID NO: 1383929 - RNA, 19 nt, Homo sapiens
  misc_RNA (1)...(19): siRNA sense strand
gcaggugugugaagaaaac

SEQ ID NO: 1383930 - RNA, 19 nt, Homo sapiens
  misc_RNA (1)...(19): siRNA sense strand
uuugaggccuacacgaaga

SEQ ID NO: 1383931 - RNA, 19 nt, Homo sapiens
  misc_RNA (1)...(19): siRNA sense strand
ggacacgguaacuccugaa

SEQ ID NO: 1383932 - RNA, 19 nt, Homo sapiens
  misc_RNA (1)...(19): siRNA sense strand
ccagaaugggacacgguaa

SEQ ID NO: 1383933 - RNA, 19 nt, Homo sapiens
  misc_RNA (1)...(19): siRNA sense strand
acauccgccucacccagua

SEQ ID NO: 1383934 - RNA, 19 nt, Homo sapiens
  misc_RNA (1)...(19): siRNA sense strand
ugaaacauccaaacaucgu

SEQ ID NO: 1383935 - RNA, 19 nt, Homo sapiens
  misc_RNA (1)...(19): siRNA sense strand
gcugcaacaccaccacaga

SEQ ID NO: 1383936 - RNA, 19 nt, Homo sapiens
  misc_RNA (1)...(19): siRNA sense strand
aaaagccuauugaacaaga

SEQ ID NO: 1383937 - RNA, 19 nt, Homo sapiens
  misc_RNA (1)...(19): siRNA sense strand
ugaggaaagaucccuaugg

SEQ ID NO: 1383938 - RNA, 19 nt, Homo sapiens
  misc_RNA (1)...(19): siRNA sense strand
ccuacacgaagauuuguga

SEQ ID NO: 1383939 - RNA, 19 nt, Homo sapiens
  misc_RNA (1)...(19): siRNA sense strand
ggaaagaucccuauggaaa

SEQ ID NO: 1383940 - RNA, 19 nt, Homo sapiens
  misc_RNA (1)...(19): siRNA sense strand
gaggaaagaucccuaugga

SEQ ID NO: 1383941 - RNA, 19 nt, Homo sapiens
  misc_RNA (1)...(19): siRNA sense strand
caggagaucauuaagauua

SEQ ID NO: 1383942 - RNA, 19 nt, Homo sapiens
  misc_RNA (1)...(19): siRNA sense strand
gcucggauaugucgacuuc

SEQ ID NO: 1383943 - RNA, 19 nt, Homo sapiens
  misc_RNA (1)...(19): siRNA sense strand
gaaaacaggagaucauuaa

SEQ ID NO: 1383944 - RNA, 19 nt, Homo sapiens
  misc_RNA (1)...(19): siRNA sense strand
ggagcuguuugaagacauu

SEQ ID NO: 1383945 - RNA, 19 nt, Homo sapiens
  misc_RNA (1)...(19): siRNA sense strand
guacuacagugaagcagau

SEQ ID NO: 1383946 - RNA, 19 nt, Homo sapiens
  misc_RNA (1)...(19): siRNA sense strand
gaacgugaggcucggauau

SEQ ID NO: 1383947 - RNA, 19 nt, Homo sapiens
  misc_RNA (1)...(19): siRNA sense strand
uuacagaacagcugauuga

SEQ ID NO: 1383948 - RNA, 19 nt, Homo sapiens
  misc_RNA (1)...(19): siRNA sense strand
guacacaacgcuacagaug

SEQ ID NO: 1383949 - RNA, 19 nt, Homo sapiens
  misc_RNA (1)...(19): siRNA sense strand
gcagaugccagccacugua

SEQ ID NO: 1383950 - RNA, 19 nt, Homo sapiens
  misc_RNA (1)...(19): siRNA sense strand
ccgucaagcuggcugauuu

SEQ ID NO: 1383951 - RNA, 19 nt, Homo sapiens
  misc_RNA (1)...(19): siRNA sense strand
gauggcaaguggcucaaug

SEQ ID NO: 1383952 - RNA, 19 nt, Homo sapiens
  misc_RNA (1)...(19): siRNA sense strand
gagagcagcaggcuugguu

SEQ ID NO: 1383953 - RNA, 19 nt, Homo sapiens
  misc_RNA (1)...(19): siRNA sense strand
aacaggagaucauuaagau

SEQ ID NO: 1383954 - RNA, 19 nt, Homo sapiens
  misc_RNA (1)...(19): siRNA sense strand
aaacaggagaucauuaaga

SEQ ID NO: 1383955 - RNA, 19 nt, Homo sapiens
  misc_RNA (1)...(19): siRNA sense strand
gcaagggugcuuucucugu

SEQ ID NO: 1383956 - RNA, 19 nt, Homo sapiens
  misc_RNA (1)...(19): siRNA sense strand
ccagagaguacuacaguga

SEQ ID NO: 1383957 - RNA, 19 nt, Homo sapiens
  misc_RNA (1)...(19): siRNA sense strand
gaacuugaucaaccagaug

SEQ ID NO: 1383958 - RNA, 19 nt, Homo sapiens
  misc_RNA (1)...(19): siRNA sense strand
gaacagcaagccuauccau

SEQ ID NO: 1383959 - RNA, 19 nt, Homo sapiens
  misc_RNA (1)...(19): siRNA sense strand
ggagaguguuaaccacauc

SEQ ID NO: 1383960 - RNA, 19 nt, Homo sapiens
  misc_RNA (1)...(19): siRNA sense strand
agaaucuccuguccaagaa

SEQ ID NO: 1383961 - RNA, 19 nt, Homo sapiens
  misc_RNA (1)...(19): siRNA sense strand
gaaagaucccuauggaaaa

SEQ ID NO: 1383962 - RNA, 19 nt, Homo sapiens
  misc_RNA (1)...(19): siRNA sense strand
cagcaggcuugguuugguu

SEQ ID NO: 1383963 - RNA, 19 nt, Homo sapiens
  misc_RNA (1)...(19): siRNA sense strand
ccaaaagccuauugaacaa

SEQ ID NO: 1383964 - RNA, 19 nt, Homo sapiens
  misc_RNA (1)...(19): siRNA sense strand
ucugaaacauccaaacauc

SEQ ID NO: 1383965 - RNA, 19 nt, Homo sapiens
  misc_RNA (1)...(19): siRNA sense strand
caacaccaccacagaagau

SEQ ID NO: 1383966 - RNA, 19 nt, Homo sapiens
  misc_RNA (1)...(19): siRNA sense strand
gcaacaccaccacagaaga

SEQ ID NO: 1383967 - RNA, 19 nt, Homo sapiens
  misc_RNA (1)...(19): siRNA sense strand
gaccauaaacccagcaaag

SEQ ID NO: 1383968 - RNA, 19 nt, Homo sapiens
  misc_RNA (1)...(19): siRNA sense strand
gcggggagcuguuugaaga

SEQ ID NO: 1383969 - RNA, 19 nt, Homo sapiens
  misc_RNA (1)...(19): siRNA sense strand
gcgccuccaugacaguauu

SEQ ID NO: 1383970 - RNA, 19 nt, Homo sapiens
  misc_RNA (1)...(19): siRNA sense strand
gcaccagccagucagaaga

SEQ ID NO: 1383971 - RNA, 19 nt, Homo sapiens
  misc_RNA (1)...(19): siRNA sense strand
aaccagaugcugaccauaa

SEQ ID NO: 1383972 - RNA, 19 nt, Homo sapiens
  misc_RNA (1)...(19): siRNA sense strand
aggagacuguggaguguuu

SEQ ID NO: 1383973 - RNA, 19 nt, Homo sapiens
  misc_RNA (1)...(19): siRNA sense strand
ggagaucauuaagauuaca

SEQ ID NO: 1383974 - RNA, 19 nt, Homo sapiens
  misc_RNA (1)...(19): siRNA sense strand
uaugucgacuucugaaaca

SEQ ID NO: 1383975 - RNA, 19 nt, Homo sapiens
  misc_RNA (1)...(19): siRNA sense strand
ccaagaacagcaagccuau

SEQ ID NO: 1383976 - RNA, 19 nt, Homo sapiens
  misc_RNA (1)...(19): siRNA sense strand
gaaaaccuguggauaucug

SEQ ID NO: 1383977 - RNA, 19 nt, Homo sapiens
  misc_RNA (1)...(19): siRNA sense strand
ccugaggucuugaggaaag

SEQ ID NO: 1383978 - RNA, 19 nt, Homo sapiens
  misc_RNA (1)...(19): siRNA sense strand
gcagcaggcuugguuuggu

SEQ ID NO: 1383979 - RNA, 19 nt, Homo sapiens
  misc_RNA (1)...(19): siRNA sense strand
gagcagcaggcuugguuug

SEQ ID NO: 1383980 - RNA, 19 nt, Homo sapiens
  misc_RNA (1)...(19): siRNA sense strand
ccgcaggugugugaagaaa

SEQ ID NO: 1383981 - RNA, 19 nt, Homo sapiens
  misc_RNA (1)...(19): siRNA sense strand
gggaugaggaucagcacaa

SEQ ID NO: 1383982 - RNA, 19 nt, Homo sapiens
  misc_RNA (1)...(19): siRNA sense strand
ggaugaggaucagcacaag

SEQ ID NO: 1383983 - RNA, 19 nt, Homo sapiens
  misc_RNA (1)...(19): siRNA sense strand
gauaugucgacuucugaaa

SEQ ID NO: 1383984 - RNA, 19 nt, Homo sapiens
  misc_RNA (1)...(19): siRNA sense strand
gccagccacuguauacauc

SEQ ID NO: 1383985 - RNA, 19 nt, Homo sapiens
  misc_RNA (1)...(19): siRNA sense strand
uggcaagggugcuuucucu

SEQ ID NO: 1383986 - RNA, 19 nt, Homo sapiens
  misc_RNA (1)...(19): siRNA sense strand
gauuucccaucaccagaau

SEQ ID NO: 1383987 - RNA, 19 nt, Homo sapiens
  misc_RNA (1)...(19): siRNA sense strand
ucaggagacuguggagugu

SEQ ID NO: 1383988 - RNA, 19 nt, Homo sapiens
  misc_RNA (1)...(19): siRNA sense strand
accagaugcugaccauaaa

SEQ ID NO: 1383989 - RNA, 19 nt, Homo sapiens
  misc_RNA (1)...(19): siRNA sense strand
ggauaugucgacuucugaa

SEQ ID NO: 1383990 - RNA, 19 nt, Homo sapiens
  misc_RNA (1)...(19): siRNA sense strand
uucacuaccucguguuuga

SEQ ID NO: 1383991 - RNA, 19 nt, Homo sapiens
  misc_RNA (1)...(19): siRNA sense strand
ucaaccagaugcugaccau

SEQ ID NO: 1383992 - RNA, 19 nt, Homo sapiens
  misc_RNA (1)...(19): siRNA sense strand
ggccagagaguacuacagu

SEQ ID NO: 1383993 - RNA, 19 nt, Homo sapiens
  misc_RNA (1)...(19): siRNA sense strand
ggcucaauguccacuauca

SEQ ID NO: 1383994 - RNA, 19 nt, Homo sapiens
  misc_RNA (1)...(19): siRNA sense strand
gauuacagaacagcugauu

SEQ ID NO: 1383995 - RNA, 19 nt, Homo sapiens
  misc_RNA (1)...(19): siRNA sense strand
aucaagggcuccacagaga

SEQ ID NO: 1383996 - RNA, 19 nt, Homo sapiens
  misc_RNA (1)...(19): siRNA sense strand
ggaucaagggcuccacaga

SEQ ID NO: 1383997 - RNA, 19 nt, Homo sapiens
  misc_RNA (1)...(19): siRNA sense strand
aaucaucaauaccaagaag

SEQ ID NO: 1383998 - RNA, 19 nt, Homo sapiens
  misc_RNA (1)...(19): siRNA sense strand
gggaucaccagaaacuaga

SEQ ID NO: 1383999 - RNA, 19 nt, Homo sapiens
  misc_RNA (1)...(19): siRNA sense strand
cagcgugcaucgccuacau

SEQ ID NO: 1384000 - RNA, 19 nt, Homo sapiens
  misc_RNA (1)...(19): siRNA sense strand
ccaugacaguauuucugaa

SEQ ID NO: 1384001 - RNA, 19 nt, Homo sapiens
  misc_RNA (1)...(19): siRNA sense strand
ccucguguuugaccuuguu

SEQ ID NO: 1384002 - RNA, 19 nt, Homo sapiens
  misc_RNA (1)...(19): siRNA sense strand
ucggauaugucgacuucug

SEQ ID NO: 1384003 - RNA, 19 nt, Homo sapiens
  misc_RNA (1)...(19): siRNA sense strand
cgaaaacaggagaucauua

SEQ ID NO: 1384004 - RNA, 19 nt, Homo sapiens
  misc_RNA (1)...(19): siRNA sense strand
ucaucaauaccaagaaguu

SEQ ID NO: 1384005 - RNA, 19 nt, Homo sapiens
  misc_RNA (1)...(19): siRNA sense strand
gccaaaagccuauugaaca

SEQ ID NO: 1384006 - RNA, 19 nt, Homo sapiens
  misc_RNA (1)...(19): siRNA sense strand
gaugccagccacuguauac

SEQ ID NO: 1384007 - RNA, 19 nt, Homo sapiens
  misc_RNA (1)...(19): siRNA sense strand
agaacuugaucaaccagau

SEQ ID NO: 1384008 - RNA, 19 nt, Homo sapiens
  misc_RNA (1)...(19): siRNA sense strand
acagcaagccuauccauac

SEQ ID NO: 1384009 - RNA, 19 nt, Homo sapiens
  misc_RNA (1)...(19): siRNA sense strand
caucaacaauggggacuuu

SEQ ID NO: 1384010 - RNA, 19 nt, Homo sapiens
  misc_RNA (1)...(19): siRNA sense strand
agagaguacuacagugaag

SEQ ID NO: 1384011 - RNA, 19 nt, Homo sapiens
  misc_RNA (1)...(19): siRNA sense strand
cagagaguacuacagugaa

SEQ ID NO: 1384012 - RNA, 19 nt, Homo sapiens
  misc_RNA (1)...(19): siRNA sense strand
caucaauaccaagaaguug

SEQ ID NO: 1384013 - RNA, 19 nt, Homo sapiens
  misc_RNA (1)...(19): siRNA sense strand
guccgcaggugugugaaga

SEQ ID NO: 1384014 - RNA, 19 nt, Homo sapiens
  misc_RNA (1)...(19): siRNA sense strand
gcaggugugugaagaaaac

SEQ ID NO: 1384015 - RNA, 19 nt, Homo sapiens
  misc_RNA (1)...(19): siRNA sense strand
uuugaggccuacacgaaga

SEQ ID NO: 1384016 - RNA, 19 nt, Homo sapiens
  misc_RNA (1)...(19): siRNA sense strand
ggacacgguaacuccugaa

SEQ ID NO: 1384017 - RNA, 19 nt, Homo sapiens
  misc_RNA (1)...(19): siRNA sense strand
ccagaaugggacacgguaa

SEQ ID NO: 1384018 - RNA, 19 nt, Homo sapiens
  misc_RNA (1)...(19): siRNA sense strand
acauccgccucacccagua

SEQ ID NO: 1384019 - RNA, 19 nt, Homo sapiens
  misc_RNA (1)...(19): siRNA sense strand
ugaaacauccaaacaucgu

SEQ ID NO: 1384020 - RNA, 19 nt, Homo sapiens
  misc_RNA (1)...(19): siRNA sense strand
gcugcaacaccaccacaga

SEQ ID NO: 1384021 - RNA, 19 nt, Homo sapiens
  misc_RNA (1)...(19): siRNA sense strand
aaaagccuauugaacaaga

SEQ ID NO: 1384022 - RNA, 19 nt, Homo sapiens
  misc_RNA (1)...(19): siRNA sense strand
ugaggaaagaucccuaugg

SEQ ID NO: 1384023 - RNA, 19 nt, Homo sapiens
  misc_RNA (1)...(19): siRNA sense strand
ccuacacgaagauuuguga

SEQ ID NO: 1384024 - RNA, 19 nt, Homo sapiens
  misc_RNA (1)...(19): siRNA sense strand
ggaaagaucccuauggaaa

SEQ ID NO: 1384025 - RNA, 19 nt, Homo sapiens
  misc_RNA (1)...(19): siRNA sense strand
gaggaaagaucccuaugga

SEQ ID NO: 1384026 - RNA, 19 nt, Homo sapiens
  misc_RNA (1)...(19): siRNA sense strand
caggagaucauuaagauua

SEQ ID NO: 1384027 - RNA, 19 nt, Homo sapiens
  misc_RNA (1)...(19): siRNA sense strand
gcucggauaugucgacuuc

SEQ ID NO: 1384028 - RNA, 19 nt, Homo sapiens
  misc_RNA (1)...(19): siRNA sense strand
gaaaacaggagaucauuaa

SEQ ID NO: 1384029 - RNA, 19 nt, Homo sapiens
  misc_RNA (1)...(19): siRNA sense strand
ggagcuguuugaagacauu

SEQ ID NO: 1384030 - RNA, 19 nt, Homo sapiens
  misc_RNA (1)...(19): siRNA sense strand
guacuacagugaagcagau

SEQ ID NO: 1384031 - RNA, 19 nt, Homo sapiens
  misc_RNA (1)...(19): siRNA sense strand
gaacgugaggcucggauau

SEQ ID NO: 1384032 - RNA, 19 nt, Homo sapiens
  misc_RNA (1)...(19): siRNA sense strand
guacacaacgcuacagaug

SEQ ID NO: 1384033 - RNA, 19 nt, Homo sapiens
  misc_RNA (1)...(19): siRNA sense strand
gcagaugccagccacugua

SEQ ID NO: 1384034 - RNA, 19 nt, Homo sapiens
  misc_RNA (1)...(19): siRNA sense strand
ccgucaagcuggcugauuu

SEQ ID NO: 1384035 - RNA, 19 nt, Homo sapiens
  misc_RNA (1)...(19): siRNA sense strand
gagagcagcaggcuugguu

SEQ ID NO: 1384036 - RNA, 19 nt, Homo sapiens
  misc_RNA (1)...(19): siRNA sense strand
aacaggagaucauuaagau

SEQ ID NO: 1384037 - RNA, 19 nt, Homo sapiens
  misc_RNA (1)...(19): siRNA sense strand
aaacaggagaucauuaaga

SEQ ID NO: 1384038 - RNA, 19 nt, Homo sapiens
  misc_RNA (1)...(19): siRNA sense strand
ccagagaguacuacaguga

SEQ ID NO: 1384039 - RNA, 19 nt, Homo sapiens
  misc_RNA (1)...(19): siRNA sense strand
gcaagggugcuuucucugu

SEQ ID NO: 1384040 - RNA, 19 nt, Homo sapiens
  misc_RNA (1)...(19): siRNA sense strand
gaacuugaucaaccagaug

SEQ ID NO: 1384041 - RNA, 19 nt, Homo sapiens
  misc_RNA (1)...(19): siRNA sense strand
ggagaguguuaaccacauc

SEQ ID NO: 1384042 - RNA, 19 nt, Homo sapiens
  misc_RNA (1)...(19): siRNA sense strand
gaaagaucccuauggaaaa

SEQ ID NO: 1384043 - RNA, 19 nt, Homo sapiens
  misc_RNA (1)...(19): siRNA sense strand
cagcaggcuugguuugguu

SEQ ID NO: 1384044 - RNA, 19 nt, Homo sapiens
  misc_RNA (1)...(19): siRNA sense strand
ccaaaagccuauugaacaa

SEQ ID NO: 1384045 - RNA, 19 nt, Homo sapiens
  misc_RNA (1)...(19): siRNA sense strand
ucugaaacauccaaacauc

SEQ ID NO: 1384046 - RNA, 19 nt, Homo sapiens
  misc_RNA (1)...(19): siRNA sense strand
caacaccaccacagaagau

SEQ ID NO: 1384047 - RNA, 19 nt, Homo sapiens
  misc_RNA (1)...(19): siRNA sense strand
gcaacaccaccacagaaga

SEQ ID NO: 1384048 - RNA, 19 nt, Homo sapiens
  misc_RNA (1)...(19): siRNA sense strand
gaccauaaacccagcaaag

SEQ ID NO: 1384049 - RNA, 19 nt, Homo sapiens
  misc_RNA (1)...(19): siRNA sense strand
gcggggagcuguuugaaga

SEQ ID NO: 1384050 - RNA, 19 nt, Homo sapiens
  misc_RNA (1)...(19): siRNA sense strand
gcgccuccaugacaguauu

SEQ ID NO: 1384051 - RNA, 19 nt, Homo sapiens
  misc_RNA (1)...(19): siRNA sense strand
aaccagaugcugaccauaa

SEQ ID NO: 1384052 - RNA, 19 nt, Homo sapiens
  misc_RNA (1)...(19): siRNA sense strand
aggagacuguggaguguuu

SEQ ID NO: 1384053 - RNA, 19 nt, Homo sapiens
  misc_RNA (1)...(19): siRNA sense strand
ggagaucauuaagauuaca

SEQ ID NO: 1384054 - RNA, 19 nt, Homo sapiens
  misc_RNA (1)...(19): siRNA sense strand
uaugucgacuucugaaaca

SEQ ID NO: 1384055 - RNA, 19 nt, Homo sapiens
  misc_RNA (1)...(19): siRNA sense strand
gaaaaccuguggauaucug

SEQ ID NO: 1384056 - RNA, 19 nt, Homo sapiens
  misc_RNA (1)...(19): siRNA sense strand
ccgcaggugugugaagaaa

SEQ ID NO: 1384057 - RNA, 19 nt, Homo sapiens
  misc_RNA (1)...(19): siRNA sense strand
ccugaggucuugaggaaag

SEQ ID NO: 1384058 - RNA, 19 nt, Homo sapiens
  misc_RNA (1)...(19): siRNA sense strand
gcagcaggcuugguuuggu

SEQ ID NO: 1384059 - RNA, 19 nt, Homo sapiens
  misc_RNA (1)...(19): siRNA sense strand
gagcagcaggcuugguuug

SEQ ID NO: 1384060 - RNA, 19 nt, Homo sapiens
  misc_RNA (1)...(19): siRNA sense strand
gggaugaggaucagcacaa

SEQ ID NO: 1384061 - RNA, 19 nt, Homo sapiens
  misc_RNA (1)...(19): siRNA sense strand
ggaugaggaucagcacaag

SEQ ID NO: 1384062 - RNA, 19 nt, Homo sapiens
  misc_RNA (1)...(19): siRNA sense strand
gauaugucgacuucugaaa

SEQ ID NO: 1384063 - RNA, 19 nt, Homo sapiens
  misc_RNA (1)...(19): siRNA sense strand
gccagccacuguauacauc

SEQ ID NO: 1384064 - RNA, 19 nt, Homo sapiens
  misc_RNA (1)...(19): siRNA sense strand
uggcaagggugcuuucucu

SEQ ID NO: 1384065 - RNA, 19 nt, Homo sapiens
  misc_RNA (1)...(19): siRNA sense strand
ggauaugucgacuucugaa

SEQ ID NO: 1384066 - RNA, 19 nt, Homo sapiens
  misc_RNA (1)...(19): siRNA sense strand
ucaggagacuguggagugu

SEQ ID NO: 1384067 - RNA, 19 nt, Homo sapiens
  misc_RNA (1)...(19): siRNA sense strand
accagaugcugaccauaaa

SEQ ID NO: 1384068 - RNA, 19 nt, Homo sapiens
  misc_RNA (1)...(19): siRNA sense strand
gauuucccaucaccagaau

SEQ ID NO: 1384069 - RNA, 19 nt, Homo sapiens
  misc_RNA (1)...(19): siRNA sense strand
uucacuaccucguguuuga

SEQ ID NO: 1384070 - RNA, 19 nt, Homo sapiens
  misc_RNA (1)...(19): siRNA sense strand
ucaaccagaugcugaccau

SEQ ID NO: 1384071 - RNA, 19 nt, Homo sapiens
  misc_RNA (1)...(19): siRNA sense strand
aaucaucaauaccaagaag

SEQ ID NO: 1384072 - RNA, 19 nt, Homo sapiens
  misc_RNA (1)...(19): siRNA sense strand
aucaagggcuccacagaga

SEQ ID NO: 1384073 - RNA, 19 nt, Homo sapiens
  misc_RNA (1)...(19): siRNA sense strand
ggaucaagggcuccacaga

SEQ ID NO: 1384074 - RNA, 19 nt, Homo sapiens
  misc_RNA (1)...(19): siRNA sense strand
gggaucaccagaaacuaga

SEQ ID NO: 1384075 - RNA, 19 nt, Homo sapiens
  misc_RNA (1)...(19): siRNA sense strand
ggccagagaguacuacagu

SEQ ID NO: 1384076 - RNA, 19 nt, Homo sapiens
  misc_RNA (1)...(19): siRNA sense strand
ccaugacaguauuucugaa

SEQ ID NO: 1384077 - RNA, 19 nt, Homo sapiens
  misc_RNA (1)...(19): siRNA sense strand
ccucguguuugaccuuguu

SEQ ID NO: 1384078 - RNA, 19 nt, Homo sapiens
  misc_RNA (1)...(19): siRNA sense strand
ucggauaugucgacuucug

SEQ ID NO: 1384079 - RNA, 19 nt, Homo sapiens
  misc_RNA (1)...(19): siRNA sense strand
cgaaaacaggagaucauua

SEQ ID NO: 1384080 - RNA, 19 nt, Homo sapiens
  misc_RNA (1)...(19): siRNA sense strand
gccaaaagccuauugaaca

SEQ ID NO: 1384081 - RNA, 19 nt, Homo sapiens
  misc_RNA (1)...(19): siRNA sense strand
ucaucaauaccaagaaguu

SEQ ID NO: 1384082 - RNA, 19 nt, Homo sapiens
  misc_RNA (1)...(19): siRNA sense strand
gaugccagccacuguauac

SEQ ID NO: 1384083 - RNA, 19 nt, Homo sapiens
  misc_RNA (1)...(19): siRNA sense strand
agaacuugaucaaccagau

SEQ ID NO: 1384084 - RNA, 19 nt, Homo sapiens
  misc_RNA (1)...(19): siRNA sense strand
agagaguacuacagugaag

SEQ ID NO: 1384085 - RNA, 19 nt, Homo sapiens
  misc_RNA (1)...(19): siRNA sense strand
cagagaguacuacagugaa

SEQ ID NO: 1384086 - RNA, 19 nt, Homo sapiens
  misc_RNA (1)...(19): siRNA sense strand
caucaauaccaagaaguug

SEQ ID NO: 1384087 - RNA, 19 nt, Homo sapiens
  misc_RNA (1)...(19): siRNA sense strand
guccgcaggugugugaaga

SEQ ID NO: 1384088 - RNA, 19 nt, Homo sapiens
  misc_RNA (1)...(19): siRNA sense strand
ggacacgguaacuccugaa

SEQ ID NO: 1384089 - RNA, 19 nt, Homo sapiens
  misc_RNA (1)...(19): siRNA sense strand
gcaggugugugaagaaaac

SEQ ID NO: 1384090 - RNA, 19 nt, Homo sapiens
  misc_RNA (1)...(19): siRNA sense strand
ugaaacauccaaacaucgu

SEQ ID NO: 1384091 - RNA, 19 nt, Homo sapiens
  misc_RNA (1)...(19): siRNA sense strand
gcugcaacaccaccacaga

SEQ ID NO: 1384092 - RNA, 19 nt, Homo sapiens
  misc_RNA (1)...(19): siRNA sense strand
aaaagccuauugaacaaga

SEQ ID NO: 1384093 - RNA, 19 nt, Homo sapiens
  misc_RNA (1)...(19): siRNA sense strand
ccagaaugggacacgguaa

SEQ ID NO: 1384094 - RNA, 19 nt, Homo sapiens
  misc_RNA (1)...(19): siRNA sense strand
ugaggaaagaucccuaugg

SEQ ID NO: 1384095 - RNA, 19 nt, Homo sapiens
  misc_RNA (1)...(19): siRNA sense strand
ggaaagaucccuauggaaa

SEQ ID NO: 1384096 - RNA, 19 nt, Homo sapiens
  misc_RNA (1)...(19): siRNA sense strand
gaggaaagaucccuaugga

SEQ ID NO: 1384097 - RNA, 19 nt, Homo sapiens
  misc_RNA (1)...(19): siRNA sense strand
caggagaucauuaagauua

SEQ ID NO: 1384098 - RNA, 19 nt, Homo sapiens
  misc_RNA (1)...(19): siRNA sense strand
gcucggauaugucgacuuc

SEQ ID NO: 1384099 - RNA, 19 nt, Homo sapiens
  misc_RNA (1)...(19): siRNA sense strand
gaaaacaggagaucauuaa

SEQ ID NO: 1384100 - RNA, 19 nt, Homo sapiens
  misc_RNA (1)...(19): siRNA sense strand
ggagcuguuugaagacauu

SEQ ID NO: 1384101 - RNA, 19 nt, Homo sapiens
  misc_RNA (1)...(19): siRNA sense strand
guacuacagugaagcagau

SEQ ID NO: 1384102 - RNA, 19 nt, Homo sapiens
  misc_RNA (1)...(19): siRNA sense strand
gaacgugaggcucggauau

SEQ ID NO: 1384103 - RNA, 19 nt, Homo sapiens
  misc_RNA (1)...(19): siRNA sense strand
uuacagaacagcugauuga

SEQ ID NO: 1384104 - RNA, 19 nt, Homo sapiens
  misc_RNA (1)...(19): siRNA sense strand
guacacaacgcuacagaug

SEQ ID NO: 1384105 - RNA, 19 nt, Homo sapiens
  misc_RNA (1)...(19): siRNA sense strand
gcagaugccagccacugua

SEQ ID NO: 1384106 - RNA, 19 nt, Homo sapiens
  misc_RNA (1)...(19): siRNA sense strand
ccgucaagcuggcugauuu

SEQ ID NO: 1384107 - RNA, 19 nt, Homo sapiens
  misc_RNA (1)...(19): siRNA sense strand
gauggcaaguggcucaaug

SEQ ID NO: 1384108 - RNA, 19 nt, Homo sapiens
  misc_RNA (1)...(19): siRNA sense strand
gagagcagcaggcuugguu

SEQ ID NO: 1384109 - RNA, 19 nt, Homo sapiens
  misc_RNA (1)...(19): siRNA sense strand
aacaggagaucauuaagau

SEQ ID NO: 1384110 - RNA, 19 nt, Homo sapiens
  misc_RNA (1)...(19): siRNA sense strand
aaacaggagaucauuaaga

SEQ ID NO: 1384111 - RNA, 19 nt, Homo sapiens
  misc_RNA (1)...(19): siRNA sense strand
gcaagggugcuuucucugu

SEQ ID NO: 1384112 - RNA, 19 nt, Homo sapiens
  misc_RNA (1)...(19): siRNA sense strand
ccagagaguacuacaguga

SEQ ID NO: 1384113 - RNA, 19 nt, Homo sapiens
  misc_RNA (1)...(19): siRNA sense strand
gaacuugaucaaccagaug

SEQ ID NO: 1384114 - RNA, 19 nt, Homo sapiens
  misc_RNA (1)...(19): siRNA sense strand
gaacagcaagccuauccau

SEQ ID NO: 1384115 - RNA, 19 nt, Homo sapiens
  misc_RNA (1)...(19): siRNA sense strand
ggagaguguuaaccacauc

SEQ ID NO: 1384116 - RNA, 19 nt, Homo sapiens
  misc_RNA (1)...(19): siRNA sense strand
agaaucuccuguccaagaa

SEQ ID NO: 1384117 - RNA, 19 nt, Homo sapiens
  misc_RNA (1)...(19): siRNA sense strand
gaaagaucccuauggaaaa

SEQ ID NO: 1384118 - RNA, 19 nt, Homo sapiens
  misc_RNA (1)...(19): siRNA sense strand
cagcaggcuugguuugguu

SEQ ID NO: 1384119 - RNA, 19 nt, Homo sapiens
  misc_RNA (1)...(19): siRNA sense strand
ccaaaagccuauugaacaa

SEQ ID NO: 1384120 - RNA, 19 nt, Homo sapiens
  misc_RNA (1)...(19): siRNA sense strand
ucugaaacauccaaacauc

SEQ ID NO: 1384121 - RNA, 19 nt, Homo sapiens
  misc_RNA (1)...(19): siRNA sense strand
caacaccaccacagaagau

SEQ ID NO: 1384122 - RNA, 19 nt, Homo sapiens
  misc_RNA (1)...(19): siRNA sense strand
gcaacaccaccacagaaga

SEQ ID NO: 1384123 - RNA, 19 nt, Homo sapiens
  misc_RNA (1)...(19): siRNA sense strand
gaccauaaacccagcaaag

SEQ ID NO: 1384124 - RNA, 19 nt, Homo sapiens
  misc_RNA (1)...(19): siRNA sense strand
gcggggagcuguuugaaga

SEQ ID NO: 1384125 - RNA, 19 nt, Homo sapiens
  misc_RNA (1)...(19): siRNA sense strand
gcgccuccaugacaguauu

SEQ ID NO: 1384126 - RNA, 19 nt, Homo sapiens
  misc_RNA (1)...(19): siRNA sense strand
gcaccagccagucagaaga

SEQ ID NO: 1384127 - RNA, 19 nt, Homo sapiens
  misc_RNA (1)...(19): siRNA sense strand
aaccagaugcugaccauaa

SEQ ID NO: 1384128 - RNA, 19 nt, Homo sapiens
  misc_RNA (1)...(19): siRNA sense strand
aggagacuguggaguguuu

SEQ ID NO: 1384129 - RNA, 19 nt, Homo sapiens
  misc_RNA (1)...(19): siRNA sense strand
ggagaucauuaagauuaca

SEQ ID NO: 1384130 - RNA, 19 nt, Homo sapiens
  misc_RNA (1)...(19): siRNA sense strand
uaugucgacuucugaaaca

SEQ ID NO: 1384131 - RNA, 19 nt, Homo sapiens
  misc_RNA (1)...(19): siRNA sense strand
ccaagaacagcaagccuau

SEQ ID NO: 1384132 - RNA, 19 nt, Homo sapiens
  misc_RNA (1)...(19): siRNA sense strand
gaaaaccuguggauaucug

SEQ ID NO: 1384133 - RNA, 19 nt, Homo sapiens
  misc_RNA (1)...(19): siRNA sense strand
ccugaggucuugaggaaag

SEQ ID NO: 1384134 - RNA, 19 nt, Homo sapiens
  misc_RNA (1)...(19): siRNA sense strand
gcagcaggcuugguuuggu

SEQ ID NO: 1384135 - RNA, 19 nt, Homo sapiens
  misc_RNA (1)...(19): siRNA sense strand
gagcagcaggcuugguuug

SEQ ID NO: 1384136 - RNA, 19 nt, Homo sapiens
  misc_RNA (1)...(19): siRNA sense strand
ccgcaggugugugaagaaa

SEQ ID NO: 1384137 - RNA, 19 nt, Homo sapiens
  misc_RNA (1)...(19): siRNA sense strand
gggaugaggaucagcacaa

SEQ ID NO: 1384138 - RNA, 19 nt, Homo sapiens
  misc_RNA (1)...(19): siRNA sense strand
ggaugaggaucagcacaag

SEQ ID NO: 1384139 - RNA, 19 nt, Homo sapiens
  misc_RNA (1)...(19): siRNA sense strand
gauaugucgacuucugaaa

SEQ ID NO: 1384140 - RNA, 19 nt, Homo sapiens
  misc_RNA (1)...(19): siRNA sense strand
gccagccacuguauacauc

SEQ ID NO: 1384141 - RNA, 19 nt, Homo sapiens
  misc_RNA (1)...(19): siRNA sense strand
uggcaagggugcuuucucu

SEQ ID NO: 1384142 - RNA, 19 nt, Homo sapiens
  misc_RNA (1)...(19): siRNA sense strand
gauuucccaucaccagaau

SEQ ID NO: 1384143 - RNA, 19 nt, Homo sapiens
  misc_RNA (1)...(19): siRNA sense strand
ucaggagacuguggagugu

SEQ ID NO: 1384144 - RNA, 19 nt, Homo sapiens
  misc_RNA (1)...(19): siRNA sense strand
accagaugcugaccauaaa

SEQ ID NO: 1384145 - RNA, 19 nt, Homo sapiens
  misc_RNA (1)...(19): siRNA sense strand
ggauaugucgacuucugaa

SEQ ID NO: 1384146 - RNA, 19 nt, Homo sapiens
  misc_RNA (1)...(19): siRNA sense strand
uucacuaccucguguuuga

SEQ ID NO: 1384147 - RNA, 19 nt, Homo sapiens
  misc_RNA (1)...(19): siRNA sense strand
ucaaccagaugcugaccau

SEQ ID NO: 1384148 - RNA, 19 nt, Homo sapiens
  misc_RNA (1)...(19): siRNA sense strand
ggccagagaguacuacagu

SEQ ID NO: 1384149 - RNA, 19 nt, Homo sapiens
  misc_RNA (1)...(19): siRNA sense strand
ggcucaauguccacuauca

SEQ ID NO: 1384150 - RNA, 19 nt, Homo sapiens
  misc_RNA (1)...(19): siRNA sense strand
gauuacagaacagcugauu

SEQ ID NO: 1384151 - RNA, 19 nt, Homo sapiens
  misc_RNA (1)...(19): siRNA sense strand
aucaagggcuccacagaga

SEQ ID NO: 1384152 - RNA, 19 nt, Homo sapiens
  misc_RNA (1)...(19): siRNA sense strand
ggaucaagggcuccacaga

SEQ ID NO: 1384153 - RNA, 19 nt, Homo sapiens
  misc_RNA (1)...(19): siRNA sense strand
aaucaucaauaccaagaag

SEQ ID NO: 1384154 - RNA, 19 nt, Homo sapiens
  misc_RNA (1)...(19): siRNA sense strand
gggaucaccagaaacuaga

SEQ ID NO: 1384155 - RNA, 19 nt, Homo sapiens
  misc_RNA (1)...(19): siRNA sense strand
cagcgugcaucgccuacau

SEQ ID NO: 1384156 - RNA, 19 nt, Homo sapiens
  misc_RNA (1)...(19): siRNA sense strand
ccaugacaguauuucugaa

SEQ ID NO: 1384157 - RNA, 19 nt, Homo sapiens
  misc_RNA (1)...(19): siRNA sense strand
ccucguguuugaccuuguu

SEQ ID NO: 1384158 - RNA, 19 nt, Homo sapiens
  misc_RNA (1)...(19): siRNA sense strand
ucggauaugucgacuucug

SEQ ID NO: 1384159 - RNA, 19 nt, Homo sapiens
  misc_RNA (1)...(19): siRNA sense strand
cgaaaacaggagaucauua

SEQ ID NO: 1384160 - RNA, 19 nt, Homo sapiens
  misc_RNA (1)...(19): siRNA sense strand
ucaucaauaccaagaaguu

SEQ ID NO: 1384161 - RNA, 19 nt, Homo sapiens
  misc_RNA (1)...(19): siRNA sense strand
gccaaaagccuauugaaca

SEQ ID NO: 1384162 - RNA, 19 nt, Homo sapiens
  misc_RNA (1)...(19): siRNA sense strand
gaugccagccacuguauac

SEQ ID NO: 1384163 - RNA, 19 nt, Homo sapiens
  misc_RNA (1)...(19): siRNA sense strand
agaacuugaucaaccagau

SEQ ID NO: 1384164 - RNA, 19 nt, Homo sapiens
  misc_RNA (1)...(19): siRNA sense strand
acagcaagccuauccauac

SEQ ID NO: 1384165 - RNA, 19 nt, Homo sapiens
  misc_RNA (1)...(19): siRNA sense strand
caucaacaauggggacuuu

SEQ ID NO: 1384166 - RNA, 19 nt, Homo sapiens
  misc_RNA (1)...(19): siRNA sense strand
agagaguacuacagugaag

SEQ ID NO: 1384167 - RNA, 19 nt, Homo sapiens
  misc_RNA (1)...(19): siRNA sense strand
cagagaguacuacagugaa

SEQ ID NO: 1384168 - RNA, 19 nt, Homo sapiens
  misc_RNA (1)...(19): siRNA sense strand
caucaauaccaagaaguug

SEQ ID NO: 1384169 - RNA, 19 nt, Homo sapiens
  misc_RNA (1)...(19): siRNA sense strand
guccgcaggugugugaaga

SEQ ID NO: 1384170 - RNA, 19 nt, Homo sapiens
  misc_RNA (1)...(19): siRNA sense strand
gcaggugugugaagaaaac

SEQ ID NO: 1384171 - RNA, 19 nt, Homo sapiens
  misc_RNA (1)...(19): siRNA sense strand
uuugaggccuacacgaaga

SEQ ID NO: 1384172 - RNA, 19 nt, Homo sapiens
  misc_RNA (1)...(19): siRNA sense strand
ggacacgguaacuccugaa

SEQ ID NO: 1384173 - RNA, 19 nt, Homo sapiens
  misc_RNA (1)...(19): siRNA sense strand
ccagaaugggacacgguaa

SEQ ID NO: 1384174 - RNA, 19 nt, Homo sapiens
  misc_RNA (1)...(19): siRNA sense strand
acauccgccucacccagua

SEQ ID NO: 1384175 - RNA, 19 nt, Homo sapiens
  misc_RNA (1)...(19): siRNA sense strand
ugaaacauccaaacaucgu

SEQ ID NO: 1384176 - RNA, 19 nt, Homo sapiens
  misc_RNA (1)...(19): siRNA sense strand
gcugcaacaccaccacaga

SEQ ID NO: 1384177 - RNA, 19 nt, Homo sapiens
  misc_RNA (1)...(19): siRNA sense strand
aaaagccuauugaacaaga

SEQ ID NO: 1384178 - RNA, 19 nt, Homo sapiens
  misc_RNA (1)...(19): siRNA sense strand
ugaggaaagaucccuaugg

SEQ ID NO: 1384179 - RNA, 19 nt, Homo sapiens
  misc_RNA (1)...(19): siRNA sense strand
ccuacacgaagauuuguga

SEQ ID NO: 1384180 - RNA, 19 nt, Homo sapiens
  misc_RNA (1)...(19): siRNA sense strand
ggaaagaucccuauggaaa

SEQ ID NO: 1384181 - RNA, 19 nt, Homo sapiens
  misc_RNA (1)...(19): siRNA sense strand
gaggaaagaucccuaugga

SEQ ID NO: 1384182 - RNA, 19 nt, Homo sapiens
  misc_RNA (1)...(19): siRNA sense strand
caggagaucauuaagauua

SEQ ID NO: 1384183 - RNA, 19 nt, Homo sapiens
  misc_RNA (1)...(19): siRNA sense strand
gcucggauaugucgacuuc

SEQ ID NO: 1384184 - RNA, 19 nt, Homo sapiens
  misc_RNA (1)...(19): siRNA sense strand
gaaaacaggagaucauuaa

SEQ ID NO: 1384185 - RNA, 19 nt, Homo sapiens
  misc_RNA (1)...(19): siRNA sense strand
ggagcuguuugaagacauu

SEQ ID NO: 1384186 - RNA, 19 nt, Homo sapiens
  misc_RNA (1)...(19): siRNA sense strand
guacuacagugaagcagau

SEQ ID NO: 1384187 - RNA, 19 nt, Homo sapiens
  misc_RNA (1)...(19): siRNA sense strand
gaacgugaggcucggauau

SEQ ID NO: 1384188 - RNA, 19 nt, Homo sapiens
  misc_RNA (1)...(19): siRNA sense strand
uuacagaacagcugauuga

SEQ ID NO: 1384189 - RNA, 19 nt, Homo sapiens
  misc_RNA (1)...(19): siRNA sense strand
guacacaacgcuacagaug

SEQ ID NO: 1384190 - RNA, 19 nt, Homo sapiens
  misc_RNA (1)...(19): siRNA sense strand
gcagaugccagccacugua

SEQ ID NO: 1384191 - RNA, 19 nt, Homo sapiens
  misc_RNA (1)...(19): siRNA sense strand
ccgucaagcuggcugauuu

SEQ ID NO: 1384192 - RNA, 19 nt, Homo sapiens
  misc_RNA (1)...(19): siRNA sense strand
gauggcaaguggcucaaug

SEQ ID NO: 1384193 - RNA, 19 nt, Homo sapiens
  misc_RNA (1)...(19): siRNA sense strand
gagagcagcaggcuugguu

SEQ ID NO: 1384194 - RNA, 19 nt, Homo sapiens
  misc_RNA (1)...(19): siRNA sense strand
aacaggagaucauuaagau

SEQ ID NO: 1384195 - RNA, 19 nt, Homo sapiens
  misc_RNA (1)...(19): siRNA sense strand
aaacaggagaucauuaaga

SEQ ID NO: 1384196 - RNA, 19 nt, Homo sapiens
  misc_RNA (1)...(19): siRNA sense strand
gcaagggugcuuucucugu

SEQ ID NO: 1384197 - RNA, 19 nt, Homo sapiens
  misc_RNA (1)...(19): siRNA sense strand
ccagagaguacuacaguga

SEQ ID NO: 1384198 - RNA, 19 nt, Homo sapiens
  misc_RNA (1)...(19): siRNA sense strand
gaacuugaucaaccagaug

SEQ ID NO: 1384199 - RNA, 19 nt, Homo sapiens
  misc_RNA (1)...(19): siRNA sense strand
gaacagcaagccuauccau

SEQ ID NO: 1384200 - RNA, 19 nt, Homo sapiens
  misc_RNA (1)...(19): siRNA sense strand
ggagaguguuaaccacauc

SEQ ID NO: 1384201 - RNA, 19 nt, Homo sapiens
  misc_RNA (1)...(19): siRNA sense strand
agaaucuccuguccaagaa

SEQ ID NO: 1384202 - RNA, 19 nt, Homo sapiens
  misc_RNA (1)...(19): siRNA sense strand
gaaagaucccuauggaaaa

SEQ ID NO: 1384203 - RNA, 19 nt, Homo sapiens
  misc_RNA (1)...(19): siRNA sense strand
cagcaggcuugguuugguu

SEQ ID NO: 1384204 - RNA, 19 nt, Homo sapiens
  misc_RNA (1)...(19): siRNA sense strand
ccaaaagccuauugaacaa

SEQ ID NO: 1384205 - RNA, 19 nt, Homo sapiens
  misc_RNA (1)...(19): siRNA sense strand
ucugaaacauccaaacauc

SEQ ID NO: 1384206 - RNA, 19 nt, Homo sapiens
  misc_RNA (1)...(19): siRNA sense strand
caacaccaccacagaagau

SEQ ID NO: 1384207 - RNA, 19 nt, Homo sapiens
  misc_RNA (1)...(19): siRNA sense strand
gcaacaccaccacagaaga

SEQ ID NO: 1384208 - RNA, 19 nt, Homo sapiens
  misc_RNA (1)...(19): siRNA sense strand
gaccauaaacccagcaaag

SEQ ID NO: 1384209 - RNA, 19 nt, Homo sapiens
  misc_RNA (1)...(19): siRNA sense strand
gcggggagcuguuugaaga

SEQ ID NO: 1384210 - RNA, 19 nt, Homo sapiens
  misc_RNA (1)...(19): siRNA sense strand
gcgccuccaugacaguauu

SEQ ID NO: 1384211 - RNA, 19 nt, Homo sapiens
  misc_RNA (1)...(19): siRNA sense strand
gcaccagccagucagaaga

SEQ ID NO: 1384212 - RNA, 19 nt, Homo sapiens
  misc_RNA (1)...(19): siRNA sense strand
aaccagaugcugaccauaa

SEQ ID NO: 1384213 - RNA, 19 nt, Homo sapiens
  misc_RNA (1)...(19): siRNA sense strand
aggagacuguggaguguuu

SEQ ID NO: 1384214 - RNA, 19 nt, Homo sapiens
  misc_RNA (1)...(19): siRNA sense strand
ggagaucauuaagauuaca

SEQ ID NO: 1384215 - RNA, 19 nt, Homo sapiens
  misc_RNA (1)...(19): siRNA sense strand
uaugucgacuucugaaaca

SEQ ID NO: 1384216 - RNA, 19 nt, Homo sapiens
  misc_RNA (1)...(19): siRNA sense strand
ccaagaacagcaagccuau

SEQ ID NO: 1384217 - RNA, 19 nt, Homo sapiens
  misc_RNA (1)...(19): siRNA sense strand
gaaaaccuguggauaucug

SEQ ID NO: 1384218 - RNA, 19 nt, Homo sapiens
  misc_RNA (1)...(19): siRNA sense strand
ccugaggucuugaggaaag

SEQ ID NO: 1384219 - RNA, 19 nt, Homo sapiens
  misc_RNA (1)...(19): siRNA sense strand
gcagcaggcuugguuuggu

SEQ ID NO: 1384220 - RNA, 19 nt, Homo sapiens
  misc_RNA (1)...(19): siRNA sense strand
gagcagcaggcuugguuug

SEQ ID NO: 1384221 - RNA, 19 nt, Homo sapiens
  misc_RNA (1)...(19): siRNA sense strand
ccgcaggugugugaagaaa

SEQ ID NO: 1384222 - RNA, 19 nt, Homo sapiens
  misc_RNA (1)...(19): siRNA sense strand
gggaugaggaucagcacaa

SEQ ID NO: 1384223 - RNA, 19 nt, Homo sapiens
  misc_RNA (1)...(19): siRNA sense strand
ggaugaggaucagcacaag

SEQ ID NO: 1384224 - RNA, 19 nt, Homo sapiens
  misc_RNA (1)...(19): siRNA sense strand
gauaugucgacuucugaaa

SEQ ID NO: 1384225 - RNA, 19 nt, Homo sapiens
  misc_RNA (1)...(19): siRNA sense strand
gccagccacuguauacauc

SEQ ID NO: 1384226 - RNA, 19 nt, Homo sapiens
  misc_RNA (1)...(19): siRNA sense strand
uggcaagggugcuuucucu

SEQ ID NO: 1384227 - RNA, 19 nt, Homo sapiens
  misc_RNA (1)...(19): siRNA sense strand
gauuucccaucaccagaau

SEQ ID NO: 1384228 - RNA, 19 nt, Homo sapiens
  misc_RNA (1)...(19): siRNA sense strand
ucaggagacuguggagugu

SEQ ID NO: 1384229 - RNA, 19 nt, Homo sapiens
  misc_RNA (1)...(19): siRNA sense strand
accagaugcugaccauaaa

SEQ ID NO: 1384230 - RNA, 19 nt, Homo sapiens
  misc_RNA (1)...(19): siRNA sense strand
ggauaugucgacuucugaa

SEQ ID NO: 1384231 - RNA, 19 nt, Homo sapiens
  misc_RNA (1)...(19): siRNA sense strand
uucacuaccucguguuuga

SEQ ID NO: 1384232 - RNA, 19 nt, Homo sapiens
  misc_RNA (1)...(19): siRNA sense strand
ucaaccagaugcugaccau

SEQ ID NO: 1384233 - RNA, 19 nt, Homo sapiens
  misc_RNA (1)...(19): siRNA sense strand
ggccagagaguacuacagu

SEQ ID NO: 1384234 - RNA, 19 nt, Homo sapiens
  misc_RNA (1)...(19): siRNA sense strand
ggcucaauguccacuauca

SEQ ID NO: 1384235 - RNA, 19 nt, Homo sapiens
  misc_RNA (1)...(19): siRNA sense strand
gauuacagaacagcugauu

SEQ ID NO: 1384236 - RNA, 19 nt, Homo sapiens
  misc_RNA (1)...(19): siRNA sense strand
aucaagggcuccacagaga

SEQ ID NO: 1384237 - RNA, 19 nt, Homo sapiens
  misc_RNA (1)...(19): siRNA sense strand
ggaucaagggcuccacaga

SEQ ID NO: 1384238 - RNA, 19 nt, Homo sapiens
  misc_RNA (1)...(19): siRNA sense strand
aaucaucaauaccaagaag

SEQ ID NO: 1384239 - RNA, 19 nt, Homo sapiens
  misc_RNA (1)...(19): siRNA sense strand
gggaucaccagaaacuaga

SEQ ID NO: 1384240 - RNA, 19 nt, Homo sapiens
  misc_RNA (1)...(19): siRNA sense strand
cagcgugcaucgccuacau

SEQ ID NO: 1384241 - RNA, 19 nt, Homo sapiens
  misc_RNA (1)...(19): siRNA sense strand
ccaugacaguauuucugaa

SEQ ID NO: 1384242 - RNA, 19 nt, Homo sapiens
  misc_RNA (1)...(19): siRNA sense strand
ccucguguuugaccuuguu

SEQ ID NO: 1384243 - RNA, 19 nt, Homo sapiens
  misc_RNA (1)...(19): siRNA sense strand
ucggauaugucgacuucug

SEQ ID NO: 1384244 - RNA, 19 nt, Homo sapiens
  misc_RNA (1)...(19): siRNA sense strand
cgaaaacaggagaucauua

SEQ ID NO: 1384245 - RNA, 19 nt, Homo sapiens
  misc_RNA (1)...(19): siRNA sense strand
ucaucaauaccaagaaguu

SEQ ID NO: 1384246 - RNA, 19 nt, Homo sapiens
  misc_RNA (1)...(19): siRNA sense strand
gccaaaagccuauugaaca

SEQ ID NO: 1384247 - RNA, 19 nt, Homo sapiens
  misc_RNA (1)...(19): siRNA sense strand
gaugccagccacuguauac

SEQ ID NO: 1384248 - RNA, 19 nt, Homo sapiens
  misc_RNA (1)...(19): siRNA sense strand
agaacuugaucaaccagau

SEQ ID NO: 1384249 - RNA, 19 nt, Homo sapiens
  misc_RNA (1)...(19): siRNA sense strand
acagcaagccuauccauac

SEQ ID NO: 1384250 - RNA, 19 nt, Homo sapiens
  misc_RNA (1)...(19): siRNA sense strand
caucaacaauggggacuuu

SEQ ID NO: 1384251 - RNA, 19 nt, Homo sapiens
  misc_RNA (1)...(19): siRNA sense strand
agagaguacuacagugaag

SEQ ID NO: 1384252 - RNA, 19 nt, Homo sapiens
  misc_RNA (1)...(19): siRNA sense strand
cagagaguacuacagugaa

SEQ ID NO: 1384253 - RNA, 19 nt, Homo sapiens
  misc_RNA (1)...(19): siRNA sense strand
caucaauaccaagaaguug

SEQ ID NO: 1384254 - RNA, 19 nt, Homo sapiens
  misc_RNA (1)...(19): siRNA sense strand
guccgcaggugugugaaga

SEQ ID NO: 1384255 - RNA, 19 nt, Homo sapiens
  misc_RNA (1)...(19): siRNA sense strand
gcaggugugugaagaaaac

SEQ ID NO: 1384256 - RNA, 19 nt, Homo sapiens
  misc_RNA (1)...(19): siRNA sense strand
uuugaggccuacacgaaga

SEQ ID NO: 1384257 - RNA, 19 nt, Homo sapiens
  misc_RNA (1)...(19): siRNA sense strand
ggacacgguaacuccugaa

SEQ ID NO: 1384258 - RNA, 19 nt, Homo sapiens
  misc_RNA (1)...(19): siRNA sense strand
ccagaaugggacacgguaa

SEQ ID NO: 1384259 - RNA, 19 nt, Homo sapiens
  misc_RNA (1)...(19): siRNA sense strand
acauccgccucacccagua

SEQ ID NO: 1384260 - RNA, 19 nt, Homo sapiens
  misc_RNA (1)...(19): siRNA sense strand
ugaaacauccaaacaucgu

SEQ ID NO: 1384261 - RNA, 19 nt, Homo sapiens
  misc_RNA (1)...(19): siRNA sense strand
gcugcaacaccaccacaga

SEQ ID NO: 1384262 - RNA, 19 nt, Homo sapiens
  misc_RNA (1)...(19): siRNA sense strand
aaaagccuauugaacaaga

SEQ ID NO: 1384263 - RNA, 19 nt, Homo sapiens
  misc_RNA (1)...(19): siRNA sense strand
ugaggaaagaucccuaugg

SEQ ID NO: 1384264 - RNA, 19 nt, Homo sapiens
  misc_RNA (1)...(19): siRNA sense strand
ccuacacgaagauuuguga

SEQ ID NO: 1384265 - RNA, 19 nt, Homo sapiens
  misc_RNA (1)...(19): siRNA sense strand
ggaaagaucccuauggaaa

SEQ ID NO: 1384266 - RNA, 19 nt, Homo sapiens
  misc_RNA (1)...(19): siRNA sense strand
gaggaaagaucccuaugga

SEQ ID NO: 1384267 - RNA, 19 nt, Homo sapiens
  misc_RNA (1)...(19): siRNA sense strand
caggagaucauuaagauua

SEQ ID NO: 1384268 - RNA, 19 nt, Homo sapiens
  misc_RNA (1)...(19): siRNA sense strand
gcucggauaugucgacuuc

SEQ ID NO: 1384269 - RNA, 19 nt, Homo sapiens
  misc_RNA (1)...(19): siRNA sense strand
gaaaacaggagaucauuaa

SEQ ID NO: 1384270 - RNA, 19 nt, Homo sapiens
  misc_RNA (1)...(19): siRNA sense strand
ggagcuguuugaagacauu

SEQ ID NO: 1384271 - RNA, 19 nt, Homo sapiens
  misc_RNA (1)...(19): siRNA sense strand
guacuacagugaagcagau

SEQ ID NO: 1384272 - RNA, 19 nt, Homo sapiens
  misc_RNA (1)...(19): siRNA sense strand
gaacgugaggcucggauau

SEQ ID NO: 1384273 - RNA, 19 nt, Homo sapiens
  misc_RNA (1)...(19): siRNA sense strand
uuacagaacagcugauuga

SEQ ID NO: 1384274 - RNA, 19 nt, Homo sapiens
  misc_RNA (1)...(19): siRNA sense strand
guacacaacgcuacagaug

SEQ ID NO: 1384275 - RNA, 19 nt, Homo sapiens
  misc_RNA (1)...(19): siRNA sense strand
gcagaugccagccacugua

SEQ ID NO: 1384276 - RNA, 19 nt, Homo sapiens
  misc_RNA (1)...(19): siRNA sense strand
ccgucaagcuggcugauuu

SEQ ID NO: 1384277 - RNA, 19 nt, Homo sapiens
  misc_RNA (1)...(19): siRNA sense strand
gauggcaaguggcucaaug

SEQ ID NO: 1384278 - RNA, 19 nt, Homo sapiens
  misc_RNA (1)...(19): siRNA sense strand
gagagcagcaggcuugguu

SEQ ID NO: 1384279 - RNA, 19 nt, Homo sapiens
  misc_RNA (1)...(19): siRNA sense strand
aacaggagaucauuaagau

SEQ ID NO: 1384280 - RNA, 19 nt, Homo sapiens
  misc_RNA (1)...(19): siRNA sense strand
aaacaggagaucauuaaga

SEQ ID NO: 1384281 - RNA, 19 nt, Homo sapiens
  misc_RNA (1)...(19): siRNA sense strand
gcaagggugcuuucucugu

SEQ ID NO: 1384282 - RNA, 19 nt, Homo sapiens
  misc_RNA (1)...(19): siRNA sense strand
ccagagaguacuacaguga

SEQ ID NO: 1384283 - RNA, 19 nt, Homo sapiens
  misc_RNA (1)...(19): siRNA sense strand
gaacuugaucaaccagaug

SEQ ID NO: 1384284 - RNA, 19 nt, Homo sapiens
  misc_RNA (1)...(19): siRNA sense strand
gaacagcaagccuauccau

SEQ ID NO: 1384285 - RNA, 19 nt, Homo sapiens
  misc_RNA (1)...(19): siRNA sense strand
ggagaguguuaaccacauc

SEQ ID NO: 1384286 - RNA, 19 nt, Homo sapiens
  misc_RNA (1)...(19): siRNA sense strand
agaaucuccuguccaagaa

SEQ ID NO: 1384287 - RNA, 19 nt, Homo sapiens
  misc_RNA (1)...(19): siRNA sense strand
gaaagaucccuauggaaaa

SEQ ID NO: 1384288 - RNA, 19 nt, Homo sapiens
  misc_RNA (1)...(19): siRNA sense strand
cagcaggcuugguuugguu

SEQ ID NO: 1384289 - RNA, 19 nt, Homo sapiens
  misc_RNA (1)...(19): siRNA sense strand
ccaaaagccuauugaacaa

SEQ ID NO: 1384290 - RNA, 19 nt, Homo sapiens
  misc_RNA (1)...(19): siRNA sense strand
ucugaaacauccaaacauc

SEQ ID NO: 1384291 - RNA, 19 nt, Homo sapiens
  misc_RNA (1)...(19): siRNA sense strand
caacaccaccacagaagau

SEQ ID NO: 1384292 - RNA, 19 nt, Homo sapiens
  misc_RNA (1)...(19): siRNA sense strand
gcaacaccaccacagaaga

SEQ ID NO: 1384293 - RNA, 19 nt, Homo sapiens
  misc_RNA (1)...(19): siRNA sense strand
gaccauaaacccagcaaag

SEQ ID NO: 1384294 - RNA, 19 nt, Homo sapiens
  misc_RNA (1)...(19): siRNA sense strand
gcggggagcuguuugaaga

SEQ ID NO: 1384295 - RNA, 19 nt, Homo sapiens
  misc_RNA (1)...(19): siRNA sense strand
gcgccuccaugacaguauu

SEQ ID NO: 1384296 - RNA, 19 nt, Homo sapiens
  misc_RNA (1)...(19): siRNA sense strand
gcaccagccagucagaaga

SEQ ID NO: 1384297 - RNA, 19 nt, Homo sapiens
  misc_RNA (1)...(19): siRNA sense strand
aaccagaugcugaccauaa

SEQ ID NO: 1384298 - RNA, 19 nt, Homo sapiens
  misc_RNA (1)...(19): siRNA sense strand
aggagacuguggaguguuu

SEQ ID NO: 1384299 - RNA, 19 nt, Homo sapiens
  misc_RNA (1)...(19): siRNA sense strand
ggagaucauuaagauuaca

SEQ ID NO: 1384300 - RNA, 19 nt, Homo sapiens
  misc_RNA (1)...(19): siRNA sense strand
uaugucgacuucugaaaca

SEQ ID NO: 1384301 - RNA, 19 nt, Homo sapiens
  misc_RNA (1)...(19): siRNA sense strand
ccaagaacagcaagccuau

SEQ ID NO: 1384302 - RNA, 19 nt, Homo sapiens
  misc_RNA (1)...(19): siRNA sense strand
gaaaaccuguggauaucug

SEQ ID NO: 1384303 - RNA, 19 nt, Homo sapiens
  misc_RNA (1)...(19): siRNA sense strand
ccugaggucuugaggaaag

SEQ ID NO: 1384304 - RNA, 19 nt, Homo sapiens
  misc_RNA (1)...(19): siRNA sense strand
gcagcaggcuugguuuggu

SEQ ID NO: 1384305 - RNA, 19 nt, Homo sapiens
  misc_RNA (1)...(19): siRNA sense strand
gagcagcaggcuugguuug

SEQ ID NO: 1384306 - RNA, 19 nt, Homo sapiens
  misc_RNA (1)...(19): siRNA sense strand
ccgcaggugugugaagaaa

SEQ ID NO: 1384307 - RNA, 19 nt, Homo sapiens
  misc_RNA (1)...(19): siRNA sense strand
gggaugaggaucagcacaa

SEQ ID NO: 1384308 - RNA, 19 nt, Homo sapiens
  misc_RNA (1)...(19): siRNA sense strand
ggaugaggaucagcacaag

SEQ ID NO: 1384309 - RNA, 19 nt, Homo sapiens
  misc_RNA (1)...(19): siRNA sense strand
gauaugucgacuucugaaa

SEQ ID NO: 1384310 - RNA, 19 nt, Homo sapiens
  misc_RNA (1)...(19): siRNA sense strand
gccagccacuguauacauc

SEQ ID NO: 1384311 - RNA, 19 nt, Homo sapiens
  misc_RNA (1)...(19): siRNA sense strand
uggcaagggugcuuucucu

SEQ ID NO: 1384312 - RNA, 19 nt, Homo sapiens
  misc_RNA (1)...(19): siRNA sense strand
gauuucccaucaccagaau

SEQ ID NO: 1384313 - RNA, 19 nt, Homo sapiens
  misc_RNA (1)...(19): siRNA sense strand
ucaggagacuguggagugu

SEQ ID NO: 1384314 - RNA, 19 nt, Homo sapiens
  misc_RNA (1)...(19): siRNA sense strand
accagaugcugaccauaaa

SEQ ID NO: 1384315 - RNA, 19 nt, Homo sapiens
  misc_RNA (1)...(19): siRNA sense strand
ggauaugucgacuucugaa

SEQ ID NO: 1384316 - RNA, 19 nt, Homo sapiens
  misc_RNA (1)...(19): siRNA sense strand
uucacuaccucguguuuga

SEQ ID NO: 1384317 - RNA, 19 nt, Homo sapiens
  misc_RNA (1)...(19): siRNA sense strand
ucaaccagaugcugaccau

SEQ ID NO: 1384318 - RNA, 19 nt, Homo sapiens
  misc_RNA (1)...(19): siRNA sense strand
ggccagagaguacuacagu

SEQ ID NO: 1384319 - RNA, 19 nt, Homo sapiens
  misc_RNA (1)...(19): siRNA sense strand
ggcucaauguccacuauca

SEQ ID NO: 1384320 - RNA, 19 nt, Homo sapiens
  misc_RNA (1)...(19): siRNA sense strand
gauuacagaacagcugauu

SEQ ID NO: 1384321 - RNA, 19 nt, Homo sapiens
  misc_RNA (1)...(19): siRNA sense strand
aucaagggcuccacagaga

SEQ ID NO: 1384322 - RNA, 19 nt, Homo sapiens
  misc_RNA (1)...(19): siRNA sense strand
ggaucaagggcuccacaga

SEQ ID NO: 1384323 - RNA, 19 nt, Homo sapiens
  misc_RNA (1)...(19): siRNA sense strand
aaucaucaauaccaagaag

SEQ ID NO: 1384324 - RNA, 19 nt, Homo sapiens
  misc_RNA (1)...(19): siRNA sense strand
gggaucaccagaaacuaga

SEQ ID NO: 1384325 - RNA, 19 nt, Homo sapiens
  misc_RNA (1)...(19): siRNA sense strand
cagcgugcaucgccuacau

SEQ ID NO: 1384326 - RNA, 19 nt, Homo sapiens
  misc_RNA (1)...(19): siRNA sense strand
ccaugacaguauuucugaa

SEQ ID NO: 1384327 - RNA, 19 nt, Homo sapiens
  misc_RNA (1)...(19): siRNA sense strand
ccucguguuugaccuuguu

SEQ ID NO: 1384328 - RNA, 19 nt, Homo sapiens
  misc_RNA (1)...(19): siRNA sense strand
ucggauaugucgacuucug

SEQ ID NO: 1384329 - RNA, 19 nt, Homo sapiens
  misc_RNA (1)...(19): siRNA sense strand
cgaaaacaggagaucauua

SEQ ID NO: 1384330 - RNA, 19 nt, Homo sapiens
  misc_RNA (1)...(19): siRNA sense strand
ucaucaauaccaagaaguu

SEQ ID NO: 1384331 - RNA, 19 nt, Homo sapiens
  misc_RNA (1)...(19): siRNA sense strand
gccaaaagccuauugaaca

SEQ ID NO: 1384332 - RNA, 19 nt, Homo sapiens
  misc_RNA (1)...(19): siRNA sense strand
gaugccagccacuguauac

SEQ ID NO: 1384333 - RNA, 19 nt, Homo sapiens
  misc_RNA (1)...(19): siRNA sense strand
agaacuugaucaaccagau

SEQ ID NO: 1384334 - RNA, 19 nt, Homo sapiens
  misc_RNA (1)...(19): siRNA sense strand
acagcaagccuauccauac

SEQ ID NO: 1384335 - RNA, 19 nt, Homo sapiens
  misc_RNA (1)...(19): siRNA sense strand
caucaacaauggggacuuu

SEQ ID NO: 1384336 - RNA, 19 nt, Homo sapiens
  misc_RNA (1)...(19): siRNA sense strand
agagaguacuacagugaag

SEQ ID NO: 1384337 - RNA, 19 nt, Homo sapiens
  misc_RNA (1)...(19): siRNA sense strand
cagagaguacuacagugaa

SEQ ID NO: 1384338 - RNA, 19 nt, Homo sapiens
  misc_RNA (1)...(19): siRNA sense strand
caucaauaccaagaaguug

SEQ ID NO: 1384339 - RNA, 19 nt, Homo sapiens
  misc_RNA (1)...(19): siRNA sense strand
guccgcaggugugugaaga

SEQ ID NO: 1384340 - RNA, 19 nt, Homo sapiens
  misc_RNA (1)...(19): siRNA sense strand
gcaggugugugaagaaaac

SEQ ID NO: 1384341 - RNA, 19 nt, Homo sapiens
  misc_RNA (1)...(19): siRNA sense strand
uuugaggccuacacgaaga

SEQ ID NO: 1384342 - RNA, 19 nt, Homo sapiens
  misc_RNA (1)...(19): siRNA sense strand
ggacacgguaacuccugaa

SEQ ID NO: 1384343 - RNA, 19 nt, Homo sapiens
  misc_RNA (1)...(19): siRNA sense strand
ccagaaugggacacgguaa

SEQ ID NO: 1384344 - RNA, 19 nt, Homo sapiens
  misc_RNA (1)...(19): siRNA sense strand
acauccgccucacccagua

SEQ ID NO: 1384345 - RNA, 19 nt, Homo sapiens
  misc_RNA (1)...(19): siRNA sense strand
ugaaacauccaaacaucgu

SEQ ID NO: 1384346 - RNA, 19 nt, Homo sapiens
  misc_RNA (1)...(19): siRNA sense strand
gcugcaacaccaccacaga

SEQ ID NO: 1384347 - RNA, 19 nt, Homo sapiens
  misc_RNA (1)...(19): siRNA sense strand
aaaagccuauugaacaaga

SEQ ID NO: 1384348 - RNA, 19 nt, Homo sapiens
  misc_RNA (1)...(19): siRNA sense strand
ugaggaaagaucccuaugg

SEQ ID NO: 1384349 - RNA, 19 nt, Homo sapiens
  misc_RNA (1)...(19): siRNA sense strand
ccuacacgaagauuuguga

SEQ ID NO: 1384350 - RNA, 19 nt, Homo sapiens
  misc_RNA (1)...(19): siRNA sense strand
ggaaagaucccuauggaaa

SEQ ID NO: 1384351 - RNA, 19 nt, Homo sapiens
  misc_RNA (1)...(19): siRNA sense strand
gaggaaagaucccuaugga

SEQ ID NO: 1384352 - RNA, 19 nt, Homo sapiens
  misc_RNA (1)...(19): siRNA sense strand
caggagaucauuaagauua

SEQ ID NO: 1384353 - RNA, 19 nt, Homo sapiens
  misc_RNA (1)...(19): siRNA sense strand
gcucggauaugucgacuuc

SEQ ID NO: 1384354 - RNA, 19 nt, Homo sapiens
  misc_RNA (1)...(19): siRNA sense strand
gaaaacaggagaucauuaa

SEQ ID NO: 1384355 - RNA, 19 nt, Homo sapiens
  misc_RNA (1)...(19): siRNA sense strand
ggagcuguuugaagacauu

SEQ ID NO: 1384356 - RNA, 19 nt, Homo sapiens
  misc_RNA (1)...(19): siRNA sense strand
guacuacagugaagcagau

SEQ ID NO: 1384357 - RNA, 19 nt, Homo sapiens
  misc_RNA (1)...(19): siRNA sense strand
gaacgugaggcucggauau

SEQ ID NO: 1384358 - RNA, 19 nt, Homo sapiens
  misc_RNA (1)...(19): siRNA sense strand
uuacagaacagcugauuga

SEQ ID NO: 1384359 - RNA, 19 nt, Homo sapiens
  misc_RNA (1)...(19): siRNA sense strand
guacacaacgcuacagaug

SEQ ID NO: 1384360 - RNA, 19 nt, Homo sapiens
  misc_RNA (1)...(19): siRNA sense strand
gcagaugccagccacugua

SEQ ID NO: 1384361 - RNA, 19 nt, Homo sapiens
  misc_RNA (1)...(19): siRNA sense strand
ccgucaagcuggcugauuu

SEQ ID NO: 1384362 - RNA, 19 nt, Homo sapiens
  misc_RNA (1)...(19): siRNA sense strand
gauggcaaguggcucaaug

SEQ ID NO: 1384363 - RNA, 19 nt, Homo sapiens
  misc_RNA (1)...(19): siRNA sense strand
gagagcagcaggcuugguu

SEQ ID NO: 1384364 - RNA, 19 nt, Homo sapiens
  misc_RNA (1)...(19): siRNA sense strand
aacaggagaucauuaagau

SEQ ID NO: 1384365 - RNA, 19 nt, Homo sapiens
  misc_RNA (1)...(19): siRNA sense strand
aaacaggagaucauuaaga

SEQ ID NO: 1384366 - RNA, 19 nt, Homo sapiens
  misc_RNA (1)...(19): siRNA sense strand
gcaagggugcuuucucugu

SEQ ID NO: 1384367 - RNA, 19 nt, Homo sapiens
  misc_RNA (1)...(19): siRNA sense strand
ccagagaguacuacaguga

SEQ ID NO: 1384368 - RNA, 19 nt, Homo sapiens
  misc_RNA (1)...(19): siRNA sense strand
gaacuugaucaaccagaug

SEQ ID NO: 1384369 - RNA, 19 nt, Homo sapiens
  misc_RNA (1)...(19): siRNA sense strand
gaacagcaagccuauccau

SEQ ID NO: 1384370 - RNA, 19 nt, Homo sapiens
  misc_RNA (1)...(19): siRNA sense strand
ggagaguguuaaccacauc

SEQ ID NO: 1384371 - RNA, 19 nt, Homo sapiens
  misc_RNA (1)...(19): siRNA sense strand
agaaucuccuguccaagaa

SEQ ID NO: 1384372 - RNA, 19 nt, Homo sapiens
  misc_RNA (1)...(19): siRNA sense strand
gaaagaucccuauggaaaa

SEQ ID NO: 1384373 - RNA, 19 nt, Homo sapiens
  misc_RNA (1)...(19): siRNA sense strand
cagcaggcuugguuugguu

SEQ ID NO: 1384374 - RNA, 19 nt, Homo sapiens
  misc_RNA (1)...(19): siRNA sense strand
ccaaaagccuauugaacaa

SEQ ID NO: 1384375 - RNA, 19 nt, Homo sapiens
  misc_RNA (1)...(19): siRNA sense strand
ucugaaacauccaaacauc

SEQ ID NO: 1384376 - RNA, 19 nt, Homo sapiens
  misc_RNA (1)...(19): siRNA sense strand
caacaccaccacagaagau

SEQ ID NO: 1384377 - RNA, 19 nt, Homo sapiens
  misc_RNA (1)...(19): siRNA sense strand
gcaacaccaccacagaaga

SEQ ID NO: 1384378 - RNA, 19 nt, Homo sapiens
  misc_RNA (1)...(19): siRNA sense strand
gaccauaaacccagcaaag

SEQ ID NO: 1384379 - RNA, 19 nt, Homo sapiens
  misc_RNA (1)...(19): siRNA sense strand
gcggggagcuguuugaaga

SEQ ID NO: 1384380 - RNA, 19 nt, Homo sapiens
  misc_RNA (1)...(19): siRNA sense strand
gcgccuccaugacaguauu

SEQ ID NO: 1384381 - RNA, 19 nt, Homo sapiens
  misc_RNA (1)...(19): siRNA sense strand
gcaccagccagucagaaga

SEQ ID NO: 1384382 - RNA, 19 nt, Homo sapiens
  misc_RNA (1)...(19): siRNA sense strand
aaccagaugcugaccauaa

SEQ ID NO: 1384383 - RNA, 19 nt, Homo sapiens
  misc_RNA (1)...(19): siRNA sense strand
aggagacuguggaguguuu

SEQ ID NO: 1384384 - RNA, 19 nt, Homo sapiens
  misc_RNA (1)...(19): siRNA sense strand
ggagaucauuaagauuaca

SEQ ID NO: 1384385 - RNA, 19 nt, Homo sapiens
  misc_RNA (1)...(19): siRNA sense strand
uaugucgacuucugaaaca

SEQ ID NO: 1384386 - RNA, 19 nt, Homo sapiens
  misc_RNA (1)...(19): siRNA sense strand
ccaagaacagcaagccuau

SEQ ID NO: 1384387 - RNA, 19 nt, Homo sapiens
  misc_RNA (1)...(19): siRNA sense strand
gaaaaccuguggauaucug

SEQ ID NO: 1384388 - RNA, 19 nt, Homo sapiens
  misc_RNA (1)...(19): siRNA sense strand
ccugaggucuugaggaaag

SEQ ID NO: 1384389 - RNA, 19 nt, Homo sapiens
  misc_RNA (1)...(19): siRNA sense strand
gcagcaggcuugguuuggu

SEQ ID NO: 1384390 - RNA, 19 nt, Homo sapiens
  misc_RNA (1)...(19): siRNA sense strand
gagcagcaggcuugguuug

SEQ ID NO: 1384391 - RNA, 19 nt, Homo sapiens
  misc_RNA (1)...(19): siRNA sense strand
ccgcaggugugugaagaaa

SEQ ID NO: 1384392 - RNA, 19 nt, Homo sapiens
  misc_RNA (1)...(19): siRNA sense strand
gggaugaggaucagcacaa

SEQ ID NO: 1384393 - RNA, 19 nt, Homo sapiens
  misc_RNA (1)...(19): siRNA sense strand
ggaugaggaucagcacaag

SEQ ID NO: 1384394 - RNA, 19 nt, Homo sapiens
  misc_RNA (1)...(19): siRNA sense strand
gauaugucgacuucugaaa

SEQ ID NO: 1384395 - RNA, 19 nt, Homo sapiens
  misc_RNA (1)...(19): siRNA sense strand
gccagccacuguauacauc

SEQ ID NO: 1384396 - RNA, 19 nt, Homo sapiens
  misc_RNA (1)...(19): siRNA sense strand
uggcaagggugcuuucucu

SEQ ID NO: 1384397 - RNA, 19 nt, Homo sapiens
  misc_RNA (1)...(19): siRNA sense strand
gauuucccaucaccagaau

SEQ ID NO: 1384398 - RNA, 19 nt, Homo sapiens
  misc_RNA (1)...(19): siRNA sense strand
ucaggagacuguggagugu

SEQ ID NO: 1384399 - RNA, 19 nt, Homo sapiens
  misc_RNA (1)...(19): siRNA sense strand
accagaugcugaccauaaa

SEQ ID NO: 1384400 - RNA, 19 nt, Homo sapiens
  misc_RNA (1)...(19): siRNA sense strand
ggauaugucgacuucugaa

SEQ ID NO: 1384401 - RNA, 19 nt, Homo sapiens
  misc_RNA (1)...(19): siRNA sense strand
uucacuaccucguguuuga

SEQ ID NO: 1384402 - RNA, 19 nt, Homo sapiens
  misc_RNA (1)...(19): siRNA sense strand
ucaaccagaugcugaccau

SEQ ID NO: 1384403 - RNA, 19 nt, Homo sapiens
  misc_RNA (1)...(19): siRNA sense strand
ggccagagaguacuacagu

SEQ ID NO: 1384404 - RNA, 19 nt, Homo sapiens
  misc_RNA (1)...(19): siRNA sense strand
ggcucaauguccacuauca

SEQ ID NO: 1384405 - RNA, 19 nt, Homo sapiens
  misc_RNA (1)...(19): siRNA sense strand
gauuacagaacagcugauu

SEQ ID NO: 1384406 - RNA, 19 nt, Homo sapiens
  misc_RNA (1)...(19): siRNA sense strand
aucaagggcuccacagaga

SEQ ID NO: 1384407 - RNA, 19 nt, Homo sapiens
  misc_RNA (1)...(19): siRNA sense strand
ggaucaagggcuccacaga

SEQ ID NO: 1384408 - RNA, 19 nt, Homo sapiens
  misc_RNA (1)...(19): siRNA sense strand
aaucaucaauaccaagaag

SEQ ID NO: 1384409 - RNA, 19 nt, Homo sapiens
  misc_RNA (1)...(19): siRNA sense strand
gggaucaccagaaacuaga

SEQ ID NO: 1384410 - RNA, 19 nt, Homo sapiens
  misc_RNA (1)...(19): siRNA sense strand
cagcgugcaucgccuacau

SEQ ID NO: 1384411 - RNA, 19 nt, Homo sapiens
  misc_RNA (1)...(19): siRNA sense strand
ccaugacaguauuucugaa

SEQ ID NO: 1384412 - RNA, 19 nt, Homo sapiens
  misc_RNA (1)...(19): siRNA sense strand
ccucguguuugaccuuguu

SEQ ID NO: 1384413 - RNA, 19 nt, Homo sapiens
  misc_RNA (1)...(19): siRNA sense strand
ucggauaugucgacuucug

SEQ ID NO: 1384414 - RNA, 19 nt, Homo sapiens
  misc_RNA (1)...(19): siRNA sense strand
cgaaaacaggagaucauua

SEQ ID NO: 1384415 - RNA, 19 nt, Homo sapiens
  misc_RNA (1)...(19): siRNA sense strand
ucaucaauaccaagaaguu

SEQ ID NO: 1384416 - RNA, 19 nt, Homo sapiens
  misc_RNA (1)...(19): siRNA sense strand
gccaaaagccuauugaaca

SEQ ID NO: 1384417 - RNA, 19 nt, Homo sapiens
  misc_RNA (1)...(19): siRNA sense strand
gaugccagccacuguauac

SEQ ID NO: 1384418 - RNA, 19 nt, Homo sapiens
  misc_RNA (1)...(19): siRNA sense strand
agaacuugaucaaccagau

SEQ ID NO: 1384419 - RNA, 19 nt, Homo sapiens
  misc_RNA (1)...(19): siRNA sense strand
acagcaagccuauccauac

SEQ ID NO: 1384420 - RNA, 19 nt, Homo sapiens
  misc_RNA (1)...(19): siRNA sense strand
caucaacaauggggacuuu

SEQ ID NO: 1384421 - RNA, 19 nt, Homo sapiens
  misc_RNA (1)...(19): siRNA sense strand
agagaguacuacagugaag

SEQ ID NO: 1384422 - RNA, 19 nt, Homo sapiens
  misc_RNA (1)...(19): siRNA sense strand
cagagaguacuacagugaa

SEQ ID NO: 1384423 - RNA, 19 nt, Homo sapiens
  misc_RNA (1)...(19): siRNA sense strand
caucaauaccaagaaguug

SEQ ID NO: 1384424 - RNA, 19 nt, Homo sapiens
  misc_RNA (1)...(19): siRNA sense strand
guccgcaggugugugaaga

SEQ ID NO: 1384425 - RNA, 19 nt, Homo sapiens
  misc_RNA (1)...(19): siRNA sense strand
gcaggugugugaagaaaac

SEQ ID NO: 1384426 - RNA, 19 nt, Homo sapiens
  misc_RNA (1)...(19): siRNA sense strand
uuugaggccuacacgaaga

SEQ ID NO: 1384427 - RNA, 19 nt, Homo sapiens
  misc_RNA (1)...(19): siRNA sense strand
ggacacgguaacuccugaa

SEQ ID NO: 1384428 - RNA, 19 nt, Homo sapiens
  misc_RNA (1)...(19): siRNA sense strand
ccagaaugggacacgguaa

SEQ ID NO: 1384429 - RNA, 19 nt, Homo sapiens
  misc_RNA (1)...(19): siRNA sense strand
acauccgccucacccagua

SEQ ID NO: 1384430 - RNA, 19 nt, Homo sapiens
  misc_RNA (1)...(19): siRNA sense strand
ugaaacauccaaacaucgu

SEQ ID NO: 1384431 - RNA, 19 nt, Homo sapiens
  misc_RNA (1)...(19): siRNA sense strand
gcugcaacaccaccacaga

SEQ ID NO: 1384432 - RNA, 19 nt, Homo sapiens
  misc_RNA (1)...(19): siRNA sense strand
aaaagccuauugaacaaga

SEQ ID NO: 1384433 - RNA, 19 nt, Homo sapiens
  misc_RNA (1)...(19): siRNA sense strand
ugaggaaagaucccuaugg

SEQ ID NO: 1384434 - RNA, 19 nt, Homo sapiens
  misc_RNA (1)...(19): siRNA sense strand
ccuacacgaagauuuguga

SEQ ID NO: 1384435 - RNA, 19 nt, Homo sapiens
  misc_RNA (1)...(19): siRNA sense strand
ggaaagaucccuauggaaa

SEQ ID NO: 1384436 - RNA, 19 nt, Homo sapiens
  misc_RNA (1)...(19): siRNA sense strand
gaggaaagaucccuaugga

SEQ ID NO: 1384437 - RNA, 19 nt, Homo sapiens
  misc_RNA (1)...(19): siRNA sense strand
caggagaucauuaagauua

SEQ ID NO: 1384438 - RNA, 19 nt, Homo sapiens
  misc_RNA (1)...(19): siRNA sense strand
gcucggauaugucgacuuc

SEQ ID NO: 1384439 - RNA, 19 nt, Homo sapiens
  misc_RNA (1)...(19): siRNA sense strand
gaaaacaggagaucauuaa

SEQ ID NO: 1384440 - RNA, 19 nt, Homo sapiens
  misc_RNA (1)...(19): siRNA sense strand
ggagcuguuugaagacauu

SEQ ID NO: 1384441 - RNA, 19 nt, Homo sapiens
  misc_RNA (1)...(19): siRNA sense strand
guacuacagugaagcagau

SEQ ID NO: 1384442 - RNA, 19 nt, Homo sapiens
  misc_RNA (1)...(19): siRNA sense strand
gaacgugaggcucggauau

SEQ ID NO: 1384443 - RNA, 19 nt, Homo sapiens
  misc_RNA (1)...(19): siRNA sense strand
uuacagaacagcugauuga

SEQ ID NO: 1384444 - RNA, 19 nt, Homo sapiens
  misc_RNA (1)...(19): siRNA sense strand
guacacaacgcuacagaug

SEQ ID NO: 1384445 - RNA, 19 nt, Homo sapiens
  misc_RNA (1)...(19): siRNA sense strand
gcagaugccagccacugua

SEQ ID NO: 1384446 - RNA, 19 nt, Homo sapiens
  misc_RNA (1)...(19): siRNA sense strand
ccgucaagcuggcugauuu

SEQ ID NO: 1384447 - RNA, 19 nt, Homo sapiens
  misc_RNA (1)...(19): siRNA sense strand
gauggcaaguggcucaaug

SEQ ID NO: 1384448 - RNA, 19 nt, Homo sapiens
  misc_RNA (1)...(19): siRNA sense strand
gagagcagcaggcuugguu

SEQ ID NO: 1384449 - RNA, 19 nt, Homo sapiens
  misc_RNA (1)...(19): siRNA sense strand
aacaggagaucauuaagau

SEQ ID NO: 1384450 - RNA, 19 nt, Homo sapiens
  misc_RNA (1)...(19): siRNA sense strand
aaacaggagaucauuaaga

SEQ ID NO: 1384451 - RNA, 19 nt, Homo sapiens
  misc_RNA (1)...(19): siRNA sense strand
gcaagggugcuuucucugu

SEQ ID NO: 1384452 - RNA, 19 nt, Homo sapiens
  misc_RNA (1)...(19): siRNA sense strand
ccagagaguacuacaguga

SEQ ID NO: 1384453 - RNA, 19 nt, Homo sapiens
  misc_RNA (1)...(19): siRNA sense strand
gaacuugaucaaccagaug

SEQ ID NO: 1384454 - RNA, 19 nt, Homo sapiens
  misc_RNA (1)...(19): siRNA sense strand
gaacagcaagccuauccau

SEQ ID NO: 1384455 - RNA, 19 nt, Homo sapiens
  misc_RNA (1)...(19): siRNA sense strand
ggagaguguuaaccacauc

SEQ ID NO: 1384456 - RNA, 19 nt, Homo sapiens
  misc_RNA (1)...(19): siRNA sense strand
agaaucuccuguccaagaa

SEQ ID NO: 1384457 - RNA, 19 nt, Homo sapiens
  misc_RNA (1)...(19): siRNA sense strand
gaaagaucccuauggaaaa

SEQ ID NO: 1384458 - RNA, 19 nt, Homo sapiens
  misc_RNA (1)...(19): siRNA sense strand
cagcaggcuugguuugguu

SEQ ID NO: 1384459 - RNA, 19 nt, Homo sapiens
  misc_RNA (1)...(19): siRNA sense strand
ccaaaagccuauugaacaa

SEQ ID NO: 1384460 - RNA, 19 nt, Homo sapiens
  misc_RNA (1)...(19): siRNA sense strand
ucugaaacauccaaacauc

SEQ ID NO: 1384461 - RNA, 19 nt, Homo sapiens
  misc_RNA (1)...(19): siRNA sense strand
caacaccaccacagaagau

SEQ ID NO: 1384462 - RNA, 19 nt, Homo sapiens
  misc_RNA (1)...(19): siRNA sense strand
gcaacaccaccacagaaga

SEQ ID NO: 1384463 - RNA, 19 nt, Homo sapiens
  misc_RNA (1)...(19): siRNA sense strand
gaccauaaacccagcaaag

SEQ ID NO: 1384464 - RNA, 19 nt, Homo sapiens
  misc_RNA (1)...(19): siRNA sense strand
gcggggagcuguuugaaga

SEQ ID NO: 1384465 - RNA, 19 nt, Homo sapiens
  misc_RNA (1)...(19): siRNA sense strand
gcgccuccaugacaguauu

SEQ ID NO: 1384466 - RNA, 19 nt, Homo sapiens
  misc_RNA (1)...(19): siRNA sense strand
gcaccagccagucagaaga

SEQ ID NO: 1384467 - RNA, 19 nt, Homo sapiens
  misc_RNA (1)...(19): siRNA sense strand
aaccagaugcugaccauaa

SEQ ID NO: 1384468 - RNA, 19 nt, Homo sapiens
  misc_RNA (1)...(19): siRNA sense strand
aggagacuguggaguguuu

SEQ ID NO: 1384469 - RNA, 19 nt, Homo sapiens
  misc_RNA (1)...(19): siRNA sense strand
ggagaucauuaagauuaca

SEQ ID NO: 1384470 - RNA, 19 nt, Homo sapiens
  misc_RNA (1)...(19): siRNA sense strand
uaugucgacuucugaaaca

SEQ ID NO: 1384471 - RNA, 19 nt, Homo sapiens
  misc_RNA (1)...(19): siRNA sense strand
ccaagaacagcaagccuau

SEQ ID NO: 1384472 - RNA, 19 nt, Homo sapiens
  misc_RNA (1)...(19): siRNA sense strand
gaaaaccuguggauaucug

SEQ ID NO: 1384473 - RNA, 19 nt, Homo sapiens
  misc_RNA (1)...(19): siRNA sense strand
ccugaggucuugaggaaag

SEQ ID NO: 1384474 - RNA, 19 nt, Homo sapiens
  misc_RNA (1)...(19): siRNA sense strand
gcagcaggcuugguuuggu

SEQ ID NO: 1384475 - RNA, 19 nt, Homo sapiens
  misc_RNA (1)...(19): siRNA sense strand
gagcagcaggcuugguuug

SEQ ID NO: 1384476 - RNA, 19 nt, Homo sapiens
  misc_RNA (1)...(19): siRNA sense strand
ccgcaggugugugaagaaa

SEQ ID NO: 1384477 - RNA, 19 nt, Homo sapiens
  misc_RNA (1)...(19): siRNA sense strand
gggaugaggaucagcacaa

SEQ ID NO: 1384478 - RNA, 19 nt, Homo sapiens
  misc_RNA (1)...(19): siRNA sense strand
ggaugaggaucagcacaag

SEQ ID NO: 1384479 - RNA, 19 nt, Homo sapiens
  misc_RNA (1)...(19): siRNA sense strand
gauaugucgacuucugaaa

SEQ ID NO: 1384480 - RNA, 19 nt, Homo sapiens
  misc_RNA (1)...(19): siRNA sense strand
gccagccacuguauacauc

SEQ ID NO: 1384481 - RNA, 19 nt, Homo sapiens
  misc_RNA (1)...(19): siRNA sense strand
uggcaagggugcuuucucu

SEQ ID NO: 1384482 - RNA, 19 nt, Homo sapiens
  misc_RNA (1)...(19): siRNA sense strand
gauuucccaucaccagaau

SEQ ID NO: 1384483 - RNA, 19 nt, Homo sapiens
  misc_RNA (1)...(19): siRNA sense strand
ucaggagacuguggagugu

SEQ ID NO: 1384484 - RNA, 19 nt, Homo sapiens
  misc_RNA (1)...(19): siRNA sense strand
accagaugcugaccauaaa

SEQ ID NO: 1384485 - RNA, 19 nt, Homo sapiens
  misc_RNA (1)...(19): siRNA sense strand
ggauaugucgacuucugaa

SEQ ID NO: 1384486 - RNA, 19 nt, Homo sapiens
  misc_RNA (1)...(19): siRNA sense strand
uucacuaccucguguuuga

SEQ ID NO: 1384487 - RNA, 19 nt, Homo sapiens
  misc_RNA (1)...(19): siRNA sense strand
ucaaccagaugcugaccau

SEQ ID NO: 1384488 - RNA, 19 nt, Homo sapiens
  misc_RNA (1)...(19): siRNA sense strand
ggccagagaguacuacagu

SEQ ID NO: 1384489 - RNA, 19 nt, Homo sapiens
  misc_RNA (1)...(19): siRNA sense strand
ggcucaauguccacuauca

SEQ ID NO: 1384490 - RNA, 19 nt, Homo sapiens
  misc_RNA (1)...(19): siRNA sense strand
gauuacagaacagcugauu

SEQ ID NO: 1384491 - RNA, 19 nt, Homo sapiens
  misc_RNA (1)...(19): siRNA sense strand
aucaagggcuccacagaga

SEQ ID NO: 1384492 - RNA, 19 nt, Homo sapiens
  misc_RNA (1)...(19): siRNA sense strand
ggaucaagggcuccacaga

SEQ ID NO: 1384493 - RNA, 19 nt, Homo sapiens
  misc_RNA (1)...(19): siRNA sense strand
aaucaucaauaccaagaag

SEQ ID NO: 1384494 - RNA, 19 nt, Homo sapiens
  misc_RNA (1)...(19): siRNA sense strand
gggaucaccagaaacuaga

SEQ ID NO: 1384495 - RNA, 19 nt, Homo sapiens
  misc_RNA (1)...(19): siRNA sense strand
cagcgugcaucgccuacau

SEQ ID NO: 1384496 - RNA, 19 nt, Homo sapiens
  misc_RNA (1)...(19): siRNA sense strand
ccaugacaguauuucugaa

SEQ ID NO: 1384497 - RNA, 19 nt, Homo sapiens
  misc_RNA (1)...(19): siRNA sense strand
ccucguguuugaccuuguu

SEQ ID NO: 1384498 - RNA, 19 nt, Homo sapiens
  misc_RNA (1)...(19): siRNA sense strand
ucggauaugucgacuucug

SEQ ID NO: 1384499 - RNA, 19 nt, Homo sapiens
  misc_RNA (1)...(19): siRNA sense strand
cgaaaacaggagaucauua

SEQ ID NO: 1384500 - RNA, 19 nt, Homo sapiens
  misc_RNA (1)...(19): siRNA sense strand
ucaucaauaccaagaaguu

SEQ ID NO: 1384501 - RNA, 19 nt, Homo sapiens
  misc_RNA (1)...(19): siRNA sense strand
gccaaaagccuauugaaca

SEQ ID NO: 1384502 - RNA, 19 nt, Homo sapiens
  misc_RNA (1)...(19): siRNA sense strand
gaugccagccacuguauac

SEQ ID NO: 1384503 - RNA, 19 nt, Homo sapiens
  misc_RNA (1)...(19): siRNA sense strand
agaacuugaucaaccagau

SEQ ID NO: 1384504 - RNA, 19 nt, Homo sapiens
  misc_RNA (1)...(19): siRNA sense strand
acagcaagccuauccauac

SEQ ID NO: 1384505 - RNA, 19 nt, Homo sapiens
  misc_RNA (1)...(19): siRNA sense strand
caucaacaauggggacuuu

SEQ ID NO: 1384506 - RNA, 19 nt, Homo sapiens
  misc_RNA (1)...(19): siRNA sense strand
agagaguacuacagugaag

SEQ ID NO: 1384507 - RNA, 19 nt, Homo sapiens
  misc_RNA (1)...(19): siRNA sense strand
cagagaguacuacagugaa

SEQ ID NO: 1384508 - RNA, 19 nt, Homo sapiens
  misc_RNA (1)...(19): siRNA sense strand
caucaauaccaagaaguug

SEQ ID NO: 1384509 - RNA, 19 nt, Homo sapiens
  misc_RNA (1)...(19): siRNA sense strand
guccgcaggugugugaaga

SEQ ID NO: 1384510 - RNA, 19 nt, Homo sapiens
  misc_RNA (1)...(19): siRNA sense strand
gcaggugugugaagaaaac

SEQ ID NO: 1384511 - RNA, 19 nt, Homo sapiens
  misc_RNA (1)...(19): siRNA sense strand
uuugaggccuacacgaaga

SEQ ID NO: 1384512 - RNA, 19 nt, Homo sapiens
  misc_RNA (1)...(19): siRNA sense strand
ggacacgguaacuccugaa

SEQ ID NO: 1384513 - RNA, 19 nt, Homo sapiens
  misc_RNA (1)...(19): siRNA sense strand
ccagaaugggacacgguaa

SEQ ID NO: 1384514 - RNA, 19 nt, Homo sapiens
  misc_RNA (1)...(19): siRNA sense strand
acauccgccucacccagua

SEQ ID NO: 1384515 - RNA, 19 nt, Homo sapiens
  misc_RNA (1)...(19): siRNA sense strand
ugaaacauccaaacaucgu

SEQ ID NO: 1384516 - RNA, 19 nt, Homo sapiens
  misc_RNA (1)...(19): siRNA sense strand
gcugcaacaccaccacaga

SEQ ID NO: 1384517 - RNA, 19 nt, Homo sapiens
  misc_RNA (1)...(19): siRNA sense strand
aaaagccuauugaacaaga

SEQ ID NO: 1384518 - RNA, 19 nt, Homo sapiens
  misc_RNA (1)...(19): siRNA sense strand
ugaggaaagaucccuaugg

SEQ ID NO: 1384519 - RNA, 19 nt, Homo sapiens
  misc_RNA (1)...(19): siRNA sense strand
ccuacacgaagauuuguga

SEQ ID NO: 1384520 - RNA, 19 nt, Homo sapiens
  misc_RNA (1)...(19): siRNA sense strand
ggaaagaucccuauggaaa

SEQ ID NO: 1384521 - RNA, 19 nt, Homo sapiens
  misc_RNA (1)...(19): siRNA sense strand
gaggaaagaucccuaugga

SEQ ID NO: 1384522 - RNA, 19 nt, Homo sapiens
  misc_RNA (1)...(19): siRNA sense strand
caggagaucauuaagauua

SEQ ID NO: 1384523 - RNA, 19 nt, Homo sapiens
  misc_RNA (1)...(19): siRNA sense strand
gcucggauaugucgacuuc

SEQ ID NO: 1384524 - RNA, 19 nt, Homo sapiens
  misc_RNA (1)...(19): siRNA sense strand
gaaaacaggagaucauuaa

SEQ ID NO: 1384525 - RNA, 19 nt, Homo sapiens
  misc_RNA (1)...(19): siRNA sense strand
ggagcuguuugaagacauu

SEQ ID NO: 1384526 - RNA, 19 nt, Homo sapiens
  misc_RNA (1)...(19): siRNA sense strand
guacuacagugaagcagau

SEQ ID NO: 1384527 - RNA, 19 nt, Homo sapiens
  misc_RNA (1)...(19): siRNA sense strand
gaacgugaggcucggauau

SEQ ID NO: 1384528 - RNA, 19 nt, Homo sapiens
  misc_RNA (1)...(19): siRNA sense strand
guacacaacgcuacagaug

SEQ ID NO: 1384529 - RNA, 19 nt, Homo sapiens
  misc_RNA (1)...(19): siRNA sense strand
gcagaugccagccacugua

SEQ ID NO: 1384530 - RNA, 19 nt, Homo sapiens
  misc_RNA (1)...(19): siRNA sense strand
ccgucaagcuggcugauuu

SEQ ID NO: 1384531 - RNA, 19 nt, Homo sapiens
  misc_RNA (1)...(19): siRNA sense strand
gagagcagcaggcuugguu

SEQ ID NO: 1384532 - RNA, 19 nt, Homo sapiens
  misc_RNA (1)...(19): siRNA sense strand
aacaggagaucauuaagau

SEQ ID NO: 1384533 - RNA, 19 nt, Homo sapiens
  misc_RNA (1)...(19): siRNA sense strand
aaacaggagaucauuaaga

SEQ ID NO: 1384534 - RNA, 19 nt, Homo sapiens
  misc_RNA (1)...(19): siRNA sense strand
ccagagaguacuacaguga

SEQ ID NO: 1384535 - RNA, 19 nt, Homo sapiens
  misc_RNA (1)...(19): siRNA sense strand
gcaagggugcuuucucugu

SEQ ID NO: 1384536 - RNA, 19 nt, Homo sapiens
  misc_RNA (1)...(19): siRNA sense strand
gaacuugaucaaccagaug

SEQ ID NO: 1384537 - RNA, 19 nt, Homo sapiens
  misc_RNA (1)...(19): siRNA sense strand
ggagaguguuaaccacauc

SEQ ID NO: 1384538 - RNA, 19 nt, Homo sapiens
  misc_RNA (1)...(19): siRNA sense strand
gaaagaucccuauggaaaa

SEQ ID NO: 1384539 - RNA, 19 nt, Homo sapiens
  misc_RNA (1)...(19): siRNA sense strand
cagcaggcuugguuugguu

SEQ ID NO: 1384540 - RNA, 19 nt, Homo sapiens
  misc_RNA (1)...(19): siRNA sense strand
ccaaaagccuauugaacaa

SEQ ID NO: 1384541 - RNA, 19 nt, Homo sapiens
  misc_RNA (1)...(19): siRNA sense strand
ucugaaacauccaaacauc

SEQ ID NO: 1384542 - RNA, 19 nt, Homo sapiens
  misc_RNA (1)...(19): siRNA sense strand
caacaccaccacagaagau

SEQ ID NO: 1384543 - RNA, 19 nt, Homo sapiens
  misc_RNA (1)...(19): siRNA sense strand
gcaacaccaccacagaaga

SEQ ID NO: 1384544 - RNA, 19 nt, Homo sapiens
  misc_RNA (1)...(19): siRNA sense strand
gaccauaaacccagcaaag

SEQ ID NO: 1384545 - RNA, 19 nt, Homo sapiens
  misc_RNA (1)...(19): siRNA sense strand
gcggggagcuguuugaaga

SEQ ID NO: 1384546 - RNA, 19 nt, Homo sapiens
  misc_RNA (1)...(19): siRNA sense strand
gcgccuccaugacaguauu

SEQ ID NO: 1384547 - RNA, 19 nt, Homo sapiens
  misc_RNA (1)...(19): siRNA sense strand
aaccagaugcugaccauaa

SEQ ID NO: 1384548 - RNA, 19 nt, Homo sapiens
  misc_RNA (1)...(19): siRNA sense strand
aggagacuguggaguguuu

SEQ ID NO: 1384549 - RNA, 19 nt, Homo sapiens
  misc_RNA (1)...(19): siRNA sense strand
ggagaucauuaagauuaca

SEQ ID NO: 1384550 - RNA, 19 nt, Homo sapiens
  misc_RNA (1)...(19): siRNA sense strand
uaugucgacuucugaaaca

SEQ ID NO: 1384551 - RNA, 19 nt, Homo sapiens
  misc_RNA (1)...(19): siRNA sense strand
gaaaaccuguggauaucug

SEQ ID NO: 1384552 - RNA, 19 nt, Homo sapiens
  misc_RNA (1)...(19): siRNA sense strand
ccgcaggugugugaagaaa

SEQ ID NO: 1384553 - RNA, 19 nt, Homo sapiens
  misc_RNA (1)...(19): siRNA sense strand
ccugaggucuugaggaaag

SEQ ID NO: 1384554 - RNA, 19 nt, Homo sapiens
  misc_RNA (1)...(19): siRNA sense strand
gcagcaggcuugguuuggu

SEQ ID NO: 1384555 - RNA, 19 nt, Homo sapiens
  misc_RNA (1)...(19): siRNA sense strand
gagcagcaggcuugguuug

SEQ ID NO: 1384556 - RNA, 19 nt, Homo sapiens
  misc_RNA (1)...(19): siRNA sense strand
gggaugaggaucagcacaa

SEQ ID NO: 1384557 - RNA, 19 nt, Homo sapiens
  misc_RNA (1)...(19): siRNA sense strand
ggaugaggaucagcacaag

SEQ ID NO: 1384558 - RNA, 19 nt, Homo sapiens
  misc_RNA (1)...(19): siRNA sense strand
gauaugucgacuucugaaa

SEQ ID NO: 1384559 - RNA, 19 nt, Homo sapiens
  misc_RNA (1)...(19): siRNA sense strand
gccagccacuguauacauc

SEQ ID NO: 1384560 - RNA, 19 nt, Homo sapiens
  misc_RNA (1)...(19): siRNA sense strand
uggcaagggugcuuucucu

SEQ ID NO: 1384561 - RNA, 19 nt, Homo sapiens
  misc_RNA (1)...(19): siRNA sense strand
ggauaugucgacuucugaa

SEQ ID NO: 1384562 - RNA, 19 nt, Homo sapiens
  misc_RNA (1)...(19): siRNA sense strand
ucaggagacuguggagugu

SEQ ID NO: 1384563 - RNA, 19 nt, Homo sapiens
  misc_RNA (1)...(19): siRNA sense strand
accagaugcugaccauaaa

SEQ ID NO: 1384564 - RNA, 19 nt, Homo sapiens
  misc_RNA (1)...(19): siRNA sense strand
gauuucccaucaccagaau

SEQ ID NO: 1384565 - RNA, 19 nt, Homo sapiens
  misc_RNA (1)...(19): siRNA sense strand
uucacuaccucguguuuga

SEQ ID NO: 1384566 - RNA, 19 nt, Homo sapiens
  misc_RNA (1)...(19): siRNA sense strand
ucaaccagaugcugaccau

SEQ ID NO: 1384567 - RNA, 19 nt, Homo sapiens
  misc_RNA (1)...(19): siRNA sense strand
aaucaucaauaccaagaag

SEQ ID NO: 1384568 - RNA, 19 nt, Homo sapiens
  misc_RNA (1)...(19): siRNA sense strand
aucaagggcuccacagaga

SEQ ID NO: 1384569 - RNA, 19 nt, Homo sapiens
  misc_RNA (1)...(19): siRNA sense strand
ggaucaagggcuccacaga

SEQ ID NO: 1384570 - RNA, 19 nt, Homo sapiens
  misc_RNA (1)...(19): siRNA sense strand
gggaucaccagaaacuaga

SEQ ID NO: 1384571 - RNA, 19 nt, Homo sapiens
  misc_RNA (1)...(19): siRNA sense strand
ggccagagaguacuacagu

SEQ ID NO: 1384572 - RNA, 19 nt, Homo sapiens
  misc_RNA (1)...(19): siRNA sense strand
ccaugacaguauuucugaa

SEQ ID NO: 1384573 - RNA, 19 nt, Homo sapiens
  misc_RNA (1)...(19): siRNA sense strand
ccucguguuugaccuuguu

SEQ ID NO: 1384574 - RNA, 19 nt, Homo sapiens
  misc_RNA (1)...(19): siRNA sense strand
ucggauaugucgacuucug

SEQ ID NO: 1384575 - RNA, 19 nt, Homo sapiens
  misc_RNA (1)...(19): siRNA sense strand
cgaaaacaggagaucauua

SEQ ID NO: 1384576 - RNA, 19 nt, Homo sapiens
  misc_RNA (1)...(19): siRNA sense strand
gccaaaagccuauugaaca

SEQ ID NO: 1384577 - RNA, 19 nt, Homo sapiens
  misc_RNA (1)...(19): siRNA sense strand
ucaucaauaccaagaaguu

SEQ ID NO: 1384578 - RNA, 19 nt, Homo sapiens
  misc_RNA (1)...(19): siRNA sense strand
gaugccagccacuguauac

SEQ ID NO: 1384579 - RNA, 19 nt, Homo sapiens
  misc_RNA (1)...(19): siRNA sense strand
agaacuugaucaaccagau

SEQ ID NO: 1384580 - RNA, 19 nt, Homo sapiens
  misc_RNA (1)...(19): siRNA sense strand
agagaguacuacagugaag

SEQ ID NO: 1384581 - RNA, 19 nt, Homo sapiens
  misc_RNA (1)...(19): siRNA sense strand
cagagaguacuacagugaa

SEQ ID NO: 1384582 - RNA, 19 nt, Homo sapiens
  misc_RNA (1)...(19): siRNA sense strand
caucaauaccaagaaguug

SEQ ID NO: 1384583 - RNA, 19 nt, Homo sapiens
  misc_RNA (1)...(19): siRNA sense strand
guccgcaggugugugaaga

SEQ ID NO: 1384584 - RNA, 19 nt, Homo sapiens
  misc_RNA (1)...(19): siRNA sense strand
ggacacgguaacuccugaa

SEQ ID NO: 1384585 - RNA, 19 nt, Homo sapiens
  misc_RNA (1)...(19): siRNA sense strand
gcaggugugugaagaaaac

SEQ ID NO: 1384586 - RNA, 19 nt, Homo sapiens
  misc_RNA (1)...(19): siRNA sense strand
ugaaacauccaaacaucgu

SEQ ID NO: 1384587 - RNA, 19 nt, Homo sapiens
  misc_RNA (1)...(19): siRNA sense strand
gcugcaacaccaccacaga

SEQ ID NO: 1384588 - RNA, 19 nt, Homo sapiens
  misc_RNA (1)...(19): siRNA sense strand
aaaagccuauugaacaaga

SEQ ID NO: 1384589 - RNA, 19 nt, Homo sapiens
  misc_RNA (1)...(19): siRNA sense strand
ccagaaugggacacgguaa

SEQ ID NO: 1384590 - RNA, 19 nt, Homo sapiens
  misc_RNA (1)...(19): siRNA sense strand
ugaggaaagaucccuaugg

SEQ ID NO: 1384591 - RNA, 19 nt, Homo sapiens
  misc_RNA (1)...(19): siRNA sense strand
ggaaagaucccuauggaaa

SEQ ID NO: 1384592 - RNA, 19 nt, Homo sapiens
  misc_RNA (1)...(19): siRNA sense strand
gaggaaagaucccuaugga

SEQ ID NO: 1384593 - RNA, 19 nt, Homo sapiens
  misc_RNA (1)...(19): siRNA sense strand
caggagaucauuaagauua

SEQ ID NO: 1384594 - RNA, 19 nt, Homo sapiens
  misc_RNA (1)...(19): siRNA sense strand
gcucggauaugucgacuuc

SEQ ID NO: 1384595 - RNA, 19 nt, Homo sapiens
  misc_RNA (1)...(19): siRNA sense strand
gaaaacaggagaucauuaa

SEQ ID NO: 1384596 - RNA, 19 nt, Homo sapiens
  misc_RNA (1)...(19): siRNA sense strand
ggagcuguuugaagacauu

SEQ ID NO: 1384597 - RNA, 19 nt, Homo sapiens
  misc_RNA (1)...(19): siRNA sense strand
guacuacagugaagcagau

SEQ ID NO: 1384598 - RNA, 19 nt, Homo sapiens
  misc_RNA (1)...(19): siRNA sense strand
gaacgugaggcucggauau

SEQ ID NO: 1384599 - RNA, 19 nt, Homo sapiens
  misc_RNA (1)...(19): siRNA sense strand
uuacagaacagcugauuga

SEQ ID NO: 1384600 - RNA, 19 nt, Homo sapiens
  misc_RNA (1)...(19): siRNA sense strand
guacacaacgcuacagaug

SEQ ID NO: 1384601 - RNA, 19 nt, Homo sapiens
  misc_RNA (1)...(19): siRNA sense strand
gcagaugccagccacugua

SEQ ID NO: 1384602 - RNA, 19 nt, Homo sapiens
  misc_RNA (1)...(19): siRNA sense strand
ccgucaagcuggcugauuu

SEQ ID NO: 1384603 - RNA, 19 nt, Homo sapiens
  misc_RNA (1)...(19): siRNA sense strand
gauggcaaguggcucaaug

SEQ ID NO: 1384604 - RNA, 19 nt, Homo sapiens
  misc_RNA (1)...(19): siRNA sense strand
gagagcagcaggcuugguu

SEQ ID NO: 1384605 - RNA, 19 nt, Homo sapiens
  misc_RNA (1)...(19): siRNA sense strand
aacaggagaucauuaagau

SEQ ID NO: 1384606 - RNA, 19 nt, Homo sapiens
  misc_RNA (1)...(19): siRNA sense strand
aaacaggagaucauuaaga

SEQ ID NO: 1384607 - RNA, 19 nt, Homo sapiens
  misc_RNA (1)...(19): siRNA sense strand
gcaagggugcuuucucugu

SEQ ID NO: 1384608 - RNA, 19 nt, Homo sapiens
  misc_RNA (1)...(19): siRNA sense strand
ccagagaguacuacaguga

SEQ ID NO: 1384609 - RNA, 19 nt, Homo sapiens
  misc_RNA (1)...(19): siRNA sense strand
gaacuugaucaaccagaug

SEQ ID NO: 1384610 - RNA, 19 nt, Homo sapiens
  misc_RNA (1)...(19): siRNA sense strand
gaacagcaagccuauccau

SEQ ID NO: 1384611 - RNA, 19 nt, Homo sapiens
  misc_RNA (1)...(19): siRNA sense strand
ggagaguguuaaccacauc

SEQ ID NO: 1384612 - RNA, 19 nt, Homo sapiens
  misc_RNA (1)...(19): siRNA sense strand
agaaucuccuguccaagaa

SEQ ID NO: 1384613 - RNA, 19 nt, Homo sapiens
  misc_RNA (1)...(19): siRNA sense strand
gaaagaucccuauggaaaa

SEQ ID NO: 1384614 - RNA, 19 nt, Homo sapiens
  misc_RNA (1)...(19): siRNA sense strand
cagcaggcuugguuugguu

SEQ ID NO: 1384615 - RNA, 19 nt, Homo sapiens
  misc_RNA (1)...(19): siRNA sense strand
ccaaaagccuauugaacaa

SEQ ID NO: 1384616 - RNA, 19 nt, Homo sapiens
  misc_RNA (1)...(19): siRNA sense strand
ucugaaacauccaaacauc

SEQ ID NO: 1384617 - RNA, 19 nt, Homo sapiens
  misc_RNA (1)...(19): siRNA sense strand
caacaccaccacagaagau

SEQ ID NO: 1384618 - RNA, 19 nt, Homo sapiens
  misc_RNA (1)...(19): siRNA sense strand
gcaacaccaccacagaaga

SEQ ID NO: 1384619 - RNA, 19 nt, Homo sapiens
  misc_RNA (1)...(19): siRNA sense strand
gaccauaaacccagcaaag

SEQ ID NO: 1384620 - RNA, 19 nt, Homo sapiens
  misc_RNA (1)...(19): siRNA sense strand
gcggggagcuguuugaaga

SEQ ID NO: 1384621 - RNA, 19 nt, Homo sapiens
  misc_RNA (1)...(19): siRNA sense strand
gcgccuccaugacaguauu

SEQ ID NO: 1384622 - RNA, 19 nt, Homo sapiens
  misc_RNA (1)...(19): siRNA sense strand
gcaccagccagucagaaga

SEQ ID NO: 1384623 - RNA, 19 nt, Homo sapiens
  misc_RNA (1)...(19): siRNA sense strand
aaccagaugcugaccauaa

SEQ ID NO: 1384624 - RNA, 19 nt, Homo sapiens
  misc_RNA (1)...(19): siRNA sense strand
aggagacuguggaguguuu

SEQ ID NO: 1384625 - RNA, 19 nt, Homo sapiens
  misc_RNA (1)...(19): siRNA sense strand
ggagaucauuaagauuaca

SEQ ID NO: 1384626 - RNA, 19 nt, Homo sapiens
  misc_RNA (1)...(19): siRNA sense strand
uaugucgacuucugaaaca

SEQ ID NO: 1384627 - RNA, 19 nt, Homo sapiens
  misc_RNA (1)...(19): siRNA sense strand
ccaagaacagcaagccuau

SEQ ID NO: 1384628 - RNA, 19 nt, Homo sapiens
  misc_RNA (1)...(19): siRNA sense strand
gaaaaccuguggauaucug

SEQ ID NO: 1384629 - RNA, 19 nt, Homo sapiens
  misc_RNA (1)...(19): siRNA sense strand
ccugaggucuugaggaaag

SEQ ID NO: 1384630 - RNA, 19 nt, Homo sapiens
  misc_RNA (1)...(19): siRNA sense strand
gcagcaggcuugguuuggu

SEQ ID NO: 1384631 - RNA, 19 nt, Homo sapiens
  misc_RNA (1)...(19): siRNA sense strand
gagcagcaggcuugguuug

SEQ ID NO: 1384632 - RNA, 19 nt, Homo sapiens
  misc_RNA (1)...(19): siRNA sense strand
ccgcaggugugugaagaaa

SEQ ID NO: 1384633 - RNA, 19 nt, Homo sapiens
  misc_RNA (1)...(19): siRNA sense strand
gggaugaggaucagcacaa

SEQ ID NO: 1384634 - RNA, 19 nt, Homo sapiens
  misc_RNA (1)...(19): siRNA sense strand
ggaugaggaucagcacaag

SEQ ID NO: 1384635 - RNA, 19 nt, Homo sapiens
  misc_RNA (1)...(19): siRNA sense strand
gauaugucgacuucugaaa

SEQ ID NO: 1384636 - RNA, 19 nt, Homo sapiens
  misc_RNA (1)...(19): siRNA sense strand
gccagccacuguauacauc

SEQ ID NO: 1384637 - RNA, 19 nt, Homo sapiens
  misc_RNA (1)...(19): siRNA sense strand
uggcaagggugcuuucucu

SEQ ID NO: 1384638 - RNA, 19 nt, Homo sapiens
  misc_RNA (1)...(19): siRNA sense strand
gauuucccaucaccagaau

SEQ ID NO: 1384639 - RNA, 19 nt, Homo sapiens
  misc_RNA (1)...(19): siRNA sense strand
ucaggagacuguggagugu

SEQ ID NO: 1384640 - RNA, 19 nt, Homo sapiens
  misc_RNA (1)...(19): siRNA sense strand
accagaugcugaccauaaa

SEQ ID NO: 1384641 - RNA, 19 nt, Homo sapiens
  misc_RNA (1)...(19): siRNA sense strand
ggauaugucgacuucugaa

SEQ ID NO: 1384642 - RNA, 19 nt, Homo sapiens
  misc_RNA (1)...(19): siRNA sense strand
uucacuaccucguguuuga

SEQ ID NO: 1384643 - RNA, 19 nt, Homo sapiens
  misc_RNA (1)...(19): siRNA sense strand
ucaaccagaugcugaccau

SEQ ID NO: 1384644 - RNA, 19 nt, Homo sapiens
  misc_RNA (1)...(19): siRNA sense strand
ggccagagaguacuacagu

SEQ ID NO: 1384645 - RNA, 19 nt, Homo sapiens
  misc_RNA (1)...(19): siRNA sense strand
ggcucaauguccacuauca

SEQ ID NO: 1384646 - RNA, 19 nt, Homo sapiens
  misc_RNA (1)...(19): siRNA sense strand
gauuacagaacagcugauu

SEQ ID NO: 1384647 - RNA, 19 nt, Homo sapiens
  misc_RNA (1)...(19): siRNA sense strand
aucaagggcuccacagaga

SEQ ID NO: 1384648 - RNA, 19 nt, Homo sapiens
  misc_RNA (1)...(19): siRNA sense strand
ggaucaagggcuccacaga

SEQ ID NO: 1384649 - RNA, 19 nt, Homo sapiens
  misc_RNA (1)...(19): siRNA sense strand
aaucaucaauaccaagaag

SEQ ID NO: 1384650 - RNA, 19 nt, Homo sapiens
  misc_RNA (1)...(19): siRNA sense strand
gggaucaccagaaacuaga

SEQ ID NO: 1384651 - RNA, 19 nt, Homo sapiens
  misc_RNA (1)...(19): siRNA sense strand
cagcgugcaucgccuacau

SEQ ID NO: 1384652 - RNA, 19 nt, Homo sapiens
  misc_RNA (1)...(19): siRNA sense strand
ccaugacaguauuucugaa

SEQ ID NO: 1384653 - RNA, 19 nt, Homo sapiens
  misc_RNA (1)...(19): siRNA sense strand
ccucguguuugaccuuguu

SEQ ID NO: 1384654 - RNA, 19 nt, Homo sapiens
  misc_RNA (1)...(19): siRNA sense strand
ucggauaugucgacuucug

SEQ ID NO: 1384655 - RNA, 19 nt, Homo sapiens
  misc_RNA (1)...(19): siRNA sense strand
cgaaaacaggagaucauua

SEQ ID NO: 1384656 - RNA, 19 nt, Homo sapiens
  misc_RNA (1)...(19): siRNA sense strand
ucaucaauaccaagaaguu

SEQ ID NO: 1384657 - RNA, 19 nt, Homo sapiens
  misc_RNA (1)...(19): siRNA sense strand
gccaaaagccuauugaaca

SEQ ID NO: 1384658 - RNA, 19 nt, Homo sapiens
  misc_RNA (1)...(19): siRNA sense strand
gaugccagccacuguauac

SEQ ID NO: 1384659 - RNA, 19 nt, Homo sapiens
  misc_RNA (1)...(19): siRNA sense strand
agaacuugaucaaccagau

SEQ ID NO: 1384660 - RNA, 19 nt, Homo sapiens
  misc_RNA (1)...(19): siRNA sense strand
acagcaagccuauccauac

SEQ ID NO: 1384661 - RNA, 19 nt, Homo sapiens
  misc_RNA (1)...(19): siRNA sense strand
caucaacaauggggacuuu

SEQ ID NO: 1384662 - RNA, 19 nt, Homo sapiens
  misc_RNA (1)...(19): siRNA sense strand
agagaguacuacagugaag

SEQ ID NO: 1384663 - RNA, 19 nt, Homo sapiens
  misc_RNA (1)...(19): siRNA sense strand
cagagaguacuacagugaa

SEQ ID NO: 1384664 - RNA, 19 nt, Homo sapiens
  misc_RNA (1)...(19): siRNA sense strand
caucaauaccaagaaguug

SEQ ID NO: 1384665 - RNA, 19 nt, Homo sapiens
  misc_RNA (1)...(19): siRNA sense strand
guccgcaggugugugaaga

SEQ ID NO: 1384666 - RNA, 19 nt, Homo sapiens
  misc_RNA (1)...(19): siRNA sense strand
gcaggugugugaagaaaac

SEQ ID NO: 1384667 - RNA, 19 nt, Homo sapiens
  misc_RNA (1)...(19): siRNA sense strand
uuugaggccuacacgaaga

SEQ ID NO: 1384668 - RNA, 19 nt, Homo sapiens
  misc_RNA (1)...(19): siRNA sense strand
ggacacgguaacuccugaa

SEQ ID NO: 1384669 - RNA, 19 nt, Homo sapiens
  misc_RNA (1)...(19): siRNA sense strand
ccagaaugggacacgguaa

SEQ ID NO: 1384670 - RNA, 19 nt, Homo sapiens
  misc_RNA (1)...(19): siRNA sense strand
acauccgccucacccagua

SEQ ID NO: 1384671 - RNA, 19 nt, Homo sapiens
  misc_RNA (1)...(19): siRNA sense strand
ugaaacauccaaacaucgu

SEQ ID NO: 1384672 - RNA, 19 nt, Homo sapiens
  misc_RNA (1)...(19): siRNA sense strand
gcugcaacaccaccacaga

SEQ ID NO: 1384673 - RNA, 19 nt, Homo sapiens
  misc_RNA (1)...(19): siRNA sense strand
aaaagccuauugaacaaga

SEQ ID NO: 1384674 - RNA, 19 nt, Homo sapiens
  misc_RNA (1)...(19): siRNA sense strand
ugaggaaagaucccuaugg

SEQ ID NO: 1384675 - RNA, 19 nt, Homo sapiens
  misc_RNA (1)...(19): siRNA sense strand
ccuacacgaagauuuguga

SEQ ID NO: 1384676 - RNA, 19 nt, Homo sapiens
  misc_RNA (1)...(19): siRNA sense strand
gcaaugaagugcuuucucu

SEQ ID NO: 1384677 - RNA, 19 nt, Homo sapiens
  misc_RNA (1)...(19): siRNA sense strand
gaaucuggaugcaaagaau

SEQ ID NO: 1384678 - RNA, 19 nt, Homo sapiens
  misc_RNA (1)...(19): siRNA sense strand
aaaccacauuugagaagua

SEQ ID NO: 1384679 - RNA, 19 nt, Homo sapiens
  misc_RNA (1)...(19): siRNA sense strand
cuacuuguguuuacuucua

SEQ ID NO: 1384680 - RNA, 19 nt, Homo sapiens
  misc_RNA (1)...(19): siRNA sense strand
caacugggugaauguaaua

SEQ ID NO: 1384681 - RNA, 19 nt, Homo sapiens
  misc_RNA (1)...(19): siRNA sense strand
caaagaaugugaggaacug

SEQ ID NO: 1384682 - RNA, 19 nt, Homo sapiens
  misc_RNA (1)...(19): siRNA sense strand
gaagccaacugggugaaug

SEQ ID NO: 1384683 - RNA, 19 nt, Homo sapiens
  misc_RNA (1)...(19): siRNA sense strand
gaauuucgaaaccacauuu

SEQ ID NO: 1384684 - RNA, 19 nt, Homo sapiens
  misc_RNA (1)...(19): siRNA sense strand
caaaguaacagcaaugaag

SEQ ID NO: 1384685 - RNA, 19 nt, Homo sapiens
  misc_RNA (1)...(19): siRNA sense strand
ccacauuugagaaguauuu

SEQ ID NO: 1384686 - RNA, 19 nt, Homo sapiens
  misc_RNA (1)...(19): siRNA sense strand
ggaguuacaaguuauuuca

SEQ ID NO: 1384687 - RNA, 19 nt, Homo sapiens
  misc_RNA (1)...(19): siRNA sense strand
gaaaccacauuugagaagu

SEQ ID NO: 1384688 - RNA, 19 nt, Homo sapiens
  misc_RNA (1)...(19): siRNA sense strand
gaugcaaguauucaugaua

SEQ ID NO: 1384689 - RNA, 19 nt, Homo sapiens
  misc_RNA (1)...(19): siRNA sense strand
guccggagaugcaaguauu

SEQ ID NO: 1384690 - RNA, 19 nt, Homo sapiens
  misc_RNA (1)...(19): siRNA sense strand
guauuuccauccagugcua

SEQ ID NO: 1384691 - RNA, 19 nt, Homo sapiens
  misc_RNA (1)...(19): siRNA sense strand
uaaugggaauguaacagaa

SEQ ID NO: 1384692 - RNA, 19 nt, Homo sapiens
  misc_RNA (1)...(19): siRNA sense strand
gggugaauguaauaaguga

SEQ ID NO: 1384693 - RNA, 19 nt, Homo sapiens
  misc_RNA (1)...(19): siRNA sense strand
gagaugcaaguauucauga

SEQ ID NO: 1384694 - RNA, 19 nt, Homo sapiens
  misc_RNA (1)...(19): siRNA sense strand
ccaacugggugaauguaau

SEQ ID NO: 1384695 - RNA, 19 nt, Homo sapiens
  misc_RNA (1)...(19): siRNA sense strand
ggagaugcaaguauucaug

SEQ ID NO: 1384696 - RNA, 19 nt, Homo sapiens
  misc_RNA (1)...(19): siRNA sense strand
gcauucaugucuucauuuu

SEQ ID NO: 1384697 - RNA, 19 nt, Homo sapiens
  misc_RNA (1)...(19): siRNA sense strand
gcaaaguaacagcaaugaa

SEQ ID NO: 1384698 - RNA, 19 nt, Homo sapiens
  misc_RNA (1)...(19): siRNA sense strand
gaagcuggcauucaugucu

SEQ ID NO: 1384699 - RNA, 19 nt, Homo sapiens
  misc_RNA (1)...(19): siRNA sense strand
gugaggaacuggaggaaaa

SEQ ID NO: 1384700 - RNA, 19 nt, Homo sapiens
  misc_RNA (1)...(19): siRNA sense strand
uggcauucaugucuucauu

SEQ ID NO: 1384701 - RNA, 19 nt, Homo sapiens
  misc_RNA (1)...(19): siRNA sense strand
ugaagugcuuucucuugga

SEQ ID NO: 1384702 - RNA, 19 nt, Homo sapiens
  misc_RNA (1)...(19): siRNA sense strand
gcaaagaaugugaggaacu

SEQ ID NO: 1384703 - RNA, 19 nt, Homo sapiens
  misc_RNA (1)...(19): siRNA sense strand
ccagugcuacuuguguuua

SEQ ID NO: 1384704 - RNA, 19 nt, Homo sapiens
  misc_RNA (1)...(19): siRNA sense strand
gcagaguuuuguacauauu

SEQ ID NO: 1384705 - RNA, 19 nt, Homo sapiens
  misc_RNA (1)...(19): siRNA sense strand
ugagaaguauuuccaucca

SEQ ID NO: 1384706 - RNA, 19 nt, Homo sapiens
  misc_RNA (1)...(19): siRNA sense strand
cuaaugggaauguaacaga

SEQ ID NO: 1384707 - RNA, 19 nt, Homo sapiens
  misc_RNA (1)...(19): siRNA sense strand
gaucuuauucaaucuaugc

SEQ ID NO: 1384708 - RNA, 19 nt, Homo sapiens
  misc_RNA (1)...(19): siRNA sense strand
ucacuugaguccggagaug

SEQ ID NO: 1384709 - RNA, 19 nt, Homo sapiens
  misc_RNA (1)...(19): siRNA sense strand
gcuacuuuauauacggaaa

SEQ ID NO: 1384710 - RNA, 19 nt, Homo sapiens
  misc_RNA (1)...(19): siRNA sense strand
cgaaaccacauuugagaag

SEQ ID NO: 1384711 - RNA, 19 nt, Homo sapiens
  misc_RNA (1)...(19): siRNA sense strand
cauauuguccaaauguuca

SEQ ID NO: 1384712 - RNA, 19 nt, Homo sapiens
  misc_RNA (1)...(19): siRNA sense strand
aaugaagugcuuucucuug

SEQ ID NO: 1384713 - RNA, 19 nt, Homo sapiens
  misc_RNA (1)...(19): siRNA sense strand
ggcauucaugucuucauuu

SEQ ID NO: 1384714 - RNA, 19 nt, Homo sapiens
  misc_RNA (1)...(19): siRNA sense strand
aacaguuugucuucuaaug

SEQ ID NO: 1384715 - RNA, 19 nt, Homo sapiens
  misc_RNA (1)...(19): siRNA sense strand
aaucugaucauccuagcaa

SEQ ID NO: 1384716 - RNA, 19 nt, Homo sapiens
  misc_RNA (1)...(19): siRNA sense strand
gugcagggcuuccuaaaac

SEQ ID NO: 1384717 - RNA, 19 nt, Homo sapiens
  misc_RNA (1)...(19): siRNA sense strand
gccaacugggugaauguaa

SEQ ID NO: 1384718 - RNA, 19 nt, Homo sapiens
  misc_RNA (1)...(19): siRNA sense strand
aaaguaacagcaaugaagu

SEQ ID NO: 1384719 - RNA, 19 nt, Homo sapiens
  misc_RNA (1)...(19): siRNA sense strand
aagcuggcauucaugucuu

SEQ ID NO: 1384720 - RNA, 19 nt, Homo sapiens
  misc_RNA (1)...(19): siRNA sense strand
caacaguuugucuucuaau

SEQ ID NO: 1384721 - RNA, 19 nt, Homo sapiens
  misc_RNA (1)...(19): siRNA sense strand
cugggugaauguaauaagu

SEQ ID NO: 1384722 - RNA, 19 nt, Homo sapiens
  misc_RNA (1)...(19): siRNA sense strand
cauccuagcaaacaacagu

SEQ ID NO: 1384723 - RNA, 19 nt, Homo sapiens
  misc_RNA (1)...(19): siRNA sense strand
caaugaagugcuuucucuu

SEQ ID NO: 1384724 - RNA, 19 nt, Homo sapiens
  misc_RNA (1)...(19): siRNA sense strand
gagaauuucgaaaccacau

SEQ ID NO: 1384725 - RNA, 19 nt, Homo sapiens
  misc_RNA (1)...(19): siRNA sense strand
uugcagaguuuuguacaua

SEQ ID NO: 1384726 - RNA, 19 nt, Homo sapiens
  misc_RNA (1)...(19): siRNA sense strand
augcaaagaaugugaggaa

SEQ ID NO: 1384727 - RNA, 19 nt, Homo sapiens
  misc_RNA (1)...(19): siRNA sense strand
aaccacauuugagaaguau

SEQ ID NO: 1384728 - RNA, 19 nt, Homo sapiens
  misc_RNA (1)...(19): siRNA sense strand
gcaaugaagugcuuucucu

SEQ ID NO: 1384729 - RNA, 19 nt, Homo sapiens
  misc_RNA (1)...(19): siRNA sense strand
gaaucuggaugcaaagaau

SEQ ID NO: 1384730 - RNA, 19 nt, Homo sapiens
  misc_RNA (1)...(19): siRNA sense strand
aaaccacauuugagaagua

SEQ ID NO: 1384731 - RNA, 19 nt, Homo sapiens
  misc_RNA (1)...(19): siRNA sense strand
cuacuuguguuuacuucua

SEQ ID NO: 1384732 - RNA, 19 nt, Homo sapiens
  misc_RNA (1)...(19): siRNA sense strand
caacugggugaauguaaua

SEQ ID NO: 1384733 - RNA, 19 nt, Homo sapiens
  misc_RNA (1)...(19): siRNA sense strand
caaagaaugugaggaacug

SEQ ID NO: 1384734 - RNA, 19 nt, Homo sapiens
  misc_RNA (1)...(19): siRNA sense strand
gaagccaacugggugaaug

SEQ ID NO: 1384735 - RNA, 19 nt, Homo sapiens
  misc_RNA (1)...(19): siRNA sense strand
gaauuucgaaaccacauuu

SEQ ID NO: 1384736 - RNA, 19 nt, Homo sapiens
  misc_RNA (1)...(19): siRNA sense strand
caaaguaacagcaaugaag

SEQ ID NO: 1384737 - RNA, 19 nt, Homo sapiens
  misc_RNA (1)...(19): siRNA sense strand
ccacauuugagaaguauuu

SEQ ID NO: 1384738 - RNA, 19 nt, Homo sapiens
  misc_RNA (1)...(19): siRNA sense strand
ggaguuacaaguuauuuca

SEQ ID NO: 1384739 - RNA, 19 nt, Homo sapiens
  misc_RNA (1)...(19): siRNA sense strand
gaaaccacauuugagaagu

SEQ ID NO: 1384740 - RNA, 19 nt, Homo sapiens
  misc_RNA (1)...(19): siRNA sense strand
gaugcaaguauucaugaua

SEQ ID NO: 1384741 - RNA, 19 nt, Homo sapiens
  misc_RNA (1)...(19): siRNA sense strand
guccggagaugcaaguauu

SEQ ID NO: 1384742 - RNA, 19 nt, Homo sapiens
  misc_RNA (1)...(19): siRNA sense strand
guauuuccauccagugcua

SEQ ID NO: 1384743 - RNA, 19 nt, Homo sapiens
  misc_RNA (1)...(19): siRNA sense strand
uaaugggaauguaacagaa

SEQ ID NO: 1384744 - RNA, 19 nt, Homo sapiens
  misc_RNA (1)...(19): siRNA sense strand
gggugaauguaauaaguga

SEQ ID NO: 1384745 - RNA, 19 nt, Homo sapiens
  misc_RNA (1)...(19): siRNA sense strand
gagaugcaaguauucauga

SEQ ID NO: 1384746 - RNA, 19 nt, Homo sapiens
  misc_RNA (1)...(19): siRNA sense strand
ccaacugggugaauguaau

SEQ ID NO: 1384747 - RNA, 19 nt, Homo sapiens
  misc_RNA (1)...(19): siRNA sense strand
ggagaugcaaguauucaug

SEQ ID NO: 1384748 - RNA, 19 nt, Homo sapiens
  misc_RNA (1)...(19): siRNA sense strand
gcauucaugucuucauuuu

SEQ ID NO: 1384749 - RNA, 19 nt, Homo sapiens
  misc_RNA (1)...(19): siRNA sense strand
gcaaaguaacagcaaugaa

SEQ ID NO: 1384750 - RNA, 19 nt, Homo sapiens
  misc_RNA (1)...(19): siRNA sense strand
gaagcuggcauucaugucu

SEQ ID NO: 1384751 - RNA, 19 nt, Homo sapiens
  misc_RNA (1)...(19): siRNA sense strand
gugaggaacuggaggaaaa

SEQ ID NO: 1384752 - RNA, 19 nt, Homo sapiens
  misc_RNA (1)...(19): siRNA sense strand
uggcauucaugucuucauu

SEQ ID NO: 1384753 - RNA, 19 nt, Homo sapiens
  misc_RNA (1)...(19): siRNA sense strand
ugaagugcuuucucuugga

SEQ ID NO: 1384754 - RNA, 19 nt, Homo sapiens
  misc_RNA (1)...(19): siRNA sense strand
gcaaagaaugugaggaacu

SEQ ID NO: 1384755 - RNA, 19 nt, Homo sapiens
  misc_RNA (1)...(19): siRNA sense strand
ccagugcuacuuguguuua

SEQ ID NO: 1384756 - RNA, 19 nt, Homo sapiens
  misc_RNA (1)...(19): siRNA sense strand
gcagaguuuuguacauauu

SEQ ID NO: 1384757 - RNA, 19 nt, Homo sapiens
  misc_RNA (1)...(19): siRNA sense strand
ugagaaguauuuccaucca

SEQ ID NO: 1384758 - RNA, 19 nt, Homo sapiens
  misc_RNA (1)...(19): siRNA sense strand
cuaaugggaauguaacaga

SEQ ID NO: 1384759 - RNA, 19 nt, Homo sapiens
  misc_RNA (1)...(19): siRNA sense strand
gaucuuauucaaucuaugc

SEQ ID NO: 1384760 - RNA, 19 nt, Homo sapiens
  misc_RNA (1)...(19): siRNA sense strand
ucacuugaguccggagaug

SEQ ID NO: 1384761 - RNA, 19 nt, Homo sapiens
  misc_RNA (1)...(19): siRNA sense strand
gcuacuuuauauacggaaa

SEQ ID NO: 1384762 - RNA, 19 nt, Homo sapiens
  misc_RNA (1)...(19): siRNA sense strand
cgaaaccacauuugagaag

SEQ ID NO: 1384763 - RNA, 19 nt, Homo sapiens
  misc_RNA (1)...(19): siRNA sense strand
cauauuguccaaauguuca

SEQ ID NO: 1384764 - RNA, 19 nt, Homo sapiens
  misc_RNA (1)...(19): siRNA sense strand
aaugaagugcuuucucuug

SEQ ID NO: 1384765 - RNA, 19 nt, Homo sapiens
  misc_RNA (1)...(19): siRNA sense strand
ggcauucaugucuucauuu

SEQ ID NO: 1384766 - RNA, 19 nt, Homo sapiens
  misc_RNA (1)...(19): siRNA sense strand
aacaguuugucuucuaaug

SEQ ID NO: 1384767 - RNA, 19 nt, Homo sapiens
  misc_RNA (1)...(19): siRNA sense strand
aaucugaucauccuagcaa

SEQ ID NO: 1384768 - RNA, 19 nt, Homo sapiens
  misc_RNA (1)...(19): siRNA sense strand
gugcagggcuuccuaaaac

SEQ ID NO: 1384769 - RNA, 19 nt, Homo sapiens
  misc_RNA (1)...(19): siRNA sense strand
gccaacugggugaauguaa

SEQ ID NO: 1384770 - RNA, 19 nt, Homo sapiens
  misc_RNA (1)...(19): siRNA sense strand
aaaguaacagcaaugaagu

SEQ ID NO: 1384771 - RNA, 19 nt, Homo sapiens
  misc_RNA (1)...(19): siRNA sense strand
aagcuggcauucaugucuu

SEQ ID NO: 1384772 - RNA, 19 nt, Homo sapiens
  misc_RNA (1)...(19): siRNA sense strand
caacaguuugucuucuaau

SEQ ID NO: 1384773 - RNA, 19 nt, Homo sapiens
  misc_RNA (1)...(19): siRNA sense strand
cugggugaauguaauaagu

SEQ ID NO: 1384774 - RNA, 19 nt, Homo sapiens
  misc_RNA (1)...(19): siRNA sense strand
cauccuagcaaacaacagu

SEQ ID NO: 1384775 - RNA, 19 nt, Homo sapiens
  misc_RNA (1)...(19): siRNA sense strand
caaugaagugcuuucucuu

SEQ ID NO: 1384776 - RNA, 19 nt, Homo sapiens
  misc_RNA (1)...(19): siRNA sense strand
gagaauuucgaaaccacau

SEQ ID NO: 1384777 - RNA, 19 nt, Homo sapiens
  misc_RNA (1)...(19): siRNA sense strand
uugcagaguuuuguacaua

SEQ ID NO: 1384778 - RNA, 19 nt, Homo sapiens
  misc_RNA (1)...(19): siRNA sense strand
augcaaagaaugugaggaa

SEQ ID NO: 1384779 - RNA, 19 nt, Homo sapiens
  misc_RNA (1)...(19): siRNA sense strand
aaccacauuugagaaguau

SEQ ID NO: 1384780 - RNA, 19 nt, Homo sapiens
  misc_RNA (1)...(19): siRNA sense strand
gcaaugaagugcuuucucu

SEQ ID NO: 1384781 - RNA, 19 nt, Homo sapiens
  misc_RNA (1)...(19): siRNA sense strand
gaaucuggaugcaaagaau

SEQ ID NO: 1384782 - RNA, 19 nt, Homo sapiens
  misc_RNA (1)...(19): siRNA sense strand
caacugggugaauguaaua

SEQ ID NO: 1384783 - RNA, 19 nt, Homo sapiens
  misc_RNA (1)...(19): siRNA sense strand
caaagaaugugaggaacug

SEQ ID NO: 1384784 - RNA, 19 nt, Homo sapiens
  misc_RNA (1)...(19): siRNA sense strand
gaagccaacugggugaaug

SEQ ID NO: 1384785 - RNA, 19 nt, Homo sapiens
  misc_RNA (1)...(19): siRNA sense strand
caaaguaacagcaaugaag

SEQ ID NO: 1384786 - RNA, 19 nt, Homo sapiens
  misc_RNA (1)...(19): siRNA sense strand
ggaguuacaaguuauuuca

SEQ ID NO: 1384787 - RNA, 19 nt, Homo sapiens
  misc_RNA (1)...(19): siRNA sense strand
gaugcaaguauucaugaua

SEQ ID NO: 1384788 - RNA, 19 nt, Homo sapiens
  misc_RNA (1)...(19): siRNA sense strand
guccggagaugcaaguauu

SEQ ID NO: 1384789 - RNA, 19 nt, Homo sapiens
  misc_RNA (1)...(19): siRNA sense strand
gggugaauguaauaaguga

SEQ ID NO: 1384790 - RNA, 19 nt, Homo sapiens
  misc_RNA (1)...(19): siRNA sense strand
uaaugggaauguaacagaa

SEQ ID NO: 1384791 - RNA, 19 nt, Homo sapiens
  misc_RNA (1)...(19): siRNA sense strand
gagaugcaaguauucauga

SEQ ID NO: 1384792 - RNA, 19 nt, Homo sapiens
  misc_RNA (1)...(19): siRNA sense strand
ccaacugggugaauguaau

SEQ ID NO: 1384793 - RNA, 19 nt, Homo sapiens
  misc_RNA (1)...(19): siRNA sense strand
ggagaugcaaguauucaug

SEQ ID NO: 1384794 - RNA, 19 nt, Homo sapiens
  misc_RNA (1)...(19): siRNA sense strand
gcaaaguaacagcaaugaa

SEQ ID NO: 1384795 - RNA, 19 nt, Homo sapiens
  misc_RNA (1)...(19): siRNA sense strand
gugaggaacuggaggaaaa

SEQ ID NO: 1384796 - RNA, 19 nt, Homo sapiens
  misc_RNA (1)...(19): siRNA sense strand
ugaagugcuuucucuugga

SEQ ID NO: 1384797 - RNA, 19 nt, Homo sapiens
  misc_RNA (1)...(19): siRNA sense strand
gcaaagaaugugaggaacu

SEQ ID NO: 1384798 - RNA, 19 nt, Homo sapiens
  misc_RNA (1)...(19): siRNA sense strand
gcagaguuuuguacauauu

SEQ ID NO: 1384799 - RNA, 19 nt, Homo sapiens
  misc_RNA (1)...(19): siRNA sense strand
cuaaugggaauguaacaga

SEQ ID NO: 1384800 - RNA, 19 nt, Homo sapiens
  misc_RNA (1)...(19): siRNA sense strand
gaucuuauucaaucuaugc

SEQ ID NO: 1384801 - RNA, 19 nt, Homo sapiens
  misc_RNA (1)...(19): siRNA sense strand
ucacuugaguccggagaug

SEQ ID NO: 1384802 - RNA, 19 nt, Homo sapiens
  misc_RNA (1)...(19): siRNA sense strand
gcuacuuuauauacggaaa

SEQ ID NO: 1384803 - RNA, 19 nt, Homo sapiens
  misc_RNA (1)...(19): siRNA sense strand
cauauuguccaaauguuca

SEQ ID NO: 1384804 - RNA, 19 nt, Homo sapiens
  misc_RNA (1)...(19): siRNA sense strand
aaugaagugcuuucucuug

SEQ ID NO: 1384805 - RNA, 19 nt, Homo sapiens
  misc_RNA (1)...(19): siRNA sense strand
gugcagggcuuccuaaaac

SEQ ID NO: 1384806 - RNA, 19 nt, Homo sapiens
  misc_RNA (1)...(19): siRNA sense strand
aacaguuugucuucuaaug

SEQ ID NO: 1384807 - RNA, 19 nt, Homo sapiens
  misc_RNA (1)...(19): siRNA sense strand
aaucugaucauccuagcaa

SEQ ID NO: 1384808 - RNA, 19 nt, Homo sapiens
  misc_RNA (1)...(19): siRNA sense strand
aaaguaacagcaaugaagu

SEQ ID NO: 1384809 - RNA, 19 nt, Homo sapiens
  misc_RNA (1)...(19): siRNA sense strand
gccaacugggugaauguaa

SEQ ID NO: 1384810 - RNA, 19 nt, Homo sapiens
  misc_RNA (1)...(19): siRNA sense strand
caacaguuugucuucuaau

SEQ ID NO: 1384811 - RNA, 19 nt, Homo sapiens
  misc_RNA (1)...(19): siRNA sense strand
caaugaagugcuuucucuu

SEQ ID NO: 1384812 - RNA, 19 nt, Homo sapiens
  misc_RNA (1)...(19): siRNA sense strand
cauccuagcaaacaacagu

SEQ ID NO: 1384813 - RNA, 19 nt, Homo sapiens
  misc_RNA (1)...(19): siRNA sense strand
cugggugaauguaauaagu

SEQ ID NO: 1384814 - RNA, 19 nt, Homo sapiens
  misc_RNA (1)...(19): siRNA sense strand
augcaaagaaugugaggaa

SEQ ID NO: 1384815 - RNA, 19 nt, Homo sapiens
  misc_RNA (1)...(19): siRNA sense strand
uugcagaguuuuguacaua

SEQ ID NO: 1384816 - RNA, 19 nt, Homo sapiens
  misc_RNA (1)...(19): siRNA sense strand
gcaaugaagugcuuucucu

SEQ ID NO: 1384817 - RNA, 19 nt, Homo sapiens
  misc_RNA (1)...(19): siRNA sense strand
gaaucuggaugcaaagaau

SEQ ID NO: 1384818 - RNA, 19 nt, Homo sapiens
  misc_RNA (1)...(19): siRNA sense strand
aaaccacauuugagaagua

SEQ ID NO: 1384819 - RNA, 19 nt, Homo sapiens
  misc_RNA (1)...(19): siRNA sense strand
cuacuuguguuuacuucua

SEQ ID NO: 1384820 - RNA, 19 nt, Homo sapiens
  misc_RNA (1)...(19): siRNA sense strand
caacugggugaauguaaua

SEQ ID NO: 1384821 - RNA, 19 nt, Homo sapiens
  misc_RNA (1)...(19): siRNA sense strand
caaagaaugugaggaacug

SEQ ID NO: 1384822 - RNA, 19 nt, Homo sapiens
  misc_RNA (1)...(19): siRNA sense strand
gaagccaacugggugaaug

SEQ ID NO: 1384823 - RNA, 19 nt, Homo sapiens
  misc_RNA (1)...(19): siRNA sense strand
gaauuucgaaaccacauuu

SEQ ID NO: 1384824 - RNA, 19 nt, Homo sapiens
  misc_RNA (1)...(19): siRNA sense strand
caaaguaacagcaaugaag

SEQ ID NO: 1384825 - RNA, 19 nt, Homo sapiens
  misc_RNA (1)...(19): siRNA sense strand
ccacauuugagaaguauuu

SEQ ID NO: 1384826 - RNA, 19 nt, Homo sapiens
  misc_RNA (1)...(19): siRNA sense strand
ggaguuacaaguuauuuca

SEQ ID NO: 1384827 - RNA, 19 nt, Homo sapiens
  misc_RNA (1)...(19): siRNA sense strand
gaaaccacauuugagaagu

SEQ ID NO: 1384828 - RNA, 19 nt, Homo sapiens
  misc_RNA (1)...(19): siRNA sense strand
gaugcaaguauucaugaua

SEQ ID NO: 1384829 - RNA, 19 nt, Homo sapiens
  misc_RNA (1)...(19): siRNA sense strand
guccggagaugcaaguauu

SEQ ID NO: 1384830 - RNA, 19 nt, Homo sapiens
  misc_RNA (1)...(19): siRNA sense strand
guauuuccauccagugcua

SEQ ID NO: 1384831 - RNA, 19 nt, Homo sapiens
  misc_RNA (1)...(19): siRNA sense strand
uaaugggaauguaacagaa

SEQ ID NO: 1384832 - RNA, 19 nt, Homo sapiens
  misc_RNA (1)...(19): siRNA sense strand
gggugaauguaauaaguga

SEQ ID NO: 1384833 - RNA, 19 nt, Homo sapiens
  misc_RNA (1)...(19): siRNA sense strand
gagaugcaaguauucauga

SEQ ID NO: 1384834 - RNA, 19 nt, Homo sapiens
  misc_RNA (1)...(19): siRNA sense strand
ccaacugggugaauguaau

SEQ ID NO: 1384835 - RNA, 19 nt, Homo sapiens
  misc_RNA (1)...(19): siRNA sense strand
ggagaugcaaguauucaug

SEQ ID NO: 1384836 - RNA, 19 nt, Homo sapiens
  misc_RNA (1)...(19): siRNA sense strand
gcauucaugucuucauuuu

SEQ ID NO: 1384837 - RNA, 19 nt, Homo sapiens
  misc_RNA (1)...(19): siRNA sense strand
gcaaaguaacagcaaugaa

SEQ ID NO: 1384838 - RNA, 19 nt, Homo sapiens
  misc_RNA (1)...(19): siRNA sense strand
gaagcuggcauucaugucu

SEQ ID NO: 1384839 - RNA, 19 nt, Homo sapiens
  misc_RNA (1)...(19): siRNA sense strand
gugaggaacuggaggaaaa

SEQ ID NO: 1384840 - RNA, 19 nt, Homo sapiens
  misc_RNA (1)...(19): siRNA sense strand
uggcauucaugucuucauu

SEQ ID NO: 1384841 - RNA, 19 nt, Homo sapiens
  misc_RNA (1)...(19): siRNA sense strand
ugaagugcuuucucuugga

SEQ ID NO: 1384842 - RNA, 19 nt, Homo sapiens
  misc_RNA (1)...(19): siRNA sense strand
gcaaagaaugugaggaacu

SEQ ID NO: 1384843 - RNA, 19 nt, Homo sapiens
  misc_RNA (1)...(19): siRNA sense strand
ccagugcuacuuguguuua

SEQ ID NO: 1384844 - RNA, 19 nt, Homo sapiens
  misc_RNA (1)...(19): siRNA sense strand
gcagaguuuuguacauauu

SEQ ID NO: 1384845 - RNA, 19 nt, Homo sapiens
  misc_RNA (1)...(19): siRNA sense strand
ugagaaguauuuccaucca

SEQ ID NO: 1384846 - RNA, 19 nt, Homo sapiens
  misc_RNA (1)...(19): siRNA sense strand
cuaaugggaauguaacaga

SEQ ID NO: 1384847 - RNA, 19 nt, Homo sapiens
  misc_RNA (1)...(19): siRNA sense strand
gaucuuauucaaucuaugc

SEQ ID NO: 1384848 - RNA, 19 nt, Homo sapiens
  misc_RNA (1)...(19): siRNA sense strand
ucacuugaguccggagaug

SEQ ID NO: 1384849 - RNA, 19 nt, Homo sapiens
  misc_RNA (1)...(19): siRNA sense strand
gcuacuuuauauacggaaa

SEQ ID NO: 1384850 - RNA, 19 nt, Homo sapiens
  misc_RNA (1)...(19): siRNA sense strand
cgaaaccacauuugagaag

SEQ ID NO: 1384851 - RNA, 19 nt, Homo sapiens
  misc_RNA (1)...(19): siRNA sense strand
cauauuguccaaauguuca

SEQ ID NO: 1384852 - RNA, 19 nt, Homo sapiens
  misc_RNA (1)...(19): siRNA sense strand
aaugaagugcuuucucuug

SEQ ID NO: 1384853 - RNA, 19 nt, Homo sapiens
  misc_RNA (1)...(19): siRNA sense strand
ggcauucaugucuucauuu

SEQ ID NO: 1384854 - RNA, 19 nt, Homo sapiens
  misc_RNA (1)...(19): siRNA sense strand
aacaguuugucuucuaaug

SEQ ID NO: 1384855 - RNA, 19 nt, Homo sapiens
  misc_RNA (1)...(19): siRNA sense strand
aaucugaucauccuagcaa

SEQ ID NO: 1384856 - RNA, 19 nt, Homo sapiens
  misc_RNA (1)...(19): siRNA sense strand
gugcagggcuuccuaaaac

SEQ ID NO: 1384857 - RNA, 19 nt, Homo sapiens
  misc_RNA (1)...(19): siRNA sense strand
gccaacugggugaauguaa

SEQ ID NO: 1384858 - RNA, 19 nt, Homo sapiens
  misc_RNA (1)...(19): siRNA sense strand
aaaguaacagcaaugaagu

SEQ ID NO: 1384859 - RNA, 19 nt, Homo sapiens
  misc_RNA (1)...(19): siRNA sense strand
aagcuggcauucaugucuu

SEQ ID NO: 1384860 - RNA, 19 nt, Homo sapiens
  misc_RNA (1)...(19): siRNA sense strand
caacaguuugucuucuaau

SEQ ID NO: 1384861 - RNA, 19 nt, Homo sapiens
  misc_RNA (1)...(19): siRNA sense strand
cugggugaauguaauaagu

SEQ ID NO: 1384862 - RNA, 19 nt, Homo sapiens
  misc_RNA (1)...(19): siRNA sense strand
cauccuagcaaacaacagu

SEQ ID NO: 1384863 - RNA, 19 nt, Homo sapiens
  misc_RNA (1)...(19): siRNA sense strand
caaugaagugcuuucucuu

SEQ ID NO: 1384864 - RNA, 19 nt, Homo sapiens
  misc_RNA (1)...(19): siRNA sense strand
gagaauuucgaaaccacau

SEQ ID NO: 1384865 - RNA, 19 nt, Homo sapiens
  misc_RNA (1)...(19): siRNA sense strand
uugcagaguuuuguacaua

SEQ ID NO: 1384866 - RNA, 19 nt, Homo sapiens
  misc_RNA (1)...(19): siRNA sense strand
augcaaagaaugugaggaa

SEQ ID NO: 1384867 - RNA, 19 nt, Homo sapiens
  misc_RNA (1)...(19): siRNA sense strand
aaccacauuugagaaguau

SEQ ID NO: 1384868 - RNA, 19 nt, Homo sapiens
  misc_RNA (1)...(19): siRNA sense strand
gcaaugaagugcuuucucu

SEQ ID NO: 1384869 - RNA, 19 nt, Homo sapiens
  misc_RNA (1)...(19): siRNA sense strand
gaaucuggaugcaaagaau

SEQ ID NO: 1384870 - RNA, 19 nt, Homo sapiens
  misc_RNA (1)...(19): siRNA sense strand
aaaccacauuugagaagua

SEQ ID NO: 1384871 - RNA, 19 nt, Homo sapiens
  misc_RNA (1)...(19): siRNA sense strand
cuacuuguguuuacuucua

SEQ ID NO: 1384872 - RNA, 19 nt, Homo sapiens
  misc_RNA (1)...(19): siRNA sense strand
caacugggugaauguaaua

SEQ ID NO: 1384873 - RNA, 19 nt, Homo sapiens
  misc_RNA (1)...(19): siRNA sense strand
caaagaaugugaggaacug

SEQ ID NO: 1384874 - RNA, 19 nt, Homo sapiens
  misc_RNA (1)...(19): siRNA sense strand
gaagccaacugggugaaug

SEQ ID NO: 1384875 - RNA, 19 nt, Homo sapiens
  misc_RNA (1)...(19): siRNA sense strand
gaauuucgaaaccacauuu

SEQ ID NO: 1384876 - RNA, 19 nt, Homo sapiens
  misc_RNA (1)...(19): siRNA sense strand
caaaguaacagcaaugaag

SEQ ID NO: 1384877 - RNA, 19 nt, Homo sapiens
  misc_RNA (1)...(19): siRNA sense strand
ccacauuugagaaguauuu

SEQ ID NO: 1384878 - RNA, 19 nt, Homo sapiens
  misc_RNA (1)...(19): siRNA sense strand
ggaguuacaaguuauuuca

SEQ ID NO: 1384879 - RNA, 19 nt, Homo sapiens
  misc_RNA (1)...(19): siRNA sense strand
gaaaccacauuugagaagu

SEQ ID NO: 1384880 - RNA, 19 nt, Homo sapiens
  misc_RNA (1)...(19): siRNA sense strand
gaugcaaguauucaugaua

SEQ ID NO: 1384881 - RNA, 19 nt, Homo sapiens
  misc_RNA (1)...(19): siRNA sense strand
guccggagaugcaaguauu

SEQ ID NO: 1384882 - RNA, 19 nt, Homo sapiens
  misc_RNA (1)...(19): siRNA sense strand
guauuuccauccagugcua

SEQ ID NO: 1384883 - RNA, 19 nt, Homo sapiens
  misc_RNA (1)...(19): siRNA sense strand
uaaugggaauguaacagaa

SEQ ID NO: 1384884 - RNA, 19 nt, Homo sapiens
  misc_RNA (1)...(19): siRNA sense strand
gggugaauguaauaaguga

SEQ ID NO: 1384885 - RNA, 19 nt, Homo sapiens
  misc_RNA (1)...(19): siRNA sense strand
gagaugcaaguauucauga

SEQ ID NO: 1384886 - RNA, 19 nt, Homo sapiens
  misc_RNA (1)...(19): siRNA sense strand
ccaacugggugaauguaau

SEQ ID NO: 1384887 - RNA, 19 nt, Homo sapiens
  misc_RNA (1)...(19): siRNA sense strand
ggagaugcaaguauucaug

SEQ ID NO: 1384888 - RNA, 19 nt, Homo sapiens
  misc_RNA (1)...(19): siRNA sense strand
gcauucaugucuucauuuu

SEQ ID NO: 1384889 - RNA, 19 nt, Homo sapiens
  misc_RNA (1)...(19): siRNA sense strand
gcaaaguaacagcaaugaa

SEQ ID NO: 1384890 - RNA, 19 nt, Homo sapiens
  misc_RNA (1)...(19): siRNA sense strand
gaagcuggcauucaugucu

SEQ ID NO: 1384891 - RNA, 19 nt, Homo sapiens
  misc_RNA (1)...(19): siRNA sense strand
gugaggaacuggaggaaaa

SEQ ID NO: 1384892 - RNA, 19 nt, Homo sapiens
  misc_RNA (1)...(19): siRNA sense strand
uggcauucaugucuucauu

SEQ ID NO: 1384893 - RNA, 19 nt, Homo sapiens
  misc_RNA (1)...(19): siRNA sense strand
ugaagugcuuucucuugga

SEQ ID NO: 1384894 - RNA, 19 nt, Homo sapiens
  misc_RNA (1)...(19): siRNA sense strand
gcaaagaaugugaggaacu

SEQ ID NO: 1384895 - RNA, 19 nt, Homo sapiens
  misc_RNA (1)...(19): siRNA sense strand
ccagugcuacuuguguuua

SEQ ID NO: 1384896 - RNA, 19 nt, Homo sapiens
  misc_RNA (1)...(19): siRNA sense strand
gcagaguuuuguacauauu

SEQ ID NO: 1384897 - RNA, 19 nt, Homo sapiens
  misc_RNA (1)...(19): siRNA sense strand
ugagaaguauuuccaucca

SEQ ID NO: 1384898 - RNA, 19 nt, Homo sapiens
  misc_RNA (1)...(19): siRNA sense strand
cuaaugggaauguaacaga

SEQ ID NO: 1384899 - RNA, 19 nt, Homo sapiens
  misc_RNA (1)...(19): siRNA sense strand
gaucuuauucaaucuaugc

SEQ ID NO: 1384900 - RNA, 19 nt, Homo sapiens
  misc_RNA (1)...(19): siRNA sense strand
ucacuugaguccggagaug

SEQ ID NO: 1384901 - RNA, 19 nt, Homo sapiens
  misc_RNA (1)...(19): siRNA sense strand
gcuacuuuauauacggaaa

SEQ ID NO: 1384902 - RNA, 19 nt, Homo sapiens
  misc_RNA (1)...(19): siRNA sense strand
cgaaaccacauuugagaag

SEQ ID NO: 1384903 - RNA, 19 nt, Homo sapiens
  misc_RNA (1)...(19): siRNA sense strand
cauauuguccaaauguuca

SEQ ID NO: 1384904 - RNA, 19 nt, Homo sapiens
  misc_RNA (1)...(19): siRNA sense strand
aaugaagugcuuucucuug

SEQ ID NO: 1384905 - RNA, 19 nt, Homo sapiens
  misc_RNA (1)...(19): siRNA sense strand
ggcauucaugucuucauuu

SEQ ID NO: 1384906 - RNA, 19 nt, Homo sapiens
  misc_RNA (1)...(19): siRNA sense strand
aacaguuugucuucuaaug

SEQ ID NO: 1384907 - RNA, 19 nt, Homo sapiens
  misc_RNA (1)...(19): siRNA sense strand
aaucugaucauccuagcaa

SEQ ID NO: 1384908 - RNA, 19 nt, Homo sapiens
  misc_RNA (1)...(19): siRNA sense strand
gugcagggcuuccuaaaac

SEQ ID NO: 1384909 - RNA, 19 nt, Homo sapiens
  misc_RNA (1)...(19): siRNA sense strand
gccaacugggugaauguaa

SEQ ID NO: 1384910 - RNA, 19 nt, Homo sapiens
  misc_RNA (1)...(19): siRNA sense strand
aaaguaacagcaaugaagu

SEQ ID NO: 1384911 - RNA, 19 nt, Homo sapiens
  misc_RNA (1)...(19): siRNA sense strand
aagcuggcauucaugucuu

SEQ ID NO: 1384912 - RNA, 19 nt, Homo sapiens
  misc_RNA (1)...(19): siRNA sense strand
caacaguuugucuucuaau

SEQ ID NO: 1384913 - RNA, 19 nt, Homo sapiens
  misc_RNA (1)...(19): siRNA sense strand
cugggugaauguaauaagu

SEQ ID NO: 1384914 - RNA, 19 nt, Homo sapiens
  misc_RNA (1)...(19): siRNA sense strand
cauccuagcaaacaacagu

SEQ ID NO: 1384915 - RNA, 19 nt, Homo sapiens
  misc_RNA (1)...(19): siRNA sense strand
caaugaagugcuuucucuu

SEQ ID NO: 1384916 - RNA, 19 nt, Homo sapiens
  misc_RNA (1)...(19): siRNA sense strand
gagaauuucgaaaccacau

SEQ ID NO: 1384917 - RNA, 19 nt, Homo sapiens
  misc_RNA (1)...(19): siRNA sense strand
uugcagaguuuuguacaua

SEQ ID NO: 1384918 - RNA, 19 nt, Homo sapiens
  misc_RNA (1)...(19): siRNA sense strand
augcaaagaaugugaggaa

SEQ ID NO: 1384919 - RNA, 19 nt, Homo sapiens
  misc_RNA (1)...(19): siRNA sense strand
aaccacauuugagaaguau

SEQ ID NO: 1384920 - RNA, 19 nt, Homo sapiens
  misc_RNA (1)...(19): siRNA sense strand
gcaaugaagugcuuucucu

SEQ ID NO: 1384921 - RNA, 19 nt, Homo sapiens
  misc_RNA (1)...(19): siRNA sense strand
gaaucuggaugcaaagaau

SEQ ID NO: 1384922 - RNA, 19 nt, Homo sapiens
  misc_RNA (1)...(19): siRNA sense strand
caacugggugaauguaaua

SEQ ID NO: 1384923 - RNA, 19 nt, Homo sapiens
  misc_RNA (1)...(19): siRNA sense strand
caaagaaugugaggaacug

SEQ ID NO: 1384924 - RNA, 19 nt, Homo sapiens
  misc_RNA (1)...(19): siRNA sense strand
gaagccaacugggugaaug

SEQ ID NO: 1384925 - RNA, 19 nt, Homo sapiens
  misc_RNA (1)...(19): siRNA sense strand
caaaguaacagcaaugaag

SEQ ID NO: 1384926 - RNA, 19 nt, Homo sapiens
  misc_RNA (1)...(19): siRNA sense strand
ggaguuacaaguuauuuca

SEQ ID NO: 1384927 - RNA, 19 nt, Homo sapiens
  misc_RNA (1)...(19): siRNA sense strand
gaugcaaguauucaugaua

SEQ ID NO: 1384928 - RNA, 19 nt, Homo sapiens
  misc_RNA (1)...(19): siRNA sense strand
guccggagaugcaaguauu

SEQ ID NO: 1384929 - RNA, 19 nt, Homo sapiens
  misc_RNA (1)...(19): siRNA sense strand
gggugaauguaauaaguga

SEQ ID NO: 1384930 - RNA, 19 nt, Homo sapiens
  misc_RNA (1)...(19): siRNA sense strand
uaaugggaauguaacagaa

SEQ ID NO: 1384931 - RNA, 19 nt, Homo sapiens
  misc_RNA (1)...(19): siRNA sense strand
gagaugcaaguauucauga

SEQ ID NO: 1384932 - RNA, 19 nt, Homo sapiens
  misc_RNA (1)...(19): siRNA sense strand
ccaacugggugaauguaau

SEQ ID NO: 1384933 - RNA, 19 nt, Homo sapiens
  misc_RNA (1)...(19): siRNA sense strand
ggagaugcaaguauucaug

SEQ ID NO: 1384934 - RNA, 19 nt, Homo sapiens
  misc_RNA (1)...(19): siRNA sense strand
gcaaaguaacagcaaugaa

SEQ ID NO: 1384935 - RNA, 19 nt, Homo sapiens
  misc_RNA (1)...(19): siRNA sense strand
gugaggaacuggaggaaaa

SEQ ID NO: 1384936 - RNA, 19 nt, Homo sapiens
  misc_RNA (1)...(19): siRNA sense strand
ugaagugcuuucucuugga

SEQ ID NO: 1384937 - RNA, 19 nt, Homo sapiens
  misc_RNA (1)...(19): siRNA sense strand
gcaaagaaugugaggaacu

SEQ ID NO: 1384938 - RNA, 19 nt, Homo sapiens
  misc_RNA (1)...(19): siRNA sense strand
gcagaguuuuguacauauu

SEQ ID NO: 1384939 - RNA, 19 nt, Homo sapiens
  misc_RNA (1)...(19): siRNA sense strand
cuaaugggaauguaacaga

SEQ ID NO: 1384940 - RNA, 19 nt, Homo sapiens
  misc_RNA (1)...(19): siRNA sense strand
gaucuuauucaaucuaugc

SEQ ID NO: 1384941 - RNA, 19 nt, Homo sapiens
  misc_RNA (1)...(19): siRNA sense strand
ucacuugaguccggagaug

SEQ ID NO: 1384942 - RNA, 19 nt, Homo sapiens
  misc_RNA (1)...(19): siRNA sense strand
gcuacuuuauauacggaaa

SEQ ID NO: 1384943 - RNA, 19 nt, Homo sapiens
  misc_RNA (1)...(19): siRNA sense strand
cauauuguccaaauguuca

SEQ ID NO: 1384944 - RNA, 19 nt, Homo sapiens
  misc_RNA (1)...(19): siRNA sense strand
aaugaagugcuuucucuug

SEQ ID NO: 1384945 - RNA, 19 nt, Homo sapiens
  misc_RNA (1)...(19): siRNA sense strand
gugcagggcuuccuaaaac

SEQ ID NO: 1384946 - RNA, 19 nt, Homo sapiens
  misc_RNA (1)...(19): siRNA sense strand
aacaguuugucuucuaaug

SEQ ID NO: 1384947 - RNA, 19 nt, Homo sapiens
  misc_RNA (1)...(19): siRNA sense strand
aaucugaucauccuagcaa

SEQ ID NO: 1384948 - RNA, 19 nt, Homo sapiens
  misc_RNA (1)...(19): siRNA sense strand
aaaguaacagcaaugaagu

SEQ ID NO: 1384949 - RNA, 19 nt, Homo sapiens
  misc_RNA (1)...(19): siRNA sense strand
gccaacugggugaauguaa

SEQ ID NO: 1384950 - RNA, 19 nt, Homo sapiens
  misc_RNA (1)...(19): siRNA sense strand
caacaguuugucuucuaau

SEQ ID NO: 1384951 - RNA, 19 nt, Homo sapiens
  misc_RNA (1)...(19): siRNA sense strand
caaugaagugcuuucucuu

SEQ ID NO: 1384952 - RNA, 19 nt, Homo sapiens
  misc_RNA (1)...(19): siRNA sense strand
cauccuagcaaacaacagu

SEQ ID NO: 1384953 - RNA, 19 nt, Homo sapiens
  misc_RNA (1)...(19): siRNA sense strand
cugggugaauguaauaagu

SEQ ID NO: 1384954 - RNA, 19 nt, Homo sapiens
  misc_RNA (1)...(19): siRNA sense strand
augcaaagaaugugaggaa

SEQ ID NO: 1384955 - RNA, 19 nt, Homo sapiens
  misc_RNA (1)...(19): siRNA sense strand
uugcagaguuuuguacaua

SEQ ID NO: 1384956 - RNA, 19 nt, Homo sapiens
  misc_RNA (1)...(19): siRNA sense strand
gaagaaaugugugcacuuu

SEQ ID NO: 1384957 - RNA, 19 nt, Homo sapiens
  misc_RNA (1)...(19): siRNA sense strand
gaaacaagcuccaacaagu

SEQ ID NO: 1384958 - RNA, 19 nt, Homo sapiens
  misc_RNA (1)...(19): siRNA sense strand
gaauugggcuuguugauau

SEQ ID NO: 1384959 - RNA, 19 nt, Homo sapiens
  misc_RNA (1)...(19): siRNA sense strand
ggagaagaguuugauaaua

SEQ ID NO: 1384960 - RNA, 19 nt, Homo sapiens
  misc_RNA (1)...(19): siRNA sense strand
caacaagucuuucgagaau

SEQ ID NO: 1384961 - RNA, 19 nt, Homo sapiens
  misc_RNA (1)...(19): siRNA sense strand
gagaagaguuugauaauac

SEQ ID NO: 1384962 - RNA, 19 nt, Homo sapiens
  misc_RNA (1)...(19): siRNA sense strand
ggagaaaccuaacucauca

SEQ ID NO: 1384963 - RNA, 19 nt, Homo sapiens
  misc_RNA (1)...(19): siRNA sense strand
gaacgaguauuucuuugau

SEQ ID NO: 1384964 - RNA, 19 nt, Homo sapiens
  misc_RNA (1)...(19): siRNA sense strand
gcaggaaacggacgaauuu

SEQ ID NO: 1384965 - RNA, 19 nt, Homo sapiens
  misc_RNA (1)...(19): siRNA sense strand
gagagacccuuuaagagaa

SEQ ID NO: 1384966 - RNA, 19 nt, Homo sapiens
  misc_RNA (1)...(19): siRNA sense strand
ggagagacccuuuaagaga

SEQ ID NO: 1384967 - RNA, 19 nt, Homo sapiens
  misc_RNA (1)...(19): siRNA sense strand
ggaggucugugcuguauug

SEQ ID NO: 1384968 - RNA, 19 nt, Homo sapiens
  misc_RNA (1)...(19): siRNA sense strand
ggaagcaucguuucuauga

SEQ ID NO: 1384969 - RNA, 19 nt, Homo sapiens
  misc_RNA (1)...(19): siRNA sense strand
ggaagaaacugugggacuu

SEQ ID NO: 1384970 - RNA, 19 nt, Homo sapiens
  misc_RNA (1)...(19): siRNA sense strand
gcagaaacgccaagagaaa

SEQ ID NO: 1384971 - RNA, 19 nt, Homo sapiens
  misc_RNA (1)...(19): siRNA sense strand
gagaugcuauacaaugaaa

SEQ ID NO: 1384972 - RNA, 19 nt, Homo sapiens
  misc_RNA (1)...(19): siRNA sense strand
guccagaucuuccgaauca

SEQ ID NO: 1384973 - RNA, 19 nt, Homo sapiens
  misc_RNA (1)...(19): siRNA sense strand
guauggaacugauagaugu

SEQ ID NO: 1384974 - RNA, 19 nt, Homo sapiens
  misc_RNA (1)...(19): siRNA sense strand
gaagagcaccaaagagcua

SEQ ID NO: 1384975 - RNA, 19 nt, Homo sapiens
  misc_RNA (1)...(19): siRNA sense strand
ccaaauaaauggaaguucu

SEQ ID NO: 1384976 - RNA, 19 nt, Homo sapiens
  misc_RNA (1)...(19): siRNA sense strand
caguaucccugcaucauuu

SEQ ID NO: 1384977 - RNA, 19 nt, Homo sapiens
  misc_RNA (1)...(19): siRNA sense strand
aagaagagauugaaaugga

SEQ ID NO: 1384978 - RNA, 19 nt, Homo sapiens
  misc_RNA (1)...(19): siRNA sense strand
acaagucuuucgagaauaa

SEQ ID NO: 1384979 - RNA, 19 nt, Homo sapiens
  misc_RNA (1)...(19): siRNA sense strand
gcagauaagccuagugaug

SEQ ID NO: 1384980 - RNA, 19 nt, Homo sapiens
  misc_RNA (1)...(19): siRNA sense strand
ccagaucccucaaagugaa

SEQ ID NO: 1384981 - RNA, 19 nt, Homo sapiens
  misc_RNA (1)...(19): siRNA sense strand
caaugacaaccgccaauua

SEQ ID NO: 1384982 - RNA, 19 nt, Homo sapiens
  misc_RNA (1)...(19): siRNA sense strand
ggaaggcucugucggaaac

SEQ ID NO: 1384983 - RNA, 19 nt, Homo sapiens
  misc_RNA (1)...(19): siRNA sense strand
ggacgaauuuggacaacuc

SEQ ID NO: 1384984 - RNA, 19 nt, Homo sapiens
  misc_RNA (1)...(19): siRNA sense strand
gagcagaaacgccaagaga

SEQ ID NO: 1384985 - RNA, 19 nt, Homo sapiens
  misc_RNA (1)...(19): siRNA sense strand
gcgagaaggagaagaguuu

SEQ ID NO: 1384986 - RNA, 19 nt, Homo sapiens
  misc_RNA (1)...(19): siRNA sense strand
gaaggagaagaguuugaua

SEQ ID NO: 1384987 - RNA, 19 nt, Homo sapiens
  misc_RNA (1)...(19): siRNA sense strand
acuauaaucugaacgagaa

SEQ ID NO: 1384988 - RNA, 19 nt, Homo sapiens
  misc_RNA (1)...(19): siRNA sense strand
ugaacgagaacgaguauuu

SEQ ID NO: 1384989 - RNA, 19 nt, Homo sapiens
  misc_RNA (1)...(19): siRNA sense strand
gauggaaaaucacuuguuu

SEQ ID NO: 1384990 - RNA, 19 nt, Homo sapiens
  misc_RNA (1)...(19): siRNA sense strand
gaagcaucguuucuaugaa

SEQ ID NO: 1384991 - RNA, 19 nt, Homo sapiens
  misc_RNA (1)...(19): siRNA sense strand
cgacaggccugcagucucu

SEQ ID NO: 1384992 - RNA, 19 nt, Homo sapiens
  misc_RNA (1)...(19): siRNA sense strand
gaggccaucugcauaugaa

SEQ ID NO: 1384993 - RNA, 19 nt, Homo sapiens
  misc_RNA (1)...(19): siRNA sense strand
caucguuucuaugaacuua

SEQ ID NO: 1384994 - RNA, 19 nt, Homo sapiens
  misc_RNA (1)...(19): siRNA sense strand
gcuaccaaguucaccagua

SEQ ID NO: 1384995 - RNA, 19 nt, Homo sapiens
  misc_RNA (1)...(19): siRNA sense strand
ggaaacggacgaauuugga

SEQ ID NO: 1384996 - RNA, 19 nt, Homo sapiens
  misc_RNA (1)...(19): siRNA sense strand
ugauagauguggcuguuga

SEQ ID NO: 1384997 - RNA, 19 nt, Homo sapiens
  misc_RNA (1)...(19): siRNA sense strand
ggaagugugcgacgacuau

SEQ ID NO: 1384998 - RNA, 19 nt, Homo sapiens
  misc_RNA (1)...(19): siRNA sense strand
aagaacaaaugaacgaaga

SEQ ID NO: 1384999 - RNA, 19 nt, Homo sapiens
  misc_RNA (1)...(19): siRNA sense strand
caucaguaccauccucuua

SEQ ID NO: 1385000 - RNA, 19 nt, Homo sapiens
  misc_RNA (1)...(19): siRNA sense strand
agacacagccucauucuca

SEQ ID NO: 1385001 - RNA, 19 nt, Homo sapiens
  misc_RNA (1)...(19): siRNA sense strand
ggacuccgccgacgauaau

SEQ ID NO: 1385002 - RNA, 19 nt, Homo sapiens
  misc_RNA (1)...(19): siRNA sense strand
gccaagagaaagcaauuaa

SEQ ID NO: 1385003 - RNA, 19 nt, Homo sapiens
  misc_RNA (1)...(19): siRNA sense strand
cuaccaaguucaccaguau

SEQ ID NO: 1385004 - RNA, 19 nt, Homo sapiens
  misc_RNA (1)...(19): siRNA sense strand
ugaagaugcuaccaaguuc

SEQ ID NO: 1385005 - RNA, 19 nt, Homo sapiens
  misc_RNA (1)...(19): siRNA sense strand
gacagaagagcaccaaaga

SEQ ID NO: 1385006 - RNA, 19 nt, Homo sapiens
  misc_RNA (1)...(19): siRNA sense strand
ggaaacaagcuccaacaag

SEQ ID NO: 1385007 - RNA, 19 nt, Homo sapiens
  misc_RNA (1)...(19): siRNA sense strand
uggagaugcuauacaauga

SEQ ID NO: 1385008 - RNA, 19 nt, Homo sapiens
  misc_RNA (1)...(19): siRNA sense strand
gaacgagaacgaguauuuc

SEQ ID NO: 1385009 - RNA, 19 nt, Homo sapiens
  misc_RNA (1)...(19): siRNA sense strand
gaugggagagacccuuuaa

SEQ ID NO: 1385010 - RNA, 19 nt, Homo sapiens
  misc_RNA (1)...(19): siRNA sense strand
ggacagaagagcaccaaag

SEQ ID NO: 1385011 - RNA, 19 nt, Homo sapiens
  misc_RNA (1)...(19): siRNA sense strand
ugaauugggcuuguugaua

SEQ ID NO: 1385012 - RNA, 19 nt, Homo sapiens
  misc_RNA (1)...(19): siRNA sense strand
caaaugaacgaagaacuga

SEQ ID NO: 1385013 - RNA, 19 nt, Homo sapiens
  misc_RNA (1)...(19): siRNA sense strand
caucgugucuauccuguuc

SEQ ID NO: 1385014 - RNA, 19 nt, Homo sapiens
  misc_RNA (1)...(19): siRNA sense strand
gaauuuggacaacucaaug

SEQ ID NO: 1385015 - RNA, 19 nt, Homo sapiens
  misc_RNA (1)...(19): siRNA sense strand
gaagaaacugugggacuug

SEQ ID NO: 1385016 - RNA, 19 nt, Homo sapiens
  misc_RNA (1)...(19): siRNA sense strand
aaaggacaguagucaagaa

SEQ ID NO: 1385017 - RNA, 19 nt, Homo sapiens
  misc_RNA (1)...(19): siRNA sense strand
agcagaaacuguucccuuu

SEQ ID NO: 1385018 - RNA, 19 nt, Homo sapiens
  misc_RNA (1)...(19): siRNA sense strand
ugaagaagagauugaaaug

SEQ ID NO: 1385019 - RNA, 19 nt, Homo sapiens
  misc_RNA (1)...(19): siRNA sense strand
gagaguccgccaacacaaa

SEQ ID NO: 1385020 - RNA, 19 nt, Homo sapiens
  misc_RNA (1)...(19): siRNA sense strand
ccaggagaguuaagaucaa

SEQ ID NO: 1385021 - RNA, 19 nt, Homo sapiens
  misc_RNA (1)...(19): siRNA sense strand
ucaguaccauccucuuaga

SEQ ID NO: 1385022 - RNA, 19 nt, Homo sapiens
  misc_RNA (1)...(19): siRNA sense strand
agaagagauugaaauggaa

SEQ ID NO: 1385023 - RNA, 19 nt, Homo sapiens
  misc_RNA (1)...(19): siRNA sense strand
caugaccacuguuggcuau

SEQ ID NO: 1385024 - RNA, 19 nt, Homo sapiens
  misc_RNA (1)...(19): siRNA sense strand
ccaagagaaagcaauuaaa

SEQ ID NO: 1385025 - RNA, 19 nt, Homo sapiens
  misc_RNA (1)...(19): siRNA sense strand
gagaggccaucugcauaug

SEQ ID NO: 1385026 - RNA, 19 nt, Homo sapiens
  misc_RNA (1)...(19): siRNA sense strand
ucaaaggcccacugaaugu

SEQ ID NO: 1385027 - RNA, 19 nt, Homo sapiens
  misc_RNA (1)...(19): siRNA sense strand
gaagggugcaagauggaaa

SEQ ID NO: 1385028 - RNA, 19 nt, Homo sapiens
  misc_RNA (1)...(19): siRNA sense strand
acaaugaaaucaccaagac

SEQ ID NO: 1385029 - RNA, 19 nt, Homo sapiens
  misc_RNA (1)...(19): siRNA sense strand
ggaagaaaugugugcacuu

SEQ ID NO: 1385030 - RNA, 19 nt, Homo sapiens
  misc_RNA (1)...(19): siRNA sense strand
ucaagaagggugcaagaug

SEQ ID NO: 1385031 - RNA, 19 nt, Homo sapiens
  misc_RNA (1)...(19): siRNA sense strand
ccaacaagucuuucgagaa

SEQ ID NO: 1385032 - RNA, 19 nt, Homo sapiens
  misc_RNA (1)...(19): siRNA sense strand
gagaaggagaagaguuuga

SEQ ID NO: 1385033 - RNA, 19 nt, Homo sapiens
  misc_RNA (1)...(19): siRNA sense strand
ggauugaugagaucuacuu

SEQ ID NO: 1385034 - RNA, 19 nt, Homo sapiens
  misc_RNA (1)...(19): siRNA sense strand
ucacagagacagagagauc

SEQ ID NO: 1385035 - RNA, 19 nt, Homo sapiens
  misc_RNA (1)...(19): siRNA sense strand
gaagaagagauugaaaugg

SEQ ID NO: 1385036 - RNA, 19 nt, Homo sapiens
  misc_RNA (1)...(19): siRNA sense strand
ggagaugcuauacaaugaa

SEQ ID NO: 1385037 - RNA, 19 nt, Homo sapiens
  misc_RNA (1)...(19): siRNA sense strand
acaagagcgugcugcaguu

SEQ ID NO: 1385038 - RNA, 19 nt, Homo sapiens
  misc_RNA (1)...(19): siRNA sense strand
ggagaguuaagaucaaugu

SEQ ID NO: 1385039 - RNA, 19 nt, Homo sapiens
  misc_RNA (1)...(19): siRNA sense strand
ccgggaaacuccauaugau

SEQ ID NO: 1385040 - RNA, 19 nt, Homo sapiens
  misc_RNA (1)...(19): siRNA sense strand
uugaugagaucuacuugga

SEQ ID NO: 1385041 - RNA, 19 nt, Homo sapiens
  misc_RNA (1)...(19): siRNA sense strand
gcaagacauuuaccaugcu

SEQ ID NO: 1385042 - RNA, 19 nt, Homo sapiens
  misc_RNA (1)...(19): siRNA sense strand
guccagaucccucaaagug

SEQ ID NO: 1385043 - RNA, 19 nt, Homo sapiens
  misc_RNA (1)...(19): siRNA sense strand
aaaggcagcaacccacuaa

SEQ ID NO: 1385044 - RNA, 19 nt, Homo sapiens
  misc_RNA (1)...(19): siRNA sense strand
gaauaaguaccaggagguu

SEQ ID NO: 1385045 - RNA, 19 nt, Homo sapiens
  misc_RNA (1)...(19): siRNA sense strand
aaggagaagaguuugauaa

SEQ ID NO: 1385046 - RNA, 19 nt, Homo sapiens
  misc_RNA (1)...(19): siRNA sense strand
ugggagagacccuuuaaga

SEQ ID NO: 1385047 - RNA, 19 nt, Homo sapiens
  misc_RNA (1)...(19): siRNA sense strand
aaacccagacugccaagaa

SEQ ID NO: 1385048 - RNA, 19 nt, Homo sapiens
  misc_RNA (1)...(19): siRNA sense strand
gaagugugcgacgacuaua

SEQ ID NO: 1385049 - RNA, 19 nt, Homo sapiens
  misc_RNA (1)...(19): siRNA sense strand
cagagccuguggacauuau

SEQ ID NO: 1385050 - RNA, 19 nt, Homo sapiens
  misc_RNA (1)...(19): siRNA sense strand
aauaccugcugcccugaua

SEQ ID NO: 1385051 - RNA, 19 nt, Homo sapiens
  misc_RNA (1)...(19): siRNA sense strand
caggccagauaucaucaaa

SEQ ID NO: 1385052 - RNA, 19 nt, Homo sapiens
  misc_RNA (1)...(19): siRNA sense strand
gaagaugcuaccaaguuca

SEQ ID NO: 1385053 - RNA, 19 nt, Homo sapiens
  misc_RNA (1)...(19): siRNA sense strand
gaaguauggaacugauaga

SEQ ID NO: 1385054 - RNA, 19 nt, Homo sapiens
  misc_RNA (1)...(19): siRNA sense strand
gggauggcacgcuggagua

SEQ ID NO: 1385055 - RNA, 19 nt, Homo sapiens
  misc_RNA (1)...(19): siRNA sense strand
ccaagacacagccucauuc

SEQ ID NO: 1385056 - RNA, 19 nt, Homo sapiens
  misc_RNA (1)...(19): siRNA sense strand
uaucacagaugucguaaga

SEQ ID NO: 1385057 - RNA, 19 nt, Homo sapiens
  misc_RNA (1)...(19): siRNA sense strand
ucacagaugucguaagaau

SEQ ID NO: 1385058 - RNA, 19 nt, Homo sapiens
  misc_RNA (1)...(19): siRNA sense strand
ggccagauccugugcauaa

SEQ ID NO: 1385059 - RNA, 19 nt, Homo sapiens
  misc_RNA (1)...(19): siRNA sense strand
cagauccugugcauaauaa

SEQ ID NO: 1385060 - RNA, 19 nt, Homo sapiens
  misc_RNA (1)...(19): siRNA sense strand
uaaaaugggugaugucaaa

SEQ ID NO: 1385061 - RNA, 19 nt, Homo sapiens
  misc_RNA (1)...(19): siRNA sense strand
gcaggacaauaguaugcua

SEQ ID NO: 1385062 - RNA, 19 nt, Homo sapiens
  misc_RNA (1)...(19): siRNA sense strand
ugacuauaauugcaacgua

SEQ ID NO: 1385063 - RNA, 19 nt, Homo sapiens
  misc_RNA (1)...(19): siRNA sense strand
agaaacacaugaucaagug

SEQ ID NO: 1385064 - RNA, 19 nt, Homo sapiens
  misc_RNA (1)...(19): siRNA sense strand
ggagcuuuauauuguguuu

SEQ ID NO: 1385065 - RNA, 19 nt, Homo sapiens
  misc_RNA (1)...(19): siRNA sense strand
gauagaacaacuuagcaaa

SEQ ID NO: 1385066 - RNA, 19 nt, Homo sapiens
  misc_RNA (1)...(19): siRNA sense strand
ugaggaaggaccuaugaua

SEQ ID NO: 1385067 - RNA, 19 nt, Homo sapiens
  misc_RNA (1)...(19): siRNA sense strand
agagaacuaucuugaaaca

SEQ ID NO: 1385068 - RNA, 19 nt, Homo sapiens
  misc_RNA (1)...(19): siRNA sense strand
ccagaugacuauaauugca

SEQ ID NO: 1385069 - RNA, 19 nt, Homo sapiens
  misc_RNA (1)...(19): siRNA sense strand
ccagauccugugcauaaua

SEQ ID NO: 1385070 - RNA, 19 nt, Homo sapiens
  misc_RNA (1)...(19): siRNA sense strand
ugaagaaacacaugaucaa

SEQ ID NO: 1385071 - RNA, 19 nt, Homo sapiens
  misc_RNA (1)...(19): siRNA sense strand
cuacuaagcaccguuggua

SEQ ID NO: 1385072 - RNA, 19 nt, Homo sapiens
  misc_RNA (1)...(19): siRNA sense strand
gaagaaacacaugaucaag

SEQ ID NO: 1385073 - RNA, 19 nt, Homo sapiens
  misc_RNA (1)...(19): siRNA sense strand
uaccagaugacuauaauug

SEQ ID NO: 1385074 - RNA, 19 nt, Homo sapiens
  misc_RNA (1)...(19): siRNA sense strand
gauggcaggacaauaguau

SEQ ID NO: 1385075 - RNA, 19 nt, Homo sapiens
  misc_RNA (1)...(19): siRNA sense strand
ggcuguagcugcaguaaaa

SEQ ID NO: 1385076 - RNA, 19 nt, Homo sapiens
  misc_RNA (1)...(19): siRNA sense strand
ugggugaugucaaagagaa

SEQ ID NO: 1385077 - RNA, 19 nt, Homo sapiens
  misc_RNA (1)...(19): siRNA sense strand
gcaaaauguucuuuacuac

SEQ ID NO: 1385078 - RNA, 19 nt, Homo sapiens
  misc_RNA (1)...(19): siRNA sense strand
ucuaccagaugacuauaau

SEQ ID NO: 1385079 - RNA, 19 nt, Homo sapiens
  misc_RNA (1)...(19): siRNA sense strand
gaaucugaauccuccaaaa

SEQ ID NO: 1385080 - RNA, 19 nt, Homo sapiens
  misc_RNA (1)...(19): siRNA sense strand
gauccugugcauaauaaug

SEQ ID NO: 1385081 - RNA, 19 nt, Homo sapiens
  misc_RNA (1)...(19): siRNA sense strand
gaacaacuuagcaaaaugu

SEQ ID NO: 1385082 - RNA, 19 nt, Homo sapiens
  misc_RNA (1)...(19): siRNA sense strand
ggacaauaguaugcuacca

SEQ ID NO: 1385083 - RNA, 19 nt, Homo sapiens
  misc_RNA (1)...(19): siRNA sense strand
gucauaaaucuacguauuc

SEQ ID NO: 1385084 - RNA, 19 nt, Homo sapiens
  misc_RNA (1)...(19): siRNA sense strand
gcaguaaaaugggugaugu

SEQ ID NO: 1385085 - RNA, 19 nt, Homo sapiens
  misc_RNA (1)...(19): siRNA sense strand
ggacauuccauaugaacac

SEQ ID NO: 1385086 - RNA, 19 nt, Homo sapiens
  misc_RNA (1)...(19): siRNA sense strand
acauuuauuuccaguccaa

SEQ ID NO: 1385087 - RNA, 19 nt, Homo sapiens
  misc_RNA (1)...(19): siRNA sense strand
cauggacgguaucacagau

SEQ ID NO: 1385088 - RNA, 19 nt, Homo sapiens
  misc_RNA (1)...(19): siRNA sense strand
ucugauggcaggacaauag

SEQ ID NO: 1385089 - RNA, 19 nt, Homo sapiens
  misc_RNA (1)...(19): siRNA sense strand
gacauuccauaugaacaca

SEQ ID NO: 1385090 - RNA, 19 nt, Homo sapiens
  misc_RNA (1)...(19): siRNA sense strand
ccucauggacgguaucaca

SEQ ID NO: 1385091 - RNA, 19 nt, Homo sapiens
  misc_RNA (1)...(19): siRNA sense strand
ugauagaacaacuuagcaa

SEQ ID NO: 1385092 - RNA, 19 nt, Homo sapiens
  misc_RNA (1)...(19): siRNA sense strand
guauucuccucuaccagau

SEQ ID NO: 1385093 - RNA, 19 nt, Homo sapiens
  misc_RNA (1)...(19): siRNA sense strand
gccagauccugugcauaau

SEQ ID NO: 1385094 - RNA, 19 nt, Homo sapiens
  misc_RNA (1)...(19): siRNA sense strand
aagaaacacaugaucaagu

SEQ ID NO: 1385095 - RNA, 19 nt, Homo sapiens
  misc_RNA (1)...(19): siRNA sense strand
cagaugacuauaauugcaa

SEQ ID NO: 1385096 - RNA, 19 nt, Homo sapiens
  misc_RNA (1)...(19): siRNA sense strand
cgguaucacagaugucgua

SEQ ID NO: 1385097 - RNA, 19 nt, Homo sapiens
  misc_RNA (1)...(19): siRNA sense strand
aaaaccagauuggaagaaa

SEQ ID NO: 1385098 - RNA, 19 nt, Homo sapiens
  misc_RNA (1)...(19): siRNA sense strand
caccguugguauccucaug

SEQ ID NO: 1385099 - RNA, 19 nt, Homo sapiens
  misc_RNA (1)...(19): siRNA sense strand
uaucacagaugucguaaga

SEQ ID NO: 1385100 - RNA, 19 nt, Homo sapiens
  misc_RNA (1)...(19): siRNA sense strand
ucacagaugucguaagaau

SEQ ID NO: 1385101 - RNA, 19 nt, Homo sapiens
  misc_RNA (1)...(19): siRNA sense strand
ggccagauccugugcauaa

SEQ ID NO: 1385102 - RNA, 19 nt, Homo sapiens
  misc_RNA (1)...(19): siRNA sense strand
cagauccugugcauaauaa

SEQ ID NO: 1385103 - RNA, 19 nt, Homo sapiens
  misc_RNA (1)...(19): siRNA sense strand
uaaaaugggugaugucaaa

SEQ ID NO: 1385104 - RNA, 19 nt, Homo sapiens
  misc_RNA (1)...(19): siRNA sense strand
gcaggacaauaguaugcua

SEQ ID NO: 1385105 - RNA, 19 nt, Homo sapiens
  misc_RNA (1)...(19): siRNA sense strand
ugacuauaauugcaacgua

SEQ ID NO: 1385106 - RNA, 19 nt, Homo sapiens
  misc_RNA (1)...(19): siRNA sense strand
agaaacacaugaucaagug

SEQ ID NO: 1385107 - RNA, 19 nt, Homo sapiens
  misc_RNA (1)...(19): siRNA sense strand
ggagcuuuauauuguguuu

SEQ ID NO: 1385108 - RNA, 19 nt, Homo sapiens
  misc_RNA (1)...(19): siRNA sense strand
gauagaacaacuuagcaaa

SEQ ID NO: 1385109 - RNA, 19 nt, Homo sapiens
  misc_RNA (1)...(19): siRNA sense strand
ugaggaaggaccuaugaua

SEQ ID NO: 1385110 - RNA, 19 nt, Homo sapiens
  misc_RNA (1)...(19): siRNA sense strand
agagaacuaucuugaaaca

SEQ ID NO: 1385111 - RNA, 19 nt, Homo sapiens
  misc_RNA (1)...(19): siRNA sense strand
ccagaugacuauaauugca

SEQ ID NO: 1385112 - RNA, 19 nt, Homo sapiens
  misc_RNA (1)...(19): siRNA sense strand
ccagauccugugcauaaua

SEQ ID NO: 1385113 - RNA, 19 nt, Homo sapiens
  misc_RNA (1)...(19): siRNA sense strand
ugaagaaacacaugaucaa

SEQ ID NO: 1385114 - RNA, 19 nt, Homo sapiens
  misc_RNA (1)...(19): siRNA sense strand
cuacuaagcaccguuggua

SEQ ID NO: 1385115 - RNA, 19 nt, Homo sapiens
  misc_RNA (1)...(19): siRNA sense strand
gaagaaacacaugaucaag

SEQ ID NO: 1385116 - RNA, 19 nt, Homo sapiens
  misc_RNA (1)...(19): siRNA sense strand
uaccagaugacuauaauug

SEQ ID NO: 1385117 - RNA, 19 nt, Homo sapiens
  misc_RNA (1)...(19): siRNA sense strand
gauggcaggacaauaguau

SEQ ID NO: 1385118 - RNA, 19 nt, Homo sapiens
  misc_RNA (1)...(19): siRNA sense strand
ggcuguagcugcaguaaaa

SEQ ID NO: 1385119 - RNA, 19 nt, Homo sapiens
  misc_RNA (1)...(19): siRNA sense strand
ugggugaugucaaagagaa

SEQ ID NO: 1385120 - RNA, 19 nt, Homo sapiens
  misc_RNA (1)...(19): siRNA sense strand
gcaaaauguucuuuacuac

SEQ ID NO: 1385121 - RNA, 19 nt, Homo sapiens
  misc_RNA (1)...(19): siRNA sense strand
ucuaccagaugacuauaau

SEQ ID NO: 1385122 - RNA, 19 nt, Homo sapiens
  misc_RNA (1)...(19): siRNA sense strand
gaaucugaauccuccaaaa

SEQ ID NO: 1385123 - RNA, 19 nt, Homo sapiens
  misc_RNA (1)...(19): siRNA sense strand
gauccugugcauaauaaug

SEQ ID NO: 1385124 - RNA, 19 nt, Homo sapiens
  misc_RNA (1)...(19): siRNA sense strand
gaacaacuuagcaaaaugu

SEQ ID NO: 1385125 - RNA, 19 nt, Homo sapiens
  misc_RNA (1)...(19): siRNA sense strand
ggacaauaguaugcuacca

SEQ ID NO: 1385126 - RNA, 19 nt, Homo sapiens
  misc_RNA (1)...(19): siRNA sense strand
gucauaaaucuacguauuc

SEQ ID NO: 1385127 - RNA, 19 nt, Homo sapiens
  misc_RNA (1)...(19): siRNA sense strand
gcaguaaaaugggugaugu

SEQ ID NO: 1385128 - RNA, 19 nt, Homo sapiens
  misc_RNA (1)...(19): siRNA sense strand
ggacauuccauaugaacac

SEQ ID NO: 1385129 - RNA, 19 nt, Homo sapiens
  misc_RNA (1)...(19): siRNA sense strand
acauuuauuuccaguccaa

SEQ ID NO: 1385130 - RNA, 19 nt, Homo sapiens
  misc_RNA (1)...(19): siRNA sense strand
cauggacgguaucacagau

SEQ ID NO: 1385131 - RNA, 19 nt, Homo sapiens
  misc_RNA (1)...(19): siRNA sense strand
ucugauggcaggacaauag

SEQ ID NO: 1385132 - RNA, 19 nt, Homo sapiens
  misc_RNA (1)...(19): siRNA sense strand
gacauuccauaugaacaca

SEQ ID NO: 1385133 - RNA, 19 nt, Homo sapiens
  misc_RNA (1)...(19): siRNA sense strand
ccucauggacgguaucaca

SEQ ID NO: 1385134 - RNA, 19 nt, Homo sapiens
  misc_RNA (1)...(19): siRNA sense strand
ugauagaacaacuuagcaa

SEQ ID NO: 1385135 - RNA, 19 nt, Homo sapiens
  misc_RNA (1)...(19): siRNA sense strand
guauucuccucuaccagau

SEQ ID NO: 1385136 - RNA, 19 nt, Homo sapiens
  misc_RNA (1)...(19): siRNA sense strand
gccagauccugugcauaau

SEQ ID NO: 1385137 - RNA, 19 nt, Homo sapiens
  misc_RNA (1)...(19): siRNA sense strand
aagaaacacaugaucaagu

SEQ ID NO: 1385138 - RNA, 19 nt, Homo sapiens
  misc_RNA (1)...(19): siRNA sense strand
cagaugacuauaauugcaa

SEQ ID NO: 1385139 - RNA, 19 nt, Homo sapiens
  misc_RNA (1)...(19): siRNA sense strand
cgguaucacagaugucgua

SEQ ID NO: 1385140 - RNA, 19 nt, Homo sapiens
  misc_RNA (1)...(19): siRNA sense strand
aaaaccagauuggaagaaa

SEQ ID NO: 1385141 - RNA, 19 nt, Homo sapiens
  misc_RNA (1)...(19): siRNA sense strand
caccguugguauccucaug

SEQ ID NO: 1385142 - RNA, 19 nt, Homo sapiens
  misc_RNA (1)...(19): siRNA sense strand
uaucacagaugucguaaga

SEQ ID NO: 1385143 - RNA, 19 nt, Homo sapiens
  misc_RNA (1)...(19): siRNA sense strand
ucacagaugucguaagaau

SEQ ID NO: 1385144 - RNA, 19 nt, Homo sapiens
  misc_RNA (1)...(19): siRNA sense strand
ggccagauccugugcauaa

SEQ ID NO: 1385145 - RNA, 19 nt, Homo sapiens
  misc_RNA (1)...(19): siRNA sense strand
cagauccugugcauaauaa

SEQ ID NO: 1385146 - RNA, 19 nt, Homo sapiens
  misc_RNA (1)...(19): siRNA sense strand
gcaggacaauaguaugcua

SEQ ID NO: 1385147 - RNA, 19 nt, Homo sapiens
  misc_RNA (1)...(19): siRNA sense strand
ugacuauaauugcaacgua

SEQ ID NO: 1385148 - RNA, 19 nt, Homo sapiens
  misc_RNA (1)...(19): siRNA sense strand
agaaacacaugaucaagug

SEQ ID NO: 1385149 - RNA, 19 nt, Homo sapiens
  misc_RNA (1)...(19): siRNA sense strand
ggagcuuuauauuguguuu

SEQ ID NO: 1385150 - RNA, 19 nt, Homo sapiens
  misc_RNA (1)...(19): siRNA sense strand
gauagaacaacuuagcaaa

SEQ ID NO: 1385151 - RNA, 19 nt, Homo sapiens
  misc_RNA (1)...(19): siRNA sense strand
ugaggaaggaccuaugaua

SEQ ID NO: 1385152 - RNA, 19 nt, Homo sapiens
  misc_RNA (1)...(19): siRNA sense strand
agagaacuaucuugaaaca

SEQ ID NO: 1385153 - RNA, 19 nt, Homo sapiens
  misc_RNA (1)...(19): siRNA sense strand
ccagaugacuauaauugca

SEQ ID NO: 1385154 - RNA, 19 nt, Homo sapiens
  misc_RNA (1)...(19): siRNA sense strand
ccagauccugugcauaaua

SEQ ID NO: 1385155 - RNA, 19 nt, Homo sapiens
  misc_RNA (1)...(19): siRNA sense strand
ugaagaaacacaugaucaa

SEQ ID NO: 1385156 - RNA, 19 nt, Homo sapiens
  misc_RNA (1)...(19): siRNA sense strand
cuacuaagcaccguuggua

SEQ ID NO: 1385157 - RNA, 19 nt, Homo sapiens
  misc_RNA (1)...(19): siRNA sense strand
gaagaaacacaugaucaag

SEQ ID NO: 1385158 - RNA, 19 nt, Homo sapiens
  misc_RNA (1)...(19): siRNA sense strand
uaccagaugacuauaauug

SEQ ID NO: 1385159 - RNA, 19 nt, Homo sapiens
  misc_RNA (1)...(19): siRNA sense strand
gauggcaggacaauaguau

SEQ ID NO: 1385160 - RNA, 19 nt, Homo sapiens
  misc_RNA (1)...(19): siRNA sense strand
gcaaaauguucuuuacuac

SEQ ID NO: 1385161 - RNA, 19 nt, Homo sapiens
  misc_RNA (1)...(19): siRNA sense strand
ucuaccagaugacuauaau

SEQ ID NO: 1385162 - RNA, 19 nt, Homo sapiens
  misc_RNA (1)...(19): siRNA sense strand
gaaucugaauccuccaaaa

SEQ ID NO: 1385163 - RNA, 19 nt, Homo sapiens
  misc_RNA (1)...(19): siRNA sense strand
gauccugugcauaauaaug

SEQ ID NO: 1385164 - RNA, 19 nt, Homo sapiens
  misc_RNA (1)...(19): siRNA sense strand
gaacaacuuagcaaaaugu

SEQ ID NO: 1385165 - RNA, 19 nt, Homo sapiens
  misc_RNA (1)...(19): siRNA sense strand
ggacaauaguaugcuacca

SEQ ID NO: 1385166 - RNA, 19 nt, Homo sapiens
  misc_RNA (1)...(19): siRNA sense strand
gucauaaaucuacguauuc

SEQ ID NO: 1385167 - RNA, 19 nt, Homo sapiens
  misc_RNA (1)...(19): siRNA sense strand
acauuuauuuccaguccaa

SEQ ID NO: 1385168 - RNA, 19 nt, Homo sapiens
  misc_RNA (1)...(19): siRNA sense strand
ggacauuccauaugaacac

SEQ ID NO: 1385169 - RNA, 19 nt, Homo sapiens
  misc_RNA (1)...(19): siRNA sense strand
cauggacgguaucacagau

SEQ ID NO: 1385170 - RNA, 19 nt, Homo sapiens
  misc_RNA (1)...(19): siRNA sense strand
ucugauggcaggacaauag

SEQ ID NO: 1385171 - RNA, 19 nt, Homo sapiens
  misc_RNA (1)...(19): siRNA sense strand
gacauuccauaugaacaca

SEQ ID NO: 1385172 - RNA, 19 nt, Homo sapiens
  misc_RNA (1)...(19): siRNA sense strand
ccucauggacgguaucaca

SEQ ID NO: 1385173 - RNA, 19 nt, Homo sapiens
  misc_RNA (1)...(19): siRNA sense strand
ugauagaacaacuuagcaa

SEQ ID NO: 1385174 - RNA, 19 nt, Homo sapiens
  misc_RNA (1)...(19): siRNA sense strand
guauucuccucuaccagau

SEQ ID NO: 1385175 - RNA, 19 nt, Homo sapiens
  misc_RNA (1)...(19): siRNA sense strand
gccagauccugugcauaau

SEQ ID NO: 1385176 - RNA, 19 nt, Homo sapiens
  misc_RNA (1)...(19): siRNA sense strand
aagaaacacaugaucaagu

SEQ ID NO: 1385177 - RNA, 19 nt, Homo sapiens
  misc_RNA (1)...(19): siRNA sense strand
cagaugacuauaauugcaa

SEQ ID NO: 1385178 - RNA, 19 nt, Homo sapiens
  misc_RNA (1)...(19): siRNA sense strand
cgguaucacagaugucgua

SEQ ID NO: 1385179 - RNA, 19 nt, Homo sapiens
  misc_RNA (1)...(19): siRNA sense strand
aaaaccagauuggaagaaa

SEQ ID NO: 1385180 - RNA, 19 nt, Homo sapiens
  misc_RNA (1)...(19): siRNA sense strand
caccguugguauccucaug

SEQ ID NO: 1385181 - RNA, 19 nt, Homo sapiens
  misc_RNA (1)...(19): siRNA sense strand
gaaaguggauggagacaca

SEQ ID NO: 1385182 - RNA, 19 nt, Homo sapiens
  misc_RNA (1)...(19): siRNA sense strand
ugagaaagaugguuuguca

SEQ ID NO: 1385183 - RNA, 19 nt, Homo sapiens
  misc_RNA (1)...(19): siRNA sense strand
caacaagugucaacagugu

SEQ ID NO: 1385184 - RNA, 19 nt, Homo sapiens
  misc_RNA (1)...(19): siRNA sense strand
ggaaucaucguugugguua

SEQ ID NO: 1385185 - RNA, 19 nt, Homo sapiens
  misc_RNA (1)...(19): siRNA sense strand
gaaagaugguuugucaaca

SEQ ID NO: 1385186 - RNA, 19 nt, Homo sapiens
  misc_RNA (1)...(19): siRNA sense strand
gacccugguuggaaucaua

SEQ ID NO: 1385187 - RNA, 19 nt, Homo sapiens
  misc_RNA (1)...(19): siRNA sense strand
gaagaugacacugagacua

SEQ ID NO: 1385188 - RNA, 19 nt, Homo sapiens
  misc_RNA (1)...(19): siRNA sense strand
gcacaggccagccagaaga

SEQ ID NO: 1385189 - RNA, 19 nt, Homo sapiens
  misc_RNA (1)...(19): siRNA sense strand
acacugagacuacagguuu

SEQ ID NO: 1385190 - RNA, 19 nt, Homo sapiens
  misc_RNA (1)...(19): siRNA sense strand
gaugguuugucaacaguga

SEQ ID NO: 1385191 - RNA, 19 nt, Homo sapiens
  misc_RNA (1)...(19): siRNA sense strand
ucgaggaucugccaacuuc

SEQ ID NO: 1385192 - RNA, 19 nt, Homo sapiens
  misc_RNA (1)...(19): siRNA sense strand
ggugucagcucugcucuuc

SEQ ID NO: 1385193 - RNA, 19 nt, Homo sapiens
  misc_RNA (1)...(19): siRNA sense strand
gcgaagaccgcuauaaguc

SEQ ID NO: 1385194 - RNA, 19 nt, Homo sapiens
  misc_RNA (1)...(19): siRNA sense strand
caacgggaacgauguggaa

SEQ ID NO: 1385195 - RNA, 19 nt, Homo sapiens
  misc_RNA (1)...(19): siRNA sense strand
gcacaguccacgcgcaaga

SEQ ID NO: 1385196 - RNA, 19 nt, Homo sapiens
  misc_RNA (1)...(19): siRNA sense strand
cuauaagucuggcuugaca

SEQ ID NO: 1385197 - RNA, 19 nt, Homo sapiens
  misc_RNA (1)...(19): siRNA sense strand
gaaucaucguugugguuau

SEQ ID NO: 1385198 - RNA, 19 nt, Homo sapiens
  misc_RNA (1)...(19): siRNA sense strand
ggcaacaagugucaacagu

SEQ ID NO: 1385199 - RNA, 19 nt, Homo sapiens
  misc_RNA (1)...(19): siRNA sense strand
aaagaugguuugucaacag

SEQ ID NO: 1385200 - RNA, 19 nt, Homo sapiens
  misc_RNA (1)...(19): siRNA sense strand
caacucugguggcaacaag

SEQ ID NO: 1385201 - RNA, 19 nt, Homo sapiens
  misc_RNA (1)...(19): siRNA sense strand
uaacaggcauucgcaucga

SEQ ID NO: 1385202 - RNA, 19 nt, Homo sapiens
  misc_RNA (1)...(19): siRNA sense strand
aaucauaguuggggucuua

SEQ ID NO: 1385203 - RNA, 19 nt, Homo sapiens
  misc_RNA (1)...(19): siRNA sense strand
acaagugucaacaguguaa

SEQ ID NO: 1385204 - RNA, 19 nt, Homo sapiens
  misc_RNA (1)...(19): siRNA sense strand
ggauggagacacacagaca

SEQ ID NO: 1385205 - RNA, 19 nt, Homo sapiens
  misc_RNA (1)...(19): siRNA sense strand
aaucaucguugugguuaug

SEQ ID NO: 1385206 - RNA, 19 nt, Homo sapiens
  misc_RNA (1)...(19): siRNA sense strand
gauggagacacacagacaa

SEQ ID NO: 1385207 - RNA, 19 nt, Homo sapiens
  misc_RNA (1)...(19): siRNA sense strand
gcauucgcaucgaggaucu

SEQ ID NO: 1385208 - RNA, 19 nt, Homo sapiens
  misc_RNA (1)...(19): siRNA sense strand
cuucauugguggaaucauc

SEQ ID NO: 1385209 - RNA, 19 nt, Homo sapiens
  misc_RNA (1)...(19): siRNA sense strand
caugccaggugccgaagau

SEQ ID NO: 1385210 - RNA, 19 nt, Homo sapiens
  misc_RNA (1)...(19): siRNA sense strand
gcgcaagaacaaaguccaa

SEQ ID NO: 1385211 - RNA, 19 nt, Homo sapiens
  misc_RNA (1)...(19): siRNA sense strand
cagugacccugguuggaau

SEQ ID NO: 1385212 - RNA, 19 nt, Homo sapiens
  misc_RNA (1)...(19): siRNA sense strand
gagaaagaugguuugucaa

SEQ ID NO: 1385213 - RNA, 19 nt, Homo sapiens
  misc_RNA (1)...(19): siRNA sense strand
caacaguguaacaggcauu

SEQ ID NO: 1385214 - RNA, 19 nt, Homo sapiens
  misc_RNA (1)...(19): siRNA sense strand
caggagagcaacaacucaa

SEQ ID NO: 1385215 - RNA, 19 nt, Homo sapiens
  misc_RNA (1)...(19): siRNA sense strand
caaacguggccaccaguca

SEQ ID NO: 1385216 - RNA, 19 nt, Homo sapiens
  misc_RNA (1)...(19): siRNA sense strand
gagacacacagacaacagu

SEQ ID NO: 1385217 - RNA, 19 nt, Homo sapiens
  misc_RNA (1)...(19): siRNA sense strand
gauguggugacuccaggaa

SEQ ID NO: 1385218 - RNA, 19 nt, Homo sapiens
  misc_RNA (1)...(19): siRNA sense strand
ugucagcucugcucuucgu

SEQ ID NO: 1385219 - RNA, 19 nt, Homo sapiens
  misc_RNA (1)...(19): siRNA sense strand
agaaagaugguuugucaac

SEQ ID NO: 1385220 - RNA, 19 nt, Homo sapiens
  misc_RNA (1)...(19): siRNA sense strand
cagcacaggccagccagaa

SEQ ID NO: 1385221 - RNA, 19 nt, Homo sapiens
  misc_RNA (1)...(19): siRNA sense strand
caguugagaaagaugguuu

SEQ ID NO: 1385222 - RNA, 19 nt, Homo sapiens
  misc_RNA (1)...(19): siRNA sense strand
ggagacacacagacaacag

SEQ ID NO: 1385223 - RNA, 19 nt, Homo sapiens
  misc_RNA (1)...(19): siRNA sense strand
acagugacccugguuggaa

SEQ ID NO: 1385224 - RNA, 19 nt, Homo sapiens
  misc_RNA (1)...(19): siRNA sense strand
caggccagccagaagauga

SEQ ID NO: 1385225 - RNA, 19 nt, Homo sapiens
  misc_RNA (1)...(19): siRNA sense strand
cgaagaugauguggugacu

SEQ ID NO: 1385226 - RNA, 19 nt, Homo sapiens
  misc_RNA (1)...(19): siRNA sense strand
cagcucugcucuucguuuu

SEQ ID NO: 1385227 - RNA, 19 nt, Homo sapiens
  misc_RNA (1)...(19): siRNA sense strand
aagaugguuugucaacagu

SEQ ID NO: 1385228 - RNA, 19 nt, Homo sapiens
  misc_RNA (1)...(19): siRNA sense strand
gaaaguggauggagacaca

SEQ ID NO: 1385229 - RNA, 19 nt, Homo sapiens
  misc_RNA (1)...(19): siRNA sense strand
ugagaaagaugguuuguca

SEQ ID NO: 1385230 - RNA, 19 nt, Homo sapiens
  misc_RNA (1)...(19): siRNA sense strand
caacaagugucaacagugu

SEQ ID NO: 1385231 - RNA, 19 nt, Homo sapiens
  misc_RNA (1)...(19): siRNA sense strand
ggaaucaucguugugguua

SEQ ID NO: 1385232 - RNA, 19 nt, Homo sapiens
  misc_RNA (1)...(19): siRNA sense strand
gaaagaugguuugucaaca

SEQ ID NO: 1385233 - RNA, 19 nt, Homo sapiens
  misc_RNA (1)...(19): siRNA sense strand
gacccugguuggaaucaua

SEQ ID NO: 1385234 - RNA, 19 nt, Homo sapiens
  misc_RNA (1)...(19): siRNA sense strand
gaagaugacacugagacua

SEQ ID NO: 1385235 - RNA, 19 nt, Homo sapiens
  misc_RNA (1)...(19): siRNA sense strand
gcacaggccagccagaaga

SEQ ID NO: 1385236 - RNA, 19 nt, Homo sapiens
  misc_RNA (1)...(19): siRNA sense strand
acacugagacuacagguuu

SEQ ID NO: 1385237 - RNA, 19 nt, Homo sapiens
  misc_RNA (1)...(19): siRNA sense strand
gaugguuugucaacaguga

SEQ ID NO: 1385238 - RNA, 19 nt, Homo sapiens
  misc_RNA (1)...(19): siRNA sense strand
ucgaggaucugccaacuuc

SEQ ID NO: 1385239 - RNA, 19 nt, Homo sapiens
  misc_RNA (1)...(19): siRNA sense strand
ggugucagcucugcucuuc

SEQ ID NO: 1385240 - RNA, 19 nt, Homo sapiens
  misc_RNA (1)...(19): siRNA sense strand
gcgaagaccgcuauaaguc

SEQ ID NO: 1385241 - RNA, 19 nt, Homo sapiens
  misc_RNA (1)...(19): siRNA sense strand
caacgggaacgauguggaa

SEQ ID NO: 1385242 - RNA, 19 nt, Homo sapiens
  misc_RNA (1)...(19): siRNA sense strand
gcacaguccacgcgcaaga

SEQ ID NO: 1385243 - RNA, 19 nt, Homo sapiens
  misc_RNA (1)...(19): siRNA sense strand
cuauaagucuggcuugaca

SEQ ID NO: 1385244 - RNA, 19 nt, Homo sapiens
  misc_RNA (1)...(19): siRNA sense strand
gaaucaucguugugguuau

SEQ ID NO: 1385245 - RNA, 19 nt, Homo sapiens
  misc_RNA (1)...(19): siRNA sense strand
ggcaacaagugucaacagu

SEQ ID NO: 1385246 - RNA, 19 nt, Homo sapiens
  misc_RNA (1)...(19): siRNA sense strand
aaagaugguuugucaacag

SEQ ID NO: 1385247 - RNA, 19 nt, Homo sapiens
  misc_RNA (1)...(19): siRNA sense strand
caacucugguggcaacaag

SEQ ID NO: 1385248 - RNA, 19 nt, Homo sapiens
  misc_RNA (1)...(19): siRNA sense strand
uaacaggcauucgcaucga

SEQ ID NO: 1385249 - RNA, 19 nt, Homo sapiens
  misc_RNA (1)...(19): siRNA sense strand
aaucauaguuggggucuua

SEQ ID NO: 1385250 - RNA, 19 nt, Homo sapiens
  misc_RNA (1)...(19): siRNA sense strand
acaagugucaacaguguaa

SEQ ID NO: 1385251 - RNA, 19 nt, Homo sapiens
  misc_RNA (1)...(19): siRNA sense strand
ggauggagacacacagaca

SEQ ID NO: 1385252 - RNA, 19 nt, Homo sapiens
  misc_RNA (1)...(19): siRNA sense strand
aaucaucguugugguuaug

SEQ ID NO: 1385253 - RNA, 19 nt, Homo sapiens
  misc_RNA (1)...(19): siRNA sense strand
gauggagacacacagacaa

SEQ ID NO: 1385254 - RNA, 19 nt, Homo sapiens
  misc_RNA (1)...(19): siRNA sense strand
gcauucgcaucgaggaucu

SEQ ID NO: 1385255 - RNA, 19 nt, Homo sapiens
  misc_RNA (1)...(19): siRNA sense strand
cuucauugguggaaucauc

SEQ ID NO: 1385256 - RNA, 19 nt, Homo sapiens
  misc_RNA (1)...(19): siRNA sense strand
caugccaggugccgaagau

SEQ ID NO: 1385257 - RNA, 19 nt, Homo sapiens
  misc_RNA (1)...(19): siRNA sense strand
gcgcaagaacaaaguccaa

SEQ ID NO: 1385258 - RNA, 19 nt, Homo sapiens
  misc_RNA (1)...(19): siRNA sense strand
cagugacccugguuggaau

SEQ ID NO: 1385259 - RNA, 19 nt, Homo sapiens
  misc_RNA (1)...(19): siRNA sense strand
gagaaagaugguuugucaa

SEQ ID NO: 1385260 - RNA, 19 nt, Homo sapiens
  misc_RNA (1)...(19): siRNA sense strand
caacaguguaacaggcauu

SEQ ID NO: 1385261 - RNA, 19 nt, Homo sapiens
  misc_RNA (1)...(19): siRNA sense strand
caggagagcaacaacucaa

SEQ ID NO: 1385262 - RNA, 19 nt, Homo sapiens
  misc_RNA (1)...(19): siRNA sense strand
caaacguggccaccaguca

SEQ ID NO: 1385263 - RNA, 19 nt, Homo sapiens
  misc_RNA (1)...(19): siRNA sense strand
gagacacacagacaacagu

SEQ ID NO: 1385264 - RNA, 19 nt, Homo sapiens
  misc_RNA (1)...(19): siRNA sense strand
gauguggugacuccaggaa

SEQ ID NO: 1385265 - RNA, 19 nt, Homo sapiens
  misc_RNA (1)...(19): siRNA sense strand
ugucagcucugcucuucgu

SEQ ID NO: 1385266 - RNA, 19 nt, Homo sapiens
  misc_RNA (1)...(19): siRNA sense strand
agaaagaugguuugucaac

SEQ ID NO: 1385267 - RNA, 19 nt, Homo sapiens
  misc_RNA (1)...(19): siRNA sense strand
cagcacaggccagccagaa

SEQ ID NO: 1385268 - RNA, 19 nt, Homo sapiens
  misc_RNA (1)...(19): siRNA sense strand
caguugagaaagaugguuu

SEQ ID NO: 1385269 - RNA, 19 nt, Homo sapiens
  misc_RNA (1)...(19): siRNA sense strand
ggagacacacagacaacag

SEQ ID NO: 1385270 - RNA, 19 nt, Homo sapiens
  misc_RNA (1)...(19): siRNA sense strand
acagugacccugguuggaa

SEQ ID NO: 1385271 - RNA, 19 nt, Homo sapiens
  misc_RNA (1)...(19): siRNA sense strand
caggccagccagaagauga

SEQ ID NO: 1385272 - RNA, 19 nt, Homo sapiens
  misc_RNA (1)...(19): siRNA sense strand
cgaagaugauguggugacu

SEQ ID NO: 1385273 - RNA, 19 nt, Homo sapiens
  misc_RNA (1)...(19): siRNA sense strand
cagcucugcucuucguuuu

SEQ ID NO: 1385274 - RNA, 19 nt, Homo sapiens
  misc_RNA (1)...(19): siRNA sense strand
aagaugguuugucaacagu

SEQ ID NO: 1385275 - RNA, 19 nt, Homo sapiens
  misc_RNA (1)...(19): siRNA sense strand
gcaaugagcuggaggagau

SEQ ID NO: 1385276 - RNA, 19 nt, Homo sapiens
  misc_RNA (1)...(19): siRNA sense strand
gcaaugagaucgauacaca

SEQ ID NO: 1385277 - RNA, 19 nt, Homo sapiens
  misc_RNA (1)...(19): siRNA sense strand
gcgaagggcugaccaguug

SEQ ID NO: 1385278 - RNA, 19 nt, Homo sapiens
  misc_RNA (1)...(19): siRNA sense strand
guaacaagcuuaaaucaag

SEQ ID NO: 1385279 - RNA, 19 nt, Homo sapiens
  misc_RNA (1)...(19): siRNA sense strand
gaaggcugauuccaacaaa

SEQ ID NO: 1385280 - RNA, 19 nt, Homo sapiens
  misc_RNA (1)...(19): siRNA sense strand
ggacuuugguuauguugga

SEQ ID NO: 1385281 - RNA, 19 nt, Homo sapiens
  misc_RNA (1)...(19): siRNA sense strand
gaguaaagaugcugguauc

SEQ ID NO: 1385282 - RNA, 19 nt, Homo sapiens
  misc_RNA (1)...(19): siRNA sense strand
ggaaagcacccgucguaug

SEQ ID NO: 1385283 - RNA, 19 nt, Homo sapiens
  misc_RNA (1)...(19): siRNA sense strand
gaaagcacccgucguaugc

SEQ ID NO: 1385284 - RNA, 19 nt, Homo sapiens
  misc_RNA (1)...(19): siRNA sense strand
gguaucaggacuuugguua

SEQ ID NO: 1385285 - RNA, 19 nt, Homo sapiens
  misc_RNA (1)...(19): siRNA sense strand
caaccaacgugcaacaaag

SEQ ID NO: 1385286 - RNA, 19 nt, Homo sapiens
  misc_RNA (1)...(19): siRNA sense strand
gcugaugagucgcuggaaa

SEQ ID NO: 1385287 - RNA, 19 nt, Homo sapiens
  misc_RNA (1)...(19): siRNA sense strand
ugagaucgauacacagaau

SEQ ID NO: 1385288 - RNA, 19 nt, Homo sapiens
  misc_RNA (1)...(19): siRNA sense strand
uaucaggacuuugguuaug

SEQ ID NO: 1385289 - RNA, 19 nt, Homo sapiens
  misc_RNA (1)...(19): siRNA sense strand
ugaaauggaugaaaaccua

SEQ ID NO: 1385290 - RNA, 19 nt, Homo sapiens
  misc_RNA (1)...(19): siRNA sense strand
cagccagccugcucgugua

SEQ ID NO: 1385291 - RNA, 19 nt, Homo sapiens
  misc_RNA (1)...(19): siRNA sense strand
ucacauggcccuggauaug

SEQ ID NO: 1385292 - RNA, 19 nt, Homo sapiens
  misc_RNA (1)...(19): siRNA sense strand
ggaugaacaaggagaacaa

SEQ ID NO: 1385293 - RNA, 19 nt, Homo sapiens
  misc_RNA (1)...(19): siRNA sense strand
ucaggacuuugguuauguu

SEQ ID NO: 1385294 - RNA, 19 nt, Homo sapiens
  misc_RNA (1)...(19): siRNA sense strand
ccaaccaacgugcaacaaa

SEQ ID NO: 1385295 - RNA, 19 nt, Homo sapiens
  misc_RNA (1)...(19): siRNA sense strand
gagaguaaagaugcuggua

SEQ ID NO: 1385296 - RNA, 19 nt, Homo sapiens
  misc_RNA (1)...(19): siRNA sense strand
ggccgaagacgcagacaug

SEQ ID NO: 1385297 - RNA, 19 nt, Homo sapiens
  misc_RNA (1)...(19): siRNA sense strand
ggauaugggcaaugagauc

SEQ ID NO: 1385298 - RNA, 19 nt, Homo sapiens
  misc_RNA (1)...(19): siRNA sense strand
cuggaaagcacccgucgua

SEQ ID NO: 1385299 - RNA, 19 nt, Homo sapiens
  misc_RNA (1)...(19): siRNA sense strand
aacaaaugaugcccgagaa

SEQ ID NO: 1385300 - RNA, 19 nt, Homo sapiens
  misc_RNA (1)...(19): siRNA sense strand
caacaaaaccagaauugau

SEQ ID NO: 1385301 - RNA, 19 nt, Homo sapiens
  misc_RNA (1)...(19): siRNA sense strand
ggacgaacgggagcagaug

SEQ ID NO: 1385302 - RNA, 19 nt, Homo sapiens
  misc_RNA (1)...(19): siRNA sense strand
ucgacaggaucauggagaa

SEQ ID NO: 1385303 - RNA, 19 nt, Homo sapiens
  misc_RNA (1)...(19): siRNA sense strand
gagaaaaugaaauggauga

SEQ ID NO: 1385304 - RNA, 19 nt, Homo sapiens
  misc_RNA (1)...(19): siRNA sense strand
acaaagaugcugggaagug

SEQ ID NO: 1385305 - RNA, 19 nt, Homo sapiens
  misc_RNA (1)...(19): siRNA sense strand
gaauugaugaggccaacca

SEQ ID NO: 1385306 - RNA, 19 nt, Homo sapiens
  misc_RNA (1)...(19): siRNA sense strand
gcaggugagcggcaucauc

SEQ ID NO: 1385307 - RNA, 19 nt, Homo sapiens
  misc_RNA (1)...(19): siRNA sense strand
ccagccugcucguguagug

SEQ ID NO: 1385308 - RNA, 19 nt, Homo sapiens
  misc_RNA (1)...(19): siRNA sense strand
gcugguaucaggacuuugg

SEQ ID NO: 1385309 - RNA, 19 nt, Homo sapiens
  misc_RNA (1)...(19): siRNA sense strand
acaaaugaugcccgagaaa

SEQ ID NO: 1385310 - RNA, 19 nt, Homo sapiens
  misc_RNA (1)...(19): siRNA sense strand
guaucaggacuuugguuau

SEQ ID NO: 1385311 - RNA, 19 nt, Homo sapiens
  misc_RNA (1)...(19): siRNA sense strand
aaugagaucgauacacaga

SEQ ID NO: 1385312 - RNA, 19 nt, Homo sapiens
  misc_RNA (1)...(19): siRNA sense strand
guaaagaugcugguaucag

SEQ ID NO: 1385313 - RNA, 19 nt, Homo sapiens
  misc_RNA (1)...(19): siRNA sense strand
cgucacauggcccuggaua

SEQ ID NO: 1385314 - RNA, 19 nt, Homo sapiens
  misc_RNA (1)...(19): siRNA sense strand
gcugaccaguuggcugaug

SEQ ID NO: 1385315 - RNA, 19 nt, Homo sapiens
  misc_RNA (1)...(19): siRNA sense strand
cugaccaguuggcugauga

SEQ ID NO: 1385316 - RNA, 19 nt, Homo sapiens
  misc_RNA (1)...(19): siRNA sense strand
ucauggagaaggcugauuc

SEQ ID NO: 1385317 - RNA, 19 nt, Homo sapiens
  misc_RNA (1)...(19): siRNA sense strand
caaaugaugcccgagaaaa

SEQ ID NO: 1385318 - RNA, 19 nt, Homo sapiens
  misc_RNA (1)...(19): siRNA sense strand
gaugcugggaagugguuaa

SEQ ID NO: 1385319 - RNA, 19 nt, Homo sapiens
  misc_RNA (1)...(19): siRNA sense strand
agaguaaagaugcugguau

SEQ ID NO: 1385320 - RNA, 19 nt, Homo sapiens
  misc_RNA (1)...(19): siRNA sense strand
guugaagagaguaaagaug

SEQ ID NO: 1385321 - RNA, 19 nt, Homo sapiens
  misc_RNA (1)...(19): siRNA sense strand
gcaaugagcuggaggagau

SEQ ID NO: 1385322 - RNA, 19 nt, Homo sapiens
  misc_RNA (1)...(19): siRNA sense strand
gcaaugagaucgauacaca

SEQ ID NO: 1385323 - RNA, 19 nt, Homo sapiens
  misc_RNA (1)...(19): siRNA sense strand
gcgaagggcugaccaguug

SEQ ID NO: 1385324 - RNA, 19 nt, Homo sapiens
  misc_RNA (1)...(19): siRNA sense strand
guaacaagcuuaaaucaag

SEQ ID NO: 1385325 - RNA, 19 nt, Homo sapiens
  misc_RNA (1)...(19): siRNA sense strand
gaaggcugauuccaacaaa

SEQ ID NO: 1385326 - RNA, 19 nt, Homo sapiens
  misc_RNA (1)...(19): siRNA sense strand
ggacuuugguuauguugga

SEQ ID NO: 1385327 - RNA, 19 nt, Homo sapiens
  misc_RNA (1)...(19): siRNA sense strand
gaguaaagaugcugguauc

SEQ ID NO: 1385328 - RNA, 19 nt, Homo sapiens
  misc_RNA (1)...(19): siRNA sense strand
ggaaagcacccgucguaug

SEQ ID NO: 1385329 - RNA, 19 nt, Homo sapiens
  misc_RNA (1)...(19): siRNA sense strand
gaaagcacccgucguaugc

SEQ ID NO: 1385330 - RNA, 19 nt, Homo sapiens
  misc_RNA (1)...(19): siRNA sense strand
gguaucaggacuuugguua

SEQ ID NO: 1385331 - RNA, 19 nt, Homo sapiens
  misc_RNA (1)...(19): siRNA sense strand
caaccaacgugcaacaaag

SEQ ID NO: 1385332 - RNA, 19 nt, Homo sapiens
  misc_RNA (1)...(19): siRNA sense strand
gcugaugagucgcuggaaa

SEQ ID NO: 1385333 - RNA, 19 nt, Homo sapiens
  misc_RNA (1)...(19): siRNA sense strand
ugagaucgauacacagaau

SEQ ID NO: 1385334 - RNA, 19 nt, Homo sapiens
  misc_RNA (1)...(19): siRNA sense strand
uaucaggacuuugguuaug

SEQ ID NO: 1385335 - RNA, 19 nt, Homo sapiens
  misc_RNA (1)...(19): siRNA sense strand
ugaaauggaugaaaaccua

SEQ ID NO: 1385336 - RNA, 19 nt, Homo sapiens
  misc_RNA (1)...(19): siRNA sense strand
cagccagccugcucgugua

SEQ ID NO: 1385337 - RNA, 19 nt, Homo sapiens
  misc_RNA (1)...(19): siRNA sense strand
ucacauggcccuggauaug

SEQ ID NO: 1385338 - RNA, 19 nt, Homo sapiens
  misc_RNA (1)...(19): siRNA sense strand
ggaugaacaaggagaacaa

SEQ ID NO: 1385339 - RNA, 19 nt, Homo sapiens
  misc_RNA (1)...(19): siRNA sense strand
ucaggacuuugguuauguu

SEQ ID NO: 1385340 - RNA, 19 nt, Homo sapiens
  misc_RNA (1)...(19): siRNA sense strand
ccaaccaacgugcaacaaa

SEQ ID NO: 1385341 - RNA, 19 nt, Homo sapiens
  misc_RNA (1)...(19): siRNA sense strand
gagaguaaagaugcuggua

SEQ ID NO: 1385342 - RNA, 19 nt, Homo sapiens
  misc_RNA (1)...(19): siRNA sense strand
ggccgaagacgcagacaug

SEQ ID NO: 1385343 - RNA, 19 nt, Homo sapiens
  misc_RNA (1)...(19): siRNA sense strand
ggauaugggcaaugagauc

SEQ ID NO: 1385344 - RNA, 19 nt, Homo sapiens
  misc_RNA (1)...(19): siRNA sense strand
cuggaaagcacccgucgua

SEQ ID NO: 1385345 - RNA, 19 nt, Homo sapiens
  misc_RNA (1)...(19): siRNA sense strand
aacaaaugaugcccgagaa

SEQ ID NO: 1385346 - RNA, 19 nt, Homo sapiens
  misc_RNA (1)...(19): siRNA sense strand
caacaaaaccagaauugau

SEQ ID NO: 1385347 - RNA, 19 nt, Homo sapiens
  misc_RNA (1)...(19): siRNA sense strand
ggacgaacgggagcagaug

SEQ ID NO: 1385348 - RNA, 19 nt, Homo sapiens
  misc_RNA (1)...(19): siRNA sense strand
ucgacaggaucauggagaa

SEQ ID NO: 1385349 - RNA, 19 nt, Homo sapiens
  misc_RNA (1)...(19): siRNA sense strand
gagaaaaugaaauggauga

SEQ ID NO: 1385350 - RNA, 19 nt, Homo sapiens
  misc_RNA (1)...(19): siRNA sense strand
acaaagaugcugggaagug

SEQ ID NO: 1385351 - RNA, 19 nt, Homo sapiens
  misc_RNA (1)...(19): siRNA sense strand
gaauugaugaggccaacca

SEQ ID NO: 1385352 - RNA, 19 nt, Homo sapiens
  misc_RNA (1)...(19): siRNA sense strand
gcaggugagcggcaucauc

SEQ ID NO: 1385353 - RNA, 19 nt, Homo sapiens
  misc_RNA (1)...(19): siRNA sense strand
ccagccugcucguguagug

SEQ ID NO: 1385354 - RNA, 19 nt, Homo sapiens
  misc_RNA (1)...(19): siRNA sense strand
gcugguaucaggacuuugg

SEQ ID NO: 1385355 - RNA, 19 nt, Homo sapiens
  misc_RNA (1)...(19): siRNA sense strand
acaaaugaugcccgagaaa

SEQ ID NO: 1385356 - RNA, 19 nt, Homo sapiens
  misc_RNA (1)...(19): siRNA sense strand
guaucaggacuuugguuau

SEQ ID NO: 1385357 - RNA, 19 nt, Homo sapiens
  misc_RNA (1)...(19): siRNA sense strand
aaugagaucgauacacaga

SEQ ID NO: 1385358 - RNA, 19 nt, Homo sapiens
  misc_RNA (1)...(19): siRNA sense strand
guaaagaugcugguaucag

SEQ ID NO: 1385359 - RNA, 19 nt, Homo sapiens
  misc_RNA (1)...(19): siRNA sense strand
cgucacauggcccuggaua

SEQ ID NO: 1385360 - RNA, 19 nt, Homo sapiens
  misc_RNA (1)...(19): siRNA sense strand
gcugaccaguuggcugaug

SEQ ID NO: 1385361 - RNA, 19 nt, Homo sapiens
  misc_RNA (1)...(19): siRNA sense strand
cugaccaguuggcugauga

SEQ ID NO: 1385362 - RNA, 19 nt, Homo sapiens
  misc_RNA (1)...(19): siRNA sense strand
ucauggagaaggcugauuc

SEQ ID NO: 1385363 - RNA, 19 nt, Homo sapiens
  misc_RNA (1)...(19): siRNA sense strand
caaaugaugcccgagaaaa

SEQ ID NO: 1385364 - RNA, 19 nt, Homo sapiens
  misc_RNA (1)...(19): siRNA sense strand
gaugcugggaagugguuaa

SEQ ID NO: 1385365 - RNA, 19 nt, Homo sapiens
  misc_RNA (1)...(19): siRNA sense strand
agaguaaagaugcugguau

SEQ ID NO: 1385366 - RNA, 19 nt, Homo sapiens
  misc_RNA (1)...(19): siRNA sense strand
guugaagagaguaaagaug

SEQ ID NO: 1385367 - RNA, 19 nt, Homo sapiens
  misc_RNA (1)...(19): siRNA sense strand
acuacuacguggacucguu

SEQ ID NO: 1385368 - RNA, 19 nt, Homo sapiens
  misc_RNA (1)...(19): siRNA sense strand
caacaaagaccgagcaaaa

SEQ ID NO: 1385369 - RNA, 19 nt, Homo sapiens
  misc_RNA (1)...(19): siRNA sense strand
aaacaaugcugagaaugag

SEQ ID NO: 1385370 - RNA, 19 nt, Homo sapiens
  misc_RNA (1)...(19): siRNA sense strand
cccuggaacuggagaaaga

SEQ ID NO: 1385371 - RNA, 19 nt, Homo sapiens
  misc_RNA (1)...(19): siRNA sense strand
ugaaaacaaugcugagaau

SEQ ID NO: 1385372 - RNA, 19 nt, Homo sapiens
  misc_RNA (1)...(19): siRNA sense strand
agaggcaggucaagaucug

SEQ ID NO: 1385373 - RNA, 19 nt, Homo sapiens
  misc_RNA (1)...(19): siRNA sense strand
aaaacaaugcugagaauga

SEQ ID NO: 1385374 - RNA, 19 nt, Homo sapiens
  misc_RNA (1)...(19): siRNA sense strand
uuccagaaccgcaggauga

SEQ ID NO: 1385375 - RNA, 19 nt, Homo sapiens
  misc_RNA (1)...(19): siRNA sense strand
acuacuacguggacucguu

SEQ ID NO: 1385376 - RNA, 19 nt, Homo sapiens
  misc_RNA (1)...(19): siRNA sense strand
ccgagaggcaggucaagau

SEQ ID NO: 1385377 - RNA, 19 nt, Homo sapiens
  misc_RNA (1)...(19): siRNA sense strand
agaaagacaugcucucaaa

SEQ ID NO: 1385378 - RNA, 19 nt, Homo sapiens
  misc_RNA (1)...(19): siRNA sense strand
gaaagccaguauccagauu

SEQ ID NO: 1385379 - RNA, 19 nt, Homo sapiens
  misc_RNA (1)...(19): siRNA sense strand
caaaacaccuuaggacaua

SEQ ID NO: 1385380 - RNA, 19 nt, Homo sapiens
  misc_RNA (1)...(19): siRNA sense strand
gagaaugucguguucaguu

SEQ ID NO: 1385381 - RNA, 19 nt, Homo sapiens
  misc_RNA (1)...(19): siRNA sense strand
ucacuucaaucgcuaccua

SEQ ID NO: 1385382 - RNA, 19 nt, Homo sapiens
  misc_RNA (1)...(19): siRNA sense strand
cuauggaucuaauuccuuu

SEQ ID NO: 1385383 - RNA, 19 nt, Homo sapiens
  misc_RNA (1)...(19): siRNA sense strand
aagccaguauccagauuua

SEQ ID NO: 1385384 - RNA, 19 nt, Homo sapiens
  misc_RNA (1)...(19): siRNA sense strand
cagaagaggagaagcagaa

SEQ ID NO: 1385385 - RNA, 19 nt, Homo sapiens
  misc_RNA (1)...(19): siRNA sense strand
ucaauuccaccgccuauga

SEQ ID NO: 1385386 - RNA, 19 nt, Homo sapiens
  misc_RNA (1)...(19): siRNA sense strand
gaucuacucgacucccuuu

SEQ ID NO: 1385387 - RNA, 19 nt, Homo sapiens
  misc_RNA (1)...(19): siRNA sense strand
ggagaagcagaaagaguga

SEQ ID NO: 1385388 - RNA, 19 nt, Homo sapiens
  misc_RNA (1)...(19): siRNA sense strand
ggaacuggagaaggaauuu

SEQ ID NO: 1385389 - RNA, 19 nt, Homo sapiens
  misc_RNA (1)...(19): siRNA sense strand
guaugacuauggaucuaau

SEQ ID NO: 1385390 - RNA, 19 nt, Homo sapiens
  misc_RNA (1)...(19): siRNA sense strand
ugaggcauuucucgaccua

SEQ ID NO: 1385391 - RNA, 19 nt, Homo sapiens
  misc_RNA (1)...(19): siRNA sense strand
acaggagaaugucguguuc

SEQ ID NO: 1385392 - RNA, 19 nt, Homo sapiens
  misc_RNA (1)...(19): siRNA sense strand
agaaugucguguucaguuc

SEQ ID NO: 1385393 - RNA, 19 nt, Homo sapiens
  misc_RNA (1)...(19): siRNA sense strand
aagaggagaagcagaaaga

SEQ ID NO: 1385394 - RNA, 19 nt, Homo sapiens
  misc_RNA (1)...(19): siRNA sense strand
caacgucgcccucaauucc

SEQ ID NO: 1385395 - RNA, 19 nt, Homo sapiens
  misc_RNA (1)...(19): siRNA sense strand
gaggagaagcagaaagagu

SEQ ID NO: 1385396 - RNA, 19 nt, Homo sapiens
  misc_RNA (1)...(19): siRNA sense strand
gaagaggagaagcagaaag

SEQ ID NO: 1385397 - RNA, 19 nt, Homo sapiens
  misc_RNA (1)...(19): siRNA sense strand
gaaagacaugcucucaaac

SEQ ID NO: 1385398 - RNA, 19 nt, Homo sapiens
  misc_RNA (1)...(19): siRNA sense strand
gaacuggagaaggaauuuc

SEQ ID NO: 1385399 - RNA, 19 nt, Homo sapiens
  misc_RNA (1)...(19): siRNA sense strand
gcucucaaacugcagacaa

SEQ ID NO: 1385400 - RNA, 19 nt, Homo sapiens
  misc_RNA (1)...(19): siRNA sense strand
aagacaugcucucaaacug

SEQ ID NO: 1385401 - RNA, 19 nt, Homo sapiens
  misc_RNA (1)...(19): siRNA sense strand
cccuggaacuggagaagga

SEQ ID NO: 1385402 - RNA, 19 nt, Homo sapiens
  misc_RNA (1)...(19): siRNA sense strand
aaagacaugcucucaaacu

SEQ ID NO: 1385403 - RNA, 19 nt, Homo sapiens
  misc_RNA (1)...(19): siRNA sense strand
agacagaagaggagaagca

SEQ ID NO: 1385404 - RNA, 19 nt, Homo sapiens
  misc_RNA (1)...(19): siRNA sense strand
aggcauuucucgaccuaug

SEQ ID NO: 1385405 - RNA, 19 nt, Homo sapiens
  misc_RNA (1)...(19): siRNA sense strand
uaacacacagaccucaauc

SEQ ID NO: 1385406 - RNA, 19 nt, Homo sapiens
  misc_RNA (1)...(19): siRNA sense strand
aaucucacauccacucucu

SEQ ID NO: 1385407 - RNA, 19 nt, Homo sapiens
  misc_RNA (1)...(19): siRNA sense strand
aaagccaguauccagauuu

SEQ ID NO: 1385408 - RNA, 19 nt, Homo sapiens
  misc_RNA (1)...(19): siRNA sense strand
gacuauggaucuaauuccu

SEQ ID NO: 1385409 - RNA, 19 nt, Homo sapiens
  misc_RNA (1)...(19): siRNA sense strand
caccuuaggacauaacaca

SEQ ID NO: 1385410 - RNA, 19 nt, Homo sapiens
  misc_RNA (1)...(19): siRNA sense strand
ugaccgagcgacagaucaa

SEQ ID NO: 1385411 - RNA, 19 nt, Homo sapiens
  misc_RNA (1)...(19): siRNA sense strand
ccguaugacuauggaucua

SEQ ID NO: 1385412 - RNA, 19 nt, Homo sapiens
  misc_RNA (1)...(19): siRNA sense strand
gcccagaaccggaucuacu

SEQ ID NO: 1385413 - RNA, 19 nt, Homo sapiens
  misc_RNA (1)...(19): siRNA sense strand
uggaugcagcgaaugaauu

SEQ ID NO: 1385414 - RNA, 19 nt, Homo sapiens
  misc_RNA (1)...(19): siRNA sense strand
gcauuucucgaccuaugga

SEQ ID NO: 1385415 - RNA, 19 nt, Homo sapiens
  misc_RNA (1)...(19): siRNA sense strand
cuacucgacucccuuuuau

SEQ ID NO: 1385416 - RNA, 19 nt, Homo sapiens
  misc_RNA (1)...(19): siRNA sense strand
cacaggagaaugucguguu

SEQ ID NO: 1385417 - RNA, 19 nt, Homo sapiens
  misc_RNA (1)...(19): siRNA sense strand
gaccagaaagccaguaucc

SEQ ID NO: 1385418 - RNA, 19 nt, Homo sapiens
  misc_RNA (1)...(19): siRNA sense strand
cucucaaacugcagacaaa

SEQ ID NO: 1385419 - RNA, 19 nt, Homo sapiens
  misc_RNA (1)...(19): siRNA sense strand
gaaagccaguauccagauu

SEQ ID NO: 1385420 - RNA, 19 nt, Homo sapiens
  misc_RNA (1)...(19): siRNA sense strand
caaaacaccuuaggacaua

SEQ ID NO: 1385421 - RNA, 19 nt, Homo sapiens
  misc_RNA (1)...(19): siRNA sense strand
ucacuucaaucgcuaccua

SEQ ID NO: 1385422 - RNA, 19 nt, Homo sapiens
  misc_RNA (1)...(19): siRNA sense strand
aagccaguauccagauuua

SEQ ID NO: 1385423 - RNA, 19 nt, Homo sapiens
  misc_RNA (1)...(19): siRNA sense strand
cagaagaggagaagcagaa

SEQ ID NO: 1385424 - RNA, 19 nt, Homo sapiens
  misc_RNA (1)...(19): siRNA sense strand
ggagaagcagaaagaguga

SEQ ID NO: 1385425 - RNA, 19 nt, Homo sapiens
  misc_RNA (1)...(19): siRNA sense strand
ggaacuggagaaggaauuu

SEQ ID NO: 1385426 - RNA, 19 nt, Homo sapiens
  misc_RNA (1)...(19): siRNA sense strand
aagaggagaagcagaaaga

SEQ ID NO: 1385427 - RNA, 19 nt, Homo sapiens
  misc_RNA (1)...(19): siRNA sense strand
gaggagaagcagaaagagu

SEQ ID NO: 1385428 - RNA, 19 nt, Homo sapiens
  misc_RNA (1)...(19): siRNA sense strand
gaagaggagaagcagaaag

SEQ ID NO: 1385429 - RNA, 19 nt, Homo sapiens
  misc_RNA (1)...(19): siRNA sense strand
gaacuggagaaggaauuuc

SEQ ID NO: 1385430 - RNA, 19 nt, Homo sapiens
  misc_RNA (1)...(19): siRNA sense strand
gcucucaaacugcagacaa

SEQ ID NO: 1385431 - RNA, 19 nt, Homo sapiens
  misc_RNA (1)...(19): siRNA sense strand
cccuggaacuggagaagga

SEQ ID NO: 1385432 - RNA, 19 nt, Homo sapiens
  misc_RNA (1)...(19): siRNA sense strand
agacagaagaggagaagca

SEQ ID NO: 1385433 - RNA, 19 nt, Homo sapiens
  misc_RNA (1)...(19): siRNA sense strand
uaacacacagaccucaauc

SEQ ID NO: 1385434 - RNA, 19 nt, Homo sapiens
  misc_RNA (1)...(19): siRNA sense strand
aaucucacauccacucucu

SEQ ID NO: 1385435 - RNA, 19 nt, Homo sapiens
  misc_RNA (1)...(19): siRNA sense strand
aaagccaguauccagauuu

SEQ ID NO: 1385436 - RNA, 19 nt, Homo sapiens
  misc_RNA (1)...(19): siRNA sense strand
caccuuaggacauaacaca

SEQ ID NO: 1385437 - RNA, 19 nt, Homo sapiens
  misc_RNA (1)...(19): siRNA sense strand
ugaccgagcgacagaucaa

SEQ ID NO: 1385438 - RNA, 19 nt, Homo sapiens
  misc_RNA (1)...(19): siRNA sense strand
uggaugcagcgaaugaauu

SEQ ID NO: 1385439 - RNA, 19 nt, Homo sapiens
  misc_RNA (1)...(19): siRNA sense strand
gaccagaaagccaguaucc

SEQ ID NO: 1385440 - RNA, 19 nt, Homo sapiens
  misc_RNA (1)...(19): siRNA sense strand
cucucaaacugcagacaaa

SEQ ID NO: 1385441 - RNA, 19 nt, Homo sapiens
  misc_RNA (1)...(19): siRNA sense strand
ggaggucacuuaccgacua

SEQ ID NO: 1385442 - RNA, 19 nt, Homo sapiens
  misc_RNA (1)...(19): siRNA sense strand
ggauauccagugaucguua

SEQ ID NO: 1385443 - RNA, 19 nt, Homo sapiens
  misc_RNA (1)...(19): siRNA sense strand
cuagggaccugagaugcua

SEQ ID NO: 1385444 - RNA, 19 nt, Homo sapiens
  misc_RNA (1)...(19): siRNA sense strand
acaucaagguguccaaguu

SEQ ID NO: 1385445 - RNA, 19 nt, Homo sapiens
  misc_RNA (1)...(19): siRNA sense strand
gaaccagacguggcacauu

SEQ ID NO: 1385446 - RNA, 19 nt, Homo sapiens
  misc_RNA (1)...(19): siRNA sense strand
gaaccagugagugcuguuu

SEQ ID NO: 1385447 - RNA, 19 nt, Homo sapiens
  misc_RNA (1)...(19): siRNA sense strand
ccaggaaccagacagagaa

SEQ ID NO: 1385448 - RNA, 19 nt, Homo sapiens
  misc_RNA (1)...(19): siRNA sense strand
aaccagacguggcacauuc

SEQ ID NO: 1385449 - RNA, 19 nt, Homo sapiens
  misc_RNA (1)...(19): siRNA sense strand
gauauccagugaucguuac

SEQ ID NO: 1385450 - RNA, 19 nt, Homo sapiens
  misc_RNA (1)...(19): siRNA sense strand
ccaccaggcugcaguucuc

SEQ ID NO: 1385451 - RNA, 19 nt, Homo sapiens
  misc_RNA (1)...(19): siRNA sense strand
ugucugugcuguacacugu

SEQ ID NO: 1385452 - RNA, 19 nt, Homo sapiens
  misc_RNA (1)...(19): siRNA sense strand
uuccugcgguguugccuua

SEQ ID NO: 1385453 - RNA, 19 nt, Homo sapiens
  misc_RNA (1)...(19): siRNA sense strand
caucaagguguccaaguug

SEQ ID NO: 1385454 - RNA, 19 nt, Homo sapiens
  misc_RNA (1)...(19): siRNA sense strand
ugaauguggcccaggaauu

SEQ ID NO: 1385455 - RNA, 19 nt, Homo sapiens
  misc_RNA (1)...(19): siRNA sense strand
gacuacagcuccacaugcu

SEQ ID NO: 1385456 - RNA, 19 nt, Homo sapiens
  misc_RNA (1)...(19): siRNA sense strand
caucuccucgaaccaauuu

SEQ ID NO: 1385457 - RNA, 19 nt, Homo sapiens
  misc_RNA (1)...(19): siRNA sense strand
ggaaccagacagagaaguc

SEQ ID NO: 1385458 - RNA, 19 nt, Homo sapiens
  misc_RNA (1)...(19): siRNA sense strand
gccaggaaccagacagaga

SEQ ID NO: 1385459 - RNA, 19 nt, Homo sapiens
  misc_RNA (1)...(19): siRNA sense strand
gcggaccucaggaugauga

SEQ ID NO: 1385460 - RNA, 19 nt, Homo sapiens
  misc_RNA (1)...(19): siRNA sense strand
ggaccucaggaugaugaua

SEQ ID NO: 1385461 - RNA, 19 nt, Homo sapiens
  misc_RNA (1)...(19): siRNA sense strand
cagcagcccauggaaguug

SEQ ID NO: 1385462 - RNA, 19 nt, Homo sapiens
  misc_RNA (1)...(19): siRNA sense strand
cgagugcuccuggcaguau

SEQ ID NO: 1385463 - RNA, 19 nt, Homo sapiens
  misc_RNA (1)...(19): siRNA sense strand
gaccucaggaugaugauac

SEQ ID NO: 1385464 - RNA, 19 nt, Homo sapiens
  misc_RNA (1)...(19): siRNA sense strand
gaggucacuuaccgacuac

SEQ ID NO: 1385465 - RNA, 19 nt, Homo sapiens
  misc_RNA (1)...(19): siRNA sense strand
gaugaauguggcccaggaa

SEQ ID NO: 1385466 - RNA, 19 nt, Homo sapiens
  misc_RNA (1)...(19): siRNA sense strand
ggaggucacuuaccgacua

SEQ ID NO: 1385467 - RNA, 19 nt, Homo sapiens
  misc_RNA (1)...(19): siRNA sense strand
ggauauccagugaucguua

SEQ ID NO: 1385468 - RNA, 19 nt, Homo sapiens
  misc_RNA (1)...(19): siRNA sense strand
cuagggaccugagaugcua

SEQ ID NO: 1385469 - RNA, 19 nt, Homo sapiens
  misc_RNA (1)...(19): siRNA sense strand
acaucaagguguccaaguu

SEQ ID NO: 1385470 - RNA, 19 nt, Homo sapiens
  misc_RNA (1)...(19): siRNA sense strand
gaaccagacguggcacauu

SEQ ID NO: 1385471 - RNA, 19 nt, Homo sapiens
  misc_RNA (1)...(19): siRNA sense strand
gaaccagugagugcuguuu

SEQ ID NO: 1385472 - RNA, 19 nt, Homo sapiens
  misc_RNA (1)...(19): siRNA sense strand
ccaggaaccagacagagaa

SEQ ID NO: 1385473 - RNA, 19 nt, Homo sapiens
  misc_RNA (1)...(19): siRNA sense strand
aaccagacguggcacauuc

SEQ ID NO: 1385474 - RNA, 19 nt, Homo sapiens
  misc_RNA (1)...(19): siRNA sense strand
gauauccagugaucguuac

SEQ ID NO: 1385475 - RNA, 19 nt, Homo sapiens
  misc_RNA (1)...(19): siRNA sense strand
ccaccaggcugcaguucuc

SEQ ID NO: 1385476 - RNA, 19 nt, Homo sapiens
  misc_RNA (1)...(19): siRNA sense strand
ugucugugcuguacacugu

SEQ ID NO: 1385477 - RNA, 19 nt, Homo sapiens
  misc_RNA (1)...(19): siRNA sense strand
uuccugcgguguugccuua

SEQ ID NO: 1385478 - RNA, 19 nt, Homo sapiens
  misc_RNA (1)...(19): siRNA sense strand
caucaagguguccaaguug

SEQ ID NO: 1385479 - RNA, 19 nt, Homo sapiens
  misc_RNA (1)...(19): siRNA sense strand
ugaauguggcccaggaauu

SEQ ID NO: 1385480 - RNA, 19 nt, Homo sapiens
  misc_RNA (1)...(19): siRNA sense strand
gacuacagcuccacaugcu

SEQ ID NO: 1385481 - RNA, 19 nt, Homo sapiens
  misc_RNA (1)...(19): siRNA sense strand
caucuccucgaaccaauuu

SEQ ID NO: 1385482 - RNA, 19 nt, Homo sapiens
  misc_RNA (1)...(19): siRNA sense strand
ggaaccagacagagaaguc

SEQ ID NO: 1385483 - RNA, 19 nt, Homo sapiens
  misc_RNA (1)...(19): siRNA sense strand
gccaggaaccagacagaga

SEQ ID NO: 1385484 - RNA, 19 nt, Homo sapiens
  misc_RNA (1)...(19): siRNA sense strand
gcggaccucaggaugauga

SEQ ID NO: 1385485 - RNA, 19 nt, Homo sapiens
  misc_RNA (1)...(19): siRNA sense strand
ggaccucaggaugaugaua

SEQ ID NO: 1385486 - RNA, 19 nt, Homo sapiens
  misc_RNA (1)...(19): siRNA sense strand
cagcagcccauggaaguug

SEQ ID NO: 1385487 - RNA, 19 nt, Homo sapiens
  misc_RNA (1)...(19): siRNA sense strand
cgagugcuccuggcaguau

SEQ ID NO: 1385488 - RNA, 19 nt, Homo sapiens
  misc_RNA (1)...(19): siRNA sense strand
gaccucaggaugaugauac

SEQ ID NO: 1385489 - RNA, 19 nt, Homo sapiens
  misc_RNA (1)...(19): siRNA sense strand
gaggucacuuaccgacuac

SEQ ID NO: 1385490 - RNA, 19 nt, Homo sapiens
  misc_RNA (1)...(19): siRNA sense strand
gaugaauguggcccaggaa

SEQ ID NO: 1385491 - RNA, 19 nt, Homo sapiens
  misc_RNA (1)...(19): siRNA sense strand
gaccaagaaggcucaguga

SEQ ID NO: 1385492 - RNA, 19 nt, Homo sapiens
  misc_RNA (1)...(19): siRNA sense strand
gccguuagccugaucaucu

SEQ ID NO: 1385493 - RNA, 19 nt, Homo sapiens
  misc_RNA (1)...(19): siRNA sense strand
gcaugucauccacaaguau

SEQ ID NO: 1385494 - RNA, 19 nt, Homo sapiens
  misc_RNA (1)...(19): siRNA sense strand
cagcaugucauccacaagu

SEQ ID NO: 1385495 - RNA, 19 nt, Homo sapiens
  misc_RNA (1)...(19): siRNA sense strand
caagagagugaccaagaag

SEQ ID NO: 1385496 - RNA, 19 nt, Homo sapiens
  misc_RNA (1)...(19): siRNA sense strand
gucagcaugucauccacaa

SEQ ID NO: 1385497 - RNA, 19 nt, Homo sapiens
  misc_RNA (1)...(19): siRNA sense strand
caugucauccacaaguauu

SEQ ID NO: 1385498 - RNA, 19 nt, Homo sapiens
  misc_RNA (1)...(19): siRNA sense strand
gaucaucuucaccuacuac

SEQ ID NO: 1385499 - RNA, 19 nt, Homo sapiens
  misc_RNA (1)...(19): siRNA sense strand
agcaugucauccacaagua

SEQ ID NO: 1385500 - RNA, 19 nt, Homo sapiens
  misc_RNA (1)...(19): siRNA sense strand
ccguuagccugaucaucuu

SEQ ID NO: 1385501 - RNA, 19 nt, Homo sapiens
  misc_RNA (1)...(19): siRNA sense strand
gccguuagccugaucaucu

SEQ ID NO: 1385502 - RNA, 19 nt, Homo sapiens
  misc_RNA (1)...(19): siRNA sense strand
gaucaucuucaccuacuac

SEQ ID NO: 1385503 - RNA, 19 nt, Homo sapiens
  misc_RNA (1)...(19): siRNA sense strand
ccguuagccugaucaucuu

SEQ ID NO: 1385504 - RNA, 19 nt, Homo sapiens
  misc_RNA (1)...(19): siRNA sense strand
cuacauaacuuccuacgua

SEQ ID NO: 1385505 - RNA, 19 nt, Homo sapiens
  misc_RNA (1)...(19): siRNA sense strand
gcaagaagccacccuccuu

SEQ ID NO: 1385506 - RNA, 19 nt, Homo sapiens
  misc_RNA (1)...(19): siRNA sense strand
caaggacgguucuuacaca

SEQ ID NO: 1385507 - RNA, 19 nt, Homo sapiens
  misc_RNA (1)...(19): siRNA sense strand
ggaagcuguuggaugauga

SEQ ID NO: 1385508 - RNA, 19 nt, Homo sapiens
  misc_RNA (1)...(19): siRNA sense strand
gccagauccugcagaagua

SEQ ID NO: 1385509 - RNA, 19 nt, Homo sapiens
  misc_RNA (1)...(19): siRNA sense strand
cagcaugccugaacuacau

SEQ ID NO: 1385510 - RNA, 19 nt, Homo sapiens
  misc_RNA (1)...(19): siRNA sense strand
ugaacuacauaacuuccua

SEQ ID NO: 1385511 - RNA, 19 nt, Homo sapiens
  misc_RNA (1)...(19): siRNA sense strand
ugcggaagcuguuggauga

SEQ ID NO: 1385512 - RNA, 19 nt, Homo sapiens
  misc_RNA (1)...(19): siRNA sense strand
ugacaaggcccugagcuuu

SEQ ID NO: 1385513 - RNA, 19 nt, Homo sapiens
  misc_RNA (1)...(19): siRNA sense strand
gacaaggcccugagcuuug

SEQ ID NO: 1385514 - RNA, 19 nt, Homo sapiens
  misc_RNA (1)...(19): siRNA sense strand
gcccaaggaugcugucaag

SEQ ID NO: 1385515 - RNA, 19 nt, Homo sapiens
  misc_RNA (1)...(19): siRNA sense strand
ugccugaacuacauaacuu

SEQ ID NO: 1385516 - RNA, 19 nt, Homo sapiens
  misc_RNA (1)...(19): siRNA sense strand
cugcagaaguacuccuauu

SEQ ID NO: 1385517 - RNA, 19 nt, Homo sapiens
  misc_RNA (1)...(19): siRNA sense strand
uacauaacuuccuacguau

SEQ ID NO: 1385518 - RNA, 19 nt, Homo sapiens
  misc_RNA (1)...(19): siRNA sense strand
gcagaaguacuccuauugc

SEQ ID NO: 1385519 - RNA, 19 nt, Homo sapiens
  misc_RNA (1)...(19): siRNA sense strand
gagcgucacggccaagugu

SEQ ID NO: 1385520 - RNA, 19 nt, Homo sapiens
  misc_RNA (1)...(19): siRNA sense strand
acacaggcuucaucaaggu

SEQ ID NO: 1385521 - RNA, 19 nt, Homo sapiens
  misc_RNA (1)...(19): siRNA sense strand
aagggcacgugaagucauu

SEQ ID NO: 1385522 - RNA, 19 nt, Homo sapiens
  misc_RNA (1)...(19): siRNA sense strand
gcacaagggcacgugaagu

SEQ ID NO: 1385523 - RNA, 19 nt, Homo sapiens
  misc_RNA (1)...(19): siRNA sense strand
ucugugcccuccagcaaga

SEQ ID NO: 1385524 - RNA, 19 nt, Homo sapiens
  misc_RNA (1)...(19): siRNA sense strand
cggaagcuguuggaugaug

SEQ ID NO: 1385525 - RNA, 19 nt, Homo sapiens
  misc_RNA (1)...(19): siRNA sense strand
uuacacaggcuucaucaag

SEQ ID NO: 1385526 - RNA, 19 nt, Homo sapiens
  misc_RNA (1)...(19): siRNA sense strand
uugaggcccugcugcgaaa

SEQ ID NO: 1385527 - RNA, 19 nt, Homo sapiens
  misc_RNA (1)...(19): siRNA sense strand
cacaagggcacgugaaguc

SEQ ID NO: 1385528 - RNA, 19 nt, Homo sapiens
  misc_RNA (1)...(19): siRNA sense strand
ggacggggcacaaguguca

SEQ ID NO: 1385529 - RNA, 19 nt, Homo sapiens
  misc_RNA (1)...(19): siRNA sense strand
caaguuugcacucuuugag

SEQ ID NO: 1385530 - RNA, 19 nt, Homo sapiens
  misc_RNA (1)...(19): siRNA sense strand
cgccagauccugcagaagu

SEQ ID NO: 1385531 - RNA, 19 nt, Homo sapiens
  misc_RNA (1)...(19): siRNA sense strand
gcaugccugaacuacauaa

SEQ ID NO: 1385532 - RNA, 19 nt, Homo sapiens
  misc_RNA (1)...(19): siRNA sense strand
cuacauaacuuccuacgua

SEQ ID NO: 1385533 - RNA, 19 nt, Homo sapiens
  misc_RNA (1)...(19): siRNA sense strand
gcaagaagccacccuccuu

SEQ ID NO: 1385534 - RNA, 19 nt, Homo sapiens
  misc_RNA (1)...(19): siRNA sense strand
caaggacgguucuuacaca

SEQ ID NO: 1385535 - RNA, 19 nt, Homo sapiens
  misc_RNA (1)...(19): siRNA sense strand
ggaagcuguuggaugauga

SEQ ID NO: 1385536 - RNA, 19 nt, Homo sapiens
  misc_RNA (1)...(19): siRNA sense strand
gccagauccugcagaagua

SEQ ID NO: 1385537 - RNA, 19 nt, Homo sapiens
  misc_RNA (1)...(19): siRNA sense strand
cagcaugccugaacuacau

SEQ ID NO: 1385538 - RNA, 19 nt, Homo sapiens
  misc_RNA (1)...(19): siRNA sense strand
ugaacuacauaacuuccua

SEQ ID NO: 1385539 - RNA, 19 nt, Homo sapiens
  misc_RNA (1)...(19): siRNA sense strand
ugcggaagcuguuggauga

SEQ ID NO: 1385540 - RNA, 19 nt, Homo sapiens
  misc_RNA (1)...(19): siRNA sense strand
ugacaaggcccugagcuuu

SEQ ID NO: 1385541 - RNA, 19 nt, Homo sapiens
  misc_RNA (1)...(19): siRNA sense strand
gacaaggcccugagcuuug

SEQ ID NO: 1385542 - RNA, 19 nt, Homo sapiens
  misc_RNA (1)...(19): siRNA sense strand
gcccaaggaugcugucaag

SEQ ID NO: 1385543 - RNA, 19 nt, Homo sapiens
  misc_RNA (1)...(19): siRNA sense strand
ugccugaacuacauaacuu

SEQ ID NO: 1385544 - RNA, 19 nt, Homo sapiens
  misc_RNA (1)...(19): siRNA sense strand
cugcagaaguacuccuauu

SEQ ID NO: 1385545 - RNA, 19 nt, Homo sapiens
  misc_RNA (1)...(19): siRNA sense strand
uacauaacuuccuacguau

SEQ ID NO: 1385546 - RNA, 19 nt, Homo sapiens
  misc_RNA (1)...(19): siRNA sense strand
gcagaaguacuccuauugc

SEQ ID NO: 1385547 - RNA, 19 nt, Homo sapiens
  misc_RNA (1)...(19): siRNA sense strand
gagcgucacggccaagugu

SEQ ID NO: 1385548 - RNA, 19 nt, Homo sapiens
  misc_RNA (1)...(19): siRNA sense strand
acacaggcuucaucaaggu

SEQ ID NO: 1385549 - RNA, 19 nt, Homo sapiens
  misc_RNA (1)...(19): siRNA sense strand
aagggcacgugaagucauu

SEQ ID NO: 1385550 - RNA, 19 nt, Homo sapiens
  misc_RNA (1)...(19): siRNA sense strand
gcacaagggcacgugaagu

SEQ ID NO: 1385551 - RNA, 19 nt, Homo sapiens
  misc_RNA (1)...(19): siRNA sense strand
ucugugcccuccagcaaga

SEQ ID NO: 1385552 - RNA, 19 nt, Homo sapiens
  misc_RNA (1)...(19): siRNA sense strand
cggaagcuguuggaugaug

SEQ ID NO: 1385553 - RNA, 19 nt, Homo sapiens
  misc_RNA (1)...(19): siRNA sense strand
uuacacaggcuucaucaag

SEQ ID NO: 1385554 - RNA, 19 nt, Homo sapiens
  misc_RNA (1)...(19): siRNA sense strand
uugaggcccugcugcgaaa

SEQ ID NO: 1385555 - RNA, 19 nt, Homo sapiens
  misc_RNA (1)...(19): siRNA sense strand
cacaagggcacgugaaguc

SEQ ID NO: 1385556 - RNA, 19 nt, Homo sapiens
  misc_RNA (1)...(19): siRNA sense strand
ggacggggcacaaguguca

SEQ ID NO: 1385557 - RNA, 19 nt, Homo sapiens
  misc_RNA (1)...(19): siRNA sense strand
caaguuugcacucuuugag

SEQ ID NO: 1385558 - RNA, 19 nt, Homo sapiens
  misc_RNA (1)...(19): siRNA sense strand
cgccagauccugcagaagu

SEQ ID NO: 1385559 - RNA, 19 nt, Homo sapiens
  misc_RNA (1)...(19): siRNA sense strand
gcaugccugaacuacauaa

SEQ ID NO: 1385560 - RNA, 19 nt, Homo sapiens
  misc_RNA (1)...(19): siRNA sense strand
cuacauaacuuccuacgua

SEQ ID NO: 1385561 - RNA, 19 nt, Homo sapiens
  misc_RNA (1)...(19): siRNA sense strand
gcaagaagccacccuccuu

SEQ ID NO: 1385562 - RNA, 19 nt, Homo sapiens
  misc_RNA (1)...(19): siRNA sense strand
caaggacgguucuuacaca

SEQ ID NO: 1385563 - RNA, 19 nt, Homo sapiens
  misc_RNA (1)...(19): siRNA sense strand
ggaagcuguuggaugauga

SEQ ID NO: 1385564 - RNA, 19 nt, Homo sapiens
  misc_RNA (1)...(19): siRNA sense strand
gccagauccugcagaagua

SEQ ID NO: 1385565 - RNA, 19 nt, Homo sapiens
  misc_RNA (1)...(19): siRNA sense strand
cagcaugccugaacuacau

SEQ ID NO: 1385566 - RNA, 19 nt, Homo sapiens
  misc_RNA (1)...(19): siRNA sense strand
ugaacuacauaacuuccua

SEQ ID NO: 1385567 - RNA, 19 nt, Homo sapiens
  misc_RNA (1)...(19): siRNA sense strand
ugcggaagcuguuggauga

SEQ ID NO: 1385568 - RNA, 19 nt, Homo sapiens
  misc_RNA (1)...(19): siRNA sense strand
ugacaaggcccugagcuuu

SEQ ID NO: 1385569 - RNA, 19 nt, Homo sapiens
  misc_RNA (1)...(19): siRNA sense strand
gacaaggcccugagcuuug

SEQ ID NO: 1385570 - RNA, 19 nt, Homo sapiens
  misc_RNA (1)...(19): siRNA sense strand
gcccaaggaugcugucaag

SEQ ID NO: 1385571 - RNA, 19 nt, Homo sapiens
  misc_RNA (1)...(19): siRNA sense strand
ugccugaacuacauaacuu

SEQ ID NO: 1385572 - RNA, 19 nt, Homo sapiens
  misc_RNA (1)...(19): siRNA sense strand
cugcagaaguacuccuauu

SEQ ID NO: 1385573 - RNA, 19 nt, Homo sapiens
  misc_RNA (1)...(19): siRNA sense strand
uacauaacuuccuacguau

SEQ ID NO: 1385574 - RNA, 19 nt, Homo sapiens
  misc_RNA (1)...(19): siRNA sense strand
gcagaaguacuccuauugc

SEQ ID NO: 1385575 - RNA, 19 nt, Homo sapiens
  misc_RNA (1)...(19): siRNA sense strand
gagcgucacggccaagugu

SEQ ID NO: 1385576 - RNA, 19 nt, Homo sapiens
  misc_RNA (1)...(19): siRNA sense strand
acacaggcuucaucaaggu

SEQ ID NO: 1385577 - RNA, 19 nt, Homo sapiens
  misc_RNA (1)...(19): siRNA sense strand
aagggcacgugaagucauu

SEQ ID NO: 1385578 - RNA, 19 nt, Homo sapiens
  misc_RNA (1)...(19): siRNA sense strand
gcacaagggcacgugaagu

SEQ ID NO: 1385579 - RNA, 19 nt, Homo sapiens
  misc_RNA (1)...(19): siRNA sense strand
ucugugcccuccagcaaga

SEQ ID NO: 1385580 - RNA, 19 nt, Homo sapiens
  misc_RNA (1)...(19): siRNA sense strand
cggaagcuguuggaugaug

SEQ ID NO: 1385581 - RNA, 19 nt, Homo sapiens
  misc_RNA (1)...(19): siRNA sense strand
uuacacaggcuucaucaag

SEQ ID NO: 1385582 - RNA, 19 nt, Homo sapiens
  misc_RNA (1)...(19): siRNA sense strand
uugaggcccugcugcgaaa

SEQ ID NO: 1385583 - RNA, 19 nt, Homo sapiens
  misc_RNA (1)...(19): siRNA sense strand
cacaagggcacgugaaguc

SEQ ID NO: 1385584 - RNA, 19 nt, Homo sapiens
  misc_RNA (1)...(19): siRNA sense strand
ggacggggcacaaguguca

SEQ ID NO: 1385585 - RNA, 19 nt, Homo sapiens
  misc_RNA (1)...(19): siRNA sense strand
caaguuugcacucuuugag

SEQ ID NO: 1385586 - RNA, 19 nt, Homo sapiens
  misc_RNA (1)...(19): siRNA sense strand
cgccagauccugcagaagu

SEQ ID NO: 1385587 - RNA, 19 nt, Homo sapiens
  misc_RNA (1)...(19): siRNA sense strand
gcaugccugaacuacauaa

SEQ ID NO: 1385588 - RNA, 19 nt, Homo sapiens
  misc_RNA (1)...(19): siRNA sense strand
cuacauaacuuccuacgua

SEQ ID NO: 1385589 - RNA, 19 nt, Homo sapiens
  misc_RNA (1)...(19): siRNA sense strand
gcaagaagccacccuccuu

SEQ ID NO: 1385590 - RNA, 19 nt, Homo sapiens
  misc_RNA (1)...(19): siRNA sense strand
caaggacgguucuuacaca

SEQ ID NO: 1385591 - RNA, 19 nt, Homo sapiens
  misc_RNA (1)...(19): siRNA sense strand
ggaagcuguuggaugauga

SEQ ID NO: 1385592 - RNA, 19 nt, Homo sapiens
  misc_RNA (1)...(19): siRNA sense strand
gccagauccugcagaagua

SEQ ID NO: 1385593 - RNA, 19 nt, Homo sapiens
  misc_RNA (1)...(19): siRNA sense strand
cagcaugccugaacuacau

SEQ ID NO: 1385594 - RNA, 19 nt, Homo sapiens
  misc_RNA (1)...(19): siRNA sense strand
ugaacuacauaacuuccua

SEQ ID NO: 1385595 - RNA, 19 nt, Homo sapiens
  misc_RNA (1)...(19): siRNA sense strand
ugcggaagcuguuggauga

SEQ ID NO: 1385596 - RNA, 19 nt, Homo sapiens
  misc_RNA (1)...(19): siRNA sense strand
ugacaaggcccugagcuuu

SEQ ID NO: 1385597 - RNA, 19 nt, Homo sapiens
  misc_RNA (1)...(19): siRNA sense strand
gacaaggcccugagcuuug

SEQ ID NO: 1385598 - RNA, 19 nt, Homo sapiens
  misc_RNA (1)...(19): siRNA sense strand
gcccaaggaugcugucaag

SEQ ID NO: 1385599 - RNA, 19 nt, Homo sapiens
  misc_RNA (1)...(19): siRNA sense strand
ugccugaacuacauaacuu

SEQ ID NO: 1385600 - RNA, 19 nt, Homo sapiens
  misc_RNA (1)...(19): siRNA sense strand
cugcagaaguacuccuauu

SEQ ID NO: 1385601 - RNA, 19 nt, Homo sapiens
  misc_RNA (1)...(19): siRNA sense strand
uacauaacuuccuacguau

SEQ ID NO: 1385602 - RNA, 19 nt, Homo sapiens
  misc_RNA (1)...(19): siRNA sense strand
gcagaaguacuccuauugc

SEQ ID NO: 1385603 - RNA, 19 nt, Homo sapiens
  misc_RNA (1)...(19): siRNA sense strand
gagcgucacggccaagugu

SEQ ID NO: 1385604 - RNA, 19 nt, Homo sapiens
  misc_RNA (1)...(19): siRNA sense strand
acacaggcuucaucaaggu

SEQ ID NO: 1385605 - RNA, 19 nt, Homo sapiens
  misc_RNA (1)...(19): siRNA sense strand
aagggcacgugaagucauu

SEQ ID NO: 1385606 - RNA, 19 nt, Homo sapiens
  misc_RNA (1)...(19): siRNA sense strand
gcacaagggcacgugaagu

SEQ ID NO: 1385607 - RNA, 19 nt, Homo sapiens
  misc_RNA (1)...(19): siRNA sense strand
ucugugcccuccagcaaga

SEQ ID NO: 1385608 - RNA, 19 nt, Homo sapiens
  misc_RNA (1)...(19): siRNA sense strand
cggaagcuguuggaugaug

SEQ ID NO: 1385609 - RNA, 19 nt, Homo sapiens
  misc_RNA (1)...(19): siRNA sense strand
uuacacaggcuucaucaag

SEQ ID NO: 1385610 - RNA, 19 nt, Homo sapiens
  misc_RNA (1)...(19): siRNA sense strand
uugaggcccugcugcgaaa

SEQ ID NO: 1385611 - RNA, 19 nt, Homo sapiens
  misc_RNA (1)...(19): siRNA sense strand
cacaagggcacgugaaguc

SEQ ID NO: 1385612 - RNA, 19 nt, Homo sapiens
  misc_RNA (1)...(19): siRNA sense strand
ggacggggcacaaguguca

SEQ ID NO: 1385613 - RNA, 19 nt, Homo sapiens
  misc_RNA (1)...(19): siRNA sense strand
caaguuugcacucuuugag

SEQ ID NO: 1385614 - RNA, 19 nt, Homo sapiens
  misc_RNA (1)...(19): siRNA sense strand
cgccagauccugcagaagu

SEQ ID NO: 1385615 - RNA, 19 nt, Homo sapiens
  misc_RNA (1)...(19): siRNA sense strand
gcaugccugaacuacauaa

SEQ ID NO: 1385616 - RNA, 19 nt, Homo sapiens
  misc_RNA (1)...(19): siRNA sense strand
cuacauaacuuccuacgua

SEQ ID NO: 1385617 - RNA, 19 nt, Homo sapiens
  misc_RNA (1)...(19): siRNA sense strand
gcaagaagccacccuccuu

SEQ ID NO: 1385618 - RNA, 19 nt, Homo sapiens
  misc_RNA (1)...(19): siRNA sense strand
caaggacgguucuuacaca

SEQ ID NO: 1385619 - RNA, 19 nt, Homo sapiens
  misc_RNA (1)...(19): siRNA sense strand
ggaagcuguuggaugauga

SEQ ID NO: 1385620 - RNA, 19 nt, Homo sapiens
  misc_RNA (1)...(19): siRNA sense strand
gccagauccugcagaagua

SEQ ID NO: 1385621 - RNA, 19 nt, Homo sapiens
  misc_RNA (1)...(19): siRNA sense strand
cagcaugccugaacuacau

SEQ ID NO: 1385622 - RNA, 19 nt, Homo sapiens
  misc_RNA (1)...(19): siRNA sense strand
ugaacuacauaacuuccua

SEQ ID NO: 1385623 - RNA, 19 nt, Homo sapiens
  misc_RNA (1)...(19): siRNA sense strand
ugcggaagcuguuggauga

SEQ ID NO: 1385624 - RNA, 19 nt, Homo sapiens
  misc_RNA (1)...(19): siRNA sense strand
ugacaaggcccugagcuuu

SEQ ID NO: 1385625 - RNA, 19 nt, Homo sapiens
  misc_RNA (1)...(19): siRNA sense strand
gacaaggcccugagcuuug

SEQ ID NO: 1385626 - RNA, 19 nt, Homo sapiens
  misc_RNA (1)...(19): siRNA sense strand
gcccaaggaugcugucaag

SEQ ID NO: 1385627 - RNA, 19 nt, Homo sapiens
  misc_RNA (1)...(19): siRNA sense strand
ugccugaacuacauaacuu

SEQ ID NO: 1385628 - RNA, 19 nt, Homo sapiens
  misc_RNA (1)...(19): siRNA sense strand
cugcagaaguacuccuauu

SEQ ID NO: 1385629 - RNA, 19 nt, Homo sapiens
  misc_RNA (1)...(19): siRNA sense strand
uacauaacuuccuacguau

SEQ ID NO: 1385630 - RNA, 19 nt, Homo sapiens
  misc_RNA (1)...(19): siRNA sense strand
gcagaaguacuccuauugc

SEQ ID NO: 1385631 - RNA, 19 nt, Homo sapiens
  misc_RNA (1)...(19): siRNA sense strand
gagcgucacggccaagugu

SEQ ID NO: 1385632 - RNA, 19 nt, Homo sapiens
  misc_RNA (1)...(19): siRNA sense strand
acacaggcuucaucaaggu

SEQ ID NO: 1385633 - RNA, 19 nt, Homo sapiens
  misc_RNA (1)...(19): siRNA sense strand
aagggcacgugaagucauu

SEQ ID NO: 1385634 - RNA, 19 nt, Homo sapiens
  misc_RNA (1)...(19): siRNA sense strand
gcacaagggcacgugaagu

SEQ ID NO: 1385635 - RNA, 19 nt, Homo sapiens
  misc_RNA (1)...(19): siRNA sense strand
ucugugcccuccagcaaga

SEQ ID NO: 1385636 - RNA, 19 nt, Homo sapiens
  misc_RNA (1)...(19): siRNA sense strand
cggaagcuguuggaugaug

SEQ ID NO: 1385637 - RNA, 19 nt, Homo sapiens
  misc_RNA (1)...(19): siRNA sense strand
uuacacaggcuucaucaag

SEQ ID NO: 1385638 - RNA, 19 nt, Homo sapiens
  misc_RNA (1)...(19): siRNA sense strand
uugaggcccugcugcgaaa

SEQ ID NO: 1385639 - RNA, 19 nt, Homo sapiens
  misc_RNA (1)...(19): siRNA sense strand
cacaagggcacgugaaguc

SEQ ID NO: 1385640 - RNA, 19 nt, Homo sapiens
  misc_RNA (1)...(19): siRNA sense strand
ggacggggcacaaguguca

SEQ ID NO: 1385641 - RNA, 19 nt, Homo sapiens
  misc_RNA (1)...(19): siRNA sense strand
caaguuugcacucuuugag

SEQ ID NO: 1385642 - RNA, 19 nt, Homo sapiens
  misc_RNA (1)...(19): siRNA sense strand
cgccagauccugcagaagu

SEQ ID NO: 1385643 - RNA, 19 nt, Homo sapiens
  misc_RNA (1)...(19): siRNA sense strand
gcaugccugaacuacauaa

SEQ ID NO: 1385644 - RNA, 19 nt, Homo sapiens
  misc_RNA (1)...(19): siRNA sense strand
gcaagaagccacccuccuu

SEQ ID NO: 1385645 - RNA, 19 nt, Homo sapiens
  misc_RNA (1)...(19): siRNA sense strand
caaggacgguucuuacaca

SEQ ID NO: 1385646 - RNA, 19 nt, Homo sapiens
  misc_RNA (1)...(19): siRNA sense strand
gcccaaggaugcugucaag

SEQ ID NO: 1385647 - RNA, 19 nt, Homo sapiens
  misc_RNA (1)...(19): siRNA sense strand
acacaggcuucaucaaggu

SEQ ID NO: 1385648 - RNA, 19 nt, Homo sapiens
  misc_RNA (1)...(19): siRNA sense strand
uuacacaggcuucaucaag

SEQ ID NO: 1385649 - RNA, 19 nt, Homo sapiens
  misc_RNA (1)...(19): siRNA sense strand
ucugugcccuccagcaaga

SEQ ID NO: 1385650 - RNA, 19 nt, Homo sapiens
  misc_RNA (1)...(19): siRNA sense strand
ggacggggcacaaguguca

SEQ ID NO: 1385651 - RNA, 19 nt, Homo sapiens
  misc_RNA (1)...(19): siRNA sense strand
cuacauaacuuccuacgua

SEQ ID NO: 1385652 - RNA, 19 nt, Homo sapiens
  misc_RNA (1)...(19): siRNA sense strand
gcaagaagccacccuccuu

SEQ ID NO: 1385653 - RNA, 19 nt, Homo sapiens
  misc_RNA (1)...(19): siRNA sense strand
caaggacgguucuuacaca

SEQ ID NO: 1385654 - RNA, 19 nt, Homo sapiens
  misc_RNA (1)...(19): siRNA sense strand
ggaagcuguuggaugauga

SEQ ID NO: 1385655 - RNA, 19 nt, Homo sapiens
  misc_RNA (1)...(19): siRNA sense strand
gccagauccugcagaagua

SEQ ID NO: 1385656 - RNA, 19 nt, Homo sapiens
  misc_RNA (1)...(19): siRNA sense strand
cagcaugccugaacuacau

SEQ ID NO: 1385657 - RNA, 19 nt, Homo sapiens
  misc_RNA (1)...(19): siRNA sense strand
ugaacuacauaacuuccua

SEQ ID NO: 1385658 - RNA, 19 nt, Homo sapiens
  misc_RNA (1)...(19): siRNA sense strand
ugcggaagcuguuggauga

SEQ ID NO: 1385659 - RNA, 19 nt, Homo sapiens
  misc_RNA (1)...(19): siRNA sense strand
ugacaaggcccugagcuuu

SEQ ID NO: 1385660 - RNA, 19 nt, Homo sapiens
  misc_RNA (1)...(19): siRNA sense strand
gacaaggcccugagcuuug

SEQ ID NO: 1385661 - RNA, 19 nt, Homo sapiens
  misc_RNA (1)...(19): siRNA sense strand
gcccaaggaugcugucaag

SEQ ID NO: 1385662 - RNA, 19 nt, Homo sapiens
  misc_RNA (1)...(19): siRNA sense strand
ugccugaacuacauaacuu

SEQ ID NO: 1385663 - RNA, 19 nt, Homo sapiens
  misc_RNA (1)...(19): siRNA sense strand
cugcagaaguacuccuauu

SEQ ID NO: 1385664 - RNA, 19 nt, Homo sapiens
  misc_RNA (1)...(19): siRNA sense strand
uacauaacuuccuacguau

SEQ ID NO: 1385665 - RNA, 19 nt, Homo sapiens
  misc_RNA (1)...(19): siRNA sense strand
gcagaaguacuccuauugc

SEQ ID NO: 1385666 - RNA, 19 nt, Homo sapiens
  misc_RNA (1)...(19): siRNA sense strand
gagcgucacggccaagugu

SEQ ID NO: 1385667 - RNA, 19 nt, Homo sapiens
  misc_RNA (1)...(19): siRNA sense strand
acacaggcuucaucaaggu

SEQ ID NO: 1385668 - RNA, 19 nt, Homo sapiens
  misc_RNA (1)...(19): siRNA sense strand
aagggcacgugaagucauu

SEQ ID NO: 1385669 - RNA, 19 nt, Homo sapiens
  misc_RNA (1)...(19): siRNA sense strand
gcacaagggcacgugaagu

SEQ ID NO: 1385670 - RNA, 19 nt, Homo sapiens
  misc_RNA (1)...(19): siRNA sense strand
ucugugcccuccagcaaga

SEQ ID NO: 1385671 - RNA, 19 nt, Homo sapiens
  misc_RNA (1)...(19): siRNA sense strand
cggaagcuguuggaugaug

SEQ ID NO: 1385672 - RNA, 19 nt, Homo sapiens
  misc_RNA (1)...(19): siRNA sense strand
uuacacaggcuucaucaag

SEQ ID NO: 1385673 - RNA, 19 nt, Homo sapiens
  misc_RNA (1)...(19): siRNA sense strand
uugaggcccugcugcgaaa

SEQ ID NO: 1385674 - RNA, 19 nt, Homo sapiens
  misc_RNA (1)...(19): siRNA sense strand
cacaagggcacgugaaguc

SEQ ID NO: 1385675 - RNA, 19 nt, Homo sapiens
  misc_RNA (1)...(19): siRNA sense strand
ggacggggcacaaguguca

SEQ ID NO: 1385676 - RNA, 19 nt, Homo sapiens
  misc_RNA (1)...(19): siRNA sense strand
caaguuugcacucuuugag

SEQ ID NO: 1385677 - RNA, 19 nt, Homo sapiens
  misc_RNA (1)...(19): siRNA sense strand
cgccagauccugcagaagu

SEQ ID NO: 1385678 - RNA, 19 nt, Homo sapiens
  misc_RNA (1)...(19): siRNA sense strand
gcaugccugaacuacauaa

SEQ ID NO: 1385679 - RNA, 19 nt, Homo sapiens
  misc_RNA (1)...(19): siRNA sense strand
cuacauaacuuccuacgua

SEQ ID NO: 1385680 - RNA, 19 nt, Homo sapiens
  misc_RNA (1)...(19): siRNA sense strand
gcaagaagccacccuccuu

SEQ ID NO: 1385681 - RNA, 19 nt, Homo sapiens
  misc_RNA (1)...(19): siRNA sense strand
caaggacgguucuuacaca

SEQ ID NO: 1385682 - RNA, 19 nt, Homo sapiens
  misc_RNA (1)...(19): siRNA sense strand
ggaagcuguuggaugauga

SEQ ID NO: 1385683 - RNA, 19 nt, Homo sapiens
  misc_RNA (1)...(19): siRNA sense strand
gccagauccugcagaagua

SEQ ID NO: 1385684 - RNA, 19 nt, Homo sapiens
  misc_RNA (1)...(19): siRNA sense strand
cagcaugccugaacuacau

SEQ ID NO: 1385685 - RNA, 19 nt, Homo sapiens
  misc_RNA (1)...(19): siRNA sense strand
ugaacuacauaacuuccua

SEQ ID NO: 1385686 - RNA, 19 nt, Homo sapiens
  misc_RNA (1)...(19): siRNA sense strand
ugcggaagcuguuggauga

SEQ ID NO: 1385687 - RNA, 19 nt, Homo sapiens
  misc_RNA (1)...(19): siRNA sense strand
ugacaaggcccugagcuuu

SEQ ID NO: 1385688 - RNA, 19 nt, Homo sapiens
  misc_RNA (1)...(19): siRNA sense strand
gacaaggcccugagcuuug

SEQ ID NO: 1385689 - RNA, 19 nt, Homo sapiens
  misc_RNA (1)...(19): siRNA sense strand
gcccaaggaugcugucaag

SEQ ID NO: 1385690 - RNA, 19 nt, Homo sapiens
  misc_RNA (1)...(19): siRNA sense strand
ugccugaacuacauaacuu

SEQ ID NO: 1385691 - RNA, 19 nt, Homo sapiens
  misc_RNA (1)...(19): siRNA sense strand
cugcagaaguacuccuauu

SEQ ID NO: 1385692 - RNA, 19 nt, Homo sapiens
  misc_RNA (1)...(19): siRNA sense strand
uacauaacuuccuacguau

SEQ ID NO: 1385693 - RNA, 19 nt, Homo sapiens
  misc_RNA (1)...(19): siRNA sense strand
gcagaaguacuccuauugc

SEQ ID NO: 1385694 - RNA, 19 nt, Homo sapiens
  misc_RNA (1)...(19): siRNA sense strand
gagcgucacggccaagugu

SEQ ID NO: 1385695 - RNA, 19 nt, Homo sapiens
  misc_RNA (1)...(19): siRNA sense strand
acacaggcuucaucaaggu

SEQ ID NO: 1385696 - RNA, 19 nt, Homo sapiens
  misc_RNA (1)...(19): siRNA sense strand
aagggcacgugaagucauu

SEQ ID NO: 1385697 - RNA, 19 nt, Homo sapiens
  misc_RNA (1)...(19): siRNA sense strand
gcacaagggcacgugaagu

SEQ ID NO: 1385698 - RNA, 19 nt, Homo sapiens
  misc_RNA (1)...(19): siRNA sense strand
ucugugcccuccagcaaga

SEQ ID NO: 1385699 - RNA, 19 nt, Homo sapiens
  misc_RNA (1)...(19): siRNA sense strand
cggaagcuguuggaugaug

SEQ ID NO: 1385700 - RNA, 19 nt, Homo sapiens
  misc_RNA (1)...(19): siRNA sense strand
uuacacaggcuucaucaag

SEQ ID NO: 1385701 - RNA, 19 nt, Homo sapiens
  misc_RNA (1)...(19): siRNA sense strand
uugaggcccugcugcgaaa

SEQ ID NO: 1385702 - RNA, 19 nt, Homo sapiens
  misc_RNA (1)...(19): siRNA sense strand
cacaagggcacgugaaguc

SEQ ID NO: 1385703 - RNA, 19 nt, Homo sapiens
  misc_RNA (1)...(19): siRNA sense strand
ggacggggcacaaguguca

SEQ ID NO: 1385704 - RNA, 19 nt, Homo sapiens
  misc_RNA (1)...(19): siRNA sense strand
caaguuugcacucuuugag

SEQ ID NO: 1385705 - RNA, 19 nt, Homo sapiens
  misc_RNA (1)...(19): siRNA sense strand
cgccagauccugcagaagu

SEQ ID NO: 1385706 - RNA, 19 nt, Homo sapiens
  misc_RNA (1)...(19): siRNA sense strand
gcaugccugaacuacauaa

SEQ ID NO: 1385707 - RNA, 19 nt, Homo sapiens
  misc_RNA (1)...(19): siRNA sense strand
cuacauaacuuccuacgua

SEQ ID NO: 1385708 - RNA, 19 nt, Homo sapiens
  misc_RNA (1)...(19): siRNA sense strand
gcaagaagccacccuccuu

SEQ ID NO: 1385709 - RNA, 19 nt, Homo sapiens
  misc_RNA (1)...(19): siRNA sense strand
caaggacgguucuuacaca

SEQ ID NO: 1385710 - RNA, 19 nt, Homo sapiens
  misc_RNA (1)...(19): siRNA sense strand
ggaagcuguuggaugauga

SEQ ID NO: 1385711 - RNA, 19 nt, Homo sapiens
  misc_RNA (1)...(19): siRNA sense strand
gccagauccugcagaagua

SEQ ID NO: 1385712 - RNA, 19 nt, Homo sapiens
  misc_RNA (1)...(19): siRNA sense strand
cagcaugccugaacuacau

SEQ ID NO: 1385713 - RNA, 19 nt, Homo sapiens
  misc_RNA (1)...(19): siRNA sense strand
ugaacuacauaacuuccua

SEQ ID NO: 1385714 - RNA, 19 nt, Homo sapiens
  misc_RNA (1)...(19): siRNA sense strand
ugcggaagcuguuggauga

SEQ ID NO: 1385715 - RNA, 19 nt, Homo sapiens
  misc_RNA (1)...(19): siRNA sense strand
ugacaaggcccugagcuuu

SEQ ID NO: 1385716 - RNA, 19 nt, Homo sapiens
  misc_RNA (1)...(19): siRNA sense strand
gacaaggcccugagcuuug

SEQ ID NO: 1385717 - RNA, 19 nt, Homo sapiens
  misc_RNA (1)...(19): siRNA sense strand
gcccaaggaugcugucaag

SEQ ID NO: 1385718 - RNA, 19 nt, Homo sapiens
  misc_RNA (1)...(19): siRNA sense strand
ugccugaacuacauaacuu

SEQ ID NO: 1385719 - RNA, 19 nt, Homo sapiens
  misc_RNA (1)...(19): siRNA sense strand
cugcagaaguacuccuauu

SEQ ID NO: 1385720 - RNA, 19 nt, Homo sapiens
  misc_RNA (1)...(19): siRNA sense strand
uacauaacuuccuacguau

SEQ ID NO: 1385721 - RNA, 19 nt, Homo sapiens
  misc_RNA (1)...(19): siRNA sense strand
gcagaaguacuccuauugc

SEQ ID NO: 1385722 - RNA, 19 nt, Homo sapiens
  misc_RNA (1)...(19): siRNA sense strand
gagcgucacggccaagugu

SEQ ID NO: 1385723 - RNA, 19 nt, Homo sapiens
  misc_RNA (1)...(19): siRNA sense strand
acacaggcuucaucaaggu

SEQ ID NO: 1385724 - RNA, 19 nt, Homo sapiens
  misc_RNA (1)...(19): siRNA sense strand
aagggcacgugaagucauu

SEQ ID NO: 1385725 - RNA, 19 nt, Homo sapiens
  misc_RNA (1)...(19): siRNA sense strand
gcacaagggcacgugaagu

SEQ ID NO: 1385726 - RNA, 19 nt, Homo sapiens
  misc_RNA (1)...(19): siRNA sense strand
ucugugcccuccagcaaga

SEQ ID NO: 1385727 - RNA, 19 nt, Homo sapiens
  misc_RNA (1)...(19): siRNA sense strand
cggaagcuguuggaugaug

SEQ ID NO: 1385728 - RNA, 19 nt, Homo sapiens
  misc_RNA (1)...(19): siRNA sense strand
uuacacaggcuucaucaag

SEQ ID NO: 1385729 - RNA, 19 nt, Homo sapiens
  misc_RNA (1)...(19): siRNA sense strand
uugaggcccugcugcgaaa

SEQ ID NO: 1385730 - RNA, 19 nt, Homo sapiens
  misc_RNA (1)...(19): siRNA sense strand
cacaagggcacgugaaguc

SEQ ID NO: 1385731 - RNA, 19 nt, Homo sapiens
  misc_RNA (1)...(19): siRNA sense strand
ggacggggcacaaguguca

SEQ ID NO: 1385732 - RNA, 19 nt, Homo sapiens
  misc_RNA (1)...(19): siRNA sense strand
caaguuugcacucuuugag

SEQ ID NO: 1385733 - RNA, 19 nt, Homo sapiens
  misc_RNA (1)...(19): siRNA sense strand
cgccagauccugcagaagu

SEQ ID NO: 1385734 - RNA, 19 nt, Homo sapiens
  misc_RNA (1)...(19): siRNA sense strand
gcaugccugaacuacauaa

SEQ ID NO: 1385735 - RNA, 19 nt, Homo sapiens
  misc_RNA (1)...(19): siRNA sense strand
cuacauaacuuccuacgua

SEQ ID NO: 1385736 - RNA, 19 nt, Homo sapiens
  misc_RNA (1)...(19): siRNA sense strand
gcaagaagccacccuccuu

SEQ ID NO: 1385737 - RNA, 19 nt, Homo sapiens
  misc_RNA (1)...(19): siRNA sense strand
caaggacgguucuuacaca

SEQ ID NO: 1385738 - RNA, 19 nt, Homo sapiens
  misc_RNA (1)...(19): siRNA sense strand
ggaagcuguuggaugauga

SEQ ID NO: 1385739 - RNA, 19 nt, Homo sapiens
  misc_RNA (1)...(19): siRNA sense strand
gccagauccugcagaagua

SEQ ID NO: 1385740 - RNA, 19 nt, Homo sapiens
  misc_RNA (1)...(19): siRNA sense strand
cagcaugccugaacuacau

SEQ ID NO: 1385741 - RNA, 19 nt, Homo sapiens
  misc_RNA (1)...(19): siRNA sense strand
ugaacuacauaacuuccua

SEQ ID NO: 1385742 - RNA, 19 nt, Homo sapiens
  misc_RNA (1)...(19): siRNA sense strand
ugcggaagcuguuggauga

SEQ ID NO: 1385743 - RNA, 19 nt, Homo sapiens
  misc_RNA (1)...(19): siRNA sense strand
ugacaaggcccugagcuuu

SEQ ID NO: 1385744 - RNA, 19 nt, Homo sapiens
  misc_RNA (1)...(19): siRNA sense strand
gacaaggcccugagcuuug

SEQ ID NO: 1385745 - RNA, 19 nt, Homo sapiens
  misc_RNA (1)...(19): siRNA sense strand
gcccaaggaugcugucaag

SEQ ID NO: 1385746 - RNA, 19 nt, Homo sapiens
  misc_RNA (1)...(19): siRNA sense strand
ugccugaacuacauaacuu

SEQ ID NO: 1385747 - RNA, 19 nt, Homo sapiens
  misc_RNA (1)...(19): siRNA sense strand
cugcagaaguacuccuauu

SEQ ID NO: 1385748 - RNA, 19 nt, Homo sapiens
  misc_RNA (1)...(19): siRNA sense strand
uacauaacuuccuacguau

SEQ ID NO: 1385749 - RNA, 19 nt, Homo sapiens
  misc_RNA (1)...(19): siRNA sense strand
gcagaaguacuccuauugc

SEQ ID NO: 1385750 - RNA, 19 nt, Homo sapiens
  misc_RNA (1)...(19): siRNA sense strand
gagcgucacggccaagugu

SEQ ID NO: 1385751 - RNA, 19 nt, Homo sapiens
  misc_RNA (1)...(19): siRNA sense strand
acacaggcuucaucaaggu

SEQ ID NO: 1385752 - RNA, 19 nt, Homo sapiens
  misc_RNA (1)...(19): siRNA sense strand
aagggcacgugaagucauu

SEQ ID NO: 1385753 - RNA, 19 nt, Homo sapiens
  misc_RNA (1)...(19): siRNA sense strand
gcacaagggcacgugaagu

SEQ ID NO: 1385754 - RNA, 19 nt, Homo sapiens
  misc_RNA (1)...(19): siRNA sense strand
ucugugcccuccagcaaga

SEQ ID NO: 1385755 - RNA, 19 nt, Homo sapiens
  misc_RNA (1)...(19): siRNA sense strand
cggaagcuguuggaugaug

SEQ ID NO: 1385756 - RNA, 19 nt, Homo sapiens
  misc_RNA (1)...(19): siRNA sense strand
uuacacaggcuucaucaag

SEQ ID NO: 1385757 - RNA, 19 nt, Homo sapiens
  misc_RNA (1)...(19): siRNA sense strand
uugaggcccugcugcgaaa

SEQ ID NO: 1385758 - RNA, 19 nt, Homo sapiens
  misc_RNA (1)...(19): siRNA sense strand
cacaagggcacgugaaguc

SEQ ID NO: 1385759 - RNA, 19 nt, Homo sapiens
  misc_RNA (1)...(19): siRNA sense strand
ggacggggcacaaguguca

SEQ ID NO: 1385760 - RNA, 19 nt, Homo sapiens
  misc_RNA (1)...(19): siRNA sense strand
caaguuugcacucuuugag

SEQ ID NO: 1385761 - RNA, 19 nt, Homo sapiens
  misc_RNA (1)...(19): siRNA sense strand
cgccagauccugcagaagu

SEQ ID NO: 1385762 - RNA, 19 nt, Homo sapiens
  misc_RNA (1)...(19): siRNA sense strand
gcaugccugaacuacauaa

SEQ ID NO: 1385763 - RNA, 19 nt, Homo sapiens
  misc_RNA (1)...(19): siRNA sense strand
cuacauaacuuccuacgua

SEQ ID NO: 1385764 - RNA, 19 nt, Homo sapiens
  misc_RNA (1)...(19): siRNA sense strand
gcaagaagccacccuccuu

SEQ ID NO: 1385765 - RNA, 19 nt, Homo sapiens
  misc_RNA (1)...(19): siRNA sense strand
caaggacgguucuuacaca

SEQ ID NO: 1385766 - RNA, 19 nt, Homo sapiens
  misc_RNA (1)...(19): siRNA sense strand
ggaagcuguuggaugauga

SEQ ID NO: 1385767 - RNA, 19 nt, Homo sapiens
  misc_RNA (1)...(19): siRNA sense strand
gccagauccugcagaagua

SEQ ID NO: 1385768 - RNA, 19 nt, Homo sapiens
  misc_RNA (1)...(19): siRNA sense strand
cagcaugccugaacuacau

SEQ ID NO: 1385769 - RNA, 19 nt, Homo sapiens
  misc_RNA (1)...(19): siRNA sense strand
ugaacuacauaacuuccua

SEQ ID NO: 1385770 - RNA, 19 nt, Homo sapiens
  misc_RNA (1)...(19): siRNA sense strand
ugcggaagcuguuggauga

SEQ ID NO: 1385771 - RNA, 19 nt, Homo sapiens
  misc_RNA (1)...(19): siRNA sense strand
ugacaaggcccugagcuuu

SEQ ID NO: 1385772 - RNA, 19 nt, Homo sapiens
  misc_RNA (1)...(19): siRNA sense strand
gacaaggcccugagcuuug

SEQ ID NO: 1385773 - RNA, 19 nt, Homo sapiens
  misc_RNA (1)...(19): siRNA sense strand
gcccaaggaugcugucaag

SEQ ID NO: 1385774 - RNA, 19 nt, Homo sapiens
  misc_RNA (1)...(19): siRNA sense strand
ugccugaacuacauaacuu

SEQ ID NO: 1385775 - RNA, 19 nt, Homo sapiens
  misc_RNA (1)...(19): siRNA sense strand
cugcagaaguacuccuauu

SEQ ID NO: 1385776 - RNA, 19 nt, Homo sapiens
  misc_RNA (1)...(19): siRNA sense strand
uacauaacuuccuacguau

SEQ ID NO: 1385777 - RNA, 19 nt, Homo sapiens
  misc_RNA (1)...(19): siRNA sense strand
gcagaaguacuccuauugc

SEQ ID NO: 1385778 - RNA, 19 nt, Homo sapiens
  misc_RNA (1)...(19): siRNA sense strand
gagcgucacggccaagugu

SEQ ID NO: 1385779 - RNA, 19 nt, Homo sapiens
  misc_RNA (1)...(19): siRNA sense strand
acacaggcuucaucaaggu

SEQ ID NO: 1385780 - RNA, 19 nt, Homo sapiens
  misc_RNA (1)...(19): siRNA sense strand
aagggcacgugaagucauu

SEQ ID NO: 1385781 - RNA, 19 nt, Homo sapiens
  misc_RNA (1)...(19): siRNA sense strand
gcacaagggcacgugaagu

SEQ ID NO: 1385782 - RNA, 19 nt, Homo sapiens
  misc_RNA (1)...(19): siRNA sense strand
ucugugcccuccagcaaga

SEQ ID NO: 1385783 - RNA, 19 nt, Homo sapiens
  misc_RNA (1)...(19): siRNA sense strand
cggaagcuguuggaugaug

SEQ ID NO: 1385784 - RNA, 19 nt, Homo sapiens
  misc_RNA (1)...(19): siRNA sense strand
uuacacaggcuucaucaag

SEQ ID NO: 1385785 - RNA, 19 nt, Homo sapiens
  misc_RNA (1)...(19): siRNA sense strand
uugaggcccugcugcgaaa

SEQ ID NO: 1385786 - RNA, 19 nt, Homo sapiens
  misc_RNA (1)...(19): siRNA sense strand
cacaagggcacgugaaguc

SEQ ID NO: 1385787 - RNA, 19 nt, Homo sapiens
  misc_RNA (1)...(19): siRNA sense strand
ggacggggcacaaguguca

SEQ ID NO: 1385788 - RNA, 19 nt, Homo sapiens
  misc_RNA (1)...(19): siRNA sense strand
caaguuugcacucuuugag

SEQ ID NO: 1385789 - RNA, 19 nt, Homo sapiens
  misc_RNA (1)...(19): siRNA sense strand
cgccagauccugcagaagu

SEQ ID NO: 1385790 - RNA, 19 nt, Homo sapiens
  misc_RNA (1)...(19): siRNA sense strand
gcaugccugaacuacauaa

SEQ ID NO: 1385791 - RNA, 19 nt, Homo sapiens
  misc_RNA (1)...(19): siRNA sense strand
gcaagaagccacccuccuu

SEQ ID NO: 1385792 - RNA, 19 nt, Homo sapiens
  misc_RNA (1)...(19): siRNA sense strand
caaggacgguucuuacaca

SEQ ID NO: 1385793 - RNA, 19 nt, Homo sapiens
  misc_RNA (1)...(19): siRNA sense strand
gcccaaggaugcugucaag

SEQ ID NO: 1385794 - RNA, 19 nt, Homo sapiens
  misc_RNA (1)...(19): siRNA sense strand
acacaggcuucaucaaggu

SEQ ID NO: 1385795 - RNA, 19 nt, Homo sapiens
  misc_RNA (1)...(19): siRNA sense strand
uuacacaggcuucaucaag

SEQ ID NO: 1385796 - RNA, 19 nt, Homo sapiens
  misc_RNA (1)...(19): siRNA sense strand
ucugugcccuccagcaaga

SEQ ID NO: 1385797 - RNA, 19 nt, Homo sapiens
  misc_RNA (1)...(19): siRNA sense strand
ggacggggcacaaguguca

SEQ ID NO: 1385798 - RNA, 19 nt, Homo sapiens
  misc_RNA (1)...(19): siRNA sense strand
cuacauaacuuccuacgua

SEQ ID NO: 1385799 - RNA, 19 nt, Homo sapiens
  misc_RNA (1)...(19): siRNA sense strand
gcaagaagccacccuccuu

SEQ ID NO: 1385800 - RNA, 19 nt, Homo sapiens
  misc_RNA (1)...(19): siRNA sense strand
caaggacgguucuuacaca

SEQ ID NO: 1385801 - RNA, 19 nt, Homo sapiens
  misc_RNA (1)...(19): siRNA sense strand
ggaagcuguuggaugauga

SEQ ID NO: 1385802 - RNA, 19 nt, Homo sapiens
  misc_RNA (1)...(19): siRNA sense strand
gccagauccugcagaagua

SEQ ID NO: 1385803 - RNA, 19 nt, Homo sapiens
  misc_RNA (1)...(19): siRNA sense strand
cagcaugccugaacuacau

SEQ ID NO: 1385804 - RNA, 19 nt, Homo sapiens
  misc_RNA (1)...(19): siRNA sense strand
ugaacuacauaacuuccua

SEQ ID NO: 1385805 - RNA, 19 nt, Homo sapiens
  misc_RNA (1)...(19): siRNA sense strand
ugcggaagcuguuggauga

SEQ ID NO: 1385806 - RNA, 19 nt, Homo sapiens
  misc_RNA (1)...(19): siRNA sense strand
ugacaaggcccugagcuuu

SEQ ID NO: 1385807 - RNA, 19 nt, Homo sapiens
  misc_RNA (1)...(19): siRNA sense strand
gacaaggcccugagcuuug

SEQ ID NO: 1385808 - RNA, 19 nt, Homo sapiens
  misc_RNA (1)...(19): siRNA sense strand
gcccaaggaugcugucaag

SEQ ID NO: 1385809 - RNA, 19 nt, Homo sapiens
  misc_RNA (1)...(19): siRNA sense strand
ugccugaacuacauaacuu

SEQ ID NO: 1385810 - RNA, 19 nt, Homo sapiens
  misc_RNA (1)...(19): siRNA sense strand
cugcagaaguacuccuauu

SEQ ID NO: 1385811 - RNA, 19 nt, Homo sapiens
  misc_RNA (1)...(19): siRNA sense strand
uacauaacuuccuacguau

SEQ ID NO: 1385812 - RNA, 19 nt, Homo sapiens
  misc_RNA (1)...(19): siRNA sense strand
gcagaaguacuccuauugc

SEQ ID NO: 1385813 - RNA, 19 nt, Homo sapiens
  misc_RNA (1)...(19): siRNA sense strand
gagcgucacggccaagugu

SEQ ID NO: 1385814 - RNA, 19 nt, Homo sapiens
  misc_RNA (1)...(19): siRNA sense strand
acacaggcuucaucaaggu

SEQ ID NO: 1385815 - RNA, 19 nt, Homo sapiens
  misc_RNA (1)...(19): siRNA sense strand
aagggcacgugaagucauu

SEQ ID NO: 1385816 - RNA, 19 nt, Homo sapiens
  misc_RNA (1)...(19): siRNA sense strand
gcacaagggcacgugaagu

SEQ ID NO: 1385817 - RNA, 19 nt, Homo sapiens
  misc_RNA (1)...(19): siRNA sense strand
ucugugcccuccagcaaga

SEQ ID NO: 1385818 - RNA, 19 nt, Homo sapiens
  misc_RNA (1)...(19): siRNA sense strand
cggaagcuguuggaugaug

SEQ ID NO: 1385819 - RNA, 19 nt, Homo sapiens
  misc_RNA (1)...(19): siRNA sense strand
uuacacaggcuucaucaag

SEQ ID NO: 1385820 - RNA, 19 nt, Homo sapiens
  misc_RNA (1)...(19): siRNA sense strand
uugaggcccugcugcgaaa

SEQ ID NO: 1385821 - RNA, 19 nt, Homo sapiens
  misc_RNA (1)...(19): siRNA sense strand
cacaagggcacgugaaguc

SEQ ID NO: 1385822 - RNA, 19 nt, Homo sapiens
  misc_RNA (1)...(19): siRNA sense strand
ggacggggcacaaguguca

SEQ ID NO: 1385823 - RNA, 19 nt, Homo sapiens
  misc_RNA (1)...(19): siRNA sense strand
caaguuugcacucuuugag

SEQ ID NO: 1385824 - RNA, 19 nt, Homo sapiens
  misc_RNA (1)...(19): siRNA sense strand
cgccagauccugcagaagu

SEQ ID NO: 1385825 - RNA, 19 nt, Homo sapiens
  misc_RNA (1)...(19): siRNA sense strand
gcaugccugaacuacauaa

SEQ ID NO: 1385826 - RNA, 19 nt, Homo sapiens
  misc_RNA (1)...(19): siRNA sense strand
cuacauaacuuccuacgua

SEQ ID NO: 1385827 - RNA, 19 nt, Homo sapiens
  misc_RNA (1)...(19): siRNA sense strand
gcaagaagccacccuccuu

SEQ ID NO: 1385828 - RNA, 19 nt, Homo sapiens
  misc_RNA (1)...(19): siRNA sense strand
caaggacgguucuuacaca

SEQ ID NO: 1385829 - RNA, 19 nt, Homo sapiens
  misc_RNA (1)...(19): siRNA sense strand
ggaagcuguuggaugauga

SEQ ID NO: 1385830 - RNA, 19 nt, Homo sapiens
  misc_RNA (1)...(19): siRNA sense strand
gccagauccugcagaagua

SEQ ID NO: 1385831 - RNA, 19 nt, Homo sapiens
  misc_RNA (1)...(19): siRNA sense strand
cagcaugccugaacuacau

SEQ ID NO: 1385832 - RNA, 19 nt, Homo sapiens
  misc_RNA (1)...(19): siRNA sense strand
ugaacuacauaacuuccua

SEQ ID NO: 1385833 - RNA, 19 nt, Homo sapiens
  misc_RNA (1)...(19): siRNA sense strand
ugcggaagcuguuggauga

SEQ ID NO: 1385834 - RNA, 19 nt, Homo sapiens
  misc_RNA (1)...(19): siRNA sense strand
ugacaaggcccugagcuuu

SEQ ID NO: 1385835 - RNA, 19 nt, Homo sapiens
  misc_RNA (1)...(19): siRNA sense strand
gacaaggcccugagcuuug

SEQ ID NO: 1385836 - RNA, 19 nt, Homo sapiens
  misc_RNA (1)...(19): siRNA sense strand
gcccaaggaugcugucaag

SEQ ID NO: 1385837 - RNA, 19 nt, Homo sapiens
  misc_RNA (1)...(19): siRNA sense strand
ugccugaacuacauaacuu

SEQ ID NO: 1385838 - RNA, 19 nt, Homo sapiens
  misc_RNA (1)...(19): siRNA sense strand
cugcagaaguacuccuauu

SEQ ID NO: 1385839 - RNA, 19 nt, Homo sapiens
  misc_RNA (1)...(19): siRNA sense strand
uacauaacuuccuacguau

SEQ ID NO: 1385840 - RNA, 19 nt, Homo sapiens
  misc_RNA (1)...(19): siRNA sense strand
gcagaaguacuccuauugc

SEQ ID NO: 1385841 - RNA, 19 nt, Homo sapiens
  misc_RNA (1)...(19): siRNA sense strand
gagcgucacggccaagugu

SEQ ID NO: 1385842 - RNA, 19 nt, Homo sapiens
  misc_RNA (1)...(19): siRNA sense strand
acacaggcuucaucaaggu

SEQ ID NO: 1385843 - RNA, 19 nt, Homo sapiens
  misc_RNA (1)...(19): siRNA sense strand
aagggcacgugaagucauu

SEQ ID NO: 1385844 - RNA, 19 nt, Homo sapiens
  misc_RNA (1)...(19): siRNA sense strand
gcacaagggcacgugaagu

SEQ ID NO: 1385845 - RNA, 19 nt, Homo sapiens
  misc_RNA (1)...(19): siRNA sense strand
ucugugcccuccagcaaga

SEQ ID NO: 1385846 - RNA, 19 nt, Homo sapiens
  misc_RNA (1)...(19): siRNA sense strand
cggaagcuguuggaugaug

SEQ ID NO: 1385847 - RNA, 19 nt, Homo sapiens
  misc_RNA (1)...(19): siRNA sense strand
uuacacaggcuucaucaag

SEQ ID NO: 1385848 - RNA, 19 nt, Homo sapiens
  misc_RNA (1)...(19): siRNA sense strand
uugaggcccugcugcgaaa

SEQ ID NO: 1385849 - RNA, 19 nt, Homo sapiens
  misc_RNA (1)...(19): siRNA sense strand
cacaagggcacgugaaguc

SEQ ID NO: 1385850 - RNA, 19 nt, Homo sapiens
  misc_RNA (1)...(19): siRNA sense strand
ggacggggcacaaguguca

SEQ ID NO: 1385851 - RNA, 19 nt, Homo sapiens
  misc_RNA (1)...(19): siRNA sense strand
caaguuugcacucuuugag

SEQ ID NO: 1385852 - RNA, 19 nt, Homo sapiens
  misc_RNA (1)...(19): siRNA sense strand
cgccagauccugcagaagu

SEQ ID NO: 1385853 - RNA, 19 nt, Homo sapiens
  misc_RNA (1)...(19): siRNA sense strand
gcaugccugaacuacauaa

SEQ ID NO: 1385854 - RNA, 19 nt, Homo sapiens
  misc_RNA (1)...(19): siRNA sense strand
cuacauaacuuccuacgua

SEQ ID NO: 1385855 - RNA, 19 nt, Homo sapiens
  misc_RNA (1)...(19): siRNA sense strand
gcaagaagccacccuccuu

SEQ ID NO: 1385856 - RNA, 19 nt, Homo sapiens
  misc_RNA (1)...(19): siRNA sense strand
caaggacgguucuuacaca

SEQ ID NO: 1385857 - RNA, 19 nt, Homo sapiens
  misc_RNA (1)...(19): siRNA sense strand
ggaagcuguuggaugauga

SEQ ID NO: 1385858 - RNA, 19 nt, Homo sapiens
  misc_RNA (1)...(19): siRNA sense strand
gccagauccugcagaagua

SEQ ID NO: 1385859 - RNA, 19 nt, Homo sapiens
  misc_RNA (1)...(19): siRNA sense strand
cagcaugccugaacuacau

SEQ ID NO: 1385860 - RNA, 19 nt, Homo sapiens
  misc_RNA (1)...(19): siRNA sense strand
ugaacuacauaacuuccua

SEQ ID NO: 1385861 - RNA, 19 nt, Homo sapiens
  misc_RNA (1)...(19): siRNA sense strand
ugcggaagcuguuggauga

SEQ ID NO: 1385862 - RNA, 19 nt, Homo sapiens
  misc_RNA (1)...(19): siRNA sense strand
ugacaaggcccugagcuuu

SEQ ID NO: 1385863 - RNA, 19 nt, Homo sapiens
  misc_RNA (1)...(19): siRNA sense strand
gacaaggcccugagcuuug

SEQ ID NO: 1385864 - RNA, 19 nt, Homo sapiens
  misc_RNA (1)...(19): siRNA sense strand
gcccaaggaugcugucaag

SEQ ID NO: 1385865 - RNA, 19 nt, Homo sapiens
  misc_RNA (1)...(19): siRNA sense strand
ugccugaacuacauaacuu

SEQ ID NO: 1385866 - RNA, 19 nt, Homo sapiens
  misc_RNA (1)...(19): siRNA sense strand
cugcagaaguacuccuauu

SEQ ID NO: 1385867 - RNA, 19 nt, Homo sapiens
  misc_RNA (1)...(19): siRNA sense strand
uacauaacuuccuacguau

SEQ ID NO: 1385868 - RNA, 19 nt, Homo sapiens
  misc_RNA (1)...(19): siRNA sense strand
gcagaaguacuccuauugc

SEQ ID NO: 1385869 - RNA, 19 nt, Homo sapiens
  misc_RNA (1)...(19): siRNA sense strand
gagcgucacggccaagugu

SEQ ID NO: 1385870 - RNA, 19 nt, Homo sapiens
  misc_RNA (1)...(19): siRNA sense strand
acacaggcuucaucaaggu

SEQ ID NO: 1385871 - RNA, 19 nt, Homo sapiens
  misc_RNA (1)...(19): siRNA sense strand
aagggcacgugaagucauu

SEQ ID NO: 1385872 - RNA, 19 nt, Homo sapiens
  misc_RNA (1)...(19): siRNA sense strand
gcacaagggcacgugaagu

SEQ ID NO: 1385873 - RNA, 19 nt, Homo sapiens
  misc_RNA (1)...(19): siRNA sense strand
ucugugcccuccagcaaga

SEQ ID NO: 1385874 - RNA, 19 nt, Homo sapiens
  misc_RNA (1)...(19): siRNA sense strand
cggaagcuguuggaugaug

SEQ ID NO: 1385875 - RNA, 19 nt, Homo sapiens
  misc_RNA (1)...(19): siRNA sense strand
uuacacaggcuucaucaag

SEQ ID NO: 1385876 - RNA, 19 nt, Homo sapiens
  misc_RNA (1)...(19): siRNA sense strand
uugaggcccugcugcgaaa

SEQ ID NO: 1385877 - RNA, 19 nt, Homo sapiens
  misc_RNA (1)...(19): siRNA sense strand
cacaagggcacgugaaguc

SEQ ID NO: 1385878 - RNA, 19 nt, Homo sapiens
  misc_RNA (1)...(19): siRNA sense strand
ggacggggcacaaguguca

SEQ ID NO: 1385879 - RNA, 19 nt, Homo sapiens
  misc_RNA (1)...(19): siRNA sense strand
caaguuugcacucuuugag

SEQ ID NO: 1385880 - RNA, 19 nt, Homo sapiens
  misc_RNA (1)...(19): siRNA sense strand
cgccagauccugcagaagu

SEQ ID NO: 1385881 - RNA, 19 nt, Homo sapiens
  misc_RNA (1)...(19): siRNA sense strand
gcaugccugaacuacauaa

SEQ ID NO: 1385882 - RNA, 19 nt, Homo sapiens
  misc_RNA (1)...(19): siRNA sense strand
cuacauaacuuccuacgua

SEQ ID NO: 1385883 - RNA, 19 nt, Homo sapiens
  misc_RNA (1)...(19): siRNA sense strand
gcaagaagccacccuccuu

SEQ ID NO: 1385884 - RNA, 19 nt, Homo sapiens
  misc_RNA (1)...(19): siRNA sense strand
caaggacgguucuuacaca

SEQ ID NO: 1385885 - RNA, 19 nt, Homo sapiens
  misc_RNA (1)...(19): siRNA sense strand
ggaagcuguuggaugauga

SEQ ID NO: 1385886 - RNA, 19 nt, Homo sapiens
  misc_RNA (1)...(19): siRNA sense strand
gccagauccugcagaagua

SEQ ID NO: 1385887 - RNA, 19 nt, Homo sapiens
  misc_RNA (1)...(19): siRNA sense strand
cagcaugccugaacuacau

SEQ ID NO: 1385888 - RNA, 19 nt, Homo sapiens
  misc_RNA (1)...(19): siRNA sense strand
ugaacuacauaacuuccua

SEQ ID NO: 1385889 - RNA, 19 nt, Homo sapiens
  misc_RNA (1)...(19): siRNA sense strand
ugcggaagcuguuggauga

SEQ ID NO: 1385890 - RNA, 19 nt, Homo sapiens
  misc_RNA (1)...(19): siRNA sense strand
ugacaaggcccugagcuuu

SEQ ID NO: 1385891 - RNA, 19 nt, Homo sapiens
  misc_RNA (1)...(19): siRNA sense strand
gacaaggcccugagcuuug

SEQ ID NO: 1385892 - RNA, 19 nt, Homo sapiens
  misc_RNA (1)...(19): siRNA sense strand
gcccaaggaugcugucaag

SEQ ID NO: 1385893 - RNA, 19 nt, Homo sapiens
  misc_RNA (1)...(19): siRNA sense strand
ugccugaacuacauaacuu

SEQ ID NO: 1385894 - RNA, 19 nt, Homo sapiens
  misc_RNA (1)...(19): siRNA sense strand
cugcagaaguacuccuauu

SEQ ID NO: 1385895 - RNA, 19 nt, Homo sapiens
  misc_RNA (1)...(19): siRNA sense strand
uacauaacuuccuacguau

SEQ ID NO: 1385896 - RNA, 19 nt, Homo sapiens
  misc_RNA (1)...(19): siRNA sense strand
gcagaaguacuccuauugc

SEQ ID NO: 1385897 - RNA, 19 nt, Homo sapiens
  misc_RNA (1)...(19): siRNA sense strand
gagcgucacggccaagugu

SEQ ID NO: 1385898 - RNA, 19 nt, Homo sapiens
  misc_RNA (1)...(19): siRNA sense strand
acacaggcuucaucaaggu

SEQ ID NO: 1385899 - RNA, 19 nt, Homo sapiens
  misc_RNA (1)...(19): siRNA sense strand
aagggcacgugaagucauu

SEQ ID NO: 1385900 - RNA, 19 nt, Homo sapiens
  misc_RNA (1)...(19): siRNA sense strand
gcacaagggcacgugaagu

SEQ ID NO: 1385901 - RNA, 19 nt, Homo sapiens
  misc_RNA (1)...(19): siRNA sense strand
ucugugcccuccagcaaga

SEQ ID NO: 1385902 - RNA, 19 nt, Homo sapiens
  misc_RNA (1)...(19): siRNA sense strand
cggaagcuguuggaugaug

SEQ ID NO: 1385903 - RNA, 19 nt, Homo sapiens
  misc_RNA (1)...(19): siRNA sense strand
uuacacaggcuucaucaag

SEQ ID NO: 1385904 - RNA, 19 nt, Homo sapiens
  misc_RNA (1)...(19): siRNA sense strand
uugaggcccugcugcgaaa

SEQ ID NO: 1385905 - RNA, 19 nt, Homo sapiens
  misc_RNA (1)...(19): siRNA sense strand
cacaagggcacgugaaguc

SEQ ID NO: 1385906 - RNA, 19 nt, Homo sapiens
  misc_RNA (1)...(19): siRNA sense strand
ggacggggcacaaguguca

SEQ ID NO: 1385907 - RNA, 19 nt, Homo sapiens
  misc_RNA (1)...(19): siRNA sense strand
caaguuugcacucuuugag

SEQ ID NO: 1385908 - RNA, 19 nt, Homo sapiens
  misc_RNA (1)...(19): siRNA sense strand
cgccagauccugcagaagu

SEQ ID NO: 1385909 - RNA, 19 nt, Homo sapiens
  misc_RNA (1)...(19): siRNA sense strand
gcaugccugaacuacauaa

SEQ ID NO: 1385910 - RNA, 19 nt, Homo sapiens
  misc_RNA (1)...(19): siRNA sense strand
cuacauaacuuccuacgua

SEQ ID NO: 1385911 - RNA, 19 nt, Homo sapiens
  misc_RNA (1)...(19): siRNA sense strand
gcaagaagccacccuccuu

SEQ ID NO: 1385912 - RNA, 19 nt, Homo sapiens
  misc_RNA (1)...(19): siRNA sense strand
caaggacgguucuuacaca

SEQ ID NO: 1385913 - RNA, 19 nt, Homo sapiens
  misc_RNA (1)...(19): siRNA sense strand
ggaagcuguuggaugauga

SEQ ID NO: 1385914 - RNA, 19 nt, Homo sapiens
  misc_RNA (1)...(19): siRNA sense strand
gccagauccugcagaagua

SEQ ID NO: 1385915 - RNA, 19 nt, Homo sapiens
  misc_RNA (1)...(19): siRNA sense strand
cagcaugccugaacuacau

SEQ ID NO: 1385916 - RNA, 19 nt, Homo sapiens
  misc_RNA (1)...(19): siRNA sense strand
ugaacuacauaacuuccua

SEQ ID NO: 1385917 - RNA, 19 nt, Homo sapiens
  misc_RNA (1)...(19): siRNA sense strand
ugcggaagcuguuggauga

SEQ ID NO: 1385918 - RNA, 19 nt, Homo sapiens
  misc_RNA (1)...(19): siRNA sense strand
ugacaaggcccugagcuuu

SEQ ID NO: 1385919 - RNA, 19 nt, Homo sapiens
  misc_RNA (1)...(19): siRNA sense strand
gacaaggcccugagcuuug

SEQ ID NO: 1385920 - RNA, 19 nt, Homo sapiens
  misc_RNA (1)...(19): siRNA sense strand
gcccaaggaugcugucaag

SEQ ID NO: 1385921 - RNA, 19 nt, Homo sapiens
  misc_RNA (1)...(19): siRNA sense strand
ugccugaacuacauaacuu

SEQ ID NO: 1385922 - RNA, 19 nt, Homo sapiens
  misc_RNA (1)...(19): siRNA sense strand
cugcagaaguacuccuauu

SEQ ID NO: 1385923 - RNA, 19 nt, Homo sapiens
  misc_RNA (1)...(19): siRNA sense strand
uacauaacuuccuacguau

SEQ ID NO: 1385924 - RNA, 19 nt, Homo sapiens
  misc_RNA (1)...(19): siRNA sense strand
gcagaaguacuccuauugc

SEQ ID NO: 1385925 - RNA, 19 nt, Homo sapiens
  misc_RNA (1)...(19): siRNA sense strand
gagcgucacggccaagugu

SEQ ID NO: 1385926 - RNA, 19 nt, Homo sapiens
  misc_RNA (1)...(19): siRNA sense strand
acacaggcuucaucaaggu

SEQ ID NO: 1385927 - RNA, 19 nt, Homo sapiens
  misc_RNA (1)...(19): siRNA sense strand
aagggcacgugaagucauu

SEQ ID NO: 1385928 - RNA, 19 nt, Homo sapiens
  misc_RNA (1)...(19): siRNA sense strand
gcacaagggcacgugaagu

SEQ ID NO: 1385929 - RNA, 19 nt, Homo sapiens
  misc_RNA (1)...(19): siRNA sense strand
ucugugcccuccagcaaga

SEQ ID NO: 1385930 - RNA, 19 nt, Homo sapiens
  misc_RNA (1)...(19): siRNA sense strand
cggaagcuguuggaugaug

SEQ ID NO: 1385931 - RNA, 19 nt, Homo sapiens
  misc_RNA (1)...(19): siRNA sense strand
uuacacaggcuucaucaag

SEQ ID NO: 1385932 - RNA, 19 nt, Homo sapiens
  misc_RNA (1)...(19): siRNA sense strand
uugaggcccugcugcgaaa

SEQ ID NO: 1385933 - RNA, 19 nt, Homo sapiens
  misc_RNA (1)...(19): siRNA sense strand
cacaagggcacgugaaguc

SEQ ID NO: 1385934 - RNA, 19 nt, Homo sapiens
  misc_RNA (1)...(19): siRNA sense strand
ggacggggcacaaguguca

SEQ ID NO: 1385935 - RNA, 19 nt, Homo sapiens
  misc_RNA (1)...(19): siRNA sense strand
caaguuugcacucuuugag

SEQ ID NO: 1385936 - RNA, 19 nt, Homo sapiens
  misc_RNA (1)...(19): siRNA sense strand
cgccagauccugcagaagu

SEQ ID NO: 1385937 - RNA, 19 nt, Homo sapiens
  misc_RNA (1)...(19): siRNA sense strand
gcaugccugaacuacauaa

SEQ ID NO: 1385938 - RNA, 19 nt, Homo sapiens
  misc_RNA (1)...(19): siRNA sense strand
gcaagaagccacccuccuu

SEQ ID NO: 1385939 - RNA, 19 nt, Homo sapiens
  misc_RNA (1)...(19): siRNA sense strand
caaggacgguucuuacaca

SEQ ID NO: 1385940 - RNA, 19 nt, Homo sapiens
  misc_RNA (1)...(19): siRNA sense strand
gcccaaggaugcugucaag

SEQ ID NO: 1385941 - RNA, 19 nt, Homo sapiens
  misc_RNA (1)...(19): siRNA sense strand
acacaggcuucaucaaggu

SEQ ID NO: 1385942 - RNA, 19 nt, Homo sapiens
  misc_RNA (1)...(19): siRNA sense strand
uuacacaggcuucaucaag

SEQ ID NO: 1385943 - RNA, 19 nt, Homo sapiens
  misc_RNA (1)...(19): siRNA sense strand
ucugugcccuccagcaaga

SEQ ID NO: 1385944 - RNA, 19 nt, Homo sapiens
  misc_RNA (1)...(19): siRNA sense strand
ggacggggcacaaguguca

SEQ ID NO: 1385945 - RNA, 19 nt, Homo sapiens
  misc_RNA (1)...(19): siRNA sense strand
cuacauaacuuccuacgua

SEQ ID NO: 1385946 - RNA, 19 nt, Homo sapiens
  misc_RNA (1)...(19): siRNA sense strand
gcaagaagccacccuccuu

SEQ ID NO: 1385947 - RNA, 19 nt, Homo sapiens
  misc_RNA (1)...(19): siRNA sense strand
caaggacgguucuuacaca

SEQ ID NO: 1385948 - RNA, 19 nt, Homo sapiens
  misc_RNA (1)...(19): siRNA sense strand
ggaagcuguuggaugauga

SEQ ID NO: 1385949 - RNA, 19 nt, Homo sapiens
  misc_RNA (1)...(19): siRNA sense strand
gccagauccugcagaagua

SEQ ID NO: 1385950 - RNA, 19 nt, Homo sapiens
  misc_RNA (1)...(19): siRNA sense strand
cagcaugccugaacuacau

SEQ ID NO: 1385951 - RNA, 19 nt, Homo sapiens
  misc_RNA (1)...(19): siRNA sense strand
ugaacuacauaacuuccua

SEQ ID NO: 1385952 - RNA, 19 nt, Homo sapiens
  misc_RNA (1)...(19): siRNA sense strand
ugcggaagcuguuggauga

SEQ ID NO: 1385953 - RNA, 19 nt, Homo sapiens
  misc_RNA (1)...(19): siRNA sense strand
ugacaaggcccugagcuuu

SEQ ID NO: 1385954 - RNA, 19 nt, Homo sapiens
  misc_RNA (1)...(19): siRNA sense strand
gacaaggcccugagcuuug

SEQ ID NO: 1385955 - RNA, 19 nt, Homo sapiens
  misc_RNA (1)...(19): siRNA sense strand
gcccaaggaugcugucaag

SEQ ID NO: 1385956 - RNA, 19 nt, Homo sapiens
  misc_RNA (1)...(19): siRNA sense strand
ugccugaacuacauaacuu

SEQ ID NO: 1385957 - RNA, 19 nt, Homo sapiens
  misc_RNA (1)...(19): siRNA sense strand
cugcagaaguacuccuauu

SEQ ID NO: 1385958 - RNA, 19 nt, Homo sapiens
  misc_RNA (1)...(19): siRNA sense strand
uacauaacuuccuacguau

SEQ ID NO: 1385959 - RNA, 19 nt, Homo sapiens
  misc_RNA (1)...(19): siRNA sense strand
gcagaaguacuccuauugc

SEQ ID NO: 1385960 - RNA, 19 nt, Homo sapiens
  misc_RNA (1)...(19): siRNA sense strand
gagcgucacggccaagugu

SEQ ID NO: 1385961 - RNA, 19 nt, Homo sapiens
  misc_RNA (1)...(19): siRNA sense strand
acacaggcuucaucaaggu

SEQ ID NO: 1385962 - RNA, 19 nt, Homo sapiens
  misc_RNA (1)...(19): siRNA sense strand
aagggcacgugaagucauu

SEQ ID NO: 1385963 - RNA, 19 nt, Homo sapiens
  misc_RNA (1)...(19): siRNA sense strand
gcacaagggcacgugaagu

SEQ ID NO: 1385964 - RNA, 19 nt, Homo sapiens
  misc_RNA (1)...(19): siRNA sense strand
ucugugcccuccagcaaga

SEQ ID NO: 1385965 - RNA, 19 nt, Homo sapiens
  misc_RNA (1)...(19): siRNA sense strand
cggaagcuguuggaugaug

SEQ ID NO: 1385966 - RNA, 19 nt, Homo sapiens
  misc_RNA (1)...(19): siRNA sense strand
uuacacaggcuucaucaag

SEQ ID NO: 1385967 - RNA, 19 nt, Homo sapiens
  misc_RNA (1)...(19): siRNA sense strand
uugaggcccugcugcgaaa

SEQ ID NO: 1385968 - RNA, 19 nt, Homo sapiens
  misc_RNA (1)...(19): siRNA sense strand
cacaagggcacgugaaguc

SEQ ID NO: 1385969 - RNA, 19 nt, Homo sapiens
  misc_RNA (1)...(19): siRNA sense strand
ggacggggcacaaguguca

SEQ ID NO: 1385970 - RNA, 19 nt, Homo sapiens
  misc_RNA (1)...(19): siRNA sense strand
caaguuugcacucuuugag

SEQ ID NO: 1385971 - RNA, 19 nt, Homo sapiens
  misc_RNA (1)...(19): siRNA sense strand
cgccagauccugcagaagu

SEQ ID NO: 1385972 - RNA, 19 nt, Homo sapiens
  misc_RNA (1)...(19): siRNA sense strand
gcaugccugaacuacauaa

SEQ ID NO: 1385973 - RNA, 19 nt, Homo sapiens
  misc_RNA (1)...(19): siRNA sense strand
cuacauaacuuccuacgua

SEQ ID NO: 1385974 - RNA, 19 nt, Homo sapiens
  misc_RNA (1)...(19): siRNA sense strand
gcaagaagccacccuccuu

SEQ ID NO: 1385975 - RNA, 19 nt, Homo sapiens
  misc_RNA (1)...(19): siRNA sense strand
caaggacgguucuuacaca

SEQ ID NO: 1385976 - RNA, 19 nt, Homo sapiens
  misc_RNA (1)...(19): siRNA sense strand
ggaagcuguuggaugauga

SEQ ID NO: 1385977 - RNA, 19 nt, Homo sapiens
  misc_RNA (1)...(19): siRNA sense strand
gccagauccugcagaagua

SEQ ID NO: 1385978 - RNA, 19 nt, Homo sapiens
  misc_RNA (1)...(19): siRNA sense strand
cagcaugccugaacuacau

SEQ ID NO: 1385979 - RNA, 19 nt, Homo sapiens
  misc_RNA (1)...(19): siRNA sense strand
ugaacuacauaacuuccua

SEQ ID NO: 1385980 - RNA, 19 nt, Homo sapiens
  misc_RNA (1)...(19): siRNA sense strand
ugcggaagcuguuggauga

SEQ ID NO: 1385981 - RNA, 19 nt, Homo sapiens
  misc_RNA (1)...(19): siRNA sense strand
ugacaaggcccugagcuuu

SEQ ID NO: 1385982 - RNA, 19 nt, Homo sapiens
  misc_RNA (1)...(19): siRNA sense strand
gacaaggcccugagcuuug

SEQ ID NO: 1385983 - RNA, 19 nt, Homo sapiens
  misc_RNA (1)...(19): siRNA sense strand
gcccaaggaugcugucaag

SEQ ID NO: 1385984 - RNA, 19 nt, Homo sapiens
  misc_RNA (1)...(19): siRNA sense strand
ugccugaacuacauaacuu

SEQ ID NO: 1385985 - RNA, 19 nt, Homo sapiens
  misc_RNA (1)...(19): siRNA sense strand
cugcagaaguacuccuauu

SEQ ID NO: 1385986 - RNA, 19 nt, Homo sapiens
  misc_RNA (1)...(19): siRNA sense strand
uacauaacuuccuacguau

SEQ ID NO: 1385987 - RNA, 19 nt, Homo sapiens
  misc_RNA (1)...(19): siRNA sense strand
gcagaaguacuccuauugc

SEQ ID NO: 1385988 - RNA, 19 nt, Homo sapiens
  misc_RNA (1)...(19): siRNA sense strand
gagcgucacggccaagugu

SEQ ID NO: 1385989 - RNA, 19 nt, Homo sapiens
  misc_RNA (1)...(19): siRNA sense strand
acacaggcuucaucaaggu

SEQ ID NO: 1385990 - RNA, 19 nt, Homo sapiens
  misc_RNA (1)...(19): siRNA sense strand
aagggcacgugaagucauu

SEQ ID NO: 1385991 - RNA, 19 nt, Homo sapiens
  misc_RNA (1)...(19): siRNA sense strand
gcacaagggcacgugaagu

SEQ ID NO: 1385992 - RNA, 19 nt, Homo sapiens
  misc_RNA (1)...(19): siRNA sense strand
ucugugcccuccagcaaga

SEQ ID NO: 1385993 - RNA, 19 nt, Homo sapiens
  misc_RNA (1)...(19): siRNA sense strand
cggaagcuguuggaugaug

SEQ ID NO: 1385994 - RNA, 19 nt, Homo sapiens
  misc_RNA (1)...(19): siRNA sense strand
uuacacaggcuucaucaag

SEQ ID NO: 1385995 - RNA, 19 nt, Homo sapiens
  misc_RNA (1)...(19): siRNA sense strand
uugaggcccugcugcgaaa

SEQ ID NO: 1385996 - RNA, 19 nt, Homo sapiens
  misc_RNA (1)...(19): siRNA sense strand
cacaagggcacgugaaguc

SEQ ID NO: 1385997 - RNA, 19 nt, Homo sapiens
  misc_RNA (1)...(19): siRNA sense strand
ggacggggcacaaguguca

SEQ ID NO: 1385998 - RNA, 19 nt, Homo sapiens
  misc_RNA (1)...(19): siRNA sense strand
caaguuugcacucuuugag

SEQ ID NO: 1385999 - RNA, 19 nt, Homo sapiens
  misc_RNA (1)...(19): siRNA sense strand
cgccagauccugcagaagu

SEQ ID NO: 1386000 - RNA, 19 nt, Homo sapiens
  misc_RNA (1)...(19): siRNA sense strand
gcaugccugaacuacauaa

SEQ ID NO: 1386001 - RNA, 19 nt, Homo sapiens
  misc_RNA (1)...(19): siRNA sense strand
cuacauaacuuccuacgua

SEQ ID NO: 1386002 - RNA, 19 nt, Homo sapiens
  misc_RNA (1)...(19): siRNA sense strand
gcaagaagccacccuccuu

SEQ ID NO: 1386003 - RNA, 19 nt, Homo sapiens
  misc_RNA (1)...(19): siRNA sense strand
caaggacgguucuuacaca

SEQ ID NO: 1386004 - RNA, 19 nt, Homo sapiens
  misc_RNA (1)...(19): siRNA sense strand
ggaagcuguuggaugauga

SEQ ID NO: 1386005 - RNA, 19 nt, Homo sapiens
  misc_RNA (1)...(19): siRNA sense strand
gccagauccugcagaagua

SEQ ID NO: 1386006 - RNA, 19 nt, Homo sapiens
  misc_RNA (1)...(19): siRNA sense strand
cagcaugccugaacuacau

SEQ ID NO: 1386007 - RNA, 19 nt, Homo sapiens
  misc_RNA (1)...(19): siRNA sense strand
ugaacuacauaacuuccua

SEQ ID NO: 1386008 - RNA, 19 nt, Homo sapiens
  misc_RNA (1)...(19): siRNA sense strand
ugcggaagcuguuggauga

SEQ ID NO: 1386009 - RNA, 19 nt, Homo sapiens
  misc_RNA (1)...(19): siRNA sense strand
ugacaaggcccugagcuuu

SEQ ID NO: 1386010 - RNA, 19 nt, Homo sapiens
  misc_RNA (1)...(19): siRNA sense strand
gacaaggcccugagcuuug

SEQ ID NO: 1386011 - RNA, 19 nt, Homo sapiens
  misc_RNA (1)...(19): siRNA sense strand
gcccaaggaugcugucaag

SEQ ID NO: 1386012 - RNA, 19 nt, Homo sapiens
  misc_RNA (1)...(19): siRNA sense strand
ugccugaacuacauaacuu

SEQ ID NO: 1386013 - RNA, 19 nt, Homo sapiens
  misc_RNA (1)...(19): siRNA sense strand
cugcagaaguacuccuauu

SEQ ID NO: 1386014 - RNA, 19 nt, Homo sapiens
  misc_RNA (1)...(19): siRNA sense strand
uacauaacuuccuacguau

SEQ ID NO: 1386015 - RNA, 19 nt, Homo sapiens
  misc_RNA (1)...(19): siRNA sense strand
gcagaaguacuccuauugc

SEQ ID NO: 1386016 - RNA, 19 nt, Homo sapiens
  misc_RNA (1)...(19): siRNA sense strand
gagcgucacggccaagugu

SEQ ID NO: 1386017 - RNA, 19 nt, Homo sapiens
  misc_RNA (1)...(19): siRNA sense strand
acacaggcuucaucaaggu

SEQ ID NO: 1386018 - RNA, 19 nt, Homo sapiens
  misc_RNA (1)...(19): siRNA sense strand
aagggcacgugaagucauu

SEQ ID NO: 1386019 - RNA, 19 nt, Homo sapiens
  misc_RNA (1)...(19): siRNA sense strand
gcacaagggcacgugaagu

SEQ ID NO: 1386020 - RNA, 19 nt, Homo sapiens
  misc_RNA (1)...(19): siRNA sense strand
ucugugcccuccagcaaga

SEQ ID NO: 1386021 - RNA, 19 nt, Homo sapiens
  misc_RNA (1)...(19): siRNA sense strand
cggaagcuguuggaugaug

SEQ ID NO: 1386022 - RNA, 19 nt, Homo sapiens
  misc_RNA (1)...(19): siRNA sense strand
uuacacaggcuucaucaag

SEQ ID NO: 1386023 - RNA, 19 nt, Homo sapiens
  misc_RNA (1)...(19): siRNA sense strand
uugaggcccugcugcgaaa

SEQ ID NO: 1386024 - RNA, 19 nt, Homo sapiens
  misc_RNA (1)...(19): siRNA sense strand
cacaagggcacgugaaguc

SEQ ID NO: 1386025 - RNA, 19 nt, Homo sapiens
  misc_RNA (1)...(19): siRNA sense strand
ggacggggcacaaguguca

SEQ ID NO: 1386026 - RNA, 19 nt, Homo sapiens
  misc_RNA (1)...(19): siRNA sense strand
caaguuugcacucuuugag

SEQ ID NO: 1386027 - RNA, 19 nt, Homo sapiens
  misc_RNA (1)...(19): siRNA sense strand
cgccagauccugcagaagu

SEQ ID NO: 1386028 - RNA, 19 nt, Homo sapiens
  misc_RNA (1)...(19): siRNA sense strand
gcaugccugaacuacauaa

SEQ ID NO: 1386029 - RNA, 19 nt, Homo sapiens
  misc_RNA (1)...(19): siRNA sense strand
cuacauaacuuccuacgua

SEQ ID NO: 1386030 - RNA, 19 nt, Homo sapiens
  misc_RNA (1)...(19): siRNA sense strand
gcaagaagccacccuccuu

SEQ ID NO: 1386031 - RNA, 19 nt, Homo sapiens
  misc_RNA (1)...(19): siRNA sense strand
caaggacgguucuuacaca

SEQ ID NO: 1386032 - RNA, 19 nt, Homo sapiens
  misc_RNA (1)...(19): siRNA sense strand
ggaagcuguuggaugauga

SEQ ID NO: 1386033 - RNA, 19 nt, Homo sapiens
  misc_RNA (1)...(19): siRNA sense strand
gccagauccugcagaagua

SEQ ID NO: 1386034 - RNA, 19 nt, Homo sapiens
  misc_RNA (1)...(19): siRNA sense strand
cagcaugccugaacuacau

SEQ ID NO: 1386035 - RNA, 19 nt, Homo sapiens
  misc_RNA (1)...(19): siRNA sense strand
ugaacuacauaacuuccua

SEQ ID NO: 1386036 - RNA, 19 nt, Homo sapiens
  misc_RNA (1)...(19): siRNA sense strand
ugcggaagcuguuggauga

SEQ ID NO: 1386037 - RNA, 19 nt, Homo sapiens
  misc_RNA (1)...(19): siRNA sense strand
ugacaaggcccugagcuuu

SEQ ID NO: 1386038 - RNA, 19 nt, Homo sapiens
  misc_RNA (1)...(19): siRNA sense strand
gacaaggcccugagcuuug

SEQ ID NO: 1386039 - RNA, 19 nt, Homo sapiens
  misc_RNA (1)...(19): siRNA sense strand
gcccaaggaugcugucaag

SEQ ID NO: 1386040 - RNA, 19 nt, Homo sapiens
  misc_RNA (1)...(19): siRNA sense strand
ugccugaacuacauaacuu

SEQ ID NO: 1386041 - RNA, 19 nt, Homo sapiens
  misc_RNA (1)...(19): siRNA sense strand
cugcagaaguacuccuauu

SEQ ID NO: 1386042 - RNA, 19 nt, Homo sapiens
  misc_RNA (1)...(19): siRNA sense strand
uacauaacuuccuacguau

SEQ ID NO: 1386043 - RNA, 19 nt, Homo sapiens
  misc_RNA (1)...(19): siRNA sense strand
gcagaaguacuccuauugc

SEQ ID NO: 1386044 - RNA, 19 nt, Homo sapiens
  misc_RNA (1)...(19): siRNA sense strand
gagcgucacggccaagugu

SEQ ID NO: 1386045 - RNA, 19 nt, Homo sapiens
  misc_RNA (1)...(19): siRNA sense strand
acacaggcuucaucaaggu

SEQ ID NO: 1386046 - RNA, 19 nt, Homo sapiens
  misc_RNA (1)...(19): siRNA sense strand
aagggcacgugaagucauu

SEQ ID NO: 1386047 - RNA, 19 nt, Homo sapiens
  misc_RNA (1)...(19): siRNA sense strand
gcacaagggcacgugaagu

SEQ ID NO: 1386048 - RNA, 19 nt, Homo sapiens
  misc_RNA (1)...(19): siRNA sense strand
ucugugcccuccagcaaga

SEQ ID NO: 1386049 - RNA, 19 nt, Homo sapiens
  misc_RNA (1)...(19): siRNA sense strand
cggaagcuguuggaugaug

SEQ ID NO: 1386050 - RNA, 19 nt, Homo sapiens
  misc_RNA (1)...(19): siRNA sense strand
uuacacaggcuucaucaag

SEQ ID NO: 1386051 - RNA, 19 nt, Homo sapiens
  misc_RNA (1)...(19): siRNA sense strand
uugaggcccugcugcgaaa

SEQ ID NO: 1386052 - RNA, 19 nt, Homo sapiens
  misc_RNA (1)...(19): siRNA sense strand
cacaagggcacgugaaguc

SEQ ID NO: 1386053 - RNA, 19 nt, Homo sapiens
  misc_RNA (1)...(19): siRNA sense strand
ggacggggcacaaguguca

SEQ ID NO: 1386054 - RNA, 19 nt, Homo sapiens
  misc_RNA (1)...(19): siRNA sense strand
caaguuugcacucuuugag

SEQ ID NO: 1386055 - RNA, 19 nt, Homo sapiens
  misc_RNA (1)...(19): siRNA sense strand
cgccagauccugcagaagu

SEQ ID NO: 1386056 - RNA, 19 nt, Homo sapiens
  misc_RNA (1)...(19): siRNA sense strand
gcaugccugaacuacauaa

SEQ ID NO: 1386057 - RNA, 19 nt, Homo sapiens
  misc_RNA (1)...(19): siRNA sense strand
cuacauaacuuccuacgua

SEQ ID NO: 1386058 - RNA, 19 nt, Homo sapiens
  misc_RNA (1)...(19): siRNA sense strand
gcaagaagccacccuccuu

SEQ ID NO: 1386059 - RNA, 19 nt, Homo sapiens
  misc_RNA (1)...(19): siRNA sense strand
caaggacgguucuuacaca

SEQ ID NO: 1386060 - RNA, 19 nt, Homo sapiens
  misc_RNA (1)...(19): siRNA sense strand
ggaagcuguuggaugauga

SEQ ID NO: 1386061 - RNA, 19 nt, Homo sapiens
  misc_RNA (1)...(19): siRNA sense strand
gccagauccugcagaagua

SEQ ID NO: 1386062 - RNA, 19 nt, Homo sapiens
  misc_RNA (1)...(19): siRNA sense strand
cagcaugccugaacuacau

SEQ ID NO: 1386063 - RNA, 19 nt, Homo sapiens
  misc_RNA (1)...(19): siRNA sense strand
ugaacuacauaacuuccua

SEQ ID NO: 1386064 - RNA, 19 nt, Homo sapiens
  misc_RNA (1)...(19): siRNA sense strand
ugcggaagcuguuggauga

SEQ ID NO: 1386065 - RNA, 19 nt, Homo sapiens
  misc_RNA (1)...(19): siRNA sense strand
ugacaaggcccugagcuuu

SEQ ID NO: 1386066 - RNA, 19 nt, Homo sapiens
  misc_RNA (1)...(19): siRNA sense strand
gacaaggcccugagcuuug

SEQ ID NO: 1386067 - RNA, 19 nt, Homo sapiens
  misc_RNA (1)...(19): siRNA sense strand
gcccaaggaugcugucaag

SEQ ID NO: 1386068 - RNA, 19 nt, Homo sapiens
  misc_RNA (1)...(19): siRNA sense strand
ugccugaacuacauaacuu

SEQ ID NO: 1386069 - RNA, 19 nt, Homo sapiens
  misc_RNA (1)...(19): siRNA sense strand
cugcagaaguacuccuauu

SEQ ID NO: 1386070 - RNA, 19 nt, Homo sapiens
  misc_RNA (1)...(19): siRNA sense strand
uacauaacuuccuacguau

SEQ ID NO: 1386071 - RNA, 19 nt, Homo sapiens
  misc_RNA (1)...(19): siRNA sense strand
gcagaaguacuccuauugc

SEQ ID NO: 1386072 - RNA, 19 nt, Homo sapiens
  misc_RNA (1)...(19): siRNA sense strand
gagcgucacggccaagugu

SEQ ID NO: 1386073 - RNA, 19 nt, Homo sapiens
  misc_RNA (1)...(19): siRNA sense strand
acacaggcuucaucaaggu

SEQ ID NO: 1386074 - RNA, 19 nt, Homo sapiens
  misc_RNA (1)...(19): siRNA sense strand
aagggcacgugaagucauu

SEQ ID NO: 1386075 - RNA, 19 nt, Homo sapiens
  misc_RNA (1)...(19): siRNA sense strand
gcacaagggcacgugaagu

SEQ ID NO: 1386076 - RNA, 19 nt, Homo sapiens
  misc_RNA (1)...(19): siRNA sense strand
ucugugcccuccagcaaga

SEQ ID NO: 1386077 - RNA, 19 nt, Homo sapiens
  misc_RNA (1)...(19): siRNA sense strand
cggaagcuguuggaugaug

SEQ ID NO: 1386078 - RNA, 19 nt, Homo sapiens
  misc_RNA (1)...(19): siRNA sense strand
uuacacaggcuucaucaag

SEQ ID NO: 1386079 - RNA, 19 nt, Homo sapiens
  misc_RNA (1)...(19): siRNA sense strand
uugaggcccugcugcgaaa

SEQ ID NO: 1386080 - RNA, 19 nt, Homo sapiens
  misc_RNA (1)...(19): siRNA sense strand
cacaagggcacgugaaguc

SEQ ID NO: 1386081 - RNA, 19 nt, Homo sapiens
  misc_RNA (1)...(19): siRNA sense strand
ggacggggcacaaguguca

SEQ ID NO: 1386082 - RNA, 19 nt, Homo sapiens
  misc_RNA (1)...(19): siRNA sense strand
caaguuugcacucuuugag

SEQ ID NO: 1386083 - RNA, 19 nt, Homo sapiens
  misc_RNA (1)...(19): siRNA sense strand
cgccagauccugcagaagu

SEQ ID NO: 1386084 - RNA, 19 nt, Homo sapiens
  misc_RNA (1)...(19): siRNA sense strand
gcaugccugaacuacauaa

SEQ ID NO: 1386085 - RNA, 19 nt, Homo sapiens
  misc_RNA (1)...(19): siRNA sense strand
gcaagaagccacccuccuu

SEQ ID NO: 1386086 - RNA, 19 nt, Homo sapiens
  misc_RNA (1)...(19): siRNA sense strand
caaggacgguucuuacaca

SEQ ID NO: 1386087 - RNA, 19 nt, Homo sapiens
  misc_RNA (1)...(19): siRNA sense strand
gcccaaggaugcugucaag

SEQ ID NO: 1386088 - RNA, 19 nt, Homo sapiens
  misc_RNA (1)...(19): siRNA sense strand
acacaggcuucaucaaggu

SEQ ID NO: 1386089 - RNA, 19 nt, Homo sapiens
  misc_RNA (1)...(19): siRNA sense strand
uuacacaggcuucaucaag

SEQ ID NO: 1386090 - RNA, 19 nt, Homo sapiens
  misc_RNA (1)...(19): siRNA sense strand
ucugugcccuccagcaaga

SEQ ID NO: 1386091 - RNA, 19 nt, Homo sapiens
  misc_RNA (1)...(19): siRNA sense strand
ggacggggcacaaguguca

SEQ ID NO: 1386092 - RNA, 19 nt, Homo sapiens
  misc_RNA (1)...(19): siRNA sense strand
cuacauaacuuccuacgua

SEQ ID NO: 1386093 - RNA, 19 nt, Homo sapiens
  misc_RNA (1)...(19): siRNA sense strand
gcaagaagccacccuccuu

SEQ ID NO: 1386094 - RNA, 19 nt, Homo sapiens
  misc_RNA (1)...(19): siRNA sense strand
caaggacgguucuuacaca

SEQ ID NO: 1386095 - RNA, 19 nt, Homo sapiens
  misc_RNA (1)...(19): siRNA sense strand
ggaagcuguuggaugauga

SEQ ID NO: 1386096 - RNA, 19 nt, Homo sapiens
  misc_RNA (1)...(19): siRNA sense strand
gccagauccugcagaagua

SEQ ID NO: 1386097 - RNA, 19 nt, Homo sapiens
  misc_RNA (1)...(19): siRNA sense strand
cagcaugccugaacuacau

SEQ ID NO: 1386098 - RNA, 19 nt, Homo sapiens
  misc_RNA (1)...(19): siRNA sense strand
ugaacuacauaacuuccua

SEQ ID NO: 1386099 - RNA, 19 nt, Homo sapiens
  misc_RNA (1)...(19): siRNA sense strand
ugcggaagcuguuggauga

SEQ ID NO: 1386100 - RNA, 19 nt, Homo sapiens
  misc_RNA (1)...(19): siRNA sense strand
ugacaaggcccugagcuuu

SEQ ID NO: 1386101 - RNA, 19 nt, Homo sapiens
  misc_RNA (1)...(19): siRNA sense strand
gacaaggcccugagcuuug

SEQ ID NO: 1386102 - RNA, 19 nt, Homo sapiens
  misc_RNA (1)...(19): siRNA sense strand
gcccaaggaugcugucaag

SEQ ID NO: 1386103 - RNA, 19 nt, Homo sapiens
  misc_RNA (1)...(19): siRNA sense strand
ugccugaacuacauaacuu

SEQ ID NO: 1386104 - RNA, 19 nt, Homo sapiens
  misc_RNA (1)...(19): siRNA sense strand
cugcagaaguacuccuauu

SEQ ID NO: 1386105 - RNA, 19 nt, Homo sapiens
  misc_RNA (1)...(19): siRNA sense strand
uacauaacuuccuacguau

SEQ ID NO: 1386106 - RNA, 19 nt, Homo sapiens
  misc_RNA (1)...(19): siRNA sense strand
gcagaaguacuccuauugc

SEQ ID NO: 1386107 - RNA, 19 nt, Homo sapiens
  misc_RNA (1)...(19): siRNA sense strand
gagcgucacggccaagugu

SEQ ID NO: 1386108 - RNA, 19 nt, Homo sapiens
  misc_RNA (1)...(19): siRNA sense strand
acacaggcuucaucaaggu

SEQ ID NO: 1386109 - RNA, 19 nt, Homo sapiens
  misc_RNA (1)...(19): siRNA sense strand
aagggcacgugaagucauu

SEQ ID NO: 1386110 - RNA, 19 nt, Homo sapiens
  misc_RNA (1)...(19): siRNA sense strand
gcacaagggcacgugaagu

SEQ ID NO: 1386111 - RNA, 19 nt, Homo sapiens
  misc_RNA (1)...(19): siRNA sense strand
ucugugcccuccagcaaga

SEQ ID NO: 1386112 - RNA, 19 nt, Homo sapiens
  misc_RNA (1)...(19): siRNA sense strand
cggaagcuguuggaugaug

SEQ ID NO: 1386113 - RNA, 19 nt, Homo sapiens
  misc_RNA (1)...(19): siRNA sense strand
uuacacaggcuucaucaag

SEQ ID NO: 1386114 - RNA, 19 nt, Homo sapiens
  misc_RNA (1)...(19): siRNA sense strand
uugaggcccugcugcgaaa

SEQ ID NO: 1386115 - RNA, 19 nt, Homo sapiens
  misc_RNA (1)...(19): siRNA sense strand
cacaagggcacgugaaguc

SEQ ID NO: 1386116 - RNA, 19 nt, Homo sapiens
  misc_RNA (1)...(19): siRNA sense strand
ggacggggcacaaguguca

SEQ ID NO: 1386117 - RNA, 19 nt, Homo sapiens
  misc_RNA (1)...(19): siRNA sense strand
caaguuugcacucuuugag

SEQ ID NO: 1386118 - RNA, 19 nt, Homo sapiens
  misc_RNA (1)...(19): siRNA sense strand
cgccagauccugcagaagu

SEQ ID NO: 1386119 - RNA, 19 nt, Homo sapiens
  misc_RNA (1)...(19): siRNA sense strand
gcaugccugaacuacauaa

SEQ ID NO: 1386120 - RNA, 19 nt, Homo sapiens
  misc_RNA (1)...(19): siRNA sense strand
cuacauaacuuccuacgua

SEQ ID NO: 1386121 - RNA, 19 nt, Homo sapiens
  misc_RNA (1)...(19): siRNA sense strand
gcaagaagccacccuccuu

SEQ ID NO: 1386122 - RNA, 19 nt, Homo sapiens
  misc_RNA (1)...(19): siRNA sense strand
caaggacgguucuuacaca

SEQ ID NO: 1386123 - RNA, 19 nt, Homo sapiens
  misc_RNA (1)...(19): siRNA sense strand
ggaagcuguuggaugauga

SEQ ID NO: 1386124 - RNA, 19 nt, Homo sapiens
  misc_RNA (1)...(19): siRNA sense strand
gccagauccugcagaagua

SEQ ID NO: 1386125 - RNA, 19 nt, Homo sapiens
  misc_RNA (1)...(19): siRNA sense strand
cagcaugccugaacuacau

SEQ ID NO: 1386126 - RNA, 19 nt, Homo sapiens
  misc_RNA (1)...(19): siRNA sense strand
ugaacuacauaacuuccua

SEQ ID NO: 1386127 - RNA, 19 nt, Homo sapiens
  misc_RNA (1)...(19): siRNA sense strand
ugcggaagcuguuggauga

SEQ ID NO: 1386128 - RNA, 19 nt, Homo sapiens
  misc_RNA (1)...(19): siRNA sense strand
ugacaaggcccugagcuuu

SEQ ID NO: 1386129 - RNA, 19 nt, Homo sapiens
  misc_RNA (1)...(19): siRNA sense strand
gacaaggcccugagcuuug

SEQ ID NO: 1386130 - RNA, 19 nt, Homo sapiens
  misc_RNA (1)...(19): siRNA sense strand
gcccaaggaugcugucaag

SEQ ID NO: 1386131 - RNA, 19 nt, Homo sapiens
  misc_RNA (1)...(19): siRNA sense strand
ugccugaacuacauaacuu

SEQ ID NO: 1386132 - RNA, 19 nt, Homo sapiens
  misc_RNA (1)...(19): siRNA sense strand
cugcagaaguacuccuauu

SEQ ID NO: 1386133 - RNA, 19 nt, Homo sapiens
  misc_RNA (1)...(19): siRNA sense strand
uacauaacuuccuacguau

SEQ ID NO: 1386134 - RNA, 19 nt, Homo sapiens
  misc_RNA (1)...(19): siRNA sense strand
gcagaaguacuccuauugc

SEQ ID NO: 1386135 - RNA, 19 nt, Homo sapiens
  misc_RNA (1)...(19): siRNA sense strand
gagcgucacggccaagugu

SEQ ID NO: 1386136 - RNA, 19 nt, Homo sapiens
  misc_RNA (1)...(19): siRNA sense strand
acacaggcuucaucaaggu

SEQ ID NO: 1386137 - RNA, 19 nt, Homo sapiens
  misc_RNA (1)...(19): siRNA sense strand
aagggcacgugaagucauu

SEQ ID NO: 1386138 - RNA, 19 nt, Homo sapiens
  misc_RNA (1)...(19): siRNA sense strand
gcacaagggcacgugaagu

SEQ ID NO: 1386139 - RNA, 19 nt, Homo sapiens
  misc_RNA (1)...(19): siRNA sense strand
ucugugcccuccagcaaga

SEQ ID NO: 1386140 - RNA, 19 nt, Homo sapiens
  misc_RNA (1)...(19): siRNA sense strand
cggaagcuguuggaugaug

SEQ ID NO: 1386141 - RNA, 19 nt, Homo sapiens
  misc_RNA (1)...(19): siRNA sense strand
uuacacaggcuucaucaag

SEQ ID NO: 1386142 - RNA, 19 nt, Homo sapiens
  misc_RNA (1)...(19): siRNA sense strand
uugaggcccugcugcgaaa

SEQ ID NO: 1386143 - RNA, 19 nt, Homo sapiens
  misc_RNA (1)...(19): siRNA sense strand
cacaagggcacgugaaguc

SEQ ID NO: 1386144 - RNA, 19 nt, Homo sapiens
  misc_RNA (1)...(19): siRNA sense strand
ggacggggcacaaguguca

SEQ ID NO: 1386145 - RNA, 19 nt, Homo sapiens
  misc_RNA (1)...(19): siRNA sense strand
caaguuugcacucuuugag

SEQ ID NO: 1386146 - RNA, 19 nt, Homo sapiens
  misc_RNA (1)...(19): siRNA sense strand
cgccagauccugcagaagu

SEQ ID NO: 1386147 - RNA, 19 nt, Homo sapiens
  misc_RNA (1)...(19): siRNA sense strand
gcaugccugaacuacauaa

SEQ ID NO: 1386148 - RNA, 19 nt, Homo sapiens
  misc_RNA (1)...(19): siRNA sense strand
cuacauaacuuccuacgua

SEQ ID NO: 1386149 - RNA, 19 nt, Homo sapiens
  misc_RNA (1)...(19): siRNA sense strand
gcaagaagccacccuccuu

SEQ ID NO: 1386150 - RNA, 19 nt, Homo sapiens
  misc_RNA (1)...(19): siRNA sense strand
caaggacgguucuuacaca

SEQ ID NO: 1386151 - RNA, 19 nt, Homo sapiens
  misc_RNA (1)...(19): siRNA sense strand
ggaagcuguuggaugauga

SEQ ID NO: 1386152 - RNA, 19 nt, Homo sapiens
  misc_RNA (1)...(19): siRNA sense strand
gccagauccugcagaagua

SEQ ID NO: 1386153 - RNA, 19 nt, Homo sapiens
  misc_RNA (1)...(19): siRNA sense strand
cagcaugccugaacuacau

SEQ ID NO: 1386154 - RNA, 19 nt, Homo sapiens
  misc_RNA (1)...(19): siRNA sense strand
ugaacuacauaacuuccua

SEQ ID NO: 1386155 - RNA, 19 nt, Homo sapiens
  misc_RNA (1)...(19): siRNA sense strand
ugcggaagcuguuggauga

SEQ ID NO: 1386156 - RNA, 19 nt, Homo sapiens
  misc_RNA (1)...(19): siRNA sense strand
ugacaaggcccugagcuuu

SEQ ID NO: 1386157 - RNA, 19 nt, Homo sapiens
  misc_RNA (1)...(19): siRNA sense strand
gacaaggcccugagcuuug

SEQ ID NO: 1386158 - RNA, 19 nt, Homo sapiens
  misc_RNA (1)...(19): siRNA sense strand
gcccaaggaugcugucaag

SEQ ID NO: 1386159 - RNA, 19 nt, Homo sapiens
  misc_RNA (1)...(19): siRNA sense strand
ugccugaacuacauaacuu

SEQ ID NO: 1386160 - RNA, 19 nt, Homo sapiens
  misc_RNA (1)...(19): siRNA sense strand
cugcagaaguacuccuauu

SEQ ID NO: 1386161 - RNA, 19 nt, Homo sapiens
  misc_RNA (1)...(19): siRNA sense strand
uacauaacuuccuacguau

SEQ ID NO: 1386162 - RNA, 19 nt, Homo sapiens
  misc_RNA (1)...(19): siRNA sense strand
gcagaaguacuccuauugc

SEQ ID NO: 1386163 - RNA, 19 nt, Homo sapiens
  misc_RNA (1)...(19): siRNA sense strand
gagcgucacggccaagugu

SEQ ID NO: 1386164 - RNA, 19 nt, Homo sapiens
  misc_RNA (1)...(19): siRNA sense strand
acacaggcuucaucaaggu

SEQ ID NO: 1386165 - RNA, 19 nt, Homo sapiens
  misc_RNA (1)...(19): siRNA sense strand
aagggcacgugaagucauu

SEQ ID NO: 1386166 - RNA, 19 nt, Homo sapiens
  misc_RNA (1)...(19): siRNA sense strand
gcacaagggcacgugaagu

SEQ ID NO: 1386167 - RNA, 19 nt, Homo sapiens
  misc_RNA (1)...(19): siRNA sense strand
ucugugcccuccagcaaga

SEQ ID NO: 1386168 - RNA, 19 nt, Homo sapiens
  misc_RNA (1)...(19): siRNA sense strand
cggaagcuguuggaugaug

SEQ ID NO: 1386169 - RNA, 19 nt, Homo sapiens
  misc_RNA (1)...(19): siRNA sense strand
uuacacaggcuucaucaag

SEQ ID NO: 1386170 - RNA, 19 nt, Homo sapiens
  misc_RNA (1)...(19): siRNA sense strand
uugaggcccugcugcgaaa

SEQ ID NO: 1386171 - RNA, 19 nt, Homo sapiens
  misc_RNA (1)...(19): siRNA sense strand
cacaagggcacgugaaguc

SEQ ID NO: 1386172 - RNA, 19 nt, Homo sapiens
  misc_RNA (1)...(19): siRNA sense strand
ggacggggcacaaguguca

SEQ ID NO: 1386173 - RNA, 19 nt, Homo sapiens
  misc_RNA (1)...(19): siRNA sense strand
caaguuugcacucuuugag

SEQ ID NO: 1386174 - RNA, 19 nt, Homo sapiens
  misc_RNA (1)...(19): siRNA sense strand
cgccagauccugcagaagu

SEQ ID NO: 1386175 - RNA, 19 nt, Homo sapiens
  misc_RNA (1)...(19): siRNA sense strand
gcaugccugaacuacauaa

SEQ ID NO: 1386176 - RNA, 19 nt, Homo sapiens
  misc_RNA (1)...(19): siRNA sense strand
cuacauaacuuccuacgua

SEQ ID NO: 1386177 - RNA, 19 nt, Homo sapiens
  misc_RNA (1)...(19): siRNA sense strand
gcaagaagccacccuccuu

SEQ ID NO: 1386178 - RNA, 19 nt, Homo sapiens
  misc_RNA (1)...(19): siRNA sense strand
caaggacgguucuuacaca

SEQ ID NO: 1386179 - RNA, 19 nt, Homo sapiens
  misc_RNA (1)...(19): siRNA sense strand
ggaagcuguuggaugauga

SEQ ID NO: 1386180 - RNA, 19 nt, Homo sapiens
  misc_RNA (1)...(19): siRNA sense strand
gccagauccugcagaagua

SEQ ID NO: 1386181 - RNA, 19 nt, Homo sapiens
  misc_RNA (1)...(19): siRNA sense strand
cagcaugccugaacuacau

SEQ ID NO: 1386182 - RNA, 19 nt, Homo sapiens
  misc_RNA (1)...(19): siRNA sense strand
ugaacuacauaacuuccua

SEQ ID NO: 1386183 - RNA, 19 nt, Homo sapiens
  misc_RNA (1)...(19): siRNA sense strand
ugcggaagcuguuggauga

SEQ ID NO: 1386184 - RNA, 19 nt, Homo sapiens
  misc_RNA (1)...(19): siRNA sense strand
ugacaaggcccugagcuuu

SEQ ID NO: 1386185 - RNA, 19 nt, Homo sapiens
  misc_RNA (1)...(19): siRNA sense strand
gacaaggcccugagcuuug

SEQ ID NO: 1386186 - RNA, 19 nt, Homo sapiens
  misc_RNA (1)...(19): siRNA sense strand
gcccaaggaugcugucaag

SEQ ID NO: 1386187 - RNA, 19 nt, Homo sapiens
  misc_RNA (1)...(19): siRNA sense strand
ugccugaacuacauaacuu

SEQ ID NO: 1386188 - RNA, 19 nt, Homo sapiens
  misc_RNA (1)...(19): siRNA sense strand
cugcagaaguacuccuauu

SEQ ID NO: 1386189 - RNA, 19 nt, Homo sapiens
  misc_RNA (1)...(19): siRNA sense strand
uacauaacuuccuacguau

SEQ ID NO: 1386190 - RNA, 19 nt, Homo sapiens
  misc_RNA (1)...(19): siRNA sense strand
gcagaaguacuccuauugc

SEQ ID NO: 1386191 - RNA, 19 nt, Homo sapiens
  misc_RNA (1)...(19): siRNA sense strand
gagcgucacggccaagugu

SEQ ID NO: 1386192 - RNA, 19 nt, Homo sapiens
  misc_RNA (1)...(19): siRNA sense strand
acacaggcuucaucaaggu

SEQ ID NO: 1386193 - RNA, 19 nt, Homo sapiens
  misc_RNA (1)...(19): siRNA sense strand
aagggcacgugaagucauu

SEQ ID NO: 1386194 - RNA, 19 nt, Homo sapiens
  misc_RNA (1)...(19): siRNA sense strand
gcacaagggcacgugaagu

SEQ ID NO: 1386195 - RNA, 19 nt, Homo sapiens
  misc_RNA (1)...(19): siRNA sense strand
ucugugcccuccagcaaga

SEQ ID NO: 1386196 - RNA, 19 nt, Homo sapiens
  misc_RNA (1)...(19): siRNA sense strand
cggaagcuguuggaugaug

SEQ ID NO: 1386197 - RNA, 19 nt, Homo sapiens
  misc_RNA (1)...(19): siRNA sense strand
uuacacaggcuucaucaag

SEQ ID NO: 1386198 - RNA, 19 nt, Homo sapiens
  misc_RNA (1)...(19): siRNA sense strand
uugaggcccugcugcgaaa

SEQ ID NO: 1386199 - RNA, 19 nt, Homo sapiens
  misc_RNA (1)...(19): siRNA sense strand
cacaagggcacgugaaguc

SEQ ID NO: 1386200 - RNA, 19 nt, Homo sapiens
  misc_RNA (1)...(19): siRNA sense strand
ggacggggcacaaguguca

SEQ ID NO: 1386201 - RNA, 19 nt, Homo sapiens
  misc_RNA (1)...(19): siRNA sense strand
caaguuugcacucuuugag

SEQ ID NO: 1386202 - RNA, 19 nt, Homo sapiens
  misc_RNA (1)...(19): siRNA sense strand
cgccagauccugcagaagu

SEQ ID NO: 1386203 - RNA, 19 nt, Homo sapiens
  misc_RNA (1)...(19): siRNA sense strand
gcaugccugaacuacauaa

SEQ ID NO: 1386204 - RNA, 19 nt, Homo sapiens
  misc_RNA (1)...(19): siRNA sense strand
cuacauaacuuccuacgua

SEQ ID NO: 1386205 - RNA, 19 nt, Homo sapiens
  misc_RNA (1)...(19): siRNA sense strand
gcaagaagccacccuccuu

SEQ ID NO: 1386206 - RNA, 19 nt, Homo sapiens
  misc_RNA (1)...(19): siRNA sense strand
caaggacgguucuuacaca

SEQ ID NO: 1386207 - RNA, 19 nt, Homo sapiens
  misc_RNA (1)...(19): siRNA sense strand
ggaagcuguuggaugauga

SEQ ID NO: 1386208 - RNA, 19 nt, Homo sapiens
  misc_RNA (1)...(19): siRNA sense strand
gccagauccugcagaagua

SEQ ID NO: 1386209 - RNA, 19 nt, Homo sapiens
  misc_RNA (1)...(19): siRNA sense strand
cagcaugccugaacuacau

SEQ ID NO: 1386210 - RNA, 19 nt, Homo sapiens
  misc_RNA (1)...(19): siRNA sense strand
ugaacuacauaacuuccua

SEQ ID NO: 1386211 - RNA, 19 nt, Homo sapiens
  misc_RNA (1)...(19): siRNA sense strand
ugcggaagcuguuggauga

SEQ ID NO: 1386212 - RNA, 19 nt, Homo sapiens
  misc_RNA (1)...(19): siRNA sense strand
ugacaaggcccugagcuuu

SEQ ID NO: 1386213 - RNA, 19 nt, Homo sapiens
  misc_RNA (1)...(19): siRNA sense strand
gacaaggcccugagcuuug

SEQ ID NO: 1386214 - RNA, 19 nt, Homo sapiens
  misc_RNA (1)...(19): siRNA sense strand
gcccaaggaugcugucaag

SEQ ID NO: 1386215 - RNA, 19 nt, Homo sapiens
  misc_RNA (1)...(19): siRNA sense strand
ugccugaacuacauaacuu

SEQ ID NO: 1386216 - RNA, 19 nt, Homo sapiens
  misc_RNA (1)...(19): siRNA sense strand
cugcagaaguacuccuauu

SEQ ID NO: 1386217 - RNA, 19 nt, Homo sapiens
  misc_RNA (1)...(19): siRNA sense strand
uacauaacuuccuacguau

SEQ ID NO: 1386218 - RNA, 19 nt, Homo sapiens
  misc_RNA (1)...(19): siRNA sense strand
gcagaaguacuccuauugc

SEQ ID NO: 1386219 - RNA, 19 nt, Homo sapiens
  misc_RNA (1)...(19): siRNA sense strand
gagcgucacggccaagugu

SEQ ID NO: 1386220 - RNA, 19 nt, Homo sapiens
  misc_RNA (1)...(19): siRNA sense strand
acacaggcuucaucaaggu

SEQ ID NO: 1386221 - RNA, 19 nt, Homo sapiens
  misc_RNA (1)...(19): siRNA sense strand
aagggcacgugaagucauu

SEQ ID NO: 1386222 - RNA, 19 nt, Homo sapiens
  misc_RNA (1)...(19): siRNA sense strand
gcacaagggcacgugaagu

SEQ ID NO: 1386223 - RNA, 19 nt, Homo sapiens
  misc_RNA (1)...(19): siRNA sense strand
ucugugcccuccagcaaga

SEQ ID NO: 1386224 - RNA, 19 nt, Homo sapiens
  misc_RNA (1)...(19): siRNA sense strand
cggaagcuguuggaugaug

SEQ ID NO: 1386225 - RNA, 19 nt, Homo sapiens
  misc_RNA (1)...(19): siRNA sense strand
uuacacaggcuucaucaag

SEQ ID NO: 1386226 - RNA, 19 nt, Homo sapiens
  misc_RNA (1)...(19): siRNA sense strand
uugaggcccugcugcgaaa

SEQ ID NO: 1386227 - RNA, 19 nt, Homo sapiens
  misc_RNA (1)...(19): siRNA sense strand
cacaagggcacgugaaguc

SEQ ID NO: 1386228 - RNA, 19 nt, Homo sapiens
  misc_RNA (1)...(19): siRNA sense strand
ggacggggcacaaguguca

SEQ ID NO: 1386229 - RNA, 19 nt, Homo sapiens
  misc_RNA (1)...(19): siRNA sense strand
caaguuugcacucuuugag

SEQ ID NO: 1386230 - RNA, 19 nt, Homo sapiens
  misc_RNA (1)...(19): siRNA sense strand
cgccagauccugcagaagu

SEQ ID NO: 1386231 - RNA, 19 nt, Homo sapiens
  misc_RNA (1)...(19): siRNA sense strand
gcaugccugaacuacauaa

SEQ ID NO: 1386232 - RNA, 19 nt, Homo sapiens
  misc_RNA (1)...(19): siRNA sense strand
gcaagaagccacccuccuu

SEQ ID NO: 1386233 - RNA, 19 nt, Homo sapiens
  misc_RNA (1)...(19): siRNA sense strand
caaggacgguucuuacaca

SEQ ID NO: 1386234 - RNA, 19 nt, Homo sapiens
  misc_RNA (1)...(19): siRNA sense strand
gcccaaggaugcugucaag

SEQ ID NO: 1386235 - RNA, 19 nt, Homo sapiens
  misc_RNA (1)...(19): siRNA sense strand
acacaggcuucaucaaggu

SEQ ID NO: 1386236 - RNA, 19 nt, Homo sapiens
  misc_RNA (1)...(19): siRNA sense strand
uuacacaggcuucaucaag

SEQ ID NO: 1386237 - RNA, 19 nt, Homo sapiens
  misc_RNA (1)...(19): siRNA sense strand
ucugugcccuccagcaaga

SEQ ID NO: 1386238 - RNA, 19 nt, Homo sapiens
  misc_RNA (1)...(19): siRNA sense strand
ggacggggcacaaguguca

SEQ ID NO: 1386239 - RNA, 19 nt, Homo sapiens
  misc_RNA (1)...(19): siRNA sense strand
ggagaucgccuacaaguuc

SEQ ID NO: 1386240 - RNA, 19 nt, Homo sapiens
  misc_RNA (1)...(19): siRNA sense strand
gggaggagaucgccuacaa

SEQ ID NO: 1386241 - RNA, 19 nt, Homo sapiens
  misc_RNA (1)...(19): siRNA sense strand
gaacaacucggacaaggau

SEQ ID NO: 1386242 - RNA, 19 nt, Homo sapiens
  misc_RNA (1)...(19): siRNA sense strand
gaagaaguccucggugaug

SEQ ID NO: 1386243 - RNA, 19 nt, Homo sapiens
  misc_RNA (1)...(19): siRNA sense strand
ggaguacgacuucaagaug

SEQ ID NO: 1386244 - RNA, 19 nt, Homo sapiens
  misc_RNA (1)...(19): siRNA sense strand
uaacgcggauggcgaggaa

SEQ ID NO: 1386245 - RNA, 19 nt, Homo sapiens
  misc_RNA (1)...(19): siRNA sense strand
ggaggaggaagccgaguuu

SEQ ID NO: 1386246 - RNA, 19 nt, Homo sapiens
  misc_RNA (1)...(19): siRNA sense strand
ccucgacgcugguguggaa

SEQ ID NO: 1386247 - RNA, 19 nt, Homo sapiens
  misc_RNA (1)...(19): siRNA sense strand
gcaaguuugugcagcucaa

SEQ ID NO: 1386248 - RNA, 19 nt, Homo sapiens
  misc_RNA (1)...(19): siRNA sense strand
gaagagggagggcgagcuu

SEQ ID NO: 1386249 - RNA, 19 nt, Homo sapiens
  misc_RNA (1)...(19): siRNA sense strand
gagaucgccuacaaguuca

SEQ ID NO: 1386250 - RNA, 19 nt, Homo sapiens
  misc_RNA (1)...(19): siRNA sense strand
aaaagcagcuggagaagga

SEQ ID NO: 1386251 - RNA, 19 nt, Homo sapiens
  misc_RNA (1)...(19): siRNA sense strand
gaggagaucgccuacaagu

SEQ ID NO: 1386252 - RNA, 19 nt, Homo sapiens
  misc_RNA (1)...(19): siRNA sense strand
caacaagagcgccaagaag

SEQ ID NO: 1386253 - RNA, 19 nt, Homo sapiens
  misc_RNA (1)...(19): siRNA sense strand
gaagcuggcccuggacaug

SEQ ID NO: 1386254 - RNA, 19 nt, Homo sapiens
  misc_RNA (1)...(19): siRNA sense strand
ucaacaagagcgccaagaa

SEQ ID NO: 1386255 - RNA, 19 nt, Homo sapiens
  misc_RNA (1)...(19): siRNA sense strand
gcgaggaaguggccaugag

SEQ ID NO: 1386256 - RNA, 19 nt, Homo sapiens
  misc_RNA (1)...(19): siRNA sense strand
ggaggaagaggaggaggaa

SEQ ID NO: 1386257 - RNA, 19 nt, Homo sapiens
  misc_RNA (1)...(19): siRNA sense strand
gaagcugagggcagaguug

SEQ ID NO: 1386258 - RNA, 19 nt, Homo sapiens
  misc_RNA (1)...(19): siRNA sense strand
ccaugaggacugugaagaa

SEQ ID NO: 1386259 - RNA, 19 nt, Homo sapiens
  misc_RNA (1)...(19): siRNA sense strand
cgaccuggagggcaaguuu

SEQ ID NO: 1386260 - RNA, 19 nt, Homo sapiens
  misc_RNA (1)...(19): siRNA sense strand
ggagaugcgggacgugaug

SEQ ID NO: 1386261 - RNA, 19 nt, Homo sapiens
  misc_RNA (1)...(19): siRNA sense strand
gaccggcuccugcucaaga

SEQ ID NO: 1386262 - RNA, 19 nt, Homo sapiens
  misc_RNA (1)...(19): siRNA sense strand
aacaagagcgccaagaaga

SEQ ID NO: 1386263 - RNA, 19 nt, Homo sapiens
  misc_RNA (1)...(19): siRNA sense strand
ggacaaguuccggaagaug

SEQ ID NO: 1386264 - RNA, 19 nt, Homo sapiens
  misc_RNA (1)...(19): siRNA sense strand
cgggacaaguuccggaaga

SEQ ID NO: 1386265 - RNA, 19 nt, Homo sapiens
  misc_RNA (1)...(19): siRNA sense strand
caugaggacugugaagaag

SEQ ID NO: 1386266 - RNA, 19 nt, Homo sapiens
  misc_RNA (1)...(19): siRNA sense strand
ugucgcggcugcaggagaa

SEQ ID NO: 1386267 - RNA, 19 nt, Homo sapiens
  misc_RNA (1)...(19): siRNA sense strand
cgaggugaguggcaucaag

SEQ ID NO: 1386268 - RNA, 19 nt, Homo sapiens
  misc_RNA (1)...(19): siRNA sense strand
gggacaaguuccggaagau

SEQ ID NO: 1386269 - RNA, 19 nt, Homo sapiens
  misc_RNA (1)...(19): siRNA sense strand
gcaggaguacgacuucaag

SEQ ID NO: 1386270 - RNA, 19 nt, Homo sapiens
  misc_RNA (1)...(19): siRNA sense strand
gcaucaaggcgcuguacga

SEQ ID NO: 1386271 - RNA, 19 nt, Homo sapiens
  misc_RNA (1)...(19): siRNA sense strand
gcagcaggaguacgacuuc

SEQ ID NO: 1386272 - RNA, 19 nt, Homo sapiens
  misc_RNA (1)...(19): siRNA sense strand
acaaguucacgcccaagua

SEQ ID NO: 1386273 - RNA, 19 nt, Homo sapiens
  misc_RNA (1)...(19): siRNA sense strand
gcaagugcggcucuacaag

SEQ ID NO: 1386274 - RNA, 19 nt, Homo sapiens
  misc_RNA (1)...(19): siRNA sense strand
ucaagaacaacucggacaa

SEQ ID NO: 1386275 - RNA, 19 nt, Homo sapiens
  misc_RNA (1)...(19): siRNA sense strand
ccaaggagcaggagaugac

SEQ ID NO: 1386276 - RNA, 19 nt, Homo sapiens
  misc_RNA (1)...(19): siRNA sense strand
ggccagugccgcugaagau

SEQ ID NO: 1386277 - RNA, 19 nt, Homo sapiens
  misc_RNA (1)...(19): siRNA sense strand
caaguucacgcccaaguac

SEQ ID NO: 1386278 - RNA, 19 nt, Homo sapiens
  misc_RNA (1)...(19): siRNA sense strand
uggacgaggucaacaagag

SEQ ID NO: 1386279 - RNA, 19 nt, Homo sapiens
  misc_RNA (1)...(19): siRNA sense strand
ggaagcugagggcagaguu

SEQ ID NO: 1386280 - RNA, 19 nt, Homo sapiens
  misc_RNA (1)...(19): siRNA sense strand
cgcuggagcuggagaacga

SEQ ID NO: 1386281 - RNA, 19 nt, Homo sapiens
  misc_RNA (1)...(19): siRNA sense strand
ggagaaggagacgcugaug

SEQ ID NO: 1386282 - RNA, 19 nt, Homo sapiens
  misc_RNA (1)...(19): siRNA sense strand
ugaagaaguccucggugau

SEQ ID NO: 1386283 - RNA, 19 nt, Homo sapiens
  misc_RNA (1)...(19): siRNA sense strand
ggaacuggagaaucaagag

SEQ ID NO: 1386284 - RNA, 19 nt, Homo sapiens
  misc_RNA (1)...(19): siRNA sense strand
gcaggaggagcuggacuuc

SEQ ID NO: 1386285 - RNA, 19 nt, Homo sapiens
  misc_RNA (1)...(19): siRNA sense strand
agauagagauugggaagcu

SEQ ID NO: 1386286 - RNA, 19 nt, Homo sapiens
  misc_RNA (1)...(19): siRNA sense strand
agcaggagaugacggagau

SEQ ID NO: 1386287 - RNA, 19 nt, Homo sapiens
  misc_RNA (1)...(19): siRNA sense strand
gggaacuggagaaucaaga

SEQ ID NO: 1386288 - RNA, 19 nt, Homo sapiens
  misc_RNA (1)...(19): siRNA sense strand
caagaacaacucggacaag

SEQ ID NO: 1386289 - RNA, 19 nt, Homo sapiens
  misc_RNA (1)...(19): siRNA sense strand
ggaaugaaccugcugaaua

SEQ ID NO: 1386290 - RNA, 19 nt, Homo sapiens
  misc_RNA (1)...(19): siRNA sense strand
gaaugaaccugcugaauac

SEQ ID NO: 1386291 - RNA, 19 nt, Homo sapiens
  misc_RNA (1)...(19): siRNA sense strand
ucacugcucuuccuucuuu

SEQ ID NO: 1386292 - RNA, 19 nt, Homo sapiens
  misc_RNA (1)...(19): siRNA sense strand
caaauccucuuuccucuau

SEQ ID NO: 1386293 - RNA, 19 nt, Homo sapiens
  misc_RNA (1)...(19): siRNA sense strand
aggaauagcugcacgaauu

SEQ ID NO: 1386294 - RNA, 19 nt, Homo sapiens
  misc_RNA (1)...(19): siRNA sense strand
uaacgaaggcaaaggaaua

SEQ ID NO: 1386295 - RNA, 19 nt, Homo sapiens
  misc_RNA (1)...(19): siRNA sense strand
ccucagaucugcauauuuc

SEQ ID NO: 1386296 - RNA, 19 nt, Homo sapiens
  misc_RNA (1)...(19): siRNA sense strand
caacccgacuccuguaauu

SEQ ID NO: 1386297 - RNA, 19 nt, Homo sapiens
  misc_RNA (1)...(19): siRNA sense strand
ggaaauccauaucccaaag

SEQ ID NO: 1386298 - RNA, 19 nt, Homo sapiens
  misc_RNA (1)...(19): siRNA sense strand
cacauaaaccuguuccuua

SEQ ID NO: 1386299 - RNA, 19 nt, Homo sapiens
  misc_RNA (1)...(19): siRNA sense strand
ugaagaauguacuaacgaa

SEQ ID NO: 1386300 - RNA, 19 nt, Homo sapiens
  misc_RNA (1)...(19): siRNA sense strand
ucagaauccuucacaauca

SEQ ID NO: 1386301 - RNA, 19 nt, Homo sapiens
  misc_RNA (1)...(19): siRNA sense strand
uaacaaugcaggucuggua

SEQ ID NO: 1386302 - RNA, 19 nt, Homo sapiens
  misc_RNA (1)...(19): siRNA sense strand
caaaccaccuccuucaaca

SEQ ID NO: 1386303 - RNA, 19 nt, Homo sapiens
  misc_RNA (1)...(19): siRNA sense strand
gcauucaguuccaauuuca

SEQ ID NO: 1386304 - RNA, 19 nt, Homo sapiens
  misc_RNA (1)...(19): siRNA sense strand
gaaugaagaccuuucgaau

SEQ ID NO: 1386305 - RNA, 19 nt, Homo sapiens
  misc_RNA (1)...(19): siRNA sense strand
ccaccuccuucaacauaua

SEQ ID NO: 1386306 - RNA, 19 nt, Homo sapiens
  misc_RNA (1)...(19): siRNA sense strand
cagcuugaguacuccuuua

SEQ ID NO: 1386307 - RNA, 19 nt, Homo sapiens
  misc_RNA (1)...(19): siRNA sense strand
aaucaacuccucugcuuua

SEQ ID NO: 1386308 - RNA, 19 nt, Homo sapiens
  misc_RNA (1)...(19): siRNA sense strand
gaccaacaauuuuccuuua

SEQ ID NO: 1386309 - RNA, 19 nt, Homo sapiens
  misc_RNA (1)...(19): siRNA sense strand
auaccaaacccaacaguua

SEQ ID NO: 1386310 - RNA, 19 nt, Homo sapiens
  misc_RNA (1)...(19): siRNA sense strand
cugauggguuuccuaguua

SEQ ID NO: 1386311 - RNA, 19 nt, Homo sapiens
  misc_RNA (1)...(19): siRNA sense strand
ggaccucugucaucuucaa

SEQ ID NO: 1386312 - RNA, 19 nt, Homo sapiens
  misc_RNA (1)...(19): siRNA sense strand
ccugauggguuuccuaguu

SEQ ID NO: 1386313 - RNA, 19 nt, Homo sapiens
  misc_RNA (1)...(19): siRNA sense strand
aggaagaccuagccgcaua

SEQ ID NO: 1386314 - RNA, 19 nt, Homo sapiens
  misc_RNA (1)...(19): siRNA sense strand
ggugugaacaguccucuuu

SEQ ID NO: 1386315 - RNA, 19 nt, Homo sapiens
  misc_RNA (1)...(19): siRNA sense strand
ccaaugacaccaauuuaau

SEQ ID NO: 1386316 - RNA, 19 nt, Homo sapiens
  misc_RNA (1)...(19): siRNA sense strand
ucacacaccucagccauca

SEQ ID NO: 1386317 - RNA, 19 nt, Homo sapiens
  misc_RNA (1)...(19): siRNA sense strand
agaccuagccgcauaaaug

SEQ ID NO: 1386318 - RNA, 19 nt, Homo sapiens
  misc_RNA (1)...(19): siRNA sense strand
ucaggucucuccagcuuga

SEQ ID NO: 1386319 - RNA, 19 nt, Homo sapiens
  misc_RNA (1)...(19): siRNA sense strand
gacauugccuguacagucu

SEQ ID NO: 1386320 - RNA, 19 nt, Homo sapiens
  misc_RNA (1)...(19): siRNA sense strand
caacccaaauucugcuuca

SEQ ID NO: 1386321 - RNA, 19 nt, Homo sapiens
  misc_RNA (1)...(19): siRNA sense strand
ggaacaaucccaggaaauc

SEQ ID NO: 1386322 - RNA, 19 nt, Homo sapiens
  misc_RNA (1)...(19): siRNA sense strand
uugcaagaauuacagcaua

SEQ ID NO: 1386323 - RNA, 19 nt, Homo sapiens
  misc_RNA (1)...(19): siRNA sense strand
uuaaucaacuccucugcuu

SEQ ID NO: 1386324 - RNA, 19 nt, Homo sapiens
  misc_RNA (1)...(19): siRNA sense strand
gauaucuucuuguggaaca

SEQ ID NO: 1386325 - RNA, 19 nt, Homo sapiens
  misc_RNA (1)...(19): siRNA sense strand
gaacaguccucuuuugucu

SEQ ID NO: 1386326 - RNA, 19 nt, Homo sapiens
  misc_RNA (1)...(19): siRNA sense strand
aaucauccuugcaagaauu

SEQ ID NO: 1386327 - RNA, 19 nt, Homo sapiens
  misc_RNA (1)...(19): siRNA sense strand
caacuccucugcuuuaucc

SEQ ID NO: 1386328 - RNA, 19 nt, Homo sapiens
  misc_RNA (1)...(19): siRNA sense strand
gcuguucucucagggcuuu

SEQ ID NO: 1386329 - RNA, 19 nt, Homo sapiens
  misc_RNA (1)...(19): siRNA sense strand
cccaaauucugcuucauug

SEQ ID NO: 1386330 - RNA, 19 nt, Homo sapiens
  misc_RNA (1)...(19): siRNA sense strand
gcacaagccgguuuaucau

SEQ ID NO: 1386331 - RNA, 19 nt, Homo sapiens
  misc_RNA (1)...(19): siRNA sense strand
ggaagaccuagccgcauaa

SEQ ID NO: 1386332 - RNA, 19 nt, Homo sapiens
  misc_RNA (1)...(19): siRNA sense strand
ucauggcacuuuagguuug

SEQ ID NO: 1386333 - RNA, 19 nt, Homo sapiens
  misc_RNA (1)...(19): siRNA sense strand
ggcaauuaaucauccauca

SEQ ID NO: 1386334 - RNA, 19 nt, Homo sapiens
  misc_RNA (1)...(19): siRNA sense strand
ucaaggaccucugucaucu

SEQ ID NO: 1386335 - RNA, 19 nt, Homo sapiens
  misc_RNA (1)...(19): siRNA sense strand
ccaagugcuuauaacaaug

SEQ ID NO: 1386336 - RNA, 19 nt, Homo sapiens
  misc_RNA (1)...(19): siRNA sense strand
ugcaagaauuacagcauaa

SEQ ID NO: 1386337 - RNA, 19 nt, Homo sapiens
  misc_RNA (1)...(19): siRNA sense strand
guggaacaaucccaggaaa

SEQ ID NO: 1386338 - RNA, 19 nt, Homo sapiens
  misc_RNA (1)...(19): siRNA sense strand
cauccaaugacaccaauuu

SEQ ID NO: 1386339 - RNA, 19 nt, Homo sapiens
  misc_RNA (1)...(19): siRNA sense strand
acaccacgguccacucuug

SEQ ID NO: 1386340 - RNA, 19 nt, Homo sapiens
  misc_RNA (1)...(19): siRNA sense strand
ccucaugguucuaauccuu

SEQ ID NO: 1386341 - RNA, 19 nt, Homo sapiens
  misc_RNA (1)...(19): siRNA sense strand
aauccucuuuccucuauuu

SEQ ID NO: 1386342 - RNA, 19 nt, Homo sapiens
  misc_RNA (1)...(19): siRNA sense strand
caacauccgugcccaucag

SEQ ID NO: 1386343 - RNA, 19 nt, Homo sapiens
  misc_RNA (1)...(19): siRNA sense strand
ucaaagguccaucucauuc

SEQ ID NO: 1386344 - RNA, 19 nt, Homo sapiens
  misc_RNA (1)...(19): siRNA sense strand
cccagcaagucaacucuuu

SEQ ID NO: 1386345 - RNA, 19 nt, Homo sapiens
  misc_RNA (1)...(19): siRNA sense strand
gacauugggccgugcauau

SEQ ID NO: 1386346 - RNA, 19 nt, Homo sapiens
  misc_RNA (1)...(19): siRNA sense strand
ccaccuccaccuccauaua

SEQ ID NO: 1386347 - RNA, 19 nt, Homo sapiens
  misc_RNA (1)...(19): siRNA sense strand
cagcauucaguuccaauuu

SEQ ID NO: 1386348 - RNA, 19 nt, Homo sapiens
  misc_RNA (1)...(19): siRNA sense strand
ggcaacccaucucuuaauc

SEQ ID NO: 1386349 - RNA, 19 nt, Homo sapiens
  misc_RNA (1)...(19): siRNA sense strand
ugucaggucucuccagcuu

SEQ ID NO: 1386350 - RNA, 19 nt, Homo sapiens
  misc_RNA (1)...(19): siRNA sense strand
gugcauauacuucaacauc

SEQ ID NO: 1386351 - RNA, 19 nt, Homo sapiens
  misc_RNA (1)...(19): siRNA sense strand
ggacauugggccgugcaua

SEQ ID NO: 1386352 - RNA, 19 nt, Homo sapiens
  misc_RNA (1)...(19): siRNA sense strand
ccucagccaucaauaccaa

SEQ ID NO: 1386353 - RNA, 19 nt, Homo sapiens
  misc_RNA (1)...(19): siRNA sense strand
ccaccuccauauacuccua

SEQ ID NO: 1386354 - RNA, 19 nt, Homo sapiens
  misc_RNA (1)...(19): siRNA sense strand
uuacauccauccacaguac

SEQ ID NO: 1386355 - RNA, 19 nt, Homo sapiens
  misc_RNA (1)...(19): siRNA sense strand
cuucggcucuggaaagcua

SEQ ID NO: 1386356 - RNA, 19 nt, Homo sapiens
  misc_RNA (1)...(19): siRNA sense strand
ugacaccaauuuaaucaac

SEQ ID NO: 1386357 - RNA, 19 nt, Homo sapiens
  misc_RNA (1)...(19): siRNA sense strand
aaauucugcuucauuguca

SEQ ID NO: 1386358 - RNA, 19 nt, Homo sapiens
  misc_RNA (1)...(19): siRNA sense strand
ccacugcaccuguuacauc

SEQ ID NO: 1386359 - RNA, 19 nt, Homo sapiens
  misc_RNA (1)...(19): siRNA sense strand
uuacuucuuugaccaacaa

SEQ ID NO: 1386360 - RNA, 19 nt, Homo sapiens
  misc_RNA (1)...(19): siRNA sense strand
ugaaccugcugaauacugu

SEQ ID NO: 1386361 - RNA, 19 nt, Homo sapiens
  misc_RNA (1)...(19): siRNA sense strand
caaucauccuugcaagaau

SEQ ID NO: 1386362 - RNA, 19 nt, Homo sapiens
  misc_RNA (1)...(19): siRNA sense strand
cuugaguacuccuuuaaau

SEQ ID NO: 1386363 - RNA, 19 nt, Homo sapiens
  misc_RNA (1)...(19): siRNA sense strand
ggugaagaauguacuaacg

SEQ ID NO: 1386364 - RNA, 19 nt, Homo sapiens
  misc_RNA (1)...(19): siRNA sense strand
caaauucugcuucauuguc

SEQ ID NO: 1386365 - RNA, 19 nt, Homo sapiens
  misc_RNA (1)...(19): siRNA sense strand
ccacauaaaccuguuccuu

SEQ ID NO: 1386366 - RNA, 19 nt, Homo sapiens
  misc_RNA (1)...(19): siRNA sense strand
accaagugcuuauaacaau

SEQ ID NO: 1386367 - RNA, 19 nt, Homo sapiens
  misc_RNA (1)...(19): siRNA sense strand
ugaguacuccuuuaaaugg

SEQ ID NO: 1386368 - RNA, 19 nt, Homo sapiens
  misc_RNA (1)...(19): siRNA sense strand
gaucugcauauuucaucua

SEQ ID NO: 1386369 - RNA, 19 nt, Homo sapiens
  misc_RNA (1)...(19): siRNA sense strand
caaugacaccaauuuaauc

SEQ ID NO: 1386370 - RNA, 19 nt, Homo sapiens
  misc_RNA (1)...(19): siRNA sense strand
caaaaccuauacagaauca

SEQ ID NO: 1386371 - RNA, 19 nt, Homo sapiens
  misc_RNA (1)...(19): siRNA sense strand
uaccucagaucugcauauu

SEQ ID NO: 1386372 - RNA, 19 nt, Homo sapiens
  misc_RNA (1)...(19): siRNA sense strand
ggauucgccucagcauuca

SEQ ID NO: 1386373 - RNA, 19 nt, Homo sapiens
  misc_RNA (1)...(19): siRNA sense strand
cauccgugcccaucaguuu

SEQ ID NO: 1386374 - RNA, 19 nt, Homo sapiens
  misc_RNA (1)...(19): siRNA sense strand
gaagaccuagccgcauaaa

SEQ ID NO: 1386375 - RNA, 19 nt, Homo sapiens
  misc_RNA (1)...(19): siRNA sense strand
acaaucauccuugcaagaa

SEQ ID NO: 1386376 - RNA, 19 nt, Homo sapiens
  misc_RNA (1)...(19): siRNA sense strand
aaggaccucugucaucuuc

SEQ ID NO: 1386377 - RNA, 19 nt, Homo sapiens
  misc_RNA (1)...(19): siRNA sense strand
ucucauggcacuuuagguu

SEQ ID NO: 1386378 - RNA, 19 nt, Homo sapiens
  misc_RNA (1)...(19): siRNA sense strand
uccaaugacaccaauuuaa

SEQ ID NO: 1386379 - RNA, 19 nt, Homo sapiens
  misc_RNA (1)...(19): siRNA sense strand
gacauccaaugacaccaau

SEQ ID NO: 1386380 - RNA, 19 nt, Homo sapiens
  misc_RNA (1)...(19): siRNA sense strand
aaccaccuccuucaacaua

SEQ ID NO: 1386381 - RNA, 19 nt, Homo sapiens
  misc_RNA (1)...(19): siRNA sense strand
cagaauccuucacaaucau

SEQ ID NO: 1386382 - RNA, 19 nt, Homo sapiens
  misc_RNA (1)...(19): siRNA sense strand
uuuaucaucuggacuucaa

SEQ ID NO: 1386383 - RNA, 19 nt, Homo sapiens
  misc_RNA (1)...(19): siRNA sense strand
acaagccgguuuaucaucu

SEQ ID NO: 1386384 - RNA, 19 nt, Homo sapiens
  misc_RNA (1)...(19): siRNA sense strand
acuggcaacccaucucuua

SEQ ID NO: 1386385 - RNA, 19 nt, Homo sapiens
  misc_RNA (1)...(19): siRNA sense strand
cuucuuugaccaacaauuu

SEQ ID NO: 1386386 - RNA, 19 nt, Homo sapiens
  misc_RNA (1)...(19): siRNA sense strand
cuucaaagguccaucucau

SEQ ID NO: 1386387 - RNA, 19 nt, Homo sapiens
  misc_RNA (1)...(19): siRNA sense strand
gcauuugcuucuacuucug

SEQ ID NO: 1386388 - RNA, 19 nt, Homo sapiens
  misc_RNA (1)...(19): siRNA sense strand
augcaggucugguaccauu

SEQ ID NO: 1386389 - RNA, 19 nt, Homo sapiens
  misc_RNA (1)...(19): siRNA sense strand
ggaaugaaccugcugaaua

SEQ ID NO: 1386390 - RNA, 19 nt, Homo sapiens
  misc_RNA (1)...(19): siRNA sense strand
gaaugaaccugcugaauac

SEQ ID NO: 1386391 - RNA, 19 nt, Homo sapiens
  misc_RNA (1)...(19): siRNA sense strand
ucacugcucuuccuucuuu

SEQ ID NO: 1386392 - RNA, 19 nt, Homo sapiens
  misc_RNA (1)...(19): siRNA sense strand
caaauccucuuuccucuau

SEQ ID NO: 1386393 - RNA, 19 nt, Homo sapiens
  misc_RNA (1)...(19): siRNA sense strand
aggaauagcugcacgaauu

SEQ ID NO: 1386394 - RNA, 19 nt, Homo sapiens
  misc_RNA (1)...(19): siRNA sense strand
uaacgaaggcaaaggaaua

SEQ ID NO: 1386395 - RNA, 19 nt, Homo sapiens
  misc_RNA (1)...(19): siRNA sense strand
ccucagaucugcauauuuc

SEQ ID NO: 1386396 - RNA, 19 nt, Homo sapiens
  misc_RNA (1)...(19): siRNA sense strand
caacccgacuccuguaauu

SEQ ID NO: 1386397 - RNA, 19 nt, Homo sapiens
  misc_RNA (1)...(19): siRNA sense strand
ggaaauccauaucccaaag

SEQ ID NO: 1386398 - RNA, 19 nt, Homo sapiens
  misc_RNA (1)...(19): siRNA sense strand
cacauaaaccuguuccuua

SEQ ID NO: 1386399 - RNA, 19 nt, Homo sapiens
  misc_RNA (1)...(19): siRNA sense strand
ugaagaauguacuaacgaa

SEQ ID NO: 1386400 - RNA, 19 nt, Homo sapiens
  misc_RNA (1)...(19): siRNA sense strand
ucagaauccuucacaauca

SEQ ID NO: 1386401 - RNA, 19 nt, Homo sapiens
  misc_RNA (1)...(19): siRNA sense strand
uaacaaugcaggucuggua

SEQ ID NO: 1386402 - RNA, 19 nt, Homo sapiens
  misc_RNA (1)...(19): siRNA sense strand
caaaccaccuccuucaaca

SEQ ID NO: 1386403 - RNA, 19 nt, Homo sapiens
  misc_RNA (1)...(19): siRNA sense strand
gcauucaguuccaauuuca

SEQ ID NO: 1386404 - RNA, 19 nt, Homo sapiens
  misc_RNA (1)...(19): siRNA sense strand
gaaugaagaccuuucgaau

SEQ ID NO: 1386405 - RNA, 19 nt, Homo sapiens
  misc_RNA (1)...(19): siRNA sense strand
ccaccuccuucaacauaua

SEQ ID NO: 1386406 - RNA, 19 nt, Homo sapiens
  misc_RNA (1)...(19): siRNA sense strand
cagcuugaguacuccuuua

SEQ ID NO: 1386407 - RNA, 19 nt, Homo sapiens
  misc_RNA (1)...(19): siRNA sense strand
aaucaacuccucugcuuua

SEQ ID NO: 1386408 - RNA, 19 nt, Homo sapiens
  misc_RNA (1)...(19): siRNA sense strand
gaccaacaauuuuccuuua

SEQ ID NO: 1386409 - RNA, 19 nt, Homo sapiens
  misc_RNA (1)...(19): siRNA sense strand
auaccaaacccaacaguua

SEQ ID NO: 1386410 - RNA, 19 nt, Homo sapiens
  misc_RNA (1)...(19): siRNA sense strand
cugauggguuuccuaguua

SEQ ID NO: 1386411 - RNA, 19 nt, Homo sapiens
  misc_RNA (1)...(19): siRNA sense strand
ggaccucugucaucuucaa

SEQ ID NO: 1386412 - RNA, 19 nt, Homo sapiens
  misc_RNA (1)...(19): siRNA sense strand
ccugauggguuuccuaguu

SEQ ID NO: 1386413 - RNA, 19 nt, Homo sapiens
  misc_RNA (1)...(19): siRNA sense strand
aggaagaccuagccgcaua

SEQ ID NO: 1386414 - RNA, 19 nt, Homo sapiens
  misc_RNA (1)...(19): siRNA sense strand
ggugugaacaguccucuuu

SEQ ID NO: 1386415 - RNA, 19 nt, Homo sapiens
  misc_RNA (1)...(19): siRNA sense strand
ccaaugacaccaauuuaau

SEQ ID NO: 1386416 - RNA, 19 nt, Homo sapiens
  misc_RNA (1)...(19): siRNA sense strand
ucacacaccucagccauca

SEQ ID NO: 1386417 - RNA, 19 nt, Homo sapiens
  misc_RNA (1)...(19): siRNA sense strand
agaccuagccgcauaaaug

SEQ ID NO: 1386418 - RNA, 19 nt, Homo sapiens
  misc_RNA (1)...(19): siRNA sense strand
ucaggucucuccagcuuga

SEQ ID NO: 1386419 - RNA, 19 nt, Homo sapiens
  misc_RNA (1)...(19): siRNA sense strand
gacauugccuguacagucu

SEQ ID NO: 1386420 - RNA, 19 nt, Homo sapiens
  misc_RNA (1)...(19): siRNA sense strand
caacccaaauucugcuuca

SEQ ID NO: 1386421 - RNA, 19 nt, Homo sapiens
  misc_RNA (1)...(19): siRNA sense strand
ggaacaaucccaggaaauc

SEQ ID NO: 1386422 - RNA, 19 nt, Homo sapiens
  misc_RNA (1)...(19): siRNA sense strand
uugcaagaauuacagcaua

SEQ ID NO: 1386423 - RNA, 19 nt, Homo sapiens
  misc_RNA (1)...(19): siRNA sense strand
uuaaucaacuccucugcuu

SEQ ID NO: 1386424 - RNA, 19 nt, Homo sapiens
  misc_RNA (1)...(19): siRNA sense strand
gauaucuucuuguggaaca

SEQ ID NO: 1386425 - RNA, 19 nt, Homo sapiens
  misc_RNA (1)...(19): siRNA sense strand
gaacaguccucuuuugucu

SEQ ID NO: 1386426 - RNA, 19 nt, Homo sapiens
  misc_RNA (1)...(19): siRNA sense strand
aaucauccuugcaagaauu

SEQ ID NO: 1386427 - RNA, 19 nt, Homo sapiens
  misc_RNA (1)...(19): siRNA sense strand
caacuccucugcuuuaucc

SEQ ID NO: 1386428 - RNA, 19 nt, Homo sapiens
  misc_RNA (1)...(19): siRNA sense strand
gcuguucucucagggcuuu

SEQ ID NO: 1386429 - RNA, 19 nt, Homo sapiens
  misc_RNA (1)...(19): siRNA sense strand
cccaaauucugcuucauug

SEQ ID NO: 1386430 - RNA, 19 nt, Homo sapiens
  misc_RNA (1)...(19): siRNA sense strand
gcacaagccgguuuaucau

SEQ ID NO: 1386431 - RNA, 19 nt, Homo sapiens
  misc_RNA (1)...(19): siRNA sense strand
ggaagaccuagccgcauaa

SEQ ID NO: 1386432 - RNA, 19 nt, Homo sapiens
  misc_RNA (1)...(19): siRNA sense strand
ucauggcacuuuagguuug

SEQ ID NO: 1386433 - RNA, 19 nt, Homo sapiens
  misc_RNA (1)...(19): siRNA sense strand
ggcaauuaaucauccauca

SEQ ID NO: 1386434 - RNA, 19 nt, Homo sapiens
  misc_RNA (1)...(19): siRNA sense strand
ucaaggaccucugucaucu

SEQ ID NO: 1386435 - RNA, 19 nt, Homo sapiens
  misc_RNA (1)...(19): siRNA sense strand
ccaagugcuuauaacaaug

SEQ ID NO: 1386436 - RNA, 19 nt, Homo sapiens
  misc_RNA (1)...(19): siRNA sense strand
ugcaagaauuacagcauaa

SEQ ID NO: 1386437 - RNA, 19 nt, Homo sapiens
  misc_RNA (1)...(19): siRNA sense strand
guggaacaaucccaggaaa

SEQ ID NO: 1386438 - RNA, 19 nt, Homo sapiens
  misc_RNA (1)...(19): siRNA sense strand
cauccaaugacaccaauuu

SEQ ID NO: 1386439 - RNA, 19 nt, Homo sapiens
  misc_RNA (1)...(19): siRNA sense strand
acaccacgguccacucuug

SEQ ID NO: 1386440 - RNA, 19 nt, Homo sapiens
  misc_RNA (1)...(19): siRNA sense strand
ccucaugguucuaauccuu

SEQ ID NO: 1386441 - RNA, 19 nt, Homo sapiens
  misc_RNA (1)...(19): siRNA sense strand
aauccucuuuccucuauuu

SEQ ID NO: 1386442 - RNA, 19 nt, Homo sapiens
  misc_RNA (1)...(19): siRNA sense strand
caacauccgugcccaucag

SEQ ID NO: 1386443 - RNA, 19 nt, Homo sapiens
  misc_RNA (1)...(19): siRNA sense strand
ucaaagguccaucucauuc

SEQ ID NO: 1386444 - RNA, 19 nt, Homo sapiens
  misc_RNA (1)...(19): siRNA sense strand
cccagcaagucaacucuuu

SEQ ID NO: 1386445 - RNA, 19 nt, Homo sapiens
  misc_RNA (1)...(19): siRNA sense strand
gacauugggccgugcauau

SEQ ID NO: 1386446 - RNA, 19 nt, Homo sapiens
  misc_RNA (1)...(19): siRNA sense strand
ccaccuccaccuccauaua

SEQ ID NO: 1386447 - RNA, 19 nt, Homo sapiens
  misc_RNA (1)...(19): siRNA sense strand
cagcauucaguuccaauuu

SEQ ID NO: 1386448 - RNA, 19 nt, Homo sapiens
  misc_RNA (1)...(19): siRNA sense strand
ggcaacccaucucuuaauc

SEQ ID NO: 1386449 - RNA, 19 nt, Homo sapiens
  misc_RNA (1)...(19): siRNA sense strand
ugucaggucucuccagcuu

SEQ ID NO: 1386450 - RNA, 19 nt, Homo sapiens
  misc_RNA (1)...(19): siRNA sense strand
gugcauauacuucaacauc

SEQ ID NO: 1386451 - RNA, 19 nt, Homo sapiens
  misc_RNA (1)...(19): siRNA sense strand
ggacauugggccgugcaua

SEQ ID NO: 1386452 - RNA, 19 nt, Homo sapiens
  misc_RNA (1)...(19): siRNA sense strand
ccucagccaucaauaccaa

SEQ ID NO: 1386453 - RNA, 19 nt, Homo sapiens
  misc_RNA (1)...(19): siRNA sense strand
ccaccuccauauacuccua

SEQ ID NO: 1386454 - RNA, 19 nt, Homo sapiens
  misc_RNA (1)...(19): siRNA sense strand
uuacauccauccacaguac

SEQ ID NO: 1386455 - RNA, 19 nt, Homo sapiens
  misc_RNA (1)...(19): siRNA sense strand
cuucggcucuggaaagcua

SEQ ID NO: 1386456 - RNA, 19 nt, Homo sapiens
  misc_RNA (1)...(19): siRNA sense strand
ugacaccaauuuaaucaac

SEQ ID NO: 1386457 - RNA, 19 nt, Homo sapiens
  misc_RNA (1)...(19): siRNA sense strand
aaauucugcuucauuguca

SEQ ID NO: 1386458 - RNA, 19 nt, Homo sapiens
  misc_RNA (1)...(19): siRNA sense strand
ccacugcaccuguuacauc

SEQ ID NO: 1386459 - RNA, 19 nt, Homo sapiens
  misc_RNA (1)...(19): siRNA sense strand
uuacuucuuugaccaacaa

SEQ ID NO: 1386460 - RNA, 19 nt, Homo sapiens
  misc_RNA (1)...(19): siRNA sense strand
ugaaccugcugaauacugu

SEQ ID NO: 1386461 - RNA, 19 nt, Homo sapiens
  misc_RNA (1)...(19): siRNA sense strand
caaucauccuugcaagaau

SEQ ID NO: 1386462 - RNA, 19 nt, Homo sapiens
  misc_RNA (1)...(19): siRNA sense strand
cuugaguacuccuuuaaau

SEQ ID NO: 1386463 - RNA, 19 nt, Homo sapiens
  misc_RNA (1)...(19): siRNA sense strand
ggugaagaauguacuaacg

SEQ ID NO: 1386464 - RNA, 19 nt, Homo sapiens
  misc_RNA (1)...(19): siRNA sense strand
caaauucugcuucauuguc

SEQ ID NO: 1386465 - RNA, 19 nt, Homo sapiens
  misc_RNA (1)...(19): siRNA sense strand
ccacauaaaccuguuccuu

SEQ ID NO: 1386466 - RNA, 19 nt, Homo sapiens
  misc_RNA (1)...(19): siRNA sense strand
accaagugcuuauaacaau

SEQ ID NO: 1386467 - RNA, 19 nt, Homo sapiens
  misc_RNA (1)...(19): siRNA sense strand
ugaguacuccuuuaaaugg

SEQ ID NO: 1386468 - RNA, 19 nt, Homo sapiens
  misc_RNA (1)...(19): siRNA sense strand
gaucugcauauuucaucua

SEQ ID NO: 1386469 - RNA, 19 nt, Homo sapiens
  misc_RNA (1)...(19): siRNA sense strand
caaugacaccaauuuaauc

SEQ ID NO: 1386470 - RNA, 19 nt, Homo sapiens
  misc_RNA (1)...(19): siRNA sense strand
caaaaccuauacagaauca

SEQ ID NO: 1386471 - RNA, 19 nt, Homo sapiens
  misc_RNA (1)...(19): siRNA sense strand
uaccucagaucugcauauu

SEQ ID NO: 1386472 - RNA, 19 nt, Homo sapiens
  misc_RNA (1)...(19): siRNA sense strand
ggauucgccucagcauuca

SEQ ID NO: 1386473 - RNA, 19 nt, Homo sapiens
  misc_RNA (1)...(19): siRNA sense strand
cauccgugcccaucaguuu

SEQ ID NO: 1386474 - RNA, 19 nt, Homo sapiens
  misc_RNA (1)...(19): siRNA sense strand
gaagaccuagccgcauaaa

SEQ ID NO: 1386475 - RNA, 19 nt, Homo sapiens
  misc_RNA (1)...(19): siRNA sense strand
acaaucauccuugcaagaa

SEQ ID NO: 1386476 - RNA, 19 nt, Homo sapiens
  misc_RNA (1)...(19): siRNA sense strand
aaggaccucugucaucuuc

SEQ ID NO: 1386477 - RNA, 19 nt, Homo sapiens
  misc_RNA (1)...(19): siRNA sense strand
ucucauggcacuuuagguu

SEQ ID NO: 1386478 - RNA, 19 nt, Homo sapiens
  misc_RNA (1)...(19): siRNA sense strand
uccaaugacaccaauuuaa

SEQ ID NO: 1386479 - RNA, 19 nt, Homo sapiens
  misc_RNA (1)...(19): siRNA sense strand
gacauccaaugacaccaau

SEQ ID NO: 1386480 - RNA, 19 nt, Homo sapiens
  misc_RNA (1)...(19): siRNA sense strand
aaccaccuccuucaacaua

SEQ ID NO: 1386481 - RNA, 19 nt, Homo sapiens
  misc_RNA (1)...(19): siRNA sense strand
cagaauccuucacaaucau

SEQ ID NO: 1386482 - RNA, 19 nt, Homo sapiens
  misc_RNA (1)...(19): siRNA sense strand
uuuaucaucuggacuucaa

SEQ ID NO: 1386483 - RNA, 19 nt, Homo sapiens
  misc_RNA (1)...(19): siRNA sense strand
acaagccgguuuaucaucu

SEQ ID NO: 1386484 - RNA, 19 nt, Homo sapiens
  misc_RNA (1)...(19): siRNA sense strand
acuggcaacccaucucuua

SEQ ID NO: 1386485 - RNA, 19 nt, Homo sapiens
  misc_RNA (1)...(19): siRNA sense strand
cuucuuugaccaacaauuu

SEQ ID NO: 1386486 - RNA, 19 nt, Homo sapiens
  misc_RNA (1)...(19): siRNA sense strand
cuucaaagguccaucucau

SEQ ID NO: 1386487 - RNA, 19 nt, Homo sapiens
  misc_RNA (1)...(19): siRNA sense strand
gcauuugcuucuacuucug

SEQ ID NO: 1386488 - RNA, 19 nt, Homo sapiens
  misc_RNA (1)...(19): siRNA sense strand
augcaggucugguaccauu

SEQ ID NO: 1386489 - RNA, 19 nt, Homo sapiens
  misc_RNA (1)...(19): siRNA sense strand
ggaggaagaugaggacgau

SEQ ID NO: 1386490 - RNA, 19 nt, Homo sapiens
  misc_RNA (1)...(19): siRNA sense strand
ggauguggaugugggcuuu

SEQ ID NO: 1386491 - RNA, 19 nt, Homo sapiens
  misc_RNA (1)...(19): siRNA sense strand
ccacuuccaucgcacuuau

SEQ ID NO: 1386492 - RNA, 19 nt, Homo sapiens
  misc_RNA (1)...(19): siRNA sense strand
ccacagccaugaccacaca

SEQ ID NO: 1386493 - RNA, 19 nt, Homo sapiens
  misc_RNA (1)...(19): siRNA sense strand
cagcguggcucccaguaug

SEQ ID NO: 1386494 - RNA, 19 nt, Homo sapiens
  misc_RNA (1)...(19): siRNA sense strand
ggaaugggguggaaacaga

SEQ ID NO: 1386495 - RNA, 19 nt, Homo sapiens
  misc_RNA (1)...(19): siRNA sense strand
ggucgacuaucgccacuuc

SEQ ID NO: 1386496 - RNA, 19 nt, Homo sapiens
  misc_RNA (1)...(19): siRNA sense strand
gagaaugaacuugcucuga

SEQ ID NO: 1386497 - RNA, 19 nt, Homo sapiens
  misc_RNA (1)...(19): siRNA sense strand
ggccagggcugacuuugag

SEQ ID NO: 1386498 - RNA, 19 nt, Homo sapiens
  misc_RNA (1)...(19): siRNA sense strand
acaccggucugcagugcua

SEQ ID NO: 1386499 - RNA, 19 nt, Homo sapiens
  misc_RNA (1)...(19): siRNA sense strand
cgucgugggugcugucaug

SEQ ID NO: 1386500 - RNA, 19 nt, Homo sapiens
  misc_RNA (1)...(19): siRNA sense strand
gugcuaaggagcuggauga

SEQ ID NO: 1386501 - RNA, 19 nt, Homo sapiens
  misc_RNA (1)...(19): siRNA sense strand
ggaugugccugcucuucuc

SEQ ID NO: 1386502 - RNA, 19 nt, Homo sapiens
  misc_RNA (1)...(19): siRNA sense strand
gauggaggcaccgaucgua

SEQ ID NO: 1386503 - RNA, 19 nt, Homo sapiens
  misc_RNA (1)...(19): siRNA sense strand
ggaugugggcuuugaugga

SEQ ID NO: 1386504 - RNA, 19 nt, Homo sapiens
  misc_RNA (1)...(19): siRNA sense strand
ccaucaccaucguccauga

SEQ ID NO: 1386505 - RNA, 19 nt, Homo sapiens
  misc_RNA (1)...(19): siRNA sense strand
cuaccucccuggugaacug

SEQ ID NO: 1386506 - RNA, 19 nt, Homo sapiens
  misc_RNA (1)...(19): siRNA sense strand
aguaugaggucgacuaucg

SEQ ID NO: 1386507 - RNA, 19 nt, Homo sapiens
  misc_RNA (1)...(19): siRNA sense strand
aggcaccgaucguaucuuc

SEQ ID NO: 1386508 - RNA, 19 nt, Homo sapiens
  misc_RNA (1)...(19): siRNA sense strand
ggacgaugagacugaggaa

SEQ ID NO: 1386509 - RNA, 19 nt, Homo sapiens
  misc_RNA (1)...(19): siRNA sense strand
gaagaugaggacgaugaga

SEQ ID NO: 1386510 - RNA, 19 nt, Homo sapiens
  misc_RNA (1)...(19): siRNA sense strand
gcggucgcuucgucaagaa

SEQ ID NO: 1386511 - RNA, 19 nt, Homo sapiens
  misc_RNA (1)...(19): siRNA sense strand
ucucacacguggccagcuu

SEQ ID NO: 1386512 - RNA, 19 nt, Homo sapiens
  misc_RNA (1)...(19): siRNA sense strand
caccgccucugccucaugu

SEQ ID NO: 1386513 - RNA, 19 nt, Homo sapiens
  misc_RNA (1)...(19): siRNA sense strand
ccggcucucugacugcauu

SEQ ID NO: 1386514 - RNA, 19 nt, Homo sapiens
  misc_RNA (1)...(19): siRNA sense strand
agaaagacgggcacugcaa

SEQ ID NO: 1386515 - RNA, 19 nt, Homo sapiens
  misc_RNA (1)...(19): siRNA sense strand
ggaggcaccgaucguaucu

SEQ ID NO: 1386516 - RNA, 19 nt, Homo sapiens
  misc_RNA (1)...(19): siRNA sense strand
ucccacagccucaagucua

SEQ ID NO: 1386517 - RNA, 19 nt, Homo sapiens
  misc_RNA (1)...(19): siRNA sense strand
gugcugucauggccaagau

SEQ ID NO: 1386518 - RNA, 19 nt, Homo sapiens
  misc_RNA (1)...(19): siRNA sense strand
aggaagaugaggacgauga

SEQ ID NO: 1386519 - RNA, 19 nt, Homo sapiens
  misc_RNA (1)...(19): siRNA sense strand
ggaagggaaugggguggaa

SEQ ID NO: 1386520 - RNA, 19 nt, Homo sapiens
  misc_RNA (1)...(19): siRNA sense strand
ccaguaugaggucgacuau

SEQ ID NO: 1386521 - RNA, 19 nt, Homo sapiens
  misc_RNA (1)...(19): siRNA sense strand
ggaagaugaggacgaugag

SEQ ID NO: 1386522 - RNA, 19 nt, Homo sapiens
  misc_RNA (1)...(19): siRNA sense strand
cugccaguccucuguauga

SEQ ID NO: 1386523 - RNA, 19 nt, Homo sapiens
  misc_RNA (1)...(19): siRNA sense strand
gagcugcugccaggaggaa

SEQ ID NO: 1386524 - RNA, 19 nt, Homo sapiens
  misc_RNA (1)...(19): siRNA sense strand
cccacagccucaagucuag

SEQ ID NO: 1386525 - RNA, 19 nt, Homo sapiens
  misc_RNA (1)...(19): siRNA sense strand
ggaggaagaugaggacgau

SEQ ID NO: 1386526 - RNA, 19 nt, Homo sapiens
  misc_RNA (1)...(19): siRNA sense strand
ggauguggaugugggcuuu

SEQ ID NO: 1386527 - RNA, 19 nt, Homo sapiens
  misc_RNA (1)...(19): siRNA sense strand
ccacuuccaucgcacuuau

SEQ ID NO: 1386528 - RNA, 19 nt, Homo sapiens
  misc_RNA (1)...(19): siRNA sense strand
ccacagccaugaccacaca

SEQ ID NO: 1386529 - RNA, 19 nt, Homo sapiens
  misc_RNA (1)...(19): siRNA sense strand
cagcguggcucccaguaug

SEQ ID NO: 1386530 - RNA, 19 nt, Homo sapiens
  misc_RNA (1)...(19): siRNA sense strand
ggaaugggguggaaacaga

SEQ ID NO: 1386531 - RNA, 19 nt, Homo sapiens
  misc_RNA (1)...(19): siRNA sense strand
ggucgacuaucgccacuuc

SEQ ID NO: 1386532 - RNA, 19 nt, Homo sapiens
  misc_RNA (1)...(19): siRNA sense strand
gagaaugaacuugcucuga

SEQ ID NO: 1386533 - RNA, 19 nt, Homo sapiens
  misc_RNA (1)...(19): siRNA sense strand
ggccagggcugacuuugag

SEQ ID NO: 1386534 - RNA, 19 nt, Homo sapiens
  misc_RNA (1)...(19): siRNA sense strand
acaccggucugcagugcua

SEQ ID NO: 1386535 - RNA, 19 nt, Homo sapiens
  misc_RNA (1)...(19): siRNA sense strand
cgucgugggugcugucaug

SEQ ID NO: 1386536 - RNA, 19 nt, Homo sapiens
  misc_RNA (1)...(19): siRNA sense strand
gugcuaaggagcuggauga

SEQ ID NO: 1386537 - RNA, 19 nt, Homo sapiens
  misc_RNA (1)...(19): siRNA sense strand
ggaugugccugcucuucuc

SEQ ID NO: 1386538 - RNA, 19 nt, Homo sapiens
  misc_RNA (1)...(19): siRNA sense strand
gauggaggcaccgaucgua

SEQ ID NO: 1386539 - RNA, 19 nt, Homo sapiens
  misc_RNA (1)...(19): siRNA sense strand
ggaugugggcuuugaugga

SEQ ID NO: 1386540 - RNA, 19 nt, Homo sapiens
  misc_RNA (1)...(19): siRNA sense strand
ccaucaccaucguccauga

SEQ ID NO: 1386541 - RNA, 19 nt, Homo sapiens
  misc_RNA (1)...(19): siRNA sense strand
cuaccucccuggugaacug

SEQ ID NO: 1386542 - RNA, 19 nt, Homo sapiens
  misc_RNA (1)...(19): siRNA sense strand
aguaugaggucgacuaucg

SEQ ID NO: 1386543 - RNA, 19 nt, Homo sapiens
  misc_RNA (1)...(19): siRNA sense strand
aggcaccgaucguaucuuc

SEQ ID NO: 1386544 - RNA, 19 nt, Homo sapiens
  misc_RNA (1)...(19): siRNA sense strand
ggacgaugagacugaggaa

SEQ ID NO: 1386545 - RNA, 19 nt, Homo sapiens
  misc_RNA (1)...(19): siRNA sense strand
gaagaugaggacgaugaga

SEQ ID NO: 1386546 - RNA, 19 nt, Homo sapiens
  misc_RNA (1)...(19): siRNA sense strand
gcggucgcuucgucaagaa

SEQ ID NO: 1386547 - RNA, 19 nt, Homo sapiens
  misc_RNA (1)...(19): siRNA sense strand
ucucacacguggccagcuu

SEQ ID NO: 1386548 - RNA, 19 nt, Homo sapiens
  misc_RNA (1)...(19): siRNA sense strand
caccgccucugccucaugu

SEQ ID NO: 1386549 - RNA, 19 nt, Homo sapiens
  misc_RNA (1)...(19): siRNA sense strand
ccggcucucugacugcauu

SEQ ID NO: 1386550 - RNA, 19 nt, Homo sapiens
  misc_RNA (1)...(19): siRNA sense strand
agaaagacgggcacugcaa

SEQ ID NO: 1386551 - RNA, 19 nt, Homo sapiens
  misc_RNA (1)...(19): siRNA sense strand
ggaggcaccgaucguaucu

SEQ ID NO: 1386552 - RNA, 19 nt, Homo sapiens
  misc_RNA (1)...(19): siRNA sense strand
ucccacagccucaagucua

SEQ ID NO: 1386553 - RNA, 19 nt, Homo sapiens
  misc_RNA (1)...(19): siRNA sense strand
gugcugucauggccaagau

SEQ ID NO: 1386554 - RNA, 19 nt, Homo sapiens
  misc_RNA (1)...(19): siRNA sense strand
aggaagaugaggacgauga

SEQ ID NO: 1386555 - RNA, 19 nt, Homo sapiens
  misc_RNA (1)...(19): siRNA sense strand
ggaagggaaugggguggaa

SEQ ID NO: 1386556 - RNA, 19 nt, Homo sapiens
  misc_RNA (1)...(19): siRNA sense strand
ccaguaugaggucgacuau

SEQ ID NO: 1386557 - RNA, 19 nt, Homo sapiens
  misc_RNA (1)...(19): siRNA sense strand
ggaagaugaggacgaugag

SEQ ID NO: 1386558 - RNA, 19 nt, Homo sapiens
  misc_RNA (1)...(19): siRNA sense strand
cugccaguccucuguauga

SEQ ID NO: 1386559 - RNA, 19 nt, Homo sapiens
  misc_RNA (1)...(19): siRNA sense strand
gagcugcugccaggaggaa

SEQ ID NO: 1386560 - RNA, 19 nt, Homo sapiens
  misc_RNA (1)...(19): siRNA sense strand
cccacagccucaagucuag

SEQ ID NO: 1386561 - RNA, 19 nt, Homo sapiens
  misc_RNA (1)...(19): siRNA sense strand
gaaucaagcuuccauaugu

SEQ ID NO: 1386562 - RNA, 19 nt, Homo sapiens
  misc_RNA (1)...(19): siRNA sense strand
gcaaagauguuucucuguu

SEQ ID NO: 1386563 - RNA, 19 nt, Homo sapiens
  misc_RNA (1)...(19): siRNA sense strand
acacaugccuggagacuua

SEQ ID NO: 1386564 - RNA, 19 nt, Homo sapiens
  misc_RNA (1)...(19): siRNA sense strand
caacaaagcccgaggauau

SEQ ID NO: 1386565 - RNA, 19 nt, Homo sapiens
  misc_RNA (1)...(19): siRNA sense strand
ccaaagaaauucaggaaga

SEQ ID NO: 1386566 - RNA, 19 nt, Homo sapiens
  misc_RNA (1)...(19): siRNA sense strand
cuacauagauuucuucaug

SEQ ID NO: 1386567 - RNA, 19 nt, Homo sapiens
  misc_RNA (1)...(19): siRNA sense strand
ggaaauugaugauauugug

SEQ ID NO: 1386568 - RNA, 19 nt, Homo sapiens
  misc_RNA (1)...(19): siRNA sense strand
aaacucagcuauugccaua

SEQ ID NO: 1386569 - RNA, 19 nt, Homo sapiens
  misc_RNA (1)...(19): siRNA sense strand
gaagauaauucugguugaa

SEQ ID NO: 1386570 - RNA, 19 nt, Homo sapiens
  misc_RNA (1)...(19): siRNA sense strand
caaagauguuucucuguuu

SEQ ID NO: 1386571 - RNA, 19 nt, Homo sapiens
  misc_RNA (1)...(19): siRNA sense strand
guacaagaguggauuaauc

SEQ ID NO: 1386572 - RNA, 19 nt, Homo sapiens
  misc_RNA (1)...(19): siRNA sense strand
ggaagaguguucuaucuca

SEQ ID NO: 1386573 - RNA, 19 nt, Homo sapiens
  misc_RNA (1)...(19): siRNA sense strand
gaaagacaacgaccuuaaa

SEQ ID NO: 1386574 - RNA, 19 nt, Homo sapiens
  misc_RNA (1)...(19): siRNA sense strand
ggaaagacaacgaccuuaa

SEQ ID NO: 1386575 - RNA, 19 nt, Homo sapiens
  misc_RNA (1)...(19): siRNA sense strand
caaagaguuucuacuaaga

SEQ ID NO: 1386576 - RNA, 19 nt, Homo sapiens
  misc_RNA (1)...(19): siRNA sense strand
ccucagugguuucuaauaa

SEQ ID NO: 1386577 - RNA, 19 nt, Homo sapiens
  misc_RNA (1)...(19): siRNA sense strand
ccagugaauuucugaguuu

SEQ ID NO: 1386578 - RNA, 19 nt, Homo sapiens
  misc_RNA (1)...(19): siRNA sense strand
cagggaacauggaaugaua

SEQ ID NO: 1386579 - RNA, 19 nt, Homo sapiens
  misc_RNA (1)...(19): siRNA sense strand
uaagagcgacaaaguauaa

SEQ ID NO: 1386580 - RNA, 19 nt, Homo sapiens
  misc_RNA (1)...(19): siRNA sense strand
gagcaucuuuaacagaauu

SEQ ID NO: 1386581 - RNA, 19 nt, Homo sapiens
  misc_RNA (1)...(19): siRNA sense strand
ccuggagacuuauuuaauu

SEQ ID NO: 1386582 - RNA, 19 nt, Homo sapiens
  misc_RNA (1)...(19): siRNA sense strand
cgacaaaguauaacaaguu

SEQ ID NO: 1386583 - RNA, 19 nt, Homo sapiens
  misc_RNA (1)...(19): siRNA sense strand
ggagcaugguauucaagua

SEQ ID NO: 1386584 - RNA, 19 nt, Homo sapiens
  misc_RNA (1)...(19): siRNA sense strand
gaagaguguucuaucucaa

SEQ ID NO: 1386585 - RNA, 19 nt, Homo sapiens
  misc_RNA (1)...(19): siRNA sense strand
ucaaagaguuucuacuaag

SEQ ID NO: 1386586 - RNA, 19 nt, Homo sapiens
  misc_RNA (1)...(19): siRNA sense strand
gagaacugauaagaagaua

SEQ ID NO: 1386587 - RNA, 19 nt, Homo sapiens
  misc_RNA (1)...(19): siRNA sense strand
gcucuuuacucagggaaua

SEQ ID NO: 1386588 - RNA, 19 nt, Homo sapiens
  misc_RNA (1)...(19): siRNA sense strand
cgggauacauuacuuguug

SEQ ID NO: 1386589 - RNA, 19 nt, Homo sapiens
  misc_RNA (1)...(19): siRNA sense strand
ucgauguccucuuauauuu

SEQ ID NO: 1386590 - RNA, 19 nt, Homo sapiens
  misc_RNA (1)...(19): siRNA sense strand
agauuuaccuaaccaguuu

SEQ ID NO: 1386591 - RNA, 19 nt, Homo sapiens
  misc_RNA (1)...(19): siRNA sense strand
ggaaguaugugaggauugg

SEQ ID NO: 1386592 - RNA, 19 nt, Homo sapiens
  misc_RNA (1)...(19): siRNA sense strand
gauaucagaagugcaauaa

SEQ ID NO: 1386593 - RNA, 19 nt, Homo sapiens
  misc_RNA (1)...(19): siRNA sense strand
gcaccaacaauuaugauga

SEQ ID NO: 1386594 - RNA, 19 nt, Homo sapiens
  misc_RNA (1)...(19): siRNA sense strand
aaacaggguggaucuauuu

SEQ ID NO: 1386595 - RNA, 19 nt, Homo sapiens
  misc_RNA (1)...(19): siRNA sense strand
gaugaucugagaacugaua

SEQ ID NO: 1386596 - RNA, 19 nt, Homo sapiens
  misc_RNA (1)...(19): siRNA sense strand
ggguggaucuauuuuauua

SEQ ID NO: 1386597 - RNA, 19 nt, Homo sapiens
  misc_RNA (1)...(19): siRNA sense strand
uaucagaagugcaauaaac

SEQ ID NO: 1386598 - RNA, 19 nt, Homo sapiens
  misc_RNA (1)...(19): siRNA sense strand
ugugagagccagugaauuu

SEQ ID NO: 1386599 - RNA, 19 nt, Homo sapiens
  misc_RNA (1)...(19): siRNA sense strand
caaaggagcaugguauuca

SEQ ID NO: 1386600 - RNA, 19 nt, Homo sapiens
  misc_RNA (1)...(19): siRNA sense strand
ccggaaaccuggucucuuc

SEQ ID NO: 1386601 - RNA, 19 nt, Homo sapiens
  misc_RNA (1)...(19): siRNA sense strand
gaagcgacacuuuggaaga

SEQ ID NO: 1386602 - RNA, 19 nt, Homo sapiens
  misc_RNA (1)...(19): siRNA sense strand
cgagaggugugaugcauuc

SEQ ID NO: 1386603 - RNA, 19 nt, Homo sapiens
  misc_RNA (1)...(19): siRNA sense strand
cagaugcugugcugucaaa

SEQ ID NO: 1386604 - RNA, 19 nt, Homo sapiens
  misc_RNA (1)...(19): siRNA sense strand
caccaacaauuaugaugaa

SEQ ID NO: 1386605 - RNA, 19 nt, Homo sapiens
  misc_RNA (1)...(19): siRNA sense strand
gaacgggauacauuacuug

SEQ ID NO: 1386606 - RNA, 19 nt, Homo sapiens
  misc_RNA (1)...(19): siRNA sense strand
gaucugagaacugauaaga

SEQ ID NO: 1386607 - RNA, 19 nt, Homo sapiens
  misc_RNA (1)...(19): siRNA sense strand
uaacaagaauggaggaaaa

SEQ ID NO: 1386608 - RNA, 19 nt, Homo sapiens
  misc_RNA (1)...(19): siRNA sense strand
caaguacaagaguggauua

SEQ ID NO: 1386609 - RNA, 19 nt, Homo sapiens
  misc_RNA (1)...(19): siRNA sense strand
gaaaccuggucucuuccuu

SEQ ID NO: 1386610 - RNA, 19 nt, Homo sapiens
  misc_RNA (1)...(19): siRNA sense strand
guuauuguuucccaaagaa

SEQ ID NO: 1386611 - RNA, 19 nt, Homo sapiens
  misc_RNA (1)...(19): siRNA sense strand
uacaugaaguucuaaggaa

SEQ ID NO: 1386612 - RNA, 19 nt, Homo sapiens
  misc_RNA (1)...(19): siRNA sense strand
ucugagaacugauaagaag

SEQ ID NO: 1386613 - RNA, 19 nt, Homo sapiens
  misc_RNA (1)...(19): siRNA sense strand
ccuccaaacucagcuauug

SEQ ID NO: 1386614 - RNA, 19 nt, Homo sapiens
  misc_RNA (1)...(19): siRNA sense strand
aauacacgcucuuuacuca

SEQ ID NO: 1386615 - RNA, 19 nt, Homo sapiens
  misc_RNA (1)...(19): siRNA sense strand
caacuuacggccaaggaaa

SEQ ID NO: 1386616 - RNA, 19 nt, Homo sapiens
  misc_RNA (1)...(19): siRNA sense strand
caaagaaauucaggaagag

SEQ ID NO: 1386617 - RNA, 19 nt, Homo sapiens
  misc_RNA (1)...(19): siRNA sense strand
ggagguaguagaaauguca

SEQ ID NO: 1386618 - RNA, 19 nt, Homo sapiens
  misc_RNA (1)...(19): siRNA sense strand
gccagugaauuucugaguu

SEQ ID NO: 1386619 - RNA, 19 nt, Homo sapiens
  misc_RNA (1)...(19): siRNA sense strand
uacaaaugcuuggagauga

SEQ ID NO: 1386620 - RNA, 19 nt, Homo sapiens
  misc_RNA (1)...(19): siRNA sense strand
ugaacuugcugugcauaaa

SEQ ID NO: 1386621 - RNA, 19 nt, Homo sapiens
  misc_RNA (1)...(19): siRNA sense strand
ccucucauuuaucagaaua

SEQ ID NO: 1386622 - RNA, 19 nt, Homo sapiens
  misc_RNA (1)...(19): siRNA sense strand
caagagguccaagcuauug

SEQ ID NO: 1386623 - RNA, 19 nt, Homo sapiens
  misc_RNA (1)...(19): siRNA sense strand
ucgggauucucauacuuua

SEQ ID NO: 1386624 - RNA, 19 nt, Homo sapiens
  misc_RNA (1)...(19): siRNA sense strand
gguuauuguuucccaaaga

SEQ ID NO: 1386625 - RNA, 19 nt, Homo sapiens
  misc_RNA (1)...(19): siRNA sense strand
gccauaccuugcucuacua

SEQ ID NO: 1386626 - RNA, 19 nt, Homo sapiens
  misc_RNA (1)...(19): siRNA sense strand
caaggaggaggaucaaguu

SEQ ID NO: 1386627 - RNA, 19 nt, Homo sapiens
  misc_RNA (1)...(19): siRNA sense strand
ugugaugcauuccaacaaa

SEQ ID NO: 1386628 - RNA, 19 nt, Homo sapiens
  misc_RNA (1)...(19): siRNA sense strand
gaggugugaugcauuccaa

SEQ ID NO: 1386629 - RNA, 19 nt, Homo sapiens
  misc_RNA (1)...(19): siRNA sense strand
aaagauguuucucuguuuc

SEQ ID NO: 1386630 - RNA, 19 nt, Homo sapiens
  misc_RNA (1)...(19): siRNA sense strand
gggauguucuggugauauc

SEQ ID NO: 1386631 - RNA, 19 nt, Homo sapiens
  misc_RNA (1)...(19): siRNA sense strand
ugacaaaacuucucuagag

SEQ ID NO: 1386632 - RNA, 19 nt, Homo sapiens
  misc_RNA (1)...(19): siRNA sense strand
caggaagaguguucuaucu

SEQ ID NO: 1386633 - RNA, 19 nt, Homo sapiens
  misc_RNA (1)...(19): siRNA sense strand
ugaacgggauacauuacuu

SEQ ID NO: 1386634 - RNA, 19 nt, Homo sapiens
  misc_RNA (1)...(19): siRNA sense strand
ggugauaucagaagugcaa

SEQ ID NO: 1386635 - RNA, 19 nt, Homo sapiens
  misc_RNA (1)...(19): siRNA sense strand
aaaggagcaugguauucaa

SEQ ID NO: 1386636 - RNA, 19 nt, Homo sapiens
  misc_RNA (1)...(19): siRNA sense strand
aauaugaacgggauacauu

SEQ ID NO: 1386637 - RNA, 19 nt, Homo sapiens
  misc_RNA (1)...(19): siRNA sense strand
cuauagaagcuaacaagaa

SEQ ID NO: 1386638 - RNA, 19 nt, Homo sapiens
  misc_RNA (1)...(19): siRNA sense strand
cgauguccucuuauauuua

SEQ ID NO: 1386639 - RNA, 19 nt, Homo sapiens
  misc_RNA (1)...(19): siRNA sense strand
auuggucgauguccucuua

SEQ ID NO: 1386640 - RNA, 19 nt, Homo sapiens
  misc_RNA (1)...(19): siRNA sense strand
gaaguucuaaggaaguaug

SEQ ID NO: 1386641 - RNA, 19 nt, Homo sapiens
  misc_RNA (1)...(19): siRNA sense strand
agauaauucugguugaaga

SEQ ID NO: 1386642 - RNA, 19 nt, Homo sapiens
  misc_RNA (1)...(19): siRNA sense strand
ccuguggcaccaacaauua

SEQ ID NO: 1386643 - RNA, 19 nt, Homo sapiens
  misc_RNA (1)...(19): siRNA sense strand
gcgacacuuuggaagauug

SEQ ID NO: 1386644 - RNA, 19 nt, Homo sapiens
  misc_RNA (1)...(19): siRNA sense strand
ggaggaggaucaaguuuuc

SEQ ID NO: 1386645 - RNA, 19 nt, Homo sapiens
  misc_RNA (1)...(19): siRNA sense strand
gggauacauuacuuguuga

SEQ ID NO: 1386646 - RNA, 19 nt, Homo sapiens
  misc_RNA (1)...(19): siRNA sense strand
uaucaaaggagcaugguau

SEQ ID NO: 1386647 - RNA, 19 nt, Homo sapiens
  misc_RNA (1)...(19): siRNA sense strand
aaucaagcuuccauauguu

SEQ ID NO: 1386648 - RNA, 19 nt, Homo sapiens
  misc_RNA (1)...(19): siRNA sense strand
caccaaaacuacauagauu

SEQ ID NO: 1386649 - RNA, 19 nt, Homo sapiens
  misc_RNA (1)...(19): siRNA sense strand
caauaaacagccuccaguu

SEQ ID NO: 1386650 - RNA, 19 nt, Homo sapiens
  misc_RNA (1)...(19): siRNA sense strand
gagcgacaaaguauaacaa

SEQ ID NO: 1386651 - RNA, 19 nt, Homo sapiens
  misc_RNA (1)...(19): siRNA sense strand
ccaaggagacauggaagaa

SEQ ID NO: 1386652 - RNA, 19 nt, Homo sapiens
  misc_RNA (1)...(19): siRNA sense strand
gaauacacgcucuuuacuc

SEQ ID NO: 1386653 - RNA, 19 nt, Homo sapiens
  misc_RNA (1)...(19): siRNA sense strand
caguggagauaauaaucaa

SEQ ID NO: 1386654 - RNA, 19 nt, Homo sapiens
  misc_RNA (1)...(19): siRNA sense strand
gcgacaaaguauaacaagu

SEQ ID NO: 1386655 - RNA, 19 nt, Homo sapiens
  misc_RNA (1)...(19): siRNA sense strand
gcaugguauucaaguacaa

SEQ ID NO: 1386656 - RNA, 19 nt, Homo sapiens
  misc_RNA (1)...(19): siRNA sense strand
ugacagggaacauggaaug

SEQ ID NO: 1386657 - RNA, 19 nt, Homo sapiens
  misc_RNA (1)...(19): siRNA sense strand
ggaauacacgcucuuuacu

SEQ ID NO: 1386658 - RNA, 19 nt, Homo sapiens
  misc_RNA (1)...(19): siRNA sense strand
ucgguugcccucucauuua

SEQ ID NO: 1386659 - RNA, 19 nt, Homo sapiens
  misc_RNA (1)...(19): siRNA sense strand
gagagccagugaauuucug

SEQ ID NO: 1386660 - RNA, 19 nt, Homo sapiens
  misc_RNA (1)...(19): siRNA sense strand
aaaaguaucgggaaaauug

SEQ ID NO: 1386661 - RNA, 19 nt, Homo sapiens
  misc_RNA (1)...(19): siRNA sense strand
gaaucaagcuuccauaugu

SEQ ID NO: 1386662 - RNA, 19 nt, Homo sapiens
  misc_RNA (1)...(19): siRNA sense strand
gcaaagauguuucucuguu

SEQ ID NO: 1386663 - RNA, 19 nt, Homo sapiens
  misc_RNA (1)...(19): siRNA sense strand
acacaugccuggagacuua

SEQ ID NO: 1386664 - RNA, 19 nt, Homo sapiens
  misc_RNA (1)...(19): siRNA sense strand
caacaaagcccgaggauau

SEQ ID NO: 1386665 - RNA, 19 nt, Homo sapiens
  misc_RNA (1)...(19): siRNA sense strand
ccaaagaaauucaggaaga

SEQ ID NO: 1386666 - RNA, 19 nt, Homo sapiens
  misc_RNA (1)...(19): siRNA sense strand
cuacauagauuucuucaug

SEQ ID NO: 1386667 - RNA, 19 nt, Homo sapiens
  misc_RNA (1)...(19): siRNA sense strand
ggaaauugaugauauugug

SEQ ID NO: 1386668 - RNA, 19 nt, Homo sapiens
  misc_RNA (1)...(19): siRNA sense strand
aaacucagcuauugccaua

SEQ ID NO: 1386669 - RNA, 19 nt, Homo sapiens
  misc_RNA (1)...(19): siRNA sense strand
gaagauaauucugguugaa

SEQ ID NO: 1386670 - RNA, 19 nt, Homo sapiens
  misc_RNA (1)...(19): siRNA sense strand
caaagauguuucucuguuu

SEQ ID NO: 1386671 - RNA, 19 nt, Homo sapiens
  misc_RNA (1)...(19): siRNA sense strand
guacaagaguggauuaauc

SEQ ID NO: 1386672 - RNA, 19 nt, Homo sapiens
  misc_RNA (1)...(19): siRNA sense strand
ggaagaguguucuaucuca

SEQ ID NO: 1386673 - RNA, 19 nt, Homo sapiens
  misc_RNA (1)...(19): siRNA sense strand
gaaagacaacgaccuuaaa

SEQ ID NO: 1386674 - RNA, 19 nt, Homo sapiens
  misc_RNA (1)...(19): siRNA sense strand
ggaaagacaacgaccuuaa

SEQ ID NO: 1386675 - RNA, 19 nt, Homo sapiens
  misc_RNA (1)...(19): siRNA sense strand
caaagaguuucuacuaaga

SEQ ID NO: 1386676 - RNA, 19 nt, Homo sapiens
  misc_RNA (1)...(19): siRNA sense strand
ccucagugguuucuaauaa

SEQ ID NO: 1386677 - RNA, 19 nt, Homo sapiens
  misc_RNA (1)...(19): siRNA sense strand
ccagugaauuucugaguuu

SEQ ID NO: 1386678 - RNA, 19 nt, Homo sapiens
  misc_RNA (1)...(19): siRNA sense strand
cagggaacauggaaugaua

SEQ ID NO: 1386679 - RNA, 19 nt, Homo sapiens
  misc_RNA (1)...(19): siRNA sense strand
uaagagcgacaaaguauaa

SEQ ID NO: 1386680 - RNA, 19 nt, Homo sapiens
  misc_RNA (1)...(19): siRNA sense strand
gagcaucuuuaacagaauu

SEQ ID NO: 1386681 - RNA, 19 nt, Homo sapiens
  misc_RNA (1)...(19): siRNA sense strand
ccuggagacuuauuuaauu

SEQ ID NO: 1386682 - RNA, 19 nt, Homo sapiens
  misc_RNA (1)...(19): siRNA sense strand
cgacaaaguauaacaaguu

SEQ ID NO: 1386683 - RNA, 19 nt, Homo sapiens
  misc_RNA (1)...(19): siRNA sense strand
ggagcaugguauucaagua

SEQ ID NO: 1386684 - RNA, 19 nt, Homo sapiens
  misc_RNA (1)...(19): siRNA sense strand
gaagaguguucuaucucaa

SEQ ID NO: 1386685 - RNA, 19 nt, Homo sapiens
  misc_RNA (1)...(19): siRNA sense strand
ucaaagaguuucuacuaag

SEQ ID NO: 1386686 - RNA, 19 nt, Homo sapiens
  misc_RNA (1)...(19): siRNA sense strand
gagaacugauaagaagaua

SEQ ID NO: 1386687 - RNA, 19 nt, Homo sapiens
  misc_RNA (1)...(19): siRNA sense strand
gcucuuuacucagggaaua

SEQ ID NO: 1386688 - RNA, 19 nt, Homo sapiens
  misc_RNA (1)...(19): siRNA sense strand
cgggauacauuacuuguug

SEQ ID NO: 1386689 - RNA, 19 nt, Homo sapiens
  misc_RNA (1)...(19): siRNA sense strand
ucgauguccucuuauauuu

SEQ ID NO: 1386690 - RNA, 19 nt, Homo sapiens
  misc_RNA (1)...(19): siRNA sense strand
agauuuaccuaaccaguuu

SEQ ID NO: 1386691 - RNA, 19 nt, Homo sapiens
  misc_RNA (1)...(19): siRNA sense strand
ggaaguaugugaggauugg

SEQ ID NO: 1386692 - RNA, 19 nt, Homo sapiens
  misc_RNA (1)...(19): siRNA sense strand
gauaucagaagugcaauaa

SEQ ID NO: 1386693 - RNA, 19 nt, Homo sapiens
  misc_RNA (1)...(19): siRNA sense strand
gcaccaacaauuaugauga

SEQ ID NO: 1386694 - RNA, 19 nt, Homo sapiens
  misc_RNA (1)...(19): siRNA sense strand
aaacaggguggaucuauuu

SEQ ID NO: 1386695 - RNA, 19 nt, Homo sapiens
  misc_RNA (1)...(19): siRNA sense strand
gaugaucugagaacugaua

SEQ ID NO: 1386696 - RNA, 19 nt, Homo sapiens
  misc_RNA (1)...(19): siRNA sense strand
ggguggaucuauuuuauua

SEQ ID NO: 1386697 - RNA, 19 nt, Homo sapiens
  misc_RNA (1)...(19): siRNA sense strand
uaucagaagugcaauaaac

SEQ ID NO: 1386698 - RNA, 19 nt, Homo sapiens
  misc_RNA (1)...(19): siRNA sense strand
ugugagagccagugaauuu

SEQ ID NO: 1386699 - RNA, 19 nt, Homo sapiens
  misc_RNA (1)...(19): siRNA sense strand
caaaggagcaugguauuca

SEQ ID NO: 1386700 - RNA, 19 nt, Homo sapiens
  misc_RNA (1)...(19): siRNA sense strand
ccggaaaccuggucucuuc

SEQ ID NO: 1386701 - RNA, 19 nt, Homo sapiens
  misc_RNA (1)...(19): siRNA sense strand
gaagcgacacuuuggaaga

SEQ ID NO: 1386702 - RNA, 19 nt, Homo sapiens
  misc_RNA (1)...(19): siRNA sense strand
cgagaggugugaugcauuc

SEQ ID NO: 1386703 - RNA, 19 nt, Homo sapiens
  misc_RNA (1)...(19): siRNA sense strand
cagaugcugugcugucaaa

SEQ ID NO: 1386704 - RNA, 19 nt, Homo sapiens
  misc_RNA (1)...(19): siRNA sense strand
caccaacaauuaugaugaa

SEQ ID NO: 1386705 - RNA, 19 nt, Homo sapiens
  misc_RNA (1)...(19): siRNA sense strand
gaacgggauacauuacuug

SEQ ID NO: 1386706 - RNA, 19 nt, Homo sapiens
  misc_RNA (1)...(19): siRNA sense strand
gaucugagaacugauaaga

SEQ ID NO: 1386707 - RNA, 19 nt, Homo sapiens
  misc_RNA (1)...(19): siRNA sense strand
uaacaagaauggaggaaaa

SEQ ID NO: 1386708 - RNA, 19 nt, Homo sapiens
  misc_RNA (1)...(19): siRNA sense strand
caaguacaagaguggauua

SEQ ID NO: 1386709 - RNA, 19 nt, Homo sapiens
  misc_RNA (1)...(19): siRNA sense strand
gaaaccuggucucuuccuu

SEQ ID NO: 1386710 - RNA, 19 nt, Homo sapiens
  misc_RNA (1)...(19): siRNA sense strand
guuauuguuucccaaagaa

SEQ ID NO: 1386711 - RNA, 19 nt, Homo sapiens
  misc_RNA (1)...(19): siRNA sense strand
uacaugaaguucuaaggaa

SEQ ID NO: 1386712 - RNA, 19 nt, Homo sapiens
  misc_RNA (1)...(19): siRNA sense strand
ucugagaacugauaagaag

SEQ ID NO: 1386713 - RNA, 19 nt, Homo sapiens
  misc_RNA (1)...(19): siRNA sense strand
aauacacgcucuuuacuca

SEQ ID NO: 1386714 - RNA, 19 nt, Homo sapiens
  misc_RNA (1)...(19): siRNA sense strand
caacuuacggccaaggaaa

SEQ ID NO: 1386715 - RNA, 19 nt, Homo sapiens
  misc_RNA (1)...(19): siRNA sense strand
caaagaaauucaggaagag

SEQ ID NO: 1386716 - RNA, 19 nt, Homo sapiens
  misc_RNA (1)...(19): siRNA sense strand
ggagguaguagaaauguca

SEQ ID NO: 1386717 - RNA, 19 nt, Homo sapiens
  misc_RNA (1)...(19): siRNA sense strand
gccagugaauuucugaguu

SEQ ID NO: 1386718 - RNA, 19 nt, Homo sapiens
  misc_RNA (1)...(19): siRNA sense strand
uacaaaugcuuggagauga

SEQ ID NO: 1386719 - RNA, 19 nt, Homo sapiens
  misc_RNA (1)...(19): siRNA sense strand
ugaacuugcugugcauaaa

SEQ ID NO: 1386720 - RNA, 19 nt, Homo sapiens
  misc_RNA (1)...(19): siRNA sense strand
ccucucauuuaucagaaua

SEQ ID NO: 1386721 - RNA, 19 nt, Homo sapiens
  misc_RNA (1)...(19): siRNA sense strand
caagagguccaagcuauug

SEQ ID NO: 1386722 - RNA, 19 nt, Homo sapiens
  misc_RNA (1)...(19): siRNA sense strand
ucgggauucucauacuuua

SEQ ID NO: 1386723 - RNA, 19 nt, Homo sapiens
  misc_RNA (1)...(19): siRNA sense strand
gguuauuguuucccaaaga

SEQ ID NO: 1386724 - RNA, 19 nt, Homo sapiens
  misc_RNA (1)...(19): siRNA sense strand
gccauaccuugcucuacua

SEQ ID NO: 1386725 - RNA, 19 nt, Homo sapiens
  misc_RNA (1)...(19): siRNA sense strand
caaggaggaggaucaaguu

SEQ ID NO: 1386726 - RNA, 19 nt, Homo sapiens
  misc_RNA (1)...(19): siRNA sense strand
ugugaugcauuccaacaaa

SEQ ID NO: 1386727 - RNA, 19 nt, Homo sapiens
  misc_RNA (1)...(19): siRNA sense strand
gaggugugaugcauuccaa

SEQ ID NO: 1386728 - RNA, 19 nt, Homo sapiens
  misc_RNA (1)...(19): siRNA sense strand
aaagauguuucucuguuuc

SEQ ID NO: 1386729 - RNA, 19 nt, Homo sapiens
  misc_RNA (1)...(19): siRNA sense strand
gggauguucuggugauauc

SEQ ID NO: 1386730 - RNA, 19 nt, Homo sapiens
  misc_RNA (1)...(19): siRNA sense strand
ugacaaaacuucucuagag

SEQ ID NO: 1386731 - RNA, 19 nt, Homo sapiens
  misc_RNA (1)...(19): siRNA sense strand
caggaagaguguucuaucu

SEQ ID NO: 1386732 - RNA, 19 nt, Homo sapiens
  misc_RNA (1)...(19): siRNA sense strand
ugaacgggauacauuacuu

SEQ ID NO: 1386733 - RNA, 19 nt, Homo sapiens
  misc_RNA (1)...(19): siRNA sense strand
ggugauaucagaagugcaa

SEQ ID NO: 1386734 - RNA, 19 nt, Homo sapiens
  misc_RNA (1)...(19): siRNA sense strand
agauaauucugguugaaga

SEQ ID NO: 1386735 - RNA, 19 nt, Homo sapiens
  misc_RNA (1)...(19): siRNA sense strand
aaaggagcaugguauucaa

SEQ ID NO: 1386736 - RNA, 19 nt, Homo sapiens
  misc_RNA (1)...(19): siRNA sense strand
aauaugaacgggauacauu

SEQ ID NO: 1386737 - RNA, 19 nt, Homo sapiens
  misc_RNA (1)...(19): siRNA sense strand
cuauagaagcuaacaagaa

SEQ ID NO: 1386738 - RNA, 19 nt, Homo sapiens
  misc_RNA (1)...(19): siRNA sense strand
cgauguccucuuauauuua

SEQ ID NO: 1386739 - RNA, 19 nt, Homo sapiens
  misc_RNA (1)...(19): siRNA sense strand
auuggucgauguccucuua

SEQ ID NO: 1386740 - RNA, 19 nt, Homo sapiens
  misc_RNA (1)...(19): siRNA sense strand
gaaguucuaaggaaguaug

SEQ ID NO: 1386741 - RNA, 19 nt, Homo sapiens
  misc_RNA (1)...(19): siRNA sense strand
ccuguggcaccaacaauua

SEQ ID NO: 1386742 - RNA, 19 nt, Homo sapiens
  misc_RNA (1)...(19): siRNA sense strand
gcgacacuuuggaagauug

SEQ ID NO: 1386743 - RNA, 19 nt, Homo sapiens
  misc_RNA (1)...(19): siRNA sense strand
ggaggaggaucaaguuuuc

SEQ ID NO: 1386744 - RNA, 19 nt, Homo sapiens
  misc_RNA (1)...(19): siRNA sense strand
gggauacauuacuuguuga

SEQ ID NO: 1386745 - RNA, 19 nt, Homo sapiens
  misc_RNA (1)...(19): siRNA sense strand
uaucaaaggagcaugguau

SEQ ID NO: 1386746 - RNA, 19 nt, Homo sapiens
  misc_RNA (1)...(19): siRNA sense strand
aaucaagcuuccauauguu

SEQ ID NO: 1386747 - RNA, 19 nt, Homo sapiens
  misc_RNA (1)...(19): siRNA sense strand
caccaaaacuacauagauu

SEQ ID NO: 1386748 - RNA, 19 nt, Homo sapiens
  misc_RNA (1)...(19): siRNA sense strand
caauaaacagccuccaguu

SEQ ID NO: 1386749 - RNA, 19 nt, Homo sapiens
  misc_RNA (1)...(19): siRNA sense strand
gagcgacaaaguauaacaa

SEQ ID NO: 1386750 - RNA, 19 nt, Homo sapiens
  misc_RNA (1)...(19): siRNA sense strand
ccaaggagacauggaagaa

SEQ ID NO: 1386751 - RNA, 19 nt, Homo sapiens
  misc_RNA (1)...(19): siRNA sense strand
gaauacacgcucuuuacuc

SEQ ID NO: 1386752 - RNA, 19 nt, Homo sapiens
  misc_RNA (1)...(19): siRNA sense strand
caguggagauaauaaucaa

SEQ ID NO: 1386753 - RNA, 19 nt, Homo sapiens
  misc_RNA (1)...(19): siRNA sense strand
gcgacaaaguauaacaagu

SEQ ID NO: 1386754 - RNA, 19 nt, Homo sapiens
  misc_RNA (1)...(19): siRNA sense strand
gcaugguauucaaguacaa

SEQ ID NO: 1386755 - RNA, 19 nt, Homo sapiens
  misc_RNA (1)...(19): siRNA sense strand
ugacagggaacauggaaug

SEQ ID NO: 1386756 - RNA, 19 nt, Homo sapiens
  misc_RNA (1)...(19): siRNA sense strand
ggaauacacgcucuuuacu

SEQ ID NO: 1386757 - RNA, 19 nt, Homo sapiens
  misc_RNA (1)...(19): siRNA sense strand
ucgguugcccucucauuua

SEQ ID NO: 1386758 - RNA, 19 nt, Homo sapiens
  misc_RNA (1)...(19): siRNA sense strand
gagagccagugaauuucug

SEQ ID NO: 1386759 - RNA, 19 nt, Homo sapiens
  misc_RNA (1)...(19): siRNA sense strand
aaaaguaucgggaaaauug

SEQ ID NO: 1386760 - RNA, 19 nt, Homo sapiens
  misc_RNA (1)...(19): siRNA sense strand
gcaugaacuugcugugcau

SEQ ID NO: 1386761 - RNA, 19 nt, Homo sapiens
  misc_RNA (1)...(19): siRNA sense strand
gaaucaagcuuccauaugu

SEQ ID NO: 1386762 - RNA, 19 nt, Homo sapiens
  misc_RNA (1)...(19): siRNA sense strand
gcaaagauguuucucuguu

SEQ ID NO: 1386763 - RNA, 19 nt, Homo sapiens
  misc_RNA (1)...(19): siRNA sense strand
acacaugccuggagacuua

SEQ ID NO: 1386764 - RNA, 19 nt, Homo sapiens
  misc_RNA (1)...(19): siRNA sense strand
caacaaagcccgaggauau

SEQ ID NO: 1386765 - RNA, 19 nt, Homo sapiens
  misc_RNA (1)...(19): siRNA sense strand
ccaaagaaauucaggaaga

SEQ ID NO: 1386766 - RNA, 19 nt, Homo sapiens
  misc_RNA (1)...(19): siRNA sense strand
cuacauagauuucuucaug

SEQ ID NO: 1386767 - RNA, 19 nt, Homo sapiens
  misc_RNA (1)...(19): siRNA sense strand
ggaaauugaugauauugug

SEQ ID NO: 1386768 - RNA, 19 nt, Homo sapiens
  misc_RNA (1)...(19): siRNA sense strand
aaacucagcuauugccaua

SEQ ID NO: 1386769 - RNA, 19 nt, Homo sapiens
  misc_RNA (1)...(19): siRNA sense strand
gaagauaauucugguugaa

SEQ ID NO: 1386770 - RNA, 19 nt, Homo sapiens
  misc_RNA (1)...(19): siRNA sense strand
caaagauguuucucuguuu

SEQ ID NO: 1386771 - RNA, 19 nt, Homo sapiens
  misc_RNA (1)...(19): siRNA sense strand
guacaagaguggauuaauc

SEQ ID NO: 1386772 - RNA, 19 nt, Homo sapiens
  misc_RNA (1)...(19): siRNA sense strand
ggaagaguguucuaucuca

SEQ ID NO: 1386773 - RNA, 19 nt, Homo sapiens
  misc_RNA (1)...(19): siRNA sense strand
gaaagacaacgaccuuaaa

SEQ ID NO: 1386774 - RNA, 19 nt, Homo sapiens
  misc_RNA (1)...(19): siRNA sense strand
ggaaagacaacgaccuuaa

SEQ ID NO: 1386775 - RNA, 19 nt, Homo sapiens
  misc_RNA (1)...(19): siRNA sense strand
caaagaguuucuacuaaga

SEQ ID NO: 1386776 - RNA, 19 nt, Homo sapiens
  misc_RNA (1)...(19): siRNA sense strand
ccucagugguuucuaauaa

SEQ ID NO: 1386777 - RNA, 19 nt, Homo sapiens
  misc_RNA (1)...(19): siRNA sense strand
ccagugaauuucugaguuu

SEQ ID NO: 1386778 - RNA, 19 nt, Homo sapiens
  misc_RNA (1)...(19): siRNA sense strand
cagggaacauggaaugaua

SEQ ID NO: 1386779 - RNA, 19 nt, Homo sapiens
  misc_RNA (1)...(19): siRNA sense strand
uaagagcgacaaaguauaa

SEQ ID NO: 1386780 - RNA, 19 nt, Homo sapiens
  misc_RNA (1)...(19): siRNA sense strand
gagcaucuuuaacagaauu

SEQ ID NO: 1386781 - RNA, 19 nt, Homo sapiens
  misc_RNA (1)...(19): siRNA sense strand
ccuggagacuuauuuaauu

SEQ ID NO: 1386782 - RNA, 19 nt, Homo sapiens
  misc_RNA (1)...(19): siRNA sense strand
cgacaaaguauaacaaguu

SEQ ID NO: 1386783 - RNA, 19 nt, Homo sapiens
  misc_RNA (1)...(19): siRNA sense strand
ggagcaugguauucaagua

SEQ ID NO: 1386784 - RNA, 19 nt, Homo sapiens
  misc_RNA (1)...(19): siRNA sense strand
gaagaguguucuaucucaa

SEQ ID NO: 1386785 - RNA, 19 nt, Homo sapiens
  misc_RNA (1)...(19): siRNA sense strand
ucaaagaguuucuacuaag

SEQ ID NO: 1386786 - RNA, 19 nt, Homo sapiens
  misc_RNA (1)...(19): siRNA sense strand
gagaacugauaagaagaua

SEQ ID NO: 1386787 - RNA, 19 nt, Homo sapiens
  misc_RNA (1)...(19): siRNA sense strand
gcucuuuacucagggaaua

SEQ ID NO: 1386788 - RNA, 19 nt, Homo sapiens
  misc_RNA (1)...(19): siRNA sense strand
cgggauacauuacuuguug

SEQ ID NO: 1386789 - RNA, 19 nt, Homo sapiens
  misc_RNA (1)...(19): siRNA sense strand
ucgauguccucuuauauuu

SEQ ID NO: 1386790 - RNA, 19 nt, Homo sapiens
  misc_RNA (1)...(19): siRNA sense strand
agauuuaccuaaccaguuu

SEQ ID NO: 1386791 - RNA, 19 nt, Homo sapiens
  misc_RNA (1)...(19): siRNA sense strand
ggaaguaugugaggauugg

SEQ ID NO: 1386792 - RNA, 19 nt, Homo sapiens
  misc_RNA (1)...(19): siRNA sense strand
gauaucagaagugcaauaa

SEQ ID NO: 1386793 - RNA, 19 nt, Homo sapiens
  misc_RNA (1)...(19): siRNA sense strand
gcaccaacaauuaugauga

SEQ ID NO: 1386794 - RNA, 19 nt, Homo sapiens
  misc_RNA (1)...(19): siRNA sense strand
aaacaggguggaucuauuu

SEQ ID NO: 1386795 - RNA, 19 nt, Homo sapiens
  misc_RNA (1)...(19): siRNA sense strand
gaugaucugagaacugaua

SEQ ID NO: 1386796 - RNA, 19 nt, Homo sapiens
  misc_RNA (1)...(19): siRNA sense strand
ggguggaucuauuuuauua

SEQ ID NO: 1386797 - RNA, 19 nt, Homo sapiens
  misc_RNA (1)...(19): siRNA sense strand
uaucagaagugcaauaaac

SEQ ID NO: 1386798 - RNA, 19 nt, Homo sapiens
  misc_RNA (1)...(19): siRNA sense strand
ugugagagccagugaauuu

SEQ ID NO: 1386799 - RNA, 19 nt, Homo sapiens
  misc_RNA (1)...(19): siRNA sense strand
caaaggagcaugguauuca

SEQ ID NO: 1386800 - RNA, 19 nt, Homo sapiens
  misc_RNA (1)...(19): siRNA sense strand
ccggaaaccuggucucuuc

SEQ ID NO: 1386801 - RNA, 19 nt, Homo sapiens
  misc_RNA (1)...(19): siRNA sense strand
gaagcgacacuuuggaaga

SEQ ID NO: 1386802 - RNA, 19 nt, Homo sapiens
  misc_RNA (1)...(19): siRNA sense strand
cgagaggugugaugcauuc

SEQ ID NO: 1386803 - RNA, 19 nt, Homo sapiens
  misc_RNA (1)...(19): siRNA sense strand
cagaugcugugcugucaaa

SEQ ID NO: 1386804 - RNA, 19 nt, Homo sapiens
  misc_RNA (1)...(19): siRNA sense strand
caccaacaauuaugaugaa

SEQ ID NO: 1386805 - RNA, 19 nt, Homo sapiens
  misc_RNA (1)...(19): siRNA sense strand
gaacgggauacauuacuug

SEQ ID NO: 1386806 - RNA, 19 nt, Homo sapiens
  misc_RNA (1)...(19): siRNA sense strand
gaucugagaacugauaaga

SEQ ID NO: 1386807 - RNA, 19 nt, Homo sapiens
  misc_RNA (1)...(19): siRNA sense strand
uaacaagaauggaggaaaa

SEQ ID NO: 1386808 - RNA, 19 nt, Homo sapiens
  misc_RNA (1)...(19): siRNA sense strand
caaguacaagaguggauua

SEQ ID NO: 1386809 - RNA, 19 nt, Homo sapiens
  misc_RNA (1)...(19): siRNA sense strand
gaaaccuggucucuuccuu

SEQ ID NO: 1386810 - RNA, 19 nt, Homo sapiens
  misc_RNA (1)...(19): siRNA sense strand
guuauuguuucccaaagaa

SEQ ID NO: 1386811 - RNA, 19 nt, Homo sapiens
  misc_RNA (1)...(19): siRNA sense strand
uacaugaaguucuaaggaa

SEQ ID NO: 1386812 - RNA, 19 nt, Homo sapiens
  misc_RNA (1)...(19): siRNA sense strand
ucugagaacugauaagaag

SEQ ID NO: 1386813 - RNA, 19 nt, Homo sapiens
  misc_RNA (1)...(19): siRNA sense strand
aauacacgcucuuuacuca

SEQ ID NO: 1386814 - RNA, 19 nt, Homo sapiens
  misc_RNA (1)...(19): siRNA sense strand
caacuuacggccaaggaaa

SEQ ID NO: 1386815 - RNA, 19 nt, Homo sapiens
  misc_RNA (1)...(19): siRNA sense strand
caaagaaauucaggaagag

SEQ ID NO: 1386816 - RNA, 19 nt, Homo sapiens
  misc_RNA (1)...(19): siRNA sense strand
ggagguaguagaaauguca

SEQ ID NO: 1386817 - RNA, 19 nt, Homo sapiens
  misc_RNA (1)...(19): siRNA sense strand
gccagugaauuucugaguu

SEQ ID NO: 1386818 - RNA, 19 nt, Homo sapiens
  misc_RNA (1)...(19): siRNA sense strand
uacaaaugcuuggagauga

SEQ ID NO: 1386819 - RNA, 19 nt, Homo sapiens
  misc_RNA (1)...(19): siRNA sense strand
ugaacuugcugugcauaaa

SEQ ID NO: 1386820 - RNA, 19 nt, Homo sapiens
  misc_RNA (1)...(19): siRNA sense strand
ccucucauuuaucagaaua

SEQ ID NO: 1386821 - RNA, 19 nt, Homo sapiens
  misc_RNA (1)...(19): siRNA sense strand
caagagguccaagcuauug

SEQ ID NO: 1386822 - RNA, 19 nt, Homo sapiens
  misc_RNA (1)...(19): siRNA sense strand
ucgggauucucauacuuua

SEQ ID NO: 1386823 - RNA, 19 nt, Homo sapiens
  misc_RNA (1)...(19): siRNA sense strand
gguuauuguuucccaaaga

SEQ ID NO: 1386824 - RNA, 19 nt, Homo sapiens
  misc_RNA (1)...(19): siRNA sense strand
gccauaccuugcucuacua

SEQ ID NO: 1386825 - RNA, 19 nt, Homo sapiens
  misc_RNA (1)...(19): siRNA sense strand
caaggaggaggaucaaguu

SEQ ID NO: 1386826 - RNA, 19 nt, Homo sapiens
  misc_RNA (1)...(19): siRNA sense strand
ugugaugcauuccaacaaa

SEQ ID NO: 1386827 - RNA, 19 nt, Homo sapiens
  misc_RNA (1)...(19): siRNA sense strand
gaggugugaugcauuccaa

SEQ ID NO: 1386828 - RNA, 19 nt, Homo sapiens
  misc_RNA (1)...(19): siRNA sense strand
aaagauguuucucuguuuc

SEQ ID NO: 1386829 - RNA, 19 nt, Homo sapiens
  misc_RNA (1)...(19): siRNA sense strand
gggauguucuggugauauc

SEQ ID NO: 1386830 - RNA, 19 nt, Homo sapiens
  misc_RNA (1)...(19): siRNA sense strand
ugacaaaacuucucuagag

SEQ ID NO: 1386831 - RNA, 19 nt, Homo sapiens
  misc_RNA (1)...(19): siRNA sense strand
caggaagaguguucuaucu

SEQ ID NO: 1386832 - RNA, 19 nt, Homo sapiens
  misc_RNA (1)...(19): siRNA sense strand
ugaacgggauacauuacuu

SEQ ID NO: 1386833 - RNA, 19 nt, Homo sapiens
  misc_RNA (1)...(19): siRNA sense strand
ggugauaucagaagugcaa

SEQ ID NO: 1386834 - RNA, 19 nt, Homo sapiens
  misc_RNA (1)...(19): siRNA sense strand
agauaauucugguugaaga

SEQ ID NO: 1386835 - RNA, 19 nt, Homo sapiens
  misc_RNA (1)...(19): siRNA sense strand
aaaggagcaugguauucaa

SEQ ID NO: 1386836 - RNA, 19 nt, Homo sapiens
  misc_RNA (1)...(19): siRNA sense strand
aauaugaacgggauacauu

SEQ ID NO: 1386837 - RNA, 19 nt, Homo sapiens
  misc_RNA (1)...(19): siRNA sense strand
cuauagaagcuaacaagaa

SEQ ID NO: 1386838 - RNA, 19 nt, Homo sapiens
  misc_RNA (1)...(19): siRNA sense strand
cgauguccucuuauauuua

SEQ ID NO: 1386839 - RNA, 19 nt, Homo sapiens
  misc_RNA (1)...(19): siRNA sense strand
auuggucgauguccucuua

SEQ ID NO: 1386840 - RNA, 19 nt, Homo sapiens
  misc_RNA (1)...(19): siRNA sense strand
gaaguucuaaggaaguaug

SEQ ID NO: 1386841 - RNA, 19 nt, Homo sapiens
  misc_RNA (1)...(19): siRNA sense strand
ccuguggcaccaacaauua

SEQ ID NO: 1386842 - RNA, 19 nt, Homo sapiens
  misc_RNA (1)...(19): siRNA sense strand
gcgacacuuuggaagauug

SEQ ID NO: 1386843 - RNA, 19 nt, Homo sapiens
  misc_RNA (1)...(19): siRNA sense strand
ggaggaggaucaaguuuuc

SEQ ID NO: 1386844 - RNA, 19 nt, Homo sapiens
  misc_RNA (1)...(19): siRNA sense strand
gggauacauuacuuguuga

SEQ ID NO: 1386845 - RNA, 19 nt, Homo sapiens
  misc_RNA (1)...(19): siRNA sense strand
uaucaaaggagcaugguau

SEQ ID NO: 1386846 - RNA, 19 nt, Homo sapiens
  misc_RNA (1)...(19): siRNA sense strand
aaucaagcuuccauauguu

SEQ ID NO: 1386847 - RNA, 19 nt, Homo sapiens
  misc_RNA (1)...(19): siRNA sense strand
caccaaaacuacauagauu

SEQ ID NO: 1386848 - RNA, 19 nt, Homo sapiens
  misc_RNA (1)...(19): siRNA sense strand
caauaaacagccuccaguu

SEQ ID NO: 1386849 - RNA, 19 nt, Homo sapiens
  misc_RNA (1)...(19): siRNA sense strand
gagcgacaaaguauaacaa

SEQ ID NO: 1386850 - RNA, 19 nt, Homo sapiens
  misc_RNA (1)...(19): siRNA sense strand
ccaaggagacauggaagaa

SEQ ID NO: 1386851 - RNA, 19 nt, Homo sapiens
  misc_RNA (1)...(19): siRNA sense strand
gaauacacgcucuuuacuc

SEQ ID NO: 1386852 - RNA, 19 nt, Homo sapiens
  misc_RNA (1)...(19): siRNA sense strand
caguggagauaauaaucaa

SEQ ID NO: 1386853 - RNA, 19 nt, Homo sapiens
  misc_RNA (1)...(19): siRNA sense strand
gcgacaaaguauaacaagu

SEQ ID NO: 1386854 - RNA, 19 nt, Homo sapiens
  misc_RNA (1)...(19): siRNA sense strand
gcaugguauucaaguacaa

SEQ ID NO: 1386855 - RNA, 19 nt, Homo sapiens
  misc_RNA (1)...(19): siRNA sense strand
ugacagggaacauggaaug

SEQ ID NO: 1386856 - RNA, 19 nt, Homo sapiens
  misc_RNA (1)...(19): siRNA sense strand
ggaauacacgcucuuuacu

SEQ ID NO: 1386857 - RNA, 19 nt, Homo sapiens
  misc_RNA (1)...(19): siRNA sense strand
ucgguugcccucucauuua

SEQ ID NO: 1386858 - RNA, 19 nt, Homo sapiens
  misc_RNA (1)...(19): siRNA sense strand
gagagccagugaauuucug

SEQ ID NO: 1386859 - RNA, 19 nt, Homo sapiens
  misc_RNA (1)...(19): siRNA sense strand
aaaaguaucgggaaaauug

SEQ ID NO: 1386860 - RNA, 19 nt, Homo sapiens
  misc_RNA (1)...(19): siRNA sense strand
gcaugaacuugcugugcau

SEQ ID NO: 1386861 - RNA, 19 nt, Homo sapiens
  misc_RNA (1)...(19): siRNA sense strand
gaaucaagcuuccauaugu

SEQ ID NO: 1386862 - RNA, 19 nt, Homo sapiens
  misc_RNA (1)...(19): siRNA sense strand
gcaaagauguuucucuguu

SEQ ID NO: 1386863 - RNA, 19 nt, Homo sapiens
  misc_RNA (1)...(19): siRNA sense strand
acacaugccuggagacuua

SEQ ID NO: 1386864 - RNA, 19 nt, Homo sapiens
  misc_RNA (1)...(19): siRNA sense strand
caacaaagcccgaggauau

SEQ ID NO: 1386865 - RNA, 19 nt, Homo sapiens
  misc_RNA (1)...(19): siRNA sense strand
ccaaagaaauucaggaaga

SEQ ID NO: 1386866 - RNA, 19 nt, Homo sapiens
  misc_RNA (1)...(19): siRNA sense strand
cuacauagauuucuucaug

SEQ ID NO: 1386867 - RNA, 19 nt, Homo sapiens
  misc_RNA (1)...(19): siRNA sense strand
ggaaauugaugauauugug

SEQ ID NO: 1386868 - RNA, 19 nt, Homo sapiens
  misc_RNA (1)...(19): siRNA sense strand
aaacucagcuauugccaua

SEQ ID NO: 1386869 - RNA, 19 nt, Homo sapiens
  misc_RNA (1)...(19): siRNA sense strand
gaagauaauucugguugaa

SEQ ID NO: 1386870 - RNA, 19 nt, Homo sapiens
  misc_RNA (1)...(19): siRNA sense strand
caaagauguuucucuguuu

SEQ ID NO: 1386871 - RNA, 19 nt, Homo sapiens
  misc_RNA (1)...(19): siRNA sense strand
ggaagaguguucuaucuca

SEQ ID NO: 1386872 - RNA, 19 nt, Homo sapiens
  misc_RNA (1)...(19): siRNA sense strand
caaagaguuucuacuaaga

SEQ ID NO: 1386873 - RNA, 19 nt, Homo sapiens
  misc_RNA (1)...(19): siRNA sense strand
ccucagugguuucuaauaa

SEQ ID NO: 1386874 - RNA, 19 nt, Homo sapiens
  misc_RNA (1)...(19): siRNA sense strand
ccagugaauuucugaguuu

SEQ ID NO: 1386875 - RNA, 19 nt, Homo sapiens
  misc_RNA (1)...(19): siRNA sense strand
cagggaacauggaaugaua

SEQ ID NO: 1386876 - RNA, 19 nt, Homo sapiens
  misc_RNA (1)...(19): siRNA sense strand
uaagagcgacaaaguauaa

SEQ ID NO: 1386877 - RNA, 19 nt, Homo sapiens
  misc_RNA (1)...(19): siRNA sense strand
gagcaucuuuaacagaauu

SEQ ID NO: 1386878 - RNA, 19 nt, Homo sapiens
  misc_RNA (1)...(19): siRNA sense strand
ccuggagacuuauuuaauu

SEQ ID NO: 1386879 - RNA, 19 nt, Homo sapiens
  misc_RNA (1)...(19): siRNA sense strand
cgacaaaguauaacaaguu

SEQ ID NO: 1386880 - RNA, 19 nt, Homo sapiens
  misc_RNA (1)...(19): siRNA sense strand
gaagaguguucuaucucaa

SEQ ID NO: 1386881 - RNA, 19 nt, Homo sapiens
  misc_RNA (1)...(19): siRNA sense strand
ucaaagaguuucuacuaag

SEQ ID NO: 1386882 - RNA, 19 nt, Homo sapiens
  misc_RNA (1)...(19): siRNA sense strand
gagaacugauaagaagaua

SEQ ID NO: 1386883 - RNA, 19 nt, Homo sapiens
  misc_RNA (1)...(19): siRNA sense strand
gcucuuuacucagggaaua

SEQ ID NO: 1386884 - RNA, 19 nt, Homo sapiens
  misc_RNA (1)...(19): siRNA sense strand
cgggauacauuacuuguug

SEQ ID NO: 1386885 - RNA, 19 nt, Homo sapiens
  misc_RNA (1)...(19): siRNA sense strand
ucgauguccucuuauauuu

SEQ ID NO: 1386886 - RNA, 19 nt, Homo sapiens
  misc_RNA (1)...(19): siRNA sense strand
agauuuaccuaaccaguuu

SEQ ID NO: 1386887 - RNA, 19 nt, Homo sapiens
  misc_RNA (1)...(19): siRNA sense strand
ggaaguaugugaggauugg

SEQ ID NO: 1386888 - RNA, 19 nt, Homo sapiens
  misc_RNA (1)...(19): siRNA sense strand
gauaucagaagugcaauaa

SEQ ID NO: 1386889 - RNA, 19 nt, Homo sapiens
  misc_RNA (1)...(19): siRNA sense strand
gcaccaacaauuaugauga

SEQ ID NO: 1386890 - RNA, 19 nt, Homo sapiens
  misc_RNA (1)...(19): siRNA sense strand
gaugaucugagaacugaua

SEQ ID NO: 1386891 - RNA, 19 nt, Homo sapiens
  misc_RNA (1)...(19): siRNA sense strand
uaucagaagugcaauaaac

SEQ ID NO: 1386892 - RNA, 19 nt, Homo sapiens
  misc_RNA (1)...(19): siRNA sense strand
ugugagagccagugaauuu

SEQ ID NO: 1386893 - RNA, 19 nt, Homo sapiens
  misc_RNA (1)...(19): siRNA sense strand
caccaacaauuaugaugaa

SEQ ID NO: 1386894 - RNA, 19 nt, Homo sapiens
  misc_RNA (1)...(19): siRNA sense strand
ccggaaaccuggucucuuc

SEQ ID NO: 1386895 - RNA, 19 nt, Homo sapiens
  misc_RNA (1)...(19): siRNA sense strand
gaagcgacacuuuggaaga

SEQ ID NO: 1386896 - RNA, 19 nt, Homo sapiens
  misc_RNA (1)...(19): siRNA sense strand
cgagaggugugaugcauuc

SEQ ID NO: 1386897 - RNA, 19 nt, Homo sapiens
  misc_RNA (1)...(19): siRNA sense strand
cagaugcugugcugucaaa

SEQ ID NO: 1386898 - RNA, 19 nt, Homo sapiens
  misc_RNA (1)...(19): siRNA sense strand
gaacgggauacauuacuug

SEQ ID NO: 1386899 - RNA, 19 nt, Homo sapiens
  misc_RNA (1)...(19): siRNA sense strand
gaucugagaacugauaaga

SEQ ID NO: 1386900 - RNA, 19 nt, Homo sapiens
  misc_RNA (1)...(19): siRNA sense strand
uaacaagaauggaggaaaa

SEQ ID NO: 1386901 - RNA, 19 nt, Homo sapiens
  misc_RNA (1)...(19): siRNA sense strand
uacaugaaguucuaaggaa

SEQ ID NO: 1386902 - RNA, 19 nt, Homo sapiens
  misc_RNA (1)...(19): siRNA sense strand
gaaaccuggucucuuccuu

SEQ ID NO: 1386903 - RNA, 19 nt, Homo sapiens
  misc_RNA (1)...(19): siRNA sense strand
guuauuguuucccaaagaa

SEQ ID NO: 1386904 - RNA, 19 nt, Homo sapiens
  misc_RNA (1)...(19): siRNA sense strand
ucugagaacugauaagaag

SEQ ID NO: 1386905 - RNA, 19 nt, Homo sapiens
  misc_RNA (1)...(19): siRNA sense strand
aauacacgcucuuuacuca

SEQ ID NO: 1386906 - RNA, 19 nt, Homo sapiens
  misc_RNA (1)...(19): siRNA sense strand
caacuuacggccaaggaaa

SEQ ID NO: 1386907 - RNA, 19 nt, Homo sapiens
  misc_RNA (1)...(19): siRNA sense strand
caaagaaauucaggaagag

SEQ ID NO: 1386908 - RNA, 19 nt, Homo sapiens
  misc_RNA (1)...(19): siRNA sense strand
ggagguaguagaaauguca

SEQ ID NO: 1386909 - RNA, 19 nt, Homo sapiens
  misc_RNA (1)...(19): siRNA sense strand
gccagugaauuucugaguu

SEQ ID NO: 1386910 - RNA, 19 nt, Homo sapiens
  misc_RNA (1)...(19): siRNA sense strand
uacaaaugcuuggagauga

SEQ ID NO: 1386911 - RNA, 19 nt, Homo sapiens
  misc_RNA (1)...(19): siRNA sense strand
ccucucauuuaucagaaua

SEQ ID NO: 1386912 - RNA, 19 nt, Homo sapiens
  misc_RNA (1)...(19): siRNA sense strand
caagagguccaagcuauug

SEQ ID NO: 1386913 - RNA, 19 nt, Homo sapiens
  misc_RNA (1)...(19): siRNA sense strand
ucgggauucucauacuuua

SEQ ID NO: 1386914 - RNA, 19 nt, Homo sapiens
  misc_RNA (1)...(19): siRNA sense strand
gguuauuguuucccaaaga

SEQ ID NO: 1386915 - RNA, 19 nt, Homo sapiens
  misc_RNA (1)...(19): siRNA sense strand
gccauaccuugcucuacua

SEQ ID NO: 1386916 - RNA, 19 nt, Homo sapiens
  misc_RNA (1)...(19): siRNA sense strand
caaggaggaggaucaaguu

SEQ ID NO: 1386917 - RNA, 19 nt, Homo sapiens
  misc_RNA (1)...(19): siRNA sense strand
ugugaugcauuccaacaaa

SEQ ID NO: 1386918 - RNA, 19 nt, Homo sapiens
  misc_RNA (1)...(19): siRNA sense strand
gaggugugaugcauuccaa

SEQ ID NO: 1386919 - RNA, 19 nt, Homo sapiens
  misc_RNA (1)...(19): siRNA sense strand
aaagauguuucucuguuuc

SEQ ID NO: 1386920 - RNA, 19 nt, Homo sapiens
  misc_RNA (1)...(19): siRNA sense strand
gggauguucuggugauauc

SEQ ID NO: 1386921 - RNA, 19 nt, Homo sapiens
  misc_RNA (1)...(19): siRNA sense strand
ugacaaaacuucucuagag

SEQ ID NO: 1386922 - RNA, 19 nt, Homo sapiens
  misc_RNA (1)...(19): siRNA sense strand
caggaagaguguucuaucu

SEQ ID NO: 1386923 - RNA, 19 nt, Homo sapiens
  misc_RNA (1)...(19): siRNA sense strand
ugaacgggauacauuacuu

SEQ ID NO: 1386924 - RNA, 19 nt, Homo sapiens
  misc_RNA (1)...(19): siRNA sense strand
ggugauaucagaagugcaa

SEQ ID NO: 1386925 - RNA, 19 nt, Homo sapiens
  misc_RNA (1)...(19): siRNA sense strand
gaaguucuaaggaaguaug

SEQ ID NO: 1386926 - RNA, 19 nt, Homo sapiens
  misc_RNA (1)...(19): siRNA sense strand
aauaugaacgggauacauu

SEQ ID NO: 1386927 - RNA, 19 nt, Homo sapiens
  misc_RNA (1)...(19): siRNA sense strand
cuauagaagcuaacaagaa

SEQ ID NO: 1386928 - RNA, 19 nt, Homo sapiens
  misc_RNA (1)...(19): siRNA sense strand
cgauguccucuuauauuua

SEQ ID NO: 1386929 - RNA, 19 nt, Homo sapiens
  misc_RNA (1)...(19): siRNA sense strand
auuggucgauguccucuua

SEQ ID NO: 1386930 - RNA, 19 nt, Homo sapiens
  misc_RNA (1)...(19): siRNA sense strand
agauaauucugguugaaga

SEQ ID NO: 1386931 - RNA, 19 nt, Homo sapiens
  misc_RNA (1)...(19): siRNA sense strand
ccuguggcaccaacaauua

SEQ ID NO: 1386932 - RNA, 19 nt, Homo sapiens
  misc_RNA (1)...(19): siRNA sense strand
gcgacacuuuggaagauug

SEQ ID NO: 1386933 - RNA, 19 nt, Homo sapiens
  misc_RNA (1)...(19): siRNA sense strand
ggaggaggaucaaguuuuc

SEQ ID NO: 1386934 - RNA, 19 nt, Homo sapiens
  misc_RNA (1)...(19): siRNA sense strand
gggauacauuacuuguuga

SEQ ID NO: 1386935 - RNA, 19 nt, Homo sapiens
  misc_RNA (1)...(19): siRNA sense strand
caauaaacagccuccaguu

SEQ ID NO: 1386936 - RNA, 19 nt, Homo sapiens
  misc_RNA (1)...(19): siRNA sense strand
aaucaagcuuccauauguu

SEQ ID NO: 1386937 - RNA, 19 nt, Homo sapiens
  misc_RNA (1)...(19): siRNA sense strand
caccaaaacuacauagauu

SEQ ID NO: 1386938 - RNA, 19 nt, Homo sapiens
  misc_RNA (1)...(19): siRNA sense strand
caguggagauaauaaucaa

SEQ ID NO: 1386939 - RNA, 19 nt, Homo sapiens
  misc_RNA (1)...(19): siRNA sense strand
ccaaggagacauggaagaa

SEQ ID NO: 1386940 - RNA, 19 nt, Homo sapiens
  misc_RNA (1)...(19): siRNA sense strand
gaauacacgcucuuuacuc

SEQ ID NO: 1386941 - RNA, 19 nt, Homo sapiens
  misc_RNA (1)...(19): siRNA sense strand
gcgacaaaguauaacaagu

SEQ ID NO: 1386942 - RNA, 19 nt, Homo sapiens
  misc_RNA (1)...(19): siRNA sense strand
gagcgacaaaguauaacaa

SEQ ID NO: 1386943 - RNA, 19 nt, Homo sapiens
  misc_RNA (1)...(19): siRNA sense strand
ucgguugcccucucauuua

SEQ ID NO: 1386944 - RNA, 19 nt, Homo sapiens
  misc_RNA (1)...(19): siRNA sense strand
ugacagggaacauggaaug

SEQ ID NO: 1386945 - RNA, 19 nt, Homo sapiens
  misc_RNA (1)...(19): siRNA sense strand
ggaauacacgcucuuuacu

SEQ ID NO: 1386946 - RNA, 19 nt, Homo sapiens
  misc_RNA (1)...(19): siRNA sense strand
guucuaaggaaguauguga

SEQ ID NO: 1386947 - RNA, 19 nt, Homo sapiens
  misc_RNA (1)...(19): siRNA sense strand
aaaaguaucgggaaaauug

SEQ ID NO: 1386948 - RNA, 19 nt, Homo sapiens
  misc_RNA (1)...(19): siRNA sense strand
acaaaugcuuggagaugau

SEQ ID NO: 1386949 - RNA, 19 nt, Homo sapiens
  misc_RNA (1)...(19): siRNA sense strand
gagagccagugaauuucug

SEQ ID NO: 1386950 - RNA, 19 nt, Homo sapiens
  misc_RNA (1)...(19): siRNA sense strand
acauagauuucuucaugga

SEQ ID NO: 1386951 - RNA, 19 nt, Homo sapiens
  misc_RNA (1)...(19): siRNA sense strand
ucagauagcaguuuucaaa

SEQ ID NO: 1386952 - RNA, 19 nt, Homo sapiens
  misc_RNA (1)...(19): siRNA sense strand
cuacuaagagcgacaaagu

SEQ ID NO: 1386953 - RNA, 19 nt, Homo sapiens
  misc_RNA (1)...(19): siRNA sense strand
ggaaugauagacccugaca

SEQ ID NO: 1386954 - RNA, 19 nt, Homo sapiens
  misc_RNA (1)...(19): siRNA sense strand
gguugaagauuuaccuaac

SEQ ID NO: 1386955 - RNA, 19 nt, Homo sapiens
  misc_RNA (1)...(19): siRNA sense strand
acuaagagcgacaaaguau

SEQ ID NO: 1386956 - RNA, 19 nt, Homo sapiens
  misc_RNA (1)...(19): siRNA sense strand
caaggagacauggaagaaa

SEQ ID NO: 1386957 - RNA, 19 nt, Homo sapiens
  misc_RNA (1)...(19): siRNA sense strand
uaucgggauucucauacuu

SEQ ID NO: 1386958 - RNA, 19 nt, Homo sapiens
  misc_RNA (1)...(19): siRNA sense strand
ugaaucaagcuuccauaug

SEQ ID NO: 1386959 - RNA, 19 nt, Homo sapiens
  misc_RNA (1)...(19): siRNA sense strand
cugaggagguaguagaaau

SEQ ID NO: 1386960 - RNA, 19 nt, Homo sapiens
  misc_RNA (1)...(19): siRNA sense strand
gucgauguccucuuauauu

SEQ ID NO: 1386961 - RNA, 19 nt, Homo sapiens
  misc_RNA (1)...(19): siRNA sense strand
gaaucaagcuuccauaugu

SEQ ID NO: 1386962 - RNA, 19 nt, Homo sapiens
  misc_RNA (1)...(19): siRNA sense strand
gcaaagauguuucucuguu

SEQ ID NO: 1386963 - RNA, 19 nt, Homo sapiens
  misc_RNA (1)...(19): siRNA sense strand
acacaugccuggagacuua

SEQ ID NO: 1386964 - RNA, 19 nt, Homo sapiens
  misc_RNA (1)...(19): siRNA sense strand
caacaaagcccgaggauau

SEQ ID NO: 1386965 - RNA, 19 nt, Homo sapiens
  misc_RNA (1)...(19): siRNA sense strand
ccaaagaaauucaggaaga

SEQ ID NO: 1386966 - RNA, 19 nt, Homo sapiens
  misc_RNA (1)...(19): siRNA sense strand
cuacauagauuucuucaug

SEQ ID NO: 1386967 - RNA, 19 nt, Homo sapiens
  misc_RNA (1)...(19): siRNA sense strand
ggaaauugaugauauugug

SEQ ID NO: 1386968 - RNA, 19 nt, Homo sapiens
  misc_RNA (1)...(19): siRNA sense strand
aaacucagcuauugccaua

SEQ ID NO: 1386969 - RNA, 19 nt, Homo sapiens
  misc_RNA (1)...(19): siRNA sense strand
gaagauaauucugguugaa

SEQ ID NO: 1386970 - RNA, 19 nt, Homo sapiens
  misc_RNA (1)...(19): siRNA sense strand
caaagauguuucucuguuu

SEQ ID NO: 1386971 - RNA, 19 nt, Homo sapiens
  misc_RNA (1)...(19): siRNA sense strand
guacaagaguggauuaauc

SEQ ID NO: 1386972 - RNA, 19 nt, Homo sapiens
  misc_RNA (1)...(19): siRNA sense strand
ggaagaguguucuaucuca

SEQ ID NO: 1386973 - RNA, 19 nt, Homo sapiens
  misc_RNA (1)...(19): siRNA sense strand
gaaagacaacgaccuuaaa

SEQ ID NO: 1386974 - RNA, 19 nt, Homo sapiens
  misc_RNA (1)...(19): siRNA sense strand
ggaaagacaacgaccuuaa

SEQ ID NO: 1386975 - RNA, 19 nt, Homo sapiens
  misc_RNA (1)...(19): siRNA sense strand
caaagaguuucuacuaaga

SEQ ID NO: 1386976 - RNA, 19 nt, Homo sapiens
  misc_RNA (1)...(19): siRNA sense strand
ccucagugguuucuaauaa

SEQ ID NO: 1386977 - RNA, 19 nt, Homo sapiens
  misc_RNA (1)...(19): siRNA sense strand
ccagugaauuucugaguuu

SEQ ID NO: 1386978 - RNA, 19 nt, Homo sapiens
  misc_RNA (1)...(19): siRNA sense strand
cagggaacauggaaugaua

SEQ ID NO: 1386979 - RNA, 19 nt, Homo sapiens
  misc_RNA (1)...(19): siRNA sense strand
uaagagcgacaaaguauaa

SEQ ID NO: 1386980 - RNA, 19 nt, Homo sapiens
  misc_RNA (1)...(19): siRNA sense strand
gagcaucuuuaacagaauu

SEQ ID NO: 1386981 - RNA, 19 nt, Homo sapiens
  misc_RNA (1)...(19): siRNA sense strand
ccuggagacuuauuuaauu

SEQ ID NO: 1386982 - RNA, 19 nt, Homo sapiens
  misc_RNA (1)...(19): siRNA sense strand
cgacaaaguauaacaaguu

SEQ ID NO: 1386983 - RNA, 19 nt, Homo sapiens
  misc_RNA (1)...(19): siRNA sense strand
ggagcaugguauucaagua

SEQ ID NO: 1386984 - RNA, 19 nt, Homo sapiens
  misc_RNA (1)...(19): siRNA sense strand
gaagaguguucuaucucaa

SEQ ID NO: 1386985 - RNA, 19 nt, Homo sapiens
  misc_RNA (1)...(19): siRNA sense strand
ucaaagaguuucuacuaag

SEQ ID NO: 1386986 - RNA, 19 nt, Homo sapiens
  misc_RNA (1)...(19): siRNA sense strand
gagaacugauaagaagaua

SEQ ID NO: 1386987 - RNA, 19 nt, Homo sapiens
  misc_RNA (1)...(19): siRNA sense strand
gcucuuuacucagggaaua

SEQ ID NO: 1386988 - RNA, 19 nt, Homo sapiens
  misc_RNA (1)...(19): siRNA sense strand
cgggauacauuacuuguug

SEQ ID NO: 1386989 - RNA, 19 nt, Homo sapiens
  misc_RNA (1)...(19): siRNA sense strand
ucgauguccucuuauauuu

SEQ ID NO: 1386990 - RNA, 19 nt, Homo sapiens
  misc_RNA (1)...(19): siRNA sense strand
agauuuaccuaaccaguuu

SEQ ID NO: 1386991 - RNA, 19 nt, Homo sapiens
  misc_RNA (1)...(19): siRNA sense strand
ggaaguaugugaggauugg

SEQ ID NO: 1386992 - RNA, 19 nt, Homo sapiens
  misc_RNA (1)...(19): siRNA sense strand
gauaucagaagugcaauaa

SEQ ID NO: 1386993 - RNA, 19 nt, Homo sapiens
  misc_RNA (1)...(19): siRNA sense strand
gcaccaacaauuaugauga

SEQ ID NO: 1386994 - RNA, 19 nt, Homo sapiens
  misc_RNA (1)...(19): siRNA sense strand
aaacaggguggaucuauuu

SEQ ID NO: 1386995 - RNA, 19 nt, Homo sapiens
  misc_RNA (1)...(19): siRNA sense strand
gaugaucugagaacugaua

SEQ ID NO: 1386996 - RNA, 19 nt, Homo sapiens
  misc_RNA (1)...(19): siRNA sense strand
ggguggaucuauuuuauua

SEQ ID NO: 1386997 - RNA, 19 nt, Homo sapiens
  misc_RNA (1)...(19): siRNA sense strand
uaucagaagugcaauaaac

SEQ ID NO: 1386998 - RNA, 19 nt, Homo sapiens
  misc_RNA (1)...(19): siRNA sense strand
ugugagagccagugaauuu

SEQ ID NO: 1386999 - RNA, 19 nt, Homo sapiens
  misc_RNA (1)...(19): siRNA sense strand
caaaggagcaugguauuca

SEQ ID NO: 1387000 - RNA, 19 nt, Homo sapiens
  misc_RNA (1)...(19): siRNA sense strand
ccggaaaccuggucucuuc

SEQ ID NO: 1387001 - RNA, 19 nt, Homo sapiens
  misc_RNA (1)...(19): siRNA sense strand
gaagcgacacuuuggaaga

SEQ ID NO: 1387002 - RNA, 19 nt, Homo sapiens
  misc_RNA (1)...(19): siRNA sense strand
cgagaggugugaugcauuc

SEQ ID NO: 1387003 - RNA, 19 nt, Homo sapiens
  misc_RNA (1)...(19): siRNA sense strand
cagaugcugugcugucaaa

SEQ ID NO: 1387004 - RNA, 19 nt, Homo sapiens
  misc_RNA (1)...(19): siRNA sense strand
caccaacaauuaugaugaa

SEQ ID NO: 1387005 - RNA, 19 nt, Homo sapiens
  misc_RNA (1)...(19): siRNA sense strand
gaacgggauacauuacuug

SEQ ID NO: 1387006 - RNA, 19 nt, Homo sapiens
  misc_RNA (1)...(19): siRNA sense strand
gaucugagaacugauaaga

SEQ ID NO: 1387007 - RNA, 19 nt, Homo sapiens
  misc_RNA (1)...(19): siRNA sense strand
uaacaagaauggaggaaaa

SEQ ID NO: 1387008 - RNA, 19 nt, Homo sapiens
  misc_RNA (1)...(19): siRNA sense strand
caaguacaagaguggauua

SEQ ID NO: 1387009 - RNA, 19 nt, Homo sapiens
  misc_RNA (1)...(19): siRNA sense strand
gaaaccuggucucuuccuu

SEQ ID NO: 1387010 - RNA, 19 nt, Homo sapiens
  misc_RNA (1)...(19): siRNA sense strand
guuauuguuucccaaagaa

SEQ ID NO: 1387011 - RNA, 19 nt, Homo sapiens
  misc_RNA (1)...(19): siRNA sense strand
uacaugaaguucuaaggaa

SEQ ID NO: 1387012 - RNA, 19 nt, Homo sapiens
  misc_RNA (1)...(19): siRNA sense strand
ucugagaacugauaagaag

SEQ ID NO: 1387013 - RNA, 19 nt, Homo sapiens
  misc_RNA (1)...(19): siRNA sense strand
aauacacgcucuuuacuca

SEQ ID NO: 1387014 - RNA, 19 nt, Homo sapiens
  misc_RNA (1)...(19): siRNA sense strand
caacuuacggccaaggaaa

SEQ ID NO: 1387015 - RNA, 19 nt, Homo sapiens
  misc_RNA (1)...(19): siRNA sense strand
caaagaaauucaggaagag

SEQ ID NO: 1387016 - RNA, 19 nt, Homo sapiens
  misc_RNA (1)...(19): siRNA sense strand
ggagguaguagaaauguca

SEQ ID NO: 1387017 - RNA, 19 nt, Homo sapiens
  misc_RNA (1)...(19): siRNA sense strand
gccagugaauuucugaguu

SEQ ID NO: 1387018 - RNA, 19 nt, Homo sapiens
  misc_RNA (1)...(19): siRNA sense strand
uacaaaugcuuggagauga

SEQ ID NO: 1387019 - RNA, 19 nt, Homo sapiens
  misc_RNA (1)...(19): siRNA sense strand
ugaacuugcugugcauaaa

SEQ ID NO: 1387020 - RNA, 19 nt, Homo sapiens
  misc_RNA (1)...(19): siRNA sense strand
ccucucauuuaucagaaua

SEQ ID NO: 1387021 - RNA, 19 nt, Homo sapiens
  misc_RNA (1)...(19): siRNA sense strand
caagagguccaagcuauug

SEQ ID NO: 1387022 - RNA, 19 nt, Homo sapiens
  misc_RNA (1)...(19): siRNA sense strand
ucgggauucucauacuuua

SEQ ID NO: 1387023 - RNA, 19 nt, Homo sapiens
  misc_RNA (1)...(19): siRNA sense strand
gguuauuguuucccaaaga

SEQ ID NO: 1387024 - RNA, 19 nt, Homo sapiens
  misc_RNA (1)...(19): siRNA sense strand
gccauaccuugcucuacua

SEQ ID NO: 1387025 - RNA, 19 nt, Homo sapiens
  misc_RNA (1)...(19): siRNA sense strand
caaggaggaggaucaaguu

SEQ ID NO: 1387026 - RNA, 19 nt, Homo sapiens
  misc_RNA (1)...(19): siRNA sense strand
ugugaugcauuccaacaaa

SEQ ID NO: 1387027 - RNA, 19 nt, Homo sapiens
  misc_RNA (1)...(19): siRNA sense strand
gaggugugaugcauuccaa

SEQ ID NO: 1387028 - RNA, 19 nt, Homo sapiens
  misc_RNA (1)...(19): siRNA sense strand
aaagauguuucucuguuuc

SEQ ID NO: 1387029 - RNA, 19 nt, Homo sapiens
  misc_RNA (1)...(19): siRNA sense strand
gggauguucuggugauauc

SEQ ID NO: 1387030 - RNA, 19 nt, Homo sapiens
  misc_RNA (1)...(19): siRNA sense strand
ugacaaaacuucucuagag

SEQ ID NO: 1387031 - RNA, 19 nt, Homo sapiens
  misc_RNA (1)...(19): siRNA sense strand
caggaagaguguucuaucu

SEQ ID NO: 1387032 - RNA, 19 nt, Homo sapiens
  misc_RNA (1)...(19): siRNA sense strand
ugaacgggauacauuacuu

SEQ ID NO: 1387033 - RNA, 19 nt, Homo sapiens
  misc_RNA (1)...(19): siRNA sense strand
ggugauaucagaagugcaa

SEQ ID NO: 1387034 - RNA, 19 nt, Homo sapiens
  misc_RNA (1)...(19): siRNA sense strand
agauaauucugguugaaga

SEQ ID NO: 1387035 - RNA, 19 nt, Homo sapiens
  misc_RNA (1)...(19): siRNA sense strand
aaaggagcaugguauucaa

SEQ ID NO: 1387036 - RNA, 19 nt, Homo sapiens
  misc_RNA (1)...(19): siRNA sense strand
aauaugaacgggauacauu

SEQ ID NO: 1387037 - RNA, 19 nt, Homo sapiens
  misc_RNA (1)...(19): siRNA sense strand
cuauagaagcuaacaagaa

SEQ ID NO: 1387038 - RNA, 19 nt, Homo sapiens
  misc_RNA (1)...(19): siRNA sense strand
cgauguccucuuauauuua

SEQ ID NO: 1387039 - RNA, 19 nt, Homo sapiens
  misc_RNA (1)...(19): siRNA sense strand
auuggucgauguccucuua

SEQ ID NO: 1387040 - RNA, 19 nt, Homo sapiens
  misc_RNA (1)...(19): siRNA sense strand
gaaguucuaaggaaguaug

SEQ ID NO: 1387041 - RNA, 19 nt, Homo sapiens
  misc_RNA (1)...(19): siRNA sense strand
ccuguggcaccaacaauua

SEQ ID NO: 1387042 - RNA, 19 nt, Homo sapiens
  misc_RNA (1)...(19): siRNA sense strand
gcgacacuuuggaagauug

SEQ ID NO: 1387043 - RNA, 19 nt, Homo sapiens
  misc_RNA (1)...(19): siRNA sense strand
ggaggaggaucaaguuuuc

SEQ ID NO: 1387044 - RNA, 19 nt, Homo sapiens
  misc_RNA (1)...(19): siRNA sense strand
gggauacauuacuuguuga

SEQ ID NO: 1387045 - RNA, 19 nt, Homo sapiens
  misc_RNA (1)...(19): siRNA sense strand
uaucaaaggagcaugguau

SEQ ID NO: 1387046 - RNA, 19 nt, Homo sapiens
  misc_RNA (1)...(19): siRNA sense strand
aaucaagcuuccauauguu

SEQ ID NO: 1387047 - RNA, 19 nt, Homo sapiens
  misc_RNA (1)...(19): siRNA sense strand
caccaaaacuacauagauu

SEQ ID NO: 1387048 - RNA, 19 nt, Homo sapiens
  misc_RNA (1)...(19): siRNA sense strand
caauaaacagccuccaguu

SEQ ID NO: 1387049 - RNA, 19 nt, Homo sapiens
  misc_RNA (1)...(19): siRNA sense strand
gagcgacaaaguauaacaa

SEQ ID NO: 1387050 - RNA, 19 nt, Homo sapiens
  misc_RNA (1)...(19): siRNA sense strand
ccaaggagacauggaagaa

SEQ ID NO: 1387051 - RNA, 19 nt, Homo sapiens
  misc_RNA (1)...(19): siRNA sense strand
gaauacacgcucuuuacuc

SEQ ID NO: 1387052 - RNA, 19 nt, Homo sapiens
  misc_RNA (1)...(19): siRNA sense strand
caguggagauaauaaucaa

SEQ ID NO: 1387053 - RNA, 19 nt, Homo sapiens
  misc_RNA (1)...(19): siRNA sense strand
gcgacaaaguauaacaagu

SEQ ID NO: 1387054 - RNA, 19 nt, Homo sapiens
  misc_RNA (1)...(19): siRNA sense strand
gcaugguauucaaguacaa

SEQ ID NO: 1387055 - RNA, 19 nt, Homo sapiens
  misc_RNA (1)...(19): siRNA sense strand
ugacagggaacauggaaug

SEQ ID NO: 1387056 - RNA, 19 nt, Homo sapiens
  misc_RNA (1)...(19): siRNA sense strand
ggaauacacgcucuuuacu

SEQ ID NO: 1387057 - RNA, 19 nt, Homo sapiens
  misc_RNA (1)...(19): siRNA sense strand
ucgguugcccucucauuua

SEQ ID NO: 1387058 - RNA, 19 nt, Homo sapiens
  misc_RNA (1)...(19): siRNA sense strand
gagagccagugaauuucug

SEQ ID NO: 1387059 - RNA, 19 nt, Homo sapiens
  misc_RNA (1)...(19): siRNA sense strand
aaaaguaucgggaaaauug

SEQ ID NO: 1387060 - RNA, 19 nt, Homo sapiens
  misc_RNA (1)...(19): siRNA sense strand
gcaugaacuugcugugcau

SEQ ID NO: 1387061 - RNA, 19 nt, Homo sapiens
  misc_RNA (1)...(19): siRNA sense strand
gaaucaagcuuccauaugu

SEQ ID NO: 1387062 - RNA, 19 nt, Homo sapiens
  misc_RNA (1)...(19): siRNA sense strand
gcaaagauguuucucuguu

SEQ ID NO: 1387063 - RNA, 19 nt, Homo sapiens
  misc_RNA (1)...(19): siRNA sense strand
acacaugccuggagacuua

SEQ ID NO: 1387064 - RNA, 19 nt, Homo sapiens
  misc_RNA (1)...(19): siRNA sense strand
caacaaagcccgaggauau

SEQ ID NO: 1387065 - RNA, 19 nt, Homo sapiens
  misc_RNA (1)...(19): siRNA sense strand
ccaaagaaauucaggaaga

SEQ ID NO: 1387066 - RNA, 19 nt, Homo sapiens
  misc_RNA (1)...(19): siRNA sense strand
cuacauagauuucuucaug

SEQ ID NO: 1387067 - RNA, 19 nt, Homo sapiens
  misc_RNA (1)...(19): siRNA sense strand
ggaaauugaugauauugug

SEQ ID NO: 1387068 - RNA, 19 nt, Homo sapiens
  misc_RNA (1)...(19): siRNA sense strand
aaacucagcuauugccaua

SEQ ID NO: 1387069 - RNA, 19 nt, Homo sapiens
  misc_RNA (1)...(19): siRNA sense strand
gaagauaauucugguugaa

SEQ ID NO: 1387070 - RNA, 19 nt, Homo sapiens
  misc_RNA (1)...(19): siRNA sense strand
caaagauguuucucuguuu

SEQ ID NO: 1387071 - RNA, 19 nt, Homo sapiens
  misc_RNA (1)...(19): siRNA sense strand
guacaagaguggauuaauc

SEQ ID NO: 1387072 - RNA, 19 nt, Homo sapiens
  misc_RNA (1)...(19): siRNA sense strand
ggaagaguguucuaucuca

SEQ ID NO: 1387073 - RNA, 19 nt, Homo sapiens
  misc_RNA (1)...(19): siRNA sense strand
gaaagacaacgaccuuaaa

SEQ ID NO: 1387074 - RNA, 19 nt, Homo sapiens
  misc_RNA (1)...(19): siRNA sense strand
ggaaagacaacgaccuuaa

SEQ ID NO: 1387075 - RNA, 19 nt, Homo sapiens
  misc_RNA (1)...(19): siRNA sense strand
caaagaguuucuacuaaga

SEQ ID NO: 1387076 - RNA, 19 nt, Homo sapiens
  misc_RNA (1)...(19): siRNA sense strand
ccucagugguuucuaauaa

SEQ ID NO: 1387077 - RNA, 19 nt, Homo sapiens
  misc_RNA (1)...(19): siRNA sense strand
ccagugaauuucugaguuu

SEQ ID NO: 1387078 - RNA, 19 nt, Homo sapiens
  misc_RNA (1)...(19): siRNA sense strand
cagggaacauggaaugaua

SEQ ID NO: 1387079 - RNA, 19 nt, Homo sapiens
  misc_RNA (1)...(19): siRNA sense strand
uaagagcgacaaaguauaa

SEQ ID NO: 1387080 - RNA, 19 nt, Homo sapiens
  misc_RNA (1)...(19): siRNA sense strand
gagcaucuuuaacagaauu

SEQ ID NO: 1387081 - RNA, 19 nt, Homo sapiens
  misc_RNA (1)...(19): siRNA sense strand
ccuggagacuuauuuaauu

SEQ ID NO: 1387082 - RNA, 19 nt, Homo sapiens
  misc_RNA (1)...(19): siRNA sense strand
cgacaaaguauaacaaguu

SEQ ID NO: 1387083 - RNA, 19 nt, Homo sapiens
  misc_RNA (1)...(19): siRNA sense strand
ggagcaugguauucaagua

SEQ ID NO: 1387084 - RNA, 19 nt, Homo sapiens
  misc_RNA (1)...(19): siRNA sense strand
gaagaguguucuaucucaa

SEQ ID NO: 1387085 - RNA, 19 nt, Homo sapiens
  misc_RNA (1)...(19): siRNA sense strand
ucaaagaguuucuacuaag

SEQ ID NO: 1387086 - RNA, 19 nt, Homo sapiens
  misc_RNA (1)...(19): siRNA sense strand
gagaacugauaagaagaua

SEQ ID NO: 1387087 - RNA, 19 nt, Homo sapiens
  misc_RNA (1)...(19): siRNA sense strand
gcucuuuacucagggaaua

SEQ ID NO: 1387088 - RNA, 19 nt, Homo sapiens
  misc_RNA (1)...(19): siRNA sense strand
cgggauacauuacuuguug

SEQ ID NO: 1387089 - RNA, 19 nt, Homo sapiens
  misc_RNA (1)...(19): siRNA sense strand
ucgauguccucuuauauuu

SEQ ID NO: 1387090 - RNA, 19 nt, Homo sapiens
  misc_RNA (1)...(19): siRNA sense strand
agauuuaccuaaccaguuu

SEQ ID NO: 1387091 - RNA, 19 nt, Homo sapiens
  misc_RNA (1)...(19): siRNA sense strand
ggaaguaugugaggauugg

SEQ ID NO: 1387092 - RNA, 19 nt, Homo sapiens
  misc_RNA (1)...(19): siRNA sense strand
gauaucagaagugcaauaa

SEQ ID NO: 1387093 - RNA, 19 nt, Homo sapiens
  misc_RNA (1)...(19): siRNA sense strand
gcaccaacaauuaugauga

SEQ ID NO: 1387094 - RNA, 19 nt, Homo sapiens
  misc_RNA (1)...(19): siRNA sense strand
aaacaggguggaucuauuu

SEQ ID NO: 1387095 - RNA, 19 nt, Homo sapiens
  misc_RNA (1)...(19): siRNA sense strand
gaugaucugagaacugaua

SEQ ID NO: 1387096 - RNA, 19 nt, Homo sapiens
  misc_RNA (1)...(19): siRNA sense strand
ggguggaucuauuuuauua

SEQ ID NO: 1387097 - RNA, 19 nt, Homo sapiens
  misc_RNA (1)...(19): siRNA sense strand
uaucagaagugcaauaaac

SEQ ID NO: 1387098 - RNA, 19 nt, Homo sapiens
  misc_RNA (1)...(19): siRNA sense strand
ugugagagccagugaauuu

SEQ ID NO: 1387099 - RNA, 19 nt, Homo sapiens
  misc_RNA (1)...(19): siRNA sense strand
caaaggagcaugguauuca

SEQ ID NO: 1387100 - RNA, 19 nt, Homo sapiens
  misc_RNA (1)...(19): siRNA sense strand
ccggaaaccuggucucuuc

SEQ ID NO: 1387101 - RNA, 19 nt, Homo sapiens
  misc_RNA (1)...(19): siRNA sense strand
gaagcgacacuuuggaaga

SEQ ID NO: 1387102 - RNA, 19 nt, Homo sapiens
  misc_RNA (1)...(19): siRNA sense strand
cgagaggugugaugcauuc

SEQ ID NO: 1387103 - RNA, 19 nt, Homo sapiens
  misc_RNA (1)...(19): siRNA sense strand
cagaugcugugcugucaaa

SEQ ID NO: 1387104 - RNA, 19 nt, Homo sapiens
  misc_RNA (1)...(19): siRNA sense strand
caccaacaauuaugaugaa

SEQ ID NO: 1387105 - RNA, 19 nt, Homo sapiens
  misc_RNA (1)...(19): siRNA sense strand
gaacgggauacauuacuug

SEQ ID NO: 1387106 - RNA, 19 nt, Homo sapiens
  misc_RNA (1)...(19): siRNA sense strand
gaucugagaacugauaaga

SEQ ID NO: 1387107 - RNA, 19 nt, Homo sapiens
  misc_RNA (1)...(19): siRNA sense strand
uaacaagaauggaggaaaa

SEQ ID NO: 1387108 - RNA, 19 nt, Homo sapiens
  misc_RNA (1)...(19): siRNA sense strand
caaguacaagaguggauua

SEQ ID NO: 1387109 - RNA, 19 nt, Homo sapiens
  misc_RNA (1)...(19): siRNA sense strand
gaaaccuggucucuuccuu

SEQ ID NO: 1387110 - RNA, 19 nt, Homo sapiens
  misc_RNA (1)...(19): siRNA sense strand
guuauuguuucccaaagaa

SEQ ID NO: 1387111 - RNA, 19 nt, Homo sapiens
  misc_RNA (1)...(19): siRNA sense strand
uacaugaaguucuaaggaa

SEQ ID NO: 1387112 - RNA, 19 nt, Homo sapiens
  misc_RNA (1)...(19): siRNA sense strand
ucugagaacugauaagaag

SEQ ID NO: 1387113 - RNA, 19 nt, Homo sapiens
  misc_RNA (1)...(19): siRNA sense strand
aauacacgcucuuuacuca

SEQ ID NO: 1387114 - RNA, 19 nt, Homo sapiens
  misc_RNA (1)...(19): siRNA sense strand
caacuuacggccaaggaaa

SEQ ID NO: 1387115 - RNA, 19 nt, Homo sapiens
  misc_RNA (1)...(19): siRNA sense strand
caaagaaauucaggaagag

SEQ ID NO: 1387116 - RNA, 19 nt, Homo sapiens
  misc_RNA (1)...(19): siRNA sense strand
ggagguaguagaaauguca

SEQ ID NO: 1387117 - RNA, 19 nt, Homo sapiens
  misc_RNA (1)...(19): siRNA sense strand
gccagugaauuucugaguu

SEQ ID NO: 1387118 - RNA, 19 nt, Homo sapiens
  misc_RNA (1)...(19): siRNA sense strand
uacaaaugcuuggagauga

SEQ ID NO: 1387119 - RNA, 19 nt, Homo sapiens
  misc_RNA (1)...(19): siRNA sense strand
ugaacuugcugugcauaaa

SEQ ID NO: 1387120 - RNA, 19 nt, Homo sapiens
  misc_RNA (1)...(19): siRNA sense strand
ccucucauuuaucagaaua

SEQ ID NO: 1387121 - RNA, 19 nt, Homo sapiens
  misc_RNA (1)...(19): siRNA sense strand
caagagguccaagcuauug

SEQ ID NO: 1387122 - RNA, 19 nt, Homo sapiens
  misc_RNA (1)...(19): siRNA sense strand
ucgggauucucauacuuua

SEQ ID NO: 1387123 - RNA, 19 nt, Homo sapiens
  misc_RNA (1)...(19): siRNA sense strand
gguuauuguuucccaaaga

SEQ ID NO: 1387124 - RNA, 19 nt, Homo sapiens
  misc_RNA (1)...(19): siRNA sense strand
gccauaccuugcucuacua

SEQ ID NO: 1387125 - RNA, 19 nt, Homo sapiens
  misc_RNA (1)...(19): siRNA sense strand
caaggaggaggaucaaguu

SEQ ID NO: 1387126 - RNA, 19 nt, Homo sapiens
  misc_RNA (1)...(19): siRNA sense strand
ugugaugcauuccaacaaa

SEQ ID NO: 1387127 - RNA, 19 nt, Homo sapiens
  misc_RNA (1)...(19): siRNA sense strand
gaggugugaugcauuccaa

SEQ ID NO: 1387128 - RNA, 19 nt, Homo sapiens
  misc_RNA (1)...(19): siRNA sense strand
aaagauguuucucuguuuc

SEQ ID NO: 1387129 - RNA, 19 nt, Homo sapiens
  misc_RNA (1)...(19): siRNA sense strand
gggauguucuggugauauc

SEQ ID NO: 1387130 - RNA, 19 nt, Homo sapiens
  misc_RNA (1)...(19): siRNA sense strand
ugacaaaacuucucuagag

SEQ ID NO: 1387131 - RNA, 19 nt, Homo sapiens
  misc_RNA (1)...(19): siRNA sense strand
caggaagaguguucuaucu

SEQ ID NO: 1387132 - RNA, 19 nt, Homo sapiens
  misc_RNA (1)...(19): siRNA sense strand
ugaacgggauacauuacuu

SEQ ID NO: 1387133 - RNA, 19 nt, Homo sapiens
  misc_RNA (1)...(19): siRNA sense strand
ggugauaucagaagugcaa

SEQ ID NO: 1387134 - RNA, 19 nt, Homo sapiens
  misc_RNA (1)...(19): siRNA sense strand
agauaauucugguugaaga

SEQ ID NO: 1387135 - RNA, 19 nt, Homo sapiens
  misc_RNA (1)...(19): siRNA sense strand
aaaggagcaugguauucaa

SEQ ID NO: 1387136 - RNA, 19 nt, Homo sapiens
  misc_RNA (1)...(19): siRNA sense strand
aauaugaacgggauacauu

SEQ ID NO: 1387137 - RNA, 19 nt, Homo sapiens
  misc_RNA (1)...(19): siRNA sense strand
cuauagaagcuaacaagaa

SEQ ID NO: 1387138 - RNA, 19 nt, Homo sapiens
  misc_RNA (1)...(19): siRNA sense strand
cgauguccucuuauauuua

SEQ ID NO: 1387139 - RNA, 19 nt, Homo sapiens
  misc_RNA (1)...(19): siRNA sense strand
auuggucgauguccucuua

SEQ ID NO: 1387140 - RNA, 19 nt, Homo sapiens
  misc_RNA (1)...(19): siRNA sense strand
gaaguucuaaggaaguaug

SEQ ID NO: 1387141 - RNA, 19 nt, Homo sapiens
  misc_RNA (1)...(19): siRNA sense strand
ccuguggcaccaacaauua

SEQ ID NO: 1387142 - RNA, 19 nt, Homo sapiens
  misc_RNA (1)...(19): siRNA sense strand
gcgacacuuuggaagauug

SEQ ID NO: 1387143 - RNA, 19 nt, Homo sapiens
  misc_RNA (1)...(19): siRNA sense strand
ggaggaggaucaaguuuuc

SEQ ID NO: 1387144 - RNA, 19 nt, Homo sapiens
  misc_RNA (1)...(19): siRNA sense strand
gggauacauuacuuguuga

SEQ ID NO: 1387145 - RNA, 19 nt, Homo sapiens
  misc_RNA (1)...(19): siRNA sense strand
uaucaaaggagcaugguau

SEQ ID NO: 1387146 - RNA, 19 nt, Homo sapiens
  misc_RNA (1)...(19): siRNA sense strand
aaucaagcuuccauauguu

SEQ ID NO: 1387147 - RNA, 19 nt, Homo sapiens
  misc_RNA (1)...(19): siRNA sense strand
caccaaaacuacauagauu

SEQ ID NO: 1387148 - RNA, 19 nt, Homo sapiens
  misc_RNA (1)...(19): siRNA sense strand
caauaaacagccuccaguu

SEQ ID NO: 1387149 - RNA, 19 nt, Homo sapiens
  misc_RNA (1)...(19): siRNA sense strand
gagcgacaaaguauaacaa

SEQ ID NO: 1387150 - RNA, 19 nt, Homo sapiens
  misc_RNA (1)...(19): siRNA sense strand
ccaaggagacauggaagaa

SEQ ID NO: 1387151 - RNA, 19 nt, Homo sapiens
  misc_RNA (1)...(19): siRNA sense strand
gaauacacgcucuuuacuc

SEQ ID NO: 1387152 - RNA, 19 nt, Homo sapiens
  misc_RNA (1)...(19): siRNA sense strand
caguggagauaauaaucaa

SEQ ID NO: 1387153 - RNA, 19 nt, Homo sapiens
  misc_RNA (1)...(19): siRNA sense strand
gcgacaaaguauaacaagu

SEQ ID NO: 1387154 - RNA, 19 nt, Homo sapiens
  misc_RNA (1)...(19): siRNA sense strand
gcaugguauucaaguacaa

SEQ ID NO: 1387155 - RNA, 19 nt, Homo sapiens
  misc_RNA (1)...(19): siRNA sense strand
ugacagggaacauggaaug

SEQ ID NO: 1387156 - RNA, 19 nt, Homo sapiens
  misc_RNA (1)...(19): siRNA sense strand
ggaauacacgcucuuuacu

SEQ ID NO: 1387157 - RNA, 19 nt, Homo sapiens
  misc_RNA (1)...(19): siRNA sense strand
ucgguugcccucucauuua

SEQ ID NO: 1387158 - RNA, 19 nt, Homo sapiens
  misc_RNA (1)...(19): siRNA sense strand
gagagccagugaauuucug

SEQ ID NO: 1387159 - RNA, 19 nt, Homo sapiens
  misc_RNA (1)...(19): siRNA sense strand
aaaaguaucgggaaaauug

SEQ ID NO: 1387160 - RNA, 19 nt, Homo sapiens
  misc_RNA (1)...(19): siRNA sense strand
gcaugaacuugcugugcau

SEQ ID NO: 1387161 - RNA, 19 nt, Homo sapiens
  misc_RNA (1)...(19): siRNA sense strand
gaaucaagcuuccauaugu

SEQ ID NO: 1387162 - RNA, 19 nt, Homo sapiens
  misc_RNA (1)...(19): siRNA sense strand
gcaaagauguuucucuguu

SEQ ID NO: 1387163 - RNA, 19 nt, Homo sapiens
  misc_RNA (1)...(19): siRNA sense strand
acacaugccuggagacuua

SEQ ID NO: 1387164 - RNA, 19 nt, Homo sapiens
  misc_RNA (1)...(19): siRNA sense strand
caacaaagcccgaggauau

SEQ ID NO: 1387165 - RNA, 19 nt, Homo sapiens
  misc_RNA (1)...(19): siRNA sense strand
ccaaagaaauucaggaaga

SEQ ID NO: 1387166 - RNA, 19 nt, Homo sapiens
  misc_RNA (1)...(19): siRNA sense strand
cuacauagauuucuucaug

SEQ ID NO: 1387167 - RNA, 19 nt, Homo sapiens
  misc_RNA (1)...(19): siRNA sense strand
ggaaauugaugauauugug

SEQ ID NO: 1387168 - RNA, 19 nt, Homo sapiens
  misc_RNA (1)...(19): siRNA sense strand
aaacucagcuauugccaua

SEQ ID NO: 1387169 - RNA, 19 nt, Homo sapiens
  misc_RNA (1)...(19): siRNA sense strand
gaagauaauucugguugaa

SEQ ID NO: 1387170 - RNA, 19 nt, Homo sapiens
  misc_RNA (1)...(19): siRNA sense strand
caaagauguuucucuguuu

SEQ ID NO: 1387171 - RNA, 19 nt, Homo sapiens
  misc_RNA (1)...(19): siRNA sense strand
guacaagaguggauuaauc

SEQ ID NO: 1387172 - RNA, 19 nt, Homo sapiens
  misc_RNA (1)...(19): siRNA sense strand
ggaagaguguucuaucuca

SEQ ID NO: 1387173 - RNA, 19 nt, Homo sapiens
  misc_RNA (1)...(19): siRNA sense strand
gaaagacaacgaccuuaaa

SEQ ID NO: 1387174 - RNA, 19 nt, Homo sapiens
  misc_RNA (1)...(19): siRNA sense strand
ggaaagacaacgaccuuaa

SEQ ID NO: 1387175 - RNA, 19 nt, Homo sapiens
  misc_RNA (1)...(19): siRNA sense strand
caaagaguuucuacuaaga

SEQ ID NO: 1387176 - RNA, 19 nt, Homo sapiens
  misc_RNA (1)...(19): siRNA sense strand
ccucagugguuucuaauaa

SEQ ID NO: 1387177 - RNA, 19 nt, Homo sapiens
  misc_RNA (1)...(19): siRNA sense strand
ccagugaauuucugaguuu

SEQ ID NO: 1387178 - RNA, 19 nt, Homo sapiens
  misc_RNA (1)...(19): siRNA sense strand
cagggaacauggaaugaua

SEQ ID NO: 1387179 - RNA, 19 nt, Homo sapiens
  misc_RNA (1)...(19): siRNA sense strand
uaagagcgacaaaguauaa

SEQ ID NO: 1387180 - RNA, 19 nt, Homo sapiens
  misc_RNA (1)...(19): siRNA sense strand
gagcaucuuuaacagaauu

SEQ ID NO: 1387181 - RNA, 19 nt, Homo sapiens
  misc_RNA (1)...(19): siRNA sense strand
ccuggagacuuauuuaauu

SEQ ID NO: 1387182 - RNA, 19 nt, Homo sapiens
  misc_RNA (1)...(19): siRNA sense strand
cgacaaaguauaacaaguu

SEQ ID NO: 1387183 - RNA, 19 nt, Homo sapiens
  misc_RNA (1)...(19): siRNA sense strand
ggagcaugguauucaagua

SEQ ID NO: 1387184 - RNA, 19 nt, Homo sapiens
  misc_RNA (1)...(19): siRNA sense strand
gaagaguguucuaucucaa

SEQ ID NO: 1387185 - RNA, 19 nt, Homo sapiens
  misc_RNA (1)...(19): siRNA sense strand
ucaaagaguuucuacuaag

SEQ ID NO: 1387186 - RNA, 19 nt, Homo sapiens
  misc_RNA (1)...(19): siRNA sense strand
gagaacugauaagaagaua

SEQ ID NO: 1387187 - RNA, 19 nt, Homo sapiens
  misc_RNA (1)...(19): siRNA sense strand
gcucuuuacucagggaaua

SEQ ID NO: 1387188 - RNA, 19 nt, Homo sapiens
  misc_RNA (1)...(19): siRNA sense strand
cgggauacauuacuuguug

SEQ ID NO: 1387189 - RNA, 19 nt, Homo sapiens
  misc_RNA (1)...(19): siRNA sense strand
ucgauguccucuuauauuu

SEQ ID NO: 1387190 - RNA, 19 nt, Homo sapiens
  misc_RNA (1)...(19): siRNA sense strand
agauuuaccuaaccaguuu

SEQ ID NO: 1387191 - RNA, 19 nt, Homo sapiens
  misc_RNA (1)...(19): siRNA sense strand
ggaaguaugugaggauugg

SEQ ID NO: 1387192 - RNA, 19 nt, Homo sapiens
  misc_RNA (1)...(19): siRNA sense strand
gauaucagaagugcaauaa

SEQ ID NO: 1387193 - RNA, 19 nt, Homo sapiens
  misc_RNA (1)...(19): siRNA sense strand
gcaccaacaauuaugauga

SEQ ID NO: 1387194 - RNA, 19 nt, Homo sapiens
  misc_RNA (1)...(19): siRNA sense strand
aaacaggguggaucuauuu

SEQ ID NO: 1387195 - RNA, 19 nt, Homo sapiens
  misc_RNA (1)...(19): siRNA sense strand
gaugaucugagaacugaua

SEQ ID NO: 1387196 - RNA, 19 nt, Homo sapiens
  misc_RNA (1)...(19): siRNA sense strand
ggguggaucuauuuuauua

SEQ ID NO: 1387197 - RNA, 19 nt, Homo sapiens
  misc_RNA (1)...(19): siRNA sense strand
uaucagaagugcaauaaac

SEQ ID NO: 1387198 - RNA, 19 nt, Homo sapiens
  misc_RNA (1)...(19): siRNA sense strand
ugugagagccagugaauuu

SEQ ID NO: 1387199 - RNA, 19 nt, Homo sapiens
  misc_RNA (1)...(19): siRNA sense strand
caaaggagcaugguauuca

SEQ ID NO: 1387200 - RNA, 19 nt, Homo sapiens
  misc_RNA (1)...(19): siRNA sense strand
ccggaaaccuggucucuuc

SEQ ID NO: 1387201 - RNA, 19 nt, Homo sapiens
  misc_RNA (1)...(19): siRNA sense strand
gaagcgacacuuuggaaga

SEQ ID NO: 1387202 - RNA, 19 nt, Homo sapiens
  misc_RNA (1)...(19): siRNA sense strand
cgagaggugugaugcauuc

SEQ ID NO: 1387203 - RNA, 19 nt, Homo sapiens
  misc_RNA (1)...(19): siRNA sense strand
cagaugcugugcugucaaa

SEQ ID NO: 1387204 - RNA, 19 nt, Homo sapiens
  misc_RNA (1)...(19): siRNA sense strand
caccaacaauuaugaugaa

SEQ ID NO: 1387205 - RNA, 19 nt, Homo sapiens
  misc_RNA (1)...(19): siRNA sense strand
gaacgggauacauuacuug

SEQ ID NO: 1387206 - RNA, 19 nt, Homo sapiens
  misc_RNA (1)...(19): siRNA sense strand
gaucugagaacugauaaga

SEQ ID NO: 1387207 - RNA, 19 nt, Homo sapiens
  misc_RNA (1)...(19): siRNA sense strand
uaacaagaauggaggaaaa

SEQ ID NO: 1387208 - RNA, 19 nt, Homo sapiens
  misc_RNA (1)...(19): siRNA sense strand
caaguacaagaguggauua

SEQ ID NO: 1387209 - RNA, 19 nt, Homo sapiens
  misc_RNA (1)...(19): siRNA sense strand
gaaaccuggucucuuccuu

SEQ ID NO: 1387210 - RNA, 19 nt, Homo sapiens
  misc_RNA (1)...(19): siRNA sense strand
guuauuguuucccaaagaa

SEQ ID NO: 1387211 - RNA, 19 nt, Homo sapiens
  misc_RNA (1)...(19): siRNA sense strand
uacaugaaguucuaaggaa

SEQ ID NO: 1387212 - RNA, 19 nt, Homo sapiens
  misc_RNA (1)...(19): siRNA sense strand
ucugagaacugauaagaag

SEQ ID NO: 1387213 - RNA, 19 nt, Homo sapiens
  misc_RNA (1)...(19): siRNA sense strand
aauacacgcucuuuacuca

SEQ ID NO: 1387214 - RNA, 19 nt, Homo sapiens
  misc_RNA (1)...(19): siRNA sense strand
caacuuacggccaaggaaa

SEQ ID NO: 1387215 - RNA, 19 nt, Homo sapiens
  misc_RNA (1)...(19): siRNA sense strand
caaagaaauucaggaagag

SEQ ID NO: 1387216 - RNA, 19 nt, Homo sapiens
  misc_RNA (1)...(19): siRNA sense strand
ggagguaguagaaauguca

SEQ ID NO: 1387217 - RNA, 19 nt, Homo sapiens
  misc_RNA (1)...(19): siRNA sense strand
gccagugaauuucugaguu

SEQ ID NO: 1387218 - RNA, 19 nt, Homo sapiens
  misc_RNA (1)...(19): siRNA sense strand
uacaaaugcuuggagauga

SEQ ID NO: 1387219 - RNA, 19 nt, Homo sapiens
  misc_RNA (1)...(19): siRNA sense strand
ugaacuugcugugcauaaa

SEQ ID NO: 1387220 - RNA, 19 nt, Homo sapiens
  misc_RNA (1)...(19): siRNA sense strand
ccucucauuuaucagaaua

SEQ ID NO: 1387221 - RNA, 19 nt, Homo sapiens
  misc_RNA (1)...(19): siRNA sense strand
caagagguccaagcuauug

SEQ ID NO: 1387222 - RNA, 19 nt, Homo sapiens
  misc_RNA (1)...(19): siRNA sense strand
ucgggauucucauacuuua

SEQ ID NO: 1387223 - RNA, 19 nt, Homo sapiens
  misc_RNA (1)...(19): siRNA sense strand
gguuauuguuucccaaaga

SEQ ID NO: 1387224 - RNA, 19 nt, Homo sapiens
  misc_RNA (1)...(19): siRNA sense strand
gccauaccuugcucuacua

SEQ ID NO: 1387225 - RNA, 19 nt, Homo sapiens
  misc_RNA (1)...(19): siRNA sense strand
caaggaggaggaucaaguu

SEQ ID NO: 1387226 - RNA, 19 nt, Homo sapiens
  misc_RNA (1)...(19): siRNA sense strand
ugugaugcauuccaacaaa

SEQ ID NO: 1387227 - RNA, 19 nt, Homo sapiens
  misc_RNA (1)...(19): siRNA sense strand
gaggugugaugcauuccaa

SEQ ID NO: 1387228 - RNA, 19 nt, Homo sapiens
  misc_RNA (1)...(19): siRNA sense strand
aaagauguuucucuguuuc

SEQ ID NO: 1387229 - RNA, 19 nt, Homo sapiens
  misc_RNA (1)...(19): siRNA sense strand
gggauguucuggugauauc

SEQ ID NO: 1387230 - RNA, 19 nt, Homo sapiens
  misc_RNA (1)...(19): siRNA sense strand
ugacaaaacuucucuagag

SEQ ID NO: 1387231 - RNA, 19 nt, Homo sapiens
  misc_RNA (1)...(19): siRNA sense strand
caggaagaguguucuaucu

SEQ ID NO: 1387232 - RNA, 19 nt, Homo sapiens
  misc_RNA (1)...(19): siRNA sense strand
ugaacgggauacauuacuu

SEQ ID NO: 1387233 - RNA, 19 nt, Homo sapiens
  misc_RNA (1)...(19): siRNA sense strand
ggugauaucagaagugcaa

SEQ ID NO: 1387234 - RNA, 19 nt, Homo sapiens
  misc_RNA (1)...(19): siRNA sense strand
agauaauucugguugaaga

SEQ ID NO: 1387235 - RNA, 19 nt, Homo sapiens
  misc_RNA (1)...(19): siRNA sense strand
aaaggagcaugguauucaa

SEQ ID NO: 1387236 - RNA, 19 nt, Homo sapiens
  misc_RNA (1)...(19): siRNA sense strand
aauaugaacgggauacauu

SEQ ID NO: 1387237 - RNA, 19 nt, Homo sapiens
  misc_RNA (1)...(19): siRNA sense strand
cuauagaagcuaacaagaa

SEQ ID NO: 1387238 - RNA, 19 nt, Homo sapiens
  misc_RNA (1)...(19): siRNA sense strand
cgauguccucuuauauuua

SEQ ID NO: 1387239 - RNA, 19 nt, Homo sapiens
  misc_RNA (1)...(19): siRNA sense strand
auuggucgauguccucuua

SEQ ID NO: 1387240 - RNA, 19 nt, Homo sapiens
  misc_RNA (1)...(19): siRNA sense strand
gaaguucuaaggaaguaug

SEQ ID NO: 1387241 - RNA, 19 nt, Homo sapiens
  misc_RNA (1)...(19): siRNA sense strand
ccuguggcaccaacaauua

SEQ ID NO: 1387242 - RNA, 19 nt, Homo sapiens
  misc_RNA (1)...(19): siRNA sense strand
gcgacacuuuggaagauug

SEQ ID NO: 1387243 - RNA, 19 nt, Homo sapiens
  misc_RNA (1)...(19): siRNA sense strand
ggaggaggaucaaguuuuc

SEQ ID NO: 1387244 - RNA, 19 nt, Homo sapiens
  misc_RNA (1)...(19): siRNA sense strand
gggauacauuacuuguuga

SEQ ID NO: 1387245 - RNA, 19 nt, Homo sapiens
  misc_RNA (1)...(19): siRNA sense strand
uaucaaaggagcaugguau

SEQ ID NO: 1387246 - RNA, 19 nt, Homo sapiens
  misc_RNA (1)...(19): siRNA sense strand
aaucaagcuuccauauguu

SEQ ID NO: 1387247 - RNA, 19 nt, Homo sapiens
  misc_RNA (1)...(19): siRNA sense strand
caccaaaacuacauagauu

SEQ ID NO: 1387248 - RNA, 19 nt, Homo sapiens
  misc_RNA (1)...(19): siRNA sense strand
caauaaacagccuccaguu

SEQ ID NO: 1387249 - RNA, 19 nt, Homo sapiens
  misc_RNA (1)...(19): siRNA sense strand
gagcgacaaaguauaacaa

SEQ ID NO: 1387250 - RNA, 19 nt, Homo sapiens
  misc_RNA (1)...(19): siRNA sense strand
ccaaggagacauggaagaa

SEQ ID NO: 1387251 - RNA, 19 nt, Homo sapiens
  misc_RNA (1)...(19): siRNA sense strand
gaauacacgcucuuuacuc

SEQ ID NO: 1387252 - RNA, 19 nt, Homo sapiens
  misc_RNA (1)...(19): siRNA sense strand
caguggagauaauaaucaa

SEQ ID NO: 1387253 - RNA, 19 nt, Homo sapiens
  misc_RNA (1)...(19): siRNA sense strand
gcgacaaaguauaacaagu

SEQ ID NO: 1387254 - RNA, 19 nt, Homo sapiens
  misc_RNA (1)...(19): siRNA sense strand
gcaugguauucaaguacaa

SEQ ID NO: 1387255 - RNA, 19 nt, Homo sapiens
  misc_RNA (1)...(19): siRNA sense strand
ugacagggaacauggaaug

SEQ ID NO: 1387256 - RNA, 19 nt, Homo sapiens
  misc_RNA (1)...(19): siRNA sense strand
ggaauacacgcucuuuacu

SEQ ID NO: 1387257 - RNA, 19 nt, Homo sapiens
  misc_RNA (1)...(19): siRNA sense strand
ucgguugcccucucauuua

SEQ ID NO: 1387258 - RNA, 19 nt, Homo sapiens
  misc_RNA (1)...(19): siRNA sense strand
gagagccagugaauuucug

SEQ ID NO: 1387259 - RNA, 19 nt, Homo sapiens
  misc_RNA (1)...(19): siRNA sense strand
aaaaguaucgggaaaauug

SEQ ID NO: 1387260 - RNA, 19 nt, Homo sapiens
  misc_RNA (1)...(19): siRNA sense strand
gcaugaacuugcugugcau

SEQ ID NO: 1387261 - RNA, 19 nt, Homo sapiens
  misc_RNA (1)...(19): siRNA sense strand
gaaucaagcuuccauaugu

SEQ ID NO: 1387262 - RNA, 19 nt, Homo sapiens
  misc_RNA (1)...(19): siRNA sense strand
gcaaagauguuucucuguu

SEQ ID NO: 1387263 - RNA, 19 nt, Homo sapiens
  misc_RNA (1)...(19): siRNA sense strand
acacaugccuggagacuua

SEQ ID NO: 1387264 - RNA, 19 nt, Homo sapiens
  misc_RNA (1)...(19): siRNA sense strand
caacaaagcccgaggauau

SEQ ID NO: 1387265 - RNA, 19 nt, Homo sapiens
  misc_RNA (1)...(19): siRNA sense strand
ccaaagaaauucaggaaga

SEQ ID NO: 1387266 - RNA, 19 nt, Homo sapiens
  misc_RNA (1)...(19): siRNA sense strand
cuacauagauuucuucaug

SEQ ID NO: 1387267 - RNA, 19 nt, Homo sapiens
  misc_RNA (1)...(19): siRNA sense strand
ggaaauugaugauauugug

SEQ ID NO: 1387268 - RNA, 19 nt, Homo sapiens
  misc_RNA (1)...(19): siRNA sense strand
aaacucagcuauugccaua

SEQ ID NO: 1387269 - RNA, 19 nt, Homo sapiens
  misc_RNA (1)...(19): siRNA sense strand
gaagauaauucugguugaa

SEQ ID NO: 1387270 - RNA, 19 nt, Homo sapiens
  misc_RNA (1)...(19): siRNA sense strand
caaagauguuucucuguuu

SEQ ID NO: 1387271 - RNA, 19 nt, Homo sapiens
  misc_RNA (1)...(19): siRNA sense strand
guacaagaguggauuaauc

SEQ ID NO: 1387272 - RNA, 19 nt, Homo sapiens
  misc_RNA (1)...(19): siRNA sense strand
ggaagaguguucuaucuca

SEQ ID NO: 1387273 - RNA, 19 nt, Homo sapiens
  misc_RNA (1)...(19): siRNA sense strand
gaaagacaacgaccuuaaa

SEQ ID NO: 1387274 - RNA, 19 nt, Homo sapiens
  misc_RNA (1)...(19): siRNA sense strand
ggaaagacaacgaccuuaa

SEQ ID NO: 1387275 - RNA, 19 nt, Homo sapiens
  misc_RNA (1)...(19): siRNA sense strand
caaagaguuucuacuaaga

SEQ ID NO: 1387276 - RNA, 19 nt, Homo sapiens
  misc_RNA (1)...(19): siRNA sense strand
ccucagugguuucuaauaa

SEQ ID NO: 1387277 - RNA, 19 nt, Homo sapiens
  misc_RNA (1)...(19): siRNA sense strand
ccagugaauuucugaguuu

SEQ ID NO: 1387278 - RNA, 19 nt, Homo sapiens
  misc_RNA (1)...(19): siRNA sense strand
cagggaacauggaaugaua

SEQ ID NO: 1387279 - RNA, 19 nt, Homo sapiens
  misc_RNA (1)...(19): siRNA sense strand
uaagagcgacaaaguauaa

SEQ ID NO: 1387280 - RNA, 19 nt, Homo sapiens
  misc_RNA (1)...(19): siRNA sense strand
gagcaucuuuaacagaauu

SEQ ID NO: 1387281 - RNA, 19 nt, Homo sapiens
  misc_RNA (1)...(19): siRNA sense strand
ccuggagacuuauuuaauu

SEQ ID NO: 1387282 - RNA, 19 nt, Homo sapiens
  misc_RNA (1)...(19): siRNA sense strand
cgacaaaguauaacaaguu

SEQ ID NO: 1387283 - RNA, 19 nt, Homo sapiens
  misc_RNA (1)...(19): siRNA sense strand
ggagcaugguauucaagua

SEQ ID NO: 1387284 - RNA, 19 nt, Homo sapiens
  misc_RNA (1)...(19): siRNA sense strand
gaagaguguucuaucucaa

SEQ ID NO: 1387285 - RNA, 19 nt, Homo sapiens
  misc_RNA (1)...(19): siRNA sense strand
ucaaagaguuucuacuaag

SEQ ID NO: 1387286 - RNA, 19 nt, Homo sapiens
  misc_RNA (1)...(19): siRNA sense strand
gagaacugauaagaagaua

SEQ ID NO: 1387287 - RNA, 19 nt, Homo sapiens
  misc_RNA (1)...(19): siRNA sense strand
gcucuuuacucagggaaua

SEQ ID NO: 1387288 - RNA, 19 nt, Homo sapiens
  misc_RNA (1)...(19): siRNA sense strand
cgggauacauuacuuguug

SEQ ID NO: 1387289 - RNA, 19 nt, Homo sapiens
  misc_RNA (1)...(19): siRNA sense strand
ucgauguccucuuauauuu

SEQ ID NO: 1387290 - RNA, 19 nt, Homo sapiens
  misc_RNA (1)...(19): siRNA sense strand
agauuuaccuaaccaguuu

SEQ ID NO: 1387291 - RNA, 19 nt, Homo sapiens
  misc_RNA (1)...(19): siRNA sense strand
ggaaguaugugaggauugg

SEQ ID NO: 1387292 - RNA, 19 nt, Homo sapiens
  misc_RNA (1)...(19): siRNA sense strand
gauaucagaagugcaauaa

SEQ ID NO: 1387293 - RNA, 19 nt, Homo sapiens
  misc_RNA (1)...(19): siRNA sense strand
gcaccaacaauuaugauga

SEQ ID NO: 1387294 - RNA, 19 nt, Homo sapiens
  misc_RNA (1)...(19): siRNA sense strand
aaacaggguggaucuauuu

SEQ ID NO: 1387295 - RNA, 19 nt, Homo sapiens
  misc_RNA (1)...(19): siRNA sense strand
gaugaucugagaacugaua

SEQ ID NO: 1387296 - RNA, 19 nt, Homo sapiens
  misc_RNA (1)...(19): siRNA sense strand
ggguggaucuauuuuauua

SEQ ID NO: 1387297 - RNA, 19 nt, Homo sapiens
  misc_RNA (1)...(19): siRNA sense strand
uaucagaagugcaauaaac

SEQ ID NO: 1387298 - RNA, 19 nt, Homo sapiens
  misc_RNA (1)...(19): siRNA sense strand
ugugagagccagugaauuu

SEQ ID NO: 1387299 - RNA, 19 nt, Homo sapiens
  misc_RNA (1)...(19): siRNA sense strand
caaaggagcaugguauuca

SEQ ID NO: 1387300 - RNA, 19 nt, Homo sapiens
  misc_RNA (1)...(19): siRNA sense strand
ccggaaaccuggucucuuc

SEQ ID NO: 1387301 - RNA, 19 nt, Homo sapiens
  misc_RNA (1)...(19): siRNA sense strand
gaagcgacacuuuggaaga

SEQ ID NO: 1387302 - RNA, 19 nt, Homo sapiens
  misc_RNA (1)...(19): siRNA sense strand
cgagaggugugaugcauuc

SEQ ID NO: 1387303 - RNA, 19 nt, Homo sapiens
  misc_RNA (1)...(19): siRNA sense strand
cagaugcugugcugucaaa

SEQ ID NO: 1387304 - RNA, 19 nt, Homo sapiens
  misc_RNA (1)...(19): siRNA sense strand
caccaacaauuaugaugaa

SEQ ID NO: 1387305 - RNA, 19 nt, Homo sapiens
  misc_RNA (1)...(19): siRNA sense strand
gaacgggauacauuacuug

SEQ ID NO: 1387306 - RNA, 19 nt, Homo sapiens
  misc_RNA (1)...(19): siRNA sense strand
gaucugagaacugauaaga

SEQ ID NO: 1387307 - RNA, 19 nt, Homo sapiens
  misc_RNA (1)...(19): siRNA sense strand
uaacaagaauggaggaaaa

SEQ ID NO: 1387308 - RNA, 19 nt, Homo sapiens
  misc_RNA (1)...(19): siRNA sense strand
caaguacaagaguggauua

SEQ ID NO: 1387309 - RNA, 19 nt, Homo sapiens
  misc_RNA (1)...(19): siRNA sense strand
gaaaccuggucucuuccuu

SEQ ID NO: 1387310 - RNA, 19 nt, Homo sapiens
  misc_RNA (1)...(19): siRNA sense strand
guuauuguuucccaaagaa

SEQ ID NO: 1387311 - RNA, 19 nt, Homo sapiens
  misc_RNA (1)...(19): siRNA sense strand
uacaugaaguucuaaggaa

SEQ ID NO: 1387312 - RNA, 19 nt, Homo sapiens
  misc_RNA (1)...(19): siRNA sense strand
ucugagaacugauaagaag

SEQ ID NO: 1387313 - RNA, 19 nt, Homo sapiens
  misc_RNA (1)...(19): siRNA sense strand
aauacacgcucuuuacuca

SEQ ID NO: 1387314 - RNA, 19 nt, Homo sapiens
  misc_RNA (1)...(19): siRNA sense strand
caacuuacggccaaggaaa

SEQ ID NO: 1387315 - RNA, 19 nt, Homo sapiens
  misc_RNA (1)...(19): siRNA sense strand
caaagaaauucaggaagag

SEQ ID NO: 1387316 - RNA, 19 nt, Homo sapiens
  misc_RNA (1)...(19): siRNA sense strand
ggagguaguagaaauguca

SEQ ID NO: 1387317 - RNA, 19 nt, Homo sapiens
  misc_RNA (1)...(19): siRNA sense strand
gccagugaauuucugaguu

SEQ ID NO: 1387318 - RNA, 19 nt, Homo sapiens
  misc_RNA (1)...(19): siRNA sense strand
uacaaaugcuuggagauga

SEQ ID NO: 1387319 - RNA, 19 nt, Homo sapiens
  misc_RNA (1)...(19): siRNA sense strand
ugaacuugcugugcauaaa

SEQ ID NO: 1387320 - RNA, 19 nt, Homo sapiens
  misc_RNA (1)...(19): siRNA sense strand
ccucucauuuaucagaaua

SEQ ID NO: 1387321 - RNA, 19 nt, Homo sapiens
  misc_RNA (1)...(19): siRNA sense strand
caagagguccaagcuauug

SEQ ID NO: 1387322 - RNA, 19 nt, Homo sapiens
  misc_RNA (1)...(19): siRNA sense strand
ucgggauucucauacuuua

SEQ ID NO: 1387323 - RNA, 19 nt, Homo sapiens
  misc_RNA (1)...(19): siRNA sense strand
gguuauuguuucccaaaga

SEQ ID NO: 1387324 - RNA, 19 nt, Homo sapiens
  misc_RNA (1)...(19): siRNA sense strand
gccauaccuugcucuacua

SEQ ID NO: 1387325 - RNA, 19 nt, Homo sapiens
  misc_RNA (1)...(19): siRNA sense strand
caaggaggaggaucaaguu

SEQ ID NO: 1387326 - RNA, 19 nt, Homo sapiens
  misc_RNA (1)...(19): siRNA sense strand
ugugaugcauuccaacaaa

SEQ ID NO: 1387327 - RNA, 19 nt, Homo sapiens
  misc_RNA (1)...(19): siRNA sense strand
gaggugugaugcauuccaa

SEQ ID NO: 1387328 - RNA, 19 nt, Homo sapiens
  misc_RNA (1)...(19): siRNA sense strand
aaagauguuucucuguuuc

SEQ ID NO: 1387329 - RNA, 19 nt, Homo sapiens
  misc_RNA (1)...(19): siRNA sense strand
gggauguucuggugauauc

SEQ ID NO: 1387330 - RNA, 19 nt, Homo sapiens
  misc_RNA (1)...(19): siRNA sense strand
ugacaaaacuucucuagag

SEQ ID NO: 1387331 - RNA, 19 nt, Homo sapiens
  misc_RNA (1)...(19): siRNA sense strand
caggaagaguguucuaucu

SEQ ID NO: 1387332 - RNA, 19 nt, Homo sapiens
  misc_RNA (1)...(19): siRNA sense strand
ugaacgggauacauuacuu

SEQ ID NO: 1387333 - RNA, 19 nt, Homo sapiens
  misc_RNA (1)...(19): siRNA sense strand
ggugauaucagaagugcaa

SEQ ID NO: 1387334 - RNA, 19 nt, Homo sapiens
  misc_RNA (1)...(19): siRNA sense strand
agauaauucugguugaaga

SEQ ID NO: 1387335 - RNA, 19 nt, Homo sapiens
  misc_RNA (1)...(19): siRNA sense strand
aaaggagcaugguauucaa

SEQ ID NO: 1387336 - RNA, 19 nt, Homo sapiens
  misc_RNA (1)...(19): siRNA sense strand
aauaugaacgggauacauu

SEQ ID NO: 1387337 - RNA, 19 nt, Homo sapiens
  misc_RNA (1)...(19): siRNA sense strand
cuauagaagcuaacaagaa

SEQ ID NO: 1387338 - RNA, 19 nt, Homo sapiens
  misc_RNA (1)...(19): siRNA sense strand
cgauguccucuuauauuua

SEQ ID NO: 1387339 - RNA, 19 nt, Homo sapiens
  misc_RNA (1)...(19): siRNA sense strand
auuggucgauguccucuua

SEQ ID NO: 1387340 - RNA, 19 nt, Homo sapiens
  misc_RNA (1)...(19): siRNA sense strand
gaaguucuaaggaaguaug

SEQ ID NO: 1387341 - RNA, 19 nt, Homo sapiens
  misc_RNA (1)...(19): siRNA sense strand
ccuguggcaccaacaauua

SEQ ID NO: 1387342 - RNA, 19 nt, Homo sapiens
  misc_RNA (1)...(19): siRNA sense strand
gcgacacuuuggaagauug

SEQ ID NO: 1387343 - RNA, 19 nt, Homo sapiens
  misc_RNA (1)...(19): siRNA sense strand
ggaggaggaucaaguuuuc

SEQ ID NO: 1387344 - RNA, 19 nt, Homo sapiens
  misc_RNA (1)...(19): siRNA sense strand
gggauacauuacuuguuga

SEQ ID NO: 1387345 - RNA, 19 nt, Homo sapiens
  misc_RNA (1)...(19): siRNA sense strand
uaucaaaggagcaugguau

SEQ ID NO: 1387346 - RNA, 19 nt, Homo sapiens
  misc_RNA (1)...(19): siRNA sense strand
aaucaagcuuccauauguu

SEQ ID NO: 1387347 - RNA, 19 nt, Homo sapiens
  misc_RNA (1)...(19): siRNA sense strand
caccaaaacuacauagauu

SEQ ID NO: 1387348 - RNA, 19 nt, Homo sapiens
  misc_RNA (1)...(19): siRNA sense strand
caauaaacagccuccaguu

SEQ ID NO: 1387349 - RNA, 19 nt, Homo sapiens
  misc_RNA (1)...(19): siRNA sense strand
gagcgacaaaguauaacaa

SEQ ID NO: 1387350 - RNA, 19 nt, Homo sapiens
  misc_RNA (1)...(19): siRNA sense strand
ccaaggagacauggaagaa

SEQ ID NO: 1387351 - RNA, 19 nt, Homo sapiens
  misc_RNA (1)...(19): siRNA sense strand
gaauacacgcucuuuacuc

SEQ ID NO: 1387352 - RNA, 19 nt, Homo sapiens
  misc_RNA (1)...(19): siRNA sense strand
caguggagauaauaaucaa

SEQ ID NO: 1387353 - RNA, 19 nt, Homo sapiens
  misc_RNA (1)...(19): siRNA sense strand
gcgacaaaguauaacaagu

SEQ ID NO: 1387354 - RNA, 19 nt, Homo sapiens
  misc_RNA (1)...(19): siRNA sense strand
gcaugguauucaaguacaa

SEQ ID NO: 1387355 - RNA, 19 nt, Homo sapiens
  misc_RNA (1)...(19): siRNA sense strand
ugacagggaacauggaaug

SEQ ID NO: 1387356 - RNA, 19 nt, Homo sapiens
  misc_RNA (1)...(19): siRNA sense strand
ggaauacacgcucuuuacu

SEQ ID NO: 1387357 - RNA, 19 nt, Homo sapiens
  misc_RNA (1)...(19): siRNA sense strand
ucgguugcccucucauuua

SEQ ID NO: 1387358 - RNA, 19 nt, Homo sapiens
  misc_RNA (1)...(19): siRNA sense strand
gagagccagugaauuucug

SEQ ID NO: 1387359 - RNA, 19 nt, Homo sapiens
  misc_RNA (1)...(19): siRNA sense strand
aaaaguaucgggaaaauug

SEQ ID NO: 1387360 - RNA, 19 nt, Homo sapiens
  misc_RNA (1)...(19): siRNA sense strand
gcaugaacuugcugugcau

SEQ ID NO: 1387361 - RNA, 19 nt, Homo sapiens
  misc_RNA (1)...(19): siRNA sense strand
gaaucaagcuuccauaugu

SEQ ID NO: 1387362 - RNA, 19 nt, Homo sapiens
  misc_RNA (1)...(19): siRNA sense strand
gcaaagauguuucucuguu

SEQ ID NO: 1387363 - RNA, 19 nt, Homo sapiens
  misc_RNA (1)...(19): siRNA sense strand
acacaugccuggagacuua

SEQ ID NO: 1387364 - RNA, 19 nt, Homo sapiens
  misc_RNA (1)...(19): siRNA sense strand
caacaaagcccgaggauau

SEQ ID NO: 1387365 - RNA, 19 nt, Homo sapiens
  misc_RNA (1)...(19): siRNA sense strand
ccaaagaaauucaggaaga

SEQ ID NO: 1387366 - RNA, 19 nt, Homo sapiens
  misc_RNA (1)...(19): siRNA sense strand
cuacauagauuucuucaug

SEQ ID NO: 1387367 - RNA, 19 nt, Homo sapiens
  misc_RNA (1)...(19): siRNA sense strand
ggaaauugaugauauugug

SEQ ID NO: 1387368 - RNA, 19 nt, Homo sapiens
  misc_RNA (1)...(19): siRNA sense strand
aaacucagcuauugccaua

SEQ ID NO: 1387369 - RNA, 19 nt, Homo sapiens
  misc_RNA (1)...(19): siRNA sense strand
gaagauaauucugguugaa

SEQ ID NO: 1387370 - RNA, 19 nt, Homo sapiens
  misc_RNA (1)...(19): siRNA sense strand
caaagauguuucucuguuu

SEQ ID NO: 1387371 - RNA, 19 nt, Homo sapiens
  misc_RNA (1)...(19): siRNA sense strand
guacaagaguggauuaauc

SEQ ID NO: 1387372 - RNA, 19 nt, Homo sapiens
  misc_RNA (1)...(19): siRNA sense strand
ggaagaguguucuaucuca

SEQ ID NO: 1387373 - RNA, 19 nt, Homo sapiens
  misc_RNA (1)...(19): siRNA sense strand
gaaagacaacgaccuuaaa

SEQ ID NO: 1387374 - RNA, 19 nt, Homo sapiens
  misc_RNA (1)...(19): siRNA sense strand
ggaaagacaacgaccuuaa

SEQ ID NO: 1387375 - RNA, 19 nt, Homo sapiens
  misc_RNA (1)...(19): siRNA sense strand
caaagaguuucuacuaaga

SEQ ID NO: 1387376 - RNA, 19 nt, Homo sapiens
  misc_RNA (1)...(19): siRNA sense strand
ccucagugguuucuaauaa

SEQ ID NO: 1387377 - RNA, 19 nt, Homo sapiens
  misc_RNA (1)...(19): siRNA sense strand
ccagugaauuucugaguuu

SEQ ID NO: 1387378 - RNA, 19 nt, Homo sapiens
  misc_RNA (1)...(19): siRNA sense strand
cagggaacauggaaugaua

SEQ ID NO: 1387379 - RNA, 19 nt, Homo sapiens
  misc_RNA (1)...(19): siRNA sense strand
uaagagcgacaaaguauaa

SEQ ID NO: 1387380 - RNA, 19 nt, Homo sapiens
  misc_RNA (1)...(19): siRNA sense strand
gagcaucuuuaacagaauu

SEQ ID NO: 1387381 - RNA, 19 nt, Homo sapiens
  misc_RNA (1)...(19): siRNA sense strand
ccuggagacuuauuuaauu

SEQ ID NO: 1387382 - RNA, 19 nt, Homo sapiens
  misc_RNA (1)...(19): siRNA sense strand
cgacaaaguauaacaaguu

SEQ ID NO: 1387383 - RNA, 19 nt, Homo sapiens
  misc_RNA (1)...(19): siRNA sense strand
ggagcaugguauucaagua

SEQ ID NO: 1387384 - RNA, 19 nt, Homo sapiens
  misc_RNA (1)...(19): siRNA sense strand
gaagaguguucuaucucaa

SEQ ID NO: 1387385 - RNA, 19 nt, Homo sapiens
  misc_RNA (1)...(19): siRNA sense strand
ucaaagaguuucuacuaag

SEQ ID NO: 1387386 - RNA, 19 nt, Homo sapiens
  misc_RNA (1)...(19): siRNA sense strand
gagaacugauaagaagaua

SEQ ID NO: 1387387 - RNA, 19 nt, Homo sapiens
  misc_RNA (1)...(19): siRNA sense strand
gcucuuuacucagggaaua

SEQ ID NO: 1387388 - RNA, 19 nt, Homo sapiens
  misc_RNA (1)...(19): siRNA sense strand
cgggauacauuacuuguug

SEQ ID NO: 1387389 - RNA, 19 nt, Homo sapiens
  misc_RNA (1)...(19): siRNA sense strand
ucgauguccucuuauauuu

SEQ ID NO: 1387390 - RNA, 19 nt, Homo sapiens
  misc_RNA (1)...(19): siRNA sense strand
agauuuaccuaaccaguuu

SEQ ID NO: 1387391 - RNA, 19 nt, Homo sapiens
  misc_RNA (1)...(19): siRNA sense strand
ggaaguaugugaggauugg

SEQ ID NO: 1387392 - RNA, 19 nt, Homo sapiens
  misc_RNA (1)...(19): siRNA sense strand
gauaucagaagugcaauaa

SEQ ID NO: 1387393 - RNA, 19 nt, Homo sapiens
  misc_RNA (1)...(19): siRNA sense strand
gcaccaacaauuaugauga

SEQ ID NO: 1387394 - RNA, 19 nt, Homo sapiens
  misc_RNA (1)...(19): siRNA sense strand
aaacaggguggaucuauuu

SEQ ID NO: 1387395 - RNA, 19 nt, Homo sapiens
  misc_RNA (1)...(19): siRNA sense strand
gaugaucugagaacugaua

SEQ ID NO: 1387396 - RNA, 19 nt, Homo sapiens
  misc_RNA (1)...(19): siRNA sense strand
ggguggaucuauuuuauua

SEQ ID NO: 1387397 - RNA, 19 nt, Homo sapiens
  misc_RNA (1)...(19): siRNA sense strand
uaucagaagugcaauaaac

SEQ ID NO: 1387398 - RNA, 19 nt, Homo sapiens
  misc_RNA (1)...(19): siRNA sense strand
ugugagagccagugaauuu

SEQ ID NO: 1387399 - RNA, 19 nt, Homo sapiens
  misc_RNA (1)...(19): siRNA sense strand
caaaggagcaugguauuca

SEQ ID NO: 1387400 - RNA, 19 nt, Homo sapiens
  misc_RNA (1)...(19): siRNA sense strand
ccggaaaccuggucucuuc

SEQ ID NO: 1387401 - RNA, 19 nt, Homo sapiens
  misc_RNA (1)...(19): siRNA sense strand
gaagcgacacuuuggaaga

SEQ ID NO: 1387402 - RNA, 19 nt, Homo sapiens
  misc_RNA (1)...(19): siRNA sense strand
cgagaggugugaugcauuc

SEQ ID NO: 1387403 - RNA, 19 nt, Homo sapiens
  misc_RNA (1)...(19): siRNA sense strand
cagaugcugugcugucaaa

SEQ ID NO: 1387404 - RNA, 19 nt, Homo sapiens
  misc_RNA (1)...(19): siRNA sense strand
caccaacaauuaugaugaa

SEQ ID NO: 1387405 - RNA, 19 nt, Homo sapiens
  misc_RNA (1)...(19): siRNA sense strand
gaacgggauacauuacuug

SEQ ID NO: 1387406 - RNA, 19 nt, Homo sapiens
  misc_RNA (1)...(19): siRNA sense strand
gaucugagaacugauaaga

SEQ ID NO: 1387407 - RNA, 19 nt, Homo sapiens
  misc_RNA (1)...(19): siRNA sense strand
uaacaagaauggaggaaaa

SEQ ID NO: 1387408 - RNA, 19 nt, Homo sapiens
  misc_RNA (1)...(19): siRNA sense strand
caaguacaagaguggauua

SEQ ID NO: 1387409 - RNA, 19 nt, Homo sapiens
  misc_RNA (1)...(19): siRNA sense strand
gaaaccuggucucuuccuu

SEQ ID NO: 1387410 - RNA, 19 nt, Homo sapiens
  misc_RNA (1)...(19): siRNA sense strand
guuauuguuucccaaagaa

SEQ ID NO: 1387411 - RNA, 19 nt, Homo sapiens
  misc_RNA (1)...(19): siRNA sense strand
uacaugaaguucuaaggaa

SEQ ID NO: 1387412 - RNA, 19 nt, Homo sapiens
  misc_RNA (1)...(19): siRNA sense strand
ucugagaacugauaagaag

SEQ ID NO: 1387413 - RNA, 19 nt, Homo sapiens
  misc_RNA (1)...(19): siRNA sense strand
ccuccaaacucagcuauug

SEQ ID NO: 1387414 - RNA, 19 nt, Homo sapiens
  misc_RNA (1)...(19): siRNA sense strand
aauacacgcucuuuacuca

SEQ ID NO: 1387415 - RNA, 19 nt, Homo sapiens
  misc_RNA (1)...(19): siRNA sense strand
caacuuacggccaaggaaa

SEQ ID NO: 1387416 - RNA, 19 nt, Homo sapiens
  misc_RNA (1)...(19): siRNA sense strand
caaagaaauucaggaagag

SEQ ID NO: 1387417 - RNA, 19 nt, Homo sapiens
  misc_RNA (1)...(19): siRNA sense strand
ggagguaguagaaauguca

SEQ ID NO: 1387418 - RNA, 19 nt, Homo sapiens
  misc_RNA (1)...(19): siRNA sense strand
gccagugaauuucugaguu

SEQ ID NO: 1387419 - RNA, 19 nt, Homo sapiens
  misc_RNA (1)...(19): siRNA sense strand
uacaaaugcuuggagauga

SEQ ID NO: 1387420 - RNA, 19 nt, Homo sapiens
  misc_RNA (1)...(19): siRNA sense strand
ugaacuugcugugcauaaa

SEQ ID NO: 1387421 - RNA, 19 nt, Homo sapiens
  misc_RNA (1)...(19): siRNA sense strand
ccucucauuuaucagaaua

SEQ ID NO: 1387422 - RNA, 19 nt, Homo sapiens
  misc_RNA (1)...(19): siRNA sense strand
caagagguccaagcuauug

SEQ ID NO: 1387423 - RNA, 19 nt, Homo sapiens
  misc_RNA (1)...(19): siRNA sense strand
ucgggauucucauacuuua

SEQ ID NO: 1387424 - RNA, 19 nt, Homo sapiens
  misc_RNA (1)...(19): siRNA sense strand
gguuauuguuucccaaaga

SEQ ID NO: 1387425 - RNA, 19 nt, Homo sapiens
  misc_RNA (1)...(19): siRNA sense strand
gccauaccuugcucuacua

SEQ ID NO: 1387426 - RNA, 19 nt, Homo sapiens
  misc_RNA (1)...(19): siRNA sense strand
caaggaggaggaucaaguu

SEQ ID NO: 1387427 - RNA, 19 nt, Homo sapiens
  misc_RNA (1)...(19): siRNA sense strand
ugugaugcauuccaacaaa

SEQ ID NO: 1387428 - RNA, 19 nt, Homo sapiens
  misc_RNA (1)...(19): siRNA sense strand
gaggugugaugcauuccaa

SEQ ID NO: 1387429 - RNA, 19 nt, Homo sapiens
  misc_RNA (1)...(19): siRNA sense strand
aaagauguuucucuguuuc

SEQ ID NO: 1387430 - RNA, 19 nt, Homo sapiens
  misc_RNA (1)...(19): siRNA sense strand
gggauguucuggugauauc

SEQ ID NO: 1387431 - RNA, 19 nt, Homo sapiens
  misc_RNA (1)...(19): siRNA sense strand
ugacaaaacuucucuagag

SEQ ID NO: 1387432 - RNA, 19 nt, Homo sapiens
  misc_RNA (1)...(19): siRNA sense strand
caggaagaguguucuaucu

SEQ ID NO: 1387433 - RNA, 19 nt, Homo sapiens
  misc_RNA (1)...(19): siRNA sense strand
ugaacgggauacauuacuu

SEQ ID NO: 1387434 - RNA, 19 nt, Homo sapiens
  misc_RNA (1)...(19): siRNA sense strand
ggugauaucagaagugcaa

SEQ ID NO: 1387435 - RNA, 19 nt, Homo sapiens
  misc_RNA (1)...(19): siRNA sense strand
aaaggagcaugguauucaa

SEQ ID NO: 1387436 - RNA, 19 nt, Homo sapiens
  misc_RNA (1)...(19): siRNA sense strand
aauaugaacgggauacauu

SEQ ID NO: 1387437 - RNA, 19 nt, Homo sapiens
  misc_RNA (1)...(19): siRNA sense strand
cuauagaagcuaacaagaa

SEQ ID NO: 1387438 - RNA, 19 nt, Homo sapiens
  misc_RNA (1)...(19): siRNA sense strand
cgauguccucuuauauuua

SEQ ID NO: 1387439 - RNA, 19 nt, Homo sapiens
  misc_RNA (1)...(19): siRNA sense strand
auuggucgauguccucuua

SEQ ID NO: 1387440 - RNA, 19 nt, Homo sapiens
  misc_RNA (1)...(19): siRNA sense strand
gaaguucuaaggaaguaug

SEQ ID NO: 1387441 - RNA, 19 nt, Homo sapiens
  misc_RNA (1)...(19): siRNA sense strand
agauaauucugguugaaga

SEQ ID NO: 1387442 - RNA, 19 nt, Homo sapiens
  misc_RNA (1)...(19): siRNA sense strand
ccuguggcaccaacaauua

SEQ ID NO: 1387443 - RNA, 19 nt, Homo sapiens
  misc_RNA (1)...(19): siRNA sense strand
gcgacacuuuggaagauug

SEQ ID NO: 1387444 - RNA, 19 nt, Homo sapiens
  misc_RNA (1)...(19): siRNA sense strand
ggaggaggaucaaguuuuc

SEQ ID NO: 1387445 - RNA, 19 nt, Homo sapiens
  misc_RNA (1)...(19): siRNA sense strand
gggauacauuacuuguuga

SEQ ID NO: 1387446 - RNA, 19 nt, Homo sapiens
  misc_RNA (1)...(19): siRNA sense strand
uaucaaaggagcaugguau

SEQ ID NO: 1387447 - RNA, 19 nt, Homo sapiens
  misc_RNA (1)...(19): siRNA sense strand
aaucaagcuuccauauguu

SEQ ID NO: 1387448 - RNA, 19 nt, Homo sapiens
  misc_RNA (1)...(19): siRNA sense strand
caccaaaacuacauagauu

SEQ ID NO: 1387449 - RNA, 19 nt, Homo sapiens
  misc_RNA (1)...(19): siRNA sense strand
caauaaacagccuccaguu

SEQ ID NO: 1387450 - RNA, 19 nt, Homo sapiens
  misc_RNA (1)...(19): siRNA sense strand
gagcgacaaaguauaacaa

SEQ ID NO: 1387451 - RNA, 19 nt, Homo sapiens
  misc_RNA (1)...(19): siRNA sense strand
ccaaggagacauggaagaa

SEQ ID NO: 1387452 - RNA, 19 nt, Homo sapiens
  misc_RNA (1)...(19): siRNA sense strand
gaauacacgcucuuuacuc

SEQ ID NO: 1387453 - RNA, 19 nt, Homo sapiens
  misc_RNA (1)...(19): siRNA sense strand
caguggagauaauaaucaa

SEQ ID NO: 1387454 - RNA, 19 nt, Homo sapiens
  misc_RNA (1)...(19): siRNA sense strand
gcgacaaaguauaacaagu

SEQ ID NO: 1387455 - RNA, 19 nt, Homo sapiens
  misc_RNA (1)...(19): siRNA sense strand
gcaugguauucaaguacaa

SEQ ID NO: 1387456 - RNA, 19 nt, Homo sapiens
  misc_RNA (1)...(19): siRNA sense strand
ugacagggaacauggaaug

SEQ ID NO: 1387457 - RNA, 19 nt, Homo sapiens
  misc_RNA (1)...(19): siRNA sense strand
ggaauacacgcucuuuacu

SEQ ID NO: 1387458 - RNA, 19 nt, Homo sapiens
  misc_RNA (1)...(19): siRNA sense strand
ucgguugcccucucauuua

SEQ ID NO: 1387459 - RNA, 19 nt, Homo sapiens
  misc_RNA (1)...(19): siRNA sense strand
gagagccagugaauuucug

SEQ ID NO: 1387460 - RNA, 19 nt, Homo sapiens
  misc_RNA (1)...(19): siRNA sense strand
aaaaguaucgggaaaauug

SEQ ID NO: 1387461 - RNA, 19 nt, Homo sapiens
  misc_RNA (1)...(19): siRNA sense strand
gaaucaagcuuccauaugu

SEQ ID NO: 1387462 - RNA, 19 nt, Homo sapiens
  misc_RNA (1)...(19): siRNA sense strand
gcaaagauguuucucuguu

SEQ ID NO: 1387463 - RNA, 19 nt, Homo sapiens
  misc_RNA (1)...(19): siRNA sense strand
acacaugccuggagacuua

SEQ ID NO: 1387464 - RNA, 19 nt, Homo sapiens
  misc_RNA (1)...(19): siRNA sense strand
caacaaagcccgaggauau

SEQ ID NO: 1387465 - RNA, 19 nt, Homo sapiens
  misc_RNA (1)...(19): siRNA sense strand
ccaaagaaauucaggaaga

SEQ ID NO: 1387466 - RNA, 19 nt, Homo sapiens
  misc_RNA (1)...(19): siRNA sense strand
cuacauagauuucuucaug

SEQ ID NO: 1387467 - RNA, 19 nt, Homo sapiens
  misc_RNA (1)...(19): siRNA sense strand
ggaaauugaugauauugug

SEQ ID NO: 1387468 - RNA, 19 nt, Homo sapiens
  misc_RNA (1)...(19): siRNA sense strand
aaacucagcuauugccaua

SEQ ID NO: 1387469 - RNA, 19 nt, Homo sapiens
  misc_RNA (1)...(19): siRNA sense strand
gaagauaauucugguugaa

SEQ ID NO: 1387470 - RNA, 19 nt, Homo sapiens
  misc_RNA (1)...(19): siRNA sense strand
caaagauguuucucuguuu

SEQ ID NO: 1387471 - RNA, 19 nt, Homo sapiens
  misc_RNA (1)...(19): siRNA sense strand
guacaagaguggauuaauc

SEQ ID NO: 1387472 - RNA, 19 nt, Homo sapiens
  misc_RNA (1)...(19): siRNA sense strand
ggaagaguguucuaucuca

SEQ ID NO: 1387473 - RNA, 19 nt, Homo sapiens
  misc_RNA (1)...(19): siRNA sense strand
gaaagacaacgaccuuaaa

SEQ ID NO: 1387474 - RNA, 19 nt, Homo sapiens
  misc_RNA (1)...(19): siRNA sense strand
ggaaagacaacgaccuuaa

SEQ ID NO: 1387475 - RNA, 19 nt, Homo sapiens
  misc_RNA (1)...(19): siRNA sense strand
caaagaguuucuacuaaga

SEQ ID NO: 1387476 - RNA, 19 nt, Homo sapiens
  misc_RNA (1)...(19): siRNA sense strand
ccucagugguuucuaauaa

SEQ ID NO: 1387477 - RNA, 19 nt, Homo sapiens
  misc_RNA (1)...(19): siRNA sense strand
ccagugaauuucugaguuu

SEQ ID NO: 1387478 - RNA, 19 nt, Homo sapiens
  misc_RNA (1)...(19): siRNA sense strand
cagggaacauggaaugaua

SEQ ID NO: 1387479 - RNA, 19 nt, Homo sapiens
  misc_RNA (1)...(19): siRNA sense strand
uaagagcgacaaaguauaa

SEQ ID NO: 1387480 - RNA, 19 nt, Homo sapiens
  misc_RNA (1)...(19): siRNA sense strand
gagcaucuuuaacagaauu

SEQ ID NO: 1387481 - RNA, 19 nt, Homo sapiens
  misc_RNA (1)...(19): siRNA sense strand
ccuggagacuuauuuaauu

SEQ ID NO: 1387482 - RNA, 19 nt, Homo sapiens
  misc_RNA (1)...(19): siRNA sense strand
cgacaaaguauaacaaguu

SEQ ID NO: 1387483 - RNA, 19 nt, Homo sapiens
  misc_RNA (1)...(19): siRNA sense strand
ggagcaugguauucaagua

SEQ ID NO: 1387484 - RNA, 19 nt, Homo sapiens
  misc_RNA (1)...(19): siRNA sense strand
gaagaguguucuaucucaa

SEQ ID NO: 1387485 - RNA, 19 nt, Homo sapiens
  misc_RNA (1)...(19): siRNA sense strand
ucaaagaguuucuacuaag

SEQ ID NO: 1387486 - RNA, 19 nt, Homo sapiens
  misc_RNA (1)...(19): siRNA sense strand
gagaacugauaagaagaua

SEQ ID NO: 1387487 - RNA, 19 nt, Homo sapiens
  misc_RNA (1)...(19): siRNA sense strand
gcucuuuacucagggaaua

SEQ ID NO: 1387488 - RNA, 19 nt, Homo sapiens
  misc_RNA (1)...(19): siRNA sense strand
cgggauacauuacuuguug

SEQ ID NO: 1387489 - RNA, 19 nt, Homo sapiens
  misc_RNA (1)...(19): siRNA sense strand
ucgauguccucuuauauuu

SEQ ID NO: 1387490 - RNA, 19 nt, Homo sapiens
  misc_RNA (1)...(19): siRNA sense strand
agauuuaccuaaccaguuu

SEQ ID NO: 1387491 - RNA, 19 nt, Homo sapiens
  misc_RNA (1)...(19): siRNA sense strand
ggaaguaugugaggauugg

SEQ ID NO: 1387492 - RNA, 19 nt, Homo sapiens
  misc_RNA (1)...(19): siRNA sense strand
gauaucagaagugcaauaa

SEQ ID NO: 1387493 - RNA, 19 nt, Homo sapiens
  misc_RNA (1)...(19): siRNA sense strand
gcaccaacaauuaugauga

SEQ ID NO: 1387494 - RNA, 19 nt, Homo sapiens
  misc_RNA (1)...(19): siRNA sense strand
aaacaggguggaucuauuu

SEQ ID NO: 1387495 - RNA, 19 nt, Homo sapiens
  misc_RNA (1)...(19): siRNA sense strand
gaugaucugagaacugaua

SEQ ID NO: 1387496 - RNA, 19 nt, Homo sapiens
  misc_RNA (1)...(19): siRNA sense strand
ggguggaucuauuuuauua

SEQ ID NO: 1387497 - RNA, 19 nt, Homo sapiens
  misc_RNA (1)...(19): siRNA sense strand
uaucagaagugcaauaaac

SEQ ID NO: 1387498 - RNA, 19 nt, Homo sapiens
  misc_RNA (1)...(19): siRNA sense strand
ugugagagccagugaauuu

SEQ ID NO: 1387499 - RNA, 19 nt, Homo sapiens
  misc_RNA (1)...(19): siRNA sense strand
caaaggagcaugguauuca

SEQ ID NO: 1387500 - RNA, 19 nt, Homo sapiens
  misc_RNA (1)...(19): siRNA sense strand
ccggaaaccuggucucuuc

SEQ ID NO: 1387501 - RNA, 19 nt, Homo sapiens
  misc_RNA (1)...(19): siRNA sense strand
gaagcgacacuuuggaaga

SEQ ID NO: 1387502 - RNA, 19 nt, Homo sapiens
  misc_RNA (1)...(19): siRNA sense strand
cgagaggugugaugcauuc

SEQ ID NO: 1387503 - RNA, 19 nt, Homo sapiens
  misc_RNA (1)...(19): siRNA sense strand
cagaugcugugcugucaaa

SEQ ID NO: 1387504 - RNA, 19 nt, Homo sapiens
  misc_RNA (1)...(19): siRNA sense strand
caccaacaauuaugaugaa

SEQ ID NO: 1387505 - RNA, 19 nt, Homo sapiens
  misc_RNA (1)...(19): siRNA sense strand
gaacgggauacauuacuug

SEQ ID NO: 1387506 - RNA, 19 nt, Homo sapiens
  misc_RNA (1)...(19): siRNA sense strand
gaucugagaacugauaaga

SEQ ID NO: 1387507 - RNA, 19 nt, Homo sapiens
  misc_RNA (1)...(19): siRNA sense strand
uaacaagaauggaggaaaa

SEQ ID NO: 1387508 - RNA, 19 nt, Homo sapiens
  misc_RNA (1)...(19): siRNA sense strand
caaguacaagaguggauua

SEQ ID NO: 1387509 - RNA, 19 nt, Homo sapiens
  misc_RNA (1)...(19): siRNA sense strand
gaaaccuggucucuuccuu

SEQ ID NO: 1387510 - RNA, 19 nt, Homo sapiens
  misc_RNA (1)...(19): siRNA sense strand
guuauuguuucccaaagaa

SEQ ID NO: 1387511 - RNA, 19 nt, Homo sapiens
  misc_RNA (1)...(19): siRNA sense strand
uacaugaaguucuaaggaa

SEQ ID NO: 1387512 - RNA, 19 nt, Homo sapiens
  misc_RNA (1)...(19): siRNA sense strand
ucugagaacugauaagaag

SEQ ID NO: 1387513 - RNA, 19 nt, Homo sapiens
  misc_RNA (1)...(19): siRNA sense strand
aauacacgcucuuuacuca

SEQ ID NO: 1387514 - RNA, 19 nt, Homo sapiens
  misc_RNA (1)...(19): siRNA sense strand
caacuuacggccaaggaaa

SEQ ID NO: 1387515 - RNA, 19 nt, Homo sapiens
  misc_RNA (1)...(19): siRNA sense strand
caaagaaauucaggaagag

SEQ ID NO: 1387516 - RNA, 19 nt, Homo sapiens
  misc_RNA (1)...(19): siRNA sense strand
ggagguaguagaaauguca

SEQ ID NO: 1387517 - RNA, 19 nt, Homo sapiens
  misc_RNA (1)...(19): siRNA sense strand
gccagugaauuucugaguu

SEQ ID NO: 1387518 - RNA, 19 nt, Homo sapiens
  misc_RNA (1)...(19): siRNA sense strand
uacaaaugcuuggagauga

SEQ ID NO: 1387519 - RNA, 19 nt, Homo sapiens
  misc_RNA (1)...(19): siRNA sense strand
ugaacuugcugugcauaaa

SEQ ID NO: 1387520 - RNA, 19 nt, Homo sapiens
  misc_RNA (1)...(19): siRNA sense strand
ccucucauuuaucagaaua

SEQ ID NO: 1387521 - RNA, 19 nt, Homo sapiens
  misc_RNA (1)...(19): siRNA sense strand
caagagguccaagcuauug

SEQ ID NO: 1387522 - RNA, 19 nt, Homo sapiens
  misc_RNA (1)...(19): siRNA sense strand
ucgggauucucauacuuua

SEQ ID NO: 1387523 - RNA, 19 nt, Homo sapiens
  misc_RNA (1)...(19): siRNA sense strand
gguuauuguuucccaaaga

SEQ ID NO: 1387524 - RNA, 19 nt, Homo sapiens
  misc_RNA (1)...(19): siRNA sense strand
gccauaccuugcucuacua

SEQ ID NO: 1387525 - RNA, 19 nt, Homo sapiens
  misc_RNA (1)...(19): siRNA sense strand
caaggaggaggaucaaguu

SEQ ID NO: 1387526 - RNA, 19 nt, Homo sapiens
  misc_RNA (1)...(19): siRNA sense strand
ugugaugcauuccaacaaa

SEQ ID NO: 1387527 - RNA, 19 nt, Homo sapiens
  misc_RNA (1)...(19): siRNA sense strand
gaggugugaugcauuccaa

SEQ ID NO: 1387528 - RNA, 19 nt, Homo sapiens
  misc_RNA (1)...(19): siRNA sense strand
aaagauguuucucuguuuc

SEQ ID NO: 1387529 - RNA, 19 nt, Homo sapiens
  misc_RNA (1)...(19): siRNA sense strand
gggauguucuggugauauc

SEQ ID NO: 1387530 - RNA, 19 nt, Homo sapiens
  misc_RNA (1)...(19): siRNA sense strand
ugacaaaacuucucuagag

SEQ ID NO: 1387531 - RNA, 19 nt, Homo sapiens
  misc_RNA (1)...(19): siRNA sense strand
caggaagaguguucuaucu

SEQ ID NO: 1387532 - RNA, 19 nt, Homo sapiens
  misc_RNA (1)...(19): siRNA sense strand
ugaacgggauacauuacuu

SEQ ID NO: 1387533 - RNA, 19 nt, Homo sapiens
  misc_RNA (1)...(19): siRNA sense strand
ggugauaucagaagugcaa

SEQ ID NO: 1387534 - RNA, 19 nt, Homo sapiens
  misc_RNA (1)...(19): siRNA sense strand
agauaauucugguugaaga

SEQ ID NO: 1387535 - RNA, 19 nt, Homo sapiens
  misc_RNA (1)...(19): siRNA sense strand
aaaggagcaugguauucaa

SEQ ID NO: 1387536 - RNA, 19 nt, Homo sapiens
  misc_RNA (1)...(19): siRNA sense strand
aauaugaacgggauacauu

SEQ ID NO: 1387537 - RNA, 19 nt, Homo sapiens
  misc_RNA (1)...(19): siRNA sense strand
cuauagaagcuaacaagaa

SEQ ID NO: 1387538 - RNA, 19 nt, Homo sapiens
  misc_RNA (1)...(19): siRNA sense strand
cgauguccucuuauauuua

SEQ ID NO: 1387539 - RNA, 19 nt, Homo sapiens
  misc_RNA (1)...(19): siRNA sense strand
auuggucgauguccucuua

SEQ ID NO: 1387540 - RNA, 19 nt, Homo sapiens
  misc_RNA (1)...(19): siRNA sense strand
gaaguucuaaggaaguaug

SEQ ID NO: 1387541 - RNA, 19 nt, Homo sapiens
  misc_RNA (1)...(19): siRNA sense strand
ccuguggcaccaacaauua

SEQ ID NO: 1387542 - RNA, 19 nt, Homo sapiens
  misc_RNA (1)...(19): siRNA sense strand
gcgacacuuuggaagauug

SEQ ID NO: 1387543 - RNA, 19 nt, Homo sapiens
  misc_RNA (1)...(19): siRNA sense strand
ggaggaggaucaaguuuuc

SEQ ID NO: 1387544 - RNA, 19 nt, Homo sapiens
  misc_RNA (1)...(19): siRNA sense strand
gggauacauuacuuguuga

SEQ ID NO: 1387545 - RNA, 19 nt, Homo sapiens
  misc_RNA (1)...(19): siRNA sense strand
uaucaaaggagcaugguau

SEQ ID NO: 1387546 - RNA, 19 nt, Homo sapiens
  misc_RNA (1)...(19): siRNA sense strand
aaucaagcuuccauauguu

SEQ ID NO: 1387547 - RNA, 19 nt, Homo sapiens
  misc_RNA (1)...(19): siRNA sense strand
caccaaaacuacauagauu

SEQ ID NO: 1387548 - RNA, 19 nt, Homo sapiens
  misc_RNA (1)...(19): siRNA sense strand
caauaaacagccuccaguu

SEQ ID NO: 1387549 - RNA, 19 nt, Homo sapiens
  misc_RNA (1)...(19): siRNA sense strand
gagcgacaaaguauaacaa

SEQ ID NO: 1387550 - RNA, 19 nt, Homo sapiens
  misc_RNA (1)...(19): siRNA sense strand
ccaaggagacauggaagaa

SEQ ID NO: 1387551 - RNA, 19 nt, Homo sapiens
  misc_RNA (1)...(19): siRNA sense strand
gaauacacgcucuuuacuc

SEQ ID NO: 1387552 - RNA, 19 nt, Homo sapiens
  misc_RNA (1)...(19): siRNA sense strand
caguggagauaauaaucaa

SEQ ID NO: 1387553 - RNA, 19 nt, Homo sapiens
  misc_RNA (1)...(19): siRNA sense strand
gcgacaaaguauaacaagu

SEQ ID NO: 1387554 - RNA, 19 nt, Homo sapiens
  misc_RNA (1)...(19): siRNA sense strand
gcaugguauucaaguacaa

SEQ ID NO: 1387555 - RNA, 19 nt, Homo sapiens
  misc_RNA (1)...(19): siRNA sense strand
ugacagggaacauggaaug

SEQ ID NO: 1387556 - RNA, 19 nt, Homo sapiens
  misc_RNA (1)...(19): siRNA sense strand
ggaauacacgcucuuuacu

SEQ ID NO: 1387557 - RNA, 19 nt, Homo sapiens
  misc_RNA (1)...(19): siRNA sense strand
ucgguugcccucucauuua

SEQ ID NO: 1387558 - RNA, 19 nt, Homo sapiens
  misc_RNA (1)...(19): siRNA sense strand
gagagccagugaauuucug

SEQ ID NO: 1387559 - RNA, 19 nt, Homo sapiens
  misc_RNA (1)...(19): siRNA sense strand
aaaaguaucgggaaaauug

SEQ ID NO: 1387560 - RNA, 19 nt, Homo sapiens
  misc_RNA (1)...(19): siRNA sense strand
gcaugaacuugcugugcau

SEQ ID NO: 1387561 - RNA, 19 nt, Homo sapiens
  misc_RNA (1)...(19): siRNA sense strand
gaaucaagcuuccauaugu

SEQ ID NO: 1387562 - RNA, 19 nt, Homo sapiens
  misc_RNA (1)...(19): siRNA sense strand
gcaaagauguuucucuguu

SEQ ID NO: 1387563 - RNA, 19 nt, Homo sapiens
  misc_RNA (1)...(19): siRNA sense strand
acacaugccuggagacuua

SEQ ID NO: 1387564 - RNA, 19 nt, Homo sapiens
  misc_RNA (1)...(19): siRNA sense strand
caacaaagcccgaggauau

SEQ ID NO: 1387565 - RNA, 19 nt, Homo sapiens
  misc_RNA (1)...(19): siRNA sense strand
ccaaagaaauucaggaaga

SEQ ID NO: 1387566 - RNA, 19 nt, Homo sapiens
  misc_RNA (1)...(19): siRNA sense strand
cuacauagauuucuucaug

SEQ ID NO: 1387567 - RNA, 19 nt, Homo sapiens
  misc_RNA (1)...(19): siRNA sense strand
ggaaauugaugauauugug

SEQ ID NO: 1387568 - RNA, 19 nt, Homo sapiens
  misc_RNA (1)...(19): siRNA sense strand
aaacucagcuauugccaua

SEQ ID NO: 1387569 - RNA, 19 nt, Homo sapiens
  misc_RNA (1)...(19): siRNA sense strand
gaagauaauucugguugaa

SEQ ID NO: 1387570 - RNA, 19 nt, Homo sapiens
  misc_RNA (1)...(19): siRNA sense strand
caaagauguuucucuguuu

SEQ ID NO: 1387571 - RNA, 19 nt, Homo sapiens
  misc_RNA (1)...(19): siRNA sense strand
guacaagaguggauuaauc

SEQ ID NO: 1387572 - RNA, 19 nt, Homo sapiens
  misc_RNA (1)...(19): siRNA sense strand
ggaagaguguucuaucuca

SEQ ID NO: 1387573 - RNA, 19 nt, Homo sapiens
  misc_RNA (1)...(19): siRNA sense strand
gaaagacaacgaccuuaaa

SEQ ID NO: 1387574 - RNA, 19 nt, Homo sapiens
  misc_RNA (1)...(19): siRNA sense strand
ggaaagacaacgaccuuaa

SEQ ID NO: 1387575 - RNA, 19 nt, Homo sapiens
  misc_RNA (1)...(19): siRNA sense strand
caaagaguuucuacuaaga

SEQ ID NO: 1387576 - RNA, 19 nt, Homo sapiens
  misc_RNA (1)...(19): siRNA sense strand
ccucagugguuucuaauaa

SEQ ID NO: 1387577 - RNA, 19 nt, Homo sapiens
  misc_RNA (1)...(19): siRNA sense strand
ccagugaauuucugaguuu

SEQ ID NO: 1387578 - RNA, 19 nt, Homo sapiens
  misc_RNA (1)...(19): siRNA sense strand
cagggaacauggaaugaua

SEQ ID NO: 1387579 - RNA, 19 nt, Homo sapiens
  misc_RNA (1)...(19): siRNA sense strand
uaagagcgacaaaguauaa

SEQ ID NO: 1387580 - RNA, 19 nt, Homo sapiens
  misc_RNA (1)...(19): siRNA sense strand
gagcaucuuuaacagaauu

SEQ ID NO: 1387581 - RNA, 19 nt, Homo sapiens
  misc_RNA (1)...(19): siRNA sense strand
ccuggagacuuauuuaauu

SEQ ID NO: 1387582 - RNA, 19 nt, Homo sapiens
  misc_RNA (1)...(19): siRNA sense strand
cgacaaaguauaacaaguu

SEQ ID NO: 1387583 - RNA, 19 nt, Homo sapiens
  misc_RNA (1)...(19): siRNA sense strand
ggagcaugguauucaagua

SEQ ID NO: 1387584 - RNA, 19 nt, Homo sapiens
  misc_RNA (1)...(19): siRNA sense strand
gaagaguguucuaucucaa

SEQ ID NO: 1387585 - RNA, 19 nt, Homo sapiens
  misc_RNA (1)...(19): siRNA sense strand
ucaaagaguuucuacuaag

SEQ ID NO: 1387586 - RNA, 19 nt, Homo sapiens
  misc_RNA (1)...(19): siRNA sense strand
gagaacugauaagaagaua

SEQ ID NO: 1387587 - RNA, 19 nt, Homo sapiens
  misc_RNA (1)...(19): siRNA sense strand
gcucuuuacucagggaaua

SEQ ID NO: 1387588 - RNA, 19 nt, Homo sapiens
  misc_RNA (1)...(19): siRNA sense strand
cgggauacauuacuuguug

SEQ ID NO: 1387589 - RNA, 19 nt, Homo sapiens
  misc_RNA (1)...(19): siRNA sense strand
ucgauguccucuuauauuu

SEQ ID NO: 1387590 - RNA, 19 nt, Homo sapiens
  misc_RNA (1)...(19): siRNA sense strand
agauuuaccuaaccaguuu

SEQ ID NO: 1387591 - RNA, 19 nt, Homo sapiens
  misc_RNA (1)...(19): siRNA sense strand
ggaaguaugugaggauugg

SEQ ID NO: 1387592 - RNA, 19 nt, Homo sapiens
  misc_RNA (1)...(19): siRNA sense strand
gauaucagaagugcaauaa

SEQ ID NO: 1387593 - RNA, 19 nt, Homo sapiens
  misc_RNA (1)...(19): siRNA sense strand
gcaccaacaauuaugauga

SEQ ID NO: 1387594 - RNA, 19 nt, Homo sapiens
  misc_RNA (1)...(19): siRNA sense strand
aaacaggguggaucuauuu

SEQ ID NO: 1387595 - RNA, 19 nt, Homo sapiens
  misc_RNA (1)...(19): siRNA sense strand
gaugaucugagaacugaua

SEQ ID NO: 1387596 - RNA, 19 nt, Homo sapiens
  misc_RNA (1)...(19): siRNA sense strand
ggguggaucuauuuuauua

SEQ ID NO: 1387597 - RNA, 19 nt, Homo sapiens
  misc_RNA (1)...(19): siRNA sense strand
uaucagaagugcaauaaac

SEQ ID NO: 1387598 - RNA, 19 nt, Homo sapiens
  misc_RNA (1)...(19): siRNA sense strand
ugugagagccagugaauuu

SEQ ID NO: 1387599 - RNA, 19 nt, Homo sapiens
  misc_RNA (1)...(19): siRNA sense strand
caaaggagcaugguauuca

SEQ ID NO: 1387600 - RNA, 19 nt, Homo sapiens
  misc_RNA (1)...(19): siRNA sense strand
ccggaaaccuggucucuuc

SEQ ID NO: 1387601 - RNA, 19 nt, Homo sapiens
  misc_RNA (1)...(19): siRNA sense strand
gaagcgacacuuuggaaga

SEQ ID NO: 1387602 - RNA, 19 nt, Homo sapiens
  misc_RNA (1)...(19): siRNA sense strand
cgagaggugugaugcauuc

SEQ ID NO: 1387603 - RNA, 19 nt, Homo sapiens
  misc_RNA (1)...(19): siRNA sense strand
cagaugcugugcugucaaa

SEQ ID NO: 1387604 - RNA, 19 nt, Homo sapiens
  misc_RNA (1)...(19): siRNA sense strand
caccaacaauuaugaugaa

SEQ ID NO: 1387605 - RNA, 19 nt, Homo sapiens
  misc_RNA (1)...(19): siRNA sense strand
gaacgggauacauuacuug

SEQ ID NO: 1387606 - RNA, 19 nt, Homo sapiens
  misc_RNA (1)...(19): siRNA sense strand
gaucugagaacugauaaga

SEQ ID NO: 1387607 - RNA, 19 nt, Homo sapiens
  misc_RNA (1)...(19): siRNA sense strand
uaacaagaauggaggaaaa

SEQ ID NO: 1387608 - RNA, 19 nt, Homo sapiens
  misc_RNA (1)...(19): siRNA sense strand
caaguacaagaguggauua

SEQ ID NO: 1387609 - RNA, 19 nt, Homo sapiens
  misc_RNA (1)...(19): siRNA sense strand
gaaaccuggucucuuccuu

SEQ ID NO: 1387610 - RNA, 19 nt, Homo sapiens
  misc_RNA (1)...(19): siRNA sense strand
guuauuguuucccaaagaa

SEQ ID NO: 1387611 - RNA, 19 nt, Homo sapiens
  misc_RNA (1)...(19): siRNA sense strand
uacaugaaguucuaaggaa

SEQ ID NO: 1387612 - RNA, 19 nt, Homo sapiens
  misc_RNA (1)...(19): siRNA sense strand
ucugagaacugauaagaag

SEQ ID NO: 1387613 - RNA, 19 nt, Homo sapiens
  misc_RNA (1)...(19): siRNA sense strand
aauacacgcucuuuacuca

SEQ ID NO: 1387614 - RNA, 19 nt, Homo sapiens
  misc_RNA (1)...(19): siRNA sense strand
caacuuacggccaaggaaa

SEQ ID NO: 1387615 - RNA, 19 nt, Homo sapiens
  misc_RNA (1)...(19): siRNA sense strand
caaagaaauucaggaagag

SEQ ID NO: 1387616 - RNA, 19 nt, Homo sapiens
  misc_RNA (1)...(19): siRNA sense strand
ggagguaguagaaauguca

SEQ ID NO: 1387617 - RNA, 19 nt, Homo sapiens
  misc_RNA (1)...(19): siRNA sense strand
gccagugaauuucugaguu

SEQ ID NO: 1387618 - RNA, 19 nt, Homo sapiens
  misc_RNA (1)...(19): siRNA sense strand
uacaaaugcuuggagauga

SEQ ID NO: 1387619 - RNA, 19 nt, Homo sapiens
  misc_RNA (1)...(19): siRNA sense strand
ugaacuugcugugcauaaa

SEQ ID NO: 1387620 - RNA, 19 nt, Homo sapiens
  misc_RNA (1)...(19): siRNA sense strand
ccucucauuuaucagaaua

SEQ ID NO: 1387621 - RNA, 19 nt, Homo sapiens
  misc_RNA (1)...(19): siRNA sense strand
caagagguccaagcuauug

SEQ ID NO: 1387622 - RNA, 19 nt, Homo sapiens
  misc_RNA (1)...(19): siRNA sense strand
ucgggauucucauacuuua

SEQ ID NO: 1387623 - RNA, 19 nt, Homo sapiens
  misc_RNA (1)...(19): siRNA sense strand
gguuauuguuucccaaaga

SEQ ID NO: 1387624 - RNA, 19 nt, Homo sapiens
  misc_RNA (1)...(19): siRNA sense strand
gccauaccuugcucuacua

SEQ ID NO: 1387625 - RNA, 19 nt, Homo sapiens
  misc_RNA (1)...(19): siRNA sense strand
caaggaggaggaucaaguu

SEQ ID NO: 1387626 - RNA, 19 nt, Homo sapiens
  misc_RNA (1)...(19): siRNA sense strand
ugugaugcauuccaacaaa

SEQ ID NO: 1387627 - RNA, 19 nt, Homo sapiens
  misc_RNA (1)...(19): siRNA sense strand
gaggugugaugcauuccaa

SEQ ID NO: 1387628 - RNA, 19 nt, Homo sapiens
  misc_RNA (1)...(19): siRNA sense strand
aaagauguuucucuguuuc

SEQ ID NO: 1387629 - RNA, 19 nt, Homo sapiens
  misc_RNA (1)...(19): siRNA sense strand
gggauguucuggugauauc

SEQ ID NO: 1387630 - RNA, 19 nt, Homo sapiens
  misc_RNA (1)...(19): siRNA sense strand
ugacaaaacuucucuagag

SEQ ID NO: 1387631 - RNA, 19 nt, Homo sapiens
  misc_RNA (1)...(19): siRNA sense strand
caggaagaguguucuaucu

SEQ ID NO: 1387632 - RNA, 19 nt, Homo sapiens
  misc_RNA (1)...(19): siRNA sense strand
ugaacgggauacauuacuu

SEQ ID NO: 1387633 - RNA, 19 nt, Homo sapiens
  misc_RNA (1)...(19): siRNA sense strand
ggugauaucagaagugcaa

SEQ ID NO: 1387634 - RNA, 19 nt, Homo sapiens
  misc_RNA (1)...(19): siRNA sense strand
agauaauucugguugaaga

SEQ ID NO: 1387635 - RNA, 19 nt, Homo sapiens
  misc_RNA (1)...(19): siRNA sense strand
aaaggagcaugguauucaa

SEQ ID NO: 1387636 - RNA, 19 nt, Homo sapiens
  misc_RNA (1)...(19): siRNA sense strand
aauaugaacgggauacauu

SEQ ID NO: 1387637 - RNA, 19 nt, Homo sapiens
  misc_RNA (1)...(19): siRNA sense strand
cuauagaagcuaacaagaa

SEQ ID NO: 1387638 - RNA, 19 nt, Homo sapiens
  misc_RNA (1)...(19): siRNA sense strand
cgauguccucuuauauuua

SEQ ID NO: 1387639 - RNA, 19 nt, Homo sapiens
  misc_RNA (1)...(19): siRNA sense strand
auuggucgauguccucuua

SEQ ID NO: 1387640 - RNA, 19 nt, Homo sapiens
  misc_RNA (1)...(19): siRNA sense strand
gaaguucuaaggaaguaug

SEQ ID NO: 1387641 - RNA, 19 nt, Homo sapiens
  misc_RNA (1)...(19): siRNA sense strand
ccuguggcaccaacaauua

SEQ ID NO: 1387642 - RNA, 19 nt, Homo sapiens
  misc_RNA (1)...(19): siRNA sense strand
gcgacacuuuggaagauug

SEQ ID NO: 1387643 - RNA, 19 nt, Homo sapiens
  misc_RNA (1)...(19): siRNA sense strand
ggaggaggaucaaguuuuc

SEQ ID NO: 1387644 - RNA, 19 nt, Homo sapiens
  misc_RNA (1)...(19): siRNA sense strand
gggauacauuacuuguuga

SEQ ID NO: 1387645 - RNA, 19 nt, Homo sapiens
  misc_RNA (1)...(19): siRNA sense strand
uaucaaaggagcaugguau

SEQ ID NO: 1387646 - RNA, 19 nt, Homo sapiens
  misc_RNA (1)...(19): siRNA sense strand
aaucaagcuuccauauguu

SEQ ID NO: 1387647 - RNA, 19 nt, Homo sapiens
  misc_RNA (1)...(19): siRNA sense strand
caccaaaacuacauagauu

SEQ ID NO: 1387648 - RNA, 19 nt, Homo sapiens
  misc_RNA (1)...(19): siRNA sense strand
caauaaacagccuccaguu

SEQ ID NO: 1387649 - RNA, 19 nt, Homo sapiens
  misc_RNA (1)...(19): siRNA sense strand
gagcgacaaaguauaacaa

SEQ ID NO: 1387650 - RNA, 19 nt, Homo sapiens
  misc_RNA (1)...(19): siRNA sense strand
ccaaggagacauggaagaa

SEQ ID NO: 1387651 - RNA, 19 nt, Homo sapiens
  misc_RNA (1)...(19): siRNA sense strand
gaauacacgcucuuuacuc

SEQ ID NO: 1387652 - RNA, 19 nt, Homo sapiens
  misc_RNA (1)...(19): siRNA sense strand
caguggagauaauaaucaa

SEQ ID NO: 1387653 - RNA, 19 nt, Homo sapiens
  misc_RNA (1)...(19): siRNA sense strand
gcgacaaaguauaacaagu

SEQ ID NO: 1387654 - RNA, 19 nt, Homo sapiens
  misc_RNA (1)...(19): siRNA sense strand
gcaugguauucaaguacaa

SEQ ID NO: 1387655 - RNA, 19 nt, Homo sapiens
  misc_RNA (1)...(19): siRNA sense strand
ugacagggaacauggaaug

SEQ ID NO: 1387656 - RNA, 19 nt, Homo sapiens
  misc_RNA (1)...(19): siRNA sense strand
ggaauacacgcucuuuacu

SEQ ID NO: 1387657 - RNA, 19 nt, Homo sapiens
  misc_RNA (1)...(19): siRNA sense strand
ucgguugcccucucauuua

SEQ ID NO: 1387658 - RNA, 19 nt, Homo sapiens
  misc_RNA (1)...(19): siRNA sense strand
gagagccagugaauuucug

SEQ ID NO: 1387659 - RNA, 19 nt, Homo sapiens
  misc_RNA (1)...(19): siRNA sense strand
aaaaguaucgggaaaauug

SEQ ID NO: 1387660 - RNA, 19 nt, Homo sapiens
  misc_RNA (1)...(19): siRNA sense strand
gcaugaacuugcugugcau

SEQ ID NO: 1387661 - RNA, 19 nt, Homo sapiens
  misc_RNA (1)...(19): siRNA sense strand
gaaucaagcuuccauaugu

SEQ ID NO: 1387662 - RNA, 19 nt, Homo sapiens
  misc_RNA (1)...(19): siRNA sense strand
gcaaagauguuucucuguu

SEQ ID NO: 1387663 - RNA, 19 nt, Homo sapiens
  misc_RNA (1)...(19): siRNA sense strand
acacaugccuggagacuua

SEQ ID NO: 1387664 - RNA, 19 nt, Homo sapiens
  misc_RNA (1)...(19): siRNA sense strand
caacaaagcccgaggauau

SEQ ID NO: 1387665 - RNA, 19 nt, Homo sapiens
  misc_RNA (1)...(19): siRNA sense strand
ccaaagaaauucaggaaga

SEQ ID NO: 1387666 - RNA, 19 nt, Homo sapiens
  misc_RNA (1)...(19): siRNA sense strand
cuacauagauuucuucaug

SEQ ID NO: 1387667 - RNA, 19 nt, Homo sapiens
  misc_RNA (1)...(19): siRNA sense strand
ggaaauugaugauauugug

SEQ ID NO: 1387668 - RNA, 19 nt, Homo sapiens
  misc_RNA (1)...(19): siRNA sense strand
aaacucagcuauugccaua

SEQ ID NO: 1387669 - RNA, 19 nt, Homo sapiens
  misc_RNA (1)...(19): siRNA sense strand
gaagauaauucugguugaa

SEQ ID NO: 1387670 - RNA, 19 nt, Homo sapiens
  misc_RNA (1)...(19): siRNA sense strand
caaagauguuucucuguuu

SEQ ID NO: 1387671 - RNA, 19 nt, Homo sapiens
  misc_RNA (1)...(19): siRNA sense strand
ggaagaguguucuaucuca

SEQ ID NO: 1387672 - RNA, 19 nt, Homo sapiens
  misc_RNA (1)...(19): siRNA sense strand
caaagaguuucuacuaaga

SEQ ID NO: 1387673 - RNA, 19 nt, Homo sapiens
  misc_RNA (1)...(19): siRNA sense strand
ccucagugguuucuaauaa

SEQ ID NO: 1387674 - RNA, 19 nt, Homo sapiens
  misc_RNA (1)...(19): siRNA sense strand
ccagugaauuucugaguuu

SEQ ID NO: 1387675 - RNA, 19 nt, Homo sapiens
  misc_RNA (1)...(19): siRNA sense strand
cagggaacauggaaugaua

SEQ ID NO: 1387676 - RNA, 19 nt, Homo sapiens
  misc_RNA (1)...(19): siRNA sense strand
uaagagcgacaaaguauaa

SEQ ID NO: 1387677 - RNA, 19 nt, Homo sapiens
  misc_RNA (1)...(19): siRNA sense strand
gagcaucuuuaacagaauu

SEQ ID NO: 1387678 - RNA, 19 nt, Homo sapiens
  misc_RNA (1)...(19): siRNA sense strand
ccuggagacuuauuuaauu

SEQ ID NO: 1387679 - RNA, 19 nt, Homo sapiens
  misc_RNA (1)...(19): siRNA sense strand
cgacaaaguauaacaaguu

SEQ ID NO: 1387680 - RNA, 19 nt, Homo sapiens
  misc_RNA (1)...(19): siRNA sense strand
gaagaguguucuaucucaa

SEQ ID NO: 1387681 - RNA, 19 nt, Homo sapiens
  misc_RNA (1)...(19): siRNA sense strand
ucaaagaguuucuacuaag

SEQ ID NO: 1387682 - RNA, 19 nt, Homo sapiens
  misc_RNA (1)...(19): siRNA sense strand
gagaacugauaagaagaua

SEQ ID NO: 1387683 - RNA, 19 nt, Homo sapiens
  misc_RNA (1)...(19): siRNA sense strand
gcucuuuacucagggaaua

SEQ ID NO: 1387684 - RNA, 19 nt, Homo sapiens
  misc_RNA (1)...(19): siRNA sense strand
cgggauacauuacuuguug

SEQ ID NO: 1387685 - RNA, 19 nt, Homo sapiens
  misc_RNA (1)...(19): siRNA sense strand
ucgauguccucuuauauuu

SEQ ID NO: 1387686 - RNA, 19 nt, Homo sapiens
  misc_RNA (1)...(19): siRNA sense strand
agauuuaccuaaccaguuu

SEQ ID NO: 1387687 - RNA, 19 nt, Homo sapiens
  misc_RNA (1)...(19): siRNA sense strand
ggaaguaugugaggauugg

SEQ ID NO: 1387688 - RNA, 19 nt, Homo sapiens
  misc_RNA (1)...(19): siRNA sense strand
gauaucagaagugcaauaa

SEQ ID NO: 1387689 - RNA, 19 nt, Homo sapiens
  misc_RNA (1)...(19): siRNA sense strand
gcaccaacaauuaugauga

SEQ ID NO: 1387690 - RNA, 19 nt, Homo sapiens
  misc_RNA (1)...(19): siRNA sense strand
gaugaucugagaacugaua

SEQ ID NO: 1387691 - RNA, 19 nt, Homo sapiens
  misc_RNA (1)...(19): siRNA sense strand
uaucagaagugcaauaaac

SEQ ID NO: 1387692 - RNA, 19 nt, Homo sapiens
  misc_RNA (1)...(19): siRNA sense strand
ugugagagccagugaauuu

SEQ ID NO: 1387693 - RNA, 19 nt, Homo sapiens
  misc_RNA (1)...(19): siRNA sense strand
caccaacaauuaugaugaa

SEQ ID NO: 1387694 - RNA, 19 nt, Homo sapiens
  misc_RNA (1)...(19): siRNA sense strand
ccggaaaccuggucucuuc

SEQ ID NO: 1387695 - RNA, 19 nt, Homo sapiens
  misc_RNA (1)...(19): siRNA sense strand
gaagcgacacuuuggaaga

SEQ ID NO: 1387696 - RNA, 19 nt, Homo sapiens
  misc_RNA (1)...(19): siRNA sense strand
cgagaggugugaugcauuc

SEQ ID NO: 1387697 - RNA, 19 nt, Homo sapiens
  misc_RNA (1)...(19): siRNA sense strand
cagaugcugugcugucaaa

SEQ ID NO: 1387698 - RNA, 19 nt, Homo sapiens
  misc_RNA (1)...(19): siRNA sense strand
gaacgggauacauuacuug

SEQ ID NO: 1387699 - RNA, 19 nt, Homo sapiens
  misc_RNA (1)...(19): siRNA sense strand
gaucugagaacugauaaga

SEQ ID NO: 1387700 - RNA, 19 nt, Homo sapiens
  misc_RNA (1)...(19): siRNA sense strand
uaacaagaauggaggaaaa

SEQ ID NO: 1387701 - RNA, 19 nt, Homo sapiens
  misc_RNA (1)...(19): siRNA sense strand
uacaugaaguucuaaggaa

SEQ ID NO: 1387702 - RNA, 19 nt, Homo sapiens
  misc_RNA (1)...(19): siRNA sense strand
gaaaccuggucucuuccuu

SEQ ID NO: 1387703 - RNA, 19 nt, Homo sapiens
  misc_RNA (1)...(19): siRNA sense strand
guuauuguuucccaaagaa

SEQ ID NO: 1387704 - RNA, 19 nt, Homo sapiens
  misc_RNA (1)...(19): siRNA sense strand
ucugagaacugauaagaag

SEQ ID NO: 1387705 - RNA, 19 nt, Homo sapiens
  misc_RNA (1)...(19): siRNA sense strand
aauacacgcucuuuacuca

SEQ ID NO: 1387706 - RNA, 19 nt, Homo sapiens
  misc_RNA (1)...(19): siRNA sense strand
caacuuacggccaaggaaa

SEQ ID NO: 1387707 - RNA, 19 nt, Homo sapiens
  misc_RNA (1)...(19): siRNA sense strand
caaagaaauucaggaagag

SEQ ID NO: 1387708 - RNA, 19 nt, Homo sapiens
  misc_RNA (1)...(19): siRNA sense strand
ggagguaguagaaauguca

SEQ ID NO: 1387709 - RNA, 19 nt, Homo sapiens
  misc_RNA (1)...(19): siRNA sense strand
gccagugaauuucugaguu

SEQ ID NO: 1387710 - RNA, 19 nt, Homo sapiens
  misc_RNA (1)...(19): siRNA sense strand
uacaaaugcuuggagauga

SEQ ID NO: 1387711 - RNA, 19 nt, Homo sapiens
  misc_RNA (1)...(19): siRNA sense strand
ccucucauuuaucagaaua

SEQ ID NO: 1387712 - RNA, 19 nt, Homo sapiens
  misc_RNA (1)...(19): siRNA sense strand
caagagguccaagcuauug

SEQ ID NO: 1387713 - RNA, 19 nt, Homo sapiens
  misc_RNA (1)...(19): siRNA sense strand
ucgggauucucauacuuua

SEQ ID NO: 1387714 - RNA, 19 nt, Homo sapiens
  misc_RNA (1)...(19): siRNA sense strand
gguuauuguuucccaaaga

SEQ ID NO: 1387715 - RNA, 19 nt, Homo sapiens
  misc_RNA (1)...(19): siRNA sense strand
gccauaccuugcucuacua

SEQ ID NO: 1387716 - RNA, 19 nt, Homo sapiens
  misc_RNA (1)...(19): siRNA sense strand
caaggaggaggaucaaguu

SEQ ID NO: 1387717 - RNA, 19 nt, Homo sapiens
  misc_RNA (1)...(19): siRNA sense strand
ugugaugcauuccaacaaa

SEQ ID NO: 1387718 - RNA, 19 nt, Homo sapiens
  misc_RNA (1)...(19): siRNA sense strand
gaggugugaugcauuccaa

SEQ ID NO: 1387719 - RNA, 19 nt, Homo sapiens
  misc_RNA (1)...(19): siRNA sense strand
aaagauguuucucuguuuc

SEQ ID NO: 1387720 - RNA, 19 nt, Homo sapiens
  misc_RNA (1)...(19): siRNA sense strand
gggauguucuggugauauc

SEQ ID NO: 1387721 - RNA, 19 nt, Homo sapiens
  misc_RNA (1)...(19): siRNA sense strand
ugacaaaacuucucuagag

SEQ ID NO: 1387722 - RNA, 19 nt, Homo sapiens
  misc_RNA (1)...(19): siRNA sense strand
caggaagaguguucuaucu

SEQ ID NO: 1387723 - RNA, 19 nt, Homo sapiens
  misc_RNA (1)...(19): siRNA sense strand
ugaacgggauacauuacuu

SEQ ID NO: 1387724 - RNA, 19 nt, Homo sapiens
  misc_RNA (1)...(19): siRNA sense strand
ggugauaucagaagugcaa

SEQ ID NO: 1387725 - RNA, 19 nt, Homo sapiens
  misc_RNA (1)...(19): siRNA sense strand
gaaguucuaaggaaguaug

SEQ ID NO: 1387726 - RNA, 19 nt, Homo sapiens
  misc_RNA (1)...(19): siRNA sense strand
aauaugaacgggauacauu

SEQ ID NO: 1387727 - RNA, 19 nt, Homo sapiens
  misc_RNA (1)...(19): siRNA sense strand
cuauagaagcuaacaagaa

SEQ ID NO: 1387728 - RNA, 19 nt, Homo sapiens
  misc_RNA (1)...(19): siRNA sense strand
cgauguccucuuauauuua

SEQ ID NO: 1387729 - RNA, 19 nt, Homo sapiens
  misc_RNA (1)...(19): siRNA sense strand
auuggucgauguccucuua

SEQ ID NO: 1387730 - RNA, 19 nt, Homo sapiens
  misc_RNA (1)...(19): siRNA sense strand
agauaauucugguugaaga

SEQ ID NO: 1387731 - RNA, 19 nt, Homo sapiens
  misc_RNA (1)...(19): siRNA sense strand
ccuguggcaccaacaauua

SEQ ID NO: 1387732 - RNA, 19 nt, Homo sapiens
  misc_RNA (1)...(19): siRNA sense strand
gcgacacuuuggaagauug

SEQ ID NO: 1387733 - RNA, 19 nt, Homo sapiens
  misc_RNA (1)...(19): siRNA sense strand
ggaggaggaucaaguuuuc

SEQ ID NO: 1387734 - RNA, 19 nt, Homo sapiens
  misc_RNA (1)...(19): siRNA sense strand
gggauacauuacuuguuga

SEQ ID NO: 1387735 - RNA, 19 nt, Homo sapiens
  misc_RNA (1)...(19): siRNA sense strand
caauaaacagccuccaguu

SEQ ID NO: 1387736 - RNA, 19 nt, Homo sapiens
  misc_RNA (1)...(19): siRNA sense strand
aaucaagcuuccauauguu

SEQ ID NO: 1387737 - RNA, 19 nt, Homo sapiens
  misc_RNA (1)...(19): siRNA sense strand
caccaaaacuacauagauu

SEQ ID NO: 1387738 - RNA, 19 nt, Homo sapiens
  misc_RNA (1)...(19): siRNA sense strand
caguggagauaauaaucaa

SEQ ID NO: 1387739 - RNA, 19 nt, Homo sapiens
  misc_RNA (1)...(19): siRNA sense strand
ccaaggagacauggaagaa

SEQ ID NO: 1387740 - RNA, 19 nt, Homo sapiens
  misc_RNA (1)...(19): siRNA sense strand
gaauacacgcucuuuacuc

SEQ ID NO: 1387741 - RNA, 19 nt, Homo sapiens
  misc_RNA (1)...(19): siRNA sense strand
gcgacaaaguauaacaagu

SEQ ID NO: 1387742 - RNA, 19 nt, Homo sapiens
  misc_RNA (1)...(19): siRNA sense strand
gagcgacaaaguauaacaa

SEQ ID NO: 1387743 - RNA, 19 nt, Homo sapiens
  misc_RNA (1)...(19): siRNA sense strand
ucgguugcccucucauuua

SEQ ID NO: 1387744 - RNA, 19 nt, Homo sapiens
  misc_RNA (1)...(19): siRNA sense strand
ugacagggaacauggaaug

SEQ ID NO: 1387745 - RNA, 19 nt, Homo sapiens
  misc_RNA (1)...(19): siRNA sense strand
ggaauacacgcucuuuacu

SEQ ID NO: 1387746 - RNA, 19 nt, Homo sapiens
  misc_RNA (1)...(19): siRNA sense strand
guucuaaggaaguauguga

SEQ ID NO: 1387747 - RNA, 19 nt, Homo sapiens
  misc_RNA (1)...(19): siRNA sense strand
aaaaguaucgggaaaauug

SEQ ID NO: 1387748 - RNA, 19 nt, Homo sapiens
  misc_RNA (1)...(19): siRNA sense strand
acaaaugcuuggagaugau

SEQ ID NO: 1387749 - RNA, 19 nt, Homo sapiens
  misc_RNA (1)...(19): siRNA sense strand
gagagccagugaauuucug

SEQ ID NO: 1387750 - RNA, 19 nt, Homo sapiens
  misc_RNA (1)...(19): siRNA sense strand
acauagauuucuucaugga

SEQ ID NO: 1387751 - RNA, 19 nt, Homo sapiens
  misc_RNA (1)...(19): siRNA sense strand
ucagauagcaguuuucaaa

SEQ ID NO: 1387752 - RNA, 19 nt, Homo sapiens
  misc_RNA (1)...(19): siRNA sense strand
cuacuaagagcgacaaagu

SEQ ID NO: 1387753 - RNA, 19 nt, Homo sapiens
  misc_RNA (1)...(19): siRNA sense strand
ggaaugauagacccugaca

SEQ ID NO: 1387754 - RNA, 19 nt, Homo sapiens
  misc_RNA (1)...(19): siRNA sense strand
gguugaagauuuaccuaac

SEQ ID NO: 1387755 - RNA, 19 nt, Homo sapiens
  misc_RNA (1)...(19): siRNA sense strand
acuaagagcgacaaaguau

SEQ ID NO: 1387756 - RNA, 19 nt, Homo sapiens
  misc_RNA (1)...(19): siRNA sense strand
caaggagacauggaagaaa

SEQ ID NO: 1387757 - RNA, 19 nt, Homo sapiens
  misc_RNA (1)...(19): siRNA sense strand
uaucgggauucucauacuu

SEQ ID NO: 1387758 - RNA, 19 nt, Homo sapiens
  misc_RNA (1)...(19): siRNA sense strand
ugaaucaagcuuccauaug

SEQ ID NO: 1387759 - RNA, 19 nt, Homo sapiens
  misc_RNA (1)...(19): siRNA sense strand
cugaggagguaguagaaau

SEQ ID NO: 1387760 - RNA, 19 nt, Homo sapiens
  misc_RNA (1)...(19): siRNA sense strand
gucgauguccucuuauauu

SEQ ID NO: 1387761 - RNA, 19 nt, Homo sapiens
  misc_RNA (1)...(19): siRNA sense strand
gaaucaagcuuccauaugu

SEQ ID NO: 1387762 - RNA, 19 nt, Homo sapiens
  misc_RNA (1)...(19): siRNA sense strand
gcaaagauguuucucuguu

SEQ ID NO: 1387763 - RNA, 19 nt, Homo sapiens
  misc_RNA (1)...(19): siRNA sense strand
acacaugccuggagacuua

SEQ ID NO: 1387764 - RNA, 19 nt, Homo sapiens
  misc_RNA (1)...(19): siRNA sense strand
caacaaagcccgaggauau

SEQ ID NO: 1387765 - RNA, 19 nt, Homo sapiens
  misc_RNA (1)...(19): siRNA sense strand
ccaaagaaauucaggaaga

SEQ ID NO: 1387766 - RNA, 19 nt, Homo sapiens
  misc_RNA (1)...(19): siRNA sense strand
cuacauagauuucuucaug

SEQ ID NO: 1387767 - RNA, 19 nt, Homo sapiens
  misc_RNA (1)...(19): siRNA sense strand
ggaaauugaugauauugug

SEQ ID NO: 1387768 - RNA, 19 nt, Homo sapiens
  misc_RNA (1)...(19): siRNA sense strand
aaacucagcuauugccaua

SEQ ID NO: 1387769 - RNA, 19 nt, Homo sapiens
  misc_RNA (1)...(19): siRNA sense strand
gaagauaauucugguugaa

SEQ ID NO: 1387770 - RNA, 19 nt, Homo sapiens
  misc_RNA (1)...(19): siRNA sense strand
caaagauguuucucuguuu

SEQ ID NO: 1387771 - RNA, 19 nt, Homo sapiens
  misc_RNA (1)...(19): siRNA sense strand
guacaagaguggauuaauc

SEQ ID NO: 1387772 - RNA, 19 nt, Homo sapiens
  misc_RNA (1)...(19): siRNA sense strand
ggaagaguguucuaucuca

SEQ ID NO: 1387773 - RNA, 19 nt, Homo sapiens
  misc_RNA (1)...(19): siRNA sense strand
gaaagacaacgaccuuaaa

SEQ ID NO: 1387774 - RNA, 19 nt, Homo sapiens
  misc_RNA (1)...(19): siRNA sense strand
ggaaagacaacgaccuuaa

SEQ ID NO: 1387775 - RNA, 19 nt, Homo sapiens
  misc_RNA (1)...(19): siRNA sense strand
caaagaguuucuacuaaga

SEQ ID NO: 1387776 - RNA, 19 nt, Homo sapiens
  misc_RNA (1)...(19): siRNA sense strand
ccucagugguuucuaauaa

SEQ ID NO: 1387777 - RNA, 19 nt, Homo sapiens
  misc_RNA (1)...(19): siRNA sense strand
ccagugaauuucugaguuu

SEQ ID NO: 1387778 - RNA, 19 nt, Homo sapiens
  misc_RNA (1)...(19): siRNA sense strand
cagggaacauggaaugaua

SEQ ID NO: 1387779 - RNA, 19 nt, Homo sapiens
  misc_RNA (1)...(19): siRNA sense strand
uaagagcgacaaaguauaa

SEQ ID NO: 1387780 - RNA, 19 nt, Homo sapiens
  misc_RNA (1)...(19): siRNA sense strand
gagcaucuuuaacagaauu

SEQ ID NO: 1387781 - RNA, 19 nt, Homo sapiens
  misc_RNA (1)...(19): siRNA sense strand
ccuggagacuuauuuaauu

SEQ ID NO: 1387782 - RNA, 19 nt, Homo sapiens
  misc_RNA (1)...(19): siRNA sense strand
cgacaaaguauaacaaguu

SEQ ID NO: 1387783 - RNA, 19 nt, Homo sapiens
  misc_RNA (1)...(19): siRNA sense strand
ggagcaugguauucaagua

SEQ ID NO: 1387784 - RNA, 19 nt, Homo sapiens
  misc_RNA (1)...(19): siRNA sense strand
gaagaguguucuaucucaa

SEQ ID NO: 1387785 - RNA, 19 nt, Homo sapiens
  misc_RNA (1)...(19): siRNA sense strand
ucaaagaguuucuacuaag

SEQ ID NO: 1387786 - RNA, 19 nt, Homo sapiens
  misc_RNA (1)...(19): siRNA sense strand
gagaacugauaagaagaua

SEQ ID NO: 1387787 - RNA, 19 nt, Homo sapiens
  misc_RNA (1)...(19): siRNA sense strand
gcucuuuacucagggaaua

SEQ ID NO: 1387788 - RNA, 19 nt, Homo sapiens
  misc_RNA (1)...(19): siRNA sense strand
cgggauacauuacuuguug

SEQ ID NO: 1387789 - RNA, 19 nt, Homo sapiens
  misc_RNA (1)...(19): siRNA sense strand
ucgauguccucuuauauuu

SEQ ID NO: 1387790 - RNA, 19 nt, Homo sapiens
  misc_RNA (1)...(19): siRNA sense strand
agauuuaccuaaccaguuu

SEQ ID NO: 1387791 - RNA, 19 nt, Homo sapiens
  misc_RNA (1)...(19): siRNA sense strand
ggaaguaugugaggauugg

SEQ ID NO: 1387792 - RNA, 19 nt, Homo sapiens
  misc_RNA (1)...(19): siRNA sense strand
gauaucagaagugcaauaa

SEQ ID NO: 1387793 - RNA, 19 nt, Homo sapiens
  misc_RNA (1)...(19): siRNA sense strand
gcaccaacaauuaugauga

SEQ ID NO: 1387794 - RNA, 19 nt, Homo sapiens
  misc_RNA (1)...(19): siRNA sense strand
aaacaggguggaucuauuu

SEQ ID NO: 1387795 - RNA, 19 nt, Homo sapiens
  misc_RNA (1)...(19): siRNA sense strand
gaugaucugagaacugaua

SEQ ID NO: 1387796 - RNA, 19 nt, Homo sapiens
  misc_RNA (1)...(19): siRNA sense strand
ggguggaucuauuuuauua

SEQ ID NO: 1387797 - RNA, 19 nt, Homo sapiens
  misc_RNA (1)...(19): siRNA sense strand
uaucagaagugcaauaaac

SEQ ID NO: 1387798 - RNA, 19 nt, Homo sapiens
  misc_RNA (1)...(19): siRNA sense strand
ugugagagccagugaauuu

SEQ ID NO: 1387799 - RNA, 19 nt, Homo sapiens
  misc_RNA (1)...(19): siRNA sense strand
caaaggagcaugguauuca

SEQ ID NO: 1387800 - RNA, 19 nt, Homo sapiens
  misc_RNA (1)...(19): siRNA sense strand
ccggaaaccuggucucuuc

SEQ ID NO: 1387801 - RNA, 19 nt, Homo sapiens
  misc_RNA (1)...(19): siRNA sense strand
gaagcgacacuuuggaaga

SEQ ID NO: 1387802 - RNA, 19 nt, Homo sapiens
  misc_RNA (1)...(19): siRNA sense strand
cgagaggugugaugcauuc

SEQ ID NO: 1387803 - RNA, 19 nt, Homo sapiens
  misc_RNA (1)...(19): siRNA sense strand
cagaugcugugcugucaaa

SEQ ID NO: 1387804 - RNA, 19 nt, Homo sapiens
  misc_RNA (1)...(19): siRNA sense strand
caccaacaauuaugaugaa

SEQ ID NO: 1387805 - RNA, 19 nt, Homo sapiens
  misc_RNA (1)...(19): siRNA sense strand
gaacgggauacauuacuug

SEQ ID NO: 1387806 - RNA, 19 nt, Homo sapiens
  misc_RNA (1)...(19): siRNA sense strand
gaucugagaacugauaaga

SEQ ID NO: 1387807 - RNA, 19 nt, Homo sapiens
  misc_RNA (1)...(19): siRNA sense strand
uaacaagaauggaggaaaa

SEQ ID NO: 1387808 - RNA, 19 nt, Homo sapiens
  misc_RNA (1)...(19): siRNA sense strand
caaguacaagaguggauua

SEQ ID NO: 1387809 - RNA, 19 nt, Homo sapiens
  misc_RNA (1)...(19): siRNA sense strand
gaaaccuggucucuuccuu

SEQ ID NO: 1387810 - RNA, 19 nt, Homo sapiens
  misc_RNA (1)...(19): siRNA sense strand
guuauuguuucccaaagaa

SEQ ID NO: 1387811 - RNA, 19 nt, Homo sapiens
  misc_RNA (1)...(19): siRNA sense strand
uacaugaaguucuaaggaa

SEQ ID NO: 1387812 - RNA, 19 nt, Homo sapiens
  misc_RNA (1)...(19): siRNA sense strand
ucugagaacugauaagaag

SEQ ID NO: 1387813 - RNA, 19 nt, Homo sapiens
  misc_RNA (1)...(19): siRNA sense strand
aauacacgcucuuuacuca

SEQ ID NO: 1387814 - RNA, 19 nt, Homo sapiens
  misc_RNA (1)...(19): siRNA sense strand
caacuuacggccaaggaaa

SEQ ID NO: 1387815 - RNA, 19 nt, Homo sapiens
  misc_RNA (1)...(19): siRNA sense strand
caaagaaauucaggaagag

SEQ ID NO: 1387816 - RNA, 19 nt, Homo sapiens
  misc_RNA (1)...(19): siRNA sense strand
ggagguaguagaaauguca

SEQ ID NO: 1387817 - RNA, 19 nt, Homo sapiens
  misc_RNA (1)...(19): siRNA sense strand
gccagugaauuucugaguu

SEQ ID NO: 1387818 - RNA, 19 nt, Homo sapiens
  misc_RNA (1)...(19): siRNA sense strand
uacaaaugcuuggagauga

SEQ ID NO: 1387819 - RNA, 19 nt, Homo sapiens
  misc_RNA (1)...(19): siRNA sense strand
ugaacuugcugugcauaaa

SEQ ID NO: 1387820 - RNA, 19 nt, Homo sapiens
  misc_RNA (1)...(19): siRNA sense strand
ccucucauuuaucagaaua

SEQ ID NO: 1387821 - RNA, 19 nt, Homo sapiens
  misc_RNA (1)...(19): siRNA sense strand
caagagguccaagcuauug

SEQ ID NO: 1387822 - RNA, 19 nt, Homo sapiens
  misc_RNA (1)...(19): siRNA sense strand
ucgggauucucauacuuua

SEQ ID NO: 1387823 - RNA, 19 nt, Homo sapiens
  misc_RNA (1)...(19): siRNA sense strand
gguuauuguuucccaaaga

SEQ ID NO: 1387824 - RNA, 19 nt, Homo sapiens
  misc_RNA (1)...(19): siRNA sense strand
gccauaccuugcucuacua

SEQ ID NO: 1387825 - RNA, 19 nt, Homo sapiens
  misc_RNA (1)...(19): siRNA sense strand
caaggaggaggaucaaguu

SEQ ID NO: 1387826 - RNA, 19 nt, Homo sapiens
  misc_RNA (1)...(19): siRNA sense strand
ugugaugcauuccaacaaa

SEQ ID NO: 1387827 - RNA, 19 nt, Homo sapiens
  misc_RNA (1)...(19): siRNA sense strand
gaggugugaugcauuccaa

SEQ ID NO: 1387828 - RNA, 19 nt, Homo sapiens
  misc_RNA (1)...(19): siRNA sense strand
aaagauguuucucuguuuc

SEQ ID NO: 1387829 - RNA, 19 nt, Homo sapiens
  misc_RNA (1)...(19): siRNA sense strand
gggauguucuggugauauc

SEQ ID NO: 1387830 - RNA, 19 nt, Homo sapiens
  misc_RNA (1)...(19): siRNA sense strand
ugacaaaacuucucuagag

SEQ ID NO: 1387831 - RNA, 19 nt, Homo sapiens
  misc_RNA (1)...(19): siRNA sense strand
caggaagaguguucuaucu

SEQ ID NO: 1387832 - RNA, 19 nt, Homo sapiens
  misc_RNA (1)...(19): siRNA sense strand
ugaacgggauacauuacuu

SEQ ID NO: 1387833 - RNA, 19 nt, Homo sapiens
  misc_RNA (1)...(19): siRNA sense strand
ggugauaucagaagugcaa

SEQ ID NO: 1387834 - RNA, 19 nt, Homo sapiens
  misc_RNA (1)...(19): siRNA sense strand
agauaauucugguugaaga

SEQ ID NO: 1387835 - RNA, 19 nt, Homo sapiens
  misc_RNA (1)...(19): siRNA sense strand
aaaggagcaugguauucaa

SEQ ID NO: 1387836 - RNA, 19 nt, Homo sapiens
  misc_RNA (1)...(19): siRNA sense strand
aauaugaacgggauacauu

SEQ ID NO: 1387837 - RNA, 19 nt, Homo sapiens
  misc_RNA (1)...(19): siRNA sense strand
cuauagaagcuaacaagaa

SEQ ID NO: 1387838 - RNA, 19 nt, Homo sapiens
  misc_RNA (1)...(19): siRNA sense strand
cgauguccucuuauauuua

SEQ ID NO: 1387839 - RNA, 19 nt, Homo sapiens
  misc_RNA (1)...(19): siRNA sense strand
auuggucgauguccucuua

SEQ ID NO: 1387840 - RNA, 19 nt, Homo sapiens
  misc_RNA (1)...(19): siRNA sense strand
gaaguucuaaggaaguaug

SEQ ID NO: 1387841 - RNA, 19 nt, Homo sapiens
  misc_RNA (1)...(19): siRNA sense strand
ccuguggcaccaacaauua

SEQ ID NO: 1387842 - RNA, 19 nt, Homo sapiens
  misc_RNA (1)...(19): siRNA sense strand
gcgacacuuuggaagauug

SEQ ID NO: 1387843 - RNA, 19 nt, Homo sapiens
  misc_RNA (1)...(19): siRNA sense strand
ggaggaggaucaaguuuuc

SEQ ID NO: 1387844 - RNA, 19 nt, Homo sapiens
  misc_RNA (1)...(19): siRNA sense strand
gggauacauuacuuguuga

SEQ ID NO: 1387845 - RNA, 19 nt, Homo sapiens
  misc_RNA (1)...(19): siRNA sense strand
uaucaaaggagcaugguau

SEQ ID NO: 1387846 - RNA, 19 nt, Homo sapiens
  misc_RNA (1)...(19): siRNA sense strand
aaucaagcuuccauauguu

SEQ ID NO: 1387847 - RNA, 19 nt, Homo sapiens
  misc_RNA (1)...(19): siRNA sense strand
caccaaaacuacauagauu

SEQ ID NO: 1387848 - RNA, 19 nt, Homo sapiens
  misc_RNA (1)...(19): siRNA sense strand
caauaaacagccuccaguu

SEQ ID NO: 1387849 - RNA, 19 nt, Homo sapiens
  misc_RNA (1)...(19): siRNA sense strand
gagcgacaaaguauaacaa

SEQ ID NO: 1387850 - RNA, 19 nt, Homo sapiens
  misc_RNA (1)...(19): siRNA sense strand
ccaaggagacauggaagaa

SEQ ID NO: 1387851 - RNA, 19 nt, Homo sapiens
  misc_RNA (1)...(19): siRNA sense strand
gaauacacgcucuuuacuc

SEQ ID NO: 1387852 - RNA, 19 nt, Homo sapiens
  misc_RNA (1)...(19): siRNA sense strand
caguggagauaauaaucaa

SEQ ID NO: 1387853 - RNA, 19 nt, Homo sapiens
  misc_RNA (1)...(19): siRNA sense strand
gcgacaaaguauaacaagu

SEQ ID NO: 1387854 - RNA, 19 nt, Homo sapiens
  misc_RNA (1)...(19): siRNA sense strand
gcaugguauucaaguacaa

SEQ ID NO: 1387855 - RNA, 19 nt, Homo sapiens
  misc_RNA (1)...(19): siRNA sense strand
ugacagggaacauggaaug

SEQ ID NO: 1387856 - RNA, 19 nt, Homo sapiens
  misc_RNA (1)...(19): siRNA sense strand
ggaauacacgcucuuuacu

SEQ ID NO: 1387857 - RNA, 19 nt, Homo sapiens
  misc_RNA (1)...(19): siRNA sense strand
ucgguugcccucucauuua

SEQ ID NO: 1387858 - RNA, 19 nt, Homo sapiens
  misc_RNA (1)...(19): siRNA sense strand
gagagccagugaauuucug

SEQ ID NO: 1387859 - RNA, 19 nt, Homo sapiens
  misc_RNA (1)...(19): siRNA sense strand
aaaaguaucgggaaaauug

SEQ ID NO: 1387860 - RNA, 19 nt, Homo sapiens
  misc_RNA (1)...(19): siRNA sense strand
gcaugaacuugcugugcau

SEQ ID NO: 1387861 - RNA, 19 nt, Homo sapiens
  misc_RNA (1)...(19): siRNA sense strand
gaaucaagcuuccauaugu

SEQ ID NO: 1387862 - RNA, 19 nt, Homo sapiens
  misc_RNA (1)...(19): siRNA sense strand
gcaaagauguuucucuguu

SEQ ID NO: 1387863 - RNA, 19 nt, Homo sapiens
  misc_RNA (1)...(19): siRNA sense strand
acacaugccuggagacuua

SEQ ID NO: 1387864 - RNA, 19 nt, Homo sapiens
  misc_RNA (1)...(19): siRNA sense strand
caacaaagcccgaggauau

SEQ ID NO: 1387865 - RNA, 19 nt, Homo sapiens
  misc_RNA (1)...(19): siRNA sense strand
ccaaagaaauucaggaaga

SEQ ID NO: 1387866 - RNA, 19 nt, Homo sapiens
  misc_RNA (1)...(19): siRNA sense strand
cuacauagauuucuucaug

SEQ ID NO: 1387867 - RNA, 19 nt, Homo sapiens
  misc_RNA (1)...(19): siRNA sense strand
ggaaauugaugauauugug

SEQ ID NO: 1387868 - RNA, 19 nt, Homo sapiens
  misc_RNA (1)...(19): siRNA sense strand
aaacucagcuauugccaua

SEQ ID NO: 1387869 - RNA, 19 nt, Homo sapiens
  misc_RNA (1)...(19): siRNA sense strand
gaagauaauucugguugaa

SEQ ID NO: 1387870 - RNA, 19 nt, Homo sapiens
  misc_RNA (1)...(19): siRNA sense strand
caaagauguuucucuguuu

SEQ ID NO: 1387871 - RNA, 19 nt, Homo sapiens
  misc_RNA (1)...(19): siRNA sense strand
guacaagaguggauuaauc

SEQ ID NO: 1387872 - RNA, 19 nt, Homo sapiens
  misc_RNA (1)...(19): siRNA sense strand
ggaagaguguucuaucuca

SEQ ID NO: 1387873 - RNA, 19 nt, Homo sapiens
  misc_RNA (1)...(19): siRNA sense strand
gaaagacaacgaccuuaaa

SEQ ID NO: 1387874 - RNA, 19 nt, Homo sapiens
  misc_RNA (1)...(19): siRNA sense strand
ggaaagacaacgaccuuaa

SEQ ID NO: 1387875 - RNA, 19 nt, Homo sapiens
  misc_RNA (1)...(19): siRNA sense strand
caaagaguuucuacuaaga

SEQ ID NO: 1387876 - RNA, 19 nt, Homo sapiens
  misc_RNA (1)...(19): siRNA sense strand
ccucagugguuucuaauaa

SEQ ID NO: 1387877 - RNA, 19 nt, Homo sapiens
  misc_RNA (1)...(19): siRNA sense strand
ccagugaauuucugaguuu

SEQ ID NO: 1387878 - RNA, 19 nt, Homo sapiens
  misc_RNA (1)...(19): siRNA sense strand
cagggaacauggaaugaua

SEQ ID NO: 1387879 - RNA, 19 nt, Homo sapiens
  misc_RNA (1)...(19): siRNA sense strand
uaagagcgacaaaguauaa

SEQ ID NO: 1387880 - RNA, 19 nt, Homo sapiens
  misc_RNA (1)...(19): siRNA sense strand
gagcaucuuuaacagaauu

SEQ ID NO: 1387881 - RNA, 19 nt, Homo sapiens
  misc_RNA (1)...(19): siRNA sense strand
ccuggagacuuauuuaauu

SEQ ID NO: 1387882 - RNA, 19 nt, Homo sapiens
  misc_RNA (1)...(19): siRNA sense strand
cgacaaaguauaacaaguu

SEQ ID NO: 1387883 - RNA, 19 nt, Homo sapiens
  misc_RNA (1)...(19): siRNA sense strand
ggagcaugguauucaagua

SEQ ID NO: 1387884 - RNA, 19 nt, Homo sapiens
  misc_RNA (1)...(19): siRNA sense strand
gaagaguguucuaucucaa

SEQ ID NO: 1387885 - RNA, 19 nt, Homo sapiens
  misc_RNA (1)...(19): siRNA sense strand
ucaaagaguuucuacuaag

SEQ ID NO: 1387886 - RNA, 19 nt, Homo sapiens
  misc_RNA (1)...(19): siRNA sense strand
gagaacugauaagaagaua

SEQ ID NO: 1387887 - RNA, 19 nt, Homo sapiens
  misc_RNA (1)...(19): siRNA sense strand
gcucuuuacucagggaaua

SEQ ID NO: 1387888 - RNA, 19 nt, Homo sapiens
  misc_RNA (1)...(19): siRNA sense strand
cgggauacauuacuuguug

SEQ ID NO: 1387889 - RNA, 19 nt, Homo sapiens
  misc_RNA (1)...(19): siRNA sense strand
ucgauguccucuuauauuu

SEQ ID NO: 1387890 - RNA, 19 nt, Homo sapiens
  misc_RNA (1)...(19): siRNA sense strand
agauuuaccuaaccaguuu

SEQ ID NO: 1387891 - RNA, 19 nt, Homo sapiens
  misc_RNA (1)...(19): siRNA sense strand
ggaaguaugugaggauugg

SEQ ID NO: 1387892 - RNA, 19 nt, Homo sapiens
  misc_RNA (1)...(19): siRNA sense strand
gauaucagaagugcaauaa

SEQ ID NO: 1387893 - RNA, 19 nt, Homo sapiens
  misc_RNA (1)...(19): siRNA sense strand
gcaccaacaauuaugauga

SEQ ID NO: 1387894 - RNA, 19 nt, Homo sapiens
  misc_RNA (1)...(19): siRNA sense strand
aaacaggguggaucuauuu

SEQ ID NO: 1387895 - RNA, 19 nt, Homo sapiens
  misc_RNA (1)...(19): siRNA sense strand
gaugaucugagaacugaua

SEQ ID NO: 1387896 - RNA, 19 nt, Homo sapiens
  misc_RNA (1)...(19): siRNA sense strand
ggguggaucuauuuuauua

SEQ ID NO: 1387897 - RNA, 19 nt, Homo sapiens
  misc_RNA (1)...(19): siRNA sense strand
uaucagaagugcaauaaac

SEQ ID NO: 1387898 - RNA, 19 nt, Homo sapiens
  misc_RNA (1)...(19): siRNA sense strand
ugugagagccagugaauuu

SEQ ID NO: 1387899 - RNA, 19 nt, Homo sapiens
  misc_RNA (1)...(19): siRNA sense strand
caaaggagcaugguauuca

SEQ ID NO: 1387900 - RNA, 19 nt, Homo sapiens
  misc_RNA (1)...(19): siRNA sense strand
ccggaaaccuggucucuuc

SEQ ID NO: 1387901 - RNA, 19 nt, Homo sapiens
  misc_RNA (1)...(19): siRNA sense strand
gaagcgacacuuuggaaga

SEQ ID NO: 1387902 - RNA, 19 nt, Homo sapiens
  misc_RNA (1)...(19): siRNA sense strand
cgagaggugugaugcauuc

SEQ ID NO: 1387903 - RNA, 19 nt, Homo sapiens
  misc_RNA (1)...(19): siRNA sense strand
cagaugcugugcugucaaa

SEQ ID NO: 1387904 - RNA, 19 nt, Homo sapiens
  misc_RNA (1)...(19): siRNA sense strand
caccaacaauuaugaugaa

SEQ ID NO: 1387905 - RNA, 19 nt, Homo sapiens
  misc_RNA (1)...(19): siRNA sense strand
gaacgggauacauuacuug

SEQ ID NO: 1387906 - RNA, 19 nt, Homo sapiens
  misc_RNA (1)...(19): siRNA sense strand
gaucugagaacugauaaga

SEQ ID NO: 1387907 - RNA, 19 nt, Homo sapiens
  misc_RNA (1)...(19): siRNA sense strand
uaacaagaauggaggaaaa

SEQ ID NO: 1387908 - RNA, 19 nt, Homo sapiens
  misc_RNA (1)...(19): siRNA sense strand
caaguacaagaguggauua

SEQ ID NO: 1387909 - RNA, 19 nt, Homo sapiens
  misc_RNA (1)...(19): siRNA sense strand
gaaaccuggucucuuccuu

SEQ ID NO: 1387910 - RNA, 19 nt, Homo sapiens
  misc_RNA (1)...(19): siRNA sense strand
guuauuguuucccaaagaa

SEQ ID NO: 1387911 - RNA, 19 nt, Homo sapiens
  misc_RNA (1)...(19): siRNA sense strand
uacaugaaguucuaaggaa

SEQ ID NO: 1387912 - RNA, 19 nt, Homo sapiens
  misc_RNA (1)...(19): siRNA sense strand
ucugagaacugauaagaag

SEQ ID NO: 1387913 - RNA, 19 nt, Homo sapiens
  misc_RNA (1)...(19): siRNA sense strand
aauacacgcucuuuacuca

SEQ ID NO: 1387914 - RNA, 19 nt, Homo sapiens
  misc_RNA (1)...(19): siRNA sense strand
caacuuacggccaaggaaa

SEQ ID NO: 1387915 - RNA, 19 nt, Homo sapiens
  misc_RNA (1)...(19): siRNA sense strand
caaagaaauucaggaagag

SEQ ID NO: 1387916 - RNA, 19 nt, Homo sapiens
  misc_RNA (1)...(19): siRNA sense strand
ggagguaguagaaauguca

SEQ ID NO: 1387917 - RNA, 19 nt, Homo sapiens
  misc_RNA (1)...(19): siRNA sense strand
gccagugaauuucugaguu

SEQ ID NO: 1387918 - RNA, 19 nt, Homo sapiens
  misc_RNA (1)...(19): siRNA sense strand
uacaaaugcuuggagauga

SEQ ID NO: 1387919 - RNA, 19 nt, Homo sapiens
  misc_RNA (1)...(19): siRNA sense strand
ugaacuugcugugcauaaa

SEQ ID NO: 1387920 - RNA, 19 nt, Homo sapiens
  misc_RNA (1)...(19): siRNA sense strand
ccucucauuuaucagaaua

SEQ ID NO: 1387921 - RNA, 19 nt, Homo sapiens
  misc_RNA (1)...(19): siRNA sense strand
caagagguccaagcuauug

SEQ ID NO: 1387922 - RNA, 19 nt, Homo sapiens
  misc_RNA (1)...(19): siRNA sense strand
ucgggauucucauacuuua

SEQ ID NO: 1387923 - RNA, 19 nt, Homo sapiens
  misc_RNA (1)...(19): siRNA sense strand
gguuauuguuucccaaaga

SEQ ID NO: 1387924 - RNA, 19 nt, Homo sapiens
  misc_RNA (1)...(19): siRNA sense strand
gccauaccuugcucuacua

SEQ ID NO: 1387925 - RNA, 19 nt, Homo sapiens
  misc_RNA (1)...(19): siRNA sense strand
caaggaggaggaucaaguu

SEQ ID NO: 1387926 - RNA, 19 nt, Homo sapiens
  misc_RNA (1)...(19): siRNA sense strand
ugugaugcauuccaacaaa

SEQ ID NO: 1387927 - RNA, 19 nt, Homo sapiens
  misc_RNA (1)...(19): siRNA sense strand
gaggugugaugcauuccaa

SEQ ID NO: 1387928 - RNA, 19 nt, Homo sapiens
  misc_RNA (1)...(19): siRNA sense strand
aaagauguuucucuguuuc

SEQ ID NO: 1387929 - RNA, 19 nt, Homo sapiens
  misc_RNA (1)...(19): siRNA sense strand
gggauguucuggugauauc

SEQ ID NO: 1387930 - RNA, 19 nt, Homo sapiens
  misc_RNA (1)...(19): siRNA sense strand
ugacaaaacuucucuagag

SEQ ID NO: 1387931 - RNA, 19 nt, Homo sapiens
  misc_RNA (1)...(19): siRNA sense strand
caggaagaguguucuaucu

SEQ ID NO: 1387932 - RNA, 19 nt, Homo sapiens
  misc_RNA (1)...(19): siRNA sense strand
ugaacgggauacauuacuu

SEQ ID NO: 1387933 - RNA, 19 nt, Homo sapiens
  misc_RNA (1)...(19): siRNA sense strand
ggugauaucagaagugcaa

SEQ ID NO: 1387934 - RNA, 19 nt, Homo sapiens
  misc_RNA (1)...(19): siRNA sense strand
agauaauucugguugaaga

SEQ ID NO: 1387935 - RNA, 19 nt, Homo sapiens
  misc_RNA (1)...(19): siRNA sense strand
aaaggagcaugguauucaa

SEQ ID NO: 1387936 - RNA, 19 nt, Homo sapiens
  misc_RNA (1)...(19): siRNA sense strand
aauaugaacgggauacauu

SEQ ID NO: 1387937 - RNA, 19 nt, Homo sapiens
  misc_RNA (1)...(19): siRNA sense strand
cuauagaagcuaacaagaa

SEQ ID NO: 1387938 - RNA, 19 nt, Homo sapiens
  misc_RNA (1)...(19): siRNA sense strand
cgauguccucuuauauuua

SEQ ID NO: 1387939 - RNA, 19 nt, Homo sapiens
  misc_RNA (1)...(19): siRNA sense strand
auuggucgauguccucuua

SEQ ID NO: 1387940 - RNA, 19 nt, Homo sapiens
  misc_RNA (1)...(19): siRNA sense strand
gaaguucuaaggaaguaug

SEQ ID NO: 1387941 - RNA, 19 nt, Homo sapiens
  misc_RNA (1)...(19): siRNA sense strand
ccuguggcaccaacaauua

SEQ ID NO: 1387942 - RNA, 19 nt, Homo sapiens
  misc_RNA (1)...(19): siRNA sense strand
gcgacacuuuggaagauug

SEQ ID NO: 1387943 - RNA, 19 nt, Homo sapiens
  misc_RNA (1)...(19): siRNA sense strand
ggaggaggaucaaguuuuc

SEQ ID NO: 1387944 - RNA, 19 nt, Homo sapiens
  misc_RNA (1)...(19): siRNA sense strand
gggauacauuacuuguuga

SEQ ID NO: 1387945 - RNA, 19 nt, Homo sapiens
  misc_RNA (1)...(19): siRNA sense strand
uaucaaaggagcaugguau

SEQ ID NO: 1387946 - RNA, 19 nt, Homo sapiens
  misc_RNA (1)...(19): siRNA sense strand
aaucaagcuuccauauguu

SEQ ID NO: 1387947 - RNA, 19 nt, Homo sapiens
  misc_RNA (1)...(19): siRNA sense strand
caccaaaacuacauagauu

SEQ ID NO: 1387948 - RNA, 19 nt, Homo sapiens
  misc_RNA (1)...(19): siRNA sense strand
caauaaacagccuccaguu

SEQ ID NO: 1387949 - RNA, 19 nt, Homo sapiens
  misc_RNA (1)...(19): siRNA sense strand
gagcgacaaaguauaacaa

SEQ ID NO: 1387950 - RNA, 19 nt, Homo sapiens
  misc_RNA (1)...(19): siRNA sense strand
ccaaggagacauggaagaa

SEQ ID NO: 1387951 - RNA, 19 nt, Homo sapiens
  misc_RNA (1)...(19): siRNA sense strand
gaauacacgcucuuuacuc

SEQ ID NO: 1387952 - RNA, 19 nt, Homo sapiens
  misc_RNA (1)...(19): siRNA sense strand
caguggagauaauaaucaa

SEQ ID NO: 1387953 - RNA, 19 nt, Homo sapiens
  misc_RNA (1)...(19): siRNA sense strand
gcgacaaaguauaacaagu

SEQ ID NO: 1387954 - RNA, 19 nt, Homo sapiens
  misc_RNA (1)...(19): siRNA sense strand
gcaugguauucaaguacaa

SEQ ID NO: 1387955 - RNA, 19 nt, Homo sapiens
  misc_RNA (1)...(19): siRNA sense strand
ugacagggaacauggaaug

SEQ ID NO: 1387956 - RNA, 19 nt, Homo sapiens
  misc_RNA (1)...(19): siRNA sense strand
ggaauacacgcucuuuacu

SEQ ID NO: 1387957 - RNA, 19 nt, Homo sapiens
  misc_RNA (1)...(19): siRNA sense strand
ucgguugcccucucauuua

SEQ ID NO: 1387958 - RNA, 19 nt, Homo sapiens
  misc_RNA (1)...(19): siRNA sense strand
gagagccagugaauuucug

SEQ ID NO: 1387959 - RNA, 19 nt, Homo sapiens
  misc_RNA (1)...(19): siRNA sense strand
aaaaguaucgggaaaauug

SEQ ID NO: 1387960 - RNA, 19 nt, Homo sapiens
  misc_RNA (1)...(19): siRNA sense strand
gcaugaacuugcugugcau

SEQ ID NO: 1387961 - RNA, 19 nt, Homo sapiens
  misc_RNA (1)...(19): siRNA sense strand
gaaucaagcuuccauaugu

SEQ ID NO: 1387962 - RNA, 19 nt, Homo sapiens
  misc_RNA (1)...(19): siRNA sense strand
gcaaagauguuucucuguu

SEQ ID NO: 1387963 - RNA, 19 nt, Homo sapiens
  misc_RNA (1)...(19): siRNA sense strand
acacaugccuggagacuua

SEQ ID NO: 1387964 - RNA, 19 nt, Homo sapiens
  misc_RNA (1)...(19): siRNA sense strand
caacaaagcccgaggauau

SEQ ID NO: 1387965 - RNA, 19 nt, Homo sapiens
  misc_RNA (1)...(19): siRNA sense strand
ccaaagaaauucaggaaga

SEQ ID NO: 1387966 - RNA, 19 nt, Homo sapiens
  misc_RNA (1)...(19): siRNA sense strand
cuacauagauuucuucaug

SEQ ID NO: 1387967 - RNA, 19 nt, Homo sapiens
  misc_RNA (1)...(19): siRNA sense strand
ggaaauugaugauauugug

SEQ ID NO: 1387968 - RNA, 19 nt, Homo sapiens
  misc_RNA (1)...(19): siRNA sense strand
aaacucagcuauugccaua

SEQ ID NO: 1387969 - RNA, 19 nt, Homo sapiens
  misc_RNA (1)...(19): siRNA sense strand
gaagauaauucugguugaa

SEQ ID NO: 1387970 - RNA, 19 nt, Homo sapiens
  misc_RNA (1)...(19): siRNA sense strand
caaagauguuucucuguuu

SEQ ID NO: 1387971 - RNA, 19 nt, Homo sapiens
  misc_RNA (1)...(19): siRNA sense strand
guacaagaguggauuaauc

SEQ ID NO: 1387972 - RNA, 19 nt, Homo sapiens
  misc_RNA (1)...(19): siRNA sense strand
ggaagaguguucuaucuca

SEQ ID NO: 1387973 - RNA, 19 nt, Homo sapiens
  misc_RNA (1)...(19): siRNA sense strand
gaaagacaacgaccuuaaa

SEQ ID NO: 1387974 - RNA, 19 nt, Homo sapiens
  misc_RNA (1)...(19): siRNA sense strand
ggaaagacaacgaccuuaa

SEQ ID NO: 1387975 - RNA, 19 nt, Homo sapiens
  misc_RNA (1)...(19): siRNA sense strand
caaagaguuucuacuaaga

SEQ ID NO: 1387976 - RNA, 19 nt, Homo sapiens
  misc_RNA (1)...(19): siRNA sense strand
ccucagugguuucuaauaa

SEQ ID NO: 1387977 - RNA, 19 nt, Homo sapiens
  misc_RNA (1)...(19): siRNA sense strand
ccagugaauuucugaguuu

SEQ ID NO: 1387978 - RNA, 19 nt, Homo sapiens
  misc_RNA (1)...(19): siRNA sense strand
cagggaacauggaaugaua

SEQ ID NO: 1387979 - RNA, 19 nt, Homo sapiens
  misc_RNA (1)...(19): siRNA sense strand
uaagagcgacaaaguauaa

SEQ ID NO: 1387980 - RNA, 19 nt, Homo sapiens
  misc_RNA (1)...(19): siRNA sense strand
gagcaucuuuaacagaauu

SEQ ID NO: 1387981 - RNA, 19 nt, Homo sapiens
  misc_RNA (1)...(19): siRNA sense strand
ccuggagacuuauuuaauu

SEQ ID NO: 1387982 - RNA, 19 nt, Homo sapiens
  misc_RNA (1)...(19): siRNA sense strand
cgacaaaguauaacaaguu

SEQ ID NO: 1387983 - RNA, 19 nt, Homo sapiens
  misc_RNA (1)...(19): siRNA sense strand
ggagcaugguauucaagua

SEQ ID NO: 1387984 - RNA, 19 nt, Homo sapiens
  misc_RNA (1)...(19): siRNA sense strand
gaagaguguucuaucucaa

SEQ ID NO: 1387985 - RNA, 19 nt, Homo sapiens
  misc_RNA (1)...(19): siRNA sense strand
ucaaagaguuucuacuaag

SEQ ID NO: 1387986 - RNA, 19 nt, Homo sapiens
  misc_RNA (1)...(19): siRNA sense strand
gagaacugauaagaagaua

SEQ ID NO: 1387987 - RNA, 19 nt, Homo sapiens
  misc_RNA (1)...(19): siRNA sense strand
gcucuuuacucagggaaua

SEQ ID NO: 1387988 - RNA, 19 nt, Homo sapiens
  misc_RNA (1)...(19): siRNA sense strand
cgggauacauuacuuguug

SEQ ID NO: 1387989 - RNA, 19 nt, Homo sapiens
  misc_RNA (1)...(19): siRNA sense strand
ucgauguccucuuauauuu

SEQ ID NO: 1387990 - RNA, 19 nt, Homo sapiens
  misc_RNA (1)...(19): siRNA sense strand
agauuuaccuaaccaguuu

SEQ ID NO: 1387991 - RNA, 19 nt, Homo sapiens
  misc_RNA (1)...(19): siRNA sense strand
ggaaguaugugaggauugg

SEQ ID NO: 1387992 - RNA, 19 nt, Homo sapiens
  misc_RNA (1)...(19): siRNA sense strand
gauaucagaagugcaauaa

SEQ ID NO: 1387993 - RNA, 19 nt, Homo sapiens
  misc_RNA (1)...(19): siRNA sense strand
gcaccaacaauuaugauga

SEQ ID NO: 1387994 - RNA, 19 nt, Homo sapiens
  misc_RNA (1)...(19): siRNA sense strand
aaacaggguggaucuauuu

SEQ ID NO: 1387995 - RNA, 19 nt, Homo sapiens
  misc_RNA (1)...(19): siRNA sense strand
gaugaucugagaacugaua

SEQ ID NO: 1387996 - RNA, 19 nt, Homo sapiens
  misc_RNA (1)...(19): siRNA sense strand
ggguggaucuauuuuauua

SEQ ID NO: 1387997 - RNA, 19 nt, Homo sapiens
  misc_RNA (1)...(19): siRNA sense strand
uaucagaagugcaauaaac

SEQ ID NO: 1387998 - RNA, 19 nt, Homo sapiens
  misc_RNA (1)...(19): siRNA sense strand
ugugagagccagugaauuu

SEQ ID NO: 1387999 - RNA, 19 nt, Homo sapiens
  misc_RNA (1)...(19): siRNA sense strand
caaaggagcaugguauuca

SEQ ID NO: 1388000 - RNA, 19 nt, Homo sapiens
  misc_RNA (1)...(19): siRNA sense strand
ccggaaaccuggucucuuc

SEQ ID NO: 1388001 - RNA, 19 nt, Homo sapiens
  misc_RNA (1)...(19): siRNA sense strand
gaagcgacacuuuggaaga

SEQ ID NO: 1388002 - RNA, 19 nt, Homo sapiens
  misc_RNA (1)...(19): siRNA sense strand
cgagaggugugaugcauuc

SEQ ID NO: 1388003 - RNA, 19 nt, Homo sapiens
  misc_RNA (1)...(19): siRNA sense strand
cagaugcugugcugucaaa

SEQ ID NO: 1388004 - RNA, 19 nt, Homo sapiens
  misc_RNA (1)...(19): siRNA sense strand
caccaacaauuaugaugaa

SEQ ID NO: 1388005 - RNA, 19 nt, Homo sapiens
  misc_RNA (1)...(19): siRNA sense strand
gaacgggauacauuacuug

SEQ ID NO: 1388006 - RNA, 19 nt, Homo sapiens
  misc_RNA (1)...(19): siRNA sense strand
gaucugagaacugauaaga

SEQ ID NO: 1388007 - RNA, 19 nt, Homo sapiens
  misc_RNA (1)...(19): siRNA sense strand
uaacaagaauggaggaaaa

SEQ ID NO: 1388008 - RNA, 19 nt, Homo sapiens
  misc_RNA (1)...(19): siRNA sense strand
caaguacaagaguggauua

SEQ ID NO: 1388009 - RNA, 19 nt, Homo sapiens
  misc_RNA (1)...(19): siRNA sense strand
gaaaccuggucucuuccuu

SEQ ID NO: 1388010 - RNA, 19 nt, Homo sapiens
  misc_RNA (1)...(19): siRNA sense strand
guuauuguuucccaaagaa

SEQ ID NO: 1388011 - RNA, 19 nt, Homo sapiens
  misc_RNA (1)...(19): siRNA sense strand
uacaugaaguucuaaggaa

SEQ ID NO: 1388012 - RNA, 19 nt, Homo sapiens
  misc_RNA (1)...(19): siRNA sense strand
ucugagaacugauaagaag

SEQ ID NO: 1388013 - RNA, 19 nt, Homo sapiens
  misc_RNA (1)...(19): siRNA sense strand
aauacacgcucuuuacuca

SEQ ID NO: 1388014 - RNA, 19 nt, Homo sapiens
  misc_RNA (1)...(19): siRNA sense strand
caacuuacggccaaggaaa

SEQ ID NO: 1388015 - RNA, 19 nt, Homo sapiens
  misc_RNA (1)...(19): siRNA sense strand
caaagaaauucaggaagag

SEQ ID NO: 1388016 - RNA, 19 nt, Homo sapiens
  misc_RNA (1)...(19): siRNA sense strand
ggagguaguagaaauguca

SEQ ID NO: 1388017 - RNA, 19 nt, Homo sapiens
  misc_RNA (1)...(19): siRNA sense strand
gccagugaauuucugaguu

SEQ ID NO: 1388018 - RNA, 19 nt, Homo sapiens
  misc_RNA (1)...(19): siRNA sense strand
uacaaaugcuuggagauga

SEQ ID NO: 1388019 - RNA, 19 nt, Homo sapiens
  misc_RNA (1)...(19): siRNA sense strand
ugaacuugcugugcauaaa

SEQ ID NO: 1388020 - RNA, 19 nt, Homo sapiens
  misc_RNA (1)...(19): siRNA sense strand
ccucucauuuaucagaaua

SEQ ID NO: 1388021 - RNA, 19 nt, Homo sapiens
  misc_RNA (1)...(19): siRNA sense strand
caagagguccaagcuauug

SEQ ID NO: 1388022 - RNA, 19 nt, Homo sapiens
  misc_RNA (1)...(19): siRNA sense strand
ucgggauucucauacuuua

SEQ ID NO: 1388023 - RNA, 19 nt, Homo sapiens
  misc_RNA (1)...(19): siRNA sense strand
gguuauuguuucccaaaga

SEQ ID NO: 1388024 - RNA, 19 nt, Homo sapiens
  misc_RNA (1)...(19): siRNA sense strand
gccauaccuugcucuacua

SEQ ID NO: 1388025 - RNA, 19 nt, Homo sapiens
  misc_RNA (1)...(19): siRNA sense strand
caaggaggaggaucaaguu

SEQ ID NO: 1388026 - RNA, 19 nt, Homo sapiens
  misc_RNA (1)...(19): siRNA sense strand
ugugaugcauuccaacaaa

SEQ ID NO: 1388027 - RNA, 19 nt, Homo sapiens
  misc_RNA (1)...(19): siRNA sense strand
gaggugugaugcauuccaa

SEQ ID NO: 1388028 - RNA, 19 nt, Homo sapiens
  misc_RNA (1)...(19): siRNA sense strand
aaagauguuucucuguuuc

SEQ ID NO: 1388029 - RNA, 19 nt, Homo sapiens
  misc_RNA (1)...(19): siRNA sense strand
gggauguucuggugauauc

SEQ ID NO: 1388030 - RNA, 19 nt, Homo sapiens
  misc_RNA (1)...(19): siRNA sense strand
ugacaaaacuucucuagag

SEQ ID NO: 1388031 - RNA, 19 nt, Homo sapiens
  misc_RNA (1)...(19): siRNA sense strand
caggaagaguguucuaucu

SEQ ID NO: 1388032 - RNA, 19 nt, Homo sapiens
  misc_RNA (1)...(19): siRNA sense strand
ugaacgggauacauuacuu

SEQ ID NO: 1388033 - RNA, 19 nt, Homo sapiens
  misc_RNA (1)...(19): siRNA sense strand
ggugauaucagaagugcaa

SEQ ID NO: 1388034 - RNA, 19 nt, Homo sapiens
  misc_RNA (1)...(19): siRNA sense strand
agauaauucugguugaaga

SEQ ID NO: 1388035 - RNA, 19 nt, Homo sapiens
  misc_RNA (1)...(19): siRNA sense strand
aaaggagcaugguauucaa

SEQ ID NO: 1388036 - RNA, 19 nt, Homo sapiens
  misc_RNA (1)...(19): siRNA sense strand
aauaugaacgggauacauu

SEQ ID NO: 1388037 - RNA, 19 nt, Homo sapiens
  misc_RNA (1)...(19): siRNA sense strand
cuauagaagcuaacaagaa

SEQ ID NO: 1388038 - RNA, 19 nt, Homo sapiens
  misc_RNA (1)...(19): siRNA sense strand
cgauguccucuuauauuua

SEQ ID NO: 1388039 - RNA, 19 nt, Homo sapiens
  misc_RNA (1)...(19): siRNA sense strand
auuggucgauguccucuua

SEQ ID NO: 1388040 - RNA, 19 nt, Homo sapiens
  misc_RNA (1)...(19): siRNA sense strand
gaaguucuaaggaaguaug

SEQ ID NO: 1388041 - RNA, 19 nt, Homo sapiens
  misc_RNA (1)...(19): siRNA sense strand
ccuguggcaccaacaauua

SEQ ID NO: 1388042 - RNA, 19 nt, Homo sapiens
  misc_RNA (1)...(19): siRNA sense strand
gcgacacuuuggaagauug

SEQ ID NO: 1388043 - RNA, 19 nt, Homo sapiens
  misc_RNA (1)...(19): siRNA sense strand
ggaggaggaucaaguuuuc

SEQ ID NO: 1388044 - RNA, 19 nt, Homo sapiens
  misc_RNA (1)...(19): siRNA sense strand
gggauacauuacuuguuga

SEQ ID NO: 1388045 - RNA, 19 nt, Homo sapiens
  misc_RNA (1)...(19): siRNA sense strand
uaucaaaggagcaugguau

SEQ ID NO: 1388046 - RNA, 19 nt, Homo sapiens
  misc_RNA (1)...(19): siRNA sense strand
aaucaagcuuccauauguu

SEQ ID NO: 1388047 - RNA, 19 nt, Homo sapiens
  misc_RNA (1)...(19): siRNA sense strand
caccaaaacuacauagauu

SEQ ID NO: 1388048 - RNA, 19 nt, Homo sapiens
  misc_RNA (1)...(19): siRNA sense strand
caauaaacagccuccaguu

SEQ ID NO: 1388049 - RNA, 19 nt, Homo sapiens
  misc_RNA (1)...(19): siRNA sense strand
gagcgacaaaguauaacaa

SEQ ID NO: 1388050 - RNA, 19 nt, Homo sapiens
  misc_RNA (1)...(19): siRNA sense strand
ccaaggagacauggaagaa

SEQ ID NO: 1388051 - RNA, 19 nt, Homo sapiens
  misc_RNA (1)...(19): siRNA sense strand
gaauacacgcucuuuacuc

SEQ ID NO: 1388052 - RNA, 19 nt, Homo sapiens
  misc_RNA (1)...(19): siRNA sense strand
caguggagauaauaaucaa

SEQ ID NO: 1388053 - RNA, 19 nt, Homo sapiens
  misc_RNA (1)...(19): siRNA sense strand
gcgacaaaguauaacaagu

SEQ ID NO: 1388054 - RNA, 19 nt, Homo sapiens
  misc_RNA (1)...(19): siRNA sense strand
gcaugguauucaaguacaa

SEQ ID NO: 1388055 - RNA, 19 nt, Homo sapiens
  misc_RNA (1)...(19): siRNA sense strand
ugacagggaacauggaaug

SEQ ID NO: 1388056 - RNA, 19 nt, Homo sapiens
  misc_RNA (1)...(19): siRNA sense strand
ggaauacacgcucuuuacu

SEQ ID NO: 1388057 - RNA, 19 nt, Homo sapiens
  misc_RNA (1)...(19): siRNA sense strand
ucgguugcccucucauuua

SEQ ID NO: 1388058 - RNA, 19 nt, Homo sapiens
  misc_RNA (1)...(19): siRNA sense strand
gagagccagugaauuucug

SEQ ID NO: 1388059 - RNA, 19 nt, Homo sapiens
  misc_RNA (1)...(19): siRNA sense strand
aaaaguaucgggaaaauug

SEQ ID NO: 1388060 - RNA, 19 nt, Homo sapiens
  misc_RNA (1)...(19): siRNA sense strand
gcaugaacuugcugugcau

SEQ ID NO: 1388061 - RNA, 19 nt, Homo sapiens
  misc_RNA (1)...(19): siRNA sense strand
gaaucaagcuuccauaugu

SEQ ID NO: 1388062 - RNA, 19 nt, Homo sapiens
  misc_RNA (1)...(19): siRNA sense strand
gcaaagauguuucucuguu

SEQ ID NO: 1388063 - RNA, 19 nt, Homo sapiens
  misc_RNA (1)...(19): siRNA sense strand
acacaugccuggagacuua

SEQ ID NO: 1388064 - RNA, 19 nt, Homo sapiens
  misc_RNA (1)...(19): siRNA sense strand
caacaaagcccgaggauau

SEQ ID NO: 1388065 - RNA, 19 nt, Homo sapiens
  misc_RNA (1)...(19): siRNA sense strand
ccaaagaaauucaggaaga

SEQ ID NO: 1388066 - RNA, 19 nt, Homo sapiens
  misc_RNA (1)...(19): siRNA sense strand
cuacauagauuucuucaug

SEQ ID NO: 1388067 - RNA, 19 nt, Homo sapiens
  misc_RNA (1)...(19): siRNA sense strand
ggaaauugaugauauugug

SEQ ID NO: 1388068 - RNA, 19 nt, Homo sapiens
  misc_RNA (1)...(19): siRNA sense strand
aaacucagcuauugccaua

SEQ ID NO: 1388069 - RNA, 19 nt, Homo sapiens
  misc_RNA (1)...(19): siRNA sense strand
gaagauaauucugguugaa

SEQ ID NO: 1388070 - RNA, 19 nt, Homo sapiens
  misc_RNA (1)...(19): siRNA sense strand
caaagauguuucucuguuu

SEQ ID NO: 1388071 - RNA, 19 nt, Homo sapiens
  misc_RNA (1)...(19): siRNA sense strand
guacaagaguggauuaauc

SEQ ID NO: 1388072 - RNA, 19 nt, Homo sapiens
  misc_RNA (1)...(19): siRNA sense strand
ggaagaguguucuaucuca

SEQ ID NO: 1388073 - RNA, 19 nt, Homo sapiens
  misc_RNA (1)...(19): siRNA sense strand
gaaagacaacgaccuuaaa

SEQ ID NO: 1388074 - RNA, 19 nt, Homo sapiens
  misc_RNA (1)...(19): siRNA sense strand
ggaaagacaacgaccuuaa

SEQ ID NO: 1388075 - RNA, 19 nt, Homo sapiens
  misc_RNA (1)...(19): siRNA sense strand
caaagaguuucuacuaaga

SEQ ID NO: 1388076 - RNA, 19 nt, Homo sapiens
  misc_RNA (1)...(19): siRNA sense strand
ccucagugguuucuaauaa

SEQ ID NO: 1388077 - RNA, 19 nt, Homo sapiens
  misc_RNA (1)...(19): siRNA sense strand
ccagugaauuucugaguuu

SEQ ID NO: 1388078 - RNA, 19 nt, Homo sapiens
  misc_RNA (1)...(19): siRNA sense strand
cagggaacauggaaugaua

SEQ ID NO: 1388079 - RNA, 19 nt, Homo sapiens
  misc_RNA (1)...(19): siRNA sense strand
uaagagcgacaaaguauaa

SEQ ID NO: 1388080 - RNA, 19 nt, Homo sapiens
  misc_RNA (1)...(19): siRNA sense strand
gagcaucuuuaacagaauu

SEQ ID NO: 1388081 - RNA, 19 nt, Homo sapiens
  misc_RNA (1)...(19): siRNA sense strand
ccuggagacuuauuuaauu

SEQ ID NO: 1388082 - RNA, 19 nt, Homo sapiens
  misc_RNA (1)...(19): siRNA sense strand
cgacaaaguauaacaaguu

SEQ ID NO: 1388083 - RNA, 19 nt, Homo sapiens
  misc_RNA (1)...(19): siRNA sense strand
ggagcaugguauucaagua

SEQ ID NO: 1388084 - RNA, 19 nt, Homo sapiens
  misc_RNA (1)...(19): siRNA sense strand
gaagaguguucuaucucaa

SEQ ID NO: 1388085 - RNA, 19 nt, Homo sapiens
  misc_RNA (1)...(19): siRNA sense strand
ucaaagaguuucuacuaag

SEQ ID NO: 1388086 - RNA, 19 nt, Homo sapiens
  misc_RNA (1)...(19): siRNA sense strand
gagaacugauaagaagaua

SEQ ID NO: 1388087 - RNA, 19 nt, Homo sapiens
  misc_RNA (1)...(19): siRNA sense strand
gcucuuuacucagggaaua

SEQ ID NO: 1388088 - RNA, 19 nt, Homo sapiens
  misc_RNA (1)...(19): siRNA sense strand
cgggauacauuacuuguug

SEQ ID NO: 1388089 - RNA, 19 nt, Homo sapiens
  misc_RNA (1)...(19): siRNA sense strand
ucgauguccucuuauauuu

SEQ ID NO: 1388090 - RNA, 19 nt, Homo sapiens
  misc_RNA (1)...(19): siRNA sense strand
agauuuaccuaaccaguuu

SEQ ID NO: 1388091 - RNA, 19 nt, Homo sapiens
  misc_RNA (1)...(19): siRNA sense strand
ggaaguaugugaggauugg

SEQ ID NO: 1388092 - RNA, 19 nt, Homo sapiens
  misc_RNA (1)...(19): siRNA sense strand
gauaucagaagugcaauaa

SEQ ID NO: 1388093 - RNA, 19 nt, Homo sapiens
  misc_RNA (1)...(19): siRNA sense strand
gcaccaacaauuaugauga

SEQ ID NO: 1388094 - RNA, 19 nt, Homo sapiens
  misc_RNA (1)...(19): siRNA sense strand
aaacaggguggaucuauuu

SEQ ID NO: 1388095 - RNA, 19 nt, Homo sapiens
  misc_RNA (1)...(19): siRNA sense strand
gaugaucugagaacugaua

SEQ ID NO: 1388096 - RNA, 19 nt, Homo sapiens
  misc_RNA (1)...(19): siRNA sense strand
ggguggaucuauuuuauua

SEQ ID NO: 1388097 - RNA, 19 nt, Homo sapiens
  misc_RNA (1)...(19): siRNA sense strand
uaucagaagugcaauaaac

SEQ ID NO: 1388098 - RNA, 19 nt, Homo sapiens
  misc_RNA (1)...(19): siRNA sense strand
ugugagagccagugaauuu

SEQ ID NO: 1388099 - RNA, 19 nt, Homo sapiens
  misc_RNA (1)...(19): siRNA sense strand
caaaggagcaugguauuca

SEQ ID NO: 1388100 - RNA, 19 nt, Homo sapiens
  misc_RNA (1)...(19): siRNA sense strand
ccggaaaccuggucucuuc

SEQ ID NO: 1388101 - RNA, 19 nt, Homo sapiens
  misc_RNA (1)...(19): siRNA sense strand
gaagcgacacuuuggaaga

SEQ ID NO: 1388102 - RNA, 19 nt, Homo sapiens
  misc_RNA (1)...(19): siRNA sense strand
cgagaggugugaugcauuc

SEQ ID NO: 1388103 - RNA, 19 nt, Homo sapiens
  misc_RNA (1)...(19): siRNA sense strand
cagaugcugugcugucaaa

SEQ ID NO: 1388104 - RNA, 19 nt, Homo sapiens
  misc_RNA (1)...(19): siRNA sense strand
caccaacaauuaugaugaa

SEQ ID NO: 1388105 - RNA, 19 nt, Homo sapiens
  misc_RNA (1)...(19): siRNA sense strand
gaacgggauacauuacuug

SEQ ID NO: 1388106 - RNA, 19 nt, Homo sapiens
  misc_RNA (1)...(19): siRNA sense strand
gaucugagaacugauaaga

SEQ ID NO: 1388107 - RNA, 19 nt, Homo sapiens
  misc_RNA (1)...(19): siRNA sense strand
uaacaagaauggaggaaaa

SEQ ID NO: 1388108 - RNA, 19 nt, Homo sapiens
  misc_RNA (1)...(19): siRNA sense strand
caaguacaagaguggauua

SEQ ID NO: 1388109 - RNA, 19 nt, Homo sapiens
  misc_RNA (1)...(19): siRNA sense strand
gaaaccuggucucuuccuu

SEQ ID NO: 1388110 - RNA, 19 nt, Homo sapiens
  misc_RNA (1)...(19): siRNA sense strand
guuauuguuucccaaagaa

SEQ ID NO: 1388111 - RNA, 19 nt, Homo sapiens
  misc_RNA (1)...(19): siRNA sense strand
uacaugaaguucuaaggaa

SEQ ID NO: 1388112 - RNA, 19 nt, Homo sapiens
  misc_RNA (1)...(19): siRNA sense strand
ucugagaacugauaagaag

SEQ ID NO: 1388113 - RNA, 19 nt, Homo sapiens
  misc_RNA (1)...(19): siRNA sense strand
aauacacgcucuuuacuca

SEQ ID NO: 1388114 - RNA, 19 nt, Homo sapiens
  misc_RNA (1)...(19): siRNA sense strand
caacuuacggccaaggaaa

SEQ ID NO: 1388115 - RNA, 19 nt, Homo sapiens
  misc_RNA (1)...(19): siRNA sense strand
caaagaaauucaggaagag

SEQ ID NO: 1388116 - RNA, 19 nt, Homo sapiens
  misc_RNA (1)...(19): siRNA sense strand
ggagguaguagaaauguca

SEQ ID NO: 1388117 - RNA, 19 nt, Homo sapiens
  misc_RNA (1)...(19): siRNA sense strand
gccagugaauuucugaguu

SEQ ID NO: 1388118 - RNA, 19 nt, Homo sapiens
  misc_RNA (1)...(19): siRNA sense strand
uacaaaugcuuggagauga

SEQ ID NO: 1388119 - RNA, 19 nt, Homo sapiens
  misc_RNA (1)...(19): siRNA sense strand
ugaacuugcugugcauaaa

SEQ ID NO: 1388120 - RNA, 19 nt, Homo sapiens
  misc_RNA (1)...(19): siRNA sense strand
ccucucauuuaucagaaua

SEQ ID NO: 1388121 - RNA, 19 nt, Homo sapiens
  misc_RNA (1)...(19): siRNA sense strand
caagagguccaagcuauug

SEQ ID NO: 1388122 - RNA, 19 nt, Homo sapiens
  misc_RNA (1)...(19): siRNA sense strand
ucgggauucucauacuuua

SEQ ID NO: 1388123 - RNA, 19 nt, Homo sapiens
  misc_RNA (1)...(19): siRNA sense strand
gguuauuguuucccaaaga

SEQ ID NO: 1388124 - RNA, 19 nt, Homo sapiens
  misc_RNA (1)...(19): siRNA sense strand
gccauaccuugcucuacua

SEQ ID NO: 1388125 - RNA, 19 nt, Homo sapiens
  misc_RNA (1)...(19): siRNA sense strand
caaggaggaggaucaaguu

SEQ ID NO: 1388126 - RNA, 19 nt, Homo sapiens
  misc_RNA (1)...(19): siRNA sense strand
ugugaugcauuccaacaaa

SEQ ID NO: 1388127 - RNA, 19 nt, Homo sapiens
  misc_RNA (1)...(19): siRNA sense strand
gaggugugaugcauuccaa

SEQ ID NO: 1388128 - RNA, 19 nt, Homo sapiens
  misc_RNA (1)...(19): siRNA sense strand
aaagauguuucucuguuuc

SEQ ID NO: 1388129 - RNA, 19 nt, Homo sapiens
  misc_RNA (1)...(19): siRNA sense strand
gggauguucuggugauauc

SEQ ID NO: 1388130 - RNA, 19 nt, Homo sapiens
  misc_RNA (1)...(19): siRNA sense strand
ugacaaaacuucucuagag

SEQ ID NO: 1388131 - RNA, 19 nt, Homo sapiens
  misc_RNA (1)...(19): siRNA sense strand
caggaagaguguucuaucu

SEQ ID NO: 1388132 - RNA, 19 nt, Homo sapiens
  misc_RNA (1)...(19): siRNA sense strand
ugaacgggauacauuacuu

SEQ ID NO: 1388133 - RNA, 19 nt, Homo sapiens
  misc_RNA (1)...(19): siRNA sense strand
ggugauaucagaagugcaa

SEQ ID NO: 1388134 - RNA, 19 nt, Homo sapiens
  misc_RNA (1)...(19): siRNA sense strand
agauaauucugguugaaga

SEQ ID NO: 1388135 - RNA, 19 nt, Homo sapiens
  misc_RNA (1)...(19): siRNA sense strand
aaaggagcaugguauucaa

SEQ ID NO: 1388136 - RNA, 19 nt, Homo sapiens
  misc_RNA (1)...(19): siRNA sense strand
aauaugaacgggauacauu

SEQ ID NO: 1388137 - RNA, 19 nt, Homo sapiens
  misc_RNA (1)...(19): siRNA sense strand
cuauagaagcuaacaagaa

SEQ ID NO: 1388138 - RNA, 19 nt, Homo sapiens
  misc_RNA (1)...(19): siRNA sense strand
cgauguccucuuauauuua

SEQ ID NO: 1388139 - RNA, 19 nt, Homo sapiens
  misc_RNA (1)...(19): siRNA sense strand
auuggucgauguccucuua

SEQ ID NO: 1388140 - RNA, 19 nt, Homo sapiens
  misc_RNA (1)...(19): siRNA sense strand
gaaguucuaaggaaguaug

SEQ ID NO: 1388141 - RNA, 19 nt, Homo sapiens
  misc_RNA (1)...(19): siRNA sense strand
ccuguggcaccaacaauua

SEQ ID NO: 1388142 - RNA, 19 nt, Homo sapiens
  misc_RNA (1)...(19): siRNA sense strand
gcgacacuuuggaagauug

SEQ ID NO: 1388143 - RNA, 19 nt, Homo sapiens
  misc_RNA (1)...(19): siRNA sense strand
ggaggaggaucaaguuuuc

SEQ ID NO: 1388144 - RNA, 19 nt, Homo sapiens
  misc_RNA (1)...(19): siRNA sense strand
gggauacauuacuuguuga

SEQ ID NO: 1388145 - RNA, 19 nt, Homo sapiens
  misc_RNA (1)...(19): siRNA sense strand
uaucaaaggagcaugguau

SEQ ID NO: 1388146 - RNA, 19 nt, Homo sapiens
  misc_RNA (1)...(19): siRNA sense strand
aaucaagcuuccauauguu

SEQ ID NO: 1388147 - RNA, 19 nt, Homo sapiens
  misc_RNA (1)...(19): siRNA sense strand
caccaaaacuacauagauu

SEQ ID NO: 1388148 - RNA, 19 nt, Homo sapiens
  misc_RNA (1)...(19): siRNA sense strand
caauaaacagccuccaguu

SEQ ID NO: 1388149 - RNA, 19 nt, Homo sapiens
  misc_RNA (1)...(19): siRNA sense strand
gagcgacaaaguauaacaa

SEQ ID NO: 1388150 - RNA, 19 nt, Homo sapiens
  misc_RNA (1)...(19): siRNA sense strand
ccaaggagacauggaagaa

SEQ ID NO: 1388151 - RNA, 19 nt, Homo sapiens
  misc_RNA (1)...(19): siRNA sense strand
gaauacacgcucuuuacuc

SEQ ID NO: 1388152 - RNA, 19 nt, Homo sapiens
  misc_RNA (1)...(19): siRNA sense strand
caguggagauaauaaucaa

SEQ ID NO: 1388153 - RNA, 19 nt, Homo sapiens
  misc_RNA (1)...(19): siRNA sense strand
gcgacaaaguauaacaagu

SEQ ID NO: 1388154 - RNA, 19 nt, Homo sapiens
  misc_RNA (1)...(19): siRNA sense strand
gcaugguauucaaguacaa

SEQ ID NO: 1388155 - RNA, 19 nt, Homo sapiens
  misc_RNA (1)...(19): siRNA sense strand
ugacagggaacauggaaug

SEQ ID NO: 1388156 - RNA, 19 nt, Homo sapiens
  misc_RNA (1)...(19): siRNA sense strand
ggaauacacgcucuuuacu

SEQ ID NO: 1388157 - RNA, 19 nt, Homo sapiens
  misc_RNA (1)...(19): siRNA sense strand
ucgguugcccucucauuua

SEQ ID NO: 1388158 - RNA, 19 nt, Homo sapiens
  misc_RNA (1)...(19): siRNA sense strand
gagagccagugaauuucug

SEQ ID NO: 1388159 - RNA, 19 nt, Homo sapiens
  misc_RNA (1)...(19): siRNA sense strand
aaaaguaucgggaaaauug

SEQ ID NO: 1388160 - RNA, 19 nt, Homo sapiens
  misc_RNA (1)...(19): siRNA sense strand
gcaugaacuugcugugcau

SEQ ID NO: 1388161 - RNA, 19 nt, Homo sapiens
  misc_RNA (1)...(19): siRNA sense strand
gcaaaggccucaucaagaa

SEQ ID NO: 1388162 - RNA, 19 nt, Homo sapiens
  misc_RNA (1)...(19): siRNA sense strand
gaagaaaucaagccuguga

SEQ ID NO: 1388163 - RNA, 19 nt, Homo sapiens
  misc_RNA (1)...(19): siRNA sense strand
gaugauggcuauggaguuu

SEQ ID NO: 1388164 - RNA, 19 nt, Homo sapiens
  misc_RNA (1)...(19): siRNA sense strand
gaucauguaucgccguaaa

SEQ ID NO: 1388165 - RNA, 19 nt, Homo sapiens
  misc_RNA (1)...(19): siRNA sense strand
gaccagcccugaugccuuu

SEQ ID NO: 1388166 - RNA, 19 nt, Homo sapiens
  misc_RNA (1)...(19): siRNA sense strand
gcaaagcccugcuggacau

SEQ ID NO: 1388167 - RNA, 19 nt, Homo sapiens
  misc_RNA (1)...(19): siRNA sense strand
ccagaaggcugcuaagaag

SEQ ID NO: 1388168 - RNA, 19 nt, Homo sapiens
  misc_RNA (1)...(19): siRNA sense strand
gggaucaacuccuggaaga

SEQ ID NO: 1388169 - RNA, 19 nt, Homo sapiens
  misc_RNA (1)...(19): siRNA sense strand
ggaguuuccuacaugauug

SEQ ID NO: 1388170 - RNA, 19 nt, Homo sapiens
  misc_RNA (1)...(19): siRNA sense strand
cuaagaagcaccagaauau

SEQ ID NO: 1388171 - RNA, 19 nt, Homo sapiens
  misc_RNA (1)...(19): siRNA sense strand
gcuaagaagcaccagaaua

SEQ ID NO: 1388172 - RNA, 19 nt, Homo sapiens
  misc_RNA (1)...(19): siRNA sense strand
agaaauaccuggugcucaa

SEQ ID NO: 1388173 - RNA, 19 nt, Homo sapiens
  misc_RNA (1)...(19): siRNA sense strand
ccaaagaauuccaggacaa

SEQ ID NO: 1388174 - RNA, 19 nt, Homo sapiens
  misc_RNA (1)...(19): siRNA sense strand
gaacagcaacuauuauguc

SEQ ID NO: 1388175 - RNA, 19 nt, Homo sapiens
  misc_RNA (1)...(19): siRNA sense strand
gacaaauccuucacucuca

SEQ ID NO: 1388176 - RNA, 19 nt, Homo sapiens
  misc_RNA (1)...(19): siRNA sense strand
cagcaacuauuaugucaug

SEQ ID NO: 1388177 - RNA, 19 nt, Homo sapiens
  misc_RNA (1)...(19): siRNA sense strand
ggacauugcugaucuuuuc

SEQ ID NO: 1388178 - RNA, 19 nt, Homo sapiens
  misc_RNA (1)...(19): siRNA sense strand
gaucaacuccuggaagaaa

SEQ ID NO: 1388179 - RNA, 19 nt, Homo sapiens
  misc_RNA (1)...(19): siRNA sense strand
cagacgacguggaguugua

SEQ ID NO: 1388180 - RNA, 19 nt, Homo sapiens
  misc_RNA (1)...(19): siRNA sense strand
uggaugaugaggaauauua

SEQ ID NO: 1388181 - RNA, 19 nt, Homo sapiens
  misc_RNA (1)...(19): siRNA sense strand
ggcaaaggccucaucaaga

SEQ ID NO: 1388182 - RNA, 19 nt, Homo sapiens
  misc_RNA (1)...(19): siRNA sense strand
uaaacuggaccgugaagaa

SEQ ID NO: 1388183 - RNA, 19 nt, Homo sapiens
  misc_RNA (1)...(19): siRNA sense strand
uaccauggguggauguuug

SEQ ID NO: 1388184 - RNA, 19 nt, Homo sapiens
  misc_RNA (1)...(19): siRNA sense strand
gagcaugcgugggcagaug

SEQ ID NO: 1388185 - RNA, 19 nt, Homo sapiens
  misc_RNA (1)...(19): siRNA sense strand
gcacgccaggccuucuuua

SEQ ID NO: 1388186 - RNA, 19 nt, Homo sapiens
  misc_RNA (1)...(19): siRNA sense strand
gcuauggaguuuccuacau

SEQ ID NO: 1388187 - RNA, 19 nt, Homo sapiens
  misc_RNA (1)...(19): siRNA sense strand
gaucugggcuauguguauc

SEQ ID NO: 1388188 - RNA, 19 nt, Homo sapiens
  misc_RNA (1)...(19): siRNA sense strand
ccacaucuccagcaaguuc

SEQ ID NO: 1388189 - RNA, 19 nt, Homo sapiens
  misc_RNA (1)...(19): siRNA sense strand
ugcgagaucucuuccagaa

SEQ ID NO: 1388190 - RNA, 19 nt, Homo sapiens
  misc_RNA (1)...(19): siRNA sense strand
caaguaacuaugugaguga

SEQ ID NO: 1388191 - RNA, 19 nt, Homo sapiens
  misc_RNA (1)...(19): siRNA sense strand
uggaguugcuggccaaaga

SEQ ID NO: 1388192 - RNA, 19 nt, Homo sapiens
  misc_RNA (1)...(19): siRNA sense strand
ggagcccucucauggugaa

SEQ ID NO: 1388193 - RNA, 19 nt, Homo sapiens
  misc_RNA (1)...(19): siRNA sense strand
agaagcaccagaauaugua

SEQ ID NO: 1388194 - RNA, 19 nt, Homo sapiens
  misc_RNA (1)...(19): siRNA sense strand
cuucaagaauggccaguug

SEQ ID NO: 1388195 - RNA, 19 nt, Homo sapiens
  misc_RNA (1)...(19): siRNA sense strand
ugacgggcaucuucuucuu

SEQ ID NO: 1388196 - RNA, 19 nt, Homo sapiens
  misc_RNA (1)...(19): siRNA sense strand
uacaacaggugguuugaca

SEQ ID NO: 1388197 - RNA, 19 nt, Homo sapiens
  misc_RNA (1)...(19): siRNA sense strand
cauggcaacugcuacaaca

SEQ ID NO: 1388198 - RNA, 19 nt, Homo sapiens
  misc_RNA (1)...(19): siRNA sense strand
agacaucucugcccaagcu

SEQ ID NO: 1388199 - RNA, 19 nt, Homo sapiens
  misc_RNA (1)...(19): siRNA sense strand
cuauggaguuuccuacaug

SEQ ID NO: 1388200 - RNA, 19 nt, Homo sapiens
  misc_RNA (1)...(19): siRNA sense strand
aaacuggaccgugaagaaa

SEQ ID NO: 1388201 - RNA, 19 nt, Homo sapiens
  misc_RNA (1)...(19): siRNA sense strand
ggaaaccacauccgcaaag

SEQ ID NO: 1388202 - RNA, 19 nt, Homo sapiens
  misc_RNA (1)...(19): siRNA sense strand
gggcaccucugggaguuug

SEQ ID NO: 1388203 - RNA, 19 nt, Homo sapiens
  misc_RNA (1)...(19): siRNA sense strand
ccaguugggucucaaugca

SEQ ID NO: 1388204 - RNA, 19 nt, Homo sapiens
  misc_RNA (1)...(19): siRNA sense strand
ccacaagggacgcuucuuc

SEQ ID NO: 1388205 - RNA, 19 nt, Homo sapiens
  misc_RNA (1)...(19): siRNA sense strand
gaaacacgucuaccugucu

SEQ ID NO: 1388206 - RNA, 19 nt, Homo sapiens
  misc_RNA (1)...(19): siRNA sense strand
gcucaagccucaggaucug

SEQ ID NO: 1388207 - RNA, 19 nt, Homo sapiens
  misc_RNA (1)...(19): siRNA sense strand
ggaagaguacaucuaccuu

SEQ ID NO: 1388208 - RNA, 19 nt, Homo sapiens
  misc_RNA (1)...(19): siRNA sense strand
gugaacagcaacuauuaug

SEQ ID NO: 1388209 - RNA, 19 nt, Homo sapiens
  misc_RNA (1)...(19): siRNA sense strand
agucagcucuccuuuccuu

SEQ ID NO: 1388210 - RNA, 19 nt, Homo sapiens
  misc_RNA (1)...(19): siRNA sense strand
ggaucugggcuauguguau

SEQ ID NO: 1388211 - RNA, 19 nt, Homo sapiens
  misc_RNA (1)...(19): siRNA sense strand
gacgaacgcccagcgcuuu

SEQ ID NO: 1388212 - RNA, 19 nt, Homo sapiens
  misc_RNA (1)...(19): siRNA sense strand
uauggaguuuccuacauga

SEQ ID NO: 1388213 - RNA, 19 nt, Homo sapiens
  misc_RNA (1)...(19): siRNA sense strand
gaaaccacauccgcaaagc

SEQ ID NO: 1388214 - RNA, 19 nt, Homo sapiens
  misc_RNA (1)...(19): siRNA sense strand
gcaacuauuaugucaugga

SEQ ID NO: 1388215 - RNA, 19 nt, Homo sapiens
  misc_RNA (1)...(19): siRNA sense strand
ggcaaggcccugcuacaug

SEQ ID NO: 1388216 - RNA, 19 nt, Homo sapiens
  misc_RNA (1)...(19): siRNA sense strand
caagggacgcuucuucaag

SEQ ID NO: 1388217 - RNA, 19 nt, Homo sapiens
  misc_RNA (1)...(19): siRNA sense strand
cuacagcaccucucagaca

SEQ ID NO: 1388218 - RNA, 19 nt, Homo sapiens
  misc_RNA (1)...(19): siRNA sense strand
caauucagcgguaccuaga

SEQ ID NO: 1388219 - RNA, 19 nt, Homo sapiens
  misc_RNA (1)...(19): siRNA sense strand
gagacugugcguuccugua

SEQ ID NO: 1388220 - RNA, 19 nt, Homo sapiens
  misc_RNA (1)...(19): siRNA sense strand
aauauuaccgcauggaguu

SEQ ID NO: 1388221 - RNA, 19 nt, Homo sapiens
  misc_RNA (1)...(19): siRNA sense strand
cuuguuggaugaugaggaa

SEQ ID NO: 1388222 - RNA, 19 nt, Homo sapiens
  misc_RNA (1)...(19): siRNA sense strand
aagaagcaccagaauaugu

SEQ ID NO: 1388223 - RNA, 19 nt, Homo sapiens
  misc_RNA (1)...(19): siRNA sense strand
aacagcaacuauuauguca

SEQ ID NO: 1388224 - RNA, 19 nt, Homo sapiens
  misc_RNA (1)...(19): siRNA sense strand
ggugaacagcaacuauuau

SEQ ID NO: 1388225 - RNA, 19 nt, Homo sapiens
  misc_RNA (1)...(19): siRNA sense strand
uggugaacagcaacuauua

SEQ ID NO: 1388226 - RNA, 19 nt, Homo sapiens
  misc_RNA (1)...(19): siRNA sense strand
caacaguggguuccuccuu

SEQ ID NO: 1388227 - RNA, 19 nt, Homo sapiens
  misc_RNA (1)...(19): siRNA sense strand
guuggaugaugaggaauau

SEQ ID NO: 1388228 - RNA, 19 nt, Homo sapiens
  misc_RNA (1)...(19): siRNA sense strand
ggaguugcuggccaaagaa

SEQ ID NO: 1388229 - RNA, 19 nt, Homo sapiens
  misc_RNA (1)...(19): siRNA sense strand
ggugggaagaguacaucua

SEQ ID NO: 1388230 - RNA, 19 nt, Homo sapiens
  misc_RNA (1)...(19): siRNA sense strand
gcaggagcccucucauggu

SEQ ID NO: 1388231 - RNA, 19 nt, Homo sapiens
  misc_RNA (1)...(19): siRNA sense strand
uaagaagcaccagaauaug

SEQ ID NO: 1388232 - RNA, 19 nt, Homo sapiens
  misc_RNA (1)...(19): siRNA sense strand
cagcgaguccacagccuuu

SEQ ID NO: 1388233 - RNA, 19 nt, Homo sapiens
  misc_RNA (1)...(19): siRNA sense strand
gccguggccuuccaguuca

SEQ ID NO: 1388234 - RNA, 19 nt, Homo sapiens
  misc_RNA (1)...(19): siRNA sense strand
ucauggaccuugugcucau

SEQ ID NO: 1388235 - RNA, 19 nt, Homo sapiens
  misc_RNA (1)...(19): siRNA sense strand
gcuggacauugcugaucuu

SEQ ID NO: 1388236 - RNA, 19 nt, Homo sapiens
  misc_RNA (1)...(19): siRNA sense strand
gaucgacaggcaccucuuc

SEQ ID NO: 1388237 - RNA, 19 nt, Homo sapiens
  misc_RNA (1)...(19): siRNA sense strand
uccagaaggcugcuaagaa

SEQ ID NO: 1388238 - RNA, 19 nt, Homo sapiens
  misc_RNA (1)...(19): siRNA sense strand
caaauccuucacucucauu

SEQ ID NO: 1388239 - RNA, 19 nt, Homo sapiens
  misc_RNA (1)...(19): siRNA sense strand
gaacgcccagcgcuuugga

SEQ ID NO: 1388240 - RNA, 19 nt, Homo sapiens
  misc_RNA (1)...(19): siRNA sense strand
ccagcaacuugaccaggau

SEQ ID NO: 1388241 - RNA, 19 nt, Homo sapiens
  misc_RNA (1)...(19): siRNA sense strand
ccucuucugccuuuacuug

SEQ ID NO: 1388242 - RNA, 19 nt, Homo sapiens
  misc_RNA (1)...(19): siRNA sense strand
ggaggggucccacacaaaa

SEQ ID NO: 1388243 - RNA, 19 nt, Homo sapiens
  misc_RNA (1)...(19): siRNA sense strand
uggcaaaggccucaucaag

SEQ ID NO: 1388244 - RNA, 19 nt, Homo sapiens
  misc_RNA (1)...(19): siRNA sense strand
ucacucucauuuccuucaa

SEQ ID NO: 1388245 - RNA, 19 nt, Homo sapiens
  misc_RNA (1)...(19): siRNA sense strand
caaagaauuccaggacaag

SEQ ID NO: 1388246 - RNA, 19 nt, Homo sapiens
  misc_RNA (1)...(19): siRNA sense strand
cagggugucagccacaauu

SEQ ID NO: 1388247 - RNA, 19 nt, Homo sapiens
  misc_RNA (1)...(19): siRNA sense strand
ucucauuuccuucaagaau

SEQ ID NO: 1388248 - RNA, 19 nt, Homo sapiens
  misc_RNA (1)...(19): siRNA sense strand
acaaauccuucacucucau

SEQ ID NO: 1388249 - RNA, 19 nt, Homo sapiens
  misc_RNA (1)...(19): siRNA sense strand
ccuaccagauggagaggau

SEQ ID NO: 1388250 - RNA, 19 nt, Homo sapiens
  misc_RNA (1)...(19): siRNA sense strand
gcucuacagcuuccagaca

SEQ ID NO: 1388251 - RNA, 19 nt, Homo sapiens
  misc_RNA (1)...(19): siRNA sense strand
uggaguuuccuacaugauu

SEQ ID NO: 1388252 - RNA, 19 nt, Homo sapiens
  misc_RNA (1)...(19): siRNA sense strand
acucucauuuccuucaaga

SEQ ID NO: 1388253 - RNA, 19 nt, Homo sapiens
  misc_RNA (1)...(19): siRNA sense strand
cacaagggacgcuucuuca

SEQ ID NO: 1388254 - RNA, 19 nt, Homo sapiens
  misc_RNA (1)...(19): siRNA sense strand
uaugugcuccuaccagaug

SEQ ID NO: 1388255 - RNA, 19 nt, Homo sapiens
  misc_RNA (1)...(19): siRNA sense strand
ugaacagcaacuauuaugu

SEQ ID NO: 1388256 - RNA, 19 nt, Homo sapiens
  misc_RNA (1)...(19): siRNA sense strand
cgccaggccuucuuuagcu

SEQ ID NO: 1388257 - RNA, 19 nt, Homo sapiens
  misc_RNA (1)...(19): siRNA sense strand
gcccagcgcuuuggaaacc

SEQ ID NO: 1388258 - RNA, 19 nt, Homo sapiens
  misc_RNA (1)...(19): siRNA sense strand
aguucugccugaccuauga

SEQ ID NO: 1388259 - RNA, 19 nt, Homo sapiens
  misc_RNA (1)...(19): siRNA sense strand
ggugggcaaguaacuaugu

SEQ ID NO: 1388260 - RNA, 19 nt, Homo sapiens
  misc_RNA (1)...(19): siRNA sense strand
ucggaacccuggcgucucu

SEQ ID NO: 1388261 - RNA, 19 nt, Homo sapiens
  misc_RNA (1)...(19): siRNA sense strand
gcaaaggccucaucaagaa

SEQ ID NO: 1388262 - RNA, 19 nt, Homo sapiens
  misc_RNA (1)...(19): siRNA sense strand
gaagaaaucaagccuguga

SEQ ID NO: 1388263 - RNA, 19 nt, Homo sapiens
  misc_RNA (1)...(19): siRNA sense strand
gaugauggcuauggaguuu

SEQ ID NO: 1388264 - RNA, 19 nt, Homo sapiens
  misc_RNA (1)...(19): siRNA sense strand
gaucauguaucgccguaaa

SEQ ID NO: 1388265 - RNA, 19 nt, Homo sapiens
  misc_RNA (1)...(19): siRNA sense strand
gaccagcccugaugccuuu

SEQ ID NO: 1388266 - RNA, 19 nt, Homo sapiens
  misc_RNA (1)...(19): siRNA sense strand
gcaaagcccugcuggacau

SEQ ID NO: 1388267 - RNA, 19 nt, Homo sapiens
  misc_RNA (1)...(19): siRNA sense strand
ccagaaggcugcuaagaag

SEQ ID NO: 1388268 - RNA, 19 nt, Homo sapiens
  misc_RNA (1)...(19): siRNA sense strand
gggaucaacuccuggaaga

SEQ ID NO: 1388269 - RNA, 19 nt, Homo sapiens
  misc_RNA (1)...(19): siRNA sense strand
ggaguuuccuacaugauug

SEQ ID NO: 1388270 - RNA, 19 nt, Homo sapiens
  misc_RNA (1)...(19): siRNA sense strand
cuaagaagcaccagaauau

SEQ ID NO: 1388271 - RNA, 19 nt, Homo sapiens
  misc_RNA (1)...(19): siRNA sense strand
gcuaagaagcaccagaaua

SEQ ID NO: 1388272 - RNA, 19 nt, Homo sapiens
  misc_RNA (1)...(19): siRNA sense strand
agaaauaccuggugcucaa

SEQ ID NO: 1388273 - RNA, 19 nt, Homo sapiens
  misc_RNA (1)...(19): siRNA sense strand
ccaaagaauuccaggacaa

SEQ ID NO: 1388274 - RNA, 19 nt, Homo sapiens
  misc_RNA (1)...(19): siRNA sense strand
gaacagcaacuauuauguc

SEQ ID NO: 1388275 - RNA, 19 nt, Homo sapiens
  misc_RNA (1)...(19): siRNA sense strand
gacaaauccuucacucuca

SEQ ID NO: 1388276 - RNA, 19 nt, Homo sapiens
  misc_RNA (1)...(19): siRNA sense strand
cagcaacuauuaugucaug

SEQ ID NO: 1388277 - RNA, 19 nt, Homo sapiens
  misc_RNA (1)...(19): siRNA sense strand
ggacauugcugaucuuuuc

SEQ ID NO: 1388278 - RNA, 19 nt, Homo sapiens
  misc_RNA (1)...(19): siRNA sense strand
gaucaacuccuggaagaaa

SEQ ID NO: 1388279 - RNA, 19 nt, Homo sapiens
  misc_RNA (1)...(19): siRNA sense strand
cagacgacguggaguugua

SEQ ID NO: 1388280 - RNA, 19 nt, Homo sapiens
  misc_RNA (1)...(19): siRNA sense strand
uggaugaugaggaauauua

SEQ ID NO: 1388281 - RNA, 19 nt, Homo sapiens
  misc_RNA (1)...(19): siRNA sense strand
ggcaaaggccucaucaaga

SEQ ID NO: 1388282 - RNA, 19 nt, Homo sapiens
  misc_RNA (1)...(19): siRNA sense strand
uaaacuggaccgugaagaa

SEQ ID NO: 1388283 - RNA, 19 nt, Homo sapiens
  misc_RNA (1)...(19): siRNA sense strand
uaccauggguggauguuug

SEQ ID NO: 1388284 - RNA, 19 nt, Homo sapiens
  misc_RNA (1)...(19): siRNA sense strand
gagcaugcgugggcagaug

SEQ ID NO: 1388285 - RNA, 19 nt, Homo sapiens
  misc_RNA (1)...(19): siRNA sense strand
gcacgccaggccuucuuua

SEQ ID NO: 1388286 - RNA, 19 nt, Homo sapiens
  misc_RNA (1)...(19): siRNA sense strand
gcuauggaguuuccuacau

SEQ ID NO: 1388287 - RNA, 19 nt, Homo sapiens
  misc_RNA (1)...(19): siRNA sense strand
gaucugggcuauguguauc

SEQ ID NO: 1388288 - RNA, 19 nt, Homo sapiens
  misc_RNA (1)...(19): siRNA sense strand
ccacaucuccagcaaguuc

SEQ ID NO: 1388289 - RNA, 19 nt, Homo sapiens
  misc_RNA (1)...(19): siRNA sense strand
ugcgagaucucuuccagaa

SEQ ID NO: 1388290 - RNA, 19 nt, Homo sapiens
  misc_RNA (1)...(19): siRNA sense strand
caaguaacuaugugaguga

SEQ ID NO: 1388291 - RNA, 19 nt, Homo sapiens
  misc_RNA (1)...(19): siRNA sense strand
uggaguugcuggccaaaga

SEQ ID NO: 1388292 - RNA, 19 nt, Homo sapiens
  misc_RNA (1)...(19): siRNA sense strand
ggagcccucucauggugaa

SEQ ID NO: 1388293 - RNA, 19 nt, Homo sapiens
  misc_RNA (1)...(19): siRNA sense strand
agaagcaccagaauaugua

SEQ ID NO: 1388294 - RNA, 19 nt, Homo sapiens
  misc_RNA (1)...(19): siRNA sense strand
cuucaagaauggccaguug

SEQ ID NO: 1388295 - RNA, 19 nt, Homo sapiens
  misc_RNA (1)...(19): siRNA sense strand
ugacgggcaucuucuucuu

SEQ ID NO: 1388296 - RNA, 19 nt, Homo sapiens
  misc_RNA (1)...(19): siRNA sense strand
uacaacaggugguuugaca

SEQ ID NO: 1388297 - RNA, 19 nt, Homo sapiens
  misc_RNA (1)...(19): siRNA sense strand
cauggcaacugcuacaaca

SEQ ID NO: 1388298 - RNA, 19 nt, Homo sapiens
  misc_RNA (1)...(19): siRNA sense strand
agacaucucugcccaagcu

SEQ ID NO: 1388299 - RNA, 19 nt, Homo sapiens
  misc_RNA (1)...(19): siRNA sense strand
cuauggaguuuccuacaug

SEQ ID NO: 1388300 - RNA, 19 nt, Homo sapiens
  misc_RNA (1)...(19): siRNA sense strand
aaacuggaccgugaagaaa

SEQ ID NO: 1388301 - RNA, 19 nt, Homo sapiens
  misc_RNA (1)...(19): siRNA sense strand
ggaaaccacauccgcaaag

SEQ ID NO: 1388302 - RNA, 19 nt, Homo sapiens
  misc_RNA (1)...(19): siRNA sense strand
gggcaccucugggaguuug

SEQ ID NO: 1388303 - RNA, 19 nt, Homo sapiens
  misc_RNA (1)...(19): siRNA sense strand
ccaguugggucucaaugca

SEQ ID NO: 1388304 - RNA, 19 nt, Homo sapiens
  misc_RNA (1)...(19): siRNA sense strand
ccacaagggacgcuucuuc

SEQ ID NO: 1388305 - RNA, 19 nt, Homo sapiens
  misc_RNA (1)...(19): siRNA sense strand
gaaacacgucuaccugucu

SEQ ID NO: 1388306 - RNA, 19 nt, Homo sapiens
  misc_RNA (1)...(19): siRNA sense strand
gcucaagccucaggaucug

SEQ ID NO: 1388307 - RNA, 19 nt, Homo sapiens
  misc_RNA (1)...(19): siRNA sense strand
ggaagaguacaucuaccuu

SEQ ID NO: 1388308 - RNA, 19 nt, Homo sapiens
  misc_RNA (1)...(19): siRNA sense strand
gugaacagcaacuauuaug

SEQ ID NO: 1388309 - RNA, 19 nt, Homo sapiens
  misc_RNA (1)...(19): siRNA sense strand
agucagcucuccuuuccuu

SEQ ID NO: 1388310 - RNA, 19 nt, Homo sapiens
  misc_RNA (1)...(19): siRNA sense strand
ggaucugggcuauguguau

SEQ ID NO: 1388311 - RNA, 19 nt, Homo sapiens
  misc_RNA (1)...(19): siRNA sense strand
gacgaacgcccagcgcuuu

SEQ ID NO: 1388312 - RNA, 19 nt, Homo sapiens
  misc_RNA (1)...(19): siRNA sense strand
uauggaguuuccuacauga

SEQ ID NO: 1388313 - RNA, 19 nt, Homo sapiens
  misc_RNA (1)...(19): siRNA sense strand
gaaaccacauccgcaaagc

SEQ ID NO: 1388314 - RNA, 19 nt, Homo sapiens
  misc_RNA (1)...(19): siRNA sense strand
gcaacuauuaugucaugga

SEQ ID NO: 1388315 - RNA, 19 nt, Homo sapiens
  misc_RNA (1)...(19): siRNA sense strand
ggcaaggcccugcuacaug

SEQ ID NO: 1388316 - RNA, 19 nt, Homo sapiens
  misc_RNA (1)...(19): siRNA sense strand
caagggacgcuucuucaag

SEQ ID NO: 1388317 - RNA, 19 nt, Homo sapiens
  misc_RNA (1)...(19): siRNA sense strand
cuacagcaccucucagaca

SEQ ID NO: 1388318 - RNA, 19 nt, Homo sapiens
  misc_RNA (1)...(19): siRNA sense strand
caauucagcgguaccuaga

SEQ ID NO: 1388319 - RNA, 19 nt, Homo sapiens
  misc_RNA (1)...(19): siRNA sense strand
gagacugugcguuccugua

SEQ ID NO: 1388320 - RNA, 19 nt, Homo sapiens
  misc_RNA (1)...(19): siRNA sense strand
aauauuaccgcauggaguu

SEQ ID NO: 1388321 - RNA, 19 nt, Homo sapiens
  misc_RNA (1)...(19): siRNA sense strand
cuuguuggaugaugaggaa

SEQ ID NO: 1388322 - RNA, 19 nt, Homo sapiens
  misc_RNA (1)...(19): siRNA sense strand
aagaagcaccagaauaugu

SEQ ID NO: 1388323 - RNA, 19 nt, Homo sapiens
  misc_RNA (1)...(19): siRNA sense strand
aacagcaacuauuauguca

SEQ ID NO: 1388324 - RNA, 19 nt, Homo sapiens
  misc_RNA (1)...(19): siRNA sense strand
ggugaacagcaacuauuau

SEQ ID NO: 1388325 - RNA, 19 nt, Homo sapiens
  misc_RNA (1)...(19): siRNA sense strand
uggugaacagcaacuauua

SEQ ID NO: 1388326 - RNA, 19 nt, Homo sapiens
  misc_RNA (1)...(19): siRNA sense strand
caacaguggguuccuccuu

SEQ ID NO: 1388327 - RNA, 19 nt, Homo sapiens
  misc_RNA (1)...(19): siRNA sense strand
guuggaugaugaggaauau

SEQ ID NO: 1388328 - RNA, 19 nt, Homo sapiens
  misc_RNA (1)...(19): siRNA sense strand
ggaguugcuggccaaagaa

SEQ ID NO: 1388329 - RNA, 19 nt, Homo sapiens
  misc_RNA (1)...(19): siRNA sense strand
ggugggaagaguacaucua

SEQ ID NO: 1388330 - RNA, 19 nt, Homo sapiens
  misc_RNA (1)...(19): siRNA sense strand
gcaggagcccucucauggu

SEQ ID NO: 1388331 - RNA, 19 nt, Homo sapiens
  misc_RNA (1)...(19): siRNA sense strand
uaagaagcaccagaauaug

SEQ ID NO: 1388332 - RNA, 19 nt, Homo sapiens
  misc_RNA (1)...(19): siRNA sense strand
cagcgaguccacagccuuu

SEQ ID NO: 1388333 - RNA, 19 nt, Homo sapiens
  misc_RNA (1)...(19): siRNA sense strand
gccguggccuuccaguuca

SEQ ID NO: 1388334 - RNA, 19 nt, Homo sapiens
  misc_RNA (1)...(19): siRNA sense strand
ucauggaccuugugcucau

SEQ ID NO: 1388335 - RNA, 19 nt, Homo sapiens
  misc_RNA (1)...(19): siRNA sense strand
gcuggacauugcugaucuu

SEQ ID NO: 1388336 - RNA, 19 nt, Homo sapiens
  misc_RNA (1)...(19): siRNA sense strand
gaucgacaggcaccucuuc

SEQ ID NO: 1388337 - RNA, 19 nt, Homo sapiens
  misc_RNA (1)...(19): siRNA sense strand
uccagaaggcugcuaagaa

SEQ ID NO: 1388338 - RNA, 19 nt, Homo sapiens
  misc_RNA (1)...(19): siRNA sense strand
caaauccuucacucucauu

SEQ ID NO: 1388339 - RNA, 19 nt, Homo sapiens
  misc_RNA (1)...(19): siRNA sense strand
gaacgcccagcgcuuugga

SEQ ID NO: 1388340 - RNA, 19 nt, Homo sapiens
  misc_RNA (1)...(19): siRNA sense strand
ccagcaacuugaccaggau

SEQ ID NO: 1388341 - RNA, 19 nt, Homo sapiens
  misc_RNA (1)...(19): siRNA sense strand
ccucuucugccuuuacuug

SEQ ID NO: 1388342 - RNA, 19 nt, Homo sapiens
  misc_RNA (1)...(19): siRNA sense strand
ggaggggucccacacaaaa

SEQ ID NO: 1388343 - RNA, 19 nt, Homo sapiens
  misc_RNA (1)...(19): siRNA sense strand
uggcaaaggccucaucaag

SEQ ID NO: 1388344 - RNA, 19 nt, Homo sapiens
  misc_RNA (1)...(19): siRNA sense strand
ucacucucauuuccuucaa

SEQ ID NO: 1388345 - RNA, 19 nt, Homo sapiens
  misc_RNA (1)...(19): siRNA sense strand
caaagaauuccaggacaag

SEQ ID NO: 1388346 - RNA, 19 nt, Homo sapiens
  misc_RNA (1)...(19): siRNA sense strand
cagggugucagccacaauu

SEQ ID NO: 1388347 - RNA, 19 nt, Homo sapiens
  misc_RNA (1)...(19): siRNA sense strand
ucucauuuccuucaagaau

SEQ ID NO: 1388348 - RNA, 19 nt, Homo sapiens
  misc_RNA (1)...(19): siRNA sense strand
acaaauccuucacucucau

SEQ ID NO: 1388349 - RNA, 19 nt, Homo sapiens
  misc_RNA (1)...(19): siRNA sense strand
ccuaccagauggagaggau

SEQ ID NO: 1388350 - RNA, 19 nt, Homo sapiens
  misc_RNA (1)...(19): siRNA sense strand
gcucuacagcuuccagaca

SEQ ID NO: 1388351 - RNA, 19 nt, Homo sapiens
  misc_RNA (1)...(19): siRNA sense strand
uggaguuuccuacaugauu

SEQ ID NO: 1388352 - RNA, 19 nt, Homo sapiens
  misc_RNA (1)...(19): siRNA sense strand
acucucauuuccuucaaga

SEQ ID NO: 1388353 - RNA, 19 nt, Homo sapiens
  misc_RNA (1)...(19): siRNA sense strand
cacaagggacgcuucuuca

SEQ ID NO: 1388354 - RNA, 19 nt, Homo sapiens
  misc_RNA (1)...(19): siRNA sense strand
uaugugcuccuaccagaug

SEQ ID NO: 1388355 - RNA, 19 nt, Homo sapiens
  misc_RNA (1)...(19): siRNA sense strand
ugaacagcaacuauuaugu

SEQ ID NO: 1388356 - RNA, 19 nt, Homo sapiens
  misc_RNA (1)...(19): siRNA sense strand
cgccaggccuucuuuagcu

SEQ ID NO: 1388357 - RNA, 19 nt, Homo sapiens
  misc_RNA (1)...(19): siRNA sense strand
gcccagcgcuuuggaaacc

SEQ ID NO: 1388358 - RNA, 19 nt, Homo sapiens
  misc_RNA (1)...(19): siRNA sense strand
aguucugccugaccuauga

SEQ ID NO: 1388359 - RNA, 19 nt, Homo sapiens
  misc_RNA (1)...(19): siRNA sense strand
ggugggcaaguaacuaugu

SEQ ID NO: 1388360 - RNA, 19 nt, Homo sapiens
  misc_RNA (1)...(19): siRNA sense strand
ucggaacccuggcgucucu

SEQ ID NO: 1388361 - RNA, 19 nt, Homo sapiens
  misc_RNA (1)...(19): siRNA sense strand
gcaaaggccucaucaagaa

SEQ ID NO: 1388362 - RNA, 19 nt, Homo sapiens
  misc_RNA (1)...(19): siRNA sense strand
gaagaaaucaagccuguga

SEQ ID NO: 1388363 - RNA, 19 nt, Homo sapiens
  misc_RNA (1)...(19): siRNA sense strand
gaugauggcuauggaguuu

SEQ ID NO: 1388364 - RNA, 19 nt, Homo sapiens
  misc_RNA (1)...(19): siRNA sense strand
gaucauguaucgccguaaa

SEQ ID NO: 1388365 - RNA, 19 nt, Homo sapiens
  misc_RNA (1)...(19): siRNA sense strand
gaccagcccugaugccuuu

SEQ ID NO: 1388366 - RNA, 19 nt, Homo sapiens
  misc_RNA (1)...(19): siRNA sense strand
gcaaagcccugcuggacau

SEQ ID NO: 1388367 - RNA, 19 nt, Homo sapiens
  misc_RNA (1)...(19): siRNA sense strand
ccagaaggcugcuaagaag

SEQ ID NO: 1388368 - RNA, 19 nt, Homo sapiens
  misc_RNA (1)...(19): siRNA sense strand
gggaucaacuccuggaaga

SEQ ID NO: 1388369 - RNA, 19 nt, Homo sapiens
  misc_RNA (1)...(19): siRNA sense strand
ggaguuuccuacaugauug

SEQ ID NO: 1388370 - RNA, 19 nt, Homo sapiens
  misc_RNA (1)...(19): siRNA sense strand
cuaagaagcaccagaauau

SEQ ID NO: 1388371 - RNA, 19 nt, Homo sapiens
  misc_RNA (1)...(19): siRNA sense strand
gcuaagaagcaccagaaua

SEQ ID NO: 1388372 - RNA, 19 nt, Homo sapiens
  misc_RNA (1)...(19): siRNA sense strand
agaaauaccuggugcucaa

SEQ ID NO: 1388373 - RNA, 19 nt, Homo sapiens
  misc_RNA (1)...(19): siRNA sense strand
ccaaagaauuccaggacaa

SEQ ID NO: 1388374 - RNA, 19 nt, Homo sapiens
  misc_RNA (1)...(19): siRNA sense strand
gaacagcaacuauuauguc

SEQ ID NO: 1388375 - RNA, 19 nt, Homo sapiens
  misc_RNA (1)...(19): siRNA sense strand
gacaaauccuucacucuca

SEQ ID NO: 1388376 - RNA, 19 nt, Homo sapiens
  misc_RNA (1)...(19): siRNA sense strand
cagcaacuauuaugucaug

SEQ ID NO: 1388377 - RNA, 19 nt, Homo sapiens
  misc_RNA (1)...(19): siRNA sense strand
ggacauugcugaucuuuuc

SEQ ID NO: 1388378 - RNA, 19 nt, Homo sapiens
  misc_RNA (1)...(19): siRNA sense strand
gaucaacuccuggaagaaa

SEQ ID NO: 1388379 - RNA, 19 nt, Homo sapiens
  misc_RNA (1)...(19): siRNA sense strand
cagacgacguggaguugua

SEQ ID NO: 1388380 - RNA, 19 nt, Homo sapiens
  misc_RNA (1)...(19): siRNA sense strand
uggaugaugaggaauauua

SEQ ID NO: 1388381 - RNA, 19 nt, Homo sapiens
  misc_RNA (1)...(19): siRNA sense strand
ggcaaaggccucaucaaga

SEQ ID NO: 1388382 - RNA, 19 nt, Homo sapiens
  misc_RNA (1)...(19): siRNA sense strand
uaaacuggaccgugaagaa

SEQ ID NO: 1388383 - RNA, 19 nt, Homo sapiens
  misc_RNA (1)...(19): siRNA sense strand
uaccauggguggauguuug

SEQ ID NO: 1388384 - RNA, 19 nt, Homo sapiens
  misc_RNA (1)...(19): siRNA sense strand
gagcaugcgugggcagaug

SEQ ID NO: 1388385 - RNA, 19 nt, Homo sapiens
  misc_RNA (1)...(19): siRNA sense strand
gcacgccaggccuucuuua

SEQ ID NO: 1388386 - RNA, 19 nt, Homo sapiens
  misc_RNA (1)...(19): siRNA sense strand
gcuauggaguuuccuacau

SEQ ID NO: 1388387 - RNA, 19 nt, Homo sapiens
  misc_RNA (1)...(19): siRNA sense strand
gaucugggcuauguguauc

SEQ ID NO: 1388388 - RNA, 19 nt, Homo sapiens
  misc_RNA (1)...(19): siRNA sense strand
ccacaucuccagcaaguuc

SEQ ID NO: 1388389 - RNA, 19 nt, Homo sapiens
  misc_RNA (1)...(19): siRNA sense strand
ugcgagaucucuuccagaa

SEQ ID NO: 1388390 - RNA, 19 nt, Homo sapiens
  misc_RNA (1)...(19): siRNA sense strand
caaguaacuaugugaguga

SEQ ID NO: 1388391 - RNA, 19 nt, Homo sapiens
  misc_RNA (1)...(19): siRNA sense strand
uggaguugcuggccaaaga

SEQ ID NO: 1388392 - RNA, 19 nt, Homo sapiens
  misc_RNA (1)...(19): siRNA sense strand
ggagcccucucauggugaa

SEQ ID NO: 1388393 - RNA, 19 nt, Homo sapiens
  misc_RNA (1)...(19): siRNA sense strand
agaagcaccagaauaugua

SEQ ID NO: 1388394 - RNA, 19 nt, Homo sapiens
  misc_RNA (1)...(19): siRNA sense strand
cuucaagaauggccaguug

SEQ ID NO: 1388395 - RNA, 19 nt, Homo sapiens
  misc_RNA (1)...(19): siRNA sense strand
ugacgggcaucuucuucuu

SEQ ID NO: 1388396 - RNA, 19 nt, Homo sapiens
  misc_RNA (1)...(19): siRNA sense strand
uacaacaggugguuugaca

SEQ ID NO: 1388397 - RNA, 19 nt, Homo sapiens
  misc_RNA (1)...(19): siRNA sense strand
cauggcaacugcuacaaca

SEQ ID NO: 1388398 - RNA, 19 nt, Homo sapiens
  misc_RNA (1)...(19): siRNA sense strand
agacaucucugcccaagcu

SEQ ID NO: 1388399 - RNA, 19 nt, Homo sapiens
  misc_RNA (1)...(19): siRNA sense strand
cuauggaguuuccuacaug

SEQ ID NO: 1388400 - RNA, 19 nt, Homo sapiens
  misc_RNA (1)...(19): siRNA sense strand
aaacuggaccgugaagaaa

SEQ ID NO: 1388401 - RNA, 19 nt, Homo sapiens
  misc_RNA (1)...(19): siRNA sense strand
ggaaaccacauccgcaaag

SEQ ID NO: 1388402 - RNA, 19 nt, Homo sapiens
  misc_RNA (1)...(19): siRNA sense strand
gggcaccucugggaguuug

SEQ ID NO: 1388403 - RNA, 19 nt, Homo sapiens
  misc_RNA (1)...(19): siRNA sense strand
ccaguugggucucaaugca

SEQ ID NO: 1388404 - RNA, 19 nt, Homo sapiens
  misc_RNA (1)...(19): siRNA sense strand
ccacaagggacgcuucuuc

SEQ ID NO: 1388405 - RNA, 19 nt, Homo sapiens
  misc_RNA (1)...(19): siRNA sense strand
gaaacacgucuaccugucu

SEQ ID NO: 1388406 - RNA, 19 nt, Homo sapiens
  misc_RNA (1)...(19): siRNA sense strand
gcucaagccucaggaucug

SEQ ID NO: 1388407 - RNA, 19 nt, Homo sapiens
  misc_RNA (1)...(19): siRNA sense strand
ggaagaguacaucuaccuu

SEQ ID NO: 1388408 - RNA, 19 nt, Homo sapiens
  misc_RNA (1)...(19): siRNA sense strand
gugaacagcaacuauuaug

SEQ ID NO: 1388409 - RNA, 19 nt, Homo sapiens
  misc_RNA (1)...(19): siRNA sense strand
agucagcucuccuuuccuu

SEQ ID NO: 1388410 - RNA, 19 nt, Homo sapiens
  misc_RNA (1)...(19): siRNA sense strand
ggaucugggcuauguguau

SEQ ID NO: 1388411 - RNA, 19 nt, Homo sapiens
  misc_RNA (1)...(19): siRNA sense strand
gacgaacgcccagcgcuuu

SEQ ID NO: 1388412 - RNA, 19 nt, Homo sapiens
  misc_RNA (1)...(19): siRNA sense strand
uauggaguuuccuacauga

SEQ ID NO: 1388413 - RNA, 19 nt, Homo sapiens
  misc_RNA (1)...(19): siRNA sense strand
gaaaccacauccgcaaagc

SEQ ID NO: 1388414 - RNA, 19 nt, Homo sapiens
  misc_RNA (1)...(19): siRNA sense strand
gcaacuauuaugucaugga

SEQ ID NO: 1388415 - RNA, 19 nt, Homo sapiens
  misc_RNA (1)...(19): siRNA sense strand
ggcaaggcccugcuacaug

SEQ ID NO: 1388416 - RNA, 19 nt, Homo sapiens
  misc_RNA (1)...(19): siRNA sense strand
caagggacgcuucuucaag

SEQ ID NO: 1388417 - RNA, 19 nt, Homo sapiens
  misc_RNA (1)...(19): siRNA sense strand
cuacagcaccucucagaca

SEQ ID NO: 1388418 - RNA, 19 nt, Homo sapiens
  misc_RNA (1)...(19): siRNA sense strand
caauucagcgguaccuaga

SEQ ID NO: 1388419 - RNA, 19 nt, Homo sapiens
  misc_RNA (1)...(19): siRNA sense strand
gagacugugcguuccugua

SEQ ID NO: 1388420 - RNA, 19 nt, Homo sapiens
  misc_RNA (1)...(19): siRNA sense strand
aauauuaccgcauggaguu

SEQ ID NO: 1388421 - RNA, 19 nt, Homo sapiens
  misc_RNA (1)...(19): siRNA sense strand
cuuguuggaugaugaggaa

SEQ ID NO: 1388422 - RNA, 19 nt, Homo sapiens
  misc_RNA (1)...(19): siRNA sense strand
aagaagcaccagaauaugu

SEQ ID NO: 1388423 - RNA, 19 nt, Homo sapiens
  misc_RNA (1)...(19): siRNA sense strand
aacagcaacuauuauguca

SEQ ID NO: 1388424 - RNA, 19 nt, Homo sapiens
  misc_RNA (1)...(19): siRNA sense strand
ggugaacagcaacuauuau

SEQ ID NO: 1388425 - RNA, 19 nt, Homo sapiens
  misc_RNA (1)...(19): siRNA sense strand
uggugaacagcaacuauua

SEQ ID NO: 1388426 - RNA, 19 nt, Homo sapiens
  misc_RNA (1)...(19): siRNA sense strand
caacaguggguuccuccuu

SEQ ID NO: 1388427 - RNA, 19 nt, Homo sapiens
  misc_RNA (1)...(19): siRNA sense strand
guuggaugaugaggaauau

SEQ ID NO: 1388428 - RNA, 19 nt, Homo sapiens
  misc_RNA (1)...(19): siRNA sense strand
ggaguugcuggccaaagaa

SEQ ID NO: 1388429 - RNA, 19 nt, Homo sapiens
  misc_RNA (1)...(19): siRNA sense strand
ggugggaagaguacaucua

SEQ ID NO: 1388430 - RNA, 19 nt, Homo sapiens
  misc_RNA (1)...(19): siRNA sense strand
gcaggagcccucucauggu

SEQ ID NO: 1388431 - RNA, 19 nt, Homo sapiens
  misc_RNA (1)...(19): siRNA sense strand
uaagaagcaccagaauaug

SEQ ID NO: 1388432 - RNA, 19 nt, Homo sapiens
  misc_RNA (1)...(19): siRNA sense strand
cagcgaguccacagccuuu

SEQ ID NO: 1388433 - RNA, 19 nt, Homo sapiens
  misc_RNA (1)...(19): siRNA sense strand
gccguggccuuccaguuca

SEQ ID NO: 1388434 - RNA, 19 nt, Homo sapiens
  misc_RNA (1)...(19): siRNA sense strand
ucauggaccuugugcucau

SEQ ID NO: 1388435 - RNA, 19 nt, Homo sapiens
  misc_RNA (1)...(19): siRNA sense strand
gcuggacauugcugaucuu

SEQ ID NO: 1388436 - RNA, 19 nt, Homo sapiens
  misc_RNA (1)...(19): siRNA sense strand
gaucgacaggcaccucuuc

SEQ ID NO: 1388437 - RNA, 19 nt, Homo sapiens
  misc_RNA (1)...(19): siRNA sense strand
uccagaaggcugcuaagaa

SEQ ID NO: 1388438 - RNA, 19 nt, Homo sapiens
  misc_RNA (1)...(19): siRNA sense strand
caaauccuucacucucauu

SEQ ID NO: 1388439 - RNA, 19 nt, Homo sapiens
  misc_RNA (1)...(19): siRNA sense strand
gaacgcccagcgcuuugga

SEQ ID NO: 1388440 - RNA, 19 nt, Homo sapiens
  misc_RNA (1)...(19): siRNA sense strand
ccagcaacuugaccaggau

SEQ ID NO: 1388441 - RNA, 19 nt, Homo sapiens
  misc_RNA (1)...(19): siRNA sense strand
ccucuucugccuuuacuug

SEQ ID NO: 1388442 - RNA, 19 nt, Homo sapiens
  misc_RNA (1)...(19): siRNA sense strand
ggaggggucccacacaaaa

SEQ ID NO: 1388443 - RNA, 19 nt, Homo sapiens
  misc_RNA (1)...(19): siRNA sense strand
uggcaaaggccucaucaag

SEQ ID NO: 1388444 - RNA, 19 nt, Homo sapiens
  misc_RNA (1)...(19): siRNA sense strand
ucacucucauuuccuucaa

SEQ ID NO: 1388445 - RNA, 19 nt, Homo sapiens
  misc_RNA (1)...(19): siRNA sense strand
caaagaauuccaggacaag

SEQ ID NO: 1388446 - RNA, 19 nt, Homo sapiens
  misc_RNA (1)...(19): siRNA sense strand
cagggugucagccacaauu

SEQ ID NO: 1388447 - RNA, 19 nt, Homo sapiens
  misc_RNA (1)...(19): siRNA sense strand
ucucauuuccuucaagaau

SEQ ID NO: 1388448 - RNA, 19 nt, Homo sapiens
  misc_RNA (1)...(19): siRNA sense strand
acaaauccuucacucucau

SEQ ID NO: 1388449 - RNA, 19 nt, Homo sapiens
  misc_RNA (1)...(19): siRNA sense strand
ccuaccagauggagaggau

SEQ ID NO: 1388450 - RNA, 19 nt, Homo sapiens
  misc_RNA (1)...(19): siRNA sense strand
gcucuacagcuuccagaca

SEQ ID NO: 1388451 - RNA, 19 nt, Homo sapiens
  misc_RNA (1)...(19): siRNA sense strand
uggaguuuccuacaugauu

SEQ ID NO: 1388452 - RNA, 19 nt, Homo sapiens
  misc_RNA (1)...(19): siRNA sense strand
acucucauuuccuucaaga

SEQ ID NO: 1388453 - RNA, 19 nt, Homo sapiens
  misc_RNA (1)...(19): siRNA sense strand
cacaagggacgcuucuuca

SEQ ID NO: 1388454 - RNA, 19 nt, Homo sapiens
  misc_RNA (1)...(19): siRNA sense strand
uaugugcuccuaccagaug

SEQ ID NO: 1388455 - RNA, 19 nt, Homo sapiens
  misc_RNA (1)...(19): siRNA sense strand
ugaacagcaacuauuaugu

SEQ ID NO: 1388456 - RNA, 19 nt, Homo sapiens
  misc_RNA (1)...(19): siRNA sense strand
cgccaggccuucuuuagcu

SEQ ID NO: 1388457 - RNA, 19 nt, Homo sapiens
  misc_RNA (1)...(19): siRNA sense strand
gcccagcgcuuuggaaacc

SEQ ID NO: 1388458 - RNA, 19 nt, Homo sapiens
  misc_RNA (1)...(19): siRNA sense strand
aguucugccugaccuauga

SEQ ID NO: 1388459 - RNA, 19 nt, Homo sapiens
  misc_RNA (1)...(19): siRNA sense strand
ggugggcaaguaacuaugu

SEQ ID NO: 1388460 - RNA, 19 nt, Homo sapiens
  misc_RNA (1)...(19): siRNA sense strand
ucggaacccuggcgucucu

SEQ ID NO: 1388461 - RNA, 19 nt, Homo sapiens
  misc_RNA (1)...(19): siRNA sense strand
gcaaaggccucaucaagaa

SEQ ID NO: 1388462 - RNA, 19 nt, Homo sapiens
  misc_RNA (1)...(19): siRNA sense strand
gaagaaaucaagccuguga

SEQ ID NO: 1388463 - RNA, 19 nt, Homo sapiens
  misc_RNA (1)...(19): siRNA sense strand
gaucauguaucgccguaaa

SEQ ID NO: 1388464 - RNA, 19 nt, Homo sapiens
  misc_RNA (1)...(19): siRNA sense strand
gaccagcccugaugccuuu

SEQ ID NO: 1388465 - RNA, 19 nt, Homo sapiens
  misc_RNA (1)...(19): siRNA sense strand
gggaucaacuccuggaaga

SEQ ID NO: 1388466 - RNA, 19 nt, Homo sapiens
  misc_RNA (1)...(19): siRNA sense strand
agaaauaccuggugcucaa

SEQ ID NO: 1388467 - RNA, 19 nt, Homo sapiens
  misc_RNA (1)...(19): siRNA sense strand
ccaaagaauuccaggacaa

SEQ ID NO: 1388468 - RNA, 19 nt, Homo sapiens
  misc_RNA (1)...(19): siRNA sense strand
gaacagcaacuauuauguc

SEQ ID NO: 1388469 - RNA, 19 nt, Homo sapiens
  misc_RNA (1)...(19): siRNA sense strand
gacaaauccuucacucuca

SEQ ID NO: 1388470 - RNA, 19 nt, Homo sapiens
  misc_RNA (1)...(19): siRNA sense strand
cagcaacuauuaugucaug

SEQ ID NO: 1388471 - RNA, 19 nt, Homo sapiens
  misc_RNA (1)...(19): siRNA sense strand
gaucaacuccuggaagaaa

SEQ ID NO: 1388472 - RNA, 19 nt, Homo sapiens
  misc_RNA (1)...(19): siRNA sense strand
cagacgacguggaguugua

SEQ ID NO: 1388473 - RNA, 19 nt, Homo sapiens
  misc_RNA (1)...(19): siRNA sense strand
uggaugaugaggaauauua

SEQ ID NO: 1388474 - RNA, 19 nt, Homo sapiens
  misc_RNA (1)...(19): siRNA sense strand
ggcaaaggccucaucaaga

SEQ ID NO: 1388475 - RNA, 19 nt, Homo sapiens
  misc_RNA (1)...(19): siRNA sense strand
uaaacuggaccgugaagaa

SEQ ID NO: 1388476 - RNA, 19 nt, Homo sapiens
  misc_RNA (1)...(19): siRNA sense strand
uaccauggguggauguuug

SEQ ID NO: 1388477 - RNA, 19 nt, Homo sapiens
  misc_RNA (1)...(19): siRNA sense strand
gagcaugcgugggcagaug

SEQ ID NO: 1388478 - RNA, 19 nt, Homo sapiens
  misc_RNA (1)...(19): siRNA sense strand
gcacgccaggccuucuuua

SEQ ID NO: 1388479 - RNA, 19 nt, Homo sapiens
  misc_RNA (1)...(19): siRNA sense strand
gaucugggcuauguguauc

SEQ ID NO: 1388480 - RNA, 19 nt, Homo sapiens
  misc_RNA (1)...(19): siRNA sense strand
caaguaacuaugugaguga

SEQ ID NO: 1388481 - RNA, 19 nt, Homo sapiens
  misc_RNA (1)...(19): siRNA sense strand
uggaguugcuggccaaaga

SEQ ID NO: 1388482 - RNA, 19 nt, Homo sapiens
  misc_RNA (1)...(19): siRNA sense strand
ggagcccucucauggugaa

SEQ ID NO: 1388483 - RNA, 19 nt, Homo sapiens
  misc_RNA (1)...(19): siRNA sense strand
cuucaagaauggccaguug

SEQ ID NO: 1388484 - RNA, 19 nt, Homo sapiens
  misc_RNA (1)...(19): siRNA sense strand
ugacgggcaucuucuucuu

SEQ ID NO: 1388485 - RNA, 19 nt, Homo sapiens
  misc_RNA (1)...(19): siRNA sense strand
uacaacaggugguuugaca

SEQ ID NO: 1388486 - RNA, 19 nt, Homo sapiens
  misc_RNA (1)...(19): siRNA sense strand
cauggcaacugcuacaaca

SEQ ID NO: 1388487 - RNA, 19 nt, Homo sapiens
  misc_RNA (1)...(19): siRNA sense strand
agacaucucugcccaagcu

SEQ ID NO: 1388488 - RNA, 19 nt, Homo sapiens
  misc_RNA (1)...(19): siRNA sense strand
aaacuggaccgugaagaaa

SEQ ID NO: 1388489 - RNA, 19 nt, Homo sapiens
  misc_RNA (1)...(19): siRNA sense strand
gggcaccucugggaguuug

SEQ ID NO: 1388490 - RNA, 19 nt, Homo sapiens
  misc_RNA (1)...(19): siRNA sense strand
ccaguugggucucaaugca

SEQ ID NO: 1388491 - RNA, 19 nt, Homo sapiens
  misc_RNA (1)...(19): siRNA sense strand
ccacaagggacgcuucuuc

SEQ ID NO: 1388492 - RNA, 19 nt, Homo sapiens
  misc_RNA (1)...(19): siRNA sense strand
gaaacacgucuaccugucu

SEQ ID NO: 1388493 - RNA, 19 nt, Homo sapiens
  misc_RNA (1)...(19): siRNA sense strand
gcucaagccucaggaucug

SEQ ID NO: 1388494 - RNA, 19 nt, Homo sapiens
  misc_RNA (1)...(19): siRNA sense strand
ggaagaguacaucuaccuu

SEQ ID NO: 1388495 - RNA, 19 nt, Homo sapiens
  misc_RNA (1)...(19): siRNA sense strand
gugaacagcaacuauuaug

SEQ ID NO: 1388496 - RNA, 19 nt, Homo sapiens
  misc_RNA (1)...(19): siRNA sense strand
ggaucugggcuauguguau

SEQ ID NO: 1388497 - RNA, 19 nt, Homo sapiens
  misc_RNA (1)...(19): siRNA sense strand
gcaacuauuaugucaugga

SEQ ID NO: 1388498 - RNA, 19 nt, Homo sapiens
  misc_RNA (1)...(19): siRNA sense strand
ggcaaggcccugcuacaug

SEQ ID NO: 1388499 - RNA, 19 nt, Homo sapiens
  misc_RNA (1)...(19): siRNA sense strand
caagggacgcuucuucaag

SEQ ID NO: 1388500 - RNA, 19 nt, Homo sapiens
  misc_RNA (1)...(19): siRNA sense strand
cuacagcaccucucagaca

SEQ ID NO: 1388501 - RNA, 19 nt, Homo sapiens
  misc_RNA (1)...(19): siRNA sense strand
caauucagcgguaccuaga

SEQ ID NO: 1388502 - RNA, 19 nt, Homo sapiens
  misc_RNA (1)...(19): siRNA sense strand
aauauuaccgcauggaguu

SEQ ID NO: 1388503 - RNA, 19 nt, Homo sapiens
  misc_RNA (1)...(19): siRNA sense strand
cuuguuggaugaugaggaa

SEQ ID NO: 1388504 - RNA, 19 nt, Homo sapiens
  misc_RNA (1)...(19): siRNA sense strand
caacaguggguuccuccuu

SEQ ID NO: 1388505 - RNA, 19 nt, Homo sapiens
  misc_RNA (1)...(19): siRNA sense strand
aacagcaacuauuauguca

SEQ ID NO: 1388506 - RNA, 19 nt, Homo sapiens
  misc_RNA (1)...(19): siRNA sense strand
ggugaacagcaacuauuau

SEQ ID NO: 1388507 - RNA, 19 nt, Homo sapiens
  misc_RNA (1)...(19): siRNA sense strand
uggugaacagcaacuauua

SEQ ID NO: 1388508 - RNA, 19 nt, Homo sapiens
  misc_RNA (1)...(19): siRNA sense strand
guuggaugaugaggaauau

SEQ ID NO: 1388509 - RNA, 19 nt, Homo sapiens
  misc_RNA (1)...(19): siRNA sense strand
ggaguugcuggccaaagaa

SEQ ID NO: 1388510 - RNA, 19 nt, Homo sapiens
  misc_RNA (1)...(19): siRNA sense strand
ggugggaagaguacaucua

SEQ ID NO: 1388511 - RNA, 19 nt, Homo sapiens
  misc_RNA (1)...(19): siRNA sense strand
gcaggagcccucucauggu

SEQ ID NO: 1388512 - RNA, 19 nt, Homo sapiens
  misc_RNA (1)...(19): siRNA sense strand
gccguggccuuccaguuca

SEQ ID NO: 1388513 - RNA, 19 nt, Homo sapiens
  misc_RNA (1)...(19): siRNA sense strand
ucauggaccuugugcucau

SEQ ID NO: 1388514 - RNA, 19 nt, Homo sapiens
  misc_RNA (1)...(19): siRNA sense strand
caaauccuucacucucauu

SEQ ID NO: 1388515 - RNA, 19 nt, Homo sapiens
  misc_RNA (1)...(19): siRNA sense strand
ccagcaacuugaccaggau

SEQ ID NO: 1388516 - RNA, 19 nt, Homo sapiens
  misc_RNA (1)...(19): siRNA sense strand
uggcaaaggccucaucaag

SEQ ID NO: 1388517 - RNA, 19 nt, Homo sapiens
  misc_RNA (1)...(19): siRNA sense strand
ucacucucauuuccuucaa

SEQ ID NO: 1388518 - RNA, 19 nt, Homo sapiens
  misc_RNA (1)...(19): siRNA sense strand
caaagaauuccaggacaag

SEQ ID NO: 1388519 - RNA, 19 nt, Homo sapiens
  misc_RNA (1)...(19): siRNA sense strand
cagggugucagccacaauu

SEQ ID NO: 1388520 - RNA, 19 nt, Homo sapiens
  misc_RNA (1)...(19): siRNA sense strand
ucucauuuccuucaagaau

SEQ ID NO: 1388521 - RNA, 19 nt, Homo sapiens
  misc_RNA (1)...(19): siRNA sense strand
acaaauccuucacucucau

SEQ ID NO: 1388522 - RNA, 19 nt, Homo sapiens
  misc_RNA (1)...(19): siRNA sense strand
ccuaccagauggagaggau

SEQ ID NO: 1388523 - RNA, 19 nt, Homo sapiens
  misc_RNA (1)...(19): siRNA sense strand
gcucuacagcuuccagaca

SEQ ID NO: 1388524 - RNA, 19 nt, Homo sapiens
  misc_RNA (1)...(19): siRNA sense strand
acucucauuuccuucaaga

SEQ ID NO: 1388525 - RNA, 19 nt, Homo sapiens
  misc_RNA (1)...(19): siRNA sense strand
cacaagggacgcuucuuca

SEQ ID NO: 1388526 - RNA, 19 nt, Homo sapiens
  misc_RNA (1)...(19): siRNA sense strand
uaugugcuccuaccagaug

SEQ ID NO: 1388527 - RNA, 19 nt, Homo sapiens
  misc_RNA (1)...(19): siRNA sense strand
ugaacagcaacuauuaugu

SEQ ID NO: 1388528 - RNA, 19 nt, Homo sapiens
  misc_RNA (1)...(19): siRNA sense strand
cgccaggccuucuuuagcu

SEQ ID NO: 1388529 - RNA, 19 nt, Homo sapiens
  misc_RNA (1)...(19): siRNA sense strand
guugcuggccaaagaauuc

SEQ ID NO: 1388530 - RNA, 19 nt, Homo sapiens
  misc_RNA (1)...(19): siRNA sense strand
ggugggcaaguaacuaugu

SEQ ID NO: 1388531 - RNA, 19 nt, Homo sapiens
  misc_RNA (1)...(19): siRNA sense strand
agucauggugggcaaguaa

SEQ ID NO: 1388532 - RNA, 19 nt, Homo sapiens
  misc_RNA (1)...(19): siRNA sense strand
gcagugggacauuccaaaa

SEQ ID NO: 1388533 - RNA, 19 nt, Homo sapiens
  misc_RNA (1)...(19): siRNA sense strand
cuacauggcaacugcuaca

SEQ ID NO: 1388534 - RNA, 19 nt, Homo sapiens
  misc_RNA (1)...(19): siRNA sense strand
gcaacguggacaucuccuu

SEQ ID NO: 1388535 - RNA, 19 nt, Homo sapiens
  misc_RNA (1)...(19): siRNA sense strand
acaagggacgcuucuucaa

SEQ ID NO: 1388536 - RNA, 19 nt, Homo sapiens
  misc_RNA (1)...(19): siRNA sense strand
ggaccgugaagaaaucaag

SEQ ID NO: 1388537 - RNA, 19 nt, Homo sapiens
  misc_RNA (1)...(19): siRNA sense strand
gcaaaggccucaucaagaa

SEQ ID NO: 1388538 - RNA, 19 nt, Homo sapiens
  misc_RNA (1)...(19): siRNA sense strand
gaagaaaucaagccuguga

SEQ ID NO: 1388539 - RNA, 19 nt, Homo sapiens
  misc_RNA (1)...(19): siRNA sense strand
gaugauggcuauggaguuu

SEQ ID NO: 1388540 - RNA, 19 nt, Homo sapiens
  misc_RNA (1)...(19): siRNA sense strand
gaucauguaucgccguaaa

SEQ ID NO: 1388541 - RNA, 19 nt, Homo sapiens
  misc_RNA (1)...(19): siRNA sense strand
gaccagcccugaugccuuu

SEQ ID NO: 1388542 - RNA, 19 nt, Homo sapiens
  misc_RNA (1)...(19): siRNA sense strand
gcaaagcccugcuggacau

SEQ ID NO: 1388543 - RNA, 19 nt, Homo sapiens
  misc_RNA (1)...(19): siRNA sense strand
ccagaaggcugcuaagaag

SEQ ID NO: 1388544 - RNA, 19 nt, Homo sapiens
  misc_RNA (1)...(19): siRNA sense strand
gggaucaacuccuggaaga

SEQ ID NO: 1388545 - RNA, 19 nt, Homo sapiens
  misc_RNA (1)...(19): siRNA sense strand
ggaguuuccuacaugauug

SEQ ID NO: 1388546 - RNA, 19 nt, Homo sapiens
  misc_RNA (1)...(19): siRNA sense strand
cuaagaagcaccagaauau

SEQ ID NO: 1388547 - RNA, 19 nt, Homo sapiens
  misc_RNA (1)...(19): siRNA sense strand
gcuaagaagcaccagaaua

SEQ ID NO: 1388548 - RNA, 19 nt, Homo sapiens
  misc_RNA (1)...(19): siRNA sense strand
agaaauaccuggugcucaa

SEQ ID NO: 1388549 - RNA, 19 nt, Homo sapiens
  misc_RNA (1)...(19): siRNA sense strand
ccaaagaauuccaggacaa

SEQ ID NO: 1388550 - RNA, 19 nt, Homo sapiens
  misc_RNA (1)...(19): siRNA sense strand
gaacagcaacuauuauguc

SEQ ID NO: 1388551 - RNA, 19 nt, Homo sapiens
  misc_RNA (1)...(19): siRNA sense strand
gacaaauccuucacucuca

SEQ ID NO: 1388552 - RNA, 19 nt, Homo sapiens
  misc_RNA (1)...(19): siRNA sense strand
cagcaacuauuaugucaug

SEQ ID NO: 1388553 - RNA, 19 nt, Homo sapiens
  misc_RNA (1)...(19): siRNA sense strand
ggacauugcugaucuuuuc

SEQ ID NO: 1388554 - RNA, 19 nt, Homo sapiens
  misc_RNA (1)...(19): siRNA sense strand
gaucaacuccuggaagaaa

SEQ ID NO: 1388555 - RNA, 19 nt, Homo sapiens
  misc_RNA (1)...(19): siRNA sense strand
cagacgacguggaguugua

SEQ ID NO: 1388556 - RNA, 19 nt, Homo sapiens
  misc_RNA (1)...(19): siRNA sense strand
uggaugaugaggaauauua

SEQ ID NO: 1388557 - RNA, 19 nt, Homo sapiens
  misc_RNA (1)...(19): siRNA sense strand
ggcaaaggccucaucaaga

SEQ ID NO: 1388558 - RNA, 19 nt, Homo sapiens
  misc_RNA (1)...(19): siRNA sense strand
uaaacuggaccgugaagaa

SEQ ID NO: 1388559 - RNA, 19 nt, Homo sapiens
  misc_RNA (1)...(19): siRNA sense strand
uaccauggguggauguuug

SEQ ID NO: 1388560 - RNA, 19 nt, Homo sapiens
  misc_RNA (1)...(19): siRNA sense strand
gagcaugcgugggcagaug

SEQ ID NO: 1388561 - RNA, 19 nt, Homo sapiens
  misc_RNA (1)...(19): siRNA sense strand
gcacgccaggccuucuuua

SEQ ID NO: 1388562 - RNA, 19 nt, Homo sapiens
  misc_RNA (1)...(19): siRNA sense strand
gcuauggaguuuccuacau

SEQ ID NO: 1388563 - RNA, 19 nt, Homo sapiens
  misc_RNA (1)...(19): siRNA sense strand
gaucugggcuauguguauc

SEQ ID NO: 1388564 - RNA, 19 nt, Homo sapiens
  misc_RNA (1)...(19): siRNA sense strand
ccacaucuccagcaaguuc

SEQ ID NO: 1388565 - RNA, 19 nt, Homo sapiens
  misc_RNA (1)...(19): siRNA sense strand
ugcgagaucucuuccagaa

SEQ ID NO: 1388566 - RNA, 19 nt, Homo sapiens
  misc_RNA (1)...(19): siRNA sense strand
caaguaacuaugugaguga

SEQ ID NO: 1388567 - RNA, 19 nt, Homo sapiens
  misc_RNA (1)...(19): siRNA sense strand
uggaguugcuggccaaaga

SEQ ID NO: 1388568 - RNA, 19 nt, Homo sapiens
  misc_RNA (1)...(19): siRNA sense strand
ggagcccucucauggugaa

SEQ ID NO: 1388569 - RNA, 19 nt, Homo sapiens
  misc_RNA (1)...(19): siRNA sense strand
agaagcaccagaauaugua

SEQ ID NO: 1388570 - RNA, 19 nt, Homo sapiens
  misc_RNA (1)...(19): siRNA sense strand
cuucaagaauggccaguug

SEQ ID NO: 1388571 - RNA, 19 nt, Homo sapiens
  misc_RNA (1)...(19): siRNA sense strand
ugacgggcaucuucuucuu

SEQ ID NO: 1388572 - RNA, 19 nt, Homo sapiens
  misc_RNA (1)...(19): siRNA sense strand
uacaacaggugguuugaca

SEQ ID NO: 1388573 - RNA, 19 nt, Homo sapiens
  misc_RNA (1)...(19): siRNA sense strand
cauggcaacugcuacaaca

SEQ ID NO: 1388574 - RNA, 19 nt, Homo sapiens
  misc_RNA (1)...(19): siRNA sense strand
agacaucucugcccaagcu

SEQ ID NO: 1388575 - RNA, 19 nt, Homo sapiens
  misc_RNA (1)...(19): siRNA sense strand
cuauggaguuuccuacaug

SEQ ID NO: 1388576 - RNA, 19 nt, Homo sapiens
  misc_RNA (1)...(19): siRNA sense strand
aaacuggaccgugaagaaa

SEQ ID NO: 1388577 - RNA, 19 nt, Homo sapiens
  misc_RNA (1)...(19): siRNA sense strand
ggaaaccacauccgcaaag

SEQ ID NO: 1388578 - RNA, 19 nt, Homo sapiens
  misc_RNA (1)...(19): siRNA sense strand
gggcaccucugggaguuug

SEQ ID NO: 1388579 - RNA, 19 nt, Homo sapiens
  misc_RNA (1)...(19): siRNA sense strand
ccaguugggucucaaugca

SEQ ID NO: 1388580 - RNA, 19 nt, Homo sapiens
  misc_RNA (1)...(19): siRNA sense strand
ccacaagggacgcuucuuc

SEQ ID NO: 1388581 - RNA, 19 nt, Homo sapiens
  misc_RNA (1)...(19): siRNA sense strand
gaaacacgucuaccugucu

SEQ ID NO: 1388582 - RNA, 19 nt, Homo sapiens
  misc_RNA (1)...(19): siRNA sense strand
gcucaagccucaggaucug

SEQ ID NO: 1388583 - RNA, 19 nt, Homo sapiens
  misc_RNA (1)...(19): siRNA sense strand
ggaagaguacaucuaccuu

SEQ ID NO: 1388584 - RNA, 19 nt, Homo sapiens
  misc_RNA (1)...(19): siRNA sense strand
gugaacagcaacuauuaug

SEQ ID NO: 1388585 - RNA, 19 nt, Homo sapiens
  misc_RNA (1)...(19): siRNA sense strand
agucagcucuccuuuccuu

SEQ ID NO: 1388586 - RNA, 19 nt, Homo sapiens
  misc_RNA (1)...(19): siRNA sense strand
ggaucugggcuauguguau

SEQ ID NO: 1388587 - RNA, 19 nt, Homo sapiens
  misc_RNA (1)...(19): siRNA sense strand
gacgaacgcccagcgcuuu

SEQ ID NO: 1388588 - RNA, 19 nt, Homo sapiens
  misc_RNA (1)...(19): siRNA sense strand
uauggaguuuccuacauga

SEQ ID NO: 1388589 - RNA, 19 nt, Homo sapiens
  misc_RNA (1)...(19): siRNA sense strand
gaaaccacauccgcaaagc

SEQ ID NO: 1388590 - RNA, 19 nt, Homo sapiens
  misc_RNA (1)...(19): siRNA sense strand
gcaacuauuaugucaugga

SEQ ID NO: 1388591 - RNA, 19 nt, Homo sapiens
  misc_RNA (1)...(19): siRNA sense strand
ggcaaggcccugcuacaug

SEQ ID NO: 1388592 - RNA, 19 nt, Homo sapiens
  misc_RNA (1)...(19): siRNA sense strand
caagggacgcuucuucaag

SEQ ID NO: 1388593 - RNA, 19 nt, Homo sapiens
  misc_RNA (1)...(19): siRNA sense strand
cuacagcaccucucagaca

SEQ ID NO: 1388594 - RNA, 19 nt, Homo sapiens
  misc_RNA (1)...(19): siRNA sense strand
caauucagcgguaccuaga

SEQ ID NO: 1388595 - RNA, 19 nt, Homo sapiens
  misc_RNA (1)...(19): siRNA sense strand
gagacugugcguuccugua

SEQ ID NO: 1388596 - RNA, 19 nt, Homo sapiens
  misc_RNA (1)...(19): siRNA sense strand
aauauuaccgcauggaguu

SEQ ID NO: 1388597 - RNA, 19 nt, Homo sapiens
  misc_RNA (1)...(19): siRNA sense strand
cuuguuggaugaugaggaa

SEQ ID NO: 1388598 - RNA, 19 nt, Homo sapiens
  misc_RNA (1)...(19): siRNA sense strand
aagaagcaccagaauaugu

SEQ ID NO: 1388599 - RNA, 19 nt, Homo sapiens
  misc_RNA (1)...(19): siRNA sense strand
aacagcaacuauuauguca

SEQ ID NO: 1388600 - RNA, 19 nt, Homo sapiens
  misc_RNA (1)...(19): siRNA sense strand
ggugaacagcaacuauuau

SEQ ID NO: 1388601 - RNA, 19 nt, Homo sapiens
  misc_RNA (1)...(19): siRNA sense strand
uggugaacagcaacuauua

SEQ ID NO: 1388602 - RNA, 19 nt, Homo sapiens
  misc_RNA (1)...(19): siRNA sense strand
caacaguggguuccuccuu

SEQ ID NO: 1388603 - RNA, 19 nt, Homo sapiens
  misc_RNA (1)...(19): siRNA sense strand
guuggaugaugaggaauau

SEQ ID NO: 1388604 - RNA, 19 nt, Homo sapiens
  misc_RNA (1)...(19): siRNA sense strand
ggaguugcuggccaaagaa

SEQ ID NO: 1388605 - RNA, 19 nt, Homo sapiens
  misc_RNA (1)...(19): siRNA sense strand
ggugggaagaguacaucua

SEQ ID NO: 1388606 - RNA, 19 nt, Homo sapiens
  misc_RNA (1)...(19): siRNA sense strand
gcaggagcccucucauggu

SEQ ID NO: 1388607 - RNA, 19 nt, Homo sapiens
  misc_RNA (1)...(19): siRNA sense strand
uaagaagcaccagaauaug

SEQ ID NO: 1388608 - RNA, 19 nt, Homo sapiens
  misc_RNA (1)...(19): siRNA sense strand
cagcgaguccacagccuuu

SEQ ID NO: 1388609 - RNA, 19 nt, Homo sapiens
  misc_RNA (1)...(19): siRNA sense strand
gccguggccuuccaguuca

SEQ ID NO: 1388610 - RNA, 19 nt, Homo sapiens
  misc_RNA (1)...(19): siRNA sense strand
ucauggaccuugugcucau

SEQ ID NO: 1388611 - RNA, 19 nt, Homo sapiens
  misc_RNA (1)...(19): siRNA sense strand
gcuggacauugcugaucuu

SEQ ID NO: 1388612 - RNA, 19 nt, Homo sapiens
  misc_RNA (1)...(19): siRNA sense strand
gaucgacaggcaccucuuc

SEQ ID NO: 1388613 - RNA, 19 nt, Homo sapiens
  misc_RNA (1)...(19): siRNA sense strand
uccagaaggcugcuaagaa

SEQ ID NO: 1388614 - RNA, 19 nt, Homo sapiens
  misc_RNA (1)...(19): siRNA sense strand
caaauccuucacucucauu

SEQ ID NO: 1388615 - RNA, 19 nt, Homo sapiens
  misc_RNA (1)...(19): siRNA sense strand
gaacgcccagcgcuuugga

SEQ ID NO: 1388616 - RNA, 19 nt, Homo sapiens
  misc_RNA (1)...(19): siRNA sense strand
ccagcaacuugaccaggau

SEQ ID NO: 1388617 - RNA, 19 nt, Homo sapiens
  misc_RNA (1)...(19): siRNA sense strand
ccucuucugccuuuacuug

SEQ ID NO: 1388618 - RNA, 19 nt, Homo sapiens
  misc_RNA (1)...(19): siRNA sense strand
ggaggggucccacacaaaa

SEQ ID NO: 1388619 - RNA, 19 nt, Homo sapiens
  misc_RNA (1)...(19): siRNA sense strand
uggcaaaggccucaucaag

SEQ ID NO: 1388620 - RNA, 19 nt, Homo sapiens
  misc_RNA (1)...(19): siRNA sense strand
ucacucucauuuccuucaa

SEQ ID NO: 1388621 - RNA, 19 nt, Homo sapiens
  misc_RNA (1)...(19): siRNA sense strand
caaagaauuccaggacaag

SEQ ID NO: 1388622 - RNA, 19 nt, Homo sapiens
  misc_RNA (1)...(19): siRNA sense strand
cagggugucagccacaauu

SEQ ID NO: 1388623 - RNA, 19 nt, Homo sapiens
  misc_RNA (1)...(19): siRNA sense strand
ucucauuuccuucaagaau

SEQ ID NO: 1388624 - RNA, 19 nt, Homo sapiens
  misc_RNA (1)...(19): siRNA sense strand
acaaauccuucacucucau

SEQ ID NO: 1388625 - RNA, 19 nt, Homo sapiens
  misc_RNA (1)...(19): siRNA sense strand
ccuaccagauggagaggau

SEQ ID NO: 1388626 - RNA, 19 nt, Homo sapiens
  misc_RNA (1)...(19): siRNA sense strand
gcucuacagcuuccagaca

SEQ ID NO: 1388627 - RNA, 19 nt, Homo sapiens
  misc_RNA (1)...(19): siRNA sense strand
uggaguuuccuacaugauu

SEQ ID NO: 1388628 - RNA, 19 nt, Homo sapiens
  misc_RNA (1)...(19): siRNA sense strand
acucucauuuccuucaaga

SEQ ID NO: 1388629 - RNA, 19 nt, Homo sapiens
  misc_RNA (1)...(19): siRNA sense strand
cacaagggacgcuucuuca

SEQ ID NO: 1388630 - RNA, 19 nt, Homo sapiens
  misc_RNA (1)...(19): siRNA sense strand
uaugugcuccuaccagaug

SEQ ID NO: 1388631 - RNA, 19 nt, Homo sapiens
  misc_RNA (1)...(19): siRNA sense strand
ugaacagcaacuauuaugu

SEQ ID NO: 1388632 - RNA, 19 nt, Homo sapiens
  misc_RNA (1)...(19): siRNA sense strand
cgccaggccuucuuuagcu

SEQ ID NO: 1388633 - RNA, 19 nt, Homo sapiens
  misc_RNA (1)...(19): siRNA sense strand
gcccagcgcuuuggaaacc

SEQ ID NO: 1388634 - RNA, 19 nt, Homo sapiens
  misc_RNA (1)...(19): siRNA sense strand
aguucugccugaccuauga

SEQ ID NO: 1388635 - RNA, 19 nt, Homo sapiens
  misc_RNA (1)...(19): siRNA sense strand
ggugggcaaguaacuaugu

SEQ ID NO: 1388636 - RNA, 19 nt, Homo sapiens
  misc_RNA (1)...(19): siRNA sense strand
ucggaacccuggcgucucu

SEQ ID NO: 1388637 - RNA, 19 nt, Homo sapiens
  misc_RNA (1)...(19): siRNA sense strand
gcaaaggccucaucaagaa

SEQ ID NO: 1388638 - RNA, 19 nt, Homo sapiens
  misc_RNA (1)...(19): siRNA sense strand
gaagaaaucaagccuguga

SEQ ID NO: 1388639 - RNA, 19 nt, Homo sapiens
  misc_RNA (1)...(19): siRNA sense strand
gaugauggcuauggaguuu

SEQ ID NO: 1388640 - RNA, 19 nt, Homo sapiens
  misc_RNA (1)...(19): siRNA sense strand
gaucauguaucgccguaaa

SEQ ID NO: 1388641 - RNA, 19 nt, Homo sapiens
  misc_RNA (1)...(19): siRNA sense strand
gaccagcccugaugccuuu

SEQ ID NO: 1388642 - RNA, 19 nt, Homo sapiens
  misc_RNA (1)...(19): siRNA sense strand
gcaaagcccugcuggacau

SEQ ID NO: 1388643 - RNA, 19 nt, Homo sapiens
  misc_RNA (1)...(19): siRNA sense strand
ccagaaggcugcuaagaag

SEQ ID NO: 1388644 - RNA, 19 nt, Homo sapiens
  misc_RNA (1)...(19): siRNA sense strand
gggaucaacuccuggaaga

SEQ ID NO: 1388645 - RNA, 19 nt, Homo sapiens
  misc_RNA (1)...(19): siRNA sense strand
ggaguuuccuacaugauug

SEQ ID NO: 1388646 - RNA, 19 nt, Homo sapiens
  misc_RNA (1)...(19): siRNA sense strand
cuaagaagcaccagaauau

SEQ ID NO: 1388647 - RNA, 19 nt, Homo sapiens
  misc_RNA (1)...(19): siRNA sense strand
gcuaagaagcaccagaaua

SEQ ID NO: 1388648 - RNA, 19 nt, Homo sapiens
  misc_RNA (1)...(19): siRNA sense strand
agaaauaccuggugcucaa

SEQ ID NO: 1388649 - RNA, 19 nt, Homo sapiens
  misc_RNA (1)...(19): siRNA sense strand
ccaaagaauuccaggacaa

SEQ ID NO: 1388650 - RNA, 19 nt, Homo sapiens
  misc_RNA (1)...(19): siRNA sense strand
gaacagcaacuauuauguc

SEQ ID NO: 1388651 - RNA, 19 nt, Homo sapiens
  misc_RNA (1)...(19): siRNA sense strand
gacaaauccuucacucuca

SEQ ID NO: 1388652 - RNA, 19 nt, Homo sapiens
  misc_RNA (1)...(19): siRNA sense strand
cagcaacuauuaugucaug

SEQ ID NO: 1388653 - RNA, 19 nt, Homo sapiens
  misc_RNA (1)...(19): siRNA sense strand
ggacauugcugaucuuuuc

SEQ ID NO: 1388654 - RNA, 19 nt, Homo sapiens
  misc_RNA (1)...(19): siRNA sense strand
gaucaacuccuggaagaaa

SEQ ID NO: 1388655 - RNA, 19 nt, Homo sapiens
  misc_RNA (1)...(19): siRNA sense strand
cagacgacguggaguugua

SEQ ID NO: 1388656 - RNA, 19 nt, Homo sapiens
  misc_RNA (1)...(19): siRNA sense strand
uggaugaugaggaauauua

SEQ ID NO: 1388657 - RNA, 19 nt, Homo sapiens
  misc_RNA (1)...(19): siRNA sense strand
ggcaaaggccucaucaaga

SEQ ID NO: 1388658 - RNA, 19 nt, Homo sapiens
  misc_RNA (1)...(19): siRNA sense strand
uaaacuggaccgugaagaa

SEQ ID NO: 1388659 - RNA, 19 nt, Homo sapiens
  misc_RNA (1)...(19): siRNA sense strand
uaccauggguggauguuug

SEQ ID NO: 1388660 - RNA, 19 nt, Homo sapiens
  misc_RNA (1)...(19): siRNA sense strand
gagcaugcgugggcagaug

SEQ ID NO: 1388661 - RNA, 19 nt, Homo sapiens
  misc_RNA (1)...(19): siRNA sense strand
gcacgccaggccuucuuua

SEQ ID NO: 1388662 - RNA, 19 nt, Homo sapiens
  misc_RNA (1)...(19): siRNA sense strand
gcuauggaguuuccuacau

SEQ ID NO: 1388663 - RNA, 19 nt, Homo sapiens
  misc_RNA (1)...(19): siRNA sense strand
gaucugggcuauguguauc

SEQ ID NO: 1388664 - RNA, 19 nt, Homo sapiens
  misc_RNA (1)...(19): siRNA sense strand
ccacaucuccagcaaguuc

SEQ ID NO: 1388665 - RNA, 19 nt, Homo sapiens
  misc_RNA (1)...(19): siRNA sense strand
ugcgagaucucuuccagaa

SEQ ID NO: 1388666 - RNA, 19 nt, Homo sapiens
  misc_RNA (1)...(19): siRNA sense strand
caaguaacuaugugaguga

SEQ ID NO: 1388667 - RNA, 19 nt, Homo sapiens
  misc_RNA (1)...(19): siRNA sense strand
uggaguugcuggccaaaga

SEQ ID NO: 1388668 - RNA, 19 nt, Homo sapiens
  misc_RNA (1)...(19): siRNA sense strand
ggagcccucucauggugaa

SEQ ID NO: 1388669 - RNA, 19 nt, Homo sapiens
  misc_RNA (1)...(19): siRNA sense strand
agaagcaccagaauaugua

SEQ ID NO: 1388670 - RNA, 19 nt, Homo sapiens
  misc_RNA (1)...(19): siRNA sense strand
cuucaagaauggccaguug

SEQ ID NO: 1388671 - RNA, 19 nt, Homo sapiens
  misc_RNA (1)...(19): siRNA sense strand
ugacgggcaucuucuucuu

SEQ ID NO: 1388672 - RNA, 19 nt, Homo sapiens
  misc_RNA (1)...(19): siRNA sense strand
uacaacaggugguuugaca

SEQ ID NO: 1388673 - RNA, 19 nt, Homo sapiens
  misc_RNA (1)...(19): siRNA sense strand
cauggcaacugcuacaaca

SEQ ID NO: 1388674 - RNA, 19 nt, Homo sapiens
  misc_RNA (1)...(19): siRNA sense strand
agacaucucugcccaagcu

SEQ ID NO: 1388675 - RNA, 19 nt, Homo sapiens
  misc_RNA (1)...(19): siRNA sense strand
cuauggaguuuccuacaug

SEQ ID NO: 1388676 - RNA, 19 nt, Homo sapiens
  misc_RNA (1)...(19): siRNA sense strand
aaacuggaccgugaagaaa

SEQ ID NO: 1388677 - RNA, 19 nt, Homo sapiens
  misc_RNA (1)...(19): siRNA sense strand
ggaaaccacauccgcaaag

SEQ ID NO: 1388678 - RNA, 19 nt, Homo sapiens
  misc_RNA (1)...(19): siRNA sense strand
gggcaccucugggaguuug

SEQ ID NO: 1388679 - RNA, 19 nt, Homo sapiens
  misc_RNA (1)...(19): siRNA sense strand
ccaguugggucucaaugca

SEQ ID NO: 1388680 - RNA, 19 nt, Homo sapiens
  misc_RNA (1)...(19): siRNA sense strand
ccacaagggacgcuucuuc

SEQ ID NO: 1388681 - RNA, 19 nt, Homo sapiens
  misc_RNA (1)...(19): siRNA sense strand
gaaacacgucuaccugucu

SEQ ID NO: 1388682 - RNA, 19 nt, Homo sapiens
  misc_RNA (1)...(19): siRNA sense strand
gcucaagccucaggaucug

SEQ ID NO: 1388683 - RNA, 19 nt, Homo sapiens
  misc_RNA (1)...(19): siRNA sense strand
ggaagaguacaucuaccuu

SEQ ID NO: 1388684 - RNA, 19 nt, Homo sapiens
  misc_RNA (1)...(19): siRNA sense strand
gugaacagcaacuauuaug

SEQ ID NO: 1388685 - RNA, 19 nt, Homo sapiens
  misc_RNA (1)...(19): siRNA sense strand
agucagcucuccuuuccuu

SEQ ID NO: 1388686 - RNA, 19 nt, Homo sapiens
  misc_RNA (1)...(19): siRNA sense strand
ggaucugggcuauguguau

SEQ ID NO: 1388687 - RNA, 19 nt, Homo sapiens
  misc_RNA (1)...(19): siRNA sense strand
gacgaacgcccagcgcuuu

SEQ ID NO: 1388688 - RNA, 19 nt, Homo sapiens
  misc_RNA (1)...(19): siRNA sense strand
uauggaguuuccuacauga

SEQ ID NO: 1388689 - RNA, 19 nt, Homo sapiens
  misc_RNA (1)...(19): siRNA sense strand
gaaaccacauccgcaaagc

SEQ ID NO: 1388690 - RNA, 19 nt, Homo sapiens
  misc_RNA (1)...(19): siRNA sense strand
gcaacuauuaugucaugga

SEQ ID NO: 1388691 - RNA, 19 nt, Homo sapiens
  misc_RNA (1)...(19): siRNA sense strand
ggcaaggcccugcuacaug

SEQ ID NO: 1388692 - RNA, 19 nt, Homo sapiens
  misc_RNA (1)...(19): siRNA sense strand
caagggacgcuucuucaag

SEQ ID NO: 1388693 - RNA, 19 nt, Homo sapiens
  misc_RNA (1)...(19): siRNA sense strand
cuacagcaccucucagaca

SEQ ID NO: 1388694 - RNA, 19 nt, Homo sapiens
  misc_RNA (1)...(19): siRNA sense strand
caauucagcgguaccuaga

SEQ ID NO: 1388695 - RNA, 19 nt, Homo sapiens
  misc_RNA (1)...(19): siRNA sense strand
gagacugugcguuccugua

SEQ ID NO: 1388696 - RNA, 19 nt, Homo sapiens
  misc_RNA (1)...(19): siRNA sense strand
aauauuaccgcauggaguu

SEQ ID NO: 1388697 - RNA, 19 nt, Homo sapiens
  misc_RNA (1)...(19): siRNA sense strand
cuuguuggaugaugaggaa

SEQ ID NO: 1388698 - RNA, 19 nt, Homo sapiens
  misc_RNA (1)...(19): siRNA sense strand
aagaagcaccagaauaugu

SEQ ID NO: 1388699 - RNA, 19 nt, Homo sapiens
  misc_RNA (1)...(19): siRNA sense strand
aacagcaacuauuauguca

SEQ ID NO: 1388700 - RNA, 19 nt, Homo sapiens
  misc_RNA (1)...(19): siRNA sense strand
ggugaacagcaacuauuau

SEQ ID NO: 1388701 - RNA, 19 nt, Homo sapiens
  misc_RNA (1)...(19): siRNA sense strand
uggugaacagcaacuauua

SEQ ID NO: 1388702 - RNA, 19 nt, Homo sapiens
  misc_RNA (1)...(19): siRNA sense strand
caacaguggguuccuccuu

SEQ ID NO: 1388703 - RNA, 19 nt, Homo sapiens
  misc_RNA (1)...(19): siRNA sense strand
guuggaugaugaggaauau

SEQ ID NO: 1388704 - RNA, 19 nt, Homo sapiens
  misc_RNA (1)...(19): siRNA sense strand
ggaguugcuggccaaagaa

SEQ ID NO: 1388705 - RNA, 19 nt, Homo sapiens
  misc_RNA (1)...(19): siRNA sense strand
ggugggaagaguacaucua

SEQ ID NO: 1388706 - RNA, 19 nt, Homo sapiens
  misc_RNA (1)...(19): siRNA sense strand
gcaggagcccucucauggu

SEQ ID NO: 1388707 - RNA, 19 nt, Homo sapiens
  misc_RNA (1)...(19): siRNA sense strand
uaagaagcaccagaauaug

SEQ ID NO: 1388708 - RNA, 19 nt, Homo sapiens
  misc_RNA (1)...(19): siRNA sense strand
cagcgaguccacagccuuu

SEQ ID NO: 1388709 - RNA, 19 nt, Homo sapiens
  misc_RNA (1)...(19): siRNA sense strand
gccguggccuuccaguuca

SEQ ID NO: 1388710 - RNA, 19 nt, Homo sapiens
  misc_RNA (1)...(19): siRNA sense strand
ucauggaccuugugcucau

SEQ ID NO: 1388711 - RNA, 19 nt, Homo sapiens
  misc_RNA (1)...(19): siRNA sense strand
gcuggacauugcugaucuu

SEQ ID NO: 1388712 - RNA, 19 nt, Homo sapiens
  misc_RNA (1)...(19): siRNA sense strand
gaucgacaggcaccucuuc

SEQ ID NO: 1388713 - RNA, 19 nt, Homo sapiens
  misc_RNA (1)...(19): siRNA sense strand
uccagaaggcugcuaagaa

SEQ ID NO: 1388714 - RNA, 19 nt, Homo sapiens
  misc_RNA (1)...(19): siRNA sense strand
caaauccuucacucucauu

SEQ ID NO: 1388715 - RNA, 19 nt, Homo sapiens
  misc_RNA (1)...(19): siRNA sense strand
gaacgcccagcgcuuugga

SEQ ID NO: 1388716 - RNA, 19 nt, Homo sapiens
  misc_RNA (1)...(19): siRNA sense strand
ccagcaacuugaccaggau

SEQ ID NO: 1388717 - RNA, 19 nt, Homo sapiens
  misc_RNA (1)...(19): siRNA sense strand
ccucuucugccuuuacuug

SEQ ID NO: 1388718 - RNA, 19 nt, Homo sapiens
  misc_RNA (1)...(19): siRNA sense strand
ggaggggucccacacaaaa

SEQ ID NO: 1388719 - RNA, 19 nt, Homo sapiens
  misc_RNA (1)...(19): siRNA sense strand
uggcaaaggccucaucaag

SEQ ID NO: 1388720 - RNA, 19 nt, Homo sapiens
  misc_RNA (1)...(19): siRNA sense strand
ucacucucauuuccuucaa

SEQ ID NO: 1388721 - RNA, 19 nt, Homo sapiens
  misc_RNA (1)...(19): siRNA sense strand
caaagaauuccaggacaag

SEQ ID NO: 1388722 - RNA, 19 nt, Homo sapiens
  misc_RNA (1)...(19): siRNA sense strand
cagggugucagccacaauu

SEQ ID NO: 1388723 - RNA, 19 nt, Homo sapiens
  misc_RNA (1)...(19): siRNA sense strand
ucucauuuccuucaagaau

SEQ ID NO: 1388724 - RNA, 19 nt, Homo sapiens
  misc_RNA (1)...(19): siRNA sense strand
acaaauccuucacucucau

SEQ ID NO: 1388725 - RNA, 19 nt, Homo sapiens
  misc_RNA (1)...(19): siRNA sense strand
ccuaccagauggagaggau

SEQ ID NO: 1388726 - RNA, 19 nt, Homo sapiens
  misc_RNA (1)...(19): siRNA sense strand
gcucuacagcuuccagaca

SEQ ID NO: 1388727 - RNA, 19 nt, Homo sapiens
  misc_RNA (1)...(19): siRNA sense strand
uggaguuuccuacaugauu

SEQ ID NO: 1388728 - RNA, 19 nt, Homo sapiens
  misc_RNA (1)...(19): siRNA sense strand
acucucauuuccuucaaga

SEQ ID NO: 1388729 - RNA, 19 nt, Homo sapiens
  misc_RNA (1)...(19): siRNA sense strand
cacaagggacgcuucuuca

SEQ ID NO: 1388730 - RNA, 19 nt, Homo sapiens
  misc_RNA (1)...(19): siRNA sense strand
uaugugcuccuaccagaug

SEQ ID NO: 1388731 - RNA, 19 nt, Homo sapiens
  misc_RNA (1)...(19): siRNA sense strand
ugaacagcaacuauuaugu

SEQ ID NO: 1388732 - RNA, 19 nt, Homo sapiens
  misc_RNA (1)...(19): siRNA sense strand
cgccaggccuucuuuagcu

SEQ ID NO: 1388733 - RNA, 19 nt, Homo sapiens
  misc_RNA (1)...(19): siRNA sense strand
gcccagcgcuuuggaaacc

SEQ ID NO: 1388734 - RNA, 19 nt, Homo sapiens
  misc_RNA (1)...(19): siRNA sense strand
aguucugccugaccuauga

SEQ ID NO: 1388735 - RNA, 19 nt, Homo sapiens
  misc_RNA (1)...(19): siRNA sense strand
ggugggcaaguaacuaugu

SEQ ID NO: 1388736 - RNA, 19 nt, Homo sapiens
  misc_RNA (1)...(19): siRNA sense strand
ucggaacccuggcgucucu

SEQ ID NO: 1388737 - RNA, 19 nt, Homo sapiens
  misc_RNA (1)...(19): siRNA sense strand
gcaaaggccucaucaagaa

SEQ ID NO: 1388738 - RNA, 19 nt, Homo sapiens
  misc_RNA (1)...(19): siRNA sense strand
gaagaaaucaagccuguga

SEQ ID NO: 1388739 - RNA, 19 nt, Homo sapiens
  misc_RNA (1)...(19): siRNA sense strand
gaugauggcuauggaguuu

SEQ ID NO: 1388740 - RNA, 19 nt, Homo sapiens
  misc_RNA (1)...(19): siRNA sense strand
gaucauguaucgccguaaa

SEQ ID NO: 1388741 - RNA, 19 nt, Homo sapiens
  misc_RNA (1)...(19): siRNA sense strand
gaccagcccugaugccuuu

SEQ ID NO: 1388742 - RNA, 19 nt, Homo sapiens
  misc_RNA (1)...(19): siRNA sense strand
gcaaagcccugcuggacau

SEQ ID NO: 1388743 - RNA, 19 nt, Homo sapiens
  misc_RNA (1)...(19): siRNA sense strand
ccagaaggcugcuaagaag

SEQ ID NO: 1388744 - RNA, 19 nt, Homo sapiens
  misc_RNA (1)...(19): siRNA sense strand
gggaucaacuccuggaaga

SEQ ID NO: 1388745 - RNA, 19 nt, Homo sapiens
  misc_RNA (1)...(19): siRNA sense strand
ggaguuuccuacaugauug

SEQ ID NO: 1388746 - RNA, 19 nt, Homo sapiens
  misc_RNA (1)...(19): siRNA sense strand
cuaagaagcaccagaauau

SEQ ID NO: 1388747 - RNA, 19 nt, Homo sapiens
  misc_RNA (1)...(19): siRNA sense strand
gcuaagaagcaccagaaua

SEQ ID NO: 1388748 - RNA, 19 nt, Homo sapiens
  misc_RNA (1)...(19): siRNA sense strand
agaaauaccuggugcucaa

SEQ ID NO: 1388749 - RNA, 19 nt, Homo sapiens
  misc_RNA (1)...(19): siRNA sense strand
ccaaagaauuccaggacaa

SEQ ID NO: 1388750 - RNA, 19 nt, Homo sapiens
  misc_RNA (1)...(19): siRNA sense strand
gaacagcaacuauuauguc

SEQ ID NO: 1388751 - RNA, 19 nt, Homo sapiens
  misc_RNA (1)...(19): siRNA sense strand
gacaaauccuucacucuca

SEQ ID NO: 1388752 - RNA, 19 nt, Homo sapiens
  misc_RNA (1)...(19): siRNA sense strand
cagcaacuauuaugucaug

SEQ ID NO: 1388753 - RNA, 19 nt, Homo sapiens
  misc_RNA (1)...(19): siRNA sense strand
ggacauugcugaucuuuuc

SEQ ID NO: 1388754 - RNA, 19 nt, Homo sapiens
  misc_RNA (1)...(19): siRNA sense strand
gaucaacuccuggaagaaa

SEQ ID NO: 1388755 - RNA, 19 nt, Homo sapiens
  misc_RNA (1)...(19): siRNA sense strand
cagacgacguggaguugua

SEQ ID NO: 1388756 - RNA, 19 nt, Homo sapiens
  misc_RNA (1)...(19): siRNA sense strand
uggaugaugaggaauauua

SEQ ID NO: 1388757 - RNA, 19 nt, Homo sapiens
  misc_RNA (1)...(19): siRNA sense strand
ggcaaaggccucaucaaga

SEQ ID NO: 1388758 - RNA, 19 nt, Homo sapiens
  misc_RNA (1)...(19): siRNA sense strand
uaaacuggaccgugaagaa

SEQ ID NO: 1388759 - RNA, 19 nt, Homo sapiens
  misc_RNA (1)...(19): siRNA sense strand
uaccauggguggauguuug

SEQ ID NO: 1388760 - RNA, 19 nt, Homo sapiens
  misc_RNA (1)...(19): siRNA sense strand
gagcaugcgugggcagaug

SEQ ID NO: 1388761 - RNA, 19 nt, Homo sapiens
  misc_RNA (1)...(19): siRNA sense strand
gcacgccaggccuucuuua

SEQ ID NO: 1388762 - RNA, 19 nt, Homo sapiens
  misc_RNA (1)...(19): siRNA sense strand
gcuauggaguuuccuacau

SEQ ID NO: 1388763 - RNA, 19 nt, Homo sapiens
  misc_RNA (1)...(19): siRNA sense strand
gaucugggcuauguguauc

SEQ ID NO: 1388764 - RNA, 19 nt, Homo sapiens
  misc_RNA (1)...(19): siRNA sense strand
ccacaucuccagcaaguuc

SEQ ID NO: 1388765 - RNA, 19 nt, Homo sapiens
  misc_RNA (1)...(19): siRNA sense strand
ugcgagaucucuuccagaa

SEQ ID NO: 1388766 - RNA, 19 nt, Homo sapiens
  misc_RNA (1)...(19): siRNA sense strand
caaguaacuaugugaguga

SEQ ID NO: 1388767 - RNA, 19 nt, Homo sapiens
  misc_RNA (1)...(19): siRNA sense strand
uggaguugcuggccaaaga

SEQ ID NO: 1388768 - RNA, 19 nt, Homo sapiens
  misc_RNA (1)...(19): siRNA sense strand
ggagcccucucauggugaa

SEQ ID NO: 1388769 - RNA, 19 nt, Homo sapiens
  misc_RNA (1)...(19): siRNA sense strand
agaagcaccagaauaugua

SEQ ID NO: 1388770 - RNA, 19 nt, Homo sapiens
  misc_RNA (1)...(19): siRNA sense strand
cuucaagaauggccaguug

SEQ ID NO: 1388771 - RNA, 19 nt, Homo sapiens
  misc_RNA (1)...(19): siRNA sense strand
ugacgggcaucuucuucuu

SEQ ID NO: 1388772 - RNA, 19 nt, Homo sapiens
  misc_RNA (1)...(19): siRNA sense strand
uacaacaggugguuugaca

SEQ ID NO: 1388773 - RNA, 19 nt, Homo sapiens
  misc_RNA (1)...(19): siRNA sense strand
cauggcaacugcuacaaca

SEQ ID NO: 1388774 - RNA, 19 nt, Homo sapiens
  misc_RNA (1)...(19): siRNA sense strand
agacaucucugcccaagcu

SEQ ID NO: 1388775 - RNA, 19 nt, Homo sapiens
  misc_RNA (1)...(19): siRNA sense strand
cuauggaguuuccuacaug

SEQ ID NO: 1388776 - RNA, 19 nt, Homo sapiens
  misc_RNA (1)...(19): siRNA sense strand
aaacuggaccgugaagaaa

SEQ ID NO: 1388777 - RNA, 19 nt, Homo sapiens
  misc_RNA (1)...(19): siRNA sense strand
ggaaaccacauccgcaaag

SEQ ID NO: 1388778 - RNA, 19 nt, Homo sapiens
  misc_RNA (1)...(19): siRNA sense strand
gggcaccucugggaguuug

SEQ ID NO: 1388779 - RNA, 19 nt, Homo sapiens
  misc_RNA (1)...(19): siRNA sense strand
ccaguugggucucaaugca

SEQ ID NO: 1388780 - RNA, 19 nt, Homo sapiens
  misc_RNA (1)...(19): siRNA sense strand
ccacaagggacgcuucuuc

SEQ ID NO: 1388781 - RNA, 19 nt, Homo sapiens
  misc_RNA (1)...(19): siRNA sense strand
gaaacacgucuaccugucu

SEQ ID NO: 1388782 - RNA, 19 nt, Homo sapiens
  misc_RNA (1)...(19): siRNA sense strand
gcucaagccucaggaucug

SEQ ID NO: 1388783 - RNA, 19 nt, Homo sapiens
  misc_RNA (1)...(19): siRNA sense strand
ggaagaguacaucuaccuu

SEQ ID NO: 1388784 - RNA, 19 nt, Homo sapiens
  misc_RNA (1)...(19): siRNA sense strand
gugaacagcaacuauuaug

SEQ ID NO: 1388785 - RNA, 19 nt, Homo sapiens
  misc_RNA (1)...(19): siRNA sense strand
agucagcucuccuuuccuu

SEQ ID NO: 1388786 - RNA, 19 nt, Homo sapiens
  misc_RNA (1)...(19): siRNA sense strand
ggaucugggcuauguguau

SEQ ID NO: 1388787 - RNA, 19 nt, Homo sapiens
  misc_RNA (1)...(19): siRNA sense strand
gacgaacgcccagcgcuuu

SEQ ID NO: 1388788 - RNA, 19 nt, Homo sapiens
  misc_RNA (1)...(19): siRNA sense strand
uauggaguuuccuacauga

SEQ ID NO: 1388789 - RNA, 19 nt, Homo sapiens
  misc_RNA (1)...(19): siRNA sense strand
gaaaccacauccgcaaagc

SEQ ID NO: 1388790 - RNA, 19 nt, Homo sapiens
  misc_RNA (1)...(19): siRNA sense strand
gcaacuauuaugucaugga

SEQ ID NO: 1388791 - RNA, 19 nt, Homo sapiens
  misc_RNA (1)...(19): siRNA sense strand
ggcaaggcccugcuacaug

SEQ ID NO: 1388792 - RNA, 19 nt, Homo sapiens
  misc_RNA (1)...(19): siRNA sense strand
caagggacgcuucuucaag

SEQ ID NO: 1388793 - RNA, 19 nt, Homo sapiens
  misc_RNA (1)...(19): siRNA sense strand
cuacagcaccucucagaca

SEQ ID NO: 1388794 - RNA, 19 nt, Homo sapiens
  misc_RNA (1)...(19): siRNA sense strand
caauucagcgguaccuaga

SEQ ID NO: 1388795 - RNA, 19 nt, Homo sapiens
  misc_RNA (1)...(19): siRNA sense strand
gagacugugcguuccugua

SEQ ID NO: 1388796 - RNA, 19 nt, Homo sapiens
  misc_RNA (1)...(19): siRNA sense strand
aauauuaccgcauggaguu

SEQ ID NO: 1388797 - RNA, 19 nt, Homo sapiens
  misc_RNA (1)...(19): siRNA sense strand
cuuguuggaugaugaggaa

SEQ ID NO: 1388798 - RNA, 19 nt, Homo sapiens
  misc_RNA (1)...(19): siRNA sense strand
aagaagcaccagaauaugu

SEQ ID NO: 1388799 - RNA, 19 nt, Homo sapiens
  misc_RNA (1)...(19): siRNA sense strand
aacagcaacuauuauguca

SEQ ID NO: 1388800 - RNA, 19 nt, Homo sapiens
  misc_RNA (1)...(19): siRNA sense strand
ggugaacagcaacuauuau

SEQ ID NO: 1388801 - RNA, 19 nt, Homo sapiens
  misc_RNA (1)...(19): siRNA sense strand
uggugaacagcaacuauua

SEQ ID NO: 1388802 - RNA, 19 nt, Homo sapiens
  misc_RNA (1)...(19): siRNA sense strand
caacaguggguuccuccuu

SEQ ID NO: 1388803 - RNA, 19 nt, Homo sapiens
  misc_RNA (1)...(19): siRNA sense strand
guuggaugaugaggaauau

SEQ ID NO: 1388804 - RNA, 19 nt, Homo sapiens
  misc_RNA (1)...(19): siRNA sense strand
ggaguugcuggccaaagaa

SEQ ID NO: 1388805 - RNA, 19 nt, Homo sapiens
  misc_RNA (1)...(19): siRNA sense strand
ggugggaagaguacaucua

SEQ ID NO: 1388806 - RNA, 19 nt, Homo sapiens
  misc_RNA (1)...(19): siRNA sense strand
gcaggagcccucucauggu

SEQ ID NO: 1388807 - RNA, 19 nt, Homo sapiens
  misc_RNA (1)...(19): siRNA sense strand
uaagaagcaccagaauaug

SEQ ID NO: 1388808 - RNA, 19 nt, Homo sapiens
  misc_RNA (1)...(19): siRNA sense strand
cagcgaguccacagccuuu

SEQ ID NO: 1388809 - RNA, 19 nt, Homo sapiens
  misc_RNA (1)...(19): siRNA sense strand
gccguggccuuccaguuca

SEQ ID NO: 1388810 - RNA, 19 nt, Homo sapiens
  misc_RNA (1)...(19): siRNA sense strand
ucauggaccuugugcucau

SEQ ID NO: 1388811 - RNA, 19 nt, Homo sapiens
  misc_RNA (1)...(19): siRNA sense strand
gcuggacauugcugaucuu

SEQ ID NO: 1388812 - RNA, 19 nt, Homo sapiens
  misc_RNA (1)...(19): siRNA sense strand
gaucgacaggcaccucuuc

SEQ ID NO: 1388813 - RNA, 19 nt, Homo sapiens
  misc_RNA (1)...(19): siRNA sense strand
uccagaaggcugcuaagaa

SEQ ID NO: 1388814 - RNA, 19 nt, Homo sapiens
  misc_RNA (1)...(19): siRNA sense strand
caaauccuucacucucauu

SEQ ID NO: 1388815 - RNA, 19 nt, Homo sapiens
  misc_RNA (1)...(19): siRNA sense strand
gaacgcccagcgcuuugga

SEQ ID NO: 1388816 - RNA, 19 nt, Homo sapiens
  misc_RNA (1)...(19): siRNA sense strand
ccagcaacuugaccaggau

SEQ ID NO: 1388817 - RNA, 19 nt, Homo sapiens
  misc_RNA (1)...(19): siRNA sense strand
ccucuucugccuuuacuug

SEQ ID NO: 1388818 - RNA, 19 nt, Homo sapiens
  misc_RNA (1)...(19): siRNA sense strand
ggaggggucccacacaaaa

SEQ ID NO: 1388819 - RNA, 19 nt, Homo sapiens
  misc_RNA (1)...(19): siRNA sense strand
uggcaaaggccucaucaag

SEQ ID NO: 1388820 - RNA, 19 nt, Homo sapiens
  misc_RNA (1)...(19): siRNA sense strand
ucacucucauuuccuucaa

SEQ ID NO: 1388821 - RNA, 19 nt, Homo sapiens
  misc_RNA (1)...(19): siRNA sense strand
caaagaauuccaggacaag

SEQ ID NO: 1388822 - RNA, 19 nt, Homo sapiens
  misc_RNA (1)...(19): siRNA sense strand
cagggugucagccacaauu

SEQ ID NO: 1388823 - RNA, 19 nt, Homo sapiens
  misc_RNA (1)...(19): siRNA sense strand
ucucauuuccuucaagaau

SEQ ID NO: 1388824 - RNA, 19 nt, Homo sapiens
  misc_RNA (1)...(19): siRNA sense strand
acaaauccuucacucucau

SEQ ID NO: 1388825 - RNA, 19 nt, Homo sapiens
  misc_RNA (1)...(19): siRNA sense strand
ccuaccagauggagaggau

SEQ ID NO: 1388826 - RNA, 19 nt, Homo sapiens
  misc_RNA (1)...(19): siRNA sense strand
gcucuacagcuuccagaca

SEQ ID NO: 1388827 - RNA, 19 nt, Homo sapiens
  misc_RNA (1)...(19): siRNA sense strand
uggaguuuccuacaugauu

SEQ ID NO: 1388828 - RNA, 19 nt, Homo sapiens
  misc_RNA (1)...(19): siRNA sense strand
acucucauuuccuucaaga

SEQ ID NO: 1388829 - RNA, 19 nt, Homo sapiens
  misc_RNA (1)...(19): siRNA sense strand
cacaagggacgcuucuuca

SEQ ID NO: 1388830 - RNA, 19 nt, Homo sapiens
  misc_RNA (1)...(19): siRNA sense strand
uaugugcuccuaccagaug

SEQ ID NO: 1388831 - RNA, 19 nt, Homo sapiens
  misc_RNA (1)...(19): siRNA sense strand
ugaacagcaacuauuaugu

SEQ ID NO: 1388832 - RNA, 19 nt, Homo sapiens
  misc_RNA (1)...(19): siRNA sense strand
cgccaggccuucuuuagcu

SEQ ID NO: 1388833 - RNA, 19 nt, Homo sapiens
  misc_RNA (1)...(19): siRNA sense strand
gcccagcgcuuuggaaacc

SEQ ID NO: 1388834 - RNA, 19 nt, Homo sapiens
  misc_RNA (1)...(19): siRNA sense strand
aguucugccugaccuauga

SEQ ID NO: 1388835 - RNA, 19 nt, Homo sapiens
  misc_RNA (1)...(19): siRNA sense strand
ggugggcaaguaacuaugu

SEQ ID NO: 1388836 - RNA, 19 nt, Homo sapiens
  misc_RNA (1)...(19): siRNA sense strand
ucggaacccuggcgucucu

SEQ ID NO: 1388837 - RNA, 19 nt, Homo sapiens
  misc_RNA (1)...(19): siRNA sense strand
gcaaaggccucaucaagaa

SEQ ID NO: 1388838 - RNA, 19 nt, Homo sapiens
  misc_RNA (1)...(19): siRNA sense strand
gaagaaaucaagccuguga

SEQ ID NO: 1388839 - RNA, 19 nt, Homo sapiens
  misc_RNA (1)...(19): siRNA sense strand
gaucauguaucgccguaaa

SEQ ID NO: 1388840 - RNA, 19 nt, Homo sapiens
  misc_RNA (1)...(19): siRNA sense strand
gaccagcccugaugccuuu

SEQ ID NO: 1388841 - RNA, 19 nt, Homo sapiens
  misc_RNA (1)...(19): siRNA sense strand
gggaucaacuccuggaaga

SEQ ID NO: 1388842 - RNA, 19 nt, Homo sapiens
  misc_RNA (1)...(19): siRNA sense strand
agaaauaccuggugcucaa

SEQ ID NO: 1388843 - RNA, 19 nt, Homo sapiens
  misc_RNA (1)...(19): siRNA sense strand
ccaaagaauuccaggacaa

SEQ ID NO: 1388844 - RNA, 19 nt, Homo sapiens
  misc_RNA (1)...(19): siRNA sense strand
gaacagcaacuauuauguc

SEQ ID NO: 1388845 - RNA, 19 nt, Homo sapiens
  misc_RNA (1)...(19): siRNA sense strand
gacaaauccuucacucuca

SEQ ID NO: 1388846 - RNA, 19 nt, Homo sapiens
  misc_RNA (1)...(19): siRNA sense strand
cagcaacuauuaugucaug

SEQ ID NO: 1388847 - RNA, 19 nt, Homo sapiens
  misc_RNA (1)...(19): siRNA sense strand
gaucaacuccuggaagaaa

SEQ ID NO: 1388848 - RNA, 19 nt, Homo sapiens
  misc_RNA (1)...(19): siRNA sense strand
cagacgacguggaguugua

SEQ ID NO: 1388849 - RNA, 19 nt, Homo sapiens
  misc_RNA (1)...(19): siRNA sense strand
uggaugaugaggaauauua

SEQ ID NO: 1388850 - RNA, 19 nt, Homo sapiens
  misc_RNA (1)...(19): siRNA sense strand
ggcaaaggccucaucaaga

SEQ ID NO: 1388851 - RNA, 19 nt, Homo sapiens
  misc_RNA (1)...(19): siRNA sense strand
uaaacuggaccgugaagaa

SEQ ID NO: 1388852 - RNA, 19 nt, Homo sapiens
  misc_RNA (1)...(19): siRNA sense strand
uaccauggguggauguuug

SEQ ID NO: 1388853 - RNA, 19 nt, Homo sapiens
  misc_RNA (1)...(19): siRNA sense strand
gagcaugcgugggcagaug

SEQ ID NO: 1388854 - RNA, 19 nt, Homo sapiens
  misc_RNA (1)...(19): siRNA sense strand
gcacgccaggccuucuuua

SEQ ID NO: 1388855 - RNA, 19 nt, Homo sapiens
  misc_RNA (1)...(19): siRNA sense strand
gaucugggcuauguguauc

SEQ ID NO: 1388856 - RNA, 19 nt, Homo sapiens
  misc_RNA (1)...(19): siRNA sense strand
caaguaacuaugugaguga

SEQ ID NO: 1388857 - RNA, 19 nt, Homo sapiens
  misc_RNA (1)...(19): siRNA sense strand
uggaguugcuggccaaaga

SEQ ID NO: 1388858 - RNA, 19 nt, Homo sapiens
  misc_RNA (1)...(19): siRNA sense strand
ggagcccucucauggugaa

SEQ ID NO: 1388859 - RNA, 19 nt, Homo sapiens
  misc_RNA (1)...(19): siRNA sense strand
cuucaagaauggccaguug

SEQ ID NO: 1388860 - RNA, 19 nt, Homo sapiens
  misc_RNA (1)...(19): siRNA sense strand
ugacgggcaucuucuucuu

SEQ ID NO: 1388861 - RNA, 19 nt, Homo sapiens
  misc_RNA (1)...(19): siRNA sense strand
uacaacaggugguuugaca

SEQ ID NO: 1388862 - RNA, 19 nt, Homo sapiens
  misc_RNA (1)...(19): siRNA sense strand
cauggcaacugcuacaaca

SEQ ID NO: 1388863 - RNA, 19 nt, Homo sapiens
  misc_RNA (1)...(19): siRNA sense strand
agacaucucugcccaagcu

SEQ ID NO: 1388864 - RNA, 19 nt, Homo sapiens
  misc_RNA (1)...(19): siRNA sense strand
aaacuggaccgugaagaaa

SEQ ID NO: 1388865 - RNA, 19 nt, Homo sapiens
  misc_RNA (1)...(19): siRNA sense strand
gggcaccucugggaguuug

SEQ ID NO: 1388866 - RNA, 19 nt, Homo sapiens
  misc_RNA (1)...(19): siRNA sense strand
ccaguugggucucaaugca

SEQ ID NO: 1388867 - RNA, 19 nt, Homo sapiens
  misc_RNA (1)...(19): siRNA sense strand
ccacaagggacgcuucuuc

SEQ ID NO: 1388868 - RNA, 19 nt, Homo sapiens
  misc_RNA (1)...(19): siRNA sense strand
gaaacacgucuaccugucu

SEQ ID NO: 1388869 - RNA, 19 nt, Homo sapiens
  misc_RNA (1)...(19): siRNA sense strand
gcucaagccucaggaucug

SEQ ID NO: 1388870 - RNA, 19 nt, Homo sapiens
  misc_RNA (1)...(19): siRNA sense strand
ggaagaguacaucuaccuu

SEQ ID NO: 1388871 - RNA, 19 nt, Homo sapiens
  misc_RNA (1)...(19): siRNA sense strand
gugaacagcaacuauuaug

SEQ ID NO: 1388872 - RNA, 19 nt, Homo sapiens
  misc_RNA (1)...(19): siRNA sense strand
ggaucugggcuauguguau

SEQ ID NO: 1388873 - RNA, 19 nt, Homo sapiens
  misc_RNA (1)...(19): siRNA sense strand
gcaacuauuaugucaugga

SEQ ID NO: 1388874 - RNA, 19 nt, Homo sapiens
  misc_RNA (1)...(19): siRNA sense strand
ggcaaggcccugcuacaug

SEQ ID NO: 1388875 - RNA, 19 nt, Homo sapiens
  misc_RNA (1)...(19): siRNA sense strand
caagggacgcuucuucaag

SEQ ID NO: 1388876 - RNA, 19 nt, Homo sapiens
  misc_RNA (1)...(19): siRNA sense strand
cuacagcaccucucagaca

SEQ ID NO: 1388877 - RNA, 19 nt, Homo sapiens
  misc_RNA (1)...(19): siRNA sense strand
caauucagcgguaccuaga

SEQ ID NO: 1388878 - RNA, 19 nt, Homo sapiens
  misc_RNA (1)...(19): siRNA sense strand
aauauuaccgcauggaguu

SEQ ID NO: 1388879 - RNA, 19 nt, Homo sapiens
  misc_RNA (1)...(19): siRNA sense strand
cuuguuggaugaugaggaa

SEQ ID NO: 1388880 - RNA, 19 nt, Homo sapiens
  misc_RNA (1)...(19): siRNA sense strand
caacaguggguuccuccuu

SEQ ID NO: 1388881 - RNA, 19 nt, Homo sapiens
  misc_RNA (1)...(19): siRNA sense strand
aacagcaacuauuauguca

SEQ ID NO: 1388882 - RNA, 19 nt, Homo sapiens
  misc_RNA (1)...(19): siRNA sense strand
ggugaacagcaacuauuau

SEQ ID NO: 1388883 - RNA, 19 nt, Homo sapiens
  misc_RNA (1)...(19): siRNA sense strand
uggugaacagcaacuauua

SEQ ID NO: 1388884 - RNA, 19 nt, Homo sapiens
  misc_RNA (1)...(19): siRNA sense strand
guuggaugaugaggaauau

SEQ ID NO: 1388885 - RNA, 19 nt, Homo sapiens
  misc_RNA (1)...(19): siRNA sense strand
ggaguugcuggccaaagaa

SEQ ID NO: 1388886 - RNA, 19 nt, Homo sapiens
  misc_RNA (1)...(19): siRNA sense strand
ggugggaagaguacaucua

SEQ ID NO: 1388887 - RNA, 19 nt, Homo sapiens
  misc_RNA (1)...(19): siRNA sense strand
gcaggagcccucucauggu

SEQ ID NO: 1388888 - RNA, 19 nt, Homo sapiens
  misc_RNA (1)...(19): siRNA sense strand
gccguggccuuccaguuca

SEQ ID NO: 1388889 - RNA, 19 nt, Homo sapiens
  misc_RNA (1)...(19): siRNA sense strand
ucauggaccuugugcucau

SEQ ID NO: 1388890 - RNA, 19 nt, Homo sapiens
  misc_RNA (1)...(19): siRNA sense strand
caaauccuucacucucauu

SEQ ID NO: 1388891 - RNA, 19 nt, Homo sapiens
  misc_RNA (1)...(19): siRNA sense strand
ccagcaacuugaccaggau

SEQ ID NO: 1388892 - RNA, 19 nt, Homo sapiens
  misc_RNA (1)...(19): siRNA sense strand
uggcaaaggccucaucaag

SEQ ID NO: 1388893 - RNA, 19 nt, Homo sapiens
  misc_RNA (1)...(19): siRNA sense strand
ucacucucauuuccuucaa

SEQ ID NO: 1388894 - RNA, 19 nt, Homo sapiens
  misc_RNA (1)...(19): siRNA sense strand
caaagaauuccaggacaag

SEQ ID NO: 1388895 - RNA, 19 nt, Homo sapiens
  misc_RNA (1)...(19): siRNA sense strand
cagggugucagccacaauu

SEQ ID NO: 1388896 - RNA, 19 nt, Homo sapiens
  misc_RNA (1)...(19): siRNA sense strand
ucucauuuccuucaagaau

SEQ ID NO: 1388897 - RNA, 19 nt, Homo sapiens
  misc_RNA (1)...(19): siRNA sense strand
acaaauccuucacucucau

SEQ ID NO: 1388898 - RNA, 19 nt, Homo sapiens
  misc_RNA (1)...(19): siRNA sense strand
ccuaccagauggagaggau

SEQ ID NO: 1388899 - RNA, 19 nt, Homo sapiens
  misc_RNA (1)...(19): siRNA sense strand
gcucuacagcuuccagaca

SEQ ID NO: 1388900 - RNA, 19 nt, Homo sapiens
  misc_RNA (1)...(19): siRNA sense strand
acucucauuuccuucaaga

SEQ ID NO: 1388901 - RNA, 19 nt, Homo sapiens
  misc_RNA (1)...(19): siRNA sense strand
cacaagggacgcuucuuca

SEQ ID NO: 1388902 - RNA, 19 nt, Homo sapiens
  misc_RNA (1)...(19): siRNA sense strand
uaugugcuccuaccagaug

SEQ ID NO: 1388903 - RNA, 19 nt, Homo sapiens
  misc_RNA (1)...(19): siRNA sense strand
ugaacagcaacuauuaugu

SEQ ID NO: 1388904 - RNA, 19 nt, Homo sapiens
  misc_RNA (1)...(19): siRNA sense strand
cgccaggccuucuuuagcu

SEQ ID NO: 1388905 - RNA, 19 nt, Homo sapiens
  misc_RNA (1)...(19): siRNA sense strand
guugcuggccaaagaauuc

SEQ ID NO: 1388906 - RNA, 19 nt, Homo sapiens
  misc_RNA (1)...(19): siRNA sense strand
ggugggcaaguaacuaugu

SEQ ID NO: 1388907 - RNA, 19 nt, Homo sapiens
  misc_RNA (1)...(19): siRNA sense strand
agucauggugggcaaguaa

SEQ ID NO: 1388908 - RNA, 19 nt, Homo sapiens
  misc_RNA (1)...(19): siRNA sense strand
gcagugggacauuccaaaa

SEQ ID NO: 1388909 - RNA, 19 nt, Homo sapiens
  misc_RNA (1)...(19): siRNA sense strand
cuacauggcaacugcuaca

SEQ ID NO: 1388910 - RNA, 19 nt, Homo sapiens
  misc_RNA (1)...(19): siRNA sense strand
gcaacguggacaucuccuu

SEQ ID NO: 1388911 - RNA, 19 nt, Homo sapiens
  misc_RNA (1)...(19): siRNA sense strand
acaagggacgcuucuucaa

SEQ ID NO: 1388912 - RNA, 19 nt, Homo sapiens
  misc_RNA (1)...(19): siRNA sense strand
ggaccgugaagaaaucaag

SEQ ID NO: 1388913 - RNA, 19 nt, Homo sapiens
  misc_RNA (1)...(19): siRNA sense strand
gcaaaggccucaucaagaa

SEQ ID NO: 1388914 - RNA, 19 nt, Homo sapiens
  misc_RNA (1)...(19): siRNA sense strand
gaagaaaucaagccuguga

SEQ ID NO: 1388915 - RNA, 19 nt, Homo sapiens
  misc_RNA (1)...(19): siRNA sense strand
gaugauggcuauggaguuu

SEQ ID NO: 1388916 - RNA, 19 nt, Homo sapiens
  misc_RNA (1)...(19): siRNA sense strand
gaucauguaucgccguaaa

SEQ ID NO: 1388917 - RNA, 19 nt, Homo sapiens
  misc_RNA (1)...(19): siRNA sense strand
gaccagcccugaugccuuu

SEQ ID NO: 1388918 - RNA, 19 nt, Homo sapiens
  misc_RNA (1)...(19): siRNA sense strand
gcaaagcccugcuggacau

SEQ ID NO: 1388919 - RNA, 19 nt, Homo sapiens
  misc_RNA (1)...(19): siRNA sense strand
ccagaaggcugcuaagaag

SEQ ID NO: 1388920 - RNA, 19 nt, Homo sapiens
  misc_RNA (1)...(19): siRNA sense strand
gggaucaacuccuggaaga

SEQ ID NO: 1388921 - RNA, 19 nt, Homo sapiens
  misc_RNA (1)...(19): siRNA sense strand
ggaguuuccuacaugauug

SEQ ID NO: 1388922 - RNA, 19 nt, Homo sapiens
  misc_RNA (1)...(19): siRNA sense strand
cuaagaagcaccagaauau

SEQ ID NO: 1388923 - RNA, 19 nt, Homo sapiens
  misc_RNA (1)...(19): siRNA sense strand
gcuaagaagcaccagaaua

SEQ ID NO: 1388924 - RNA, 19 nt, Homo sapiens
  misc_RNA (1)...(19): siRNA sense strand
agaaauaccuggugcucaa

SEQ ID NO: 1388925 - RNA, 19 nt, Homo sapiens
  misc_RNA (1)...(19): siRNA sense strand
ccaaagaauuccaggacaa

SEQ ID NO: 1388926 - RNA, 19 nt, Homo sapiens
  misc_RNA (1)...(19): siRNA sense strand
gaacagcaacuauuauguc

SEQ ID NO: 1388927 - RNA, 19 nt, Homo sapiens
  misc_RNA (1)...(19): siRNA sense strand
gacaaauccuucacucuca

SEQ ID NO: 1388928 - RNA, 19 nt, Homo sapiens
  misc_RNA (1)...(19): siRNA sense strand
cagcaacuauuaugucaug

SEQ ID NO: 1388929 - RNA, 19 nt, Homo sapiens
  misc_RNA (1)...(19): siRNA sense strand
ggacauugcugaucuuuuc

SEQ ID NO: 1388930 - RNA, 19 nt, Homo sapiens
  misc_RNA (1)...(19): siRNA sense strand
gaucaacuccuggaagaaa

SEQ ID NO: 1388931 - RNA, 19 nt, Homo sapiens
  misc_RNA (1)...(19): siRNA sense strand
cagacgacguggaguugua

SEQ ID NO: 1388932 - RNA, 19 nt, Homo sapiens
  misc_RNA (1)...(19): siRNA sense strand
uggaugaugaggaauauua

SEQ ID NO: 1388933 - RNA, 19 nt, Homo sapiens
  misc_RNA (1)...(19): siRNA sense strand
ggcaaaggccucaucaaga

SEQ ID NO: 1388934 - RNA, 19 nt, Homo sapiens
  misc_RNA (1)...(19): siRNA sense strand
uaaacuggaccgugaagaa

SEQ ID NO: 1388935 - RNA, 19 nt, Homo sapiens
  misc_RNA (1)...(19): siRNA sense strand
uaccauggguggauguuug

SEQ ID NO: 1388936 - RNA, 19 nt, Homo sapiens
  misc_RNA (1)...(19): siRNA sense strand
gagcaugcgugggcagaug

SEQ ID NO: 1388937 - RNA, 19 nt, Homo sapiens
  misc_RNA (1)...(19): siRNA sense strand
gcacgccaggccuucuuua

SEQ ID NO: 1388938 - RNA, 19 nt, Homo sapiens
  misc_RNA (1)...(19): siRNA sense strand
gcuauggaguuuccuacau

SEQ ID NO: 1388939 - RNA, 19 nt, Homo sapiens
  misc_RNA (1)...(19): siRNA sense strand
gaucugggcuauguguauc

SEQ ID NO: 1388940 - RNA, 19 nt, Homo sapiens
  misc_RNA (1)...(19): siRNA sense strand
ccacaucuccagcaaguuc

SEQ ID NO: 1388941 - RNA, 19 nt, Homo sapiens
  misc_RNA (1)...(19): siRNA sense strand
ugcgagaucucuuccagaa

SEQ ID NO: 1388942 - RNA, 19 nt, Homo sapiens
  misc_RNA (1)...(19): siRNA sense strand
caaguaacuaugugaguga

SEQ ID NO: 1388943 - RNA, 19 nt, Homo sapiens
  misc_RNA (1)...(19): siRNA sense strand
uggaguugcuggccaaaga

SEQ ID NO: 1388944 - RNA, 19 nt, Homo sapiens
  misc_RNA (1)...(19): siRNA sense strand
ggagcccucucauggugaa

SEQ ID NO: 1388945 - RNA, 19 nt, Homo sapiens
  misc_RNA (1)...(19): siRNA sense strand
agaagcaccagaauaugua

SEQ ID NO: 1388946 - RNA, 19 nt, Homo sapiens
  misc_RNA (1)...(19): siRNA sense strand
cuucaagaauggccaguug

SEQ ID NO: 1388947 - RNA, 19 nt, Homo sapiens
  misc_RNA (1)...(19): siRNA sense strand
ugacgggcaucuucuucuu

SEQ ID NO: 1388948 - RNA, 19 nt, Homo sapiens
  misc_RNA (1)...(19): siRNA sense strand
uacaacaggugguuugaca

SEQ ID NO: 1388949 - RNA, 19 nt, Homo sapiens
  misc_RNA (1)...(19): siRNA sense strand
cauggcaacugcuacaaca

SEQ ID NO: 1388950 - RNA, 19 nt, Homo sapiens
  misc_RNA (1)...(19): siRNA sense strand
agacaucucugcccaagcu

SEQ ID NO: 1388951 - RNA, 19 nt, Homo sapiens
  misc_RNA (1)...(19): siRNA sense strand
cuauggaguuuccuacaug

SEQ ID NO: 1388952 - RNA, 19 nt, Homo sapiens
  misc_RNA (1)...(19): siRNA sense strand
aaacuggaccgugaagaaa

SEQ ID NO: 1388953 - RNA, 19 nt, Homo sapiens
  misc_RNA (1)...(19): siRNA sense strand
ggaaaccacauccgcaaag

SEQ ID NO: 1388954 - RNA, 19 nt, Homo sapiens
  misc_RNA (1)...(19): siRNA sense strand
gggcaccucugggaguuug

SEQ ID NO: 1388955 - RNA, 19 nt, Homo sapiens
  misc_RNA (1)...(19): siRNA sense strand
ccaguugggucucaaugca

SEQ ID NO: 1388956 - RNA, 19 nt, Homo sapiens
  misc_RNA (1)...(19): siRNA sense strand
ccacaagggacgcuucuuc

SEQ ID NO: 1388957 - RNA, 19 nt, Homo sapiens
  misc_RNA (1)...(19): siRNA sense strand
gaaacacgucuaccugucu

SEQ ID NO: 1388958 - RNA, 19 nt, Homo sapiens
  misc_RNA (1)...(19): siRNA sense strand
gcucaagccucaggaucug

SEQ ID NO: 1388959 - RNA, 19 nt, Homo sapiens
  misc_RNA (1)...(19): siRNA sense strand
ggaagaguacaucuaccuu

SEQ ID NO: 1388960 - RNA, 19 nt, Homo sapiens
  misc_RNA (1)...(19): siRNA sense strand
gugaacagcaacuauuaug

SEQ ID NO: 1388961 - RNA, 19 nt, Homo sapiens
  misc_RNA (1)...(19): siRNA sense strand
agucagcucuccuuuccuu

SEQ ID NO: 1388962 - RNA, 19 nt, Homo sapiens
  misc_RNA (1)...(19): siRNA sense strand
ggaucugggcuauguguau

SEQ ID NO: 1388963 - RNA, 19 nt, Homo sapiens
  misc_RNA (1)...(19): siRNA sense strand
gacgaacgcccagcgcuuu

SEQ ID NO: 1388964 - RNA, 19 nt, Homo sapiens
  misc_RNA (1)...(19): siRNA sense strand
uauggaguuuccuacauga

SEQ ID NO: 1388965 - RNA, 19 nt, Homo sapiens
  misc_RNA (1)...(19): siRNA sense strand
gaaaccacauccgcaaagc

SEQ ID NO: 1388966 - RNA, 19 nt, Homo sapiens
  misc_RNA (1)...(19): siRNA sense strand
gcaacuauuaugucaugga

SEQ ID NO: 1388967 - RNA, 19 nt, Homo sapiens
  misc_RNA (1)...(19): siRNA sense strand
ggcaaggcccugcuacaug

SEQ ID NO: 1388968 - RNA, 19 nt, Homo sapiens
  misc_RNA (1)...(19): siRNA sense strand
caagggacgcuucuucaag

SEQ ID NO: 1388969 - RNA, 19 nt, Homo sapiens
  misc_RNA (1)...(19): siRNA sense strand
cuacagcaccucucagaca

SEQ ID NO: 1388970 - RNA, 19 nt, Homo sapiens
  misc_RNA (1)...(19): siRNA sense strand
caauucagcgguaccuaga

SEQ ID NO: 1388971 - RNA, 19 nt, Homo sapiens
  misc_RNA (1)...(19): siRNA sense strand
gagacugugcguuccugua

SEQ ID NO: 1388972 - RNA, 19 nt, Homo sapiens
  misc_RNA (1)...(19): siRNA sense strand
aauauuaccgcauggaguu

SEQ ID NO: 1388973 - RNA, 19 nt, Homo sapiens
  misc_RNA (1)...(19): siRNA sense strand
cuuguuggaugaugaggaa

SEQ ID NO: 1388974 - RNA, 19 nt, Homo sapiens
  misc_RNA (1)...(19): siRNA sense strand
aagaagcaccagaauaugu

SEQ ID NO: 1388975 - RNA, 19 nt, Homo sapiens
  misc_RNA (1)...(19): siRNA sense strand
aacagcaacuauuauguca

SEQ ID NO: 1388976 - RNA, 19 nt, Homo sapiens
  misc_RNA (1)...(19): siRNA sense strand
ggugaacagcaacuauuau

SEQ ID NO: 1388977 - RNA, 19 nt, Homo sapiens
  misc_RNA (1)...(19): siRNA sense strand
uggugaacagcaacuauua

SEQ ID NO: 1388978 - RNA, 19 nt, Homo sapiens
  misc_RNA (1)...(19): siRNA sense strand
caacaguggguuccuccuu

SEQ ID NO: 1388979 - RNA, 19 nt, Homo sapiens
  misc_RNA (1)...(19): siRNA sense strand
guuggaugaugaggaauau

SEQ ID NO: 1388980 - RNA, 19 nt, Homo sapiens
  misc_RNA (1)...(19): siRNA sense strand
ggaguugcuggccaaagaa

SEQ ID NO: 1388981 - RNA, 19 nt, Homo sapiens
  misc_RNA (1)...(19): siRNA sense strand
ggugggaagaguacaucua

SEQ ID NO: 1388982 - RNA, 19 nt, Homo sapiens
  misc_RNA (1)...(19): siRNA sense strand
gcaggagcccucucauggu

SEQ ID NO: 1388983 - RNA, 19 nt, Homo sapiens
  misc_RNA (1)...(19): siRNA sense strand
uaagaagcaccagaauaug

SEQ ID NO: 1388984 - RNA, 19 nt, Homo sapiens
  misc_RNA (1)...(19): siRNA sense strand
cagcgaguccacagccuuu

SEQ ID NO: 1388985 - RNA, 19 nt, Homo sapiens
  misc_RNA (1)...(19): siRNA sense strand
gccguggccuuccaguuca

SEQ ID NO: 1388986 - RNA, 19 nt, Homo sapiens
  misc_RNA (1)...(19): siRNA sense strand
ucauggaccuugugcucau

SEQ ID NO: 1388987 - RNA, 19 nt, Homo sapiens
  misc_RNA (1)...(19): siRNA sense strand
gcuggacauugcugaucuu

SEQ ID NO: 1388988 - RNA, 19 nt, Homo sapiens
  misc_RNA (1)...(19): siRNA sense strand
gaucgacaggcaccucuuc

SEQ ID NO: 1388989 - RNA, 19 nt, Homo sapiens
  misc_RNA (1)...(19): siRNA sense strand
uccagaaggcugcuaagaa

SEQ ID NO: 1388990 - RNA, 19 nt, Homo sapiens
  misc_RNA (1)...(19): siRNA sense strand
caaauccuucacucucauu

SEQ ID NO: 1388991 - RNA, 19 nt, Homo sapiens
  misc_RNA (1)...(19): siRNA sense strand
gaacgcccagcgcuuugga

SEQ ID NO: 1388992 - RNA, 19 nt, Homo sapiens
  misc_RNA (1)...(19): siRNA sense strand
ccagcaacuugaccaggau

SEQ ID NO: 1388993 - RNA, 19 nt, Homo sapiens
  misc_RNA (1)...(19): siRNA sense strand
ccucuucugccuuuacuug

SEQ ID NO: 1388994 - RNA, 19 nt, Homo sapiens
  misc_RNA (1)...(19): siRNA sense strand
ggaggggucccacacaaaa

SEQ ID NO: 1388995 - RNA, 19 nt, Homo sapiens
  misc_RNA (1)...(19): siRNA sense strand
uggcaaaggccucaucaag

SEQ ID NO: 1388996 - RNA, 19 nt, Homo sapiens
  misc_RNA (1)...(19): siRNA sense strand
ucacucucauuuccuucaa

SEQ ID NO: 1388997 - RNA, 19 nt, Homo sapiens
  misc_RNA (1)...(19): siRNA sense strand
caaagaauuccaggacaag

SEQ ID NO: 1388998 - RNA, 19 nt, Homo sapiens
  misc_RNA (1)...(19): siRNA sense strand
cagggugucagccacaauu

SEQ ID NO: 1388999 - RNA, 19 nt, Homo sapiens
  misc_RNA (1)...(19): siRNA sense strand
ucucauuuccuucaagaau

SEQ ID NO: 1389000 - RNA, 19 nt, Homo sapiens
  misc_RNA (1)...(19): siRNA sense strand
acaaauccuucacucucau

SEQ ID NO: 1389001 - RNA, 19 nt, Homo sapiens
  misc_RNA (1)...(19): siRNA sense strand
ccuaccagauggagaggau

SEQ ID NO: 1389002 - RNA, 19 nt, Homo sapiens
  misc_RNA (1)...(19): siRNA sense strand
gcucuacagcuuccagaca

SEQ ID NO: 1389003 - RNA, 19 nt, Homo sapiens
  misc_RNA (1)...(19): siRNA sense strand
uggaguuuccuacaugauu

SEQ ID NO: 1389004 - RNA, 19 nt, Homo sapiens
  misc_RNA (1)...(19): siRNA sense strand
acucucauuuccuucaaga

SEQ ID NO: 1389005 - RNA, 19 nt, Homo sapiens
  misc_RNA (1)...(19): siRNA sense strand
cacaagggacgcuucuuca

SEQ ID NO: 1389006 - RNA, 19 nt, Homo sapiens
  misc_RNA (1)...(19): siRNA sense strand
uaugugcuccuaccagaug

SEQ ID NO: 1389007 - RNA, 19 nt, Homo sapiens
  misc_RNA (1)...(19): siRNA sense strand
ugaacagcaacuauuaugu

SEQ ID NO: 1389008 - RNA, 19 nt, Homo sapiens
  misc_RNA (1)...(19): siRNA sense strand
cgccaggccuucuuuagcu

SEQ ID NO: 1389009 - RNA, 19 nt, Homo sapiens
  misc_RNA (1)...(19): siRNA sense strand
gcccagcgcuuuggaaacc

SEQ ID NO: 1389010 - RNA, 19 nt, Homo sapiens
  misc_RNA (1)...(19): siRNA sense strand
aguucugccugaccuauga

SEQ ID NO: 1389011 - RNA, 19 nt, Homo sapiens
  misc_RNA (1)...(19): siRNA sense strand
ggugggcaaguaacuaugu

SEQ ID NO: 1389012 - RNA, 19 nt, Homo sapiens
  misc_RNA (1)...(19): siRNA sense strand
ucggaacccuggcgucucu

SEQ ID NO: 1389013 - RNA, 19 nt, Homo sapiens
  misc_RNA (1)...(19): siRNA sense strand
gcaaaggccucaucaagaa

SEQ ID NO: 1389014 - RNA, 19 nt, Homo sapiens
  misc_RNA (1)...(19): siRNA sense strand
gaagaaaucaagccuguga

SEQ ID NO: 1389015 - RNA, 19 nt, Homo sapiens
  misc_RNA (1)...(19): siRNA sense strand
gaugauggcuauggaguuu

SEQ ID NO: 1389016 - RNA, 19 nt, Homo sapiens
  misc_RNA (1)...(19): siRNA sense strand
gaucauguaucgccguaaa

SEQ ID NO: 1389017 - RNA, 19 nt, Homo sapiens
  misc_RNA (1)...(19): siRNA sense strand
gaccagcccugaugccuuu

SEQ ID NO: 1389018 - RNA, 19 nt, Homo sapiens
  misc_RNA (1)...(19): siRNA sense strand
gcaaagcccugcuggacau

SEQ ID NO: 1389019 - RNA, 19 nt, Homo sapiens
  misc_RNA (1)...(19): siRNA sense strand
ccagaaggcugcuaagaag

SEQ ID NO: 1389020 - RNA, 19 nt, Homo sapiens
  misc_RNA (1)...(19): siRNA sense strand
gggaucaacuccuggaaga

SEQ ID NO: 1389021 - RNA, 19 nt, Homo sapiens
  misc_RNA (1)...(19): siRNA sense strand
ggaguuuccuacaugauug

SEQ ID NO: 1389022 - RNA, 19 nt, Homo sapiens
  misc_RNA (1)...(19): siRNA sense strand
cuaagaagcaccagaauau

SEQ ID NO: 1389023 - RNA, 19 nt, Homo sapiens
  misc_RNA (1)...(19): siRNA sense strand
gcuaagaagcaccagaaua

SEQ ID NO: 1389024 - RNA, 19 nt, Homo sapiens
  misc_RNA (1)...(19): siRNA sense strand
agaaauaccuggugcucaa

SEQ ID NO: 1389025 - RNA, 19 nt, Homo sapiens
  misc_RNA (1)...(19): siRNA sense strand
ccaaagaauuccaggacaa

SEQ ID NO: 1389026 - RNA, 19 nt, Homo sapiens
  misc_RNA (1)...(19): siRNA sense strand
gaacagcaacuauuauguc

SEQ ID NO: 1389027 - RNA, 19 nt, Homo sapiens
  misc_RNA (1)...(19): siRNA sense strand
gacaaauccuucacucuca

SEQ ID NO: 1389028 - RNA, 19 nt, Homo sapiens
  misc_RNA (1)...(19): siRNA sense strand
cagcaacuauuaugucaug

SEQ ID NO: 1389029 - RNA, 19 nt, Homo sapiens
  misc_RNA (1)...(19): siRNA sense strand
ggacauugcugaucuuuuc

SEQ ID NO: 1389030 - RNA, 19 nt, Homo sapiens
  misc_RNA (1)...(19): siRNA sense strand
gaucaacuccuggaagaaa

SEQ ID NO: 1389031 - RNA, 19 nt, Homo sapiens
  misc_RNA (1)...(19): siRNA sense strand
cagacgacguggaguugua

SEQ ID NO: 1389032 - RNA, 19 nt, Homo sapiens
  misc_RNA (1)...(19): siRNA sense strand
uggaugaugaggaauauua

SEQ ID NO: 1389033 - RNA, 19 nt, Homo sapiens
  misc_RNA (1)...(19): siRNA sense strand
ggcaaaggccucaucaaga

SEQ ID NO: 1389034 - RNA, 19 nt, Homo sapiens
  misc_RNA (1)...(19): siRNA sense strand
uaaacuggaccgugaagaa

SEQ ID NO: 1389035 - RNA, 19 nt, Homo sapiens
  misc_RNA (1)...(19): siRNA sense strand
uaccauggguggauguuug

SEQ ID NO: 1389036 - RNA, 19 nt, Homo sapiens
  misc_RNA (1)...(19): siRNA sense strand
gagcaugcgugggcagaug

SEQ ID NO: 1389037 - RNA, 19 nt, Homo sapiens
  misc_RNA (1)...(19): siRNA sense strand
gcacgccaggccuucuuua

SEQ ID NO: 1389038 - RNA, 19 nt, Homo sapiens
  misc_RNA (1)...(19): siRNA sense strand
gcuauggaguuuccuacau

SEQ ID NO: 1389039 - RNA, 19 nt, Homo sapiens
  misc_RNA (1)...(19): siRNA sense strand
gaucugggcuauguguauc

SEQ ID NO: 1389040 - RNA, 19 nt, Homo sapiens
  misc_RNA (1)...(19): siRNA sense strand
ccacaucuccagcaaguuc

SEQ ID NO: 1389041 - RNA, 19 nt, Homo sapiens
  misc_RNA (1)...(19): siRNA sense strand
ugcgagaucucuuccagaa

SEQ ID NO: 1389042 - RNA, 19 nt, Homo sapiens
  misc_RNA (1)...(19): siRNA sense strand
caaguaacuaugugaguga

SEQ ID NO: 1389043 - RNA, 19 nt, Homo sapiens
  misc_RNA (1)...(19): siRNA sense strand
uggaguugcuggccaaaga

SEQ ID NO: 1389044 - RNA, 19 nt, Homo sapiens
  misc_RNA (1)...(19): siRNA sense strand
ggagcccucucauggugaa

SEQ ID NO: 1389045 - RNA, 19 nt, Homo sapiens
  misc_RNA (1)...(19): siRNA sense strand
agaagcaccagaauaugua

SEQ ID NO: 1389046 - RNA, 19 nt, Homo sapiens
  misc_RNA (1)...(19): siRNA sense strand
cuucaagaauggccaguug

SEQ ID NO: 1389047 - RNA, 19 nt, Homo sapiens
  misc_RNA (1)...(19): siRNA sense strand
ugacgggcaucuucuucuu

SEQ ID NO: 1389048 - RNA, 19 nt, Homo sapiens
  misc_RNA (1)...(19): siRNA sense strand
uacaacaggugguuugaca

SEQ ID NO: 1389049 - RNA, 19 nt, Homo sapiens
  misc_RNA (1)...(19): siRNA sense strand
cauggcaacugcuacaaca

SEQ ID NO: 1389050 - RNA, 19 nt, Homo sapiens
  misc_RNA (1)...(19): siRNA sense strand
agacaucucugcccaagcu

SEQ ID NO: 1389051 - RNA, 19 nt, Homo sapiens
  misc_RNA (1)...(19): siRNA sense strand
cuauggaguuuccuacaug

SEQ ID NO: 1389052 - RNA, 19 nt, Homo sapiens
  misc_RNA (1)...(19): siRNA sense strand
aaacuggaccgugaagaaa

SEQ ID NO: 1389053 - RNA, 19 nt, Homo sapiens
  misc_RNA (1)...(19): siRNA sense strand
ggaaaccacauccgcaaag

SEQ ID NO: 1389054 - RNA, 19 nt, Homo sapiens
  misc_RNA (1)...(19): siRNA sense strand
gggcaccucugggaguuug

SEQ ID NO: 1389055 - RNA, 19 nt, Homo sapiens
  misc_RNA (1)...(19): siRNA sense strand
ccaguugggucucaaugca

SEQ ID NO: 1389056 - RNA, 19 nt, Homo sapiens
  misc_RNA (1)...(19): siRNA sense strand
ccacaagggacgcuucuuc

SEQ ID NO: 1389057 - RNA, 19 nt, Homo sapiens
  misc_RNA (1)...(19): siRNA sense strand
gaaacacgucuaccugucu

SEQ ID NO: 1389058 - RNA, 19 nt, Homo sapiens
  misc_RNA (1)...(19): siRNA sense strand
gcucaagccucaggaucug

SEQ ID NO: 1389059 - RNA, 19 nt, Homo sapiens
  misc_RNA (1)...(19): siRNA sense strand
ggaagaguacaucuaccuu

SEQ ID NO: 1389060 - RNA, 19 nt, Homo sapiens
  misc_RNA (1)...(19): siRNA sense strand
gugaacagcaacuauuaug

SEQ ID NO: 1389061 - RNA, 19 nt, Homo sapiens
  misc_RNA (1)...(19): siRNA sense strand
agucagcucuccuuuccuu

SEQ ID NO: 1389062 - RNA, 19 nt, Homo sapiens
  misc_RNA (1)...(19): siRNA sense strand
ggaucugggcuauguguau

SEQ ID NO: 1389063 - RNA, 19 nt, Homo sapiens
  misc_RNA (1)...(19): siRNA sense strand
gacgaacgcccagcgcuuu

SEQ ID NO: 1389064 - RNA, 19 nt, Homo sapiens
  misc_RNA (1)...(19): siRNA sense strand
uauggaguuuccuacauga

SEQ ID NO: 1389065 - RNA, 19 nt, Homo sapiens
  misc_RNA (1)...(19): siRNA sense strand
gaaaccacauccgcaaagc

SEQ ID NO: 1389066 - RNA, 19 nt, Homo sapiens
  misc_RNA (1)...(19): siRNA sense strand
gcaacuauuaugucaugga

SEQ ID NO: 1389067 - RNA, 19 nt, Homo sapiens
  misc_RNA (1)...(19): siRNA sense strand
ggcaaggcccugcuacaug

SEQ ID NO: 1389068 - RNA, 19 nt, Homo sapiens
  misc_RNA (1)...(19): siRNA sense strand
caagggacgcuucuucaag

SEQ ID NO: 1389069 - RNA, 19 nt, Homo sapiens
  misc_RNA (1)...(19): siRNA sense strand
cuacagcaccucucagaca

SEQ ID NO: 1389070 - RNA, 19 nt, Homo sapiens
  misc_RNA (1)...(19): siRNA sense strand
caauucagcgguaccuaga

SEQ ID NO: 1389071 - RNA, 19 nt, Homo sapiens
  misc_RNA (1)...(19): siRNA sense strand
gagacugugcguuccugua

SEQ ID NO: 1389072 - RNA, 19 nt, Homo sapiens
  misc_RNA (1)...(19): siRNA sense strand
aauauuaccgcauggaguu

SEQ ID NO: 1389073 - RNA, 19 nt, Homo sapiens
  misc_RNA (1)...(19): siRNA sense strand
cuuguuggaugaugaggaa

SEQ ID NO: 1389074 - RNA, 19 nt, Homo sapiens
  misc_RNA (1)...(19): siRNA sense strand
aagaagcaccagaauaugu

SEQ ID NO: 1389075 - RNA, 19 nt, Homo sapiens
  misc_RNA (1)...(19): siRNA sense strand
aacagcaacuauuauguca

SEQ ID NO: 1389076 - RNA, 19 nt, Homo sapiens
  misc_RNA (1)...(19): siRNA sense strand
ggugaacagcaacuauuau

SEQ ID NO: 1389077 - RNA, 19 nt, Homo sapiens
  misc_RNA (1)...(19): siRNA sense strand
uggugaacagcaacuauua

SEQ ID NO: 1389078 - RNA, 19 nt, Homo sapiens
  misc_RNA (1)...(19): siRNA sense strand
caacaguggguuccuccuu

SEQ ID NO: 1389079 - RNA, 19 nt, Homo sapiens
  misc_RNA (1)...(19): siRNA sense strand
guuggaugaugaggaauau

SEQ ID NO: 1389080 - RNA, 19 nt, Homo sapiens
  misc_RNA (1)...(19): siRNA sense strand
ggaguugcuggccaaagaa

SEQ ID NO: 1389081 - RNA, 19 nt, Homo sapiens
  misc_RNA (1)...(19): siRNA sense strand
ggugggaagaguacaucua

SEQ ID NO: 1389082 - RNA, 19 nt, Homo sapiens
  misc_RNA (1)...(19): siRNA sense strand
gcaggagcccucucauggu

SEQ ID NO: 1389083 - RNA, 19 nt, Homo sapiens
  misc_RNA (1)...(19): siRNA sense strand
uaagaagcaccagaauaug

SEQ ID NO: 1389084 - RNA, 19 nt, Homo sapiens
  misc_RNA (1)...(19): siRNA sense strand
cagcgaguccacagccuuu

SEQ ID NO: 1389085 - RNA, 19 nt, Homo sapiens
  misc_RNA (1)...(19): siRNA sense strand
gccguggccuuccaguuca

SEQ ID NO: 1389086 - RNA, 19 nt, Homo sapiens
  misc_RNA (1)...(19): siRNA sense strand
ucauggaccuugugcucau

SEQ ID NO: 1389087 - RNA, 19 nt, Homo sapiens
  misc_RNA (1)...(19): siRNA sense strand
gcuggacauugcugaucuu

SEQ ID NO: 1389088 - RNA, 19 nt, Homo sapiens
  misc_RNA (1)...(19): siRNA sense strand
gaucgacaggcaccucuuc

SEQ ID NO: 1389089 - RNA, 19 nt, Homo sapiens
  misc_RNA (1)...(19): siRNA sense strand
uccagaaggcugcuaagaa

SEQ ID NO: 1389090 - RNA, 19 nt, Homo sapiens
  misc_RNA (1)...(19): siRNA sense strand
caaauccuucacucucauu

SEQ ID NO: 1389091 - RNA, 19 nt, Homo sapiens
  misc_RNA (1)...(19): siRNA sense strand
gaacgcccagcgcuuugga

SEQ ID NO: 1389092 - RNA, 19 nt, Homo sapiens
  misc_RNA (1)...(19): siRNA sense strand
ccagcaacuugaccaggau

SEQ ID NO: 1389093 - RNA, 19 nt, Homo sapiens
  misc_RNA (1)...(19): siRNA sense strand
ccucuucugccuuuacuug

SEQ ID NO: 1389094 - RNA, 19 nt, Homo sapiens
  misc_RNA (1)...(19): siRNA sense strand
ggaggggucccacacaaaa

SEQ ID NO: 1389095 - RNA, 19 nt, Homo sapiens
  misc_RNA (1)...(19): siRNA sense strand
uggcaaaggccucaucaag

SEQ ID NO: 1389096 - RNA, 19 nt, Homo sapiens
  misc_RNA (1)...(19): siRNA sense strand
ucacucucauuuccuucaa

SEQ ID NO: 1389097 - RNA, 19 nt, Homo sapiens
  misc_RNA (1)...(19): siRNA sense strand
caaagaauuccaggacaag

SEQ ID NO: 1389098 - RNA, 19 nt, Homo sapiens
  misc_RNA (1)...(19): siRNA sense strand
cagggugucagccacaauu

SEQ ID NO: 1389099 - RNA, 19 nt, Homo sapiens
  misc_RNA (1)...(19): siRNA sense strand
ucucauuuccuucaagaau

SEQ ID NO: 1389100 - RNA, 19 nt, Homo sapiens
  misc_RNA (1)...(19): siRNA sense strand
acaaauccuucacucucau

SEQ ID NO: 1389101 - RNA, 19 nt, Homo sapiens
  misc_RNA (1)...(19): siRNA sense strand
ccuaccagauggagaggau

SEQ ID NO: 1389102 - RNA, 19 nt, Homo sapiens
  misc_RNA (1)...(19): siRNA sense strand
gcucuacagcuuccagaca

SEQ ID NO: 1389103 - RNA, 19 nt, Homo sapiens
  misc_RNA (1)...(19): siRNA sense strand
uggaguuuccuacaugauu

SEQ ID NO: 1389104 - RNA, 19 nt, Homo sapiens
  misc_RNA (1)...(19): siRNA sense strand
acucucauuuccuucaaga

SEQ ID NO: 1389105 - RNA, 19 nt, Homo sapiens
  misc_RNA (1)...(19): siRNA sense strand
cacaagggacgcuucuuca

SEQ ID NO: 1389106 - RNA, 19 nt, Homo sapiens
  misc_RNA (1)...(19): siRNA sense strand
uaugugcuccuaccagaug

SEQ ID NO: 1389107 - RNA, 19 nt, Homo sapiens
  misc_RNA (1)...(19): siRNA sense strand
ugaacagcaacuauuaugu

SEQ ID NO: 1389108 - RNA, 19 nt, Homo sapiens
  misc_RNA (1)...(19): siRNA sense strand
cgccaggccuucuuuagcu

SEQ ID NO: 1389109 - RNA, 19 nt, Homo sapiens
  misc_RNA (1)...(19): siRNA sense strand
gcccagcgcuuuggaaacc

SEQ ID NO: 1389110 - RNA, 19 nt, Homo sapiens
  misc_RNA (1)...(19): siRNA sense strand
aguucugccugaccuauga

SEQ ID NO: 1389111 - RNA, 19 nt, Homo sapiens
  misc_RNA (1)...(19): siRNA sense strand
ggugggcaaguaacuaugu

SEQ ID NO: 1389112 - RNA, 19 nt, Homo sapiens
  misc_RNA (1)...(19): siRNA sense strand
ucggaacccuggcgucucu

SEQ ID NO: 1389113 - RNA, 19 nt, Homo sapiens
  misc_RNA (1)...(19): siRNA sense strand
gcaaaggccucaucaagaa

SEQ ID NO: 1389114 - RNA, 19 nt, Homo sapiens
  misc_RNA (1)...(19): siRNA sense strand
gaagaaaucaagccuguga

SEQ ID NO: 1389115 - RNA, 19 nt, Homo sapiens
  misc_RNA (1)...(19): siRNA sense strand
gaugauggcuauggaguuu

SEQ ID NO: 1389116 - RNA, 19 nt, Homo sapiens
  misc_RNA (1)...(19): siRNA sense strand
gaucauguaucgccguaaa

SEQ ID NO: 1389117 - RNA, 19 nt, Homo sapiens
  misc_RNA (1)...(19): siRNA sense strand
gaccagcccugaugccuuu

SEQ ID NO: 1389118 - RNA, 19 nt, Homo sapiens
  misc_RNA (1)...(19): siRNA sense strand
gcaaagcccugcuggacau

SEQ ID NO: 1389119 - RNA, 19 nt, Homo sapiens
  misc_RNA (1)...(19): siRNA sense strand
ccagaaggcugcuaagaag

SEQ ID NO: 1389120 - RNA, 19 nt, Homo sapiens
  misc_RNA (1)...(19): siRNA sense strand
gggaucaacuccuggaaga

SEQ ID NO: 1389121 - RNA, 19 nt, Homo sapiens
  misc_RNA (1)...(19): siRNA sense strand
ggaguuuccuacaugauug

SEQ ID NO: 1389122 - RNA, 19 nt, Homo sapiens
  misc_RNA (1)...(19): siRNA sense strand
cuaagaagcaccagaauau

SEQ ID NO: 1389123 - RNA, 19 nt, Homo sapiens
  misc_RNA (1)...(19): siRNA sense strand
gcuaagaagcaccagaaua

SEQ ID NO: 1389124 - RNA, 19 nt, Homo sapiens
  misc_RNA (1)...(19): siRNA sense strand
agaaauaccuggugcucaa

SEQ ID NO: 1389125 - RNA, 19 nt, Homo sapiens
  misc_RNA (1)...(19): siRNA sense strand
ccaaagaauuccaggacaa

SEQ ID NO: 1389126 - RNA, 19 nt, Homo sapiens
  misc_RNA (1)...(19): siRNA sense strand
gaacagcaacuauuauguc

SEQ ID NO: 1389127 - RNA, 19 nt, Homo sapiens
  misc_RNA (1)...(19): siRNA sense strand
gacaaauccuucacucuca

SEQ ID NO: 1389128 - RNA, 19 nt, Homo sapiens
  misc_RNA (1)...(19): siRNA sense strand
cagcaacuauuaugucaug

SEQ ID NO: 1389129 - RNA, 19 nt, Homo sapiens
  misc_RNA (1)...(19): siRNA sense strand
ggacauugcugaucuuuuc

SEQ ID NO: 1389130 - RNA, 19 nt, Homo sapiens
  misc_RNA (1)...(19): siRNA sense strand
gaucaacuccuggaagaaa

SEQ ID NO: 1389131 - RNA, 19 nt, Homo sapiens
  misc_RNA (1)...(19): siRNA sense strand
cagacgacguggaguugua

SEQ ID NO: 1389132 - RNA, 19 nt, Homo sapiens
  misc_RNA (1)...(19): siRNA sense strand
uggaugaugaggaauauua

SEQ ID NO: 1389133 - RNA, 19 nt, Homo sapiens
  misc_RNA (1)...(19): siRNA sense strand
ggcaaaggccucaucaaga

SEQ ID NO: 1389134 - RNA, 19 nt, Homo sapiens
  misc_RNA (1)...(19): siRNA sense strand
uaaacuggaccgugaagaa

SEQ ID NO: 1389135 - RNA, 19 nt, Homo sapiens
  misc_RNA (1)...(19): siRNA sense strand
uaccauggguggauguuug

SEQ ID NO: 1389136 - RNA, 19 nt, Homo sapiens
  misc_RNA (1)...(19): siRNA sense strand
gagcaugcgugggcagaug

SEQ ID NO: 1389137 - RNA, 19 nt, Homo sapiens
  misc_RNA (1)...(19): siRNA sense strand
gcacgccaggccuucuuua

SEQ ID NO: 1389138 - RNA, 19 nt, Homo sapiens
  misc_RNA (1)...(19): siRNA sense strand
gcuauggaguuuccuacau

SEQ ID NO: 1389139 - RNA, 19 nt, Homo sapiens
  misc_RNA (1)...(19): siRNA sense strand
gaucugggcuauguguauc

SEQ ID NO: 1389140 - RNA, 19 nt, Homo sapiens
  misc_RNA (1)...(19): siRNA sense strand
ccacaucuccagcaaguuc

SEQ ID NO: 1389141 - RNA, 19 nt, Homo sapiens
  misc_RNA (1)...(19): siRNA sense strand
ugcgagaucucuuccagaa

SEQ ID NO: 1389142 - RNA, 19 nt, Homo sapiens
  misc_RNA (1)...(19): siRNA sense strand
caaguaacuaugugaguga

SEQ ID NO: 1389143 - RNA, 19 nt, Homo sapiens
  misc_RNA (1)...(19): siRNA sense strand
uggaguugcuggccaaaga

SEQ ID NO: 1389144 - RNA, 19 nt, Homo sapiens
  misc_RNA (1)...(19): siRNA sense strand
ggagcccucucauggugaa

SEQ ID NO: 1389145 - RNA, 19 nt, Homo sapiens
  misc_RNA (1)...(19): siRNA sense strand
agaagcaccagaauaugua

SEQ ID NO: 1389146 - RNA, 19 nt, Homo sapiens
  misc_RNA (1)...(19): siRNA sense strand
cuucaagaauggccaguug

SEQ ID NO: 1389147 - RNA, 19 nt, Homo sapiens
  misc_RNA (1)...(19): siRNA sense strand
ugacgggcaucuucuucuu

SEQ ID NO: 1389148 - RNA, 19 nt, Homo sapiens
  misc_RNA (1)...(19): siRNA sense strand
uacaacaggugguuugaca

SEQ ID NO: 1389149 - RNA, 19 nt, Homo sapiens
  misc_RNA (1)...(19): siRNA sense strand
cauggcaacugcuacaaca

SEQ ID NO: 1389150 - RNA, 19 nt, Homo sapiens
  misc_RNA (1)...(19): siRNA sense strand
agacaucucugcccaagcu

SEQ ID NO: 1389151 - RNA, 19 nt, Homo sapiens
  misc_RNA (1)...(19): siRNA sense strand
cuauggaguuuccuacaug

SEQ ID NO: 1389152 - RNA, 19 nt, Homo sapiens
  misc_RNA (1)...(19): siRNA sense strand
aaacuggaccgugaagaaa

SEQ ID NO: 1389153 - RNA, 19 nt, Homo sapiens
  misc_RNA (1)...(19): siRNA sense strand
ggaaaccacauccgcaaag

SEQ ID NO: 1389154 - RNA, 19 nt, Homo sapiens
  misc_RNA (1)...(19): siRNA sense strand
gggcaccucugggaguuug

SEQ ID NO: 1389155 - RNA, 19 nt, Homo sapiens
  misc_RNA (1)...(19): siRNA sense strand
ccaguugggucucaaugca

SEQ ID NO: 1389156 - RNA, 19 nt, Homo sapiens
  misc_RNA (1)...(19): siRNA sense strand
ccacaagggacgcuucuuc

SEQ ID NO: 1389157 - RNA, 19 nt, Homo sapiens
  misc_RNA (1)...(19): siRNA sense strand
gaaacacgucuaccugucu

SEQ ID NO: 1389158 - RNA, 19 nt, Homo sapiens
  misc_RNA (1)...(19): siRNA sense strand
gcucaagccucaggaucug

SEQ ID NO: 1389159 - RNA, 19 nt, Homo sapiens
  misc_RNA (1)...(19): siRNA sense strand
ggaagaguacaucuaccuu

SEQ ID NO: 1389160 - RNA, 19 nt, Homo sapiens
  misc_RNA (1)...(19): siRNA sense strand
gugaacagcaacuauuaug

SEQ ID NO: 1389161 - RNA, 19 nt, Homo sapiens
  misc_RNA (1)...(19): siRNA sense strand
agucagcucuccuuuccuu

SEQ ID NO: 1389162 - RNA, 19 nt, Homo sapiens
  misc_RNA (1)...(19): siRNA sense strand
ggaucugggcuauguguau

SEQ ID NO: 1389163 - RNA, 19 nt, Homo sapiens
  misc_RNA (1)...(19): siRNA sense strand
gacgaacgcccagcgcuuu

SEQ ID NO: 1389164 - RNA, 19 nt, Homo sapiens
  misc_RNA (1)...(19): siRNA sense strand
uauggaguuuccuacauga

SEQ ID NO: 1389165 - RNA, 19 nt, Homo sapiens
  misc_RNA (1)...(19): siRNA sense strand
gaaaccacauccgcaaagc

SEQ ID NO: 1389166 - RNA, 19 nt, Homo sapiens
  misc_RNA (1)...(19): siRNA sense strand
gcaacuauuaugucaugga

SEQ ID NO: 1389167 - RNA, 19 nt, Homo sapiens
  misc_RNA (1)...(19): siRNA sense strand
ggcaaggcccugcuacaug

SEQ ID NO: 1389168 - RNA, 19 nt, Homo sapiens
  misc_RNA (1)...(19): siRNA sense strand
caagggacgcuucuucaag

SEQ ID NO: 1389169 - RNA, 19 nt, Homo sapiens
  misc_RNA (1)...(19): siRNA sense strand
cuacagcaccucucagaca

SEQ ID NO: 1389170 - RNA, 19 nt, Homo sapiens
  misc_RNA (1)...(19): siRNA sense strand
caauucagcgguaccuaga

SEQ ID NO: 1389171 - RNA, 19 nt, Homo sapiens
  misc_RNA (1)...(19): siRNA sense strand
gagacugugcguuccugua

SEQ ID NO: 1389172 - RNA, 19 nt, Homo sapiens
  misc_RNA (1)...(19): siRNA sense strand
aauauuaccgcauggaguu

SEQ ID NO: 1389173 - RNA, 19 nt, Homo sapiens
  misc_RNA (1)...(19): siRNA sense strand
cuuguuggaugaugaggaa

SEQ ID NO: 1389174 - RNA, 19 nt, Homo sapiens
  misc_RNA (1)...(19): siRNA sense strand
aagaagcaccagaauaugu

SEQ ID NO: 1389175 - RNA, 19 nt, Homo sapiens
  misc_RNA (1)...(19): siRNA sense strand
aacagcaacuauuauguca

SEQ ID NO: 1389176 - RNA, 19 nt, Homo sapiens
  misc_RNA (1)...(19): siRNA sense strand
ggugaacagcaacuauuau

SEQ ID NO: 1389177 - RNA, 19 nt, Homo sapiens
  misc_RNA (1)...(19): siRNA sense strand
uggugaacagcaacuauua

SEQ ID NO: 1389178 - RNA, 19 nt, Homo sapiens
  misc_RNA (1)...(19): siRNA sense strand
caacaguggguuccuccuu

SEQ ID NO: 1389179 - RNA, 19 nt, Homo sapiens
  misc_RNA (1)...(19): siRNA sense strand
guuggaugaugaggaauau

SEQ ID NO: 1389180 - RNA, 19 nt, Homo sapiens
  misc_RNA (1)...(19): siRNA sense strand
ggaguugcuggccaaagaa

SEQ ID NO: 1389181 - RNA, 19 nt, Homo sapiens
  misc_RNA (1)...(19): siRNA sense strand
ggugggaagaguacaucua

SEQ ID NO: 1389182 - RNA, 19 nt, Homo sapiens
  misc_RNA (1)...(19): siRNA sense strand
gcaggagcccucucauggu

SEQ ID NO: 1389183 - RNA, 19 nt, Homo sapiens
  misc_RNA (1)...(19): siRNA sense strand
uaagaagcaccagaauaug

SEQ ID NO: 1389184 - RNA, 19 nt, Homo sapiens
  misc_RNA (1)...(19): siRNA sense strand
cagcgaguccacagccuuu

SEQ ID NO: 1389185 - RNA, 19 nt, Homo sapiens
  misc_RNA (1)...(19): siRNA sense strand
gccguggccuuccaguuca

SEQ ID NO: 1389186 - RNA, 19 nt, Homo sapiens
  misc_RNA (1)...(19): siRNA sense strand
ucauggaccuugugcucau

SEQ ID NO: 1389187 - RNA, 19 nt, Homo sapiens
  misc_RNA (1)...(19): siRNA sense strand
gcuggacauugcugaucuu

SEQ ID NO: 1389188 - RNA, 19 nt, Homo sapiens
  misc_RNA (1)...(19): siRNA sense strand
gaucgacaggcaccucuuc

SEQ ID NO: 1389189 - RNA, 19 nt, Homo sapiens
  misc_RNA (1)...(19): siRNA sense strand
uccagaaggcugcuaagaa

SEQ ID NO: 1389190 - RNA, 19 nt, Homo sapiens
  misc_RNA (1)...(19): siRNA sense strand
caaauccuucacucucauu

SEQ ID NO: 1389191 - RNA, 19 nt, Homo sapiens
  misc_RNA (1)...(19): siRNA sense strand
gaacgcccagcgcuuugga

SEQ ID NO: 1389192 - RNA, 19 nt, Homo sapiens
  misc_RNA (1)...(19): siRNA sense strand
ccagcaacuugaccaggau

SEQ ID NO: 1389193 - RNA, 19 nt, Homo sapiens
  misc_RNA (1)...(19): siRNA sense strand
ccucuucugccuuuacuug

SEQ ID NO: 1389194 - RNA, 19 nt, Homo sapiens
  misc_RNA (1)...(19): siRNA sense strand
ggaggggucccacacaaaa

SEQ ID NO: 1389195 - RNA, 19 nt, Homo sapiens
  misc_RNA (1)...(19): siRNA sense strand
uggcaaaggccucaucaag

SEQ ID NO: 1389196 - RNA, 19 nt, Homo sapiens
  misc_RNA (1)...(19): siRNA sense strand
ucacucucauuuccuucaa

SEQ ID NO: 1389197 - RNA, 19 nt, Homo sapiens
  misc_RNA (1)...(19): siRNA sense strand
caaagaauuccaggacaag

SEQ ID NO: 1389198 - RNA, 19 nt, Homo sapiens
  misc_RNA (1)...(19): siRNA sense strand
cagggugucagccacaauu

SEQ ID NO: 1389199 - RNA, 19 nt, Homo sapiens
  misc_RNA (1)...(19): siRNA sense strand
ucucauuuccuucaagaau

SEQ ID NO: 1389200 - RNA, 19 nt, Homo sapiens
  misc_RNA (1)...(19): siRNA sense strand
acaaauccuucacucucau

SEQ ID NO: 1389201 - RNA, 19 nt, Homo sapiens
  misc_RNA (1)...(19): siRNA sense strand
ccuaccagauggagaggau

SEQ ID NO: 1389202 - RNA, 19 nt, Homo sapiens
  misc_RNA (1)...(19): siRNA sense strand
gcucuacagcuuccagaca

SEQ ID NO: 1389203 - RNA, 19 nt, Homo sapiens
  misc_RNA (1)...(19): siRNA sense strand
uggaguuuccuacaugauu

SEQ ID NO: 1389204 - RNA, 19 nt, Homo sapiens
  misc_RNA (1)...(19): siRNA sense strand
acucucauuuccuucaaga

SEQ ID NO: 1389205 - RNA, 19 nt, Homo sapiens
  misc_RNA (1)...(19): siRNA sense strand
cacaagggacgcuucuuca

SEQ ID NO: 1389206 - RNA, 19 nt, Homo sapiens
  misc_RNA (1)...(19): siRNA sense strand
uaugugcuccuaccagaug

SEQ ID NO: 1389207 - RNA, 19 nt, Homo sapiens
  misc_RNA (1)...(19): siRNA sense strand
ugaacagcaacuauuaugu

SEQ ID NO: 1389208 - RNA, 19 nt, Homo sapiens
  misc_RNA (1)...(19): siRNA sense strand
cgccaggccuucuuuagcu

SEQ ID NO: 1389209 - RNA, 19 nt, Homo sapiens
  misc_RNA (1)...(19): siRNA sense strand
gcccagcgcuuuggaaacc

SEQ ID NO: 1389210 - RNA, 19 nt, Homo sapiens
  misc_RNA (1)...(19): siRNA sense strand
aguucugccugaccuauga

SEQ ID NO: 1389211 - RNA, 19 nt, Homo sapiens
  misc_RNA (1)...(19): siRNA sense strand
ggugggcaaguaacuaugu

SEQ ID NO: 1389212 - RNA, 19 nt, Homo sapiens
  misc_RNA (1)...(19): siRNA sense strand
ucggaacccuggcgucucu

SEQ ID NO: 1389213 - RNA, 19 nt, Homo sapiens
  misc_RNA (1)...(19): siRNA sense strand
gcaaaggccucaucaagaa

SEQ ID NO: 1389214 - RNA, 19 nt, Homo sapiens
  misc_RNA (1)...(19): siRNA sense strand
gaagaaaucaagccuguga

SEQ ID NO: 1389215 - RNA, 19 nt, Homo sapiens
  misc_RNA (1)...(19): siRNA sense strand
gaucauguaucgccguaaa

SEQ ID NO: 1389216 - RNA, 19 nt, Homo sapiens
  misc_RNA (1)...(19): siRNA sense strand
gaccagcccugaugccuuu

SEQ ID NO: 1389217 - RNA, 19 nt, Homo sapiens
  misc_RNA (1)...(19): siRNA sense strand
gggaucaacuccuggaaga

SEQ ID NO: 1389218 - RNA, 19 nt, Homo sapiens
  misc_RNA (1)...(19): siRNA sense strand
agaaauaccuggugcucaa

SEQ ID NO: 1389219 - RNA, 19 nt, Homo sapiens
  misc_RNA (1)...(19): siRNA sense strand
ccaaagaauuccaggacaa

SEQ ID NO: 1389220 - RNA, 19 nt, Homo sapiens
  misc_RNA (1)...(19): siRNA sense strand
gaacagcaacuauuauguc

SEQ ID NO: 1389221 - RNA, 19 nt, Homo sapiens
  misc_RNA (1)...(19): siRNA sense strand
gacaaauccuucacucuca

SEQ ID NO: 1389222 - RNA, 19 nt, Homo sapiens
  misc_RNA (1)...(19): siRNA sense strand
cagcaacuauuaugucaug

SEQ ID NO: 1389223 - RNA, 19 nt, Homo sapiens
  misc_RNA (1)...(19): siRNA sense strand
gaucaacuccuggaagaaa

SEQ ID NO: 1389224 - RNA, 19 nt, Homo sapiens
  misc_RNA (1)...(19): siRNA sense strand
cagacgacguggaguugua

SEQ ID NO: 1389225 - RNA, 19 nt, Homo sapiens
  misc_RNA (1)...(19): siRNA sense strand
uggaugaugaggaauauua

SEQ ID NO: 1389226 - RNA, 19 nt, Homo sapiens
  misc_RNA (1)...(19): siRNA sense strand
ggcaaaggccucaucaaga

SEQ ID NO: 1389227 - RNA, 19 nt, Homo sapiens
  misc_RNA (1)...(19): siRNA sense strand
uaaacuggaccgugaagaa

SEQ ID NO: 1389228 - RNA, 19 nt, Homo sapiens
  misc_RNA (1)...(19): siRNA sense strand
uaccauggguggauguuug

SEQ ID NO: 1389229 - RNA, 19 nt, Homo sapiens
  misc_RNA (1)...(19): siRNA sense strand
gagcaugcgugggcagaug

SEQ ID NO: 1389230 - RNA, 19 nt, Homo sapiens
  misc_RNA (1)...(19): siRNA sense strand
gcacgccaggccuucuuua

SEQ ID NO: 1389231 - RNA, 19 nt, Homo sapiens
  misc_RNA (1)...(19): siRNA sense strand
gaucugggcuauguguauc

SEQ ID NO: 1389232 - RNA, 19 nt, Homo sapiens
  misc_RNA (1)...(19): siRNA sense strand
caaguaacuaugugaguga

SEQ ID NO: 1389233 - RNA, 19 nt, Homo sapiens
  misc_RNA (1)...(19): siRNA sense strand
uggaguugcuggccaaaga

SEQ ID NO: 1389234 - RNA, 19 nt, Homo sapiens
  misc_RNA (1)...(19): siRNA sense strand
ggagcccucucauggugaa

SEQ ID NO: 1389235 - RNA, 19 nt, Homo sapiens
  misc_RNA (1)...(19): siRNA sense strand
cuucaagaauggccaguug

SEQ ID NO: 1389236 - RNA, 19 nt, Homo sapiens
  misc_RNA (1)...(19): siRNA sense strand
ugacgggcaucuucuucuu

SEQ ID NO: 1389237 - RNA, 19 nt, Homo sapiens
  misc_RNA (1)...(19): siRNA sense strand
uacaacaggugguuugaca

SEQ ID NO: 1389238 - RNA, 19 nt, Homo sapiens
  misc_RNA (1)...(19): siRNA sense strand
cauggcaacugcuacaaca

SEQ ID NO: 1389239 - RNA, 19 nt, Homo sapiens
  misc_RNA (1)...(19): siRNA sense strand
agacaucucugcccaagcu

SEQ ID NO: 1389240 - RNA, 19 nt, Homo sapiens
  misc_RNA (1)...(19): siRNA sense strand
aaacuggaccgugaagaaa

SEQ ID NO: 1389241 - RNA, 19 nt, Homo sapiens
  misc_RNA (1)...(19): siRNA sense strand
gggcaccucugggaguuug

SEQ ID NO: 1389242 - RNA, 19 nt, Homo sapiens
  misc_RNA (1)...(19): siRNA sense strand
ccaguugggucucaaugca

SEQ ID NO: 1389243 - RNA, 19 nt, Homo sapiens
  misc_RNA (1)...(19): siRNA sense strand
ccacaagggacgcuucuuc

SEQ ID NO: 1389244 - RNA, 19 nt, Homo sapiens
  misc_RNA (1)...(19): siRNA sense strand
gaaacacgucuaccugucu

SEQ ID NO: 1389245 - RNA, 19 nt, Homo sapiens
  misc_RNA (1)...(19): siRNA sense strand
gcucaagccucaggaucug

SEQ ID NO: 1389246 - RNA, 19 nt, Homo sapiens
  misc_RNA (1)...(19): siRNA sense strand
ggaagaguacaucuaccuu

SEQ ID NO: 1389247 - RNA, 19 nt, Homo sapiens
  misc_RNA (1)...(19): siRNA sense strand
gugaacagcaacuauuaug

SEQ ID NO: 1389248 - RNA, 19 nt, Homo sapiens
  misc_RNA (1)...(19): siRNA sense strand
ggaucugggcuauguguau

SEQ ID NO: 1389249 - RNA, 19 nt, Homo sapiens
  misc_RNA (1)...(19): siRNA sense strand
gcaacuauuaugucaugga

SEQ ID NO: 1389250 - RNA, 19 nt, Homo sapiens
  misc_RNA (1)...(19): siRNA sense strand
ggcaaggcccugcuacaug

SEQ ID NO: 1389251 - RNA, 19 nt, Homo sapiens
  misc_RNA (1)...(19): siRNA sense strand
caagggacgcuucuucaag

SEQ ID NO: 1389252 - RNA, 19 nt, Homo sapiens
  misc_RNA (1)...(19): siRNA sense strand
cuacagcaccucucagaca

SEQ ID NO: 1389253 - RNA, 19 nt, Homo sapiens
  misc_RNA (1)...(19): siRNA sense strand
caauucagcgguaccuaga

SEQ ID NO: 1389254 - RNA, 19 nt, Homo sapiens
  misc_RNA (1)...(19): siRNA sense strand
aauauuaccgcauggaguu

SEQ ID NO: 1389255 - RNA, 19 nt, Homo sapiens
  misc_RNA (1)...(19): siRNA sense strand
cuuguuggaugaugaggaa

SEQ ID NO: 1389256 - RNA, 19 nt, Homo sapiens
  misc_RNA (1)...(19): siRNA sense strand
caacaguggguuccuccuu

SEQ ID NO: 1389257 - RNA, 19 nt, Homo sapiens
  misc_RNA (1)...(19): siRNA sense strand
aacagcaacuauuauguca

SEQ ID NO: 1389258 - RNA, 19 nt, Homo sapiens
  misc_RNA (1)...(19): siRNA sense strand
ggugaacagcaacuauuau

SEQ ID NO: 1389259 - RNA, 19 nt, Homo sapiens
  misc_RNA (1)...(19): siRNA sense strand
uggugaacagcaacuauua

SEQ ID NO: 1389260 - RNA, 19 nt, Homo sapiens
  misc_RNA (1)...(19): siRNA sense strand
guuggaugaugaggaauau

SEQ ID NO: 1389261 - RNA, 19 nt, Homo sapiens
  misc_RNA (1)...(19): siRNA sense strand
ggaguugcuggccaaagaa

SEQ ID NO: 1389262 - RNA, 19 nt, Homo sapiens
  misc_RNA (1)...(19): siRNA sense strand
ggugggaagaguacaucua

SEQ ID NO: 1389263 - RNA, 19 nt, Homo sapiens
  misc_RNA (1)...(19): siRNA sense strand
gcaggagcccucucauggu

SEQ ID NO: 1389264 - RNA, 19 nt, Homo sapiens
  misc_RNA (1)...(19): siRNA sense strand
gccguggccuuccaguuca

SEQ ID NO: 1389265 - RNA, 19 nt, Homo sapiens
  misc_RNA (1)...(19): siRNA sense strand
ucauggaccuugugcucau

SEQ ID NO: 1389266 - RNA, 19 nt, Homo sapiens
  misc_RNA (1)...(19): siRNA sense strand
caaauccuucacucucauu

SEQ ID NO: 1389267 - RNA, 19 nt, Homo sapiens
  misc_RNA (1)...(19): siRNA sense strand
ccagcaacuugaccaggau

SEQ ID NO: 1389268 - RNA, 19 nt, Homo sapiens
  misc_RNA (1)...(19): siRNA sense strand
uggcaaaggccucaucaag

SEQ ID NO: 1389269 - RNA, 19 nt, Homo sapiens
  misc_RNA (1)...(19): siRNA sense strand
ucacucucauuuccuucaa

SEQ ID NO: 1389270 - RNA, 19 nt, Homo sapiens
  misc_RNA (1)...(19): siRNA sense strand
caaagaauuccaggacaag

SEQ ID NO: 1389271 - RNA, 19 nt, Homo sapiens
  misc_RNA (1)...(19): siRNA sense strand
cagggugucagccacaauu

SEQ ID NO: 1389272 - RNA, 19 nt, Homo sapiens
  misc_RNA (1)...(19): siRNA sense strand
ucucauuuccuucaagaau

SEQ ID NO: 1389273 - RNA, 19 nt, Homo sapiens
  misc_RNA (1)...(19): siRNA sense strand
acaaauccuucacucucau

SEQ ID NO: 1389274 - RNA, 19 nt, Homo sapiens
  misc_RNA (1)...(19): siRNA sense strand
ccuaccagauggagaggau

SEQ ID NO: 1389275 - RNA, 19 nt, Homo sapiens
  misc_RNA (1)...(19): siRNA sense strand
gcucuacagcuuccagaca

SEQ ID NO: 1389276 - RNA, 19 nt, Homo sapiens
  misc_RNA (1)...(19): siRNA sense strand
acucucauuuccuucaaga

SEQ ID NO: 1389277 - RNA, 19 nt, Homo sapiens
  misc_RNA (1)...(19): siRNA sense strand
cacaagggacgcuucuuca

SEQ ID NO: 1389278 - RNA, 19 nt, Homo sapiens
  misc_RNA (1)...(19): siRNA sense strand
uaugugcuccuaccagaug

SEQ ID NO: 1389279 - RNA, 19 nt, Homo sapiens
  misc_RNA (1)...(19): siRNA sense strand
ugaacagcaacuauuaugu

SEQ ID NO: 1389280 - RNA, 19 nt, Homo sapiens
  misc_RNA (1)...(19): siRNA sense strand
cgccaggccuucuuuagcu

SEQ ID NO: 1389281 - RNA, 19 nt, Homo sapiens
  misc_RNA (1)...(19): siRNA sense strand
guugcuggccaaagaauuc

SEQ ID NO: 1389282 - RNA, 19 nt, Homo sapiens
  misc_RNA (1)...(19): siRNA sense strand
ggugggcaaguaacuaugu

SEQ ID NO: 1389283 - RNA, 19 nt, Homo sapiens
  misc_RNA (1)...(19): siRNA sense strand
agucauggugggcaaguaa

SEQ ID NO: 1389284 - RNA, 19 nt, Homo sapiens
  misc_RNA (1)...(19): siRNA sense strand
gcagugggacauuccaaaa

SEQ ID NO: 1389285 - RNA, 19 nt, Homo sapiens
  misc_RNA (1)...(19): siRNA sense strand
cuacauggcaacugcuaca

SEQ ID NO: 1389286 - RNA, 19 nt, Homo sapiens
  misc_RNA (1)...(19): siRNA sense strand
gcaacguggacaucuccuu

SEQ ID NO: 1389287 - RNA, 19 nt, Homo sapiens
  misc_RNA (1)...(19): siRNA sense strand
acaagggacgcuucuucaa

SEQ ID NO: 1389288 - RNA, 19 nt, Homo sapiens
  misc_RNA (1)...(19): siRNA sense strand
ggaccgugaagaaaucaag

SEQ ID NO: 1389289 - RNA, 19 nt, Homo sapiens
  misc_RNA (1)...(19): siRNA sense strand
gaaccuacuuguacaauga

SEQ ID NO: 1389290 - RNA, 19 nt, Homo sapiens
  misc_RNA (1)...(19): siRNA sense strand
gaagagagauagugugugu

SEQ ID NO: 1389291 - RNA, 19 nt, Homo sapiens
  misc_RNA (1)...(19): siRNA sense strand
gagugugucuccuguagua

SEQ ID NO: 1389292 - RNA, 19 nt, Homo sapiens
  misc_RNA (1)...(19): siRNA sense strand
caaaggaaccuacuuguac

SEQ ID NO: 1389293 - RNA, 19 nt, Homo sapiens
  misc_RNA (1)...(19): siRNA sense strand
ggaaccuacuuguacaaug

SEQ ID NO: 1389294 - RNA, 19 nt, Homo sapiens
  misc_RNA (1)...(19): siRNA sense strand
ccaugcagguuucuuucua

SEQ ID NO: 1389295 - RNA, 19 nt, Homo sapiens
  misc_RNA (1)...(19): siRNA sense strand
ccacaaaggaaccuacuug

SEQ ID NO: 1389296 - RNA, 19 nt, Homo sapiens
  misc_RNA (1)...(19): siRNA sense strand
gagaagagagauagugugu

SEQ ID NO: 1389297 - RNA, 19 nt, Homo sapiens
  misc_RNA (1)...(19): siRNA sense strand
aaauauauccacccucaaa

SEQ ID NO: 1389298 - RNA, 19 nt, Homo sapiens
  misc_RNA (1)...(19): siRNA sense strand
ugaaggaacuacuacuaag

SEQ ID NO: 1389299 - RNA, 19 nt, Homo sapiens
  misc_RNA (1)...(19): siRNA sense strand
guggagaucucuucuugca

SEQ ID NO: 1389300 - RNA, 19 nt, Homo sapiens
  misc_RNA (1)...(19): siRNA sense strand
caugcagguuucuuucuaa

SEQ ID NO: 1389301 - RNA, 19 nt, Homo sapiens
  misc_RNA (1)...(19): siRNA sense strand
gagcuugaaggaacuacua

SEQ ID NO: 1389302 - RNA, 19 nt, Homo sapiens
  misc_RNA (1)...(19): siRNA sense strand
aaaggaaccuacuuguaca

SEQ ID NO: 1389303 - RNA, 19 nt, Homo sapiens
  misc_RNA (1)...(19): siRNA sense strand
cacagagccuagacacuga

SEQ ID NO: 1389304 - RNA, 19 nt, Homo sapiens
  misc_RNA (1)...(19): siRNA sense strand
aagcucuacuccauuguuu

SEQ ID NO: 1389305 - RNA, 19 nt, Homo sapiens
  misc_RNA (1)...(19): siRNA sense strand
guguguggcugcaggaaga

SEQ ID NO: 1389306 - RNA, 19 nt, Homo sapiens
  misc_RNA (1)...(19): siRNA sense strand
ggaaaucgacaccugaaaa

SEQ ID NO: 1389307 - RNA, 19 nt, Homo sapiens
  misc_RNA (1)...(19): siRNA sense strand
gaaccaguaccggcauuau

SEQ ID NO: 1389308 - RNA, 19 nt, Homo sapiens
  misc_RNA (1)...(19): siRNA sense strand
ccaaaugccgaaaggaaau

SEQ ID NO: 1389309 - RNA, 19 nt, Homo sapiens
  misc_RNA (1)...(19): siRNA sense strand
uccaagcucuacuccauug

SEQ ID NO: 1389310 - RNA, 19 nt, Homo sapiens
  misc_RNA (1)...(19): siRNA sense strand
cggcauuauuggagugaaa

SEQ ID NO: 1389311 - RNA, 19 nt, Homo sapiens
  misc_RNA (1)...(19): siRNA sense strand
gcccagucuucucagauga

SEQ ID NO: 1389312 - RNA, 19 nt, Homo sapiens
  misc_RNA (1)...(19): siRNA sense strand
ugccucagcugcuccaaau

SEQ ID NO: 1389313 - RNA, 19 nt, Homo sapiens
  misc_RNA (1)...(19): siRNA sense strand
gcucuacuccauuguuugu

SEQ ID NO: 1389314 - RNA, 19 nt, Homo sapiens
  misc_RNA (1)...(19): siRNA sense strand
agguggagaucucuucuug

SEQ ID NO: 1389315 - RNA, 19 nt, Homo sapiens
  misc_RNA (1)...(19): siRNA sense strand
ucgauuugcuguaccaagu

SEQ ID NO: 1389316 - RNA, 19 nt, Homo sapiens
  misc_RNA (1)...(19): siRNA sense strand
uugaaggaacuacuacuaa

SEQ ID NO: 1389317 - RNA, 19 nt, Homo sapiens
  misc_RNA (1)...(19): siRNA sense strand
gggagaagagagauagugu

SEQ ID NO: 1389318 - RNA, 19 nt, Homo sapiens
  misc_RNA (1)...(19): siRNA sense strand
uuuaauguaucgcuaccaa

SEQ ID NO: 1389319 - RNA, 19 nt, Homo sapiens
  misc_RNA (1)...(19): siRNA sense strand
gacagggagaagagagaua

SEQ ID NO: 1389320 - RNA, 19 nt, Homo sapiens
  misc_RNA (1)...(19): siRNA sense strand
gaaggaacuacuacuaagc

SEQ ID NO: 1389321 - RNA, 19 nt, Homo sapiens
  misc_RNA (1)...(19): siRNA sense strand
caagcucuacuccauuguu

SEQ ID NO: 1389322 - RNA, 19 nt, Homo sapiens
  misc_RNA (1)...(19): siRNA sense strand
aguccaagcucuacuccau

SEQ ID NO: 1389323 - RNA, 19 nt, Homo sapiens
  misc_RNA (1)...(19): siRNA sense strand
gggaaaucgacaccugaaa

SEQ ID NO: 1389324 - RNA, 19 nt, Homo sapiens
  misc_RNA (1)...(19): siRNA sense strand
gcugagcgaccacgagauc

SEQ ID NO: 1389325 - RNA, 19 nt, Homo sapiens
  misc_RNA (1)...(19): siRNA sense strand
auaauucgauuugcuguac

SEQ ID NO: 1389326 - RNA, 19 nt, Homo sapiens
  misc_RNA (1)...(19): siRNA sense strand
ggaaguccaagcucuacuc

SEQ ID NO: 1389327 - RNA, 19 nt, Homo sapiens
  misc_RNA (1)...(19): siRNA sense strand
gcugcaggaagaaccagua

SEQ ID NO: 1389328 - RNA, 19 nt, Homo sapiens
  misc_RNA (1)...(19): siRNA sense strand
ccguugcgcuggaaggaau

SEQ ID NO: 1389329 - RNA, 19 nt, Homo sapiens
  misc_RNA (1)...(19): siRNA sense strand
cuugaaggaacuacuacua

SEQ ID NO: 1389330 - RNA, 19 nt, Homo sapiens
  misc_RNA (1)...(19): siRNA sense strand
ggacagggagaagagagau

SEQ ID NO: 1389331 - RNA, 19 nt, Homo sapiens
  misc_RNA (1)...(19): siRNA sense strand
uauauccacccucaaaaua

SEQ ID NO: 1389332 - RNA, 19 nt, Homo sapiens
  misc_RNA (1)...(19): siRNA sense strand
cgcccagucuucucagaug

SEQ ID NO: 1389333 - RNA, 19 nt, Homo sapiens
  misc_RNA (1)...(19): siRNA sense strand
uccaaaugccgaaaggaaa

SEQ ID NO: 1389334 - RNA, 19 nt, Homo sapiens
  misc_RNA (1)...(19): siRNA sense strand
ucagucccgugcccaguuc

SEQ ID NO: 1389335 - RNA, 19 nt, Homo sapiens
  misc_RNA (1)...(19): siRNA sense strand
ucccuccucuucauugguu

SEQ ID NO: 1389336 - RNA, 19 nt, Homo sapiens
  misc_RNA (1)...(19): siRNA sense strand
accaguaccggcauuauug

SEQ ID NO: 1389337 - RNA, 19 nt, Homo sapiens
  misc_RNA (1)...(19): siRNA sense strand
caaaugccgaaaggaaaug

SEQ ID NO: 1389338 - RNA, 19 nt, Homo sapiens
  misc_RNA (1)...(19): siRNA sense strand
aagaaccaguaccggcauu

SEQ ID NO: 1389339 - RNA, 19 nt, Homo sapiens
  misc_RNA (1)...(19): siRNA sense strand
guaccaagugccacaaagg

SEQ ID NO: 1389340 - RNA, 19 nt, Homo sapiens
  misc_RNA (1)...(19): siRNA sense strand
gaaaaccaccucagacacu

SEQ ID NO: 1389341 - RNA, 19 nt, Homo sapiens
  misc_RNA (1)...(19): siRNA sense strand
ggaauggccuuucuacaaa

SEQ ID NO: 1389342 - RNA, 19 nt, Homo sapiens
  misc_RNA (1)...(19): siRNA sense strand
ggaagaagauuugcuggua

SEQ ID NO: 1389343 - RNA, 19 nt, Homo sapiens
  misc_RNA (1)...(19): siRNA sense strand
gaacagcaguugcauuuua

SEQ ID NO: 1389344 - RNA, 19 nt, Homo sapiens
  misc_RNA (1)...(19): siRNA sense strand
gugaguggguuuaugauua

SEQ ID NO: 1389345 - RNA, 19 nt, Homo sapiens
  misc_RNA (1)...(19): siRNA sense strand
ccacgaagauggcgcaauu

SEQ ID NO: 1389346 - RNA, 19 nt, Homo sapiens
  misc_RNA (1)...(19): siRNA sense strand
ccgaggagcugaggguuua

SEQ ID NO: 1389347 - RNA, 19 nt, Homo sapiens
  misc_RNA (1)...(19): siRNA sense strand
cauagaauuugguuacuug

SEQ ID NO: 1389348 - RNA, 19 nt, Homo sapiens
  misc_RNA (1)...(19): siRNA sense strand
caacuggccucccugagau

SEQ ID NO: 1389349 - RNA, 19 nt, Homo sapiens
  misc_RNA (1)...(19): siRNA sense strand
gaagauggcgcaauuucau

SEQ ID NO: 1389350 - RNA, 19 nt, Homo sapiens
  misc_RNA (1)...(19): siRNA sense strand
ugaguggguuuaugauuau

SEQ ID NO: 1389351 - RNA, 19 nt, Homo sapiens
  misc_RNA (1)...(19): siRNA sense strand
aagaacagcaguugcauuu

SEQ ID NO: 1389352 - RNA, 19 nt, Homo sapiens
  misc_RNA (1)...(19): siRNA sense strand
gaacaguacaucccaaguc

SEQ ID NO: 1389353 - RNA, 19 nt, Homo sapiens
  misc_RNA (1)...(19): siRNA sense strand
cagcagccauugccacgaa

SEQ ID NO: 1389354 - RNA, 19 nt, Homo sapiens
  misc_RNA (1)...(19): siRNA sense strand
ugaaccugcuggagaugua

SEQ ID NO: 1389355 - RNA, 19 nt, Homo sapiens
  misc_RNA (1)...(19): siRNA sense strand
aagcaaggcccacagacua

SEQ ID NO: 1389356 - RNA, 19 nt, Homo sapiens
  misc_RNA (1)...(19): siRNA sense strand
aagaagauuugcugguaga

SEQ ID NO: 1389357 - RNA, 19 nt, Homo sapiens
  misc_RNA (1)...(19): siRNA sense strand
agagaaaacuggaagaaga

SEQ ID NO: 1389358 - RNA, 19 nt, Homo sapiens
  misc_RNA (1)...(19): siRNA sense strand
ccauagaauuugguuacuu

SEQ ID NO: 1389359 - RNA, 19 nt, Homo sapiens
  misc_RNA (1)...(19): siRNA sense strand
uguacagccugaaggauga

SEQ ID NO: 1389360 - RNA, 19 nt, Homo sapiens
  misc_RNA (1)...(19): siRNA sense strand
ccaacuggccucccugaga

SEQ ID NO: 1389361 - RNA, 19 nt, Homo sapiens
  misc_RNA (1)...(19): siRNA sense strand
ccauggagcgguaccuaaa

SEQ ID NO: 1389362 - RNA, 19 nt, Homo sapiens
  misc_RNA (1)...(19): siRNA sense strand
caagaacagcaguugcauu

SEQ ID NO: 1389363 - RNA, 19 nt, Homo sapiens
  misc_RNA (1)...(19): siRNA sense strand
ugauuauacucacgaggaa

SEQ ID NO: 1389364 - RNA, 19 nt, Homo sapiens
  misc_RNA (1)...(19): siRNA sense strand
gcauccauguccaccauag

SEQ ID NO: 1389365 - RNA, 19 nt, Homo sapiens
  misc_RNA (1)...(19): siRNA sense strand
gcucuggcaucccauuucu

SEQ ID NO: 1389366 - RNA, 19 nt, Homo sapiens
  misc_RNA (1)...(19): siRNA sense strand
aagauuugcugguagaagu

SEQ ID NO: 1389367 - RNA, 19 nt, Homo sapiens
  misc_RNA (1)...(19): siRNA sense strand
aggaauggccuuucuacaa

SEQ ID NO: 1389368 - RNA, 19 nt, Homo sapiens
  misc_RNA (1)...(19): siRNA sense strand
agaugaaccugcuggagau

SEQ ID NO: 1389369 - RNA, 19 nt, Homo sapiens
  misc_RNA (1)...(19): siRNA sense strand
guagaagucagucgguaug

SEQ ID NO: 1389370 - RNA, 19 nt, Homo sapiens
  misc_RNA (1)...(19): siRNA sense strand
gaacaucuugcugcucuca

SEQ ID NO: 1389371 - RNA, 19 nt, Homo sapiens
  misc_RNA (1)...(19): siRNA sense strand
gaguggguuuaugauuaua

SEQ ID NO: 1389372 - RNA, 19 nt, Homo sapiens
  misc_RNA (1)...(19): siRNA sense strand
cauguccaccauagaauuu

SEQ ID NO: 1389373 - RNA, 19 nt, Homo sapiens
  misc_RNA (1)...(19): siRNA sense strand
ccacaaugacauccaggaa

SEQ ID NO: 1389374 - RNA, 19 nt, Homo sapiens
  misc_RNA (1)...(19): siRNA sense strand
cgaagauggcgcaauuuca

SEQ ID NO: 1389375 - RNA, 19 nt, Homo sapiens
  misc_RNA (1)...(19): siRNA sense strand
cccaagaggagcagagaaa

SEQ ID NO: 1389376 - RNA, 19 nt, Homo sapiens
  misc_RNA (1)...(19): siRNA sense strand
gguagaagucagucgguau

SEQ ID NO: 1389377 - RNA, 19 nt, Homo sapiens
  misc_RNA (1)...(19): siRNA sense strand
gggcaaccucaggaaguua

SEQ ID NO: 1389378 - RNA, 19 nt, Homo sapiens
  misc_RNA (1)...(19): siRNA sense strand
gcuagaaagcgugauguuc

SEQ ID NO: 1389379 - RNA, 19 nt, Homo sapiens
  misc_RNA (1)...(19): siRNA sense strand
ggagauguacagccugaag

SEQ ID NO: 1389380 - RNA, 19 nt, Homo sapiens
  misc_RNA (1)...(19): siRNA sense strand
gaaaacuggaagaagauuu

SEQ ID NO: 1389381 - RNA, 19 nt, Homo sapiens
  misc_RNA (1)...(19): siRNA sense strand
ccauguccaccauagaauu

SEQ ID NO: 1389382 - RNA, 19 nt, Homo sapiens
  misc_RNA (1)...(19): siRNA sense strand
gaagauuugcugguagaag

SEQ ID NO: 1389383 - RNA, 19 nt, Homo sapiens
  misc_RNA (1)...(19): siRNA sense strand
gcuguacggagccaucuug

SEQ ID NO: 1389384 - RNA, 19 nt, Homo sapiens
  misc_RNA (1)...(19): siRNA sense strand
ucgaguacagcaguuauaa

SEQ ID NO: 1389385 - RNA, 19 nt, Homo sapiens
  misc_RNA (1)...(19): siRNA sense strand
gaccauggagcgguaccua

SEQ ID NO: 1389386 - RNA, 19 nt, Homo sapiens
  misc_RNA (1)...(19): siRNA sense strand
ggguuuaugauuauacuca

SEQ ID NO: 1389387 - RNA, 19 nt, Homo sapiens
  misc_RNA (1)...(19): siRNA sense strand
uauaggggcuuugacauug

SEQ ID NO: 1389388 - RNA, 19 nt, Homo sapiens
  misc_RNA (1)...(19): siRNA sense strand
gagcuucgagagccagugu

SEQ ID NO: 1389389 - RNA, 19 nt, Homo sapiens
  misc_RNA (1)...(19): siRNA sense strand
gcuugcagcagucuaagug

SEQ ID NO: 1389390 - RNA, 19 nt, Homo sapiens
  misc_RNA (1)...(19): siRNA sense strand
gaggaauggccuuucuaca

SEQ ID NO: 1389391 - RNA, 19 nt, Homo sapiens
  misc_RNA (1)...(19): siRNA sense strand
acaucuugcugcucucaga

SEQ ID NO: 1389392 - RNA, 19 nt, Homo sapiens
  misc_RNA (1)...(19): siRNA sense strand
ccaagucggccauugaaaa

SEQ ID NO: 1389393 - RNA, 19 nt, Homo sapiens
  misc_RNA (1)...(19): siRNA sense strand
caucccaagucggccauug

SEQ ID NO: 1389394 - RNA, 19 nt, Homo sapiens
  misc_RNA (1)...(19): siRNA sense strand
ugggcaaccucaggaaguu

SEQ ID NO: 1389395 - RNA, 19 nt, Homo sapiens
  misc_RNA (1)...(19): siRNA sense strand
ggaacaguacaucccaagu

SEQ ID NO: 1389396 - RNA, 19 nt, Homo sapiens
  misc_RNA (1)...(19): siRNA sense strand
acaaagcaaggcccacaga

SEQ ID NO: 1389397 - RNA, 19 nt, Homo sapiens
  misc_RNA (1)...(19): siRNA sense strand
gugauguucgccauacuug

SEQ ID NO: 1389398 - RNA, 19 nt, Homo sapiens
  misc_RNA (1)...(19): siRNA sense strand
cucaggaaguuacuagagu

SEQ ID NO: 1389399 - RNA, 19 nt, Homo sapiens
  misc_RNA (1)...(19): siRNA sense strand
uggacucccuggugcuaga

SEQ ID NO: 1389400 - RNA, 19 nt, Homo sapiens
  misc_RNA (1)...(19): siRNA sense strand
cacgaggaauggccuuucu

SEQ ID NO: 1389401 - RNA, 19 nt, Homo sapiens
  misc_RNA (1)...(19): siRNA sense strand
ccgaggagcugaggguuua

SEQ ID NO: 1389402 - RNA, 19 nt, Homo sapiens
  misc_RNA (1)...(19): siRNA sense strand
gcuugcagcagucuaagug

SEQ ID NO: 1389403 - RNA, 19 nt, Homo sapiens
  misc_RNA (1)...(19): siRNA sense strand
ggaauggccuuucuacaaa

SEQ ID NO: 1389404 - RNA, 19 nt, Homo sapiens
  misc_RNA (1)...(19): siRNA sense strand
ggaagaagauuugcuggua

SEQ ID NO: 1389405 - RNA, 19 nt, Homo sapiens
  misc_RNA (1)...(19): siRNA sense strand
gaacagcaguugcauuuua

SEQ ID NO: 1389406 - RNA, 19 nt, Homo sapiens
  misc_RNA (1)...(19): siRNA sense strand
gugaguggguuuaugauua

SEQ ID NO: 1389407 - RNA, 19 nt, Homo sapiens
  misc_RNA (1)...(19): siRNA sense strand
ccacgaagauggcgcaauu

SEQ ID NO: 1389408 - RNA, 19 nt, Homo sapiens
  misc_RNA (1)...(19): siRNA sense strand
ccgaggagcugaggguuua

SEQ ID NO: 1389409 - RNA, 19 nt, Homo sapiens
  misc_RNA (1)...(19): siRNA sense strand
cauagaauuugguuacuug

SEQ ID NO: 1389410 - RNA, 19 nt, Homo sapiens
  misc_RNA (1)...(19): siRNA sense strand
caacuggccucccugagau

SEQ ID NO: 1389411 - RNA, 19 nt, Homo sapiens
  misc_RNA (1)...(19): siRNA sense strand
gaagauggcgcaauuucau

SEQ ID NO: 1389412 - RNA, 19 nt, Homo sapiens
  misc_RNA (1)...(19): siRNA sense strand
ugaguggguuuaugauuau

SEQ ID NO: 1389413 - RNA, 19 nt, Homo sapiens
  misc_RNA (1)...(19): siRNA sense strand
aagaacagcaguugcauuu

SEQ ID NO: 1389414 - RNA, 19 nt, Homo sapiens
  misc_RNA (1)...(19): siRNA sense strand
gaacaguacaucccaaguc

SEQ ID NO: 1389415 - RNA, 19 nt, Homo sapiens
  misc_RNA (1)...(19): siRNA sense strand
cagcagccauugccacgaa

SEQ ID NO: 1389416 - RNA, 19 nt, Homo sapiens
  misc_RNA (1)...(19): siRNA sense strand
ugaaccugcuggagaugua

SEQ ID NO: 1389417 - RNA, 19 nt, Homo sapiens
  misc_RNA (1)...(19): siRNA sense strand
aagcaaggcccacagacua

SEQ ID NO: 1389418 - RNA, 19 nt, Homo sapiens
  misc_RNA (1)...(19): siRNA sense strand
aagaagauuugcugguaga

SEQ ID NO: 1389419 - RNA, 19 nt, Homo sapiens
  misc_RNA (1)...(19): siRNA sense strand
agagaaaacuggaagaaga

SEQ ID NO: 1389420 - RNA, 19 nt, Homo sapiens
  misc_RNA (1)...(19): siRNA sense strand
ccauagaauuugguuacuu

SEQ ID NO: 1389421 - RNA, 19 nt, Homo sapiens
  misc_RNA (1)...(19): siRNA sense strand
uguacagccugaaggauga

SEQ ID NO: 1389422 - RNA, 19 nt, Homo sapiens
  misc_RNA (1)...(19): siRNA sense strand
ccaacuggccucccugaga

SEQ ID NO: 1389423 - RNA, 19 nt, Homo sapiens
  misc_RNA (1)...(19): siRNA sense strand
ccauggagcgguaccuaaa

SEQ ID NO: 1389424 - RNA, 19 nt, Homo sapiens
  misc_RNA (1)...(19): siRNA sense strand
caagaacagcaguugcauu

SEQ ID NO: 1389425 - RNA, 19 nt, Homo sapiens
  misc_RNA (1)...(19): siRNA sense strand
ugauuauacucacgaggaa

SEQ ID NO: 1389426 - RNA, 19 nt, Homo sapiens
  misc_RNA (1)...(19): siRNA sense strand
gcauccauguccaccauag

SEQ ID NO: 1389427 - RNA, 19 nt, Homo sapiens
  misc_RNA (1)...(19): siRNA sense strand
gcucuggcaucccauuucu

SEQ ID NO: 1389428 - RNA, 19 nt, Homo sapiens
  misc_RNA (1)...(19): siRNA sense strand
aagauuugcugguagaagu

SEQ ID NO: 1389429 - RNA, 19 nt, Homo sapiens
  misc_RNA (1)...(19): siRNA sense strand
aggaauggccuuucuacaa

SEQ ID NO: 1389430 - RNA, 19 nt, Homo sapiens
  misc_RNA (1)...(19): siRNA sense strand
agaugaaccugcuggagau

SEQ ID NO: 1389431 - RNA, 19 nt, Homo sapiens
  misc_RNA (1)...(19): siRNA sense strand
guagaagucagucgguaug

SEQ ID NO: 1389432 - RNA, 19 nt, Homo sapiens
  misc_RNA (1)...(19): siRNA sense strand
gaacaucuugcugcucuca

SEQ ID NO: 1389433 - RNA, 19 nt, Homo sapiens
  misc_RNA (1)...(19): siRNA sense strand
gaguggguuuaugauuaua

SEQ ID NO: 1389434 - RNA, 19 nt, Homo sapiens
  misc_RNA (1)...(19): siRNA sense strand
cauguccaccauagaauuu

SEQ ID NO: 1389435 - RNA, 19 nt, Homo sapiens
  misc_RNA (1)...(19): siRNA sense strand
ccacaaugacauccaggaa

SEQ ID NO: 1389436 - RNA, 19 nt, Homo sapiens
  misc_RNA (1)...(19): siRNA sense strand
cgaagauggcgcaauuuca

SEQ ID NO: 1389437 - RNA, 19 nt, Homo sapiens
  misc_RNA (1)...(19): siRNA sense strand
cccaagaggagcagagaaa

SEQ ID NO: 1389438 - RNA, 19 nt, Homo sapiens
  misc_RNA (1)...(19): siRNA sense strand
gguagaagucagucgguau

SEQ ID NO: 1389439 - RNA, 19 nt, Homo sapiens
  misc_RNA (1)...(19): siRNA sense strand
gggcaaccucaggaaguua

SEQ ID NO: 1389440 - RNA, 19 nt, Homo sapiens
  misc_RNA (1)...(19): siRNA sense strand
gcuagaaagcgugauguuc

SEQ ID NO: 1389441 - RNA, 19 nt, Homo sapiens
  misc_RNA (1)...(19): siRNA sense strand
ggagauguacagccugaag

SEQ ID NO: 1389442 - RNA, 19 nt, Homo sapiens
  misc_RNA (1)...(19): siRNA sense strand
gaaaacuggaagaagauuu

SEQ ID NO: 1389443 - RNA, 19 nt, Homo sapiens
  misc_RNA (1)...(19): siRNA sense strand
ccauguccaccauagaauu

SEQ ID NO: 1389444 - RNA, 19 nt, Homo sapiens
  misc_RNA (1)...(19): siRNA sense strand
gaagauuugcugguagaag

SEQ ID NO: 1389445 - RNA, 19 nt, Homo sapiens
  misc_RNA (1)...(19): siRNA sense strand
gcuguacggagccaucuug

SEQ ID NO: 1389446 - RNA, 19 nt, Homo sapiens
  misc_RNA (1)...(19): siRNA sense strand
ucgaguacagcaguuauaa

SEQ ID NO: 1389447 - RNA, 19 nt, Homo sapiens
  misc_RNA (1)...(19): siRNA sense strand
gaccauggagcgguaccua

SEQ ID NO: 1389448 - RNA, 19 nt, Homo sapiens
  misc_RNA (1)...(19): siRNA sense strand
ggguuuaugauuauacuca

SEQ ID NO: 1389449 - RNA, 19 nt, Homo sapiens
  misc_RNA (1)...(19): siRNA sense strand
uauaggggcuuugacauug

SEQ ID NO: 1389450 - RNA, 19 nt, Homo sapiens
  misc_RNA (1)...(19): siRNA sense strand
gagcuucgagagccagugu

SEQ ID NO: 1389451 - RNA, 19 nt, Homo sapiens
  misc_RNA (1)...(19): siRNA sense strand
gcuugcagcagucuaagug

SEQ ID NO: 1389452 - RNA, 19 nt, Homo sapiens
  misc_RNA (1)...(19): siRNA sense strand
gaggaauggccuuucuaca

SEQ ID NO: 1389453 - RNA, 19 nt, Homo sapiens
  misc_RNA (1)...(19): siRNA sense strand
acaucuugcugcucucaga

SEQ ID NO: 1389454 - RNA, 19 nt, Homo sapiens
  misc_RNA (1)...(19): siRNA sense strand
ccaagucggccauugaaaa

SEQ ID NO: 1389455 - RNA, 19 nt, Homo sapiens
  misc_RNA (1)...(19): siRNA sense strand
caucccaagucggccauug

SEQ ID NO: 1389456 - RNA, 19 nt, Homo sapiens
  misc_RNA (1)...(19): siRNA sense strand
ugggcaaccucaggaaguu

SEQ ID NO: 1389457 - RNA, 19 nt, Homo sapiens
  misc_RNA (1)...(19): siRNA sense strand
ggaacaguacaucccaagu

SEQ ID NO: 1389458 - RNA, 19 nt, Homo sapiens
  misc_RNA (1)...(19): siRNA sense strand
acaaagcaaggcccacaga

SEQ ID NO: 1389459 - RNA, 19 nt, Homo sapiens
  misc_RNA (1)...(19): siRNA sense strand
gugauguucgccauacuug

SEQ ID NO: 1389460 - RNA, 19 nt, Homo sapiens
  misc_RNA (1)...(19): siRNA sense strand
cucaggaaguuacuagagu

SEQ ID NO: 1389461 - RNA, 19 nt, Homo sapiens
  misc_RNA (1)...(19): siRNA sense strand
uggacucccuggugcuaga

SEQ ID NO: 1389462 - RNA, 19 nt, Homo sapiens
  misc_RNA (1)...(19): siRNA sense strand
cacgaggaauggccuuucu

SEQ ID NO: 1389463 - RNA, 19 nt, Homo sapiens
  misc_RNA (1)...(19): siRNA sense strand
ccgaggagcugaggguuua

SEQ ID NO: 1389464 - RNA, 19 nt, Homo sapiens
  misc_RNA (1)...(19): siRNA sense strand
gcuugcagcagucuaagug

SEQ ID NO: 1389465 - RNA, 19 nt, Homo sapiens
  misc_RNA (1)...(19): siRNA sense strand
caacgagugucuccucauc

SEQ ID NO: 1389466 - RNA, 19 nt, Homo sapiens
  misc_RNA (1)...(19): siRNA sense strand
caucaugccugcugugaag

SEQ ID NO: 1389467 - RNA, 19 nt, Homo sapiens
  misc_RNA (1)...(19): siRNA sense strand
gcacagacgcucagcaucu

SEQ ID NO: 1389468 - RNA, 19 nt, Homo sapiens
  misc_RNA (1)...(19): siRNA sense strand
cagggucgcuuccgcuuug

SEQ ID NO: 1389469 - RNA, 19 nt, Homo sapiens
  misc_RNA (1)...(19): siRNA sense strand
caucaggauucucaaguuc

SEQ ID NO: 1389470 - RNA, 19 nt, Homo sapiens
  misc_RNA (1)...(19): siRNA sense strand
ggaaguagcagaggagaag

SEQ ID NO: 1389471 - RNA, 19 nt, Homo sapiens
  misc_RNA (1)...(19): siRNA sense strand
aaacucggguggaccaaau

SEQ ID NO: 1389472 - RNA, 19 nt, Homo sapiens
  misc_RNA (1)...(19): siRNA sense strand
ccaucaggauucucaaguu

SEQ ID NO: 1389473 - RNA, 19 nt, Homo sapiens
  misc_RNA (1)...(19): siRNA sense strand
ggagaagagcuaccagugu

SEQ ID NO: 1389474 - RNA, 19 nt, Homo sapiens
  misc_RNA (1)...(19): siRNA sense strand
acgcggaggugguggauga

SEQ ID NO: 1389475 - RNA, 19 nt, Homo sapiens
  misc_RNA (1)...(19): siRNA sense strand
ugucugugcuguccacuau

SEQ ID NO: 1389476 - RNA, 19 nt, Homo sapiens
  misc_RNA (1)...(19): siRNA sense strand
cuaccacgucuucauauuu

SEQ ID NO: 1389477 - RNA, 19 nt, Homo sapiens
  misc_RNA (1)...(19): siRNA sense strand
cgacaucaccuccgacuac

SEQ ID NO: 1389478 - RNA, 19 nt, Homo sapiens
  misc_RNA (1)...(19): siRNA sense strand
cauccuaggcuccggcuuu

SEQ ID NO: 1389479 - RNA, 19 nt, Homo sapiens
  misc_RNA (1)...(19): siRNA sense strand
ggaagcugcugggcucagu

SEQ ID NO: 1389480 - RNA, 19 nt, Homo sapiens
  misc_RNA (1)...(19): siRNA sense strand
ucaguggucuacgcgcaua

SEQ ID NO: 1389481 - RNA, 19 nt, Homo sapiens
  misc_RNA (1)...(19): siRNA sense strand
cgucuaccacgucuucaua

SEQ ID NO: 1389482 - RNA, 19 nt, Homo sapiens
  misc_RNA (1)...(19): siRNA sense strand
ggacgucauugagcaguac

SEQ ID NO: 1389483 - RNA, 19 nt, Homo sapiens
  misc_RNA (1)...(19): siRNA sense strand
ggaacuugccaacgagugu

SEQ ID NO: 1389484 - RNA, 19 nt, Homo sapiens
  misc_RNA (1)...(19): siRNA sense strand
gaucaccgccugguacauc

SEQ ID NO: 1389485 - RNA, 19 nt, Homo sapiens
  misc_RNA (1)...(19): siRNA sense strand
caucggcuauggugacaag

SEQ ID NO: 1389486 - RNA, 19 nt, Homo sapiens
  misc_RNA (1)...(19): siRNA sense strand
ggacgccaacuccgacuuc

SEQ ID NO: 1389487 - RNA, 19 nt, Homo sapiens
  misc_RNA (1)...(19): siRNA sense strand
acaagacaccgcacacaug

SEQ ID NO: 1389488 - RNA, 19 nt, Homo sapiens
  misc_RNA (1)...(19): siRNA sense strand
agaagcaggugcaguccau

SEQ ID NO: 1389489 - RNA, 19 nt, Homo sapiens
  misc_RNA (1)...(19): siRNA sense strand
ggaggugguggaugaaauc

SEQ ID NO: 1389490 - RNA, 19 nt, Homo sapiens
  misc_RNA (1)...(19): siRNA sense strand
ccaccugguacuacuauga

SEQ ID NO: 1389491 - RNA, 19 nt, Homo sapiens
  misc_RNA (1)...(19): siRNA sense strand
cgccuguacuccaccgaua

SEQ ID NO: 1389492 - RNA, 19 nt, Homo sapiens
  misc_RNA (1)...(19): siRNA sense strand
ucuaccacgucuucauauu

SEQ ID NO: 1389493 - RNA, 19 nt, Homo sapiens
  misc_RNA (1)...(19): siRNA sense strand
ugacagccaccugguacua

SEQ ID NO: 1389494 - RNA, 19 nt, Homo sapiens
  misc_RNA (1)...(19): siRNA sense strand
ucuggcaccuccaacaaug

SEQ ID NO: 1389495 - RNA, 19 nt, Homo sapiens
  misc_RNA (1)...(19): siRNA sense strand
gcagggucgcuuccgcuuu

SEQ ID NO: 1389496 - RNA, 19 nt, Homo sapiens
  misc_RNA (1)...(19): siRNA sense strand
cugggcaucucuuucuuug

SEQ ID NO: 1389497 - RNA, 19 nt, Homo sapiens
  misc_RNA (1)...(19): siRNA sense strand
gacaagacaccgcacacau

SEQ ID NO: 1389498 - RNA, 19 nt, Homo sapiens
  misc_RNA (1)...(19): siRNA sense strand
uaccacgucuucauauuuu

SEQ ID NO: 1389499 - RNA, 19 nt, Homo sapiens
  misc_RNA (1)...(19): siRNA sense strand
acgagugucuccucaucuu

SEQ ID NO: 1389500 - RNA, 19 nt, Homo sapiens
  misc_RNA (1)...(19): siRNA sense strand
cggaggugguggaugaaau

SEQ ID NO: 1389501 - RNA, 19 nt, Homo sapiens
  misc_RNA (1)...(19): siRNA sense strand
gaccguacgacgugaagga

SEQ ID NO: 1389502 - RNA, 19 nt, Homo sapiens
  misc_RNA (1)...(19): siRNA sense strand
accaggaacuugccaacga

SEQ ID NO: 1389503 - RNA, 19 nt, Homo sapiens
  misc_RNA (1)...(19): siRNA sense strand
acaguauccucccauccuu

SEQ ID NO: 1389504 - RNA, 19 nt, Homo sapiens
  misc_RNA (1)...(19): siRNA sense strand
acgauuacauugacaacca

SEQ ID NO: 1389505 - RNA, 19 nt, Homo sapiens
  misc_RNA (1)...(19): siRNA sense strand
agaacugggucuacaacgu

SEQ ID NO: 1389506 - RNA, 19 nt, Homo sapiens
  misc_RNA (1)...(19): siRNA sense strand
guggaugaaaucagcauga

SEQ ID NO: 1389507 - RNA, 19 nt, Homo sapiens
  misc_RNA (1)...(19): siRNA sense strand
cggcuauggugacaagaca

SEQ ID NO: 1389508 - RNA, 19 nt, Homo sapiens
  misc_RNA (1)...(19): siRNA sense strand
gcagaacugggucuacaac

SEQ ID NO: 1389509 - RNA, 19 nt, Homo sapiens
  misc_RNA (1)...(19): siRNA sense strand
cugcagaacugggucuaca

SEQ ID NO: 1389510 - RNA, 19 nt, Homo sapiens
  misc_RNA (1)...(19): siRNA sense strand
caucuggcaccuccaacaa

SEQ ID NO: 1389511 - RNA, 19 nt, Homo sapiens
  misc_RNA (1)...(19): siRNA sense strand
gacaucaugccugcuguga

SEQ ID NO: 1389512 - RNA, 19 nt, Homo sapiens
  misc_RNA (1)...(19): siRNA sense strand
caagcuggaccugcuguug

SEQ ID NO: 1389513 - RNA, 19 nt, Homo sapiens
  misc_RNA (1)...(19): siRNA sense strand
gaucaagagccugcaaacu

SEQ ID NO: 1389514 - RNA, 19 nt, Homo sapiens
  misc_RNA (1)...(19): siRNA sense strand
ggaaauucaaggagacacu

SEQ ID NO: 1389515 - RNA, 19 nt, Homo sapiens
  misc_RNA (1)...(19): siRNA sense strand
acagucauccgcuccauca

SEQ ID NO: 1389516 - RNA, 19 nt, Homo sapiens
  misc_RNA (1)...(19): siRNA sense strand
gaaagcccuucugugucau

SEQ ID NO: 1389517 - RNA, 19 nt, Homo sapiens
  misc_RNA (1)...(19): siRNA sense strand
uggucuaccuggcugagaa

SEQ ID NO: 1389518 - RNA, 19 nt, Homo sapiens
  misc_RNA (1)...(19): siRNA sense strand
guacccagggcaacaucuu

SEQ ID NO: 1389519 - RNA, 19 nt, Homo sapiens
  misc_RNA (1)...(19): siRNA sense strand
gaaguagcagaggagaaga

SEQ ID NO: 1389520 - RNA, 19 nt, Homo sapiens
  misc_RNA (1)...(19): siRNA sense strand
gcaucuggcaccuccaaca

SEQ ID NO: 1389521 - RNA, 19 nt, Homo sapiens
  misc_RNA (1)...(19): siRNA sense strand
uuacugggcaucucuuucu

SEQ ID NO: 1389522 - RNA, 19 nt, Homo sapiens
  misc_RNA (1)...(19): siRNA sense strand
caaacucggguggaccaaa

SEQ ID NO: 1389523 - RNA, 19 nt, Homo sapiens
  misc_RNA (1)...(19): siRNA sense strand
caacgagugucuccucauc

SEQ ID NO: 1389524 - RNA, 19 nt, Homo sapiens
  misc_RNA (1)...(19): siRNA sense strand
caucaugccugcugugaag

SEQ ID NO: 1389525 - RNA, 19 nt, Homo sapiens
  misc_RNA (1)...(19): siRNA sense strand
gcacagacgcucagcaucu

SEQ ID NO: 1389526 - RNA, 19 nt, Homo sapiens
  misc_RNA (1)...(19): siRNA sense strand
cagggucgcuuccgcuuug

SEQ ID NO: 1389527 - RNA, 19 nt, Homo sapiens
  misc_RNA (1)...(19): siRNA sense strand
caucaggauucucaaguuc

SEQ ID NO: 1389528 - RNA, 19 nt, Homo sapiens
  misc_RNA (1)...(19): siRNA sense strand
ggaaguagcagaggagaag

SEQ ID NO: 1389529 - RNA, 19 nt, Homo sapiens
  misc_RNA (1)...(19): siRNA sense strand
aaacucggguggaccaaau

SEQ ID NO: 1389530 - RNA, 19 nt, Homo sapiens
  misc_RNA (1)...(19): siRNA sense strand
ccaucaggauucucaaguu

SEQ ID NO: 1389531 - RNA, 19 nt, Homo sapiens
  misc_RNA (1)...(19): siRNA sense strand
ggagaagagcuaccagugu

SEQ ID NO: 1389532 - RNA, 19 nt, Homo sapiens
  misc_RNA (1)...(19): siRNA sense strand
acgcggaggugguggauga

SEQ ID NO: 1389533 - RNA, 19 nt, Homo sapiens
  misc_RNA (1)...(19): siRNA sense strand
ugucugugcuguccacuau

SEQ ID NO: 1389534 - RNA, 19 nt, Homo sapiens
  misc_RNA (1)...(19): siRNA sense strand
cuaccacgucuucauauuu

SEQ ID NO: 1389535 - RNA, 19 nt, Homo sapiens
  misc_RNA (1)...(19): siRNA sense strand
cgacaucaccuccgacuac

SEQ ID NO: 1389536 - RNA, 19 nt, Homo sapiens
  misc_RNA (1)...(19): siRNA sense strand
cauccuaggcuccggcuuu

SEQ ID NO: 1389537 - RNA, 19 nt, Homo sapiens
  misc_RNA (1)...(19): siRNA sense strand
ggaagcugcugggcucagu

SEQ ID NO: 1389538 - RNA, 19 nt, Homo sapiens
  misc_RNA (1)...(19): siRNA sense strand
ucaguggucuacgcgcaua

SEQ ID NO: 1389539 - RNA, 19 nt, Homo sapiens
  misc_RNA (1)...(19): siRNA sense strand
cgucuaccacgucuucaua

SEQ ID NO: 1389540 - RNA, 19 nt, Homo sapiens
  misc_RNA (1)...(19): siRNA sense strand
ggacgucauugagcaguac

SEQ ID NO: 1389541 - RNA, 19 nt, Homo sapiens
  misc_RNA (1)...(19): siRNA sense strand
ggaacuugccaacgagugu

SEQ ID NO: 1389542 - RNA, 19 nt, Homo sapiens
  misc_RNA (1)...(19): siRNA sense strand
gaucaccgccugguacauc

SEQ ID NO: 1389543 - RNA, 19 nt, Homo sapiens
  misc_RNA (1)...(19): siRNA sense strand
caucggcuauggugacaag

SEQ ID NO: 1389544 - RNA, 19 nt, Homo sapiens
  misc_RNA (1)...(19): siRNA sense strand
ggacgccaacuccgacuuc

SEQ ID NO: 1389545 - RNA, 19 nt, Homo sapiens
  misc_RNA (1)...(19): siRNA sense strand
acaagacaccgcacacaug

SEQ ID NO: 1389546 - RNA, 19 nt, Homo sapiens
  misc_RNA (1)...(19): siRNA sense strand
agaagcaggugcaguccau

SEQ ID NO: 1389547 - RNA, 19 nt, Homo sapiens
  misc_RNA (1)...(19): siRNA sense strand
ggaggugguggaugaaauc

SEQ ID NO: 1389548 - RNA, 19 nt, Homo sapiens
  misc_RNA (1)...(19): siRNA sense strand
ccaccugguacuacuauga

SEQ ID NO: 1389549 - RNA, 19 nt, Homo sapiens
  misc_RNA (1)...(19): siRNA sense strand
cgccuguacuccaccgaua

SEQ ID NO: 1389550 - RNA, 19 nt, Homo sapiens
  misc_RNA (1)...(19): siRNA sense strand
ucuaccacgucuucauauu

SEQ ID NO: 1389551 - RNA, 19 nt, Homo sapiens
  misc_RNA (1)...(19): siRNA sense strand
ugacagccaccugguacua

SEQ ID NO: 1389552 - RNA, 19 nt, Homo sapiens
  misc_RNA (1)...(19): siRNA sense strand
ucuggcaccuccaacaaug

SEQ ID NO: 1389553 - RNA, 19 nt, Homo sapiens
  misc_RNA (1)...(19): siRNA sense strand
gcagggucgcuuccgcuuu

SEQ ID NO: 1389554 - RNA, 19 nt, Homo sapiens
  misc_RNA (1)...(19): siRNA sense strand
cugggcaucucuuucuuug

SEQ ID NO: 1389555 - RNA, 19 nt, Homo sapiens
  misc_RNA (1)...(19): siRNA sense strand
gacaagacaccgcacacau

SEQ ID NO: 1389556 - RNA, 19 nt, Homo sapiens
  misc_RNA (1)...(19): siRNA sense strand
uaccacgucuucauauuuu

SEQ ID NO: 1389557 - RNA, 19 nt, Homo sapiens
  misc_RNA (1)...(19): siRNA sense strand
acgagugucuccucaucuu

SEQ ID NO: 1389558 - RNA, 19 nt, Homo sapiens
  misc_RNA (1)...(19): siRNA sense strand
cggaggugguggaugaaau

SEQ ID NO: 1389559 - RNA, 19 nt, Homo sapiens
  misc_RNA (1)...(19): siRNA sense strand
gaccguacgacgugaagga

SEQ ID NO: 1389560 - RNA, 19 nt, Homo sapiens
  misc_RNA (1)...(19): siRNA sense strand
accaggaacuugccaacga

SEQ ID NO: 1389561 - RNA, 19 nt, Homo sapiens
  misc_RNA (1)...(19): siRNA sense strand
acaguauccucccauccuu

SEQ ID NO: 1389562 - RNA, 19 nt, Homo sapiens
  misc_RNA (1)...(19): siRNA sense strand
acgauuacauugacaacca

SEQ ID NO: 1389563 - RNA, 19 nt, Homo sapiens
  misc_RNA (1)...(19): siRNA sense strand
agaacugggucuacaacgu

SEQ ID NO: 1389564 - RNA, 19 nt, Homo sapiens
  misc_RNA (1)...(19): siRNA sense strand
guggaugaaaucagcauga

SEQ ID NO: 1389565 - RNA, 19 nt, Homo sapiens
  misc_RNA (1)...(19): siRNA sense strand
cggcuauggugacaagaca

SEQ ID NO: 1389566 - RNA, 19 nt, Homo sapiens
  misc_RNA (1)...(19): siRNA sense strand
gcagaacugggucuacaac

SEQ ID NO: 1389567 - RNA, 19 nt, Homo sapiens
  misc_RNA (1)...(19): siRNA sense strand
cugcagaacugggucuaca

SEQ ID NO: 1389568 - RNA, 19 nt, Homo sapiens
  misc_RNA (1)...(19): siRNA sense strand
caucuggcaccuccaacaa

SEQ ID NO: 1389569 - RNA, 19 nt, Homo sapiens
  misc_RNA (1)...(19): siRNA sense strand
gacaucaugccugcuguga

SEQ ID NO: 1389570 - RNA, 19 nt, Homo sapiens
  misc_RNA (1)...(19): siRNA sense strand
caagcuggaccugcuguug

SEQ ID NO: 1389571 - RNA, 19 nt, Homo sapiens
  misc_RNA (1)...(19): siRNA sense strand
gaucaagagccugcaaacu

SEQ ID NO: 1389572 - RNA, 19 nt, Homo sapiens
  misc_RNA (1)...(19): siRNA sense strand
ggaaauucaaggagacacu

SEQ ID NO: 1389573 - RNA, 19 nt, Homo sapiens
  misc_RNA (1)...(19): siRNA sense strand
acagucauccgcuccauca

SEQ ID NO: 1389574 - RNA, 19 nt, Homo sapiens
  misc_RNA (1)...(19): siRNA sense strand
gaaagcccuucugugucau

SEQ ID NO: 1389575 - RNA, 19 nt, Homo sapiens
  misc_RNA (1)...(19): siRNA sense strand
uggucuaccuggcugagaa

SEQ ID NO: 1389576 - RNA, 19 nt, Homo sapiens
  misc_RNA (1)...(19): siRNA sense strand
guacccagggcaacaucuu

SEQ ID NO: 1389577 - RNA, 19 nt, Homo sapiens
  misc_RNA (1)...(19): siRNA sense strand
gaaguagcagaggagaaga

SEQ ID NO: 1389578 - RNA, 19 nt, Homo sapiens
  misc_RNA (1)...(19): siRNA sense strand
gcaucuggcaccuccaaca

SEQ ID NO: 1389579 - RNA, 19 nt, Homo sapiens
  misc_RNA (1)...(19): siRNA sense strand
uuacugggcaucucuuucu

SEQ ID NO: 1389580 - RNA, 19 nt, Homo sapiens
  misc_RNA (1)...(19): siRNA sense strand
caaacucggguggaccaaa

SEQ ID NO: 1389581 - RNA, 19 nt, Homo sapiens
  misc_RNA (1)...(19): siRNA sense strand
gcuauuaacuggagacuuu

SEQ ID NO: 1389582 - RNA, 19 nt, Homo sapiens
  misc_RNA (1)...(19): siRNA sense strand
caaguuaggagguuuguuu

SEQ ID NO: 1389583 - RNA, 19 nt, Homo sapiens
  misc_RNA (1)...(19): siRNA sense strand
ugaagaagaugaacaggau

SEQ ID NO: 1389584 - RNA, 19 nt, Homo sapiens
  misc_RNA (1)...(19): siRNA sense strand
gagccaagguguucuucuu

SEQ ID NO: 1389585 - RNA, 19 nt, Homo sapiens
  misc_RNA (1)...(19): siRNA sense strand
ggaauaagggccaucaugu

SEQ ID NO: 1389586 - RNA, 19 nt, Homo sapiens
  misc_RNA (1)...(19): siRNA sense strand
agagaagccuguauucaga

SEQ ID NO: 1389587 - RNA, 19 nt, Homo sapiens
  misc_RNA (1)...(19): siRNA sense strand
gcgcaagauuuggaagaua

SEQ ID NO: 1389588 - RNA, 19 nt, Homo sapiens
  misc_RNA (1)...(19): siRNA sense strand
gcacuacacauucaaguuc

SEQ ID NO: 1389589 - RNA, 19 nt, Homo sapiens
  misc_RNA (1)...(19): siRNA sense strand
acaggaagcuagacaggaa

SEQ ID NO: 1389590 - RNA, 19 nt, Homo sapiens
  misc_RNA (1)...(19): siRNA sense strand
agaccaggauguuuggaua

SEQ ID NO: 1389591 - RNA, 19 nt, Homo sapiens
  misc_RNA (1)...(19): siRNA sense strand
gaagaugaacaggauauau

SEQ ID NO: 1389592 - RNA, 19 nt, Homo sapiens
  misc_RNA (1)...(19): siRNA sense strand
caacauggaagccaaguuc

SEQ ID NO: 1389593 - RNA, 19 nt, Homo sapiens
  misc_RNA (1)...(19): siRNA sense strand
caaaauaccuggcccaagu

SEQ ID NO: 1389594 - RNA, 19 nt, Homo sapiens
  misc_RNA (1)...(19): siRNA sense strand
gaauaagggccaucaugug

SEQ ID NO: 1389595 - RNA, 19 nt, Homo sapiens
  misc_RNA (1)...(19): siRNA sense strand
gaagaagaugaacaggaua

SEQ ID NO: 1389596 - RNA, 19 nt, Homo sapiens
  misc_RNA (1)...(19): siRNA sense strand
gaccgaacaucccugaaca

SEQ ID NO: 1389597 - RNA, 19 nt, Homo sapiens
  misc_RNA (1)...(19): siRNA sense strand
aaacuuggagcucgcauaa

SEQ ID NO: 1389598 - RNA, 19 nt, Homo sapiens
  misc_RNA (1)...(19): siRNA sense strand
gagagaagccuguauucag

SEQ ID NO: 1389599 - RNA, 19 nt, Homo sapiens
  misc_RNA (1)...(19): siRNA sense strand
cgcaagauuuggaagauau

SEQ ID NO: 1389600 - RNA, 19 nt, Homo sapiens
  misc_RNA (1)...(19): siRNA sense strand
ugagcugggugacuauuug

SEQ ID NO: 1389601 - RNA, 19 nt, Homo sapiens
  misc_RNA (1)...(19): siRNA sense strand
gcaaugcggacagagagua

SEQ ID NO: 1389602 - RNA, 19 nt, Homo sapiens
  misc_RNA (1)...(19): siRNA sense strand
caucaugugugggucacua

SEQ ID NO: 1389603 - RNA, 19 nt, Homo sapiens
  misc_RNA (1)...(19): siRNA sense strand
gccaagguguucuucuuca

SEQ ID NO: 1389604 - RNA, 19 nt, Homo sapiens
  misc_RNA (1)...(19): siRNA sense strand
uaacagaagcugaugaaaa

SEQ ID NO: 1389605 - RNA, 19 nt, Homo sapiens
  misc_RNA (1)...(19): siRNA sense strand
aggaugagcugggugacua

SEQ ID NO: 1389606 - RNA, 19 nt, Homo sapiens
  misc_RNA (1)...(19): siRNA sense strand
cauaacagaagcugaugaa

SEQ ID NO: 1389607 - RNA, 19 nt, Homo sapiens
  misc_RNA (1)...(19): siRNA sense strand
gggaauaagggccaucaug

SEQ ID NO: 1389608 - RNA, 19 nt, Homo sapiens
  misc_RNA (1)...(19): siRNA sense strand
caagguguucuucuucaaa

SEQ ID NO: 1389609 - RNA, 19 nt, Homo sapiens
  misc_RNA (1)...(19): siRNA sense strand
ccaagguguucuucuucaa

SEQ ID NO: 1389610 - RNA, 19 nt, Homo sapiens
  misc_RNA (1)...(19): siRNA sense strand
gaaagcugaccuucaugau

SEQ ID NO: 1389611 - RNA, 19 nt, Homo sapiens
  misc_RNA (1)...(19): siRNA sense strand
ggagacccuucgaggaaca

SEQ ID NO: 1389612 - RNA, 19 nt, Homo sapiens
  misc_RNA (1)...(19): siRNA sense strand
uuaggagguuuguuucaga

SEQ ID NO: 1389613 - RNA, 19 nt, Homo sapiens
  misc_RNA (1)...(19): siRNA sense strand
acuuggagcucgcauaaca

SEQ ID NO: 1389614 - RNA, 19 nt, Homo sapiens
  misc_RNA (1)...(19): siRNA sense strand
gcagauugagauagagaga

SEQ ID NO: 1389615 - RNA, 19 nt, Homo sapiens
  misc_RNA (1)...(19): siRNA sense strand
agaaagcugaccuucauga

SEQ ID NO: 1389616 - RNA, 19 nt, Homo sapiens
  misc_RNA (1)...(19): siRNA sense strand
gcauaacagaagcugauga

SEQ ID NO: 1389617 - RNA, 19 nt, Homo sapiens
  misc_RNA (1)...(19): siRNA sense strand
caaacuuggagcucgcaua

SEQ ID NO: 1389618 - RNA, 19 nt, Homo sapiens
  misc_RNA (1)...(19): siRNA sense strand
ugcagcagauugagauaga

SEQ ID NO: 1389619 - RNA, 19 nt, Homo sapiens
  misc_RNA (1)...(19): siRNA sense strand
gcugggugacuauuugaaa

SEQ ID NO: 1389620 - RNA, 19 nt, Homo sapiens
  misc_RNA (1)...(19): siRNA sense strand
ggagcucgcauaacagaag

SEQ ID NO: 1389621 - RNA, 19 nt, Homo sapiens
  misc_RNA (1)...(19): siRNA sense strand
aauaagggccaucaugugu

SEQ ID NO: 1389622 - RNA, 19 nt, Homo sapiens
  misc_RNA (1)...(19): siRNA sense strand
gagcugggugacuauuuga

SEQ ID NO: 1389623 - RNA, 19 nt, Homo sapiens
  misc_RNA (1)...(19): siRNA sense strand
aaauaccuggcccaaguua

SEQ ID NO: 1389624 - RNA, 19 nt, Homo sapiens
  misc_RNA (1)...(19): siRNA sense strand
agaugaacaggauauauug

SEQ ID NO: 1389625 - RNA, 19 nt, Homo sapiens
  misc_RNA (1)...(19): siRNA sense strand
caaugcggacagagaguaa

SEQ ID NO: 1389626 - RNA, 19 nt, Homo sapiens
  misc_RNA (1)...(19): siRNA sense strand
agauugagauagagagaag

SEQ ID NO: 1389627 - RNA, 19 nt, Homo sapiens
  misc_RNA (1)...(19): siRNA sense strand
gaaguuuggagaccaggau

SEQ ID NO: 1389628 - RNA, 19 nt, Homo sapiens
  misc_RNA (1)...(19): siRNA sense strand
gaagcuagacaggaaccuu

SEQ ID NO: 1389629 - RNA, 19 nt, Homo sapiens
  misc_RNA (1)...(19): siRNA sense strand
gauagagagaagccuguau

SEQ ID NO: 1389630 - RNA, 19 nt, Homo sapiens
  misc_RNA (1)...(19): siRNA sense strand
aaagcugaccuucaugaug

SEQ ID NO: 1389631 - RNA, 19 nt, Homo sapiens
  misc_RNA (1)...(19): siRNA sense strand
ggaaccuuguccuguuagu

SEQ ID NO: 1389632 - RNA, 19 nt, Homo sapiens
  misc_RNA (1)...(19): siRNA sense strand
auagagagaagccuguauu

SEQ ID NO: 1389633 - RNA, 19 nt, Homo sapiens
  misc_RNA (1)...(19): siRNA sense strand
gcaagauuuggaagauaug

SEQ ID NO: 1389634 - RNA, 19 nt, Homo sapiens
  misc_RNA (1)...(19): siRNA sense strand
ggcgcaagauuuggaagau

SEQ ID NO: 1389635 - RNA, 19 nt, Homo sapiens
  misc_RNA (1)...(19): siRNA sense strand
guuaggagguuuguuucag

SEQ ID NO: 1389636 - RNA, 19 nt, Homo sapiens
  misc_RNA (1)...(19): siRNA sense strand
guaaggcggacgcuguuag

SEQ ID NO: 1389637 - RNA, 19 nt, Homo sapiens
  misc_RNA (1)...(19): siRNA sense strand
guauucagaccacgagcuu

SEQ ID NO: 1389638 - RNA, 19 nt, Homo sapiens
  misc_RNA (1)...(19): siRNA sense strand
ugaaaagaaugaccgaaca

SEQ ID NO: 1389639 - RNA, 19 nt, Homo sapiens
  misc_RNA (1)...(19): siRNA sense strand
aacagaagcugaugaaaag

SEQ ID NO: 1389640 - RNA, 19 nt, Homo sapiens
  misc_RNA (1)...(19): siRNA sense strand
aagaagaugaacaggauau

SEQ ID NO: 1389641 - RNA, 19 nt, Homo sapiens
  misc_RNA (1)...(19): siRNA sense strand
uaugugggagcagaaauuu

SEQ ID NO: 1389642 - RNA, 19 nt, Homo sapiens
  misc_RNA (1)...(19): siRNA sense strand
agaagaugaacaggauaua

SEQ ID NO: 1389643 - RNA, 19 nt, Homo sapiens
  misc_RNA (1)...(19): siRNA sense strand
ggcccaaguuaggagguuu

SEQ ID NO: 1389644 - RNA, 19 nt, Homo sapiens
  misc_RNA (1)...(19): siRNA sense strand
ggcacuacacauucaaguu

SEQ ID NO: 1389645 - RNA, 19 nt, Homo sapiens
  misc_RNA (1)...(19): siRNA sense strand
cagcagauugagauagaga

SEQ ID NO: 1389646 - RNA, 19 nt, Homo sapiens
  misc_RNA (1)...(19): siRNA sense strand
ggugacuauuugaaaccaa

SEQ ID NO: 1389647 - RNA, 19 nt, Homo sapiens
  misc_RNA (1)...(19): siRNA sense strand
gagaccaggauguuuggau

SEQ ID NO: 1389648 - RNA, 19 nt, Homo sapiens
  misc_RNA (1)...(19): siRNA sense strand
aaagaagaaagcugaccuu

SEQ ID NO: 1389649 - RNA, 19 nt, Homo sapiens
  misc_RNA (1)...(19): siRNA sense strand
agagagaagccuguauuca

SEQ ID NO: 1389650 - RNA, 19 nt, Homo sapiens
  misc_RNA (1)...(19): siRNA sense strand
uagagagaagccuguauuc

SEQ ID NO: 1389651 - RNA, 19 nt, Homo sapiens
  misc_RNA (1)...(19): siRNA sense strand
gauaugugggagcagaaau

SEQ ID NO: 1389652 - RNA, 19 nt, Homo sapiens
  misc_RNA (1)...(19): siRNA sense strand
aagguguucuucuucaaag

SEQ ID NO: 1389653 - RNA, 19 nt, Homo sapiens
  misc_RNA (1)...(19): siRNA sense strand
gcagcagauugagauagag

SEQ ID NO: 1389654 - RNA, 19 nt, Homo sapiens
  misc_RNA (1)...(19): siRNA sense strand
ggaaaucacuucuggaguu

SEQ ID NO: 1389655 - RNA, 19 nt, Homo sapiens
  misc_RNA (1)...(19): siRNA sense strand
gaaagaugaugcaaagaaa

SEQ ID NO: 1389656 - RNA, 19 nt, Homo sapiens
  misc_RNA (1)...(19): siRNA sense strand
gaagaaaugccaaaugauu

SEQ ID NO: 1389657 - RNA, 19 nt, Homo sapiens
  misc_RNA (1)...(19): siRNA sense strand
gaaagaaauugaggaacua

SEQ ID NO: 1389658 - RNA, 19 nt, Homo sapiens
  misc_RNA (1)...(19): siRNA sense strand
ugaaagcacugcauguuaa

SEQ ID NO: 1389659 - RNA, 19 nt, Homo sapiens
  misc_RNA (1)...(19): siRNA sense strand
gaacugcuacccgaaauua

SEQ ID NO: 1389660 - RNA, 19 nt, Homo sapiens
  misc_RNA (1)...(19): siRNA sense strand
ggaagcagcuagucuuuua

SEQ ID NO: 1389661 - RNA, 19 nt, Homo sapiens
  misc_RNA (1)...(19): siRNA sense strand
caaauugugugacugauau

SEQ ID NO: 1389662 - RNA, 19 nt, Homo sapiens
  misc_RNA (1)...(19): siRNA sense strand
ggaaagaugaugcaaagaa

SEQ ID NO: 1389663 - RNA, 19 nt, Homo sapiens
  misc_RNA (1)...(19): siRNA sense strand
ccgaagaaaugccaaauga

SEQ ID NO: 1389664 - RNA, 19 nt, Homo sapiens
  misc_RNA (1)...(19): siRNA sense strand
agaagaggaugauaaagaa

SEQ ID NO: 1389665 - RNA, 19 nt, Homo sapiens
  misc_RNA (1)...(19): siRNA sense strand
gaaauuagagagaagauag

SEQ ID NO: 1389666 - RNA, 19 nt, Homo sapiens
  misc_RNA (1)...(19): siRNA sense strand
gaaaucacuucuggaguug

SEQ ID NO: 1389667 - RNA, 19 nt, Homo sapiens
  misc_RNA (1)...(19): siRNA sense strand
gaagauagaagaugcaaag

SEQ ID NO: 1389668 - RNA, 19 nt, Homo sapiens
  misc_RNA (1)...(19): siRNA sense strand
cagaauggcuguacuaaac

SEQ ID NO: 1389669 - RNA, 19 nt, Homo sapiens
  misc_RNA (1)...(19): siRNA sense strand
ggaggaggcucuucagucu

SEQ ID NO: 1389670 - RNA, 19 nt, Homo sapiens
  misc_RNA (1)...(19): siRNA sense strand
cagcaaaucuauugaaguc

SEQ ID NO: 1389671 - RNA, 19 nt, Homo sapiens
  misc_RNA (1)...(19): siRNA sense strand
gcaaaucuauugaagucau

SEQ ID NO: 1389672 - RNA, 19 nt, Homo sapiens
  misc_RNA (1)...(19): siRNA sense strand
caaagaaagccaaacaaga

SEQ ID NO: 1389673 - RNA, 19 nt, Homo sapiens
  misc_RNA (1)...(19): siRNA sense strand
gcucagaagaggaugauaa

SEQ ID NO: 1389674 - RNA, 19 nt, Homo sapiens
  misc_RNA (1)...(19): siRNA sense strand
guacaacucucaguaugau

SEQ ID NO: 1389675 - RNA, 19 nt, Homo sapiens
  misc_RNA (1)...(19): siRNA sense strand
cagaagaggaugauaaaga

SEQ ID NO: 1389676 - RNA, 19 nt, Homo sapiens
  misc_RNA (1)...(19): siRNA sense strand
gcacaguucagcaaaucua

SEQ ID NO: 1389677 - RNA, 19 nt, Homo sapiens
  misc_RNA (1)...(19): siRNA sense strand
uaagaaguauggagagaca

SEQ ID NO: 1389678 - RNA, 19 nt, Homo sapiens
  misc_RNA (1)...(19): siRNA sense strand
gcaaagaaagccaaacaag

SEQ ID NO: 1389679 - RNA, 19 nt, Homo sapiens
  misc_RNA (1)...(19): siRNA sense strand
gaacuggcucugaaagcua

SEQ ID NO: 1389680 - RNA, 19 nt, Homo sapiens
  misc_RNA (1)...(19): siRNA sense strand
caagaaagaaauugaggaa

SEQ ID NO: 1389681 - RNA, 19 nt, Homo sapiens
  misc_RNA (1)...(19): siRNA sense strand
uagcugaacuggcucugaa

SEQ ID NO: 1389682 - RNA, 19 nt, Homo sapiens
  misc_RNA (1)...(19): siRNA sense strand
agagacagcuaaugagugu

SEQ ID NO: 1389683 - RNA, 19 nt, Homo sapiens
  misc_RNA (1)...(19): siRNA sense strand
ccugggauaugcuggauuu

SEQ ID NO: 1389684 - RNA, 19 nt, Homo sapiens
  misc_RNA (1)...(19): siRNA sense strand
gaaaacaagucucuucaag

SEQ ID NO: 1389685 - RNA, 19 nt, Homo sapiens
  misc_RNA (1)...(19): siRNA sense strand
ggaagaggaagaaggagaa

SEQ ID NO: 1389686 - RNA, 19 nt, Homo sapiens
  misc_RNA (1)...(19): siRNA sense strand
gaagaggaaaccagaggaa

SEQ ID NO: 1389687 - RNA, 19 nt, Homo sapiens
  misc_RNA (1)...(19): siRNA sense strand
gguaagaaguauggagaga

SEQ ID NO: 1389688 - RNA, 19 nt, Homo sapiens
  misc_RNA (1)...(19): siRNA sense strand
ggaacuaaaggaacugcua

SEQ ID NO: 1389689 - RNA, 19 nt, Homo sapiens
  misc_RNA (1)...(19): siRNA sense strand
agaaagaaauugaggaacu

SEQ ID NO: 1389690 - RNA, 19 nt, Homo sapiens
  misc_RNA (1)...(19): siRNA sense strand
uaaacgagcaggugaagga

SEQ ID NO: 1389691 - RNA, 19 nt, Homo sapiens
  misc_RNA (1)...(19): siRNA sense strand
gaagaggaugauaaagaaa

SEQ ID NO: 1389692 - RNA, 19 nt, Homo sapiens
  misc_RNA (1)...(19): siRNA sense strand
ggugcuuccucaucaaauu

SEQ ID NO: 1389693 - RNA, 19 nt, Homo sapiens
  misc_RNA (1)...(19): siRNA sense strand
gaguuccaguccugccuua

SEQ ID NO: 1389694 - RNA, 19 nt, Homo sapiens
  misc_RNA (1)...(19): siRNA sense strand
aaagaaagccaaacaagag

SEQ ID NO: 1389695 - RNA, 19 nt, Homo sapiens
  misc_RNA (1)...(19): siRNA sense strand
gcugguuucugccgacaaa

SEQ ID NO: 1389696 - RNA, 19 nt, Homo sapiens
  misc_RNA (1)...(19): siRNA sense strand
gaauggcuguacuaaacga

SEQ ID NO: 1389697 - RNA, 19 nt, Homo sapiens
  misc_RNA (1)...(19): siRNA sense strand
agaaugguguguugggaaa

SEQ ID NO: 1389698 - RNA, 19 nt, Homo sapiens
  misc_RNA (1)...(19): siRNA sense strand
ccggaaagaugaugcaaag

SEQ ID NO: 1389699 - RNA, 19 nt, Homo sapiens
  misc_RNA (1)...(19): siRNA sense strand
agacggugcuuccucauca

SEQ ID NO: 1389700 - RNA, 19 nt, Homo sapiens
  misc_RNA (1)...(19): siRNA sense strand
cuauugaagucauugagaa

SEQ ID NO: 1389701 - RNA, 19 nt, Homo sapiens
  misc_RNA (1)...(19): siRNA sense strand
ggguacaacucucaguaug

SEQ ID NO: 1389702 - RNA, 19 nt, Homo sapiens
  misc_RNA (1)...(19): siRNA sense strand
ggauuuagcaaagaucauu

SEQ ID NO: 1389703 - RNA, 19 nt, Homo sapiens
  misc_RNA (1)...(19): siRNA sense strand
cagcugggcuuggcuuaug

SEQ ID NO: 1389704 - RNA, 19 nt, Homo sapiens
  misc_RNA (1)...(19): siRNA sense strand
gaucgucugcugaauacaa

SEQ ID NO: 1389705 - RNA, 19 nt, Homo sapiens
  misc_RNA (1)...(19): siRNA sense strand
ggagagacagcuaaugagu

SEQ ID NO: 1389706 - RNA, 19 nt, Homo sapiens
  misc_RNA (1)...(19): siRNA sense strand
ucaaauugugugacugaua

SEQ ID NO: 1389707 - RNA, 19 nt, Homo sapiens
  misc_RNA (1)...(19): siRNA sense strand
gccaaaugauucaguccuu

SEQ ID NO: 1389708 - RNA, 19 nt, Homo sapiens
  misc_RNA (1)...(19): siRNA sense strand
ugauaagaccgaagaaaug

SEQ ID NO: 1389709 - RNA, 19 nt, Homo sapiens
  misc_RNA (1)...(19): siRNA sense strand
ggauagugaagcuaagaaa

SEQ ID NO: 1389710 - RNA, 19 nt, Homo sapiens
  misc_RNA (1)...(19): siRNA sense strand
caaaugauucaguccuuga

SEQ ID NO: 1389711 - RNA, 19 nt, Homo sapiens
  misc_RNA (1)...(19): siRNA sense strand
gagcuugccugggauaugc

SEQ ID NO: 1389712 - RNA, 19 nt, Homo sapiens
  misc_RNA (1)...(19): siRNA sense strand
ggcuggagcuacaguugaa

SEQ ID NO: 1389713 - RNA, 19 nt, Homo sapiens
  misc_RNA (1)...(19): siRNA sense strand
caucaaauugugugacuga

SEQ ID NO: 1389714 - RNA, 19 nt, Homo sapiens
  misc_RNA (1)...(19): siRNA sense strand
gcucuucagucuccaugau

SEQ ID NO: 1389715 - RNA, 19 nt, Homo sapiens
  misc_RNA (1)...(19): siRNA sense strand
gguacaacucucaguauga

SEQ ID NO: 1389716 - RNA, 19 nt, Homo sapiens
  misc_RNA (1)...(19): siRNA sense strand
ggaggagauugggaaccua

SEQ ID NO: 1389717 - RNA, 19 nt, Homo sapiens
  misc_RNA (1)...(19): siRNA sense strand
gaaaccagaggaagagagu

SEQ ID NO: 1389718 - RNA, 19 nt, Homo sapiens
  misc_RNA (1)...(19): siRNA sense strand
cagcuagucuuuuagguaa

SEQ ID NO: 1389719 - RNA, 19 nt, Homo sapiens
  misc_RNA (1)...(19): siRNA sense strand
gaaggaucgucugcugaau

SEQ ID NO: 1389720 - RNA, 19 nt, Homo sapiens
  misc_RNA (1)...(19): siRNA sense strand
cggagaaguuaguguugaa

SEQ ID NO: 1389721 - RNA, 19 nt, Homo sapiens
  misc_RNA (1)...(19): siRNA sense strand
uuagagagaagauagaaga

SEQ ID NO: 1389722 - RNA, 19 nt, Homo sapiens
  misc_RNA (1)...(19): siRNA sense strand
uugaaagcacugcauguua

SEQ ID NO: 1389723 - RNA, 19 nt, Homo sapiens
  misc_RNA (1)...(19): siRNA sense strand
gaagaggaagaaggagaaa

SEQ ID NO: 1389724 - RNA, 19 nt, Homo sapiens
  misc_RNA (1)...(19): siRNA sense strand
gaaauugaggaacuaaagg

SEQ ID NO: 1389725 - RNA, 19 nt, Homo sapiens
  misc_RNA (1)...(19): siRNA sense strand
gggauaugcuggauuuagc

SEQ ID NO: 1389726 - RNA, 19 nt, Homo sapiens
  misc_RNA (1)...(19): siRNA sense strand
gguggagaguucuacuuca

SEQ ID NO: 1389727 - RNA, 19 nt, Homo sapiens
  misc_RNA (1)...(19): siRNA sense strand
ugaaggaucgucugcugaa

SEQ ID NO: 1389728 - RNA, 19 nt, Homo sapiens
  misc_RNA (1)...(19): siRNA sense strand
gcuaaugaguguggagaag

SEQ ID NO: 1389729 - RNA, 19 nt, Homo sapiens
  misc_RNA (1)...(19): siRNA sense strand
uggcaagaauggagaaugg

SEQ ID NO: 1389730 - RNA, 19 nt, Homo sapiens
  misc_RNA (1)...(19): siRNA sense strand
ggaagagaguccccggaaa

SEQ ID NO: 1389731 - RNA, 19 nt, Homo sapiens
  misc_RNA (1)...(19): siRNA sense strand
cgaaauuagagagaagaua

SEQ ID NO: 1389732 - RNA, 19 nt, Homo sapiens
  misc_RNA (1)...(19): siRNA sense strand
ggaacugcuacccgaaauu

SEQ ID NO: 1389733 - RNA, 19 nt, Homo sapiens
  misc_RNA (1)...(19): siRNA sense strand
gccuuaaccugcaggaaca

SEQ ID NO: 1389734 - RNA, 19 nt, Homo sapiens
  misc_RNA (1)...(19): siRNA sense strand
ggaggaggaggcugagaau

SEQ ID NO: 1389735 - RNA, 19 nt, Homo sapiens
  misc_RNA (1)...(19): siRNA sense strand
aauggagaaugguguguug

SEQ ID NO: 1389736 - RNA, 19 nt, Homo sapiens
  misc_RNA (1)...(19): siRNA sense strand
ccaggcacaucuuaaacuc

SEQ ID NO: 1389737 - RNA, 19 nt, Homo sapiens
  misc_RNA (1)...(19): siRNA sense strand
gaauggagaaugguguguu

SEQ ID NO: 1389738 - RNA, 19 nt, Homo sapiens
  misc_RNA (1)...(19): siRNA sense strand
aaggaucgucugcugaaua

SEQ ID NO: 1389739 - RNA, 19 nt, Homo sapiens
  misc_RNA (1)...(19): siRNA sense strand
agaaguuaguguugaaucu

SEQ ID NO: 1389740 - RNA, 19 nt, Homo sapiens
  misc_RNA (1)...(19): siRNA sense strand
ggauguggauagugaagcu

SEQ ID NO: 1389741 - RNA, 19 nt, Homo sapiens
  misc_RNA (1)...(19): siRNA sense strand
aacaagagccggaggugaa

SEQ ID NO: 1389742 - RNA, 19 nt, Homo sapiens
  misc_RNA (1)...(19): siRNA sense strand
gauauuucccaccuuguca

SEQ ID NO: 1389743 - RNA, 19 nt, Homo sapiens
  misc_RNA (1)...(19): siRNA sense strand
ccaggaagcagcuagucuu

SEQ ID NO: 1389744 - RNA, 19 nt, Homo sapiens
  misc_RNA (1)...(19): siRNA sense strand
ugaagucauugagaacaga

SEQ ID NO: 1389745 - RNA, 19 nt, Homo sapiens
  misc_RNA (1)...(19): siRNA sense strand
gauaagaccgaagaaaugc

SEQ ID NO: 1389746 - RNA, 19 nt, Homo sapiens
  misc_RNA (1)...(19): siRNA sense strand
guugaaagcacugcauguu

SEQ ID NO: 1389747 - RNA, 19 nt, Homo sapiens
  misc_RNA (1)...(19): siRNA sense strand
caggaagcagcuagucuuu

SEQ ID NO: 1389748 - RNA, 19 nt, Homo sapiens
  misc_RNA (1)...(19): siRNA sense strand
gaagucauugagaacagaa

SEQ ID NO: 1389749 - RNA, 19 nt, Homo sapiens
  misc_RNA (1)...(19): siRNA sense strand
ccacgaccgucuccuugca

SEQ ID NO: 1389750 - RNA, 19 nt, Homo sapiens
  misc_RNA (1)...(19): siRNA sense strand
aaguuaguguugaaucuga

SEQ ID NO: 1389751 - RNA, 19 nt, Homo sapiens
  misc_RNA (1)...(19): siRNA sense strand
gaaguuaguguugaaucug

SEQ ID NO: 1389752 - RNA, 19 nt, Homo sapiens
  misc_RNA (1)...(19): siRNA sense strand
agaaaugccaaaugauuca

SEQ ID NO: 1389753 - RNA, 19 nt, Homo sapiens
  misc_RNA (1)...(19): siRNA sense strand
ucggagaaguuaguguuga

SEQ ID NO: 1389754 - RNA, 19 nt, Homo sapiens
  misc_RNA (1)...(19): siRNA sense strand
ggaaaucacuucuggaguu

SEQ ID NO: 1389755 - RNA, 19 nt, Homo sapiens
  misc_RNA (1)...(19): siRNA sense strand
gaaagaugaugcaaagaaa

SEQ ID NO: 1389756 - RNA, 19 nt, Homo sapiens
  misc_RNA (1)...(19): siRNA sense strand
gaagaaaugccaaaugauu

SEQ ID NO: 1389757 - RNA, 19 nt, Homo sapiens
  misc_RNA (1)...(19): siRNA sense strand
gaaagaaauugaggaacua

SEQ ID NO: 1389758 - RNA, 19 nt, Homo sapiens
  misc_RNA (1)...(19): siRNA sense strand
ugaaagcacugcauguuaa

SEQ ID NO: 1389759 - RNA, 19 nt, Homo sapiens
  misc_RNA (1)...(19): siRNA sense strand
gaacugcuacccgaaauua

SEQ ID NO: 1389760 - RNA, 19 nt, Homo sapiens
  misc_RNA (1)...(19): siRNA sense strand
ggaagcagcuagucuuuua

SEQ ID NO: 1389761 - RNA, 19 nt, Homo sapiens
  misc_RNA (1)...(19): siRNA sense strand
caaauugugugacugauau

SEQ ID NO: 1389762 - RNA, 19 nt, Homo sapiens
  misc_RNA (1)...(19): siRNA sense strand
ggaaagaugaugcaaagaa

SEQ ID NO: 1389763 - RNA, 19 nt, Homo sapiens
  misc_RNA (1)...(19): siRNA sense strand
ccgaagaaaugccaaauga

SEQ ID NO: 1389764 - RNA, 19 nt, Homo sapiens
  misc_RNA (1)...(19): siRNA sense strand
agaagaggaugauaaagaa

SEQ ID NO: 1389765 - RNA, 19 nt, Homo sapiens
  misc_RNA (1)...(19): siRNA sense strand
gaaauuagagagaagauag

SEQ ID NO: 1389766 - RNA, 19 nt, Homo sapiens
  misc_RNA (1)...(19): siRNA sense strand
gaaaucacuucuggaguug

SEQ ID NO: 1389767 - RNA, 19 nt, Homo sapiens
  misc_RNA (1)...(19): siRNA sense strand
gaagauagaagaugcaaag

SEQ ID NO: 1389768 - RNA, 19 nt, Homo sapiens
  misc_RNA (1)...(19): siRNA sense strand
cagaauggcuguacuaaac

SEQ ID NO: 1389769 - RNA, 19 nt, Homo sapiens
  misc_RNA (1)...(19): siRNA sense strand
ggaggaggcucuucagucu

SEQ ID NO: 1389770 - RNA, 19 nt, Homo sapiens
  misc_RNA (1)...(19): siRNA sense strand
cagcaaaucuauugaaguc

SEQ ID NO: 1389771 - RNA, 19 nt, Homo sapiens
  misc_RNA (1)...(19): siRNA sense strand
gcaaaucuauugaagucau

SEQ ID NO: 1389772 - RNA, 19 nt, Homo sapiens
  misc_RNA (1)...(19): siRNA sense strand
caaagaaagccaaacaaga

SEQ ID NO: 1389773 - RNA, 19 nt, Homo sapiens
  misc_RNA (1)...(19): siRNA sense strand
gcucagaagaggaugauaa

SEQ ID NO: 1389774 - RNA, 19 nt, Homo sapiens
  misc_RNA (1)...(19): siRNA sense strand
guacaacucucaguaugau

SEQ ID NO: 1389775 - RNA, 19 nt, Homo sapiens
  misc_RNA (1)...(19): siRNA sense strand
cagaagaggaugauaaaga

SEQ ID NO: 1389776 - RNA, 19 nt, Homo sapiens
  misc_RNA (1)...(19): siRNA sense strand
gcacaguucagcaaaucua

SEQ ID NO: 1389777 - RNA, 19 nt, Homo sapiens
  misc_RNA (1)...(19): siRNA sense strand
uaagaaguauggagagaca

SEQ ID NO: 1389778 - RNA, 19 nt, Homo sapiens
  misc_RNA (1)...(19): siRNA sense strand
gcaaagaaagccaaacaag

SEQ ID NO: 1389779 - RNA, 19 nt, Homo sapiens
  misc_RNA (1)...(19): siRNA sense strand
gaacuggcucugaaagcua

SEQ ID NO: 1389780 - RNA, 19 nt, Homo sapiens
  misc_RNA (1)...(19): siRNA sense strand
caagaaagaaauugaggaa

SEQ ID NO: 1389781 - RNA, 19 nt, Homo sapiens
  misc_RNA (1)...(19): siRNA sense strand
uagcugaacuggcucugaa

SEQ ID NO: 1389782 - RNA, 19 nt, Homo sapiens
  misc_RNA (1)...(19): siRNA sense strand
agagacagcuaaugagugu

SEQ ID NO: 1389783 - RNA, 19 nt, Homo sapiens
  misc_RNA (1)...(19): siRNA sense strand
ccugggauaugcuggauuu

SEQ ID NO: 1389784 - RNA, 19 nt, Homo sapiens
  misc_RNA (1)...(19): siRNA sense strand
gaaaacaagucucuucaag

SEQ ID NO: 1389785 - RNA, 19 nt, Homo sapiens
  misc_RNA (1)...(19): siRNA sense strand
ggaagaggaagaaggagaa

SEQ ID NO: 1389786 - RNA, 19 nt, Homo sapiens
  misc_RNA (1)...(19): siRNA sense strand
gaagaggaaaccagaggaa

SEQ ID NO: 1389787 - RNA, 19 nt, Homo sapiens
  misc_RNA (1)...(19): siRNA sense strand
gguaagaaguauggagaga

SEQ ID NO: 1389788 - RNA, 19 nt, Homo sapiens
  misc_RNA (1)...(19): siRNA sense strand
ggaacuaaaggaacugcua

SEQ ID NO: 1389789 - RNA, 19 nt, Homo sapiens
  misc_RNA (1)...(19): siRNA sense strand
agaaagaaauugaggaacu

SEQ ID NO: 1389790 - RNA, 19 nt, Homo sapiens
  misc_RNA (1)...(19): siRNA sense strand
uaaacgagcaggugaagga

SEQ ID NO: 1389791 - RNA, 19 nt, Homo sapiens
  misc_RNA (1)...(19): siRNA sense strand
gaagaggaugauaaagaaa

SEQ ID NO: 1389792 - RNA, 19 nt, Homo sapiens
  misc_RNA (1)...(19): siRNA sense strand
ggugcuuccucaucaaauu

SEQ ID NO: 1389793 - RNA, 19 nt, Homo sapiens
  misc_RNA (1)...(19): siRNA sense strand
gaguuccaguccugccuua

SEQ ID NO: 1389794 - RNA, 19 nt, Homo sapiens
  misc_RNA (1)...(19): siRNA sense strand
aaagaaagccaaacaagag

SEQ ID NO: 1389795 - RNA, 19 nt, Homo sapiens
  misc_RNA (1)...(19): siRNA sense strand
gcugguuucugccgacaaa

SEQ ID NO: 1389796 - RNA, 19 nt, Homo sapiens
  misc_RNA (1)...(19): siRNA sense strand
gaauggcuguacuaaacga

SEQ ID NO: 1389797 - RNA, 19 nt, Homo sapiens
  misc_RNA (1)...(19): siRNA sense strand
agaaugguguguugggaaa

SEQ ID NO: 1389798 - RNA, 19 nt, Homo sapiens
  misc_RNA (1)...(19): siRNA sense strand
ccggaaagaugaugcaaag

SEQ ID NO: 1389799 - RNA, 19 nt, Homo sapiens
  misc_RNA (1)...(19): siRNA sense strand
agacggugcuuccucauca

SEQ ID NO: 1389800 - RNA, 19 nt, Homo sapiens
  misc_RNA (1)...(19): siRNA sense strand
cuauugaagucauugagaa

SEQ ID NO: 1389801 - RNA, 19 nt, Homo sapiens
  misc_RNA (1)...(19): siRNA sense strand
ggguacaacucucaguaug

SEQ ID NO: 1389802 - RNA, 19 nt, Homo sapiens
  misc_RNA (1)...(19): siRNA sense strand
ggauuuagcaaagaucauu

SEQ ID NO: 1389803 - RNA, 19 nt, Homo sapiens
  misc_RNA (1)...(19): siRNA sense strand
cagcugggcuuggcuuaug

SEQ ID NO: 1389804 - RNA, 19 nt, Homo sapiens
  misc_RNA (1)...(19): siRNA sense strand
gaucgucugcugaauacaa

SEQ ID NO: 1389805 - RNA, 19 nt, Homo sapiens
  misc_RNA (1)...(19): siRNA sense strand
ggagagacagcuaaugagu

SEQ ID NO: 1389806 - RNA, 19 nt, Homo sapiens
  misc_RNA (1)...(19): siRNA sense strand
ucaaauugugugacugaua

SEQ ID NO: 1389807 - RNA, 19 nt, Homo sapiens
  misc_RNA (1)...(19): siRNA sense strand
gccaaaugauucaguccuu

SEQ ID NO: 1389808 - RNA, 19 nt, Homo sapiens
  misc_RNA (1)...(19): siRNA sense strand
ugauaagaccgaagaaaug

SEQ ID NO: 1389809 - RNA, 19 nt, Homo sapiens
  misc_RNA (1)...(19): siRNA sense strand
ggauagugaagcuaagaaa

SEQ ID NO: 1389810 - RNA, 19 nt, Homo sapiens
  misc_RNA (1)...(19): siRNA sense strand
caaaugauucaguccuuga

SEQ ID NO: 1389811 - RNA, 19 nt, Homo sapiens
  misc_RNA (1)...(19): siRNA sense strand
gagcuugccugggauaugc

SEQ ID NO: 1389812 - RNA, 19 nt, Homo sapiens
  misc_RNA (1)...(19): siRNA sense strand
ggcuggagcuacaguugaa

SEQ ID NO: 1389813 - RNA, 19 nt, Homo sapiens
  misc_RNA (1)...(19): siRNA sense strand
caucaaauugugugacuga

SEQ ID NO: 1389814 - RNA, 19 nt, Homo sapiens
  misc_RNA (1)...(19): siRNA sense strand
gcucuucagucuccaugau

SEQ ID NO: 1389815 - RNA, 19 nt, Homo sapiens
  misc_RNA (1)...(19): siRNA sense strand
gguacaacucucaguauga

SEQ ID NO: 1389816 - RNA, 19 nt, Homo sapiens
  misc_RNA (1)...(19): siRNA sense strand
ggaggagauugggaaccua

SEQ ID NO: 1389817 - RNA, 19 nt, Homo sapiens
  misc_RNA (1)...(19): siRNA sense strand
gaaaccagaggaagagagu

SEQ ID NO: 1389818 - RNA, 19 nt, Homo sapiens
  misc_RNA (1)...(19): siRNA sense strand
cagcuagucuuuuagguaa

SEQ ID NO: 1389819 - RNA, 19 nt, Homo sapiens
  misc_RNA (1)...(19): siRNA sense strand
gaaggaucgucugcugaau

SEQ ID NO: 1389820 - RNA, 19 nt, Homo sapiens
  misc_RNA (1)...(19): siRNA sense strand
cggagaaguuaguguugaa

SEQ ID NO: 1389821 - RNA, 19 nt, Homo sapiens
  misc_RNA (1)...(19): siRNA sense strand
uuagagagaagauagaaga

SEQ ID NO: 1389822 - RNA, 19 nt, Homo sapiens
  misc_RNA (1)...(19): siRNA sense strand
uugaaagcacugcauguua

SEQ ID NO: 1389823 - RNA, 19 nt, Homo sapiens
  misc_RNA (1)...(19): siRNA sense strand
gaagaggaagaaggagaaa

SEQ ID NO: 1389824 - RNA, 19 nt, Homo sapiens
  misc_RNA (1)...(19): siRNA sense strand
gaaauugaggaacuaaagg

SEQ ID NO: 1389825 - RNA, 19 nt, Homo sapiens
  misc_RNA (1)...(19): siRNA sense strand
gggauaugcuggauuuagc

SEQ ID NO: 1389826 - RNA, 19 nt, Homo sapiens
  misc_RNA (1)...(19): siRNA sense strand
gguggagaguucuacuuca

SEQ ID NO: 1389827 - RNA, 19 nt, Homo sapiens
  misc_RNA (1)...(19): siRNA sense strand
ugaaggaucgucugcugaa

SEQ ID NO: 1389828 - RNA, 19 nt, Homo sapiens
  misc_RNA (1)...(19): siRNA sense strand
gcuaaugaguguggagaag

SEQ ID NO: 1389829 - RNA, 19 nt, Homo sapiens
  misc_RNA (1)...(19): siRNA sense strand
uggcaagaauggagaaugg

SEQ ID NO: 1389830 - RNA, 19 nt, Homo sapiens
  misc_RNA (1)...(19): siRNA sense strand
ggaagagaguccccggaaa

SEQ ID NO: 1389831 - RNA, 19 nt, Homo sapiens
  misc_RNA (1)...(19): siRNA sense strand
cgaaauuagagagaagaua

SEQ ID NO: 1389832 - RNA, 19 nt, Homo sapiens
  misc_RNA (1)...(19): siRNA sense strand
ggaacugcuacccgaaauu

SEQ ID NO: 1389833 - RNA, 19 nt, Homo sapiens
  misc_RNA (1)...(19): siRNA sense strand
gccuuaaccugcaggaaca

SEQ ID NO: 1389834 - RNA, 19 nt, Homo sapiens
  misc_RNA (1)...(19): siRNA sense strand
ggaggaggaggcugagaau

SEQ ID NO: 1389835 - RNA, 19 nt, Homo sapiens
  misc_RNA (1)...(19): siRNA sense strand
aauggagaaugguguguug

SEQ ID NO: 1389836 - RNA, 19 nt, Homo sapiens
  misc_RNA (1)...(19): siRNA sense strand
ccaggcacaucuuaaacuc

SEQ ID NO: 1389837 - RNA, 19 nt, Homo sapiens
  misc_RNA (1)...(19): siRNA sense strand
gaauggagaaugguguguu

SEQ ID NO: 1389838 - RNA, 19 nt, Homo sapiens
  misc_RNA (1)...(19): siRNA sense strand
aaggaucgucugcugaaua

SEQ ID NO: 1389839 - RNA, 19 nt, Homo sapiens
  misc_RNA (1)...(19): siRNA sense strand
agaaguuaguguugaaucu

SEQ ID NO: 1389840 - RNA, 19 nt, Homo sapiens
  misc_RNA (1)...(19): siRNA sense strand
ggauguggauagugaagcu

SEQ ID NO: 1389841 - RNA, 19 nt, Homo sapiens
  misc_RNA (1)...(19): siRNA sense strand
aacaagagccggaggugaa

SEQ ID NO: 1389842 - RNA, 19 nt, Homo sapiens
  misc_RNA (1)...(19): siRNA sense strand
gauauuucccaccuuguca

SEQ ID NO: 1389843 - RNA, 19 nt, Homo sapiens
  misc_RNA (1)...(19): siRNA sense strand
ccaggaagcagcuagucuu

SEQ ID NO: 1389844 - RNA, 19 nt, Homo sapiens
  misc_RNA (1)...(19): siRNA sense strand
ugaagucauugagaacaga

SEQ ID NO: 1389845 - RNA, 19 nt, Homo sapiens
  misc_RNA (1)...(19): siRNA sense strand
gauaagaccgaagaaaugc

SEQ ID NO: 1389846 - RNA, 19 nt, Homo sapiens
  misc_RNA (1)...(19): siRNA sense strand
guugaaagcacugcauguu

SEQ ID NO: 1389847 - RNA, 19 nt, Homo sapiens
  misc_RNA (1)...(19): siRNA sense strand
caggaagcagcuagucuuu

SEQ ID NO: 1389848 - RNA, 19 nt, Homo sapiens
  misc_RNA (1)...(19): siRNA sense strand
gaagucauugagaacagaa

SEQ ID NO: 1389849 - RNA, 19 nt, Homo sapiens
  misc_RNA (1)...(19): siRNA sense strand
ccacgaccgucuccuugca

SEQ ID NO: 1389850 - RNA, 19 nt, Homo sapiens
  misc_RNA (1)...(19): siRNA sense strand
aaguuaguguugaaucuga

SEQ ID NO: 1389851 - RNA, 19 nt, Homo sapiens
  misc_RNA (1)...(19): siRNA sense strand
gaaguuaguguugaaucug

SEQ ID NO: 1389852 - RNA, 19 nt, Homo sapiens
  misc_RNA (1)...(19): siRNA sense strand
agaaaugccaaaugauuca

SEQ ID NO: 1389853 - RNA, 19 nt, Homo sapiens
  misc_RNA (1)...(19): siRNA sense strand
ucggagaaguuaguguuga

SEQ ID NO: 1389854 - RNA, 19 nt, Homo sapiens
  misc_RNA (1)...(19): siRNA sense strand
ggaaaucacuucuggaguu

SEQ ID NO: 1389855 - RNA, 19 nt, Homo sapiens
  misc_RNA (1)...(19): siRNA sense strand
gaaagaugaugcaaagaaa

SEQ ID NO: 1389856 - RNA, 19 nt, Homo sapiens
  misc_RNA (1)...(19): siRNA sense strand
gaagaaaugccaaaugauu

SEQ ID NO: 1389857 - RNA, 19 nt, Homo sapiens
  misc_RNA (1)...(19): siRNA sense strand
gaaagaaauugaggaacua

SEQ ID NO: 1389858 - RNA, 19 nt, Homo sapiens
  misc_RNA (1)...(19): siRNA sense strand
ugaaagcacugcauguuaa

SEQ ID NO: 1389859 - RNA, 19 nt, Homo sapiens
  misc_RNA (1)...(19): siRNA sense strand
gaacugcuacccgaaauua

SEQ ID NO: 1389860 - RNA, 19 nt, Homo sapiens
  misc_RNA (1)...(19): siRNA sense strand
ggaagcagcuagucuuuua

SEQ ID NO: 1389861 - RNA, 19 nt, Homo sapiens
  misc_RNA (1)...(19): siRNA sense strand
caaauugugugacugauau

SEQ ID NO: 1389862 - RNA, 19 nt, Homo sapiens
  misc_RNA (1)...(19): siRNA sense strand
ggaaagaugaugcaaagaa

SEQ ID NO: 1389863 - RNA, 19 nt, Homo sapiens
  misc_RNA (1)...(19): siRNA sense strand
ccgaagaaaugccaaauga

SEQ ID NO: 1389864 - RNA, 19 nt, Homo sapiens
  misc_RNA (1)...(19): siRNA sense strand
agaagaggaugauaaagaa

SEQ ID NO: 1389865 - RNA, 19 nt, Homo sapiens
  misc_RNA (1)...(19): siRNA sense strand
gaaauuagagagaagauag

SEQ ID NO: 1389866 - RNA, 19 nt, Homo sapiens
  misc_RNA (1)...(19): siRNA sense strand
gaaaucacuucuggaguug

SEQ ID NO: 1389867 - RNA, 19 nt, Homo sapiens
  misc_RNA (1)...(19): siRNA sense strand
gaagauagaagaugcaaag

SEQ ID NO: 1389868 - RNA, 19 nt, Homo sapiens
  misc_RNA (1)...(19): siRNA sense strand
cagaauggcuguacuaaac

SEQ ID NO: 1389869 - RNA, 19 nt, Homo sapiens
  misc_RNA (1)...(19): siRNA sense strand
ggaggaggcucuucagucu

SEQ ID NO: 1389870 - RNA, 19 nt, Homo sapiens
  misc_RNA (1)...(19): siRNA sense strand
cagcaaaucuauugaaguc

SEQ ID NO: 1389871 - RNA, 19 nt, Homo sapiens
  misc_RNA (1)...(19): siRNA sense strand
gcaaaucuauugaagucau

SEQ ID NO: 1389872 - RNA, 19 nt, Homo sapiens
  misc_RNA (1)...(19): siRNA sense strand
caaagaaagccaaacaaga

SEQ ID NO: 1389873 - RNA, 19 nt, Homo sapiens
  misc_RNA (1)...(19): siRNA sense strand
gcucagaagaggaugauaa

SEQ ID NO: 1389874 - RNA, 19 nt, Homo sapiens
  misc_RNA (1)...(19): siRNA sense strand
guacaacucucaguaugau

SEQ ID NO: 1389875 - RNA, 19 nt, Homo sapiens
  misc_RNA (1)...(19): siRNA sense strand
cagaagaggaugauaaaga

SEQ ID NO: 1389876 - RNA, 19 nt, Homo sapiens
  misc_RNA (1)...(19): siRNA sense strand
gcacaguucagcaaaucua

SEQ ID NO: 1389877 - RNA, 19 nt, Homo sapiens
  misc_RNA (1)...(19): siRNA sense strand
uaagaaguauggagagaca

SEQ ID NO: 1389878 - RNA, 19 nt, Homo sapiens
  misc_RNA (1)...(19): siRNA sense strand
gcaaagaaagccaaacaag

SEQ ID NO: 1389879 - RNA, 19 nt, Homo sapiens
  misc_RNA (1)...(19): siRNA sense strand
gaacuggcucugaaagcua

SEQ ID NO: 1389880 - RNA, 19 nt, Homo sapiens
  misc_RNA (1)...(19): siRNA sense strand
caagaaagaaauugaggaa

SEQ ID NO: 1389881 - RNA, 19 nt, Homo sapiens
  misc_RNA (1)...(19): siRNA sense strand
uagcugaacuggcucugaa

SEQ ID NO: 1389882 - RNA, 19 nt, Homo sapiens
  misc_RNA (1)...(19): siRNA sense strand
agagacagcuaaugagugu

SEQ ID NO: 1389883 - RNA, 19 nt, Homo sapiens
  misc_RNA (1)...(19): siRNA sense strand
ccugggauaugcuggauuu

SEQ ID NO: 1389884 - RNA, 19 nt, Homo sapiens
  misc_RNA (1)...(19): siRNA sense strand
gaaaacaagucucuucaag

SEQ ID NO: 1389885 - RNA, 19 nt, Homo sapiens
  misc_RNA (1)...(19): siRNA sense strand
ggaagaggaagaaggagaa

SEQ ID NO: 1389886 - RNA, 19 nt, Homo sapiens
  misc_RNA (1)...(19): siRNA sense strand
gaagaggaaaccagaggaa

SEQ ID NO: 1389887 - RNA, 19 nt, Homo sapiens
  misc_RNA (1)...(19): siRNA sense strand
gguaagaaguauggagaga

SEQ ID NO: 1389888 - RNA, 19 nt, Homo sapiens
  misc_RNA (1)...(19): siRNA sense strand
ggaacuaaaggaacugcua

SEQ ID NO: 1389889 - RNA, 19 nt, Homo sapiens
  misc_RNA (1)...(19): siRNA sense strand
agaaagaaauugaggaacu

SEQ ID NO: 1389890 - RNA, 19 nt, Homo sapiens
  misc_RNA (1)...(19): siRNA sense strand
uaaacgagcaggugaagga

SEQ ID NO: 1389891 - RNA, 19 nt, Homo sapiens
  misc_RNA (1)...(19): siRNA sense strand
gaagaggaugauaaagaaa

SEQ ID NO: 1389892 - RNA, 19 nt, Homo sapiens
  misc_RNA (1)...(19): siRNA sense strand
ggugcuuccucaucaaauu

SEQ ID NO: 1389893 - RNA, 19 nt, Homo sapiens
  misc_RNA (1)...(19): siRNA sense strand
gaguuccaguccugccuua

SEQ ID NO: 1389894 - RNA, 19 nt, Homo sapiens
  misc_RNA (1)...(19): siRNA sense strand
aaagaaagccaaacaagag

SEQ ID NO: 1389895 - RNA, 19 nt, Homo sapiens
  misc_RNA (1)...(19): siRNA sense strand
gaauggcuguacuaaacga

SEQ ID NO: 1389896 - RNA, 19 nt, Homo sapiens
  misc_RNA (1)...(19): siRNA sense strand
agaaugguguguugggaaa

SEQ ID NO: 1389897 - RNA, 19 nt, Homo sapiens
  misc_RNA (1)...(19): siRNA sense strand
ccggaaagaugaugcaaag

SEQ ID NO: 1389898 - RNA, 19 nt, Homo sapiens
  misc_RNA (1)...(19): siRNA sense strand
agacggugcuuccucauca

SEQ ID NO: 1389899 - RNA, 19 nt, Homo sapiens
  misc_RNA (1)...(19): siRNA sense strand
cuauugaagucauugagaa

SEQ ID NO: 1389900 - RNA, 19 nt, Homo sapiens
  misc_RNA (1)...(19): siRNA sense strand
ggguacaacucucaguaug

SEQ ID NO: 1389901 - RNA, 19 nt, Homo sapiens
  misc_RNA (1)...(19): siRNA sense strand
ggauuuagcaaagaucauu

SEQ ID NO: 1389902 - RNA, 19 nt, Homo sapiens
  misc_RNA (1)...(19): siRNA sense strand
cagcugggcuuggcuuaug

SEQ ID NO: 1389903 - RNA, 19 nt, Homo sapiens
  misc_RNA (1)...(19): siRNA sense strand
gaucgucugcugaauacaa

SEQ ID NO: 1389904 - RNA, 19 nt, Homo sapiens
  misc_RNA (1)...(19): siRNA sense strand
gccaaaugauucaguccuu

SEQ ID NO: 1389905 - RNA, 19 nt, Homo sapiens
  misc_RNA (1)...(19): siRNA sense strand
ucaaauugugugacugaua

SEQ ID NO: 1389906 - RNA, 19 nt, Homo sapiens
  misc_RNA (1)...(19): siRNA sense strand
ggagagacagcuaaugagu

SEQ ID NO: 1389907 - RNA, 19 nt, Homo sapiens
  misc_RNA (1)...(19): siRNA sense strand
ugauaagaccgaagaaaug

SEQ ID NO: 1389908 - RNA, 19 nt, Homo sapiens
  misc_RNA (1)...(19): siRNA sense strand
caaaugauucaguccuuga

SEQ ID NO: 1389909 - RNA, 19 nt, Homo sapiens
  misc_RNA (1)...(19): siRNA sense strand
ggauagugaagcuaagaaa

SEQ ID NO: 1389910 - RNA, 19 nt, Homo sapiens
  misc_RNA (1)...(19): siRNA sense strand
gagcuugccugggauaugc

SEQ ID NO: 1389911 - RNA, 19 nt, Homo sapiens
  misc_RNA (1)...(19): siRNA sense strand
ggcuggagcuacaguugaa

SEQ ID NO: 1389912 - RNA, 19 nt, Homo sapiens
  misc_RNA (1)...(19): siRNA sense strand
caucaaauugugugacuga

SEQ ID NO: 1389913 - RNA, 19 nt, Homo sapiens
  misc_RNA (1)...(19): siRNA sense strand
gcucuucagucuccaugau

SEQ ID NO: 1389914 - RNA, 19 nt, Homo sapiens
  misc_RNA (1)...(19): siRNA sense strand
gguacaacucucaguauga

SEQ ID NO: 1389915 - RNA, 19 nt, Homo sapiens
  misc_RNA (1)...(19): siRNA sense strand
ggaggagauugggaaccua

SEQ ID NO: 1389916 - RNA, 19 nt, Homo sapiens
  misc_RNA (1)...(19): siRNA sense strand
gaaaccagaggaagagagu

SEQ ID NO: 1389917 - RNA, 19 nt, Homo sapiens
  misc_RNA (1)...(19): siRNA sense strand
gaaggaucgucugcugaau

SEQ ID NO: 1389918 - RNA, 19 nt, Homo sapiens
  misc_RNA (1)...(19): siRNA sense strand
cagcuagucuuuuagguaa

SEQ ID NO: 1389919 - RNA, 19 nt, Homo sapiens
  misc_RNA (1)...(19): siRNA sense strand
cggagaaguuaguguugaa

SEQ ID NO: 1389920 - RNA, 19 nt, Homo sapiens
  misc_RNA (1)...(19): siRNA sense strand
uuagagagaagauagaaga

SEQ ID NO: 1389921 - RNA, 19 nt, Homo sapiens
  misc_RNA (1)...(19): siRNA sense strand
uugaaagcacugcauguua

SEQ ID NO: 1389922 - RNA, 19 nt, Homo sapiens
  misc_RNA (1)...(19): siRNA sense strand
gaagaggaagaaggagaaa

SEQ ID NO: 1389923 - RNA, 19 nt, Homo sapiens
  misc_RNA (1)...(19): siRNA sense strand
gaaauugaggaacuaaagg

SEQ ID NO: 1389924 - RNA, 19 nt, Homo sapiens
  misc_RNA (1)...(19): siRNA sense strand
gggauaugcuggauuuagc

SEQ ID NO: 1389925 - RNA, 19 nt, Homo sapiens
  misc_RNA (1)...(19): siRNA sense strand
gguggagaguucuacuuca

SEQ ID NO: 1389926 - RNA, 19 nt, Homo sapiens
  misc_RNA (1)...(19): siRNA sense strand
ugaaggaucgucugcugaa

SEQ ID NO: 1389927 - RNA, 19 nt, Homo sapiens
  misc_RNA (1)...(19): siRNA sense strand
gcuaaugaguguggagaag

SEQ ID NO: 1389928 - RNA, 19 nt, Homo sapiens
  misc_RNA (1)...(19): siRNA sense strand
uggcaagaauggagaaugg

SEQ ID NO: 1389929 - RNA, 19 nt, Homo sapiens
  misc_RNA (1)...(19): siRNA sense strand
ggaagagaguccccggaaa

SEQ ID NO: 1389930 - RNA, 19 nt, Homo sapiens
  misc_RNA (1)...(19): siRNA sense strand
cgaaauuagagagaagaua

SEQ ID NO: 1389931 - RNA, 19 nt, Homo sapiens
  misc_RNA (1)...(19): siRNA sense strand
ggaacugcuacccgaaauu

SEQ ID NO: 1389932 - RNA, 19 nt, Homo sapiens
  misc_RNA (1)...(19): siRNA sense strand
aauggagaaugguguguug

SEQ ID NO: 1389933 - RNA, 19 nt, Homo sapiens
  misc_RNA (1)...(19): siRNA sense strand
ggaggaggaggcugagaau

SEQ ID NO: 1389934 - RNA, 19 nt, Homo sapiens
  misc_RNA (1)...(19): siRNA sense strand
gccuuaaccugcaggaaca

SEQ ID NO: 1389935 - RNA, 19 nt, Homo sapiens
  misc_RNA (1)...(19): siRNA sense strand
ccaggcacaucuuaaacuc

SEQ ID NO: 1389936 - RNA, 19 nt, Homo sapiens
  misc_RNA (1)...(19): siRNA sense strand
aaggaucgucugcugaaua

SEQ ID NO: 1389937 - RNA, 19 nt, Homo sapiens
  misc_RNA (1)...(19): siRNA sense strand
gaauggagaaugguguguu

SEQ ID NO: 1389938 - RNA, 19 nt, Homo sapiens
  misc_RNA (1)...(19): siRNA sense strand
agaaguuaguguugaaucu

SEQ ID NO: 1389939 - RNA, 19 nt, Homo sapiens
  misc_RNA (1)...(19): siRNA sense strand
ggauguggauagugaagcu

SEQ ID NO: 1389940 - RNA, 19 nt, Homo sapiens
  misc_RNA (1)...(19): siRNA sense strand
aacaagagccggaggugaa

SEQ ID NO: 1389941 - RNA, 19 nt, Homo sapiens
  misc_RNA (1)...(19): siRNA sense strand
ccaggaagcagcuagucuu

SEQ ID NO: 1389942 - RNA, 19 nt, Homo sapiens
  misc_RNA (1)...(19): siRNA sense strand
gauauuucccaccuuguca

SEQ ID NO: 1389943 - RNA, 19 nt, Homo sapiens
  misc_RNA (1)...(19): siRNA sense strand
ugaagucauugagaacaga

SEQ ID NO: 1389944 - RNA, 19 nt, Homo sapiens
  misc_RNA (1)...(19): siRNA sense strand
gauaagaccgaagaaaugc

SEQ ID NO: 1389945 - RNA, 19 nt, Homo sapiens
  misc_RNA (1)...(19): siRNA sense strand
guugaaagcacugcauguu

SEQ ID NO: 1389946 - RNA, 19 nt, Homo sapiens
  misc_RNA (1)...(19): siRNA sense strand
caggaagcagcuagucuuu

SEQ ID NO: 1389947 - RNA, 19 nt, Homo sapiens
  misc_RNA (1)...(19): siRNA sense strand
gaagucauugagaacagaa

SEQ ID NO: 1389948 - RNA, 19 nt, Homo sapiens
  misc_RNA (1)...(19): siRNA sense strand
ccacgaccgucuccuugca

SEQ ID NO: 1389949 - RNA, 19 nt, Homo sapiens
  misc_RNA (1)...(19): siRNA sense strand
aaguuaguguugaaucuga

SEQ ID NO: 1389950 - RNA, 19 nt, Homo sapiens
  misc_RNA (1)...(19): siRNA sense strand
gaaguuaguguugaaucug

SEQ ID NO: 1389951 - RNA, 19 nt, Homo sapiens
  misc_RNA (1)...(19): siRNA sense strand
agaaaugccaaaugauuca

SEQ ID NO: 1389952 - RNA, 19 nt, Homo sapiens
  misc_RNA (1)...(19): siRNA sense strand
ucggagaaguuaguguuga

SEQ ID NO: 1389953 - RNA, 19 nt, Homo sapiens
  misc_RNA (1)...(19): siRNA sense strand
gcugaauacaagaaagaaa

SEQ ID NO: 1389954 - RNA, 19 nt, Homo sapiens
  misc_RNA (1)...(19): siRNA sense strand
ggaaaucacuucuggaguu

SEQ ID NO: 1389955 - RNA, 19 nt, Homo sapiens
  misc_RNA (1)...(19): siRNA sense strand
gaaagaugaugcaaagaaa

SEQ ID NO: 1389956 - RNA, 19 nt, Homo sapiens
  misc_RNA (1)...(19): siRNA sense strand
gaagaaaugccaaaugauu

SEQ ID NO: 1389957 - RNA, 19 nt, Homo sapiens
  misc_RNA (1)...(19): siRNA sense strand
gaaagaaauugaggaacua

SEQ ID NO: 1389958 - RNA, 19 nt, Homo sapiens
  misc_RNA (1)...(19): siRNA sense strand
ugaaagcacugcauguuaa

SEQ ID NO: 1389959 - RNA, 19 nt, Homo sapiens
  misc_RNA (1)...(19): siRNA sense strand
gaacugcuacccgaaauua

SEQ ID NO: 1389960 - RNA, 19 nt, Homo sapiens
  misc_RNA (1)...(19): siRNA sense strand
ggaagcagcuagucuuuua

SEQ ID NO: 1389961 - RNA, 19 nt, Homo sapiens
  misc_RNA (1)...(19): siRNA sense strand
caaauugugugacugauau

SEQ ID NO: 1389962 - RNA, 19 nt, Homo sapiens
  misc_RNA (1)...(19): siRNA sense strand
ggaaagaugaugcaaagaa

SEQ ID NO: 1389963 - RNA, 19 nt, Homo sapiens
  misc_RNA (1)...(19): siRNA sense strand
ccgaagaaaugccaaauga

SEQ ID NO: 1389964 - RNA, 19 nt, Homo sapiens
  misc_RNA (1)...(19): siRNA sense strand
agaagaggaugauaaagaa

SEQ ID NO: 1389965 - RNA, 19 nt, Homo sapiens
  misc_RNA (1)...(19): siRNA sense strand
gaaauuagagagaagauag

SEQ ID NO: 1389966 - RNA, 19 nt, Homo sapiens
  misc_RNA (1)...(19): siRNA sense strand
gaaaucacuucuggaguug

SEQ ID NO: 1389967 - RNA, 19 nt, Homo sapiens
  misc_RNA (1)...(19): siRNA sense strand
gaagauagaagaugcaaag

SEQ ID NO: 1389968 - RNA, 19 nt, Homo sapiens
  misc_RNA (1)...(19): siRNA sense strand
cagaauggcuguacuaaac

SEQ ID NO: 1389969 - RNA, 19 nt, Homo sapiens
  misc_RNA (1)...(19): siRNA sense strand
ggaggaggcucuucagucu

SEQ ID NO: 1389970 - RNA, 19 nt, Homo sapiens
  misc_RNA (1)...(19): siRNA sense strand
cagcaaaucuauugaaguc

SEQ ID NO: 1389971 - RNA, 19 nt, Homo sapiens
  misc_RNA (1)...(19): siRNA sense strand
gcaaaucuauugaagucau

SEQ ID NO: 1389972 - RNA, 19 nt, Homo sapiens
  misc_RNA (1)...(19): siRNA sense strand
caaagaaagccaaacaaga

SEQ ID NO: 1389973 - RNA, 19 nt, Homo sapiens
  misc_RNA (1)...(19): siRNA sense strand
gcucagaagaggaugauaa

SEQ ID NO: 1389974 - RNA, 19 nt, Homo sapiens
  misc_RNA (1)...(19): siRNA sense strand
guacaacucucaguaugau

SEQ ID NO: 1389975 - RNA, 19 nt, Homo sapiens
  misc_RNA (1)...(19): siRNA sense strand
cagaagaggaugauaaaga

SEQ ID NO: 1389976 - RNA, 19 nt, Homo sapiens
  misc_RNA (1)...(19): siRNA sense strand
gcacaguucagcaaaucua

SEQ ID NO: 1389977 - RNA, 19 nt, Homo sapiens
  misc_RNA (1)...(19): siRNA sense strand
uaagaaguauggagagaca

SEQ ID NO: 1389978 - RNA, 19 nt, Homo sapiens
  misc_RNA (1)...(19): siRNA sense strand
gcaaagaaagccaaacaag

SEQ ID NO: 1389979 - RNA, 19 nt, Homo sapiens
  misc_RNA (1)...(19): siRNA sense strand
gaacuggcucugaaagcua

SEQ ID NO: 1389980 - RNA, 19 nt, Homo sapiens
  misc_RNA (1)...(19): siRNA sense strand
caagaaagaaauugaggaa

SEQ ID NO: 1389981 - RNA, 19 nt, Homo sapiens
  misc_RNA (1)...(19): siRNA sense strand
uagcugaacuggcucugaa

SEQ ID NO: 1389982 - RNA, 19 nt, Homo sapiens
  misc_RNA (1)...(19): siRNA sense strand
agagacagcuaaugagugu

SEQ ID NO: 1389983 - RNA, 19 nt, Homo sapiens
  misc_RNA (1)...(19): siRNA sense strand
ccugggauaugcuggauuu

SEQ ID NO: 1389984 - RNA, 19 nt, Homo sapiens
  misc_RNA (1)...(19): siRNA sense strand
gaaaacaagucucuucaag

SEQ ID NO: 1389985 - RNA, 19 nt, Homo sapiens
  misc_RNA (1)...(19): siRNA sense strand
ggaagaggaagaaggagaa

SEQ ID NO: 1389986 - RNA, 19 nt, Homo sapiens
  misc_RNA (1)...(19): siRNA sense strand
gaagaggaaaccagaggaa

SEQ ID NO: 1389987 - RNA, 19 nt, Homo sapiens
  misc_RNA (1)...(19): siRNA sense strand
gguaagaaguauggagaga

SEQ ID NO: 1389988 - RNA, 19 nt, Homo sapiens
  misc_RNA (1)...(19): siRNA sense strand
ggaacuaaaggaacugcua

SEQ ID NO: 1389989 - RNA, 19 nt, Homo sapiens
  misc_RNA (1)...(19): siRNA sense strand
agaaagaaauugaggaacu

SEQ ID NO: 1389990 - RNA, 19 nt, Homo sapiens
  misc_RNA (1)...(19): siRNA sense strand
uaaacgagcaggugaagga

SEQ ID NO: 1389991 - RNA, 19 nt, Homo sapiens
  misc_RNA (1)...(19): siRNA sense strand
gaagaggaugauaaagaaa

SEQ ID NO: 1389992 - RNA, 19 nt, Homo sapiens
  misc_RNA (1)...(19): siRNA sense strand
ggugcuuccucaucaaauu

SEQ ID NO: 1389993 - RNA, 19 nt, Homo sapiens
  misc_RNA (1)...(19): siRNA sense strand
gaguuccaguccugccuua

SEQ ID NO: 1389994 - RNA, 19 nt, Homo sapiens
  misc_RNA (1)...(19): siRNA sense strand
aaagaaagccaaacaagag

SEQ ID NO: 1389995 - RNA, 19 nt, Homo sapiens
  misc_RNA (1)...(19): siRNA sense strand
gcugguuucugccgacaaa

SEQ ID NO: 1389996 - RNA, 19 nt, Homo sapiens
  misc_RNA (1)...(19): siRNA sense strand
gaauggcuguacuaaacga

SEQ ID NO: 1389997 - RNA, 19 nt, Homo sapiens
  misc_RNA (1)...(19): siRNA sense strand
agaaugguguguugggaaa

SEQ ID NO: 1389998 - RNA, 19 nt, Homo sapiens
  misc_RNA (1)...(19): siRNA sense strand
ccggaaagaugaugcaaag

SEQ ID NO: 1389999 - RNA, 19 nt, Homo sapiens
  misc_RNA (1)...(19): siRNA sense strand
agacggugcuuccucauca

SEQ ID NO: 1390000 - RNA, 19 nt, Homo sapiens
  misc_RNA (1)...(19): siRNA sense strand
cuauugaagucauugagaa

SEQ ID NO: 1390001 - RNA, 19 nt, Homo sapiens
  misc_RNA (1)...(19): siRNA sense strand
ggguacaacucucaguaug

SEQ ID NO: 1390002 - RNA, 19 nt, Homo sapiens
  misc_RNA (1)...(19): siRNA sense strand
ggauuuagcaaagaucauu

SEQ ID NO: 1390003 - RNA, 19 nt, Homo sapiens
  misc_RNA (1)...(19): siRNA sense strand
cagcugggcuuggcuuaug

SEQ ID NO: 1390004 - RNA, 19 nt, Homo sapiens
  misc_RNA (1)...(19): siRNA sense strand
gaucgucugcugaauacaa

SEQ ID NO: 1390005 - RNA, 19 nt, Homo sapiens
  misc_RNA (1)...(19): siRNA sense strand
ggagagacagcuaaugagu

SEQ ID NO: 1390006 - RNA, 19 nt, Homo sapiens
  misc_RNA (1)...(19): siRNA sense strand
ucaaauugugugacugaua

SEQ ID NO: 1390007 - RNA, 19 nt, Homo sapiens
  misc_RNA (1)...(19): siRNA sense strand
gccaaaugauucaguccuu

SEQ ID NO: 1390008 - RNA, 19 nt, Homo sapiens
  misc_RNA (1)...(19): siRNA sense strand
ugauaagaccgaagaaaug

SEQ ID NO: 1390009 - RNA, 19 nt, Homo sapiens
  misc_RNA (1)...(19): siRNA sense strand
ggauagugaagcuaagaaa

SEQ ID NO: 1390010 - RNA, 19 nt, Homo sapiens
  misc_RNA (1)...(19): siRNA sense strand
caaaugauucaguccuuga

SEQ ID NO: 1390011 - RNA, 19 nt, Homo sapiens
  misc_RNA (1)...(19): siRNA sense strand
gagcuugccugggauaugc

SEQ ID NO: 1390012 - RNA, 19 nt, Homo sapiens
  misc_RNA (1)...(19): siRNA sense strand
ggcuggagcuacaguugaa

SEQ ID NO: 1390013 - RNA, 19 nt, Homo sapiens
  misc_RNA (1)...(19): siRNA sense strand
caucaaauugugugacuga

SEQ ID NO: 1390014 - RNA, 19 nt, Homo sapiens
  misc_RNA (1)...(19): siRNA sense strand
gcucuucagucuccaugau

SEQ ID NO: 1390015 - RNA, 19 nt, Homo sapiens
  misc_RNA (1)...(19): siRNA sense strand
gguacaacucucaguauga

SEQ ID NO: 1390016 - RNA, 19 nt, Homo sapiens
  misc_RNA (1)...(19): siRNA sense strand
ggaggagauugggaaccua

SEQ ID NO: 1390017 - RNA, 19 nt, Homo sapiens
  misc_RNA (1)...(19): siRNA sense strand
gaaaccagaggaagagagu

SEQ ID NO: 1390018 - RNA, 19 nt, Homo sapiens
  misc_RNA (1)...(19): siRNA sense strand
cagcuagucuuuuagguaa

SEQ ID NO: 1390019 - RNA, 19 nt, Homo sapiens
  misc_RNA (1)...(19): siRNA sense strand
gaaggaucgucugcugaau

SEQ ID NO: 1390020 - RNA, 19 nt, Homo sapiens
  misc_RNA (1)...(19): siRNA sense strand
cggagaaguuaguguugaa

SEQ ID NO: 1390021 - RNA, 19 nt, Homo sapiens
  misc_RNA (1)...(19): siRNA sense strand
uuagagagaagauagaaga

SEQ ID NO: 1390022 - RNA, 19 nt, Homo sapiens
  misc_RNA (1)...(19): siRNA sense strand
uugaaagcacugcauguua

SEQ ID NO: 1390023 - RNA, 19 nt, Homo sapiens
  misc_RNA (1)...(19): siRNA sense strand
gaagaggaagaaggagaaa

SEQ ID NO: 1390024 - RNA, 19 nt, Homo sapiens
  misc_RNA (1)...(19): siRNA sense strand
gaaauugaggaacuaaagg

SEQ ID NO: 1390025 - RNA, 19 nt, Homo sapiens
  misc_RNA (1)...(19): siRNA sense strand
gggauaugcuggauuuagc

SEQ ID NO: 1390026 - RNA, 19 nt, Homo sapiens
  misc_RNA (1)...(19): siRNA sense strand
gguggagaguucuacuuca

SEQ ID NO: 1390027 - RNA, 19 nt, Homo sapiens
  misc_RNA (1)...(19): siRNA sense strand
ugaaggaucgucugcugaa

SEQ ID NO: 1390028 - RNA, 19 nt, Homo sapiens
  misc_RNA (1)...(19): siRNA sense strand
gcuaaugaguguggagaag

SEQ ID NO: 1390029 - RNA, 19 nt, Homo sapiens
  misc_RNA (1)...(19): siRNA sense strand
uggcaagaauggagaaugg

SEQ ID NO: 1390030 - RNA, 19 nt, Homo sapiens
  misc_RNA (1)...(19): siRNA sense strand
ggaagagaguccccggaaa

SEQ ID NO: 1390031 - RNA, 19 nt, Homo sapiens
  misc_RNA (1)...(19): siRNA sense strand
cgaaauuagagagaagaua

SEQ ID NO: 1390032 - RNA, 19 nt, Homo sapiens
  misc_RNA (1)...(19): siRNA sense strand
ggaacugcuacccgaaauu

SEQ ID NO: 1390033 - RNA, 19 nt, Homo sapiens
  misc_RNA (1)...(19): siRNA sense strand
gccuuaaccugcaggaaca

SEQ ID NO: 1390034 - RNA, 19 nt, Homo sapiens
  misc_RNA (1)...(19): siRNA sense strand
ggaggaggaggcugagaau

SEQ ID NO: 1390035 - RNA, 19 nt, Homo sapiens
  misc_RNA (1)...(19): siRNA sense strand
aauggagaaugguguguug

SEQ ID NO: 1390036 - RNA, 19 nt, Homo sapiens
  misc_RNA (1)...(19): siRNA sense strand
ccaggcacaucuuaaacuc

SEQ ID NO: 1390037 - RNA, 19 nt, Homo sapiens
  misc_RNA (1)...(19): siRNA sense strand
gaauggagaaugguguguu

SEQ ID NO: 1390038 - RNA, 19 nt, Homo sapiens
  misc_RNA (1)...(19): siRNA sense strand
aaggaucgucugcugaaua

SEQ ID NO: 1390039 - RNA, 19 nt, Homo sapiens
  misc_RNA (1)...(19): siRNA sense strand
agaaguuaguguugaaucu

SEQ ID NO: 1390040 - RNA, 19 nt, Homo sapiens
  misc_RNA (1)...(19): siRNA sense strand
ggauguggauagugaagcu

SEQ ID NO: 1390041 - RNA, 19 nt, Homo sapiens
  misc_RNA (1)...(19): siRNA sense strand
aacaagagccggaggugaa

SEQ ID NO: 1390042 - RNA, 19 nt, Homo sapiens
  misc_RNA (1)...(19): siRNA sense strand
gauauuucccaccuuguca

SEQ ID NO: 1390043 - RNA, 19 nt, Homo sapiens
  misc_RNA (1)...(19): siRNA sense strand
ccaggaagcagcuagucuu

SEQ ID NO: 1390044 - RNA, 19 nt, Homo sapiens
  misc_RNA (1)...(19): siRNA sense strand
ugaagucauugagaacaga

SEQ ID NO: 1390045 - RNA, 19 nt, Homo sapiens
  misc_RNA (1)...(19): siRNA sense strand
gauaagaccgaagaaaugc

SEQ ID NO: 1390046 - RNA, 19 nt, Homo sapiens
  misc_RNA (1)...(19): siRNA sense strand
guugaaagcacugcauguu

SEQ ID NO: 1390047 - RNA, 19 nt, Homo sapiens
  misc_RNA (1)...(19): siRNA sense strand
caggaagcagcuagucuuu

SEQ ID NO: 1390048 - RNA, 19 nt, Homo sapiens
  misc_RNA (1)...(19): siRNA sense strand
gaagucauugagaacagaa

SEQ ID NO: 1390049 - RNA, 19 nt, Homo sapiens
  misc_RNA (1)...(19): siRNA sense strand
ccacgaccgucuccuugca

SEQ ID NO: 1390050 - RNA, 19 nt, Homo sapiens
  misc_RNA (1)...(19): siRNA sense strand
aaguuaguguugaaucuga

SEQ ID NO: 1390051 - RNA, 19 nt, Homo sapiens
  misc_RNA (1)...(19): siRNA sense strand
gaaguuaguguugaaucug

SEQ ID NO: 1390052 - RNA, 19 nt, Homo sapiens
  misc_RNA (1)...(19): siRNA sense strand
agaaaugccaaaugauuca

SEQ ID NO: 1390053 - RNA, 19 nt, Homo sapiens
  misc_RNA (1)...(19): siRNA sense strand
ucggagaaguuaguguuga

SEQ ID NO: 1390054 - RNA, 19 nt, Homo sapiens
  misc_RNA (1)...(19): siRNA sense strand
ggaaaucacuucuggaguu

SEQ ID NO: 1390055 - RNA, 19 nt, Homo sapiens
  misc_RNA (1)...(19): siRNA sense strand
gaaagaugaugcaaagaaa

SEQ ID NO: 1390056 - RNA, 19 nt, Homo sapiens
  misc_RNA (1)...(19): siRNA sense strand
gaagaaaugccaaaugauu

SEQ ID NO: 1390057 - RNA, 19 nt, Homo sapiens
  misc_RNA (1)...(19): siRNA sense strand
gaaagaaauugaggaacua

SEQ ID NO: 1390058 - RNA, 19 nt, Homo sapiens
  misc_RNA (1)...(19): siRNA sense strand
ugaaagcacugcauguuaa

SEQ ID NO: 1390059 - RNA, 19 nt, Homo sapiens
  misc_RNA (1)...(19): siRNA sense strand
gaacugcuacccgaaauua

SEQ ID NO: 1390060 - RNA, 19 nt, Homo sapiens
  misc_RNA (1)...(19): siRNA sense strand
ggaagcagcuagucuuuua

SEQ ID NO: 1390061 - RNA, 19 nt, Homo sapiens
  misc_RNA (1)...(19): siRNA sense strand
caaauugugugacugauau

SEQ ID NO: 1390062 - RNA, 19 nt, Homo sapiens
  misc_RNA (1)...(19): siRNA sense strand
ggaaagaugaugcaaagaa

SEQ ID NO: 1390063 - RNA, 19 nt, Homo sapiens
  misc_RNA (1)...(19): siRNA sense strand
ccgaagaaaugccaaauga

SEQ ID NO: 1390064 - RNA, 19 nt, Homo sapiens
  misc_RNA (1)...(19): siRNA sense strand
agaagaggaugauaaagaa

SEQ ID NO: 1390065 - RNA, 19 nt, Homo sapiens
  misc_RNA (1)...(19): siRNA sense strand
gaaauuagagagaagauag

SEQ ID NO: 1390066 - RNA, 19 nt, Homo sapiens
  misc_RNA (1)...(19): siRNA sense strand
gaaaucacuucuggaguug

SEQ ID NO: 1390067 - RNA, 19 nt, Homo sapiens
  misc_RNA (1)...(19): siRNA sense strand
gaagauagaagaugcaaag

SEQ ID NO: 1390068 - RNA, 19 nt, Homo sapiens
  misc_RNA (1)...(19): siRNA sense strand
cagaauggcuguacuaaac

SEQ ID NO: 1390069 - RNA, 19 nt, Homo sapiens
  misc_RNA (1)...(19): siRNA sense strand
ggaggaggcucuucagucu

SEQ ID NO: 1390070 - RNA, 19 nt, Homo sapiens
  misc_RNA (1)...(19): siRNA sense strand
cagcaaaucuauugaaguc

SEQ ID NO: 1390071 - RNA, 19 nt, Homo sapiens
  misc_RNA (1)...(19): siRNA sense strand
gcaaaucuauugaagucau

SEQ ID NO: 1390072 - RNA, 19 nt, Homo sapiens
  misc_RNA (1)...(19): siRNA sense strand
caaagaaagccaaacaaga

SEQ ID NO: 1390073 - RNA, 19 nt, Homo sapiens
  misc_RNA (1)...(19): siRNA sense strand
gcucagaagaggaugauaa

SEQ ID NO: 1390074 - RNA, 19 nt, Homo sapiens
  misc_RNA (1)...(19): siRNA sense strand
guacaacucucaguaugau

SEQ ID NO: 1390075 - RNA, 19 nt, Homo sapiens
  misc_RNA (1)...(19): siRNA sense strand
cagaagaggaugauaaaga

SEQ ID NO: 1390076 - RNA, 19 nt, Homo sapiens
  misc_RNA (1)...(19): siRNA sense strand
gcacaguucagcaaaucua

SEQ ID NO: 1390077 - RNA, 19 nt, Homo sapiens
  misc_RNA (1)...(19): siRNA sense strand
uaagaaguauggagagaca

SEQ ID NO: 1390078 - RNA, 19 nt, Homo sapiens
  misc_RNA (1)...(19): siRNA sense strand
gcaaagaaagccaaacaag

SEQ ID NO: 1390079 - RNA, 19 nt, Homo sapiens
  misc_RNA (1)...(19): siRNA sense strand
gaacuggcucugaaagcua

SEQ ID NO: 1390080 - RNA, 19 nt, Homo sapiens
  misc_RNA (1)...(19): siRNA sense strand
caagaaagaaauugaggaa

SEQ ID NO: 1390081 - RNA, 19 nt, Homo sapiens
  misc_RNA (1)...(19): siRNA sense strand
uagcugaacuggcucugaa

SEQ ID NO: 1390082 - RNA, 19 nt, Homo sapiens
  misc_RNA (1)...(19): siRNA sense strand
agagacagcuaaugagugu

SEQ ID NO: 1390083 - RNA, 19 nt, Homo sapiens
  misc_RNA (1)...(19): siRNA sense strand
ccugggauaugcuggauuu

SEQ ID NO: 1390084 - RNA, 19 nt, Homo sapiens
  misc_RNA (1)...(19): siRNA sense strand
gaaaacaagucucuucaag

SEQ ID NO: 1390085 - RNA, 19 nt, Homo sapiens
  misc_RNA (1)...(19): siRNA sense strand
ggaagaggaagaaggagaa

SEQ ID NO: 1390086 - RNA, 19 nt, Homo sapiens
  misc_RNA (1)...(19): siRNA sense strand
gaagaggaaaccagaggaa

SEQ ID NO: 1390087 - RNA, 19 nt, Homo sapiens
  misc_RNA (1)...(19): siRNA sense strand
gguaagaaguauggagaga

SEQ ID NO: 1390088 - RNA, 19 nt, Homo sapiens
  misc_RNA (1)...(19): siRNA sense strand
ggaacuaaaggaacugcua

SEQ ID NO: 1390089 - RNA, 19 nt, Homo sapiens
  misc_RNA (1)...(19): siRNA sense strand
agaaagaaauugaggaacu

SEQ ID NO: 1390090 - RNA, 19 nt, Homo sapiens
  misc_RNA (1)...(19): siRNA sense strand
uaaacgagcaggugaagga

SEQ ID NO: 1390091 - RNA, 19 nt, Homo sapiens
  misc_RNA (1)...(19): siRNA sense strand
gaagaggaugauaaagaaa

SEQ ID NO: 1390092 - RNA, 19 nt, Homo sapiens
  misc_RNA (1)...(19): siRNA sense strand
ggugcuuccucaucaaauu

SEQ ID NO: 1390093 - RNA, 19 nt, Homo sapiens
  misc_RNA (1)...(19): siRNA sense strand
gaguuccaguccugccuua

SEQ ID NO: 1390094 - RNA, 19 nt, Homo sapiens
  misc_RNA (1)...(19): siRNA sense strand
aaagaaagccaaacaagag

SEQ ID NO: 1390095 - RNA, 19 nt, Homo sapiens
  misc_RNA (1)...(19): siRNA sense strand
gcugguuucugccgacaaa

SEQ ID NO: 1390096 - RNA, 19 nt, Homo sapiens
  misc_RNA (1)...(19): siRNA sense strand
gaauggcuguacuaaacga

SEQ ID NO: 1390097 - RNA, 19 nt, Homo sapiens
  misc_RNA (1)...(19): siRNA sense strand
agaaugguguguugggaaa

SEQ ID NO: 1390098 - RNA, 19 nt, Homo sapiens
  misc_RNA (1)...(19): siRNA sense strand
ccggaaagaugaugcaaag

SEQ ID NO: 1390099 - RNA, 19 nt, Homo sapiens
  misc_RNA (1)...(19): siRNA sense strand
agacggugcuuccucauca

SEQ ID NO: 1390100 - RNA, 19 nt, Homo sapiens
  misc_RNA (1)...(19): siRNA sense strand
cuauugaagucauugagaa

SEQ ID NO: 1390101 - RNA, 19 nt, Homo sapiens
  misc_RNA (1)...(19): siRNA sense strand
ggguacaacucucaguaug

SEQ ID NO: 1390102 - RNA, 19 nt, Homo sapiens
  misc_RNA (1)...(19): siRNA sense strand
ggauuuagcaaagaucauu

SEQ ID NO: 1390103 - RNA, 19 nt, Homo sapiens
  misc_RNA (1)...(19): siRNA sense strand
cagcugggcuuggcuuaug

SEQ ID NO: 1390104 - RNA, 19 nt, Homo sapiens
  misc_RNA (1)...(19): siRNA sense strand
gaucgucugcugaauacaa

SEQ ID NO: 1390105 - RNA, 19 nt, Homo sapiens
  misc_RNA (1)...(19): siRNA sense strand
ggagagacagcuaaugagu

SEQ ID NO: 1390106 - RNA, 19 nt, Homo sapiens
  misc_RNA (1)...(19): siRNA sense strand
ucaaauugugugacugaua

SEQ ID NO: 1390107 - RNA, 19 nt, Homo sapiens
  misc_RNA (1)...(19): siRNA sense strand
gccaaaugauucaguccuu

SEQ ID NO: 1390108 - RNA, 19 nt, Homo sapiens
  misc_RNA (1)...(19): siRNA sense strand
ugauaagaccgaagaaaug

SEQ ID NO: 1390109 - RNA, 19 nt, Homo sapiens
  misc_RNA (1)...(19): siRNA sense strand
ggauagugaagcuaagaaa

SEQ ID NO: 1390110 - RNA, 19 nt, Homo sapiens
  misc_RNA (1)...(19): siRNA sense strand
caaaugauucaguccuuga

SEQ ID NO: 1390111 - RNA, 19 nt, Homo sapiens
  misc_RNA (1)...(19): siRNA sense strand
gagcuugccugggauaugc

SEQ ID NO: 1390112 - RNA, 19 nt, Homo sapiens
  misc_RNA (1)...(19): siRNA sense strand
ggcuggagcuacaguugaa

SEQ ID NO: 1390113 - RNA, 19 nt, Homo sapiens
  misc_RNA (1)...(19): siRNA sense strand
caucaaauugugugacuga

SEQ ID NO: 1390114 - RNA, 19 nt, Homo sapiens
  misc_RNA (1)...(19): siRNA sense strand
gcucuucagucuccaugau

SEQ ID NO: 1390115 - RNA, 19 nt, Homo sapiens
  misc_RNA (1)...(19): siRNA sense strand
gguacaacucucaguauga

SEQ ID NO: 1390116 - RNA, 19 nt, Homo sapiens
  misc_RNA (1)...(19): siRNA sense strand
ggaggagauugggaaccua

SEQ ID NO: 1390117 - RNA, 19 nt, Homo sapiens
  misc_RNA (1)...(19): siRNA sense strand
gaaaccagaggaagagagu

SEQ ID NO: 1390118 - RNA, 19 nt, Homo sapiens
  misc_RNA (1)...(19): siRNA sense strand
cagcuagucuuuuagguaa

SEQ ID NO: 1390119 - RNA, 19 nt, Homo sapiens
  misc_RNA (1)...(19): siRNA sense strand
gaaggaucgucugcugaau

SEQ ID NO: 1390120 - RNA, 19 nt, Homo sapiens
  misc_RNA (1)...(19): siRNA sense strand
cggagaaguuaguguugaa

SEQ ID NO: 1390121 - RNA, 19 nt, Homo sapiens
  misc_RNA (1)...(19): siRNA sense strand
uuagagagaagauagaaga

SEQ ID NO: 1390122 - RNA, 19 nt, Homo sapiens
  misc_RNA (1)...(19): siRNA sense strand
uugaaagcacugcauguua

SEQ ID NO: 1390123 - RNA, 19 nt, Homo sapiens
  misc_RNA (1)...(19): siRNA sense strand
gaagaggaagaaggagaaa

SEQ ID NO: 1390124 - RNA, 19 nt, Homo sapiens
  misc_RNA (1)...(19): siRNA sense strand
gaaauugaggaacuaaagg

SEQ ID NO: 1390125 - RNA, 19 nt, Homo sapiens
  misc_RNA (1)...(19): siRNA sense strand
gggauaugcuggauuuagc

SEQ ID NO: 1390126 - RNA, 19 nt, Homo sapiens
  misc_RNA (1)...(19): siRNA sense strand
gguggagaguucuacuuca

SEQ ID NO: 1390127 - RNA, 19 nt, Homo sapiens
  misc_RNA (1)...(19): siRNA sense strand
ugaaggaucgucugcugaa

SEQ ID NO: 1390128 - RNA, 19 nt, Homo sapiens
  misc_RNA (1)...(19): siRNA sense strand
gcuaaugaguguggagaag

SEQ ID NO: 1390129 - RNA, 19 nt, Homo sapiens
  misc_RNA (1)...(19): siRNA sense strand
uggcaagaauggagaaugg

SEQ ID NO: 1390130 - RNA, 19 nt, Homo sapiens
  misc_RNA (1)...(19): siRNA sense strand
ggaagagaguccccggaaa

SEQ ID NO: 1390131 - RNA, 19 nt, Homo sapiens
  misc_RNA (1)...(19): siRNA sense strand
cgaaauuagagagaagaua

SEQ ID NO: 1390132 - RNA, 19 nt, Homo sapiens
  misc_RNA (1)...(19): siRNA sense strand
ggaacugcuacccgaaauu

SEQ ID NO: 1390133 - RNA, 19 nt, Homo sapiens
  misc_RNA (1)...(19): siRNA sense strand
gccuuaaccugcaggaaca

SEQ ID NO: 1390134 - RNA, 19 nt, Homo sapiens
  misc_RNA (1)...(19): siRNA sense strand
ggaggaggaggcugagaau

SEQ ID NO: 1390135 - RNA, 19 nt, Homo sapiens
  misc_RNA (1)...(19): siRNA sense strand
aauggagaaugguguguug

SEQ ID NO: 1390136 - RNA, 19 nt, Homo sapiens
  misc_RNA (1)...(19): siRNA sense strand
ccaggcacaucuuaaacuc

SEQ ID NO: 1390137 - RNA, 19 nt, Homo sapiens
  misc_RNA (1)...(19): siRNA sense strand
gaauggagaaugguguguu

SEQ ID NO: 1390138 - RNA, 19 nt, Homo sapiens
  misc_RNA (1)...(19): siRNA sense strand
aaggaucgucugcugaaua

SEQ ID NO: 1390139 - RNA, 19 nt, Homo sapiens
  misc_RNA (1)...(19): siRNA sense strand
agaaguuaguguugaaucu

SEQ ID NO: 1390140 - RNA, 19 nt, Homo sapiens
  misc_RNA (1)...(19): siRNA sense strand
ggauguggauagugaagcu

SEQ ID NO: 1390141 - RNA, 19 nt, Homo sapiens
  misc_RNA (1)...(19): siRNA sense strand
aacaagagccggaggugaa

SEQ ID NO: 1390142 - RNA, 19 nt, Homo sapiens
  misc_RNA (1)...(19): siRNA sense strand
gauauuucccaccuuguca

SEQ ID NO: 1390143 - RNA, 19 nt, Homo sapiens
  misc_RNA (1)...(19): siRNA sense strand
ccaggaagcagcuagucuu

SEQ ID NO: 1390144 - RNA, 19 nt, Homo sapiens
  misc_RNA (1)...(19): siRNA sense strand
ugaagucauugagaacaga

SEQ ID NO: 1390145 - RNA, 19 nt, Homo sapiens
  misc_RNA (1)...(19): siRNA sense strand
gauaagaccgaagaaaugc

SEQ ID NO: 1390146 - RNA, 19 nt, Homo sapiens
  misc_RNA (1)...(19): siRNA sense strand
guugaaagcacugcauguu

SEQ ID NO: 1390147 - RNA, 19 nt, Homo sapiens
  misc_RNA (1)...(19): siRNA sense strand
caggaagcagcuagucuuu

SEQ ID NO: 1390148 - RNA, 19 nt, Homo sapiens
  misc_RNA (1)...(19): siRNA sense strand
gaagucauugagaacagaa

SEQ ID NO: 1390149 - RNA, 19 nt, Homo sapiens
  misc_RNA (1)...(19): siRNA sense strand
ccacgaccgucuccuugca

SEQ ID NO: 1390150 - RNA, 19 nt, Homo sapiens
  misc_RNA (1)...(19): siRNA sense strand
aaguuaguguugaaucuga

SEQ ID NO: 1390151 - RNA, 19 nt, Homo sapiens
  misc_RNA (1)...(19): siRNA sense strand
gaaguuaguguugaaucug

SEQ ID NO: 1390152 - RNA, 19 nt, Homo sapiens
  misc_RNA (1)...(19): siRNA sense strand
agaaaugccaaaugauuca

SEQ ID NO: 1390153 - RNA, 19 nt, Homo sapiens
  misc_RNA (1)...(19): siRNA sense strand
ucggagaaguuaguguuga

SEQ ID NO: 1390154 - RNA, 19 nt, Homo sapiens
  misc_RNA (1)...(19): siRNA sense strand
ggaaaucacuucuggaguu

SEQ ID NO: 1390155 - RNA, 19 nt, Homo sapiens
  misc_RNA (1)...(19): siRNA sense strand
gaaagaugaugcaaagaaa

SEQ ID NO: 1390156 - RNA, 19 nt, Homo sapiens
  misc_RNA (1)...(19): siRNA sense strand
gaagaaaugccaaaugauu

SEQ ID NO: 1390157 - RNA, 19 nt, Homo sapiens
  misc_RNA (1)...(19): siRNA sense strand
gaaagaaauugaggaacua

SEQ ID NO: 1390158 - RNA, 19 nt, Homo sapiens
  misc_RNA (1)...(19): siRNA sense strand
ugaaagcacugcauguuaa

SEQ ID NO: 1390159 - RNA, 19 nt, Homo sapiens
  misc_RNA (1)...(19): siRNA sense strand
gaacugcuacccgaaauua

SEQ ID NO: 1390160 - RNA, 19 nt, Homo sapiens
  misc_RNA (1)...(19): siRNA sense strand
ggaagcagcuagucuuuua

SEQ ID NO: 1390161 - RNA, 19 nt, Homo sapiens
  misc_RNA (1)...(19): siRNA sense strand
caaauugugugacugauau

SEQ ID NO: 1390162 - RNA, 19 nt, Homo sapiens
  misc_RNA (1)...(19): siRNA sense strand
ggaaagaugaugcaaagaa

SEQ ID NO: 1390163 - RNA, 19 nt, Homo sapiens
  misc_RNA (1)...(19): siRNA sense strand
ccgaagaaaugccaaauga

SEQ ID NO: 1390164 - RNA, 19 nt, Homo sapiens
  misc_RNA (1)...(19): siRNA sense strand
agaagaggaugauaaagaa

SEQ ID NO: 1390165 - RNA, 19 nt, Homo sapiens
  misc_RNA (1)...(19): siRNA sense strand
gaaauuagagagaagauag

SEQ ID NO: 1390166 - RNA, 19 nt, Homo sapiens
  misc_RNA (1)...(19): siRNA sense strand
gaaaucacuucuggaguug

SEQ ID NO: 1390167 - RNA, 19 nt, Homo sapiens
  misc_RNA (1)...(19): siRNA sense strand
gaagauagaagaugcaaag

SEQ ID NO: 1390168 - RNA, 19 nt, Homo sapiens
  misc_RNA (1)...(19): siRNA sense strand
cagaauggcuguacuaaac

SEQ ID NO: 1390169 - RNA, 19 nt, Homo sapiens
  misc_RNA (1)...(19): siRNA sense strand
ggaggaggcucuucagucu

SEQ ID NO: 1390170 - RNA, 19 nt, Homo sapiens
  misc_RNA (1)...(19): siRNA sense strand
cagcaaaucuauugaaguc

SEQ ID NO: 1390171 - RNA, 19 nt, Homo sapiens
  misc_RNA (1)...(19): siRNA sense strand
gcaaaucuauugaagucau

SEQ ID NO: 1390172 - RNA, 19 nt, Homo sapiens
  misc_RNA (1)...(19): siRNA sense strand
caaagaaagccaaacaaga

SEQ ID NO: 1390173 - RNA, 19 nt, Homo sapiens
  misc_RNA (1)...(19): siRNA sense strand
gcucagaagaggaugauaa

SEQ ID NO: 1390174 - RNA, 19 nt, Homo sapiens
  misc_RNA (1)...(19): siRNA sense strand
guacaacucucaguaugau

SEQ ID NO: 1390175 - RNA, 19 nt, Homo sapiens
  misc_RNA (1)...(19): siRNA sense strand
cagaagaggaugauaaaga

SEQ ID NO: 1390176 - RNA, 19 nt, Homo sapiens
  misc_RNA (1)...(19): siRNA sense strand
gcacaguucagcaaaucua

SEQ ID NO: 1390177 - RNA, 19 nt, Homo sapiens
  misc_RNA (1)...(19): siRNA sense strand
uaagaaguauggagagaca

SEQ ID NO: 1390178 - RNA, 19 nt, Homo sapiens
  misc_RNA (1)...(19): siRNA sense strand
gcaaagaaagccaaacaag

SEQ ID NO: 1390179 - RNA, 19 nt, Homo sapiens
  misc_RNA (1)...(19): siRNA sense strand
gaacuggcucugaaagcua

SEQ ID NO: 1390180 - RNA, 19 nt, Homo sapiens
  misc_RNA (1)...(19): siRNA sense strand
caagaaagaaauugaggaa

SEQ ID NO: 1390181 - RNA, 19 nt, Homo sapiens
  misc_RNA (1)...(19): siRNA sense strand
uagcugaacuggcucugaa

SEQ ID NO: 1390182 - RNA, 19 nt, Homo sapiens
  misc_RNA (1)...(19): siRNA sense strand
agagacagcuaaugagugu

SEQ ID NO: 1390183 - RNA, 19 nt, Homo sapiens
  misc_RNA (1)...(19): siRNA sense strand
ccugggauaugcuggauuu

SEQ ID NO: 1390184 - RNA, 19 nt, Homo sapiens
  misc_RNA (1)...(19): siRNA sense strand
gaaaacaagucucuucaag

SEQ ID NO: 1390185 - RNA, 19 nt, Homo sapiens
  misc_RNA (1)...(19): siRNA sense strand
ggaagaggaagaaggagaa

SEQ ID NO: 1390186 - RNA, 19 nt, Homo sapiens
  misc_RNA (1)...(19): siRNA sense strand
gaagaggaaaccagaggaa

SEQ ID NO: 1390187 - RNA, 19 nt, Homo sapiens
  misc_RNA (1)...(19): siRNA sense strand
gguaagaaguauggagaga

SEQ ID NO: 1390188 - RNA, 19 nt, Homo sapiens
  misc_RNA (1)...(19): siRNA sense strand
ggaacuaaaggaacugcua

SEQ ID NO: 1390189 - RNA, 19 nt, Homo sapiens
  misc_RNA (1)...(19): siRNA sense strand
agaaagaaauugaggaacu

SEQ ID NO: 1390190 - RNA, 19 nt, Homo sapiens
  misc_RNA (1)...(19): siRNA sense strand
uaaacgagcaggugaagga

SEQ ID NO: 1390191 - RNA, 19 nt, Homo sapiens
  misc_RNA (1)...(19): siRNA sense strand
gaagaggaugauaaagaaa

SEQ ID NO: 1390192 - RNA, 19 nt, Homo sapiens
  misc_RNA (1)...(19): siRNA sense strand
ggugcuuccucaucaaauu

SEQ ID NO: 1390193 - RNA, 19 nt, Homo sapiens
  misc_RNA (1)...(19): siRNA sense strand
gaguuccaguccugccuua

SEQ ID NO: 1390194 - RNA, 19 nt, Homo sapiens
  misc_RNA (1)...(19): siRNA sense strand
aaagaaagccaaacaagag

SEQ ID NO: 1390195 - RNA, 19 nt, Homo sapiens
  misc_RNA (1)...(19): siRNA sense strand
gaauggcuguacuaaacga

SEQ ID NO: 1390196 - RNA, 19 nt, Homo sapiens
  misc_RNA (1)...(19): siRNA sense strand
agaaugguguguugggaaa

SEQ ID NO: 1390197 - RNA, 19 nt, Homo sapiens
  misc_RNA (1)...(19): siRNA sense strand
ccggaaagaugaugcaaag

SEQ ID NO: 1390198 - RNA, 19 nt, Homo sapiens
  misc_RNA (1)...(19): siRNA sense strand
agacggugcuuccucauca

SEQ ID NO: 1390199 - RNA, 19 nt, Homo sapiens
  misc_RNA (1)...(19): siRNA sense strand
cuauugaagucauugagaa

SEQ ID NO: 1390200 - RNA, 19 nt, Homo sapiens
  misc_RNA (1)...(19): siRNA sense strand
ggguacaacucucaguaug

SEQ ID NO: 1390201 - RNA, 19 nt, Homo sapiens
  misc_RNA (1)...(19): siRNA sense strand
ggauuuagcaaagaucauu

SEQ ID NO: 1390202 - RNA, 19 nt, Homo sapiens
  misc_RNA (1)...(19): siRNA sense strand
cagcugggcuuggcuuaug

SEQ ID NO: 1390203 - RNA, 19 nt, Homo sapiens
  misc_RNA (1)...(19): siRNA sense strand
gaucgucugcugaauacaa

SEQ ID NO: 1390204 - RNA, 19 nt, Homo sapiens
  misc_RNA (1)...(19): siRNA sense strand
gccaaaugauucaguccuu

SEQ ID NO: 1390205 - RNA, 19 nt, Homo sapiens
  misc_RNA (1)...(19): siRNA sense strand
ucaaauugugugacugaua

SEQ ID NO: 1390206 - RNA, 19 nt, Homo sapiens
  misc_RNA (1)...(19): siRNA sense strand
ggagagacagcuaaugagu

SEQ ID NO: 1390207 - RNA, 19 nt, Homo sapiens
  misc_RNA (1)...(19): siRNA sense strand
ugauaagaccgaagaaaug

SEQ ID NO: 1390208 - RNA, 19 nt, Homo sapiens
  misc_RNA (1)...(19): siRNA sense strand
caaaugauucaguccuuga

SEQ ID NO: 1390209 - RNA, 19 nt, Homo sapiens
  misc_RNA (1)...(19): siRNA sense strand
ggauagugaagcuaagaaa

SEQ ID NO: 1390210 - RNA, 19 nt, Homo sapiens
  misc_RNA (1)...(19): siRNA sense strand
gagcuugccugggauaugc

SEQ ID NO: 1390211 - RNA, 19 nt, Homo sapiens
  misc_RNA (1)...(19): siRNA sense strand
ggcuggagcuacaguugaa

SEQ ID NO: 1390212 - RNA, 19 nt, Homo sapiens
  misc_RNA (1)...(19): siRNA sense strand
caucaaauugugugacuga

SEQ ID NO: 1390213 - RNA, 19 nt, Homo sapiens
  misc_RNA (1)...(19): siRNA sense strand
gcucuucagucuccaugau

SEQ ID NO: 1390214 - RNA, 19 nt, Homo sapiens
  misc_RNA (1)...(19): siRNA sense strand
gguacaacucucaguauga

SEQ ID NO: 1390215 - RNA, 19 nt, Homo sapiens
  misc_RNA (1)...(19): siRNA sense strand
ggaggagauugggaaccua

SEQ ID NO: 1390216 - RNA, 19 nt, Homo sapiens
  misc_RNA (1)...(19): siRNA sense strand
gaaaccagaggaagagagu

SEQ ID NO: 1390217 - RNA, 19 nt, Homo sapiens
  misc_RNA (1)...(19): siRNA sense strand
gaaggaucgucugcugaau

SEQ ID NO: 1390218 - RNA, 19 nt, Homo sapiens
  misc_RNA (1)...(19): siRNA sense strand
cagcuagucuuuuagguaa

SEQ ID NO: 1390219 - RNA, 19 nt, Homo sapiens
  misc_RNA (1)...(19): siRNA sense strand
cggagaaguuaguguugaa

SEQ ID NO: 1390220 - RNA, 19 nt, Homo sapiens
  misc_RNA (1)...(19): siRNA sense strand
uuagagagaagauagaaga

SEQ ID NO: 1390221 - RNA, 19 nt, Homo sapiens
  misc_RNA (1)...(19): siRNA sense strand
uugaaagcacugcauguua

SEQ ID NO: 1390222 - RNA, 19 nt, Homo sapiens
  misc_RNA (1)...(19): siRNA sense strand
gaagaggaagaaggagaaa

SEQ ID NO: 1390223 - RNA, 19 nt, Homo sapiens
  misc_RNA (1)...(19): siRNA sense strand
gaaauugaggaacuaaagg

SEQ ID NO: 1390224 - RNA, 19 nt, Homo sapiens
  misc_RNA (1)...(19): siRNA sense strand
gggauaugcuggauuuagc

SEQ ID NO: 1390225 - RNA, 19 nt, Homo sapiens
  misc_RNA (1)...(19): siRNA sense strand
gguggagaguucuacuuca

SEQ ID NO: 1390226 - RNA, 19 nt, Homo sapiens
  misc_RNA (1)...(19): siRNA sense strand
ugaaggaucgucugcugaa

SEQ ID NO: 1390227 - RNA, 19 nt, Homo sapiens
  misc_RNA (1)...(19): siRNA sense strand
gcuaaugaguguggagaag

SEQ ID NO: 1390228 - RNA, 19 nt, Homo sapiens
  misc_RNA (1)...(19): siRNA sense strand
uggcaagaauggagaaugg

SEQ ID NO: 1390229 - RNA, 19 nt, Homo sapiens
  misc_RNA (1)...(19): siRNA sense strand
ggaagagaguccccggaaa

SEQ ID NO: 1390230 - RNA, 19 nt, Homo sapiens
  misc_RNA (1)...(19): siRNA sense strand
cgaaauuagagagaagaua

SEQ ID NO: 1390231 - RNA, 19 nt, Homo sapiens
  misc_RNA (1)...(19): siRNA sense strand
ggaacugcuacccgaaauu

SEQ ID NO: 1390232 - RNA, 19 nt, Homo sapiens
  misc_RNA (1)...(19): siRNA sense strand
aauggagaaugguguguug

SEQ ID NO: 1390233 - RNA, 19 nt, Homo sapiens
  misc_RNA (1)...(19): siRNA sense strand
ggaggaggaggcugagaau

SEQ ID NO: 1390234 - RNA, 19 nt, Homo sapiens
  misc_RNA (1)...(19): siRNA sense strand
gccuuaaccugcaggaaca

SEQ ID NO: 1390235 - RNA, 19 nt, Homo sapiens
  misc_RNA (1)...(19): siRNA sense strand
ccaggcacaucuuaaacuc

SEQ ID NO: 1390236 - RNA, 19 nt, Homo sapiens
  misc_RNA (1)...(19): siRNA sense strand
aaggaucgucugcugaaua

SEQ ID NO: 1390237 - RNA, 19 nt, Homo sapiens
  misc_RNA (1)...(19): siRNA sense strand
gaauggagaaugguguguu

SEQ ID NO: 1390238 - RNA, 19 nt, Homo sapiens
  misc_RNA (1)...(19): siRNA sense strand
agaaguuaguguugaaucu

SEQ ID NO: 1390239 - RNA, 19 nt, Homo sapiens
  misc_RNA (1)...(19): siRNA sense strand
ggauguggauagugaagcu

SEQ ID NO: 1390240 - RNA, 19 nt, Homo sapiens
  misc_RNA (1)...(19): siRNA sense strand
aacaagagccggaggugaa

SEQ ID NO: 1390241 - RNA, 19 nt, Homo sapiens
  misc_RNA (1)...(19): siRNA sense strand
ccaggaagcagcuagucuu

SEQ ID NO: 1390242 - RNA, 19 nt, Homo sapiens
  misc_RNA (1)...(19): siRNA sense strand
gauauuucccaccuuguca

SEQ ID NO: 1390243 - RNA, 19 nt, Homo sapiens
  misc_RNA (1)...(19): siRNA sense strand
ugaagucauugagaacaga

SEQ ID NO: 1390244 - RNA, 19 nt, Homo sapiens
  misc_RNA (1)...(19): siRNA sense strand
gauaagaccgaagaaaugc

SEQ ID NO: 1390245 - RNA, 19 nt, Homo sapiens
  misc_RNA (1)...(19): siRNA sense strand
guugaaagcacugcauguu

SEQ ID NO: 1390246 - RNA, 19 nt, Homo sapiens
  misc_RNA (1)...(19): siRNA sense strand
caggaagcagcuagucuuu

SEQ ID NO: 1390247 - RNA, 19 nt, Homo sapiens
  misc_RNA (1)...(19): siRNA sense strand
gaagucauugagaacagaa

SEQ ID NO: 1390248 - RNA, 19 nt, Homo sapiens
  misc_RNA (1)...(19): siRNA sense strand
ccacgaccgucuccuugca

SEQ ID NO: 1390249 - RNA, 19 nt, Homo sapiens
  misc_RNA (1)...(19): siRNA sense strand
aaguuaguguugaaucuga

SEQ ID NO: 1390250 - RNA, 19 nt, Homo sapiens
  misc_RNA (1)...(19): siRNA sense strand
gaaguuaguguugaaucug

SEQ ID NO: 1390251 - RNA, 19 nt, Homo sapiens
  misc_RNA (1)...(19): siRNA sense strand
agaaaugccaaaugauuca

SEQ ID NO: 1390252 - RNA, 19 nt, Homo sapiens
  misc_RNA (1)...(19): siRNA sense strand
ucggagaaguuaguguuga

SEQ ID NO: 1390253 - RNA, 19 nt, Homo sapiens
  misc_RNA (1)...(19): siRNA sense strand
gcugaauacaagaaagaaa

SEQ ID NO: 1390254 - RNA, 19 nt, Homo sapiens
  misc_RNA (1)...(19): siRNA sense strand
caacauagauccugaaauu

SEQ ID NO: 1390255 - RNA, 19 nt, Homo sapiens
  misc_RNA (1)...(19): siRNA sense strand
gaacauagaucaagacacu

SEQ ID NO: 1390256 - RNA, 19 nt, Homo sapiens
  misc_RNA (1)...(19): siRNA sense strand
gcaaggagcuggagaaucu

SEQ ID NO: 1390257 - RNA, 19 nt, Homo sapiens
  misc_RNA (1)...(19): siRNA sense strand
ccaaggagcuggaugcauu

SEQ ID NO: 1390258 - RNA, 19 nt, Homo sapiens
  misc_RNA (1)...(19): siRNA sense strand
gcaacgaucuugucuucuu

SEQ ID NO: 1390259 - RNA, 19 nt, Homo sapiens
  misc_RNA (1)...(19): siRNA sense strand
ggacuggacuucauguuuc

SEQ ID NO: 1390260 - RNA, 19 nt, Homo sapiens
  misc_RNA (1)...(19): siRNA sense strand
gaauaugacucgauuucug

SEQ ID NO: 1390261 - RNA, 19 nt, Homo sapiens
  misc_RNA (1)...(19): siRNA sense strand
ggacuucccaguuuccuua

SEQ ID NO: 1390262 - RNA, 19 nt, Homo sapiens
  misc_RNA (1)...(19): siRNA sense strand
ccagugacuuugagauuaa

SEQ ID NO: 1390263 - RNA, 19 nt, Homo sapiens
  misc_RNA (1)...(19): siRNA sense strand
gccagugacuuugagauua

SEQ ID NO: 1390264 - RNA, 19 nt, Homo sapiens
  misc_RNA (1)...(19): siRNA sense strand
ucaaggauuugcuaaagaa

SEQ ID NO: 1390265 - RNA, 19 nt, Homo sapiens
  misc_RNA (1)...(19): siRNA sense strand
gaaacuggauuuggaagau

SEQ ID NO: 1390266 - RNA, 19 nt, Homo sapiens
  misc_RNA (1)...(19): siRNA sense strand
ggacauugcccaagaguuc

SEQ ID NO: 1390267 - RNA, 19 nt, Homo sapiens
  misc_RNA (1)...(19): siRNA sense strand
gaucuugucuucuucuauc

SEQ ID NO: 1390268 - RNA, 19 nt, Homo sapiens
  misc_RNA (1)...(19): siRNA sense strand
cugauuggcuuccuucuuu

SEQ ID NO: 1390269 - RNA, 19 nt, Homo sapiens
  misc_RNA (1)...(19): siRNA sense strand
ccaaacaggaugagaauau

SEQ ID NO: 1390270 - RNA, 19 nt, Homo sapiens
  misc_RNA (1)...(19): siRNA sense strand
ggguugaacuggaagacua

SEQ ID NO: 1390271 - RNA, 19 nt, Homo sapiens
  misc_RNA (1)...(19): siRNA sense strand
gagaauaugacucgauuuc

SEQ ID NO: 1390272 - RNA, 19 nt, Homo sapiens
  misc_RNA (1)...(19): siRNA sense strand
gacauuaguggauaaguuu

SEQ ID NO: 1390273 - RNA, 19 nt, Homo sapiens
  misc_RNA (1)...(19): siRNA sense strand
gaagagcauauaccucaaa

SEQ ID NO: 1390274 - RNA, 19 nt, Homo sapiens
  misc_RNA (1)...(19): siRNA sense strand
caaacaggaugagaauaug

SEQ ID NO: 1390275 - RNA, 19 nt, Homo sapiens
  misc_RNA (1)...(19): siRNA sense strand
agacauuaguggauaaguu

SEQ ID NO: 1390276 - RNA, 19 nt, Homo sapiens
  misc_RNA (1)...(19): siRNA sense strand
cgaaagcagugaacaaugc

SEQ ID NO: 1390277 - RNA, 19 nt, Homo sapiens
  misc_RNA (1)...(19): siRNA sense strand
gguagaggccagugacuuu

SEQ ID NO: 1390278 - RNA, 19 nt, Homo sapiens
  misc_RNA (1)...(19): siRNA sense strand
gaacuggaagacuauaaug

SEQ ID NO: 1390279 - RNA, 19 nt, Homo sapiens
  misc_RNA (1)...(19): siRNA sense strand
gcaaacaacgccuccuuuc

SEQ ID NO: 1390280 - RNA, 19 nt, Homo sapiens
  misc_RNA (1)...(19): siRNA sense strand
ggcacgagcagcugucuua

SEQ ID NO: 1390281 - RNA, 19 nt, Homo sapiens
  misc_RNA (1)...(19): siRNA sense strand
ugacucaucuggugaacau

SEQ ID NO: 1390282 - RNA, 19 nt, Homo sapiens
  misc_RNA (1)...(19): siRNA sense strand
aggagacgcugcugaugua

SEQ ID NO: 1390283 - RNA, 19 nt, Homo sapiens
  misc_RNA (1)...(19): siRNA sense strand
cugaugaccugcaccauau

SEQ ID NO: 1390284 - RNA, 19 nt, Homo sapiens
  misc_RNA (1)...(19): siRNA sense strand
uaaagaagaaccaaaugga

SEQ ID NO: 1390285 - RNA, 19 nt, Homo sapiens
  misc_RNA (1)...(19): siRNA sense strand
ggaagagcauauaccucaa

SEQ ID NO: 1390286 - RNA, 19 nt, Homo sapiens
  misc_RNA (1)...(19): siRNA sense strand
ggacaaagggagggucaaa

SEQ ID NO: 1390287 - RNA, 19 nt, Homo sapiens
  misc_RNA (1)...(19): siRNA sense strand
gagaagcugcacuaucgua

SEQ ID NO: 1390288 - RNA, 19 nt, Homo sapiens
  misc_RNA (1)...(19): siRNA sense strand
acauagauccugaaauuga

SEQ ID NO: 1390289 - RNA, 19 nt, Homo sapiens
  misc_RNA (1)...(19): siRNA sense strand
aaucuggacucccguauuc

SEQ ID NO: 1390290 - RNA, 19 nt, Homo sapiens
  misc_RNA (1)...(19): siRNA sense strand
gguccuuauugaugaauuu

SEQ ID NO: 1390291 - RNA, 19 nt, Homo sapiens
  misc_RNA (1)...(19): siRNA sense strand
acauagaucaagacacuua

SEQ ID NO: 1390292 - RNA, 19 nt, Homo sapiens
  misc_RNA (1)...(19): siRNA sense strand
cacagucgcugguccuuau

SEQ ID NO: 1390293 - RNA, 19 nt, Homo sapiens
  misc_RNA (1)...(19): siRNA sense strand
ugucuuaacccgaguauug

SEQ ID NO: 1390294 - RNA, 19 nt, Homo sapiens
  misc_RNA (1)...(19): siRNA sense strand
uuacaguguucuacagauu

SEQ ID NO: 1390295 - RNA, 19 nt, Homo sapiens
  misc_RNA (1)...(19): siRNA sense strand
gcacagagagccuaaaaga

SEQ ID NO: 1390296 - RNA, 19 nt, Homo sapiens
  misc_RNA (1)...(19): siRNA sense strand
uggcaacgaucuugucuuc

SEQ ID NO: 1390297 - RNA, 19 nt, Homo sapiens
  misc_RNA (1)...(19): siRNA sense strand
aaacaacgccuccuuucug

SEQ ID NO: 1390298 - RNA, 19 nt, Homo sapiens
  misc_RNA (1)...(19): siRNA sense strand
caacgaucuugucuucuuc

SEQ ID NO: 1390299 - RNA, 19 nt, Homo sapiens
  misc_RNA (1)...(19): siRNA sense strand
gcacagucgcugguccuua

SEQ ID NO: 1390300 - RNA, 19 nt, Homo sapiens
  misc_RNA (1)...(19): siRNA sense strand
gagcauauaccucaaacag

SEQ ID NO: 1390301 - RNA, 19 nt, Homo sapiens
  misc_RNA (1)...(19): siRNA sense strand
caacgccuccuuucuggaa

SEQ ID NO: 1390302 - RNA, 19 nt, Homo sapiens
  misc_RNA (1)...(19): siRNA sense strand
aaccuggacuugaacguuu

SEQ ID NO: 1390303 - RNA, 19 nt, Homo sapiens
  misc_RNA (1)...(19): siRNA sense strand
uuaugaaacuggauuugga

SEQ ID NO: 1390304 - RNA, 19 nt, Homo sapiens
  misc_RNA (1)...(19): siRNA sense strand
gucaaggauuugcuaaaga

SEQ ID NO: 1390305 - RNA, 19 nt, Homo sapiens
  misc_RNA (1)...(19): siRNA sense strand
ucacacguccgacucauga

SEQ ID NO: 1390306 - RNA, 19 nt, Homo sapiens
  misc_RNA (1)...(19): siRNA sense strand
gagaagcugcucaggcuau

SEQ ID NO: 1390307 - RNA, 19 nt, Homo sapiens
  misc_RNA (1)...(19): siRNA sense strand
uuggagggcugcugaaguu

SEQ ID NO: 1390308 - RNA, 19 nt, Homo sapiens
  misc_RNA (1)...(19): siRNA sense strand
aagaagaaccaaauggaaa

SEQ ID NO: 1390309 - RNA, 19 nt, Homo sapiens
  misc_RNA (1)...(19): siRNA sense strand
cauagauccugaaauugau

SEQ ID NO: 1390310 - RNA, 19 nt, Homo sapiens
  misc_RNA (1)...(19): siRNA sense strand
gacgccaucuucacacgaa

SEQ ID NO: 1390311 - RNA, 19 nt, Homo sapiens
  misc_RNA (1)...(19): siRNA sense strand
aaagaagaaccaaauggaa

SEQ ID NO: 1390312 - RNA, 19 nt, Homo sapiens
  misc_RNA (1)...(19): siRNA sense strand
ccgccugccuuccauggua

SEQ ID NO: 1390313 - RNA, 19 nt, Homo sapiens
  misc_RNA (1)...(19): siRNA sense strand
gccagacauuaguggauaa

SEQ ID NO: 1390314 - RNA, 19 nt, Homo sapiens
  misc_RNA (1)...(19): siRNA sense strand
cagguaggcuugaucacau

SEQ ID NO: 1390315 - RNA, 19 nt, Homo sapiens
  misc_RNA (1)...(19): siRNA sense strand
ccauaucgccagccucauu

SEQ ID NO: 1390316 - RNA, 19 nt, Homo sapiens
  misc_RNA (1)...(19): siRNA sense strand
gauccuaaccuggacuuga

SEQ ID NO: 1390317 - RNA, 19 nt, Homo sapiens
  misc_RNA (1)...(19): siRNA sense strand
caucagggaagagcauaua

SEQ ID NO: 1390318 - RNA, 19 nt, Homo sapiens
  misc_RNA (1)...(19): siRNA sense strand
gaaccuuugugcccaacuc

SEQ ID NO: 1390319 - RNA, 19 nt, Homo sapiens
  misc_RNA (1)...(19): siRNA sense strand
ugacuccacuauccacuuc

SEQ ID NO: 1390320 - RNA, 19 nt, Homo sapiens
  misc_RNA (1)...(19): siRNA sense strand
aggagaagcugcacuaucg

SEQ ID NO: 1390321 - RNA, 19 nt, Homo sapiens
  misc_RNA (1)...(19): siRNA sense strand
ggacucccguauuccuuca

SEQ ID NO: 1390322 - RNA, 19 nt, Homo sapiens
  misc_RNA (1)...(19): siRNA sense strand
gaaucuggacucccguauu

SEQ ID NO: 1390323 - RNA, 19 nt, Homo sapiens
  misc_RNA (1)...(19): siRNA sense strand
cuuccucucuuccauuauu

SEQ ID NO: 1390324 - RNA, 19 nt, Homo sapiens
  misc_RNA (1)...(19): siRNA sense strand
ugccagacauuaguggaua

SEQ ID NO: 1390325 - RNA, 19 nt, Homo sapiens
  misc_RNA (1)...(19): siRNA sense strand
aggauuugcuaaagaagaa

SEQ ID NO: 1390326 - RNA, 19 nt, Homo sapiens
  misc_RNA (1)...(19): siRNA sense strand
guuccugggucgaagaaga

SEQ ID NO: 1390327 - RNA, 19 nt, Homo sapiens
  misc_RNA (1)...(19): siRNA sense strand
cagaggagaagcugcacua

SEQ ID NO: 1390328 - RNA, 19 nt, Homo sapiens
  misc_RNA (1)...(19): siRNA sense strand
gaaaauugccagacauuag

SEQ ID NO: 1390329 - RNA, 19 nt, Homo sapiens
  misc_RNA (1)...(19): siRNA sense strand
uuaauggacuggacuucau

SEQ ID NO: 1390330 - RNA, 19 nt, Homo sapiens
  misc_RNA (1)...(19): siRNA sense strand
ggcaguagacgccaucuuc

SEQ ID NO: 1390331 - RNA, 19 nt, Homo sapiens
  misc_RNA (1)...(19): siRNA sense strand
gcagaggaggccgaaauug

SEQ ID NO: 1390332 - RNA, 19 nt, Homo sapiens
  misc_RNA (1)...(19): siRNA sense strand
ggacuucauguuucucuca

SEQ ID NO: 1390333 - RNA, 19 nt, Homo sapiens
  misc_RNA (1)...(19): siRNA sense strand
gaagaagaaucgggguuga

SEQ ID NO: 1390334 - RNA, 19 nt, Homo sapiens
  misc_RNA (1)...(19): siRNA sense strand
gcuaaagaagaaccaaaug

SEQ ID NO: 1390335 - RNA, 19 nt, Homo sapiens
  misc_RNA (1)...(19): siRNA sense strand
ugucaaggauuugcuaaag

SEQ ID NO: 1390336 - RNA, 19 nt, Homo sapiens
  misc_RNA (1)...(19): siRNA sense strand
gcaguagacgccaucuuca

SEQ ID NO: 1390337 - RNA, 19 nt, Homo sapiens
  misc_RNA (1)...(19): siRNA sense strand
gugcccaacuccacagaau

SEQ ID NO: 1390338 - RNA, 19 nt, Homo sapiens
  misc_RNA (1)...(19): siRNA sense strand
aaacaggaugagaauauga

SEQ ID NO: 1390339 - RNA, 19 nt, Homo sapiens
  misc_RNA (1)...(19): siRNA sense strand
aggaggagcuggccgagau

SEQ ID NO: 1390340 - RNA, 19 nt, Homo sapiens
  misc_RNA (1)...(19): siRNA sense strand
ugaaacgcaugaaguuguc

SEQ ID NO: 1390341 - RNA, 19 nt, Homo sapiens
  misc_RNA (1)...(19): siRNA sense strand
gcuccugggucacaucaag

SEQ ID NO: 1390342 - RNA, 19 nt, Homo sapiens
  misc_RNA (1)...(19): siRNA sense strand
cauccugggcuuuaagaaa

SEQ ID NO: 1390343 - RNA, 19 nt, Homo sapiens
  misc_RNA (1)...(19): siRNA sense strand
agagaguucuggaugagau

SEQ ID NO: 1390344 - RNA, 19 nt, Homo sapiens
  misc_RNA (1)...(19): siRNA sense strand
gcuguggaauucaggauac

SEQ ID NO: 1390345 - RNA, 19 nt, Homo sapiens
  misc_RNA (1)...(19): siRNA sense strand
cagcagaggaggccgaaau

SEQ ID NO: 1390346 - RNA, 19 nt, Homo sapiens
  misc_RNA (1)...(19): siRNA sense strand
gaggagaagcugcacuauc

SEQ ID NO: 1390347 - RNA, 19 nt, Homo sapiens
  misc_RNA (1)...(19): siRNA sense strand
ggccagugacuuugagauu

SEQ ID NO: 1390348 - RNA, 19 nt, Homo sapiens
  misc_RNA (1)...(19): siRNA sense strand
ucugaugaccugcaccaua

SEQ ID NO: 1390349 - RNA, 19 nt, Homo sapiens
  misc_RNA (1)...(19): siRNA sense strand
ggaaaauugccagacauua

SEQ ID NO: 1390350 - RNA, 19 nt, Homo sapiens
  misc_RNA (1)...(19): siRNA sense strand
gcgaaagcagugaacaaug

SEQ ID NO: 1390351 - RNA, 19 nt, Homo sapiens
  misc_RNA (1)...(19): siRNA sense strand
aaacagguaggcuugauca

SEQ ID NO: 1390352 - RNA, 19 nt, Homo sapiens
  misc_RNA (1)...(19): siRNA sense strand
aaagggagggucaaaguca

SEQ ID NO: 1390353 - RNA, 19 nt, Homo sapiens
  misc_RNA (1)...(19): siRNA sense strand
gcacgagcagcugucuuaa

SEQ ID NO: 1390354 - RNA, 19 nt, Homo sapiens
  misc_RNA (1)...(19): siRNA sense strand
caacauagauccugaaauu

SEQ ID NO: 1390355 - RNA, 19 nt, Homo sapiens
  misc_RNA (1)...(19): siRNA sense strand
gaacauagaucaagacacu

SEQ ID NO: 1390356 - RNA, 19 nt, Homo sapiens
  misc_RNA (1)...(19): siRNA sense strand
gcaaggagcuggagaaucu

SEQ ID NO: 1390357 - RNA, 19 nt, Homo sapiens
  misc_RNA (1)...(19): siRNA sense strand
ccaaggagcuggaugcauu

SEQ ID NO: 1390358 - RNA, 19 nt, Homo sapiens
  misc_RNA (1)...(19): siRNA sense strand
gcaacgaucuugucuucuu

SEQ ID NO: 1390359 - RNA, 19 nt, Homo sapiens
  misc_RNA (1)...(19): siRNA sense strand
ggacuggacuucauguuuc

SEQ ID NO: 1390360 - RNA, 19 nt, Homo sapiens
  misc_RNA (1)...(19): siRNA sense strand
gaauaugacucgauuucug

SEQ ID NO: 1390361 - RNA, 19 nt, Homo sapiens
  misc_RNA (1)...(19): siRNA sense strand
ggacuucccaguuuccuua

SEQ ID NO: 1390362 - RNA, 19 nt, Homo sapiens
  misc_RNA (1)...(19): siRNA sense strand
ccagugacuuugagauuaa

SEQ ID NO: 1390363 - RNA, 19 nt, Homo sapiens
  misc_RNA (1)...(19): siRNA sense strand
gccagugacuuugagauua

SEQ ID NO: 1390364 - RNA, 19 nt, Homo sapiens
  misc_RNA (1)...(19): siRNA sense strand
ucaaggauuugcuaaagaa

SEQ ID NO: 1390365 - RNA, 19 nt, Homo sapiens
  misc_RNA (1)...(19): siRNA sense strand
gaaacuggauuuggaagau

SEQ ID NO: 1390366 - RNA, 19 nt, Homo sapiens
  misc_RNA (1)...(19): siRNA sense strand
ggacauugcccaagaguuc

SEQ ID NO: 1390367 - RNA, 19 nt, Homo sapiens
  misc_RNA (1)...(19): siRNA sense strand
gaucuugucuucuucuauc

SEQ ID NO: 1390368 - RNA, 19 nt, Homo sapiens
  misc_RNA (1)...(19): siRNA sense strand
cugauuggcuuccuucuuu

SEQ ID NO: 1390369 - RNA, 19 nt, Homo sapiens
  misc_RNA (1)...(19): siRNA sense strand
ccaaacaggaugagaauau

SEQ ID NO: 1390370 - RNA, 19 nt, Homo sapiens
  misc_RNA (1)...(19): siRNA sense strand
ggguugaacuggaagacua

SEQ ID NO: 1390371 - RNA, 19 nt, Homo sapiens
  misc_RNA (1)...(19): siRNA sense strand
gagaauaugacucgauuuc

SEQ ID NO: 1390372 - RNA, 19 nt, Homo sapiens
  misc_RNA (1)...(19): siRNA sense strand
gacauuaguggauaaguuu

SEQ ID NO: 1390373 - RNA, 19 nt, Homo sapiens
  misc_RNA (1)...(19): siRNA sense strand
gaagagcauauaccucaaa

SEQ ID NO: 1390374 - RNA, 19 nt, Homo sapiens
  misc_RNA (1)...(19): siRNA sense strand
caaacaggaugagaauaug

SEQ ID NO: 1390375 - RNA, 19 nt, Homo sapiens
  misc_RNA (1)...(19): siRNA sense strand
agacauuaguggauaaguu

SEQ ID NO: 1390376 - RNA, 19 nt, Homo sapiens
  misc_RNA (1)...(19): siRNA sense strand
cgaaagcagugaacaaugc

SEQ ID NO: 1390377 - RNA, 19 nt, Homo sapiens
  misc_RNA (1)...(19): siRNA sense strand
gguagaggccagugacuuu

SEQ ID NO: 1390378 - RNA, 19 nt, Homo sapiens
  misc_RNA (1)...(19): siRNA sense strand
gaacuggaagacuauaaug

SEQ ID NO: 1390379 - RNA, 19 nt, Homo sapiens
  misc_RNA (1)...(19): siRNA sense strand
gcaaacaacgccuccuuuc

SEQ ID NO: 1390380 - RNA, 19 nt, Homo sapiens
  misc_RNA (1)...(19): siRNA sense strand
ggcacgagcagcugucuua

SEQ ID NO: 1390381 - RNA, 19 nt, Homo sapiens
  misc_RNA (1)...(19): siRNA sense strand
ugacucaucuggugaacau

SEQ ID NO: 1390382 - RNA, 19 nt, Homo sapiens
  misc_RNA (1)...(19): siRNA sense strand
aggagacgcugcugaugua

SEQ ID NO: 1390383 - RNA, 19 nt, Homo sapiens
  misc_RNA (1)...(19): siRNA sense strand
cugaugaccugcaccauau

SEQ ID NO: 1390384 - RNA, 19 nt, Homo sapiens
  misc_RNA (1)...(19): siRNA sense strand
uaaagaagaaccaaaugga

SEQ ID NO: 1390385 - RNA, 19 nt, Homo sapiens
  misc_RNA (1)...(19): siRNA sense strand
ggaagagcauauaccucaa

SEQ ID NO: 1390386 - RNA, 19 nt, Homo sapiens
  misc_RNA (1)...(19): siRNA sense strand
ggacaaagggagggucaaa

SEQ ID NO: 1390387 - RNA, 19 nt, Homo sapiens
  misc_RNA (1)...(19): siRNA sense strand
gagaagcugcacuaucgua

SEQ ID NO: 1390388 - RNA, 19 nt, Homo sapiens
  misc_RNA (1)...(19): siRNA sense strand
acauagauccugaaauuga

SEQ ID NO: 1390389 - RNA, 19 nt, Homo sapiens
  misc_RNA (1)...(19): siRNA sense strand
aaucuggacucccguauuc

SEQ ID NO: 1390390 - RNA, 19 nt, Homo sapiens
  misc_RNA (1)...(19): siRNA sense strand
gguccuuauugaugaauuu

SEQ ID NO: 1390391 - RNA, 19 nt, Homo sapiens
  misc_RNA (1)...(19): siRNA sense strand
acauagaucaagacacuua

SEQ ID NO: 1390392 - RNA, 19 nt, Homo sapiens
  misc_RNA (1)...(19): siRNA sense strand
cacagucgcugguccuuau

SEQ ID NO: 1390393 - RNA, 19 nt, Homo sapiens
  misc_RNA (1)...(19): siRNA sense strand
ugucuuaacccgaguauug

SEQ ID NO: 1390394 - RNA, 19 nt, Homo sapiens
  misc_RNA (1)...(19): siRNA sense strand
uuacaguguucuacagauu

SEQ ID NO: 1390395 - RNA, 19 nt, Homo sapiens
  misc_RNA (1)...(19): siRNA sense strand
gcacagagagccuaaaaga

SEQ ID NO: 1390396 - RNA, 19 nt, Homo sapiens
  misc_RNA (1)...(19): siRNA sense strand
uggcaacgaucuugucuuc

SEQ ID NO: 1390397 - RNA, 19 nt, Homo sapiens
  misc_RNA (1)...(19): siRNA sense strand
aaacaacgccuccuuucug

SEQ ID NO: 1390398 - RNA, 19 nt, Homo sapiens
  misc_RNA (1)...(19): siRNA sense strand
caacgaucuugucuucuuc

SEQ ID NO: 1390399 - RNA, 19 nt, Homo sapiens
  misc_RNA (1)...(19): siRNA sense strand
gcacagucgcugguccuua

SEQ ID NO: 1390400 - RNA, 19 nt, Homo sapiens
  misc_RNA (1)...(19): siRNA sense strand
gagcauauaccucaaacag

SEQ ID NO: 1390401 - RNA, 19 nt, Homo sapiens
  misc_RNA (1)...(19): siRNA sense strand
caacgccuccuuucuggaa

SEQ ID NO: 1390402 - RNA, 19 nt, Homo sapiens
  misc_RNA (1)...(19): siRNA sense strand
aaccuggacuugaacguuu

SEQ ID NO: 1390403 - RNA, 19 nt, Homo sapiens
  misc_RNA (1)...(19): siRNA sense strand
uuaugaaacuggauuugga

SEQ ID NO: 1390404 - RNA, 19 nt, Homo sapiens
  misc_RNA (1)...(19): siRNA sense strand
gucaaggauuugcuaaaga

SEQ ID NO: 1390405 - RNA, 19 nt, Homo sapiens
  misc_RNA (1)...(19): siRNA sense strand
ucacacguccgacucauga

SEQ ID NO: 1390406 - RNA, 19 nt, Homo sapiens
  misc_RNA (1)...(19): siRNA sense strand
gagaagcugcucaggcuau

SEQ ID NO: 1390407 - RNA, 19 nt, Homo sapiens
  misc_RNA (1)...(19): siRNA sense strand
uuggagggcugcugaaguu

SEQ ID NO: 1390408 - RNA, 19 nt, Homo sapiens
  misc_RNA (1)...(19): siRNA sense strand
aagaagaaccaaauggaaa

SEQ ID NO: 1390409 - RNA, 19 nt, Homo sapiens
  misc_RNA (1)...(19): siRNA sense strand
cauagauccugaaauugau

SEQ ID NO: 1390410 - RNA, 19 nt, Homo sapiens
  misc_RNA (1)...(19): siRNA sense strand
gacgccaucuucacacgaa

SEQ ID NO: 1390411 - RNA, 19 nt, Homo sapiens
  misc_RNA (1)...(19): siRNA sense strand
aaagaagaaccaaauggaa

SEQ ID NO: 1390412 - RNA, 19 nt, Homo sapiens
  misc_RNA (1)...(19): siRNA sense strand
ccgccugccuuccauggua

SEQ ID NO: 1390413 - RNA, 19 nt, Homo sapiens
  misc_RNA (1)...(19): siRNA sense strand
gccagacauuaguggauaa

SEQ ID NO: 1390414 - RNA, 19 nt, Homo sapiens
  misc_RNA (1)...(19): siRNA sense strand
cagguaggcuugaucacau

SEQ ID NO: 1390415 - RNA, 19 nt, Homo sapiens
  misc_RNA (1)...(19): siRNA sense strand
ccauaucgccagccucauu

SEQ ID NO: 1390416 - RNA, 19 nt, Homo sapiens
  misc_RNA (1)...(19): siRNA sense strand
gauccuaaccuggacuuga

SEQ ID NO: 1390417 - RNA, 19 nt, Homo sapiens
  misc_RNA (1)...(19): siRNA sense strand
caucagggaagagcauaua

SEQ ID NO: 1390418 - RNA, 19 nt, Homo sapiens
  misc_RNA (1)...(19): siRNA sense strand
gaaccuuugugcccaacuc

SEQ ID NO: 1390419 - RNA, 19 nt, Homo sapiens
  misc_RNA (1)...(19): siRNA sense strand
ugacuccacuauccacuuc

SEQ ID NO: 1390420 - RNA, 19 nt, Homo sapiens
  misc_RNA (1)...(19): siRNA sense strand
aggagaagcugcacuaucg

SEQ ID NO: 1390421 - RNA, 19 nt, Homo sapiens
  misc_RNA (1)...(19): siRNA sense strand
ggacucccguauuccuuca

SEQ ID NO: 1390422 - RNA, 19 nt, Homo sapiens
  misc_RNA (1)...(19): siRNA sense strand
gaaucuggacucccguauu

SEQ ID NO: 1390423 - RNA, 19 nt, Homo sapiens
  misc_RNA (1)...(19): siRNA sense strand
cuuccucucuuccauuauu

SEQ ID NO: 1390424 - RNA, 19 nt, Homo sapiens
  misc_RNA (1)...(19): siRNA sense strand
ugccagacauuaguggaua

SEQ ID NO: 1390425 - RNA, 19 nt, Homo sapiens
  misc_RNA (1)...(19): siRNA sense strand
aggauuugcuaaagaagaa

SEQ ID NO: 1390426 - RNA, 19 nt, Homo sapiens
  misc_RNA (1)...(19): siRNA sense strand
guuccugggucgaagaaga

SEQ ID NO: 1390427 - RNA, 19 nt, Homo sapiens
  misc_RNA (1)...(19): siRNA sense strand
cagaggagaagcugcacua

SEQ ID NO: 1390428 - RNA, 19 nt, Homo sapiens
  misc_RNA (1)...(19): siRNA sense strand
gaaaauugccagacauuag

SEQ ID NO: 1390429 - RNA, 19 nt, Homo sapiens
  misc_RNA (1)...(19): siRNA sense strand
uuaauggacuggacuucau

SEQ ID NO: 1390430 - RNA, 19 nt, Homo sapiens
  misc_RNA (1)...(19): siRNA sense strand
ggcaguagacgccaucuuc

SEQ ID NO: 1390431 - RNA, 19 nt, Homo sapiens
  misc_RNA (1)...(19): siRNA sense strand
gcagaggaggccgaaauug

SEQ ID NO: 1390432 - RNA, 19 nt, Homo sapiens
  misc_RNA (1)...(19): siRNA sense strand
ggacuucauguuucucuca

SEQ ID NO: 1390433 - RNA, 19 nt, Homo sapiens
  misc_RNA (1)...(19): siRNA sense strand
gaagaagaaucgggguuga

SEQ ID NO: 1390434 - RNA, 19 nt, Homo sapiens
  misc_RNA (1)...(19): siRNA sense strand
gcuaaagaagaaccaaaug

SEQ ID NO: 1390435 - RNA, 19 nt, Homo sapiens
  misc_RNA (1)...(19): siRNA sense strand
ugucaaggauuugcuaaag

SEQ ID NO: 1390436 - RNA, 19 nt, Homo sapiens
  misc_RNA (1)...(19): siRNA sense strand
gcaguagacgccaucuuca

SEQ ID NO: 1390437 - RNA, 19 nt, Homo sapiens
  misc_RNA (1)...(19): siRNA sense strand
gugcccaacuccacagaau

SEQ ID NO: 1390438 - RNA, 19 nt, Homo sapiens
  misc_RNA (1)...(19): siRNA sense strand
aaacaggaugagaauauga

SEQ ID NO: 1390439 - RNA, 19 nt, Homo sapiens
  misc_RNA (1)...(19): siRNA sense strand
aggaggagcuggccgagau

SEQ ID NO: 1390440 - RNA, 19 nt, Homo sapiens
  misc_RNA (1)...(19): siRNA sense strand
ugaaacgcaugaaguuguc

SEQ ID NO: 1390441 - RNA, 19 nt, Homo sapiens
  misc_RNA (1)...(19): siRNA sense strand
gcuccugggucacaucaag

SEQ ID NO: 1390442 - RNA, 19 nt, Homo sapiens
  misc_RNA (1)...(19): siRNA sense strand
cauccugggcuuuaagaaa

SEQ ID NO: 1390443 - RNA, 19 nt, Homo sapiens
  misc_RNA (1)...(19): siRNA sense strand
agagaguucuggaugagau

SEQ ID NO: 1390444 - RNA, 19 nt, Homo sapiens
  misc_RNA (1)...(19): siRNA sense strand
gcuguggaauucaggauac

SEQ ID NO: 1390445 - RNA, 19 nt, Homo sapiens
  misc_RNA (1)...(19): siRNA sense strand
cagcagaggaggccgaaau

SEQ ID NO: 1390446 - RNA, 19 nt, Homo sapiens
  misc_RNA (1)...(19): siRNA sense strand
gaggagaagcugcacuauc

SEQ ID NO: 1390447 - RNA, 19 nt, Homo sapiens
  misc_RNA (1)...(19): siRNA sense strand
ggccagugacuuugagauu

SEQ ID NO: 1390448 - RNA, 19 nt, Homo sapiens
  misc_RNA (1)...(19): siRNA sense strand
ucugaugaccugcaccaua

SEQ ID NO: 1390449 - RNA, 19 nt, Homo sapiens
  misc_RNA (1)...(19): siRNA sense strand
ggaaaauugccagacauua

SEQ ID NO: 1390450 - RNA, 19 nt, Homo sapiens
  misc_RNA (1)...(19): siRNA sense strand
gcgaaagcagugaacaaug

SEQ ID NO: 1390451 - RNA, 19 nt, Homo sapiens
  misc_RNA (1)...(19): siRNA sense strand
aaacagguaggcuugauca

SEQ ID NO: 1390452 - RNA, 19 nt, Homo sapiens
  misc_RNA (1)...(19): siRNA sense strand
aaagggagggucaaaguca

SEQ ID NO: 1390453 - RNA, 19 nt, Homo sapiens
  misc_RNA (1)...(19): siRNA sense strand
gcacgagcagcugucuuaa

SEQ ID NO: 1390454 - RNA, 19 nt, Homo sapiens
  misc_RNA (1)...(19): siRNA sense strand
caacauagauccugaaauu

SEQ ID NO: 1390455 - RNA, 19 nt, Homo sapiens
  misc_RNA (1)...(19): siRNA sense strand
gaacauagaucaagacacu

SEQ ID NO: 1390456 - RNA, 19 nt, Homo sapiens
  misc_RNA (1)...(19): siRNA sense strand
gcaaggagcuggagaaucu

SEQ ID NO: 1390457 - RNA, 19 nt, Homo sapiens
  misc_RNA (1)...(19): siRNA sense strand
ccaaggagcuggaugcauu

SEQ ID NO: 1390458 - RNA, 19 nt, Homo sapiens
  misc_RNA (1)...(19): siRNA sense strand
gcaacgaucuugucuucuu

SEQ ID NO: 1390459 - RNA, 19 nt, Homo sapiens
  misc_RNA (1)...(19): siRNA sense strand
ggacuggacuucauguuuc

SEQ ID NO: 1390460 - RNA, 19 nt, Homo sapiens
  misc_RNA (1)...(19): siRNA sense strand
gaauaugacucgauuucug

SEQ ID NO: 1390461 - RNA, 19 nt, Homo sapiens
  misc_RNA (1)...(19): siRNA sense strand
ggacuucccaguuuccuua

SEQ ID NO: 1390462 - RNA, 19 nt, Homo sapiens
  misc_RNA (1)...(19): siRNA sense strand
ccagugacuuugagauuaa

SEQ ID NO: 1390463 - RNA, 19 nt, Homo sapiens
  misc_RNA (1)...(19): siRNA sense strand
gccagugacuuugagauua

SEQ ID NO: 1390464 - RNA, 19 nt, Homo sapiens
  misc_RNA (1)...(19): siRNA sense strand
ucaaggauuugcuaaagaa

SEQ ID NO: 1390465 - RNA, 19 nt, Homo sapiens
  misc_RNA (1)...(19): siRNA sense strand
gaaacuggauuuggaagau

SEQ ID NO: 1390466 - RNA, 19 nt, Homo sapiens
  misc_RNA (1)...(19): siRNA sense strand
ggacauugcccaagaguuc

SEQ ID NO: 1390467 - RNA, 19 nt, Homo sapiens
  misc_RNA (1)...(19): siRNA sense strand
gaucuugucuucuucuauc

SEQ ID NO: 1390468 - RNA, 19 nt, Homo sapiens
  misc_RNA (1)...(19): siRNA sense strand
cugauuggcuuccuucuuu

SEQ ID NO: 1390469 - RNA, 19 nt, Homo sapiens
  misc_RNA (1)...(19): siRNA sense strand
ccaaacaggaugagaauau

SEQ ID NO: 1390470 - RNA, 19 nt, Homo sapiens
  misc_RNA (1)...(19): siRNA sense strand
ggguugaacuggaagacua

SEQ ID NO: 1390471 - RNA, 19 nt, Homo sapiens
  misc_RNA (1)...(19): siRNA sense strand
gagaauaugacucgauuuc

SEQ ID NO: 1390472 - RNA, 19 nt, Homo sapiens
  misc_RNA (1)...(19): siRNA sense strand
gacauuaguggauaaguuu

SEQ ID NO: 1390473 - RNA, 19 nt, Homo sapiens
  misc_RNA (1)...(19): siRNA sense strand
gaagagcauauaccucaaa

SEQ ID NO: 1390474 - RNA, 19 nt, Homo sapiens
  misc_RNA (1)...(19): siRNA sense strand
caaacaggaugagaauaug

SEQ ID NO: 1390475 - RNA, 19 nt, Homo sapiens
  misc_RNA (1)...(19): siRNA sense strand
agacauuaguggauaaguu

SEQ ID NO: 1390476 - RNA, 19 nt, Homo sapiens
  misc_RNA (1)...(19): siRNA sense strand
cgaaagcagugaacaaugc

SEQ ID NO: 1390477 - RNA, 19 nt, Homo sapiens
  misc_RNA (1)...(19): siRNA sense strand
gguagaggccagugacuuu

SEQ ID NO: 1390478 - RNA, 19 nt, Homo sapiens
  misc_RNA (1)...(19): siRNA sense strand
gaacuggaagacuauaaug

SEQ ID NO: 1390479 - RNA, 19 nt, Homo sapiens
  misc_RNA (1)...(19): siRNA sense strand
gcaaacaacgccuccuuuc

SEQ ID NO: 1390480 - RNA, 19 nt, Homo sapiens
  misc_RNA (1)...(19): siRNA sense strand
ggcacgagcagcugucuua

SEQ ID NO: 1390481 - RNA, 19 nt, Homo sapiens
  misc_RNA (1)...(19): siRNA sense strand
ugacucaucuggugaacau

SEQ ID NO: 1390482 - RNA, 19 nt, Homo sapiens
  misc_RNA (1)...(19): siRNA sense strand
aggagacgcugcugaugua

SEQ ID NO: 1390483 - RNA, 19 nt, Homo sapiens
  misc_RNA (1)...(19): siRNA sense strand
cugaugaccugcaccauau

SEQ ID NO: 1390484 - RNA, 19 nt, Homo sapiens
  misc_RNA (1)...(19): siRNA sense strand
uaaagaagaaccaaaugga

SEQ ID NO: 1390485 - RNA, 19 nt, Homo sapiens
  misc_RNA (1)...(19): siRNA sense strand
ggaagagcauauaccucaa

SEQ ID NO: 1390486 - RNA, 19 nt, Homo sapiens
  misc_RNA (1)...(19): siRNA sense strand
ggacaaagggagggucaaa

SEQ ID NO: 1390487 - RNA, 19 nt, Homo sapiens
  misc_RNA (1)...(19): siRNA sense strand
gagaagcugcacuaucgua

SEQ ID NO: 1390488 - RNA, 19 nt, Homo sapiens
  misc_RNA (1)...(19): siRNA sense strand
acauagauccugaaauuga

SEQ ID NO: 1390489 - RNA, 19 nt, Homo sapiens
  misc_RNA (1)...(19): siRNA sense strand
aaucuggacucccguauuc

SEQ ID NO: 1390490 - RNA, 19 nt, Homo sapiens
  misc_RNA (1)...(19): siRNA sense strand
gguccuuauugaugaauuu

SEQ ID NO: 1390491 - RNA, 19 nt, Homo sapiens
  misc_RNA (1)...(19): siRNA sense strand
acauagaucaagacacuua

SEQ ID NO: 1390492 - RNA, 19 nt, Homo sapiens
  misc_RNA (1)...(19): siRNA sense strand
cacagucgcugguccuuau

SEQ ID NO: 1390493 - RNA, 19 nt, Homo sapiens
  misc_RNA (1)...(19): siRNA sense strand
ugucuuaacccgaguauug

SEQ ID NO: 1390494 - RNA, 19 nt, Homo sapiens
  misc_RNA (1)...(19): siRNA sense strand
uuacaguguucuacagauu

SEQ ID NO: 1390495 - RNA, 19 nt, Homo sapiens
  misc_RNA (1)...(19): siRNA sense strand
gcacagagagccuaaaaga

SEQ ID NO: 1390496 - RNA, 19 nt, Homo sapiens
  misc_RNA (1)...(19): siRNA sense strand
uggcaacgaucuugucuuc

SEQ ID NO: 1390497 - RNA, 19 nt, Homo sapiens
  misc_RNA (1)...(19): siRNA sense strand
aaacaacgccuccuuucug

SEQ ID NO: 1390498 - RNA, 19 nt, Homo sapiens
  misc_RNA (1)...(19): siRNA sense strand
caacgaucuugucuucuuc

SEQ ID NO: 1390499 - RNA, 19 nt, Homo sapiens
  misc_RNA (1)...(19): siRNA sense strand
gcacagucgcugguccuua

SEQ ID NO: 1390500 - RNA, 19 nt, Homo sapiens
  misc_RNA (1)...(19): siRNA sense strand
gagcauauaccucaaacag

SEQ ID NO: 1390501 - RNA, 19 nt, Homo sapiens
  misc_RNA (1)...(19): siRNA sense strand
caacgccuccuuucuggaa

SEQ ID NO: 1390502 - RNA, 19 nt, Homo sapiens
  misc_RNA (1)...(19): siRNA sense strand
aaccuggacuugaacguuu

SEQ ID NO: 1390503 - RNA, 19 nt, Homo sapiens
  misc_RNA (1)...(19): siRNA sense strand
uuaugaaacuggauuugga

SEQ ID NO: 1390504 - RNA, 19 nt, Homo sapiens
  misc_RNA (1)...(19): siRNA sense strand
gucaaggauuugcuaaaga

SEQ ID NO: 1390505 - RNA, 19 nt, Homo sapiens
  misc_RNA (1)...(19): siRNA sense strand
ucacacguccgacucauga

SEQ ID NO: 1390506 - RNA, 19 nt, Homo sapiens
  misc_RNA (1)...(19): siRNA sense strand
gagaagcugcucaggcuau

SEQ ID NO: 1390507 - RNA, 19 nt, Homo sapiens
  misc_RNA (1)...(19): siRNA sense strand
uuggagggcugcugaaguu

SEQ ID NO: 1390508 - RNA, 19 nt, Homo sapiens
  misc_RNA (1)...(19): siRNA sense strand
aagaagaaccaaauggaaa

SEQ ID NO: 1390509 - RNA, 19 nt, Homo sapiens
  misc_RNA (1)...(19): siRNA sense strand
cauagauccugaaauugau

SEQ ID NO: 1390510 - RNA, 19 nt, Homo sapiens
  misc_RNA (1)...(19): siRNA sense strand
gacgccaucuucacacgaa

SEQ ID NO: 1390511 - RNA, 19 nt, Homo sapiens
  misc_RNA (1)...(19): siRNA sense strand
aaagaagaaccaaauggaa

SEQ ID NO: 1390512 - RNA, 19 nt, Homo sapiens
  misc_RNA (1)...(19): siRNA sense strand
ccgccugccuuccauggua

SEQ ID NO: 1390513 - RNA, 19 nt, Homo sapiens
  misc_RNA (1)...(19): siRNA sense strand
gccagacauuaguggauaa

SEQ ID NO: 1390514 - RNA, 19 nt, Homo sapiens
  misc_RNA (1)...(19): siRNA sense strand
cagguaggcuugaucacau

SEQ ID NO: 1390515 - RNA, 19 nt, Homo sapiens
  misc_RNA (1)...(19): siRNA sense strand
ccauaucgccagccucauu

SEQ ID NO: 1390516 - RNA, 19 nt, Homo sapiens
  misc_RNA (1)...(19): siRNA sense strand
gauccuaaccuggacuuga

SEQ ID NO: 1390517 - RNA, 19 nt, Homo sapiens
  misc_RNA (1)...(19): siRNA sense strand
caucagggaagagcauaua

SEQ ID NO: 1390518 - RNA, 19 nt, Homo sapiens
  misc_RNA (1)...(19): siRNA sense strand
gaaccuuugugcccaacuc

SEQ ID NO: 1390519 - RNA, 19 nt, Homo sapiens
  misc_RNA (1)...(19): siRNA sense strand
ugacuccacuauccacuuc

SEQ ID NO: 1390520 - RNA, 19 nt, Homo sapiens
  misc_RNA (1)...(19): siRNA sense strand
aggagaagcugcacuaucg

SEQ ID NO: 1390521 - RNA, 19 nt, Homo sapiens
  misc_RNA (1)...(19): siRNA sense strand
ggacucccguauuccuuca

SEQ ID NO: 1390522 - RNA, 19 nt, Homo sapiens
  misc_RNA (1)...(19): siRNA sense strand
gaaucuggacucccguauu

SEQ ID NO: 1390523 - RNA, 19 nt, Homo sapiens
  misc_RNA (1)...(19): siRNA sense strand
cuuccucucuuccauuauu

SEQ ID NO: 1390524 - RNA, 19 nt, Homo sapiens
  misc_RNA (1)...(19): siRNA sense strand
ugccagacauuaguggaua

SEQ ID NO: 1390525 - RNA, 19 nt, Homo sapiens
  misc_RNA (1)...(19): siRNA sense strand
aggauuugcuaaagaagaa

SEQ ID NO: 1390526 - RNA, 19 nt, Homo sapiens
  misc_RNA (1)...(19): siRNA sense strand
guuccugggucgaagaaga

SEQ ID NO: 1390527 - RNA, 19 nt, Homo sapiens
  misc_RNA (1)...(19): siRNA sense strand
cagaggagaagcugcacua

SEQ ID NO: 1390528 - RNA, 19 nt, Homo sapiens
  misc_RNA (1)...(19): siRNA sense strand
gaaaauugccagacauuag

SEQ ID NO: 1390529 - RNA, 19 nt, Homo sapiens
  misc_RNA (1)...(19): siRNA sense strand
uuaauggacuggacuucau

SEQ ID NO: 1390530 - RNA, 19 nt, Homo sapiens
  misc_RNA (1)...(19): siRNA sense strand
ggcaguagacgccaucuuc

SEQ ID NO: 1390531 - RNA, 19 nt, Homo sapiens
  misc_RNA (1)...(19): siRNA sense strand
gcagaggaggccgaaauug

SEQ ID NO: 1390532 - RNA, 19 nt, Homo sapiens
  misc_RNA (1)...(19): siRNA sense strand
ggacuucauguuucucuca

SEQ ID NO: 1390533 - RNA, 19 nt, Homo sapiens
  misc_RNA (1)...(19): siRNA sense strand
gaagaagaaucgggguuga

SEQ ID NO: 1390534 - RNA, 19 nt, Homo sapiens
  misc_RNA (1)...(19): siRNA sense strand
gcuaaagaagaaccaaaug

SEQ ID NO: 1390535 - RNA, 19 nt, Homo sapiens
  misc_RNA (1)...(19): siRNA sense strand
ugucaaggauuugcuaaag

SEQ ID NO: 1390536 - RNA, 19 nt, Homo sapiens
  misc_RNA (1)...(19): siRNA sense strand
gcaguagacgccaucuuca

SEQ ID NO: 1390537 - RNA, 19 nt, Homo sapiens
  misc_RNA (1)...(19): siRNA sense strand
gugcccaacuccacagaau

SEQ ID NO: 1390538 - RNA, 19 nt, Homo sapiens
  misc_RNA (1)...(19): siRNA sense strand
aaacaggaugagaauauga

SEQ ID NO: 1390539 - RNA, 19 nt, Homo sapiens
  misc_RNA (1)...(19): siRNA sense strand
aggaggagcuggccgagau

SEQ ID NO: 1390540 - RNA, 19 nt, Homo sapiens
  misc_RNA (1)...(19): siRNA sense strand
ugaaacgcaugaaguuguc

SEQ ID NO: 1390541 - RNA, 19 nt, Homo sapiens
  misc_RNA (1)...(19): siRNA sense strand
gcuccugggucacaucaag

SEQ ID NO: 1390542 - RNA, 19 nt, Homo sapiens
  misc_RNA (1)...(19): siRNA sense strand
cauccugggcuuuaagaaa

SEQ ID NO: 1390543 - RNA, 19 nt, Homo sapiens
  misc_RNA (1)...(19): siRNA sense strand
agagaguucuggaugagau

SEQ ID NO: 1390544 - RNA, 19 nt, Homo sapiens
  misc_RNA (1)...(19): siRNA sense strand
gcuguggaauucaggauac

SEQ ID NO: 1390545 - RNA, 19 nt, Homo sapiens
  misc_RNA (1)...(19): siRNA sense strand
cagcagaggaggccgaaau

SEQ ID NO: 1390546 - RNA, 19 nt, Homo sapiens
  misc_RNA (1)...(19): siRNA sense strand
gaggagaagcugcacuauc

SEQ ID NO: 1390547 - RNA, 19 nt, Homo sapiens
  misc_RNA (1)...(19): siRNA sense strand
ggccagugacuuugagauu

SEQ ID NO: 1390548 - RNA, 19 nt, Homo sapiens
  misc_RNA (1)...(19): siRNA sense strand
ucugaugaccugcaccaua

SEQ ID NO: 1390549 - RNA, 19 nt, Homo sapiens
  misc_RNA (1)...(19): siRNA sense strand
ggaaaauugccagacauua

SEQ ID NO: 1390550 - RNA, 19 nt, Homo sapiens
  misc_RNA (1)...(19): siRNA sense strand
gcgaaagcagugaacaaug

SEQ ID NO: 1390551 - RNA, 19 nt, Homo sapiens
  misc_RNA (1)...(19): siRNA sense strand
aaacagguaggcuugauca

SEQ ID NO: 1390552 - RNA, 19 nt, Homo sapiens
  misc_RNA (1)...(19): siRNA sense strand
aaagggagggucaaaguca

SEQ ID NO: 1390553 - RNA, 19 nt, Homo sapiens
  misc_RNA (1)...(19): siRNA sense strand
gcacgagcagcugucuuaa

SEQ ID NO: 1390554 - RNA, 19 nt, Homo sapiens
  misc_RNA (1)...(19): siRNA sense strand
caacauagauccugaaauu

SEQ ID NO: 1390555 - RNA, 19 nt, Homo sapiens
  misc_RNA (1)...(19): siRNA sense strand
gaacauagaucaagacacu

SEQ ID NO: 1390556 - RNA, 19 nt, Homo sapiens
  misc_RNA (1)...(19): siRNA sense strand
gcaaggagcuggagaaucu

SEQ ID NO: 1390557 - RNA, 19 nt, Homo sapiens
  misc_RNA (1)...(19): siRNA sense strand
ccaaggagcuggaugcauu

SEQ ID NO: 1390558 - RNA, 19 nt, Homo sapiens
  misc_RNA (1)...(19): siRNA sense strand
gcaacgaucuugucuucuu

SEQ ID NO: 1390559 - RNA, 19 nt, Homo sapiens
  misc_RNA (1)...(19): siRNA sense strand
ggacuggacuucauguuuc

SEQ ID NO: 1390560 - RNA, 19 nt, Homo sapiens
  misc_RNA (1)...(19): siRNA sense strand
gaauaugacucgauuucug

SEQ ID NO: 1390561 - RNA, 19 nt, Homo sapiens
  misc_RNA (1)...(19): siRNA sense strand
ggacuucccaguuuccuua

SEQ ID NO: 1390562 - RNA, 19 nt, Homo sapiens
  misc_RNA (1)...(19): siRNA sense strand
ccagugacuuugagauuaa

SEQ ID NO: 1390563 - RNA, 19 nt, Homo sapiens
  misc_RNA (1)...(19): siRNA sense strand
gccagugacuuugagauua

SEQ ID NO: 1390564 - RNA, 19 nt, Homo sapiens
  misc_RNA (1)...(19): siRNA sense strand
ucaaggauuugcuaaagaa

SEQ ID NO: 1390565 - RNA, 19 nt, Homo sapiens
  misc_RNA (1)...(19): siRNA sense strand
gaaacuggauuuggaagau

SEQ ID NO: 1390566 - RNA, 19 nt, Homo sapiens
  misc_RNA (1)...(19): siRNA sense strand
ggacauugcccaagaguuc

SEQ ID NO: 1390567 - RNA, 19 nt, Homo sapiens
  misc_RNA (1)...(19): siRNA sense strand
gaucuugucuucuucuauc

SEQ ID NO: 1390568 - RNA, 19 nt, Homo sapiens
  misc_RNA (1)...(19): siRNA sense strand
cugauuggcuuccuucuuu

SEQ ID NO: 1390569 - RNA, 19 nt, Homo sapiens
  misc_RNA (1)...(19): siRNA sense strand
ccaaacaggaugagaauau

SEQ ID NO: 1390570 - RNA, 19 nt, Homo sapiens
  misc_RNA (1)...(19): siRNA sense strand
ggguugaacuggaagacua

SEQ ID NO: 1390571 - RNA, 19 nt, Homo sapiens
  misc_RNA (1)...(19): siRNA sense strand
gagaauaugacucgauuuc

SEQ ID NO: 1390572 - RNA, 19 nt, Homo sapiens
  misc_RNA (1)...(19): siRNA sense strand
gacauuaguggauaaguuu

SEQ ID NO: 1390573 - RNA, 19 nt, Homo sapiens
  misc_RNA (1)...(19): siRNA sense strand
gaagagcauauaccucaaa

SEQ ID NO: 1390574 - RNA, 19 nt, Homo sapiens
  misc_RNA (1)...(19): siRNA sense strand
caaacaggaugagaauaug

SEQ ID NO: 1390575 - RNA, 19 nt, Homo sapiens
  misc_RNA (1)...(19): siRNA sense strand
agacauuaguggauaaguu

SEQ ID NO: 1390576 - RNA, 19 nt, Homo sapiens
  misc_RNA (1)...(19): siRNA sense strand
cgaaagcagugaacaaugc

SEQ ID NO: 1390577 - RNA, 19 nt, Homo sapiens
  misc_RNA (1)...(19): siRNA sense strand
gguagaggccagugacuuu

SEQ ID NO: 1390578 - RNA, 19 nt, Homo sapiens
  misc_RNA (1)...(19): siRNA sense strand
gaacuggaagacuauaaug

SEQ ID NO: 1390579 - RNA, 19 nt, Homo sapiens
  misc_RNA (1)...(19): siRNA sense strand
gcaaacaacgccuccuuuc

SEQ ID NO: 1390580 - RNA, 19 nt, Homo sapiens
  misc_RNA (1)...(19): siRNA sense strand
ggcacgagcagcugucuua

SEQ ID NO: 1390581 - RNA, 19 nt, Homo sapiens
  misc_RNA (1)...(19): siRNA sense strand
ugacucaucuggugaacau

SEQ ID NO: 1390582 - RNA, 19 nt, Homo sapiens
  misc_RNA (1)...(19): siRNA sense strand
aggagacgcugcugaugua

SEQ ID NO: 1390583 - RNA, 19 nt, Homo sapiens
  misc_RNA (1)...(19): siRNA sense strand
cugaugaccugcaccauau

SEQ ID NO: 1390584 - RNA, 19 nt, Homo sapiens
  misc_RNA (1)...(19): siRNA sense strand
uaaagaagaaccaaaugga

SEQ ID NO: 1390585 - RNA, 19 nt, Homo sapiens
  misc_RNA (1)...(19): siRNA sense strand
ggaagagcauauaccucaa

SEQ ID NO: 1390586 - RNA, 19 nt, Homo sapiens
  misc_RNA (1)...(19): siRNA sense strand
ggacaaagggagggucaaa

SEQ ID NO: 1390587 - RNA, 19 nt, Homo sapiens
  misc_RNA (1)...(19): siRNA sense strand
gagaagcugcacuaucgua

SEQ ID NO: 1390588 - RNA, 19 nt, Homo sapiens
  misc_RNA (1)...(19): siRNA sense strand
acauagauccugaaauuga

SEQ ID NO: 1390589 - RNA, 19 nt, Homo sapiens
  misc_RNA (1)...(19): siRNA sense strand
aaucuggacucccguauuc

SEQ ID NO: 1390590 - RNA, 19 nt, Homo sapiens
  misc_RNA (1)...(19): siRNA sense strand
gguccuuauugaugaauuu

SEQ ID NO: 1390591 - RNA, 19 nt, Homo sapiens
  misc_RNA (1)...(19): siRNA sense strand
acauagaucaagacacuua

SEQ ID NO: 1390592 - RNA, 19 nt, Homo sapiens
  misc_RNA (1)...(19): siRNA sense strand
cacagucgcugguccuuau

SEQ ID NO: 1390593 - RNA, 19 nt, Homo sapiens
  misc_RNA (1)...(19): siRNA sense strand
ugucuuaacccgaguauug

SEQ ID NO: 1390594 - RNA, 19 nt, Homo sapiens
  misc_RNA (1)...(19): siRNA sense strand
uuacaguguucuacagauu

SEQ ID NO: 1390595 - RNA, 19 nt, Homo sapiens
  misc_RNA (1)...(19): siRNA sense strand
gcacagagagccuaaaaga

SEQ ID NO: 1390596 - RNA, 19 nt, Homo sapiens
  misc_RNA (1)...(19): siRNA sense strand
uggcaacgaucuugucuuc

SEQ ID NO: 1390597 - RNA, 19 nt, Homo sapiens
  misc_RNA (1)...(19): siRNA sense strand
aaacaacgccuccuuucug

SEQ ID NO: 1390598 - RNA, 19 nt, Homo sapiens
  misc_RNA (1)...(19): siRNA sense strand
caacgaucuugucuucuuc

SEQ ID NO: 1390599 - RNA, 19 nt, Homo sapiens
  misc_RNA (1)...(19): siRNA sense strand
gcacagucgcugguccuua

SEQ ID NO: 1390600 - RNA, 19 nt, Homo sapiens
  misc_RNA (1)...(19): siRNA sense strand
gagcauauaccucaaacag

SEQ ID NO: 1390601 - RNA, 19 nt, Homo sapiens
  misc_RNA (1)...(19): siRNA sense strand
caacgccuccuuucuggaa

SEQ ID NO: 1390602 - RNA, 19 nt, Homo sapiens
  misc_RNA (1)...(19): siRNA sense strand
aaccuggacuugaacguuu

SEQ ID NO: 1390603 - RNA, 19 nt, Homo sapiens
  misc_RNA (1)...(19): siRNA sense strand
uuaugaaacuggauuugga

SEQ ID NO: 1390604 - RNA, 19 nt, Homo sapiens
  misc_RNA (1)...(19): siRNA sense strand
gucaaggauuugcuaaaga

SEQ ID NO: 1390605 - RNA, 19 nt, Homo sapiens
  misc_RNA (1)...(19): siRNA sense strand
ucacacguccgacucauga

SEQ ID NO: 1390606 - RNA, 19 nt, Homo sapiens
  misc_RNA (1)...(19): siRNA sense strand
gagaagcugcucaggcuau

SEQ ID NO: 1390607 - RNA, 19 nt, Homo sapiens
  misc_RNA (1)...(19): siRNA sense strand
uuggagggcugcugaaguu

SEQ ID NO: 1390608 - RNA, 19 nt, Homo sapiens
  misc_RNA (1)...(19): siRNA sense strand
aagaagaaccaaauggaaa

SEQ ID NO: 1390609 - RNA, 19 nt, Homo sapiens
  misc_RNA (1)...(19): siRNA sense strand
cauagauccugaaauugau

SEQ ID NO: 1390610 - RNA, 19 nt, Homo sapiens
  misc_RNA (1)...(19): siRNA sense strand
gacgccaucuucacacgaa

SEQ ID NO: 1390611 - RNA, 19 nt, Homo sapiens
  misc_RNA (1)...(19): siRNA sense strand
aaagaagaaccaaauggaa

SEQ ID NO: 1390612 - RNA, 19 nt, Homo sapiens
  misc_RNA (1)...(19): siRNA sense strand
ccgccugccuuccauggua

SEQ ID NO: 1390613 - RNA, 19 nt, Homo sapiens
  misc_RNA (1)...(19): siRNA sense strand
gccagacauuaguggauaa

SEQ ID NO: 1390614 - RNA, 19 nt, Homo sapiens
  misc_RNA (1)...(19): siRNA sense strand
cagguaggcuugaucacau

SEQ ID NO: 1390615 - RNA, 19 nt, Homo sapiens
  misc_RNA (1)...(19): siRNA sense strand
ccauaucgccagccucauu

SEQ ID NO: 1390616 - RNA, 19 nt, Homo sapiens
  misc_RNA (1)...(19): siRNA sense strand
gauccuaaccuggacuuga

SEQ ID NO: 1390617 - RNA, 19 nt, Homo sapiens
  misc_RNA (1)...(19): siRNA sense strand
caucagggaagagcauaua

SEQ ID NO: 1390618 - RNA, 19 nt, Homo sapiens
  misc_RNA (1)...(19): siRNA sense strand
gaaccuuugugcccaacuc

SEQ ID NO: 1390619 - RNA, 19 nt, Homo sapiens
  misc_RNA (1)...(19): siRNA sense strand
ugacuccacuauccacuuc

SEQ ID NO: 1390620 - RNA, 19 nt, Homo sapiens
  misc_RNA (1)...(19): siRNA sense strand
aggagaagcugcacuaucg

SEQ ID NO: 1390621 - RNA, 19 nt, Homo sapiens
  misc_RNA (1)...(19): siRNA sense strand
ggacucccguauuccuuca

SEQ ID NO: 1390622 - RNA, 19 nt, Homo sapiens
  misc_RNA (1)...(19): siRNA sense strand
gaaucuggacucccguauu

SEQ ID NO: 1390623 - RNA, 19 nt, Homo sapiens
  misc_RNA (1)...(19): siRNA sense strand
cuuccucucuuccauuauu

SEQ ID NO: 1390624 - RNA, 19 nt, Homo sapiens
  misc_RNA (1)...(19): siRNA sense strand
ugccagacauuaguggaua

SEQ ID NO: 1390625 - RNA, 19 nt, Homo sapiens
  misc_RNA (1)...(19): siRNA sense strand
aggauuugcuaaagaagaa

SEQ ID NO: 1390626 - RNA, 19 nt, Homo sapiens
  misc_RNA (1)...(19): siRNA sense strand
guuccugggucgaagaaga

SEQ ID NO: 1390627 - RNA, 19 nt, Homo sapiens
  misc_RNA (1)...(19): siRNA sense strand
cagaggagaagcugcacua

SEQ ID NO: 1390628 - RNA, 19 nt, Homo sapiens
  misc_RNA (1)...(19): siRNA sense strand
gaaaauugccagacauuag

SEQ ID NO: 1390629 - RNA, 19 nt, Homo sapiens
  misc_RNA (1)...(19): siRNA sense strand
uuaauggacuggacuucau

SEQ ID NO: 1390630 - RNA, 19 nt, Homo sapiens
  misc_RNA (1)...(19): siRNA sense strand
ggcaguagacgccaucuuc

SEQ ID NO: 1390631 - RNA, 19 nt, Homo sapiens
  misc_RNA (1)...(19): siRNA sense strand
gcagaggaggccgaaauug

SEQ ID NO: 1390632 - RNA, 19 nt, Homo sapiens
  misc_RNA (1)...(19): siRNA sense strand
ggacuucauguuucucuca

SEQ ID NO: 1390633 - RNA, 19 nt, Homo sapiens
  misc_RNA (1)...(19): siRNA sense strand
gaagaagaaucgggguuga

SEQ ID NO: 1390634 - RNA, 19 nt, Homo sapiens
  misc_RNA (1)...(19): siRNA sense strand
gcuaaagaagaaccaaaug

SEQ ID NO: 1390635 - RNA, 19 nt, Homo sapiens
  misc_RNA (1)...(19): siRNA sense strand
ugucaaggauuugcuaaag

SEQ ID NO: 1390636 - RNA, 19 nt, Homo sapiens
  misc_RNA (1)...(19): siRNA sense strand
gcaguagacgccaucuuca

SEQ ID NO: 1390637 - RNA, 19 nt, Homo sapiens
  misc_RNA (1)...(19): siRNA sense strand
gugcccaacuccacagaau

SEQ ID NO: 1390638 - RNA, 19 nt, Homo sapiens
  misc_RNA (1)...(19): siRNA sense strand
aaacaggaugagaauauga

SEQ ID NO: 1390639 - RNA, 19 nt, Homo sapiens
  misc_RNA (1)...(19): siRNA sense strand
aggaggagcuggccgagau

SEQ ID NO: 1390640 - RNA, 19 nt, Homo sapiens
  misc_RNA (1)...(19): siRNA sense strand
ugaaacgcaugaaguuguc

SEQ ID NO: 1390641 - RNA, 19 nt, Homo sapiens
  misc_RNA (1)...(19): siRNA sense strand
gcuccugggucacaucaag

SEQ ID NO: 1390642 - RNA, 19 nt, Homo sapiens
  misc_RNA (1)...(19): siRNA sense strand
cauccugggcuuuaagaaa

SEQ ID NO: 1390643 - RNA, 19 nt, Homo sapiens
  misc_RNA (1)...(19): siRNA sense strand
agagaguucuggaugagau

SEQ ID NO: 1390644 - RNA, 19 nt, Homo sapiens
  misc_RNA (1)...(19): siRNA sense strand
gcuguggaauucaggauac

SEQ ID NO: 1390645 - RNA, 19 nt, Homo sapiens
  misc_RNA (1)...(19): siRNA sense strand
cagcagaggaggccgaaau

SEQ ID NO: 1390646 - RNA, 19 nt, Homo sapiens
  misc_RNA (1)...(19): siRNA sense strand
gaggagaagcugcacuauc

SEQ ID NO: 1390647 - RNA, 19 nt, Homo sapiens
  misc_RNA (1)...(19): siRNA sense strand
ggccagugacuuugagauu

SEQ ID NO: 1390648 - RNA, 19 nt, Homo sapiens
  misc_RNA (1)...(19): siRNA sense strand
ucugaugaccugcaccaua

SEQ ID NO: 1390649 - RNA, 19 nt, Homo sapiens
  misc_RNA (1)...(19): siRNA sense strand
ggaaaauugccagacauua

SEQ ID NO: 1390650 - RNA, 19 nt, Homo sapiens
  misc_RNA (1)...(19): siRNA sense strand
gcgaaagcagugaacaaug

SEQ ID NO: 1390651 - RNA, 19 nt, Homo sapiens
  misc_RNA (1)...(19): siRNA sense strand
aaacagguaggcuugauca

SEQ ID NO: 1390652 - RNA, 19 nt, Homo sapiens
  misc_RNA (1)...(19): siRNA sense strand
aaagggagggucaaaguca

SEQ ID NO: 1390653 - RNA, 19 nt, Homo sapiens
  misc_RNA (1)...(19): siRNA sense strand
gcacgagcagcugucuuaa

SEQ ID NO: 1390654 - RNA, 19 nt, Homo sapiens
  misc_RNA (1)...(19): siRNA sense strand
caacauagauccugaaauu

SEQ ID NO: 1390655 - RNA, 19 nt, Homo sapiens
  misc_RNA (1)...(19): siRNA sense strand
gaacauagaucaagacacu

SEQ ID NO: 1390656 - RNA, 19 nt, Homo sapiens
  misc_RNA (1)...(19): siRNA sense strand
gcaaggagcuggagaaucu

SEQ ID NO: 1390657 - RNA, 19 nt, Homo sapiens
  misc_RNA (1)...(19): siRNA sense strand
ccaaggagcuggaugcauu

SEQ ID NO: 1390658 - RNA, 19 nt, Homo sapiens
  misc_RNA (1)...(19): siRNA sense strand
gcaacgaucuugucuucuu

SEQ ID NO: 1390659 - RNA, 19 nt, Homo sapiens
  misc_RNA (1)...(19): siRNA sense strand
ggacuggacuucauguuuc

SEQ ID NO: 1390660 - RNA, 19 nt, Homo sapiens
  misc_RNA (1)...(19): siRNA sense strand
gaauaugacucgauuucug

SEQ ID NO: 1390661 - RNA, 19 nt, Homo sapiens
  misc_RNA (1)...(19): siRNA sense strand
ggacuucccaguuuccuua

SEQ ID NO: 1390662 - RNA, 19 nt, Homo sapiens
  misc_RNA (1)...(19): siRNA sense strand
ccagugacuuugagauuaa

SEQ ID NO: 1390663 - RNA, 19 nt, Homo sapiens
  misc_RNA (1)...(19): siRNA sense strand
gccagugacuuugagauua

SEQ ID NO: 1390664 - RNA, 19 nt, Homo sapiens
  misc_RNA (1)...(19): siRNA sense strand
ucaaggauuugcuaaagaa

SEQ ID NO: 1390665 - RNA, 19 nt, Homo sapiens
  misc_RNA (1)...(19): siRNA sense strand
gaaacuggauuuggaagau

SEQ ID NO: 1390666 - RNA, 19 nt, Homo sapiens
  misc_RNA (1)...(19): siRNA sense strand
ggacauugcccaagaguuc

SEQ ID NO: 1390667 - RNA, 19 nt, Homo sapiens
  misc_RNA (1)...(19): siRNA sense strand
gaucuugucuucuucuauc

SEQ ID NO: 1390668 - RNA, 19 nt, Homo sapiens
  misc_RNA (1)...(19): siRNA sense strand
cugauuggcuuccuucuuu

SEQ ID NO: 1390669 - RNA, 19 nt, Homo sapiens
  misc_RNA (1)...(19): siRNA sense strand
ccaaacaggaugagaauau

SEQ ID NO: 1390670 - RNA, 19 nt, Homo sapiens
  misc_RNA (1)...(19): siRNA sense strand
ggguugaacuggaagacua

SEQ ID NO: 1390671 - RNA, 19 nt, Homo sapiens
  misc_RNA (1)...(19): siRNA sense strand
gagaauaugacucgauuuc

SEQ ID NO: 1390672 - RNA, 19 nt, Homo sapiens
  misc_RNA (1)...(19): siRNA sense strand
gacauuaguggauaaguuu

SEQ ID NO: 1390673 - RNA, 19 nt, Homo sapiens
  misc_RNA (1)...(19): siRNA sense strand
gaagagcauauaccucaaa

SEQ ID NO: 1390674 - RNA, 19 nt, Homo sapiens
  misc_RNA (1)...(19): siRNA sense strand
caaacaggaugagaauaug

SEQ ID NO: 1390675 - RNA, 19 nt, Homo sapiens
  misc_RNA (1)...(19): siRNA sense strand
agacauuaguggauaaguu

SEQ ID NO: 1390676 - RNA, 19 nt, Homo sapiens
  misc_RNA (1)...(19): siRNA sense strand
cgaaagcagugaacaaugc

SEQ ID NO: 1390677 - RNA, 19 nt, Homo sapiens
  misc_RNA (1)...(19): siRNA sense strand
gguagaggccagugacuuu

SEQ ID NO: 1390678 - RNA, 19 nt, Homo sapiens
  misc_RNA (1)...(19): siRNA sense strand
gaacuggaagacuauaaug

SEQ ID NO: 1390679 - RNA, 19 nt, Homo sapiens
  misc_RNA (1)...(19): siRNA sense strand
gcaaacaacgccuccuuuc

SEQ ID NO: 1390680 - RNA, 19 nt, Homo sapiens
  misc_RNA (1)...(19): siRNA sense strand
ggcacgagcagcugucuua

SEQ ID NO: 1390681 - RNA, 19 nt, Homo sapiens
  misc_RNA (1)...(19): siRNA sense strand
ugacucaucuggugaacau

SEQ ID NO: 1390682 - RNA, 19 nt, Homo sapiens
  misc_RNA (1)...(19): siRNA sense strand
aggagacgcugcugaugua

SEQ ID NO: 1390683 - RNA, 19 nt, Homo sapiens
  misc_RNA (1)...(19): siRNA sense strand
cugaugaccugcaccauau

SEQ ID NO: 1390684 - RNA, 19 nt, Homo sapiens
  misc_RNA (1)...(19): siRNA sense strand
uaaagaagaaccaaaugga

SEQ ID NO: 1390685 - RNA, 19 nt, Homo sapiens
  misc_RNA (1)...(19): siRNA sense strand
ggaagagcauauaccucaa

SEQ ID NO: 1390686 - RNA, 19 nt, Homo sapiens
  misc_RNA (1)...(19): siRNA sense strand
ggacaaagggagggucaaa

SEQ ID NO: 1390687 - RNA, 19 nt, Homo sapiens
  misc_RNA (1)...(19): siRNA sense strand
gagaagcugcacuaucgua

SEQ ID NO: 1390688 - RNA, 19 nt, Homo sapiens
  misc_RNA (1)...(19): siRNA sense strand
acauagauccugaaauuga

SEQ ID NO: 1390689 - RNA, 19 nt, Homo sapiens
  misc_RNA (1)...(19): siRNA sense strand
aaucuggacucccguauuc

SEQ ID NO: 1390690 - RNA, 19 nt, Homo sapiens
  misc_RNA (1)...(19): siRNA sense strand
gguccuuauugaugaauuu

SEQ ID NO: 1390691 - RNA, 19 nt, Homo sapiens
  misc_RNA (1)...(19): siRNA sense strand
acauagaucaagacacuua

SEQ ID NO: 1390692 - RNA, 19 nt, Homo sapiens
  misc_RNA (1)...(19): siRNA sense strand
cacagucgcugguccuuau

SEQ ID NO: 1390693 - RNA, 19 nt, Homo sapiens
  misc_RNA (1)...(19): siRNA sense strand
ugucuuaacccgaguauug

SEQ ID NO: 1390694 - RNA, 19 nt, Homo sapiens
  misc_RNA (1)...(19): siRNA sense strand
uuacaguguucuacagauu

SEQ ID NO: 1390695 - RNA, 19 nt, Homo sapiens
  misc_RNA (1)...(19): siRNA sense strand
gcacagagagccuaaaaga

SEQ ID NO: 1390696 - RNA, 19 nt, Homo sapiens
  misc_RNA (1)...(19): siRNA sense strand
uggcaacgaucuugucuuc

SEQ ID NO: 1390697 - RNA, 19 nt, Homo sapiens
  misc_RNA (1)...(19): siRNA sense strand
aaacaacgccuccuuucug

SEQ ID NO: 1390698 - RNA, 19 nt, Homo sapiens
  misc_RNA (1)...(19): siRNA sense strand
caacgaucuugucuucuuc

SEQ ID NO: 1390699 - RNA, 19 nt, Homo sapiens
  misc_RNA (1)...(19): siRNA sense strand
gcacagucgcugguccuua

SEQ ID NO: 1390700 - RNA, 19 nt, Homo sapiens
  misc_RNA (1)...(19): siRNA sense strand
gagcauauaccucaaacag

SEQ ID NO: 1390701 - RNA, 19 nt, Homo sapiens
  misc_RNA (1)...(19): siRNA sense strand
caacgccuccuuucuggaa

SEQ ID NO: 1390702 - RNA, 19 nt, Homo sapiens
  misc_RNA (1)...(19): siRNA sense strand
aaccuggacuugaacguuu

SEQ ID NO: 1390703 - RNA, 19 nt, Homo sapiens
  misc_RNA (1)...(19): siRNA sense strand
uuaugaaacuggauuugga

SEQ ID NO: 1390704 - RNA, 19 nt, Homo sapiens
  misc_RNA (1)...(19): siRNA sense strand
gucaaggauuugcuaaaga

SEQ ID NO: 1390705 - RNA, 19 nt, Homo sapiens
  misc_RNA (1)...(19): siRNA sense strand
ucacacguccgacucauga

SEQ ID NO: 1390706 - RNA, 19 nt, Homo sapiens
  misc_RNA (1)...(19): siRNA sense strand
gagaagcugcucaggcuau

SEQ ID NO: 1390707 - RNA, 19 nt, Homo sapiens
  misc_RNA (1)...(19): siRNA sense strand
uuggagggcugcugaaguu

SEQ ID NO: 1390708 - RNA, 19 nt, Homo sapiens
  misc_RNA (1)...(19): siRNA sense strand
aagaagaaccaaauggaaa

SEQ ID NO: 1390709 - RNA, 19 nt, Homo sapiens
  misc_RNA (1)...(19): siRNA sense strand
cauagauccugaaauugau

SEQ ID NO: 1390710 - RNA, 19 nt, Homo sapiens
  misc_RNA (1)...(19): siRNA sense strand
gacgccaucuucacacgaa

SEQ ID NO: 1390711 - RNA, 19 nt, Homo sapiens
  misc_RNA (1)...(19): siRNA sense strand
aaagaagaaccaaauggaa

SEQ ID NO: 1390712 - RNA, 19 nt, Homo sapiens
  misc_RNA (1)...(19): siRNA sense strand
ccgccugccuuccauggua

SEQ ID NO: 1390713 - RNA, 19 nt, Homo sapiens
  misc_RNA (1)...(19): siRNA sense strand
gccagacauuaguggauaa

SEQ ID NO: 1390714 - RNA, 19 nt, Homo sapiens
  misc_RNA (1)...(19): siRNA sense strand
cagguaggcuugaucacau

SEQ ID NO: 1390715 - RNA, 19 nt, Homo sapiens
  misc_RNA (1)...(19): siRNA sense strand
ccauaucgccagccucauu

SEQ ID NO: 1390716 - RNA, 19 nt, Homo sapiens
  misc_RNA (1)...(19): siRNA sense strand
gauccuaaccuggacuuga

SEQ ID NO: 1390717 - RNA, 19 nt, Homo sapiens
  misc_RNA (1)...(19): siRNA sense strand
caucagggaagagcauaua

SEQ ID NO: 1390718 - RNA, 19 nt, Homo sapiens
  misc_RNA (1)...(19): siRNA sense strand
gaaccuuugugcccaacuc

SEQ ID NO: 1390719 - RNA, 19 nt, Homo sapiens
  misc_RNA (1)...(19): siRNA sense strand
ugacuccacuauccacuuc

SEQ ID NO: 1390720 - RNA, 19 nt, Homo sapiens
  misc_RNA (1)...(19): siRNA sense strand
aggagaagcugcacuaucg

SEQ ID NO: 1390721 - RNA, 19 nt, Homo sapiens
  misc_RNA (1)...(19): siRNA sense strand
ggacucccguauuccuuca

SEQ ID NO: 1390722 - RNA, 19 nt, Homo sapiens
  misc_RNA (1)...(19): siRNA sense strand
gaaucuggacucccguauu

SEQ ID NO: 1390723 - RNA, 19 nt, Homo sapiens
  misc_RNA (1)...(19): siRNA sense strand
cuuccucucuuccauuauu

SEQ ID NO: 1390724 - RNA, 19 nt, Homo sapiens
  misc_RNA (1)...(19): siRNA sense strand
ugccagacauuaguggaua

SEQ ID NO: 1390725 - RNA, 19 nt, Homo sapiens
  misc_RNA (1)...(19): siRNA sense strand
aggauuugcuaaagaagaa

SEQ ID NO: 1390726 - RNA, 19 nt, Homo sapiens
  misc_RNA (1)...(19): siRNA sense strand
guuccugggucgaagaaga

SEQ ID NO: 1390727 - RNA, 19 nt, Homo sapiens
  misc_RNA (1)...(19): siRNA sense strand
cagaggagaagcugcacua

SEQ ID NO: 1390728 - RNA, 19 nt, Homo sapiens
  misc_RNA (1)...(19): siRNA sense strand
gaaaauugccagacauuag

SEQ ID NO: 1390729 - RNA, 19 nt, Homo sapiens
  misc_RNA (1)...(19): siRNA sense strand
uuaauggacuggacuucau

SEQ ID NO: 1390730 - RNA, 19 nt, Homo sapiens
  misc_RNA (1)...(19): siRNA sense strand
ggcaguagacgccaucuuc

SEQ ID NO: 1390731 - RNA, 19 nt, Homo sapiens
  misc_RNA (1)...(19): siRNA sense strand
gcagaggaggccgaaauug

SEQ ID NO: 1390732 - RNA, 19 nt, Homo sapiens
  misc_RNA (1)...(19): siRNA sense strand
ggacuucauguuucucuca

SEQ ID NO: 1390733 - RNA, 19 nt, Homo sapiens
  misc_RNA (1)...(19): siRNA sense strand
gaagaagaaucgggguuga

SEQ ID NO: 1390734 - RNA, 19 nt, Homo sapiens
  misc_RNA (1)...(19): siRNA sense strand
gcuaaagaagaaccaaaug

SEQ ID NO: 1390735 - RNA, 19 nt, Homo sapiens
  misc_RNA (1)...(19): siRNA sense strand
ugucaaggauuugcuaaag

SEQ ID NO: 1390736 - RNA, 19 nt, Homo sapiens
  misc_RNA (1)...(19): siRNA sense strand
gcaguagacgccaucuuca

SEQ ID NO: 1390737 - RNA, 19 nt, Homo sapiens
  misc_RNA (1)...(19): siRNA sense strand
gugcccaacuccacagaau

SEQ ID NO: 1390738 - RNA, 19 nt, Homo sapiens
  misc_RNA (1)...(19): siRNA sense strand
aaacaggaugagaauauga

SEQ ID NO: 1390739 - RNA, 19 nt, Homo sapiens
  misc_RNA (1)...(19): siRNA sense strand
aggaggagcuggccgagau

SEQ ID NO: 1390740 - RNA, 19 nt, Homo sapiens
  misc_RNA (1)...(19): siRNA sense strand
ugaaacgcaugaaguuguc

SEQ ID NO: 1390741 - RNA, 19 nt, Homo sapiens
  misc_RNA (1)...(19): siRNA sense strand
gcuccugggucacaucaag

SEQ ID NO: 1390742 - RNA, 19 nt, Homo sapiens
  misc_RNA (1)...(19): siRNA sense strand
cauccugggcuuuaagaaa

SEQ ID NO: 1390743 - RNA, 19 nt, Homo sapiens
  misc_RNA (1)...(19): siRNA sense strand
agagaguucuggaugagau

SEQ ID NO: 1390744 - RNA, 19 nt, Homo sapiens
  misc_RNA (1)...(19): siRNA sense strand
gcuguggaauucaggauac

SEQ ID NO: 1390745 - RNA, 19 nt, Homo sapiens
  misc_RNA (1)...(19): siRNA sense strand
cagcagaggaggccgaaau

SEQ ID NO: 1390746 - RNA, 19 nt, Homo sapiens
  misc_RNA (1)...(19): siRNA sense strand
gaggagaagcugcacuauc

SEQ ID NO: 1390747 - RNA, 19 nt, Homo sapiens
  misc_RNA (1)...(19): siRNA sense strand
ggccagugacuuugagauu

SEQ ID NO: 1390748 - RNA, 19 nt, Homo sapiens
  misc_RNA (1)...(19): siRNA sense strand
ucugaugaccugcaccaua

SEQ ID NO: 1390749 - RNA, 19 nt, Homo sapiens
  misc_RNA (1)...(19): siRNA sense strand
ggaaaauugccagacauua

SEQ ID NO: 1390750 - RNA, 19 nt, Homo sapiens
  misc_RNA (1)...(19): siRNA sense strand
gcgaaagcagugaacaaug

SEQ ID NO: 1390751 - RNA, 19 nt, Homo sapiens
  misc_RNA (1)...(19): siRNA sense strand
aaacagguaggcuugauca

SEQ ID NO: 1390752 - RNA, 19 nt, Homo sapiens
  misc_RNA (1)...(19): siRNA sense strand
aaagggagggucaaaguca

SEQ ID NO: 1390753 - RNA, 19 nt, Homo sapiens
  misc_RNA (1)...(19): siRNA sense strand
gcacgagcagcugucuuaa

SEQ ID NO: 1390754 - RNA, 19 nt, Homo sapiens
  misc_RNA (1)...(19): siRNA sense strand
caacauagauccugaaauu

SEQ ID NO: 1390755 - RNA, 19 nt, Homo sapiens
  misc_RNA (1)...(19): siRNA sense strand
gaacauagaucaagacacu

SEQ ID NO: 1390756 - RNA, 19 nt, Homo sapiens
  misc_RNA (1)...(19): siRNA sense strand
gcaaggagcuggagaaucu

SEQ ID NO: 1390757 - RNA, 19 nt, Homo sapiens
  misc_RNA (1)...(19): siRNA sense strand
ccaaggagcuggaugcauu

SEQ ID NO: 1390758 - RNA, 19 nt, Homo sapiens
  misc_RNA (1)...(19): siRNA sense strand
gcaacgaucuugucuucuu

SEQ ID NO: 1390759 - RNA, 19 nt, Homo sapiens
  misc_RNA (1)...(19): siRNA sense strand
ggacuggacuucauguuuc

SEQ ID NO: 1390760 - RNA, 19 nt, Homo sapiens
  misc_RNA (1)...(19): siRNA sense strand
gaauaugacucgauuucug

SEQ ID NO: 1390761 - RNA, 19 nt, Homo sapiens
  misc_RNA (1)...(19): siRNA sense strand
ggacuucccaguuuccuua

SEQ ID NO: 1390762 - RNA, 19 nt, Homo sapiens
  misc_RNA (1)...(19): siRNA sense strand
ccagugacuuugagauuaa

SEQ ID NO: 1390763 - RNA, 19 nt, Homo sapiens
  misc_RNA (1)...(19): siRNA sense strand
gccagugacuuugagauua

SEQ ID NO: 1390764 - RNA, 19 nt, Homo sapiens
  misc_RNA (1)...(19): siRNA sense strand
ucaaggauuugcuaaagaa

SEQ ID NO: 1390765 - RNA, 19 nt, Homo sapiens
  misc_RNA (1)...(19): siRNA sense strand
gaaacuggauuuggaagau

SEQ ID NO: 1390766 - RNA, 19 nt, Homo sapiens
  misc_RNA (1)...(19): siRNA sense strand
ggacauugcccaagaguuc

SEQ ID NO: 1390767 - RNA, 19 nt, Homo sapiens
  misc_RNA (1)...(19): siRNA sense strand
gaucuugucuucuucuauc

SEQ ID NO: 1390768 - RNA, 19 nt, Homo sapiens
  misc_RNA (1)...(19): siRNA sense strand
cugauuggcuuccuucuuu

SEQ ID NO: 1390769 - RNA, 19 nt, Homo sapiens
  misc_RNA (1)...(19): siRNA sense strand
ccaaacaggaugagaauau

SEQ ID NO: 1390770 - RNA, 19 nt, Homo sapiens
  misc_RNA (1)...(19): siRNA sense strand
ggguugaacuggaagacua

SEQ ID NO: 1390771 - RNA, 19 nt, Homo sapiens
  misc_RNA (1)...(19): siRNA sense strand
gagaauaugacucgauuuc

SEQ ID NO: 1390772 - RNA, 19 nt, Homo sapiens
  misc_RNA (1)...(19): siRNA sense strand
gacauuaguggauaaguuu

SEQ ID NO: 1390773 - RNA, 19 nt, Homo sapiens
  misc_RNA (1)...(19): siRNA sense strand
gaagagcauauaccucaaa

SEQ ID NO: 1390774 - RNA, 19 nt, Homo sapiens
  misc_RNA (1)...(19): siRNA sense strand
caaacaggaugagaauaug

SEQ ID NO: 1390775 - RNA, 19 nt, Homo sapiens
  misc_RNA (1)...(19): siRNA sense strand
agacauuaguggauaaguu

SEQ ID NO: 1390776 - RNA, 19 nt, Homo sapiens
  misc_RNA (1)...(19): siRNA sense strand
cgaaagcagugaacaaugc

SEQ ID NO: 1390777 - RNA, 19 nt, Homo sapiens
  misc_RNA (1)...(19): siRNA sense strand
gguagaggccagugacuuu

SEQ ID NO: 1390778 - RNA, 19 nt, Homo sapiens
  misc_RNA (1)...(19): siRNA sense strand
gaacuggaagacuauaaug

SEQ ID NO: 1390779 - RNA, 19 nt, Homo sapiens
  misc_RNA (1)...(19): siRNA sense strand
gcaaacaacgccuccuuuc

SEQ ID NO: 1390780 - RNA, 19 nt, Homo sapiens
  misc_RNA (1)...(19): siRNA sense strand
ggcacgagcagcugucuua

SEQ ID NO: 1390781 - RNA, 19 nt, Homo sapiens
  misc_RNA (1)...(19): siRNA sense strand
ugacucaucuggugaacau

SEQ ID NO: 1390782 - RNA, 19 nt, Homo sapiens
  misc_RNA (1)...(19): siRNA sense strand
aggagacgcugcugaugua

SEQ ID NO: 1390783 - RNA, 19 nt, Homo sapiens
  misc_RNA (1)...(19): siRNA sense strand
cugaugaccugcaccauau

SEQ ID NO: 1390784 - RNA, 19 nt, Homo sapiens
  misc_RNA (1)...(19): siRNA sense strand
uaaagaagaaccaaaugga

SEQ ID NO: 1390785 - RNA, 19 nt, Homo sapiens
  misc_RNA (1)...(19): siRNA sense strand
ggaagagcauauaccucaa

SEQ ID NO: 1390786 - RNA, 19 nt, Homo sapiens
  misc_RNA (1)...(19): siRNA sense strand
ggacaaagggagggucaaa

SEQ ID NO: 1390787 - RNA, 19 nt, Homo sapiens
  misc_RNA (1)...(19): siRNA sense strand
gagaagcugcacuaucgua

SEQ ID NO: 1390788 - RNA, 19 nt, Homo sapiens
  misc_RNA (1)...(19): siRNA sense strand
acauagauccugaaauuga

SEQ ID NO: 1390789 - RNA, 19 nt, Homo sapiens
  misc_RNA (1)...(19): siRNA sense strand
aaucuggacucccguauuc

SEQ ID NO: 1390790 - RNA, 19 nt, Homo sapiens
  misc_RNA (1)...(19): siRNA sense strand
gguccuuauugaugaauuu

SEQ ID NO: 1390791 - RNA, 19 nt, Homo sapiens
  misc_RNA (1)...(19): siRNA sense strand
acauagaucaagacacuua

SEQ ID NO: 1390792 - RNA, 19 nt, Homo sapiens
  misc_RNA (1)...(19): siRNA sense strand
cacagucgcugguccuuau

SEQ ID NO: 1390793 - RNA, 19 nt, Homo sapiens
  misc_RNA (1)...(19): siRNA sense strand
ugucuuaacccgaguauug

SEQ ID NO: 1390794 - RNA, 19 nt, Homo sapiens
  misc_RNA (1)...(19): siRNA sense strand
uuacaguguucuacagauu

SEQ ID NO: 1390795 - RNA, 19 nt, Homo sapiens
  misc_RNA (1)...(19): siRNA sense strand
gcacagagagccuaaaaga

SEQ ID NO: 1390796 - RNA, 19 nt, Homo sapiens
  misc_RNA (1)...(19): siRNA sense strand
uggcaacgaucuugucuuc

SEQ ID NO: 1390797 - RNA, 19 nt, Homo sapiens
  misc_RNA (1)...(19): siRNA sense strand
aaacaacgccuccuuucug

SEQ ID NO: 1390798 - RNA, 19 nt, Homo sapiens
  misc_RNA (1)...(19): siRNA sense strand
caacgaucuugucuucuuc

SEQ ID NO: 1390799 - RNA, 19 nt, Homo sapiens
  misc_RNA (1)...(19): siRNA sense strand
gcacagucgcugguccuua

SEQ ID NO: 1390800 - RNA, 19 nt, Homo sapiens
  misc_RNA (1)...(19): siRNA sense strand
gagcauauaccucaaacag

SEQ ID NO: 1390801 - RNA, 19 nt, Homo sapiens
  misc_RNA (1)...(19): siRNA sense strand
caacgccuccuuucuggaa

SEQ ID NO: 1390802 - RNA, 19 nt, Homo sapiens
  misc_RNA (1)...(19): siRNA sense strand
aaccuggacuugaacguuu

SEQ ID NO: 1390803 - RNA, 19 nt, Homo sapiens
  misc_RNA (1)...(19): siRNA sense strand
uuaugaaacuggauuugga

SEQ ID NO: 1390804 - RNA, 19 nt, Homo sapiens
  misc_RNA (1)...(19): siRNA sense strand
gucaaggauuugcuaaaga

SEQ ID NO: 1390805 - RNA, 19 nt, Homo sapiens
  misc_RNA (1)...(19): siRNA sense strand
ucacacguccgacucauga

SEQ ID NO: 1390806 - RNA, 19 nt, Homo sapiens
  misc_RNA (1)...(19): siRNA sense strand
gagaagcugcucaggcuau

SEQ ID NO: 1390807 - RNA, 19 nt, Homo sapiens
  misc_RNA (1)...(19): siRNA sense strand
uuggagggcugcugaaguu

SEQ ID NO: 1390808 - RNA, 19 nt, Homo sapiens
  misc_RNA (1)...(19): siRNA sense strand
aagaagaaccaaauggaaa

SEQ ID NO: 1390809 - RNA, 19 nt, Homo sapiens
  misc_RNA (1)...(19): siRNA sense strand
cauagauccugaaauugau

SEQ ID NO: 1390810 - RNA, 19 nt, Homo sapiens
  misc_RNA (1)...(19): siRNA sense strand
gacgccaucuucacacgaa

SEQ ID NO: 1390811 - RNA, 19 nt, Homo sapiens
  misc_RNA (1)...(19): siRNA sense strand
aaagaagaaccaaauggaa

SEQ ID NO: 1390812 - RNA, 19 nt, Homo sapiens
  misc_RNA (1)...(19): siRNA sense strand
ccgccugccuuccauggua

SEQ ID NO: 1390813 - RNA, 19 nt, Homo sapiens
  misc_RNA (1)...(19): siRNA sense strand
gccagacauuaguggauaa

SEQ ID NO: 1390814 - RNA, 19 nt, Homo sapiens
  misc_RNA (1)...(19): siRNA sense strand
cagguaggcuugaucacau

SEQ ID NO: 1390815 - RNA, 19 nt, Homo sapiens
  misc_RNA (1)...(19): siRNA sense strand
ccauaucgccagccucauu

SEQ ID NO: 1390816 - RNA, 19 nt, Homo sapiens
  misc_RNA (1)...(19): siRNA sense strand
gauccuaaccuggacuuga

SEQ ID NO: 1390817 - RNA, 19 nt, Homo sapiens
  misc_RNA (1)...(19): siRNA sense strand
caucagggaagagcauaua

SEQ ID NO: 1390818 - RNA, 19 nt, Homo sapiens
  misc_RNA (1)...(19): siRNA sense strand
gaaccuuugugcccaacuc

SEQ ID NO: 1390819 - RNA, 19 nt, Homo sapiens
  misc_RNA (1)...(19): siRNA sense strand
ugacuccacuauccacuuc

SEQ ID NO: 1390820 - RNA, 19 nt, Homo sapiens
  misc_RNA (1)...(19): siRNA sense strand
aggagaagcugcacuaucg

SEQ ID NO: 1390821 - RNA, 19 nt, Homo sapiens
  misc_RNA (1)...(19): siRNA sense strand
ggacucccguauuccuuca

SEQ ID NO: 1390822 - RNA, 19 nt, Homo sapiens
  misc_RNA (1)...(19): siRNA sense strand
gaaucuggacucccguauu

SEQ ID NO: 1390823 - RNA, 19 nt, Homo sapiens
  misc_RNA (1)...(19): siRNA sense strand
cuuccucucuuccauuauu

SEQ ID NO: 1390824 - RNA, 19 nt, Homo sapiens
  misc_RNA (1)...(19): siRNA sense strand
ugccagacauuaguggaua

SEQ ID NO: 1390825 - RNA, 19 nt, Homo sapiens
  misc_RNA (1)...(19): siRNA sense strand
aggauuugcuaaagaagaa

SEQ ID NO: 1390826 - RNA, 19 nt, Homo sapiens
  misc_RNA (1)...(19): siRNA sense strand
guuccugggucgaagaaga

SEQ ID NO: 1390827 - RNA, 19 nt, Homo sapiens
  misc_RNA (1)...(19): siRNA sense strand
cagaggagaagcugcacua

SEQ ID NO: 1390828 - RNA, 19 nt, Homo sapiens
  misc_RNA (1)...(19): siRNA sense strand
gaaaauugccagacauuag

SEQ ID NO: 1390829 - RNA, 19 nt, Homo sapiens
  misc_RNA (1)...(19): siRNA sense strand
uuaauggacuggacuucau

SEQ ID NO: 1390830 - RNA, 19 nt, Homo sapiens
  misc_RNA (1)...(19): siRNA sense strand
ggcaguagacgccaucuuc

SEQ ID NO: 1390831 - RNA, 19 nt, Homo sapiens
  misc_RNA (1)...(19): siRNA sense strand
gcagaggaggccgaaauug

SEQ ID NO: 1390832 - RNA, 19 nt, Homo sapiens
  misc_RNA (1)...(19): siRNA sense strand
ggacuucauguuucucuca

SEQ ID NO: 1390833 - RNA, 19 nt, Homo sapiens
  misc_RNA (1)...(19): siRNA sense strand
gaagaagaaucgggguuga

SEQ ID NO: 1390834 - RNA, 19 nt, Homo sapiens
  misc_RNA (1)...(19): siRNA sense strand
gcuaaagaagaaccaaaug

SEQ ID NO: 1390835 - RNA, 19 nt, Homo sapiens
  misc_RNA (1)...(19): siRNA sense strand
ugucaaggauuugcuaaag

SEQ ID NO: 1390836 - RNA, 19 nt, Homo sapiens
  misc_RNA (1)...(19): siRNA sense strand
gcaguagacgccaucuuca

SEQ ID NO: 1390837 - RNA, 19 nt, Homo sapiens
  misc_RNA (1)...(19): siRNA sense strand
gugcccaacuccacagaau

SEQ ID NO: 1390838 - RNA, 19 nt, Homo sapiens
  misc_RNA (1)...(19): siRNA sense strand
aaacaggaugagaauauga

SEQ ID NO: 1390839 - RNA, 19 nt, Homo sapiens
  misc_RNA (1)...(19): siRNA sense strand
aggaggagcuggccgagau

SEQ ID NO: 1390840 - RNA, 19 nt, Homo sapiens
  misc_RNA (1)...(19): siRNA sense strand
ugaaacgcaugaaguuguc

SEQ ID NO: 1390841 - RNA, 19 nt, Homo sapiens
  misc_RNA (1)...(19): siRNA sense strand
gcuccugggucacaucaag

SEQ ID NO: 1390842 - RNA, 19 nt, Homo sapiens
  misc_RNA (1)...(19): siRNA sense strand
cauccugggcuuuaagaaa

SEQ ID NO: 1390843 - RNA, 19 nt, Homo sapiens
  misc_RNA (1)...(19): siRNA sense strand
agagaguucuggaugagau

SEQ ID NO: 1390844 - RNA, 19 nt, Homo sapiens
  misc_RNA (1)...(19): siRNA sense strand
gcuguggaauucaggauac

SEQ ID NO: 1390845 - RNA, 19 nt, Homo sapiens
  misc_RNA (1)...(19): siRNA sense strand
cagcagaggaggccgaaau

SEQ ID NO: 1390846 - RNA, 19 nt, Homo sapiens
  misc_RNA (1)...(19): siRNA sense strand
gaggagaagcugcacuauc

SEQ ID NO: 1390847 - RNA, 19 nt, Homo sapiens
  misc_RNA (1)...(19): siRNA sense strand
ggccagugacuuugagauu

SEQ ID NO: 1390848 - RNA, 19 nt, Homo sapiens
  misc_RNA (1)...(19): siRNA sense strand
ucugaugaccugcaccaua

SEQ ID NO: 1390849 - RNA, 19 nt, Homo sapiens
  misc_RNA (1)...(19): siRNA sense strand
ggaaaauugccagacauua

SEQ ID NO: 1390850 - RNA, 19 nt, Homo sapiens
  misc_RNA (1)...(19): siRNA sense strand
gcgaaagcagugaacaaug

SEQ ID NO: 1390851 - RNA, 19 nt, Homo sapiens
  misc_RNA (1)...(19): siRNA sense strand
aaacagguaggcuugauca

SEQ ID NO: 1390852 - RNA, 19 nt, Homo sapiens
  misc_RNA (1)...(19): siRNA sense strand
aaagggagggucaaaguca

SEQ ID NO: 1390853 - RNA, 19 nt, Homo sapiens
  misc_RNA (1)...(19): siRNA sense strand
gcacgagcagcugucuuaa

SEQ ID NO: 1390854 - RNA, 19 nt, Homo sapiens
  misc_RNA (1)...(19): siRNA sense strand
caacauagauccugaaauu

SEQ ID NO: 1390855 - RNA, 19 nt, Homo sapiens
  misc_RNA (1)...(19): siRNA sense strand
gaacauagaucaagacacu

SEQ ID NO: 1390856 - RNA, 19 nt, Homo sapiens
  misc_RNA (1)...(19): siRNA sense strand
gcaaggagcuggagaaucu

SEQ ID NO: 1390857 - RNA, 19 nt, Homo sapiens
  misc_RNA (1)...(19): siRNA sense strand
ccaaggagcuggaugcauu

SEQ ID NO: 1390858 - RNA, 19 nt, Homo sapiens
  misc_RNA (1)...(19): siRNA sense strand
gcaacgaucuugucuucuu

SEQ ID NO: 1390859 - RNA, 19 nt, Homo sapiens
  misc_RNA (1)...(19): siRNA sense strand
ggacuggacuucauguuuc

SEQ ID NO: 1390860 - RNA, 19 nt, Homo sapiens
  misc_RNA (1)...(19): siRNA sense strand
gaauaugacucgauuucug

SEQ ID NO: 1390861 - RNA, 19 nt, Homo sapiens
  misc_RNA (1)...(19): siRNA sense strand
ggacuucccaguuuccuua

SEQ ID NO: 1390862 - RNA, 19 nt, Homo sapiens
  misc_RNA (1)...(19): siRNA sense strand
ccagugacuuugagauuaa

SEQ ID NO: 1390863 - RNA, 19 nt, Homo sapiens
  misc_RNA (1)...(19): siRNA sense strand
gccagugacuuugagauua

SEQ ID NO: 1390864 - RNA, 19 nt, Homo sapiens
  misc_RNA (1)...(19): siRNA sense strand
ucaaggauuugcuaaagaa

SEQ ID NO: 1390865 - RNA, 19 nt, Homo sapiens
  misc_RNA (1)...(19): siRNA sense strand
gaaacuggauuuggaagau

SEQ ID NO: 1390866 - RNA, 19 nt, Homo sapiens
  misc_RNA (1)...(19): siRNA sense strand
ggacauugcccaagaguuc

SEQ ID NO: 1390867 - RNA, 19 nt, Homo sapiens
  misc_RNA (1)...(19): siRNA sense strand
gaucuugucuucuucuauc

SEQ ID NO: 1390868 - RNA, 19 nt, Homo sapiens
  misc_RNA (1)...(19): siRNA sense strand
cugauuggcuuccuucuuu

SEQ ID NO: 1390869 - RNA, 19 nt, Homo sapiens
  misc_RNA (1)...(19): siRNA sense strand
ccaaacaggaugagaauau

SEQ ID NO: 1390870 - RNA, 19 nt, Homo sapiens
  misc_RNA (1)...(19): siRNA sense strand
ggguugaacuggaagacua

SEQ ID NO: 1390871 - RNA, 19 nt, Homo sapiens
  misc_RNA (1)...(19): siRNA sense strand
gagaauaugacucgauuuc

SEQ ID NO: 1390872 - RNA, 19 nt, Homo sapiens
  misc_RNA (1)...(19): siRNA sense strand
gacauuaguggauaaguuu

SEQ ID NO: 1390873 - RNA, 19 nt, Homo sapiens
  misc_RNA (1)...(19): siRNA sense strand
gaagagcauauaccucaaa

SEQ ID NO: 1390874 - RNA, 19 nt, Homo sapiens
  misc_RNA (1)...(19): siRNA sense strand
caaacaggaugagaauaug

SEQ ID NO: 1390875 - RNA, 19 nt, Homo sapiens
  misc_RNA (1)...(19): siRNA sense strand
agacauuaguggauaaguu

SEQ ID NO: 1390876 - RNA, 19 nt, Homo sapiens
  misc_RNA (1)...(19): siRNA sense strand
cgaaagcagugaacaaugc

SEQ ID NO: 1390877 - RNA, 19 nt, Homo sapiens
  misc_RNA (1)...(19): siRNA sense strand
gguagaggccagugacuuu

SEQ ID NO: 1390878 - RNA, 19 nt, Homo sapiens
  misc_RNA (1)...(19): siRNA sense strand
gaacuggaagacuauaaug

SEQ ID NO: 1390879 - RNA, 19 nt, Homo sapiens
  misc_RNA (1)...(19): siRNA sense strand
gcaaacaacgccuccuuuc

SEQ ID NO: 1390880 - RNA, 19 nt, Homo sapiens
  misc_RNA (1)...(19): siRNA sense strand
ggcacgagcagcugucuua

SEQ ID NO: 1390881 - RNA, 19 nt, Homo sapiens
  misc_RNA (1)...(19): siRNA sense strand
ugacucaucuggugaacau

SEQ ID NO: 1390882 - RNA, 19 nt, Homo sapiens
  misc_RNA (1)...(19): siRNA sense strand
aggagacgcugcugaugua

SEQ ID NO: 1390883 - RNA, 19 nt, Homo sapiens
  misc_RNA (1)...(19): siRNA sense strand
cugaugaccugcaccauau

SEQ ID NO: 1390884 - RNA, 19 nt, Homo sapiens
  misc_RNA (1)...(19): siRNA sense strand
uaaagaagaaccaaaugga

SEQ ID NO: 1390885 - RNA, 19 nt, Homo sapiens
  misc_RNA (1)...(19): siRNA sense strand
ggaagagcauauaccucaa

SEQ ID NO: 1390886 - RNA, 19 nt, Homo sapiens
  misc_RNA (1)...(19): siRNA sense strand
ggacaaagggagggucaaa

SEQ ID NO: 1390887 - RNA, 19 nt, Homo sapiens
  misc_RNA (1)...(19): siRNA sense strand
gagaagcugcacuaucgua

SEQ ID NO: 1390888 - RNA, 19 nt, Homo sapiens
  misc_RNA (1)...(19): siRNA sense strand
acauagauccugaaauuga

SEQ ID NO: 1390889 - RNA, 19 nt, Homo sapiens
  misc_RNA (1)...(19): siRNA sense strand
aaucuggacucccguauuc

SEQ ID NO: 1390890 - RNA, 19 nt, Homo sapiens
  misc_RNA (1)...(19): siRNA sense strand
gguccuuauugaugaauuu

SEQ ID NO: 1390891 - RNA, 19 nt, Homo sapiens
  misc_RNA (1)...(19): siRNA sense strand
acauagaucaagacacuua

SEQ ID NO: 1390892 - RNA, 19 nt, Homo sapiens
  misc_RNA (1)...(19): siRNA sense strand
cacagucgcugguccuuau

SEQ ID NO: 1390893 - RNA, 19 nt, Homo sapiens
  misc_RNA (1)...(19): siRNA sense strand
ugucuuaacccgaguauug

SEQ ID NO: 1390894 - RNA, 19 nt, Homo sapiens
  misc_RNA (1)...(19): siRNA sense strand
uuacaguguucuacagauu

SEQ ID NO: 1390895 - RNA, 19 nt, Homo sapiens
  misc_RNA (1)...(19): siRNA sense strand
gcacagagagccuaaaaga

SEQ ID NO: 1390896 - RNA, 19 nt, Homo sapiens
  misc_RNA (1)...(19): siRNA sense strand
uggcaacgaucuugucuuc

SEQ ID NO: 1390897 - RNA, 19 nt, Homo sapiens
  misc_RNA (1)...(19): siRNA sense strand
aaacaacgccuccuuucug

SEQ ID NO: 1390898 - RNA, 19 nt, Homo sapiens
  misc_RNA (1)...(19): siRNA sense strand
caacgaucuugucuucuuc

SEQ ID NO: 1390899 - RNA, 19 nt, Homo sapiens
  misc_RNA (1)...(19): siRNA sense strand
gcacagucgcugguccuua

SEQ ID NO: 1390900 - RNA, 19 nt, Homo sapiens
  misc_RNA (1)...(19): siRNA sense strand
gagcauauaccucaaacag

SEQ ID NO: 1390901 - RNA, 19 nt, Homo sapiens
  misc_RNA (1)...(19): siRNA sense strand
caacgccuccuuucuggaa

SEQ ID NO: 1390902 - RNA, 19 nt, Homo sapiens
  misc_RNA (1)...(19): siRNA sense strand
aaccuggacuugaacguuu

SEQ ID NO: 1390903 - RNA, 19 nt, Homo sapiens
  misc_RNA (1)...(19): siRNA sense strand
uuaugaaacuggauuugga

SEQ ID NO: 1390904 - RNA, 19 nt, Homo sapiens
  misc_RNA (1)...(19): siRNA sense strand
gucaaggauuugcuaaaga

SEQ ID NO: 1390905 - RNA, 19 nt, Homo sapiens
  misc_RNA (1)...(19): siRNA sense strand
ucacacguccgacucauga

SEQ ID NO: 1390906 - RNA, 19 nt, Homo sapiens
  misc_RNA (1)...(19): siRNA sense strand
gagaagcugcucaggcuau

SEQ ID NO: 1390907 - RNA, 19 nt, Homo sapiens
  misc_RNA (1)...(19): siRNA sense strand
uuggagggcugcugaaguu

SEQ ID NO: 1390908 - RNA, 19 nt, Homo sapiens
  misc_RNA (1)...(19): siRNA sense strand
aagaagaaccaaauggaaa

SEQ ID NO: 1390909 - RNA, 19 nt, Homo sapiens
  misc_RNA (1)...(19): siRNA sense strand
cauagauccugaaauugau

SEQ ID NO: 1390910 - RNA, 19 nt, Homo sapiens
  misc_RNA (1)...(19): siRNA sense strand
gacgccaucuucacacgaa

SEQ ID NO: 1390911 - RNA, 19 nt, Homo sapiens
  misc_RNA (1)...(19): siRNA sense strand
aaagaagaaccaaauggaa

SEQ ID NO: 1390912 - RNA, 19 nt, Homo sapiens
  misc_RNA (1)...(19): siRNA sense strand
ccgccugccuuccauggua

SEQ ID NO: 1390913 - RNA, 19 nt, Homo sapiens
  misc_RNA (1)...(19): siRNA sense strand
gccagacauuaguggauaa

SEQ ID NO: 1390914 - RNA, 19 nt, Homo sapiens
  misc_RNA (1)...(19): siRNA sense strand
cagguaggcuugaucacau

SEQ ID NO: 1390915 - RNA, 19 nt, Homo sapiens
  misc_RNA (1)...(19): siRNA sense strand
ccauaucgccagccucauu

SEQ ID NO: 1390916 - RNA, 19 nt, Homo sapiens
  misc_RNA (1)...(19): siRNA sense strand
gauccuaaccuggacuuga

SEQ ID NO: 1390917 - RNA, 19 nt, Homo sapiens
  misc_RNA (1)...(19): siRNA sense strand
caucagggaagagcauaua

SEQ ID NO: 1390918 - RNA, 19 nt, Homo sapiens
  misc_RNA (1)...(19): siRNA sense strand
gaaccuuugugcccaacuc

SEQ ID NO: 1390919 - RNA, 19 nt, Homo sapiens
  misc_RNA (1)...(19): siRNA sense strand
ugacuccacuauccacuuc

SEQ ID NO: 1390920 - RNA, 19 nt, Homo sapiens
  misc_RNA (1)...(19): siRNA sense strand
aggagaagcugcacuaucg

SEQ ID NO: 1390921 - RNA, 19 nt, Homo sapiens
  misc_RNA (1)...(19): siRNA sense strand
ggacucccguauuccuuca

SEQ ID NO: 1390922 - RNA, 19 nt, Homo sapiens
  misc_RNA (1)...(19): siRNA sense strand
gaaucuggacucccguauu

SEQ ID NO: 1390923 - RNA, 19 nt, Homo sapiens
  misc_RNA (1)...(19): siRNA sense strand
cuuccucucuuccauuauu

SEQ ID NO: 1390924 - RNA, 19 nt, Homo sapiens
  misc_RNA (1)...(19): siRNA sense strand
ugccagacauuaguggaua

SEQ ID NO: 1390925 - RNA, 19 nt, Homo sapiens
  misc_RNA (1)...(19): siRNA sense strand
aggauuugcuaaagaagaa

SEQ ID NO: 1390926 - RNA, 19 nt, Homo sapiens
  misc_RNA (1)...(19): siRNA sense strand
guuccugggucgaagaaga

SEQ ID NO: 1390927 - RNA, 19 nt, Homo sapiens
  misc_RNA (1)...(19): siRNA sense strand
cagaggagaagcugcacua

SEQ ID NO: 1390928 - RNA, 19 nt, Homo sapiens
  misc_RNA (1)...(19): siRNA sense strand
gaaaauugccagacauuag

SEQ ID NO: 1390929 - RNA, 19 nt, Homo sapiens
  misc_RNA (1)...(19): siRNA sense strand
uuaauggacuggacuucau

SEQ ID NO: 1390930 - RNA, 19 nt, Homo sapiens
  misc_RNA (1)...(19): siRNA sense strand
ggcaguagacgccaucuuc

SEQ ID NO: 1390931 - RNA, 19 nt, Homo sapiens
  misc_RNA (1)...(19): siRNA sense strand
gcagaggaggccgaaauug

SEQ ID NO: 1390932 - RNA, 19 nt, Homo sapiens
  misc_RNA (1)...(19): siRNA sense strand
ggacuucauguuucucuca

SEQ ID NO: 1390933 - RNA, 19 nt, Homo sapiens
  misc_RNA (1)...(19): siRNA sense strand
gaagaagaaucgggguuga

SEQ ID NO: 1390934 - RNA, 19 nt, Homo sapiens
  misc_RNA (1)...(19): siRNA sense strand
gcuaaagaagaaccaaaug

SEQ ID NO: 1390935 - RNA, 19 nt, Homo sapiens
  misc_RNA (1)...(19): siRNA sense strand
ugucaaggauuugcuaaag

SEQ ID NO: 1390936 - RNA, 19 nt, Homo sapiens
  misc_RNA (1)...(19): siRNA sense strand
gcaguagacgccaucuuca

SEQ ID NO: 1390937 - RNA, 19 nt, Homo sapiens
  misc_RNA (1)...(19): siRNA sense strand
gugcccaacuccacagaau

SEQ ID NO: 1390938 - RNA, 19 nt, Homo sapiens
  misc_RNA (1)...(19): siRNA sense strand
aaacaggaugagaauauga

SEQ ID NO: 1390939 - RNA, 19 nt, Homo sapiens
  misc_RNA (1)...(19): siRNA sense strand
aggaggagcuggccgagau

SEQ ID NO: 1390940 - RNA, 19 nt, Homo sapiens
  misc_RNA (1)...(19): siRNA sense strand
ugaaacgcaugaaguuguc

SEQ ID NO: 1390941 - RNA, 19 nt, Homo sapiens
  misc_RNA (1)...(19): siRNA sense strand
gcuccugggucacaucaag

SEQ ID NO: 1390942 - RNA, 19 nt, Homo sapiens
  misc_RNA (1)...(19): siRNA sense strand
cauccugggcuuuaagaaa

SEQ ID NO: 1390943 - RNA, 19 nt, Homo sapiens
  misc_RNA (1)...(19): siRNA sense strand
agagaguucuggaugagau

SEQ ID NO: 1390944 - RNA, 19 nt, Homo sapiens
  misc_RNA (1)...(19): siRNA sense strand
gcuguggaauucaggauac

SEQ ID NO: 1390945 - RNA, 19 nt, Homo sapiens
  misc_RNA (1)...(19): siRNA sense strand
cagcagaggaggccgaaau

SEQ ID NO: 1390946 - RNA, 19 nt, Homo sapiens
  misc_RNA (1)...(19): siRNA sense strand
gaggagaagcugcacuauc

SEQ ID NO: 1390947 - RNA, 19 nt, Homo sapiens
  misc_RNA (1)...(19): siRNA sense strand
ggccagugacuuugagauu

SEQ ID NO: 1390948 - RNA, 19 nt, Homo sapiens
  misc_RNA (1)...(19): siRNA sense strand
ucugaugaccugcaccaua

SEQ ID NO: 1390949 - RNA, 19 nt, Homo sapiens
  misc_RNA (1)...(19): siRNA sense strand
ggaaaauugccagacauua

SEQ ID NO: 1390950 - RNA, 19 nt, Homo sapiens
  misc_RNA (1)...(19): siRNA sense strand
gcgaaagcagugaacaaug

SEQ ID NO: 1390951 - RNA, 19 nt, Homo sapiens
  misc_RNA (1)...(19): siRNA sense strand
aaacagguaggcuugauca

SEQ ID NO: 1390952 - RNA, 19 nt, Homo sapiens
  misc_RNA (1)...(19): siRNA sense strand
aaagggagggucaaaguca

SEQ ID NO: 1390953 - RNA, 19 nt, Homo sapiens
  misc_RNA (1)...(19): siRNA sense strand
gcacgagcagcugucuuaa

SEQ ID NO: 1390954 - RNA, 19 nt, Homo sapiens
  misc_RNA (1)...(19): siRNA sense strand
caacauagauccugaaauu

SEQ ID NO: 1390955 - RNA, 19 nt, Homo sapiens
  misc_RNA (1)...(19): siRNA sense strand
gaacauagaucaagacacu

SEQ ID NO: 1390956 - RNA, 19 nt, Homo sapiens
  misc_RNA (1)...(19): siRNA sense strand
gcaaggagcuggagaaucu

SEQ ID NO: 1390957 - RNA, 19 nt, Homo sapiens
  misc_RNA (1)...(19): siRNA sense strand
ccaaggagcuggaugcauu

SEQ ID NO: 1390958 - RNA, 19 nt, Homo sapiens
  misc_RNA (1)...(19): siRNA sense strand
gcaacgaucuugucuucuu

SEQ ID NO: 1390959 - RNA, 19 nt, Homo sapiens
  misc_RNA (1)...(19): siRNA sense strand
ggacuggacuucauguuuc

SEQ ID NO: 1390960 - RNA, 19 nt, Homo sapiens
  misc_RNA (1)...(19): siRNA sense strand
gaauaugacucgauuucug

SEQ ID NO: 1390961 - RNA, 19 nt, Homo sapiens
  misc_RNA (1)...(19): siRNA sense strand
ggacuucccaguuuccuua

SEQ ID NO: 1390962 - RNA, 19 nt, Homo sapiens
  misc_RNA (1)...(19): siRNA sense strand
ccagugacuuugagauuaa

SEQ ID NO: 1390963 - RNA, 19 nt, Homo sapiens
  misc_RNA (1)...(19): siRNA sense strand
gccagugacuuugagauua

SEQ ID NO: 1390964 - RNA, 19 nt, Homo sapiens
  misc_RNA (1)...(19): siRNA sense strand
ucaaggauuugcuaaagaa

SEQ ID NO: 1390965 - RNA, 19 nt, Homo sapiens
  misc_RNA (1)...(19): siRNA sense strand
gaaacuggauuuggaagau

SEQ ID NO: 1390966 - RNA, 19 nt, Homo sapiens
  misc_RNA (1)...(19): siRNA sense strand
ggacauugcccaagaguuc

SEQ ID NO: 1390967 - RNA, 19 nt, Homo sapiens
  misc_RNA (1)...(19): siRNA sense strand
gaucuugucuucuucuauc

SEQ ID NO: 1390968 - RNA, 19 nt, Homo sapiens
  misc_RNA (1)...(19): siRNA sense strand
cugauuggcuuccuucuuu

SEQ ID NO: 1390969 - RNA, 19 nt, Homo sapiens
  misc_RNA (1)...(19): siRNA sense strand
ccaaacaggaugagaauau

SEQ ID NO: 1390970 - RNA, 19 nt, Homo sapiens
  misc_RNA (1)...(19): siRNA sense strand
ggguugaacuggaagacua

SEQ ID NO: 1390971 - RNA, 19 nt, Homo sapiens
  misc_RNA (1)...(19): siRNA sense strand
gagaauaugacucgauuuc

SEQ ID NO: 1390972 - RNA, 19 nt, Homo sapiens
  misc_RNA (1)...(19): siRNA sense strand
gacauuaguggauaaguuu

SEQ ID NO: 1390973 - RNA, 19 nt, Homo sapiens
  misc_RNA (1)...(19): siRNA sense strand
gaagagcauauaccucaaa

SEQ ID NO: 1390974 - RNA, 19 nt, Homo sapiens
  misc_RNA (1)...(19): siRNA sense strand
caaacaggaugagaauaug

SEQ ID NO: 1390975 - RNA, 19 nt, Homo sapiens
  misc_RNA (1)...(19): siRNA sense strand
agacauuaguggauaaguu

SEQ ID NO: 1390976 - RNA, 19 nt, Homo sapiens
  misc_RNA (1)...(19): siRNA sense strand
cgaaagcagugaacaaugc

SEQ ID NO: 1390977 - RNA, 19 nt, Homo sapiens
  misc_RNA (1)...(19): siRNA sense strand
gguagaggccagugacuuu

SEQ ID NO: 1390978 - RNA, 19 nt, Homo sapiens
  misc_RNA (1)...(19): siRNA sense strand
gaacuggaagacuauaaug

SEQ ID NO: 1390979 - RNA, 19 nt, Homo sapiens
  misc_RNA (1)...(19): siRNA sense strand
gcaaacaacgccuccuuuc

SEQ ID NO: 1390980 - RNA, 19 nt, Homo sapiens
  misc_RNA (1)...(19): siRNA sense strand
ggcacgagcagcugucuua

SEQ ID NO: 1390981 - RNA, 19 nt, Homo sapiens
  misc_RNA (1)...(19): siRNA sense strand
ugacucaucuggugaacau

SEQ ID NO: 1390982 - RNA, 19 nt, Homo sapiens
  misc_RNA (1)...(19): siRNA sense strand
aggagacgcugcugaugua

SEQ ID NO: 1390983 - RNA, 19 nt, Homo sapiens
  misc_RNA (1)...(19): siRNA sense strand
cugaugaccugcaccauau

SEQ ID NO: 1390984 - RNA, 19 nt, Homo sapiens
  misc_RNA (1)...(19): siRNA sense strand
uaaagaagaaccaaaugga

SEQ ID NO: 1390985 - RNA, 19 nt, Homo sapiens
  misc_RNA (1)...(19): siRNA sense strand
ggaagagcauauaccucaa

SEQ ID NO: 1390986 - RNA, 19 nt, Homo sapiens
  misc_RNA (1)...(19): siRNA sense strand
ggacaaagggagggucaaa

SEQ ID NO: 1390987 - RNA, 19 nt, Homo sapiens
  misc_RNA (1)...(19): siRNA sense strand
gagaagcugcacuaucgua

SEQ ID NO: 1390988 - RNA, 19 nt, Homo sapiens
  misc_RNA (1)...(19): siRNA sense strand
acauagauccugaaauuga

SEQ ID NO: 1390989 - RNA, 19 nt, Homo sapiens
  misc_RNA (1)...(19): siRNA sense strand
aaucuggacucccguauuc

SEQ ID NO: 1390990 - RNA, 19 nt, Homo sapiens
  misc_RNA (1)...(19): siRNA sense strand
gguccuuauugaugaauuu

SEQ ID NO: 1390991 - RNA, 19 nt, Homo sapiens
  misc_RNA (1)...(19): siRNA sense strand
acauagaucaagacacuua

SEQ ID NO: 1390992 - RNA, 19 nt, Homo sapiens
  misc_RNA (1)...(19): siRNA sense strand
cacagucgcugguccuuau

SEQ ID NO: 1390993 - RNA, 19 nt, Homo sapiens
  misc_RNA (1)...(19): siRNA sense strand
ugucuuaacccgaguauug

SEQ ID NO: 1390994 - RNA, 19 nt, Homo sapiens
  misc_RNA (1)...(19): siRNA sense strand
uuacaguguucuacagauu

SEQ ID NO: 1390995 - RNA, 19 nt, Homo sapiens
  misc_RNA (1)...(19): siRNA sense strand
gcacagagagccuaaaaga

SEQ ID NO: 1390996 - RNA, 19 nt, Homo sapiens
  misc_RNA (1)...(19): siRNA sense strand
uggcaacgaucuugucuuc

SEQ ID NO: 1390997 - RNA, 19 nt, Homo sapiens
  misc_RNA (1)...(19): siRNA sense strand
aaacaacgccuccuuucug

SEQ ID NO: 1390998 - RNA, 19 nt, Homo sapiens
  misc_RNA (1)...(19): siRNA sense strand
caacgaucuugucuucuuc

SEQ ID NO: 1390999 - RNA, 19 nt, Homo sapiens
  misc_RNA (1)...(19): siRNA sense strand
gcacagucgcugguccuua

SEQ ID NO: 1391000 - RNA, 19 nt, Homo sapiens
  misc_RNA (1)...(19): siRNA sense strand
gagcauauaccucaaacag

SEQ ID NO: 1391001 - RNA, 19 nt, Homo sapiens
  misc_RNA (1)...(19): siRNA sense strand
caacgccuccuuucuggaa

SEQ ID NO: 1391002 - RNA, 19 nt, Homo sapiens
  misc_RNA (1)...(19): siRNA sense strand
aaccuggacuugaacguuu

SEQ ID NO: 1391003 - RNA, 19 nt, Homo sapiens
  misc_RNA (1)...(19): siRNA sense strand
uuaugaaacuggauuugga

SEQ ID NO: 1391004 - RNA, 19 nt, Homo sapiens
  misc_RNA (1)...(19): siRNA sense strand
gucaaggauuugcuaaaga

SEQ ID NO: 1391005 - RNA, 19 nt, Homo sapiens
  misc_RNA (1)...(19): siRNA sense strand
ucacacguccgacucauga

SEQ ID NO: 1391006 - RNA, 19 nt, Homo sapiens
  misc_RNA (1)...(19): siRNA sense strand
gagaagcugcucaggcuau

SEQ ID NO: 1391007 - RNA, 19 nt, Homo sapiens
  misc_RNA (1)...(19): siRNA sense strand
uuggagggcugcugaaguu

SEQ ID NO: 1391008 - RNA, 19 nt, Homo sapiens
  misc_RNA (1)...(19): siRNA sense strand
aagaagaaccaaauggaaa

SEQ ID NO: 1391009 - RNA, 19 nt, Homo sapiens
  misc_RNA (1)...(19): siRNA sense strand
cauagauccugaaauugau

SEQ ID NO: 1391010 - RNA, 19 nt, Homo sapiens
  misc_RNA (1)...(19): siRNA sense strand
gacgccaucuucacacgaa

SEQ ID NO: 1391011 - RNA, 19 nt, Homo sapiens
  misc_RNA (1)...(19): siRNA sense strand
aaagaagaaccaaauggaa

SEQ ID NO: 1391012 - RNA, 19 nt, Homo sapiens
  misc_RNA (1)...(19): siRNA sense strand
ccgccugccuuccauggua

SEQ ID NO: 1391013 - RNA, 19 nt, Homo sapiens
  misc_RNA (1)...(19): siRNA sense strand
gccagacauuaguggauaa

SEQ ID NO: 1391014 - RNA, 19 nt, Homo sapiens
  misc_RNA (1)...(19): siRNA sense strand
cagguaggcuugaucacau

SEQ ID NO: 1391015 - RNA, 19 nt, Homo sapiens
  misc_RNA (1)...(19): siRNA sense strand
ccauaucgccagccucauu

SEQ ID NO: 1391016 - RNA, 19 nt, Homo sapiens
  misc_RNA (1)...(19): siRNA sense strand
gauccuaaccuggacuuga

SEQ ID NO: 1391017 - RNA, 19 nt, Homo sapiens
  misc_RNA (1)...(19): siRNA sense strand
caucagggaagagcauaua

SEQ ID NO: 1391018 - RNA, 19 nt, Homo sapiens
  misc_RNA (1)...(19): siRNA sense strand
gaaccuuugugcccaacuc

SEQ ID NO: 1391019 - RNA, 19 nt, Homo sapiens
  misc_RNA (1)...(19): siRNA sense strand
ugacuccacuauccacuuc

SEQ ID NO: 1391020 - RNA, 19 nt, Homo sapiens
  misc_RNA (1)...(19): siRNA sense strand
aggagaagcugcacuaucg

SEQ ID NO: 1391021 - RNA, 19 nt, Homo sapiens
  misc_RNA (1)...(19): siRNA sense strand
ggacucccguauuccuuca

SEQ ID NO: 1391022 - RNA, 19 nt, Homo sapiens
  misc_RNA (1)...(19): siRNA sense strand
gaaucuggacucccguauu

SEQ ID NO: 1391023 - RNA, 19 nt, Homo sapiens
  misc_RNA (1)...(19): siRNA sense strand
cuuccucucuuccauuauu

SEQ ID NO: 1391024 - RNA, 19 nt, Homo sapiens
  misc_RNA (1)...(19): siRNA sense strand
ugccagacauuaguggaua

SEQ ID NO: 1391025 - RNA, 19 nt, Homo sapiens
  misc_RNA (1)...(19): siRNA sense strand
aggauuugcuaaagaagaa

SEQ ID NO: 1391026 - RNA, 19 nt, Homo sapiens
  misc_RNA (1)...(19): siRNA sense strand
guuccugggucgaagaaga

SEQ ID NO: 1391027 - RNA, 19 nt, Homo sapiens
  misc_RNA (1)...(19): siRNA sense strand
cagaggagaagcugcacua

SEQ ID NO: 1391028 - RNA, 19 nt, Homo sapiens
  misc_RNA (1)...(19): siRNA sense strand
gaaaauugccagacauuag

SEQ ID NO: 1391029 - RNA, 19 nt, Homo sapiens
  misc_RNA (1)...(19): siRNA sense strand
uuaauggacuggacuucau

SEQ ID NO: 1391030 - RNA, 19 nt, Homo sapiens
  misc_RNA (1)...(19): siRNA sense strand
ggcaguagacgccaucuuc

SEQ ID NO: 1391031 - RNA, 19 nt, Homo sapiens
  misc_RNA (1)...(19): siRNA sense strand
gcagaggaggccgaaauug

SEQ ID NO: 1391032 - RNA, 19 nt, Homo sapiens
  misc_RNA (1)...(19): siRNA sense strand
ggacuucauguuucucuca

SEQ ID NO: 1391033 - RNA, 19 nt, Homo sapiens
  misc_RNA (1)...(19): siRNA sense strand
gaagaagaaucgggguuga

SEQ ID NO: 1391034 - RNA, 19 nt, Homo sapiens
  misc_RNA (1)...(19): siRNA sense strand
gcuaaagaagaaccaaaug

SEQ ID NO: 1391035 - RNA, 19 nt, Homo sapiens
  misc_RNA (1)...(19): siRNA sense strand
ugucaaggauuugcuaaag

SEQ ID NO: 1391036 - RNA, 19 nt, Homo sapiens
  misc_RNA (1)...(19): siRNA sense strand
gcaguagacgccaucuuca

SEQ ID NO: 1391037 - RNA, 19 nt, Homo sapiens
  misc_RNA (1)...(19): siRNA sense strand
gugcccaacuccacagaau

SEQ ID NO: 1391038 - RNA, 19 nt, Homo sapiens
  misc_RNA (1)...(19): siRNA sense strand
aaacaggaugagaauauga

SEQ ID NO: 1391039 - RNA, 19 nt, Homo sapiens
  misc_RNA (1)...(19): siRNA sense strand
aggaggagcuggccgagau

SEQ ID NO: 1391040 - RNA, 19 nt, Homo sapiens
  misc_RNA (1)...(19): siRNA sense strand
ugaaacgcaugaaguuguc

SEQ ID NO: 1391041 - RNA, 19 nt, Homo sapiens
  misc_RNA (1)...(19): siRNA sense strand
gcuccugggucacaucaag

SEQ ID NO: 1391042 - RNA, 19 nt, Homo sapiens
  misc_RNA (1)...(19): siRNA sense strand
cauccugggcuuuaagaaa

SEQ ID NO: 1391043 - RNA, 19 nt, Homo sapiens
  misc_RNA (1)...(19): siRNA sense strand
agagaguucuggaugagau

SEQ ID NO: 1391044 - RNA, 19 nt, Homo sapiens
  misc_RNA (1)...(19): siRNA sense strand
gcuguggaauucaggauac

SEQ ID NO: 1391045 - RNA, 19 nt, Homo sapiens
  misc_RNA (1)...(19): siRNA sense strand
cagcagaggaggccgaaau

SEQ ID NO: 1391046 - RNA, 19 nt, Homo sapiens
  misc_RNA (1)...(19): siRNA sense strand
gaggagaagcugcacuauc

SEQ ID NO: 1391047 - RNA, 19 nt, Homo sapiens
  misc_RNA (1)...(19): siRNA sense strand
ggccagugacuuugagauu

SEQ ID NO: 1391048 - RNA, 19 nt, Homo sapiens
  misc_RNA (1)...(19): siRNA sense strand
ucugaugaccugcaccaua

SEQ ID NO: 1391049 - RNA, 19 nt, Homo sapiens
  misc_RNA (1)...(19): siRNA sense strand
ggaaaauugccagacauua

SEQ ID NO: 1391050 - RNA, 19 nt, Homo sapiens
  misc_RNA (1)...(19): siRNA sense strand
gcgaaagcagugaacaaug

SEQ ID NO: 1391051 - RNA, 19 nt, Homo sapiens
  misc_RNA (1)...(19): siRNA sense strand
aaacagguaggcuugauca

SEQ ID NO: 1391052 - RNA, 19 nt, Homo sapiens
  misc_RNA (1)...(19): siRNA sense strand
aaagggagggucaaaguca

SEQ ID NO: 1391053 - RNA, 19 nt, Homo sapiens
  misc_RNA (1)...(19): siRNA sense strand
gcacgagcagcugucuuaa

SEQ ID NO: 1391054 - RNA, 19 nt, Homo sapiens
  misc_RNA (1)...(19): siRNA sense strand
gaaaccagcucaaguaagu

SEQ ID NO: 1391055 - RNA, 19 nt, Homo sapiens
  misc_RNA (1)...(19): siRNA sense strand
gaagacauguacaauaaga

SEQ ID NO: 1391056 - RNA, 19 nt, Homo sapiens
  misc_RNA (1)...(19): siRNA sense strand
uggaagacauguacaauaa

SEQ ID NO: 1391057 - RNA, 19 nt, Homo sapiens
  misc_RNA (1)...(19): siRNA sense strand
gauaaccacuugucuccua

SEQ ID NO: 1391058 - RNA, 19 nt, Homo sapiens
  misc_RNA (1)...(19): siRNA sense strand
cgaaguaugucaagcauug

SEQ ID NO: 1391059 - RNA, 19 nt, Homo sapiens
  misc_RNA (1)...(19): siRNA sense strand
gcaauagcguucaacuuug

SEQ ID NO: 1391060 - RNA, 19 nt, Homo sapiens
  misc_RNA (1)...(19): siRNA sense strand
gccaagagcucgacuacug

SEQ ID NO: 1391061 - RNA, 19 nt, Homo sapiens
  misc_RNA (1)...(19): siRNA sense strand
cgaauucuccgcauccuua

SEQ ID NO: 1391062 - RNA, 19 nt, Homo sapiens
  misc_RNA (1)...(19): siRNA sense strand
cgacaacgaguacuucuuu

SEQ ID NO: 1391063 - RNA, 19 nt, Homo sapiens
  misc_RNA (1)...(19): siRNA sense strand
gggagaauauggguaagaa

SEQ ID NO: 1391064 - RNA, 19 nt, Homo sapiens
  misc_RNA (1)...(19): siRNA sense strand
aaauggaaauggacaaaga

SEQ ID NO: 1391065 - RNA, 19 nt, Homo sapiens
  misc_RNA (1)...(19): siRNA sense strand
gcauugagaugauggacau

SEQ ID NO: 1391066 - RNA, 19 nt, Homo sapiens
  misc_RNA (1)...(19): siRNA sense strand
gcacagagcaaaccaaagg

SEQ ID NO: 1391067 - RNA, 19 nt, Homo sapiens
  misc_RNA (1)...(19): siRNA sense strand
guccagaucuuccgcauca

SEQ ID NO: 1391068 - RNA, 19 nt, Homo sapiens
  misc_RNA (1)...(19): siRNA sense strand
ccacagcccuuugacauca

SEQ ID NO: 1391069 - RNA, 19 nt, Homo sapiens
  misc_RNA (1)...(19): siRNA sense strand
gucaauaacuucucugagu

SEQ ID NO: 1391070 - RNA, 19 nt, Homo sapiens
  misc_RNA (1)...(19): siRNA sense strand
gaaagacaaaguacaagau

SEQ ID NO: 1391071 - RNA, 19 nt, Homo sapiens
  misc_RNA (1)...(19): siRNA sense strand
aggaagaacuugaaaugga

SEQ ID NO: 1391072 - RNA, 19 nt, Homo sapiens
  misc_RNA (1)...(19): siRNA sense strand
gaacuugaaauggagagua

SEQ ID NO: 1391073 - RNA, 19 nt, Homo sapiens
  misc_RNA (1)...(19): siRNA sense strand
ugagaaacacacagcaaua

SEQ ID NO: 1391074 - RNA, 19 nt, Homo sapiens
  misc_RNA (1)...(19): siRNA sense strand
guaaguccuuugaaaccaa

SEQ ID NO: 1391075 - RNA, 19 nt, Homo sapiens
  misc_RNA (1)...(19): siRNA sense strand
agaaagagcagaugaacga

SEQ ID NO: 1391076 - RNA, 19 nt, Homo sapiens
  misc_RNA (1)...(19): siRNA sense strand
ggacauugugguugagaaa

SEQ ID NO: 1391077 - RNA, 19 nt, Homo sapiens
  misc_RNA (1)...(19): siRNA sense strand
acaagagcgugcugcaauu

SEQ ID NO: 1391078 - RNA, 19 nt, Homo sapiens
  misc_RNA (1)...(19): siRNA sense strand
cagaagcauugacuggaaa

SEQ ID NO: 1391079 - RNA, 19 nt, Homo sapiens
  misc_RNA (1)...(19): siRNA sense strand
aaaggaagaacuugaaaug

SEQ ID NO: 1391080 - RNA, 19 nt, Homo sapiens
  misc_RNA (1)...(19): siRNA sense strand
ucucugaguucuauaagga

SEQ ID NO: 1391081 - RNA, 19 nt, Homo sapiens
  misc_RNA (1)...(19): siRNA sense strand
uaaggcagaacuguauuua

SEQ ID NO: 1391082 - RNA, 19 nt, Homo sapiens
  misc_RNA (1)...(19): siRNA sense strand
gagcaaaccaaaggaagaa

SEQ ID NO: 1391083 - RNA, 19 nt, Homo sapiens
  misc_RNA (1)...(19): siRNA sense strand
acaauaagauggccaagac

SEQ ID NO: 1391084 - RNA, 19 nt, Homo sapiens
  misc_RNA (1)...(19): siRNA sense strand
aaagccagaucgucuucua

SEQ ID NO: 1391085 - RNA, 19 nt, Homo sapiens
  misc_RNA (1)...(19): siRNA sense strand
gagaauauggguaagaaag

SEQ ID NO: 1391086 - RNA, 19 nt, Homo sapiens
  misc_RNA (1)...(19): siRNA sense strand
gccauaauuuccaucaugu

SEQ ID NO: 1391087 - RNA, 19 nt, Homo sapiens
  misc_RNA (1)...(19): siRNA sense strand
acagaagcauugacuggaa

SEQ ID NO: 1391088 - RNA, 19 nt, Homo sapiens
  misc_RNA (1)...(19): siRNA sense strand
ggacgacaccaaguucaaa

SEQ ID NO: 1391089 - RNA, 19 nt, Homo sapiens
  misc_RNA (1)...(19): siRNA sense strand
ccuaacaaauggaaaugga

SEQ ID NO: 1391090 - RNA, 19 nt, Homo sapiens
  misc_RNA (1)...(19): siRNA sense strand
cggaggagcuacaaugagu

SEQ ID NO: 1391091 - RNA, 19 nt, Homo sapiens
  misc_RNA (1)...(19): siRNA sense strand
agcaauagcguucaacuuu

SEQ ID NO: 1391092 - RNA, 19 nt, Homo sapiens
  misc_RNA (1)...(19): siRNA sense strand
gcacucuaguuucuucauc

SEQ ID NO: 1391093 - RNA, 19 nt, Homo sapiens
  misc_RNA (1)...(19): siRNA sense strand
ugauggacauugugguuga

SEQ ID NO: 1391094 - RNA, 19 nt, Homo sapiens
  misc_RNA (1)...(19): siRNA sense strand
ggagagagccaagaggaau

SEQ ID NO: 1391095 - RNA, 19 nt, Homo sapiens
  misc_RNA (1)...(19): siRNA sense strand
gaugauggacauugugguu

SEQ ID NO: 1391096 - RNA, 19 nt, Homo sapiens
  misc_RNA (1)...(19): siRNA sense strand
gagaaacacacagcaauag

SEQ ID NO: 1391097 - RNA, 19 nt, Homo sapiens
  misc_RNA (1)...(19): siRNA sense strand
ucugaaaccagcucaagua

SEQ ID NO: 1391098 - RNA, 19 nt, Homo sapiens
  misc_RNA (1)...(19): siRNA sense strand
gaagaaagagcagaugaac

SEQ ID NO: 1391099 - RNA, 19 nt, Homo sapiens
  misc_RNA (1)...(19): siRNA sense strand
gacagcugcucuacagugu

SEQ ID NO: 1391100 - RNA, 19 nt, Homo sapiens
  misc_RNA (1)...(19): siRNA sense strand
gaauauggguaagaaagac

SEQ ID NO: 1391101 - RNA, 19 nt, Homo sapiens
  misc_RNA (1)...(19): siRNA sense strand
gaacaugaaggaugcuuuu

SEQ ID NO: 1391102 - RNA, 19 nt, Homo sapiens
  misc_RNA (1)...(19): siRNA sense strand
aaacuaacaacccuuugaa

SEQ ID NO: 1391103 - RNA, 19 nt, Homo sapiens
  misc_RNA (1)...(19): siRNA sense strand
gacaacgaguacuucuuug

SEQ ID NO: 1391104 - RNA, 19 nt, Homo sapiens
  misc_RNA (1)...(19): siRNA sense strand
caaaggaagaacuugaaau

SEQ ID NO: 1391105 - RNA, 19 nt, Homo sapiens
  misc_RNA (1)...(19): siRNA sense strand
gcauugauaguuucauuag

SEQ ID NO: 1391106 - RNA, 19 nt, Homo sapiens
  misc_RNA (1)...(19): siRNA sense strand
uacagagccucgaugaguu

SEQ ID NO: 1391107 - RNA, 19 nt, Homo sapiens
  misc_RNA (1)...(19): siRNA sense strand
aggcagaacuguauuuacu

SEQ ID NO: 1391108 - RNA, 19 nt, Homo sapiens
  misc_RNA (1)...(19): siRNA sense strand
ccagccagcacucuaguuu

SEQ ID NO: 1391109 - RNA, 19 nt, Homo sapiens
  misc_RNA (1)...(19): siRNA sense strand
ccaaaggaagaacuugaaa

SEQ ID NO: 1391110 - RNA, 19 nt, Homo sapiens
  misc_RNA (1)...(19): siRNA sense strand
gaagagacaggagaaagca

SEQ ID NO: 1391111 - RNA, 19 nt, Homo sapiens
  misc_RNA (1)...(19): siRNA sense strand
ggagacaucuaccccaaga

SEQ ID NO: 1391112 - RNA, 19 nt, Homo sapiens
  misc_RNA (1)...(19): siRNA sense strand
gaggagcuacaaugaguug

SEQ ID NO: 1391113 - RNA, 19 nt, Homo sapiens
  misc_RNA (1)...(19): siRNA sense strand
gagcaccaguccgaaguuc

SEQ ID NO: 1391114 - RNA, 19 nt, Homo sapiens
  misc_RNA (1)...(19): siRNA sense strand
gcccagaguccuccaucua

SEQ ID NO: 1391115 - RNA, 19 nt, Homo sapiens
  misc_RNA (1)...(19): siRNA sense strand
ccagcacucuaguuucuuc

SEQ ID NO: 1391116 - RNA, 19 nt, Homo sapiens
  misc_RNA (1)...(19): siRNA sense strand
cagaagaaagagcagauga

SEQ ID NO: 1391117 - RNA, 19 nt, Homo sapiens
  misc_RNA (1)...(19): siRNA sense strand
guacauugacgcagacaca

SEQ ID NO: 1391118 - RNA, 19 nt, Homo sapiens
  misc_RNA (1)...(19): siRNA sense strand
ucaccuccauccucaacuu

SEQ ID NO: 1391119 - RNA, 19 nt, Homo sapiens
  misc_RNA (1)...(19): siRNA sense strand
ggguaagaaagacaaagua

SEQ ID NO: 1391120 - RNA, 19 nt, Homo sapiens
  misc_RNA (1)...(19): siRNA sense strand
cuacagagccucgaugagu

SEQ ID NO: 1391121 - RNA, 19 nt, Homo sapiens
  misc_RNA (1)...(19): siRNA sense strand
acacagcaauagcguucaa

SEQ ID NO: 1391122 - RNA, 19 nt, Homo sapiens
  misc_RNA (1)...(19): siRNA sense strand
ccagaguccuccaucuaca

SEQ ID NO: 1391123 - RNA, 19 nt, Homo sapiens
  misc_RNA (1)...(19): siRNA sense strand
cagcacagagcaaaccaaa

SEQ ID NO: 1391124 - RNA, 19 nt, Homo sapiens
  misc_RNA (1)...(19): siRNA sense strand
gaggaauggcagcaucgua

SEQ ID NO: 1391125 - RNA, 19 nt, Homo sapiens
  misc_RNA (1)...(19): siRNA sense strand
ugccauaauuuccaucaug

SEQ ID NO: 1391126 - RNA, 19 nt, Homo sapiens
  misc_RNA (1)...(19): siRNA sense strand
ggaagcacacgagaucaga

SEQ ID NO: 1391127 - RNA, 19 nt, Homo sapiens
  misc_RNA (1)...(19): siRNA sense strand
ucauugacaugcgaaguau

SEQ ID NO: 1391128 - RNA, 19 nt, Homo sapiens
  misc_RNA (1)...(19): siRNA sense strand
gcacagaaggggucauuga

SEQ ID NO: 1391129 - RNA, 19 nt, Homo sapiens
  misc_RNA (1)...(19): siRNA sense strand
caaguaaguccuuugaaac

SEQ ID NO: 1391130 - RNA, 19 nt, Homo sapiens
  misc_RNA (1)...(19): siRNA sense strand
guaagaaagacaaaguaca

SEQ ID NO: 1391131 - RNA, 19 nt, Homo sapiens
  misc_RNA (1)...(19): siRNA sense strand
ggagaauauggguaagaaa

SEQ ID NO: 1391132 - RNA, 19 nt, Homo sapiens
  misc_RNA (1)...(19): siRNA sense strand
gcagaagagacaggagaaa

SEQ ID NO: 1391133 - RNA, 19 nt, Homo sapiens
  misc_RNA (1)...(19): siRNA sense strand
gcgaggaguucgauaacac

SEQ ID NO: 1391134 - RNA, 19 nt, Homo sapiens
  misc_RNA (1)...(19): siRNA sense strand
caugacuacuguuggguau

SEQ ID NO: 1391135 - RNA, 19 nt, Homo sapiens
  misc_RNA (1)...(19): siRNA sense strand
gcaguuggaagacauguac

SEQ ID NO: 1391136 - RNA, 19 nt, Homo sapiens
  misc_RNA (1)...(19): siRNA sense strand
cauaauuuccaucauguuc

SEQ ID NO: 1391137 - RNA, 19 nt, Homo sapiens
  misc_RNA (1)...(19): siRNA sense strand
gcuaccaccagaagaaaga

SEQ ID NO: 1391138 - RNA, 19 nt, Homo sapiens
  misc_RNA (1)...(19): siRNA sense strand
agaaagacaaaguacaaga

SEQ ID NO: 1391139 - RNA, 19 nt, Homo sapiens
  misc_RNA (1)...(19): siRNA sense strand
gcccggagcauugagauga

SEQ ID NO: 1391140 - RNA, 19 nt, Homo sapiens
  misc_RNA (1)...(19): siRNA sense strand
ccaugggcauuaugaucuu

SEQ ID NO: 1391141 - RNA, 19 nt, Homo sapiens
  misc_RNA (1)...(19): siRNA sense strand
gaauucuccgcauccuuaa

SEQ ID NO: 1391142 - RNA, 19 nt, Homo sapiens
  misc_RNA (1)...(19): siRNA sense strand
ucugggaccuacuggagaa

SEQ ID NO: 1391143 - RNA, 19 nt, Homo sapiens
  misc_RNA (1)...(19): siRNA sense strand
gaaggcgaggaguucgaua

SEQ ID NO: 1391144 - RNA, 19 nt, Homo sapiens
  misc_RNA (1)...(19): siRNA sense strand
caaaccaaaggaagaacuu

SEQ ID NO: 1391145 - RNA, 19 nt, Homo sapiens
  misc_RNA (1)...(19): siRNA sense strand
cagcucaaguaaguccuuu

SEQ ID NO: 1391146 - RNA, 19 nt, Homo sapiens
  misc_RNA (1)...(19): siRNA sense strand
ggcagcaucguauccauga

SEQ ID NO: 1391147 - RNA, 19 nt, Homo sapiens
  misc_RNA (1)...(19): siRNA sense strand
ugacuacuguuggguaugg

SEQ ID NO: 1391148 - RNA, 19 nt, Homo sapiens
  misc_RNA (1)...(19): siRNA sense strand
caucaucgucaauaacuuc

SEQ ID NO: 1391149 - RNA, 19 nt, Homo sapiens
  misc_RNA (1)...(19): siRNA sense strand
caacccauccucaauacca

SEQ ID NO: 1391150 - RNA, 19 nt, Homo sapiens
  misc_RNA (1)...(19): siRNA sense strand
agacauguacaauaagaug

SEQ ID NO: 1391151 - RNA, 19 nt, Homo sapiens
  misc_RNA (1)...(19): siRNA sense strand
agaagaaagagcagaugaa

SEQ ID NO: 1391152 - RNA, 19 nt, Homo sapiens
  misc_RNA (1)...(19): siRNA sense strand
gcagcaucguauccaugaa

SEQ ID NO: 1391153 - RNA, 19 nt, Homo sapiens
  misc_RNA (1)...(19): siRNA sense strand
gagagagccaagaggaaug

SEQ ID NO: 1391154 - RNA, 19 nt, Homo sapiens
  misc_RNA (1)...(19): siRNA sense strand
gaaucaagcuuccauaugu

SEQ ID NO: 1391155 - RNA, 19 nt, Homo sapiens
  misc_RNA (1)...(19): siRNA sense strand
gcaaagauguuucucuguu

SEQ ID NO: 1391156 - RNA, 19 nt, Homo sapiens
  misc_RNA (1)...(19): siRNA sense strand
acacaugccuggagacuua

SEQ ID NO: 1391157 - RNA, 19 nt, Homo sapiens
  misc_RNA (1)...(19): siRNA sense strand
caacaaagcccgaggauau

SEQ ID NO: 1391158 - RNA, 19 nt, Homo sapiens
  misc_RNA (1)...(19): siRNA sense strand
ccaaagaaauucaggaaga

SEQ ID NO: 1391159 - RNA, 19 nt, Homo sapiens
  misc_RNA (1)...(19): siRNA sense strand
cuacauagauuucuucaug

SEQ ID NO: 1391160 - RNA, 19 nt, Homo sapiens
  misc_RNA (1)...(19): siRNA sense strand
ggaaauugaugauauugug

SEQ ID NO: 1391161 - RNA, 19 nt, Homo sapiens
  misc_RNA (1)...(19): siRNA sense strand
aaacucagcuauugccaua

SEQ ID NO: 1391162 - RNA, 19 nt, Homo sapiens
  misc_RNA (1)...(19): siRNA sense strand
gaagauaauucugguugaa

SEQ ID NO: 1391163 - RNA, 19 nt, Homo sapiens
  misc_RNA (1)...(19): siRNA sense strand
caaagauguuucucuguuu

SEQ ID NO: 1391164 - RNA, 19 nt, Homo sapiens
  misc_RNA (1)...(19): siRNA sense strand
guacaagaguggauuaauc

SEQ ID NO: 1391165 - RNA, 19 nt, Homo sapiens
  misc_RNA (1)...(19): siRNA sense strand
ggaagaguguucuaucuca

SEQ ID NO: 1391166 - RNA, 19 nt, Homo sapiens
  misc_RNA (1)...(19): siRNA sense strand
gaaagacaacgaccuuaaa

SEQ ID NO: 1391167 - RNA, 19 nt, Homo sapiens
  misc_RNA (1)...(19): siRNA sense strand
ggaaagacaacgaccuuaa

SEQ ID NO: 1391168 - RNA, 19 nt, Homo sapiens
  misc_RNA (1)...(19): siRNA sense strand
caaagaguuucuacuaaga

SEQ ID NO: 1391169 - RNA, 19 nt, Homo sapiens
  misc_RNA (1)...(19): siRNA sense strand
ccucagugguuucuaauaa

SEQ ID NO: 1391170 - RNA, 19 nt, Homo sapiens
  misc_RNA (1)...(19): siRNA sense strand
ccagugaauuucugaguuu

SEQ ID NO: 1391171 - RNA, 19 nt, Homo sapiens
  misc_RNA (1)...(19): siRNA sense strand
cagggaacauggaaugaua

SEQ ID NO: 1391172 - RNA, 19 nt, Homo sapiens
  misc_RNA (1)...(19): siRNA sense strand
uaagagcgacaaaguauaa

SEQ ID NO: 1391173 - RNA, 19 nt, Homo sapiens
  misc_RNA (1)...(19): siRNA sense strand
gagcaucuuuaacagaauu

SEQ ID NO: 1391174 - RNA, 19 nt, Homo sapiens
  misc_RNA (1)...(19): siRNA sense strand
ccuggagacuuauuuaauu

SEQ ID NO: 1391175 - RNA, 19 nt, Homo sapiens
  misc_RNA (1)...(19): siRNA sense strand
cgacaaaguauaacaaguu

SEQ ID NO: 1391176 - RNA, 19 nt, Homo sapiens
  misc_RNA (1)...(19): siRNA sense strand
ggagcaugguauucaagua

SEQ ID NO: 1391177 - RNA, 19 nt, Homo sapiens
  misc_RNA (1)...(19): siRNA sense strand
gaagaguguucuaucucaa

SEQ ID NO: 1391178 - RNA, 19 nt, Homo sapiens
  misc_RNA (1)...(19): siRNA sense strand
ucaaagaguuucuacuaag

SEQ ID NO: 1391179 - RNA, 19 nt, Homo sapiens
  misc_RNA (1)...(19): siRNA sense strand
gagaacugauaagaagaua

SEQ ID NO: 1391180 - RNA, 19 nt, Homo sapiens
  misc_RNA (1)...(19): siRNA sense strand
gcucuuuacucagggaaua

SEQ ID NO: 1391181 - RNA, 19 nt, Homo sapiens
  misc_RNA (1)...(19): siRNA sense strand
cgggauacauuacuuguug

SEQ ID NO: 1391182 - RNA, 19 nt, Homo sapiens
  misc_RNA (1)...(19): siRNA sense strand
ucgauguccucuuauauuu

SEQ ID NO: 1391183 - RNA, 19 nt, Homo sapiens
  misc_RNA (1)...(19): siRNA sense strand
agauuuaccuaaccaguuu

SEQ ID NO: 1391184 - RNA, 19 nt, Homo sapiens
  misc_RNA (1)...(19): siRNA sense strand
ggaaguaugugaggauugg

SEQ ID NO: 1391185 - RNA, 19 nt, Homo sapiens
  misc_RNA (1)...(19): siRNA sense strand
gauaucagaagugcaauaa

SEQ ID NO: 1391186 - RNA, 19 nt, Homo sapiens
  misc_RNA (1)...(19): siRNA sense strand
gcaccaacaauuaugauga

SEQ ID NO: 1391187 - RNA, 19 nt, Homo sapiens
  misc_RNA (1)...(19): siRNA sense strand
aaacaggguggaucuauuu

SEQ ID NO: 1391188 - RNA, 19 nt, Homo sapiens
  misc_RNA (1)...(19): siRNA sense strand
gaugaucugagaacugaua

SEQ ID NO: 1391189 - RNA, 19 nt, Homo sapiens
  misc_RNA (1)...(19): siRNA sense strand
ggguggaucuauuuuauua

SEQ ID NO: 1391190 - RNA, 19 nt, Homo sapiens
  misc_RNA (1)...(19): siRNA sense strand
uaucagaagugcaauaaac

SEQ ID NO: 1391191 - RNA, 19 nt, Homo sapiens
  misc_RNA (1)...(19): siRNA sense strand
ugugagagccagugaauuu

SEQ ID NO: 1391192 - RNA, 19 nt, Homo sapiens
  misc_RNA (1)...(19): siRNA sense strand
caaaggagcaugguauuca

SEQ ID NO: 1391193 - RNA, 19 nt, Homo sapiens
  misc_RNA (1)...(19): siRNA sense strand
ccggaaaccuggucucuuc

SEQ ID NO: 1391194 - RNA, 19 nt, Homo sapiens
  misc_RNA (1)...(19): siRNA sense strand
gaagcgacacuuuggaaga

SEQ ID NO: 1391195 - RNA, 19 nt, Homo sapiens
  misc_RNA (1)...(19): siRNA sense strand
cgagaggugugaugcauuc

SEQ ID NO: 1391196 - RNA, 19 nt, Homo sapiens
  misc_RNA (1)...(19): siRNA sense strand
cagaugcugugcugucaaa

SEQ ID NO: 1391197 - RNA, 19 nt, Homo sapiens
  misc_RNA (1)...(19): siRNA sense strand
caccaacaauuaugaugaa

SEQ ID NO: 1391198 - RNA, 19 nt, Homo sapiens
  misc_RNA (1)...(19): siRNA sense strand
gaacgggauacauuacuug

SEQ ID NO: 1391199 - RNA, 19 nt, Homo sapiens
  misc_RNA (1)...(19): siRNA sense strand
gaucugagaacugauaaga

SEQ ID NO: 1391200 - RNA, 19 nt, Homo sapiens
  misc_RNA (1)...(19): siRNA sense strand
uaacaagaauggaggaaaa

SEQ ID NO: 1391201 - RNA, 19 nt, Homo sapiens
  misc_RNA (1)...(19): siRNA sense strand
caaguacaagaguggauua

SEQ ID NO: 1391202 - RNA, 19 nt, Homo sapiens
  misc_RNA (1)...(19): siRNA sense strand
gaaaccuggucucuuccuu

SEQ ID NO: 1391203 - RNA, 19 nt, Homo sapiens
  misc_RNA (1)...(19): siRNA sense strand
guuauuguuucccaaagaa

SEQ ID NO: 1391204 - RNA, 19 nt, Homo sapiens
  misc_RNA (1)...(19): siRNA sense strand
uacaugaaguucuaaggaa

SEQ ID NO: 1391205 - RNA, 19 nt, Homo sapiens
  misc_RNA (1)...(19): siRNA sense strand
ucugagaacugauaagaag

SEQ ID NO: 1391206 - RNA, 19 nt, Homo sapiens
  misc_RNA (1)...(19): siRNA sense strand
ccuccaaacucagcuauug

SEQ ID NO: 1391207 - RNA, 19 nt, Homo sapiens
  misc_RNA (1)...(19): siRNA sense strand
aauacacgcucuuuacuca

SEQ ID NO: 1391208 - RNA, 19 nt, Homo sapiens
  misc_RNA (1)...(19): siRNA sense strand
caacuuacggccaaggaaa

SEQ ID NO: 1391209 - RNA, 19 nt, Homo sapiens
  misc_RNA (1)...(19): siRNA sense strand
caaagaaauucaggaagag

SEQ ID NO: 1391210 - RNA, 19 nt, Homo sapiens
  misc_RNA (1)...(19): siRNA sense strand
ggagguaguagaaauguca

SEQ ID NO: 1391211 - RNA, 19 nt, Homo sapiens
  misc_RNA (1)...(19): siRNA sense strand
gccagugaauuucugaguu

SEQ ID NO: 1391212 - RNA, 19 nt, Homo sapiens
  misc_RNA (1)...(19): siRNA sense strand
uacaaaugcuuggagauga

SEQ ID NO: 1391213 - RNA, 19 nt, Homo sapiens
  misc_RNA (1)...(19): siRNA sense strand
ugaacuugcugugcauaaa

SEQ ID NO: 1391214 - RNA, 19 nt, Homo sapiens
  misc_RNA (1)...(19): siRNA sense strand
ccucucauuuaucagaaua

SEQ ID NO: 1391215 - RNA, 19 nt, Homo sapiens
  misc_RNA (1)...(19): siRNA sense strand
caagagguccaagcuauug

SEQ ID NO: 1391216 - RNA, 19 nt, Homo sapiens
  misc_RNA (1)...(19): siRNA sense strand
ucgggauucucauacuuua

SEQ ID NO: 1391217 - RNA, 19 nt, Homo sapiens
  misc_RNA (1)...(19): siRNA sense strand
gguuauuguuucccaaaga

SEQ ID NO: 1391218 - RNA, 19 nt, Homo sapiens
  misc_RNA (1)...(19): siRNA sense strand
gccauaccuugcucuacua

SEQ ID NO: 1391219 - RNA, 19 nt, Homo sapiens
  misc_RNA (1)...(19): siRNA sense strand
caaggaggaggaucaaguu

SEQ ID NO: 1391220 - RNA, 19 nt, Homo sapiens
  misc_RNA (1)...(19): siRNA sense strand
ugugaugcauuccaacaaa

SEQ ID NO: 1391221 - RNA, 19 nt, Homo sapiens
  misc_RNA (1)...(19): siRNA sense strand
gaggugugaugcauuccaa

SEQ ID NO: 1391222 - RNA, 19 nt, Homo sapiens
  misc_RNA (1)...(19): siRNA sense strand
aaagauguuucucuguuuc

SEQ ID NO: 1391223 - RNA, 19 nt, Homo sapiens
  misc_RNA (1)...(19): siRNA sense strand
gggauguucuggugauauc

SEQ ID NO: 1391224 - RNA, 19 nt, Homo sapiens
  misc_RNA (1)...(19): siRNA sense strand
ugacaaaacuucucuagag

SEQ ID NO: 1391225 - RNA, 19 nt, Homo sapiens
  misc_RNA (1)...(19): siRNA sense strand
caggaagaguguucuaucu

SEQ ID NO: 1391226 - RNA, 19 nt, Homo sapiens
  misc_RNA (1)...(19): siRNA sense strand
ugaacgggauacauuacuu

SEQ ID NO: 1391227 - RNA, 19 nt, Homo sapiens
  misc_RNA (1)...(19): siRNA sense strand
ggugauaucagaagugcaa

SEQ ID NO: 1391228 - RNA, 19 nt, Homo sapiens
  misc_RNA (1)...(19): siRNA sense strand
aaaggagcaugguauucaa

SEQ ID NO: 1391229 - RNA, 19 nt, Homo sapiens
  misc_RNA (1)...(19): siRNA sense strand
aauaugaacgggauacauu

SEQ ID NO: 1391230 - RNA, 19 nt, Homo sapiens
  misc_RNA (1)...(19): siRNA sense strand
cuauagaagcuaacaagaa

SEQ ID NO: 1391231 - RNA, 19 nt, Homo sapiens
  misc_RNA (1)...(19): siRNA sense strand
cgauguccucuuauauuua

SEQ ID NO: 1391232 - RNA, 19 nt, Homo sapiens
  misc_RNA (1)...(19): siRNA sense strand
auuggucgauguccucuua

SEQ ID NO: 1391233 - RNA, 19 nt, Homo sapiens
  misc_RNA (1)...(19): siRNA sense strand
gaaguucuaaggaaguaug

SEQ ID NO: 1391234 - RNA, 19 nt, Homo sapiens
  misc_RNA (1)...(19): siRNA sense strand
agauaauucugguugaaga

SEQ ID NO: 1391235 - RNA, 19 nt, Homo sapiens
  misc_RNA (1)...(19): siRNA sense strand
ccuguggcaccaacaauua

SEQ ID NO: 1391236 - RNA, 19 nt, Homo sapiens
  misc_RNA (1)...(19): siRNA sense strand
gcgacacuuuggaagauug

SEQ ID NO: 1391237 - RNA, 19 nt, Homo sapiens
  misc_RNA (1)...(19): siRNA sense strand
ggaggaggaucaaguuuuc

SEQ ID NO: 1391238 - RNA, 19 nt, Homo sapiens
  misc_RNA (1)...(19): siRNA sense strand
gggauacauuacuuguuga

SEQ ID NO: 1391239 - RNA, 19 nt, Homo sapiens
  misc_RNA (1)...(19): siRNA sense strand
uaucaaaggagcaugguau

SEQ ID NO: 1391240 - RNA, 19 nt, Homo sapiens
  misc_RNA (1)...(19): siRNA sense strand
aaucaagcuuccauauguu

SEQ ID NO: 1391241 - RNA, 19 nt, Homo sapiens
  misc_RNA (1)...(19): siRNA sense strand
caccaaaacuacauagauu

SEQ ID NO: 1391242 - RNA, 19 nt, Homo sapiens
  misc_RNA (1)...(19): siRNA sense strand
caauaaacagccuccaguu

SEQ ID NO: 1391243 - RNA, 19 nt, Homo sapiens
  misc_RNA (1)...(19): siRNA sense strand
gagcgacaaaguauaacaa

SEQ ID NO: 1391244 - RNA, 19 nt, Homo sapiens
  misc_RNA (1)...(19): siRNA sense strand
ccaaggagacauggaagaa

SEQ ID NO: 1391245 - RNA, 19 nt, Homo sapiens
  misc_RNA (1)...(19): siRNA sense strand
gaauacacgcucuuuacuc

SEQ ID NO: 1391246 - RNA, 19 nt, Homo sapiens
  misc_RNA (1)...(19): siRNA sense strand
caguggagauaauaaucaa

SEQ ID NO: 1391247 - RNA, 19 nt, Homo sapiens
  misc_RNA (1)...(19): siRNA sense strand
gcgacaaaguauaacaagu

SEQ ID NO: 1391248 - RNA, 19 nt, Homo sapiens
  misc_RNA (1)...(19): siRNA sense strand
gcaugguauucaaguacaa

SEQ ID NO: 1391249 - RNA, 19 nt, Homo sapiens
  misc_RNA (1)...(19): siRNA sense strand
ugacagggaacauggaaug

SEQ ID NO: 1391250 - RNA, 19 nt, Homo sapiens
  misc_RNA (1)...(19): siRNA sense strand
ggaauacacgcucuuuacu

SEQ ID NO: 1391251 - RNA, 19 nt, Homo sapiens
  misc_RNA (1)...(19): siRNA sense strand
ucgguugcccucucauuua

SEQ ID NO: 1391252 - RNA, 19 nt, Homo sapiens
  misc_RNA (1)...(19): siRNA sense strand
gagagccagugaauuucug

SEQ ID NO: 1391253 - RNA, 19 nt, Homo sapiens
  misc_RNA (1)...(19): siRNA sense strand
aaaaguaucgggaaaauug

SEQ ID NO: 1391254 - RNA, 19 nt, Homo sapiens
  misc_RNA (1)...(19): siRNA sense strand
gaaucaagcuuccauaugu

SEQ ID NO: 1391255 - RNA, 19 nt, Homo sapiens
  misc_RNA (1)...(19): siRNA sense strand
gcaaagauguuucucuguu

SEQ ID NO: 1391256 - RNA, 19 nt, Homo sapiens
  misc_RNA (1)...(19): siRNA sense strand
acacaugccuggagacuua

SEQ ID NO: 1391257 - RNA, 19 nt, Homo sapiens
  misc_RNA (1)...(19): siRNA sense strand
caacaaagcccgaggauau

SEQ ID NO: 1391258 - RNA, 19 nt, Homo sapiens
  misc_RNA (1)...(19): siRNA sense strand
ccaaagaaauucaggaaga

SEQ ID NO: 1391259 - RNA, 19 nt, Homo sapiens
  misc_RNA (1)...(19): siRNA sense strand
cuacauagauuucuucaug

SEQ ID NO: 1391260 - RNA, 19 nt, Homo sapiens
  misc_RNA (1)...(19): siRNA sense strand
ggaaauugaugauauugug

SEQ ID NO: 1391261 - RNA, 19 nt, Homo sapiens
  misc_RNA (1)...(19): siRNA sense strand
aaacucagcuauugccaua

SEQ ID NO: 1391262 - RNA, 19 nt, Homo sapiens
  misc_RNA (1)...(19): siRNA sense strand
gaagauaauucugguugaa

SEQ ID NO: 1391263 - RNA, 19 nt, Homo sapiens
  misc_RNA (1)...(19): siRNA sense strand
caaagauguuucucuguuu

SEQ ID NO: 1391264 - RNA, 19 nt, Homo sapiens
  misc_RNA (1)...(19): siRNA sense strand
guacaagaguggauuaauc

SEQ ID NO: 1391265 - RNA, 19 nt, Homo sapiens
  misc_RNA (1)...(19): siRNA sense strand
ggaagaguguucuaucuca

SEQ ID NO: 1391266 - RNA, 19 nt, Homo sapiens
  misc_RNA (1)...(19): siRNA sense strand
gaaagacaacgaccuuaaa

SEQ ID NO: 1391267 - RNA, 19 nt, Homo sapiens
  misc_RNA (1)...(19): siRNA sense strand
ggaaagacaacgaccuuaa

SEQ ID NO: 1391268 - RNA, 19 nt, Homo sapiens
  misc_RNA (1)...(19): siRNA sense strand
caaagaguuucuacuaaga

SEQ ID NO: 1391269 - RNA, 19 nt, Homo sapiens
  misc_RNA (1)...(19): siRNA sense strand
ccucagugguuucuaauaa

SEQ ID NO: 1391270 - RNA, 19 nt, Homo sapiens
  misc_RNA (1)...(19): siRNA sense strand
ccagugaauuucugaguuu

SEQ ID NO: 1391271 - RNA, 19 nt, Homo sapiens
  misc_RNA (1)...(19): siRNA sense strand
cagggaacauggaaugaua

SEQ ID NO: 1391272 - RNA, 19 nt, Homo sapiens
  misc_RNA (1)...(19): siRNA sense strand
uaagagcgacaaaguauaa

SEQ ID NO: 1391273 - RNA, 19 nt, Homo sapiens
  misc_RNA (1)...(19): siRNA sense strand
gagcaucuuuaacagaauu

SEQ ID NO: 1391274 - RNA, 19 nt, Homo sapiens
  misc_RNA (1)...(19): siRNA sense strand
ccuggagacuuauuuaauu

SEQ ID NO: 1391275 - RNA, 19 nt, Homo sapiens
  misc_RNA (1)...(19): siRNA sense strand
cgacaaaguauaacaaguu

SEQ ID NO: 1391276 - RNA, 19 nt, Homo sapiens
  misc_RNA (1)...(19): siRNA sense strand
ggagcaugguauucaagua

SEQ ID NO: 1391277 - RNA, 19 nt, Homo sapiens
  misc_RNA (1)...(19): siRNA sense strand
gaagaguguucuaucucaa

SEQ ID NO: 1391278 - RNA, 19 nt, Homo sapiens
  misc_RNA (1)...(19): siRNA sense strand
ucaaagaguuucuacuaag

SEQ ID NO: 1391279 - RNA, 19 nt, Homo sapiens
  misc_RNA (1)...(19): siRNA sense strand
gagaacugauaagaagaua

SEQ ID NO: 1391280 - RNA, 19 nt, Homo sapiens
  misc_RNA (1)...(19): siRNA sense strand
gcucuuuacucagggaaua

SEQ ID NO: 1391281 - RNA, 19 nt, Homo sapiens
  misc_RNA (1)...(19): siRNA sense strand
cgggauacauuacuuguug

SEQ ID NO: 1391282 - RNA, 19 nt, Homo sapiens
  misc_RNA (1)...(19): siRNA sense strand
ucgauguccucuuauauuu

SEQ ID NO: 1391283 - RNA, 19 nt, Homo sapiens
  misc_RNA (1)...(19): siRNA sense strand
agauuuaccuaaccaguuu

SEQ ID NO: 1391284 - RNA, 19 nt, Homo sapiens
  misc_RNA (1)...(19): siRNA sense strand
ggaaguaugugaggauugg

SEQ ID NO: 1391285 - RNA, 19 nt, Homo sapiens
  misc_RNA (1)...(19): siRNA sense strand
gauaucagaagugcaauaa

SEQ ID NO: 1391286 - RNA, 19 nt, Homo sapiens
  misc_RNA (1)...(19): siRNA sense strand
gcaccaacaauuaugauga

SEQ ID NO: 1391287 - RNA, 19 nt, Homo sapiens
  misc_RNA (1)...(19): siRNA sense strand
aaacaggguggaucuauuu

SEQ ID NO: 1391288 - RNA, 19 nt, Homo sapiens
  misc_RNA (1)...(19): siRNA sense strand
gaugaucugagaacugaua

SEQ ID NO: 1391289 - RNA, 19 nt, Homo sapiens
  misc_RNA (1)...(19): siRNA sense strand
ggguggaucuauuuuauua

SEQ ID NO: 1391290 - RNA, 19 nt, Homo sapiens
  misc_RNA (1)...(19): siRNA sense strand
uaucagaagugcaauaaac

SEQ ID NO: 1391291 - RNA, 19 nt, Homo sapiens
  misc_RNA (1)...(19): siRNA sense strand
ugugagagccagugaauuu

SEQ ID NO: 1391292 - RNA, 19 nt, Homo sapiens
  misc_RNA (1)...(19): siRNA sense strand
caaaggagcaugguauuca

SEQ ID NO: 1391293 - RNA, 19 nt, Homo sapiens
  misc_RNA (1)...(19): siRNA sense strand
ccggaaaccuggucucuuc

SEQ ID NO: 1391294 - RNA, 19 nt, Homo sapiens
  misc_RNA (1)...(19): siRNA sense strand
gaagcgacacuuuggaaga

SEQ ID NO: 1391295 - RNA, 19 nt, Homo sapiens
  misc_RNA (1)...(19): siRNA sense strand
cgagaggugugaugcauuc

SEQ ID NO: 1391296 - RNA, 19 nt, Homo sapiens
  misc_RNA (1)...(19): siRNA sense strand
cagaugcugugcugucaaa

SEQ ID NO: 1391297 - RNA, 19 nt, Homo sapiens
  misc_RNA (1)...(19): siRNA sense strand
caccaacaauuaugaugaa

SEQ ID NO: 1391298 - RNA, 19 nt, Homo sapiens
  misc_RNA (1)...(19): siRNA sense strand
gaacgggauacauuacuug

SEQ ID NO: 1391299 - RNA, 19 nt, Homo sapiens
  misc_RNA (1)...(19): siRNA sense strand
gaucugagaacugauaaga

SEQ ID NO: 1391300 - RNA, 19 nt, Homo sapiens
  misc_RNA (1)...(19): siRNA sense strand
uaacaagaauggaggaaaa

SEQ ID NO: 1391301 - RNA, 19 nt, Homo sapiens
  misc_RNA (1)...(19): siRNA sense strand
caaguacaagaguggauua

SEQ ID NO: 1391302 - RNA, 19 nt, Homo sapiens
  misc_RNA (1)...(19): siRNA sense strand
gaaaccuggucucuuccuu

SEQ ID NO: 1391303 - RNA, 19 nt, Homo sapiens
  misc_RNA (1)...(19): siRNA sense strand
guuauuguuucccaaagaa

SEQ ID NO: 1391304 - RNA, 19 nt, Homo sapiens
  misc_RNA (1)...(19): siRNA sense strand
uacaugaaguucuaaggaa

SEQ ID NO: 1391305 - RNA, 19 nt, Homo sapiens
  misc_RNA (1)...(19): siRNA sense strand
ucugagaacugauaagaag

SEQ ID NO: 1391306 - RNA, 19 nt, Homo sapiens
  misc_RNA (1)...(19): siRNA sense strand
aauacacgcucuuuacuca

SEQ ID NO: 1391307 - RNA, 19 nt, Homo sapiens
  misc_RNA (1)...(19): siRNA sense strand
caacuuacggccaaggaaa

SEQ ID NO: 1391308 - RNA, 19 nt, Homo sapiens
  misc_RNA (1)...(19): siRNA sense strand
caaagaaauucaggaagag

SEQ ID NO: 1391309 - RNA, 19 nt, Homo sapiens
  misc_RNA (1)...(19): siRNA sense strand
ggagguaguagaaauguca

SEQ ID NO: 1391310 - RNA, 19 nt, Homo sapiens
  misc_RNA (1)...(19): siRNA sense strand
gccagugaauuucugaguu

SEQ ID NO: 1391311 - RNA, 19 nt, Homo sapiens
  misc_RNA (1)...(19): siRNA sense strand
uacaaaugcuuggagauga

SEQ ID NO: 1391312 - RNA, 19 nt, Homo sapiens
  misc_RNA (1)...(19): siRNA sense strand
ugaacuugcugugcauaaa

SEQ ID NO: 1391313 - RNA, 19 nt, Homo sapiens
  misc_RNA (1)...(19): siRNA sense strand
ccucucauuuaucagaaua

SEQ ID NO: 1391314 - RNA, 19 nt, Homo sapiens
  misc_RNA (1)...(19): siRNA sense strand
caagagguccaagcuauug

SEQ ID NO: 1391315 - RNA, 19 nt, Homo sapiens
  misc_RNA (1)...(19): siRNA sense strand
ucgggauucucauacuuua

SEQ ID NO: 1391316 - RNA, 19 nt, Homo sapiens
  misc_RNA (1)...(19): siRNA sense strand
gguuauuguuucccaaaga

SEQ ID NO: 1391317 - RNA, 19 nt, Homo sapiens
  misc_RNA (1)...(19): siRNA sense strand
gccauaccuugcucuacua

SEQ ID NO: 1391318 - RNA, 19 nt, Homo sapiens
  misc_RNA (1)...(19): siRNA sense strand
caaggaggaggaucaaguu

SEQ ID NO: 1391319 - RNA, 19 nt, Homo sapiens
  misc_RNA (1)...(19): siRNA sense strand
ugugaugcauuccaacaaa

SEQ ID NO: 1391320 - RNA, 19 nt, Homo sapiens
  misc_RNA (1)...(19): siRNA sense strand
gaggugugaugcauuccaa

SEQ ID NO: 1391321 - RNA, 19 nt, Homo sapiens
  misc_RNA (1)...(19): siRNA sense strand
aaagauguuucucuguuuc

SEQ ID NO: 1391322 - RNA, 19 nt, Homo sapiens
  misc_RNA (1)...(19): siRNA sense strand
gggauguucuggugauauc

SEQ ID NO: 1391323 - RNA, 19 nt, Homo sapiens
  misc_RNA (1)...(19): siRNA sense strand
ugacaaaacuucucuagag

SEQ ID NO: 1391324 - RNA, 19 nt, Homo sapiens
  misc_RNA (1)...(19): siRNA sense strand
caggaagaguguucuaucu

SEQ ID NO: 1391325 - RNA, 19 nt, Homo sapiens
  misc_RNA (1)...(19): siRNA sense strand
ugaacgggauacauuacuu

SEQ ID NO: 1391326 - RNA, 19 nt, Homo sapiens
  misc_RNA (1)...(19): siRNA sense strand
ggugauaucagaagugcaa

SEQ ID NO: 1391327 - RNA, 19 nt, Homo sapiens
  misc_RNA (1)...(19): siRNA sense strand
agauaauucugguugaaga

SEQ ID NO: 1391328 - RNA, 19 nt, Homo sapiens
  misc_RNA (1)...(19): siRNA sense strand
aaaggagcaugguauucaa

SEQ ID NO: 1391329 - RNA, 19 nt, Homo sapiens
  misc_RNA (1)...(19): siRNA sense strand
aauaugaacgggauacauu

SEQ ID NO: 1391330 - RNA, 19 nt, Homo sapiens
  misc_RNA (1)...(19): siRNA sense strand
cuauagaagcuaacaagaa

SEQ ID NO: 1391331 - RNA, 19 nt, Homo sapiens
  misc_RNA (1)...(19): siRNA sense strand
cgauguccucuuauauuua

SEQ ID NO: 1391332 - RNA, 19 nt, Homo sapiens
  misc_RNA (1)...(19): siRNA sense strand
auuggucgauguccucuua

SEQ ID NO: 1391333 - RNA, 19 nt, Homo sapiens
  misc_RNA (1)...(19): siRNA sense strand
gaaguucuaaggaaguaug

SEQ ID NO: 1391334 - RNA, 19 nt, Homo sapiens
  misc_RNA (1)...(19): siRNA sense strand
ccuguggcaccaacaauua

SEQ ID NO: 1391335 - RNA, 19 nt, Homo sapiens
  misc_RNA (1)...(19): siRNA sense strand
gcgacacuuuggaagauug

SEQ ID NO: 1391336 - RNA, 19 nt, Homo sapiens
  misc_RNA (1)...(19): siRNA sense strand
ggaggaggaucaaguuuuc

SEQ ID NO: 1391337 - RNA, 19 nt, Homo sapiens
  misc_RNA (1)...(19): siRNA sense strand
gggauacauuacuuguuga

SEQ ID NO: 1391338 - RNA, 19 nt, Homo sapiens
  misc_RNA (1)...(19): siRNA sense strand
uaucaaaggagcaugguau

SEQ ID NO: 1391339 - RNA, 19 nt, Homo sapiens
  misc_RNA (1)...(19): siRNA sense strand
aaucaagcuuccauauguu

SEQ ID NO: 1391340 - RNA, 19 nt, Homo sapiens
  misc_RNA (1)...(19): siRNA sense strand
caccaaaacuacauagauu

SEQ ID NO: 1391341 - RNA, 19 nt, Homo sapiens
  misc_RNA (1)...(19): siRNA sense strand
caauaaacagccuccaguu

SEQ ID NO: 1391342 - RNA, 19 nt, Homo sapiens
  misc_RNA (1)...(19): siRNA sense strand
gagcgacaaaguauaacaa

SEQ ID NO: 1391343 - RNA, 19 nt, Homo sapiens
  misc_RNA (1)...(19): siRNA sense strand
ccaaggagacauggaagaa

SEQ ID NO: 1391344 - RNA, 19 nt, Homo sapiens
  misc_RNA (1)...(19): siRNA sense strand
gaauacacgcucuuuacuc

SEQ ID NO: 1391345 - RNA, 19 nt, Homo sapiens
  misc_RNA (1)...(19): siRNA sense strand
caguggagauaauaaucaa

SEQ ID NO: 1391346 - RNA, 19 nt, Homo sapiens
  misc_RNA (1)...(19): siRNA sense strand
gcgacaaaguauaacaagu

SEQ ID NO: 1391347 - RNA, 19 nt, Homo sapiens
  misc_RNA (1)...(19): siRNA sense strand
gcaugguauucaaguacaa

SEQ ID NO: 1391348 - RNA, 19 nt, Homo sapiens
  misc_RNA (1)...(19): siRNA sense strand
ugacagggaacauggaaug

SEQ ID NO: 1391349 - RNA, 19 nt, Homo sapiens
  misc_RNA (1)...(19): siRNA sense strand
ggaauacacgcucuuuacu

SEQ ID NO: 1391350 - RNA, 19 nt, Homo sapiens
  misc_RNA (1)...(19): siRNA sense strand
ucgguugcccucucauuua

SEQ ID NO: 1391351 - RNA, 19 nt, Homo sapiens
  misc_RNA (1)...(19): siRNA sense strand
gagagccagugaauuucug

SEQ ID NO: 1391352 - RNA, 19 nt, Homo sapiens
  misc_RNA (1)...(19): siRNA sense strand
aaaaguaucgggaaaauug

SEQ ID NO: 1391353 - RNA, 19 nt, Homo sapiens
  misc_RNA (1)...(19): siRNA sense strand
gcaugaacuugcugugcau

SEQ ID NO: 1391354 - RNA, 19 nt, Homo sapiens
  misc_RNA (1)...(19): siRNA sense strand
gaaucaagcuuccauaugu

SEQ ID NO: 1391355 - RNA, 19 nt, Homo sapiens
  misc_RNA (1)...(19): siRNA sense strand
gcaaagauguuucucuguu

SEQ ID NO: 1391356 - RNA, 19 nt, Homo sapiens
  misc_RNA (1)...(19): siRNA sense strand
acacaugccuggagacuua

SEQ ID NO: 1391357 - RNA, 19 nt, Homo sapiens
  misc_RNA (1)...(19): siRNA sense strand
caacaaagcccgaggauau

SEQ ID NO: 1391358 - RNA, 19 nt, Homo sapiens
  misc_RNA (1)...(19): siRNA sense strand
ccaaagaaauucaggaaga

SEQ ID NO: 1391359 - RNA, 19 nt, Homo sapiens
  misc_RNA (1)...(19): siRNA sense strand
cuacauagauuucuucaug

SEQ ID NO: 1391360 - RNA, 19 nt, Homo sapiens
  misc_RNA (1)...(19): siRNA sense strand
ggaaauugaugauauugug

SEQ ID NO: 1391361 - RNA, 19 nt, Homo sapiens
  misc_RNA (1)...(19): siRNA sense strand
aaacucagcuauugccaua

SEQ ID NO: 1391362 - RNA, 19 nt, Homo sapiens
  misc_RNA (1)...(19): siRNA sense strand
gaagauaauucugguugaa

SEQ ID NO: 1391363 - RNA, 19 nt, Homo sapiens
  misc_RNA (1)...(19): siRNA sense strand
caaagauguuucucuguuu

SEQ ID NO: 1391364 - RNA, 19 nt, Homo sapiens
  misc_RNA (1)...(19): siRNA sense strand
guacaagaguggauuaauc

SEQ ID NO: 1391365 - RNA, 19 nt, Homo sapiens
  misc_RNA (1)...(19): siRNA sense strand
ggaagaguguucuaucuca

SEQ ID NO: 1391366 - RNA, 19 nt, Homo sapiens
  misc_RNA (1)...(19): siRNA sense strand
gaaagacaacgaccuuaaa

SEQ ID NO: 1391367 - RNA, 19 nt, Homo sapiens
  misc_RNA (1)...(19): siRNA sense strand
ggaaagacaacgaccuuaa

SEQ ID NO: 1391368 - RNA, 19 nt, Homo sapiens
  misc_RNA (1)...(19): siRNA sense strand
caaagaguuucuacuaaga

SEQ ID NO: 1391369 - RNA, 19 nt, Homo sapiens
  misc_RNA (1)...(19): siRNA sense strand
ccucagugguuucuaauaa

SEQ ID NO: 1391370 - RNA, 19 nt, Homo sapiens
  misc_RNA (1)...(19): siRNA sense strand
ccagugaauuucugaguuu

SEQ ID NO: 1391371 - RNA, 19 nt, Homo sapiens
  misc_RNA (1)...(19): siRNA sense strand
cagggaacauggaaugaua

SEQ ID NO: 1391372 - RNA, 19 nt, Homo sapiens
  misc_RNA (1)...(19): siRNA sense strand
uaagagcgacaaaguauaa

SEQ ID NO: 1391373 - RNA, 19 nt, Homo sapiens
  misc_RNA (1)...(19): siRNA sense strand
gagcaucuuuaacagaauu

SEQ ID NO: 1391374 - RNA, 19 nt, Homo sapiens
  misc_RNA (1)...(19): siRNA sense strand
ccuggagacuuauuuaauu

SEQ ID NO: 1391375 - RNA, 19 nt, Homo sapiens
  misc_RNA (1)...(19): siRNA sense strand
cgacaaaguauaacaaguu

SEQ ID NO: 1391376 - RNA, 19 nt, Homo sapiens
  misc_RNA (1)...(19): siRNA sense strand
ggagcaugguauucaagua

SEQ ID NO: 1391377 - RNA, 19 nt, Homo sapiens
  misc_RNA (1)...(19): siRNA sense strand
gaagaguguucuaucucaa

SEQ ID NO: 1391378 - RNA, 19 nt, Homo sapiens
  misc_RNA (1)...(19): siRNA sense strand
ucaaagaguuucuacuaag

SEQ ID NO: 1391379 - RNA, 19 nt, Homo sapiens
  misc_RNA (1)...(19): siRNA sense strand
gagaacugauaagaagaua

SEQ ID NO: 1391380 - RNA, 19 nt, Homo sapiens
  misc_RNA (1)...(19): siRNA sense strand
gcucuuuacucagggaaua

SEQ ID NO: 1391381 - RNA, 19 nt, Homo sapiens
  misc_RNA (1)...(19): siRNA sense strand
cgggauacauuacuuguug

SEQ ID NO: 1391382 - RNA, 19 nt, Homo sapiens
  misc_RNA (1)...(19): siRNA sense strand
ucgauguccucuuauauuu

SEQ ID NO: 1391383 - RNA, 19 nt, Homo sapiens
  misc_RNA (1)...(19): siRNA sense strand
agauuuaccuaaccaguuu

SEQ ID NO: 1391384 - RNA, 19 nt, Homo sapiens
  misc_RNA (1)...(19): siRNA sense strand
ggaaguaugugaggauugg

SEQ ID NO: 1391385 - RNA, 19 nt, Homo sapiens
  misc_RNA (1)...(19): siRNA sense strand
gauaucagaagugcaauaa

SEQ ID NO: 1391386 - RNA, 19 nt, Homo sapiens
  misc_RNA (1)...(19): siRNA sense strand
gcaccaacaauuaugauga

SEQ ID NO: 1391387 - RNA, 19 nt, Homo sapiens
  misc_RNA (1)...(19): siRNA sense strand
aaacaggguggaucuauuu

SEQ ID NO: 1391388 - RNA, 19 nt, Homo sapiens
  misc_RNA (1)...(19): siRNA sense strand
gaugaucugagaacugaua

SEQ ID NO: 1391389 - RNA, 19 nt, Homo sapiens
  misc_RNA (1)...(19): siRNA sense strand
ggguggaucuauuuuauua

SEQ ID NO: 1391390 - RNA, 19 nt, Homo sapiens
  misc_RNA (1)...(19): siRNA sense strand
uaucagaagugcaauaaac

SEQ ID NO: 1391391 - RNA, 19 nt, Homo sapiens
  misc_RNA (1)...(19): siRNA sense strand
ugugagagccagugaauuu

SEQ ID NO: 1391392 - RNA, 19 nt, Homo sapiens
  misc_RNA (1)...(19): siRNA sense strand
caaaggagcaugguauuca

SEQ ID NO: 1391393 - RNA, 19 nt, Homo sapiens
  misc_RNA (1)...(19): siRNA sense strand
ccggaaaccuggucucuuc

SEQ ID NO: 1391394 - RNA, 19 nt, Homo sapiens
  misc_RNA (1)...(19): siRNA sense strand
gaagcgacacuuuggaaga

SEQ ID NO: 1391395 - RNA, 19 nt, Homo sapiens
  misc_RNA (1)...(19): siRNA sense strand
cgagaggugugaugcauuc

SEQ ID NO: 1391396 - RNA, 19 nt, Homo sapiens
  misc_RNA (1)...(19): siRNA sense strand
cagaugcugugcugucaaa

SEQ ID NO: 1391397 - RNA, 19 nt, Homo sapiens
  misc_RNA (1)...(19): siRNA sense strand
caccaacaauuaugaugaa

SEQ ID NO: 1391398 - RNA, 19 nt, Homo sapiens
  misc_RNA (1)...(19): siRNA sense strand
gaacgggauacauuacuug

SEQ ID NO: 1391399 - RNA, 19 nt, Homo sapiens
  misc_RNA (1)...(19): siRNA sense strand
gaucugagaacugauaaga

SEQ ID NO: 1391400 - RNA, 19 nt, Homo sapiens
  misc_RNA (1)...(19): siRNA sense strand
uaacaagaauggaggaaaa

SEQ ID NO: 1391401 - RNA, 19 nt, Homo sapiens
  misc_RNA (1)...(19): siRNA sense strand
caaguacaagaguggauua

SEQ ID NO: 1391402 - RNA, 19 nt, Homo sapiens
  misc_RNA (1)...(19): siRNA sense strand
gaaaccuggucucuuccuu

SEQ ID NO: 1391403 - RNA, 19 nt, Homo sapiens
  misc_RNA (1)...(19): siRNA sense strand
guuauuguuucccaaagaa

SEQ ID NO: 1391404 - RNA, 19 nt, Homo sapiens
  misc_RNA (1)...(19): siRNA sense strand
uacaugaaguucuaaggaa

SEQ ID NO: 1391405 - RNA, 19 nt, Homo sapiens
  misc_RNA (1)...(19): siRNA sense strand
ucugagaacugauaagaag

SEQ ID NO: 1391406 - RNA, 19 nt, Homo sapiens
  misc_RNA (1)...(19): siRNA sense strand
aauacacgcucuuuacuca

SEQ ID NO: 1391407 - RNA, 19 nt, Homo sapiens
  misc_RNA (1)...(19): siRNA sense strand
caacuuacggccaaggaaa

SEQ ID NO: 1391408 - RNA, 19 nt, Homo sapiens
  misc_RNA (1)...(19): siRNA sense strand
caaagaaauucaggaagag

SEQ ID NO: 1391409 - RNA, 19 nt, Homo sapiens
  misc_RNA (1)...(19): siRNA sense strand
ggagguaguagaaauguca

SEQ ID NO: 1391410 - RNA, 19 nt, Homo sapiens
  misc_RNA (1)...(19): siRNA sense strand
gccagugaauuucugaguu

SEQ ID NO: 1391411 - RNA, 19 nt, Homo sapiens
  misc_RNA (1)...(19): siRNA sense strand
uacaaaugcuuggagauga

SEQ ID NO: 1391412 - RNA, 19 nt, Homo sapiens
  misc_RNA (1)...(19): siRNA sense strand
ugaacuugcugugcauaaa

SEQ ID NO: 1391413 - RNA, 19 nt, Homo sapiens
  misc_RNA (1)...(19): siRNA sense strand
ccucucauuuaucagaaua

SEQ ID NO: 1391414 - RNA, 19 nt, Homo sapiens
  misc_RNA (1)...(19): siRNA sense strand
caagagguccaagcuauug

SEQ ID NO: 1391415 - RNA, 19 nt, Homo sapiens
  misc_RNA (1)...(19): siRNA sense strand
ucgggauucucauacuuua

SEQ ID NO: 1391416 - RNA, 19 nt, Homo sapiens
  misc_RNA (1)...(19): siRNA sense strand
gguuauuguuucccaaaga

SEQ ID NO: 1391417 - RNA, 19 nt, Homo sapiens
  misc_RNA (1)...(19): siRNA sense strand
gccauaccuugcucuacua

SEQ ID NO: 1391418 - RNA, 19 nt, Homo sapiens
  misc_RNA (1)...(19): siRNA sense strand
caaggaggaggaucaaguu

SEQ ID NO: 1391419 - RNA, 19 nt, Homo sapiens
  misc_RNA (1)...(19): siRNA sense strand
ugugaugcauuccaacaaa

SEQ ID NO: 1391420 - RNA, 19 nt, Homo sapiens
  misc_RNA (1)...(19): siRNA sense strand
gaggugugaugcauuccaa

SEQ ID NO: 1391421 - RNA, 19 nt, Homo sapiens
  misc_RNA (1)...(19): siRNA sense strand
aaagauguuucucuguuuc

SEQ ID NO: 1391422 - RNA, 19 nt, Homo sapiens
  misc_RNA (1)...(19): siRNA sense strand
gggauguucuggugauauc

SEQ ID NO: 1391423 - RNA, 19 nt, Homo sapiens
  misc_RNA (1)...(19): siRNA sense strand
ugacaaaacuucucuagag

SEQ ID NO: 1391424 - RNA, 19 nt, Homo sapiens
  misc_RNA (1)...(19): siRNA sense strand
caggaagaguguucuaucu

SEQ ID NO: 1391425 - RNA, 19 nt, Homo sapiens
  misc_RNA (1)...(19): siRNA sense strand
ugaacgggauacauuacuu

SEQ ID NO: 1391426 - RNA, 19 nt, Homo sapiens
  misc_RNA (1)...(19): siRNA sense strand
ggugauaucagaagugcaa

SEQ ID NO: 1391427 - RNA, 19 nt, Homo sapiens
  misc_RNA (1)...(19): siRNA sense strand
agauaauucugguugaaga

SEQ ID NO: 1391428 - RNA, 19 nt, Homo sapiens
  misc_RNA (1)...(19): siRNA sense strand
aaaggagcaugguauucaa

SEQ ID NO: 1391429 - RNA, 19 nt, Homo sapiens
  misc_RNA (1)...(19): siRNA sense strand
aauaugaacgggauacauu

SEQ ID NO: 1391430 - RNA, 19 nt, Homo sapiens
  misc_RNA (1)...(19): siRNA sense strand
cuauagaagcuaacaagaa

SEQ ID NO: 1391431 - RNA, 19 nt, Homo sapiens
  misc_RNA (1)...(19): siRNA sense strand
cgauguccucuuauauuua

SEQ ID NO: 1391432 - RNA, 19 nt, Homo sapiens
  misc_RNA (1)...(19): siRNA sense strand
auuggucgauguccucuua

SEQ ID NO: 1391433 - RNA, 19 nt, Homo sapiens
  misc_RNA (1)...(19): siRNA sense strand
gaaguucuaaggaaguaug

SEQ ID NO: 1391434 - RNA, 19 nt, Homo sapiens
  misc_RNA (1)...(19): siRNA sense strand
ccuguggcaccaacaauua

SEQ ID NO: 1391435 - RNA, 19 nt, Homo sapiens
  misc_RNA (1)...(19): siRNA sense strand
gcgacacuuuggaagauug

SEQ ID NO: 1391436 - RNA, 19 nt, Homo sapiens
  misc_RNA (1)...(19): siRNA sense strand
ggaggaggaucaaguuuuc

SEQ ID NO: 1391437 - RNA, 19 nt, Homo sapiens
  misc_RNA (1)...(19): siRNA sense strand
gggauacauuacuuguuga

SEQ ID NO: 1391438 - RNA, 19 nt, Homo sapiens
  misc_RNA (1)...(19): siRNA sense strand
uaucaaaggagcaugguau

SEQ ID NO: 1391439 - RNA, 19 nt, Homo sapiens
  misc_RNA (1)...(19): siRNA sense strand
aaucaagcuuccauauguu

SEQ ID NO: 1391440 - RNA, 19 nt, Homo sapiens
  misc_RNA (1)...(19): siRNA sense strand
caccaaaacuacauagauu

SEQ ID NO: 1391441 - RNA, 19 nt, Homo sapiens
  misc_RNA (1)...(19): siRNA sense strand
caauaaacagccuccaguu

SEQ ID NO: 1391442 - RNA, 19 nt, Homo sapiens
  misc_RNA (1)...(19): siRNA sense strand
gagcgacaaaguauaacaa

SEQ ID NO: 1391443 - RNA, 19 nt, Homo sapiens
  misc_RNA (1)...(19): siRNA sense strand
ccaaggagacauggaagaa

SEQ ID NO: 1391444 - RNA, 19 nt, Homo sapiens
  misc_RNA (1)...(19): siRNA sense strand
gaauacacgcucuuuacuc

SEQ ID NO: 1391445 - RNA, 19 nt, Homo sapiens
  misc_RNA (1)...(19): siRNA sense strand
caguggagauaauaaucaa

SEQ ID NO: 1391446 - RNA, 19 nt, Homo sapiens
  misc_RNA (1)...(19): siRNA sense strand
gcgacaaaguauaacaagu

SEQ ID NO: 1391447 - RNA, 19 nt, Homo sapiens
  misc_RNA (1)...(19): siRNA sense strand
gcaugguauucaaguacaa

SEQ ID NO: 1391448 - RNA, 19 nt, Homo sapiens
  misc_RNA (1)...(19): siRNA sense strand
ugacagggaacauggaaug

SEQ ID NO: 1391449 - RNA, 19 nt, Homo sapiens
  misc_RNA (1)...(19): siRNA sense strand
ggaauacacgcucuuuacu

SEQ ID NO: 1391450 - RNA, 19 nt, Homo sapiens
  misc_RNA (1)...(19): siRNA sense strand
ucgguugcccucucauuua

SEQ ID NO: 1391451 - RNA, 19 nt, Homo sapiens
  misc_RNA (1)...(19): siRNA sense strand
gagagccagugaauuucug

SEQ ID NO: 1391452 - RNA, 19 nt, Homo sapiens
  misc_RNA (1)...(19): siRNA sense strand
aaaaguaucgggaaaauug

SEQ ID NO: 1391453 - RNA, 19 nt, Homo sapiens
  misc_RNA (1)...(19): siRNA sense strand
gcaugaacuugcugugcau

SEQ ID NO: 1391454 - RNA, 19 nt, Homo sapiens
  misc_RNA (1)...(19): siRNA sense strand
gaaucaagcuuccauaugu

SEQ ID NO: 1391455 - RNA, 19 nt, Homo sapiens
  misc_RNA (1)...(19): siRNA sense strand
gcaaagauguuucucuguu

SEQ ID NO: 1391456 - RNA, 19 nt, Homo sapiens
  misc_RNA (1)...(19): siRNA sense strand
acacaugccuggagacuua

SEQ ID NO: 1391457 - RNA, 19 nt, Homo sapiens
  misc_RNA (1)...(19): siRNA sense strand
caacaaagcccgaggauau

SEQ ID NO: 1391458 - RNA, 19 nt, Homo sapiens
  misc_RNA (1)...(19): siRNA sense strand
ccaaagaaauucaggaaga

SEQ ID NO: 1391459 - RNA, 19 nt, Homo sapiens
  misc_RNA (1)...(19): siRNA sense strand
cuacauagauuucuucaug

SEQ ID NO: 1391460 - RNA, 19 nt, Homo sapiens
  misc_RNA (1)...(19): siRNA sense strand
ggaaauugaugauauugug

SEQ ID NO: 1391461 - RNA, 19 nt, Homo sapiens
  misc_RNA (1)...(19): siRNA sense strand
aaacucagcuauugccaua

SEQ ID NO: 1391462 - RNA, 19 nt, Homo sapiens
  misc_RNA (1)...(19): siRNA sense strand
gaagauaauucugguugaa

SEQ ID NO: 1391463 - RNA, 19 nt, Homo sapiens
  misc_RNA (1)...(19): siRNA sense strand
caaagauguuucucuguuu

SEQ ID NO: 1391464 - RNA, 19 nt, Homo sapiens
  misc_RNA (1)...(19): siRNA sense strand
ggaagaguguucuaucuca

SEQ ID NO: 1391465 - RNA, 19 nt, Homo sapiens
  misc_RNA (1)...(19): siRNA sense strand
caaagaguuucuacuaaga

SEQ ID NO: 1391466 - RNA, 19 nt, Homo sapiens
  misc_RNA (1)...(19): siRNA sense strand
ccucagugguuucuaauaa

SEQ ID NO: 1391467 - RNA, 19 nt, Homo sapiens
  misc_RNA (1)...(19): siRNA sense strand
ccagugaauuucugaguuu

SEQ ID NO: 1391468 - RNA, 19 nt, Homo sapiens
  misc_RNA (1)...(19): siRNA sense strand
cagggaacauggaaugaua

SEQ ID NO: 1391469 - RNA, 19 nt, Homo sapiens
  misc_RNA (1)...(19): siRNA sense strand
uaagagcgacaaaguauaa

SEQ ID NO: 1391470 - RNA, 19 nt, Homo sapiens
  misc_RNA (1)...(19): siRNA sense strand
gagcaucuuuaacagaauu

SEQ ID NO: 1391471 - RNA, 19 nt, Homo sapiens
  misc_RNA (1)...(19): siRNA sense strand
ccuggagacuuauuuaauu

SEQ ID NO: 1391472 - RNA, 19 nt, Homo sapiens
  misc_RNA (1)...(19): siRNA sense strand
cgacaaaguauaacaaguu

SEQ ID NO: 1391473 - RNA, 19 nt, Homo sapiens
  misc_RNA (1)...(19): siRNA sense strand
gaagaguguucuaucucaa

SEQ ID NO: 1391474 - RNA, 19 nt, Homo sapiens
  misc_RNA (1)...(19): siRNA sense strand
ucaaagaguuucuacuaag

SEQ ID NO: 1391475 - RNA, 19 nt, Homo sapiens
  misc_RNA (1)...(19): siRNA sense strand
gagaacugauaagaagaua

SEQ ID NO: 1391476 - RNA, 19 nt, Homo sapiens
  misc_RNA (1)...(19): siRNA sense strand
gcucuuuacucagggaaua

SEQ ID NO: 1391477 - RNA, 19 nt, Homo sapiens
  misc_RNA (1)...(19): siRNA sense strand
cgggauacauuacuuguug

SEQ ID NO: 1391478 - RNA, 19 nt, Homo sapiens
  misc_RNA (1)...(19): siRNA sense strand
ucgauguccucuuauauuu

SEQ ID NO: 1391479 - RNA, 19 nt, Homo sapiens
  misc_RNA (1)...(19): siRNA sense strand
agauuuaccuaaccaguuu

SEQ ID NO: 1391480 - RNA, 19 nt, Homo sapiens
  misc_RNA (1)...(19): siRNA sense strand
ggaaguaugugaggauugg

SEQ ID NO: 1391481 - RNA, 19 nt, Homo sapiens
  misc_RNA (1)...(19): siRNA sense strand
gauaucagaagugcaauaa

SEQ ID NO: 1391482 - RNA, 19 nt, Homo sapiens
  misc_RNA (1)...(19): siRNA sense strand
gcaccaacaauuaugauga

SEQ ID NO: 1391483 - RNA, 19 nt, Homo sapiens
  misc_RNA (1)...(19): siRNA sense strand
gaugaucugagaacugaua

SEQ ID NO: 1391484 - RNA, 19 nt, Homo sapiens
  misc_RNA (1)...(19): siRNA sense strand
uaucagaagugcaauaaac

SEQ ID NO: 1391485 - RNA, 19 nt, Homo sapiens
  misc_RNA (1)...(19): siRNA sense strand
ugugagagccagugaauuu

SEQ ID NO: 1391486 - RNA, 19 nt, Homo sapiens
  misc_RNA (1)...(19): siRNA sense strand
caccaacaauuaugaugaa

SEQ ID NO: 1391487 - RNA, 19 nt, Homo sapiens
  misc_RNA (1)...(19): siRNA sense strand
ccggaaaccuggucucuuc

SEQ ID NO: 1391488 - RNA, 19 nt, Homo sapiens
  misc_RNA (1)...(19): siRNA sense strand
gaagcgacacuuuggaaga

SEQ ID NO: 1391489 - RNA, 19 nt, Homo sapiens
  misc_RNA (1)...(19): siRNA sense strand
cgagaggugugaugcauuc

SEQ ID NO: 1391490 - RNA, 19 nt, Homo sapiens
  misc_RNA (1)...(19): siRNA sense strand
cagaugcugugcugucaaa

SEQ ID NO: 1391491 - RNA, 19 nt, Homo sapiens
  misc_RNA (1)...(19): siRNA sense strand
gaacgggauacauuacuug

SEQ ID NO: 1391492 - RNA, 19 nt, Homo sapiens
  misc_RNA (1)...(19): siRNA sense strand
gaucugagaacugauaaga

SEQ ID NO: 1391493 - RNA, 19 nt, Homo sapiens
  misc_RNA (1)...(19): siRNA sense strand
uaacaagaauggaggaaaa

SEQ ID NO: 1391494 - RNA, 19 nt, Homo sapiens
  misc_RNA (1)...(19): siRNA sense strand
uacaugaaguucuaaggaa

SEQ ID NO: 1391495 - RNA, 19 nt, Homo sapiens
  misc_RNA (1)...(19): siRNA sense strand
gaaaccuggucucuuccuu

SEQ ID NO: 1391496 - RNA, 19 nt, Homo sapiens
  misc_RNA (1)...(19): siRNA sense strand
guuauuguuucccaaagaa

SEQ ID NO: 1391497 - RNA, 19 nt, Homo sapiens
  misc_RNA (1)...(19): siRNA sense strand
ucugagaacugauaagaag

SEQ ID NO: 1391498 - RNA, 19 nt, Homo sapiens
  misc_RNA (1)...(19): siRNA sense strand
aauacacgcucuuuacuca

SEQ ID NO: 1391499 - RNA, 19 nt, Homo sapiens
  misc_RNA (1)...(19): siRNA sense strand
caacuuacggccaaggaaa

SEQ ID NO: 1391500 - RNA, 19 nt, Homo sapiens
  misc_RNA (1)...(19): siRNA sense strand
caaagaaauucaggaagag

SEQ ID NO: 1391501 - RNA, 19 nt, Homo sapiens
  misc_RNA (1)...(19): siRNA sense strand
ggagguaguagaaauguca

SEQ ID NO: 1391502 - RNA, 19 nt, Homo sapiens
  misc_RNA (1)...(19): siRNA sense strand
gccagugaauuucugaguu

SEQ ID NO: 1391503 - RNA, 19 nt, Homo sapiens
  misc_RNA (1)...(19): siRNA sense strand
uacaaaugcuuggagauga

SEQ ID NO: 1391504 - RNA, 19 nt, Homo sapiens
  misc_RNA (1)...(19): siRNA sense strand
ccucucauuuaucagaaua

SEQ ID NO: 1391505 - RNA, 19 nt, Homo sapiens
  misc_RNA (1)...(19): siRNA sense strand
caagagguccaagcuauug

SEQ ID NO: 1391506 - RNA, 19 nt, Homo sapiens
  misc_RNA (1)...(19): siRNA sense strand
ucgggauucucauacuuua

SEQ ID NO: 1391507 - RNA, 19 nt, Homo sapiens
  misc_RNA (1)...(19): siRNA sense strand
gguuauuguuucccaaaga

SEQ ID NO: 1391508 - RNA, 19 nt, Homo sapiens
  misc_RNA (1)...(19): siRNA sense strand
gccauaccuugcucuacua

SEQ ID NO: 1391509 - RNA, 19 nt, Homo sapiens
  misc_RNA (1)...(19): siRNA sense strand
caaggaggaggaucaaguu

SEQ ID NO: 1391510 - RNA, 19 nt, Homo sapiens
  misc_RNA (1)...(19): siRNA sense strand
ugugaugcauuccaacaaa

SEQ ID NO: 1391511 - RNA, 19 nt, Homo sapiens
  misc_RNA (1)...(19): siRNA sense strand
gaggugugaugcauuccaa

SEQ ID NO: 1391512 - RNA, 19 nt, Homo sapiens
  misc_RNA (1)...(19): siRNA sense strand
aaagauguuucucuguuuc

SEQ ID NO: 1391513 - RNA, 19 nt, Homo sapiens
  misc_RNA (1)...(19): siRNA sense strand
gggauguucuggugauauc

SEQ ID NO: 1391514 - RNA, 19 nt, Homo sapiens
  misc_RNA (1)...(19): siRNA sense strand
ugacaaaacuucucuagag

SEQ ID NO: 1391515 - RNA, 19 nt, Homo sapiens
  misc_RNA (1)...(19): siRNA sense strand
caggaagaguguucuaucu

SEQ ID NO: 1391516 - RNA, 19 nt, Homo sapiens
  misc_RNA (1)...(19): siRNA sense strand
ugaacgggauacauuacuu

SEQ ID NO: 1391517 - RNA, 19 nt, Homo sapiens
  misc_RNA (1)...(19): siRNA sense strand
ggugauaucagaagugcaa

SEQ ID NO: 1391518 - RNA, 19 nt, Homo sapiens
  misc_RNA (1)...(19): siRNA sense strand
gaaguucuaaggaaguaug

SEQ ID NO: 1391519 - RNA, 19 nt, Homo sapiens
  misc_RNA (1)...(19): siRNA sense strand
aauaugaacgggauacauu

SEQ ID NO: 1391520 - RNA, 19 nt, Homo sapiens
  misc_RNA (1)...(19): siRNA sense strand
cuauagaagcuaacaagaa

SEQ ID NO: 1391521 - RNA, 19 nt, Homo sapiens
  misc_RNA (1)...(19): siRNA sense strand
cgauguccucuuauauuua

SEQ ID NO: 1391522 - RNA, 19 nt, Homo sapiens
  misc_RNA (1)...(19): siRNA sense strand
auuggucgauguccucuua

SEQ ID NO: 1391523 - RNA, 19 nt, Homo sapiens
  misc_RNA (1)...(19): siRNA sense strand
agauaauucugguugaaga

SEQ ID NO: 1391524 - RNA, 19 nt, Homo sapiens
  misc_RNA (1)...(19): siRNA sense strand
ccuguggcaccaacaauua

SEQ ID NO: 1391525 - RNA, 19 nt, Homo sapiens
  misc_RNA (1)...(19): siRNA sense strand
gcgacacuuuggaagauug

SEQ ID NO: 1391526 - RNA, 19 nt, Homo sapiens
  misc_RNA (1)...(19): siRNA sense strand
ggaggaggaucaaguuuuc

SEQ ID NO: 1391527 - RNA, 19 nt, Homo sapiens
  misc_RNA (1)...(19): siRNA sense strand
gggauacauuacuuguuga

SEQ ID NO: 1391528 - RNA, 19 nt, Homo sapiens
  misc_RNA (1)...(19): siRNA sense strand
caauaaacagccuccaguu

SEQ ID NO: 1391529 - RNA, 19 nt, Homo sapiens
  misc_RNA (1)...(19): siRNA sense strand
aaucaagcuuccauauguu

SEQ ID NO: 1391530 - RNA, 19 nt, Homo sapiens
  misc_RNA (1)...(19): siRNA sense strand
caccaaaacuacauagauu

SEQ ID NO: 1391531 - RNA, 19 nt, Homo sapiens
  misc_RNA (1)...(19): siRNA sense strand
caguggagauaauaaucaa

SEQ ID NO: 1391532 - RNA, 19 nt, Homo sapiens
  misc_RNA (1)...(19): siRNA sense strand
ccaaggagacauggaagaa

SEQ ID NO: 1391533 - RNA, 19 nt, Homo sapiens
  misc_RNA (1)...(19): siRNA sense strand
gaauacacgcucuuuacuc

SEQ ID NO: 1391534 - RNA, 19 nt, Homo sapiens
  misc_RNA (1)...(19): siRNA sense strand
gcgacaaaguauaacaagu

SEQ ID NO: 1391535 - RNA, 19 nt, Homo sapiens
  misc_RNA (1)...(19): siRNA sense strand
gagcgacaaaguauaacaa

SEQ ID NO: 1391536 - RNA, 19 nt, Homo sapiens
  misc_RNA (1)...(19): siRNA sense strand
ucgguugcccucucauuua

SEQ ID NO: 1391537 - RNA, 19 nt, Homo sapiens
  misc_RNA (1)...(19): siRNA sense strand
ugacagggaacauggaaug

SEQ ID NO: 1391538 - RNA, 19 nt, Homo sapiens
  misc_RNA (1)...(19): siRNA sense strand
ggaauacacgcucuuuacu

SEQ ID NO: 1391539 - RNA, 19 nt, Homo sapiens
  misc_RNA (1)...(19): siRNA sense strand
guucuaaggaaguauguga

SEQ ID NO: 1391540 - RNA, 19 nt, Homo sapiens
  misc_RNA (1)...(19): siRNA sense strand
aaaaguaucgggaaaauug

SEQ ID NO: 1391541 - RNA, 19 nt, Homo sapiens
  misc_RNA (1)...(19): siRNA sense strand
acaaaugcuuggagaugau

SEQ ID NO: 1391542 - RNA, 19 nt, Homo sapiens
  misc_RNA (1)...(19): siRNA sense strand
gagagccagugaauuucug

SEQ ID NO: 1391543 - RNA, 19 nt, Homo sapiens
  misc_RNA (1)...(19): siRNA sense strand
acauagauuucuucaugga

SEQ ID NO: 1391544 - RNA, 19 nt, Homo sapiens
  misc_RNA (1)...(19): siRNA sense strand
ucagauagcaguuuucaaa

SEQ ID NO: 1391545 - RNA, 19 nt, Homo sapiens
  misc_RNA (1)...(19): siRNA sense strand
cuacuaagagcgacaaagu

SEQ ID NO: 1391546 - RNA, 19 nt, Homo sapiens
  misc_RNA (1)...(19): siRNA sense strand
ggaaugauagacccugaca

SEQ ID NO: 1391547 - RNA, 19 nt, Homo sapiens
  misc_RNA (1)...(19): siRNA sense strand
gguugaagauuuaccuaac

SEQ ID NO: 1391548 - RNA, 19 nt, Homo sapiens
  misc_RNA (1)...(19): siRNA sense strand
acuaagagcgacaaaguau

SEQ ID NO: 1391549 - RNA, 19 nt, Homo sapiens
  misc_RNA (1)...(19): siRNA sense strand
caaggagacauggaagaaa

SEQ ID NO: 1391550 - RNA, 19 nt, Homo sapiens
  misc_RNA (1)...(19): siRNA sense strand
uaucgggauucucauacuu

SEQ ID NO: 1391551 - RNA, 19 nt, Homo sapiens
  misc_RNA (1)...(19): siRNA sense strand
ugaaucaagcuuccauaug

SEQ ID NO: 1391552 - RNA, 19 nt, Homo sapiens
  misc_RNA (1)...(19): siRNA sense strand
cugaggagguaguagaaau

SEQ ID NO: 1391553 - RNA, 19 nt, Homo sapiens
  misc_RNA (1)...(19): siRNA sense strand
gucgauguccucuuauauu

SEQ ID NO: 1391554 - RNA, 19 nt, Homo sapiens
  misc_RNA (1)...(19): siRNA sense strand
gaaucaagcuuccauaugu

SEQ ID NO: 1391555 - RNA, 19 nt, Homo sapiens
  misc_RNA (1)...(19): siRNA sense strand
gcaaagauguuucucuguu

SEQ ID NO: 1391556 - RNA, 19 nt, Homo sapiens
  misc_RNA (1)...(19): siRNA sense strand
acacaugccuggagacuua

SEQ ID NO: 1391557 - RNA, 19 nt, Homo sapiens
  misc_RNA (1)...(19): siRNA sense strand
caacaaagcccgaggauau

SEQ ID NO: 1391558 - RNA, 19 nt, Homo sapiens
  misc_RNA (1)...(19): siRNA sense strand
ccaaagaaauucaggaaga

SEQ ID NO: 1391559 - RNA, 19 nt, Homo sapiens
  misc_RNA (1)...(19): siRNA sense strand
cuacauagauuucuucaug

SEQ ID NO: 1391560 - RNA, 19 nt, Homo sapiens
  misc_RNA (1)...(19): siRNA sense strand
ggaaauugaugauauugug

SEQ ID NO: 1391561 - RNA, 19 nt, Homo sapiens
  misc_RNA (1)...(19): siRNA sense strand
aaacucagcuauugccaua

SEQ ID NO: 1391562 - RNA, 19 nt, Homo sapiens
  misc_RNA (1)...(19): siRNA sense strand
gaagauaauucugguugaa

SEQ ID NO: 1391563 - RNA, 19 nt, Homo sapiens
  misc_RNA (1)...(19): siRNA sense strand
caaagauguuucucuguuu

SEQ ID NO: 1391564 - RNA, 19 nt, Homo sapiens
  misc_RNA (1)...(19): siRNA sense strand
guacaagaguggauuaauc

SEQ ID NO: 1391565 - RNA, 19 nt, Homo sapiens
  misc_RNA (1)...(19): siRNA sense strand
ggaagaguguucuaucuca

SEQ ID NO: 1391566 - RNA, 19 nt, Homo sapiens
  misc_RNA (1)...(19): siRNA sense strand
gaaagacaacgaccuuaaa

SEQ ID NO: 1391567 - RNA, 19 nt, Homo sapiens
  misc_RNA (1)...(19): siRNA sense strand
ggaaagacaacgaccuuaa

SEQ ID NO: 1391568 - RNA, 19 nt, Homo sapiens
  misc_RNA (1)...(19): siRNA sense strand
caaagaguuucuacuaaga

SEQ ID NO: 1391569 - RNA, 19 nt, Homo sapiens
  misc_RNA (1)...(19): siRNA sense strand
ccucagugguuucuaauaa

SEQ ID NO: 1391570 - RNA, 19 nt, Homo sapiens
  misc_RNA (1)...(19): siRNA sense strand
ccagugaauuucugaguuu

SEQ ID NO: 1391571 - RNA, 19 nt, Homo sapiens
  misc_RNA (1)...(19): siRNA sense strand
cagggaacauggaaugaua

SEQ ID NO: 1391572 - RNA, 19 nt, Homo sapiens
  misc_RNA (1)...(19): siRNA sense strand
uaagagcgacaaaguauaa

SEQ ID NO: 1391573 - RNA, 19 nt, Homo sapiens
  misc_RNA (1)...(19): siRNA sense strand
gagcaucuuuaacagaauu

SEQ ID NO: 1391574 - RNA, 19 nt, Homo sapiens
  misc_RNA (1)...(19): siRNA sense strand
ccuggagacuuauuuaauu

SEQ ID NO: 1391575 - RNA, 19 nt, Homo sapiens
  misc_RNA (1)...(19): siRNA sense strand
cgacaaaguauaacaaguu

SEQ ID NO: 1391576 - RNA, 19 nt, Homo sapiens
  misc_RNA (1)...(19): siRNA sense strand
ggagcaugguauucaagua

SEQ ID NO: 1391577 - RNA, 19 nt, Homo sapiens
  misc_RNA (1)...(19): siRNA sense strand
gaagaguguucuaucucaa

SEQ ID NO: 1391578 - RNA, 19 nt, Homo sapiens
  misc_RNA (1)...(19): siRNA sense strand
ucaaagaguuucuacuaag

SEQ ID NO: 1391579 - RNA, 19 nt, Homo sapiens
  misc_RNA (1)...(19): siRNA sense strand
gagaacugauaagaagaua

SEQ ID NO: 1391580 - RNA, 19 nt, Homo sapiens
  misc_RNA (1)...(19): siRNA sense strand
gcucuuuacucagggaaua

SEQ ID NO: 1391581 - RNA, 19 nt, Homo sapiens
  misc_RNA (1)...(19): siRNA sense strand
cgggauacauuacuuguug

SEQ ID NO: 1391582 - RNA, 19 nt, Homo sapiens
  misc_RNA (1)...(19): siRNA sense strand
ucgauguccucuuauauuu

SEQ ID NO: 1391583 - RNA, 19 nt, Homo sapiens
  misc_RNA (1)...(19): siRNA sense strand
agauuuaccuaaccaguuu

SEQ ID NO: 1391584 - RNA, 19 nt, Homo sapiens
  misc_RNA (1)...(19): siRNA sense strand
ggaaguaugugaggauugg

SEQ ID NO: 1391585 - RNA, 19 nt, Homo sapiens
  misc_RNA (1)...(19): siRNA sense strand
gauaucagaagugcaauaa

SEQ ID NO: 1391586 - RNA, 19 nt, Homo sapiens
  misc_RNA (1)...(19): siRNA sense strand
gcaccaacaauuaugauga

SEQ ID NO: 1391587 - RNA, 19 nt, Homo sapiens
  misc_RNA (1)...(19): siRNA sense strand
aaacaggguggaucuauuu

SEQ ID NO: 1391588 - RNA, 19 nt, Homo sapiens
  misc_RNA (1)...(19): siRNA sense strand
gaugaucugagaacugaua

SEQ ID NO: 1391589 - RNA, 19 nt, Homo sapiens
  misc_RNA (1)...(19): siRNA sense strand
ggguggaucuauuuuauua

SEQ ID NO: 1391590 - RNA, 19 nt, Homo sapiens
  misc_RNA (1)...(19): siRNA sense strand
uaucagaagugcaauaaac

SEQ ID NO: 1391591 - RNA, 19 nt, Homo sapiens
  misc_RNA (1)...(19): siRNA sense strand
ugugagagccagugaauuu

SEQ ID NO: 1391592 - RNA, 19 nt, Homo sapiens
  misc_RNA (1)...(19): siRNA sense strand
caaaggagcaugguauuca

SEQ ID NO: 1391593 - RNA, 19 nt, Homo sapiens
  misc_RNA (1)...(19): siRNA sense strand
ccggaaaccuggucucuuc

SEQ ID NO: 1391594 - RNA, 19 nt, Homo sapiens
  misc_RNA (1)...(19): siRNA sense strand
gaagcgacacuuuggaaga

SEQ ID NO: 1391595 - RNA, 19 nt, Homo sapiens
  misc_RNA (1)...(19): siRNA sense strand
cgagaggugugaugcauuc

SEQ ID NO: 1391596 - RNA, 19 nt, Homo sapiens
  misc_RNA (1)...(19): siRNA sense strand
cagaugcugugcugucaaa

SEQ ID NO: 1391597 - RNA, 19 nt, Homo sapiens
  misc_RNA (1)...(19): siRNA sense strand
caccaacaauuaugaugaa

SEQ ID NO: 1391598 - RNA, 19 nt, Homo sapiens
  misc_RNA (1)...(19): siRNA sense strand
gaacgggauacauuacuug

SEQ ID NO: 1391599 - RNA, 19 nt, Homo sapiens
  misc_RNA (1)...(19): siRNA sense strand
gaucugagaacugauaaga

SEQ ID NO: 1391600 - RNA, 19 nt, Homo sapiens
  misc_RNA (1)...(19): siRNA sense strand
uaacaagaauggaggaaaa

SEQ ID NO: 1391601 - RNA, 19 nt, Homo sapiens
  misc_RNA (1)...(19): siRNA sense strand
caaguacaagaguggauua

SEQ ID NO: 1391602 - RNA, 19 nt, Homo sapiens
  misc_RNA (1)...(19): siRNA sense strand
gaaaccuggucucuuccuu

SEQ ID NO: 1391603 - RNA, 19 nt, Homo sapiens
  misc_RNA (1)...(19): siRNA sense strand
guuauuguuucccaaagaa

SEQ ID NO: 1391604 - RNA, 19 nt, Homo sapiens
  misc_RNA (1)...(19): siRNA sense strand
uacaugaaguucuaaggaa

SEQ ID NO: 1391605 - RNA, 19 nt, Homo sapiens
  misc_RNA (1)...(19): siRNA sense strand
ucugagaacugauaagaag

SEQ ID NO: 1391606 - RNA, 19 nt, Homo sapiens
  misc_RNA (1)...(19): siRNA sense strand
aauacacgcucuuuacuca

SEQ ID NO: 1391607 - RNA, 19 nt, Homo sapiens
  misc_RNA (1)...(19): siRNA sense strand
caacuuacggccaaggaaa

SEQ ID NO: 1391608 - RNA, 19 nt, Homo sapiens
  misc_RNA (1)...(19): siRNA sense strand
caaagaaauucaggaagag

SEQ ID NO: 1391609 - RNA, 19 nt, Homo sapiens
  misc_RNA (1)...(19): siRNA sense strand
ggagguaguagaaauguca

SEQ ID NO: 1391610 - RNA, 19 nt, Homo sapiens
  misc_RNA (1)...(19): siRNA sense strand
gccagugaauuucugaguu

SEQ ID NO: 1391611 - RNA, 19 nt, Homo sapiens
  misc_RNA (1)...(19): siRNA sense strand
uacaaaugcuuggagauga

SEQ ID NO: 1391612 - RNA, 19 nt, Homo sapiens
  misc_RNA (1)...(19): siRNA sense strand
ugaacuugcugugcauaaa

SEQ ID NO: 1391613 - RNA, 19 nt, Homo sapiens
  misc_RNA (1)...(19): siRNA sense strand
ccucucauuuaucagaaua

SEQ ID NO: 1391614 - RNA, 19 nt, Homo sapiens
  misc_RNA (1)...(19): siRNA sense strand
caagagguccaagcuauug

SEQ ID NO: 1391615 - RNA, 19 nt, Homo sapiens
  misc_RNA (1)...(19): siRNA sense strand
ucgggauucucauacuuua

SEQ ID NO: 1391616 - RNA, 19 nt, Homo sapiens
  misc_RNA (1)...(19): siRNA sense strand
gguuauuguuucccaaaga

SEQ ID NO: 1391617 - RNA, 19 nt, Homo sapiens
  misc_RNA (1)...(19): siRNA sense strand
gccauaccuugcucuacua

SEQ ID NO: 1391618 - RNA, 19 nt, Homo sapiens
  misc_RNA (1)...(19): siRNA sense strand
caaggaggaggaucaaguu

SEQ ID NO: 1391619 - RNA, 19 nt, Homo sapiens
  misc_RNA (1)...(19): siRNA sense strand
ugugaugcauuccaacaaa

SEQ ID NO: 1391620 - RNA, 19 nt, Homo sapiens
  misc_RNA (1)...(19): siRNA sense strand
gaggugugaugcauuccaa

SEQ ID NO: 1391621 - RNA, 19 nt, Homo sapiens
  misc_RNA (1)...(19): siRNA sense strand
aaagauguuucucuguuuc

SEQ ID NO: 1391622 - RNA, 19 nt, Homo sapiens
  misc_RNA (1)...(19): siRNA sense strand
gggauguucuggugauauc

SEQ ID NO: 1391623 - RNA, 19 nt, Homo sapiens
  misc_RNA (1)...(19): siRNA sense strand
ugacaaaacuucucuagag

SEQ ID NO: 1391624 - RNA, 19 nt, Homo sapiens
  misc_RNA (1)...(19): siRNA sense strand
caggaagaguguucuaucu

SEQ ID NO: 1391625 - RNA, 19 nt, Homo sapiens
  misc_RNA (1)...(19): siRNA sense strand
ugaacgggauacauuacuu

SEQ ID NO: 1391626 - RNA, 19 nt, Homo sapiens
  misc_RNA (1)...(19): siRNA sense strand
ggugauaucagaagugcaa

SEQ ID NO: 1391627 - RNA, 19 nt, Homo sapiens
  misc_RNA (1)...(19): siRNA sense strand
agauaauucugguugaaga

SEQ ID NO: 1391628 - RNA, 19 nt, Homo sapiens
  misc_RNA (1)...(19): siRNA sense strand
aaaggagcaugguauucaa

SEQ ID NO: 1391629 - RNA, 19 nt, Homo sapiens
  misc_RNA (1)...(19): siRNA sense strand
aauaugaacgggauacauu

SEQ ID NO: 1391630 - RNA, 19 nt, Homo sapiens
  misc_RNA (1)...(19): siRNA sense strand
cuauagaagcuaacaagaa

SEQ ID NO: 1391631 - RNA, 19 nt, Homo sapiens
  misc_RNA (1)...(19): siRNA sense strand
cgauguccucuuauauuua

SEQ ID NO: 1391632 - RNA, 19 nt, Homo sapiens
  misc_RNA (1)...(19): siRNA sense strand
auuggucgauguccucuua

SEQ ID NO: 1391633 - RNA, 19 nt, Homo sapiens
  misc_RNA (1)...(19): siRNA sense strand
gaaguucuaaggaaguaug

SEQ ID NO: 1391634 - RNA, 19 nt, Homo sapiens
  misc_RNA (1)...(19): siRNA sense strand
ccuguggcaccaacaauua

SEQ ID NO: 1391635 - RNA, 19 nt, Homo sapiens
  misc_RNA (1)...(19): siRNA sense strand
gcgacacuuuggaagauug

SEQ ID NO: 1391636 - RNA, 19 nt, Homo sapiens
  misc_RNA (1)...(19): siRNA sense strand
ggaggaggaucaaguuuuc

SEQ ID NO: 1391637 - RNA, 19 nt, Homo sapiens
  misc_RNA (1)...(19): siRNA sense strand
gggauacauuacuuguuga

SEQ ID NO: 1391638 - RNA, 19 nt, Homo sapiens
  misc_RNA (1)...(19): siRNA sense strand
uaucaaaggagcaugguau

SEQ ID NO: 1391639 - RNA, 19 nt, Homo sapiens
  misc_RNA (1)...(19): siRNA sense strand
aaucaagcuuccauauguu

SEQ ID NO: 1391640 - RNA, 19 nt, Homo sapiens
  misc_RNA (1)...(19): siRNA sense strand
caccaaaacuacauagauu

SEQ ID NO: 1391641 - RNA, 19 nt, Homo sapiens
  misc_RNA (1)...(19): siRNA sense strand
caauaaacagccuccaguu

SEQ ID NO: 1391642 - RNA, 19 nt, Homo sapiens
  misc_RNA (1)...(19): siRNA sense strand
gagcgacaaaguauaacaa

SEQ ID NO: 1391643 - RNA, 19 nt, Homo sapiens
  misc_RNA (1)...(19): siRNA sense strand
ccaaggagacauggaagaa

SEQ ID NO: 1391644 - RNA, 19 nt, Homo sapiens
  misc_RNA (1)...(19): siRNA sense strand
gaauacacgcucuuuacuc

SEQ ID NO: 1391645 - RNA, 19 nt, Homo sapiens
  misc_RNA (1)...(19): siRNA sense strand
caguggagauaauaaucaa

SEQ ID NO: 1391646 - RNA, 19 nt, Homo sapiens
  misc_RNA (1)...(19): siRNA sense strand
gcgacaaaguauaacaagu

SEQ ID NO: 1391647 - RNA, 19 nt, Homo sapiens
  misc_RNA (1)...(19): siRNA sense strand
gcaugguauucaaguacaa

SEQ ID NO: 1391648 - RNA, 19 nt, Homo sapiens
  misc_RNA (1)...(19): siRNA sense strand
ugacagggaacauggaaug

SEQ ID NO: 1391649 - RNA, 19 nt, Homo sapiens
  misc_RNA (1)...(19): siRNA sense strand
ggaauacacgcucuuuacu

SEQ ID NO: 1391650 - RNA, 19 nt, Homo sapiens
  misc_RNA (1)...(19): siRNA sense strand
ucgguugcccucucauuua

SEQ ID NO: 1391651 - RNA, 19 nt, Homo sapiens
  misc_RNA (1)...(19): siRNA sense strand
gagagccagugaauuucug

SEQ ID NO: 1391652 - RNA, 19 nt, Homo sapiens
  misc_RNA (1)...(19): siRNA sense strand
aaaaguaucgggaaaauug

SEQ ID NO: 1391653 - RNA, 19 nt, Homo sapiens
  misc_RNA (1)...(19): siRNA sense strand
gcaugaacuugcugugcau

SEQ ID NO: 1391654 - RNA, 19 nt, Homo sapiens
  misc_RNA (1)...(19): siRNA sense strand
gaaucaagcuuccauaugu

SEQ ID NO: 1391655 - RNA, 19 nt, Homo sapiens
  misc_RNA (1)...(19): siRNA sense strand
gcaaagauguuucucuguu

SEQ ID NO: 1391656 - RNA, 19 nt, Homo sapiens
  misc_RNA (1)...(19): siRNA sense strand
acacaugccuggagacuua

SEQ ID NO: 1391657 - RNA, 19 nt, Homo sapiens
  misc_RNA (1)...(19): siRNA sense strand
caacaaagcccgaggauau

SEQ ID NO: 1391658 - RNA, 19 nt, Homo sapiens
  misc_RNA (1)...(19): siRNA sense strand
ccaaagaaauucaggaaga

SEQ ID NO: 1391659 - RNA, 19 nt, Homo sapiens
  misc_RNA (1)...(19): siRNA sense strand
cuacauagauuucuucaug

SEQ ID NO: 1391660 - RNA, 19 nt, Homo sapiens
  misc_RNA (1)...(19): siRNA sense strand
ggaaauugaugauauugug

SEQ ID NO: 1391661 - RNA, 19 nt, Homo sapiens
  misc_RNA (1)...(19): siRNA sense strand
aaacucagcuauugccaua

SEQ ID NO: 1391662 - RNA, 19 nt, Homo sapiens
  misc_RNA (1)...(19): siRNA sense strand
gaagauaauucugguugaa

SEQ ID NO: 1391663 - RNA, 19 nt, Homo sapiens
  misc_RNA (1)...(19): siRNA sense strand
caaagauguuucucuguuu

SEQ ID NO: 1391664 - RNA, 19 nt, Homo sapiens
  misc_RNA (1)...(19): siRNA sense strand
guacaagaguggauuaauc

SEQ ID NO: 1391665 - RNA, 19 nt, Homo sapiens
  misc_RNA (1)...(19): siRNA sense strand
ggaagaguguucuaucuca

SEQ ID NO: 1391666 - RNA, 19 nt, Homo sapiens
  misc_RNA (1)...(19): siRNA sense strand
gaaagacaacgaccuuaaa

SEQ ID NO: 1391667 - RNA, 19 nt, Homo sapiens
  misc_RNA (1)...(19): siRNA sense strand
ggaaagacaacgaccuuaa

SEQ ID NO: 1391668 - RNA, 19 nt, Homo sapiens
  misc_RNA (1)...(19): siRNA sense strand
caaagaguuucuacuaaga

SEQ ID NO: 1391669 - RNA, 19 nt, Homo sapiens
  misc_RNA (1)...(19): siRNA sense strand
ccucagugguuucuaauaa

SEQ ID NO: 1391670 - RNA, 19 nt, Homo sapiens
  misc_RNA (1)...(19): siRNA sense strand
ccagugaauuucugaguuu

SEQ ID NO: 1391671 - RNA, 19 nt, Homo sapiens
  misc_RNA (1)...(19): siRNA sense strand
cagggaacauggaaugaua

SEQ ID NO: 1391672 - RNA, 19 nt, Homo sapiens
  misc_RNA (1)...(19): siRNA sense strand
uaagagcgacaaaguauaa

SEQ ID NO: 1391673 - RNA, 19 nt, Homo sapiens
  misc_RNA (1)...(19): siRNA sense strand
gagcaucuuuaacagaauu

SEQ ID NO: 1391674 - RNA, 19 nt, Homo sapiens
  misc_RNA (1)...(19): siRNA sense strand
ccuggagacuuauuuaauu

SEQ ID NO: 1391675 - RNA, 19 nt, Homo sapiens
  misc_RNA (1)...(19): siRNA sense strand
cgacaaaguauaacaaguu

SEQ ID NO: 1391676 - RNA, 19 nt, Homo sapiens
  misc_RNA (1)...(19): siRNA sense strand
ggagcaugguauucaagua

SEQ ID NO: 1391677 - RNA, 19 nt, Homo sapiens
  misc_RNA (1)...(19): siRNA sense strand
gaagaguguucuaucucaa

SEQ ID NO: 1391678 - RNA, 19 nt, Homo sapiens
  misc_RNA (1)...(19): siRNA sense strand
ucaaagaguuucuacuaag

SEQ ID NO: 1391679 - RNA, 19 nt, Homo sapiens
  misc_RNA (1)...(19): siRNA sense strand
gagaacugauaagaagaua

SEQ ID NO: 1391680 - RNA, 19 nt, Homo sapiens
  misc_RNA (1)...(19): siRNA sense strand
gcucuuuacucagggaaua

SEQ ID NO: 1391681 - RNA, 19 nt, Homo sapiens
  misc_RNA (1)...(19): siRNA sense strand
cgggauacauuacuuguug

SEQ ID NO: 1391682 - RNA, 19 nt, Homo sapiens
  misc_RNA (1)...(19): siRNA sense strand
ucgauguccucuuauauuu

SEQ ID NO: 1391683 - RNA, 19 nt, Homo sapiens
  misc_RNA (1)...(19): siRNA sense strand
agauuuaccuaaccaguuu

SEQ ID NO: 1391684 - RNA, 19 nt, Homo sapiens
  misc_RNA (1)...(19): siRNA sense strand
ggaaguaugugaggauugg

SEQ ID NO: 1391685 - RNA, 19 nt, Homo sapiens
  misc_RNA (1)...(19): siRNA sense strand
gauaucagaagugcaauaa

SEQ ID NO: 1391686 - RNA, 19 nt, Homo sapiens
  misc_RNA (1)...(19): siRNA sense strand
gcaccaacaauuaugauga

SEQ ID NO: 1391687 - RNA, 19 nt, Homo sapiens
  misc_RNA (1)...(19): siRNA sense strand
aaacaggguggaucuauuu

SEQ ID NO: 1391688 - RNA, 19 nt, Homo sapiens
  misc_RNA (1)...(19): siRNA sense strand
gaugaucugagaacugaua

SEQ ID NO: 1391689 - RNA, 19 nt, Homo sapiens
  misc_RNA (1)...(19): siRNA sense strand
ggguggaucuauuuuauua

SEQ ID NO: 1391690 - RNA, 19 nt, Homo sapiens
  misc_RNA (1)...(19): siRNA sense strand
uaucagaagugcaauaaac

SEQ ID NO: 1391691 - RNA, 19 nt, Homo sapiens
  misc_RNA (1)...(19): siRNA sense strand
ugugagagccagugaauuu

SEQ ID NO: 1391692 - RNA, 19 nt, Homo sapiens
  misc_RNA (1)...(19): siRNA sense strand
caaaggagcaugguauuca

SEQ ID NO: 1391693 - RNA, 19 nt, Homo sapiens
  misc_RNA (1)...(19): siRNA sense strand
ccggaaaccuggucucuuc

SEQ ID NO: 1391694 - RNA, 19 nt, Homo sapiens
  misc_RNA (1)...(19): siRNA sense strand
gaagcgacacuuuggaaga

SEQ ID NO: 1391695 - RNA, 19 nt, Homo sapiens
  misc_RNA (1)...(19): siRNA sense strand
cgagaggugugaugcauuc

SEQ ID NO: 1391696 - RNA, 19 nt, Homo sapiens
  misc_RNA (1)...(19): siRNA sense strand
cagaugcugugcugucaaa

SEQ ID NO: 1391697 - RNA, 19 nt, Homo sapiens
  misc_RNA (1)...(19): siRNA sense strand
caccaacaauuaugaugaa

SEQ ID NO: 1391698 - RNA, 19 nt, Homo sapiens
  misc_RNA (1)...(19): siRNA sense strand
gaacgggauacauuacuug

SEQ ID NO: 1391699 - RNA, 19 nt, Homo sapiens
  misc_RNA (1)...(19): siRNA sense strand
gaucugagaacugauaaga

SEQ ID NO: 1391700 - RNA, 19 nt, Homo sapiens
  misc_RNA (1)...(19): siRNA sense strand
uaacaagaauggaggaaaa

SEQ ID NO: 1391701 - RNA, 19 nt, Homo sapiens
  misc_RNA (1)...(19): siRNA sense strand
caaguacaagaguggauua

SEQ ID NO: 1391702 - RNA, 19 nt, Homo sapiens
  misc_RNA (1)...(19): siRNA sense strand
gaaaccuggucucuuccuu

SEQ ID NO: 1391703 - RNA, 19 nt, Homo sapiens
  misc_RNA (1)...(19): siRNA sense strand
guuauuguuucccaaagaa

SEQ ID NO: 1391704 - RNA, 19 nt, Homo sapiens
  misc_RNA (1)...(19): siRNA sense strand
uacaugaaguucuaaggaa

SEQ ID NO: 1391705 - RNA, 19 nt, Homo sapiens
  misc_RNA (1)...(19): siRNA sense strand
ucugagaacugauaagaag

SEQ ID NO: 1391706 - RNA, 19 nt, Homo sapiens
  misc_RNA (1)...(19): siRNA sense strand
aauacacgcucuuuacuca

SEQ ID NO: 1391707 - RNA, 19 nt, Homo sapiens
  misc_RNA (1)...(19): siRNA sense strand
caacuuacggccaaggaaa

SEQ ID NO: 1391708 - RNA, 19 nt, Homo sapiens
  misc_RNA (1)...(19): siRNA sense strand
caaagaaauucaggaagag

SEQ ID NO: 1391709 - RNA, 19 nt, Homo sapiens
  misc_RNA (1)...(19): siRNA sense strand
ggagguaguagaaauguca

SEQ ID NO: 1391710 - RNA, 19 nt, Homo sapiens
  misc_RNA (1)...(19): siRNA sense strand
gccagugaauuucugaguu

SEQ ID NO: 1391711 - RNA, 19 nt, Homo sapiens
  misc_RNA (1)...(19): siRNA sense strand
uacaaaugcuuggagauga

SEQ ID NO: 1391712 - RNA, 19 nt, Homo sapiens
  misc_RNA (1)...(19): siRNA sense strand
ugaacuugcugugcauaaa

SEQ ID NO: 1391713 - RNA, 19 nt, Homo sapiens
  misc_RNA (1)...(19): siRNA sense strand
ccucucauuuaucagaaua

SEQ ID NO: 1391714 - RNA, 19 nt, Homo sapiens
  misc_RNA (1)...(19): siRNA sense strand
caagagguccaagcuauug

SEQ ID NO: 1391715 - RNA, 19 nt, Homo sapiens
  misc_RNA (1)...(19): siRNA sense strand
ucgggauucucauacuuua

SEQ ID NO: 1391716 - RNA, 19 nt, Homo sapiens
  misc_RNA (1)...(19): siRNA sense strand
gguuauuguuucccaaaga

SEQ ID NO: 1391717 - RNA, 19 nt, Homo sapiens
  misc_RNA (1)...(19): siRNA sense strand
gccauaccuugcucuacua

SEQ ID NO: 1391718 - RNA, 19 nt, Homo sapiens
  misc_RNA (1)...(19): siRNA sense strand
caaggaggaggaucaaguu

SEQ ID NO: 1391719 - RNA, 19 nt, Homo sapiens
  misc_RNA (1)...(19): siRNA sense strand
ugugaugcauuccaacaaa

SEQ ID NO: 1391720 - RNA, 19 nt, Homo sapiens
  misc_RNA (1)...(19): siRNA sense strand
gaggugugaugcauuccaa

SEQ ID NO: 1391721 - RNA, 19 nt, Homo sapiens
  misc_RNA (1)...(19): siRNA sense strand
aaagauguuucucuguuuc

SEQ ID NO: 1391722 - RNA, 19 nt, Homo sapiens
  misc_RNA (1)...(19): siRNA sense strand
gggauguucuggugauauc

SEQ ID NO: 1391723 - RNA, 19 nt, Homo sapiens
  misc_RNA (1)...(19): siRNA sense strand
ugacaaaacuucucuagag

SEQ ID NO: 1391724 - RNA, 19 nt, Homo sapiens
  misc_RNA (1)...(19): siRNA sense strand
caggaagaguguucuaucu

SEQ ID NO: 1391725 - RNA, 19 nt, Homo sapiens
  misc_RNA (1)...(19): siRNA sense strand
ugaacgggauacauuacuu

SEQ ID NO: 1391726 - RNA, 19 nt, Homo sapiens
  misc_RNA (1)...(19): siRNA sense strand
ggugauaucagaagugcaa

SEQ ID NO: 1391727 - RNA, 19 nt, Homo sapiens
  misc_RNA (1)...(19): siRNA sense strand
agauaauucugguugaaga

SEQ ID NO: 1391728 - RNA, 19 nt, Homo sapiens
  misc_RNA (1)...(19): siRNA sense strand
aaaggagcaugguauucaa

SEQ ID NO: 1391729 - RNA, 19 nt, Homo sapiens
  misc_RNA (1)...(19): siRNA sense strand
aauaugaacgggauacauu

SEQ ID NO: 1391730 - RNA, 19 nt, Homo sapiens
  misc_RNA (1)...(19): siRNA sense strand
cuauagaagcuaacaagaa

SEQ ID NO: 1391731 - RNA, 19 nt, Homo sapiens
  misc_RNA (1)...(19): siRNA sense strand
cgauguccucuuauauuua

SEQ ID NO: 1391732 - RNA, 19 nt, Homo sapiens
  misc_RNA (1)...(19): siRNA sense strand
auuggucgauguccucuua

SEQ ID NO: 1391733 - RNA, 19 nt, Homo sapiens
  misc_RNA (1)...(19): siRNA sense strand
gaaguucuaaggaaguaug

SEQ ID NO: 1391734 - RNA, 19 nt, Homo sapiens
  misc_RNA (1)...(19): siRNA sense strand
ccuguggcaccaacaauua

SEQ ID NO: 1391735 - RNA, 19 nt, Homo sapiens
  misc_RNA (1)...(19): siRNA sense strand
gcgacacuuuggaagauug

SEQ ID NO: 1391736 - RNA, 19 nt, Homo sapiens
  misc_RNA (1)...(19): siRNA sense strand
ggaggaggaucaaguuuuc

SEQ ID NO: 1391737 - RNA, 19 nt, Homo sapiens
  misc_RNA (1)...(19): siRNA sense strand
gggauacauuacuuguuga

SEQ ID NO: 1391738 - RNA, 19 nt, Homo sapiens
  misc_RNA (1)...(19): siRNA sense strand
uaucaaaggagcaugguau

SEQ ID NO: 1391739 - RNA, 19 nt, Homo sapiens
  misc_RNA (1)...(19): siRNA sense strand
aaucaagcuuccauauguu

SEQ ID NO: 1391740 - RNA, 19 nt, Homo sapiens
  misc_RNA (1)...(19): siRNA sense strand
caccaaaacuacauagauu

SEQ ID NO: 1391741 - RNA, 19 nt, Homo sapiens
  misc_RNA (1)...(19): siRNA sense strand
caauaaacagccuccaguu

SEQ ID NO: 1391742 - RNA, 19 nt, Homo sapiens
  misc_RNA (1)...(19): siRNA sense strand
gagcgacaaaguauaacaa

SEQ ID NO: 1391743 - RNA, 19 nt, Homo sapiens
  misc_RNA (1)...(19): siRNA sense strand
ccaaggagacauggaagaa

SEQ ID NO: 1391744 - RNA, 19 nt, Homo sapiens
  misc_RNA (1)...(19): siRNA sense strand
gaauacacgcucuuuacuc

SEQ ID NO: 1391745 - RNA, 19 nt, Homo sapiens
  misc_RNA (1)...(19): siRNA sense strand
caguggagauaauaaucaa

SEQ ID NO: 1391746 - RNA, 19 nt, Homo sapiens
  misc_RNA (1)...(19): siRNA sense strand
gcgacaaaguauaacaagu

SEQ ID NO: 1391747 - RNA, 19 nt, Homo sapiens
  misc_RNA (1)...(19): siRNA sense strand
gcaugguauucaaguacaa

SEQ ID NO: 1391748 - RNA, 19 nt, Homo sapiens
  misc_RNA (1)...(19): siRNA sense strand
ugacagggaacauggaaug

SEQ ID NO: 1391749 - RNA, 19 nt, Homo sapiens
  misc_RNA (1)...(19): siRNA sense strand
ggaauacacgcucuuuacu

SEQ ID NO: 1391750 - RNA, 19 nt, Homo sapiens
  misc_RNA (1)...(19): siRNA sense strand
ucgguugcccucucauuua

SEQ ID NO: 1391751 - RNA, 19 nt, Homo sapiens
  misc_RNA (1)...(19): siRNA sense strand
gagagccagugaauuucug

SEQ ID NO: 1391752 - RNA, 19 nt, Homo sapiens
  misc_RNA (1)...(19): siRNA sense strand
aaaaguaucgggaaaauug

SEQ ID NO: 1391753 - RNA, 19 nt, Homo sapiens
  misc_RNA (1)...(19): siRNA sense strand
gcaugaacuugcugugcau

SEQ ID NO: 1391754 - RNA, 19 nt, Homo sapiens
  misc_RNA (1)...(19): siRNA sense strand
gaaucaagcuuccauaugu

SEQ ID NO: 1391755 - RNA, 19 nt, Homo sapiens
  misc_RNA (1)...(19): siRNA sense strand
gcaaagauguuucucuguu

SEQ ID NO: 1391756 - RNA, 19 nt, Homo sapiens
  misc_RNA (1)...(19): siRNA sense strand
acacaugccuggagacuua

SEQ ID NO: 1391757 - RNA, 19 nt, Homo sapiens
  misc_RNA (1)...(19): siRNA sense strand
caacaaagcccgaggauau

SEQ ID NO: 1391758 - RNA, 19 nt, Homo sapiens
  misc_RNA (1)...(19): siRNA sense strand
ccaaagaaauucaggaaga

SEQ ID NO: 1391759 - RNA, 19 nt, Homo sapiens
  misc_RNA (1)...(19): siRNA sense strand
cuacauagauuucuucaug

SEQ ID NO: 1391760 - RNA, 19 nt, Homo sapiens
  misc_RNA (1)...(19): siRNA sense strand
ggaaauugaugauauugug

SEQ ID NO: 1391761 - RNA, 19 nt, Homo sapiens
  misc_RNA (1)...(19): siRNA sense strand
aaacucagcuauugccaua

SEQ ID NO: 1391762 - RNA, 19 nt, Homo sapiens
  misc_RNA (1)...(19): siRNA sense strand
gaagauaauucugguugaa

SEQ ID NO: 1391763 - RNA, 19 nt, Homo sapiens
  misc_RNA (1)...(19): siRNA sense strand
caaagauguuucucuguuu

SEQ ID NO: 1391764 - RNA, 19 nt, Homo sapiens
  misc_RNA (1)...(19): siRNA sense strand
guacaagaguggauuaauc

SEQ ID NO: 1391765 - RNA, 19 nt, Homo sapiens
  misc_RNA (1)...(19): siRNA sense strand
ggaagaguguucuaucuca

SEQ ID NO: 1391766 - RNA, 19 nt, Homo sapiens
  misc_RNA (1)...(19): siRNA sense strand
gaaagacaacgaccuuaaa

SEQ ID NO: 1391767 - RNA, 19 nt, Homo sapiens
  misc_RNA (1)...(19): siRNA sense strand
ggaaagacaacgaccuuaa

SEQ ID NO: 1391768 - RNA, 19 nt, Homo sapiens
  misc_RNA (1)...(19): siRNA sense strand
caaagaguuucuacuaaga

SEQ ID NO: 1391769 - RNA, 19 nt, Homo sapiens
  misc_RNA (1)...(19): siRNA sense strand
ccucagugguuucuaauaa

SEQ ID NO: 1391770 - RNA, 19 nt, Homo sapiens
  misc_RNA (1)...(19): siRNA sense strand
ccagugaauuucugaguuu

SEQ ID NO: 1391771 - RNA, 19 nt, Homo sapiens
  misc_RNA (1)...(19): siRNA sense strand
cagggaacauggaaugaua

SEQ ID NO: 1391772 - RNA, 19 nt, Homo sapiens
  misc_RNA (1)...(19): siRNA sense strand
uaagagcgacaaaguauaa

SEQ ID NO: 1391773 - RNA, 19 nt, Homo sapiens
  misc_RNA (1)...(19): siRNA sense strand
gagcaucuuuaacagaauu

SEQ ID NO: 1391774 - RNA, 19 nt, Homo sapiens
  misc_RNA (1)...(19): siRNA sense strand
ccuggagacuuauuuaauu

SEQ ID NO: 1391775 - RNA, 19 nt, Homo sapiens
  misc_RNA (1)...(19): siRNA sense strand
cgacaaaguauaacaaguu

SEQ ID NO: 1391776 - RNA, 19 nt, Homo sapiens
  misc_RNA (1)...(19): siRNA sense strand
ggagcaugguauucaagua

SEQ ID NO: 1391777 - RNA, 19 nt, Homo sapiens
  misc_RNA (1)...(19): siRNA sense strand
gaagaguguucuaucucaa

SEQ ID NO: 1391778 - RNA, 19 nt, Homo sapiens
  misc_RNA (1)...(19): siRNA sense strand
ucaaagaguuucuacuaag

SEQ ID NO: 1391779 - RNA, 19 nt, Homo sapiens
  misc_RNA (1)...(19): siRNA sense strand
gagaacugauaagaagaua

SEQ ID NO: 1391780 - RNA, 19 nt, Homo sapiens
  misc_RNA (1)...(19): siRNA sense strand
gcucuuuacucagggaaua

SEQ ID NO: 1391781 - RNA, 19 nt, Homo sapiens
  misc_RNA (1)...(19): siRNA sense strand
cgggauacauuacuuguug

SEQ ID NO: 1391782 - RNA, 19 nt, Homo sapiens
  misc_RNA (1)...(19): siRNA sense strand
ucgauguccucuuauauuu

SEQ ID NO: 1391783 - RNA, 19 nt, Homo sapiens
  misc_RNA (1)...(19): siRNA sense strand
agauuuaccuaaccaguuu

SEQ ID NO: 1391784 - RNA, 19 nt, Homo sapiens
  misc_RNA (1)...(19): siRNA sense strand
ggaaguaugugaggauugg

SEQ ID NO: 1391785 - RNA, 19 nt, Homo sapiens
  misc_RNA (1)...(19): siRNA sense strand
gauaucagaagugcaauaa

SEQ ID NO: 1391786 - RNA, 19 nt, Homo sapiens
  misc_RNA (1)...(19): siRNA sense strand
gcaccaacaauuaugauga

SEQ ID NO: 1391787 - RNA, 19 nt, Homo sapiens
  misc_RNA (1)...(19): siRNA sense strand
aaacaggguggaucuauuu

SEQ ID NO: 1391788 - RNA, 19 nt, Homo sapiens
  misc_RNA (1)...(19): siRNA sense strand
gaugaucugagaacugaua

SEQ ID NO: 1391789 - RNA, 19 nt, Homo sapiens
  misc_RNA (1)...(19): siRNA sense strand
ggguggaucuauuuuauua

SEQ ID NO: 1391790 - RNA, 19 nt, Homo sapiens
  misc_RNA (1)...(19): siRNA sense strand
uaucagaagugcaauaaac

SEQ ID NO: 1391791 - RNA, 19 nt, Homo sapiens
  misc_RNA (1)...(19): siRNA sense strand
ugugagagccagugaauuu

SEQ ID NO: 1391792 - RNA, 19 nt, Homo sapiens
  misc_RNA (1)...(19): siRNA sense strand
caaaggagcaugguauuca

SEQ ID NO: 1391793 - RNA, 19 nt, Homo sapiens
  misc_RNA (1)...(19): siRNA sense strand
ccggaaaccuggucucuuc

SEQ ID NO: 1391794 - RNA, 19 nt, Homo sapiens
  misc_RNA (1)...(19): siRNA sense strand
gaagcgacacuuuggaaga

SEQ ID NO: 1391795 - RNA, 19 nt, Homo sapiens
  misc_RNA (1)...(19): siRNA sense strand
cgagaggugugaugcauuc

SEQ ID NO: 1391796 - RNA, 19 nt, Homo sapiens
  misc_RNA (1)...(19): siRNA sense strand
cagaugcugugcugucaaa

SEQ ID NO: 1391797 - RNA, 19 nt, Homo sapiens
  misc_RNA (1)...(19): siRNA sense strand
caccaacaauuaugaugaa

SEQ ID NO: 1391798 - RNA, 19 nt, Homo sapiens
  misc_RNA (1)...(19): siRNA sense strand
gaacgggauacauuacuug

SEQ ID NO: 1391799 - RNA, 19 nt, Homo sapiens
  misc_RNA (1)...(19): siRNA sense strand
gaucugagaacugauaaga

SEQ ID NO: 1391800 - RNA, 19 nt, Homo sapiens
  misc_RNA (1)...(19): siRNA sense strand
uaacaagaauggaggaaaa

SEQ ID NO: 1391801 - RNA, 19 nt, Homo sapiens
  misc_RNA (1)...(19): siRNA sense strand
caaguacaagaguggauua

SEQ ID NO: 1391802 - RNA, 19 nt, Homo sapiens
  misc_RNA (1)...(19): siRNA sense strand
gaaaccuggucucuuccuu

SEQ ID NO: 1391803 - RNA, 19 nt, Homo sapiens
  misc_RNA (1)...(19): siRNA sense strand
guuauuguuucccaaagaa

SEQ ID NO: 1391804 - RNA, 19 nt, Homo sapiens
  misc_RNA (1)...(19): siRNA sense strand
uacaugaaguucuaaggaa

SEQ ID NO: 1391805 - RNA, 19 nt, Homo sapiens
  misc_RNA (1)...(19): siRNA sense strand
ucugagaacugauaagaag

SEQ ID NO: 1391806 - RNA, 19 nt, Homo sapiens
  misc_RNA (1)...(19): siRNA sense strand
aauacacgcucuuuacuca

SEQ ID NO: 1391807 - RNA, 19 nt, Homo sapiens
  misc_RNA (1)...(19): siRNA sense strand
caacuuacggccaaggaaa

SEQ ID NO: 1391808 - RNA, 19 nt, Homo sapiens
  misc_RNA (1)...(19): siRNA sense strand
caaagaaauucaggaagag

SEQ ID NO: 1391809 - RNA, 19 nt, Homo sapiens
  misc_RNA (1)...(19): siRNA sense strand
ggagguaguagaaauguca

SEQ ID NO: 1391810 - RNA, 19 nt, Homo sapiens
  misc_RNA (1)...(19): siRNA sense strand
gccagugaauuucugaguu

SEQ ID NO: 1391811 - RNA, 19 nt, Homo sapiens
  misc_RNA (1)...(19): siRNA sense strand
uacaaaugcuuggagauga

SEQ ID NO: 1391812 - RNA, 19 nt, Homo sapiens
  misc_RNA (1)...(19): siRNA sense strand
ugaacuugcugugcauaaa

SEQ ID NO: 1391813 - RNA, 19 nt, Homo sapiens
  misc_RNA (1)...(19): siRNA sense strand
ccucucauuuaucagaaua

SEQ ID NO: 1391814 - RNA, 19 nt, Homo sapiens
  misc_RNA (1)...(19): siRNA sense strand
caagagguccaagcuauug

SEQ ID NO: 1391815 - RNA, 19 nt, Homo sapiens
  misc_RNA (1)...(19): siRNA sense strand
ucgggauucucauacuuua

SEQ ID NO: 1391816 - RNA, 19 nt, Homo sapiens
  misc_RNA (1)...(19): siRNA sense strand
gguuauuguuucccaaaga

SEQ ID NO: 1391817 - RNA, 19 nt, Homo sapiens
  misc_RNA (1)...(19): siRNA sense strand
gccauaccuugcucuacua

SEQ ID NO: 1391818 - RNA, 19 nt, Homo sapiens
  misc_RNA (1)...(19): siRNA sense strand
caaggaggaggaucaaguu

SEQ ID NO: 1391819 - RNA, 19 nt, Homo sapiens
  misc_RNA (1)...(19): siRNA sense strand
ugugaugcauuccaacaaa

SEQ ID NO: 1391820 - RNA, 19 nt, Homo sapiens
  misc_RNA (1)...(19): siRNA sense strand
gaggugugaugcauuccaa

SEQ ID NO: 1391821 - RNA, 19 nt, Homo sapiens
  misc_RNA (1)...(19): siRNA sense strand
aaagauguuucucuguuuc

SEQ ID NO: 1391822 - RNA, 19 nt, Homo sapiens
  misc_RNA (1)...(19): siRNA sense strand
gggauguucuggugauauc

SEQ ID NO: 1391823 - RNA, 19 nt, Homo sapiens
  misc_RNA (1)...(19): siRNA sense strand
ugacaaaacuucucuagag

SEQ ID NO: 1391824 - RNA, 19 nt, Homo sapiens
  misc_RNA (1)...(19): siRNA sense strand
caggaagaguguucuaucu

SEQ ID NO: 1391825 - RNA, 19 nt, Homo sapiens
  misc_RNA (1)...(19): siRNA sense strand
ugaacgggauacauuacuu

SEQ ID NO: 1391826 - RNA, 19 nt, Homo sapiens
  misc_RNA (1)...(19): siRNA sense strand
ggugauaucagaagugcaa

SEQ ID NO: 1391827 - RNA, 19 nt, Homo sapiens
  misc_RNA (1)...(19): siRNA sense strand
agauaauucugguugaaga

SEQ ID NO: 1391828 - RNA, 19 nt, Homo sapiens
  misc_RNA (1)...(19): siRNA sense strand
aaaggagcaugguauucaa

SEQ ID NO: 1391829 - RNA, 19 nt, Homo sapiens
  misc_RNA (1)...(19): siRNA sense strand
aauaugaacgggauacauu

SEQ ID NO: 1391830 - RNA, 19 nt, Homo sapiens
  misc_RNA (1)...(19): siRNA sense strand
cuauagaagcuaacaagaa

SEQ ID NO: 1391831 - RNA, 19 nt, Homo sapiens
  misc_RNA (1)...(19): siRNA sense strand
cgauguccucuuauauuua

SEQ ID NO: 1391832 - RNA, 19 nt, Homo sapiens
  misc_RNA (1)...(19): siRNA sense strand
auuggucgauguccucuua

SEQ ID NO: 1391833 - RNA, 19 nt, Homo sapiens
  misc_RNA (1)...(19): siRNA sense strand
gaaguucuaaggaaguaug

SEQ ID NO: 1391834 - RNA, 19 nt, Homo sapiens
  misc_RNA (1)...(19): siRNA sense strand
ccuguggcaccaacaauua

SEQ ID NO: 1391835 - RNA, 19 nt, Homo sapiens
  misc_RNA (1)...(19): siRNA sense strand
gcgacacuuuggaagauug

SEQ ID NO: 1391836 - RNA, 19 nt, Homo sapiens
  misc_RNA (1)...(19): siRNA sense strand
ggaggaggaucaaguuuuc

SEQ ID NO: 1391837 - RNA, 19 nt, Homo sapiens
  misc_RNA (1)...(19): siRNA sense strand
gggauacauuacuuguuga

SEQ ID NO: 1391838 - RNA, 19 nt, Homo sapiens
  misc_RNA (1)...(19): siRNA sense strand
uaucaaaggagcaugguau

SEQ ID NO: 1391839 - RNA, 19 nt, Homo sapiens
  misc_RNA (1)...(19): siRNA sense strand
aaucaagcuuccauauguu

SEQ ID NO: 1391840 - RNA, 19 nt, Homo sapiens
  misc_RNA (1)...(19): siRNA sense strand
caccaaaacuacauagauu

SEQ ID NO: 1391841 - RNA, 19 nt, Homo sapiens
  misc_RNA (1)...(19): siRNA sense strand
caauaaacagccuccaguu

SEQ ID NO: 1391842 - RNA, 19 nt, Homo sapiens
  misc_RNA (1)...(19): siRNA sense strand
gagcgacaaaguauaacaa

SEQ ID NO: 1391843 - RNA, 19 nt, Homo sapiens
  misc_RNA (1)...(19): siRNA sense strand
ccaaggagacauggaagaa

SEQ ID NO: 1391844 - RNA, 19 nt, Homo sapiens
  misc_RNA (1)...(19): siRNA sense strand
gaauacacgcucuuuacuc

SEQ ID NO: 1391845 - RNA, 19 nt, Homo sapiens
  misc_RNA (1)...(19): siRNA sense strand
caguggagauaauaaucaa

SEQ ID NO: 1391846 - RNA, 19 nt, Homo sapiens
  misc_RNA (1)...(19): siRNA sense strand
gcgacaaaguauaacaagu

SEQ ID NO: 1391847 - RNA, 19 nt, Homo sapiens
  misc_RNA (1)...(19): siRNA sense strand
gcaugguauucaaguacaa

SEQ ID NO: 1391848 - RNA, 19 nt, Homo sapiens
  misc_RNA (1)...(19): siRNA sense strand
ugacagggaacauggaaug

SEQ ID NO: 1391849 - RNA, 19 nt, Homo sapiens
  misc_RNA (1)...(19): siRNA sense strand
ggaauacacgcucuuuacu

SEQ ID NO: 1391850 - RNA, 19 nt, Homo sapiens
  misc_RNA (1)...(19): siRNA sense strand
ucgguugcccucucauuua

SEQ ID NO: 1391851 - RNA, 19 nt, Homo sapiens
  misc_RNA (1)...(19): siRNA sense strand
gagagccagugaauuucug

SEQ ID NO: 1391852 - RNA, 19 nt, Homo sapiens
  misc_RNA (1)...(19): siRNA sense strand
aaaaguaucgggaaaauug

SEQ ID NO: 1391853 - RNA, 19 nt, Homo sapiens
  misc_RNA (1)...(19): siRNA sense strand
gcaugaacuugcugugcau

SEQ ID NO: 1391854 - RNA, 19 nt, Homo sapiens
  misc_RNA (1)...(19): siRNA sense strand
gaaucaagcuuccauaugu

SEQ ID NO: 1391855 - RNA, 19 nt, Homo sapiens
  misc_RNA (1)...(19): siRNA sense strand
gcaaagauguuucucuguu

SEQ ID NO: 1391856 - RNA, 19 nt, Homo sapiens
  misc_RNA (1)...(19): siRNA sense strand
acacaugccuggagacuua

SEQ ID NO: 1391857 - RNA, 19 nt, Homo sapiens
  misc_RNA (1)...(19): siRNA sense strand
caacaaagcccgaggauau

SEQ ID NO: 1391858 - RNA, 19 nt, Homo sapiens
  misc_RNA (1)...(19): siRNA sense strand
ccaaagaaauucaggaaga

SEQ ID NO: 1391859 - RNA, 19 nt, Homo sapiens
  misc_RNA (1)...(19): siRNA sense strand
cuacauagauuucuucaug

SEQ ID NO: 1391860 - RNA, 19 nt, Homo sapiens
  misc_RNA (1)...(19): siRNA sense strand
ggaaauugaugauauugug

SEQ ID NO: 1391861 - RNA, 19 nt, Homo sapiens
  misc_RNA (1)...(19): siRNA sense strand
aaacucagcuauugccaua

SEQ ID NO: 1391862 - RNA, 19 nt, Homo sapiens
  misc_RNA (1)...(19): siRNA sense strand
gaagauaauucugguugaa

SEQ ID NO: 1391863 - RNA, 19 nt, Homo sapiens
  misc_RNA (1)...(19): siRNA sense strand
caaagauguuucucuguuu

SEQ ID NO: 1391864 - RNA, 19 nt, Homo sapiens
  misc_RNA (1)...(19): siRNA sense strand
guacaagaguggauuaauc

SEQ ID NO: 1391865 - RNA, 19 nt, Homo sapiens
  misc_RNA (1)...(19): siRNA sense strand
ggaagaguguucuaucuca

SEQ ID NO: 1391866 - RNA, 19 nt, Homo sapiens
  misc_RNA (1)...(19): siRNA sense strand
gaaagacaacgaccuuaaa

SEQ ID NO: 1391867 - RNA, 19 nt, Homo sapiens
  misc_RNA (1)...(19): siRNA sense strand
ggaaagacaacgaccuuaa

SEQ ID NO: 1391868 - RNA, 19 nt, Homo sapiens
  misc_RNA (1)...(19): siRNA sense strand
caaagaguuucuacuaaga

SEQ ID NO: 1391869 - RNA, 19 nt, Homo sapiens
  misc_RNA (1)...(19): siRNA sense strand
ccucagugguuucuaauaa

SEQ ID NO: 1391870 - RNA, 19 nt, Homo sapiens
  misc_RNA (1)...(19): siRNA sense strand
ccagugaauuucugaguuu

SEQ ID NO: 1391871 - RNA, 19 nt, Homo sapiens
  misc_RNA (1)...(19): siRNA sense strand
cagggaacauggaaugaua

SEQ ID NO: 1391872 - RNA, 19 nt, Homo sapiens
  misc_RNA (1)...(19): siRNA sense strand
uaagagcgacaaaguauaa

SEQ ID NO: 1391873 - RNA, 19 nt, Homo sapiens
  misc_RNA (1)...(19): siRNA sense strand
gagcaucuuuaacagaauu

SEQ ID NO: 1391874 - RNA, 19 nt, Homo sapiens
  misc_RNA (1)...(19): siRNA sense strand
ccuggagacuuauuuaauu

SEQ ID NO: 1391875 - RNA, 19 nt, Homo sapiens
  misc_RNA (1)...(19): siRNA sense strand
cgacaaaguauaacaaguu

SEQ ID NO: 1391876 - RNA, 19 nt, Homo sapiens
  misc_RNA (1)...(19): siRNA sense strand
ggagcaugguauucaagua

SEQ ID NO: 1391877 - RNA, 19 nt, Homo sapiens
  misc_RNA (1)...(19): siRNA sense strand
gaagaguguucuaucucaa

SEQ ID NO: 1391878 - RNA, 19 nt, Homo sapiens
  misc_RNA (1)...(19): siRNA sense strand
ucaaagaguuucuacuaag

SEQ ID NO: 1391879 - RNA, 19 nt, Homo sapiens
  misc_RNA (1)...(19): siRNA sense strand
gagaacugauaagaagaua

SEQ ID NO: 1391880 - RNA, 19 nt, Homo sapiens
  misc_RNA (1)...(19): siRNA sense strand
gcucuuuacucagggaaua

SEQ ID NO: 1391881 - RNA, 19 nt, Homo sapiens
  misc_RNA (1)...(19): siRNA sense strand
cgggauacauuacuuguug

SEQ ID NO: 1391882 - RNA, 19 nt, Homo sapiens
  misc_RNA (1)...(19): siRNA sense strand
ucgauguccucuuauauuu

SEQ ID NO: 1391883 - RNA, 19 nt, Homo sapiens
  misc_RNA (1)...(19): siRNA sense strand
agauuuaccuaaccaguuu

SEQ ID NO: 1391884 - RNA, 19 nt, Homo sapiens
  misc_RNA (1)...(19): siRNA sense strand
ggaaguaugugaggauugg

SEQ ID NO: 1391885 - RNA, 19 nt, Homo sapiens
  misc_RNA (1)...(19): siRNA sense strand
gauaucagaagugcaauaa

SEQ ID NO: 1391886 - RNA, 19 nt, Homo sapiens
  misc_RNA (1)...(19): siRNA sense strand
gcaccaacaauuaugauga

SEQ ID NO: 1391887 - RNA, 19 nt, Homo sapiens
  misc_RNA (1)...(19): siRNA sense strand
aaacaggguggaucuauuu

SEQ ID NO: 1391888 - RNA, 19 nt, Homo sapiens
  misc_RNA (1)...(19): siRNA sense strand
gaugaucugagaacugaua

SEQ ID NO: 1391889 - RNA, 19 nt, Homo sapiens
  misc_RNA (1)...(19): siRNA sense strand
ggguggaucuauuuuauua

SEQ ID NO: 1391890 - RNA, 19 nt, Homo sapiens
  misc_RNA (1)...(19): siRNA sense strand
uaucagaagugcaauaaac

SEQ ID NO: 1391891 - RNA, 19 nt, Homo sapiens
  misc_RNA (1)...(19): siRNA sense strand
ugugagagccagugaauuu

SEQ ID NO: 1391892 - RNA, 19 nt, Homo sapiens
  misc_RNA (1)...(19): siRNA sense strand
caaaggagcaugguauuca

SEQ ID NO: 1391893 - RNA, 19 nt, Homo sapiens
  misc_RNA (1)...(19): siRNA sense strand
ccggaaaccuggucucuuc

SEQ ID NO: 1391894 - RNA, 19 nt, Homo sapiens
  misc_RNA (1)...(19): siRNA sense strand
gaagcgacacuuuggaaga

SEQ ID NO: 1391895 - RNA, 19 nt, Homo sapiens
  misc_RNA (1)...(19): siRNA sense strand
cgagaggugugaugcauuc

SEQ ID NO: 1391896 - RNA, 19 nt, Homo sapiens
  misc_RNA (1)...(19): siRNA sense strand
cagaugcugugcugucaaa

SEQ ID NO: 1391897 - RNA, 19 nt, Homo sapiens
  misc_RNA (1)...(19): siRNA sense strand
caccaacaauuaugaugaa

SEQ ID NO: 1391898 - RNA, 19 nt, Homo sapiens
  misc_RNA (1)...(19): siRNA sense strand
gaacgggauacauuacuug

SEQ ID NO: 1391899 - RNA, 19 nt, Homo sapiens
  misc_RNA (1)...(19): siRNA sense strand
gaucugagaacugauaaga

SEQ ID NO: 1391900 - RNA, 19 nt, Homo sapiens
  misc_RNA (1)...(19): siRNA sense strand
uaacaagaauggaggaaaa

SEQ ID NO: 1391901 - RNA, 19 nt, Homo sapiens
  misc_RNA (1)...(19): siRNA sense strand
caaguacaagaguggauua

SEQ ID NO: 1391902 - RNA, 19 nt, Homo sapiens
  misc_RNA (1)...(19): siRNA sense strand
gaaaccuggucucuuccuu

SEQ ID NO: 1391903 - RNA, 19 nt, Homo sapiens
  misc_RNA (1)...(19): siRNA sense strand
guuauuguuucccaaagaa

SEQ ID NO: 1391904 - RNA, 19 nt, Homo sapiens
  misc_RNA (1)...(19): siRNA sense strand
uacaugaaguucuaaggaa

SEQ ID NO: 1391905 - RNA, 19 nt, Homo sapiens
  misc_RNA (1)...(19): siRNA sense strand
ucugagaacugauaagaag

SEQ ID NO: 1391906 - RNA, 19 nt, Homo sapiens
  misc_RNA (1)...(19): siRNA sense strand
aauacacgcucuuuacuca

SEQ ID NO: 1391907 - RNA, 19 nt, Homo sapiens
  misc_RNA (1)...(19): siRNA sense strand
caacuuacggccaaggaaa

SEQ ID NO: 1391908 - RNA, 19 nt, Homo sapiens
  misc_RNA (1)...(19): siRNA sense strand
caaagaaauucaggaagag

SEQ ID NO: 1391909 - RNA, 19 nt, Homo sapiens
  misc_RNA (1)...(19): siRNA sense strand
ggagguaguagaaauguca

SEQ ID NO: 1391910 - RNA, 19 nt, Homo sapiens
  misc_RNA (1)...(19): siRNA sense strand
gccagugaauuucugaguu

SEQ ID NO: 1391911 - RNA, 19 nt, Homo sapiens
  misc_RNA (1)...(19): siRNA sense strand
uacaaaugcuuggagauga

SEQ ID NO: 1391912 - RNA, 19 nt, Homo sapiens
  misc_RNA (1)...(19): siRNA sense strand
ugaacuugcugugcauaaa

SEQ ID NO: 1391913 - RNA, 19 nt, Homo sapiens
  misc_RNA (1)...(19): siRNA sense strand
ccucucauuuaucagaaua

SEQ ID NO: 1391914 - RNA, 19 nt, Homo sapiens
  misc_RNA (1)...(19): siRNA sense strand
caagagguccaagcuauug

SEQ ID NO: 1391915 - RNA, 19 nt, Homo sapiens
  misc_RNA (1)...(19): siRNA sense strand
ucgggauucucauacuuua

SEQ ID NO: 1391916 - RNA, 19 nt, Homo sapiens
  misc_RNA (1)...(19): siRNA sense strand
gguuauuguuucccaaaga

SEQ ID NO: 1391917 - RNA, 19 nt, Homo sapiens
  misc_RNA (1)...(19): siRNA sense strand
gccauaccuugcucuacua

SEQ ID NO: 1391918 - RNA, 19 nt, Homo sapiens
  misc_RNA (1)...(19): siRNA sense strand
caaggaggaggaucaaguu

SEQ ID NO: 1391919 - RNA, 19 nt, Homo sapiens
  misc_RNA (1)...(19): siRNA sense strand
ugugaugcauuccaacaaa

SEQ ID NO: 1391920 - RNA, 19 nt, Homo sapiens
  misc_RNA (1)...(19): siRNA sense strand
gaggugugaugcauuccaa

SEQ ID NO: 1391921 - RNA, 19 nt, Homo sapiens
  misc_RNA (1)...(19): siRNA sense strand
aaagauguuucucuguuuc

SEQ ID NO: 1391922 - RNA, 19 nt, Homo sapiens
  misc_RNA (1)...(19): siRNA sense strand
gggauguucuggugauauc

SEQ ID NO: 1391923 - RNA, 19 nt, Homo sapiens
  misc_RNA (1)...(19): siRNA sense strand
ugacaaaacuucucuagag

SEQ ID NO: 1391924 - RNA, 19 nt, Homo sapiens
  misc_RNA (1)...(19): siRNA sense strand
caggaagaguguucuaucu

SEQ ID NO: 1391925 - RNA, 19 nt, Homo sapiens
  misc_RNA (1)...(19): siRNA sense strand
ugaacgggauacauuacuu

SEQ ID NO: 1391926 - RNA, 19 nt, Homo sapiens
  misc_RNA (1)...(19): siRNA sense strand
ggugauaucagaagugcaa

SEQ ID NO: 1391927 - RNA, 19 nt, Homo sapiens
  misc_RNA (1)...(19): siRNA sense strand
agauaauucugguugaaga

SEQ ID NO: 1391928 - RNA, 19 nt, Homo sapiens
  misc_RNA (1)...(19): siRNA sense strand
aaaggagcaugguauucaa

SEQ ID NO: 1391929 - RNA, 19 nt, Homo sapiens
  misc_RNA (1)...(19): siRNA sense strand
aauaugaacgggauacauu

SEQ ID NO: 1391930 - RNA, 19 nt, Homo sapiens
  misc_RNA (1)...(19): siRNA sense strand
cuauagaagcuaacaagaa

SEQ ID NO: 1391931 - RNA, 19 nt, Homo sapiens
  misc_RNA (1)...(19): siRNA sense strand
cgauguccucuuauauuua

SEQ ID NO: 1391932 - RNA, 19 nt, Homo sapiens
  misc_RNA (1)...(19): siRNA sense strand
auuggucgauguccucuua

SEQ ID NO: 1391933 - RNA, 19 nt, Homo sapiens
  misc_RNA (1)...(19): siRNA sense strand
gaaguucuaaggaaguaug

SEQ ID NO: 1391934 - RNA, 19 nt, Homo sapiens
  misc_RNA (1)...(19): siRNA sense strand
ccuguggcaccaacaauua

SEQ ID NO: 1391935 - RNA, 19 nt, Homo sapiens
  misc_RNA (1)...(19): siRNA sense strand
gcgacacuuuggaagauug

SEQ ID NO: 1391936 - RNA, 19 nt, Homo sapiens
  misc_RNA (1)...(19): siRNA sense strand
ggaggaggaucaaguuuuc

SEQ ID NO: 1391937 - RNA, 19 nt, Homo sapiens
  misc_RNA (1)...(19): siRNA sense strand
gggauacauuacuuguuga

SEQ ID NO: 1391938 - RNA, 19 nt, Homo sapiens
  misc_RNA (1)...(19): siRNA sense strand
uaucaaaggagcaugguau

SEQ ID NO: 1391939 - RNA, 19 nt, Homo sapiens
  misc_RNA (1)...(19): siRNA sense strand
aaucaagcuuccauauguu

SEQ ID NO: 1391940 - RNA, 19 nt, Homo sapiens
  misc_RNA (1)...(19): siRNA sense strand
caccaaaacuacauagauu

SEQ ID NO: 1391941 - RNA, 19 nt, Homo sapiens
  misc_RNA (1)...(19): siRNA sense strand
caauaaacagccuccaguu

SEQ ID NO: 1391942 - RNA, 19 nt, Homo sapiens
  misc_RNA (1)...(19): siRNA sense strand
gagcgacaaaguauaacaa

SEQ ID NO: 1391943 - RNA, 19 nt, Homo sapiens
  misc_RNA (1)...(19): siRNA sense strand
ccaaggagacauggaagaa

SEQ ID NO: 1391944 - RNA, 19 nt, Homo sapiens
  misc_RNA (1)...(19): siRNA sense strand
gaauacacgcucuuuacuc

SEQ ID NO: 1391945 - RNA, 19 nt, Homo sapiens
  misc_RNA (1)...(19): siRNA sense strand
caguggagauaauaaucaa

SEQ ID NO: 1391946 - RNA, 19 nt, Homo sapiens
  misc_RNA (1)...(19): siRNA sense strand
gcgacaaaguauaacaagu

SEQ ID NO: 1391947 - RNA, 19 nt, Homo sapiens
  misc_RNA (1)...(19): siRNA sense strand
gcaugguauucaaguacaa

SEQ ID NO: 1391948 - RNA, 19 nt, Homo sapiens
  misc_RNA (1)...(19): siRNA sense strand
ugacagggaacauggaaug

SEQ ID NO: 1391949 - RNA, 19 nt, Homo sapiens
  misc_RNA (1)...(19): siRNA sense strand
ggaauacacgcucuuuacu

SEQ ID NO: 1391950 - RNA, 19 nt, Homo sapiens
  misc_RNA (1)...(19): siRNA sense strand
ucgguugcccucucauuua

SEQ ID NO: 1391951 - RNA, 19 nt, Homo sapiens
  misc_RNA (1)...(19): siRNA sense strand
gagagccagugaauuucug

SEQ ID NO: 1391952 - RNA, 19 nt, Homo sapiens
  misc_RNA (1)...(19): siRNA sense strand
aaaaguaucgggaaaauug

SEQ ID NO: 1391953 - RNA, 19 nt, Homo sapiens
  misc_RNA (1)...(19): siRNA sense strand
gcaugaacuugcugugcau

SEQ ID NO: 1391954 - RNA, 19 nt, Homo sapiens
  misc_RNA (1)...(19): siRNA sense strand
gaaucaagcuuccauaugu

SEQ ID NO: 1391955 - RNA, 19 nt, Homo sapiens
  misc_RNA (1)...(19): siRNA sense strand
gcaaagauguuucucuguu

SEQ ID NO: 1391956 - RNA, 19 nt, Homo sapiens
  misc_RNA (1)...(19): siRNA sense strand
acacaugccuggagacuua

SEQ ID NO: 1391957 - RNA, 19 nt, Homo sapiens
  misc_RNA (1)...(19): siRNA sense strand
caacaaagcccgaggauau

SEQ ID NO: 1391958 - RNA, 19 nt, Homo sapiens
  misc_RNA (1)...(19): siRNA sense strand
ccaaagaaauucaggaaga

SEQ ID NO: 1391959 - RNA, 19 nt, Homo sapiens
  misc_RNA (1)...(19): siRNA sense strand
cuacauagauuucuucaug

SEQ ID NO: 1391960 - RNA, 19 nt, Homo sapiens
  misc_RNA (1)...(19): siRNA sense strand
ggaaauugaugauauugug

SEQ ID NO: 1391961 - RNA, 19 nt, Homo sapiens
  misc_RNA (1)...(19): siRNA sense strand
aaacucagcuauugccaua

SEQ ID NO: 1391962 - RNA, 19 nt, Homo sapiens
  misc_RNA (1)...(19): siRNA sense strand
gaagauaauucugguugaa

SEQ ID NO: 1391963 - RNA, 19 nt, Homo sapiens
  misc_RNA (1)...(19): siRNA sense strand
caaagauguuucucuguuu

SEQ ID NO: 1391964 - RNA, 19 nt, Homo sapiens
  misc_RNA (1)...(19): siRNA sense strand
guacaagaguggauuaauc

SEQ ID NO: 1391965 - RNA, 19 nt, Homo sapiens
  misc_RNA (1)...(19): siRNA sense strand
ggaagaguguucuaucuca

SEQ ID NO: 1391966 - RNA, 19 nt, Homo sapiens
  misc_RNA (1)...(19): siRNA sense strand
gaaagacaacgaccuuaaa

SEQ ID NO: 1391967 - RNA, 19 nt, Homo sapiens
  misc_RNA (1)...(19): siRNA sense strand
ggaaagacaacgaccuuaa

SEQ ID NO: 1391968 - RNA, 19 nt, Homo sapiens
  misc_RNA (1)...(19): siRNA sense strand
caaagaguuucuacuaaga

SEQ ID NO: 1391969 - RNA, 19 nt, Homo sapiens
  misc_RNA (1)...(19): siRNA sense strand
ccucagugguuucuaauaa

SEQ ID NO: 1391970 - RNA, 19 nt, Homo sapiens
  misc_RNA (1)...(19): siRNA sense strand
ccagugaauuucugaguuu

SEQ ID NO: 1391971 - RNA, 19 nt, Homo sapiens
  misc_RNA (1)...(19): siRNA sense strand
cagggaacauggaaugaua

SEQ ID NO: 1391972 - RNA, 19 nt, Homo sapiens
  misc_RNA (1)...(19): siRNA sense strand
uaagagcgacaaaguauaa

SEQ ID NO: 1391973 - RNA, 19 nt, Homo sapiens
  misc_RNA (1)...(19): siRNA sense strand
gagcaucuuuaacagaauu

SEQ ID NO: 1391974 - RNA, 19 nt, Homo sapiens
  misc_RNA (1)...(19): siRNA sense strand
ccuggagacuuauuuaauu

SEQ ID NO: 1391975 - RNA, 19 nt, Homo sapiens
  misc_RNA (1)...(19): siRNA sense strand
cgacaaaguauaacaaguu

SEQ ID NO: 1391976 - RNA, 19 nt, Homo sapiens
  misc_RNA (1)...(19): siRNA sense strand
ggagcaugguauucaagua

SEQ ID NO: 1391977 - RNA, 19 nt, Homo sapiens
  misc_RNA (1)...(19): siRNA sense strand
gaagaguguucuaucucaa

SEQ ID NO: 1391978 - RNA, 19 nt, Homo sapiens
  misc_RNA (1)...(19): siRNA sense strand
ucaaagaguuucuacuaag

SEQ ID NO: 1391979 - RNA, 19 nt, Homo sapiens
  misc_RNA (1)...(19): siRNA sense strand
gagaacugauaagaagaua

SEQ ID NO: 1391980 - RNA, 19 nt, Homo sapiens
  misc_RNA (1)...(19): siRNA sense strand
gcucuuuacucagggaaua

SEQ ID NO: 1391981 - RNA, 19 nt, Homo sapiens
  misc_RNA (1)...(19): siRNA sense strand
cgggauacauuacuuguug

SEQ ID NO: 1391982 - RNA, 19 nt, Homo sapiens
  misc_RNA (1)...(19): siRNA sense strand
ucgauguccucuuauauuu

SEQ ID NO: 1391983 - RNA, 19 nt, Homo sapiens
  misc_RNA (1)...(19): siRNA sense strand
agauuuaccuaaccaguuu

SEQ ID NO: 1391984 - RNA, 19 nt, Homo sapiens
  misc_RNA (1)...(19): siRNA sense strand
ggaaguaugugaggauugg

SEQ ID NO: 1391985 - RNA, 19 nt, Homo sapiens
  misc_RNA (1)...(19): siRNA sense strand
gauaucagaagugcaauaa

SEQ ID NO: 1391986 - RNA, 19 nt, Homo sapiens
  misc_RNA (1)...(19): siRNA sense strand
gcaccaacaauuaugauga

SEQ ID NO: 1391987 - RNA, 19 nt, Homo sapiens
  misc_RNA (1)...(19): siRNA sense strand
aaacaggguggaucuauuu

SEQ ID NO: 1391988 - RNA, 19 nt, Homo sapiens
  misc_RNA (1)...(19): siRNA sense strand
gaugaucugagaacugaua

SEQ ID NO: 1391989 - RNA, 19 nt, Homo sapiens
  misc_RNA (1)...(19): siRNA sense strand
ggguggaucuauuuuauua

SEQ ID NO: 1391990 - RNA, 19 nt, Homo sapiens
  misc_RNA (1)...(19): siRNA sense strand
uaucagaagugcaauaaac

SEQ ID NO: 1391991 - RNA, 19 nt, Homo sapiens
  misc_RNA (1)...(19): siRNA sense strand
ugugagagccagugaauuu

SEQ ID NO: 1391992 - RNA, 19 nt, Homo sapiens
  misc_RNA (1)...(19): siRNA sense strand
caaaggagcaugguauuca

SEQ ID NO: 1391993 - RNA, 19 nt, Homo sapiens
  misc_RNA (1)...(19): siRNA sense strand
ccggaaaccuggucucuuc

SEQ ID NO: 1391994 - RNA, 19 nt, Homo sapiens
  misc_RNA (1)...(19): siRNA sense strand
gaagcgacacuuuggaaga

SEQ ID NO: 1391995 - RNA, 19 nt, Homo sapiens
  misc_RNA (1)...(19): siRNA sense strand
cgagaggugugaugcauuc

SEQ ID NO: 1391996 - RNA, 19 nt, Homo sapiens
  misc_RNA (1)...(19): siRNA sense strand
cagaugcugugcugucaaa

SEQ ID NO: 1391997 - RNA, 19 nt, Homo sapiens
  misc_RNA (1)...(19): siRNA sense strand
caccaacaauuaugaugaa

SEQ ID NO: 1391998 - RNA, 19 nt, Homo sapiens
  misc_RNA (1)...(19): siRNA sense strand
gaacgggauacauuacuug

SEQ ID NO: 1391999 - RNA, 19 nt, Homo sapiens
  misc_RNA (1)...(19): siRNA sense strand
gaucugagaacugauaaga

SEQ ID NO: 1392000 - RNA, 19 nt, Homo sapiens
  misc_RNA (1)...(19): siRNA sense strand
uaacaagaauggaggaaaa

SEQ ID NO: 1392001 - RNA, 19 nt, Homo sapiens
  misc_RNA (1)...(19): siRNA sense strand
caaguacaagaguggauua

SEQ ID NO: 1392002 - RNA, 19 nt, Homo sapiens
  misc_RNA (1)...(19): siRNA sense strand
gaaaccuggucucuuccuu

SEQ ID NO: 1392003 - RNA, 19 nt, Homo sapiens
  misc_RNA (1)...(19): siRNA sense strand
guuauuguuucccaaagaa

SEQ ID NO: 1392004 - RNA, 19 nt, Homo sapiens
  misc_RNA (1)...(19): siRNA sense strand
uacaugaaguucuaaggaa

SEQ ID NO: 1392005 - RNA, 19 nt, Homo sapiens
  misc_RNA (1)...(19): siRNA sense strand
ucugagaacugauaagaag

SEQ ID NO: 1392006 - RNA, 19 nt, Homo sapiens
  misc_RNA (1)...(19): siRNA sense strand
ccuccaaacucagcuauug

SEQ ID NO: 1392007 - RNA, 19 nt, Homo sapiens
  misc_RNA (1)...(19): siRNA sense strand
aauacacgcucuuuacuca

SEQ ID NO: 1392008 - RNA, 19 nt, Homo sapiens
  misc_RNA (1)...(19): siRNA sense strand
caacuuacggccaaggaaa

SEQ ID NO: 1392009 - RNA, 19 nt, Homo sapiens
  misc_RNA (1)...(19): siRNA sense strand
caaagaaauucaggaagag

SEQ ID NO: 1392010 - RNA, 19 nt, Homo sapiens
  misc_RNA (1)...(19): siRNA sense strand
ggagguaguagaaauguca

SEQ ID NO: 1392011 - RNA, 19 nt, Homo sapiens
  misc_RNA (1)...(19): siRNA sense strand
gccagugaauuucugaguu

SEQ ID NO: 1392012 - RNA, 19 nt, Homo sapiens
  misc_RNA (1)...(19): siRNA sense strand
uacaaaugcuuggagauga

SEQ ID NO: 1392013 - RNA, 19 nt, Homo sapiens
  misc_RNA (1)...(19): siRNA sense strand
ugaacuugcugugcauaaa

SEQ ID NO: 1392014 - RNA, 19 nt, Homo sapiens
  misc_RNA (1)...(19): siRNA sense strand
ccucucauuuaucagaaua

SEQ ID NO: 1392015 - RNA, 19 nt, Homo sapiens
  misc_RNA (1)...(19): siRNA sense strand
caagagguccaagcuauug

SEQ ID NO: 1392016 - RNA, 19 nt, Homo sapiens
  misc_RNA (1)...(19): siRNA sense strand
ucgggauucucauacuuua

SEQ ID NO: 1392017 - RNA, 19 nt, Homo sapiens
  misc_RNA (1)...(19): siRNA sense strand
gguuauuguuucccaaaga

SEQ ID NO: 1392018 - RNA, 19 nt, Homo sapiens
  misc_RNA (1)...(19): siRNA sense strand
gccauaccuugcucuacua

SEQ ID NO: 1392019 - RNA, 19 nt, Homo sapiens
  misc_RNA (1)...(19): siRNA sense strand
caaggaggaggaucaaguu

SEQ ID NO: 1392020 - RNA, 19 nt, Homo sapiens
  misc_RNA (1)...(19): siRNA sense strand
ugugaugcauuccaacaaa

SEQ ID NO: 1392021 - RNA, 19 nt, Homo sapiens
  misc_RNA (1)...(19): siRNA sense strand
gaggugugaugcauuccaa

SEQ ID NO: 1392022 - RNA, 19 nt, Homo sapiens
  misc_RNA (1)...(19): siRNA sense strand
aaagauguuucucuguuuc

SEQ ID NO: 1392023 - RNA, 19 nt, Homo sapiens
  misc_RNA (1)...(19): siRNA sense strand
gggauguucuggugauauc

SEQ ID NO: 1392024 - RNA, 19 nt, Homo sapiens
  misc_RNA (1)...(19): siRNA sense strand
ugacaaaacuucucuagag

SEQ ID NO: 1392025 - RNA, 19 nt, Homo sapiens
  misc_RNA (1)...(19): siRNA sense strand
caggaagaguguucuaucu

SEQ ID NO: 1392026 - RNA, 19 nt, Homo sapiens
  misc_RNA (1)...(19): siRNA sense strand
ugaacgggauacauuacuu

SEQ ID NO: 1392027 - RNA, 19 nt, Homo sapiens
  misc_RNA (1)...(19): siRNA sense strand
ggugauaucagaagugcaa

SEQ ID NO: 1392028 - RNA, 19 nt, Homo sapiens
  misc_RNA (1)...(19): siRNA sense strand
aaaggagcaugguauucaa

SEQ ID NO: 1392029 - RNA, 19 nt, Homo sapiens
  misc_RNA (1)...(19): siRNA sense strand
aauaugaacgggauacauu

SEQ ID NO: 1392030 - RNA, 19 nt, Homo sapiens
  misc_RNA (1)...(19): siRNA sense strand
cuauagaagcuaacaagaa

SEQ ID NO: 1392031 - RNA, 19 nt, Homo sapiens
  misc_RNA (1)...(19): siRNA sense strand
cgauguccucuuauauuua

SEQ ID NO: 1392032 - RNA, 19 nt, Homo sapiens
  misc_RNA (1)...(19): siRNA sense strand
auuggucgauguccucuua

SEQ ID NO: 1392033 - RNA, 19 nt, Homo sapiens
  misc_RNA (1)...(19): siRNA sense strand
gaaguucuaaggaaguaug

SEQ ID NO: 1392034 - RNA, 19 nt, Homo sapiens
  misc_RNA (1)...(19): siRNA sense strand
agauaauucugguugaaga

SEQ ID NO: 1392035 - RNA, 19 nt, Homo sapiens
  misc_RNA (1)...(19): siRNA sense strand
ccuguggcaccaacaauua

SEQ ID NO: 1392036 - RNA, 19 nt, Homo sapiens
  misc_RNA (1)...(19): siRNA sense strand
gcgacacuuuggaagauug

SEQ ID NO: 1392037 - RNA, 19 nt, Homo sapiens
  misc_RNA (1)...(19): siRNA sense strand
ggaggaggaucaaguuuuc

SEQ ID NO: 1392038 - RNA, 19 nt, Homo sapiens
  misc_RNA (1)...(19): siRNA sense strand
gggauacauuacuuguuga

SEQ ID NO: 1392039 - RNA, 19 nt, Homo sapiens
  misc_RNA (1)...(19): siRNA sense strand
uaucaaaggagcaugguau

SEQ ID NO: 1392040 - RNA, 19 nt, Homo sapiens
  misc_RNA (1)...(19): siRNA sense strand
aaucaagcuuccauauguu

SEQ ID NO: 1392041 - RNA, 19 nt, Homo sapiens
  misc_RNA (1)...(19): siRNA sense strand
caccaaaacuacauagauu

SEQ ID NO: 1392042 - RNA, 19 nt, Homo sapiens
  misc_RNA (1)...(19): siRNA sense strand
caauaaacagccuccaguu

SEQ ID NO: 1392043 - RNA, 19 nt, Homo sapiens
  misc_RNA (1)...(19): siRNA sense strand
gagcgacaaaguauaacaa

SEQ ID NO: 1392044 - RNA, 19 nt, Homo sapiens
  misc_RNA (1)...(19): siRNA sense strand
ccaaggagacauggaagaa

SEQ ID NO: 1392045 - RNA, 19 nt, Homo sapiens
  misc_RNA (1)...(19): siRNA sense strand
gaauacacgcucuuuacuc

SEQ ID NO: 1392046 - RNA, 19 nt, Homo sapiens
  misc_RNA (1)...(19): siRNA sense strand
caguggagauaauaaucaa

SEQ ID NO: 1392047 - RNA, 19 nt, Homo sapiens
  misc_RNA (1)...(19): siRNA sense strand
gcgacaaaguauaacaagu

SEQ ID NO: 1392048 - RNA, 19 nt, Homo sapiens
  misc_RNA (1)...(19): siRNA sense strand
gcaugguauucaaguacaa

SEQ ID NO: 1392049 - RNA, 19 nt, Homo sapiens
  misc_RNA (1)...(19): siRNA sense strand
ugacagggaacauggaaug

SEQ ID NO: 1392050 - RNA, 19 nt, Homo sapiens
  misc_RNA (1)...(19): siRNA sense strand
ggaauacacgcucuuuacu

SEQ ID NO: 1392051 - RNA, 19 nt, Homo sapiens
  misc_RNA (1)...(19): siRNA sense strand
ucgguugcccucucauuua

SEQ ID NO: 1392052 - RNA, 19 nt, Homo sapiens
  misc_RNA (1)...(19): siRNA sense strand
gagagccagugaauuucug

SEQ ID NO: 1392053 - RNA, 19 nt, Homo sapiens
  misc_RNA (1)...(19): siRNA sense strand
aaaaguaucgggaaaauug

SEQ ID NO: 1392054 - RNA, 19 nt, Homo sapiens
  misc_RNA (1)...(19): siRNA sense strand
gaaucaagcuuccauaugu

SEQ ID NO: 1392055 - RNA, 19 nt, Homo sapiens
  misc_RNA (1)...(19): siRNA sense strand
gcaaagauguuucucuguu

SEQ ID NO: 1392056 - RNA, 19 nt, Homo sapiens
  misc_RNA (1)...(19): siRNA sense strand
acacaugccuggagacuua

SEQ ID NO: 1392057 - RNA, 19 nt, Homo sapiens
  misc_RNA (1)...(19): siRNA sense strand
caacaaagcccgaggauau

SEQ ID NO: 1392058 - RNA, 19 nt, Homo sapiens
  misc_RNA (1)...(19): siRNA sense strand
ccaaagaaauucaggaaga

SEQ ID NO: 1392059 - RNA, 19 nt, Homo sapiens
  misc_RNA (1)...(19): siRNA sense strand
cuacauagauuucuucaug

SEQ ID NO: 1392060 - RNA, 19 nt, Homo sapiens
  misc_RNA (1)...(19): siRNA sense strand
ggaaauugaugauauugug

SEQ ID NO: 1392061 - RNA, 19 nt, Homo sapiens
  misc_RNA (1)...(19): siRNA sense strand
aaacucagcuauugccaua

SEQ ID NO: 1392062 - RNA, 19 nt, Homo sapiens
  misc_RNA (1)...(19): siRNA sense strand
gaagauaauucugguugaa

SEQ ID NO: 1392063 - RNA, 19 nt, Homo sapiens
  misc_RNA (1)...(19): siRNA sense strand
caaagauguuucucuguuu

SEQ ID NO: 1392064 - RNA, 19 nt, Homo sapiens
  misc_RNA (1)...(19): siRNA sense strand
guacaagaguggauuaauc

SEQ ID NO: 1392065 - RNA, 19 nt, Homo sapiens
  misc_RNA (1)...(19): siRNA sense strand
ggaagaguguucuaucuca

SEQ ID NO: 1392066 - RNA, 19 nt, Homo sapiens
  misc_RNA (1)...(19): siRNA sense strand
gaaagacaacgaccuuaaa

SEQ ID NO: 1392067 - RNA, 19 nt, Homo sapiens
  misc_RNA (1)...(19): siRNA sense strand
ggaaagacaacgaccuuaa

SEQ ID NO: 1392068 - RNA, 19 nt, Homo sapiens
  misc_RNA (1)...(19): siRNA sense strand
caaagaguuucuacuaaga

SEQ ID NO: 1392069 - RNA, 19 nt, Homo sapiens
  misc_RNA (1)...(19): siRNA sense strand
ccucagugguuucuaauaa

SEQ ID NO: 1392070 - RNA, 19 nt, Homo sapiens
  misc_RNA (1)...(19): siRNA sense strand
ccagugaauuucugaguuu

SEQ ID NO: 1392071 - RNA, 19 nt, Homo sapiens
  misc_RNA (1)...(19): siRNA sense strand
cagggaacauggaaugaua

SEQ ID NO: 1392072 - RNA, 19 nt, Homo sapiens
  misc_RNA (1)...(19): siRNA sense strand
uaagagcgacaaaguauaa

SEQ ID NO: 1392073 - RNA, 19 nt, Homo sapiens
  misc_RNA (1)...(19): siRNA sense strand
gagcaucuuuaacagaauu

SEQ ID NO: 1392074 - RNA, 19 nt, Homo sapiens
  misc_RNA (1)...(19): siRNA sense strand
ccuggagacuuauuuaauu

SEQ ID NO: 1392075 - RNA, 19 nt, Homo sapiens
  misc_RNA (1)...(19): siRNA sense strand
cgacaaaguauaacaaguu

SEQ ID NO: 1392076 - RNA, 19 nt, Homo sapiens
  misc_RNA (1)...(19): siRNA sense strand
ggagcaugguauucaagua

SEQ ID NO: 1392077 - RNA, 19 nt, Homo sapiens
  misc_RNA (1)...(19): siRNA sense strand
gaagaguguucuaucucaa

SEQ ID NO: 1392078 - RNA, 19 nt, Homo sapiens
  misc_RNA (1)...(19): siRNA sense strand
ucaaagaguuucuacuaag

SEQ ID NO: 1392079 - RNA, 19 nt, Homo sapiens
  misc_RNA (1)...(19): siRNA sense strand
gagaacugauaagaagaua

SEQ ID NO: 1392080 - RNA, 19 nt, Homo sapiens
  misc_RNA (1)...(19): siRNA sense strand
gcucuuuacucagggaaua

SEQ ID NO: 1392081 - RNA, 19 nt, Homo sapiens
  misc_RNA (1)...(19): siRNA sense strand
cgggauacauuacuuguug

SEQ ID NO: 1392082 - RNA, 19 nt, Homo sapiens
  misc_RNA (1)...(19): siRNA sense strand
ucgauguccucuuauauuu

SEQ ID NO: 1392083 - RNA, 19 nt, Homo sapiens
  misc_RNA (1)...(19): siRNA sense strand
agauuuaccuaaccaguuu

SEQ ID NO: 1392084 - RNA, 19 nt, Homo sapiens
  misc_RNA (1)...(19): siRNA sense strand
ggaaguaugugaggauugg

SEQ ID NO: 1392085 - RNA, 19 nt, Homo sapiens
  misc_RNA (1)...(19): siRNA sense strand
gauaucagaagugcaauaa

SEQ ID NO: 1392086 - RNA, 19 nt, Homo sapiens
  misc_RNA (1)...(19): siRNA sense strand
gcaccaacaauuaugauga

SEQ ID NO: 1392087 - RNA, 19 nt, Homo sapiens
  misc_RNA (1)...(19): siRNA sense strand
aaacaggguggaucuauuu

SEQ ID NO: 1392088 - RNA, 19 nt, Homo sapiens
  misc_RNA (1)...(19): siRNA sense strand
gaugaucugagaacugaua

SEQ ID NO: 1392089 - RNA, 19 nt, Homo sapiens
  misc_RNA (1)...(19): siRNA sense strand
ggguggaucuauuuuauua

SEQ ID NO: 1392090 - RNA, 19 nt, Homo sapiens
  misc_RNA (1)...(19): siRNA sense strand
uaucagaagugcaauaaac

SEQ ID NO: 1392091 - RNA, 19 nt, Homo sapiens
  misc_RNA (1)...(19): siRNA sense strand
ugugagagccagugaauuu

SEQ ID NO: 1392092 - RNA, 19 nt, Homo sapiens
  misc_RNA (1)...(19): siRNA sense strand
caaaggagcaugguauuca

SEQ ID NO: 1392093 - RNA, 19 nt, Homo sapiens
  misc_RNA (1)...(19): siRNA sense strand
ccggaaaccuggucucuuc

SEQ ID NO: 1392094 - RNA, 19 nt, Homo sapiens
  misc_RNA (1)...(19): siRNA sense strand
gaagcgacacuuuggaaga

SEQ ID NO: 1392095 - RNA, 19 nt, Homo sapiens
  misc_RNA (1)...(19): siRNA sense strand
cgagaggugugaugcauuc

SEQ ID NO: 1392096 - RNA, 19 nt, Homo sapiens
  misc_RNA (1)...(19): siRNA sense strand
cagaugcugugcugucaaa

SEQ ID NO: 1392097 - RNA, 19 nt, Homo sapiens
  misc_RNA (1)...(19): siRNA sense strand
caccaacaauuaugaugaa

SEQ ID NO: 1392098 - RNA, 19 nt, Homo sapiens
  misc_RNA (1)...(19): siRNA sense strand
gaacgggauacauuacuug

SEQ ID NO: 1392099 - RNA, 19 nt, Homo sapiens
  misc_RNA (1)...(19): siRNA sense strand
gaucugagaacugauaaga

SEQ ID NO: 1392100 - RNA, 19 nt, Homo sapiens
  misc_RNA (1)...(19): siRNA sense strand
uaacaagaauggaggaaaa

SEQ ID NO: 1392101 - RNA, 19 nt, Homo sapiens
  misc_RNA (1)...(19): siRNA sense strand
caaguacaagaguggauua

SEQ ID NO: 1392102 - RNA, 19 nt, Homo sapiens
  misc_RNA (1)...(19): siRNA sense strand
gaaaccuggucucuuccuu

SEQ ID NO: 1392103 - RNA, 19 nt, Homo sapiens
  misc_RNA (1)...(19): siRNA sense strand
guuauuguuucccaaagaa

SEQ ID NO: 1392104 - RNA, 19 nt, Homo sapiens
  misc_RNA (1)...(19): siRNA sense strand
uacaugaaguucuaaggaa

SEQ ID NO: 1392105 - RNA, 19 nt, Homo sapiens
  misc_RNA (1)...(19): siRNA sense strand
ucugagaacugauaagaag

SEQ ID NO: 1392106 - RNA, 19 nt, Homo sapiens
  misc_RNA (1)...(19): siRNA sense strand
aauacacgcucuuuacuca

SEQ ID NO: 1392107 - RNA, 19 nt, Homo sapiens
  misc_RNA (1)...(19): siRNA sense strand
caacuuacggccaaggaaa

SEQ ID NO: 1392108 - RNA, 19 nt, Homo sapiens
  misc_RNA (1)...(19): siRNA sense strand
caaagaaauucaggaagag

SEQ ID NO: 1392109 - RNA, 19 nt, Homo sapiens
  misc_RNA (1)...(19): siRNA sense strand
ggagguaguagaaauguca

SEQ ID NO: 1392110 - RNA, 19 nt, Homo sapiens
  misc_RNA (1)...(19): siRNA sense strand
gccagugaauuucugaguu

SEQ ID NO: 1392111 - RNA, 19 nt, Homo sapiens
  misc_RNA (1)...(19): siRNA sense strand
uacaaaugcuuggagauga

SEQ ID NO: 1392112 - RNA, 19 nt, Homo sapiens
  misc_RNA (1)...(19): siRNA sense strand
ugaacuugcugugcauaaa

SEQ ID NO: 1392113 - RNA, 19 nt, Homo sapiens
  misc_RNA (1)...(19): siRNA sense strand
ccucucauuuaucagaaua

SEQ ID NO: 1392114 - RNA, 19 nt, Homo sapiens
  misc_RNA (1)...(19): siRNA sense strand
caagagguccaagcuauug

SEQ ID NO: 1392115 - RNA, 19 nt, Homo sapiens
  misc_RNA (1)...(19): siRNA sense strand
ucgggauucucauacuuua

SEQ ID NO: 1392116 - RNA, 19 nt, Homo sapiens
  misc_RNA (1)...(19): siRNA sense strand
gguuauuguuucccaaaga

SEQ ID NO: 1392117 - RNA, 19 nt, Homo sapiens
  misc_RNA (1)...(19): siRNA sense strand
gccauaccuugcucuacua

SEQ ID NO: 1392118 - RNA, 19 nt, Homo sapiens
  misc_RNA (1)...(19): siRNA sense strand
caaggaggaggaucaaguu

SEQ ID NO: 1392119 - RNA, 19 nt, Homo sapiens
  misc_RNA (1)...(19): siRNA sense strand
ugugaugcauuccaacaaa

SEQ ID NO: 1392120 - RNA, 19 nt, Homo sapiens
  misc_RNA (1)...(19): siRNA sense strand
gaggugugaugcauuccaa

SEQ ID NO: 1392121 - RNA, 19 nt, Homo sapiens
  misc_RNA (1)...(19): siRNA sense strand
aaagauguuucucuguuuc

SEQ ID NO: 1392122 - RNA, 19 nt, Homo sapiens
  misc_RNA (1)...(19): siRNA sense strand
gggauguucuggugauauc

SEQ ID NO: 1392123 - RNA, 19 nt, Homo sapiens
  misc_RNA (1)...(19): siRNA sense strand
ugacaaaacuucucuagag

SEQ ID NO: 1392124 - RNA, 19 nt, Homo sapiens
  misc_RNA (1)...(19): siRNA sense strand
caggaagaguguucuaucu

SEQ ID NO: 1392125 - RNA, 19 nt, Homo sapiens
  misc_RNA (1)...(19): siRNA sense strand
ugaacgggauacauuacuu

SEQ ID NO: 1392126 - RNA, 19 nt, Homo sapiens
  misc_RNA (1)...(19): siRNA sense strand
ggugauaucagaagugcaa

SEQ ID NO: 1392127 - RNA, 19 nt, Homo sapiens
  misc_RNA (1)...(19): siRNA sense strand
agauaauucugguugaaga

SEQ ID NO: 1392128 - RNA, 19 nt, Homo sapiens
  misc_RNA (1)...(19): siRNA sense strand
aaaggagcaugguauucaa

SEQ ID NO: 1392129 - RNA, 19 nt, Homo sapiens
  misc_RNA (1)...(19): siRNA sense strand
aauaugaacgggauacauu

SEQ ID NO: 1392130 - RNA, 19 nt, Homo sapiens
  misc_RNA (1)...(19): siRNA sense strand
cuauagaagcuaacaagaa

SEQ ID NO: 1392131 - RNA, 19 nt, Homo sapiens
  misc_RNA (1)...(19): siRNA sense strand
cgauguccucuuauauuua

SEQ ID NO: 1392132 - RNA, 19 nt, Homo sapiens
  misc_RNA (1)...(19): siRNA sense strand
auuggucgauguccucuua

SEQ ID NO: 1392133 - RNA, 19 nt, Homo sapiens
  misc_RNA (1)...(19): siRNA sense strand
gaaguucuaaggaaguaug

SEQ ID NO: 1392134 - RNA, 19 nt, Homo sapiens
  misc_RNA (1)...(19): siRNA sense strand
ccuguggcaccaacaauua

SEQ ID NO: 1392135 - RNA, 19 nt, Homo sapiens
  misc_RNA (1)...(19): siRNA sense strand
gcgacacuuuggaagauug

SEQ ID NO: 1392136 - RNA, 19 nt, Homo sapiens
  misc_RNA (1)...(19): siRNA sense strand
ggaggaggaucaaguuuuc

SEQ ID NO: 1392137 - RNA, 19 nt, Homo sapiens
  misc_RNA (1)...(19): siRNA sense strand
gggauacauuacuuguuga

SEQ ID NO: 1392138 - RNA, 19 nt, Homo sapiens
  misc_RNA (1)...(19): siRNA sense strand
uaucaaaggagcaugguau

SEQ ID NO: 1392139 - RNA, 19 nt, Homo sapiens
  misc_RNA (1)...(19): siRNA sense strand
aaucaagcuuccauauguu

SEQ ID NO: 1392140 - RNA, 19 nt, Homo sapiens
  misc_RNA (1)...(19): siRNA sense strand
caccaaaacuacauagauu

SEQ ID NO: 1392141 - RNA, 19 nt, Homo sapiens
  misc_RNA (1)...(19): siRNA sense strand
caauaaacagccuccaguu

SEQ ID NO: 1392142 - RNA, 19 nt, Homo sapiens
  misc_RNA (1)...(19): siRNA sense strand
gagcgacaaaguauaacaa

SEQ ID NO: 1392143 - RNA, 19 nt, Homo sapiens
  misc_RNA (1)...(19): siRNA sense strand
ccaaggagacauggaagaa

SEQ ID NO: 1392144 - RNA, 19 nt, Homo sapiens
  misc_RNA (1)...(19): siRNA sense strand
gaauacacgcucuuuacuc

SEQ ID NO: 1392145 - RNA, 19 nt, Homo sapiens
  misc_RNA (1)...(19): siRNA sense strand
caguggagauaauaaucaa

SEQ ID NO: 1392146 - RNA, 19 nt, Homo sapiens
  misc_RNA (1)...(19): siRNA sense strand
gcgacaaaguauaacaagu

SEQ ID NO: 1392147 - RNA, 19 nt, Homo sapiens
  misc_RNA (1)...(19): siRNA sense strand
gcaugguauucaaguacaa

SEQ ID NO: 1392148 - RNA, 19 nt, Homo sapiens
  misc_RNA (1)...(19): siRNA sense strand
ugacagggaacauggaaug

SEQ ID NO: 1392149 - RNA, 19 nt, Homo sapiens
  misc_RNA (1)...(19): siRNA sense strand
ggaauacacgcucuuuacu

SEQ ID NO: 1392150 - RNA, 19 nt, Homo sapiens
  misc_RNA (1)...(19): siRNA sense strand
ucgguugcccucucauuua

SEQ ID NO: 1392151 - RNA, 19 nt, Homo sapiens
  misc_RNA (1)...(19): siRNA sense strand
gagagccagugaauuucug

SEQ ID NO: 1392152 - RNA, 19 nt, Homo sapiens
  misc_RNA (1)...(19): siRNA sense strand
aaaaguaucgggaaaauug

SEQ ID NO: 1392153 - RNA, 19 nt, Homo sapiens
  misc_RNA (1)...(19): siRNA sense strand
gcaugaacuugcugugcau

SEQ ID NO: 1392154 - RNA, 19 nt, Homo sapiens
  misc_RNA (1)...(19): siRNA sense strand
gaaucaagcuuccauaugu

SEQ ID NO: 1392155 - RNA, 19 nt, Homo sapiens
  misc_RNA (1)...(19): siRNA sense strand
gcaaagauguuucucuguu

SEQ ID NO: 1392156 - RNA, 19 nt, Homo sapiens
  misc_RNA (1)...(19): siRNA sense strand
acacaugccuggagacuua

SEQ ID NO: 1392157 - RNA, 19 nt, Homo sapiens
  misc_RNA (1)...(19): siRNA sense strand
caacaaagcccgaggauau

SEQ ID NO: 1392158 - RNA, 19 nt, Homo sapiens
  misc_RNA (1)...(19): siRNA sense strand
ccaaagaaauucaggaaga

SEQ ID NO: 1392159 - RNA, 19 nt, Homo sapiens
  misc_RNA (1)...(19): siRNA sense strand
cuacauagauuucuucaug

SEQ ID NO: 1392160 - RNA, 19 nt, Homo sapiens
  misc_RNA (1)...(19): siRNA sense strand
ggaaauugaugauauugug

SEQ ID NO: 1392161 - RNA, 19 nt, Homo sapiens
  misc_RNA (1)...(19): siRNA sense strand
aaacucagcuauugccaua

SEQ ID NO: 1392162 - RNA, 19 nt, Homo sapiens
  misc_RNA (1)...(19): siRNA sense strand
gaagauaauucugguugaa

SEQ ID NO: 1392163 - RNA, 19 nt, Homo sapiens
  misc_RNA (1)...(19): siRNA sense strand
caaagauguuucucuguuu

SEQ ID NO: 1392164 - RNA, 19 nt, Homo sapiens
  misc_RNA (1)...(19): siRNA sense strand
guacaagaguggauuaauc

SEQ ID NO: 1392165 - RNA, 19 nt, Homo sapiens
  misc_RNA (1)...(19): siRNA sense strand
ggaagaguguucuaucuca

SEQ ID NO: 1392166 - RNA, 19 nt, Homo sapiens
  misc_RNA (1)...(19): siRNA sense strand
gaaagacaacgaccuuaaa

SEQ ID NO: 1392167 - RNA, 19 nt, Homo sapiens
  misc_RNA (1)...(19): siRNA sense strand
ggaaagacaacgaccuuaa

SEQ ID NO: 1392168 - RNA, 19 nt, Homo sapiens
  misc_RNA (1)...(19): siRNA sense strand
caaagaguuucuacuaaga

SEQ ID NO: 1392169 - RNA, 19 nt, Homo sapiens
  misc_RNA (1)...(19): siRNA sense strand
ccucagugguuucuaauaa

SEQ ID NO: 1392170 - RNA, 19 nt, Homo sapiens
  misc_RNA (1)...(19): siRNA sense strand
ccagugaauuucugaguuu

SEQ ID NO: 1392171 - RNA, 19 nt, Homo sapiens
  misc_RNA (1)...(19): siRNA sense strand
cagggaacauggaaugaua

SEQ ID NO: 1392172 - RNA, 19 nt, Homo sapiens
  misc_RNA (1)...(19): siRNA sense strand
uaagagcgacaaaguauaa

SEQ ID NO: 1392173 - RNA, 19 nt, Homo sapiens
  misc_RNA (1)...(19): siRNA sense strand
gagcaucuuuaacagaauu

SEQ ID NO: 1392174 - RNA, 19 nt, Homo sapiens
  misc_RNA (1)...(19): siRNA sense strand
ccuggagacuuauuuaauu

SEQ ID NO: 1392175 - RNA, 19 nt, Homo sapiens
  misc_RNA (1)...(19): siRNA sense strand
cgacaaaguauaacaaguu

SEQ ID NO: 1392176 - RNA, 19 nt, Homo sapiens
  misc_RNA (1)...(19): siRNA sense strand
ggagcaugguauucaagua

SEQ ID NO: 1392177 - RNA, 19 nt, Homo sapiens
  misc_RNA (1)...(19): siRNA sense strand
gaagaguguucuaucucaa

SEQ ID NO: 1392178 - RNA, 19 nt, Homo sapiens
  misc_RNA (1)...(19): siRNA sense strand
ucaaagaguuucuacuaag

SEQ ID NO: 1392179 - RNA, 19 nt, Homo sapiens
  misc_RNA (1)...(19): siRNA sense strand
gagaacugauaagaagaua

SEQ ID NO: 1392180 - RNA, 19 nt, Homo sapiens
  misc_RNA (1)...(19): siRNA sense strand
gcucuuuacucagggaaua

SEQ ID NO: 1392181 - RNA, 19 nt, Homo sapiens
  misc_RNA (1)...(19): siRNA sense strand
cgggauacauuacuuguug

SEQ ID NO: 1392182 - RNA, 19 nt, Homo sapiens
  misc_RNA (1)...(19): siRNA sense strand
ucgauguccucuuauauuu

SEQ ID NO: 1392183 - RNA, 19 nt, Homo sapiens
  misc_RNA (1)...(19): siRNA sense strand
agauuuaccuaaccaguuu

SEQ ID NO: 1392184 - RNA, 19 nt, Homo sapiens
  misc_RNA (1)...(19): siRNA sense strand
ggaaguaugugaggauugg

SEQ ID NO: 1392185 - RNA, 19 nt, Homo sapiens
  misc_RNA (1)...(19): siRNA sense strand
gauaucagaagugcaauaa

SEQ ID NO: 1392186 - RNA, 19 nt, Homo sapiens
  misc_RNA (1)...(19): siRNA sense strand
gcaccaacaauuaugauga

SEQ ID NO: 1392187 - RNA, 19 nt, Homo sapiens
  misc_RNA (1)...(19): siRNA sense strand
aaacaggguggaucuauuu

SEQ ID NO: 1392188 - RNA, 19 nt, Homo sapiens
  misc_RNA (1)...(19): siRNA sense strand
gaugaucugagaacugaua

SEQ ID NO: 1392189 - RNA, 19 nt, Homo sapiens
  misc_RNA (1)...(19): siRNA sense strand
ggguggaucuauuuuauua

SEQ ID NO: 1392190 - RNA, 19 nt, Homo sapiens
  misc_RNA (1)...(19): siRNA sense strand
uaucagaagugcaauaaac

SEQ ID NO: 1392191 - RNA, 19 nt, Homo sapiens
  misc_RNA (1)...(19): siRNA sense strand
ugugagagccagugaauuu

SEQ ID NO: 1392192 - RNA, 19 nt, Homo sapiens
  misc_RNA (1)...(19): siRNA sense strand
caaaggagcaugguauuca

SEQ ID NO: 1392193 - RNA, 19 nt, Homo sapiens
  misc_RNA (1)...(19): siRNA sense strand
ccggaaaccuggucucuuc

SEQ ID NO: 1392194 - RNA, 19 nt, Homo sapiens
  misc_RNA (1)...(19): siRNA sense strand
gaagcgacacuuuggaaga

SEQ ID NO: 1392195 - RNA, 19 nt, Homo sapiens
  misc_RNA (1)...(19): siRNA sense strand
cgagaggugugaugcauuc

SEQ ID NO: 1392196 - RNA, 19 nt, Homo sapiens
  misc_RNA (1)...(19): siRNA sense strand
cagaugcugugcugucaaa

SEQ ID NO: 1392197 - RNA, 19 nt, Homo sapiens
  misc_RNA (1)...(19): siRNA sense strand
caccaacaauuaugaugaa

SEQ ID NO: 1392198 - RNA, 19 nt, Homo sapiens
  misc_RNA (1)...(19): siRNA sense strand
gaacgggauacauuacuug

SEQ ID NO: 1392199 - RNA, 19 nt, Homo sapiens
  misc_RNA (1)...(19): siRNA sense strand
gaucugagaacugauaaga

SEQ ID NO: 1392200 - RNA, 19 nt, Homo sapiens
  misc_RNA (1)...(19): siRNA sense strand
uaacaagaauggaggaaaa

SEQ ID NO: 1392201 - RNA, 19 nt, Homo sapiens
  misc_RNA (1)...(19): siRNA sense strand
caaguacaagaguggauua

SEQ ID NO: 1392202 - RNA, 19 nt, Homo sapiens
  misc_RNA (1)...(19): siRNA sense strand
gaaaccuggucucuuccuu

SEQ ID NO: 1392203 - RNA, 19 nt, Homo sapiens
  misc_RNA (1)...(19): siRNA sense strand
guuauuguuucccaaagaa

SEQ ID NO: 1392204 - RNA, 19 nt, Homo sapiens
  misc_RNA (1)...(19): siRNA sense strand
uacaugaaguucuaaggaa

SEQ ID NO: 1392205 - RNA, 19 nt, Homo sapiens
  misc_RNA (1)...(19): siRNA sense strand
ucugagaacugauaagaag

SEQ ID NO: 1392206 - RNA, 19 nt, Homo sapiens
  misc_RNA (1)...(19): siRNA sense strand
aauacacgcucuuuacuca

SEQ ID NO: 1392207 - RNA, 19 nt, Homo sapiens
  misc_RNA (1)...(19): siRNA sense strand
caacuuacggccaaggaaa

SEQ ID NO: 1392208 - RNA, 19 nt, Homo sapiens
  misc_RNA (1)...(19): siRNA sense strand
caaagaaauucaggaagag

SEQ ID NO: 1392209 - RNA, 19 nt, Homo sapiens
  misc_RNA (1)...(19): siRNA sense strand
ggagguaguagaaauguca

SEQ ID NO: 1392210 - RNA, 19 nt, Homo sapiens
  misc_RNA (1)...(19): siRNA sense strand
gccagugaauuucugaguu

SEQ ID NO: 1392211 - RNA, 19 nt, Homo sapiens
  misc_RNA (1)...(19): siRNA sense strand
uacaaaugcuuggagauga

SEQ ID NO: 1392212 - RNA, 19 nt, Homo sapiens
  misc_RNA (1)...(19): siRNA sense strand
ugaacuugcugugcauaaa

SEQ ID NO: 1392213 - RNA, 19 nt, Homo sapiens
  misc_RNA (1)...(19): siRNA sense strand
ccucucauuuaucagaaua

SEQ ID NO: 1392214 - RNA, 19 nt, Homo sapiens
  misc_RNA (1)...(19): siRNA sense strand
caagagguccaagcuauug

SEQ ID NO: 1392215 - RNA, 19 nt, Homo sapiens
  misc_RNA (1)...(19): siRNA sense strand
ucgggauucucauacuuua

SEQ ID NO: 1392216 - RNA, 19 nt, Homo sapiens
  misc_RNA (1)...(19): siRNA sense strand
gguuauuguuucccaaaga

SEQ ID NO: 1392217 - RNA, 19 nt, Homo sapiens
  misc_RNA (1)...(19): siRNA sense strand
gccauaccuugcucuacua

SEQ ID NO: 1392218 - RNA, 19 nt, Homo sapiens
  misc_RNA (1)...(19): siRNA sense strand
caaggaggaggaucaaguu

SEQ ID NO: 1392219 - RNA, 19 nt, Homo sapiens
  misc_RNA (1)...(19): siRNA sense strand
ugugaugcauuccaacaaa

SEQ ID NO: 1392220 - RNA, 19 nt, Homo sapiens
  misc_RNA (1)...(19): siRNA sense strand
gaggugugaugcauuccaa

SEQ ID NO: 1392221 - RNA, 19 nt, Homo sapiens
  misc_RNA (1)...(19): siRNA sense strand
aaagauguuucucuguuuc

SEQ ID NO: 1392222 - RNA, 19 nt, Homo sapiens
  misc_RNA (1)...(19): siRNA sense strand
gggauguucuggugauauc

SEQ ID NO: 1392223 - RNA, 19 nt, Homo sapiens
  misc_RNA (1)...(19): siRNA sense strand
ugacaaaacuucucuagag

SEQ ID NO: 1392224 - RNA, 19 nt, Homo sapiens
  misc_RNA (1)...(19): siRNA sense strand
caggaagaguguucuaucu

SEQ ID NO: 1392225 - RNA, 19 nt, Homo sapiens
  misc_RNA (1)...(19): siRNA sense strand
ugaacgggauacauuacuu

SEQ ID NO: 1392226 - RNA, 19 nt, Homo sapiens
  misc_RNA (1)...(19): siRNA sense strand
ggugauaucagaagugcaa

SEQ ID NO: 1392227 - RNA, 19 nt, Homo sapiens
  misc_RNA (1)...(19): siRNA sense strand
agauaauucugguugaaga

SEQ ID NO: 1392228 - RNA, 19 nt, Homo sapiens
  misc_RNA (1)...(19): siRNA sense strand
aaaggagcaugguauucaa

SEQ ID NO: 1392229 - RNA, 19 nt, Homo sapiens
  misc_RNA (1)...(19): siRNA sense strand
aauaugaacgggauacauu

SEQ ID NO: 1392230 - RNA, 19 nt, Homo sapiens
  misc_RNA (1)...(19): siRNA sense strand
cuauagaagcuaacaagaa

SEQ ID NO: 1392231 - RNA, 19 nt, Homo sapiens
  misc_RNA (1)...(19): siRNA sense strand
cgauguccucuuauauuua

SEQ ID NO: 1392232 - RNA, 19 nt, Homo sapiens
  misc_RNA (1)...(19): siRNA sense strand
auuggucgauguccucuua

SEQ ID NO: 1392233 - RNA, 19 nt, Homo sapiens
  misc_RNA (1)...(19): siRNA sense strand
gaaguucuaaggaaguaug

SEQ ID NO: 1392234 - RNA, 19 nt, Homo sapiens
  misc_RNA (1)...(19): siRNA sense strand
ccuguggcaccaacaauua

SEQ ID NO: 1392235 - RNA, 19 nt, Homo sapiens
  misc_RNA (1)...(19): siRNA sense strand
gcgacacuuuggaagauug

SEQ ID NO: 1392236 - RNA, 19 nt, Homo sapiens
  misc_RNA (1)...(19): siRNA sense strand
ggaggaggaucaaguuuuc

SEQ ID NO: 1392237 - RNA, 19 nt, Homo sapiens
  misc_RNA (1)...(19): siRNA sense strand
gggauacauuacuuguuga

SEQ ID NO: 1392238 - RNA, 19 nt, Homo sapiens
  misc_RNA (1)...(19): siRNA sense strand
uaucaaaggagcaugguau

SEQ ID NO: 1392239 - RNA, 19 nt, Homo sapiens
  misc_RNA (1)...(19): siRNA sense strand
aaucaagcuuccauauguu

SEQ ID NO: 1392240 - RNA, 19 nt, Homo sapiens
  misc_RNA (1)...(19): siRNA sense strand
caccaaaacuacauagauu

SEQ ID NO: 1392241 - RNA, 19 nt, Homo sapiens
  misc_RNA (1)...(19): siRNA sense strand
caauaaacagccuccaguu

SEQ ID NO: 1392242 - RNA, 19 nt, Homo sapiens
  misc_RNA (1)...(19): siRNA sense strand
gagcgacaaaguauaacaa

SEQ ID NO: 1392243 - RNA, 19 nt, Homo sapiens
  misc_RNA (1)...(19): siRNA sense strand
ccaaggagacauggaagaa

SEQ ID NO: 1392244 - RNA, 19 nt, Homo sapiens
  misc_RNA (1)...(19): siRNA sense strand
gaauacacgcucuuuacuc

SEQ ID NO: 1392245 - RNA, 19 nt, Homo sapiens
  misc_RNA (1)...(19): siRNA sense strand
caguggagauaauaaucaa

SEQ ID NO: 1392246 - RNA, 19 nt, Homo sapiens
  misc_RNA (1)...(19): siRNA sense strand
gcgacaaaguauaacaagu

SEQ ID NO: 1392247 - RNA, 19 nt, Homo sapiens
  misc_RNA (1)...(19): siRNA sense strand
gcaugguauucaaguacaa

SEQ ID NO: 1392248 - RNA, 19 nt, Homo sapiens
  misc_RNA (1)...(19): siRNA sense strand
ugacagggaacauggaaug

SEQ ID NO: 1392249 - RNA, 19 nt, Homo sapiens
  misc_RNA (1)...(19): siRNA sense strand
ggaauacacgcucuuuacu

SEQ ID NO: 1392250 - RNA, 19 nt, Homo sapiens
  misc_RNA (1)...(19): siRNA sense strand
ucgguugcccucucauuua

SEQ ID NO: 1392251 - RNA, 19 nt, Homo sapiens
  misc_RNA (1)...(19): siRNA sense strand
gagagccagugaauuucug

SEQ ID NO: 1392252 - RNA, 19 nt, Homo sapiens
  misc_RNA (1)...(19): siRNA sense strand
aaaaguaucgggaaaauug

SEQ ID NO: 1392253 - RNA, 19 nt, Homo sapiens
  misc_RNA (1)...(19): siRNA sense strand
gcaugaacuugcugugcau

SEQ ID NO: 1392254 - RNA, 19 nt, Homo sapiens
  misc_RNA (1)...(19): siRNA sense strand
gaaucaagcuuccauaugu

SEQ ID NO: 1392255 - RNA, 19 nt, Homo sapiens
  misc_RNA (1)...(19): siRNA sense strand
gcaaagauguuucucuguu

SEQ ID NO: 1392256 - RNA, 19 nt, Homo sapiens
  misc_RNA (1)...(19): siRNA sense strand
acacaugccuggagacuua

SEQ ID NO: 1392257 - RNA, 19 nt, Homo sapiens
  misc_RNA (1)...(19): siRNA sense strand
caacaaagcccgaggauau

SEQ ID NO: 1392258 - RNA, 19 nt, Homo sapiens
  misc_RNA (1)...(19): siRNA sense strand
ccaaagaaauucaggaaga

SEQ ID NO: 1392259 - RNA, 19 nt, Homo sapiens
  misc_RNA (1)...(19): siRNA sense strand
cuacauagauuucuucaug

SEQ ID NO: 1392260 - RNA, 19 nt, Homo sapiens
  misc_RNA (1)...(19): siRNA sense strand
ggaaauugaugauauugug

SEQ ID NO: 1392261 - RNA, 19 nt, Homo sapiens
  misc_RNA (1)...(19): siRNA sense strand
aaacucagcuauugccaua

SEQ ID NO: 1392262 - RNA, 19 nt, Homo sapiens
  misc_RNA (1)...(19): siRNA sense strand
gaagauaauucugguugaa

SEQ ID NO: 1392263 - RNA, 19 nt, Homo sapiens
  misc_RNA (1)...(19): siRNA sense strand
caaagauguuucucuguuu

SEQ ID NO: 1392264 - RNA, 19 nt, Homo sapiens
  misc_RNA (1)...(19): siRNA sense strand
ggaagaguguucuaucuca

SEQ ID NO: 1392265 - RNA, 19 nt, Homo sapiens
  misc_RNA (1)...(19): siRNA sense strand
caaagaguuucuacuaaga

SEQ ID NO: 1392266 - RNA, 19 nt, Homo sapiens
  misc_RNA (1)...(19): siRNA sense strand
ccucagugguuucuaauaa

SEQ ID NO: 1392267 - RNA, 19 nt, Homo sapiens
  misc_RNA (1)...(19): siRNA sense strand
ccagugaauuucugaguuu

SEQ ID NO: 1392268 - RNA, 19 nt, Homo sapiens
  misc_RNA (1)...(19): siRNA sense strand
cagggaacauggaaugaua

SEQ ID NO: 1392269 - RNA, 19 nt, Homo sapiens
  misc_RNA (1)...(19): siRNA sense strand
uaagagcgacaaaguauaa

SEQ ID NO: 1392270 - RNA, 19 nt, Homo sapiens
  misc_RNA (1)...(19): siRNA sense strand
gagcaucuuuaacagaauu

SEQ ID NO: 1392271 - RNA, 19 nt, Homo sapiens
  misc_RNA (1)...(19): siRNA sense strand
ccuggagacuuauuuaauu

SEQ ID NO: 1392272 - RNA, 19 nt, Homo sapiens
  misc_RNA (1)...(19): siRNA sense strand
cgacaaaguauaacaaguu

SEQ ID NO: 1392273 - RNA, 19 nt, Homo sapiens
  misc_RNA (1)...(19): siRNA sense strand
gaagaguguucuaucucaa

SEQ ID NO: 1392274 - RNA, 19 nt, Homo sapiens
  misc_RNA (1)...(19): siRNA sense strand
ucaaagaguuucuacuaag

SEQ ID NO: 1392275 - RNA, 19 nt, Homo sapiens
  misc_RNA (1)...(19): siRNA sense strand
gagaacugauaagaagaua

SEQ ID NO: 1392276 - RNA, 19 nt, Homo sapiens
  misc_RNA (1)...(19): siRNA sense strand
gcucuuuacucagggaaua

SEQ ID NO: 1392277 - RNA, 19 nt, Homo sapiens
  misc_RNA (1)...(19): siRNA sense strand
cgggauacauuacuuguug

SEQ ID NO: 1392278 - RNA, 19 nt, Homo sapiens
  misc_RNA (1)...(19): siRNA sense strand
ucgauguccucuuauauuu

SEQ ID NO: 1392279 - RNA, 19 nt, Homo sapiens
  misc_RNA (1)...(19): siRNA sense strand
agauuuaccuaaccaguuu

SEQ ID NO: 1392280 - RNA, 19 nt, Homo sapiens
  misc_RNA (1)...(19): siRNA sense strand
ggaaguaugugaggauugg

SEQ ID NO: 1392281 - RNA, 19 nt, Homo sapiens
  misc_RNA (1)...(19): siRNA sense strand
gauaucagaagugcaauaa

SEQ ID NO: 1392282 - RNA, 19 nt, Homo sapiens
  misc_RNA (1)...(19): siRNA sense strand
gcaccaacaauuaugauga

SEQ ID NO: 1392283 - RNA, 19 nt, Homo sapiens
  misc_RNA (1)...(19): siRNA sense strand
gaugaucugagaacugaua

SEQ ID NO: 1392284 - RNA, 19 nt, Homo sapiens
  misc_RNA (1)...(19): siRNA sense strand
uaucagaagugcaauaaac

SEQ ID NO: 1392285 - RNA, 19 nt, Homo sapiens
  misc_RNA (1)...(19): siRNA sense strand
ugugagagccagugaauuu

SEQ ID NO: 1392286 - RNA, 19 nt, Homo sapiens
  misc_RNA (1)...(19): siRNA sense strand
caccaacaauuaugaugaa

SEQ ID NO: 1392287 - RNA, 19 nt, Homo sapiens
  misc_RNA (1)...(19): siRNA sense strand
ccggaaaccuggucucuuc

SEQ ID NO: 1392288 - RNA, 19 nt, Homo sapiens
  misc_RNA (1)...(19): siRNA sense strand
gaagcgacacuuuggaaga

SEQ ID NO: 1392289 - RNA, 19 nt, Homo sapiens
  misc_RNA (1)...(19): siRNA sense strand
cgagaggugugaugcauuc

SEQ ID NO: 1392290 - RNA, 19 nt, Homo sapiens
  misc_RNA (1)...(19): siRNA sense strand
cagaugcugugcugucaaa

SEQ ID NO: 1392291 - RNA, 19 nt, Homo sapiens
  misc_RNA (1)...(19): siRNA sense strand
gaacgggauacauuacuug

SEQ ID NO: 1392292 - RNA, 19 nt, Homo sapiens
  misc_RNA (1)...(19): siRNA sense strand
gaucugagaacugauaaga

SEQ ID NO: 1392293 - RNA, 19 nt, Homo sapiens
  misc_RNA (1)...(19): siRNA sense strand
uaacaagaauggaggaaaa

SEQ ID NO: 1392294 - RNA, 19 nt, Homo sapiens
  misc_RNA (1)...(19): siRNA sense strand
uacaugaaguucuaaggaa

SEQ ID NO: 1392295 - RNA, 19 nt, Homo sapiens
  misc_RNA (1)...(19): siRNA sense strand
gaaaccuggucucuuccuu

SEQ ID NO: 1392296 - RNA, 19 nt, Homo sapiens
  misc_RNA (1)...(19): siRNA sense strand
guuauuguuucccaaagaa

SEQ ID NO: 1392297 - RNA, 19 nt, Homo sapiens
  misc_RNA (1)...(19): siRNA sense strand
ucugagaacugauaagaag

SEQ ID NO: 1392298 - RNA, 19 nt, Homo sapiens
  misc_RNA (1)...(19): siRNA sense strand
aauacacgcucuuuacuca

SEQ ID NO: 1392299 - RNA, 19 nt, Homo sapiens
  misc_RNA (1)...(19): siRNA sense strand
caacuuacggccaaggaaa

SEQ ID NO: 1392300 - RNA, 19 nt, Homo sapiens
  misc_RNA (1)...(19): siRNA sense strand
caaagaaauucaggaagag

SEQ ID NO: 1392301 - RNA, 19 nt, Homo sapiens
  misc_RNA (1)...(19): siRNA sense strand
ggagguaguagaaauguca

SEQ ID NO: 1392302 - RNA, 19 nt, Homo sapiens
  misc_RNA (1)...(19): siRNA sense strand
gccagugaauuucugaguu

SEQ ID NO: 1392303 - RNA, 19 nt, Homo sapiens
  misc_RNA (1)...(19): siRNA sense strand
uacaaaugcuuggagauga

SEQ ID NO: 1392304 - RNA, 19 nt, Homo sapiens
  misc_RNA (1)...(19): siRNA sense strand
ccucucauuuaucagaaua

SEQ ID NO: 1392305 - RNA, 19 nt, Homo sapiens
  misc_RNA (1)...(19): siRNA sense strand
caagagguccaagcuauug

SEQ ID NO: 1392306 - RNA, 19 nt, Homo sapiens
  misc_RNA (1)...(19): siRNA sense strand
ucgggauucucauacuuua

SEQ ID NO: 1392307 - RNA, 19 nt, Homo sapiens
  misc_RNA (1)...(19): siRNA sense strand
gguuauuguuucccaaaga

SEQ ID NO: 1392308 - RNA, 19 nt, Homo sapiens
  misc_RNA (1)...(19): siRNA sense strand
gccauaccuugcucuacua

SEQ ID NO: 1392309 - RNA, 19 nt, Homo sapiens
  misc_RNA (1)...(19): siRNA sense strand
caaggaggaggaucaaguu

SEQ ID NO: 1392310 - RNA, 19 nt, Homo sapiens
  misc_RNA (1)...(19): siRNA sense strand
ugugaugcauuccaacaaa

SEQ ID NO: 1392311 - RNA, 19 nt, Homo sapiens
  misc_RNA (1)...(19): siRNA sense strand
gaggugugaugcauuccaa

SEQ ID NO: 1392312 - RNA, 19 nt, Homo sapiens
  misc_RNA (1)...(19): siRNA sense strand
aaagauguuucucuguuuc

SEQ ID NO: 1392313 - RNA, 19 nt, Homo sapiens
  misc_RNA (1)...(19): siRNA sense strand
gggauguucuggugauauc

SEQ ID NO: 1392314 - RNA, 19 nt, Homo sapiens
  misc_RNA (1)...(19): siRNA sense strand
ugacaaaacuucucuagag

SEQ ID NO: 1392315 - RNA, 19 nt, Homo sapiens
  misc_RNA (1)...(19): siRNA sense strand
caggaagaguguucuaucu

SEQ ID NO: 1392316 - RNA, 19 nt, Homo sapiens
  misc_RNA (1)...(19): siRNA sense strand
ugaacgggauacauuacuu

SEQ ID NO: 1392317 - RNA, 19 nt, Homo sapiens
  misc_RNA (1)...(19): siRNA sense strand
ggugauaucagaagugcaa

SEQ ID NO: 1392318 - RNA, 19 nt, Homo sapiens
  misc_RNA (1)...(19): siRNA sense strand
gaaguucuaaggaaguaug

SEQ ID NO: 1392319 - RNA, 19 nt, Homo sapiens
  misc_RNA (1)...(19): siRNA sense strand
aauaugaacgggauacauu

SEQ ID NO: 1392320 - RNA, 19 nt, Homo sapiens
  misc_RNA (1)...(19): siRNA sense strand
cuauagaagcuaacaagaa

SEQ ID NO: 1392321 - RNA, 19 nt, Homo sapiens
  misc_RNA (1)...(19): siRNA sense strand
cgauguccucuuauauuua

SEQ ID NO: 1392322 - RNA, 19 nt, Homo sapiens
  misc_RNA (1)...(19): siRNA sense strand
auuggucgauguccucuua

SEQ ID NO: 1392323 - RNA, 19 nt, Homo sapiens
  misc_RNA (1)...(19): siRNA sense strand
agauaauucugguugaaga

SEQ ID NO: 1392324 - RNA, 19 nt, Homo sapiens
  misc_RNA (1)...(19): siRNA sense strand
ccuguggcaccaacaauua

SEQ ID NO: 1392325 - RNA, 19 nt, Homo sapiens
  misc_RNA (1)...(19): siRNA sense strand
gcgacacuuuggaagauug

SEQ ID NO: 1392326 - RNA, 19 nt, Homo sapiens
  misc_RNA (1)...(19): siRNA sense strand
ggaggaggaucaaguuuuc

SEQ ID NO: 1392327 - RNA, 19 nt, Homo sapiens
  misc_RNA (1)...(19): siRNA sense strand
gggauacauuacuuguuga

SEQ ID NO: 1392328 - RNA, 19 nt, Homo sapiens
  misc_RNA (1)...(19): siRNA sense strand
caauaaacagccuccaguu

SEQ ID NO: 1392329 - RNA, 19 nt, Homo sapiens
  misc_RNA (1)...(19): siRNA sense strand
aaucaagcuuccauauguu

SEQ ID NO: 1392330 - RNA, 19 nt, Homo sapiens
  misc_RNA (1)...(19): siRNA sense strand
caccaaaacuacauagauu

SEQ ID NO: 1392331 - RNA, 19 nt, Homo sapiens
  misc_RNA (1)...(19): siRNA sense strand
caguggagauaauaaucaa

SEQ ID NO: 1392332 - RNA, 19 nt, Homo sapiens
  misc_RNA (1)...(19): siRNA sense strand
ccaaggagacauggaagaa

SEQ ID NO: 1392333 - RNA, 19 nt, Homo sapiens
  misc_RNA (1)...(19): siRNA sense strand
gaauacacgcucuuuacuc

SEQ ID NO: 1392334 - RNA, 19 nt, Homo sapiens
  misc_RNA (1)...(19): siRNA sense strand
gcgacaaaguauaacaagu

SEQ ID NO: 1392335 - RNA, 19 nt, Homo sapiens
  misc_RNA (1)...(19): siRNA sense strand
gagcgacaaaguauaacaa

SEQ ID NO: 1392336 - RNA, 19 nt, Homo sapiens
  misc_RNA (1)...(19): siRNA sense strand
ucgguugcccucucauuua

SEQ ID NO: 1392337 - RNA, 19 nt, Homo sapiens
  misc_RNA (1)...(19): siRNA sense strand
ugacagggaacauggaaug

SEQ ID NO: 1392338 - RNA, 19 nt, Homo sapiens
  misc_RNA (1)...(19): siRNA sense strand
ggaauacacgcucuuuacu

SEQ ID NO: 1392339 - RNA, 19 nt, Homo sapiens
  misc_RNA (1)...(19): siRNA sense strand
guucuaaggaaguauguga

SEQ ID NO: 1392340 - RNA, 19 nt, Homo sapiens
  misc_RNA (1)...(19): siRNA sense strand
aaaaguaucgggaaaauug

SEQ ID NO: 1392341 - RNA, 19 nt, Homo sapiens
  misc_RNA (1)...(19): siRNA sense strand
acaaaugcuuggagaugau

SEQ ID NO: 1392342 - RNA, 19 nt, Homo sapiens
  misc_RNA (1)...(19): siRNA sense strand
gagagccagugaauuucug

SEQ ID NO: 1392343 - RNA, 19 nt, Homo sapiens
  misc_RNA (1)...(19): siRNA sense strand
acauagauuucuucaugga

SEQ ID NO: 1392344 - RNA, 19 nt, Homo sapiens
  misc_RNA (1)...(19): siRNA sense strand
ucagauagcaguuuucaaa

SEQ ID NO: 1392345 - RNA, 19 nt, Homo sapiens
  misc_RNA (1)...(19): siRNA sense strand
cuacuaagagcgacaaagu

SEQ ID NO: 1392346 - RNA, 19 nt, Homo sapiens
  misc_RNA (1)...(19): siRNA sense strand
ggaaugauagacccugaca

SEQ ID NO: 1392347 - RNA, 19 nt, Homo sapiens
  misc_RNA (1)...(19): siRNA sense strand
gguugaagauuuaccuaac

SEQ ID NO: 1392348 - RNA, 19 nt, Homo sapiens
  misc_RNA (1)...(19): siRNA sense strand
acuaagagcgacaaaguau

SEQ ID NO: 1392349 - RNA, 19 nt, Homo sapiens
  misc_RNA (1)...(19): siRNA sense strand
caaggagacauggaagaaa

SEQ ID NO: 1392350 - RNA, 19 nt, Homo sapiens
  misc_RNA (1)...(19): siRNA sense strand
uaucgggauucucauacuu

SEQ ID NO: 1392351 - RNA, 19 nt, Homo sapiens
  misc_RNA (1)...(19): siRNA sense strand
ugaaucaagcuuccauaug

SEQ ID NO: 1392352 - RNA, 19 nt, Homo sapiens
  misc_RNA (1)...(19): siRNA sense strand
cugaggagguaguagaaau

SEQ ID NO: 1392353 - RNA, 19 nt, Homo sapiens
  misc_RNA (1)...(19): siRNA sense strand
gucgauguccucuuauauu

SEQ ID NO: 1392354 - RNA, 19 nt, Homo sapiens
  misc_RNA (1)...(19): siRNA sense strand
gaaucaagcuuccauaugu

SEQ ID NO: 1392355 - RNA, 19 nt, Homo sapiens
  misc_RNA (1)...(19): siRNA sense strand
gcaaagauguuucucuguu

SEQ ID NO: 1392356 - RNA, 19 nt, Homo sapiens
  misc_RNA (1)...(19): siRNA sense strand
acacaugccuggagacuua

SEQ ID NO: 1392357 - RNA, 19 nt, Homo sapiens
  misc_RNA (1)...(19): siRNA sense strand
caacaaagcccgaggauau

SEQ ID NO: 1392358 - RNA, 19 nt, Homo sapiens
  misc_RNA (1)...(19): siRNA sense strand
ccaaagaaauucaggaaga

SEQ ID NO: 1392359 - RNA, 19 nt, Homo sapiens
  misc_RNA (1)...(19): siRNA sense strand
cuacauagauuucuucaug

SEQ ID NO: 1392360 - RNA, 19 nt, Homo sapiens
  misc_RNA (1)...(19): siRNA sense strand
ggaaauugaugauauugug

SEQ ID NO: 1392361 - RNA, 19 nt, Homo sapiens
  misc_RNA (1)...(19): siRNA sense strand
aaacucagcuauugccaua

SEQ ID NO: 1392362 - RNA, 19 nt, Homo sapiens
  misc_RNA (1)...(19): siRNA sense strand
gaagauaauucugguugaa

SEQ ID NO: 1392363 - RNA, 19 nt, Homo sapiens
  misc_RNA (1)...(19): siRNA sense strand
caaagauguuucucuguuu

SEQ ID NO: 1392364 - RNA, 19 nt, Homo sapiens
  misc_RNA (1)...(19): siRNA sense strand
guacaagaguggauuaauc

SEQ ID NO: 1392365 - RNA, 19 nt, Homo sapiens
  misc_RNA (1)...(19): siRNA sense strand
ggaagaguguucuaucuca

SEQ ID NO: 1392366 - RNA, 19 nt, Homo sapiens
  misc_RNA (1)...(19): siRNA sense strand
gaaagacaacgaccuuaaa

SEQ ID NO: 1392367 - RNA, 19 nt, Homo sapiens
  misc_RNA (1)...(19): siRNA sense strand
ggaaagacaacgaccuuaa

SEQ ID NO: 1392368 - RNA, 19 nt, Homo sapiens
  misc_RNA (1)...(19): siRNA sense strand
caaagaguuucuacuaaga

SEQ ID NO: 1392369 - RNA, 19 nt, Homo sapiens
  misc_RNA (1)...(19): siRNA sense strand
ccucagugguuucuaauaa

SEQ ID NO: 1392370 - RNA, 19 nt, Homo sapiens
  misc_RNA (1)...(19): siRNA sense strand
ccagugaauuucugaguuu

SEQ ID NO: 1392371 - RNA, 19 nt, Homo sapiens
  misc_RNA (1)...(19): siRNA sense strand
cagggaacauggaaugaua

SEQ ID NO: 1392372 - RNA, 19 nt, Homo sapiens
  misc_RNA (1)...(19): siRNA sense strand
uaagagcgacaaaguauaa

SEQ ID NO: 1392373 - RNA, 19 nt, Homo sapiens
  misc_RNA (1)...(19): siRNA sense strand
gagcaucuuuaacagaauu

SEQ ID NO: 1392374 - RNA, 19 nt, Homo sapiens
  misc_RNA (1)...(19): siRNA sense strand
ccuggagacuuauuuaauu

SEQ ID NO: 1392375 - RNA, 19 nt, Homo sapiens
  misc_RNA (1)...(19): siRNA sense strand
cgacaaaguauaacaaguu

SEQ ID NO: 1392376 - RNA, 19 nt, Homo sapiens
  misc_RNA (1)...(19): siRNA sense strand
ggagcaugguauucaagua

SEQ ID NO: 1392377 - RNA, 19 nt, Homo sapiens
  misc_RNA (1)...(19): siRNA sense strand
gaagaguguucuaucucaa

SEQ ID NO: 1392378 - RNA, 19 nt, Homo sapiens
  misc_RNA (1)...(19): siRNA sense strand
ucaaagaguuucuacuaag

SEQ ID NO: 1392379 - RNA, 19 nt, Homo sapiens
  misc_RNA (1)...(19): siRNA sense strand
gagaacugauaagaagaua

SEQ ID NO: 1392380 - RNA, 19 nt, Homo sapiens
  misc_RNA (1)...(19): siRNA sense strand
gcucuuuacucagggaaua

SEQ ID NO: 1392381 - RNA, 19 nt, Homo sapiens
  misc_RNA (1)...(19): siRNA sense strand
cgggauacauuacuuguug

SEQ ID NO: 1392382 - RNA, 19 nt, Homo sapiens
  misc_RNA (1)...(19): siRNA sense strand
ucgauguccucuuauauuu

SEQ ID NO: 1392383 - RNA, 19 nt, Homo sapiens
  misc_RNA (1)...(19): siRNA sense strand
agauuuaccuaaccaguuu

SEQ ID NO: 1392384 - RNA, 19 nt, Homo sapiens
  misc_RNA (1)...(19): siRNA sense strand
ggaaguaugugaggauugg

SEQ ID NO: 1392385 - RNA, 19 nt, Homo sapiens
  misc_RNA (1)...(19): siRNA sense strand
gauaucagaagugcaauaa

SEQ ID NO: 1392386 - RNA, 19 nt, Homo sapiens
  misc_RNA (1)...(19): siRNA sense strand
gcaccaacaauuaugauga

SEQ ID NO: 1392387 - RNA, 19 nt, Homo sapiens
  misc_RNA (1)...(19): siRNA sense strand
aaacaggguggaucuauuu

SEQ ID NO: 1392388 - RNA, 19 nt, Homo sapiens
  misc_RNA (1)...(19): siRNA sense strand
gaugaucugagaacugaua

SEQ ID NO: 1392389 - RNA, 19 nt, Homo sapiens
  misc_RNA (1)...(19): siRNA sense strand
ggguggaucuauuuuauua

SEQ ID NO: 1392390 - RNA, 19 nt, Homo sapiens
  misc_RNA (1)...(19): siRNA sense strand
uaucagaagugcaauaaac

SEQ ID NO: 1392391 - RNA, 19 nt, Homo sapiens
  misc_RNA (1)...(19): siRNA sense strand
ugugagagccagugaauuu

SEQ ID NO: 1392392 - RNA, 19 nt, Homo sapiens
  misc_RNA (1)...(19): siRNA sense strand
caaaggagcaugguauuca

SEQ ID NO: 1392393 - RNA, 19 nt, Homo sapiens
  misc_RNA (1)...(19): siRNA sense strand
ccggaaaccuggucucuuc

SEQ ID NO: 1392394 - RNA, 19 nt, Homo sapiens
  misc_RNA (1)...(19): siRNA sense strand
gaagcgacacuuuggaaga

SEQ ID NO: 1392395 - RNA, 19 nt, Homo sapiens
  misc_RNA (1)...(19): siRNA sense strand
cgagaggugugaugcauuc

SEQ ID NO: 1392396 - RNA, 19 nt, Homo sapiens
  misc_RNA (1)...(19): siRNA sense strand
cagaugcugugcugucaaa

SEQ ID NO: 1392397 - RNA, 19 nt, Homo sapiens
  misc_RNA (1)...(19): siRNA sense strand
caccaacaauuaugaugaa

SEQ ID NO: 1392398 - RNA, 19 nt, Homo sapiens
  misc_RNA (1)...(19): siRNA sense strand
gaacgggauacauuacuug

SEQ ID NO: 1392399 - RNA, 19 nt, Homo sapiens
  misc_RNA (1)...(19): siRNA sense strand
gaucugagaacugauaaga

SEQ ID NO: 1392400 - RNA, 19 nt, Homo sapiens
  misc_RNA (1)...(19): siRNA sense strand
uaacaagaauggaggaaaa

SEQ ID NO: 1392401 - RNA, 19 nt, Homo sapiens
  misc_RNA (1)...(19): siRNA sense strand
caaguacaagaguggauua

SEQ ID NO: 1392402 - RNA, 19 nt, Homo sapiens
  misc_RNA (1)...(19): siRNA sense strand
gaaaccuggucucuuccuu

SEQ ID NO: 1392403 - RNA, 19 nt, Homo sapiens
  misc_RNA (1)...(19): siRNA sense strand
guuauuguuucccaaagaa

SEQ ID NO: 1392404 - RNA, 19 nt, Homo sapiens
  misc_RNA (1)...(19): siRNA sense strand
uacaugaaguucuaaggaa

SEQ ID NO: 1392405 - RNA, 19 nt, Homo sapiens
  misc_RNA (1)...(19): siRNA sense strand
ucugagaacugauaagaag

SEQ ID NO: 1392406 - RNA, 19 nt, Homo sapiens
  misc_RNA (1)...(19): siRNA sense strand
aauacacgcucuuuacuca

SEQ ID NO: 1392407 - RNA, 19 nt, Homo sapiens
  misc_RNA (1)...(19): siRNA sense strand
caacuuacggccaaggaaa

SEQ ID NO: 1392408 - RNA, 19 nt, Homo sapiens
  misc_RNA (1)...(19): siRNA sense strand
caaagaaauucaggaagag

SEQ ID NO: 1392409 - RNA, 19 nt, Homo sapiens
  misc_RNA (1)...(19): siRNA sense strand
ggagguaguagaaauguca

SEQ ID NO: 1392410 - RNA, 19 nt, Homo sapiens
  misc_RNA (1)...(19): siRNA sense strand
gccagugaauuucugaguu

SEQ ID NO: 1392411 - RNA, 19 nt, Homo sapiens
  misc_RNA (1)...(19): siRNA sense strand
uacaaaugcuuggagauga

SEQ ID NO: 1392412 - RNA, 19 nt, Homo sapiens
  misc_RNA (1)...(19): siRNA sense strand
ugaacuugcugugcauaaa

SEQ ID NO: 1392413 - RNA, 19 nt, Homo sapiens
  misc_RNA (1)...(19): siRNA sense strand
ccucucauuuaucagaaua

SEQ ID NO: 1392414 - RNA, 19 nt, Homo sapiens
  misc_RNA (1)...(19): siRNA sense strand
caagagguccaagcuauug

SEQ ID NO: 1392415 - RNA, 19 nt, Homo sapiens
  misc_RNA (1)...(19): siRNA sense strand
ucgggauucucauacuuua

SEQ ID NO: 1392416 - RNA, 19 nt, Homo sapiens
  misc_RNA (1)...(19): siRNA sense strand
gguuauuguuucccaaaga

SEQ ID NO: 1392417 - RNA, 19 nt, Homo sapiens
  misc_RNA (1)...(19): siRNA sense strand
gccauaccuugcucuacua

SEQ ID NO: 1392418 - RNA, 19 nt, Homo sapiens
  misc_RNA (1)...(19): siRNA sense strand
caaggaggaggaucaaguu

SEQ ID NO: 1392419 - RNA, 19 nt, Homo sapiens
  misc_RNA (1)...(19): siRNA sense strand
ugugaugcauuccaacaaa

SEQ ID NO: 1392420 - RNA, 19 nt, Homo sapiens
  misc_RNA (1)...(19): siRNA sense strand
gaggugugaugcauuccaa

SEQ ID NO: 1392421 - RNA, 19 nt, Homo sapiens
  misc_RNA (1)...(19): siRNA sense strand
aaagauguuucucuguuuc

SEQ ID NO: 1392422 - RNA, 19 nt, Homo sapiens
  misc_RNA (1)...(19): siRNA sense strand
gggauguucuggugauauc

SEQ ID NO: 1392423 - RNA, 19 nt, Homo sapiens
  misc_RNA (1)...(19): siRNA sense strand
ugacaaaacuucucuagag

SEQ ID NO: 1392424 - RNA, 19 nt, Homo sapiens
  misc_RNA (1)...(19): siRNA sense strand
caggaagaguguucuaucu

SEQ ID NO: 1392425 - RNA, 19 nt, Homo sapiens
  misc_RNA (1)...(19): siRNA sense strand
ugaacgggauacauuacuu

SEQ ID NO: 1392426 - RNA, 19 nt, Homo sapiens
  misc_RNA (1)...(19): siRNA sense strand
ggugauaucagaagugcaa

SEQ ID NO: 1392427 - RNA, 19 nt, Homo sapiens
  misc_RNA (1)...(19): siRNA sense strand
agauaauucugguugaaga

SEQ ID NO: 1392428 - RNA, 19 nt, Homo sapiens
  misc_RNA (1)...(19): siRNA sense strand
aaaggagcaugguauucaa

SEQ ID NO: 1392429 - RNA, 19 nt, Homo sapiens
  misc_RNA (1)...(19): siRNA sense strand
aauaugaacgggauacauu

SEQ ID NO: 1392430 - RNA, 19 nt, Homo sapiens
  misc_RNA (1)...(19): siRNA sense strand
cuauagaagcuaacaagaa

SEQ ID NO: 1392431 - RNA, 19 nt, Homo sapiens
  misc_RNA (1)...(19): siRNA sense strand
cgauguccucuuauauuua

SEQ ID NO: 1392432 - RNA, 19 nt, Homo sapiens
  misc_RNA (1)...(19): siRNA sense strand
auuggucgauguccucuua

SEQ ID NO: 1392433 - RNA, 19 nt, Homo sapiens
  misc_RNA (1)...(19): siRNA sense strand
gaaguucuaaggaaguaug

SEQ ID NO: 1392434 - RNA, 19 nt, Homo sapiens
  misc_RNA (1)...(19): siRNA sense strand
ccuguggcaccaacaauua

SEQ ID NO: 1392435 - RNA, 19 nt, Homo sapiens
  misc_RNA (1)...(19): siRNA sense strand
gcgacacuuuggaagauug

SEQ ID NO: 1392436 - RNA, 19 nt, Homo sapiens
  misc_RNA (1)...(19): siRNA sense strand
ggaggaggaucaaguuuuc

SEQ ID NO: 1392437 - RNA, 19 nt, Homo sapiens
  misc_RNA (1)...(19): siRNA sense strand
gggauacauuacuuguuga

SEQ ID NO: 1392438 - RNA, 19 nt, Homo sapiens
  misc_RNA (1)...(19): siRNA sense strand
uaucaaaggagcaugguau

SEQ ID NO: 1392439 - RNA, 19 nt, Homo sapiens
  misc_RNA (1)...(19): siRNA sense strand
aaucaagcuuccauauguu

SEQ ID NO: 1392440 - RNA, 19 nt, Homo sapiens
  misc_RNA (1)...(19): siRNA sense strand
caccaaaacuacauagauu

SEQ ID NO: 1392441 - RNA, 19 nt, Homo sapiens
  misc_RNA (1)...(19): siRNA sense strand
caauaaacagccuccaguu

SEQ ID NO: 1392442 - RNA, 19 nt, Homo sapiens
  misc_RNA (1)...(19): siRNA sense strand
gagcgacaaaguauaacaa

SEQ ID NO: 1392443 - RNA, 19 nt, Homo sapiens
  misc_RNA (1)...(19): siRNA sense strand
ccaaggagacauggaagaa

SEQ ID NO: 1392444 - RNA, 19 nt, Homo sapiens
  misc_RNA (1)...(19): siRNA sense strand
gaauacacgcucuuuacuc

SEQ ID NO: 1392445 - RNA, 19 nt, Homo sapiens
  misc_RNA (1)...(19): siRNA sense strand
caguggagauaauaaucaa

SEQ ID NO: 1392446 - RNA, 19 nt, Homo sapiens
  misc_RNA (1)...(19): siRNA sense strand
gcgacaaaguauaacaagu

SEQ ID NO: 1392447 - RNA, 19 nt, Homo sapiens
  misc_RNA (1)...(19): siRNA sense strand
gcaugguauucaaguacaa

SEQ ID NO: 1392448 - RNA, 19 nt, Homo sapiens
  misc_RNA (1)...(19): siRNA sense strand
ugacagggaacauggaaug

SEQ ID NO: 1392449 - RNA, 19 nt, Homo sapiens
  misc_RNA (1)...(19): siRNA sense strand
ggaauacacgcucuuuacu

SEQ ID NO: 1392450 - RNA, 19 nt, Homo sapiens
  misc_RNA (1)...(19): siRNA sense strand
ucgguugcccucucauuua

SEQ ID NO: 1392451 - RNA, 19 nt, Homo sapiens
  misc_RNA (1)...(19): siRNA sense strand
gagagccagugaauuucug

SEQ ID NO: 1392452 - RNA, 19 nt, Homo sapiens
  misc_RNA (1)...(19): siRNA sense strand
aaaaguaucgggaaaauug

SEQ ID NO: 1392453 - RNA, 19 nt, Homo sapiens
  misc_RNA (1)...(19): siRNA sense strand
gcaugaacuugcugugcau

SEQ ID NO: 1392454 - RNA, 19 nt, Homo sapiens
  misc_RNA (1)...(19): siRNA sense strand
gaaucaagcuuccauaugu

SEQ ID NO: 1392455 - RNA, 19 nt, Homo sapiens
  misc_RNA (1)...(19): siRNA sense strand
gcaaagauguuucucuguu

SEQ ID NO: 1392456 - RNA, 19 nt, Homo sapiens
  misc_RNA (1)...(19): siRNA sense strand
acacaugccuggagacuua

SEQ ID NO: 1392457 - RNA, 19 nt, Homo sapiens
  misc_RNA (1)...(19): siRNA sense strand
caacaaagcccgaggauau

SEQ ID NO: 1392458 - RNA, 19 nt, Homo sapiens
  misc_RNA (1)...(19): siRNA sense strand
ccaaagaaauucaggaaga

SEQ ID NO: 1392459 - RNA, 19 nt, Homo sapiens
  misc_RNA (1)...(19): siRNA sense strand
cuacauagauuucuucaug

SEQ ID NO: 1392460 - RNA, 19 nt, Homo sapiens
  misc_RNA (1)...(19): siRNA sense strand
ggaaauugaugauauugug

SEQ ID NO: 1392461 - RNA, 19 nt, Homo sapiens
  misc_RNA (1)...(19): siRNA sense strand
aaacucagcuauugccaua

SEQ ID NO: 1392462 - RNA, 19 nt, Homo sapiens
  misc_RNA (1)...(19): siRNA sense strand
gaagauaauucugguugaa

SEQ ID NO: 1392463 - RNA, 19 nt, Homo sapiens
  misc_RNA (1)...(19): siRNA sense strand
caaagauguuucucuguuu

SEQ ID NO: 1392464 - RNA, 19 nt, Homo sapiens
  misc_RNA (1)...(19): siRNA sense strand
guacaagaguggauuaauc

SEQ ID NO: 1392465 - RNA, 19 nt, Homo sapiens
  misc_RNA (1)...(19): siRNA sense strand
ggaagaguguucuaucuca

SEQ ID NO: 1392466 - RNA, 19 nt, Homo sapiens
  misc_RNA (1)...(19): siRNA sense strand
gaaagacaacgaccuuaaa

SEQ ID NO: 1392467 - RNA, 19 nt, Homo sapiens
  misc_RNA (1)...(19): siRNA sense strand
ggaaagacaacgaccuuaa

SEQ ID NO: 1392468 - RNA, 19 nt, Homo sapiens
  misc_RNA (1)...(19): siRNA sense strand
caaagaguuucuacuaaga

SEQ ID NO: 1392469 - RNA, 19 nt, Homo sapiens
  misc_RNA (1)...(19): siRNA sense strand
ccucagugguuucuaauaa

SEQ ID NO: 1392470 - RNA, 19 nt, Homo sapiens
  misc_RNA (1)...(19): siRNA sense strand
ccagugaauuucugaguuu

SEQ ID NO: 1392471 - RNA, 19 nt, Homo sapiens
  misc_RNA (1)...(19): siRNA sense strand
cagggaacauggaaugaua

SEQ ID NO: 1392472 - RNA, 19 nt, Homo sapiens
  misc_RNA (1)...(19): siRNA sense strand
uaagagcgacaaaguauaa

SEQ ID NO: 1392473 - RNA, 19 nt, Homo sapiens
  misc_RNA (1)...(19): siRNA sense strand
gagcaucuuuaacagaauu

SEQ ID NO: 1392474 - RNA, 19 nt, Homo sapiens
  misc_RNA (1)...(19): siRNA sense strand
ccuggagacuuauuuaauu

SEQ ID NO: 1392475 - RNA, 19 nt, Homo sapiens
  misc_RNA (1)...(19): siRNA sense strand
cgacaaaguauaacaaguu

SEQ ID NO: 1392476 - RNA, 19 nt, Homo sapiens
  misc_RNA (1)...(19): siRNA sense strand
ggagcaugguauucaagua

SEQ ID NO: 1392477 - RNA, 19 nt, Homo sapiens
  misc_RNA (1)...(19): siRNA sense strand
gaagaguguucuaucucaa

SEQ ID NO: 1392478 - RNA, 19 nt, Homo sapiens
  misc_RNA (1)...(19): siRNA sense strand
ucaaagaguuucuacuaag

SEQ ID NO: 1392479 - RNA, 19 nt, Homo sapiens
  misc_RNA (1)...(19): siRNA sense strand
gagaacugauaagaagaua

SEQ ID NO: 1392480 - RNA, 19 nt, Homo sapiens
  misc_RNA (1)...(19): siRNA sense strand
gcucuuuacucagggaaua

SEQ ID NO: 1392481 - RNA, 19 nt, Homo sapiens
  misc_RNA (1)...(19): siRNA sense strand
cgggauacauuacuuguug

SEQ ID NO: 1392482 - RNA, 19 nt, Homo sapiens
  misc_RNA (1)...(19): siRNA sense strand
ucgauguccucuuauauuu

SEQ ID NO: 1392483 - RNA, 19 nt, Homo sapiens
  misc_RNA (1)...(19): siRNA sense strand
agauuuaccuaaccaguuu

SEQ ID NO: 1392484 - RNA, 19 nt, Homo sapiens
  misc_RNA (1)...(19): siRNA sense strand
ggaaguaugugaggauugg

SEQ ID NO: 1392485 - RNA, 19 nt, Homo sapiens
  misc_RNA (1)...(19): siRNA sense strand
gauaucagaagugcaauaa

SEQ ID NO: 1392486 - RNA, 19 nt, Homo sapiens
  misc_RNA (1)...(19): siRNA sense strand
gcaccaacaauuaugauga

SEQ ID NO: 1392487 - RNA, 19 nt, Homo sapiens
  misc_RNA (1)...(19): siRNA sense strand
aaacaggguggaucuauuu

SEQ ID NO: 1392488 - RNA, 19 nt, Homo sapiens
  misc_RNA (1)...(19): siRNA sense strand
gaugaucugagaacugaua

SEQ ID NO: 1392489 - RNA, 19 nt, Homo sapiens
  misc_RNA (1)...(19): siRNA sense strand
ggguggaucuauuuuauua

SEQ ID NO: 1392490 - RNA, 19 nt, Homo sapiens
  misc_RNA (1)...(19): siRNA sense strand
uaucagaagugcaauaaac

SEQ ID NO: 1392491 - RNA, 19 nt, Homo sapiens
  misc_RNA (1)...(19): siRNA sense strand
ugugagagccagugaauuu

SEQ ID NO: 1392492 - RNA, 19 nt, Homo sapiens
  misc_RNA (1)...(19): siRNA sense strand
caaaggagcaugguauuca

SEQ ID NO: 1392493 - RNA, 19 nt, Homo sapiens
  misc_RNA (1)...(19): siRNA sense strand
ccggaaaccuggucucuuc

SEQ ID NO: 1392494 - RNA, 19 nt, Homo sapiens
  misc_RNA (1)...(19): siRNA sense strand
gaagcgacacuuuggaaga

SEQ ID NO: 1392495 - RNA, 19 nt, Homo sapiens
  misc_RNA (1)...(19): siRNA sense strand
cgagaggugugaugcauuc

SEQ ID NO: 1392496 - RNA, 19 nt, Homo sapiens
  misc_RNA (1)...(19): siRNA sense strand
cagaugcugugcugucaaa

SEQ ID NO: 1392497 - RNA, 19 nt, Homo sapiens
  misc_RNA (1)...(19): siRNA sense strand
caccaacaauuaugaugaa

SEQ ID NO: 1392498 - RNA, 19 nt, Homo sapiens
  misc_RNA (1)...(19): siRNA sense strand
gaacgggauacauuacuug

SEQ ID NO: 1392499 - RNA, 19 nt, Homo sapiens
  misc_RNA (1)...(19): siRNA sense strand
gaucugagaacugauaaga

SEQ ID NO: 1392500 - RNA, 19 nt, Homo sapiens
  misc_RNA (1)...(19): siRNA sense strand
uaacaagaauggaggaaaa

SEQ ID NO: 1392501 - RNA, 19 nt, Homo sapiens
  misc_RNA (1)...(19): siRNA sense strand
caaguacaagaguggauua

SEQ ID NO: 1392502 - RNA, 19 nt, Homo sapiens
  misc_RNA (1)...(19): siRNA sense strand
gaaaccuggucucuuccuu

SEQ ID NO: 1392503 - RNA, 19 nt, Homo sapiens
  misc_RNA (1)...(19): siRNA sense strand
guuauuguuucccaaagaa

SEQ ID NO: 1392504 - RNA, 19 nt, Homo sapiens
  misc_RNA (1)...(19): siRNA sense strand
uacaugaaguucuaaggaa

SEQ ID NO: 1392505 - RNA, 19 nt, Homo sapiens
  misc_RNA (1)...(19): siRNA sense strand
ucugagaacugauaagaag

SEQ ID NO: 1392506 - RNA, 19 nt, Homo sapiens
  misc_RNA (1)...(19): siRNA sense strand
aauacacgcucuuuacuca

SEQ ID NO: 1392507 - RNA, 19 nt, Homo sapiens
  misc_RNA (1)...(19): siRNA sense strand
caacuuacggccaaggaaa

SEQ ID NO: 1392508 - RNA, 19 nt, Homo sapiens
  misc_RNA (1)...(19): siRNA sense strand
caaagaaauucaggaagag

SEQ ID NO: 1392509 - RNA, 19 nt, Homo sapiens
  misc_RNA (1)...(19): siRNA sense strand
ggagguaguagaaauguca

SEQ ID NO: 1392510 - RNA, 19 nt, Homo sapiens
  misc_RNA (1)...(19): siRNA sense strand
gccagugaauuucugaguu

SEQ ID NO: 1392511 - RNA, 19 nt, Homo sapiens
  misc_RNA (1)...(19): siRNA sense strand
uacaaaugcuuggagauga

SEQ ID NO: 1392512 - RNA, 19 nt, Homo sapiens
  misc_RNA (1)...(19): siRNA sense strand
ugaacuugcugugcauaaa

SEQ ID NO: 1392513 - RNA, 19 nt, Homo sapiens
  misc_RNA (1)...(19): siRNA sense strand
ccucucauuuaucagaaua

SEQ ID NO: 1392514 - RNA, 19 nt, Homo sapiens
  misc_RNA (1)...(19): siRNA sense strand
caagagguccaagcuauug

SEQ ID NO: 1392515 - RNA, 19 nt, Homo sapiens
  misc_RNA (1)...(19): siRNA sense strand
ucgggauucucauacuuua

SEQ ID NO: 1392516 - RNA, 19 nt, Homo sapiens
  misc_RNA (1)...(19): siRNA sense strand
gguuauuguuucccaaaga

SEQ ID NO: 1392517 - RNA, 19 nt, Homo sapiens
  misc_RNA (1)...(19): siRNA sense strand
gccauaccuugcucuacua

SEQ ID NO: 1392518 - RNA, 19 nt, Homo sapiens
  misc_RNA (1)...(19): siRNA sense strand
caaggaggaggaucaaguu

SEQ ID NO: 1392519 - RNA, 19 nt, Homo sapiens
  misc_RNA (1)...(19): siRNA sense strand
ugugaugcauuccaacaaa

SEQ ID NO: 1392520 - RNA, 19 nt, Homo sapiens
  misc_RNA (1)...(19): siRNA sense strand
gaggugugaugcauuccaa

SEQ ID NO: 1392521 - RNA, 19 nt, Homo sapiens
  misc_RNA (1)...(19): siRNA sense strand
aaagauguuucucuguuuc

SEQ ID NO: 1392522 - RNA, 19 nt, Homo sapiens
  misc_RNA (1)...(19): siRNA sense strand
gggauguucuggugauauc

SEQ ID NO: 1392523 - RNA, 19 nt, Homo sapiens
  misc_RNA (1)...(19): siRNA sense strand
ugacaaaacuucucuagag

SEQ ID NO: 1392524 - RNA, 19 nt, Homo sapiens
  misc_RNA (1)...(19): siRNA sense strand
caggaagaguguucuaucu

SEQ ID NO: 1392525 - RNA, 19 nt, Homo sapiens
  misc_RNA (1)...(19): siRNA sense strand
ugaacgggauacauuacuu

SEQ ID NO: 1392526 - RNA, 19 nt, Homo sapiens
  misc_RNA (1)...(19): siRNA sense strand
ggugauaucagaagugcaa

SEQ ID NO: 1392527 - RNA, 19 nt, Homo sapiens
  misc_RNA (1)...(19): siRNA sense strand
agauaauucugguugaaga

SEQ ID NO: 1392528 - RNA, 19 nt, Homo sapiens
  misc_RNA (1)...(19): siRNA sense strand
aaaggagcaugguauucaa

SEQ ID NO: 1392529 - RNA, 19 nt, Homo sapiens
  misc_RNA (1)...(19): siRNA sense strand
aauaugaacgggauacauu

SEQ ID NO: 1392530 - RNA, 19 nt, Homo sapiens
  misc_RNA (1)...(19): siRNA sense strand
cuauagaagcuaacaagaa

SEQ ID NO: 1392531 - RNA, 19 nt, Homo sapiens
  misc_RNA (1)...(19): siRNA sense strand
cgauguccucuuauauuua

SEQ ID NO: 1392532 - RNA, 19 nt, Homo sapiens
  misc_RNA (1)...(19): siRNA sense strand
auuggucgauguccucuua

SEQ ID NO: 1392533 - RNA, 19 nt, Homo sapiens
  misc_RNA (1)...(19): siRNA sense strand
gaaguucuaaggaaguaug

SEQ ID NO: 1392534 - RNA, 19 nt, Homo sapiens
  misc_RNA (1)...(19): siRNA sense strand
ccuguggcaccaacaauua

SEQ ID NO: 1392535 - RNA, 19 nt, Homo sapiens
  misc_RNA (1)...(19): siRNA sense strand
gcgacacuuuggaagauug

SEQ ID NO: 1392536 - RNA, 19 nt, Homo sapiens
  misc_RNA (1)...(19): siRNA sense strand
ggaggaggaucaaguuuuc

SEQ ID NO: 1392537 - RNA, 19 nt, Homo sapiens
  misc_RNA (1)...(19): siRNA sense strand
gggauacauuacuuguuga

SEQ ID NO: 1392538 - RNA, 19 nt, Homo sapiens
  misc_RNA (1)...(19): siRNA sense strand
uaucaaaggagcaugguau

SEQ ID NO: 1392539 - RNA, 19 nt, Homo sapiens
  misc_RNA (1)...(19): siRNA sense strand
aaucaagcuuccauauguu

SEQ ID NO: 1392540 - RNA, 19 nt, Homo sapiens
  misc_RNA (1)...(19): siRNA sense strand
caccaaaacuacauagauu

SEQ ID NO: 1392541 - RNA, 19 nt, Homo sapiens
  misc_RNA (1)...(19): siRNA sense strand
caauaaacagccuccaguu

SEQ ID NO: 1392542 - RNA, 19 nt, Homo sapiens
  misc_RNA (1)...(19): siRNA sense strand
gagcgacaaaguauaacaa

SEQ ID NO: 1392543 - RNA, 19 nt, Homo sapiens
  misc_RNA (1)...(19): siRNA sense strand
ccaaggagacauggaagaa

SEQ ID NO: 1392544 - RNA, 19 nt, Homo sapiens
  misc_RNA (1)...(19): siRNA sense strand
gaauacacgcucuuuacuc

SEQ ID NO: 1392545 - RNA, 19 nt, Homo sapiens
  misc_RNA (1)...(19): siRNA sense strand
caguggagauaauaaucaa

SEQ ID NO: 1392546 - RNA, 19 nt, Homo sapiens
  misc_RNA (1)...(19): siRNA sense strand
gcgacaaaguauaacaagu

SEQ ID NO: 1392547 - RNA, 19 nt, Homo sapiens
  misc_RNA (1)...(19): siRNA sense strand
gcaugguauucaaguacaa

SEQ ID NO: 1392548 - RNA, 19 nt, Homo sapiens
  misc_RNA (1)...(19): siRNA sense strand
ugacagggaacauggaaug

SEQ ID NO: 1392549 - RNA, 19 nt, Homo sapiens
  misc_RNA (1)...(19): siRNA sense strand
ggaauacacgcucuuuacu

SEQ ID NO: 1392550 - RNA, 19 nt, Homo sapiens
  misc_RNA (1)...(19): siRNA sense strand
ucgguugcccucucauuua

SEQ ID NO: 1392551 - RNA, 19 nt, Homo sapiens
  misc_RNA (1)...(19): siRNA sense strand
gagagccagugaauuucug

SEQ ID NO: 1392552 - RNA, 19 nt, Homo sapiens
  misc_RNA (1)...(19): siRNA sense strand
aaaaguaucgggaaaauug

SEQ ID NO: 1392553 - RNA, 19 nt, Homo sapiens
  misc_RNA (1)...(19): siRNA sense strand
gcaugaacuugcugugcau

SEQ ID NO: 1392554 - RNA, 19 nt, Homo sapiens
  misc_RNA (1)...(19): siRNA sense strand
gaaucaagcuuccauaugu

SEQ ID NO: 1392555 - RNA, 19 nt, Homo sapiens
  misc_RNA (1)...(19): siRNA sense strand
gcaaagauguuucucuguu

SEQ ID NO: 1392556 - RNA, 19 nt, Homo sapiens
  misc_RNA (1)...(19): siRNA sense strand
acacaugccuggagacuua

SEQ ID NO: 1392557 - RNA, 19 nt, Homo sapiens
  misc_RNA (1)...(19): siRNA sense strand
caacaaagcccgaggauau

SEQ ID NO: 1392558 - RNA, 19 nt, Homo sapiens
  misc_RNA (1)...(19): siRNA sense strand
ccaaagaaauucaggaaga

SEQ ID NO: 1392559 - RNA, 19 nt, Homo sapiens
  misc_RNA (1)...(19): siRNA sense strand
cuacauagauuucuucaug

SEQ ID NO: 1392560 - RNA, 19 nt, Homo sapiens
  misc_RNA (1)...(19): siRNA sense strand
ggaaauugaugauauugug

SEQ ID NO: 1392561 - RNA, 19 nt, Homo sapiens
  misc_RNA (1)...(19): siRNA sense strand
aaacucagcuauugccaua

SEQ ID NO: 1392562 - RNA, 19 nt, Homo sapiens
  misc_RNA (1)...(19): siRNA sense strand
gaagauaauucugguugaa

SEQ ID NO: 1392563 - RNA, 19 nt, Homo sapiens
  misc_RNA (1)...(19): siRNA sense strand
caaagauguuucucuguuu

SEQ ID NO: 1392564 - RNA, 19 nt, Homo sapiens
  misc_RNA (1)...(19): siRNA sense strand
guacaagaguggauuaauc

SEQ ID NO: 1392565 - RNA, 19 nt, Homo sapiens
  misc_RNA (1)...(19): siRNA sense strand
ggaagaguguucuaucuca

SEQ ID NO: 1392566 - RNA, 19 nt, Homo sapiens
  misc_RNA (1)...(19): siRNA sense strand
gaaagacaacgaccuuaaa

SEQ ID NO: 1392567 - RNA, 19 nt, Homo sapiens
  misc_RNA (1)...(19): siRNA sense strand
ggaaagacaacgaccuuaa

SEQ ID NO: 1392568 - RNA, 19 nt, Homo sapiens
  misc_RNA (1)...(19): siRNA sense strand
caaagaguuucuacuaaga

SEQ ID NO: 1392569 - RNA, 19 nt, Homo sapiens
  misc_RNA (1)...(19): siRNA sense strand
ccucagugguuucuaauaa

SEQ ID NO: 1392570 - RNA, 19 nt, Homo sapiens
  misc_RNA (1)...(19): siRNA sense strand
ccagugaauuucugaguuu

SEQ ID NO: 1392571 - RNA, 19 nt, Homo sapiens
  misc_RNA (1)...(19): siRNA sense strand
cagggaacauggaaugaua

SEQ ID NO: 1392572 - RNA, 19 nt, Homo sapiens
  misc_RNA (1)...(19): siRNA sense strand
uaagagcgacaaaguauaa

SEQ ID NO: 1392573 - RNA, 19 nt, Homo sapiens
  misc_RNA (1)...(19): siRNA sense strand
gagcaucuuuaacagaauu

SEQ ID NO: 1392574 - RNA, 19 nt, Homo sapiens
  misc_RNA (1)...(19): siRNA sense strand
ccuggagacuuauuuaauu

SEQ ID NO: 1392575 - RNA, 19 nt, Homo sapiens
  misc_RNA (1)...(19): siRNA sense strand
cgacaaaguauaacaaguu

SEQ ID NO: 1392576 - RNA, 19 nt, Homo sapiens
  misc_RNA (1)...(19): siRNA sense strand
ggagcaugguauucaagua

SEQ ID NO: 1392577 - RNA, 19 nt, Homo sapiens
  misc_RNA (1)...(19): siRNA sense strand
gaagaguguucuaucucaa

SEQ ID NO: 1392578 - RNA, 19 nt, Homo sapiens
  misc_RNA (1)...(19): siRNA sense strand
ucaaagaguuucuacuaag

SEQ ID NO: 1392579 - RNA, 19 nt, Homo sapiens
  misc_RNA (1)...(19): siRNA sense strand
gagaacugauaagaagaua

SEQ ID NO: 1392580 - RNA, 19 nt, Homo sapiens
  misc_RNA (1)...(19): siRNA sense strand
gcucuuuacucagggaaua

SEQ ID NO: 1392581 - RNA, 19 nt, Homo sapiens
  misc_RNA (1)...(19): siRNA sense strand
cgggauacauuacuuguug

SEQ ID NO: 1392582 - RNA, 19 nt, Homo sapiens
  misc_RNA (1)...(19): siRNA sense strand
ucgauguccucuuauauuu

SEQ ID NO: 1392583 - RNA, 19 nt, Homo sapiens
  misc_RNA (1)...(19): siRNA sense strand
agauuuaccuaaccaguuu

SEQ ID NO: 1392584 - RNA, 19 nt, Homo sapiens
  misc_RNA (1)...(19): siRNA sense strand
ggaaguaugugaggauugg

SEQ ID NO: 1392585 - RNA, 19 nt, Homo sapiens
  misc_RNA (1)...(19): siRNA sense strand
gauaucagaagugcaauaa

SEQ ID NO: 1392586 - RNA, 19 nt, Homo sapiens
  misc_RNA (1)...(19): siRNA sense strand
gcaccaacaauuaugauga

SEQ ID NO: 1392587 - RNA, 19 nt, Homo sapiens
  misc_RNA (1)...(19): siRNA sense strand
aaacaggguggaucuauuu

SEQ ID NO: 1392588 - RNA, 19 nt, Homo sapiens
  misc_RNA (1)...(19): siRNA sense strand
gaugaucugagaacugaua

SEQ ID NO: 1392589 - RNA, 19 nt, Homo sapiens
  misc_RNA (1)...(19): siRNA sense strand
ggguggaucuauuuuauua

SEQ ID NO: 1392590 - RNA, 19 nt, Homo sapiens
  misc_RNA (1)...(19): siRNA sense strand
uaucagaagugcaauaaac

SEQ ID NO: 1392591 - RNA, 19 nt, Homo sapiens
  misc_RNA (1)...(19): siRNA sense strand
ugugagagccagugaauuu

SEQ ID NO: 1392592 - RNA, 19 nt, Homo sapiens
  misc_RNA (1)...(19): siRNA sense strand
caaaggagcaugguauuca

SEQ ID NO: 1392593 - RNA, 19 nt, Homo sapiens
  misc_RNA (1)...(19): siRNA sense strand
ccggaaaccuggucucuuc

SEQ ID NO: 1392594 - RNA, 19 nt, Homo sapiens
  misc_RNA (1)...(19): siRNA sense strand
gaagcgacacuuuggaaga

SEQ ID NO: 1392595 - RNA, 19 nt, Homo sapiens
  misc_RNA (1)...(19): siRNA sense strand
cgagaggugugaugcauuc

SEQ ID NO: 1392596 - RNA, 19 nt, Homo sapiens
  misc_RNA (1)...(19): siRNA sense strand
cagaugcugugcugucaaa

SEQ ID NO: 1392597 - RNA, 19 nt, Homo sapiens
  misc_RNA (1)...(19): siRNA sense strand
caccaacaauuaugaugaa

SEQ ID NO: 1392598 - RNA, 19 nt, Homo sapiens
  misc_RNA (1)...(19): siRNA sense strand
gaacgggauacauuacuug

SEQ ID NO: 1392599 - RNA, 19 nt, Homo sapiens
  misc_RNA (1)...(19): siRNA sense strand
gaucugagaacugauaaga

SEQ ID NO: 1392600 - RNA, 19 nt, Homo sapiens
  misc_RNA (1)...(19): siRNA sense strand
uaacaagaauggaggaaaa

SEQ ID NO: 1392601 - RNA, 19 nt, Homo sapiens
  misc_RNA (1)...(19): siRNA sense strand
caaguacaagaguggauua

SEQ ID NO: 1392602 - RNA, 19 nt, Homo sapiens
  misc_RNA (1)...(19): siRNA sense strand
gaaaccuggucucuuccuu

SEQ ID NO: 1392603 - RNA, 19 nt, Homo sapiens
  misc_RNA (1)...(19): siRNA sense strand
guuauuguuucccaaagaa

SEQ ID NO: 1392604 - RNA, 19 nt, Homo sapiens
  misc_RNA (1)...(19): siRNA sense strand
uacaugaaguucuaaggaa

SEQ ID NO: 1392605 - RNA, 19 nt, Homo sapiens
  misc_RNA (1)...(19): siRNA sense strand
ucugagaacugauaagaag

SEQ ID NO: 1392606 - RNA, 19 nt, Homo sapiens
  misc_RNA (1)...(19): siRNA sense strand
aauacacgcucuuuacuca

SEQ ID NO: 1392607 - RNA, 19 nt, Homo sapiens
  misc_RNA (1)...(19): siRNA sense strand
caacuuacggccaaggaaa

SEQ ID NO: 1392608 - RNA, 19 nt, Homo sapiens
  misc_RNA (1)...(19): siRNA sense strand
caaagaaauucaggaagag

SEQ ID NO: 1392609 - RNA, 19 nt, Homo sapiens
  misc_RNA (1)...(19): siRNA sense strand
ggagguaguagaaauguca

SEQ ID NO: 1392610 - RNA, 19 nt, Homo sapiens
  misc_RNA (1)...(19): siRNA sense strand
gccagugaauuucugaguu

SEQ ID NO: 1392611 - RNA, 19 nt, Homo sapiens
  misc_RNA (1)...(19): siRNA sense strand
uacaaaugcuuggagauga

SEQ ID NO: 1392612 - RNA, 19 nt, Homo sapiens
  misc_RNA (1)...(19): siRNA sense strand
ugaacuugcugugcauaaa

SEQ ID NO: 1392613 - RNA, 19 nt, Homo sapiens
  misc_RNA (1)...(19): siRNA sense strand
ccucucauuuaucagaaua

SEQ ID NO: 1392614 - RNA, 19 nt, Homo sapiens
  misc_RNA (1)...(19): siRNA sense strand
caagagguccaagcuauug

SEQ ID NO: 1392615 - RNA, 19 nt, Homo sapiens
  misc_RNA (1)...(19): siRNA sense strand
ucgggauucucauacuuua

SEQ ID NO: 1392616 - RNA, 19 nt, Homo sapiens
  misc_RNA (1)...(19): siRNA sense strand
gguuauuguuucccaaaga

SEQ ID NO: 1392617 - RNA, 19 nt, Homo sapiens
  misc_RNA (1)...(19): siRNA sense strand
gccauaccuugcucuacua

SEQ ID NO: 1392618 - RNA, 19 nt, Homo sapiens
  misc_RNA (1)...(19): siRNA sense strand
caaggaggaggaucaaguu

SEQ ID NO: 1392619 - RNA, 19 nt, Homo sapiens
  misc_RNA (1)...(19): siRNA sense strand
ugugaugcauuccaacaaa

SEQ ID NO: 1392620 - RNA, 19 nt, Homo sapiens
  misc_RNA (1)...(19): siRNA sense strand
gaggugugaugcauuccaa

SEQ ID NO: 1392621 - RNA, 19 nt, Homo sapiens
  misc_RNA (1)...(19): siRNA sense strand
aaagauguuucucuguuuc

SEQ ID NO: 1392622 - RNA, 19 nt, Homo sapiens
  misc_RNA (1)...(19): siRNA sense strand
gggauguucuggugauauc

SEQ ID NO: 1392623 - RNA, 19 nt, Homo sapiens
  misc_RNA (1)...(19): siRNA sense strand
ugacaaaacuucucuagag

SEQ ID NO: 1392624 - RNA, 19 nt, Homo sapiens
  misc_RNA (1)...(19): siRNA sense strand
caggaagaguguucuaucu

SEQ ID NO: 1392625 - RNA, 19 nt, Homo sapiens
  misc_RNA (1)...(19): siRNA sense strand
ugaacgggauacauuacuu

SEQ ID NO: 1392626 - RNA, 19 nt, Homo sapiens
  misc_RNA (1)...(19): siRNA sense strand
ggugauaucagaagugcaa

SEQ ID NO: 1392627 - RNA, 19 nt, Homo sapiens
  misc_RNA (1)...(19): siRNA sense strand
agauaauucugguugaaga

SEQ ID NO: 1392628 - RNA, 19 nt, Homo sapiens
  misc_RNA (1)...(19): siRNA sense strand
aaaggagcaugguauucaa

SEQ ID NO: 1392629 - RNA, 19 nt, Homo sapiens
  misc_RNA (1)...(19): siRNA sense strand
aauaugaacgggauacauu

SEQ ID NO: 1392630 - RNA, 19 nt, Homo sapiens
  misc_RNA (1)...(19): siRNA sense strand
cuauagaagcuaacaagaa

SEQ ID NO: 1392631 - RNA, 19 nt, Homo sapiens
  misc_RNA (1)...(19): siRNA sense strand
cgauguccucuuauauuua

SEQ ID NO: 1392632 - RNA, 19 nt, Homo sapiens
  misc_RNA (1)...(19): siRNA sense strand
auuggucgauguccucuua

SEQ ID NO: 1392633 - RNA, 19 nt, Homo sapiens
  misc_RNA (1)...(19): siRNA sense strand
gaaguucuaaggaaguaug

SEQ ID NO: 1392634 - RNA, 19 nt, Homo sapiens
  misc_RNA (1)...(19): siRNA sense strand
ccuguggcaccaacaauua

SEQ ID NO: 1392635 - RNA, 19 nt, Homo sapiens
  misc_RNA (1)...(19): siRNA sense strand
gcgacacuuuggaagauug

SEQ ID NO: 1392636 - RNA, 19 nt, Homo sapiens
  misc_RNA (1)...(19): siRNA sense strand
ggaggaggaucaaguuuuc

SEQ ID NO: 1392637 - RNA, 19 nt, Homo sapiens
  misc_RNA (1)...(19): siRNA sense strand
gggauacauuacuuguuga

SEQ ID NO: 1392638 - RNA, 19 nt, Homo sapiens
  misc_RNA (1)...(19): siRNA sense strand
uaucaaaggagcaugguau

SEQ ID NO: 1392639 - RNA, 19 nt, Homo sapiens
  misc_RNA (1)...(19): siRNA sense strand
aaucaagcuuccauauguu

SEQ ID NO: 1392640 - RNA, 19 nt, Homo sapiens
  misc_RNA (1)...(19): siRNA sense strand
caccaaaacuacauagauu

SEQ ID NO: 1392641 - RNA, 19 nt, Homo sapiens
  misc_RNA (1)...(19): siRNA sense strand
caauaaacagccuccaguu

SEQ ID NO: 1392642 - RNA, 19 nt, Homo sapiens
  misc_RNA (1)...(19): siRNA sense strand
gagcgacaaaguauaacaa

SEQ ID NO: 1392643 - RNA, 19 nt, Homo sapiens
  misc_RNA (1)...(19): siRNA sense strand
ccaaggagacauggaagaa

SEQ ID NO: 1392644 - RNA, 19 nt, Homo sapiens
  misc_RNA (1)...(19): siRNA sense strand
gaauacacgcucuuuacuc

SEQ ID NO: 1392645 - RNA, 19 nt, Homo sapiens
  misc_RNA (1)...(19): siRNA sense strand
caguggagauaauaaucaa

SEQ ID NO: 1392646 - RNA, 19 nt, Homo sapiens
  misc_RNA (1)...(19): siRNA sense strand
gcgacaaaguauaacaagu

SEQ ID NO: 1392647 - RNA, 19 nt, Homo sapiens
  misc_RNA (1)...(19): siRNA sense strand
gcaugguauucaaguacaa

SEQ ID NO: 1392648 - RNA, 19 nt, Homo sapiens
  misc_RNA (1)...(19): siRNA sense strand
ugacagggaacauggaaug

SEQ ID NO: 1392649 - RNA, 19 nt, Homo sapiens
  misc_RNA (1)...(19): siRNA sense strand
ggaauacacgcucuuuacu

SEQ ID NO: 1392650 - RNA, 19 nt, Homo sapiens
  misc_RNA (1)...(19): siRNA sense strand
ucgguugcccucucauuua

SEQ ID NO: 1392651 - RNA, 19 nt, Homo sapiens
  misc_RNA (1)...(19): siRNA sense strand
gagagccagugaauuucug

SEQ ID NO: 1392652 - RNA, 19 nt, Homo sapiens
  misc_RNA (1)...(19): siRNA sense strand
aaaaguaucgggaaaauug

SEQ ID NO: 1392653 - RNA, 19 nt, Homo sapiens
  misc_RNA (1)...(19): siRNA sense strand
gcaugaacuugcugugcau

SEQ ID NO: 1392654 - RNA, 19 nt, Homo sapiens
  misc_RNA (1)...(19): siRNA sense strand
gaaucaagcuuccauaugu

SEQ ID NO: 1392655 - RNA, 19 nt, Homo sapiens
  misc_RNA (1)...(19): siRNA sense strand
gcaaagauguuucucuguu

SEQ ID NO: 1392656 - RNA, 19 nt, Homo sapiens
  misc_RNA (1)...(19): siRNA sense strand
acacaugccuggagacuua

SEQ ID NO: 1392657 - RNA, 19 nt, Homo sapiens
  misc_RNA (1)...(19): siRNA sense strand
caacaaagcccgaggauau

SEQ ID NO: 1392658 - RNA, 19 nt, Homo sapiens
  misc_RNA (1)...(19): siRNA sense strand
ccaaagaaauucaggaaga

SEQ ID NO: 1392659 - RNA, 19 nt, Homo sapiens
  misc_RNA (1)...(19): siRNA sense strand
cuacauagauuucuucaug

SEQ ID NO: 1392660 - RNA, 19 nt, Homo sapiens
  misc_RNA (1)...(19): siRNA sense strand
ggaaauugaugauauugug

SEQ ID NO: 1392661 - RNA, 19 nt, Homo sapiens
  misc_RNA (1)...(19): siRNA sense strand
aaacucagcuauugccaua

SEQ ID NO: 1392662 - RNA, 19 nt, Homo sapiens
  misc_RNA (1)...(19): siRNA sense strand
gaagauaauucugguugaa

SEQ ID NO: 1392663 - RNA, 19 nt, Homo sapiens
  misc_RNA (1)...(19): siRNA sense strand
caaagauguuucucuguuu

SEQ ID NO: 1392664 - RNA, 19 nt, Homo sapiens
  misc_RNA (1)...(19): siRNA sense strand
guacaagaguggauuaauc

SEQ ID NO: 1392665 - RNA, 19 nt, Homo sapiens
  misc_RNA (1)...(19): siRNA sense strand
ggaagaguguucuaucuca

SEQ ID NO: 1392666 - RNA, 19 nt, Homo sapiens
  misc_RNA (1)...(19): siRNA sense strand
gaaagacaacgaccuuaaa

SEQ ID NO: 1392667 - RNA, 19 nt, Homo sapiens
  misc_RNA (1)...(19): siRNA sense strand
ggaaagacaacgaccuuaa

SEQ ID NO: 1392668 - RNA, 19 nt, Homo sapiens
  misc_RNA (1)...(19): siRNA sense strand
caaagaguuucuacuaaga

SEQ ID NO: 1392669 - RNA, 19 nt, Homo sapiens
  misc_RNA (1)...(19): siRNA sense strand
ccucagugguuucuaauaa

SEQ ID NO: 1392670 - RNA, 19 nt, Homo sapiens
  misc_RNA (1)...(19): siRNA sense strand
ccagugaauuucugaguuu

SEQ ID NO: 1392671 - RNA, 19 nt, Homo sapiens
  misc_RNA (1)...(19): siRNA sense strand
cagggaacauggaaugaua

SEQ ID NO: 1392672 - RNA, 19 nt, Homo sapiens
  misc_RNA (1)...(19): siRNA sense strand
uaagagcgacaaaguauaa

SEQ ID NO: 1392673 - RNA, 19 nt, Homo sapiens
  misc_RNA (1)...(19): siRNA sense strand
gagcaucuuuaacagaauu

SEQ ID NO: 1392674 - RNA, 19 nt, Homo sapiens
  misc_RNA (1)...(19): siRNA sense strand
ccuggagacuuauuuaauu

SEQ ID NO: 1392675 - RNA, 19 nt, Homo sapiens
  misc_RNA (1)...(19): siRNA sense strand
cgacaaaguauaacaaguu

SEQ ID NO: 1392676 - RNA, 19 nt, Homo sapiens
  misc_RNA (1)...(19): siRNA sense strand
ggagcaugguauucaagua

SEQ ID NO: 1392677 - RNA, 19 nt, Homo sapiens
  misc_RNA (1)...(19): siRNA sense strand
gaagaguguucuaucucaa

SEQ ID NO: 1392678 - RNA, 19 nt, Homo sapiens
  misc_RNA (1)...(19): siRNA sense strand
ucaaagaguuucuacuaag

SEQ ID NO: 1392679 - RNA, 19 nt, Homo sapiens
  misc_RNA (1)...(19): siRNA sense strand
gagaacugauaagaagaua

SEQ ID NO: 1392680 - RNA, 19 nt, Homo sapiens
  misc_RNA (1)...(19): siRNA sense strand
gcucuuuacucagggaaua

SEQ ID NO: 1392681 - RNA, 19 nt, Homo sapiens
  misc_RNA (1)...(19): siRNA sense strand
cgggauacauuacuuguug

SEQ ID NO: 1392682 - RNA, 19 nt, Homo sapiens
  misc_RNA (1)...(19): siRNA sense strand
ucgauguccucuuauauuu

SEQ ID NO: 1392683 - RNA, 19 nt, Homo sapiens
  misc_RNA (1)...(19): siRNA sense strand
agauuuaccuaaccaguuu

SEQ ID NO: 1392684 - RNA, 19 nt, Homo sapiens
  misc_RNA (1)...(19): siRNA sense strand
ggaaguaugugaggauugg

SEQ ID NO: 1392685 - RNA, 19 nt, Homo sapiens
  misc_RNA (1)...(19): siRNA sense strand
gauaucagaagugcaauaa

SEQ ID NO: 1392686 - RNA, 19 nt, Homo sapiens
  misc_RNA (1)...(19): siRNA sense strand
gcaccaacaauuaugauga

SEQ ID NO: 1392687 - RNA, 19 nt, Homo sapiens
  misc_RNA (1)...(19): siRNA sense strand
aaacaggguggaucuauuu

SEQ ID NO: 1392688 - RNA, 19 nt, Homo sapiens
  misc_RNA (1)...(19): siRNA sense strand
gaugaucugagaacugaua

SEQ ID NO: 1392689 - RNA, 19 nt, Homo sapiens
  misc_RNA (1)...(19): siRNA sense strand
ggguggaucuauuuuauua

SEQ ID NO: 1392690 - RNA, 19 nt, Homo sapiens
  misc_RNA (1)...(19): siRNA sense strand
uaucagaagugcaauaaac

SEQ ID NO: 1392691 - RNA, 19 nt, Homo sapiens
  misc_RNA (1)...(19): siRNA sense strand
ugugagagccagugaauuu

SEQ ID NO: 1392692 - RNA, 19 nt, Homo sapiens
  misc_RNA (1)...(19): siRNA sense strand
caaaggagcaugguauuca

SEQ ID NO: 1392693 - RNA, 19 nt, Homo sapiens
  misc_RNA (1)...(19): siRNA sense strand
ccggaaaccuggucucuuc

SEQ ID NO: 1392694 - RNA, 19 nt, Homo sapiens
  misc_RNA (1)...(19): siRNA sense strand
gaagcgacacuuuggaaga

SEQ ID NO: 1392695 - RNA, 19 nt, Homo sapiens
  misc_RNA (1)...(19): siRNA sense strand
cgagaggugugaugcauuc

SEQ ID NO: 1392696 - RNA, 19 nt, Homo sapiens
  misc_RNA (1)...(19): siRNA sense strand
cagaugcugugcugucaaa

SEQ ID NO: 1392697 - RNA, 19 nt, Homo sapiens
  misc_RNA (1)...(19): siRNA sense strand
caccaacaauuaugaugaa

SEQ ID NO: 1392698 - RNA, 19 nt, Homo sapiens
  misc_RNA (1)...(19): siRNA sense strand
gaacgggauacauuacuug

SEQ ID NO: 1392699 - RNA, 19 nt, Homo sapiens
  misc_RNA (1)...(19): siRNA sense strand
gaucugagaacugauaaga

SEQ ID NO: 1392700 - RNA, 19 nt, Homo sapiens
  misc_RNA (1)...(19): siRNA sense strand
uaacaagaauggaggaaaa

SEQ ID NO: 1392701 - RNA, 19 nt, Homo sapiens
  misc_RNA (1)...(19): siRNA sense strand
caaguacaagaguggauua

SEQ ID NO: 1392702 - RNA, 19 nt, Homo sapiens
  misc_RNA (1)...(19): siRNA sense strand
gaaaccuggucucuuccuu

SEQ ID NO: 1392703 - RNA, 19 nt, Homo sapiens
  misc_RNA (1)...(19): siRNA sense strand
guuauuguuucccaaagaa

SEQ ID NO: 1392704 - RNA, 19 nt, Homo sapiens
  misc_RNA (1)...(19): siRNA sense strand
uacaugaaguucuaaggaa

SEQ ID NO: 1392705 - RNA, 19 nt, Homo sapiens
  misc_RNA (1)...(19): siRNA sense strand
ucugagaacugauaagaag

SEQ ID NO: 1392706 - RNA, 19 nt, Homo sapiens
  misc_RNA (1)...(19): siRNA sense strand
aauacacgcucuuuacuca

SEQ ID NO: 1392707 - RNA, 19 nt, Homo sapiens
  misc_RNA (1)...(19): siRNA sense strand
caacuuacggccaaggaaa

SEQ ID NO: 1392708 - RNA, 19 nt, Homo sapiens
  misc_RNA (1)...(19): siRNA sense strand
caaagaaauucaggaagag

SEQ ID NO: 1392709 - RNA, 19 nt, Homo sapiens
  misc_RNA (1)...(19): siRNA sense strand
ggagguaguagaaauguca

SEQ ID NO: 1392710 - RNA, 19 nt, Homo sapiens
  misc_RNA (1)...(19): siRNA sense strand
gccagugaauuucugaguu

SEQ ID NO: 1392711 - RNA, 19 nt, Homo sapiens
  misc_RNA (1)...(19): siRNA sense strand
uacaaaugcuuggagauga

SEQ ID NO: 1392712 - RNA, 19 nt, Homo sapiens
  misc_RNA (1)...(19): siRNA sense strand
ugaacuugcugugcauaaa

SEQ ID NO: 1392713 - RNA, 19 nt, Homo sapiens
  misc_RNA (1)...(19): siRNA sense strand
ccucucauuuaucagaaua

SEQ ID NO: 1392714 - RNA, 19 nt, Homo sapiens
  misc_RNA (1)...(19): siRNA sense strand
caagagguccaagcuauug

SEQ ID NO: 1392715 - RNA, 19 nt, Homo sapiens
  misc_RNA (1)...(19): siRNA sense strand
ucgggauucucauacuuua

SEQ ID NO: 1392716 - RNA, 19 nt, Homo sapiens
  misc_RNA (1)...(19): siRNA sense strand
gguuauuguuucccaaaga

SEQ ID NO: 1392717 - RNA, 19 nt, Homo sapiens
  misc_RNA (1)...(19): siRNA sense strand
gccauaccuugcucuacua

SEQ ID NO: 1392718 - RNA, 19 nt, Homo sapiens
  misc_RNA (1)...(19): siRNA sense strand
caaggaggaggaucaaguu

SEQ ID NO: 1392719 - RNA, 19 nt, Homo sapiens
  misc_RNA (1)...(19): siRNA sense strand
ugugaugcauuccaacaaa

SEQ ID NO: 1392720 - RNA, 19 nt, Homo sapiens
  misc_RNA (1)...(19): siRNA sense strand
gaggugugaugcauuccaa

SEQ ID NO: 1392721 - RNA, 19 nt, Homo sapiens
  misc_RNA (1)...(19): siRNA sense strand
aaagauguuucucuguuuc

SEQ ID NO: 1392722 - RNA, 19 nt, Homo sapiens
  misc_RNA (1)...(19): siRNA sense strand
gggauguucuggugauauc

SEQ ID NO: 1392723 - RNA, 19 nt, Homo sapiens
  misc_RNA (1)...(19): siRNA sense strand
ugacaaaacuucucuagag

SEQ ID NO: 1392724 - RNA, 19 nt, Homo sapiens
  misc_RNA (1)...(19): siRNA sense strand
caggaagaguguucuaucu

SEQ ID NO: 1392725 - RNA, 19 nt, Homo sapiens
  misc_RNA (1)...(19): siRNA sense strand
ugaacgggauacauuacuu

SEQ ID NO: 1392726 - RNA, 19 nt, Homo sapiens
  misc_RNA (1)...(19): siRNA sense strand
ggugauaucagaagugcaa

SEQ ID NO: 1392727 - RNA, 19 nt, Homo sapiens
  misc_RNA (1)...(19): siRNA sense strand
agauaauucugguugaaga

SEQ ID NO: 1392728 - RNA, 19 nt, Homo sapiens
  misc_RNA (1)...(19): siRNA sense strand
aaaggagcaugguauucaa

SEQ ID NO: 1392729 - RNA, 19 nt, Homo sapiens
  misc_RNA (1)...(19): siRNA sense strand
aauaugaacgggauacauu

SEQ ID NO: 1392730 - RNA, 19 nt, Homo sapiens
  misc_RNA (1)...(19): siRNA sense strand
cuauagaagcuaacaagaa

SEQ ID NO: 1392731 - RNA, 19 nt, Homo sapiens
  misc_RNA (1)...(19): siRNA sense strand
cgauguccucuuauauuua

SEQ ID NO: 1392732 - RNA, 19 nt, Homo sapiens
  misc_RNA (1)...(19): siRNA sense strand
auuggucgauguccucuua

SEQ ID NO: 1392733 - RNA, 19 nt, Homo sapiens
  misc_RNA (1)...(19): siRNA sense strand
gaaguucuaaggaaguaug

SEQ ID NO: 1392734 - RNA, 19 nt, Homo sapiens
  misc_RNA (1)...(19): siRNA sense strand
ccuguggcaccaacaauua

SEQ ID NO: 1392735 - RNA, 19 nt, Homo sapiens
  misc_RNA (1)...(19): siRNA sense strand
gcgacacuuuggaagauug

SEQ ID NO: 1392736 - RNA, 19 nt, Homo sapiens
  misc_RNA (1)...(19): siRNA sense strand
ggaggaggaucaaguuuuc

SEQ ID NO: 1392737 - RNA, 19 nt, Homo sapiens
  misc_RNA (1)...(19): siRNA sense strand
gggauacauuacuuguuga

SEQ ID NO: 1392738 - RNA, 19 nt, Homo sapiens
  misc_RNA (1)...(19): siRNA sense strand
uaucaaaggagcaugguau

SEQ ID NO: 1392739 - RNA, 19 nt, Homo sapiens
  misc_RNA (1)...(19): siRNA sense strand
aaucaagcuuccauauguu

SEQ ID NO: 1392740 - RNA, 19 nt, Homo sapiens
  misc_RNA (1)...(19): siRNA sense strand
caccaaaacuacauagauu

SEQ ID NO: 1392741 - RNA, 19 nt, Homo sapiens
  misc_RNA (1)...(19): siRNA sense strand
caauaaacagccuccaguu

SEQ ID NO: 1392742 - RNA, 19 nt, Homo sapiens
  misc_RNA (1)...(19): siRNA sense strand
gagcgacaaaguauaacaa

SEQ ID NO: 1392743 - RNA, 19 nt, Homo sapiens
  misc_RNA (1)...(19): siRNA sense strand
ccaaggagacauggaagaa

SEQ ID NO: 1392744 - RNA, 19 nt, Homo sapiens
  misc_RNA (1)...(19): siRNA sense strand
gaauacacgcucuuuacuc

SEQ ID NO: 1392745 - RNA, 19 nt, Homo sapiens
  misc_RNA (1)...(19): siRNA sense strand
caguggagauaauaaucaa

SEQ ID NO: 1392746 - RNA, 19 nt, Homo sapiens
  misc_RNA (1)...(19): siRNA sense strand
gcgacaaaguauaacaagu

SEQ ID NO: 1392747 - RNA, 19 nt, Homo sapiens
  misc_RNA (1)...(19): siRNA sense strand
gcaugguauucaaguacaa

SEQ ID NO: 1392748 - RNA, 19 nt, Homo sapiens
  misc_RNA (1)...(19): siRNA sense strand
ugacagggaacauggaaug

SEQ ID NO: 1392749 - RNA, 19 nt, Homo sapiens
  misc_RNA (1)...(19): siRNA sense strand
ggaauacacgcucuuuacu

SEQ ID NO: 1392750 - RNA, 19 nt, Homo sapiens
  misc_RNA (1)...(19): siRNA sense strand
ucgguugcccucucauuua

SEQ ID NO: 1392751 - RNA, 19 nt, Homo sapiens
  misc_RNA (1)...(19): siRNA sense strand
gagagccagugaauuucug

SEQ ID NO: 1392752 - RNA, 19 nt, Homo sapiens
  misc_RNA (1)...(19): siRNA sense strand
aaaaguaucgggaaaauug

SEQ ID NO: 1392753 - RNA, 19 nt, Homo sapiens
  misc_RNA (1)...(19): siRNA sense strand
gcaugaacuugcugugcau

SEQ ID NO: 1392754 - RNA, 19 nt, Homo sapiens
  misc_RNA (1)...(19): siRNA sense strand
gaaguauguugcugaaauu

SEQ ID NO: 1392755 - RNA, 19 nt, Homo sapiens
  misc_RNA (1)...(19): siRNA sense strand
gaagagacauuguuguucu

SEQ ID NO: 1392756 - RNA, 19 nt, Homo sapiens
  misc_RNA (1)...(19): siRNA sense strand
gaagaucugugcuuuggau

SEQ ID NO: 1392757 - RNA, 19 nt, Homo sapiens
  misc_RNA (1)...(19): siRNA sense strand
cugaagaaauugagaagua

SEQ ID NO: 1392758 - RNA, 19 nt, Homo sapiens
  misc_RNA (1)...(19): siRNA sense strand
gcacauaccaugccuggaa

SEQ ID NO: 1392759 - RNA, 19 nt, Homo sapiens
  misc_RNA (1)...(19): siRNA sense strand
caucguggguuucgacuuu

SEQ ID NO: 1392760 - RNA, 19 nt, Homo sapiens
  misc_RNA (1)...(19): siRNA sense strand
ccauuaagcuggugaucaa

SEQ ID NO: 1392761 - RNA, 19 nt, Homo sapiens
  misc_RNA (1)...(19): siRNA sense strand
gaaagaacagugcggaaga

SEQ ID NO: 1392762 - RNA, 19 nt, Homo sapiens
  misc_RNA (1)...(19): siRNA sense strand
gaucaaggcacuccuggaa

SEQ ID NO: 1392763 - RNA, 19 nt, Homo sapiens
  misc_RNA (1)...(19): siRNA sense strand
guauguugcugaaauugaa

SEQ ID NO: 1392764 - RNA, 19 nt, Homo sapiens
  misc_RNA (1)...(19): siRNA sense strand
agaaguauguugcugaaau

SEQ ID NO: 1392765 - RNA, 19 nt, Homo sapiens
  misc_RNA (1)...(19): siRNA sense strand
cgagaucaaucccucaaga

SEQ ID NO: 1392766 - RNA, 19 nt, Homo sapiens
  misc_RNA (1)...(19): siRNA sense strand
gaaauugagaaguauguug

SEQ ID NO: 1392767 - RNA, 19 nt, Homo sapiens
  misc_RNA (1)...(19): siRNA sense strand
gaacagugcggaagaucug

SEQ ID NO: 1392768 - RNA, 19 nt, Homo sapiens
  misc_RNA (1)...(19): siRNA sense strand
guacaucacccgcuacauc

SEQ ID NO: 1392769 - RNA, 19 nt, Homo sapiens
  misc_RNA (1)...(19): siRNA sense strand
gaagaagucaguggccaaa

SEQ ID NO: 1392770 - RNA, 19 nt, Homo sapiens
  misc_RNA (1)...(19): siRNA sense strand
ugagaaguauguugcugaa

SEQ ID NO: 1392771 - RNA, 19 nt, Homo sapiens
  misc_RNA (1)...(19): siRNA sense strand
gcaaggauagucaucaaca

SEQ ID NO: 1392772 - RNA, 19 nt, Homo sapiens
  misc_RNA (1)...(19): siRNA sense strand
uggccaaacugcaggauga

SEQ ID NO: 1392773 - RNA, 19 nt, Homo sapiens
  misc_RNA (1)...(19): siRNA sense strand
ucaaggcacuccuggaagu

SEQ ID NO: 1392774 - RNA, 19 nt, Homo sapiens
  misc_RNA (1)...(19): siRNA sense strand
gcaggaggccgucaagaag

SEQ ID NO: 1392775 - RNA, 19 nt, Homo sapiens
  misc_RNA (1)...(19): siRNA sense strand
gaagaaauugagaaguaug

SEQ ID NO: 1392776 - RNA, 19 nt, Homo sapiens
  misc_RNA (1)...(19): siRNA sense strand
ggaagagacauuguuguuc

SEQ ID NO: 1392777 - RNA, 19 nt, Homo sapiens
  misc_RNA (1)...(19): siRNA sense strand
gaagaaaacgaaaagaaga

SEQ ID NO: 1392778 - RNA, 19 nt, Homo sapiens
  misc_RNA (1)...(19): siRNA sense strand
cggaagaucugugcuuugg

SEQ ID NO: 1392779 - RNA, 19 nt, Homo sapiens
  misc_RNA (1)...(19): siRNA sense strand
caccgccgaugcaaggaua

SEQ ID NO: 1392780 - RNA, 19 nt, Homo sapiens
  misc_RNA (1)...(19): siRNA sense strand
caaacugcaggaugaaaga

SEQ ID NO: 1392781 - RNA, 19 nt, Homo sapiens
  misc_RNA (1)...(19): siRNA sense strand
cgaggaagagacauuguug

SEQ ID NO: 1392782 - RNA, 19 nt, Homo sapiens
  misc_RNA (1)...(19): siRNA sense strand
aaagaacagugcggaagau

SEQ ID NO: 1392783 - RNA, 19 nt, Homo sapiens
  misc_RNA (1)...(19): siRNA sense strand
uggagaagaacuauacuga

SEQ ID NO: 1392784 - RNA, 19 nt, Homo sapiens
  misc_RNA (1)...(19): siRNA sense strand
gcacuccuaggcucuauca

SEQ ID NO: 1392785 - RNA, 19 nt, Homo sapiens
  misc_RNA (1)...(19): siRNA sense strand
cauugaacuugcugucaug

SEQ ID NO: 1392786 - RNA, 19 nt, Homo sapiens
  misc_RNA (1)...(19): siRNA sense strand
gagaucaaucccucaagau

SEQ ID NO: 1392787 - RNA, 19 nt, Homo sapiens
  misc_RNA (1)...(19): siRNA sense strand
gaucugugcuuuggaugac

SEQ ID NO: 1392788 - RNA, 19 nt, Homo sapiens
  misc_RNA (1)...(19): siRNA sense strand
cuacaucgccagucugaag

SEQ ID NO: 1392789 - RNA, 19 nt, Homo sapiens
  misc_RNA (1)...(19): siRNA sense strand
caaggauagucaucaacag

SEQ ID NO: 1392790 - RNA, 19 nt, Homo sapiens
  misc_RNA (1)...(19): siRNA sense strand
agaagucaguggccaaacu

SEQ ID NO: 1392791 - RNA, 19 nt, Homo sapiens
  misc_RNA (1)...(19): siRNA sense strand
acauugaacuugcugucau

SEQ ID NO: 1392792 - RNA, 19 nt, Homo sapiens
  misc_RNA (1)...(19): siRNA sense strand
aggaagagacauuguuguu

SEQ ID NO: 1392793 - RNA, 19 nt, Homo sapiens
  misc_RNA (1)...(19): siRNA sense strand
agacauuguuguucuuggu

SEQ ID NO: 1392794 - RNA, 19 nt, Homo sapiens
  misc_RNA (1)...(19): siRNA sense strand
cgcaggaggccgucaagaa

SEQ ID NO: 1392795 - RNA, 19 nt, Homo sapiens
  misc_RNA (1)...(19): siRNA sense strand
gaggaagagacauuguugu

SEQ ID NO: 1392796 - RNA, 19 nt, Homo sapiens
  misc_RNA (1)...(19): siRNA sense strand
ugcggaagaucugugcuuu

SEQ ID NO: 1392797 - RNA, 19 nt, Homo sapiens
  misc_RNA (1)...(19): siRNA sense strand
caacgucugcauggccuuu

SEQ ID NO: 1392798 - RNA, 19 nt, Homo sapiens
  misc_RNA (1)...(19): siRNA sense strand
ccaaacugcaggaugaaag

SEQ ID NO: 1392799 - RNA, 19 nt, Homo sapiens
  misc_RNA (1)...(19): siRNA sense strand
gcggaagaucugugcuuug

SEQ ID NO: 1392800 - RNA, 19 nt, Homo sapiens
  misc_RNA (1)...(19): siRNA sense strand
cgacggccaccucuuccaa

SEQ ID NO: 1392801 - RNA, 19 nt, Homo sapiens
  misc_RNA (1)...(19): siRNA sense strand
gguugguguucgaggaaga

SEQ ID NO: 1392802 - RNA, 19 nt, Homo sapiens
  misc_RNA (1)...(19): siRNA sense strand
augcaaggauagucaucaa

SEQ ID NO: 1392803 - RNA, 19 nt, Homo sapiens
  misc_RNA (1)...(19): siRNA sense strand
gaaacaaaagaaagcauca

SEQ ID NO: 1392804 - RNA, 19 nt, Homo sapiens
  misc_RNA (1)...(19): siRNA sense strand
gagaaguauguugcugaaa

SEQ ID NO: 1392805 - RNA, 19 nt, Homo sapiens
  misc_RNA (1)...(19): siRNA sense strand
gaagagacauuguuguucu

SEQ ID NO: 1392806 - RNA, 19 nt, Homo sapiens
  misc_RNA (1)...(19): siRNA sense strand
gaagaucugugcuuuggau

SEQ ID NO: 1392807 - RNA, 19 nt, Homo sapiens
  misc_RNA (1)...(19): siRNA sense strand
caucguggguuucgacuuu

SEQ ID NO: 1392808 - RNA, 19 nt, Homo sapiens
  misc_RNA (1)...(19): siRNA sense strand
gaaagaacagugcggaaga

SEQ ID NO: 1392809 - RNA, 19 nt, Homo sapiens
  misc_RNA (1)...(19): siRNA sense strand
gaacagugcggaagaucug

SEQ ID NO: 1392810 - RNA, 19 nt, Homo sapiens
  misc_RNA (1)...(19): siRNA sense strand
guacaucacccgcuacauc

SEQ ID NO: 1392811 - RNA, 19 nt, Homo sapiens
  misc_RNA (1)...(19): siRNA sense strand
gaagaagucaguggccaaa

SEQ ID NO: 1392812 - RNA, 19 nt, Homo sapiens
  misc_RNA (1)...(19): siRNA sense strand
gcaaggauagucaucaaca

SEQ ID NO: 1392813 - RNA, 19 nt, Homo sapiens
  misc_RNA (1)...(19): siRNA sense strand
uggccaaacugcaggauga

SEQ ID NO: 1392814 - RNA, 19 nt, Homo sapiens
  misc_RNA (1)...(19): siRNA sense strand
gcaggaggccgucaagaag

SEQ ID NO: 1392815 - RNA, 19 nt, Homo sapiens
  misc_RNA (1)...(19): siRNA sense strand
ggaagagacauuguuguuc

SEQ ID NO: 1392816 - RNA, 19 nt, Homo sapiens
  misc_RNA (1)...(19): siRNA sense strand
cggaagaucugugcuuugg

SEQ ID NO: 1392817 - RNA, 19 nt, Homo sapiens
  misc_RNA (1)...(19): siRNA sense strand
caccgccgaugcaaggaua

SEQ ID NO: 1392818 - RNA, 19 nt, Homo sapiens
  misc_RNA (1)...(19): siRNA sense strand
cgaggaagagacauuguug

SEQ ID NO: 1392819 - RNA, 19 nt, Homo sapiens
  misc_RNA (1)...(19): siRNA sense strand
caaacugcaggaugaaaga

SEQ ID NO: 1392820 - RNA, 19 nt, Homo sapiens
  misc_RNA (1)...(19): siRNA sense strand
aaagaacagugcggaagau

SEQ ID NO: 1392821 - RNA, 19 nt, Homo sapiens
  misc_RNA (1)...(19): siRNA sense strand
gaucugugcuuuggaugac

SEQ ID NO: 1392822 - RNA, 19 nt, Homo sapiens
  misc_RNA (1)...(19): siRNA sense strand
cuacaucgccagucugaag

SEQ ID NO: 1392823 - RNA, 19 nt, Homo sapiens
  misc_RNA (1)...(19): siRNA sense strand
agaagucaguggccaaacu

SEQ ID NO: 1392824 - RNA, 19 nt, Homo sapiens
  misc_RNA (1)...(19): siRNA sense strand
caaggauagucaucaacag

SEQ ID NO: 1392825 - RNA, 19 nt, Homo sapiens
  misc_RNA (1)...(19): siRNA sense strand
aggaagagacauuguuguu

SEQ ID NO: 1392826 - RNA, 19 nt, Homo sapiens
  misc_RNA (1)...(19): siRNA sense strand
agacauuguuguucuuggu

SEQ ID NO: 1392827 - RNA, 19 nt, Homo sapiens
  misc_RNA (1)...(19): siRNA sense strand
gaggaagagacauuguugu

SEQ ID NO: 1392828 - RNA, 19 nt, Homo sapiens
  misc_RNA (1)...(19): siRNA sense strand
cgcaggaggccgucaagaa

SEQ ID NO: 1392829 - RNA, 19 nt, Homo sapiens
  misc_RNA (1)...(19): siRNA sense strand
ugcggaagaucugugcuuu

SEQ ID NO: 1392830 - RNA, 19 nt, Homo sapiens
  misc_RNA (1)...(19): siRNA sense strand
caacgucugcauggccuuu

SEQ ID NO: 1392831 - RNA, 19 nt, Homo sapiens
  misc_RNA (1)...(19): siRNA sense strand
ccaaacugcaggaugaaag

SEQ ID NO: 1392832 - RNA, 19 nt, Homo sapiens
  misc_RNA (1)...(19): siRNA sense strand
gcggaagaucugugcuuug

SEQ ID NO: 1392833 - RNA, 19 nt, Homo sapiens
  misc_RNA (1)...(19): siRNA sense strand
cgacggccaccucuuccaa

SEQ ID NO: 1392834 - RNA, 19 nt, Homo sapiens
  misc_RNA (1)...(19): siRNA sense strand
gguugguguucgaggaaga

SEQ ID NO: 1392835 - RNA, 19 nt, Homo sapiens
  misc_RNA (1)...(19): siRNA sense strand
augcaaggauagucaucaa

SEQ ID NO: 1392836 - RNA, 19 nt, Homo sapiens
  misc_RNA (1)...(19): siRNA sense strand
gaagaaaggugucaagaac

SEQ ID NO: 1392837 - RNA, 19 nt, Homo sapiens
  misc_RNA (1)...(19): siRNA sense strand
caucacgccuagagaauua

SEQ ID NO: 1392838 - RNA, 19 nt, Homo sapiens
  misc_RNA (1)...(19): siRNA sense strand
cgacaaagcuugggcugaa

SEQ ID NO: 1392839 - RNA, 19 nt, Homo sapiens
  misc_RNA (1)...(19): siRNA sense strand
cagcagaccucgcaggaaa

SEQ ID NO: 1392840 - RNA, 19 nt, Homo sapiens
  misc_RNA (1)...(19): siRNA sense strand
gaugagaacuugaugaaaa

SEQ ID NO: 1392841 - RNA, 19 nt, Homo sapiens
  misc_RNA (1)...(19): siRNA sense strand
gggagaagguggccucguu

SEQ ID NO: 1392842 - RNA, 19 nt, Homo sapiens
  misc_RNA (1)...(19): siRNA sense strand
gguccucucuccuuuggua

SEQ ID NO: 1392843 - RNA, 19 nt, Homo sapiens
  misc_RNA (1)...(19): siRNA sense strand
ucacggcgcugaccucaca

SEQ ID NO: 1392844 - RNA, 19 nt, Homo sapiens
  misc_RNA (1)...(19): siRNA sense strand
gcaaacaacagaacuacca

SEQ ID NO: 1392845 - RNA, 19 nt, Homo sapiens
  misc_RNA (1)...(19): siRNA sense strand
ggaaacaucacgccuagag

SEQ ID NO: 1392846 - RNA, 19 nt, Homo sapiens
  misc_RNA (1)...(19): siRNA sense strand
gagcgcagcuuccucuacu

SEQ ID NO: 1392847 - RNA, 19 nt, Homo sapiens
  misc_RNA (1)...(19): siRNA sense strand
ugccaaaccuggagaacuu

SEQ ID NO: 1392848 - RNA, 19 nt, Homo sapiens
  misc_RNA (1)...(19): siRNA sense strand
aaacaucacgccuagagaa

SEQ ID NO: 1392849 - RNA, 19 nt, Homo sapiens
  misc_RNA (1)...(19): siRNA sense strand
gacgacauguccaccaaau

SEQ ID NO: 1392850 - RNA, 19 nt, Homo sapiens
  misc_RNA (1)...(19): siRNA sense strand
caacugguccucucuccuu

SEQ ID NO: 1392851 - RNA, 19 nt, Homo sapiens
  misc_RNA (1)...(19): siRNA sense strand
gaaacccuccauuaccaaa

SEQ ID NO: 1392852 - RNA, 19 nt, Homo sapiens
  misc_RNA (1)...(19): siRNA sense strand
ccucacagguggagaacau

SEQ ID NO: 1392853 - RNA, 19 nt, Homo sapiens
  misc_RNA (1)...(19): siRNA sense strand
cccaggaaacccuccauua

SEQ ID NO: 1392854 - RNA, 19 nt, Homo sapiens
  misc_RNA (1)...(19): siRNA sense strand
cgacauguccaccaaaucu

SEQ ID NO: 1392855 - RNA, 19 nt, Homo sapiens
  misc_RNA (1)...(19): siRNA sense strand
cgucgccgcugaugccaaa

SEQ ID NO: 1392856 - RNA, 19 nt, Homo sapiens
  misc_RNA (1)...(19): siRNA sense strand
gaaacaucacgccuagaga

SEQ ID NO: 1392857 - RNA, 19 nt, Homo sapiens
  misc_RNA (1)...(19): siRNA sense strand
agaagaaaggugucaagaa

SEQ ID NO: 1392858 - RNA, 19 nt, Homo sapiens
  misc_RNA (1)...(19): siRNA sense strand
ucgccaaggacuauuauaa

SEQ ID NO: 1392859 - RNA, 19 nt, Homo sapiens
  misc_RNA (1)...(19): siRNA sense strand
ggacagcgccaaccccuuu

SEQ ID NO: 1392860 - RNA, 19 nt, Homo sapiens
  misc_RNA (1)...(19): siRNA sense strand
auuauaacccgcagccuua

SEQ ID NO: 1392861 - RNA, 19 nt, Homo sapiens
  misc_RNA (1)...(19): siRNA sense strand
ccaggaaacccuccauuac

SEQ ID NO: 1392862 - RNA, 19 nt, Homo sapiens
  misc_RNA (1)...(19): siRNA sense strand
ggaaacccuccauuaccaa

SEQ ID NO: 1392863 - RNA, 19 nt, Homo sapiens
  misc_RNA (1)...(19): siRNA sense strand
ggccaaguaugaugagaac

SEQ ID NO: 1392864 - RNA, 19 nt, Homo sapiens
  misc_RNA (1)...(19): siRNA sense strand
gaccucuccugacgacaug

SEQ ID NO: 1392865 - RNA, 19 nt, Homo sapiens
  misc_RNA (1)...(19): siRNA sense strand
ccgcucaccuuccuacagu

SEQ ID NO: 1392866 - RNA, 19 nt, Homo sapiens
  misc_RNA (1)...(19): siRNA sense strand
gagaaggccgacaaagcuu

SEQ ID NO: 1392867 - RNA, 19 nt, Homo sapiens
  misc_RNA (1)...(19): siRNA sense strand
cgacagcuucuccaaguuc

SEQ ID NO: 1392868 - RNA, 19 nt, Homo sapiens
  misc_RNA (1)...(19): siRNA sense strand
gcagaagaaaggugucaag

SEQ ID NO: 1392869 - RNA, 19 nt, Homo sapiens
  misc_RNA (1)...(19): siRNA sense strand
cuggagaacuuucccuaca

SEQ ID NO: 1392870 - RNA, 19 nt, Homo sapiens
  misc_RNA (1)...(19): siRNA sense strand
gcaaaggggacacccauga

SEQ ID NO: 1392871 - RNA, 19 nt, Homo sapiens
  misc_RNA (1)...(19): siRNA sense strand
accaaaaccucgccaagua

SEQ ID NO: 1392872 - RNA, 19 nt, Homo sapiens
  misc_RNA (1)...(19): siRNA sense strand
cagcagcuuuugacuguuu

SEQ ID NO: 1392873 - RNA, 19 nt, Homo sapiens
  misc_RNA (1)...(19): siRNA sense strand
gaagcugcagaacgacauu

SEQ ID NO: 1392874 - RNA, 19 nt, Homo sapiens
  misc_RNA (1)...(19): siRNA sense strand
gaguacuccucccuaugug

SEQ ID NO: 1392875 - RNA, 19 nt, Homo sapiens
  misc_RNA (1)...(19): siRNA sense strand
guguccaccuguucuguga

SEQ ID NO: 1392876 - RNA, 19 nt, Homo sapiens
  misc_RNA (1)...(19): siRNA sense strand
aggaaacccuccauuacca

SEQ ID NO: 1392877 - RNA, 19 nt, Homo sapiens
  misc_RNA (1)...(19): siRNA sense strand
gccaaggacuauuauaacc

SEQ ID NO: 1392878 - RNA, 19 nt, Homo sapiens
  misc_RNA (1)...(19): siRNA sense strand
ccaaaucugacgacuccuu

SEQ ID NO: 1392879 - RNA, 19 nt, Homo sapiens
  misc_RNA (1)...(19): siRNA sense strand
ugagaaggccgacaaagcu

SEQ ID NO: 1392880 - RNA, 19 nt, Homo sapiens
  misc_RNA (1)...(19): siRNA sense strand
ggcagcggguccagaaucu

SEQ ID NO: 1392881 - RNA, 19 nt, Homo sapiens
  misc_RNA (1)...(19): siRNA sense strand
cgaagggagcggcuacuca

SEQ ID NO: 1392882 - RNA, 19 nt, Homo sapiens
  misc_RNA (1)...(19): siRNA sense strand
cagaagaaaggugucaaga

SEQ ID NO: 1392883 - RNA, 19 nt, Homo sapiens
  misc_RNA (1)...(19): siRNA sense strand
cucgacagcuucuccaagu

SEQ ID NO: 1392884 - RNA, 19 nt, Homo sapiens
  misc_RNA (1)...(19): siRNA sense strand
gcagcaagccacccuucuc

SEQ ID NO: 1392885 - RNA, 19 nt, Homo sapiens
  misc_RNA (1)...(19): siRNA sense strand
gcagaccucgcaggaaaca

SEQ ID NO: 1392886 - RNA, 19 nt, Homo sapiens
  misc_RNA (1)...(19): siRNA sense strand
gacaaagcuugggcugaag

SEQ ID NO: 1392887 - RNA, 19 nt, Homo sapiens
  misc_RNA (1)...(19): siRNA sense strand
cagcggguccagaaucuuc

SEQ ID NO: 1392888 - RNA, 19 nt, Homo sapiens
  misc_RNA (1)...(19): siRNA sense strand
gaaggaggaccuggaagcu

SEQ ID NO: 1392889 - RNA, 19 nt, Homo sapiens
  misc_RNA (1)...(19): siRNA sense strand
cugcagggguggccaagua

SEQ ID NO: 1392890 - RNA, 19 nt, Homo sapiens
  misc_RNA (1)...(19): siRNA sense strand
cagcagcaagcccuucaga

SEQ ID NO: 1392891 - RNA, 19 nt, Homo sapiens
  misc_RNA (1)...(19): siRNA sense strand
gcucaccuuccuacaguuc

SEQ ID NO: 1392892 - RNA, 19 nt, Homo sapiens
  misc_RNA (1)...(19): siRNA sense strand
caucacgccuagagaauua

SEQ ID NO: 1392893 - RNA, 19 nt, Homo sapiens
  misc_RNA (1)...(19): siRNA sense strand
cagcagaccucgcaggaaa

SEQ ID NO: 1392894 - RNA, 19 nt, Homo sapiens
  misc_RNA (1)...(19): siRNA sense strand
gaugagaacuugaugaaaa

SEQ ID NO: 1392895 - RNA, 19 nt, Homo sapiens
  misc_RNA (1)...(19): siRNA sense strand
gcaaacaacagaacuacca

SEQ ID NO: 1392896 - RNA, 19 nt, Homo sapiens
  misc_RNA (1)...(19): siRNA sense strand
ggaaacaucacgccuagag

SEQ ID NO: 1392897 - RNA, 19 nt, Homo sapiens
  misc_RNA (1)...(19): siRNA sense strand
aaacaucacgccuagagaa

SEQ ID NO: 1392898 - RNA, 19 nt, Homo sapiens
  misc_RNA (1)...(19): siRNA sense strand
gaaacaucacgccuagaga

SEQ ID NO: 1392899 - RNA, 19 nt, Homo sapiens
  misc_RNA (1)...(19): siRNA sense strand
ucgccaaggacuauuauaa

SEQ ID NO: 1392900 - RNA, 19 nt, Homo sapiens
  misc_RNA (1)...(19): siRNA sense strand
auuauaacccgcagccuua

SEQ ID NO: 1392901 - RNA, 19 nt, Homo sapiens
  misc_RNA (1)...(19): siRNA sense strand
ggccaaguaugaugagaac

SEQ ID NO: 1392902 - RNA, 19 nt, Homo sapiens
  misc_RNA (1)...(19): siRNA sense strand
gaagcugcagaacgacauu

SEQ ID NO: 1392903 - RNA, 19 nt, Homo sapiens
  misc_RNA (1)...(19): siRNA sense strand
gccaaggacuauuauaacc

SEQ ID NO: 1392904 - RNA, 19 nt, Homo sapiens
  misc_RNA (1)...(19): siRNA sense strand
gcagaccucgcaggaaaca

SEQ ID NO: 1392905 - RNA, 19 nt, Homo sapiens
  misc_RNA (1)...(19): siRNA sense strand
cugcagggguggccaagua

SEQ ID NO: 1392906 - RNA, 19 nt, Homo sapiens
  misc_RNA (1)...(19): siRNA sense strand
gaagaaaggugucaagaac

SEQ ID NO: 1392907 - RNA, 19 nt, Homo sapiens
  misc_RNA (1)...(19): siRNA sense strand
caucacgccuagagaauua

SEQ ID NO: 1392908 - RNA, 19 nt, Homo sapiens
  misc_RNA (1)...(19): siRNA sense strand
cgacaaagcuugggcugaa

SEQ ID NO: 1392909 - RNA, 19 nt, Homo sapiens
  misc_RNA (1)...(19): siRNA sense strand
cagcagaccucgcaggaaa

SEQ ID NO: 1392910 - RNA, 19 nt, Homo sapiens
  misc_RNA (1)...(19): siRNA sense strand
gaugagaacuugaugaaaa

SEQ ID NO: 1392911 - RNA, 19 nt, Homo sapiens
  misc_RNA (1)...(19): siRNA sense strand
gggagaagguggccucguu

SEQ ID NO: 1392912 - RNA, 19 nt, Homo sapiens
  misc_RNA (1)...(19): siRNA sense strand
gguccucucuccuuuggua

SEQ ID NO: 1392913 - RNA, 19 nt, Homo sapiens
  misc_RNA (1)...(19): siRNA sense strand
ucacggcgcugaccucaca

SEQ ID NO: 1392914 - RNA, 19 nt, Homo sapiens
  misc_RNA (1)...(19): siRNA sense strand
gcaaacaacagaacuacca

SEQ ID NO: 1392915 - RNA, 19 nt, Homo sapiens
  misc_RNA (1)...(19): siRNA sense strand
ggaaacaucacgccuagag

SEQ ID NO: 1392916 - RNA, 19 nt, Homo sapiens
  misc_RNA (1)...(19): siRNA sense strand
gagcgcagcuuccucuacu

SEQ ID NO: 1392917 - RNA, 19 nt, Homo sapiens
  misc_RNA (1)...(19): siRNA sense strand
ugccaaaccuggagaacuu

SEQ ID NO: 1392918 - RNA, 19 nt, Homo sapiens
  misc_RNA (1)...(19): siRNA sense strand
aaacaucacgccuagagaa

SEQ ID NO: 1392919 - RNA, 19 nt, Homo sapiens
  misc_RNA (1)...(19): siRNA sense strand
gacgacauguccaccaaau

SEQ ID NO: 1392920 - RNA, 19 nt, Homo sapiens
  misc_RNA (1)...(19): siRNA sense strand
caacugguccucucuccuu

SEQ ID NO: 1392921 - RNA, 19 nt, Homo sapiens
  misc_RNA (1)...(19): siRNA sense strand
gaaacccuccauuaccaaa

SEQ ID NO: 1392922 - RNA, 19 nt, Homo sapiens
  misc_RNA (1)...(19): siRNA sense strand
ccucacagguggagaacau

SEQ ID NO: 1392923 - RNA, 19 nt, Homo sapiens
  misc_RNA (1)...(19): siRNA sense strand
cccaggaaacccuccauua

SEQ ID NO: 1392924 - RNA, 19 nt, Homo sapiens
  misc_RNA (1)...(19): siRNA sense strand
cgacauguccaccaaaucu

SEQ ID NO: 1392925 - RNA, 19 nt, Homo sapiens
  misc_RNA (1)...(19): siRNA sense strand
cgucgccgcugaugccaaa

SEQ ID NO: 1392926 - RNA, 19 nt, Homo sapiens
  misc_RNA (1)...(19): siRNA sense strand
gaaacaucacgccuagaga

SEQ ID NO: 1392927 - RNA, 19 nt, Homo sapiens
  misc_RNA (1)...(19): siRNA sense strand
agaagaaaggugucaagaa

SEQ ID NO: 1392928 - RNA, 19 nt, Homo sapiens
  misc_RNA (1)...(19): siRNA sense strand
ucgccaaggacuauuauaa

SEQ ID NO: 1392929 - RNA, 19 nt, Homo sapiens
  misc_RNA (1)...(19): siRNA sense strand
ggacagcgccaaccccuuu

SEQ ID NO: 1392930 - RNA, 19 nt, Homo sapiens
  misc_RNA (1)...(19): siRNA sense strand
auuauaacccgcagccuua

SEQ ID NO: 1392931 - RNA, 19 nt, Homo sapiens
  misc_RNA (1)...(19): siRNA sense strand
ccaggaaacccuccauuac

SEQ ID NO: 1392932 - RNA, 19 nt, Homo sapiens
  misc_RNA (1)...(19): siRNA sense strand
ggaaacccuccauuaccaa

SEQ ID NO: 1392933 - RNA, 19 nt, Homo sapiens
  misc_RNA (1)...(19): siRNA sense strand
ggccaaguaugaugagaac

SEQ ID NO: 1392934 - RNA, 19 nt, Homo sapiens
  misc_RNA (1)...(19): siRNA sense strand
gaccucuccugacgacaug

SEQ ID NO: 1392935 - RNA, 19 nt, Homo sapiens
  misc_RNA (1)...(19): siRNA sense strand
ccgcucaccuuccuacagu

SEQ ID NO: 1392936 - RNA, 19 nt, Homo sapiens
  misc_RNA (1)...(19): siRNA sense strand
gagaaggccgacaaagcuu

SEQ ID NO: 1392937 - RNA, 19 nt, Homo sapiens
  misc_RNA (1)...(19): siRNA sense strand
cgacagcuucuccaaguuc

SEQ ID NO: 1392938 - RNA, 19 nt, Homo sapiens
  misc_RNA (1)...(19): siRNA sense strand
gcagaagaaaggugucaag

SEQ ID NO: 1392939 - RNA, 19 nt, Homo sapiens
  misc_RNA (1)...(19): siRNA sense strand
cuggagaacuuucccuaca

SEQ ID NO: 1392940 - RNA, 19 nt, Homo sapiens
  misc_RNA (1)...(19): siRNA sense strand
gcaaaggggacacccauga

SEQ ID NO: 1392941 - RNA, 19 nt, Homo sapiens
  misc_RNA (1)...(19): siRNA sense strand
accaaaaccucgccaagua

SEQ ID NO: 1392942 - RNA, 19 nt, Homo sapiens
  misc_RNA (1)...(19): siRNA sense strand
cagcagcuuuugacuguuu

SEQ ID NO: 1392943 - RNA, 19 nt, Homo sapiens
  misc_RNA (1)...(19): siRNA sense strand
gaagcugcagaacgacauu

SEQ ID NO: 1392944 - RNA, 19 nt, Homo sapiens
  misc_RNA (1)...(19): siRNA sense strand
gaguacuccucccuaugug

SEQ ID NO: 1392945 - RNA, 19 nt, Homo sapiens
  misc_RNA (1)...(19): siRNA sense strand
guguccaccuguucuguga

SEQ ID NO: 1392946 - RNA, 19 nt, Homo sapiens
  misc_RNA (1)...(19): siRNA sense strand
aggaaacccuccauuacca

SEQ ID NO: 1392947 - RNA, 19 nt, Homo sapiens
  misc_RNA (1)...(19): siRNA sense strand
gccaaggacuauuauaacc

SEQ ID NO: 1392948 - RNA, 19 nt, Homo sapiens
  misc_RNA (1)...(19): siRNA sense strand
ccaaaucugacgacuccuu

SEQ ID NO: 1392949 - RNA, 19 nt, Homo sapiens
  misc_RNA (1)...(19): siRNA sense strand
ugagaaggccgacaaagcu

SEQ ID NO: 1392950 - RNA, 19 nt, Homo sapiens
  misc_RNA (1)...(19): siRNA sense strand
ggcagcggguccagaaucu

SEQ ID NO: 1392951 - RNA, 19 nt, Homo sapiens
  misc_RNA (1)...(19): siRNA sense strand
cgaagggagcggcuacuca

SEQ ID NO: 1392952 - RNA, 19 nt, Homo sapiens
  misc_RNA (1)...(19): siRNA sense strand
cagaagaaaggugucaaga

SEQ ID NO: 1392953 - RNA, 19 nt, Homo sapiens
  misc_RNA (1)...(19): siRNA sense strand
cucgacagcuucuccaagu

SEQ ID NO: 1392954 - RNA, 19 nt, Homo sapiens
  misc_RNA (1)...(19): siRNA sense strand
gcagcaagccacccuucuc

SEQ ID NO: 1392955 - RNA, 19 nt, Homo sapiens
  misc_RNA (1)...(19): siRNA sense strand
gcagaccucgcaggaaaca

SEQ ID NO: 1392956 - RNA, 19 nt, Homo sapiens
  misc_RNA (1)...(19): siRNA sense strand
gacaaagcuugggcugaag

SEQ ID NO: 1392957 - RNA, 19 nt, Homo sapiens
  misc_RNA (1)...(19): siRNA sense strand
cagcggguccagaaucuuc

SEQ ID NO: 1392958 - RNA, 19 nt, Homo sapiens
  misc_RNA (1)...(19): siRNA sense strand
gaaggaggaccuggaagcu

SEQ ID NO: 1392959 - RNA, 19 nt, Homo sapiens
  misc_RNA (1)...(19): siRNA sense strand
cugcagggguggccaagua

SEQ ID NO: 1392960 - RNA, 19 nt, Homo sapiens
  misc_RNA (1)...(19): siRNA sense strand
cagcagcaagcccuucaga

SEQ ID NO: 1392961 - RNA, 19 nt, Homo sapiens
  misc_RNA (1)...(19): siRNA sense strand
gcucaccuuccuacaguuc

SEQ ID NO: 1392962 - RNA, 19 nt, Homo sapiens
  misc_RNA (1)...(19): siRNA sense strand
gcuaaacccuguucuaaua

SEQ ID NO: 1392963 - RNA, 19 nt, Homo sapiens
  misc_RNA (1)...(19): siRNA sense strand
gaaaugacccugaauguga

SEQ ID NO: 1392964 - RNA, 19 nt, Homo sapiens
  misc_RNA (1)...(19): siRNA sense strand
ccaaagagaacacaaauaa

SEQ ID NO: 1392965 - RNA, 19 nt, Homo sapiens
  misc_RNA (1)...(19): siRNA sense strand
gaaauuaccacauugaaga

SEQ ID NO: 1392966 - RNA, 19 nt, Homo sapiens
  misc_RNA (1)...(19): siRNA sense strand
cuacacagauugaggcuaa

SEQ ID NO: 1392967 - RNA, 19 nt, Homo sapiens
  misc_RNA (1)...(19): siRNA sense strand
ggaucaacuuggagauuua

SEQ ID NO: 1392968 - RNA, 19 nt, Homo sapiens
  misc_RNA (1)...(19): siRNA sense strand
caaauaaauuggacagugu

SEQ ID NO: 1392969 - RNA, 19 nt, Homo sapiens
  misc_RNA (1)...(19): siRNA sense strand
gcaaagaugccgucagcua

SEQ ID NO: 1392970 - RNA, 19 nt, Homo sapiens
  misc_RNA (1)...(19): siRNA sense strand
gauccuggcuuuggaauau

SEQ ID NO: 1392971 - RNA, 19 nt, Homo sapiens
  misc_RNA (1)...(19): siRNA sense strand
uguaaaggcuggugaaaga

SEQ ID NO: 1392972 - RNA, 19 nt, Homo sapiens
  misc_RNA (1)...(19): siRNA sense strand
guacuauugucccuucuaa

SEQ ID NO: 1392973 - RNA, 19 nt, Homo sapiens
  misc_RNA (1)...(19): siRNA sense strand
gaauggcaguucuuguaaa

SEQ ID NO: 1392974 - RNA, 19 nt, Homo sapiens
  misc_RNA (1)...(19): siRNA sense strand
gauguuggacugaaugaua

SEQ ID NO: 1392975 - RNA, 19 nt, Homo sapiens
  misc_RNA (1)...(19): siRNA sense strand
gaucuuagaccacgagcua

SEQ ID NO: 1392976 - RNA, 19 nt, Homo sapiens
  misc_RNA (1)...(19): siRNA sense strand
gguauuguccuucuuguaa

SEQ ID NO: 1392977 - RNA, 19 nt, Homo sapiens
  misc_RNA (1)...(19): siRNA sense strand
ggugaaagacucaagauga

SEQ ID NO: 1392978 - RNA, 19 nt, Homo sapiens
  misc_RNA (1)...(19): siRNA sense strand
cgaagcagguguucacaga

SEQ ID NO: 1392979 - RNA, 19 nt, Homo sapiens
  misc_RNA (1)...(19): siRNA sense strand
aagcauaaauccaaagaga

SEQ ID NO: 1392980 - RNA, 19 nt, Homo sapiens
  misc_RNA (1)...(19): siRNA sense strand
gggaauggcuuguguuggu

SEQ ID NO: 1392981 - RNA, 19 nt, Homo sapiens
  misc_RNA (1)...(19): siRNA sense strand
agaaagcgguacucuagaa

SEQ ID NO: 1392982 - RNA, 19 nt, Homo sapiens
  misc_RNA (1)...(19): siRNA sense strand
gcagaaauuaccacauuga

SEQ ID NO: 1392983 - RNA, 19 nt, Homo sapiens
  misc_RNA (1)...(19): siRNA sense strand
acaaagaggauucugguuu

SEQ ID NO: 1392984 - RNA, 19 nt, Homo sapiens
  misc_RNA (1)...(19): siRNA sense strand
ggaauucauggucgaagua

SEQ ID NO: 1392985 - RNA, 19 nt, Homo sapiens
  misc_RNA (1)...(19): siRNA sense strand
uguacuggcugguggauuu

SEQ ID NO: 1392986 - RNA, 19 nt, Homo sapiens
  misc_RNA (1)...(19): siRNA sense strand
ccagaaagcgguacucuag

SEQ ID NO: 1392987 - RNA, 19 nt, Homo sapiens
  misc_RNA (1)...(19): siRNA sense strand
gagagaauguacuauuguc

SEQ ID NO: 1392988 - RNA, 19 nt, Homo sapiens
  misc_RNA (1)...(19): siRNA sense strand
acaugcagcuucuguguga

SEQ ID NO: 1392989 - RNA, 19 nt, Homo sapiens
  misc_RNA (1)...(19): siRNA sense strand
gcucgugcccgucuuauug

SEQ ID NO: 1392990 - RNA, 19 nt, Homo sapiens
  misc_RNA (1)...(19): siRNA sense strand
gaagacguuauuuaccaua

SEQ ID NO: 1392991 - RNA, 19 nt, Homo sapiens
  misc_RNA (1)...(19): siRNA sense strand
aaacuccacugaagaaugg

SEQ ID NO: 1392992 - RNA, 19 nt, Homo sapiens
  misc_RNA (1)...(19): siRNA sense strand
gaaagcgguacucuagaaa

SEQ ID NO: 1392993 - RNA, 19 nt, Homo sapiens
  misc_RNA (1)...(19): siRNA sense strand
gauacagguucgcaccauu

SEQ ID NO: 1392994 - RNA, 19 nt, Homo sapiens
  misc_RNA (1)...(19): siRNA sense strand
agaaaugaaugucaaggau

SEQ ID NO: 1392995 - RNA, 19 nt, Homo sapiens
  misc_RNA (1)...(19): siRNA sense strand
guauuguccuucuuguaaa

SEQ ID NO: 1392996 - RNA, 19 nt, Homo sapiens
  misc_RNA (1)...(19): siRNA sense strand
guaauguggcuuaucauau

SEQ ID NO: 1392997 - RNA, 19 nt, Homo sapiens
  misc_RNA (1)...(19): siRNA sense strand
gaacuucgugugaaaauuu

SEQ ID NO: 1392998 - RNA, 19 nt, Homo sapiens
  misc_RNA (1)...(19): siRNA sense strand
gcgguacucuagaaaugaa

SEQ ID NO: 1392999 - RNA, 19 nt, Homo sapiens
  misc_RNA (1)...(19): siRNA sense strand
cagaagaggaauacuggua

SEQ ID NO: 1393000 - RNA, 19 nt, Homo sapiens
  misc_RNA (1)...(19): siRNA sense strand
aauguaauguggcuuauca

SEQ ID NO: 1393001 - RNA, 19 nt, Homo sapiens
  misc_RNA (1)...(19): siRNA sense strand
gguaggaccuuccaaucag

SEQ ID NO: 1393002 - RNA, 19 nt, Homo sapiens
  misc_RNA (1)...(19): siRNA sense strand
uggaucaacuuggagauuu

SEQ ID NO: 1393003 - RNA, 19 nt, Homo sapiens
  misc_RNA (1)...(19): siRNA sense strand
cauauuuacugucugaauc

SEQ ID NO: 1393004 - RNA, 19 nt, Homo sapiens
  misc_RNA (1)...(19): siRNA sense strand
augcagaaauuaccacauu

SEQ ID NO: 1393005 - RNA, 19 nt, Homo sapiens
  misc_RNA (1)...(19): siRNA sense strand
ggugaugugguaaugguua

SEQ ID NO: 1393006 - RNA, 19 nt, Homo sapiens
  misc_RNA (1)...(19): siRNA sense strand
aaauguuggugauguggua

SEQ ID NO: 1393007 - RNA, 19 nt, Homo sapiens
  misc_RNA (1)...(19): siRNA sense strand
gaagcacacauacauagug

SEQ ID NO: 1393008 - RNA, 19 nt, Homo sapiens
  misc_RNA (1)...(19): siRNA sense strand
uacuagagcuucugaugga

SEQ ID NO: 1393009 - RNA, 19 nt, Homo sapiens
  misc_RNA (1)...(19): siRNA sense strand
uaugaugaauacccagaaa

SEQ ID NO: 1393010 - RNA, 19 nt, Homo sapiens
  misc_RNA (1)...(19): siRNA sense strand
ggaaaauggauauaccuua

SEQ ID NO: 1393011 - RNA, 19 nt, Homo sapiens
  misc_RNA (1)...(19): siRNA sense strand
uggauaaagucccagaaga

SEQ ID NO: 1393012 - RNA, 19 nt, Homo sapiens
  misc_RNA (1)...(19): siRNA sense strand
gaacuaaauguuggugaug

SEQ ID NO: 1393013 - RNA, 19 nt, Homo sapiens
  misc_RNA (1)...(19): siRNA sense strand
uaauaguccaccuaaagua

SEQ ID NO: 1393014 - RNA, 19 nt, Homo sapiens
  misc_RNA (1)...(19): siRNA sense strand
acgagagaauguacuauug

SEQ ID NO: 1393015 - RNA, 19 nt, Homo sapiens
  misc_RNA (1)...(19): siRNA sense strand
uaaagucccagaagaggaa

SEQ ID NO: 1393016 - RNA, 19 nt, Homo sapiens
  misc_RNA (1)...(19): siRNA sense strand
uccaagacgugcaccauug

SEQ ID NO: 1393017 - RNA, 19 nt, Homo sapiens
  misc_RNA (1)...(19): siRNA sense strand
gcauaaauccaaagagaac

SEQ ID NO: 1393018 - RNA, 19 nt, Homo sapiens
  misc_RNA (1)...(19): siRNA sense strand
ggauaaagucccagaagag

SEQ ID NO: 1393019 - RNA, 19 nt, Homo sapiens
  misc_RNA (1)...(19): siRNA sense strand
caacaugcagcuucugugu

SEQ ID NO: 1393020 - RNA, 19 nt, Homo sapiens
  misc_RNA (1)...(19): siRNA sense strand
gcgaaaugacccugaaugu

SEQ ID NO: 1393021 - RNA, 19 nt, Homo sapiens
  misc_RNA (1)...(19): siRNA sense strand
gugaugugguaaugguuaa

SEQ ID NO: 1393022 - RNA, 19 nt, Homo sapiens
  misc_RNA (1)...(19): siRNA sense strand
gcaaaacuccacugaagaa

SEQ ID NO: 1393023 - RNA, 19 nt, Homo sapiens
  misc_RNA (1)...(19): siRNA sense strand
aaagaggauucugguuuga

SEQ ID NO: 1393024 - RNA, 19 nt, Homo sapiens
  misc_RNA (1)...(19): siRNA sense strand
ugaacuaaauguuggugau

SEQ ID NO: 1393025 - RNA, 19 nt, Homo sapiens
  misc_RNA (1)...(19): siRNA sense strand
aagcgguacucuagaaaug

SEQ ID NO: 1393026 - RNA, 19 nt, Homo sapiens
  misc_RNA (1)...(19): siRNA sense strand
cugaugaagacguuauuua

SEQ ID NO: 1393027 - RNA, 19 nt, Homo sapiens
  misc_RNA (1)...(19): siRNA sense strand
ccaaucagccaucuacauc

SEQ ID NO: 1393028 - RNA, 19 nt, Homo sapiens
  misc_RNA (1)...(19): siRNA sense strand
gaauucauggucgaaguaa

SEQ ID NO: 1393029 - RNA, 19 nt, Homo sapiens
  misc_RNA (1)...(19): siRNA sense strand
gaaugucaaggaucuuaga

SEQ ID NO: 1393030 - RNA, 19 nt, Homo sapiens
  misc_RNA (1)...(19): siRNA sense strand
aaaugaaugucaaggaucu

SEQ ID NO: 1393031 - RNA, 19 nt, Homo sapiens
  misc_RNA (1)...(19): siRNA sense strand
guucuaauaguccaccuaa

SEQ ID NO: 1393032 - RNA, 19 nt, Homo sapiens
  misc_RNA (1)...(19): siRNA sense strand
ugauauaauucagcugcua

SEQ ID NO: 1393033 - RNA, 19 nt, Homo sapiens
  misc_RNA (1)...(19): siRNA sense strand
gcaagcaguuggaaaaugg

SEQ ID NO: 1393034 - RNA, 19 nt, Homo sapiens
  misc_RNA (1)...(19): siRNA sense strand
uguaauguggcuuaucaua

SEQ ID NO: 1393035 - RNA, 19 nt, Homo sapiens
  misc_RNA (1)...(19): siRNA sense strand
aaaagaacuucgugugaaa

SEQ ID NO: 1393036 - RNA, 19 nt, Homo sapiens
  misc_RNA (1)...(19): siRNA sense strand
guaaaaggacuaauggaaa

SEQ ID NO: 1393037 - RNA, 19 nt, Homo sapiens
  misc_RNA (1)...(19): siRNA sense strand
gaggcuaaacccuguucua

SEQ ID NO: 1393038 - RNA, 19 nt, Homo sapiens
  misc_RNA (1)...(19): siRNA sense strand
ugauuccagugaaguugua

SEQ ID NO: 1393039 - RNA, 19 nt, Homo sapiens
  misc_RNA (1)...(19): siRNA sense strand
agaggauucugguuugaug

SEQ ID NO: 1393040 - RNA, 19 nt, Homo sapiens
  misc_RNA (1)...(19): siRNA sense strand
ggguaggaccuuccaauca

SEQ ID NO: 1393041 - RNA, 19 nt, Homo sapiens
  misc_RNA (1)...(19): siRNA sense strand
aauaguccaccuaaaguaa

SEQ ID NO: 1393042 - RNA, 19 nt, Homo sapiens
  misc_RNA (1)...(19): siRNA sense strand
ggauacagguucgcaccau

SEQ ID NO: 1393043 - RNA, 19 nt, Homo sapiens
  misc_RNA (1)...(19): siRNA sense strand
aagaugccgucagcuagua

SEQ ID NO: 1393044 - RNA, 19 nt, Homo sapiens
  misc_RNA (1)...(19): siRNA sense strand
uggaaugaacuaaauguug

SEQ ID NO: 1393045 - RNA, 19 nt, Homo sapiens
  misc_RNA (1)...(19): siRNA sense strand
gcccagacccugaucaucu

SEQ ID NO: 1393046 - RNA, 19 nt, Homo sapiens
  misc_RNA (1)...(19): siRNA sense strand
gaggacgugucucgcaaag

SEQ ID NO: 1393047 - RNA, 19 nt, Homo sapiens
  misc_RNA (1)...(19): siRNA sense strand
cgaaaugacccugaaugug

SEQ ID NO: 1393048 - RNA, 19 nt, Homo sapiens
  misc_RNA (1)...(19): siRNA sense strand
uaaacccuguucuaauagu

SEQ ID NO: 1393049 - RNA, 19 nt, Homo sapiens
  misc_RNA (1)...(19): siRNA sense strand
cugguuugaugcagaaauu

SEQ ID NO: 1393050 - RNA, 19 nt, Homo sapiens
  misc_RNA (1)...(19): siRNA sense strand
ccaagacgugcaccauuga

SEQ ID NO: 1393051 - RNA, 19 nt, Homo sapiens
  misc_RNA (1)...(19): siRNA sense strand
ggaaacaugaacccaacau

SEQ ID NO: 1393052 - RNA, 19 nt, Homo sapiens
  misc_RNA (1)...(19): siRNA sense strand
ucuaauaguccaccuaaag

SEQ ID NO: 1393053 - RNA, 19 nt, Homo sapiens
  misc_RNA (1)...(19): siRNA sense strand
acuuggagauuuagaguuc

SEQ ID NO: 1393054 - RNA, 19 nt, Homo sapiens
  misc_RNA (1)...(19): siRNA sense strand
caacuuggagauuuagagu

SEQ ID NO: 1393055 - RNA, 19 nt, Homo sapiens
  misc_RNA (1)...(19): siRNA sense strand
cgagagaauguacuauugu

SEQ ID NO: 1393056 - RNA, 19 nt, Homo sapiens
  misc_RNA (1)...(19): siRNA sense strand
cagaaauuaccacauugaa

SEQ ID NO: 1393057 - RNA, 19 nt, Homo sapiens
  misc_RNA (1)...(19): siRNA sense strand
gaugugguaaugguuaauu

SEQ ID NO: 1393058 - RNA, 19 nt, Homo sapiens
  misc_RNA (1)...(19): siRNA sense strand
ccacgagcuagaaccauuu

SEQ ID NO: 1393059 - RNA, 19 nt, Homo sapiens
  misc_RNA (1)...(19): siRNA sense strand
cagcuucugugugaugaau

SEQ ID NO: 1393060 - RNA, 19 nt, Homo sapiens
  misc_RNA (1)...(19): siRNA sense strand
ggucguacgagagaaugua

SEQ ID NO: 1393061 - RNA, 19 nt, Homo sapiens
  misc_RNA (1)...(19): siRNA sense strand
gcuucugugugaugaaugu

SEQ ID NO: 1393062 - RNA, 19 nt, Homo sapiens
  misc_RNA (1)...(19): siRNA sense strand
gcuaaacccuguucuaaua

SEQ ID NO: 1393063 - RNA, 19 nt, Homo sapiens
  misc_RNA (1)...(19): siRNA sense strand
gagauuaugucuacguuua

SEQ ID NO: 1393064 - RNA, 19 nt, Homo sapiens
  misc_RNA (1)...(19): siRNA sense strand
ggaggaagaucagcaaaua

SEQ ID NO: 1393065 - RNA, 19 nt, Homo sapiens
  misc_RNA (1)...(19): siRNA sense strand
gaaaugacccugaauguga

SEQ ID NO: 1393066 - RNA, 19 nt, Homo sapiens
  misc_RNA (1)...(19): siRNA sense strand
caacagauaugauggcauu

SEQ ID NO: 1393067 - RNA, 19 nt, Homo sapiens
  misc_RNA (1)...(19): siRNA sense strand
caaauaugcuccugaagaa

SEQ ID NO: 1393068 - RNA, 19 nt, Homo sapiens
  misc_RNA (1)...(19): siRNA sense strand
ccaaagagaacacaaauaa

SEQ ID NO: 1393069 - RNA, 19 nt, Homo sapiens
  misc_RNA (1)...(19): siRNA sense strand
gaaauuaccacauugaaga

SEQ ID NO: 1393070 - RNA, 19 nt, Homo sapiens
  misc_RNA (1)...(19): siRNA sense strand
gcaaauaugcuccugaaga

SEQ ID NO: 1393071 - RNA, 19 nt, Homo sapiens
  misc_RNA (1)...(19): siRNA sense strand
guacaaagcaucagauuca

SEQ ID NO: 1393072 - RNA, 19 nt, Homo sapiens
  misc_RNA (1)...(19): siRNA sense strand
cuacacagauugaggcuaa

SEQ ID NO: 1393073 - RNA, 19 nt, Homo sapiens
  misc_RNA (1)...(19): siRNA sense strand
ggaucaacuuggagauuua

SEQ ID NO: 1393074 - RNA, 19 nt, Homo sapiens
  misc_RNA (1)...(19): siRNA sense strand
gaugaugacuguccaagug

SEQ ID NO: 1393075 - RNA, 19 nt, Homo sapiens
  misc_RNA (1)...(19): siRNA sense strand
gaagugcuuucacaucuug

SEQ ID NO: 1393076 - RNA, 19 nt, Homo sapiens
  misc_RNA (1)...(19): siRNA sense strand
caaauaaauuggacagugu

SEQ ID NO: 1393077 - RNA, 19 nt, Homo sapiens
  misc_RNA (1)...(19): siRNA sense strand
gcaaagaugccgucagcua

SEQ ID NO: 1393078 - RNA, 19 nt, Homo sapiens
  misc_RNA (1)...(19): siRNA sense strand
cacaaugucuguaaagauu

SEQ ID NO: 1393079 - RNA, 19 nt, Homo sapiens
  misc_RNA (1)...(19): siRNA sense strand
gauccuggcuuuggaauau

SEQ ID NO: 1393080 - RNA, 19 nt, Homo sapiens
  misc_RNA (1)...(19): siRNA sense strand
aagaagagaugauguugaa

SEQ ID NO: 1393081 - RNA, 19 nt, Homo sapiens
  misc_RNA (1)...(19): siRNA sense strand
uguaaaggcuggugaaaga

SEQ ID NO: 1393082 - RNA, 19 nt, Homo sapiens
  misc_RNA (1)...(19): siRNA sense strand
guacuauugucccuucuaa

SEQ ID NO: 1393083 - RNA, 19 nt, Homo sapiens
  misc_RNA (1)...(19): siRNA sense strand
gaauggcaguucuuguaaa

SEQ ID NO: 1393084 - RNA, 19 nt, Homo sapiens
  misc_RNA (1)...(19): siRNA sense strand
gauguuggacugaaugaua

SEQ ID NO: 1393085 - RNA, 19 nt, Homo sapiens
  misc_RNA (1)...(19): siRNA sense strand
gaucuuagaccacgagcua

SEQ ID NO: 1393086 - RNA, 19 nt, Homo sapiens
  misc_RNA (1)...(19): siRNA sense strand
gguauuguccuucuuguaa

SEQ ID NO: 1393087 - RNA, 19 nt, Homo sapiens
  misc_RNA (1)...(19): siRNA sense strand
ggugaaagacucaagauga

SEQ ID NO: 1393088 - RNA, 19 nt, Homo sapiens
  misc_RNA (1)...(19): siRNA sense strand
ucaaggagauuaugucuac

SEQ ID NO: 1393089 - RNA, 19 nt, Homo sapiens
  misc_RNA (1)...(19): siRNA sense strand
cgaagcagguguucacaga

SEQ ID NO: 1393090 - RNA, 19 nt, Homo sapiens
  misc_RNA (1)...(19): siRNA sense strand
gaagaaggcaacagauaug

SEQ ID NO: 1393091 - RNA, 19 nt, Homo sapiens
  misc_RNA (1)...(19): siRNA sense strand
aagcauaaauccaaagaga

SEQ ID NO: 1393092 - RNA, 19 nt, Homo sapiens
  misc_RNA (1)...(19): siRNA sense strand
ccaagugccuccaaagugu

SEQ ID NO: 1393093 - RNA, 19 nt, Homo sapiens
  misc_RNA (1)...(19): siRNA sense strand
gaaauacuggccagagauu

SEQ ID NO: 1393094 - RNA, 19 nt, Homo sapiens
  misc_RNA (1)...(19): siRNA sense strand
gggaauggcuuguguuggu

SEQ ID NO: 1393095 - RNA, 19 nt, Homo sapiens
  misc_RNA (1)...(19): siRNA sense strand
agaaagcgguacucuagaa

SEQ ID NO: 1393096 - RNA, 19 nt, Homo sapiens
  misc_RNA (1)...(19): siRNA sense strand
gcagguuacccuucagaua

SEQ ID NO: 1393097 - RNA, 19 nt, Homo sapiens
  misc_RNA (1)...(19): siRNA sense strand
ggccagagauuucaucaag

SEQ ID NO: 1393098 - RNA, 19 nt, Homo sapiens
  misc_RNA (1)...(19): siRNA sense strand
aaacugugaugcuccauug

SEQ ID NO: 1393099 - RNA, 19 nt, Homo sapiens
  misc_RNA (1)...(19): siRNA sense strand
gcagaaauuaccacauuga

SEQ ID NO: 1393100 - RNA, 19 nt, Homo sapiens
  misc_RNA (1)...(19): siRNA sense strand
cagguuacccuucagauaa

SEQ ID NO: 1393101 - RNA, 19 nt, Homo sapiens
  misc_RNA (1)...(19): siRNA sense strand
gaaggcaacagauaugaug

SEQ ID NO: 1393102 - RNA, 19 nt, Homo sapiens
  misc_RNA (1)...(19): siRNA sense strand
ggagcagagucucggaauu

SEQ ID NO: 1393103 - RNA, 19 nt, Homo sapiens
  misc_RNA (1)...(19): siRNA sense strand
gagcagagucucggaauug

SEQ ID NO: 1393104 - RNA, 19 nt, Homo sapiens
  misc_RNA (1)...(19): siRNA sense strand
acaaagaggauucugguuu

SEQ ID NO: 1393105 - RNA, 19 nt, Homo sapiens
  misc_RNA (1)...(19): siRNA sense strand
ggaauucauggucgaagua

SEQ ID NO: 1393106 - RNA, 19 nt, Homo sapiens
  misc_RNA (1)...(19): siRNA sense strand
uguacuggcugguggauuu

SEQ ID NO: 1393107 - RNA, 19 nt, Homo sapiens
  misc_RNA (1)...(19): siRNA sense strand
cagauaugauggcauuuau

SEQ ID NO: 1393108 - RNA, 19 nt, Homo sapiens
  misc_RNA (1)...(19): siRNA sense strand
ccagaaagcgguacucuag

SEQ ID NO: 1393109 - RNA, 19 nt, Homo sapiens
  misc_RNA (1)...(19): siRNA sense strand
ggccagaauuacaucauga

SEQ ID NO: 1393110 - RNA, 19 nt, Homo sapiens
  misc_RNA (1)...(19): siRNA sense strand
ggaauagaacggucaagga

SEQ ID NO: 1393111 - RNA, 19 nt, Homo sapiens
  misc_RNA (1)...(19): siRNA sense strand
gagagaauguacuauuguc

SEQ ID NO: 1393112 - RNA, 19 nt, Homo sapiens
  misc_RNA (1)...(19): siRNA sense strand
acaugcagcuucuguguga

SEQ ID NO: 1393113 - RNA, 19 nt, Homo sapiens
  misc_RNA (1)...(19): siRNA sense strand
gcucgugcccgucuuauug

SEQ ID NO: 1393114 - RNA, 19 nt, Homo sapiens
  misc_RNA (1)...(19): siRNA sense strand
gaagacguuauuuaccaua

SEQ ID NO: 1393115 - RNA, 19 nt, Homo sapiens
  misc_RNA (1)...(19): siRNA sense strand
aaacuccacugaagaaugg

SEQ ID NO: 1393116 - RNA, 19 nt, Homo sapiens
  misc_RNA (1)...(19): siRNA sense strand
gaaagcgguacucuagaaa

SEQ ID NO: 1393117 - RNA, 19 nt, Homo sapiens
  misc_RNA (1)...(19): siRNA sense strand
gauacagguucgcaccauu

SEQ ID NO: 1393118 - RNA, 19 nt, Homo sapiens
  misc_RNA (1)...(19): siRNA sense strand
ggaauuggagagcugguaa

SEQ ID NO: 1393119 - RNA, 19 nt, Homo sapiens
  misc_RNA (1)...(19): siRNA sense strand
agaaaugaaugucaaggau

SEQ ID NO: 1393120 - RNA, 19 nt, Homo sapiens
  misc_RNA (1)...(19): siRNA sense strand
gugaaauacuggccagaga

SEQ ID NO: 1393121 - RNA, 19 nt, Homo sapiens
  misc_RNA (1)...(19): siRNA sense strand
guauuguccuucuuguaaa

SEQ ID NO: 1393122 - RNA, 19 nt, Homo sapiens
  misc_RNA (1)...(19): siRNA sense strand
guaauguggcuuaucauau

SEQ ID NO: 1393123 - RNA, 19 nt, Homo sapiens
  misc_RNA (1)...(19): siRNA sense strand
gaacuucgugugaaaauuu

SEQ ID NO: 1393124 - RNA, 19 nt, Homo sapiens
  misc_RNA (1)...(19): siRNA sense strand
gcgguacucuagaaaugaa

SEQ ID NO: 1393125 - RNA, 19 nt, Homo sapiens
  misc_RNA (1)...(19): siRNA sense strand
cuaaaggacagucaaagaa

SEQ ID NO: 1393126 - RNA, 19 nt, Homo sapiens
  misc_RNA (1)...(19): siRNA sense strand
cagaagaggaauacuggua

SEQ ID NO: 1393127 - RNA, 19 nt, Homo sapiens
  misc_RNA (1)...(19): siRNA sense strand
aauguaauguggcuuauca

SEQ ID NO: 1393128 - RNA, 19 nt, Homo sapiens
  misc_RNA (1)...(19): siRNA sense strand
ugaagaaggcaacagauau

SEQ ID NO: 1393129 - RNA, 19 nt, Homo sapiens
  misc_RNA (1)...(19): siRNA sense strand
ggcaugaucuuggccagaa

SEQ ID NO: 1393130 - RNA, 19 nt, Homo sapiens
  misc_RNA (1)...(19): siRNA sense strand
gguaggaccuuccaaucag

SEQ ID NO: 1393131 - RNA, 19 nt, Homo sapiens
  misc_RNA (1)...(19): siRNA sense strand
aaaggccaauuucagauga

SEQ ID NO: 1393132 - RNA, 19 nt, Homo sapiens
  misc_RNA (1)...(19): siRNA sense strand
aaaucuugcugguaacaaa

SEQ ID NO: 1393133 - RNA, 19 nt, Homo sapiens
  misc_RNA (1)...(19): siRNA sense strand
uggaucaacuuggagauuu

SEQ ID NO: 1393134 - RNA, 19 nt, Homo sapiens
  misc_RNA (1)...(19): siRNA sense strand
cauauuuacugucugaauc

SEQ ID NO: 1393135 - RNA, 19 nt, Homo sapiens
  misc_RNA (1)...(19): siRNA sense strand
augcagaaauuaccacauu

SEQ ID NO: 1393136 - RNA, 19 nt, Homo sapiens
  misc_RNA (1)...(19): siRNA sense strand
ggugaugugguaaugguua

SEQ ID NO: 1393137 - RNA, 19 nt, Homo sapiens
  misc_RNA (1)...(19): siRNA sense strand
aaauguuggugauguggua

SEQ ID NO: 1393138 - RNA, 19 nt, Homo sapiens
  misc_RNA (1)...(19): siRNA sense strand
gaagcacacauacauagug

SEQ ID NO: 1393139 - RNA, 19 nt, Homo sapiens
  misc_RNA (1)...(19): siRNA sense strand
uacuagagcuucugaugga

SEQ ID NO: 1393140 - RNA, 19 nt, Homo sapiens
  misc_RNA (1)...(19): siRNA sense strand
gaucuuggccagaauuaca

SEQ ID NO: 1393141 - RNA, 19 nt, Homo sapiens
  misc_RNA (1)...(19): siRNA sense strand
ucaacuaacuccucaacag

SEQ ID NO: 1393142 - RNA, 19 nt, Homo sapiens
  misc_RNA (1)...(19): siRNA sense strand
uaugaugaauacccagaaa

SEQ ID NO: 1393143 - RNA, 19 nt, Homo sapiens
  misc_RNA (1)...(19): siRNA sense strand
caacagcaacaucucauca

SEQ ID NO: 1393144 - RNA, 19 nt, Homo sapiens
  misc_RNA (1)...(19): siRNA sense strand
uggauaaagucccagaaga

SEQ ID NO: 1393145 - RNA, 19 nt, Homo sapiens
  misc_RNA (1)...(19): siRNA sense strand
ggaaaauggauauaccuua

SEQ ID NO: 1393146 - RNA, 19 nt, Homo sapiens
  misc_RNA (1)...(19): siRNA sense strand
gaacuaaauguuggugaug

SEQ ID NO: 1393147 - RNA, 19 nt, Homo sapiens
  misc_RNA (1)...(19): siRNA sense strand
uaauaguccaccuaaagua

SEQ ID NO: 1393148 - RNA, 19 nt, Homo sapiens
  misc_RNA (1)...(19): siRNA sense strand
gcugugggaugaagugcuu

SEQ ID NO: 1393149 - RNA, 19 nt, Homo sapiens
  misc_RNA (1)...(19): siRNA sense strand
gaacggucaaggagauuau

SEQ ID NO: 1393150 - RNA, 19 nt, Homo sapiens
  misc_RNA (1)...(19): siRNA sense strand
acgagagaauguacuauug

SEQ ID NO: 1393151 - RNA, 19 nt, Homo sapiens
  misc_RNA (1)...(19): siRNA sense strand
uaaagucccagaagaggaa

SEQ ID NO: 1393152 - RNA, 19 nt, Homo sapiens
  misc_RNA (1)...(19): siRNA sense strand
acagauaugauggcauuua

SEQ ID NO: 1393153 - RNA, 19 nt, Homo sapiens
  misc_RNA (1)...(19): siRNA sense strand
gcugucaggagcuaguuua

SEQ ID NO: 1393154 - RNA, 19 nt, Homo sapiens
  misc_RNA (1)...(19): siRNA sense strand
uccaagacgugcaccauug

SEQ ID NO: 1393155 - RNA, 19 nt, Homo sapiens
  misc_RNA (1)...(19): siRNA sense strand
gcauaaauccaaagagaac

SEQ ID NO: 1393156 - RNA, 19 nt, Homo sapiens
  misc_RNA (1)...(19): siRNA sense strand
uacaguauccagcagguua

SEQ ID NO: 1393157 - RNA, 19 nt, Homo sapiens
  misc_RNA (1)...(19): siRNA sense strand
agccauggauucuugguuu

SEQ ID NO: 1393158 - RNA, 19 nt, Homo sapiens
  misc_RNA (1)...(19): siRNA sense strand
ggauaaagucccagaagag

SEQ ID NO: 1393159 - RNA, 19 nt, Homo sapiens
  misc_RNA (1)...(19): siRNA sense strand
caacaugcagcuucugugu

SEQ ID NO: 1393160 - RNA, 19 nt, Homo sapiens
  misc_RNA (1)...(19): siRNA sense strand
gcgaaaugacccugaaugu

SEQ ID NO: 1393161 - RNA, 19 nt, Homo sapiens
  misc_RNA (1)...(19): siRNA sense strand
gugaugugguaaugguuaa

SEQ ID NO: 1393162 - RNA, 19 nt, Homo sapiens
  misc_RNA (1)...(19): siRNA sense strand
gaaaugugcuucuuaucuu

SEQ ID NO: 1393163 - RNA, 19 nt, Homo sapiens
  misc_RNA (1)...(19): siRNA sense strand
ggagguguauuuccgguuu

SEQ ID NO: 1393164 - RNA, 19 nt, Homo sapiens
  misc_RNA (1)...(19): siRNA sense strand
gcaaccgacugccugcuaa

SEQ ID NO: 1393165 - RNA, 19 nt, Homo sapiens
  misc_RNA (1)...(19): siRNA sense strand
acacuuggcugugcuauga

SEQ ID NO: 1393166 - RNA, 19 nt, Homo sapiens
  misc_RNA (1)...(19): siRNA sense strand
gaaggugaccaaauucuug

SEQ ID NO: 1393167 - RNA, 19 nt, Homo sapiens
  misc_RNA (1)...(19): siRNA sense strand
cagaucaccugguuuguau

SEQ ID NO: 1393168 - RNA, 19 nt, Homo sapiens
  misc_RNA (1)...(19): siRNA sense strand
gcugugcuaugaagugaaa

SEQ ID NO: 1393169 - RNA, 19 nt, Homo sapiens
  misc_RNA (1)...(19): siRNA sense strand
guacaaauucgaugacaau

SEQ ID NO: 1393170 - RNA, 19 nt, Homo sapiens
  misc_RNA (1)...(19): siRNA sense strand
gugugaagaucauggacua

SEQ ID NO: 1393171 - RNA, 19 nt, Homo sapiens
  misc_RNA (1)...(19): siRNA sense strand
gagcggauguaucgagaca

SEQ ID NO: 1393172 - RNA, 19 nt, Homo sapiens
  misc_RNA (1)...(19): siRNA sense strand
aaacgaacccauccucuau

SEQ ID NO: 1393173 - RNA, 19 nt, Homo sapiens
  misc_RNA (1)...(19): siRNA sense strand
aaacgucagucgaaucaca

SEQ ID NO: 1393174 - RNA, 19 nt, Homo sapiens
  misc_RNA (1)...(19): siRNA sense strand
gguacaaauucgaugacaa

SEQ ID NO: 1393175 - RNA, 19 nt, Homo sapiens
  misc_RNA (1)...(19): siRNA sense strand
gcggauguaucgagacaca

SEQ ID NO: 1393176 - RNA, 19 nt, Homo sapiens
  misc_RNA (1)...(19): siRNA sense strand
ucaccugguuuguaucaug

SEQ ID NO: 1393177 - RNA, 19 nt, Homo sapiens
  misc_RNA (1)...(19): siRNA sense strand
ccaaacgucagucgaauca

SEQ ID NO: 1393178 - RNA, 19 nt, Homo sapiens
  misc_RNA (1)...(19): siRNA sense strand
aaaugugcuucuuaucuug

SEQ ID NO: 1393179 - RNA, 19 nt, Homo sapiens
  misc_RNA (1)...(19): siRNA sense strand
gaacagccucagagaugga

SEQ ID NO: 1393180 - RNA, 19 nt, Homo sapiens
  misc_RNA (1)...(19): siRNA sense strand
gaucaccugguuuguauca

SEQ ID NO: 1393181 - RNA, 19 nt, Homo sapiens
  misc_RNA (1)...(19): siRNA sense strand
gagacacauucuacgacaa

SEQ ID NO: 1393182 - RNA, 19 nt, Homo sapiens
  misc_RNA (1)...(19): siRNA sense strand
aacaggcgcuuccagauca

SEQ ID NO: 1393183 - RNA, 19 nt, Homo sapiens
  misc_RNA (1)...(19): siRNA sense strand
cuucuuaucuugguucugu

SEQ ID NO: 1393184 - RNA, 19 nt, Homo sapiens
  misc_RNA (1)...(19): siRNA sense strand
gcacugauugcaacugaca

SEQ ID NO: 1393185 - RNA, 19 nt, Homo sapiens
  misc_RNA (1)...(19): siRNA sense strand
cacauucuacgacaacuuu

SEQ ID NO: 1393186 - RNA, 19 nt, Homo sapiens
  misc_RNA (1)...(19): siRNA sense strand
ucucagacuuugcauacug

SEQ ID NO: 1393187 - RNA, 19 nt, Homo sapiens
  misc_RNA (1)...(19): siRNA sense strand
uaacaggcgcuuccagauc

SEQ ID NO: 1393188 - RNA, 19 nt, Homo sapiens
  misc_RNA (1)...(19): siRNA sense strand
ugagaaccacgcagaaaug

SEQ ID NO: 1393189 - RNA, 19 nt, Homo sapiens
  misc_RNA (1)...(19): siRNA sense strand
acaggcaggagguguauuu

SEQ ID NO: 1393190 - RNA, 19 nt, Homo sapiens
  misc_RNA (1)...(19): siRNA sense strand
uggcacugauugcaacuga

SEQ ID NO: 1393191 - RNA, 19 nt, Homo sapiens
  misc_RNA (1)...(19): siRNA sense strand
gagguguauuuccgguuug

SEQ ID NO: 1393192 - RNA, 19 nt, Homo sapiens
  misc_RNA (1)...(19): siRNA sense strand
auucaugccuugguacaaa

SEQ ID NO: 1393193 - RNA, 19 nt, Homo sapiens
  misc_RNA (1)...(19): siRNA sense strand
cgacaacuuugaaaacgaa

SEQ ID NO: 1393194 - RNA, 19 nt, Homo sapiens
  misc_RNA (1)...(19): siRNA sense strand
gagaaccacgcagaaaugu

SEQ ID NO: 1393195 - RNA, 19 nt, Homo sapiens
  misc_RNA (1)...(19): siRNA sense strand
aggaacagccucagagaug

SEQ ID NO: 1393196 - RNA, 19 nt, Homo sapiens
  misc_RNA (1)...(19): siRNA sense strand
caucucagacuuugcauac

SEQ ID NO: 1393197 - RNA, 19 nt, Homo sapiens
  misc_RNA (1)...(19): siRNA sense strand
gggaaaacuuugugugcaa

SEQ ID NO: 1393198 - RNA, 19 nt, Homo sapiens
  misc_RNA (1)...(19): siRNA sense strand
ccucuucaucucagacuuu

SEQ ID NO: 1393199 - RNA, 19 nt, Homo sapiens
  misc_RNA (1)...(19): siRNA sense strand
ugaaggugaccaaauucuu

SEQ ID NO: 1393200 - RNA, 19 nt, Homo sapiens
  misc_RNA (1)...(19): siRNA sense strand
gugaagaucauggacuaug

SEQ ID NO: 1393201 - RNA, 19 nt, Homo sapiens
  misc_RNA (1)...(19): siRNA sense strand
uggcugugcuaugaaguga

SEQ ID NO: 1393202 - RNA, 19 nt, Homo sapiens
  misc_RNA (1)...(19): siRNA sense strand
guacuacccaaacgucagu

SEQ ID NO: 1393203 - RNA, 19 nt, Homo sapiens
  misc_RNA (1)...(19): siRNA sense strand
ggugaaggugaccaaauuc

SEQ ID NO: 1393204 - RNA, 19 nt, Homo sapiens
  misc_RNA (1)...(19): siRNA sense strand
agccauucaugccuuggua

SEQ ID NO: 1393205 - RNA, 19 nt, Homo sapiens
  misc_RNA (1)...(19): siRNA sense strand
ggaaaacuuugugugcaau

SEQ ID NO: 1393206 - RNA, 19 nt, Homo sapiens
  misc_RNA (1)...(19): siRNA sense strand
gggcuggcacugauugcaa

SEQ ID NO: 1393207 - RNA, 19 nt, Homo sapiens
  misc_RNA (1)...(19): siRNA sense strand
gauggauggaucugcaaug

SEQ ID NO: 1393208 - RNA, 19 nt, Homo sapiens
  misc_RNA (1)...(19): siRNA sense strand
cuaccgggauagagauugg

SEQ ID NO: 1393209 - RNA, 19 nt, Homo sapiens
  misc_RNA (1)...(19): siRNA sense strand
aaacuuugugugcaaugaa

SEQ ID NO: 1393210 - RNA, 19 nt, Homo sapiens
  misc_RNA (1)...(19): siRNA sense strand
gugcuccucaggcugcaua

SEQ ID NO: 1393211 - RNA, 19 nt, Homo sapiens
  misc_RNA (1)...(19): siRNA sense strand
gaccaagaaggcucaguga

SEQ ID NO: 1393212 - RNA, 19 nt, Homo sapiens
  misc_RNA (1)...(19): siRNA sense strand
gccguuagccugaucaucu

SEQ ID NO: 1393213 - RNA, 19 nt, Homo sapiens
  misc_RNA (1)...(19): siRNA sense strand
gcaugucauccacaaguau

SEQ ID NO: 1393214 - RNA, 19 nt, Homo sapiens
  misc_RNA (1)...(19): siRNA sense strand
cagcaugucauccacaagu

SEQ ID NO: 1393215 - RNA, 19 nt, Homo sapiens
  misc_RNA (1)...(19): siRNA sense strand
caagagagugaccaagaag

SEQ ID NO: 1393216 - RNA, 19 nt, Homo sapiens
  misc_RNA (1)...(19): siRNA sense strand
gucagcaugucauccacaa

SEQ ID NO: 1393217 - RNA, 19 nt, Homo sapiens
  misc_RNA (1)...(19): siRNA sense strand
caugucauccacaaguauu

SEQ ID NO: 1393218 - RNA, 19 nt, Homo sapiens
  misc_RNA (1)...(19): siRNA sense strand
gaucaucuucaccuacuac

SEQ ID NO: 1393219 - RNA, 19 nt, Homo sapiens
  misc_RNA (1)...(19): siRNA sense strand
agcaugucauccacaagua

SEQ ID NO: 1393220 - RNA, 19 nt, Homo sapiens
  misc_RNA (1)...(19): siRNA sense strand
ccguuagccugaucaucuu

SEQ ID NO: 1393221 - RNA, 19 nt, Homo sapiens
  misc_RNA (1)...(19): siRNA sense strand
gccguuagccugaucaucu

SEQ ID NO: 1393222 - RNA, 19 nt, Homo sapiens
  misc_RNA (1)...(19): siRNA sense strand
gaucaucuucaccuacuac

SEQ ID NO: 1393223 - RNA, 19 nt, Homo sapiens
  misc_RNA (1)...(19): siRNA sense strand
ccguuagccugaucaucuu

SEQ ID NO: 1393224 - RNA, 19 nt, Homo sapiens
  misc_RNA (1)...(19): siRNA sense strand
gggaacaucucuauuauua

SEQ ID NO: 1393225 - RNA, 19 nt, Homo sapiens
  misc_RNA (1)...(19): siRNA sense strand
ggaaaggacuucuguuuaa

SEQ ID NO: 1393226 - RNA, 19 nt, Homo sapiens
  misc_RNA (1)...(19): siRNA sense strand
ggacaaggauucagcuuua

SEQ ID NO: 1393227 - RNA, 19 nt, Homo sapiens
  misc_RNA (1)...(19): siRNA sense strand
ucaaauggcucacauauaa

SEQ ID NO: 1393228 - RNA, 19 nt, Homo sapiens
  misc_RNA (1)...(19): siRNA sense strand
gaacaacguugguuucuuu

SEQ ID NO: 1393229 - RNA, 19 nt, Homo sapiens
  misc_RNA (1)...(19): siRNA sense strand
uaacaacucugaauggaua

SEQ ID NO: 1393230 - RNA, 19 nt, Homo sapiens
  misc_RNA (1)...(19): siRNA sense strand
ugaaacaccuuacaacuuu

SEQ ID NO: 1393231 - RNA, 19 nt, Homo sapiens
  misc_RNA (1)...(19): siRNA sense strand
aagaacagcugacuaauuu

SEQ ID NO: 1393232 - RNA, 19 nt, Homo sapiens
  misc_RNA (1)...(19): siRNA sense strand
ggaaauaauucaugaagug

SEQ ID NO: 1393233 - RNA, 19 nt, Homo sapiens
  misc_RNA (1)...(19): siRNA sense strand
gguagaaccuuauauauca

SEQ ID NO: 1393234 - RNA, 19 nt, Homo sapiens
  misc_RNA (1)...(19): siRNA sense strand
gaaccaaucuaaggacuuu

SEQ ID NO: 1393235 - RNA, 19 nt, Homo sapiens
  misc_RNA (1)...(19): siRNA sense strand
gcacaagacuggccauaau

SEQ ID NO: 1393236 - RNA, 19 nt, Homo sapiens
  misc_RNA (1)...(19): siRNA sense strand
gggaagauguccacaguuu

SEQ ID NO: 1393237 - RNA, 19 nt, Homo sapiens
  misc_RNA (1)...(19): siRNA sense strand
gcugauggguucaaauaua

SEQ ID NO: 1393238 - RNA, 19 nt, Homo sapiens
  misc_RNA (1)...(19): siRNA sense strand
gcacagaaauaggaucuuu

SEQ ID NO: 1393239 - RNA, 19 nt, Homo sapiens
  misc_RNA (1)...(19): siRNA sense strand
ggaagucacuggauaagga

SEQ ID NO: 1393240 - RNA, 19 nt, Homo sapiens
  misc_RNA (1)...(19): siRNA sense strand
gcaagaaccuacagacaga

SEQ ID NO: 1393241 - RNA, 19 nt, Homo sapiens
  misc_RNA (1)...(19): siRNA sense strand
gcagacagcucacauucuu

SEQ ID NO: 1393242 - RNA, 19 nt, Homo sapiens
  misc_RNA (1)...(19): siRNA sense strand
uaacuagucuccaugaauu

SEQ ID NO: 1393243 - RNA, 19 nt, Homo sapiens
  misc_RNA (1)...(19): siRNA sense strand
gaaaugcgauagcucagaa

SEQ ID NO: 1393244 - RNA, 19 nt, Homo sapiens
  misc_RNA (1)...(19): siRNA sense strand
gcuuggaacuuaaaugaua

SEQ ID NO: 1393245 - RNA, 19 nt, Homo sapiens
  misc_RNA (1)...(19): siRNA sense strand
ggaaauaacuaggaaagug

SEQ ID NO: 1393246 - RNA, 19 nt, Homo sapiens
  misc_RNA (1)...(19): siRNA sense strand
gcucaugucuucuuccuuu

SEQ ID NO: 1393247 - RNA, 19 nt, Homo sapiens
  misc_RNA (1)...(19): siRNA sense strand
gaagaaaccuaaauuugag

SEQ ID NO: 1393248 - RNA, 19 nt, Homo sapiens
  misc_RNA (1)...(19): siRNA sense strand
uagaagaccuauuggauaa

SEQ ID NO: 1393249 - RNA, 19 nt, Homo sapiens
  misc_RNA (1)...(19): siRNA sense strand
ucacaaacuuccuauauga

SEQ ID NO: 1393250 - RNA, 19 nt, Homo sapiens
  misc_RNA (1)...(19): siRNA sense strand
gcaaaggugugguauaauc

SEQ ID NO: 1393251 - RNA, 19 nt, Homo sapiens
  misc_RNA (1)...(19): siRNA sense strand
gcacacagcaauaccuuua

SEQ ID NO: 1393252 - RNA, 19 nt, Homo sapiens
  misc_RNA (1)...(19): siRNA sense strand
caauagaaaugucagauga

SEQ ID NO: 1393253 - RNA, 19 nt, Homo sapiens
  misc_RNA (1)...(19): siRNA sense strand
gaacaagcauauuauugga

SEQ ID NO: 1393254 - RNA, 19 nt, Homo sapiens
  misc_RNA (1)...(19): siRNA sense strand
gaccaagcaucauuccuua

SEQ ID NO: 1393255 - RNA, 19 nt, Homo sapiens
  misc_RNA (1)...(19): siRNA sense strand
cgaaucagcuaaauuguga

SEQ ID NO: 1393256 - RNA, 19 nt, Homo sapiens
  misc_RNA (1)...(19): siRNA sense strand
ggacuucuaugcuuuguau

SEQ ID NO: 1393257 - RNA, 19 nt, Homo sapiens
  misc_RNA (1)...(19): siRNA sense strand
gccaaugacuuccauaauu

SEQ ID NO: 1393258 - RNA, 19 nt, Homo sapiens
  misc_RNA (1)...(19): siRNA sense strand
ucagaaaguugguguauga

SEQ ID NO: 1393259 - RNA, 19 nt, Homo sapiens
  misc_RNA (1)...(19): siRNA sense strand
ucacuaaacuucaucuuug

SEQ ID NO: 1393260 - RNA, 19 nt, Homo sapiens
  misc_RNA (1)...(19): siRNA sense strand
gaacagauccugaacucuu

SEQ ID NO: 1393261 - RNA, 19 nt, Homo sapiens
  misc_RNA (1)...(19): siRNA sense strand
ggaaaggacaguacaauug

SEQ ID NO: 1393262 - RNA, 19 nt, Homo sapiens
  misc_RNA (1)...(19): siRNA sense strand
gaaaguggucugcauaauu

SEQ ID NO: 1393263 - RNA, 19 nt, Homo sapiens
  misc_RNA (1)...(19): siRNA sense strand
ucaaacagcugcucauaau

SEQ ID NO: 1393264 - RNA, 19 nt, Homo sapiens
  misc_RNA (1)...(19): siRNA sense strand
ggaaucaguuugaagaaga

SEQ ID NO: 1393265 - RNA, 19 nt, Homo sapiens
  misc_RNA (1)...(19): siRNA sense strand
gaggauuacuccagaauga

SEQ ID NO: 1393266 - RNA, 19 nt, Homo sapiens
  misc_RNA (1)...(19): siRNA sense strand
gcaccugaauuuauuagaa

SEQ ID NO: 1393267 - RNA, 19 nt, Homo sapiens
  misc_RNA (1)...(19): siRNA sense strand
ggaaucccaucaugacuuu

SEQ ID NO: 1393268 - RNA, 19 nt, Homo sapiens
  misc_RNA (1)...(19): siRNA sense strand
gaagcaagccuuuccugua

SEQ ID NO: 1393269 - RNA, 19 nt, Homo sapiens
  misc_RNA (1)...(19): siRNA sense strand
ggacagcaccugaauuuau

SEQ ID NO: 1393270 - RNA, 19 nt, Homo sapiens
  misc_RNA (1)...(19): siRNA sense strand
guagaacucugcuauaauc

SEQ ID NO: 1393271 - RNA, 19 nt, Homo sapiens
  misc_RNA (1)...(19): siRNA sense strand
gaaaacaaguggcaucuuu

SEQ ID NO: 1393272 - RNA, 19 nt, Homo sapiens
  misc_RNA (1)...(19): siRNA sense strand
gagauuaguuggugcuauu

SEQ ID NO: 1393273 - RNA, 19 nt, Homo sapiens
  misc_RNA (1)...(19): siRNA sense strand
gcaacgaagugauuuggaa

SEQ ID NO: 1393274 - RNA, 19 nt, Homo sapiens
  misc_RNA (1)...(19): siRNA sense strand
gagacauucuuguguuaua

SEQ ID NO: 1393275 - RNA, 19 nt, Homo sapiens
  misc_RNA (1)...(19): siRNA sense strand
cauaguagauuucacagaa

SEQ ID NO: 1393276 - RNA, 19 nt, Homo sapiens
  misc_RNA (1)...(19): siRNA sense strand
gaaaggacaguacaauuga

SEQ ID NO: 1393277 - RNA, 19 nt, Homo sapiens
  misc_RNA (1)...(19): siRNA sense strand
gagaagaaaccuaaauuug

SEQ ID NO: 1393278 - RNA, 19 nt, Homo sapiens
  misc_RNA (1)...(19): siRNA sense strand
gcuaagagaagcaauagua

SEQ ID NO: 1393279 - RNA, 19 nt, Homo sapiens
  misc_RNA (1)...(19): siRNA sense strand
gaacuuguacugaauguga

SEQ ID NO: 1393280 - RNA, 19 nt, Homo sapiens
  misc_RNA (1)...(19): siRNA sense strand
gaagugagcugaccuacac

SEQ ID NO: 1393281 - RNA, 19 nt, Homo sapiens
  misc_RNA (1)...(19): siRNA sense strand
ugaagaauaucaccaaguu

SEQ ID NO: 1393282 - RNA, 19 nt, Homo sapiens
  misc_RNA (1)...(19): siRNA sense strand
ccacaaagauguuauugca

SEQ ID NO: 1393283 - RNA, 19 nt, Homo sapiens
  misc_RNA (1)...(19): siRNA sense strand
gcaauuccauuuaucacuu

SEQ ID NO: 1393284 - RNA, 19 nt, Homo sapiens
  misc_RNA (1)...(19): siRNA sense strand
gacagcaccugaauuuauu

SEQ ID NO: 1393285 - RNA, 19 nt, Homo sapiens
  misc_RNA (1)...(19): siRNA sense strand
cauaagauauuaccguuug

SEQ ID NO: 1393286 - RNA, 19 nt, Homo sapiens
  misc_RNA (1)...(19): siRNA sense strand
ggacuguugugcuauugua

SEQ ID NO: 1393287 - RNA, 19 nt, Homo sapiens
  misc_RNA (1)...(19): siRNA sense strand
agaaagagaugauugacuu

SEQ ID NO: 1393288 - RNA, 19 nt, Homo sapiens
  misc_RNA (1)...(19): siRNA sense strand
caacagagauggcaagacu

SEQ ID NO: 1393289 - RNA, 19 nt, Homo sapiens
  misc_RNA (1)...(19): siRNA sense strand
gauacugaccuucaaauaa

SEQ ID NO: 1393290 - RNA, 19 nt, Homo sapiens
  misc_RNA (1)...(19): siRNA sense strand
ugaaagaccuaacccaaga

SEQ ID NO: 1393291 - RNA, 19 nt, Homo sapiens
  misc_RNA (1)...(19): siRNA sense strand
ggaaaccauaucucaauua

SEQ ID NO: 1393292 - RNA, 19 nt, Homo sapiens
  misc_RNA (1)...(19): siRNA sense strand
gcagcaaacucuacaaucu

SEQ ID NO: 1393293 - RNA, 19 nt, Homo sapiens
  misc_RNA (1)...(19): siRNA sense strand
gauaaggcaucucauuuua

SEQ ID NO: 1393294 - RNA, 19 nt, Homo sapiens
  misc_RNA (1)...(19): siRNA sense strand
caagacagauugaugaaca

SEQ ID NO: 1393295 - RNA, 19 nt, Homo sapiens
  misc_RNA (1)...(19): siRNA sense strand
gaauggaaauaacuaggaa

SEQ ID NO: 1393296 - RNA, 19 nt, Homo sapiens
  misc_RNA (1)...(19): siRNA sense strand
gaaguggcccaauauguaa

SEQ ID NO: 1393297 - RNA, 19 nt, Homo sapiens
  misc_RNA (1)...(19): siRNA sense strand
uaaagcacaugaacucuug

SEQ ID NO: 1393298 - RNA, 19 nt, Homo sapiens
  misc_RNA (1)...(19): siRNA sense strand
gaaauaccugggaggauua

SEQ ID NO: 1393299 - RNA, 19 nt, Homo sapiens
  misc_RNA (1)...(19): siRNA sense strand
ugugggaacuggcaauuua

SEQ ID NO: 1393300 - RNA, 19 nt, Homo sapiens
  misc_RNA (1)...(19): siRNA sense strand
cagaugaaauuccuaauca

SEQ ID NO: 1393301 - RNA, 19 nt, Homo sapiens
  misc_RNA (1)...(19): siRNA sense strand
caaagcaccuucuaaugau

SEQ ID NO: 1393302 - RNA, 19 nt, Homo sapiens
  misc_RNA (1)...(19): siRNA sense strand
ugaaggagauucccacaga

SEQ ID NO: 1393303 - RNA, 19 nt, Homo sapiens
  misc_RNA (1)...(19): siRNA sense strand
gagcugaccuacaccauuc

SEQ ID NO: 1393304 - RNA, 19 nt, Homo sapiens
  misc_RNA (1)...(19): siRNA sense strand
gaagaacuauggcccaagu

SEQ ID NO: 1393305 - RNA, 19 nt, Homo sapiens
  misc_RNA (1)...(19): siRNA sense strand
ccaguauacuugaucauuu

SEQ ID NO: 1393306 - RNA, 19 nt, Homo sapiens
  misc_RNA (1)...(19): siRNA sense strand
caacuuaacaacagacuuu

SEQ ID NO: 1393307 - RNA, 19 nt, Homo sapiens
  misc_RNA (1)...(19): siRNA sense strand
guagaagaccuauuggaua

SEQ ID NO: 1393308 - RNA, 19 nt, Homo sapiens
  misc_RNA (1)...(19): siRNA sense strand
caagagaguuuccagaaca

SEQ ID NO: 1393309 - RNA, 19 nt, Homo sapiens
  misc_RNA (1)...(19): siRNA sense strand
gaacauagauuuuguacgu

SEQ ID NO: 1393310 - RNA, 19 nt, Homo sapiens
  misc_RNA (1)...(19): siRNA sense strand
gaggaaaggacuucuguuu

SEQ ID NO: 1393311 - RNA, 19 nt, Homo sapiens
  misc_RNA (1)...(19): siRNA sense strand
gagacuauauaucaccuaa

SEQ ID NO: 1393312 - RNA, 19 nt, Homo sapiens
  misc_RNA (1)...(19): siRNA sense strand
ucacuuagcuaguuaccuu

SEQ ID NO: 1393313 - RNA, 19 nt, Homo sapiens
  misc_RNA (1)...(19): siRNA sense strand
cgaaguggcccaauaugua

SEQ ID NO: 1393314 - RNA, 19 nt, Homo sapiens
  misc_RNA (1)...(19): siRNA sense strand
ucaagugggucuuuacuau

SEQ ID NO: 1393315 - RNA, 19 nt, Homo sapiens
  misc_RNA (1)...(19): siRNA sense strand
uggcaaaggugugguauaa

SEQ ID NO: 1393316 - RNA, 19 nt, Homo sapiens
  misc_RNA (1)...(19): siRNA sense strand
ugaaagacauggcuugugu

SEQ ID NO: 1393317 - RNA, 19 nt, Homo sapiens
  misc_RNA (1)...(19): siRNA sense strand
gaauagcucucuggaggaa

SEQ ID NO: 1393318 - RNA, 19 nt, Homo sapiens
  misc_RNA (1)...(19): siRNA sense strand
aaacagagcaacauuagaa

SEQ ID NO: 1393319 - RNA, 19 nt, Homo sapiens
  misc_RNA (1)...(19): siRNA sense strand
gaaguucaugcaagauuua

SEQ ID NO: 1393320 - RNA, 19 nt, Homo sapiens
  misc_RNA (1)...(19): siRNA sense strand
uaaauucucugcuugaagu

SEQ ID NO: 1393321 - RNA, 19 nt, Homo sapiens
  misc_RNA (1)...(19): siRNA sense strand
aaacacauuucuuccguaa

SEQ ID NO: 1393322 - RNA, 19 nt, Homo sapiens
  misc_RNA (1)...(19): siRNA sense strand
ucaaagcccugcuguggaa

SEQ ID NO: 1393323 - RNA, 19 nt, Homo sapiens
  misc_RNA (1)...(19): siRNA sense strand
guuuagagaucaagauuug

SEQ ID NO: 1393324 - RNA, 19 nt, Homo sapiens
  misc_RNA (1)...(19): siRNA sense strand
ggccaaagaugccuuagaa

SEQ ID NO: 1393325 - RNA, 19 nt, Homo sapiens
  misc_RNA (1)...(19): siRNA sense strand
ccaaagaugccuuagaaga

SEQ ID NO: 1393326 - RNA, 19 nt, Homo sapiens
  misc_RNA (1)...(19): siRNA sense strand
gcaaggggcugccacauag

SEQ ID NO: 1393327 - RNA, 19 nt, Homo sapiens
  misc_RNA (1)...(19): siRNA sense strand
ccacauagcccaguucaag

SEQ ID NO: 1393328 - RNA, 19 nt, Homo sapiens
  misc_RNA (1)...(19): siRNA sense strand
aagagucgcuucugcugaa

SEQ ID NO: 1393329 - RNA, 19 nt, Homo sapiens
  misc_RNA (1)...(19): siRNA sense strand
caaagaugccuuagaagag

SEQ ID NO: 1393330 - RNA, 19 nt, Homo sapiens
  misc_RNA (1)...(19): siRNA sense strand
aaagaugccuuagaagagu

SEQ ID NO: 1393331 - RNA, 19 nt, Homo sapiens
  misc_RNA (1)...(19): siRNA sense strand
cgcgagaccugaauugugu

SEQ ID NO: 1393332 - RNA, 19 nt, Homo sapiens
  misc_RNA (1)...(19): siRNA sense strand
gagcugcaggccuuuaaga

SEQ ID NO: 1393333 - RNA, 19 nt, Homo sapiens
  misc_RNA (1)...(19): siRNA sense strand
cuucacacccugcaccaua

SEQ ID NO: 1393334 - RNA, 19 nt, Homo sapiens
  misc_RNA (1)...(19): siRNA sense strand
gagggccaaagaugccuua

SEQ ID NO: 1393335 - RNA, 19 nt, Homo sapiens
  misc_RNA (1)...(19): siRNA sense strand
uuuaagagggccaaagaug

SEQ ID NO: 1393336 - RNA, 19 nt, Homo sapiens
  misc_RNA (1)...(19): siRNA sense strand
gggccaaagaugccuuaga

SEQ ID NO: 1393337 - RNA, 19 nt, Homo sapiens
  misc_RNA (1)...(19): siRNA sense strand
ucacgcgagaccugaauug

SEQ ID NO: 1393338 - RNA, 19 nt, Homo sapiens
  misc_RNA (1)...(19): siRNA sense strand
gggaagggcugccacauug

SEQ ID NO: 1393339 - RNA, 19 nt, Homo sapiens
  misc_RNA (1)...(19): siRNA sense strand
gaugggaaccugugucuga

SEQ ID NO: 1393340 - RNA, 19 nt, Homo sapiens
  misc_RNA (1)...(19): siRNA sense strand
cgcgagaccucaaauaugu

SEQ ID NO: 1393341 - RNA, 19 nt, Homo sapiens
  misc_RNA (1)...(19): siRNA sense strand
gggaaccugugucugagaa

SEQ ID NO: 1393342 - RNA, 19 nt, Homo sapiens
  misc_RNA (1)...(19): siRNA sense strand
gcuggugacuuuggugcua

SEQ ID NO: 1393343 - RNA, 19 nt, Homo sapiens
  misc_RNA (1)...(19): siRNA sense strand
uugcagcucuccugucuuc

SEQ ID NO: 1393344 - RNA, 19 nt, Homo sapiens
  misc_RNA (1)...(19): siRNA sense strand
ccguggugcuggugacuuu

SEQ ID NO: 1393345 - RNA, 19 nt, Homo sapiens
  misc_RNA (1)...(19): siRNA sense strand
ucacgcgagaccucaaaua

SEQ ID NO: 1393346 - RNA, 19 nt, Homo sapiens
  misc_RNA (1)...(19): siRNA sense strand
ccagggacgccuuggaaga

SEQ ID NO: 1393347 - RNA, 19 nt, Homo sapiens
  misc_RNA (1)...(19): siRNA sense strand
cacauuggcagguucaaau

SEQ ID NO: 1393348 - RNA, 19 nt, Homo sapiens
  misc_RNA (1)...(19): siRNA sense strand
cacgcgagaccucaaauau

SEQ ID NO: 1393349 - RNA, 19 nt, Homo sapiens
  misc_RNA (1)...(19): siRNA sense strand
aggcaucugucaccuucaa

SEQ ID NO: 1393350 - RNA, 19 nt, Homo sapiens
  misc_RNA (1)...(19): siRNA sense strand
ccacauuggcagguucaaa

SEQ ID NO: 1393351 - RNA, 19 nt, Homo sapiens
  misc_RNA (1)...(19): siRNA sense strand
ugggaagggcugccacauu

SEQ ID NO: 1393352 - RNA, 19 nt, Homo sapiens
  misc_RNA (1)...(19): siRNA sense strand
gaaggaaccugaaggcauu

SEQ ID NO: 1393353 - RNA, 19 nt, Homo sapiens
  misc_RNA (1)...(19): siRNA sense strand
gaacauggacugaaguauc

SEQ ID NO: 1393354 - RNA, 19 nt, Homo sapiens
  misc_RNA (1)...(19): siRNA sense strand
uagcggaucuggccaucua

SEQ ID NO: 1393355 - RNA, 19 nt, Homo sapiens
  misc_RNA (1)...(19): siRNA sense strand
gauucgagccuuugugaaa

SEQ ID NO: 1393356 - RNA, 19 nt, Homo sapiens
  misc_RNA (1)...(19): siRNA sense strand
ggaaaguccuagcggaucu

SEQ ID NO: 1393357 - RNA, 19 nt, Homo sapiens
  misc_RNA (1)...(19): siRNA sense strand
ccaggaacauggacugaag

SEQ ID NO: 1393358 - RNA, 19 nt, Homo sapiens
  misc_RNA (1)...(19): siRNA sense strand
gaggcgacacgaaggauuu

SEQ ID NO: 1393359 - RNA, 19 nt, Homo sapiens
  misc_RNA (1)...(19): siRNA sense strand
agguggagcucaacaggaa

SEQ ID NO: 1393360 - RNA, 19 nt, Homo sapiens
  misc_RNA (1)...(19): siRNA sense strand
gaaguauccagcgcucauu

SEQ ID NO: 1393361 - RNA, 19 nt, Homo sapiens
  misc_RNA (1)...(19): siRNA sense strand
ggucagaaccgugauucga

SEQ ID NO: 1393362 - RNA, 19 nt, Homo sapiens
  misc_RNA (1)...(19): siRNA sense strand
cgucaccgaccgcuacuuu

SEQ ID NO: 1393363 - RNA, 19 nt, Homo sapiens
  misc_RNA (1)...(19): siRNA sense strand
gcucauugggaauuuaguu

SEQ ID NO: 1393364 - RNA, 19 nt, Homo sapiens
  misc_RNA (1)...(19): siRNA sense strand
gugauucgagccuuuguga

SEQ ID NO: 1393365 - RNA, 19 nt, Homo sapiens
  misc_RNA (1)...(19): siRNA sense strand
ccucuggauuaaucgaauu

SEQ ID NO: 1393366 - RNA, 19 nt, Homo sapiens
  misc_RNA (1)...(19): siRNA sense strand
ggaggcgacacgaaggauu

SEQ ID NO: 1393367 - RNA, 19 nt, Homo sapiens
  misc_RNA (1)...(19): siRNA sense strand
ccaaagcccgauaccugaa

SEQ ID NO: 1393368 - RNA, 19 nt, Homo sapiens
  misc_RNA (1)...(19): siRNA sense strand
cagcgcucauugggaauuu

SEQ ID NO: 1393369 - RNA, 19 nt, Homo sapiens
  misc_RNA (1)...(19): siRNA sense strand
cauugggaauuuaguuaag

SEQ ID NO: 1393370 - RNA, 19 nt, Homo sapiens
  misc_RNA (1)...(19): siRNA sense strand
aaagcccgauaccugaaga

SEQ ID NO: 1393371 - RNA, 19 nt, Homo sapiens
  misc_RNA (1)...(19): siRNA sense strand
ggaacauggacugaaguau

SEQ ID NO: 1393372 - RNA, 19 nt, Homo sapiens
  misc_RNA (1)...(19): siRNA sense strand
cucauugggaauuuaguua

SEQ ID NO: 1393373 - RNA, 19 nt, Homo sapiens
  misc_RNA (1)...(19): siRNA sense strand
uuuccagaguggugcagua

SEQ ID NO: 1393374 - RNA, 19 nt, Homo sapiens
  misc_RNA (1)...(19): siRNA sense strand
aaccgugauucgagccuuu

SEQ ID NO: 1393375 - RNA, 19 nt, Homo sapiens
  misc_RNA (1)...(19): siRNA sense strand
caaccagagugaccugauu

SEQ ID NO: 1393376 - RNA, 19 nt, Homo sapiens
  misc_RNA (1)...(19): siRNA sense strand
ccaagugcauggaugugua

SEQ ID NO: 1393377 - RNA, 19 nt, Homo sapiens
  misc_RNA (1)...(19): siRNA sense strand
cgagaugcuuuauggauug

SEQ ID NO: 1393378 - RNA, 19 nt, Homo sapiens
  misc_RNA (1)...(19): siRNA sense strand
gcucuacgguuucaagauc

SEQ ID NO: 1393379 - RNA, 19 nt, Homo sapiens
  misc_RNA (1)...(19): siRNA sense strand
gcaaggagacuuugguuac

SEQ ID NO: 1393380 - RNA, 19 nt, Homo sapiens
  misc_RNA (1)...(19): siRNA sense strand
gacaagcucuagacaugau

SEQ ID NO: 1393381 - RNA, 19 nt, Homo sapiens
  misc_RNA (1)...(19): siRNA sense strand
ugaaguggaugaagacuac

SEQ ID NO: 1393382 - RNA, 19 nt, Homo sapiens
  misc_RNA (1)...(19): siRNA sense strand
cuacauccaggacaaauuu

SEQ ID NO: 1393383 - RNA, 19 nt, Homo sapiens
  misc_RNA (1)...(19): siRNA sense strand
cagccgagaugcuuuaugg

SEQ ID NO: 1393384 - RNA, 19 nt, Homo sapiens
  misc_RNA (1)...(19): siRNA sense strand
ccgagaugcuuuauggauu

SEQ ID NO: 1393385 - RNA, 19 nt, Homo sapiens
  misc_RNA (1)...(19): siRNA sense strand
ccuggagccugaugaagaa

SEQ ID NO: 1393386 - RNA, 19 nt, Homo sapiens
  misc_RNA (1)...(19): siRNA sense strand
augaagaacuggaagacaa

SEQ ID NO: 1393387 - RNA, 19 nt, Homo sapiens
  misc_RNA (1)...(19): siRNA sense strand
gcacugguuucccucacau

SEQ ID NO: 1393388 - RNA, 19 nt, Homo sapiens
  misc_RNA (1)...(19): siRNA sense strand
gagaugcuuuauggauuga

SEQ ID NO: 1393389 - RNA, 19 nt, Homo sapiens
  misc_RNA (1)...(19): siRNA sense strand
ggaccuggagccugaugaa

SEQ ID NO: 1393390 - RNA, 19 nt, Homo sapiens
  misc_RNA (1)...(19): siRNA sense strand
caaggagacuuugguuacu

SEQ ID NO: 1393391 - RNA, 19 nt, Homo sapiens
  misc_RNA (1)...(19): siRNA sense strand
guaccagcaaggagacuuu

SEQ ID NO: 1393392 - RNA, 19 nt, Homo sapiens
  misc_RNA (1)...(19): siRNA sense strand
guacacacccaagucauca

SEQ ID NO: 1393393 - RNA, 19 nt, Homo sapiens
  misc_RNA (1)...(19): siRNA sense strand
gcaggcagccgagaugcuu

SEQ ID NO: 1393394 - RNA, 19 nt, Homo sapiens
  misc_RNA (1)...(19): siRNA sense strand
uaaucuuacuggacucaau

SEQ ID NO: 1393395 - RNA, 19 nt, Homo sapiens
  misc_RNA (1)...(19): siRNA sense strand
ccauuggccuuucagacau

SEQ ID NO: 1393396 - RNA, 19 nt, Homo sapiens
  misc_RNA (1)...(19): siRNA sense strand
ugcccaggcucuacgguuu

SEQ ID NO: 1393397 - RNA, 19 nt, Homo sapiens
  misc_RNA (1)...(19): siRNA sense strand
cgacaagcucuagacauga

SEQ ID NO: 1393398 - RNA, 19 nt, Homo sapiens
  misc_RNA (1)...(19): siRNA sense strand
aagacuacauccaggacaa

SEQ ID NO: 1393399 - RNA, 19 nt, Homo sapiens
  misc_RNA (1)...(19): siRNA sense strand
gagaccugccaaccaguuu

SEQ ID NO: 1393400 - RNA, 19 nt, Homo sapiens
  misc_RNA (1)...(19): siRNA sense strand
gaugcuuuauggauugauc

SEQ ID NO: 1393401 - RNA, 19 nt, Homo sapiens
  misc_RNA (1)...(19): siRNA sense strand
uguccuggauuuccugguu

SEQ ID NO: 1393402 - RNA, 19 nt, Homo sapiens
  misc_RNA (1)...(19): siRNA sense strand
ggagccugaugaagaacug

SEQ ID NO: 1393403 - RNA, 19 nt, Homo sapiens
  misc_RNA (1)...(19): siRNA sense strand
gugaagccauggugaagcu

SEQ ID NO: 1393404 - RNA, 19 nt, Homo sapiens
  misc_RNA (1)...(19): siRNA sense strand
ccaagccgccagcaacuuc

SEQ ID NO: 1393405 - RNA, 19 nt, Homo sapiens
  misc_RNA (1)...(19): siRNA sense strand
uuacuguccucguguguac

SEQ ID NO: 1393406 - RNA, 19 nt, Homo sapiens
  misc_RNA (1)...(19): siRNA sense strand
ccaagagaccugccaacca

SEQ ID NO: 1393407 - RNA, 19 nt, Homo sapiens
  misc_RNA (1)...(19): siRNA sense strand
guccucguguguacuguga

SEQ ID NO: 1393408 - RNA, 19 nt, Homo sapiens
  misc_RNA (1)...(19): siRNA sense strand
cagcaaggagacuuugguu

SEQ ID NO: 1393409 - RNA, 19 nt, Homo sapiens
  misc_RNA (1)...(19): siRNA sense strand
gugaaguggaugaagacua

SEQ ID NO: 1393410 - RNA, 19 nt, Homo sapiens
  misc_RNA (1)...(19): siRNA sense strand
ccucguguguacugugaga

SEQ ID NO: 1393411 - RNA, 19 nt, Homo sapiens
  misc_RNA (1)...(19): siRNA sense strand
gccgagaugcuuuauggau

SEQ ID NO: 1393412 - RNA, 19 nt, Homo sapiens
  misc_RNA (1)...(19): siRNA sense strand
gaugaagaacuggaagaca

SEQ ID NO: 1393413 - RNA, 19 nt, Homo sapiens
  misc_RNA (1)...(19): siRNA sense strand
cauggugcaucccgaguac

SEQ ID NO: 1393414 - RNA, 19 nt, Homo sapiens
  misc_RNA (1)...(19): siRNA sense strand
ccaggacaaauuuaaucuu

SEQ ID NO: 1393415 - RNA, 19 nt, Homo sapiens
  misc_RNA (1)...(19): siRNA sense strand
cauccaggacaaauuuaau

SEQ ID NO: 1393416 - RNA, 19 nt, Homo sapiens
  misc_RNA (1)...(19): siRNA sense strand
caggugaagccauggugaa

SEQ ID NO: 1393417 - RNA, 19 nt, Homo sapiens
  misc_RNA (1)...(19): siRNA sense strand
gcaagacaguucaauauga

SEQ ID NO: 1393418 - RNA, 19 nt, Homo sapiens
  misc_RNA (1)...(19): siRNA sense strand
gaacaugggugacauuugg

SEQ ID NO: 1393419 - RNA, 19 nt, Homo sapiens
  misc_RNA (1)...(19): siRNA sense strand
gaaggacuauagaucauaa

SEQ ID NO: 1393420 - RNA, 19 nt, Homo sapiens
  misc_RNA (1)...(19): siRNA sense strand
aaagagggcugucaagaaa

SEQ ID NO: 1393421 - RNA, 19 nt, Homo sapiens
  misc_RNA (1)...(19): siRNA sense strand
gaaagagggcugucaagaa

SEQ ID NO: 1393422 - RNA, 19 nt, Homo sapiens
  misc_RNA (1)...(19): siRNA sense strand
caucacaugugguaaauga

SEQ ID NO: 1393423 - RNA, 19 nt, Homo sapiens
  misc_RNA (1)...(19): siRNA sense strand
gguguuaaccucuuugaua

SEQ ID NO: 1393424 - RNA, 19 nt, Homo sapiens
  misc_RNA (1)...(19): siRNA sense strand
uggaaaggcugaagugauu

SEQ ID NO: 1393425 - RNA, 19 nt, Homo sapiens
  misc_RNA (1)...(19): siRNA sense strand
gaggucaaauuucagauga

SEQ ID NO: 1393426 - RNA, 19 nt, Homo sapiens
  misc_RNA (1)...(19): siRNA sense strand
gaaauuguccgagccauga

SEQ ID NO: 1393427 - RNA, 19 nt, Homo sapiens
  misc_RNA (1)...(19): siRNA sense strand
gaaaugaaggugugaguuc

SEQ ID NO: 1393428 - RNA, 19 nt, Homo sapiens
  misc_RNA (1)...(19): siRNA sense strand
gcaaaucgaccggacagua

SEQ ID NO: 1393429 - RNA, 19 nt, Homo sapiens
  misc_RNA (1)...(19): siRNA sense strand
gcaacaagcccuacagcaa

SEQ ID NO: 1393430 - RNA, 19 nt, Homo sapiens
  misc_RNA (1)...(19): siRNA sense strand
caagacaguucaauaugau

SEQ ID NO: 1393431 - RNA, 19 nt, Homo sapiens
  misc_RNA (1)...(19): siRNA sense strand
caaaucgaccggacaguaa

SEQ ID NO: 1393432 - RNA, 19 nt, Homo sapiens
  misc_RNA (1)...(19): siRNA sense strand
caagaaggacuauagauca

SEQ ID NO: 1393433 - RNA, 19 nt, Homo sapiens
  misc_RNA (1)...(19): siRNA sense strand
gcaagaaggacuauagauc

SEQ ID NO: 1393434 - RNA, 19 nt, Homo sapiens
  misc_RNA (1)...(19): siRNA sense strand
gaccaucgccuaugaaagu

SEQ ID NO: 1393435 - RNA, 19 nt, Homo sapiens
  misc_RNA (1)...(19): siRNA sense strand
cauggaagccuauucugua

SEQ ID NO: 1393436 - RNA, 19 nt, Homo sapiens
  misc_RNA (1)...(19): siRNA sense strand
gcauauuauugaaggauug

SEQ ID NO: 1393437 - RNA, 19 nt, Homo sapiens
  misc_RNA (1)...(19): siRNA sense strand
guagcaagacaguucaaua

SEQ ID NO: 1393438 - RNA, 19 nt, Homo sapiens
  misc_RNA (1)...(19): siRNA sense strand
guauguggauguggucuuu

SEQ ID NO: 1393439 - RNA, 19 nt, Homo sapiens
  misc_RNA (1)...(19): siRNA sense strand
ggaagccuauucuguagca

SEQ ID NO: 1393440 - RNA, 19 nt, Homo sapiens
  misc_RNA (1)...(19): siRNA sense strand
gauguggucuuugcaaauc

SEQ ID NO: 1393441 - RNA, 19 nt, Homo sapiens
  misc_RNA (1)...(19): siRNA sense strand
gaaagaauuguaagugaag

SEQ ID NO: 1393442 - RNA, 19 nt, Homo sapiens
  misc_RNA (1)...(19): siRNA sense strand
caagcugaguaccaucuuu

SEQ ID NO: 1393443 - RNA, 19 nt, Homo sapiens
  misc_RNA (1)...(19): siRNA sense strand
ggagcaucaucaagaagaa

SEQ ID NO: 1393444 - RNA, 19 nt, Homo sapiens
  misc_RNA (1)...(19): siRNA sense strand
ugccagagcucuaccacaa

SEQ ID NO: 1393445 - RNA, 19 nt, Homo sapiens
  misc_RNA (1)...(19): siRNA sense strand
caguaacacucccauggaa

SEQ ID NO: 1393446 - RNA, 19 nt, Homo sapiens
  misc_RNA (1)...(19): siRNA sense strand
ccauucagguucucccaaa

SEQ ID NO: 1393447 - RNA, 19 nt, Homo sapiens
  misc_RNA (1)...(19): siRNA sense strand
uagcaagacaguucaauau

SEQ ID NO: 1393448 - RNA, 19 nt, Homo sapiens
  misc_RNA (1)...(19): siRNA sense strand
ugacacaugugauaaacca

SEQ ID NO: 1393449 - RNA, 19 nt, Homo sapiens
  misc_RNA (1)...(19): siRNA sense strand
uggaaaagcugaaacagaa

SEQ ID NO: 1393450 - RNA, 19 nt, Homo sapiens
  misc_RNA (1)...(19): siRNA sense strand
ggaaucaucucaggaaaau

SEQ ID NO: 1393451 - RNA, 19 nt, Homo sapiens
  misc_RNA (1)...(19): siRNA sense strand
ggagugcuauggagaucau

SEQ ID NO: 1393452 - RNA, 19 nt, Homo sapiens
  misc_RNA (1)...(19): siRNA sense strand
gauaacauacugcgcaaca

SEQ ID NO: 1393453 - RNA, 19 nt, Homo sapiens
  misc_RNA (1)...(19): siRNA sense strand
guaacacucccauggaaga

SEQ ID NO: 1393454 - RNA, 19 nt, Homo sapiens
  misc_RNA (1)...(19): siRNA sense strand
ggcugcagcucgaguaugu

SEQ ID NO: 1393455 - RNA, 19 nt, Homo sapiens
  misc_RNA (1)...(19): siRNA sense strand
gaucauccacuccugaaca

SEQ ID NO: 1393456 - RNA, 19 nt, Homo sapiens
  misc_RNA (1)...(19): siRNA sense strand
guguuaaccucuuugauac

SEQ ID NO: 1393457 - RNA, 19 nt, Homo sapiens
  misc_RNA (1)...(19): siRNA sense strand
ugaacaagcugaguaccau

SEQ ID NO: 1393458 - RNA, 19 nt, Homo sapiens
  misc_RNA (1)...(19): siRNA sense strand
gaucauggaagccuauucu

SEQ ID NO: 1393459 - RNA, 19 nt, Homo sapiens
  misc_RNA (1)...(19): siRNA sense strand
ggagaaaacagcaaaacaa

SEQ ID NO: 1393460 - RNA, 19 nt, Homo sapiens
  misc_RNA (1)...(19): siRNA sense strand
ggaggucaaauuucagaug

SEQ ID NO: 1393461 - RNA, 19 nt, Homo sapiens
  misc_RNA (1)...(19): siRNA sense strand
ugagauugauaacauacug

SEQ ID NO: 1393462 - RNA, 19 nt, Homo sapiens
  misc_RNA (1)...(19): siRNA sense strand
cagguucucccaaagauga

SEQ ID NO: 1393463 - RNA, 19 nt, Homo sapiens
  misc_RNA (1)...(19): siRNA sense strand
cguggugccugagaaauga

SEQ ID NO: 1393464 - RNA, 19 nt, Homo sapiens
  misc_RNA (1)...(19): siRNA sense strand
gggagcaucaucaagaaga

SEQ ID NO: 1393465 - RNA, 19 nt, Homo sapiens
  misc_RNA (1)...(19): siRNA sense strand
ucacaugugguaaaugaga

SEQ ID NO: 1393466 - RNA, 19 nt, Homo sapiens
  misc_RNA (1)...(19): siRNA sense strand
ggaacaugggugacauuug

SEQ ID NO: 1393467 - RNA, 19 nt, Homo sapiens
  misc_RNA (1)...(19): siRNA sense strand
ucaaauuucagaugagguu

SEQ ID NO: 1393468 - RNA, 19 nt, Homo sapiens
  misc_RNA (1)...(19): siRNA sense strand
guuaaccucuuugauacug

SEQ ID NO: 1393469 - RNA, 19 nt, Homo sapiens
  misc_RNA (1)...(19): siRNA sense strand
aaagugguguuaaccucuu

SEQ ID NO: 1393470 - RNA, 19 nt, Homo sapiens
  misc_RNA (1)...(19): siRNA sense strand
ccagagcucuaccacaaaa

SEQ ID NO: 1393471 - RNA, 19 nt, Homo sapiens
  misc_RNA (1)...(19): siRNA sense strand
guggaaucaucucaggaaa

SEQ ID NO: 1393472 - RNA, 19 nt, Homo sapiens
  misc_RNA (1)...(19): siRNA sense strand
ggucauaacaaccaaacuc

SEQ ID NO: 1393473 - RNA, 19 nt, Homo sapiens
  misc_RNA (1)...(19): siRNA sense strand
aagaaggacuauagaucau

SEQ ID NO: 1393474 - RNA, 19 nt, Homo sapiens
  misc_RNA (1)...(19): siRNA sense strand
aacaagcccuacagcaaga

SEQ ID NO: 1393475 - RNA, 19 nt, Homo sapiens
  misc_RNA (1)...(19): siRNA sense strand
ggauguggucuuugcaaau

SEQ ID NO: 1393476 - RNA, 19 nt, Homo sapiens
  misc_RNA (1)...(19): siRNA sense strand
cauaacaaccaaacucuac

SEQ ID NO: 1393477 - RNA, 19 nt, Homo sapiens
  misc_RNA (1)...(19): siRNA sense strand
uaacauacugcgcaacaag

SEQ ID NO: 1393478 - RNA, 19 nt, Homo sapiens
  misc_RNA (1)...(19): siRNA sense strand
cugaacaacucauugaaaa

SEQ ID NO: 1393479 - RNA, 19 nt, Homo sapiens
  misc_RNA (1)...(19): siRNA sense strand
ccugaacaacucauugaaa

SEQ ID NO: 1393480 - RNA, 19 nt, Homo sapiens
  misc_RNA (1)...(19): siRNA sense strand
gaaacggggugccugaaag

SEQ ID NO: 1393481 - RNA, 19 nt, Homo sapiens
  misc_RNA (1)...(19): siRNA sense strand
ggagaucauggaagccuau

SEQ ID NO: 1393482 - RNA, 19 nt, Homo sapiens
  misc_RNA (1)...(19): siRNA sense strand
acacucccauggaagaaau

SEQ ID NO: 1393483 - RNA, 19 nt, Homo sapiens
  misc_RNA (1)...(19): siRNA sense strand
uggauguggucuuugcaaa

SEQ ID NO: 1393484 - RNA, 19 nt, Homo sapiens
  misc_RNA (1)...(19): siRNA sense strand
gaaaggcugaagugauucu

SEQ ID NO: 1393485 - RNA, 19 nt, Homo sapiens
  misc_RNA (1)...(19): siRNA sense strand
gagaaaugaaggugugagu

SEQ ID NO: 1393486 - RNA, 19 nt, Homo sapiens
  misc_RNA (1)...(19): siRNA sense strand
cgucugggaugcacacuac

SEQ ID NO: 1393487 - RNA, 19 nt, Homo sapiens
  misc_RNA (1)...(19): siRNA sense strand
gagcaucaucaagaagaaa

SEQ ID NO: 1393488 - RNA, 19 nt, Homo sapiens
  misc_RNA (1)...(19): siRNA sense strand
cagcaagaaggacuauaga

SEQ ID NO: 1393489 - RNA, 19 nt, Homo sapiens
  misc_RNA (1)...(19): siRNA sense strand
accaaggcauggcgaugua

SEQ ID NO: 1393490 - RNA, 19 nt, Homo sapiens
  misc_RNA (1)...(19): siRNA sense strand
agaaagagggcugucaaga

SEQ ID NO: 1393491 - RNA, 19 nt, Homo sapiens
  misc_RNA (1)...(19): siRNA sense strand
gcucgaguauguggaugug

SEQ ID NO: 1393492 - RNA, 19 nt, Homo sapiens
  misc_RNA (1)...(19): siRNA sense strand
gcuugggucuuggaacaug

SEQ ID NO: 1393493 - RNA, 19 nt, Homo sapiens
  misc_RNA (1)...(19): siRNA sense strand
cgagauggagugcuaugga

SEQ ID NO: 1393494 - RNA, 19 nt, Homo sapiens
  misc_RNA (1)...(19): siRNA sense strand
agaaggacuauagaucaua

SEQ ID NO: 1393495 - RNA, 19 nt, Homo sapiens
  misc_RNA (1)...(19): siRNA sense strand
ccaccggucugugaacaag

SEQ ID NO: 1393496 - RNA, 19 nt, Homo sapiens
  misc_RNA (1)...(19): siRNA sense strand
ucauaacaaccaaacucua

SEQ ID NO: 1393497 - RNA, 19 nt, Homo sapiens
  misc_RNA (1)...(19): siRNA sense strand
gaaaacagcaaaacaagcu

SEQ ID NO: 1393498 - RNA, 19 nt, Homo sapiens
  misc_RNA (1)...(19): siRNA sense strand
gaagggagaaaacagcaaa

SEQ ID NO: 1393499 - RNA, 19 nt, Homo sapiens
  misc_RNA (1)...(19): siRNA sense strand
uaacaaccaaacucuacug

SEQ ID NO: 1393500 - RNA, 19 nt, Homo sapiens
  misc_RNA (1)...(19): siRNA sense strand
cuaugaaagugguguuaac

SEQ ID NO: 1393501 - RNA, 19 nt, Homo sapiens
  misc_RNA (1)...(19): siRNA sense strand
cugaacggcugaugaccau

SEQ ID NO: 1393502 - RNA, 19 nt, Homo sapiens
  misc_RNA (1)...(19): siRNA sense strand
aaaugaaggugugaguucu

SEQ ID NO: 1393503 - RNA, 19 nt, Homo sapiens
  misc_RNA (1)...(19): siRNA sense strand
gggcugucaagaaagcaua

SEQ ID NO: 1393504 - RNA, 19 nt, Homo sapiens
  misc_RNA (1)...(19): siRNA sense strand
gugguaaaugagauugaua

SEQ ID NO: 1393505 - RNA, 19 nt, Homo sapiens
  misc_RNA (1)...(19): siRNA sense strand
gcguggugccugagaaaug

SEQ ID NO: 1393506 - RNA, 19 nt, Homo sapiens
  misc_RNA (1)...(19): siRNA sense strand
ugauacugccgaagucuau

SEQ ID NO: 1393507 - RNA, 19 nt, Homo sapiens
  misc_RNA (1)...(19): siRNA sense strand
gauggagugcuauggagau

SEQ ID NO: 1393508 - RNA, 19 nt, Homo sapiens
  misc_RNA (1)...(19): siRNA sense strand
ccuauucuguagcaagaca

SEQ ID NO: 1393509 - RNA, 19 nt, Homo sapiens
  misc_RNA (1)...(19): siRNA sense strand
agucuaugcugcuggaaag

SEQ ID NO: 1393510 - RNA, 19 nt, Homo sapiens
  misc_RNA (1)...(19): siRNA sense strand
gaucccaccggucugugaa

SEQ ID NO: 1393511 - RNA, 19 nt, Homo sapiens
  misc_RNA (1)...(19): siRNA sense strand
gcagcucgaguauguggau

SEQ ID NO: 1393512 - RNA, 19 nt, Homo sapiens
  misc_RNA (1)...(19): siRNA sense strand
acagcaagaaggacuauag

SEQ ID NO: 1393513 - RNA, 19 nt, Homo sapiens
  misc_RNA (1)...(19): siRNA sense strand
ggaaacggggugccugaaa

SEQ ID NO: 1393514 - RNA, 19 nt, Homo sapiens
  misc_RNA (1)...(19): siRNA sense strand
ucauggaagccuauucugu

SEQ ID NO: 1393515 - RNA, 19 nt, Homo sapiens
  misc_RNA (1)...(19): siRNA sense strand
ugaaaaccuuggugccauu

SEQ ID NO: 1393516 - RNA, 19 nt, Homo sapiens
  misc_RNA (1)...(19): siRNA sense strand
uugcuugggucuuggaaca

SEQ ID NO: 1393517 - RNA, 19 nt, Homo sapiens
  misc_RNA (1)...(19): siRNA sense strand
gcaagacaguucaauauga

SEQ ID NO: 1393518 - RNA, 19 nt, Homo sapiens
  misc_RNA (1)...(19): siRNA sense strand
gaacaugggugacauuugg

SEQ ID NO: 1393519 - RNA, 19 nt, Homo sapiens
  misc_RNA (1)...(19): siRNA sense strand
gaaggacuauagaucauaa

SEQ ID NO: 1393520 - RNA, 19 nt, Homo sapiens
  misc_RNA (1)...(19): siRNA sense strand
aaagagggcugucaagaaa

SEQ ID NO: 1393521 - RNA, 19 nt, Homo sapiens
  misc_RNA (1)...(19): siRNA sense strand
gaaagagggcugucaagaa

SEQ ID NO: 1393522 - RNA, 19 nt, Homo sapiens
  misc_RNA (1)...(19): siRNA sense strand
caucacaugugguaaauga

SEQ ID NO: 1393523 - RNA, 19 nt, Homo sapiens
  misc_RNA (1)...(19): siRNA sense strand
gguguuaaccucuuugaua

SEQ ID NO: 1393524 - RNA, 19 nt, Homo sapiens
  misc_RNA (1)...(19): siRNA sense strand
uggaaaggcugaagugauu

SEQ ID NO: 1393525 - RNA, 19 nt, Homo sapiens
  misc_RNA (1)...(19): siRNA sense strand
gaggucaaauuucagauga

SEQ ID NO: 1393526 - RNA, 19 nt, Homo sapiens
  misc_RNA (1)...(19): siRNA sense strand
gaaauuguccgagccauga

SEQ ID NO: 1393527 - RNA, 19 nt, Homo sapiens
  misc_RNA (1)...(19): siRNA sense strand
gaaaugaaggugugaguuc

SEQ ID NO: 1393528 - RNA, 19 nt, Homo sapiens
  misc_RNA (1)...(19): siRNA sense strand
gcaaaucgaccggacagua

SEQ ID NO: 1393529 - RNA, 19 nt, Homo sapiens
  misc_RNA (1)...(19): siRNA sense strand
gcaacaagcccuacagcaa

SEQ ID NO: 1393530 - RNA, 19 nt, Homo sapiens
  misc_RNA (1)...(19): siRNA sense strand
caagacaguucaauaugau

SEQ ID NO: 1393531 - RNA, 19 nt, Homo sapiens
  misc_RNA (1)...(19): siRNA sense strand
caaaucgaccggacaguaa

SEQ ID NO: 1393532 - RNA, 19 nt, Homo sapiens
  misc_RNA (1)...(19): siRNA sense strand
caagaaggacuauagauca

SEQ ID NO: 1393533 - RNA, 19 nt, Homo sapiens
  misc_RNA (1)...(19): siRNA sense strand
gcaagaaggacuauagauc

SEQ ID NO: 1393534 - RNA, 19 nt, Homo sapiens
  misc_RNA (1)...(19): siRNA sense strand
gaccaucgccuaugaaagu

SEQ ID NO: 1393535 - RNA, 19 nt, Homo sapiens
  misc_RNA (1)...(19): siRNA sense strand
cauggaagccuauucugua

SEQ ID NO: 1393536 - RNA, 19 nt, Homo sapiens
  misc_RNA (1)...(19): siRNA sense strand
gcauauuauugaaggauug

SEQ ID NO: 1393537 - RNA, 19 nt, Homo sapiens
  misc_RNA (1)...(19): siRNA sense strand
guagcaagacaguucaaua

SEQ ID NO: 1393538 - RNA, 19 nt, Homo sapiens
  misc_RNA (1)...(19): siRNA sense strand
guauguggauguggucuuu

SEQ ID NO: 1393539 - RNA, 19 nt, Homo sapiens
  misc_RNA (1)...(19): siRNA sense strand
ggaagccuauucuguagca

SEQ ID NO: 1393540 - RNA, 19 nt, Homo sapiens
  misc_RNA (1)...(19): siRNA sense strand
gauguggucuuugcaaauc

SEQ ID NO: 1393541 - RNA, 19 nt, Homo sapiens
  misc_RNA (1)...(19): siRNA sense strand
gaaagaauuguaagugaag

SEQ ID NO: 1393542 - RNA, 19 nt, Homo sapiens
  misc_RNA (1)...(19): siRNA sense strand
caagcugaguaccaucuuu

SEQ ID NO: 1393543 - RNA, 19 nt, Homo sapiens
  misc_RNA (1)...(19): siRNA sense strand
ggagcaucaucaagaagaa

SEQ ID NO: 1393544 - RNA, 19 nt, Homo sapiens
  misc_RNA (1)...(19): siRNA sense strand
ugccagagcucuaccacaa

SEQ ID NO: 1393545 - RNA, 19 nt, Homo sapiens
  misc_RNA (1)...(19): siRNA sense strand
caguaacacucccauggaa

SEQ ID NO: 1393546 - RNA, 19 nt, Homo sapiens
  misc_RNA (1)...(19): siRNA sense strand
ccauucagguucucccaaa

SEQ ID NO: 1393547 - RNA, 19 nt, Homo sapiens
  misc_RNA (1)...(19): siRNA sense strand
uagcaagacaguucaauau

SEQ ID NO: 1393548 - RNA, 19 nt, Homo sapiens
  misc_RNA (1)...(19): siRNA sense strand
ugacacaugugauaaacca

SEQ ID NO: 1393549 - RNA, 19 nt, Homo sapiens
  misc_RNA (1)...(19): siRNA sense strand
uggaaaagcugaaacagaa

SEQ ID NO: 1393550 - RNA, 19 nt, Homo sapiens
  misc_RNA (1)...(19): siRNA sense strand
ggaaucaucucaggaaaau

SEQ ID NO: 1393551 - RNA, 19 nt, Homo sapiens
  misc_RNA (1)...(19): siRNA sense strand
ggagugcuauggagaucau

SEQ ID NO: 1393552 - RNA, 19 nt, Homo sapiens
  misc_RNA (1)...(19): siRNA sense strand
gauaacauacugcgcaaca

SEQ ID NO: 1393553 - RNA, 19 nt, Homo sapiens
  misc_RNA (1)...(19): siRNA sense strand
guaacacucccauggaaga

SEQ ID NO: 1393554 - RNA, 19 nt, Homo sapiens
  misc_RNA (1)...(19): siRNA sense strand
ggcugcagcucgaguaugu

SEQ ID NO: 1393555 - RNA, 19 nt, Homo sapiens
  misc_RNA (1)...(19): siRNA sense strand
gaucauccacuccugaaca

SEQ ID NO: 1393556 - RNA, 19 nt, Homo sapiens
  misc_RNA (1)...(19): siRNA sense strand
guguuaaccucuuugauac

SEQ ID NO: 1393557 - RNA, 19 nt, Homo sapiens
  misc_RNA (1)...(19): siRNA sense strand
ugaacaagcugaguaccau

SEQ ID NO: 1393558 - RNA, 19 nt, Homo sapiens
  misc_RNA (1)...(19): siRNA sense strand
gaucauggaagccuauucu

SEQ ID NO: 1393559 - RNA, 19 nt, Homo sapiens
  misc_RNA (1)...(19): siRNA sense strand
ggagaaaacagcaaaacaa

SEQ ID NO: 1393560 - RNA, 19 nt, Homo sapiens
  misc_RNA (1)...(19): siRNA sense strand
ggaggucaaauuucagaug

SEQ ID NO: 1393561 - RNA, 19 nt, Homo sapiens
  misc_RNA (1)...(19): siRNA sense strand
ugagauugauaacauacug

SEQ ID NO: 1393562 - RNA, 19 nt, Homo sapiens
  misc_RNA (1)...(19): siRNA sense strand
cagguucucccaaagauga

SEQ ID NO: 1393563 - RNA, 19 nt, Homo sapiens
  misc_RNA (1)...(19): siRNA sense strand
cguggugccugagaaauga

SEQ ID NO: 1393564 - RNA, 19 nt, Homo sapiens
  misc_RNA (1)...(19): siRNA sense strand
gggagcaucaucaagaaga

SEQ ID NO: 1393565 - RNA, 19 nt, Homo sapiens
  misc_RNA (1)...(19): siRNA sense strand
ucacaugugguaaaugaga

SEQ ID NO: 1393566 - RNA, 19 nt, Homo sapiens
  misc_RNA (1)...(19): siRNA sense strand
ggaacaugggugacauuug

SEQ ID NO: 1393567 - RNA, 19 nt, Homo sapiens
  misc_RNA (1)...(19): siRNA sense strand
ucaaauuucagaugagguu

SEQ ID NO: 1393568 - RNA, 19 nt, Homo sapiens
  misc_RNA (1)...(19): siRNA sense strand
guuaaccucuuugauacug

SEQ ID NO: 1393569 - RNA, 19 nt, Homo sapiens
  misc_RNA (1)...(19): siRNA sense strand
aaagugguguuaaccucuu

SEQ ID NO: 1393570 - RNA, 19 nt, Homo sapiens
  misc_RNA (1)...(19): siRNA sense strand
ccagagcucuaccacaaaa

SEQ ID NO: 1393571 - RNA, 19 nt, Homo sapiens
  misc_RNA (1)...(19): siRNA sense strand
guggaaucaucucaggaaa

SEQ ID NO: 1393572 - RNA, 19 nt, Homo sapiens
  misc_RNA (1)...(19): siRNA sense strand
ggucauaacaaccaaacuc

SEQ ID NO: 1393573 - RNA, 19 nt, Homo sapiens
  misc_RNA (1)...(19): siRNA sense strand
aagaaggacuauagaucau

SEQ ID NO: 1393574 - RNA, 19 nt, Homo sapiens
  misc_RNA (1)...(19): siRNA sense strand
aacaagcccuacagcaaga

SEQ ID NO: 1393575 - RNA, 19 nt, Homo sapiens
  misc_RNA (1)...(19): siRNA sense strand
ggauguggucuuugcaaau

SEQ ID NO: 1393576 - RNA, 19 nt, Homo sapiens
  misc_RNA (1)...(19): siRNA sense strand
cauaacaaccaaacucuac

SEQ ID NO: 1393577 - RNA, 19 nt, Homo sapiens
  misc_RNA (1)...(19): siRNA sense strand
uaacauacugcgcaacaag

SEQ ID NO: 1393578 - RNA, 19 nt, Homo sapiens
  misc_RNA (1)...(19): siRNA sense strand
cugaacaacucauugaaaa

SEQ ID NO: 1393579 - RNA, 19 nt, Homo sapiens
  misc_RNA (1)...(19): siRNA sense strand
ccugaacaacucauugaaa

SEQ ID NO: 1393580 - RNA, 19 nt, Homo sapiens
  misc_RNA (1)...(19): siRNA sense strand
gaaacggggugccugaaag

SEQ ID NO: 1393581 - RNA, 19 nt, Homo sapiens
  misc_RNA (1)...(19): siRNA sense strand
ggagaucauggaagccuau

SEQ ID NO: 1393582 - RNA, 19 nt, Homo sapiens
  misc_RNA (1)...(19): siRNA sense strand
acacucccauggaagaaau

SEQ ID NO: 1393583 - RNA, 19 nt, Homo sapiens
  misc_RNA (1)...(19): siRNA sense strand
uggauguggucuuugcaaa

SEQ ID NO: 1393584 - RNA, 19 nt, Homo sapiens
  misc_RNA (1)...(19): siRNA sense strand
gaaaggcugaagugauucu

SEQ ID NO: 1393585 - RNA, 19 nt, Homo sapiens
  misc_RNA (1)...(19): siRNA sense strand
gagaaaugaaggugugagu

SEQ ID NO: 1393586 - RNA, 19 nt, Homo sapiens
  misc_RNA (1)...(19): siRNA sense strand
cgucugggaugcacacuac

SEQ ID NO: 1393587 - RNA, 19 nt, Homo sapiens
  misc_RNA (1)...(19): siRNA sense strand
gagcaucaucaagaagaaa

SEQ ID NO: 1393588 - RNA, 19 nt, Homo sapiens
  misc_RNA (1)...(19): siRNA sense strand
cagcaagaaggacuauaga

SEQ ID NO: 1393589 - RNA, 19 nt, Homo sapiens
  misc_RNA (1)...(19): siRNA sense strand
accaaggcauggcgaugua

SEQ ID NO: 1393590 - RNA, 19 nt, Homo sapiens
  misc_RNA (1)...(19): siRNA sense strand
agaaagagggcugucaaga

SEQ ID NO: 1393591 - RNA, 19 nt, Homo sapiens
  misc_RNA (1)...(19): siRNA sense strand
gcucgaguauguggaugug

SEQ ID NO: 1393592 - RNA, 19 nt, Homo sapiens
  misc_RNA (1)...(19): siRNA sense strand
gcuugggucuuggaacaug

SEQ ID NO: 1393593 - RNA, 19 nt, Homo sapiens
  misc_RNA (1)...(19): siRNA sense strand
cgagauggagugcuaugga

SEQ ID NO: 1393594 - RNA, 19 nt, Homo sapiens
  misc_RNA (1)...(19): siRNA sense strand
agaaggacuauagaucaua

SEQ ID NO: 1393595 - RNA, 19 nt, Homo sapiens
  misc_RNA (1)...(19): siRNA sense strand
ccaccggucugugaacaag

SEQ ID NO: 1393596 - RNA, 19 nt, Homo sapiens
  misc_RNA (1)...(19): siRNA sense strand
ucauaacaaccaaacucua

SEQ ID NO: 1393597 - RNA, 19 nt, Homo sapiens
  misc_RNA (1)...(19): siRNA sense strand
gaaaacagcaaaacaagcu

SEQ ID NO: 1393598 - RNA, 19 nt, Homo sapiens
  misc_RNA (1)...(19): siRNA sense strand
gaagggagaaaacagcaaa

SEQ ID NO: 1393599 - RNA, 19 nt, Homo sapiens
  misc_RNA (1)...(19): siRNA sense strand
uaacaaccaaacucuacug

SEQ ID NO: 1393600 - RNA, 19 nt, Homo sapiens
  misc_RNA (1)...(19): siRNA sense strand
cuaugaaagugguguuaac

SEQ ID NO: 1393601 - RNA, 19 nt, Homo sapiens
  misc_RNA (1)...(19): siRNA sense strand
cugaacggcugaugaccau

SEQ ID NO: 1393602 - RNA, 19 nt, Homo sapiens
  misc_RNA (1)...(19): siRNA sense strand
aaaugaaggugugaguucu

SEQ ID NO: 1393603 - RNA, 19 nt, Homo sapiens
  misc_RNA (1)...(19): siRNA sense strand
gggcugucaagaaagcaua

SEQ ID NO: 1393604 - RNA, 19 nt, Homo sapiens
  misc_RNA (1)...(19): siRNA sense strand
gugguaaaugagauugaua

SEQ ID NO: 1393605 - RNA, 19 nt, Homo sapiens
  misc_RNA (1)...(19): siRNA sense strand
gcguggugccugagaaaug

SEQ ID NO: 1393606 - RNA, 19 nt, Homo sapiens
  misc_RNA (1)...(19): siRNA sense strand
ugauacugccgaagucuau

SEQ ID NO: 1393607 - RNA, 19 nt, Homo sapiens
  misc_RNA (1)...(19): siRNA sense strand
gauggagugcuauggagau

SEQ ID NO: 1393608 - RNA, 19 nt, Homo sapiens
  misc_RNA (1)...(19): siRNA sense strand
ccuauucuguagcaagaca

SEQ ID NO: 1393609 - RNA, 19 nt, Homo sapiens
  misc_RNA (1)...(19): siRNA sense strand
agucuaugcugcuggaaag

SEQ ID NO: 1393610 - RNA, 19 nt, Homo sapiens
  misc_RNA (1)...(19): siRNA sense strand
gaucccaccggucugugaa

SEQ ID NO: 1393611 - RNA, 19 nt, Homo sapiens
  misc_RNA (1)...(19): siRNA sense strand
gcagcucgaguauguggau

SEQ ID NO: 1393612 - RNA, 19 nt, Homo sapiens
  misc_RNA (1)...(19): siRNA sense strand
acagcaagaaggacuauag

SEQ ID NO: 1393613 - RNA, 19 nt, Homo sapiens
  misc_RNA (1)...(19): siRNA sense strand
ggaaacggggugccugaaa

SEQ ID NO: 1393614 - RNA, 19 nt, Homo sapiens
  misc_RNA (1)...(19): siRNA sense strand
ucauggaagccuauucugu

SEQ ID NO: 1393615 - RNA, 19 nt, Homo sapiens
  misc_RNA (1)...(19): siRNA sense strand
ugaaaaccuuggugccauu

SEQ ID NO: 1393616 - RNA, 19 nt, Homo sapiens
  misc_RNA (1)...(19): siRNA sense strand
uugcuugggucuuggaaca

SEQ ID NO: 1393617 - RNA, 19 nt, Homo sapiens
  misc_RNA (1)...(19): siRNA sense strand
gcaagacaguucaauauga

SEQ ID NO: 1393618 - RNA, 19 nt, Homo sapiens
  misc_RNA (1)...(19): siRNA sense strand
gaacaugggugacauuugg

SEQ ID NO: 1393619 - RNA, 19 nt, Homo sapiens
  misc_RNA (1)...(19): siRNA sense strand
gaaggacuauagaucauaa

SEQ ID NO: 1393620 - RNA, 19 nt, Homo sapiens
  misc_RNA (1)...(19): siRNA sense strand
aaagagggcugucaagaaa

SEQ ID NO: 1393621 - RNA, 19 nt, Homo sapiens
  misc_RNA (1)...(19): siRNA sense strand
gaaagagggcugucaagaa

SEQ ID NO: 1393622 - RNA, 19 nt, Homo sapiens
  misc_RNA (1)...(19): siRNA sense strand
caucacaugugguaaauga

SEQ ID NO: 1393623 - RNA, 19 nt, Homo sapiens
  misc_RNA (1)...(19): siRNA sense strand
gguguuaaccucuuugaua

SEQ ID NO: 1393624 - RNA, 19 nt, Homo sapiens
  misc_RNA (1)...(19): siRNA sense strand
uggaaaggcugaagugauu

SEQ ID NO: 1393625 - RNA, 19 nt, Homo sapiens
  misc_RNA (1)...(19): siRNA sense strand
gaggucaaauuucagauga

SEQ ID NO: 1393626 - RNA, 19 nt, Homo sapiens
  misc_RNA (1)...(19): siRNA sense strand
gaaauuguccgagccauga

SEQ ID NO: 1393627 - RNA, 19 nt, Homo sapiens
  misc_RNA (1)...(19): siRNA sense strand
gaaaugaaggugugaguuc

SEQ ID NO: 1393628 - RNA, 19 nt, Homo sapiens
  misc_RNA (1)...(19): siRNA sense strand
gcaaaucgaccggacagua

SEQ ID NO: 1393629 - RNA, 19 nt, Homo sapiens
  misc_RNA (1)...(19): siRNA sense strand
gcaacaagcccuacagcaa

SEQ ID NO: 1393630 - RNA, 19 nt, Homo sapiens
  misc_RNA (1)...(19): siRNA sense strand
caagacaguucaauaugau

SEQ ID NO: 1393631 - RNA, 19 nt, Homo sapiens
  misc_RNA (1)...(19): siRNA sense strand
caaaucgaccggacaguaa

SEQ ID NO: 1393632 - RNA, 19 nt, Homo sapiens
  misc_RNA (1)...(19): siRNA sense strand
caagaaggacuauagauca

SEQ ID NO: 1393633 - RNA, 19 nt, Homo sapiens
  misc_RNA (1)...(19): siRNA sense strand
gcaagaaggacuauagauc

SEQ ID NO: 1393634 - RNA, 19 nt, Homo sapiens
  misc_RNA (1)...(19): siRNA sense strand
gaccaucgccuaugaaagu

SEQ ID NO: 1393635 - RNA, 19 nt, Homo sapiens
  misc_RNA (1)...(19): siRNA sense strand
cauggaagccuauucugua

SEQ ID NO: 1393636 - RNA, 19 nt, Homo sapiens
  misc_RNA (1)...(19): siRNA sense strand
gcauauuauugaaggauug

SEQ ID NO: 1393637 - RNA, 19 nt, Homo sapiens
  misc_RNA (1)...(19): siRNA sense strand
guagcaagacaguucaaua

SEQ ID NO: 1393638 - RNA, 19 nt, Homo sapiens
  misc_RNA (1)...(19): siRNA sense strand
guauguggauguggucuuu

SEQ ID NO: 1393639 - RNA, 19 nt, Homo sapiens
  misc_RNA (1)...(19): siRNA sense strand
ggaagccuauucuguagca

SEQ ID NO: 1393640 - RNA, 19 nt, Homo sapiens
  misc_RNA (1)...(19): siRNA sense strand
gauguggucuuugcaaauc

SEQ ID NO: 1393641 - RNA, 19 nt, Homo sapiens
  misc_RNA (1)...(19): siRNA sense strand
gaaagaauuguaagugaag

SEQ ID NO: 1393642 - RNA, 19 nt, Homo sapiens
  misc_RNA (1)...(19): siRNA sense strand
caagcugaguaccaucuuu

SEQ ID NO: 1393643 - RNA, 19 nt, Homo sapiens
  misc_RNA (1)...(19): siRNA sense strand
ggagcaucaucaagaagaa

SEQ ID NO: 1393644 - RNA, 19 nt, Homo sapiens
  misc_RNA (1)...(19): siRNA sense strand
ugccagagcucuaccacaa

SEQ ID NO: 1393645 - RNA, 19 nt, Homo sapiens
  misc_RNA (1)...(19): siRNA sense strand
caguaacacucccauggaa

SEQ ID NO: 1393646 - RNA, 19 nt, Homo sapiens
  misc_RNA (1)...(19): siRNA sense strand
ccauucagguucucccaaa

SEQ ID NO: 1393647 - RNA, 19 nt, Homo sapiens
  misc_RNA (1)...(19): siRNA sense strand
uagcaagacaguucaauau

SEQ ID NO: 1393648 - RNA, 19 nt, Homo sapiens
  misc_RNA (1)...(19): siRNA sense strand
ugacacaugugauaaacca

SEQ ID NO: 1393649 - RNA, 19 nt, Homo sapiens
  misc_RNA (1)...(19): siRNA sense strand
uggaaaagcugaaacagaa

SEQ ID NO: 1393650 - RNA, 19 nt, Homo sapiens
  misc_RNA (1)...(19): siRNA sense strand
ggaaucaucucaggaaaau

SEQ ID NO: 1393651 - RNA, 19 nt, Homo sapiens
  misc_RNA (1)...(19): siRNA sense strand
ggagugcuauggagaucau

SEQ ID NO: 1393652 - RNA, 19 nt, Homo sapiens
  misc_RNA (1)...(19): siRNA sense strand
gauaacauacugcgcaaca

SEQ ID NO: 1393653 - RNA, 19 nt, Homo sapiens
  misc_RNA (1)...(19): siRNA sense strand
guaacacucccauggaaga

SEQ ID NO: 1393654 - RNA, 19 nt, Homo sapiens
  misc_RNA (1)...(19): siRNA sense strand
ggcugcagcucgaguaugu

SEQ ID NO: 1393655 - RNA, 19 nt, Homo sapiens
  misc_RNA (1)...(19): siRNA sense strand
gaucauccacuccugaaca

SEQ ID NO: 1393656 - RNA, 19 nt, Homo sapiens
  misc_RNA (1)...(19): siRNA sense strand
guguuaaccucuuugauac

SEQ ID NO: 1393657 - RNA, 19 nt, Homo sapiens
  misc_RNA (1)...(19): siRNA sense strand
ugaacaagcugaguaccau

SEQ ID NO: 1393658 - RNA, 19 nt, Homo sapiens
  misc_RNA (1)...(19): siRNA sense strand
gaucauggaagccuauucu

SEQ ID NO: 1393659 - RNA, 19 nt, Homo sapiens
  misc_RNA (1)...(19): siRNA sense strand
ggagaaaacagcaaaacaa

SEQ ID NO: 1393660 - RNA, 19 nt, Homo sapiens
  misc_RNA (1)...(19): siRNA sense strand
ggaggucaaauuucagaug

SEQ ID NO: 1393661 - RNA, 19 nt, Homo sapiens
  misc_RNA (1)...(19): siRNA sense strand
ugagauugauaacauacug

SEQ ID NO: 1393662 - RNA, 19 nt, Homo sapiens
  misc_RNA (1)...(19): siRNA sense strand
cagguucucccaaagauga

SEQ ID NO: 1393663 - RNA, 19 nt, Homo sapiens
  misc_RNA (1)...(19): siRNA sense strand
cguggugccugagaaauga

SEQ ID NO: 1393664 - RNA, 19 nt, Homo sapiens
  misc_RNA (1)...(19): siRNA sense strand
gggagcaucaucaagaaga

SEQ ID NO: 1393665 - RNA, 19 nt, Homo sapiens
  misc_RNA (1)...(19): siRNA sense strand
ucacaugugguaaaugaga

SEQ ID NO: 1393666 - RNA, 19 nt, Homo sapiens
  misc_RNA (1)...(19): siRNA sense strand
ggaacaugggugacauuug

SEQ ID NO: 1393667 - RNA, 19 nt, Homo sapiens
  misc_RNA (1)...(19): siRNA sense strand
ucaaauuucagaugagguu

SEQ ID NO: 1393668 - RNA, 19 nt, Homo sapiens
  misc_RNA (1)...(19): siRNA sense strand
guuaaccucuuugauacug

SEQ ID NO: 1393669 - RNA, 19 nt, Homo sapiens
  misc_RNA (1)...(19): siRNA sense strand
aaagugguguuaaccucuu

SEQ ID NO: 1393670 - RNA, 19 nt, Homo sapiens
  misc_RNA (1)...(19): siRNA sense strand
ccagagcucuaccacaaaa

SEQ ID NO: 1393671 - RNA, 19 nt, Homo sapiens
  misc_RNA (1)...(19): siRNA sense strand
guggaaucaucucaggaaa

SEQ ID NO: 1393672 - RNA, 19 nt, Homo sapiens
  misc_RNA (1)...(19): siRNA sense strand
ggucauaacaaccaaacuc

SEQ ID NO: 1393673 - RNA, 19 nt, Homo sapiens
  misc_RNA (1)...(19): siRNA sense strand
aagaaggacuauagaucau

SEQ ID NO: 1393674 - RNA, 19 nt, Homo sapiens
  misc_RNA (1)...(19): siRNA sense strand
aacaagcccuacagcaaga

SEQ ID NO: 1393675 - RNA, 19 nt, Homo sapiens
  misc_RNA (1)...(19): siRNA sense strand
ggauguggucuuugcaaau

SEQ ID NO: 1393676 - RNA, 19 nt, Homo sapiens
  misc_RNA (1)...(19): siRNA sense strand
cauaacaaccaaacucuac

SEQ ID NO: 1393677 - RNA, 19 nt, Homo sapiens
  misc_RNA (1)...(19): siRNA sense strand
uaacauacugcgcaacaag

SEQ ID NO: 1393678 - RNA, 19 nt, Homo sapiens
  misc_RNA (1)...(19): siRNA sense strand
cugaacaacucauugaaaa

SEQ ID NO: 1393679 - RNA, 19 nt, Homo sapiens
  misc_RNA (1)...(19): siRNA sense strand
ccugaacaacucauugaaa

SEQ ID NO: 1393680 - RNA, 19 nt, Homo sapiens
  misc_RNA (1)...(19): siRNA sense strand
gaaacggggugccugaaag

SEQ ID NO: 1393681 - RNA, 19 nt, Homo sapiens
  misc_RNA (1)...(19): siRNA sense strand
ggagaucauggaagccuau

SEQ ID NO: 1393682 - RNA, 19 nt, Homo sapiens
  misc_RNA (1)...(19): siRNA sense strand
acacucccauggaagaaau

SEQ ID NO: 1393683 - RNA, 19 nt, Homo sapiens
  misc_RNA (1)...(19): siRNA sense strand
uggauguggucuuugcaaa

SEQ ID NO: 1393684 - RNA, 19 nt, Homo sapiens
  misc_RNA (1)...(19): siRNA sense strand
gaaaggcugaagugauucu

SEQ ID NO: 1393685 - RNA, 19 nt, Homo sapiens
  misc_RNA (1)...(19): siRNA sense strand
gagaaaugaaggugugagu

SEQ ID NO: 1393686 - RNA, 19 nt, Homo sapiens
  misc_RNA (1)...(19): siRNA sense strand
cgucugggaugcacacuac

SEQ ID NO: 1393687 - RNA, 19 nt, Homo sapiens
  misc_RNA (1)...(19): siRNA sense strand
gagcaucaucaagaagaaa

SEQ ID NO: 1393688 - RNA, 19 nt, Homo sapiens
  misc_RNA (1)...(19): siRNA sense strand
cagcaagaaggacuauaga

SEQ ID NO: 1393689 - RNA, 19 nt, Homo sapiens
  misc_RNA (1)...(19): siRNA sense strand
accaaggcauggcgaugua

SEQ ID NO: 1393690 - RNA, 19 nt, Homo sapiens
  misc_RNA (1)...(19): siRNA sense strand
agaaagagggcugucaaga

SEQ ID NO: 1393691 - RNA, 19 nt, Homo sapiens
  misc_RNA (1)...(19): siRNA sense strand
gcucgaguauguggaugug

SEQ ID NO: 1393692 - RNA, 19 nt, Homo sapiens
  misc_RNA (1)...(19): siRNA sense strand
gcuugggucuuggaacaug

SEQ ID NO: 1393693 - RNA, 19 nt, Homo sapiens
  misc_RNA (1)...(19): siRNA sense strand
cgagauggagugcuaugga

SEQ ID NO: 1393694 - RNA, 19 nt, Homo sapiens
  misc_RNA (1)...(19): siRNA sense strand
agaaggacuauagaucaua

SEQ ID NO: 1393695 - RNA, 19 nt, Homo sapiens
  misc_RNA (1)...(19): siRNA sense strand
ccaccggucugugaacaag

SEQ ID NO: 1393696 - RNA, 19 nt, Homo sapiens
  misc_RNA (1)...(19): siRNA sense strand
ucauaacaaccaaacucua

SEQ ID NO: 1393697 - RNA, 19 nt, Homo sapiens
  misc_RNA (1)...(19): siRNA sense strand
gaaaacagcaaaacaagcu

SEQ ID NO: 1393698 - RNA, 19 nt, Homo sapiens
  misc_RNA (1)...(19): siRNA sense strand
gaagggagaaaacagcaaa

SEQ ID NO: 1393699 - RNA, 19 nt, Homo sapiens
  misc_RNA (1)...(19): siRNA sense strand
uaacaaccaaacucuacug

SEQ ID NO: 1393700 - RNA, 19 nt, Homo sapiens
  misc_RNA (1)...(19): siRNA sense strand
cuaugaaagugguguuaac

SEQ ID NO: 1393701 - RNA, 19 nt, Homo sapiens
  misc_RNA (1)...(19): siRNA sense strand
cugaacggcugaugaccau

SEQ ID NO: 1393702 - RNA, 19 nt, Homo sapiens
  misc_RNA (1)...(19): siRNA sense strand
aaaugaaggugugaguucu

SEQ ID NO: 1393703 - RNA, 19 nt, Homo sapiens
  misc_RNA (1)...(19): siRNA sense strand
gggcugucaagaaagcaua

SEQ ID NO: 1393704 - RNA, 19 nt, Homo sapiens
  misc_RNA (1)...(19): siRNA sense strand
gugguaaaugagauugaua

SEQ ID NO: 1393705 - RNA, 19 nt, Homo sapiens
  misc_RNA (1)...(19): siRNA sense strand
gcguggugccugagaaaug

SEQ ID NO: 1393706 - RNA, 19 nt, Homo sapiens
  misc_RNA (1)...(19): siRNA sense strand
ugauacugccgaagucuau

SEQ ID NO: 1393707 - RNA, 19 nt, Homo sapiens
  misc_RNA (1)...(19): siRNA sense strand
gauggagugcuauggagau

SEQ ID NO: 1393708 - RNA, 19 nt, Homo sapiens
  misc_RNA (1)...(19): siRNA sense strand
ccuauucuguagcaagaca

SEQ ID NO: 1393709 - RNA, 19 nt, Homo sapiens
  misc_RNA (1)...(19): siRNA sense strand
agucuaugcugcuggaaag

SEQ ID NO: 1393710 - RNA, 19 nt, Homo sapiens
  misc_RNA (1)...(19): siRNA sense strand
gaucccaccggucugugaa

SEQ ID NO: 1393711 - RNA, 19 nt, Homo sapiens
  misc_RNA (1)...(19): siRNA sense strand
gcagcucgaguauguggau

SEQ ID NO: 1393712 - RNA, 19 nt, Homo sapiens
  misc_RNA (1)...(19): siRNA sense strand
acagcaagaaggacuauag

SEQ ID NO: 1393713 - RNA, 19 nt, Homo sapiens
  misc_RNA (1)...(19): siRNA sense strand
ggaaacggggugccugaaa

SEQ ID NO: 1393714 - RNA, 19 nt, Homo sapiens
  misc_RNA (1)...(19): siRNA sense strand
ucauggaagccuauucugu

SEQ ID NO: 1393715 - RNA, 19 nt, Homo sapiens
  misc_RNA (1)...(19): siRNA sense strand
ugaaaaccuuggugccauu

SEQ ID NO: 1393716 - RNA, 19 nt, Homo sapiens
  misc_RNA (1)...(19): siRNA sense strand
uugcuugggucuuggaaca

SEQ ID NO: 1393717 - RNA, 19 nt, Homo sapiens
  misc_RNA (1)...(19): siRNA sense strand
gcaagacaguucaauauga

SEQ ID NO: 1393718 - RNA, 19 nt, Homo sapiens
  misc_RNA (1)...(19): siRNA sense strand
gaacaugggugacauuugg

SEQ ID NO: 1393719 - RNA, 19 nt, Homo sapiens
  misc_RNA (1)...(19): siRNA sense strand
gaaggacuauagaucauaa

SEQ ID NO: 1393720 - RNA, 19 nt, Homo sapiens
  misc_RNA (1)...(19): siRNA sense strand
aaagagggcugucaagaaa

SEQ ID NO: 1393721 - RNA, 19 nt, Homo sapiens
  misc_RNA (1)...(19): siRNA sense strand
gaaagagggcugucaagaa

SEQ ID NO: 1393722 - RNA, 19 nt, Homo sapiens
  misc_RNA (1)...(19): siRNA sense strand
caucacaugugguaaauga

SEQ ID NO: 1393723 - RNA, 19 nt, Homo sapiens
  misc_RNA (1)...(19): siRNA sense strand
gguguuaaccucuuugaua

SEQ ID NO: 1393724 - RNA, 19 nt, Homo sapiens
  misc_RNA (1)...(19): siRNA sense strand
uggaaaggcugaagugauu

SEQ ID NO: 1393725 - RNA, 19 nt, Homo sapiens
  misc_RNA (1)...(19): siRNA sense strand
gaggucaaauuucagauga

SEQ ID NO: 1393726 - RNA, 19 nt, Homo sapiens
  misc_RNA (1)...(19): siRNA sense strand
gaaauuguccgagccauga

SEQ ID NO: 1393727 - RNA, 19 nt, Homo sapiens
  misc_RNA (1)...(19): siRNA sense strand
gaaaugaaggugugaguuc

SEQ ID NO: 1393728 - RNA, 19 nt, Homo sapiens
  misc_RNA (1)...(19): siRNA sense strand
gcaaaucgaccggacagua

SEQ ID NO: 1393729 - RNA, 19 nt, Homo sapiens
  misc_RNA (1)...(19): siRNA sense strand
gcaacaagcccuacagcaa

SEQ ID NO: 1393730 - RNA, 19 nt, Homo sapiens
  misc_RNA (1)...(19): siRNA sense strand
caagacaguucaauaugau

SEQ ID NO: 1393731 - RNA, 19 nt, Homo sapiens
  misc_RNA (1)...(19): siRNA sense strand
caaaucgaccggacaguaa

SEQ ID NO: 1393732 - RNA, 19 nt, Homo sapiens
  misc_RNA (1)...(19): siRNA sense strand
caagaaggacuauagauca

SEQ ID NO: 1393733 - RNA, 19 nt, Homo sapiens
  misc_RNA (1)...(19): siRNA sense strand
gcaagaaggacuauagauc

SEQ ID NO: 1393734 - RNA, 19 nt, Homo sapiens
  misc_RNA (1)...(19): siRNA sense strand
gaccaucgccuaugaaagu

SEQ ID NO: 1393735 - RNA, 19 nt, Homo sapiens
  misc_RNA (1)...(19): siRNA sense strand
cauggaagccuauucugua

SEQ ID NO: 1393736 - RNA, 19 nt, Homo sapiens
  misc_RNA (1)...(19): siRNA sense strand
gcauauuauugaaggauug

SEQ ID NO: 1393737 - RNA, 19 nt, Homo sapiens
  misc_RNA (1)...(19): siRNA sense strand
guagcaagacaguucaaua

SEQ ID NO: 1393738 - RNA, 19 nt, Homo sapiens
  misc_RNA (1)...(19): siRNA sense strand
guauguggauguggucuuu

SEQ ID NO: 1393739 - RNA, 19 nt, Homo sapiens
  misc_RNA (1)...(19): siRNA sense strand
ggaagccuauucuguagca

SEQ ID NO: 1393740 - RNA, 19 nt, Homo sapiens
  misc_RNA (1)...(19): siRNA sense strand
gauguggucuuugcaaauc

SEQ ID NO: 1393741 - RNA, 19 nt, Homo sapiens
  misc_RNA (1)...(19): siRNA sense strand
gaaagaauuguaagugaag

SEQ ID NO: 1393742 - RNA, 19 nt, Homo sapiens
  misc_RNA (1)...(19): siRNA sense strand
caagcugaguaccaucuuu

SEQ ID NO: 1393743 - RNA, 19 nt, Homo sapiens
  misc_RNA (1)...(19): siRNA sense strand
ggagcaucaucaagaagaa

SEQ ID NO: 1393744 - RNA, 19 nt, Homo sapiens
  misc_RNA (1)...(19): siRNA sense strand
ugccagagcucuaccacaa

SEQ ID NO: 1393745 - RNA, 19 nt, Homo sapiens
  misc_RNA (1)...(19): siRNA sense strand
caguaacacucccauggaa

SEQ ID NO: 1393746 - RNA, 19 nt, Homo sapiens
  misc_RNA (1)...(19): siRNA sense strand
ccauucagguucucccaaa

SEQ ID NO: 1393747 - RNA, 19 nt, Homo sapiens
  misc_RNA (1)...(19): siRNA sense strand
uagcaagacaguucaauau

SEQ ID NO: 1393748 - RNA, 19 nt, Homo sapiens
  misc_RNA (1)...(19): siRNA sense strand
ugacacaugugauaaacca

SEQ ID NO: 1393749 - RNA, 19 nt, Homo sapiens
  misc_RNA (1)...(19): siRNA sense strand
uggaaaagcugaaacagaa

SEQ ID NO: 1393750 - RNA, 19 nt, Homo sapiens
  misc_RNA (1)...(19): siRNA sense strand
ggaaucaucucaggaaaau

SEQ ID NO: 1393751 - RNA, 19 nt, Homo sapiens
  misc_RNA (1)...(19): siRNA sense strand
ggagugcuauggagaucau

SEQ ID NO: 1393752 - RNA, 19 nt, Homo sapiens
  misc_RNA (1)...(19): siRNA sense strand
gauaacauacugcgcaaca

SEQ ID NO: 1393753 - RNA, 19 nt, Homo sapiens
  misc_RNA (1)...(19): siRNA sense strand
guaacacucccauggaaga

SEQ ID NO: 1393754 - RNA, 19 nt, Homo sapiens
  misc_RNA (1)...(19): siRNA sense strand
ggcugcagcucgaguaugu

SEQ ID NO: 1393755 - RNA, 19 nt, Homo sapiens
  misc_RNA (1)...(19): siRNA sense strand
gaucauccacuccugaaca

SEQ ID NO: 1393756 - RNA, 19 nt, Homo sapiens
  misc_RNA (1)...(19): siRNA sense strand
guguuaaccucuuugauac

SEQ ID NO: 1393757 - RNA, 19 nt, Homo sapiens
  misc_RNA (1)...(19): siRNA sense strand
ugaacaagcugaguaccau

SEQ ID NO: 1393758 - RNA, 19 nt, Homo sapiens
  misc_RNA (1)...(19): siRNA sense strand
gaucauggaagccuauucu

SEQ ID NO: 1393759 - RNA, 19 nt, Homo sapiens
  misc_RNA (1)...(19): siRNA sense strand
ggagaaaacagcaaaacaa

SEQ ID NO: 1393760 - RNA, 19 nt, Homo sapiens
  misc_RNA (1)...(19): siRNA sense strand
ggaggucaaauuucagaug

SEQ ID NO: 1393761 - RNA, 19 nt, Homo sapiens
  misc_RNA (1)...(19): siRNA sense strand
ugagauugauaacauacug

SEQ ID NO: 1393762 - RNA, 19 nt, Homo sapiens
  misc_RNA (1)...(19): siRNA sense strand
cagguucucccaaagauga

SEQ ID NO: 1393763 - RNA, 19 nt, Homo sapiens
  misc_RNA (1)...(19): siRNA sense strand
cguggugccugagaaauga

SEQ ID NO: 1393764 - RNA, 19 nt, Homo sapiens
  misc_RNA (1)...(19): siRNA sense strand
gggagcaucaucaagaaga

SEQ ID NO: 1393765 - RNA, 19 nt, Homo sapiens
  misc_RNA (1)...(19): siRNA sense strand
ucacaugugguaaaugaga

SEQ ID NO: 1393766 - RNA, 19 nt, Homo sapiens
  misc_RNA (1)...(19): siRNA sense strand
ggaacaugggugacauuug

SEQ ID NO: 1393767 - RNA, 19 nt, Homo sapiens
  misc_RNA (1)...(19): siRNA sense strand
ucaaauuucagaugagguu

SEQ ID NO: 1393768 - RNA, 19 nt, Homo sapiens
  misc_RNA (1)...(19): siRNA sense strand
guuaaccucuuugauacug

SEQ ID NO: 1393769 - RNA, 19 nt, Homo sapiens
  misc_RNA (1)...(19): siRNA sense strand
aaagugguguuaaccucuu

SEQ ID NO: 1393770 - RNA, 19 nt, Homo sapiens
  misc_RNA (1)...(19): siRNA sense strand
ccagagcucuaccacaaaa

SEQ ID NO: 1393771 - RNA, 19 nt, Homo sapiens
  misc_RNA (1)...(19): siRNA sense strand
guggaaucaucucaggaaa

SEQ ID NO: 1393772 - RNA, 19 nt, Homo sapiens
  misc_RNA (1)...(19): siRNA sense strand
ggucauaacaaccaaacuc

SEQ ID NO: 1393773 - RNA, 19 nt, Homo sapiens
  misc_RNA (1)...(19): siRNA sense strand
aagaaggacuauagaucau

SEQ ID NO: 1393774 - RNA, 19 nt, Homo sapiens
  misc_RNA (1)...(19): siRNA sense strand
aacaagcccuacagcaaga

SEQ ID NO: 1393775 - RNA, 19 nt, Homo sapiens
  misc_RNA (1)...(19): siRNA sense strand
ggauguggucuuugcaaau

SEQ ID NO: 1393776 - RNA, 19 nt, Homo sapiens
  misc_RNA (1)...(19): siRNA sense strand
cauaacaaccaaacucuac

SEQ ID NO: 1393777 - RNA, 19 nt, Homo sapiens
  misc_RNA (1)...(19): siRNA sense strand
uaacauacugcgcaacaag

SEQ ID NO: 1393778 - RNA, 19 nt, Homo sapiens
  misc_RNA (1)...(19): siRNA sense strand
cugaacaacucauugaaaa

SEQ ID NO: 1393779 - RNA, 19 nt, Homo sapiens
  misc_RNA (1)...(19): siRNA sense strand
ccugaacaacucauugaaa

SEQ ID NO: 1393780 - RNA, 19 nt, Homo sapiens
  misc_RNA (1)...(19): siRNA sense strand
gaaacggggugccugaaag

SEQ ID NO: 1393781 - RNA, 19 nt, Homo sapiens
  misc_RNA (1)...(19): siRNA sense strand
ggagaucauggaagccuau

SEQ ID NO: 1393782 - RNA, 19 nt, Homo sapiens
  misc_RNA (1)...(19): siRNA sense strand
acacucccauggaagaaau

SEQ ID NO: 1393783 - RNA, 19 nt, Homo sapiens
  misc_RNA (1)...(19): siRNA sense strand
uggauguggucuuugcaaa

SEQ ID NO: 1393784 - RNA, 19 nt, Homo sapiens
  misc_RNA (1)...(19): siRNA sense strand
gaaaggcugaagugauucu

SEQ ID NO: 1393785 - RNA, 19 nt, Homo sapiens
  misc_RNA (1)...(19): siRNA sense strand
gagaaaugaaggugugagu

SEQ ID NO: 1393786 - RNA, 19 nt, Homo sapiens
  misc_RNA (1)...(19): siRNA sense strand
cgucugggaugcacacuac

SEQ ID NO: 1393787 - RNA, 19 nt, Homo sapiens
  misc_RNA (1)...(19): siRNA sense strand
gagcaucaucaagaagaaa

SEQ ID NO: 1393788 - RNA, 19 nt, Homo sapiens
  misc_RNA (1)...(19): siRNA sense strand
cagcaagaaggacuauaga

SEQ ID NO: 1393789 - RNA, 19 nt, Homo sapiens
  misc_RNA (1)...(19): siRNA sense strand
accaaggcauggcgaugua

SEQ ID NO: 1393790 - RNA, 19 nt, Homo sapiens
  misc_RNA (1)...(19): siRNA sense strand
agaaagagggcugucaaga

SEQ ID NO: 1393791 - RNA, 19 nt, Homo sapiens
  misc_RNA (1)...(19): siRNA sense strand
gcucgaguauguggaugug

SEQ ID NO: 1393792 - RNA, 19 nt, Homo sapiens
  misc_RNA (1)...(19): siRNA sense strand
gcuugggucuuggaacaug

SEQ ID NO: 1393793 - RNA, 19 nt, Homo sapiens
  misc_RNA (1)...(19): siRNA sense strand
cgagauggagugcuaugga

SEQ ID NO: 1393794 - RNA, 19 nt, Homo sapiens
  misc_RNA (1)...(19): siRNA sense strand
agaaggacuauagaucaua

SEQ ID NO: 1393795 - RNA, 19 nt, Homo sapiens
  misc_RNA (1)...(19): siRNA sense strand
ccaccggucugugaacaag

SEQ ID NO: 1393796 - RNA, 19 nt, Homo sapiens
  misc_RNA (1)...(19): siRNA sense strand
ucauaacaaccaaacucua

SEQ ID NO: 1393797 - RNA, 19 nt, Homo sapiens
  misc_RNA (1)...(19): siRNA sense strand
gaaaacagcaaaacaagcu

SEQ ID NO: 1393798 - RNA, 19 nt, Homo sapiens
  misc_RNA (1)...(19): siRNA sense strand
gaagggagaaaacagcaaa

SEQ ID NO: 1393799 - RNA, 19 nt, Homo sapiens
  misc_RNA (1)...(19): siRNA sense strand
uaacaaccaaacucuacug

SEQ ID NO: 1393800 - RNA, 19 nt, Homo sapiens
  misc_RNA (1)...(19): siRNA sense strand
cuaugaaagugguguuaac

SEQ ID NO: 1393801 - RNA, 19 nt, Homo sapiens
  misc_RNA (1)...(19): siRNA sense strand
cugaacggcugaugaccau

SEQ ID NO: 1393802 - RNA, 19 nt, Homo sapiens
  misc_RNA (1)...(19): siRNA sense strand
aaaugaaggugugaguucu

SEQ ID NO: 1393803 - RNA, 19 nt, Homo sapiens
  misc_RNA (1)...(19): siRNA sense strand
gggcugucaagaaagcaua

SEQ ID NO: 1393804 - RNA, 19 nt, Homo sapiens
  misc_RNA (1)...(19): siRNA sense strand
gugguaaaugagauugaua

SEQ ID NO: 1393805 - RNA, 19 nt, Homo sapiens
  misc_RNA (1)...(19): siRNA sense strand
gcguggugccugagaaaug

SEQ ID NO: 1393806 - RNA, 19 nt, Homo sapiens
  misc_RNA (1)...(19): siRNA sense strand
ugauacugccgaagucuau

SEQ ID NO: 1393807 - RNA, 19 nt, Homo sapiens
  misc_RNA (1)...(19): siRNA sense strand
gauggagugcuauggagau

SEQ ID NO: 1393808 - RNA, 19 nt, Homo sapiens
  misc_RNA (1)...(19): siRNA sense strand
ccuauucuguagcaagaca

SEQ ID NO: 1393809 - RNA, 19 nt, Homo sapiens
  misc_RNA (1)...(19): siRNA sense strand
agucuaugcugcuggaaag

SEQ ID NO: 1393810 - RNA, 19 nt, Homo sapiens
  misc_RNA (1)...(19): siRNA sense strand
gaucccaccggucugugaa

SEQ ID NO: 1393811 - RNA, 19 nt, Homo sapiens
  misc_RNA (1)...(19): siRNA sense strand
gcagcucgaguauguggau

SEQ ID NO: 1393812 - RNA, 19 nt, Homo sapiens
  misc_RNA (1)...(19): siRNA sense strand
acagcaagaaggacuauag

SEQ ID NO: 1393813 - RNA, 19 nt, Homo sapiens
  misc_RNA (1)...(19): siRNA sense strand
ggaaacggggugccugaaa

SEQ ID NO: 1393814 - RNA, 19 nt, Homo sapiens
  misc_RNA (1)...(19): siRNA sense strand
ucauggaagccuauucugu

SEQ ID NO: 1393815 - RNA, 19 nt, Homo sapiens
  misc_RNA (1)...(19): siRNA sense strand
ugaaaaccuuggugccauu

SEQ ID NO: 1393816 - RNA, 19 nt, Homo sapiens
  misc_RNA (1)...(19): siRNA sense strand
uugcuugggucuuggaaca

SEQ ID NO: 1393817 - RNA, 19 nt, Homo sapiens
  misc_RNA (1)...(19): siRNA sense strand
gcaagacaguucaauauga

SEQ ID NO: 1393818 - RNA, 19 nt, Homo sapiens
  misc_RNA (1)...(19): siRNA sense strand
gaacaugggugacauuugg

SEQ ID NO: 1393819 - RNA, 19 nt, Homo sapiens
  misc_RNA (1)...(19): siRNA sense strand
gaaggacuauagaucauaa

SEQ ID NO: 1393820 - RNA, 19 nt, Homo sapiens
  misc_RNA (1)...(19): siRNA sense strand
aaagagggcugucaagaaa

SEQ ID NO: 1393821 - RNA, 19 nt, Homo sapiens
  misc_RNA (1)...(19): siRNA sense strand
gaaagagggcugucaagaa

SEQ ID NO: 1393822 - RNA, 19 nt, Homo sapiens
  misc_RNA (1)...(19): siRNA sense strand
caucacaugugguaaauga

SEQ ID NO: 1393823 - RNA, 19 nt, Homo sapiens
  misc_RNA (1)...(19): siRNA sense strand
gguguuaaccucuuugaua

SEQ ID NO: 1393824 - RNA, 19 nt, Homo sapiens
  misc_RNA (1)...(19): siRNA sense strand
uggaaaggcugaagugauu

SEQ ID NO: 1393825 - RNA, 19 nt, Homo sapiens
  misc_RNA (1)...(19): siRNA sense strand
gaggucaaauuucagauga

SEQ ID NO: 1393826 - RNA, 19 nt, Homo sapiens
  misc_RNA (1)...(19): siRNA sense strand
gaaauuguccgagccauga

SEQ ID NO: 1393827 - RNA, 19 nt, Homo sapiens
  misc_RNA (1)...(19): siRNA sense strand
gaaaugaaggugugaguuc

SEQ ID NO: 1393828 - RNA, 19 nt, Homo sapiens
  misc_RNA (1)...(19): siRNA sense strand
gcaaaucgaccggacagua

SEQ ID NO: 1393829 - RNA, 19 nt, Homo sapiens
  misc_RNA (1)...(19): siRNA sense strand
gcaacaagcccuacagcaa

SEQ ID NO: 1393830 - RNA, 19 nt, Homo sapiens
  misc_RNA (1)...(19): siRNA sense strand
caagacaguucaauaugau

SEQ ID NO: 1393831 - RNA, 19 nt, Homo sapiens
  misc_RNA (1)...(19): siRNA sense strand
caaaucgaccggacaguaa

SEQ ID NO: 1393832 - RNA, 19 nt, Homo sapiens
  misc_RNA (1)...(19): siRNA sense strand
caagaaggacuauagauca

SEQ ID NO: 1393833 - RNA, 19 nt, Homo sapiens
  misc_RNA (1)...(19): siRNA sense strand
gcaagaaggacuauagauc

SEQ ID NO: 1393834 - RNA, 19 nt, Homo sapiens
  misc_RNA (1)...(19): siRNA sense strand
gaccaucgccuaugaaagu

SEQ ID NO: 1393835 - RNA, 19 nt, Homo sapiens
  misc_RNA (1)...(19): siRNA sense strand
cauggaagccuauucugua

SEQ ID NO: 1393836 - RNA, 19 nt, Homo sapiens
  misc_RNA (1)...(19): siRNA sense strand
gcauauuauugaaggauug

SEQ ID NO: 1393837 - RNA, 19 nt, Homo sapiens
  misc_RNA (1)...(19): siRNA sense strand
guagcaagacaguucaaua

SEQ ID NO: 1393838 - RNA, 19 nt, Homo sapiens
  misc_RNA (1)...(19): siRNA sense strand
guauguggauguggucuuu

SEQ ID NO: 1393839 - RNA, 19 nt, Homo sapiens
  misc_RNA (1)...(19): siRNA sense strand
ggaagccuauucuguagca

SEQ ID NO: 1393840 - RNA, 19 nt, Homo sapiens
  misc_RNA (1)...(19): siRNA sense strand
gauguggucuuugcaaauc

SEQ ID NO: 1393841 - RNA, 19 nt, Homo sapiens
  misc_RNA (1)...(19): siRNA sense strand
gaaagaauuguaagugaag

SEQ ID NO: 1393842 - RNA, 19 nt, Homo sapiens
  misc_RNA (1)...(19): siRNA sense strand
caagcugaguaccaucuuu

SEQ ID NO: 1393843 - RNA, 19 nt, Homo sapiens
  misc_RNA (1)...(19): siRNA sense strand
ggagcaucaucaagaagaa

SEQ ID NO: 1393844 - RNA, 19 nt, Homo sapiens
  misc_RNA (1)...(19): siRNA sense strand
ugccagagcucuaccacaa

SEQ ID NO: 1393845 - RNA, 19 nt, Homo sapiens
  misc_RNA (1)...(19): siRNA sense strand
caguaacacucccauggaa

SEQ ID NO: 1393846 - RNA, 19 nt, Homo sapiens
  misc_RNA (1)...(19): siRNA sense strand
ccauucagguucucccaaa

SEQ ID NO: 1393847 - RNA, 19 nt, Homo sapiens
  misc_RNA (1)...(19): siRNA sense strand
uagcaagacaguucaauau

SEQ ID NO: 1393848 - RNA, 19 nt, Homo sapiens
  misc_RNA (1)...(19): siRNA sense strand
ugacacaugugauaaacca

SEQ ID NO: 1393849 - RNA, 19 nt, Homo sapiens
  misc_RNA (1)...(19): siRNA sense strand
uggaaaagcugaaacagaa

SEQ ID NO: 1393850 - RNA, 19 nt, Homo sapiens
  misc_RNA (1)...(19): siRNA sense strand
ggaaucaucucaggaaaau

SEQ ID NO: 1393851 - RNA, 19 nt, Homo sapiens
  misc_RNA (1)...(19): siRNA sense strand
ggagugcuauggagaucau

SEQ ID NO: 1393852 - RNA, 19 nt, Homo sapiens
  misc_RNA (1)...(19): siRNA sense strand
gauaacauacugcgcaaca

SEQ ID NO: 1393853 - RNA, 19 nt, Homo sapiens
  misc_RNA (1)...(19): siRNA sense strand
guaacacucccauggaaga

SEQ ID NO: 1393854 - RNA, 19 nt, Homo sapiens
  misc_RNA (1)...(19): siRNA sense strand
ggcugcagcucgaguaugu

SEQ ID NO: 1393855 - RNA, 19 nt, Homo sapiens
  misc_RNA (1)...(19): siRNA sense strand
gaucauccacuccugaaca

SEQ ID NO: 1393856 - RNA, 19 nt, Homo sapiens
  misc_RNA (1)...(19): siRNA sense strand
guguuaaccucuuugauac

SEQ ID NO: 1393857 - RNA, 19 nt, Homo sapiens
  misc_RNA (1)...(19): siRNA sense strand
ugaacaagcugaguaccau

SEQ ID NO: 1393858 - RNA, 19 nt, Homo sapiens
  misc_RNA (1)...(19): siRNA sense strand
gaucauggaagccuauucu

SEQ ID NO: 1393859 - RNA, 19 nt, Homo sapiens
  misc_RNA (1)...(19): siRNA sense strand
ggagaaaacagcaaaacaa

SEQ ID NO: 1393860 - RNA, 19 nt, Homo sapiens
  misc_RNA (1)...(19): siRNA sense strand
ggaggucaaauuucagaug

SEQ ID NO: 1393861 - RNA, 19 nt, Homo sapiens
  misc_RNA (1)...(19): siRNA sense strand
ugagauugauaacauacug

SEQ ID NO: 1393862 - RNA, 19 nt, Homo sapiens
  misc_RNA (1)...(19): siRNA sense strand
cagguucucccaaagauga

SEQ ID NO: 1393863 - RNA, 19 nt, Homo sapiens
  misc_RNA (1)...(19): siRNA sense strand
cguggugccugagaaauga

SEQ ID NO: 1393864 - RNA, 19 nt, Homo sapiens
  misc_RNA (1)...(19): siRNA sense strand
gggagcaucaucaagaaga

SEQ ID NO: 1393865 - RNA, 19 nt, Homo sapiens
  misc_RNA (1)...(19): siRNA sense strand
ucacaugugguaaaugaga

SEQ ID NO: 1393866 - RNA, 19 nt, Homo sapiens
  misc_RNA (1)...(19): siRNA sense strand
ggaacaugggugacauuug

SEQ ID NO: 1393867 - RNA, 19 nt, Homo sapiens
  misc_RNA (1)...(19): siRNA sense strand
ucaaauuucagaugagguu

SEQ ID NO: 1393868 - RNA, 19 nt, Homo sapiens
  misc_RNA (1)...(19): siRNA sense strand
guuaaccucuuugauacug

SEQ ID NO: 1393869 - RNA, 19 nt, Homo sapiens
  misc_RNA (1)...(19): siRNA sense strand
aaagugguguuaaccucuu

SEQ ID NO: 1393870 - RNA, 19 nt, Homo sapiens
  misc_RNA (1)...(19): siRNA sense strand
ccagagcucuaccacaaaa

SEQ ID NO: 1393871 - RNA, 19 nt, Homo sapiens
  misc_RNA (1)...(19): siRNA sense strand
guggaaucaucucaggaaa

SEQ ID NO: 1393872 - RNA, 19 nt, Homo sapiens
  misc_RNA (1)...(19): siRNA sense strand
ggucauaacaaccaaacuc

SEQ ID NO: 1393873 - RNA, 19 nt, Homo sapiens
  misc_RNA (1)...(19): siRNA sense strand
aagaaggacuauagaucau

SEQ ID NO: 1393874 - RNA, 19 nt, Homo sapiens
  misc_RNA (1)...(19): siRNA sense strand
aacaagcccuacagcaaga

SEQ ID NO: 1393875 - RNA, 19 nt, Homo sapiens
  misc_RNA (1)...(19): siRNA sense strand
ggauguggucuuugcaaau

SEQ ID NO: 1393876 - RNA, 19 nt, Homo sapiens
  misc_RNA (1)...(19): siRNA sense strand
cauaacaaccaaacucuac

SEQ ID NO: 1393877 - RNA, 19 nt, Homo sapiens
  misc_RNA (1)...(19): siRNA sense strand
uaacauacugcgcaacaag

SEQ ID NO: 1393878 - RNA, 19 nt, Homo sapiens
  misc_RNA (1)...(19): siRNA sense strand
cugaacaacucauugaaaa

SEQ ID NO: 1393879 - RNA, 19 nt, Homo sapiens
  misc_RNA (1)...(19): siRNA sense strand
ccugaacaacucauugaaa

SEQ ID NO: 1393880 - RNA, 19 nt, Homo sapiens
  misc_RNA (1)...(19): siRNA sense strand
gaaacggggugccugaaag

SEQ ID NO: 1393881 - RNA, 19 nt, Homo sapiens
  misc_RNA (1)...(19): siRNA sense strand
ggagaucauggaagccuau

SEQ ID NO: 1393882 - RNA, 19 nt, Homo sapiens
  misc_RNA (1)...(19): siRNA sense strand
acacucccauggaagaaau

SEQ ID NO: 1393883 - RNA, 19 nt, Homo sapiens
  misc_RNA (1)...(19): siRNA sense strand
uggauguggucuuugcaaa

SEQ ID NO: 1393884 - RNA, 19 nt, Homo sapiens
  misc_RNA (1)...(19): siRNA sense strand
gaaaggcugaagugauucu

SEQ ID NO: 1393885 - RNA, 19 nt, Homo sapiens
  misc_RNA (1)...(19): siRNA sense strand
gagaaaugaaggugugagu

SEQ ID NO: 1393886 - RNA, 19 nt, Homo sapiens
  misc_RNA (1)...(19): siRNA sense strand
cgucugggaugcacacuac

SEQ ID NO: 1393887 - RNA, 19 nt, Homo sapiens
  misc_RNA (1)...(19): siRNA sense strand
gagcaucaucaagaagaaa

SEQ ID NO: 1393888 - RNA, 19 nt, Homo sapiens
  misc_RNA (1)...(19): siRNA sense strand
cagcaagaaggacuauaga

SEQ ID NO: 1393889 - RNA, 19 nt, Homo sapiens
  misc_RNA (1)...(19): siRNA sense strand
accaaggcauggcgaugua

SEQ ID NO: 1393890 - RNA, 19 nt, Homo sapiens
  misc_RNA (1)...(19): siRNA sense strand
agaaagagggcugucaaga

SEQ ID NO: 1393891 - RNA, 19 nt, Homo sapiens
  misc_RNA (1)...(19): siRNA sense strand
gcucgaguauguggaugug

SEQ ID NO: 1393892 - RNA, 19 nt, Homo sapiens
  misc_RNA (1)...(19): siRNA sense strand
gcuugggucuuggaacaug

SEQ ID NO: 1393893 - RNA, 19 nt, Homo sapiens
  misc_RNA (1)...(19): siRNA sense strand
cgagauggagugcuaugga

SEQ ID NO: 1393894 - RNA, 19 nt, Homo sapiens
  misc_RNA (1)...(19): siRNA sense strand
agaaggacuauagaucaua

SEQ ID NO: 1393895 - RNA, 19 nt, Homo sapiens
  misc_RNA (1)...(19): siRNA sense strand
ccaccggucugugaacaag

SEQ ID NO: 1393896 - RNA, 19 nt, Homo sapiens
  misc_RNA (1)...(19): siRNA sense strand
ucauaacaaccaaacucua

SEQ ID NO: 1393897 - RNA, 19 nt, Homo sapiens
  misc_RNA (1)...(19): siRNA sense strand
gaaaacagcaaaacaagcu

SEQ ID NO: 1393898 - RNA, 19 nt, Homo sapiens
  misc_RNA (1)...(19): siRNA sense strand
gaagggagaaaacagcaaa

SEQ ID NO: 1393899 - RNA, 19 nt, Homo sapiens
  misc_RNA (1)...(19): siRNA sense strand
uaacaaccaaacucuacug

SEQ ID NO: 1393900 - RNA, 19 nt, Homo sapiens
  misc_RNA (1)...(19): siRNA sense strand
cuaugaaagugguguuaac

SEQ ID NO: 1393901 - RNA, 19 nt, Homo sapiens
  misc_RNA (1)...(19): siRNA sense strand
cugaacggcugaugaccau

SEQ ID NO: 1393902 - RNA, 19 nt, Homo sapiens
  misc_RNA (1)...(19): siRNA sense strand
aaaugaaggugugaguucu

SEQ ID NO: 1393903 - RNA, 19 nt, Homo sapiens
  misc_RNA (1)...(19): siRNA sense strand
gggcugucaagaaagcaua

SEQ ID NO: 1393904 - RNA, 19 nt, Homo sapiens
  misc_RNA (1)...(19): siRNA sense strand
gugguaaaugagauugaua

SEQ ID NO: 1393905 - RNA, 19 nt, Homo sapiens
  misc_RNA (1)...(19): siRNA sense strand
gcguggugccugagaaaug

SEQ ID NO: 1393906 - RNA, 19 nt, Homo sapiens
  misc_RNA (1)...(19): siRNA sense strand
ugauacugccgaagucuau

SEQ ID NO: 1393907 - RNA, 19 nt, Homo sapiens
  misc_RNA (1)...(19): siRNA sense strand
gauggagugcuauggagau

SEQ ID NO: 1393908 - RNA, 19 nt, Homo sapiens
  misc_RNA (1)...(19): siRNA sense strand
ccuauucuguagcaagaca

SEQ ID NO: 1393909 - RNA, 19 nt, Homo sapiens
  misc_RNA (1)...(19): siRNA sense strand
agucuaugcugcuggaaag

SEQ ID NO: 1393910 - RNA, 19 nt, Homo sapiens
  misc_RNA (1)...(19): siRNA sense strand
gaucccaccggucugugaa

SEQ ID NO: 1393911 - RNA, 19 nt, Homo sapiens
  misc_RNA (1)...(19): siRNA sense strand
gcagcucgaguauguggau

SEQ ID NO: 1393912 - RNA, 19 nt, Homo sapiens
  misc_RNA (1)...(19): siRNA sense strand
acagcaagaaggacuauag

SEQ ID NO: 1393913 - RNA, 19 nt, Homo sapiens
  misc_RNA (1)...(19): siRNA sense strand
ggaaacggggugccugaaa

SEQ ID NO: 1393914 - RNA, 19 nt, Homo sapiens
  misc_RNA (1)...(19): siRNA sense strand
ucauggaagccuauucugu

SEQ ID NO: 1393915 - RNA, 19 nt, Homo sapiens
  misc_RNA (1)...(19): siRNA sense strand
ugaaaaccuuggugccauu

SEQ ID NO: 1393916 - RNA, 19 nt, Homo sapiens
  misc_RNA (1)...(19): siRNA sense strand
uugcuugggucuuggaaca

SEQ ID NO: 1393917 - RNA, 19 nt, Homo sapiens
  misc_RNA (1)...(19): siRNA sense strand
gcaagacaguucaauauga

SEQ ID NO: 1393918 - RNA, 19 nt, Homo sapiens
  misc_RNA (1)...(19): siRNA sense strand
gaacaugggugacauuugg

SEQ ID NO: 1393919 - RNA, 19 nt, Homo sapiens
  misc_RNA (1)...(19): siRNA sense strand
gaaggacuauagaucauaa

SEQ ID NO: 1393920 - RNA, 19 nt, Homo sapiens
  misc_RNA (1)...(19): siRNA sense strand
aaagagggcugucaagaaa

SEQ ID NO: 1393921 - RNA, 19 nt, Homo sapiens
  misc_RNA (1)...(19): siRNA sense strand
gaaagagggcugucaagaa

SEQ ID NO: 1393922 - RNA, 19 nt, Homo sapiens
  misc_RNA (1)...(19): siRNA sense strand
caucacaugugguaaauga

SEQ ID NO: 1393923 - RNA, 19 nt, Homo sapiens
  misc_RNA (1)...(19): siRNA sense strand
gguguuaaccucuuugaua

SEQ ID NO: 1393924 - RNA, 19 nt, Homo sapiens
  misc_RNA (1)...(19): siRNA sense strand
uggaaaggcugaagugauu

SEQ ID NO: 1393925 - RNA, 19 nt, Homo sapiens
  misc_RNA (1)...(19): siRNA sense strand
gaggucaaauuucagauga

SEQ ID NO: 1393926 - RNA, 19 nt, Homo sapiens
  misc_RNA (1)...(19): siRNA sense strand
gaaauuguccgagccauga

SEQ ID NO: 1393927 - RNA, 19 nt, Homo sapiens
  misc_RNA (1)...(19): siRNA sense strand
gaaaugaaggugugaguuc

SEQ ID NO: 1393928 - RNA, 19 nt, Homo sapiens
  misc_RNA (1)...(19): siRNA sense strand
gcaaaucgaccggacagua

SEQ ID NO: 1393929 - RNA, 19 nt, Homo sapiens
  misc_RNA (1)...(19): siRNA sense strand
gcaacaagcccuacagcaa

SEQ ID NO: 1393930 - RNA, 19 nt, Homo sapiens
  misc_RNA (1)...(19): siRNA sense strand
caagacaguucaauaugau

SEQ ID NO: 1393931 - RNA, 19 nt, Homo sapiens
  misc_RNA (1)...(19): siRNA sense strand
caaaucgaccggacaguaa

SEQ ID NO: 1393932 - RNA, 19 nt, Homo sapiens
  misc_RNA (1)...(19): siRNA sense strand
caagaaggacuauagauca

SEQ ID NO: 1393933 - RNA, 19 nt, Homo sapiens
  misc_RNA (1)...(19): siRNA sense strand
gcaagaaggacuauagauc

SEQ ID NO: 1393934 - RNA, 19 nt, Homo sapiens
  misc_RNA (1)...(19): siRNA sense strand
gaccaucgccuaugaaagu

SEQ ID NO: 1393935 - RNA, 19 nt, Homo sapiens
  misc_RNA (1)...(19): siRNA sense strand
cauggaagccuauucugua

SEQ ID NO: 1393936 - RNA, 19 nt, Homo sapiens
  misc_RNA (1)...(19): siRNA sense strand
gcauauuauugaaggauug

SEQ ID NO: 1393937 - RNA, 19 nt, Homo sapiens
  misc_RNA (1)...(19): siRNA sense strand
guagcaagacaguucaaua

SEQ ID NO: 1393938 - RNA, 19 nt, Homo sapiens
  misc_RNA (1)...(19): siRNA sense strand
guauguggauguggucuuu

SEQ ID NO: 1393939 - RNA, 19 nt, Homo sapiens
  misc_RNA (1)...(19): siRNA sense strand
ggaagccuauucuguagca

SEQ ID NO: 1393940 - RNA, 19 nt, Homo sapiens
  misc_RNA (1)...(19): siRNA sense strand
gauguggucuuugcaaauc

SEQ ID NO: 1393941 - RNA, 19 nt, Homo sapiens
  misc_RNA (1)...(19): siRNA sense strand
gaaagaauuguaagugaag

SEQ ID NO: 1393942 - RNA, 19 nt, Homo sapiens
  misc_RNA (1)...(19): siRNA sense strand
caagcugaguaccaucuuu

SEQ ID NO: 1393943 - RNA, 19 nt, Homo sapiens
  misc_RNA (1)...(19): siRNA sense strand
ggagcaucaucaagaagaa

SEQ ID NO: 1393944 - RNA, 19 nt, Homo sapiens
  misc_RNA (1)...(19): siRNA sense strand
ugccagagcucuaccacaa

SEQ ID NO: 1393945 - RNA, 19 nt, Homo sapiens
  misc_RNA (1)...(19): siRNA sense strand
caguaacacucccauggaa

SEQ ID NO: 1393946 - RNA, 19 nt, Homo sapiens
  misc_RNA (1)...(19): siRNA sense strand
ccauucagguucucccaaa

SEQ ID NO: 1393947 - RNA, 19 nt, Homo sapiens
  misc_RNA (1)...(19): siRNA sense strand
uagcaagacaguucaauau

SEQ ID NO: 1393948 - RNA, 19 nt, Homo sapiens
  misc_RNA (1)...(19): siRNA sense strand
ugacacaugugauaaacca

SEQ ID NO: 1393949 - RNA, 19 nt, Homo sapiens
  misc_RNA (1)...(19): siRNA sense strand
uggaaaagcugaaacagaa

SEQ ID NO: 1393950 - RNA, 19 nt, Homo sapiens
  misc_RNA (1)...(19): siRNA sense strand
ggaaucaucucaggaaaau

SEQ ID NO: 1393951 - RNA, 19 nt, Homo sapiens
  misc_RNA (1)...(19): siRNA sense strand
ggagugcuauggagaucau

SEQ ID NO: 1393952 - RNA, 19 nt, Homo sapiens
  misc_RNA (1)...(19): siRNA sense strand
gauaacauacugcgcaaca

SEQ ID NO: 1393953 - RNA, 19 nt, Homo sapiens
  misc_RNA (1)...(19): siRNA sense strand
guaacacucccauggaaga

SEQ ID NO: 1393954 - RNA, 19 nt, Homo sapiens
  misc_RNA (1)...(19): siRNA sense strand
ggcugcagcucgaguaugu

SEQ ID NO: 1393955 - RNA, 19 nt, Homo sapiens
  misc_RNA (1)...(19): siRNA sense strand
gaucauccacuccugaaca

SEQ ID NO: 1393956 - RNA, 19 nt, Homo sapiens
  misc_RNA (1)...(19): siRNA sense strand
guguuaaccucuuugauac

SEQ ID NO: 1393957 - RNA, 19 nt, Homo sapiens
  misc_RNA (1)...(19): siRNA sense strand
ugaacaagcugaguaccau

SEQ ID NO: 1393958 - RNA, 19 nt, Homo sapiens
  misc_RNA (1)...(19): siRNA sense strand
gaucauggaagccuauucu

SEQ ID NO: 1393959 - RNA, 19 nt, Homo sapiens
  misc_RNA (1)...(19): siRNA sense strand
ggagaaaacagcaaaacaa

SEQ ID NO: 1393960 - RNA, 19 nt, Homo sapiens
  misc_RNA (1)...(19): siRNA sense strand
ggaggucaaauuucagaug

SEQ ID NO: 1393961 - RNA, 19 nt, Homo sapiens
  misc_RNA (1)...(19): siRNA sense strand
ugagauugauaacauacug

SEQ ID NO: 1393962 - RNA, 19 nt, Homo sapiens
  misc_RNA (1)...(19): siRNA sense strand
cagguucucccaaagauga

SEQ ID NO: 1393963 - RNA, 19 nt, Homo sapiens
  misc_RNA (1)...(19): siRNA sense strand
cguggugccugagaaauga

SEQ ID NO: 1393964 - RNA, 19 nt, Homo sapiens
  misc_RNA (1)...(19): siRNA sense strand
gggagcaucaucaagaaga

SEQ ID NO: 1393965 - RNA, 19 nt, Homo sapiens
  misc_RNA (1)...(19): siRNA sense strand
ucacaugugguaaaugaga

SEQ ID NO: 1393966 - RNA, 19 nt, Homo sapiens
  misc_RNA (1)...(19): siRNA sense strand
ggaacaugggugacauuug

SEQ ID NO: 1393967 - RNA, 19 nt, Homo sapiens
  misc_RNA (1)...(19): siRNA sense strand
ucaaauuucagaugagguu

SEQ ID NO: 1393968 - RNA, 19 nt, Homo sapiens
  misc_RNA (1)...(19): siRNA sense strand
guuaaccucuuugauacug

SEQ ID NO: 1393969 - RNA, 19 nt, Homo sapiens
  misc_RNA (1)...(19): siRNA sense strand
aaagugguguuaaccucuu

SEQ ID NO: 1393970 - RNA, 19 nt, Homo sapiens
  misc_RNA (1)...(19): siRNA sense strand
ccagagcucuaccacaaaa

SEQ ID NO: 1393971 - RNA, 19 nt, Homo sapiens
  misc_RNA (1)...(19): siRNA sense strand
guggaaucaucucaggaaa

SEQ ID NO: 1393972 - RNA, 19 nt, Homo sapiens
  misc_RNA (1)...(19): siRNA sense strand
ggucauaacaaccaaacuc

SEQ ID NO: 1393973 - RNA, 19 nt, Homo sapiens
  misc_RNA (1)...(19): siRNA sense strand
aagaaggacuauagaucau

SEQ ID NO: 1393974 - RNA, 19 nt, Homo sapiens
  misc_RNA (1)...(19): siRNA sense strand
aacaagcccuacagcaaga

SEQ ID NO: 1393975 - RNA, 19 nt, Homo sapiens
  misc_RNA (1)...(19): siRNA sense strand
ggauguggucuuugcaaau

SEQ ID NO: 1393976 - RNA, 19 nt, Homo sapiens
  misc_RNA (1)...(19): siRNA sense strand
cauaacaaccaaacucuac

SEQ ID NO: 1393977 - RNA, 19 nt, Homo sapiens
  misc_RNA (1)...(19): siRNA sense strand
uaacauacugcgcaacaag

SEQ ID NO: 1393978 - RNA, 19 nt, Homo sapiens
  misc_RNA (1)...(19): siRNA sense strand
cugaacaacucauugaaaa

SEQ ID NO: 1393979 - RNA, 19 nt, Homo sapiens
  misc_RNA (1)...(19): siRNA sense strand
ccugaacaacucauugaaa

SEQ ID NO: 1393980 - RNA, 19 nt, Homo sapiens
  misc_RNA (1)...(19): siRNA sense strand
gaaacggggugccugaaag

SEQ ID NO: 1393981 - RNA, 19 nt, Homo sapiens
  misc_RNA (1)...(19): siRNA sense strand
ggagaucauggaagccuau

SEQ ID NO: 1393982 - RNA, 19 nt, Homo sapiens
  misc_RNA (1)...(19): siRNA sense strand
acacucccauggaagaaau

SEQ ID NO: 1393983 - RNA, 19 nt, Homo sapiens
  misc_RNA (1)...(19): siRNA sense strand
uggauguggucuuugcaaa

SEQ ID NO: 1393984 - RNA, 19 nt, Homo sapiens
  misc_RNA (1)...(19): siRNA sense strand
gaaaggcugaagugauucu

SEQ ID NO: 1393985 - RNA, 19 nt, Homo sapiens
  misc_RNA (1)...(19): siRNA sense strand
gagaaaugaaggugugagu

SEQ ID NO: 1393986 - RNA, 19 nt, Homo sapiens
  misc_RNA (1)...(19): siRNA sense strand
cgucugggaugcacacuac

SEQ ID NO: 1393987 - RNA, 19 nt, Homo sapiens
  misc_RNA (1)...(19): siRNA sense strand
gagcaucaucaagaagaaa

SEQ ID NO: 1393988 - RNA, 19 nt, Homo sapiens
  misc_RNA (1)...(19): siRNA sense strand
cagcaagaaggacuauaga

SEQ ID NO: 1393989 - RNA, 19 nt, Homo sapiens
  misc_RNA (1)...(19): siRNA sense strand
accaaggcauggcgaugua

SEQ ID NO: 1393990 - RNA, 19 nt, Homo sapiens
  misc_RNA (1)...(19): siRNA sense strand
agaaagagggcugucaaga

SEQ ID NO: 1393991 - RNA, 19 nt, Homo sapiens
  misc_RNA (1)...(19): siRNA sense strand
gcucgaguauguggaugug

SEQ ID NO: 1393992 - RNA, 19 nt, Homo sapiens
  misc_RNA (1)...(19): siRNA sense strand
gcuugggucuuggaacaug

SEQ ID NO: 1393993 - RNA, 19 nt, Homo sapiens
  misc_RNA (1)...(19): siRNA sense strand
cgagauggagugcuaugga

SEQ ID NO: 1393994 - RNA, 19 nt, Homo sapiens
  misc_RNA (1)...(19): siRNA sense strand
agaaggacuauagaucaua

SEQ ID NO: 1393995 - RNA, 19 nt, Homo sapiens
  misc_RNA (1)...(19): siRNA sense strand
ccaccggucugugaacaag

SEQ ID NO: 1393996 - RNA, 19 nt, Homo sapiens
  misc_RNA (1)...(19): siRNA sense strand
ucauaacaaccaaacucua

SEQ ID NO: 1393997 - RNA, 19 nt, Homo sapiens
  misc_RNA (1)...(19): siRNA sense strand
gaaaacagcaaaacaagcu

SEQ ID NO: 1393998 - RNA, 19 nt, Homo sapiens
  misc_RNA (1)...(19): siRNA sense strand
gaagggagaaaacagcaaa

SEQ ID NO: 1393999 - RNA, 19 nt, Homo sapiens
  misc_RNA (1)...(19): siRNA sense strand
uaacaaccaaacucuacug

SEQ ID NO: 1394000 - RNA, 19 nt, Homo sapiens
  misc_RNA (1)...(19): siRNA sense strand
cuaugaaagugguguuaac

SEQ ID NO: 1394001 - RNA, 19 nt, Homo sapiens
  misc_RNA (1)...(19): siRNA sense strand
cugaacggcugaugaccau

SEQ ID NO: 1394002 - RNA, 19 nt, Homo sapiens
  misc_RNA (1)...(19): siRNA sense strand
aaaugaaggugugaguucu

SEQ ID NO: 1394003 - RNA, 19 nt, Homo sapiens
  misc_RNA (1)...(19): siRNA sense strand
gggcugucaagaaagcaua

SEQ ID NO: 1394004 - RNA, 19 nt, Homo sapiens
  misc_RNA (1)...(19): siRNA sense strand
gugguaaaugagauugaua

SEQ ID NO: 1394005 - RNA, 19 nt, Homo sapiens
  misc_RNA (1)...(19): siRNA sense strand
gcguggugccugagaaaug

SEQ ID NO: 1394006 - RNA, 19 nt, Homo sapiens
  misc_RNA (1)...(19): siRNA sense strand
ugauacugccgaagucuau

SEQ ID NO: 1394007 - RNA, 19 nt, Homo sapiens
  misc_RNA (1)...(19): siRNA sense strand
gauggagugcuauggagau

SEQ ID NO: 1394008 - RNA, 19 nt, Homo sapiens
  misc_RNA (1)...(19): siRNA sense strand
ccuauucuguagcaagaca

SEQ ID NO: 1394009 - RNA, 19 nt, Homo sapiens
  misc_RNA (1)...(19): siRNA sense strand
agucuaugcugcuggaaag

SEQ ID NO: 1394010 - RNA, 19 nt, Homo sapiens
  misc_RNA (1)...(19): siRNA sense strand
gaucccaccggucugugaa

SEQ ID NO: 1394011 - RNA, 19 nt, Homo sapiens
  misc_RNA (1)...(19): siRNA sense strand
gcagcucgaguauguggau

SEQ ID NO: 1394012 - RNA, 19 nt, Homo sapiens
  misc_RNA (1)...(19): siRNA sense strand
acagcaagaaggacuauag

SEQ ID NO: 1394013 - RNA, 19 nt, Homo sapiens
  misc_RNA (1)...(19): siRNA sense strand
ggaaacggggugccugaaa

SEQ ID NO: 1394014 - RNA, 19 nt, Homo sapiens
  misc_RNA (1)...(19): siRNA sense strand
ucauggaagccuauucugu

SEQ ID NO: 1394015 - RNA, 19 nt, Homo sapiens
  misc_RNA (1)...(19): siRNA sense strand
ugaaaaccuuggugccauu

SEQ ID NO: 1394016 - RNA, 19 nt, Homo sapiens
  misc_RNA (1)...(19): siRNA sense strand
uugcuugggucuuggaaca

SEQ ID NO: 1394017 - RNA, 19 nt, Homo sapiens
  misc_RNA (1)...(19): siRNA sense strand
ggaagaccaucauuacuaa

SEQ ID NO: 1394018 - RNA, 19 nt, Homo sapiens
  misc_RNA (1)...(19): siRNA sense strand
gggcuuggaucaugcauua

SEQ ID NO: 1394019 - RNA, 19 nt, Homo sapiens
  misc_RNA (1)...(19): siRNA sense strand
gaucagaaguucaaaguuc

SEQ ID NO: 1394020 - RNA, 19 nt, Homo sapiens
  misc_RNA (1)...(19): siRNA sense strand
gcuaucggaugcuuauaua

SEQ ID NO: 1394021 - RNA, 19 nt, Homo sapiens
  misc_RNA (1)...(19): siRNA sense strand
aaaugaaacccgacaauua

SEQ ID NO: 1394022 - RNA, 19 nt, Homo sapiens
  misc_RNA (1)...(19): siRNA sense strand
gaaauuaagcugaaaugga

SEQ ID NO: 1394023 - RNA, 19 nt, Homo sapiens
  misc_RNA (1)...(19): siRNA sense strand
gugaagaccuaucgaagaa

SEQ ID NO: 1394024 - RNA, 19 nt, Homo sapiens
  misc_RNA (1)...(19): siRNA sense strand
gggcagaaacuacuuauug

SEQ ID NO: 1394025 - RNA, 19 nt, Homo sapiens
  misc_RNA (1)...(19): siRNA sense strand
guuaauggaucaucagaga

SEQ ID NO: 1394026 - RNA, 19 nt, Homo sapiens
  misc_RNA (1)...(19): siRNA sense strand
ggaugcagauuucccuauu

SEQ ID NO: 1394027 - RNA, 19 nt, Homo sapiens
  misc_RNA (1)...(19): siRNA sense strand
guaagaagcaaagugaaua

SEQ ID NO: 1394028 - RNA, 19 nt, Homo sapiens
  misc_RNA (1)...(19): siRNA sense strand
gaugcagauuucccuauuu

SEQ ID NO: 1394029 - RNA, 19 nt, Homo sapiens
  misc_RNA (1)...(19): siRNA sense strand
gcaucagacuauaaagauu

SEQ ID NO: 1394030 - RNA, 19 nt, Homo sapiens
  misc_RNA (1)...(19): siRNA sense strand
ccuaucagauccaguuauu

SEQ ID NO: 1394031 - RNA, 19 nt, Homo sapiens
  misc_RNA (1)...(19): siRNA sense strand
guaguaagaagcaaaguga

SEQ ID NO: 1394032 - RNA, 19 nt, Homo sapiens
  misc_RNA (1)...(19): siRNA sense strand
gaacuaaaauaccgaaaca

SEQ ID NO: 1394033 - RNA, 19 nt, Homo sapiens
  misc_RNA (1)...(19): siRNA sense strand
gauaucaccacaaggaauu

SEQ ID NO: 1394034 - RNA, 19 nt, Homo sapiens
  misc_RNA (1)...(19): siRNA sense strand
caaaguuccugggcagaaa

SEQ ID NO: 1394035 - RNA, 19 nt, Homo sapiens
  misc_RNA (1)...(19): siRNA sense strand
ccacaaggaauuccagaaa

SEQ ID NO: 1394036 - RNA, 19 nt, Homo sapiens
  misc_RNA (1)...(19): siRNA sense strand
ggaggcaucagacuauaaa

SEQ ID NO: 1394037 - RNA, 19 nt, Homo sapiens
  misc_RNA (1)...(19): siRNA sense strand
gcauagguguacuucuuga

SEQ ID NO: 1394038 - RNA, 19 nt, Homo sapiens
  misc_RNA (1)...(19): siRNA sense strand
ccauuugguuucaucuuaa

SEQ ID NO: 1394039 - RNA, 19 nt, Homo sapiens
  misc_RNA (1)...(19): siRNA sense strand
aaacauugguagugaaaca

SEQ ID NO: 1394040 - RNA, 19 nt, Homo sapiens
  misc_RNA (1)...(19): siRNA sense strand
caaaugaaacccgacaauu

SEQ ID NO: 1394041 - RNA, 19 nt, Homo sapiens
  misc_RNA (1)...(19): siRNA sense strand
gaaauggagcauaccuuug

SEQ ID NO: 1394042 - RNA, 19 nt, Homo sapiens
  misc_RNA (1)...(19): siRNA sense strand
uggcauagguguacuucuu

SEQ ID NO: 1394043 - RNA, 19 nt, Homo sapiens
  misc_RNA (1)...(19): siRNA sense strand
ggaaugcacaguggaauau

SEQ ID NO: 1394044 - RNA, 19 nt, Homo sapiens
  misc_RNA (1)...(19): siRNA sense strand
gaagaccuaucgaagaaaa

SEQ ID NO: 1394045 - RNA, 19 nt, Homo sapiens
  misc_RNA (1)...(19): siRNA sense strand
ugaaauggagcauaccuuu

SEQ ID NO: 1394046 - RNA, 19 nt, Homo sapiens
  misc_RNA (1)...(19): siRNA sense strand
acaaauggaucagaaguuc

SEQ ID NO: 1394047 - RNA, 19 nt, Homo sapiens
  misc_RNA (1)...(19): siRNA sense strand
gcauuacaguguguugauu

SEQ ID NO: 1394048 - RNA, 19 nt, Homo sapiens
  misc_RNA (1)...(19): siRNA sense strand
caugugaaauuaagcugaa

SEQ ID NO: 1394049 - RNA, 19 nt, Homo sapiens
  misc_RNA (1)...(19): siRNA sense strand
aauauaggaugcagauuuc

SEQ ID NO: 1394050 - RNA, 19 nt, Homo sapiens
  misc_RNA (1)...(19): siRNA sense strand
gagaagaugauacuaccuu

SEQ ID NO: 1394051 - RNA, 19 nt, Homo sapiens
  misc_RNA (1)...(19): siRNA sense strand
gcgaagauacacacgcuuu

SEQ ID NO: 1394052 - RNA, 19 nt, Homo sapiens
  misc_RNA (1)...(19): siRNA sense strand
uggaagaccaucauuacua

SEQ ID NO: 1394053 - RNA, 19 nt, Homo sapiens
  misc_RNA (1)...(19): siRNA sense strand
uggagugaguggagugaua

SEQ ID NO: 1394054 - RNA, 19 nt, Homo sapiens
  misc_RNA (1)...(19): siRNA sense strand
aaauugagaucagagaaga

SEQ ID NO: 1394055 - RNA, 19 nt, Homo sapiens
  misc_RNA (1)...(19): siRNA sense strand
gcagauuucccuauuugga

SEQ ID NO: 1394056 - RNA, 19 nt, Homo sapiens
  misc_RNA (1)...(19): siRNA sense strand
ggcaauauuuacucuguuc

SEQ ID NO: 1394057 - RNA, 19 nt, Homo sapiens
  misc_RNA (1)...(19): siRNA sense strand
ggcagaaacuacuuauugg

SEQ ID NO: 1394058 - RNA, 19 nt, Homo sapiens
  misc_RNA (1)...(19): siRNA sense strand
ugaguggagugauaaacaa

SEQ ID NO: 1394059 - RNA, 19 nt, Homo sapiens
  misc_RNA (1)...(19): siRNA sense strand
gaaauugagaucagagaag

SEQ ID NO: 1394060 - RNA, 19 nt, Homo sapiens
  misc_RNA (1)...(19): siRNA sense strand
uaucagauccaguuauuuc

SEQ ID NO: 1394061 - RNA, 19 nt, Homo sapiens
  misc_RNA (1)...(19): siRNA sense strand
uagguuaucucuauuugca

SEQ ID NO: 1394062 - RNA, 19 nt, Homo sapiens
  misc_RNA (1)...(19): siRNA sense strand
ggugaagaccuaucgaaga

SEQ ID NO: 1394063 - RNA, 19 nt, Homo sapiens
  misc_RNA (1)...(19): siRNA sense strand
ggagugaguggagugauaa

SEQ ID NO: 1394064 - RNA, 19 nt, Homo sapiens
  misc_RNA (1)...(19): siRNA sense strand
aaugaaacccgacaauuau

SEQ ID NO: 1394065 - RNA, 19 nt, Homo sapiens
  misc_RNA (1)...(19): siRNA sense strand
gcacaacauuuggcuguac

SEQ ID NO: 1394066 - RNA, 19 nt, Homo sapiens
  misc_RNA (1)...(19): siRNA sense strand
gcaaugcacaaauggauca

SEQ ID NO: 1394067 - RNA, 19 nt, Homo sapiens
  misc_RNA (1)...(19): siRNA sense strand
cacugucucuggaucauuu

SEQ ID NO: 1394068 - RNA, 19 nt, Homo sapiens
  misc_RNA (1)...(19): siRNA sense strand
gaagaaaacuuugcuacgu

SEQ ID NO: 1394069 - RNA, 19 nt, Homo sapiens
  misc_RNA (1)...(19): siRNA sense strand
caucagagaacaagccuau

SEQ ID NO: 1394070 - RNA, 19 nt, Homo sapiens
  misc_RNA (1)...(19): siRNA sense strand
ugauaccaauuacaacuug

SEQ ID NO: 1394071 - RNA, 19 nt, Homo sapiens
  misc_RNA (1)...(19): siRNA sense strand
gcacaaauggaucagaagu

SEQ ID NO: 1394072 - RNA, 19 nt, Homo sapiens
  misc_RNA (1)...(19): siRNA sense strand
gaagauacacacgcuuuua

SEQ ID NO: 1394073 - RNA, 19 nt, Homo sapiens
  misc_RNA (1)...(19): siRNA sense strand
gaccaucauuacuaagaau

SEQ ID NO: 1394074 - RNA, 19 nt, Homo sapiens
  misc_RNA (1)...(19): siRNA sense strand
ccauggcaaugcacaaaug

SEQ ID NO: 1394075 - RNA, 19 nt, Homo sapiens
  misc_RNA (1)...(19): siRNA sense strand
ugaaacauacaccuugaaa

SEQ ID NO: 1394076 - RNA, 19 nt, Homo sapiens
  misc_RNA (1)...(19): siRNA sense strand
gcagaaacuacuuauugga

SEQ ID NO: 1394077 - RNA, 19 nt, Homo sapiens
  misc_RNA (1)...(19): siRNA sense strand
gguuaucucuauuugcaau

SEQ ID NO: 1394078 - RNA, 19 nt, Homo sapiens
  misc_RNA (1)...(19): siRNA sense strand
aaugaaacauacaccuuga

SEQ ID NO: 1394079 - RNA, 19 nt, Homo sapiens
  misc_RNA (1)...(19): siRNA sense strand
gagaacaagccuaucagau

SEQ ID NO: 1394080 - RNA, 19 nt, Homo sapiens
  misc_RNA (1)...(19): siRNA sense strand
cauuacaguguguugauua

SEQ ID NO: 1394081 - RNA, 19 nt, Homo sapiens
  misc_RNA (1)...(19): siRNA sense strand
cgaaacauugguagugaaa

SEQ ID NO: 1394082 - RNA, 19 nt, Homo sapiens
  misc_RNA (1)...(19): siRNA sense strand
gguaugagggcuuggauca

SEQ ID NO: 1394083 - RNA, 19 nt, Homo sapiens
  misc_RNA (1)...(19): siRNA sense strand
cugauaagcacaacauuug

SEQ ID NO: 1394084 - RNA, 19 nt, Homo sapiens
  misc_RNA (1)...(19): siRNA sense strand
gaucuuaacaagggcauug

SEQ ID NO: 1394085 - RNA, 19 nt, Homo sapiens
  misc_RNA (1)...(19): siRNA sense strand
caagguguuuugauuauga

SEQ ID NO: 1394086 - RNA, 19 nt, Homo sapiens
  misc_RNA (1)...(19): siRNA sense strand
agaacaagccuaucagauc

SEQ ID NO: 1394087 - RNA, 19 nt, Homo sapiens
  misc_RNA (1)...(19): siRNA sense strand
ucagagaacaagccuauca

SEQ ID NO: 1394088 - RNA, 19 nt, Homo sapiens
  misc_RNA (1)...(19): siRNA sense strand
caaggaauuccagaaacua

SEQ ID NO: 1394089 - RNA, 19 nt, Homo sapiens
  misc_RNA (1)...(19): siRNA sense strand
gcauugaagcgaagauaca

SEQ ID NO: 1394090 - RNA, 19 nt, Homo sapiens
  misc_RNA (1)...(19): siRNA sense strand
uugcucagaugacggaauu

SEQ ID NO: 1394091 - RNA, 19 nt, Homo sapiens
  misc_RNA (1)...(19): siRNA sense strand
agaccaucauuacuaagaa

SEQ ID NO: 1394092 - RNA, 19 nt, Homo sapiens
  misc_RNA (1)...(19): siRNA sense strand
acaaggaauuccagaaacu

SEQ ID NO: 1394093 - RNA, 19 nt, Homo sapiens
  misc_RNA (1)...(19): siRNA sense strand
ggauaucaccacaaggaau

SEQ ID NO: 1394094 - RNA, 19 nt, Homo sapiens
  misc_RNA (1)...(19): siRNA sense strand
ccagcaagguguuuugauu

SEQ ID NO: 1394095 - RNA, 19 nt, Homo sapiens
  misc_RNA (1)...(19): siRNA sense strand
aagcugaaauggagcauac

SEQ ID NO: 1394096 - RNA, 19 nt, Homo sapiens
  misc_RNA (1)...(19): siRNA sense strand
gauccaguuauuucacuuu

SEQ ID NO: 1394097 - RNA, 19 nt, Homo sapiens
  misc_RNA (1)...(19): siRNA sense strand
ggaauuccagaaacuaaag

SEQ ID NO: 1394098 - RNA, 19 nt, Homo sapiens
  misc_RNA (1)...(19): siRNA sense strand
uauuuacucuguucuugga

SEQ ID NO: 1394099 - RNA, 19 nt, Homo sapiens
  misc_RNA (1)...(19): siRNA sense strand
gcucagaugacggaauuug

SEQ ID NO: 1394100 - RNA, 19 nt, Homo sapiens
  misc_RNA (1)...(19): siRNA sense strand
cuucagacaccgagauaaa

SEQ ID NO: 1394101 - RNA, 19 nt, Homo sapiens
  misc_RNA (1)...(19): siRNA sense strand
ggcaucagacuauaaagau

SEQ ID NO: 1394102 - RNA, 19 nt, Homo sapiens
  misc_RNA (1)...(19): siRNA sense strand
aaugcacaguggaauauga

SEQ ID NO: 1394103 - RNA, 19 nt, Homo sapiens
  misc_RNA (1)...(19): siRNA sense strand
augcagauuucccuauuug

SEQ ID NO: 1394104 - RNA, 19 nt, Homo sapiens
  misc_RNA (1)...(19): siRNA sense strand
ccgaaacauugguagugaa

SEQ ID NO: 1394105 - RNA, 19 nt, Homo sapiens
  misc_RNA (1)...(19): siRNA sense strand
gacggaauuuggagugagu

SEQ ID NO: 1394106 - RNA, 19 nt, Homo sapiens
  misc_RNA (1)...(19): siRNA sense strand
ucugauaagcacaacauuu

SEQ ID NO: 1394107 - RNA, 19 nt, Homo sapiens
  misc_RNA (1)...(19): siRNA sense strand
acaguggaauaugaacuaa

SEQ ID NO: 1394108 - RNA, 19 nt, Homo sapiens
  misc_RNA (1)...(19): siRNA sense strand
uaaggaaugcacaguggaa

SEQ ID NO: 1394109 - RNA, 19 nt, Homo sapiens
  misc_RNA (1)...(19): siRNA sense strand
cagaaacuacuuauuggau

SEQ ID NO: 1394110 - RNA, 19 nt, Homo sapiens
  misc_RNA (1)...(19): siRNA sense strand
gggcauugaagcgaagaua

SEQ ID NO: 1394111 - RNA, 19 nt, Homo sapiens
  misc_RNA (1)...(19): siRNA sense strand
cacaguggaauaugaacua

SEQ ID NO: 1394112 - RNA, 19 nt, Homo sapiens
  misc_RNA (1)...(19): siRNA sense strand
acauuuggcuguacuucau

SEQ ID NO: 1394113 - RNA, 19 nt, Homo sapiens
  misc_RNA (1)...(19): siRNA sense strand
auagguguacuucuugaua

SEQ ID NO: 1394114 - RNA, 19 nt, Homo sapiens
  misc_RNA (1)...(19): siRNA sense strand
caacuuguuuuacugguau

SEQ ID NO: 1394115 - RNA, 19 nt, Homo sapiens
  misc_RNA (1)...(19): siRNA sense strand
uggauugcguauauuacaa

SEQ ID NO: 1394116 - RNA, 19 nt, Homo sapiens
  misc_RNA (1)...(19): siRNA sense strand
ucagaugacggaauuugga

SEQ ID NO: 1394117 - RNA, 19 nt, Homo sapiens
  misc_RNA (1)...(19): siRNA sense strand
ggaauaugcuucucuaauu

SEQ ID NO: 1394118 - RNA, 19 nt, Homo sapiens
  misc_RNA (1)...(19): siRNA sense strand
ggacuggcuugauaaauua

SEQ ID NO: 1394119 - RNA, 19 nt, Homo sapiens
  misc_RNA (1)...(19): siRNA sense strand
gcugauagaugaaguuaua

SEQ ID NO: 1394120 - RNA, 19 nt, Homo sapiens
  misc_RNA (1)...(19): siRNA sense strand
gaacugagcugcuacuuac

SEQ ID NO: 1394121 - RNA, 19 nt, Homo sapiens
  misc_RNA (1)...(19): siRNA sense strand
gaaaguggcuucuucucaa

SEQ ID NO: 1394122 - RNA, 19 nt, Homo sapiens
  misc_RNA (1)...(19): siRNA sense strand
ccagaaaccucuuggcuuu

SEQ ID NO: 1394123 - RNA, 19 nt, Homo sapiens
  misc_RNA (1)...(19): siRNA sense strand
gagcauuucuggaguauug

SEQ ID NO: 1394124 - RNA, 19 nt, Homo sapiens
  misc_RNA (1)...(19): siRNA sense strand
gaauaugcuucucuaauug

SEQ ID NO: 1394125 - RNA, 19 nt, Homo sapiens
  misc_RNA (1)...(19): siRNA sense strand
ggaagacaccaaaccauua

SEQ ID NO: 1394126 - RNA, 19 nt, Homo sapiens
  misc_RNA (1)...(19): siRNA sense strand
ggaaggaguugccuacaga

SEQ ID NO: 1394127 - RNA, 19 nt, Homo sapiens
  misc_RNA (1)...(19): siRNA sense strand
ccacaggaaugcacgguua

SEQ ID NO: 1394128 - RNA, 19 nt, Homo sapiens
  misc_RNA (1)...(19): siRNA sense strand
gaacaucuggcuaggcuua

SEQ ID NO: 1394129 - RNA, 19 nt, Homo sapiens
  misc_RNA (1)...(19): siRNA sense strand
ggacaucguuaucgaaaug

SEQ ID NO: 1394130 - RNA, 19 nt, Homo sapiens
  misc_RNA (1)...(19): siRNA sense strand
gaaggagaguggauaguug

SEQ ID NO: 1394131 - RNA, 19 nt, Homo sapiens
  misc_RNA (1)...(19): siRNA sense strand
gagaagacaccaccagaua

SEQ ID NO: 1394132 - RNA, 19 nt, Homo sapiens
  misc_RNA (1)...(19): siRNA sense strand
ggaagaagaugaaggugau

SEQ ID NO: 1394133 - RNA, 19 nt, Homo sapiens
  misc_RNA (1)...(19): siRNA sense strand
gaacggcugcaaacaaaua

SEQ ID NO: 1394134 - RNA, 19 nt, Homo sapiens
  misc_RNA (1)...(19): siRNA sense strand
ggaaauauuuggaggcaau

SEQ ID NO: 1394135 - RNA, 19 nt, Homo sapiens
  misc_RNA (1)...(19): siRNA sense strand
gaagauaccaguucagguu

SEQ ID NO: 1394136 - RNA, 19 nt, Homo sapiens
  misc_RNA (1)...(19): siRNA sense strand
ccacugagaucauccauuc

SEQ ID NO: 1394137 - RNA, 19 nt, Homo sapiens
  misc_RNA (1)...(19): siRNA sense strand
aaaucaagcucucauguuu

SEQ ID NO: 1394138 - RNA, 19 nt, Homo sapiens
  misc_RNA (1)...(19): siRNA sense strand
gaagacagguuggacaaug

SEQ ID NO: 1394139 - RNA, 19 nt, Homo sapiens
  misc_RNA (1)...(19): siRNA sense strand
gagaaaggcugggaauaug

SEQ ID NO: 1394140 - RNA, 19 nt, Homo sapiens
  misc_RNA (1)...(19): siRNA sense strand
ggaaucaggucgucaaucu

SEQ ID NO: 1394141 - RNA, 19 nt, Homo sapiens
  misc_RNA (1)...(19): siRNA sense strand
gaugaugccuucucacaga

SEQ ID NO: 1394142 - RNA, 19 nt, Homo sapiens
  misc_RNA (1)...(19): siRNA sense strand
ggacaacaauggccugugu

SEQ ID NO: 1394143 - RNA, 19 nt, Homo sapiens
  misc_RNA (1)...(19): siRNA sense strand
caacacagcugcuucaaaa

SEQ ID NO: 1394144 - RNA, 19 nt, Homo sapiens
  misc_RNA (1)...(19): siRNA sense strand
ggaaaugagugacaucuac

SEQ ID NO: 1394145 - RNA, 19 nt, Homo sapiens
  misc_RNA (1)...(19): siRNA sense strand
gaagacaccaccagauaaa

SEQ ID NO: 1394146 - RNA, 19 nt, Homo sapiens
  misc_RNA (1)...(19): siRNA sense strand
gauaguugauccugaaaga

SEQ ID NO: 1394147 - RNA, 19 nt, Homo sapiens
  misc_RNA (1)...(19): siRNA sense strand
cagaacggcugcaaacaaa

SEQ ID NO: 1394148 - RNA, 19 nt, Homo sapiens
  misc_RNA (1)...(19): siRNA sense strand
gugaugauguggagaguaa

SEQ ID NO: 1394149 - RNA, 19 nt, Homo sapiens
  misc_RNA (1)...(19): siRNA sense strand
gagcagaaguccaugaaag

SEQ ID NO: 1394150 - RNA, 19 nt, Homo sapiens
  misc_RNA (1)...(19): siRNA sense strand
ggucaaaguucacgucugu

SEQ ID NO: 1394151 - RNA, 19 nt, Homo sapiens
  misc_RNA (1)...(19): siRNA sense strand
gaagaugggaguagaauca

SEQ ID NO: 1394152 - RNA, 19 nt, Homo sapiens
  misc_RNA (1)...(19): siRNA sense strand
ccagauggcuucuaucaca

SEQ ID NO: 1394153 - RNA, 19 nt, Homo sapiens
  misc_RNA (1)...(19): siRNA sense strand
gauggcaacuacuauuauu

SEQ ID NO: 1394154 - RNA, 19 nt, Homo sapiens
  misc_RNA (1)...(19): siRNA sense strand
ggaaagccaagaaauacua

SEQ ID NO: 1394155 - RNA, 19 nt, Homo sapiens
  misc_RNA (1)...(19): siRNA sense strand
ggaaugagauuuuggaguu

SEQ ID NO: 1394156 - RNA, 19 nt, Homo sapiens
  misc_RNA (1)...(19): siRNA sense strand
caagagggcugggaauaug

SEQ ID NO: 1394157 - RNA, 19 nt, Homo sapiens
  misc_RNA (1)...(19): siRNA sense strand
cuuguuaccugaaucuuua

SEQ ID NO: 1394158 - RNA, 19 nt, Homo sapiens
  misc_RNA (1)...(19): siRNA sense strand
gaaacaacguaguucagau

SEQ ID NO: 1394159 - RNA, 19 nt, Homo sapiens
  misc_RNA (1)...(19): siRNA sense strand
cuacuuggguuuccuagaa

SEQ ID NO: 1394160 - RNA, 19 nt, Homo sapiens
  misc_RNA (1)...(19): siRNA sense strand
ggcggaugcugucaaauaa

SEQ ID NO: 1394161 - RNA, 19 nt, Homo sapiens
  misc_RNA (1)...(19): siRNA sense strand
gaugaugcauggucuuaug

SEQ ID NO: 1394162 - RNA, 19 nt, Homo sapiens
  misc_RNA (1)...(19): siRNA sense strand
uaaugcagcugacugaaga

SEQ ID NO: 1394163 - RNA, 19 nt, Homo sapiens
  misc_RNA (1)...(19): siRNA sense strand
ggcugaagcugauagauga

SEQ ID NO: 1394164 - RNA, 19 nt, Homo sapiens
  misc_RNA (1)...(19): siRNA sense strand
aagcugaucucccugcuaa

SEQ ID NO: 1394165 - RNA, 19 nt, Homo sapiens
  misc_RNA (1)...(19): siRNA sense strand
cagauacguucaaguugua

SEQ ID NO: 1394166 - RNA, 19 nt, Homo sapiens
  misc_RNA (1)...(19): siRNA sense strand
cagaauccacccaaaguua

SEQ ID NO: 1394167 - RNA, 19 nt, Homo sapiens
  misc_RNA (1)...(19): siRNA sense strand
caaauaagccacaggacuu

SEQ ID NO: 1394168 - RNA, 19 nt, Homo sapiens
  misc_RNA (1)...(19): siRNA sense strand
gaaaacagauguccauuac

SEQ ID NO: 1394169 - RNA, 19 nt, Homo sapiens
  misc_RNA (1)...(19): siRNA sense strand
cagcuuggaugaauuugaa

SEQ ID NO: 1394170 - RNA, 19 nt, Homo sapiens
  misc_RNA (1)...(19): siRNA sense strand
agaccgagaucacuacauu

SEQ ID NO: 1394171 - RNA, 19 nt, Homo sapiens
  misc_RNA (1)...(19): siRNA sense strand
ggacaucacacccaaacuu

SEQ ID NO: 1394172 - RNA, 19 nt, Homo sapiens
  misc_RNA (1)...(19): siRNA sense strand
acacggaguucacugauga

SEQ ID NO: 1394173 - RNA, 19 nt, Homo sapiens
  misc_RNA (1)...(19): siRNA sense strand
caaaccaucuuucugaagu

SEQ ID NO: 1394174 - RNA, 19 nt, Homo sapiens
  misc_RNA (1)...(19): siRNA sense strand
cgaugaaguugaaaucuau

SEQ ID NO: 1394175 - RNA, 19 nt, Homo sapiens
  misc_RNA (1)...(19): siRNA sense strand
gcaaacaaauauagaagcu

SEQ ID NO: 1394176 - RNA, 19 nt, Homo sapiens
  misc_RNA (1)...(19): siRNA sense strand
aaagagcauuucuggagua

SEQ ID NO: 1394177 - RNA, 19 nt, Homo sapiens
  misc_RNA (1)...(19): siRNA sense strand
ccagaggaguacuguguuu

SEQ ID NO: 1394178 - RNA, 19 nt, Homo sapiens
  misc_RNA (1)...(19): siRNA sense strand
auuccaagcucaagauaua

SEQ ID NO: 1394179 - RNA, 19 nt, Homo sapiens
  misc_RNA (1)...(19): siRNA sense strand
uaagaagacacccaacuuu

SEQ ID NO: 1394180 - RNA, 19 nt, Homo sapiens
  misc_RNA (1)...(19): siRNA sense strand
ggaccaaacaauuauauuc

SEQ ID NO: 1394181 - RNA, 19 nt, Homo sapiens
  misc_RNA (1)...(19): siRNA sense strand
caagggccauggaggaauu

SEQ ID NO: 1394182 - RNA, 19 nt, Homo sapiens
  misc_RNA (1)...(19): siRNA sense strand
uaagugcuguggagaagaa

SEQ ID NO: 1394183 - RNA, 19 nt, Homo sapiens
  misc_RNA (1)...(19): siRNA sense strand
cauaaggccuguggucaaa

SEQ ID NO: 1394184 - RNA, 19 nt, Homo sapiens
  misc_RNA (1)...(19): siRNA sense strand
aaacagauguccauuacag

SEQ ID NO: 1394185 - RNA, 19 nt, Homo sapiens
  misc_RNA (1)...(19): siRNA sense strand
uuacauuguucgaggcuua

SEQ ID NO: 1394186 - RNA, 19 nt, Homo sapiens
  misc_RNA (1)...(19): siRNA sense strand
ucacaguucucgauacuca

SEQ ID NO: 1394187 - RNA, 19 nt, Homo sapiens
  misc_RNA (1)...(19): siRNA sense strand
aaacaacguaguucagaua

SEQ ID NO: 1394188 - RNA, 19 nt, Homo sapiens
  misc_RNA (1)...(19): siRNA sense strand
ggaaaguggagaugacauu

SEQ ID NO: 1394189 - RNA, 19 nt, Homo sapiens
  misc_RNA (1)...(19): siRNA sense strand
gacaguauauucagaaagg

SEQ ID NO: 1394190 - RNA, 19 nt, Homo sapiens
  misc_RNA (1)...(19): siRNA sense strand
gauguuggauuuguuuaug

SEQ ID NO: 1394191 - RNA, 19 nt, Homo sapiens
  misc_RNA (1)...(19): siRNA sense strand
cgaacuauuugucaaugaa

SEQ ID NO: 1394192 - RNA, 19 nt, Homo sapiens
  misc_RNA (1)...(19): siRNA sense strand
ggacugguggaguaaauuu

SEQ ID NO: 1394193 - RNA, 19 nt, Homo sapiens
  misc_RNA (1)...(19): siRNA sense strand
gcugccaucuuuaaacuug

SEQ ID NO: 1394194 - RNA, 19 nt, Homo sapiens
  misc_RNA (1)...(19): siRNA sense strand
caaguuuccuucagugugu

SEQ ID NO: 1394195 - RNA, 19 nt, Homo sapiens
  misc_RNA (1)...(19): siRNA sense strand
ggaaugcacgguuaggauu

SEQ ID NO: 1394196 - RNA, 19 nt, Homo sapiens
  misc_RNA (1)...(19): siRNA sense strand
ucagauacguucaaguugu

SEQ ID NO: 1394197 - RNA, 19 nt, Homo sapiens
  misc_RNA (1)...(19): siRNA sense strand
ggcgaaggcugguccgaaa

SEQ ID NO: 1394198 - RNA, 19 nt, Homo sapiens
  misc_RNA (1)...(19): siRNA sense strand
ggaaggagaguggauaguu

SEQ ID NO: 1394199 - RNA, 19 nt, Homo sapiens
  misc_RNA (1)...(19): siRNA sense strand
cgucuuugcugaaauguau

SEQ ID NO: 1394200 - RNA, 19 nt, Homo sapiens
  misc_RNA (1)...(19): siRNA sense strand
agaagaaguuuaacagcuu

SEQ ID NO: 1394201 - RNA, 19 nt, Homo sapiens
  misc_RNA (1)...(19): siRNA sense strand
cagcaugccugacaucauc

SEQ ID NO: 1394202 - RNA, 19 nt, Homo sapiens
  misc_RNA (1)...(19): siRNA sense strand
gauugagggccgacaguua

SEQ ID NO: 1394203 - RNA, 19 nt, Homo sapiens
  misc_RNA (1)...(19): siRNA sense strand
gcaagaaagauuuaacaca

SEQ ID NO: 1394204 - RNA, 19 nt, Homo sapiens
  misc_RNA (1)...(19): siRNA sense strand
aguaggacgucauaaguuu

SEQ ID NO: 1394205 - RNA, 19 nt, Homo sapiens
  misc_RNA (1)...(19): siRNA sense strand
aaucagggauacaagguaa

SEQ ID NO: 1394206 - RNA, 19 nt, Homo sapiens
  misc_RNA (1)...(19): siRNA sense strand
cagccugucugccguguuu

SEQ ID NO: 1394207 - RNA, 19 nt, Homo sapiens
  misc_RNA (1)...(19): siRNA sense strand
aaacagagguaggcuuugu

SEQ ID NO: 1394208 - RNA, 19 nt, Homo sapiens
  misc_RNA (1)...(19): siRNA sense strand
ucgaugaaguugaaaucua

SEQ ID NO: 1394209 - RNA, 19 nt, Homo sapiens
  misc_RNA (1)...(19): siRNA sense strand
ggaaacaacguaguucaga

SEQ ID NO: 1394210 - RNA, 19 nt, Homo sapiens
  misc_RNA (1)...(19): siRNA sense strand
aaagaagcuugcugacuga

SEQ ID NO: 1394211 - RNA, 19 nt, Homo sapiens
  misc_RNA (1)...(19): siRNA sense strand
aggacuggcuugauaaauu

SEQ ID NO: 1394212 - RNA, 19 nt, Homo sapiens
  misc_RNA (1)...(19): siRNA sense strand
gagguaggcuuuguuccaa

SEQ ID NO: 1394213 - RNA, 19 nt, Homo sapiens
  misc_RNA (1)...(19): siRNA sense strand
ccaggucucucucccaaau

SEQ ID NO: 1394214 - RNA, 19 nt, Homo sapiens
  misc_RNA (1)...(19): siRNA sense strand
gcucaaagccucccuucug

SEQ ID NO: 1394215 - RNA, 19 nt, Homo sapiens
  misc_RNA (1)...(19): siRNA sense strand
agaagagccuggagaaaca

SEQ ID NO: 1394216 - RNA, 19 nt, Homo sapiens
  misc_RNA (1)...(19): siRNA sense strand
gucaauaccuggcgagauc

SEQ ID NO: 1394217 - RNA, 19 nt, Homo sapiens
  misc_RNA (1)...(19): siRNA sense strand
ggaauaugcuucucuaauu

SEQ ID NO: 1394218 - RNA, 19 nt, Homo sapiens
  misc_RNA (1)...(19): siRNA sense strand
ggacuggcuugauaaauua

SEQ ID NO: 1394219 - RNA, 19 nt, Homo sapiens
  misc_RNA (1)...(19): siRNA sense strand
gcugauagaugaaguuaua

SEQ ID NO: 1394220 - RNA, 19 nt, Homo sapiens
  misc_RNA (1)...(19): siRNA sense strand
gaacugagcugcuacuuac

SEQ ID NO: 1394221 - RNA, 19 nt, Homo sapiens
  misc_RNA (1)...(19): siRNA sense strand
gaaaguggcuucuucucaa

SEQ ID NO: 1394222 - RNA, 19 nt, Homo sapiens
  misc_RNA (1)...(19): siRNA sense strand
ccagaaaccucuuggcuuu

SEQ ID NO: 1394223 - RNA, 19 nt, Homo sapiens
  misc_RNA (1)...(19): siRNA sense strand
gagcauuucuggaguauug

SEQ ID NO: 1394224 - RNA, 19 nt, Homo sapiens
  misc_RNA (1)...(19): siRNA sense strand
gaauaugcuucucuaauug

SEQ ID NO: 1394225 - RNA, 19 nt, Homo sapiens
  misc_RNA (1)...(19): siRNA sense strand
ggaagacaccaaaccauua

SEQ ID NO: 1394226 - RNA, 19 nt, Homo sapiens
  misc_RNA (1)...(19): siRNA sense strand
ggaaggaguugccuacaga

SEQ ID NO: 1394227 - RNA, 19 nt, Homo sapiens
  misc_RNA (1)...(19): siRNA sense strand
ccacaggaaugcacgguua

SEQ ID NO: 1394228 - RNA, 19 nt, Homo sapiens
  misc_RNA (1)...(19): siRNA sense strand
gaacaucuggcuaggcuua

SEQ ID NO: 1394229 - RNA, 19 nt, Homo sapiens
  misc_RNA (1)...(19): siRNA sense strand
ggacaucguuaucgaaaug

SEQ ID NO: 1394230 - RNA, 19 nt, Homo sapiens
  misc_RNA (1)...(19): siRNA sense strand
gaaggagaguggauaguug

SEQ ID NO: 1394231 - RNA, 19 nt, Homo sapiens
  misc_RNA (1)...(19): siRNA sense strand
gagaagacaccaccagaua

SEQ ID NO: 1394232 - RNA, 19 nt, Homo sapiens
  misc_RNA (1)...(19): siRNA sense strand
ggaagaagaugaaggugau

SEQ ID NO: 1394233 - RNA, 19 nt, Homo sapiens
  misc_RNA (1)...(19): siRNA sense strand
gaacggcugcaaacaaaua

SEQ ID NO: 1394234 - RNA, 19 nt, Homo sapiens
  misc_RNA (1)...(19): siRNA sense strand
ggaaauauuuggaggcaau

SEQ ID NO: 1394235 - RNA, 19 nt, Homo sapiens
  misc_RNA (1)...(19): siRNA sense strand
gaagauaccaguucagguu

SEQ ID NO: 1394236 - RNA, 19 nt, Homo sapiens
  misc_RNA (1)...(19): siRNA sense strand
ccacugagaucauccauuc

SEQ ID NO: 1394237 - RNA, 19 nt, Homo sapiens
  misc_RNA (1)...(19): siRNA sense strand
aaaucaagcucucauguuu

SEQ ID NO: 1394238 - RNA, 19 nt, Homo sapiens
  misc_RNA (1)...(19): siRNA sense strand
gaagacagguuggacaaug

SEQ ID NO: 1394239 - RNA, 19 nt, Homo sapiens
  misc_RNA (1)...(19): siRNA sense strand
gagaaaggcugggaauaug

SEQ ID NO: 1394240 - RNA, 19 nt, Homo sapiens
  misc_RNA (1)...(19): siRNA sense strand
ggaaucaggucgucaaucu

SEQ ID NO: 1394241 - RNA, 19 nt, Homo sapiens
  misc_RNA (1)...(19): siRNA sense strand
gaugaugccuucucacaga

SEQ ID NO: 1394242 - RNA, 19 nt, Homo sapiens
  misc_RNA (1)...(19): siRNA sense strand
ggacaacaauggccugugu

SEQ ID NO: 1394243 - RNA, 19 nt, Homo sapiens
  misc_RNA (1)...(19): siRNA sense strand
caacacagcugcuucaaaa

SEQ ID NO: 1394244 - RNA, 19 nt, Homo sapiens
  misc_RNA (1)...(19): siRNA sense strand
ggaaaugagugacaucuac

SEQ ID NO: 1394245 - RNA, 19 nt, Homo sapiens
  misc_RNA (1)...(19): siRNA sense strand
gaagacaccaccagauaaa

SEQ ID NO: 1394246 - RNA, 19 nt, Homo sapiens
  misc_RNA (1)...(19): siRNA sense strand
gauaguugauccugaaaga

SEQ ID NO: 1394247 - RNA, 19 nt, Homo sapiens
  misc_RNA (1)...(19): siRNA sense strand
cagaacggcugcaaacaaa

SEQ ID NO: 1394248 - RNA, 19 nt, Homo sapiens
  misc_RNA (1)...(19): siRNA sense strand
gugaugauguggagaguaa

SEQ ID NO: 1394249 - RNA, 19 nt, Homo sapiens
  misc_RNA (1)...(19): siRNA sense strand
gagcagaaguccaugaaag

SEQ ID NO: 1394250 - RNA, 19 nt, Homo sapiens
  misc_RNA (1)...(19): siRNA sense strand
ggucaaaguucacgucugu

SEQ ID NO: 1394251 - RNA, 19 nt, Homo sapiens
  misc_RNA (1)...(19): siRNA sense strand
gaagaugggaguagaauca

SEQ ID NO: 1394252 - RNA, 19 nt, Homo sapiens
  misc_RNA (1)...(19): siRNA sense strand
ccagauggcuucuaucaca

SEQ ID NO: 1394253 - RNA, 19 nt, Homo sapiens
  misc_RNA (1)...(19): siRNA sense strand
gauggcaacuacuauuauu

SEQ ID NO: 1394254 - RNA, 19 nt, Homo sapiens
  misc_RNA (1)...(19): siRNA sense strand
ggaaagccaagaaauacua

SEQ ID NO: 1394255 - RNA, 19 nt, Homo sapiens
  misc_RNA (1)...(19): siRNA sense strand
ggaaugagauuuuggaguu

SEQ ID NO: 1394256 - RNA, 19 nt, Homo sapiens
  misc_RNA (1)...(19): siRNA sense strand
caagagggcugggaauaug

SEQ ID NO: 1394257 - RNA, 19 nt, Homo sapiens
  misc_RNA (1)...(19): siRNA sense strand
cuuguuaccugaaucuuua

SEQ ID NO: 1394258 - RNA, 19 nt, Homo sapiens
  misc_RNA (1)...(19): siRNA sense strand
gaaacaacguaguucagau

SEQ ID NO: 1394259 - RNA, 19 nt, Homo sapiens
  misc_RNA (1)...(19): siRNA sense strand
cuacuuggguuuccuagaa

SEQ ID NO: 1394260 - RNA, 19 nt, Homo sapiens
  misc_RNA (1)...(19): siRNA sense strand
ggcggaugcugucaaauaa

SEQ ID NO: 1394261 - RNA, 19 nt, Homo sapiens
  misc_RNA (1)...(19): siRNA sense strand
gaugaugcauggucuuaug

SEQ ID NO: 1394262 - RNA, 19 nt, Homo sapiens
  misc_RNA (1)...(19): siRNA sense strand
uaaugcagcugacugaaga

SEQ ID NO: 1394263 - RNA, 19 nt, Homo sapiens
  misc_RNA (1)...(19): siRNA sense strand
ggcugaagcugauagauga

SEQ ID NO: 1394264 - RNA, 19 nt, Homo sapiens
  misc_RNA (1)...(19): siRNA sense strand
aagcugaucucccugcuaa

SEQ ID NO: 1394265 - RNA, 19 nt, Homo sapiens
  misc_RNA (1)...(19): siRNA sense strand
cagauacguucaaguugua

SEQ ID NO: 1394266 - RNA, 19 nt, Homo sapiens
  misc_RNA (1)...(19): siRNA sense strand
cagaauccacccaaaguua

SEQ ID NO: 1394267 - RNA, 19 nt, Homo sapiens
  misc_RNA (1)...(19): siRNA sense strand
caaauaagccacaggacuu

SEQ ID NO: 1394268 - RNA, 19 nt, Homo sapiens
  misc_RNA (1)...(19): siRNA sense strand
gaaaacagauguccauuac

SEQ ID NO: 1394269 - RNA, 19 nt, Homo sapiens
  misc_RNA (1)...(19): siRNA sense strand
cagcuuggaugaauuugaa

SEQ ID NO: 1394270 - RNA, 19 nt, Homo sapiens
  misc_RNA (1)...(19): siRNA sense strand
agaccgagaucacuacauu

SEQ ID NO: 1394271 - RNA, 19 nt, Homo sapiens
  misc_RNA (1)...(19): siRNA sense strand
ggacaucacacccaaacuu

SEQ ID NO: 1394272 - RNA, 19 nt, Homo sapiens
  misc_RNA (1)...(19): siRNA sense strand
acacggaguucacugauga

SEQ ID NO: 1394273 - RNA, 19 nt, Homo sapiens
  misc_RNA (1)...(19): siRNA sense strand
caaaccaucuuucugaagu

SEQ ID NO: 1394274 - RNA, 19 nt, Homo sapiens
  misc_RNA (1)...(19): siRNA sense strand
cgaugaaguugaaaucuau

SEQ ID NO: 1394275 - RNA, 19 nt, Homo sapiens
  misc_RNA (1)...(19): siRNA sense strand
gcaaacaaauauagaagcu

SEQ ID NO: 1394276 - RNA, 19 nt, Homo sapiens
  misc_RNA (1)...(19): siRNA sense strand
aaagagcauuucuggagua

SEQ ID NO: 1394277 - RNA, 19 nt, Homo sapiens
  misc_RNA (1)...(19): siRNA sense strand
ccagaggaguacuguguuu

SEQ ID NO: 1394278 - RNA, 19 nt, Homo sapiens
  misc_RNA (1)...(19): siRNA sense strand
auuccaagcucaagauaua

SEQ ID NO: 1394279 - RNA, 19 nt, Homo sapiens
  misc_RNA (1)...(19): siRNA sense strand
uaagaagacacccaacuuu

SEQ ID NO: 1394280 - RNA, 19 nt, Homo sapiens
  misc_RNA (1)...(19): siRNA sense strand
ggaccaaacaauuauauuc

SEQ ID NO: 1394281 - RNA, 19 nt, Homo sapiens
  misc_RNA (1)...(19): siRNA sense strand
caagggccauggaggaauu

SEQ ID NO: 1394282 - RNA, 19 nt, Homo sapiens
  misc_RNA (1)...(19): siRNA sense strand
uaagugcuguggagaagaa

SEQ ID NO: 1394283 - RNA, 19 nt, Homo sapiens
  misc_RNA (1)...(19): siRNA sense strand
cauaaggccuguggucaaa

SEQ ID NO: 1394284 - RNA, 19 nt, Homo sapiens
  misc_RNA (1)...(19): siRNA sense strand
aaacagauguccauuacag

SEQ ID NO: 1394285 - RNA, 19 nt, Homo sapiens
  misc_RNA (1)...(19): siRNA sense strand
uuacauuguucgaggcuua

SEQ ID NO: 1394286 - RNA, 19 nt, Homo sapiens
  misc_RNA (1)...(19): siRNA sense strand
ucacaguucucgauacuca

SEQ ID NO: 1394287 - RNA, 19 nt, Homo sapiens
  misc_RNA (1)...(19): siRNA sense strand
aaacaacguaguucagaua

SEQ ID NO: 1394288 - RNA, 19 nt, Homo sapiens
  misc_RNA (1)...(19): siRNA sense strand
ggaaaguggagaugacauu

SEQ ID NO: 1394289 - RNA, 19 nt, Homo sapiens
  misc_RNA (1)...(19): siRNA sense strand
gacaguauauucagaaagg

SEQ ID NO: 1394290 - RNA, 19 nt, Homo sapiens
  misc_RNA (1)...(19): siRNA sense strand
gauguuggauuuguuuaug

SEQ ID NO: 1394291 - RNA, 19 nt, Homo sapiens
  misc_RNA (1)...(19): siRNA sense strand
cgaacuauuugucaaugaa

SEQ ID NO: 1394292 - RNA, 19 nt, Homo sapiens
  misc_RNA (1)...(19): siRNA sense strand
ggacugguggaguaaauuu

SEQ ID NO: 1394293 - RNA, 19 nt, Homo sapiens
  misc_RNA (1)...(19): siRNA sense strand
gcugccaucuuuaaacuug

SEQ ID NO: 1394294 - RNA, 19 nt, Homo sapiens
  misc_RNA (1)...(19): siRNA sense strand
caaguuuccuucagugugu

SEQ ID NO: 1394295 - RNA, 19 nt, Homo sapiens
  misc_RNA (1)...(19): siRNA sense strand
ggaaugcacgguuaggauu

SEQ ID NO: 1394296 - RNA, 19 nt, Homo sapiens
  misc_RNA (1)...(19): siRNA sense strand
ucagauacguucaaguugu

SEQ ID NO: 1394297 - RNA, 19 nt, Homo sapiens
  misc_RNA (1)...(19): siRNA sense strand
ggcgaaggcugguccgaaa

SEQ ID NO: 1394298 - RNA, 19 nt, Homo sapiens
  misc_RNA (1)...(19): siRNA sense strand
ggaaggagaguggauaguu

SEQ ID NO: 1394299 - RNA, 19 nt, Homo sapiens
  misc_RNA (1)...(19): siRNA sense strand
cgucuuugcugaaauguau

SEQ ID NO: 1394300 - RNA, 19 nt, Homo sapiens
  misc_RNA (1)...(19): siRNA sense strand
agaagaaguuuaacagcuu

SEQ ID NO: 1394301 - RNA, 19 nt, Homo sapiens
  misc_RNA (1)...(19): siRNA sense strand
cagcaugccugacaucauc

SEQ ID NO: 1394302 - RNA, 19 nt, Homo sapiens
  misc_RNA (1)...(19): siRNA sense strand
gauugagggccgacaguua

SEQ ID NO: 1394303 - RNA, 19 nt, Homo sapiens
  misc_RNA (1)...(19): siRNA sense strand
gcaagaaagauuuaacaca

SEQ ID NO: 1394304 - RNA, 19 nt, Homo sapiens
  misc_RNA (1)...(19): siRNA sense strand
aguaggacgucauaaguuu

SEQ ID NO: 1394305 - RNA, 19 nt, Homo sapiens
  misc_RNA (1)...(19): siRNA sense strand
aaucagggauacaagguaa

SEQ ID NO: 1394306 - RNA, 19 nt, Homo sapiens
  misc_RNA (1)...(19): siRNA sense strand
cagccugucugccguguuu

SEQ ID NO: 1394307 - RNA, 19 nt, Homo sapiens
  misc_RNA (1)...(19): siRNA sense strand
aaacagagguaggcuuugu

SEQ ID NO: 1394308 - RNA, 19 nt, Homo sapiens
  misc_RNA (1)...(19): siRNA sense strand
ucgaugaaguugaaaucua

SEQ ID NO: 1394309 - RNA, 19 nt, Homo sapiens
  misc_RNA (1)...(19): siRNA sense strand
ggaaacaacguaguucaga

SEQ ID NO: 1394310 - RNA, 19 nt, Homo sapiens
  misc_RNA (1)...(19): siRNA sense strand
aaagaagcuugcugacuga

SEQ ID NO: 1394311 - RNA, 19 nt, Homo sapiens
  misc_RNA (1)...(19): siRNA sense strand
aggacuggcuugauaaauu

SEQ ID NO: 1394312 - RNA, 19 nt, Homo sapiens
  misc_RNA (1)...(19): siRNA sense strand
gagguaggcuuuguuccaa

SEQ ID NO: 1394313 - RNA, 19 nt, Homo sapiens
  misc_RNA (1)...(19): siRNA sense strand
ccaggucucucucccaaau

SEQ ID NO: 1394314 - RNA, 19 nt, Homo sapiens
  misc_RNA (1)...(19): siRNA sense strand
gcucaaagccucccuucug

SEQ ID NO: 1394315 - RNA, 19 nt, Homo sapiens
  misc_RNA (1)...(19): siRNA sense strand
agaagagccuggagaaaca

SEQ ID NO: 1394316 - RNA, 19 nt, Homo sapiens
  misc_RNA (1)...(19): siRNA sense strand
gucaauaccuggcgagauc

SEQ ID NO: 1394317 - RNA, 19 nt, Homo sapiens
  misc_RNA (1)...(19): siRNA sense strand
ggagaacagucaccaggua

SEQ ID NO: 1394318 - RNA, 19 nt, Homo sapiens
  misc_RNA (1)...(19): siRNA sense strand
gcaaggagcacgaagauga

SEQ ID NO: 1394319 - RNA, 19 nt, Homo sapiens
  misc_RNA (1)...(19): siRNA sense strand
ggaagaaggacaccaguaa

SEQ ID NO: 1394320 - RNA, 19 nt, Homo sapiens
  misc_RNA (1)...(19): siRNA sense strand
ucacucagcuggaggauuc

SEQ ID NO: 1394321 - RNA, 19 nt, Homo sapiens
  misc_RNA (1)...(19): siRNA sense strand
gagcagggcuuugagaaca

SEQ ID NO: 1394322 - RNA, 19 nt, Homo sapiens
  misc_RNA (1)...(19): siRNA sense strand
ggaagaggaagaauucauu

SEQ ID NO: 1394323 - RNA, 19 nt, Homo sapiens
  misc_RNA (1)...(19): siRNA sense strand
agacugaacugaauaacug

SEQ ID NO: 1394324 - RNA, 19 nt, Homo sapiens
  misc_RNA (1)...(19): siRNA sense strand
gaacauggacuucuuuacu

SEQ ID NO: 1394325 - RNA, 19 nt, Homo sapiens
  misc_RNA (1)...(19): siRNA sense strand
ggaaucccauggagaacuu

SEQ ID NO: 1394326 - RNA, 19 nt, Homo sapiens
  misc_RNA (1)...(19): siRNA sense strand
gagcugagccagaaguuug

SEQ ID NO: 1394327 - RNA, 19 nt, Homo sapiens
  misc_RNA (1)...(19): siRNA sense strand
ggagccaccuuccucuuga

SEQ ID NO: 1394328 - RNA, 19 nt, Homo sapiens
  misc_RNA (1)...(19): siRNA sense strand
cagcugaucugcccuaucu

SEQ ID NO: 1394329 - RNA, 19 nt, Homo sapiens
  misc_RNA (1)...(19): siRNA sense strand
gaagaggaagaauucauug

SEQ ID NO: 1394330 - RNA, 19 nt, Homo sapiens
  misc_RNA (1)...(19): siRNA sense strand
ggaaccugcugguggagaa

SEQ ID NO: 1394331 - RNA, 19 nt, Homo sapiens
  misc_RNA (1)...(19): siRNA sense strand
gccagaaguuugacacguu

SEQ ID NO: 1394332 - RNA, 19 nt, Homo sapiens
  misc_RNA (1)...(19): siRNA sense strand
gaacaucaucgacaucuac

SEQ ID NO: 1394333 - RNA, 19 nt, Homo sapiens
  misc_RNA (1)...(19): siRNA sense strand
ccugagagccauugacuuu

SEQ ID NO: 1394334 - RNA, 19 nt, Homo sapiens
  misc_RNA (1)...(19): siRNA sense strand
gaagacagagcagggcuuu

SEQ ID NO: 1394335 - RNA, 19 nt, Homo sapiens
  misc_RNA (1)...(19): siRNA sense strand
gcacgaagaugagaaaauc

SEQ ID NO: 1394336 - RNA, 19 nt, Homo sapiens
  misc_RNA (1)...(19): siRNA sense strand
gaggaagaguccacagaag

SEQ ID NO: 1394337 - RNA, 19 nt, Homo sapiens
  misc_RNA (1)...(19): siRNA sense strand
ggacuucuuuacuuuggau

SEQ ID NO: 1394338 - RNA, 19 nt, Homo sapiens
  misc_RNA (1)...(19): siRNA sense strand
acauggacuucuuuacuuu

SEQ ID NO: 1394339 - RNA, 19 nt, Homo sapiens
  misc_RNA (1)...(19): siRNA sense strand
gagaacagucaccagguaa

SEQ ID NO: 1394340 - RNA, 19 nt, Homo sapiens
  misc_RNA (1)...(19): siRNA sense strand
caucaucgacaucuacaaa

SEQ ID NO: 1394341 - RNA, 19 nt, Homo sapiens
  misc_RNA (1)...(19): siRNA sense strand
ugaagaagaagaucaggaa

SEQ ID NO: 1394342 - RNA, 19 nt, Homo sapiens
  misc_RNA (1)...(19): siRNA sense strand
aggaagagcugagccagaa

SEQ ID NO: 1394343 - RNA, 19 nt, Homo sapiens
  misc_RNA (1)...(19): siRNA sense strand
gaacugaauaacuguaucu

SEQ ID NO: 1394344 - RNA, 19 nt, Homo sapiens
  misc_RNA (1)...(19): siRNA sense strand
ccacagaagggaaggaaga

SEQ ID NO: 1394345 - RNA, 19 nt, Homo sapiens
  misc_RNA (1)...(19): siRNA sense strand
gaagugugccaaugacauc

SEQ ID NO: 1394346 - RNA, 19 nt, Homo sapiens
  misc_RNA (1)...(19): siRNA sense strand
agacagagcagggcuuuga

SEQ ID NO: 1394347 - RNA, 19 nt, Homo sapiens
  misc_RNA (1)...(19): siRNA sense strand
gaggauucccgucgaguga

SEQ ID NO: 1394348 - RNA, 19 nt, Homo sapiens
  misc_RNA (1)...(19): siRNA sense strand
aacauggacuucuuuacuu

SEQ ID NO: 1394349 - RNA, 19 nt, Homo sapiens
  misc_RNA (1)...(19): siRNA sense strand
ugaggaagaggaagaauuc

SEQ ID NO: 1394350 - RNA, 19 nt, Homo sapiens
  misc_RNA (1)...(19): siRNA sense strand
ggagcacgaagaugagaaa

SEQ ID NO: 1394351 - RNA, 19 nt, Homo sapiens
  misc_RNA (1)...(19): siRNA sense strand
agaagaagaucaggaagag

SEQ ID NO: 1394352 - RNA, 19 nt, Homo sapiens
  misc_RNA (1)...(19): siRNA sense strand
gccacgaggugaucaugga

SEQ ID NO: 1394353 - RNA, 19 nt, Homo sapiens
  misc_RNA (1)...(19): siRNA sense strand
ggauuuagagcacauagca

SEQ ID NO: 1394354 - RNA, 19 nt, Homo sapiens
  misc_RNA (1)...(19): siRNA sense strand
ugagagccauugacuuugg

SEQ ID NO: 1394355 - RNA, 19 nt, Homo sapiens
  misc_RNA (1)...(19): siRNA sense strand
gaacagucaccagguaaag

SEQ ID NO: 1394356 - RNA, 19 nt, Homo sapiens
  misc_RNA (1)...(19): siRNA sense strand
gccuggagauguuuaccaa

SEQ ID NO: 1394357 - RNA, 19 nt, Homo sapiens
  misc_RNA (1)...(19): siRNA sense strand
gaagagcugagccagaagu

SEQ ID NO: 1394358 - RNA, 19 nt, Homo sapiens
  misc_RNA (1)...(19): siRNA sense strand
acaaaagacugaacugaau

SEQ ID NO: 1394359 - RNA, 19 nt, Homo sapiens
  misc_RNA (1)...(19): siRNA sense strand
gcagggcuuugagaacaug

SEQ ID NO: 1394360 - RNA, 19 nt, Homo sapiens
  misc_RNA (1)...(19): siRNA sense strand
ccaagcaacucaucaaaag

SEQ ID NO: 1394361 - RNA, 19 nt, Homo sapiens
  misc_RNA (1)...(19): siRNA sense strand
ccaagccaguggucaucuu

SEQ ID NO: 1394362 - RNA, 19 nt, Homo sapiens
  misc_RNA (1)...(19): siRNA sense strand
ggaagugugccaaugacau

SEQ ID NO: 1394363 - RNA, 19 nt, Homo sapiens
  misc_RNA (1)...(19): siRNA sense strand
ucaucgacaucuacaaaca

SEQ ID NO: 1394364 - RNA, 19 nt, Homo sapiens
  misc_RNA (1)...(19): siRNA sense strand
gaaaaucaacaucuacugu

SEQ ID NO: 1394365 - RNA, 19 nt, Homo sapiens
  misc_RNA (1)...(19): siRNA sense strand
gaaguuugacacguuguau

SEQ ID NO: 1394366 - RNA, 19 nt, Homo sapiens
  misc_RNA (1)...(19): siRNA sense strand
gcagcucaguguccauguc

SEQ ID NO: 1394367 - RNA, 19 nt, Homo sapiens
  misc_RNA (1)...(19): siRNA sense strand
gggagccaccuuccucuug

SEQ ID NO: 1394368 - RNA, 19 nt, Homo sapiens
  misc_RNA (1)...(19): siRNA sense strand
caaaagacugaacugaaua

SEQ ID NO: 1394369 - RNA, 19 nt, Homo sapiens
  misc_RNA (1)...(19): siRNA sense strand
aggagcagcuggacaaguc

SEQ ID NO: 1394370 - RNA, 19 nt, Homo sapiens
  misc_RNA (1)...(19): siRNA sense strand
gugcccaccugcuccaugu

SEQ ID NO: 1394371 - RNA, 19 nt, Homo sapiens
  misc_RNA (1)...(19): siRNA sense strand
cauagcagacgcccugaga

SEQ ID NO: 1394372 - RNA, 19 nt, Homo sapiens
  misc_RNA (1)...(19): siRNA sense strand
agaacaucaucgacaucua

SEQ ID NO: 1394373 - RNA, 19 nt, Homo sapiens
  misc_RNA (1)...(19): siRNA sense strand
aagaagaagaucaggaaga

SEQ ID NO: 1394374 - RNA, 19 nt, Homo sapiens
  misc_RNA (1)...(19): siRNA sense strand
ccauggagaacuuggagaa

SEQ ID NO: 1394375 - RNA, 19 nt, Homo sapiens
  misc_RNA (1)...(19): siRNA sense strand
aaaucaacaucuacugucu

SEQ ID NO: 1394376 - RNA, 19 nt, Homo sapiens
  misc_RNA (1)...(19): siRNA sense strand
gagaacaucaucgacaucu

SEQ ID NO: 1394377 - RNA, 19 nt, Homo sapiens
  misc_RNA (1)...(19): siRNA sense strand
gacaaaagacugaacugaa

SEQ ID NO: 1394378 - RNA, 19 nt, Homo sapiens
  misc_RNA (1)...(19): siRNA sense strand
ggacaaaagacugaacuga

SEQ ID NO: 1394379 - RNA, 19 nt, Homo sapiens
  misc_RNA (1)...(19): siRNA sense strand
agaggaagaguccacagaa

SEQ ID NO: 1394380 - RNA, 19 nt, Homo sapiens
  misc_RNA (1)...(19): siRNA sense strand
cagaugaggaagaggaaga

SEQ ID NO: 1394381 - RNA, 19 nt, Homo sapiens
  misc_RNA (1)...(19): siRNA sense strand
uggagaacaucaucgacau

SEQ ID NO: 1394382 - RNA, 19 nt, Homo sapiens
  misc_RNA (1)...(19): siRNA sense strand
uguacggccugcagaggaa

SEQ ID NO: 1394383 - RNA, 19 nt, Homo sapiens
  misc_RNA (1)...(19): siRNA sense strand
ggagaacaucaucgacauc

SEQ ID NO: 1394384 - RNA, 19 nt, Homo sapiens
  misc_RNA (1)...(19): siRNA sense strand
ccauugacuuugggacaga

SEQ ID NO: 1394385 - RNA, 19 nt, Homo sapiens
  misc_RNA (1)...(19): siRNA sense strand
cagagcagggcuuugagaa

SEQ ID NO: 1394386 - RNA, 19 nt, Homo sapiens
  misc_RNA (1)...(19): siRNA sense strand
gccggaagugugccaauga

SEQ ID NO: 1394387 - RNA, 19 nt, Homo sapiens
  misc_RNA (1)...(19): siRNA sense strand
ucacgcaggagcaggagaa

SEQ ID NO: 1394388 - RNA, 19 nt, Homo sapiens
  misc_RNA (1)...(19): siRNA sense strand
ugaacugaauaacuguauc

SEQ ID NO: 1394389 - RNA, 19 nt, Homo sapiens
  misc_RNA (1)...(19): siRNA sense strand
uggagaacuuggagaagca

SEQ ID NO: 1394390 - RNA, 19 nt, Homo sapiens
  misc_RNA (1)...(19): siRNA sense strand
gucaccagguaaaggaaga

SEQ ID NO: 1394391 - RNA, 19 nt, Homo sapiens
  misc_RNA (1)...(19): siRNA sense strand
gacagaugaggaagaggaa

SEQ ID NO: 1394392 - RNA, 19 nt, Homo sapiens
  misc_RNA (1)...(19): siRNA sense strand
gcuuugagaacauggacuu

SEQ ID NO: 1394393 - RNA, 19 nt, Homo sapiens
  misc_RNA (1)...(19): siRNA sense strand
aagaggaagaauucauuga

SEQ ID NO: 1394394 - RNA, 19 nt, Homo sapiens
  misc_RNA (1)...(19): siRNA sense strand
gcaagguguuugggaucca

SEQ ID NO: 1394395 - RNA, 19 nt, Homo sapiens
  misc_RNA (1)...(19): siRNA sense strand
caacucaucaaaagcauug

SEQ ID NO: 1394396 - RNA, 19 nt, Homo sapiens
  misc_RNA (1)...(19): siRNA sense strand
ugcagaccaucaucacuca

SEQ ID NO: 1394397 - RNA, 19 nt, Homo sapiens
  misc_RNA (1)...(19): siRNA sense strand
gaacacagcuauacaggaa

SEQ ID NO: 1394398 - RNA, 19 nt, Homo sapiens
  misc_RNA (1)...(19): siRNA sense strand
gacaauauccuacccauuu

SEQ ID NO: 1394399 - RNA, 19 nt, Homo sapiens
  misc_RNA (1)...(19): siRNA sense strand
uaaaggaaauggugcaaug

SEQ ID NO: 1394400 - RNA, 19 nt, Homo sapiens
  misc_RNA (1)...(19): siRNA sense strand
uaucgugguuuaucucuua

SEQ ID NO: 1394401 - RNA, 19 nt, Homo sapiens
  misc_RNA (1)...(19): siRNA sense strand
uuacaagcauuuaggagua

SEQ ID NO: 1394402 - RNA, 19 nt, Homo sapiens
  misc_RNA (1)...(19): siRNA sense strand
ggucugaugccuacuauuu

SEQ ID NO: 1394403 - RNA, 19 nt, Homo sapiens
  misc_RNA (1)...(19): siRNA sense strand
gaaggugguuucuuuggau

SEQ ID NO: 1394404 - RNA, 19 nt, Homo sapiens
  misc_RNA (1)...(19): siRNA sense strand
ggaaauggugcaaugauga

SEQ ID NO: 1394405 - RNA, 19 nt, Homo sapiens
  misc_RNA (1)...(19): siRNA sense strand
ggaaggugguuucuuugga

SEQ ID NO: 1394406 - RNA, 19 nt, Homo sapiens
  misc_RNA (1)...(19): siRNA sense strand
cuacgaagcugggaauuuc

SEQ ID NO: 1394407 - RNA, 19 nt, Homo sapiens
  misc_RNA (1)...(19): siRNA sense strand
cagcaguuaucuguacuua

SEQ ID NO: 1394408 - RNA, 19 nt, Homo sapiens
  misc_RNA (1)...(19): siRNA sense strand
gcagguaugacagcaguua

SEQ ID NO: 1394409 - RNA, 19 nt, Homo sapiens
  misc_RNA (1)...(19): siRNA sense strand
gcaguuaucuguacuuacc

SEQ ID NO: 1394410 - RNA, 19 nt, Homo sapiens
  misc_RNA (1)...(19): siRNA sense strand
gcaauagcgcagacaauau

SEQ ID NO: 1394411 - RNA, 19 nt, Homo sapiens
  misc_RNA (1)...(19): siRNA sense strand
acacagcuauacaggaauu

SEQ ID NO: 1394412 - RNA, 19 nt, Homo sapiens
  misc_RNA (1)...(19): siRNA sense strand
ggucaugugcacagauuaa

SEQ ID NO: 1394413 - RNA, 19 nt, Homo sapiens
  misc_RNA (1)...(19): siRNA sense strand
guacuuacccucuugacau

SEQ ID NO: 1394414 - RNA, 19 nt, Homo sapiens
  misc_RNA (1)...(19): siRNA sense strand
aaaggacucuaucgugguu

SEQ ID NO: 1394415 - RNA, 19 nt, Homo sapiens
  misc_RNA (1)...(19): siRNA sense strand
gaaauggugcaaugaugau

SEQ ID NO: 1394416 - RNA, 19 nt, Homo sapiens
  misc_RNA (1)...(19): siRNA sense strand
caucagacaauccuaaugu

SEQ ID NO: 1394417 - RNA, 19 nt, Homo sapiens
  misc_RNA (1)...(19): siRNA sense strand
auaugcagguguuucauuu

SEQ ID NO: 1394418 - RNA, 19 nt, Homo sapiens
  misc_RNA (1)...(19): siRNA sense strand
uuauggcauuugagcauua

SEQ ID NO: 1394419 - RNA, 19 nt, Homo sapiens
  misc_RNA (1)...(19): siRNA sense strand
acaauauccuacccauuug

SEQ ID NO: 1394420 - RNA, 19 nt, Homo sapiens
  misc_RNA (1)...(19): siRNA sense strand
caggucaugugcacagauu

SEQ ID NO: 1394421 - RNA, 19 nt, Homo sapiens
  misc_RNA (1)...(19): siRNA sense strand
gugcaaugaugauucgaau

SEQ ID NO: 1394422 - RNA, 19 nt, Homo sapiens
  misc_RNA (1)...(19): siRNA sense strand
gaggucugaugccuacuau

SEQ ID NO: 1394423 - RNA, 19 nt, Homo sapiens
  misc_RNA (1)...(19): siRNA sense strand
caauccaguuuauggcauu

SEQ ID NO: 1394424 - RNA, 19 nt, Homo sapiens
  misc_RNA (1)...(19): siRNA sense strand
uaugaaguaugucuaugga

SEQ ID NO: 1394425 - RNA, 19 nt, Homo sapiens
  misc_RNA (1)...(19): siRNA sense strand
caauagcgcagacaauauc

SEQ ID NO: 1394426 - RNA, 19 nt, Homo sapiens
  misc_RNA (1)...(19): siRNA sense strand
cgugguuuaucucuuaauu

SEQ ID NO: 1394427 - RNA, 19 nt, Homo sapiens
  misc_RNA (1)...(19): siRNA sense strand
cgaaugcaauuaggaacug

SEQ ID NO: 1394428 - RNA, 19 nt, Homo sapiens
  misc_RNA (1)...(19): siRNA sense strand
aagcucacaaucaccauua

SEQ ID NO: 1394429 - RNA, 19 nt, Homo sapiens
  misc_RNA (1)...(19): siRNA sense strand
aggacucuaucgugguuua

SEQ ID NO: 1394430 - RNA, 19 nt, Homo sapiens
  misc_RNA (1)...(19): siRNA sense strand
auucgaaucuuucccuaug

SEQ ID NO: 1394431 - RNA, 19 nt, Homo sapiens
  misc_RNA (1)...(19): siRNA sense strand
ggacaccauggaauucgaa

SEQ ID NO: 1394432 - RNA, 19 nt, Homo sapiens
  misc_RNA (1)...(19): siRNA sense strand
gagcaauagcgcagacaau

SEQ ID NO: 1394433 - RNA, 19 nt, Homo sapiens
  misc_RNA (1)...(19): siRNA sense strand
ucugaugccuacuauuuua

SEQ ID NO: 1394434 - RNA, 19 nt, Homo sapiens
  misc_RNA (1)...(19): siRNA sense strand
aggaaauggugcaaugaug

SEQ ID NO: 1394435 - RNA, 19 nt, Homo sapiens
  misc_RNA (1)...(19): siRNA sense strand
agcaauagcgcagacaaua

SEQ ID NO: 1394436 - RNA, 19 nt, Homo sapiens
  misc_RNA (1)...(19): siRNA sense strand
cagcuauacaggaauuauu

SEQ ID NO: 1394437 - RNA, 19 nt, Homo sapiens
  misc_RNA (1)...(19): siRNA sense strand
gaaugcaauuaggaacugu

SEQ ID NO: 1394438 - RNA, 19 nt, Homo sapiens
  misc_RNA (1)...(19): siRNA sense strand
cauaugcagguguuucauu

SEQ ID NO: 1394439 - RNA, 19 nt, Homo sapiens
  misc_RNA (1)...(19): siRNA sense strand
uaucuguacuuacccucuu

SEQ ID NO: 1394440 - RNA, 19 nt, Homo sapiens
  misc_RNA (1)...(19): siRNA sense strand
caauauccuacccauuuga

SEQ ID NO: 1394441 - RNA, 19 nt, Homo sapiens
  misc_RNA (1)...(19): siRNA sense strand
uggcauuugagcauuauaa

SEQ ID NO: 1394442 - RNA, 19 nt, Homo sapiens
  misc_RNA (1)...(19): siRNA sense strand
ugaagaguguugggcuuuc

SEQ ID NO: 1394443 - RNA, 19 nt, Homo sapiens
  misc_RNA (1)...(19): siRNA sense strand
caaaggaaggugguuucuu

SEQ ID NO: 1394444 - RNA, 19 nt, Homo sapiens
  misc_RNA (1)...(19): siRNA sense strand
ggcauuugagcauuauaaa

SEQ ID NO: 1394445 - RNA, 19 nt, Homo sapiens
  misc_RNA (1)...(19): siRNA sense strand
gaaaggggaacacagcuau

SEQ ID NO: 1394446 - RNA, 19 nt, Homo sapiens
  misc_RNA (1)...(19): siRNA sense strand
ggagcaauagcgcagacaa

SEQ ID NO: 1394447 - RNA, 19 nt, Homo sapiens
  misc_RNA (1)...(19): siRNA sense strand
uacaagcauuuaggaguau

SEQ ID NO: 1394448 - RNA, 19 nt, Homo sapiens
  misc_RNA (1)...(19): siRNA sense strand
uagcgcagacaauauccua

SEQ ID NO: 1394449 - RNA, 19 nt, Homo sapiens
  misc_RNA (1)...(19): siRNA sense strand
uauggugcaauccaguuua

SEQ ID NO: 1394450 - RNA, 19 nt, Homo sapiens
  misc_RNA (1)...(19): siRNA sense strand
gggaauuucaggucaugug

SEQ ID NO: 1394451 - RNA, 19 nt, Homo sapiens
  misc_RNA (1)...(19): siRNA sense strand
caaucaccauuacaagcau

SEQ ID NO: 1394452 - RNA, 19 nt, Homo sapiens
  misc_RNA (1)...(19): siRNA sense strand
gcaaaggaaggugguuucu

SEQ ID NO: 1394453 - RNA, 19 nt, Homo sapiens
  misc_RNA (1)...(19): siRNA sense strand
uacuuacccucuugacaug

SEQ ID NO: 1394454 - RNA, 19 nt, Homo sapiens
  misc_RNA (1)...(19): siRNA sense strand
caagcauuuaggaguauuu

SEQ ID NO: 1394455 - RNA, 19 nt, Homo sapiens
  misc_RNA (1)...(19): siRNA sense strand
uuccuuggauuguauaaag

SEQ ID NO: 1394456 - RNA, 19 nt, Homo sapiens
  misc_RNA (1)...(19): siRNA sense strand
uauccuacccauuugaugu

SEQ ID NO: 1394457 - RNA, 19 nt, Homo sapiens
  misc_RNA (1)...(19): siRNA sense strand
gaagaguguugggcuuucc

SEQ ID NO: 1394458 - RNA, 19 nt, Homo sapiens
  misc_RNA (1)...(19): siRNA sense strand
acaaucaccauuacaagca

SEQ ID NO: 1394459 - RNA, 19 nt, Homo sapiens
  misc_RNA (1)...(19): siRNA sense strand
uauuacaagcucacaauca

SEQ ID NO: 1394460 - RNA, 19 nt, Homo sapiens
  misc_RNA (1)...(19): siRNA sense strand
ggugcaauccaguuuaugg

SEQ ID NO: 1394461 - RNA, 19 nt, Homo sapiens
  misc_RNA (1)...(19): siRNA sense strand
ggauuccuuggauuguaua

SEQ ID NO: 1394462 - RNA, 19 nt, Homo sapiens
  misc_RNA (1)...(19): siRNA sense strand
ggcagaccuucaucagaca

SEQ ID NO: 1394463 - RNA, 19 nt, Homo sapiens
  misc_RNA (1)...(19): siRNA sense strand
aaaggaaauggugcaauga

SEQ ID NO: 1394464 - RNA, 19 nt, Homo sapiens
  misc_RNA (1)...(19): siRNA sense strand
uccaguuuauggcauuuga

SEQ ID NO: 1394465 - RNA, 19 nt, Homo sapiens
  misc_RNA (1)...(19): siRNA sense strand
ugccuuaccaugcgggaua

SEQ ID NO: 1394466 - RNA, 19 nt, Homo sapiens
  misc_RNA (1)...(19): siRNA sense strand
caagcucacaaucaccauu

SEQ ID NO: 1394467 - RNA, 19 nt, Homo sapiens
  misc_RNA (1)...(19): siRNA sense strand
aaggugguuucuuuggauu

SEQ ID NO: 1394468 - RNA, 19 nt, Homo sapiens
  misc_RNA (1)...(19): siRNA sense strand
ucacaaucaccauuacaag

SEQ ID NO: 1394469 - RNA, 19 nt, Homo sapiens
  misc_RNA (1)...(19): siRNA sense strand
gcugggaauuucaggucau

SEQ ID NO: 1394470 - RNA, 19 nt, Homo sapiens
  misc_RNA (1)...(19): siRNA sense strand
ggugcaaugaugauucgaa

SEQ ID NO: 1394471 - RNA, 19 nt, Homo sapiens
  misc_RNA (1)...(19): siRNA sense strand
ccacaacccgcagagacuu

SEQ ID NO: 1394472 - RNA, 19 nt, Homo sapiens
  misc_RNA (1)...(19): siRNA sense strand
cuucaucagacaauccuaa

SEQ ID NO: 1394473 - RNA, 19 nt, Homo sapiens
  misc_RNA (1)...(19): siRNA sense strand
cuggauccauggcagguau

SEQ ID NO: 1394474 - RNA, 19 nt, Homo sapiens
  misc_RNA (1)...(19): siRNA sense strand
caugugcacagauuaaugg

SEQ ID NO: 1394475 - RNA, 19 nt, Homo sapiens
  misc_RNA (1)...(19): siRNA sense strand
aaucaccauuacaagcauu

SEQ ID NO: 1394476 - RNA, 19 nt, Homo sapiens
  misc_RNA (1)...(19): siRNA sense strand
cggcgaaugcaauuaggaa

SEQ ID NO: 1394477 - RNA, 19 nt, Homo sapiens
  misc_RNA (1)...(19): siRNA sense strand
gaauuugaaaagugccuua

SEQ ID NO: 1394478 - RNA, 19 nt, Homo sapiens
  misc_RNA (1)...(19): siRNA sense strand
gaaggacacuuguauauug

SEQ ID NO: 1394479 - RNA, 19 nt, Homo sapiens
  misc_RNA (1)...(19): siRNA sense strand
gaaggaggcuguucuuuua

SEQ ID NO: 1394480 - RNA, 19 nt, Homo sapiens
  misc_RNA (1)...(19): siRNA sense strand
gauaucaaguccaagaaua

SEQ ID NO: 1394481 - RNA, 19 nt, Homo sapiens
  misc_RNA (1)...(19): siRNA sense strand
gggaaaaccugccuuauaa

SEQ ID NO: 1394482 - RNA, 19 nt, Homo sapiens
  misc_RNA (1)...(19): siRNA sense strand
uaugaacucuguacccuua

SEQ ID NO: 1394483 - RNA, 19 nt, Homo sapiens
  misc_RNA (1)...(19): siRNA sense strand
ggaauauggugaggaagua

SEQ ID NO: 1394484 - RNA, 19 nt, Homo sapiens
  misc_RNA (1)...(19): siRNA sense strand
gaaauaaggcuucccaagu

SEQ ID NO: 1394485 - RNA, 19 nt, Homo sapiens
  misc_RNA (1)...(19): siRNA sense strand
gaaagugcauugagaagag

SEQ ID NO: 1394486 - RNA, 19 nt, Homo sapiens
  misc_RNA (1)...(19): siRNA sense strand
cgauagaggugguucugua

SEQ ID NO: 1394487 - RNA, 19 nt, Homo sapiens
  misc_RNA (1)...(19): siRNA sense strand
gaaagccaguucaccaaau

SEQ ID NO: 1394488 - RNA, 19 nt, Homo sapiens
  misc_RNA (1)...(19): siRNA sense strand
gcagaaaggaaaguuauuu

SEQ ID NO: 1394489 - RNA, 19 nt, Homo sapiens
  misc_RNA (1)...(19): siRNA sense strand
uagaggugguucuguaaua

SEQ ID NO: 1394490 - RNA, 19 nt, Homo sapiens
  misc_RNA (1)...(19): siRNA sense strand
gaggaaguauuagaagaaa

SEQ ID NO: 1394491 - RNA, 19 nt, Homo sapiens
  misc_RNA (1)...(19): siRNA sense strand
gaaaaugcauccauacuca

SEQ ID NO: 1394492 - RNA, 19 nt, Homo sapiens
  misc_RNA (1)...(19): siRNA sense strand
auacucaccuccaguuuaa

SEQ ID NO: 1394493 - RNA, 19 nt, Homo sapiens
  misc_RNA (1)...(19): siRNA sense strand
ggacacuuguauauuguga

SEQ ID NO: 1394494 - RNA, 19 nt, Homo sapiens
  misc_RNA (1)...(19): siRNA sense strand
caggauagcuuugggaaau

SEQ ID NO: 1394495 - RNA, 19 nt, Homo sapiens
  misc_RNA (1)...(19): siRNA sense strand
guaaaucacauucacaaga

SEQ ID NO: 1394496 - RNA, 19 nt, Homo sapiens
  misc_RNA (1)...(19): siRNA sense strand
cugaagacaugauacuuaa

SEQ ID NO: 1394497 - RNA, 19 nt, Homo sapiens
  misc_RNA (1)...(19): siRNA sense strand
gaaaggguagccauacuga

SEQ ID NO: 1394498 - RNA, 19 nt, Homo sapiens
  misc_RNA (1)...(19): siRNA sense strand
gauagaaaggguagccaua

SEQ ID NO: 1394499 - RNA, 19 nt, Homo sapiens
  misc_RNA (1)...(19): siRNA sense strand
aaauaaggcuucccaaguc

SEQ ID NO: 1394500 - RNA, 19 nt, Homo sapiens
  misc_RNA (1)...(19): siRNA sense strand
aaaccugccuuauaacaau

SEQ ID NO: 1394501 - RNA, 19 nt, Homo sapiens
  misc_RNA (1)...(19): siRNA sense strand
gaaauugggagacuuugga

SEQ ID NO: 1394502 - RNA, 19 nt, Homo sapiens
  misc_RNA (1)...(19): siRNA sense strand
caaaugugccuuggaguaa

SEQ ID NO: 1394503 - RNA, 19 nt, Homo sapiens
  misc_RNA (1)...(19): siRNA sense strand
caugaaagcaguaaucaga

SEQ ID NO: 1394504 - RNA, 19 nt, Homo sapiens
  misc_RNA (1)...(19): siRNA sense strand
ggauagcuuugggaaauga

SEQ ID NO: 1394505 - RNA, 19 nt, Homo sapiens
  misc_RNA (1)...(19): siRNA sense strand
ugaaacacccuaauauugu

SEQ ID NO: 1394506 - RNA, 19 nt, Homo sapiens
  misc_RNA (1)...(19): siRNA sense strand
ucagauguuugccaugaaa

SEQ ID NO: 1394507 - RNA, 19 nt, Homo sapiens
  misc_RNA (1)...(19): siRNA sense strand
ggaaagccaguucaccaaa

SEQ ID NO: 1394508 - RNA, 19 nt, Homo sapiens
  misc_RNA (1)...(19): siRNA sense strand
acagagauaucaaguccaa

SEQ ID NO: 1394509 - RNA, 19 nt, Homo sapiens
  misc_RNA (1)...(19): siRNA sense strand
ugaaagcaguaaucagaug

SEQ ID NO: 1394510 - RNA, 19 nt, Homo sapiens
  misc_RNA (1)...(19): siRNA sense strand
ugugggaacuccuuauuau

SEQ ID NO: 1394511 - RNA, 19 nt, Homo sapiens
  misc_RNA (1)...(19): siRNA sense strand
cauggaauauggugaggaa

SEQ ID NO: 1394512 - RNA, 19 nt, Homo sapiens
  misc_RNA (1)...(19): siRNA sense strand
ccugaagacaugauacuua

SEQ ID NO: 1394513 - RNA, 19 nt, Homo sapiens
  misc_RNA (1)...(19): siRNA sense strand
gauagaggugguucuguaa

SEQ ID NO: 1394514 - RNA, 19 nt, Homo sapiens
  misc_RNA (1)...(19): siRNA sense strand
gcaagaggaagaacaagau

SEQ ID NO: 1394515 - RNA, 19 nt, Homo sapiens
  misc_RNA (1)...(19): siRNA sense strand
aaucagauguuugccauga

SEQ ID NO: 1394516 - RNA, 19 nt, Homo sapiens
  misc_RNA (1)...(19): siRNA sense strand
ggcauuugcuuguaccuau

SEQ ID NO: 1394517 - RNA, 19 nt, Homo sapiens
  misc_RNA (1)...(19): siRNA sense strand
caagaggaagaacaagaua

SEQ ID NO: 1394518 - RNA, 19 nt, Homo sapiens
  misc_RNA (1)...(19): siRNA sense strand
gugguucuguaauaaagua

SEQ ID NO: 1394519 - RNA, 19 nt, Homo sapiens
  misc_RNA (1)...(19): siRNA sense strand
ccaagucuuucucuaauac

SEQ ID NO: 1394520 - RNA, 19 nt, Homo sapiens
  misc_RNA (1)...(19): siRNA sense strand
ggaagaacaagauagaaag

SEQ ID NO: 1394521 - RNA, 19 nt, Homo sapiens
  misc_RNA (1)...(19): siRNA sense strand
gugaggaaguauuagaaga

SEQ ID NO: 1394522 - RNA, 19 nt, Homo sapiens
  misc_RNA (1)...(19): siRNA sense strand
uuaugugccuccagaaauu

SEQ ID NO: 1394523 - RNA, 19 nt, Homo sapiens
  misc_RNA (1)...(19): siRNA sense strand
uuaaacagcagaaaggaaa

SEQ ID NO: 1394524 - RNA, 19 nt, Homo sapiens
  misc_RNA (1)...(19): siRNA sense strand
cauacucaccuccaguuua

SEQ ID NO: 1394525 - RNA, 19 nt, Homo sapiens
  misc_RNA (1)...(19): siRNA sense strand
gagaagaguaaacagagaa

SEQ ID NO: 1394526 - RNA, 19 nt, Homo sapiens
  misc_RNA (1)...(19): siRNA sense strand
ggaaggaggcuguucuuuu

SEQ ID NO: 1394527 - RNA, 19 nt, Homo sapiens
  misc_RNA (1)...(19): siRNA sense strand
agaggugguucuguaauaa

SEQ ID NO: 1394528 - RNA, 19 nt, Homo sapiens
  misc_RNA (1)...(19): siRNA sense strand
aagcauaacacaccaagaa

SEQ ID NO: 1394529 - RNA, 19 nt, Homo sapiens
  misc_RNA (1)...(19): siRNA sense strand
uagcucggcuuguccagaa

SEQ ID NO: 1394530 - RNA, 19 nt, Homo sapiens
  misc_RNA (1)...(19): siRNA sense strand
gaguaaaucacauucacaa

SEQ ID NO: 1394531 - RNA, 19 nt, Homo sapiens
  misc_RNA (1)...(19): siRNA sense strand
guuauuuccugaagacaug

SEQ ID NO: 1394532 - RNA, 19 nt, Homo sapiens
  misc_RNA (1)...(19): siRNA sense strand
gcugaaggacacuuguaua

SEQ ID NO: 1394533 - RNA, 19 nt, Homo sapiens
  misc_RNA (1)...(19): siRNA sense strand
ugagaagaguaaacagaga

SEQ ID NO: 1394534 - RNA, 19 nt, Homo sapiens
  misc_RNA (1)...(19): siRNA sense strand
ccgagaucaucauggaaua

SEQ ID NO: 1394535 - RNA, 19 nt, Homo sapiens
  misc_RNA (1)...(19): siRNA sense strand
gggaacuccuuauuaugug

SEQ ID NO: 1394536 - RNA, 19 nt, Homo sapiens
  misc_RNA (1)...(19): siRNA sense strand
gaaagcaguaaucagaugu

SEQ ID NO: 1394537 - RNA, 19 nt, Homo sapiens
  misc_RNA (1)...(19): siRNA sense strand
ggucacgauucugucauuu

SEQ ID NO: 1394538 - RNA, 19 nt, Homo sapiens
  misc_RNA (1)...(19): siRNA sense strand
cccaagucuuucucuaaua

SEQ ID NO: 1394539 - RNA, 19 nt, Homo sapiens
  misc_RNA (1)...(19): siRNA sense strand
gcagagcucuuuugguuca

SEQ ID NO: 1394540 - RNA, 19 nt, Homo sapiens
  misc_RNA (1)...(19): siRNA sense strand
gaggggaucuaaugcaaaa

SEQ ID NO: 1394541 - RNA, 19 nt, Homo sapiens
  misc_RNA (1)...(19): siRNA sense strand
cggcagagcucuuuugguu

SEQ ID NO: 1394542 - RNA, 19 nt, Homo sapiens
  misc_RNA (1)...(19): siRNA sense strand
acacuuguauauugugaug

SEQ ID NO: 1394543 - RNA, 19 nt, Homo sapiens
  misc_RNA (1)...(19): siRNA sense strand
gcaguaaucagauguuugc

SEQ ID NO: 1394544 - RNA, 19 nt, Homo sapiens
  misc_RNA (1)...(19): siRNA sense strand
gcagaaucaggauagcuuu

SEQ ID NO: 1394545 - RNA, 19 nt, Homo sapiens
  misc_RNA (1)...(19): siRNA sense strand
caucguagcucggcuuguc

SEQ ID NO: 1394546 - RNA, 19 nt, Homo sapiens
  misc_RNA (1)...(19): siRNA sense strand
gauggaauacugugaugga

SEQ ID NO: 1394547 - RNA, 19 nt, Homo sapiens
  misc_RNA (1)...(19): siRNA sense strand
ugaaggacacuuguauauu

SEQ ID NO: 1394548 - RNA, 19 nt, Homo sapiens
  misc_RNA (1)...(19): siRNA sense strand
guaagcaguggcucaaaga

SEQ ID NO: 1394549 - RNA, 19 nt, Homo sapiens
  misc_RNA (1)...(19): siRNA sense strand
gcucuuacagcuuuggaaa

SEQ ID NO: 1394550 - RNA, 19 nt, Homo sapiens
  misc_RNA (1)...(19): siRNA sense strand
guccacugccgucucauua

SEQ ID NO: 1394551 - RNA, 19 nt, Homo sapiens
  misc_RNA (1)...(19): siRNA sense strand
gcauuugcuuguaccuaug

SEQ ID NO: 1394552 - RNA, 19 nt, Homo sapiens
  misc_RNA (1)...(19): siRNA sense strand
cagcagaaaggaaaguuau

SEQ ID NO: 1394553 - RNA, 19 nt, Homo sapiens
  misc_RNA (1)...(19): siRNA sense strand
ggguagccauacugauuug

SEQ ID NO: 1394554 - RNA, 19 nt, Homo sapiens
  misc_RNA (1)...(19): siRNA sense strand
gaaaugaagcaagcacagu

SEQ ID NO: 1394555 - RNA, 19 nt, Homo sapiens
  misc_RNA (1)...(19): siRNA sense strand
ugaggaaguauuagaagaa

SEQ ID NO: 1394556 - RNA, 19 nt, Homo sapiens
  misc_RNA (1)...(19): siRNA sense strand
ucaggcaaauaguuggaaa

SEQ ID NO: 1394557 - RNA, 19 nt, Homo sapiens
  misc_RNA (1)...(19): siRNA sense strand
gaagaacaagauagaaagg

SEQ ID NO: 1394558 - RNA, 19 nt, Homo sapiens
  misc_RNA (1)...(19): siRNA sense strand
uacaugguccugagaauga

SEQ ID NO: 1394559 - RNA, 19 nt, Homo sapiens
  misc_RNA (1)...(19): siRNA sense strand
agaaucauuugaagcugaa

SEQ ID NO: 1394560 - RNA, 19 nt, Homo sapiens
  misc_RNA (1)...(19): siRNA sense strand
ugauggaggucacgauucu

SEQ ID NO: 1394561 - RNA, 19 nt, Homo sapiens
  misc_RNA (1)...(19): siRNA sense strand
cagcuuggcuuuucaaaca

SEQ ID NO: 1394562 - RNA, 19 nt, Homo sapiens
  misc_RNA (1)...(19): siRNA sense strand
gaggugguucuguaauaaa

SEQ ID NO: 1394563 - RNA, 19 nt, Homo sapiens
  misc_RNA (1)...(19): siRNA sense strand
uggguugcauccuguauga

SEQ ID NO: 1394564 - RNA, 19 nt, Homo sapiens
  misc_RNA (1)...(19): siRNA sense strand
aagcaguaaucagauguuu

SEQ ID NO: 1394565 - RNA, 19 nt, Homo sapiens
  misc_RNA (1)...(19): siRNA sense strand
aaaguuauuuccugaagac

SEQ ID NO: 1394566 - RNA, 19 nt, Homo sapiens
  misc_RNA (1)...(19): siRNA sense strand
gaucucagcuuggcuuuuc

SEQ ID NO: 1394567 - RNA, 19 nt, Homo sapiens
  misc_RNA (1)...(19): siRNA sense strand
augaaacacccuaauauug

SEQ ID NO: 1394568 - RNA, 19 nt, Homo sapiens
  misc_RNA (1)...(19): siRNA sense strand
cauccuguaugaacucugu

SEQ ID NO: 1394569 - RNA, 19 nt, Homo sapiens
  misc_RNA (1)...(19): siRNA sense strand
aaaugugccuuggaguaaa

SEQ ID NO: 1394570 - RNA, 19 nt, Homo sapiens
  misc_RNA (1)...(19): siRNA sense strand
uagucaagcagauguuuaa

SEQ ID NO: 1394571 - RNA, 19 nt, Homo sapiens
  misc_RNA (1)...(19): siRNA sense strand
cuaauauuguugccuucaa

SEQ ID NO: 1394572 - RNA, 19 nt, Homo sapiens
  misc_RNA (1)...(19): siRNA sense strand
aaagccaguucaccaaauc

SEQ ID NO: 1394573 - RNA, 19 nt, Homo sapiens
  misc_RNA (1)...(19): siRNA sense strand
guaauaagucaguccaucu

SEQ ID NO: 1394574 - RNA, 19 nt, Homo sapiens
  misc_RNA (1)...(19): siRNA sense strand
ucccaagucuuucucuaau

SEQ ID NO: 1394575 - RNA, 19 nt, Homo sapiens
  misc_RNA (1)...(19): siRNA sense strand
uagccauacugauuuggaa

SEQ ID NO: 1394576 - RNA, 19 nt, Homo sapiens
  misc_RNA (1)...(19): siRNA sense strand
aaggguagccauacugauu

SEQ ID NO: 1394577 - RNA, 19 nt, Homo sapiens
  misc_RNA (1)...(19): siRNA sense strand
gagaucaucauggaauaug

SEQ ID NO: 1394578 - RNA, 19 nt, Homo sapiens
  misc_RNA (1)...(19): siRNA sense strand
gaaggacacuuguauauug

SEQ ID NO: 1394579 - RNA, 19 nt, Homo sapiens
  misc_RNA (1)...(19): siRNA sense strand
gaaggaggcuguucuuuua

SEQ ID NO: 1394580 - RNA, 19 nt, Homo sapiens
  misc_RNA (1)...(19): siRNA sense strand
gauaucaaguccaagaaua

SEQ ID NO: 1394581 - RNA, 19 nt, Homo sapiens
  misc_RNA (1)...(19): siRNA sense strand
gggaaaaccugccuuauaa

SEQ ID NO: 1394582 - RNA, 19 nt, Homo sapiens
  misc_RNA (1)...(19): siRNA sense strand
uaugaacucuguacccuua

SEQ ID NO: 1394583 - RNA, 19 nt, Homo sapiens
  misc_RNA (1)...(19): siRNA sense strand
ggaauauggugaggaagua

SEQ ID NO: 1394584 - RNA, 19 nt, Homo sapiens
  misc_RNA (1)...(19): siRNA sense strand
gaaauaaggcuucccaagu

SEQ ID NO: 1394585 - RNA, 19 nt, Homo sapiens
  misc_RNA (1)...(19): siRNA sense strand
gaaagugcauugagaagag

SEQ ID NO: 1394586 - RNA, 19 nt, Homo sapiens
  misc_RNA (1)...(19): siRNA sense strand
cgauagaggugguucugua

SEQ ID NO: 1394587 - RNA, 19 nt, Homo sapiens
  misc_RNA (1)...(19): siRNA sense strand
gaaagccaguucaccaaau

SEQ ID NO: 1394588 - RNA, 19 nt, Homo sapiens
  misc_RNA (1)...(19): siRNA sense strand
gcagaaaggaaaguuauuu

SEQ ID NO: 1394589 - RNA, 19 nt, Homo sapiens
  misc_RNA (1)...(19): siRNA sense strand
uagaggugguucuguaaua

SEQ ID NO: 1394590 - RNA, 19 nt, Homo sapiens
  misc_RNA (1)...(19): siRNA sense strand
gaggaaguauuagaagaaa

SEQ ID NO: 1394591 - RNA, 19 nt, Homo sapiens
  misc_RNA (1)...(19): siRNA sense strand
gaaaaugcauccauacuca

SEQ ID NO: 1394592 - RNA, 19 nt, Homo sapiens
  misc_RNA (1)...(19): siRNA sense strand
auacucaccuccaguuuaa

SEQ ID NO: 1394593 - RNA, 19 nt, Homo sapiens
  misc_RNA (1)...(19): siRNA sense strand
ggacacuuguauauuguga

SEQ ID NO: 1394594 - RNA, 19 nt, Homo sapiens
  misc_RNA (1)...(19): siRNA sense strand
caggauagcuuugggaaau

SEQ ID NO: 1394595 - RNA, 19 nt, Homo sapiens
  misc_RNA (1)...(19): siRNA sense strand
guaaaucacauucacaaga

SEQ ID NO: 1394596 - RNA, 19 nt, Homo sapiens
  misc_RNA (1)...(19): siRNA sense strand
cugaagacaugauacuuaa

SEQ ID NO: 1394597 - RNA, 19 nt, Homo sapiens
  misc_RNA (1)...(19): siRNA sense strand
gaaaggguagccauacuga

SEQ ID NO: 1394598 - RNA, 19 nt, Homo sapiens
  misc_RNA (1)...(19): siRNA sense strand
gauagaaaggguagccaua

SEQ ID NO: 1394599 - RNA, 19 nt, Homo sapiens
  misc_RNA (1)...(19): siRNA sense strand
aaauaaggcuucccaaguc

SEQ ID NO: 1394600 - RNA, 19 nt, Homo sapiens
  misc_RNA (1)...(19): siRNA sense strand
aaaccugccuuauaacaau

SEQ ID NO: 1394601 - RNA, 19 nt, Homo sapiens
  misc_RNA (1)...(19): siRNA sense strand
gaaauugggagacuuugga

SEQ ID NO: 1394602 - RNA, 19 nt, Homo sapiens
  misc_RNA (1)...(19): siRNA sense strand
caaaugugccuuggaguaa

SEQ ID NO: 1394603 - RNA, 19 nt, Homo sapiens
  misc_RNA (1)...(19): siRNA sense strand
caugaaagcaguaaucaga

SEQ ID NO: 1394604 - RNA, 19 nt, Homo sapiens
  misc_RNA (1)...(19): siRNA sense strand
ggauagcuuugggaaauga

SEQ ID NO: 1394605 - RNA, 19 nt, Homo sapiens
  misc_RNA (1)...(19): siRNA sense strand
ugaaacacccuaauauugu

SEQ ID NO: 1394606 - RNA, 19 nt, Homo sapiens
  misc_RNA (1)...(19): siRNA sense strand
ucagauguuugccaugaaa

SEQ ID NO: 1394607 - RNA, 19 nt, Homo sapiens
  misc_RNA (1)...(19): siRNA sense strand
ggaaagccaguucaccaaa

SEQ ID NO: 1394608 - RNA, 19 nt, Homo sapiens
  misc_RNA (1)...(19): siRNA sense strand
acagagauaucaaguccaa

SEQ ID NO: 1394609 - RNA, 19 nt, Homo sapiens
  misc_RNA (1)...(19): siRNA sense strand
ugaaagcaguaaucagaug

SEQ ID NO: 1394610 - RNA, 19 nt, Homo sapiens
  misc_RNA (1)...(19): siRNA sense strand
ugugggaacuccuuauuau

SEQ ID NO: 1394611 - RNA, 19 nt, Homo sapiens
  misc_RNA (1)...(19): siRNA sense strand
cauggaauauggugaggaa

SEQ ID NO: 1394612 - RNA, 19 nt, Homo sapiens
  misc_RNA (1)...(19): siRNA sense strand
ccugaagacaugauacuua

SEQ ID NO: 1394613 - RNA, 19 nt, Homo sapiens
  misc_RNA (1)...(19): siRNA sense strand
gauagaggugguucuguaa

SEQ ID NO: 1394614 - RNA, 19 nt, Homo sapiens
  misc_RNA (1)...(19): siRNA sense strand
gcaagaggaagaacaagau

SEQ ID NO: 1394615 - RNA, 19 nt, Homo sapiens
  misc_RNA (1)...(19): siRNA sense strand
aaucagauguuugccauga

SEQ ID NO: 1394616 - RNA, 19 nt, Homo sapiens
  misc_RNA (1)...(19): siRNA sense strand
ggcauuugcuuguaccuau

SEQ ID NO: 1394617 - RNA, 19 nt, Homo sapiens
  misc_RNA (1)...(19): siRNA sense strand
caagaggaagaacaagaua

SEQ ID NO: 1394618 - RNA, 19 nt, Homo sapiens
  misc_RNA (1)...(19): siRNA sense strand
gugguucuguaauaaagua

SEQ ID NO: 1394619 - RNA, 19 nt, Homo sapiens
  misc_RNA (1)...(19): siRNA sense strand
ccaagucuuucucuaauac

SEQ ID NO: 1394620 - RNA, 19 nt, Homo sapiens
  misc_RNA (1)...(19): siRNA sense strand
ggaagaacaagauagaaag

SEQ ID NO: 1394621 - RNA, 19 nt, Homo sapiens
  misc_RNA (1)...(19): siRNA sense strand
gugaggaaguauuagaaga

SEQ ID NO: 1394622 - RNA, 19 nt, Homo sapiens
  misc_RNA (1)...(19): siRNA sense strand
uuaugugccuccagaaauu

SEQ ID NO: 1394623 - RNA, 19 nt, Homo sapiens
  misc_RNA (1)...(19): siRNA sense strand
uuaaacagcagaaaggaaa

SEQ ID NO: 1394624 - RNA, 19 nt, Homo sapiens
  misc_RNA (1)...(19): siRNA sense strand
cauacucaccuccaguuua

SEQ ID NO: 1394625 - RNA, 19 nt, Homo sapiens
  misc_RNA (1)...(19): siRNA sense strand
gagaagaguaaacagagaa

SEQ ID NO: 1394626 - RNA, 19 nt, Homo sapiens
  misc_RNA (1)...(19): siRNA sense strand
ggaaggaggcuguucuuuu

SEQ ID NO: 1394627 - RNA, 19 nt, Homo sapiens
  misc_RNA (1)...(19): siRNA sense strand
agaggugguucuguaauaa

SEQ ID NO: 1394628 - RNA, 19 nt, Homo sapiens
  misc_RNA (1)...(19): siRNA sense strand
aagcauaacacaccaagaa

SEQ ID NO: 1394629 - RNA, 19 nt, Homo sapiens
  misc_RNA (1)...(19): siRNA sense strand
uagcucggcuuguccagaa

SEQ ID NO: 1394630 - RNA, 19 nt, Homo sapiens
  misc_RNA (1)...(19): siRNA sense strand
gaguaaaucacauucacaa

SEQ ID NO: 1394631 - RNA, 19 nt, Homo sapiens
  misc_RNA (1)...(19): siRNA sense strand
guuauuuccugaagacaug

SEQ ID NO: 1394632 - RNA, 19 nt, Homo sapiens
  misc_RNA (1)...(19): siRNA sense strand
gcugaaggacacuuguaua

SEQ ID NO: 1394633 - RNA, 19 nt, Homo sapiens
  misc_RNA (1)...(19): siRNA sense strand
ugagaagaguaaacagaga

SEQ ID NO: 1394634 - RNA, 19 nt, Homo sapiens
  misc_RNA (1)...(19): siRNA sense strand
ccgagaucaucauggaaua

SEQ ID NO: 1394635 - RNA, 19 nt, Homo sapiens
  misc_RNA (1)...(19): siRNA sense strand
gggaacuccuuauuaugug

SEQ ID NO: 1394636 - RNA, 19 nt, Homo sapiens
  misc_RNA (1)...(19): siRNA sense strand
gaaagcaguaaucagaugu

SEQ ID NO: 1394637 - RNA, 19 nt, Homo sapiens
  misc_RNA (1)...(19): siRNA sense strand
ggucacgauucugucauuu

SEQ ID NO: 1394638 - RNA, 19 nt, Homo sapiens
  misc_RNA (1)...(19): siRNA sense strand
cccaagucuuucucuaaua

SEQ ID NO: 1394639 - RNA, 19 nt, Homo sapiens
  misc_RNA (1)...(19): siRNA sense strand
gcagagcucuuuugguuca

SEQ ID NO: 1394640 - RNA, 19 nt, Homo sapiens
  misc_RNA (1)...(19): siRNA sense strand
gaggggaucuaaugcaaaa

SEQ ID NO: 1394641 - RNA, 19 nt, Homo sapiens
  misc_RNA (1)...(19): siRNA sense strand
cggcagagcucuuuugguu

SEQ ID NO: 1394642 - RNA, 19 nt, Homo sapiens
  misc_RNA (1)...(19): siRNA sense strand
acacuuguauauugugaug

SEQ ID NO: 1394643 - RNA, 19 nt, Homo sapiens
  misc_RNA (1)...(19): siRNA sense strand
gcaguaaucagauguuugc

SEQ ID NO: 1394644 - RNA, 19 nt, Homo sapiens
  misc_RNA (1)...(19): siRNA sense strand
gcagaaucaggauagcuuu

SEQ ID NO: 1394645 - RNA, 19 nt, Homo sapiens
  misc_RNA (1)...(19): siRNA sense strand
caucguagcucggcuuguc

SEQ ID NO: 1394646 - RNA, 19 nt, Homo sapiens
  misc_RNA (1)...(19): siRNA sense strand
gauggaauacugugaugga

SEQ ID NO: 1394647 - RNA, 19 nt, Homo sapiens
  misc_RNA (1)...(19): siRNA sense strand
ugaaggacacuuguauauu

SEQ ID NO: 1394648 - RNA, 19 nt, Homo sapiens
  misc_RNA (1)...(19): siRNA sense strand
guaagcaguggcucaaaga

SEQ ID NO: 1394649 - RNA, 19 nt, Homo sapiens
  misc_RNA (1)...(19): siRNA sense strand
gcucuuacagcuuuggaaa

SEQ ID NO: 1394650 - RNA, 19 nt, Homo sapiens
  misc_RNA (1)...(19): siRNA sense strand
guccacugccgucucauua

SEQ ID NO: 1394651 - RNA, 19 nt, Homo sapiens
  misc_RNA (1)...(19): siRNA sense strand
gcauuugcuuguaccuaug

SEQ ID NO: 1394652 - RNA, 19 nt, Homo sapiens
  misc_RNA (1)...(19): siRNA sense strand
cagcagaaaggaaaguuau

SEQ ID NO: 1394653 - RNA, 19 nt, Homo sapiens
  misc_RNA (1)...(19): siRNA sense strand
ggguagccauacugauuug

SEQ ID NO: 1394654 - RNA, 19 nt, Homo sapiens
  misc_RNA (1)...(19): siRNA sense strand
gaaaugaagcaagcacagu

SEQ ID NO: 1394655 - RNA, 19 nt, Homo sapiens
  misc_RNA (1)...(19): siRNA sense strand
ugaggaaguauuagaagaa

SEQ ID NO: 1394656 - RNA, 19 nt, Homo sapiens
  misc_RNA (1)...(19): siRNA sense strand
ucaggcaaauaguuggaaa

SEQ ID NO: 1394657 - RNA, 19 nt, Homo sapiens
  misc_RNA (1)...(19): siRNA sense strand
gaagaacaagauagaaagg

SEQ ID NO: 1394658 - RNA, 19 nt, Homo sapiens
  misc_RNA (1)...(19): siRNA sense strand
uacaugguccugagaauga

SEQ ID NO: 1394659 - RNA, 19 nt, Homo sapiens
  misc_RNA (1)...(19): siRNA sense strand
agaaucauuugaagcugaa

SEQ ID NO: 1394660 - RNA, 19 nt, Homo sapiens
  misc_RNA (1)...(19): siRNA sense strand
ugauggaggucacgauucu

SEQ ID NO: 1394661 - RNA, 19 nt, Homo sapiens
  misc_RNA (1)...(19): siRNA sense strand
cagcuuggcuuuucaaaca

SEQ ID NO: 1394662 - RNA, 19 nt, Homo sapiens
  misc_RNA (1)...(19): siRNA sense strand
gaggugguucuguaauaaa

SEQ ID NO: 1394663 - RNA, 19 nt, Homo sapiens
  misc_RNA (1)...(19): siRNA sense strand
uggguugcauccuguauga

SEQ ID NO: 1394664 - RNA, 19 nt, Homo sapiens
  misc_RNA (1)...(19): siRNA sense strand
aagcaguaaucagauguuu

SEQ ID NO: 1394665 - RNA, 19 nt, Homo sapiens
  misc_RNA (1)...(19): siRNA sense strand
aaaguuauuuccugaagac

SEQ ID NO: 1394666 - RNA, 19 nt, Homo sapiens
  misc_RNA (1)...(19): siRNA sense strand
gaucucagcuuggcuuuuc

SEQ ID NO: 1394667 - RNA, 19 nt, Homo sapiens
  misc_RNA (1)...(19): siRNA sense strand
augaaacacccuaauauug

SEQ ID NO: 1394668 - RNA, 19 nt, Homo sapiens
  misc_RNA (1)...(19): siRNA sense strand
cauccuguaugaacucugu

SEQ ID NO: 1394669 - RNA, 19 nt, Homo sapiens
  misc_RNA (1)...(19): siRNA sense strand
aaaugugccuuggaguaaa

SEQ ID NO: 1394670 - RNA, 19 nt, Homo sapiens
  misc_RNA (1)...(19): siRNA sense strand
uagucaagcagauguuuaa

SEQ ID NO: 1394671 - RNA, 19 nt, Homo sapiens
  misc_RNA (1)...(19): siRNA sense strand
cuaauauuguugccuucaa

SEQ ID NO: 1394672 - RNA, 19 nt, Homo sapiens
  misc_RNA (1)...(19): siRNA sense strand
aaagccaguucaccaaauc

SEQ ID NO: 1394673 - RNA, 19 nt, Homo sapiens
  misc_RNA (1)...(19): siRNA sense strand
guaauaagucaguccaucu

SEQ ID NO: 1394674 - RNA, 19 nt, Homo sapiens
  misc_RNA (1)...(19): siRNA sense strand
ucccaagucuuucucuaau

SEQ ID NO: 1394675 - RNA, 19 nt, Homo sapiens
  misc_RNA (1)...(19): siRNA sense strand
uagccauacugauuuggaa

SEQ ID NO: 1394676 - RNA, 19 nt, Homo sapiens
  misc_RNA (1)...(19): siRNA sense strand
aaggguagccauacugauu

SEQ ID NO: 1394677 - RNA, 19 nt, Homo sapiens
  misc_RNA (1)...(19): siRNA sense strand
gagaucaucauggaauaug

SEQ ID NO: 1394678 - RNA, 19 nt, Homo sapiens
  misc_RNA (1)...(19): siRNA sense strand
ccaaagaccucaucaauaa

SEQ ID NO: 1394679 - RNA, 19 nt, Homo sapiens
  misc_RNA (1)...(19): siRNA sense strand
gcuagaaucugccgucuuu

SEQ ID NO: 1394680 - RNA, 19 nt, Homo sapiens
  misc_RNA (1)...(19): siRNA sense strand
gaagaaaccagauggagua

SEQ ID NO: 1394681 - RNA, 19 nt, Homo sapiens
  misc_RNA (1)...(19): siRNA sense strand
gaucaaggcuggagcuuau

SEQ ID NO: 1394682 - RNA, 19 nt, Homo sapiens
  misc_RNA (1)...(19): siRNA sense strand
gaucgaagcuaucaacaau

SEQ ID NO: 1394683 - RNA, 19 nt, Homo sapiens
  misc_RNA (1)...(19): siRNA sense strand
guaaagauccuuauggaaa

SEQ ID NO: 1394684 - RNA, 19 nt, Homo sapiens
  misc_RNA (1)...(19): siRNA sense strand
gaggugaacuguuugaaga

SEQ ID NO: 1394685 - RNA, 19 nt, Homo sapiens
  misc_RNA (1)...(19): siRNA sense strand
gaaaccagauggaguaaag

SEQ ID NO: 1394686 - RNA, 19 nt, Homo sapiens
  misc_RNA (1)...(19): siRNA sense strand
gaagagggcuuucacuacu

SEQ ID NO: 1394687 - RNA, 19 nt, Homo sapiens
  misc_RNA (1)...(19): siRNA sense strand
guaaaggagucaacugaga

SEQ ID NO: 1394688 - RNA, 19 nt, Homo sapiens
  misc_RNA (1)...(19): siRNA sense strand
aaaccaauccacacuauua

SEQ ID NO: 1394689 - RNA, 19 nt, Homo sapiens
  misc_RNA (1)...(19): siRNA sense strand
caaagucacugaacaacug

SEQ ID NO: 1394690 - RNA, 19 nt, Homo sapiens
  misc_RNA (1)...(19): siRNA sense strand
gggagcagcugugaaauug

SEQ ID NO: 1394691 - RNA, 19 nt, Homo sapiens
  misc_RNA (1)...(19): siRNA sense strand
caaagacaaugcagucaga

SEQ ID NO: 1394692 - RNA, 19 nt, Homo sapiens
  misc_RNA (1)...(19): siRNA sense strand
gccaagaguuuguugaaga

SEQ ID NO: 1394693 - RNA, 19 nt, Homo sapiens
  misc_RNA (1)...(19): siRNA sense strand
gcacgaaagcaagagauua

SEQ ID NO: 1394694 - RNA, 19 nt, Homo sapiens
  misc_RNA (1)...(19): siRNA sense strand
gccaaagaccucaucaaua

SEQ ID NO: 1394695 - RNA, 19 nt, Homo sapiens
  misc_RNA (1)...(19): siRNA sense strand
caagggagcagcugugaaa

SEQ ID NO: 1394696 - RNA, 19 nt, Homo sapiens
  misc_RNA (1)...(19): siRNA sense strand
caacuaugcuggcuacaag

SEQ ID NO: 1394697 - RNA, 19 nt, Homo sapiens
  misc_RNA (1)...(19): siRNA sense strand
gaaagccaguggauaugug

SEQ ID NO: 1394698 - RNA, 19 nt, Homo sapiens
  misc_RNA (1)...(19): siRNA sense strand
ucaccuaaauggcauaguu

SEQ ID NO: 1394699 - RNA, 19 nt, Homo sapiens
  misc_RNA (1)...(19): siRNA sense strand
acaagaauaugcugccaaa

SEQ ID NO: 1394700 - RNA, 19 nt, Homo sapiens
  misc_RNA (1)...(19): siRNA sense strand
ccaagaguuuguugaagaa

SEQ ID NO: 1394701 - RNA, 19 nt, Homo sapiens
  misc_RNA (1)...(19): siRNA sense strand
guagacugcuugaagaaau

SEQ ID NO: 1394702 - RNA, 19 nt, Homo sapiens
  misc_RNA (1)...(19): siRNA sense strand
ccauggaucugucaacguu

SEQ ID NO: 1394703 - RNA, 19 nt, Homo sapiens
  misc_RNA (1)...(19): siRNA sense strand
gaagcacccuaauauugug

SEQ ID NO: 1394704 - RNA, 19 nt, Homo sapiens
  misc_RNA (1)...(19): siRNA sense strand
guuaaucauugucaccuaa

SEQ ID NO: 1394705 - RNA, 19 nt, Homo sapiens
  misc_RNA (1)...(19): siRNA sense strand
auacaacaauugaggauga

SEQ ID NO: 1394706 - RNA, 19 nt, Homo sapiens
  misc_RNA (1)...(19): siRNA sense strand
ugaacuguuugaagacaua

SEQ ID NO: 1394707 - RNA, 19 nt, Homo sapiens
  misc_RNA (1)...(19): siRNA sense strand
ggugccaucuugacaacua

SEQ ID NO: 1394708 - RNA, 19 nt, Homo sapiens
  misc_RNA (1)...(19): siRNA sense strand
uaaagauccuuauggaaag

SEQ ID NO: 1394709 - RNA, 19 nt, Homo sapiens
  misc_RNA (1)...(19): siRNA sense strand
ggaugaagaccaacacaga

SEQ ID NO: 1394710 - RNA, 19 nt, Homo sapiens
  misc_RNA (1)...(19): siRNA sense strand
gaguaaaggagucaacuga

SEQ ID NO: 1394711 - RNA, 19 nt, Homo sapiens
  misc_RNA (1)...(19): siRNA sense strand
gaaagcaagagauuaucaa

SEQ ID NO: 1394712 - RNA, 19 nt, Homo sapiens
  misc_RNA (1)...(19): siRNA sense strand
ggaugaagaugugaaagca

SEQ ID NO: 1394713 - RNA, 19 nt, Homo sapiens
  misc_RNA (1)...(19): siRNA sense strand
gaaagagaagcuagaaucu

SEQ ID NO: 1394714 - RNA, 19 nt, Homo sapiens
  misc_RNA (1)...(19): siRNA sense strand
gaacaacugaucgaagcua

SEQ ID NO: 1394715 - RNA, 19 nt, Homo sapiens
  misc_RNA (1)...(19): siRNA sense strand
caagagaauacuacaguga

SEQ ID NO: 1394716 - RNA, 19 nt, Homo sapiens
  misc_RNA (1)...(19): siRNA sense strand
auauuaggcucacacagua

SEQ ID NO: 1394717 - RNA, 19 nt, Homo sapiens
  misc_RNA (1)...(19): siRNA sense strand
gcaagagauuaucaaaguc

SEQ ID NO: 1394718 - RNA, 19 nt, Homo sapiens
  misc_RNA (1)...(19): siRNA sense strand
cagaagagggcuuucacua

SEQ ID NO: 1394719 - RNA, 19 nt, Homo sapiens
  misc_RNA (1)...(19): siRNA sense strand
cuacuugguguuugauuua

SEQ ID NO: 1394720 - RNA, 19 nt, Homo sapiens
  misc_RNA (1)...(19): siRNA sense strand
acuaaagggugccaucuug

SEQ ID NO: 1394721 - RNA, 19 nt, Homo sapiens
  misc_RNA (1)...(19): siRNA sense strand
ggugagaagauguaugaaa

SEQ ID NO: 1394722 - RNA, 19 nt, Homo sapiens
  misc_RNA (1)...(19): siRNA sense strand
cagcaggcgugguuugguu

SEQ ID NO: 1394723 - RNA, 19 nt, Homo sapiens
  misc_RNA (1)...(19): siRNA sense strand
gaucaucagaaacuagaaa

SEQ ID NO: 1394724 - RNA, 19 nt, Homo sapiens
  misc_RNA (1)...(19): siRNA sense strand
agcaagagauuaucaaagu

SEQ ID NO: 1394725 - RNA, 19 nt, Homo sapiens
  misc_RNA (1)...(19): siRNA sense strand
gugagaagauguaugaaaa

SEQ ID NO: 1394726 - RNA, 19 nt, Homo sapiens
  misc_RNA (1)...(19): siRNA sense strand
uacuggaggugaacuguuu

SEQ ID NO: 1394727 - RNA, 19 nt, Homo sapiens
  misc_RNA (1)...(19): siRNA sense strand
gaaaauuccuacuggacaa

SEQ ID NO: 1394728 - RNA, 19 nt, Homo sapiens
  misc_RNA (1)...(19): siRNA sense strand
gcugaugccagucauugua

SEQ ID NO: 1394729 - RNA, 19 nt, Homo sapiens
  misc_RNA (1)...(19): siRNA sense strand
gcgacuucaugauagcaua

SEQ ID NO: 1394730 - RNA, 19 nt, Homo sapiens
  misc_RNA (1)...(19): siRNA sense strand
ucuaaacccucauguacau

SEQ ID NO: 1394731 - RNA, 19 nt, Homo sapiens
  misc_RNA (1)...(19): siRNA sense strand
caagagauuaucaaaguca

SEQ ID NO: 1394732 - RNA, 19 nt, Homo sapiens
  misc_RNA (1)...(19): siRNA sense strand
acugagaguucaaauacaa

SEQ ID NO: 1394733 - RNA, 19 nt, Homo sapiens
  misc_RNA (1)...(19): siRNA sense strand
ugaagcacccuaauauugu

SEQ ID NO: 1394734 - RNA, 19 nt, Homo sapiens
  misc_RNA (1)...(19): siRNA sense strand
gcaguggaaugccaaagac

SEQ ID NO: 1394735 - RNA, 19 nt, Homo sapiens
  misc_RNA (1)...(19): siRNA sense strand
gaauaugcugccaaaauua

SEQ ID NO: 1394736 - RNA, 19 nt, Homo sapiens
  misc_RNA (1)...(19): siRNA sense strand
auaaaccaauccacacuau

SEQ ID NO: 1394737 - RNA, 19 nt, Homo sapiens
  misc_RNA (1)...(19): siRNA sense strand
agaauaugcugccaaaauu

SEQ ID NO: 1394738 - RNA, 19 nt, Homo sapiens
  misc_RNA (1)...(19): siRNA sense strand
guggugagaagauguauga

SEQ ID NO: 1394739 - RNA, 19 nt, Homo sapiens
  misc_RNA (1)...(19): siRNA sense strand
uggcacaccuggauaucuu

SEQ ID NO: 1394740 - RNA, 19 nt, Homo sapiens
  misc_RNA (1)...(19): siRNA sense strand
cagauucuagaaaguguua

SEQ ID NO: 1394741 - RNA, 19 nt, Homo sapiens
  misc_RNA (1)...(19): siRNA sense strand
guauacagcagauucuaga

SEQ ID NO: 1394742 - RNA, 19 nt, Homo sapiens
  misc_RNA (1)...(19): siRNA sense strand
ccugaagccugagaauuug

SEQ ID NO: 1394743 - RNA, 19 nt, Homo sapiens
  misc_RNA (1)...(19): siRNA sense strand
ccaauccacacuauuauuc

SEQ ID NO: 1394744 - RNA, 19 nt, Homo sapiens
  misc_RNA (1)...(19): siRNA sense strand
uagacugcuugaagaaauu

SEQ ID NO: 1394745 - RNA, 19 nt, Homo sapiens
  misc_RNA (1)...(19): siRNA sense strand
caaagaccucaucaauaaa

SEQ ID NO: 1394746 - RNA, 19 nt, Homo sapiens
  misc_RNA (1)...(19): siRNA sense strand
ggaaagccaguggauaugu

SEQ ID NO: 1394747 - RNA, 19 nt, Homo sapiens
  misc_RNA (1)...(19): siRNA sense strand
agaaagagaagcuagaauc

SEQ ID NO: 1394748 - RNA, 19 nt, Homo sapiens
  misc_RNA (1)...(19): siRNA sense strand
ggcuggagcuuaugauuuu

SEQ ID NO: 1394749 - RNA, 19 nt, Homo sapiens
  misc_RNA (1)...(19): siRNA sense strand
caauugaggaugaagaugu

SEQ ID NO: 1394750 - RNA, 19 nt, Homo sapiens
  misc_RNA (1)...(19): siRNA sense strand
gcacugaagcacccaugga

SEQ ID NO: 1394751 - RNA, 19 nt, Homo sapiens
  misc_RNA (1)...(19): siRNA sense strand
ggugacuccugaagccaaa

SEQ ID NO: 1394752 - RNA, 19 nt, Homo sapiens
  misc_RNA (1)...(19): siRNA sense strand
uugaagcacccuaauauug

SEQ ID NO: 1394753 - RNA, 19 nt, Homo sapiens
  misc_RNA (1)...(19): siRNA sense strand
ucgaagcuaucaacaaugg

SEQ ID NO: 1394754 - RNA, 19 nt, Homo sapiens
  misc_RNA (1)...(19): siRNA sense strand
caacaauugaggaugaaga

SEQ ID NO: 1394755 - RNA, 19 nt, Homo sapiens
  misc_RNA (1)...(19): siRNA sense strand
agacauaguggcaagagaa

SEQ ID NO: 1394756 - RNA, 19 nt, Homo sapiens
  misc_RNA (1)...(19): siRNA sense strand
caccgauucuacuuugaaa

SEQ ID NO: 1394757 - RNA, 19 nt, Homo sapiens
  misc_RNA (1)...(19): siRNA sense strand
acccaggccuuacugcuuu

SEQ ID NO: 1394758 - RNA, 19 nt, Homo sapiens
  misc_RNA (1)...(19): siRNA sense strand
cgaaagcaagagauuauca

SEQ ID NO: 1394759 - RNA, 19 nt, Homo sapiens
  misc_RNA (1)...(19): siRNA sense strand
cauguggugucauucucua

SEQ ID NO: 1394760 - RNA, 19 nt, Homo sapiens
  misc_RNA (1)...(19): siRNA sense strand
ugaugccagucauuguaua

SEQ ID NO: 1394761 - RNA, 19 nt, Homo sapiens
  misc_RNA (1)...(19): siRNA sense strand
gaaacuagaaagagaagcu

SEQ ID NO: 1394762 - RNA, 19 nt, Homo sapiens
  misc_RNA (1)...(19): siRNA sense strand
cugaagcuuuggguaauuu

SEQ ID NO: 1394763 - RNA, 19 nt, Homo sapiens
  misc_RNA (1)...(19): siRNA sense strand
uaucaaagucacugaacaa

SEQ ID NO: 1394764 - RNA, 19 nt, Homo sapiens
  misc_RNA (1)...(19): siRNA sense strand
guggugucauucucuauau

SEQ ID NO: 1394765 - RNA, 19 nt, Homo sapiens
  misc_RNA (1)...(19): siRNA sense strand
gugggcauguggugucauu

SEQ ID NO: 1394766 - RNA, 19 nt, Homo sapiens
  misc_RNA (1)...(19): siRNA sense strand
cacgaaagcaagagauuau

SEQ ID NO: 1394767 - RNA, 19 nt, Homo sapiens
  misc_RNA (1)...(19): siRNA sense strand
ggcaagagaauacuacagu

SEQ ID NO: 1394768 - RNA, 19 nt, Homo sapiens
  misc_RNA (1)...(19): siRNA sense strand
agacaaugcagucagaaga

SEQ ID NO: 1394769 - RNA, 19 nt, Homo sapiens
  misc_RNA (1)...(19): siRNA sense strand
uauauuaggcucacacagu

SEQ ID NO: 1394770 - RNA, 19 nt, Homo sapiens
  misc_RNA (1)...(19): siRNA sense strand
ugaaagcacgaaagcaaga

SEQ ID NO: 1394771 - RNA, 19 nt, Homo sapiens
  misc_RNA (1)...(19): siRNA sense strand
ggaggugaacuguuugaag

SEQ ID NO: 1394772 - RNA, 19 nt, Homo sapiens
  misc_RNA (1)...(19): siRNA sense strand
gccugcauagcauauauua

SEQ ID NO: 1394773 - RNA, 19 nt, Homo sapiens
  misc_RNA (1)...(19): siRNA sense strand
caaaagcaauaaaccaauc

SEQ ID NO: 1394774 - RNA, 19 nt, Homo sapiens
  misc_RNA (1)...(19): siRNA sense strand
acguaaagauccuuaugga

SEQ ID NO: 1394775 - RNA, 19 nt, Homo sapiens
  misc_RNA (1)...(19): siRNA sense strand
gaccugaagccugagaauu

SEQ ID NO: 1394776 - RNA, 19 nt, Homo sapiens
  misc_RNA (1)...(19): siRNA sense strand
uacagcagauucuagaaag

SEQ ID NO: 1394777 - RNA, 19 nt, Homo sapiens
  misc_RNA (1)...(19): siRNA sense strand
ggugaacuguuugaagaca

SEQ ID NO: 1394778 - RNA, 19 nt, Homo sapiens
  misc_RNA (1)...(19): siRNA sense strand
ccaaagaccucaucaauaa

SEQ ID NO: 1394779 - RNA, 19 nt, Homo sapiens
  misc_RNA (1)...(19): siRNA sense strand
gcuagaaucugccgucuuu

SEQ ID NO: 1394780 - RNA, 19 nt, Homo sapiens
  misc_RNA (1)...(19): siRNA sense strand
gaagaaaccagauggagua

SEQ ID NO: 1394781 - RNA, 19 nt, Homo sapiens
  misc_RNA (1)...(19): siRNA sense strand
gaucaaggcuggagcuuau

SEQ ID NO: 1394782 - RNA, 19 nt, Homo sapiens
  misc_RNA (1)...(19): siRNA sense strand
gaucgaagcuaucaacaau

SEQ ID NO: 1394783 - RNA, 19 nt, Homo sapiens
  misc_RNA (1)...(19): siRNA sense strand
guaaagauccuuauggaaa

SEQ ID NO: 1394784 - RNA, 19 nt, Homo sapiens
  misc_RNA (1)...(19): siRNA sense strand
gaggugaacuguuugaaga

SEQ ID NO: 1394785 - RNA, 19 nt, Homo sapiens
  misc_RNA (1)...(19): siRNA sense strand
gaaaccagauggaguaaag

SEQ ID NO: 1394786 - RNA, 19 nt, Homo sapiens
  misc_RNA (1)...(19): siRNA sense strand
gaagagggcuuucacuacu

SEQ ID NO: 1394787 - RNA, 19 nt, Homo sapiens
  misc_RNA (1)...(19): siRNA sense strand
guaaaggagucaacugaga

SEQ ID NO: 1394788 - RNA, 19 nt, Homo sapiens
  misc_RNA (1)...(19): siRNA sense strand
aaaccaauccacacuauua

SEQ ID NO: 1394789 - RNA, 19 nt, Homo sapiens
  misc_RNA (1)...(19): siRNA sense strand
caaagucacugaacaacug

SEQ ID NO: 1394790 - RNA, 19 nt, Homo sapiens
  misc_RNA (1)...(19): siRNA sense strand
gggagcagcugugaaauug

SEQ ID NO: 1394791 - RNA, 19 nt, Homo sapiens
  misc_RNA (1)...(19): siRNA sense strand
caaagacaaugcagucaga

SEQ ID NO: 1394792 - RNA, 19 nt, Homo sapiens
  misc_RNA (1)...(19): siRNA sense strand
gccaagaguuuguugaaga

SEQ ID NO: 1394793 - RNA, 19 nt, Homo sapiens
  misc_RNA (1)...(19): siRNA sense strand
gcacgaaagcaagagauua

SEQ ID NO: 1394794 - RNA, 19 nt, Homo sapiens
  misc_RNA (1)...(19): siRNA sense strand
gccaaagaccucaucaaua

SEQ ID NO: 1394795 - RNA, 19 nt, Homo sapiens
  misc_RNA (1)...(19): siRNA sense strand
caagggagcagcugugaaa

SEQ ID NO: 1394796 - RNA, 19 nt, Homo sapiens
  misc_RNA (1)...(19): siRNA sense strand
caacuaugcuggcuacaag

SEQ ID NO: 1394797 - RNA, 19 nt, Homo sapiens
  misc_RNA (1)...(19): siRNA sense strand
gaaagccaguggauaugug

SEQ ID NO: 1394798 - RNA, 19 nt, Homo sapiens
  misc_RNA (1)...(19): siRNA sense strand
ucaccuaaauggcauaguu

SEQ ID NO: 1394799 - RNA, 19 nt, Homo sapiens
  misc_RNA (1)...(19): siRNA sense strand
acaagaauaugcugccaaa

SEQ ID NO: 1394800 - RNA, 19 nt, Homo sapiens
  misc_RNA (1)...(19): siRNA sense strand
ccaagaguuuguugaagaa

SEQ ID NO: 1394801 - RNA, 19 nt, Homo sapiens
  misc_RNA (1)...(19): siRNA sense strand
guagacugcuugaagaaau

SEQ ID NO: 1394802 - RNA, 19 nt, Homo sapiens
  misc_RNA (1)...(19): siRNA sense strand
ccauggaucugucaacguu

SEQ ID NO: 1394803 - RNA, 19 nt, Homo sapiens
  misc_RNA (1)...(19): siRNA sense strand
gaagcacccuaauauugug

SEQ ID NO: 1394804 - RNA, 19 nt, Homo sapiens
  misc_RNA (1)...(19): siRNA sense strand
guuaaucauugucaccuaa

SEQ ID NO: 1394805 - RNA, 19 nt, Homo sapiens
  misc_RNA (1)...(19): siRNA sense strand
auacaacaauugaggauga

SEQ ID NO: 1394806 - RNA, 19 nt, Homo sapiens
  misc_RNA (1)...(19): siRNA sense strand
ugaacuguuugaagacaua

SEQ ID NO: 1394807 - RNA, 19 nt, Homo sapiens
  misc_RNA (1)...(19): siRNA sense strand
ggugccaucuugacaacua

SEQ ID NO: 1394808 - RNA, 19 nt, Homo sapiens
  misc_RNA (1)...(19): siRNA sense strand
uaaagauccuuauggaaag

SEQ ID NO: 1394809 - RNA, 19 nt, Homo sapiens
  misc_RNA (1)...(19): siRNA sense strand
ggaugaagaccaacacaga

SEQ ID NO: 1394810 - RNA, 19 nt, Homo sapiens
  misc_RNA (1)...(19): siRNA sense strand
gaguaaaggagucaacuga

SEQ ID NO: 1394811 - RNA, 19 nt, Homo sapiens
  misc_RNA (1)...(19): siRNA sense strand
gaaagcaagagauuaucaa

SEQ ID NO: 1394812 - RNA, 19 nt, Homo sapiens
  misc_RNA (1)...(19): siRNA sense strand
ggaugaagaugugaaagca

SEQ ID NO: 1394813 - RNA, 19 nt, Homo sapiens
  misc_RNA (1)...(19): siRNA sense strand
gaaagagaagcuagaaucu

SEQ ID NO: 1394814 - RNA, 19 nt, Homo sapiens
  misc_RNA (1)...(19): siRNA sense strand
gaacaacugaucgaagcua

SEQ ID NO: 1394815 - RNA, 19 nt, Homo sapiens
  misc_RNA (1)...(19): siRNA sense strand
caagagaauacuacaguga

SEQ ID NO: 1394816 - RNA, 19 nt, Homo sapiens
  misc_RNA (1)...(19): siRNA sense strand
auauuaggcucacacagua

SEQ ID NO: 1394817 - RNA, 19 nt, Homo sapiens
  misc_RNA (1)...(19): siRNA sense strand
gcaagagauuaucaaaguc

SEQ ID NO: 1394818 - RNA, 19 nt, Homo sapiens
  misc_RNA (1)...(19): siRNA sense strand
cagaagagggcuuucacua

SEQ ID NO: 1394819 - RNA, 19 nt, Homo sapiens
  misc_RNA (1)...(19): siRNA sense strand
cuacuugguguuugauuua

SEQ ID NO: 1394820 - RNA, 19 nt, Homo sapiens
  misc_RNA (1)...(19): siRNA sense strand
acuaaagggugccaucuug

SEQ ID NO: 1394821 - RNA, 19 nt, Homo sapiens
  misc_RNA (1)...(19): siRNA sense strand
ggugagaagauguaugaaa

SEQ ID NO: 1394822 - RNA, 19 nt, Homo sapiens
  misc_RNA (1)...(19): siRNA sense strand
cagcaggcgugguuugguu

SEQ ID NO: 1394823 - RNA, 19 nt, Homo sapiens
  misc_RNA (1)...(19): siRNA sense strand
gaucaucagaaacuagaaa

SEQ ID NO: 1394824 - RNA, 19 nt, Homo sapiens
  misc_RNA (1)...(19): siRNA sense strand
agcaagagauuaucaaagu

SEQ ID NO: 1394825 - RNA, 19 nt, Homo sapiens
  misc_RNA (1)...(19): siRNA sense strand
gugagaagauguaugaaaa

SEQ ID NO: 1394826 - RNA, 19 nt, Homo sapiens
  misc_RNA (1)...(19): siRNA sense strand
uacuggaggugaacuguuu

SEQ ID NO: 1394827 - RNA, 19 nt, Homo sapiens
  misc_RNA (1)...(19): siRNA sense strand
gaaaauuccuacuggacaa

SEQ ID NO: 1394828 - RNA, 19 nt, Homo sapiens
  misc_RNA (1)...(19): siRNA sense strand
gcugaugccagucauugua

SEQ ID NO: 1394829 - RNA, 19 nt, Homo sapiens
  misc_RNA (1)...(19): siRNA sense strand
gcgacuucaugauagcaua

SEQ ID NO: 1394830 - RNA, 19 nt, Homo sapiens
  misc_RNA (1)...(19): siRNA sense strand
ucuaaacccucauguacau

SEQ ID NO: 1394831 - RNA, 19 nt, Homo sapiens
  misc_RNA (1)...(19): siRNA sense strand
caagagauuaucaaaguca

SEQ ID NO: 1394832 - RNA, 19 nt, Homo sapiens
  misc_RNA (1)...(19): siRNA sense strand
acugagaguucaaauacaa

SEQ ID NO: 1394833 - RNA, 19 nt, Homo sapiens
  misc_RNA (1)...(19): siRNA sense strand
ugaagcacccuaauauugu

SEQ ID NO: 1394834 - RNA, 19 nt, Homo sapiens
  misc_RNA (1)...(19): siRNA sense strand
gcaguggaaugccaaagac

SEQ ID NO: 1394835 - RNA, 19 nt, Homo sapiens
  misc_RNA (1)...(19): siRNA sense strand
gaauaugcugccaaaauua

SEQ ID NO: 1394836 - RNA, 19 nt, Homo sapiens
  misc_RNA (1)...(19): siRNA sense strand
auaaaccaauccacacuau

SEQ ID NO: 1394837 - RNA, 19 nt, Homo sapiens
  misc_RNA (1)...(19): siRNA sense strand
agaauaugcugccaaaauu

SEQ ID NO: 1394838 - RNA, 19 nt, Homo sapiens
  misc_RNA (1)...(19): siRNA sense strand
guggugagaagauguauga

SEQ ID NO: 1394839 - RNA, 19 nt, Homo sapiens
  misc_RNA (1)...(19): siRNA sense strand
uggcacaccuggauaucuu

SEQ ID NO: 1394840 - RNA, 19 nt, Homo sapiens
  misc_RNA (1)...(19): siRNA sense strand
cagauucuagaaaguguua

SEQ ID NO: 1394841 - RNA, 19 nt, Homo sapiens
  misc_RNA (1)...(19): siRNA sense strand
guauacagcagauucuaga

SEQ ID NO: 1394842 - RNA, 19 nt, Homo sapiens
  misc_RNA (1)...(19): siRNA sense strand
ccugaagccugagaauuug

SEQ ID NO: 1394843 - RNA, 19 nt, Homo sapiens
  misc_RNA (1)...(19): siRNA sense strand
ccaauccacacuauuauuc

SEQ ID NO: 1394844 - RNA, 19 nt, Homo sapiens
  misc_RNA (1)...(19): siRNA sense strand
uagacugcuugaagaaauu

SEQ ID NO: 1394845 - RNA, 19 nt, Homo sapiens
  misc_RNA (1)...(19): siRNA sense strand
caaagaccucaucaauaaa

SEQ ID NO: 1394846 - RNA, 19 nt, Homo sapiens
  misc_RNA (1)...(19): siRNA sense strand
ggaaagccaguggauaugu

SEQ ID NO: 1394847 - RNA, 19 nt, Homo sapiens
  misc_RNA (1)...(19): siRNA sense strand
agaaagagaagcuagaauc

SEQ ID NO: 1394848 - RNA, 19 nt, Homo sapiens
  misc_RNA (1)...(19): siRNA sense strand
ggcuggagcuuaugauuuu

SEQ ID NO: 1394849 - RNA, 19 nt, Homo sapiens
  misc_RNA (1)...(19): siRNA sense strand
caauugaggaugaagaugu

SEQ ID NO: 1394850 - RNA, 19 nt, Homo sapiens
  misc_RNA (1)...(19): siRNA sense strand
gcacugaagcacccaugga

SEQ ID NO: 1394851 - RNA, 19 nt, Homo sapiens
  misc_RNA (1)...(19): siRNA sense strand
ggugacuccugaagccaaa

SEQ ID NO: 1394852 - RNA, 19 nt, Homo sapiens
  misc_RNA (1)...(19): siRNA sense strand
uugaagcacccuaauauug

SEQ ID NO: 1394853 - RNA, 19 nt, Homo sapiens
  misc_RNA (1)...(19): siRNA sense strand
ucgaagcuaucaacaaugg

SEQ ID NO: 1394854 - RNA, 19 nt, Homo sapiens
  misc_RNA (1)...(19): siRNA sense strand
caacaauugaggaugaaga

SEQ ID NO: 1394855 - RNA, 19 nt, Homo sapiens
  misc_RNA (1)...(19): siRNA sense strand
agacauaguggcaagagaa

SEQ ID NO: 1394856 - RNA, 19 nt, Homo sapiens
  misc_RNA (1)...(19): siRNA sense strand
caccgauucuacuuugaaa

SEQ ID NO: 1394857 - RNA, 19 nt, Homo sapiens
  misc_RNA (1)...(19): siRNA sense strand
acccaggccuuacugcuuu

SEQ ID NO: 1394858 - RNA, 19 nt, Homo sapiens
  misc_RNA (1)...(19): siRNA sense strand
cgaaagcaagagauuauca

SEQ ID NO: 1394859 - RNA, 19 nt, Homo sapiens
  misc_RNA (1)...(19): siRNA sense strand
cauguggugucauucucua

SEQ ID NO: 1394860 - RNA, 19 nt, Homo sapiens
  misc_RNA (1)...(19): siRNA sense strand
ugaugccagucauuguaua

SEQ ID NO: 1394861 - RNA, 19 nt, Homo sapiens
  misc_RNA (1)...(19): siRNA sense strand
gaaacuagaaagagaagcu

SEQ ID NO: 1394862 - RNA, 19 nt, Homo sapiens
  misc_RNA (1)...(19): siRNA sense strand
cugaagcuuuggguaauuu

SEQ ID NO: 1394863 - RNA, 19 nt, Homo sapiens
  misc_RNA (1)...(19): siRNA sense strand
uaucaaagucacugaacaa

SEQ ID NO: 1394864 - RNA, 19 nt, Homo sapiens
  misc_RNA (1)...(19): siRNA sense strand
guggugucauucucuauau

SEQ ID NO: 1394865 - RNA, 19 nt, Homo sapiens
  misc_RNA (1)...(19): siRNA sense strand
gugggcauguggugucauu

SEQ ID NO: 1394866 - RNA, 19 nt, Homo sapiens
  misc_RNA (1)...(19): siRNA sense strand
cacgaaagcaagagauuau

SEQ ID NO: 1394867 - RNA, 19 nt, Homo sapiens
  misc_RNA (1)...(19): siRNA sense strand
ggcaagagaauacuacagu

SEQ ID NO: 1394868 - RNA, 19 nt, Homo sapiens
  misc_RNA (1)...(19): siRNA sense strand
agacaaugcagucagaaga

SEQ ID NO: 1394869 - RNA, 19 nt, Homo sapiens
  misc_RNA (1)...(19): siRNA sense strand
uauauuaggcucacacagu

SEQ ID NO: 1394870 - RNA, 19 nt, Homo sapiens
  misc_RNA (1)...(19): siRNA sense strand
ugaaagcacgaaagcaaga

SEQ ID NO: 1394871 - RNA, 19 nt, Homo sapiens
  misc_RNA (1)...(19): siRNA sense strand
ggaggugaacuguuugaag

SEQ ID NO: 1394872 - RNA, 19 nt, Homo sapiens
  misc_RNA (1)...(19): siRNA sense strand
gccugcauagcauauauua

SEQ ID NO: 1394873 - RNA, 19 nt, Homo sapiens
  misc_RNA (1)...(19): siRNA sense strand
caaaagcaauaaaccaauc

SEQ ID NO: 1394874 - RNA, 19 nt, Homo sapiens
  misc_RNA (1)...(19): siRNA sense strand
acguaaagauccuuaugga

SEQ ID NO: 1394875 - RNA, 19 nt, Homo sapiens
  misc_RNA (1)...(19): siRNA sense strand
gaccugaagccugagaauu

SEQ ID NO: 1394876 - RNA, 19 nt, Homo sapiens
  misc_RNA (1)...(19): siRNA sense strand
uacagcagauucuagaaag

SEQ ID NO: 1394877 - RNA, 19 nt, Homo sapiens
  misc_RNA (1)...(19): siRNA sense strand
ggugaacuguuugaagaca

SEQ ID NO: 1394878 - RNA, 19 nt, Homo sapiens
  misc_RNA (1)...(19): siRNA sense strand
ccaaagaccucaucaauaa

SEQ ID NO: 1394879 - RNA, 19 nt, Homo sapiens
  misc_RNA (1)...(19): siRNA sense strand
gcuagaaucugccgucuuu

SEQ ID NO: 1394880 - RNA, 19 nt, Homo sapiens
  misc_RNA (1)...(19): siRNA sense strand
gaagaaaccagauggagua

SEQ ID NO: 1394881 - RNA, 19 nt, Homo sapiens
  misc_RNA (1)...(19): siRNA sense strand
gaucaaggcuggagcuuau

SEQ ID NO: 1394882 - RNA, 19 nt, Homo sapiens
  misc_RNA (1)...(19): siRNA sense strand
gaucgaagcuaucaacaau

SEQ ID NO: 1394883 - RNA, 19 nt, Homo sapiens
  misc_RNA (1)...(19): siRNA sense strand
guaaagauccuuauggaaa

SEQ ID NO: 1394884 - RNA, 19 nt, Homo sapiens
  misc_RNA (1)...(19): siRNA sense strand
gaggugaacuguuugaaga

SEQ ID NO: 1394885 - RNA, 19 nt, Homo sapiens
  misc_RNA (1)...(19): siRNA sense strand
gaaaccagauggaguaaag

SEQ ID NO: 1394886 - RNA, 19 nt, Homo sapiens
  misc_RNA (1)...(19): siRNA sense strand
gaagagggcuuucacuacu

SEQ ID NO: 1394887 - RNA, 19 nt, Homo sapiens
  misc_RNA (1)...(19): siRNA sense strand
guaaaggagucaacugaga

SEQ ID NO: 1394888 - RNA, 19 nt, Homo sapiens
  misc_RNA (1)...(19): siRNA sense strand
aaaccaauccacacuauua

SEQ ID NO: 1394889 - RNA, 19 nt, Homo sapiens
  misc_RNA (1)...(19): siRNA sense strand
caaagucacugaacaacug

SEQ ID NO: 1394890 - RNA, 19 nt, Homo sapiens
  misc_RNA (1)...(19): siRNA sense strand
gggagcagcugugaaauug

SEQ ID NO: 1394891 - RNA, 19 nt, Homo sapiens
  misc_RNA (1)...(19): siRNA sense strand
caaagacaaugcagucaga

SEQ ID NO: 1394892 - RNA, 19 nt, Homo sapiens
  misc_RNA (1)...(19): siRNA sense strand
gccaagaguuuguugaaga

SEQ ID NO: 1394893 - RNA, 19 nt, Homo sapiens
  misc_RNA (1)...(19): siRNA sense strand
gcacgaaagcaagagauua

SEQ ID NO: 1394894 - RNA, 19 nt, Homo sapiens
  misc_RNA (1)...(19): siRNA sense strand
gccaaagaccucaucaaua

SEQ ID NO: 1394895 - RNA, 19 nt, Homo sapiens
  misc_RNA (1)...(19): siRNA sense strand
caagggagcagcugugaaa

SEQ ID NO: 1394896 - RNA, 19 nt, Homo sapiens
  misc_RNA (1)...(19): siRNA sense strand
caacuaugcuggcuacaag

SEQ ID NO: 1394897 - RNA, 19 nt, Homo sapiens
  misc_RNA (1)...(19): siRNA sense strand
gaaagccaguggauaugug

SEQ ID NO: 1394898 - RNA, 19 nt, Homo sapiens
  misc_RNA (1)...(19): siRNA sense strand
ucaccuaaauggcauaguu

SEQ ID NO: 1394899 - RNA, 19 nt, Homo sapiens
  misc_RNA (1)...(19): siRNA sense strand
acaagaauaugcugccaaa

SEQ ID NO: 1394900 - RNA, 19 nt, Homo sapiens
  misc_RNA (1)...(19): siRNA sense strand
ccaagaguuuguugaagaa

SEQ ID NO: 1394901 - RNA, 19 nt, Homo sapiens
  misc_RNA (1)...(19): siRNA sense strand
guagacugcuugaagaaau

SEQ ID NO: 1394902 - RNA, 19 nt, Homo sapiens
  misc_RNA (1)...(19): siRNA sense strand
ccauggaucugucaacguu

SEQ ID NO: 1394903 - RNA, 19 nt, Homo sapiens
  misc_RNA (1)...(19): siRNA sense strand
gaagcacccuaauauugug

SEQ ID NO: 1394904 - RNA, 19 nt, Homo sapiens
  misc_RNA (1)...(19): siRNA sense strand
guuaaucauugucaccuaa

SEQ ID NO: 1394905 - RNA, 19 nt, Homo sapiens
  misc_RNA (1)...(19): siRNA sense strand
auacaacaauugaggauga

SEQ ID NO: 1394906 - RNA, 19 nt, Homo sapiens
  misc_RNA (1)...(19): siRNA sense strand
ugaacuguuugaagacaua

SEQ ID NO: 1394907 - RNA, 19 nt, Homo sapiens
  misc_RNA (1)...(19): siRNA sense strand
ggugccaucuugacaacua

SEQ ID NO: 1394908 - RNA, 19 nt, Homo sapiens
  misc_RNA (1)...(19): siRNA sense strand
uaaagauccuuauggaaag

SEQ ID NO: 1394909 - RNA, 19 nt, Homo sapiens
  misc_RNA (1)...(19): siRNA sense strand
ggaugaagaccaacacaga

SEQ ID NO: 1394910 - RNA, 19 nt, Homo sapiens
  misc_RNA (1)...(19): siRNA sense strand
gaguaaaggagucaacuga

SEQ ID NO: 1394911 - RNA, 19 nt, Homo sapiens
  misc_RNA (1)...(19): siRNA sense strand
gaaagcaagagauuaucaa

SEQ ID NO: 1394912 - RNA, 19 nt, Homo sapiens
  misc_RNA (1)...(19): siRNA sense strand
ggaugaagaugugaaagca

SEQ ID NO: 1394913 - RNA, 19 nt, Homo sapiens
  misc_RNA (1)...(19): siRNA sense strand
gaaagagaagcuagaaucu

SEQ ID NO: 1394914 - RNA, 19 nt, Homo sapiens
  misc_RNA (1)...(19): siRNA sense strand
gaacaacugaucgaagcua

SEQ ID NO: 1394915 - RNA, 19 nt, Homo sapiens
  misc_RNA (1)...(19): siRNA sense strand
caagagaauacuacaguga

SEQ ID NO: 1394916 - RNA, 19 nt, Homo sapiens
  misc_RNA (1)...(19): siRNA sense strand
auauuaggcucacacagua

SEQ ID NO: 1394917 - RNA, 19 nt, Homo sapiens
  misc_RNA (1)...(19): siRNA sense strand
gcaagagauuaucaaaguc

SEQ ID NO: 1394918 - RNA, 19 nt, Homo sapiens
  misc_RNA (1)...(19): siRNA sense strand
cagaagagggcuuucacua

SEQ ID NO: 1394919 - RNA, 19 nt, Homo sapiens
  misc_RNA (1)...(19): siRNA sense strand
cuacuugguguuugauuua

SEQ ID NO: 1394920 - RNA, 19 nt, Homo sapiens
  misc_RNA (1)...(19): siRNA sense strand
acuaaagggugccaucuug

SEQ ID NO: 1394921 - RNA, 19 nt, Homo sapiens
  misc_RNA (1)...(19): siRNA sense strand
ggugagaagauguaugaaa

SEQ ID NO: 1394922 - RNA, 19 nt, Homo sapiens
  misc_RNA (1)...(19): siRNA sense strand
cagcaggcgugguuugguu

SEQ ID NO: 1394923 - RNA, 19 nt, Homo sapiens
  misc_RNA (1)...(19): siRNA sense strand
gaucaucagaaacuagaaa

SEQ ID NO: 1394924 - RNA, 19 nt, Homo sapiens
  misc_RNA (1)...(19): siRNA sense strand
agcaagagauuaucaaagu

SEQ ID NO: 1394925 - RNA, 19 nt, Homo sapiens
  misc_RNA (1)...(19): siRNA sense strand
gugagaagauguaugaaaa

SEQ ID NO: 1394926 - RNA, 19 nt, Homo sapiens
  misc_RNA (1)...(19): siRNA sense strand
uacuggaggugaacuguuu

SEQ ID NO: 1394927 - RNA, 19 nt, Homo sapiens
  misc_RNA (1)...(19): siRNA sense strand
gaaaauuccuacuggacaa

SEQ ID NO: 1394928 - RNA, 19 nt, Homo sapiens
  misc_RNA (1)...(19): siRNA sense strand
gcugaugccagucauugua

SEQ ID NO: 1394929 - RNA, 19 nt, Homo sapiens
  misc_RNA (1)...(19): siRNA sense strand
gcgacuucaugauagcaua

SEQ ID NO: 1394930 - RNA, 19 nt, Homo sapiens
  misc_RNA (1)...(19): siRNA sense strand
ucuaaacccucauguacau

SEQ ID NO: 1394931 - RNA, 19 nt, Homo sapiens
  misc_RNA (1)...(19): siRNA sense strand
caagagauuaucaaaguca

SEQ ID NO: 1394932 - RNA, 19 nt, Homo sapiens
  misc_RNA (1)...(19): siRNA sense strand
acugagaguucaaauacaa

SEQ ID NO: 1394933 - RNA, 19 nt, Homo sapiens
  misc_RNA (1)...(19): siRNA sense strand
ugaagcacccuaauauugu

SEQ ID NO: 1394934 - RNA, 19 nt, Homo sapiens
  misc_RNA (1)...(19): siRNA sense strand
gcaguggaaugccaaagac

SEQ ID NO: 1394935 - RNA, 19 nt, Homo sapiens
  misc_RNA (1)...(19): siRNA sense strand
gaauaugcugccaaaauua

SEQ ID NO: 1394936 - RNA, 19 nt, Homo sapiens
  misc_RNA (1)...(19): siRNA sense strand
auaaaccaauccacacuau

SEQ ID NO: 1394937 - RNA, 19 nt, Homo sapiens
  misc_RNA (1)...(19): siRNA sense strand
agaauaugcugccaaaauu

SEQ ID NO: 1394938 - RNA, 19 nt, Homo sapiens
  misc_RNA (1)...(19): siRNA sense strand
guggugagaagauguauga

SEQ ID NO: 1394939 - RNA, 19 nt, Homo sapiens
  misc_RNA (1)...(19): siRNA sense strand
uggcacaccuggauaucuu

SEQ ID NO: 1394940 - RNA, 19 nt, Homo sapiens
  misc_RNA (1)...(19): siRNA sense strand
cagauucuagaaaguguua

SEQ ID NO: 1394941 - RNA, 19 nt, Homo sapiens
  misc_RNA (1)...(19): siRNA sense strand
guauacagcagauucuaga

SEQ ID NO: 1394942 - RNA, 19 nt, Homo sapiens
  misc_RNA (1)...(19): siRNA sense strand
ccugaagccugagaauuug

SEQ ID NO: 1394943 - RNA, 19 nt, Homo sapiens
  misc_RNA (1)...(19): siRNA sense strand
ccaauccacacuauuauuc

SEQ ID NO: 1394944 - RNA, 19 nt, Homo sapiens
  misc_RNA (1)...(19): siRNA sense strand
uagacugcuugaagaaauu

SEQ ID NO: 1394945 - RNA, 19 nt, Homo sapiens
  misc_RNA (1)...(19): siRNA sense strand
caaagaccucaucaauaaa

SEQ ID NO: 1394946 - RNA, 19 nt, Homo sapiens
  misc_RNA (1)...(19): siRNA sense strand
ggaaagccaguggauaugu

SEQ ID NO: 1394947 - RNA, 19 nt, Homo sapiens
  misc_RNA (1)...(19): siRNA sense strand
agaaagagaagcuagaauc

SEQ ID NO: 1394948 - RNA, 19 nt, Homo sapiens
  misc_RNA (1)...(19): siRNA sense strand
ggcuggagcuuaugauuuu

SEQ ID NO: 1394949 - RNA, 19 nt, Homo sapiens
  misc_RNA (1)...(19): siRNA sense strand
caauugaggaugaagaugu

SEQ ID NO: 1394950 - RNA, 19 nt, Homo sapiens
  misc_RNA (1)...(19): siRNA sense strand
gcacugaagcacccaugga

SEQ ID NO: 1394951 - RNA, 19 nt, Homo sapiens
  misc_RNA (1)...(19): siRNA sense strand
ggugacuccugaagccaaa

SEQ ID NO: 1394952 - RNA, 19 nt, Homo sapiens
  misc_RNA (1)...(19): siRNA sense strand
uugaagcacccuaauauug

SEQ ID NO: 1394953 - RNA, 19 nt, Homo sapiens
  misc_RNA (1)...(19): siRNA sense strand
ucgaagcuaucaacaaugg

SEQ ID NO: 1394954 - RNA, 19 nt, Homo sapiens
  misc_RNA (1)...(19): siRNA sense strand
caacaauugaggaugaaga

SEQ ID NO: 1394955 - RNA, 19 nt, Homo sapiens
  misc_RNA (1)...(19): siRNA sense strand
agacauaguggcaagagaa

SEQ ID NO: 1394956 - RNA, 19 nt, Homo sapiens
  misc_RNA (1)...(19): siRNA sense strand
caccgauucuacuuugaaa

SEQ ID NO: 1394957 - RNA, 19 nt, Homo sapiens
  misc_RNA (1)...(19): siRNA sense strand
acccaggccuuacugcuuu

SEQ ID NO: 1394958 - RNA, 19 nt, Homo sapiens
  misc_RNA (1)...(19): siRNA sense strand
cgaaagcaagagauuauca

SEQ ID NO: 1394959 - RNA, 19 nt, Homo sapiens
  misc_RNA (1)...(19): siRNA sense strand
cauguggugucauucucua

SEQ ID NO: 1394960 - RNA, 19 nt, Homo sapiens
  misc_RNA (1)...(19): siRNA sense strand
ugaugccagucauuguaua

SEQ ID NO: 1394961 - RNA, 19 nt, Homo sapiens
  misc_RNA (1)...(19): siRNA sense strand
gaaacuagaaagagaagcu

SEQ ID NO: 1394962 - RNA, 19 nt, Homo sapiens
  misc_RNA (1)...(19): siRNA sense strand
cugaagcuuuggguaauuu

SEQ ID NO: 1394963 - RNA, 19 nt, Homo sapiens
  misc_RNA (1)...(19): siRNA sense strand
uaucaaagucacugaacaa

SEQ ID NO: 1394964 - RNA, 19 nt, Homo sapiens
  misc_RNA (1)...(19): siRNA sense strand
guggugucauucucuauau

SEQ ID NO: 1394965 - RNA, 19 nt, Homo sapiens
  misc_RNA (1)...(19): siRNA sense strand
gugggcauguggugucauu

SEQ ID NO: 1394966 - RNA, 19 nt, Homo sapiens
  misc_RNA (1)...(19): siRNA sense strand
cacgaaagcaagagauuau

SEQ ID NO: 1394967 - RNA, 19 nt, Homo sapiens
  misc_RNA (1)...(19): siRNA sense strand
ggcaagagaauacuacagu

SEQ ID NO: 1394968 - RNA, 19 nt, Homo sapiens
  misc_RNA (1)...(19): siRNA sense strand
agacaaugcagucagaaga

SEQ ID NO: 1394969 - RNA, 19 nt, Homo sapiens
  misc_RNA (1)...(19): siRNA sense strand
uauauuaggcucacacagu

SEQ ID NO: 1394970 - RNA, 19 nt, Homo sapiens
  misc_RNA (1)...(19): siRNA sense strand
ugaaagcacgaaagcaaga

SEQ ID NO: 1394971 - RNA, 19 nt, Homo sapiens
  misc_RNA (1)...(19): siRNA sense strand
ggaggugaacuguuugaag

SEQ ID NO: 1394972 - RNA, 19 nt, Homo sapiens
  misc_RNA (1)...(19): siRNA sense strand
gccugcauagcauauauua

SEQ ID NO: 1394973 - RNA, 19 nt, Homo sapiens
  misc_RNA (1)...(19): siRNA sense strand
caaaagcaauaaaccaauc

SEQ ID NO: 1394974 - RNA, 19 nt, Homo sapiens
  misc_RNA (1)...(19): siRNA sense strand
acguaaagauccuuaugga

SEQ ID NO: 1394975 - RNA, 19 nt, Homo sapiens
  misc_RNA (1)...(19): siRNA sense strand
gaccugaagccugagaauu

SEQ ID NO: 1394976 - RNA, 19 nt, Homo sapiens
  misc_RNA (1)...(19): siRNA sense strand
uacagcagauucuagaaag

SEQ ID NO: 1394977 - RNA, 19 nt, Homo sapiens
  misc_RNA (1)...(19): siRNA sense strand
ggugaacuguuugaagaca

SEQ ID NO: 1394978 - RNA, 19 nt, Homo sapiens
  misc_RNA (1)...(19): siRNA sense strand
ccaaagaccucaucaauaa

SEQ ID NO: 1394979 - RNA, 19 nt, Homo sapiens
  misc_RNA (1)...(19): siRNA sense strand
gcuagaaucugccgucuuu

SEQ ID NO: 1394980 - RNA, 19 nt, Homo sapiens
  misc_RNA (1)...(19): siRNA sense strand
gaagaaaccagauggagua

SEQ ID NO: 1394981 - RNA, 19 nt, Homo sapiens
  misc_RNA (1)...(19): siRNA sense strand
gaucaaggcuggagcuuau

SEQ ID NO: 1394982 - RNA, 19 nt, Homo sapiens
  misc_RNA (1)...(19): siRNA sense strand
gaucgaagcuaucaacaau

SEQ ID NO: 1394983 - RNA, 19 nt, Homo sapiens
  misc_RNA (1)...(19): siRNA sense strand
guaaagauccuuauggaaa

SEQ ID NO: 1394984 - RNA, 19 nt, Homo sapiens
  misc_RNA (1)...(19): siRNA sense strand
gaggugaacuguuugaaga

SEQ ID NO: 1394985 - RNA, 19 nt, Homo sapiens
  misc_RNA (1)...(19): siRNA sense strand
gaaaccagauggaguaaag

SEQ ID NO: 1394986 - RNA, 19 nt, Homo sapiens
  misc_RNA (1)...(19): siRNA sense strand
gaagagggcuuucacuacu

SEQ ID NO: 1394987 - RNA, 19 nt, Homo sapiens
  misc_RNA (1)...(19): siRNA sense strand
guaaaggagucaacugaga

SEQ ID NO: 1394988 - RNA, 19 nt, Homo sapiens
  misc_RNA (1)...(19): siRNA sense strand
aaaccaauccacacuauua

SEQ ID NO: 1394989 - RNA, 19 nt, Homo sapiens
  misc_RNA (1)...(19): siRNA sense strand
caaagucacugaacaacug

SEQ ID NO: 1394990 - RNA, 19 nt, Homo sapiens
  misc_RNA (1)...(19): siRNA sense strand
gggagcagcugugaaauug

SEQ ID NO: 1394991 - RNA, 19 nt, Homo sapiens
  misc_RNA (1)...(19): siRNA sense strand
caaagacaaugcagucaga

SEQ ID NO: 1394992 - RNA, 19 nt, Homo sapiens
  misc_RNA (1)...(19): siRNA sense strand
gccaagaguuuguugaaga

SEQ ID NO: 1394993 - RNA, 19 nt, Homo sapiens
  misc_RNA (1)...(19): siRNA sense strand
gcacgaaagcaagagauua

SEQ ID NO: 1394994 - RNA, 19 nt, Homo sapiens
  misc_RNA (1)...(19): siRNA sense strand
gccaaagaccucaucaaua

SEQ ID NO: 1394995 - RNA, 19 nt, Homo sapiens
  misc_RNA (1)...(19): siRNA sense strand
caagggagcagcugugaaa

SEQ ID NO: 1394996 - RNA, 19 nt, Homo sapiens
  misc_RNA (1)...(19): siRNA sense strand
caacuaugcuggcuacaag

SEQ ID NO: 1394997 - RNA, 19 nt, Homo sapiens
  misc_RNA (1)...(19): siRNA sense strand
gaaagccaguggauaugug

SEQ ID NO: 1394998 - RNA, 19 nt, Homo sapiens
  misc_RNA (1)...(19): siRNA sense strand
ucaccuaaauggcauaguu

SEQ ID NO: 1394999 - RNA, 19 nt, Homo sapiens
  misc_RNA (1)...(19): siRNA sense strand
acaagaauaugcugccaaa

SEQ ID NO: 1395000 - RNA, 19 nt, Homo sapiens
  misc_RNA (1)...(19): siRNA sense strand
ccaagaguuuguugaagaa

SEQ ID NO: 1395001 - RNA, 19 nt, Homo sapiens
  misc_RNA (1)...(19): siRNA sense strand
guagacugcuugaagaaau

SEQ ID NO: 1395002 - RNA, 19 nt, Homo sapiens
  misc_RNA (1)...(19): siRNA sense strand
ccauggaucugucaacguu

SEQ ID NO: 1395003 - RNA, 19 nt, Homo sapiens
  misc_RNA (1)...(19): siRNA sense strand
gaagcacccuaauauugug

SEQ ID NO: 1395004 - RNA, 19 nt, Homo sapiens
  misc_RNA (1)...(19): siRNA sense strand
guuaaucauugucaccuaa

SEQ ID NO: 1395005 - RNA, 19 nt, Homo sapiens
  misc_RNA (1)...(19): siRNA sense strand
auacaacaauugaggauga

SEQ ID NO: 1395006 - RNA, 19 nt, Homo sapiens
  misc_RNA (1)...(19): siRNA sense strand
ugaacuguuugaagacaua

SEQ ID NO: 1395007 - RNA, 19 nt, Homo sapiens
  misc_RNA (1)...(19): siRNA sense strand
ggugccaucuugacaacua

SEQ ID NO: 1395008 - RNA, 19 nt, Homo sapiens
  misc_RNA (1)...(19): siRNA sense strand
uaaagauccuuauggaaag

SEQ ID NO: 1395009 - RNA, 19 nt, Homo sapiens
  misc_RNA (1)...(19): siRNA sense strand
ggaugaagaccaacacaga

SEQ ID NO: 1395010 - RNA, 19 nt, Homo sapiens
  misc_RNA (1)...(19): siRNA sense strand
gaguaaaggagucaacuga

SEQ ID NO: 1395011 - RNA, 19 nt, Homo sapiens
  misc_RNA (1)...(19): siRNA sense strand
gaaagcaagagauuaucaa

SEQ ID NO: 1395012 - RNA, 19 nt, Homo sapiens
  misc_RNA (1)...(19): siRNA sense strand
ggaugaagaugugaaagca

SEQ ID NO: 1395013 - RNA, 19 nt, Homo sapiens
  misc_RNA (1)...(19): siRNA sense strand
gaaagagaagcuagaaucu

SEQ ID NO: 1395014 - RNA, 19 nt, Homo sapiens
  misc_RNA (1)...(19): siRNA sense strand
gaacaacugaucgaagcua

SEQ ID NO: 1395015 - RNA, 19 nt, Homo sapiens
  misc_RNA (1)...(19): siRNA sense strand
caagagaauacuacaguga

SEQ ID NO: 1395016 - RNA, 19 nt, Homo sapiens
  misc_RNA (1)...(19): siRNA sense strand
auauuaggcucacacagua

SEQ ID NO: 1395017 - RNA, 19 nt, Homo sapiens
  misc_RNA (1)...(19): siRNA sense strand
gcaagagauuaucaaaguc

SEQ ID NO: 1395018 - RNA, 19 nt, Homo sapiens
  misc_RNA (1)...(19): siRNA sense strand
cagaagagggcuuucacua

SEQ ID NO: 1395019 - RNA, 19 nt, Homo sapiens
  misc_RNA (1)...(19): siRNA sense strand
cuacuugguguuugauuua

SEQ ID NO: 1395020 - RNA, 19 nt, Homo sapiens
  misc_RNA (1)...(19): siRNA sense strand
acuaaagggugccaucuug

SEQ ID NO: 1395021 - RNA, 19 nt, Homo sapiens
  misc_RNA (1)...(19): siRNA sense strand
ggugagaagauguaugaaa

SEQ ID NO: 1395022 - RNA, 19 nt, Homo sapiens
  misc_RNA (1)...(19): siRNA sense strand
cagcaggcgugguuugguu

SEQ ID NO: 1395023 - RNA, 19 nt, Homo sapiens
  misc_RNA (1)...(19): siRNA sense strand
gaucaucagaaacuagaaa

SEQ ID NO: 1395024 - RNA, 19 nt, Homo sapiens
  misc_RNA (1)...(19): siRNA sense strand
agcaagagauuaucaaagu

SEQ ID NO: 1395025 - RNA, 19 nt, Homo sapiens
  misc_RNA (1)...(19): siRNA sense strand
gugagaagauguaugaaaa

SEQ ID NO: 1395026 - RNA, 19 nt, Homo sapiens
  misc_RNA (1)...(19): siRNA sense strand
uacuggaggugaacuguuu

SEQ ID NO: 1395027 - RNA, 19 nt, Homo sapiens
  misc_RNA (1)...(19): siRNA sense strand
gaaaauuccuacuggacaa

SEQ ID NO: 1395028 - RNA, 19 nt, Homo sapiens
  misc_RNA (1)...(19): siRNA sense strand
gcugaugccagucauugua

SEQ ID NO: 1395029 - RNA, 19 nt, Homo sapiens
  misc_RNA (1)...(19): siRNA sense strand
gcgacuucaugauagcaua

SEQ ID NO: 1395030 - RNA, 19 nt, Homo sapiens
  misc_RNA (1)...(19): siRNA sense strand
ucuaaacccucauguacau

SEQ ID NO: 1395031 - RNA, 19 nt, Homo sapiens
  misc_RNA (1)...(19): siRNA sense strand
caagagauuaucaaaguca

SEQ ID NO: 1395032 - RNA, 19 nt, Homo sapiens
  misc_RNA (1)...(19): siRNA sense strand
acugagaguucaaauacaa

SEQ ID NO: 1395033 - RNA, 19 nt, Homo sapiens
  misc_RNA (1)...(19): siRNA sense strand
ugaagcacccuaauauugu

SEQ ID NO: 1395034 - RNA, 19 nt, Homo sapiens
  misc_RNA (1)...(19): siRNA sense strand
gcaguggaaugccaaagac

SEQ ID NO: 1395035 - RNA, 19 nt, Homo sapiens
  misc_RNA (1)...(19): siRNA sense strand
gaauaugcugccaaaauua

SEQ ID NO: 1395036 - RNA, 19 nt, Homo sapiens
  misc_RNA (1)...(19): siRNA sense strand
auaaaccaauccacacuau

SEQ ID NO: 1395037 - RNA, 19 nt, Homo sapiens
  misc_RNA (1)...(19): siRNA sense strand
agaauaugcugccaaaauu

SEQ ID NO: 1395038 - RNA, 19 nt, Homo sapiens
  misc_RNA (1)...(19): siRNA sense strand
guggugagaagauguauga

SEQ ID NO: 1395039 - RNA, 19 nt, Homo sapiens
  misc_RNA (1)...(19): siRNA sense strand
uggcacaccuggauaucuu

SEQ ID NO: 1395040 - RNA, 19 nt, Homo sapiens
  misc_RNA (1)...(19): siRNA sense strand
cagauucuagaaaguguua

SEQ ID NO: 1395041 - RNA, 19 nt, Homo sapiens
  misc_RNA (1)...(19): siRNA sense strand
guauacagcagauucuaga

SEQ ID NO: 1395042 - RNA, 19 nt, Homo sapiens
  misc_RNA (1)...(19): siRNA sense strand
ccugaagccugagaauuug

SEQ ID NO: 1395043 - RNA, 19 nt, Homo sapiens
  misc_RNA (1)...(19): siRNA sense strand
ccaauccacacuauuauuc

SEQ ID NO: 1395044 - RNA, 19 nt, Homo sapiens
  misc_RNA (1)...(19): siRNA sense strand
uagacugcuugaagaaauu

SEQ ID NO: 1395045 - RNA, 19 nt, Homo sapiens
  misc_RNA (1)...(19): siRNA sense strand
caaagaccucaucaauaaa

SEQ ID NO: 1395046 - RNA, 19 nt, Homo sapiens
  misc_RNA (1)...(19): siRNA sense strand
ggaaagccaguggauaugu

SEQ ID NO: 1395047 - RNA, 19 nt, Homo sapiens
  misc_RNA (1)...(19): siRNA sense strand
agaaagagaagcuagaauc

SEQ ID NO: 1395048 - RNA, 19 nt, Homo sapiens
  misc_RNA (1)...(19): siRNA sense strand
ggcuggagcuuaugauuuu

SEQ ID NO: 1395049 - RNA, 19 nt, Homo sapiens
  misc_RNA (1)...(19): siRNA sense strand
caauugaggaugaagaugu

SEQ ID NO: 1395050 - RNA, 19 nt, Homo sapiens
  misc_RNA (1)...(19): siRNA sense strand
gcacugaagcacccaugga

SEQ ID NO: 1395051 - RNA, 19 nt, Homo sapiens
  misc_RNA (1)...(19): siRNA sense strand
ggugacuccugaagccaaa

SEQ ID NO: 1395052 - RNA, 19 nt, Homo sapiens
  misc_RNA (1)...(19): siRNA sense strand
uugaagcacccuaauauug

SEQ ID NO: 1395053 - RNA, 19 nt, Homo sapiens
  misc_RNA (1)...(19): siRNA sense strand
ucgaagcuaucaacaaugg

SEQ ID NO: 1395054 - RNA, 19 nt, Homo sapiens
  misc_RNA (1)...(19): siRNA sense strand
caacaauugaggaugaaga

SEQ ID NO: 1395055 - RNA, 19 nt, Homo sapiens
  misc_RNA (1)...(19): siRNA sense strand
agacauaguggcaagagaa

SEQ ID NO: 1395056 - RNA, 19 nt, Homo sapiens
  misc_RNA (1)...(19): siRNA sense strand
caccgauucuacuuugaaa

SEQ ID NO: 1395057 - RNA, 19 nt, Homo sapiens
  misc_RNA (1)...(19): siRNA sense strand
acccaggccuuacugcuuu

SEQ ID NO: 1395058 - RNA, 19 nt, Homo sapiens
  misc_RNA (1)...(19): siRNA sense strand
cgaaagcaagagauuauca

SEQ ID NO: 1395059 - RNA, 19 nt, Homo sapiens
  misc_RNA (1)...(19): siRNA sense strand
cauguggugucauucucua

SEQ ID NO: 1395060 - RNA, 19 nt, Homo sapiens
  misc_RNA (1)...(19): siRNA sense strand
ugaugccagucauuguaua

SEQ ID NO: 1395061 - RNA, 19 nt, Homo sapiens
  misc_RNA (1)...(19): siRNA sense strand
gaaacuagaaagagaagcu

SEQ ID NO: 1395062 - RNA, 19 nt, Homo sapiens
  misc_RNA (1)...(19): siRNA sense strand
cugaagcuuuggguaauuu

SEQ ID NO: 1395063 - RNA, 19 nt, Homo sapiens
  misc_RNA (1)...(19): siRNA sense strand
uaucaaagucacugaacaa

SEQ ID NO: 1395064 - RNA, 19 nt, Homo sapiens
  misc_RNA (1)...(19): siRNA sense strand
guggugucauucucuauau

SEQ ID NO: 1395065 - RNA, 19 nt, Homo sapiens
  misc_RNA (1)...(19): siRNA sense strand
gugggcauguggugucauu

SEQ ID NO: 1395066 - RNA, 19 nt, Homo sapiens
  misc_RNA (1)...(19): siRNA sense strand
cacgaaagcaagagauuau

SEQ ID NO: 1395067 - RNA, 19 nt, Homo sapiens
  misc_RNA (1)...(19): siRNA sense strand
ggcaagagaauacuacagu

SEQ ID NO: 1395068 - RNA, 19 nt, Homo sapiens
  misc_RNA (1)...(19): siRNA sense strand
agacaaugcagucagaaga

SEQ ID NO: 1395069 - RNA, 19 nt, Homo sapiens
  misc_RNA (1)...(19): siRNA sense strand
uauauuaggcucacacagu

SEQ ID NO: 1395070 - RNA, 19 nt, Homo sapiens
  misc_RNA (1)...(19): siRNA sense strand
ugaaagcacgaaagcaaga

SEQ ID NO: 1395071 - RNA, 19 nt, Homo sapiens
  misc_RNA (1)...(19): siRNA sense strand
ggaggugaacuguuugaag

SEQ ID NO: 1395072 - RNA, 19 nt, Homo sapiens
  misc_RNA (1)...(19): siRNA sense strand
gccugcauagcauauauua

SEQ ID NO: 1395073 - RNA, 19 nt, Homo sapiens
  misc_RNA (1)...(19): siRNA sense strand
caaaagcaauaaaccaauc

SEQ ID NO: 1395074 - RNA, 19 nt, Homo sapiens
  misc_RNA (1)...(19): siRNA sense strand
acguaaagauccuuaugga

SEQ ID NO: 1395075 - RNA, 19 nt, Homo sapiens
  misc_RNA (1)...(19): siRNA sense strand
gaccugaagccugagaauu

SEQ ID NO: 1395076 - RNA, 19 nt, Homo sapiens
  misc_RNA (1)...(19): siRNA sense strand
uacagcagauucuagaaag

SEQ ID NO: 1395077 - RNA, 19 nt, Homo sapiens
  misc_RNA (1)...(19): siRNA sense strand
ggugaacuguuugaagaca

SEQ ID NO: 1395078 - RNA, 19 nt, Homo sapiens
  misc_RNA (1)...(19): siRNA sense strand
ccaaagaccucaucaauaa

SEQ ID NO: 1395079 - RNA, 19 nt, Homo sapiens
  misc_RNA (1)...(19): siRNA sense strand
gcuagaaucugccgucuuu

SEQ ID NO: 1395080 - RNA, 19 nt, Homo sapiens
  misc_RNA (1)...(19): siRNA sense strand
gaagaaaccagauggagua

SEQ ID NO: 1395081 - RNA, 19 nt, Homo sapiens
  misc_RNA (1)...(19): siRNA sense strand
gaucaaggcuggagcuuau

SEQ ID NO: 1395082 - RNA, 19 nt, Homo sapiens
  misc_RNA (1)...(19): siRNA sense strand
gaucgaagcuaucaacaau

SEQ ID NO: 1395083 - RNA, 19 nt, Homo sapiens
  misc_RNA (1)...(19): siRNA sense strand
guaaagauccuuauggaaa

SEQ ID NO: 1395084 - RNA, 19 nt, Homo sapiens
  misc_RNA (1)...(19): siRNA sense strand
gaggugaacuguuugaaga

SEQ ID NO: 1395085 - RNA, 19 nt, Homo sapiens
  misc_RNA (1)...(19): siRNA sense strand
gaaaccagauggaguaaag

SEQ ID NO: 1395086 - RNA, 19 nt, Homo sapiens
  misc_RNA (1)...(19): siRNA sense strand
gaagagggcuuucacuacu

SEQ ID NO: 1395087 - RNA, 19 nt, Homo sapiens
  misc_RNA (1)...(19): siRNA sense strand
guaaaggagucaacugaga

SEQ ID NO: 1395088 - RNA, 19 nt, Homo sapiens
  misc_RNA (1)...(19): siRNA sense strand
aaaccaauccacacuauua

SEQ ID NO: 1395089 - RNA, 19 nt, Homo sapiens
  misc_RNA (1)...(19): siRNA sense strand
caaagucacugaacaacug

SEQ ID NO: 1395090 - RNA, 19 nt, Homo sapiens
  misc_RNA (1)...(19): siRNA sense strand
gggagcagcugugaaauug

SEQ ID NO: 1395091 - RNA, 19 nt, Homo sapiens
  misc_RNA (1)...(19): siRNA sense strand
caaagacaaugcagucaga

SEQ ID NO: 1395092 - RNA, 19 nt, Homo sapiens
  misc_RNA (1)...(19): siRNA sense strand
gccaagaguuuguugaaga

SEQ ID NO: 1395093 - RNA, 19 nt, Homo sapiens
  misc_RNA (1)...(19): siRNA sense strand
gcacgaaagcaagagauua

SEQ ID NO: 1395094 - RNA, 19 nt, Homo sapiens
  misc_RNA (1)...(19): siRNA sense strand
gccaaagaccucaucaaua

SEQ ID NO: 1395095 - RNA, 19 nt, Homo sapiens
  misc_RNA (1)...(19): siRNA sense strand
caagggagcagcugugaaa

SEQ ID NO: 1395096 - RNA, 19 nt, Homo sapiens
  misc_RNA (1)...(19): siRNA sense strand
caacuaugcuggcuacaag

SEQ ID NO: 1395097 - RNA, 19 nt, Homo sapiens
  misc_RNA (1)...(19): siRNA sense strand
gaaagccaguggauaugug

SEQ ID NO: 1395098 - RNA, 19 nt, Homo sapiens
  misc_RNA (1)...(19): siRNA sense strand
ucaccuaaauggcauaguu

SEQ ID NO: 1395099 - RNA, 19 nt, Homo sapiens
  misc_RNA (1)...(19): siRNA sense strand
acaagaauaugcugccaaa

SEQ ID NO: 1395100 - RNA, 19 nt, Homo sapiens
  misc_RNA (1)...(19): siRNA sense strand
ccaagaguuuguugaagaa

SEQ ID NO: 1395101 - RNA, 19 nt, Homo sapiens
  misc_RNA (1)...(19): siRNA sense strand
guagacugcuugaagaaau

SEQ ID NO: 1395102 - RNA, 19 nt, Homo sapiens
  misc_RNA (1)...(19): siRNA sense strand
ccauggaucugucaacguu

SEQ ID NO: 1395103 - RNA, 19 nt, Homo sapiens
  misc_RNA (1)...(19): siRNA sense strand
gaagcacccuaauauugug

SEQ ID NO: 1395104 - RNA, 19 nt, Homo sapiens
  misc_RNA (1)...(19): siRNA sense strand
guuaaucauugucaccuaa

SEQ ID NO: 1395105 - RNA, 19 nt, Homo sapiens
  misc_RNA (1)...(19): siRNA sense strand
auacaacaauugaggauga

SEQ ID NO: 1395106 - RNA, 19 nt, Homo sapiens
  misc_RNA (1)...(19): siRNA sense strand
ugaacuguuugaagacaua

SEQ ID NO: 1395107 - RNA, 19 nt, Homo sapiens
  misc_RNA (1)...(19): siRNA sense strand
ggugccaucuugacaacua

SEQ ID NO: 1395108 - RNA, 19 nt, Homo sapiens
  misc_RNA (1)...(19): siRNA sense strand
uaaagauccuuauggaaag

SEQ ID NO: 1395109 - RNA, 19 nt, Homo sapiens
  misc_RNA (1)...(19): siRNA sense strand
ggaugaagaccaacacaga

SEQ ID NO: 1395110 - RNA, 19 nt, Homo sapiens
  misc_RNA (1)...(19): siRNA sense strand
gaguaaaggagucaacuga

SEQ ID NO: 1395111 - RNA, 19 nt, Homo sapiens
  misc_RNA (1)...(19): siRNA sense strand
gaaagcaagagauuaucaa

SEQ ID NO: 1395112 - RNA, 19 nt, Homo sapiens
  misc_RNA (1)...(19): siRNA sense strand
ggaugaagaugugaaagca

SEQ ID NO: 1395113 - RNA, 19 nt, Homo sapiens
  misc_RNA (1)...(19): siRNA sense strand
gaaagagaagcuagaaucu

SEQ ID NO: 1395114 - RNA, 19 nt, Homo sapiens
  misc_RNA (1)...(19): siRNA sense strand
gaacaacugaucgaagcua

SEQ ID NO: 1395115 - RNA, 19 nt, Homo sapiens
  misc_RNA (1)...(19): siRNA sense strand
caagagaauacuacaguga

SEQ ID NO: 1395116 - RNA, 19 nt, Homo sapiens
  misc_RNA (1)...(19): siRNA sense strand
auauuaggcucacacagua

SEQ ID NO: 1395117 - RNA, 19 nt, Homo sapiens
  misc_RNA (1)...(19): siRNA sense strand
gcaagagauuaucaaaguc

SEQ ID NO: 1395118 - RNA, 19 nt, Homo sapiens
  misc_RNA (1)...(19): siRNA sense strand
cagaagagggcuuucacua

SEQ ID NO: 1395119 - RNA, 19 nt, Homo sapiens
  misc_RNA (1)...(19): siRNA sense strand
cuacuugguguuugauuua

SEQ ID NO: 1395120 - RNA, 19 nt, Homo sapiens
  misc_RNA (1)...(19): siRNA sense strand
acuaaagggugccaucuug

SEQ ID NO: 1395121 - RNA, 19 nt, Homo sapiens
  misc_RNA (1)...(19): siRNA sense strand
ggugagaagauguaugaaa

SEQ ID NO: 1395122 - RNA, 19 nt, Homo sapiens
  misc_RNA (1)...(19): siRNA sense strand
cagcaggcgugguuugguu

SEQ ID NO: 1395123 - RNA, 19 nt, Homo sapiens
  misc_RNA (1)...(19): siRNA sense strand
gaucaucagaaacuagaaa

SEQ ID NO: 1395124 - RNA, 19 nt, Homo sapiens
  misc_RNA (1)...(19): siRNA sense strand
agcaagagauuaucaaagu

SEQ ID NO: 1395125 - RNA, 19 nt, Homo sapiens
  misc_RNA (1)...(19): siRNA sense strand
gugagaagauguaugaaaa

SEQ ID NO: 1395126 - RNA, 19 nt, Homo sapiens
  misc_RNA (1)...(19): siRNA sense strand
uacuggaggugaacuguuu

SEQ ID NO: 1395127 - RNA, 19 nt, Homo sapiens
  misc_RNA (1)...(19): siRNA sense strand
gaaaauuccuacuggacaa

SEQ ID NO: 1395128 - RNA, 19 nt, Homo sapiens
  misc_RNA (1)...(19): siRNA sense strand
gcugaugccagucauugua

SEQ ID NO: 1395129 - RNA, 19 nt, Homo sapiens
  misc_RNA (1)...(19): siRNA sense strand
gcgacuucaugauagcaua

SEQ ID NO: 1395130 - RNA, 19 nt, Homo sapiens
  misc_RNA (1)...(19): siRNA sense strand
ucuaaacccucauguacau

SEQ ID NO: 1395131 - RNA, 19 nt, Homo sapiens
  misc_RNA (1)...(19): siRNA sense strand
caagagauuaucaaaguca

SEQ ID NO: 1395132 - RNA, 19 nt, Homo sapiens
  misc_RNA (1)...(19): siRNA sense strand
acugagaguucaaauacaa

SEQ ID NO: 1395133 - RNA, 19 nt, Homo sapiens
  misc_RNA (1)...(19): siRNA sense strand
ugaagcacccuaauauugu

SEQ ID NO: 1395134 - RNA, 19 nt, Homo sapiens
  misc_RNA (1)...(19): siRNA sense strand
gcaguggaaugccaaagac

SEQ ID NO: 1395135 - RNA, 19 nt, Homo sapiens
  misc_RNA (1)...(19): siRNA sense strand
gaauaugcugccaaaauua

SEQ ID NO: 1395136 - RNA, 19 nt, Homo sapiens
  misc_RNA (1)...(19): siRNA sense strand
auaaaccaauccacacuau

SEQ ID NO: 1395137 - RNA, 19 nt, Homo sapiens
  misc_RNA (1)...(19): siRNA sense strand
agaauaugcugccaaaauu

SEQ ID NO: 1395138 - RNA, 19 nt, Homo sapiens
  misc_RNA (1)...(19): siRNA sense strand
guggugagaagauguauga

SEQ ID NO: 1395139 - RNA, 19 nt, Homo sapiens
  misc_RNA (1)...(19): siRNA sense strand
uggcacaccuggauaucuu

SEQ ID NO: 1395140 - RNA, 19 nt, Homo sapiens
  misc_RNA (1)...(19): siRNA sense strand
cagauucuagaaaguguua

SEQ ID NO: 1395141 - RNA, 19 nt, Homo sapiens
  misc_RNA (1)...(19): siRNA sense strand
guauacagcagauucuaga

SEQ ID NO: 1395142 - RNA, 19 nt, Homo sapiens
  misc_RNA (1)...(19): siRNA sense strand
ccugaagccugagaauuug

SEQ ID NO: 1395143 - RNA, 19 nt, Homo sapiens
  misc_RNA (1)...(19): siRNA sense strand
ccaauccacacuauuauuc

SEQ ID NO: 1395144 - RNA, 19 nt, Homo sapiens
  misc_RNA (1)...(19): siRNA sense strand
uagacugcuugaagaaauu

SEQ ID NO: 1395145 - RNA, 19 nt, Homo sapiens
  misc_RNA (1)...(19): siRNA sense strand
caaagaccucaucaauaaa

SEQ ID NO: 1395146 - RNA, 19 nt, Homo sapiens
  misc_RNA (1)...(19): siRNA sense strand
ggaaagccaguggauaugu

SEQ ID NO: 1395147 - RNA, 19 nt, Homo sapiens
  misc_RNA (1)...(19): siRNA sense strand
agaaagagaagcuagaauc

SEQ ID NO: 1395148 - RNA, 19 nt, Homo sapiens
  misc_RNA (1)...(19): siRNA sense strand
ggcuggagcuuaugauuuu

SEQ ID NO: 1395149 - RNA, 19 nt, Homo sapiens
  misc_RNA (1)...(19): siRNA sense strand
caauugaggaugaagaugu

SEQ ID NO: 1395150 - RNA, 19 nt, Homo sapiens
  misc_RNA (1)...(19): siRNA sense strand
gcacugaagcacccaugga

SEQ ID NO: 1395151 - RNA, 19 nt, Homo sapiens
  misc_RNA (1)...(19): siRNA sense strand
ggugacuccugaagccaaa

SEQ ID NO: 1395152 - RNA, 19 nt, Homo sapiens
  misc_RNA (1)...(19): siRNA sense strand
uugaagcacccuaauauug

SEQ ID NO: 1395153 - RNA, 19 nt, Homo sapiens
  misc_RNA (1)...(19): siRNA sense strand
ucgaagcuaucaacaaugg

SEQ ID NO: 1395154 - RNA, 19 nt, Homo sapiens
  misc_RNA (1)...(19): siRNA sense strand
caacaauugaggaugaaga

SEQ ID NO: 1395155 - RNA, 19 nt, Homo sapiens
  misc_RNA (1)...(19): siRNA sense strand
agacauaguggcaagagaa

SEQ ID NO: 1395156 - RNA, 19 nt, Homo sapiens
  misc_RNA (1)...(19): siRNA sense strand
caccgauucuacuuugaaa

SEQ ID NO: 1395157 - RNA, 19 nt, Homo sapiens
  misc_RNA (1)...(19): siRNA sense strand
acccaggccuuacugcuuu

SEQ ID NO: 1395158 - RNA, 19 nt, Homo sapiens
  misc_RNA (1)...(19): siRNA sense strand
cgaaagcaagagauuauca

SEQ ID NO: 1395159 - RNA, 19 nt, Homo sapiens
  misc_RNA (1)...(19): siRNA sense strand
cauguggugucauucucua

SEQ ID NO: 1395160 - RNA, 19 nt, Homo sapiens
  misc_RNA (1)...(19): siRNA sense strand
ugaugccagucauuguaua

SEQ ID NO: 1395161 - RNA, 19 nt, Homo sapiens
  misc_RNA (1)...(19): siRNA sense strand
gaaacuagaaagagaagcu

SEQ ID NO: 1395162 - RNA, 19 nt, Homo sapiens
  misc_RNA (1)...(19): siRNA sense strand
cugaagcuuuggguaauuu

SEQ ID NO: 1395163 - RNA, 19 nt, Homo sapiens
  misc_RNA (1)...(19): siRNA sense strand
uaucaaagucacugaacaa

SEQ ID NO: 1395164 - RNA, 19 nt, Homo sapiens
  misc_RNA (1)...(19): siRNA sense strand
guggugucauucucuauau

SEQ ID NO: 1395165 - RNA, 19 nt, Homo sapiens
  misc_RNA (1)...(19): siRNA sense strand
gugggcauguggugucauu

SEQ ID NO: 1395166 - RNA, 19 nt, Homo sapiens
  misc_RNA (1)...(19): siRNA sense strand
cacgaaagcaagagauuau

SEQ ID NO: 1395167 - RNA, 19 nt, Homo sapiens
  misc_RNA (1)...(19): siRNA sense strand
ggcaagagaauacuacagu

SEQ ID NO: 1395168 - RNA, 19 nt, Homo sapiens
  misc_RNA (1)...(19): siRNA sense strand
agacaaugcagucagaaga

SEQ ID NO: 1395169 - RNA, 19 nt, Homo sapiens
  misc_RNA (1)...(19): siRNA sense strand
uauauuaggcucacacagu

SEQ ID NO: 1395170 - RNA, 19 nt, Homo sapiens
  misc_RNA (1)...(19): siRNA sense strand
ugaaagcacgaaagcaaga

SEQ ID NO: 1395171 - RNA, 19 nt, Homo sapiens
  misc_RNA (1)...(19): siRNA sense strand
ggaggugaacuguuugaag

SEQ ID NO: 1395172 - RNA, 19 nt, Homo sapiens
  misc_RNA (1)...(19): siRNA sense strand
gccugcauagcauauauua

SEQ ID NO: 1395173 - RNA, 19 nt, Homo sapiens
  misc_RNA (1)...(19): siRNA sense strand
caaaagcaauaaaccaauc

SEQ ID NO: 1395174 - RNA, 19 nt, Homo sapiens
  misc_RNA (1)...(19): siRNA sense strand
acguaaagauccuuaugga

SEQ ID NO: 1395175 - RNA, 19 nt, Homo sapiens
  misc_RNA (1)...(19): siRNA sense strand
gaccugaagccugagaauu

SEQ ID NO: 1395176 - RNA, 19 nt, Homo sapiens
  misc_RNA (1)...(19): siRNA sense strand
uacagcagauucuagaaag

SEQ ID NO: 1395177 - RNA, 19 nt, Homo sapiens
  misc_RNA (1)...(19): siRNA sense strand
ggugaacuguuugaagaca

SEQ ID NO: 1395178 - RNA, 19 nt, Homo sapiens
  misc_RNA (1)...(19): siRNA sense strand
ccaaagaccucaucaauaa

SEQ ID NO: 1395179 - RNA, 19 nt, Homo sapiens
  misc_RNA (1)...(19): siRNA sense strand
gcuagaaucugccgucuuu

SEQ ID NO: 1395180 - RNA, 19 nt, Homo sapiens
  misc_RNA (1)...(19): siRNA sense strand
gaagaaaccagauggagua

SEQ ID NO: 1395181 - RNA, 19 nt, Homo sapiens
  misc_RNA (1)...(19): siRNA sense strand
gaucaaggcuggagcuuau

SEQ ID NO: 1395182 - RNA, 19 nt, Homo sapiens
  misc_RNA (1)...(19): siRNA sense strand
gaucgaagcuaucaacaau

SEQ ID NO: 1395183 - RNA, 19 nt, Homo sapiens
  misc_RNA (1)...(19): siRNA sense strand
guaaagauccuuauggaaa

SEQ ID NO: 1395184 - RNA, 19 nt, Homo sapiens
  misc_RNA (1)...(19): siRNA sense strand
gaggugaacuguuugaaga

SEQ ID NO: 1395185 - RNA, 19 nt, Homo sapiens
  misc_RNA (1)...(19): siRNA sense strand
gaaaccagauggaguaaag

SEQ ID NO: 1395186 - RNA, 19 nt, Homo sapiens
  misc_RNA (1)...(19): siRNA sense strand
gaagagggcuuucacuacu

SEQ ID NO: 1395187 - RNA, 19 nt, Homo sapiens
  misc_RNA (1)...(19): siRNA sense strand
guaaaggagucaacugaga

SEQ ID NO: 1395188 - RNA, 19 nt, Homo sapiens
  misc_RNA (1)...(19): siRNA sense strand
aaaccaauccacacuauua

SEQ ID NO: 1395189 - RNA, 19 nt, Homo sapiens
  misc_RNA (1)...(19): siRNA sense strand
caaagucacugaacaacug

SEQ ID NO: 1395190 - RNA, 19 nt, Homo sapiens
  misc_RNA (1)...(19): siRNA sense strand
gggagcagcugugaaauug

SEQ ID NO: 1395191 - RNA, 19 nt, Homo sapiens
  misc_RNA (1)...(19): siRNA sense strand
caaagacaaugcagucaga

SEQ ID NO: 1395192 - RNA, 19 nt, Homo sapiens
  misc_RNA (1)...(19): siRNA sense strand
gccaagaguuuguugaaga

SEQ ID NO: 1395193 - RNA, 19 nt, Homo sapiens
  misc_RNA (1)...(19): siRNA sense strand
gcacgaaagcaagagauua

SEQ ID NO: 1395194 - RNA, 19 nt, Homo sapiens
  misc_RNA (1)...(19): siRNA sense strand
gccaaagaccucaucaaua

SEQ ID NO: 1395195 - RNA, 19 nt, Homo sapiens
  misc_RNA (1)...(19): siRNA sense strand
caagggagcagcugugaaa

SEQ ID NO: 1395196 - RNA, 19 nt, Homo sapiens
  misc_RNA (1)...(19): siRNA sense strand
caacuaugcuggcuacaag

SEQ ID NO: 1395197 - RNA, 19 nt, Homo sapiens
  misc_RNA (1)...(19): siRNA sense strand
gaaagccaguggauaugug

SEQ ID NO: 1395198 - RNA, 19 nt, Homo sapiens
  misc_RNA (1)...(19): siRNA sense strand
ucaccuaaauggcauaguu

SEQ ID NO: 1395199 - RNA, 19 nt, Homo sapiens
  misc_RNA (1)...(19): siRNA sense strand
acaagaauaugcugccaaa

SEQ ID NO: 1395200 - RNA, 19 nt, Homo sapiens
  misc_RNA (1)...(19): siRNA sense strand
ccaagaguuuguugaagaa

SEQ ID NO: 1395201 - RNA, 19 nt, Homo sapiens
  misc_RNA (1)...(19): siRNA sense strand
guagacugcuugaagaaau

SEQ ID NO: 1395202 - RNA, 19 nt, Homo sapiens
  misc_RNA (1)...(19): siRNA sense strand
ccauggaucugucaacguu

SEQ ID NO: 1395203 - RNA, 19 nt, Homo sapiens
  misc_RNA (1)...(19): siRNA sense strand
gaagcacccuaauauugug

SEQ ID NO: 1395204 - RNA, 19 nt, Homo sapiens
  misc_RNA (1)...(19): siRNA sense strand
guuaaucauugucaccuaa

SEQ ID NO: 1395205 - RNA, 19 nt, Homo sapiens
  misc_RNA (1)...(19): siRNA sense strand
auacaacaauugaggauga

SEQ ID NO: 1395206 - RNA, 19 nt, Homo sapiens
  misc_RNA (1)...(19): siRNA sense strand
ugaacuguuugaagacaua

SEQ ID NO: 1395207 - RNA, 19 nt, Homo sapiens
  misc_RNA (1)...(19): siRNA sense strand
ggugccaucuugacaacua

SEQ ID NO: 1395208 - RNA, 19 nt, Homo sapiens
  misc_RNA (1)...(19): siRNA sense strand
uaaagauccuuauggaaag

SEQ ID NO: 1395209 - RNA, 19 nt, Homo sapiens
  misc_RNA (1)...(19): siRNA sense strand
ggaugaagaccaacacaga

SEQ ID NO: 1395210 - RNA, 19 nt, Homo sapiens
  misc_RNA (1)...(19): siRNA sense strand
gaguaaaggagucaacuga

SEQ ID NO: 1395211 - RNA, 19 nt, Homo sapiens
  misc_RNA (1)...(19): siRNA sense strand
gaaagcaagagauuaucaa

SEQ ID NO: 1395212 - RNA, 19 nt, Homo sapiens
  misc_RNA (1)...(19): siRNA sense strand
ggaugaagaugugaaagca

SEQ ID NO: 1395213 - RNA, 19 nt, Homo sapiens
  misc_RNA (1)...(19): siRNA sense strand
gaaagagaagcuagaaucu

SEQ ID NO: 1395214 - RNA, 19 nt, Homo sapiens
  misc_RNA (1)...(19): siRNA sense strand
gaacaacugaucgaagcua

SEQ ID NO: 1395215 - RNA, 19 nt, Homo sapiens
  misc_RNA (1)...(19): siRNA sense strand
caagagaauacuacaguga

SEQ ID NO: 1395216 - RNA, 19 nt, Homo sapiens
  misc_RNA (1)...(19): siRNA sense strand
auauuaggcucacacagua

SEQ ID NO: 1395217 - RNA, 19 nt, Homo sapiens
  misc_RNA (1)...(19): siRNA sense strand
gcaagagauuaucaaaguc

SEQ ID NO: 1395218 - RNA, 19 nt, Homo sapiens
  misc_RNA (1)...(19): siRNA sense strand
cagaagagggcuuucacua

SEQ ID NO: 1395219 - RNA, 19 nt, Homo sapiens
  misc_RNA (1)...(19): siRNA sense strand
cuacuugguguuugauuua

SEQ ID NO: 1395220 - RNA, 19 nt, Homo sapiens
  misc_RNA (1)...(19): siRNA sense strand
acuaaagggugccaucuug

SEQ ID NO: 1395221 - RNA, 19 nt, Homo sapiens
  misc_RNA (1)...(19): siRNA sense strand
ggugagaagauguaugaaa

SEQ ID NO: 1395222 - RNA, 19 nt, Homo sapiens
  misc_RNA (1)...(19): siRNA sense strand
cagcaggcgugguuugguu

SEQ ID NO: 1395223 - RNA, 19 nt, Homo sapiens
  misc_RNA (1)...(19): siRNA sense strand
gaucaucagaaacuagaaa

SEQ ID NO: 1395224 - RNA, 19 nt, Homo sapiens
  misc_RNA (1)...(19): siRNA sense strand
agcaagagauuaucaaagu

SEQ ID NO: 1395225 - RNA, 19 nt, Homo sapiens
  misc_RNA (1)...(19): siRNA sense strand
gugagaagauguaugaaaa

SEQ ID NO: 1395226 - RNA, 19 nt, Homo sapiens
  misc_RNA (1)...(19): siRNA sense strand
uacuggaggugaacuguuu

SEQ ID NO: 1395227 - RNA, 19 nt, Homo sapiens
  misc_RNA (1)...(19): siRNA sense strand
gaaaauuccuacuggacaa

SEQ ID NO: 1395228 - RNA, 19 nt, Homo sapiens
  misc_RNA (1)...(19): siRNA sense strand
gcugaugccagucauugua

SEQ ID NO: 1395229 - RNA, 19 nt, Homo sapiens
  misc_RNA (1)...(19): siRNA sense strand
gcgacuucaugauagcaua

SEQ ID NO: 1395230 - RNA, 19 nt, Homo sapiens
  misc_RNA (1)...(19): siRNA sense strand
ucuaaacccucauguacau

SEQ ID NO: 1395231 - RNA, 19 nt, Homo sapiens
  misc_RNA (1)...(19): siRNA sense strand
caagagauuaucaaaguca

SEQ ID NO: 1395232 - RNA, 19 nt, Homo sapiens
  misc_RNA (1)...(19): siRNA sense strand
acugagaguucaaauacaa

SEQ ID NO: 1395233 - RNA, 19 nt, Homo sapiens
  misc_RNA (1)...(19): siRNA sense strand
ugaagcacccuaauauugu

SEQ ID NO: 1395234 - RNA, 19 nt, Homo sapiens
  misc_RNA (1)...(19): siRNA sense strand
gcaguggaaugccaaagac

SEQ ID NO: 1395235 - RNA, 19 nt, Homo sapiens
  misc_RNA (1)...(19): siRNA sense strand
gaauaugcugccaaaauua

SEQ ID NO: 1395236 - RNA, 19 nt, Homo sapiens
  misc_RNA (1)...(19): siRNA sense strand
auaaaccaauccacacuau

SEQ ID NO: 1395237 - RNA, 19 nt, Homo sapiens
  misc_RNA (1)...(19): siRNA sense strand
agaauaugcugccaaaauu

SEQ ID NO: 1395238 - RNA, 19 nt, Homo sapiens
  misc_RNA (1)...(19): siRNA sense strand
guggugagaagauguauga

SEQ ID NO: 1395239 - RNA, 19 nt, Homo sapiens
  misc_RNA (1)...(19): siRNA sense strand
uggcacaccuggauaucuu

SEQ ID NO: 1395240 - RNA, 19 nt, Homo sapiens
  misc_RNA (1)...(19): siRNA sense strand
cagauucuagaaaguguua

SEQ ID NO: 1395241 - RNA, 19 nt, Homo sapiens
  misc_RNA (1)...(19): siRNA sense strand
guauacagcagauucuaga

SEQ ID NO: 1395242 - RNA, 19 nt, Homo sapiens
  misc_RNA (1)...(19): siRNA sense strand
ccugaagccugagaauuug

SEQ ID NO: 1395243 - RNA, 19 nt, Homo sapiens
  misc_RNA (1)...(19): siRNA sense strand
ccaauccacacuauuauuc

SEQ ID NO: 1395244 - RNA, 19 nt, Homo sapiens
  misc_RNA (1)...(19): siRNA sense strand
uagacugcuugaagaaauu

SEQ ID NO: 1395245 - RNA, 19 nt, Homo sapiens
  misc_RNA (1)...(19): siRNA sense strand
caaagaccucaucaauaaa

SEQ ID NO: 1395246 - RNA, 19 nt, Homo sapiens
  misc_RNA (1)...(19): siRNA sense strand
ggaaagccaguggauaugu

SEQ ID NO: 1395247 - RNA, 19 nt, Homo sapiens
  misc_RNA (1)...(19): siRNA sense strand
agaaagagaagcuagaauc

SEQ ID NO: 1395248 - RNA, 19 nt, Homo sapiens
  misc_RNA (1)...(19): siRNA sense strand
ggcuggagcuuaugauuuu

SEQ ID NO: 1395249 - RNA, 19 nt, Homo sapiens
  misc_RNA (1)...(19): siRNA sense strand
caauugaggaugaagaugu

SEQ ID NO: 1395250 - RNA, 19 nt, Homo sapiens
  misc_RNA (1)...(19): siRNA sense strand
gcacugaagcacccaugga

SEQ ID NO: 1395251 - RNA, 19 nt, Homo sapiens
  misc_RNA (1)...(19): siRNA sense strand
ggugacuccugaagccaaa

SEQ ID NO: 1395252 - RNA, 19 nt, Homo sapiens
  misc_RNA (1)...(19): siRNA sense strand
uugaagcacccuaauauug

SEQ ID NO: 1395253 - RNA, 19 nt, Homo sapiens
  misc_RNA (1)...(19): siRNA sense strand
ucgaagcuaucaacaaugg

SEQ ID NO: 1395254 - RNA, 19 nt, Homo sapiens
  misc_RNA (1)...(19): siRNA sense strand
caacaauugaggaugaaga

SEQ ID NO: 1395255 - RNA, 19 nt, Homo sapiens
  misc_RNA (1)...(19): siRNA sense strand
agacauaguggcaagagaa

SEQ ID NO: 1395256 - RNA, 19 nt, Homo sapiens
  misc_RNA (1)...(19): siRNA sense strand
caccgauucuacuuugaaa

SEQ ID NO: 1395257 - RNA, 19 nt, Homo sapiens
  misc_RNA (1)...(19): siRNA sense strand
acccaggccuuacugcuuu

SEQ ID NO: 1395258 - RNA, 19 nt, Homo sapiens
  misc_RNA (1)...(19): siRNA sense strand
cgaaagcaagagauuauca

SEQ ID NO: 1395259 - RNA, 19 nt, Homo sapiens
  misc_RNA (1)...(19): siRNA sense strand
cauguggugucauucucua

SEQ ID NO: 1395260 - RNA, 19 nt, Homo sapiens
  misc_RNA (1)...(19): siRNA sense strand
ugaugccagucauuguaua

SEQ ID NO: 1395261 - RNA, 19 nt, Homo sapiens
  misc_RNA (1)...(19): siRNA sense strand
gaaacuagaaagagaagcu

SEQ ID NO: 1395262 - RNA, 19 nt, Homo sapiens
  misc_RNA (1)...(19): siRNA sense strand
cugaagcuuuggguaauuu

SEQ ID NO: 1395263 - RNA, 19 nt, Homo sapiens
  misc_RNA (1)...(19): siRNA sense strand
uaucaaagucacugaacaa

SEQ ID NO: 1395264 - RNA, 19 nt, Homo sapiens
  misc_RNA (1)...(19): siRNA sense strand
guggugucauucucuauau

SEQ ID NO: 1395265 - RNA, 19 nt, Homo sapiens
  misc_RNA (1)...(19): siRNA sense strand
gugggcauguggugucauu

SEQ ID NO: 1395266 - RNA, 19 nt, Homo sapiens
  misc_RNA (1)...(19): siRNA sense strand
cacgaaagcaagagauuau

SEQ ID NO: 1395267 - RNA, 19 nt, Homo sapiens
  misc_RNA (1)...(19): siRNA sense strand
ggcaagagaauacuacagu

SEQ ID NO: 1395268 - RNA, 19 nt, Homo sapiens
  misc_RNA (1)...(19): siRNA sense strand
agacaaugcagucagaaga

SEQ ID NO: 1395269 - RNA, 19 nt, Homo sapiens
  misc_RNA (1)...(19): siRNA sense strand
uauauuaggcucacacagu

SEQ ID NO: 1395270 - RNA, 19 nt, Homo sapiens
  misc_RNA (1)...(19): siRNA sense strand
ugaaagcacgaaagcaaga

SEQ ID NO: 1395271 - RNA, 19 nt, Homo sapiens
  misc_RNA (1)...(19): siRNA sense strand
ggaggugaacuguuugaag

SEQ ID NO: 1395272 - RNA, 19 nt, Homo sapiens
  misc_RNA (1)...(19): siRNA sense strand
gccugcauagcauauauua

SEQ ID NO: 1395273 - RNA, 19 nt, Homo sapiens
  misc_RNA (1)...(19): siRNA sense strand
caaaagcaauaaaccaauc

SEQ ID NO: 1395274 - RNA, 19 nt, Homo sapiens
  misc_RNA (1)...(19): siRNA sense strand
acguaaagauccuuaugga

SEQ ID NO: 1395275 - RNA, 19 nt, Homo sapiens
  misc_RNA (1)...(19): siRNA sense strand
gaccugaagccugagaauu

SEQ ID NO: 1395276 - RNA, 19 nt, Homo sapiens
  misc_RNA (1)...(19): siRNA sense strand
uacagcagauucuagaaag

SEQ ID NO: 1395277 - RNA, 19 nt, Homo sapiens
  misc_RNA (1)...(19): siRNA sense strand
ggugaacuguuugaagaca

SEQ ID NO: 1395278 - RNA, 19 nt, Homo sapiens
  misc_RNA (1)...(19): siRNA sense strand
ccaaagaccucaucaauaa

SEQ ID NO: 1395279 - RNA, 19 nt, Homo sapiens
  misc_RNA (1)...(19): siRNA sense strand
gcuagaaucugccgucuuu

SEQ ID NO: 1395280 - RNA, 19 nt, Homo sapiens
  misc_RNA (1)...(19): siRNA sense strand
gaagaaaccagauggagua

SEQ ID NO: 1395281 - RNA, 19 nt, Homo sapiens
  misc_RNA (1)...(19): siRNA sense strand
gaucaaggcuggagcuuau

SEQ ID NO: 1395282 - RNA, 19 nt, Homo sapiens
  misc_RNA (1)...(19): siRNA sense strand
gaucgaagcuaucaacaau

SEQ ID NO: 1395283 - RNA, 19 nt, Homo sapiens
  misc_RNA (1)...(19): siRNA sense strand
guaaagauccuuauggaaa

SEQ ID NO: 1395284 - RNA, 19 nt, Homo sapiens
  misc_RNA (1)...(19): siRNA sense strand
gaggugaacuguuugaaga

SEQ ID NO: 1395285 - RNA, 19 nt, Homo sapiens
  misc_RNA (1)...(19): siRNA sense strand
gaaaccagauggaguaaag

SEQ ID NO: 1395286 - RNA, 19 nt, Homo sapiens
  misc_RNA (1)...(19): siRNA sense strand
gaagagggcuuucacuacu

SEQ ID NO: 1395287 - RNA, 19 nt, Homo sapiens
  misc_RNA (1)...(19): siRNA sense strand
guaaaggagucaacugaga

SEQ ID NO: 1395288 - RNA, 19 nt, Homo sapiens
  misc_RNA (1)...(19): siRNA sense strand
aaaccaauccacacuauua

SEQ ID NO: 1395289 - RNA, 19 nt, Homo sapiens
  misc_RNA (1)...(19): siRNA sense strand
caaagucacugaacaacug

SEQ ID NO: 1395290 - RNA, 19 nt, Homo sapiens
  misc_RNA (1)...(19): siRNA sense strand
gggagcagcugugaaauug

SEQ ID NO: 1395291 - RNA, 19 nt, Homo sapiens
  misc_RNA (1)...(19): siRNA sense strand
caaagacaaugcagucaga

SEQ ID NO: 1395292 - RNA, 19 nt, Homo sapiens
  misc_RNA (1)...(19): siRNA sense strand
gccaagaguuuguugaaga

SEQ ID NO: 1395293 - RNA, 19 nt, Homo sapiens
  misc_RNA (1)...(19): siRNA sense strand
gcacgaaagcaagagauua

SEQ ID NO: 1395294 - RNA, 19 nt, Homo sapiens
  misc_RNA (1)...(19): siRNA sense strand
gccaaagaccucaucaaua

SEQ ID NO: 1395295 - RNA, 19 nt, Homo sapiens
  misc_RNA (1)...(19): siRNA sense strand
caagggagcagcugugaaa

SEQ ID NO: 1395296 - RNA, 19 nt, Homo sapiens
  misc_RNA (1)...(19): siRNA sense strand
caacuaugcuggcuacaag

SEQ ID NO: 1395297 - RNA, 19 nt, Homo sapiens
  misc_RNA (1)...(19): siRNA sense strand
gaaagccaguggauaugug

SEQ ID NO: 1395298 - RNA, 19 nt, Homo sapiens
  misc_RNA (1)...(19): siRNA sense strand
ucaccuaaauggcauaguu

SEQ ID NO: 1395299 - RNA, 19 nt, Homo sapiens
  misc_RNA (1)...(19): siRNA sense strand
acaagaauaugcugccaaa

SEQ ID NO: 1395300 - RNA, 19 nt, Homo sapiens
  misc_RNA (1)...(19): siRNA sense strand
ccaagaguuuguugaagaa

SEQ ID NO: 1395301 - RNA, 19 nt, Homo sapiens
  misc_RNA (1)...(19): siRNA sense strand
guagacugcuugaagaaau

SEQ ID NO: 1395302 - RNA, 19 nt, Homo sapiens
  misc_RNA (1)...(19): siRNA sense strand
ccauggaucugucaacguu

SEQ ID NO: 1395303 - RNA, 19 nt, Homo sapiens
  misc_RNA (1)...(19): siRNA sense strand
gaagcacccuaauauugug

SEQ ID NO: 1395304 - RNA, 19 nt, Homo sapiens
  misc_RNA (1)...(19): siRNA sense strand
guuaaucauugucaccuaa

SEQ ID NO: 1395305 - RNA, 19 nt, Homo sapiens
  misc_RNA (1)...(19): siRNA sense strand
auacaacaauugaggauga

SEQ ID NO: 1395306 - RNA, 19 nt, Homo sapiens
  misc_RNA (1)...(19): siRNA sense strand
ugaacuguuugaagacaua

SEQ ID NO: 1395307 - RNA, 19 nt, Homo sapiens
  misc_RNA (1)...(19): siRNA sense strand
ggugccaucuugacaacua

SEQ ID NO: 1395308 - RNA, 19 nt, Homo sapiens
  misc_RNA (1)...(19): siRNA sense strand
uaaagauccuuauggaaag

SEQ ID NO: 1395309 - RNA, 19 nt, Homo sapiens
  misc_RNA (1)...(19): siRNA sense strand
ggaugaagaccaacacaga

SEQ ID NO: 1395310 - RNA, 19 nt, Homo sapiens
  misc_RNA (1)...(19): siRNA sense strand
gaguaaaggagucaacuga

SEQ ID NO: 1395311 - RNA, 19 nt, Homo sapiens
  misc_RNA (1)...(19): siRNA sense strand
gaaagcaagagauuaucaa

SEQ ID NO: 1395312 - RNA, 19 nt, Homo sapiens
  misc_RNA (1)...(19): siRNA sense strand
ggaugaagaugugaaagca

SEQ ID NO: 1395313 - RNA, 19 nt, Homo sapiens
  misc_RNA (1)...(19): siRNA sense strand
gaaagagaagcuagaaucu

SEQ ID NO: 1395314 - RNA, 19 nt, Homo sapiens
  misc_RNA (1)...(19): siRNA sense strand
gaacaacugaucgaagcua

SEQ ID NO: 1395315 - RNA, 19 nt, Homo sapiens
  misc_RNA (1)...(19): siRNA sense strand
caagagaauacuacaguga

SEQ ID NO: 1395316 - RNA, 19 nt, Homo sapiens
  misc_RNA (1)...(19): siRNA sense strand
auauuaggcucacacagua

SEQ ID NO: 1395317 - RNA, 19 nt, Homo sapiens
  misc_RNA (1)...(19): siRNA sense strand
gcaagagauuaucaaaguc

SEQ ID NO: 1395318 - RNA, 19 nt, Homo sapiens
  misc_RNA (1)...(19): siRNA sense strand
cagaagagggcuuucacua

SEQ ID NO: 1395319 - RNA, 19 nt, Homo sapiens
  misc_RNA (1)...(19): siRNA sense strand
cuacuugguguuugauuua

SEQ ID NO: 1395320 - RNA, 19 nt, Homo sapiens
  misc_RNA (1)...(19): siRNA sense strand
acuaaagggugccaucuug

SEQ ID NO: 1395321 - RNA, 19 nt, Homo sapiens
  misc_RNA (1)...(19): siRNA sense strand
ggugagaagauguaugaaa

SEQ ID NO: 1395322 - RNA, 19 nt, Homo sapiens
  misc_RNA (1)...(19): siRNA sense strand
cagcaggcgugguuugguu

SEQ ID NO: 1395323 - RNA, 19 nt, Homo sapiens
  misc_RNA (1)...(19): siRNA sense strand
gaucaucagaaacuagaaa

SEQ ID NO: 1395324 - RNA, 19 nt, Homo sapiens
  misc_RNA (1)...(19): siRNA sense strand
agcaagagauuaucaaagu

SEQ ID NO: 1395325 - RNA, 19 nt, Homo sapiens
  misc_RNA (1)...(19): siRNA sense strand
gugagaagauguaugaaaa

SEQ ID NO: 1395326 - RNA, 19 nt, Homo sapiens
  misc_RNA (1)...(19): siRNA sense strand
uacuggaggugaacuguuu

SEQ ID NO: 1395327 - RNA, 19 nt, Homo sapiens
  misc_RNA (1)...(19): siRNA sense strand
gaaaauuccuacuggacaa

SEQ ID NO: 1395328 - RNA, 19 nt, Homo sapiens
  misc_RNA (1)...(19): siRNA sense strand
gcugaugccagucauugua

SEQ ID NO: 1395329 - RNA, 19 nt, Homo sapiens
  misc_RNA (1)...(19): siRNA sense strand
gcgacuucaugauagcaua

SEQ ID NO: 1395330 - RNA, 19 nt, Homo sapiens
  misc_RNA (1)...(19): siRNA sense strand
ucuaaacccucauguacau

SEQ ID NO: 1395331 - RNA, 19 nt, Homo sapiens
  misc_RNA (1)...(19): siRNA sense strand
caagagauuaucaaaguca

SEQ ID NO: 1395332 - RNA, 19 nt, Homo sapiens
  misc_RNA (1)...(19): siRNA sense strand
acugagaguucaaauacaa

SEQ ID NO: 1395333 - RNA, 19 nt, Homo sapiens
  misc_RNA (1)...(19): siRNA sense strand
ugaagcacccuaauauugu

SEQ ID NO: 1395334 - RNA, 19 nt, Homo sapiens
  misc_RNA (1)...(19): siRNA sense strand
gcaguggaaugccaaagac

SEQ ID NO: 1395335 - RNA, 19 nt, Homo sapiens
  misc_RNA (1)...(19): siRNA sense strand
gaauaugcugccaaaauua

SEQ ID NO: 1395336 - RNA, 19 nt, Homo sapiens
  misc_RNA (1)...(19): siRNA sense strand
auaaaccaauccacacuau

SEQ ID NO: 1395337 - RNA, 19 nt, Homo sapiens
  misc_RNA (1)...(19): siRNA sense strand
agaauaugcugccaaaauu

SEQ ID NO: 1395338 - RNA, 19 nt, Homo sapiens
  misc_RNA (1)...(19): siRNA sense strand
guggugagaagauguauga

SEQ ID NO: 1395339 - RNA, 19 nt, Homo sapiens
  misc_RNA (1)...(19): siRNA sense strand
uggcacaccuggauaucuu

SEQ ID NO: 1395340 - RNA, 19 nt, Homo sapiens
  misc_RNA (1)...(19): siRNA sense strand
cagauucuagaaaguguua

SEQ ID NO: 1395341 - RNA, 19 nt, Homo sapiens
  misc_RNA (1)...(19): siRNA sense strand
guauacagcagauucuaga

SEQ ID NO: 1395342 - RNA, 19 nt, Homo sapiens
  misc_RNA (1)...(19): siRNA sense strand
ccugaagccugagaauuug

SEQ ID NO: 1395343 - RNA, 19 nt, Homo sapiens
  misc_RNA (1)...(19): siRNA sense strand
ccaauccacacuauuauuc

SEQ ID NO: 1395344 - RNA, 19 nt, Homo sapiens
  misc_RNA (1)...(19): siRNA sense strand
uagacugcuugaagaaauu

SEQ ID NO: 1395345 - RNA, 19 nt, Homo sapiens
  misc_RNA (1)...(19): siRNA sense strand
caaagaccucaucaauaaa

SEQ ID NO: 1395346 - RNA, 19 nt, Homo sapiens
  misc_RNA (1)...(19): siRNA sense strand
ggaaagccaguggauaugu

SEQ ID NO: 1395347 - RNA, 19 nt, Homo sapiens
  misc_RNA (1)...(19): siRNA sense strand
agaaagagaagcuagaauc

SEQ ID NO: 1395348 - RNA, 19 nt, Homo sapiens
  misc_RNA (1)...(19): siRNA sense strand
ggcuggagcuuaugauuuu

SEQ ID NO: 1395349 - RNA, 19 nt, Homo sapiens
  misc_RNA (1)...(19): siRNA sense strand
caauugaggaugaagaugu

SEQ ID NO: 1395350 - RNA, 19 nt, Homo sapiens
  misc_RNA (1)...(19): siRNA sense strand
gcacugaagcacccaugga

SEQ ID NO: 1395351 - RNA, 19 nt, Homo sapiens
  misc_RNA (1)...(19): siRNA sense strand
ggugacuccugaagccaaa

SEQ ID NO: 1395352 - RNA, 19 nt, Homo sapiens
  misc_RNA (1)...(19): siRNA sense strand
uugaagcacccuaauauug

SEQ ID NO: 1395353 - RNA, 19 nt, Homo sapiens
  misc_RNA (1)...(19): siRNA sense strand
ucgaagcuaucaacaaugg

SEQ ID NO: 1395354 - RNA, 19 nt, Homo sapiens
  misc_RNA (1)...(19): siRNA sense strand
caacaauugaggaugaaga

SEQ ID NO: 1395355 - RNA, 19 nt, Homo sapiens
  misc_RNA (1)...(19): siRNA sense strand
agacauaguggcaagagaa

SEQ ID NO: 1395356 - RNA, 19 nt, Homo sapiens
  misc_RNA (1)...(19): siRNA sense strand
caccgauucuacuuugaaa

SEQ ID NO: 1395357 - RNA, 19 nt, Homo sapiens
  misc_RNA (1)...(19): siRNA sense strand
acccaggccuuacugcuuu

SEQ ID NO: 1395358 - RNA, 19 nt, Homo sapiens
  misc_RNA (1)...(19): siRNA sense strand
cgaaagcaagagauuauca

SEQ ID NO: 1395359 - RNA, 19 nt, Homo sapiens
  misc_RNA (1)...(19): siRNA sense strand
cauguggugucauucucua

SEQ ID NO: 1395360 - RNA, 19 nt, Homo sapiens
  misc_RNA (1)...(19): siRNA sense strand
ugaugccagucauuguaua

SEQ ID NO: 1395361 - RNA, 19 nt, Homo sapiens
  misc_RNA (1)...(19): siRNA sense strand
gaaacuagaaagagaagcu

SEQ ID NO: 1395362 - RNA, 19 nt, Homo sapiens
  misc_RNA (1)...(19): siRNA sense strand
cugaagcuuuggguaauuu

SEQ ID NO: 1395363 - RNA, 19 nt, Homo sapiens
  misc_RNA (1)...(19): siRNA sense strand
uaucaaagucacugaacaa

SEQ ID NO: 1395364 - RNA, 19 nt, Homo sapiens
  misc_RNA (1)...(19): siRNA sense strand
guggugucauucucuauau

SEQ ID NO: 1395365 - RNA, 19 nt, Homo sapiens
  misc_RNA (1)...(19): siRNA sense strand
gugggcauguggugucauu

SEQ ID NO: 1395366 - RNA, 19 nt, Homo sapiens
  misc_RNA (1)...(19): siRNA sense strand
cacgaaagcaagagauuau

SEQ ID NO: 1395367 - RNA, 19 nt, Homo sapiens
  misc_RNA (1)...(19): siRNA sense strand
ggcaagagaauacuacagu

SEQ ID NO: 1395368 - RNA, 19 nt, Homo sapiens
  misc_RNA (1)...(19): siRNA sense strand
agacaaugcagucagaaga

SEQ ID NO: 1395369 - RNA, 19 nt, Homo sapiens
  misc_RNA (1)...(19): siRNA sense strand
uauauuaggcucacacagu

SEQ ID NO: 1395370 - RNA, 19 nt, Homo sapiens
  misc_RNA (1)...(19): siRNA sense strand
ugaaagcacgaaagcaaga

SEQ ID NO: 1395371 - RNA, 19 nt, Homo sapiens
  misc_RNA (1)...(19): siRNA sense strand
ggaggugaacuguuugaag

SEQ ID NO: 1395372 - RNA, 19 nt, Homo sapiens
  misc_RNA (1)...(19): siRNA sense strand
gccugcauagcauauauua

SEQ ID NO: 1395373 - RNA, 19 nt, Homo sapiens
  misc_RNA (1)...(19): siRNA sense strand
caaaagcaauaaaccaauc

SEQ ID NO: 1395374 - RNA, 19 nt, Homo sapiens
  misc_RNA (1)...(19): siRNA sense strand
acguaaagauccuuaugga

SEQ ID NO: 1395375 - RNA, 19 nt, Homo sapiens
  misc_RNA (1)...(19): siRNA sense strand
gaccugaagccugagaauu

SEQ ID NO: 1395376 - RNA, 19 nt, Homo sapiens
  misc_RNA (1)...(19): siRNA sense strand
uacagcagauucuagaaag

SEQ ID NO: 1395377 - RNA, 19 nt, Homo sapiens
  misc_RNA (1)...(19): siRNA sense strand
ggugaacuguuugaagaca

SEQ ID NO: 1395378 - RNA, 19 nt, Homo sapiens
  misc_RNA (1)...(19): siRNA sense strand
ccaaagaccucaucaauaa

SEQ ID NO: 1395379 - RNA, 19 nt, Homo sapiens
  misc_RNA (1)...(19): siRNA sense strand
gcuagaaucugccgucuuu

SEQ ID NO: 1395380 - RNA, 19 nt, Homo sapiens
  misc_RNA (1)...(19): siRNA sense strand
gaagaaaccagauggagua

SEQ ID NO: 1395381 - RNA, 19 nt, Homo sapiens
  misc_RNA (1)...(19): siRNA sense strand
gaucaaggcuggagcuuau

SEQ ID NO: 1395382 - RNA, 19 nt, Homo sapiens
  misc_RNA (1)...(19): siRNA sense strand
gaucgaagcuaucaacaau

SEQ ID NO: 1395383 - RNA, 19 nt, Homo sapiens
  misc_RNA (1)...(19): siRNA sense strand
guaaagauccuuauggaaa

SEQ ID NO: 1395384 - RNA, 19 nt, Homo sapiens
  misc_RNA (1)...(19): siRNA sense strand
gaggugaacuguuugaaga

SEQ ID NO: 1395385 - RNA, 19 nt, Homo sapiens
  misc_RNA (1)...(19): siRNA sense strand
gaaaccagauggaguaaag

SEQ ID NO: 1395386 - RNA, 19 nt, Homo sapiens
  misc_RNA (1)...(19): siRNA sense strand
gaagagggcuuucacuacu

SEQ ID NO: 1395387 - RNA, 19 nt, Homo sapiens
  misc_RNA (1)...(19): siRNA sense strand
guaaaggagucaacugaga

SEQ ID NO: 1395388 - RNA, 19 nt, Homo sapiens
  misc_RNA (1)...(19): siRNA sense strand
aaaccaauccacacuauua

SEQ ID NO: 1395389 - RNA, 19 nt, Homo sapiens
  misc_RNA (1)...(19): siRNA sense strand
caaagucacugaacaacug

SEQ ID NO: 1395390 - RNA, 19 nt, Homo sapiens
  misc_RNA (1)...(19): siRNA sense strand
gggagcagcugugaaauug

SEQ ID NO: 1395391 - RNA, 19 nt, Homo sapiens
  misc_RNA (1)...(19): siRNA sense strand
caaagacaaugcagucaga

SEQ ID NO: 1395392 - RNA, 19 nt, Homo sapiens
  misc_RNA (1)...(19): siRNA sense strand
gccaagaguuuguugaaga

SEQ ID NO: 1395393 - RNA, 19 nt, Homo sapiens
  misc_RNA (1)...(19): siRNA sense strand
gcacgaaagcaagagauua

SEQ ID NO: 1395394 - RNA, 19 nt, Homo sapiens
  misc_RNA (1)...(19): siRNA sense strand
gccaaagaccucaucaaua

SEQ ID NO: 1395395 - RNA, 19 nt, Homo sapiens
  misc_RNA (1)...(19): siRNA sense strand
caagggagcagcugugaaa

SEQ ID NO: 1395396 - RNA, 19 nt, Homo sapiens
  misc_RNA (1)...(19): siRNA sense strand
caacuaugcuggcuacaag

SEQ ID NO: 1395397 - RNA, 19 nt, Homo sapiens
  misc_RNA (1)...(19): siRNA sense strand
gaaagccaguggauaugug

SEQ ID NO: 1395398 - RNA, 19 nt, Homo sapiens
  misc_RNA (1)...(19): siRNA sense strand
ucaccuaaauggcauaguu

SEQ ID NO: 1395399 - RNA, 19 nt, Homo sapiens
  misc_RNA (1)...(19): siRNA sense strand
acaagaauaugcugccaaa

SEQ ID NO: 1395400 - RNA, 19 nt, Homo sapiens
  misc_RNA (1)...(19): siRNA sense strand
ccaagaguuuguugaagaa

SEQ ID NO: 1395401 - RNA, 19 nt, Homo sapiens
  misc_RNA (1)...(19): siRNA sense strand
guagacugcuugaagaaau

SEQ ID NO: 1395402 - RNA, 19 nt, Homo sapiens
  misc_RNA (1)...(19): siRNA sense strand
ccauggaucugucaacguu

SEQ ID NO: 1395403 - RNA, 19 nt, Homo sapiens
  misc_RNA (1)...(19): siRNA sense strand
gaagcacccuaauauugug

SEQ ID NO: 1395404 - RNA, 19 nt, Homo sapiens
  misc_RNA (1)...(19): siRNA sense strand
guuaaucauugucaccuaa

SEQ ID NO: 1395405 - RNA, 19 nt, Homo sapiens
  misc_RNA (1)...(19): siRNA sense strand
auacaacaauugaggauga

SEQ ID NO: 1395406 - RNA, 19 nt, Homo sapiens
  misc_RNA (1)...(19): siRNA sense strand
ugaacuguuugaagacaua

SEQ ID NO: 1395407 - RNA, 19 nt, Homo sapiens
  misc_RNA (1)...(19): siRNA sense strand
ggugccaucuugacaacua

SEQ ID NO: 1395408 - RNA, 19 nt, Homo sapiens
  misc_RNA (1)...(19): siRNA sense strand
uaaagauccuuauggaaag

SEQ ID NO: 1395409 - RNA, 19 nt, Homo sapiens
  misc_RNA (1)...(19): siRNA sense strand
ggaugaagaccaacacaga

SEQ ID NO: 1395410 - RNA, 19 nt, Homo sapiens
  misc_RNA (1)...(19): siRNA sense strand
gaguaaaggagucaacuga

SEQ ID NO: 1395411 - RNA, 19 nt, Homo sapiens
  misc_RNA (1)...(19): siRNA sense strand
gaaagcaagagauuaucaa

SEQ ID NO: 1395412 - RNA, 19 nt, Homo sapiens
  misc_RNA (1)...(19): siRNA sense strand
ggaugaagaugugaaagca

SEQ ID NO: 1395413 - RNA, 19 nt, Homo sapiens
  misc_RNA (1)...(19): siRNA sense strand
gaaagagaagcuagaaucu

SEQ ID NO: 1395414 - RNA, 19 nt, Homo sapiens
  misc_RNA (1)...(19): siRNA sense strand
gaacaacugaucgaagcua

SEQ ID NO: 1395415 - RNA, 19 nt, Homo sapiens
  misc_RNA (1)...(19): siRNA sense strand
caagagaauacuacaguga

SEQ ID NO: 1395416 - RNA, 19 nt, Homo sapiens
  misc_RNA (1)...(19): siRNA sense strand
auauuaggcucacacagua

SEQ ID NO: 1395417 - RNA, 19 nt, Homo sapiens
  misc_RNA (1)...(19): siRNA sense strand
gcaagagauuaucaaaguc

SEQ ID NO: 1395418 - RNA, 19 nt, Homo sapiens
  misc_RNA (1)...(19): siRNA sense strand
cagaagagggcuuucacua

SEQ ID NO: 1395419 - RNA, 19 nt, Homo sapiens
  misc_RNA (1)...(19): siRNA sense strand
cuacuugguguuugauuua

SEQ ID NO: 1395420 - RNA, 19 nt, Homo sapiens
  misc_RNA (1)...(19): siRNA sense strand
acuaaagggugccaucuug

SEQ ID NO: 1395421 - RNA, 19 nt, Homo sapiens
  misc_RNA (1)...(19): siRNA sense strand
ggugagaagauguaugaaa

SEQ ID NO: 1395422 - RNA, 19 nt, Homo sapiens
  misc_RNA (1)...(19): siRNA sense strand
cagcaggcgugguuugguu

SEQ ID NO: 1395423 - RNA, 19 nt, Homo sapiens
  misc_RNA (1)...(19): siRNA sense strand
gaucaucagaaacuagaaa

SEQ ID NO: 1395424 - RNA, 19 nt, Homo sapiens
  misc_RNA (1)...(19): siRNA sense strand
agcaagagauuaucaaagu

SEQ ID NO: 1395425 - RNA, 19 nt, Homo sapiens
  misc_RNA (1)...(19): siRNA sense strand
gugagaagauguaugaaaa

SEQ ID NO: 1395426 - RNA, 19 nt, Homo sapiens
  misc_RNA (1)...(19): siRNA sense strand
uacuggaggugaacuguuu

SEQ ID NO: 1395427 - RNA, 19 nt, Homo sapiens
  misc_RNA (1)...(19): siRNA sense strand
gaaaauuccuacuggacaa

SEQ ID NO: 1395428 - RNA, 19 nt, Homo sapiens
  misc_RNA (1)...(19): siRNA sense strand
gcugaugccagucauugua

SEQ ID NO: 1395429 - RNA, 19 nt, Homo sapiens
  misc_RNA (1)...(19): siRNA sense strand
gcgacuucaugauagcaua

SEQ ID NO: 1395430 - RNA, 19 nt, Homo sapiens
  misc_RNA (1)...(19): siRNA sense strand
ucuaaacccucauguacau

SEQ ID NO: 1395431 - RNA, 19 nt, Homo sapiens
  misc_RNA (1)...(19): siRNA sense strand
caagagauuaucaaaguca

SEQ ID NO: 1395432 - RNA, 19 nt, Homo sapiens
  misc_RNA (1)...(19): siRNA sense strand
acugagaguucaaauacaa

SEQ ID NO: 1395433 - RNA, 19 nt, Homo sapiens
  misc_RNA (1)...(19): siRNA sense strand
ugaagcacccuaauauugu

SEQ ID NO: 1395434 - RNA, 19 nt, Homo sapiens
  misc_RNA (1)...(19): siRNA sense strand
gcaguggaaugccaaagac

SEQ ID NO: 1395435 - RNA, 19 nt, Homo sapiens
  misc_RNA (1)...(19): siRNA sense strand
gaauaugcugccaaaauua

SEQ ID NO: 1395436 - RNA, 19 nt, Homo sapiens
  misc_RNA (1)...(19): siRNA sense strand
auaaaccaauccacacuau

SEQ ID NO: 1395437 - RNA, 19 nt, Homo sapiens
  misc_RNA (1)...(19): siRNA sense strand
agaauaugcugccaaaauu

SEQ ID NO: 1395438 - RNA, 19 nt, Homo sapiens
  misc_RNA (1)...(19): siRNA sense strand
guggugagaagauguauga

SEQ ID NO: 1395439 - RNA, 19 nt, Homo sapiens
  misc_RNA (1)...(19): siRNA sense strand
uggcacaccuggauaucuu

SEQ ID NO: 1395440 - RNA, 19 nt, Homo sapiens
  misc_RNA (1)...(19): siRNA sense strand
cagauucuagaaaguguua

SEQ ID NO: 1395441 - RNA, 19 nt, Homo sapiens
  misc_RNA (1)...(19): siRNA sense strand
guauacagcagauucuaga

SEQ ID NO: 1395442 - RNA, 19 nt, Homo sapiens
  misc_RNA (1)...(19): siRNA sense strand
ccugaagccugagaauuug

SEQ ID NO: 1395443 - RNA, 19 nt, Homo sapiens
  misc_RNA (1)...(19): siRNA sense strand
ccaauccacacuauuauuc

SEQ ID NO: 1395444 - RNA, 19 nt, Homo sapiens
  misc_RNA (1)...(19): siRNA sense strand
uagacugcuugaagaaauu

SEQ ID NO: 1395445 - RNA, 19 nt, Homo sapiens
  misc_RNA (1)...(19): siRNA sense strand
caaagaccucaucaauaaa

SEQ ID NO: 1395446 - RNA, 19 nt, Homo sapiens
  misc_RNA (1)...(19): siRNA sense strand
ggaaagccaguggauaugu

SEQ ID NO: 1395447 - RNA, 19 nt, Homo sapiens
  misc_RNA (1)...(19): siRNA sense strand
agaaagagaagcuagaauc

SEQ ID NO: 1395448 - RNA, 19 nt, Homo sapiens
  misc_RNA (1)...(19): siRNA sense strand
ggcuggagcuuaugauuuu

SEQ ID NO: 1395449 - RNA, 19 nt, Homo sapiens
  misc_RNA (1)...(19): siRNA sense strand
caauugaggaugaagaugu

SEQ ID NO: 1395450 - RNA, 19 nt, Homo sapiens
  misc_RNA (1)...(19): siRNA sense strand
gcacugaagcacccaugga

SEQ ID NO: 1395451 - RNA, 19 nt, Homo sapiens
  misc_RNA (1)...(19): siRNA sense strand
ggugacuccugaagccaaa

SEQ ID NO: 1395452 - RNA, 19 nt, Homo sapiens
  misc_RNA (1)...(19): siRNA sense strand
uugaagcacccuaauauug

SEQ ID NO: 1395453 - RNA, 19 nt, Homo sapiens
  misc_RNA (1)...(19): siRNA sense strand
ucgaagcuaucaacaaugg

SEQ ID NO: 1395454 - RNA, 19 nt, Homo sapiens
  misc_RNA (1)...(19): siRNA sense strand
caacaauugaggaugaaga

SEQ ID NO: 1395455 - RNA, 19 nt, Homo sapiens
  misc_RNA (1)...(19): siRNA sense strand
agacauaguggcaagagaa

SEQ ID NO: 1395456 - RNA, 19 nt, Homo sapiens
  misc_RNA (1)...(19): siRNA sense strand
caccgauucuacuuugaaa

SEQ ID NO: 1395457 - RNA, 19 nt, Homo sapiens
  misc_RNA (1)...(19): siRNA sense strand
acccaggccuuacugcuuu

SEQ ID NO: 1395458 - RNA, 19 nt, Homo sapiens
  misc_RNA (1)...(19): siRNA sense strand
cgaaagcaagagauuauca

SEQ ID NO: 1395459 - RNA, 19 nt, Homo sapiens
  misc_RNA (1)...(19): siRNA sense strand
cauguggugucauucucua

SEQ ID NO: 1395460 - RNA, 19 nt, Homo sapiens
  misc_RNA (1)...(19): siRNA sense strand
ugaugccagucauuguaua

SEQ ID NO: 1395461 - RNA, 19 nt, Homo sapiens
  misc_RNA (1)...(19): siRNA sense strand
gaaacuagaaagagaagcu

SEQ ID NO: 1395462 - RNA, 19 nt, Homo sapiens
  misc_RNA (1)...(19): siRNA sense strand
cugaagcuuuggguaauuu

SEQ ID NO: 1395463 - RNA, 19 nt, Homo sapiens
  misc_RNA (1)...(19): siRNA sense strand
uaucaaagucacugaacaa

SEQ ID NO: 1395464 - RNA, 19 nt, Homo sapiens
  misc_RNA (1)...(19): siRNA sense strand
guggugucauucucuauau

SEQ ID NO: 1395465 - RNA, 19 nt, Homo sapiens
  misc_RNA (1)...(19): siRNA sense strand
gugggcauguggugucauu

SEQ ID NO: 1395466 - RNA, 19 nt, Homo sapiens
  misc_RNA (1)...(19): siRNA sense strand
cacgaaagcaagagauuau

SEQ ID NO: 1395467 - RNA, 19 nt, Homo sapiens
  misc_RNA (1)...(19): siRNA sense strand
ggcaagagaauacuacagu

SEQ ID NO: 1395468 - RNA, 19 nt, Homo sapiens
  misc_RNA (1)...(19): siRNA sense strand
agacaaugcagucagaaga

SEQ ID NO: 1395469 - RNA, 19 nt, Homo sapiens
  misc_RNA (1)...(19): siRNA sense strand
uauauuaggcucacacagu

SEQ ID NO: 1395470 - RNA, 19 nt, Homo sapiens
  misc_RNA (1)...(19): siRNA sense strand
ugaaagcacgaaagcaaga

SEQ ID NO: 1395471 - RNA, 19 nt, Homo sapiens
  misc_RNA (1)...(19): siRNA sense strand
ggaggugaacuguuugaag

SEQ ID NO: 1395472 - RNA, 19 nt, Homo sapiens
  misc_RNA (1)...(19): siRNA sense strand
gccugcauagcauauauua

SEQ ID NO: 1395473 - RNA, 19 nt, Homo sapiens
  misc_RNA (1)...(19): siRNA sense strand
caaaagcaauaaaccaauc

SEQ ID NO: 1395474 - RNA, 19 nt, Homo sapiens
  misc_RNA (1)...(19): siRNA sense strand
acguaaagauccuuaugga

SEQ ID NO: 1395475 - RNA, 19 nt, Homo sapiens
  misc_RNA (1)...(19): siRNA sense strand
gaccugaagccugagaauu

SEQ ID NO: 1395476 - RNA, 19 nt, Homo sapiens
  misc_RNA (1)...(19): siRNA sense strand
uacagcagauucuagaaag

SEQ ID NO: 1395477 - RNA, 19 nt, Homo sapiens
  misc_RNA (1)...(19): siRNA sense strand
ggugaacuguuugaagaca

SEQ ID NO: 1395478 - RNA, 19 nt, Homo sapiens
  misc_RNA (1)...(19): siRNA sense strand
ggaaacaucauuaagaaga

SEQ ID NO: 1395479 - RNA, 19 nt, Homo sapiens
  misc_RNA (1)...(19): siRNA sense strand
gcaauaaacccuacagcaa

SEQ ID NO: 1395480 - RNA, 19 nt, Homo sapiens
  misc_RNA (1)...(19): siRNA sense strand
guacguggaugugguguuu

SEQ ID NO: 1395481 - RNA, 19 nt, Homo sapiens
  misc_RNA (1)...(19): siRNA sense strand
caauaaacccuacagcaaa

SEQ ID NO: 1395482 - RNA, 19 nt, Homo sapiens
  misc_RNA (1)...(19): siRNA sense strand
guacugggaaacaucauua

SEQ ID NO: 1395483 - RNA, 19 nt, Homo sapiens
  misc_RNA (1)...(19): siRNA sense strand
ugggaaacaucauuaagaa

SEQ ID NO: 1395484 - RNA, 19 nt, Homo sapiens
  misc_RNA (1)...(19): siRNA sense strand
gaggccagaucaccgauga

SEQ ID NO: 1395485 - RNA, 19 nt, Homo sapiens
  misc_RNA (1)...(19): siRNA sense strand
ccacgagauugauaguauu

SEQ ID NO: 1395486 - RNA, 19 nt, Homo sapiens
  misc_RNA (1)...(19): siRNA sense strand
gaccuuggccuaugauaau

SEQ ID NO: 1395487 - RNA, 19 nt, Homo sapiens
  misc_RNA (1)...(19): siRNA sense strand
cauaaucgaaggucugaaa

SEQ ID NO: 1395488 - RNA, 19 nt, Homo sapiens
  misc_RNA (1)...(19): siRNA sense strand
ccagaucaccgaugagaug

SEQ ID NO: 1395489 - RNA, 19 nt, Homo sapiens
  misc_RNA (1)...(19): siRNA sense strand
cggaccagcucauggagaa

SEQ ID NO: 1395490 - RNA, 19 nt, Homo sapiens
  misc_RNA (1)...(19): siRNA sense strand
ggagcuguuccacaagaua

SEQ ID NO: 1395491 - RNA, 19 nt, Homo sapiens
  misc_RNA (1)...(19): siRNA sense strand
ugccggagcuguuccacaa

SEQ ID NO: 1395492 - RNA, 19 nt, Homo sapiens
  misc_RNA (1)...(19): siRNA sense strand
uccacgagauugauaguau

SEQ ID NO: 1395493 - RNA, 19 nt, Homo sapiens
  misc_RNA (1)...(19): siRNA sense strand
ccaggaagcacauaaucga

SEQ ID NO: 1395494 - RNA, 19 nt, Homo sapiens
  misc_RNA (1)...(19): siRNA sense strand
gaagugguacugggaaaca

SEQ ID NO: 1395495 - RNA, 19 nt, Homo sapiens
  misc_RNA (1)...(19): siRNA sense strand
ccuggugccugaggaauga

SEQ ID NO: 1395496 - RNA, 19 nt, Homo sapiens
  misc_RNA (1)...(19): siRNA sense strand
ugaccuuggccuaugauaa

SEQ ID NO: 1395497 - RNA, 19 nt, Homo sapiens
  misc_RNA (1)...(19): siRNA sense strand
ccggagcuguuccacaaga

SEQ ID NO: 1395498 - RNA, 19 nt, Homo sapiens
  misc_RNA (1)...(19): siRNA sense strand
gcucaugaccuuggccuau

SEQ ID NO: 1395499 - RNA, 19 nt, Homo sapiens
  misc_RNA (1)...(19): siRNA sense strand
ccucuggccuguggcauug

SEQ ID NO: 1395500 - RNA, 19 nt, Homo sapiens
  misc_RNA (1)...(19): siRNA sense strand
gacugcagcuggaguacgu

SEQ ID NO: 1395501 - RNA, 19 nt, Homo sapiens
  misc_RNA (1)...(19): siRNA sense strand
gagcuguuccacaagauag

SEQ ID NO: 1395502 - RNA, 19 nt, Homo sapiens
  misc_RNA (1)...(19): siRNA sense strand
aauaaacccuacagcaaaa

SEQ ID NO: 1395503 - RNA, 19 nt, Homo sapiens
  misc_RNA (1)...(19): siRNA sense strand
cgagauugauaguauuuug

SEQ ID NO: 1395504 - RNA, 19 nt, Homo sapiens
  misc_RNA (1)...(19): siRNA sense strand
cacgagauugauaguauuu

SEQ ID NO: 1395505 - RNA, 19 nt, Homo sapiens
  misc_RNA (1)...(19): siRNA sense strand
caucccacccuacucaaga

SEQ ID NO: 1395506 - RNA, 19 nt, Homo sapiens
  misc_RNA (1)...(19): siRNA sense strand
accaguggcugaaggacaa

SEQ ID NO: 1395507 - RNA, 19 nt, Homo sapiens
  misc_RNA (1)...(19): siRNA sense strand
cugggaaacaucauuaaga

SEQ ID NO: 1395508 - RNA, 19 nt, Homo sapiens
  misc_RNA (1)...(19): siRNA sense strand
ggccagaucaccgaugaga

SEQ ID NO: 1395509 - RNA, 19 nt, Homo sapiens
  misc_RNA (1)...(19): siRNA sense strand
auaauggcaucaaccucuu

SEQ ID NO: 1395510 - RNA, 19 nt, Homo sapiens
  misc_RNA (1)...(19): siRNA sense strand
gguacugggaaacaucauu

SEQ ID NO: 1395511 - RNA, 19 nt, Homo sapiens
  misc_RNA (1)...(19): siRNA sense strand
cugaagugguacugggaaa

SEQ ID NO: 1395512 - RNA, 19 nt, Homo sapiens
  misc_RNA (1)...(19): siRNA sense strand
aaucgaaggucugaaagcu

SEQ ID NO: 1395513 - RNA, 19 nt, Homo sapiens
  misc_RNA (1)...(19): siRNA sense strand
caggaagcacauaaucgaa

SEQ ID NO: 1395514 - RNA, 19 nt, Homo sapiens
  misc_RNA (1)...(19): siRNA sense strand
cauuguuucuggcaaguac

SEQ ID NO: 1395515 - RNA, 19 nt, Homo sapiens
  misc_RNA (1)...(19): siRNA sense strand
ggaaacaucauuaagaaga

SEQ ID NO: 1395516 - RNA, 19 nt, Homo sapiens
  misc_RNA (1)...(19): siRNA sense strand
gcaauaaacccuacagcaa

SEQ ID NO: 1395517 - RNA, 19 nt, Homo sapiens
  misc_RNA (1)...(19): siRNA sense strand
guacguggaugugguguuu

SEQ ID NO: 1395518 - RNA, 19 nt, Homo sapiens
  misc_RNA (1)...(19): siRNA sense strand
caauaaacccuacagcaaa

SEQ ID NO: 1395519 - RNA, 19 nt, Homo sapiens
  misc_RNA (1)...(19): siRNA sense strand
guacugggaaacaucauua

SEQ ID NO: 1395520 - RNA, 19 nt, Homo sapiens
  misc_RNA (1)...(19): siRNA sense strand
ugggaaacaucauuaagaa

SEQ ID NO: 1395521 - RNA, 19 nt, Homo sapiens
  misc_RNA (1)...(19): siRNA sense strand
gaggccagaucaccgauga

SEQ ID NO: 1395522 - RNA, 19 nt, Homo sapiens
  misc_RNA (1)...(19): siRNA sense strand
ccacgagauugauaguauu

SEQ ID NO: 1395523 - RNA, 19 nt, Homo sapiens
  misc_RNA (1)...(19): siRNA sense strand
gaccuuggccuaugauaau

SEQ ID NO: 1395524 - RNA, 19 nt, Homo sapiens
  misc_RNA (1)...(19): siRNA sense strand
cauaaucgaaggucugaaa

SEQ ID NO: 1395525 - RNA, 19 nt, Homo sapiens
  misc_RNA (1)...(19): siRNA sense strand
ccagaucaccgaugagaug

SEQ ID NO: 1395526 - RNA, 19 nt, Homo sapiens
  misc_RNA (1)...(19): siRNA sense strand
cggaccagcucauggagaa

SEQ ID NO: 1395527 - RNA, 19 nt, Homo sapiens
  misc_RNA (1)...(19): siRNA sense strand
ggagcuguuccacaagaua

SEQ ID NO: 1395528 - RNA, 19 nt, Homo sapiens
  misc_RNA (1)...(19): siRNA sense strand
ugccggagcuguuccacaa

SEQ ID NO: 1395529 - RNA, 19 nt, Homo sapiens
  misc_RNA (1)...(19): siRNA sense strand
uccacgagauugauaguau

SEQ ID NO: 1395530 - RNA, 19 nt, Homo sapiens
  misc_RNA (1)...(19): siRNA sense strand
ccaggaagcacauaaucga

SEQ ID NO: 1395531 - RNA, 19 nt, Homo sapiens
  misc_RNA (1)...(19): siRNA sense strand
gaagugguacugggaaaca

SEQ ID NO: 1395532 - RNA, 19 nt, Homo sapiens
  misc_RNA (1)...(19): siRNA sense strand
ccuggugccugaggaauga

SEQ ID NO: 1395533 - RNA, 19 nt, Homo sapiens
  misc_RNA (1)...(19): siRNA sense strand
ugaccuuggccuaugauaa

SEQ ID NO: 1395534 - RNA, 19 nt, Homo sapiens
  misc_RNA (1)...(19): siRNA sense strand
ccggagcuguuccacaaga

SEQ ID NO: 1395535 - RNA, 19 nt, Homo sapiens
  misc_RNA (1)...(19): siRNA sense strand
gcucaugaccuuggccuau

SEQ ID NO: 1395536 - RNA, 19 nt, Homo sapiens
  misc_RNA (1)...(19): siRNA sense strand
ccucuggccuguggcauug

SEQ ID NO: 1395537 - RNA, 19 nt, Homo sapiens
  misc_RNA (1)...(19): siRNA sense strand
gacugcagcuggaguacgu

SEQ ID NO: 1395538 - RNA, 19 nt, Homo sapiens
  misc_RNA (1)...(19): siRNA sense strand
gagcuguuccacaagauag

SEQ ID NO: 1395539 - RNA, 19 nt, Homo sapiens
  misc_RNA (1)...(19): siRNA sense strand
aauaaacccuacagcaaaa

SEQ ID NO: 1395540 - RNA, 19 nt, Homo sapiens
  misc_RNA (1)...(19): siRNA sense strand
cgagauugauaguauuuug

SEQ ID NO: 1395541 - RNA, 19 nt, Homo sapiens
  misc_RNA (1)...(19): siRNA sense strand
cacgagauugauaguauuu

SEQ ID NO: 1395542 - RNA, 19 nt, Homo sapiens
  misc_RNA (1)...(19): siRNA sense strand
caucccacccuacucaaga

SEQ ID NO: 1395543 - RNA, 19 nt, Homo sapiens
  misc_RNA (1)...(19): siRNA sense strand
accaguggcugaaggacaa

SEQ ID NO: 1395544 - RNA, 19 nt, Homo sapiens
  misc_RNA (1)...(19): siRNA sense strand
cugggaaacaucauuaaga

SEQ ID NO: 1395545 - RNA, 19 nt, Homo sapiens
  misc_RNA (1)...(19): siRNA sense strand
ggccagaucaccgaugaga

SEQ ID NO: 1395546 - RNA, 19 nt, Homo sapiens
  misc_RNA (1)...(19): siRNA sense strand
auaauggcaucaaccucuu

SEQ ID NO: 1395547 - RNA, 19 nt, Homo sapiens
  misc_RNA (1)...(19): siRNA sense strand
gguacugggaaacaucauu

SEQ ID NO: 1395548 - RNA, 19 nt, Homo sapiens
  misc_RNA (1)...(19): siRNA sense strand
cugaagugguacugggaaa

SEQ ID NO: 1395549 - RNA, 19 nt, Homo sapiens
  misc_RNA (1)...(19): siRNA sense strand
aaucgaaggucugaaagcu

SEQ ID NO: 1395550 - RNA, 19 nt, Homo sapiens
  misc_RNA (1)...(19): siRNA sense strand
caggaagcacauaaucgaa

SEQ ID NO: 1395551 - RNA, 19 nt, Homo sapiens
  misc_RNA (1)...(19): siRNA sense strand
cauuguuucuggcaaguac

SEQ ID NO: 1395552 - RNA, 19 nt, Homo sapiens
  misc_RNA (1)...(19): siRNA sense strand
gaccugcucuuacauuuaa

SEQ ID NO: 1395553 - RNA, 19 nt, Homo sapiens
  misc_RNA (1)...(19): siRNA sense strand
uaaaggaccugcucuuaca

SEQ ID NO: 1395554 - RNA, 19 nt, Homo sapiens
  misc_RNA (1)...(19): siRNA sense strand
ggucucagcugggcaguuu

SEQ ID NO: 1395555 - RNA, 19 nt, Homo sapiens
  misc_RNA (1)...(19): siRNA sense strand
ggaccugcucuuacauuua

SEQ ID NO: 1395556 - RNA, 19 nt, Homo sapiens
  misc_RNA (1)...(19): siRNA sense strand
ccucaauccucuccuguug

SEQ ID NO: 1395557 - RNA, 19 nt, Homo sapiens
  misc_RNA (1)...(19): siRNA sense strand
gagguggcccaguuuguaa

SEQ ID NO: 1395558 - RNA, 19 nt, Homo sapiens
  misc_RNA (1)...(19): siRNA sense strand
ccugacagcuggcauguac

SEQ ID NO: 1395559 - RNA, 19 nt, Homo sapiens
  misc_RNA (1)...(19): siRNA sense strand
uguaaaggaccugcucuua

SEQ ID NO: 1395560 - RNA, 19 nt, Homo sapiens
  misc_RNA (1)...(19): siRNA sense strand
gcagugccaucgagaagac

SEQ ID NO: 1395561 - RNA, 19 nt, Homo sapiens
  misc_RNA (1)...(19): siRNA sense strand
aaaucgagguggcccaguu

SEQ ID NO: 1395562 - RNA, 19 nt, Homo sapiens
  misc_RNA (1)...(19): siRNA sense strand
cgagguggcccaguuugua

SEQ ID NO: 1395563 - RNA, 19 nt, Homo sapiens
  misc_RNA (1)...(19): siRNA sense strand
gcccuggaaucccugauca

SEQ ID NO: 1395564 - RNA, 19 nt, Homo sapiens
  misc_RNA (1)...(19): siRNA sense strand
guacugugcagcccuggaa

SEQ ID NO: 1395565 - RNA, 19 nt, Homo sapiens
  misc_RNA (1)...(19): siRNA sense strand
gcaauggcagcaugguaug

SEQ ID NO: 1395566 - RNA, 19 nt, Homo sapiens
  misc_RNA (1)...(19): siRNA sense strand
uggaaucccugaucaacgu

SEQ ID NO: 1395567 - RNA, 19 nt, Homo sapiens
  misc_RNA (1)...(19): siRNA sense strand
gaggagcuggucaacauca

SEQ ID NO: 1395568 - RNA, 19 nt, Homo sapiens
  misc_RNA (1)...(19): siRNA sense strand
aggaccugcucuuacauuu

SEQ ID NO: 1395569 - RNA, 19 nt, Homo sapiens
  misc_RNA (1)...(19): siRNA sense strand
agaggaugcugagcggauu

SEQ ID NO: 1395570 - RNA, 19 nt, Homo sapiens
  misc_RNA (1)...(19): siRNA sense strand
agaaggcuccgcucugcaa

SEQ ID NO: 1395571 - RNA, 19 nt, Homo sapiens
  misc_RNA (1)...(19): siRNA sense strand
uggcccaguuuguaaagga

SEQ ID NO: 1395572 - RNA, 19 nt, Homo sapiens
  misc_RNA (1)...(19): siRNA sense strand
ugacagcuggcauguacug

SEQ ID NO: 1395573 - RNA, 19 nt, Homo sapiens
  misc_RNA (1)...(19): siRNA sense strand
caaauaagauaugcuguuc

SEQ ID NO: 1395574 - RNA, 19 nt, Homo sapiens
  misc_RNA (1)...(19): siRNA sense strand
gaaucaaggucugugagaa

SEQ ID NO: 1395575 - RNA, 19 nt, Homo sapiens
  misc_RNA (1)...(19): siRNA sense strand
gagaagcgacccagcauag

SEQ ID NO: 1395576 - RNA, 19 nt, Homo sapiens
  misc_RNA (1)...(19): siRNA sense strand
ccaccacuguucauauuuc

SEQ ID NO: 1395577 - RNA, 19 nt, Homo sapiens
  misc_RNA (1)...(19): siRNA sense strand
gaagcgacccagcauagau

SEQ ID NO: 1395578 - RNA, 19 nt, Homo sapiens
  misc_RNA (1)...(19): siRNA sense strand
ccaaaagugugaaacaaau

SEQ ID NO: 1395579 - RNA, 19 nt, Homo sapiens
  misc_RNA (1)...(19): siRNA sense strand
aauaagauaugcuguucag

SEQ ID NO: 1395580 - RNA, 19 nt, Homo sapiens
  misc_RNA (1)...(19): siRNA sense strand
ugugggaacauuuguauga

SEQ ID NO: 1395581 - RNA, 19 nt, Homo sapiens
  misc_RNA (1)...(19): siRNA sense strand
guucauauuuccaaaagug

SEQ ID NO: 1395582 - RNA, 19 nt, Homo sapiens
  misc_RNA (1)...(19): siRNA sense strand
gcauccaccacuguucaua

SEQ ID NO: 1395583 - RNA, 19 nt, Homo sapiens
  misc_RNA (1)...(19): siRNA sense strand
ugagaagcgacccagcaua

SEQ ID NO: 1395584 - RNA, 19 nt, Homo sapiens
  misc_RNA (1)...(19): siRNA sense strand
ccacuguucauauuuccaa

SEQ ID NO: 1395585 - RNA, 19 nt, Homo sapiens
  misc_RNA (1)...(19): siRNA sense strand
auccaccacuguucauauu

SEQ ID NO: 1395586 - RNA, 19 nt, Homo sapiens
  misc_RNA (1)...(19): siRNA sense strand
cauccaccacuguucauau

SEQ ID NO: 1395587 - RNA, 19 nt, Homo sapiens
  misc_RNA (1)...(19): siRNA sense strand
gaacagcacugaaauccuu

SEQ ID NO: 1395588 - RNA, 19 nt, Homo sapiens
  misc_RNA (1)...(19): siRNA sense strand
caaauaagauaugcuguuc

SEQ ID NO: 1395589 - RNA, 19 nt, Homo sapiens
  misc_RNA (1)...(19): siRNA sense strand
gaaucaaggucugugagaa

SEQ ID NO: 1395590 - RNA, 19 nt, Homo sapiens
  misc_RNA (1)...(19): siRNA sense strand
gguuacaccugcagacuau

SEQ ID NO: 1395591 - RNA, 19 nt, Homo sapiens
  misc_RNA (1)...(19): siRNA sense strand
gagaagcgacccagcauag

SEQ ID NO: 1395592 - RNA, 19 nt, Homo sapiens
  misc_RNA (1)...(19): siRNA sense strand
gaaaggagggcaagcaaaa

SEQ ID NO: 1395593 - RNA, 19 nt, Homo sapiens
  misc_RNA (1)...(19): siRNA sense strand
ccaccacuguucauauuuc

SEQ ID NO: 1395594 - RNA, 19 nt, Homo sapiens
  misc_RNA (1)...(19): siRNA sense strand
gaagcgacccagcauagau

SEQ ID NO: 1395595 - RNA, 19 nt, Homo sapiens
  misc_RNA (1)...(19): siRNA sense strand
gaaggaggaacagcacuga

SEQ ID NO: 1395596 - RNA, 19 nt, Homo sapiens
  misc_RNA (1)...(19): siRNA sense strand
ggaggaacagcacugaaau

SEQ ID NO: 1395597 - RNA, 19 nt, Homo sapiens
  misc_RNA (1)...(19): siRNA sense strand
ccaaaagugugaaacaaau

SEQ ID NO: 1395598 - RNA, 19 nt, Homo sapiens
  misc_RNA (1)...(19): siRNA sense strand
aauaagauaugcuguucag

SEQ ID NO: 1395599 - RNA, 19 nt, Homo sapiens
  misc_RNA (1)...(19): siRNA sense strand
ugugggaacauuuguauga

SEQ ID NO: 1395600 - RNA, 19 nt, Homo sapiens
  misc_RNA (1)...(19): siRNA sense strand
gaggaacagcacugaaauc

SEQ ID NO: 1395601 - RNA, 19 nt, Homo sapiens
  misc_RNA (1)...(19): siRNA sense strand
ugaaaggagggcaagcaaa

SEQ ID NO: 1395602 - RNA, 19 nt, Homo sapiens
  misc_RNA (1)...(19): siRNA sense strand
guucauauuuccaaaagug

SEQ ID NO: 1395603 - RNA, 19 nt, Homo sapiens
  misc_RNA (1)...(19): siRNA sense strand
ugagaagcgacccagcaua

SEQ ID NO: 1395604 - RNA, 19 nt, Homo sapiens
  misc_RNA (1)...(19): siRNA sense strand
gcauccaccacuguucaua

SEQ ID NO: 1395605 - RNA, 19 nt, Homo sapiens
  misc_RNA (1)...(19): siRNA sense strand
gcaaaaguguaggacaaau

SEQ ID NO: 1395606 - RNA, 19 nt, Homo sapiens
  misc_RNA (1)...(19): siRNA sense strand
ccacuguucauauuuccaa

SEQ ID NO: 1395607 - RNA, 19 nt, Homo sapiens
  misc_RNA (1)...(19): siRNA sense strand
aggaggaacagcacugaaa

SEQ ID NO: 1395608 - RNA, 19 nt, Homo sapiens
  misc_RNA (1)...(19): siRNA sense strand
auccaccacuguucauauu

SEQ ID NO: 1395609 - RNA, 19 nt, Homo sapiens
  misc_RNA (1)...(19): siRNA sense strand
caaaaguguaggacaaauu

SEQ ID NO: 1395610 - RNA, 19 nt, Homo sapiens
  misc_RNA (1)...(19): siRNA sense strand
gugaaaggagggcaagcaa

SEQ ID NO: 1395611 - RNA, 19 nt, Homo sapiens
  misc_RNA (1)...(19): siRNA sense strand
cauccaccacuguucauau

SEQ ID NO: 1395612 - RNA, 19 nt, Homo sapiens
  misc_RNA (1)...(19): siRNA sense strand
ugcagacuaucccacagaa

SEQ ID NO: 1395613 - RNA, 19 nt, Homo sapiens
  misc_RNA (1)...(19): siRNA sense strand
aagcaaaaguguaggacaa

SEQ ID NO: 1395614 - RNA, 19 nt, Homo sapiens
  misc_RNA (1)...(19): siRNA sense strand
aauccuuucucgcaaucuu

SEQ ID NO: 1395615 - RNA, 19 nt, Homo sapiens
  misc_RNA (1)...(19): siRNA sense strand
ggccaaagaugccuuagaa

SEQ ID NO: 1395616 - RNA, 19 nt, Homo sapiens
  misc_RNA (1)...(19): siRNA sense strand
ccaaagaugccuuagaaga

SEQ ID NO: 1395617 - RNA, 19 nt, Homo sapiens
  misc_RNA (1)...(19): siRNA sense strand
gcaaggggcugccacauag

SEQ ID NO: 1395618 - RNA, 19 nt, Homo sapiens
  misc_RNA (1)...(19): siRNA sense strand
ccacauagcccaguucaag

SEQ ID NO: 1395619 - RNA, 19 nt, Homo sapiens
  misc_RNA (1)...(19): siRNA sense strand
aagagucgcuucugcugaa

SEQ ID NO: 1395620 - RNA, 19 nt, Homo sapiens
  misc_RNA (1)...(19): siRNA sense strand
caaagaugccuuagaagag

SEQ ID NO: 1395621 - RNA, 19 nt, Homo sapiens
  misc_RNA (1)...(19): siRNA sense strand
aaagaugccuuagaagagu

SEQ ID NO: 1395622 - RNA, 19 nt, Homo sapiens
  misc_RNA (1)...(19): siRNA sense strand
cgcgagaccugaauugugu

SEQ ID NO: 1395623 - RNA, 19 nt, Homo sapiens
  misc_RNA (1)...(19): siRNA sense strand
gagcugcaggccuuuaaga

SEQ ID NO: 1395624 - RNA, 19 nt, Homo sapiens
  misc_RNA (1)...(19): siRNA sense strand
cuucacacccugcaccaua

SEQ ID NO: 1395625 - RNA, 19 nt, Homo sapiens
  misc_RNA (1)...(19): siRNA sense strand
gagggccaaagaugccuua

SEQ ID NO: 1395626 - RNA, 19 nt, Homo sapiens
  misc_RNA (1)...(19): siRNA sense strand
uuuaagagggccaaagaug

SEQ ID NO: 1395627 - RNA, 19 nt, Homo sapiens
  misc_RNA (1)...(19): siRNA sense strand
gggccaaagaugccuuaga

SEQ ID NO: 1395628 - RNA, 19 nt, Homo sapiens
  misc_RNA (1)...(19): siRNA sense strand
ucacgcgagaccugaauug

SEQ ID NO: 1395629 - RNA, 19 nt, Homo sapiens
  misc_RNA (1)...(19): siRNA sense strand
gcauguaaaccacugaaga

SEQ ID NO: 1395630 - RNA, 19 nt, Homo sapiens
  misc_RNA (1)...(19): siRNA sense strand
cauguaaaccacugaagaa

SEQ ID NO: 1395631 - RNA, 19 nt, Homo sapiens
  misc_RNA (1)...(19): siRNA sense strand
gcucuuggguuuagcaaaa

SEQ ID NO: 1395632 - RNA, 19 nt, Homo sapiens
  misc_RNA (1)...(19): siRNA sense strand
aaaucugucugaugcaugu

SEQ ID NO: 1395633 - RNA, 19 nt, Homo sapiens
  misc_RNA (1)...(19): siRNA sense strand
ggcagcaucuucagcucuu

SEQ ID NO: 1395634 - RNA, 19 nt, Homo sapiens
  misc_RNA (1)...(19): siRNA sense strand
cuucagcucuuggguuuag

SEQ ID NO: 1395635 - RNA, 19 nt, Homo sapiens
  misc_RNA (1)...(19): siRNA sense strand
ccacugaagaagcgaaauc

SEQ ID NO: 1395636 - RNA, 19 nt, Homo sapiens
  misc_RNA (1)...(19): siRNA sense strand
cauccuuaacugagaauga

SEQ ID NO: 1395637 - RNA, 19 nt, Homo sapiens
  misc_RNA (1)...(19): siRNA sense strand
gcagcaucuucagcucuug

SEQ ID NO: 1395638 - RNA, 19 nt, Homo sapiens
  misc_RNA (1)...(19): siRNA sense strand
cugcauccuuaacugagaa

SEQ ID NO: 1395639 - RNA, 19 nt, Homo sapiens
  misc_RNA (1)...(19): siRNA sense strand
gcauguaaaccacugaaga

SEQ ID NO: 1395640 - RNA, 19 nt, Homo sapiens
  misc_RNA (1)...(19): siRNA sense strand
cauguaaaccacugaagaa

SEQ ID NO: 1395641 - RNA, 19 nt, Homo sapiens
  misc_RNA (1)...(19): siRNA sense strand
gcucuuggguuuagcaaaa

SEQ ID NO: 1395642 - RNA, 19 nt, Homo sapiens
  misc_RNA (1)...(19): siRNA sense strand
aaaucugucugaugcaugu

SEQ ID NO: 1395643 - RNA, 19 nt, Homo sapiens
  misc_RNA (1)...(19): siRNA sense strand
ggcagcaucuucagcucuu

SEQ ID NO: 1395644 - RNA, 19 nt, Homo sapiens
  misc_RNA (1)...(19): siRNA sense strand
cuucagcucuuggguuuag

SEQ ID NO: 1395645 - RNA, 19 nt, Homo sapiens
  misc_RNA (1)...(19): siRNA sense strand
ccacugaagaagcgaaauc

SEQ ID NO: 1395646 - RNA, 19 nt, Homo sapiens
  misc_RNA (1)...(19): siRNA sense strand
cauccuuaacugagaauga

SEQ ID NO: 1395647 - RNA, 19 nt, Homo sapiens
  misc_RNA (1)...(19): siRNA sense strand
gcagcaucuucagcucuug

SEQ ID NO: 1395648 - RNA, 19 nt, Homo sapiens
  misc_RNA (1)...(19): siRNA sense strand
cugcauccuuaacugagaa

SEQ ID NO: 1395649 - RNA, 19 nt, Homo sapiens
  misc_RNA (1)...(19): siRNA sense strand
gcauguaaaccacugaaga

SEQ ID NO: 1395650 - RNA, 19 nt, Homo sapiens
  misc_RNA (1)...(19): siRNA sense strand
cauguaaaccacugaagaa

SEQ ID NO: 1395651 - RNA, 19 nt, Homo sapiens
  misc_RNA (1)...(19): siRNA sense strand
gcucuuggguuuagcaaaa

SEQ ID NO: 1395652 - RNA, 19 nt, Homo sapiens
  misc_RNA (1)...(19): siRNA sense strand
aaaucugucugaugcaugu

SEQ ID NO: 1395653 - RNA, 19 nt, Homo sapiens
  misc_RNA (1)...(19): siRNA sense strand
ggcagcaucuucagcucuu

SEQ ID NO: 1395654 - RNA, 19 nt, Homo sapiens
  misc_RNA (1)...(19): siRNA sense strand
cuucagcucuuggguuuag

SEQ ID NO: 1395655 - RNA, 19 nt, Homo sapiens
  misc_RNA (1)...(19): siRNA sense strand
ccacugaagaagcgaaauc

SEQ ID NO: 1395656 - RNA, 19 nt, Homo sapiens
  misc_RNA (1)...(19): siRNA sense strand
cauccuuaacugagaauga

SEQ ID NO: 1395657 - RNA, 19 nt, Homo sapiens
  misc_RNA (1)...(19): siRNA sense strand
gcagcaucuucagcucuug

SEQ ID NO: 1395658 - RNA, 19 nt, Homo sapiens
  misc_RNA (1)...(19): siRNA sense strand
cugcauccuuaacugagaa

SEQ ID NO: 1395659 - RNA, 19 nt, Homo sapiens
  misc_RNA (1)...(19): siRNA sense strand
gcauguaaaccacugaaga

SEQ ID NO: 1395660 - RNA, 19 nt, Homo sapiens
  misc_RNA (1)...(19): siRNA sense strand
cauguaaaccacugaagaa

SEQ ID NO: 1395661 - RNA, 19 nt, Homo sapiens
  misc_RNA (1)...(19): siRNA sense strand
gcucuuggguuuagcaaaa

SEQ ID NO: 1395662 - RNA, 19 nt, Homo sapiens
  misc_RNA (1)...(19): siRNA sense strand
aaaucugucugaugcaugu

SEQ ID NO: 1395663 - RNA, 19 nt, Homo sapiens
  misc_RNA (1)...(19): siRNA sense strand
ggcagcaucuucagcucuu

SEQ ID NO: 1395664 - RNA, 19 nt, Homo sapiens
  misc_RNA (1)...(19): siRNA sense strand
cuucagcucuuggguuuag

SEQ ID NO: 1395665 - RNA, 19 nt, Homo sapiens
  misc_RNA (1)...(19): siRNA sense strand
ccacugaagaagcgaaauc

SEQ ID NO: 1395666 - RNA, 19 nt, Homo sapiens
  misc_RNA (1)...(19): siRNA sense strand
cauccuuaacugagaauga

SEQ ID NO: 1395667 - RNA, 19 nt, Homo sapiens
  misc_RNA (1)...(19): siRNA sense strand
gcagcaucuucagcucuug

SEQ ID NO: 1395668 - RNA, 19 nt, Homo sapiens
  misc_RNA (1)...(19): siRNA sense strand
cugcauccuuaacugagaa

SEQ ID NO: 1395669 - RNA, 19 nt, Homo sapiens
  misc_RNA (1)...(19): siRNA sense strand
gcauguaaaccacugaaga

SEQ ID NO: 1395670 - RNA, 19 nt, Homo sapiens
  misc_RNA (1)...(19): siRNA sense strand
cauguaaaccacugaagaa

SEQ ID NO: 1395671 - RNA, 19 nt, Homo sapiens
  misc_RNA (1)...(19): siRNA sense strand
gcucuuggguuuagcaaaa

SEQ ID NO: 1395672 - RNA, 19 nt, Homo sapiens
  misc_RNA (1)...(19): siRNA sense strand
aaaucugucugaugcaugu

SEQ ID NO: 1395673 - RNA, 19 nt, Homo sapiens
  misc_RNA (1)...(19): siRNA sense strand
ggcagcaucuucagcucuu

SEQ ID NO: 1395674 - RNA, 19 nt, Homo sapiens
  misc_RNA (1)...(19): siRNA sense strand
cuucagcucuuggguuuag

SEQ ID NO: 1395675 - RNA, 19 nt, Homo sapiens
  misc_RNA (1)...(19): siRNA sense strand
ccacugaagaagcgaaauc

SEQ ID NO: 1395676 - RNA, 19 nt, Homo sapiens
  misc_RNA (1)...(19): siRNA sense strand
cauccuuaacugagaauga

SEQ ID NO: 1395677 - RNA, 19 nt, Homo sapiens
  misc_RNA (1)...(19): siRNA sense strand
gcagcaucuucagcucuug

SEQ ID NO: 1395678 - RNA, 19 nt, Homo sapiens
  misc_RNA (1)...(19): siRNA sense strand
cugcauccuuaacugagaa

SEQ ID NO: 1395679 - RNA, 19 nt, Homo sapiens
  misc_RNA (1)...(19): siRNA sense strand
gcauguaaaccacugaaga

SEQ ID NO: 1395680 - RNA, 19 nt, Homo sapiens
  misc_RNA (1)...(19): siRNA sense strand
cauguaaaccacugaagaa

SEQ ID NO: 1395681 - RNA, 19 nt, Homo sapiens
  misc_RNA (1)...(19): siRNA sense strand
gcucuuggguuuagcaaaa

SEQ ID NO: 1395682 - RNA, 19 nt, Homo sapiens
  misc_RNA (1)...(19): siRNA sense strand
aaaucugucugaugcaugu

SEQ ID NO: 1395683 - RNA, 19 nt, Homo sapiens
  misc_RNA (1)...(19): siRNA sense strand
ggcagcaucuucagcucuu

SEQ ID NO: 1395684 - RNA, 19 nt, Homo sapiens
  misc_RNA (1)...(19): siRNA sense strand
cuucagcucuuggguuuag

SEQ ID NO: 1395685 - RNA, 19 nt, Homo sapiens
  misc_RNA (1)...(19): siRNA sense strand
ccacugaagaagcgaaauc

SEQ ID NO: 1395686 - RNA, 19 nt, Homo sapiens
  misc_RNA (1)...(19): siRNA sense strand
cauccuuaacugagaauga

SEQ ID NO: 1395687 - RNA, 19 nt, Homo sapiens
  misc_RNA (1)...(19): siRNA sense strand
gcagcaucuucagcucuug

SEQ ID NO: 1395688 - RNA, 19 nt, Homo sapiens
  misc_RNA (1)...(19): siRNA sense strand
cugcauccuuaacugagaa

SEQ ID NO: 1395689 - RNA, 19 nt, Homo sapiens
  misc_RNA (1)...(19): siRNA sense strand
gcauguaaaccacugaaga

SEQ ID NO: 1395690 - RNA, 19 nt, Homo sapiens
  misc_RNA (1)...(19): siRNA sense strand
cauguaaaccacugaagaa

SEQ ID NO: 1395691 - RNA, 19 nt, Homo sapiens
  misc_RNA (1)...(19): siRNA sense strand
gcucuuggguuuagcaaaa

SEQ ID NO: 1395692 - RNA, 19 nt, Homo sapiens
  misc_RNA (1)...(19): siRNA sense strand
aaaucugucugaugcaugu

SEQ ID NO: 1395693 - RNA, 19 nt, Homo sapiens
  misc_RNA (1)...(19): siRNA sense strand
ggcagcaucuucagcucuu

SEQ ID NO: 1395694 - RNA, 19 nt, Homo sapiens
  misc_RNA (1)...(19): siRNA sense strand
cuucagcucuuggguuuag

SEQ ID NO: 1395695 - RNA, 19 nt, Homo sapiens
  misc_RNA (1)...(19): siRNA sense strand
ccacugaagaagcgaaauc

SEQ ID NO: 1395696 - RNA, 19 nt, Homo sapiens
  misc_RNA (1)...(19): siRNA sense strand
cauccuuaacugagaauga

SEQ ID NO: 1395697 - RNA, 19 nt, Homo sapiens
  misc_RNA (1)...(19): siRNA sense strand
gcagcaucuucagcucuug

SEQ ID NO: 1395698 - RNA, 19 nt, Homo sapiens
  misc_RNA (1)...(19): siRNA sense strand
cugcauccuuaacugagaa

SEQ ID NO: 1395699 - RNA, 19 nt, Homo sapiens
  misc_RNA (1)...(19): siRNA sense strand
gcauguaaaccacugaaga

SEQ ID NO: 1395700 - RNA, 19 nt, Homo sapiens
  misc_RNA (1)...(19): siRNA sense strand
cauguaaaccacugaagaa

SEQ ID NO: 1395701 - RNA, 19 nt, Homo sapiens
  misc_RNA (1)...(19): siRNA sense strand
gcucuuggguuuagcaaaa

SEQ ID NO: 1395702 - RNA, 19 nt, Homo sapiens
  misc_RNA (1)...(19): siRNA sense strand
aaaucugucugaugcaugu

SEQ ID NO: 1395703 - RNA, 19 nt, Homo sapiens
  misc_RNA (1)...(19): siRNA sense strand
ggcagcaucuucagcucuu

SEQ ID NO: 1395704 - RNA, 19 nt, Homo sapiens
  misc_RNA (1)...(19): siRNA sense strand
cuucagcucuuggguuuag

SEQ ID NO: 1395705 - RNA, 19 nt, Homo sapiens
  misc_RNA (1)...(19): siRNA sense strand
ccacugaagaagcgaaauc

SEQ ID NO: 1395706 - RNA, 19 nt, Homo sapiens
  misc_RNA (1)...(19): siRNA sense strand
cauccuuaacugagaauga

SEQ ID NO: 1395707 - RNA, 19 nt, Homo sapiens
  misc_RNA (1)...(19): siRNA sense strand
gcagcaucuucagcucuug

SEQ ID NO: 1395708 - RNA, 19 nt, Homo sapiens
  misc_RNA (1)...(19): siRNA sense strand
cugcauccuuaacugagaa

SEQ ID NO: 1395709 - RNA, 19 nt, Homo sapiens
  misc_RNA (1)...(19): siRNA sense strand
gcauguaaaccacugaaga

SEQ ID NO: 1395710 - RNA, 19 nt, Homo sapiens
  misc_RNA (1)...(19): siRNA sense strand
cauguaaaccacugaagaa

SEQ ID NO: 1395711 - RNA, 19 nt, Homo sapiens
  misc_RNA (1)...(19): siRNA sense strand
gcucuuggguuuagcaaaa

SEQ ID NO: 1395712 - RNA, 19 nt, Homo sapiens
  misc_RNA (1)...(19): siRNA sense strand
aaaucugucugaugcaugu

SEQ ID NO: 1395713 - RNA, 19 nt, Homo sapiens
  misc_RNA (1)...(19): siRNA sense strand
ggcagcaucuucagcucuu

SEQ ID NO: 1395714 - RNA, 19 nt, Homo sapiens
  misc_RNA (1)...(19): siRNA sense strand
cuucagcucuuggguuuag

SEQ ID NO: 1395715 - RNA, 19 nt, Homo sapiens
  misc_RNA (1)...(19): siRNA sense strand
ccacugaagaagcgaaauc

SEQ ID NO: 1395716 - RNA, 19 nt, Homo sapiens
  misc_RNA (1)...(19): siRNA sense strand
cauccuuaacugagaauga

SEQ ID NO: 1395717 - RNA, 19 nt, Homo sapiens
  misc_RNA (1)...(19): siRNA sense strand
gcagcaucuucagcucuug

SEQ ID NO: 1395718 - RNA, 19 nt, Homo sapiens
  misc_RNA (1)...(19): siRNA sense strand
cugcauccuuaacugagaa

SEQ ID NO: 1395719 - RNA, 19 nt, Homo sapiens
  misc_RNA (1)...(19): siRNA sense strand
gcauguaaaccacugaaga

SEQ ID NO: 1395720 - RNA, 19 nt, Homo sapiens
  misc_RNA (1)...(19): siRNA sense strand
cauguaaaccacugaagaa

SEQ ID NO: 1395721 - RNA, 19 nt, Homo sapiens
  misc_RNA (1)...(19): siRNA sense strand
gcucuuggguuuagcaaaa

SEQ ID NO: 1395722 - RNA, 19 nt, Homo sapiens
  misc_RNA (1)...(19): siRNA sense strand
aaaucugucugaugcaugu

SEQ ID NO: 1395723 - RNA, 19 nt, Homo sapiens
  misc_RNA (1)...(19): siRNA sense strand
ggcagcaucuucagcucuu

SEQ ID NO: 1395724 - RNA, 19 nt, Homo sapiens
  misc_RNA (1)...(19): siRNA sense strand
cuucagcucuuggguuuag

SEQ ID NO: 1395725 - RNA, 19 nt, Homo sapiens
  misc_RNA (1)...(19): siRNA sense strand
ccacugaagaagcgaaauc

SEQ ID NO: 1395726 - RNA, 19 nt, Homo sapiens
  misc_RNA (1)...(19): siRNA sense strand
cauccuuaacugagaauga

SEQ ID NO: 1395727 - RNA, 19 nt, Homo sapiens
  misc_RNA (1)...(19): siRNA sense strand
gcagcaucuucagcucuug

SEQ ID NO: 1395728 - RNA, 19 nt, Homo sapiens
  misc_RNA (1)...(19): siRNA sense strand
cugcauccuuaacugagaa

SEQ ID NO: 1395729 - RNA, 19 nt, Homo sapiens
  misc_RNA (1)...(19): siRNA sense strand
gcauguaaaccacugaaga

SEQ ID NO: 1395730 - RNA, 19 nt, Homo sapiens
  misc_RNA (1)...(19): siRNA sense strand
cauguaaaccacugaagaa

SEQ ID NO: 1395731 - RNA, 19 nt, Homo sapiens
  misc_RNA (1)...(19): siRNA sense strand
gcucuuggguuuagcaaaa

SEQ ID NO: 1395732 - RNA, 19 nt, Homo sapiens
  misc_RNA (1)...(19): siRNA sense strand
aaaucugucugaugcaugu

SEQ ID NO: 1395733 - RNA, 19 nt, Homo sapiens
  misc_RNA (1)...(19): siRNA sense strand
ggcagcaucuucagcucuu

SEQ ID NO: 1395734 - RNA, 19 nt, Homo sapiens
  misc_RNA (1)...(19): siRNA sense strand
cuucagcucuuggguuuag

SEQ ID NO: 1395735 - RNA, 19 nt, Homo sapiens
  misc_RNA (1)...(19): siRNA sense strand
ccacugaagaagcgaaauc

SEQ ID NO: 1395736 - RNA, 19 nt, Homo sapiens
  misc_RNA (1)...(19): siRNA sense strand
cauccuuaacugagaauga

SEQ ID NO: 1395737 - RNA, 19 nt, Homo sapiens
  misc_RNA (1)...(19): siRNA sense strand
gcagcaucuucagcucuug

SEQ ID NO: 1395738 - RNA, 19 nt, Homo sapiens
  misc_RNA (1)...(19): siRNA sense strand
cugcauccuuaacugagaa

SEQ ID NO: 1395739 - RNA, 19 nt, Homo sapiens
  misc_RNA (1)...(19): siRNA sense strand
gcauguaaaccacugaaga

SEQ ID NO: 1395740 - RNA, 19 nt, Homo sapiens
  misc_RNA (1)...(19): siRNA sense strand
cauguaaaccacugaagaa

SEQ ID NO: 1395741 - RNA, 19 nt, Homo sapiens
  misc_RNA (1)...(19): siRNA sense strand
gcucuuggguuuagcaaaa

SEQ ID NO: 1395742 - RNA, 19 nt, Homo sapiens
  misc_RNA (1)...(19): siRNA sense strand
aaaucugucugaugcaugu

SEQ ID NO: 1395743 - RNA, 19 nt, Homo sapiens
  misc_RNA (1)...(19): siRNA sense strand
ggcagcaucuucagcucuu

SEQ ID NO: 1395744 - RNA, 19 nt, Homo sapiens
  misc_RNA (1)...(19): siRNA sense strand
cuucagcucuuggguuuag

SEQ ID NO: 1395745 - RNA, 19 nt, Homo sapiens
  misc_RNA (1)...(19): siRNA sense strand
ccacugaagaagcgaaauc

SEQ ID NO: 1395746 - RNA, 19 nt, Homo sapiens
  misc_RNA (1)...(19): siRNA sense strand
cauccuuaacugagaauga

SEQ ID NO: 1395747 - RNA, 19 nt, Homo sapiens
  misc_RNA (1)...(19): siRNA sense strand
gcagcaucuucagcucuug

SEQ ID NO: 1395748 - RNA, 19 nt, Homo sapiens
  misc_RNA (1)...(19): siRNA sense strand
cugcauccuuaacugagaa

SEQ ID NO: 1395749 - RNA, 19 nt, Homo sapiens
  misc_RNA (1)...(19): siRNA sense strand
gcauguaaaccacugaaga

SEQ ID NO: 1395750 - RNA, 19 nt, Homo sapiens
  misc_RNA (1)...(19): siRNA sense strand
cauguaaaccacugaagaa

SEQ ID NO: 1395751 - RNA, 19 nt, Homo sapiens
  misc_RNA (1)...(19): siRNA sense strand
gcucuuggguuuagcaaaa

SEQ ID NO: 1395752 - RNA, 19 nt, Homo sapiens
  misc_RNA (1)...(19): siRNA sense strand
aaaucugucugaugcaugu

SEQ ID NO: 1395753 - RNA, 19 nt, Homo sapiens
  misc_RNA (1)...(19): siRNA sense strand
ggcagcaucuucagcucuu

SEQ ID NO: 1395754 - RNA, 19 nt, Homo sapiens
  misc_RNA (1)...(19): siRNA sense strand
cuucagcucuuggguuuag

SEQ ID NO: 1395755 - RNA, 19 nt, Homo sapiens
  misc_RNA (1)...(19): siRNA sense strand
ccacugaagaagcgaaauc

SEQ ID NO: 1395756 - RNA, 19 nt, Homo sapiens
  misc_RNA (1)...(19): siRNA sense strand
cauccuuaacugagaauga

SEQ ID NO: 1395757 - RNA, 19 nt, Homo sapiens
  misc_RNA (1)...(19): siRNA sense strand
gcagcaucuucagcucuug

SEQ ID NO: 1395758 - RNA, 19 nt, Homo sapiens
  misc_RNA (1)...(19): siRNA sense strand
cugcauccuuaacugagaa

SEQ ID NO: 1395759 - RNA, 19 nt, Homo sapiens
  misc_RNA (1)...(19): siRNA sense strand
gcauguaaaccacugaaga

SEQ ID NO: 1395760 - RNA, 19 nt, Homo sapiens
  misc_RNA (1)...(19): siRNA sense strand
cauguaaaccacugaagaa

SEQ ID NO: 1395761 - RNA, 19 nt, Homo sapiens
  misc_RNA (1)...(19): siRNA sense strand
gcucuuggguuuagcaaaa

SEQ ID NO: 1395762 - RNA, 19 nt, Homo sapiens
  misc_RNA (1)...(19): siRNA sense strand
aaaucugucugaugcaugu

SEQ ID NO: 1395763 - RNA, 19 nt, Homo sapiens
  misc_RNA (1)...(19): siRNA sense strand
ggcagcaucuucagcucuu

SEQ ID NO: 1395764 - RNA, 19 nt, Homo sapiens
  misc_RNA (1)...(19): siRNA sense strand
cuucagcucuuggguuuag

SEQ ID NO: 1395765 - RNA, 19 nt, Homo sapiens
  misc_RNA (1)...(19): siRNA sense strand
ccacugaagaagcgaaauc

SEQ ID NO: 1395766 - RNA, 19 nt, Homo sapiens
  misc_RNA (1)...(19): siRNA sense strand
cauccuuaacugagaauga

SEQ ID NO: 1395767 - RNA, 19 nt, Homo sapiens
  misc_RNA (1)...(19): siRNA sense strand
gcagcaucuucagcucuug

SEQ ID NO: 1395768 - RNA, 19 nt, Homo sapiens
  misc_RNA (1)...(19): siRNA sense strand
cugcauccuuaacugagaa

SEQ ID NO: 1395769 - RNA, 19 nt, Homo sapiens
  misc_RNA (1)...(19): siRNA sense strand
gcauguaaaccacugaaga

SEQ ID NO: 1395770 - RNA, 19 nt, Homo sapiens
  misc_RNA (1)...(19): siRNA sense strand
cauguaaaccacugaagaa

SEQ ID NO: 1395771 - RNA, 19 nt, Homo sapiens
  misc_RNA (1)...(19): siRNA sense strand
gcucuuggguuuagcaaaa

SEQ ID NO: 1395772 - RNA, 19 nt, Homo sapiens
  misc_RNA (1)...(19): siRNA sense strand
aaaucugucugaugcaugu

SEQ ID NO: 1395773 - RNA, 19 nt, Homo sapiens
  misc_RNA (1)...(19): siRNA sense strand
ggcagcaucuucagcucuu

SEQ ID NO: 1395774 - RNA, 19 nt, Homo sapiens
  misc_RNA (1)...(19): siRNA sense strand
cuucagcucuuggguuuag

SEQ ID NO: 1395775 - RNA, 19 nt, Homo sapiens
  misc_RNA (1)...(19): siRNA sense strand
ccacugaagaagcgaaauc

SEQ ID NO: 1395776 - RNA, 19 nt, Homo sapiens
  misc_RNA (1)...(19): siRNA sense strand
cauccuuaacugagaauga

SEQ ID NO: 1395777 - RNA, 19 nt, Homo sapiens
  misc_RNA (1)...(19): siRNA sense strand
gcagcaucuucagcucuug

SEQ ID NO: 1395778 - RNA, 19 nt, Homo sapiens
  misc_RNA (1)...(19): siRNA sense strand
cugcauccuuaacugagaa

SEQ ID NO: 1395779 - RNA, 19 nt, Homo sapiens
  misc_RNA (1)...(19): siRNA sense strand
gcauguaaaccacugaaga

SEQ ID NO: 1395780 - RNA, 19 nt, Homo sapiens
  misc_RNA (1)...(19): siRNA sense strand
cauguaaaccacugaagaa

SEQ ID NO: 1395781 - RNA, 19 nt, Homo sapiens
  misc_RNA (1)...(19): siRNA sense strand
gcucuuggguuuagcaaaa

SEQ ID NO: 1395782 - RNA, 19 nt, Homo sapiens
  misc_RNA (1)...(19): siRNA sense strand
aaaucugucugaugcaugu

SEQ ID NO: 1395783 - RNA, 19 nt, Homo sapiens
  misc_RNA (1)...(19): siRNA sense strand
ggcagcaucuucagcucuu

SEQ ID NO: 1395784 - RNA, 19 nt, Homo sapiens
  misc_RNA (1)...(19): siRNA sense strand
cuucagcucuuggguuuag

SEQ ID NO: 1395785 - RNA, 19 nt, Homo sapiens
  misc_RNA (1)...(19): siRNA sense strand
ccacugaagaagcgaaauc

SEQ ID NO: 1395786 - RNA, 19 nt, Homo sapiens
  misc_RNA (1)...(19): siRNA sense strand
cauccuuaacugagaauga

SEQ ID NO: 1395787 - RNA, 19 nt, Homo sapiens
  misc_RNA (1)...(19): siRNA sense strand
gcagcaucuucagcucuug

SEQ ID NO: 1395788 - RNA, 19 nt, Homo sapiens
  misc_RNA (1)...(19): siRNA sense strand
cugcauccuuaacugagaa

SEQ ID NO: 1395789 - RNA, 19 nt, Homo sapiens
  misc_RNA (1)...(19): siRNA sense strand
acuacuacguggacucguu

SEQ ID NO: 1395790 - RNA, 19 nt, Homo sapiens
  misc_RNA (1)...(19): siRNA sense strand
caacaaagaccgagcaaaa

SEQ ID NO: 1395791 - RNA, 19 nt, Homo sapiens
  misc_RNA (1)...(19): siRNA sense strand
aaacaaugcugagaaugag

SEQ ID NO: 1395792 - RNA, 19 nt, Homo sapiens
  misc_RNA (1)...(19): siRNA sense strand
cccuggaacuggagaaaga

SEQ ID NO: 1395793 - RNA, 19 nt, Homo sapiens
  misc_RNA (1)...(19): siRNA sense strand
ugaaaacaaugcugagaau

SEQ ID NO: 1395794 - RNA, 19 nt, Homo sapiens
  misc_RNA (1)...(19): siRNA sense strand
agaggcaggucaagaucug

SEQ ID NO: 1395795 - RNA, 19 nt, Homo sapiens
  misc_RNA (1)...(19): siRNA sense strand
aaaacaaugcugagaauga

SEQ ID NO: 1395796 - RNA, 19 nt, Homo sapiens
  misc_RNA (1)...(19): siRNA sense strand
uuccagaaccgcaggauga

SEQ ID NO: 1395797 - RNA, 19 nt, Homo sapiens
  misc_RNA (1)...(19): siRNA sense strand
acuacuacguggacucguu

SEQ ID NO: 1395798 - RNA, 19 nt, Homo sapiens
  misc_RNA (1)...(19): siRNA sense strand
ccgagaggcaggucaagau

SEQ ID NO: 1395799 - RNA, 19 nt, Homo sapiens
  misc_RNA (1)...(19): siRNA sense strand
gcacuuggcuuugaauaua

SEQ ID NO: 1395800 - RNA, 19 nt, Homo sapiens
  misc_RNA (1)...(19): siRNA sense strand
gaagauauguucccaguuc

SEQ ID NO: 1395801 - RNA, 19 nt, Homo sapiens
  misc_RNA (1)...(19): siRNA sense strand
gaauauaaaugguggaaug

SEQ ID NO: 1395802 - RNA, 19 nt, Homo sapiens
  misc_RNA (1)...(19): siRNA sense strand
gaaaggagccaaagaaugu

SEQ ID NO: 1395803 - RNA, 19 nt, Homo sapiens
  misc_RNA (1)...(19): siRNA sense strand
gaaaucaggcacaaacaua

SEQ ID NO: 1395804 - RNA, 19 nt, Homo sapiens
  misc_RNA (1)...(19): siRNA sense strand
gaaagacacagauaaugua

SEQ ID NO: 1395805 - RNA, 19 nt, Homo sapiens
  misc_RNA (1)...(19): siRNA sense strand
guacaaaugugguagaauc

SEQ ID NO: 1395806 - RNA, 19 nt, Homo sapiens
  misc_RNA (1)...(19): siRNA sense strand
caacaauuauuccuucuga

SEQ ID NO: 1395807 - RNA, 19 nt, Homo sapiens
  misc_RNA (1)...(19): siRNA sense strand
gcacaaacauacucuacug

SEQ ID NO: 1395808 - RNA, 19 nt, Homo sapiens
  misc_RNA (1)...(19): siRNA sense strand
uaaagacgacucucaauuu

SEQ ID NO: 1395809 - RNA, 19 nt, Homo sapiens
  misc_RNA (1)...(19): siRNA sense strand
gauaauagacgguucauca

SEQ ID NO: 1395810 - RNA, 19 nt, Homo sapiens
  misc_RNA (1)...(19): siRNA sense strand
gaaggaaagacacagauaa

SEQ ID NO: 1395811 - RNA, 19 nt, Homo sapiens
  misc_RNA (1)...(19): siRNA sense strand
ggaaagacacagauaaugu

SEQ ID NO: 1395812 - RNA, 19 nt, Homo sapiens
  misc_RNA (1)...(19): siRNA sense strand
guaugccagucaacaauua

SEQ ID NO: 1395813 - RNA, 19 nt, Homo sapiens
  misc_RNA (1)...(19): siRNA sense strand
ggaaggagaagauaaugaa

SEQ ID NO: 1395814 - RNA, 19 nt, Homo sapiens
  misc_RNA (1)...(19): siRNA sense strand
caaagaauguagaccaugu

SEQ ID NO: 1395815 - RNA, 19 nt, Homo sapiens
  misc_RNA (1)...(19): siRNA sense strand
caggaaaccuuguaugugu

SEQ ID NO: 1395816 - RNA, 19 nt, Homo sapiens
  misc_RNA (1)...(19): siRNA sense strand
caaagaggcuuguauucca

SEQ ID NO: 1395817 - RNA, 19 nt, Homo sapiens
  misc_RNA (1)...(19): siRNA sense strand
ggucaagccugugcuggua

SEQ ID NO: 1395818 - RNA, 19 nt, Homo sapiens
  misc_RNA (1)...(19): siRNA sense strand
ucacagaugcuauuagauu

SEQ ID NO: 1395819 - RNA, 19 nt, Homo sapiens
  misc_RNA (1)...(19): siRNA sense strand
guaaagacgacucucaauu
